(19) United States
(12) Patent Application Publication
(10) Pub. No.: US 2021/0260219 A1
(43) Pub. Date: Aug. 26, 2021

(54) MATERIALS AND METHODS FOR TREATMENT OF AMYOTROPHIC LATERAL SCLEROSIS AND/OR FRONTAL TEMPORAL LOBULAR DEGENERATION

(71) Applicant: Crispr Therapeutics AG, ZUG (CH)

(72) Inventors: Chad Albert Cowan, Cambridge, MA (US); Ami Meda Kabadi, Cambridge, MA (US); Ante Sven Lundberg, Cambridge, MA (US)

(21) Appl. No.: 16/065,535

(22) PCT Filed: Dec. 22, 2016
(86) PCT No.: PCT/IB2016/057958

§ 371 Date: Jun. 22, 2018

Related U.S. Application Data
(60) Provisional application No. 62/324,281, filed on Apr. 18, 2016.
(60) Provisional application No. 62/387,424, filed on Dec. 23, 2015.

(51) Int. Cl. A61K 48/00; A61K 35/28; A61K 35/30; A61K 38/19; A61K 31/395; A61K 38/46; A61K 31/7105; A61K 35/761; A61K 41/00; A61P 25/28; C12N 15/90; C12N 5/0789; C12N 5/0797; C12N 5/0793; C12N 5/074; C12N 5/0775

(52) U.S. Cl. CPC A61K 48/0083; C12N 2506/1353; A61K 35/30; A61K 38/193; A61K 31/395; A61K 38/465; A61K 31/7105; A61K 35/761; A61K 41/0047; A61P 25/28; C12N 15/907; C12N 5/0647; C12N 5/0623; C12N 5/0619; C12N 5/0696; C12N 5/0663; C12N 2506/45; C12N 2510/00; C12N 2506/1307; C12N 2501/60; A61K 35/28

(57) ABSTRACT

The present application provides materials and methods for treating a patient with Amyotrophic Lateral Sclerosis (ALS) and/or Frontaltemporal Lobular Degeneration (FTLD), both ex vivo and in vivo. In addition, the present application provides materials and methods for editing to modulate the expression, function or activity of the C9ORF72 gene in a cell by genome editing.

### RELATED APPLICATIONS

[0001] This application claims the benefit of U.S. Provisional Application No. 62/387,424, filed Dec. 23, 2015; and U.S. Provisional Application No. 62/324,281, filed Apr. 18, 2016; the contents of each of which are incorporated herein by reference in their entirety.

### FIELD

[0002] The present application provides materials and methods for treating a patient with Amyotrophic Lateral Sclerosis (ALS) and/or Frontaltemporal Lobular Degeneration (FTLD), both ex vivo and in vivo. In addition, the present application provides materials and methods for editing to modulate the expression, function or activity of the C9ORF72 gene in a cell by genome editing.

### INCORPORATION BY REFERENCE OF SEQUENCE LISTING

[0003] This application contains a Sequence Listing in computer readable form (filename: 50316A_SeqListing.txt; 14,785,573 bytes—ASCII text file; created Dec. 21, 2016), which is incorporated herein by reference in its entirety and forms part of the disclosure.

### BACKGROUND

[0004] Amyotrophic lateral sclerosis (ALS) is a fatal neurodegenerative disease characterized clinically by progressive paralysis leading to death from respiratory failure, typically within two to three years of symptom onset (Rowland and Shneider, N. Engl. J. Med., 2001, 344, 1688-1700). ALS is the third most common neurodegenerative disease in the Western world (Hirtz et al., Neurology, 2007, 68, 326-337). Approximately 10% of cases are familial in nature, whereas the bulk of patients diagnosed with the disease are classified as sporadic, as they appear to occur randomly throughout the population (Chio et al., Neurology, 2008, 70, 533-537). There is growing recognition, based on clinical, genetic, and epidemiological data that ALS and Frontotemporal Lobular Dementia represent an overlapping continuum of disease, characterized pathologically by the presence of TDP-43 positive inclusions throughout the central nervous system (Lillo and Hodges, J. Clin. Neurosci, 2009, 16, 1131-1135; Neumann et al., Science, 2006, 314, 130-133).

[0005] To date, a number of genes have been discovered as causative for classical familial ALS, for example, SOD1, TARDBP, FUS, OPTN, and VCP (Johnson et al., Neuron, 2010, 68, 857-864; Kwiatkowski et al., Science, 2009, 323, 1205-1208; Maruyama et al., Nature, 2010, 465, 223-226; Rosen et al., Nature, 1993, 362, 59-62; Sreedharan et al., Science, 2008, 319, 1668-1672; Vance et al., Brain, 2009, 129, 868-876). Over the past 10 years, linkage analysis of kindreds involving multiple cases of ALS, FTD, and ALS-FTD identified an important locus for the disease on the short arm of chromosome 9, which is now known as C9orf72 (Boxer et al., J. Neurol. Neurosurg. Psychiatry, 2011, 82, 196-203; Morita et al., Neurology, 2006, 66, 839-844; Pearson et al. J. Neurol., 2011, 258, 647-655; Vance et al., Brain, 2006, 129, 868-876).

[0006] Frontotemporal lobar degeneration (FTLD) is a type of neurodegenerative disease involving degeneration of gray matter in the frontal lobe and anterior portion of the temporal lobe of the cerebrum, with sparing of the parietal and occipital lobes. FTLD is the second most common form of dementia after Alzheimer's disease, and is therefore a major cause of neurological problems in the elderly. The syndrome of FTLD encompasses the clinical subgroups of frontotemporal dementia (FTD), FTD with motor neuron disease (MND), semantic dementia and primary progressive aphasia, and is characterized by changes in behavior, personality and language, with relative preservation of memory and perception.

[0007] Pathologically, there are two main histological profiles associated with FTLD. One of these is tauopathy, the accumulation of hyperphosphorylated tau in neurons, and occasionally in glia. However, the most common neuropathology associated with FTLD, accounting for well over half of all cases, is that known as FTLD-U, in which there are neuronal cytoplasmic inclusions and neurites that are immunoreactive for ubiquitin (ub-ir), but not for tau. FTLD pathology of this type was first described in patients with motor neuron disease (MND) and dementia, but has subsequently been recognized as a common neuropathological feature of FTLD in patients without motor symptoms. This ub-ir pathology is characteristically found in granule cells of dentate fascia of the hippocampus and in neurons of layer 2 of the frontal and temporal neocortex.

[0008] Currently, there is only one FDA approved drug on the market for the treatment of ALS, Rilutek (riluzole). However, the mechanism of action is poorly understood. The drug is thought to slow the disease's progression in some people by reducing levels of glutamate in the brain.

[0009] C9orf72 (chromosome 9 open reading frame 72) is a protein which, in humans, is encoded by the gene C9ORF72. The human C9ORF72 gene is located on the short (p) arm of chromosome 9 open reading frame 72, from base pair 27,546,542 to base pair 27,573,863. Its cytogenetic location is at 9p21.2. The protein is found in many regions of the brain, in the cytoplasm of neurons, as well as in presynaptic terminals. Disease causing mutations in the gene were first discovered by two independent research teams in 2011 (DeJesus-Hernandez et al. (2011) Neuron 72 (2): 245-56; Renton et al. (2011). Neuron 72 (2): 257-68). The mutation in C9ORF72 is significant because it is the first pathogenic mechanism identified to be a genetic link between FTLD and ALS. As of 2012, it is the most common mutation identified that is associated with familial FTLD and/or ALS.

[0010] The mutation of C9ORF72 is a hexanucleotide repeat expansion of the six letter string of nucleotides GGGGCC. In healthy individuals, there are few repeats of this hexanucleotide, typically 30, but in people with the diseased phenotype, the repeat can occur in the order of hundreds (Fong et al. (2012) Alzheimers Res Ther 4 (4): 27). The hexanucleotide expansion event in the C9ORF72 gene is present in approximately 40% of familial ALS and 8-10% of sporadic ALS patients. The hexanucleotide expansion occurs in an alternatively spliced Intron 1 of the C9ORF72 gene, and as such does not alter the coding sequence or resulting protein. Three alternatively spliced variants of C9ORF72 (V1, V2 and V3) are normally produced. The expanded nucleotide repeat has been shown to reduce the transcription of V1, however the total amount of protein produced was unaffected (DeJesus-Hernandez et al. (2011), Neuron 72 (2): 245-56). Overall, reduced protein levels of C9ORF72 have been observed in brain autopsies from ALS patients (Waite (2014) Neurobiol Aging, 35 1779 e1775-1779 e1713) suggesting haploinsufficiency as a cause of ALS/FTD. However, the physiological function of the C9orf72 protein is poorly understood and neuron specific knockout mice develop no disease like pathology (Koppers (2015), Ann Neurol, 78:426-438) making it unlikely that haploinsufficiency significantly contributes to the disease mechanism.

[0011] In addition to haploinsufficiency, there are other theories about the way in which the C9ORF72 hexanucleotide expansion causes FTD and/or ALS. Another theory is that accumulation of GC rich RNA in the nucleus and cytoplasm becomes toxic, and RNA binding protein sequestration occurs. A common feature of non-coding repeat expansion disorders, which has gained increased attention in recent years, is the accumulation of RNA fragments composed of the repeated nucleotides as RNA foci in the nucleus and/or cytoplasm of affected cells (Todd and Paulson, 2010, Ann. Neurol. 67, 291-300). In several disorders, the RNA foci have been shown to sequester RNA-binding proteins, leading to dysregulation of alternative mRNA splicing. A hallmark of such RNA foci is TDP-43 positive inclusions throughout the central nervous system (Lillo and Hodges, J. Clin. Neurosci, 2009, 16, 1131-1135; Neumann et al., Science, 2006, 314, 130-133). An additional theory is that RNA transcribed from the C9ORF72 gene containing expanded hexanucleotide repeats is translated through a non-ATG initiated mechanism. This drives the formation and accumulation of dipeptide repeat proteins corresponding to multiple ribosomal reading frames on the mutation. The repeat is translated into dipeptide repeat (DPR) proteins that cause repeat-induced toxicity. DPRs inhibit the proteasome and sequester other proteins. GGGGCC repeat expansion in C9ORF72 may compromise nucleocytoplasmic transport through several possible mechanisms (Edbauer, Current Opinion in Neurobiology 2016, 36:99-106).

[0012] Traditionally, familial and sporadic cases of ALS have been clinically indistinguishable, which has made diagnosis difficult. The identification of this gene will therefore help in the future diagnosis of familial ALS. Slow diagnosis is also common for FTD, which can often take up to a year with many patients initially misdiagnosed with another condition. Testing for a specific gene that is known to cause the diseases would help with faster diagnoses. Most importantly, this hexanucleotide repeat expansion is an extremely promising future target for developing therapies to treat both familial FTD and familial ALS.

[0013] Genome engineering refers to the strategies and techniques for the targeted, specific modification of the genetic information (genome) of living organisms. Genome engineering is a very active field of research because of the wide range of possible applications, particularly in the areas of human health; the correction of a gene carrying a harmful mutation, for example, or to explore the function of a gene. Early technologies developed to insert a transgene into a living cell were often limited by the random nature of the insertion of the new sequence into the genome. Random insertions into the genome may result in disrupting normal regulation of neighboring genes leading to severe unwanted effects. Furthermore, random integration technologies offer little reproducibility, as there is no guarantee that the sequence would be inserted at the same place in two different cells. Recent genome engineering strategies, such as ZFNs, TALENs, HEs and MegaTALs, enable a specific area of the DNA to be modified, thereby increasing the precision of the correction or insertion compared to early technologies. These newer platforms offer a much larger degree of reproducibility.

[0014] Despite efforts from researchers and medical professionals worldwide who have been trying to address ALS and FTLD, and despite the promise of genome engineering approaches, there still remains a critical need for developing safe and effective treatments for ALS and FTLD.

[0015] Currently, all therapies for addressing ALS and FTLD aim at slowing the progression of the disease, rather than curing the disease. In contrast, the present invention presents an approach to correct the genetic basis of the disease. By using genome engineering tools to create permanent changes to the genome that can restore the C9ORF72 hexanucleotide repeat expansion with a single treatment, the resulting therapy should stop the disease progression completely.

### SUMMARY

[0016] Provided herein are cellular, ex vivo and in vivo methods for creating permanent changes to the genome by deleting, inserting or correcting the expanded hexanucleotide repeat within or near the C9ORF72 gene or other DNA sequences that encode regulatory elements of the C9ORF72 gene or knocking in C9ORF72 cDNA or minigene into a safe harbor locus by genome editing and restoring C9orf72 protein activity, which can be used to treat amyotrophic lateral sclerosis (ALS) or frontotemporal lobular dementia (FTLD), as well as components, kits and compositions for performing such methods, and cells produced by them.

[0017] Provided herein is a method for editing the C9ORF72 gene in a human cell by genome editing, the method comprising the step of introducing into the human cell one or more deoxyribonucleic acid (DNA) endonucleases to effect one or more single-strand breaks (SSBs) or one or more double-strand breaks (DSBs) within or near the C9ORF72 gene or other DNA sequences that encode regulatory elements of the C9ORF72 gene that results in at least one of a permanent insertion, correction, or modulation of expression or function of one or more mutations or exons within or near or affecting the expression or function of the C9ORF72 gene, or within or near a safe harbor locus that results in a permanent insertion of the C9ORF72 gene and results in restoration of C9orf72 protein activity.

[0018] Also provided herein is a method for inserting the C9ORF72 gene in a human cell by genome editing, the method comprising the step of: introducing into the human cell one or more deoxyribonucleic acid (DNA) endonucleases to effect one or more single-strand breaks (SSBs) or double-strand breaks (DSBs) within or near a safe harbor locus that results in a permanent insertion of the C9ORF72 gene or minigene, and results in restoration of C9orf72 protein activity.

[0019] In one aspect, provided herein is a method for editing the C9ORF72 gene in a human cell by genome editing comprising introducing into the cell one or more deoxyribonucleic acid (DNA) endonucleases to effect one or more double-strand breaks (DSBs) within or near the C9ORF72 gene or other DNA sequences that encode regulatory elements of the C9ORF72 gene that results in permanent deletion, insertion, or correction of the expanded hexanucleotide repeat within or near the C9ORF72 gene or within or near a safe harbor locus that results in permanent insertion of the C9ORF72 gene or minigene, and restoration of C9orf72 protein activity.

[0020] In another aspect, provided herein is an ex vivo method for treating a patient with amyotrophic lateral sclerosis (ALS) or frontotemporal lobular dementia (FTLD) comprising the steps of: creating a patient specific induced pluripotent stem cell (iPSC); editing within or near the C9ORF72 gene of the iPSC or other DNA sequences that encode regulatory elements of the C9ORF72 gene of the iPSC or editing within or near a safe harbor locus of the iPSC; differentiating the genome edited iPSC into a hematopoietic progenitor cell, a neural progenitor cell, or a neural cell; and implanting the hematopoietic progenitor cell, neural progenitor cell, or neural cell into the patient.

[0021] In some embodiments, the step of creating a patient specific induced pluripotent stem cell comprises: isolating a somatic cell from the patient; and introducing a set of pluripotency-associated genes into the somatic cell to induce the cell to become a pluripotent stem cell. In some embodiments, the somatic cell is a fibroblast. In some embodiments, the set of pluripotency-associated genes is one or more of the genes selected from the group consisting of OCT4, SOX2, KLF4, Lin28, NANOG and cMYC.

[0022] The step of editing within or near the C9ORF72 gene or other DNA sequences that encode regulatory elements of the C9ORF72 gene or of editing within or near a safe harbor locus or of editing within or near a locus of the first exon of the C9ORF72 gene can comprise introducing into the iPSC one or more deoxyribonucleic acid (DNA) endonucleases to effect one or more single-strand breaks (SSBs) or double-strand breaks (DSBs) within or near the C9ORF72 gene or other DNA sequences that encode regulatory elements of the C9ORF72 gene that results in a permanent insertion, correction, or modulation of expression or function of one or more mutations or exons within or near or affecting the expression or function of the C9ORF72 gene or within or near a safe harbor locus that results in a permanent insertion of the C9ORF72 gene and results in restoration of C9orf72 protein activity. The safe harbor locus can be selected from the group consisting of: AAVS1 (PPP1R12C), ALB, Angptl3, ApoC3, ASGR2, CCR5, FIX (F9), G6PC, Gys2, HGD, Lp(a), Pcsk9, Serpina1, TF, and TTR. The safe harbor locus can be selected from the group consisting of: exon 1-2 of AAVS1 (PPP1R12C), exon 1-2 of ALB, exon 1-2 of Angptl3, exon 1-2 of ApoC3, exon 1-2 of ASGR2, exon 1-2 of CCR5, exon 1-2 of FIX (F9), exon 1-2 of G6PC, exon 1-2 of Gys2, exon 1-2 of HGD, exon 1-2 of Lp(a), exon 1-2 of Pcsk9, exon 1-2 of Serpina1, exon 1-2 of TF, and exon 1-2 of TTR.

[0023] In some embodiments, the step of editing the C9ORF72 gene of the iPSC comprises introducing into the iPSC one or more deoxyribonucleic acid (DNA) endonucleases to effect one or more double-strand breaks (DSBs) within or near the C9ORF72 gene that results in permanent deletion, insertion, or correction of the expanded hexanucleotide repeat within or near the C9ORF72 gene.

[0024] In some embodiments, the step of differentiating the genome edited iPSC into hematopoietic progenitor cell, a neural progenitor cell, or neural cell comprises one or more of the following: treatment with a combination of small molecules or delivery of master transcription factors.

[0025] In some embodiments, the step of implanting the hematopoietic progenitor cell, neural progenitor cell, or neural cell into the patient comprises implanting the hematopoietic progenitor cell, neural progenitor cell, or neural cell into the patient by transplantation, local injection, systemic infusion, or combinations thereof.

[0026] In another aspect, provided herein is an ex vivo method for treating a patient with amyotrophic lateral sclerosis (ALS) or frontotemporal lobular dementia (FTLD) comprising the steps of: isolating a white blood cell from the patient; editing the C9ORF72 gene of the white blood cell; and implanting the edited white blood cell into the patient.

[0027] In some embodiments, step of isolating a white blood cell comprises: cell differential centrifugation and cell culturing.

[0028] The step of editing within or near the C9ORF72 gene or other DNA sequences that encode regulatory elements of the C9ORF72 gene or of editing within or near a safe harbor locus or of editing within or near a locus of the first exon of the C9ORF72 gene can comprise introducing into the white blood cell one or more deoxyribonucleic acid (DNA) endonucleases to effect one or more single-strand breaks (SSBs) or double-strand breaks (DSBs) within or near the C9ORF72 gene or other DNA sequences that encode regulatory elements of the C9ORF72 gene that results in a permanent insertion, correction, or modulation of expression or function of one or more mutations or exons within or near or affecting the expression or function of the C9ORF72 gene or within or near a safe harbor locus that results in a permanent insertion of the C9ORF72 gene and results in restoration of C9orf72 protein activity. The safe harbor locus can be selected from the group consisting of: AAVS1 (PPP1R12C), ALB, Angptl3, ApoC3, ASGR2, CCR5, FIX (F9), G6PC, Gys2, HGD, Lp(a), Pcsk9, Serpina1, TF, and TTR. The safe harbor locus can be selected from the group consisting of: exon 1-2 of AAVS1 (PPP1R12C), exon 1-2 of ALB, exon 1-2 of Angptl3, exon 1-2 of ApoC3, exon 1-2 of ASGR2, exon 1-2 of CCR5, exon 1-2 of FIX (F9), exon 1-2 of G6PC, exon 1-2 of Gys2, exon 1-2 of HGD, exon 1-2 of Lp(a), exon 1-2 of Pcsk9, exon 1-2 of Serpina1, exon 1-2 of TF, and exon 1-2 of TTR.

[0029] In some embodiments, the step of editing the C9ORF72 gene of the neural cell comprises introducing into the neural cell one or more deoxyribonucleic acid (DNA) endonucleases to effect one or more double-strand breaks (DSBs) within or near the C9ORF72 gene that results in permanent deletion, insertion, or correction of the expanded hexanucleotide repeat within or near the C9ORF72 gene.

[0030] In some embodiments, the step of implanting the white blood cell into the patient comprises implanting the white blood cell into the patient by transplantation, local injection, systemic infusion, or combinations thereof.

[0031] In an aspect, provided herein is an ex vivo method for treating a patient with amyotrophic lateral sclerosis (ALS) or frontotemporal lobular dementia (FTLD) comprising the steps of: optionally, performing a biopsy of the patient's bone marrow; isolating a mesenchymal stem cell; editing within or near the C9ORF72 gene of the stem cell or other DNA sequences that encode regulatory elements of the C9ORF72 gene or editing within or near a safe harbor locus of the C9ORF72 gene; differentiating the stem cell into a hematopoietic progenitor cell, neural progenitor cell, or neural cell; and implanting the hematopoietic progenitor cell, neural progenitor cell, or neural cell into the patient.

[0032] In some embodiments, the step of isolating a mesenchymal stem cell comprises: aspiration of bone marrow and isolation of mesenchymal cells by density centrifugation using Percoll™.

[0033] The step of editing within or near the C9ORF72 gene or other DNA sequences that encode regulatory elements of the C9ORF72 gene or of editing within or near a safe harbor locus or of editing within or near a locus of the first exon of the C9ORF72 gene can comprise introducing into the mesenchymal stem cell one or more deoxyribonucleic acid (DNA) endonucleases to effect one or more single-strand breaks (SSBs) or double-strand breaks (DSBs) within or near the C9ORF72 gene or other DNA sequences that encode regulatory elements of the C9ORF72 gene that results in a permanent insertion, correction, or modulation of expression or function of one or more mutations or exons within or near or affecting the expression or function of the C9ORF72 gene or within or near a safe harbor locus that results in a permanent insertion of the C9ORF72 gene and results in restoration of C9orf72 protein activity. The safe harbor locus can be selected from the group consisting of: AAVS1 (PPP1R12C), ALB, Angptl3, ApoC3, ASGR2, CCR5, FIX (F9), G6PC, Gys2, HGD, Lp(a), Pcsk9, Serpina1, TF, and TTR. The safe harbor locus can be selected from the group consisting of: exon 1-2 of AAVS1 (PPP1R12C), exon 1-2 of ALB, exon 1-2 of Angptl3, exon 1-2 of ApoC3, exon 1-2 of ASGR2, exon 1-2 of CCR5, exon 1-2 of FIX (F9), exon 1-2 of G6PC, exon 1-2 of Gys2, exon 1-2 of HGD, exon 1-2 of Lp(a), exon 1-2 of Pcsk9, exon 1-2 of Serpina1, exon 1-2 of TF, and exon 1-2 of TTR.

[0034] In some embodiments, the step of editing the C9ORF72 gene of the stem cell comprises introducing into the stem cell one or more deoxyribonucleic acid (DNA) endonucleases to effect one or more double-strand breaks (DSBs) within or near the C9ORF72 gene that results in permanent deletion, insertion, or correction of the expanded hexanucleotide repeat within or near the C9ORF72 gene. In some embodiments, the step of differentiating the stem cell into a hematopoietic progenitor cell, neural progenitor cell, or neural cell comprises one or more of the following to differentiate the genome edited stem cell into a neural cell: treatment with a combination of small molecules or delivery of master transcription factors.

[0035] In some embodiments, step of implanting the cell into the patient comprises implanting the cell into the patient by transplantation, local injection, systemic infusion, or combinations thereof.

[0036] In another aspect, provided herein is an ex vivo method for treating a patient with amyotrophic lateral sclerosis (ALS) or frontotemporal lobular dementia (FTLD) comprising the steps of: optionally treating the patient with granulocyte colony stimulating factor (GCSF); isolating a hematopoietic progenitor cell from the patient; editing within or near the C9ORF72 gene of the hematopoietic progenitor cell or other DNA sequences that encode regulatory elements of the C9ORF72 gene or editing within or near a safe harbor locus of the C9ORF72 gene of the hematopoietic progenitor cell; and implanting the cell into the patient.

[0037] In some embodiments, the step of treating the patient with granulocyte colony stimulating factor (GCSF) is performed in combination with Plerixaflor. In some embodiments, the step of isolating a hematopoietic progenitor cell from the patient comprises isolating CD34+ cells.

[0038] The step of editing within or near the C9ORF72 gene or other DNA sequences that encode regulatory elements of the C9ORF72 gene or of editing within or near a safe harbor locus or of editing within or near a locus of the first exon of the C9ORF72 gene can comprise introducing into the hematopoietic progenitor cell one or more deoxyribonucleic acid (DNA) endonucleases to effect one or more single-strand breaks (SSBs) or double-strand breaks (DSBs) within or near the C9ORF72 gene or other DNA sequences that encode regulatory elements of the C9ORF72 gene that results in a permanent insertion, correction, or modulation of expression or function of one or more mutations or exons within or near or affecting the expression or function of the C9ORF72 gene or within or near a safe harbor locus that results in a permanent insertion of the C9ORF72 gene and results in restoration of C9orf72 protein activity. The safe harbor locus can be selected from the group consisting of: AAVS1 (PPP1 R12C), ALB, Angptl3, ApoC3, ASGR2, CCR5, FIX (F9), G6PC, Gys2, HGD, Lp(a), Pcsk9, Serpina1, TF, and TTR. The safe harbor locus can be selected from the group consisting of: exon 1-2 of AAVS1 (PPP1 R12C), exon 1-2 of ALB, exon 1-2 of Angptl3, exon 1-2 of ApoC3, exon 1-2 of ASGR2, exon 1-2 of CCR5, exon 1-2 of FIX (F9), exon 1-2 of G6PC, exon 1-2 of Gys2, exon 1-2 of HGD, exon 1-2 of Lp(a), exon 1-2 of Pcsk9, exon 1-2 of Serpina1, exon 1-2 of TF, and exon 1-2 of TTR.

[0039] In some embodiments, the step of editing the C9ORF72 gene of the hematopoietic progenitor cell comprises introducing into the stem cell one or more deoxyribonucleic acid (DNA) endonucleases to effect one or more double-strand breaks (DSBs) within or near the C9ORF72 gene or other DNA sequences that encode regulatory elements of the C9ORF72 gene or editing within or near a safe harbor locus of the C9ORF72 gene that results in permanent deletion, insertion, or correction of the expanded hexanucleotide repeat within or near the C9ORF72 gene and restoration of C9orf72 protein activity.

[0040] In some embodiments, the step of implanting the cell into the patient comprises implanting the neural cell into the patient by transplantation, local injection, systemic infusion, or combinations thereof.

[0041] In another aspect, provided herein is an in vivo method for treating a patient with amyotrophic lateral sclerosis (ALS) or frontotemporal lobular dementia (FTLD) comprising the step of editing the C9ORF72 gene in a cell of the patient.

[0042] The step of editing within or near the C9ORF72 gene or other DNA sequences that encode regulatory elements of the C9ORF72 gene or of editing within or near a safe harbor locus or of editing within or near a locus of the first exon of the C9ORF72 gene can comprise introducing into the cell one or more deoxyribonucleic acid (DNA) endonucleases to effect one or more single-strand breaks (SSBs) or double-strand breaks (DSBs) within or near the C9ORF72 gene or other DNA sequences that encode regulatory elements of the C9ORF72 gene that results in a permanent insertion, correction, or modulation of expression or function of one or more mutations or exons within or near or affecting the expression or function of the C9ORF72 gene or within or near a safe harbor locus that results in a permanent insertion of the C9ORF72 gene and results in restoration of C9orf72 protein activity. The safe harbor locus can be selected from the group consisting of: AAVS1 (PPP1R12C), ALB, Angptl3, ApoC3, ASGR2, CCR5, FIX (F9), G6PC, Gys2, HGD, Lp(a), Pcsk9, Serpina1, TF, and TTR. The safe harbor locus can be selected from the group consisting of: exon 1-2 of AAVS1 (PPP1R12C), exon 1-2 of ALB, exon 1-2 of Angptl3, exon 1-2 of ApoC3, exon 1-2 of ASGR2, exon 1-2 of CCR5, exon 1-2 of FIX (F9), exon 1-2 of G6PC, exon 1-2 of Gys2, exon 1-2 of HGD, exon 1-2 of Lp(a), exon 1-2 of Pcsk9, exon 1-2 of Serpina1, exon 1-2 of TF, and exon 1-2 of TTR.

[0043] In some embodiments, the step of editing the C9ORF72 gene in a cell of the patient comprises introducing into the cell one or more deoxyribonucleic acid (DNA) endonucleases to effect one or more double-strand breaks (DSBs) within or near the C9ORF72 gene that results in permanent deletion, insertion, or correction of the expanded hexanucleotide repeat within or near the C9ORF72 gene.

[0044] In some in vivo embodiments, the cell is a neural cell, a bone marrow cell, a hematopoietic progenitor cell, or a CD34+cell.

[0045] In some embodiments, the one or more DNA endonucleases is a Cas1, Cas1 B, Cas2, Cas3, Cas4, Cas5, Cas6, Cas7, Cas8, Cas9 (also known as Csn1 and Csx12), Cas100, Csy1, Csy2, Csy3, Cse1, Cse2, Csc1, Csc2, Csa5, Csn2, Csm2, Csm3, Csm4, Csm5, Csm6, Cmr1, Cmr3, Cmr4, Cmr5, Cmr6, Csb1, Csb2, Csb3, Csx17, Csx14, Csx10, Csx16, CsaX, Csx3, Csx1, Csx15, Csf1, Csf2, Csf3, Csf4, or Cpf1 endonuclease; or a homolog, codon-optimized, or modified version thereof.

[0046] In some embodiments, the method comprises introducing into the cell one or more polynucleotides encoding the one or more DNA endonucleases. In some embodiments, the method comprises introducing into the cell one or more ribonucleic acids (RNAs) encoding the one or more DNA endonucleases. In some embodiments, the one or more polynucleotides or one or more RNAs is one or more modified polynucleotides or one or more modified RNAs.

[0047] In some embodiments, the method further comprises introducing into the cell one or more DNA endonucleases, wherein the DNA endonuclease is a protein or polypeptide.

[0048] In some embodiments, the method further comprises introducing into the cell one or more guide ribonucleic acids (gRNAs). In some embodiments, the one or more gRNAs are single-molecule guide RNA (sgRNAs). In some embodiments, the one or more gRNAs or one or more sgRNAs is one or more modified gRNAs or one or more modified sgRNAs.

[0049] In some embodiments, the one or more DNA endonucleases is pre-complexed with one or more gRNAs or one or more sgRNAs.

[0050] In some embodiments, the method further comprises introducing into the cell a polynucleotide donor template comprising a part of the wild-type C9ORF72 gene or cDNA. In some embodiments, the part of the wild-type C9ORF72 gene or cDNA is the entire C9ORF72 gene or cDNA, or the cDNA of natural Variant 1, Variant 2, or Variant 3. In some embodiments, the donor template is either single or double stranded. In some embodiments, the donor template has homologous arms to the 9p21.2 region.

[0051] In some embodiments, the method further comprises introducing into the cell one guide ribonucleic acid (gRNA) and a polynucleotide donor template comprising at least a portion of the wild-type C9ORF72 gene. In some embodiments, the method further comprises introducing into the cell one guide ribonucleic acid (gRNA) and a polynucleotide donor template comprising at least a portion of a codon-optimized or modified C9ORF72 gene. In some embodiments, the one or more DNA endonucleases is one or more Cas9 or Cpf1 endonucleases that effect one single-strand break (SSB) or one double-strand break (DSB) at a locus within or near the C9ORF72 gene or other DNA sequences that encode regulatory elements of the C9ORF72 gene that facilitates insertion of a new sequence from the polynucleotide donor template into the chromosomal DNA at the DSB locus that results in permanent insertion or correction of a part of the chromosomal DNA of the C9ORF72 gene proximal to the locus or safe harbor locus, and wherein the gRNA comprises a spacer sequence that is complementary to a segment of the locus or safe harbor locus and restoration of C9orf72 protein activity. In some embodiments, proximal means nucleotides both upstream and downstream of the DSB locus.

[0052] In some embodiments, the method further comprises introducing into the cell two guide ribonucleic acid (gRNAs) and a polynucleotide donor template comprising at least a portion of the wild-type C9ORF72 gene, and wherein the one or more DNA endonucleases is two or more Cas9 or Cpf1 endonucleases that effect or create at least two (e.g., a pair) of single-strand breaks (SSBs) or a pair of double-strand breaks (DSBs), the first at a 5′ locus and the second at a 3′ locus, within or near the C9ORF72 gene or other DNA sequences that encode regulatory elements of the C9ORF72 gene or within or near a safe harbor locus that facilitates insertion of a new sequence from the polynucleotide donor template into the chromosomal DNA between the 5′ locus and the 3′ locus that results in permanent insertion or correction of the chromosomal DNA between the 5′ locus and the 3′ locus within or near the C9ORF72 gene or other DNA sequences that encode regulatory elements of the C9ORF72 gene or within or near a safe harbor locus, and wherein the first guide RNA comprises a spacer sequence that is complementary to a segment of the 5′ locus and the second guide RNA comprises a spacer sequence that is complementary to a segment of the 3′ locus.

[0053] In some embodiments, the one or two gRNAs are one or two single-molecule guide RNA (sgRNAs). In some embodiments, the one or two gRNAs or one or two sgRNAs is one or two modified gRNAs or one or two modified sgRNAs.

[0054] In some embodiments, the one or more DNA endonucleases is pre-complexed with one or two gRNAs or one or two sgRNAs.

[0055] In some embodiments, the part of the wild-type C9ORF72 gene or cDNA is the entire C9ORF72 gene or cDNA; the cDNA of natural Variant 1, Variant 2, or Variant 3; or about 30 hexanucleotide repeats.

[0056] In some embodiments, the donor template is either single or double stranded. In some embodiments, the donor template has homologous arms to the 9p21.2 region.

[0057] In some embodiments, the DSB, or 5′ DSB and 3′ DSB are in the first intron of the C9ORF72 gene.

[0058] The donor template can be either single or double stranded polynucleotide. The donor template can have homologous arms to a safe harbor locus, such as, for example, exon 1-2 of AAVS1 (PPP1R12C), exon 1-2 of ALB, exon 1-2 of Angptl3, exon 1-2 of ApoC3, exon 1-2 of ASGR2, exon 1-2 of CCR5, exon 1-2 of FIX (F9), exon 1-2 of G6PC, exon 1-2 of Gys2, exon 1-2 of HGD, exon 1-2 of Lp(a), exon 1-2 of Pcsk9, exon 1-2 of Serpina1, exon 1-2 of TF, and exon 1-2 of TTR.

[0059] In some embodiments, the insertion or correction is by homology directed repair (HDR).

[0060] In some embodiments, the method further comprises introducing into the cell two guide ribonucleic acid (gRNAs), and wherein the one or more DNA endonucleases is two or more Cas9 or Cpf1 endonucleases that effect a pair of double-strand breaks (DSBs), the first at a 5′ DSB locus and the second at a 3′ DSB locus, within or near the C9ORF72 gene that causes a deletion of the chromosomal DNA between the 5′ DSB locus and the 3′ DSB locus that results in permanent deletion of the chromosomal DNA between the 5′ DSB locus and the 3′ DSB locus within or near the C9ORF72 gene, and wherein the first guide RNA comprises a spacer sequence that is complementary to a segment of the 5′ DSB locus and the second guide RNA comprises a spacer sequence that is complementary to a segment of the 3′ DSB locus.

[0061] In some embodiments, the two gRNAs are two single-molecule guide RNA (sgRNAs). In some embodiments, the two gRNAs or two sgRNAs are two modified gRNAs or two modified sgRNAs.

[0062] In some embodiments, the one or more DNA endonucleases is pre-complexed with one or two gRNAs or one or two sgRNAs.

[0063] In some embodiments, both the 5′ DSB and 3′ DSB are in or near either the first exon, first intron, or second exon of the C9ORF72 gene.

[0064] In some embodiments, the deletion is a deletion of the expanded hexanucleotide repeat.

[0065] In some embodiments, the Cas9 or Cpf1 mRNA, gRNA, and donor template are either each formulated separately into lipid nanoparticles or all co-formulated into a lipid nanoparticle.

[0066] In some embodiments, the Cas9 or Cpf1 mRNA, gRNA, and donor template are formulated into separate exosomes or are co-formulated into an exosome.

[0067] In some embodiments, the Cas9 or Cpf1 mRNA is formulated into a lipid nanoparticle, and both the gRNA and donor template are delivered to the cell by a viral vector. In some embodiments, the viral vector is an adeno-associated virus (AAV) vector. In some embodiments, the AAV vector is an AAV6 vector.

[0068] The Cas9 or Cpf1 mRNA can be formulated into a lipid nanoparticle, and the gRNA can be delivered to the cell by electroporation and donor template can be delivered to the cell by a viral vector. The viral vector can be an adeno-associated virus (AAV) vector. The AAV vector can be an AAV6 vector.

[0069] In some embodiments, the C9ORF72 gene is located on Chromosome 9: 27,546,542-27,573,863 (Genome Reference Consortium—GRCh38/hg38).

[0070] In some embodiments, the restoration of C9orf72 protein activity is compared to wild-type or normal C9orf72 protein activity.

[0071] In another aspect, provided herein is one or more guide ribonucleic acids (gRNAs) comprising a spacer sequence selected from the group consisting of the nucleic acid sequences in SEQ ID NOs: 1-18807 for editing the C9ORF72 gene in a cell from a patient with amyotrophic lateral sclerosis (ALS) or frontotemporal lobular dementia (FTLD). In some embodiments, the one or more gRNAs are one or more single-molecule guide RNAs (sgRNAs). In some embodiments, the one or more gRNAs or one or more sgRNAs is one or more modified gRNAs or one or more modified sgRNAs.

[0072] Also provided herein is one or more guide ribonucleic acids (gRNAs) comprising a spacer sequence selected from the group consisting of the nucleic acid sequences in SEQ ID NOs: 18810-73668 for editing a safe harbor locus in a cell from a patient with amyotrophic lateral sclerosis (ALS) or frontotemporal lobular dementia (FTLD), wherein the safe harbor locus is selected from the group consisting of AAVS1 (PPP1 R12C), ALB, Angptl3, ApoC3, ASGR2, CCR5, FIX (F9), G6PC, Gys2, HGD, Lp(a), Pcsk9, Serpina1, TF, and TTR. In some embodiments, the one or more gRNAs are one or more single-molecule guide RNAs (sgRNAs). In some embodiments, the one or more gRNAs or one or more sgRNAs is one or more modified gRNAs or one or more modified sgRNAs.

[0073] Also provided herein are cells that have been modified by the preceding methods to permanently correct one or more mutations within the C9ORF72 gene, and restore C9orf72 protein activity. Further provided herein are methods for ameliorating amyotrophic lateral sclerosis (ALS) or frontotemporal lobular dementia (FTLD) by the administration of cells that have been modified by the preceding methods to an ALS or FTLD patient.

[0074] In some embodiments, the methods and compositions of the disclosure comprise one or more modified guide ribonucleic acids (gRNAs). Non-limiting examples of modifications can comprise one or more nucleotides modified at the 2′ position of the sugar, in some embodiments a 2′-O-alkyl, 2′-O-alkyl-O-alkyl, or 2′-fluoro-modified nucleotide. In some embodiments, RNA modifications include 2′-fluoro, 2′-amino or 2′ O-methyl modifications on the ribose of pyrimidines, abasic residues, desoxy nucleotides, or an inverted base at the 3′ end of the RNA.

[0075] In some embodiments, the one or more modified guide ribonucleic acids (gRNAs) comprise a modification that makes the modified gRNA more resistant to nuclease digestion than the native oligonucleotide. Non-limiting examples of such modifications include those comprising modified backbones, for example, phosphorothioates, phosphorothyos, phosphotriesters, methyl phosphonates, short chain alkyl or cycloalkyl intersugar linkages or short chain heteroatomic or heterocyclic intersugar linkages.

[0076] In another aspect, provided herein is a method for treating a patient with amyotrophic lateral sclerosis (ALS) or frontotemporal lobular dementia (FTLD) comprising transplanting the bone marrow from a donor to the patient.

[0077] Various other aspects are described and exemplified herein.

### BRIEF DESCRIPTION OF THE DRAWINGS

[0078] FIG. 1 is a graph showing the percent cutting of the guide RNAs subjected to tracking of indels by decomposition (TIDE) analysis.

[0079] BRIEF DESCRIPTION OF THE SEQUENCE LISTING

[0080] SEQ ID NOs: 1-6148 are 20 bp spacer sequences for targeting the C9ORF72 gene with a S. pyogenes Cas9 endonuclease.

[0081] SEQ ID NOs: 6149-6892 are 20 bp spacer sequences for targeting the C9ORF72 gene with a S. aureus Cas9 endonuclease.

[0082] SEQ ID NOs: 7760-8097 are 20 bp spacer sequences for targeting the C9ORF72 gene with a S. thermophilus Cas9 endonuclease.

[0083] SEQID NOs: 8098-8261 are 20 bp spacer sequences for targeting the C9ORF72 gene with a T. denticola Cas9 endonuclease.

[0084] SEQID NOs: 6893-7759 are 20 bp spacer sequences for the C9ORF72 gene with a N. meningitides Cas9 endonuclease.

[0085] SEQID NOs: 8262-18807 are 22 bp spacer sequences for targeting the C9ORF72 gene with an Acidominococcus, Lachnospiraceae, and Francisella novicida Cpf1 endonuclease.

[0086] SEQID NOs: 18810-20841 are 20 bp spacer sequences for targeting exons 1-2 of an AAVS1 (PPP1R12C) gene with a S. pyogenes Cas9 endonuclease.

[0087] SEQID NOs: 20842-21012 are 20 bp spacer sequences for targeting exons 1-2 of an AAVS1 (PPP1R12C) gene with a S. aureus Cas9 endonuclease.

[0088] SEQID NOs: 21013-21030 are 20 bp spacer sequences for targeting exons 1-2 of an AAVS1 (PPP1R12C) gene with a S. thermophilus Cas9 endonuclease.

[0089] SEQID NOs: 21031-21039 are 20 bp spacer sequences for targeting exons 1-2 of an AAVS1 (PPP1R12C) gene with a T. denticola Cas9 endonuclease.

[0090] SEQID NOs: 21040-21114 are 20 bp spacer sequences for targeting exons 1-2 of an AAVS1 (PPP1 R12C) gene with a N. meningitides Cas9 endonuclease.

[0091] SEQID NOs: 21115-22290 are 22 bp spacer sequences for targeting exons 1-2 of an AAVS1 (PPP1 R12C) gene with an Acidominococcus, Lachnospiraceae, and Francisella novicida Cpf1 endonuclease.

[0092] SEQID NOs: 22291-22458 are 20 bp spacer sequences for targeting exons 1-2 of an Alb gene with a S. pyogenes Cas9 endonuclease.

[0093] SEQID NOs: 22459-22486 are 20 bp spacer sequences for targeting exons 1-2 of an Alb gene with a S. aureus Cas9 endonuclease.

[0094] SEQID NOs: 22487-22504 are 20 bp spacer sequences for targeting exons 1-2 of an Alb gene with a S. thermophilus Cas9 endonuclease.

[0095] SEQID NOs: 22505-22509 are 20 bp spacer sequences for targeting exons 1-2 of an Alb gene with a T. denticola Cas9 endonuclease.

[0096] SEQID NOs: 22510-22533 are 20 bp spacer sequences for targeting exons 1-2 of an Alb gene with a N. meningitides Cas9 endonuclease.

[0097] SEQID NOs: 22534-22912 are 22 bp spacer sequences for targeting exons 1-2 of an Alb gene with an Acidominococcus, Lachnospiraceae, and Francisella novicida Cpf1 endonuclease.

[0098] SEQID NOs: 22913-23257 are 20 bp spacer sequences for targeting exons 1-2 of an Angpt13 gene with a S. pyogenes Cas9 endonuclease.

[0099] SEQID NOs: 23258-23293 are 20 bp spacer sequences for targeting exons 1-2 of an Angpt13 gene with a S. aureus Cas9 endonuclease.

[0100] SEQID NOs: 23294-23316 are 20 bp spacer sequences for targeting exons 1-2 of an Angpt13 gene with a S. thermophilus Cas9 endonuclease.

[0101] SEQID NOs: 23317-23329 are 20 bp spacer sequences for targeting exons 1-2 of an Angpt13 gene with a T. denticola Cas9 endonuclease.

[0102] SEQID NOs: 23330-23392 are 20 bp spacer sequences for targeting exons 1-2 of an Angpt13 gene with a N. meningitides Cas9 endonuclease.

[0103] SEQID NOs: 23393-24240 are 22 bp spacer sequences for targeting exons 1-2 of an Angpt13 gene with an Acidominococcus, Lachnospiraceae, and Francisella novicida Cpf1 endonuclease.

[0104] SEQID NOs: 24241-24643 are 20 bp spacer sequences for targeting exons 1-2 of an ApoC3 gene with a S. pyogenes Cas9 endonuclease.

[0105] SEQID NOs: 24644-24668 are 20 bp spacer sequences for targeting exons 1-2 of an ApoC3 gene with a S. aureus Cas9 endonuclease.

[0106] SEQID NOs: 24669-24671 are 20 bp spacer sequences for targeting exons 1-2 of an ApoC3 gene with a S. thermophilus Cas9 endonuclease.

[0107] SEQID NOs: 24672-24673 are 20 bp spacer sequences for targeting exons 1-2 of an ApoC3 gene with a T. denticola Cas9 endonuclease.

[0108] SEQID NOs: 24674-24685 are 20 bp spacer sequences for targeting exons 1-2 of an ApoC3 gene with a N. meningitides Cas9 endonuclease.

[0109] SEQID NOs: 24686-24917 are 22 bp spacer sequences for targeting exons 1-2 of an ApoC3 gene with an Acidominococcus, Lachnospiraceae, and Francisella novicida Cpf1 endonuclease.

[0110] SEQID NOs: 24918-26685 are 20 bp spacer sequences for targeting exons 1-2 of an ASGR2 gene with a S. pyogenes Cas9 endonuclease.

[0111] SEQID NOs: 26686-26891 are 20 bp spacer sequences for targeting exons 1-2 of an ASGR2 gene with a S. aureus Cas9 endonuclease.

[0112] SEQID NOs: 26892-26915 are 20 bp spacer sequences for targeting exons 1-2 of an ASGR2 gene with a S. thermophilus Cas9 endonuclease.

[0113] SEQID NOs: 26916-26927 are 20 bp spacer sequences for targeting exons 1-2 of an ASGR2 gene with a T. denticola Cas9 endonuclease.

[0114] SEQID NOs: 26928-27010 are 20 bp spacer sequences for targeting exons 1-2 of an ASGR2 gene with a N. meningitides Cas9 endonuclease.

[0115] SEQID NOs: 27011-28450 are 22 bp spacer sequences for targeting exons 1-2 of an ASGR2 gene with an Acidominococcus, Lachnospiraceae, and Francisella novicida Cpf1 endonuclease.

[0116] SEQID NOs: 28451-28653 are 20 bp spacer sequences for targeting exons 1-2 of a CCRS gene with a S. pyogenes Cas9 endonuclease.

[0117] SEQID NOs: 28654-28685 are 20 bp spacer sequences for targeting exons 1-2 of a CCRS gene with a S. aureus Cas9 endonuclease.

[0118] SEQID NOs: 28686-28699 are 20 bp spacer sequences for targeting exons 1-2 of a CCR5 gene with a S. thermophilus Cas9 endonuclease.

[0119] SEQID NOs: 28700-28701 are 20 bp spacer sequences for targeting exons 1-2 of a CCR5 gene with a T. denticola Cas9 endonuclease.

[0120] SEQID NOs: 28702-28729 are 20 bp spacer sequences for targeting exons 1-2 of a CCR5 gene with a N. meningitides Cas9 endonuclease.

[0121] SEQID NOs: 28730-29029 are 22 bp spacer sequences for targeting exons 1-2 of a CCR5 gene with an Acidominococcus, Lachnospiraceae, and Francisella novicida Cpf1 endonuclease.

[0122] SEQID NOs: 29030-30495 are 20 bp spacer sequences for targeting exons 1-2 of an F9 gene with a S. pyogenes Cas9 endonuclease.

[0123] SEQID NOs: 30496-30658 are 20 bp spacer sequences for targeting exons 1-2 of an F9 gene with a S. aureus Cas9 endonuclease.

[0124] SEQID NOs: 30659-30719 are 20 bp spacer sequences for targeting exons 1-2 of an F9 gene with a S. thermophilus Cas9 endonuclease.

[0125] SEQID NOs: 30720-30744 are 20 bp spacer sequences for targeting exons 1-2 of an F9 gene with a T. denticola Cas9 endonuclease.

[0126] SEQID NOs: 30745-30897 are 20 bp spacer sequences for targeting exons 1-2 of an F9 gene with a N. meningitides Cas9 endonuclease.

[0127] SEQID NOs: 30898-33038 are 22 bp spacer sequences for targeting exons 1-2 of an F9 gene with an Acidominococcus, Lachnospiraceae, and Francisella novicida Cpf1 endonuclease.

[0128] SEQID NOs: 33039-34054 are 20 bp spacer sequences for targeting exons 1-2 of a G6PC gene with a S. pyogenes Cas9 endonuclease.

[0129] SEQID NOs: 34055-34171 are 20 bp spacer sequences for targeting exons 1-2 of a G6PC gene with a S. aureus Cas9 endonuclease.

[0130] SEQID NOs: 34172-34195 are 20 bp spacer sequences for targeting exons 1-2 of a G6PC gene with a S. thermophilus Cas9 endonuclease.

[0131] SEQID NOs: 34196-34204 are 20 bp spacer sequences for targeting exons 1-2 of a G6PC gene with a T. denticola Cas9 endonuclease.

[0132] SEQID NOs: 34205-34294 are 20 bp spacer sequences for targeting exons 1-2 of a G6PC gene with a N. meningitides Cas9 endonuclease.

[0133] SEQID NOs: 34295-35389 are 22 bp spacer sequences for targeting exons 1-2 of a G6PC gene with an Acidominococcus, Lachnospiraceae, and Francisella novicida Cpf1 endonuclease.

[0134] SEQID NOs: 35390-40882 are 20 bp spacer sequences for targeting exons 1-2 of a Gys2 gene with a S. pyogenes Cas9 endonuclease.

[0135] SEQID NOs: 40883-41558 are 20 bp spacer sequences for targeting exons 1-2 of a Gys2 gene with a S. aureus Cas9 endonuclease.

[0136] SEQID NOs: 41559-41836 are 20 bp spacer sequences for targeting exons 1-2 of a Gys2 gene with a S. thermophilus Cas9 endonuclease.

[0137] SEQID NOs: 41837-41950 are 20 bp spacer sequences for targeting exons 1-2 of a Gys2 gene with a T. denticola Cas9 endonuclease.

[0138] SEQID NOs: 41951-42630 are 20 bp spacer sequences for targeting exons 1-2 of a Gys2 gene with a N. meningitides Cas9 endonuclease.

[0139] SEQID NOs: 42631-51062 are 22 bp spacer sequences for targeting exons 1-2 of a Gys2 gene with an Acidominococcus, Lachnospiraceae, and Francisella novicida Cpf1 endonuclease.

[0140] SEQID NOs: 51063-52755 are 20 bp spacer sequences for targeting exons 1-2 of an HGD gene with a S. pyogenes Cas9 endonuclease.

[0141] SEQID NOs: 52756-52969 are 20 bp spacer sequences for targeting exons 1-2 of an HGD gene with a S. aureus Cas9 endonuclease.

[0142] SEQID NOs: 52970-53052 are 20 bp spacer sequences for targeting exons 1-2 of an HGD gene with a S. thermophilus Cas9 endonuclease.

[0143] SEQID NOs: 53053-53071 are 20 bp spacer sequences for targeting exons 1-2 of an HGD gene with a T. denticola Cas9 endonuclease.

[0144] SEQID NOs: 53072-53272 are 20 bp spacer sequences for targeting exons 1-2 of an HGD gene with a N. meningitides Cas9 endonuclease.

[0145] SEQID NOs: 53273-55597 are 22 bp spacer sequences for targeting exons 1-2 of an HGD gene with an Acidominococcus, Lachnospiraceae, and Francisella novicida Cpf1 endonuclease.

[0146] SEQID NOs: 55598-59392 are 20 bp spacer sequences for targeting exons 1-2 of an Lp(a) gene with a S. pyogenes Cas9 endonuclease.

[0147] SEQID NOs: 59393-59802 are 20 bp spacer sequences for targeting exons 1-2 of an Lp(a) gene with a S. aureus Cas9 endonuclease.

[0148] SEQID NOs: 59803-59938 are 20 bp spacer sequences for targeting exons 1-2 of an Lp(a) gene with a S. thermophilus Cas9 endonuclease.

[0149] SEQID NOs: 59939-59973 are 20 bp spacer sequences for targeting exons 1-2 of an Lp(a) gene with a T. denticola Cas9 endonuclease.

[0150] SEQID NOs: 59974-60341 are 20 bp spacer sequences for targeting exons 1-2 of an Lp(a) gene with a N. meningitides Cas9 endonuclease.

[0151] SEQID NOs: 60342-64962 are 22 bp spacer sequences for targeting exons 1-2 of an Lp(a) gene with an Acidominococcus, Lachnospiraceae, and Francisella novicida Cpf1 endonuclease.

[0152] SEQID NOs: 64963-66982 are 20 bp spacer sequences for targeting exons 1-2 of a PCSK9 gene with a S. pyogenes Cas9 endonuclease.

[0153] SEQID NOs: 66983-67169 are 20 bp spacer sequences for targeting exons 1-2 of a PCSK9 gene with a S. aureus Cas9 endonuclease.

[0154] SEQID NOs: 67170-67205 are 20 bp spacer sequences for targeting exons 1-2 of a PCSK9 gene with a S. thermophilus Cas9 endonuclease.

[0155] SEQID NOs: 67206-67219 are 20 bp spacer sequences for targeting exons 1-2 of a PCSK9 gene with a T. denticola Cas9 endonuclease.

[0156] SEQID NOs: 67220-67359 are 20 bp spacer sequences for targeting exons 1-2 of a PCSK9 gene with a N. meningitides Cas9 endonuclease.

[0157] SEQID NOs: 67360-69153 are 22 bp spacer sequences for targeting exons 1-2 of a PCSK9 gene with an Acidominococcus, Lachnospiraceae, and Francisella novicida Cpf1 endonuclease.

[0158] SEQID NOs: 69154-70291 are 20 bp spacer sequences for targeting exons 1-2 of a Serpina1 gene with a S. pyogenes Cas9 endonuclease.

[0159] SEQID NOs: 70292-70384 are 20 bp spacer sequences for targeting exons 1-2 of a Serpina1 gene with a S. aureus Cas9 endonuclease.

[0160] SEQID NOs: 70385-70396 are 20 bp spacer sequences for targeting exons 1-2 of a Serpina1 gene with a S. thermophilus Cas9 endonuclease.

[0161] SEQID NOs: 70397-70399 are 20 bp spacer sequences for targeting exons 1-2 of a Serpina1 gene with a T. denticola Cas9 endonuclease.

[0162] SEQID NOs: 70400-70450 are 20 bp spacer sequences for targeting exons 1-2 of a Serpina1 gene with a N. meningitides Cas9 endonuclease.

[0163] SEQID NOs: 70451-71254 are 22 bp spacer sequences for targeting exons 1-2 of a Serpina1 gene with an Acidominococcus, Lachnospiraceae, and Francisella novicida Cpf1 endonuclease.

[0164] SEQID NOs: 71255-72086 are 20 bp spacer sequences for targeting exons 1-2 of a TF gene with a S. pyogenes Cas9 endonuclease.

[0165] SEQID NOs: 72087-72172 are 20 bp spacer sequences for targeting exons 1-2 of a TF gene with a S. aureus Cas9 endonuclease.

[0166] SEQID NOs: 72173-72184 are 20 bp spacer sequences for targeting exons 1-2 of a TF gene with a S. thermophilus Cas9 endonuclease.

[0167] SEQID NOs: 72185-72191 are 20 bp spacer sequences for targeting exons 1-2 of a TF gene with a T. denticola Cas9 endonuclease.

[0168] SEQID NOs: 72192-72235 are 20 bp spacer sequences for targeting exons 1-2 of a TF gene with a N. meningitides Cas9 endonuclease.

[0169] SEQID NOs: 72236-72871 are 22 bp spacer sequences for targeting exons 1-2 of a TF gene with an Acidominococcus, Lachnospiraceae, and Francisella novicida Cpf1 endonuclease.

[0170] SEQID NOs: 72872-73171 are 20 bp spacer sequences for targeting exons 1-2 of a TTR gene with a S. pyogenes Cas9 endonuclease.

[0171] SEQID NOs: 73172-73212 are 20 bp spacer sequences for targeting exons 1-2 of a TTR gene with a S. aureus Cas9 endonuclease.

[0172] SEQID NOs: 73213-73229 are 20 bp spacer sequences for targeting exons 1-2 of a TTR gene with a S. thermophilus Cas9 endonuclease.

[0173] SEQID NOs: 73230-73231 are 20 bp spacer sequences for targeting exons 1-2 of a TTR gene with a T. denticola Cas9 endonuclease.

[0174] SEQID NOs: 73232-73266 are 20 bp spacer sequences for targeting exons 1-2 of a TTR gene with a N. meningitides Cas9 endonuclease.

[0175] SEQID NOs: 73267-73668 are 22 bp spacer sequences for targeting exons 1-2 of a TTR gene with an Acidominococcus, Lachnospiraceae, and Francisella novicida Cpf1 endonuclease.

### DETAILED DESCRIPTION

[0176] C9ORF72

[0177] The human C9ORF72 gene is located on the short (p) arm of chromosome 9 open reading frame 72, from base pair 27,546,542 to base pair 27,573,863. Its cytogenetic location is at 9p21.2. The mutation of C9ORF72 is a hexanucleotide repeat expansion of the six letter string of nucleotides GGGGCC. In healthy individuals, there are few repeats of this hexanucleotide, typically 30 or less, but in people with the diseased phenotype, the repeat can occur in the order of hundreds. The hexanucleotide expansion event in the C9ORF72 gene is present in approximately 40% of familial ALS and 8-10% of sporadic ALS.

[0178] The hexanucleotide expansion occurs in an alternatively spliced Intron 1 of the C9ORF72 gene, and as such does not alter the coding sequence or resulting protein. Three alternatively spliced variants of C9ORF72 (V1, V2 and V3) are normally produced. The expanded nucleotide repeat has been shown to reduce the transcription of V1, however the total amount of protein produced was unaffected.

[0179] The term “hexanucleotide repeat expansion” means a series of six bases (for example, GGGGCC, GGGGGG, GGGGCG, or GGGGGC) repeated at least twice. In certain embodiments, the hexanucleotide repeat expansion may be located in intron 1 of a C9ORF72 nucleic acid. In certain embodiments, a pathogenic hexanucleotide repeat expansion includes at least 30 repeats of GGGGCC, GGGGGG, GGGGCG, or GGGGGC in a C9ORF72 nucleic acid and is associated with disease. In other embodiments, a pathogenic hexanucleotide repeat expansion includes at least 31, 32, 33, 34, 35, 40, 45, 50, 60, 70, 80, 90, 100, 150, 200, 250, 300 or more repeats. In certain embodiments, the repeats are consecutive. In certain embodiments, the repeats are interrupted by 1 or more nucleobases. In certain embodiments, a wild-type hexanucleotide repeat expansion includes 29 or fewer repeats of GGGGCC, GGGGGG, GGGGCG, or GGGGGC in a C9ORF72 nucleic acid. In other embodiments, a wild-type hexanucleotide repeat expansion includes 28, 27, 26, 25, 24, 23, 22, 21, 20, 19, 18, 17, 16, 15, 14, 13, 12, 11, 10, 9, 8, 7, 6, 5, 4, 3, 2, or 1 repeat. In certain embodiments, the entire hexanucleotide repeat expansion is deleted. In certain embodiments, the repeats are consecutive. In certain embodiments, the repeats are interrupted by 1 or more nucleobases.

[0180] Therapeutic Approach

[0181] Provided herein are cellular, ex vivo and in vivo methods for using genome engineering tools to create permanent changes to the genome by: 1) completely deleting the expanded hexanucleotide repeat within or near the C9ORF72 gene, 2) correcting/replacing the expanded hexanucleotide repeat within or near the C9ORF72 gene with a wild-type or similar number of hexanucleotide repeats, or 3) deletion of the hexanucleotide repeat region and knocking-in C9ORF72 cDNA into the gene locus or a safe harbor locus. Such methods use endonucleases, such as CRISPRassociated (Cas9, Cpf1 and the like) nucleases, to permanently delete or replace the expanded hexanucleotide repeat or portions thereof or insert in the genomic locus of the C9ORF72 gene. In this way, the present invention restores the wild-type or similar C9ORF72 intronic sequence or deletes the expanded hexanucleotide repeat with a single treatment (rather than deliver potential therapies for the lifetime of the patient).

[0182] Provided herein are methods for treating a patient with amyotrophic lateral sclerosis (ALS) or frontotemporal lobular dementia (FTLD). An embodiment of such method is an ex vivo cell based therapy. For example, a patient specific induced pluripotent stem cell (iPSC) is created. Then, the chromosomal DNA of these iPS cells is corrected using the materials and methods described herein. Next, the corrected iPSCs are differentiated into hematopoietic progenitor cells, neural progenitor cells, or neural cells. Finally, the hematopoietic progenitor cells, neural progenitor cells, or neural cells are implanted into the patient.

[0183] Provided herein are methods of restoring correct expression of a C9ORF72 gene using CRISPR-Cas9 or CRISPR-Cpf1, together with donor template to insert a wildtype C9ORF72 cDNA into an C9ORF72 locus, or to a safe harbor locus selected from the group consisting of: AAVS1 (PPP1R12C), ALB, Angptl3, ApoC3, ASGR2, CCR5, FIX (F9), G6PC, Gys2, HGD, Lp(a), Pcsk9, Serpina1, TF, and TTR. In some embodiments, such method is the use of a cDNA that can be knocked in and that contains the exons affected. In addition to partial cDNA approach, a full length cDNA can be knocked into translation start site. In either case, the expression of inserted cDNA is under the control of a C9ORF72 promoter, which renders the precise regulation of C9ORF72 protein level.

[0184] Also provided herein are methods of restoring correct expression of a C9ORF72 gene by inserting C9ORF72 cDNA into a safe harbor locus selected from the group consisting of: exon 1-2 of AAVS1 (PPP1 R12C), exon 1-2 of ALB, exon 1-2 of Angptl3, exon 1-2 of ApoC3, exon 1-2 of ASGR2, exon 1-2 of CCR5, exon 1-2 of FIX (F9), exon 1-2 of G6PC, exon 1-2 of Gys2, exon 1-2 of HGD, exon 1-2 of Lp(a), exon 1-2 of Pcsk9, exon 1-2 of Serpina1, exon 1-2 of TF, and exon 1-2 of TTR.

[0185] Another embodiment of such method is an ex vivo cell based therapy. For example, a white blood cell is isolated from the patient. Next, the chromosomal DNA of these white blood cells is corrected using the materials and methods described herein. Finally, the edited white blood cells are implanted into the patient.

[0186] Yet another embodiment of such method is an ex vivo cell based therapy. For example, a biopsy of the patient's bone marrow is optionally performed. Then, a mesenchymal stem cell is isolated from the biopsied material. Next, the chromosomal DNA of these stem cells is corrected using the materials and methods described herein. Next, the stem cells are differentiated into hematopoietic progenitor cells, neural progenitor cells, or neural cells. Finally, these hematopoietic progenitor cells, neural progenitor cells, or neural cells are implanted into the patient.

[0187] A further embodiments of such method is an ex vivo cell based therapy. For example, a patient is optionally treated with granulocyte colony stimulating factor. Then, a hematopoietic progenitor cell is isolated from the patient. Next, the chromosomal DNA of these cells is corrected using the materials and methods described herein. Finally, the cells are implanted into the patient.

[0188] One advantage of an ex vivo cell therapy approach is the ability to conduct a comprehensive analysis of the therapeutic prior to administration. All nuclease based therapeutics have some level of off-target effects. Performing gene correction ex vivo allows one to fully characterize the corrected cell population prior to implantation. Aspects of the invention include sequencing the entire genome of the corrected cells to ensure that the off-target cuts, if any, are in genomic locations associated with minimal risk to the patient. Furthermore, populations of specific cells, including clonal populations, can be isolated prior to implantation.

[0189] Another advantage of ex vivo cell therapy relates to genetic correction in iPSCs compared to other primary cell sources. iPSCs are prolific, making it easy to obtain the large number of cells that will be required for a cell based therapy. Furthermore, iPSCs are an ideal cell type for performing clonal isolations. This allows screening for the correct genomic correction, without risking a decrease in viability. In contrast, other primary cells are viable for only a few passages and difficult to clonally expand. Thus, manipulation of iPSCs for the treatment of ALS or FTLD will be much easier, and will shorten the amount of time needed to make the desired genetic correction.

[0190] Another embodiment of such method is an in vivo based therapy. In this method, the chromosomal DNA of the cells in the patient is corrected using the materials and methods described herein. Preferably, the cells are neural cells, bone marrow cells, hematopoietic progenitor cells, or CD34+ cells.

[0191] An advantage of in vivo gene therapy is the ease of therapeutic production and administration. The same therapeutic approach and therapy will have the potential to be used to treat more than one patient, for example a number of patients who share the same or similar genotype or allele. In contrast, ex vivo cell therapy typically requires using a patient's own cells, which are isolated, manipulated and returned to the same patient.

[0192] Also provided herein is a cellular method for editing the C9ORF72 gene in a cell by genome editing. For example, a cell is isolated from a patient or animal. Then, the chromosomal DNA of the cell is corrected using the materials and methods described herein.

[0193] The methods of the invention, regardless of whether a cellular or ex vivo or in vivo method, involves one or a combination of the following: deleting the entire expanded hexanucleotide repeat or a portion thereof in or near the C9ORF72 gene, correcting the expanded hexanucleotide repeat in or near the C9ORF72 gene to wildtype level or similar levels, or introducing exogenous C9ORF72 DNA or cDNA sequence or a fragment thereof into the locus of the gene or at a heterologous location in the genome (such as a safe harbor site, such as a safe harbor locus selected from the group consisting of: AAVS1 (PPP1 R12C), ALB, Angptl3, ApoC3, ASGR2, CCR5, FIX (F9), G6PC, Gys2, HGD, Lp(a), Pcsk9, Serpina1, TF, and TTR). Both the correction and knock-in strategies utilize a donor DNA template in Homology-Directed Repair (HDR). HDR in either strategy may be accomplished by making one or more double-stranded breaks (DSBs) at specific sites in the genome by using one or more endonucleases. Assessment of efficiency of HDR mediated knock-in of cDNA into the first exon can utilize cDNA knock-in into “safe harbor” sites such as: single-stranded or double-stranded DNA having homologous arms to one of the following regions, for example: ApoC3 (chr11:116,829,908-116,833,071), Angptl3 (chr1:62,597,487-62,606,305), Serpina1 (chr14:94,376,747-94,390,692), Lp(a) (chr6:160,531,483-160,664,259), Pcsk9 (chr1:55,039,475-55,064,852), FIX (chrX:139,530,736-139,563,458), ALB (chr4:73,404,254-73,421,411), TTR (chr18:31,591,766-31,599,023), TF (chr3:133,661,997-133,779,005), G6PC (17:42,900,796-42,914,432), Gys2 (chr12:21,536,188-21,604,857), AAVS1(PPP1R12C) (chr19:55,090,912-55,117,599), HGD (chr3:120,628,167-120,682,570), CCR5 (chr3:46,370,854-46,376,206), ASG R2 (chr17:7,101,322-7,114,310). Both the correction and knock-in strategies utilize a donor DNA template in Homology-Directed Repair (HDR). HDR in either strategy may be accomplished by making one or more double-stranded breaks (DSBs) at specific sites in the genome by using one or more endonucleases.

[0194] For example, the correction strategy involves correcting the expanded hexanucleotide repeat in the C9ORF72 gene by inducing one double stranded break in the gene of interest with one or more Cas9 and a sg RNA, or two or more double stranded breaks in the gene of interest using two or more appropriate sgRNAs, in the presence of a donor DNA template introduced exogenously to direct the cellular DSB response to Homology-Directed Repair (the donor DNA template can be a short single stranded oligonucleotide, a short double stranded oligonucleotide, a long single or double stranded DNA molecule). This approach requires development and optimization of gRNAS and donor DNA molecules for heterogeneous hexanucleotide repeat expansions of the C9ORF72 gene.

[0195] For example, the knock-in strategy involves knocking-in C9ORF72 cDNA into the locus of the gene using a sgRNA or a pair of sgRNAs targeting upstream of or in the first or other exon and/or intron of the C9ORF72 gene, or in a safe harbor site (such as, e.g., exon 1-2 of a safe harbor locus selected from the group consisting of: AAVS1 (PPP1 R12C), ALB, Angptl3, ApoC3, ASGR2, CCR5, FIX (F9), G6PC, Gys2, HGD, Lp(a), Pcsk9, Serpina1, TF, and TTR)). The donor DNA will be single or double stranded DNA having homologous arms to the 9p21.2 region. The donor DNA can be single or double stranded DNA having homologous arms to the target safe harbor locus. The donor template can be single or double stranded DNA having homologous arms to a safe harbor locus selected from the group consisting of: AAVS1 (PPP1R12C), ALB, Angptl3, ApoC3, ASGR2, CCR5, FIX (F9), G6PC, Gys2, HGD, Lp(a), Pcsk9, Serpina1, TF, and TTR.

[0196] For example, the deletion strategy involves deleting one or more, and preferably all, hexanucleotide repeats in the C9ORF72 gene using one or more endonucleases and two or more gRNAs or sgRNAs.

[0197] The advantages for the above strategies (correction and knock-in and deletion) are similar, including in principle both short and long term beneficial clinical and laboratory effects. The knock-in approach does provide one advantage over the correction or deletion approach—the ability to treat all patients versus only a subset of patients. The other issue with gene editing in this manner is the need for a DNA donor for HDR.

[0198] In addition to the above genome editing strategies, another strategy involves modulating expression, function, or activity of C9orf72 by editing in the gene other than the expanded hexanucleotide repeat region or by editing in the regulatory sequence.

[0199] A CRISPR/Cas9 endonuclease can be used to target single-stranded RNA targets when the PAM is presented in trans as a DNA oligo (PAMer) (O'Connell, M. R. et al. Nature 516, 263-266 (2014)). Manipulation of this system can be utilized to specifically induce breaks in transcribed RNA while leaving the genomic locus intact. This is a useful strategy for specifically knocking down expression from deleterious RNAs in the cell. In the context of treating ALS, one approach would be to deliver gRNAs that specifically target the hexanucleotide repeat in C9ORF72 pre-RNA along with a DNA PAMer to induce cutting. This would lead to reduced expression of the deleterious C9ORF72 mRNA.

[0200] Another method of the invention involves treating a patient with amyotrophic lateral sclerosis (ALS) or frontotemporal lobular dementia (FTLD) comprising transplanting the bone marrow from a donor to the patient.

[0201] A number of types of genomic Target Sites are present in addition to mutations in the coding and splicing sequences.

[0202] The regulation of transcription and translation implicates a number of different classes of sites that interact with cellular proteins or nucleotides. Often the DNA binding sites of transcription factors or other proteins can be targeted for mutation or deletion to study the role of the site, though they can also be targeted to change gene expression. Sites can be added through non-homologous end joining (NHEJ) or direct genome editing by homology directed repair (HDR). Increased use of genome sequencing, RNA expression and genome-wide studies of transcription factor binding have increased our ability to identify how the sites lead to developmental or temporal gene regulation. These control systems may be direct or may involve extensive cooperative regulation that can require the integration of activities from multiple enhancers. Transcription factors typically bind 6-12 bp-long degenerate DNA sequences. The low level of specificity provided by individual sites suggests that complex interactions and rules are involved in binding and the functional outcome. Binding sites with less degeneracy may provide simpler means of regulation. Artificial transcription factors can be designed to specify longer sequences that have less similar sequences in the genome and have lower potential for off-target cleavage. Any of these types of binding sites can be mutated, deleted or even created to enable changes in gene regulation or expression (Canver, M. C. et al., Nature (2015)).

[0203] Another class of gene regulatory regions having these features is microRNA (miRNA) binding sites. miRNAs are non-coding RNAs that play key roles in post-transcriptional gene regulation. miRNA may regulate the expression of 30% of all mammalian protein-encoding genes. Specific and potent gene silencing by double stranded RNA (RNAi) was discovered, plus additional small noncoding RNA (Canver, M. C. et al., Nature (2015)). The largest class of noncoding RNAs important for gene silencing are miRNAs. In mammals, miRNAs are first transcribed as a long RNA transcripts, which can be separate transcriptional units, part of protein introns, or other transcripts. The long transcripts are called primary miRNA (pri-miRNA) that include imperfectly base-paired hairpin structures. These pri-miRNA are cleaved into one or more shorter precursor miRNAs (pre-miRNAs) by Microprocessor, a protein complex in the nucleus, involving Drosha.

[0204] Pre-miRNAs are short stem loops -70 nucleotides in length with a 2-nucleotide 3′-overhang that are exported, into the mature 19-25 nucleotide miRNA:miRNA* duplexes. The miRNA strand with lower base pairing stability (the guide strand) is loaded onto the RNA-induced silencing complex (RISC). The passenger guide strand (marked with *), may be functional, but is usually degraded. The mature miRNA tethers RISC to partly complementary sequence motifs in target mRNAs predominantly found within the 3′ untranslated regions (UTRs) and induces posttranscriptional gene silencing (Bartel, D. P. Cell 136, 215-233 (2009); Saj, A. & Lai, E. C. Curr Opin Genet Dev 21, 504-510 (2011)).

[0205] miRNAs are important in development, differentiation, cell cycle and growth control, and in virtually all biological pathways in mammals and other multicellular organisms. miRNAs are also involved in cell cycle control, apoptosis and stem cell differentiation, hematopoiesis, hypoxia, muscle development, neurogenesis, insulin secretion, cholesterol metabolism, aging, viral replication and immune responses.

[0206] A single miRNA can target hundreds of different mRNA transcripts, while an individual transcript can be targeted by many different miRNAs. More than 28645 microRNAs have been annotated in the latest release of miRBase (v.21). Some miRNAs are encoded by multiple loci, some of which are expressed from tandemly co-transcribed clusters. The features allow for complex regulatory networks with multiple pathways and feedback controls. miRNAs are integral parts of these feedback and regulatory circuits and can help regulate gene expression by keeping protein production within limits (Herranz, H. & Cohen, S. M. Genes Dev 24, 1339-1344 (2010); Posadas, D. M. & Carthew, R. W. Curr Opin Genet Dev 27, 1-6 (2014)). miRNA are also important in a large number of human diseases that are associated with abnormal miRNA expression. This association underscores the importance of the miRNA regulatory pathway. Recent miRNA deletion studies have linked miRNA with regulation of the immune responses (Stern-Ginossar, N. et al., Science 317, 376-381 (2007)).

[0207] miRNA also have a strong link to cancer and may play a role in different types of cancer. miRNAs have been found to be downregulated in a number of tumors. miRNA are important in the regulation of key cancer-related pathways, such as cell cycle control and the DNA damage response, and are therefore used in diagnosis and are being targeted clinically. MicroRNAs delicately regulate the balance of angiogenesis, such that experiments depleting all microRNAs suppresses tumor angiogenesis (Chen, S. et al., Genes Dev 28, 1054-1067 (2014)).

[0208] As has been shown for protein coding genes, miRNA genes are also subject to epigenetic changes occurring with cancer. Many miRNA loci are associated with CpG islands increasing their opportunity for regulation by DNA methylation (Weber, B., Stresemann, C., Brueckner, B. & Lyko, F. Cell Cycle 6, 1001-1005 (2007)). The majority of studies have used treatment with chromatin remodeling drugs to reveal epigenetically silenced miRNAs.

[0209] In addition to their role in RNA silencing, miRNA can also activate translation (Posadas, D. M. & Carthew, R. W. Curr Opin Genet Dev 27, 1-6 (2014)). Knocking out these sites may lead to decreased expression of the targeted gene, while introducing these sites may increase expression.

[0210] Individual miRNA can be knocked out most effectively by mutating the seed sequence (bases 2-8 of the microRNA), which is important for binding specificity. Cleavage in this region, followed by mis-repair by NHEJ can effectively abolish miRNA function by blocking binding to Target Sites. miRNA could also be inhibited by specific targeting of the special loop region adjacent to the palindromic sequence. Catalytically inactive Cas9 can also be used to inhibit shRNA expression (Zhao, Y. et al., Sci Rep 4, 3943 (2014)). In addition to targeting the miRNA, the binding sites can also be targeted and mutated to prevent the silencing by miRNA.

[0211] Human Cells

[0212] For ameliorating ALS or FTLD, as described and illustrated herein, the principal targets for gene editing are human cells. For example, in the ex vivo methods, the human cells are somatic cells, which after being modified using the techniques as described, can give rise to neural cells or progenitor cells. For example, in the in vivo methods, the human cells are neural cells.

[0213] By performing gene editing in autologous cells that are derived from and therefore already completely matched with the patient in need, it is possible to generate cells that can be safely re-introduced into the patient, and effectively give rise to a population of cells that will be effective in ameliorating one or more clinical conditions associated with the patient's disease.

[0214] Progenitor cells (also referred to as stem cells herein) are capable of both proliferation and giving rise to more progenitor cells, these in turn having the ability to generate a large number of mother cells that can in turn give rise to differentiated or differentiable daughter cells. The daughter cells themselves can be induced to proliferate and produce progeny that subsequently differentiate into one or more mature cell types, while also retaining one or more cells with parental developmental potential. The term “stem cell” refers then, to a cell with the capacity or potential, under particular circumstances, to differentiate to a more specialized or differentiated phenotype, and which retains the capacity, under certain circumstances, to proliferate without substantially differentiating. In one embodiment, the term progenitor or stem cell refers to a generalized mother cell whose descendants (progeny) specialize, often in different directions, by differentiation, e.g., by acquiring completely individual characters, as occurs in progressive diversification of embryonic cells and tissues. Cellular differentiation is a complex process typically occurring through many cell divisions. A differentiated cell may derive from a multipotent cell that itself is derived from a multipotent cell, and so on. While each of these multipotent cells may be considered stem cells, the range of cell types that each can give rise to may vary considerably. Some differentiated cells also have the capacity to give rise to cells of greater developmental potential. Such capacity may be natural or may be induced artificially upon treatment with various factors. In many biological instances, stem cells are also “multipotent” because they can produce progeny of more than one distinct cell type, but this is not required for “stem-ness.”

[0215] Self-renewal is another important aspect of the stem cell. In theory, self-renewal can occur by either of two major mechanisms. Stem cells may divide asymmetrically, with one daughter retaining the stem state and the other daughter expressing some distinct other specific function and phenotype. Alternatively, some of the stem cells in a population can divide symmetrically into two stems, thus maintaining some stem cells in the population as a whole, while other cells in the population give rise to differentiated progeny only. Generally, “progenitor cells” have a cellular phenotype that is more primitive (i.e., is at an earlier step along a developmental pathway or progression than is a fully differentiated cell). Often, progenitor cells also have significant or very high proliferative potential. Progenitor cells can give rise to multiple distinct differentiated cell types or to a single differentiated cell type, depending on the developmental pathway and on the environment in which the cells develop and differentiate.

[0216] In the context of cell ontogeny, the adjective “differentiated,” or “differentiating” is a relative term. A “differentiated cell” is a cell that has progressed further down the developmental pathway than the cell to which it is being compared. Thus, stem cells can differentiate into lineage-restricted precursor cells (such as a myocyte progenitor cell), which in turn can differentiate into other types of precursor cells further down the pathway (such as a myocyte precursor), and then to an end-stage differentiated cell, such as a myocyte, which plays a characteristic role in a certain tissue type, and may or may not retain the capacity to proliferate further.

[0217] The term “hematopoietic progenitor cell” refers to cells of a stem cell lineage that give rise to all the blood cell types, including erythroid (erythrocytes or red blood cells (RBCs)), myeloid (monocytes and macrophages, neutrophils, basophils, eosinophils, megakaryocytes/platelets, and dendritic cells), and lymphoid (T-cells, B-cells, NK-cells).

[0218] A “cell of the erythroid lineage” indicates that the cell being contacted is a cell that undergoes erythropoiesis, such that upon final differentiation it forms an erythrocyte or red blood cell. Such cells originate from bone marrow hematopoietic progenitor cells. Upon exposure to specific growth factors and other components of the hematopoietic microenvironment, hematopoietic progenitor cells can mature through a series of intermediate differentiation cellular types, all intermediates of the erythroid lineage, into RBCs. Thus, cells of the “erythroid lineage” comprise hematopoietic progenitor cells, rubriblasts, prorubricytes, erythroblasts, metarubricytes, reticulocytes, and erythrocytes.

[0219] In some embodiments, the hematopoietic progenitor cell expresses at least one of the following cell surface markers characteristic of hematopoietic progenitor cells: CD34+, CD59+, Thyl/CD90+, CD381o/−, and C-kit/CDI 17+. In some embodiments, the hematopoietic progenitors are CD34+.

[0220] In some embodiments, the hematopoietic progenitor cell is a peripheral blood stem cell obtained from the patient after the patient has been treated with one or more factors such as granulocyte colony stimulating factor (optionally in combination with Plerixaflor). In illustrative embodiments, CD34+cells are enriched using CliniMACS® Cell Selection System (Miltenyi Biotec). In some embodiments, CD34+ cells are stimulated in serum-free medium (e.g., CellGrow SCGM media, CellGenix) with cytokines (e.g., SCF, rhTPO, rhFLT3) before genome editing. In some embodiments, addition of SR1 and dmPGE2 and/or other factors is contemplated to improve long-term engraftment.

[0221] In some embodiments, the hematopoietic progenitor cells of the erythroid lineage have a cell surface marker characteristic of the erythroid lineage: such as CD71 and Terl 19.

[0222] ALS and FTLD are both diseases of motor neurons, the large cells of the spinal cord that send nerve fibers out to control the muscles. Also, motor neurons in the part of the brain governing voluntary movements are destroyed in ALS and FTLD. These so called upper motor neurons send nerve fibers down from the brain to control the lower motor neurons in the spinal cord. In vivo methods could target the motor neurons directly. In vivo methods could also target the glia, astrocytes and other supporting cells.

[0223] In unpublished data, it has been shown that mice harboring a homozygous C9ORF72 mutation are viable. However these mice are characterized by a decreased life expectancy, splenomegaly, neutrophilia, thrombocytopenia, and elevated levels of inflammatory cytokines, suggesting that there may be an immune component to the pathology of ALS. Interestingly, a bone marrow transplant is able to delay the lethality and level of cytokines observed in C9ORF72 homozygous mutant mice. Building on this work, it is hypothesized that correction of the C9orf72 locus in cells of the immune system using CRISPR/Cas9/Cpf1 technologies may be a new approach for the treatment of ALS.

[0224] Induced Pluripotent Stem Cells

[0225] In some embodiments, the genetically engineered human cells described herein are induced pluripotent stem cells (iPSCs). An advantage of using iPSCs is that the cells can be derived from the same subject to which the progenitor cells are to be administered. That is, a somatic cell can be obtained from a subject, reprogrammed to an induced pluripotent stem cell, and then re-differentiated into a progenitor cell to be administered to the subject (e.g., autologous cells). Because the progenitors are essentially derived from an autologous source, the risk of engraftment rejection or allergic response is reduced compared to the use of cells from another subject or group of subjects. In addition, the use of iPSCs negates the need for cells obtained from an embryonic source. Thus, in one embodiment, the stem cells used in the disclosed methods are not embryonic stem cells.

[0226] Although differentiation is generally irreversible under physiological contexts, several methods have been recently developed to reprogram somatic cells to iPSCs. Exemplary methods are known to those of skill in the art and are described briefly herein below.

[0227] The term “reprogramming” refers to a process that alters or reverses the differentiation state of a differentiated cell (e.g., a somatic cell). Stated another way, reprogramming refers to a process of driving the differentiation of a cell backwards to a more undifferentiated or more primitive type of cell. It should be noted that placing many primary cells in culture can lead to some loss of fully differentiated characteristics. Thus, simply culturing such cells included in the term differentiated cells does not render these cells non-differentiated cells (e.g., undifferentiated cells) or pluripotent cells. The transition of a differentiated cell to pluripotency requires a reprogramming stimulus beyond the stimuli that lead to partial loss of differentiated character in culture. Reprogrammed cells also have the characteristic of the capacity of extended passaging without loss of growth potential, relative to primary cell parents, which generally have capacity for only a limited number of divisions in culture.

[0228] The cell to be reprogrammed can be either partially or terminally differentiated prior to reprogramming. In some embodiments, reprogramming encompasses complete reversion of the differentiation state of a differentiated cell (e.g., a somatic cell) to a pluripotent state or a multipotent state. In some embodiments, reprogramming encompasses complete or partial reversion of the differentiation state of a differentiated cell (e.g., a somatic cell) to an undifferentiated cell (e.g., an embryonic-like cell). Reprogramming can result in expression of particular genes by the cells, the expression of which further contributes to reprogramming. In certain embodiments described herein, reprogramming of a differentiated cell (e.g., a somatic cell) causes the differentiated cell to assume an undifferentiated state (e.g., is an undifferentiated cell). The resulting cells are referred to as “reprogrammed cells,” or “induced pluripotent stem cells (iPSCs or iPS cells).”

[0229] Reprogramming can involve alteration, e.g., reversal, of at least some of the heritable patterns of nucleic acid modification (e.g., methylation), chromatin condensation, epigenetic changes, genomic imprinting, etc., that occur during cellular differentiation. Reprogramming is distinct from simply maintaining the existing undifferentiated state of a cell that is already pluripotent or maintaining the existing less than fully differentiated state of a cell that is already a multipotent cell (e.g., a myogenic stem cell). Reprogramming is also distinct from promoting the self-renewal or proliferation of cells that are already pluripotent or multipotent, although the compositions and methods described herein can also be of use for such purposes, in some embodiments.

[0230] Many methods are known in the art that can be used to generate pluripotent stem cells from somatic cells. Any such method that reprograms a somatic cell to the pluripotent phenotype would be appropriate for use in the methods described herein.

[0231] Reprogramming methodologies for generating pluripotent cells using defined combinations of transcription factors have been described. Mouse somatic cells can be converted to ES cell-like cells with expanded developmental potential by the direct transduction of Oct4, Sox2, Klf4, and c-Myc; see, e.g., Takahashi and Yamanaka, Cell 126(4): 663-76 (2006). iPSCs resemble ES cells, as they restore the pluripotency-associated transcriptional circuitry and much of the epigenetic landscape. In addition, mouse iPSCs satisfy all the standard assays for pluripotency: specifically, in vitro differentiation into cell types of the three germ layers, teratoma formation, contribution to chimeras, germline transmission [see, e.g., Maherali and Hochedlinger, Cell Stem Cell. 3(6):595-605 (2008)], and tetraploid complementation.

[0232] Human iPSCs can be obtained using similar transduction methods, and the transcription factor trio, OCT4, SOX2, and NANOG, has been established as the core set of transcription factors that govern pluripotency; see, e.g., Budniatzky and Gepstein, Stem Cells Transl Med. 3(4):448-57 (2014); Barrett et al., Stem Cells Trans Med 3:1-6 sctm.2014-0121 (2014); Focosi et al., Blood Cancer Journal 4: e211 (2014); and references cited therein. The production of iPSCs can be achieved by the introduction of nucleic acid sequences encoding stem cell-associated genes into an adult, somatic cell, historically using viral vectors.

[0233] iPSCs can be generated or derived from terminally differentiated somatic cells, as well as from adult stem cells, or somatic stem cells. That is, a non-pluripotent progenitor cell can be rendered pluripotent or multipotent by reprogramming. In such instances, it may not be necessary to include as many reprogramming factors as required to reprogram a terminally differentiated cell. Further, reprogramming can be induced by the non-viral introduction of reprogramming factors, e.g., by introducing the proteins themselves, or by introducing nucleic acids that encode the reprogramming factors, or by introducing messenger RNAs that upon translation produce the reprogramming factors (see e.g., Warren et al., Cell Stem Cell, 7(5):618-30 (2010). Reprogramming can be achieved by introducing a combination of nucleic acids encoding stem cell-associated genes, including, for example, Oct-4 (also known as Oct-3/4 or Pouf51), Sox1, Sox2, Sox3, Sox 15, Sox 18, NANOG, Klfl, Klf2, Klf4, Klf5, NR5A2, c-Myc, 1-Myc, n-Myc, Rem2, Tert, and LIN28. In one embodiment, reprogramming using the methods and compositions described herein can further comprise introducing one or more of Oct-3/4, a member of the Sox family, a member of the Klf family, and a member of the Myc family to a somatic cell. In one embodiment, the methods and compositions described herein further comprise introducing one or more of each of Oct-4, Sox2, Nanog, c-MYC and Klf4 for reprogramming. As noted above, the exact method used for reprogramming is not necessarily critical to the methods and compositions described herein. However, where cells differentiated from the reprogrammed cells are to be used in, e.g., human therapy, in one embodiment the reprogramming is not effected by a method that alters the genome. Thus, in such embodiments, reprogramming is achieved, e.g., without the use of viral or plasmid vectors.

[0234] The efficiency of reprogramming (i.e., the number of reprogrammed cells) derived from a population of starting cells can be enhanced by the addition of various agents, e.g., small molecules, as shown by Shi et al., Cell-Stem Cell 2:525-528 (2008); Huangfu et al., Nature Biotechnology 26(7):795-797 (2008) and Marson et al., Cell-Stem Cell 3: 132-135 (2008). Thus, an agent or combination of agents that enhance the efficiency or rate of induced pluripotent stem cell production can be used in the production of patient-specific or disease-specific iPSCs. Some non-limiting examples of agents that enhance reprogramming efficiency include soluble Wnt, Wnt conditioned media, BIX-01294 (a G9a histone methyltransferase), PD0325901 (a MEK inhibitor), DNA methyltransferase inhibitors, histone deacetylase (HDAC) inhibitors, valproic acid, 5′-azacytidine, dexamethasone, suberoylanilide, hydroxamic acid (SAHA), vitamin C, and trichostatin (TSA), among others.

[0235] Other non-limiting examples of reprogramming enhancing agents include: Suberoylanilide Hydroxamic Acid (SAHA (e.g., MK0683, vorinostat) and other hydroxamic acids), BML-210, Depudecin (e.g., (−)-Depudecin), HC Toxin, Nullscript (4-(1,3-Dioxo-1H,3H-benzo[de]isoquinolin-2-yl)-N-hydroxybutanamide), Phenylbutyrate (e.g., sodium phenylbutyrate) and Valproic Acid ((VP A) and other short chain fatty acids), Scriptaid, Suramin Sodium, Trichostatin A (TSA), APHA Compound 8, Apicidin, Sodium Butyrate, pivaloyloxymethyl butyrate (Pivanex, AN-9), Trapoxin B, Chlamydocin, Depsipeptide (also known as FR901228 or FK228), benzamides (e.g., CI-994 (e.g., N-acetyl dinaline) and MS-27-275), MGCD0103, NVP-LAQ-824, CBHA (m-carboxycinnaminic acid bishydroxamic acid), JNJ16241199, Tubacin, A-161906, proxamide, oxamflatin, 3-CI-UCHA (e.g., 6-(3-chlorophenylureido)caproic hydroxamic acid), AOE (2-amino-8-oxo-9, 10-epoxydecanoic acid), CHAP31 and CHAP 50. Other reprogramming enhancing agents include, for example, dominant negative forms of the HDACs (e.g., catalytically inactive forms), siRNA inhibitors of the HDACs, and antibodies that specifically bind to the HDACs. Such inhibitors are available, e.g., from BIOMOL International, Fukasawa, Merck Biosciences, Novartis, Gloucester Pharmaceuticals, Titan Pharmaceuticals, MethylGene, and Sigma Aldrich.

[0236] To confirm the induction of pluripotent stem cells for use with the methods described herein, isolated clones can be tested for the expression of a stem cell marker. Such expression in a cell derived from a somatic cell identifies the cells as induced pluripotent stem cells. Stem cell markers are selected from the non-limiting group including SSEA3, SSEA4, CD9, Nanog, Fbxl5, Ecatl, Esgl, Eras, Gdf3, Fgf4, Cripto, Daxl, Zpf296, Slc2a3, Rexl, Utfl, and Natl. In one embodiment, a cell that expresses Oct4 or Nanog is identified as pluripotent. Methods for detecting the expression of such markers can include, for example, RT-PCR and immunological methods that detect the presence of the encoded polypeptides, such as Western blots or flow cytometric analyses. In some embodiments, detection involves not only RT-PCR, but also includes detection of protein markers. Intracellular markers may be best identified via RT-PCR, or protein detection methods such as immunocytochemistry, while cell surface markers are readily identified, e.g., by immunocytochemistry.

[0237] The pluripotent stem cell character of isolated cells can be confirmed by tests evaluating the ability of the iPSCs to differentiate into cells of each of the three germ layers. As one example, teratoma formation in nude mice can be used to evaluate the pluripotent character of the isolated clones. The cells are introduced into nude mice and histology and/or immunohistochemistry is performed on a tumor arising from the cells. The growth of a tumor comprising cells from all three germ layers, for example, further indicates that the cells are pluripotent stem cells.

[0238] Neural Cells

[0239] The human nervous system is estimated to have approximately 360 billion non-neural glial cells and 90 billion nerve cells. There are hundreds of different types of neurons based on morphology alone. Often, neurons that look similar have strikingly different properties. For example, they utilize and respond to different neurotransmitters.

[0240] Neural stem cells (NSCs) are self-renewing, multipotent cells that generate the main phenotype of the nervous system. Stem cells are characterized by their capability to differentiate into multiple cell types via exogenous stimuli from their environment. They undergo asymmetric cell division into two daughter cells, one non-specialized and one specialized. NSCs primarily differentiate into neurons, astrocytes, and oligodendrocytes.

[0241] The typical neuron transmits electrical signals from one cell to another. Neurons contain a cell body, dendrite, axon hillock, axon, nerve ending and neuromuscular junction. Neurons may be named according to shape or the nature of the dendritic tree.

[0242] The most numerous cellular constituents of the central nervous system are the non-neuronal, neuroglial (“nerve glue”) cells that occupy the space between neurons. It has been estimated that there are roughly 360 billion glial cells, which comprise 80-90% of the cells in the CNS. Neuroglia differ from neurons in several general ways in that they: do not form synapses, have essentially only one type of process, retain the ability to divide, and are less electrically excitable than neurons. Neuroglia are classified based on size and shape of their neucleus and distinguished from neurons, at the light microscopic level. Neuroglia are divided into two major categories based on size, the macroglia and the microglia. The macroglia are of ectodermal origin and consist of astrocytes, oligodendrocytes and ependymal cells. Microglia cells are probably of mesodermal origin.

[0243] Creating Patient Specific iPSCs

[0244] One step of the ex vivo methods of the invention involves creating a patient specific i PS cell, patient specific iPS cells, or a patient specific iPS cell line. There are many established methods in the art for creating patient specific iPS cells, as described in Takahashi and Yamanaka 2006; Takahashi, Tanabe et al. 2007. For example, the creating step comprises: a) isolating a somatic cell, such as a skin cell or fibroblast, from the patient; and b) introducing a set of pluripotency-associated genes into the somatic cell in order to induce the cell to become a pluripotent stem cell. In some embodiments, the set of pluripotency-associated genes is one or more of the genes selected from the group consisting of OCT4, SOX2, KLF4, Lin28, NANOG, and cMYC.

[0245] Performing a Biopsy of the Patient's Bone Marrow

[0246] A biopsy is a sample of tissue or fluid taken from the body. There are many different kinds of biopsies. Nearly all of them involve using a sharp tool to remove a small amount of tissue. If the biopsy will be on the skin or other sensitive area, numbing medicine is applied first. A biopsy may be performed according to any of the known methods in the art. For example, in a bone marrow biopsy, a large needle is used to enter the pelvis bone to collect bone marrow.

[0247] Isolating a White Blood Cell

[0248] White blood cells may be isolated according to any method known in the art. For example, white blood cells may be isolated from a liquid sample by centrifugation.

[0249] Isolating a Mesenchymal Stem Cell

[0250] Mesenchymal stem cells may be isolated according to any method known in the art. For example, marrow aspirate is collected into a syringe with heparin. Cells are washed and centrifuged on a Percoll. The cells are cultured in Dulbecco's modified Eagle's medium (DMEM) (low glucose) containing 10% fetal bovine serum (FBS) (Pittinger M F, Mackay A M, Beck S C et al., Science 1999; 284:143-147).

[0251] Treating a Patient with GCSF

[0252] A patient may optionally be treated with granulocyte colony stimulating factor (GCSF) in accordance with any method known in the art. In some embodiments, the GCSF is administered in combination with Plerixaflor.

[0253] Isolating a Hematopoietic Progenitor Cell from a Patient

[0254] A hematopoietic progenitor cell may be isolated from a patient by any method known in the art. CD34+ cells are enriched using CliniMACS® Cell Selection System (Miltenyi Biotec). In some embodiments, CD34+ cells are weakly stimulated in serum-free medium (e.g., CellGrow SCGM media, CellGenix) with cytokines (e.g., SCF, rhTPO, rhFLT3) before genome editing.

[0255] Genome Editing

[0256] Genome editing generally refers to the process of modifying the nucleotide sequence of a genome, preferably in a precise or pre-determined manner. Examples of methods of genome editing described herein include methods of using site-directed nucleases to cut deoxyribonucleic acid (DNA) at precise target locations in the genome, thereby creating double-strand or single-strand DNA breaks at particular locations within the genome. Such breaks can be and regularly are repaired by natural, endogenous cellular processes, such as homology-directed repair (HDR) and non-homologous end-joining (NHEJ), as recently reviewed in Cox et al., Nature Medicine 21(2), 121-31 (2015). NHEJ directly joins the DNA ends resulting from a double-strand break, sometimes with the loss or addition of nucleotide sequence, which may disrupt or enhance gene expression. HDR utilizes a homologous sequence, or donor sequence, as a template for inserting a defined DNA sequence at the break point. The homologous sequence may be in the endogenous genome, such as a sister chromatid. Alternatively, the donor may be an exogenous nucleic acid, such as a plasmid, a single-strand oligonucleotide, a double-stranded oligonucleotide, a duplex oligonucleotide or a virus, that has regions of high homology with the nuclease-cleaved locus, but which may also contain additional sequence or sequence changes including deletions that can be incorporated into the cleaved target locus. A third repair mechanism is microhomology-mediated end joining (MMEJ), also referred to as “Alternative NHEJ”, in which the genetic outcome is similar to NHEJ in that small deletions and insertions can occur at the cleavage site. MMEJ makes use of homologous sequences of a few basepairs flanking the DNA break site to drive a more favored DNA end joining repair outcome, and recent reports have further elucidated the molecular mechanism of this process; see, e.g., Cho and Greenberg, Nature 518, 174-76 (2015); Kent et al., Nature Structural and Molecular Biology, Adv. Online doi:10.1038/nsmb.2961(2015); Mateos-Gomez et al., Nature 518, 254-57 (2015); Ceccaldi et al., Nature 528, 258-62 (2015). In some instances it may be possible to predict likely repair outcomes based on analysis of potential microhomologies at the site of the DNA break.

[0257] Each of these genome editing mechanisms can be used to create desired genomic alterations. A step in the genome editing process is to create one or two DNA breaks, the latter as double-strand breaks or as two single-stranded breaks, in the target locus as close as possible to the site of intended mutation. This can be achieved via the use of site-directed polypeptides, as described and illustrated herein.

[0258] Site-directed polypeptides, such as a DNA endonuclease, can introduce double-strand breaks or single-strand breaks in nucleic acids, e.g., genomic DNA. The double-strand break can stimulate a cell's endogenous DNA-repair pathways (e.g., homology-dependent repair or non-homologous end joining or alternative non-homologous end joining (A-NHEJ) or microhomology-mediated end joining). NHEJ can repair cleaved target nucleic acid without the need for a homologous template. This can sometimes result in small deletions or insertions (indels) in the target nucleic acid at the site of cleavage, and can lead to disruption or alteration of gene expression. HDR can occur when a homologous repair template, or donor, is available. The homologous donor template comprises sequences that are homologous to sequences flanking the target nucleic acid cleavage site. The sister chromatid is generally used by the cell as the repair template. However, for the purposes of genome editing, the repair template is often supplied as an exogenous nucleic acid, such as a plasmid, duplex oligonucleotide, single-strand oligonucleotide, double-stranded oligonucleotide, or viral nucleic acid. With exogenous donor templates, it is common to introduce an additional nucleic acid sequence (such as a transgene) or modification (such as a single or multiple base change or a deletion) between the flanking regions of homology so that the additional or altered nucleic acid sequence also becomes incorporated into the target locus. MMEJ results in a genetic outcome that is similar to NHEJ in that small deletions and insertions can occur at the cleavage site. MMEJ makes use of homologous sequences of a few basepairs flanking the cleavage site to drive a favored end-joining DNA repair outcome. In some instances it may be possible to predict likely repair outcomes based on analysis of potential microhomologies in the nuclease target regions.

[0259] Thus, in some cases, homologous recombination is used to insert an exogenous polynucleotide sequence into the target nucleic acid cleavage site. An exogenous polynucleotide sequence is termed a donor polynucleotide (or donor or donor sequence or polynucleotide donor template) herein. In some embodiments, the donor polynucleotide, a portion of the donor polynucleotide, a copy of the donor polynucleotide, or a portion of a copy of the donor polynucleotide is inserted into the target nucleic acid cleavage site. In some embodiments, the donor polynucleotide is an exogenous polynucleotide sequence, i.e., a sequence that does not naturally occur at the target nucleic acid cleavage site.

[0260] The modifications of the target DNA due to NHEJ and/or HDR can lead to, for example, mutations, deletions, alterations, integrations, gene correction, gene replacement, gene tagging, transgene insertion, nucleotide deletion, gene disruption, translocations and/or gene mutation. The processes of deleting genomic DNA and integrating non-native nucleic acid into genomic DNA are examples of genome editing.

[0261] CRISPR Endonuclease System

[0262] A CRISPR (Clustered Regularly Interspaced Short Palindromic Repeats) genomic locus can be found in the genomes of many prokaryotes (e.g., bacteria and archaea). In prokaryotes, the CRISPR locus encodes products that function as a type of immune system to help defend the prokaryotes against foreign invaders, such as virus and phage. There are three stages of CRISPR locus function: integration of new sequences into the locus, biogenesis of CRISPR RNA (crRNA), and silencing of foreign invader nucleic acid. Five types of CRISPR systems (e.g., Type I, Type II, Type III, Type U, and Type V) have been identified.

[0263] A CRISPR locus includes a number of short repeating sequences referred to as “repeats.” The repeats can form hairpin structures and/or comprise unstructured single-stranded sequences. The repeats usually occur in clusters and frequently diverge between species. The repeats are regularly interspaced with unique intervening sequences referred to as “spacers,” resulting in a repeat-spacer-repeat locus architecture. The spacers are identical to or have high homology with known foreign invader sequences. A spacer-repeat unit encodes a crisprRNA (crRNA), which is processed into a mature form of the spacer-repeat unit. A crRNA comprises a “seed” or spacer sequence that is involved in targeting a target nucleic acid (in the naturally occurring form in prokaryotes, the spacer sequence targets the foreign invader nucleic acid). A spacer sequence is located at the 5′ or 3′ end of the crRNA.

[0264] A CRISPR locus also comprises polynucleotide sequences encoding CRISPR Associated (Cas) genes. Cas genes encode endonucleases involved in the biogenesis and the interference stages of crRNA function in prokaryotes. Some Cas genes comprise homologous secondary and/or tertiary structures.

[0265] Type II CRISPR Systems

[0266] crRNA biogenesis in a Type II CRISPR system in nature requires a trans-activating CRISPR RNA (tracrRNA). The tracrRNA is modified by endogenous RNaseIII, and then hybridizes to a crRNA repeat in the pre-crRNA array. Endogenous RNaseIII is recruited to cleave the pre-crRNA. Cleaved crRNAs are subjected to exoribonuclease trimming to produce the mature crRNA form (e.g., 5′ trimming). The tracrRNA remains hybridized to the crRNA, and the tracrRNA and the crRNA associate with a site-directed polypeptide (e.g., Cas9). The crRNA of the crRNA-tracrRNA-Cas9 complex guides the complex to a target nucleic acid to which the crRNA can hybridize. Hybridization of the crRNA to the target nucleic acid activates Cas9 for targeted nucleic acid cleavage. The target nucleic acid in a Type II CRISPR system is referred to as a protospacer adjacent motif (PAM). In nature, the PAM is essential to facilitate binding of a site-directed polypeptide (e.g., Cas9) to the target nucleic acid. Type II systems (also referred to as Nmeni or CASS4) are further subdivided into Type II-A (CASS4) and II-B (CASS4a). Jinek et al., Science, 337(6096):816-821 (2012) showed that the CRISPR/Cas9 system is useful for RNA-programmable genome editing, and international patent application publication number WO2013/176772 provides numerous examples and applications of the CRISPR/Cas endonuclease system for site-specific gene editing.

[0267] Type V CRISPR Systems

[0268] Type V CRISPR systems have several important differences from Type II systems. For example, Cpf1 is a single RNA-guided endonuclease that, in contrast to Type II systems, lacks tracrRNA. In fact, Cpf1-associated CRISPR arrays are processed into mature crRNAS without the requirement of an additional trans-activating tracrRNA. The Type V CRISPR array is processed into short mature crRNAs of 42-44 nucleotides in length, with each mature crRNA beginning with 19 nucleotides of direct repeat followed by 23-25 nucleotides of spacer sequence. In contrast, mature crRNAs in Type II systems start with 20-24 nucleotides of spacer sequence followed by about 22 nucleotides of direct repeat. Also, Cpf1 utilizes a T-rich protospacer-adjacent motif such that Cpf1-crRNA complexes efficiently cleave target DNA preceded by a short T-rich PAM, which is in contrast to the G-rich PAM following the target DNA for Type II systems. Thus, Type V systems cleave at a point that is distant from the PAM, while Type II systems cleave at a point that is adjacent to the PAM. In addition, in contrast to Type II systems, Cpf1 cleaves DNA via a staggered DNA double-stranded break with a 4 or 5 nucleotide 5′ overhang. Type II systems cleave via a blunt double-stranded break. Similar to Type II systems, Cpf1 contains a predicted RuvC-like endonuclease domain, but lacks a second HNH endonuclease domain, which is in contrast to Type II systems.

[0269] Cas Genes/Polypeptides and Protospacer Adjacent Motifs

[0270] Exemplary CRISPR/Cas polypeptides include the Cas9 polypeptides in FIG. 1 of Fonfara et al., Nucleic Acids Research, 42: 2577-2590 (2014). The CRISPR/Cas gene naming system has undergone extensive rewriting since the Cas genes were discovered. FIG. 5 of Fonfara, supra, provides PAM sequences for the Cas9 polypeptides from various species.

[0271] Site-Directed Polypeptides

[0272] A site-directed polypeptide is a nuclease used in genome editing to cleave DNA. The site-directed may be administered to a cell or a patient as either: one or more polypeptides, or one or more mRNAs encoding the polypeptide.

[0273] In the context of a CRISPR/Cas or CRISPR/Cpf1 system, the site-directed polypeptide can bind to a guide RNA that, in turn, specifies the site in the target DNA to which the polypeptide is directed. In embodiments of CRISPR/Cas or CRISPR/Cpf1 systems herein, the site-directed polypeptide is an endonuclease, such as a DNA endonuclease.

[0274] In some embodiments, a site-directed polypeptide comprises a plurality of nucleic acid-cleaving (i.e., nuclease) domains. Two or more nucleic acid-cleaving domains can be linked together via a linker. In some embodiments, the linker comprises a flexible linker. Linkers may comprise 1, 2, 3, 4, 5, 6, 7, 8, 9, 10, 11, 12, 13, 14, 15, 16, 17, 18, 19, 20, 21, 22, 23, 24, 25, 30, 35, 40 or more amino acids in length.

[0275] Naturally-occurring wild-type Cas9 enzymes comprise two nuclease domains, a HNH nuclease domain and a RuvC domain. Herein, the “Cas9” refers to both naturally-occurring and recombinant Cas9s. Cas9 enzymes contemplated herein comprises a HNH or HNH-like nuclease domain, and/or a RuvC or RuvC-like nuclease domain.

[0276] HNH or HNH-like domains comprise a McrA-like fold. HNH or HNH-like domains comprises two antiparallel p-strands and an α-helix. HNH or HNH-like domains comprises a metal binding site (e.g., a divalent cation binding site). HNH or HNH-like domains can cleave one strand of a target nucleic acid (e.g., the complementary strand of the crRNA targeted strand).

[0277] RuvC or RuvC-like domains comprise an RNaseH or RNaseH-like fold. RuvC/RNaseH domains are involved in a diverse set of nucleic acid-based functions including acting on both RNA and DNA. The RNaseH domain comprises 5β-strands surrounded by a plurality of a-helices. RuvC/RNaseH or RuvC/RNaseH-like domains comprise a metal binding site (e.g., a divalent cation binding site). RuvC/RNaseH or RuvC/RNaseH-like domains can cleave one strand of a target nucleic acid (e.g., the non-complementary strand of a double-stranded target DNA).

[0278] Site-directed polypeptides can introduce double-strand breaks or single-strand breaks in nucleic acids, e.g., genomic DNA. The double-strand break can stimulate a cell's endogenous DNA-repair pathways (e.g., homology-dependent repair (HDR) or non-homologous end joining (NHEJ) or alternative non-homologous end joining (A-NHEJ) or microhomology-mediated end joining (MMEJ)). NHEJ can repair cleaved target nucleic acid without the need for a homologous template. This can sometimes result in small deletions or insertions (indels) in the target nucleic acid at the site of cleavage, and can lead to disruption or alteration of gene expression. HDR can occur when a homologous repair template, or donor, is available. The homologous donor template comprises sequences that are homologous to sequences flanking the target nucleic acid cleavage site. The sister chromatid is generally used by the cell as the repair template. However, for the purposes of genome editing, the repair template is often supplied as an exogenous nucleic acid, such as a plasmid, duplex oligonucleotide, single-strand oligonucleotide or viral nucleic acid. With exogenous donor templates, it is common to introduce an additional nucleic acid sequence (such as a transgene) or modification (such as a single or multiple base change or a deletion) between the flanking regions of homology so that the additional or altered nucleic acid sequence also becomes incorporated into the target locus. MMEJ results in a genetic outcome that is similar to NHEJ in that small deletions and insertions can occur at the cleavage site. MMEJ makes use of homologous sequences of a few basepairs flanking the cleavage site to drive a favored end-joining DNA repair outcome. In some instances it may be possible to predict likely repair outcomes based on analysis of potential microhomologies in the nuclease target regions.

[0279] Thus, in some cases, homologous recombination is used to insert an exogenous polynucleotide sequence into the target nucleic acid cleavage site. An exogenous polynucleotide sequence is termed a donor polynucleotide (or donor or donor sequence) herein. In some embodiments, the donor polynucleotide, a portion of the donor polynucleotide, a copy of the donor polynucleotide, or a portion of a copy of the donor polynucleotide is inserted into the target nucleic acid cleavage site. In some embodiments, the donor polynucleotide is an exogenous polynucleotide sequence, i.e., a sequence that does not naturally occur at the target nucleic acid cleavage site.

[0280] The modifications of the target DNA due to NHEJ and/or HDR can lead to, for example, mutations, deletions, alterations, integrations, gene correction, gene replacement, gene tagging, transgene insertion, nucleotide deletion, gene disruption, translocations and/or gene mutation. The processes of deleting genomic DNA and integrating non-native nucleic acid into genomic DNA are examples of genome editing.

[0281] In some embodiments, the site-directed polypeptide comprises an amino acid sequence having at least 10%, at least 15%, at least 20%, at least 30%, at least 40%, at least 50%, at least 60%, at least 70%, at least 75%, at least 80%, at least 85%, at least 90%, at least 95%, at least 99%, or 100% amino acid sequence identity to a wild-type exemplary site-directed polypeptide [e.g., Cas9 from S. pyogenes, US2014/0068797 Sequence ID No. 8 or Sapranauskas et al., Nucleic Acids Res, 39(21): 9275-9282 (2011)], and various other site-directed polypeptides).

[0282] In some embodiments, the site-directed polypeptide comprises an amino acid sequence having at least 10%, at least 15%, at least 20%, at least 30%, at least 40%, at least 50%, at least 60%, at least 70%, at least 75%, at least 80%, at least 85%, at least 90%, at least 95%, at least 99%, or 100% amino acid sequence identity to the nuclease domain of a wild-type exemplary site-directed polypeptide (e.g., Cas9 from S. pyogenes, supra).

[0283] In some embodiments, a site-directed polypeptide comprises at least 70, 75, 80, 85, 90, 95, 97, 99, or 100% identity to a wild-type site-directed polypeptide (e.g., Cas9 from S. pyogenes, supra) over 10 contiguous amino acids. In some embodiments, a site-directed polypeptide comprises at most: 70, 75, 80, 85, 90, 95, 97, 99, or 100% identity to a wild-type site-directed polypeptide (e.g., Cas9 from S. pyogenes, supra) over 10 contiguous amino acids. In some embodiments, a site-directed polypeptide comprises at least: 70, 75, 80, 85, 90, 95, 97, 99, or 100% identity to a wild-type site-directed polypeptide (e.g., Cas9 from S. pyogenes, supra) over 10 contiguous amino acids in a HNH nuclease domain of the site-directed polypeptide. In some embodiments, a site-directed polypeptide comprises at most: 70, 75, 80, 85, 90, 95, 97, 99, or 100% identity to a wild-type site-directed polypeptide (e.g., Cas9 from S. pyogenes, supra) over 10 contiguous amino acids in a HNH nuclease domain of the site-directed polypeptide. In some embodiments, a site-directed polypeptide comprises at least: 70, 75, 80, 85, 90, 95, 97, 99, or 100% identity to a wild-type site-directed polypeptide (e.g., Cas9 from S. pyogenes, supra) over 10 contiguous amino acids in a RuvC nuclease domain of the site-directed polypeptide. In some embodiments, a site-directed polypeptide comprises at most: 70, 75, 80, 85, 90, 95, 97, 99, or 100% identity to a wild-type site-directed polypeptide (e.g., Cas9 from S. pyogenes, supra) over 10 contiguous amino acids in a RuvC nuclease domain of the site-directed polypeptide.

[0284] In some embodiments, the site-directed polypeptide comprises a modified form of a wild-type exemplary site-directed polypeptide. The modified form of the wild-type exemplary site-directed polypeptide comprises a mutation that reduces the nucleic acid-cleaving activity of the site-directed polypeptide. In some embodiments, the modified form of the wild-type exemplary site-directed polypeptide has less than 90%, less than 80%, less than 70%, less than 60%, less than 50%, less than 40%, less than 30%, less than 20%, less than 10%, less than 5%, or less than 1% of the nucleic acid-cleaving activity of the wild-type exemplary site-directed polypeptide (e.g., Cas9 from S. pyogenes, supra). The modified form of the site-directed polypeptide can have no substantial nucleic acid-cleaving activity. When a site-directed polypeptide is a modified form that has no substantial nucleic acid-cleaving activity, it is referred to herein as “enzymatically inactive.”

[0285] In some embodiments, the modified form of the site-directed polypeptide comprises a mutation such that it can induce a single-strand break (SSB) on a target nucleic acid (e.g., by cutting only one of the sugar-phosphate backbones of a double-strand target nucleic acid). In some embodiments, the mutation results in less than 90%, less than 80%, less than 70%, less than 60%, less than 50%, less than 40%, less than 30%, less than 20%, less than 10%, less than 5%, or less than 1% of the nucleic acid-cleaving activity in one or more of the plurality of nucleic acid-cleaving domains of the wild-type site directed polypeptide (e.g., Cas9 from S. pyogenes, supra). In some embodiments, the mutation results in one or more of the plurality of nucleic acid-cleaving domains retaining the ability to cleave the complementary strand of the target nucleic acid, but reducing its ability to cleave the non-complementary strand of the target nucleic acid. In some embodiments, the mutation results in one or more of the plurality of nucleic acid-cleaving domains retaining the ability to cleave the non-complementary strand of the target nucleic acid, but reducing its ability to cleave the complementary strand of the target nucleic acid. For example, residues in the wild-type exemplary S. pyogenes Cas9 polypeptide, such as Asp10, His840, Asn854 and Asn856, are mutated to inactivate one or more of the plurality of nucleic acid-cleaving domains (e.g., nuclease domains). In some embodiments, the residues to be mutated correspond to residues Asp10, His840, Asn854 and Asn856 in the wild-type exemplary S. pyogenes Cas9 polypeptide (e.g., as determined by sequence and/or structural alignment). Non-limiting examples of mutations include D10A, H840A, N854A or N856A. One skilled in the art will recognize that mutations other than alanine substitutions are suitable.

[0286] In some embodiments, a D10A mutation is combined with one or more of H840A, N854A, or N856A mutations to produce a site-directed polypeptide substantially lacking DNA cleavage activity. In some embodiments, a H840A mutation is combined with one or more of D10A, N854A, or N856A mutations to produce a site-directed polypeptide substantially lacking DNA cleavage activity. In some embodiments, a N854A mutation is combined with one or more of H840A, D10A, or N856A mutations to produce a site-directed polypeptide substantially lacking DNA cleavage activity. In some embodiments, a N856A mutation is combined with one or more of H840A, N854A, or D10A mutations to produce a site-directed polypeptide substantially lacking DNA cleavage activity. Site-directed polypeptides that comprise one substantially inactive nuclease domain are referred to as “nickases”.

[0287] Nickase variants of RNA-guided endonucleases, for example Cas9, can be used to increase the specificity of CRISPR-mediated genome editing. Wild type Cas9 is typically guided by a single guide RNA designed to hybridize with a specified ˜20 nucleotide sequence in the target sequence (such as an endogenous genomic locus). However, several mismatches can be tolerated between the guide RNA and the target locus, effectively reducing the length of required homology in the target site to, for example, as little as 13 nt of homology, and thereby resulting in elevated potential for binding and double-strand nucleic acid cleavage by the CRISPR/Cas9 complex elsewhere in the target genome—also known as off-target cleavage. Because nickase variants of Cas9 each only cut one strand, in order to create a double-strand break it is necessary for a pair of nickases to bind in close proximity and on opposite strands of the target nucleic acid, thereby creating a pair of nicks, which is the equivalent of a double-strand break. This requires that two separate guide RNAs—one for each nickase—must bind in close proximity and on opposite strands of the target nucleic acid. This requirement essentially doubles the minimum length of homology needed for the double-strand break to occur, thereby reducing the likelihood that a double-strand cleavage event will occur elsewhere in the genome, where the two guide RNA sites—if they exist—are unlikely to be sufficiently close to each other to enable the double-strand break to form. As described in the art, nickases can also be used to promote HDR versus NHEJ. HDR can be used to introduce selected changes into Target Sites in the genome through the use of specific donor sequences that effectively mediate the desired changes. Descriptions of various CRISPR/Cas systems for use in gene editing can be found, e.g., in international patent application publication number WO2013/176772, and in Nature Biotechnology 32, 347-355 (2014), and references cited therein.

[0288] Mutations contemplated include substitutions, additions, and deletions, or any combination thereof. In some embodiments, the mutation converts the mutated amino acid to alanine. In some embodiments, the mutation converts the mutated amino acid to another amino acid (e.g., glycine, serine, threonine, cysteine, valine, leucine, isoleucine, methionine, proline, phenylalanine, tyrosine, tryptophan, aspartic acid, glutamic acid, asparagines, glutamine, histidine, lysine, or arginine). In some embodiments, the mutation converts the mutated amino acid to a non-natural amino acid (e.g., selenomethionine). In some embodiments, the mutation converts the mutated amino acid to amino acid mimics (e.g., phosphomimics). In some embodiments, the mutation is a conservative mutation. For example, the mutation can convert the mutated amino acid to amino acids that resemble the size, shape, charge, polarity, conformation, and/or rotamers of the mutated amino acids (e.g., cysteine/serine mutation, lysine/asparagine mutation, histidine/phenylalanine mutation). In some embodiments, the mutation causes a shift in reading frame and/or the creation of a premature stop codon. In some embodiments, mutations cause changes to regulatory regions of genes or loci that affect expression of one or more genes.

[0289] In some embodiments, the site-directed polypeptide (e.g., variant, mutated, enzymatically inactive and/or conditionally enzymatically inactive site-directed polypeptide) targets nucleic acid. In some embodiments, the site-directed polypeptide (e.g., variant, mutated, enzymatically inactive and/or conditionally enzymatically inactive endoribonuclease) targets RNA. In some embodiments, the site-directed polypeptide (e.g., variant, mutated, enzymatically inactive and/or conditionally enzymatically inactive endoribonuclease) targets DNA.

[0290] In some embodiments, the site-directed polypeptide comprises one or more non-native sequences (e.g., the site-directed polypeptide is a fusion protein).

[0291] In some embodiments, the site-directed polypeptide comprises an amino acid sequence comprising at least 15% amino acid identity to a Cas9 from a bacterium (e.g., S. pyogenes ), a nucleic acid binding domain, and two nucleic acid cleaving domains (i.e., a HNH domain and a RuvC domain).

[0292] In some embodiments, the site-directed polypeptide comprises an amino acid sequence comprising at least 15% amino acid identity to a Cas9 from a bacterium (e.g., S. pyogenes ), and two nucleic acid cleaving domains (i.e., a HNH domain and a RuvC domain).

[0293] In some embodiments, the site-directed polypeptide comprises an amino acid sequence comprising at least 15% amino acid identity to a Cas9 from a bacterium (e.g., S. pyogenes ), and two nucleic acid cleaving domains, wherein one or both of the nucleic acid cleaving domains comprise at least 50% amino acid identity to a nuclease domain from Cas9 from a bacterium (e.g., S. pyogenes ).

[0294] In some embodiments, the site-directed polypeptide comprises an amino acid sequence comprising at least 15% amino acid identity to a Cas9 from a bacterium (e.g., S. pyogenes ), two nucleic acid cleaving domains (i.e., a HNH domain and a RuvC domain), and non-native sequence (for example, a nuclear localization signal) or a linker linking the site-directed polypeptide to a non-native sequence.

[0295] In some embodiments, the site-directed polypeptide comprises an amino acid sequence comprising at least 15% amino acid identity to a Cas9 from a bacterium (e.g., S. pyogenes ), two nucleic acid cleaving domains (i.e., a HNH domain and a RuvC domain), wherein the site-directed polypeptide comprises a mutation in one or both of the nucleic acid cleaving domains that reduces the cleaving activity of the nuclease domains by at least 50%.

[0296] In some embodiments, the site-directed polypeptide comprises an amino acid sequence comprising at least 15% amino acid identity to a Cas9 from a bacterium (e.g., S. pyogenes ), and two nucleic acid cleaving domains (i.e., a HNH domain and a RuvC domain), wherein one of the nuclease domains comprises mutation of aspartic acid 10, and/or wherein one of the nuclease domains comprises mutation of histidine 840, and wherein the mutation reduces the cleaving activity of the nuclease domain(s) by at least 50%.

[0297] In some embodiments of the invention, the one or more site-directed polypeptides, e.g. DNA endonucleases, include two nickases that together effect one double-strand break at a specific locus in the genome, or four nickases that together effect two double-strand breaks at specific loci in the genome. Alternatively, one site-directed polypeptide, e.g. DNA endonuclease, effects one double-strand break at a specific locus in the genome.

[0298] Genome-Targeting Nucleic Acid

[0299] The present disclosure provides a genome-targeting nucleic acid that can direct the activities of an associated polypeptide (e.g., a site-directed polypeptide) to a specific target sequence within a target nucleic acid. In some embodiments, the genome-targeting nucleic acid is an RNA. A genome-targeting RNA is referred to as a “guide RNA” or “gRNA” herein. A guide RNA comprises at least a spacer sequence that hybridizes to a target nucleic acid sequence of interest, and a CRISPR repeat sequence. In Type II systems, the gRNA also comprises a tracrRNA sequence. In the Type II guide RNA, the CRISPR repeat sequence and tracrRNA sequence hybridize to each other to form a duplex. In the Type V guide RNA, the crRNA forms a duplex. In both systems, the duplex binds a site-directed polypeptide, such that the guide RNA and site-direct polypeptide form a complex. The genome-targeting nucleic acid provides target specificity to the complex by virtue of its association with the site-directed polypeptide. The genome-targeting nucleic acid thus directs the activity of the site-directed polypeptide.

[0300] Exemplary guide RNAs include the spacer sequences in SEQ ID NOs: 1-18807, shown with the genome location of their target sequence and the associated Cas9 cut site, wherein the genome location is based on the GRCh38/hg38 human genome assembly. As is understood by the person of ordinary skill in the art, each guide RNA is designed to include a spacer sequence complementary to its genomic target sequence. For example, each of the spacer sequences in SEQ ID NOs: 1-18807 may be put into a single RNA chimera or a crRNA (along with a corresponding tracrRNA). See Jinek et al., Science, 337, 816-821 (2012) and Deltcheva et al., Nature, 471, 602-607 (2011).

[0301] In some embodiments, the genome-targeting nucleic acid is a double-molecule guide RNA. In some embodiments, the genome-targeting nucleic acid is a single-molecule guide RNA.

[0302] A double-molecule guide RNA comprises two strands of RNA. The first strand comprises in the 5′ to 3′ direction, an optional spacer extension sequence, a spacer sequence and a minimum CRISPR repeat sequence. The second strand comprises a minimum tracrRNA sequence (complementary to the minimum CRISPR repeat sequence), a 3′ tracrRNA sequence and an optional tracrRNA extension sequence.

[0303] A single-molecule guide RNA in a Type II system comprises, in the 5′ to 3′ direction, an optional spacer extension sequence, a spacer sequence, a minimum CRISPR repeat sequence, a single-molecule guide linker, a minimum tracrRNA sequence, a 3′ tracrRNA sequence and an optional tracrRNA extension sequence. The optional tracrRNA extension may comprise elements that contribute additional functionality (e.g., stability) to the guide RNA. The single-molecule guide linker links the minimum CRISPR repeat and the minimum tracrRNA sequence to form a hairpin structure. The optional tracrRNA extension comprises one or more hairpins.

[0304] A single-molecule guide RNA in a Type V system comprises, in the 5′ to 3′ direction, a minimum CRISPR repeat sequence and a spacer sequence.

[0305] By way of illustration, guide RNAs used in the CRISPR/Cas system, or other smaller RNAs can be readily synthesized by chemical means, as illustrated below and described in the art. While chemical synthetic procedures are continually expanding, purifications of such RNAs by procedures such as high performance liquid chromatography (HPLC, which avoids the use of gels such as PAGE) tends to become more challenging as polynucleotide lengths increase significantly beyond a hundred or so nucleotides. One approach used for generating RNAs of greater length is to produce two or more molecules that are ligated together. Much longer RNAs, such as those encoding a Cas9 endonuclease, are more readily generated enzymatically. Various types of RNA modifications can be introduced during or after chemical synthesis and/or enzymatic generation of RNAs, e.g., modifications that enhance stability, reduce the likelihood or degree of innate immune response, and/or enhance other attributes, as described in the art.

[0306] Spacer Extension Sequence

[0307] In some embodiments of genome-targeting nucleic acids, a spacer extension sequence can provide stability and/or provide a location for modifications of a genome-targeting nucleic acid. A spacer extension sequence can modify on- or off-target activity or specificity. In some embodiments, a spacer extension sequence is provided. A spacer extension sequence may have a length of more than 1, 5, 10, 15, 20, 25, 30, 35, 40, 45, 50, 60, 70, 80, 90, 100, 120, 140, 160, 180, 200, 220, 240, 260, 280, 300, 320, 340, 360, 380, 400, 1000, 2000, 3000, 4000, 5000, 6000, or 7000 or more nucleotides. A spacer extension sequence may have a length of less than 1, 5, 10, 15, 20, 25, 30, 35, 40, 45, 50, 60, 70, 80, 90, 100, 120, 140, 160, 180, 200, 220, 240, 260, 280, 300, 320, 340, 360, 380, 400, 1000, 2000, 3000, 4000, 5000, 6000, 7000 or more nucleotides. In some embodiments, a spacer extension sequence is less than 10 nucleotides in length. In some embodiments, a spacer extension sequence is between 10-30 nucleotides in length. In some embodiments, a spacer extension sequence is between 30-70 nucleotides in length.

[0308] In some embodiments, the spacer extension sequence comprises another moiety (e.g., a stability control sequence, an endoribonuclease binding sequence, a ribozyme). In some embodiments, the moiety increases the stability of a nucleic acid targeting nucleic acid. In some embodiments, the moiety is a transcriptional terminator segment (i.e., a transcription termination sequence). In some embodiments, the moiety functions in a eukaryotic cell. In some embodiments, the moiety functions in a prokaryotic cell. In some embodiments, the moiety functions in both eukaryotic and prokaryotic cells. Non-limiting examples of suitable moieties include: a 5′ cap (e.g., a 7-methylguanylate cap (m7 G)), a riboswitch sequence (e.g., to allow for regulated stability and/or regulated accessibility by proteins and protein complexes), a sequence that forms a dsRNA duplex (i.e., a hairpin), a sequence that targets the RNA to a subcellular location (e.g., nucleus, mitochondria, chloroplasts, and the like), a modification or sequence that provides for tracking (e.g., direct conjugation to a fluorescent molecule, conjugation to a moiety that facilitates fluorescent detection, a sequence that allows for fluorescent detection, etc.), and/or a modification or sequence that provides a binding site for proteins (e.g., proteins that act on DNA, including transcriptional activators, transcriptional repressors, DNA methyltransferases, DNA demethylases, histone acetyltransferases, histone deacetylases, and the like).

[0309] Spacer Sequence

[0310] The spacer sequence hybridizes to a sequence in a target nucleic acid of interest. The spacer of a genome-targeting nucleic acid interacts with a target nucleic acid in a sequence-specific manner via hybridization (i.e., base pairing). The nucleotide sequence of the spacer thus varies depending on the sequence of the target nucleic acid of interest.

[0311] In a CRISPR/Cas system herein, the spacer sequence is designed to hybridize to a target nucleic acid that is located 5′ of a PAM of the Cas9 enzyme used in the system. The spacer may perfectly match the target sequence or may have mismatches. Each Cas9 enzyme has a particular PAM sequence that it recognizes in a target DNA. For example, S. pyogenes recognizes in a target nucleic acid a PAM that comprises the sequence 5′-NRG-3′, where R comprises either A or G, where N is any nucleotide and N is immediately 3′ of the target nucleic acid sequence targeted by the spacer sequence.

[0312] In some embodiments, the target nucleic acid sequence comprises 20 nucleotides. In some embodiments, the target nucleic acid comprises more than 20 nucleotides. In some embodiments, the target nucleic acid comprises less than 20 nucleotides. In some embodiments, the target nucleic acid comprises at least: 5, 10, 15, 16, 17, 18, 19, 20, 21, 22, 23, 24, 25, 30 or more nucleotides. In some embodiments, the target nucleic acid comprises at most: 5, 10, 15, 16, 17, 18, 19, 20, 21, 22, 23, 24, 25, 30 or more nucleotides. In some embodiments, the target nucleic acid sequence comprises 20 bases immediately 5′ of the first nucleotide of the PAM. For example, in a sequence comprising 5′-NNNNNNNNNNNNNNNNNNNNNRG-3′ (SEQ ID NO: 18808), the target nucleic acid comprises the sequence that corresponds to the Ns, wherein N is any nucleotide, and the underlined NRG sequence is the S. pyogenes PAM.

[0313] In some embodiments, the spacer sequence that hybridizes to the target nucleic acid has a length of at least about 6 nucleotides (nt). The spacer sequence can be at least about 6 nt, at least about 10 nt, at least about 15 nt, at least about 18 nt, at least about 19 nt, at least about 20 nt, at least about 25 nt, at least about 30 nt, at least about 35 nt or at least about 40 nt, from about 6 nt to about 80 nt, from about 6 nt to about 50 nt, from about 6 nt to about 45 nt, from about 6 nt to about 40 nt, from about 6 nt to about 35 nt, from about 6 nt to about 30 nt, from about 6 nt to about 25 nt, from about 6 nt to about 20 nt, from about 6 nt to about 19 nt, from about 10 nt to about 50 nt, from about 10 nt to about 45 nt, from about 10 nt to about 40 nt, from about 10 nt to about 35 nt, from about 10 nt to about 30 nt, from about 10 nt to about 25 nt, from about 10 nt to about 20 nt, from about 10 nt to about 19 nt, from about 19 nt to about 25 nt, from about 19 nt to about 30 nt, from about 19 nt to about 35 nt, from about 19 nt to about 40 nt, from about 19 nt to about 45 nt, from about 19 nt to about 50 nt, from about 19 nt to about 60 nt, from about 20 nt to about 25 nt, from about 20 nt to about 30 nt, from about 20 nt to about 35 nt, from about 20 nt to about 40 nt, from about 20 nt to about 45 nt, from about 20 nt to about 50 nt, or from about 20 nt to about 60 nt. In some embodiments, the spacer sequence comprises 20 nucleotides. In some embodiments, the spacer comprises 19 nucleotides.

[0314] In some embodiments, the percent complementarity between the spacer sequence and the target nucleic acid is at least about 30%, at least about 40%, at least about 50%, at least about 60%, at least about 65%, at least about 70%, at least about 75%, at least about 80%, at least about 85%, at least about 90%, at least about 95%, at least about 97%, at least about 98%, at least about 99%, or 100%. In some embodiments, the percent complementarity between the spacer sequence and the target nucleic acid is at most about 30%, at most about 40%, at most about 50%, at most about 60%, at most about 65%, at most about 70%, at most about 75%, at most about 80%, at most about 85%, at most about 90%, at most about 95%, at most about 97%, at most about 98%, at most about 99%, or 100%. In some embodiments, the percent complementarity between the spacer sequence and the target nucleic acid is 100% over the six contiguous 5′-most nucleotides of the target sequence of the complementary strand of the target nucleic acid. In some embodiments, the percent complementarity between the spacer sequence and the target nucleic acid is at least 60% over about 20 contiguous nucleotides. The length of the spacer sequence and the target nucleic acid can differ by 1 to 6 nucleotides, which may be thought of as a bulge or bulges.

[0315] In some embodiments, a spacer sequence is designed or chosen using a computer program. The computer program can use variables, such as predicted melting temperature, secondary structure formation, predicted annealing temperature, sequence identity, genomic context, chromatin accessibility, % GC, frequency of genomic occurrence (e.g., of sequences that are identical or are similar but vary in one or more spots as a result of mismatch, insertion or deletion), methylation status, presence of SNPs, and the like.

[0316] Minimum CRISPR Repeat Sequence

[0317] In some embodiments, a minimum CRISPR repeat sequence is a sequence with at least about 30%, about 40%, about 50%, about 60%, about 65%, about 70%, about 75%, about 80%, about 85%, about 90%, about 95%, or 100% sequence identity to a reference CRISPR repeat sequence (e.g., crRNA from S. pyogenes).

[0318] A minimum CRISPR repeat sequence comprises nucleotides that can hybridize to a minimum tracrRNA sequence in a cell. The minimum CRISPR repeat sequence and a minimum tracrRNA sequence form a duplex, i.e. a base-paired double-stranded structure. Together, the minimum CRISPR repeat sequence and the minimum tracrRNA sequence bind to the site-directed polypeptide. At least a part of the minimum CRISPR repeat sequence hybridizes to the minimum tracrRNA sequence. In some embodiments, at least a part of the minimum CRISPR repeat sequence comprises at least about 30%, about 40%, about 50%, about 60%, about 65%, about 70%, about 75%, about 80%, about 85%, about 90%, about 95%, or 100% complementary to the minimum tracrRNA sequence. In some embodiments, at least a part of the minimum CRISPR repeat sequence comprises at most about 30%, about 40%, about 50%, about 60%, about 65%, about 70%, about 75%, about 80%, about 85%, about 90%, about 95%, or 100% complementary to the minimum tracrRNA sequence.

[0319] The minimum CRISPR repeat sequence can have a length from about 7 nucleotides to about 100 nucleotides. For example, the length of the minimum CRISPR repeat sequence is from about 7 nucleotides (nt) to about 50 nt, from about 7 nt to about 40 nt, from about 7 nt to about 30 nt, from about 7 nt to about 25 nt, from about 7 nt to about 20 nt, from about 7 nt to about 15 nt, from about 8 nt to about 40 nt, from about 8 nt to about 30 nt, from about 8 nt to about 25 nt, from about 8 nt to about 20 nt, from about 8 nt to about 15 nt, from about 15 nt to about 100 nt, from about 15 nt to about 80 nt, from about 15 nt to about 50 nt, from about 15 nt to about 40 nt, from about 15 nt to about 30 nt, or from about 15 nt to about 25 nt. In some embodiments, the minimum CRISPR repeat sequence is approximately 9 nucleotides in length. In some embodiments, the minimum CRISPR repeat sequence is approximately 12 nucleotides in length.

[0320] In some embodiments, the minimum CRISPR repeat sequence is at least about 60% identical to a reference minimum CRISPR repeat sequence (e.g., wild-type crRNA from S. pyogenes ) over a stretch of at least 6, 7, or 8 contiguous nucleotides. For example, the minimum CRISPR repeat sequence is at least about 65% identical, at least about 70% identical, at least about 75% identical, at least about 80% identical, at least about 85% identical, at least about 90% identical, at least about 95% identical, at least about 98% identical, at least about 99% identical or 100% identical to a reference minimum CRISPR repeat sequence over a stretch of at least 6, 7, or 8 contiguous nucleotides.

[0321] Minimum tracrRNA Sequence

[0322] In some embodiments, a minimum tracrRNA sequence is a sequence with at least about 30%, about 40%, about 50%, about 60%, about 65%, about 70%, about 75%, about 80%, about 85%, about 90%, about 95%, or 100% sequence identity to a reference tracrRNA sequence (e.g., wild type tracrRNA from S. pyogenes).

[0323] A minimum tracrRNA sequence comprises nucleotides that hybridize to a minimum CRISPR repeat sequence in a cell. A minimum tracrRNA sequence and a minimum CRISPR repeat sequence form a duplex, i.e. a base-paired double-stranded structure. Together, the minimum tracrRNA sequence and the minimum CRISPR repeat bind to a site-directed polypeptide. At least a part of the minimum tracrRNA sequence can hybridize to the minimum CRISPR repeat sequence. In some embodiments, the minimum tracrRNA sequence is at least about 30%, about 40%, about 50%, about 60%, about 65%, about 70%, about 75%, about 80%, about 85%, about 90%, about 95%, or 100% complementary to the minimum CRISPR repeat sequence.

[0324] The minimum tracrRNA sequence can have a length from about 7 nucleotides to about 100 nucleotides. For example, the minimum tracrRNA sequence can be from about 7 nucleotides (nt) to about 50 nt, from about 7 nt to about 40 nt, from about 7 nt to about 30 nt, from about 7 nt to about 25 nt, from about 7 nt to about 20 nt, from about 7 nt to about 15 nt, from about 8 nt to about 40 nt, from about 8 nt to about 30 nt, from about 8 nt to about 25 nt, from about 8 nt to about 20 nt, from about 8 nt to about 15 nt, from about 15 nt to about 100 nt, from about 15 nt to about 80 nt, from about 15 nt to about 50 nt, from about 15 nt to about 40 nt, from about 15 nt to about 30 nt or from about 15 nt to about 25 nt long. In some embodiments, the minimum tracrRNA sequence is approximately 9 nucleotides in length. In some embodiments, the minimum tracrRNA sequence is approximately 12 nucleotides. In some embodiments, the minimum tracrRNA consists of tracrRNA nt 23-48 described in Jinek et al., supra.

[0325] In some embodiments, the minimum tracrRNA sequence is at least about 60% identical to a reference minimum tracrRNA (e.g., wild type, tracrRNA from S. pyogenes) sequence over a stretch of at least 6, 7, or 8 contiguous nucleotides. For example, the minimum tracrRNA sequence is at least about 65% identical, about 70% identical, about 75% identical, about 80% identical, about 85% identical, about 90% identical, about 95% identical, about 98% identical, about 99% identical or 100% identical to a reference minimum tracrRNA sequence over a stretch of at least 6, 7, or 8 contiguous nucleotides.

[0326] In some embodiments, the duplex between the minimum CRISPR RNA and the minimum tracrRNA comprises a double helix. In some embodiments, the duplex between the minimum CRISPR RNA and the minimum tracrRNA comprises at least about 1, 2, 3, 4, 5, 6, 7, 8, 9, or 10 or more nucleotides. In some embodiments, the duplex between the minimum CRISPR RNA and the minimum tracrRNA comprises at most about 1, 2, 3, 4, 5, 6, 7, 8, 9, or 10 or more nucleotides. In some embodiments, the duplex comprises a mismatch (i.e., the two strands of the duplex are not 100% complementary). In some embodiments, the duplex comprises at least about 1, 2, 3, 4, or 5 or mismatches. In some embodiments, the duplex comprises at most about 1, 2, 3, 4, or 5 or mismatches. In some embodiments, the duplex comprises no more than 2 mismatches.

[0327] Bulges

[0328] In some embodiments, there is a “bulge” in the duplex between the minimum CRISPR RNA and the minimum tracrRNA. The bulge is an unpaired region of nucleotides within the duplex. In some embodiments, the bulge contributes to the binding of the duplex to the site-directed polypeptide. A bulge comprises, on one side of the duplex, an unpaired 5′-XXXY-3′ where X is any purine and Y comprises a nucleotide that can form a wobble pair with a nucleotide on the opposite strand, and an unpaired nucleotide region on the other side of the duplex. The number of unpaired nucleotides on the two sides of the duplex can be different.

[0329] In one example, the bulge comprises an unpaired purine (e.g., adenine) on the minimum CRISPR repeat strand of the bulge. In some embodiments, a bulge comprises an unpaired 5′-AAGY-3′ of the minimum tracrRNA sequence strand of the bulge, where Y comprises a nucleotide that can form a wobble pairing with a nucleotide on the minimum CRISPR repeat strand.

[0330] In some embodiments, a bulge on the minimum CRISPR repeat side of the duplex comprises at least 1, 2, 3, 4, or 5 or more unpaired nucleotides. In some embodiments, a bulge on the minimum CRISPR repeat side of the duplex comprises at most 1, 2, 3, 4, or 5 or more unpaired nucleotides. In some embodiments, a bulge on the minimum CRISPR repeat side of the duplex comprises 1 unpaired nucleotide.

[0331] In some embodiments, a bulge on the minimum tracrRNA sequence side of the duplex comprises at least 1, 2, 3, 4, 5, 6, 7, 8, 9, or 10 or more unpaired nucleotides. In some embodiments, a bulge on the minimum tracrRNA sequence side of the duplex comprises at most 1, 2, 3, 4, 5, 6, 7, 8, 9, or 10 or more unpaired nucleotides. In some embodiments, a bulge on a second side of the duplex (e.g., the minimum tracrRNA sequence side of the duplex) comprises 4 unpaired nucleotides.

[0332] In some embodiments, a bulge comprises at least one wobble pairing. In some embodiments, a bulge comprises at most one wobble pairing. In some embodiments, a bulge comprises at least one purine nucleotide. In some embodiments, a bulge comprises at least 3 purine nucleotides. In some embodiments, a bulge sequence comprises at least 5 purine nucleotides. In some embodiments, a bulge sequence comprises at least one guanine nucleotide. In some embodiments, a bulge sequence comprises at least one adenine nucleotide.

[0333] Hairpins

[0334] In various embodiments, one or more hairpins are located 3′ to the minimum tracrRNA in the 3′ tracrRNA sequence.

[0335] In some embodiments, the hairpin starts at least about 1, 2, 3, 4, 5, 6, 7, 8, 9, 10, 15, or 20 or more nucleotides 3′ from the last paired nucleotide in the minimum CRISPR repeat and minimum tracrRNA sequence duplex. In some embodiments, the hairpin can start at most about 1, 2, 3, 4, 5, 6, 7, 8, 9 or 10 or more nucleotides 3′ of the last paired nucleotide in the minimum CRISPR repeat and minimum tracrRNA sequence duplex.

[0336] In some embodiments, a hairpin comprises at least about 1, 2, 3, 4, 5, 6, 7, 8, 9, 10, 15, or 20 or more consecutive nucleotides. In some embodiments, a hairpin comprises at most about 1, 2, 3, 4, 5, 6, 7, 8, 9, 10, 15, or more consecutive nucleotides.

[0337] In some embodiments, a hairpin comprises a CC dinucleotide (i.e., two consecutive cytosine nucleotides).

[0338] In some embodiments, a hairpin comprises duplexed nucleotides (e.g., nucleotides in a hairpin, hybridized together). For example, a hairpin comprises a CC dinucleotide that is hybridized to a GG dinucleotide in a hairpin duplex of the 3′ tracrRNA sequence.

[0339] One or more of the hairpins can interact with guide RNA-interacting regions of a site-directed polypeptide.

[0340] In some embodiments, there are two or more hairpins, and in some embodiments there are three or more hairpins.

[0341] 3′ tracrRNA Sequence

[0342] In some embodiments, a 3′ tracrRNA sequence comprises a sequence with at least about 30%, about 40%, about 50%, about 60%, about 65%, about 70%, about 75%, about 80%, about 85%, about 90%, about 95%, or 100% sequence identity to a reference tracrRNA sequence (e.g., a tracrRNA from S. pyogenes ). In some embodiments, the 3′ tracrRNA sequence has a length from about 6 nucleotides to about 100 nucleotides. For example, the 3′ tracrRNA sequence can have a length from about 6 nucleotides (nt) to about 50 nt, from about 6 nt to about 40 nt, from about 6 nt to about 30 nt, from about 6 nt to about 25 nt, from about 6 nt to about 20 nt, from about 6 nt to about 15 nt, from about 8 nt to about 40 nt, from about 8 nt to about 30 nt, from about 8 nt to about 25 nt, from about 8 nt to about 20 nt, from about 8 nt to about 15 nt, from about 15 nt to about 100 nt, from about 15 nt to about 80 nt, from about 15 nt to about 50 nt, from about 15 nt to about 40 nt, from about 15 nt to about 30 nt, or from about 15 nt to about 25 nt. In some embodiments, the 3′ tracrRNA sequence has a length of approximately 14 nucleotides.

[0343] In some embodiments, the 3′ tracrRNA sequence is at least about 60% identical to a reference 3′ tracrRNA sequence (e.g., wild type 3′ tracrRNA sequence from S. pyogenes ) over a stretch of at least 6, 7, or 8 contiguous nucleotides. For example, the 3′ tracrRNA sequence is at least about 60% identical, about 65% identical, about 70% identical, about 75% identical, about 80% identical, about 85% identical, about 90% identical, about 95% identical, about 98% identical, about 99% identical, or 100% identical, to a reference 3′ tracrRNA sequence (e.g., wild type 3′ tracrRNA sequence from S. pyogenes ) over a stretch of at least 6, 7, or 8 contiguous nucleotides.

[0344] In some embodiments, a 3′ tracrRNA sequence comprises more than one duplexed region (e.g., hairpin, hybridized region). In some embodiments, a 3′ tracrRNA sequence comprises two duplexed regions.

[0345] In some embodiments, the 3′ tracrRNA sequence comprises a stem loop structure. In some embodiments, a stem loop structure in the 3′ tracrRNA comprises at least 1, 2, 3, 4, 5, 6, 7, 8, 9, 10, 15 or 20 or more nucleotides. In some embodiments, the stem loop structure in the 3′ tracrRNA comprises at most 1, 2, 3, 4, 5, 6, 7, 8, 9 or 10 or more nucleotides. In some embodiments, the stem loop structure comprises a functional moiety. For example, the stem loop structure may comprise an aptamer, a ribozyme, a protein-interacting hairpin, a CRISPR array, an intron, or an exon. In some embodiments, the stem loop structure comprises at least about 1, 2, 3, 4, or 5 or more functional moieties. In some embodiments, the stem loop structure comprises at most about 1, 2, 3, 4, or 5 or more functional moieties. In some embodiments, the hairpin in the 3′ tracrRNA sequence comprises a P-domain. In some embodiments, the P-domain comprises a double-stranded region in the hairpin.

[0346] tracrRNA Extension Sequence

[0347] A tracrRNA extension sequence may be provided whether the tracrRNA is in the context of single-molecule guides or double-molecule guides. In some embodiments, a tracrRNA extension sequence has a length from about 1 nucleotide to about 400 nucleotides. In some embodiments, a tracrRNA extension sequence has a length of more than 1, 5, 10, 15, 20, 25, 30, 35, 40, 45, 50, 60, 70, 80, 90, 100, 120, 140, 160, 180, 200, 220, 240, 260, 280, 300, 320, 340, 360, 380, or 400 nucleotides. In some embodiments, a tracrRNA extension sequence has a length from about 20 to about 5000 or more nucleotides. In some embodiments, a tracrRNA extension sequence has a length of more than 1000 nucleotides. In some embodiments, a tracrRNA extension sequence has a length of less than 1, 5, 10, 15, 20, 25, 30, 35, 40, 45, 50, 60, 70, 80, 90, 100, 120, 140, 160, 180, 200, 220, 240, 260, 280, 300, 320, 340, 360, 380, 400 or more nucleotides. In some embodiments, a tracrRNA extension sequence can have a length of less than 1000 nucleotides. In some embodiments, a tracrRNA extension sequence comprises less than 10 nucleotides in length. In some embodiments, a tracrRNA extension sequence is 10-30 nucleotides in length. In some embodiments, tracrRNA extension sequence is 30-70 nucleotides in length.

[0348] In some embodiments, the tracrRNA extension sequence comprises a functional moiety (e.g., a stability control sequence, ribozyme, endoribonuclease binding sequence). In some embodiments, the functional moiety comprises a transcriptional terminator segment (i.e., a transcription termination sequence). In some embodiments, the functional moiety has a total length from about 10 nucleotides (nt) to about 100 nucleotides, from about 10 nt to about 20 nt, from about 20 nt to about 30 nt, from about 30 nt to about 40 nt, from about 40 nt to about 50 nt, from about 50 nt to about 60 nt, from about 60 nt to about 70 nt, from about 70 nt to about 80 nt, from about 80 nt to about 90 nt, or from about 90 nt to about 100 nt, from about 15 nt to about 80 nt, from about 15 nt to about 50 nt, from about 15 nt to about 40 nt, from about 15 nt to about 30 nt, or from about 15 nt to about 25 nt. In some embodiments, the functional moiety functions in a eukaryotic cell. In some embodiments, the functional moiety functions in a prokaryotic cell. In some embodiments, the functional moiety functions in both eukaryotic and prokaryotic cells.

[0349] Non-limiting examples of suitable tracrRNA extension functional moieties include a 3′ poly-adenylated tail, a riboswitch sequence (e.g., to allow for regulated stability and/or regulated accessibility by proteins and protein complexes), a sequence that forms a dsRNA duplex (i.e., a hairpin), a sequence that targets the RNA to a subcellular location (e.g., nucleus, mitochondria, chloroplasts, and the like), a modification or sequence that provides for tracking (e.g., direct conjugation to a fluorescent molecule, conjugation to a moiety that facilitates fluorescent detection, a sequence that allows for fluorescent detection, etc.), and/or a modification or sequence that provides a binding site for proteins (e.g., proteins that act on DNA, including transcriptional activators, transcriptional repressors, DNA methyltransferases, DNA demethylases, histone acetyltransferases, histone deacetylases, and the like). In some embodiments, a tracrRNA extension sequence comprises a primer binding site or a molecular index (e.g., barcode sequence). In some embodiments, the tracrRNA extension sequence comprises one or more affinity tags.

[0350] Single-Molecule Guide Linker Sequence In some embodiments, the linker sequence of a single-molecule guide nucleic acid has a length from about 3 nucleotides to about 100 nucleotides. In Jinek et al., supra, for example, a simple 4 nucleotide “tetraloop” (-GAAA-) was used, Science, 337(6096):816-821 (2012). An illustrative linker has a length from about 3 nucleotides (nt) to about 90 nt, from about 3 nt to about 80 nt, from about 3 nt to about 70 nt, from about 3 nt to about 60 nt, from about 3 nt to about 50 nt, from about 3 nt to about 40 nt, from about 3 nt to about 30 nt, from about 3 nt to about 20 nt, from about 3 nt to about 10 nt. For example, the linker can have a length from about 3 nt to about 5 nt, from about 5 nt to about 10 nt, from about 10 nt to about 15 nt, from about 15 nt to about 20 nt, from about 20 nt to about 25 nt, from about 25 nt to about 30 nt, from about 30 nt to about 35 nt, from about 35 nt to about 40 nt, from about 40 nt to about 50 nt, from about 50 nt to about 60 nt, from about 60 nt to about 70 nt, from about 70 nt to about 80 nt, from about 80 nt to about 90 nt, or from about 90 nt to about 100 nt. In some embodiments, the linker of a single-molecule guide nucleic acid is between 4 and 40 nucleotides. In some embodiments, a linker is at least about 100, 500, 1000, 1500, 2000, 2500, 3000, 3500, 4000, 4500, 5000, 5500, 6000, 6500, or 7000 or more nucleotides. In some embodiments, a linker is at most about 100, 500, 1000, 1500, 2000, 2500, 3000, 3500, 4000, 4500, 5000, 5500, 6000, 6500, or 7000 or more nucleotides.

[0351] Linkers can comprise any of a variety of sequences, although preferably the linker will not comprise sequences that have extensive regions of homology with other portions of the guide RNA, which might cause intramolecular binding that could interfere with other functional regions of the guide. In Jinek et al., supra, a simple 4 nucleotide sequence -GAAA- was used, Science, 337(6096):816-821 (2012), but numerous other sequences, including longer sequences can likewise be used.

[0352] In some embodiments, the linker sequence comprises a functional moiety. For example, the linker sequence may comprise one or more features, including an aptamer, a ribozyme, a protein-interacting hairpin, a CRISPR array, an intron, or an exon. In some embodiments, the linker sequence comprises at least about 1, 2, 3, 4, or 5 or more functional moieties. In some embodiments, the linker sequence comprises at most about 1, 2, 3, 4, or 5 or more functional moieties.

[0353] Genome Engineering Strategies to Correct Cells by Deletion or Replacement of the Expanded Hexanucleotide Repeat in the C9ORF72 Gene, or by Knocking-In C9ORF72 cDNA into the Locus of the Corresponding Gene or Safe Harbor Site

[0354] A step of the ex vivo methods of the invention involves editing/correcting the patient specific iPS cells using genome engineering. Alternatively, a step of the ex vivo methods of the invention involves editing/correcting the white blood cell, mesenchymal stem cell, or hematopoietic progenitor cell. Likewise, a step of the in vivo methods of the invention involves editing/correcting the cells in an ALS or FTLD patient using genome engineering. Similarly, a step in the cellular methods of the invention involves editing/correcting the C9ORF72 gene in a human cell by genome engineering.

[0355] ALS and/or FTLD patients exhibit an expanded hexanucleotide repeat in the C9ORF72 gene. Therefore, different patients will generally require similar correction strategies. Any CRISPR endonuclease may be used in the methods of the invention, each CRISPR endonuclease having its own associated PAM, which may or may not be disease specific. For example, gRNA spacer sequences for targeting the C9ORF72 gene with a CRISPR/Cas9 endonuclease from S. pyogenes have been identified in SEQ ID NOs: 1-6148. gRNA spacer sequences for targeting the C9ORF72 gene with a CRISPR/Cas9 endonuclease from S. aureus have been identified in SEQ ID NOs: 6149-6892. gRNA spacer sequences for targeting the C9ORF72 gene with a CRISPR/Cas9 endonuclease from S. thermophilus have been identified in SEQ ID NOs: 7760-8097. gRNA spacer sequences for targeting the C9ORF72 gene with a CRISPR/Cas9 endonuclease from T. denticola have been identified in SEQ ID NOs: 8098-8261. gRNA spacer sequences for targeting the C9ORF72 gene with a CRISPR/Cas9 endonuclease from N. meningitides have been identified in SEQ ID NOs: 6893-7759. gRNA spacer sequences for targeting the C9ORF72 gene with a CRISPR/Cpf1 endonuclease from Acidominococcus and Lachnospiraceae have been identified in SEQ ID NOs: 8262-18807. gRNA spacer sequences for targeting, e.g., targeting exon 1-2 of, AAVS1 (PPP1R12C), ALB, Angptl3, ApoC3, ASGR2, CCRS, FIX (F9), Gys2, HGD, Lp(a), Pcsk9, Serpina1, TF, and TTR with a CRISPR/Cas9 endonuclease from S. pyogenes have been identified in Examples 7, 13, 19, 25, 31, 37, 43, 49, 55, 61, 67, 73, 79, 85, and 91, respectively. gRNA spacer sequences for targeting, e.g., targeting exon 1-2 of, AAVS1 (PPP1R12C), ALB, Angptl3, ApoC3, ASGR2, CCR5, FIX (F9), Gys2, HGD, Lp(a), Pcsk9, Serpina1, TF, and TTR with a CRISPR/Cas9 endonuclease from S. aureus have been identified in Examples 8, 14, 20, 26, 32, 38, 44, 50, 56, 62, 68, 74, 80, and 86, respectively. gRNA spacer sequences for targeting, e.g., targeting exon 1-2 of, AAVS1 (PPP1R12C), ALB, Angptl3, ApoC3, ASGR2, CCR5, FIX (F9), Gys2, HGD, Lp(a), Pcsk9, Serpina1, TF, and TTR with a CRISPR/Cas9 endonuclease from S. thermophilus have been identified in Examples 9, 15, 21, 27, 33, 39, 45, 51, 57,63, 69, 75, 81, and 87, respectively. gRNA spacer sequences for targeting, e.g., targeting exon 1-2 of, AAVS1 (PPP1R12C), ALB, Angptl3, ApoC3, ASGR2, CCR5, FIX (F9), Gys2, HGD, Lp(a), Pcsk9, Serpina1, TF, and TTR with a CRISPR/Cas9 endonuclease from T. denticola have been identified in Examples 10, 16, 22, 28, 34, 40, 46, 52, 58, 64, 70, 76, 82, and 88, respectively. gRNA spacer sequences for targeting, e.g., targeting exon 1-2 of, AAVS1 (PPP1R12C), ALB, Angptl3, ApoC3, ASGR2, CCR5, FIX (F9), Gys2, HGD, Lp(a), Pcsk9, Serpina1, TF, and TTR with a CRISPR/Cas9 endonuclease from N. meningitides have been identified in Examples 11, 17, 23, 29, 35, 41, 47, 53, 59, 65, 71, 77, 83, and 89, respectively. gRNA spacer sequences for targeting, e.g., targeting exon 1-2 of, AAVS1 (PPP1 R12C), ALB, Angptl3, ApoC3, ASGR2, CCR5, FIX (F9), Gys2, HGD, Lp(a), Pcsk9, Serpina1, TF, and TTR with a CRISPR/Cas9 endonuclease from Acidominococcus, Lachnospiraceae, and Francisella novicida have been identified in Examples 12, 18, 24, 30, 36, 42, 48, 54, 60, 66, 72, 78, 84, and 90, respectively.

[0356] For example, the mutation can be corrected by the insertions or deletions that arise due to the imprecise NHEJ repair pathway. If the patient's C9ORF72 gene has an inserted or deleted base, a targeted cleavage can result in a NHEJ-mediated insertion or deletion that restores the frame. Missense mutations can also be corrected through NHEJ-mediated correction using one or more guide RNA. The ability or likelihood of the cut(s) to correct the mutation can be designed or evaluated based on the local sequence and micro-homologies. NHEJ can also be used to delete segments of the gene, either directly or by altering splice donor or acceptor sites through cleavage by one gRNA targeting several locations, or several gRNAs. This may be useful if an amino acid, domain or exon contains the mutations and can be removed or inverted, or if the deletion otherwise restored function to the protein. Pairs of guide strands have been used for deletions and corrections of inversions.

[0357] Alternatively, the donor for correction by HDR contains the corrected sequence with small or large flanking homology arms to allow for annealing. HDR is essentially an error-free mechanism that uses a supplied homologous DNA sequence as a template during DSB repair. The rate of homology directed repair (HDR) is a function of the distance between the mutation and the cut site so choosing overlapping or nearest Target Sites is important. Templates can include extra sequences flanked by the homologous regions or can contain a sequence that differs from the genomic sequence, thus allowing sequence editing.

[0358] In addition to correcting mutations by NHEJ or HDR, a range of other options are possible. If there are small or large deletions or multiple mutations, a cDNA can be knocked in that contains the exons affected. A full length cDNA can be knocked into any “safe harbor”, but must use a supplied or other promoter. If this construct is knocked into the correct location, it will have physiological control, similar to the normal gene. Pairs of nucleases can be used to delete mutated gene regions, though a donor would usually have to be provided to restore function. In this case two gRNA would be supplied and one donor sequence.

[0359] Some genome engineering strategies involve replacement of the expanded hexanucleotide repeat with a wild-type or similar number of hexanucleotide repeats in or near the C9ORF72 gene, or deleting the expanded hexanucleotide repeat and knocking-in C9ORF72 cDNA into the locus of the corresponding gene or a safe harbor locus by homology directed repair (HDR), which is also known as homologous recombination (HR). Homology directed repair is one strategy for treating patients that have expanded hexanucleotides in the C9ORF72 gene. These strategies will restore the C9ORF72 gene and completely reverse the diseased state. This strategy will not likely require a more custom approach based on the length of the patient's expanded hexanucleotide repeat. Donor nucleotides for correcting mutations are small (<300 bp). This is advantageous, as HDR efficiencies may be inversely related to the size of the donor molecule. Also, it is expected that the donor templates can fit into size constrained viral vector molecules, e.g., including, by way of non-limiting example, size-constrained adeno-associated virus (AAV) molecules, which have been shown to be an effective means of donor template delivery. Also, it is expected that the donor templates can fit into other size constrained molecules, including, by way of non-limiting example, platelets and/or exosomes or other microvesicles.

[0360] Homology direct repair is a cellular mechanism for repairing double-stranded breaks (DSBs). The most common form is homologous recombination. There are additional pathways for HDR, including single-strand annealing and alternative-HDR. Genome engineering tools allow researchers to manipulate the cellular homologous recombination pathways to create site-specific modifications to the genome. It has been found that cells can repair a double-stranded break using a synthetic donor molecule provided in trans. Therefore, by introducing a double-stranded break near a specific mutation and providing a suitable donor, targeted changes can be made in the genome. Specific cleavage increases the rate of HDR more than 1,000 fold above the rate of 1 in 10⁶ cells receiving a homologous donor alone. The rate of homology directed repair (HDR) at a particular nucleotide is a function of the distance to the cut site, so choosing overlapping or nearest target sites is important. Gene editing offers the advantage over gene addition, as correcting in situ leaves the rest of the genome unperturbed.

[0361] Supplied donors for editing by HDR vary markedly but generally contain the intended sequence with small or large flanking homology arms to allow annealing to the genomic DNA. The homology regions flanking the introduced genetic changes can be 30 bp or smaller, or as large as a multi-kilobase cassette that can contain promoters, cDNAs, etc. Both single-stranded and double-stranded oligonucleotide donors have been used. These oligonucleotides range in size from less than 100 nt to over many kb, though longer ssDNA can also be generated and used. Double-stranded donors are often used, including PCR amplicons, plasmids, and mini-circles. In general, it has been found that an AAV vector is a very effective means of delivery of a donor template, though the packaging limits for individual donors is <5kb. Active transcription of the donor increased HDR three-fold, indicating the inclusion of promoter may increase conversion. Conversely, CpG methylation of the donor decreased gene expression and HDR.

[0362] In addition to wildtype endonucleases, such as Cas9, nickase variants exist that have one or the other nuclease domain inactivated resulting in cutting of only one DNA strand. HDR can be directed from individual Cas nickases or using pairs of nickases that flank the target area. Donors can be single-stranded, nicked, or dsDNA.

[0363] The donor DNA can be supplied with the nuclease or independently by a variety of different methods, for example by transfection, nano-particle, micro-injection, or viral transduction. A range of tethering options have been proposed to increase the availability of the donors for HDR. Examples include attaching the donor to the nuclease, attaching to DNA binding proteins that bind nearby, or attaching to proteins that are involved in DNA end binding or repair.

[0364] The repair pathway choice can be guided by a number of culture conditions, such as those that influence cell cycling, or by targeting of DNA repair and associated proteins. For example, to increase HDR, key NHEJ molecules can be suppressed, such as KU70, KU80 or DNA ligase IV.

[0365] Without a donor present, the ends from a DNA break or ends from different breaks can be joined using the several nonhomologous repair pathways in which the DNA ends are joined with little or no base-pairing at the junction. In addition to canonical NHEJ, there are similar repair mechanisms, such as alt-NHEJ. If there are two breaks, the intervening segment can be deleted or inverted. NHEJ repair pathways can lead to insertions, deletions or mutations at the joints.

[0366] NHEJ was used to insert a 15-kb inducible gene expression cassette into a defined locus in human cell lines after nuclease cleavage. Maresca, M., Lin, V. G., Guo, N. & Yang, Y., Genome Res 23, 539-546 (2013).

[0367] In addition to genome editing by NHEJ or HDR, site-specific gene insertions have been conducted that use both the NHEJ pathway and HR. A combination approach may be applicable in certain settings, possibly including intron/exon borders. NHEJ may prove effective for ligation in the intron, while the error-free HDR may be better suited in the coding region.

[0368] As stated previously, the mutation of the C9ORF72 gene is a hexanucleotide repeat expansion of the six letter string of nucleotides GGGGCC. In healthy individuals, there are few repeats of this hexanucleotide, typically about or fewer than 30. In people with the diseases phenotype, the repeat can occur in the order of hundreds. One or more hexanucleotide repeats may be deleted or corrected in order to restore the gene to a wild-type or similar number of hexanucleotide repeats. Alternatively, all of the hexanucleotide repeats may be deleted. As a further alternative, C9ORF72 cDNA may be knocked-in to the locus of the corresponding gene or knocked-in to a safe harbor site, such as a safe harbor locus selected from the group consisting of: AAVS1(PPP1R12C), ALB, Angptl3, ApoC3, ASGR2, CCR5, FIX (F9), G6PC, Gys2, HGD, Lp(a), Pcsk9, Serpina1,, TF, and TTR. In some embodiments, the methods provide one gRNA or a pair of gRNAs that can be used to facilitate incorporation of a new sequence from a polynucleotide donor template to replace one or more mutations or to knock-in the entire C9ORF72 gene or cDNA.

[0369] Some embodiments of the methods provide gRNA pairs that make a deletion by cutting the gene twice, one gRNA cutting at the 5′ end of one or more hexanucleotide repeats and the other gRNA cutting at the 3′ end of one or more hexanucleotide repeats that facilitates insertion of a new sequence from a polynucleotide donor template to replace the one or more hexanucleotide repeats. The cutting may be accomplished by a pair of DNA endonucleases that each makes a DSB in the genome, or by multiple nickases that together make a DSB in the genome.

[0370] Alternatively, some embodiments of the methods provide one gRNA to make one double-strand cut around one or more hexanucleotide repeats that facilitates insertion of a new sequence from a polynucleotide donor template to replace the one or more hexanucleotide repeats. The double-strand cut may be made by a single DNA endonuclease or multiple nickases that together make a DSB in the genome.

[0371] Illustrative modifications within the C9ORF72 gene include replacements within or proximal to the mutations referred to above, such as within the region of less than 3 kb, less than 2kb, less than 1 kb, less than 0.5 kb upstream or downstream of the specific mutation. Given the relatively wide variations of hexanucleotide repeats in the C9ORF72 gene, it will be appreciated that numerous variations of the replacements referenced above (including without limitation larger as well as smaller deletions), would be expected to result in restoration of the C9ORF72 gene.

[0372] Such variants include replacements that are larger in the 5′ and/or 3′ direction than the specific mutation in question, or smaller in either direction. Accordingly, by “proximal” with respect to specific replacements, it is intended that the DSB locus associated with a desired replacement boundary (also referred to herein as an endpoint) may be within a region that is less than about 3 kb from the reference locus noted. In some embodiments, the DSB locus is more proximal and within 2 kb, within 1 kb, within 0.5 kb, or within 0.1 kb. In the case of small replacement, the desired endpoint is at or “adjacent to” the reference locus, by which it is intended that the endpoint is within 100 bp, within 50 bp, within 25 bp, or less than about 10 bp to 5 bp from the reference locus.

[0373] Embodiments comprising larger or smaller replacements are expected to provide the same benefit, as long as the expanded hexanucleotide repeat is reduced to wild-type levels. It is thus expected that many variations of the replacements described and illustrated herein will be effective for ameliorating ALS and/or FTLD.

[0374] Another genome engineering strategy involves exon deletion. Targeted deletion of specific exons is an attractive strategy for treating a large subset of patients with a single therapeutic cocktail. Deletions can either be single hexanucleotide repeat deletions or multi-hexanucleotide repeat deletions. While multi-repeat deletions, including complete deletion of the expanded hexanucleotide repeat, can reach a larger number of patients, for larger deletions the efficiency of deletion greatly decreases with increased size. Therefore, preferred deletions range from 40 to 10,000 base pairs (bp) in size. For example, deletions may range from 40-100; 100-300; 300-500; 500-1,000; 1,000-2,000; 2,000-3,000; 3,000-5,000; or 5,000-10,000 base pairs in size.

[0375] In order to ensure that the pre-mRNA is properly processed following deletion, it is important to also delete the surrounding splicing signals. Splicing donor and acceptors are generally within 100 base pairs of the neighboring intron. Therefore, in some embodiments, methods provide all gRNAs that cut approximately +/− 100-3100 bp with respect to each exon/intron junction of interest.

[0376] For any of the genome editing strategies, gene editing can be confirmed by sequencing or PCR analysis.

[0377] Target Sequence Selection

[0378] Preferentially, shifts in the location of the 5′ boundary and/or the 3′ boundary relative to particular reference loci are used to facilitate or enhance particular applications of gene editing, which depend in part on the endonuclease system selected for the editing, as further described and illustrated herein.

[0379] In a first aspect of such target sequence selection, many endonuclease systems have rules or criteria that guide the initial selection of potential Target Sites for cleavage, such as the requirement of a PAM sequence motif in a particular position adjacent to the DNA cleavage sites in the case of CRISPR Type II or Type V endonucleases.

[0380] In another aspect of target sequence selection or optimization, the frequency of “off-target” activity for a particular combination of target sequence and gene editing endonuclease (i.e. the frequency of DSBs occurring at sites other than the selected target sequence) is assessed relative to the frequency of on-target activity. In some cases, cells that have been correctly edited at the desired locus may have a selective advantage relative to other cells. Illustrative, but nonlimiting, examples of a selective advantage include the acquisition of attributes such as enhanced rates of replication, persistence, resistance to certain conditions, enhanced rates of successful engraftment or persistence in vivo following introduction into a patient, and other attributes associated with the maintenance or increased numbers or viability of such cells. In other cases, cells that have been correctly edited at the desired locus may be positively selected for by one or more screening methods used to identify, sort or otherwise select for cells that have been correctly edited. Both selective advantage and directed selection methods may take advantage of the phenotype associated with the correction. In some embodiments, cells may be edited two or more times in order to create a second modification that creates a new phenotype that is used to select or purify the intended population of cells. Such a second modification could be created by adding a second gRNA for a selectable or screenable marker. In some embodiments, cells can be correctly edited at the desired locus using a DNA fragment that contains the cDNA and also a selectable marker.

[0381] Whether any selective advantage is applicable or any directed selection is to be applied in a particular case, target sequence selection is also guided by consideration of off-target frequencies in order to enhance the effectiveness of the application and/or reduce the potential for undesired alterations at sites other than the desired target. As described further and illustrated herein and in the art, the occurrence of off-target activity is influenced by a number of factors including similarities and dissimilarities between the target site and various off Target Sites, as well as the particular endonuclease used. In many cases, bioinformatics tools are available that assist in the prediction of off-target activity, and frequently such tools can also be used to identify the most likely sites of off-target activity, which can then be assessed in experimental settings to evaluate relative frequencies of off-target to on-target activity, thereby allowing the selection of sequences that have higher relative on-target activities. Illustrative examples of such techniques are provided herein, and others are known in the art.

[0382] Another aspect of target sequence selection relates to homologous recombination events. It is well known that sequences sharing regions of homology can serve as focal points for homologous recombination events that result in deletion of intervening sequences. Such recombination events occur during the normal course of replication of chromosomes and other DNA sequences, and also at other times when DNA sequences are being synthesized, such as in the case of repairs of double-strand breaks (DSBs), which occur on a regular basis during the normal cell replication cycle but may also be enhanced by the occurrence of various events (such as UV light and other inducers of DNA breakage) or the presence of certain agents (such as various chemical inducers). Many such inducers cause DSBs to occur indiscriminately in the genome, and DSBs are regularly being induced and repaired in normal cells. During repair, the original sequence may be reconstructed with complete fidelity, however, in some cases, small insertions or deletions (referred to as “indels”) are introduced at the DSB site.

[0383] DSBs may also be specifically induced at particular locations, as in the case of the endonucleases systems described herein, which can be used to cause directed or preferential gene modification events at selected chromosomal locations. The tendency for homologous sequences to be subject to recombination in the context of DNA repair (as well as replication) can be taken advantage of in a number of circumstances, and is the basis for one application of gene editing systems, such as CRISPR, in which homology directed repair is used to insert a sequence of interest, provided through use of a “donor” polynucleotide, into a desired chromosomal location.

[0384] Regions of homology between particular sequences, which can be small regions of “microhomology” that may comprise as few as ten basepairs or less, can also be used to bring about desired deletions. For example, a single DSB is introduced at a site that exhibits microhomology with a nearby sequence. During the normal course of repair of such DSB, a result that occurs with high frequency is the deletion of the intervening sequence as a result of recombination being facilitated by the DSB and concomitant cellular repair process.

[0385] In some circumstances, however, selecting target sequences within regions of homology can also give rise to much larger deletions, including gene fusions (when the deletions are in coding regions), which may or may not be desired given the particular circumstances.

[0386] The examples provided herein further illustrate the selection of various target regions for the creation of DSBs designed to induce replacements that result in restoration of wild-type or similar levels of hexanucleotide repeats, as well as the selection of specific target sequences within such regions that are designed to minimize off-target events relative to on-target events.

[0387] Nucleic Acid Modifications

[0388] In some embodiments, polynucleotides introduced into cells comprise one or more modifications that can be used, for example, to enhance activity, stability or specificity, alter delivery, reduce innate immune responses in host cells, or for other enhancements, as further described herein and known in the art.

[0389] In certain embodiments, modified polynucleotides are used in the CRISPR/Cas9/Cpf1 system, in which case the guide RNAs (either single-molecule guides or double-molecule guides) and/or a DNA or an RNA encoding a Cas or Cpf1 endonuclease introduced into a cell can be modified, as described and illustrated below. Such modified polynucleotides can be used in the CRISPR/Cas9/Cpf1 system to edit any one or more genomic loci.

[0390] Using the CRISPR/Cas9/Cpf1 system for purposes of nonlimiting illustrations of such uses, modifications of guide RNAs can be used to enhance the formation or stability of the CRISPR/Cas9/Cpf1 genome editing complex comprising guide RNAs, which may be single-molecule guides or double-molecule, and a Cas or Cpf1 endonuclease. Modifications of guide RNAs can also or alternatively be used to enhance the initiation, stability or kinetics of interactions between the genome editing complex with the target sequence in the genome, which can be used, for example, to enhance on-target activity. Modifications of guide RNAs can also or alternatively be used to enhance specificity, e.g., the relative rates of genome editing at the on-target site as compared to effects at other (off-target) sites.

[0391] Modifications can also or alternatively be used to increase the stability of a guide RNA, e.g., by increasing its resistance to degradation by ribonucleases (RNases) present in a cell, thereby causing its half-life in the cell to be increased. Modifications enhancing guide RNA half-life can be particularly useful in embodiments in which a Cas or Cpf1 endonuclease is introduced into the cell to be edited via an RNA that needs to be translated in order to generate endonuclease, because increasing the half-life of guide RNAs introduced at the same time as the RNA encoding the endonuclease can be used to increase the time that the guide RNAs and the encoded Cas or Cpf1 endonuclease co-exist in the cell.

[0392] Modifications can also or alternatively be used to decrease the likelihood or degree to which RNAs introduced into cells elicit innate immune responses. Such responses, which have been well characterized in the context of RNA interference (RNAi), including small-interfering RNAs (siRNAs), as described below and in the art, tend to be associated with reduced half-life of the RNA and/or the elicitation of cytokines or other factors associated with immune responses.

[0393] One or more types of modifications can also be made to RNAs encoding an endonuclease that are introduced into a cell, including, without limitation, modifications that enhance the stability of the RNA (such as by increasing its degradation by RNAses present in the cell), modifications that enhance translation of the resulting product (i.e. the endonuclease), and/or modifications that decrease the likelihood or degree to which the RNAs introduced into cells elicit innate immune responses.

[0394] Combinations of modifications, such as the foregoing and others, can likewise be used. In the case of CRISPR/Cas9/Cpf1, for example, one or more types of modifications can be made to guide RNAs (including those exemplified above), and/or one or more types of modifications can be made to RNAs encoding Cas or Cpf1 endonuclease (including those exemplified above).

[0395] By way of illustration, guide RNAs used in the CRISPR/Cas9/Cpf1 system, or other smaller RNAs can be readily synthesized by chemical means, enabling a number of modifications to be readily incorporated, as illustrated below and described in the art. While chemical synthetic procedures are continually expanding, purifications of such RNAs by procedures such as high performance liquid chromatography (HPLC, which avoids the use of gels such as PAGE) tends to become more challenging as polynucleotide lengths increase significantly beyond a hundred or so nucleotides. One approach used for generating chemically-modified RNAs of greater length is to produce two or more molecules that are ligated together. Much longer RNAs, such as those encoding a Cas9 endonuclease, are more readily generated enzymatically. While fewer types of modifications are generally available for use in enzymatically produced RNAs, there are still modifications that can be used to, e.g., enhance stability, reduce the likelihood or degree of innate immune response, and/or enhance other attributes, as described further below and in the art; and new types of modifications are regularly being developed.

[0396] By way of illustration of various types of modifications, especially those used frequently with smaller chemically synthesized RNAs, modifications can comprise one or more nucleotides modified at the 2′ position of the sugar, in some embodiments a 2′-O-alkyl, 2′-O-alkyl-O-alkyl, or 2′-fluoro-modified nucleotide. In some embodiments, RNA modifications include 2′-fluoro, 2′-amino or 2′ 0-methyl modifications on the ribose of pyrimidines, abasic residues, or an inverted base at the 3′ end of the RNA. Such modifications are routinely incorporated into oligonucleotides and these oligonucleotides have been shown to have a higher Tm (i.e., higher target binding affinity) than 2′-deoxyoligonucleotides against a given target.

[0397] A number of nucleotide and nucleoside modifications have been shown to make the oligonucleotide into which they are incorporated more resistant to nuclease digestion than the native oligonucleotide; these modified oligos survive intact for a longer time than unmodified oligonucleotides. Specific examples of modified oligonucleotides include those comprising modified backbones, for example, phosphorothioates, phosphotriesters, methyl phosphonates, short chain alkyl or cycloalkyl intersugar linkages or short chain heteroatomic or heterocyclic intersugar linkages. Some oligonucleotides are oligonucleotides with phosphorothioate backbones and those with heteroatom backbones, particularly CH2 —NH—O—CH2, CH,˜N(CH3)˜O˜CH2 (known as a methylene(methylimino) or MMI backbone), CH2 —O—N (CH3)—CH2, CH2—N (CH3)—N (CH3)—CH2 and O—N (CH3)—CH2—CH2 backbones, wherein the native phosphodiester backbone is represented as O—P—O—CH,); amide backbones [see De Mesmaeker et al., Ace. Chem. Res., 28:366-374 (1995)]; morpholino backbone structures (see Summerton and Weller, U.S. Pat. No. 5,034,506); peptide nucleic acid (PNA) backbone (wherein the phosphodiester backbone of the oligonucleotide is replaced with a polyamide backbone, the nucleotides being bound directly or indirectly to the aza nitrogen atoms of the polyamide backbone, see Nielsen et al., Science 1991, 254, 1497). Phosphorus-containing linkages include, but are not limited to, phosphorothioates, chiral phosphorothioates, phosphorodithioates, phosphotriesters, aminoalkylphosphotriesters, methyl and other alkyl phosphonates comprising 3′alkylene phosphonates and chiral phosphonates, phosphinates, phosphoramidates comprising 3′-amino phosphoramidate and aminoalkylphosphoramidates, thionophosphoramidates, thionoalkylphosphonates, thionoalkylphosphotriesters, and boranophosphates having normal 3′-5′ linkages, 2′-5′ linked analogs of these, and those having inverted polarity wherein the adjacent pairs of nucleoside units are linked 3′-5′ to 5′-3′ or 2′-5′ to 5′-2′; see U.S. Pat. Nos. 3,687,808; 4,469,863; 4,476,301; 5,023,243; 5,177,196; 5,188,897; 5,264,423; 5,276,019; 5,278,302; 5,286,717; 5,321,131; 5,399,676; 5,405,939; 5,453,496; 5,455,233; 5,466,677; 5,476,925; 5,519,126; 5,536,821; 5,541,306; 5,550,111; 5,563,253; 5,571,799; 5,587,361; and 5,625,050.

[0398] Morpholino-based oligomeric compounds are described in Braasch and David Corey, Biochemistry, 41(14): 4503-4510 (2002); Genesis, Volume 30, Issue 3, (2001); Heasman, Dev. Biol., 243: 209-214 (2002); Nasevicius et al., Nat. Genet., 26:216-220 (2000); Lacerra et al., Proc. Natl. Acad. Sci., 97: 9591-9596 (2000); and U.S. Pat. No. 5,034,506, issued Jul. 23, 1991.

[0399] Cyclohexenyl nucleic acid oligonucleotide mimetics are described in Wang et al., J. Am. Chem. Soc., 122: 8595-8602 (2000).

[0400] Modified oligonucleotide backbones that do not include a phosphorus atom therein have backbones that are formed by short chain alkyl or cycloalkyl internucleoside linkages, mixed heteroatom and alkyl or cycloalkyl internucleoside linkages, or one or more short chain heteroatomic or heterocyclic internucleoside linkages. These comprise those having morpholino linkages (formed in part from the sugar portion of a nucleoside); siloxane backbones; sulfide, sulfoxide and sulfone backbones; formacetyl and thioformacetyl backbones; methylene formacetyl and thioformacetyl backbones; alkene containing backbones; sulfamate backbones; methyleneimino and methylenehydrazino backbones; sulfonate and sulfonamide backbones; amide backbones; and others having mixed N, O, S, and CH2 component parts; see U.S. Pat. Nos. 5,034,506; 5,166,315; 5,185,444; 5,214,134; 5,216,141; 5,235,033; 5,264,562; 5,264,564; 5,405,938; 5,434,257; 5,466,677; 5,470,967; 5,489,677; 5,541,307; 5,561,225; 5,596,086; 5,602,240; 5,610,289; 5,602,240; 5,608,046; 5,610,289; 5,618,704; 5,623,070; 5,663,312; 5,633,360; 5,677,437; and 5,677,439, each of which is herein incorporated by reference.

[0401] One or more substituted sugar moieties can also be included, e.g., one of the following at the 2′ position: OH, SH, SCH3, F, OCN, OCH3 OCH3, OCH3 O(CH2)n CH3, O(CH2)n NH2, or O(CH2)n CH3, where n is from 1 to about 10; C1 to C10 lower alkyl, alkoxyalkoxy, substituted lower alkyl, alkaryl or aralkyl; Cl; Br; CN; CF3; OCF3; O-, S-, or N-alkyl; O-, S-, or N-alkenyl; SOCH3; SO2 CH3; ONO2; NO2; N3; NH2; heterocycloalkyl; heterocycloalkaryl; aminoalkylamino; polyalkylamino; substituted silyl; an RNA cleaving group; a reporter group; an intercalator; a group for improving the pharmacokinetic properties of an oligonucleotide; or a group for improving the pharmacodynamic properties of an oligonucleotide and other substituents having similar properties. In some embodiments, a modification includes 2′-methoxyethoxy (2′-0-CH2CH2OCH3, also known as 2′-O-(2-methoxyethyl)) (Martin et al, Helv. Chim. Acta, 1995, 78, 486). Other modifications include 2′-methoxy (2′-0-CH3), 2′-propoxy (2′-OCH2 CH2CH3) and 2′-fluoro (2′-F). Similar modifications may also be made at other positions on the oligonucleotide, particularly the 3′ position of the sugar on the 3′ terminal nucleotide and the 5′ position of 5′ terminal nucleotide. Oligonucleotides may also have sugar mimetics, such as cyclobutyls in place of the pentofuranosyl group.

[0402] In some embodiments, both a sugar and an internucleoside linkage, i.e., the backbone, of the nucleotide units are replaced with novel groups. The base units are maintained for hybridization with an appropriate nucleic acid target compound. One such oligomeric compound, an oligonucleotide mimetic that has been shown to have excellent hybridization properties, is referred to as a peptide nucleic acid (PNA). In PNA compounds, the sugar-backbone of an oligonucleotide is replaced with an amide containing backbone, for example, an aminoethylglycine backbone. The nucleobases are retained and are bound directly or indirectly to aza nitrogen atoms of the amide portion of the backbone. Representative United States patents that teach the preparation of PNA compounds comprise, but are not limited to, U.S. Pat. Nos. 5,539,082; 5,714,331; and 5,719,262. Further teaching of PNA compounds can be found in Nielsen et al, Science, 254: 1497-1500 (1991).

[0403] Guide RNAs can also include, additionally or alternatively, nucleobase (often referred to in the art simply as “base”) modifications or substitutions. As used herein, “unmodified” or “natural” nucleobases include adenine (A), guanine (G), thymine (T), cytosine (C), and uracil (U). Modified nucleobases include nucleobases found only infrequently or transiently in natural nucleic acids, e.g., hypoxanthine, 6-methyladenine, 5-Me pyrimidines, particularly 5-methylcytosine (also referred to as 5-methyl-2′ deoxycytosine and often referred to in the art as 5-Me-C), 5-hydroxymethylcytosine (HMC), glycosyl HMC and gentobiosyl HMC, as well as synthetic nucleobases, e.g., 2-aminoadenine, 2-(methylamino)adenine, 2-(imidazolylalkyl)adenine, 2-(aminoalklyamino)adenine or other heterosubstituted alkyladenines, 2-thiouracil, 2-thiothymine, 5-bromouracil, 5-hydroxymethyluracil, 8-azaguanine, 7-deazaguanine, N6 (6-aminohexyl)adenine, and 2,6-diaminopurine. Kornberg, A., DNA Replication, W. H. Freeman & Co., San Francisco, pp75-77 (1980); Gebeyehu et al., Nucl. Acids Res. 15:4513 (1997). A “universal” base known in the art, e.g., inosine, can also be included. 5-Me—C substitutions have been shown to increase nucleic acid duplex stability by 0.6-1.2 ° C. (Sanghvi, Y. S., in Crooke, S. T. and Lebleu, B., eds., Antisense Research and Applications, CRC Press, Boca Raton, 1993, pp. 276-278) and are embodiments of base substitutions.

[0404] Modified nucleobases comprise other synthetic and natural nucleobases, such as 5-methylcytosine (5-me-C), 5-hydroxymethyl cytosine, xanthine, hypoxanthine, 2-aminoadenine, 6-methyl and other alkyl derivatives of adenine and guanine, 2-propyl and other alkyl derivatives of adenine and guanine, 2-thiouracil, 2-thiothymine and 2-thiocytosine, 5-halouracil and cytosine, 5-propynyl uracil and cytosine, 6-azo uracil, cytosine and thymine, 5-uracil (pseudo-uracil), 4-thiouracil, 8-halo, 8-amino, 8-thiol, 8-thioalkyl, 8-hydroxyl and other 8-substituted adenines and guanines, 5-halo particularly 5-bromo, 5-trifluoromethyl and other 5-substituted uracils and cytosines, 7-methylquanine and 7-methyladenine, 8-azaguanine and 8-azaadenine, 7-deazaguanine and 7-deazaadenine, and 3-deazaguanine and 3-deazaadenine.

[0405] Further, nucleobases comprise those disclosed in U.S. Pat. No. 3,687,808, those disclosed in ‘The Concise Encyclopedia of Polymer Science And Engineering’, pages 858-859, Kroschwitz, J. I., ed. John Wiley & Sons, 1990, those disclosed by Englisch et al., ‘Angewandle Chemie, International Edition’, 1991, 30, page 613, and those disclosed by Sanghvi, Y. S., Chapter 15, ‘Antisense Research and Applications’, pages 289-302, Crooke, S. T. and Lebleu, B. ea., CRC Press, 1993. Certain of these nucleobases are particularly useful for increasing the binding affinity of the oligomeric compounds of the invention. These include 5-substituted pyrimidines, 6-azapyrimidines and N-2, N-6 and 0-6 substituted purines, comprising 2-aminopropyladenine, 5-propynyluracil and 5-propynylcytosine. 5-methylcytosine substitutions have been shown to increase nucleic acid duplex stability by 0.6-1.2° C. (Sanghvi, Y. S., Crooke, S. T. and Lebleu, B., eds, ‘Antisense Research and Applications’, CRC Press, Boca Raton, 1993, pp. 276-278) and are embodiments of base substitutions, even more particularly when combined with 2′-O-methoxyethyl sugar modifications. Modified nucleobases are described in U.S. Pat. Nos. 3,687,808, as well as 4,845,205; 5,130,302; 5,134,066; 5,175,273; 5,367,066; 5,432,272; 5,457,187; 5,459,255; 5,484,908; 5,502,177; 5,525,711; 5,552,540; 5,587,469; 5,596,091; 5,614,617; 5,681,941; 5,750,692; 5,763,588; 5,830,653; 6,005,096; and U.S. Patent Application Publication 2003/0158403.

[0406] Thus, the term “modified” refers to a non-natural sugar, phosphate, or base that is incorporated into a guide RNA, an endonuclease, or both a guide RNA and an endonuclease. It is not necessary for all positions in a given oligonucleotide to be uniformly modified, and in fact more than one of the aforementioned modifications may be incorporated in a single oligonucleotide, or even in a single nucleoside within an oligonucleotide.

[0407] In some embodiments, the guide RNAs and/or mRNA (or DNA) encoding an endonuclease are chemically linked to one or more moieties or conjugates that enhance the activity, cellular distribution, or cellular uptake of the oligonucleotide. Such moieties comprise, but are not limited to, lipid moieties such as a cholesterol moiety [Letsinger et al., Proc. Natl. Acad. Sci. USA, 86: 6553-6556 (1989)]; cholic acid [Manoharan et al., Bioorg. Med. Chem. Let., 4: 1053-1060 (1994)]; a thioether, e.g., hexyl-S-tritylthiol [Manoharan et al, Ann. N. Y. Acad. Sci., 660: 306-309 (1992) and Manoharan et al., Bioorg. Med. Chem. Let., 3: 2765-2770 (1993)]; a thiocholesterol [Oberhauser et al., Nucl. Acids Res., 20: 533-538 (1992)]; an aliphatic chain, e.g., dodecandiol or undecyl residues [Kabanov et al., FEBS Lett., 259: 327-330 (1990) and Svinarchuk et al., Biochimie, 75: 49-54 (1993)]; a phospholipid, e.g., di-hexadecyl-rac-glycerol or triethylammonium 1,2-di-O-hexadecyl-rac-glycero-3-H-phosphonate [Manoharan et al., Tetrahedron Lett., 36: 3651-3654 (1995) and Shea et al., Nucl. Acids Res., 18: 3777-3783 (1990)]; a polyamine or a polyethylene glycol chain [Mancharan et al., Nucleosides & Nucleotides, 14: 969-973 (1995)]; adamantane acetic acid [Manoharan et al., Tetrahedron Lett., 36: 3651-3654 (1995)]; a palmityl moiety [(Mishra et al., Biochim. Biophys. Acta, 1264: 229-237 (1995)]; or an octadecylamine or hexylamino-carbonyl-t oxycholesterol moiety [Crooke et al., J. Pharmacol. Exp. Ther., 277: 923-937 (1996)]. See also U.S. Pat. Nos. 4,828,979; 4,948,882; 5,218,105; 5,525,465; 5,541,313; 5,545,730; 5,552,538; 5,578,717, 5,580,731; 5,580,731; 5,591,584; 5,109,124; 5,118,802; 5,138,045; 5,414,077; 5,486,603; 5,512,439; 5,578,718; 5,608,046; 4,587,044; 4,605,735; 4,667,025; 4,762,779; 4,789,737; 4,824,941; 4,835,263; 4,876,335; 4,904,582; 4,958,013; 5,082,830; 5,112,963; 5,214,136; 5,082,830; 5,112,963; 5,214,136; 5,245,022; 5,254,469; 5,258,506; 5,262,536; 5,272,250; 5,292,873; 5,317,098; 5,371,241, 5,391,723; 5,416,203, 5,451,463; 5,510,475; 5,512,667; 5,514,785; 5,565,552; 5,567,810; 5,574,142; 5,585,481; 5,587,371; 5,595,726; 5,597,696; 5,599,923; 5,599, 928 and 5,688,941.

[0408] Sugars and other moieties can be used to target proteins and complexes comprising nucleotides, such as cationic polysomes and liposomes, to particular sites. For example, hepatic cell directed transfer can be mediated via asialoglycoprotein receptors (ASGPRs); see, e.g., Hu, et al., Protein Pept Lett. 21(10):1025-30 (2014). Other systems known in the art and regularly developed can be used to target biomolecules of use in the present case and/or complexes thereof to particular target cells of interest.

[0409] These targeting moieties or conjugates can include conjugate groups covalently bound to functional groups, such as primary or secondary hydroxyl groups. Conjugate groups of the invention include intercalators, reporter molecules, polyamines, polyamides, polyethylene glycols, polyethers, groups that enhance the pharmacodynamic properties of oligomers, and groups that enhance the pharmacokinetic properties of oligomers. Typical conjugate groups include cholesterols, lipids, phospholipids, biotin, phenazine, folate, phenanthridine, anthraquinone, acridine, fluoresceins, rhodamines, coumarins, and dyes. Groups that enhance the pharmacodynamic properties, in the context of this invention, include groups that improve uptake, enhance resistance to degradation, and/or strengthen sequence-specific hybridization with the target nucleic acid. Groups that enhance the pharmacokinetic properties, in the context of this invention, include groups that improve uptake, distribution, metabolism or excretion of the compounds of the present invention. Representative conjugate groups are disclosed in International Patent Application No. PCT/US92/09196, filed Oct. 23, 1992, and U.S. Pat. No. 6,287,860, which are incorporated herein by reference. Conjugate moieties include, but are not limited to, lipid moieties such as a cholesterol moiety, cholic acid, a thioether, e.g., hexyl-5-tritylthiol, a thiocholesterol, an aliphatic chain, e.g., dodecandiol or undecyl residues, a phospholipid, e.g., di-hexadecyl-rac-glycerol or triethylammonium 1,2-di-O-hexadecyl-rac-glycero-3-H-phosphonate, a polyamine or a polyethylene glycol chain, or adamantane acetic acid, a palmityl moiety, or an octadecylamine or hexylamino-carbonyl-oxy cholesterol moiety. See, e.g., U.S. Pat. Nos. 4,828,979; 4,948,882; 5,218,105; 5,525,465; 5,541,313; 5,545,730; 5,552,538; 5,578,717, 5,580,731; 5,580,731; 5,591,584; 5,109,124; 5,118,802; 5,138,045; 5,414,077; 5,486,603; 5,512,439; 5,578,718; 5,608,046; 4,587,044; 4,605,735; 4,667,025; 4,762,779; 4,789,737; 4,824,941; 4,835,263; 4,876,335; 4,904,582; 4,958,013; 5,082,830; 5,112,963; 5,214,136; 5,082,830; 5,112,963; 5,214,136; 5,245,022; 5,254,469; 5,258,506; 5,262,536; 5,272,250; 5,292,873; 5,317,098; 5,371,241, 5,391,723; 5,416,203, 5,451,463; 5,510,475; 5,512,667; 5,514,785; 5,565,552; 5,567,810; 5,574,142; 5,585,481; 5,587,371; 5,595,726; 5,597,696; 5,599,923; 5,599,928 and 5,688,941.

[0410] Longer polynucleotides that are less amenable to chemical synthesis and are typically produced by enzymatic synthesis can also be modified by various means. Such modifications can include, for example, the introduction of certain nucleotide analogs, the incorporation of particular sequences or other moieties at the 5′ or 3′ ends of molecules, and other modifications. By way of illustration, the mRNA encoding Cas9 is approximately 4 kb in length and can be synthesized by in vitro transcription. Modifications to the mRNA can be applied to, e.g., increase its translation or stability (such as by increasing its resistance to degradation with a cell), or to reduce the tendency of the RNA to elicit an innate immune response that is often observed in cells following introduction of exogenous RNAs, particularly longer RNAs such as that encoding Cas9.

[0411] Numerous such modifications have been described in the art, such as polyA tails, 5′ cap analogs (e.g., Anti Reverse Cap Analog (ARCA) or m7G(5′)ppp(5′)G (mCAP)), modified 5′ or 3′ untranslated regions (UTRs), use of modified bases (such as Pseudo-UTP, 2-Thio-UTP, 5-Methylcytidine-5′-Triphosphate (5-Methyl-CTP) or N6-Methyl-ATP), or treatment with phosphatase to remove 5′ terminal phosphates. These and other modifications are known in the art, and new modifications of RNAs are regularly being developed.

[0412] There are numerous commercial suppliers of modified RNAs, including for example, TriLink Biotech, AxoLabs, Bio-Synthesis Inc., Dharmacon and many others. As described by TriLink, for example, 5-Methyl-CTP can be used to impart desirable characteristics, such as increased nuclease stability, increased translation or reduced interaction of innate immune receptors with in vitro transcribed RNA. 5-Methylcytidine-5′-Triphosphate (5-Methyl-CTP), N6-Methyl-ATP, as well as Pseudo-UTP and 2-Thio-UTP, have also been shown to reduce innate immune stimulation in culture and in vivo while enhancing translation, as illustrated in publications by Kormann et al. and Warren et al. referred to below.

[0413] It has been shown that chemically modified mRNA delivered in vivo can be used to achieve improved therapeutic effects; see, e.g., Kormann et al., Nature Biotechnology 29,154-157 (2011). Such modifications can be used, for example, to increase the stability of the RNA molecule and/or reduce its immunogenicity. Using chemical modifications such as Pseudo-U, N6-Methyl-A, 2-Thio-U and 5-Methyl-C, it was found that substituting just one quarter of the uridine and cytidine residues with 2-Thio-U and 5-Methyl-C respectively resulted in a significant decrease in toll-like receptor (TLR) mediated recognition of the mRNA in mice. By reducing the activation of the innate immune system, these modifications can be used to effectively increase the stability and longevity of the mRNA in vivo; see, e.g., Kormann et al., supra.

[0414] It has also been shown that repeated administration of synthetic messenger RNAs incorporating modifications designed to bypass innate anti-viral responses can reprogram differentiated human cells to pluripotency. See, e.g., Warren, et al., Cell Stem Cell, 7(5):618-30 (2010). Such modified mRNAs that act as primary reprogramming proteins can be an efficient means of reprogramming multiple human cell types. Such cells are referred to as induced pluripotency stem cells (iPSCs), and it was found that enzymatically synthesized RNA incorporating 5-Methyl-CTP, Pseudo-UTP and an Anti Reverse Cap Analog (ARCA) could be used to effectively evade the cell's antiviral response; see, e.g., Warren et al., supra.

[0415] Other modifications of polynucleotides described in the art include, for example, the use of polyA tails, the addition of 5′ cap analogs (such as m7G(5′)ppp(5′)G (mCAP)), modifications of 5′ or 3′ untranslated regions (UTRs), or treatment with phosphatase to remove 5′ terminal phosphates—and new approaches are regularly being developed.

[0416] A number of compositions and techniques applicable to the generation of modified RNAs for use herein have been developed in connection with the modification of RNA interference (RNAi), including small-interfering RNAs (siRNAs). siRNAs present particular challenges in vivo because their effects on gene silencing via mRNA interference are generally transient, which can require repeat administration. In addition, siRNAs are double-stranded RNAs (dsRNA) and mammalian cells have immune responses that have evolved to detect and neutralize dsRNA, which is often a by-product of viral infection. Thus, there are mammalian enzymes such as PKR (dsRNA-responsive kinase), and potentially retinoic acid-inducible gene I (RIG-I), that can mediate cellular responses to dsRNA, as well as Toll-like receptors (such as TLR3, TLR7 and TLR8) that can trigger the induction of cytokines in response to such molecules; see, e.g., the reviews by Angart et al., Pharmaceuticals (Basel) 6(4): 440-468 (2013); Kanasty et al., Molecular Therapy 20(3): 513-524 (2012); Burnett et al., Biotechnol J. 6(9):1130-46 (2011); Judge and MacLachlan, Hum Gene Ther 19(2):111-24 (2008); and references cited therein.

[0417] A large variety of modifications have been developed and applied to enhance RNA stability, reduce innate immune responses, and/or achieve other benefits that can be useful in connection with the introduction of polynucleotides into human cells, as described herein; see, e.g., the reviews by Whitehead KA et al., Annual Review of Chemical and Biomolecular Engineering, 2: 77-96 (2011); Gaglione and Messere, Mini Rev Med Chem, 10(7):578-95 (2010); Chernolovskaya et al, Curr Opin Mol Ther., 12(2):158-67 (2010); Deleavey et al., Curr Protoc Nucleic Acid Chem Chapter 16:Unit 16.3 (2009); Behlke, Oligonucleotides 18(4):305-19 (2008); Fucini et al., Nucleic Acid Ther 22(3): 205-210 (2012); Bremsen et al., Front Genet 3:154 (2012).

[0418] As noted above, there are a number of commercial suppliers of modified RNAs, many of which have specialized in modifications designed to improve the effectiveness of siRNAs. A variety of approaches are offered based on various findings reported in the literature. For example, Dharmacon notes that replacement of a non-bridging oxygen with sulfur (phosphorothioate, PS) has been extensively used to improve nuclease resistance of siRNAs, as reported by Kole, Nature Reviews Drug Discovery 11:125-140 (2012). Modifications of the 2′-position of the ribose have been reported to improve nuclease resistance of the internucleotide phosphate bond while increasing duplex stability (Tm), which has also been shown to provide protection from immune activation. A combination of moderate PS backbone modifications with small, well-tolerated 2′-substitutions (2′-O-Methyl, 2′-Fluoro, 2′-Hydro) have been associated with highly stable siRNAs for applications in vivo, as reported by Soutschek et al. Nature 432:173-178 (2004); and 2′-O-Methyl modifications have been reported to be effective in improving stability as reported by Volkov, Oligonucleotides 19:191-202 (2009). With respect to decreasing the induction of innate immune responses, modifying specific sequences with 2′-O-Methyl, 2′-Fluoro, 2′-Hydro have been reported to reduce TLR7/TLR8 interaction while generally preserving silencing activity; see, e.g., Judge et al., Mol. Ther. 13:494-505 (2006); and Cekaite et al., J. Mol. Biol. 365:90-108 (2007). Additional modifications, such as 2-thiouracil, pseudouracil, 5-methylcytosine, 5-methyluracil, and N6-methyladenosine have also been shown to minimize the immune effects mediated by TLR3, TLR7, and TLR8; see, e.g., Kariko, K. et al., Immunity 23:165-175 (2005).

[0419] As is also known in the art, and commercially available, a number of conjugates can be applied to polynucleotides, such as RNAs, for use herein that can enhance their delivery and/or uptake by cells, including for example, cholesterol, tocopherol and folic acid, lipids, peptides, polymers, linkers and aptamers; see, e.g., the review by Winkler, Ther. Deliv. 4:791-809 (2013), and references cited therein.

[0420] Codon-Optimization

[0421] In some embodiments, a polynucleotide encoding a site-directed polypeptide is codon-optimized according to methods standard in the art for expression in the cell containing the target DNA of interest. For example, if the intended target nucleic acid is in a human cell, a human codon-optimized polynucleotide encoding Cas9 is contemplated for use for producing the Cas9 polypeptide.

[0422] Complexes of a Genome-targeting Nucleic Acid and a Site-Directed Polypeptide

[0423] A genome-targeting nucleic acid interacts with a site-directed polypeptide (e.g., a nucleic acid-guided nuclease such as Cas9), thereby forming a complex. The genome-targeting nucleic acid guides the site-directed polypeptide to a target nucleic acid.

[0424] RNPs

[0425] As stated previously, the site-directed polypeptide and genome-targeting nucleic acid may each be administered separately to a cell or a patient. On the other hand, the site-directed polypeptide may be pre-complexed with one or more guide RNAs, or one or more crRNA together with a tracrRNA. The pre-complexed material may then be administered to a cell or a patient. Such pre-complexed material is known as a ribonucleoprotein particle (RNP).

[0426] Nucleic Acids Encoding System Components

[0427] In another aspect, the present disclosure provides a nucleic acid comprising a nucleotide sequence encoding a genome-targeting nucleic acid of the disclosure, a site-directed polypeptide of the disclosure, and/or any nucleic acid or proteinaceous molecule necessary to carry out the embodiments of the methods of the disclosure.

[0428] In some embodiments, the nucleic acid encoding a genome-targeting nucleic acid of the disclosure, a site-directed polypeptide of the disclosure, and/or any nucleic acid or proteinaceous molecule necessary to carry out the embodiments of the methods of the disclosure comprises a vector (e.g., a recombinant expression vector).

[0429] The term “vector” refers to a nucleic acid molecule capable of transporting another nucleic acid to which it has been linked. One type of vector is a “plasmid”, which refers to a circular double-stranded DNA loop into which additional nucleic acid segments can be ligated. Another type of vector is a viral vector, wherein additional nucleic acid segments can be ligated into the viral genome. Certain vectors are capable of autonomous replication in a host cell into which they are introduced (e.g., bacterial vectors having a bacterial origin of replication and episomal mammalian vectors). Other vectors (e.g., non-episomal mammalian vectors) are integrated into the genome of a host cell upon introduction into the host cell, and thereby are replicated along with the host genome.

[0430] In some embodiments, vectors are capable of directing the expression of nucleic acids to which they are operatively linked. Such vectors are referred to herein as “recombinant expression vectors”, or more simply “expression vectors”, which serve equivalent functions.

[0431] The term “operably linked” means that the nucleotide sequence of interest is linked to regulatory sequence(s) in a manner that allows for expression of the nucleotide sequence. The term “regulatory sequence” is intended to include, for example, promoters, enhancers and other expression control elements (e.g., polyadenylation signals). Such regulatory sequences are well known in the art and are described, for example, in Goeddel; Gene Expression Technology: Methods in Enzymology 185, Academic Press, San Diego, Calif. (1990). Regulatory sequences include those that direct constitutive expression of a nucleotide sequence in many types of host cells, and those that direct expression of the nucleotide sequence only in certain host cells (e.g., tissue-specific regulatory sequences). It will be appreciated by those skilled in the art that the design of the expression vector can depend on such factors as the choice of the target cell, the level of expression desired, and the like.

[0432] Expression vectors contemplated include, but are not limited to, viral vectors based on vaccinia virus, poliovirus, adenovirus, adeno-associated virus, SV40, herpes simplex virus, human immunodeficiency virus, retrovirus (e.g., Murine Leukemia Virus, spleen necrosis virus, and vectors derived from retroviruses such as Rous Sarcoma Virus, Harvey Sarcoma Virus, avian leukosis virus, a lentivirus, human immunodeficiency virus, myeloproliferative sarcoma virus, and mammary tumor virus) and other recombinant vectors. Other vectors contemplated for eukaryotic target cells include, but are not limited to, the vectors pXT1, pSG5, pSVK3, pBPV, pMSG, and pSVLSV40 (Pharmacia). Other vectors may be used so long as they are compatible with the host cell.

[0433] In some embodiments, a vector comprises one or more transcription and/or translation control elements. Depending on the host/vector system utilized, any of a number of suitable transcription and translation control elements, including constitutive and inducible promoters, transcription enhancer elements, transcription terminators, etc. may be used in the expression vector. In some embodiments, the vector is a self-inactivating vector that either inactivates the viral sequences or the components of the CRISPR machinery or other elements.

[0434] Non-limiting examples of suitable eukaryotic promoters (i.e., promoters functional in a eukaryotic cell) include those from cytomegalovirus (CMV) immediate early, herpes simplex virus (HSV) thymidine kinase, early and late SV40, long terminal repeats (LTRs) from retrovirus, human elongation factor-1 promoter (EF1), a hybrid construct comprising the cytomegalovirus (CMV) enhancer fused to the chicken beta-actin promoter (CAG), murine stem cell virus promoter (MSCV), phosphoglycerate kinase-1 locus promoter (PGK), and mouse metallothionein-I.

[0435] For expressing small RNAs, including guide RNAs used in connection with Cas or Cpf1 endonuclease, various promoters such as RNA polymerase III promoters, including for example U6 and H1, can be advantageous. Descriptions of and parameters for enhancing the use of such promoters are known in art, and additional information and approaches are regularly being described; see, e.g., Ma, H. et al., Molecular Therapy—Nucleic Acids 3, e161 (2014) doi:10.1038/mtna.2014.12.

[0436] The expression vector may also contain a ribosome binding site for translation initiation and a transcription terminator. The expression vector may also include appropriate sequences for amplifying expression. The expression vector may also include nucleotide sequences encoding non-native tags (e.g., histidine tag, hemagglutinin tag, green fluorescent protein, etc.) that are fused to the site-directed polypeptide, thus resulting in a fusion protein.

[0437] In some embodiments, a promoter is an inducible promoter (e.g., a heat shock promoter, tetracycline-regulated promoter, steroid-regulated promoter, metal-regulated promoter, estrogen receptor-regulated promoter, etc.). In some embodiments, a promoter is a constitutive promoter (e.g., CMV promoter, UBC promoter). In some embodiments, the promoter is a spatially restricted and/or temporally restricted promoter (e.g., a tissue specific promoter, a cell type specific promoter, etc.).

[0438] In some embodiments, the nucleic acid encoding a genome-targeting nucleic acid of the disclosure and/or a site-directed polypeptide are packaged into or on the surface of delivery vehicles for delivery to cells. Delivery vehicles contemplated include, but are not limited to, nanospheres, liposomes, quantum dots, nanoparticles, polyethylene glycol particles, hydrogels, and micelles. As described in the art, a variety of targeting moieties can be used to enhance the preferential interaction of such vehicles with desired cell types or locations.

[0439] Introduction of the complexes, polypeptides, and nucleic acids of the disclosure into cells can occur by viral or bacteriophage infection, transfection, conjugation, protoplast fusion, lipofection, electroporation, nucleofection, calcium phosphate precipitation, polyethyleneimine (PEI)-mediated transfection, DEAE-dextran mediated transfection, liposome-mediated transfection, particle gun technology, calcium phosphate precipitation, direct micro-injection, nanoparticle-mediated nucleic acid delivery, and the like.

[0440] Delivery

[0441] Guide RNA polynucleotides (RNA or DNA) and/or endonuclease polynucleotide(s) (RNA or DNA) can be delivered by viral or non-viral delivery vehicles known in the art. Alternatively, endonuclease polypeptide(s) may be delivered by non-viral delivery vehicles known in the art, such as electroporation or lipid nanoparticles. In further alternative embodiments, the DNA endonuclease may be delivered as one or more polypeptides, either alone or pre-complexed with one or more guide RNAs, or one or more crRNA together with a tracrRNA.

[0442] Polynucleotides may be delivered by non-viral delivery vehicles including, but not limited to, nanoparticles, liposomes, ribonucleoproteins, positively charged peptides, small molecule RNA-conjugates, aptamer-RNA chimeras, and RNA-fusion protein complexes. Some exemplary non-viral delivery vehicles are described in Peer and Lieberman, Gene Therapy, 18: 1127-1133 (2011) (which focuses on non-viral delivery vehicles for siRNA that are also useful for delivery of other polynucleotides).

[0443] Polynucleotides, such as guide RNA, sgRNA, and mRNA encoding an endonuclease, may be delivered to a cell or a patient by a lipid nanoparticle (LNP).

[0444] A LNP refers to any particle having a diameter of less than 1000 nm, 500 nm, 250 nm, 200 nm, 150 nm, 100 nm, 75 nm, 50 nm, or 25 nm. Alternatively, a nanoparticle may range in size from 1-1000 nm, 1-500 nm, 1-250 nm, 25-200 nm, 25-100 nm, 35-75 nm, or 25-60 nm.

[0445] LNPs may be made from cationic, anionic, or neutral lipids. Neutral lipids, such as the fusogenic phospholipid DOPE or the membrane component cholesterol, may be included in LNPs as ‘helper lipids’ to enhance transfection activity and nanoparticle stability. Limitations of cationic lipids include low efficacy owing to poor stability and rapid clearance, as well as the generation of inflammatory or anti-inflammatory responses.

[0446] LNPs may also be comprised of hydrophobic lipids, hydrophilic lipids, or both hydrophobic and hydrophilic lipids.

[0447] Any lipid or combination of lipids that are known in the art may be used to produce a LNP. Examples of lipids used to produce LNPs are: DOTMA, DOSPA, DOTAP, DMRIE, DC-cholesterol, DOTAP-cholesterol, GAP-DMORIE-DPyPE, and GL67A-DOPE-DMPE-polyethylene glycol (PEG). Examples of cationic lipids are: 98N12-5, C12-200, DLin-KC2-DMA (KC2), DLin-MC3-DMA (MC3), XTC, MD1, and 7C1. Examples of neutral lipids are: DPSC, DPPC, POPC, DOPE, and SM. Examples of PEG-modified lipids are: PEG-DMG, PEG-CerC14, and PEG-CerC20.

[0448] The lipids may be combined in any number of molar ratios to produce a LNP. In addition, the polynucleotide(s) may be combined with lipid(s) in a wide range of molar ratios to produce a LNP.

[0449] As stated previously, the site-directed polypeptide and genome-targeting nucleic acid may each be administered separately to a cell or a patient. On the other hand, the site-directed polypeptide may be pre-complexed with one or more guide RNAs, or one or more crRNA together with a tracrRNA. The pre-complexed material may then be administered to a cell or a patient. Such pre-complexed material is known as a ribonucleoprotein particle (RNP).

[0450] RNA is capable of forming specific interactions with RNA or DNA. While this property is exploited in many biological processes, it also comes with the risk of promiscuous interactions in a nucleic acid-rich cellular environment. One solution to this problem is the formation of ribonucleoprotein particles (RNPs), in which the RNA is pre-complexed with an endonuclease. Another benefit of the RNP is protection of the RNA from degradation.

[0451] The endonuclease in the RNP may be modified or unmodified. Likewise, the gRNA, crRNA, tracrRNA, or sgRNA may be modified or unmodified. Numerous modifications are known in the art and may be used.

[0452] The endonuclease and sgRNA can be generally combined in a 1:1 molar ratio. Alternatively, the endonuclease, crRNA and tracrRNA can be generally combined in a 1:1:1 molar ratio. However, a wide range of molar ratios may be used to produce a RNP.

[0453] A viral vector may be used for delivery, such as an adeno virus, HPV, HSV, lenti virus, or other viral vector.

[0454] A recombinant adeno-associated virus (AAV) vector may be used for delivery. Techniques to produce rAAV particles, in which an AAV genome to be packaged that includes the polynucleotide to be delivered, rep and cap genes, and helper virus functions are provided to a cell are standard in the art. Production of rAAV requires that the following components are present within a single cell (denoted herein as a packaging cell): a rAAV genome, AAV rep and cap genes separate from (i.e., not in) the rAAV genome, and helper virus functions. The AAV rep and cap genes may be from any AAV serotype for which recombinant virus can be derived, and may be from a different AAV serotype than the rAAV genome ITRs, including, but not limited to, AAV serotypes AAV-1, AAV-2, AAV-3, AAV-4, AAV-5, AAV-6, AAV-7, AAV-8, AAV-9, AAV-10, AAV-11, AAV-12, AAV-13 and AAV rh.74. Production of pseudotyped rAAV is disclosed in, for example, international patent application publication number WO 01/83692. See Table 1.

TABLE 1

| AAV Serotype | Genbank Accession No. |
|---|---|
| AAV-1 | NC_002077.1 |
| AAV-2 | NC_001401.2 |
| AAV-3 | NC_001729.1 |
| AAV-3B | AF028705.1 |
| AAV-4 | NC_001829.1 |
| AAV-5 | NC_006152.1 |
| AAV-6 | AF028704.1 |
| AAV-7 | NC_006260.1 |
| AAV-8 | NC_006261.1 |
| AAV-9 | AX753250.1 |
| AAV-10 | AY631965.1 |
| AAV-11 | AY631966.1 |
| AAV-12 | DQ813647.1 |
| AAV-13 | EU285562.1 |

[0455] A method of generating a packaging cell involves creating a cell line that stably expresses all of the necessary components for AAV particle production. For example, a plasmid (or multiple plasmids) comprising a rAAV genome lacking AAV rep and cap genes, AAV rep and cap genes separate from the rAAV genome, and a selectable marker, such as a neomycin resistance gene, are integrated into the genome of a cell. AAV genomes have been introduced into bacterial plasmids by procedures such as GC tailing (Samulski et al., 1982, Proc. Natl. Acad. S6. USA, 79:2077-2081), addition of synthetic linkers containing restriction endonuclease cleavage sites (Laughlin et al., 1983, Gene, 23:65-73) or by direct, blunt-end ligation (Senapathy & Carter, 1984, J. Biol. Chem., 259:4661-4666). The packaging cell line is then infected with a helper virus, such as adenovirus. The advantages of this method are that the cells are selectable and are suitable for large-scale production of rAAV. Other examples of suitable methods employ adenovirus or baculovirus, rather than plasmids, to introduce rAAV genomes and/or rep and cap genes into packaging cells.

[0456] General principles of rAAV production are reviewed in, for example, Carter, 1992, Current Opinions in Biotechnology, 1533-539; and Muzyczka, 1992, Curr. Topics in Microbial. and Immunol., 158:97-129). Various approaches are described in Ratschin et al., Mol. Cell. Biol. 4:2072 (1984); Hermonat et al., Proc. Natl. Acad. Sci. USA, 81:6466 (1984); Tratschin et al., Mol. Cell. Biol. 5:3251 (1985); McLaughlin et al., J. Virol., 62:1963 (1988); and Lebkowski et al., 1988 Mol. Cell. Biol., 7:349 (1988). Samulski et al. (1989, J. Virol., 63:3822-3828); U.S. Pat. No. 5,173,414; WO 95/13365 and corresponding U.S. Pat. No. 5,658.776; WO 95/13392; WO 96/17947; PCT/US98/18600; WO 97/09441 (PCT/US96/14423); WO 97/08298 (PCT/US96/13872); WO 97/21825 (PCT/US96/20777); WO 97/06243 (PCT/FR96/01064); WO 99/11764; Perrin et al. (1995) Vaccine 13:1244-1250; Paul et al. (1993) Human Gene Therapy 4:609-615; Clark et al. (1996) Gene Therapy 3:1124-1132; U.S. Pat. Nos. 5,786,211; 5,871,982; and 6,258,595.

[0457] AAV vector serotypes can be matched to target cell types. For example, the following exemplary cell types may be transduced by the indicated AAV serotypes among others. See Table 2.

TABLE 2

| Tissue/Cell Type | Serotype |
|---|---|
| Liver | AAV3, AAV5, AAV8, AAV9 |
| Skeletal muscle | AAV1, AAV7, AAV6, AAV8, AAV9 |
| Central nervous system | AAV5, AAV1, AAV4 |
| RPE | AAV5, AAV4 |
| Photoreceptor cells | AAV5 |
| Lung | AAV9 |
| Heart | AAV8 |
| Pancreas | AAV8 |
| Kidney | AAV2, AAV8 |

[0458] In addition to adeno-associated viral vectors, other viral vectors may be used in the practice of the invention. Such viral vectors include, but are not limited to, lentivirus, alphavirus, enterovirus, pestivirus, baculovirus, herpesvirus, Epstein Barr virus, papovavirusr, poxvirus, vaccinia virus, and herpes simplex virus.

[0459] In some embodiments, Cas9 mRNA, sgRNA targeting one or two loci in C9ORF72 genes, and donor DNA are each separately formulated into lipid nanoparticles, or are all co-formulated into one lipid nanoparticle, or co-formulated into two or more lipid nanoparticles.

[0460] In some embodiments, Cas9 mRNA is formulated in a lipid nanoparticle, while sgRNA and donor DNA are delivered in an AAV vector. In some embodiments, Cas9 mRNA and sgRNA are co-formulated in a lipid nanoparticle, while donor DNA is delivered in an AAV vector.

[0461] Options are available to deliver the Cas9 nuclease as a DNA plasmid, as mRNA or as a protein. The guide RNA can be expressed from the same DNA, or can also be delivered as an RNA. The RNA can be chemically modified to alter or improve its half-life, or decrease the likelihood or degree of immune response. The endonuclease protein can be complexed with the gRNA prior to delivery. Viral vectors allow efficient delivery; split versions of Cas9 and smaller orthologs of Cas9 can be packaged in AAV, as can donors for HDR. A range of non-viral delivery methods also exist that can deliver each of these components, or non-viral and viral methods can be employed in tandem. For example, nano-particles can be used to deliver the protein and guide RNA, while AAV can be used to deliver a donor DNA.

[0462] Genetically Modified Cells

[0463] The term “genetically modified cell” refers to a cell that comprises at least one genetic modification introduced by genome editing (e.g., using the CRISPR/Cas9/Cpf1 system). In some ex vivo embodiments herein, the genetically modified cell is a genetically modified progenitor cell. In some in vivo embodiments herein, the genetically modified cell is a genetically modified neural cell. A genetically modified cell comprising an exogenous genome-targeting nucleic acid and/or an exogenous nucleic acid encoding a genome-targeting nucleic acid is contemplated herein.

[0464] The term “control treated population” describes a population of cells that has been treated with identical media, viral induction, nucleic acid sequences, temperature, confluency, flask size, pH, etc., with the exception of the addition of the genome editing components. Any method known in the art can be used to measure length of the hexanucleotide repeat in the C9ORF72 gene, for example Northern Blot analysis of the or quantifying C9ORF72 mRNA.

[0465] The term “isolated cell” refers to a cell that has been removed from an organism in which it was originally found, or a descendant of such a cell. Optionally, the cell has been cultured in vitro, e.g., under defined conditions or in the presence of other cells. Optionally, the cell is later introduced into a second organism or re-introduced into the organism from which it (or the cell from which it is descended) was isolated.

[0466] The term “isolated population” with respect to an isolated population of cells refers to a population of cells that has been removed and separated from a mixed or heterogeneous population of cells. In some embodiments, an isolated population is a substantially pure population of cells, as compared to the heterogeneous population from which the cells were isolated or enriched. In some embodiments, the isolated population is an isolated population of human progenitor cells, e.g., a substantially pure population of human progenitor cells, as compared to a heterogeneous population of cells comprising human progenitor cells and cells from which the human progenitor cells were derived.

[0467] The term “substantially enhanced,” with respect to a particular cell population, refers to a population of cells in which the occurrence of a particular type of cell is increased relative to pre-existing or reference levels, by at least 2-fold, at least 3-, at least 4-, at least 5-, at least 6-, at least 7-, at least 8-, at least 9, at least 10-, at least 20-, at least 50-, at least 100-, at least 400-, at least 1000-, at least 5000-, at least 20000-, at least 100000- or more fold depending, e.g., on the desired levels of such cells for ameliorating ALS and/or FTLD.

[0468] The term “substantially enriched” with respect to a particular cell population, refers to a population of cells that is at least about 10%, about 20%, about 30%, about 40%, about 50%, about 60%, about 70% or more with respect to the cells making up a total cell population.

[0469] The terms “substantially enriched” or “substantially pure” with respect to a particular cell population, refers to a population of cells that is at least about 75%, at least about 85%, at least about 90%, or at least about 95% pure, with respect to the cells making up a total cell population. That is, the terms “substantially pure” or “essentially purified,” with regard to a population of progenitor cells, refers to a population of cells that contain fewer than about 20%, about 15%, about 10%, about 9%, about 8%, about 7%, about 6%, about 5%, about 4%, about 3%, about 2%, about 1%, or less than 1%, of cells that are not progenitor cells as defined by the terms herein.

[0470] Differentiation of Genome Edited iPSCs into Hematopoietic Progenitor Cells, Neural Progenitor Cells, or Neural Cells

[0471] Another step of the ex vivo methods of the invention involves differentiating the genome edited iPSCs into hematopoietic progenitor cells, neural progenitor cells, or neural cells. The differentiating step may be performed according to any method known in the art. For example, iPSCs are differentiated into neurons using a combination of small molecules or by delivery of master transcription factors such as, but not limited to, Brn2, ASCL1, MYT1 L, Sox2 and Foxa2,Hes1, Hes3, Klf4, Myc, Notch1, (NICD), PLAGL1, and Rfx4. iPSCs can be differentiated into neurons, expressing βIII-tubulin, tyrosine hydroxylase, AADC, DAT, ChAT, LMX1 B, and MAP2. The presence of catecholamine-associated enzymes may indicate that iPSCs, like hESCs, may be differentiable into dopaminergic neurons.

[0472] Differentiation of Genome Edited Mesenchymal Stem Cells into Hematopoietic Progenitor Cells, Neural Progenitor Cells, or Neural Cells

[0473] Another step of the ex vivo methods of the invention involves differentiating the genome edited mesenchymal stem cells into neural cells. The differentiating step may be performed according to any method known in the art. For example, mesenchymal stem cells are differentiated into neurons using a combination of small molecules or by delivery of master transcription factors such as, but not limited to, Brn2, ASCL1, MYT1 L, Sox2 and Foxa2,Hes1, Hes3, Klf4, Myc, Notch1, (NICD), PLAGL1, and Rfx4. Mesenchymal stem cells can be differentiated into neurons, expressing βIII-tubulin, tyrosine hydroxylase, AADC, DAT, ChAT, LMX1 B, and MAP2. The presence of catecholamine-associated enzymes may indicate that mesenchymal stem cells, like hESCs, may be differentiable into dopaminergic neurons.

[0474] Implanting Cells into Patients

[0475] Another step of the ex vivo methods of the invention involves implanting the cells into patients. This implanting step may be accomplished using any method of implantation known in the art. For example, the genetically modified cells may be injected directly in the patient's central nervous system or otherwise administered to the patient. The genetically modified cells may be purified ex vivo using a selected marker.

[0476] Pharmaceutically Acceptable Carriers

[0477] The ex vivo methods of administering progenitor cells to a subject contemplated herein involve the use of therapeutic compositions comprising progenitor cells.

[0478] Therapeutic compositions contain a physiologically tolerable carrier together with the cell composition, and optionally at least one additional bioactive agent as described herein, dissolved or dispersed therein as an active ingredient. In some embodiments, the therapeutic composition is not substantially immunogenic when administered to a mammal or human patient for therapeutic purposes, unless so desired.

[0479] In general, the progenitor cells described herein are administered as a suspension with a pharmaceutically acceptable carrier. One of skill in the art will recognize that a pharmaceutically acceptable carrier to be used in a cell composition will not include buffers, compounds, cryopreservation agents, preservatives, or other agents in amounts that substantially interfere with the viability of the cells to be delivered to the subject. A formulation comprising cells can include e.g., osmotic buffers that permit cell membrane integrity to be maintained, and optionally, nutrients to maintain cell viability or enhance engraftment upon administration. Such formulations and suspensions are known to those of skill in the art and/or can be adapted for use with the progenitor cells, as described herein, using routine experimentation.

[0480] A cell composition can also be emulsified or presented as a liposome composition, provided that the emulsification procedure does not adversely affect cell viability. The cells and any other active ingredient can be mixed with excipients that are pharmaceutically acceptable and compatible with the active ingredient, and in amounts suitable for use in the therapeutic methods described herein.

[0481] Additional agents included in a cell composition can include pharmaceutically acceptable salts of the components therein. Pharmaceutically acceptable salts include the acid addition salts (formed with the free amino groups of the polypeptide) that are formed with inorganic acids, such as, for example, hydrochloric or phosphoric acids, or such organic acids as acetic, tartaric, mandelic and the like. Salts formed with the free carboxyl groups can also be derived from inorganic bases, such as, for example, sodium, potassium, ammonium, calcium or ferric hydroxides, and such organic bases as isopropylamine, trimethylamine, 2-ethylamino ethanol, histidine, procaine and the like.

[0482] Physiologically tolerable carriers are well known in the art. Exemplary liquid carriers are sterile aqueous solutions that contain no materials in addition to the active ingredients and water, or contain a buffer such as sodium phosphate at physiological pH value, physiological saline or both, such as phosphate-buffered saline. Still further, aqueous carriers can contain more than one buffer salt, as well as salts such as sodium and potassium chlorides, dextrose, polyethylene glycol and other solutes. Liquid compositions can also contain liquid phases in addition to and to the exclusion of water. Exemplary of such additional liquid phases are glycerin, vegetable oils such as cottonseed oil, and water-oil emulsions. The amount of an active compound used in the cell compositions that is effective in the treatment of a particular disorder or condition will depend on the nature of the disorder or condition, and can be determined by standard clinical techniques.

[0483] Administration & Efficacy

[0484] The terms “administering,” “introducing” and “transplanting” are used interchangeably in the context of the placement of cells, e.g., progenitor cells, into a subject, by a method or route that results in at least partial localization of the introduced cells at a desired site, such as a site of injury or repair, such that a desired effect(s) is produced. The cells e.g., progenitor cells, or their differentiated progeny can be administered by any appropriate route that results in delivery to a desired location in the subject where at least a portion of the implanted cells or components of the cells remain viable. The period of viability of the cells after administration to a subject can be as short as a few hours, e.g., twenty-four hours, to a few days, to as long as several years, or even the life time of the patient, i.e., long-term engraftment. For example, in some embodiments described herein, an effective amount of myogenic progenitor cells is administered via a systemic route of administration, such as an intraperitoneal or intravenous route.

[0485] The terms “individual”, “subject,” “host” and “patient” are used interchangeably herein and refer to any subject for whom diagnosis, treatment or therapy is desired. In some embodiments, the subject is a mammal. In some embodiments, the subject is a human being.

[0486] When provided prophylactically, progenitor cells described herein can be administered to a subject in advance of any symptom of ALS and/or FTLD, e.g., prior to the development of dementia, difficulty walking, weakness in the legs, hand weakness, clumsiness, slurring of speech, trouble swallowing, muscle cramps, twitching in the arms or shoulders or tongue, difficulty holding the head up or keeping good posture. Accordingly, the prophylactic administration of a neural progenitor cell population serves to prevent ALS and/or FTLD.

[0487] When provided therapeutically, neural progenitor cells are provided at (or after) the onset of a symptom or indication of ALS and/or FTLD, e.g., upon the onset of disease.

[0488] In some embodiments described herein, the neural progenitor cell population being administered according to the methods described herein comprises allogeneic neural progenitor cells obtained from one or more donors. “Allogeneic” refers to a neural progenitor cell or biological samples comprising neural progenitor cells obtained from one or more different donors of the same species, where the genes at one or more loci are not identical. For example, a neural progenitor cell population being administered to a subject can be derived from one more unrelated donor subjects, or from one or more non-identical siblings. In some embodiments, syngeneic neural progenitor cell populations can be used, such as those obtained from genetically identical animals, or from identical twins. In other embodiments, the neural progenitor cells are autologous cells; that is, the neural progenitor cells are obtained or isolated from a subject and administered to the same subject, i.e., the donor and recipient are the same.

[0489] In one embodiment, the term “effective amount” refers to the amount of a population of progenitor cells or their progeny needed to prevent or alleviate at least one or more signs or symptoms of ALS and/or FTLD, and relates to a sufficient amount of a composition to provide the desired effect, e.g., to treat a subject having ALS and/or FTLD. The term “therapeutically effective amount” therefore refers to an amount of progenitor cells or a composition comprising progenitor cells that is sufficient to promote a particular effect when administered to a typical subject, such as one who has or is at risk for ALS and/or FTLD. An effective amount would also include an amount sufficient to prevent or delay the development of a symptom of the disease, alter the course of a symptom of the disease (for example but not limited to, slow the progression of a symptom of the disease), or reverse a symptom of the disease. It is understood that for any given case, an appropriate “effective amount” can be determined by one of ordinary skill in the art using routine experimentation.

[0490] For use in the various embodiments described herein, an effective amount of progenitor cells comprises at least 10² progenitor cells, at least 5×10² progenitor cells, at least 10³ progenitor cells, at least 5×10³ progenitor cells, at least 10⁴ progenitor cells, at least 5×10⁴ progenitor cells, at least 10⁵ progenitor cells, at least 2×10⁵ progenitor cells, at least 3×10⁵ progenitor cells, at least 4×10⁵ progenitor cells, at least 5×10⁵ progenitor cells, at least 6×10⁵ progenitor cells, at least 7×10⁵ progenitor cells, at least 8×10⁵ progenitor cells, at least 9×10⁵ progenitor cells, at least 1×10⁶ progenitor cells, at least 2×10⁶ progenitor cells, at least 3×10⁶ progenitor cells, at least 4×10⁶ progenitor cells, at least 5×10⁶ progenitor cells, at least 6×10⁶ progenitor cells, at least 7×10⁶ progenitor cells, at least 8×10⁶ progenitor cells, at least 9×10⁶ progenitor cells, or multiples thereof. The progenitor cells are derived from one or more donors, or are obtained from an autologous source. In some embodiments described herein, the progenitor cells are expanded in culture prior to administration to a subject in need thereof.

[0491] Reduction of the expanded hexanucleotide repeats in the C9ORF72 gene in cells of patients having ALS and/or FTLD can be beneficial for ameliorating one or more symptoms of the disease, for increasing long-term survival, and/or for reducing side effects associated with other treatments. Upon administration of such cells to human patients, the presence of neural progenitors that have wild-type or similar levels of the hexanucleotide repeat is beneficial. In some embodiments, effective treatment of a subject gives rise to at least about 3%, 5% or 7% wild-type or similar levels relative to total hexanucleotide repeat in the treated subject. In some embodiments, wild-type or similar levels will be at least about 10% of total hexanucleotide repeat. In some embodiments, wild-type or similar levels will be at least about 20% to 30% of total hexanucleotide repeat. Similarly, the introduction of even relatively limited subpopulations of cells having wild-type levels of hexanucleotide repeat can be beneficial in various patients because in some situations normalized cells will have a selective advantage relative to diseased cells. However, even modest levels of neural progenitors with wild-type or similar levels of hexanucleotide repeat can be beneficial for ameliorating one or more aspects of ALS and/or FTLD in patients. In some embodiments, about 10%, about 20%, about 30%, about 40%, about 50%, about 60%, about 70%, about 80%, about 90% or more of the neural progenitors in patients to whom such cells are administered are producing wild-type or similar levels of hexanucleotide repeat.

[0492] “Administered” refers to the delivery of a progenitor cell composition into a subject by a method or route that results in at least partial localization of the cell composition at a desired site. A cell composition can be administered by any appropriate route that results in effective treatment in the subject, i.e. administration results in delivery to a desired location in the subject where at least a portion of the composition delivered, i.e. at least 1×10⁴ cells are delivered to the desired site for a period of time. Modes of administration include injection, infusion, instillation, or ingestion. “Injection” includes, without limitation, intravenous, intramuscular, intra-arterial, intrathecal, intraventricular, intracapsular, intraorbital, intracardiac, intradermal, intraperitoneal, transtracheal, subcutaneous, subcuticular, intraarticular, sub capsular, subarachnoid, intraspinal, intracerebro spinal, and intrasternal injection and infusion. In some embodiments, the route is intravenous. For the delivery of cells, administration by injection or infusion is generally preferred.

[0493] In one embodiment, the cells are administered systemically. The phrases “systemic administration,” “administered systemically”, “peripheral administration” and “administered peripherally” refer to the administration of a population of progenitor cells other than directly into a target site, tissue, or organ, such that it enters, instead, the subject's circulatory system and, thus, is subject to metabolism and other like processes.

[0494] The efficacy of a treatment comprising a composition for the treatment of ALS and/or FTLD can be determined by the skilled clinician. However, a treatment is considered “effective treatment,” if any one or all of the signs or symptoms of, as but one example, levels of hexanucleotide repeat are altered in a beneficial manner (e.g., increased by at least 10%), or other clinically accepted symptoms or markers of disease are improved or ameliorated. Efficacy can also be measured by failure of an individual to worsen as assessed by hospitalization or need for medical interventions (e.g., chronic obstructive pulmonary disease, or progression of the disease is halted or at least slowed). Methods of measuring these indicators are known to those of skill in the art and/or described herein. Treatment includes any treatment of a disease in an individual or an animal (some non-limiting examples include a human, or a mammal) and includes: (1) inhibiting the disease, e.g., arresting, or slowing the progression of symptoms; or (2) relieving the disease, e.g., causing regression of symptoms; and (3) preventing or reducing the likelihood of the development of symptoms.

[0495] The treatment according to the present invention ameliorates one or more symptoms associated with ALS and/or FTLD by reducing the amount of hexanucleotide repeat in the individual. Early signs typically associated with ALS and/or FTLD include for example, dementia, difficulty walking, weakness in the legs, hand weakness, clumsiness, slurring of speech, trouble swallowing, muscle cramps, twitching in the arms or shoulders or tongue, difficulty holding the head up or keeping good posture.

[0496] Kits

[0497] The present disclosure provides kits for carrying out the methods of the invention. A kit can include one or more of a genome-targeting nucleic acid, a polynucleotide encoding a genome-targeting nucleic acid, a site-directed polypeptide, a polynucleotide encoding a site-directed polypeptide, and/or any nucleic acid or proteinaceous molecule necessary to carry out the embodiments of the methods of the invention, or any combination thereof.

[0498] In some embodiments, a kit comprises: (1) a vector comprising a nucleotide sequence encoding a genome-targeting nucleic acid, and (2) a vector comprising a nucleotide sequence encoding the site-directed polypeptide or the site-directed polypeptide and (3) a reagent for reconstitution and/or dilution of the vector(s) and or polypeptide.

[0499] In some embodiments, a kit comprises: (1) a vector comprising (i) a nucleotide sequence encoding a genome-targeting nucleic acid, and (ii) a nucleotide sequence encoding the site-directed polypeptide and (2) a reagent for reconstitution and/or dilution of the vector.

[0500] In some embodiments of any of the above kits, the kit comprises a single-molecule guide genome-targeting nucleic acid. In some embodiments of any of the above kits, the kit comprises a double-molecule genome-targeting nucleic acid. In some embodiments of any of the above kits, the kit comprises two or more double-molecule guides or single-molecule guides. In some embodiments, the kits comprise a vector that encodes the nucleic acid targeting nucleic acid.

[0501] In some embodiments of any of the above kits, the kit can further comprise a polynucleotide to be inserted to effect the desired genetic modification.

[0502] Components of a kit may be in separate containers, or combined in a single container.

[0503] In some embodiments, a kit described above further comprises one or more additional reagents, where such additional reagents are selected from a buffer, a buffer for introducing a polypeptide or polynucleotide into a cell, a wash buffer, a control reagent, a control vector, a control RNA polynucleotide, a reagent for in vitro production of the polypeptide from DNA, adaptors for sequencing and the like. A buffer can be a stabilization buffer, a reconstituting buffer, a diluting buffer, or the like. In some embodiments, a kit can also include one or more components that may be used to facilitate or enhance the on-target binding or the cleavage of DNA by the endonuclease, or improve the specificity of targeting.

[0504] In addition to the above-mentioned components, a kit can further include instructions for using the components of the kit to practice the methods. The instructions for practicing the methods are generally recorded on a suitable recording medium. For example, the instructions may be printed on a substrate, such as paper or plastic, etc. The instructions may be present in the kits as a package insert, in the labeling of the container of the kit or components thereof (i.e., associated with the packaging or subpackaging), etc. The instructions can be present as an electronic storage data file present on a suitable computer readable storage medium, e.g. CD-ROM, diskette, flash drive, etc. In some instances, the actual instructions are not present in the kit, but means for obtaining the instructions from a remote source (e.g. via the Internet), can be provided. An example of this embodiment is a kit that includes a web address where the instructions can be viewed and/or from which the instructions can be downloaded. As with the instructions, this means for obtaining the instructions can be recorded on a suitable substrate.

[0505] Guide RNA Formulation

[0506] Guide RNAs of the invention are formulated with pharmaceutically acceptable excipients such as carriers, solvents, stabilizers, adjuvants, diluents, etc., depending upon the particular mode of administration and dosage form. Guide RNA compositions are generally formulated to achieve a physiologically compatible pH, and range from a pH of about 3 to a pH of about 11, about pH 3 to about pH 7, depending on the formulation and route of administration. In alternative embodiments, the pH is adjusted to a range from about pH 5.0 to about pH 8. In some embodiments, the compositions comprise a therapeutically effective amount of at least one compound as described herein, together with one or more pharmaceutically acceptable excipients. Optionally, the compositions comprise a combination of the compounds described herein, or may include a second active ingredient useful in the treatment or prevention of bacterial growth (for example and without limitation, anti-bacterial or anti-microbial agents), or may include a combination of reagents of the invention.

[0507] Suitable excipients include, for example, carrier molecules that include large, slowly metabolized macromolecules such as proteins, polysaccharides, polylactic acids, polyglycolic acids, polymeric amino acids, amino acid copolymers, and inactive virus particles. Other exemplary excipients include antioxidants (for example and without limitation, ascorbic acid), chelating agents (for example and without limitation, EDTA), carbohydrates (for example and without limitation, dextrin, hydroxyalkylcellulose, and hydroxyalkylmethylcellulose), stearic acid, liquids (for example and without limitation, oils, water, saline, glycerol and ethanol), wetting or emulsifying agents, pH buffering substances, and the like.

[0508] Other Possible Therapeutic Approaches

[0509] Gene editing can be conducted using nucleases engineered to target specific sequences. To date there are four major types of nucleases: meganucleases and their derivatives, zinc finger nucleases (ZFNs), transcription activator like effector nucleases (TALENs), and CRISPR-Cas9 nuclease systems. The nuclease platforms vary in difficulty of design, targeting density and mode of action, particularly as the specificity of ZFNs and TALENs is through protein-DNA interactions, while RNA-DNA interactions primarily guide Cas9. Cas9 cleavage also requires an adjacent motif, the PAM, which differs between different CRISPR systems. Cas9 from Streptococcus pyogenes cleaves using a NRG PAM, CRISPR from Neisseria meningitidis can cleave at sites with PAMs including NNNNGATT, NNNNNGTTT and NNNNGCTT. A number of other Cas9 orthologs target protospacer adjacent to alternative PAMs.

[0510] It is preferable to use CRISPR endonucleases, such as Cas9, in the methods of the invention. However, the teachings described herein, such as therapeutic Target Sites, could be applied to other forms of endonucleases, such as ZFNs, TALENs, HEs, or MegaTALs, or using combinations of nucleases. However, in order to apply the teachings of the present invention to such endonucleases, one would need to, among other things, engineer proteins directed to the specific target sites.

[0511] Additional binding domains can be fused to the Cas9 protein to increase specificity. The Target Sites of these constructs would map to the identified gRNA specified site, but would require additional binding motifs, such as for a zinc finger domain. In the case of Mega-TAL, a meganuclease can be fused to a TALE DNA-binding domain. The meganuclease domain can increase specificity and provide the cleavage. Similarly, inactivated or dead Cas9 (dCas9) can be fused to a cleavage domain and require the sgRNA/Cas9 target site and adjacent binding site for the fused DNA-binding domain. This likely would require some protein engineering of the dCas9, in addition to the catalytic inactivation, to decrease binding without the additional binding site.

[0512] Zinc Finger Nucleases

[0513] Zinc finger nucleases (ZFNs) are modular proteins comprised of an engineered zinc finger DNA binding domain linked to the catalytic domain of the type II endonuclease FokI. Because FokI functions only as a dimer, a pair of ZFNs must be engineered to bind to cognate target “half-site” sequences on opposite DNA strands and with precise spacing between them to enable the catalytically active FokI dimer to form. Upon dimerization of the FokI domain, which itself has no sequence specificity per se, a DNA double-strand break is generated between the ZFN half-sites as the initiating step in genome editing.

[0514] The DNA binding domain of each ZFN is typically comprised of 3-6 zinc fingers of the abundant Cys2-His2 architecture, with each finger primarily recognizing a triplet of nucleotides on one strand of the target DNA sequence, although cross-strand interaction with a fourth nucleotide also can be important. Alteration of the amino acids of a finger in positions that make key contacts with the DNA alters the sequence specificity of a given finger. Thus, a four-finger zinc finger protein will selectively recognize a 12 bp target sequence, where the target sequence is a composite of the triplet preferences contributed by each finger, although triplet preference can be influenced to varying degrees by neighboring fingers. An important aspect of ZFNs is that they can be readily re-targeted to almost any genomic address simply by modifying individual fingers, although considerable expertise is required to do this well. In most applications of ZFNs, proteins of 4-6 fingers are used, recognizing 12-18 bp respectively. Hence, a pair of ZFNs will typically recognize a combined target sequence of 24-36 bp, not including the 5-7 bp spacer between half-sites. The binding sites can be separated further with larger spacers, including 15-17 bp. A target sequence of this length is likely to be unique in the human genome, assuming repetitive sequences or gene homologs are excluded during the design process. Nevertheless, the ZFN protein-DNA interactions are not absolute in their specificity so off-target binding and cleavage events do occur, either as a heterodimer between the two ZFNs, or as a homodimer of one or the other of the ZFNs. The latter possibility has been effectively eliminated by engineering the dimerization interface of the FokI domain to create “plus” and “minus” variants, also known as obligate heterodimer variants, which can only dimerize with each other, and not with themselves. Forcing the obligate heterodimer prevents formation of the homodimer. This has greatly enhanced specificity of ZFNs, as well as any other nuclease that adopts these FokI variants.

[0515] A variety of ZFN-based systems have been described in the art, modifications thereof are regularly reported, and numerous references describe rules and parameters that are used to guide the design of ZFNs; see, e.g., Segal et al., Proc Natl Acad Sci USA 96(6):2758-63 (1999); Dreier B et al., J Mol Biol. 303(4):489-502 (2000); Liu Q et al., J Biol Chem. 277(6):3850-6 (2002); Dreier et al., J Biol Chem 280(42):35588-97 (2005); and Dreier et al., J Biol Chem. 276(31):29466-78 (2001).

[0516] Transcription Activator-Like Effector Nucleases (TALENs)

[0517] TALENs represent another format of modular nucleases whereby, as with ZFNs, an engineered DNA binding domain is linked to the FokI nuclease domain, and a pair of TALENs operate in tandem to achieve targeted DNA cleavage. The major difference from ZFNs is the nature of the DNA binding domain and the associated target DNA sequence recognition properties. The TALEN DNA binding domain derives from TALE proteins, which were originally described in the plant bacterial pathogen Xanthomonas sp. TALEs are comprised of tandem arrays of 33-35 amino acid repeats, with each repeat recognizing a single basepair in the target DNA sequence that is typically up to 20 bp in length, giving a total target sequence length of up to 40 bp. Nucleotide specificity of each repeat is determined by the repeat variable diresidue (RVD), which includes just two amino acids at positions 12 and 13. The bases guanine, adenine, cytosine and thymine are predominantly recognized by the four RVDs: Asn-Asn, Asn-Ile, His-Asp and Asn-Gly, respectively. This constitutes a much simpler recognition code than for zinc fingers, and thus represents an advantage over the latter for nuclease design. Nevertheless, as with ZFNs, the protein-DNA interactions of TALENs are not absolute in their specificity, and TALENs have also benefitted from the use of obligate heterodimer variants of the FokI domain to reduce off-target activity.

[0518] Additional variants of the FokI domain have been created that are deactivated in their catalytic function. If one half of either a TALEN or a ZFN pair contains an inactive FokI domain, then only single-strand DNA cleavage (nicking) will occur at the target site, rather than a DSB. The outcome is comparable to the use of CRISPR/Cas9/Cpf1 “nickase” mutants in which one of the Cas9 cleavage domains has been deactivated. DNA nicks can be used to drive genome editing by HDR, but at lower efficiency than with a DSB. The main benefit is that off-target nicks are quickly and accurately repaired, unlike the DSB, which is prone to NHEJ-mediated mis-repair.

[0519] A variety of TALEN-based systems have been described in the art, and modifications thereof are regularly reported; see, e.g., Boch, Science 326(5959):1509-12 (2009); Mak et al., Science 335(6069):716-9 (2012); and Moscou et al., Science 326(5959):1501 (2009). The use of TALENs based on the “Golden Gate” platform has been described by multiple groups; see, e.g., Cermak et al., Nucleic Acids Res. 39(12):e82 (2011); Li et al., Nucleic Acids Res. 39(14):6315-25(2011); Weber et al., PLoS One. 6(2):e16765 (2011); Wang et al., J Genet Genomics 41(6):339-47, Epub 2014 May 17 (2014); and Cermak T et al., Methods Mol Biol. 1239:133-59 (2015).

[0520] Homing Endonucleases

[0521] Homing endonucleases (HEs) are sequence-specific endonucleases that have long recognition sequences (14-44 base pairs) and cleave DNA with high specificity—often at sites unique in the genome. There are at least six known families of HEs as classified by their structure, including LAGLIDADG (SEQ ID NO: 18809), GIY-YIG, His-Cis box, H-N-H, PD-(D/E)xK, and Vsr-like that are derived from a broad range of hosts, including eukarya, protists, bacteria, archaea, cyanobacteria and phage. As with ZFNs and TALENs, HEs can be used to create a DSB at a target locus as the initial step in genome editing. In addition, some natural and engineered HEs cut only a single strand of DNA, thereby functioning as site-specific nickases. The large target sequence of HEs and the specificity that they offer have made them attractive candidates to create site-specific DSBs.

[0522] A variety of HE-based systems have been described in the art, and modifications thereof are regularly reported; see, e.g., the reviews by Steentoft et al., Glycobiology 24(8):663-80 (2014); Belfort and Bonocora, Methods Mol Biol. 1123:1-26 (2014); Hafez and Hausner, Genome 55(8):553-69 (2012); and references cited therein.

[0523] MegaTAL/Tev-mTALEN/MegaTev

[0524] As further examples of hybrid nucleases, the MegaTAL platform and Tev-mTALEN platform use a fusion of TALE DNA binding domains and catalytically active HEs, taking advantage of both the tunable DNA binding and specificity of the TALE, as well as the cleavage sequence specificity of the HE; see, e.g., Boissel et al., NAR 42: 2591-2601 (2014); Kleinstiver et al., G3 4:1155-65 (2014); and Boissel and Scharenberg, Methods Mol. Biol. 1239: 171-96 (2015).

[0525] In a further variation, the MegaTev architecture is the fusion of a meganuclease (Mega) with the nuclease domain derived from the GIY-YIG homing endonuclease I-Tevl (Tev). The two active sites are positioned ˜30 bp apart on a DNA substrate and generate two DSBs with non-compatible cohesive ends; see, e.g., Wolfs et al., NAR 42, 8816-29 (2014). It is anticipated that other combinations of existing nuclease-based approaches will evolve and be useful in achieving the targeted genome modifications described herein.

[0526] dCas9-FokI or dCpf1-Fok1 and Other Nucleases

[0527] Combining the structural and functional properties of the nuclease platforms described above offers a further approach to genome editing that can potentially overcome some of the inherent deficiencies. As an example, the CRISPR genome editing system typically uses a single Cas9 endonuclease to create a DSB. The specificity of targeting is driven by a 20 or 24 nucleotide sequence in the guide RNA that undergoes Watson-Crick base-pairing with the target DNA (plus an additional 2 bases in the adjacent NAG or NGG PAM sequence in the case of Cas9 from S. pyogenes ). Such a sequence is long enough to be unique in the human genome, however, the specificity of the RNA/DNA interaction is not absolute, with significant promiscuity sometimes tolerated, particularly in the 5′ half of the target sequence, effectively reducing the number of bases that drive specificity. One solution to this has been to completely deactivate the Cas9 or Cpf1 catalytic function—retaining only the RNA-guided DNA binding function—and instead fusing a FokI domain to the deactivated Cas9; see, e.g., Tsai et al., Nature Biotech 32: 569-76 (2014); and Guilinger et al., Nature Biotech. 32: 577-82 (2014). Because FokI must dimerize to become catalytically active, two guide RNAs are required to tether two FokI fusions in close proximity to form the dimer and cleave DNA. This essentially doubles the number of bases in the combined Target Sites, thereby increasing the stringency of targeting by CRISPR-based systems.

[0528] As further example, fusion of the TALE DNA binding domain to a catalytically active HE, such as I-Tevl, takes advantage of both the tunable DNA binding and specificity of the TALE, as well as the cleavage sequence specificity of I-Tevl, with the expectation that off-target cleavage may be further reduced.

[0529] Methods and Compositions of the Invention

[0530] Accordingly, the present disclosure relates in particular to the following non-limiting inventions: In a first method, Method 1, the present disclosure provides a method for editing the C9ORF72 gene in a human cell by genome editing, the method comprising introducing into the cell one or more deoxyribonucleic acid (DNA) endonucleases to effect one or more single-strand breaks (SSBs) or double-strand breaks (DSBs) within or near the C9ORF72 gene or other DNA sequences that encode regulatory elements of the C9ORF72 gene that results in permanent deletion, insertion, or correction of the expanded hexanucleotide repeat within or near the C9ORF72 gene and results in restoration of C9orf72 protein activity.

[0531] In another method, Method 2, the present disclosure provides a method for inserting the C9ORF72 gene in a human cell by genome editing, the method comprising the step of: introducing into the human cell one or more deoxyribonucleic acid (DNA) endonucleases to effect one or more single-strand breaks (SSBs) or double-strand breaks (DSBs) within or near a safe harbor locus that results in a permanent insertion of the C9ORF72 gene or minigene, and results in restoration of the C9orf72 protein activity.

[0532] In another method, Method 3, present disclosure provides an ex vivo method for treating a patient with amyotrophic lateral sclerosis (ALS) or frontotemporal lobular dementia (FTLD) comprising the steps of: i) creating a patient specific induced pluripotent stem cell (iPSC); ii) editing within or near the C9ORF72 gene of the iPSC or other DNA sequences that encode regulatory elements of the C9ORF72 gene of the iPSC, or editing within or near a safe harbor locus of the iPSC; iii) differentiating the genome edited iPSC into a hematopoietic progenitor cell, a neural progenitor cell, or neural cell; and iv) implanting the hematopoietic progenitor cell, neural progenitor cell, or neural cell into the patient.

[0533] In another method, Method 4, the present disclosure provides the method of Method 3, wherein the creating step comprises: a) isolating a somatic cell from the patient; and b) introducing a set of pluripotency-associated genes into the somatic cell to induce the cell to become a pluripotent stem cell.

[0534] In another method, Method 5, the present disclosure provides the method of Method 4, wherein the somatic cell is a fibroblast.

[0535] In another method, Method 6, the present disclosure provides the method of Method 4, wherein the set of pluripotency-associated genes is one or more of the genes selected from the group consisting of OCT4, SOX2, KLF4, Lin28, NANOG and cMYC.

[0536] In another method, Method 7, the present disclosure provides the method of any one of Methods 3-6, wherein the editing step comprises introducing into the iPSC one or more deoxyribonucleic acid (DNA) endonucleases to effect one or more single-stranded breaks (SSBs) or double-strand breaks (DSBs) within or near the C9ORF72 gene or other DNA sequences that encode regulatory elements of the C9ORF72 gene that results in permanent deletion, insertion, or correction of the expanded hexanucleotide repeat within or near the C9ORF72 gene or other DNA sequences that encode regulatory elements of the C9ORF72 gene, or within or near a safe harbor locus that results in permanent insertion of the C9ORF72 gene or minigene and restoration of C9orf72 protein activity.

[0537] In another method, Method 8, the present disclosure provides the method of Method 7, wherein the safe harbor locus is a safe harbor locus selected from the group consisting of: AAVS1 (PPP1R12C), ALB, Angptl3, ApoC3, ASGR2, CCR5, FIX (F9), G6PC, Gys2, HGD, Lp(a), Pcsk9, Serpina1, TF, and TTR.

[0538] In another method, Method 9, the present disclosure provides the method of any one of Methods 3-8, wherein the differentiating step comprises one or more of the following to differentiate the genome edited iPSC into a hematopoietic progenitor cell, a neural progenitor cell, or neural cell: treatment with a combination of small molecules or delivery of master transcription factors.

[0539] In another method, Method 10, the present disclosure provides the method of any one of Methods 3-9, wherein the implanting step comprises implanting the hematopoietic progenitor cell, neural progenitor cell, or neural cell into the patient by transplantation, local injection, systemic infusion, or combinations thereof.

[0540] In another method, Method 11, the present disclosure provides an ex vivo method for treating a patient with amyotrophic lateral sclerosis (ALS) or frontotemporal lobular dementia (FTLD) comprising the steps of: i) isolating a white blood cell from the patient; ii) editing within or near the C9ORF72 gene or other DNA sequences that encode regulatory elements of the C9ORF72 gene of the white blood cell, or editing within or near a safe harbor locus of the white blood cell; and iii) implanting the edited white blood cell into the patient.

[0541] In another method, Method 12, the present disclosure provides the method of Method 11, wherein the isolating step comprises: cell differential centrifugation, cell culturing, or combinations thereof.

[0542] In another method, Method 13, the present disclosure provides the method of any one of Methods 11-12, wherein the editing step comprises introducing into the neural cell one or more deoxyribonucleic acid (DNA) endonucleases to effect one or more single-strand breaks (SSBs) or one or more double-strand breaks (DSBs) within or near the C9ORF72 gene or other DNA sequences that encode regulatory elements of the C9ORF72 gene that results in permanent deletion, insertion, or correction of the expanded hexanucleotide repeat within or near the C9ORF72 gene or other DNA sequences that encode regulatory elements of the C9ORF72 gene, or within or near a safe harbor locus that results in restoration of C9orf72 protein activity.

[0543] In another method, Method 14, the present disclosure provides the method of Method 13, wherein the safe harbor locus is a safe harbor locus selected from the group consisting of: AAVS1 (PPP1R12C), ALB, Angptl3, ApoC3, ASGR2, CCR5, FIX (F9), G6PC, Gys2, HGD, Lp(a), Pcsk9, Serpina1, TF, and TTR.

[0544] In another method, Method 15, the present disclosure provides the method of any one of Methods 11-14, wherein the implanting step comprises implanting the edited white blood cell into the patient by transplantation, local injection, systemic infusion, or combinations thereof.

[0545] In another method, Method 16, the present disclosure provides an ex vivo method for treating a patient with amyotrophic lateral sclerosis (ALS) or frontotemporal lobular dementia (FTLD) comprising the steps of: i) optionally, performing a biopsy of the patient's bone marrow; ii) isolating a mesenchymal stem cell; iii) editing within or near the C9ORF72 gene of the stem cell or other DNA sequences that encode regulatory elements of the C9ORF72 gene of the stem cell, or editing within or near a safe harbor locus of the stem cell; Iv) differentiating the stem cell into a hematopoietic progenitor cell, neural progenitor cell, or neural cell; and v) implanting the hematopoietic progenitor cell, neural progenitor cell, or neural cell into the patient.

[0546] In another method, Method 17, the present disclosure provides the method of Method 16, wherein the isolating step comprises: aspiration of bone marrow and isolation of mesenchymal cells by density centrifugation using Percoll™.

[0547] In another method, Method 18, the present disclosure provides the method of any one of Methods 16-17, wherein the editing step comprises introducing into the stem cell one or more deoxyribonucleic acid (DNA) endonucleases to effect one or more single-strand breaks (SSBs) or one or more double-strand breaks (DSBs) within or near the C9ORF72 gene or other DNA sequences that encode regulatory elements of the C9ORF72 gene that results in permanent deletion, insertion, or correction of the expanded hexanucleotide repeat within or near the C9ORF72 gene or other DNA sequences that encode regulatory elements of the C9ORF72 gene, or within or near a safe harbor locus that results in restoration of C9orf72 protein activity.

[0548] In another method, Method 19, the present disclosure provides the method of Method 18, wherein the safe harbor locus is a safe harbor locus selected from the group consisting of: AAVS1 (PPP1R12C), ALB, Angptl3, ApoC3, ASGR2, CCR5, FIX (F9), G6PC, Gys2, HGD, Lp(a), Pcsk9, Serpina1, TF, and TTR.

[0549] In another method, Method 20, the present disclosure provides the method of any one of Methods 16-19, wherein the differentiating step comprises one or more of the following to differentiate the genome edited stem cell into a hematopoietic progenitor cell, neural progenitor cell, or neural cell: treatment with a combination of small molecules or delivery of master transcription factors.

[0550] In another method, Method 21, the present disclosure provides the method of any one of Methods 16-20, wherein the implanting step comprises implanting the cell into the patient by transplantation, local injection, systemic infusion, or combinations thereof.

[0551] In another method, Method 22, the present disclosure provides an ex vivo method for treating a patient with amyotrophic lateral sclerosis (ALS) or frontotemporal lobular dementia (FTLD) comprising the steps of: i) optionally, treating the patient with granulocyte colony stimulating factor (GCSF); ii) isolating a hematopoietic progenitor cell from the patient; iii) editing within or near the C9ORF72 gene of the hematopoietic progenitor cell or other DNA sequences that encode regulatory elements of the C9ORF72 gene of the hematopoietic progenitor cell, or editing within or near a safe harbor locus of the hematopoietic progenitor cell; and iv) implanting the cell into the patient.

[0552] In another method, Method 23, the present disclosure provides the method of Method 22, wherein the treating step is performed in combination with Plerixaflor.

[0553] In another method, Method 24, the present disclosure provides the method of any one of Methods 22-23, wherein the isolating step comprises isolating CD34+ cells.

[0554] In another method, Method 25, the present disclosure provides the method of any one of Methods 22-24, wherein the editing step comprises introducing into the stem cell one or more deoxyribonucleic acid (DNA) endonucleases to effect one or more single-strand breaks (SSBs) or one or more double-strand breaks (DSBs) within or near the C9ORF72 gene or other DNA sequences that encode regulatory elements of the C9ORF72 gene that results in permanent deletion, insertion, or correction of the expanded hexanucleotide repeat within or near the C9ORF72 gene or other DNA sequences that encode regulatory elements of the C9ORF72 gene, or within or near a safe harbor locus that results in restoration of C9orf72 protein activity.

[0555] In another method, Method 26, the present disclosure provides the method of Method 25, wherein the safe harbor locus is a safe harbor locus selected from the group consisting of: AAVS1 (PPP1R12C), ALB, Angptl3, ApoC3, ASGR2, CCR5, FIX (F9), G6PC, Gys2, HGD, Lp(a), Pcsk9, Serpina1, TF, and TTR.

[0556] In another method, Method 27, the present disclosure provides the method of any one of Methods 22-26, wherein the implanting step comprises implanting the neural cell into the patient by transplantation, local injection, systemic infusion, or combinations thereof.

[0557] In another method, Method 28, the present disclosure provides an in vivo method for treating a patient with amyotrophic lateral sclerosis (ALS) or frontotemporal lobular dementia (FTLD) comprising the step of editing within or near the C9ORF72 gene in a cell of the patient or other DNA sequences that encode regulatory elements of the C9ORF72 gene, or editing within or near a safe harbor locus.

[0558] In another method, Method 29, the present disclosure provides the method of Method 28, wherein the editing step comprises introducing into the cell one or more deoxyribonucleic acid (DNA) endonucleases to effect one or more single-strand breaks (SSBs) or one or more double-strand breaks (DSBs) within or near the C9ORF72 gene or other DNA sequences that encode regulatory elements of the C9ORF72 gene that results in permanent deletion, insertion, or correction of the expanded hexanucleotide repeat within or near the C9ORF72 gene or other DNA sequences that encode regulatory elements of the C9ORF72 gene, or within or near a safe harbor locus that results in restoration of C9orf72 protein activity.

[0559] In another method, Method 30, the present disclosure provides the method of Method 29, wherein the safe harbor locus is a safe harbor locus selected from the group consisting of: AAVS1 (PPP1R12C), ALB, Angptl3, ApoC3, ASGR2, CCR5, FIX (F9), G6PC, Gys2, HGD, Lp(a), Pcsk9, Serpina1, TF, and TTR.

[0560] In another method, Method 31, the present disclosure provides the method of any one of Methods 28-30, wherein the cell a neural cell, a bone marrow cell, a hematopoietic progenitor cell, or a CD34+ cell.

[0561] In another method, Method 32, the present disclosure provides the method of any one of Methods 1, 7, 13, 18, 25 or 29, wherein the one or more DNA endonucleases is a Cas1, Cas1B, Cas2, Cas3, Cas4, Cas5, Cas6, Cas7, Cas8, Cas9 (also known as Csn1 and Csx12), Cas100, Csy1, Csy2, Csy3, Cse1, Cse2, Csc1, Csc2, Csa5, Csn2, Csm2, Csm3, Csm4, Csm5, Csm6, Cmr1, Cmr3, Cmr4, Cmr5, Cmr6, Csb1, Csb2, Csb3, Csx17, Csx14, Csx10, Csx16, CsaX, Csx3, Csx1, Csx15, Csf1, Csf2, Csf3, Csf4, or Cpf1 endonuclease; or a homolog thereof, recombination of the naturally occurring molecule, codon-optimized, or modified version thereof, and combinations thereof.

[0562] In another method, Method 33, the present disclosure provides the method of Method 32, wherein the method comprises introducing into the cell one or more polynucleotides encoding the one or more DNA endonucleases.

[0563] In another method, Method 34, the present disclosure provides the method of Method 32, wherein the method comprises introducing into the cell one or more ribonucleic acids (RNAs) encoding the one or more DNA endonucleases.

[0564] In another method, Method 35, the present disclosure provides the method of any one of Methods 33 or 34, wherein the one or more polynucleotides or one or more RNAs is one or more modified polynucleotides or one or more modified RNAs.

[0565] In another method, Method 36, the present disclosure provides the method of Method 32, wherein the DNA endonuclease is a protein or polypeptide.

[0566] In another method, Method 37, the present disclosure provides the method of any one of the preceding Methods, wherein the method further comprises introducing into the cell one or more guide ribonucleic acids (gRNAs).

[0567] In another method, Method 38, the present disclosure provides the method of Method 37, wherein the one or more gRNAs are single-molecule guide RNA (sgRNAs).

[0568] In another method, Method 39, the present disclosure provides the method of any one of Methods 37-38, wherein the one or more gRNAs or one or more sgRNAs is one or more modified gRNAs or one or more modified sgRNAs.

[0569] In another method, Method 40, the present disclosure provides the method of any one of Methods 37-39, wherein the one or more DNA endonucleases is pre-complexed with one or more gRNAs or one or more sgRNAs.

[0570] In another method, Method 41, the present disclosure provides the method of any one of the preceding Methods, wherein the method further comprises introducing into the cell a polynucleotide donor template comprising a part of the wild-type C9ORF72 gene or minigene or cDNA.

[0571] In another method, Method 42, the present disclosure provides the method of Method 41, wherein the part of the wild-type C9ORF72 gene or cDNA is the entire C9ORF72 gene or cDNA, or the cDNA of natural Variant 1, Variant 2, or Variant 3.

[0572] In another method, Method 43, the present disclosure provides the method of any one of Methods 41-42, wherein the donor template is either single or double stranded.

[0573] In another method, Method 44, the present disclosure provides the method of any one of Methods 41-43, wherein the donor template has homologous arms to the 9p21.2 region.

[0574] In another method, Method 45, the present disclosure provides the method of any one of Methods 41-43, wherein the donor template has homologous arms to a safe harbor locus selected from the group consisting of exon 1-2 of AAVS1 (PPP1 R12C), exon 1-2 of ALB, exon 1-2 of Angptl3, exon 1-2 of ApoC3, exon 1-2 of ASGR2, exon 1-2 of CCR5, exon 1-2 of FIX (F9), exon 1-2 of G6PC, exon 1-2 of Gys2, exon 1-2 of HGD, exon 1-2 of Lp(a), exon 1-2 of Pcsk9, exon 1-2 of Serpina1, exon 1-2 of TF, and exon 1-2 of TTR.

[0575] In another method, Method 46, the present disclosure provides the method of any one of Methods 1, 7, 13, 18, 25 or 29, wherein the method further comprises introducing into the cell one guide ribonucleic acid (gRNA) and a polynucleotide donor template comprising at least a portion of the wild-type C9ORF72 gene, and wherein the one or more DNA endonucleases is one or more Cas9 or Cpf1 endonucleases that effect one single-strand break (SSB) or double-strand break (DSB) at a DSB locus within or near the C9ORF72 gene or other DNA sequences that encode regulatory elements of the C9ORF72 gene, or within or near a safe harbor locus that facilitates insertion of a new sequence from the polynucleotide donor template into the chromosomal DNA at the locus or safe harbor that results in permanent insertion or correction of a part of the chromosomal DNA of the C9ORF72 gene or other DNA sequences that encode regulatory elements of the C9ORF72 gene proximal to the locus or safe harbor locus and restoration of C9orf72 protein activity, and wherein the gRNA comprises a spacer sequence that is complementary to a segment of the locus or locus.

[0576] In another method, Method 47, the present disclosure provides the method of Method 46, wherein proximal means nucleotides both upstream and downstream of the locus or locus.

[0577] In another method, Method 48, the present disclosure provides the method of any one of Methods 1, 7, 13, 18, 25 or 29, wherein the method further comprises introducing into the cell two guide ribonucleic acid (gRNAs) and a polynucleotide donor template comprising at least a portion of the wild-type C9ORF72 gene, and wherein the one or more DNA endonucleases is two or more Cas9 or Cpf1 endonucleases that effect a pair of single-strand break (SSB) or double-strand breaks (DSBs), the first at a 5′ locus and the second at a 3′ locus, within or near the C9ORF72 gene or other DNA sequences that encode regulatory elements of the C9ORF72 gene, or within or near a safe harbor locus that facilitates insertion of a new sequence from the polynucleotide donor template into the chromosomal DNA between the 5′ locus and the 3′ locus that results in permanent insertion or correction of the chromosomal DNA between the 5′ locus and the 3′ locus within or near the C9ORF72 gene or other DNA sequences that encode regulatory elements of the C9ORF72 gene or safe harbor locus and restoration of C9orf72 protein activity, and wherein the first guide RNA comprises a spacer sequence that is complementary to a segment of the 5′ locus and the second guide RNA comprises a spacer sequence that is complementary to a segment of the 3′ locus.

[0578] In another method, Method 49, the present disclosure provides the method of any one of Methods 46-48, wherein the one or two gRNAs are one or two single-molecule guide RNA (sgRNAs).

[0579] In another method, Method 50, the present disclosure provides the method of any one of Methods 46-49, wherein the one or two gRNAs or one or two sgRNAs is one or two modified gRNAs or one or two modified sgRNAs.

[0580] In another method, Method 51, the present disclosure provides the method of any one of Methods 46-50, wherein the one or more DNA endonucleases is pre-complexed with one or two gRNAs or one or two sgRNAs.

[0581] In another method, Method 52, the present disclosure provides the method of any one of Methods 46-51, wherein the part of the wild-type C9ORF72 gene or cDNA is the entire C9ORF72 gene or cDNA; the cDNA of natural Variant 1, Variant 2, Variant 3; or about 30 hexanucleotide repeats.

[0582] In another method, Method 53, the present disclosure provides the method of any one of Methods 46-52, wherein the donor template is either single or double stranded polynucleotide.

[0583] In another method, Method 54, the present disclosure provides the method of any one of Methods 46-53, wherein the donor template has homologous arms to the 9p21.2 region.

[0584] In another method, Method 55, the present disclosure provides the method of any one of Methods 46-44, wherein the donor template has homologous arms to a safe harbor locus selected from the group consisting of exon 1-2 of AAVS1 (PPP1 R12C), exon 1-2 of ALB, exon 1-2 of Angptl3, exon 1-2 of ApoC3, exon 1-2 of ASGR2, exon 1-2 of CCRS, exon 1-2 of FIX (F9), exon 1-2 of G6PC, exon 1-2 of Gys2, exon 1-2 of HGD, exon 1-2 of Lp(a), exon 1-2 of Pcsk9, exon 1-2 of Serpina1, exon 1-2 of TF, and exon 1-2 of TTR.

[0585] In another method, Method 56, the present disclosure provides the method of Method 44, wherein the DSB, or 5′ DSB and 3′ DSB are in the first intron of the C9ORF72 gene.

[0586] In another method, Method 57, the present disclosure provides the method of any one of Methods 1, 7, 13, 18, 25 or 29-56, wherein the insertion or correction is by homology directed repair (HDR).

[0587] In another method, Method 58, the present disclosure provides the method of any one of Methods 1, 7, 13, 18, 25 or 29, wherein the method further comprises introducing into the cell two guide ribonucleic acid (gRNAs), and wherein the one or more DNA endonucleases is two or more Cas9 or Cpf1 endonucleases that effect a pair of double-strand breaks (DSBs), the first at a 5′ DSB locus and the second at a 3′ DSB locus, within or near the C9ORF72 gene that causes a deletion of the chromosomal DNA between the 5′ DSB locus and the 3′ DSB locus that results in permanent deletion of the chromosomal DNA between the 5′ DSB locus and the 3′ DSB locus within or near the C9ORF72 gene, and wherein the first guide RNA comprises a spacer sequence that is complementary to a segment of the 5′ DSB locus and the second guide RNA comprises a spacer sequence that is complementary to a segment of the 3′ DSB locus.

[0588] In another method, Method 59, the present disclosure provides the method of Method 58, wherein the two gRNAs are two single-molecule guide RNA (sg RNAs).

[0589] In another method, Method 60, the present disclosure provides the method of any one of Methods 58-59, wherein the two gRNAs or two sgRNAs are two modified gRNAs or two modified sgRNAs.

[0590] In another method, Method 61, the present disclosure provides the method of any one of Methods 58-60, wherein the one or more DNA endonucleases is pre-complexed with one or two gRNAs or one or two sgRNAs.

[0591] In another method, Method 62, the present disclosure provides the method of any one of Methods 58-61, wherein both the 5′ DSB and 3′ DSB are in or near either the first exon, first intron, or second exon of the C9ORF72 gene.

[0592] In another method, Method 63, the present disclosure provides the method of any one of Method 58-62, wherein the deletion is a deletion of the expanded hexanucleotide repeat.

[0593] In another method, Method 64, the present disclosure provides the method of any one of Methods 1, 7, 13, 18, 25 or 29-63, wherein the Cas9 or Cpf1 mRNA, gRNA, and donor template are either each formulated separately into lipid nanoparticles or all co-formulated into a lipid nanoparticle.

[0594] In another method, Method 65, the present disclosure provides the method of any one of Methods 1, 7, 13, 18, 25 or 29-63, wherein the Cas9 or Cpf1 mRNA is formulated into a lipid nanoparticle, and both the gRNA and donor template are delivered by a viral vector.

[0595] In another method, Method 66, the present disclosure provides the method of Method 65, wherein the viral vector is an adeno-associated virus (AAV) vector.

[0596] In another method, Method 67, the present disclosure provides the method of Method 66, wherein the AAV vector is an AAV6 vector.

[0597] In another method, Method 68, the present disclosure provides the method of any one of Methods 1, 7, 13, 18, 25 or 29-63, wherein the Cas9 or Cpf1 mRNA, gRNA, and donor template are either each formulated into separate exosomes or all co-formulated into an exosome.

[0598] In another method, Method 69, the present disclosure provides the method of any one of Methods 1, 7, 13, 18, 25 or 29-63, wherein the Cas9 or Cpf1 mRNA is formulated into a lipid nanoparticle, and the gRNA is delivered to the cell by electroporation and donor template is delivered to the cell by a viral vector.

[0599] In another method, Method 70, the present disclosure provides the method of Methods 69, wherein the gRNA is delivered to the cell by electroporation and donor template is delivered to the cell by an adeno-associated virus (AAV) vector.

[0600] In another method, Method 71, the present disclosure provides the method of Method 70, wherein the AAV vector is an AAV6 vector.

[0601] In another method, Method 72, the present disclosure provides the method of any one of the preceding Methods, wherein the C9ORF72 gene is located on Chromosome 9: 27,546,542-27,573,863 (Genome Reference Consortium—GRCh38/hg38).

[0602] In another method, Method 73, the present disclosure provides the method of any one of Methods 1, 7, 13, 18, 25 or 29, wherein the restoration of C9orf72 protein activity is compared to wild-type or normal C9orf72 protein activity.

[0603] In another method, Method 74, the present disclosure provides a method for treating a patient with amyotrophic lateral sclerosis (ALS) or frontotemporal lobular dementia (FTLD) comprising transplanting the bone marrow from a donor to the patient.

[0604] The present disclosure also provides a composition, Composition 1, of one or more guide ribonucleic acids (gRNAs) comprising a spacer sequence selected from the group consisting of the nucleic acid sequences in SEQ ID NOs: 1-18807 for editing the C9ORF72 gene in a cell from a patient with amyotrophic lateral sclerosis (ALS) or frontotemporal lobular dementia (FTLD).

[0605] In another composition, Composition 2, the present disclosure provides the composition of Composition 1, wherein the one or more gRNAs are one or more single-molecule guide RNAs (sgRNAs).

[0606] In another composition, Composition 3, the present disclosure provides the composition of Composition 1 or Composition 2, wherein the one or more gRNAs or one or more sgRNAs is one or more modified gRNAs or one or more modified sgRNAs.

[0607] The present disclosure also provides a composition, Composition 4, of one or more guide ribonucleic acids (gRNAs) comprising a spacer sequence selected from the group consisting of the nucleic acid sequences in SEQ ID NOs: 18810-73668 for editing the C9ORF72 gene in a cell from a patient with amyotrophic lateral sclerosis (ALS) or frontotemporal lobular dementia (FTLD).

[0608] In another composition, Composition 5, the present disclosure provides the composition of Composition 4, wherein the one or more gRNAs are one or more single-molecule guide RNAs (sgRNAs).

[0609] In another composition, Composition 6, the present disclosure provides the composition of Composition 4 or Composition 5, wherein the one or more gRNAs or one or more sgRNAs is one or more modified gRNAs or one or more modified sgRNAs.

[0610] Definitions

[0611] The term “comprising” or “comprises” is used in reference to compositions, methods, and respective component(s) thereof, that are essential to the invention, yet open to the inclusion of unspecified elements, whether essential or not.

[0612] The term “consisting essentially of” refers to those elements required for a given embodiment. The term permits the presence of additional elements that do not materially affect the basic and novel or functional characteristic(s) of that embodiment of the invention.

[0613] The term “consisting of” refers to compositions, methods, and respective components thereof as described herein, which are exclusive of any element not recited in that description of the embodiment.

[0614] The singular forms “a,” “an,” and “the” include plural references, unless the context clearly dictates otherwise.

[0615] Certain numerical values presented herein are preceded by the term “about.” The term “about” is used to provide literal support for the numerical value the term “about” precedes, as well as a numerical value that is approximately the numerical value, that is the approximating unrecited numerical value may be a number which, in the context it is presented, is the substantial equivalent of the specifically recited numerical value. The term “about” means numerical values within +10% of the recited numerical value.

[0616] When a range of numerical values is presented herein, it is contemplated that each intervening value between the lower and upper limit of the range, the values that are the upper and lower limits of the range, and all stated values with the range are encompassed within the disclosure. All the possible sub-ranges within the lower and upper limits of the range are also contemplated by the disclosure.

### EXAMPLES

[0617] The invention will be more fully understood by reference to the following examples, which provide illustrative non-limiting embodiments of the invention.

[0618] The examples describe the use of the CRISPR system as an illustrative genome editing technique to create defined therapeutic genomic replacements, termed “genomic modifications” herein, in the C9ORF72 gene that lead to permanent correction of expanded hexanucleotide repeats in the genomic locus, or expression at a heterologous locus, that restore wild-type or similar levels of hexanucleotide repeats. Introduction of the defined therapeutic modifications represents a novel therapeutic strategy for the potential amelioration of ALS and/or FTLD, as described and illustrated herein.

### Example 1

### CRISPR/SpCas9 Target Sites for the C9ORF72 Gene

[0619] Regions of the C9ORF72 gene were scanned for Target Sites. Each area was scanned for a protospacer adjacent motif (PAM) having the sequence NRG. gRNA 20 bp spacer sequences corresponding to the PAM were identified, as provided in SEQ ID NOs: 1-6148.

### Example 2

### CRISPR/SaCas9 Target Sites for the C9ORF72 Gene

[0620] Regions of the C9ORF72 gene were scanned for Target Sites. Each area was scanned for a protospacer adjacent motif (PAM) having the sequence NNGRRT. gRNA 20 bp spacer sequences corresponding to the PAM were identified, as provided in SEQ ID NOs: 6149-6892.

### Example 3

### CRISPR/StCas9 Target Sites for the C9ORF72 Gene

[0621] Regions of the C9ORF72 gene were scanned for Target Sites. Each area was scanned for a protospacer adjacent motif (PAM) having the sequence NNAGAAW. gRNA 24 bp spacer sequences corresponding to the PAM were identified, as provided in SEQ ID NOs: 7760-8097.

### Example 4

### CRISPR/TdCas9 Target Sites for the C9ORF72 Gene

[0622] Regions of the C9ORF72 gene were scanned for Target Sites. Each area was scanned for a protospacer adjacent motif (PAM) having the sequence NAAAAC. gRNA 24 bp spacer sequences corresponding to the PAM were identified, as provided in SEQ ID NOs: 8098-8261.

### Example 5

### CRISPR/NmCas9 Target Sites for the C9ORF72 Gene

[0623] Regions of the C9ORF72 gene were scanned for Target Sites. Each area was scanned for a protospacer adjacent motif (PAM) having the sequence NNNNGHTT. gRNA 24 bp spacer sequences corresponding to the PAM were identified, as provided in SEQ ID NOs: 6893-7759.

### Example 6

### CRISPR/Cpf1 Target Sites for the C9ORF72 Gene

[0624] Regions of the C9ORF72 gene were scanned for Target Sites. Each area was scanned for a protospacer adjacent motif (PAM) having the sequence YTN. gRNA 24 bp spacer sequences corresponding to the PAM were identified, as provided in SEQ ID NOs: 8262-18807.

### Example 7

### CRISPR/SpCas9 Target Sites for the AAVS1 (PPP1R12C) Gene

[0625] Exons 1-2 of the AAVS1 (PPP1R12C) gene were scanned for Target Sites. Each area was scanned for a protospacer adjacent motif (PAM) having the sequence NRG. gRNA 20 bp spacer sequences corresponding to the PAM were identified, as shown in SEQ ID NOs: 18810-20841.

### Example 8

### CRISPR/SaCas9 Target Sites for the AAVS1 (PPP1R12C) Gene

[0626] Exons 1-2 of the AAVS1 (PPP1R12C) gene were scanned for Target Sites. Each area was scanned for a protospacer adjacent motif (PAM) having the sequence NNGRRT. gRNA 20 bp spacer sequences corresponding to the PAM were identified, as shown in SEQ ID NOs: 20842-21012.

### Example 9

### CRISPR/StCas9 Target Sites for the AAVS1 (PPP1R12C) Gene

[0627] Exons 1-2 of the AAVS1 (PPP1R12C) gene were scanned for Target Sites. Each area was scanned for a protospacer adjacent motif (PAM) having the sequence NNAGAAW. gRNA 20 bp spacer sequences corresponding to the PAM were identified, as shown in SEQ ID NOs: 21013-21030.

### Example 10

### CRISPR/TdCas9 Target Sites for the AAVS1 (PPP1R12C) Gene

[0628] Exons 1-2 of the AAVS1 (PPP1R12C) gene were scanned for Target Sites. Each area was scanned for a protospacer adjacent motif (PAM) having the sequence NAAAAC. gRNA 20 bp spacer sequences corresponding to the PAM were identified, as shown in SEQ ID NOs: 21031-21039.

### Example 11

### CRISPR/NmCas9 Target Sites for the AAVS1 (PPP1R12C) Gene

[0629] Exons 1-2 of the AAVS1 (PPP1R12C) gene were scanned for Target Sites. Each area was scanned for a protospacer adjacent motif (PAM) having the sequence NNNNGHTT. gRNA 20 bp spacer sequences corresponding to the PAM were identified, as shown in SEQ ID NOs: 21040-21114.

### Example 12

### CRISPR/Cpf1 Target Sites for the AAVS1 (PPP1R12C) Gene

[0630] Exons 1-2 of the AAVS1 (PPP1R12C) gene were scanned for Target Sites. Each area was scanned for a protospacer adjacent motif (PAM) having the sequence YTN. gRNA 22 bp spacer sequences corresponding to the PAM were identified, as shown in SEQ ID NOs: 21115-22290.

### Example 13

### CRISPR/SpCas9 Target Sites for the ALB Gene

[0631] Exons 1-2 of the ALB gene were scanned for Target Sites. Each area was scanned for a protospacer adjacent motif (PAM) having the sequence NRG. gRNA 20 bp spacer sequences corresponding to the PAM were identified, as shown in SEQ ID NOs: 22291-22458.

### Example 14

### CRISPR/SaCas9 Target Sites for the ALB Gene

[0632] Exons 1-2 of the ALB gene were scanned for Target Sites. Each area was scanned for a protospacer adjacent motif (PAM) having the sequence NNGRRT. gRNA 20 bp spacer sequences corresponding to the PAM were identified, as shown in SEQ ID NOs: 22459-22486.

### Example 15

### CRISPR/StCas9 Target Sites for the ALB Gene

[0633] Exons 1-2 of the ALB gene were scanned for Target Sites. Each area was scanned for a protospacer adjacent motif (PAM) having the sequence NNAGAAW. gRNA 20 bp spacer sequences corresponding to the PAM were identified, as shown in SEQ ID NOs: 22487-22504.

### Example 16

### CRISPR/TdCas9 Target Sites for the ALB Gene

[0634] Exons 1-2 of the ALB gene were scanned for Target Sites. Each area was scanned for a protospacer adjacent motif (PAM) having the sequence NAAAAC. gRNA 20 bp spacer sequences corresponding to the PAM were identified, as shown in SEQ ID NOs: 22505-22509.

### Example 17

### CRISPR/NmCas9 Target Sites for the ALB Gene

[0635] Exons 1-2 of the ALB gene were scanned for Target Sites. Each area was scanned for a protospacer adjacent motif (PAM) having the sequence NNNNGHTT. gRNA 20 bp spacer sequences corresponding to the PAM were identified, as shown in SEQ ID NOs: 22510-22533.

### Example 18

### CRISPR/Cpf1 Target Sites for the ALB Gene

[0636] Exons 1-2 of the ALB gene were scanned for Target Sites. Each area was scanned for a protospacer adjacent motif (PAM) having the sequence YTN. gRNA 22 bp spacer sequences corresponding to the PAM were identified, as shown in SEQ ID NOs: 22534-22912.

### Example 19

### RISPR/SpCas9 Target Sites for the Angptl3 Gene

[0637] Exons 1-2 of the Angptl3 gene were scanned for Target Sites. Each area was scanned for a protospacer adjacent motif (PAM) having the sequence NRG. gRNA 20 bp spacer sequences corresponding to the PAM were identified, as shown in SEQ ID NOs: 22913-23257.

### Example 20

### CRISPR/SaCas9 Target Sites for the Angptl3 Gene

[0638] Exons 1-2 of the Angptl3 gene were scanned for Target Sites. Each area was scanned for a protospacer adjacent motif (PAM) having the sequence NNGRRT. gRNA 20 bp spacer sequences corresponding to the PAM were identified, as shown in SEQ ID NOs: 23258-23293.

### Example 21

### CRISPR/StCas9 Target Sites for the Angptl3 Gene

[0639] Exons 1-2 of the Angptl3 gene were scanned for Target Sites. Each area was scanned for a protospacer adjacent motif (PAM) having the sequence NNAGAAW. gRNA 20 bp spacer sequences corresponding to the PAM were identified, as shown in SEQ ID NOs: 23294-23316.

### Example 22

### CRISPR/TdCas9 Target Sites for the Angptl3 Gene

[0640] Exons 1-2 of the Angptl3 gene were scanned for Target Sites. Each area was scanned for a protospacer adjacent motif (PAM) having the sequence NAAAAC. gRNA 20 bp spacer sequences corresponding to the PAM were identified, as shown in SEQ ID NOs: 23317-23329.

### Example 23

### RISPR/NmCas9 Target Sites for the Angptl3 Gene

[0641] Exons 1-2 of the Angptl3 gene were scanned for Target Sites. Each area was scanned for a protospacer adjacent motif (PAM) having the sequence NNNNGHTT. gRNA 20 bp spacer sequences corresponding to the PAM were identified, as shown in SEQ ID NOs: 23330-23392.

### Example 24

### RISPR/Cpf1 Target Sites for the Angptl3 Gene

[0642] Exons 1-2 of the Angptl3 gene were scanned for Target Sites. Each area was scanned for a protospacer adjacent motif (PAM) having the sequence YTN. gRNA 22 bp spacer sequences corresponding to the PAM were identified, as shown in SEQ ID NOs: 23393-24240.

### Example 25

### CRISPR/SpCas9 Target Sites for the ApoC3 Gene

[0643] Exons 1-2 of the ApoC3 gene were scanned for Target Sites. Each area was scanned for a protospacer adjacent motif (PAM) having the sequence NRG. gRNA 20 bp spacer sequences corresponding to the PAM were identified, as shown in SEQ ID NOs: 24241-24643.

### Example 26

### CRISPR/SaCas9 Target Sites for the ApoC3 Gene

[0644] Exons 1-2 of the ApoC3 gene were scanned for Target Sites. Each area was scanned for a protospacer adjacent motif (PAM) having the sequence NNGRRT. gRNA 20 bp spacer sequences corresponding to the PAM were identified, as shown in SEQ ID NOs: 24644-24668.

### Example 27

### RISPR/StCas9 Target Sites for the ApoC3 Gene

[0645] Exons 1-2 of the ApoC3 gene were scanned for Target Sites. Each area was scanned for a protospacer adjacent motif (PAM) having the sequence NNAGAAW. gRNA 20 bp spacer sequences corresponding to the PAM were identified, as shown in SEQ ID NOs: 24669-24671.

### Example 28

### CRISPR/TdCas9 Target Sites for the ApoC3 Gene

[0646] Exons 1-2 of the ApoC3 gene were scanned for Target Sites. Each area was scanned for a protospacer adjacent motif (PAM) having the sequence NAAAAC. gRNA 20 bp spacer sequences corresponding to the PAM were identified, as shown in SEQ ID NOs: 24672-24673.

### Example 29

### CRISPR/NmCas9 Target Sites for the ApoC3 Gene

[0647] Exons 1-2 of the ApoC3 gene were scanned for Target Sites. Each area was scanned for a protospacer adjacent motif (PAM) having the sequence NNNNGHTT. gRNA 20 bp spacer sequences corresponding to the PAM were identified, as shown in SEQ ID NOs: 24674-24685.

### Example 30

### CRISPR/Cpf1 Target Sites for the ApoC3 Gene

[0648] Exons 1-2 of the ApoC3 gene were scanned for Target Sites. Each area was scanned for a protospacer adjacent motif (PAM) having the sequence YTN. gRNA 22 bp spacer sequences corresponding to the PAM were identified, as shown in SEQ ID NOs: 24686-24917.

### Example 31

### CRISPR/SpCas9 Target Sites for the ASGR2 Gene

[0649] Exons 1-2 of the ASGR2 gene were scanned for Target Sites. Each area was scanned for a protospacer adjacent motif (PAM) having the sequence NRG. gRNA 20 bp spacer sequences corresponding to the PAM were identified, as shown in SEQ ID NOs: 24918-26685.

### Example 32

### CRISPR/SaCas9 Target Sites for the ASGR2 Gene

[0650] Exons 1-2 of the ASGR2 gene were scanned for Target Sites. Each area was scanned for a protospacer adjacent motif (PAM) having the sequence NNGRRT. gRNA 20 bp spacer sequences corresponding to the PAM were identified, as shown in SEQ ID NOs: 26686-26891.

### Example 33

### CRISPR/StCas9 Target Sites for the ASGR2 Gene

[0651] Exons 1-2 of the ASGR2 gene were scanned for Target Sites. Each area was scanned for a protospacer adjacent motif (PAM) having the sequence NNAGAAW. gRNA 20 bp spacer sequences corresponding to the PAM were identified, as shown in SEQ ID NOs: 26892-26915.

### Example 34

### CRISPR/TdCas9 Target Sites for the ASGR2 Gene

[0652] Exons 1-2 of the ASGR2 gene were scanned for Target Sites. Each area was scanned for a protospacer adjacent motif (PAM) having the sequence NAAAAC. gRNA 20 bp spacer sequences corresponding to the PAM were identified, as shown in SEQ ID NOs: 26916-26927.

### Example 35

### CRISPR/NmCas9 Target Sites for the ASGR2 Gene

[0653] Exons 1-2 of the ASGR2 gene were scanned for Target Sites. Each area was scanned for a protospacer adjacent motif (PAM) having the sequence NNNNGHTT. gRNA 20 bp spacer sequences corresponding to the PAM were identified, as shown in SEQ ID NOs: 26928-27010.

### Example 36

### RISPR/Cpf1 Target Sites for the ASGR2 Gene

[0654] Exons 1-2 of the ASGR2 gene were scanned for Target Sites. Each area was scanned for a protospacer adjacent motif (PAM) having the sequence YTN. gRNA 22 bp spacer sequences corresponding to the PAM were identified, as shown in SEQ ID NOs: 27011-28450.

### Example 37

### CRISPR/SpCas9 Target Sites for the CCRS Gene

[0655] Exons 1-2 of the CCRS gene were scanned for Target Sites. Each area was scanned for a protospacer adjacent motif (PAM) having the sequence NRG. gRNA 20 bp spacer sequences corresponding to the PAM were identified, as shown in SEQ ID NOs: 28451-28653.

### Example 38

### CRISPR/SaCas9 Target Sites for the CCRS Gene

[0656] Exons 1-2 of the CCRS gene were scanned for Target Sites. Each area was scanned for a protospacer adjacent motif (PAM) having the sequence NNGRRT. gRNA 20 bp spacer sequences corresponding to the PAM were identified, as shown in SEQ ID NOs: 28654-28685.

### Example 39

### RISPR/StCas9 Target Sites for the CCR5 Gene

[0657] Exons 1-2 of the CCR5 gene were scanned for Target Sites. Each area was scanned for a protospacer adjacent motif (PAM) having the sequence NNAGAAW. gRNA 20 bp spacer sequences corresponding to the PAM were identified, as shown in SEQ ID NOs: 28686-28699.

### Example 40

### CRISPR/TdCas9 Target Sites for the CCR5 Gene

[0658] Exons 1-2 of the CCR5 gene were scanned for Target Sites. Each area was scanned for a protospacer adjacent motif (PAM) having the sequence NAAAAC. gRNA 20 bp spacer sequences corresponding to the PAM were identified, as shown in SEQ ID NOs: 28700-28701.

### Example 41

### CRISPR/NmCas9 Target Sites for the CCR5 Gene

[0659] Exons 1-2 of the CCR5 gene were scanned for Target Sites. Each area was scanned for a protospacer adjacent motif (PAM) having the sequence NNNNGHTT. gRNA 20 bp spacer sequences corresponding to the PAM were identified, as shown in SEQ ID NOs: 28702-28729.

### Example 42

### CRISPR/Cpf1 Target Sites for the CCR5 Gene

[0660] Exons 1-2 of the CCR5 gene were scanned for Target Sites. Each area was scanned for a protospacer adjacent motif (PAM) having the sequence YTN. gRNA 22 bp spacer sequences corresponding to the PAM were identified, as shown in SEQ ID NOs: 28730-29029.

### Example 43

### RISPR/SpCas9 Target Sites for the FIX (F9) Gene

[0661] Exons 1-2 of the FIX (F9) gene were scanned for Target Sites. Each area was scanned for a protospacer adjacent motif (PAM) having the sequence NRG. gRNA 20 bp spacer sequences corresponding to the PAM were identified, as shown in SEQ ID NOs: 29030-30495.

### Example 44

### CRISPR/SaCas9 Target Sites for the FIX (F9) Gene

[0662] Exons 1-2 of the FIX (F9) gene were scanned for Target Sites. Each area was scanned for a protospacer adjacent motif (PAM) having the sequence NNGRRT. gRNA 20 bp spacer sequences corresponding to the PAM were identified, as shown in SEQ ID NOs: 30496-30658.

### Example 45

### CRISPR/StCas9 Target Sites for the FIX (F9) Gene

[0663] Exons 1-2 of the FIX (F9) gene were scanned for Target Sites. Each area was scanned for a protospacer adjacent motif (PAM) having the sequence NNAGAAW. gRNA 20 bp spacer sequences corresponding to the PAM were identified, as shown in SEQ ID NOs: 30659-30719.

### Example 46

### CRISPR/TdCas9 Target Sites for the FIX (F9) Gene

[0664] Exons 1-2 of the FIX (F9) gene were scanned for Target Sites. Each area was scanned for a protospacer adjacent motif (PAM) having the sequence NAAAAC. gRNA 20 bp spacer sequences corresponding to the PAM were identified, as shown in SEQ ID NOs: 30720-30744.

### Example 47

### CRISPR/NmCas9 Target Sites for the FIX (F9) Gene

[0665] Exons 1-2 of the FIX (F9) gene were scanned for Target Sites. Each area was scanned for a protospacer adjacent motif (PAM) having the sequence NNNNGHTT. gRNA 20 bp spacer sequences corresponding to the PAM were identified, as shown in SEQ ID NOs: 30745-30897.

### Example 48

### CRISPR/Cpf1 Target Sites for the FIX (F9) Gene

[0666] Exons 1-2 of the FIX (F9) gene were scanned for Target Sites. Each area was scanned for a protospacer adjacent motif (PAM) having the sequence YTN. gRNA 22 bp spacer sequences corresponding to the PAM were identified, as shown in SEQ ID NOs: 30898-33038.

### Example 49

### CRISPR/SpCas9 Target Sites for the G6PC Gene

[0667] Regions of the G6PC gene were scanned for Target Sites. Each area was scanned for a protospacer adjacent motif (PAM) having the sequence NRG. gRNA 20 bp spacer sequences corresponding to the PAM were identified, as shown in SEQ ID NOs: 33039-34054.

### Example 50

### CRISPR/SaCas9 Target Sites for the G6PC Gene

[0668] Regions of the G6PC gene were scanned for Target Sites. Each area was scanned for a protospacer adjacent motif (PAM) having the sequence NNGRRT. gRNA 20 bp spacer sequences corresponding to the PAM were identified, as shown in SEQ ID NOs: 34055-34171.

### Example 51

### CRISPR/StCas9 Target Sites for the G6PC Gene

[0669] Regions of the G6PC gene were scanned for Target Sites. Each area was scanned for a protospacer adjacent motif (PAM) having the sequence NNAGAAW. gRNA 20 bp spacer sequences corresponding to the PAM were identified, as shown in SEQ ID NOs: 34172-34195.

### Example 52

### RISPR/TdCas9 Target Sites for the G6PC Gene

[0670] Regions of the G6PC gene were scanned for Target Sites. Each area was scanned for a protospacer adjacent motif (PAM) having the sequence NAAAAC. gRNA 20 bp spacer sequences corresponding to the PAM were identified, as shown in SEQ ID NOs: 34196-34204.

### Example 53

### CRISPR/NmCas9 Target Sites for the G6PC Gene

[0671] Regions of the G6PC gene were scanned for Target Sites. Each area was scanned for a protospacer adjacent motif (PAM) having the sequence NNNNGHTT. gRNA 20 bp spacer sequences corresponding to the PAM were identified, as shown in SEQ ID NOs: 34205-34294.

### Example 54

### CRISPR/Cpf1 Target Sites for the G6PC Gene

[0672] Regions of the G6PC gene were scanned for Target Sites. Each area was scanned for a protospacer adjacent motif (PAM) having the sequence YTN. gRNA 22 bp spacer sequences corresponding to the PAM were identified, as shown in SEQ ID NOs: 34295-35389.

### Example 55

### RISPR/SpCas9 Target Sites for the Gys2 Gene

[0673] Exons 1-2 of the Gys2 gene were scanned for Target Sites. Each area was scanned for a protospacer adjacent motif (PAM) having the sequence NRG. gRNA 20 bp spacer sequences corresponding to the PAM were identified, as shown in SEQ ID NOs: 35390-40882.

### Example 56

### RISPR/SaCas9 Target Sites for the Gys2 Gene

[0674] Exons 1-2 of the Gys2 gene were scanned for Target Sites. Each area was scanned for a protospacer adjacent motif (PAM) having the sequence NNGRRT. gRNA 20 bp spacer sequences corresponding to the PAM were identified, as shown in SEQ ID NOs: 40883-41558.

### Example 57

### CRISPR/StCas9 Target Sites for the Gys2 Gene

[0675] Exons 1-2 of the Gys2 gene were scanned for Target Sites. Each area was scanned for a protospacer adjacent motif (PAM) having the sequence NNAGAAW. gRNA 20 bp spacer sequences corresponding to the PAM were identified, as shown in SEQ ID NOs: 41559-41836.

### Example 58

### CRISPR/TdCas9 Target Sites for the Gys2 Gene

[0676] Exons 1-2 of the Gys2 gene were scanned for Target Sites. Each area was scanned for a protospacer adjacent motif (PAM) having the sequence NAAAAC. gRNA 20 bp spacer sequences corresponding to the PAM were identified, as shown in SEQ ID NOs: 41837-41950.

### Example 59

### CRISPR/NmCas9 Target Sites for the Gys2 Gene

[0677] Exons 1-2 of the Gys2 gene were scanned for Target Sites. Each area was scanned for a protospacer adjacent motif (PAM) having the sequence NNNNGHTT. gRNA 20 bp spacer sequences corresponding to the PAM were identified, as shown in SEQ ID NOs: 41951-42630.

### Example 60

### CRISPR/Cpf1 Target Sites for the Gys2 Gene

[0678] Exons 1-2 of the Gys2 gene were scanned for Target Sites. Each area was scanned for a protospacer adjacent motif (PAM) having the sequence YTN. gRNA 22 bp spacer sequences corresponding to the PAM were identified, as shown in SEQ ID NOs: 42631-51062.

### Example 61

### RISPR/SpCas9 Target Sites for the HGD Gene

[0679] Exons 1-2 of the HGD gene were scanned for Target Sites. Each area was scanned for a protospacer adjacent motif (PAM) having the sequence NRG. gRNA 20 bp spacer sequences corresponding to the PAM were identified, as shown in SEQ ID NOs: 51063-52755.

### Example 62

### CRISPR/SaCas9 Target Sites for the HGD Gene

[0680] Exons 1-2 of the HGD gene were scanned for Target Sites. Each area was scanned for a protospacer adjacent motif (PAM) having the sequence NNGRRT. gRNA 20 bp spacer sequences corresponding to the PAM were identified, as shown in SEQ ID NOs: 52756-52969.

### Example 63

### CRISPR/StCas9 Target Sites for the HGD Gene

[0681] Exons 1-2 of the HGD gene were scanned for Target Sites. Each area was scanned for a protospacer adjacent motif (PAM) having the sequence NNAGAAW. gRNA 20 bp spacer sequences corresponding to the PAM were identified, as shown in SEQ ID NOs: 52970-53052.

### Example 64

### CRISPR/TdCas9 Target Sites for the HGD Gene

[0682] Exons 1-2 of the HGD gene were scanned for Target Sites. Each area was scanned for a protospacer adjacent motif (PAM) having the sequence NAAAAC. gRNA 20 bp spacer sequences corresponding to the PAM were identified, as shown in SEQ ID NOs: 53053-53071.

### Example 65

### CRISPR/NmCas9 Target Sites for the HGD Gene

[0683] Exons 1-2 of the HGD gene were scanned for Target Sites. Each area was scanned for a protospacer adjacent motif (PAM) having the sequence NNNNGHTT. gRNA 20 bp spacer sequences corresponding to the PAM were identified, as shown in SEQ ID NOs: 53072-53272.

### Example 66

### CRISPR/Cpf1 Target Sites for the HGD Gene

[0684] Exons 1-2 of the HGD gene were scanned for Target Sites. Each area was scanned for a protospacer adjacent motif (PAM) having the sequence YTN. gRNA 22 bp spacer sequences corresponding to the PAM were identified, as shown in SEQ ID NOs: 53273-55597.

### Example 67

### CRISPR/SpCas9 Target Sites for the Lp(a) Gene

[0685] Exons 1-2 of the Lp(a) gene were scanned for Target Sites. Each area was scanned for a protospacer adjacent motif (PAM) having the sequence NRG. gRNA 20 bp spacer sequences corresponding to the PAM were identified, as shown in SEQ ID NOs: 55598-59392.

### Example 68

### CRISPR/SaCas9 Target Sites for the Lp(a) Gene

[0686] Exons 1-2 of the Lp(a) gene were scanned for Target Sites. Each area was scanned for a protospacer adjacent motif (PAM) having the sequence NNGRRT. gRNA 20 bp spacer sequences corresponding to the PAM were identified, as shown in SEQ ID NOs: 59393-59802.

### Example 69

### CRISPR/StCas9 Target Sites for the Lp(a) Gene

[0687] Exons 1-2 of the Lp(a) gene were scanned for Target Sites. Each area was scanned for a protospacer adjacent motif (PAM) having the sequence NNAGAAW. gRNA 20 bp spacer sequences corresponding to the PAM were identified, as shown in SEQ ID NOs: 59803-59938.

### Example 70

### CRISPR/TdCas9 Target Sites for the Lp(a) Gene

[0688] Exons 1-2 of the Lp(a) gene were scanned for Target Sites. Each area was scanned for a protospacer adjacent motif (PAM) having the sequence NAAAAC. gRNA 20 bp spacer sequences corresponding to the PAM were identified, as shown in SEQ ID NOs: 59939-59973.

### Example 71

### CRISPR/NmCas9 Target Sites for the Lp(a) Gene

[0689] Exons 1-2 of the Lp(a) gene were scanned for Target Sites. Each area was scanned for a protospacer adjacent motif (PAM) having the sequence NNNNGHTT. gRNA 20 bp spacer sequences corresponding to the PAM were identified, as shown in SEQ ID NOs: 59974-60341.

### Example 72

### CRISPR/Cpf1 Target Sites for the Lp(a) Gene

[0690] Exons 1-2 of the Lp(a) gene were scanned for Target Sites. Each area was scanned for a protospacer adjacent motif (PAM) having the sequence YTN. gRNA 22 bp spacer sequences corresponding to the PAM were identified, as shown in SEQ ID NOs: 60342-64962.

### Example 73

### CRISPR/SpCas9 Target Sites for the PCSK9 Gene

[0691] Exons 1-2 of the PCSK9 gene were scanned for Target Sites. Each area was scanned for a protospacer adjacent motif (PAM) having the sequence NRG. gRNA 20 bp spacer sequences corresponding to the PAM were identified, as shown in SEQ ID NOs: 64963-66982.

### Example 74

### CRISPR/SaCas9 Target Sites for the PCSK9 Gene

[0692] Exons 1-2 of the PCSK9 gene were scanned for Target Sites. Each area was scanned for a protospacer adjacent motif (PAM) having the sequence NNGRRT. gRNA 20 bp spacer sequences corresponding to the PAM were identified, as shown in SEQ ID NOs: 66983-67169.

### Example 75

### CRISPR/StCas9 Target Sites for the PCSK9 Gene

[0693] Exons 1-2 of the PCSK9 gene were scanned for Target Sites. Each area was scanned for a protospacer adjacent motif (PAM) having the sequence NNAGAAW. gRNA 20 bp spacer sequences corresponding to the PAM were identified, as shown in SEQ ID NOs: 67170-67205.

### Example 76

### RISPR/TdCas9 Target Sites for the PCSK9 Gene

[0694] Exons 1-2 of the PCSK9 gene were scanned for Target Sites. Each area was scanned for a protospacer adjacent motif (PAM) having the sequence NAAAAC. gRNA 20 bp spacer sequences corresponding to the PAM were identified, as shown in SEQ ID NOs: 67206-67219.

### Example 77

### CRISPR/NmCas9 Target Sites for the PCSK9 Gene

[0695] Exons 1-2 of the PCSK9 gene were scanned for Target Sites. Each area was scanned for a protospacer adjacent motif (PAM) having the sequence NNNNGHTT. gRNA 20 bp spacer sequences corresponding to the PAM were identified, as shown in SEQ ID NOs: 67220-67359.

### Example 78

### CRISPR/Cpf1 Target Sites for the PCSK9 Gene

[0696] Exons 1-2 of the PCSK9 gene were scanned for Target Sites. Each area was scanned for a protospacer adjacent motif (PAM) having the sequence YTN. gRNA 22 bp spacer sequences corresponding to the PAM were identified, as shown in SEQ ID NOs: 67360-69153.

### Example 79

### CRISPR/SpCas9 Target Sites for the Serpina1 Gene

[0697] Exons 1-2 of the Serpina1 gene were scanned for Target Sites. Each area was scanned for a protospacer adjacent motif (PAM) having the sequence NRG. gRNA 20 bp spacer sequences corresponding to the PAM were identified, as shown in SEQ ID NOs: 69154-70291.

### Example 80

### CRISPR/SaCas9 Target Sites for the Serpina1 Gene

[0698] Exons 1-2 of the Serpina1 gene were scanned for Target Sites. Each area was scanned for a protospacer adjacent motif (PAM) having the sequence NNGRRT. gRNA 20 bp spacer sequences corresponding to the PAM were identified, as shown in SEQ ID NOs: 70292-70384.

### Example 81

### CRISPR/StCas9 Target Sites for the Serpina1 Gene

[0699] Exons 1-2 of the Serpina1 gene were scanned for Target Sites. Each area was scanned for a protospacer adjacent motif (PAM) having the sequence NNAGAAW. gRNA 20 bp spacer sequences corresponding to the PAM were identified, as shown in SEQ ID NOs: 70385-70396.

### Example 82

### CRISPR/TdCas9 Target Sites for the Serpina1 Gene

[0700] Exons 1-2 of the Serpina1 gene were scanned for Target Sites. Each area was scanned for a protospacer adjacent motif (PAM) having the sequence NAAAAC. gRNA 20 bp spacer sequences corresponding to the PAM were identified, as shown in SEQ ID NOs: 70397-70399.

### Example 83

### CRISPR/NmCas9 Target Sites for the Serpina1 Gene

[0701] Exons 1-2 of the Serpina1 gene were scanned for Target Sites. Each area was scanned for a protospacer adjacent motif (PAM) having the sequence NNNNGHTT. gRNA 20 bp spacer sequences corresponding to the PAM were identified, as shown in SEQ ID NOs: 70400-70450.

### Example 84

### CRISPR/Cpf1 Target Sites for the Serpina1 Gene

[0702] Exons 1-2 of the Serpina1 gene were scanned for Target Sites. Each area was scanned for a protospacer adjacent motif (PAM) having the sequence YTN. gRNA 22 bp spacer sequences corresponding to the PAM were identified, as shown in SEQ ID NOs: 70451-71254.

### Example 85

### CRISPR/SpCas9 Target Sites for the TF Gene

[0703] Exons 1-2 of the TF gene were scanned for Target Sites. Each area was scanned for a protospacer adjacent motif (PAM) having the sequence NRG. gRNA 20 bp spacer sequences corresponding to the PAM were identified, as shown in SEQ ID NOs: 71255-72086.

### Example 86

### CRISPR/SaCas9 Target Sites for the TF Gene

[0704] Exons 1-2 of the TF gene were scanned for Target Sites. Each area was scanned for a protospacer adjacent motif (PAM) having the sequence NNGRRT. gRNA 20 bp spacer sequences corresponding to the PAM were identified, as shown in SEQ ID NOs: 72087-72172.

### Example 87

### CRISPR/StCas9 Target Sites for the TF Gene

[0705] Exons 1-2 of the TF gene were scanned for Target Sites. Each area was scanned for a protospacer adjacent motif (PAM) having the sequence NNAGAAW. gRNA 20 bp spacer sequences corresponding to the PAM were identified, as shown in SEQ ID NOs: 72173-72184.

### Example 88

### CRISPR/TdCas9 Target Sites for the TF Gene

[0706] Exons 1-2 of the TF gene were scanned for Target Sites. Each area was scanned for a protospacer adjacent motif (PAM) having the sequence NAAAAC. gRNA 20 bp spacer sequences corresponding to the PAM were identified, as shown in SEQ ID NOs: 72185-72191.

### Example 89

### CRISPR/NmCas9 Target Sites for the TF Gene

[0707] Exons 1-2 of the TF gene were scanned for Target Sites. Each area was scanned for a protospacer adjacent motif (PAM) having the sequence NNNNGHTT. gRNA 20 bp spacer sequences corresponding to the PAM were identified, as shown in SEQ ID NOs: 72192-72235.

### Example 90

### CRISPR/Cpf1 Target Sites for the TF Gene

[0708] Exons 1-2 of the TF gene were scanned for Target Sites. Each area was scanned for a protospacer adjacent motif (PAM) having the sequence YTN. gRNA 22 bp spacer sequences corresponding to the PAM were identified, as shown in SEQ ID NOs: 72236-72871.

### Example 91

### CRISPR/SpCas9 Target Sites for the TTR Gene

[0709] Exons 1-2 of the TTR gene were scanned for Target Sites. Each area was scanned for a protospacer adjacent motif (PAM) having the sequence NRG. gRNA 20 bp spacer sequences corresponding to the PAM were identified, as shown in SEQ ID NOs: 72872-73171.

### Example 92

### CRISPR/SaCas9 Target Sites for the TTR Gene

[0710] Exons 1-2 of the TTR gene were scanned for Target Sites. Each area was scanned for a protospacer adjacent motif (PAM) having the sequence NNGRRT. gRNA 20 bp spacer sequences corresponding to the PAM were identified, as shown in SEQ ID NOs: 73172-73212.

### Example 93

### CRISPR/StCas9 Target Sites for the TTR Gene

[0711] Exons 1-2 of the TTR gene were scanned for Target Sites. Each area was scanned for a protospacer adjacent motif (PAM) having the sequence NNAGAAW. gRNA 20 bp spacer sequences corresponding to the PAM were identified, as shown in SEQ ID NOs: 73213-73229.

### Example 94

### CRISPR/TdCas9 Target Sites for the TTR Gene

[0712] Exons 1-2 of the TTR gene were scanned for Target Sites. Each area was scanned for a protospacer adjacent motif (PAM) having the sequence NAAAAC. gRNA 20 bp spacer sequences corresponding to the PAM were identified, as shown in SEQ ID NOs: 73230-73231.

### Example 95

### CRISPR/NmCas9 Target Sites for the TTR Gene

[0713] Exons 1-2 of the TTR gene were scanned for Target Sites. Each area was scanned for a protospacer adjacent motif (PAM) having the sequence NNNNGHTT. gRNA 20 bp spacer sequences corresponding to the PAM were identified, as shown in SEQ ID NOs: 73232-73266.

### Example 96

### CRISPR/Cpf1 Target Sites for the TTR Gene

[0714] Exons 1-2 of the TTR gene were scanned for Target Sites. Each area was scanned for a protospacer adjacent motif (PAM) having the sequence YTN. gRNA 22 bp spacer sequences corresponding to the PAM were identified, as shown in SEQ ID NOs: 73267-73668.

### Example 97

### Bioinformatics Analysis of the Guide Strands

[0715] Candidate guides will be screened and selected in a multi-step process that involves both theoretical binding and experimentally assessed activity. By way of illustration, candidate guides having sequences that match a particular on-target site, such as a site within the C9ORF72 Gene, with adjacent PAM can be assessed for their potential to cleave at off-Target Sites having similar sequences, using one or more of a variety of bioinformatics tools available for assessing off-target binding, as described and illustrated in more detail below, in order to assess the likelihood of effects at chromosomal positions other than those intended. Candidates predicted to have relatively lower potential for off-target activity can then be assessed experimentally to measure their on-target activity, and then off-target activities at various sites. Preferred guides have sufficiently high on-target activity to achieve desired levels of gene editing at the selected locus, and relatively lower off-target activity to reduce the likelihood of alterations at other chromosomal loci. The ratio of on-target to off-target activity is often referred to as the “specificity” of a guide.

[0716] For initial screening of predicted off-target activities, there are a number of bioinformatics tools known and publicly available that can be used to predict the most likely off-Target Sites; and since binding to Target Sites in the CRISPR/Cas9/Cpf1 nuclease system is driven by Watson-Crick base pairing between complementary sequences, the degree of dissimilarity (and therefore reduced potential for off-target binding) is essentially related to primary sequence differences: mismatches and bulges, i.e. bases that are changed to a non-complementary base, and insertions or deletions of bases in the potential off-target site relative to the target site. An exemplary bioinformatics tool called COSMID (CRISPR Off-target Sites with Mismatches, Insertions and Deletions) (available on the web at crispr.bme.gatech.edu) compiles such similarities. Other bioinformatics tools include, but are not limited to, GUIDO, autoCOSMID, and CCtop.

[0717] Bioinformatics were used to minimize off-target cleavage in order to reduce the detrimental effects of mutations and chromosomal rearrangements. Studies on CRISPR/Cas9 systems suggested the possibility of high off-target activity due to nonspecific hybridization of the guide strand to DNA sequences with base pair mismatches and/or bulges, particularly at positions distal from the PAM region. (See e.g., Hsu, P. D. et al. DNA targeting specificity of RNA-guided Cas9 nucleases. Nat Biotechnol 31, 827-832 (2013); Fu, Y. et al. High-frequency off-target mutagenesis induced by CRISPR-Cas nucleases in human cells. Nat Biotechnol (2013); Cradick, T. J., Fine, E. J., Antico, C. J. & Bao, G. CRISPR/Cas9 systems targeting β-globin and CCR5 genes have substantial off-target activity. Nucleic Acids Research 41, 9584-9592 (2013); Lin, Y. et al. CRISPR/Cas9 systems have off-target activity with insertions or deletions between target DNA and guide RNA sequences. Nucleic Acids Res 42, 7473-7485 (2014)). Therefore, it is important to have a bioinformatics tool that can identify potential off-Target Sites that have insertions and/or deletions between the RNA guide strand and genomic sequences, in addition to base-pair mismatches. The bioinformatics-based tool, COSMID (CRISPR Off-target Sites with Mismatches, Insertions and Deletions) was therefore used to search genomes for potential CRISPR off-Target Sites (available on the web at http_crispr_bme_gatech_edu). COSMID output ranked lists of the potential off-target sites based on the number and location of mismatches, allowing more informed choice of Target Sites, and avoiding the use of sites with more likely off-target cleavage.

[0718] Additional bioinformatics pipelines were employed that weigh the estimated on- and/or off-target activity of gRNA targeting sites in a region. Other features that may be used to predict activity include information about the cell type in question, DNA accessibility, chromatin state, transcription factor binding sites, transcription factor binding data, and other CHIP-seq data. Additional factors are weighed that predict editing efficiency such as relative positions and directions of pairs of gRNAs, local sequence features and micro-homologies. (See e.g., Naito, Y., Hino, K., Bono, H. & Ui-Tei, K. CRISPRdirect: software for designing CRISPR/Cas guide RNA with reduced off-Target Sites. Bioinformatics 31, 1120-1123 (2015); Cradick, T. J., Qui, P., Lee, C. M., Fine, E. J. & Bao, G. COSMID: A Web-based Tool for Identifying and Validating CRISPR/Cas Off-target Sites. Molecular Therapy-Nucleic Acids, e214 (2014); GUell, M., Yang, L. & Church, G. M. Genome editing assessment using CRISPR Genome Analyzer (CRISPR-GA). Bioinformatics 30, 2968-2970 (2014); Prykhozhij, S. V., Rajan, V., Gaston, D. & Berman, J. N. CRISPR multitargeter: a web tool to find common and unique CRISPR single guide RNA targets in a set of similar sequences. PLoS One 10, e0119372 (2015); Montague, T. G., Cruz, J. M., Gagnon, J. A., Church, G. M. & Valen, E. CHOPCHOP: a CRISPR/Cas9 and TALEN web tool for genome editing. Nucleic Acids Res 42, W401-407 (2014); Bae, S., Kweon, J., Kim, H. S. & Kim, J. S. Microhomology-based choice of Cas9 nuclease Target Sites. Nat Methods 11, 705-706 (2014); Bae, S., Park, J. & Kim, J. S. Cas-OFFinder: a fast and versatile algorithm that searches for potential off-Target Sites of Cas9 RNA-guided endonucleases. Bioinformatics 30, 1473-1475 (2014); Stemmer, M., Thumberger, T., Del Sol Keyer, M., Wittbrodt, J. & Mateo, J. L. CCTop: An Intuitive, Flexible and Reliable CRISPR/Cas9 Target Prediction Tool. PLoS One 10, e0124633 (2015)).

### Example 98

### Testing of Preferred Guides in Cells for On-Target Activity

[0719] The gRNAs predicted to have the lowest off target activity will then be tested for on-target activity in a model cell line, such as HEK293T or K562, and evaluated for indel frequency using TIDE or next generation sequencing. TIDE is a web tool to rapidly assess genome editing by CRISPR-Cas9 of a target locus determined by a guide RNA (sgRNA). Based on the quantitative sequence trace data from two standard capillary sequencing reactions, the TIDE software quantifies the editing efficacy and identifies the predominant types of insertions and deletions (indels) in the DNA of a targeted cell pool. See Brinkman et al, Nucl. Acids Res. (2014) for a detailed explanation and examples. Next-generation sequencing (NGS), also known as high-throughput sequencing, is the catch-all term used to describe a number of different modern sequencing technologies including: Illumina (Solexa) sequencing, Roche 454 sequencing, Ion torrent: Proton/PGM sequencing, and SOLiD sequencing. These recent technologies allow one to sequence DNA and RNA much more quickly and cheaply than the previously used Sanger sequencing, and as such have revolutionized the study of genomics and molecular biology.

[0720] Transfection of tissue culture cells allows screening of different constructs and a robust means of testing activity and specificity.(Cradick, T. J., Qui, P., Lee, C. M., Fine, E. J. & Bao, G. COSMID: A Web-based Tool for Identifying and Validating CRISPR/Cas Off-target Sites. Molecular Therapy-Nucleic Acids, e214 (2014)). Tissue culture cell lines, such as K-562 or HEK293T are easily transfected and result in high activity. These or other cell lines will be evaluated to determine the cell lines that match with CD34+and provide the best surrogate. These cells will then be used for many early stage tests. For example, individual gRNAs for S. pyogenes Cas9 will be transfected into the cells using plasmids, which are suitable for expression in human cells. Several days later the genomic DNA is harvested and the target site amplified by PCR. The cutting activity can be measured by the rate of insertions, deletions and mutations introduced by NHEJ repair of the free DNA ends. Although this method cannot differentiate correctly repaired sequences from uncleaved DNA with this method, the level of cutting can be gauged by the amount of mis-repair. Off-target activity can be observed by amplifying identified putative off-Target Sites and using similar methods to detect cleavage. Translocation can also be assayed using primers flanking cut sites, to determine if specific cutting and translocations happen. Un-guided assays have been developed allowing complementary testing of off-target cleavage including guide-seq. (Kim, D. et al. Digenome-seq: genome-wide profiling of CRISPR-Cas9 off-target effects in human cells. Nat Methods 12, 237-243, 231 p following 243 (2015); Frock, R.L. et al. Genome-wide detection of DNA double-stranded breaks induced by engineered nucleases. Nat Biotechnol 33, 179-186 (2015); Wang, X. et al. Unbiased detection of off-target cleavage by CRISPR-Cas9 and TALENs using integrase-defective lentiviral vectors. Nat Biotechnol 33, 175-178 (2015); Tsai, S.Q. et al. GUIDE-seq enables genome-wide profiling of off-target cleavage by CRISPR-Cas nucleases. Nat Biotechnol (2014); Kuscu, C., Arslan, S., Singh, R., Thorpe, J. & Adli, M. Genome-wide analysis reveals characteristics of off-Target Sites bound by the Cas9 endonuclease. Nat Biotechnol 32, 677-683 (2014)). The gRNA or pairs of gRNA with significant activity can then be followed up in cultured cells to measure the expression level of a C9ORF72 gene. Off-target events can be followed again. Similarly CD34+cells can be transfected and the level of gene correction and possible off-target events measured. These experiments allow optimization of nuclease and donor design and delivery.

### Example 99

### Testing of Preferred Guides in Cells for Off-Target Activity

[0721] The gRNAs having the best on-target activity from the TIDE and next generation sequencing studies in the above example will then be tested for off-target activity using whole genome sequencing. Candidate gRNAs will be more completely evaluated in CD34+ cells or iPSCs.

### Example 100

### Testing Different Approaches for HDR Gene Editing

[0722] After testing the gRNAs for both on-target activity and off-target activity, the mutation correction and knock-in strategies will be tested for HDR gene editing.

[0723] For the mutation correction approach, the donor DNA template will be provided as a short single-stranded oligonucleotide, a short double-stranded oligonucleotide (PAM sequence intact/PAM sequence mutated), a long single-stranded DNA molecule (PAM sequence intact/PAM sequence mutated) or a long double-stranded DNA molecule (PAM sequence intact/PAM sequence mutated). In addition, the donor DNA template will be delivered by AAV.

[0724] For some embodiments of the cDNA knock-in approach, a single-stranded or double-stranded DNA having homologous arms to a safe harbor locus (e.g., AAVS1 (PPP1 R12C), ALB, Angptl3, ApoC3, ASGR2, CCR5, FIX (F9), G6PC, Gys2, HGD, Lp(a), Pcsk9, Serpina1, TF, and TTR), the 18q11.2 region, the 14q24.3 region, or the 11p15.4 region may include more than 40 nt of the first exon (the first coding exon) of the C9ORF72 gene the complete CDS of the C9ORF72 gene and 3′UTR of the C9ORF72 gene and at least 40 nt of the following intron. The single-stranded or double-stranded DNA having homologous arms to a safe harbor locus (e.g., AAVS1 (PPP1 R12C), ALB, Angptl3, ApoC3, ASGR2, CCR5, FIX (F9), G6PC, Gys2, HGD, Lp(a), Pcsk9, Serpina1, TF, and TTR), the 18q11.2 region, the 14q24.3 region, or the 11p15.4 region may include more than 80 nt of the first exon of the C9ORF72 gene, the complete CDS of the C9ORF72 gene and 3′UTR of the C9ORF72 gene, and at least 80 nt of the following intron. The single-stranded or double-stranded DNA having homologous arms to a safe harbor locus (e.g., AAVS1 (PPP1 R12C), ALB, Angptl3, ApoC3, ASGR2, CCR5, FIX (F9), G6PC, Gys2, HGD, Lp(a), Pcsk9, Serpina1, TF, and TTR), the 18q11.2 region, the 14q24.3 region, or the 11p15.4 region may include more than 100 nt of the first exon of the C9ORF72 gene, the complete CDS of the C9ORF72 gene and 3′UTR of the C9ORF72 gene, and at least 100 nt of the following intron. The single-stranded or double-stranded DNA having homologous arms to a safe harbor locus (e.g., AAVS1 (PPP1 R12C), ALB, Angptl3, ApoC3, ASGR2, CCR5, FIX (F9), G6PC, Gys2, HGD, Lp(a), Pcsk9, Serpina1, TF, and TTR), the 18q11.2 region, the 14q24.3 region, or the 11p15.4 region may include more than 150 nt of the first exon of the C9ORF72 gene, the complete CDS of the C9ORF72 gene and 3′UTR of the C9ORF72 gene, and at least 150 nt of the following intron. The single-stranded or double-stranded DNA having homologous arms to a safe harbor locus (e.g., AAVS1 (PPP1R12C), ALB, Angptl3, ApoC3, ASGR2, CCR5, FIX (F9), G6PC, Gys2, HGD, Lp(a), Pcsk9, Serpina1, TF, and TTR), the 18q11.2 region, the 14q24.3 region, or the 11p15.4 region may include more than 300 nt of the first exon of the C9ORF72 gene, the complete CDS of the C9ORF72 gene and 3′UTR of the C9ORF72 gene, and at least 300 nt of the following intron. The single-stranded or double-stranded DNA having homologous arms to a safe harbor locus (e.g., AAVS1 (PPP1R12C), ALB, Angptl3, ApoC3, ASGR2, CCR5, FIX (F9), G6PC, Gys2, HGD, Lp(a), Pcsk9, Serpina1, TF, and TTR), the 18q11.2 region, the 14q24.3 region, or the 11p15.4 region may include more than 400 nt of the first exon of the C9ORF72 gene, the complete CDS of the C9ORF72 gene and 3′UTR of the C9ORF72 gene, and at least 400 nt of the following intron. In addition, the DNA template will be delivered by AAV.

[0725] For the cDNA or minigene knock-in approach, a single-stranded or double-stranded DNA having homologous arms to the 9p21.2, which includes more than 80 nt of the first exon (the first coding exon) of the C9ORF72 gene, the complete CDS of the C9ORF72 gene and 3′UTR of the C9ORF72 gene, and at least 80 nt of the following intron. In addition, the DNA template will be delivered by AAV.

### Example 101

### Re-assessment of Lead Crispr-Cas9/DNA Donor Combinations

[0726] After testing the different strategies for HDR gene editing, the lead CRISPR-Cas9/DNA donor combinations will be re-assessed in primary human neurons for efficiency of deletion, recombination, and off-target specificity. Cas9 mRNA will be formulated into lipid nanoparticles for delivery, sgRNAs will be formulated into nanoparticles or delivered as AAV, and donor DNA will be formulated into nanoparticles or delivered as AAV.

### Example 102

### In Vivo Testing in Relevant Mouse Model

[0727] Recently a mouse model containing the human C9ORF72 gene with either a normal hexanucleotide repeat complement or an expanded hexanucleotide repeat was generated. The Tg(C9orf72_3) line 112 mice (Jackson Laboratory, Stock No. 023099) have several tandem copies of the human C9orf72_3 transgene, with each copy having between 100-1000 repeats ([GGGGCC]100-1000). As a control, the Tg(C9orf72_2) line 8 mice (Jackson Laboratory, Stock No. 023088) have the C9orf72_2 transgene with 15 hexanucleotide repeats ([GGGGCC]15). Hemizygous mice from Tg(C9orf72_3) line 112 and Tg(C9orf72_2) line 8 are viable, fertile, born in Mendelian ratios and do not develop any locomotor or cognitive phenotype by 16 months of age.

[0728] By three months of age, however, hemizygous Tg(C9orf72_3) line 112 animals exhibit RNA foci (formed by hexanucleotide-repeat expansion-containing human C9ORF72 RNAs) and poly(GP) dipeptides (resulting from a non-ATG initiated translation of the repeat expansion) in most neuronal populations of the brain. No RNA foci or poly(GP) dipeptide phenotype is observed for hemizygous Tg(C9orf72_2) line 8. (O'Rourke (2015) Neuron Volume 88, Issue 5, p892-901, 2 Dec. 2015 “C9orf72 BAC Transgenic Mice Display Typical Pathologic Features of ALS/FTD”).

[0729] gRNA's will be tested in animals to assess their ability to alter the hexanucleotide repeat expansion in C9ORF72 and produce phenotypic changes, such as suppression or amelioration of RNA foci and repeat associated non-ATG (RAN) translated dipeptides, and suppression or amelioration of the resulting altered nucleolin distribution and nucleolar dysfunction exhibited in the hemizygous Tg(C9orf72_3) line 112 animals.

### Example 103

### In Vitro Transcription of C9ORF72

[0730] To identify a large spectrum of pairs of gRNAs able to edit the C9ORF72 DNA target region, an in vitro transcribed (IVT) gRNA screen was conducted. C9ORF72 genomic sequence was submitted for analysis using a gRNA design software. The resulting list of gRNAs were narrowed to a list of about 200 gRNAs (see Table 3) based on uniqueness of sequence (only gRNAs without a perfect match somewhere else in the genome were screened) and minimal predicted off targets.

TABLE 3
gRNAs

| Guide Sequence | Indel | SEQ ID |
|---|---|---|
| (20mer) | % | NO |
| AGAGCAGGTG TGGGTTTAGG | 60.0 | 3330 |
| CAAGTAGTGG GGAGAGAGGG | 6.9 | 2812 |
| GAGCAAGTAG TGGGGAGAGA | 68.9 | 2811 |
| AGAGCAAGTA GTGGGGAGAG | 76.7 | 2810 |
| TACTGTGAGA GCAAGTAGTG | 55.9 | 2806 |
| GTACTGTGAG AGCAAGTAGT | 88.1 | 2805 |
| AGTACTGTGA GAGCAAGTAG | 59.5 | 2804 |
| TGCTCTCACA GTACTCGCTG | 57.5 | 3333 |
| GCTCTCACAG TACTCGCTGA | 78.4 | 3334 |
| TCTTCTGGTT AATCTTTATC | 53.0 | 2797 |
| AGATTAACCA GAAGAAAACA | 92.6 | 3341 |
| TAACCAGAAG AAAACAAGGA | 91.8 | 3344 |
| CCAGAGCTTG CTACAGGCTG | 68.3 | 2794 |
| TGAGTTCCAG AGCTTGCTAC | 71.3 | 2793 |
| CCGCAGCCTG TAGCAAGCTC | 44.3 | 3348 |
| TGTAGCAAGC TCTGGAACTC | 71.7 | 3350 |
| GAACTCAGGA GTCGCGCGCT | 69.8 | 3353 |
| AACTCAGGAG TCGCGCGCTA | 71.9 | 3354 |
| ACTCAGGAGT CGCGCGCTAG | 61.3 | 3355 |
| AGGAGTCGCG CGCTAGGGGC | 24.6 | 3356 |
| GGAGTCGCGC GCTAGGGGCC | 53.1 | 3357 |
| GAGTCGCGCG CTAGGGGCCG | 63.6 | 3358 |
| CGCGCGCTAG GGGCCGGGGC | 33.2 | 3359 |
| GGCCCGCCCC GACCACGCCC | 89.8 | 2785 |
| GGTTGCGGTG CCTGCGCCCG | 54.0 | 3385 |
| TGCGGTGCCT GCGCCCGCGG | 64.6 | 3386 |
| GGTGCCTGCG CCCGCGGCGG | 68.9 | 3387 |
| AGGCGCAGGC GGTGGCGAGT | 75.9 | 3396 |
| TGAGTGAGGA GGCGGCATCC | 85.3 | 3403 |
| GTGAGGAGGC GGCATCCTGG | 92.5 | 3404 |
| TGAGGAGGCG GCATCCTGGC | 90.4 | 3405 |
| ACCCCAAACA GCCACCCGCC | 72.7 | 2775 |
| CATCCTGGCG GGTGGCTGTT | 76.8 | 3407 |
| ATCCTGGCGG GTGGCTGTTT | 71.3 | 3408 |
| TCCTGGCGGG TGGCTGTTTG | 66.7 | 3409 |
| GCGGGTGGCT GTTTGGGGTT | 86.3 | 3410 |
| GCTGTTTGGG GTTCGGCTGC | 45.9 | 3411 |
| CTGTTTGGGG TTCGGCTGCC | 31.5 | 3412 |
| GGGGTTCGGC TGCCGGGAAG | 71.5 | 3415 |
| CTTCTACCCG CGCCTCTTCC | 90.6 | 2771 |
| TCGGCTGCCG GGAAGAGGCG | 66.2 | 3416 |
| CGGCTGCCGG GAAGAGGCGC | 61.9 | 3417 |
| GGAAGAGGCG CGGGTAGAAG | 77.2 | 3420 |
| GAAGAGGCGC GGGTAGAAGC | 80.6 | 3421 |
| AAGAGGCGCG GGTAGAAGCG | 84.2 | 3422 |
| AGAGGCGCGG GTAGAAGCGG | 68.9 | 3423 |
| TAAAAATGCG TCGAGCTCTG | 70.9 | 2768 |
| CTTCGGTCAG AGAAATGAGA | not | 2764 |
| | obtainable | |
| GCTTCGGTCA GAGAAATGAG | 91.3 | 2763 |
| CTCATTTCTC TGACCGAAGC | 4.3 | 3427 |
| TCATTTCTCT GACCGAAGCT | 61.1 | 3428 |
| GAAAGCCCGA CACCCAGCTT | 81.7 | 2758 |
| CTCTGACCGA AGCTGGGTGT | 60.3 | 3429 |
| TCTGACCGAA GCTGGGTGTC | 80.5 | 3430 |
| GCAATTCCAC CAGTCGCTAG | 94.3 | 2755 |
| GGGCTTTCGC CTCTAGCGAC | 86.1 | 3432 |
| CTTTCGCCTC TAGCGACTGG | 74.9 | 3433 |
| CTGGTGGAAT TGCCTGCATC | 59.1 | 3434 |
| TGGTGGAATT GCCTGCATCC | 85.7 | 3435 |
| GAAGCCCGGG GCCCGGATGC | 27.9 | 2751 |
| AATTGCCTGC ATCCGGGCCC | 41.4 | 3436 |
| ATTGCCTGCA TCCGGGCCCC | 81.4 | 3437 |
| CCGCCGGGAA GCCCGGGGCC | 37.7 | 2749 |
| CGCCGCCGCC GGGAAGCCCG | 74.6 | 2748 |
| CCGCCGCCGC CGGGAAGCCC | 46.3 | 2747 |
| CATCCGGGCC CCGGGCTTCC | 62.3 | 3438 |
| GCCGCCGCCG CCGGGAAGCC | 21.3 | 2746 |
| CCGGGCCCCG GGCTTCCCGG | 3.1 | 3439 |
| GGCCCCGGGC TTCCCGGCGG | 74.0 | 3440 |
| CCCGGGCTTC CCGGCGGCGG | 43.2 | 3441 |
| GCGGCGGCGG CGCAGGGACA | not | 3450 |
| | obtainable | |
| CGGCGGCGGC GCAGGGACAA | not | 3451 |
| | obtainable | |
| GCGGCGCAGG GACAAGGGAT | 88.3 | 3453 |
| CGGCGCAGGG ACAAGGGATG | 48.7 | 3454 |
| GTACTGAGGG CGGGAAAGCA | 48.3 | 2738 |
| ACAGCTCGGG TACTGAGGGC | 26.9 | 2735 |
| GACAGCTCGG GTACTGAGGG | 69.6 | 2734 |
| GGAGACAGCT CGGGTACTGA | 89.9 | 2733 |
| AGGAGACAGC TCGGGTACTG | 73.1 | 2732 |
| CCCCGGGAAG GAGACAGCTC | 34.9 | 2730 |
| TCCCCGGGAA GGAGACAGCT | not | 2729 |
| | obtainable | |
| TACCCGAGCT GTCTCCTTCC | 75.9 | 3458 |
| ACCCGAGCTG TCTCCTTCCC | 49.0 | 3459 |
| CCCGAGCTGT CTCCTTCCCG | 78.7 | 3460 |
| CTCCCAGCGG GTCCCCGGGA | 32.1 | 2726 |
| AGCGCTCCCA GCGGGTCCCC | 12.0 | 2724 |
| CAGCGCTCCC AGCGGGTCCC | 44.4 | 2723 |
| TCTCCTTCCC GGGGACCCGC | 27.7 | 3461 |
| CTCCTTCCCG GGGACCCGCT | 31.0 | 3462 |
| GCAGCGGCAG CGCTCCCAGC | 49.3 | 2722 |
| CGCAGCGGCA GCGCTCCCAG | 53.3 | 2721 |
| CGCTGGGAGC GCTGCCGCTG | 86.0 | 3464 |
| GCTGGGAGCG CTGCCGCTGC | 28.3 | 3465 |
| CCCTTTTCTC GAGCCCGCAG | 71.6 | 2718 |
| GCCGCTGCGG GCTCGAGAAA | 58.2 | 3468 |
| CCGCTGCGGG CTCGAGAAAA | 61.5 | 3469 |
| GGCTCGAGAA AAGGGAGCCT | 12.0 | 3471 |
| GCTCGAGAAA AGGGAGCCTC | 80.0 | 3472 |
| GCGAGGCCTC TCAGTACCCG | 76.4 | 2715 |
| AGGGAGCCTC GGGTACTGAG | 95.2 | 3475 |
| GGGTACTGAG AGGCCTCGCC | 10.8 | 3476 |
| GGTACTGAGA GGCCTCGCCT | 36.3 | 3477 |
| GTACTGAGAG GCCTCGCCTG | 14.2 | 3478 |
| TACTGAGAGG CCTCGCCTGG | 81.5 | 3479 |
| CTCCGGCCTT CCCCCAGGCG | 54.9 | 2712 |
| GAGAGGCCTC GCCTGGGGGA | 32.0 | 3481 |
| CCACCCTCCG GCCTTCCCCC | 73.0 | 2710 |
| GGCCTCGCCT GGGGGAAGGC | 62.6 | 3482 |
| CTCGCCTGGG GGAAGGCCGG | 18.8 | 3484 |
| TCGCCTGGGG GAAGGCCGGA | 92.7 | 3485 |
| GCCGCGCGCC GCCCACCCTC | 66.3 | 2708 |
| TGGGCGGCGC GCGGCTTCTG | 36.5 | 3490 |
| GCGGCTTCTG CGGACCAAGT | 63.8 | 3492 |
| CGGCTTCTGC GGACCAAGTC | 10.6 | 3493 |
| GGCTTCTGCG GACCAAGTCG | 78.9 | 3494 |
| GTTCCTAGCG AACCCCGACT | 67.9 | 2705 |
| GGACCAAGTC GGGGTTCGCT | 93.3 | 3496 |
| GGTTCGCTAG GAACCCGAGA | 79.6 | 3498 |
| TCGCCGGCAG GGACCGTCTC | 72.5 | 2703 |
| CTCGCCGGCA GGGACCGTCT | 47.1 | 2702 |
| GAACCCGAGA CGGTCCCTGC | 52.5 | 3499 |
| GCATGATCTC CTCGCCGGCA | 87.5 | 2701 |
| CGCATGATCT CCTCGCCGGC | 56.2 | 2700 |
| CGAGACGGTC CCTGCCGGCG | 68.1 | 3501 |
| ATCCCGCATG ATCTCCTCGC | 94.0 | 2698 |
| CTGCCGGCGA GGAGATCATG | 85.2 | 3503 |
| TGCCGGCGAG GAGATCATGC | 78.6 | 3504 |
| GGAGATCATG CGGGATGAGA | 63.1 | 3506 |
| GAGATCATGC GGGATGAGAT | 66.2 | 3507 |
| AGATCATGCG GGATGAGATG | 57.6 | 3508 |
| GATCATGCGG GATGAGATGG | 70.3 | 3509 |
| AGCTTGGGCT GAAATTGTGC | 87.1 | 2697 |
| TCACCACTCT CTAGAAGCTT | 73.9 | 2695 |
| ATCACCACTC TCTAGAAGCT | 87.6 | 2694 |
| CAGCCCAAGC TTCTAGAGAG | 48.5 | 3517 |
| GTGGTGATGA CTTGCATATG | 93.2 | 3519 |
| TGGTGATGAC TTGCATATGA | 71.5 | 3520 |
| ATGAGGGCAG CAATGCAAGT | 80.4 | 3523 |
| TCGGTGTGCT CCCCATTCTG | 84.0 | 3524 |
| AGGTCATGTC CCACAGAATG | 94.9 | 2689 |
| CGGTGTGCTC CCCATTCTGT | 77.2 | 3525 |
| CAGGTCATGT CCCACAGAAT | 63.1 | 2688 |
| CCAGGTCATG TCCCACAGAA | 83.6 | 2687 |
| CCATTCTGTG GGACATGACC | 64.7 | 3526 |
| CTCGGAGCTG TGAAGCAACC | 48.8 | 2685 |
| TAAGCAAGTC TGTGTCATCT | 92.7 | 2681 |
| GATGACACAG ACTTGCTTAA | 90.7 | 3531 |
| AGGAAGTGAC TATTGTGACT | 62.1 | 3533 |
| GGAAGTGACT ATTGTGACTT | 89.0 | 3534 |
| CTTGGGCATC ACTTGACTGA | 74.1 | 3535 |
| AGATAGACCC AATGAGCACA | 91.0 | 2673 |
| TTACATGTCC GTGTGCTCAT | 19.2 | 3540 |
| TACATGTCCG TGTGCTCATT | 48.6 | 3541 |
| GTGTGCTCAT TGGGTCTATC | 91.5 | 3542 |
| AAGCCTGGTG GTGTTCAACG | 98.5 | 2669 |
| TGGCCGCGTT GAACACCACC | 73.7 | 3544 |
| CTGTTTCTGA ATACAAAGCC | 67.0 | 2667 |
| CAGGCTTTGT ATTCAGAAAC | 62.1 | 3547 |
| GCTTTGTATT CAGAAACAGG | 84.0 | 3549 |
| TGTATTCAGA AACAGGAGGG | 38.5 | 3552 |
| CACCCCTCCT GGGAAAGTGC | 78.2 | 2665 |
| GGGAGGTCCT GCACTTTCCC | 35.7 | 3554 |
| AGGTCCTGCA CTTTCCCAGG | 88.9 | 3556 |
| GGTCCTGCAC TTTCCCAGGA | 67.5 | 3557 |
| GTCCTGCACT TTCCCAGGAG | 96.3 | 3558 |
| CTGAAAGGGC CACCCCTCCT | 47.0 | 2662 |
| TCTGAAAGGG CCACCCCTCC | 41.2 | 2661 |
| CTGCACTTTC CCAGGAGGGG | not | 3559 |
| | obtainable | |
| AATCTCGATT GCATCTGAAA | not | 2660 |
| | obtainable | |
| CAATCTCGAT TGCATCTGAA | not | 2659 |
| | obtainable | |
| CAGATGCAAT CGAGATTGTT | not | 3563 |
| | obtainable | |
| CAATCGAGAT TGTTAGGCTC | not | 3564 |
| | obtainable | |
| AATCGAGATT GTTAGGCTCT | not | 3565 |
| | obtainable | |
| GCTCTGGGAG AGTAGTTGCC | not | 3569 |
| | obtainable | |
| GGAGAGTAGT TGCCTGGTTG | not | 3570 |
| | obtainable | |
| ATTTACCAAC TGCCACAACC | not | 2654 |
| | obtainable | |
| AGTTGCCTGG TTGTGGCAGT | not | 3572 |
| | obtainable | |
| TGTTGTGAAC AACTGGTGCA | not | 2652 |
| | obtainable | |
| GTACCCTTGT TGTGAACAAC | not | 2651 |
| | obtainable | |
| TGCACCAGTT GTTCACAACA | not | 3576 |
| | obtainable | |
| GCACCAGTTG TTCACAACAA | not | 3577 |
| | obtainable | |
| ACAAGGGTAC GTAATCTGTC | not | 3578 |
| | obtainable | |
| CAGAAACAAG ACTATCATAT | 13.1 | 3589 |
| AGAAACAAGA CTATCATATA | 65.3 | 3590 |
| GAAACAAGAC TATCATATAG | 58.4 | 3591 |
| TATAGGGGAT ATTAATAACC | 93.5 | 3592 |
| ATTTCAAGTA TTCTGACTCC | 50.2 | 2639 |
| GAGTCAGAAT ACTTGAAATA | 38.3 | 3595 |
| AAATACGGTG TCATTTGACA | 49.8 | 3596 |
| AATACGGTGT CATTTGACAC | 18.6 | 3597 |
| TGTTGTCACC ACCTCTGCCA | 72.5 | 3599 |
| TTTCCTAAAG TGGCAGGCCT | 21.4 | 2632 |

[0731] The gRNAs in Table 3 were in vitro transcribed, and transfected using messenger Max into HEK293T cells that constitutively express Cas9. Cells were harvested 48 hours post transfection, the genomic DNA was isolated, and cutting efficiency was evaluated using TIDE analysis. (FIG. 1). It was found that about 25% of the tested gRNAs induced cutting efficiencies over 80%.

[0732] Note Regarding Illustrative Embodiments

[0733] While the present disclosure provides descriptions of various specific aspects for the purpose of illustrating various aspects of the present invention and/or its potential applications, it is understood that variations and modifications will occur to those skilled in the art. Accordingly, the invention or inventions described herein should be understood to be at least as broad as they are claimed, and not as more narrowly defined by particular illustrative aspects provided herein.

[0734] Any patent, publication, or other disclosure material identified herein is incorporated by reference into this specification in its entirety unless otherwise indicated, but only to the extent that the incorporated material does not conflict with existing descriptions, definitions, statements, or other disclosure material expressly set forth in this specification. As such, and to the extent necessary, the express disclosure as set forth in this specification supersedes any conflicting material incorporated by reference. Any material, or portion thereof, that is said to be incorporated by reference into this specification, but which conflicts with existing definitions, statements, or other disclosure material set forth herein, is only incorporated to the extent that no conflict arises between that incorporated material and the existing disclosure material. Applicants reserve the right to amend this specification to expressly recite any subject matter, or portion thereof, incorporated by reference herein.

The application's sequence listing, which the Patent Office published only in electronic form, follows.

SEQUENCE LISTING (73668 sequences)

SEQ ID NO: 1 - DNA, 20 bp, Artificial Sequence
  chemically synthesized
tttattcaaaattctccatt

SEQ ID NO: 2 - DNA, 20 bp, Artificial Sequence
  chemically synthesized
ttattcaaaattctccattt

SEQ ID NO: 3 - DNA, 20 bp, Artificial Sequence
  chemically synthesized
attcaaaattctccatttag

SEQ ID NO: 4 - DNA, 20 bp, Artificial Sequence
  chemically synthesized
aaattctccatttaggagaa

SEQ ID NO: 5 - DNA, 20 bp, Artificial Sequence
  chemically synthesized
acaacttacattctgtataa

SEQ ID NO: 6 - DNA, 20 bp, Artificial Sequence
  chemically synthesized
tgtataacagtacaataaac

SEQ ID NO: 7 - DNA, 20 bp, Artificial Sequence
  chemically synthesized
acagtacaataaaccagcca

SEQ ID NO: 8 - DNA, 20 bp, Artificial Sequence
  chemically synthesized
aaccagccaaagaaaataac

SEQ ID NO: 9 - DNA, 20 bp, Artificial Sequence
  chemically synthesized
agccaaagaaaataaccagt

SEQ ID NO: 10 - DNA, 20 bp, Artificial Sequence
  chemically synthesized
taaccagttagcacttaaat

SEQ ID NO: 11 - DNA, 20 bp, Artificial Sequence
  chemically synthesized
aatctaccatgtaaaaaaca

SEQ ID NO: 12 - DNA, 20 bp, Artificial Sequence
  chemically synthesized
accatgtaaaaaacacagta

SEQ ID NO: 13 - DNA, 20 bp, Artificial Sequence
  chemically synthesized
ccatgtaaaaaacacagtat

SEQ ID NO: 14 - DNA, 20 bp, Artificial Sequence
  chemically synthesized
aacacagtatgggacactac

SEQ ID NO: 15 - DNA, 20 bp, Artificial Sequence
  chemically synthesized
acacagtatgggacactaca

SEQ ID NO: 16 - DNA, 20 bp, Artificial Sequence
  chemically synthesized
cagtatgggacactacaagg

SEQ ID NO: 17 - DNA, 20 bp, Artificial Sequence
  chemically synthesized
tatatattttttaaatgact

SEQ ID NO: 18 - DNA, 20 bp, Artificial Sequence
  chemically synthesized
ttttttaaatgactgagcta

SEQ ID NO: 19 - DNA, 20 bp, Artificial Sequence
  chemically synthesized
atgactgagctacagtacaa

SEQ ID NO: 20 - DNA, 20 bp, Artificial Sequence
  chemically synthesized
gctacagtacaacagtcatc

SEQ ID NO: 21 - DNA, 20 bp, Artificial Sequence
  chemically synthesized
agtacaacagtcatctagtt

SEQ ID NO: 22 - DNA, 20 bp, Artificial Sequence
  chemically synthesized
acaacagtcatctagttcag

SEQ ID NO: 23 - DNA, 20 bp, Artificial Sequence
  chemically synthesized
cagtggttgtctaaaacatc

SEQ ID NO: 24 - DNA, 20 bp, Artificial Sequence
  chemically synthesized
cacatctttctgattcatga

SEQ ID NO: 25 - DNA, 20 bp, Artificial Sequence
  chemically synthesized
acatctttctgattcatgat

SEQ ID NO: 26 - DNA, 20 bp, Artificial Sequence
  chemically synthesized
ctttctgattcatgatggga

SEQ ID NO: 27 - DNA, 20 bp, Artificial Sequence
  chemically synthesized
gtcattttgttgtgtaaatt

SEQ ID NO: 28 - DNA, 20 bp, Artificial Sequence
  chemically synthesized
attttgttgtgtaaatttgg

SEQ ID NO: 29 - DNA, 20 bp, Artificial Sequence
  chemically synthesized
ttttgttgtgtaaatttggt

SEQ ID NO: 30 - DNA, 20 bp, Artificial Sequence
  chemically synthesized
tgttgtgtaaatttggtggg

SEQ ID NO: 31 - DNA, 20 bp, Artificial Sequence
  chemically synthesized
gttgtgtaaatttggtgggt

SEQ ID NO: 32 - DNA, 20 bp, Artificial Sequence
  chemically synthesized
ttgtgtaaatttggtgggtg

SEQ ID NO: 33 - DNA, 20 bp, Artificial Sequence
  chemically synthesized
tgtgtaaatttggtgggtgg

SEQ ID NO: 34 - DNA, 20 bp, Artificial Sequence
  chemically synthesized
gtgtaaatttggtgggtggg

SEQ ID NO: 35 - DNA, 20 bp, Artificial Sequence
  chemically synthesized
taaatttggtgggtgggggg

SEQ ID NO: 36 - DNA, 20 bp, Artificial Sequence
  chemically synthesized
atttggtgggtggggggcag

SEQ ID NO: 37 - DNA, 20 bp, Artificial Sequence
  chemically synthesized
tttggtgggtggggggcaga

SEQ ID NO: 38 - DNA, 20 bp, Artificial Sequence
  chemically synthesized
ttggtgggtggggggcagaa

SEQ ID NO: 39 - DNA, 20 bp, Artificial Sequence
  chemically synthesized
tttcccttttatattacttc

SEQ ID NO: 40 - DNA, 20 bp, Artificial Sequence
  chemically synthesized
ctacaatgtcaacattgtgt

SEQ ID NO: 41 - DNA, 20 bp, Artificial Sequence
  chemically synthesized
tgtgttagaattatattaat

SEQ ID NO: 42 - DNA, 20 bp, Artificial Sequence
  chemically synthesized
tatattaatcagttatttta

SEQ ID NO: 43 - DNA, 20 bp, Artificial Sequence
  chemically synthesized
ttaatcagttattttatagc

SEQ ID NO: 44 - DNA, 20 bp, Artificial Sequence
  chemically synthesized
ttattttatagccagcaaaa

SEQ ID NO: 45 - DNA, 20 bp, Artificial Sequence
  chemically synthesized
caaaatggtccaaacgcatt

SEQ ID NO: 46 - DNA, 20 bp, Artificial Sequence
  chemically synthesized
caaacgcattaagaaaacaa

SEQ ID NO: 47 - DNA, 20 bp, Artificial Sequence
  chemically synthesized
taagaaaacaaaagataact

SEQ ID NO: 48 - DNA, 20 bp, Artificial Sequence
  chemically synthesized
aagataacttagctctgcca

SEQ ID NO: 49 - DNA, 20 bp, Artificial Sequence
  chemically synthesized
ataacttagctctgccaaag

SEQ ID NO: 50 - DNA, 20 bp, Artificial Sequence
  chemically synthesized
agctctgccaaagtagcacc

SEQ ID NO: 51 - DNA, 20 bp, Artificial Sequence
  chemically synthesized
gctctgccaaagtagcacct

SEQ ID NO: 52 - DNA, 20 bp, Artificial Sequence
  chemically synthesized
caaagtagcacctaggaaaa

SEQ ID NO: 53 - DNA, 20 bp, Artificial Sequence
  chemically synthesized
cacctaggaaaacagcactt

SEQ ID NO: 54 - DNA, 20 bp, Artificial Sequence
  chemically synthesized
atttctcctgctattcctta

SEQ ID NO: 55 - DNA, 20 bp, Artificial Sequence
  chemically synthesized
ctattccttatagcctattg

SEQ ID NO: 56 - DNA, 20 bp, Artificial Sequence
  chemically synthesized
tattccttatagcctattgc

SEQ ID NO: 57 - DNA, 20 bp, Artificial Sequence
  chemically synthesized
tatagcctattgcaggcaaa

SEQ ID NO: 58 - DNA, 20 bp, Artificial Sequence
  chemically synthesized
cagcaacaacttcaaaaaca

SEQ ID NO: 59 - DNA, 20 bp, Artificial Sequence
  chemically synthesized
agcaacaacttcaaaaacat

SEQ ID NO: 60 - DNA, 20 bp, Artificial Sequence
  chemically synthesized
aacaacttcaaaaacatagg

SEQ ID NO: 61 - DNA, 20 bp, Artificial Sequence
  chemically synthesized
aaaaacataggcagaaatgc

SEQ ID NO: 62 - DNA, 20 bp, Artificial Sequence
  chemically synthesized
aacataggcagaaatgcaag

SEQ ID NO: 63 - DNA, 20 bp, Artificial Sequence
  chemically synthesized
acataggcagaaatgcaaga

SEQ ID NO: 64 - DNA, 20 bp, Artificial Sequence
  chemically synthesized
taggcagaaatgcaagaagg

SEQ ID NO: 65 - DNA, 20 bp, Artificial Sequence
  chemically synthesized
aatgcaagaaggaagtactc

SEQ ID NO: 66 - DNA, 20 bp, Artificial Sequence
  chemically synthesized
atgcaagaaggaagtactca

SEQ ID NO: 67 - DNA, 20 bp, Artificial Sequence
  chemically synthesized
tattttctgtttctgaaaaa

SEQ ID NO: 68 - DNA, 20 bp, Artificial Sequence
  chemically synthesized
ttctgaaaaaaagatcttat

SEQ ID NO: 69 - DNA, 20 bp, Artificial Sequence
  chemically synthesized
gaaaaaaagatcttattagt

SEQ ID NO: 70 - DNA, 20 bp, Artificial Sequence
  chemically synthesized
tattagttagtatattctct

SEQ ID NO: 71 - DNA, 20 bp, Artificial Sequence
  chemically synthesized
attagttagtatattctcta

SEQ ID NO: 72 - DNA, 20 bp, Artificial Sequence
  chemically synthesized
tctaaggcattttataatct

SEQ ID NO: 73 - DNA, 20 bp, Artificial Sequence
  chemically synthesized
taaggcattttataatctca

SEQ ID NO: 74 - DNA, 20 bp, Artificial Sequence
  chemically synthesized
cagagttgcaatgattgcca

SEQ ID NO: 75 - DNA, 20 bp, Artificial Sequence
  chemically synthesized
agttgcaatgattgccaaag

SEQ ID NO: 76 - DNA, 20 bp, Artificial Sequence
  chemically synthesized
gttgcaatgattgccaaagc

SEQ ID NO: 77 - DNA, 20 bp, Artificial Sequence
  chemically synthesized
tgattgccaaagcaggtaca

SEQ ID NO: 78 - DNA, 20 bp, Artificial Sequence
  chemically synthesized
tgccaaagcaggtacatggt

SEQ ID NO: 79 - DNA, 20 bp, Artificial Sequence
  chemically synthesized
agcaggtacatggtaagact

SEQ ID NO: 80 - DNA, 20 bp, Artificial Sequence
  chemically synthesized
ggtacatggtaagacttagc

SEQ ID NO: 81 - DNA, 20 bp, Artificial Sequence
  chemically synthesized
acatggtaagacttagcaag

SEQ ID NO: 82 - DNA, 20 bp, Artificial Sequence
  chemically synthesized
agacttagcaagaagaaaac

SEQ ID NO: 83 - DNA, 20 bp, Artificial Sequence
  chemically synthesized
acaagatgaaaatgactgac

SEQ ID NO: 84 - DNA, 20 bp, Artificial Sequence
  chemically synthesized
gtgaaatctgaacttgttcc

SEQ ID NO: 85 - DNA, 20 bp, Artificial Sequence
  chemically synthesized
ctgaacttgttccaagtaat

SEQ ID NO: 86 - DNA, 20 bp, Artificial Sequence
  chemically synthesized
tccaagtaattagattttct

SEQ ID NO: 87 - DNA, 20 bp, Artificial Sequence
  chemically synthesized
ccaagtaattagattttcta

SEQ ID NO: 88 - DNA, 20 bp, Artificial Sequence
  chemically synthesized
aagtaattagattttctaag

SEQ ID NO: 89 - DNA, 20 bp, Artificial Sequence
  chemically synthesized
tagattttctaaggagaaaa

SEQ ID NO: 90 - DNA, 20 bp, Artificial Sequence
  chemically synthesized
agattttctaaggagaaaaa

SEQ ID NO: 91 - DNA, 20 bp, Artificial Sequence
  chemically synthesized
ttctaaggagaaaaaaggca

SEQ ID NO: 92 - DNA, 20 bp, Artificial Sequence
  chemically synthesized
tctaaggagaaaaaaggcac

SEQ ID NO: 93 - DNA, 20 bp, Artificial Sequence
  chemically synthesized
taaggagaaaaaaggcacag

SEQ ID NO: 94 - DNA, 20 bp, Artificial Sequence
  chemically synthesized
aaggagaaaaaaggcacagg

SEQ ID NO: 95 - DNA, 20 bp, Artificial Sequence
  chemically synthesized
aggaggtgcacatttcaatt

SEQ ID NO: 96 - DNA, 20 bp, Artificial Sequence
  chemically synthesized
ataatgaaaattaatttaaa

SEQ ID NO: 97 - DNA, 20 bp, Artificial Sequence
  chemically synthesized
tgaaaattaatttaaaaagt

SEQ ID NO: 98 - DNA, 20 bp, Artificial Sequence
  chemically synthesized
taaaatacaatttcctttta

SEQ ID NO: 99 - DNA, 20 bp, Artificial Sequence
  chemically synthesized
aaatacaatttccttttaca

SEQ ID NO: 100 - DNA, 20 bp, Artificial Sequence
  chemically synthesized
ttttacagagctcaactaca

SEQ ID NO: 101 - DNA, 20 bp, Artificial Sequence
  chemically synthesized
actacatagaatatcaacaa

SEQ ID NO: 102 - DNA, 20 bp, Artificial Sequence
  chemically synthesized
catagaatatcaacaatagc

SEQ ID NO: 103 - DNA, 20 bp, Artificial Sequence
  chemically synthesized
taaacaaaacaccctaactg

SEQ ID NO: 104 - DNA, 20 bp, Artificial Sequence
  chemically synthesized
acaccctaactgtggttcac

SEQ ID NO: 105 - DNA, 20 bp, Artificial Sequence
  chemically synthesized
caccctaactgtggttcacc

SEQ ID NO: 106 - DNA, 20 bp, Artificial Sequence
  chemically synthesized
aactgtggttcaccaggaac

SEQ ID NO: 107 - DNA, 20 bp, Artificial Sequence
  chemically synthesized
actgtggttcaccaggaaca

SEQ ID NO: 108 - DNA, 20 bp, Artificial Sequence
  chemically synthesized
ttcaccaggaacaaggacta

SEQ ID NO: 109 - DNA, 20 bp, Artificial Sequence
  chemically synthesized
caccaggaacaaggactata

SEQ ID NO: 110 - DNA, 20 bp, Artificial Sequence
  chemically synthesized
caaggactatagagaactat

SEQ ID NO: 111 - DNA, 20 bp, Artificial Sequence
  chemically synthesized
agaactattagacatttcta

SEQ ID NO: 112 - DNA, 20 bp, Artificial Sequence
  chemically synthesized
catttctacagactgaatcc

SEQ ID NO: 113 - DNA, 20 bp, Artificial Sequence
  chemically synthesized
atttctacagactgaatccc

SEQ ID NO: 114 - DNA, 20 bp, Artificial Sequence
  chemically synthesized
tttctacagactgaatccca

SEQ ID NO: 115 - DNA, 20 bp, Artificial Sequence
  chemically synthesized
tcccagggactaaatccaca

SEQ ID NO: 116 - DNA, 20 bp, Artificial Sequence
  chemically synthesized
cagggactaaatccacaaag

SEQ ID NO: 117 - DNA, 20 bp, Artificial Sequence
  chemically synthesized
agggactaaatccacaaagt

SEQ ID NO: 118 - DNA, 20 bp, Artificial Sequence
  chemically synthesized
cttgatcaattttctttcta

SEQ ID NO: 119 - DNA, 20 bp, Artificial Sequence
  chemically synthesized
ctaaagctcatcctatgttc

SEQ ID NO: 120 - DNA, 20 bp, Artificial Sequence
  chemically synthesized
tcaagctcactttctttctg

SEQ ID NO: 121 - DNA, 20 bp, Artificial Sequence
  chemically synthesized
tgtggaattgaaatcattta

SEQ ID NO: 122 - DNA, 20 bp, Artificial Sequence
  chemically synthesized
gtggaattgaaatcatttaa

SEQ ID NO: 123 - DNA, 20 bp, Artificial Sequence
  chemically synthesized
ttgaaatcatttaaaggctc

SEQ ID NO: 124 - DNA, 20 bp, Artificial Sequence
  chemically synthesized
catttaaaggctctagtttt

SEQ ID NO: 125 - DNA, 20 bp, Artificial Sequence
  chemically synthesized
ctctagttttcagttgattg

SEQ ID NO: 126 - DNA, 20 bp, Artificial Sequence
  chemically synthesized
tagttttcagttgattgcag

SEQ ID NO: 127 - DNA, 20 bp, Artificial Sequence
  chemically synthesized
agttgattgcagaagtatta

SEQ ID NO: 128 - DNA, 20 bp, Artificial Sequence
  chemically synthesized
tacagtaattctacacacca

SEQ ID NO: 129 - DNA, 20 bp, Artificial Sequence
  chemically synthesized
tacacaccaaagaatgccaa

SEQ ID NO: 130 - DNA, 20 bp, Artificial Sequence
  chemically synthesized
caccaaagaatgccaaaaga

SEQ ID NO: 131 - DNA, 20 bp, Artificial Sequence
  chemically synthesized
aaagaatgccaaaagataga

SEQ ID NO: 132 - DNA, 20 bp, Artificial Sequence
  chemically synthesized
agaaagtcaactatctgtaa

SEQ ID NO: 133 - DNA, 20 bp, Artificial Sequence
  chemically synthesized
actatctgtaaaagccaact

SEQ ID NO: 134 - DNA, 20 bp, Artificial Sequence
  chemically synthesized
aatcatgtatttcaaaaaaa

SEQ ID NO: 135 - DNA, 20 bp, Artificial Sequence
  chemically synthesized
catgtatttcaaaaaaacag

SEQ ID NO: 136 - DNA, 20 bp, Artificial Sequence
  chemically synthesized
tttcaaaaaaacagtagttg

SEQ ID NO: 137 - DNA, 20 bp, Artificial Sequence
  chemically synthesized
aaaaaacagtagttgtggtc

SEQ ID NO: 138 - DNA, 20 bp, Artificial Sequence
  chemically synthesized
tcctattattatatctttaa

SEQ ID NO: 139 - DNA, 20 bp, Artificial Sequence
  chemically synthesized
attattatatctttaaaaga

SEQ ID NO: 140 - DNA, 20 bp, Artificial Sequence
  chemically synthesized
tatttattatattgtaaaca

SEQ ID NO: 141 - DNA, 20 bp, Artificial Sequence
  chemically synthesized
atttattatattgtaaacat

SEQ ID NO: 142 - DNA, 20 bp, Artificial Sequence
  chemically synthesized
aacataggtctgtatcccaa

SEQ ID NO: 143 - DNA, 20 bp, Artificial Sequence
  chemically synthesized
gtatcccaaaagcataaatc

SEQ ID NO: 144 - DNA, 20 bp, Artificial Sequence
  chemically synthesized
tatcccaaaagcataaatct

SEQ ID NO: 145 - DNA, 20 bp, Artificial Sequence
  chemically synthesized
caaaagcataaatctaggaa

SEQ ID NO: 146 - DNA, 20 bp, Artificial Sequence
  chemically synthesized
aaagcataaatctaggaaaa

SEQ ID NO: 147 - DNA, 20 bp, Artificial Sequence
  chemically synthesized
atgcacctgacatcccctca

SEQ ID NO: 148 - DNA, 20 bp, Artificial Sequence
  chemically synthesized
tgcacctgacatcccctcac

SEQ ID NO: 149 - DNA, 20 bp, Artificial Sequence
  chemically synthesized
atcccctcacaggctcttgt

SEQ ID NO: 150 - DNA, 20 bp, Artificial Sequence
  chemically synthesized
acaggctcttgtgagaactg

SEQ ID NO: 151 - DNA, 20 bp, Artificial Sequence
  chemically synthesized
cttacttaactgcaattgct

SEQ ID NO: 152 - DNA, 20 bp, Artificial Sequence
  chemically synthesized
tacttaactgcaattgctga

SEQ ID NO: 153 - DNA, 20 bp, Artificial Sequence
  chemically synthesized
ttaactgcaattgctgagag

SEQ ID NO: 154 - DNA, 20 bp, Artificial Sequence
  chemically synthesized
aattgctgagagcagaattc

SEQ ID NO: 155 - DNA, 20 bp, Artificial Sequence
  chemically synthesized
ttgctgagagcagaattctg

SEQ ID NO: 156 - DNA, 20 bp, Artificial Sequence
  chemically synthesized
cagaattctggagtatgatc

SEQ ID NO: 157 - DNA, 20 bp, Artificial Sequence
  chemically synthesized
agaattctggagtatgatcc

SEQ ID NO: 158 - DNA, 20 bp, Artificial Sequence
  chemically synthesized
gaattctggagtatgatcca

SEQ ID NO: 159 - DNA, 20 bp, Artificial Sequence
  chemically synthesized
aattctggagtatgatccag

SEQ ID NO: 160 - DNA, 20 bp, Artificial Sequence
  chemically synthesized
gaacgtttccccacaccact

SEQ ID NO: 161 - DNA, 20 bp, Artificial Sequence
  chemically synthesized
acaccactgagctactttac

SEQ ID NO: 162 - DNA, 20 bp, Artificial Sequence
  chemically synthesized
accagcgatcatgattgtga

SEQ ID NO: 163 - DNA, 20 bp, Artificial Sequence
  chemically synthesized
cgatcatgattgtgatggaa

SEQ ID NO: 164 - DNA, 20 bp, Artificial Sequence
  chemically synthesized
gatcatgattgtgatggaat

SEQ ID NO: 165 - DNA, 20 bp, Artificial Sequence
  chemically synthesized
tgtgatggaataggcttatt

SEQ ID NO: 166 - DNA, 20 bp, Artificial Sequence
  chemically synthesized
tattaagttacacatttaaa

SEQ ID NO: 167 - DNA, 20 bp, Artificial Sequence
  chemically synthesized
ttacacatttaaaaagtcat

SEQ ID NO: 168 - DNA, 20 bp, Artificial Sequence
  chemically synthesized
aacatctcgttcttgcacac

SEQ ID NO: 169 - DNA, 20 bp, Artificial Sequence
  chemically synthesized
ctcgttcttgcacactagtg

SEQ ID NO: 170 - DNA, 20 bp, Artificial Sequence
  chemically synthesized
ttcttgcacactagtgtaga

SEQ ID NO: 171 - DNA, 20 bp, Artificial Sequence
  chemically synthesized
tcttgcacactagtgtagaa

SEQ ID NO: 172 - DNA, 20 bp, Artificial Sequence
  chemically synthesized
tagtgtagaaaggtcttcca

SEQ ID NO: 173 - DNA, 20 bp, Artificial Sequence
  chemically synthesized
gaaaggtcttccaaagataa

SEQ ID NO: 174 - DNA, 20 bp, Artificial Sequence
  chemically synthesized
aaggtcttccaaagataaaa

SEQ ID NO: 175 - DNA, 20 bp, Artificial Sequence
  chemically synthesized
cttccaaagataaaagagtg

SEQ ID NO: 176 - DNA, 20 bp, Artificial Sequence
  chemically synthesized
ttccaaagataaaagagtgt

SEQ ID NO: 177 - DNA, 20 bp, Artificial Sequence
  chemically synthesized
aagataaaagagtgtaggcc

SEQ ID NO: 178 - DNA, 20 bp, Artificial Sequence
  chemically synthesized
taggcctggtttaattttct

SEQ ID NO: 179 - DNA, 20 bp, Artificial Sequence
  chemically synthesized
cctggtttaattttctcagc

SEQ ID NO: 180 - DNA, 20 bp, Artificial Sequence
  chemically synthesized
tggtttaattttctcagcca

SEQ ID NO: 181 - DNA, 20 bp, Artificial Sequence
  chemically synthesized
gccagagccattattatgtt

SEQ ID NO: 182 - DNA, 20 bp, Artificial Sequence
  chemically synthesized
tcgccctctgctgttaaatc

SEQ ID NO: 183 - DNA, 20 bp, Artificial Sequence
  chemically synthesized
cgccctctgctgttaaatca

SEQ ID NO: 184 - DNA, 20 bp, Artificial Sequence
  chemically synthesized
gttaaatcaaggtctatctt

SEQ ID NO: 185 - DNA, 20 bp, Artificial Sequence
  chemically synthesized
ttaaatcaaggtctatcttc

SEQ ID NO: 186 - DNA, 20 bp, Artificial Sequence
  chemically synthesized
aggtctatcttcaggttccg

SEQ ID NO: 187 - DNA, 20 bp, Artificial Sequence
  chemically synthesized
gtctatcttcaggttccgaa

SEQ ID NO: 188 - DNA, 20 bp, Artificial Sequence
  chemically synthesized
tcaggttccgaagagattta

SEQ ID NO: 189 - DNA, 20 bp, Artificial Sequence
  chemically synthesized
caggttccgaagagatttaa

SEQ ID NO: 190 - DNA, 20 bp, Artificial Sequence
  chemically synthesized
aggttccgaagagatttaaa

SEQ ID NO: 191 - DNA, 20 bp, Artificial Sequence
  chemically synthesized
tcccttctgcctaaaaataa

SEQ ID NO: 192 - DNA, 20 bp, Artificial Sequence
  chemically synthesized
aaaaaaaaaaaaaaaaaaaa

SEQ ID NO: 193 - DNA, 20 bp, Artificial Sequence
  chemically synthesized
aaaaaaaaaaaaaaaaaaag

SEQ ID NO: 194 - DNA, 20 bp, Artificial Sequence
  chemically synthesized
gaagcgcaaaaattatgata

SEQ ID NO: 195 - DNA, 20 bp, Artificial Sequence
  chemically synthesized
tatgatatagaaaatgtaca

SEQ ID NO: 196 - DNA, 20 bp, Artificial Sequence
  chemically synthesized
atgatatagaaaatgtacaa

SEQ ID NO: 197 - DNA, 20 bp, Artificial Sequence
  chemically synthesized
aaacaaaaaaacaatgtaca

SEQ ID NO: 198 - DNA, 20 bp, Artificial Sequence
  chemically synthesized
aacaaaaaaacaatgtacaa

SEQ ID NO: 199 - DNA, 20 bp, Artificial Sequence
  chemically synthesized
acaaaggtttttcttccgtg

SEQ ID NO: 200 - DNA, 20 bp, Artificial Sequence
  chemically synthesized
caaaggtttttcttccgtgt

SEQ ID NO: 201 - DNA, 20 bp, Artificial Sequence
  chemically synthesized
aaggtttttcttccgtgtag

SEQ ID NO: 202 - DNA, 20 bp, Artificial Sequence
  chemically synthesized
tcgtcttctatatattttat

SEQ ID NO: 203 - DNA, 20 bp, Artificial Sequence
  chemically synthesized
ctatatattttattagtgtc

SEQ ID NO: 204 - DNA, 20 bp, Artificial Sequence
  chemically synthesized
tatatattttattagtgtca

SEQ ID NO: 205 - DNA, 20 bp, Artificial Sequence
  chemically synthesized
agtgtcaaggcttttctgtg

SEQ ID NO: 206 - DNA, 20 bp, Artificial Sequence
  chemically synthesized
gtgtcaaggcttttctgtga

SEQ ID NO: 207 - DNA, 20 bp, Artificial Sequence
  chemically synthesized
aaggcttttctgtgaaggac

SEQ ID NO: 208 - DNA, 20 bp, Artificial Sequence
  chemically synthesized
gcttttctgtgaaggacaag

SEQ ID NO: 209 - DNA, 20 bp, Artificial Sequence
  chemically synthesized
aggacaagtagaaactgtgc

SEQ ID NO: 210 - DNA, 20 bp, Artificial Sequence
  chemically synthesized
ggacaagtagaaactgtgca

SEQ ID NO: 211 - DNA, 20 bp, Artificial Sequence
  chemically synthesized
aagtagaaactgtgcaagga

SEQ ID NO: 212 - DNA, 20 bp, Artificial Sequence
  chemically synthesized
tgtgcaaggaaagtacttct

SEQ ID NO: 213 - DNA, 20 bp, Artificial Sequence
  chemically synthesized
tgcaaggaaagtacttctga

SEQ ID NO: 214 - DNA, 20 bp, Artificial Sequence
  chemically synthesized
ggaaagtacttctgagagat

SEQ ID NO: 215 - DNA, 20 bp, Artificial Sequence
  chemically synthesized
agtacttctgagagataagc

SEQ ID NO: 216 - DNA, 20 bp, Artificial Sequence
  chemically synthesized
gtacttctgagagataagcc

SEQ ID NO: 217 - DNA, 20 bp, Artificial Sequence
  chemically synthesized
ctgagagataagccaggttt

SEQ ID NO: 218 - DNA, 20 bp, Artificial Sequence
  chemically synthesized
ataagccaggtttcagctga

SEQ ID NO: 219 - DNA, 20 bp, Artificial Sequence
  chemically synthesized
ggtttcagctgaaagacctg

SEQ ID NO: 220 - DNA, 20 bp, Artificial Sequence
  chemically synthesized
gtttcagctgaaagacctgc

SEQ ID NO: 221 - DNA, 20 bp, Artificial Sequence
  chemically synthesized
tttcagctgaaagacctgca

SEQ ID NO: 222 - DNA, 20 bp, Artificial Sequence
  chemically synthesized
tcagctgaaagacctgcagg

SEQ ID NO: 223 - DNA, 20 bp, Artificial Sequence
  chemically synthesized
agctgaaagacctgcaggga

SEQ ID NO: 224 - DNA, 20 bp, Artificial Sequence
  chemically synthesized
gctgaaagacctgcagggag

SEQ ID NO: 225 - DNA, 20 bp, Artificial Sequence
  chemically synthesized
ttgctcacattctactcgta

SEQ ID NO: 226 - DNA, 20 bp, Artificial Sequence
  chemically synthesized
ctcacattctactcgtacag

SEQ ID NO: 227 - DNA, 20 bp, Artificial Sequence
  chemically synthesized
tcgtacagaagtttctatga

SEQ ID NO: 228 - DNA, 20 bp, Artificial Sequence
  chemically synthesized
agtttctatgacagtgttga

SEQ ID NO: 229 - DNA, 20 bp, Artificial Sequence
  chemically synthesized
atgacagtgttgacagtgct

SEQ ID NO: 230 - DNA, 20 bp, Artificial Sequence
  chemically synthesized
acagtgttgacagtgcttgg

SEQ ID NO: 231 - DNA, 20 bp, Artificial Sequence
  chemically synthesized
tttccactgatgccccctaa

SEQ ID NO: 232 - DNA, 20 bp, Artificial Sequence
  chemically synthesized
ttccactgatgccccctaac

SEQ ID NO: 233 - DNA, 20 bp, Artificial Sequence
  chemically synthesized
ccactgatgccccctaacag

SEQ ID NO: 234 - DNA, 20 bp, Artificial Sequence
  chemically synthesized
gatgccccctaacaggagtg

SEQ ID NO: 235 - DNA, 20 bp, Artificial Sequence
  chemically synthesized
cccctaacaggagtgtggta

SEQ ID NO: 236 - DNA, 20 bp, Artificial Sequence
  chemically synthesized
ctaacaggagtgtggtatag

SEQ ID NO: 237 - DNA, 20 bp, Artificial Sequence
  chemically synthesized
ggagtgtggtatagaagcac

SEQ ID NO: 238 - DNA, 20 bp, Artificial Sequence
  chemically synthesized
gagtgtggtatagaagcact

SEQ ID NO: 239 - DNA, 20 bp, Artificial Sequence
  chemically synthesized
tggtatagaagcactaggtg

SEQ ID NO: 240 - DNA, 20 bp, Artificial Sequence
  chemically synthesized
ggtatagaagcactaggtgt

SEQ ID NO: 241 - DNA, 20 bp, Artificial Sequence
  chemically synthesized
tgatattttttttttttttt

SEQ ID NO: 242 - DNA, 20 bp, Artificial Sequence
  chemically synthesized
atttttttttttttttgaga

SEQ ID NO: 243 - DNA, 20 bp, Artificial Sequence
  chemically synthesized
ttttttttttttttgagacg

SEQ ID NO: 244 - DNA, 20 bp, Artificial Sequence
  chemically synthesized
tttttttttgagacggagtc

SEQ ID NO: 245 - DNA, 20 bp, Artificial Sequence
  chemically synthesized
acggagtctagctctgtcac

SEQ ID NO: 246 - DNA, 20 bp, Artificial Sequence
  chemically synthesized
cggagtctagctctgtcacc

SEQ ID NO: 247 - DNA, 20 bp, Artificial Sequence
  chemically synthesized
ctagctctgtcaccaggcta

SEQ ID NO: 248 - DNA, 20 bp, Artificial Sequence
  chemically synthesized
tctgtcaccaggctaaagtg

SEQ ID NO: 249 - DNA, 20 bp, Artificial Sequence
  chemically synthesized
gtcaccaggctaaagtgcag

SEQ ID NO: 250 - DNA, 20 bp, Artificial Sequence
  chemically synthesized
tcactgcaacctacacctcc

SEQ ID NO: 251 - DNA, 20 bp, Artificial Sequence
  chemically synthesized
cactgcaacctacacctcct

SEQ ID NO: 252 - DNA, 20 bp, Artificial Sequence
  chemically synthesized
aacctacacctcctgggttc

SEQ ID NO: 253 - DNA, 20 bp, Artificial Sequence
  chemically synthesized
ttcaagcgattctcctgcct

SEQ ID NO: 254 - DNA, 20 bp, Artificial Sequence
  chemically synthesized
attctcctgcctcagcctcc

SEQ ID NO: 255 - DNA, 20 bp, Artificial Sequence
  chemically synthesized
ttctcctgcctcagcctccc

SEQ ID NO: 256 - DNA, 20 bp, Artificial Sequence
  chemically synthesized
tcctgcctcagcctcccagg

SEQ ID NO: 257 - DNA, 20 bp, Artificial Sequence
  chemically synthesized
gcctcagcctcccaggtagc

SEQ ID NO: 258 - DNA, 20 bp, Artificial Sequence
  chemically synthesized
cctcagcctcccaggtagct

SEQ ID NO: 259 - DNA, 20 bp, Artificial Sequence
  chemically synthesized
ctcccaggtagctgggatta

SEQ ID NO: 260 - DNA, 20 bp, Artificial Sequence
  chemically synthesized
tcccaggtagctgggattac

SEQ ID NO: 261 - DNA, 20 bp, Artificial Sequence
  chemically synthesized
caggcacacgctgccacgcc

SEQ ID NO: 262 - DNA, 20 bp, Artificial Sequence
  chemically synthesized
ccagctaatttttgtatact

SEQ ID NO: 263 - DNA, 20 bp, Artificial Sequence
  chemically synthesized
gctaatttttgtatacttag

SEQ ID NO: 264 - DNA, 20 bp, Artificial Sequence
  chemically synthesized
taatttttgtatacttagta

SEQ ID NO: 265 - DNA, 20 bp, Artificial Sequence
  chemically synthesized
ttttgtatacttagtagaga

SEQ ID NO: 266 - DNA, 20 bp, Artificial Sequence
  chemically synthesized
tttgtatacttagtagagac

SEQ ID NO: 267 - DNA, 20 bp, Artificial Sequence
  chemically synthesized
ttgtatacttagtagagacg

SEQ ID NO: 268 - DNA, 20 bp, Artificial Sequence
  chemically synthesized
gagacggggtttcaccatgt

SEQ ID NO: 269 - DNA, 20 bp, Artificial Sequence
  chemically synthesized
acggggtttcaccatgttgg

SEQ ID NO: 270 - DNA, 20 bp, Artificial Sequence
  chemically synthesized
cggggtttcaccatgttggc

SEQ ID NO: 271 - DNA, 20 bp, Artificial Sequence
  chemically synthesized
gtttcaccatgttggcagga

SEQ ID NO: 272 - DNA, 20 bp, Artificial Sequence
  chemically synthesized
accttgtgatccacccacct

SEQ ID NO: 273 - DNA, 20 bp, Artificial Sequence
  chemically synthesized
ccacccacctcggactccca

SEQ ID NO: 274 - DNA, 20 bp, Artificial Sequence
  chemically synthesized
acctcggactcccaaagtgc

SEQ ID NO: 275 - DNA, 20 bp, Artificial Sequence
  chemically synthesized
cctcggactcccaaagtgct

SEQ ID NO: 276 - DNA, 20 bp, Artificial Sequence
  chemically synthesized
ctcccaaagtgctgggatta

SEQ ID NO: 277 - DNA, 20 bp, Artificial Sequence
  chemically synthesized
tcccaaagtgctgggattac

SEQ ID NO: 278 - DNA, 20 bp, Artificial Sequence
  chemically synthesized
agtgctgggattacaggcat

SEQ ID NO: 279 - DNA, 20 bp, Artificial Sequence
  chemically synthesized
ggattacaggcataagccac

SEQ ID NO: 280 - DNA, 20 bp, Artificial Sequence
  chemically synthesized
gattacaggcataagccacc

SEQ ID NO: 281 - DNA, 20 bp, Artificial Sequence
  chemically synthesized
caggcataagccaccaggcc

SEQ ID NO: 282 - DNA, 20 bp, Artificial Sequence
  chemically synthesized
accaggcccagacaatctga

SEQ ID NO: 283 - DNA, 20 bp, Artificial Sequence
  chemically synthesized
ccagacaatctgacagtttt

SEQ ID NO: 284 - DNA, 20 bp, Artificial Sequence
  chemically synthesized
gacaatctgacagtttttag

SEQ ID NO: 285 - DNA, 20 bp, Artificial Sequence
  chemically synthesized
tcaaattttgcattctactt

SEQ ID NO: 286 - DNA, 20 bp, Artificial Sequence
  chemically synthesized
cacttttaaaactcatacat

SEQ ID NO: 287 - DNA, 20 bp, Artificial Sequence
  chemically synthesized
caaatcttcaaataacattg

SEQ ID NO: 288 - DNA, 20 bp, Artificial Sequence
  chemically synthesized
tcaaataacattgaagctcc

SEQ ID NO: 289 - DNA, 20 bp, Artificial Sequence
  chemically synthesized
aataacattgaagctcctag

SEQ ID NO: 290 - DNA, 20 bp, Artificial Sequence
  chemically synthesized
cattgaagctcctagaagat

SEQ ID NO: 291 - DNA, 20 bp, Artificial Sequence
  chemically synthesized
gctcctagaagatgagccta

SEQ ID NO: 292 - DNA, 20 bp, Artificial Sequence
  chemically synthesized
gaagatgagcctatggtttt

SEQ ID NO: 293 - DNA, 20 bp, Artificial Sequence
  chemically synthesized
ttcatatacctgtacttttg

SEQ ID NO: 294 - DNA, 20 bp, Artificial Sequence
  chemically synthesized
tcatatacctgtacttttgc

SEQ ID NO: 295 - DNA, 20 bp, Artificial Sequence
  chemically synthesized
catatacctgtacttttgca

SEQ ID NO: 296 - DNA, 20 bp, Artificial Sequence
  chemically synthesized
atatacctgtacttttgcag

SEQ ID NO: 297 - DNA, 20 bp, Artificial Sequence
  chemically synthesized
tatacctgtacttttgcagg

SEQ ID NO: 298 - DNA, 20 bp, Artificial Sequence
  chemically synthesized
acctgtacttttgcaggggg

SEQ ID NO: 299 - DNA, 20 bp, Artificial Sequence
  chemically synthesized
ctgtacttttgcagggggtg

SEQ ID NO: 300 - DNA, 20 bp, Artificial Sequence
  chemically synthesized
tacttttgcagggggtggag

SEQ ID NO: 301 - DNA, 20 bp, Artificial Sequence
  chemically synthesized
acttttgcagggggtggagt

SEQ ID NO: 302 - DNA, 20 bp, Artificial Sequence
  chemically synthesized
tttgcagggggtggagtggg

SEQ ID NO: 303 - DNA, 20 bp, Artificial Sequence
  chemically synthesized
ttgcagggggtggagtgggt

SEQ ID NO: 304 - DNA, 20 bp, Artificial Sequence
  chemically synthesized
cagggggtggagtgggtggg

SEQ ID NO: 305 - DNA, 20 bp, Artificial Sequence
  chemically synthesized
agggggtggagtgggtgggt

SEQ ID NO: 306 - DNA, 20 bp, Artificial Sequence
  chemically synthesized
ggggtggagtgggtgggtag

SEQ ID NO: 307 - DNA, 20 bp, Artificial Sequence
  chemically synthesized
gtggagtgggtgggtaggag

SEQ ID NO: 308 - DNA, 20 bp, Artificial Sequence
  chemically synthesized
gtagaatgtgtgcatatgat

SEQ ID NO: 309 - DNA, 20 bp, Artificial Sequence
  chemically synthesized
tagaatgtgtgcatatgatg

SEQ ID NO: 310 - DNA, 20 bp, Artificial Sequence
  chemically synthesized
aatgtgtgcatatgatgagg

SEQ ID NO: 311 - DNA, 20 bp, Artificial Sequence
  chemically synthesized
tgtgtgcatatgatgaggtg

SEQ ID NO: 312 - DNA, 20 bp, Artificial Sequence
  chemically synthesized
tgtgcatatgatgaggtgga

SEQ ID NO: 313 - DNA, 20 bp, Artificial Sequence
  chemically synthesized
gcatatgatgaggtggagag

SEQ ID NO: 314 - DNA, 20 bp, Artificial Sequence
  chemically synthesized
catatgatgaggtggagagt

SEQ ID NO: 315 - DNA, 20 bp, Artificial Sequence
  chemically synthesized
tatgatgaggtggagagtgg

SEQ ID NO: 316 - DNA, 20 bp, Artificial Sequence
  chemically synthesized
atgatgaggtggagagtggg

SEQ ID NO: 317 - DNA, 20 bp, Artificial Sequence
  chemically synthesized
tgatgaggtggagagtggga

SEQ ID NO: 318 - DNA, 20 bp, Artificial Sequence
  chemically synthesized
gagtgggagggattttatgt

SEQ ID NO: 319 - DNA, 20 bp, Artificial Sequence
  chemically synthesized
gagggattttatgtcagctt

SEQ ID NO: 320 - DNA, 20 bp, Artificial Sequence
  chemically synthesized
ggattttatgtcagcttgag

SEQ ID NO: 321 - DNA, 20 bp, Artificial Sequence
  chemically synthesized
gcttgagaagcatgaaattc

SEQ ID NO: 322 - DNA, 20 bp, Artificial Sequence
  chemically synthesized
cttgagaagcatgaaattcc

SEQ ID NO: 323 - DNA, 20 bp, Artificial Sequence
  chemically synthesized
ttgaacttcgcaatatgtca

SEQ ID NO: 324 - DNA, 20 bp, Artificial Sequence
  chemically synthesized
gcaatatgtcacagacctca

SEQ ID NO: 325 - DNA, 20 bp, Artificial Sequence
  chemically synthesized
agatctcaatccaaaatttc

SEQ ID NO: 326 - DNA, 20 bp, Artificial Sequence
  chemically synthesized
ccaaaatttctagtaaacat

SEQ ID NO: 327 - DNA, 20 bp, Artificial Sequence
  chemically synthesized
caaaatttctagtaaacata

SEQ ID NO: 328 - DNA, 20 bp, Artificial Sequence
  chemically synthesized
ataaggatctcattatttca

SEQ ID NO: 329 - DNA, 20 bp, Artificial Sequence
  chemically synthesized
tcaaagctttatctatgaca

SEQ ID NO: 330 - DNA, 20 bp, Artificial Sequence
  chemically synthesized
ttatctatgacacagtttcc

SEQ ID NO: 331 - DNA, 20 bp, Artificial Sequence
  chemically synthesized
cagtttcctggcctgatccc

SEQ ID NO: 332 - DNA, 20 bp, Artificial Sequence
  chemically synthesized
ataacaaactgtaatatatt

SEQ ID NO: 333 - DNA, 20 bp, Artificial Sequence
  chemically synthesized
actgtaatatattaagaaat

SEQ ID NO: 334 - DNA, 20 bp, Artificial Sequence
  chemically synthesized
tttccttcaactgtgtaatt

SEQ ID NO: 335 - DNA, 20 bp, Artificial Sequence
  chemically synthesized
ccttcaactgtgtaattaag

SEQ ID NO: 336 - DNA, 20 bp, Artificial Sequence
  chemically synthesized
attaagtagatattttttaa

SEQ ID NO: 337 - DNA, 20 bp, Artificial Sequence
  chemically synthesized
tttaaaagaatgaaacaata

SEQ ID NO: 338 - DNA, 20 bp, Artificial Sequence
  chemically synthesized
aataaagatgttatttaaat

SEQ ID NO: 339 - DNA, 20 bp, Artificial Sequence
  chemically synthesized
tatgtttcaaaaatattttt

SEQ ID NO: 340 - DNA, 20 bp, Artificial Sequence
  chemically synthesized
aaaatatttttgagtcattt

SEQ ID NO: 341 - DNA, 20 bp, Artificial Sequence
  chemically synthesized
aaatatttttgagtcatttc

SEQ ID NO: 342 - DNA, 20 bp, Artificial Sequence
  chemically synthesized
aaaaaaaaacttacttgtta

SEQ ID NO: 343 - DNA, 20 bp, Artificial Sequence
  chemically synthesized
aaaaaaaacttacttgttat

SEQ ID NO: 344 - DNA, 20 bp, Artificial Sequence
  chemically synthesized
aatgtttgttgtttgacgta

SEQ ID NO: 345 - DNA, 20 bp, Artificial Sequence
  chemically synthesized
cactcttaattgttaatata

SEQ ID NO: 346 - DNA, 20 bp, Artificial Sequence
  chemically synthesized
actcttaattgttaatatac

SEQ ID NO: 347 - DNA, 20 bp, Artificial Sequence
  chemically synthesized
acaggctcttccccattaat

SEQ ID NO: 348 - DNA, 20 bp, Artificial Sequence
  chemically synthesized
cttccccattaataagtcaa

SEQ ID NO: 349 - DNA, 20 bp, Artificial Sequence
  chemically synthesized
ttccccattaataagtcaaa

SEQ ID NO: 350 - DNA, 20 bp, Artificial Sequence
  chemically synthesized
agtcaaaaggaaaaatcatt

SEQ ID NO: 351 - DNA, 20 bp, Artificial Sequence
  chemically synthesized
gaaaaatcatttagacactt

SEQ ID NO: 352 - DNA, 20 bp, Artificial Sequence
  chemically synthesized
aatcatttagacactttaga

SEQ ID NO: 353 - DNA, 20 bp, Artificial Sequence
  chemically synthesized
tttagacactttagaaagac

SEQ ID NO: 354 - DNA, 20 bp, Artificial Sequence
  chemically synthesized
gaaagaccagacactacaaa

SEQ ID NO: 355 - DNA, 20 bp, Artificial Sequence
  chemically synthesized
acaaaaagcacctaataaaa

SEQ ID NO: 356 - DNA, 20 bp, Artificial Sequence
  chemically synthesized
aagcacctaataaaacagat

SEQ ID NO: 357 - DNA, 20 bp, Artificial Sequence
  chemically synthesized
agcacctaataaaacagatt

SEQ ID NO: 358 - DNA, 20 bp, Artificial Sequence
  chemically synthesized
aaatatattacactctatca

SEQ ID NO: 359 - DNA, 20 bp, Artificial Sequence
  chemically synthesized
atatattacactctatcata

SEQ ID NO: 360 - DNA, 20 bp, Artificial Sequence
  chemically synthesized
atatactctacataacataa

SEQ ID NO: 361 - DNA, 20 bp, Artificial Sequence
  chemically synthesized
tatactctacataacataat

SEQ ID NO: 362 - DNA, 20 bp, Artificial Sequence
  chemically synthesized
atactctacataacataata

SEQ ID NO: 363 - DNA, 20 bp, Artificial Sequence
  chemically synthesized
acataacataatagggtttt

SEQ ID NO: 364 - DNA, 20 bp, Artificial Sequence
  chemically synthesized
atatatatatcctacaatgc

SEQ ID NO: 365 - DNA, 20 bp, Artificial Sequence
  chemically synthesized
atatacttgtactacatata

SEQ ID NO: 366 - DNA, 20 bp, Artificial Sequence
  chemically synthesized
ttgtactacatatatagtac

SEQ ID NO: 367 - DNA, 20 bp, Artificial Sequence
  chemically synthesized
catatatagtacaagcattg

SEQ ID NO: 368 - DNA, 20 bp, Artificial Sequence
  chemically synthesized
atatatagtacaagcattgc

SEQ ID NO: 369 - DNA, 20 bp, Artificial Sequence
  chemically synthesized
tgtatatattatatctgtaa

SEQ ID NO: 370 - DNA, 20 bp, Artificial Sequence
  chemically synthesized
atattatatctgtaaaagct

SEQ ID NO: 371 - DNA, 20 bp, Artificial Sequence
  chemically synthesized
tatatctgtaaaagctaagt

SEQ ID NO: 372 - DNA, 20 bp, Artificial Sequence
  chemically synthesized
tcactttgatacatgtaaac

SEQ ID NO: 373 - DNA, 20 bp, Artificial Sequence
  chemically synthesized
cactttgatacatgtaaacc

SEQ ID NO: 374 - DNA, 20 bp, Artificial Sequence
  chemically synthesized
gaattctatgtttcaaaaaa

SEQ ID NO: 375 - DNA, 20 bp, Artificial Sequence
  chemically synthesized
ttctatgtttcaaaaaacag

SEQ ID NO: 376 - DNA, 20 bp, Artificial Sequence
  chemically synthesized
gtttcaaaaaacagtagttg

SEQ ID NO: 377 - DNA, 20 bp, Artificial Sequence
  chemically synthesized
tcttattattatatctttaa

SEQ ID NO: 378 - DNA, 20 bp, Artificial Sequence
  chemically synthesized
attattatatctttaaaaga

SEQ ID NO: 379 - DNA, 20 bp, Artificial Sequence
  chemically synthesized
tatttattatattgtaaaca

SEQ ID NO: 380 - DNA, 20 bp, Artificial Sequence
  chemically synthesized
atttattatattgtaaacaa

SEQ ID NO: 381 - DNA, 20 bp, Artificial Sequence
  chemically synthesized
aacaaaggtctgaattcccg

SEQ ID NO: 382 - DNA, 20 bp, Artificial Sequence
  chemically synthesized
gaattcccgaagcataaatc

SEQ ID NO: 383 - DNA, 20 bp, Artificial Sequence
  chemically synthesized
aattcccgaagcataaatct

SEQ ID NO: 384 - DNA, 20 bp, Artificial Sequence
  chemically synthesized
ccgaagcataaatctaggac

SEQ ID NO: 385 - DNA, 20 bp, Artificial Sequence
  chemically synthesized
gaagcataaatctaggacaa

SEQ ID NO: 386 - DNA, 20 bp, Artificial Sequence
  chemically synthesized
aagcataaatctaggacaag

SEQ ID NO: 387 - DNA, 20 bp, Artificial Sequence
  chemically synthesized
atgcacttgacatgccctca

SEQ ID NO: 388 - DNA, 20 bp, Artificial Sequence
  chemically synthesized
atgccctcacagactcttct

SEQ ID NO: 389 - DNA, 20 bp, Artificial Sequence
  chemically synthesized
acagactcttctgagaactg

SEQ ID NO: 390 - DNA, 20 bp, Artificial Sequence
  chemically synthesized
ctaacttaactgcaattgct

SEQ ID NO: 391 - DNA, 20 bp, Artificial Sequence
  chemically synthesized
acttaactgcaattgctgag

SEQ ID NO: 392 - DNA, 20 bp, Artificial Sequence
  chemically synthesized
gcaattgctgagcagaactc

SEQ ID NO: 393 - DNA, 20 bp, Artificial Sequence
  chemically synthesized
caattgctgagcagaactct

SEQ ID NO: 394 - DNA, 20 bp, Artificial Sequence
  chemically synthesized
aattgctgagcagaactctg

SEQ ID NO: 395 - DNA, 20 bp, Artificial Sequence
  chemically synthesized
cagaactctggggcatgatc

SEQ ID NO: 396 - DNA, 20 bp, Artificial Sequence
  chemically synthesized
agaactctggggcatgatcc

SEQ ID NO: 397 - DNA, 20 bp, Artificial Sequence
  chemically synthesized
gaactctggggcatgatcca

SEQ ID NO: 398 - DNA, 20 bp, Artificial Sequence
  chemically synthesized
aactctggggcatgatccag

SEQ ID NO: 399 - DNA, 20 bp, Artificial Sequence
  chemically synthesized
tccaggggaatataaatata

SEQ ID NO: 400 - DNA, 20 bp, Artificial Sequence
  chemically synthesized
gggaatataaatatatagaa

SEQ ID NO: 401 - DNA, 20 bp, Artificial Sequence
  chemically synthesized
ggaatataaatatatagaac

SEQ ID NO: 402 - DNA, 20 bp, Artificial Sequence
  chemically synthesized
aatatatagaacaggcattg

SEQ ID NO: 403 - DNA, 20 bp, Artificial Sequence
  chemically synthesized
atatatagaacaggcattgt

SEQ ID NO: 404 - DNA, 20 bp, Artificial Sequence
  chemically synthesized
cattgtaggatatattaaaa

SEQ ID NO: 405 - DNA, 20 bp, Artificial Sequence
  chemically synthesized
tcattcactctgacaatctc

SEQ ID NO: 406 - DNA, 20 bp, Artificial Sequence
  chemically synthesized
agttcaacatttacctgatc

SEQ ID NO: 407 - DNA, 20 bp, Artificial Sequence
  chemically synthesized
gttcaacatttacctgatcc

SEQ ID NO: 408 - DNA, 20 bp, Artificial Sequence
  chemically synthesized
caacatttacctgatccagg

SEQ ID NO: 409 - DNA, 20 bp, Artificial Sequence
  chemically synthesized
aacatttacctgatccagga

SEQ ID NO: 410 - DNA, 20 bp, Artificial Sequence
  chemically synthesized
tgatccaggaaggctttcac

SEQ ID NO: 411 - DNA, 20 bp, Artificial Sequence
  chemically synthesized
atccaggaaggctttcacta

SEQ ID NO: 412 - DNA, 20 bp, Artificial Sequence
  chemically synthesized
tcactagagtgtctctgtgt

SEQ ID NO: 413 - DNA, 20 bp, Artificial Sequence
  chemically synthesized
catcttgaaaaatattcctg

SEQ ID NO: 414 - DNA, 20 bp, Artificial Sequence
  chemically synthesized
tgaaaaatattcctgaagaa

SEQ ID NO: 415 - DNA, 20 bp, Artificial Sequence
  chemically synthesized
aaaatattcctgaagaaaag

SEQ ID NO: 416 - DNA, 20 bp, Artificial Sequence
  chemically synthesized
ctgaagaaaagaagaaaatg

SEQ ID NO: 417 - DNA, 20 bp, Artificial Sequence
  chemically synthesized
gaaaagaagaaaatgaagaa

SEQ ID NO: 418 - DNA, 20 bp, Artificial Sequence
  chemically synthesized
agaaaatgaagaaaagaaaa

SEQ ID NO: 419 - DNA, 20 bp, Artificial Sequence
  chemically synthesized
aaaaagttcaaatgttgaaa

SEQ ID NO: 420 - DNA, 20 bp, Artificial Sequence
  chemically synthesized
ccttccacaatccctcactt

SEQ ID NO: 421 - DNA, 20 bp, Artificial Sequence
  chemically synthesized
ctcacttgagccaacatttt

SEQ ID NO: 422 - DNA, 20 bp, Artificial Sequence
  chemically synthesized
ttacatataaacacatttgt

SEQ ID NO: 423 - DNA, 20 bp, Artificial Sequence
  chemically synthesized
taaacacatttgtaagaata

SEQ ID NO: 424 - DNA, 20 bp, Artificial Sequence
  chemically synthesized
agaatatagatatatatatt

SEQ ID NO: 425 - DNA, 20 bp, Artificial Sequence
  chemically synthesized
aatatagatatatatatttg

SEQ ID NO: 426 - DNA, 20 bp, Artificial Sequence
  chemically synthesized
atacattcatttatttactc

SEQ ID NO: 427 - DNA, 20 bp, Artificial Sequence
  chemically synthesized
tacattcatttatttactca

SEQ ID NO: 428 - DNA, 20 bp, Artificial Sequence
  chemically synthesized
aggatatatttacattttac

SEQ ID NO: 429 - DNA, 20 bp, Artificial Sequence
  chemically synthesized
tacattttactggtgtttgt

SEQ ID NO: 430 - DNA, 20 bp, Artificial Sequence
  chemically synthesized
acattttactggtgtttgtc

SEQ ID NO: 431 - DNA, 20 bp, Artificial Sequence
  chemically synthesized
aatatgtaattttttctcta

SEQ ID NO: 432 - DNA, 20 bp, Artificial Sequence
  chemically synthesized
attttttctctaaagaatat

SEQ ID NO: 433 - DNA, 20 bp, Artificial Sequence
  chemically synthesized
ttttctctaaagaatataag

SEQ ID NO: 434 - DNA, 20 bp, Artificial Sequence
  chemically synthesized
taaagaatataagcagtccc

SEQ ID NO: 435 - DNA, 20 bp, Artificial Sequence
  chemically synthesized
gaatataagcagtccccagt

SEQ ID NO: 436 - DNA, 20 bp, Artificial Sequence
  chemically synthesized
aatataagcagtccccagta

SEQ ID NO: 437 - DNA, 20 bp, Artificial Sequence
  chemically synthesized
atataagcagtccccagtaa

SEQ ID NO: 438 - DNA, 20 bp, Artificial Sequence
  chemically synthesized
ctactctcatcttttaaaaa

SEQ ID NO: 439 - DNA, 20 bp, Artificial Sequence
  chemically synthesized
ctctcatcttttaaaaaaag

SEQ ID NO: 440 - DNA, 20 bp, Artificial Sequence
  chemically synthesized
ctcatcttttaaaaaaagta

SEQ ID NO: 441 - DNA, 20 bp, Artificial Sequence
  chemically synthesized
ttaaaaaaagtagagaccct

SEQ ID NO: 442 - DNA, 20 bp, Artificial Sequence
  chemically synthesized
taaaaaaagtagagaccctt

SEQ ID NO: 443 - DNA, 20 bp, Artificial Sequence
  chemically synthesized
aaaaaaaacaaaaaacaaac

SEQ ID NO: 444 - DNA, 20 bp, Artificial Sequence
  chemically synthesized
aacaaaccagcaacaaaaat

SEQ ID NO: 445 - DNA, 20 bp, Artificial Sequence
  chemically synthesized
aaaacaaaccaaaaaatgtg

SEQ ID NO: 446 - DNA, 20 bp, Artificial Sequence
  chemically synthesized
aaaaatgtgaagaaaaattt

SEQ ID NO: 447 - DNA, 20 bp, Artificial Sequence
  chemically synthesized
atgtgaagaaaaatttgagt

SEQ ID NO: 448 - DNA, 20 bp, Artificial Sequence
  chemically synthesized
aagaaaaatttgagtgagat

SEQ ID NO: 449 - DNA, 20 bp, Artificial Sequence
  chemically synthesized
gaaaaatttgagtgagatta

SEQ ID NO: 450 - DNA, 20 bp, Artificial Sequence
  chemically synthesized
acactccgatgattatccac

SEQ ID NO: 451 - DNA, 20 bp, Artificial Sequence
  chemically synthesized
cactccgatgattatccact

SEQ ID NO: 452 - DNA, 20 bp, Artificial Sequence
  chemically synthesized
tccactgggtttgcctcaac

SEQ ID NO: 453 - DNA, 20 bp, Artificial Sequence
  chemically synthesized
tcaacaagcccaccatctgt

SEQ ID NO: 454 - DNA, 20 bp, Artificial Sequence
  chemically synthesized
gtaacatgaaccaactatcc

SEQ ID NO: 455 - DNA, 20 bp, Artificial Sequence
  chemically synthesized
catgaaccaactatccaaga

SEQ ID NO: 456 - DNA, 20 bp, Artificial Sequence
  chemically synthesized
caagaaagtactacctacct

SEQ ID NO: 457 - DNA, 20 bp, Artificial Sequence
  chemically synthesized
ctacctaccttggcaacgac

SEQ ID NO: 458 - DNA, 20 bp, Artificial Sequence
  chemically synthesized
acctaccttggcaacgacca

SEQ ID NO: 459 - DNA, 20 bp, Artificial Sequence
  chemically synthesized
accttggcaacgaccagagt

SEQ ID NO: 460 - DNA, 20 bp, Artificial Sequence
  chemically synthesized
ttggcaacgaccagagtgag

SEQ ID NO: 461 - DNA, 20 bp, Artificial Sequence
  chemically synthesized
gcaacgaccagagtgagtag

SEQ ID NO: 462 - DNA, 20 bp, Artificial Sequence
  chemically synthesized
agtgagtagtagtaatataa

SEQ ID NO: 463 - DNA, 20 bp, Artificial Sequence
  chemically synthesized
aaaataatgtgtgcctaaca

SEQ ID NO: 464 - DNA, 20 bp, Artificial Sequence
  chemically synthesized
tgtgtgcctaacacagcacc

SEQ ID NO: 465 - DNA, 20 bp, Artificial Sequence
  chemically synthesized
gtgtgcctaacacagcacct

SEQ ID NO: 466 - DNA, 20 bp, Artificial Sequence
  chemically synthesized
ctaacacagcacctaggata

SEQ ID NO: 467 - DNA, 20 bp, Artificial Sequence
  chemically synthesized
acacagcacctaggatatag

SEQ ID NO: 468 - DNA, 20 bp, Artificial Sequence
  chemically synthesized
cacagcacctaggatatagc

SEQ ID NO: 469 - DNA, 20 bp, Artificial Sequence
  chemically synthesized
ctaggatatagcaggtgcta

SEQ ID NO: 470 - DNA, 20 bp, Artificial Sequence
  chemically synthesized
aaagcaaacacacaaacaaa

SEQ ID NO: 471 - DNA, 20 bp, Artificial Sequence
  chemically synthesized
aagcaaacacacaaacaaac

SEQ ID NO: 472 - DNA, 20 bp, Artificial Sequence
  chemically synthesized
aggactacttattcccttcc

SEQ ID NO: 473 - DNA, 20 bp, Artificial Sequence
  chemically synthesized
ggactacttattcccttccc

SEQ ID NO: 474 - DNA, 20 bp, Artificial Sequence
  chemically synthesized
tttttctcttccattttccc

SEQ ID NO: 475 - DNA, 20 bp, Artificial Sequence
  chemically synthesized
ttttctcttccattttccct

SEQ ID NO: 476 - DNA, 20 bp, Artificial Sequence
  chemically synthesized
cattttccctaggttctact

SEQ ID NO: 477 - DNA, 20 bp, Artificial Sequence
  chemically synthesized
attttccctaggttctactc

SEQ ID NO: 478 - DNA, 20 bp, Artificial Sequence
  chemically synthesized
tccctaggttctactcaggc

SEQ ID NO: 479 - DNA, 20 bp, Artificial Sequence
  chemically synthesized
cctaggttctactcaggcca

SEQ ID NO: 480 - DNA, 20 bp, Artificial Sequence
  chemically synthesized
ctaggttctactcaggccag

SEQ ID NO: 481 - DNA, 20 bp, Artificial Sequence
  chemically synthesized
taggttctactcaggccaga

SEQ ID NO: 482 - DNA, 20 bp, Artificial Sequence
  chemically synthesized
ttctactcaggccagagggt

SEQ ID NO: 483 - DNA, 20 bp, Artificial Sequence
  chemically synthesized
ctactcaggccagagggtaa

SEQ ID NO: 484 - DNA, 20 bp, Artificial Sequence
  chemically synthesized
ccagagggtaagagaacatt

SEQ ID NO: 485 - DNA, 20 bp, Artificial Sequence
  chemically synthesized
agggtaagagaacatttagt

SEQ ID NO: 486 - DNA, 20 bp, Artificial Sequence
  chemically synthesized
ggtaagagaacatttagtaa

SEQ ID NO: 487 - DNA, 20 bp, Artificial Sequence
  chemically synthesized
gtaagagaacatttagtaag

SEQ ID NO: 488 - DNA, 20 bp, Artificial Sequence
  chemically synthesized
aagagaacatttagtaagag

SEQ ID NO: 489 - DNA, 20 bp, Artificial Sequence
  chemically synthesized
agagaacatttagtaagagg

SEQ ID NO: 490 - DNA, 20 bp, Artificial Sequence
  chemically synthesized
agaacatttagtaagaggag

SEQ ID NO: 491 - DNA, 20 bp, Artificial Sequence
  chemically synthesized
gaggaggagtttttaactga

SEQ ID NO: 492 - DNA, 20 bp, Artificial Sequence
  chemically synthesized
gaggagtttttaactgaaag

SEQ ID NO: 493 - DNA, 20 bp, Artificial Sequence
  chemically synthesized
gagtttttaactgaaagtgg

SEQ ID NO: 494 - DNA, 20 bp, Artificial Sequence
  chemically synthesized
agtttttaactgaaagtggt

SEQ ID NO: 495 - DNA, 20 bp, Artificial Sequence
  chemically synthesized
gtttttaactgaaagtggta

SEQ ID NO: 496 - DNA, 20 bp, Artificial Sequence
  chemically synthesized
gggatcatcctatacctgac

SEQ ID NO: 497 - DNA, 20 bp, Artificial Sequence
  chemically synthesized
gatcatcctatacctgacca

SEQ ID NO: 498 - DNA, 20 bp, Artificial Sequence
  chemically synthesized
catcctatacctgaccagag

SEQ ID NO: 499 - DNA, 20 bp, Artificial Sequence
  chemically synthesized
cctgaccagagtggcaaaaa

SEQ ID NO: 500 - DNA, 20 bp, Artificial Sequence
  chemically synthesized
tgaccagagtggcaaaaaaa

SEQ ID NO: 501 - DNA, 20 bp, Artificial Sequence
  chemically synthesized
agagtggcaaaaaaagagaa

SEQ ID NO: 502 - DNA, 20 bp, Artificial Sequence
  chemically synthesized
gagtggcaaaaaaagagaat

SEQ ID NO: 503 - DNA, 20 bp, Artificial Sequence
  chemically synthesized
aaaaagagaatgggtatgtg

SEQ ID NO: 504 - DNA, 20 bp, Artificial Sequence
  chemically synthesized
aagagaatgggtatgtgtag

SEQ ID NO: 505 - DNA, 20 bp, Artificial Sequence
  chemically synthesized
tgggtatgtgtagaagcaaa

SEQ ID NO: 506 - DNA, 20 bp, Artificial Sequence
  chemically synthesized
gggtatgtgtagaagcaaac

SEQ ID NO: 507 - DNA, 20 bp, Artificial Sequence
  chemically synthesized
tatgtgtagaagcaaacagg

SEQ ID NO: 508 - DNA, 20 bp, Artificial Sequence
  chemically synthesized
atgtgtagaagcaaacagga

SEQ ID NO: 509 - DNA, 20 bp, Artificial Sequence
  chemically synthesized
tgtagaagcaaacaggaagg

SEQ ID NO: 510 - DNA, 20 bp, Artificial Sequence
  chemically synthesized
agcaaacaggaaggtagttc

SEQ ID NO: 511 - DNA, 20 bp, Artificial Sequence
  chemically synthesized
agttcaagtttccttatctt

SEQ ID NO: 512 - DNA, 20 bp, Artificial Sequence
  chemically synthesized
gtttccttatcttaagaaac

SEQ ID NO: 513 - DNA, 20 bp, Artificial Sequence
  chemically synthesized
gaaacgagtgtaccacacta

SEQ ID NO: 514 - DNA, 20 bp, Artificial Sequence
  chemically synthesized
acgagtgtaccacactacag

SEQ ID NO: 515 - DNA, 20 bp, Artificial Sequence
  chemically synthesized
gtgtaccacactacagaaga

SEQ ID NO: 516 - DNA, 20 bp, Artificial Sequence
  chemically synthesized
tacagaagaaagaaaccgta

SEQ ID NO: 517 - DNA, 20 bp, Artificial Sequence
  chemically synthesized
acagaagaaagaaaccgtaa

SEQ ID NO: 518 - DNA, 20 bp, Artificial Sequence
  chemically synthesized
cagaagaaagaaaccgtaaa

SEQ ID NO: 519 - DNA, 20 bp, Artificial Sequence
  chemically synthesized
agaagaaagaaaccgtaaag

SEQ ID NO: 520 - DNA, 20 bp, Artificial Sequence
  chemically synthesized
accgtaaaggggaaaaatat

SEQ ID NO: 521 - DNA, 20 bp, Artificial Sequence
  chemically synthesized
agcatttcgtcattattgac

SEQ ID NO: 522 - DNA, 20 bp, Artificial Sequence
  chemically synthesized
gcatttcgtcattattgact

SEQ ID NO: 523 - DNA, 20 bp, Artificial Sequence
  chemically synthesized
cattattgactgggcactga

SEQ ID NO: 524 - DNA, 20 bp, Artificial Sequence
  chemically synthesized
gcactgatagtgccccttct

SEQ ID NO: 525 - DNA, 20 bp, Artificial Sequence
  chemically synthesized
cactgatagtgccccttctt

SEQ ID NO: 526 - DNA, 20 bp, Artificial Sequence
  chemically synthesized
tagtgccccttcttgggctc

SEQ ID NO: 527 - DNA, 20 bp, Artificial Sequence
  chemically synthesized
gccccttcttgggctctgga

SEQ ID NO: 528 - DNA, 20 bp, Artificial Sequence
  chemically synthesized
cccttcttgggctctggaaa

SEQ ID NO: 529 - DNA, 20 bp, Artificial Sequence
  chemically synthesized
ttgggctctggaaagagaat

SEQ ID NO: 530 - DNA, 20 bp, Artificial Sequence
  chemically synthesized
tgggctctggaaagagaata

SEQ ID NO: 531 - DNA, 20 bp, Artificial Sequence
  chemically synthesized
aataaggcttatatttaatc

SEQ ID NO: 532 - DNA, 20 bp, Artificial Sequence
  chemically synthesized
aaggcttatatttaatcgag

SEQ ID NO: 533 - DNA, 20 bp, Artificial Sequence
  chemically synthesized
ttatacctgttccactgaat

SEQ ID NO: 534 - DNA, 20 bp, Artificial Sequence
  chemically synthesized
tgaatgagtatcttcatcat

SEQ ID NO: 535 - DNA, 20 bp, Artificial Sequence
  chemically synthesized
tatcttcatcataagtgaat

SEQ ID NO: 536 - DNA, 20 bp, Artificial Sequence
  chemically synthesized
catcataagtgaattagata

SEQ ID NO: 537 - DNA, 20 bp, Artificial Sequence
  chemically synthesized
ataagtgaattagataaagc

SEQ ID NO: 538 - DNA, 20 bp, Artificial Sequence
  chemically synthesized
taagtgaattagataaagca

SEQ ID NO: 539 - DNA, 20 bp, Artificial Sequence
  chemically synthesized
gataaagcaaggtgttaaaa

SEQ ID NO: 540 - DNA, 20 bp, Artificial Sequence
  chemically synthesized
gtgtcatctctgatttcttt

SEQ ID NO: 541 - DNA, 20 bp, Artificial Sequence
  chemically synthesized
tcatctctgatttctttcag

SEQ ID NO: 542 - DNA, 20 bp, Artificial Sequence
  chemically synthesized
gcagtgttttgtaattctca

SEQ ID NO: 543 - DNA, 20 bp, Artificial Sequence
  chemically synthesized
agtgttttgtaattctcata

SEQ ID NO: 544 - DNA, 20 bp, Artificial Sequence
  chemically synthesized
atagagatctttcacctccc

SEQ ID NO: 545 - DNA, 20 bp, Artificial Sequence
  chemically synthesized
agatctttcacctccctggt

SEQ ID NO: 546 - DNA, 20 bp, Artificial Sequence
  chemically synthesized
ctttcacctccctggttagc

SEQ ID NO: 547 - DNA, 20 bp, Artificial Sequence
  chemically synthesized
tccctggttagctggattcc

SEQ ID NO: 548 - DNA, 20 bp, Artificial Sequence
  chemically synthesized
ccctggttagctggattcct

SEQ ID NO: 549 - DNA, 20 bp, Artificial Sequence
  chemically synthesized
taggtattttattcgttttg

SEQ ID NO: 550 - DNA, 20 bp, Artificial Sequence
  chemically synthesized
cgttttgcggctattgtgaa

SEQ ID NO: 551 - DNA, 20 bp, Artificial Sequence
  chemically synthesized
gttttgcggctattgtgaat

SEQ ID NO: 552 - DNA, 20 bp, Artificial Sequence
  chemically synthesized
tcttgattttgctctcactt

SEQ ID NO: 553 - DNA, 20 bp, Artificial Sequence
  chemically synthesized
tgattttgctctcactttgg

SEQ ID NO: 554 - DNA, 20 bp, Artificial Sequence
  chemically synthesized
gattttgctctcactttgga

SEQ ID NO: 555 - DNA, 20 bp, Artificial Sequence
  chemically synthesized
gctctcactttggaaggtgt

SEQ ID NO: 556 - DNA, 20 bp, Artificial Sequence
  chemically synthesized
tctcactttggaaggtgttg

SEQ ID NO: 557 - DNA, 20 bp, Artificial Sequence
  chemically synthesized
ctttggaaggtgttggagta

SEQ ID NO: 558 - DNA, 20 bp, Artificial Sequence
  chemically synthesized
ttggaaggtgttggagtata

SEQ ID NO: 559 - DNA, 20 bp, Artificial Sequence
  chemically synthesized
aactttgctgaaatttttaa

SEQ ID NO: 560 - DNA, 20 bp, Artificial Sequence
  chemically synthesized
gctgaaatttttaacagatt

SEQ ID NO: 561 - DNA, 20 bp, Artificial Sequence
  chemically synthesized
ctgaaatttttaacagattt

SEQ ID NO: 562 - DNA, 20 bp, Artificial Sequence
  chemically synthesized
gaaatttttaacagatttag

SEQ ID NO: 563 - DNA, 20 bp, Artificial Sequence
  chemically synthesized
ttaacagatttaggagtttc

SEQ ID NO: 564 - DNA, 20 bp, Artificial Sequence
  chemically synthesized
taacagatttaggagtttct

SEQ ID NO: 565 - DNA, 20 bp, Artificial Sequence
  chemically synthesized
cagatttaggagtttctggg

SEQ ID NO: 566 - DNA, 20 bp, Artificial Sequence
  chemically synthesized
gatttaggagtttctgggca

SEQ ID NO: 567 - DNA, 20 bp, Artificial Sequence
  chemically synthesized
agtttctgggcagagactat

SEQ ID NO: 568 - DNA, 20 bp, Artificial Sequence
  chemically synthesized
gcagagactatgagattttc

SEQ ID NO: 569 - DNA, 20 bp, Artificial Sequence
  chemically synthesized
cagagactatgagattttct

SEQ ID NO: 570 - DNA, 20 bp, Artificial Sequence
  chemically synthesized
actatgagattttctaggta

SEQ ID NO: 571 - DNA, 20 bp, Artificial Sequence
  chemically synthesized
agaattatactgcctgcaaa

SEQ ID NO: 572 - DNA, 20 bp, Artificial Sequence
  chemically synthesized
atactgcctgcaaacagaaa

SEQ ID NO: 573 - DNA, 20 bp, Artificial Sequence
  chemically synthesized
tttctctttcctgattgctc

SEQ ID NO: 574 - DNA, 20 bp, Artificial Sequence
  chemically synthesized
tctttcctgattgctctggc

SEQ ID NO: 575 - DNA, 20 bp, Artificial Sequence
  chemically synthesized
ctttcctgattgctctggct

SEQ ID NO: 576 - DNA, 20 bp, Artificial Sequence
  chemically synthesized
attgctctggctaggacttc

SEQ ID NO: 577 - DNA, 20 bp, Artificial Sequence
  chemically synthesized
acttccagaactatgctgaa

SEQ ID NO: 578 - DNA, 20 bp, Artificial Sequence
  chemically synthesized
cttccagaactatgctgaaa

SEQ ID NO: 579 - DNA, 20 bp, Artificial Sequence
  chemically synthesized
tccagaactatgctgaaaag

SEQ ID NO: 580 - DNA, 20 bp, Artificial Sequence
  chemically synthesized
agaactatgctgaaaaggag

SEQ ID NO: 581 - DNA, 20 bp, Artificial Sequence
  chemically synthesized
ctatgctgaaaaggagtggt

SEQ ID NO: 582 - DNA, 20 bp, Artificial Sequence
  chemically synthesized
atgctgaaaaggagtggtga

SEQ ID NO: 583 - DNA, 20 bp, Artificial Sequence
  chemically synthesized
ctgaaaaggagtggtgagag

SEQ ID NO: 584 - DNA, 20 bp, Artificial Sequence
  chemically synthesized
tggacatccttgtcttgtta

SEQ ID NO: 585 - DNA, 20 bp, Artificial Sequence
  chemically synthesized
cttgtcttgttacggttctc

SEQ ID NO: 586 - DNA, 20 bp, Artificial Sequence
  chemically synthesized
ttgtcttgttacggttctca

SEQ ID NO: 587 - DNA, 20 bp, Artificial Sequence
  chemically synthesized
gtcttgttacggttctcaag

SEQ ID NO: 588 - DNA, 20 bp, Artificial Sequence
  chemically synthesized
gttctcaaggagaatacttc

SEQ ID NO: 589 - DNA, 20 bp, Artificial Sequence
  chemically synthesized
acttccagcttttgcccatt

SEQ ID NO: 590 - DNA, 20 bp, Artificial Sequence
  chemically synthesized
ccagcttttgcccatttggt

SEQ ID NO: 591 - DNA, 20 bp, Artificial Sequence
  chemically synthesized
ttgcccatttggtaagatat

SEQ ID NO: 592 - DNA, 20 bp, Artificial Sequence
  chemically synthesized
atttggtaagatattggcta

SEQ ID NO: 593 - DNA, 20 bp, Artificial Sequence
  chemically synthesized
tttggtaagatattggctat

SEQ ID NO: 594 - DNA, 20 bp, Artificial Sequence
  chemically synthesized
tattggctatgggtctgtca

SEQ ID NO: 595 - DNA, 20 bp, Artificial Sequence
  chemically synthesized
ggctatgggtctgtcataga

SEQ ID NO: 596 - DNA, 20 bp, Artificial Sequence
  chemically synthesized
tagatggttcttattttttt

SEQ ID NO: 597 - DNA, 20 bp, Artificial Sequence
  chemically synthesized
agatggttcttatttttttg

SEQ ID NO: 598 - DNA, 20 bp, Artificial Sequence
  chemically synthesized
aggcatgttccttcaatgcc

SEQ ID NO: 599 - DNA, 20 bp, Artificial Sequence
  chemically synthesized
ccttcaatgcctagtttgtt

SEQ ID NO: 600 - DNA, 20 bp, Artificial Sequence
  chemically synthesized
cttcaatgcctagtttgttt

SEQ ID NO: 601 - DNA, 20 bp, Artificial Sequence
  chemically synthesized
gtttgtgatttttctttttt

SEQ ID NO: 602 - DNA, 20 bp, Artificial Sequence
  chemically synthesized
gtgatttttcttttttgaga

SEQ ID NO: 603 - DNA, 20 bp, Artificial Sequence
  chemically synthesized
tgatttttcttttttgagac

SEQ ID NO: 604 - DNA, 20 bp, Artificial Sequence
  chemically synthesized
gatttttcttttttgagaca

SEQ ID NO: 605 - DNA, 20 bp, Artificial Sequence
  chemically synthesized
cagggtctcactccgttgcc

SEQ ID NO: 606 - DNA, 20 bp, Artificial Sequence
  chemically synthesized
agggtctcactccgttgccc

SEQ ID NO: 607 - DNA, 20 bp, Artificial Sequence
  chemically synthesized
tctcactccgttgcccaggc

SEQ ID NO: 608 - DNA, 20 bp, Artificial Sequence
  chemically synthesized
tcactccgttgcccaggctg

SEQ ID NO: 609 - DNA, 20 bp, Artificial Sequence
  chemically synthesized
ccgttgcccaggctggagtg

SEQ ID NO: 610 - DNA, 20 bp, Artificial Sequence
  chemically synthesized
ttgcccaggctggagtgcgg

SEQ ID NO: 611 - DNA, 20 bp, Artificial Sequence
  chemically synthesized
ggagtgcggtggcatgatct

SEQ ID NO: 612 - DNA, 20 bp, Artificial Sequence
  chemically synthesized
cgctgccaacctctgcctcc

SEQ ID NO: 613 - DNA, 20 bp, Artificial Sequence
  chemically synthesized
gctgccaacctctgcctccc

SEQ ID NO: 614 - DNA, 20 bp, Artificial Sequence
  chemically synthesized
tcccacctcaacctcctgaa

SEQ ID NO: 615 - DNA, 20 bp, Artificial Sequence
  chemically synthesized
acctcaacctcctgaatagc

SEQ ID NO: 616 - DNA, 20 bp, Artificial Sequence
  chemically synthesized
cctcaacctcctgaatagct

SEQ ID NO: 617 - DNA, 20 bp, Artificial Sequence
  chemically synthesized
ctcctgaatagctgggacta

SEQ ID NO: 618 - DNA, 20 bp, Artificial Sequence
  chemically synthesized
tcctgaatagctgggactat

SEQ ID NO: 619 - DNA, 20 bp, Artificial Sequence
  chemically synthesized
taggtgcatgtcaccatacc

SEQ ID NO: 620 - DNA, 20 bp, Artificial Sequence
  chemically synthesized
tttttttttttttttttttg

SEQ ID NO: 621 - DNA, 20 bp, Artificial Sequence
  chemically synthesized
tttttttttttttttttgta

SEQ ID NO: 622 - DNA, 20 bp, Artificial Sequence
  chemically synthesized
tttttttttttttgtagaga

SEQ ID NO: 623 - DNA, 20 bp, Artificial Sequence
  chemically synthesized
ttttttttttttgtagagat

SEQ ID NO: 624 - DNA, 20 bp, Artificial Sequence
  chemically synthesized
tttttttttttgtagagatg

SEQ ID NO: 625 - DNA, 20 bp, Artificial Sequence
  chemically synthesized
tggggtttcaccatgctgcc

SEQ ID NO: 626 - DNA, 20 bp, Artificial Sequence
  chemically synthesized
ggggtttcaccatgctgcct

SEQ ID NO: 627 - DNA, 20 bp, Artificial Sequence
  chemically synthesized
ctaggctcgtcttgaactcc

SEQ ID NO: 628 - DNA, 20 bp, Artificial Sequence
  chemically synthesized
taggctcgtcttgaactcct

SEQ ID NO: 629 - DNA, 20 bp, Artificial Sequence
  chemically synthesized
cgtcttgaactcctgggctt

SEQ ID NO: 630 - DNA, 20 bp, Artificial Sequence
  chemically synthesized
tcttgaactcctgggcttaa

SEQ ID NO: 631 - DNA, 20 bp, Artificial Sequence
  chemically synthesized
cttaagagatatgcccgcct

SEQ ID NO: 632 - DNA, 20 bp, Artificial Sequence
  chemically synthesized
atgcccgccttggcctccca

SEQ ID NO: 633 - DNA, 20 bp, Artificial Sequence
  chemically synthesized
gccttggcctcccaaagtgc

SEQ ID NO: 634 - DNA, 20 bp, Artificial Sequence
  chemically synthesized
ccttggcctcccaaagtgct

SEQ ID NO: 635 - DNA, 20 bp, Artificial Sequence
  chemically synthesized
ctcccaaagtgctgggatta

SEQ ID NO: 636 - DNA, 20 bp, Artificial Sequence
  chemically synthesized
tcccaaagtgctgggattac

SEQ ID NO: 637 - DNA, 20 bp, Artificial Sequence
  chemically synthesized
agtgctgggattacaggtgt

SEQ ID NO: 638 - DNA, 20 bp, Artificial Sequence
  chemically synthesized
tcactacacctgacctactg

SEQ ID NO: 639 - DNA, 20 bp, Artificial Sequence
  chemically synthesized
cactacacctgacctactga

SEQ ID NO: 640 - DNA, 20 bp, Artificial Sequence
  chemically synthesized
cctactgaaggtttttaaca

SEQ ID NO: 641 - DNA, 20 bp, Artificial Sequence
  chemically synthesized
tactgaaggtttttaacatg

SEQ ID NO: 642 - DNA, 20 bp, Artificial Sequence
  chemically synthesized
actgaaggtttttaacatgg

SEQ ID NO: 643 - DNA, 20 bp, Artificial Sequence
  chemically synthesized
caaccttttctctacctatt

SEQ ID NO: 644 - DNA, 20 bp, Artificial Sequence
  chemically synthesized
tacctattgagataatcttg

SEQ ID NO: 645 - DNA, 20 bp, Artificial Sequence
  chemically synthesized
aatcttgtggtttttgtttt

SEQ ID NO: 646 - DNA, 20 bp, Artificial Sequence
  chemically synthesized
gttgaaccaaccttgcatcc

SEQ ID NO: 647 - DNA, 20 bp, Artificial Sequence
  chemically synthesized
ttgaaccaaccttgcatccc

SEQ ID NO: 648 - DNA, 20 bp, Artificial Sequence
  chemically synthesized
tgaaccaaccttgcatccca

SEQ ID NO: 649 - DNA, 20 bp, Artificial Sequence
  chemically synthesized
aaccttgcatcccagggata

SEQ ID NO: 650 - DNA, 20 bp, Artificial Sequence
  chemically synthesized
ggataaagcctacttgatca

SEQ ID NO: 651 - DNA, 20 bp, Artificial Sequence
  chemically synthesized
taaagcctacttgatcaaag

SEQ ID NO: 652 - DNA, 20 bp, Artificial Sequence
  chemically synthesized
cctacttgatcaaagtagat

SEQ ID NO: 653 - DNA, 20 bp, Artificial Sequence
  chemically synthesized
tcagctttttgatgtgctgc

SEQ ID NO: 654 - DNA, 20 bp, Artificial Sequence
  chemically synthesized
ttttgatgtgctgctggatt

SEQ ID NO: 655 - DNA, 20 bp, Artificial Sequence
  chemically synthesized
tgctgctggatttggtttgc

SEQ ID NO: 656 - DNA, 20 bp, Artificial Sequence
  chemically synthesized
tggtttgctagtattttgtt

SEQ ID NO: 657 - DNA, 20 bp, Artificial Sequence
  chemically synthesized
ggtttgctagtattttgttg

SEQ ID NO: 658 - DNA, 20 bp, Artificial Sequence
  chemically synthesized
tttttgcatctatattcatc

SEQ ID NO: 659 - DNA, 20 bp, Artificial Sequence
  chemically synthesized
ttttgcatctatattcatca

SEQ ID NO: 660 - DNA, 20 bp, Artificial Sequence
  chemically synthesized
tctatattcatcaaggatat

SEQ ID NO: 661 - DNA, 20 bp, Artificial Sequence
  chemically synthesized
tcatcaaggatattggcctg

SEQ ID NO: 662 - DNA, 20 bp, Artificial Sequence
  chemically synthesized
tttttctgttgtgtctctgc

SEQ ID NO: 663 - DNA, 20 bp, Artificial Sequence
  chemically synthesized
ttttctgttgtgtctctgcc

SEQ ID NO: 664 - DNA, 20 bp, Artificial Sequence
  chemically synthesized
gttgtgtctctgccaggttt

SEQ ID NO: 665 - DNA, 20 bp, Artificial Sequence
  chemically synthesized
tctctgccaggttttggtat

SEQ ID NO: 666 - DNA, 20 bp, Artificial Sequence
  chemically synthesized
ttttggtatcagaatgatgc

SEQ ID NO: 667 - DNA, 20 bp, Artificial Sequence
  chemically synthesized
cagaatgatgctggcctcat

SEQ ID NO: 668 - DNA, 20 bp, Artificial Sequence
  chemically synthesized
agaatgatgctggcctcatt

SEQ ID NO: 669 - DNA, 20 bp, Artificial Sequence
  chemically synthesized
gaatgatgctggcctcatta

SEQ ID NO: 670 - DNA, 20 bp, Artificial Sequence
  chemically synthesized
tgatgctggcctcattaggg

SEQ ID NO: 671 - DNA, 20 bp, Artificial Sequence
  chemically synthesized
atgctggcctcattagggaa

SEQ ID NO: 672 - DNA, 20 bp, Artificial Sequence
  chemically synthesized
gttcctcctcctcaattttt

SEQ ID NO: 673 - DNA, 20 bp, Artificial Sequence
  chemically synthesized
tcctcctcaattttttggaa

SEQ ID NO: 674 - DNA, 20 bp, Artificial Sequence
  chemically synthesized
tcaattttttggaacagatt

SEQ ID NO: 675 - DNA, 20 bp, Artificial Sequence
  chemically synthesized
attttttggaacagattgag

SEQ ID NO: 676 - DNA, 20 bp, Artificial Sequence
  chemically synthesized
ttttttggaacagattgagt

SEQ ID NO: 677 - DNA, 20 bp, Artificial Sequence
  chemically synthesized
agattgagtaggaataatac

SEQ ID NO: 678 - DNA, 20 bp, Artificial Sequence
  chemically synthesized
accagcttttctttatacat

SEQ ID NO: 679 - DNA, 20 bp, Artificial Sequence
  chemically synthesized
ccagcttttctttatacatc

SEQ ID NO: 680 - DNA, 20 bp, Artificial Sequence
  chemically synthesized
ttctttatacatcaggtata

SEQ ID NO: 681 - DNA, 20 bp, Artificial Sequence
  chemically synthesized
ctttatacatcaggtataaa

SEQ ID NO: 682 - DNA, 20 bp, Artificial Sequence
  chemically synthesized
aaagagatgacacaaacaca

SEQ ID NO: 683 - DNA, 20 bp, Artificial Sequence
  chemically synthesized
ggaaaaacattccatattca

SEQ ID NO: 684 - DNA, 20 bp, Artificial Sequence
  chemically synthesized
aaacattccatattcataga

SEQ ID NO: 685 - DNA, 20 bp, Artificial Sequence
  chemically synthesized
aacattccatattcatagat

SEQ ID NO: 686 - DNA, 20 bp, Artificial Sequence
  chemically synthesized
attccatattcatagatagg

SEQ ID NO: 687 - DNA, 20 bp, Artificial Sequence
  chemically synthesized
aagaattaatattgttaaaa

SEQ ID NO: 688 - DNA, 20 bp, Artificial Sequence
  chemically synthesized
taaaatggccatactgccca

SEQ ID NO: 689 - DNA, 20 bp, Artificial Sequence
  chemically synthesized
atactgcccaaagcaatcta

SEQ ID NO: 690 - DNA, 20 bp, Artificial Sequence
  chemically synthesized
aatgatatccttcacaaaac

SEQ ID NO: 691 - DNA, 20 bp, Artificial Sequence
  chemically synthesized
aaactgttttaaaattaata

SEQ ID NO: 692 - DNA, 20 bp, Artificial Sequence
  chemically synthesized
aaaattaatatggacccaaa

SEQ ID NO: 693 - DNA, 20 bp, Artificial Sequence
  chemically synthesized
aaattaatatggacccaaaa

SEQ ID NO: 694 - DNA, 20 bp, Artificial Sequence
  chemically synthesized
attaatatggacccaaaaag

SEQ ID NO: 695 - DNA, 20 bp, Artificial Sequence
  chemically synthesized
gacccaaaaaggagcccaaa

SEQ ID NO: 696 - DNA, 20 bp, Artificial Sequence
  chemically synthesized
aaaaggagcccaaatagcca

SEQ ID NO: 697 - DNA, 20 bp, Artificial Sequence
  chemically synthesized
caaatagccaaagcaatcct

SEQ ID NO: 698 - DNA, 20 bp, Artificial Sequence
  chemically synthesized
ccaaagcaatcctaagcaaa

SEQ ID NO: 699 - DNA, 20 bp, Artificial Sequence
  chemically synthesized
aatcctaagcaaaaagaaca

SEQ ID NO: 700 - DNA, 20 bp, Artificial Sequence
  chemically synthesized
ctaagcaaaaagaacaaagc

SEQ ID NO: 701 - DNA, 20 bp, Artificial Sequence
  chemically synthesized
aagcaaaaagaacaaagctg

SEQ ID NO: 702 - DNA, 20 bp, Artificial Sequence
  chemically synthesized
agcaaaaagaacaaagctgg

SEQ ID NO: 703 - DNA, 20 bp, Artificial Sequence
  chemically synthesized
caaagctggaggcatcacat

SEQ ID NO: 704 - DNA, 20 bp, Artificial Sequence
  chemically synthesized
attagccgattttatactaa

SEQ ID NO: 705 - DNA, 20 bp, Artificial Sequence
  chemically synthesized
ttagccgattttatactaaa

SEQ ID NO: 706 - DNA, 20 bp, Artificial Sequence
  chemically synthesized
gattttatactaaaaggcta

SEQ ID NO: 707 - DNA, 20 bp, Artificial Sequence
  chemically synthesized
attttatactaaaaggctat

SEQ ID NO: 708 - DNA, 20 bp, Artificial Sequence
  chemically synthesized
aaaggctataggaacctgaa

SEQ ID NO: 709 - DNA, 20 bp, Artificial Sequence
  chemically synthesized
ggctataggaacctgaacag

SEQ ID NO: 710 - DNA, 20 bp, Artificial Sequence
  chemically synthesized
gctataggaacctgaacagc

SEQ ID NO: 711 - DNA, 20 bp, Artificial Sequence
  chemically synthesized
ctataggaacctgaacagca

SEQ ID NO: 712 - DNA, 20 bp, Artificial Sequence
  chemically synthesized
gcagggtactgttataaaaa

SEQ ID NO: 713 - DNA, 20 bp, Artificial Sequence
  chemically synthesized
ctgttataaaaacagacaca

SEQ ID NO: 714 - DNA, 20 bp, Artificial Sequence
  chemically synthesized
aaaacagacacatagaccaa

SEQ ID NO: 715 - DNA, 20 bp, Artificial Sequence
  chemically synthesized
aacagacacatagaccaatg

SEQ ID NO: 716 - DNA, 20 bp, Artificial Sequence
  chemically synthesized
acacatagaccaatggagaa

SEQ ID NO: 717 - DNA, 20 bp, Artificial Sequence
  chemically synthesized
acatagaccaatggagaata

SEQ ID NO: 718 - DNA, 20 bp, Artificial Sequence
  chemically synthesized
atagaccaatggagaataga

SEQ ID NO: 719 - DNA, 20 bp, Artificial Sequence
  chemically synthesized
ccaatggagaatagagagcc

SEQ ID NO: 720 - DNA, 20 bp, Artificial Sequence
  chemically synthesized
gaatagagagccaagaaata

SEQ ID NO: 721 - DNA, 20 bp, Artificial Sequence
  chemically synthesized
caaccatctgatcttcaaca

SEQ ID NO: 722 - DNA, 20 bp, Artificial Sequence
  chemically synthesized
caacaaagttgacaaaaaac

SEQ ID NO: 723 - DNA, 20 bp, Artificial Sequence
  chemically synthesized
agttgacaaaaaacaagcaa

SEQ ID NO: 724 - DNA, 20 bp, Artificial Sequence
  chemically synthesized
gttgacaaaaaacaagcaat

SEQ ID NO: 725 - DNA, 20 bp, Artificial Sequence
  chemically synthesized
ttgacaaaaaacaagcaatg

SEQ ID NO: 726 - DNA, 20 bp, Artificial Sequence
  chemically synthesized
caaaaaacaagcaatgggga

SEQ ID NO: 727 - DNA, 20 bp, Artificial Sequence
  chemically synthesized
aaaaaacaagcaatggggaa

SEQ ID NO: 728 - DNA, 20 bp, Artificial Sequence
  chemically synthesized
aggactccgtattcaataaa

SEQ ID NO: 729 - DNA, 20 bp, Artificial Sequence
  chemically synthesized
ccgtattcaataaatggtgc

SEQ ID NO: 730 - DNA, 20 bp, Artificial Sequence
  chemically synthesized
cgtattcaataaatggtgct

SEQ ID NO: 731 - DNA, 20 bp, Artificial Sequence
  chemically synthesized
aatggtgctgggataattgc

SEQ ID NO: 732 - DNA, 20 bp, Artificial Sequence
  chemically synthesized
gctgggataattgctagcca

SEQ ID NO: 733 - DNA, 20 bp, Artificial Sequence
  chemically synthesized
ctgggataattgctagccat

SEQ ID NO: 734 - DNA, 20 bp, Artificial Sequence
  chemically synthesized
taattgctagccataggaat

SEQ ID NO: 735 - DNA, 20 bp, Artificial Sequence
  chemically synthesized
attgctagccataggaattg

SEQ ID NO: 736 - DNA, 20 bp, Artificial Sequence
  chemically synthesized
cataggaattggagtgaaac

SEQ ID NO: 737 - DNA, 20 bp, Artificial Sequence
  chemically synthesized
ccatatacaaaaatcaactc

SEQ ID NO: 738 - DNA, 20 bp, Artificial Sequence
  chemically synthesized
atacaaaaatcaactcaaga

SEQ ID NO: 739 - DNA, 20 bp, Artificial Sequence
  chemically synthesized
aatcaactcaagatggatta

SEQ ID NO: 740 - DNA, 20 bp, Artificial Sequence
  chemically synthesized
atctaaaattgtaaaaaccc

SEQ ID NO: 741 - DNA, 20 bp, Artificial Sequence
  chemically synthesized
taaaattgtaaaaaccctgg

SEQ ID NO: 742 - DNA, 20 bp, Artificial Sequence
  chemically synthesized
aaaaaccctggaagacaacc

SEQ ID NO: 743 - DNA, 20 bp, Artificial Sequence
  chemically synthesized
aaaaccctggaagacaacct

SEQ ID NO: 744 - DNA, 20 bp, Artificial Sequence
  chemically synthesized
caacctaggaaataccattc

SEQ ID NO: 745 - DNA, 20 bp, Artificial Sequence
  chemically synthesized
aggaaataccattctggaca

SEQ ID NO: 746 - DNA, 20 bp, Artificial Sequence
  chemically synthesized
ggaaataccattctggacat

SEQ ID NO: 747 - DNA, 20 bp, Artificial Sequence
  chemically synthesized
accattctggacataggccc

SEQ ID NO: 748 - DNA, 20 bp, Artificial Sequence
  chemically synthesized
tctggacataggccctggca

SEQ ID NO: 749 - DNA, 20 bp, Artificial Sequence
  chemically synthesized
ctggcacagattttatgatg

SEQ ID NO: 750 - DNA, 20 bp, Artificial Sequence
  chemically synthesized
ttttatgatgaagacgccaa

SEQ ID NO: 751 - DNA, 20 bp, Artificial Sequence
  chemically synthesized
gcaacaaaaacaaacacaaa

SEQ ID NO: 752 - DNA, 20 bp, Artificial Sequence
  chemically synthesized
caacaaaaacaaacacaaat

SEQ ID NO: 753 - DNA, 20 bp, Artificial Sequence
  chemically synthesized
aaacacaaatgggacctaac

SEQ ID NO: 754 - DNA, 20 bp, Artificial Sequence
  chemically synthesized
ggacctaacgagctcctgca

SEQ ID NO: 755 - DNA, 20 bp, Artificial Sequence
  chemically synthesized
aacgagctcctgcatggcaa

SEQ ID NO: 756 - DNA, 20 bp, Artificial Sequence
  chemically synthesized
atggcaaaagaaactatcaa

SEQ ID NO: 757 - DNA, 20 bp, Artificial Sequence
  chemically synthesized
ggcaaaagaaactatcaaca

SEQ ID NO: 758 - DNA, 20 bp, Artificial Sequence
  chemically synthesized
agaaactatcaacagagtaa

SEQ ID NO: 759 - DNA, 20 bp, Artificial Sequence
  chemically synthesized
gtaaaagacaacctacacaa

SEQ ID NO: 760 - DNA, 20 bp, Artificial Sequence
  chemically synthesized
taaaagacaacctacacaat

SEQ ID NO: 761 - DNA, 20 bp, Artificial Sequence
  chemically synthesized
aaagacaacctacacaatgg

SEQ ID NO: 762 - DNA, 20 bp, Artificial Sequence
  chemically synthesized
tgcaaaccatgtatccaaca

SEQ ID NO: 763 - DNA, 20 bp, Artificial Sequence
  chemically synthesized
gcaaaccatgtatccaacaa

SEQ ID NO: 764 - DNA, 20 bp, Artificial Sequence
  chemically synthesized
caaaccatgtatccaacaaa

SEQ ID NO: 765 - DNA, 20 bp, Artificial Sequence
  chemically synthesized
gtatccaacaaagggatatg

SEQ ID NO: 766 - DNA, 20 bp, Artificial Sequence
  chemically synthesized
acaaagggatatgcagaatc

SEQ ID NO: 767 - DNA, 20 bp, Artificial Sequence
  chemically synthesized
aagggatatgcagaatctgg

SEQ ID NO: 768 - DNA, 20 bp, Artificial Sequence
  chemically synthesized
agggatatgcagaatctgga

SEQ ID NO: 769 - DNA, 20 bp, Artificial Sequence
  chemically synthesized
ggaacttaaaactaattaac

SEQ ID NO: 770 - DNA, 20 bp, Artificial Sequence
  chemically synthesized
caacccaccccactacaaac

SEQ ID NO: 771 - DNA, 20 bp, Artificial Sequence
  chemically synthesized
aacccaccccactacaaact

SEQ ID NO: 772 - DNA, 20 bp, Artificial Sequence
  chemically synthesized
accccactacaaactgggca

SEQ ID NO: 773 - DNA, 20 bp, Artificial Sequence
  chemically synthesized
ccccactacaaactgggcaa

SEQ ID NO: 774 - DNA, 20 bp, Artificial Sequence
  chemically synthesized
caaaggacatgaaaattttt

SEQ ID NO: 775 - DNA, 20 bp, Artificial Sequence
  chemically synthesized
aggacatgaaaatttttcag

SEQ ID NO: 776 - DNA, 20 bp, Artificial Sequence
  chemically synthesized
atttttcagaagaatatata

SEQ ID NO: 777 - DNA, 20 bp, Artificial Sequence
  chemically synthesized
ttcagaagaatatatacaga

SEQ ID NO: 778 - DNA, 20 bp, Artificial Sequence
  chemically synthesized
aatatatacagacagctaaa

SEQ ID NO: 779 - DNA, 20 bp, Artificial Sequence
  chemically synthesized
aaaatgcttaatatcactaa

SEQ ID NO: 780 - DNA, 20 bp, Artificial Sequence
  chemically synthesized
aatgcttaatatcactaata

SEQ ID NO: 781 - DNA, 20 bp, Artificial Sequence
  chemically synthesized
agaattgcaaatcaattctc

SEQ ID NO: 782 - DNA, 20 bp, Artificial Sequence
  chemically synthesized
gaattgcaaatcaattctct

SEQ ID NO: 783 - DNA, 20 bp, Artificial Sequence
  chemically synthesized
gcaaatcaattctctaggaa

SEQ ID NO: 784 - DNA, 20 bp, Artificial Sequence
  chemically synthesized
taggaatggctattattaaa

SEQ ID NO: 785 - DNA, 20 bp, Artificial Sequence
  chemically synthesized
attaaaaagtcaaaaaatca

SEQ ID NO: 786 - DNA, 20 bp, Artificial Sequence
  chemically synthesized
agtcaaaaaatcacagatgt

SEQ ID NO: 787 - DNA, 20 bp, Artificial Sequence
  chemically synthesized
aaaaaatcacagatgttggc

SEQ ID NO: 788 - DNA, 20 bp, Artificial Sequence
  chemically synthesized
aaaaatcacagatgttggca

SEQ ID NO: 789 - DNA, 20 bp, Artificial Sequence
  chemically synthesized
cacagatgttggcaaggttg

SEQ ID NO: 790 - DNA, 20 bp, Artificial Sequence
  chemically synthesized
cagatgttggcaaggttgtg

SEQ ID NO: 791 - DNA, 20 bp, Artificial Sequence
  chemically synthesized
gttggcaaggttgtggagaa

SEQ ID NO: 792 - DNA, 20 bp, Artificial Sequence
  chemically synthesized
ttggcaaggttgtggagaaa

SEQ ID NO: 793 - DNA, 20 bp, Artificial Sequence
  chemically synthesized
tggcaaggttgtggagaaaa

SEQ ID NO: 794 - DNA, 20 bp, Artificial Sequence
  chemically synthesized
agggaacacttatacactgc

SEQ ID NO: 795 - DNA, 20 bp, Artificial Sequence
  chemically synthesized
gaacacttatacactgctgg

SEQ ID NO: 796 - DNA, 20 bp, Artificial Sequence
  chemically synthesized
aacacttatacactgctggc

SEQ ID NO: 797 - DNA, 20 bp, Artificial Sequence
  chemically synthesized
ctgctggcgggactgtaaat

SEQ ID NO: 798 - DNA, 20 bp, Artificial Sequence
  chemically synthesized
ggcgggactgtaaattagtt

SEQ ID NO: 799 - DNA, 20 bp, Artificial Sequence
  chemically synthesized
attagtttagctattatgaa

SEQ ID NO: 800 - DNA, 20 bp, Artificial Sequence
  chemically synthesized
agtttagctattatgaaaag

SEQ ID NO: 801 - DNA, 20 bp, Artificial Sequence
  chemically synthesized
ctattatgaaaagcagtttg

SEQ ID NO: 802 - DNA, 20 bp, Artificial Sequence
  chemically synthesized
atttctcaaataactgaaaa

SEQ ID NO: 803 - DNA, 20 bp, Artificial Sequence
  chemically synthesized
aatagaactaccattcaccc

SEQ ID NO: 804 - DNA, 20 bp, Artificial Sequence
  chemically synthesized
cattattctatatgtaccta

SEQ ID NO: 805 - DNA, 20 bp, Artificial Sequence
  chemically synthesized
attattctatatgtacctaa

SEQ ID NO: 806 - DNA, 20 bp, Artificial Sequence
  chemically synthesized
atacaaatttttctaccata

SEQ ID NO: 807 - DNA, 20 bp, Artificial Sequence
  chemically synthesized
atgcatgtgtatgttcatca

SEQ ID NO: 808 - DNA, 20 bp, Artificial Sequence
  chemically synthesized
cagcactattcatgataaca

SEQ ID NO: 809 - DNA, 20 bp, Artificial Sequence
  chemically synthesized
actattcatgataacaaaga

SEQ ID NO: 810 - DNA, 20 bp, Artificial Sequence
  chemically synthesized
ctattcatgataacaaagac

SEQ ID NO: 811 - DNA, 20 bp, Artificial Sequence
  chemically synthesized
tattcatgataacaaagaca

SEQ ID NO: 812 - DNA, 20 bp, Artificial Sequence
  chemically synthesized
tcaacctaaatgcctatcaa

SEQ ID NO: 813 - DNA, 20 bp, Artificial Sequence
  chemically synthesized
acctaaatgcctatcaatgg

SEQ ID NO: 814 - DNA, 20 bp, Artificial Sequence
  chemically synthesized
aatgcctatcaatggtagac

SEQ ID NO: 815 - DNA, 20 bp, Artificial Sequence
  chemically synthesized
tatcaatggtagactggata

SEQ ID NO: 816 - DNA, 20 bp, Artificial Sequence
  chemically synthesized
aatgtgatacatatacacca

SEQ ID NO: 817 - DNA, 20 bp, Artificial Sequence
  chemically synthesized
atacaccatggaatactatg

SEQ ID NO: 818 - DNA, 20 bp, Artificial Sequence
  chemically synthesized
tactatgcagccataaaaac

SEQ ID NO: 819 - DNA, 20 bp, Artificial Sequence
  chemically synthesized
atgcagccataaaaaccaga

SEQ ID NO: 820 - DNA, 20 bp, Artificial Sequence
  chemically synthesized
gcagccataaaaaccagatg

SEQ ID NO: 821 - DNA, 20 bp, Artificial Sequence
  chemically synthesized
ccataaaaaccagatggagc

SEQ ID NO: 822 - DNA, 20 bp, Artificial Sequence
  chemically synthesized
ataaaaaccagatggagcta

SEQ ID NO: 823 - DNA, 20 bp, Artificial Sequence
  chemically synthesized
taaaaaccagatggagctag

SEQ ID NO: 824 - DNA, 20 bp, Artificial Sequence
  chemically synthesized
gagctagaggtcattatcct

SEQ ID NO: 825 - DNA, 20 bp, Artificial Sequence
  chemically synthesized
ttatcctaagtgaactaatc

SEQ ID NO: 826 - DNA, 20 bp, Artificial Sequence
  chemically synthesized
tatcctaagtgaactaatcc

SEQ ID NO: 827 - DNA, 20 bp, Artificial Sequence
  chemically synthesized
taagtgaactaatccaggaa

SEQ ID NO: 828 - DNA, 20 bp, Artificial Sequence
  chemically synthesized
taccgcatgttctcacttct

SEQ ID NO: 829 - DNA, 20 bp, Artificial Sequence
  chemically synthesized
cgcatgttctcacttctaag

SEQ ID NO: 830 - DNA, 20 bp, Artificial Sequence
  chemically synthesized
gcatgttctcacttctaagt

SEQ ID NO: 831 - DNA, 20 bp, Artificial Sequence
  chemically synthesized
atgttctcacttctaagtgg

SEQ ID NO: 832 - DNA, 20 bp, Artificial Sequence
  chemically synthesized
ctaagtgggagctaaacact

SEQ ID NO: 833 - DNA, 20 bp, Artificial Sequence
  chemically synthesized
agctaaacactgagtataca

SEQ ID NO: 834 - DNA, 20 bp, Artificial Sequence
  chemically synthesized
actgagtatacatggacaca

SEQ ID NO: 835 - DNA, 20 bp, Artificial Sequence
  chemically synthesized
gagtatacatggacacaaag

SEQ ID NO: 836 - DNA, 20 bp, Artificial Sequence
  chemically synthesized
agtatacatggacacaaaga

SEQ ID NO: 837 - DNA, 20 bp, Artificial Sequence
  chemically synthesized
catggacacaaagaaggaaa

SEQ ID NO: 838 - DNA, 20 bp, Artificial Sequence
  chemically synthesized
aaagaaggaaacagcaacac

SEQ ID NO: 839 - DNA, 20 bp, Artificial Sequence
  chemically synthesized
aagaaggaaacagcaacacc

SEQ ID NO: 840 - DNA, 20 bp, Artificial Sequence
  chemically synthesized
agaaggaaacagcaacacca

SEQ ID NO: 841 - DNA, 20 bp, Artificial Sequence
  chemically synthesized
agcaacaccagggcctactt

SEQ ID NO: 842 - DNA, 20 bp, Artificial Sequence
  chemically synthesized
gcaacaccagggcctacttg

SEQ ID NO: 843 - DNA, 20 bp, Artificial Sequence
  chemically synthesized
caacaccagggcctacttga

SEQ ID NO: 844 - DNA, 20 bp, Artificial Sequence
  chemically synthesized
caccagggcctacttgaggg

SEQ ID NO: 845 - DNA, 20 bp, Artificial Sequence
  chemically synthesized
accagggcctacttgagggt

SEQ ID NO: 846 - DNA, 20 bp, Artificial Sequence
  chemically synthesized
cagggcctacttgagggtgg

SEQ ID NO: 847 - DNA, 20 bp, Artificial Sequence
  chemically synthesized
ggcctacttgagggtgggag

SEQ ID NO: 848 - DNA, 20 bp, Artificial Sequence
  chemically synthesized
gcctacttgagggtgggaga

SEQ ID NO: 849 - DNA, 20 bp, Artificial Sequence
  chemically synthesized
cctacttgagggtgggagaa

SEQ ID NO: 850 - DNA, 20 bp, Artificial Sequence
  chemically synthesized
cttgagggtgggagaagggt

SEQ ID NO: 851 - DNA, 20 bp, Artificial Sequence
  chemically synthesized
ttgagggtgggagaagggtg

SEQ ID NO: 852 - DNA, 20 bp, Artificial Sequence
  chemically synthesized
aggatcaaaaaactacctat

SEQ ID NO: 853 - DNA, 20 bp, Artificial Sequence
  chemically synthesized
ggatcaaaaaactacctatt

SEQ ID NO: 854 - DNA, 20 bp, Artificial Sequence
  chemically synthesized
tgggtactatgcttattacc

SEQ ID NO: 855 - DNA, 20 bp, Artificial Sequence
  chemically synthesized
gggtactatgcttattacct

SEQ ID NO: 856 - DNA, 20 bp, Artificial Sequence
  chemically synthesized
tacacatgaacctaaaataa

SEQ ID NO: 857 - DNA, 20 bp, Artificial Sequence
  chemically synthesized
aaaagtcaaaaaaaaaattc

SEQ ID NO: 858 - DNA, 20 bp, Artificial Sequence
  chemically synthesized
gtgaccaatttttcatgtat

SEQ ID NO: 859 - DNA, 20 bp, Artificial Sequence
  chemically synthesized
accaatttttcatgtattgg

SEQ ID NO: 860 - DNA, 20 bp, Artificial Sequence
  chemically synthesized
tttcatgtattggcagtgac

SEQ ID NO: 861 - DNA, 20 bp, Artificial Sequence
  chemically synthesized
gtgactggaattattttaaa

SEQ ID NO: 862 - DNA, 20 bp, Artificial Sequence
  chemically synthesized
atgtaaaaacatatacttaa

SEQ ID NO: 863 - DNA, 20 bp, Artificial Sequence
  chemically synthesized
gtaaaatgactctgtgacaa

SEQ ID NO: 864 - DNA, 20 bp, Artificial Sequence
  chemically synthesized
aatagacttaacacacaatc

SEQ ID NO: 865 - DNA, 20 bp, Artificial Sequence
  chemically synthesized
agacttaacacacaatctag

SEQ ID NO: 866 - DNA, 20 bp, Artificial Sequence
  chemically synthesized
tggctgaaaatactattttt

SEQ ID NO: 867 - DNA, 20 bp, Artificial Sequence
  chemically synthesized
tttttggacaattttatgtt

SEQ ID NO: 868 - DNA, 20 bp, Artificial Sequence
  chemically synthesized
aattttatgtttagaaaatt

SEQ ID NO: 869 - DNA, 20 bp, Artificial Sequence
  chemically synthesized
ttttatgtttagaaaattta

SEQ ID NO: 870 - DNA, 20 bp, Artificial Sequence
  chemically synthesized
atgtttagaaaatttagagc

SEQ ID NO: 871 - DNA, 20 bp, Artificial Sequence
  chemically synthesized
ggatgcaaaatttaaaaatt

SEQ ID NO: 872 - DNA, 20 bp, Artificial Sequence
  chemically synthesized
gatgcaaaatttaaaaattc

SEQ ID NO: 873 - DNA, 20 bp, Artificial Sequence
  chemically synthesized
ggatattattttgtcatgat

SEQ ID NO: 874 - DNA, 20 bp, Artificial Sequence
  chemically synthesized
tttgtcatgatcagcaaaat

SEQ ID NO: 875 - DNA, 20 bp, Artificial Sequence
  chemically synthesized
catgatcagcaaaatgagaa

SEQ ID NO: 876 - DNA, 20 bp, Artificial Sequence
  chemically synthesized
tgagaatagctgtctaactg

SEQ ID NO: 877 - DNA, 20 bp, Artificial Sequence
  chemically synthesized
ctaactgtagtttgtcaaat

SEQ ID NO: 878 - DNA, 20 bp, Artificial Sequence
  chemically synthesized
tcaaatcagcaaaacaaaca

SEQ ID NO: 879 - DNA, 20 bp, Artificial Sequence
  chemically synthesized
atcagcaaaacaaacatagc

SEQ ID NO: 880 - DNA, 20 bp, Artificial Sequence
  chemically synthesized
atagctggctaaaaatgatt

SEQ ID NO: 881 - DNA, 20 bp, Artificial Sequence
  chemically synthesized
aacaaaacaaaaataccaaa

SEQ ID NO: 882 - DNA, 20 bp, Artificial Sequence
  chemically synthesized
atggttgcaaacccattctg

SEQ ID NO: 883 - DNA, 20 bp, Artificial Sequence
  chemically synthesized
ttcactaaatttcctcaaaa

SEQ ID NO: 884 - DNA, 20 bp, Artificial Sequence
  chemically synthesized
atttcctcaaaaaagctccc

SEQ ID NO: 885 - DNA, 20 bp, Artificial Sequence
  chemically synthesized
ccaagtaaccaatcaaaaaa

SEQ ID NO: 886 - DNA, 20 bp, Artificial Sequence
  chemically synthesized
caaaaaacggaaaaaatact

SEQ ID NO: 887 - DNA, 20 bp, Artificial Sequence
  chemically synthesized
ggaaaaaatactaagcactt

SEQ ID NO: 888 - DNA, 20 bp, Artificial Sequence
  chemically synthesized
gaaaaaatactaagcacttt

SEQ ID NO: 889 - DNA, 20 bp, Artificial Sequence
  chemically synthesized
tactaagcactttaggaaaa

SEQ ID NO: 890 - DNA, 20 bp, Artificial Sequence
  chemically synthesized
aggaaaaaagaaaatgtttc

SEQ ID NO: 891 - DNA, 20 bp, Artificial Sequence
  chemically synthesized
ggaaaaaagaaaatgtttca

SEQ ID NO: 892 - DNA, 20 bp, Artificial Sequence
  chemically synthesized
aaagaaaatgtttcaaggca

SEQ ID NO: 893 - DNA, 20 bp, Artificial Sequence
  chemically synthesized
gtttcaaggcacagattaat

SEQ ID NO: 894 - DNA, 20 bp, Artificial Sequence
  chemically synthesized
aacttactgacatgtaattt

SEQ ID NO: 895 - DNA, 20 bp, Artificial Sequence
  chemically synthesized
tactgacatgtaatttcagt

SEQ ID NO: 896 - DNA, 20 bp, Artificial Sequence
  chemically synthesized
cattcccctactactttctc

SEQ ID NO: 897 - DNA, 20 bp, Artificial Sequence
  chemically synthesized
tcaagaaccaataaaaactc

SEQ ID NO: 898 - DNA, 20 bp, Artificial Sequence
  chemically synthesized
aagaaccaataaaaactctg

SEQ ID NO: 899 - DNA, 20 bp, Artificial Sequence
  chemically synthesized
caataaaaactctggagaac

SEQ ID NO: 900 - DNA, 20 bp, Artificial Sequence
  chemically synthesized
aataaaaactctggagaact

SEQ ID NO: 901 - DNA, 20 bp, Artificial Sequence
  chemically synthesized
tctggagaactaggaaaaaa

SEQ ID NO: 902 - DNA, 20 bp, Artificial Sequence
  chemically synthesized
ctggagaactaggaaaaaat

SEQ ID NO: 903 - DNA, 20 bp, Artificial Sequence
  chemically synthesized
gaaaaaatgggtcctatatt

SEQ ID NO: 904 - DNA, 20 bp, Artificial Sequence
  chemically synthesized
aagtcatctttctgcacctt

SEQ ID NO: 905 - DNA, 20 bp, Artificial Sequence
  chemically synthesized
ttctgcaccttgagatgtat

SEQ ID NO: 906 - DNA, 20 bp, Artificial Sequence
  chemically synthesized
tctgcaccttgagatgtata

SEQ ID NO: 907 - DNA, 20 bp, Artificial Sequence
  chemically synthesized
caccttgagatgtataaggc

SEQ ID NO: 908 - DNA, 20 bp, Artificial Sequence
  chemically synthesized
accttgagatgtataaggct

SEQ ID NO: 909 - DNA, 20 bp, Artificial Sequence
  chemically synthesized
ccttgagatgtataaggctg

SEQ ID NO: 910 - DNA, 20 bp, Artificial Sequence
  chemically synthesized
cttgagatgtataaggctgg

SEQ ID NO: 911 - DNA, 20 bp, Artificial Sequence
  chemically synthesized
aggctgggggtcccttgaac

SEQ ID NO: 912 - DNA, 20 bp, Artificial Sequence
  chemically synthesized
atattcctattctatgcttt

SEQ ID NO: 913 - DNA, 20 bp, Artificial Sequence
  chemically synthesized
aacacttactgtgtaattac

SEQ ID NO: 914 - DNA, 20 bp, Artificial Sequence
  chemically synthesized
gtgtaattactggtgctcca

SEQ ID NO: 915 - DNA, 20 bp, Artificial Sequence
  chemically synthesized
tgtaattactggtgctccac

SEQ ID NO: 916 - DNA, 20 bp, Artificial Sequence
  chemically synthesized
gctccacaggtctgttacct

SEQ ID NO: 917 - DNA, 20 bp, Artificial Sequence
  chemically synthesized
ctaagctcaaactgattctg

SEQ ID NO: 918 - DNA, 20 bp, Artificial Sequence
  chemically synthesized
aaactgattctgtagataca

SEQ ID NO: 919 - DNA, 20 bp, Artificial Sequence
  chemically synthesized
aactgattctgtagatacat

SEQ ID NO: 920 - DNA, 20 bp, Artificial Sequence
  chemically synthesized
gattctgtagatacataggt

SEQ ID NO: 921 - DNA, 20 bp, Artificial Sequence
  chemically synthesized
attctgtagatacataggtc

SEQ ID NO: 922 - DNA, 20 bp, Artificial Sequence
  chemically synthesized
tttctattgccttacacact

SEQ ID NO: 923 - DNA, 20 bp, Artificial Sequence
  chemically synthesized
ttgccttacacacttagacc

SEQ ID NO: 924 - DNA, 20 bp, Artificial Sequence
  chemically synthesized
tgccttacacacttagacct

SEQ ID NO: 925 - DNA, 20 bp, Artificial Sequence
  chemically synthesized
cacttagacctgggttatta

SEQ ID NO: 926 - DNA, 20 bp, Artificial Sequence
  chemically synthesized
tactgttaccttctatgtgc

SEQ ID NO: 927 - DNA, 20 bp, Artificial Sequence
  chemically synthesized
actgttaccttctatgtgcc

SEQ ID NO: 928 - DNA, 20 bp, Artificial Sequence
  chemically synthesized
tatgtgccaggcattattgc

SEQ ID NO: 929 - DNA, 20 bp, Artificial Sequence
  chemically synthesized
ttttttttttttttttaaat

SEQ ID NO: 930 - DNA, 20 bp, Artificial Sequence
  chemically synthesized
ttttttttttttaaataaga

SEQ ID NO: 931 - DNA, 20 bp, Artificial Sequence
  chemically synthesized
ttttttttttaaataagaca

SEQ ID NO: 932 - DNA, 20 bp, Artificial Sequence
  chemically synthesized
ttttaaataagacagagtct

SEQ ID NO: 933 - DNA, 20 bp, Artificial Sequence
  chemically synthesized
gacagagtctcggtgttccc

SEQ ID NO: 934 - DNA, 20 bp, Artificial Sequence
  chemically synthesized
acagagtctcggtgttcccc

SEQ ID NO: 935 - DNA, 20 bp, Artificial Sequence
  chemically synthesized
agtctcggtgttccccaggc

SEQ ID NO: 936 - DNA, 20 bp, Artificial Sequence
  chemically synthesized
tctcggtgttccccaggctg

SEQ ID NO: 937 - DNA, 20 bp, Artificial Sequence
  chemically synthesized
ttccccaggctggagtacac

SEQ ID NO: 938 - DNA, 20 bp, Artificial Sequence
  chemically synthesized
tccctgtaacctcaaactcc

SEQ ID NO: 939 - DNA, 20 bp, Artificial Sequence
  chemically synthesized
ccctgtaacctcaaactcct

SEQ ID NO: 940 - DNA, 20 bp, Artificial Sequence
  chemically synthesized
cctcaaactcctgggctcaa

SEQ ID NO: 941 - DNA, 20 bp, Artificial Sequence
  chemically synthesized
ctcaaaagatcctcctgcct

SEQ ID NO: 942 - DNA, 20 bp, Artificial Sequence
  chemically synthesized
gatcctcctgcctcagcttt

SEQ ID NO: 943 - DNA, 20 bp, Artificial Sequence
  chemically synthesized
tcctgcctcagctttcggaa

SEQ ID NO: 944 - DNA, 20 bp, Artificial Sequence
  chemically synthesized
gcctcagctttcggaatagc

SEQ ID NO: 945 - DNA, 20 bp, Artificial Sequence
  chemically synthesized
cctcagctttcggaatagct

SEQ ID NO: 946 - DNA, 20 bp, Artificial Sequence
  chemically synthesized
tttcggaatagctaggatta

SEQ ID NO: 947 - DNA, 20 bp, Artificial Sequence
  chemically synthesized
ttcggaatagctaggattac

SEQ ID NO: 948 - DNA, 20 bp, Artificial Sequence
  chemically synthesized
tagctaggattacaggcaca

SEQ ID NO: 949 - DNA, 20 bp, Artificial Sequence
  chemically synthesized
taattcttttttattttttg

SEQ ID NO: 950 - DNA, 20 bp, Artificial Sequence
  chemically synthesized
attcttttttattttttgta

SEQ ID NO: 951 - DNA, 20 bp, Artificial Sequence
  chemically synthesized
ttttttattttttgtagaga

SEQ ID NO: 952 - DNA, 20 bp, Artificial Sequence
  chemically synthesized
tttttattttttgtagagat

SEQ ID NO: 953 - DNA, 20 bp, Artificial Sequence
  chemically synthesized
ttttattttttgtagagatg

SEQ ID NO: 954 - DNA, 20 bp, Artificial Sequence
  chemically synthesized
tggggtttcactatgttgcc

SEQ ID NO: 955 - DNA, 20 bp, Artificial Sequence
  chemically synthesized
ggggtttcactatgttgccc

SEQ ID NO: 956 - DNA, 20 bp, Artificial Sequence
  chemically synthesized
tttcactatgttgcccaggc

SEQ ID NO: 957 - DNA, 20 bp, Artificial Sequence
  chemically synthesized
ctatgttgcccaggctggtc

SEQ ID NO: 958 - DNA, 20 bp, Artificial Sequence
  chemically synthesized
ccaggctggtctggaactcc

SEQ ID NO: 959 - DNA, 20 bp, Artificial Sequence
  chemically synthesized
ggtctggaactcctggcctc

SEQ ID NO: 960 - DNA, 20 bp, Artificial Sequence
  chemically synthesized
ccgcctgccttgcactccca

SEQ ID NO: 961 - DNA, 20 bp, Artificial Sequence
  chemically synthesized
ctcccaaagctctgttctta

SEQ ID NO: 962 - DNA, 20 bp, Artificial Sequence
  chemically synthesized
tcccaaagctctgttcttac

SEQ ID NO: 963 - DNA, 20 bp, Artificial Sequence
  chemically synthesized
agctctgttcttacaggcat

SEQ ID NO: 964 - DNA, 20 bp, Artificial Sequence
  chemically synthesized
tgccttttttcaactgataa

SEQ ID NO: 965 - DNA, 20 bp, Artificial Sequence
  chemically synthesized
ccttttttcaactgataaaa

SEQ ID NO: 966 - DNA, 20 bp, Artificial Sequence
  chemically synthesized
ctgataaaagagaaacacaa

SEQ ID NO: 967 - DNA, 20 bp, Artificial Sequence
  chemically synthesized
tataattcttttcctgattt

SEQ ID NO: 968 - DNA, 20 bp, Artificial Sequence
  chemically synthesized
ctgatttcagaacatctttt

SEQ ID NO: 969 - DNA, 20 bp, Artificial Sequence
  chemically synthesized
acatcttttaagtgtttact

SEQ ID NO: 970 - DNA, 20 bp, Artificial Sequence
  chemically synthesized
catcttttaagtgtttactt

SEQ ID NO: 971 - DNA, 20 bp, Artificial Sequence
  chemically synthesized
atcttttaagtgtttactta

SEQ ID NO: 972 - DNA, 20 bp, Artificial Sequence
  chemically synthesized
taagtgtttacttagggttt

SEQ ID NO: 973 - DNA, 20 bp, Artificial Sequence
  chemically synthesized
aagtgtttacttagggtttt

SEQ ID NO: 974 - DNA, 20 bp, Artificial Sequence
  chemically synthesized
tacttagggttttaggatta

SEQ ID NO: 975 - DNA, 20 bp, Artificial Sequence
  chemically synthesized
tcatcatcattttttttttc

SEQ ID NO: 976 - DNA, 20 bp, Artificial Sequence
  chemically synthesized
catcattttttttttcaagt

SEQ ID NO: 977 - DNA, 20 bp, Artificial Sequence
  chemically synthesized
atcattttttttttcaagtt

SEQ ID NO: 978 - DNA, 20 bp, Artificial Sequence
  chemically synthesized
ttccttttgaatttactgtt

SEQ ID NO: 979 - DNA, 20 bp, Artificial Sequence
  chemically synthesized
tccttttgaatttactgttc

SEQ ID NO: 980 - DNA, 20 bp, Artificial Sequence
  chemically synthesized
ttttttttttaaaaaaaaat

SEQ ID NO: 981 - DNA, 20 bp, Artificial Sequence
  chemically synthesized
tttttttaaaaaaaaataag

SEQ ID NO: 982 - DNA, 20 bp, Artificial Sequence
  chemically synthesized
gaataacaatataaaatgca

SEQ ID NO: 983 - DNA, 20 bp, Artificial Sequence
  chemically synthesized
gttccattaatatattttaa

SEQ ID NO: 984 - DNA, 20 bp, Artificial Sequence
  chemically synthesized
gtattttatattcatatgtc

SEQ ID NO: 985 - DNA, 20 bp, Artificial Sequence
  chemically synthesized
attcatatgtcaagaaaaaa

SEQ ID NO: 986 - DNA, 20 bp, Artificial Sequence
  chemically synthesized
atgtcaagaaaaaaaagact

SEQ ID NO: 987 - DNA, 20 bp, Artificial Sequence
  chemically synthesized
aagacttagaattacttctt

SEQ ID NO: 988 - DNA, 20 bp, Artificial Sequence
  chemically synthesized
acttctttggttttgttaat

SEQ ID NO: 989 - DNA, 20 bp, Artificial Sequence
  chemically synthesized
attcaataactgttacataa

SEQ ID NO: 990 - DNA, 20 bp, Artificial Sequence
  chemically synthesized
ataatagactatacacaatg

SEQ ID NO: 991 - DNA, 20 bp, Artificial Sequence
  chemically synthesized
taatagactatacacaatgt

SEQ ID NO: 992 - DNA, 20 bp, Artificial Sequence
  chemically synthesized
aatagactatacacaatgta

SEQ ID NO: 993 - DNA, 20 bp, Artificial Sequence
  chemically synthesized
atagactatacacaatgtag

SEQ ID NO: 994 - DNA, 20 bp, Artificial Sequence
  chemically synthesized
actatacacaatgtaggggc

SEQ ID NO: 995 - DNA, 20 bp, Artificial Sequence
  chemically synthesized
ctatacacaatgtaggggct

SEQ ID NO: 996 - DNA, 20 bp, Artificial Sequence
  chemically synthesized
tatacacaatgtaggggctg

SEQ ID NO: 997 - DNA, 20 bp, Artificial Sequence
  chemically synthesized
cacaatgtaggggctggggc

SEQ ID NO: 998 - DNA, 20 bp, Artificial Sequence
  chemically synthesized
acaatgtaggggctggggct

SEQ ID NO: 999 - DNA, 20 bp, Artificial Sequence
  chemically synthesized
caatgtaggggctggggctg

SEQ ID NO: 1000 - DNA, 20 bp, Artificial Sequence
  chemically synthesized
gggctggggctggggctgtc

SEQ ID NO: 1001 - DNA, 20 bp, Artificial Sequence
  chemically synthesized
tggggctggggctgtctggt

SEQ ID NO: 1002 - DNA, 20 bp, Artificial Sequence
  chemically synthesized
ctgtctggttggccactatt

SEQ ID NO: 1003 - DNA, 20 bp, Artificial Sequence
  chemically synthesized
tggttggccactattaagcc

SEQ ID NO: 1004 - DNA, 20 bp, Artificial Sequence
  chemically synthesized
ccactattaagcccggtacc

SEQ ID NO: 1005 - DNA, 20 bp, Artificial Sequence
  chemically synthesized
attaagcccggtacctagaa

SEQ ID NO: 1006 - DNA, 20 bp, Artificial Sequence
  chemically synthesized
ccggtacctagaacagtgcc

SEQ ID NO: 1007 - DNA, 20 bp, Artificial Sequence
  chemically synthesized
cggtacctagaacagtgcct

SEQ ID NO: 1008 - DNA, 20 bp, Artificial Sequence
  chemically synthesized
gtacctagaacagtgcctag

SEQ ID NO: 1009 - DNA, 20 bp, Artificial Sequence
  chemically synthesized
atatatatttattaaacaaa

SEQ ID NO: 1010 - DNA, 20 bp, Artificial Sequence
  chemically synthesized
aatagttaaatatttacttt

SEQ ID NO: 1011 - DNA, 20 bp, Artificial Sequence
  chemically synthesized
atagttaaatatttacttta

SEQ ID NO: 1012 - DNA, 20 bp, Artificial Sequence
  chemically synthesized
tagttaaatatttactttaa

SEQ ID NO: 1013 - DNA, 20 bp, Artificial Sequence
  chemically synthesized
agggttaatcttacctattt

SEQ ID NO: 1014 - DNA, 20 bp, Artificial Sequence
  chemically synthesized
gggttaatcttacctatttt

SEQ ID NO: 1015 - DNA, 20 bp, Artificial Sequence
  chemically synthesized
ggttaatcttacctatttta

SEQ ID NO: 1016 - DNA, 20 bp, Artificial Sequence
  chemically synthesized
ttagggtaaacacaattgta

SEQ ID NO: 1017 - DNA, 20 bp, Artificial Sequence
  chemically synthesized
taaacacaattgtatggaaa

SEQ ID NO: 1018 - DNA, 20 bp, Artificial Sequence
  chemically synthesized
acacaattgtatggaaaaag

SEQ ID NO: 1019 - DNA, 20 bp, Artificial Sequence
  chemically synthesized
atggaaaaagaagaacattt

SEQ ID NO: 1020 - DNA, 20 bp, Artificial Sequence
  chemically synthesized
gcttgattaaatgtttcttc

SEQ ID NO: 1021 - DNA, 20 bp, Artificial Sequence
  chemically synthesized
ttcttcaagcataattctgc

SEQ ID NO: 1022 - DNA, 20 bp, Artificial Sequence
  chemically synthesized
tgttttgtttttattcgtaa

SEQ ID NO: 1023 - DNA, 20 bp, Artificial Sequence
  chemically synthesized
aatttcatattgcttgacta

SEQ ID NO: 1024 - DNA, 20 bp, Artificial Sequence
  chemically synthesized
atattgcttgactacagtac

SEQ ID NO: 1025 - DNA, 20 bp, Artificial Sequence
  chemically synthesized
ttgcttgactacagtaccag

SEQ ID NO: 1026 - DNA, 20 bp, Artificial Sequence
  chemically synthesized
tgcttgactacagtaccagc

SEQ ID NO: 1027 - DNA, 20 bp, Artificial Sequence
  chemically synthesized
ttgactacagtaccagcagg

SEQ ID NO: 1028 - DNA, 20 bp, Artificial Sequence
  chemically synthesized
gactacagtaccagcaggca

SEQ ID NO: 1029 - DNA, 20 bp, Artificial Sequence
  chemically synthesized
gcagagcattacgtacaaat

SEQ ID NO: 1030 - DNA, 20 bp, Artificial Sequence
  chemically synthesized
cagagcattacgtacaaatc

SEQ ID NO: 1031 - DNA, 20 bp, Artificial Sequence
  chemically synthesized
gagcattacgtacaaatcag

SEQ ID NO: 1032 - DNA, 20 bp, Artificial Sequence
  chemically synthesized
ttacgtacaaatcaggagta

SEQ ID NO: 1033 - DNA, 20 bp, Artificial Sequence
  chemically synthesized
atcaggagtaaagctttcgt

SEQ ID NO: 1034 - DNA, 20 bp, Artificial Sequence
  chemically synthesized
gagtaaagctttcgtcagtg

SEQ ID NO: 1035 - DNA, 20 bp, Artificial Sequence
  chemically synthesized
agtgtagatgatcgtatcct

SEQ ID NO: 1036 - DNA, 20 bp, Artificial Sequence
  chemically synthesized
ctgagccatgtcttcttctg

SEQ ID NO: 1037 - DNA, 20 bp, Artificial Sequence
  chemically synthesized
agccatgtcttcttctgaag

SEQ ID NO: 1038 - DNA, 20 bp, Artificial Sequence
  chemically synthesized
cttcttctgaagtggctctc

SEQ ID NO: 1039 - DNA, 20 bp, Artificial Sequence
  chemically synthesized
cttctgaagtggctctccag

SEQ ID NO: 1040 - DNA, 20 bp, Artificial Sequence
  chemically synthesized
ttctgaagtggctctccaga

SEQ ID NO: 1041 - DNA, 20 bp, Artificial Sequence
  chemically synthesized
gtggctctccagaaggctgt

SEQ ID NO: 1042 - DNA, 20 bp, Artificial Sequence
  chemically synthesized
tctccagaaggctgtcagct

SEQ ID NO: 1043 - DNA, 20 bp, Artificial Sequence
  chemically synthesized
gattataaatatgttcatga

SEQ ID NO: 1044 - DNA, 20 bp, Artificial Sequence
  chemically synthesized
attataaatatgttcatgac

SEQ ID NO: 1045 - DNA, 20 bp, Artificial Sequence
  chemically synthesized
ttataaatatgttcatgaca

SEQ ID NO: 1046 - DNA, 20 bp, Artificial Sequence
  chemically synthesized
taaatatgttcatgacaggg

SEQ ID NO: 1047 - DNA, 20 bp, Artificial Sequence
  chemically synthesized
acagggtggcatctgcttca

SEQ ID NO: 1048 - DNA, 20 bp, Artificial Sequence
  chemically synthesized
gacatccacatctatgtgtg

SEQ ID NO: 1049 - DNA, 20 bp, Artificial Sequence
  chemically synthesized
atccacatctatgtgtgtgg

SEQ ID NO: 1050 - DNA, 20 bp, Artificial Sequence
  chemically synthesized
tccacatctatgtgtgtggt

SEQ ID NO: 1051 - DNA, 20 bp, Artificial Sequence
  chemically synthesized
tctatgtgtgtggtgggata

SEQ ID NO: 1052 - DNA, 20 bp, Artificial Sequence
  chemically synthesized
tatgtgtgtggtgggatatg

SEQ ID NO: 1053 - DNA, 20 bp, Artificial Sequence
  chemically synthesized
atggagcatacatgacttgc

SEQ ID NO: 1054 - DNA, 20 bp, Artificial Sequence
  chemically synthesized
agcatacatgacttgccgga

SEQ ID NO: 1055 - DNA, 20 bp, Artificial Sequence
  chemically synthesized
gcatacatgacttgccggaa

SEQ ID NO: 1056 - DNA, 20 bp, Artificial Sequence
  chemically synthesized
tacatgacttgccggaaagg

SEQ ID NO: 1057 - DNA, 20 bp, Artificial Sequence
  chemically synthesized
cttgccggaaaggcagcaca

SEQ ID NO: 1058 - DNA, 20 bp, Artificial Sequence
  chemically synthesized
gaaaggcagcacaaagcttc

SEQ ID NO: 1059 - DNA, 20 bp, Artificial Sequence
  chemically synthesized
gttgaatcctgtcaaaataa

SEQ ID NO: 1060 - DNA, 20 bp, Artificial Sequence
  chemically synthesized
ttgaatcctgtcaaaataaa

SEQ ID NO: 1061 - DNA, 20 bp, Artificial Sequence
  chemically synthesized
tgttttttaattttaaaaaa

SEQ ID NO: 1062 - DNA, 20 bp, Artificial Sequence
  chemically synthesized
ttaaaaaatggtctctgatt

SEQ ID NO: 1063 - DNA, 20 bp, Artificial Sequence
  chemically synthesized
catctctaaaaatttatcct

SEQ ID NO: 1064 - DNA, 20 bp, Artificial Sequence
  chemically synthesized
ctctaaaaatttatcctaag

SEQ ID NO: 1065 - DNA, 20 bp, Artificial Sequence
  chemically synthesized
tatcctaagaagctattcat

SEQ ID NO: 1066 - DNA, 20 bp, Artificial Sequence
  chemically synthesized
gctattcatgagtgtgtgca

SEQ ID NO: 1067 - DNA, 20 bp, Artificial Sequence
  chemically synthesized
catgagtgtgtgcaaagttt

SEQ ID NO: 1068 - DNA, 20 bp, Artificial Sequence
  chemically synthesized
tgtgtgcaaagttttagtga

SEQ ID NO: 1069 - DNA, 20 bp, Artificial Sequence
  chemically synthesized
gtgcaaagttttagtgacag

SEQ ID NO: 1070 - DNA, 20 bp, Artificial Sequence
  chemically synthesized
gttttagtgacagaagtgtt

SEQ ID NO: 1071 - DNA, 20 bp, Artificial Sequence
  chemically synthesized
agtgacagaagtgttcagta

SEQ ID NO: 1072 - DNA, 20 bp, Artificial Sequence
  chemically synthesized
agaagtgttcagtatagcat

SEQ ID NO: 1073 - DNA, 20 bp, Artificial Sequence
  chemically synthesized
cagtatagcattggtttcaa

SEQ ID NO: 1074 - DNA, 20 bp, Artificial Sequence
  chemically synthesized
tggtttcaatagcaaaacat

SEQ ID NO: 1075 - DNA, 20 bp, Artificial Sequence
  chemically synthesized
gcaaaacatcagaatgacct

SEQ ID NO: 1076 - DNA, 20 bp, Artificial Sequence
  chemically synthesized
cagaatgacctaagcatcca

SEQ ID NO: 1077 - DNA, 20 bp, Artificial Sequence
  chemically synthesized
agaatgacctaagcatccaa

SEQ ID NO: 1078 - DNA, 20 bp, Artificial Sequence
  chemically synthesized
atgacctaagcatccaaagg

SEQ ID NO: 1079 - DNA, 20 bp, Artificial Sequence
  chemically synthesized
acctaagcatccaaaggaag

SEQ ID NO: 1080 - DNA, 20 bp, Artificial Sequence
  chemically synthesized
agcatccaaaggaagtggtt

SEQ ID NO: 1081 - DNA, 20 bp, Artificial Sequence
  chemically synthesized
ataaaaatgaatttattatt

SEQ ID NO: 1082 - DNA, 20 bp, Artificial Sequence
  chemically synthesized
aatttattatttggcatcta

SEQ ID NO: 1083 - DNA, 20 bp, Artificial Sequence
  chemically synthesized
ttatttggcatctatagatg

SEQ ID NO: 1084 - DNA, 20 bp, Artificial Sequence
  chemically synthesized
atctatagatgaagttgttg

SEQ ID NO: 1085 - DNA, 20 bp, Artificial Sequence
  chemically synthesized
gaagtttgtgttgatattca

SEQ ID NO: 1086 - DNA, 20 bp, Artificial Sequence
  chemically synthesized
agtttgtgttgatattcaaa

SEQ ID NO: 1087 - DNA, 20 bp, Artificial Sequence
  chemically synthesized
gtttgtgttgatattcaaag

SEQ ID NO: 1088 - DNA, 20 bp, Artificial Sequence
  chemically synthesized
tgttgatattcaaagaggct

SEQ ID NO: 1089 - DNA, 20 bp, Artificial Sequence
  chemically synthesized
cttagaatctgctgtgaaaa

SEQ ID NO: 1090 - DNA, 20 bp, Artificial Sequence
  chemically synthesized
agaatctgctgtgaaaaaag

SEQ ID NO: 1091 - DNA, 20 bp, Artificial Sequence
  chemically synthesized
ctgctgtgaaaaaagcagat

SEQ ID NO: 1092 - DNA, 20 bp, Artificial Sequence
  chemically synthesized
aaaaagcagattagaacatg

SEQ ID NO: 1093 - DNA, 20 bp, Artificial Sequence
  chemically synthesized
aaagcagattagaacatgca

SEQ ID NO: 1094 - DNA, 20 bp, Artificial Sequence
  chemically synthesized
tagaacatgcagagatgatc

SEQ ID NO: 1095 - DNA, 20 bp, Artificial Sequence
  chemically synthesized
aacatgcagagatgatccag

SEQ ID NO: 1096 - DNA, 20 bp, Artificial Sequence
  chemically synthesized
acatgcagagatgatccagt

SEQ ID NO: 1097 - DNA, 20 bp, Artificial Sequence
  chemically synthesized
catgcagagatgatccagtg

SEQ ID NO: 1098 - DNA, 20 bp, Artificial Sequence
  chemically synthesized
atgcagagatgatccagtgg

SEQ ID NO: 1099 - DNA, 20 bp, Artificial Sequence
  chemically synthesized
cagagatgatccagtggggg

SEQ ID NO: 1100 - DNA, 20 bp, Artificial Sequence
  chemically synthesized
agagatgatccagtgggggt

SEQ ID NO: 1101 - DNA, 20 bp, Artificial Sequence
  chemically synthesized
agatgatccagtgggggtgg

SEQ ID NO: 1102 - DNA, 20 bp, Artificial Sequence
  chemically synthesized
cagtgggggtgggagtctta

SEQ ID NO: 1103 - DNA, 20 bp, Artificial Sequence
  chemically synthesized
cttaaagaaaatacatgcaa

SEQ ID NO: 1104 - DNA, 20 bp, Artificial Sequence
  chemically synthesized
ttaaagaaaatacatgcaaa

SEQ ID NO: 1105 - DNA, 20 bp, Artificial Sequence
  chemically synthesized
taaagaaaatacatgcaaaa

SEQ ID NO: 1106 - DNA, 20 bp, Artificial Sequence
  chemically synthesized
atacatgcaaaagggaaaaa

SEQ ID NO: 1107 - DNA, 20 bp, Artificial Sequence
  chemically synthesized
tgcaaaagggaaaaaaagac

SEQ ID NO: 1108 - DNA, 20 bp, Artificial Sequence
  chemically synthesized
aaagggaaaaaaagactaga

SEQ ID NO: 1109 - DNA, 20 bp, Artificial Sequence
  chemically synthesized
agggaaaaaaagactagaaa

SEQ ID NO: 1110 - DNA, 20 bp, Artificial Sequence
  chemically synthesized
agagatataccaaatattaa

SEQ ID NO: 1111 - DNA, 20 bp, Artificial Sequence
  chemically synthesized
gatataccaaatattaacag

SEQ ID NO: 1112 - DNA, 20 bp, Artificial Sequence
  chemically synthesized
atataccaaatattaacagt

SEQ ID NO: 1113 - DNA, 20 bp, Artificial Sequence
  chemically synthesized
tattaacagtgggtattcac

SEQ ID NO: 1114 - DNA, 20 bp, Artificial Sequence
  chemically synthesized
ttcactggattcaaaattac

SEQ ID NO: 1115 - DNA, 20 bp, Artificial Sequence
  chemically synthesized
attattctatgcacctcaat

SEQ ID NO: 1116 - DNA, 20 bp, Artificial Sequence
  chemically synthesized
aaatttacttctttcctaat

SEQ ID NO: 1117 - DNA, 20 bp, Artificial Sequence
  chemically synthesized
ttacttctttcctaatcagt

SEQ ID NO: 1118 - DNA, 20 bp, Artificial Sequence
  chemically synthesized
tacttctttcctaatcagtt

SEQ ID NO: 1119 - DNA, 20 bp, Artificial Sequence
  chemically synthesized
acttctttcctaatcagttg

SEQ ID NO: 1120 - DNA, 20 bp, Artificial Sequence
  chemically synthesized
tctttcctaatcagttgggg

SEQ ID NO: 1121 - DNA, 20 bp, Artificial Sequence
  chemically synthesized
tcctaatcagttggggtagc

SEQ ID NO: 1122 - DNA, 20 bp, Artificial Sequence
  chemically synthesized
aataataacctactgcgtat

SEQ ID NO: 1123 - DNA, 20 bp, Artificial Sequence
  chemically synthesized
ataataacctactgcgtatg

SEQ ID NO: 1124 - DNA, 20 bp, Artificial Sequence
  chemically synthesized
atgaggcactgtgctatgaa

SEQ ID NO: 1125 - DNA, 20 bp, Artificial Sequence
  chemically synthesized
gcactgtgctatgaacagaa

SEQ ID NO: 1126 - DNA, 20 bp, Artificial Sequence
  chemically synthesized
ctgtgctatgaacagaacag

SEQ ID NO: 1127 - DNA, 20 bp, Artificial Sequence
  chemically synthesized
gctatgaacagaacagaaga

SEQ ID NO: 1128 - DNA, 20 bp, Artificial Sequence
  chemically synthesized
tatgaacagaacagaagaaa

SEQ ID NO: 1129 - DNA, 20 bp, Artificial Sequence
  chemically synthesized
atgaacagaacagaagaaag

SEQ ID NO: 1130 - DNA, 20 bp, Artificial Sequence
  chemically synthesized
atcatctttgtataatgtca

SEQ ID NO: 1131 - DNA, 20 bp, Artificial Sequence
  chemically synthesized
tcatctttgtataatgtcaa

SEQ ID NO: 1132 - DNA, 20 bp, Artificial Sequence
  chemically synthesized
ataatgtcaaaggtattttc

SEQ ID NO: 1133 - DNA, 20 bp, Artificial Sequence
  chemically synthesized
ctatatgatttgtatttgca

SEQ ID NO: 1134 - DNA, 20 bp, Artificial Sequence
  chemically synthesized
atatgatttgtatttgcatg

SEQ ID NO: 1135 - DNA, 20 bp, Artificial Sequence
  chemically synthesized
actattaaatattttttcat

SEQ ID NO: 1136 - DNA, 20 bp, Artificial Sequence
  chemically synthesized
aatattttttcattagatca

SEQ ID NO: 1137 - DNA, 20 bp, Artificial Sequence
  chemically synthesized
catagttttgaaatttcctc

SEQ ID NO: 1138 - DNA, 20 bp, Artificial Sequence
  chemically synthesized
atagttttgaaatttcctct

SEQ ID NO: 1139 - DNA, 20 bp, Artificial Sequence
  chemically synthesized
tgaaatttcctctaggcatc

SEQ ID NO: 1140 - DNA, 20 bp, Artificial Sequence
  chemically synthesized
tttcctctaggcatctggta

SEQ ID NO: 1141 - DNA, 20 bp, Artificial Sequence
  chemically synthesized
ttcctctaggcatctggtat

SEQ ID NO: 1142 - DNA, 20 bp, Artificial Sequence
  chemically synthesized
catctggtataggtcccttt

SEQ ID NO: 1143 - DNA, 20 bp, Artificial Sequence
  chemically synthesized
ctaaaattatataattaaat

SEQ ID NO: 1144 - DNA, 20 bp, Artificial Sequence
  chemically synthesized
aaaattatataattaaatga

SEQ ID NO: 1145 - DNA, 20 bp, Artificial Sequence
  chemically synthesized
aaattatataattaaatgag

SEQ ID NO: 1146 - DNA, 20 bp, Artificial Sequence
  chemically synthesized
aattatataattaaatgaga

SEQ ID NO: 1147 - DNA, 20 bp, Artificial Sequence
  chemically synthesized
taattaaatgagagggtgct

SEQ ID NO: 1148 - DNA, 20 bp, Artificial Sequence
  chemically synthesized
aattaaatgagagggtgctg

SEQ ID NO: 1149 - DNA, 20 bp, Artificial Sequence
  chemically synthesized
agagggtgctgaggaaacaa

SEQ ID NO: 1150 - DNA, 20 bp, Artificial Sequence
  chemically synthesized
gctgaggaaacaaaagtatt

SEQ ID NO: 1151 - DNA, 20 bp, Artificial Sequence
  chemically synthesized
gcactttattatgcctttaa

SEQ ID NO: 1152 - DNA, 20 bp, Artificial Sequence
  chemically synthesized
cactttattatgcctttaac

SEQ ID NO: 1153 - DNA, 20 bp, Artificial Sequence
  chemically synthesized
ctttattatgcctttaacag

SEQ ID NO: 1154 - DNA, 20 bp, Artificial Sequence
  chemically synthesized
tattatgcctttaacaggag

SEQ ID NO: 1155 - DNA, 20 bp, Artificial Sequence
  chemically synthesized
acaggagaagttctaattta

SEQ ID NO: 1156 - DNA, 20 bp, Artificial Sequence
  chemically synthesized
acagatatgtataactcaaa

SEQ ID NO: 1157 - DNA, 20 bp, Artificial Sequence
  chemically synthesized
gaaactacgtttcctttaac

SEQ ID NO: 1158 - DNA, 20 bp, Artificial Sequence
  chemically synthesized
tatttaaatactatcattct

SEQ ID NO: 1159 - DNA, 20 bp, Artificial Sequence
  chemically synthesized
atactatcattctgagttca

SEQ ID NO: 1160 - DNA, 20 bp, Artificial Sequence
  chemically synthesized
ctatcattctgagttcatag

SEQ ID NO: 1161 - DNA, 20 bp, Artificial Sequence
  chemically synthesized
acattattgaaaatgcacaa

SEQ ID NO: 1162 - DNA, 20 bp, Artificial Sequence
  chemically synthesized
ttttttatttcattttgccg

SEQ ID NO: 1163 - DNA, 20 bp, Artificial Sequence
  chemically synthesized
tttgccgtggctacatcctc

SEQ ID NO: 1164 - DNA, 20 bp, Artificial Sequence
  chemically synthesized
ccgtggctacatcctcaaga

SEQ ID NO: 1165 - DNA, 20 bp, Artificial Sequence
  chemically synthesized
tggctacatcctcaagaaag

SEQ ID NO: 1166 - DNA, 20 bp, Artificial Sequence
  chemically synthesized
ctcaagaaagtagtcactat

SEQ ID NO: 1167 - DNA, 20 bp, Artificial Sequence
  chemically synthesized
tgagacaatcacataaccat

SEQ ID NO: 1168 - DNA, 20 bp, Artificial Sequence
  chemically synthesized
gagacaatcacataaccatt

SEQ ID NO: 1169 - DNA, 20 bp, Artificial Sequence
  chemically synthesized
caatcacataaccattagga

SEQ ID NO: 1170 - DNA, 20 bp, Artificial Sequence
  chemically synthesized
aaagctatttcttcacgtct

SEQ ID NO: 1171 - DNA, 20 bp, Artificial Sequence
  chemically synthesized
aagctatttcttcacgtctt

SEQ ID NO: 1172 - DNA, 20 bp, Artificial Sequence
  chemically synthesized
tataattgaaataacaataa

SEQ ID NO: 1173 - DNA, 20 bp, Artificial Sequence
  chemically synthesized
ataacaataatagattcaac

SEQ ID NO: 1174 - DNA, 20 bp, Artificial Sequence
  chemically synthesized
taacaataatagattcaaca

SEQ ID NO: 1175 - DNA, 20 bp, Artificial Sequence
  chemically synthesized
tgaacaactttcttcccttt

SEQ ID NO: 1176 - DNA, 20 bp, Artificial Sequence
  chemically synthesized
ttctctgttttgctccttga

SEQ ID NO: 1177 - DNA, 20 bp, Artificial Sequence
  chemically synthesized
tctgttttgctccttgacag

SEQ ID NO: 1178 - DNA, 20 bp, Artificial Sequence
  chemically synthesized
ttgacagtagactcaaataa

SEQ ID NO: 1179 - DNA, 20 bp, Artificial Sequence
  chemically synthesized
tttctaatatatattatata

SEQ ID NO: 1180 - DNA, 20 bp, Artificial Sequence
  chemically synthesized
atatagaaatatatatattt

SEQ ID NO: 1181 - DNA, 20 bp, Artificial Sequence
  chemically synthesized
tatattttagtacacataca

SEQ ID NO: 1182 - DNA, 20 bp, Artificial Sequence
  chemically synthesized
atattttagtacacatacat

SEQ ID NO: 1183 - DNA, 20 bp, Artificial Sequence
  chemically synthesized
aggaattgcttaaatcctat

SEQ ID NO: 1184 - DNA, 20 bp, Artificial Sequence
  chemically synthesized
taaatcctataagcttctta

SEQ ID NO: 1185 - DNA, 20 bp, Artificial Sequence
  chemically synthesized
caataaaattcaaatctatt

SEQ ID NO: 1186 - DNA, 20 bp, Artificial Sequence
  chemically synthesized
ttcaaatctatttagttaaa

SEQ ID NO: 1187 - DNA, 20 bp, Artificial Sequence
  chemically synthesized
tttgatgtgcaacctgattt

SEQ ID NO: 1188 - DNA, 20 bp, Artificial Sequence
  chemically synthesized
agcatgtgttaaaaaaaaaa

SEQ ID NO: 1189 - DNA, 20 bp, Artificial Sequence
  chemically synthesized
gttaaaaaaaaaaaagtcct

SEQ ID NO: 1190 - DNA, 20 bp, Artificial Sequence
  chemically synthesized
ttaaaaaaaaaaaagtcctg

SEQ ID NO: 1191 - DNA, 20 bp, Artificial Sequence
  chemically synthesized
aaaaaaaaaagtcctgaggc

SEQ ID NO: 1192 - DNA, 20 bp, Artificial Sequence
  chemically synthesized
aagtcctgaggctagacatg

SEQ ID NO: 1193 - DNA, 20 bp, Artificial Sequence
  chemically synthesized
agtcctgaggctagacatgt

SEQ ID NO: 1194 - DNA, 20 bp, Artificial Sequence
  chemically synthesized
tgaggctagacatgtaggaa

SEQ ID NO: 1195 - DNA, 20 bp, Artificial Sequence
  chemically synthesized
gaggctagacatgtaggaac

SEQ ID NO: 1196 - DNA, 20 bp, Artificial Sequence
  chemically synthesized
aggctagacatgtaggaaca

SEQ ID NO: 1197 - DNA, 20 bp, Artificial Sequence
  chemically synthesized
tgtaggaacagggacccacc

SEQ ID NO: 1198 - DNA, 20 bp, Artificial Sequence
  chemically synthesized
agggacccacctggaacaca

SEQ ID NO: 1199 - DNA, 20 bp, Artificial Sequence
  chemically synthesized
gggacccacctggaacacaa

SEQ ID NO: 1200 - DNA, 20 bp, Artificial Sequence
  chemically synthesized
ggacccacctggaacacaaa

SEQ ID NO: 1201 - DNA, 20 bp, Artificial Sequence
  chemically synthesized
ggaacacaaagggtattcta

SEQ ID NO: 1202 - DNA, 20 bp, Artificial Sequence
  chemically synthesized
gatactaactataaatccat

SEQ ID NO: 1203 - DNA, 20 bp, Artificial Sequence
  chemically synthesized
ctataaatccataagacata

SEQ ID NO: 1204 - DNA, 20 bp, Artificial Sequence
  chemically synthesized
taagacatatagtctatgtg

SEQ ID NO: 1205 - DNA, 20 bp, Artificial Sequence
  chemically synthesized
tctatgtgcagaactgtgta

SEQ ID NO: 1206 - DNA, 20 bp, Artificial Sequence
  chemically synthesized
ctatgtgcagaactgtgtaa

SEQ ID NO: 1207 - DNA, 20 bp, Artificial Sequence
  chemically synthesized
tgtgcagaactgtgtaaagg

SEQ ID NO: 1208 - DNA, 20 bp, Artificial Sequence
  chemically synthesized
cagaactgtgtaaaggaagt

SEQ ID NO: 1209 - DNA, 20 bp, Artificial Sequence
  chemically synthesized
gtgtaaaggaagtcagtctc

SEQ ID NO: 1210 - DNA, 20 bp, Artificial Sequence
  chemically synthesized
tgtaaaggaagtcagtctct

SEQ ID NO: 1211 - DNA, 20 bp, Artificial Sequence
  chemically synthesized
gtctctgggcatgtcaatat

SEQ ID NO: 1212 - DNA, 20 bp, Artificial Sequence
  chemically synthesized
tacattaaatgctaatattt

SEQ ID NO: 1213 - DNA, 20 bp, Artificial Sequence
  chemically synthesized
atatttaagatttgtctata

SEQ ID NO: 1214 - DNA, 20 bp, Artificial Sequence
  chemically synthesized
atttaagatttgtctataaa

SEQ ID NO: 1215 - DNA, 20 bp, Artificial Sequence
  chemically synthesized
aagagtctcaaaaatgattt

SEQ ID NO: 1216 - DNA, 20 bp, Artificial Sequence
  chemically synthesized
tctcaaaaatgattttagaa

SEQ ID NO: 1217 - DNA, 20 bp, Artificial Sequence
  chemically synthesized
caaaaatgattttagaaaag

SEQ ID NO: 1218 - DNA, 20 bp, Artificial Sequence
  chemically synthesized
gtggtttcacttgtgataac

SEQ ID NO: 1219 - DNA, 20 bp, Artificial Sequence
  chemically synthesized
ataactagaaactatacctt

SEQ ID NO: 1220 - DNA, 20 bp, Artificial Sequence
  chemically synthesized
actagaaactatacctttag

SEQ ID NO: 1221 - DNA, 20 bp, Artificial Sequence
  chemically synthesized
ctagaaactatacctttagc

SEQ ID NO: 1222 - DNA, 20 bp, Artificial Sequence
  chemically synthesized
cctttagcaggccttgtaca

SEQ ID NO: 1223 - DNA, 20 bp, Artificial Sequence
  chemically synthesized
tttagcaggccttgtacaaa

SEQ ID NO: 1224 - DNA, 20 bp, Artificial Sequence
  chemically synthesized
tgattctgcttcacataacc

SEQ ID NO: 1225 - DNA, 20 bp, Artificial Sequence
  chemically synthesized
attctgcttcacataacctg

SEQ ID NO: 1226 - DNA, 20 bp, Artificial Sequence
  chemically synthesized
ctggagcattttctctctgc

SEQ ID NO: 1227 - DNA, 20 bp, Artificial Sequence
  chemically synthesized
ggagcattttctctctgctg

SEQ ID NO: 1228 - DNA, 20 bp, Artificial Sequence
  chemically synthesized
cattttctctctgctggagt

SEQ ID NO: 1229 - DNA, 20 bp, Artificial Sequence
  chemically synthesized
ctctctgctggagtcagaaa

SEQ ID NO: 1230 - DNA, 20 bp, Artificial Sequence
  chemically synthesized
tctctgctggagtcagaaaa

SEQ ID NO: 1231 - DNA, 20 bp, Artificial Sequence
  chemically synthesized
aatgttctgactatctataa

SEQ ID NO: 1232 - DNA, 20 bp, Artificial Sequence
  chemically synthesized
atctataaaagaaaatattt

SEQ ID NO: 1233 - DNA, 20 bp, Artificial Sequence
  chemically synthesized
tattttagcattaaaacatg

SEQ ID NO: 1234 - DNA, 20 bp, Artificial Sequence
  chemically synthesized
gcattaaaacatgaagtaaa

SEQ ID NO: 1235 - DNA, 20 bp, Artificial Sequence
  chemically synthesized
gaccactgatttgcttatga

SEQ ID NO: 1236 - DNA, 20 bp, Artificial Sequence
  chemically synthesized
ttatcaataaaacatatcct

SEQ ID NO: 1237 - DNA, 20 bp, Artificial Sequence
  chemically synthesized
taaaacatatcctaagaaat

SEQ ID NO: 1238 - DNA, 20 bp, Artificial Sequence
  chemically synthesized
cctaagaaataagtattctt

SEQ ID NO: 1239 - DNA, 20 bp, Artificial Sequence
  chemically synthesized
ataagtattctttagtcacc

SEQ ID NO: 1240 - DNA, 20 bp, Artificial Sequence
  chemically synthesized
ctttagtcacctggaatcca

SEQ ID NO: 1241 - DNA, 20 bp, Artificial Sequence
  chemically synthesized
tttagtcacctggaatccat

SEQ ID NO: 1242 - DNA, 20 bp, Artificial Sequence
  chemically synthesized
ctggaatccatgggatgtaa

SEQ ID NO: 1243 - DNA, 20 bp, Artificial Sequence
  chemically synthesized
gtaacagttgttgcttaaaa

SEQ ID NO: 1244 - DNA, 20 bp, Artificial Sequence
  chemically synthesized
taacagttgttgcttaaaat

SEQ ID NO: 1245 - DNA, 20 bp, Artificial Sequence
  chemically synthesized
aacagttgttgcttaaaata

SEQ ID NO: 1246 - DNA, 20 bp, Artificial Sequence
  chemically synthesized
tgcttaaaatagggattctg

SEQ ID NO: 1247 - DNA, 20 bp, Artificial Sequence
  chemically synthesized
attctgtggtcaaataaatt

SEQ ID NO: 1248 - DNA, 20 bp, Artificial Sequence
  chemically synthesized
aaataaatttagaaaatgct

SEQ ID NO: 1249 - DNA, 20 bp, Artificial Sequence
  chemically synthesized
tgcttggtaaatttactgta

SEQ ID NO: 1250 - DNA, 20 bp, Artificial Sequence
  chemically synthesized
atctcaaaacctttaacatt

SEQ ID NO: 1251 - DNA, 20 bp, Artificial Sequence
  chemically synthesized
ggctacatactgtgactctt

SEQ ID NO: 1252 - DNA, 20 bp, Artificial Sequence
  chemically synthesized
gctacatactgtgactcttc

SEQ ID NO: 1253 - DNA, 20 bp, Artificial Sequence
  chemically synthesized
caggtgaattatatcatctg

SEQ ID NO: 1254 - DNA, 20 bp, Artificial Sequence
  chemically synthesized
atatcatctgcagactttct

SEQ ID NO: 1255 - DNA, 20 bp, Artificial Sequence
  chemically synthesized
atttgaccatgcaactttta

SEQ ID NO: 1256 - DNA, 20 bp, Artificial Sequence
  chemically synthesized
caacttttatagcttctgtt

SEQ ID NO: 1257 - DNA, 20 bp, Artificial Sequence
  chemically synthesized
cttttatagcttctgtttag

SEQ ID NO: 1258 - DNA, 20 bp, Artificial Sequence
  chemically synthesized
ttttatagcttctgtttagt

SEQ ID NO: 1259 - DNA, 20 bp, Artificial Sequence
  chemically synthesized
ctacacatgaaattcgttgt

SEQ ID NO: 1260 - DNA, 20 bp, Artificial Sequence
  chemically synthesized
attcgttgtaagaaatatca

SEQ ID NO: 1261 - DNA, 20 bp, Artificial Sequence
  chemically synthesized
aagaaatatcaaagaatgtc

SEQ ID NO: 1262 - DNA, 20 bp, Artificial Sequence
  chemically synthesized
gaatgtccagatcctccaaa

SEQ ID NO: 1263 - DNA, 20 bp, Artificial Sequence
  chemically synthesized
tgtccagatcctccaaaaag

SEQ ID NO: 1264 - DNA, 20 bp, Artificial Sequence
  chemically synthesized
tccagatcctccaaaaagaa

SEQ ID NO: 1265 - DNA, 20 bp, Artificial Sequence
  chemically synthesized
tattgaatttgatttaaaat

SEQ ID NO: 1266 - DNA, 20 bp, Artificial Sequence
  chemically synthesized
tgaatttgatttaaaataag

SEQ ID NO: 1267 - DNA, 20 bp, Artificial Sequence
  chemically synthesized
gaatttgatttaaaataagc

SEQ ID NO: 1268 - DNA, 20 bp, Artificial Sequence
  chemically synthesized
atttaaaataagcaggtcat

SEQ ID NO: 1269 - DNA, 20 bp, Artificial Sequence
  chemically synthesized
tttaaaataagcaggtcatt

SEQ ID NO: 1270 - DNA, 20 bp, Artificial Sequence
  chemically synthesized
aaaataagcaggtcattggg

SEQ ID NO: 1271 - DNA, 20 bp, Artificial Sequence
  chemically synthesized
aaataagcaggtcattgggt

SEQ ID NO: 1272 - DNA, 20 bp, Artificial Sequence
  chemically synthesized
gcaggtcattgggtgggatt

SEQ ID NO: 1273 - DNA, 20 bp, Artificial Sequence
  chemically synthesized
ttctaataatatttgaccta

SEQ ID NO: 1274 - DNA, 20 bp, Artificial Sequence
  chemically synthesized
tatttgacctacagctctat

SEQ ID NO: 1275 - DNA, 20 bp, Artificial Sequence
  chemically synthesized
atttgacctacagctctatt

SEQ ID NO: 1276 - DNA, 20 bp, Artificial Sequence
  chemically synthesized
gctctattaggaaaaataaa

SEQ ID NO: 1277 - DNA, 20 bp, Artificial Sequence
  chemically synthesized
ctctattaggaaaaataaaa

SEQ ID NO: 1278 - DNA, 20 bp, Artificial Sequence
  chemically synthesized
tgaaattcaaaccatatcca

SEQ ID NO: 1279 - DNA, 20 bp, Artificial Sequence
  chemically synthesized
tatccacagttattatgtta

SEQ ID NO: 1280 - DNA, 20 bp, Artificial Sequence
  chemically synthesized
atccacagttattatgttaa

SEQ ID NO: 1281 - DNA, 20 bp, Artificial Sequence
  chemically synthesized
ccacagttattatgttaaag

SEQ ID NO: 1282 - DNA, 20 bp, Artificial Sequence
  chemically synthesized
cagttattatgttaaaggag

SEQ ID NO: 1283 - DNA, 20 bp, Artificial Sequence
  chemically synthesized
taaaggagtggttttcaacc

SEQ ID NO: 1284 - DNA, 20 bp, Artificial Sequence
  chemically synthesized
aaggagtggttttcaaccta

SEQ ID NO: 1285 - DNA, 20 bp, Artificial Sequence
  chemically synthesized
gagtggttttcaacctagag

SEQ ID NO: 1286 - DNA, 20 bp, Artificial Sequence
  chemically synthesized
tggttttcaacctagagtgg

SEQ ID NO: 1287 - DNA, 20 bp, Artificial Sequence
  chemically synthesized
cttctttctcaaattaaaac

SEQ ID NO: 1288 - DNA, 20 bp, Artificial Sequence
  chemically synthesized
ctcaaattaaaacaagataa

SEQ ID NO: 1289 - DNA, 20 bp, Artificial Sequence
  chemically synthesized
tcaaattaaaacaagataaa

SEQ ID NO: 1290 - DNA, 20 bp, Artificial Sequence
  chemically synthesized
attaaaacaagataaaaggt

SEQ ID NO: 1291 - DNA, 20 bp, Artificial Sequence
  chemically synthesized
aaggtaagctattctccctc

SEQ ID NO: 1292 - DNA, 20 bp, Artificial Sequence
  chemically synthesized
ggtaagctattctccctcaa

SEQ ID NO: 1293 - DNA, 20 bp, Artificial Sequence
  chemically synthesized
gtaagctattctccctcaag

SEQ ID NO: 1294 - DNA, 20 bp, Artificial Sequence
  chemically synthesized
gctattctccctcaagagga

SEQ ID NO: 1295 - DNA, 20 bp, Artificial Sequence
  chemically synthesized
tattctccctcaagaggatg

SEQ ID NO: 1296 - DNA, 20 bp, Artificial Sequence
  chemically synthesized
attctccctcaagaggatgg

SEQ ID NO: 1297 - DNA, 20 bp, Artificial Sequence
  chemically synthesized
tccctcaagaggatggagga

SEQ ID NO: 1298 - DNA, 20 bp, Artificial Sequence
  chemically synthesized
ccctcaagaggatggaggat

SEQ ID NO: 1299 - DNA, 20 bp, Artificial Sequence
  chemically synthesized
aaaaaaaaacactccaacta

SEQ ID NO: 1300 - DNA, 20 bp, Artificial Sequence
  chemically synthesized
aaaaaaacactccaactatg

SEQ ID NO: 1301 - DNA, 20 bp, Artificial Sequence
  chemically synthesized
ggagcctttctcccttcata

SEQ ID NO: 1302 - DNA, 20 bp, Artificial Sequence
  chemically synthesized
gcctttctcccttcataaag

SEQ ID NO: 1303 - DNA, 20 bp, Artificial Sequence
  chemically synthesized
tctcccttcataaagcagct

SEQ ID NO: 1304 - DNA, 20 bp, Artificial Sequence
  chemically synthesized
cccttcataaagcagctcgg

SEQ ID NO: 1305 - DNA, 20 bp, Artificial Sequence
  chemically synthesized
gcagtcactctgtgcaacct

SEQ ID NO: 1306 - DNA, 20 bp, Artificial Sequence
  chemically synthesized
cagtcactctgtgcaaccta

SEQ ID NO: 1307 - DNA, 20 bp, Artificial Sequence
  chemically synthesized
ctctgtgcaacctaaggctt

SEQ ID NO: 1308 - DNA, 20 bp, Artificial Sequence
  chemically synthesized
ctgtgcaacctaaggctttg

SEQ ID NO: 1309 - DNA, 20 bp, Artificial Sequence
  chemically synthesized
acctaaggctttggagatca

SEQ ID NO: 1310 - DNA, 20 bp, Artificial Sequence
  chemically synthesized
aaggctttggagatcacaga

SEQ ID NO: 1311 - DNA, 20 bp, Artificial Sequence
  chemically synthesized
ctttggagatcacagatgga

SEQ ID NO: 1312 - DNA, 20 bp, Artificial Sequence
  chemically synthesized
agatggaaagccacctgttt

SEQ ID NO: 1313 - DNA, 20 bp, Artificial Sequence
  chemically synthesized
gatggaaagccacctgtttg

SEQ ID NO: 1314 - DNA, 20 bp, Artificial Sequence
  chemically synthesized
aagccacctgtttgaggtaa

SEQ ID NO: 1315 - DNA, 20 bp, Artificial Sequence
  chemically synthesized
ccacctgtttgaggtaacag

SEQ ID NO: 1316 - DNA, 20 bp, Artificial Sequence
  chemically synthesized
cacctgtttgaggtaacaga

SEQ ID NO: 1317 - DNA, 20 bp, Artificial Sequence
  chemically synthesized
tttgaggtaacagaaggaat

SEQ ID NO: 1318 - DNA, 20 bp, Artificial Sequence
  chemically synthesized
ttgaggtaacagaaggaata

SEQ ID NO: 1319 - DNA, 20 bp, Artificial Sequence
  chemically synthesized
aacagaaggaataaggtcac

SEQ ID NO: 1320 - DNA, 20 bp, Artificial Sequence
  chemically synthesized
ggaataaggtcactagttcg

SEQ ID NO: 1321 - DNA, 20 bp, Artificial Sequence
  chemically synthesized
gtagatgcaatataatgaca

SEQ ID NO: 1322 - DNA, 20 bp, Artificial Sequence
  chemically synthesized
tagatgcaatataatgacac

SEQ ID NO: 1323 - DNA, 20 bp, Artificial Sequence
  chemically synthesized
tataatgacacaggtatact

SEQ ID NO: 1324 - DNA, 20 bp, Artificial Sequence
  chemically synthesized
gtatactaagctctcataaa

SEQ ID NO: 1325 - DNA, 20 bp, Artificial Sequence
  chemically synthesized
gctctcataaatggttatat

SEQ ID NO: 1326 - DNA, 20 bp, Artificial Sequence
  chemically synthesized
ttatatgagaaatataaatt

SEQ ID NO: 1327 - DNA, 20 bp, Artificial Sequence
  chemically synthesized
tatatgagaaatataaatta

SEQ ID NO: 1328 - DNA, 20 bp, Artificial Sequence
  chemically synthesized
aaggctcatgtaaatataca

SEQ ID NO: 1329 - DNA, 20 bp, Artificial Sequence
  chemically synthesized
gctcatgtaaatatacaaag

SEQ ID NO: 1330 - DNA, 20 bp, Artificial Sequence
  chemically synthesized
aaattatgaatatctttgta

SEQ ID NO: 1331 - DNA, 20 bp, Artificial Sequence
  chemically synthesized
taaaactttttttaaaaaat

SEQ ID NO: 1332 - DNA, 20 bp, Artificial Sequence
  chemically synthesized
aaaactttttttaaaaaatt

SEQ ID NO: 1333 - DNA, 20 bp, Artificial Sequence
  chemically synthesized
attaggtttgctgaaattga

SEQ ID NO: 1334 - DNA, 20 bp, Artificial Sequence
  chemically synthesized
tctgaactctttctaactaa

SEQ ID NO: 1335 - DNA, 20 bp, Artificial Sequence
  chemically synthesized
aactctttctaactaatggt

SEQ ID NO: 1336 - DNA, 20 bp, Artificial Sequence
  chemically synthesized
tttctaactaatggtcagtg

SEQ ID NO: 1337 - DNA, 20 bp, Artificial Sequence
  chemically synthesized
aactaatggtcagtgaagaa

SEQ ID NO: 1338 - DNA, 20 bp, Artificial Sequence
  chemically synthesized
aagaaaagtgcaaaatcctt

SEQ ID NO: 1339 - DNA, 20 bp, Artificial Sequence
  chemically synthesized
tgcaaaatcctttagtttat

SEQ ID NO: 1340 - DNA, 20 bp, Artificial Sequence
  chemically synthesized
ttagtttattagctaatgct

SEQ ID NO: 1341 - DNA, 20 bp, Artificial Sequence
  chemically synthesized
cattaatccttaattaactc

SEQ ID NO: 1342 - DNA, 20 bp, Artificial Sequence
  chemically synthesized
taatccttaattaactcaag

SEQ ID NO: 1343 - DNA, 20 bp, Artificial Sequence
  chemically synthesized
aattaactcaagtagcactg

SEQ ID NO: 1344 - DNA, 20 bp, Artificial Sequence
  chemically synthesized
attaactcaagtagcactga

SEQ ID NO: 1345 - DNA, 20 bp, Artificial Sequence
  chemically synthesized
actcaagtagcactgaagga

SEQ ID NO: 1346 - DNA, 20 bp, Artificial Sequence
  chemically synthesized
ctcaagtagcactgaaggaa

SEQ ID NO: 1347 - DNA, 20 bp, Artificial Sequence
  chemically synthesized
tcaagtagcactgaaggaaa

SEQ ID NO: 1348 - DNA, 20 bp, Artificial Sequence
  chemically synthesized
gtagcactgaaggaaagggt

SEQ ID NO: 1349 - DNA, 20 bp, Artificial Sequence
  chemically synthesized
gtcagaaacattactgaata

SEQ ID NO: 1350 - DNA, 20 bp, Artificial Sequence
  chemically synthesized
caatgaccacttaatcccaa

SEQ ID NO: 1351 - DNA, 20 bp, Artificial Sequence
  chemically synthesized
acttaatcccaatagctccc

SEQ ID NO: 1352 - DNA, 20 bp, Artificial Sequence
  chemically synthesized
taatcccaatagctccctag

SEQ ID NO: 1353 - DNA, 20 bp, Artificial Sequence
  chemically synthesized
aatcccaatagctccctaga

SEQ ID NO: 1354 - DNA, 20 bp, Artificial Sequence
  chemically synthesized
atcccaatagctccctagaa

SEQ ID NO: 1355 - DNA, 20 bp, Artificial Sequence
  chemically synthesized
caatagctccctagaaggga

SEQ ID NO: 1356 - DNA, 20 bp, Artificial Sequence
  chemically synthesized
ctccctagaagggacagatt

SEQ ID NO: 1357 - DNA, 20 bp, Artificial Sequence
  chemically synthesized
cctagaagggacagatttag

SEQ ID NO: 1358 - DNA, 20 bp, Artificial Sequence
  chemically synthesized
ctagaagggacagatttaga

SEQ ID NO: 1359 - DNA, 20 bp, Artificial Sequence
  chemically synthesized
aagggacagatttagaagga

SEQ ID NO: 1360 - DNA, 20 bp, Artificial Sequence
  chemically synthesized
acagatttagaaggaaagcg

SEQ ID NO: 1361 - DNA, 20 bp, Artificial Sequence
  chemically synthesized
aaagcgaagacaatgaaatc

SEQ ID NO: 1362 - DNA, 20 bp, Artificial Sequence
  chemically synthesized
ataaacaaataacatttctt

SEQ ID NO: 1363 - DNA, 20 bp, Artificial Sequence
  chemically synthesized
ttctttggaactactaccaa

SEQ ID NO: 1364 - DNA, 20 bp, Artificial Sequence
  chemically synthesized
caaaagtacatgactatctt

SEQ ID NO: 1365 - DNA, 20 bp, Artificial Sequence
  chemically synthesized
gactatcttcagatttgtta

SEQ ID NO: 1366 - DNA, 20 bp, Artificial Sequence
  chemically synthesized
agatttgttaaagataacat

SEQ ID NO: 1367 - DNA, 20 bp, Artificial Sequence
  chemically synthesized
gatttgttaaagataacatt

SEQ ID NO: 1368 - DNA, 20 bp, Artificial Sequence
  chemically synthesized
ttaaagataacattgggaaa

SEQ ID NO: 1369 - DNA, 20 bp, Artificial Sequence
  chemically synthesized
aagataacattgggaaatag

SEQ ID NO: 1370 - DNA, 20 bp, Artificial Sequence
  chemically synthesized
gataacattgggaaatagaa

SEQ ID NO: 1371 - DNA, 20 bp, Artificial Sequence
  chemically synthesized
catttatacactactgacac

SEQ ID NO: 1372 - DNA, 20 bp, Artificial Sequence
  chemically synthesized
ctactgacactggtatttcc

SEQ ID NO: 1373 - DNA, 20 bp, Artificial Sequence
  chemically synthesized
actgataaatgattcttact

SEQ ID NO: 1374 - DNA, 20 bp, Artificial Sequence
  chemically synthesized
ttcaaactcactgttgccac

SEQ ID NO: 1375 - DNA, 20 bp, Artificial Sequence
  chemically synthesized
tcaaactcactgttgccaca

SEQ ID NO: 1376 - DNA, 20 bp, Artificial Sequence
  chemically synthesized
actgttgccacaaggtgtct

SEQ ID NO: 1377 - DNA, 20 bp, Artificial Sequence
  chemically synthesized
aggtgtcttagcaatttgat

SEQ ID NO: 1378 - DNA, 20 bp, Artificial Sequence
  chemically synthesized
acattgcctccttatactac

SEQ ID NO: 1379 - DNA, 20 bp, Artificial Sequence
  chemically synthesized
gacaatccatgatatatcat

SEQ ID NO: 1380 - DNA, 20 bp, Artificial Sequence
  chemically synthesized
atgatatatcatcagtctta

SEQ ID NO: 1381 - DNA, 20 bp, Artificial Sequence
  chemically synthesized
gatatatcatcagtcttaaa

SEQ ID NO: 1382 - DNA, 20 bp, Artificial Sequence
  chemically synthesized
taaagagtcaaatcatttgc

SEQ ID NO: 1383 - DNA, 20 bp, Artificial Sequence
  chemically synthesized
tgcactgctacctactacaa

SEQ ID NO: 1384 - DNA, 20 bp, Artificial Sequence
  chemically synthesized
tgctacctactacaacggaa

SEQ ID NO: 1385 - DNA, 20 bp, Artificial Sequence
  chemically synthesized
ctactacaacggaacagcca

SEQ ID NO: 1386 - DNA, 20 bp, Artificial Sequence
  chemically synthesized
tactacaacggaacagccac

SEQ ID NO: 1387 - DNA, 20 bp, Artificial Sequence
  chemically synthesized
cggaacagccacaggtttgc

SEQ ID NO: 1388 - DNA, 20 bp, Artificial Sequence
  chemically synthesized
agccacaggtttgcaagtgt

SEQ ID NO: 1389 - DNA, 20 bp, Artificial Sequence
  chemically synthesized
ggtttgcaagtgtgagctga

SEQ ID NO: 1390 - DNA, 20 bp, Artificial Sequence
  chemically synthesized
gtgtgagctgatggcactgt

SEQ ID NO: 1391 - DNA, 20 bp, Artificial Sequence
  chemically synthesized
gctgatggcactgtaagtta

SEQ ID NO: 1392 - DNA, 20 bp, Artificial Sequence
  chemically synthesized
gcactgtaagttaaagaaaa

SEQ ID NO: 1393 - DNA, 20 bp, Artificial Sequence
  chemically synthesized
aacaaactaaaaacaaaaaa

SEQ ID NO: 1394 - DNA, 20 bp, Artificial Sequence
  chemically synthesized
aaactaaaaacaaaaaaaag

SEQ ID NO: 1395 - DNA, 20 bp, Artificial Sequence
  chemically synthesized
aactaaaaacaaaaaaaagt

SEQ ID NO: 1396 - DNA, 20 bp, Artificial Sequence
  chemically synthesized
aaaaacaaaaaaaagtaggt

SEQ ID NO: 1397 - DNA, 20 bp, Artificial Sequence
  chemically synthesized
ggtgagctcttcaaataact

SEQ ID NO: 1398 - DNA, 20 bp, Artificial Sequence
  chemically synthesized
gctcttcaaataactcagaa

SEQ ID NO: 1399 - DNA, 20 bp, Artificial Sequence
  chemically synthesized
gctttatatgataaacaccg

SEQ ID NO: 1400 - DNA, 20 bp, Artificial Sequence
  chemically synthesized
atgataaacaccgaagctat

SEQ ID NO: 1401 - DNA, 20 bp, Artificial Sequence
  chemically synthesized
aatgttatcttttatttgta

SEQ ID NO: 1402 - DNA, 20 bp, Artificial Sequence
  chemically synthesized
atgttatcttttatttgtat

SEQ ID NO: 1403 - DNA, 20 bp, Artificial Sequence
  chemically synthesized
gtataggaacctacattttc

SEQ ID NO: 1404 - DNA, 20 bp, Artificial Sequence
  chemically synthesized
ataggaacctacattttcta

SEQ ID NO: 1405 - DNA, 20 bp, Artificial Sequence
  chemically synthesized
cattttctagagacctttca

SEQ ID NO: 1406 - DNA, 20 bp, Artificial Sequence
  chemically synthesized
ttcacagaaattttcttatt

SEQ ID NO: 1407 - DNA, 20 bp, Artificial Sequence
  chemically synthesized
tttcttattgagccttaaaa

SEQ ID NO: 1408 - DNA, 20 bp, Artificial Sequence
  chemically synthesized
gagccttaaaacagcccaat

SEQ ID NO: 1409 - DNA, 20 bp, Artificial Sequence
  chemically synthesized
cttaaaacagcccaattagt

SEQ ID NO: 1410 - DNA, 20 bp, Artificial Sequence
  chemically synthesized
attgaaataccatcatttta

SEQ ID NO: 1411 - DNA, 20 bp, Artificial Sequence
  chemically synthesized
ataccatcattttatagctg

SEQ ID NO: 1412 - DNA, 20 bp, Artificial Sequence
  chemically synthesized
tagctgaagaaattgacatg

SEQ ID NO: 1413 - DNA, 20 bp, Artificial Sequence
  chemically synthesized
gctgaagaaattgacatgta

SEQ ID NO: 1414 - DNA, 20 bp, Artificial Sequence
  chemically synthesized
tgaagaaattgacatgtaga

SEQ ID NO: 1415 - DNA, 20 bp, Artificial Sequence
  chemically synthesized
aattgacatgtagagagatt

SEQ ID NO: 1416 - DNA, 20 bp, Artificial Sequence
  chemically synthesized
gagattaagtgacttactta

SEQ ID NO: 1417 - DNA, 20 bp, Artificial Sequence
  chemically synthesized
gtgacttacttaaagtcaaa

SEQ ID NO: 1418 - DNA, 20 bp, Artificial Sequence
  chemically synthesized
tgacttacttaaagtcaaat

SEQ ID NO: 1419 - DNA, 20 bp, Artificial Sequence
  chemically synthesized
ggatttaaaatgatgtatga

SEQ ID NO: 1420 - DNA, 20 bp, Artificial Sequence
  chemically synthesized
gatttaaaatgatgtatgaa

SEQ ID NO: 1421 - DNA, 20 bp, Artificial Sequence
  chemically synthesized
tatgaaaggctgacactgaa

SEQ ID NO: 1422 - DNA, 20 bp, Artificial Sequence
  chemically synthesized
aggctgacactgaacagata

SEQ ID NO: 1423 - DNA, 20 bp, Artificial Sequence
  chemically synthesized
ggctgacactgaacagatac

SEQ ID NO: 1424 - DNA, 20 bp, Artificial Sequence
  chemically synthesized
actgaacagatacaggacta

SEQ ID NO: 1425 - DNA, 20 bp, Artificial Sequence
  chemically synthesized
gactaaagtgcttctgattc

SEQ ID NO: 1426 - DNA, 20 bp, Artificial Sequence
  chemically synthesized
tgcttctgattcaagccatt

SEQ ID NO: 1427 - DNA, 20 bp, Artificial Sequence
  chemically synthesized
gcttctgattcaagccatta

SEQ ID NO: 1428 - DNA, 20 bp, Artificial Sequence
  chemically synthesized
attcaagccattaaggctct

SEQ ID NO: 1429 - DNA, 20 bp, Artificial Sequence
  chemically synthesized
ttcaagccattaaggctctt

SEQ ID NO: 1430 - DNA, 20 bp, Artificial Sequence
  chemically synthesized
tgcctctgatactccatcat

SEQ ID NO: 1431 - DNA, 20 bp, Artificial Sequence
  chemically synthesized
gatactccatcatgagccta

SEQ ID NO: 1432 - DNA, 20 bp, Artificial Sequence
  chemically synthesized
atactccatcatgagcctaa

SEQ ID NO: 1433 - DNA, 20 bp, Artificial Sequence
  chemically synthesized
ccatcatgagcctaaaggaa

SEQ ID NO: 1434 - DNA, 20 bp, Artificial Sequence
  chemically synthesized
ggaaaagactgtgaacataa

SEQ ID NO: 1435 - DNA, 20 bp, Artificial Sequence
  chemically synthesized
ttttacttctcttttattaa

SEQ ID NO: 1436 - DNA, 20 bp, Artificial Sequence
  chemically synthesized
catgaaaatctgtaactgtg

SEQ ID NO: 1437 - DNA, 20 bp, Artificial Sequence
  chemically synthesized
actgtgaagaaactttaaaa

SEQ ID NO: 1438 - DNA, 20 bp, Artificial Sequence
  chemically synthesized
gaaactttaaaacagaatat

SEQ ID NO: 1439 - DNA, 20 bp, Artificial Sequence
  chemically synthesized
aatataagataatacatgta

SEQ ID NO: 1440 - DNA, 20 bp, Artificial Sequence
  chemically synthesized
gataatacatgtaaagcaac

SEQ ID NO: 1441 - DNA, 20 bp, Artificial Sequence
  chemically synthesized
tacatgtaaagcaactagta

SEQ ID NO: 1442 - DNA, 20 bp, Artificial Sequence
  chemically synthesized
acatgtaaagcaactagtaa

SEQ ID NO: 1443 - DNA, 20 bp, Artificial Sequence
  chemically synthesized
ctagtaaaggaactaacatg

SEQ ID NO: 1444 - DNA, 20 bp, Artificial Sequence
  chemically synthesized
tagtaaaggaactaacatgt

SEQ ID NO: 1445 - DNA, 20 bp, Artificial Sequence
  chemically synthesized
tgtaggcactcaacaaatac

SEQ ID NO: 1446 - DNA, 20 bp, Artificial Sequence
  chemically synthesized
caacaaatactggctatttc

SEQ ID NO: 1447 - DNA, 20 bp, Artificial Sequence
  chemically synthesized
caaatactggctatttctag

SEQ ID NO: 1448 - DNA, 20 bp, Artificial Sequence
  chemically synthesized
atttctagaagaaatgtaaa

SEQ ID NO: 1449 - DNA, 20 bp, Artificial Sequence
  chemically synthesized
tttctagaagaaatgtaaat

SEQ ID NO: 1450 - DNA, 20 bp, Artificial Sequence
  chemically synthesized
gaaatgtaaataggaaatgt

SEQ ID NO: 1451 - DNA, 20 bp, Artificial Sequence
  chemically synthesized
aaataggaaatgttagctat

SEQ ID NO: 1452 - DNA, 20 bp, Artificial Sequence
  chemically synthesized
gttagctatgagctattatt

SEQ ID NO: 1453 - DNA, 20 bp, Artificial Sequence
  chemically synthesized
tattaagtgtttttatgttc

SEQ ID NO: 1454 - DNA, 20 bp, Artificial Sequence
  chemically synthesized
attaagtgtttttatgttcc

SEQ ID NO: 1455 - DNA, 20 bp, Artificial Sequence
  chemically synthesized
tatgttccaggcactgttct

SEQ ID NO: 1456 - DNA, 20 bp, Artificial Sequence
  chemically synthesized
cttataacaaccctacacat

SEQ ID NO: 1457 - DNA, 20 bp, Artificial Sequence
  chemically synthesized
ttataacaaccctacacatt

SEQ ID NO: 1458 - DNA, 20 bp, Artificial Sequence
  chemically synthesized
ttactattattgccatttta

SEQ ID NO: 1459 - DNA, 20 bp, Artificial Sequence
  chemically synthesized
attattgccattttacagat

SEQ ID NO: 1460 - DNA, 20 bp, Artificial Sequence
  chemically synthesized
ttattgccattttacagatg

SEQ ID NO: 1461 - DNA, 20 bp, Artificial Sequence
  chemically synthesized
ccattttacagatgaggaaa

SEQ ID NO: 1462 - DNA, 20 bp, Artificial Sequence
  chemically synthesized
cattttacagatgaggaaat

SEQ ID NO: 1463 - DNA, 20 bp, Artificial Sequence
  chemically synthesized
cagatgaggaaataggtgta

SEQ ID NO: 1464 - DNA, 20 bp, Artificial Sequence
  chemically synthesized
gatgaggaaataggtgtata

SEQ ID NO: 1465 - DNA, 20 bp, Artificial Sequence
  chemically synthesized
aaataggtgtatagagaatt

SEQ ID NO: 1466 - DNA, 20 bp, Artificial Sequence
  chemically synthesized
aataggtgtatagagaattc

SEQ ID NO: 1467 - DNA, 20 bp, Artificial Sequence
  chemically synthesized
gaattcaggcaccttgccca

SEQ ID NO: 1468 - DNA, 20 bp, Artificial Sequence
  chemically synthesized
aattcaggcaccttgcccac

SEQ ID NO: 1469 - DNA, 20 bp, Artificial Sequence
  chemically synthesized
gcaccttgcccacgggtaca

SEQ ID NO: 1470 - DNA, 20 bp, Artificial Sequence
  chemically synthesized
acgggtacacagcattaatc

SEQ ID NO: 1471 - DNA, 20 bp, Artificial Sequence
  chemically synthesized
cgggtacacagcattaatcc

SEQ ID NO: 1472 - DNA, 20 bp, Artificial Sequence
  chemically synthesized
gggtacacagcattaatcca

SEQ ID NO: 1473 - DNA, 20 bp, Artificial Sequence
  chemically synthesized
gtacacagcattaatccagg

SEQ ID NO: 1474 - DNA, 20 bp, Artificial Sequence
  chemically synthesized
cagcattaatccagggagtc

SEQ ID NO: 1475 - DNA, 20 bp, Artificial Sequence
  chemically synthesized
taatccagggagtctggttt

SEQ ID NO: 1476 - DNA, 20 bp, Artificial Sequence
  chemically synthesized
aatccagggagtctggttta

SEQ ID NO: 1477 - DNA, 20 bp, Artificial Sequence
  chemically synthesized
atccagggagtctggtttaa

SEQ ID NO: 1478 - DNA, 20 bp, Artificial Sequence
  chemically synthesized
gtttaagggcacaaactctt

SEQ ID NO: 1479 - DNA, 20 bp, Artificial Sequence
  chemically synthesized
taagtactaaactccactgc

SEQ ID NO: 1480 - DNA, 20 bp, Artificial Sequence
  chemically synthesized
tactaaactccactgctgga

SEQ ID NO: 1481 - DNA, 20 bp, Artificial Sequence
  chemically synthesized
actccactgctggatggaaa

SEQ ID NO: 1482 - DNA, 20 bp, Artificial Sequence
  chemically synthesized
actgctggatggaaaaagat

SEQ ID NO: 1483 - DNA, 20 bp, Artificial Sequence
  chemically synthesized
gttctacgcctaaataactt

SEQ ID NO: 1484 - DNA, 20 bp, Artificial Sequence
  chemically synthesized
aaataacttaagttcatcta

SEQ ID NO: 1485 - DNA, 20 bp, Artificial Sequence
  chemically synthesized
tacagtacaacttaatatga

SEQ ID NO: 1486 - DNA, 20 bp, Artificial Sequence
  chemically synthesized
acagtacaacttaatatgaa

SEQ ID NO: 1487 - DNA, 20 bp, Artificial Sequence
  chemically synthesized
ttaatatgaaaggattctgt

SEQ ID NO: 1488 - DNA, 20 bp, Artificial Sequence
  chemically synthesized
aggattctgttagctttaat

SEQ ID NO: 1489 - DNA, 20 bp, Artificial Sequence
  chemically synthesized
attctgttagctttaatgag

SEQ ID NO: 1490 - DNA, 20 bp, Artificial Sequence
  chemically synthesized
gctttaatgagaagtaaaac

SEQ ID NO: 1491 - DNA, 20 bp, Artificial Sequence
  chemically synthesized
tgagaagtaaaacaagaaac

SEQ ID NO: 1492 - DNA, 20 bp, Artificial Sequence
  chemically synthesized
taaaacaagaaaccagaatc

SEQ ID NO: 1493 - DNA, 20 bp, Artificial Sequence
  chemically synthesized
acaagaaaccagaatcaagc

SEQ ID NO: 1494 - DNA, 20 bp, Artificial Sequence
  chemically synthesized
caagaaaccagaatcaagca

SEQ ID NO: 1495 - DNA, 20 bp, Artificial Sequence
  chemically synthesized
aagaaaccagaatcaagcaa

SEQ ID NO: 1496 - DNA, 20 bp, Artificial Sequence
  chemically synthesized
agaaaccagaatcaagcaag

SEQ ID NO: 1497 - DNA, 20 bp, Artificial Sequence
  chemically synthesized
aggggccatgatttcttgtc

SEQ ID NO: 1498 - DNA, 20 bp, Artificial Sequence
  chemically synthesized
ggggccatgatttcttgtct

SEQ ID NO: 1499 - DNA, 20 bp, Artificial Sequence
  chemically synthesized
ccatgatttcttgtctggga

SEQ ID NO: 1500 - DNA, 20 bp, Artificial Sequence
  chemically synthesized
tcttgtctgggatggaaact

SEQ ID NO: 1501 - DNA, 20 bp, Artificial Sequence
  chemically synthesized
ggaaactcggtttctttaaa

SEQ ID NO: 1502 - DNA, 20 bp, Artificial Sequence
  chemically synthesized
cggtttctttaaatagcaaa

SEQ ID NO: 1503 - DNA, 20 bp, Artificial Sequence
  chemically synthesized
ggaataacaccaaatatata

SEQ ID NO: 1504 - DNA, 20 bp, Artificial Sequence
  chemically synthesized
aatatatatagaaatataat

SEQ ID NO: 1505 - DNA, 20 bp, Artificial Sequence
  chemically synthesized
gtgaaaaataacacaaattt

SEQ ID NO: 1506 - DNA, 20 bp, Artificial Sequence
  chemically synthesized
aataacacaaatttaagcaa

SEQ ID NO: 1507 - DNA, 20 bp, Artificial Sequence
  chemically synthesized
gttcaaatacgtaatgtccc

SEQ ID NO: 1508 - DNA, 20 bp, Artificial Sequence
  chemically synthesized
taatgtccctagaacaatct

SEQ ID NO: 1509 - DNA, 20 bp, Artificial Sequence
  chemically synthesized
tgtccctagaacaatctaag

SEQ ID NO: 1510 - DNA, 20 bp, Artificial Sequence
  chemically synthesized
cctagaacaatctaagtaga

SEQ ID NO: 1511 - DNA, 20 bp, Artificial Sequence
  chemically synthesized
ctttcttccaaatcttgtca

SEQ ID NO: 1512 - DNA, 20 bp, Artificial Sequence
  chemically synthesized
tttcttccaaatcttgtcat

SEQ ID NO: 1513 - DNA, 20 bp, Artificial Sequence
  chemically synthesized
ttccaaatcttgtcataggt

SEQ ID NO: 1514 - DNA, 20 bp, Artificial Sequence
  chemically synthesized
atcttgtcataggtgagcat

SEQ ID NO: 1515 - DNA, 20 bp, Artificial Sequence
  chemically synthesized
tgtcataggtgagcataaga

SEQ ID NO: 1516 - DNA, 20 bp, Artificial Sequence
  chemically synthesized
aagatggtatctgcttcatc

SEQ ID NO: 1517 - DNA, 20 bp, Artificial Sequence
  chemically synthesized
cttcatccagcttttatgaa

SEQ ID NO: 1518 - DNA, 20 bp, Artificial Sequence
  chemically synthesized
gaaaagaaaaattcttactt

SEQ ID NO: 1519 - DNA, 20 bp, Artificial Sequence
  chemically synthesized
aagaaaaattcttacttgag

SEQ ID NO: 1520 - DNA, 20 bp, Artificial Sequence
  chemically synthesized
aaaattcttacttgagaaga

SEQ ID NO: 1521 - DNA, 20 bp, Artificial Sequence
  chemically synthesized
tgagaagaaagccttcatga

SEQ ID NO: 1522 - DNA, 20 bp, Artificial Sequence
  chemically synthesized
tcaccaatatcatcatcatt

SEQ ID NO: 1523 - DNA, 20 bp, Artificial Sequence
  chemically synthesized
atcatcattgagtactgtat

SEQ ID NO: 1524 - DNA, 20 bp, Artificial Sequence
  chemically synthesized
gcatcaaaaaataaaaaaat

SEQ ID NO: 1525 - DNA, 20 bp, Artificial Sequence
  chemically synthesized
aaaaaataaaaaaattagtc

SEQ ID NO: 1526 - DNA, 20 bp, Artificial Sequence
  chemically synthesized
aaattagtctggctgtaaca

SEQ ID NO: 1527 - DNA, 20 bp, Artificial Sequence
  chemically synthesized
aaataacacttttaatatac

SEQ ID NO: 1528 - DNA, 20 bp, Artificial Sequence
  chemically synthesized
acttttaatatacaagtttt

SEQ ID NO: 1529 - DNA, 20 bp, Artificial Sequence
  chemically synthesized
tttaatatacaagttttcgg

SEQ ID NO: 1530 - DNA, 20 bp, Artificial Sequence
  chemically synthesized
tatacaagttttcggaagtc

SEQ ID NO: 1531 - DNA, 20 bp, Artificial Sequence
  chemically synthesized
aacacactgccttcatttcc

SEQ ID NO: 1532 - DNA, 20 bp, Artificial Sequence
  chemically synthesized
tgccttcatttccgagaatc

SEQ ID NO: 1533 - DNA, 20 bp, Artificial Sequence
  chemically synthesized
ctgtgcactaccataaactt

SEQ ID NO: 1534 - DNA, 20 bp, Artificial Sequence
  chemically synthesized
tgcactaccataaacttcag

SEQ ID NO: 1535 - DNA, 20 bp, Artificial Sequence
  chemically synthesized
cttcagaagaacaaatgtga

SEQ ID NO: 1536 - DNA, 20 bp, Artificial Sequence
  chemically synthesized
agaagaacaaatgtgaaagc

SEQ ID NO: 1537 - DNA, 20 bp, Artificial Sequence
  chemically synthesized
aacaaatgtgaaagctggtc

SEQ ID NO: 1538 - DNA, 20 bp, Artificial Sequence
  chemically synthesized
aaatgtgaaagctggtcaag

SEQ ID NO: 1539 - DNA, 20 bp, Artificial Sequence
  chemically synthesized
aatgtgaaagctggtcaagc

SEQ ID NO: 1540 - DNA, 20 bp, Artificial Sequence
  chemically synthesized
gcaggttaaacaatttttac

SEQ ID NO: 1541 - DNA, 20 bp, Artificial Sequence
  chemically synthesized
caagaacaacttcctcttct

SEQ ID NO: 1542 - DNA, 20 bp, Artificial Sequence
  chemically synthesized
aacttcctcttctgagctgt

SEQ ID NO: 1543 - DNA, 20 bp, Artificial Sequence
  chemically synthesized
ctcttctgagctgtcagaat

SEQ ID NO: 1544 - DNA, 20 bp, Artificial Sequence
  chemically synthesized
tcttctgagctgtcagaatc

SEQ ID NO: 1545 - DNA, 20 bp, Artificial Sequence
  chemically synthesized
ttctgagctgtcagaatcag

SEQ ID NO: 1546 - DNA, 20 bp, Artificial Sequence
  chemically synthesized
actaacctaaatgacaaaat

SEQ ID NO: 1547 - DNA, 20 bp, Artificial Sequence
  chemically synthesized
tgacaaaatcagaaaacaac

SEQ ID NO: 1548 - DNA, 20 bp, Artificial Sequence
  chemically synthesized
aaatcagaaaacaacaagaa

SEQ ID NO: 1549 - DNA, 20 bp, Artificial Sequence
  chemically synthesized
acaacaagaatagtttccta

SEQ ID NO: 1550 - DNA, 20 bp, Artificial Sequence
  chemically synthesized
caacaagaatagtttcctaa

SEQ ID NO: 1551 - DNA, 20 bp, Artificial Sequence
  chemically synthesized
aaggtatctcttaacactca

SEQ ID NO: 1552 - DNA, 20 bp, Artificial Sequence
  chemically synthesized
aacgtcctcaacaaatgatt

SEQ ID NO: 1553 - DNA, 20 bp, Artificial Sequence
  chemically synthesized
acgtcctcaacaaatgatta

SEQ ID NO: 1554 - DNA, 20 bp, Artificial Sequence
  chemically synthesized
gaaactaaatttgtgactac

SEQ ID NO: 1555 - DNA, 20 bp, Artificial Sequence
  chemically synthesized
tacaagtaaacttccattaa

SEQ ID NO: 1556 - DNA, 20 bp, Artificial Sequence
  chemically synthesized
tccattaatggttactactt

SEQ ID NO: 1557 - DNA, 20 bp, Artificial Sequence
  chemically synthesized
atggttactactttggcaca

SEQ ID NO: 1558 - DNA, 20 bp, Artificial Sequence
  chemically synthesized
ggcacacagttttgtttcaa

SEQ ID NO: 1559 - DNA, 20 bp, Artificial Sequence
  chemically synthesized
taaatattaattgctcctat

SEQ ID NO: 1560 - DNA, 20 bp, Artificial Sequence
  chemically synthesized
aatattaattgctcctataa

SEQ ID NO: 1561 - DNA, 20 bp, Artificial Sequence
  chemically synthesized
ttaattgctcctataagagc

SEQ ID NO: 1562 - DNA, 20 bp, Artificial Sequence
  chemically synthesized
taattgctcctataagagct

SEQ ID NO: 1563 - DNA, 20 bp, Artificial Sequence
  chemically synthesized
agctgggatcctcccacttt

SEQ ID NO: 1564 - DNA, 20 bp, Artificial Sequence
  chemically synthesized
gctgggatcctcccactttt

SEQ ID NO: 1565 - DNA, 20 bp, Artificial Sequence
  chemically synthesized
cccacttttaggaattataa

SEQ ID NO: 1566 - DNA, 20 bp, Artificial Sequence
  chemically synthesized
ctctgttttgccataaaatc

SEQ ID NO: 1567 - DNA, 20 bp, Artificial Sequence
  chemically synthesized
tctgttttgccataaaatcc

SEQ ID NO: 1568 - DNA, 20 bp, Artificial Sequence
  chemically synthesized
ttgtgtgtgcttatttgcta

SEQ ID NO: 1569 - DNA, 20 bp, Artificial Sequence
  chemically synthesized
tgtgtgcttatttgctaaag

SEQ ID NO: 1570 - DNA, 20 bp, Artificial Sequence
  chemically synthesized
tggctaatactgtatgtgaa

SEQ ID NO: 1571 - DNA, 20 bp, Artificial Sequence
  chemically synthesized
tgtgaatagtatgtatgaca

SEQ ID NO: 1572 - DNA, 20 bp, Artificial Sequence
  chemically synthesized
aaagtccttactattaaaat

SEQ ID NO: 1573 - DNA, 20 bp, Artificial Sequence
  chemically synthesized
ataaccccaaaaaactcata

SEQ ID NO: 1574 - DNA, 20 bp, Artificial Sequence
  chemically synthesized
taaacttacatctatttctt

SEQ ID NO: 1575 - DNA, 20 bp, Artificial Sequence
  chemically synthesized
aaacttacatctatttcttc

SEQ ID NO: 1576 - DNA, 20 bp, Artificial Sequence
  chemically synthesized
aggaacactgtgtgatttca

SEQ ID NO: 1577 - DNA, 20 bp, Artificial Sequence
  chemically synthesized
ctgtgtgatttcatagatga

SEQ ID NO: 1578 - DNA, 20 bp, Artificial Sequence
  chemically synthesized
tgtgatttcatagatgaaag

SEQ ID NO: 1579 - DNA, 20 bp, Artificial Sequence
  chemically synthesized
agatgaaagcagttccatta

SEQ ID NO: 1580 - DNA, 20 bp, Artificial Sequence
  chemically synthesized
gatgaaagcagttccattac

SEQ ID NO: 1581 - DNA, 20 bp, Artificial Sequence
  chemically synthesized
cattacaggaatcacttctc

SEQ ID NO: 1582 - DNA, 20 bp, Artificial Sequence
  chemically synthesized
acaggaatcacttctccagt

SEQ ID NO: 1583 - DNA, 20 bp, Artificial Sequence
  chemically synthesized
atcacttctccagtaagcat

SEQ ID NO: 1584 - DNA, 20 bp, Artificial Sequence
  chemically synthesized
tactctgaccctgcacaata

SEQ ID NO: 1585 - DNA, 20 bp, Artificial Sequence
  chemically synthesized
ctgcacaataaagtgacatg

SEQ ID NO: 1586 - DNA, 20 bp, Artificial Sequence
  chemically synthesized
caataaagtgacatgaagtg

SEQ ID NO: 1587 - DNA, 20 bp, Artificial Sequence
  chemically synthesized
tgaagaaaatcacgtaatat

SEQ ID NO: 1588 - DNA, 20 bp, Artificial Sequence
  chemically synthesized
aagaaaatcacgtaatatga

SEQ ID NO: 1589 - DNA, 20 bp, Artificial Sequence
  chemically synthesized
aaaatcacgtaatatgagag

SEQ ID NO: 1590 - DNA, 20 bp, Artificial Sequence
  chemically synthesized
tcacgtaatatgagagaagc

SEQ ID NO: 1591 - DNA, 20 bp, Artificial Sequence
  chemically synthesized
cacgtaatatgagagaagct

SEQ ID NO: 1592 - DNA, 20 bp, Artificial Sequence
  chemically synthesized
cttcgtaatttgttcaaaca

SEQ ID NO: 1593 - DNA, 20 bp, Artificial Sequence
  chemically synthesized
gttcaaacacagtatcaaac

SEQ ID NO: 1594 - DNA, 20 bp, Artificial Sequence
  chemically synthesized
acaagtctactacatgtcta

SEQ ID NO: 1595 - DNA, 20 bp, Artificial Sequence
  chemically synthesized
caagtctactacatgtctaa

SEQ ID NO: 1596 - DNA, 20 bp, Artificial Sequence
  chemically synthesized
aaggatttatatgcaatcca

SEQ ID NO: 1597 - DNA, 20 bp, Artificial Sequence
  chemically synthesized
tcttttcttttttttttttt

SEQ ID NO: 1598 - DNA, 20 bp, Artificial Sequence
  chemically synthesized
ttctttttttttttttgaga

SEQ ID NO: 1599 - DNA, 20 bp, Artificial Sequence
  chemically synthesized
ctttttttttttttgagatg

SEQ ID NO: 1600 - DNA, 20 bp, Artificial Sequence
  chemically synthesized
ggagttttgctttcattgct

SEQ ID NO: 1601 - DNA, 20 bp, Artificial Sequence
  chemically synthesized
gagttttgctttcattgctc

SEQ ID NO: 1602 - DNA, 20 bp, Artificial Sequence
  chemically synthesized
tttgctttcattgctcaggc

SEQ ID NO: 1603 - DNA, 20 bp, Artificial Sequence
  chemically synthesized
tgctttcattgctcaggctg

SEQ ID NO: 1604 - DNA, 20 bp, Artificial Sequence
  chemically synthesized
ttgctcaggctggagtgcaa

SEQ ID NO: 1605 - DNA, 20 bp, Artificial Sequence
  chemically synthesized
ggagtgcaatggcgtgatct

SEQ ID NO: 1606 - DNA, 20 bp, Artificial Sequence
  chemically synthesized
ctcactgcaacctctcctcc

SEQ ID NO: 1607 - DNA, 20 bp, Artificial Sequence
  chemically synthesized
tcactgcaacctctcctccc

SEQ ID NO: 1608 - DNA, 20 bp, Artificial Sequence
  chemically synthesized
caacctctcctcccaggttc

SEQ ID NO: 1609 - DNA, 20 bp, Artificial Sequence
  chemically synthesized
ctctcctgtctcatcctccc

SEQ ID NO: 1610 - DNA, 20 bp, Artificial Sequence
  chemically synthesized
tcctgtctcatcctcccaag

SEQ ID NO: 1611 - DNA, 20 bp, Artificial Sequence
  chemically synthesized
gtctcatcctcccaagtagc

SEQ ID NO: 1612 - DNA, 20 bp, Artificial Sequence
  chemically synthesized
tctcatcctcccaagtagct

SEQ ID NO: 1613 - DNA, 20 bp, Artificial Sequence
  chemically synthesized
ctcccaagtagctgggacta

SEQ ID NO: 1614 - DNA, 20 bp, Artificial Sequence
  chemically synthesized
tcccaagtagctgggactat

SEQ ID NO: 1615 - DNA, 20 bp, Artificial Sequence
  chemically synthesized
ataggtgccgccaccatgcc

SEQ ID NO: 1616 - DNA, 20 bp, Artificial Sequence
  chemically synthesized
ccggctgatttttgtatttt

SEQ ID NO: 1617 - DNA, 20 bp, Artificial Sequence
  chemically synthesized
gctgatttttgtatttttag

SEQ ID NO: 1618 - DNA, 20 bp, Artificial Sequence
  chemically synthesized
tgatttttgtatttttagta

SEQ ID NO: 1619 - DNA, 20 bp, Artificial Sequence
  chemically synthesized
ttttgtatttttagtagaga

SEQ ID NO: 1620 - DNA, 20 bp, Artificial Sequence
  chemically synthesized
tttgtatttttagtagagac

SEQ ID NO: 1621 - DNA, 20 bp, Artificial Sequence
  chemically synthesized
ttgtatttttagtagagacg

SEQ ID NO: 1622 - DNA, 20 bp, Artificial Sequence
  chemically synthesized
gagacggggtttcgccatgt

SEQ ID NO: 1623 - DNA, 20 bp, Artificial Sequence
  chemically synthesized
cggggtttcgccatgttggc

SEQ ID NO: 1624 - DNA, 20 bp, Artificial Sequence
  chemically synthesized
ggggtttcgccatgttggcc

SEQ ID NO: 1625 - DNA, 20 bp, Artificial Sequence
  chemically synthesized
tttcgccatgttggccaggt

SEQ ID NO: 1626 - DNA, 20 bp, Artificial Sequence
  chemically synthesized
gtcaaatttctgaccatgcc

SEQ ID NO: 1627 - DNA, 20 bp, Artificial Sequence
  chemically synthesized
tctgaccatgcccggcccta

SEQ ID NO: 1628 - DNA, 20 bp, Artificial Sequence
  chemically synthesized
taaagctcacttttattctt

SEQ ID NO: 1629 - DNA, 20 bp, Artificial Sequence
  chemically synthesized
aagctcacttttattcttta

SEQ ID NO: 1630 - DNA, 20 bp, Artificial Sequence
  chemically synthesized
gctcacttttattctttaga

SEQ ID NO: 1631 - DNA, 20 bp, Artificial Sequence
  chemically synthesized
cttttattctttagagagta

SEQ ID NO: 1632 - DNA, 20 bp, Artificial Sequence
  chemically synthesized
tttagagagtatggaatcat

SEQ ID NO: 1633 - DNA, 20 bp, Artificial Sequence
  chemically synthesized
tactgttacatgcaatgatt

SEQ ID NO: 1634 - DNA, 20 bp, Artificial Sequence
  chemically synthesized
ttaagtcatcatgcctcttt

SEQ ID NO: 1635 - DNA, 20 bp, Artificial Sequence
  chemically synthesized
tcatcatgcctcttttagaa

SEQ ID NO: 1636 - DNA, 20 bp, Artificial Sequence
  chemically synthesized
aaagatctcctttaaaattt

SEQ ID NO: 1637 - DNA, 20 bp, Artificial Sequence
  chemically synthesized
gagataaaaaaaatttgtta

SEQ ID NO: 1638 - DNA, 20 bp, Artificial Sequence
  chemically synthesized
agataaaaaaaatttgttaa

SEQ ID NO: 1639 - DNA, 20 bp, Artificial Sequence
  chemically synthesized
tatatttcatatttaaaaat

SEQ ID NO: 1640 - DNA, 20 bp, Artificial Sequence
  chemically synthesized
atatttcatatttaaaaatg

SEQ ID NO: 1641 - DNA, 20 bp, Artificial Sequence
  chemically synthesized
atttaaaaatgaggaaaacc

SEQ ID NO: 1642 - DNA, 20 bp, Artificial Sequence
  chemically synthesized
tgaggaaaaccaagcacaaa

SEQ ID NO: 1643 - DNA, 20 bp, Artificial Sequence
  chemically synthesized
actttgaaatccttaccaaa

SEQ ID NO: 1644 - DNA, 20 bp, Artificial Sequence
  chemically synthesized
ctttgaaatccttaccaaat

SEQ ID NO: 1645 - DNA, 20 bp, Artificial Sequence
  chemically synthesized
gaaatccttaccaaataggt

SEQ ID NO: 1646 - DNA, 20 bp, Artificial Sequence
  chemically synthesized
aaatccttaccaaataggta

SEQ ID NO: 1647 - DNA, 20 bp, Artificial Sequence
  chemically synthesized
cctaacctccatactcataa

SEQ ID NO: 1648 - DNA, 20 bp, Artificial Sequence
  chemically synthesized
acccaaatgcaaatcaaaat

SEQ ID NO: 1649 - DNA, 20 bp, Artificial Sequence
  chemically synthesized
aaaatcagcacatatatttt

SEQ ID NO: 1650 - DNA, 20 bp, Artificial Sequence
  chemically synthesized
tattttaagaatcaataaaa

SEQ ID NO: 1651 - DNA, 20 bp, Artificial Sequence
  chemically synthesized
taaaacagaaaaattccctt

SEQ ID NO: 1652 - DNA, 20 bp, Artificial Sequence
  chemically synthesized
aaacagaaaaattcccttta

SEQ ID NO: 1653 - DNA, 20 bp, Artificial Sequence
  chemically synthesized
attccctttagagctatttc

SEQ ID NO: 1654 - DNA, 20 bp, Artificial Sequence
  chemically synthesized
aattgtaattttgaaatttg

SEQ ID NO: 1655 - DNA, 20 bp, Artificial Sequence
  chemically synthesized
attttgaaatttgtagtcta

SEQ ID NO: 1656 - DNA, 20 bp, Artificial Sequence
  chemically synthesized
atagaatcaaactgaaaatt

SEQ ID NO: 1657 - DNA, 20 bp, Artificial Sequence
  chemically synthesized
tataacacatcacaaatgta

SEQ ID NO: 1658 - DNA, 20 bp, Artificial Sequence
  chemically synthesized
aatgtaaagtgtctcaaata

SEQ ID NO: 1659 - DNA, 20 bp, Artificial Sequence
  chemically synthesized
taaagtgtctcaaatatgga

SEQ ID NO: 1660 - DNA, 20 bp, Artificial Sequence
  chemically synthesized
catttattcactaccaccac

SEQ ID NO: 1661 - DNA, 20 bp, Artificial Sequence
  chemically synthesized
actaccaccaccagtctcat

SEQ ID NO: 1662 - DNA, 20 bp, Artificial Sequence
  chemically synthesized
catcagttttgtgaccaact

SEQ ID NO: 1663 - DNA, 20 bp, Artificial Sequence
  chemically synthesized
gttttgtgaccaacttggtt

SEQ ID NO: 1664 - DNA, 20 bp, Artificial Sequence
  chemically synthesized
cttggttaagtaaatttttt

SEQ ID NO: 1665 - DNA, 20 bp, Artificial Sequence
  chemically synthesized
gtcaaatgactatgcatttt

SEQ ID NO: 1666 - DNA, 20 bp, Artificial Sequence
  chemically synthesized
ttttaaatcatacattattt

SEQ ID NO: 1667 - DNA, 20 bp, Artificial Sequence
  chemically synthesized
atttaagatgaatttaatac

SEQ ID NO: 1668 - DNA, 20 bp, Artificial Sequence
  chemically synthesized
ttatgaaatgattttactca

SEQ ID NO: 1669 - DNA, 20 bp, Artificial Sequence
  chemically synthesized
attttactcaaagtcttcat

SEQ ID NO: 1670 - DNA, 20 bp, Artificial Sequence
  chemically synthesized
aagtcttcataagcatcttt

SEQ ID NO: 1671 - DNA, 20 bp, Artificial Sequence
  chemically synthesized
cttcataagcatctttaagt

SEQ ID NO: 1672 - DNA, 20 bp, Artificial Sequence
  chemically synthesized
ctttaagttagaatctttgt

SEQ ID NO: 1673 - DNA, 20 bp, Artificial Sequence
  chemically synthesized
gttagaatctttgtcagacc

SEQ ID NO: 1674 - DNA, 20 bp, Artificial Sequence
  chemically synthesized
ttagaatctttgtcagaccc

SEQ ID NO: 1675 - DNA, 20 bp, Artificial Sequence
  chemically synthesized
tagaatctttgtcagaccca

SEQ ID NO: 1676 - DNA, 20 bp, Artificial Sequence
  chemically synthesized
gtcagacccagggccatttt

SEQ ID NO: 1677 - DNA, 20 bp, Artificial Sequence
  chemically synthesized
cagacccagggccatttttg

SEQ ID NO: 1678 - DNA, 20 bp, Artificial Sequence
  chemically synthesized
atttttggagtaaccttaac

SEQ ID NO: 1679 - DNA, 20 bp, Artificial Sequence
  chemically synthesized
agtaaccttaaccagttttt

SEQ ID NO: 1680 - DNA, 20 bp, Artificial Sequence
  chemically synthesized
taaccttaaccagtttttca

SEQ ID NO: 1681 - DNA, 20 bp, Artificial Sequence
  chemically synthesized
tttcagagccccatattatt

SEQ ID NO: 1682 - DNA, 20 bp, Artificial Sequence
  chemically synthesized
cccatattattaagttgctt

SEQ ID NO: 1683 - DNA, 20 bp, Artificial Sequence
  chemically synthesized
tttaaatgtgatgctacttc

SEQ ID NO: 1684 - DNA, 20 bp, Artificial Sequence
  chemically synthesized
aaatgtgatgctacttctgg

SEQ ID NO: 1685 - DNA, 20 bp, Artificial Sequence
  chemically synthesized
acttctggaagttttatcct

SEQ ID NO: 1686 - DNA, 20 bp, Artificial Sequence
  chemically synthesized
gcccatttgcataatgctga

SEQ ID NO: 1687 - DNA, 20 bp, Artificial Sequence
  chemically synthesized
tttaaaaaaaaaccatcctt

SEQ ID NO: 1688 - DNA, 20 bp, Artificial Sequence
  chemically synthesized
aactaactattcactgtttt

SEQ ID NO: 1689 - DNA, 20 bp, Artificial Sequence
  chemically synthesized
ttcactgtttttagttttta

SEQ ID NO: 1690 - DNA, 20 bp, Artificial Sequence
  chemically synthesized
attcacacattcaatctaac

SEQ ID NO: 1691 - DNA, 20 bp, Artificial Sequence
  chemically synthesized
aatctaacaagaataatgac

SEQ ID NO: 1692 - DNA, 20 bp, Artificial Sequence
  chemically synthesized
gttaaatttccttccctgtg

SEQ ID NO: 1693 - DNA, 20 bp, Artificial Sequence
  chemically synthesized
tccctgtgaagcaattttat

SEQ ID NO: 1694 - DNA, 20 bp, Artificial Sequence
  chemically synthesized
gaagcaattttatcagatga

SEQ ID NO: 1695 - DNA, 20 bp, Artificial Sequence
  chemically synthesized
tcagatgacagctacaactg

SEQ ID NO: 1696 - DNA, 20 bp, Artificial Sequence
  chemically synthesized
actaatgcatcatccccaaa

SEQ ID NO: 1697 - DNA, 20 bp, Artificial Sequence
  chemically synthesized
aaacagtattgttcaaaata

SEQ ID NO: 1698 - DNA, 20 bp, Artificial Sequence
  chemically synthesized
gttcaaaataaagtcgttgt

SEQ ID NO: 1699 - DNA, 20 bp, Artificial Sequence
  chemically synthesized
aaagtcgttgtgagatttgc

SEQ ID NO: 1700 - DNA, 20 bp, Artificial Sequence
  chemically synthesized
atttgcaagaactcaatcaa

SEQ ID NO: 1701 - DNA, 20 bp, Artificial Sequence
  chemically synthesized
tttgcaagaactcaatcaaa

SEQ ID NO: 1702 - DNA, 20 bp, Artificial Sequence
  chemically synthesized
aaaaggcaactcctcctttt

SEQ ID NO: 1703 - DNA, 20 bp, Artificial Sequence
  chemically synthesized
aaaggcaactcctccttttc

SEQ ID NO: 1704 - DNA, 20 bp, Artificial Sequence
  chemically synthesized
ggcaactcctccttttcggg

SEQ ID NO: 1705 - DNA, 20 bp, Artificial Sequence
  chemically synthesized
cttttcgggaagaataattt

SEQ ID NO: 1706 - DNA, 20 bp, Artificial Sequence
  chemically synthesized
ttttcgggaagaataatttt

SEQ ID NO: 1707 - DNA, 20 bp, Artificial Sequence
  chemically synthesized
tttgggaaaatatttcctct

SEQ ID NO: 1708 - DNA, 20 bp, Artificial Sequence
  chemically synthesized
ttgggaaaatatttcctctt

SEQ ID NO: 1709 - DNA, 20 bp, Artificial Sequence
  chemically synthesized
aaatatttcctcttaggttt

SEQ ID NO: 1710 - DNA, 20 bp, Artificial Sequence
  chemically synthesized
ctcttaggtttaagcataca

SEQ ID NO: 1711 - DNA, 20 bp, Artificial Sequence
  chemically synthesized
catacatagtatttcattca

SEQ ID NO: 1712 - DNA, 20 bp, Artificial Sequence
  chemically synthesized
gtatttcattcacagtatct

SEQ ID NO: 1713 - DNA, 20 bp, Artificial Sequence
  chemically synthesized
cacagtatctcagacattat

SEQ ID NO: 1714 - DNA, 20 bp, Artificial Sequence
  chemically synthesized
atctcagacattatcagtat

SEQ ID NO: 1715 - DNA, 20 bp, Artificial Sequence
  chemically synthesized
tatcagtataagtgaatgaa

SEQ ID NO: 1716 - DNA, 20 bp, Artificial Sequence
  chemically synthesized
gtgaatgaatagcctcactg

SEQ ID NO: 1717 - DNA, 20 bp, Artificial Sequence
  chemically synthesized
aaaaaaaaaaaaaaatccta

SEQ ID NO: 1718 - DNA, 20 bp, Artificial Sequence
  chemically synthesized
aaaaaaaaaaaaaatcctac

SEQ ID NO: 1719 - DNA, 20 bp, Artificial Sequence
  chemically synthesized
aaaaaaaaaaaaatcctaca

SEQ ID NO: 1720 - DNA, 20 bp, Artificial Sequence
  chemically synthesized
aaatcctacagggctaaata

SEQ ID NO: 1721 - DNA, 20 bp, Artificial Sequence
  chemically synthesized
tcctacagggctaaatacag

SEQ ID NO: 1722 - DNA, 20 bp, Artificial Sequence
  chemically synthesized
ctacagggctaaatacagaa

SEQ ID NO: 1723 - DNA, 20 bp, Artificial Sequence
  chemically synthesized
tacagggctaaatacagaag

SEQ ID NO: 1724 - DNA, 20 bp, Artificial Sequence
  chemically synthesized
aaatacagaagaggctctaa

SEQ ID NO: 1725 - DNA, 20 bp, Artificial Sequence
  chemically synthesized
gctctaaaagaaaatctctt

SEQ ID NO: 1726 - DNA, 20 bp, Artificial Sequence
  chemically synthesized
cttcccaaacttgaacttct

SEQ ID NO: 1727 - DNA, 20 bp, Artificial Sequence
  chemically synthesized
cccaaacttgaacttctcag

SEQ ID NO: 1728 - DNA, 20 bp, Artificial Sequence
  chemically synthesized
aacttgaacttctcagcagt

SEQ ID NO: 1729 - DNA, 20 bp, Artificial Sequence
  chemically synthesized
agcagtaagataacattttt

SEQ ID NO: 1730 - DNA, 20 bp, Artificial Sequence
  chemically synthesized
agtaagataacatttttaag

SEQ ID NO: 1731 - DNA, 20 bp, Artificial Sequence
  chemically synthesized
taagataacatttttaagaa

SEQ ID NO: 1732 - DNA, 20 bp, Artificial Sequence
  chemically synthesized
tttttaagaagagcacttaa

SEQ ID NO: 1733 - DNA, 20 bp, Artificial Sequence
  chemically synthesized
tttaagaagagcacttaaaa

SEQ ID NO: 1734 - DNA, 20 bp, Artificial Sequence
  chemically synthesized
taagaagagcacttaaaaga

SEQ ID NO: 1735 - DNA, 20 bp, Artificial Sequence
  chemically synthesized
gagagaccaaaattcattaa

SEQ ID NO: 1736 - DNA, 20 bp, Artificial Sequence
  chemically synthesized
agaccaaaattcattaatag

SEQ ID NO: 1737 - DNA, 20 bp, Artificial Sequence
  chemically synthesized
tcattaatagtagtcaactt

SEQ ID NO: 1738 - DNA, 20 bp, Artificial Sequence
  chemically synthesized
aatagtagtcaacttaagta

SEQ ID NO: 1739 - DNA, 20 bp, Artificial Sequence
  chemically synthesized
atagtagtcaacttaagtaa

SEQ ID NO: 1740 - DNA, 20 bp, Artificial Sequence
  chemically synthesized
tcaacttaagtaaaggtttc

SEQ ID NO: 1741 - DNA, 20 bp, Artificial Sequence
  chemically synthesized
ggtttgaaaaaacaaaatcc

SEQ ID NO: 1742 - DNA, 20 bp, Artificial Sequence
  chemically synthesized
aaaaaacaaaatcccagtaa

SEQ ID NO: 1743 - DNA, 20 bp, Artificial Sequence
  chemically synthesized
aaacaaaatcccagtaaaag

SEQ ID NO: 1744 - DNA, 20 bp, Artificial Sequence
  chemically synthesized
tcccagtaaaagcagaattt

SEQ ID NO: 1745 - DNA, 20 bp, Artificial Sequence
  chemically synthesized
agtaaaagcagaattttagt

SEQ ID NO: 1746 - DNA, 20 bp, Artificial Sequence
  chemically synthesized
gcagaattttagttggttct

SEQ ID NO: 1747 - DNA, 20 bp, Artificial Sequence
  chemically synthesized
aagtttcctcaacttgcgat

SEQ ID NO: 1748 - DNA, 20 bp, Artificial Sequence
  chemically synthesized
ttgcgataagtttacttaat

SEQ ID NO: 1749 - DNA, 20 bp, Artificial Sequence
  chemically synthesized
ttaattagtctactaataac

SEQ ID NO: 1750 - DNA, 20 bp, Artificial Sequence
  chemically synthesized
attagtctactaataactag

SEQ ID NO: 1751 - DNA, 20 bp, Artificial Sequence
  chemically synthesized
ttagtctactaataactagt

SEQ ID NO: 1752 - DNA, 20 bp, Artificial Sequence
  chemically synthesized
tctactaataactagtgggt

SEQ ID NO: 1753 - DNA, 20 bp, Artificial Sequence
  chemically synthesized
tactaataactagtgggtta

SEQ ID NO: 1754 - DNA, 20 bp, Artificial Sequence
  chemically synthesized
actaataactagtgggttag

SEQ ID NO: 1755 - DNA, 20 bp, Artificial Sequence
  chemically synthesized
ctaataactagtgggttaga

SEQ ID NO: 1756 - DNA, 20 bp, Artificial Sequence
  chemically synthesized
agtgggttagagggtgctga

SEQ ID NO: 1757 - DNA, 20 bp, Artificial Sequence
  chemically synthesized
gctgaaagttaccccattcc

SEQ ID NO: 1758 - DNA, 20 bp, Artificial Sequence
  chemically synthesized
ctgaaagttaccccattcct

SEQ ID NO: 1759 - DNA, 20 bp, Artificial Sequence
  chemically synthesized
tgaaagttaccccattcctg

SEQ ID NO: 1760 - DNA, 20 bp, Artificial Sequence
  chemically synthesized
tggggaccctgcttattgac

SEQ ID NO: 1761 - DNA, 20 bp, Artificial Sequence
  chemically synthesized
ctgcttattgaccagcaaat

SEQ ID NO: 1762 - DNA, 20 bp, Artificial Sequence
  chemically synthesized
tgcttattgaccagcaaata

SEQ ID NO: 1763 - DNA, 20 bp, Artificial Sequence
  chemically synthesized
attgaccagcaaataaggac

SEQ ID NO: 1764 - DNA, 20 bp, Artificial Sequence
  chemically synthesized
ttgaccagcaaataaggact

SEQ ID NO: 1765 - DNA, 20 bp, Artificial Sequence
  chemically synthesized
aaataaggactgggattctt

SEQ ID NO: 1766 - DNA, 20 bp, Artificial Sequence
  chemically synthesized
aataaggactgggattcttt

SEQ ID NO: 1767 - DNA, 20 bp, Artificial Sequence
  chemically synthesized
ggactgggattctttgggta

SEQ ID NO: 1768 - DNA, 20 bp, Artificial Sequence
  chemically synthesized
gactgggattctttgggtaa

SEQ ID NO: 1769 - DNA, 20 bp, Artificial Sequence
  chemically synthesized
actgggattctttgggtaaa

SEQ ID NO: 1770 - DNA, 20 bp, Artificial Sequence
  chemically synthesized
aagggaaatcttttcttgtt

SEQ ID NO: 1771 - DNA, 20 bp, Artificial Sequence
  chemically synthesized
gaaatcttttcttgttaagt

SEQ ID NO: 1772 - DNA, 20 bp, Artificial Sequence
  chemically synthesized
tgttaagtcagacctttaca

SEQ ID NO: 1773 - DNA, 20 bp, Artificial Sequence
  chemically synthesized
cagaataactgtctctgaat

SEQ ID NO: 1774 - DNA, 20 bp, Artificial Sequence
  chemically synthesized
ataactgtctctgaattgga

SEQ ID NO: 1775 - DNA, 20 bp, Artificial Sequence
  chemically synthesized
aattggaaagctatctacaa

SEQ ID NO: 1776 - DNA, 20 bp, Artificial Sequence
  chemically synthesized
aaagtacaaacataacaatt

SEQ ID NO: 1777 - DNA, 20 bp, Artificial Sequence
  chemically synthesized
acaaacataacaatttggta

SEQ ID NO: 1778 - DNA, 20 bp, Artificial Sequence
  chemically synthesized
caaacataacaatttggtaa

SEQ ID NO: 1779 - DNA, 20 bp, Artificial Sequence
  chemically synthesized
aacataacaatttggtaaag

SEQ ID NO: 1780 - DNA, 20 bp, Artificial Sequence
  chemically synthesized
ggtaaaggagatcattgtat

SEQ ID NO: 1781 - DNA, 20 bp, Artificial Sequence
  chemically synthesized
gtaaaggagatcattgtatt

SEQ ID NO: 1782 - DNA, 20 bp, Artificial Sequence
  chemically synthesized
ttgtattgggttctgtatta

SEQ ID NO: 1783 - DNA, 20 bp, Artificial Sequence
  chemically synthesized
ttatggccatgtattttcac

SEQ ID NO: 1784 - DNA, 20 bp, Artificial Sequence
  chemically synthesized
tttttttaattactttttta

SEQ ID NO: 1785 - DNA, 20 bp, Artificial Sequence
  chemically synthesized
tctgtctcattcatgctaaa

SEQ ID NO: 1786 - DNA, 20 bp, Artificial Sequence
  chemically synthesized
gtctcattcatgctaaaaag

SEQ ID NO: 1787 - DNA, 20 bp, Artificial Sequence
  chemically synthesized
attcatgctaaaaagaagca

SEQ ID NO: 1788 - DNA, 20 bp, Artificial Sequence
  chemically synthesized
atgctaaaaagaagcaaaga

SEQ ID NO: 1789 - DNA, 20 bp, Artificial Sequence
  chemically synthesized
tgctaaaaagaagcaaagaa

SEQ ID NO: 1790 - DNA, 20 bp, Artificial Sequence
  chemically synthesized
agaagcaaagaaaggcaaaa

SEQ ID NO: 1791 - DNA, 20 bp, Artificial Sequence
  chemically synthesized
aacagccatgtttaaaatat

SEQ ID NO: 1792 - DNA, 20 bp, Artificial Sequence
  chemically synthesized
cagccatgtttaaaatattg

SEQ ID NO: 1793 - DNA, 20 bp, Artificial Sequence
  chemically synthesized
ttaaaatattggagttttac

SEQ ID NO: 1794 - DNA, 20 bp, Artificial Sequence
  chemically synthesized
taaaatattggagttttaca

SEQ ID NO: 1795 - DNA, 20 bp, Artificial Sequence
  chemically synthesized
aaatattggagttttacaag

SEQ ID NO: 1796 - DNA, 20 bp, Artificial Sequence
  chemically synthesized
ggagttttacaaggagcatt

SEQ ID NO: 1797 - DNA, 20 bp, Artificial Sequence
  chemically synthesized
gagttttacaaggagcattg

SEQ ID NO: 1798 - DNA, 20 bp, Artificial Sequence
  chemically synthesized
agttttacaaggagcattga

SEQ ID NO: 1799 - DNA, 20 bp, Artificial Sequence
  chemically synthesized
gagcattgagggtcacccac

SEQ ID NO: 1800 - DNA, 20 bp, Artificial Sequence
  chemically synthesized
gcattgagggtcacccacaa

SEQ ID NO: 1801 - DNA, 20 bp, Artificial Sequence
  chemically synthesized
cattgagggtcacccacaag

SEQ ID NO: 1802 - DNA, 20 bp, Artificial Sequence
  chemically synthesized
gggtcacccacaagaggaaa

SEQ ID NO: 1803 - DNA, 20 bp, Artificial Sequence
  chemically synthesized
tcacccacaagaggaaatgg

SEQ ID NO: 1804 - DNA, 20 bp, Artificial Sequence
  chemically synthesized
acaagaggaaatggaagtaa

SEQ ID NO: 1805 - DNA, 20 bp, Artificial Sequence
  chemically synthesized
aggaaatggaagtaaaagtg

SEQ ID NO: 1806 - DNA, 20 bp, Artificial Sequence
  chemically synthesized
gtgaagaactctttcttcac

SEQ ID NO: 1807 - DNA, 20 bp, Artificial Sequence
  chemically synthesized
gaagaactctttcttcactg

SEQ ID NO: 1808 - DNA, 20 bp, Artificial Sequence
  chemically synthesized
cactggagattctccttcaa

SEQ ID NO: 1809 - DNA, 20 bp, Artificial Sequence
  chemically synthesized
aaaagaacttctctgcttta

SEQ ID NO: 1810 - DNA, 20 bp, Artificial Sequence
  chemically synthesized
ttctctgctttacagtgaaa

SEQ ID NO: 1811 - DNA, 20 bp, Artificial Sequence
  chemically synthesized
acagtgaaatagtctgtact

SEQ ID NO: 1812 - DNA, 20 bp, Artificial Sequence
  chemically synthesized
tagtctgtacttagtttccg

SEQ ID NO: 1813 - DNA, 20 bp, Artificial Sequence
  chemically synthesized
agtctgtacttagtttccgc

SEQ ID NO: 1814 - DNA, 20 bp, Artificial Sequence
  chemically synthesized
gtctgtacttagtttccgca

SEQ ID NO: 1815 - DNA, 20 bp, Artificial Sequence
  chemically synthesized
tctgtacttagtttccgcag

SEQ ID NO: 1816 - DNA, 20 bp, Artificial Sequence
  chemically synthesized
gtacttagtttccgcagggg

SEQ ID NO: 1817 - DNA, 20 bp, Artificial Sequence
  chemically synthesized
aaccatgcttctcaaactct

SEQ ID NO: 1818 - DNA, 20 bp, Artificial Sequence
  chemically synthesized
aactcttagtgtctgttcct

SEQ ID NO: 1819 - DNA, 20 bp, Artificial Sequence
  chemically synthesized
actcttagtgtctgttcctg

SEQ ID NO: 1820 - DNA, 20 bp, Artificial Sequence
  chemically synthesized
ctcttagtgtctgttcctga

SEQ ID NO: 1821 - DNA, 20 bp, Artificial Sequence
  chemically synthesized
tcttagtgtctgttcctgag

SEQ ID NO: 1822 - DNA, 20 bp, Artificial Sequence
  chemically synthesized
ctgttcctgaggggcattca

SEQ ID NO: 1823 - DNA, 20 bp, Artificial Sequence
  chemically synthesized
cctgaggggcattcaaagcc

SEQ ID NO: 1824 - DNA, 20 bp, Artificial Sequence
  chemically synthesized
ctgaggggcattcaaagcca

SEQ ID NO: 1825 - DNA, 20 bp, Artificial Sequence
  chemically synthesized
tgaggggcattcaaagccaa

SEQ ID NO: 1826 - DNA, 20 bp, Artificial Sequence
  chemically synthesized
tcaaagccaagggataaaca

SEQ ID NO: 1827 - DNA, 20 bp, Artificial Sequence
  chemically synthesized
ataaacatggcacattttcc

SEQ ID NO: 1828 - DNA, 20 bp, Artificial Sequence
  chemically synthesized
aaacatggcacattttccta

SEQ ID NO: 1829 - DNA, 20 bp, Artificial Sequence
  chemically synthesized
aacatggcacattttcctag

SEQ ID NO: 1830 - DNA, 20 bp, Artificial Sequence
  chemically synthesized
catggcacattttcctagag

SEQ ID NO: 1831 - DNA, 20 bp, Artificial Sequence
  chemically synthesized
tggcacattttcctagagga

SEQ ID NO: 1832 - DNA, 20 bp, Artificial Sequence
  chemically synthesized
ggcacattttcctagaggag

SEQ ID NO: 1833 - DNA, 20 bp, Artificial Sequence
  chemically synthesized
gcacattttcctagaggaga

SEQ ID NO: 1834 - DNA, 20 bp, Artificial Sequence
  chemically synthesized
attttcctagaggagagggt

SEQ ID NO: 1835 - DNA, 20 bp, Artificial Sequence
  chemically synthesized
gacaaattttaatactaaaa

SEQ ID NO: 1836 - DNA, 20 bp, Artificial Sequence
  chemically synthesized
ttttaatactaaaatagtta

SEQ ID NO: 1837 - DNA, 20 bp, Artificial Sequence
  chemically synthesized
gaataaaatgtaaattgcat

SEQ ID NO: 1838 - DNA, 20 bp, Artificial Sequence
  chemically synthesized
gagtcttaacgatacaacat

SEQ ID NO: 1839 - DNA, 20 bp, Artificial Sequence
  chemically synthesized
taacgatacaacataagact

SEQ ID NO: 1840 - DNA, 20 bp, Artificial Sequence
  chemically synthesized
cgatacaacataagacttag

SEQ ID NO: 1841 - DNA, 20 bp, Artificial Sequence
  chemically synthesized
gacttagaagaaatattgtg

SEQ ID NO: 1842 - DNA, 20 bp, Artificial Sequence
  chemically synthesized
gaagaaatattgtgtggacc

SEQ ID NO: 1843 - DNA, 20 bp, Artificial Sequence
  chemically synthesized
aagaaatattgtgtggacct

SEQ ID NO: 1844 - DNA, 20 bp, Artificial Sequence
  chemically synthesized
gtggacctgggcctacaccc

SEQ ID NO: 1845 - DNA, 20 bp, Artificial Sequence
  chemically synthesized
acctgggcctacaccccaga

SEQ ID NO: 1846 - DNA, 20 bp, Artificial Sequence
  chemically synthesized
tacaccccagacagatacct

SEQ ID NO: 1847 - DNA, 20 bp, Artificial Sequence
  chemically synthesized
acaccccagacagatacctc

SEQ ID NO: 1848 - DNA, 20 bp, Artificial Sequence
  chemically synthesized
caccccagacagatacctca

SEQ ID NO: 1849 - DNA, 20 bp, Artificial Sequence
  chemically synthesized
accccagacagatacctcag

SEQ ID NO: 1850 - DNA, 20 bp, Artificial Sequence
  chemically synthesized
catatgctctccttctgtta

SEQ ID NO: 1851 - DNA, 20 bp, Artificial Sequence
  chemically synthesized
ccttctgttacagctacttc

SEQ ID NO: 1852 - DNA, 20 bp, Artificial Sequence
  chemically synthesized
cttctgttacagctacttct

SEQ ID NO: 1853 - DNA, 20 bp, Artificial Sequence
  chemically synthesized
ttctgttacagctacttcta

SEQ ID NO: 1854 - DNA, 20 bp, Artificial Sequence
  chemically synthesized
gttacagctacttctaggga

SEQ ID NO: 1855 - DNA, 20 bp, Artificial Sequence
  chemically synthesized
ttacagctacttctagggaa

SEQ ID NO: 1856 - DNA, 20 bp, Artificial Sequence
  chemically synthesized
ctacttctagggaaaggttc

SEQ ID NO: 1857 - DNA, 20 bp, Artificial Sequence
  chemically synthesized
cttctagggaaaggttcgag

SEQ ID NO: 1858 - DNA, 20 bp, Artificial Sequence
  chemically synthesized
ctagggaaaggttcgagaag

SEQ ID NO: 1859 - DNA, 20 bp, Artificial Sequence
  chemically synthesized
gttcgagaagtagtacctta

SEQ ID NO: 1860 - DNA, 20 bp, Artificial Sequence
  chemically synthesized
tagtaccttaaagaacatat

SEQ ID NO: 1861 - DNA, 20 bp, Artificial Sequence
  chemically synthesized
gtaccttaaagaacatatca

SEQ ID NO: 1862 - DNA, 20 bp, Artificial Sequence
  chemically synthesized
tttttatttttactatgaac

SEQ ID NO: 1863 - DNA, 20 bp, Artificial Sequence
  chemically synthesized
aagttatccaaaatttattc

SEQ ID NO: 1864 - DNA, 20 bp, Artificial Sequence
  chemically synthesized
agttatccaaaatttattct

SEQ ID NO: 1865 - DNA, 20 bp, Artificial Sequence
  chemically synthesized
caaaatttattctgggcaaa

SEQ ID NO: 1866 - DNA, 20 bp, Artificial Sequence
  chemically synthesized
tctgggcaaacagaaaaaaa

SEQ ID NO: 1867 - DNA, 20 bp, Artificial Sequence
  chemically synthesized
ctgggcaaacagaaaaaaaa

SEQ ID NO: 1868 - DNA, 20 bp, Artificial Sequence
  chemically synthesized
tgggcaaacagaaaaaaaaa

SEQ ID NO: 1869 - DNA, 20 bp, Artificial Sequence
  chemically synthesized
ggcaaacagaaaaaaaaagg

SEQ ID NO: 1870 - DNA, 20 bp, Artificial Sequence
  chemically synthesized
agggagcaaatattaatttg

SEQ ID NO: 1871 - DNA, 20 bp, Artificial Sequence
  chemically synthesized
tgtttactgatttaactctt

SEQ ID NO: 1872 - DNA, 20 bp, Artificial Sequence
  chemically synthesized
gtttactgatttaactcttt

SEQ ID NO: 1873 - DNA, 20 bp, Artificial Sequence
  chemically synthesized
tgatttaactctttgggttt

SEQ ID NO: 1874 - DNA, 20 bp, Artificial Sequence
  chemically synthesized
aactctttgggtttaagata

SEQ ID NO: 1875 - DNA, 20 bp, Artificial Sequence
  chemically synthesized
aagatatggaaatcttcctc

SEQ ID NO: 1876 - DNA, 20 bp, Artificial Sequence
  chemically synthesized
tattctgtacacctccataa

SEQ ID NO: 1877 - DNA, 20 bp, Artificial Sequence
  chemically synthesized
cctccataaaagctccatta

SEQ ID NO: 1878 - DNA, 20 bp, Artificial Sequence
  chemically synthesized
ctccataaaagctccattaa

SEQ ID NO: 1879 - DNA, 20 bp, Artificial Sequence
  chemically synthesized
aggcttattcgtatgtctcc

SEQ ID NO: 1880 - DNA, 20 bp, Artificial Sequence
  chemically synthesized
ggcttattcgtatgtctcca

SEQ ID NO: 1881 - DNA, 20 bp, Artificial Sequence
  chemically synthesized
ctccaaggccttgacaaatg

SEQ ID NO: 1882 - DNA, 20 bp, Artificial Sequence
  chemically synthesized
atgtagccatcaaccttata

SEQ ID NO: 1883 - DNA, 20 bp, Artificial Sequence
  chemically synthesized
cttatacagatacatgctgt

SEQ ID NO: 1884 - DNA, 20 bp, Artificial Sequence
  chemically synthesized
gctgtgagaaaaacatttga

SEQ ID NO: 1885 - DNA, 20 bp, Artificial Sequence
  chemically synthesized
ccattctctctgtgccttct

SEQ ID NO: 1886 - DNA, 20 bp, Artificial Sequence
  chemically synthesized
tgccttctaagataatcttc

SEQ ID NO: 1887 - DNA, 20 bp, Artificial Sequence
  chemically synthesized
gacattttcttgtctttcct

SEQ ID NO: 1888 - DNA, 20 bp, Artificial Sequence
  chemically synthesized
ttttcttgtctttcctgagc

SEQ ID NO: 1889 - DNA, 20 bp, Artificial Sequence
  chemically synthesized
ttcttgtctttcctgagcaa

SEQ ID NO: 1890 - DNA, 20 bp, Artificial Sequence
  chemically synthesized
gatacttgcttatttttcaa

SEQ ID NO: 1891 - DNA, 20 bp, Artificial Sequence
  chemically synthesized
tcaatagacatgttcttgtg

SEQ ID NO: 1892 - DNA, 20 bp, Artificial Sequence
  chemically synthesized
catgttcttgtgtagtaatt

SEQ ID NO: 1893 - DNA, 20 bp, Artificial Sequence
  chemically synthesized
tgtgtagtaatttagttcac

SEQ ID NO: 1894 - DNA, 20 bp, Artificial Sequence
  chemically synthesized
aagaaaaatactttctactt

SEQ ID NO: 1895 - DNA, 20 bp, Artificial Sequence
  chemically synthesized
agaaaaatactttctacttt

SEQ ID NO: 1896 - DNA, 20 bp, Artificial Sequence
  chemically synthesized
gaaaaatactttctacttta

SEQ ID NO: 1897 - DNA, 20 bp, Artificial Sequence
  chemically synthesized
tttctactttagggaaaaaa

SEQ ID NO: 1898 - DNA, 20 bp, Artificial Sequence
  chemically synthesized
ttctactttagggaaaaaat

SEQ ID NO: 1899 - DNA, 20 bp, Artificial Sequence
  chemically synthesized
tctactttagggaaaaaatg

SEQ ID NO: 1900 - DNA, 20 bp, Artificial Sequence
  chemically synthesized
ctactttagggaaaaaatgg

SEQ ID NO: 1901 - DNA, 20 bp, Artificial Sequence
  chemically synthesized
ctttagggaaaaaatggggg

SEQ ID NO: 1902 - DNA, 20 bp, Artificial Sequence
  chemically synthesized
tttagggaaaaaatgggggc

SEQ ID NO: 1903 - DNA, 20 bp, Artificial Sequence
  chemically synthesized
ttagggaaaaaatgggggca

SEQ ID NO: 1904 - DNA, 20 bp, Artificial Sequence
  chemically synthesized
tagggaaaaaatgggggcag

SEQ ID NO: 1905 - DNA, 20 bp, Artificial Sequence
  chemically synthesized
ggaaaaaatgggggcagggg

SEQ ID NO: 1906 - DNA, 20 bp, Artificial Sequence
  chemically synthesized
gaaaaaatgggggcaggggt

SEQ ID NO: 1907 - DNA, 20 bp, Artificial Sequence
  chemically synthesized
tcaaaacaacctttattctg

SEQ ID NO: 1908 - DNA, 20 bp, Artificial Sequence
  chemically synthesized
ctttattctgcagtgaaaaa

SEQ ID NO: 1909 - DNA, 20 bp, Artificial Sequence
  chemically synthesized
gtgaaaaaaagataacttca

SEQ ID NO: 1910 - DNA, 20 bp, Artificial Sequence
  chemically synthesized
aaagataacttcacagaaaa

SEQ ID NO: 1911 - DNA, 20 bp, Artificial Sequence
  chemically synthesized
cagtcaatgtaacatctgca

SEQ ID NO: 1912 - DNA, 20 bp, Artificial Sequence
  chemically synthesized
aacatctgcatagtttcaaa

SEQ ID NO: 1913 - DNA, 20 bp, Artificial Sequence
  chemically synthesized
acatctgcatagtttcaaaa

SEQ ID NO: 1914 - DNA, 20 bp, Artificial Sequence
  chemically synthesized
tgcatagtttcaaaaaggaa

SEQ ID NO: 1915 - DNA, 20 bp, Artificial Sequence
  chemically synthesized
aacattatgatgttgtttaa

SEQ ID NO: 1916 - DNA, 20 bp, Artificial Sequence
  chemically synthesized
taaaagattctcctgatttt

SEQ ID NO: 1917 - DNA, 20 bp, Artificial Sequence
  chemically synthesized
aaagattctcctgattttaa

SEQ ID NO: 1918 - DNA, 20 bp, Artificial Sequence
  chemically synthesized
ttttaagagtttcataatgt

SEQ ID NO: 1919 - DNA, 20 bp, Artificial Sequence
  chemically synthesized
agtttcataatgtgagaaaa

SEQ ID NO: 1920 - DNA, 20 bp, Artificial Sequence
  chemically synthesized
gtttcataatgtgagaaaaa

SEQ ID NO: 1921 - DNA, 20 bp, Artificial Sequence
  chemically synthesized
tcataatgtgagaaaaaagg

SEQ ID NO: 1922 - DNA, 20 bp, Artificial Sequence
  chemically synthesized
aatgtgagaaaaaaggaagt

SEQ ID NO: 1923 - DNA, 20 bp, Artificial Sequence
  chemically synthesized
aggaagtaagcctgcaaaca

SEQ ID NO: 1924 - DNA, 20 bp, Artificial Sequence
  chemically synthesized
gtaaaaaattattcttttaa

SEQ ID NO: 1925 - DNA, 20 bp, Artificial Sequence
  chemically synthesized
atattatttttccttactat

SEQ ID NO: 1926 - DNA, 20 bp, Artificial Sequence
  chemically synthesized
tattatttttccttactatt

SEQ ID NO: 1927 - DNA, 20 bp, Artificial Sequence
  chemically synthesized
ttttccttactattgggcaa

SEQ ID NO: 1928 - DNA, 20 bp, Artificial Sequence
  chemically synthesized
gggcaaaagccttttaaaac

SEQ ID NO: 1929 - DNA, 20 bp, Artificial Sequence
  chemically synthesized
ttaaaactggtaatgcttaa

SEQ ID NO: 1930 - DNA, 20 bp, Artificial Sequence
  chemically synthesized
ggtaatgcttaatggacttt

SEQ ID NO: 1931 - DNA, 20 bp, Artificial Sequence
  chemically synthesized
gtaatgcttaatggactttc

SEQ ID NO: 1932 - DNA, 20 bp, Artificial Sequence
  chemically synthesized
tgcttaatggactttcaggt

SEQ ID NO: 1933 - DNA, 20 bp, Artificial Sequence
  chemically synthesized
ctttcaggttagtatcaaac

SEQ ID NO: 1934 - DNA, 20 bp, Artificial Sequence
  chemically synthesized
gttagtatcaaactggaaca

SEQ ID NO: 1935 - DNA, 20 bp, Artificial Sequence
  chemically synthesized
ttagtatcaaactggaacac

SEQ ID NO: 1936 - DNA, 20 bp, Artificial Sequence
  chemically synthesized
gtatcaaactggaacacagg

SEQ ID NO: 1937 - DNA, 20 bp, Artificial Sequence
  chemically synthesized
tatcaaactggaacacagga

SEQ ID NO: 1938 - DNA, 20 bp, Artificial Sequence
  chemically synthesized
tcaaactggaacacaggaag

SEQ ID NO: 1939 - DNA, 20 bp, Artificial Sequence
  chemically synthesized
ggagaattcaatgtgttctt

SEQ ID NO: 1940 - DNA, 20 bp, Artificial Sequence
  chemically synthesized
aaactatactgaaatgtaaa

SEQ ID NO: 1941 - DNA, 20 bp, Artificial Sequence
  chemically synthesized
tagcattatatattcaacta

SEQ ID NO: 1942 - DNA, 20 bp, Artificial Sequence
  chemically synthesized
agcattatatattcaactac

SEQ ID NO: 1943 - DNA, 20 bp, Artificial Sequence
  chemically synthesized
atatattcaactacaggatt

SEQ ID NO: 1944 - DNA, 20 bp, Artificial Sequence
  chemically synthesized
tatattcaactacaggattt

SEQ ID NO: 1945 - DNA, 20 bp, Artificial Sequence
  chemically synthesized
aggaaaacaataatttctgt

SEQ ID NO: 1946 - DNA, 20 bp, Artificial Sequence
  chemically synthesized
aataatttctgtaagattaa

SEQ ID NO: 1947 - DNA, 20 bp, Artificial Sequence
  chemically synthesized
ataatttctgtaagattaaa

SEQ ID NO: 1948 - DNA, 20 bp, Artificial Sequence
  chemically synthesized
aagattaaaaggaattctct

SEQ ID NO: 1949 - DNA, 20 bp, Artificial Sequence
  chemically synthesized
agattaaaaggaattctctt

SEQ ID NO: 1950 - DNA, 20 bp, Artificial Sequence
  chemically synthesized
acctcctcattttatgaacc

SEQ ID NO: 1951 - DNA, 20 bp, Artificial Sequence
  chemically synthesized
cctcctcattttatgaacct

SEQ ID NO: 1952 - DNA, 20 bp, Artificial Sequence
  chemically synthesized
attttatgaacctgggaact

SEQ ID NO: 1953 - DNA, 20 bp, Artificial Sequence
  chemically synthesized
atgaacctgggaacttggca

SEQ ID NO: 1954 - DNA, 20 bp, Artificial Sequence
  chemically synthesized
gaacctgggaacttggcaaa

SEQ ID NO: 1955 - DNA, 20 bp, Artificial Sequence
  chemically synthesized
aacctgggaacttggcaaag

SEQ ID NO: 1956 - DNA, 20 bp, Artificial Sequence
  chemically synthesized
ggaacttggcaaagaggtta

SEQ ID NO: 1957 - DNA, 20 bp, Artificial Sequence
  chemically synthesized
aacttggcaaagaggttaaa

SEQ ID NO: 1958 - DNA, 20 bp, Artificial Sequence
  chemically synthesized
caaagaggttaaagagacca

SEQ ID NO: 1959 - DNA, 20 bp, Artificial Sequence
  chemically synthesized
aaagaggttaaagagaccaa

SEQ ID NO: 1960 - DNA, 20 bp, Artificial Sequence
  chemically synthesized
accaaaggctacatgaccaa

SEQ ID NO: 1961 - DNA, 20 bp, Artificial Sequence
  chemically synthesized
tgaactgttatacttacaca

SEQ ID NO: 1962 - DNA, 20 bp, Artificial Sequence
  chemically synthesized
actgttatacttacacatag

SEQ ID NO: 1963 - DNA, 20 bp, Artificial Sequence
  chemically synthesized
ttatacttacacatagtagt

SEQ ID NO: 1964 - DNA, 20 bp, Artificial Sequence
  chemically synthesized
ttacacatagtagtaagcaa

SEQ ID NO: 1965 - DNA, 20 bp, Artificial Sequence
  chemically synthesized
acatagtagtaagcaaaaga

SEQ ID NO: 1966 - DNA, 20 bp, Artificial Sequence
  chemically synthesized
aagacagaattgtgcaatga

SEQ ID NO: 1967 - DNA, 20 bp, Artificial Sequence
  chemically synthesized
agacagaattgtgcaatgaa

SEQ ID NO: 1968 - DNA, 20 bp, Artificial Sequence
  chemically synthesized
gacagaattgtgcaatgaaa

SEQ ID NO: 1969 - DNA, 20 bp, Artificial Sequence
  chemically synthesized
gtgcaatgaaagggaaacaa

SEQ ID NO: 1970 - DNA, 20 bp, Artificial Sequence
  chemically synthesized
tgcaatgaaagggaaacaaa

SEQ ID NO: 1971 - DNA, 20 bp, Artificial Sequence
  chemically synthesized
gaaagggaaacaaaaggtat

SEQ ID NO: 1972 - DNA, 20 bp, Artificial Sequence
  chemically synthesized
aagggaaacaaaaggtatta

SEQ ID NO: 1973 - DNA, 20 bp, Artificial Sequence
  chemically synthesized
aacaaaaggtattagagtca

SEQ ID NO: 1974 - DNA, 20 bp, Artificial Sequence
  chemically synthesized
acaaaaggtattagagtcaa

SEQ ID NO: 1975 - DNA, 20 bp, Artificial Sequence
  chemically synthesized
tattagagtcaaaggctccc

SEQ ID NO: 1976 - DNA, 20 bp, Artificial Sequence
  chemically synthesized
tagagtcaaaggctcccaag

SEQ ID NO: 1977 - DNA, 20 bp, Artificial Sequence
  chemically synthesized
aaaggctcccaagaagaatc

SEQ ID NO: 1978 - DNA, 20 bp, Artificial Sequence
  chemically synthesized
aaggctcccaagaagaatcc

SEQ ID NO: 1979 - DNA, 20 bp, Artificial Sequence
  chemically synthesized
aggctcccaagaagaatcca

SEQ ID NO: 1980 - DNA, 20 bp, Artificial Sequence
  chemically synthesized
aagaagaatccagggtctaa

SEQ ID NO: 1981 - DNA, 20 bp, Artificial Sequence
  chemically synthesized
aaaagtttctttatttgtct

SEQ ID NO: 1982 - DNA, 20 bp, Artificial Sequence
  chemically synthesized
ttctttatttgtctaagctt

SEQ ID NO: 1983 - DNA, 20 bp, Artificial Sequence
  chemically synthesized
ttagcttttcatctataatg

SEQ ID NO: 1984 - DNA, 20 bp, Artificial Sequence
  chemically synthesized
agcttttcatctataatgtg

SEQ ID NO: 1985 - DNA, 20 bp, Artificial Sequence
  chemically synthesized
ctaccatttcgtaccttcca

SEQ ID NO: 1986 - DNA, 20 bp, Artificial Sequence
  chemically synthesized
taccttccacagttaatatg

SEQ ID NO: 1987 - DNA, 20 bp, Artificial Sequence
  chemically synthesized
cacagttaatatgaagatga

SEQ ID NO: 1988 - DNA, 20 bp, Artificial Sequence
  chemically synthesized
acagttaatatgaagatgac

SEQ ID NO: 1989 - DNA, 20 bp, Artificial Sequence
  chemically synthesized
aatatgaagatgacaggtat

SEQ ID NO: 1990 - DNA, 20 bp, Artificial Sequence
  chemically synthesized
gaagatgacaggtatcagac

SEQ ID NO: 1991 - DNA, 20 bp, Artificial Sequence
  chemically synthesized
ccagatgtatttgtatctaa

SEQ ID NO: 1992 - DNA, 20 bp, Artificial Sequence
  chemically synthesized
cagatgtatttgtatctaat

SEQ ID NO: 1993 - DNA, 20 bp, Artificial Sequence
  chemically synthesized
agatgtatttgtatctaata

SEQ ID NO: 1994 - DNA, 20 bp, Artificial Sequence
  chemically synthesized
ctgcatataattaaaaaaat

SEQ ID NO: 1995 - DNA, 20 bp, Artificial Sequence
  chemically synthesized
aaaataagatttatatgtac

SEQ ID NO: 1996 - DNA, 20 bp, Artificial Sequence
  chemically synthesized
atttatatgtaccagaaaat

SEQ ID NO: 1997 - DNA, 20 bp, Artificial Sequence
  chemically synthesized
accagaaaataagctttcaa

SEQ ID NO: 1998 - DNA, 20 bp, Artificial Sequence
  chemically synthesized
gaaaataagctttcaacaga

SEQ ID NO: 1999 - DNA, 20 bp, Artificial Sequence
  chemically synthesized
aaaataagctttcaacagat

SEQ ID NO: 2000 - DNA, 20 bp, Artificial Sequence
  chemically synthesized
gataggttaacatgattaat

SEQ ID NO: 2001 - DNA, 20 bp, Artificial Sequence
  chemically synthesized
gcatccatattcttcctttc

SEQ ID NO: 2002 - DNA, 20 bp, Artificial Sequence
  chemically synthesized
ctatcaacacacactctatg

SEQ ID NO: 2003 - DNA, 20 bp, Artificial Sequence
  chemically synthesized
tcaacacacactctatgaag

SEQ ID NO: 2004 - DNA, 20 bp, Artificial Sequence
  chemically synthesized
caacacacactctatgaagt

SEQ ID NO: 2005 - DNA, 20 bp, Artificial Sequence
  chemically synthesized
acacacactctatgaagtgg

SEQ ID NO: 2006 - DNA, 20 bp, Artificial Sequence
  chemically synthesized
cacacactctatgaagtggg

SEQ ID NO: 2007 - DNA, 20 bp, Artificial Sequence
  chemically synthesized
acactctatgaagtgggagg

SEQ ID NO: 2008 - DNA, 20 bp, Artificial Sequence
  chemically synthesized
tgaagtgggaggtagaaact

SEQ ID NO: 2009 - DNA, 20 bp, Artificial Sequence
  chemically synthesized
tagaaactaagttctgtctg

SEQ ID NO: 2010 - DNA, 20 bp, Artificial Sequence
  chemically synthesized
aaactaagttctgtctgtgg

SEQ ID NO: 2011 - DNA, 20 bp, Artificial Sequence
  chemically synthesized
gtctgtggaagtataattga

SEQ ID NO: 2012 - DNA, 20 bp, Artificial Sequence
  chemically synthesized
atgtgctgcgatccccattc

SEQ ID NO: 2013 - DNA, 20 bp, Artificial Sequence
  chemically synthesized
ccccattccagtttccatca

SEQ ID NO: 2014 - DNA, 20 bp, Artificial Sequence
  chemically synthesized
aacaataatcactccctttt

SEQ ID NO: 2015 - DNA, 20 bp, Artificial Sequence
  chemically synthesized
taatcactcccttttcagac

SEQ ID NO: 2016 - DNA, 20 bp, Artificial Sequence
  chemically synthesized
gacaaaaaactttacatcta

SEQ ID NO: 2017 - DNA, 20 bp, Artificial Sequence
  chemically synthesized
gcaccactctctgcatttcg

SEQ ID NO: 2018 - DNA, 20 bp, Artificial Sequence
  chemically synthesized
caccactctctgcatttcga

SEQ ID NO: 2019 - DNA, 20 bp, Artificial Sequence
  chemically synthesized
tttcgaaggatttctccatt

SEQ ID NO: 2020 - DNA, 20 bp, Artificial Sequence
  chemically synthesized
tcgaaggatttctccattta

SEQ ID NO: 2021 - DNA, 20 bp, Artificial Sequence
  chemically synthesized
ggatttctccatttagagtg

SEQ ID NO: 2022 - DNA, 20 bp, Artificial Sequence
  chemically synthesized
ttctccatttagagtgtggt

SEQ ID NO: 2023 - DNA, 20 bp, Artificial Sequence
  chemically synthesized
ccatttagagtgtggttggc

SEQ ID NO: 2024 - DNA, 20 bp, Artificial Sequence
  chemically synthesized
tagagtgtggttggcaagaa

SEQ ID NO: 2025 - DNA, 20 bp, Artificial Sequence
  chemically synthesized
aaagttatttctccatcact

SEQ ID NO: 2026 - DNA, 20 bp, Artificial Sequence
  chemically synthesized
gttatttctccatcactgag

SEQ ID NO: 2027 - DNA, 20 bp, Artificial Sequence
  chemically synthesized
agaagtacctgttctgtctt

SEQ ID NO: 2028 - DNA, 20 bp, Artificial Sequence
  chemically synthesized
aagtacctgttctgtctttg

SEQ ID NO: 2029 - DNA, 20 bp, Artificial Sequence
  chemically synthesized
agcccaaatgtgccttactc

SEQ ID NO: 2030 - DNA, 20 bp, Artificial Sequence
  chemically synthesized
gcccaaatgtgccttactct

SEQ ID NO: 2031 - DNA, 20 bp, Artificial Sequence
  chemically synthesized
atgtgccttactctaggacc

SEQ ID NO: 2032 - DNA, 20 bp, Artificial Sequence
  chemically synthesized
taggaccaagaatattgtcc

SEQ ID NO: 2033 - DNA, 20 bp, Artificial Sequence
  chemically synthesized
accaagaatattgtcccagt

SEQ ID NO: 2034 - DNA, 20 bp, Artificial Sequence
  chemically synthesized
aatattgtcccagtaagcaa

SEQ ID NO: 2035 - DNA, 20 bp, Artificial Sequence
  chemically synthesized
attgtcccagtaagcaaaag

SEQ ID NO: 2036 - DNA, 20 bp, Artificial Sequence
  chemically synthesized
agcaaaagtagctgctaata

SEQ ID NO: 2037 - DNA, 20 bp, Artificial Sequence
  chemically synthesized
gcaaaagtagctgctaataa

SEQ ID NO: 2038 - DNA, 20 bp, Artificial Sequence
  chemically synthesized
taaaggtgatttgccactta

SEQ ID NO: 2039 - DNA, 20 bp, Artificial Sequence
  chemically synthesized
acttaaagcaatctctgtct

SEQ ID NO: 2040 - DNA, 20 bp, Artificial Sequence
  chemically synthesized
agcaatctctgtcttggcaa

SEQ ID NO: 2041 - DNA, 20 bp, Artificial Sequence
  chemically synthesized
atctctgtcttggcaacagc

SEQ ID NO: 2042 - DNA, 20 bp, Artificial Sequence
  chemically synthesized
ctctgtcttggcaacagctg

SEQ ID NO: 2043 - DNA, 20 bp, Artificial Sequence
  chemically synthesized
gtcttggcaacagctggaga

SEQ ID NO: 2044 - DNA, 20 bp, Artificial Sequence
  chemically synthesized
ttggcaacagctggagatgg

SEQ ID NO: 2045 - DNA, 20 bp, Artificial Sequence
  chemically synthesized
gcaacagctggagatggcgg

SEQ ID NO: 2046 - DNA, 20 bp, Artificial Sequence
  chemically synthesized
caacagctggagatggcggt

SEQ ID NO: 2047 - DNA, 20 bp, Artificial Sequence
  chemically synthesized
gctggagatggcggtgggca

SEQ ID NO: 2048 - DNA, 20 bp, Artificial Sequence
  chemically synthesized
tggagatggcggtgggcaaa

SEQ ID NO: 2049 - DNA, 20 bp, Artificial Sequence
  chemically synthesized
gtcacattatccaaatgctc

SEQ ID NO: 2050 - DNA, 20 bp, Artificial Sequence
  chemically synthesized
cacattatccaaatgctccg

SEQ ID NO: 2051 - DNA, 20 bp, Artificial Sequence
  chemically synthesized
tgacatatgaaaccaatgat

SEQ ID NO: 2052 - DNA, 20 bp, Artificial Sequence
  chemically synthesized
gacatatgaaaccaatgatt

SEQ ID NO: 2053 - DNA, 20 bp, Artificial Sequence
  chemically synthesized
atgaaaccaatgattaggtt

SEQ ID NO: 2054 - DNA, 20 bp, Artificial Sequence
  chemically synthesized
tgattaggttcagcaattta

SEQ ID NO: 2055 - DNA, 20 bp, Artificial Sequence
  chemically synthesized
catcaaaaccccaaatgatt

SEQ ID NO: 2056 - DNA, 20 bp, Artificial Sequence
  chemically synthesized
ccaaatgatttagacatatt

SEQ ID NO: 2057 - DNA, 20 bp, Artificial Sequence
  chemically synthesized
catatttggtttgtcctctt

SEQ ID NO: 2058 - DNA, 20 bp, Artificial Sequence
  chemically synthesized
tggtttgtcctcttaagtca

SEQ ID NO: 2059 - DNA, 20 bp, Artificial Sequence
  chemically synthesized
gtcctcttaagtcaaagatg

SEQ ID NO: 2060 - DNA, 20 bp, Artificial Sequence
  chemically synthesized
ggaatcctgttatctcctat

SEQ ID NO: 2061 - DNA, 20 bp, Artificial Sequence
  chemically synthesized
gaatcctgttatctcctatc

SEQ ID NO: 2062 - DNA, 20 bp, Artificial Sequence
  chemically synthesized
tgttatctcctatcaggata

SEQ ID NO: 2063 - DNA, 20 bp, Artificial Sequence
  chemically synthesized
tcaggataaagacattcaac

SEQ ID NO: 2064 - DNA, 20 bp, Artificial Sequence
  chemically synthesized
ataaagacattcaactagca

SEQ ID NO: 2065 - DNA, 20 bp, Artificial Sequence
  chemically synthesized
aagacattcaactagcacag

SEQ ID NO: 2066 - DNA, 20 bp, Artificial Sequence
  chemically synthesized
agacattcaactagcacagt

SEQ ID NO: 2067 - DNA, 20 bp, Artificial Sequence
  chemically synthesized
tgttgatatgatcattttac

SEQ ID NO: 2068 - DNA, 20 bp, Artificial Sequence
  chemically synthesized
tatgatcattttacaagaca

SEQ ID NO: 2069 - DNA, 20 bp, Artificial Sequence
  chemically synthesized
ggtaacttgttacttatatt

SEQ ID NO: 2070 - DNA, 20 bp, Artificial Sequence
  chemically synthesized
gtaacttgttacttatattc

SEQ ID NO: 2071 - DNA, 20 bp, Artificial Sequence
  chemically synthesized
taacttgttacttatattca

SEQ ID NO: 2072 - DNA, 20 bp, Artificial Sequence
  chemically synthesized
ttatattcagggcatacatt

SEQ ID NO: 2073 - DNA, 20 bp, Artificial Sequence
  chemically synthesized
ggcatacatttagaaattca

SEQ ID NO: 2074 - DNA, 20 bp, Artificial Sequence
  chemically synthesized
ttcaaagaaataacttaaaa

SEQ ID NO: 2075 - DNA, 20 bp, Artificial Sequence
  chemically synthesized
tcaaagaaataacttaaaaa

SEQ ID NO: 2076 - DNA, 20 bp, Artificial Sequence
  chemically synthesized
caaagaaataacttaaaaaa

SEQ ID NO: 2077 - DNA, 20 bp, Artificial Sequence
  chemically synthesized
atattaaatgttacatacta

SEQ ID NO: 2078 - DNA, 20 bp, Artificial Sequence
  chemically synthesized
atgttacatactaaagctca

SEQ ID NO: 2079 - DNA, 20 bp, Artificial Sequence
  chemically synthesized
acatactaaagctcatagaa

SEQ ID NO: 2080 - DNA, 20 bp, Artificial Sequence
  chemically synthesized
aagctcatagaatagacccg

SEQ ID NO: 2081 - DNA, 20 bp, Artificial Sequence
  chemically synthesized
ccgcagtattcccaaatatc

SEQ ID NO: 2082 - DNA, 20 bp, Artificial Sequence
  chemically synthesized
atccagtccatgtgcaattc

SEQ ID NO: 2083 - DNA, 20 bp, Artificial Sequence
  chemically synthesized
atgtgcaattctagtatgac

SEQ ID NO: 2084 - DNA, 20 bp, Artificial Sequence
  chemically synthesized
gtgcaattctagtatgactg

SEQ ID NO: 2085 - DNA, 20 bp, Artificial Sequence
  chemically synthesized
ttctagtatgactggagatt

SEQ ID NO: 2086 - DNA, 20 bp, Artificial Sequence
  chemically synthesized
gagatttggcccctaaccca

SEQ ID NO: 2087 - DNA, 20 bp, Artificial Sequence
  chemically synthesized
cctaacccatagcaactaaa

SEQ ID NO: 2088 - DNA, 20 bp, Artificial Sequence
  chemically synthesized
ctaacccatagcaactaaaa

SEQ ID NO: 2089 - DNA, 20 bp, Artificial Sequence
  chemically synthesized
aacccatagcaactaaaaag

SEQ ID NO: 2090 - DNA, 20 bp, Artificial Sequence
  chemically synthesized
gcaactaaaaaggagaaaaa

SEQ ID NO: 2091 - DNA, 20 bp, Artificial Sequence
  chemically synthesized
caactaaaaaggagaaaaac

SEQ ID NO: 2092 - DNA, 20 bp, Artificial Sequence
  chemically synthesized
ctaaaaaggagaaaaacagg

SEQ ID NO: 2093 - DNA, 20 bp, Artificial Sequence
  chemically synthesized
taaaaaggagaaaaacagga

SEQ ID NO: 2094 - DNA, 20 bp, Artificial Sequence
  chemically synthesized
aaaaaggagaaaaacaggaa

SEQ ID NO: 2095 - DNA, 20 bp, Artificial Sequence
  chemically synthesized
aggagaaaaacaggaaggga

SEQ ID NO: 2096 - DNA, 20 bp, Artificial Sequence
  chemically synthesized
ggagaaaaacaggaagggaa

SEQ ID NO: 2097 - DNA, 20 bp, Artificial Sequence
  chemically synthesized
aaaacaggaagggaaaggct

SEQ ID NO: 2098 - DNA, 20 bp, Artificial Sequence
  chemically synthesized
caggaagggaaaggctcagc

SEQ ID NO: 2099 - DNA, 20 bp, Artificial Sequence
  chemically synthesized
ggaagggaaaggctcagcta

SEQ ID NO: 2100 - DNA, 20 bp, Artificial Sequence
  chemically synthesized
cagctagagactgacacttg

SEQ ID NO: 2101 - DNA, 20 bp, Artificial Sequence
  chemically synthesized
agctagagactgacacttgt

SEQ ID NO: 2102 - DNA, 20 bp, Artificial Sequence
  chemically synthesized
gttgaattgtgtcccccaaa

SEQ ID NO: 2103 - DNA, 20 bp, Artificial Sequence
  chemically synthesized
tatgttcaattcctaaccct

SEQ ID NO: 2104 - DNA, 20 bp, Artificial Sequence
  chemically synthesized
tacgtgaatgtgaccttatc

SEQ ID NO: 2105 - DNA, 20 bp, Artificial Sequence
  chemically synthesized
atgtgaccttatctagaaat

SEQ ID NO: 2106 - DNA, 20 bp, Artificial Sequence
  chemically synthesized
taagtgtaatcatgttaaaa

SEQ ID NO: 2107 - DNA, 20 bp, Artificial Sequence
  chemically synthesized
aagtgtaatcatgttaaaat

SEQ ID NO: 2108 - DNA, 20 bp, Artificial Sequence
  chemically synthesized
agtgtaatcatgttaaaatg

SEQ ID NO: 2109 - DNA, 20 bp, Artificial Sequence
  chemically synthesized
atgttaaaatggggtcatac

SEQ ID NO: 2110 - DNA, 20 bp, Artificial Sequence
  chemically synthesized
aaaatggggtcatactggat

SEQ ID NO: 2111 - DNA, 20 bp, Artificial Sequence
  chemically synthesized
aatggggtcatactggatta

SEQ ID NO: 2112 - DNA, 20 bp, Artificial Sequence
  chemically synthesized
ggggtcatactggattagag

SEQ ID NO: 2113 - DNA, 20 bp, Artificial Sequence
  chemically synthesized
gggtcatactggattagagt

SEQ ID NO: 2114 - DNA, 20 bp, Artificial Sequence
  chemically synthesized
ggtcatactggattagagtg

SEQ ID NO: 2115 - DNA, 20 bp, Artificial Sequence
  chemically synthesized
ccaataactgctgtgtttat

SEQ ID NO: 2116 - DNA, 20 bp, Artificial Sequence
  chemically synthesized
caataactgctgtgtttata

SEQ ID NO: 2117 - DNA, 20 bp, Artificial Sequence
  chemically synthesized
ataactgctgtgtttataag

SEQ ID NO: 2118 - DNA, 20 bp, Artificial Sequence
  chemically synthesized
aactgctgtgtttataagga

SEQ ID NO: 2119 - DNA, 20 bp, Artificial Sequence
  chemically synthesized
ctgctgtgtttataaggaga

SEQ ID NO: 2120 - DNA, 20 bp, Artificial Sequence
  chemically synthesized
tgtttataaggagagagatt

SEQ ID NO: 2121 - DNA, 20 bp, Artificial Sequence
  chemically synthesized
tttataaggagagagatttg

SEQ ID NO: 2122 - DNA, 20 bp, Artificial Sequence
  chemically synthesized
aggagagagatttggagaca

SEQ ID NO: 2123 - DNA, 20 bp, Artificial Sequence
  chemically synthesized
gagagagatttggagacaca

SEQ ID NO: 2124 - DNA, 20 bp, Artificial Sequence
  chemically synthesized
tttggagacacagagacaaa

SEQ ID NO: 2125 - DNA, 20 bp, Artificial Sequence
  chemically synthesized
ggagacacagagacaaatgg

SEQ ID NO: 2126 - DNA, 20 bp, Artificial Sequence
  chemically synthesized
acacagagacaaatggtaga

SEQ ID NO: 2127 - DNA, 20 bp, Artificial Sequence
  chemically synthesized
aaatggtagacagccatgtg

SEQ ID NO: 2128 - DNA, 20 bp, Artificial Sequence
  chemically synthesized
agacagccatgtgaagacaa

SEQ ID NO: 2129 - DNA, 20 bp, Artificial Sequence
  chemically synthesized
gacagccatgtgaagacaaa

SEQ ID NO: 2130 - DNA, 20 bp, Artificial Sequence
  chemically synthesized
agccatgtgaagacaaaagg

SEQ ID NO: 2131 - DNA, 20 bp, Artificial Sequence
  chemically synthesized
tgaagacaaaaggcagatac

SEQ ID NO: 2132 - DNA, 20 bp, Artificial Sequence
  chemically synthesized
tactggattgttgaaactac

SEQ ID NO: 2133 - DNA, 20 bp, Artificial Sequence
  chemically synthesized
actggattgttgaaactaca

SEQ ID NO: 2134 - DNA, 20 bp, Artificial Sequence
  chemically synthesized
gattgttgaaactacaaggc

SEQ ID NO: 2135 - DNA, 20 bp, Artificial Sequence
  chemically synthesized
gttgaaactacaaggcaaga

SEQ ID NO: 2136 - DNA, 20 bp, Artificial Sequence
  chemically synthesized
ttgaaactacaaggcaagaa

SEQ ID NO: 2137 - DNA, 20 bp, Artificial Sequence
  chemically synthesized
caaggcaagaaaggaacact

SEQ ID NO: 2138 - DNA, 20 bp, Artificial Sequence
  chemically synthesized
aaggcaagaaaggaacactc

SEQ ID NO: 2139 - DNA, 20 bp, Artificial Sequence
  chemically synthesized
aaaggaacactcaggattgc

SEQ ID NO: 2140 - DNA, 20 bp, Artificial Sequence
  chemically synthesized
tcaggattgctggtaaccac

SEQ ID NO: 2141 - DNA, 20 bp, Artificial Sequence
  chemically synthesized
ggattgctggtaaccaccag

SEQ ID NO: 2142 - DNA, 20 bp, Artificial Sequence
  chemically synthesized
tgctggtaaccaccagaagc

SEQ ID NO: 2143 - DNA, 20 bp, Artificial Sequence
  chemically synthesized
gctggtaaccaccagaagcc

SEQ ID NO: 2144 - DNA, 20 bp, Artificial Sequence
  chemically synthesized
ggtaaccaccagaagccagg

SEQ ID NO: 2145 - DNA, 20 bp, Artificial Sequence
  chemically synthesized
taaccaccagaagccaggaa

SEQ ID NO: 2146 - DNA, 20 bp, Artificial Sequence
  chemically synthesized
aaccaccagaagccaggaag

SEQ ID NO: 2147 - DNA, 20 bp, Artificial Sequence
  chemically synthesized
accagaagccaggaagaggc

SEQ ID NO: 2148 - DNA, 20 bp, Artificial Sequence
  chemically synthesized
ccagaagccaggaagaggca

SEQ ID NO: 2149 - DNA, 20 bp, Artificial Sequence
  chemically synthesized
aagccaggaagaggcaagga

SEQ ID NO: 2150 - DNA, 20 bp, Artificial Sequence
  chemically synthesized
gccaggaagaggcaaggaaa

SEQ ID NO: 2151 - DNA, 20 bp, Artificial Sequence
  chemically synthesized
ggaaagagtcttctctcttg

SEQ ID NO: 2152 - DNA, 20 bp, Artificial Sequence
  chemically synthesized
ccctgtcaacactttgattt

SEQ ID NO: 2153 - DNA, 20 bp, Artificial Sequence
  chemically synthesized
acactttgatttcggacttc

SEQ ID NO: 2154 - DNA, 20 bp, Artificial Sequence
  chemically synthesized
gatttcggacttctagcttc

SEQ ID NO: 2155 - DNA, 20 bp, Artificial Sequence
  chemically synthesized
cttctagcttctagaattgt

SEQ ID NO: 2156 - DNA, 20 bp, Artificial Sequence
  chemically synthesized
tctagcttctagaattgtga

SEQ ID NO: 2157 - DNA, 20 bp, Artificial Sequence
  chemically synthesized
gaataaattgctgttgttta

SEQ ID NO: 2158 - DNA, 20 bp, Artificial Sequence
  chemically synthesized
tgctgttgtttaaagccact

SEQ ID NO: 2159 - DNA, 20 bp, Artificial Sequence
  chemically synthesized
gtttaaagccactcagtttg

SEQ ID NO: 2160 - DNA, 20 bp, Artificial Sequence
  chemically synthesized
tcagtttgtggtgctttgtt

SEQ ID NO: 2161 - DNA, 20 bp, Artificial Sequence
  chemically synthesized
ggtgctttgttaagtaatct

SEQ ID NO: 2162 - DNA, 20 bp, Artificial Sequence
  chemically synthesized
tttgttaagtaatcttagaa

SEQ ID NO: 2163 - DNA, 20 bp, Artificial Sequence
  chemically synthesized
agtaatacaacacctaacaa

SEQ ID NO: 2164 - DNA, 20 bp, Artificial Sequence
  chemically synthesized
ctaacaacagaaatacttta

SEQ ID NO: 2165 - DNA, 20 bp, Artificial Sequence
  chemically synthesized
aaatactttaaagccgctaa

SEQ ID NO: 2166 - DNA, 20 bp, Artificial Sequence
  chemically synthesized
aatactttaaagccgctaaa

SEQ ID NO: 2167 - DNA, 20 bp, Artificial Sequence
  chemically synthesized
caaaaaaaaaaaaaaaaaaa

SEQ ID NO: 2168 - DNA, 20 bp, Artificial Sequence
  chemically synthesized
aaaaaaaaaaaaaaaagaca

SEQ ID NO: 2169 - DNA, 20 bp, Artificial Sequence
  chemically synthesized
aaaagacatggaaataccac

SEQ ID NO: 2170 - DNA, 20 bp, Artificial Sequence
  chemically synthesized
acatggaaataccacaagtc

SEQ ID NO: 2171 - DNA, 20 bp, Artificial Sequence
  chemically synthesized
atggaaataccacaagtctg

SEQ ID NO: 2172 - DNA, 20 bp, Artificial Sequence
  chemically synthesized
tctggagccataacaaaaaa

SEQ ID NO: 2173 - DNA, 20 bp, Artificial Sequence
  chemically synthesized
ctggagccataacaaaaaat

SEQ ID NO: 2174 - DNA, 20 bp, Artificial Sequence
  chemically synthesized
cataacaaaaaatgggcaaa

SEQ ID NO: 2175 - DNA, 20 bp, Artificial Sequence
  chemically synthesized
ggcaaacagtcctgtatcct

SEQ ID NO: 2176 - DNA, 20 bp, Artificial Sequence
  chemically synthesized
tgtatcctcagtgaactctc

SEQ ID NO: 2177 - DNA, 20 bp, Artificial Sequence
  chemically synthesized
tcagtgaactctctggttat

SEQ ID NO: 2178 - DNA, 20 bp, Artificial Sequence
  chemically synthesized
ctctggttatgagaatactg

SEQ ID NO: 2179 - DNA, 20 bp, Artificial Sequence
  chemically synthesized
tgatgtttaaaacgacattg

SEQ ID NO: 2180 - DNA, 20 bp, Artificial Sequence
  chemically synthesized
taaaacgacattgaagtatc

SEQ ID NO: 2181 - DNA, 20 bp, Artificial Sequence
  chemically synthesized
gacattgaagtatcaagaca

SEQ ID NO: 2182 - DNA, 20 bp, Artificial Sequence
  chemically synthesized
gataaaaatatttaatatgc

SEQ ID NO: 2183 - DNA, 20 bp, Artificial Sequence
  chemically synthesized
aaatatttaatatgctagcc

SEQ ID NO: 2184 - DNA, 20 bp, Artificial Sequence
  chemically synthesized
tgctagccaagaaaccaata

SEQ ID NO: 2185 - DNA, 20 bp, Artificial Sequence
  chemically synthesized
tacagcatttcatcactgca

SEQ ID NO: 2186 - DNA, 20 bp, Artificial Sequence
  chemically synthesized
cagcatttcatcactgcaaa

SEQ ID NO: 2187 - DNA, 20 bp, Artificial Sequence
  chemically synthesized
gcatttcatcactgcaaaga

SEQ ID NO: 2188 - DNA, 20 bp, Artificial Sequence
  chemically synthesized
aaagagagttctacactaaa

SEQ ID NO: 2189 - DNA, 20 bp, Artificial Sequence
  chemically synthesized
agagttctacactaaatggc

SEQ ID NO: 2190 - DNA, 20 bp, Artificial Sequence
  chemically synthesized
actaaatggctagaatttaa

SEQ ID NO: 2191 - DNA, 20 bp, Artificial Sequence
  chemically synthesized
tggctagaatttaaaagctt

SEQ ID NO: 2192 - DNA, 20 bp, Artificial Sequence
  chemically synthesized
atttaaaagctttagttatt

SEQ ID NO: 2193 - DNA, 20 bp, Artificial Sequence
  chemically synthesized
ctttagttatttagaacacg

SEQ ID NO: 2194 - DNA, 20 bp, Artificial Sequence
  chemically synthesized
tatttagaacacgtagaaaa

SEQ ID NO: 2195 - DNA, 20 bp, Artificial Sequence
  chemically synthesized
ttagaacacgtagaaaacag

SEQ ID NO: 2196 - DNA, 20 bp, Artificial Sequence
  chemically synthesized
tagaacacgtagaaaacaga

SEQ ID NO: 2197 - DNA, 20 bp, Artificial Sequence
  chemically synthesized
agaacacgtagaaaacagaa

SEQ ID NO: 2198 - DNA, 20 bp, Artificial Sequence
  chemically synthesized
tagaaaacagaagggctaaa

SEQ ID NO: 2199 - DNA, 20 bp, Artificial Sequence
  chemically synthesized
agaaaacagaagggctaaat

SEQ ID NO: 2200 - DNA, 20 bp, Artificial Sequence
  chemically synthesized
gaaaacagaagggctaaata

SEQ ID NO: 2201 - DNA, 20 bp, Artificial Sequence
  chemically synthesized
gggctaaatagggcccgttc

SEQ ID NO: 2202 - DNA, 20 bp, Artificial Sequence
  chemically synthesized
ttcaagcctttgaatttaat

SEQ ID NO: 2203 - DNA, 20 bp, Artificial Sequence
  chemically synthesized
ctttgaatttaatgagaaaa

SEQ ID NO: 2204 - DNA, 20 bp, Artificial Sequence
  chemically synthesized
tttaatgagaaaacagacat

SEQ ID NO: 2205 - DNA, 20 bp, Artificial Sequence
  chemically synthesized
ttaatgagaaaacagacatg

SEQ ID NO: 2206 - DNA, 20 bp, Artificial Sequence
  chemically synthesized
aatgagaaaacagacatgag

SEQ ID NO: 2207 - DNA, 20 bp, Artificial Sequence
  chemically synthesized
gagaaaacagacatgaggag

SEQ ID NO: 2208 - DNA, 20 bp, Artificial Sequence
  chemically synthesized
gaacataaacgctcacatcc

SEQ ID NO: 2209 - DNA, 20 bp, Artificial Sequence
  chemically synthesized
ataaacgctcacatccaaga

SEQ ID NO: 2210 - DNA, 20 bp, Artificial Sequence
  chemically synthesized
ctcacatccaagacagaacc

SEQ ID NO: 2211 - DNA, 20 bp, Artificial Sequence
  chemically synthesized
tcacatccaagacagaaccc

SEQ ID NO: 2212 - DNA, 20 bp, Artificial Sequence
  chemically synthesized
cacatccaagacagaaccca

SEQ ID NO: 2213 - DNA, 20 bp, Artificial Sequence
  chemically synthesized
aagacagaacccagggctct

SEQ ID NO: 2214 - DNA, 20 bp, Artificial Sequence
  chemically synthesized
cataaacataccactctaaa

SEQ ID NO: 2215 - DNA, 20 bp, Artificial Sequence
  chemically synthesized
ataaacataccactctaaaa

SEQ ID NO: 2216 - DNA, 20 bp, Artificial Sequence
  chemically synthesized
acaaatcattcttgcaaata

SEQ ID NO: 2217 - DNA, 20 bp, Artificial Sequence
  chemically synthesized
ttatgtgccatgtaacgttt

SEQ ID NO: 2218 - DNA, 20 bp, Artificial Sequence
  chemically synthesized
ccatgtaacgtttcagtcaa

SEQ ID NO: 2219 - DNA, 20 bp, Artificial Sequence
  chemically synthesized
tgtaacgtttcagtcaatgg

SEQ ID NO: 2220 - DNA, 20 bp, Artificial Sequence
  chemically synthesized
atggtagactgcatatatga

SEQ ID NO: 2221 - DNA, 20 bp, Artificial Sequence
  chemically synthesized
gtagactgcatatatgatgg

SEQ ID NO: 2222 - DNA, 20 bp, Artificial Sequence
  chemically synthesized
atatatgatggtagtcccat

SEQ ID NO: 2223 - DNA, 20 bp, Artificial Sequence
  chemically synthesized
gtagtcccattagattacaa

SEQ ID NO: 2224 - DNA, 20 bp, Artificial Sequence
  chemically synthesized
ctgaaaatatgctattgcct

SEQ ID NO: 2225 - DNA, 20 bp, Artificial Sequence
  chemically synthesized
agtgacactgtaaccatcat

SEQ ID NO: 2226 - DNA, 20 bp, Artificial Sequence
  chemically synthesized
gtgacactgtaaccatcata

SEQ ID NO: 2227 - DNA, 20 bp, Artificial Sequence
  chemically synthesized
ctgtaaccatcataaggtct

SEQ ID NO: 2228 - DNA, 20 bp, Artificial Sequence
  chemically synthesized
aggtcttagtactattttgc

SEQ ID NO: 2229 - DNA, 20 bp, Artificial Sequence
  chemically synthesized
actattttgcaagttattta

SEQ ID NO: 2230 - DNA, 20 bp, Artificial Sequence
  chemically synthesized
tttgcaagttatttaaagta

SEQ ID NO: 2231 - DNA, 20 bp, Artificial Sequence
  chemically synthesized
tatagcacatacaattatta

SEQ ID NO: 2232 - DNA, 20 bp, Artificial Sequence
  chemically synthesized
ataataaactactacattgc

SEQ ID NO: 2233 - DNA, 20 bp, Artificial Sequence
  chemically synthesized
tatgccttttattgttattt

SEQ ID NO: 2234 - DNA, 20 bp, Artificial Sequence
  chemically synthesized
tgccttttattgttatttta

SEQ ID NO: 2235 - DNA, 20 bp, Artificial Sequence
  chemically synthesized
cttctacttttttttttttt

SEQ ID NO: 2236 - DNA, 20 bp, Artificial Sequence
  chemically synthesized
tttttaagttaaatgtaaaa

SEQ ID NO: 2237 - DNA, 20 bp, Artificial Sequence
  chemically synthesized
agttaaatgtaaaacagcct

SEQ ID NO: 2238 - DNA, 20 bp, Artificial Sequence
  chemically synthesized
gttaaatgtaaaacagcctc

SEQ ID NO: 2239 - DNA, 20 bp, Artificial Sequence
  chemically synthesized
aatgtaaaacagcctcaggc

SEQ ID NO: 2240 - DNA, 20 bp, Artificial Sequence
  chemically synthesized
acagcctcaggcaagtcctt

SEQ ID NO: 2241 - DNA, 20 bp, Artificial Sequence
  chemically synthesized
cagcctcaggcaagtccttc

SEQ ID NO: 2242 - DNA, 20 bp, Artificial Sequence
  chemically synthesized
gcctcaggcaagtccttcag

SEQ ID NO: 2243 - DNA, 20 bp, Artificial Sequence
  chemically synthesized
cctcaggcaagtccttcagg

SEQ ID NO: 2244 - DNA, 20 bp, Artificial Sequence
  chemically synthesized
gtccttcaggaggtattcaa

SEQ ID NO: 2245 - DNA, 20 bp, Artificial Sequence
  chemically synthesized
ttcaggaggtattcaacaga

SEQ ID NO: 2246 - DNA, 20 bp, Artificial Sequence
  chemically synthesized
aacagaaagcactgttatca

SEQ ID NO: 2247 - DNA, 20 bp, Artificial Sequence
  chemically synthesized
acagaaagcactgttatcat

SEQ ID NO: 2248 - DNA, 20 bp, Artificial Sequence
  chemically synthesized
agcactgttatcataggtga

SEQ ID NO: 2249 - DNA, 20 bp, Artificial Sequence
  chemically synthesized
tattgcccctaaaaaccttc

SEQ ID NO: 2250 - DNA, 20 bp, Artificial Sequence
  chemically synthesized
tgcccctaaaaaccttccag

SEQ ID NO: 2251 - DNA, 20 bp, Artificial Sequence
  chemically synthesized
gcccctaaaaaccttccagt

SEQ ID NO: 2252 - DNA, 20 bp, Artificial Sequence
  chemically synthesized
taaaaaccttccagtgggac

SEQ ID NO: 2253 - DNA, 20 bp, Artificial Sequence
  chemically synthesized
ccttccagtgggacaagatg

SEQ ID NO: 2254 - DNA, 20 bp, Artificial Sequence
  chemically synthesized
ttccagtgggacaagatgtg

SEQ ID NO: 2255 - DNA, 20 bp, Artificial Sequence
  chemically synthesized
tccagtgggacaagatgtgg

SEQ ID NO: 2256 - DNA, 20 bp, Artificial Sequence
  chemically synthesized
agtgggacaagatgtggagg

SEQ ID NO: 2257 - DNA, 20 bp, Artificial Sequence
  chemically synthesized
gggacaagatgtggaggtgg

SEQ ID NO: 2258 - DNA, 20 bp, Artificial Sequence
  chemically synthesized
ggacaagatgtggaggtgga

SEQ ID NO: 2259 - DNA, 20 bp, Artificial Sequence
  chemically synthesized
caagatgtggaggtggaagg

SEQ ID NO: 2260 - DNA, 20 bp, Artificial Sequence
  chemically synthesized
atgtggaggtggaaggcagt

SEQ ID NO: 2261 - DNA, 20 bp, Artificial Sequence
  chemically synthesized
tgtggaggtggaaggcagtg

SEQ ID NO: 2262 - DNA, 20 bp, Artificial Sequence
  chemically synthesized
ggaggtggaaggcagtgagg

SEQ ID NO: 2263 - DNA, 20 bp, Artificial Sequence
  chemically synthesized
ggtggaaggcagtgaggtgg

SEQ ID NO: 2264 - DNA, 20 bp, Artificial Sequence
  chemically synthesized
gtggaaggcagtgaggtgga

SEQ ID NO: 2265 - DNA, 20 bp, Artificial Sequence
  chemically synthesized
tggaaggcagtgaggtggaa

SEQ ID NO: 2266 - DNA, 20 bp, Artificial Sequence
  chemically synthesized
gaaggcagtgaggtggaagg

SEQ ID NO: 2267 - DNA, 20 bp, Artificial Sequence
  chemically synthesized
atcctaatcctgtctatgcc

SEQ ID NO: 2268 - DNA, 20 bp, Artificial Sequence
  chemically synthesized
tcctaatcctgtctatgcct

SEQ ID NO: 2269 - DNA, 20 bp, Artificial Sequence
  chemically synthesized
tcctgtctatgcctaggtga

SEQ ID NO: 2270 - DNA, 20 bp, Artificial Sequence
  chemically synthesized
aggtgaaagtgtgtgtgttt

SEQ ID NO: 2271 - DNA, 20 bp, Artificial Sequence
  chemically synthesized
ttttaacaaaaacgactaac

SEQ ID NO: 2272 - DNA, 20 bp, Artificial Sequence
  chemically synthesized
gtaaaaaaaaaaatttaaaa

SEQ ID NO: 2273 - DNA, 20 bp, Artificial Sequence
  chemically synthesized
aaaaaatttaaaatagaaaa

SEQ ID NO: 2274 - DNA, 20 bp, Artificial Sequence
  chemically synthesized
ttaaaatagaaaatagaaaa

SEQ ID NO: 2275 - DNA, 20 bp, Artificial Sequence
  chemically synthesized
agaaaatagaaaaaagcttc

SEQ ID NO: 2276 - DNA, 20 bp, Artificial Sequence
  chemically synthesized
tagaaaaaagcttctagaat

SEQ ID NO: 2277 - DNA, 20 bp, Artificial Sequence
  chemically synthesized
agaaaaaagcttctagaata

SEQ ID NO: 2278 - DNA, 20 bp, Artificial Sequence
  chemically synthesized
gcttctagaataaggataca

SEQ ID NO: 2279 - DNA, 20 bp, Artificial Sequence
  chemically synthesized
aaagaaaaaatatttttgta

SEQ ID NO: 2280 - DNA, 20 bp, Artificial Sequence
  chemically synthesized
atacaatgtatttgtgtttc

SEQ ID NO: 2281 - DNA, 20 bp, Artificial Sequence
  chemically synthesized
atgtatttgtgtttcaagct

SEQ ID NO: 2282 - DNA, 20 bp, Artificial Sequence
  chemically synthesized
tttcaagctaagtattttaa

SEQ ID NO: 2283 - DNA, 20 bp, Artificial Sequence
  chemically synthesized
ttaaaagttaaaaaattaaa

SEQ ID NO: 2284 - DNA, 20 bp, Artificial Sequence
  chemically synthesized
aaaaaattaaaaagtttaca

SEQ ID NO: 2285 - DNA, 20 bp, Artificial Sequence
  chemically synthesized
aaaaagtttacaaagttaaa

SEQ ID NO: 2286 - DNA, 20 bp, Artificial Sequence
  chemically synthesized
aaagttataattttttattg

SEQ ID NO: 2287 - DNA, 20 bp, Artificial Sequence
  chemically synthesized
tttattgaagaaaaactgtt

SEQ ID NO: 2288 - DNA, 20 bp, Artificial Sequence
  chemically synthesized
aaaaactgttaagataaatt

SEQ ID NO: 2289 - DNA, 20 bp, Artificial Sequence
  chemically synthesized
ctgttaagataaatttggtg

SEQ ID NO: 2290 - DNA, 20 bp, Artificial Sequence
  chemically synthesized
agataaatttggtgtagctt

SEQ ID NO: 2291 - DNA, 20 bp, Artificial Sequence
  chemically synthesized
gcttcagcgtactgtgttta

SEQ ID NO: 2292 - DNA, 20 bp, Artificial Sequence
  chemically synthesized
cgtactgtgtttatagtcta

SEQ ID NO: 2293 - DNA, 20 bp, Artificial Sequence
  chemically synthesized
actgtgtttatagtctacag

SEQ ID NO: 2294 - DNA, 20 bp, Artificial Sequence
  chemically synthesized
ttatagtctacagtggtgta

SEQ ID NO: 2295 - DNA, 20 bp, Artificial Sequence
  chemically synthesized
tacagtggtgtacagtgttc

SEQ ID NO: 2296 - DNA, 20 bp, Artificial Sequence
  chemically synthesized
acagtggtgtacagtgttct

SEQ ID NO: 2297 - DNA, 20 bp, Artificial Sequence
  chemically synthesized
cactcactcactgactcacc

SEQ ID NO: 2298 - DNA, 20 bp, Artificial Sequence
  chemically synthesized
ctcactcactgactcaccca

SEQ ID NO: 2299 - DNA, 20 bp, Artificial Sequence
  chemically synthesized
gactcacccagagcaacttc

SEQ ID NO: 2300 - DNA, 20 bp, Artificial Sequence
  chemically synthesized
agagcaacttctagtcctgc

SEQ ID NO: 2301 - DNA, 20 bp, Artificial Sequence
  chemically synthesized
agtcctgcaagctccattcg

SEQ ID NO: 2302 - DNA, 20 bp, Artificial Sequence
  chemically synthesized
ctgcaagctccattcgtggt

SEQ ID NO: 2303 - DNA, 20 bp, Artificial Sequence
  chemically synthesized
caagctccattcgtggtaag

SEQ ID NO: 2304 - DNA, 20 bp, Artificial Sequence
  chemically synthesized
ttcgtggtaagtggcctaca

SEQ ID NO: 2305 - DNA, 20 bp, Artificial Sequence
  chemically synthesized
tcgtggtaagtggcctacac

SEQ ID NO: 2306 - DNA, 20 bp, Artificial Sequence
  chemically synthesized
tttctctgtttgcatatatt

SEQ ID NO: 2307 - DNA, 20 bp, Artificial Sequence
  chemically synthesized
cactgtgttacaactgtcta

SEQ ID NO: 2308 - DNA, 20 bp, Artificial Sequence
  chemically synthesized
ttacaactgtctatagtatt

SEQ ID NO: 2309 - DNA, 20 bp, Artificial Sequence
  chemically synthesized
actgtctatagtattcagta

SEQ ID NO: 2310 - DNA, 20 bp, Artificial Sequence
  chemically synthesized
tatagtattcagtacagtaa

SEQ ID NO: 2311 - DNA, 20 bp, Artificial Sequence
  chemically synthesized
tcagtacagtaacagttgta

SEQ ID NO: 2312 - DNA, 20 bp, Artificial Sequence
  chemically synthesized
cagtacagtaacagttgtac

SEQ ID NO: 2313 - DNA, 20 bp, Artificial Sequence
  chemically synthesized
gtaacagttgtacaggtttg

SEQ ID NO: 2314 - DNA, 20 bp, Artificial Sequence
  chemically synthesized
agttgtacaggtttgtggcc

SEQ ID NO: 2315 - DNA, 20 bp, Artificial Sequence
  chemically synthesized
gttgtacaggtttgtggcct

SEQ ID NO: 2316 - DNA, 20 bp, Artificial Sequence
  chemically synthesized
tgtacaggtttgtggcctag

SEQ ID NO: 2317 - DNA, 20 bp, Artificial Sequence
  chemically synthesized
ggtttgtggcctaggagcaa

SEQ ID NO: 2318 - DNA, 20 bp, Artificial Sequence
  chemically synthesized
gagcaacagactataccata

SEQ ID NO: 2319 - DNA, 20 bp, Artificial Sequence
  chemically synthesized
acagactataccatacggcc

SEQ ID NO: 2320 - DNA, 20 bp, Artificial Sequence
  chemically synthesized
cagactataccatacggcct

SEQ ID NO: 2321 - DNA, 20 bp, Artificial Sequence
  chemically synthesized
ccatacggcctaggtacata

SEQ ID NO: 2322 - DNA, 20 bp, Artificial Sequence
  chemically synthesized
catacggcctaggtacataa

SEQ ID NO: 2323 - DNA, 20 bp, Artificial Sequence
  chemically synthesized
tacataaaggctatactatc

SEQ ID NO: 2324 - DNA, 20 bp, Artificial Sequence
  chemically synthesized
acataaaggctatactatct

SEQ ID NO: 2325 - DNA, 20 bp, Artificial Sequence
  chemically synthesized
tatactatctaggtttgtgt

SEQ ID NO: 2326 - DNA, 20 bp, Artificial Sequence
  chemically synthesized
tcgcctaatgatgcattcct

SEQ ID NO: 2327 - DNA, 20 bp, Artificial Sequence
  chemically synthesized
gtgtgattgtactataattg

SEQ ID NO: 2328 - DNA, 20 bp, Artificial Sequence
  chemically synthesized
taattgaagacttgttatct

SEQ ID NO: 2329 - DNA, 20 bp, Artificial Sequence
  chemically synthesized
gacttgttatctaagactga

SEQ ID NO: 2330 - DNA, 20 bp, Artificial Sequence
  chemically synthesized
tatctaagactgaaagtaaa

SEQ ID NO: 2331 - DNA, 20 bp, Artificial Sequence
  chemically synthesized
aaagaattgcaatttcacct

SEQ ID NO: 2332 - DNA, 20 bp, Artificial Sequence
  chemically synthesized
aattgcaatttcacctaagc

SEQ ID NO: 2333 - DNA, 20 bp, Artificial Sequence
  chemically synthesized
taagcaagtctaaaactgtg

SEQ ID NO: 2334 - DNA, 20 bp, Artificial Sequence
  chemically synthesized
gtgaagtctatttataataa

SEQ ID NO: 2335 - DNA, 20 bp, Artificial Sequence
  chemically synthesized
tttataataatagcaataca

SEQ ID NO: 2336 - DNA, 20 bp, Artificial Sequence
  chemically synthesized
ataataatagcaatacaaag

SEQ ID NO: 2337 - DNA, 20 bp, Artificial Sequence
  chemically synthesized
tagcaatacaaagcagctaa

SEQ ID NO: 2338 - DNA, 20 bp, Artificial Sequence
  chemically synthesized
agcaatacaaagcagctaat

SEQ ID NO: 2339 - DNA, 20 bp, Artificial Sequence
  chemically synthesized
tctttgccatatgattgctt

SEQ ID NO: 2340 - DNA, 20 bp, Artificial Sequence
  chemically synthesized
ctttgccatatgattgcttt

SEQ ID NO: 2341 - DNA, 20 bp, Artificial Sequence
  chemically synthesized
ttgccatatgattgctttgg

SEQ ID NO: 2342 - DNA, 20 bp, Artificial Sequence
  chemically synthesized
tgatctgtaaatgtatgaca

SEQ ID NO: 2343 - DNA, 20 bp, Artificial Sequence
  chemically synthesized
aaagtaaacaattttactta

SEQ ID NO: 2344 - DNA, 20 bp, Artificial Sequence
  chemically synthesized
aatttcatccacatcttgtc

SEQ ID NO: 2345 - DNA, 20 bp, Artificial Sequence
  chemically synthesized
tttcatccacatcttgtcaa

SEQ ID NO: 2346 - DNA, 20 bp, Artificial Sequence
  chemically synthesized
tcatccacatcttgtcaaga

SEQ ID NO: 2347 - DNA, 20 bp, Artificial Sequence
  chemically synthesized
cacatcttgtcaagagagtt

SEQ ID NO: 2348 - DNA, 20 bp, Artificial Sequence
  chemically synthesized
gtcaagagagttcagtctga

SEQ ID NO: 2349 - DNA, 20 bp, Artificial Sequence
  chemically synthesized
agagagttcagtctgatgga

SEQ ID NO: 2350 - DNA, 20 bp, Artificial Sequence
  chemically synthesized
aaagcactgacttctattta

SEQ ID NO: 2351 - DNA, 20 bp, Artificial Sequence
  chemically synthesized
agcactgacttctatttaca

SEQ ID NO: 2352 - DNA, 20 bp, Artificial Sequence
  chemically synthesized
gacttctatttacagagcat

SEQ ID NO: 2353 - DNA, 20 bp, Artificial Sequence
  chemically synthesized
ctatttacagagcattagat

SEQ ID NO: 2354 - DNA, 20 bp, Artificial Sequence
  chemically synthesized
gagtgcttttatcatattat

SEQ ID NO: 2355 - DNA, 20 bp, Artificial Sequence
  chemically synthesized
tgcttttatcatattatgag

SEQ ID NO: 2356 - DNA, 20 bp, Artificial Sequence
  chemically synthesized
gcttttatcatattatgagt

SEQ ID NO: 2357 - DNA, 20 bp, Artificial Sequence
  chemically synthesized
tcatattatgagtaggcata

SEQ ID NO: 2358 - DNA, 20 bp, Artificial Sequence
  chemically synthesized
atattatgagtaggcataca

SEQ ID NO: 2359 - DNA, 20 bp, Artificial Sequence
  chemically synthesized
atgagtaggcatacagagcc

SEQ ID NO: 2360 - DNA, 20 bp, Artificial Sequence
  chemically synthesized
gcatacagagcctggcaaaa

SEQ ID NO: 2361 - DNA, 20 bp, Artificial Sequence
  chemically synthesized
ctggcaaaacagttaactct

SEQ ID NO: 2362 - DNA, 20 bp, Artificial Sequence
  chemically synthesized
cagttaactctaagtatgta

SEQ ID NO: 2363 - DNA, 20 bp, Artificial Sequence
  chemically synthesized
actctaagtatgtacagaaa

SEQ ID NO: 2364 - DNA, 20 bp, Artificial Sequence
  chemically synthesized
gaaatggttgaacacaacga

SEQ ID NO: 2365 - DNA, 20 bp, Artificial Sequence
  chemically synthesized
tgtaatttcaaaaattcatt

SEQ ID NO: 2366 - DNA, 20 bp, Artificial Sequence
  chemically synthesized
gtaatttcaaaaattcattt

SEQ ID NO: 2367 - DNA, 20 bp, Artificial Sequence
  chemically synthesized
aatatgttgtatcaatttaa

SEQ ID NO: 2368 - DNA, 20 bp, Artificial Sequence
  chemically synthesized
tgtatcaatttaatagtctt

SEQ ID NO: 2369 - DNA, 20 bp, Artificial Sequence
  chemically synthesized
tatcaatttaatagtcttaa

SEQ ID NO: 2370 - DNA, 20 bp, Artificial Sequence
  chemically synthesized
aatttaatagtcttaagaga

SEQ ID NO: 2371 - DNA, 20 bp, Artificial Sequence
  chemically synthesized
atagtcttaagagacagcac

SEQ ID NO: 2372 - DNA, 20 bp, Artificial Sequence
  chemically synthesized
taagagacagcactagatat

SEQ ID NO: 2373 - DNA, 20 bp, Artificial Sequence
  chemically synthesized
agcactagatataagccgta

SEQ ID NO: 2374 - DNA, 20 bp, Artificial Sequence
  chemically synthesized
cactgtttttaatacaatgt

SEQ ID NO: 2375 - DNA, 20 bp, Artificial Sequence
  chemically synthesized
tgtttttaatacaatgtaag

SEQ ID NO: 2376 - DNA, 20 bp, Artificial Sequence
  chemically synthesized
tttaatacaatgtaagcagt

SEQ ID NO: 2377 - DNA, 20 bp, Artificial Sequence
  chemically synthesized
cagtttacaatgatcaaata

SEQ ID NO: 2378 - DNA, 20 bp, Artificial Sequence
  chemically synthesized
agtttacaatgatcaaatat

SEQ ID NO: 2379 - DNA, 20 bp, Artificial Sequence
  chemically synthesized
gaatgtaatctgaattgaaa

SEQ ID NO: 2380 - DNA, 20 bp, Artificial Sequence
  chemically synthesized
actgctgtcataactaacaa

SEQ ID NO: 2381 - DNA, 20 bp, Artificial Sequence
  chemically synthesized
cataactaacaacagcaaac

SEQ ID NO: 2382 - DNA, 20 bp, Artificial Sequence
  chemically synthesized
taactaacaacagcaaactg

SEQ ID NO: 2383 - DNA, 20 bp, Artificial Sequence
  chemically synthesized
aactaacaacagcaaactgg

SEQ ID NO: 2384 - DNA, 20 bp, Artificial Sequence
  chemically synthesized
ggaggccaacataatgaatt

SEQ ID NO: 2385 - DNA, 20 bp, Artificial Sequence
  chemically synthesized
atatttttctttcattcttt

SEQ ID NO: 2386 - DNA, 20 bp, Artificial Sequence
  chemically synthesized
tatttttctttcattctttt

SEQ ID NO: 2387 - DNA, 20 bp, Artificial Sequence
  chemically synthesized
tttcattcttttaggttaaa

SEQ ID NO: 2388 - DNA, 20 bp, Artificial Sequence
  chemically synthesized
ttcattcttttaggttaaaa

SEQ ID NO: 2389 - DNA, 20 bp, Artificial Sequence
  chemically synthesized
attcttttaggttaaaaagg

SEQ ID NO: 2390 - DNA, 20 bp, Artificial Sequence
  chemically synthesized
taaaaaggtggataatcata

SEQ ID NO: 2391 - DNA, 20 bp, Artificial Sequence
  chemically synthesized
aaaaaggtggataatcataa

SEQ ID NO: 2392 - DNA, 20 bp, Artificial Sequence
  chemically synthesized
catcattaaactgaaaataa

SEQ ID NO: 2393 - DNA, 20 bp, Artificial Sequence
  chemically synthesized
aataaaagtatttcctaaaa

SEQ ID NO: 2394 - DNA, 20 bp, Artificial Sequence
  chemically synthesized
cctaaaacagaactgaaccc

SEQ ID NO: 2395 - DNA, 20 bp, Artificial Sequence
  chemically synthesized
taaaacagaactgaaccctg

SEQ ID NO: 2396 - DNA, 20 bp, Artificial Sequence
  chemically synthesized
agcaaaatctgattgaatta

SEQ ID NO: 2397 - DNA, 20 bp, Artificial Sequence
  chemically synthesized
gcaaaatctgattgaattat

SEQ ID NO: 2398 - DNA, 20 bp, Artificial Sequence
  chemically synthesized
caaaatctgattgaattata

SEQ ID NO: 2399 - DNA, 20 bp, Artificial Sequence
  chemically synthesized
aaattgaactattatactgc

SEQ ID NO: 2400 - DNA, 20 bp, Artificial Sequence
  chemically synthesized
agttacactctcactcctaa

SEQ ID NO: 2401 - DNA, 20 bp, Artificial Sequence
  chemically synthesized
actctcactcctaacagaat

SEQ ID NO: 2402 - DNA, 20 bp, Artificial Sequence
  chemically synthesized
acagaataagaaaaaaaaaa

SEQ ID NO: 2403 - DNA, 20 bp, Artificial Sequence
  chemically synthesized
cagaataagaaaaaaaaaat

SEQ ID NO: 2404 - DNA, 20 bp, Artificial Sequence
  chemically synthesized
ataagaaaaaaaaaatgggc

SEQ ID NO: 2405 - DNA, 20 bp, Artificial Sequence
  chemically synthesized
taagaaaaaaaaaatgggcc

SEQ ID NO: 2406 - DNA, 20 bp, Artificial Sequence
  chemically synthesized
aaaaaaaaatgggccgggca

SEQ ID NO: 2407 - DNA, 20 bp, Artificial Sequence
  chemically synthesized
aaaaaatgggccgggcatgg

SEQ ID NO: 2408 - DNA, 20 bp, Artificial Sequence
  chemically synthesized
aaaaatgggccgggcatggt

SEQ ID NO: 2409 - DNA, 20 bp, Artificial Sequence
  chemically synthesized
gtgggtcacacctgttatcc

SEQ ID NO: 2410 - DNA, 20 bp, Artificial Sequence
  chemically synthesized
cacctgttatcccagctctt

SEQ ID NO: 2411 - DNA, 20 bp, Artificial Sequence
  chemically synthesized
ctgttatcccagctctttgg

SEQ ID NO: 2412 - DNA, 20 bp, Artificial Sequence
  chemically synthesized
tgttatcccagctctttggt

SEQ ID NO: 2413 - DNA, 20 bp, Artificial Sequence
  chemically synthesized
tcccagctctttggtaggcc

SEQ ID NO: 2414 - DNA, 20 bp, Artificial Sequence
  chemically synthesized
cccagctctttggtaggccg

SEQ ID NO: 2415 - DNA, 20 bp, Artificial Sequence
  chemically synthesized
agctctttggtaggccgagg

SEQ ID NO: 2416 - DNA, 20 bp, Artificial Sequence
  chemically synthesized
gctctttggtaggccgaggc

SEQ ID NO: 2417 - DNA, 20 bp, Artificial Sequence
  chemically synthesized
ctttggtaggccgaggcagg

SEQ ID NO: 2418 - DNA, 20 bp, Artificial Sequence
  chemically synthesized
ccgaggcaggtggatcacct

SEQ ID NO: 2419 - DNA, 20 bp, Artificial Sequence
  chemically synthesized
cgaggcaggtggatcacctg

SEQ ID NO: 2420 - DNA, 20 bp, Artificial Sequence
  chemically synthesized
gcaggtggatcacctgaggt

SEQ ID NO: 2421 - DNA, 20 bp, Artificial Sequence
  chemically synthesized
caggtggatcacctgaggtc

SEQ ID NO: 2422 - DNA, 20 bp, Artificial Sequence
  chemically synthesized
ggtggatcacctgaggtcag

SEQ ID NO: 2423 - DNA, 20 bp, Artificial Sequence
  chemically synthesized
tcacctgaggtcaggagctc

SEQ ID NO: 2424 - DNA, 20 bp, Artificial Sequence
  chemically synthesized
tgaggtcaggagctcaagac

SEQ ID NO: 2425 - DNA, 20 bp, Artificial Sequence
  chemically synthesized
tcaggagctcaagaccagcc

SEQ ID NO: 2426 - DNA, 20 bp, Artificial Sequence
  chemically synthesized
caagaccagcctggccaaca

SEQ ID NO: 2427 - DNA, 20 bp, Artificial Sequence
  chemically synthesized
ctactaaaaatacaaaaaat

SEQ ID NO: 2428 - DNA, 20 bp, Artificial Sequence
  chemically synthesized
taaaaatacaaaaaattagc

SEQ ID NO: 2429 - DNA, 20 bp, Artificial Sequence
  chemically synthesized
aaaaatacaaaaaattagcc

SEQ ID NO: 2430 - DNA, 20 bp, Artificial Sequence
  chemically synthesized
tacaaaaaattagccgggtg

SEQ ID NO: 2431 - DNA, 20 bp, Artificial Sequence
  chemically synthesized
aaaaaattagccgggtgtgg

SEQ ID NO: 2432 - DNA, 20 bp, Artificial Sequence
  chemically synthesized
aaattagccgggtgtggtgg

SEQ ID NO: 2433 - DNA, 20 bp, Artificial Sequence
  chemically synthesized
gtggtggacacctgtaatcc

SEQ ID NO: 2434 - DNA, 20 bp, Artificial Sequence
  chemically synthesized
cacctgtaatcccagctact

SEQ ID NO: 2435 - DNA, 20 bp, Artificial Sequence
  chemically synthesized
acctgtaatcccagctactc

SEQ ID NO: 2436 - DNA, 20 bp, Artificial Sequence
  chemically synthesized
ctgtaatcccagctactcgg

SEQ ID NO: 2437 - DNA, 20 bp, Artificial Sequence
  chemically synthesized
tgtaatcccagctactcggg

SEQ ID NO: 2438 - DNA, 20 bp, Artificial Sequence
  chemically synthesized
tcccagctactcgggaggct

SEQ ID NO: 2439 - DNA, 20 bp, Artificial Sequence
  chemically synthesized
cccagctactcgggaggctg

SEQ ID NO: 2440 - DNA, 20 bp, Artificial Sequence
  chemically synthesized
agctactcgggaggctgagg

SEQ ID NO: 2441 - DNA, 20 bp, Artificial Sequence
  chemically synthesized
gctactcgggaggctgaggc

SEQ ID NO: 2442 - DNA, 20 bp, Artificial Sequence
  chemically synthesized
tactcgggaggctgaggcag

SEQ ID NO: 2443 - DNA, 20 bp, Artificial Sequence
  chemically synthesized
gcaggagaatctcttgaacc

SEQ ID NO: 2444 - DNA, 20 bp, Artificial Sequence
  chemically synthesized
aggagaatctcttgaacccg

SEQ ID NO: 2445 - DNA, 20 bp, Artificial Sequence
  chemically synthesized
ggagaatctcttgaacccgg

SEQ ID NO: 2446 - DNA, 20 bp, Artificial Sequence
  chemically synthesized
gaatctcttgaacccggagg

SEQ ID NO: 2447 - DNA, 20 bp, Artificial Sequence
  chemically synthesized
tctcttgaacccggaggtgg

SEQ ID NO: 2448 - DNA, 20 bp, Artificial Sequence
  chemically synthesized
tcttgaacccggaggtggca

SEQ ID NO: 2449 - DNA, 20 bp, Artificial Sequence
  chemically synthesized
cttgaacccggaggtggcag

SEQ ID NO: 2450 - DNA, 20 bp, Artificial Sequence
  chemically synthesized
gaggtggcagaggttgcaat

SEQ ID NO: 2451 - DNA, 20 bp, Artificial Sequence
  chemically synthesized
ggcagaggttgcaatgagct

SEQ ID NO: 2452 - DNA, 20 bp, Artificial Sequence
  chemically synthesized
gaggttgcaatgagctgaga

SEQ ID NO: 2453 - DNA, 20 bp, Artificial Sequence
  chemically synthesized
gagatggcgccactgcactc

SEQ ID NO: 2454 - DNA, 20 bp, Artificial Sequence
  chemically synthesized
ggcgccactgcactccagcc

SEQ ID NO: 2455 - DNA, 20 bp, Artificial Sequence
  chemically synthesized
gcgccactgcactccagcct

SEQ ID NO: 2456 - DNA, 20 bp, Artificial Sequence
  chemically synthesized
ctgcactccagcctgggcga

SEQ ID NO: 2457 - DNA, 20 bp, Artificial Sequence
  chemically synthesized
gcactccagcctgggcgaca

SEQ ID NO: 2458 - DNA, 20 bp, Artificial Sequence
  chemically synthesized
actccagcctgggcgacaga

SEQ ID NO: 2459 - DNA, 20 bp, Artificial Sequence
  chemically synthesized
tccagcctgggcgacagaga

SEQ ID NO: 2460 - DNA, 20 bp, Artificial Sequence
  chemically synthesized
acagagagagactctgcctc

SEQ ID NO: 2461 - DNA, 20 bp, Artificial Sequence
  chemically synthesized
caaacaaacaaacaaacaaa

SEQ ID NO: 2462 - DNA, 20 bp, Artificial Sequence
  chemically synthesized
aacaaacaaacaaaaagaat

SEQ ID NO: 2463 - DNA, 20 bp, Artificial Sequence
  chemically synthesized
aacaaacaaaaagaataaga

SEQ ID NO: 2464 - DNA, 20 bp, Artificial Sequence
  chemically synthesized
aaagaataagaaagaaaatg

SEQ ID NO: 2465 - DNA, 20 bp, Artificial Sequence
  chemically synthesized
aagaataagaaagaaaatga

SEQ ID NO: 2466 - DNA, 20 bp, Artificial Sequence
  chemically synthesized
aagaaagaaaatgaaggaca

SEQ ID NO: 2467 - DNA, 20 bp, Artificial Sequence
  chemically synthesized
aaagatcatactgaattgct

SEQ ID NO: 2468 - DNA, 20 bp, Artificial Sequence
  chemically synthesized
ttagttttaaatcctaccaa

SEQ ID NO: 2469 - DNA, 20 bp, Artificial Sequence
  chemically synthesized
ttaaatcctaccaaaagaaa

SEQ ID NO: 2470 - DNA, 20 bp, Artificial Sequence
  chemically synthesized
tcctaccaaaagaaatagcc

SEQ ID NO: 2471 - DNA, 20 bp, Artificial Sequence
  chemically synthesized
cctaccaaaagaaatagcct

SEQ ID NO: 2472 - DNA, 20 bp, Artificial Sequence
  chemically synthesized
gcctgggaaatgaaatgtca

SEQ ID NO: 2473 - DNA, 20 bp, Artificial Sequence
  chemically synthesized
ctgggaaatgaaatgtcaca

SEQ ID NO: 2474 - DNA, 20 bp, Artificial Sequence
  chemically synthesized
ggaaatgaaatgtcacagag

SEQ ID NO: 2475 - DNA, 20 bp, Artificial Sequence
  chemically synthesized
atgtcacagagaagtataat

SEQ ID NO: 2476 - DNA, 20 bp, Artificial Sequence
  chemically synthesized
tgtcacagagaagtataatc

SEQ ID NO: 2477 - DNA, 20 bp, Artificial Sequence
  chemically synthesized
tcacagagaagtataatcag

SEQ ID NO: 2478 - DNA, 20 bp, Artificial Sequence
  chemically synthesized
acagagaagtataatcagga

SEQ ID NO: 2479 - DNA, 20 bp, Artificial Sequence
  chemically synthesized
aattattttactaatacttg

SEQ ID NO: 2480 - DNA, 20 bp, Artificial Sequence
  chemically synthesized
atacttgaagtcatcgtctt

SEQ ID NO: 2481 - DNA, 20 bp, Artificial Sequence
  chemically synthesized
ttgaagtcatcgtctttggt

SEQ ID NO: 2482 - DNA, 20 bp, Artificial Sequence
  chemically synthesized
aaaatccatacatgcaaatg

SEQ ID NO: 2483 - DNA, 20 bp, Artificial Sequence
  chemically synthesized
caaatgcagctgaaaaaaat

SEQ ID NO: 2484 - DNA, 20 bp, Artificial Sequence
  chemically synthesized
aaaaatcagctcaaaaccaa

SEQ ID NO: 2485 - DNA, 20 bp, Artificial Sequence
  chemically synthesized
gtacctatcttacgtacatg

SEQ ID NO: 2486 - DNA, 20 bp, Artificial Sequence
  chemically synthesized
acatgtagtgctgtctactc

SEQ ID NO: 2487 - DNA, 20 bp, Artificial Sequence
  chemically synthesized
atgtagtgctgtctactcca

SEQ ID NO: 2488 - DNA, 20 bp, Artificial Sequence
  chemically synthesized
gtagtgctgtctactccaga

SEQ ID NO: 2489 - DNA, 20 bp, Artificial Sequence
  chemically synthesized
tccagagagttaccaaacat

SEQ ID NO: 2490 - DNA, 20 bp, Artificial Sequence
  chemically synthesized
gagagttaccaaacattagc

SEQ ID NO: 2491 - DNA, 20 bp, Artificial Sequence
  chemically synthesized
caaacattagccagtctttt

SEQ ID NO: 2492 - DNA, 20 bp, Artificial Sequence
  chemically synthesized
aaacattagccagtcttttg

SEQ ID NO: 2493 - DNA, 20 bp, Artificial Sequence
  chemically synthesized
aacattagccagtcttttga

SEQ ID NO: 2494 - DNA, 20 bp, Artificial Sequence
  chemically synthesized
attagccagtcttttgaggg

SEQ ID NO: 2495 - DNA, 20 bp, Artificial Sequence
  chemically synthesized
ccagtcttttgagggaagcc

SEQ ID NO: 2496 - DNA, 20 bp, Artificial Sequence
  chemically synthesized
gggaagccaagattcaaatt

SEQ ID NO: 2497 - DNA, 20 bp, Artificial Sequence
  chemically synthesized
agccaagattcaaattgagt

SEQ ID NO: 2498 - DNA, 20 bp, Artificial Sequence
  chemically synthesized
aagattcaaattgagtgaga

SEQ ID NO: 2499 - DNA, 20 bp, Artificial Sequence
  chemically synthesized
attcaaattgagtgagacgg

SEQ ID NO: 2500 - DNA, 20 bp, Artificial Sequence
  chemically synthesized
gtgagacggtggcttgctca

SEQ ID NO: 2501 - DNA, 20 bp, Artificial Sequence
  chemically synthesized
tgagacggtggcttgctcac

SEQ ID NO: 2502 - DNA, 20 bp, Artificial Sequence
  chemically synthesized
gagacggtggcttgctcaca

SEQ ID NO: 2503 - DNA, 20 bp, Artificial Sequence
  chemically synthesized
ggcttgctcacagggttcat

SEQ ID NO: 2504 - DNA, 20 bp, Artificial Sequence
  chemically synthesized
cttgctcacagggttcatga

SEQ ID NO: 2505 - DNA, 20 bp, Artificial Sequence
  chemically synthesized
ttgctcacagggttcatgag

SEQ ID NO: 2506 - DNA, 20 bp, Artificial Sequence
  chemically synthesized
aggtttcccaatacactttc

SEQ ID NO: 2507 - DNA, 20 bp, Artificial Sequence
  chemically synthesized
tggaaataatcccatacatg

SEQ ID NO: 2508 - DNA, 20 bp, Artificial Sequence
  chemically synthesized
ttaacatctgctaaaactgt

SEQ ID NO: 2509 - DNA, 20 bp, Artificial Sequence
  chemically synthesized
acatctgctaaaactgttag

SEQ ID NO: 2510 - DNA, 20 bp, Artificial Sequence
  chemically synthesized
atctgctaaaactgttagta

SEQ ID NO: 2511 - DNA, 20 bp, Artificial Sequence
  chemically synthesized
aaaactgttagtagagtgct

SEQ ID NO: 2512 - DNA, 20 bp, Artificial Sequence
  chemically synthesized
gttagtagagtgctaagttt

SEQ ID NO: 2513 - DNA, 20 bp, Artificial Sequence
  chemically synthesized
ttagtagagtgctaagtttg

SEQ ID NO: 2514 - DNA, 20 bp, Artificial Sequence
  chemically synthesized
tcaaccatctcttccctgat

SEQ ID NO: 2515 - DNA, 20 bp, Artificial Sequence
  chemically synthesized
tctcttccctgattggtatt

SEQ ID NO: 2516 - DNA, 20 bp, Artificial Sequence
  chemically synthesized
ttccctgattggtatttaga

SEQ ID NO: 2517 - DNA, 20 bp, Artificial Sequence
  chemically synthesized
tccctgattggtatttagaa

SEQ ID NO: 2518 - DNA, 20 bp, Artificial Sequence
  chemically synthesized
ctgattggtatttagaaagg

SEQ ID NO: 2519 - DNA, 20 bp, Artificial Sequence
  chemically synthesized
ttggtatttagaaaggtggt

SEQ ID NO: 2520 - DNA, 20 bp, Artificial Sequence
  chemically synthesized
tggttggtccactgctattg

SEQ ID NO: 2521 - DNA, 20 bp, Artificial Sequence
  chemically synthesized
gtgaaaattctacaatcata

SEQ ID NO: 2522 - DNA, 20 bp, Artificial Sequence
  chemically synthesized
agccctcacttcttgttttt

SEQ ID NO: 2523 - DNA, 20 bp, Artificial Sequence
  chemically synthesized
ccctcacttcttgtttttta

SEQ ID NO: 2524 - DNA, 20 bp, Artificial Sequence
  chemically synthesized
cacttcttgttttttagaga

SEQ ID NO: 2525 - DNA, 20 bp, Artificial Sequence
  chemically synthesized
acttcttgttttttagagac

SEQ ID NO: 2526 - DNA, 20 bp, Artificial Sequence
  chemically synthesized
cttcttgttttttagagaca

SEQ ID NO: 2527 - DNA, 20 bp, Artificial Sequence
  chemically synthesized
cagggtctcgttttgtcatc

SEQ ID NO: 2528 - DNA, 20 bp, Artificial Sequence
  chemically synthesized
agggtctcgttttgtcatcc

SEQ ID NO: 2529 - DNA, 20 bp, Artificial Sequence
  chemically synthesized
tctcgttttgtcatccaggc

SEQ ID NO: 2530 - DNA, 20 bp, Artificial Sequence
  chemically synthesized
tcatccaggctggaatgcac

SEQ ID NO: 2531 - DNA, 20 bp, Artificial Sequence
  chemically synthesized
tccaggctggaatgcactgg

SEQ ID NO: 2532 - DNA, 20 bp, Artificial Sequence
  chemically synthesized
ccaggctggaatgcactggc

SEQ ID NO: 2533 - DNA, 20 bp, Artificial Sequence
  chemically synthesized
ggaatgcactggcaggatca

SEQ ID NO: 2534 - DNA, 20 bp, Artificial Sequence
  chemically synthesized
actggcaggatcatagctct

SEQ ID NO: 2535 - DNA, 20 bp, Artificial Sequence
  chemically synthesized
tctcggtaacttcaaactct

SEQ ID NO: 2536 - DNA, 20 bp, Artificial Sequence
  chemically synthesized
ctcggtaacttcaaactctt

SEQ ID NO: 2537 - DNA, 20 bp, Artificial Sequence
  chemically synthesized
ctcaaatgaccctcctgcct

SEQ ID NO: 2538 - DNA, 20 bp, Artificial Sequence
  chemically synthesized
ccctcctgcctcagcctccc

SEQ ID NO: 2539 - DNA, 20 bp, Artificial Sequence
  chemically synthesized
tcctgcctcagcctcccaag

SEQ ID NO: 2540 - DNA, 20 bp, Artificial Sequence
  chemically synthesized
gcctcagcctcccaagtagc

SEQ ID NO: 2541 - DNA, 20 bp, Artificial Sequence
  chemically synthesized
cctcagcctcccaagtagct

SEQ ID NO: 2542 - DNA, 20 bp, Artificial Sequence
  chemically synthesized
ctcccaagtagctaggacta

SEQ ID NO: 2543 - DNA, 20 bp, Artificial Sequence
  chemically synthesized
tcccaagtagctaggactac

SEQ ID NO: 2544 - DNA, 20 bp, Artificial Sequence
  chemically synthesized
caggtgcacatcaccacgcc

SEQ ID NO: 2545 - DNA, 20 bp, Artificial Sequence
  chemically synthesized
gcacatcaccacgcccggct

SEQ ID NO: 2546 - DNA, 20 bp, Artificial Sequence
  chemically synthesized
gctaagtttttaattttttg

SEQ ID NO: 2547 - DNA, 20 bp, Artificial Sequence
  chemically synthesized
taagtttttaattttttgta

SEQ ID NO: 2548 - DNA, 20 bp, Artificial Sequence
  chemically synthesized
tttttaattttttgtagaga

SEQ ID NO: 2549 - DNA, 20 bp, Artificial Sequence
  chemically synthesized
ttttaattttttgtagagac

SEQ ID NO: 2550 - DNA, 20 bp, Artificial Sequence
  chemically synthesized
tttaattttttgtagagaca

SEQ ID NO: 2551 - DNA, 20 bp, Artificial Sequence
  chemically synthesized
gagacagggtctacgttgcc

SEQ ID NO: 2552 - DNA, 20 bp, Artificial Sequence
  chemically synthesized
agacagggtctacgttgccc

SEQ ID NO: 2553 - DNA, 20 bp, Artificial Sequence
  chemically synthesized
gggtctacgttgcccaggtt

SEQ ID NO: 2554 - DNA, 20 bp, Artificial Sequence
  chemically synthesized
ccaggttgagcttgaactcc

SEQ ID NO: 2555 - DNA, 20 bp, Artificial Sequence
  chemically synthesized
gagcttgaactcctggcttc

SEQ ID NO: 2556 - DNA, 20 bp, Artificial Sequence
  chemically synthesized
cctcttgcctccgcctccca

SEQ ID NO: 2557 - DNA, 20 bp, Artificial Sequence
  chemically synthesized
gcctccgcctcccaaagctc

SEQ ID NO: 2558 - DNA, 20 bp, Artificial Sequence
  chemically synthesized
ctcccaaagctctggcatta

SEQ ID NO: 2559 - DNA, 20 bp, Artificial Sequence
  chemically synthesized
tcccaaagctctggcattac

SEQ ID NO: 2560 - DNA, 20 bp, Artificial Sequence
  chemically synthesized
agctctggcattacaggtgt

SEQ ID NO: 2561 - DNA, 20 bp, Artificial Sequence
  chemically synthesized
gtaagccaccttctccaacc

SEQ ID NO: 2562 - DNA, 20 bp, Artificial Sequence
  chemically synthesized
ccatgctgtttattttctcc

SEQ ID NO: 2563 - DNA, 20 bp, Artificial Sequence
  chemically synthesized
gtttattttctcccagccca

SEQ ID NO: 2564 - DNA, 20 bp, Artificial Sequence
  chemically synthesized
ttattttctcccagcccaaa

SEQ ID NO: 2565 - DNA, 20 bp, Artificial Sequence
  chemically synthesized
ttttctcccagcccaaagag

SEQ ID NO: 2566 - DNA, 20 bp, Artificial Sequence
  chemically synthesized
tctcccagcccaaagagaag

SEQ ID NO: 2567 - DNA, 20 bp, Artificial Sequence
  chemically synthesized
ctcccagcccaaagagaagc

SEQ ID NO: 2568 - DNA, 20 bp, Artificial Sequence
  chemically synthesized
aaaccgtccactttccacaa

SEQ ID NO: 2569 - DNA, 20 bp, Artificial Sequence
  chemically synthesized
aaccgtccactttccacaac

SEQ ID NO: 2570 - DNA, 20 bp, Artificial Sequence
  chemically synthesized
ccgtccactttccacaacag

SEQ ID NO: 2571 - DNA, 20 bp, Artificial Sequence
  chemically synthesized
tttccacaacaggagctgcc

SEQ ID NO: 2572 - DNA, 20 bp, Artificial Sequence
  chemically synthesized
ttccacaacaggagctgccc

SEQ ID NO: 2573 - DNA, 20 bp, Artificial Sequence
  chemically synthesized
gagctgcccaggaccacttc

SEQ ID NO: 2574 - DNA, 20 bp, Artificial Sequence
  chemically synthesized
agctgcccaggaccacttca

SEQ ID NO: 2575 - DNA, 20 bp, Artificial Sequence
  chemically synthesized
gcccaggaccacttcaagga

SEQ ID NO: 2576 - DNA, 20 bp, Artificial Sequence
  chemically synthesized
caaggacagtgaactgttta

SEQ ID NO: 2577 - DNA, 20 bp, Artificial Sequence
  chemically synthesized
cagtgaactgtttacagtac

SEQ ID NO: 2578 - DNA, 20 bp, Artificial Sequence
  chemically synthesized
gaactgtttacagtaccaga

SEQ ID NO: 2579 - DNA, 20 bp, Artificial Sequence
  chemically synthesized
actttctcaatcttcaacat

SEQ ID NO: 2580 - DNA, 20 bp, Artificial Sequence
  chemically synthesized
ctttctcaatcttcaacatc

SEQ ID NO: 2581 - DNA, 20 bp, Artificial Sequence
  chemically synthesized
tttctcaatcttcaacatca

SEQ ID NO: 2582 - DNA, 20 bp, Artificial Sequence
  chemically synthesized
ctcaatcttcaacatcaggg

SEQ ID NO: 2583 - DNA, 20 bp, Artificial Sequence
  chemically synthesized
tcttcaacatcagggaagac

SEQ ID NO: 2584 - DNA, 20 bp, Artificial Sequence
  chemically synthesized
tcaacatcagggaagactgg

SEQ ID NO: 2585 - DNA, 20 bp, Artificial Sequence
  chemically synthesized
caacatcagggaagactgga

SEQ ID NO: 2586 - DNA, 20 bp, Artificial Sequence
  chemically synthesized
tcagggaagactggaaggtg

SEQ ID NO: 2587 - DNA, 20 bp, Artificial Sequence
  chemically synthesized
gtgaagttcatatcactatc

SEQ ID NO: 2588 - DNA, 20 bp, Artificial Sequence
  chemically synthesized
cactatctggccatttctca

SEQ ID NO: 2589 - DNA, 20 bp, Artificial Sequence
  chemically synthesized
tggccatttctcacagttcc

SEQ ID NO: 2590 - DNA, 20 bp, Artificial Sequence
  chemically synthesized
tctcacagttccaagtttct

SEQ ID NO: 2591 - DNA, 20 bp, Artificial Sequence
  chemically synthesized
gttccaagtttctcagacaa

SEQ ID NO: 2592 - DNA, 20 bp, Artificial Sequence
  chemically synthesized
ttccaagtttctcagacaat

SEQ ID NO: 2593 - DNA, 20 bp, Artificial Sequence
  chemically synthesized
caagtttctcagacaatagg

SEQ ID NO: 2594 - DNA, 20 bp, Artificial Sequence
  chemically synthesized
aagtttctcagacaataggt

SEQ ID NO: 2595 - DNA, 20 bp, Artificial Sequence
  chemically synthesized
agacaataggtaggctaacc

SEQ ID NO: 2596 - DNA, 20 bp, Artificial Sequence
  chemically synthesized
gtaggctaacctagtcctcc

SEQ ID NO: 2597 - DNA, 20 bp, Artificial Sequence
  chemically synthesized
taggctaacctagtcctcct

SEQ ID NO: 2598 - DNA, 20 bp, Artificial Sequence
  chemically synthesized
tgggaactatctaattaacg

SEQ ID NO: 2599 - DNA, 20 bp, Artificial Sequence
  chemically synthesized
actatctaattaacgtagaa

SEQ ID NO: 2600 - DNA, 20 bp, Artificial Sequence
  chemically synthesized
attaacgtagaatagaaccc

SEQ ID NO: 2601 - DNA, 20 bp, Artificial Sequence
  chemically synthesized
ttaacgtagaatagaacccg

SEQ ID NO: 2602 - DNA, 20 bp, Artificial Sequence
  chemically synthesized
taacgtagaatagaacccga

SEQ ID NO: 2603 - DNA, 20 bp, Artificial Sequence
  chemically synthesized
cgtagaatagaacccgaggg

SEQ ID NO: 2604 - DNA, 20 bp, Artificial Sequence
  chemically synthesized
ccgagggcagacttgaaaaa

SEQ ID NO: 2605 - DNA, 20 bp, Artificial Sequence
  chemically synthesized
agggcagacttgaaaaacag

SEQ ID NO: 2606 - DNA, 20 bp, Artificial Sequence
  chemically synthesized
tgaaaaacagaagtcctcct

SEQ ID NO: 2607 - DNA, 20 bp, Artificial Sequence
  chemically synthesized
ggtttactttgtttctctga

SEQ ID NO: 2608 - DNA, 20 bp, Artificial Sequence
  chemically synthesized
gtttctctgaaagcaaattg

SEQ ID NO: 2609 - DNA, 20 bp, Artificial Sequence
  chemically synthesized
ttctctgaaagcaaattgtg

SEQ ID NO: 2610 - DNA, 20 bp, Artificial Sequence
  chemically synthesized
caaattgtggagtgccaaca

SEQ ID NO: 2611 - DNA, 20 bp, Artificial Sequence
  chemically synthesized
aaatattttatcaacttcat

SEQ ID NO: 2612 - DNA, 20 bp, Artificial Sequence
  chemically synthesized
aatattttatcaacttcata

SEQ ID NO: 2613 - DNA, 20 bp, Artificial Sequence
  chemically synthesized
aggtgcttgtaattttttcc

SEQ ID NO: 2614 - DNA, 20 bp, Artificial Sequence
  chemically synthesized
gtgcttgtaattttttcctg

SEQ ID NO: 2615 - DNA, 20 bp, Artificial Sequence
  chemically synthesized
cttgtaattttttcctggag

SEQ ID NO: 2616 - DNA, 20 bp, Artificial Sequence
  chemically synthesized
ttgtaattttttcctggagc

SEQ ID NO: 2617 - DNA, 20 bp, Artificial Sequence
  chemically synthesized
ttcctggagcaggtaaatgc

SEQ ID NO: 2618 - DNA, 20 bp, Artificial Sequence
  chemically synthesized
ggagcaggtaaatgctggct

SEQ ID NO: 2619 - DNA, 20 bp, Artificial Sequence
  chemically synthesized
tgctggcttagtgaacaatc

SEQ ID NO: 2620 - DNA, 20 bp, Artificial Sequence
  chemically synthesized
ttagtgaacaatctggaatg

SEQ ID NO: 2621 - DNA, 20 bp, Artificial Sequence
  chemically synthesized
aattactctcgttcttgttt

SEQ ID NO: 2622 - DNA, 20 bp, Artificial Sequence
  chemically synthesized
tcttgtttcagatgtactat

SEQ ID NO: 2623 - DNA, 20 bp, Artificial Sequence
  chemically synthesized
tcagatgtactatcagcatg

SEQ ID NO: 2624 - DNA, 20 bp, Artificial Sequence
  chemically synthesized
gatgtactatcagcatgtag

SEQ ID NO: 2625 - DNA, 20 bp, Artificial Sequence
  chemically synthesized
gtagcagtttccaactgatt

SEQ ID NO: 2626 - DNA, 20 bp, Artificial Sequence
  chemically synthesized
tagcagtttccaactgattc

SEQ ID NO: 2627 - DNA, 20 bp, Artificial Sequence
  chemically synthesized
agcagtttccaactgattca

SEQ ID NO: 2628 - DNA, 20 bp, Artificial Sequence
  chemically synthesized
actgattcagggttttccta

SEQ ID NO: 2629 - DNA, 20 bp, Artificial Sequence
  chemically synthesized
gattcagggttttcctaaag

SEQ ID NO: 2630 - DNA, 20 bp, Artificial Sequence
  chemically synthesized
tcagggttttcctaaagtgg

SEQ ID NO: 2631 - DNA, 20 bp, Artificial Sequence
  chemically synthesized
cagggttttcctaaagtggc

SEQ ID NO: 2632 - DNA, 20 bp, Artificial Sequence
  chemically synthesized
tttcctaaagtggcaggcct

SEQ ID NO: 2633 - DNA, 20 bp, Artificial Sequence
  chemically synthesized
cctaaagtggcaggccttgg

SEQ ID NO: 2634 - DNA, 20 bp, Artificial Sequence
  chemically synthesized
taaagtggcaggccttggca

SEQ ID NO: 2635 - DNA, 20 bp, Artificial Sequence
  chemically synthesized
aaagtggcaggccttggcag

SEQ ID NO: 2636 - DNA, 20 bp, Artificial Sequence
  chemically synthesized
gtggcaggccttggcagagg

SEQ ID NO: 2637 - DNA, 20 bp, Artificial Sequence
  chemically synthesized
gtcaaatgacaccgtatttc

SEQ ID NO: 2638 - DNA, 20 bp, Artificial Sequence
  chemically synthesized
tatttcaagtattctgactc

SEQ ID NO: 2639 - DNA, 20 bp, Artificial Sequence
  chemically synthesized
atttcaagtattctgactcc

SEQ ID NO: 2640 - DNA, 20 bp, Artificial Sequence
  chemically synthesized
tattaatatcccctatatga

SEQ ID NO: 2641 - DNA, 20 bp, Artificial Sequence
  chemically synthesized
tcttgtttctgtgatattca

SEQ ID NO: 2642 - DNA, 20 bp, Artificial Sequence
  chemically synthesized
atattcacagattatgttaa

SEQ ID NO: 2643 - DNA, 20 bp, Artificial Sequence
  chemically synthesized
attatgttaaaagtttccca

SEQ ID NO: 2644 - DNA, 20 bp, Artificial Sequence
  chemically synthesized
ttaaaagtttcccaaagtct

SEQ ID NO: 2645 - DNA, 20 bp, Artificial Sequence
  chemically synthesized
tgagaaaaatcatatcttaa

SEQ ID NO: 2646 - DNA, 20 bp, Artificial Sequence
  chemically synthesized
ttttttgatcctttgtacaa

SEQ ID NO: 2647 - DNA, 20 bp, Artificial Sequence
  chemically synthesized
tttgatcctttgtacaaaag

SEQ ID NO: 2648 - DNA, 20 bp, Artificial Sequence
  chemically synthesized
gatcctttgtacaaaagtag

SEQ ID NO: 2649 - DNA, 20 bp, Artificial Sequence
  chemically synthesized
tacaaaagtagaagtaatgc

SEQ ID NO: 2650 - DNA, 20 bp, Artificial Sequence
  chemically synthesized
aaagtagaagtaatgccaga

SEQ ID NO: 2651 - DNA, 20 bp, Artificial Sequence
  chemically synthesized
gtacccttgttgtgaacaac

SEQ ID NO: 2652 - DNA, 20 bp, Artificial Sequence
  chemically synthesized
tgttgtgaacaactggtgca

SEQ ID NO: 2653 - DNA, 20 bp, Artificial Sequence
  chemically synthesized
gtgcatggcaactgtttgaa

SEQ ID NO: 2654 - DNA, 20 bp, Artificial Sequence
  chemically synthesized
aatttaccaactgccacaac

SEQ ID NO: 2655 - DNA, 20 bp, Artificial Sequence
  chemically synthesized
atttaccaactgccacaacc

SEQ ID NO: 2656 - DNA, 20 bp, Artificial Sequence
  chemically synthesized
caaccaggcaactactctcc

SEQ ID NO: 2657 - DNA, 20 bp, Artificial Sequence
  chemically synthesized
accaggcaactactctccca

SEQ ID NO: 2658 - DNA, 20 bp, Artificial Sequence
  chemically synthesized
acaatctcgattgcatctga

SEQ ID NO: 2659 - DNA, 20 bp, Artificial Sequence
  chemically synthesized
caatctcgattgcatctgaa

SEQ ID NO: 2660 - DNA, 20 bp, Artificial Sequence
  chemically synthesized
aatctcgattgcatctgaaa

SEQ ID NO: 2661 - DNA, 20 bp, Artificial Sequence
  chemically synthesized
tctgaaagggccacccctcc

SEQ ID NO: 2662 - DNA, 20 bp, Artificial Sequence
  chemically synthesized
ctgaaagggccacccctcct

SEQ ID NO: 2663 - DNA, 20 bp, Artificial Sequence
  chemically synthesized
aagggccacccctcctggga

SEQ ID NO: 2664 - DNA, 20 bp, Artificial Sequence
  chemically synthesized
ccacccctcctgggaaagtg

SEQ ID NO: 2665 - DNA, 20 bp, Artificial Sequence
  chemically synthesized
cacccctcctgggaaagtgc

SEQ ID NO: 2666 - DNA, 20 bp, Artificial Sequence
  chemically synthesized
ccctcctgtttctgaataca

SEQ ID NO: 2667 - DNA, 20 bp, Artificial Sequence
  chemically synthesized
ctgtttctgaatacaaagcc

SEQ ID NO: 2668 - DNA, 20 bp, Artificial Sequence
  chemically synthesized
tttctgaatacaaagcctgg

SEQ ID NO: 2669 - DNA, 20 bp, Artificial Sequence
  chemically synthesized
aagcctggtggtgttcaacg

SEQ ID NO: 2670 - DNA, 20 bp, Artificial Sequence
  chemically synthesized
ctggtggtgttcaacgcggc

SEQ ID NO: 2671 - DNA, 20 bp, Artificial Sequence
  chemically synthesized
tggtgttcaacgcggccaga

SEQ ID NO: 2672 - DNA, 20 bp, Artificial Sequence
  chemically synthesized
cgcggccagatagacccaat

SEQ ID NO: 2673 - DNA, 20 bp, Artificial Sequence
  chemically synthesized
agatagacccaatgagcaca

SEQ ID NO: 2674 - DNA, 20 bp, Artificial Sequence
  chemically synthesized
atgtaatctgtgcacttctt

SEQ ID NO: 2675 - DNA, 20 bp, Artificial Sequence
  chemically synthesized
tttagacaactgattaccat

SEQ ID NO: 2676 - DNA, 20 bp, Artificial Sequence
  chemically synthesized
acaactgattaccatcagtc

SEQ ID NO: 2677 - DNA, 20 bp, Artificial Sequence
  chemically synthesized
ccatcagtcaagtgatgccc

SEQ ID NO: 2678 - DNA, 20 bp, Artificial Sequence
  chemically synthesized
aagtgatgcccaagtcacaa

SEQ ID NO: 2679 - DNA, 20 bp, Artificial Sequence
  chemically synthesized
tcacaatagtcacttccttt

SEQ ID NO: 2680 - DNA, 20 bp, Artificial Sequence
  chemically synthesized
aatagtcacttcctttaagc

SEQ ID NO: 2681 - DNA, 20 bp, Artificial Sequence
  chemically synthesized
taagcaagtctgtgtcatct

SEQ ID NO: 2682 - DNA, 20 bp, Artificial Sequence
  chemically synthesized
agcaagtctgtgtcatctcg

SEQ ID NO: 2683 - DNA, 20 bp, Artificial Sequence
  chemically synthesized
tgtgtcatctcggagctgtg

SEQ ID NO: 2684 - DNA, 20 bp, Artificial Sequence
  chemically synthesized
tctcggagctgtgaagcaac

SEQ ID NO: 2685 - DNA, 20 bp, Artificial Sequence
  chemically synthesized
ctcggagctgtgaagcaacc

SEQ ID NO: 2686 - DNA, 20 bp, Artificial Sequence
  chemically synthesized
agcaaccaggtcatgtccca

SEQ ID NO: 2687 - DNA, 20 bp, Artificial Sequence
  chemically synthesized
ccaggtcatgtcccacagaa

SEQ ID NO: 2688 - DNA, 20 bp, Artificial Sequence
  chemically synthesized
caggtcatgtcccacagaat

SEQ ID NO: 2689 - DNA, 20 bp, Artificial Sequence
  chemically synthesized
aggtcatgtcccacagaatg

SEQ ID NO: 2690 - DNA, 20 bp, Artificial Sequence
  chemically synthesized
gtcatgtcccacagaatggg

SEQ ID NO: 2691 - DNA, 20 bp, Artificial Sequence
  chemically synthesized
gcattgctgccctcatatgc

SEQ ID NO: 2692 - DNA, 20 bp, Artificial Sequence
  chemically synthesized
tgcaagtcatcaccactctc

SEQ ID NO: 2693 - DNA, 20 bp, Artificial Sequence
  chemically synthesized
aagtcatcaccactctctag

SEQ ID NO: 2694 - DNA, 20 bp, Artificial Sequence
  chemically synthesized
atcaccactctctagaagct

SEQ ID NO: 2695 - DNA, 20 bp, Artificial Sequence
  chemically synthesized
tcaccactctctagaagctt

SEQ ID NO: 2696 - DNA, 20 bp, Artificial Sequence
  chemically synthesized
aagcttgggctgaaattgtg

SEQ ID NO: 2697 - DNA, 20 bp, Artificial Sequence
  chemically synthesized
agcttgggctgaaattgtgc

SEQ ID NO: 2698 - DNA, 20 bp, Artificial Sequence
  chemically synthesized
atcccgcatgatctcctcgc

SEQ ID NO: 2699 - DNA, 20 bp, Artificial Sequence
  chemically synthesized
ccgcatgatctcctcgccgg

SEQ ID NO: 2700 - DNA, 20 bp, Artificial Sequence
  chemically synthesized
cgcatgatctcctcgccggc

SEQ ID NO: 2701 - DNA, 20 bp, Artificial Sequence
  chemically synthesized
gcatgatctcctcgccggca

SEQ ID NO: 2702 - DNA, 20 bp, Artificial Sequence
  chemically synthesized
ctcgccggcagggaccgtct

SEQ ID NO: 2703 - DNA, 20 bp, Artificial Sequence
  chemically synthesized
tcgccggcagggaccgtctc

SEQ ID NO: 2704 - DNA, 20 bp, Artificial Sequence
  chemically synthesized
cagggaccgtctcgggttcc

SEQ ID NO: 2705 - DNA, 20 bp, Artificial Sequence
  chemically synthesized
gttcctagcgaaccccgact

SEQ ID NO: 2706 - DNA, 20 bp, Artificial Sequence
  chemically synthesized
gcgaaccccgacttggtccg

SEQ ID NO: 2707 - DNA, 20 bp, Artificial Sequence
  chemically synthesized
aaccccgacttggtccgcag

SEQ ID NO: 2708 - DNA, 20 bp, Artificial Sequence
  chemically synthesized
gccgcgcgccgcccaccctc

SEQ ID NO: 2709 - DNA, 20 bp, Artificial Sequence
  chemically synthesized
cccaccctccggccttcccc

SEQ ID NO: 2710 - DNA, 20 bp, Artificial Sequence
  chemically synthesized
ccaccctccggccttccccc

SEQ ID NO: 2711 - DNA, 20 bp, Artificial Sequence
  chemically synthesized
cctccggccttcccccaggc

SEQ ID NO: 2712 - DNA, 20 bp, Artificial Sequence
  chemically synthesized
ctccggccttcccccaggcg

SEQ ID NO: 2713 - DNA, 20 bp, Artificial Sequence
  chemically synthesized
ttcccccaggcgaggcctct

SEQ ID NO: 2714 - DNA, 20 bp, Artificial Sequence
  chemically synthesized
ggcgaggcctctcagtaccc

SEQ ID NO: 2715 - DNA, 20 bp, Artificial Sequence
  chemically synthesized
gcgaggcctctcagtacccg

SEQ ID NO: 2716 - DNA, 20 bp, Artificial Sequence
  chemically synthesized
acccgaggctcccttttctc

SEQ ID NO: 2717 - DNA, 20 bp, Artificial Sequence
  chemically synthesized
gctcccttttctcgagcccg

SEQ ID NO: 2718 - DNA, 20 bp, Artificial Sequence
  chemically synthesized
cccttttctcgagcccgcag

SEQ ID NO: 2719 - DNA, 20 bp, Artificial Sequence
  chemically synthesized
ttttctcgagcccgcagcgg

SEQ ID NO: 2720 - DNA, 20 bp, Artificial Sequence
  chemically synthesized
gcccgcagcggcagcgctcc

SEQ ID NO: 2721 - DNA, 20 bp, Artificial Sequence
  chemically synthesized
cgcagcggcagcgctcccag

SEQ ID NO: 2722 - DNA, 20 bp, Artificial Sequence
  chemically synthesized
gcagcggcagcgctcccagc

SEQ ID NO: 2723 - DNA, 20 bp, Artificial Sequence
  chemically synthesized
cagcgctcccagcgggtccc

SEQ ID NO: 2724 - DNA, 20 bp, Artificial Sequence
  chemically synthesized
agcgctcccagcgggtcccc

SEQ ID NO: 2725 - DNA, 20 bp, Artificial Sequence
  chemically synthesized
gctcccagcgggtccccggg

SEQ ID NO: 2726 - DNA, 20 bp, Artificial Sequence
  chemically synthesized
ctcccagcgggtccccggga

SEQ ID NO: 2727 - DNA, 20 bp, Artificial Sequence
  chemically synthesized
cccagcgggtccccgggaag

SEQ ID NO: 2728 - DNA, 20 bp, Artificial Sequence
  chemically synthesized
gcgggtccccgggaaggaga

SEQ ID NO: 2729 - DNA, 20 bp, Artificial Sequence
  chemically synthesized
tccccgggaaggagacagct

SEQ ID NO: 2730 - DNA, 20 bp, Artificial Sequence
  chemically synthesized
ccccgggaaggagacagctc

SEQ ID NO: 2731 - DNA, 20 bp, Artificial Sequence
  chemically synthesized
aaggagacagctcgggtact

SEQ ID NO: 2732 - DNA, 20 bp, Artificial Sequence
  chemically synthesized
aggagacagctcgggtactg

SEQ ID NO: 2733 - DNA, 20 bp, Artificial Sequence
  chemically synthesized
ggagacagctcgggtactga

SEQ ID NO: 2734 - DNA, 20 bp, Artificial Sequence
  chemically synthesized
gacagctcgggtactgaggg

SEQ ID NO: 2735 - DNA, 20 bp, Artificial Sequence
  chemically synthesized
acagctcgggtactgagggc

SEQ ID NO: 2736 - DNA, 20 bp, Artificial Sequence
  chemically synthesized
ctcgggtactgagggcggga

SEQ ID NO: 2737 - DNA, 20 bp, Artificial Sequence
  chemically synthesized
ggtactgagggcgggaaagc

SEQ ID NO: 2738 - DNA, 20 bp, Artificial Sequence
  chemically synthesized
gtactgagggcgggaaagca

SEQ ID NO: 2739 - DNA, 20 bp, Artificial Sequence
  chemically synthesized
ctgagggcgggaaagcaagg

SEQ ID NO: 2740 - DNA, 20 bp, Artificial Sequence
  chemically synthesized
gagggcgggaaagcaaggaa

SEQ ID NO: 2741 - DNA, 20 bp, Artificial Sequence
  chemically synthesized
agggcgggaaagcaaggaag

SEQ ID NO: 2742 - DNA, 20 bp, Artificial Sequence
  chemically synthesized
cgggaaagcaaggaagaggc

SEQ ID NO: 2743 - DNA, 20 bp, Artificial Sequence
  chemically synthesized
gccgccgccgccgccgccgc

SEQ ID NO: 2744 - DNA, 20 bp, Artificial Sequence
  chemically synthesized
ccgccgccgccgccgccgcc

SEQ ID NO: 2745 - DNA, 20 bp, Artificial Sequence
  chemically synthesized
ccgccgccgccgccgccggg

SEQ ID NO: 2746 - DNA, 20 bp, Artificial Sequence
  chemically synthesized
gccgccgccgccgggaagcc

SEQ ID NO: 2747 - DNA, 20 bp, Artificial Sequence
  chemically synthesized
ccgccgccgccgggaagccc

SEQ ID NO: 2748 - DNA, 20 bp, Artificial Sequence
  chemically synthesized
cgccgccgccgggaagcccg

SEQ ID NO: 2749 - DNA, 20 bp, Artificial Sequence
  chemically synthesized
ccgccgggaagcccggggcc

SEQ ID NO: 2750 - DNA, 20 bp, Artificial Sequence
  chemically synthesized
ggaagcccggggcccggatg

SEQ ID NO: 2751 - DNA, 20 bp, Artificial Sequence
  chemically synthesized
gaagcccggggcccggatgc

SEQ ID NO: 2752 - DNA, 20 bp, Artificial Sequence
  chemically synthesized
ccggatgcaggcaattccac

SEQ ID NO: 2753 - DNA, 20 bp, Artificial Sequence
  chemically synthesized
caggcaattccaccagtcgc

SEQ ID NO: 2754 - DNA, 20 bp, Artificial Sequence
  chemically synthesized
ggcaattccaccagtcgcta

SEQ ID NO: 2755 - DNA, 20 bp, Artificial Sequence
  chemically synthesized
gcaattccaccagtcgctag

SEQ ID NO: 2756 - DNA, 20 bp, Artificial Sequence
  chemically synthesized
ccaccagtcgctagaggcga

SEQ ID NO: 2757 - DNA, 20 bp, Artificial Sequence
  chemically synthesized
agaggcgaaagcccgacacc

SEQ ID NO: 2758 - DNA, 20 bp, Artificial Sequence
  chemically synthesized
gaaagcccgacacccagctt

SEQ ID NO: 2759 - DNA, 20 bp, Artificial Sequence
  chemically synthesized
gcccgacacccagcttcggt

SEQ ID NO: 2760 - DNA, 20 bp, Artificial Sequence
  chemically synthesized
ccgacacccagcttcggtca

SEQ ID NO: 2761 - DNA, 20 bp, Artificial Sequence
  chemically synthesized
ccagcttcggtcagagaaat

SEQ ID NO: 2762 - DNA, 20 bp, Artificial Sequence
  chemically synthesized
agcttcggtcagagaaatga

SEQ ID NO: 2763 - DNA, 20 bp, Artificial Sequence
  chemically synthesized
gcttcggtcagagaaatgag

SEQ ID NO: 2764 - DNA, 20 bp, Artificial Sequence
  chemically synthesized
cttcggtcagagaaatgaga

SEQ ID NO: 2765 - DNA, 20 bp, Artificial Sequence
  chemically synthesized
ggtcagagaaatgagaggga

SEQ ID NO: 2766 - DNA, 20 bp, Artificial Sequence
  chemically synthesized
agggaaagtaaaaatgcgtc

SEQ ID NO: 2767 - DNA, 20 bp, Artificial Sequence
  chemically synthesized
gtaaaaatgcgtcgagctct

SEQ ID NO: 2768 - DNA, 20 bp, Artificial Sequence
  chemically synthesized
taaaaatgcgtcgagctctg

SEQ ID NO: 2769 - DNA, 20 bp, Artificial Sequence
  chemically synthesized
aaaatgcgtcgagctctgag

SEQ ID NO: 2770 - DNA, 20 bp, Artificial Sequence
  chemically synthesized
aatgcgtcgagctctgagga

SEQ ID NO: 2771 - DNA, 20 bp, Artificial Sequence
  chemically synthesized
cttctacccgcgcctcttcc

SEQ ID NO: 2772 - DNA, 20 bp, Artificial Sequence
  chemically synthesized
ctacccgcgcctcttcccgg

SEQ ID NO: 2773 - DNA, 20 bp, Artificial Sequence
  chemically synthesized
cccggcagccgaaccccaaa

SEQ ID NO: 2774 - DNA, 20 bp, Artificial Sequence
  chemically synthesized
aaccccaaacagccacccgc

SEQ ID NO: 2775 - DNA, 20 bp, Artificial Sequence
  chemically synthesized
accccaaacagccacccgcc

SEQ ID NO: 2776 - DNA, 20 bp, Artificial Sequence
  chemically synthesized
cgcctgcgcctccgccgccg

SEQ ID NO: 2777 - DNA, 20 bp, Artificial Sequence
  chemically synthesized
gcctgcgcctccgccgccgc

SEQ ID NO: 2778 - DNA, 20 bp, Artificial Sequence
  chemically synthesized
cgcctccgccgccgcgggcg

SEQ ID NO: 2779 - DNA, 20 bp, Artificial Sequence
  chemically synthesized
gcctccgccgccgcgggcgc

SEQ ID NO: 2780 - DNA, 20 bp, Artificial Sequence
  chemically synthesized
gggcgcaggcaccgcaaccg

SEQ ID NO: 2781 - DNA, 20 bp, Artificial Sequence
  chemically synthesized
ccgcaaccgcagccccgccc

SEQ ID NO: 2782 - DNA, 20 bp, Artificial Sequence
  chemically synthesized
cgcaaccgcagccccgcccc

SEQ ID NO: 2783 - DNA, 20 bp, Artificial Sequence
  chemically synthesized
ccccgccccgggcccgcccc

SEQ ID NO: 2784 - DNA, 20 bp, Artificial Sequence
  chemically synthesized
cccgccccgggcccgccccc

SEQ ID NO: 2785 - DNA, 20 bp, Artificial Sequence
  chemically synthesized
ggcccgccccgaccacgccc

SEQ ID NO: 2786 - DNA, 20 bp, Artificial Sequence
  chemically synthesized
ccccgaccacgccccggccc

SEQ ID NO: 2787 - DNA, 20 bp, Artificial Sequence
  chemically synthesized
ccacgccccggccccggccc

SEQ ID NO: 2788 - DNA, 20 bp, Artificial Sequence
  chemically synthesized
ccggccccggccccggcccc

SEQ ID NO: 2789 - DNA, 20 bp, Artificial Sequence
  chemically synthesized
gcccctagcgcgcgactcct

SEQ ID NO: 2790 - DNA, 20 bp, Artificial Sequence
  chemically synthesized
agcgcgcgactcctgagttc

SEQ ID NO: 2791 - DNA, 20 bp, Artificial Sequence
  chemically synthesized
cgcgcgactcctgagttcca

SEQ ID NO: 2792 - DNA, 20 bp, Artificial Sequence
  chemically synthesized
ctgagttccagagcttgcta

SEQ ID NO: 2793 - DNA, 20 bp, Artificial Sequence
  chemically synthesized
tgagttccagagcttgctac

SEQ ID NO: 2794 - DNA, 20 bp, Artificial Sequence
  chemically synthesized
ccagagcttgctacaggctg

SEQ ID NO: 2795 - DNA, 20 bp, Artificial Sequence
  chemically synthesized
tttccctccttgttttcttc

SEQ ID NO: 2796 - DNA, 20 bp, Artificial Sequence
  chemically synthesized
ttcttctggttaatctttat

SEQ ID NO: 2797 - DNA, 20 bp, Artificial Sequence
  chemically synthesized
tcttctggttaatctttatc

SEQ ID NO: 2798 - DNA, 20 bp, Artificial Sequence
  chemically synthesized
ggtcttttcttgttcaccct

SEQ ID NO: 2799 - DNA, 20 bp, Artificial Sequence
  chemically synthesized
ttttcttgttcaccctcagc

SEQ ID NO: 2800 - DNA, 20 bp, Artificial Sequence
  chemically synthesized
tcaccctcagcgagtactgt

SEQ ID NO: 2801 - DNA, 20 bp, Artificial Sequence
  chemically synthesized
accctcagcgagtactgtga

SEQ ID NO: 2802 - DNA, 20 bp, Artificial Sequence
  chemically synthesized
tcagcgagtactgtgagagc

SEQ ID NO: 2803 - DNA, 20 bp, Artificial Sequence
  chemically synthesized
gcgagtactgtgagagcaag

SEQ ID NO: 2804 - DNA, 20 bp, Artificial Sequence
  chemically synthesized
agtactgtgagagcaagtag

SEQ ID NO: 2805 - DNA, 20 bp, Artificial Sequence
  chemically synthesized
gtactgtgagagcaagtagt

SEQ ID NO: 2806 - DNA, 20 bp, Artificial Sequence
  chemically synthesized
tactgtgagagcaagtagtg

SEQ ID NO: 2807 - DNA, 20 bp, Artificial Sequence
  chemically synthesized
ctgtgagagcaagtagtggg

SEQ ID NO: 2808 - DNA, 20 bp, Artificial Sequence
  chemically synthesized
gtgagagcaagtagtgggga

SEQ ID NO: 2809 - DNA, 20 bp, Artificial Sequence
  chemically synthesized
gagagcaagtagtggggaga

SEQ ID NO: 2810 - DNA, 20 bp, Artificial Sequence
  chemically synthesized
agagcaagtagtggggagag

SEQ ID NO: 2811 - DNA, 20 bp, Artificial Sequence
  chemically synthesized
gagcaagtagtggggagaga

SEQ ID NO: 2812 - DNA, 20 bp, Artificial Sequence
  chemically synthesized
caagtagtggggagagaggg

SEQ ID NO: 2813 - DNA, 20 bp, Artificial Sequence
  chemically synthesized
aagtagtggggagagagggt

SEQ ID NO: 2814 - DNA, 20 bp, Artificial Sequence
  chemically synthesized
aaacccacacctgctcttgc

SEQ ID NO: 2815 - DNA, 20 bp, Artificial Sequence
  chemically synthesized
ttgctagaccccgcccccaa

SEQ ID NO: 2816 - DNA, 20 bp, Artificial Sequence
  chemically synthesized
gctagaccccgcccccaaaa

SEQ ID NO: 2817 - DNA, 20 bp, Artificial Sequence
  chemically synthesized
agaccccgcccccaaaagag

SEQ ID NO: 2818 - DNA, 20 bp, Artificial Sequence
  chemically synthesized
gcccccaaaagagaagcaac

SEQ ID NO: 2819 - DNA, 20 bp, Artificial Sequence
  chemically synthesized
cccccaaaagagaagcaacc

SEQ ID NO: 2820 - DNA, 20 bp, Artificial Sequence
  chemically synthesized
ccaaaagagaagcaaccggg

SEQ ID NO: 2821 - DNA, 20 bp, Artificial Sequence
  chemically synthesized
aaagagaagcaaccgggcag

SEQ ID NO: 2822 - DNA, 20 bp, Artificial Sequence
  chemically synthesized
aagagaagcaaccgggcagc

SEQ ID NO: 2823 - DNA, 20 bp, Artificial Sequence
  chemically synthesized
agagaagcaaccgggcagca

SEQ ID NO: 2824 - DNA, 20 bp, Artificial Sequence
  chemically synthesized
aagcaaccgggcagcaggga

SEQ ID NO: 2825 - DNA, 20 bp, Artificial Sequence
  chemically synthesized
gcagggacggctgacacacc

SEQ ID NO: 2826 - DNA, 20 bp, Artificial Sequence
  chemically synthesized
accaagcgtcatcttttacg

SEQ ID NO: 2827 - DNA, 20 bp, Artificial Sequence
  chemically synthesized
ccaagcgtcatcttttacgt

SEQ ID NO: 2828 - DNA, 20 bp, Artificial Sequence
  chemically synthesized
agcgtcatcttttacgtggg

SEQ ID NO: 2829 - DNA, 20 bp, Artificial Sequence
  chemically synthesized
tttgacgcacctctctttcc

SEQ ID NO: 2830 - DNA, 20 bp, Artificial Sequence
  chemically synthesized
gacgcacctctctttcctag

SEQ ID NO: 2831 - DNA, 20 bp, Artificial Sequence
  chemically synthesized
acgcacctctctttcctagc

SEQ ID NO: 2832 - DNA, 20 bp, Artificial Sequence
  chemically synthesized
tctttcctagcgggacaccg

SEQ ID NO: 2833 - DNA, 20 bp, Artificial Sequence
  chemically synthesized
ctttcctagcgggacaccgt

SEQ ID NO: 2834 - DNA, 20 bp, Artificial Sequence
  chemically synthesized
gtgcgatgacgttttctcac

SEQ ID NO: 2835 - DNA, 20 bp, Artificial Sequence
  chemically synthesized
tgcgatgacgttttctcacg

SEQ ID NO: 2836 - DNA, 20 bp, Artificial Sequence
  chemically synthesized
atgacgttttctcacgaggc

SEQ ID NO: 2837 - DNA, 20 bp, Artificial Sequence
  chemically synthesized
ttctcacgaggctagcgaaa

SEQ ID NO: 2838 - DNA, 20 bp, Artificial Sequence
  chemically synthesized
tctcacgaggctagcgaaat

SEQ ID NO: 2839 - DNA, 20 bp, Artificial Sequence
  chemically synthesized
ctcacgaggctagcgaaatg

SEQ ID NO: 2840 - DNA, 20 bp, Artificial Sequence
  chemically synthesized
acgaggctagcgaaatgggg

SEQ ID NO: 2841 - DNA, 20 bp, Artificial Sequence
  chemically synthesized
cgaggctagcgaaatggggc

SEQ ID NO: 2842 - DNA, 20 bp, Artificial Sequence
  chemically synthesized
gaggctagcgaaatggggcg

SEQ ID NO: 2843 - DNA, 20 bp, Artificial Sequence
  chemically synthesized
ttgtcctgttcttttatctt

SEQ ID NO: 2844 - DNA, 20 bp, Artificial Sequence
  chemically synthesized
ttttatcttaagacccgctc

SEQ ID NO: 2845 - DNA, 20 bp, Artificial Sequence
  chemically synthesized
ttatcttaagacccgctctg

SEQ ID NO: 2846 - DNA, 20 bp, Artificial Sequence
  chemically synthesized
tatcttaagacccgctctgg

SEQ ID NO: 2847 - DNA, 20 bp, Artificial Sequence
  chemically synthesized
tcttaagacccgctctggag

SEQ ID NO: 2848 - DNA, 20 bp, Artificial Sequence
  chemically synthesized
gacccgctctggaggagcgt

SEQ ID NO: 2849 - DNA, 20 bp, Artificial Sequence
  chemically synthesized
ctggaggagcgttggcgcaa

SEQ ID NO: 2850 - DNA, 20 bp, Artificial Sequence
  chemically synthesized
atagcgtgtgcgaaccttaa

SEQ ID NO: 2851 - DNA, 20 bp, Artificial Sequence
  chemically synthesized
tagcgtgtgcgaaccttaat

SEQ ID NO: 2852 - DNA, 20 bp, Artificial Sequence
  chemically synthesized
agcgtgtgcgaaccttaata

SEQ ID NO: 2853 - DNA, 20 bp, Artificial Sequence
  chemically synthesized
gcgtgtgcgaaccttaatag

SEQ ID NO: 2854 - DNA, 20 bp, Artificial Sequence
  chemically synthesized
gtgtgcgaaccttaataggg

SEQ ID NO: 2855 - DNA, 20 bp, Artificial Sequence
  chemically synthesized
tgtgcgaaccttaatagggg

SEQ ID NO: 2856 - DNA, 20 bp, Artificial Sequence
  chemically synthesized
accttaataggggaggctgc

SEQ ID NO: 2857 - DNA, 20 bp, Artificial Sequence
  chemically synthesized
ataggggaggctgctggatc

SEQ ID NO: 2858 - DNA, 20 bp, Artificial Sequence
  chemically synthesized
aggggaggctgctggatctg

SEQ ID NO: 2859 - DNA, 20 bp, Artificial Sequence
  chemically synthesized
gaggctgctggatctggaga

SEQ ID NO: 2860 - DNA, 20 bp, Artificial Sequence
  chemically synthesized
tgctggatctggagaaagtg

SEQ ID NO: 2861 - DNA, 20 bp, Artificial Sequence
  chemically synthesized
agaaagtgaagacgatttcg

SEQ ID NO: 2862 - DNA, 20 bp, Artificial Sequence
  chemically synthesized
gacgatttcgtggttttgaa

SEQ ID NO: 2863 - DNA, 20 bp, Artificial Sequence
  chemically synthesized
tgaatggttttgtttgtgct

SEQ ID NO: 2864 - DNA, 20 bp, Artificial Sequence
  chemically synthesized
atggttttgtttgtgcttgg

SEQ ID NO: 2865 - DNA, 20 bp, Artificial Sequence
  chemically synthesized
tggttttgtttgtgcttggt

SEQ ID NO: 2866 - DNA, 20 bp, Artificial Sequence
  chemically synthesized
ttttgtttgtgcttggtagg

SEQ ID NO: 2867 - DNA, 20 bp, Artificial Sequence
  chemically synthesized
tgtttgtgcttggtaggcag

SEQ ID NO: 2868 - DNA, 20 bp, Artificial Sequence
  chemically synthesized
gtttgtgcttggtaggcagt

SEQ ID NO: 2869 - DNA, 20 bp, Artificial Sequence
  chemically synthesized
gtgggcgctcaacacataat

SEQ ID NO: 2870 - DNA, 20 bp, Artificial Sequence
  chemically synthesized
ggcgctcaacacataattgg

SEQ ID NO: 2871 - DNA, 20 bp, Artificial Sequence
  chemically synthesized
tgaaattttgtttttaccgt

SEQ ID NO: 2872 - DNA, 20 bp, Artificial Sequence
  chemically synthesized
ttttaccgtaagacactgtt

SEQ ID NO: 2873 - DNA, 20 bp, Artificial Sequence
  chemically synthesized
caaaactccactgcaaaccc

SEQ ID NO: 2874 - DNA, 20 bp, Artificial Sequence
  chemically synthesized
aactccactgcaaaccctgg

SEQ ID NO: 2875 - DNA, 20 bp, Artificial Sequence
  chemically synthesized
actccactgcaaaccctggt

SEQ ID NO: 2876 - DNA, 20 bp, Artificial Sequence
  chemically synthesized
ctccactgcaaaccctggta

SEQ ID NO: 2877 - DNA, 20 bp, Artificial Sequence
  chemically synthesized
tccactgcaaaccctggtag

SEQ ID NO: 2878 - DNA, 20 bp, Artificial Sequence
  chemically synthesized
ctgcaaaccctggtagggga

SEQ ID NO: 2879 - DNA, 20 bp, Artificial Sequence
  chemically synthesized
accctggtaggggacagctc

SEQ ID NO: 2880 - DNA, 20 bp, Artificial Sequence
  chemically synthesized
aggggacagctccggcactg

SEQ ID NO: 2881 - DNA, 20 bp, Artificial Sequence
  chemically synthesized
ggggacagctccggcactgc

SEQ ID NO: 2882 - DNA, 20 bp, Artificial Sequence
  chemically synthesized
gacagctccggcactgcggg

SEQ ID NO: 2883 - DNA, 20 bp, Artificial Sequence
  chemically synthesized
acagctccggcactgcgggc

SEQ ID NO: 2884 - DNA, 20 bp, Artificial Sequence
  chemically synthesized
cactgcgggcgggaatccca

SEQ ID NO: 2885 - DNA, 20 bp, Artificial Sequence
  chemically synthesized
gaatcccacggtcccctgca

SEQ ID NO: 2886 - DNA, 20 bp, Artificial Sequence
  chemically synthesized
gcaattttgcctttacatgt

SEQ ID NO: 2887 - DNA, 20 bp, Artificial Sequence
  chemically synthesized
ttacatgtaagaattctctc

SEQ ID NO: 2888 - DNA, 20 bp, Artificial Sequence
  chemically synthesized
ctcaagcatgattttcacac

SEQ ID NO: 2889 - DNA, 20 bp, Artificial Sequence
  chemically synthesized
tcaagcatgattttcacact

SEQ ID NO: 2890 - DNA, 20 bp, Artificial Sequence
  chemically synthesized
caagcatgattttcacactg

SEQ ID NO: 2891 - DNA, 20 bp, Artificial Sequence
  chemically synthesized
ctggggaatgtcatttttgc

SEQ ID NO: 2892 - DNA, 20 bp, Artificial Sequence
  chemically synthesized
tttttgctagttgcaatatg

SEQ ID NO: 2893 - DNA, 20 bp, Artificial Sequence
  chemically synthesized
gctagttgcaatatgtggat

SEQ ID NO: 2894 - DNA, 20 bp, Artificial Sequence
  chemically synthesized
tttgatgtgtaaaaaacaca

SEQ ID NO: 2895 - DNA, 20 bp, Artificial Sequence
  chemically synthesized
ttttgaaaccttgcgtcttt

SEQ ID NO: 2896 - DNA, 20 bp, Artificial Sequence
  chemically synthesized
accttgcgtcttttggtctg

SEQ ID NO: 2897 - DNA, 20 bp, Artificial Sequence
  chemically synthesized
ccttgcgtcttttggtctgc

SEQ ID NO: 2898 - DNA, 20 bp, Artificial Sequence
  chemically synthesized
tcttttggtctgcaggtgta

SEQ ID NO: 2899 - DNA, 20 bp, Artificial Sequence
  chemically synthesized
tgtatagattccacttacta

SEQ ID NO: 2900 - DNA, 20 bp, Artificial Sequence
  chemically synthesized
agattccacttactacagat

SEQ ID NO: 2901 - DNA, 20 bp, Artificial Sequence
  chemically synthesized
ttccacttactacagatgag

SEQ ID NO: 2902 - DNA, 20 bp, Artificial Sequence
  chemically synthesized
tgagtagcatttacaccact

SEQ ID NO: 2903 - DNA, 20 bp, Artificial Sequence
  chemically synthesized
ctcagatgtgtaaaaaaaca

SEQ ID NO: 2904 - DNA, 20 bp, Artificial Sequence
  chemically synthesized
tcagatgtgtaaaaaaacaa

SEQ ID NO: 2905 - DNA, 20 bp, Artificial Sequence
  chemically synthesized
ctgtgtgccttttgatctgc

SEQ ID NO: 2906 - DNA, 20 bp, Artificial Sequence
  chemically synthesized
gccttttgatctgcaagtgt

SEQ ID NO: 2907 - DNA, 20 bp, Artificial Sequence
  chemically synthesized
tttgatctgcaagtgtgaga

SEQ ID NO: 2908 - DNA, 20 bp, Artificial Sequence
  chemically synthesized
gtgtgagatggcacttacta

SEQ ID NO: 2909 - DNA, 20 bp, Artificial Sequence
  chemically synthesized
gagatggcacttactacagt

SEQ ID NO: 2910 - DNA, 20 bp, Artificial Sequence
  chemically synthesized
atggcacttactacagtgag

SEQ ID NO: 2911 - DNA, 20 bp, Artificial Sequence
  chemically synthesized
tttcatcactaaaaatcaca

SEQ ID NO: 2912 - DNA, 20 bp, Artificial Sequence
  chemically synthesized
gaacgttttaatcattcacc

SEQ ID NO: 2913 - DNA, 20 bp, Artificial Sequence
  chemically synthesized
aacgttttaatcattcaccg

SEQ ID NO: 2914 - DNA, 20 bp, Artificial Sequence
  chemically synthesized
gttttaatcattcaccgagg

SEQ ID NO: 2915 - DNA, 20 bp, Artificial Sequence
  chemically synthesized
taatcattcaccgaggaaga

SEQ ID NO: 2916 - DNA, 20 bp, Artificial Sequence
  chemically synthesized
aatcattcaccgaggaagaa

SEQ ID NO: 2917 - DNA, 20 bp, Artificial Sequence
  chemically synthesized
atcattcaccgaggaagaaa

SEQ ID NO: 2918 - DNA, 20 bp, Artificial Sequence
  chemically synthesized
cattcaccgaggaagaaagg

SEQ ID NO: 2919 - DNA, 20 bp, Artificial Sequence
  chemically synthesized
attcaccgaggaagaaaggg

SEQ ID NO: 2920 - DNA, 20 bp, Artificial Sequence
  chemically synthesized
ggaggaataaatacacaaaa

SEQ ID NO: 2921 - DNA, 20 bp, Artificial Sequence
  chemically synthesized
ctcaacgtctacaccttctg

SEQ ID NO: 2922 - DNA, 20 bp, Artificial Sequence
  chemically synthesized
gtctacaccttctgcagaaa

SEQ ID NO: 2923 - DNA, 20 bp, Artificial Sequence
  chemically synthesized
tactgttctatgctttgtga

SEQ ID NO: 2924 - DNA, 20 bp, Artificial Sequence
  chemically synthesized
tgaaagttgatcatacaaat

SEQ ID NO: 2925 - DNA, 20 bp, Artificial Sequence
  chemically synthesized
gaaagttgatcatacaaatt

SEQ ID NO: 2926 - DNA, 20 bp, Artificial Sequence
  chemically synthesized
ctttttatacccaactaaaa

SEQ ID NO: 2927 - DNA, 20 bp, Artificial Sequence
  chemically synthesized
tttatacccaactaaaatag

SEQ ID NO: 2928 - DNA, 20 bp, Artificial Sequence
  chemically synthesized
ttatacccaactaaaatagt

SEQ ID NO: 2929 - DNA, 20 bp, Artificial Sequence
  chemically synthesized
tatacccaactaaaatagtg

SEQ ID NO: 2930 - DNA, 20 bp, Artificial Sequence
  chemically synthesized
atacccaactaaaatagtgg

SEQ ID NO: 2931 - DNA, 20 bp, Artificial Sequence
  chemically synthesized
cccaactaaaatagtggggg

SEQ ID NO: 2932 - DNA, 20 bp, Artificial Sequence
  chemically synthesized
ccaactaaaatagtgggggt

SEQ ID NO: 2933 - DNA, 20 bp, Artificial Sequence
  chemically synthesized
caactaaaatagtgggggta

SEQ ID NO: 2934 - DNA, 20 bp, Artificial Sequence
  chemically synthesized
aactaaaatagtgggggtag

SEQ ID NO: 2935 - DNA, 20 bp, Artificial Sequence
  chemically synthesized
actaaaatagtgggggtagg

SEQ ID NO: 2936 - DNA, 20 bp, Artificial Sequence
  chemically synthesized
aaaatagtgggggtaggggg

SEQ ID NO: 2937 - DNA, 20 bp, Artificial Sequence
  chemically synthesized
agtgggggtagggggtagaa

SEQ ID NO: 2938 - DNA, 20 bp, Artificial Sequence
  chemically synthesized
gtagggggtagaaaagcact

SEQ ID NO: 2939 - DNA, 20 bp, Artificial Sequence
  chemically synthesized
tagggggtagaaaagcactt

SEQ ID NO: 2940 - DNA, 20 bp, Artificial Sequence
  chemically synthesized
gacaaatgacactgctccca

SEQ ID NO: 2941 - DNA, 20 bp, Artificial Sequence
  chemically synthesized
cccacagtgtaattctctcc

SEQ ID NO: 2942 - DNA, 20 bp, Artificial Sequence
  chemically synthesized
agtgtaattctctccaagtc

SEQ ID NO: 2943 - DNA, 20 bp, Artificial Sequence
  chemically synthesized
gcaactgcccgttgtgacct

SEQ ID NO: 2944 - DNA, 20 bp, Artificial Sequence
  chemically synthesized
tgcccgttgtgacctgagac

SEQ ID NO: 2945 - DNA, 20 bp, Artificial Sequence
  chemically synthesized
ctgagaccagttttatctaa

SEQ ID NO: 2946 - DNA, 20 bp, Artificial Sequence
  chemically synthesized
gttgctaaaatgacctgctg

SEQ ID NO: 2947 - DNA, 20 bp, Artificial Sequence
  chemically synthesized
tatctaccaccatcactcac

SEQ ID NO: 2948 - DNA, 20 bp, Artificial Sequence
  chemically synthesized
actcaccagttgaaactcac

SEQ ID NO: 2949 - DNA, 20 bp, Artificial Sequence
  chemically synthesized
gttgaaactcaccagctcct

SEQ ID NO: 2950 - DNA, 20 bp, Artificial Sequence
  chemically synthesized
ccagctcctcagatccttaa

SEQ ID NO: 2951 - DNA, 20 bp, Artificial Sequence
  chemically synthesized
agtgccaatgaattttctca

SEQ ID NO: 2952 - DNA, 20 bp, Artificial Sequence
  chemically synthesized
tgccaatgaattttctcaaa

SEQ ID NO: 2953 - DNA, 20 bp, Artificial Sequence
  chemically synthesized
tcccccttttctttgttgtg

SEQ ID NO: 2954 - DNA, 20 bp, Artificial Sequence
  chemically synthesized
tttgttgtgtggatataccg

SEQ ID NO: 2955 - DNA, 20 bp, Artificial Sequence
  chemically synthesized
cccaaataaatcacttaatt

SEQ ID NO: 2956 - DNA, 20 bp, Artificial Sequence
  chemically synthesized
caaataaatcacttaattta

SEQ ID NO: 2957 - DNA, 20 bp, Artificial Sequence
  chemically synthesized
tgtatttttattttgactga

SEQ ID NO: 2958 - DNA, 20 bp, Artificial Sequence
  chemically synthesized
tttgactgacagcttataac

SEQ ID NO: 2959 - DNA, 20 bp, Artificial Sequence
  chemically synthesized
gactgacagcttataacaag

SEQ ID NO: 2960 - DNA, 20 bp, Artificial Sequence
  chemically synthesized
gacagcttataacaagtagc

SEQ ID NO: 2961 - DNA, 20 bp, Artificial Sequence
  chemically synthesized
acaagtagctagcatttacc

SEQ ID NO: 2962 - DNA, 20 bp, Artificial Sequence
  chemically synthesized
atttaccaagtttctacact

SEQ ID NO: 2963 - DNA, 20 bp, Artificial Sequence
  chemically synthesized
agttgtacttcacttatacg

SEQ ID NO: 2964 - DNA, 20 bp, Artificial Sequence
  chemically synthesized
ttaaaaaacaactgaattta

SEQ ID NO: 2965 - DNA, 20 bp, Artificial Sequence
  chemically synthesized
aacaactgaatttatagaaa

SEQ ID NO: 2966 - DNA, 20 bp, Artificial Sequence
  chemically synthesized
caactgaatttatagaaaca

SEQ ID NO: 2967 - DNA, 20 bp, Artificial Sequence
  chemically synthesized
ctgaatttatagaaacagag

SEQ ID NO: 2968 - DNA, 20 bp, Artificial Sequence
  chemically synthesized
atagaaacagagtagaccct

SEQ ID NO: 2969 - DNA, 20 bp, Artificial Sequence
  chemically synthesized
aaacagagtagacccttggt

SEQ ID NO: 2970 - DNA, 20 bp, Artificial Sequence
  chemically synthesized
aacagagtagacccttggtt

SEQ ID NO: 2971 - DNA, 20 bp, Artificial Sequence
  chemically synthesized
acagagtagacccttggttg

SEQ ID NO: 2972 - DNA, 20 bp, Artificial Sequence
  chemically synthesized
cagagtagacccttggttgg

SEQ ID NO: 2973 - DNA, 20 bp, Artificial Sequence
  chemically synthesized
agagtagacccttggttggg

SEQ ID NO: 2974 - DNA, 20 bp, Artificial Sequence
  chemically synthesized
agacccttggttggggggct

SEQ ID NO: 2975 - DNA, 20 bp, Artificial Sequence
  chemically synthesized
gacccttggttggggggctt

SEQ ID NO: 2976 - DNA, 20 bp, Artificial Sequence
  chemically synthesized
acccttggttggggggcttg

SEQ ID NO: 2977 - DNA, 20 bp, Artificial Sequence
  chemically synthesized
cccttggttggggggcttgg

SEQ ID NO: 2978 - DNA, 20 bp, Artificial Sequence
  chemically synthesized
ccttggttggggggcttggg

SEQ ID NO: 2979 - DNA, 20 bp, Artificial Sequence
  chemically synthesized
ggttggggggcttgggggga

SEQ ID NO: 2980 - DNA, 20 bp, Artificial Sequence
  chemically synthesized
cttggggggaaagaaaattg

SEQ ID NO: 2981 - DNA, 20 bp, Artificial Sequence
  chemically synthesized
ttggggggaaagaaaattgt

SEQ ID NO: 2982 - DNA, 20 bp, Artificial Sequence
  chemically synthesized
tggggggaaagaaaattgta

SEQ ID NO: 2983 - DNA, 20 bp, Artificial Sequence
  chemically synthesized
ggggaaagaaaattgtaggg

SEQ ID NO: 2984 - DNA, 20 bp, Artificial Sequence
  chemically synthesized
gggaaagaaaattgtagggt

SEQ ID NO: 2985 - DNA, 20 bp, Artificial Sequence
  chemically synthesized
ggaaagaaaattgtagggta

SEQ ID NO: 2986 - DNA, 20 bp, Artificial Sequence
  chemically synthesized
aaattgtagggtagggtaca

SEQ ID NO: 2987 - DNA, 20 bp, Artificial Sequence
  chemically synthesized
tagggtagggtacaaagttg

SEQ ID NO: 2988 - DNA, 20 bp, Artificial Sequence
  chemically synthesized
gcagttacgtctaatacatc

SEQ ID NO: 2989 - DNA, 20 bp, Artificial Sequence
  chemically synthesized
agttacgtctaatacatcta

SEQ ID NO: 2990 - DNA, 20 bp, Artificial Sequence
  chemically synthesized
agagatttaatgtacaacat

SEQ ID NO: 2991 - DNA, 20 bp, Artificial Sequence
  chemically synthesized
gagatttaatgtacaacatg

SEQ ID NO: 2992 - DNA, 20 bp, Artificial Sequence
  chemically synthesized
ttaatgtacaacatgaggac

SEQ ID NO: 2993 - DNA, 20 bp, Artificial Sequence
  chemically synthesized
actagcgttaataattgtgt

SEQ ID NO: 2994 - DNA, 20 bp, Artificial Sequence
  chemically synthesized
tccattcttacactgctata

SEQ ID NO: 2995 - DNA, 20 bp, Artificial Sequence
  chemically synthesized
tataaagaaataactgaaac

SEQ ID NO: 2996 - DNA, 20 bp, Artificial Sequence
  chemically synthesized
ataaagaaataactgaaact

SEQ ID NO: 2997 - DNA, 20 bp, Artificial Sequence
  chemically synthesized
ctgaaactgggtaatttata

SEQ ID NO: 2998 - DNA, 20 bp, Artificial Sequence
  chemically synthesized
actgggtaatttataaagaa

SEQ ID NO: 2999 - DNA, 20 bp, Artificial Sequence
  chemically synthesized
atttataaagaaaagtttaa

SEQ ID NO: 3000 - DNA, 20 bp, Artificial Sequence
  chemically synthesized
aagaaaagtttaatggctca

SEQ ID NO: 3001 - DNA, 20 bp, Artificial Sequence
  chemically synthesized
tttaatggctcacagttctg

SEQ ID NO: 3002 - DNA, 20 bp, Artificial Sequence
  chemically synthesized
ttaatggctcacagttctgc

SEQ ID NO: 3003 - DNA, 20 bp, Artificial Sequence
  chemically synthesized
cacagttctgcaggctgtac

SEQ ID NO: 3004 - DNA, 20 bp, Artificial Sequence
  chemically synthesized
agttctgcaggctgtacaag

SEQ ID NO: 3005 - DNA, 20 bp, Artificial Sequence
  chemically synthesized
tgcaggctgtacaagaagca

SEQ ID NO: 3006 - DNA, 20 bp, Artificial Sequence
  chemically synthesized
ggctgtacaagaagcatggc

SEQ ID NO: 3007 - DNA, 20 bp, Artificial Sequence
  chemically synthesized
tacaagaagcatggctggat

SEQ ID NO: 3008 - DNA, 20 bp, Artificial Sequence
  chemically synthesized
agcatggctggatcagcttc

SEQ ID NO: 3009 - DNA, 20 bp, Artificial Sequence
  chemically synthesized
gcatggctggatcagcttct

SEQ ID NO: 3010 - DNA, 20 bp, Artificial Sequence
  chemically synthesized
tggctggatcagcttctggg

SEQ ID NO: 3011 - DNA, 20 bp, Artificial Sequence
  chemically synthesized
ggctggatcagcttctgggc

SEQ ID NO: 3012 - DNA, 20 bp, Artificial Sequence
  chemically synthesized
atcagcttctgggcaggcca

SEQ ID NO: 3013 - DNA, 20 bp, Artificial Sequence
  chemically synthesized
tcagcttctgggcaggccat

SEQ ID NO: 3014 - DNA, 20 bp, Artificial Sequence
  chemically synthesized
cagcttctgggcaggccata

SEQ ID NO: 3015 - DNA, 20 bp, Artificial Sequence
  chemically synthesized
tagggaacttaaaatcatga

SEQ ID NO: 3016 - DNA, 20 bp, Artificial Sequence
  chemically synthesized
ggaacttaaaatcatgatgg

SEQ ID NO: 3017 - DNA, 20 bp, Artificial Sequence
  chemically synthesized
gaacttaaaatcatgatgga

SEQ ID NO: 3018 - DNA, 20 bp, Artificial Sequence
  chemically synthesized
taaaatcatgatggaaggca

SEQ ID NO: 3019 - DNA, 20 bp, Artificial Sequence
  chemically synthesized
aaaatcatgatggaaggcat

SEQ ID NO: 3020 - DNA, 20 bp, Artificial Sequence
  chemically synthesized
aaatcatgatggaaggcata

SEQ ID NO: 3021 - DNA, 20 bp, Artificial Sequence
  chemically synthesized
atcatgatggaaggcatagg

SEQ ID NO: 3022 - DNA, 20 bp, Artificial Sequence
  chemically synthesized
tggaaggcatagggagaccc

SEQ ID NO: 3023 - DNA, 20 bp, Artificial Sequence
  chemically synthesized
gggagaccccagacttcaca

SEQ ID NO: 3024 - DNA, 20 bp, Artificial Sequence
  chemically synthesized
agaccccagacttcacatgg

SEQ ID NO: 3025 - DNA, 20 bp, Artificial Sequence
  chemically synthesized
gaccccagacttcacatggc

SEQ ID NO: 3026 - DNA, 20 bp, Artificial Sequence
  chemically synthesized
agacttcacatggcaggaac

SEQ ID NO: 3027 - DNA, 20 bp, Artificial Sequence
  chemically synthesized
gacttcacatggcaggaact

SEQ ID NO: 3028 - DNA, 20 bp, Artificial Sequence
  chemically synthesized
acttcacatggcaggaactg

SEQ ID NO: 3029 - DNA, 20 bp, Artificial Sequence
  chemically synthesized
cttcacatggcaggaactgg

SEQ ID NO: 3030 - DNA, 20 bp, Artificial Sequence
  chemically synthesized
cacatggcaggaactggggg

SEQ ID NO: 3031 - DNA, 20 bp, Artificial Sequence
  chemically synthesized
catggcaggaactgggggaa

SEQ ID NO: 3032 - DNA, 20 bp, Artificial Sequence
  chemically synthesized
tggcaggaactgggggaaga

SEQ ID NO: 3033 - DNA, 20 bp, Artificial Sequence
  chemically synthesized
gaactgggggaagagagaaa

SEQ ID NO: 3034 - DNA, 20 bp, Artificial Sequence
  chemically synthesized
aactgggggaagagagaaat

SEQ ID NO: 3035 - DNA, 20 bp, Artificial Sequence
  chemically synthesized
ctgggggaagagagaaatgg

SEQ ID NO: 3036 - DNA, 20 bp, Artificial Sequence
  chemically synthesized
tgggggaagagagaaatggg

SEQ ID NO: 3037 - DNA, 20 bp, Artificial Sequence
  chemically synthesized
gctacatacgtttaaacaac

SEQ ID NO: 3038 - DNA, 20 bp, Artificial Sequence
  chemically synthesized
tttaaacaactagatcttgt

SEQ ID NO: 3039 - DNA, 20 bp, Artificial Sequence
  chemically synthesized
tcttgtcagaactcactata

SEQ ID NO: 3040 - DNA, 20 bp, Artificial Sequence
  chemically synthesized
agaactcactatatagtacc

SEQ ID NO: 3041 - DNA, 20 bp, Artificial Sequence
  chemically synthesized
aactcactatatagtaccaa

SEQ ID NO: 3042 - DNA, 20 bp, Artificial Sequence
  chemically synthesized
actcactatatagtaccaag

SEQ ID NO: 3043 - DNA, 20 bp, Artificial Sequence
  chemically synthesized
ctcactatatagtaccaaga

SEQ ID NO: 3044 - DNA, 20 bp, Artificial Sequence
  chemically synthesized
tcactatatagtaccaagag

SEQ ID NO: 3045 - DNA, 20 bp, Artificial Sequence
  chemically synthesized
aggggactgtacaaaaccat

SEQ ID NO: 3046 - DNA, 20 bp, Artificial Sequence
  chemically synthesized
ggactgtacaaaaccattag

SEQ ID NO: 3047 - DNA, 20 bp, Artificial Sequence
  chemically synthesized
ataatccactcacctcccac

SEQ ID NO: 3048 - DNA, 20 bp, Artificial Sequence
  chemically synthesized
taatccactcacctcccacc

SEQ ID NO: 3049 - DNA, 20 bp, Artificial Sequence
  chemically synthesized
ccaggcccaacctccaacac

SEQ ID NO: 3050 - DNA, 20 bp, Artificial Sequence
  chemically synthesized
caggcccaacctccaacact

SEQ ID NO: 3051 - DNA, 20 bp, Artificial Sequence
  chemically synthesized
aggcccaacctccaacactg

SEQ ID NO: 3052 - DNA, 20 bp, Artificial Sequence
  chemically synthesized
acctccaacactggggatta

SEQ ID NO: 3053 - DNA, 20 bp, Artificial Sequence
  chemically synthesized
tggggattacagttgaacat

SEQ ID NO: 3054 - DNA, 20 bp, Artificial Sequence
  chemically synthesized
ttacagttgaacatgagatt

SEQ ID NO: 3055 - DNA, 20 bp, Artificial Sequence
  chemically synthesized
tacagttgaacatgagattt

SEQ ID NO: 3056 - DNA, 20 bp, Artificial Sequence
  chemically synthesized
agttgaacatgagatttggg

SEQ ID NO: 3057 - DNA, 20 bp, Artificial Sequence
  chemically synthesized
gttgaacatgagatttgggt

SEQ ID NO: 3058 - DNA, 20 bp, Artificial Sequence
  chemically synthesized
ttgaacatgagatttgggtg

SEQ ID NO: 3059 - DNA, 20 bp, Artificial Sequence
  chemically synthesized
acatgagatttgggtgggga

SEQ ID NO: 3060 - DNA, 20 bp, Artificial Sequence
  chemically synthesized
atgagatttgggtggggaca

SEQ ID NO: 3061 - DNA, 20 bp, Artificial Sequence
  chemically synthesized
aaaccatgttattccaactc

SEQ ID NO: 3062 - DNA, 20 bp, Artificial Sequence
  chemically synthesized
atactgtcgtgccttaccaa

SEQ ID NO: 3063 - DNA, 20 bp, Artificial Sequence
  chemically synthesized
gccttaccaacagttcccca

SEQ ID NO: 3064 - DNA, 20 bp, Artificial Sequence
  chemically synthesized
cccaaagtcttaactcgatc

SEQ ID NO: 3065 - DNA, 20 bp, Artificial Sequence
  chemically synthesized
tcgatccagcattcattcaa

SEQ ID NO: 3066 - DNA, 20 bp, Artificial Sequence
  chemically synthesized
agcattcattcaaaagtcca

SEQ ID NO: 3067 - DNA, 20 bp, Artificial Sequence
  chemically synthesized
attcaaaagtccaaagtccc

SEQ ID NO: 3068 - DNA, 20 bp, Artificial Sequence
  chemically synthesized
tcaggtgagacttgggactt

SEQ ID NO: 3069 - DNA, 20 bp, Artificial Sequence
  chemically synthesized
ttggacttttgaatgaatgc

SEQ ID NO: 3070 - DNA, 20 bp, Artificial Sequence
  chemically synthesized
ttttgaatgaatgctggatc

SEQ ID NO: 3071 - DNA, 20 bp, Artificial Sequence
  chemically synthesized
aatgaatgctggatcgagtt

SEQ ID NO: 3072 - DNA, 20 bp, Artificial Sequence
  chemically synthesized
gctggatcgagttaagactt

SEQ ID NO: 3073 - DNA, 20 bp, Artificial Sequence
  chemically synthesized
ctggatcgagttaagacttt

SEQ ID NO: 3074 - DNA, 20 bp, Artificial Sequence
  chemically synthesized
tggatcgagttaagactttg

SEQ ID NO: 3075 - DNA, 20 bp, Artificial Sequence
  chemically synthesized
ttaagactttggggaactgt

SEQ ID NO: 3076 - DNA, 20 bp, Artificial Sequence
  chemically synthesized
gactttggggaactgttggt

SEQ ID NO: 3077 - DNA, 20 bp, Artificial Sequence
  chemically synthesized
actttggggaactgttggta

SEQ ID NO: 3078 - DNA, 20 bp, Artificial Sequence
  chemically synthesized
gaactgttggtaaggcacga

SEQ ID NO: 3079 - DNA, 20 bp, Artificial Sequence
  chemically synthesized
acgacagtattttgcaatat

SEQ ID NO: 3080 - DNA, 20 bp, Artificial Sequence
  chemically synthesized
acagtattttgcaatatgag

SEQ ID NO: 3081 - DNA, 20 bp, Artificial Sequence
  chemically synthesized
cagtattttgcaatatgaga

SEQ ID NO: 3082 - DNA, 20 bp, Artificial Sequence
  chemically synthesized
ttgcaatatgagaaggacat

SEQ ID NO: 3083 - DNA, 20 bp, Artificial Sequence
  chemically synthesized
tatgagaaggacattagatt

SEQ ID NO: 3084 - DNA, 20 bp, Artificial Sequence
  chemically synthesized
atgagaaggacattagattt

SEQ ID NO: 3085 - DNA, 20 bp, Artificial Sequence
  chemically synthesized
gagaaggacattagatttgg

SEQ ID NO: 3086 - DNA, 20 bp, Artificial Sequence
  chemically synthesized
agaaggacattagatttggg

SEQ ID NO: 3087 - DNA, 20 bp, Artificial Sequence
  chemically synthesized
gaaggacattagatttggga

SEQ ID NO: 3088 - DNA, 20 bp, Artificial Sequence
  chemically synthesized
aaggacattagatttgggag

SEQ ID NO: 3089 - DNA, 20 bp, Artificial Sequence
  chemically synthesized
acattagatttgggaggggc

SEQ ID NO: 3090 - DNA, 20 bp, Artificial Sequence
  chemically synthesized
attagatttgggaggggcca

SEQ ID NO: 3091 - DNA, 20 bp, Artificial Sequence
  chemically synthesized
gatttgggaggggccagagt

SEQ ID NO: 3092 - DNA, 20 bp, Artificial Sequence
  chemically synthesized
gggccagagttggaataaca

SEQ ID NO: 3093 - DNA, 20 bp, Artificial Sequence
  chemically synthesized
agagttggaataacatggtt

SEQ ID NO: 3094 - DNA, 20 bp, Artificial Sequence
  chemically synthesized
tcatgttcaactgtaatccc

SEQ ID NO: 3095 - DNA, 20 bp, Artificial Sequence
  chemically synthesized
tcaactgtaatccccagtgt

SEQ ID NO: 3096 - DNA, 20 bp, Artificial Sequence
  chemically synthesized
aactgtaatccccagtgttg

SEQ ID NO: 3097 - DNA, 20 bp, Artificial Sequence
  chemically synthesized
actgtaatccccagtgttgg

SEQ ID NO: 3098 - DNA, 20 bp, Artificial Sequence
  chemically synthesized
taatccccagtgttggaggt

SEQ ID NO: 3099 - DNA, 20 bp, Artificial Sequence
  chemically synthesized
aatccccagtgttggaggtt

SEQ ID NO: 3100 - DNA, 20 bp, Artificial Sequence
  chemically synthesized
ccagtgttggaggttgggcc

SEQ ID NO: 3101 - DNA, 20 bp, Artificial Sequence
  chemically synthesized
gtgttggaggttgggcctgg

SEQ ID NO: 3102 - DNA, 20 bp, Artificial Sequence
  chemically synthesized
tgttggaggttgggcctggt

SEQ ID NO: 3103 - DNA, 20 bp, Artificial Sequence
  chemically synthesized
ttggaggttgggcctggtgg

SEQ ID NO: 3104 - DNA, 20 bp, Artificial Sequence
  chemically synthesized
tggaggttgggcctggtggg

SEQ ID NO: 3105 - DNA, 20 bp, Artificial Sequence
  chemically synthesized
ggttgggcctggtgggaggt

SEQ ID NO: 3106 - DNA, 20 bp, Artificial Sequence
  chemically synthesized
tgggcctggtgggaggtgag

SEQ ID NO: 3107 - DNA, 20 bp, Artificial Sequence
  chemically synthesized
ggtgggaggtgagtggatta

SEQ ID NO: 3108 - DNA, 20 bp, Artificial Sequence
  chemically synthesized
gtgggaggtgagtggattat

SEQ ID NO: 3109 - DNA, 20 bp, Artificial Sequence
  chemically synthesized
tgggaggtgagtggattatg

SEQ ID NO: 3110 - DNA, 20 bp, Artificial Sequence
  chemically synthesized
gaggtgagtggattatgggg

SEQ ID NO: 3111 - DNA, 20 bp, Artificial Sequence
  chemically synthesized
gattatggggtggcttctaa

SEQ ID NO: 3112 - DNA, 20 bp, Artificial Sequence
  chemically synthesized
tggcttctaatggttttgta

SEQ ID NO: 3113 - DNA, 20 bp, Artificial Sequence
  chemically synthesized
ggttttgtacagtcccctct

SEQ ID NO: 3114 - DNA, 20 bp, Artificial Sequence
  chemically synthesized
agtcccctcttggtactata

SEQ ID NO: 3115 - DNA, 20 bp, Artificial Sequence
  chemically synthesized
ccctcttggtactatatagt

SEQ ID NO: 3116 - DNA, 20 bp, Artificial Sequence
  chemically synthesized
actatatagtgagttctgac

SEQ ID NO: 3117 - DNA, 20 bp, Artificial Sequence
  chemically synthesized
tagtgagttctgacaagatc

SEQ ID NO: 3118 - DNA, 20 bp, Artificial Sequence
  chemically synthesized
tctagttgtttaaacgtatg

SEQ ID NO: 3119 - DNA, 20 bp, Artificial Sequence
  chemically synthesized
ctcccatttctctcttcccc

SEQ ID NO: 3120 - DNA, 20 bp, Artificial Sequence
  chemically synthesized
cccccagttcctgccatgtg

SEQ ID NO: 3121 - DNA, 20 bp, Artificial Sequence
  chemically synthesized
agttcctgccatgtgaagtc

SEQ ID NO: 3122 - DNA, 20 bp, Artificial Sequence
  chemically synthesized
gttcctgccatgtgaagtct

SEQ ID NO: 3123 - DNA, 20 bp, Artificial Sequence
  chemically synthesized
ttcctgccatgtgaagtctg

SEQ ID NO: 3124 - DNA, 20 bp, Artificial Sequence
  chemically synthesized
atgccttccatcatgatttt

SEQ ID NO: 3125 - DNA, 20 bp, Artificial Sequence
  chemically synthesized
tcatgattttaagttcccta

SEQ ID NO: 3126 - DNA, 20 bp, Artificial Sequence
  chemically synthesized
taagttccctatggcctgcc

SEQ ID NO: 3127 - DNA, 20 bp, Artificial Sequence
  chemically synthesized
gttccctatggcctgcccag

SEQ ID NO: 3128 - DNA, 20 bp, Artificial Sequence
  chemically synthesized
ggcctgcccagaagctgatc

SEQ ID NO: 3129 - DNA, 20 bp, Artificial Sequence
  chemically synthesized
atccagccatgcttcttgta

SEQ ID NO: 3130 - DNA, 20 bp, Artificial Sequence
  chemically synthesized
catgcttcttgtacagcctg

SEQ ID NO: 3131 - DNA, 20 bp, Artificial Sequence
  chemically synthesized
tgtacagcctgcagaactgt

SEQ ID NO: 3132 - DNA, 20 bp, Artificial Sequence
  chemically synthesized
acttttctttataaattacc

SEQ ID NO: 3133 - DNA, 20 bp, Artificial Sequence
  chemically synthesized
ctttataaattacccagttt

SEQ ID NO: 3134 - DNA, 20 bp, Artificial Sequence
  chemically synthesized
cagtttcagttatttcttta

SEQ ID NO: 3135 - DNA, 20 bp, Artificial Sequence
  chemically synthesized
tttcagttatttctttatag

SEQ ID NO: 3136 - DNA, 20 bp, Artificial Sequence
  chemically synthesized
ttatttctttatagcagtgt

SEQ ID NO: 3137 - DNA, 20 bp, Artificial Sequence
  chemically synthesized
tctttatagcagtgtaagaa

SEQ ID NO: 3138 - DNA, 20 bp, Artificial Sequence
  chemically synthesized
actaacacaattattaacgc

SEQ ID NO: 3139 - DNA, 20 bp, Artificial Sequence
  chemically synthesized
catgttgtacattaaatctc

SEQ ID NO: 3140 - DNA, 20 bp, Artificial Sequence
  chemically synthesized
cattaaatctctagatgtat

SEQ ID NO: 3141 - DNA, 20 bp, Artificial Sequence
  chemically synthesized
ctacaattttctttcccccc

SEQ ID NO: 3142 - DNA, 20 bp, Artificial Sequence
  chemically synthesized
tccccccaagccccccaacc

SEQ ID NO: 3143 - DNA, 20 bp, Artificial Sequence
  chemically synthesized
ccccccaagccccccaacca

SEQ ID NO: 3144 - DNA, 20 bp, Artificial Sequence
  chemically synthesized
cccccaagccccccaaccaa

SEQ ID NO: 3145 - DNA, 20 bp, Artificial Sequence
  chemically synthesized
ctactctgtttctataaatt

SEQ ID NO: 3146 - DNA, 20 bp, Artificial Sequence
  chemically synthesized
tgttttttaattccacgtat

SEQ ID NO: 3147 - DNA, 20 bp, Artificial Sequence
  chemically synthesized
tttaattccacgtataagtg

SEQ ID NO: 3148 - DNA, 20 bp, Artificial Sequence
  chemically synthesized
cgtataagtgaagtacaact

SEQ ID NO: 3149 - DNA, 20 bp, Artificial Sequence
  chemically synthesized
aagtgaagtacaactcagtg

SEQ ID NO: 3150 - DNA, 20 bp, Artificial Sequence
  chemically synthesized
tacaactcagtgtagaaact

SEQ ID NO: 3151 - DNA, 20 bp, Artificial Sequence
  chemically synthesized
tgtagaaacttggtaaatgc

SEQ ID NO: 3152 - DNA, 20 bp, Artificial Sequence
  chemically synthesized
aaatgctagctacttgttat

SEQ ID NO: 3153 - DNA, 20 bp, Artificial Sequence
  chemically synthesized
agctacttgttataagctgt

SEQ ID NO: 3154 - DNA, 20 bp, Artificial Sequence
  chemically synthesized
tgtcagtcaaaataaaaata

SEQ ID NO: 3155 - DNA, 20 bp, Artificial Sequence
  chemically synthesized
tcagtcaaaataaaaataca

SEQ ID NO: 3156 - DNA, 20 bp, Artificial Sequence
  chemically synthesized
cagagatgaatctctaaatt

SEQ ID NO: 3157 - DNA, 20 bp, Artificial Sequence
  chemically synthesized
tctaaattaagtgatttatt

SEQ ID NO: 3158 - DNA, 20 bp, Artificial Sequence
  chemically synthesized
ctaaattaagtgatttattt

SEQ ID NO: 3159 - DNA, 20 bp, Artificial Sequence
  chemically synthesized
aattaagtgatttatttggg

SEQ ID NO: 3160 - DNA, 20 bp, Artificial Sequence
  chemically synthesized
aagtgatttatttgggaaga

SEQ ID NO: 3161 - DNA, 20 bp, Artificial Sequence
  chemically synthesized
tgggaagaaagaattgcaat

SEQ ID NO: 3162 - DNA, 20 bp, Artificial Sequence
  chemically synthesized
gggaagaaagaattgcaatt

SEQ ID NO: 3163 - DNA, 20 bp, Artificial Sequence
  chemically synthesized
ggaagaaagaattgcaatta

SEQ ID NO: 3164 - DNA, 20 bp, Artificial Sequence
  chemically synthesized
ttgcaattagggcatacatg

SEQ ID NO: 3165 - DNA, 20 bp, Artificial Sequence
  chemically synthesized
attagggcatacatgtagat

SEQ ID NO: 3166 - DNA, 20 bp, Artificial Sequence
  chemically synthesized
gggcatacatgtagatcaga

SEQ ID NO: 3167 - DNA, 20 bp, Artificial Sequence
  chemically synthesized
catgtagatcagatggtctt

SEQ ID NO: 3168 - DNA, 20 bp, Artificial Sequence
  chemically synthesized
ttcggtatatccacacaaca

SEQ ID NO: 3169 - DNA, 20 bp, Artificial Sequence
  chemically synthesized
tatatccacacaacaaagaa

SEQ ID NO: 3170 - DNA, 20 bp, Artificial Sequence
  chemically synthesized
atatccacacaacaaagaaa

SEQ ID NO: 3171 - DNA, 20 bp, Artificial Sequence
  chemically synthesized
tatccacacaacaaagaaaa

SEQ ID NO: 3172 - DNA, 20 bp, Artificial Sequence
  chemically synthesized
atccacacaacaaagaaaag

SEQ ID NO: 3173 - DNA, 20 bp, Artificial Sequence
  chemically synthesized
tccacacaacaaagaaaagg

SEQ ID NO: 3174 - DNA, 20 bp, Artificial Sequence
  chemically synthesized
cacacaacaaagaaaagggg

SEQ ID NO: 3175 - DNA, 20 bp, Artificial Sequence
  chemically synthesized
acacaacaaagaaaaggggg

SEQ ID NO: 3176 - DNA, 20 bp, Artificial Sequence
  chemically synthesized
agggggaggttttgttaaaa

SEQ ID NO: 3177 - DNA, 20 bp, Artificial Sequence
  chemically synthesized
ggggaggttttgttaaaaaa

SEQ ID NO: 3178 - DNA, 20 bp, Artificial Sequence
  chemically synthesized
taaaaaagagaaatgttaca

SEQ ID NO: 3179 - DNA, 20 bp, Artificial Sequence
  chemically synthesized
aatgttacatagtgctcttt

SEQ ID NO: 3180 - DNA, 20 bp, Artificial Sequence
  chemically synthesized
tgctctttgagaaaattcat

SEQ ID NO: 3181 - DNA, 20 bp, Artificial Sequence
  chemically synthesized
gaaaattcattggcactatt

SEQ ID NO: 3182 - DNA, 20 bp, Artificial Sequence
  chemically synthesized
aaaattcattggcactatta

SEQ ID NO: 3183 - DNA, 20 bp, Artificial Sequence
  chemically synthesized
attggcactattaaggatct

SEQ ID NO: 3184 - DNA, 20 bp, Artificial Sequence
  chemically synthesized
ttggcactattaaggatctg

SEQ ID NO: 3185 - DNA, 20 bp, Artificial Sequence
  chemically synthesized
ggcactattaaggatctgag

SEQ ID NO: 3186 - DNA, 20 bp, Artificial Sequence
  chemically synthesized
ctattaaggatctgaggagc

SEQ ID NO: 3187 - DNA, 20 bp, Artificial Sequence
  chemically synthesized
taaggatctgaggagctggt

SEQ ID NO: 3188 - DNA, 20 bp, Artificial Sequence
  chemically synthesized
aggagctggtgagtttcaac

SEQ ID NO: 3189 - DNA, 20 bp, Artificial Sequence
  chemically synthesized
gctggtgagtttcaactggt

SEQ ID NO: 3190 - DNA, 20 bp, Artificial Sequence
  chemically synthesized
gagtttcaactggtgagtga

SEQ ID NO: 3191 - DNA, 20 bp, Artificial Sequence
  chemically synthesized
tttcaactggtgagtgatgg

SEQ ID NO: 3192 - DNA, 20 bp, Artificial Sequence
  chemically synthesized
caactggtgagtgatggtgg

SEQ ID NO: 3193 - DNA, 20 bp, Artificial Sequence
  chemically synthesized
gtgatggtggtagataaaat

SEQ ID NO: 3194 - DNA, 20 bp, Artificial Sequence
  chemically synthesized
gatggtggtagataaaatta

SEQ ID NO: 3195 - DNA, 20 bp, Artificial Sequence
  chemically synthesized
ggtagataaaattagagctg

SEQ ID NO: 3196 - DNA, 20 bp, Artificial Sequence
  chemically synthesized
agataaaattagagctgcag

SEQ ID NO: 3197 - DNA, 20 bp, Artificial Sequence
  chemically synthesized
gataaaattagagctgcagc

SEQ ID NO: 3198 - DNA, 20 bp, Artificial Sequence
  chemically synthesized
agagctgcagcaggtcattt

SEQ ID NO: 3199 - DNA, 20 bp, Artificial Sequence
  chemically synthesized
caggtcattttagcaactat

SEQ ID NO: 3200 - DNA, 20 bp, Artificial Sequence
  chemically synthesized
tagcaactattagataaaac

SEQ ID NO: 3201 - DNA, 20 bp, Artificial Sequence
  chemically synthesized
ctattagataaaactggtct

SEQ ID NO: 3202 - DNA, 20 bp, Artificial Sequence
  chemically synthesized
tattagataaaactggtctc

SEQ ID NO: 3203 - DNA, 20 bp, Artificial Sequence
  chemically synthesized
aaactggtctcaggtcacaa

SEQ ID NO: 3204 - DNA, 20 bp, Artificial Sequence
  chemically synthesized
aactggtctcaggtcacaac

SEQ ID NO: 3205 - DNA, 20 bp, Artificial Sequence
  chemically synthesized
tggtctcaggtcacaacggg

SEQ ID NO: 3206 - DNA, 20 bp, Artificial Sequence
  chemically synthesized
caggtcacaacgggcagttg

SEQ ID NO: 3207 - DNA, 20 bp, Artificial Sequence
  chemically synthesized
gtcacaacgggcagttgcag

SEQ ID NO: 3208 - DNA, 20 bp, Artificial Sequence
  chemically synthesized
caacgggcagttgcagcagc

SEQ ID NO: 3209 - DNA, 20 bp, Artificial Sequence
  chemically synthesized
gcagttgcagcagctggact

SEQ ID NO: 3210 - DNA, 20 bp, Artificial Sequence
  chemically synthesized
agttgcagcagctggacttg

SEQ ID NO: 3211 - DNA, 20 bp, Artificial Sequence
  chemically synthesized
ttgcagcagctggacttgga

SEQ ID NO: 3212 - DNA, 20 bp, Artificial Sequence
  chemically synthesized
acttggagagaattacactg

SEQ ID NO: 3213 - DNA, 20 bp, Artificial Sequence
  chemically synthesized
cttggagagaattacactgt

SEQ ID NO: 3214 - DNA, 20 bp, Artificial Sequence
  chemically synthesized
tggagagaattacactgtgg

SEQ ID NO: 3215 - DNA, 20 bp, Artificial Sequence
  chemically synthesized
agagaattacactgtgggag

SEQ ID NO: 3216 - DNA, 20 bp, Artificial Sequence
  chemically synthesized
ggagcagtgtcatttgtcct

SEQ ID NO: 3217 - DNA, 20 bp, Artificial Sequence
  chemically synthesized
accccctacccccactattt

SEQ ID NO: 3218 - DNA, 20 bp, Artificial Sequence
  chemically synthesized
cctacccccactattttagt

SEQ ID NO: 3219 - DNA, 20 bp, Artificial Sequence
  chemically synthesized
ctacccccactattttagtt

SEQ ID NO: 3220 - DNA, 20 bp, Artificial Sequence
  chemically synthesized
ctattttagttgggtataaa

SEQ ID NO: 3221 - DNA, 20 bp, Artificial Sequence
  chemically synthesized
ttgtatgatcaactttcaca

SEQ ID NO: 3222 - DNA, 20 bp, Artificial Sequence
  chemically synthesized
tgatcaactttcacaaagca

SEQ ID NO: 3223 - DNA, 20 bp, Artificial Sequence
  chemically synthesized
aactttcacaaagcatagaa

SEQ ID NO: 3224 - DNA, 20 bp, Artificial Sequence
  chemically synthesized
tttcacaaagcatagaacag

SEQ ID NO: 3225 - DNA, 20 bp, Artificial Sequence
  chemically synthesized
ttcacaaagcatagaacagt

SEQ ID NO: 3226 - DNA, 20 bp, Artificial Sequence
  chemically synthesized
aaagcatagaacagtaggaa

SEQ ID NO: 3227 - DNA, 20 bp, Artificial Sequence
  chemically synthesized
aagcatagaacagtaggaaa

SEQ ID NO: 3228 - DNA, 20 bp, Artificial Sequence
  chemically synthesized
agcatagaacagtaggaaaa

SEQ ID NO: 3229 - DNA, 20 bp, Artificial Sequence
  chemically synthesized
aggaaaagggtctgtttctg

SEQ ID NO: 3230 - DNA, 20 bp, Artificial Sequence
  chemically synthesized
aaaagggtctgtttctgcag

SEQ ID NO: 3231 - DNA, 20 bp, Artificial Sequence
  chemically synthesized
aaagggtctgtttctgcaga

SEQ ID NO: 3232 - DNA, 20 bp, Artificial Sequence
  chemically synthesized
gtctgtttctgcagaaggtg

SEQ ID NO: 3233 - DNA, 20 bp, Artificial Sequence
  chemically synthesized
ctgcagaaggtgtagacgtt

SEQ ID NO: 3234 - DNA, 20 bp, Artificial Sequence
  chemically synthesized
gcagaaggtgtagacgttga

SEQ ID NO: 3235 - DNA, 20 bp, Artificial Sequence
  chemically synthesized
ttattcctccctttcttcct

SEQ ID NO: 3236 - DNA, 20 bp, Artificial Sequence
  chemically synthesized
aaaacgttctgtgtgatttt

SEQ ID NO: 3237 - DNA, 20 bp, Artificial Sequence
  chemically synthesized
tgtgatttttagtgatgaaa

SEQ ID NO: 3238 - DNA, 20 bp, Artificial Sequence
  chemically synthesized
agattaaatgctactcactg

SEQ ID NO: 3239 - DNA, 20 bp, Artificial Sequence
  chemically synthesized
taaatgctactcactgtagt

SEQ ID NO: 3240 - DNA, 20 bp, Artificial Sequence
  chemically synthesized
taagtgccatctcacacttg

SEQ ID NO: 3241 - DNA, 20 bp, Artificial Sequence
  chemically synthesized
atctcacacttgcagatcaa

SEQ ID NO: 3242 - DNA, 20 bp, Artificial Sequence
  chemically synthesized
tctcacacttgcagatcaaa

SEQ ID NO: 3243 - DNA, 20 bp, Artificial Sequence
  chemically synthesized
cttgcagatcaaaaggcaca

SEQ ID NO: 3244 - DNA, 20 bp, Artificial Sequence
  chemically synthesized
ctttgtttttttacacatct

SEQ ID NO: 3245 - DNA, 20 bp, Artificial Sequence
  chemically synthesized
tgtttttttacacatctgag

SEQ ID NO: 3246 - DNA, 20 bp, Artificial Sequence
  chemically synthesized
gtgtaaatgctactcatctg

SEQ ID NO: 3247 - DNA, 20 bp, Artificial Sequence
  chemically synthesized
aaatgctactcatctgtagt

SEQ ID NO: 3248 - DNA, 20 bp, Artificial Sequence
  chemically synthesized
tgctactcatctgtagtaag

SEQ ID NO: 3249 - DNA, 20 bp, Artificial Sequence
  chemically synthesized
aagtggaatctatacacctg

SEQ ID NO: 3250 - DNA, 20 bp, Artificial Sequence
  chemically synthesized
tctatacacctgcagaccaa

SEQ ID NO: 3251 - DNA, 20 bp, Artificial Sequence
  chemically synthesized
acctgcagaccaaaagacgc

SEQ ID NO: 3252 - DNA, 20 bp, Artificial Sequence
  chemically synthesized
cctgcagaccaaaagacgca

SEQ ID NO: 3253 - DNA, 20 bp, Artificial Sequence
  chemically synthesized
tgtgttttttacacatcaaa

SEQ ID NO: 3254 - DNA, 20 bp, Artificial Sequence
  chemically synthesized
tttttacacatcaaacagaa

SEQ ID NO: 3255 - DNA, 20 bp, Artificial Sequence
  chemically synthesized
cagaatggtacgtttttcaa

SEQ ID NO: 3256 - DNA, 20 bp, Artificial Sequence
  chemically synthesized
actcatccacatattgcaac

SEQ ID NO: 3257 - DNA, 20 bp, Artificial Sequence
  chemically synthesized
ctagcaaaaatgacattccc

SEQ ID NO: 3258 - DNA, 20 bp, Artificial Sequence
  chemically synthesized
ccagtgtgaaaatcatgctt

SEQ ID NO: 3259 - DNA, 20 bp, Artificial Sequence
  chemically synthesized
agtgtgaaaatcatgcttga

SEQ ID NO: 3260 - DNA, 20 bp, Artificial Sequence
  chemically synthesized
tgagagaattcttacatgta

SEQ ID NO: 3261 - DNA, 20 bp, Artificial Sequence
  chemically synthesized
gagagaattcttacatgtaa

SEQ ID NO: 3262 - DNA, 20 bp, Artificial Sequence
  chemically synthesized
gcaaaattgcgatgactttg

SEQ ID NO: 3263 - DNA, 20 bp, Artificial Sequence
  chemically synthesized
caaaattgcgatgactttgc

SEQ ID NO: 3264 - DNA, 20 bp, Artificial Sequence
  chemically synthesized
aaaattgcgatgactttgca

SEQ ID NO: 3265 - DNA, 20 bp, Artificial Sequence
  chemically synthesized
aaattgcgatgactttgcag

SEQ ID NO: 3266 - DNA, 20 bp, Artificial Sequence
  chemically synthesized
gatgactttgcaggggaccg

SEQ ID NO: 3267 - DNA, 20 bp, Artificial Sequence
  chemically synthesized
atgactttgcaggggaccgt

SEQ ID NO: 3268 - DNA, 20 bp, Artificial Sequence
  chemically synthesized
gaccgtgggattcccgcccg

SEQ ID NO: 3269 - DNA, 20 bp, Artificial Sequence
  chemically synthesized
gggattcccgcccgcagtgc

SEQ ID NO: 3270 - DNA, 20 bp, Artificial Sequence
  chemically synthesized
gattcccgcccgcagtgccg

SEQ ID NO: 3271 - DNA, 20 bp, Artificial Sequence
  chemically synthesized
gtgccggagctgtcccctac

SEQ ID NO: 3272 - DNA, 20 bp, Artificial Sequence
  chemically synthesized
tgccggagctgtcccctacc

SEQ ID NO: 3273 - DNA, 20 bp, Artificial Sequence
  chemically synthesized
gccggagctgtcccctacca

SEQ ID NO: 3274 - DNA, 20 bp, Artificial Sequence
  chemically synthesized
ctgtcccctaccagggtttg

SEQ ID NO: 3275 - DNA, 20 bp, Artificial Sequence
  chemically synthesized
tcccctaccagggtttgcag

SEQ ID NO: 3276 - DNA, 20 bp, Artificial Sequence
  chemically synthesized
ccctaccagggtttgcagtg

SEQ ID NO: 3277 - DNA, 20 bp, Artificial Sequence
  chemically synthesized
ggagttttgaatgcacttaa

SEQ ID NO: 3278 - DNA, 20 bp, Artificial Sequence
  chemically synthesized
atgcacttaacagtgtctta

SEQ ID NO: 3279 - DNA, 20 bp, Artificial Sequence
  chemically synthesized
tcatccaccaattatgtgtt

SEQ ID NO: 3280 - DNA, 20 bp, Artificial Sequence
  chemically synthesized
ttgagcgcccactgcctacc

SEQ ID NO: 3281 - DNA, 20 bp, Artificial Sequence
  chemically synthesized
gaaatcgtcttcactttctc

SEQ ID NO: 3282 - DNA, 20 bp, Artificial Sequence
  chemically synthesized
gtcttcactttctccagatc

SEQ ID NO: 3283 - DNA, 20 bp, Artificial Sequence
  chemically synthesized
ttcactttctccagatccag

SEQ ID NO: 3284 - DNA, 20 bp, Artificial Sequence
  chemically synthesized
atccagcagcctcccctatt

SEQ ID NO: 3285 - DNA, 20 bp, Artificial Sequence
  chemically synthesized
tccagcagcctcccctatta

SEQ ID NO: 3286 - DNA, 20 bp, Artificial Sequence
  chemically synthesized
ctattgcgccaacgctcctc

SEQ ID NO: 3287 - DNA, 20 bp, Artificial Sequence
  chemically synthesized
attgcgccaacgctcctcca

SEQ ID NO: 3288 - DNA, 20 bp, Artificial Sequence
  chemically synthesized
gcgccaacgctcctccagag

SEQ ID NO: 3289 - DNA, 20 bp, Artificial Sequence
  chemically synthesized
cgccaacgctcctccagagc

SEQ ID NO: 3290 - DNA, 20 bp, Artificial Sequence
  chemically synthesized
gctcctccagagcgggtctt

SEQ ID NO: 3291 - DNA, 20 bp, Artificial Sequence
  chemically synthesized
cagagcgggtcttaagataa

SEQ ID NO: 3292 - DNA, 20 bp, Artificial Sequence
  chemically synthesized
cgggtcttaagataaaagaa

SEQ ID NO: 3293 - DNA, 20 bp, Artificial Sequence
  chemically synthesized
gggtcttaagataaaagaac

SEQ ID NO: 3294 - DNA, 20 bp, Artificial Sequence
  chemically synthesized
ttaagataaaagaacaggac

SEQ ID NO: 3295 - DNA, 20 bp, Artificial Sequence
  chemically synthesized
gttgccccgccccatttcgc

SEQ ID NO: 3296 - DNA, 20 bp, Artificial Sequence
  chemically synthesized
ccccatttcgctagcctcgt

SEQ ID NO: 3297 - DNA, 20 bp, Artificial Sequence
  chemically synthesized
tgagaaaacgtcatcgcaca

SEQ ID NO: 3298 - DNA, 20 bp, Artificial Sequence
  chemically synthesized
acgtcatcgcacatagaaaa

SEQ ID NO: 3299 - DNA, 20 bp, Artificial Sequence
  chemically synthesized
catcgcacatagaaaacaga

SEQ ID NO: 3300 - DNA, 20 bp, Artificial Sequence
  chemically synthesized
aaacagacagacgtaaccta

SEQ ID NO: 3301 - DNA, 20 bp, Artificial Sequence
  chemically synthesized
cgtaacctacggtgtcccgc

SEQ ID NO: 3302 - DNA, 20 bp, Artificial Sequence
  chemically synthesized
gtaacctacggtgtcccgct

SEQ ID NO: 3303 - DNA, 20 bp, Artificial Sequence
  chemically synthesized
cctacggtgtcccgctagga

SEQ ID NO: 3304 - DNA, 20 bp, Artificial Sequence
  chemically synthesized
tacggtgtcccgctaggaaa

SEQ ID NO: 3305 - DNA, 20 bp, Artificial Sequence
  chemically synthesized
cggtgtcccgctaggaaaga

SEQ ID NO: 3306 - DNA, 20 bp, Artificial Sequence
  chemically synthesized
ggtgtcccgctaggaaagag

SEQ ID NO: 3307 - DNA, 20 bp, Artificial Sequence
  chemically synthesized
ggaaagagaggtgcgtcaaa

SEQ ID NO: 3308 - DNA, 20 bp, Artificial Sequence
  chemically synthesized
gaggtgcgtcaaacagcgac

SEQ ID NO: 3309 - DNA, 20 bp, Artificial Sequence
  chemically synthesized
gacaagttccgcccacgtaa

SEQ ID NO: 3310 - DNA, 20 bp, Artificial Sequence
  chemically synthesized
cccacgtaaaagatgacgct

SEQ ID NO: 3311 - DNA, 20 bp, Artificial Sequence
  chemically synthesized
aaagatgacgcttggtgtgt

SEQ ID NO: 3312 - DNA, 20 bp, Artificial Sequence
  chemically synthesized
tgtcagccgtccctgctgcc

SEQ ID NO: 3313 - DNA, 20 bp, Artificial Sequence
  chemically synthesized
ctgcccggttgcttctcttt

SEQ ID NO: 3314 - DNA, 20 bp, Artificial Sequence
  chemically synthesized
tgcccggttgcttctctttt

SEQ ID NO: 3315 - DNA, 20 bp, Artificial Sequence
  chemically synthesized
gcccggttgcttctcttttg

SEQ ID NO: 3316 - DNA, 20 bp, Artificial Sequence
  chemically synthesized
cccggttgcttctcttttgg

SEQ ID NO: 3317 - DNA, 20 bp, Artificial Sequence
  chemically synthesized
ggttgcttctcttttggggg

SEQ ID NO: 3318 - DNA, 20 bp, Artificial Sequence
  chemically synthesized
gttgcttctcttttgggggc

SEQ ID NO: 3319 - DNA, 20 bp, Artificial Sequence
  chemically synthesized
ttgcttctcttttgggggcg

SEQ ID NO: 3320 - DNA, 20 bp, Artificial Sequence
  chemically synthesized
tctcttttgggggcggggtc

SEQ ID NO: 3321 - DNA, 20 bp, Artificial Sequence
  chemically synthesized
ttttgggggcggggtctagc

SEQ ID NO: 3322 - DNA, 20 bp, Artificial Sequence
  chemically synthesized
ttgggggcggggtctagcaa

SEQ ID NO: 3323 - DNA, 20 bp, Artificial Sequence
  chemically synthesized
ggggcggggtctagcaagag

SEQ ID NO: 3324 - DNA, 20 bp, Artificial Sequence
  chemically synthesized
gggcggggtctagcaagagc

SEQ ID NO: 3325 - DNA, 20 bp, Artificial Sequence
  chemically synthesized
gggtctagcaagagcaggtg

SEQ ID NO: 3326 - DNA, 20 bp, Artificial Sequence
  chemically synthesized
ggtctagcaagagcaggtgt

SEQ ID NO: 3327 - DNA, 20 bp, Artificial Sequence
  chemically synthesized
agcaagagcaggtgtgggtt

SEQ ID NO: 3328 - DNA, 20 bp, Artificial Sequence
  chemically synthesized
gcaagagcaggtgtgggttt

SEQ ID NO: 3329 - DNA, 20 bp, Artificial Sequence
  chemically synthesized
aagagcaggtgtgggtttag

SEQ ID NO: 3330 - DNA, 20 bp, Artificial Sequence
  chemically synthesized
agagcaggtgtgggtttagg

SEQ ID NO: 3331 - DNA, 20 bp, Artificial Sequence
  chemically synthesized
ctccccactacttgctctca

SEQ ID NO: 3332 - DNA, 20 bp, Artificial Sequence
  chemically synthesized
ttgctctcacagtactcgct

SEQ ID NO: 3333 - DNA, 20 bp, Artificial Sequence
  chemically synthesized
tgctctcacagtactcgctg

SEQ ID NO: 3334 - DNA, 20 bp, Artificial Sequence
  chemically synthesized
gctctcacagtactcgctga

SEQ ID NO: 3335 - DNA, 20 bp, Artificial Sequence
  chemically synthesized
agtactcgctgagggtgaac

SEQ ID NO: 3336 - DNA, 20 bp, Artificial Sequence
  chemically synthesized
tcgctgagggtgaacaagaa

SEQ ID NO: 3337 - DNA, 20 bp, Artificial Sequence
  chemically synthesized
gaacaagaaaagacctgata

SEQ ID NO: 3338 - DNA, 20 bp, Artificial Sequence
  chemically synthesized
aagacctgataaagattaac

SEQ ID NO: 3339 - DNA, 20 bp, Artificial Sequence
  chemically synthesized
acctgataaagattaaccag

SEQ ID NO: 3340 - DNA, 20 bp, Artificial Sequence
  chemically synthesized
aagattaaccagaagaaaac

SEQ ID NO: 3341 - DNA, 20 bp, Artificial Sequence
  chemically synthesized
agattaaccagaagaaaaca

SEQ ID NO: 3342 - DNA, 20 bp, Artificial Sequence
  chemically synthesized
attaaccagaagaaaacaag

SEQ ID NO: 3343 - DNA, 20 bp, Artificial Sequence
  chemically synthesized
ttaaccagaagaaaacaagg

SEQ ID NO: 3344 - DNA, 20 bp, Artificial Sequence
  chemically synthesized
taaccagaagaaaacaagga

SEQ ID NO: 3345 - DNA, 20 bp, Artificial Sequence
  chemically synthesized
aacaaggagggaaacaaccg

SEQ ID NO: 3346 - DNA, 20 bp, Artificial Sequence
  chemically synthesized
agggaaacaaccgcagcctg

SEQ ID NO: 3347 - DNA, 20 bp, Artificial Sequence
  chemically synthesized
aaacaaccgcagcctgtagc

SEQ ID NO: 3348 - DNA, 20 bp, Artificial Sequence
  chemically synthesized
ccgcagcctgtagcaagctc

SEQ ID NO: 3349 - DNA, 20 bp, Artificial Sequence
  chemically synthesized
ctgtagcaagctctggaact

SEQ ID NO: 3350 - DNA, 20 bp, Artificial Sequence
  chemically synthesized
tgtagcaagctctggaactc

SEQ ID NO: 3351 - DNA, 20 bp, Artificial Sequence
  chemically synthesized
tagcaagctctggaactcag

SEQ ID NO: 3352 - DNA, 20 bp, Artificial Sequence
  chemically synthesized
ggaactcaggagtcgcgcgc

SEQ ID NO: 3353 - DNA, 20 bp, Artificial Sequence
  chemically synthesized
gaactcaggagtcgcgcgct

SEQ ID NO: 3354 - DNA, 20 bp, Artificial Sequence
  chemically synthesized
aactcaggagtcgcgcgcta

SEQ ID NO: 3355 - DNA, 20 bp, Artificial Sequence
  chemically synthesized
actcaggagtcgcgcgctag

SEQ ID NO: 3356 - DNA, 20 bp, Artificial Sequence
  chemically synthesized
aggagtcgcgcgctaggggc

SEQ ID NO: 3357 - DNA, 20 bp, Artificial Sequence
  chemically synthesized
ggagtcgcgcgctaggggcc

SEQ ID NO: 3358 - DNA, 20 bp, Artificial Sequence
  chemically synthesized
gagtcgcgcgctaggggccg

SEQ ID NO: 3359 - DNA, 20 bp, Artificial Sequence
  chemically synthesized
cgcgcgctaggggccggggc

SEQ ID NO: 3360 - DNA, 20 bp, Artificial Sequence
  chemically synthesized
gcgcgctaggggccggggcc

SEQ ID NO: 3361 - DNA, 20 bp, Artificial Sequence
  chemically synthesized
cgcgctaggggccggggccg

SEQ ID NO: 3362 - DNA, 20 bp, Artificial Sequence
  chemically synthesized
ctaggggccggggccggggc

SEQ ID NO: 3363 - DNA, 20 bp, Artificial Sequence
  chemically synthesized
taggggccggggccggggcc

SEQ ID NO: 3364 - DNA, 20 bp, Artificial Sequence
  chemically synthesized
aggggccggggccggggccg

SEQ ID NO: 3365 - DNA, 20 bp, Artificial Sequence
  chemically synthesized
ccggggccggggccggggcg

SEQ ID NO: 3366 - DNA, 20 bp, Artificial Sequence
  chemically synthesized
ggccggggccggggcgtggt

SEQ ID NO: 3367 - DNA, 20 bp, Artificial Sequence
  chemically synthesized
gccggggccggggcgtggtc

SEQ ID NO: 3368 - DNA, 20 bp, Artificial Sequence
  chemically synthesized
ccggggccggggcgtggtcg

SEQ ID NO: 3369 - DNA, 20 bp, Artificial Sequence
  chemically synthesized
gggccggggcgtggtcgggg

SEQ ID NO: 3370 - DNA, 20 bp, Artificial Sequence
  chemically synthesized
ggccggggcgtggtcggggc

SEQ ID NO: 3371 - DNA, 20 bp, Artificial Sequence
  chemically synthesized
gggcgtggtcggggcgggcc

SEQ ID NO: 3372 - DNA, 20 bp, Artificial Sequence
  chemically synthesized
ggcgtggtcggggcgggccc

SEQ ID NO: 3373 - DNA, 20 bp, Artificial Sequence
  chemically synthesized
gcgtggtcggggcgggcccg

SEQ ID NO: 3374 - DNA, 20 bp, Artificial Sequence
  chemically synthesized
cgtggtcggggcgggcccgg

SEQ ID NO: 3375 - DNA, 20 bp, Artificial Sequence
  chemically synthesized
ggtcggggcgggcccggggg

SEQ ID NO: 3376 - DNA, 20 bp, Artificial Sequence
  chemically synthesized
gtcggggcgggcccgggggc

SEQ ID NO: 3377 - DNA, 20 bp, Artificial Sequence
  chemically synthesized
ggcgggcccgggggcgggcc

SEQ ID NO: 3378 - DNA, 20 bp, Artificial Sequence
  chemically synthesized
gcgggcccgggggcgggccc

SEQ ID NO: 3379 - DNA, 20 bp, Artificial Sequence
  chemically synthesized
cgggcccgggggcgggcccg

SEQ ID NO: 3380 - DNA, 20 bp, Artificial Sequence
  chemically synthesized
gcccgggggcgggcccgggg

SEQ ID NO: 3381 - DNA, 20 bp, Artificial Sequence
  chemically synthesized
cccgggggcgggcccggggc

SEQ ID NO: 3382 - DNA, 20 bp, Artificial Sequence
  chemically synthesized
ccgggggcgggcccggggcg

SEQ ID NO: 3383 - DNA, 20 bp, Artificial Sequence
  chemically synthesized
gcgggcccggggcggggctg

SEQ ID NO: 3384 - DNA, 20 bp, Artificial Sequence
  chemically synthesized
ccggggcggggctgcggttg

SEQ ID NO: 3385 - DNA, 20 bp, Artificial Sequence
  chemically synthesized
ggttgcggtgcctgcgcccg

SEQ ID NO: 3386 - DNA, 20 bp, Artificial Sequence
  chemically synthesized
tgcggtgcctgcgcccgcgg

SEQ ID NO: 3387 - DNA, 20 bp, Artificial Sequence
  chemically synthesized
ggtgcctgcgcccgcggcgg

SEQ ID NO: 3388 - DNA, 20 bp, Artificial Sequence
  chemically synthesized
tgcctgcgcccgcggcggcg

SEQ ID NO: 3389 - DNA, 20 bp, Artificial Sequence
  chemically synthesized
gcctgcgcccgcggcggcgg

SEQ ID NO: 3390 - DNA, 20 bp, Artificial Sequence
  chemically synthesized
cgcccgcggcggcggaggcg

SEQ ID NO: 3391 - DNA, 20 bp, Artificial Sequence
  chemically synthesized
gcccgcggcggcggaggcgc

SEQ ID NO: 3392 - DNA, 20 bp, Artificial Sequence
  chemically synthesized
cgcggcggcggaggcgcagg

SEQ ID NO: 3393 - DNA, 20 bp, Artificial Sequence
  chemically synthesized
ggcggcggaggcgcaggcgg

SEQ ID NO: 3394 - DNA, 20 bp, Artificial Sequence
  chemically synthesized
gcggaggcgcaggcggtggc

SEQ ID NO: 3395 - DNA, 20 bp, Artificial Sequence
  chemically synthesized
gaggcgcaggcggtggcgag

SEQ ID NO: 3396 - DNA, 20 bp, Artificial Sequence
  chemically synthesized
aggcgcaggcggtggcgagt

SEQ ID NO: 3397 - DNA, 20 bp, Artificial Sequence
  chemically synthesized
gcaggcggtggcgagtgggt

SEQ ID NO: 3398 - DNA, 20 bp, Artificial Sequence
  chemically synthesized
gcggtggcgagtgggtgagt

SEQ ID NO: 3399 - DNA, 20 bp, Artificial Sequence
  chemically synthesized
cggtggcgagtgggtgagtg

SEQ ID NO: 3400 - DNA, 20 bp, Artificial Sequence
  chemically synthesized
gtggcgagtgggtgagtgag

SEQ ID NO: 3401 - DNA, 20 bp, Artificial Sequence
  chemically synthesized
tggcgagtgggtgagtgagg

SEQ ID NO: 3402 - DNA, 20 bp, Artificial Sequence
  chemically synthesized
cgagtgggtgagtgaggagg

SEQ ID NO: 3403 - DNA, 20 bp, Artificial Sequence
  chemically synthesized
tgagtgaggaggcggcatcc

SEQ ID NO: 3404 - DNA, 20 bp, Artificial Sequence
  chemically synthesized
gtgaggaggcggcatcctgg

SEQ ID NO: 3405 - DNA, 20 bp, Artificial Sequence
  chemically synthesized
tgaggaggcggcatcctggc

SEQ ID NO: 3406 - DNA, 20 bp, Artificial Sequence
  chemically synthesized
ggaggcggcatcctggcggg

SEQ ID NO: 3407 - DNA, 20 bp, Artificial Sequence
  chemically synthesized
catcctggcgggtggctgtt

SEQ ID NO: 3408 - DNA, 20 bp, Artificial Sequence
  chemically synthesized
atcctggcgggtggctgttt

SEQ ID NO: 3409 - DNA, 20 bp, Artificial Sequence
  chemically synthesized
tcctggcgggtggctgtttg

SEQ ID NO: 3410 - DNA, 20 bp, Artificial Sequence
  chemically synthesized
gcgggtggctgtttggggtt

SEQ ID NO: 3411 - DNA, 20 bp, Artificial Sequence
  chemically synthesized
gctgtttggggttcggctgc

SEQ ID NO: 3412 - DNA, 20 bp, Artificial Sequence
  chemically synthesized
ctgtttggggttcggctgcc

SEQ ID NO: 3413 - DNA, 20 bp, Artificial Sequence
  chemically synthesized
tttggggttcggctgccggg

SEQ ID NO: 3414 - DNA, 20 bp, Artificial Sequence
  chemically synthesized
tggggttcggctgccgggaa

SEQ ID NO: 3415 - DNA, 20 bp, Artificial Sequence
  chemically synthesized
ggggttcggctgccgggaag

SEQ ID NO: 3416 - DNA, 20 bp, Artificial Sequence
  chemically synthesized
tcggctgccgggaagaggcg

SEQ ID NO: 3417 - DNA, 20 bp, Artificial Sequence
  chemically synthesized
cggctgccgggaagaggcgc

SEQ ID NO: 3418 - DNA, 20 bp, Artificial Sequence
  chemically synthesized
ctgccgggaagaggcgcggg

SEQ ID NO: 3419 - DNA, 20 bp, Artificial Sequence
  chemically synthesized
ccgggaagaggcgcgggtag

SEQ ID NO: 3420 - DNA, 20 bp, Artificial Sequence
  chemically synthesized
ggaagaggcgcgggtagaag

SEQ ID NO: 3421 - DNA, 20 bp, Artificial Sequence
  chemically synthesized
gaagaggcgcgggtagaagc

SEQ ID NO: 3422 - DNA, 20 bp, Artificial Sequence
  chemically synthesized
aagaggcgcgggtagaagcg

SEQ ID NO: 3423 - DNA, 20 bp, Artificial Sequence
  chemically synthesized
agaggcgcgggtagaagcgg

SEQ ID NO: 3424 - DNA, 20 bp, Artificial Sequence
  chemically synthesized
gtagaagcgggggctctcct

SEQ ID NO: 3425 - DNA, 20 bp, Artificial Sequence
  chemically synthesized
agaagcgggggctctcctca

SEQ ID NO: 3426 - DNA, 20 bp, Artificial Sequence
  chemically synthesized
ccctctcatttctctgaccg

SEQ ID NO: 3427 - DNA, 20 bp, Artificial Sequence
  chemically synthesized
ctcatttctctgaccgaagc

SEQ ID NO: 3428 - DNA, 20 bp, Artificial Sequence
  chemically synthesized
tcatttctctgaccgaagct

SEQ ID NO: 3429 - DNA, 20 bp, Artificial Sequence
  chemically synthesized
ctctgaccgaagctgggtgt

SEQ ID NO: 3430 - DNA, 20 bp, Artificial Sequence
  chemically synthesized
tctgaccgaagctgggtgtc

SEQ ID NO: 3431 - DNA, 20 bp, Artificial Sequence
  chemically synthesized
gggtgtcgggctttcgcctc

SEQ ID NO: 3432 - DNA, 20 bp, Artificial Sequence
  chemically synthesized
gggctttcgcctctagcgac

SEQ ID NO: 3433 - DNA, 20 bp, Artificial Sequence
  chemically synthesized
ctttcgcctctagcgactgg

SEQ ID NO: 3434 - DNA, 20 bp, Artificial Sequence
  chemically synthesized
ctggtggaattgcctgcatc

SEQ ID NO: 3435 - DNA, 20 bp, Artificial Sequence
  chemically synthesized
tggtggaattgcctgcatcc

SEQ ID NO: 3436 - DNA, 20 bp, Artificial Sequence
  chemically synthesized
aattgcctgcatccgggccc

SEQ ID NO: 3437 - DNA, 20 bp, Artificial Sequence
  chemically synthesized
attgcctgcatccgggcccc

SEQ ID NO: 3438 - DNA, 20 bp, Artificial Sequence
  chemically synthesized
catccgggccccgggcttcc

SEQ ID NO: 3439 - DNA, 20 bp, Artificial Sequence
  chemically synthesized
ccgggccccgggcttcccgg

SEQ ID NO: 3440 - DNA, 20 bp, Artificial Sequence
  chemically synthesized
ggccccgggcttcccggcgg

SEQ ID NO: 3441 - DNA, 20 bp, Artificial Sequence
  chemically synthesized
cccgggcttcccggcggcgg

SEQ ID NO: 3442 - DNA, 20 bp, Artificial Sequence
  chemically synthesized
gggcttcccggcggcggcgg

SEQ ID NO: 3443 - DNA, 20 bp, Artificial Sequence
  chemically synthesized
cttcccggcggcggcggcgg

SEQ ID NO: 3444 - DNA, 20 bp, Artificial Sequence
  chemically synthesized
cccggcggcggcggcggcgg

SEQ ID NO: 3445 - DNA, 20 bp, Artificial Sequence
  chemically synthesized
ggcggcggcggcggcggcgg

SEQ ID NO: 3446 - DNA, 20 bp, Artificial Sequence
  chemically synthesized
cggcggcggcggcggcggcg

SEQ ID NO: 3447 - DNA, 20 bp, Artificial Sequence
  chemically synthesized
ggcggcggcggcggcggcgc

SEQ ID NO: 3448 - DNA, 20 bp, Artificial Sequence
  chemically synthesized
gcggcggcggcggcggcgca

SEQ ID NO: 3449 - DNA, 20 bp, Artificial Sequence
  chemically synthesized
ggcggcggcggcgcagggac

SEQ ID NO: 3450 - DNA, 20 bp, Artificial Sequence
  chemically synthesized
gcggcggcggcgcagggaca

SEQ ID NO: 3451 - DNA, 20 bp, Artificial Sequence
  chemically synthesized
cggcggcggcgcagggacaa

SEQ ID NO: 3452 - DNA, 20 bp, Artificial Sequence
  chemically synthesized
ggcggcgcagggacaaggga

SEQ ID NO: 3453 - DNA, 20 bp, Artificial Sequence
  chemically synthesized
gcggcgcagggacaagggat

SEQ ID NO: 3454 - DNA, 20 bp, Artificial Sequence
  chemically synthesized
cggcgcagggacaagggatg

SEQ ID NO: 3455 - DNA, 20 bp, Artificial Sequence
  chemically synthesized
agggacaagggatggggatc

SEQ ID NO: 3456 - DNA, 20 bp, Artificial Sequence
  chemically synthesized
cttccttgctttcccgccct

SEQ ID NO: 3457 - DNA, 20 bp, Artificial Sequence
  chemically synthesized
ctttcccgccctcagtaccc

SEQ ID NO: 3458 - DNA, 20 bp, Artificial Sequence
  chemically synthesized
tacccgagctgtctccttcc

SEQ ID NO: 3459 - DNA, 20 bp, Artificial Sequence
  chemically synthesized
acccgagctgtctccttccc

SEQ ID NO: 3460 - DNA, 20 bp, Artificial Sequence
  chemically synthesized
cccgagctgtctccttcccg

SEQ ID NO: 3461 - DNA, 20 bp, Artificial Sequence
  chemically synthesized
tctccttcccggggacccgc

SEQ ID NO: 3462 - DNA, 20 bp, Artificial Sequence
  chemically synthesized
ctccttcccggggacccgct

SEQ ID NO: 3463 - DNA, 20 bp, Artificial Sequence
  chemically synthesized
ccttcccggggacccgctgg

SEQ ID NO: 3464 - DNA, 20 bp, Artificial Sequence
  chemically synthesized
cgctgggagcgctgccgctg

SEQ ID NO: 3465 - DNA, 20 bp, Artificial Sequence
  chemically synthesized
gctgggagcgctgccgctgc

SEQ ID NO: 3466 - DNA, 20 bp, Artificial Sequence
  chemically synthesized
agcgctgccgctgcgggctc

SEQ ID NO: 3467 - DNA, 20 bp, Artificial Sequence
  chemically synthesized
tgccgctgcgggctcgagaa

SEQ ID NO: 3468 - DNA, 20 bp, Artificial Sequence
  chemically synthesized
gccgctgcgggctcgagaaa

SEQ ID NO: 3469 - DNA, 20 bp, Artificial Sequence
  chemically synthesized
ccgctgcgggctcgagaaaa

SEQ ID NO: 3470 - DNA, 20 bp, Artificial Sequence
  chemically synthesized
gctgcgggctcgagaaaagg

SEQ ID NO: 3471 - DNA, 20 bp, Artificial Sequence
  chemically synthesized
ggctcgagaaaagggagcct

SEQ ID NO: 3472 - DNA, 20 bp, Artificial Sequence
  chemically synthesized
gctcgagaaaagggagcctc

SEQ ID NO: 3473 - DNA, 20 bp, Artificial Sequence
  chemically synthesized
aaaagggagcctcgggtact

SEQ ID NO: 3474 - DNA, 20 bp, Artificial Sequence
  chemically synthesized
aagggagcctcgggtactga

SEQ ID NO: 3475 - DNA, 20 bp, Artificial Sequence
  chemically synthesized
agggagcctcgggtactgag

SEQ ID NO: 3476 - DNA, 20 bp, Artificial Sequence
  chemically synthesized
gggtactgagaggcctcgcc

SEQ ID NO: 3477 - DNA, 20 bp, Artificial Sequence
  chemically synthesized
ggtactgagaggcctcgcct

SEQ ID NO: 3478 - DNA, 20 bp, Artificial Sequence
  chemically synthesized
gtactgagaggcctcgcctg

SEQ ID NO: 3479 - DNA, 20 bp, Artificial Sequence
  chemically synthesized
tactgagaggcctcgcctgg

SEQ ID NO: 3480 - DNA, 20 bp, Artificial Sequence
  chemically synthesized
tgagaggcctcgcctggggg

SEQ ID NO: 3481 - DNA, 20 bp, Artificial Sequence
  chemically synthesized
gagaggcctcgcctggggga

SEQ ID NO: 3482 - DNA, 20 bp, Artificial Sequence
  chemically synthesized
ggcctcgcctgggggaaggc

SEQ ID NO: 3483 - DNA, 20 bp, Artificial Sequence
  chemically synthesized
cctcgcctgggggaaggccg

SEQ ID NO: 3484 - DNA, 20 bp, Artificial Sequence
  chemically synthesized
ctcgcctgggggaaggccgg

SEQ ID NO: 3485 - DNA, 20 bp, Artificial Sequence
  chemically synthesized
tcgcctgggggaaggccgga

SEQ ID NO: 3486 - DNA, 20 bp, Artificial Sequence
  chemically synthesized
cctgggggaaggccggaggg

SEQ ID NO: 3487 - DNA, 20 bp, Artificial Sequence
  chemically synthesized
ctgggggaaggccggagggt

SEQ ID NO: 3488 - DNA, 20 bp, Artificial Sequence
  chemically synthesized
ggggaaggccggagggtggg

SEQ ID NO: 3489 - DNA, 20 bp, Artificial Sequence
  chemically synthesized
gccggagggtgggcggcgcg

SEQ ID NO: 3490 - DNA, 20 bp, Artificial Sequence
  chemically synthesized
tgggcggcgcgcggcttctg

SEQ ID NO: 3491 - DNA, 20 bp, Artificial Sequence
  chemically synthesized
gcgcgcggcttctgcggacc

SEQ ID NO: 3492 - DNA, 20 bp, Artificial Sequence
  chemically synthesized
gcggcttctgcggaccaagt

SEQ ID NO: 3493 - DNA, 20 bp, Artificial Sequence
  chemically synthesized
cggcttctgcggaccaagtc

SEQ ID NO: 3494 - DNA, 20 bp, Artificial Sequence
  chemically synthesized
ggcttctgcggaccaagtcg

SEQ ID NO: 3495 - DNA, 20 bp, Artificial Sequence
  chemically synthesized
cggaccaagtcggggttcgc

SEQ ID NO: 3496 - DNA, 20 bp, Artificial Sequence
  chemically synthesized
ggaccaagtcggggttcgct

SEQ ID NO: 3497 - DNA, 20 bp, Artificial Sequence
  chemically synthesized
tcggggttcgctaggaaccc

SEQ ID NO: 3498 - DNA, 20 bp, Artificial Sequence
  chemically synthesized
ggttcgctaggaacccgaga

SEQ ID NO: 3499 - DNA, 20 bp, Artificial Sequence
  chemically synthesized
gaacccgagacggtccctgc

SEQ ID NO: 3500 - DNA, 20 bp, Artificial Sequence
  chemically synthesized
ccgagacggtccctgccggc

SEQ ID NO: 3501 - DNA, 20 bp, Artificial Sequence
  chemically synthesized
cgagacggtccctgccggcg

SEQ ID NO: 3502 - DNA, 20 bp, Artificial Sequence
  chemically synthesized
agacggtccctgccggcgag

SEQ ID NO: 3503 - DNA, 20 bp, Artificial Sequence
  chemically synthesized
ctgccggcgaggagatcatg

SEQ ID NO: 3504 - DNA, 20 bp, Artificial Sequence
  chemically synthesized
tgccggcgaggagatcatgc

SEQ ID NO: 3505 - DNA, 20 bp, Artificial Sequence
  chemically synthesized
gcgaggagatcatgcgggat

SEQ ID NO: 3506 - DNA, 20 bp, Artificial Sequence
  chemically synthesized
ggagatcatgcgggatgaga

SEQ ID NO: 3507 - DNA, 20 bp, Artificial Sequence
  chemically synthesized
gagatcatgcgggatgagat

SEQ ID NO: 3508 - DNA, 20 bp, Artificial Sequence
  chemically synthesized
agatcatgcgggatgagatg

SEQ ID NO: 3509 - DNA, 20 bp, Artificial Sequence
  chemically synthesized
gatcatgcgggatgagatgg

SEQ ID NO: 3510 - DNA, 20 bp, Artificial Sequence
  chemically synthesized
tgcgggatgagatgggggtg

SEQ ID NO: 3511 - DNA, 20 bp, Artificial Sequence
  chemically synthesized
cgggatgagatgggggtgtg

SEQ ID NO: 3512 - DNA, 20 bp, Artificial Sequence
  chemically synthesized
tggagacgcctgcacaattt

SEQ ID NO: 3513 - DNA, 20 bp, Artificial Sequence
  chemically synthesized
cgcctgcacaatttcagccc

SEQ ID NO: 3514 - DNA, 20 bp, Artificial Sequence
  chemically synthesized
acaatttcagcccaagcttc

SEQ ID NO: 3515 - DNA, 20 bp, Artificial Sequence
  chemically synthesized
aatttcagcccaagcttcta

SEQ ID NO: 3516 - DNA, 20 bp, Artificial Sequence
  chemically synthesized
tttcagcccaagcttctaga

SEQ ID NO: 3517 - DNA, 20 bp, Artificial Sequence
  chemically synthesized
cagcccaagcttctagagag

SEQ ID NO: 3518 - DNA, 20 bp, Artificial Sequence
  chemically synthesized
agtggtgatgacttgcatat

SEQ ID NO: 3519 - DNA, 20 bp, Artificial Sequence
  chemically synthesized
gtggtgatgacttgcatatg

SEQ ID NO: 3520 - DNA, 20 bp, Artificial Sequence
  chemically synthesized
tggtgatgacttgcatatga

SEQ ID NO: 3521 - DNA, 20 bp, Artificial Sequence
  chemically synthesized
tgatgacttgcatatgaggg

SEQ ID NO: 3522 - DNA, 20 bp, Artificial Sequence
  chemically synthesized
gcatatgagggcagcaatgc

SEQ ID NO: 3523 - DNA, 20 bp, Artificial Sequence
  chemically synthesized
atgagggcagcaatgcaagt

SEQ ID NO: 3524 - DNA, 20 bp, Artificial Sequence
  chemically synthesized
tcggtgtgctccccattctg

SEQ ID NO: 3525 - DNA, 20 bp, Artificial Sequence
  chemically synthesized
cggtgtgctccccattctgt

SEQ ID NO: 3526 - DNA, 20 bp, Artificial Sequence
  chemically synthesized
ccattctgtgggacatgacc

SEQ ID NO: 3527 - DNA, 20 bp, Artificial Sequence
  chemically synthesized
gacatgacctggttgcttca

SEQ ID NO: 3528 - DNA, 20 bp, Artificial Sequence
  chemically synthesized
cctggttgcttcacagctcc

SEQ ID NO: 3529 - DNA, 20 bp, Artificial Sequence
  chemically synthesized
ttcacagctccgagatgaca

SEQ ID NO: 3530 - DNA, 20 bp, Artificial Sequence
  chemically synthesized
agatgacacagacttgctta

SEQ ID NO: 3531 - DNA, 20 bp, Artificial Sequence
  chemically synthesized
gatgacacagacttgcttaa

SEQ ID NO: 3532 - DNA, 20 bp, Artificial Sequence
  chemically synthesized
gacacagacttgcttaaagg

SEQ ID NO: 3533 - DNA, 20 bp, Artificial Sequence
  chemically synthesized
aggaagtgactattgtgact

SEQ ID NO: 3534 - DNA, 20 bp, Artificial Sequence
  chemically synthesized
ggaagtgactattgtgactt

SEQ ID NO: 3535 - DNA, 20 bp, Artificial Sequence
  chemically synthesized
cttgggcatcacttgactga

SEQ ID NO: 3536 - DNA, 20 bp, Artificial Sequence
  chemically synthesized
atcacttgactgatggtaat

SEQ ID NO: 3537 - DNA, 20 bp, Artificial Sequence
  chemically synthesized
tgatggtaatcagttgtcta

SEQ ID NO: 3538 - DNA, 20 bp, Artificial Sequence
  chemically synthesized
tggtaatcagttgtctaaag

SEQ ID NO: 3539 - DNA, 20 bp, Artificial Sequence
  chemically synthesized
cagttgtctaaagaagtgca

SEQ ID NO: 3540 - DNA, 20 bp, Artificial Sequence
  chemically synthesized
ttacatgtccgtgtgctcat

SEQ ID NO: 3541 - DNA, 20 bp, Artificial Sequence
  chemically synthesized
tacatgtccgtgtgctcatt

SEQ ID NO: 3542 - DNA, 20 bp, Artificial Sequence
  chemically synthesized
gtgtgctcattgggtctatc

SEQ ID NO: 3543 - DNA, 20 bp, Artificial Sequence
  chemically synthesized
ctggccgcgttgaacaccac

SEQ ID NO: 3544 - DNA, 20 bp, Artificial Sequence
  chemically synthesized
tggccgcgttgaacaccacc

SEQ ID NO: 3545 - DNA, 20 bp, Artificial Sequence
  chemically synthesized
acaccaccaggctttgtatt

SEQ ID NO: 3546 - DNA, 20 bp, Artificial Sequence
  chemically synthesized
ccaggctttgtattcagaaa

SEQ ID NO: 3547 - DNA, 20 bp, Artificial Sequence
  chemically synthesized
caggctttgtattcagaaac

SEQ ID NO: 3548 - DNA, 20 bp, Artificial Sequence
  chemically synthesized
ggctttgtattcagaaacag

SEQ ID NO: 3549 - DNA, 20 bp, Artificial Sequence
  chemically synthesized
gctttgtattcagaaacagg

SEQ ID NO: 3550 - DNA, 20 bp, Artificial Sequence
  chemically synthesized
ctttgtattcagaaacagga

SEQ ID NO: 3551 - DNA, 20 bp, Artificial Sequence
  chemically synthesized
ttgtattcagaaacaggagg

SEQ ID NO: 3552 - DNA, 20 bp, Artificial Sequence
  chemically synthesized
tgtattcagaaacaggaggg

SEQ ID NO: 3553 - DNA, 20 bp, Artificial Sequence
  chemically synthesized
agggaggtcctgcactttcc

SEQ ID NO: 3554 - DNA, 20 bp, Artificial Sequence
  chemically synthesized
gggaggtcctgcactttccc

SEQ ID NO: 3555 - DNA, 20 bp, Artificial Sequence
  chemically synthesized
gaggtcctgcactttcccag

SEQ ID NO: 3556 - DNA, 20 bp, Artificial Sequence
  chemically synthesized
aggtcctgcactttcccagg

SEQ ID NO: 3557 - DNA, 20 bp, Artificial Sequence
  chemically synthesized
ggtcctgcactttcccagga

SEQ ID NO: 3558 - DNA, 20 bp, Artificial Sequence
  chemically synthesized
gtcctgcactttcccaggag

SEQ ID NO: 3559 - DNA, 20 bp, Artificial Sequence
  chemically synthesized
ctgcactttcccaggagggg

SEQ ID NO: 3560 - DNA, 20 bp, Artificial Sequence
  chemically synthesized
cccaggaggggtggcccttt

SEQ ID NO: 3561 - DNA, 20 bp, Artificial Sequence
  chemically synthesized
tggccctttcagatgcaatc

SEQ ID NO: 3562 - DNA, 20 bp, Artificial Sequence
  chemically synthesized
tcagatgcaatcgagattgt

SEQ ID NO: 3563 - DNA, 20 bp, Artificial Sequence
  chemically synthesized
cagatgcaatcgagattgtt

SEQ ID NO: 3564 - DNA, 20 bp, Artificial Sequence
  chemically synthesized
caatcgagattgttaggctc

SEQ ID NO: 3565 - DNA, 20 bp, Artificial Sequence
  chemically synthesized
aatcgagattgttaggctct

SEQ ID NO: 3566 - DNA, 20 bp, Artificial Sequence
  chemically synthesized
tcgagattgttaggctctgg

SEQ ID NO: 3567 - DNA, 20 bp, Artificial Sequence
  chemically synthesized
gagattgttaggctctggga

SEQ ID NO: 3568 - DNA, 20 bp, Artificial Sequence
  chemically synthesized
attgttaggctctgggagag

SEQ ID NO: 3569 - DNA, 20 bp, Artificial Sequence
  chemically synthesized
gctctgggagagtagttgcc

SEQ ID NO: 3570 - DNA, 20 bp, Artificial Sequence
  chemically synthesized
ggagagtagttgcctggttg

SEQ ID NO: 3571 - DNA, 20 bp, Artificial Sequence
  chemically synthesized
gagtagttgcctggttgtgg

SEQ ID NO: 3572 - DNA, 20 bp, Artificial Sequence
  chemically synthesized
agttgcctggttgtggcagt

SEQ ID NO: 3573 - DNA, 20 bp, Artificial Sequence
  chemically synthesized
ttggtaaatttctattcaaa

SEQ ID NO: 3574 - DNA, 20 bp, Artificial Sequence
  chemically synthesized
ttcaaacagttgccatgcac

SEQ ID NO: 3575 - DNA, 20 bp, Artificial Sequence
  chemically synthesized
atgcaccagttgttcacaac

SEQ ID NO: 3576 - DNA, 20 bp, Artificial Sequence
  chemically synthesized
tgcaccagttgttcacaaca

SEQ ID NO: 3577 - DNA, 20 bp, Artificial Sequence
  chemically synthesized
gcaccagttgttcacaacaa

SEQ ID NO: 3578 - DNA, 20 bp, Artificial Sequence
  chemically synthesized
acaagggtacgtaatctgtc

SEQ ID NO: 3579 - DNA, 20 bp, Artificial Sequence
  chemically synthesized
attacttctacttttgtaca

SEQ ID NO: 3580 - DNA, 20 bp, Artificial Sequence
  chemically synthesized
ttacttctacttttgtacaa

SEQ ID NO: 3581 - DNA, 20 bp, Artificial Sequence
  chemically synthesized
acaaaggatcaaaaaaaaaa

SEQ ID NO: 3582 - DNA, 20 bp, Artificial Sequence
  chemically synthesized
aaaaaaaaaaagatactgtt

SEQ ID NO: 3583 - DNA, 20 bp, Artificial Sequence
  chemically synthesized
tgttaagatatgatttttct

SEQ ID NO: 3584 - DNA, 20 bp, Artificial Sequence
  chemically synthesized
atatgatttttctcagactt

SEQ ID NO: 3585 - DNA, 20 bp, Artificial Sequence
  chemically synthesized
tatgatttttctcagacttt

SEQ ID NO: 3586 - DNA, 20 bp, Artificial Sequence
  chemically synthesized
aacataatctgtgaatatca

SEQ ID NO: 3587 - DNA, 20 bp, Artificial Sequence
  chemically synthesized
tctgtgaatatcacagaaac

SEQ ID NO: 3588 - DNA, 20 bp, Artificial Sequence
  chemically synthesized
acagaaacaagactatcata

SEQ ID NO: 3589 - DNA, 20 bp, Artificial Sequence
  chemically synthesized
cagaaacaagactatcatat

SEQ ID NO: 3590 - DNA, 20 bp, Artificial Sequence
  chemically synthesized
agaaacaagactatcatata

SEQ ID NO: 3591 - DNA, 20 bp, Artificial Sequence
  chemically synthesized
gaaacaagactatcatatag

SEQ ID NO: 3592 - DNA, 20 bp, Artificial Sequence
  chemically synthesized
tataggggatattaataacc

SEQ ID NO: 3593 - DNA, 20 bp, Artificial Sequence
  chemically synthesized
taggggatattaataacctg

SEQ ID NO: 3594 - DNA, 20 bp, Artificial Sequence
  chemically synthesized
ggatattaataacctggagt

SEQ ID NO: 3595 - DNA, 20 bp, Artificial Sequence
  chemically synthesized
gagtcagaatacttgaaata

SEQ ID NO: 3596 - DNA, 20 bp, Artificial Sequence
  chemically synthesized
aaatacggtgtcatttgaca

SEQ ID NO: 3597 - DNA, 20 bp, Artificial Sequence
  chemically synthesized
aatacggtgtcatttgacac

SEQ ID NO: 3598 - DNA, 20 bp, Artificial Sequence
  chemically synthesized
ttgttgtcaccacctctgcc

SEQ ID NO: 3599 - DNA, 20 bp, Artificial Sequence
  chemically synthesized
tgttgtcaccacctctgcca

SEQ ID NO: 3600 - DNA, 20 bp, Artificial Sequence
  chemically synthesized
tctgccaaggcctgccactt

SEQ ID NO: 3601 - DNA, 20 bp, Artificial Sequence
  chemically synthesized
ctgccaaggcctgccacttt

SEQ ID NO: 3602 - DNA, 20 bp, Artificial Sequence
  chemically synthesized
actttaggaaaaccctgaat

SEQ ID NO: 3603 - DNA, 20 bp, Artificial Sequence
  chemically synthesized
taggaaaaccctgaatcagt

SEQ ID NO: 3604 - DNA, 20 bp, Artificial Sequence
  chemically synthesized
tggaaactgctacatgctga

SEQ ID NO: 3605 - DNA, 20 bp, Artificial Sequence
  chemically synthesized
gctgatagtacatctgaaac

SEQ ID NO: 3606 - DNA, 20 bp, Artificial Sequence
  chemically synthesized
agtacatctgaaacaagaac

SEQ ID NO: 3607 - DNA, 20 bp, Artificial Sequence
  chemically synthesized
tacatctgaaacaagaacga

SEQ ID NO: 3608 - DNA, 20 bp, Artificial Sequence
  chemically synthesized
cgagagtaattaccacattc

SEQ ID NO: 3609 - DNA, 20 bp, Artificial Sequence
  chemically synthesized
cacattccagattgttcact

SEQ ID NO: 3610 - DNA, 20 bp, Artificial Sequence
  chemically synthesized
ttccagattgttcactaagc

SEQ ID NO: 3611 - DNA, 20 bp, Artificial Sequence
  chemically synthesized
aagccagcatttacctgctc

SEQ ID NO: 3612 - DNA, 20 bp, Artificial Sequence
  chemically synthesized
agccagcatttacctgctcc

SEQ ID NO: 3613 - DNA, 20 bp, Artificial Sequence
  chemically synthesized
ctgctccaggaaaaaattac

SEQ ID NO: 3614 - DNA, 20 bp, Artificial Sequence
  chemically synthesized
aaaattacaagcaccttatg

SEQ ID NO: 3615 - DNA, 20 bp, Artificial Sequence
  chemically synthesized
agttgataaaatattttgtt

SEQ ID NO: 3616 - DNA, 20 bp, Artificial Sequence
  chemically synthesized
aatattttgtttggctatgt

SEQ ID NO: 3617 - DNA, 20 bp, Artificial Sequence
  chemically synthesized
ggcactccacaatttgcttt

SEQ ID NO: 3618 - DNA, 20 bp, Artificial Sequence
  chemically synthesized
cactccacaatttgctttca

SEQ ID NO: 3619 - DNA, 20 bp, Artificial Sequence
  chemically synthesized
aatttgctttcagagaaaca

SEQ ID NO: 3620 - DNA, 20 bp, Artificial Sequence
  chemically synthesized
tcagagaaacaaagtaaacc

SEQ ID NO: 3621 - DNA, 20 bp, Artificial Sequence
  chemically synthesized
cagagaaacaaagtaaacca

SEQ ID NO: 3622 - DNA, 20 bp, Artificial Sequence
  chemically synthesized
gagaaacaaagtaaaccaag

SEQ ID NO: 3623 - DNA, 20 bp, Artificial Sequence
  chemically synthesized
agaaacaaagtaaaccaagg

SEQ ID NO: 3624 - DNA, 20 bp, Artificial Sequence
  chemically synthesized
aaggaggacttctgtttttc

SEQ ID NO: 3625 - DNA, 20 bp, Artificial Sequence
  chemically synthesized
ctgtttttcaagtctgccct

SEQ ID NO: 3626 - DNA, 20 bp, Artificial Sequence
  chemically synthesized
tgtttttcaagtctgccctc

SEQ ID NO: 3627 - DNA, 20 bp, Artificial Sequence
  chemically synthesized
gggttctattctacgttaat

SEQ ID NO: 3628 - DNA, 20 bp, Artificial Sequence
  chemically synthesized
tctattctacgttaattaga

SEQ ID NO: 3629 - DNA, 20 bp, Artificial Sequence
  chemically synthesized
tacgttaattagatagttcc

SEQ ID NO: 3630 - DNA, 20 bp, Artificial Sequence
  chemically synthesized
acgttaattagatagttccc

SEQ ID NO: 3631 - DNA, 20 bp, Artificial Sequence
  chemically synthesized
gttaattagatagttcccag

SEQ ID NO: 3632 - DNA, 20 bp, Artificial Sequence
  chemically synthesized
ttaattagatagttcccagg

SEQ ID NO: 3633 - DNA, 20 bp, Artificial Sequence
  chemically synthesized
tagatagttcccaggaggac

SEQ ID NO: 3634 - DNA, 20 bp, Artificial Sequence
  chemically synthesized
agatagttcccaggaggact

SEQ ID NO: 3635 - DNA, 20 bp, Artificial Sequence
  chemically synthesized
agttcccaggaggactaggt

SEQ ID NO: 3636 - DNA, 20 bp, Artificial Sequence
  chemically synthesized
ggttagcctacctattgtct

SEQ ID NO: 3637 - DNA, 20 bp, Artificial Sequence
  chemically synthesized
tacctattgtctgagaaact

SEQ ID NO: 3638 - DNA, 20 bp, Artificial Sequence
  chemically synthesized
tctgagaaacttggaactgt

SEQ ID NO: 3639 - DNA, 20 bp, Artificial Sequence
  chemically synthesized
aaacttggaactgtgagaaa

SEQ ID NO: 3640 - DNA, 20 bp, Artificial Sequence
  chemically synthesized
ttggaactgtgagaaatggc

SEQ ID NO: 3641 - DNA, 20 bp, Artificial Sequence
  chemically synthesized
aactgtgagaaatggccaga

SEQ ID NO: 3642 - DNA, 20 bp, Artificial Sequence
  chemically synthesized
gtgatatgaacttcaccttc

SEQ ID NO: 3643 - DNA, 20 bp, Artificial Sequence
  chemically synthesized
tccagtcttccctgatgttg

SEQ ID NO: 3644 - DNA, 20 bp, Artificial Sequence
  chemically synthesized
cttccctgatgttgaagatt

SEQ ID NO: 3645 - DNA, 20 bp, Artificial Sequence
  chemically synthesized
cctgatgttgaagattgaga

SEQ ID NO: 3646 - DNA, 20 bp, Artificial Sequence
  chemically synthesized
agaaagtgttgtgaactttc

SEQ ID NO: 3647 - DNA, 20 bp, Artificial Sequence
  chemically synthesized
gaactttctggtactgtaaa

SEQ ID NO: 3648 - DNA, 20 bp, Artificial Sequence
  chemically synthesized
taaacagttcactgtccttg

SEQ ID NO: 3649 - DNA, 20 bp, Artificial Sequence
  chemically synthesized
acagttcactgtccttgaag

SEQ ID NO: 3650 - DNA, 20 bp, Artificial Sequence
  chemically synthesized
cactgtccttgaagtggtcc

SEQ ID NO: 3651 - DNA, 20 bp, Artificial Sequence
  chemically synthesized
actgtccttgaagtggtcct

SEQ ID NO: 3652 - DNA, 20 bp, Artificial Sequence
  chemically synthesized
gtccttgaagtggtcctggg

SEQ ID NO: 3653 - DNA, 20 bp, Artificial Sequence
  chemically synthesized
gtcctgggcagctcctgttg

SEQ ID NO: 3654 - DNA, 20 bp, Artificial Sequence
  chemically synthesized
tgggcagctcctgttgtgga

SEQ ID NO: 3655 - DNA, 20 bp, Artificial Sequence
  chemically synthesized
gcagctcctgttgtggaaag

SEQ ID NO: 3656 - DNA, 20 bp, Artificial Sequence
  chemically synthesized
ctcctgttgtggaaagtgga

SEQ ID NO: 3657 - DNA, 20 bp, Artificial Sequence
  chemically synthesized
gttgtggaaagtggacggtt

SEQ ID NO: 3658 - DNA, 20 bp, Artificial Sequence
  chemically synthesized
ttgtggaaagtggacggttt

SEQ ID NO: 3659 - DNA, 20 bp, Artificial Sequence
  chemically synthesized
tttaggatcctgcttctctt

SEQ ID NO: 3660 - DNA, 20 bp, Artificial Sequence
  chemically synthesized
ttaggatcctgcttctcttt

SEQ ID NO: 3661 - DNA, 20 bp, Artificial Sequence
  chemically synthesized
gatcctgcttctctttgggc

SEQ ID NO: 3662 - DNA, 20 bp, Artificial Sequence
  chemically synthesized
atcctgcttctctttgggct

SEQ ID NO: 3663 - DNA, 20 bp, Artificial Sequence
  chemically synthesized
cctgcttctctttgggctgg

SEQ ID NO: 3664 - DNA, 20 bp, Artificial Sequence
  chemically synthesized
ttgggctgggagaaaataaa

SEQ ID NO: 3665 - DNA, 20 bp, Artificial Sequence
  chemically synthesized
ctgggagaaaataaacagca

SEQ ID NO: 3666 - DNA, 20 bp, Artificial Sequence
  chemically synthesized
aaaataaacagcatggttac

SEQ ID NO: 3667 - DNA, 20 bp, Artificial Sequence
  chemically synthesized
acagcatggttacaagtatt

SEQ ID NO: 3668 - DNA, 20 bp, Artificial Sequence
  chemically synthesized
agcatggttacaagtattga

SEQ ID NO: 3669 - DNA, 20 bp, Artificial Sequence
  chemically synthesized
tggttacaagtattgagagc

SEQ ID NO: 3670 - DNA, 20 bp, Artificial Sequence
  chemically synthesized
ggttacaagtattgagagcc

SEQ ID NO: 3671 - DNA, 20 bp, Artificial Sequence
  chemically synthesized
acaagtattgagagccaggt

SEQ ID NO: 3672 - DNA, 20 bp, Artificial Sequence
  chemically synthesized
aagtattgagagccaggttg

SEQ ID NO: 3673 - DNA, 20 bp, Artificial Sequence
  chemically synthesized
tattgagagccaggttggag

SEQ ID NO: 3674 - DNA, 20 bp, Artificial Sequence
  chemically synthesized
attgagagccaggttggaga

SEQ ID NO: 3675 - DNA, 20 bp, Artificial Sequence
  chemically synthesized
gagagccaggttggagaagg

SEQ ID NO: 3676 - DNA, 20 bp, Artificial Sequence
  chemically synthesized
gtggcttacacctgtaatgc

SEQ ID NO: 3677 - DNA, 20 bp, Artificial Sequence
  chemically synthesized
ggcttacacctgtaatgcca

SEQ ID NO: 3678 - DNA, 20 bp, Artificial Sequence
  chemically synthesized
cacctgtaatgccagagctt

SEQ ID NO: 3679 - DNA, 20 bp, Artificial Sequence
  chemically synthesized
acctgtaatgccagagcttt

SEQ ID NO: 3680 - DNA, 20 bp, Artificial Sequence
  chemically synthesized
ctgtaatgccagagctttgg

SEQ ID NO: 3681 - DNA, 20 bp, Artificial Sequence
  chemically synthesized
tgtaatgccagagctttggg

SEQ ID NO: 3682 - DNA, 20 bp, Artificial Sequence
  chemically synthesized
aatgccagagctttgggagg

SEQ ID NO: 3683 - DNA, 20 bp, Artificial Sequence
  chemically synthesized
tgccagagctttgggaggcg

SEQ ID NO: 3684 - DNA, 20 bp, Artificial Sequence
  chemically synthesized
gccagagctttgggaggcgg

SEQ ID NO: 3685 - DNA, 20 bp, Artificial Sequence
  chemically synthesized
gagctttgggaggcggaggc

SEQ ID NO: 3686 - DNA, 20 bp, Artificial Sequence
  chemically synthesized
gctttgggaggcggaggcaa

SEQ ID NO: 3687 - DNA, 20 bp, Artificial Sequence
  chemically synthesized
ctttgggaggcggaggcaag

SEQ ID NO: 3688 - DNA, 20 bp, Artificial Sequence
  chemically synthesized
ggaggcaagaggatcacttg

SEQ ID NO: 3689 - DNA, 20 bp, Artificial Sequence
  chemically synthesized
gcaagaggatcacttgaagc

SEQ ID NO: 3690 - DNA, 20 bp, Artificial Sequence
  chemically synthesized
caagaggatcacttgaagcc

SEQ ID NO: 3691 - DNA, 20 bp, Artificial Sequence
  chemically synthesized
agaggatcacttgaagccag

SEQ ID NO: 3692 - DNA, 20 bp, Artificial Sequence
  chemically synthesized
tcacttgaagccaggagttc

SEQ ID NO: 3693 - DNA, 20 bp, Artificial Sequence
  chemically synthesized
ccaggagttcaagctcaacc

SEQ ID NO: 3694 - DNA, 20 bp, Artificial Sequence
  chemically synthesized
caggagttcaagctcaacct

SEQ ID NO: 3695 - DNA, 20 bp, Artificial Sequence
  chemically synthesized
caagctcaacctgggcaacg

SEQ ID NO: 3696 - DNA, 20 bp, Artificial Sequence
  chemically synthesized
tctacaaaaaattaaaaact

SEQ ID NO: 3697 - DNA, 20 bp, Artificial Sequence
  chemically synthesized
caaaaaattaaaaacttagc

SEQ ID NO: 3698 - DNA, 20 bp, Artificial Sequence
  chemically synthesized
aaaaaattaaaaacttagcc

SEQ ID NO: 3699 - DNA, 20 bp, Artificial Sequence
  chemically synthesized
attaaaaacttagccgggcg

SEQ ID NO: 3700 - DNA, 20 bp, Artificial Sequence
  chemically synthesized
ggcgtggtgatgtgcacctg

SEQ ID NO: 3701 - DNA, 20 bp, Artificial Sequence
  chemically synthesized
gtgatgtgcacctgtagtcc

SEQ ID NO: 3702 - DNA, 20 bp, Artificial Sequence
  chemically synthesized
cacctgtagtcctagctact

SEQ ID NO: 3703 - DNA, 20 bp, Artificial Sequence
  chemically synthesized
acctgtagtcctagctactt

SEQ ID NO: 3704 - DNA, 20 bp, Artificial Sequence
  chemically synthesized
ctgtagtcctagctacttgg

SEQ ID NO: 3705 - DNA, 20 bp, Artificial Sequence
  chemically synthesized
tgtagtcctagctacttggg

SEQ ID NO: 3706 - DNA, 20 bp, Artificial Sequence
  chemically synthesized
tcctagctacttgggaggct

SEQ ID NO: 3707 - DNA, 20 bp, Artificial Sequence
  chemically synthesized
cctagctacttgggaggctg

SEQ ID NO: 3708 - DNA, 20 bp, Artificial Sequence
  chemically synthesized
agctacttgggaggctgagg

SEQ ID NO: 3709 - DNA, 20 bp, Artificial Sequence
  chemically synthesized
gctacttgggaggctgaggc

SEQ ID NO: 3710 - DNA, 20 bp, Artificial Sequence
  chemically synthesized
tacttgggaggctgaggcag

SEQ ID NO: 3711 - DNA, 20 bp, Artificial Sequence
  chemically synthesized
acttgggaggctgaggcagg

SEQ ID NO: 3712 - DNA, 20 bp, Artificial Sequence
  chemically synthesized
cttgggaggctgaggcagga

SEQ ID NO: 3713 - DNA, 20 bp, Artificial Sequence
  chemically synthesized
ctgaggcaggagggtcattt

SEQ ID NO: 3714 - DNA, 20 bp, Artificial Sequence
  chemically synthesized
caggagggtcatttgagccc

SEQ ID NO: 3715 - DNA, 20 bp, Artificial Sequence
  chemically synthesized
ggagggtcatttgagcccaa

SEQ ID NO: 3716 - DNA, 20 bp, Artificial Sequence
  chemically synthesized
catttgagcccaagagtttg

SEQ ID NO: 3717 - DNA, 20 bp, Artificial Sequence
  chemically synthesized
cccaagagtttgaagttacc

SEQ ID NO: 3718 - DNA, 20 bp, Artificial Sequence
  chemically synthesized
caagagtttgaagttaccga

SEQ ID NO: 3719 - DNA, 20 bp, Artificial Sequence
  chemically synthesized
accgagagctatgatcctgc

SEQ ID NO: 3720 - DNA, 20 bp, Artificial Sequence
  chemically synthesized
atgatcctgccagtgcattc

SEQ ID NO: 3721 - DNA, 20 bp, Artificial Sequence
  chemically synthesized
cctgccagtgcattccagcc

SEQ ID NO: 3722 - DNA, 20 bp, Artificial Sequence
  chemically synthesized
tccagcctggatgacaaaac

SEQ ID NO: 3723 - DNA, 20 bp, Artificial Sequence
  chemically synthesized
agaccctgtctctaaaaaac

SEQ ID NO: 3724 - DNA, 20 bp, Artificial Sequence
  chemically synthesized
ccctgtctctaaaaaacaag

SEQ ID NO: 3725 - DNA, 20 bp, Artificial Sequence
  chemically synthesized
gtctctaaaaaacaagaagt

SEQ ID NO: 3726 - DNA, 20 bp, Artificial Sequence
  chemically synthesized
tctctaaaaaacaagaagtg

SEQ ID NO: 3727 - DNA, 20 bp, Artificial Sequence
  chemically synthesized
ctctaaaaaacaagaagtga

SEQ ID NO: 3728 - DNA, 20 bp, Artificial Sequence
  chemically synthesized
aagtgagggctttatgattg

SEQ ID NO: 3729 - DNA, 20 bp, Artificial Sequence
  chemically synthesized
ttgtagaattttcactacaa

SEQ ID NO: 3730 - DNA, 20 bp, Artificial Sequence
  chemically synthesized
tagaattttcactacaatag

SEQ ID NO: 3731 - DNA, 20 bp, Artificial Sequence
  chemically synthesized
aattttcactacaatagcag

SEQ ID NO: 3732 - DNA, 20 bp, Artificial Sequence
  chemically synthesized
ccacctttctaaataccaat

SEQ ID NO: 3733 - DNA, 20 bp, Artificial Sequence
  chemically synthesized
cacctttctaaataccaatc

SEQ ID NO: 3734 - DNA, 20 bp, Artificial Sequence
  chemically synthesized
acctttctaaataccaatca

SEQ ID NO: 3735 - DNA, 20 bp, Artificial Sequence
  chemically synthesized
tttctaaataccaatcaggg

SEQ ID NO: 3736 - DNA, 20 bp, Artificial Sequence
  chemically synthesized
tctaaataccaatcagggaa

SEQ ID NO: 3737 - DNA, 20 bp, Artificial Sequence
  chemically synthesized
aataccaatcagggaagaga

SEQ ID NO: 3738 - DNA, 20 bp, Artificial Sequence
  chemically synthesized
agagatggttgattttttaa

SEQ ID NO: 3739 - DNA, 20 bp, Artificial Sequence
  chemically synthesized
gattttttaacagacgttta

SEQ ID NO: 3740 - DNA, 20 bp, Artificial Sequence
  chemically synthesized
ttaacagacgtttaaagaaa

SEQ ID NO: 3741 - DNA, 20 bp, Artificial Sequence
  chemically synthesized
aaaaagcaaaacctcaaact

SEQ ID NO: 3742 - DNA, 20 bp, Artificial Sequence
  chemically synthesized
caaacttagcactctactaa

SEQ ID NO: 3743 - DNA, 20 bp, Artificial Sequence
  chemically synthesized
tagcactctactaacagttt

SEQ ID NO: 3744 - DNA, 20 bp, Artificial Sequence
  chemically synthesized
cactctactaacagttttag

SEQ ID NO: 3745 - DNA, 20 bp, Artificial Sequence
  chemically synthesized
tgtaatcatgtctgcatgta

SEQ ID NO: 3746 - DNA, 20 bp, Artificial Sequence
  chemically synthesized
gtaatcatgtctgcatgtat

SEQ ID NO: 3747 - DNA, 20 bp, Artificial Sequence
  chemically synthesized
tgcatgtatgggattatttc

SEQ ID NO: 3748 - DNA, 20 bp, Artificial Sequence
  chemically synthesized
tgtatgggattatttccaga

SEQ ID NO: 3749 - DNA, 20 bp, Artificial Sequence
  chemically synthesized
attatttccagaaagtgtat

SEQ ID NO: 3750 - DNA, 20 bp, Artificial Sequence
  chemically synthesized
ttatttccagaaagtgtatt

SEQ ID NO: 3751 - DNA, 20 bp, Artificial Sequence
  chemically synthesized
aaacctctcatgaaccctgt

SEQ ID NO: 3752 - DNA, 20 bp, Artificial Sequence
  chemically synthesized
ctctcatgaaccctgtgagc

SEQ ID NO: 3753 - DNA, 20 bp, Artificial Sequence
  chemically synthesized
gtctcactcaatttgaatct

SEQ ID NO: 3754 - DNA, 20 bp, Artificial Sequence
  chemically synthesized
tgaatcttggcttccctcaa

SEQ ID NO: 3755 - DNA, 20 bp, Artificial Sequence
  chemically synthesized
cttggcttccctcaaaagac

SEQ ID NO: 3756 - DNA, 20 bp, Artificial Sequence
  chemically synthesized
tcaaaagactggctaatgtt

SEQ ID NO: 3757 - DNA, 20 bp, Artificial Sequence
  chemically synthesized
gctaatgtttggtaactctc

SEQ ID NO: 3758 - DNA, 20 bp, Artificial Sequence
  chemically synthesized
taatgtttggtaactctctg

SEQ ID NO: 3759 - DNA, 20 bp, Artificial Sequence
  chemically synthesized
tgtttggtaactctctggag

SEQ ID NO: 3760 - DNA, 20 bp, Artificial Sequence
  chemically synthesized
tggtaactctctggagtaga

SEQ ID NO: 3761 - DNA, 20 bp, Artificial Sequence
  chemically synthesized
agacagcactacatgtacgt

SEQ ID NO: 3762 - DNA, 20 bp, Artificial Sequence
  chemically synthesized
agcactacatgtacgtaaga

SEQ ID NO: 3763 - DNA, 20 bp, Artificial Sequence
  chemically synthesized
gcactacatgtacgtaagat

SEQ ID NO: 3764 - DNA, 20 bp, Artificial Sequence
  chemically synthesized
ataggtacataaacaactat

SEQ ID NO: 3765 - DNA, 20 bp, Artificial Sequence
  chemically synthesized
cataaacaactattggtttt

SEQ ID NO: 3766 - DNA, 20 bp, Artificial Sequence
  chemically synthesized
ggttttgagctgattttttt

SEQ ID NO: 3767 - DNA, 20 bp, Artificial Sequence
  chemically synthesized
ttcagctgcatttgcatgta

SEQ ID NO: 3768 - DNA, 20 bp, Artificial Sequence
  chemically synthesized
tgtatggatttttctcacca

SEQ ID NO: 3769 - DNA, 20 bp, Artificial Sequence
  chemically synthesized
tcaccaaagacgatgacttc

SEQ ID NO: 3770 - DNA, 20 bp, Artificial Sequence
  chemically synthesized
aagacgatgacttcaagtat

SEQ ID NO: 3771 - DNA, 20 bp, Artificial Sequence
  chemically synthesized
gtattagtaaaataattgta

SEQ ID NO: 3772 - DNA, 20 bp, Artificial Sequence
  chemically synthesized
ctctgtgacatttcatttcc

SEQ ID NO: 3773 - DNA, 20 bp, Artificial Sequence
  chemically synthesized
tctgtgacatttcatttccc

SEQ ID NO: 3774 - DNA, 20 bp, Artificial Sequence
  chemically synthesized
atttcccaggctatttcttt

SEQ ID NO: 3775 - DNA, 20 bp, Artificial Sequence
  chemically synthesized
tcccaggctatttcttttgg

SEQ ID NO: 3776 - DNA, 20 bp, Artificial Sequence
  chemically synthesized
cccaggctatttcttttggt

SEQ ID NO: 3777 - DNA, 20 bp, Artificial Sequence
  chemically synthesized
ttttggtaggatttaaaact

SEQ ID NO: 3778 - DNA, 20 bp, Artificial Sequence
  chemically synthesized
ggatttaaaactaagcaatt

SEQ ID NO: 3779 - DNA, 20 bp, Artificial Sequence
  chemically synthesized
tgtttgtttgtttttttctt

SEQ ID NO: 3780 - DNA, 20 bp, Artificial Sequence
  chemically synthesized
gtttgtttgtttttttcttg

SEQ ID NO: 3781 - DNA, 20 bp, Artificial Sequence
  chemically synthesized
tgtttgtttttttcttgagg

SEQ ID NO: 3782 - DNA, 20 bp, Artificial Sequence
  chemically synthesized
tttgtttttttcttgaggca

SEQ ID NO: 3783 - DNA, 20 bp, Artificial Sequence
  chemically synthesized
cagagtctctctctgtcgcc

SEQ ID NO: 3784 - DNA, 20 bp, Artificial Sequence
  chemically synthesized
agagtctctctctgtcgccc

SEQ ID NO: 3785 - DNA, 20 bp, Artificial Sequence
  chemically synthesized
tctctctctgtcgcccaggc

SEQ ID NO: 3786 - DNA, 20 bp, Artificial Sequence
  chemically synthesized
tctctctgtcgcccaggctg

SEQ ID NO: 3787 - DNA, 20 bp, Artificial Sequence
  chemically synthesized
ctgtcgcccaggctggagtg

SEQ ID NO: 3788 - DNA, 20 bp, Artificial Sequence
  chemically synthesized
tcgcccaggctggagtgcag

SEQ ID NO: 3789 - DNA, 20 bp, Artificial Sequence
  chemically synthesized
ggagtgcagtggcgccatct

SEQ ID NO: 3790 - DNA, 20 bp, Artificial Sequence
  chemically synthesized
attgcaacctctgccacctc

SEQ ID NO: 3791 - DNA, 20 bp, Artificial Sequence
  chemically synthesized
ttgcaacctctgccacctcc

SEQ ID NO: 3792 - DNA, 20 bp, Artificial Sequence
  chemically synthesized
cctctgccacctccgggttc

SEQ ID NO: 3793 - DNA, 20 bp, Artificial Sequence
  chemically synthesized
tctgccacctccgggttcaa

SEQ ID NO: 3794 - DNA, 20 bp, Artificial Sequence
  chemically synthesized
ttcaagagattctcctgcct

SEQ ID NO: 3795 - DNA, 20 bp, Artificial Sequence
  chemically synthesized
ttctcctgcctcagcctccc

SEQ ID NO: 3796 - DNA, 20 bp, Artificial Sequence
  chemically synthesized
tcctgcctcagcctcccgag

SEQ ID NO: 3797 - DNA, 20 bp, Artificial Sequence
  chemically synthesized
gcctcagcctcccgagtagc

SEQ ID NO: 3798 - DNA, 20 bp, Artificial Sequence
  chemically synthesized
cctcagcctcccgagtagct

SEQ ID NO: 3799 - DNA, 20 bp, Artificial Sequence
  chemically synthesized
ctcccgagtagctgggatta

SEQ ID NO: 3800 - DNA, 20 bp, Artificial Sequence
  chemically synthesized
tcccgagtagctgggattac

SEQ ID NO: 3801 - DNA, 20 bp, Artificial Sequence
  chemically synthesized
caggtgtccaccaccacacc

SEQ ID NO: 3802 - DNA, 20 bp, Artificial Sequence
  chemically synthesized
cggctaattttttgtatttt

SEQ ID NO: 3803 - DNA, 20 bp, Artificial Sequence
  chemically synthesized
ctaattttttgtatttttag

SEQ ID NO: 3804 - DNA, 20 bp, Artificial Sequence
  chemically synthesized
aattttttgtatttttagta

SEQ ID NO: 3805 - DNA, 20 bp, Artificial Sequence
  chemically synthesized
attttttgtatttttagtag

SEQ ID NO: 3806 - DNA, 20 bp, Artificial Sequence
  chemically synthesized
ttttgtatttttagtagagg

SEQ ID NO: 3807 - DNA, 20 bp, Artificial Sequence
  chemically synthesized
tttgtatttttagtagaggt

SEQ ID NO: 3808 - DNA, 20 bp, Artificial Sequence
  chemically synthesized
ttgtatttttagtagaggtg

SEQ ID NO: 3809 - DNA, 20 bp, Artificial Sequence
  chemically synthesized
gaggtggggtttcaccatgt

SEQ ID NO: 3810 - DNA, 20 bp, Artificial Sequence
  chemically synthesized
tggggtttcaccatgttggc

SEQ ID NO: 3811 - DNA, 20 bp, Artificial Sequence
  chemically synthesized
ggggtttcaccatgttggcc

SEQ ID NO: 3812 - DNA, 20 bp, Artificial Sequence
  chemically synthesized
tttcaccatgttggccaggc

SEQ ID NO: 3813 - DNA, 20 bp, Artificial Sequence
  chemically synthesized
atgttggccaggctggtctt

SEQ ID NO: 3814 - DNA, 20 bp, Artificial Sequence
  chemically synthesized
tggtcttgagctcctgacct

SEQ ID NO: 3815 - DNA, 20 bp, Artificial Sequence
  chemically synthesized
ggtcttgagctcctgacctc

SEQ ID NO: 3816 - DNA, 20 bp, Artificial Sequence
  chemically synthesized
ctcaggtgatccacctgcct

SEQ ID NO: 3817 - DNA, 20 bp, Artificial Sequence
  chemically synthesized
ccacctgcctcggcctacca

SEQ ID NO: 3818 - DNA, 20 bp, Artificial Sequence
  chemically synthesized
acctgcctcggcctaccaaa

SEQ ID NO: 3819 - DNA, 20 bp, Artificial Sequence
  chemically synthesized
gcctcggcctaccaaagagc

SEQ ID NO: 3820 - DNA, 20 bp, Artificial Sequence
  chemically synthesized
cctcggcctaccaaagagct

SEQ ID NO: 3821 - DNA, 20 bp, Artificial Sequence
  chemically synthesized
ctaccaaagagctgggataa

SEQ ID NO: 3822 - DNA, 20 bp, Artificial Sequence
  chemically synthesized
taccaaagagctgggataac

SEQ ID NO: 3823 - DNA, 20 bp, Artificial Sequence
  chemically synthesized
caggtgtgacccaccatgcc

SEQ ID NO: 3824 - DNA, 20 bp, Artificial Sequence
  chemically synthesized
ttttttttttcttattctgt

SEQ ID NO: 3825 - DNA, 20 bp, Artificial Sequence
  chemically synthesized
tttttttttcttattctgtt

SEQ ID NO: 3826 - DNA, 20 bp, Artificial Sequence
  chemically synthesized
tttttttcttattctgttag

SEQ ID NO: 3827 - DNA, 20 bp, Artificial Sequence
  chemically synthesized
tttcttattctgttaggagt

SEQ ID NO: 3828 - DNA, 20 bp, Artificial Sequence
  chemically synthesized
tcttattctgttaggagtga

SEQ ID NO: 3829 - DNA, 20 bp, Artificial Sequence
  chemically synthesized
gttaggagtgagagtgtaac

SEQ ID NO: 3830 - DNA, 20 bp, Artificial Sequence
  chemically synthesized
aggagtgagagtgtaactag

SEQ ID NO: 3831 - DNA, 20 bp, Artificial Sequence
  chemically synthesized
gagtgtaactagcagtataa

SEQ ID NO: 3832 - DNA, 20 bp, Artificial Sequence
  chemically synthesized
atagttcaattttcacaacg

SEQ ID NO: 3833 - DNA, 20 bp, Artificial Sequence
  chemically synthesized
caattttcacaacgtggtaa

SEQ ID NO: 3834 - DNA, 20 bp, Artificial Sequence
  chemically synthesized
aagtttccctataattcaat

SEQ ID NO: 3835 - DNA, 20 bp, Artificial Sequence
  chemically synthesized
aattcaatcagattttgctc

SEQ ID NO: 3836 - DNA, 20 bp, Artificial Sequence
  chemically synthesized
attcaatcagattttgctcc

SEQ ID NO: 3837 - DNA, 20 bp, Artificial Sequence
  chemically synthesized
ttcaatcagattttgctcca

SEQ ID NO: 3838 - DNA, 20 bp, Artificial Sequence
  chemically synthesized
tcagattttgctccagggtt

SEQ ID NO: 3839 - DNA, 20 bp, Artificial Sequence
  chemically synthesized
tccagggttcagttctgttt

SEQ ID NO: 3840 - DNA, 20 bp, Artificial Sequence
  chemically synthesized
ccagggttcagttctgtttt

SEQ ID NO: 3841 - DNA, 20 bp, Artificial Sequence
  chemically synthesized
ttaggaaatacttttatttt

SEQ ID NO: 3842 - DNA, 20 bp, Artificial Sequence
  chemically synthesized
tcagtttaatgatgaaatat

SEQ ID NO: 3843 - DNA, 20 bp, Artificial Sequence
  chemically synthesized
agtttaatgatgaaatatta

SEQ ID NO: 3844 - DNA, 20 bp, Artificial Sequence
  chemically synthesized
tatccacctttttaacctaa

SEQ ID NO: 3845 - DNA, 20 bp, Artificial Sequence
  chemically synthesized
tttttaacctaaaagaatga

SEQ ID NO: 3846 - DNA, 20 bp, Artificial Sequence
  chemically synthesized
atgtttgcaatataatttta

SEQ ID NO: 3847 - DNA, 20 bp, Artificial Sequence
  chemically synthesized
gttaacttaattcattatgt

SEQ ID NO: 3848 - DNA, 20 bp, Artificial Sequence
  chemically synthesized
taattcattatgttggcctc

SEQ ID NO: 3849 - DNA, 20 bp, Artificial Sequence
  chemically synthesized
ggcctccagtttgctgttgt

SEQ ID NO: 3850 - DNA, 20 bp, Artificial Sequence
  chemically synthesized
tttgctgttgttagttatga

SEQ ID NO: 3851 - DNA, 20 bp, Artificial Sequence
  chemically synthesized
gctgttgttagttatgacag

SEQ ID NO: 3852 - DNA, 20 bp, Artificial Sequence
  chemically synthesized
gttgttagttatgacagcag

SEQ ID NO: 3853 - DNA, 20 bp, Artificial Sequence
  chemically synthesized
gtgtcattaccatttcaatt

SEQ ID NO: 3854 - DNA, 20 bp, Artificial Sequence
  chemically synthesized
tgcttacattgtattaaaaa

SEQ ID NO: 3855 - DNA, 20 bp, Artificial Sequence
  chemically synthesized
ttacattgtattaaaaacag

SEQ ID NO: 3856 - DNA, 20 bp, Artificial Sequence
  chemically synthesized
taaaaacagtggatatttta

SEQ ID NO: 3857 - DNA, 20 bp, Artificial Sequence
  chemically synthesized
aaacagtggatattttaaag

SEQ ID NO: 3858 - DNA, 20 bp, Artificial Sequence
  chemically synthesized
gatattttaaagaagctgta

SEQ ID NO: 3859 - DNA, 20 bp, Artificial Sequence
  chemically synthesized
gaagctgtacggcttatatc

SEQ ID NO: 3860 - DNA, 20 bp, Artificial Sequence
  chemically synthesized
tatatctagtgctgtctctt

SEQ ID NO: 3861 - DNA, 20 bp, Artificial Sequence
  chemically synthesized
aattgatacaacatatttaa

SEQ ID NO: 3862 - DNA, 20 bp, Artificial Sequence
  chemically synthesized
caaccatttctgtacatact

SEQ ID NO: 3863 - DNA, 20 bp, Artificial Sequence
  chemically synthesized
accatttctgtacatactta

SEQ ID NO: 3864 - DNA, 20 bp, Artificial Sequence
  chemically synthesized
cttagagttaactgttttgc

SEQ ID NO: 3865 - DNA, 20 bp, Artificial Sequence
  chemically synthesized
ttagagttaactgttttgcc

SEQ ID NO: 3866 - DNA, 20 bp, Artificial Sequence
  chemically synthesized
gcctactcataatatgataa

SEQ ID NO: 3867 - DNA, 20 bp, Artificial Sequence
  chemically synthesized
ctcatctaatgctctgtaaa

SEQ ID NO: 3868 - DNA, 20 bp, Artificial Sequence
  chemically synthesized
atctaatgctctgtaaatag

SEQ ID NO: 3869 - DNA, 20 bp, Artificial Sequence
  chemically synthesized
aatgctctgtaaatagaagt

SEQ ID NO: 3870 - DNA, 20 bp, Artificial Sequence
  chemically synthesized
tagaagtcagtgctttccat

SEQ ID NO: 3871 - DNA, 20 bp, Artificial Sequence
  chemically synthesized
tcagactgaactctcttgac

SEQ ID NO: 3872 - DNA, 20 bp, Artificial Sequence
  chemically synthesized
tgaactctcttgacaagatg

SEQ ID NO: 3873 - DNA, 20 bp, Artificial Sequence
  chemically synthesized
agatgtggatgaaattcttt

SEQ ID NO: 3874 - DNA, 20 bp, Artificial Sequence
  chemically synthesized
tttactttgtcatacattta

SEQ ID NO: 3875 - DNA, 20 bp, Artificial Sequence
  chemically synthesized
tacatttacagatcaaatgt

SEQ ID NO: 3876 - DNA, 20 bp, Artificial Sequence
  chemically synthesized
agatcaaatgttagctccca

SEQ ID NO: 3877 - DNA, 20 bp, Artificial Sequence
  chemically synthesized
tagctcccaaagcaatcata

SEQ ID NO: 3878 - DNA, 20 bp, Artificial Sequence
  chemically synthesized
cccaaagcaatcatatggca

SEQ ID NO: 3879 - DNA, 20 bp, Artificial Sequence
  chemically synthesized
aagcaatcatatggcaaaga

SEQ ID NO: 3880 - DNA, 20 bp, Artificial Sequence
  chemically synthesized
agcaatcatatggcaaagat

SEQ ID NO: 3881 - DNA, 20 bp, Artificial Sequence
  chemically synthesized
tggcaaagataggtatatca

SEQ ID NO: 3882 - DNA, 20 bp, Artificial Sequence
  chemically synthesized
gtatatcatagtttgcctat

SEQ ID NO: 3883 - DNA, 20 bp, Artificial Sequence
  chemically synthesized
tgtattgctattattataaa

SEQ ID NO: 3884 - DNA, 20 bp, Artificial Sequence
  chemically synthesized
attattataaatagacttca

SEQ ID NO: 3885 - DNA, 20 bp, Artificial Sequence
  chemically synthesized
ataaatagacttcacagttt

SEQ ID NO: 3886 - DNA, 20 bp, Artificial Sequence
  chemically synthesized
ttcacagttttagacttgct

SEQ ID NO: 3887 - DNA, 20 bp, Artificial Sequence
  chemically synthesized
tcacagttttagacttgctt

SEQ ID NO: 3888 - DNA, 20 bp, Artificial Sequence
  chemically synthesized
attgcaattctttttacttt

SEQ ID NO: 3889 - DNA, 20 bp, Artificial Sequence
  chemically synthesized
attctttttactttcagtct

SEQ ID NO: 3890 - DNA, 20 bp, Artificial Sequence
  chemically synthesized
tactttcagtcttagataac

SEQ ID NO: 3891 - DNA, 20 bp, Artificial Sequence
  chemically synthesized
agataacaagtcttcaatta

SEQ ID NO: 3892 - DNA, 20 bp, Artificial Sequence
  chemically synthesized
tagtacaatcacacattgct

SEQ ID NO: 3893 - DNA, 20 bp, Artificial Sequence
  chemically synthesized
agtacaatcacacattgctt

SEQ ID NO: 3894 - DNA, 20 bp, Artificial Sequence
  chemically synthesized
attgcttaggaatgcatcat

SEQ ID NO: 3895 - DNA, 20 bp, Artificial Sequence
  chemically synthesized
ttgcttaggaatgcatcatt

SEQ ID NO: 3896 - DNA, 20 bp, Artificial Sequence
  chemically synthesized
ttgtcattatgcaaacatca

SEQ ID NO: 3897 - DNA, 20 bp, Artificial Sequence
  chemically synthesized
gtcattatgcaaacatcata

SEQ ID NO: 3898 - DNA, 20 bp, Artificial Sequence
  chemically synthesized
agagtgtacttacacaaacc

SEQ ID NO: 3899 - DNA, 20 bp, Artificial Sequence
  chemically synthesized
tgtacttacacaaacctaga

SEQ ID NO: 3900 - DNA, 20 bp, Artificial Sequence
  chemically synthesized
ttacacaaacctagatagta

SEQ ID NO: 3901 - DNA, 20 bp, Artificial Sequence
  chemically synthesized
tagtatagcctttatgtacc

SEQ ID NO: 3902 - DNA, 20 bp, Artificial Sequence
  chemically synthesized
agtatagcctttatgtacct

SEQ ID NO: 3903 - DNA, 20 bp, Artificial Sequence
  chemically synthesized
ctttatgtacctaggccgta

SEQ ID NO: 3904 - DNA, 20 bp, Artificial Sequence
  chemically synthesized
tgtacctaggccgtatggta

SEQ ID NO: 3905 - DNA, 20 bp, Artificial Sequence
  chemically synthesized
atggtatagtctgttgctcc

SEQ ID NO: 3906 - DNA, 20 bp, Artificial Sequence
  chemically synthesized
tggtatagtctgttgctcct

SEQ ID NO: 3907 - DNA, 20 bp, Artificial Sequence
  chemically synthesized
tgttactgtactgaatacta

SEQ ID NO: 3908 - DNA, 20 bp, Artificial Sequence
  chemically synthesized
actgtactgaatactataga

SEQ ID NO: 3909 - DNA, 20 bp, Artificial Sequence
  chemically synthesized
tactatagacagttgtaaca

SEQ ID NO: 3910 - DNA, 20 bp, Artificial Sequence
  chemically synthesized
tatagacagttgtaacacag

SEQ ID NO: 3911 - DNA, 20 bp, Artificial Sequence
  chemically synthesized
tttatctaaatatatgcaaa

SEQ ID NO: 3912 - DNA, 20 bp, Artificial Sequence
  chemically synthesized
tatctaaatatatgcaaaca

SEQ ID NO: 3913 - DNA, 20 bp, Artificial Sequence
  chemically synthesized
aaatatatgcaaacagagaa

SEQ ID NO: 3914 - DNA, 20 bp, Artificial Sequence
  chemically synthesized
aatatatgcaaacagagaaa

SEQ ID NO: 3915 - DNA, 20 bp, Artificial Sequence
  chemically synthesized
atgcaaacagagaaaaggta

SEQ ID NO: 3916 - DNA, 20 bp, Artificial Sequence
  chemically synthesized
acagagaaaaggtacagtaa

SEQ ID NO: 3917 - DNA, 20 bp, Artificial Sequence
  chemically synthesized
gaaaaggtacagtaaaagta

SEQ ID NO: 3918 - DNA, 20 bp, Artificial Sequence
  chemically synthesized
acagtaaaagtatggtataa

SEQ ID NO: 3919 - DNA, 20 bp, Artificial Sequence
  chemically synthesized
aagtatggtataaaagataa

SEQ ID NO: 3920 - DNA, 20 bp, Artificial Sequence
  chemically synthesized
aagataatggtatacctgtg

SEQ ID NO: 3921 - DNA, 20 bp, Artificial Sequence
  chemically synthesized
agataatggtatacctgtgt

SEQ ID NO: 3922 - DNA, 20 bp, Artificial Sequence
  chemically synthesized
tgtaggccacttaccacgaa

SEQ ID NO: 3923 - DNA, 20 bp, Artificial Sequence
  chemically synthesized
taggccacttaccacgaatg

SEQ ID NO: 3924 - DNA, 20 bp, Artificial Sequence
  chemically synthesized
cttaccacgaatggagcttg

SEQ ID NO: 3925 - DNA, 20 bp, Artificial Sequence
  chemically synthesized
ttaccacgaatggagcttgc

SEQ ID NO: 3926 - DNA, 20 bp, Artificial Sequence
  chemically synthesized
acgaatggagcttgcaggac

SEQ ID NO: 3927 - DNA, 20 bp, Artificial Sequence
  chemically synthesized
aatggagcttgcaggactag

SEQ ID NO: 3928 - DNA, 20 bp, Artificial Sequence
  chemically synthesized
tgcaggactagaagttgctc

SEQ ID NO: 3929 - DNA, 20 bp, Artificial Sequence
  chemically synthesized
gcaggactagaagttgctct

SEQ ID NO: 3930 - DNA, 20 bp, Artificial Sequence
  chemically synthesized
gactagaagttgctctgggt

SEQ ID NO: 3931 - DNA, 20 bp, Artificial Sequence
  chemically synthesized
agaagttgctctgggtgagt

SEQ ID NO: 3932 - DNA, 20 bp, Artificial Sequence
  chemically synthesized
gttgctctgggtgagtcagt

SEQ ID NO: 3933 - DNA, 20 bp, Artificial Sequence
  chemically synthesized
ctctgggtgagtcagtgagt

SEQ ID NO: 3934 - DNA, 20 bp, Artificial Sequence
  chemically synthesized
tgggtgagtcagtgagtgag

SEQ ID NO: 3935 - DNA, 20 bp, Artificial Sequence
  chemically synthesized
gtgagtggtgaattaatgtg

SEQ ID NO: 3936 - DNA, 20 bp, Artificial Sequence
  chemically synthesized
tgagtggtgaattaatgtga

SEQ ID NO: 3937 - DNA, 20 bp, Artificial Sequence
  chemically synthesized
ggtgaattaatgtgaaggcc

SEQ ID NO: 3938 - DNA, 20 bp, Artificial Sequence
  chemically synthesized
tagaacactgtacaccactg

SEQ ID NO: 3939 - DNA, 20 bp, Artificial Sequence
  chemically synthesized
accactgtagactataaaca

SEQ ID NO: 3940 - DNA, 20 bp, Artificial Sequence
  chemically synthesized
actataaacacagtacgctg

SEQ ID NO: 3941 - DNA, 20 bp, Artificial Sequence
  chemically synthesized
ctacaccaaatttatcttaa

SEQ ID NO: 3942 - DNA, 20 bp, Artificial Sequence
  chemically synthesized
tttttaacttttaaaatact

SEQ ID NO: 3943 - DNA, 20 bp, Artificial Sequence
  chemically synthesized
tgaaacacaaatacattgta

SEQ ID NO: 3944 - DNA, 20 bp, Artificial Sequence
  chemically synthesized
ttttctttgtatccttattc

SEQ ID NO: 3945 - DNA, 20 bp, Artificial Sequence
  chemically synthesized
tctttgtatccttattctag

SEQ ID NO: 3946 - DNA, 20 bp, Artificial Sequence
  chemically synthesized
aaatttttttttttacttgt

SEQ ID NO: 3947 - DNA, 20 bp, Artificial Sequence
  chemically synthesized
aaaacacacacactttcacc

SEQ ID NO: 3948 - DNA, 20 bp, Artificial Sequence
  chemically synthesized
aaacacacacactttcacct

SEQ ID NO: 3949 - DNA, 20 bp, Artificial Sequence
  chemically synthesized
cacacactttcacctaggca

SEQ ID NO: 3950 - DNA, 20 bp, Artificial Sequence
  chemically synthesized
cactttcacctaggcataga

SEQ ID NO: 3951 - DNA, 20 bp, Artificial Sequence
  chemically synthesized
actttcacctaggcatagac

SEQ ID NO: 3952 - DNA, 20 bp, Artificial Sequence
  chemically synthesized
cacctaggcatagacaggat

SEQ ID NO: 3953 - DNA, 20 bp, Artificial Sequence
  chemically synthesized
acctaggcatagacaggatt

SEQ ID NO: 3954 - DNA, 20 bp, Artificial Sequence
  chemically synthesized
atagacaggattaggatcat

SEQ ID NO: 3955 - DNA, 20 bp, Artificial Sequence
  chemically synthesized
acctccacatcttgtcccac

SEQ ID NO: 3956 - DNA, 20 bp, Artificial Sequence
  chemically synthesized
tccacatcttgtcccactgg

SEQ ID NO: 3957 - DNA, 20 bp, Artificial Sequence
  chemically synthesized
ccacatcttgtcccactgga

SEQ ID NO: 3958 - DNA, 20 bp, Artificial Sequence
  chemically synthesized
ttgtcccactggaaggtttt

SEQ ID NO: 3959 - DNA, 20 bp, Artificial Sequence
  chemically synthesized
tgtcccactggaaggttttt

SEQ ID NO: 3960 - DNA, 20 bp, Artificial Sequence
  chemically synthesized
gtcccactggaaggttttta

SEQ ID NO: 3961 - DNA, 20 bp, Artificial Sequence
  chemically synthesized
tcccactggaaggtttttag

SEQ ID NO: 3962 - DNA, 20 bp, Artificial Sequence
  chemically synthesized
taggggcaataacacacatg

SEQ ID NO: 3963 - DNA, 20 bp, Artificial Sequence
  chemically synthesized
gtagctgtcacctatgataa

SEQ ID NO: 3964 - DNA, 20 bp, Artificial Sequence
  chemically synthesized
tttctgttgaatacctcctg

SEQ ID NO: 3965 - DNA, 20 bp, Artificial Sequence
  chemically synthesized
ttctgttgaatacctcctga

SEQ ID NO: 3966 - DNA, 20 bp, Artificial Sequence
  chemically synthesized
acctcctgaaggacttgcct

SEQ ID NO: 3967 - DNA, 20 bp, Artificial Sequence
  chemically synthesized
cctcctgaaggacttgcctg

SEQ ID NO: 3968 - DNA, 20 bp, Artificial Sequence
  chemically synthesized
atttaacttaaaaaaaaaaa

SEQ ID NO: 3969 - DNA, 20 bp, Artificial Sequence
  chemically synthesized
taacttaaaaaaaaaaaaag

SEQ ID NO: 3970 - DNA, 20 bp, Artificial Sequence
  chemically synthesized
cttaaaaaaaaaaaaagtag

SEQ ID NO: 3971 - DNA, 20 bp, Artificial Sequence
  chemically synthesized
ttaaaaaaaaaaaaagtaga

SEQ ID NO: 3972 - DNA, 20 bp, Artificial Sequence
  chemically synthesized
aaaaaaaaaaaaagtagaag

SEQ ID NO: 3973 - DNA, 20 bp, Artificial Sequence
  chemically synthesized
gcactctaaaataacaataa

SEQ ID NO: 3974 - DNA, 20 bp, Artificial Sequence
  chemically synthesized
cactctaaaataacaataaa

SEQ ID NO: 3975 - DNA, 20 bp, Artificial Sequence
  chemically synthesized
taaaataacaataaaaggca

SEQ ID NO: 3976 - DNA, 20 bp, Artificial Sequence
  chemically synthesized
taacaataaaaggcatagta

SEQ ID NO: 3977 - DNA, 20 bp, Artificial Sequence
  chemically synthesized
agtatagtgaatacataaac

SEQ ID NO: 3978 - DNA, 20 bp, Artificial Sequence
  chemically synthesized
gaatacataaaccagcaatg

SEQ ID NO: 3979 - DNA, 20 bp, Artificial Sequence
  chemically synthesized
tacataaaccagcaatgtag

SEQ ID NO: 3980 - DNA, 20 bp, Artificial Sequence
  chemically synthesized
caatgtagtagtttattatc

SEQ ID NO: 3981 - DNA, 20 bp, Artificial Sequence
  chemically synthesized
actttaaataacttgcaaaa

SEQ ID NO: 3982 - DNA, 20 bp, Artificial Sequence
  chemically synthesized
ataacttgcaaaatagtact

SEQ ID NO: 3983 - DNA, 20 bp, Artificial Sequence
  chemically synthesized
atagtactaagaccttatga

SEQ ID NO: 3984 - DNA, 20 bp, Artificial Sequence
  chemically synthesized
ctaagaccttatgatggtta

SEQ ID NO: 3985 - DNA, 20 bp, Artificial Sequence
  chemically synthesized
atgatggttacagtgtcact

SEQ ID NO: 3986 - DNA, 20 bp, Artificial Sequence
  chemically synthesized
tgatggttacagtgtcacta

SEQ ID NO: 3987 - DNA, 20 bp, Artificial Sequence
  chemically synthesized
ttacagtgtcactaaggcaa

SEQ ID NO: 3988 - DNA, 20 bp, Artificial Sequence
  chemically synthesized
ctaaggcaatagcatatttt

SEQ ID NO: 3989 - DNA, 20 bp, Artificial Sequence
  chemically synthesized
taaggcaatagcatattttc

SEQ ID NO: 3990 - DNA, 20 bp, Artificial Sequence
  chemically synthesized
tcaggtccattgtaatctaa

SEQ ID NO: 3991 - DNA, 20 bp, Artificial Sequence
  chemically synthesized
caggtccattgtaatctaat

SEQ ID NO: 3992 - DNA, 20 bp, Artificial Sequence
  chemically synthesized
tgggactaccatcatatatg

SEQ ID NO: 3993 - DNA, 20 bp, Artificial Sequence
  chemically synthesized
ccattgactgaaacgttaca

SEQ ID NO: 3994 - DNA, 20 bp, Artificial Sequence
  chemically synthesized
tggcacataactgtatttgc

SEQ ID NO: 3995 - DNA, 20 bp, Artificial Sequence
  chemically synthesized
tgttttacattaatatcaca

SEQ ID NO: 3996 - DNA, 20 bp, Artificial Sequence
  chemically synthesized
gttttacattaatatcacat

SEQ ID NO: 3997 - DNA, 20 bp, Artificial Sequence
  chemically synthesized
tcacataggatgtacctttt

SEQ ID NO: 3998 - DNA, 20 bp, Artificial Sequence
  chemically synthesized
acataggatgtaccttttta

SEQ ID NO: 3999 - DNA, 20 bp, Artificial Sequence
  chemically synthesized
taggatgtacctttttagag

SEQ ID NO: 4000 - DNA, 20 bp, Artificial Sequence
  chemically synthesized
tttagagtggtatgtttatg

SEQ ID NO: 4001 - DNA, 20 bp, Artificial Sequence
  chemically synthesized
gtggtatgtttatgtggatt

SEQ ID NO: 4002 - DNA, 20 bp, Artificial Sequence
  chemically synthesized
ttatgtggattaagatgtac

SEQ ID NO: 4003 - DNA, 20 bp, Artificial Sequence
  chemically synthesized
tggattaagatgtacaagtt

SEQ ID NO: 4004 - DNA, 20 bp, Artificial Sequence
  chemically synthesized
ttaagatgtacaagttgagc

SEQ ID NO: 4005 - DNA, 20 bp, Artificial Sequence
  chemically synthesized
taagatgtacaagttgagca

SEQ ID NO: 4006 - DNA, 20 bp, Artificial Sequence
  chemically synthesized
aagatgtacaagttgagcaa

SEQ ID NO: 4007 - DNA, 20 bp, Artificial Sequence
  chemically synthesized
agatgtacaagttgagcaag

SEQ ID NO: 4008 - DNA, 20 bp, Artificial Sequence
  chemically synthesized
acaagttgagcaaggggacc

SEQ ID NO: 4009 - DNA, 20 bp, Artificial Sequence
  chemically synthesized
aagttgagcaaggggaccaa

SEQ ID NO: 4010 - DNA, 20 bp, Artificial Sequence
  chemically synthesized
agcaaggggaccaagagccc

SEQ ID NO: 4011 - DNA, 20 bp, Artificial Sequence
  chemically synthesized
gcaaggggaccaagagccct

SEQ ID NO: 4012 - DNA, 20 bp, Artificial Sequence
  chemically synthesized
aagagccctgggttctgtct

SEQ ID NO: 4013 - DNA, 20 bp, Artificial Sequence
  chemically synthesized
ctgggttctgtcttggatgt

SEQ ID NO: 4014 - DNA, 20 bp, Artificial Sequence
  chemically synthesized
ctgttttctcattaaattca

SEQ ID NO: 4015 - DNA, 20 bp, Artificial Sequence
  chemically synthesized
tgttttctcattaaattcaa

SEQ ID NO: 4016 - DNA, 20 bp, Artificial Sequence
  chemically synthesized
attaaattcaaaggcttgaa

SEQ ID NO: 4017 - DNA, 20 bp, Artificial Sequence
  chemically synthesized
ttaaattcaaaggcttgaac

SEQ ID NO: 4018 - DNA, 20 bp, Artificial Sequence
  chemically synthesized
aggcttgaacgggccctatt

SEQ ID NO: 4019 - DNA, 20 bp, Artificial Sequence
  chemically synthesized
ctacgtgttctaaataacta

SEQ ID NO: 4020 - DNA, 20 bp, Artificial Sequence
  chemically synthesized
taactaaagcttttaaattc

SEQ ID NO: 4021 - DNA, 20 bp, Artificial Sequence
  chemically synthesized
gcttttaaattctagccatt

SEQ ID NO: 4022 - DNA, 20 bp, Artificial Sequence
  chemically synthesized
taaattctagccatttagtg

SEQ ID NO: 4023 - DNA, 20 bp, Artificial Sequence
  chemically synthesized
ttagtgtagaactctctttg

SEQ ID NO: 4024 - DNA, 20 bp, Artificial Sequence
  chemically synthesized
gcagtgatgaaatgctgtat

SEQ ID NO: 4025 - DNA, 20 bp, Artificial Sequence
  chemically synthesized
gaaatgctgtattggtttct

SEQ ID NO: 4026 - DNA, 20 bp, Artificial Sequence
  chemically synthesized
tgctgtattggtttcttggc

SEQ ID NO: 4027 - DNA, 20 bp, Artificial Sequence
  chemically synthesized
ttcaatgtcgttttaaacat

SEQ ID NO: 4028 - DNA, 20 bp, Artificial Sequence
  chemically synthesized
tcaatgtcgttttaaacatc

SEQ ID NO: 4029 - DNA, 20 bp, Artificial Sequence
  chemically synthesized
gtcgttttaaacatcaggat

SEQ ID NO: 4030 - DNA, 20 bp, Artificial Sequence
  chemically synthesized
tcgttttaaacatcaggatc

SEQ ID NO: 4031 - DNA, 20 bp, Artificial Sequence
  chemically synthesized
taaacatcaggatcgggctt

SEQ ID NO: 4032 - DNA, 20 bp, Artificial Sequence
  chemically synthesized
ggcttcagtattctcataac

SEQ ID NO: 4033 - DNA, 20 bp, Artificial Sequence
  chemically synthesized
cttcagtattctcataacca

SEQ ID NO: 4034 - DNA, 20 bp, Artificial Sequence
  chemically synthesized
tcagtattctcataaccaga

SEQ ID NO: 4035 - DNA, 20 bp, Artificial Sequence
  chemically synthesized
tcataaccagagagttcact

SEQ ID NO: 4036 - DNA, 20 bp, Artificial Sequence
  chemically synthesized
cataaccagagagttcactg

SEQ ID NO: 4037 - DNA, 20 bp, Artificial Sequence
  chemically synthesized
cagagagttcactgaggata

SEQ ID NO: 4038 - DNA, 20 bp, Artificial Sequence
  chemically synthesized
agagagttcactgaggatac

SEQ ID NO: 4039 - DNA, 20 bp, Artificial Sequence
  chemically synthesized
tgtttgcccattttttgtta

SEQ ID NO: 4040 - DNA, 20 bp, Artificial Sequence
  chemically synthesized
cccattttttgttatggctc

SEQ ID NO: 4041 - DNA, 20 bp, Artificial Sequence
  chemically synthesized
ttgttatggctccagacttg

SEQ ID NO: 4042 - DNA, 20 bp, Artificial Sequence
  chemically synthesized
tttttttttttttgaccttt

SEQ ID NO: 4043 - DNA, 20 bp, Artificial Sequence
  chemically synthesized
ttttttttttgaccttttag

SEQ ID NO: 4044 - DNA, 20 bp, Artificial Sequence
  chemically synthesized
ttgaccttttagcggcttta

SEQ ID NO: 4045 - DNA, 20 bp, Artificial Sequence
  chemically synthesized
ctttaaagtatttctgttgt

SEQ ID NO: 4046 - DNA, 20 bp, Artificial Sequence
  chemically synthesized
tttaaagtatttctgttgtt

SEQ ID NO: 4047 - DNA, 20 bp, Artificial Sequence
  chemically synthesized
aggtgttgtattacttttct

SEQ ID NO: 4048 - DNA, 20 bp, Artificial Sequence
  chemically synthesized
ttttctaagattacttaaca

SEQ ID NO: 4049 - DNA, 20 bp, Artificial Sequence
  chemically synthesized
ttaacaaagcaccacaaact

SEQ ID NO: 4050 - DNA, 20 bp, Artificial Sequence
  chemically synthesized
acaaagcaccacaaactgag

SEQ ID NO: 4051 - DNA, 20 bp, Artificial Sequence
  chemically synthesized
aactgagtggctttaaacaa

SEQ ID NO: 4052 - DNA, 20 bp, Artificial Sequence
  chemically synthesized
aatttattctctcacaattc

SEQ ID NO: 4053 - DNA, 20 bp, Artificial Sequence
  chemically synthesized
ttattctctcacaattctag

SEQ ID NO: 4054 - DNA, 20 bp, Artificial Sequence
  chemically synthesized
tctctcacaattctagaagc

SEQ ID NO: 4055 - DNA, 20 bp, Artificial Sequence
  chemically synthesized
ctcacaattctagaagctag

SEQ ID NO: 4056 - DNA, 20 bp, Artificial Sequence
  chemically synthesized
aagctagaagtccgaaatca

SEQ ID NO: 4057 - DNA, 20 bp, Artificial Sequence
  chemically synthesized
gtccgaaatcaaagtgttga

SEQ ID NO: 4058 - DNA, 20 bp, Artificial Sequence
  chemically synthesized
tccgaaatcaaagtgttgac

SEQ ID NO: 4059 - DNA, 20 bp, Artificial Sequence
  chemically synthesized
ccgaaatcaaagtgttgaca

SEQ ID NO: 4060 - DNA, 20 bp, Artificial Sequence
  chemically synthesized
cgaaatcaaagtgttgacag

SEQ ID NO: 4061 - DNA, 20 bp, Artificial Sequence
  chemically synthesized
ttgacaggggcatgatcttc

SEQ ID NO: 4062 - DNA, 20 bp, Artificial Sequence
  chemically synthesized
gacaggggcatgatcttcaa

SEQ ID NO: 4063 - DNA, 20 bp, Artificial Sequence
  chemically synthesized
caggggcatgatcttcaaga

SEQ ID NO: 4064 - DNA, 20 bp, Artificial Sequence
  chemically synthesized
gggcatgatcttcaagagag

SEQ ID NO: 4065 - DNA, 20 bp, Artificial Sequence
  chemically synthesized
actctttccttgcctcttcc

SEQ ID NO: 4066 - DNA, 20 bp, Artificial Sequence
  chemically synthesized
ccttgcctcttcctggcttc

SEQ ID NO: 4067 - DNA, 20 bp, Artificial Sequence
  chemically synthesized
tgcctcttcctggcttctgg

SEQ ID NO: 4068 - DNA, 20 bp, Artificial Sequence
  chemically synthesized
tcctggcttctggtggttac

SEQ ID NO: 4069 - DNA, 20 bp, Artificial Sequence
  chemically synthesized
tggtggttaccagcaatcct

SEQ ID NO: 4070 - DNA, 20 bp, Artificial Sequence
  chemically synthesized
agtgttcctttcttgccttg

SEQ ID NO: 4071 - DNA, 20 bp, Artificial Sequence
  chemically synthesized
gccttgtagtttcaacaatc

SEQ ID NO: 4072 - DNA, 20 bp, Artificial Sequence
  chemically synthesized
atctgccttttgtcttcaca

SEQ ID NO: 4073 - DNA, 20 bp, Artificial Sequence
  chemically synthesized
aatctctctccttataaaca

SEQ ID NO: 4074 - DNA, 20 bp, Artificial Sequence
  chemically synthesized
ctctctccttataaacacag

SEQ ID NO: 4075 - DNA, 20 bp, Artificial Sequence
  chemically synthesized
cttataaacacagcagttat

SEQ ID NO: 4076 - DNA, 20 bp, Artificial Sequence
  chemically synthesized
aaacacagcagttattggat

SEQ ID NO: 4077 - DNA, 20 bp, Artificial Sequence
  chemically synthesized
aacacagcagttattggatt

SEQ ID NO: 4078 - DNA, 20 bp, Artificial Sequence
  chemically synthesized
gattaggccccactctaatc

SEQ ID NO: 4079 - DNA, 20 bp, Artificial Sequence
  chemically synthesized
aacatgattacacttatttc

SEQ ID NO: 4080 - DNA, 20 bp, Artificial Sequence
  chemically synthesized
gattacacttatttctagat

SEQ ID NO: 4081 - DNA, 20 bp, Artificial Sequence
  chemically synthesized
attacacttatttctagata

SEQ ID NO: 4082 - DNA, 20 bp, Artificial Sequence
  chemically synthesized
aggtcacattcacgtacacc

SEQ ID NO: 4083 - DNA, 20 bp, Artificial Sequence
  chemically synthesized
ggtcacattcacgtacacca

SEQ ID NO: 4084 - DNA, 20 bp, Artificial Sequence
  chemically synthesized
gtcacattcacgtacaccaa

SEQ ID NO: 4085 - DNA, 20 bp, Artificial Sequence
  chemically synthesized
cattcacgtacaccaagggt

SEQ ID NO: 4086 - DNA, 20 bp, Artificial Sequence
  chemically synthesized
attcacgtacaccaagggtt

SEQ ID NO: 4087 - DNA, 20 bp, Artificial Sequence
  chemically synthesized
aggaattgaacatatctttt

SEQ ID NO: 4088 - DNA, 20 bp, Artificial Sequence
  chemically synthesized
ggaattgaacatatcttttt

SEQ ID NO: 4089 - DNA, 20 bp, Artificial Sequence
  chemically synthesized
gaattgaacatatctttttg

SEQ ID NO: 4090 - DNA, 20 bp, Artificial Sequence
  chemically synthesized
aattgaacatatctttttgg

SEQ ID NO: 4091 - DNA, 20 bp, Artificial Sequence
  chemically synthesized
ggggacacaattcaacccac

SEQ ID NO: 4092 - DNA, 20 bp, Artificial Sequence
  chemically synthesized
acaattcaacccacaagtgt

SEQ ID NO: 4093 - DNA, 20 bp, Artificial Sequence
  chemically synthesized
aacccacaagtgtcagtctc

SEQ ID NO: 4094 - DNA, 20 bp, Artificial Sequence
  chemically synthesized
acaagtgtcagtctctagct

SEQ ID NO: 4095 - DNA, 20 bp, Artificial Sequence
  chemically synthesized
cttcctgtttttctcctttt

SEQ ID NO: 4096 - DNA, 20 bp, Artificial Sequence
  chemically synthesized
tttctcctttttagttgcta

SEQ ID NO: 4097 - DNA, 20 bp, Artificial Sequence
  chemically synthesized
ttctcctttttagttgctat

SEQ ID NO: 4098 - DNA, 20 bp, Artificial Sequence
  chemically synthesized
cctttttagttgctatgggt

SEQ ID NO: 4099 - DNA, 20 bp, Artificial Sequence
  chemically synthesized
ctttttagttgctatgggtt

SEQ ID NO: 4100 - DNA, 20 bp, Artificial Sequence
  chemically synthesized
tttttagttgctatgggtta

SEQ ID NO: 4101 - DNA, 20 bp, Artificial Sequence
  chemically synthesized
ttttagttgctatgggttag

SEQ ID NO: 4102 - DNA, 20 bp, Artificial Sequence
  chemically synthesized
tgggttaggggccaaatctc

SEQ ID NO: 4103 - DNA, 20 bp, Artificial Sequence
  chemically synthesized
ggccaaatctccagtcatac

SEQ ID NO: 4104 - DNA, 20 bp, Artificial Sequence
  chemically synthesized
agtcatactagaattgcaca

SEQ ID NO: 4105 - DNA, 20 bp, Artificial Sequence
  chemically synthesized
tactagaattgcacatggac

SEQ ID NO: 4106 - DNA, 20 bp, Artificial Sequence
  chemically synthesized
ttgcacatggactggatatt

SEQ ID NO: 4107 - DNA, 20 bp, Artificial Sequence
  chemically synthesized
tgcacatggactggatattt

SEQ ID NO: 4108 - DNA, 20 bp, Artificial Sequence
  chemically synthesized
ctggatatttgggaatactg

SEQ ID NO: 4109 - DNA, 20 bp, Artificial Sequence
  chemically synthesized
tggatatttgggaatactgc

SEQ ID NO: 4110 - DNA, 20 bp, Artificial Sequence
  chemically synthesized
atactgcgggtctattctat

SEQ ID NO: 4111 - DNA, 20 bp, Artificial Sequence
  chemically synthesized
cgggtctattctatgagctt

SEQ ID NO: 4112 - DNA, 20 bp, Artificial Sequence
  chemically synthesized
tagtatgtaacatttaatat

SEQ ID NO: 4113 - DNA, 20 bp, Artificial Sequence
  chemically synthesized
taacatttaatatcagtgta

SEQ ID NO: 4114 - DNA, 20 bp, Artificial Sequence
  chemically synthesized
catttaatatcagtgtaaag

SEQ ID NO: 4115 - DNA, 20 bp, Artificial Sequence
  chemically synthesized
gtgtaaagaagccctttttt

SEQ ID NO: 4116 - DNA, 20 bp, Artificial Sequence
  chemically synthesized
taaatgtatgccctgaatat

SEQ ID NO: 4117 - DNA, 20 bp, Artificial Sequence
  chemically synthesized
atgccctgaatataagtaac

SEQ ID NO: 4118 - DNA, 20 bp, Artificial Sequence
  chemically synthesized
ttaatgtgcacctactgtgc

SEQ ID NO: 4119 - DNA, 20 bp, Artificial Sequence
  chemically synthesized
gttgaatgtctttatcctga

SEQ ID NO: 4120 - DNA, 20 bp, Artificial Sequence
  chemically synthesized
ttgaatgtctttatcctgat

SEQ ID NO: 4121 - DNA, 20 bp, Artificial Sequence
  chemically synthesized
gaatgtctttatcctgatag

SEQ ID NO: 4122 - DNA, 20 bp, Artificial Sequence
  chemically synthesized
tttatcctgataggagataa

SEQ ID NO: 4123 - DNA, 20 bp, Artificial Sequence
  chemically synthesized
ttatcctgataggagataac

SEQ ID NO: 4124 - DNA, 20 bp, Artificial Sequence
  chemically synthesized
ggattccacatctttgactt

SEQ ID NO: 4125 - DNA, 20 bp, Artificial Sequence
  chemically synthesized
attccacatctttgacttaa

SEQ ID NO: 4126 - DNA, 20 bp, Artificial Sequence
  chemically synthesized
ttccacatctttgacttaag

SEQ ID NO: 4127 - DNA, 20 bp, Artificial Sequence
  chemically synthesized
ccaaatatgtctaaatcatt

SEQ ID NO: 4128 - DNA, 20 bp, Artificial Sequence
  chemically synthesized
caaatatgtctaaatcattt

SEQ ID NO: 4129 - DNA, 20 bp, Artificial Sequence
  chemically synthesized
aaatatgtctaaatcatttg

SEQ ID NO: 4130 - DNA, 20 bp, Artificial Sequence
  chemically synthesized
taaatcatttggggttttga

SEQ ID NO: 4131 - DNA, 20 bp, Artificial Sequence
  chemically synthesized
aaattgctgaacctaatcat

SEQ ID NO: 4132 - DNA, 20 bp, Artificial Sequence
  chemically synthesized
tggtttcatatgtcattgtt

SEQ ID NO: 4133 - DNA, 20 bp, Artificial Sequence
  chemically synthesized
tgtcattgtttagatatctc

SEQ ID NO: 4134 - DNA, 20 bp, Artificial Sequence
  chemically synthesized
tcattgtttagatatctccg

SEQ ID NO: 4135 - DNA, 20 bp, Artificial Sequence
  chemically synthesized
ttagatatctccggagcatt

SEQ ID NO: 4136 - DNA, 20 bp, Artificial Sequence
  chemically synthesized
ggagcatttggataatgtga

SEQ ID NO: 4137 - DNA, 20 bp, Artificial Sequence
  chemically synthesized
catttggataatgtgacagt

SEQ ID NO: 4138 - DNA, 20 bp, Artificial Sequence
  chemically synthesized
ataatgtgacagttggaatg

SEQ ID NO: 4139 - DNA, 20 bp, Artificial Sequence
  chemically synthesized
tctttgcccaccgccatctc

SEQ ID NO: 4140 - DNA, 20 bp, Artificial Sequence
  chemically synthesized
cgccatctccagctgttgcc

SEQ ID NO: 4141 - DNA, 20 bp, Artificial Sequence
  chemically synthesized
atctccagctgttgccaaga

SEQ ID NO: 4142 - DNA, 20 bp, Artificial Sequence
  chemically synthesized
ctccagctgttgccaagaca

SEQ ID NO: 4143 - DNA, 20 bp, Artificial Sequence
  chemically synthesized
gccaagacagagattgcttt

SEQ ID NO: 4144 - DNA, 20 bp, Artificial Sequence
  chemically synthesized
aagacagagattgctttaag

SEQ ID NO: 4145 - DNA, 20 bp, Artificial Sequence
  chemically synthesized
aagtggcaaatcacctttat

SEQ ID NO: 4146 - DNA, 20 bp, Artificial Sequence
  chemically synthesized
tggcaaatcacctttattag

SEQ ID NO: 4147 - DNA, 20 bp, Artificial Sequence
  chemically synthesized
tagcagctacttttgcttac

SEQ ID NO: 4148 - DNA, 20 bp, Artificial Sequence
  chemically synthesized
agcagctacttttgcttact

SEQ ID NO: 4149 - DNA, 20 bp, Artificial Sequence
  chemically synthesized
gcttactgggacaatattct

SEQ ID NO: 4150 - DNA, 20 bp, Artificial Sequence
  chemically synthesized
tgggacaatattcttggtcc

SEQ ID NO: 4151 - DNA, 20 bp, Artificial Sequence
  chemically synthesized
ggacaatattcttggtccta

SEQ ID NO: 4152 - DNA, 20 bp, Artificial Sequence
  chemically synthesized
aatattcttggtcctagagt

SEQ ID NO: 4153 - DNA, 20 bp, Artificial Sequence
  chemically synthesized
atattcttggtcctagagta

SEQ ID NO: 4154 - DNA, 20 bp, Artificial Sequence
  chemically synthesized
gtcctagagtaaggcacatt

SEQ ID NO: 4155 - DNA, 20 bp, Artificial Sequence
  chemically synthesized
tcctagagtaaggcacattt

SEQ ID NO: 4156 - DNA, 20 bp, Artificial Sequence
  chemically synthesized
taaggcacatttgggctcca

SEQ ID NO: 4157 - DNA, 20 bp, Artificial Sequence
  chemically synthesized
gcacatttgggctccaaaga

SEQ ID NO: 4158 - DNA, 20 bp, Artificial Sequence
  chemically synthesized
tttgggctccaaagacagaa

SEQ ID NO: 4159 - DNA, 20 bp, Artificial Sequence
  chemically synthesized
ttgggctccaaagacagaac

SEQ ID NO: 4160 - DNA, 20 bp, Artificial Sequence
  chemically synthesized
aagacagaacaggtacttct

SEQ ID NO: 4161 - DNA, 20 bp, Artificial Sequence
  chemically synthesized
gaacaggtacttctcagtga

SEQ ID NO: 4162 - DNA, 20 bp, Artificial Sequence
  chemically synthesized
acaggtacttctcagtgatg

SEQ ID NO: 4163 - DNA, 20 bp, Artificial Sequence
  chemically synthesized
cttgccaaccacactctaaa

SEQ ID NO: 4164 - DNA, 20 bp, Artificial Sequence
  chemically synthesized
tgccaaccacactctaaatg

SEQ ID NO: 4165 - DNA, 20 bp, Artificial Sequence
  chemically synthesized
tggagaaatccttcgaaatg

SEQ ID NO: 4166 - DNA, 20 bp, Artificial Sequence
  chemically synthesized
gagaaatccttcgaaatgca

SEQ ID NO: 4167 - DNA, 20 bp, Artificial Sequence
  chemically synthesized
gaaatccttcgaaatgcaga

SEQ ID NO: 4168 - DNA, 20 bp, Artificial Sequence
  chemically synthesized
atccttcgaaatgcagagag

SEQ ID NO: 4169 - DNA, 20 bp, Artificial Sequence
  chemically synthesized
aaatgcagagagtggtgcta

SEQ ID NO: 4170 - DNA, 20 bp, Artificial Sequence
  chemically synthesized
agagtggtgctatagatgta

SEQ ID NO: 4171 - DNA, 20 bp, Artificial Sequence
  chemically synthesized
agttttttgtcttgtctgaa

SEQ ID NO: 4172 - DNA, 20 bp, Artificial Sequence
  chemically synthesized
gttttttgtcttgtctgaaa

SEQ ID NO: 4173 - DNA, 20 bp, Artificial Sequence
  chemically synthesized
ttttttgtcttgtctgaaaa

SEQ ID NO: 4174 - DNA, 20 bp, Artificial Sequence
  chemically synthesized
ttttgtcttgtctgaaaagg

SEQ ID NO: 4175 - DNA, 20 bp, Artificial Sequence
  chemically synthesized
attgtttcattaatctttga

SEQ ID NO: 4176 - DNA, 20 bp, Artificial Sequence
  chemically synthesized
cattaatctttgatggaaac

SEQ ID NO: 4177 - DNA, 20 bp, Artificial Sequence
  chemically synthesized
atctttgatggaaactggaa

SEQ ID NO: 4178 - DNA, 20 bp, Artificial Sequence
  chemically synthesized
tctttgatggaaactggaat

SEQ ID NO: 4179 - DNA, 20 bp, Artificial Sequence
  chemically synthesized
ctttgatggaaactggaatg

SEQ ID NO: 4180 - DNA, 20 bp, Artificial Sequence
  chemically synthesized
ggaaactggaatggggatcg

SEQ ID NO: 4181 - DNA, 20 bp, Artificial Sequence
  chemically synthesized
aatggggatcgcagcacata

SEQ ID NO: 4182 - DNA, 20 bp, Artificial Sequence
  chemically synthesized
gactatcaattatacttcca

SEQ ID NO: 4183 - DNA, 20 bp, Artificial Sequence
  chemically synthesized
atcaattatacttccacaga

SEQ ID NO: 4184 - DNA, 20 bp, Artificial Sequence
  chemically synthesized
atacttccacagacagaact

SEQ ID NO: 4185 - DNA, 20 bp, Artificial Sequence
  chemically synthesized
agtttctacctcccacttca

SEQ ID NO: 4186 - DNA, 20 bp, Artificial Sequence
  chemically synthesized
tttctacctcccacttcata

SEQ ID NO: 4187 - DNA, 20 bp, Artificial Sequence
  chemically synthesized
cttcatagagtgtgtgttga

SEQ ID NO: 4188 - DNA, 20 bp, Artificial Sequence
  chemically synthesized
atagattaacacatataatc

SEQ ID NO: 4189 - DNA, 20 bp, Artificial Sequence
  chemically synthesized
attaacacatataatccgga

SEQ ID NO: 4190 - DNA, 20 bp, Artificial Sequence
  chemically synthesized
ttaacacatataatccggaa

SEQ ID NO: 4191 - DNA, 20 bp, Artificial Sequence
  chemically synthesized
acacatataatccggaaagg

SEQ ID NO: 4192 - DNA, 20 bp, Artificial Sequence
  chemically synthesized
taatccggaaaggaagaata

SEQ ID NO: 4193 - DNA, 20 bp, Artificial Sequence
  chemically synthesized
aaggaagaatatggatgcat

SEQ ID NO: 4194 - DNA, 20 bp, Artificial Sequence
  chemically synthesized
aggaagaatatggatgcata

SEQ ID NO: 4195 - DNA, 20 bp, Artificial Sequence
  chemically synthesized
agaatatggatgcataaggt

SEQ ID NO: 4196 - DNA, 20 bp, Artificial Sequence
  chemically synthesized
gcataaggtaagtgattttt

SEQ ID NO: 4197 - DNA, 20 bp, Artificial Sequence
  chemically synthesized
catgttaacctatctgttga

SEQ ID NO: 4198 - DNA, 20 bp, Artificial Sequence
  chemically synthesized
tctgttgaaagcttattttc

SEQ ID NO: 4199 - DNA, 20 bp, Artificial Sequence
  chemically synthesized
cttatttttttaattatatg

SEQ ID NO: 4200 - DNA, 20 bp, Artificial Sequence
  chemically synthesized
ttattttgcatttaccctat

SEQ ID NO: 4201 - DNA, 20 bp, Artificial Sequence
  chemically synthesized
ctattagatacaaatacatc

SEQ ID NO: 4202 - DNA, 20 bp, Artificial Sequence
  chemically synthesized
tgtcatcttcatattaactg

SEQ ID NO: 4203 - DNA, 20 bp, Artificial Sequence
  chemically synthesized
catcttcatattaactgtgg

SEQ ID NO: 4204 - DNA, 20 bp, Artificial Sequence
  chemically synthesized
atcttcatattaactgtgga

SEQ ID NO: 4205 - DNA, 20 bp, Artificial Sequence
  chemically synthesized
taactgtggaaggtacgaaa

SEQ ID NO: 4206 - DNA, 20 bp, Artificial Sequence
  chemically synthesized
ctgtggaaggtacgaaatgg

SEQ ID NO: 4207 - DNA, 20 bp, Artificial Sequence
  chemically synthesized
gaaatggtagctccacatta

SEQ ID NO: 4208 - DNA, 20 bp, Artificial Sequence
  chemically synthesized
agctccacattatagatgaa

SEQ ID NO: 4209 - DNA, 20 bp, Artificial Sequence
  chemically synthesized
acattatagatgaaaagcta

SEQ ID NO: 4210 - DNA, 20 bp, Artificial Sequence
  chemically synthesized
atagatgaaaagctaaagct

SEQ ID NO: 4211 - DNA, 20 bp, Artificial Sequence
  chemically synthesized
agctaaagcttagacaaata

SEQ ID NO: 4212 - DNA, 20 bp, Artificial Sequence
  chemically synthesized
tagacaaataaagaaacttt

SEQ ID NO: 4213 - DNA, 20 bp, Artificial Sequence
  chemically synthesized
ataaagaaacttttagaccc

SEQ ID NO: 4214 - DNA, 20 bp, Artificial Sequence
  chemically synthesized
tttagaccctggattcttct

SEQ ID NO: 4215 - DNA, 20 bp, Artificial Sequence
  chemically synthesized
ttagaccctggattcttctt

SEQ ID NO: 4216 - DNA, 20 bp, Artificial Sequence
  chemically synthesized
agaccctggattcttcttgg

SEQ ID NO: 4217 - DNA, 20 bp, Artificial Sequence
  chemically synthesized
ttttgcttactactatgtgt

SEQ ID NO: 4218 - DNA, 20 bp, Artificial Sequence
  chemically synthesized
actactatgtgtaagtataa

SEQ ID NO: 4219 - DNA, 20 bp, Artificial Sequence
  chemically synthesized
tgtgtaagtataacagttca

SEQ ID NO: 4220 - DNA, 20 bp, Artificial Sequence
  chemically synthesized
agtataacagttcaaagtaa

SEQ ID NO: 4221 - DNA, 20 bp, Artificial Sequence
  chemically synthesized
gttcaaagtaatagtttcat

SEQ ID NO: 4222 - DNA, 20 bp, Artificial Sequence
  chemically synthesized
gtaatagtttcataagctgt

SEQ ID NO: 4223 - DNA, 20 bp, Artificial Sequence
  chemically synthesized
ttcataagctgttggtcatg

SEQ ID NO: 4224 - DNA, 20 bp, Artificial Sequence
  chemically synthesized
gctgttggtcatgtagcctt

SEQ ID NO: 4225 - DNA, 20 bp, Artificial Sequence
  chemically synthesized
gtctctttaacctctttgcc

SEQ ID NO: 4226 - DNA, 20 bp, Artificial Sequence
  chemically synthesized
taacctctttgccaagttcc

SEQ ID NO: 4227 - DNA, 20 bp, Artificial Sequence
  chemically synthesized
aacctctttgccaagttccc

SEQ ID NO: 4228 - DNA, 20 bp, Artificial Sequence
  chemically synthesized
agttcccaggttcataaaat

SEQ ID NO: 4229 - DNA, 20 bp, Artificial Sequence
  chemically synthesized
gttcccaggttcataaaatg

SEQ ID NO: 4230 - DNA, 20 bp, Artificial Sequence
  chemically synthesized
tcccaggttcataaaatgag

SEQ ID NO: 4231 - DNA, 20 bp, Artificial Sequence
  chemically synthesized
cccaggttcataaaatgagg

SEQ ID NO: 4232 - DNA, 20 bp, Artificial Sequence
  chemically synthesized
cataaaatgaggaggttgaa

SEQ ID NO: 4233 - DNA, 20 bp, Artificial Sequence
  chemically synthesized
aatgaggaggttgaatggaa

SEQ ID NO: 4234 - DNA, 20 bp, Artificial Sequence
  chemically synthesized
ggttgaatggaatggttccc

SEQ ID NO: 4235 - DNA, 20 bp, Artificial Sequence
  chemically synthesized
ttgaatggaatggttcccaa

SEQ ID NO: 4236 - DNA, 20 bp, Artificial Sequence
  chemically synthesized
gagaattccttttaatctta

SEQ ID NO: 4237 - DNA, 20 bp, Artificial Sequence
  chemically synthesized
tattgttttcctaaatcctg

SEQ ID NO: 4238 - DNA, 20 bp, Artificial Sequence
  chemically synthesized
atataatgctatttacattt

SEQ ID NO: 4239 - DNA, 20 bp, Artificial Sequence
  chemically synthesized
atgctatttacatttcagta

SEQ ID NO: 4240 - DNA, 20 bp, Artificial Sequence
  chemically synthesized
gtatagttttgatgtatcta

SEQ ID NO: 4241 - DNA, 20 bp, Artificial Sequence
  chemically synthesized
gaattctccttcctgtgttc

SEQ ID NO: 4242 - DNA, 20 bp, Artificial Sequence
  chemically synthesized
ccagtttgatactaacctga

SEQ ID NO: 4243 - DNA, 20 bp, Artificial Sequence
  chemically synthesized
tactaacctgaaagtccatt

SEQ ID NO: 4244 - DNA, 20 bp, Artificial Sequence
  chemically synthesized
gaaagtccattaagcattac

SEQ ID NO: 4245 - DNA, 20 bp, Artificial Sequence
  chemically synthesized
ttaagcattaccagttttaa

SEQ ID NO: 4246 - DNA, 20 bp, Artificial Sequence
  chemically synthesized
taagcattaccagttttaaa

SEQ ID NO: 4247 - DNA, 20 bp, Artificial Sequence
  chemically synthesized
tttaaaaggcttttgcccaa

SEQ ID NO: 4248 - DNA, 20 bp, Artificial Sequence
  chemically synthesized
aaaggcttttgcccaatagt

SEQ ID NO: 4249 - DNA, 20 bp, Artificial Sequence
  chemically synthesized
aaggcttttgcccaatagta

SEQ ID NO: 4250 - DNA, 20 bp, Artificial Sequence
  chemically synthesized
ggaaaaataatatcttttaa

SEQ ID NO: 4251 - DNA, 20 bp, Artificial Sequence
  chemically synthesized
ataattttttactatgtttg

SEQ ID NO: 4252 - DNA, 20 bp, Artificial Sequence
  chemically synthesized
taattttttactatgtttgc

SEQ ID NO: 4253 - DNA, 20 bp, Artificial Sequence
  chemically synthesized
cattatgaaactcttaaaat

SEQ ID NO: 4254 - DNA, 20 bp, Artificial Sequence
  chemically synthesized
attatgaaactcttaaaatc

SEQ ID NO: 4255 - DNA, 20 bp, Artificial Sequence
  chemically synthesized
tatgaaactcttaaaatcag

SEQ ID NO: 4256 - DNA, 20 bp, Artificial Sequence
  chemically synthesized
atcataatgtttaatttgaa

SEQ ID NO: 4257 - DNA, 20 bp, Artificial Sequence
  chemically synthesized
atgtttaatttgaaaagtgc

SEQ ID NO: 4258 - DNA, 20 bp, Artificial Sequence
  chemically synthesized
ttttcctttttgaaactatg

SEQ ID NO: 4259 - DNA, 20 bp, Artificial Sequence
  chemically synthesized
tacattgactgttttctgtg

SEQ ID NO: 4260 - DNA, 20 bp, Artificial Sequence
  chemically synthesized
aagttatctttttttcactg

SEQ ID NO: 4261 - DNA, 20 bp, Artificial Sequence
  chemically synthesized
ctttttttcactgcagaata

SEQ ID NO: 4262 - DNA, 20 bp, Artificial Sequence
  chemically synthesized
tttttttcactgcagaataa

SEQ ID NO: 4263 - DNA, 20 bp, Artificial Sequence
  chemically synthesized
ttttattttgtattgtttat

SEQ ID NO: 4264 - DNA, 20 bp, Artificial Sequence
  chemically synthesized
ttatgagaacatgcatttgt

SEQ ID NO: 4265 - DNA, 20 bp, Artificial Sequence
  chemically synthesized
tatgagaacatgcatttgtt

SEQ ID NO: 4266 - DNA, 20 bp, Artificial Sequence
  chemically synthesized
ctgcccccattttttcccta

SEQ ID NO: 4267 - DNA, 20 bp, Artificial Sequence
  chemically synthesized
cccccattttttccctaaag

SEQ ID NO: 4268 - DNA, 20 bp, Artificial Sequence
  chemically synthesized
cattttttccctaaagtaga

SEQ ID NO: 4269 - DNA, 20 bp, Artificial Sequence
  chemically synthesized
tgtgaactaaattactacac

SEQ ID NO: 4270 - DNA, 20 bp, Artificial Sequence
  chemically synthesized
gaacatgtctattgaaaaat

SEQ ID NO: 4271 - DNA, 20 bp, Artificial Sequence
  chemically synthesized
atgtctattgaaaaataagc

SEQ ID NO: 4272 - DNA, 20 bp, Artificial Sequence
  chemically synthesized
aagcaagtatcaaaatgttg

SEQ ID NO: 4273 - DNA, 20 bp, Artificial Sequence
  chemically synthesized
agcaagtatcaaaatgttgt

SEQ ID NO: 4274 - DNA, 20 bp, Artificial Sequence
  chemically synthesized
taaataaattttctcttgct

SEQ ID NO: 4275 - DNA, 20 bp, Artificial Sequence
  chemically synthesized
aaataaattttctcttgctc

SEQ ID NO: 4276 - DNA, 20 bp, Artificial Sequence
  chemically synthesized
aaattttctcttgctcagga

SEQ ID NO: 4277 - DNA, 20 bp, Artificial Sequence
  chemically synthesized
ttctcttgctcaggaaagac

SEQ ID NO: 4278 - DNA, 20 bp, Artificial Sequence
  chemically synthesized
aggaaagacaagaaaatgtc

SEQ ID NO: 4279 - DNA, 20 bp, Artificial Sequence
  chemically synthesized
aaagacaagaaaatgtccag

SEQ ID NO: 4280 - DNA, 20 bp, Artificial Sequence
  chemically synthesized
aaatgtccagaagattatct

SEQ ID NO: 4281 - DNA, 20 bp, Artificial Sequence
  chemically synthesized
tgtccagaagattatcttag

SEQ ID NO: 4282 - DNA, 20 bp, Artificial Sequence
  chemically synthesized
gtccagaagattatcttaga

SEQ ID NO: 4283 - DNA, 20 bp, Artificial Sequence
  chemically synthesized
gaagattatcttagaaggca

SEQ ID NO: 4284 - DNA, 20 bp, Artificial Sequence
  chemically synthesized
agattatcttagaaggcaca

SEQ ID NO: 4285 - DNA, 20 bp, Artificial Sequence
  chemically synthesized
attatcttagaaggcacaga

SEQ ID NO: 4286 - DNA, 20 bp, Artificial Sequence
  chemically synthesized
cttagaaggcacagagagaa

SEQ ID NO: 4287 - DNA, 20 bp, Artificial Sequence
  chemically synthesized
agaaggcacagagagaatgg

SEQ ID NO: 4288 - DNA, 20 bp, Artificial Sequence
  chemically synthesized
gcacagagagaatggaagat

SEQ ID NO: 4289 - DNA, 20 bp, Artificial Sequence
  chemically synthesized
cacagagagaatggaagatc

SEQ ID NO: 4290 - DNA, 20 bp, Artificial Sequence
  chemically synthesized
actgtcaaatgtttttctca

SEQ ID NO: 4291 - DNA, 20 bp, Artificial Sequence
  chemically synthesized
ctcacagcatgtatctgtat

SEQ ID NO: 4292 - DNA, 20 bp, Artificial Sequence
  chemically synthesized
tcacagcatgtatctgtata

SEQ ID NO: 4293 - DNA, 20 bp, Artificial Sequence
  chemically synthesized
atgtatctgtataaggttga

SEQ ID NO: 4294 - DNA, 20 bp, Artificial Sequence
  chemically synthesized
ggttgatggctacatttgtc

SEQ ID NO: 4295 - DNA, 20 bp, Artificial Sequence
  chemically synthesized
gttgatggctacatttgtca

SEQ ID NO: 4296 - DNA, 20 bp, Artificial Sequence
  chemically synthesized
ggctacatttgtcaaggcct

SEQ ID NO: 4297 - DNA, 20 bp, Artificial Sequence
  chemically synthesized
ctacatttgtcaaggccttg

SEQ ID NO: 4298 - DNA, 20 bp, Artificial Sequence
  chemically synthesized
ggccttggagacatacgaat

SEQ ID NO: 4299 - DNA, 20 bp, Artificial Sequence
  chemically synthesized
acatacgaataagcctttaa

SEQ ID NO: 4300 - DNA, 20 bp, Artificial Sequence
  chemically synthesized
atacgaataagcctttaatg

SEQ ID NO: 4301 - DNA, 20 bp, Artificial Sequence
  chemically synthesized
agcctttaatggagctttta

SEQ ID NO: 4302 - DNA, 20 bp, Artificial Sequence
  chemically synthesized
cctttaatggagcttttatg

SEQ ID NO: 4303 - DNA, 20 bp, Artificial Sequence
  chemically synthesized
ctttaatggagcttttatgg

SEQ ID NO: 4304 - DNA, 20 bp, Artificial Sequence
  chemically synthesized
ggagcttttatggaggtgta

SEQ ID NO: 4305 - DNA, 20 bp, Artificial Sequence
  chemically synthesized
tggaggtgtacagaataaac

SEQ ID NO: 4306 - DNA, 20 bp, Artificial Sequence
  chemically synthesized
gaggtgtacagaataaactg

SEQ ID NO: 4307 - DNA, 20 bp, Artificial Sequence
  chemically synthesized
aggtgtacagaataaactgg

SEQ ID NO: 4308 - DNA, 20 bp, Artificial Sequence
  chemically synthesized
tgtacagaataaactggagg

SEQ ID NO: 4309 - DNA, 20 bp, Artificial Sequence
  chemically synthesized
atttccatatcttaaaccca

SEQ ID NO: 4310 - DNA, 20 bp, Artificial Sequence
  chemically synthesized
ttccatatcttaaacccaaa

SEQ ID NO: 4311 - DNA, 20 bp, Artificial Sequence
  chemically synthesized
ttaaacccaaagagttaaat

SEQ ID NO: 4312 - DNA, 20 bp, Artificial Sequence
  chemically synthesized
aagagttaaatcagtaaaca

SEQ ID NO: 4313 - DNA, 20 bp, Artificial Sequence
  chemically synthesized
agagttaaatcagtaaacaa

SEQ ID NO: 4314 - DNA, 20 bp, Artificial Sequence
  chemically synthesized
aatcagtaaacaaaggaaaa

SEQ ID NO: 4315 - DNA, 20 bp, Artificial Sequence
  chemically synthesized
cctttttttttctgtttgcc

SEQ ID NO: 4316 - DNA, 20 bp, Artificial Sequence
  chemically synthesized
tgtttgcccagaataaattt

SEQ ID NO: 4317 - DNA, 20 bp, Artificial Sequence
  chemically synthesized
aattttggataacttgttca

SEQ ID NO: 4318 - DNA, 20 bp, Artificial Sequence
  chemically synthesized
ttgtctctgatatgttcttt

SEQ ID NO: 4319 - DNA, 20 bp, Artificial Sequence
  chemically synthesized
tgtctctgatatgttcttta

SEQ ID NO: 4320 - DNA, 20 bp, Artificial Sequence
  chemically synthesized
ctacttctcgaacctttccc

SEQ ID NO: 4321 - DNA, 20 bp, Artificial Sequence
  chemically synthesized
cttctcgaacctttccctag

SEQ ID NO: 4322 - DNA, 20 bp, Artificial Sequence
  chemically synthesized
ctcgaacctttccctagaag

SEQ ID NO: 4323 - DNA, 20 bp, Artificial Sequence
  chemically synthesized
ttccctagaagtagctgtaa

SEQ ID NO: 4324 - DNA, 20 bp, Artificial Sequence
  chemically synthesized
cctagaagtagctgtaacag

SEQ ID NO: 4325 - DNA, 20 bp, Artificial Sequence
  chemically synthesized
ctagaagtagctgtaacaga

SEQ ID NO: 4326 - DNA, 20 bp, Artificial Sequence
  chemically synthesized
agaagtagctgtaacagaag

SEQ ID NO: 4327 - DNA, 20 bp, Artificial Sequence
  chemically synthesized
aagtagctgtaacagaagga

SEQ ID NO: 4328 - DNA, 20 bp, Artificial Sequence
  chemically synthesized
aggagagcatatgtacccct

SEQ ID NO: 4329 - DNA, 20 bp, Artificial Sequence
  chemically synthesized
ggagagcatatgtacccctg

SEQ ID NO: 4330 - DNA, 20 bp, Artificial Sequence
  chemically synthesized
gtacccctgaggtatctgtc

SEQ ID NO: 4331 - DNA, 20 bp, Artificial Sequence
  chemically synthesized
tacccctgaggtatctgtct

SEQ ID NO: 4332 - DNA, 20 bp, Artificial Sequence
  chemically synthesized
acccctgaggtatctgtctg

SEQ ID NO: 4333 - DNA, 20 bp, Artificial Sequence
  chemically synthesized
tgaggtatctgtctggggtg

SEQ ID NO: 4334 - DNA, 20 bp, Artificial Sequence
  chemically synthesized
gaggtatctgtctggggtgt

SEQ ID NO: 4335 - DNA, 20 bp, Artificial Sequence
  chemically synthesized
atctgtctggggtgtaggcc

SEQ ID NO: 4336 - DNA, 20 bp, Artificial Sequence
  chemically synthesized
tctgtctggggtgtaggccc

SEQ ID NO: 4337 - DNA, 20 bp, Artificial Sequence
  chemically synthesized
gtccacacaatatttcttct

SEQ ID NO: 4338 - DNA, 20 bp, Artificial Sequence
  chemically synthesized
aagtcttatgttgtatcgtt

SEQ ID NO: 4339 - DNA, 20 bp, Artificial Sequence
  chemically synthesized
attttattccataactattt

SEQ ID NO: 4340 - DNA, 20 bp, Artificial Sequence
  chemically synthesized
attttagtattaaaatttgt

SEQ ID NO: 4341 - DNA, 20 bp, Artificial Sequence
  chemically synthesized
atatttcttaccctctcctc

SEQ ID NO: 4342 - DNA, 20 bp, Artificial Sequence
  chemically synthesized
tatttcttaccctctcctct

SEQ ID NO: 4343 - DNA, 20 bp, Artificial Sequence
  chemically synthesized
aatgtgccatgtttatccct

SEQ ID NO: 4344 - DNA, 20 bp, Artificial Sequence
  chemically synthesized
ccttggctttgaatgcccct

SEQ ID NO: 4345 - DNA, 20 bp, Artificial Sequence
  chemically synthesized
cttggctttgaatgcccctc

SEQ ID NO: 4346 - DNA, 20 bp, Artificial Sequence
  chemically synthesized
ctttgaatgcccctcaggaa

SEQ ID NO: 4347 - DNA, 20 bp, Artificial Sequence
  chemically synthesized
gcccctcaggaacagacact

SEQ ID NO: 4348 - DNA, 20 bp, Artificial Sequence
  chemically synthesized
ccctcaggaacagacactaa

SEQ ID NO: 4349 - DNA, 20 bp, Artificial Sequence
  chemically synthesized
ggaacagacactaagagttt

SEQ ID NO: 4350 - DNA, 20 bp, Artificial Sequence
  chemically synthesized
acagacactaagagtttgag

SEQ ID NO: 4351 - DNA, 20 bp, Artificial Sequence
  chemically synthesized
cactaagagtttgagaagca

SEQ ID NO: 4352 - DNA, 20 bp, Artificial Sequence
  chemically synthesized
agtttgagaagcatggttac

SEQ ID NO: 4353 - DNA, 20 bp, Artificial Sequence
  chemically synthesized
gtttgagaagcatggttaca

SEQ ID NO: 4354 - DNA, 20 bp, Artificial Sequence
  chemically synthesized
tttgagaagcatggttacaa

SEQ ID NO: 4355 - DNA, 20 bp, Artificial Sequence
  chemically synthesized
gaagcatggttacaagggtg

SEQ ID NO: 4356 - DNA, 20 bp, Artificial Sequence
  chemically synthesized
caagggtgtggcttcccctg

SEQ ID NO: 4357 - DNA, 20 bp, Artificial Sequence
  chemically synthesized
tggcttcccctgcggaaact

SEQ ID NO: 4358 - DNA, 20 bp, Artificial Sequence
  chemically synthesized
tcccctgcggaaactaagta

SEQ ID NO: 4359 - DNA, 20 bp, Artificial Sequence
  chemically synthesized
gtacagactatttcactgta

SEQ ID NO: 4360 - DNA, 20 bp, Artificial Sequence
  chemically synthesized
cagactatttcactgtaaag

SEQ ID NO: 4361 - DNA, 20 bp, Artificial Sequence
  chemically synthesized
gactatttcactgtaaagca

SEQ ID NO: 4362 - DNA, 20 bp, Artificial Sequence
  chemically synthesized
tatttcactgtaaagcagag

SEQ ID NO: 4363 - DNA, 20 bp, Artificial Sequence
  chemically synthesized
aaagcagagaagttcttttg

SEQ ID NO: 4364 - DNA, 20 bp, Artificial Sequence
  chemically synthesized
aagcagagaagttcttttga

SEQ ID NO: 4365 - DNA, 20 bp, Artificial Sequence
  chemically synthesized
gcagagaagttcttttgaag

SEQ ID NO: 4366 - DNA, 20 bp, Artificial Sequence
  chemically synthesized
ttcttttgaaggagaatctc

SEQ ID NO: 4367 - DNA, 20 bp, Artificial Sequence
  chemically synthesized
ttgaaggagaatctccagtg

SEQ ID NO: 4368 - DNA, 20 bp, Artificial Sequence
  chemically synthesized
aggagaatctccagtgaaga

SEQ ID NO: 4369 - DNA, 20 bp, Artificial Sequence
  chemically synthesized
gagaatctccagtgaagaaa

SEQ ID NO: 4370 - DNA, 20 bp, Artificial Sequence
  chemically synthesized
tttacttccatttcctcttg

SEQ ID NO: 4371 - DNA, 20 bp, Artificial Sequence
  chemically synthesized
ttacttccatttcctcttgt

SEQ ID NO: 4372 - DNA, 20 bp, Artificial Sequence
  chemically synthesized
aaactccaatattttaaaca

SEQ ID NO: 4373 - DNA, 20 bp, Artificial Sequence
  chemically synthesized
tgcctttctttgcttctttt

SEQ ID NO: 4374 - DNA, 20 bp, Artificial Sequence
  chemically synthesized
tgcttctttttagcatgaat

SEQ ID NO: 4375 - DNA, 20 bp, Artificial Sequence
  chemically synthesized
tctttttagcatgaatgaga

SEQ ID NO: 4376 - DNA, 20 bp, Artificial Sequence
  chemically synthesized
agacagatgatactttaaaa

SEQ ID NO: 4377 - DNA, 20 bp, Artificial Sequence
  chemically synthesized
aaaaaacttgtgaaaataca

SEQ ID NO: 4378 - DNA, 20 bp, Artificial Sequence
  chemically synthesized
gaaaatacatggccataata

SEQ ID NO: 4379 - DNA, 20 bp, Artificial Sequence
  chemically synthesized
ttgttatgtttgtacttttg

SEQ ID NO: 4380 - DNA, 20 bp, Artificial Sequence
  chemically synthesized
tatgtttgtacttttgtaga

SEQ ID NO: 4381 - DNA, 20 bp, Artificial Sequence
  chemically synthesized
ttgtagatagctttccaatt

SEQ ID NO: 4382 - DNA, 20 bp, Artificial Sequence
  chemically synthesized
gtagatagctttccaattca

SEQ ID NO: 4383 - DNA, 20 bp, Artificial Sequence
  chemically synthesized
atagctttccaattcagaga

SEQ ID NO: 4384 - DNA, 20 bp, Artificial Sequence
  chemically synthesized
agagacagttattctgtgta

SEQ ID NO: 4385 - DNA, 20 bp, Artificial Sequence
  chemically synthesized
gagacagttattctgtgtaa

SEQ ID NO: 4386 - DNA, 20 bp, Artificial Sequence
  chemically synthesized
gtgtaaaggtctgacttaac

SEQ ID NO: 4387 - DNA, 20 bp, Artificial Sequence
  chemically synthesized
aaggtctgacttaacaagaa

SEQ ID NO: 4388 - DNA, 20 bp, Artificial Sequence
  chemically synthesized
aaaagatttccctttaccca

SEQ ID NO: 4389 - DNA, 20 bp, Artificial Sequence
  chemically synthesized
tccctttacccaaagaatcc

SEQ ID NO: 4390 - DNA, 20 bp, Artificial Sequence
  chemically synthesized
gaatcccagtccttatttgc

SEQ ID NO: 4391 - DNA, 20 bp, Artificial Sequence
  chemically synthesized
gtccttatttgctggtcaat

SEQ ID NO: 4392 - DNA, 20 bp, Artificial Sequence
  chemically synthesized
cttatttgctggtcaataag

SEQ ID NO: 4393 - DNA, 20 bp, Artificial Sequence
  chemically synthesized
ttatttgctggtcaataagc

SEQ ID NO: 4394 - DNA, 20 bp, Artificial Sequence
  chemically synthesized
tatttgctggtcaataagca

SEQ ID NO: 4395 - DNA, 20 bp, Artificial Sequence
  chemically synthesized
tggtcaataagcagggtccc

SEQ ID NO: 4396 - DNA, 20 bp, Artificial Sequence
  chemically synthesized
ggtcaataagcagggtcccc

SEQ ID NO: 4397 - DNA, 20 bp, Artificial Sequence
  chemically synthesized
ataagcagggtccccaggaa

SEQ ID NO: 4398 - DNA, 20 bp, Artificial Sequence
  chemically synthesized
taagcagggtccccaggaat

SEQ ID NO: 4399 - DNA, 20 bp, Artificial Sequence
  chemically synthesized
aagcagggtccccaggaatg

SEQ ID NO: 4400 - DNA, 20 bp, Artificial Sequence
  chemically synthesized
cccaggaatggggtaacttt

SEQ ID NO: 4401 - DNA, 20 bp, Artificial Sequence
  chemically synthesized
ttcagcaccctctaacccac

SEQ ID NO: 4402 - DNA, 20 bp, Artificial Sequence
  chemically synthesized
ccctctaacccactagttat

SEQ ID NO: 4403 - DNA, 20 bp, Artificial Sequence
  chemically synthesized
tctaacccactagttattag

SEQ ID NO: 4404 - DNA, 20 bp, Artificial Sequence
  chemically synthesized
tagttattagtagactaatt

SEQ ID NO: 4405 - DNA, 20 bp, Artificial Sequence
  chemically synthesized
taattaagtaaacttatcgc

SEQ ID NO: 4406 - DNA, 20 bp, Artificial Sequence
  chemically synthesized
aagtaaacttatcgcaagtt

SEQ ID NO: 4407 - DNA, 20 bp, Artificial Sequence
  chemically synthesized
agtaaacttatcgcaagttg

SEQ ID NO: 4408 - DNA, 20 bp, Artificial Sequence
  chemically synthesized
tatcgcaagttgaggaaact

SEQ ID NO: 4409 - DNA, 20 bp, Artificial Sequence
  chemically synthesized
aactaaaattctgcttttac

SEQ ID NO: 4410 - DNA, 20 bp, Artificial Sequence
  chemically synthesized
actaaaattctgcttttact

SEQ ID NO: 4411 - DNA, 20 bp, Artificial Sequence
  chemically synthesized
gggattttgttttttcaaac

SEQ ID NO: 4412 - DNA, 20 bp, Artificial Sequence
  chemically synthesized
caaaccagaaacctttactt

SEQ ID NO: 4413 - DNA, 20 bp, Artificial Sequence
  chemically synthesized
tgactactattaatgaattt

SEQ ID NO: 4414 - DNA, 20 bp, Artificial Sequence
  chemically synthesized
tgaattttggtctctctttt

SEQ ID NO: 4415 - DNA, 20 bp, Artificial Sequence
  chemically synthesized
aaaaatgttatcttactgct

SEQ ID NO: 4416 - DNA, 20 bp, Artificial Sequence
  chemically synthesized
aatgttatcttactgctgag

SEQ ID NO: 4417 - DNA, 20 bp, Artificial Sequence
  chemically synthesized
atcttactgctgagaagttc

SEQ ID NO: 4418 - DNA, 20 bp, Artificial Sequence
  chemically synthesized
actgctgagaagttcaagtt

SEQ ID NO: 4419 - DNA, 20 bp, Artificial Sequence
  chemically synthesized
ctgctgagaagttcaagttt

SEQ ID NO: 4420 - DNA, 20 bp, Artificial Sequence
  chemically synthesized
ctgagaagttcaagtttggg

SEQ ID NO: 4421 - DNA, 20 bp, Artificial Sequence
  chemically synthesized
agttcaagtttgggaagtac

SEQ ID NO: 4422 - DNA, 20 bp, Artificial Sequence
  chemically synthesized
gttcaagtttgggaagtaca

SEQ ID NO: 4423 - DNA, 20 bp, Artificial Sequence
  chemically synthesized
tcaagtttgggaagtacaag

SEQ ID NO: 4424 - DNA, 20 bp, Artificial Sequence
  chemically synthesized
caagtttgggaagtacaagg

SEQ ID NO: 4425 - DNA, 20 bp, Artificial Sequence
  chemically synthesized
ttgggaagtacaaggaggaa

SEQ ID NO: 4426 - DNA, 20 bp, Artificial Sequence
  chemically synthesized
acaaggaggaatagaaactt

SEQ ID NO: 4427 - DNA, 20 bp, Artificial Sequence
  chemically synthesized
aaggaggaatagaaacttaa

SEQ ID NO: 4428 - DNA, 20 bp, Artificial Sequence
  chemically synthesized
aaacttaagagattttcttt

SEQ ID NO: 4429 - DNA, 20 bp, Artificial Sequence
  chemically synthesized
acttaagagattttctttta

SEQ ID NO: 4430 - DNA, 20 bp, Artificial Sequence
  chemically synthesized
tttagagcctcttctgtatt

SEQ ID NO: 4431 - DNA, 20 bp, Artificial Sequence
  chemically synthesized
ctcttctgtatttagccctg

SEQ ID NO: 4432 - DNA, 20 bp, Artificial Sequence
  chemically synthesized
tcttctgtatttagccctgt

SEQ ID NO: 4433 - DNA, 20 bp, Artificial Sequence
  chemically synthesized
tttttttttttttttttttt

SEQ ID NO: 4434 - DNA, 20 bp, Artificial Sequence
  chemically synthesized
tttttttttttggtgttgtt

SEQ ID NO: 4435 - DNA, 20 bp, Artificial Sequence
  chemically synthesized
tttttggtgttgttgagctt

SEQ ID NO: 4436 - DNA, 20 bp, Artificial Sequence
  chemically synthesized
tggtgttgttgagcttcagt

SEQ ID NO: 4437 - DNA, 20 bp, Artificial Sequence
  chemically synthesized
ggtgttgttgagcttcagtg

SEQ ID NO: 4438 - DNA, 20 bp, Artificial Sequence
  chemically synthesized
cacttatactgataatgtct

SEQ ID NO: 4439 - DNA, 20 bp, Artificial Sequence
  chemically synthesized
tactatgtatgcttaaacct

SEQ ID NO: 4440 - DNA, 20 bp, Artificial Sequence
  chemically synthesized
ctatgtatgcttaaacctaa

SEQ ID NO: 4441 - DNA, 20 bp, Artificial Sequence
  chemically synthesized
tatgtatgcttaaacctaag

SEQ ID NO: 4442 - DNA, 20 bp, Artificial Sequence
  chemically synthesized
ccaaaattattcttcccgaa

SEQ ID NO: 4443 - DNA, 20 bp, Artificial Sequence
  chemically synthesized
caaaattattcttcccgaaa

SEQ ID NO: 4444 - DNA, 20 bp, Artificial Sequence
  chemically synthesized
aaattattcttcccgaaaag

SEQ ID NO: 4445 - DNA, 20 bp, Artificial Sequence
  chemically synthesized
aattattcttcccgaaaagg

SEQ ID NO: 4446 - DNA, 20 bp, Artificial Sequence
  chemically synthesized
ttattcttcccgaaaaggag

SEQ ID NO: 4447 - DNA, 20 bp, Artificial Sequence
  chemically synthesized
ggaggagttgccttttgatt

SEQ ID NO: 4448 - DNA, 20 bp, Artificial Sequence
  chemically synthesized
ttattttgaacaatactgtt

SEQ ID NO: 4449 - DNA, 20 bp, Artificial Sequence
  chemically synthesized
tattttgaacaatactgttt

SEQ ID NO: 4450 - DNA, 20 bp, Artificial Sequence
  chemically synthesized
attttgaacaatactgtttg

SEQ ID NO: 4451 - DNA, 20 bp, Artificial Sequence
  chemically synthesized
actgtttggggatgatgcat

SEQ ID NO: 4452 - DNA, 20 bp, Artificial Sequence
  chemically synthesized
gcattagtttgaaacaactt

SEQ ID NO: 4453 - DNA, 20 bp, Artificial Sequence
  chemically synthesized
gtttgaaacaacttcagttg

SEQ ID NO: 4454 - DNA, 20 bp, Artificial Sequence
  chemically synthesized
catctgataaaattgcttca

SEQ ID NO: 4455 - DNA, 20 bp, Artificial Sequence
  chemically synthesized
atctgataaaattgcttcac

SEQ ID NO: 4456 - DNA, 20 bp, Artificial Sequence
  chemically synthesized
tctgataaaattgcttcaca

SEQ ID NO: 4457 - DNA, 20 bp, Artificial Sequence
  chemically synthesized
gataaaattgcttcacaggg

SEQ ID NO: 4458 - DNA, 20 bp, Artificial Sequence
  chemically synthesized
ataaaattgcttcacaggga

SEQ ID NO: 4459 - DNA, 20 bp, Artificial Sequence
  chemically synthesized
acagggaaggaaatttaaca

SEQ ID NO: 4460 - DNA, 20 bp, Artificial Sequence
  chemically synthesized
aaggaaatttaacacggatc

SEQ ID NO: 4461 - DNA, 20 bp, Artificial Sequence
  chemically synthesized
gatctagtcattattcttgt

SEQ ID NO: 4462 - DNA, 20 bp, Artificial Sequence
  chemically synthesized
gtgtgaattgtaattgtaaa

SEQ ID NO: 4463 - DNA, 20 bp, Artificial Sequence
  chemically synthesized
tgtgaattgtaattgtaaac

SEQ ID NO: 4464 - DNA, 20 bp, Artificial Sequence
  chemically synthesized
attactttaaaaactaaaaa

SEQ ID NO: 4465 - DNA, 20 bp, Artificial Sequence
  chemically synthesized
taaaaactaaaaacagtgaa

SEQ ID NO: 4466 - DNA, 20 bp, Artificial Sequence
  chemically synthesized
aactaaaaacagtgaatagt

SEQ ID NO: 4467 - DNA, 20 bp, Artificial Sequence
  chemically synthesized
aaacagtgaatagttagttg

SEQ ID NO: 4468 - DNA, 20 bp, Artificial Sequence
  chemically synthesized
acagtgaatagttagttgtg

SEQ ID NO: 4469 - DNA, 20 bp, Artificial Sequence
  chemically synthesized
cagtgaatagttagttgtgg

SEQ ID NO: 4470 - DNA, 20 bp, Artificial Sequence
  chemically synthesized
gttagttgtggaggttacta

SEQ ID NO: 4471 - DNA, 20 bp, Artificial Sequence
  chemically synthesized
ttagttgtggaggttactaa

SEQ ID NO: 4472 - DNA, 20 bp, Artificial Sequence
  chemically synthesized
ttgtggaggttactaaagga

SEQ ID NO: 4473 - DNA, 20 bp, Artificial Sequence
  chemically synthesized
ttttttttaaataaaacttt

SEQ ID NO: 4474 - DNA, 20 bp, Artificial Sequence
  chemically synthesized
aactttcagcattatgcaaa

SEQ ID NO: 4475 - DNA, 20 bp, Artificial Sequence
  chemically synthesized
actttcagcattatgcaaat

SEQ ID NO: 4476 - DNA, 20 bp, Artificial Sequence
  chemically synthesized
gcattatgcaaatgggcata

SEQ ID NO: 4477 - DNA, 20 bp, Artificial Sequence
  chemically synthesized
atgcaaatgggcatatggct

SEQ ID NO: 4478 - DNA, 20 bp, Artificial Sequence
  chemically synthesized
tgcaaatgggcatatggctt

SEQ ID NO: 4479 - DNA, 20 bp, Artificial Sequence
  chemically synthesized
atggcttaggataaaacttc

SEQ ID NO: 4480 - DNA, 20 bp, Artificial Sequence
  chemically synthesized
gcttaggataaaacttccag

SEQ ID NO: 4481 - DNA, 20 bp, Artificial Sequence
  chemically synthesized
taggataaaacttccagaag

SEQ ID NO: 4482 - DNA, 20 bp, Artificial Sequence
  chemically synthesized
agcatcacatttaaattctc

SEQ ID NO: 4483 - DNA, 20 bp, Artificial Sequence
  chemically synthesized
tctcaagcaacttaataata

SEQ ID NO: 4484 - DNA, 20 bp, Artificial Sequence
  chemically synthesized
ctcaagcaacttaataatat

SEQ ID NO: 4485 - DNA, 20 bp, Artificial Sequence
  chemically synthesized
tcaagcaacttaataatatg

SEQ ID NO: 4486 - DNA, 20 bp, Artificial Sequence
  chemically synthesized
aatatggggctctgaaaaac

SEQ ID NO: 4487 - DNA, 20 bp, Artificial Sequence
  chemically synthesized
ggggctctgaaaaactggtt

SEQ ID NO: 4488 - DNA, 20 bp, Artificial Sequence
  chemically synthesized
gggctctgaaaaactggtta

SEQ ID NO: 4489 - DNA, 20 bp, Artificial Sequence
  chemically synthesized
ggttaaggttactccaaaaa

SEQ ID NO: 4490 - DNA, 20 bp, Artificial Sequence
  chemically synthesized
ggttactccaaaaatggccc

SEQ ID NO: 4491 - DNA, 20 bp, Artificial Sequence
  chemically synthesized
gttactccaaaaatggccct

SEQ ID NO: 4492 - DNA, 20 bp, Artificial Sequence
  chemically synthesized
aaatggccctgggtctgaca

SEQ ID NO: 4493 - DNA, 20 bp, Artificial Sequence
  chemically synthesized
ctgacaaagattctaactta

SEQ ID NO: 4494 - DNA, 20 bp, Artificial Sequence
  chemically synthesized
ctaacttaaagatgcttatg

SEQ ID NO: 4495 - DNA, 20 bp, Artificial Sequence
  chemically synthesized
aagatgcttatgaagacttt

SEQ ID NO: 4496 - DNA, 20 bp, Artificial Sequence
  chemically synthesized
gtaaaatcatttcataaaat

SEQ ID NO: 4497 - DNA, 20 bp, Artificial Sequence
  chemically synthesized
aatcatttcataaaataagt

SEQ ID NO: 4498 - DNA, 20 bp, Artificial Sequence
  chemically synthesized
atcatttcataaaataagtg

SEQ ID NO: 4499 - DNA, 20 bp, Artificial Sequence
  chemically synthesized
aataagtgaggaaaaacaac

SEQ ID NO: 4500 - DNA, 20 bp, Artificial Sequence
  chemically synthesized
tatgatttaaaaaatatgtt

SEQ ID NO: 4501 - DNA, 20 bp, Artificial Sequence
  chemically synthesized
tatgtttagctaaaaatgca

SEQ ID NO: 4502 - DNA, 20 bp, Artificial Sequence
  chemically synthesized
ctcaaaaaatttacttaacc

SEQ ID NO: 4503 - DNA, 20 bp, Artificial Sequence
  chemically synthesized
aaaaatttacttaaccaagt

SEQ ID NO: 4504 - DNA, 20 bp, Artificial Sequence
  chemically synthesized
aagttggtcacaaaactgat

SEQ ID NO: 4505 - DNA, 20 bp, Artificial Sequence
  chemically synthesized
ggtcacaaaactgatgagac

SEQ ID NO: 4506 - DNA, 20 bp, Artificial Sequence
  chemically synthesized
cacaaaactgatgagactgg

SEQ ID NO: 4507 - DNA, 20 bp, Artificial Sequence
  chemically synthesized
aaaactgatgagactggtgg

SEQ ID NO: 4508 - DNA, 20 bp, Artificial Sequence
  chemically synthesized
actgatgagactggtggtgg

SEQ ID NO: 4509 - DNA, 20 bp, Artificial Sequence
  chemically synthesized
ggtggtggtagtgaataaat

SEQ ID NO: 4510 - DNA, 20 bp, Artificial Sequence
  chemically synthesized
gtggtggtagtgaataaatg

SEQ ID NO: 4511 - DNA, 20 bp, Artificial Sequence
  chemically synthesized
tggtggtagtgaataaatga

SEQ ID NO: 4512 - DNA, 20 bp, Artificial Sequence
  chemically synthesized
atgagggaccatccatattt

SEQ ID NO: 4513 - DNA, 20 bp, Artificial Sequence
  chemically synthesized
gatgtgttatactgaatttt

SEQ ID NO: 4514 - DNA, 20 bp, Artificial Sequence
  chemically synthesized
gaattttcagtttgattcta

SEQ ID NO: 4515 - DNA, 20 bp, Artificial Sequence
  chemically synthesized
aatttcaaaattacaatttc

SEQ ID NO: 4516 - DNA, 20 bp, Artificial Sequence
  chemically synthesized
ttacaatttcaagatgtaat

SEQ ID NO: 4517 - DNA, 20 bp, Artificial Sequence
  chemically synthesized
caatttcaagatgtaataag

SEQ ID NO: 4518 - DNA, 20 bp, Artificial Sequence
  chemically synthesized
taagtagtaatatcttgaaa

SEQ ID NO: 4519 - DNA, 20 bp, Artificial Sequence
  chemically synthesized
aatatcttgaaatagctcta

SEQ ID NO: 4520 - DNA, 20 bp, Artificial Sequence
  chemically synthesized
atatcttgaaatagctctaa

SEQ ID NO: 4521 - DNA, 20 bp, Artificial Sequence
  chemically synthesized
tatcttgaaatagctctaaa

SEQ ID NO: 4522 - DNA, 20 bp, Artificial Sequence
  chemically synthesized
tgctgattttgatttgcatt

SEQ ID NO: 4523 - DNA, 20 bp, Artificial Sequence
  chemically synthesized
gctgattttgatttgcattt

SEQ ID NO: 4524 - DNA, 20 bp, Artificial Sequence
  chemically synthesized
gattttgatttgcatttggg

SEQ ID NO: 4525 - DNA, 20 bp, Artificial Sequence
  chemically synthesized
tgggtagattatacttttat

SEQ ID NO: 4526 - DNA, 20 bp, Artificial Sequence
  chemically synthesized
agattatacttttatgagta

SEQ ID NO: 4527 - DNA, 20 bp, Artificial Sequence
  chemically synthesized
attatacttttatgagtatg

SEQ ID NO: 4528 - DNA, 20 bp, Artificial Sequence
  chemically synthesized
ttatacttttatgagtatgg

SEQ ID NO: 4529 - DNA, 20 bp, Artificial Sequence
  chemically synthesized
acttttatgagtatggaggt

SEQ ID NO: 4530 - DNA, 20 bp, Artificial Sequence
  chemically synthesized
cttttatgagtatggaggtt

SEQ ID NO: 4531 - DNA, 20 bp, Artificial Sequence
  chemically synthesized
tggaggttaggtattgattc

SEQ ID NO: 4532 - DNA, 20 bp, Artificial Sequence
  chemically synthesized
tcaagttttccttacctatt

SEQ ID NO: 4533 - DNA, 20 bp, Artificial Sequence
  chemically synthesized
gttttccttacctatttggt

SEQ ID NO: 4534 - DNA, 20 bp, Artificial Sequence
  chemically synthesized
ttttccttacctatttggta

SEQ ID NO: 4535 - DNA, 20 bp, Artificial Sequence
  chemically synthesized
cctatttggtaaggatttca

SEQ ID NO: 4536 - DNA, 20 bp, Artificial Sequence
  chemically synthesized
tttcaaagtctttttgtgct

SEQ ID NO: 4537 - DNA, 20 bp, Artificial Sequence
  chemically synthesized
tttttttatctcaaatttta

SEQ ID NO: 4538 - DNA, 20 bp, Artificial Sequence
  chemically synthesized
ttttttatctcaaattttaa

SEQ ID NO: 4539 - DNA, 20 bp, Artificial Sequence
  chemically synthesized
ttttatctcaaattttaaag

SEQ ID NO: 4540 - DNA, 20 bp, Artificial Sequence
  chemically synthesized
ttaaaggagatcttttctaa

SEQ ID NO: 4541 - DNA, 20 bp, Artificial Sequence
  chemically synthesized
aaaggagatcttttctaaaa

SEQ ID NO: 4542 - DNA, 20 bp, Artificial Sequence
  chemically synthesized
aaggagatcttttctaaaag

SEQ ID NO: 4543 - DNA, 20 bp, Artificial Sequence
  chemically synthesized
gacttaatcattgcatgtaa

SEQ ID NO: 4544 - DNA, 20 bp, Artificial Sequence
  chemically synthesized
caatgattccatactctcta

SEQ ID NO: 4545 - DNA, 20 bp, Artificial Sequence
  chemically synthesized
ccatactctctaaagaataa

SEQ ID NO: 4546 - DNA, 20 bp, Artificial Sequence
  chemically synthesized
actctctaaagaataaaagt

SEQ ID NO: 4547 - DNA, 20 bp, Artificial Sequence
  chemically synthesized
taaagaataaaagtgagctt

SEQ ID NO: 4548 - DNA, 20 bp, Artificial Sequence
  chemically synthesized
aaagaataaaagtgagcttt

SEQ ID NO: 4549 - DNA, 20 bp, Artificial Sequence
  chemically synthesized
aagaataaaagtgagcttta

SEQ ID NO: 4550 - DNA, 20 bp, Artificial Sequence
  chemically synthesized
ataaaagtgagctttagggc

SEQ ID NO: 4551 - DNA, 20 bp, Artificial Sequence
  chemically synthesized
taaaagtgagctttagggcc

SEQ ID NO: 4552 - DNA, 20 bp, Artificial Sequence
  chemically synthesized
gtgagctttagggccgggca

SEQ ID NO: 4553 - DNA, 20 bp, Artificial Sequence
  chemically synthesized
gctttagggccgggcatggt

SEQ ID NO: 4554 - DNA, 20 bp, Artificial Sequence
  chemically synthesized
tcagaaatttgacaccaacc

SEQ ID NO: 4555 - DNA, 20 bp, Artificial Sequence
  chemically synthesized
tgacaccaacctggccaaca

SEQ ID NO: 4556 - DNA, 20 bp, Artificial Sequence
  chemically synthesized
tctactaaaaatacaaaaat

SEQ ID NO: 4557 - DNA, 20 bp, Artificial Sequence
  chemically synthesized
ctaaaaatacaaaaatcagc

SEQ ID NO: 4558 - DNA, 20 bp, Artificial Sequence
  chemically synthesized
taaaaatacaaaaatcagcc

SEQ ID NO: 4559 - DNA, 20 bp, Artificial Sequence
  chemically synthesized
atacaaaaatcagccgggca

SEQ ID NO: 4560 - DNA, 20 bp, Artificial Sequence
  chemically synthesized
caaaaatcagccgggcatgg

SEQ ID NO: 4561 - DNA, 20 bp, Artificial Sequence
  chemically synthesized
aaatcagccgggcatggtgg

SEQ ID NO: 4562 - DNA, 20 bp, Artificial Sequence
  chemically synthesized
gggcatggtggcggcaccta

SEQ ID NO: 4563 - DNA, 20 bp, Artificial Sequence
  chemically synthesized
ggtggcggcacctatagtcc

SEQ ID NO: 4564 - DNA, 20 bp, Artificial Sequence
  chemically synthesized
cacctatagtcccagctact

SEQ ID NO: 4565 - DNA, 20 bp, Artificial Sequence
  chemically synthesized
acctatagtcccagctactt

SEQ ID NO: 4566 - DNA, 20 bp, Artificial Sequence
  chemically synthesized
ctatagtcccagctacttgg

SEQ ID NO: 4567 - DNA, 20 bp, Artificial Sequence
  chemically synthesized
tatagtcccagctacttggg

SEQ ID NO: 4568 - DNA, 20 bp, Artificial Sequence
  chemically synthesized
tcccagctacttgggaggat

SEQ ID NO: 4569 - DNA, 20 bp, Artificial Sequence
  chemically synthesized
agctacttgggaggatgaga

SEQ ID NO: 4570 - DNA, 20 bp, Artificial Sequence
  chemically synthesized
gctacttgggaggatgagac

SEQ ID NO: 4571 - DNA, 20 bp, Artificial Sequence
  chemically synthesized
tacttgggaggatgagacag

SEQ ID NO: 4572 - DNA, 20 bp, Artificial Sequence
  chemically synthesized
cttgggaggatgagacagga

SEQ ID NO: 4573 - DNA, 20 bp, Artificial Sequence
  chemically synthesized
acaggagagtcacttgaacc

SEQ ID NO: 4574 - DNA, 20 bp, Artificial Sequence
  chemically synthesized
caggagagtcacttgaacct

SEQ ID NO: 4575 - DNA, 20 bp, Artificial Sequence
  chemically synthesized
ggagagtcacttgaacctgg

SEQ ID NO: 4576 - DNA, 20 bp, Artificial Sequence
  chemically synthesized
gagagtcacttgaacctggg

SEQ ID NO: 4577 - DNA, 20 bp, Artificial Sequence
  chemically synthesized
gagtcacttgaacctgggag

SEQ ID NO: 4578 - DNA, 20 bp, Artificial Sequence
  chemically synthesized
gtcacttgaacctgggagga

SEQ ID NO: 4579 - DNA, 20 bp, Artificial Sequence
  chemically synthesized
tcacttgaacctgggaggag

SEQ ID NO: 4580 - DNA, 20 bp, Artificial Sequence
  chemically synthesized
gaacctgggaggagaggttg

SEQ ID NO: 4581 - DNA, 20 bp, Artificial Sequence
  chemically synthesized
ctgggaggagaggttgcagt

SEQ ID NO: 4582 - DNA, 20 bp, Artificial Sequence
  chemically synthesized
aggagaggttgcagtgagct

SEQ ID NO: 4583 - DNA, 20 bp, Artificial Sequence
  chemically synthesized
gagatcacgccattgcactc

SEQ ID NO: 4584 - DNA, 20 bp, Artificial Sequence
  chemically synthesized
acgccattgcactccagcct

SEQ ID NO: 4585 - DNA, 20 bp, Artificial Sequence
  chemically synthesized
cactccagcctgagcaatga

SEQ ID NO: 4586 - DNA, 20 bp, Artificial Sequence
  chemically synthesized
ctccatctcaaaaaaaaaaa

SEQ ID NO: 4587 - DNA, 20 bp, Artificial Sequence
  chemically synthesized
tctcaaaaaaaaaaaaagaa

SEQ ID NO: 4588 - DNA, 20 bp, Artificial Sequence
  chemically synthesized
aaaaaaaaaaaaagaaaaga

SEQ ID NO: 4589 - DNA, 20 bp, Artificial Sequence
  chemically synthesized
aaaaagaaaagaaagaataa

SEQ ID NO: 4590 - DNA, 20 bp, Artificial Sequence
  chemically synthesized
agaaaagaaagaataaaagt

SEQ ID NO: 4591 - DNA, 20 bp, Artificial Sequence
  chemically synthesized
gaaagaataaaagtgagctt

SEQ ID NO: 4592 - DNA, 20 bp, Artificial Sequence
  chemically synthesized
tggattgcatataaatcctt

SEQ ID NO: 4593 - DNA, 20 bp, Artificial Sequence
  chemically synthesized
atataaatcctttagacatg

SEQ ID NO: 4594 - DNA, 20 bp, Artificial Sequence
  chemically synthesized
taaatcctttagacatgtag

SEQ ID NO: 4595 - DNA, 20 bp, Artificial Sequence
  chemically synthesized
ctgtgtttgaacaaattacg

SEQ ID NO: 4596 - DNA, 20 bp, Artificial Sequence
  chemically synthesized
attacgaagtattttcatca

SEQ ID NO: 4597 - DNA, 20 bp, Artificial Sequence
  chemically synthesized
tatttttattttttattgcc

SEQ ID NO: 4598 - DNA, 20 bp, Artificial Sequence
  chemically synthesized
cttcatgtcactttattgtg

SEQ ID NO: 4599 - DNA, 20 bp, Artificial Sequence
  chemically synthesized
ttcatgtcactttattgtgc

SEQ ID NO: 4600 - DNA, 20 bp, Artificial Sequence
  chemically synthesized
tcatgtcactttattgtgca

SEQ ID NO: 4601 - DNA, 20 bp, Artificial Sequence
  chemically synthesized
gtcactttattgtgcagggt

SEQ ID NO: 4602 - DNA, 20 bp, Artificial Sequence
  chemically synthesized
cactttattgtgcagggtca

SEQ ID NO: 4603 - DNA, 20 bp, Artificial Sequence
  chemically synthesized
agtattattccaatgcttac

SEQ ID NO: 4604 - DNA, 20 bp, Artificial Sequence
  chemically synthesized
tattattccaatgcttactg

SEQ ID NO: 4605 - DNA, 20 bp, Artificial Sequence
  chemically synthesized
tattccaatgcttactggag

SEQ ID NO: 4606 - DNA, 20 bp, Artificial Sequence
  chemically synthesized
tggagaagtgattcctgtaa

SEQ ID NO: 4607 - DNA, 20 bp, Artificial Sequence
  chemically synthesized
ctttcatctatgaaatcaca

SEQ ID NO: 4608 - DNA, 20 bp, Artificial Sequence
  chemically synthesized
gaaatcacacagtgttcctg

SEQ ID NO: 4609 - DNA, 20 bp, Artificial Sequence
  chemically synthesized
acacagtgttcctgaagaaa

SEQ ID NO: 4610 - DNA, 20 bp, Artificial Sequence
  chemically synthesized
gttcctgaagaaatagatgt

SEQ ID NO: 4611 - DNA, 20 bp, Artificial Sequence
  chemically synthesized
aaatagatgtaagtttaaat

SEQ ID NO: 4612 - DNA, 20 bp, Artificial Sequence
  chemically synthesized
atagatgtaagtttaaatga

SEQ ID NO: 4613 - DNA, 20 bp, Artificial Sequence
  chemically synthesized
agagcaattatacactttat

SEQ ID NO: 4614 - DNA, 20 bp, Artificial Sequence
  chemically synthesized
tatacactttatgagttttt

SEQ ID NO: 4615 - DNA, 20 bp, Artificial Sequence
  chemically synthesized
atacactttatgagtttttt

SEQ ID NO: 4616 - DNA, 20 bp, Artificial Sequence
  chemically synthesized
tacactttatgagttttttg

SEQ ID NO: 4617 - DNA, 20 bp, Artificial Sequence
  chemically synthesized
ttatgagttttttggggtta

SEQ ID NO: 4618 - DNA, 20 bp, Artificial Sequence
  chemically synthesized
tattaatattctaattttaa

SEQ ID NO: 4619 - DNA, 20 bp, Artificial Sequence
  chemically synthesized
aatattctaattttaatagt

SEQ ID NO: 4620 - DNA, 20 bp, Artificial Sequence
  chemically synthesized
atattctaattttaatagta

SEQ ID NO: 4621 - DNA, 20 bp, Artificial Sequence
  chemically synthesized
tcatacatactattcacata

SEQ ID NO: 4622 - DNA, 20 bp, Artificial Sequence
  chemically synthesized
atactattcacatacagtat

SEQ ID NO: 4623 - DNA, 20 bp, Artificial Sequence
  chemically synthesized
acatacagtattagccactt

SEQ ID NO: 4624 - DNA, 20 bp, Artificial Sequence
  chemically synthesized
tattagccactttagcaaat

SEQ ID NO: 4625 - DNA, 20 bp, Artificial Sequence
  chemically synthesized
aataagcacacacaaaatcc

SEQ ID NO: 4626 - DNA, 20 bp, Artificial Sequence
  chemically synthesized
acacaaaatcctggatttta

SEQ ID NO: 4627 - DNA, 20 bp, Artificial Sequence
  chemically synthesized
tcctggattttatggcaaaa

SEQ ID NO: 4628 - DNA, 20 bp, Artificial Sequence
  chemically synthesized
ctggattttatggcaaaaca

SEQ ID NO: 4629 - DNA, 20 bp, Artificial Sequence
  chemically synthesized
tggattttatggcaaaacag

SEQ ID NO: 4630 - DNA, 20 bp, Artificial Sequence
  chemically synthesized
aaaacagaggcatttttgat

SEQ ID NO: 4631 - DNA, 20 bp, Artificial Sequence
  chemically synthesized
attacttttataattcctaa

SEQ ID NO: 4632 - DNA, 20 bp, Artificial Sequence
  chemically synthesized
acttttataattcctaaaag

SEQ ID NO: 4633 - DNA, 20 bp, Artificial Sequence
  chemically synthesized
cttttataattcctaaaagt

SEQ ID NO: 4634 - DNA, 20 bp, Artificial Sequence
  chemically synthesized
tttataattcctaaaagtgg

SEQ ID NO: 4635 - DNA, 20 bp, Artificial Sequence
  chemically synthesized
ttataattcctaaaagtggg

SEQ ID NO: 4636 - DNA, 20 bp, Artificial Sequence
  chemically synthesized
tcctaaaagtgggaggatcc

SEQ ID NO: 4637 - DNA, 20 bp, Artificial Sequence
  chemically synthesized
tgggaggatcccagctctta

SEQ ID NO: 4638 - DNA, 20 bp, Artificial Sequence
  chemically synthesized
gggaggatcccagctcttat

SEQ ID NO: 4639 - DNA, 20 bp, Artificial Sequence
  chemically synthesized
gaggatcccagctcttatag

SEQ ID NO: 4640 - DNA, 20 bp, Artificial Sequence
  chemically synthesized
ggagcaattaatatttaatg

SEQ ID NO: 4641 - DNA, 20 bp, Artificial Sequence
  chemically synthesized
tgaaacaaaactgtgtgcca

SEQ ID NO: 4642 - DNA, 20 bp, Artificial Sequence
  chemically synthesized
aacaaaactgtgtgccaaag

SEQ ID NO: 4643 - DNA, 20 bp, Artificial Sequence
  chemically synthesized
gccaaagtagtaaccattaa

SEQ ID NO: 4644 - DNA, 20 bp, Artificial Sequence
  chemically synthesized
aaagtagtaaccattaatgg

SEQ ID NO: 4645 - DNA, 20 bp, Artificial Sequence
  chemically synthesized
cattaatggaagtttacttg

SEQ ID NO: 4646 - DNA, 20 bp, Artificial Sequence
  chemically synthesized
tttacttgtagtcacaaatt

SEQ ID NO: 4647 - DNA, 20 bp, Artificial Sequence
  chemically synthesized
agtttccttaatcatttgtt

SEQ ID NO: 4648 - DNA, 20 bp, Artificial Sequence
  chemically synthesized
gtttccttaatcatttgttg

SEQ ID NO: 4649 - DNA, 20 bp, Artificial Sequence
  chemically synthesized
cgttttgaatcacacactat

SEQ ID NO: 4650 - DNA, 20 bp, Artificial Sequence
  chemically synthesized
aatcacacactatgagtgtt

SEQ ID NO: 4651 - DNA, 20 bp, Artificial Sequence
  chemically synthesized
tcacacactatgagtgttaa

SEQ ID NO: 4652 - DNA, 20 bp, Artificial Sequence
  chemically synthesized
tgagtgttaagagatacctt

SEQ ID NO: 4653 - DNA, 20 bp, Artificial Sequence
  chemically synthesized
gagtgttaagagataccttt

SEQ ID NO: 4654 - DNA, 20 bp, Artificial Sequence
  chemically synthesized
tgttttctgattttgtcatt

SEQ ID NO: 4655 - DNA, 20 bp, Artificial Sequence
  chemically synthesized
gttttctgattttgtcattt

SEQ ID NO: 4656 - DNA, 20 bp, Artificial Sequence
  chemically synthesized
tctgattttgtcatttaggt

SEQ ID NO: 4657 - DNA, 20 bp, Artificial Sequence
  chemically synthesized
ggttagtctcctgattctga

SEQ ID NO: 4658 - DNA, 20 bp, Artificial Sequence
  chemically synthesized
gtctcctgattctgacagct

SEQ ID NO: 4659 - DNA, 20 bp, Artificial Sequence
  chemically synthesized
tcctgattctgacagctcag

SEQ ID NO: 4660 - DNA, 20 bp, Artificial Sequence
  chemically synthesized
ctgattctgacagctcagaa

SEQ ID NO: 4661 - DNA, 20 bp, Artificial Sequence
  chemically synthesized
tgattctgacagctcagaag

SEQ ID NO: 4662 - DNA, 20 bp, Artificial Sequence
  chemically synthesized
ttctgacagctcagaagagg

SEQ ID NO: 4663 - DNA, 20 bp, Artificial Sequence
  chemically synthesized
aattgtttaacctgcttgac

SEQ ID NO: 4664 - DNA, 20 bp, Artificial Sequence
  chemically synthesized
ctttcacatttgttcttctg

SEQ ID NO: 4665 - DNA, 20 bp, Artificial Sequence
  chemically synthesized
atttgttcttctgaagttta

SEQ ID NO: 4666 - DNA, 20 bp, Artificial Sequence
  chemically synthesized
tgttcttctgaagtttatgg

SEQ ID NO: 4667 - DNA, 20 bp, Artificial Sequence
  chemically synthesized
ctgaagtttatggtagtgca

SEQ ID NO: 4668 - DNA, 20 bp, Artificial Sequence
  chemically synthesized
gaagtttatggtagtgcaca

SEQ ID NO: 4669 - DNA, 20 bp, Artificial Sequence
  chemically synthesized
agtgcacagagattgttttt

SEQ ID NO: 4670 - DNA, 20 bp, Artificial Sequence
  chemically synthesized
gtgcacagagattgtttttt

SEQ ID NO: 4671 - DNA, 20 bp, Artificial Sequence
  chemically synthesized
tgcacagagattgttttttg

SEQ ID NO: 4672 - DNA, 20 bp, Artificial Sequence
  chemically synthesized
cacagagattgttttttggg

SEQ ID NO: 4673 - DNA, 20 bp, Artificial Sequence
  chemically synthesized
ttttggggagtcttgattct

SEQ ID NO: 4674 - DNA, 20 bp, Artificial Sequence
  chemically synthesized
agtcttgattctcggaaatg

SEQ ID NO: 4675 - DNA, 20 bp, Artificial Sequence
  chemically synthesized
gtcttgattctcggaaatga

SEQ ID NO: 4676 - DNA, 20 bp, Artificial Sequence
  chemically synthesized
ttgattctcggaaatgaagg

SEQ ID NO: 4677 - DNA, 20 bp, Artificial Sequence
  chemically synthesized
gcagtgtgttatattgaatc

SEQ ID NO: 4678 - DNA, 20 bp, Artificial Sequence
  chemically synthesized
tccgaaaacttgtatattaa

SEQ ID NO: 4679 - DNA, 20 bp, Artificial Sequence
  chemically synthesized
gttatttcaacactatgtta

SEQ ID NO: 4680 - DNA, 20 bp, Artificial Sequence
  chemically synthesized
tttcaacactatgttacagc

SEQ ID NO: 4681 - DNA, 20 bp, Artificial Sequence
  chemically synthesized
ttttattttttgatgcattt

SEQ ID NO: 4682 - DNA, 20 bp, Artificial Sequence
  chemically synthesized
attttttgatgcattttaga

SEQ ID NO: 4683 - DNA, 20 bp, Artificial Sequence
  chemically synthesized
tgcattttagatagctgata

SEQ ID NO: 4684 - DNA, 20 bp, Artificial Sequence
  chemically synthesized
gtactcaatgatgatgatat

SEQ ID NO: 4685 - DNA, 20 bp, Artificial Sequence
  chemically synthesized
aatgatgatgatattggtga

SEQ ID NO: 4686 - DNA, 20 bp, Artificial Sequence
  chemically synthesized
tattggtgacagctgtcatg

SEQ ID NO: 4687 - DNA, 20 bp, Artificial Sequence
  chemically synthesized
attggtgacagctgtcatga

SEQ ID NO: 4688 - DNA, 20 bp, Artificial Sequence
  chemically synthesized
gtcatgaaggctttcttctc

SEQ ID NO: 4689 - DNA, 20 bp, Artificial Sequence
  chemically synthesized
tgaaggctttcttctcaagt

SEQ ID NO: 4690 - DNA, 20 bp, Artificial Sequence
  chemically synthesized
aagaatttttcttttcataa

SEQ ID NO: 4691 - DNA, 20 bp, Artificial Sequence
  chemically synthesized
atttttcttttcataaaagc

SEQ ID NO: 4692 - DNA, 20 bp, Artificial Sequence
  chemically synthesized
cttttcataaaagctggatg

SEQ ID NO: 4693 - DNA, 20 bp, Artificial Sequence
  chemically synthesized
ttcataaaagctggatgaag

SEQ ID NO: 4694 - DNA, 20 bp, Artificial Sequence
  chemically synthesized
atcttatgctcacctatgac

SEQ ID NO: 4695 - DNA, 20 bp, Artificial Sequence
  chemically synthesized
tgctcacctatgacaagatt

SEQ ID NO: 4696 - DNA, 20 bp, Artificial Sequence
  chemically synthesized
tcacctatgacaagatttgg

SEQ ID NO: 4697 - DNA, 20 bp, Artificial Sequence
  chemically synthesized
ctatgacaagatttggaaga

SEQ ID NO: 4698 - DNA, 20 bp, Artificial Sequence
  chemically synthesized
atttggaagaaagaaaataa

SEQ ID NO: 4699 - DNA, 20 bp, Artificial Sequence
  chemically synthesized
aaaataacagactgtctact

SEQ ID NO: 4700 - DNA, 20 bp, Artificial Sequence
  chemically synthesized
actgtctacttagattgttc

SEQ ID NO: 4701 - DNA, 20 bp, Artificial Sequence
  chemically synthesized
ctgtctacttagattgttct

SEQ ID NO: 4702 - DNA, 20 bp, Artificial Sequence
  chemically synthesized
tgtctacttagattgttcta

SEQ ID NO: 4703 - DNA, 20 bp, Artificial Sequence
  chemically synthesized
attatatttctatatatatt

SEQ ID NO: 4704 - DNA, 20 bp, Artificial Sequence
  chemically synthesized
gttattccatttgctattta

SEQ ID NO: 4705 - DNA, 20 bp, Artificial Sequence
  chemically synthesized
atttgctatttaaagaaacc

SEQ ID NO: 4706 - DNA, 20 bp, Artificial Sequence
  chemically synthesized
aagaaaccgagtttccatcc

SEQ ID NO: 4707 - DNA, 20 bp, Artificial Sequence
  chemically synthesized
accgagtttccatcccagac

SEQ ID NO: 4708 - DNA, 20 bp, Artificial Sequence
  chemically synthesized
ccatcccagacaagaaatca

SEQ ID NO: 4709 - DNA, 20 bp, Artificial Sequence
  chemically synthesized
catggccccttgcttgattc

SEQ ID NO: 4710 - DNA, 20 bp, Artificial Sequence
  chemically synthesized
tcttgttttacttctcatta

SEQ ID NO: 4711 - DNA, 20 bp, Artificial Sequence
  chemically synthesized
ttacttctcattaaagctaa

SEQ ID NO: 4712 - DNA, 20 bp, Artificial Sequence
  chemically synthesized
taacagaatcctttcatatt

SEQ ID NO: 4713 - DNA, 20 bp, Artificial Sequence
  chemically synthesized
tttcatattaagttgtactg

SEQ ID NO: 4714 - DNA, 20 bp, Artificial Sequence
  chemically synthesized
gttgtactgtagatgaactt

SEQ ID NO: 4715 - DNA, 20 bp, Artificial Sequence
  chemically synthesized
gtagatgaacttaagttatt

SEQ ID NO: 4716 - DNA, 20 bp, Artificial Sequence
  chemically synthesized
tagatgaacttaagttattt

SEQ ID NO: 4717 - DNA, 20 bp, Artificial Sequence
  chemically synthesized
gaacttaagttatttaggcg

SEQ ID NO: 4718 - DNA, 20 bp, Artificial Sequence
  chemically synthesized
tatactgatctttttccatc

SEQ ID NO: 4719 - DNA, 20 bp, Artificial Sequence
  chemically synthesized
actgatctttttccatccag

SEQ ID NO: 4720 - DNA, 20 bp, Artificial Sequence
  chemically synthesized
gatctttttccatccagcag

SEQ ID NO: 4721 - DNA, 20 bp, Artificial Sequence
  chemically synthesized
tctttttccatccagcagtg

SEQ ID NO: 4722 - DNA, 20 bp, Artificial Sequence
  chemically synthesized
ttccatccagcagtggagtt

SEQ ID NO: 4723 - DNA, 20 bp, Artificial Sequence
  chemically synthesized
agcagtggagtttagtactt

SEQ ID NO: 4724 - DNA, 20 bp, Artificial Sequence
  chemically synthesized
cagtggagtttagtacttaa

SEQ ID NO: 4725 - DNA, 20 bp, Artificial Sequence
  chemically synthesized
aagagtttgtgcccttaaac

SEQ ID NO: 4726 - DNA, 20 bp, Artificial Sequence
  chemically synthesized
tgcccttaaaccagactccc

SEQ ID NO: 4727 - DNA, 20 bp, Artificial Sequence
  chemically synthesized
ggattaatgctgtgtacccg

SEQ ID NO: 4728 - DNA, 20 bp, Artificial Sequence
  chemically synthesized
gattaatgctgtgtacccgt

SEQ ID NO: 4729 - DNA, 20 bp, Artificial Sequence
  chemically synthesized
aatgctgtgtacccgtgggc

SEQ ID NO: 4730 - DNA, 20 bp, Artificial Sequence
  chemically synthesized
atgctgtgtacccgtgggca

SEQ ID NO: 4731 - DNA, 20 bp, Artificial Sequence
  chemically synthesized
ctatttcctcatctgtaaaa

SEQ ID NO: 4732 - DNA, 20 bp, Artificial Sequence
  chemically synthesized
catctgtaaaatggcaataa

SEQ ID NO: 4733 - DNA, 20 bp, Artificial Sequence
  chemically synthesized
taaaatggcaataatagtaa

SEQ ID NO: 4734 - DNA, 20 bp, Artificial Sequence
  chemically synthesized
tagtaatagtacctaatgtg

SEQ ID NO: 4735 - DNA, 20 bp, Artificial Sequence
  chemically synthesized
agtaatagtacctaatgtgt

SEQ ID NO: 4736 - DNA, 20 bp, Artificial Sequence
  chemically synthesized
gtaatagtacctaatgtgta

SEQ ID NO: 4737 - DNA, 20 bp, Artificial Sequence
  chemically synthesized
ctaatgtgtagggttgttat

SEQ ID NO: 4738 - DNA, 20 bp, Artificial Sequence
  chemically synthesized
gtagggttgttataagcatt

SEQ ID NO: 4739 - DNA, 20 bp, Artificial Sequence
  chemically synthesized
ggttgttataagcattgagt

SEQ ID NO: 4740 - DNA, 20 bp, Artificial Sequence
  chemically synthesized
tgagtaagataaataatata

SEQ ID NO: 4741 - DNA, 20 bp, Artificial Sequence
  chemically synthesized
gataaataatataaagcact

SEQ ID NO: 4742 - DNA, 20 bp, Artificial Sequence
  chemically synthesized
ataatataaagcacttagaa

SEQ ID NO: 4743 - DNA, 20 bp, Artificial Sequence
  chemically synthesized
aaagcacttagaacagtgcc

SEQ ID NO: 4744 - DNA, 20 bp, Artificial Sequence
  chemically synthesized
aacataaaaacacttaataa

SEQ ID NO: 4745 - DNA, 20 bp, Artificial Sequence
  chemically synthesized
aaacacttaataatagctca

SEQ ID NO: 4746 - DNA, 20 bp, Artificial Sequence
  chemically synthesized
tttcctatttacatttcttc

SEQ ID NO: 4747 - DNA, 20 bp, Artificial Sequence
  chemically synthesized
atttacatttcttctagaaa

SEQ ID NO: 4748 - DNA, 20 bp, Artificial Sequence
  chemically synthesized
acatttcttctagaaatagc

SEQ ID NO: 4749 - DNA, 20 bp, Artificial Sequence
  chemically synthesized
agaaatagccagtatttgtt

SEQ ID NO: 4750 - DNA, 20 bp, Artificial Sequence
  chemically synthesized
tttgttgagtgcctacatgt

SEQ ID NO: 4751 - DNA, 20 bp, Artificial Sequence
  chemically synthesized
ctacatgttagttcctttac

SEQ ID NO: 4752 - DNA, 20 bp, Artificial Sequence
  chemically synthesized
ttatcttatattctgtttta

SEQ ID NO: 4753 - DNA, 20 bp, Artificial Sequence
  chemically synthesized
tctgttttaaagtttcttca

SEQ ID NO: 4754 - DNA, 20 bp, Artificial Sequence
  chemically synthesized
ttaaagtttcttcacagtta

SEQ ID NO: 4755 - DNA, 20 bp, Artificial Sequence
  chemically synthesized
tgaaattttacttttaataa

SEQ ID NO: 4756 - DNA, 20 bp, Artificial Sequence
  chemically synthesized
aaattttacttttaataaaa

SEQ ID NO: 4757 - DNA, 20 bp, Artificial Sequence
  chemically synthesized
ttttacttttaataaaagag

SEQ ID NO: 4758 - DNA, 20 bp, Artificial Sequence
  chemically synthesized
ttttaataaaagagaagtaa

SEQ ID NO: 4759 - DNA, 20 bp, Artificial Sequence
  chemically synthesized
aaaagagaagtaaaagtata

SEQ ID NO: 4760 - DNA, 20 bp, Artificial Sequence
  chemically synthesized
agtattcacttttatgttca

SEQ ID NO: 4761 - DNA, 20 bp, Artificial Sequence
  chemically synthesized
atgttcacagtcttttcctt

SEQ ID NO: 4762 - DNA, 20 bp, Artificial Sequence
  chemically synthesized
tgttcacagtcttttccttt

SEQ ID NO: 4763 - DNA, 20 bp, Artificial Sequence
  chemically synthesized
cttttcctttaggctcatga

SEQ ID NO: 4764 - DNA, 20 bp, Artificial Sequence
  chemically synthesized
tttcctttaggctcatgatg

SEQ ID NO: 4765 - DNA, 20 bp, Artificial Sequence
  chemically synthesized
ttaggctcatgatggagtat

SEQ ID NO: 4766 - DNA, 20 bp, Artificial Sequence
  chemically synthesized
aggctcatgatggagtatca

SEQ ID NO: 4767 - DNA, 20 bp, Artificial Sequence
  chemically synthesized
ggctcatgatggagtatcag

SEQ ID NO: 4768 - DNA, 20 bp, Artificial Sequence
  chemically synthesized
tgatggagtatcagaggcat

SEQ ID NO: 4769 - DNA, 20 bp, Artificial Sequence
  chemically synthesized
ggcatgagtgtgtttaacct

SEQ ID NO: 4770 - DNA, 20 bp, Artificial Sequence
  chemically synthesized
catgagtgtgtttaacctaa

SEQ ID NO: 4771 - DNA, 20 bp, Artificial Sequence
  chemically synthesized
gtttaacctaagagccttaa

SEQ ID NO: 4772 - DNA, 20 bp, Artificial Sequence
  chemically synthesized
agagccttaatggcttgaat

SEQ ID NO: 4773 - DNA, 20 bp, Artificial Sequence
  chemically synthesized
gccttaatggcttgaatcag

SEQ ID NO: 4774 - DNA, 20 bp, Artificial Sequence
  chemically synthesized
ggcttgaatcagaagcactt

SEQ ID NO: 4775 - DNA, 20 bp, Artificial Sequence
  chemically synthesized
actttagtcctgtatctgtt

SEQ ID NO: 4776 - DNA, 20 bp, Artificial Sequence
  chemically synthesized
gtcctgtatctgttcagtgt

SEQ ID NO: 4777 - DNA, 20 bp, Artificial Sequence
  chemically synthesized
tttaaatcccatttgacttt

SEQ ID NO: 4778 - DNA, 20 bp, Artificial Sequence
  chemically synthesized
aatcccatttgactttaagt

SEQ ID NO: 4779 - DNA, 20 bp, Artificial Sequence
  chemically synthesized
tctctacatgtcaatttctt

SEQ ID NO: 4780 - DNA, 20 bp, Artificial Sequence
  chemically synthesized
tttcttcagctataaaatga

SEQ ID NO: 4781 - DNA, 20 bp, Artificial Sequence
  chemically synthesized
atgatattatactgactaat

SEQ ID NO: 4782 - DNA, 20 bp, Artificial Sequence
  chemically synthesized
tgatattatactgactaatt

SEQ ID NO: 4783 - DNA, 20 bp, Artificial Sequence
  chemically synthesized
ctgactaattgggctgtttt

SEQ ID NO: 4784 - DNA, 20 bp, Artificial Sequence
  chemically synthesized
tgactaattgggctgtttta

SEQ ID NO: 4785 - DNA, 20 bp, Artificial Sequence
  chemically synthesized
gggctgttttaaggctcaat

SEQ ID NO: 4786 - DNA, 20 bp, Artificial Sequence
  chemically synthesized
caataagaaaatttctgtga

SEQ ID NO: 4787 - DNA, 20 bp, Artificial Sequence
  chemically synthesized
aataagaaaatttctgtgaa

SEQ ID NO: 4788 - DNA, 20 bp, Artificial Sequence
  chemically synthesized
aaatttctgtgaaaggtctc

SEQ ID NO: 4789 - DNA, 20 bp, Artificial Sequence
  chemically synthesized
tgaaaggtctctagaaaatg

SEQ ID NO: 4790 - DNA, 20 bp, Artificial Sequence
  chemically synthesized
gaaaggtctctagaaaatgt

SEQ ID NO: 4791 - DNA, 20 bp, Artificial Sequence
  chemically synthesized
gtaggttcctatacaaataa

SEQ ID NO: 4792 - DNA, 20 bp, Artificial Sequence
  chemically synthesized
aaaagataacattgtgctta

SEQ ID NO: 4793 - DNA, 20 bp, Artificial Sequence
  chemically synthesized
taacattgtgcttatagctt

SEQ ID NO: 4794 - DNA, 20 bp, Artificial Sequence
  chemically synthesized
gcttcggtgtttatcatata

SEQ ID NO: 4795 - DNA, 20 bp, Artificial Sequence
  chemically synthesized
ttatcatataaagctattct

SEQ ID NO: 4796 - DNA, 20 bp, Artificial Sequence
  chemically synthesized
aagctattctgagttatttg

SEQ ID NO: 4797 - DNA, 20 bp, Artificial Sequence
  chemically synthesized
gctattctgagttatttgaa

SEQ ID NO: 4798 - DNA, 20 bp, Artificial Sequence
  chemically synthesized
cacctacttttttttgtttt

SEQ ID NO: 4799 - DNA, 20 bp, Artificial Sequence
  chemically synthesized
tagtttgttaaattgtttta

SEQ ID NO: 4800 - DNA, 20 bp, Artificial Sequence
  chemically synthesized
agtttgttaaattgttttat

SEQ ID NO: 4801 - DNA, 20 bp, Artificial Sequence
  chemically synthesized
aatctgttttctttaactta

SEQ ID NO: 4802 - DNA, 20 bp, Artificial Sequence
  chemically synthesized
tctttaacttacagtgccat

SEQ ID NO: 4803 - DNA, 20 bp, Artificial Sequence
  chemically synthesized
agctcacacttgcaaacctg

SEQ ID NO: 4804 - DNA, 20 bp, Artificial Sequence
  chemically synthesized
aacctgtggctgttccgttg

SEQ ID NO: 4805 - DNA, 20 bp, Artificial Sequence
  chemically synthesized
ctgtggctgttccgttgtag

SEQ ID NO: 4806 - DNA, 20 bp, Artificial Sequence
  chemically synthesized
tgtggctgttccgttgtagt

SEQ ID NO: 4807 - DNA, 20 bp, Artificial Sequence
  chemically synthesized
ggctgttccgttgtagtagg

SEQ ID NO: 4808 - DNA, 20 bp, Artificial Sequence
  chemically synthesized
tgttccgttgtagtaggtag

SEQ ID NO: 4809 - DNA, 20 bp, Artificial Sequence
  chemically synthesized
cgttgtagtaggtagcagtg

SEQ ID NO: 4810 - DNA, 20 bp, Artificial Sequence
  chemically synthesized
ttgtagtaggtagcagtgca

SEQ ID NO: 4811 - DNA, 20 bp, Artificial Sequence
  chemically synthesized
agtaggtagcagtgcagaga

SEQ ID NO: 4812 - DNA, 20 bp, Artificial Sequence
  chemically synthesized
gcagtgcagagaaagtaaat

SEQ ID NO: 4813 - DNA, 20 bp, Artificial Sequence
  chemically synthesized
cagtgcagagaaagtaaata

SEQ ID NO: 4814 - DNA, 20 bp, Artificial Sequence
  chemically synthesized
tgcagagaaagtaaataagg

SEQ ID NO: 4815 - DNA, 20 bp, Artificial Sequence
  chemically synthesized
aggtagtttattttataatc

SEQ ID NO: 4816 - DNA, 20 bp, Artificial Sequence
  chemically synthesized
agcaaatgatttgactcttt

SEQ ID NO: 4817 - DNA, 20 bp, Artificial Sequence
  chemically synthesized
ttaagactgatgatatatca

SEQ ID NO: 4818 - DNA, 20 bp, Artificial Sequence
  chemically synthesized
atcatggattgtcatttaaa

SEQ ID NO: 4819 - DNA, 20 bp, Artificial Sequence
  chemically synthesized
atggattgtcatttaaatgg

SEQ ID NO: 4820 - DNA, 20 bp, Artificial Sequence
  chemically synthesized
tggattgtcatttaaatggt

SEQ ID NO: 4821 - DNA, 20 bp, Artificial Sequence
  chemically synthesized
aggttgcaattaaaatgatc

SEQ ID NO: 4822 - DNA, 20 bp, Artificial Sequence
  chemically synthesized
ttgcaattaaaatgatctag

SEQ ID NO: 4823 - DNA, 20 bp, Artificial Sequence
  chemically synthesized
ttaaaatgatctagtagtat

SEQ ID NO: 4824 - DNA, 20 bp, Artificial Sequence
  chemically synthesized
taaaatgatctagtagtata

SEQ ID NO: 4825 - DNA, 20 bp, Artificial Sequence
  chemically synthesized
aaatgatctagtagtataag

SEQ ID NO: 4826 - DNA, 20 bp, Artificial Sequence
  chemically synthesized
aatgatctagtagtataagg

SEQ ID NO: 4827 - DNA, 20 bp, Artificial Sequence
  chemically synthesized
tgtaatctcatcaaattgct

SEQ ID NO: 4828 - DNA, 20 bp, Artificial Sequence
  chemically synthesized
caaattgctaagacaccttg

SEQ ID NO: 4829 - DNA, 20 bp, Artificial Sequence
  chemically synthesized
gctaagacaccttgtggcaa

SEQ ID NO: 4830 - DNA, 20 bp, Artificial Sequence
  chemically synthesized
agacaccttgtggcaacagt

SEQ ID NO: 4831 - DNA, 20 bp, Artificial Sequence
  chemically synthesized
cagtgagtttgaaataaact

SEQ ID NO: 4832 - DNA, 20 bp, Artificial Sequence
  chemically synthesized
gagtttgaaataaactgagt

SEQ ID NO: 4833 - DNA, 20 bp, Artificial Sequence
  chemically synthesized
actgagtaagaatcatttat

SEQ ID NO: 4834 - DNA, 20 bp, Artificial Sequence
  chemically synthesized
catttatcagtttattttga

SEQ ID NO: 4835 - DNA, 20 bp, Artificial Sequence
  chemically synthesized
atcagtttattttgatagct

SEQ ID NO: 4836 - DNA, 20 bp, Artificial Sequence
  chemically synthesized
ttttgatagctcggaaatac

SEQ ID NO: 4837 - DNA, 20 bp, Artificial Sequence
  chemically synthesized
tagctcggaaataccagtgt

SEQ ID NO: 4838 - DNA, 20 bp, Artificial Sequence
  chemically synthesized
ctcggaaataccagtgtcag

SEQ ID NO: 4839 - DNA, 20 bp, Artificial Sequence
  chemically synthesized
cagtgtcagtagtgtataaa

SEQ ID NO: 4840 - DNA, 20 bp, Artificial Sequence
  chemically synthesized
agtagtgtataaatggtttt

SEQ ID NO: 4841 - DNA, 20 bp, Artificial Sequence
  chemically synthesized
ttttgagaatatattaaaat

SEQ ID NO: 4842 - DNA, 20 bp, Artificial Sequence
  chemically synthesized
tgttatctttaacaaatctg

SEQ ID NO: 4843 - DNA, 20 bp, Artificial Sequence
  chemically synthesized
atctttaacaaatctgaaga

SEQ ID NO: 4844 - DNA, 20 bp, Artificial Sequence
  chemically synthesized
tgaagatagtcatgtacttt

SEQ ID NO: 4845 - DNA, 20 bp, Artificial Sequence
  chemically synthesized
agatagtcatgtacttttgg

SEQ ID NO: 4846 - DNA, 20 bp, Artificial Sequence
  chemically synthesized
tagtcatgtacttttggtag

SEQ ID NO: 4847 - DNA, 20 bp, Artificial Sequence
  chemically synthesized
tacttttggtagtagttcca

SEQ ID NO: 4848 - DNA, 20 bp, Artificial Sequence
  chemically synthesized
ccttctaaatctgtcccttc

SEQ ID NO: 4849 - DNA, 20 bp, Artificial Sequence
  chemically synthesized
cttctaaatctgtcccttct

SEQ ID NO: 4850 - DNA, 20 bp, Artificial Sequence
  chemically synthesized
ttctaaatctgtcccttcta

SEQ ID NO: 4851 - DNA, 20 bp, Artificial Sequence
  chemically synthesized
ctaaatctgtcccttctagg

SEQ ID NO: 4852 - DNA, 20 bp, Artificial Sequence
  chemically synthesized
tgtcccttctagggagctat

SEQ ID NO: 4853 - DNA, 20 bp, Artificial Sequence
  chemically synthesized
gtcccttctagggagctatt

SEQ ID NO: 4854 - DNA, 20 bp, Artificial Sequence
  chemically synthesized
tctagggagctattgggatt

SEQ ID NO: 4855 - DNA, 20 bp, Artificial Sequence
  chemically synthesized
agggagctattgggattaag

SEQ ID NO: 4856 - DNA, 20 bp, Artificial Sequence
  chemically synthesized
attgattattatactttatt

SEQ ID NO: 4857 - DNA, 20 bp, Artificial Sequence
  chemically synthesized
atgtttctgaccctttcctt

SEQ ID NO: 4858 - DNA, 20 bp, Artificial Sequence
  chemically synthesized
cctttccttcagtgctactt

SEQ ID NO: 4859 - DNA, 20 bp, Artificial Sequence
  chemically synthesized
cagtgctacttgagttaatt

SEQ ID NO: 4860 - DNA, 20 bp, Artificial Sequence
  chemically synthesized
agtgctacttgagttaatta

SEQ ID NO: 4861 - DNA, 20 bp, Artificial Sequence
  chemically synthesized
gttaattaaggattaatgaa

SEQ ID NO: 4862 - DNA, 20 bp, Artificial Sequence
  chemically synthesized
taatgaacagttacatttcc

SEQ ID NO: 4863 - DNA, 20 bp, Artificial Sequence
  chemically synthesized
acagttacatttccaagcat

SEQ ID NO: 4864 - DNA, 20 bp, Artificial Sequence
  chemically synthesized
aagcattagctaataaacta

SEQ ID NO: 4865 - DNA, 20 bp, Artificial Sequence
  chemically synthesized
agcattagctaataaactaa

SEQ ID NO: 4866 - DNA, 20 bp, Artificial Sequence
  chemically synthesized
cacttttcttcactgaccat

SEQ ID NO: 4867 - DNA, 20 bp, Artificial Sequence
  chemically synthesized
tttcttcactgaccattagt

SEQ ID NO: 4868 - DNA, 20 bp, Artificial Sequence
  chemically synthesized
ttcactgaccattagttaga

SEQ ID NO: 4869 - DNA, 20 bp, Artificial Sequence
  chemically synthesized
cactgaccattagttagaaa

SEQ ID NO: 4870 - DNA, 20 bp, Artificial Sequence
  chemically synthesized
accattagttagaaagagtt

SEQ ID NO: 4871 - DNA, 20 bp, Artificial Sequence
  chemically synthesized
cattagttagaaagagttca

SEQ ID NO: 4872 - DNA, 20 bp, Artificial Sequence
  chemically synthesized
gttagaaagagttcagagat

SEQ ID NO: 4873 - DNA, 20 bp, Artificial Sequence
  chemically synthesized
gtatgtgtatctttcaattt

SEQ ID NO: 4874 - DNA, 20 bp, Artificial Sequence
  chemically synthesized
caaacctaattttttaaaaa

SEQ ID NO: 4875 - DNA, 20 bp, Artificial Sequence
  chemically synthesized
tttttaaaaaaagttttaca

SEQ ID NO: 4876 - DNA, 20 bp, Artificial Sequence
  chemically synthesized
ttttaaaaaaagttttacat

SEQ ID NO: 4877 - DNA, 20 bp, Artificial Sequence
  chemically synthesized
gttttacataggaaatatgt

SEQ ID NO: 4878 - DNA, 20 bp, Artificial Sequence
  chemically synthesized
gttggaaatgatactttaca

SEQ ID NO: 4879 - DNA, 20 bp, Artificial Sequence
  chemically synthesized
tcataatttttttttgtaat

SEQ ID NO: 4880 - DNA, 20 bp, Artificial Sequence
  chemically synthesized
gctactttgtatatttacat

SEQ ID NO: 4881 - DNA, 20 bp, Artificial Sequence
  chemically synthesized
tttctcatataaccatttat

SEQ ID NO: 4882 - DNA, 20 bp, Artificial Sequence
  chemically synthesized
tctcatataaccatttatga

SEQ ID NO: 4883 - DNA, 20 bp, Artificial Sequence
  chemically synthesized
tataaccatttatgagagct

SEQ ID NO: 4884 - DNA, 20 bp, Artificial Sequence
  chemically synthesized
attatattgcatctacgaac

SEQ ID NO: 4885 - DNA, 20 bp, Artificial Sequence
  chemically synthesized
attccttctgttacctcaaa

SEQ ID NO: 4886 - DNA, 20 bp, Artificial Sequence
  chemically synthesized
ttccttctgttacctcaaac

SEQ ID NO: 4887 - DNA, 20 bp, Artificial Sequence
  chemically synthesized
cttctgttacctcaaacagg

SEQ ID NO: 4888 - DNA, 20 bp, Artificial Sequence
  chemically synthesized
ctttccatctgtgatctcca

SEQ ID NO: 4889 - DNA, 20 bp, Artificial Sequence
  chemically synthesized
atctgtgatctccaaagcct

SEQ ID NO: 4890 - DNA, 20 bp, Artificial Sequence
  chemically synthesized
tctgtgatctccaaagcctt

SEQ ID NO: 4891 - DNA, 20 bp, Artificial Sequence
  chemically synthesized
ctccaaagccttaggttgca

SEQ ID NO: 4892 - DNA, 20 bp, Artificial Sequence
  chemically synthesized
ccaaagccttaggttgcaca

SEQ ID NO: 4893 - DNA, 20 bp, Artificial Sequence
  chemically synthesized
ggttgcacagagtgactgcc

SEQ ID NO: 4894 - DNA, 20 bp, Artificial Sequence
  chemically synthesized
gactgccgagctgctttatg

SEQ ID NO: 4895 - DNA, 20 bp, Artificial Sequence
  chemically synthesized
actgccgagctgctttatga

SEQ ID NO: 4896 - DNA, 20 bp, Artificial Sequence
  chemically synthesized
ctgccgagctgctttatgaa

SEQ ID NO: 4897 - DNA, 20 bp, Artificial Sequence
  chemically synthesized
gccgagctgctttatgaagg

SEQ ID NO: 4898 - DNA, 20 bp, Artificial Sequence
  chemically synthesized
agctgctttatgaagggaga

SEQ ID NO: 4899 - DNA, 20 bp, Artificial Sequence
  chemically synthesized
gctgctttatgaagggagaa

SEQ ID NO: 4900 - DNA, 20 bp, Artificial Sequence
  chemically synthesized
atgaagggagaaaggctcca

SEQ ID NO: 4901 - DNA, 20 bp, Artificial Sequence
  chemically synthesized
agggagaaaggctccatagt

SEQ ID NO: 4902 - DNA, 20 bp, Artificial Sequence
  chemically synthesized
ggagaaaggctccatagttg

SEQ ID NO: 4903 - DNA, 20 bp, Artificial Sequence
  chemically synthesized
ttcccatcctccatcctctt

SEQ ID NO: 4904 - DNA, 20 bp, Artificial Sequence
  chemically synthesized
tcccatcctccatcctcttg

SEQ ID NO: 4905 - DNA, 20 bp, Artificial Sequence
  chemically synthesized
cccatcctccatcctcttga

SEQ ID NO: 4906 - DNA, 20 bp, Artificial Sequence
  chemically synthesized
catcctccatcctcttgagg

SEQ ID NO: 4907 - DNA, 20 bp, Artificial Sequence
  chemically synthesized
tccatcctcttgagggagaa

SEQ ID NO: 4908 - DNA, 20 bp, Artificial Sequence
  chemically synthesized
cttttatcttgttttaattt

SEQ ID NO: 4909 - DNA, 20 bp, Artificial Sequence
  chemically synthesized
tatcttgttttaatttgaga

SEQ ID NO: 4910 - DNA, 20 bp, Artificial Sequence
  chemically synthesized
cttgttttaatttgagaaag

SEQ ID NO: 4911 - DNA, 20 bp, Artificial Sequence
  chemically synthesized
gaaagaagttgccaccactc

SEQ ID NO: 4912 - DNA, 20 bp, Artificial Sequence
  chemically synthesized
aaagaagttgccaccactct

SEQ ID NO: 4913 - DNA, 20 bp, Artificial Sequence
  chemically synthesized
ctcctttaacataataactg

SEQ ID NO: 4914 - DNA, 20 bp, Artificial Sequence
  chemically synthesized
taacataataactgtggata

SEQ ID NO: 4915 - DNA, 20 bp, Artificial Sequence
  chemically synthesized
gtggatatggtttgaatttc

SEQ ID NO: 4916 - DNA, 20 bp, Artificial Sequence
  chemically synthesized
atatggtttgaatttcaaga

SEQ ID NO: 4917 - DNA, 20 bp, Artificial Sequence
  chemically synthesized
tgcctttttatttttcctaa

SEQ ID NO: 4918 - DNA, 20 bp, Artificial Sequence
  chemically synthesized
cctttttatttttcctaata

SEQ ID NO: 4919 - DNA, 20 bp, Artificial Sequence
  chemically synthesized
tatttttcctaatagagctg

SEQ ID NO: 4920 - DNA, 20 bp, Artificial Sequence
  chemically synthesized
atttttcctaatagagctgt

SEQ ID NO: 4921 - DNA, 20 bp, Artificial Sequence
  chemically synthesized
agctgtaggtcaaatattat

SEQ ID NO: 4922 - DNA, 20 bp, Artificial Sequence
  chemically synthesized
aggtcaaatattattagaat

SEQ ID NO: 4923 - DNA, 20 bp, Artificial Sequence
  chemically synthesized
ataattaattctcttctttt

SEQ ID NO: 4924 - DNA, 20 bp, Artificial Sequence
  chemically synthesized
aattaattctcttctttttg

SEQ ID NO: 4925 - DNA, 20 bp, Artificial Sequence
  chemically synthesized
attaattctcttctttttgg

SEQ ID NO: 4926 - DNA, 20 bp, Artificial Sequence
  chemically synthesized
tctcttctttttggaggatc

SEQ ID NO: 4927 - DNA, 20 bp, Artificial Sequence
  chemically synthesized
cttacaacgaatttcatgtg

SEQ ID NO: 4928 - DNA, 20 bp, Artificial Sequence
  chemically synthesized
tcatgtgtagacccactaaa

SEQ ID NO: 4929 - DNA, 20 bp, Artificial Sequence
  chemically synthesized
tgtgtagacccactaaacag

SEQ ID NO: 4930 - DNA, 20 bp, Artificial Sequence
  chemically synthesized
ccactaaacagaagctataa

SEQ ID NO: 4931 - DNA, 20 bp, Artificial Sequence
  chemically synthesized
cagaagctataaaagttgca

SEQ ID NO: 4932 - DNA, 20 bp, Artificial Sequence
  chemically synthesized
taaaagttgcatggtcaaat

SEQ ID NO: 4933 - DNA, 20 bp, Artificial Sequence
  chemically synthesized
ttgcatggtcaaataagtct

SEQ ID NO: 4934 - DNA, 20 bp, Artificial Sequence
  chemically synthesized
atggtcaaataagtctgaga

SEQ ID NO: 4935 - DNA, 20 bp, Artificial Sequence
  chemically synthesized
aataagtctgagaaagtctg

SEQ ID NO: 4936 - DNA, 20 bp, Artificial Sequence
  chemically synthesized
cagatgatataattcacctg

SEQ ID NO: 4937 - DNA, 20 bp, Artificial Sequence
  chemically synthesized
gatgatataattcacctgaa

SEQ ID NO: 4938 - DNA, 20 bp, Artificial Sequence
  chemically synthesized
ataattcacctgaagagtca

SEQ ID NO: 4939 - DNA, 20 bp, Artificial Sequence
  chemically synthesized
acctgaagagtcacagtatg

SEQ ID NO: 4940 - DNA, 20 bp, Artificial Sequence
  chemically synthesized
cagtatgtagccaaatgtta

SEQ ID NO: 4941 - DNA, 20 bp, Artificial Sequence
  chemically synthesized
agtatgtagccaaatgttaa

SEQ ID NO: 4942 - DNA, 20 bp, Artificial Sequence
  chemically synthesized
agccaaatgttaaaggtttt

SEQ ID NO: 4943 - DNA, 20 bp, Artificial Sequence
  chemically synthesized
aaaggttttgagatgccata

SEQ ID NO: 4944 - DNA, 20 bp, Artificial Sequence
  chemically synthesized
tgccatacagtaaatttacc

SEQ ID NO: 4945 - DNA, 20 bp, Artificial Sequence
  chemically synthesized
tttctaaatttatttgacca

SEQ ID NO: 4946 - DNA, 20 bp, Artificial Sequence
  chemically synthesized
gaccacagaatccctatttt

SEQ ID NO: 4947 - DNA, 20 bp, Artificial Sequence
  chemically synthesized
gcaacaactgttacatccca

SEQ ID NO: 4948 - DNA, 20 bp, Artificial Sequence
  chemically synthesized
ctgttacatcccatggattc

SEQ ID NO: 4949 - DNA, 20 bp, Artificial Sequence
  chemically synthesized
tgttacatcccatggattcc

SEQ ID NO: 4950 - DNA, 20 bp, Artificial Sequence
  chemically synthesized
ccatggattccaggtgacta

SEQ ID NO: 4951 - DNA, 20 bp, Artificial Sequence
  chemically synthesized
actaaagaatacttatttct

SEQ ID NO: 4952 - DNA, 20 bp, Artificial Sequence
  chemically synthesized
ctaaagaatacttatttctt

SEQ ID NO: 4953 - DNA, 20 bp, Artificial Sequence
  chemically synthesized
gataataacaattaaaattt

SEQ ID NO: 4954 - DNA, 20 bp, Artificial Sequence
  chemically synthesized
aaatttcagatatctttcat

SEQ ID NO: 4955 - DNA, 20 bp, Artificial Sequence
  chemically synthesized
gatatctttcataagcaaat

SEQ ID NO: 4956 - DNA, 20 bp, Artificial Sequence
  chemically synthesized
atctttcataagcaaatcag

SEQ ID NO: 4957 - DNA, 20 bp, Artificial Sequence
  chemically synthesized
tgctaaaatattttctttta

SEQ ID NO: 4958 - DNA, 20 bp, Artificial Sequence
  chemically synthesized
aaaatattttcttttataga

SEQ ID NO: 4959 - DNA, 20 bp, Artificial Sequence
  chemically synthesized
tattttcttttatagatagt

SEQ ID NO: 4960 - DNA, 20 bp, Artificial Sequence
  chemically synthesized
attatgcctttttctgactc

SEQ ID NO: 4961 - DNA, 20 bp, Artificial Sequence
  chemically synthesized
atgcctttttctgactccag

SEQ ID NO: 4962 - DNA, 20 bp, Artificial Sequence
  chemically synthesized
gcctttttctgactccagca

SEQ ID NO: 4963 - DNA, 20 bp, Artificial Sequence
  chemically synthesized
ctttttctgactccagcaga

SEQ ID NO: 4964 - DNA, 20 bp, Artificial Sequence
  chemically synthesized
ccagcagagagaaaatgctc

SEQ ID NO: 4965 - DNA, 20 bp, Artificial Sequence
  chemically synthesized
cagcagagagaaaatgctcc

SEQ ID NO: 4966 - DNA, 20 bp, Artificial Sequence
  chemically synthesized
aaaatgctccaggttatgtg

SEQ ID NO: 4967 - DNA, 20 bp, Artificial Sequence
  chemically synthesized
atgctccaggttatgtgaag

SEQ ID NO: 4968 - DNA, 20 bp, Artificial Sequence
  chemically synthesized
cagaatcatcatttaaatat

SEQ ID NO: 4969 - DNA, 20 bp, Artificial Sequence
  chemically synthesized
atcatcatttaaatatgagt

SEQ ID NO: 4970 - DNA, 20 bp, Artificial Sequence
  chemically synthesized
tcatcatttaaatatgagtc

SEQ ID NO: 4971 - DNA, 20 bp, Artificial Sequence
  chemically synthesized
catcatttaaatatgagtca

SEQ ID NO: 4972 - DNA, 20 bp, Artificial Sequence
  chemically synthesized
tgagtcagggctctttgtac

SEQ ID NO: 4973 - DNA, 20 bp, Artificial Sequence
  chemically synthesized
gagtcagggctctttgtaca

SEQ ID NO: 4974 - DNA, 20 bp, Artificial Sequence
  chemically synthesized
tctttgtacaaggcctgcta

SEQ ID NO: 4975 - DNA, 20 bp, Artificial Sequence
  chemically synthesized
ctttgtacaaggcctgctaa

SEQ ID NO: 4976 - DNA, 20 bp, Artificial Sequence
  chemically synthesized
tacaaggcctgctaaaggta

SEQ ID NO: 4977 - DNA, 20 bp, Artificial Sequence
  chemically synthesized
cctgctaaaggtatagtttc

SEQ ID NO: 4978 - DNA, 20 bp, Artificial Sequence
  chemically synthesized
gtatagtttctagttatcac

SEQ ID NO: 4979 - DNA, 20 bp, Artificial Sequence
  chemically synthesized
acttttctaaaatcattttt

SEQ ID NO: 4980 - DNA, 20 bp, Artificial Sequence
  chemically synthesized
atcatttttgagactcttta

SEQ ID NO: 4981 - DNA, 20 bp, Artificial Sequence
  chemically synthesized
tatagacaaatcttaaatat

SEQ ID NO: 4982 - DNA, 20 bp, Artificial Sequence
  chemically synthesized
gtatctcatattgacatgcc

SEQ ID NO: 4983 - DNA, 20 bp, Artificial Sequence
  chemically synthesized
atctcatattgacatgccca

SEQ ID NO: 4984 - DNA, 20 bp, Artificial Sequence
  chemically synthesized
agagactgacttcctttaca

SEQ ID NO: 4985 - DNA, 20 bp, Artificial Sequence
  chemically synthesized
cctttacacagttctgcaca

SEQ ID NO: 4986 - DNA, 20 bp, Artificial Sequence
  chemically synthesized
cacatagactatatgtctta

SEQ ID NO: 4987 - DNA, 20 bp, Artificial Sequence
  chemically synthesized
ctatatgtcttatggattta

SEQ ID NO: 4988 - DNA, 20 bp, Artificial Sequence
  chemically synthesized
atgtcttatggatttatagt

SEQ ID NO: 4989 - DNA, 20 bp, Artificial Sequence
  chemically synthesized
ggatttatagttagtatcat

SEQ ID NO: 4990 - DNA, 20 bp, Artificial Sequence
  chemically synthesized
gtatcatcagtgaaacacca

SEQ ID NO: 4991 - DNA, 20 bp, Artificial Sequence
  chemically synthesized
atagaataccctttgtgttc

SEQ ID NO: 4992 - DNA, 20 bp, Artificial Sequence
  chemically synthesized
tagaataccctttgtgttcc

SEQ ID NO: 4993 - DNA, 20 bp, Artificial Sequence
  chemically synthesized
aataccctttgtgttccagg

SEQ ID NO: 4994 - DNA, 20 bp, Artificial Sequence
  chemically synthesized
ataccctttgtgttccaggt

SEQ ID NO: 4995 - DNA, 20 bp, Artificial Sequence
  chemically synthesized
ggtccctgttcctacatgtc

SEQ ID NO: 4996 - DNA, 20 bp, Artificial Sequence
  chemically synthesized
tgttcctacatgtctagcct

SEQ ID NO: 4997 - DNA, 20 bp, Artificial Sequence
  chemically synthesized
gttcctacatgtctagcctc

SEQ ID NO: 4998 - DNA, 20 bp, Artificial Sequence
  chemically synthesized
tttttaacacatgcttaaat

SEQ ID NO: 4999 - DNA, 20 bp, Artificial Sequence
  chemically synthesized
ttttaacacatgcttaaatc

SEQ ID NO: 5000 - DNA, 20 bp, Artificial Sequence
  chemically synthesized
tcaggttgcacatcaaaaat

SEQ ID NO: 5001 - DNA, 20 bp, Artificial Sequence
  chemically synthesized
atcatttctttttaactaaa

SEQ ID NO: 5002 - DNA, 20 bp, Artificial Sequence
  chemically synthesized
aaaaaattttaaacatcttt

SEQ ID NO: 5003 - DNA, 20 bp, Artificial Sequence
  chemically synthesized
aaattttaaacatctttaag

SEQ ID NO: 5004 - DNA, 20 bp, Artificial Sequence
  chemically synthesized
aaacatctttaagaagctta

SEQ ID NO: 5005 - DNA, 20 bp, Artificial Sequence
  chemically synthesized
aacatctttaagaagcttat

SEQ ID NO: 5006 - DNA, 20 bp, Artificial Sequence
  chemically synthesized
ttaagaagcttataggattt

SEQ ID NO: 5007 - DNA, 20 bp, Artificial Sequence
  chemically synthesized
tttctatatataatatatat

SEQ ID NO: 5008 - DNA, 20 bp, Artificial Sequence
  chemically synthesized
attgtatttttcttttattt

SEQ ID NO: 5009 - DNA, 20 bp, Artificial Sequence
  chemically synthesized
ttttatttgagtctactgtc

SEQ ID NO: 5010 - DNA, 20 bp, Artificial Sequence
  chemically synthesized
tttatttgagtctactgtca

SEQ ID NO: 5011 - DNA, 20 bp, Artificial Sequence
  chemically synthesized
tatttgagtctactgtcaag

SEQ ID NO: 5012 - DNA, 20 bp, Artificial Sequence
  chemically synthesized
tctactgtcaaggagcaaaa

SEQ ID NO: 5013 - DNA, 20 bp, Artificial Sequence
  chemically synthesized
tactgtcaaggagcaaaaca

SEQ ID NO: 5014 - DNA, 20 bp, Artificial Sequence
  chemically synthesized
caaaacagagaaatgtaaat

SEQ ID NO: 5015 - DNA, 20 bp, Artificial Sequence
  chemically synthesized
gcaattatttataatactta

SEQ ID NO: 5016 - DNA, 20 bp, Artificial Sequence
  chemically synthesized
caattatttataatacttaa

SEQ ID NO: 5017 - DNA, 20 bp, Artificial Sequence
  chemically synthesized
aattatttataatacttaaa

SEQ ID NO: 5018 - DNA, 20 bp, Artificial Sequence
  chemically synthesized
tatttataatacttaaaggg

SEQ ID NO: 5019 - DNA, 20 bp, Artificial Sequence
  chemically synthesized
tataatacttaaagggaaga

SEQ ID NO: 5020 - DNA, 20 bp, Artificial Sequence
  chemically synthesized
tattattgttatttcaatta

SEQ ID NO: 5021 - DNA, 20 bp, Artificial Sequence
  chemically synthesized
gttatttcaattatagtccc

SEQ ID NO: 5022 - DNA, 20 bp, Artificial Sequence
  chemically synthesized
aattatagtcccaagacgtg

SEQ ID NO: 5023 - DNA, 20 bp, Artificial Sequence
  chemically synthesized
agtcccaagacgtgaagaaa

SEQ ID NO: 5024 - DNA, 20 bp, Artificial Sequence
  chemically synthesized
tgaagaaatagctttcctaa

SEQ ID NO: 5025 - DNA, 20 bp, Artificial Sequence
  chemically synthesized
atggttatgtgattgtctca

SEQ ID NO: 5026 - DNA, 20 bp, Artificial Sequence
  chemically synthesized
ctcatagtgactactttctt

SEQ ID NO: 5027 - DNA, 20 bp, Artificial Sequence
  chemically synthesized
tcatagtgactactttcttg

SEQ ID NO: 5028 - DNA, 20 bp, Artificial Sequence
  chemically synthesized
tgactactttcttgaggatg

SEQ ID NO: 5029 - DNA, 20 bp, Artificial Sequence
  chemically synthesized
ctttcttgaggatgtagcca

SEQ ID NO: 5030 - DNA, 20 bp, Artificial Sequence
  chemically synthesized
ttaaaaattgttgcaaatac

SEQ ID NO: 5031 - DNA, 20 bp, Artificial Sequence
  chemically synthesized
gttgcaaatacaagttatat

SEQ ID NO: 5032 - DNA, 20 bp, Artificial Sequence
  chemically synthesized
ttgcaaatacaagttatatt

SEQ ID NO: 5033 - DNA, 20 bp, Artificial Sequence
  chemically synthesized
ataatgtgctgctatgaact

SEQ ID NO: 5034 - DNA, 20 bp, Artificial Sequence
  chemically synthesized
ctgctatgaactcagaatga

SEQ ID NO: 5035 - DNA, 20 bp, Artificial Sequence
  chemically synthesized
agaatgatagtatttaaata

SEQ ID NO: 5036 - DNA, 20 bp, Artificial Sequence
  chemically synthesized
tagtatttaaatatagaaac

SEQ ID NO: 5037 - DNA, 20 bp, Artificial Sequence
  chemically synthesized
ttaaatatagaaactagtta

SEQ ID NO: 5038 - DNA, 20 bp, Artificial Sequence
  chemically synthesized
taaatatagaaactagttaa

SEQ ID NO: 5039 - DNA, 20 bp, Artificial Sequence
  chemically synthesized
gaaactagttaaaggaaacg

SEQ ID NO: 5040 - DNA, 20 bp, Artificial Sequence
  chemically synthesized
aggaaacgtagtttctattt

SEQ ID NO: 5041 - DNA, 20 bp, Artificial Sequence
  chemically synthesized
agttatacatatctgtaaat

SEQ ID NO: 5042 - DNA, 20 bp, Artificial Sequence
  chemically synthesized
aattagaacttctcctgtta

SEQ ID NO: 5043 - DNA, 20 bp, Artificial Sequence
  chemically synthesized
attagaacttctcctgttaa

SEQ ID NO: 5044 - DNA, 20 bp, Artificial Sequence
  chemically synthesized
ctcctgttaaaggcataata

SEQ ID NO: 5045 - DNA, 20 bp, Artificial Sequence
  chemically synthesized
gcttaatacttttgtttcct

SEQ ID NO: 5046 - DNA, 20 bp, Artificial Sequence
  chemically synthesized
ctcatttaattatataattt

SEQ ID NO: 5047 - DNA, 20 bp, Artificial Sequence
  chemically synthesized
ttatataattttagttctga

SEQ ID NO: 5048 - DNA, 20 bp, Artificial Sequence
  chemically synthesized
tatataattttagttctgaa

SEQ ID NO: 5049 - DNA, 20 bp, Artificial Sequence
  chemically synthesized
atataattttagttctgaaa

SEQ ID NO: 5050 - DNA, 20 bp, Artificial Sequence
  chemically synthesized
gttctgaaagggacctatac

SEQ ID NO: 5051 - DNA, 20 bp, Artificial Sequence
  chemically synthesized
agggacctataccagatgcc

SEQ ID NO: 5052 - DNA, 20 bp, Artificial Sequence
  chemically synthesized
ggacctataccagatgccta

SEQ ID NO: 5053 - DNA, 20 bp, Artificial Sequence
  chemically synthesized
gacctataccagatgcctag

SEQ ID NO: 5054 - DNA, 20 bp, Artificial Sequence
  chemically synthesized
tctaatgaaaaaatatttaa

SEQ ID NO: 5055 - DNA, 20 bp, Artificial Sequence
  chemically synthesized
ccatgcaaatacaaatcata

SEQ ID NO: 5056 - DNA, 20 bp, Artificial Sequence
  chemically synthesized
atacaaatcatatagttttc

SEQ ID NO: 5057 - DNA, 20 bp, Artificial Sequence
  chemically synthesized
aatacctttgacattataca

SEQ ID NO: 5058 - DNA, 20 bp, Artificial Sequence
  chemically synthesized
ttatacaaagatgattatca

SEQ ID NO: 5059 - DNA, 20 bp, Artificial Sequence
  chemically synthesized
tgattatcacagcattataa

SEQ ID NO: 5060 - DNA, 20 bp, Artificial Sequence
  chemically synthesized
gcattataatagtaaaaaaa

SEQ ID NO: 5061 - DNA, 20 bp, Artificial Sequence
  chemically synthesized
taatagtaaaaaaatggaaa

SEQ ID NO: 5062 - DNA, 20 bp, Artificial Sequence
  chemically synthesized
tctttcttctgttctgttca

SEQ ID NO: 5063 - DNA, 20 bp, Artificial Sequence
  chemically synthesized
cttctgttctgttcatagca

SEQ ID NO: 5064 - DNA, 20 bp, Artificial Sequence
  chemically synthesized
atagcacagtgcctcatacg

SEQ ID NO: 5065 - DNA, 20 bp, Artificial Sequence
  chemically synthesized
gcacagtgcctcatacgcag

SEQ ID NO: 5066 - DNA, 20 bp, Artificial Sequence
  chemically synthesized
cacagtgcctcatacgcagt

SEQ ID NO: 5067 - DNA, 20 bp, Artificial Sequence
  chemically synthesized
cgcagtaggttattattaca

SEQ ID NO: 5068 - DNA, 20 bp, Artificial Sequence
  chemically synthesized
ggttattattacatggtaac

SEQ ID NO: 5069 - DNA, 20 bp, Artificial Sequence
  chemically synthesized
aactggctaccccaactgat

SEQ ID NO: 5070 - DNA, 20 bp, Artificial Sequence
  chemically synthesized
actggctaccccaactgatt

SEQ ID NO: 5071 - DNA, 20 bp, Artificial Sequence
  chemically synthesized
gctaccccaactgattagga

SEQ ID NO: 5072 - DNA, 20 bp, Artificial Sequence
  chemically synthesized
accccaactgattaggaaag

SEQ ID NO: 5073 - DNA, 20 bp, Artificial Sequence
  chemically synthesized
tataaaaatacatactcatt

SEQ ID NO: 5074 - DNA, 20 bp, Artificial Sequence
  chemically synthesized
ataaaaatacatactcattg

SEQ ID NO: 5075 - DNA, 20 bp, Artificial Sequence
  chemically synthesized
tacatactcattgaggtgca

SEQ ID NO: 5076 - DNA, 20 bp, Artificial Sequence
  chemically synthesized
ttgaggtgcatagaataatt

SEQ ID NO: 5077 - DNA, 20 bp, Artificial Sequence
  chemically synthesized
tagaataattaagaaattaa

SEQ ID NO: 5078 - DNA, 20 bp, Artificial Sequence
  chemically synthesized
gacacttgtaattttgaatc

SEQ ID NO: 5079 - DNA, 20 bp, Artificial Sequence
  chemically synthesized
gaatacccactgttaatatt

SEQ ID NO: 5080 - DNA, 20 bp, Artificial Sequence
  chemically synthesized
atatttggtatatctctttc

SEQ ID NO: 5081 - DNA, 20 bp, Artificial Sequence
  chemically synthesized
cttttgcatgtattttcttt

SEQ ID NO: 5082 - DNA, 20 bp, Artificial Sequence
  chemically synthesized
tttaagactcccacccccac

SEQ ID NO: 5083 - DNA, 20 bp, Artificial Sequence
  chemically synthesized
gttctaatctgcttttttca

SEQ ID NO: 5084 - DNA, 20 bp, Artificial Sequence
  chemically synthesized
ctaatctgcttttttcacag

SEQ ID NO: 5085 - DNA, 20 bp, Artificial Sequence
  chemically synthesized
cttttttcacagcagattct

SEQ ID NO: 5086 - DNA, 20 bp, Artificial Sequence
  chemically synthesized
aacttcaacaacttcatcta

SEQ ID NO: 5087 - DNA, 20 bp, Artificial Sequence
  chemically synthesized
atttacttaaccacttcctt

SEQ ID NO: 5088 - DNA, 20 bp, Artificial Sequence
  chemically synthesized
aaccacttcctttggatgct

SEQ ID NO: 5089 - DNA, 20 bp, Artificial Sequence
  chemically synthesized
accacttcctttggatgctt

SEQ ID NO: 5090 - DNA, 20 bp, Artificial Sequence
  chemically synthesized
actttgcacacactcatgaa

SEQ ID NO: 5091 - DNA, 20 bp, Artificial Sequence
  chemically synthesized
cacactcatgaatagcttct

SEQ ID NO: 5092 - DNA, 20 bp, Artificial Sequence
  chemically synthesized
acactcatgaatagcttctt

SEQ ID NO: 5093 - DNA, 20 bp, Artificial Sequence
  chemically synthesized
agcttcttaggataaatttt

SEQ ID NO: 5094 - DNA, 20 bp, Artificial Sequence
  chemically synthesized
cttcttaggataaattttta

SEQ ID NO: 5095 - DNA, 20 bp, Artificial Sequence
  chemically synthesized
ttaggataaatttttagaga

SEQ ID NO: 5096 - DNA, 20 bp, Artificial Sequence
  chemically synthesized
tagagatggatttgctaaat

SEQ ID NO: 5097 - DNA, 20 bp, Artificial Sequence
  chemically synthesized
gagatggatttgctaaatca

SEQ ID NO: 5098 - DNA, 20 bp, Artificial Sequence
  chemically synthesized
aaacaattattcatatcgtt

SEQ ID NO: 5099 - DNA, 20 bp, Artificial Sequence
  chemically synthesized
attcatatcgtttggcatgt

SEQ ID NO: 5100 - DNA, 20 bp, Artificial Sequence
  chemically synthesized
atatcgtttggcatgtaaga

SEQ ID NO: 5101 - DNA, 20 bp, Artificial Sequence
  chemically synthesized
aaattttccttttattttga

SEQ ID NO: 5102 - DNA, 20 bp, Artificial Sequence
  chemically synthesized
aattttccttttattttgac

SEQ ID NO: 5103 - DNA, 20 bp, Artificial Sequence
  chemically synthesized
ttattttgacaggattcaac

SEQ ID NO: 5104 - DNA, 20 bp, Artificial Sequence
  chemically synthesized
ttttgacaggattcaactgg

SEQ ID NO: 5105 - DNA, 20 bp, Artificial Sequence
  chemically synthesized
gaagctttgtgctgcctttc

SEQ ID NO: 5106 - DNA, 20 bp, Artificial Sequence
  chemically synthesized
ctttgtgctgcctttccggc

SEQ ID NO: 5107 - DNA, 20 bp, Artificial Sequence
  chemically synthesized
tccatatcccaccacacaca

SEQ ID NO: 5108 - DNA, 20 bp, Artificial Sequence
  chemically synthesized
tcccaccacacacatagatg

SEQ ID NO: 5109 - DNA, 20 bp, Artificial Sequence
  chemically synthesized
atgtggatgtcaatactgtg

SEQ ID NO: 5110 - DNA, 20 bp, Artificial Sequence
  chemically synthesized
tggatgtcaatactgtgaag

SEQ ID NO: 5111 - DNA, 20 bp, Artificial Sequence
  chemically synthesized
gtcatgaacatatttataat

SEQ ID NO: 5112 - DNA, 20 bp, Artificial Sequence
  chemically synthesized
gaacatatttataatcagcg

SEQ ID NO: 5113 - DNA, 20 bp, Artificial Sequence
  chemically synthesized
tataatcagcgtagatacat

SEQ ID NO: 5114 - DNA, 20 bp, Artificial Sequence
  chemically synthesized
agcgtagatacatgagatcc

SEQ ID NO: 5115 - DNA, 20 bp, Artificial Sequence
  chemically synthesized
atacatgagatccgagctga

SEQ ID NO: 5116 - DNA, 20 bp, Artificial Sequence
  chemically synthesized
gatccgagctgacagccttc

SEQ ID NO: 5117 - DNA, 20 bp, Artificial Sequence
  chemically synthesized
tccgagctgacagccttctg

SEQ ID NO: 5118 - DNA, 20 bp, Artificial Sequence
  chemically synthesized
cgagctgacagccttctgga

SEQ ID NO: 5119 - DNA, 20 bp, Artificial Sequence
  chemically synthesized
agccttctggagagccactt

SEQ ID NO: 5120 - DNA, 20 bp, Artificial Sequence
  chemically synthesized
cttctggagagccacttcag

SEQ ID NO: 5121 - DNA, 20 bp, Artificial Sequence
  chemically synthesized
ctggagagccacttcagaag

SEQ ID NO: 5122 - DNA, 20 bp, Artificial Sequence
  chemically synthesized
agccacttcagaagaagaca

SEQ ID NO: 5123 - DNA, 20 bp, Artificial Sequence
  chemically synthesized
cttcagaagaagacatggct

SEQ ID NO: 5124 - DNA, 20 bp, Artificial Sequence
  chemically synthesized
ttcagaagaagacatggctc

SEQ ID NO: 5125 - DNA, 20 bp, Artificial Sequence
  chemically synthesized
acgatcatctacactgacga

SEQ ID NO: 5126 - DNA, 20 bp, Artificial Sequence
  chemically synthesized
gtacgtaatgctctgcctgc

SEQ ID NO: 5127 - DNA, 20 bp, Artificial Sequence
  chemically synthesized
tgctctgcctgctggtactg

SEQ ID NO: 5128 - DNA, 20 bp, Artificial Sequence
  chemically synthesized
tgcctgctggtactgtagtc

SEQ ID NO: 5129 - DNA, 20 bp, Artificial Sequence
  chemically synthesized
ttttacgaataaaaacaaaa

SEQ ID NO: 5130 - DNA, 20 bp, Artificial Sequence
  chemically synthesized
tacgaataaaaacaaaacag

SEQ ID NO: 5131 - DNA, 20 bp, Artificial Sequence
  chemically synthesized
aaacagaagttgcatttaaa

SEQ ID NO: 5132 - DNA, 20 bp, Artificial Sequence
  chemically synthesized
agaagttgcatttaaaaaga

SEQ ID NO: 5133 - DNA, 20 bp, Artificial Sequence
  chemically synthesized
taaaaagaaagaaatattac

SEQ ID NO: 5134 - DNA, 20 bp, Artificial Sequence
  chemically synthesized
aaagaaagaaatattaccag

SEQ ID NO: 5135 - DNA, 20 bp, Artificial Sequence
  chemically synthesized
taccagcagaattatgcttg

SEQ ID NO: 5136 - DNA, 20 bp, Artificial Sequence
  chemically synthesized
gcttgaagaaacatttaatc

SEQ ID NO: 5137 - DNA, 20 bp, Artificial Sequence
  chemically synthesized
caattgtgtttaccctaaaa

SEQ ID NO: 5138 - DNA, 20 bp, Artificial Sequence
  chemically synthesized
aattgtgtttaccctaaaat

SEQ ID NO: 5139 - DNA, 20 bp, Artificial Sequence
  chemically synthesized
gtgtttaccctaaaataggt

SEQ ID NO: 5140 - DNA, 20 bp, Artificial Sequence
  chemically synthesized
ataggtaagattaaccctta

SEQ ID NO: 5141 - DNA, 20 bp, Artificial Sequence
  chemically synthesized
ttgtttaataaatatatatt

SEQ ID NO: 5142 - DNA, 20 bp, Artificial Sequence
  chemically synthesized
ataaatatatattgagctcc

SEQ ID NO: 5143 - DNA, 20 bp, Artificial Sequence
  chemically synthesized
taaatatatattgagctcct

SEQ ID NO: 5144 - DNA, 20 bp, Artificial Sequence
  chemically synthesized
tgagctcctaggcactgttc

SEQ ID NO: 5145 - DNA, 20 bp, Artificial Sequence
  chemically synthesized
gagctcctaggcactgttct

SEQ ID NO: 5146 - DNA, 20 bp, Artificial Sequence
  chemically synthesized
ctaggcactgttctaggtac

SEQ ID NO: 5147 - DNA, 20 bp, Artificial Sequence
  chemically synthesized
taggcactgttctaggtacc

SEQ ID NO: 5148 - DNA, 20 bp, Artificial Sequence
  chemically synthesized
gttctaggtaccgggcttaa

SEQ ID NO: 5149 - DNA, 20 bp, Artificial Sequence
  chemically synthesized
ctaggtaccgggcttaatag

SEQ ID NO: 5150 - DNA, 20 bp, Artificial Sequence
  chemically synthesized
cgggcttaatagtggccaac

SEQ ID NO: 5151 - DNA, 20 bp, Artificial Sequence
  chemically synthesized
cttaatagtggccaaccaga

SEQ ID NO: 5152 - DNA, 20 bp, Artificial Sequence
  chemically synthesized
agtggccaaccagacagccc

SEQ ID NO: 5153 - DNA, 20 bp, Artificial Sequence
  chemically synthesized
caaccagacagccccagccc

SEQ ID NO: 5154 - DNA, 20 bp, Artificial Sequence
  chemically synthesized
cccagcccctacattgtgta

SEQ ID NO: 5155 - DNA, 20 bp, Artificial Sequence
  chemically synthesized
gtgtatagtctattatgtaa

SEQ ID NO: 5156 - DNA, 20 bp, Artificial Sequence
  chemically synthesized
attatgtaacagttattgaa

SEQ ID NO: 5157 - DNA, 20 bp, Artificial Sequence
  chemically synthesized
tggacttattaacaaaacca

SEQ ID NO: 5158 - DNA, 20 bp, Artificial Sequence
  chemically synthesized
acttattaacaaaaccaaag

SEQ ID NO: 5159 - DNA, 20 bp, Artificial Sequence
  chemically synthesized
aaaaccaaagaagtaattct

SEQ ID NO: 5160 - DNA, 20 bp, Artificial Sequence
  chemically synthesized
tgacatatgaatataaaata

SEQ ID NO: 5161 - DNA, 20 bp, Artificial Sequence
  chemically synthesized
aaactgttaaaatatattaa

SEQ ID NO: 5162 - DNA, 20 bp, Artificial Sequence
  chemically synthesized
ttatttttttttaaaaaaaa

SEQ ID NO: 5163 - DNA, 20 bp, Artificial Sequence
  chemically synthesized
tttaaaaaaaaaagcctgaa

SEQ ID NO: 5164 - DNA, 20 bp, Artificial Sequence
  chemically synthesized
agcctgaacagtaaattcaa

SEQ ID NO: 5165 - DNA, 20 bp, Artificial Sequence
  chemically synthesized
gcctgaacagtaaattcaaa

SEQ ID NO: 5166 - DNA, 20 bp, Artificial Sequence
  chemically synthesized
aacagtaaattcaaaaggaa

SEQ ID NO: 5167 - DNA, 20 bp, Artificial Sequence
  chemically synthesized
agtaatgataattaattgtt

SEQ ID NO: 5168 - DNA, 20 bp, Artificial Sequence
  chemically synthesized
tgataattaattgttgagca

SEQ ID NO: 5169 - DNA, 20 bp, Artificial Sequence
  chemically synthesized
atctataatcctaaaaccct

SEQ ID NO: 5170 - DNA, 20 bp, Artificial Sequence
  chemically synthesized
aaccctaagtaaacacttaa

SEQ ID NO: 5171 - DNA, 20 bp, Artificial Sequence
  chemically synthesized
cttaaaagatgttctgaaat

SEQ ID NO: 5172 - DNA, 20 bp, Artificial Sequence
  chemically synthesized
ttaaaagatgttctgaaatc

SEQ ID NO: 5173 - DNA, 20 bp, Artificial Sequence
  chemically synthesized
agatgttctgaaatcaggaa

SEQ ID NO: 5174 - DNA, 20 bp, Artificial Sequence
  chemically synthesized
tgaaatcaggaaaagaatta

SEQ ID NO: 5175 - DNA, 20 bp, Artificial Sequence
  chemically synthesized
cttttgtgtttctcttttat

SEQ ID NO: 5176 - DNA, 20 bp, Artificial Sequence
  chemically synthesized
tctcttttatcagttgaaaa

SEQ ID NO: 5177 - DNA, 20 bp, Artificial Sequence
  chemically synthesized
ctcttttatcagttgaaaaa

SEQ ID NO: 5178 - DNA, 20 bp, Artificial Sequence
  chemically synthesized
ttatcagttgaaaaaaggca

SEQ ID NO: 5179 - DNA, 20 bp, Artificial Sequence
  chemically synthesized
tcagttgaaaaaaggcacag

SEQ ID NO: 5180 - DNA, 20 bp, Artificial Sequence
  chemically synthesized
gcacagtagctcatgcctgt

SEQ ID NO: 5181 - DNA, 20 bp, Artificial Sequence
  chemically synthesized
gtagctcatgcctgtaagaa

SEQ ID NO: 5182 - DNA, 20 bp, Artificial Sequence
  chemically synthesized
agctcatgcctgtaagaaca

SEQ ID NO: 5183 - DNA, 20 bp, Artificial Sequence
  chemically synthesized
tgcctgtaagaacagagctt

SEQ ID NO: 5184 - DNA, 20 bp, Artificial Sequence
  chemically synthesized
gcctgtaagaacagagcttt

SEQ ID NO: 5185 - DNA, 20 bp, Artificial Sequence
  chemically synthesized
ctgtaagaacagagctttgg

SEQ ID NO: 5186 - DNA, 20 bp, Artificial Sequence
  chemically synthesized
gaacagagctttgggagtgc

SEQ ID NO: 5187 - DNA, 20 bp, Artificial Sequence
  chemically synthesized
aacagagctttgggagtgca

SEQ ID NO: 5188 - DNA, 20 bp, Artificial Sequence
  chemically synthesized
agagctttgggagtgcaagg

SEQ ID NO: 5189 - DNA, 20 bp, Artificial Sequence
  chemically synthesized
gagctttgggagtgcaaggc

SEQ ID NO: 5190 - DNA, 20 bp, Artificial Sequence
  chemically synthesized
ctttgggagtgcaaggcagg

SEQ ID NO: 5191 - DNA, 20 bp, Artificial Sequence
  chemically synthesized
gcaaggcaggcggatcactt

SEQ ID NO: 5192 - DNA, 20 bp, Artificial Sequence
  chemically synthesized
caaggcaggcggatcacttg

SEQ ID NO: 5193 - DNA, 20 bp, Artificial Sequence
  chemically synthesized
gcaggcggatcacttgaggc

SEQ ID NO: 5194 - DNA, 20 bp, Artificial Sequence
  chemically synthesized
caggcggatcacttgaggcc

SEQ ID NO: 5195 - DNA, 20 bp, Artificial Sequence
  chemically synthesized
ggcggatcacttgaggccag

SEQ ID NO: 5196 - DNA, 20 bp, Artificial Sequence
  chemically synthesized
tcacttgaggccaggagttc

SEQ ID NO: 5197 - DNA, 20 bp, Artificial Sequence
  chemically synthesized
tgaggccaggagttccagac

SEQ ID NO: 5198 - DNA, 20 bp, Artificial Sequence
  chemically synthesized
ccaggagttccagaccagcc

SEQ ID NO: 5199 - DNA, 20 bp, Artificial Sequence
  chemically synthesized
caggagttccagaccagcct

SEQ ID NO: 5200 - DNA, 20 bp, Artificial Sequence
  chemically synthesized
ccagaccagcctgggcaaca

SEQ ID NO: 5201 - DNA, 20 bp, Artificial Sequence
  chemically synthesized
catctctacaaaaaataaaa

SEQ ID NO: 5202 - DNA, 20 bp, Artificial Sequence
  chemically synthesized
aaaaaataaaaaagaattat

SEQ ID NO: 5203 - DNA, 20 bp, Artificial Sequence
  chemically synthesized
tttctgtgtgcctgtaatcc

SEQ ID NO: 5204 - DNA, 20 bp, Artificial Sequence
  chemically synthesized
tgtaatcctagctattccga

SEQ ID NO: 5205 - DNA, 20 bp, Artificial Sequence
  chemically synthesized
tcctagctattccgaaagct

SEQ ID NO: 5206 - DNA, 20 bp, Artificial Sequence
  chemically synthesized
cctagctattccgaaagctg

SEQ ID NO: 5207 - DNA, 20 bp, Artificial Sequence
  chemically synthesized
agctattccgaaagctgagg

SEQ ID NO: 5208 - DNA, 20 bp, Artificial Sequence
  chemically synthesized
gctattccgaaagctgaggc

SEQ ID NO: 5209 - DNA, 20 bp, Artificial Sequence
  chemically synthesized
tattccgaaagctgaggcag

SEQ ID NO: 5210 - DNA, 20 bp, Artificial Sequence
  chemically synthesized
attccgaaagctgaggcagg

SEQ ID NO: 5211 - DNA, 20 bp, Artificial Sequence
  chemically synthesized
ctgaggcaggaggatctttt

SEQ ID NO: 5212 - DNA, 20 bp, Artificial Sequence
  chemically synthesized
gcaggaggatcttttgagcc

SEQ ID NO: 5213 - DNA, 20 bp, Artificial Sequence
  chemically synthesized
caggaggatcttttgagccc

SEQ ID NO: 5214 - DNA, 20 bp, Artificial Sequence
  chemically synthesized
ggaggatcttttgagcccag

SEQ ID NO: 5215 - DNA, 20 bp, Artificial Sequence
  chemically synthesized
tcttttgagcccaggagttt

SEQ ID NO: 5216 - DNA, 20 bp, Artificial Sequence
  chemically synthesized
cttttgagcccaggagtttg

SEQ ID NO: 5217 - DNA, 20 bp, Artificial Sequence
  chemically synthesized
agcccaggagtttgaggtta

SEQ ID NO: 5218 - DNA, 20 bp, Artificial Sequence
  chemically synthesized
gcccaggagtttgaggttac

SEQ ID NO: 5219 - DNA, 20 bp, Artificial Sequence
  chemically synthesized
cccaggagtttgaggttaca

SEQ ID NO: 5220 - DNA, 20 bp, Artificial Sequence
  chemically synthesized
caggagtttgaggttacagg

SEQ ID NO: 5221 - DNA, 20 bp, Artificial Sequence
  chemically synthesized
tacagggagttatgatgtgc

SEQ ID NO: 5222 - DNA, 20 bp, Artificial Sequence
  chemically synthesized
tatgatgtgccagtgtactc

SEQ ID NO: 5223 - DNA, 20 bp, Artificial Sequence
  chemically synthesized
tgtgccagtgtactccagcc

SEQ ID NO: 5224 - DNA, 20 bp, Artificial Sequence
  chemically synthesized
gtgccagtgtactccagcct

SEQ ID NO: 5225 - DNA, 20 bp, Artificial Sequence
  chemically synthesized
tgccagtgtactccagcctg

SEQ ID NO: 5226 - DNA, 20 bp, Artificial Sequence
  chemically synthesized
actccagcctggggaacacc

SEQ ID NO: 5227 - DNA, 20 bp, Artificial Sequence
  chemically synthesized
aaaatgcttgcaataatgcc

SEQ ID NO: 5228 - DNA, 20 bp, Artificial Sequence
  chemically synthesized
ttgcaataatgcctggcaca

SEQ ID NO: 5229 - DNA, 20 bp, Artificial Sequence
  chemically synthesized
caataatgcctggcacatag

SEQ ID NO: 5230 - DNA, 20 bp, Artificial Sequence
  chemically synthesized
aataatgcctggcacataga

SEQ ID NO: 5231 - DNA, 20 bp, Artificial Sequence
  chemically synthesized
gcctggcacatagaaggtaa

SEQ ID NO: 5232 - DNA, 20 bp, Artificial Sequence
  chemically synthesized
ggcacatagaaggtaacagt

SEQ ID NO: 5233 - DNA, 20 bp, Artificial Sequence
  chemically synthesized
aagtgttaactgtaataacc

SEQ ID NO: 5234 - DNA, 20 bp, Artificial Sequence
  chemically synthesized
agtgttaactgtaataaccc

SEQ ID NO: 5235 - DNA, 20 bp, Artificial Sequence
  chemically synthesized
aactgtaataacccaggtct

SEQ ID NO: 5236 - DNA, 20 bp, Artificial Sequence
  chemically synthesized
taacccaggtctaagtgtgt

SEQ ID NO: 5237 - DNA, 20 bp, Artificial Sequence
  chemically synthesized
aacccaggtctaagtgtgta

SEQ ID NO: 5238 - DNA, 20 bp, Artificial Sequence
  chemically synthesized
ggtctaagtgtgtaaggcaa

SEQ ID NO: 5239 - DNA, 20 bp, Artificial Sequence
  chemically synthesized
gtgtaaggcaatagaaaaat

SEQ ID NO: 5240 - DNA, 20 bp, Artificial Sequence
  chemically synthesized
tgtaaggcaatagaaaaatt

SEQ ID NO: 5241 - DNA, 20 bp, Artificial Sequence
  chemically synthesized
gtaaggcaatagaaaaattg

SEQ ID NO: 5242 - DNA, 20 bp, Artificial Sequence
  chemically synthesized
atagaaaaattggggcaaat

SEQ ID NO: 5243 - DNA, 20 bp, Artificial Sequence
  chemically synthesized
aagcctgacctatgtatcta

SEQ ID NO: 5244 - DNA, 20 bp, Artificial Sequence
  chemically synthesized
gacctatgtatctacagaat

SEQ ID NO: 5245 - DNA, 20 bp, Artificial Sequence
  chemically synthesized
tgtatctacagaatcagttt

SEQ ID NO: 5246 - DNA, 20 bp, Artificial Sequence
  chemically synthesized
ctacagaatcagtttgagct

SEQ ID NO: 5247 - DNA, 20 bp, Artificial Sequence
  chemically synthesized
tacagaatcagtttgagctt

SEQ ID NO: 5248 - DNA, 20 bp, Artificial Sequence
  chemically synthesized
atcagtttgagcttaggtaa

SEQ ID NO: 5249 - DNA, 20 bp, Artificial Sequence
  chemically synthesized
gagcttaggtaacagacctg

SEQ ID NO: 5250 - DNA, 20 bp, Artificial Sequence
  chemically synthesized
gcttaggtaacagacctgtg

SEQ ID NO: 5251 - DNA, 20 bp, Artificial Sequence
  chemically synthesized
gtaacagacctgtggagcac

SEQ ID NO: 5252 - DNA, 20 bp, Artificial Sequence
  chemically synthesized
gtggagcaccagtaattaca

SEQ ID NO: 5253 - DNA, 20 bp, Artificial Sequence
  chemically synthesized
agcaccagtaattacacagt

SEQ ID NO: 5254 - DNA, 20 bp, Artificial Sequence
  chemically synthesized
acacagtaagtgttaaccaa

SEQ ID NO: 5255 - DNA, 20 bp, Artificial Sequence
  chemically synthesized
gtaagtgttaaccaaaagca

SEQ ID NO: 5256 - DNA, 20 bp, Artificial Sequence
  chemically synthesized
tgttaaccaaaagcatagaa

SEQ ID NO: 5257 - DNA, 20 bp, Artificial Sequence
  chemically synthesized
gttaaccaaaagcatagaat

SEQ ID NO: 5258 - DNA, 20 bp, Artificial Sequence
  chemically synthesized
agaataggaatatcttgttc

SEQ ID NO: 5259 - DNA, 20 bp, Artificial Sequence
  chemically synthesized
gaataggaatatcttgttca

SEQ ID NO: 5260 - DNA, 20 bp, Artificial Sequence
  chemically synthesized
aataggaatatcttgttcaa

SEQ ID NO: 5261 - DNA, 20 bp, Artificial Sequence
  chemically synthesized
tatcttgttcaagggacccc

SEQ ID NO: 5262 - DNA, 20 bp, Artificial Sequence
  chemically synthesized
cccccagccttatacatctc

SEQ ID NO: 5263 - DNA, 20 bp, Artificial Sequence
  chemically synthesized
ccccagccttatacatctca

SEQ ID NO: 5264 - DNA, 20 bp, Artificial Sequence
  chemically synthesized
gccttatacatctcaaggtg

SEQ ID NO: 5265 - DNA, 20 bp, Artificial Sequence
  chemically synthesized
tatacatctcaaggtgcaga

SEQ ID NO: 5266 - DNA, 20 bp, Artificial Sequence
  chemically synthesized
tgcagaaagatgacttaata

SEQ ID NO: 5267 - DNA, 20 bp, Artificial Sequence
  chemically synthesized
gcagaaagatgacttaatat

SEQ ID NO: 5268 - DNA, 20 bp, Artificial Sequence
  chemically synthesized
atataggacccattttttcc

SEQ ID NO: 5269 - DNA, 20 bp, Artificial Sequence
  chemically synthesized
cccattttttcctagttctc

SEQ ID NO: 5270 - DNA, 20 bp, Artificial Sequence
  chemically synthesized
cattttttcctagttctcca

SEQ ID NO: 5271 - DNA, 20 bp, Artificial Sequence
  chemically synthesized
tagttctccagagtttttat

SEQ ID NO: 5272 - DNA, 20 bp, Artificial Sequence
  chemically synthesized
cagagtttttattggttctt

SEQ ID NO: 5273 - DNA, 20 bp, Artificial Sequence
  chemically synthesized
gtttttattggttcttgaga

SEQ ID NO: 5274 - DNA, 20 bp, Artificial Sequence
  chemically synthesized
tttattggttcttgagaaag

SEQ ID NO: 5275 - DNA, 20 bp, Artificial Sequence
  chemically synthesized
attggttcttgagaaagtag

SEQ ID NO: 5276 - DNA, 20 bp, Artificial Sequence
  chemically synthesized
ttggttcttgagaaagtagt

SEQ ID NO: 5277 - DNA, 20 bp, Artificial Sequence
  chemically synthesized
tggttcttgagaaagtagta

SEQ ID NO: 5278 - DNA, 20 bp, Artificial Sequence
  chemically synthesized
ggttcttgagaaagtagtag

SEQ ID NO: 5279 - DNA, 20 bp, Artificial Sequence
  chemically synthesized
aaagtagtaggggaatgttt

SEQ ID NO: 5280 - DNA, 20 bp, Artificial Sequence
  chemically synthesized
gaatgttttagaaaatgaat

SEQ ID NO: 5281 - DNA, 20 bp, Artificial Sequence
  chemically synthesized
gtccaactgaaattacatgt

SEQ ID NO: 5282 - DNA, 20 bp, Artificial Sequence
  chemically synthesized
aactgaaattacatgtcagt

SEQ ID NO: 5283 - DNA, 20 bp, Artificial Sequence
  chemically synthesized
gtcagtaagtttttatatat

SEQ ID NO: 5284 - DNA, 20 bp, Artificial Sequence
  chemically synthesized
ttttatatattggtaaattt

SEQ ID NO: 5285 - DNA, 20 bp, Artificial Sequence
  chemically synthesized
tatatattggtaaattttag

SEQ ID NO: 5286 - DNA, 20 bp, Artificial Sequence
  chemically synthesized
ggtaaattttagtagacatg

SEQ ID NO: 5287 - DNA, 20 bp, Artificial Sequence
  chemically synthesized
aaattttagtagacatgtag

SEQ ID NO: 5288 - DNA, 20 bp, Artificial Sequence
  chemically synthesized
aaacattttcttttttccta

SEQ ID NO: 5289 - DNA, 20 bp, Artificial Sequence
  chemically synthesized
ttcttttttcctaaagtgct

SEQ ID NO: 5290 - DNA, 20 bp, Artificial Sequence
  chemically synthesized
tattttttccgttttttgat

SEQ ID NO: 5291 - DNA, 20 bp, Artificial Sequence
  chemically synthesized
ccgttttttgattggttact

SEQ ID NO: 5292 - DNA, 20 bp, Artificial Sequence
  chemically synthesized
cgttttttgattggttactt

SEQ ID NO: 5293 - DNA, 20 bp, Artificial Sequence
  chemically synthesized
ttttttgattggttacttgg

SEQ ID NO: 5294 - DNA, 20 bp, Artificial Sequence
  chemically synthesized
ggttacttgggagctttttt

SEQ ID NO: 5295 - DNA, 20 bp, Artificial Sequence
  chemically synthesized
gttacttgggagcttttttg

SEQ ID NO: 5296 - DNA, 20 bp, Artificial Sequence
  chemically synthesized
ggagcttttttgaggaaatt

SEQ ID NO: 5297 - DNA, 20 bp, Artificial Sequence
  chemically synthesized
tgaggaaatttagtgaactg

SEQ ID NO: 5298 - DNA, 20 bp, Artificial Sequence
  chemically synthesized
aaatttagtgaactgcagaa

SEQ ID NO: 5299 - DNA, 20 bp, Artificial Sequence
  chemically synthesized
aatttagtgaactgcagaat

SEQ ID NO: 5300 - DNA, 20 bp, Artificial Sequence
  chemically synthesized
agaatgggtttgcaaccatt

SEQ ID NO: 5301 - DNA, 20 bp, Artificial Sequence
  chemically synthesized
ggtatttttgttttgttttt

SEQ ID NO: 5302 - DNA, 20 bp, Artificial Sequence
  chemically synthesized
tatttttgttttgtttttta

SEQ ID NO: 5303 - DNA, 20 bp, Artificial Sequence
  chemically synthesized
atttttgttttgttttttag

SEQ ID NO: 5304 - DNA, 20 bp, Artificial Sequence
  chemically synthesized
taacatttcttaatcatttt

SEQ ID NO: 5305 - DNA, 20 bp, Artificial Sequence
  chemically synthesized
atttcttaatcatttttagc

SEQ ID NO: 5306 - DNA, 20 bp, Artificial Sequence
  chemically synthesized
tttgctgatttgacaaacta

SEQ ID NO: 5307 - DNA, 20 bp, Artificial Sequence
  chemically synthesized
ctgatttgacaaactacagt

SEQ ID NO: 5308 - DNA, 20 bp, Artificial Sequence
  chemically synthesized
tttgacaaactacagttaga

SEQ ID NO: 5309 - DNA, 20 bp, Artificial Sequence
  chemically synthesized
gaatttttaaattttgcatc

SEQ ID NO: 5310 - DNA, 20 bp, Artificial Sequence
  chemically synthesized
acataaaattgtccaaaaaa

SEQ ID NO: 5311 - DNA, 20 bp, Artificial Sequence
  chemically synthesized
tgtccaaaaaatagtatttt

SEQ ID NO: 5312 - DNA, 20 bp, Artificial Sequence
  chemically synthesized
aaaatagtattttcagccac

SEQ ID NO: 5313 - DNA, 20 bp, Artificial Sequence
  chemically synthesized
cagccactagattgtgtgtt

SEQ ID NO: 5314 - DNA, 20 bp, Artificial Sequence
  chemically synthesized
gtgtgttaagtctattgtca

SEQ ID NO: 5315 - DNA, 20 bp, Artificial Sequence
  chemically synthesized
gtgttaagtctattgtcaca

SEQ ID NO: 5316 - DNA, 20 bp, Artificial Sequence
  chemically synthesized
cacagagtcattttactttt

SEQ ID NO: 5317 - DNA, 20 bp, Artificial Sequence
  chemically synthesized
ttaactttttaaaataattc

SEQ ID NO: 5318 - DNA, 20 bp, Artificial Sequence
  chemically synthesized
actgccaatacatgaaaaat

SEQ ID NO: 5319 - DNA, 20 bp, Artificial Sequence
  chemically synthesized
atacatgaaaaattggtcac

SEQ ID NO: 5320 - DNA, 20 bp, Artificial Sequence
  chemically synthesized
tttttttttgacttttattt

SEQ ID NO: 5321 - DNA, 20 bp, Artificial Sequence
  chemically synthesized
ttttttttgacttttatttt

SEQ ID NO: 5322 - DNA, 20 bp, Artificial Sequence
  chemically synthesized
taggttcatgtgtacatgtg

SEQ ID NO: 5323 - DNA, 20 bp, Artificial Sequence
  chemically synthesized
aggttcatgtgtacatgtgc

SEQ ID NO: 5324 - DNA, 20 bp, Artificial Sequence
  chemically synthesized
acatgtgcaggtgtgttata

SEQ ID NO: 5325 - DNA, 20 bp, Artificial Sequence
  chemically synthesized
catgtgcaggtgtgttatac

SEQ ID NO: 5326 - DNA, 20 bp, Artificial Sequence
  chemically synthesized
acaggtaaattgcgtgtcat

SEQ ID NO: 5327 - DNA, 20 bp, Artificial Sequence
  chemically synthesized
caggtaaattgcgtgtcatg

SEQ ID NO: 5328 - DNA, 20 bp, Artificial Sequence
  chemically synthesized
aggtaaattgcgtgtcatga

SEQ ID NO: 5329 - DNA, 20 bp, Artificial Sequence
  chemically synthesized
aattgcgtgtcatgagggtt

SEQ ID NO: 5330 - DNA, 20 bp, Artificial Sequence
  chemically synthesized
tgtcatgagggtttggtgta

SEQ ID NO: 5331 - DNA, 20 bp, Artificial Sequence
  chemically synthesized
gtcatgagggtttggtgtac

SEQ ID NO: 5332 - DNA, 20 bp, Artificial Sequence
  chemically synthesized
gtacaggtgatttcattacc

SEQ ID NO: 5333 - DNA, 20 bp, Artificial Sequence
  chemically synthesized
tacaggtgatttcattaccc

SEQ ID NO: 5334 - DNA, 20 bp, Artificial Sequence
  chemically synthesized
gatttcattacccaggtaat

SEQ ID NO: 5335 - DNA, 20 bp, Artificial Sequence
  chemically synthesized
cattacccaggtaataagca

SEQ ID NO: 5336 - DNA, 20 bp, Artificial Sequence
  chemically synthesized
gtaataagcatagtacccaa

SEQ ID NO: 5337 - DNA, 20 bp, Artificial Sequence
  chemically synthesized
taataagcatagtacccaat

SEQ ID NO: 5338 - DNA, 20 bp, Artificial Sequence
  chemically synthesized
taagcatagtacccaatagg

SEQ ID NO: 5339 - DNA, 20 bp, Artificial Sequence
  chemically synthesized
ctcacccttctcccaccctc

SEQ ID NO: 5340 - DNA, 20 bp, Artificial Sequence
  chemically synthesized
acccttctcccaccctcaag

SEQ ID NO: 5341 - DNA, 20 bp, Artificial Sequence
  chemically synthesized
cccttctcccaccctcaagt

SEQ ID NO: 5342 - DNA, 20 bp, Artificial Sequence
  chemically synthesized
tcccaccctcaagtaggccc

SEQ ID NO: 5343 - DNA, 20 bp, Artificial Sequence
  chemically synthesized
tctttgtgtccatgtatact

SEQ ID NO: 5344 - DNA, 20 bp, Artificial Sequence
  chemically synthesized
gtccatgtatactcagtgtt

SEQ ID NO: 5345 - DNA, 20 bp, Artificial Sequence
  chemically synthesized
ctcagtgtttagctcccact

SEQ ID NO: 5346 - DNA, 20 bp, Artificial Sequence
  chemically synthesized
agtgtttagctcccacttag

SEQ ID NO: 5347 - DNA, 20 bp, Artificial Sequence
  chemically synthesized
tttagctcccacttagaagt

SEQ ID NO: 5348 - DNA, 20 bp, Artificial Sequence
  chemically synthesized
cacttagaagtgagaacatg

SEQ ID NO: 5349 - DNA, 20 bp, Artificial Sequence
  chemically synthesized
ttagaagtgagaacatgcgg

SEQ ID NO: 5350 - DNA, 20 bp, Artificial Sequence
  chemically synthesized
aagtgagaacatgcggtagt

SEQ ID NO: 5351 - DNA, 20 bp, Artificial Sequence
  chemically synthesized
ggtagttggttttctgttcc

SEQ ID NO: 5352 - DNA, 20 bp, Artificial Sequence
  chemically synthesized
ttggttttctgttcctggat

SEQ ID NO: 5353 - DNA, 20 bp, Artificial Sequence
  chemically synthesized
tgttcctggattagttcact

SEQ ID NO: 5354 - DNA, 20 bp, Artificial Sequence
  chemically synthesized
gttcctggattagttcactt

SEQ ID NO: 5355 - DNA, 20 bp, Artificial Sequence
  chemically synthesized
tcacttaggataatgacctc

SEQ ID NO: 5356 - DNA, 20 bp, Artificial Sequence
  chemically synthesized
taatgacctctagctccatc

SEQ ID NO: 5357 - DNA, 20 bp, Artificial Sequence
  chemically synthesized
ctagctccatctggttttta

SEQ ID NO: 5358 - DNA, 20 bp, Artificial Sequence
  chemically synthesized
atctggtttttatggctgca

SEQ ID NO: 5359 - DNA, 20 bp, Artificial Sequence
  chemically synthesized
tatggctgcatagtattcca

SEQ ID NO: 5360 - DNA, 20 bp, Artificial Sequence
  chemically synthesized
tgtatcacattttctttatc

SEQ ID NO: 5361 - DNA, 20 bp, Artificial Sequence
  chemically synthesized
tttatccagtctaccattga

SEQ ID NO: 5362 - DNA, 20 bp, Artificial Sequence
  chemically synthesized
ttatccagtctaccattgat

SEQ ID NO: 5363 - DNA, 20 bp, Artificial Sequence
  chemically synthesized
gtctaccattgataggcatt

SEQ ID NO: 5364 - DNA, 20 bp, Artificial Sequence
  chemically synthesized
tctaccattgataggcattt

SEQ ID NO: 5365 - DNA, 20 bp, Artificial Sequence
  chemically synthesized
cctgtctttgttatcatgaa

SEQ ID NO: 5366 - DNA, 20 bp, Artificial Sequence
  chemically synthesized
tacacatgcatgtgtcttta

SEQ ID NO: 5367 - DNA, 20 bp, Artificial Sequence
  chemically synthesized
acatgcatgtgtctttatgg

SEQ ID NO: 5368 - DNA, 20 bp, Artificial Sequence
  chemically synthesized
tagaaaaatttgtattcctt

SEQ ID NO: 5369 - DNA, 20 bp, Artificial Sequence
  chemically synthesized
agaaaaatttgtattccttt

SEQ ID NO: 5370 - DNA, 20 bp, Artificial Sequence
  chemically synthesized
tgtattcctttaggtacata

SEQ ID NO: 5371 - DNA, 20 bp, Artificial Sequence
  chemically synthesized
tttaggtacatatagaataa

SEQ ID NO: 5372 - DNA, 20 bp, Artificial Sequence
  chemically synthesized
ttaggtacatatagaataat

SEQ ID NO: 5373 - DNA, 20 bp, Artificial Sequence
  chemically synthesized
taggtacatatagaataatg

SEQ ID NO: 5374 - DNA, 20 bp, Artificial Sequence
  chemically synthesized
atatagaataatggggttgc

SEQ ID NO: 5375 - DNA, 20 bp, Artificial Sequence
  chemically synthesized
tatagaataatggggttgct

SEQ ID NO: 5376 - DNA, 20 bp, Artificial Sequence
  chemically synthesized
atagaataatggggttgcta

SEQ ID NO: 5377 - DNA, 20 bp, Artificial Sequence
  chemically synthesized
aatggggttgctagggtgaa

SEQ ID NO: 5378 - DNA, 20 bp, Artificial Sequence
  chemically synthesized
ggggttgctagggtgaatgg

SEQ ID NO: 5379 - DNA, 20 bp, Artificial Sequence
  chemically synthesized
gtgaatggtagttctatttt

SEQ ID NO: 5380 - DNA, 20 bp, Artificial Sequence
  chemically synthesized
agttctattttcagttattt

SEQ ID NO: 5381 - DNA, 20 bp, Artificial Sequence
  chemically synthesized
cttcaaactgcttttcataa

SEQ ID NO: 5382 - DNA, 20 bp, Artificial Sequence
  chemically synthesized
ataatagctaaactaattta

SEQ ID NO: 5383 - DNA, 20 bp, Artificial Sequence
  chemically synthesized
aaactaatttacagtcccgc

SEQ ID NO: 5384 - DNA, 20 bp, Artificial Sequence
  chemically synthesized
ctaatttacagtcccgccag

SEQ ID NO: 5385 - DNA, 20 bp, Artificial Sequence
  chemically synthesized
cagtcccgccagcagtgtat

SEQ ID NO: 5386 - DNA, 20 bp, Artificial Sequence
  chemically synthesized
attttttgactttttaataa

SEQ ID NO: 5387 - DNA, 20 bp, Artificial Sequence
  chemically synthesized
tttttaataatagccattcc

SEQ ID NO: 5388 - DNA, 20 bp, Artificial Sequence
  chemically synthesized
tttaataatagccattccta

SEQ ID NO: 5389 - DNA, 20 bp, Artificial Sequence
  chemically synthesized
attgatttgcaattctctat

SEQ ID NO: 5390 - DNA, 20 bp, Artificial Sequence
  chemically synthesized
aattctctattagtgatatt

SEQ ID NO: 5391 - DNA, 20 bp, Artificial Sequence
  chemically synthesized
gcattttttcatatgctttt

SEQ ID NO: 5392 - DNA, 20 bp, Artificial Sequence
  chemically synthesized
aaattttcatgtcctttgcc

SEQ ID NO: 5393 - DNA, 20 bp, Artificial Sequence
  chemically synthesized
catgtcctttgcccagtttg

SEQ ID NO: 5394 - DNA, 20 bp, Artificial Sequence
  chemically synthesized
gtcctttgcccagtttgtag

SEQ ID NO: 5395 - DNA, 20 bp, Artificial Sequence
  chemically synthesized
tcctttgcccagtttgtagt

SEQ ID NO: 5396 - DNA, 20 bp, Artificial Sequence
  chemically synthesized
cctttgcccagtttgtagtg

SEQ ID NO: 5397 - DNA, 20 bp, Artificial Sequence
  chemically synthesized
ttgcccagtttgtagtgggg

SEQ ID NO: 5398 - DNA, 20 bp, Artificial Sequence
  chemically synthesized
tgcccagtttgtagtggggt

SEQ ID NO: 5399 - DNA, 20 bp, Artificial Sequence
  chemically synthesized
gttgttttttgcttgttaat

SEQ ID NO: 5400 - DNA, 20 bp, Artificial Sequence
  chemically synthesized
tttgcttgttaattagtttt

SEQ ID NO: 5401 - DNA, 20 bp, Artificial Sequence
  chemically synthesized
aattagttttaagttccttc

SEQ ID NO: 5402 - DNA, 20 bp, Artificial Sequence
  chemically synthesized
gattctgcatatccctttgt

SEQ ID NO: 5403 - DNA, 20 bp, Artificial Sequence
  chemically synthesized
atatccctttgttggataca

SEQ ID NO: 5404 - DNA, 20 bp, Artificial Sequence
  chemically synthesized
tttgttggatacatggtttg

SEQ ID NO: 5405 - DNA, 20 bp, Artificial Sequence
  chemically synthesized
gatatttttctcccattgtg

SEQ ID NO: 5406 - DNA, 20 bp, Artificial Sequence
  chemically synthesized
atatttttctcccattgtgt

SEQ ID NO: 5407 - DNA, 20 bp, Artificial Sequence
  chemically synthesized
gttgtcttttactctgttga

SEQ ID NO: 5408 - DNA, 20 bp, Artificial Sequence
  chemically synthesized
tgatagtttcttttgccatg

SEQ ID NO: 5409 - DNA, 20 bp, Artificial Sequence
  chemically synthesized
gatagtttcttttgccatgc

SEQ ID NO: 5410 - DNA, 20 bp, Artificial Sequence
  chemically synthesized
tagtttcttttgccatgcag

SEQ ID NO: 5411 - DNA, 20 bp, Artificial Sequence
  chemically synthesized
tttgccatgcaggagctcgt

SEQ ID NO: 5412 - DNA, 20 bp, Artificial Sequence
  chemically synthesized
ttgccatgcaggagctcgtt

SEQ ID NO: 5413 - DNA, 20 bp, Artificial Sequence
  chemically synthesized
atttgtgtttgtttttgttg

SEQ ID NO: 5414 - DNA, 20 bp, Artificial Sequence
  chemically synthesized
gtttttgttgcagttgcttt

SEQ ID NO: 5415 - DNA, 20 bp, Artificial Sequence
  chemically synthesized
cttcatcataaaatctgtgc

SEQ ID NO: 5416 - DNA, 20 bp, Artificial Sequence
  chemically synthesized
ttcatcataaaatctgtgcc

SEQ ID NO: 5417 - DNA, 20 bp, Artificial Sequence
  chemically synthesized
tcatcataaaatctgtgcca

SEQ ID NO: 5418 - DNA, 20 bp, Artificial Sequence
  chemically synthesized
tctgtgccagggcctatgtc

SEQ ID NO: 5419 - DNA, 20 bp, Artificial Sequence
  chemically synthesized
gccagggcctatgtccagaa

SEQ ID NO: 5420 - DNA, 20 bp, Artificial Sequence
  chemically synthesized
atgtccagaatggtatttcc

SEQ ID NO: 5421 - DNA, 20 bp, Artificial Sequence
  chemically synthesized
tgtccagaatggtatttcct

SEQ ID NO: 5422 - DNA, 20 bp, Artificial Sequence
  chemically synthesized
gtatttcctaggttgtcttc

SEQ ID NO: 5423 - DNA, 20 bp, Artificial Sequence
  chemically synthesized
tatttcctaggttgtcttcc

SEQ ID NO: 5424 - DNA, 20 bp, Artificial Sequence
  chemically synthesized
atttcctaggttgtcttcca

SEQ ID NO: 5425 - DNA, 20 bp, Artificial Sequence
  chemically synthesized
ttccagggtttttacaattt

SEQ ID NO: 5426 - DNA, 20 bp, Artificial Sequence
  chemically synthesized
ttatgtctttaatccatctt

SEQ ID NO: 5427 - DNA, 20 bp, Artificial Sequence
  chemically synthesized
cttgagttgatttttgtata

SEQ ID NO: 5428 - DNA, 20 bp, Artificial Sequence
  chemically synthesized
ttgatttttgtatatggcac

SEQ ID NO: 5429 - DNA, 20 bp, Artificial Sequence
  chemically synthesized
tgatttttgtatatggcaca

SEQ ID NO: 5430 - DNA, 20 bp, Artificial Sequence
  chemically synthesized
tttttgtatatggcacaagg

SEQ ID NO: 5431 - DNA, 20 bp, Artificial Sequence
  chemically synthesized
ttttgtatatggcacaagga

SEQ ID NO: 5432 - DNA, 20 bp, Artificial Sequence
  chemically synthesized
tttgtatatggcacaaggaa

SEQ ID NO: 5433 - DNA, 20 bp, Artificial Sequence
  chemically synthesized
ttgtatatggcacaaggaag

SEQ ID NO: 5434 - DNA, 20 bp, Artificial Sequence
  chemically synthesized
tatggcacaaggaaggggtc

SEQ ID NO: 5435 - DNA, 20 bp, Artificial Sequence
  chemically synthesized
cagtttcactccaattccta

SEQ ID NO: 5436 - DNA, 20 bp, Artificial Sequence
  chemically synthesized
ttcactccaattcctatggc

SEQ ID NO: 5437 - DNA, 20 bp, Artificial Sequence
  chemically synthesized
cctatggctagcaattatcc

SEQ ID NO: 5438 - DNA, 20 bp, Artificial Sequence
  chemically synthesized
ccagcaccatttattgaata

SEQ ID NO: 5439 - DNA, 20 bp, Artificial Sequence
  chemically synthesized
agcaccatttattgaatacg

SEQ ID NO: 5440 - DNA, 20 bp, Artificial Sequence
  chemically synthesized
gttttttgtcaactttgttg

SEQ ID NO: 5441 - DNA, 20 bp, Artificial Sequence
  chemically synthesized
ttgtcaactttgttgaagat

SEQ ID NO: 5442 - DNA, 20 bp, Artificial Sequence
  chemically synthesized
caactttgttgaagatcaga

SEQ ID NO: 5443 - DNA, 20 bp, Artificial Sequence
  chemically synthesized
gttgaagatcagatggttgt

SEQ ID NO: 5444 - DNA, 20 bp, Artificial Sequence
  chemically synthesized
atcagatggttgtaagtgtg

SEQ ID NO: 5445 - DNA, 20 bp, Artificial Sequence
  chemically synthesized
aagtgtgtggctttatttct

SEQ ID NO: 5446 - DNA, 20 bp, Artificial Sequence
  chemically synthesized
cttggctctctattctccat

SEQ ID NO: 5447 - DNA, 20 bp, Artificial Sequence
  chemically synthesized
ctatgtgtctgtttttataa

SEQ ID NO: 5448 - DNA, 20 bp, Artificial Sequence
  chemically synthesized
tataacagtaccctgctgtt

SEQ ID NO: 5449 - DNA, 20 bp, Artificial Sequence
  chemically synthesized
ataacagtaccctgctgttc

SEQ ID NO: 5450 - DNA, 20 bp, Artificial Sequence
  chemically synthesized
ccctgctgttcaggttccta

SEQ ID NO: 5451 - DNA, 20 bp, Artificial Sequence
  chemically synthesized
ttcaggttcctatagccttt

SEQ ID NO: 5452 - DNA, 20 bp, Artificial Sequence
  chemically synthesized
atagccttttagtataaaat

SEQ ID NO: 5453 - DNA, 20 bp, Artificial Sequence
  chemically synthesized
atcggctaatgtgatgcctc

SEQ ID NO: 5454 - DNA, 20 bp, Artificial Sequence
  chemically synthesized
ccagctttgttctttttgct

SEQ ID NO: 5455 - DNA, 20 bp, Artificial Sequence
  chemically synthesized
cagctttgttctttttgctt

SEQ ID NO: 5456 - DNA, 20 bp, Artificial Sequence
  chemically synthesized
ctttttgcttaggattgctt

SEQ ID NO: 5457 - DNA, 20 bp, Artificial Sequence
  chemically synthesized
ttaggattgctttggctatt

SEQ ID NO: 5458 - DNA, 20 bp, Artificial Sequence
  chemically synthesized
taggattgctttggctattt

SEQ ID NO: 5459 - DNA, 20 bp, Artificial Sequence
  chemically synthesized
tggctatttgggctcctttt

SEQ ID NO: 5460 - DNA, 20 bp, Artificial Sequence
  chemically synthesized
ggctatttgggctccttttt

SEQ ID NO: 5461 - DNA, 20 bp, Artificial Sequence
  chemically synthesized
ggtccatattaattttaaaa

SEQ ID NO: 5462 - DNA, 20 bp, Artificial Sequence
  chemically synthesized
aattttaaaacagttttttc

SEQ ID NO: 5463 - DNA, 20 bp, Artificial Sequence
  chemically synthesized
cagttttttctggttttgtg

SEQ ID NO: 5464 - DNA, 20 bp, Artificial Sequence
  chemically synthesized
agttttttctggttttgtga

SEQ ID NO: 5465 - DNA, 20 bp, Artificial Sequence
  chemically synthesized
ggttttgtgaaggatatcat

SEQ ID NO: 5466 - DNA, 20 bp, Artificial Sequence
  chemically synthesized
tttgtgaaggatatcattgg

SEQ ID NO: 5467 - DNA, 20 bp, Artificial Sequence
  chemically synthesized
aggatatcattggtagttta

SEQ ID NO: 5468 - DNA, 20 bp, Artificial Sequence
  chemically synthesized
ggatatcattggtagtttat

SEQ ID NO: 5469 - DNA, 20 bp, Artificial Sequence
  chemically synthesized
tcattggtagtttataggaa

SEQ ID NO: 5470 - DNA, 20 bp, Artificial Sequence
  chemically synthesized
taggaatagcattgaatctg

SEQ ID NO: 5471 - DNA, 20 bp, Artificial Sequence
  chemically synthesized
attgaatctgtagattgctt

SEQ ID NO: 5472 - DNA, 20 bp, Artificial Sequence
  chemically synthesized
ttgaatctgtagattgcttt

SEQ ID NO: 5473 - DNA, 20 bp, Artificial Sequence
  chemically synthesized
aatctgtagattgctttggg

SEQ ID NO: 5474 - DNA, 20 bp, Artificial Sequence
  chemically synthesized
gtagattgctttgggcagta

SEQ ID NO: 5475 - DNA, 20 bp, Artificial Sequence
  chemically synthesized
attcttcctatctatgaata

SEQ ID NO: 5476 - DNA, 20 bp, Artificial Sequence
  chemically synthesized
ctctttatacctgatgtata

SEQ ID NO: 5477 - DNA, 20 bp, Artificial Sequence
  chemically synthesized
tatacctgatgtataaagaa

SEQ ID NO: 5478 - DNA, 20 bp, Artificial Sequence
  chemically synthesized
cctgatgtataaagaaaagc

SEQ ID NO: 5479 - DNA, 20 bp, Artificial Sequence
  chemically synthesized
tcaatctgttccaaaaaatt

SEQ ID NO: 5480 - DNA, 20 bp, Artificial Sequence
  chemically synthesized
caatctgttccaaaaaattg

SEQ ID NO: 5481 - DNA, 20 bp, Artificial Sequence
  chemically synthesized
atctgttccaaaaaattgag

SEQ ID NO: 5482 - DNA, 20 bp, Artificial Sequence
  chemically synthesized
tctgttccaaaaaattgagg

SEQ ID NO: 5483 - DNA, 20 bp, Artificial Sequence
  chemically synthesized
tgttccaaaaaattgaggag

SEQ ID NO: 5484 - DNA, 20 bp, Artificial Sequence
  chemically synthesized
gttccaaaaaattgaggagg

SEQ ID NO: 5485 - DNA, 20 bp, Artificial Sequence
  chemically synthesized
aggaggaactcttccctaat

SEQ ID NO: 5486 - DNA, 20 bp, Artificial Sequence
  chemically synthesized
ggaggaactcttccctaatg

SEQ ID NO: 5487 - DNA, 20 bp, Artificial Sequence
  chemically synthesized
gaactcttccctaatgaggc

SEQ ID NO: 5488 - DNA, 20 bp, Artificial Sequence
  chemically synthesized
atcattctgataccaaaacc

SEQ ID NO: 5489 - DNA, 20 bp, Artificial Sequence
  chemically synthesized
attctgataccaaaacctgg

SEQ ID NO: 5490 - DNA, 20 bp, Artificial Sequence
  chemically synthesized
tctgataccaaaacctggca

SEQ ID NO: 5491 - DNA, 20 bp, Artificial Sequence
  chemically synthesized
aaaacctggcagagacacaa

SEQ ID NO: 5492 - DNA, 20 bp, Artificial Sequence
  chemically synthesized
ggcagagacacaacagaaaa

SEQ ID NO: 5493 - DNA, 20 bp, Artificial Sequence
  chemically synthesized
caacagaaaaaagaaaactt

SEQ ID NO: 5494 - DNA, 20 bp, Artificial Sequence
  chemically synthesized
aacagaaaaaagaaaacttc

SEQ ID NO: 5495 - DNA, 20 bp, Artificial Sequence
  chemically synthesized
gccaatatccttgatgaata

SEQ ID NO: 5496 - DNA, 20 bp, Artificial Sequence
  chemically synthesized
aaaaatcctcaacaaaatac

SEQ ID NO: 5497 - DNA, 20 bp, Artificial Sequence
  chemically synthesized
aaatactagcaaaccaaatc

SEQ ID NO: 5498 - DNA, 20 bp, Artificial Sequence
  chemically synthesized
tactagcaaaccaaatccag

SEQ ID NO: 5499 - DNA, 20 bp, Artificial Sequence
  chemically synthesized
aaatccagcagcacatcaaa

SEQ ID NO: 5500 - DNA, 20 bp, Artificial Sequence
  chemically synthesized
aaagctgatctactttgatc

SEQ ID NO: 5501 - DNA, 20 bp, Artificial Sequence
  chemically synthesized
gctgatctactttgatcaag

SEQ ID NO: 5502 - DNA, 20 bp, Artificial Sequence
  chemically synthesized
ctgatctactttgatcaagt

SEQ ID NO: 5503 - DNA, 20 bp, Artificial Sequence
  chemically synthesized
gatcaagtaggctttatccc

SEQ ID NO: 5504 - DNA, 20 bp, Artificial Sequence
  chemically synthesized
atcaagtaggctttatccct

SEQ ID NO: 5505 - DNA, 20 bp, Artificial Sequence
  chemically synthesized
aggctttatccctgggatgc

SEQ ID NO: 5506 - DNA, 20 bp, Artificial Sequence
  chemically synthesized
ggctttatccctgggatgca

SEQ ID NO: 5507 - DNA, 20 bp, Artificial Sequence
  chemically synthesized
ttatccctgggatgcaaggt

SEQ ID NO: 5508 - DNA, 20 bp, Artificial Sequence
  chemically synthesized
ttcaacatacacaaatcaat

SEQ ID NO: 5509 - DNA, 20 bp, Artificial Sequence
  chemically synthesized
agtgtgattcatcacataaa

SEQ ID NO: 5510 - DNA, 20 bp, Artificial Sequence
  chemically synthesized
tgtgattcatcacataaaca

SEQ ID NO: 5511 - DNA, 20 bp, Artificial Sequence
  chemically synthesized
gagctaaaaacaaaaaccac

SEQ ID NO: 5512 - DNA, 20 bp, Artificial Sequence
  chemically synthesized
aaaccacaagattatctcaa

SEQ ID NO: 5513 - DNA, 20 bp, Artificial Sequence
  chemically synthesized
aaccacaagattatctcaat

SEQ ID NO: 5514 - DNA, 20 bp, Artificial Sequence
  chemically synthesized
cacaagattatctcaatagg

SEQ ID NO: 5515 - DNA, 20 bp, Artificial Sequence
  chemically synthesized
caagattatctcaataggta

SEQ ID NO: 5516 - DNA, 20 bp, Artificial Sequence
  chemically synthesized
ttatctcaataggtagagaa

SEQ ID NO: 5517 - DNA, 20 bp, Artificial Sequence
  chemically synthesized
tatctcaataggtagagaaa

SEQ ID NO: 5518 - DNA, 20 bp, Artificial Sequence
  chemically synthesized
tcctccatgttaaaaacctt

SEQ ID NO: 5519 - DNA, 20 bp, Artificial Sequence
  chemically synthesized
tccatgttaaaaaccttcag

SEQ ID NO: 5520 - DNA, 20 bp, Artificial Sequence
  chemically synthesized
ccatgttaaaaaccttcagt

SEQ ID NO: 5521 - DNA, 20 bp, Artificial Sequence
  chemically synthesized
gttaaaaaccttcagtaggt

SEQ ID NO: 5522 - DNA, 20 bp, Artificial Sequence
  chemically synthesized
ttaaaaaccttcagtaggtc

SEQ ID NO: 5523 - DNA, 20 bp, Artificial Sequence
  chemically synthesized
aaccttcagtaggtcaggtg

SEQ ID NO: 5524 - DNA, 20 bp, Artificial Sequence
  chemically synthesized
gtgactcacacctgtaatcc

SEQ ID NO: 5525 - DNA, 20 bp, Artificial Sequence
  chemically synthesized
cacctgtaatcccagcactt

SEQ ID NO: 5526 - DNA, 20 bp, Artificial Sequence
  chemically synthesized
acctgtaatcccagcacttt

SEQ ID NO: 5527 - DNA, 20 bp, Artificial Sequence
  chemically synthesized
ctgtaatcccagcactttgg

SEQ ID NO: 5528 - DNA, 20 bp, Artificial Sequence
  chemically synthesized
tgtaatcccagcactttggg

SEQ ID NO: 5529 - DNA, 20 bp, Artificial Sequence
  chemically synthesized
tcccagcactttgggaggcc

SEQ ID NO: 5530 - DNA, 20 bp, Artificial Sequence
  chemically synthesized
cccagcactttgggaggcca

SEQ ID NO: 5531 - DNA, 20 bp, Artificial Sequence
  chemically synthesized
agcactttgggaggccaagg

SEQ ID NO: 5532 - DNA, 20 bp, Artificial Sequence
  chemically synthesized
gcactttgggaggccaaggc

SEQ ID NO: 5533 - DNA, 20 bp, Artificial Sequence
  chemically synthesized
ccaaggcgggcatatctctt

SEQ ID NO: 5534 - DNA, 20 bp, Artificial Sequence
  chemically synthesized
gcgggcatatctcttaagcc

SEQ ID NO: 5535 - DNA, 20 bp, Artificial Sequence
  chemically synthesized
cgggcatatctcttaagccc

SEQ ID NO: 5536 - DNA, 20 bp, Artificial Sequence
  chemically synthesized
ggcatatctcttaagcccag

SEQ ID NO: 5537 - DNA, 20 bp, Artificial Sequence
  chemically synthesized
tctcttaagcccaggagttc

SEQ ID NO: 5538 - DNA, 20 bp, Artificial Sequence
  chemically synthesized
taagcccaggagttcaagac

SEQ ID NO: 5539 - DNA, 20 bp, Artificial Sequence
  chemically synthesized
ccaggagttcaagacgagcc

SEQ ID NO: 5540 - DNA, 20 bp, Artificial Sequence
  chemically synthesized
caggagttcaagacgagcct

SEQ ID NO: 5541 - DNA, 20 bp, Artificial Sequence
  chemically synthesized
gagttcaagacgagcctagg

SEQ ID NO: 5542 - DNA, 20 bp, Artificial Sequence
  chemically synthesized
caagacgagcctaggcagca

SEQ ID NO: 5543 - DNA, 20 bp, Artificial Sequence
  chemically synthesized
aaaaaaaaaaaaaaaaaaat

SEQ ID NO: 5544 - DNA, 20 bp, Artificial Sequence
  chemically synthesized
aaaaaaaaaaaaaattagct

SEQ ID NO: 5545 - DNA, 20 bp, Artificial Sequence
  chemically synthesized
aaaaaaaaattagcttggta

SEQ ID NO: 5546 - DNA, 20 bp, Artificial Sequence
  chemically synthesized
ggtatggtgacatgcaccta

SEQ ID NO: 5547 - DNA, 20 bp, Artificial Sequence
  chemically synthesized
gtgacatgcacctatagtcc

SEQ ID NO: 5548 - DNA, 20 bp, Artificial Sequence
  chemically synthesized
cacctatagtcccagctatt

SEQ ID NO: 5549 - DNA, 20 bp, Artificial Sequence
  chemically synthesized
acctatagtcccagctattc

SEQ ID NO: 5550 - DNA, 20 bp, Artificial Sequence
  chemically synthesized
ctatagtcccagctattcag

SEQ ID NO: 5551 - DNA, 20 bp, Artificial Sequence
  chemically synthesized
tatagtcccagctattcagg

SEQ ID NO: 5552 - DNA, 20 bp, Artificial Sequence
  chemically synthesized
tcccagctattcaggaggtt

SEQ ID NO: 5553 - DNA, 20 bp, Artificial Sequence
  chemically synthesized
cccagctattcaggaggttg

SEQ ID NO: 5554 - DNA, 20 bp, Artificial Sequence
  chemically synthesized
agctattcaggaggttgagg

SEQ ID NO: 5555 - DNA, 20 bp, Artificial Sequence
  chemically synthesized
gctattcaggaggttgaggt

SEQ ID NO: 5556 - DNA, 20 bp, Artificial Sequence
  chemically synthesized
tattcaggaggttgaggtgg

SEQ ID NO: 5557 - DNA, 20 bp, Artificial Sequence
  chemically synthesized
attcaggaggttgaggtggg

SEQ ID NO: 5558 - DNA, 20 bp, Artificial Sequence
  chemically synthesized
ttgaggtgggaggattgttt

SEQ ID NO: 5559 - DNA, 20 bp, Artificial Sequence
  chemically synthesized
gtgggaggattgtttgagcc

SEQ ID NO: 5560 - DNA, 20 bp, Artificial Sequence
  chemically synthesized
tgggaggattgtttgagccc

SEQ ID NO: 5561 - DNA, 20 bp, Artificial Sequence
  chemically synthesized
ggaggattgtttgagcccgg

SEQ ID NO: 5562 - DNA, 20 bp, Artificial Sequence
  chemically synthesized
gaggattgtttgagcccggg

SEQ ID NO: 5563 - DNA, 20 bp, Artificial Sequence
  chemically synthesized
gattgtttgagcccgggagg

SEQ ID NO: 5564 - DNA, 20 bp, Artificial Sequence
  chemically synthesized
ttgtttgagcccgggaggca

SEQ ID NO: 5565 - DNA, 20 bp, Artificial Sequence
  chemically synthesized
tgtttgagcccgggaggcag

SEQ ID NO: 5566 - DNA, 20 bp, Artificial Sequence
  chemically synthesized
tgagcccgggaggcagaggt

SEQ ID NO: 5567 - DNA, 20 bp, Artificial Sequence
  chemically synthesized
gcccgggaggcagaggttgg

SEQ ID NO: 5568 - DNA, 20 bp, Artificial Sequence
  chemically synthesized
gggaggcagaggttggcagc

SEQ ID NO: 5569 - DNA, 20 bp, Artificial Sequence
  chemically synthesized
gcagaggttggcagcgagct

SEQ ID NO: 5570 - DNA, 20 bp, Artificial Sequence
  chemically synthesized
gagatcatgccaccgcactc

SEQ ID NO: 5571 - DNA, 20 bp, Artificial Sequence
  chemically synthesized
catgccaccgcactccagcc

SEQ ID NO: 5572 - DNA, 20 bp, Artificial Sequence
  chemically synthesized
atgccaccgcactccagcct

SEQ ID NO: 5573 - DNA, 20 bp, Artificial Sequence
  chemically synthesized
ccgcactccagcctgggcaa

SEQ ID NO: 5574 - DNA, 20 bp, Artificial Sequence
  chemically synthesized
gcactccagcctgggcaacg

SEQ ID NO: 5575 - DNA, 20 bp, Artificial Sequence
  chemically synthesized
tccagcctgggcaacggagt

SEQ ID NO: 5576 - DNA, 20 bp, Artificial Sequence
  chemically synthesized
agtgagaccctgtctcaaaa

SEQ ID NO: 5577 - DNA, 20 bp, Artificial Sequence
  chemically synthesized
acaaacaatcctaaacaaac

SEQ ID NO: 5578 - DNA, 20 bp, Artificial Sequence
  chemically synthesized
caaacaatcctaaacaaact

SEQ ID NO: 5579 - DNA, 20 bp, Artificial Sequence
  chemically synthesized
cctaaacaaactaggcattg

SEQ ID NO: 5580 - DNA, 20 bp, Artificial Sequence
  chemically synthesized
ctaaacaaactaggcattga

SEQ ID NO: 5581 - DNA, 20 bp, Artificial Sequence
  chemically synthesized
ggaacatgcctcaaaaaaat

SEQ ID NO: 5582 - DNA, 20 bp, Artificial Sequence
  chemically synthesized
aaaataagaaccatctatga

SEQ ID NO: 5583 - DNA, 20 bp, Artificial Sequence
  chemically synthesized
aaccatctatgacagaccca

SEQ ID NO: 5584 - DNA, 20 bp, Artificial Sequence
  chemically synthesized
atagccaatatcttaccaaa

SEQ ID NO: 5585 - DNA, 20 bp, Artificial Sequence
  chemically synthesized
tagccaatatcttaccaaat

SEQ ID NO: 5586 - DNA, 20 bp, Artificial Sequence
  chemically synthesized
atatcttaccaaatgggcaa

SEQ ID NO: 5587 - DNA, 20 bp, Artificial Sequence
  chemically synthesized
cttaccaaatgggcaaaagc

SEQ ID NO: 5588 - DNA, 20 bp, Artificial Sequence
  chemically synthesized
accaaatgggcaaaagctgg

SEQ ID NO: 5589 - DNA, 20 bp, Artificial Sequence
  chemically synthesized
aagctggaagtattctcctt

SEQ ID NO: 5590 - DNA, 20 bp, Artificial Sequence
  chemically synthesized
ttctccttgagaaccgtaac

SEQ ID NO: 5591 - DNA, 20 bp, Artificial Sequence
  chemically synthesized
cttgagaaccgtaacaagac

SEQ ID NO: 5592 - DNA, 20 bp, Artificial Sequence
  chemically synthesized
ttgagaaccgtaacaagaca

SEQ ID NO: 5593 - DNA, 20 bp, Artificial Sequence
  chemically synthesized
ccactctcaccactcctttt

SEQ ID NO: 5594 - DNA, 20 bp, Artificial Sequence
  chemically synthesized
ctcaccactccttttcagca

SEQ ID NO: 5595 - DNA, 20 bp, Artificial Sequence
  chemically synthesized
actccttttcagcatagttc

SEQ ID NO: 5596 - DNA, 20 bp, Artificial Sequence
  chemically synthesized
ccttttcagcatagttctgg

SEQ ID NO: 5597 - DNA, 20 bp, Artificial Sequence
  chemically synthesized
cagcatagttctggaagtcc

SEQ ID NO: 5598 - DNA, 20 bp, Artificial Sequence
  chemically synthesized
atagttctggaagtcctagc

SEQ ID NO: 5599 - DNA, 20 bp, Artificial Sequence
  chemically synthesized
agttctggaagtcctagcca

SEQ ID NO: 5600 - DNA, 20 bp, Artificial Sequence
  chemically synthesized
gaagtcctagccagagcaat

SEQ ID NO: 5601 - DNA, 20 bp, Artificial Sequence
  chemically synthesized
aagtcctagccagagcaatc

SEQ ID NO: 5602 - DNA, 20 bp, Artificial Sequence
  chemically synthesized
cctagccagagcaatcagga

SEQ ID NO: 5603 - DNA, 20 bp, Artificial Sequence
  chemically synthesized
tagccagagcaatcaggaaa

SEQ ID NO: 5604 - DNA, 20 bp, Artificial Sequence
  chemically synthesized
cagagcaatcaggaaagaga

SEQ ID NO: 5605 - DNA, 20 bp, Artificial Sequence
  chemically synthesized
gcaatcaggaaagagaaaga

SEQ ID NO: 5606 - DNA, 20 bp, Artificial Sequence
  chemically synthesized
tcaggaaagagaaagaaaga

SEQ ID NO: 5607 - DNA, 20 bp, Artificial Sequence
  chemically synthesized
gagaaagaaagaaagacatt

SEQ ID NO: 5608 - DNA, 20 bp, Artificial Sequence
  chemically synthesized
aagaaagaaagacattcaga

SEQ ID NO: 5609 - DNA, 20 bp, Artificial Sequence
  chemically synthesized
agaaagaaagacattcagat

SEQ ID NO: 5610 - DNA, 20 bp, Artificial Sequence
  chemically synthesized
aagaaagacattcagatagg

SEQ ID NO: 5611 - DNA, 20 bp, Artificial Sequence
  chemically synthesized
gaaagacattcagataggaa

SEQ ID NO: 5612 - DNA, 20 bp, Artificial Sequence
  chemically synthesized
agacattcagataggaagag

SEQ ID NO: 5613 - DNA, 20 bp, Artificial Sequence
  chemically synthesized
cattcagataggaagagaag

SEQ ID NO: 5614 - DNA, 20 bp, Artificial Sequence
  chemically synthesized
agtcaaactatttctgtttg

SEQ ID NO: 5615 - DNA, 20 bp, Artificial Sequence
  chemically synthesized
gtcaaactatttctgtttgc

SEQ ID NO: 5616 - DNA, 20 bp, Artificial Sequence
  chemically synthesized
aaactatttctgtttgcagg

SEQ ID NO: 5617 - DNA, 20 bp, Artificial Sequence
  chemically synthesized
aggcagtataattctgtacc

SEQ ID NO: 5618 - DNA, 20 bp, Artificial Sequence
  chemically synthesized
tctgtacctagaaaatctca

SEQ ID NO: 5619 - DNA, 20 bp, Artificial Sequence
  chemically synthesized
aaaatctcatagtctctgcc

SEQ ID NO: 5620 - DNA, 20 bp, Artificial Sequence
  chemically synthesized
cctaaatctgttaaaaattt

SEQ ID NO: 5621 - DNA, 20 bp, Artificial Sequence
  chemically synthesized
atctgttaaaaatttcagca

SEQ ID NO: 5622 - DNA, 20 bp, Artificial Sequence
  chemically synthesized
taaaaatttcagcaaagttt

SEQ ID NO: 5623 - DNA, 20 bp, Artificial Sequence
  chemically synthesized
ctatactccaacaccttcca

SEQ ID NO: 5624 - DNA, 20 bp, Artificial Sequence
  chemically synthesized
actccaacaccttccaaagt

SEQ ID NO: 5625 - DNA, 20 bp, Artificial Sequence
  chemically synthesized
tccaacaccttccaaagtga

SEQ ID NO: 5626 - DNA, 20 bp, Artificial Sequence
  chemically synthesized
tccaaagtgagagcaaaatc

SEQ ID NO: 5627 - DNA, 20 bp, Artificial Sequence
  chemically synthesized
tgagagcaaaatcaagaaca

SEQ ID NO: 5628 - DNA, 20 bp, Artificial Sequence
  chemically synthesized
gaacacagtcccattcacaa

SEQ ID NO: 5629 - DNA, 20 bp, Artificial Sequence
  chemically synthesized
cgcaaaacgaataaaatacc

SEQ ID NO: 5630 - DNA, 20 bp, Artificial Sequence
  chemically synthesized
gcaaaacgaataaaatacct

SEQ ID NO: 5631 - DNA, 20 bp, Artificial Sequence
  chemically synthesized
gaataaaatacctaggaatc

SEQ ID NO: 5632 - DNA, 20 bp, Artificial Sequence
  chemically synthesized
tacctaggaatccagctaac

SEQ ID NO: 5633 - DNA, 20 bp, Artificial Sequence
  chemically synthesized
acctaggaatccagctaacc

SEQ ID NO: 5634 - DNA, 20 bp, Artificial Sequence
  chemically synthesized
cctaggaatccagctaacca

SEQ ID NO: 5635 - DNA, 20 bp, Artificial Sequence
  chemically synthesized
taggaatccagctaaccagg

SEQ ID NO: 5636 - DNA, 20 bp, Artificial Sequence
  chemically synthesized
aggaatccagctaaccaggg

SEQ ID NO: 5637 - DNA, 20 bp, Artificial Sequence
  chemically synthesized
ccagctaaccagggaggtga

SEQ ID NO: 5638 - DNA, 20 bp, Artificial Sequence
  chemically synthesized
gggaggtgaaagatctctat

SEQ ID NO: 5639 - DNA, 20 bp, Artificial Sequence
  chemically synthesized
gaattacaaaacactgctga

SEQ ID NO: 5640 - DNA, 20 bp, Artificial Sequence
  chemically synthesized
aaaacactgctgaaagaaat

SEQ ID NO: 5641 - DNA, 20 bp, Artificial Sequence
  chemically synthesized
aacactgctgaaagaaatca

SEQ ID NO: 5642 - DNA, 20 bp, Artificial Sequence
  chemically synthesized
tcagagatgacacaaacaaa

SEQ ID NO: 5643 - DNA, 20 bp, Artificial Sequence
  chemically synthesized
tatctaattcacttatgatg

SEQ ID NO: 5644 - DNA, 20 bp, Artificial Sequence
  chemically synthesized
ttatgatgaagatactcatt

SEQ ID NO: 5645 - DNA, 20 bp, Artificial Sequence
  chemically synthesized
tgatgaagatactcattcag

SEQ ID NO: 5646 - DNA, 20 bp, Artificial Sequence
  chemically synthesized
aagatactcattcagtggaa

SEQ ID NO: 5647 - DNA, 20 bp, Artificial Sequence
  chemically synthesized
agatactcattcagtggaac

SEQ ID NO: 5648 - DNA, 20 bp, Artificial Sequence
  chemically synthesized
ttcagtggaacaggtataat

SEQ ID NO: 5649 - DNA, 20 bp, Artificial Sequence
  chemically synthesized
aagtccactcgattaaatat

SEQ ID NO: 5650 - DNA, 20 bp, Artificial Sequence
  chemically synthesized
tataagccttattctctttc

SEQ ID NO: 5651 - DNA, 20 bp, Artificial Sequence
  chemically synthesized
taagccttattctctttcca

SEQ ID NO: 5652 - DNA, 20 bp, Artificial Sequence
  chemically synthesized
ttattctctttccagagccc

SEQ ID NO: 5653 - DNA, 20 bp, Artificial Sequence
  chemically synthesized
ttctctttccagagcccaag

SEQ ID NO: 5654 - DNA, 20 bp, Artificial Sequence
  chemically synthesized
tctctttccagagcccaaga

SEQ ID NO: 5655 - DNA, 20 bp, Artificial Sequence
  chemically synthesized
ctctttccagagcccaagaa

SEQ ID NO: 5656 - DNA, 20 bp, Artificial Sequence
  chemically synthesized
tctttccagagcccaagaag

SEQ ID NO: 5657 - DNA, 20 bp, Artificial Sequence
  chemically synthesized
agcccaagaaggggcactat

SEQ ID NO: 5658 - DNA, 20 bp, Artificial Sequence
  chemically synthesized
gaaggggcactatcagtgcc

SEQ ID NO: 5659 - DNA, 20 bp, Artificial Sequence
  chemically synthesized
gctaatatttttccccttta

SEQ ID NO: 5660 - DNA, 20 bp, Artificial Sequence
  chemically synthesized
tttacggtttctttcttctg

SEQ ID NO: 5661 - DNA, 20 bp, Artificial Sequence
  chemically synthesized
ggtttctttcttctgtagtg

SEQ ID NO: 5662 - DNA, 20 bp, Artificial Sequence
  chemically synthesized
gtgtggtacactcgtttctt

SEQ ID NO: 5663 - DNA, 20 bp, Artificial Sequence
  chemically synthesized
gtacactcgtttcttaagat

SEQ ID NO: 5664 - DNA, 20 bp, Artificial Sequence
  chemically synthesized
tacactcgtttcttaagata

SEQ ID NO: 5665 - DNA, 20 bp, Artificial Sequence
  chemically synthesized
attctctttttttgccactc

SEQ ID NO: 5666 - DNA, 20 bp, Artificial Sequence
  chemically synthesized
tctttttttgccactctggt

SEQ ID NO: 5667 - DNA, 20 bp, Artificial Sequence
  chemically synthesized
ctttttttgccactctggtc

SEQ ID NO: 5668 - DNA, 20 bp, Artificial Sequence
  chemically synthesized
tttgccactctggtcaggta

SEQ ID NO: 5669 - DNA, 20 bp, Artificial Sequence
  chemically synthesized
ttgccactctggtcaggtat

SEQ ID NO: 5670 - DNA, 20 bp, Artificial Sequence
  chemically synthesized
aggatgatccctaccacttt

SEQ ID NO: 5671 - DNA, 20 bp, Artificial Sequence
  chemically synthesized
ctaaatgttctcttaccctc

SEQ ID NO: 5672 - DNA, 20 bp, Artificial Sequence
  chemically synthesized
gttctcttaccctctggcct

SEQ ID NO: 5673 - DNA, 20 bp, Artificial Sequence
  chemically synthesized
ctcttaccctctggcctgag

SEQ ID NO: 5674 - DNA, 20 bp, Artificial Sequence
  chemically synthesized
cctctggcctgagtagaacc

SEQ ID NO: 5675 - DNA, 20 bp, Artificial Sequence
  chemically synthesized
ctctggcctgagtagaacct

SEQ ID NO: 5676 - DNA, 20 bp, Artificial Sequence
  chemically synthesized
tctggcctgagtagaaccta

SEQ ID NO: 5677 - DNA, 20 bp, Artificial Sequence
  chemically synthesized
tgagtagaacctagggaaaa

SEQ ID NO: 5678 - DNA, 20 bp, Artificial Sequence
  chemically synthesized
gtagaacctagggaaaatgg

SEQ ID NO: 5679 - DNA, 20 bp, Artificial Sequence
  chemically synthesized
agaacctagggaaaatggaa

SEQ ID NO: 5680 - DNA, 20 bp, Artificial Sequence
  chemically synthesized
tagggaaaatggaagagaaa

SEQ ID NO: 5681 - DNA, 20 bp, Artificial Sequence
  chemically synthesized
aatggaagagaaaaagatga

SEQ ID NO: 5682 - DNA, 20 bp, Artificial Sequence
  chemically synthesized
atggaagagaaaaagatgaa

SEQ ID NO: 5683 - DNA, 20 bp, Artificial Sequence
  chemically synthesized
tggaagagaaaaagatgaaa

SEQ ID NO: 5684 - DNA, 20 bp, Artificial Sequence
  chemically synthesized
gaagagaaaaagatgaaagg

SEQ ID NO: 5685 - DNA, 20 bp, Artificial Sequence
  chemically synthesized
aagagaaaaagatgaaaggg

SEQ ID NO: 5686 - DNA, 20 bp, Artificial Sequence
  chemically synthesized
agaaaaagatgaaagggagg

SEQ ID NO: 5687 - DNA, 20 bp, Artificial Sequence
  chemically synthesized
gaaaaagatgaaagggaggt

SEQ ID NO: 5688 - DNA, 20 bp, Artificial Sequence
  chemically synthesized
aaaaagatgaaagggaggtg

SEQ ID NO: 5689 - DNA, 20 bp, Artificial Sequence
  chemically synthesized
gatgaaagggaggtggggcc

SEQ ID NO: 5690 - DNA, 20 bp, Artificial Sequence
  chemically synthesized
atgaaagggaggtggggcct

SEQ ID NO: 5691 - DNA, 20 bp, Artificial Sequence
  chemically synthesized
aaagggaggtggggcctggg

SEQ ID NO: 5692 - DNA, 20 bp, Artificial Sequence
  chemically synthesized
aagggaggtggggcctggga

SEQ ID NO: 5693 - DNA, 20 bp, Artificial Sequence
  chemically synthesized
agggaggtggggcctgggaa

SEQ ID NO: 5694 - DNA, 20 bp, Artificial Sequence
  chemically synthesized
gtggggcctgggaagggaat

SEQ ID NO: 5695 - DNA, 20 bp, Artificial Sequence
  chemically synthesized
gggcctgggaagggaataag

SEQ ID NO: 5696 - DNA, 20 bp, Artificial Sequence
  chemically synthesized
gtttgtttgtgtgtttgctt

SEQ ID NO: 5697 - DNA, 20 bp, Artificial Sequence
  chemically synthesized
ctttagcacctgctatatcc

SEQ ID NO: 5698 - DNA, 20 bp, Artificial Sequence
  chemically synthesized
tttagcacctgctatatcct

SEQ ID NO: 5699 - DNA, 20 bp, Artificial Sequence
  chemically synthesized
ctatatcctaggtgctgtgt

SEQ ID NO: 5700 - DNA, 20 bp, Artificial Sequence
  chemically synthesized
tatatcctaggtgctgtgtt

SEQ ID NO: 5701 - DNA, 20 bp, Artificial Sequence
  chemically synthesized
tgttaggcacacattatttt

SEQ ID NO: 5702 - DNA, 20 bp, Artificial Sequence
  chemically synthesized
taggcacacattattttaag

SEQ ID NO: 5703 - DNA, 20 bp, Artificial Sequence
  chemically synthesized
tatattactactactcactc

SEQ ID NO: 5704 - DNA, 20 bp, Artificial Sequence
  chemically synthesized
tactcactctggtcgttgcc

SEQ ID NO: 5705 - DNA, 20 bp, Artificial Sequence
  chemically synthesized
actcactctggtcgttgcca

SEQ ID NO: 5706 - DNA, 20 bp, Artificial Sequence
  chemically synthesized
cactctggtcgttgccaagg

SEQ ID NO: 5707 - DNA, 20 bp, Artificial Sequence
  chemically synthesized
actctggtcgttgccaaggt

SEQ ID NO: 5708 - DNA, 20 bp, Artificial Sequence
  chemically synthesized
ctggtcgttgccaaggtagg

SEQ ID NO: 5709 - DNA, 20 bp, Artificial Sequence
  chemically synthesized
caaggtaggtagtactttct

SEQ ID NO: 5710 - DNA, 20 bp, Artificial Sequence
  chemically synthesized
gtaggtagtactttcttgga

SEQ ID NO: 5711 - DNA, 20 bp, Artificial Sequence
  chemically synthesized
gtagtactttcttggatagt

SEQ ID NO: 5712 - DNA, 20 bp, Artificial Sequence
  chemically synthesized
tagttggttcatgttactta

SEQ ID NO: 5713 - DNA, 20 bp, Artificial Sequence
  chemically synthesized
tggttcatgttacttacaga

SEQ ID NO: 5714 - DNA, 20 bp, Artificial Sequence
  chemically synthesized
ttcatgttacttacagatgg

SEQ ID NO: 5715 - DNA, 20 bp, Artificial Sequence
  chemically synthesized
tcatgttacttacagatggt

SEQ ID NO: 5716 - DNA, 20 bp, Artificial Sequence
  chemically synthesized
ttacagatggtgggcttgtt

SEQ ID NO: 5717 - DNA, 20 bp, Artificial Sequence
  chemically synthesized
tacagatggtgggcttgttg

SEQ ID NO: 5718 - DNA, 20 bp, Artificial Sequence
  chemically synthesized
tgggcttgttgaggcaaacc

SEQ ID NO: 5719 - DNA, 20 bp, Artificial Sequence
  chemically synthesized
gcttgttgaggcaaacccag

SEQ ID NO: 5720 - DNA, 20 bp, Artificial Sequence
  chemically synthesized
caaacccagtggataatcat

SEQ ID NO: 5721 - DNA, 20 bp, Artificial Sequence
  chemically synthesized
aacccagtggataatcatcg

SEQ ID NO: 5722 - DNA, 20 bp, Artificial Sequence
  chemically synthesized
aaatttttcttcacattttt

SEQ ID NO: 5723 - DNA, 20 bp, Artificial Sequence
  chemically synthesized
tcacattttttggtttgttt

SEQ ID NO: 5724 - DNA, 20 bp, Artificial Sequence
  chemically synthesized
tggtttgttttggtttttga

SEQ ID NO: 5725 - DNA, 20 bp, Artificial Sequence
  chemically synthesized
tttgttttggtttttgatgg

SEQ ID NO: 5726 - DNA, 20 bp, Artificial Sequence
  chemically synthesized
gttttggtttttgatggtag

SEQ ID NO: 5727 - DNA, 20 bp, Artificial Sequence
  chemically synthesized
tagtggcttatttttgttgc

SEQ ID NO: 5728 - DNA, 20 bp, Artificial Sequence
  chemically synthesized
tttgttttttgttttttttt

SEQ ID NO: 5729 - DNA, 20 bp, Artificial Sequence
  chemically synthesized
ttttttgtttttttttgaga

SEQ ID NO: 5730 - DNA, 20 bp, Artificial Sequence
  chemically synthesized
ttgtttttttttgagatggc

SEQ ID NO: 5731 - DNA, 20 bp, Artificial Sequence
  chemically synthesized
ttttttgagatggcaagaat

SEQ ID NO: 5732 - DNA, 20 bp, Artificial Sequence
  chemically synthesized
tttgagatggcaagaattgg

SEQ ID NO: 5733 - DNA, 20 bp, Artificial Sequence
  chemically synthesized
gttttatttattaattgcct

SEQ ID NO: 5734 - DNA, 20 bp, Artificial Sequence
  chemically synthesized
ttttatttattaattgccta

SEQ ID NO: 5735 - DNA, 20 bp, Artificial Sequence
  chemically synthesized
tttatttattaattgcctaa

SEQ ID NO: 5736 - DNA, 20 bp, Artificial Sequence
  chemically synthesized
agggtctctactttttttaa

SEQ ID NO: 5737 - DNA, 20 bp, Artificial Sequence
  chemically synthesized
ctctactttttttaaaagat

SEQ ID NO: 5738 - DNA, 20 bp, Artificial Sequence
  chemically synthesized
ctactttttttaaaagatga

SEQ ID NO: 5739 - DNA, 20 bp, Artificial Sequence
  chemically synthesized
ctttttttaaaagatgagag

SEQ ID NO: 5740 - DNA, 20 bp, Artificial Sequence
  chemically synthesized
aaaagatgagagtagtaaaa

SEQ ID NO: 5741 - DNA, 20 bp, Artificial Sequence
  chemically synthesized
agagtagtaaaatagattga

SEQ ID NO: 5742 - DNA, 20 bp, Artificial Sequence
  chemically synthesized
agatacatacatacccttac

SEQ ID NO: 5743 - DNA, 20 bp, Artificial Sequence
  chemically synthesized
gatacatacatacccttact

SEQ ID NO: 5744 - DNA, 20 bp, Artificial Sequence
  chemically synthesized
atacatacatacccttactg

SEQ ID NO: 5745 - DNA, 20 bp, Artificial Sequence
  chemically synthesized
tggggactgcttatattctt

SEQ ID NO: 5746 - DNA, 20 bp, Artificial Sequence
  chemically synthesized
gggactgcttatattcttta

SEQ ID NO: 5747 - DNA, 20 bp, Artificial Sequence
  chemically synthesized
ttagagaaaaaattacatat

SEQ ID NO: 5748 - DNA, 20 bp, Artificial Sequence
  chemically synthesized
catattagcctgacaaacac

SEQ ID NO: 5749 - DNA, 20 bp, Artificial Sequence
  chemically synthesized
taaaatgtaaatatatcctt

SEQ ID NO: 5750 - DNA, 20 bp, Artificial Sequence
  chemically synthesized
tatatgtaatatcaatttat

SEQ ID NO: 5751 - DNA, 20 bp, Artificial Sequence
  chemically synthesized
tttataagaacttaaaatgt

SEQ ID NO: 5752 - DNA, 20 bp, Artificial Sequence
  chemically synthesized
agaacttaaaatgttggctc

SEQ ID NO: 5753 - DNA, 20 bp, Artificial Sequence
  chemically synthesized
cttaaaatgttggctcaagt

SEQ ID NO: 5754 - DNA, 20 bp, Artificial Sequence
  chemically synthesized
ttaaaatgttggctcaagtg

SEQ ID NO: 5755 - DNA, 20 bp, Artificial Sequence
  chemically synthesized
taaaatgttggctcaagtga

SEQ ID NO: 5756 - DNA, 20 bp, Artificial Sequence
  chemically synthesized
ttggctcaagtgagggattg

SEQ ID NO: 5757 - DNA, 20 bp, Artificial Sequence
  chemically synthesized
gctcaagtgagggattgtgg

SEQ ID NO: 5758 - DNA, 20 bp, Artificial Sequence
  chemically synthesized
ctcaagtgagggattgtgga

SEQ ID NO: 5759 - DNA, 20 bp, Artificial Sequence
  chemically synthesized
aagtgagggattgtggaagg

SEQ ID NO: 5760 - DNA, 20 bp, Artificial Sequence
  chemically synthesized
ttgtggaaggtagcattata

SEQ ID NO: 5761 - DNA, 20 bp, Artificial Sequence
  chemically synthesized
cttcattttcttcttttctt

SEQ ID NO: 5762 - DNA, 20 bp, Artificial Sequence
  chemically synthesized
ttcattttcttcttttcttc

SEQ ID NO: 5763 - DNA, 20 bp, Artificial Sequence
  chemically synthesized
tttcttcaggaatatttttc

SEQ ID NO: 5764 - DNA, 20 bp, Artificial Sequence
  chemically synthesized
atttttcaagatgtcttaca

SEQ ID NO: 5765 - DNA, 20 bp, Artificial Sequence
  chemically synthesized
ttttcaagatgtcttacaca

SEQ ID NO: 5766 - DNA, 20 bp, Artificial Sequence
  chemically synthesized
tgtcttacacagagacactc

SEQ ID NO: 5767 - DNA, 20 bp, Artificial Sequence
  chemically synthesized
acacagagacactctagtga

SEQ ID NO: 5768 - DNA, 20 bp, Artificial Sequence
  chemically synthesized
cactctagtgaaagccttcc

SEQ ID NO: 5769 - DNA, 20 bp, Artificial Sequence
  chemically synthesized
tagtgaaagccttcctggat

SEQ ID NO: 5770 - DNA, 20 bp, Artificial Sequence
  chemically synthesized
agtgaaagccttcctggatc

SEQ ID NO: 5771 - DNA, 20 bp, Artificial Sequence
  chemically synthesized
atcaggtaaatgttgaactt

SEQ ID NO: 5772 - DNA, 20 bp, Artificial Sequence
  chemically synthesized
aatgttgaacttgagattgt

SEQ ID NO: 5773 - DNA, 20 bp, Artificial Sequence
  chemically synthesized
tgttgaacttgagattgtca

SEQ ID NO: 5774 - DNA, 20 bp, Artificial Sequence
  chemically synthesized
tctatatatttatattcccc

SEQ ID NO: 5775 - DNA, 20 bp, Artificial Sequence
  chemically synthesized
tattcccctggatcatgccc

SEQ ID NO: 5776 - DNA, 20 bp, Artificial Sequence
  chemically synthesized
ttcccctggatcatgcccca

SEQ ID NO: 5777 - DNA, 20 bp, Artificial Sequence
  chemically synthesized
tcatgccccagagttctgct

SEQ ID NO: 5778 - DNA, 20 bp, Artificial Sequence
  chemically synthesized
agagttctgctcagcaattg

SEQ ID NO: 5779 - DNA, 20 bp, Artificial Sequence
  chemically synthesized
tctgctcagcaattgcagtt

SEQ ID NO: 5780 - DNA, 20 bp, Artificial Sequence
  chemically synthesized
ctcagcaattgcagttaagt

SEQ ID NO: 5781 - DNA, 20 bp, Artificial Sequence
  chemically synthesized
cagttaagttagttacacta

SEQ ID NO: 5782 - DNA, 20 bp, Artificial Sequence
  chemically synthesized
gttagttacactacagttct

SEQ ID NO: 5783 - DNA, 20 bp, Artificial Sequence
  chemically synthesized
agttacactacagttctcag

SEQ ID NO: 5784 - DNA, 20 bp, Artificial Sequence
  chemically synthesized
ttacactacagttctcagaa

SEQ ID NO: 5785 - DNA, 20 bp, Artificial Sequence
  chemically synthesized
cagttctcagaagagtctgt

SEQ ID NO: 5786 - DNA, 20 bp, Artificial Sequence
  chemically synthesized
agttctcagaagagtctgtg

SEQ ID NO: 5787 - DNA, 20 bp, Artificial Sequence
  chemically synthesized
gttctcagaagagtctgtga

SEQ ID NO: 5788 - DNA, 20 bp, Artificial Sequence
  chemically synthesized
agagtctgtgagggcatgtc

SEQ ID NO: 5789 - DNA, 20 bp, Artificial Sequence
  chemically synthesized
tgtcaagtgcatcattacat

SEQ ID NO: 5790 - DNA, 20 bp, Artificial Sequence
  chemically synthesized
acattggttgcctcttgtcc

SEQ ID NO: 5791 - DNA, 20 bp, Artificial Sequence
  chemically synthesized
cttgtcctagatttatgctt

SEQ ID NO: 5792 - DNA, 20 bp, Artificial Sequence
  chemically synthesized
ttgtcctagatttatgcttc

SEQ ID NO: 5793 - DNA, 20 bp, Artificial Sequence
  chemically synthesized
agatttatgcttcgggaatt

SEQ ID NO: 5794 - DNA, 20 bp, Artificial Sequence
  chemically synthesized
aatattattgctatctttta

SEQ ID NO: 5795 - DNA, 20 bp, Artificial Sequence
  chemically synthesized
tcttttaaagatataataat

SEQ ID NO: 5796 - DNA, 20 bp, Artificial Sequence
  chemically synthesized
agatataataataagatata

SEQ ID NO: 5797 - DNA, 20 bp, Artificial Sequence
  chemically synthesized
aactactgttttttgaaaca

SEQ ID NO: 5798 - DNA, 20 bp, Artificial Sequence
  chemically synthesized
tttttgaaacatagaattcc

SEQ ID NO: 5799 - DNA, 20 bp, Artificial Sequence
  chemically synthesized
ttcctggtttacatgtatca

SEQ ID NO: 5800 - DNA, 20 bp, Artificial Sequence
  chemically synthesized
tatcaaagtgaaatctgact

SEQ ID NO: 5801 - DNA, 20 bp, Artificial Sequence
  chemically synthesized
gaaatctgacttagctttta

SEQ ID NO: 5802 - DNA, 20 bp, Artificial Sequence
  chemically synthesized
caatgcttgtactatatatg

SEQ ID NO: 5803 - DNA, 20 bp, Artificial Sequence
  chemically synthesized
ttgtactatatatgtagtac

SEQ ID NO: 5804 - DNA, 20 bp, Artificial Sequence
  chemically synthesized
tttgtgtgtgtatatatata

SEQ ID NO: 5805 - DNA, 20 bp, Artificial Sequence
  chemically synthesized
tgtgtatatatatatagtac

SEQ ID NO: 5806 - DNA, 20 bp, Artificial Sequence
  chemically synthesized
cgagcatatatacatattac

SEQ ID NO: 5807 - DNA, 20 bp, Artificial Sequence
  chemically synthesized
tatacatattaccagcattg

SEQ ID NO: 5808 - DNA, 20 bp, Artificial Sequence
  chemically synthesized
atacatattaccagcattgt

SEQ ID NO: 5809 - DNA, 20 bp, Artificial Sequence
  chemically synthesized
tatgtttatatattaaaaaa

SEQ ID NO: 5810 - DNA, 20 bp, Artificial Sequence
  chemically synthesized
taaaaccctattatgttatg

SEQ ID NO: 5811 - DNA, 20 bp, Artificial Sequence
  chemically synthesized
aaaccctattatgttatgta

SEQ ID NO: 5812 - DNA, 20 bp, Artificial Sequence
  chemically synthesized
atataacatatactctatga

SEQ ID NO: 5813 - DNA, 20 bp, Artificial Sequence
  chemically synthesized
ataacatatactctatgata

SEQ ID NO: 5814 - DNA, 20 bp, Artificial Sequence
  chemically synthesized
ttttaacatttataaaatga

SEQ ID NO: 5815 - DNA, 20 bp, Artificial Sequence
  chemically synthesized
atttataaaatgatagaatt

SEQ ID NO: 5816 - DNA, 20 bp, Artificial Sequence
  chemically synthesized
aaatgatagaattaagaatt

SEQ ID NO: 5817 - DNA, 20 bp, Artificial Sequence
  chemically synthesized
tgagtcctaatctgttttat

SEQ ID NO: 5818 - DNA, 20 bp, Artificial Sequence
  chemically synthesized
gagtcctaatctgttttatt

SEQ ID NO: 5819 - DNA, 20 bp, Artificial Sequence
  chemically synthesized
gttttattaggtgctttttg

SEQ ID NO: 5820 - DNA, 20 bp, Artificial Sequence
  chemically synthesized
taggtgctttttgtagtgtc

SEQ ID NO: 5821 - DNA, 20 bp, Artificial Sequence
  chemically synthesized
tgtagtgtctggtctttcta

SEQ ID NO: 5822 - DNA, 20 bp, Artificial Sequence
  chemically synthesized
ttttccttttgacttattaa

SEQ ID NO: 5823 - DNA, 20 bp, Artificial Sequence
  chemically synthesized
tttccttttgacttattaat

SEQ ID NO: 5824 - DNA, 20 bp, Artificial Sequence
  chemically synthesized
ttccttttgacttattaatg

SEQ ID NO: 5825 - DNA, 20 bp, Artificial Sequence
  chemically synthesized
cttttgacttattaatgggg

SEQ ID NO: 5826 - DNA, 20 bp, Artificial Sequence
  chemically synthesized
tttgacttattaatggggaa

SEQ ID NO: 5827 - DNA, 20 bp, Artificial Sequence
  chemically synthesized
gagcctgtatattaacaatt

SEQ ID NO: 5828 - DNA, 20 bp, Artificial Sequence
  chemically synthesized
gcctgtatattaacaattaa

SEQ ID NO: 5829 - DNA, 20 bp, Artificial Sequence
  chemically synthesized
tatattaacaattaagagtg

SEQ ID NO: 5830 - DNA, 20 bp, Artificial Sequence
  chemically synthesized
aacaacaaacattttaattc

SEQ ID NO: 5831 - DNA, 20 bp, Artificial Sequence
  chemically synthesized
ttcaagcattaacctataac

SEQ ID NO: 5832 - DNA, 20 bp, Artificial Sequence
  chemically synthesized
agcattaacctataacaagt

SEQ ID NO: 5833 - DNA, 20 bp, Artificial Sequence
  chemically synthesized
taagtttttttttttttttt

SEQ ID NO: 5834 - DNA, 20 bp, Artificial Sequence
  chemically synthesized
ttttttttttttttttgaga

SEQ ID NO: 5835 - DNA, 20 bp, Artificial Sequence
  chemically synthesized
tttttttttttttttgagaa

SEQ ID NO: 5836 - DNA, 20 bp, Artificial Sequence
  chemically synthesized
ttttttttttttttgagaaa

SEQ ID NO: 5837 - DNA, 20 bp, Artificial Sequence
  chemically synthesized
ttttttttttttgagaaagg

SEQ ID NO: 5838 - DNA, 20 bp, Artificial Sequence
  chemically synthesized
tttttttttttgagaaaggg

SEQ ID NO: 5839 - DNA, 20 bp, Artificial Sequence
  chemically synthesized
tcaaaaatatttttgaaaca

SEQ ID NO: 5840 - DNA, 20 bp, Artificial Sequence
  chemically synthesized
aaaatatctacttaattaca

SEQ ID NO: 5841 - DNA, 20 bp, Artificial Sequence
  chemically synthesized
tctacttaattacacagttg

SEQ ID NO: 5842 - DNA, 20 bp, Artificial Sequence
  chemically synthesized
ctacttaattacacagttga

SEQ ID NO: 5843 - DNA, 20 bp, Artificial Sequence
  chemically synthesized
tacacagttgaaggaaatcg

SEQ ID NO: 5844 - DNA, 20 bp, Artificial Sequence
  chemically synthesized
gaaggaaatcgtagattata

SEQ ID NO: 5845 - DNA, 20 bp, Artificial Sequence
  chemically synthesized
acttatttcttaatatatta

SEQ ID NO: 5846 - DNA, 20 bp, Artificial Sequence
  chemically synthesized
agtttgttataataacattc

SEQ ID NO: 5847 - DNA, 20 bp, Artificial Sequence
  chemically synthesized
gtttgttataataacattct

SEQ ID NO: 5848 - DNA, 20 bp, Artificial Sequence
  chemically synthesized
tttgttataataacattctg

SEQ ID NO: 5849 - DNA, 20 bp, Artificial Sequence
  chemically synthesized
tataataacattctggggat

SEQ ID NO: 5850 - DNA, 20 bp, Artificial Sequence
  chemically synthesized
ataataacattctggggatc

SEQ ID NO: 5851 - DNA, 20 bp, Artificial Sequence
  chemically synthesized
taacattctggggatcaggc

SEQ ID NO: 5852 - DNA, 20 bp, Artificial Sequence
  chemically synthesized
aacattctggggatcaggcc

SEQ ID NO: 5853 - DNA, 20 bp, Artificial Sequence
  chemically synthesized
caggccaggaaactgtgtca

SEQ ID NO: 5854 - DNA, 20 bp, Artificial Sequence
  chemically synthesized
aggaaactgtgtcatagata

SEQ ID NO: 5855 - DNA, 20 bp, Artificial Sequence
  chemically synthesized
agataaagctttgaaataat

SEQ ID NO: 5856 - DNA, 20 bp, Artificial Sequence
  chemically synthesized
aatgagatccttatgtttac

SEQ ID NO: 5857 - DNA, 20 bp, Artificial Sequence
  chemically synthesized
cttatgtttactagaaattt

SEQ ID NO: 5858 - DNA, 20 bp, Artificial Sequence
  chemically synthesized
tttactagaaattttggatt

SEQ ID NO: 5859 - DNA, 20 bp, Artificial Sequence
  chemically synthesized
aattttggattgagatctat

SEQ ID NO: 5860 - DNA, 20 bp, Artificial Sequence
  chemically synthesized
attttggattgagatctatg

SEQ ID NO: 5861 - DNA, 20 bp, Artificial Sequence
  chemically synthesized
gaggtctgtgacatattgcg

SEQ ID NO: 5862 - DNA, 20 bp, Artificial Sequence
  chemically synthesized
tgtgacatattgcgaagttc

SEQ ID NO: 5863 - DNA, 20 bp, Artificial Sequence
  chemically synthesized
gtgacatattgcgaagttca

SEQ ID NO: 5864 - DNA, 20 bp, Artificial Sequence
  chemically synthesized
cgaagttcaaggaaaattcg

SEQ ID NO: 5865 - DNA, 20 bp, Artificial Sequence
  chemically synthesized
gaagttcaaggaaaattcgt

SEQ ID NO: 5866 - DNA, 20 bp, Artificial Sequence
  chemically synthesized
tcaaggaaaattcgtaggcc

SEQ ID NO: 5867 - DNA, 20 bp, Artificial Sequence
  chemically synthesized
cctggaatttcatgcttctc

SEQ ID NO: 5868 - DNA, 20 bp, Artificial Sequence
  chemically synthesized
acccactccaccccctgcaa

SEQ ID NO: 5869 - DNA, 20 bp, Artificial Sequence
  chemically synthesized
ctccaccccctgcaaaagta

SEQ ID NO: 5870 - DNA, 20 bp, Artificial Sequence
  chemically synthesized
tccaccccctgcaaaagtac

SEQ ID NO: 5871 - DNA, 20 bp, Artificial Sequence
  chemically synthesized
atatgaatgtctcaaaacca

SEQ ID NO: 5872 - DNA, 20 bp, Artificial Sequence
  chemically synthesized
tatgaatgtctcaaaaccat

SEQ ID NO: 5873 - DNA, 20 bp, Artificial Sequence
  chemically synthesized
aaaaccataggctcatcttc

SEQ ID NO: 5874 - DNA, 20 bp, Artificial Sequence
  chemically synthesized
aaaccataggctcatcttct

SEQ ID NO: 5875 - DNA, 20 bp, Artificial Sequence
  chemically synthesized
accataggctcatcttctag

SEQ ID NO: 5876 - DNA, 20 bp, Artificial Sequence
  chemically synthesized
aggagcttcaatgttatttg

SEQ ID NO: 5877 - DNA, 20 bp, Artificial Sequence
  chemically synthesized
ttcaatgttatttgaagatt

SEQ ID NO: 5878 - DNA, 20 bp, Artificial Sequence
  chemically synthesized
tcaatgttatttgaagattt

SEQ ID NO: 5879 - DNA, 20 bp, Artificial Sequence
  chemically synthesized
atgttatttgaagatttggg

SEQ ID NO: 5880 - DNA, 20 bp, Artificial Sequence
  chemically synthesized
agatttgggcagaaaaaatt

SEQ ID NO: 5881 - DNA, 20 bp, Artificial Sequence
  chemically synthesized
atacgaaataacttatgtat

SEQ ID NO: 5882 - DNA, 20 bp, Artificial Sequence
  chemically synthesized
aacttatgtatgagttttaa

SEQ ID NO: 5883 - DNA, 20 bp, Artificial Sequence
  chemically synthesized
atgtatgagttttaaaagtg

SEQ ID NO: 5884 - DNA, 20 bp, Artificial Sequence
  chemically synthesized
ttttaaaagtgaagtaaaca

SEQ ID NO: 5885 - DNA, 20 bp, Artificial Sequence
  chemically synthesized
gtaaacatggatgtattctg

SEQ ID NO: 5886 - DNA, 20 bp, Artificial Sequence
  chemically synthesized
aacatggatgtattctgaag

SEQ ID NO: 5887 - DNA, 20 bp, Artificial Sequence
  chemically synthesized
aaaatttgaatgcattttta

SEQ ID NO: 5888 - DNA, 20 bp, Artificial Sequence
  chemically synthesized
atgcatttttaaagataaat

SEQ ID NO: 5889 - DNA, 20 bp, Artificial Sequence
  chemically synthesized
agaaaacttctaaaaactgt

SEQ ID NO: 5890 - DNA, 20 bp, Artificial Sequence
  chemically synthesized
ctaaaaactgtcagattgtc

SEQ ID NO: 5891 - DNA, 20 bp, Artificial Sequence
  chemically synthesized
taaaaactgtcagattgtct

SEQ ID NO: 5892 - DNA, 20 bp, Artificial Sequence
  chemically synthesized
actgtcagattgtctgggcc

SEQ ID NO: 5893 - DNA, 20 bp, Artificial Sequence
  chemically synthesized
gtcagattgtctgggcctgg

SEQ ID NO: 5894 - DNA, 20 bp, Artificial Sequence
  chemically synthesized
gtggcttatgcctgtaatcc

SEQ ID NO: 5895 - DNA, 20 bp, Artificial Sequence
  chemically synthesized
tgcctgtaatcccagcactt

SEQ ID NO: 5896 - DNA, 20 bp, Artificial Sequence
  chemically synthesized
gcctgtaatcccagcacttt

SEQ ID NO: 5897 - DNA, 20 bp, Artificial Sequence
  chemically synthesized
ctgtaatcccagcactttgg

SEQ ID NO: 5898 - DNA, 20 bp, Artificial Sequence
  chemically synthesized
tcccagcactttgggagtcc

SEQ ID NO: 5899 - DNA, 20 bp, Artificial Sequence
  chemically synthesized
cccagcactttgggagtccg

SEQ ID NO: 5900 - DNA, 20 bp, Artificial Sequence
  chemically synthesized
agcactttgggagtccgagg

SEQ ID NO: 5901 - DNA, 20 bp, Artificial Sequence
  chemically synthesized
gcactttgggagtccgaggt

SEQ ID NO: 5902 - DNA, 20 bp, Artificial Sequence
  chemically synthesized
ctttgggagtccgaggtggg

SEQ ID NO: 5903 - DNA, 20 bp, Artificial Sequence
  chemically synthesized
gtccgaggtgggtggatcac

SEQ ID NO: 5904 - DNA, 20 bp, Artificial Sequence
  chemically synthesized
tccgaggtgggtggatcaca

SEQ ID NO: 5905 - DNA, 20 bp, Artificial Sequence
  chemically synthesized
aggtgggtggatcacaaggt

SEQ ID NO: 5906 - DNA, 20 bp, Artificial Sequence
  chemically synthesized
ggtgggtggatcacaaggtc

SEQ ID NO: 5907 - DNA, 20 bp, Artificial Sequence
  chemically synthesized
tgggtggatcacaaggtcag

SEQ ID NO: 5908 - DNA, 20 bp, Artificial Sequence
  chemically synthesized
gatcacaaggtcaggagatc

SEQ ID NO: 5909 - DNA, 20 bp, Artificial Sequence
  chemically synthesized
tcgagaccatcctgccaaca

SEQ ID NO: 5910 - DNA, 20 bp, Artificial Sequence
  chemically synthesized
ggtgaaaccccgtctctact

SEQ ID NO: 5911 - DNA, 20 bp, Artificial Sequence
  chemically synthesized
tctactaagtatacaaaaat

SEQ ID NO: 5912 - DNA, 20 bp, Artificial Sequence
  chemically synthesized
ctaagtatacaaaaattagc

SEQ ID NO: 5913 - DNA, 20 bp, Artificial Sequence
  chemically synthesized
taagtatacaaaaattagct

SEQ ID NO: 5914 - DNA, 20 bp, Artificial Sequence
  chemically synthesized
atacaaaaattagctgggcg

SEQ ID NO: 5915 - DNA, 20 bp, Artificial Sequence
  chemically synthesized
caaaaattagctgggcgtgg

SEQ ID NO: 5916 - DNA, 20 bp, Artificial Sequence
  chemically synthesized
gcagcgtgtgcctgtaatcc

SEQ ID NO: 5917 - DNA, 20 bp, Artificial Sequence
  chemically synthesized
tgcctgtaatcccagctacc

SEQ ID NO: 5918 - DNA, 20 bp, Artificial Sequence
  chemically synthesized
gcctgtaatcccagctacct

SEQ ID NO: 5919 - DNA, 20 bp, Artificial Sequence
  chemically synthesized
ctgtaatcccagctacctgg

SEQ ID NO: 5920 - DNA, 20 bp, Artificial Sequence
  chemically synthesized
tgtaatcccagctacctggg

SEQ ID NO: 5921 - DNA, 20 bp, Artificial Sequence
  chemically synthesized
tcccagctacctgggaggct

SEQ ID NO: 5922 - DNA, 20 bp, Artificial Sequence
  chemically synthesized
cccagctacctgggaggctg

SEQ ID NO: 5923 - DNA, 20 bp, Artificial Sequence
  chemically synthesized
agctacctgggaggctgagg

SEQ ID NO: 5924 - DNA, 20 bp, Artificial Sequence
  chemically synthesized
gctacctgggaggctgaggc

SEQ ID NO: 5925 - DNA, 20 bp, Artificial Sequence
  chemically synthesized
tacctgggaggctgaggcag

SEQ ID NO: 5926 - DNA, 20 bp, Artificial Sequence
  chemically synthesized
gcaggagaatcgcttgaacc

SEQ ID NO: 5927 - DNA, 20 bp, Artificial Sequence
  chemically synthesized
caggagaatcgcttgaaccc

SEQ ID NO: 5928 - DNA, 20 bp, Artificial Sequence
  chemically synthesized
ggagaatcgcttgaacccag

SEQ ID NO: 5929 - DNA, 20 bp, Artificial Sequence
  chemically synthesized
gagaatcgcttgaacccagg

SEQ ID NO: 5930 - DNA, 20 bp, Artificial Sequence
  chemically synthesized
tcgcttgaacccaggaggtg

SEQ ID NO: 5931 - DNA, 20 bp, Artificial Sequence
  chemically synthesized
cgcttgaacccaggaggtgt

SEQ ID NO: 5932 - DNA, 20 bp, Artificial Sequence
  chemically synthesized
aacccaggaggtgtaggttg

SEQ ID NO: 5933 - DNA, 20 bp, Artificial Sequence
  chemically synthesized
caggaggtgtaggttgcagt

SEQ ID NO: 5934 - DNA, 20 bp, Artificial Sequence
  chemically synthesized
ggtgtaggttgcagtgagtc

SEQ ID NO: 5935 - DNA, 20 bp, Artificial Sequence
  chemically synthesized
aagatcgcgccactgcactt

SEQ ID NO: 5936 - DNA, 20 bp, Artificial Sequence
  chemically synthesized
cgcgccactgcactttagcc

SEQ ID NO: 5937 - DNA, 20 bp, Artificial Sequence
  chemically synthesized
actgcactttagcctggtga

SEQ ID NO: 5938 - DNA, 20 bp, Artificial Sequence
  chemically synthesized
tgcactttagcctggtgaca

SEQ ID NO: 5939 - DNA, 20 bp, Artificial Sequence
  chemically synthesized
ctttagcctggtgacagagc

SEQ ID NO: 5940 - DNA, 20 bp, Artificial Sequence
  chemically synthesized
tcaaaaaaaaaaaaaaatat

SEQ ID NO: 5941 - DNA, 20 bp, Artificial Sequence
  chemically synthesized
tatcagattgttcctacacc

SEQ ID NO: 5942 - DNA, 20 bp, Artificial Sequence
  chemically synthesized
cttctataccacactcctgt

SEQ ID NO: 5943 - DNA, 20 bp, Artificial Sequence
  chemically synthesized
ttctataccacactcctgtt

SEQ ID NO: 5944 - DNA, 20 bp, Artificial Sequence
  chemically synthesized
tctataccacactcctgtta

SEQ ID NO: 5945 - DNA, 20 bp, Artificial Sequence
  chemically synthesized
ctataccacactcctgttag

SEQ ID NO: 5946 - DNA, 20 bp, Artificial Sequence
  chemically synthesized
tataccacactcctgttagg

SEQ ID NO: 5947 - DNA, 20 bp, Artificial Sequence
  chemically synthesized
acactcctgttagggggcat

SEQ ID NO: 5948 - DNA, 20 bp, Artificial Sequence
  chemically synthesized
ctcctgttagggggcatcag

SEQ ID NO: 5949 - DNA, 20 bp, Artificial Sequence
  chemically synthesized
ttagggggcatcagtggaaa

SEQ ID NO: 5950 - DNA, 20 bp, Artificial Sequence
  chemically synthesized
gggcatcagtggaaatggtt

SEQ ID NO: 5951 - DNA, 20 bp, Artificial Sequence
  chemically synthesized
ggcatcagtggaaatggtta

SEQ ID NO: 5952 - DNA, 20 bp, Artificial Sequence
  chemically synthesized
catcagtggaaatggttaag

SEQ ID NO: 5953 - DNA, 20 bp, Artificial Sequence
  chemically synthesized
gaaatggttaaggagatgtt

SEQ ID NO: 5954 - DNA, 20 bp, Artificial Sequence
  chemically synthesized
tttagtgtgtattgtctgcc

SEQ ID NO: 5955 - DNA, 20 bp, Artificial Sequence
  chemically synthesized
aagcactgtcaacactgtca

SEQ ID NO: 5956 - DNA, 20 bp, Artificial Sequence
  chemically synthesized
tgtcatagaaacttctgtac

SEQ ID NO: 5957 - DNA, 20 bp, Artificial Sequence
  chemically synthesized
catagaaacttctgtacgag

SEQ ID NO: 5958 - DNA, 20 bp, Artificial Sequence
  chemically synthesized
cttctgtacgagtagaatgt

SEQ ID NO: 5959 - DNA, 20 bp, Artificial Sequence
  chemically synthesized
gagcaaattatgtgttgaaa

SEQ ID NO: 5960 - DNA, 20 bp, Artificial Sequence
  chemically synthesized
tgaaatggttcctctccctg

SEQ ID NO: 5961 - DNA, 20 bp, Artificial Sequence
  chemically synthesized
gaaatggttcctctccctgc

SEQ ID NO: 5962 - DNA, 20 bp, Artificial Sequence
  chemically synthesized
tcctctccctgcaggtcttt

SEQ ID NO: 5963 - DNA, 20 bp, Artificial Sequence
  chemically synthesized
caggtctttcagctgaaacc

SEQ ID NO: 5964 - DNA, 20 bp, Artificial Sequence
  chemically synthesized
ctgaaacctggcttatctct

SEQ ID NO: 5965 - DNA, 20 bp, Artificial Sequence
  chemically synthesized
aaacctggcttatctctcag

SEQ ID NO: 5966 - DNA, 20 bp, Artificial Sequence
  chemically synthesized
tcagaagtactttccttgca

SEQ ID NO: 5967 - DNA, 20 bp, Artificial Sequence
  chemically synthesized
cagtttctacttgtccttca

SEQ ID NO: 5968 - DNA, 20 bp, Artificial Sequence
  chemically synthesized
tctacttgtccttcacagaa

SEQ ID NO: 5969 - DNA, 20 bp, Artificial Sequence
  chemically synthesized
cttgacactaataaaatata

SEQ ID NO: 5970 - DNA, 20 bp, Artificial Sequence
  chemically synthesized
gacactaataaaatatatag

SEQ ID NO: 5971 - DNA, 20 bp, Artificial Sequence
  chemically synthesized
atatatagaagacgatacgt

SEQ ID NO: 5972 - DNA, 20 bp, Artificial Sequence
  chemically synthesized
acgtgagtaaaactcctaca

SEQ ID NO: 5973 - DNA, 20 bp, Artificial Sequence
  chemically synthesized
tgagtaaaactcctacacgg

SEQ ID NO: 5974 - DNA, 20 bp, Artificial Sequence
  chemically synthesized
ttttttttttccattatttt

SEQ ID NO: 5975 - DNA, 20 bp, Artificial Sequence
  chemically synthesized
tttttttttccattattttt

SEQ ID NO: 5976 - DNA, 20 bp, Artificial Sequence
  chemically synthesized
ttttttccattatttttagg

SEQ ID NO: 5977 - DNA, 20 bp, Artificial Sequence
  chemically synthesized
tttccattatttttaggcag

SEQ ID NO: 5978 - DNA, 20 bp, Artificial Sequence
  chemically synthesized
ttccattatttttaggcaga

SEQ ID NO: 5979 - DNA, 20 bp, Artificial Sequence
  chemically synthesized
tccattatttttaggcagaa

SEQ ID NO: 5980 - DNA, 20 bp, Artificial Sequence
  chemically synthesized
tttttaggcagaagggaaaa

SEQ ID NO: 5981 - DNA, 20 bp, Artificial Sequence
  chemically synthesized
aaaagccctttaaatctctt

SEQ ID NO: 5982 - DNA, 20 bp, Artificial Sequence
  chemically synthesized
ttaaatctcttcggaacctg

SEQ ID NO: 5983 - DNA, 20 bp, Artificial Sequence
  chemically synthesized
atctcttcggaacctgaaga

SEQ ID NO: 5984 - DNA, 20 bp, Artificial Sequence
  chemically synthesized
gaagatagaccttgatttaa

SEQ ID NO: 5985 - DNA, 20 bp, Artificial Sequence
  chemically synthesized
gatagaccttgatttaacag

SEQ ID NO: 5986 - DNA, 20 bp, Artificial Sequence
  chemically synthesized
tagaccttgatttaacagca

SEQ ID NO: 5987 - DNA, 20 bp, Artificial Sequence
  chemically synthesized
agaccttgatttaacagcag

SEQ ID NO: 5988 - DNA, 20 bp, Artificial Sequence
  chemically synthesized
gaccttgatttaacagcaga

SEQ ID NO: 5989 - DNA, 20 bp, Artificial Sequence
  chemically synthesized
gggcgatcttaacataataa

SEQ ID NO: 5990 - DNA, 20 bp, Artificial Sequence
  chemically synthesized
tcttaacataataatggctc

SEQ ID NO: 5991 - DNA, 20 bp, Artificial Sequence
  chemically synthesized
acataataatggctctggct

SEQ ID NO: 5992 - DNA, 20 bp, Artificial Sequence
  chemically synthesized
tctggctgagaaaattaaac

SEQ ID NO: 5993 - DNA, 20 bp, Artificial Sequence
  chemically synthesized
ctggctgagaaaattaaacc

SEQ ID NO: 5994 - DNA, 20 bp, Artificial Sequence
  chemically synthesized
ggcctacactcttttatctt

SEQ ID NO: 5995 - DNA, 20 bp, Artificial Sequence
  chemically synthesized
ctacactcttttatctttgg

SEQ ID NO: 5996 - DNA, 20 bp, Artificial Sequence
  chemically synthesized
tttggaagacctttctacac

SEQ ID NO: 5997 - DNA, 20 bp, Artificial Sequence
  chemically synthesized
acctttctacactagtgtgc

SEQ ID NO: 5998 - DNA, 20 bp, Artificial Sequence
  chemically synthesized
ctacactagtgtgcaagaac

SEQ ID NO: 5999 - DNA, 20 bp, Artificial Sequence
  chemically synthesized
ttttaaatgtgtaacttaat

SEQ ID NO: 6000 - DNA, 20 bp, Artificial Sequence
  chemically synthesized
tccatcacaatcatgatcgc

SEQ ID NO: 6001 - DNA, 20 bp, Artificial Sequence
  chemically synthesized
cacaatcatgatcgctggta

SEQ ID NO: 6002 - DNA, 20 bp, Artificial Sequence
  chemically synthesized
aatcatgatcgctggtaaag

SEQ ID NO: 6003 - DNA, 20 bp, Artificial Sequence
  chemically synthesized
tgatcgctggtaaagtagct

SEQ ID NO: 6004 - DNA, 20 bp, Artificial Sequence
  chemically synthesized
tcgctggtaaagtagctcag

SEQ ID NO: 6005 - DNA, 20 bp, Artificial Sequence
  chemically synthesized
ggtaaagtagctcagtggtg

SEQ ID NO: 6006 - DNA, 20 bp, Artificial Sequence
  chemically synthesized
gtaaagtagctcagtggtgt

SEQ ID NO: 6007 - DNA, 20 bp, Artificial Sequence
  chemically synthesized
taaagtagctcagtggtgtg

SEQ ID NO: 6008 - DNA, 20 bp, Artificial Sequence
  chemically synthesized
ggtgtggggaaacgttcccc

SEQ ID NO: 6009 - DNA, 20 bp, Artificial Sequence
  chemically synthesized
cgttcccctggatcatactc

SEQ ID NO: 6010 - DNA, 20 bp, Artificial Sequence
  chemically synthesized
atactccagaattctgctct

SEQ ID NO: 6011 - DNA, 20 bp, Artificial Sequence
  chemically synthesized
aattctgctctcagcaattg

SEQ ID NO: 6012 - DNA, 20 bp, Artificial Sequence
  chemically synthesized
tgctctcagcaattgcagtt

SEQ ID NO: 6013 - DNA, 20 bp, Artificial Sequence
  chemically synthesized
ctcagcaattgcagttaagt

SEQ ID NO: 6014 - DNA, 20 bp, Artificial Sequence
  chemically synthesized
cagttaagtaagttacacta

SEQ ID NO: 6015 - DNA, 20 bp, Artificial Sequence
  chemically synthesized
agttacactacagttctcac

SEQ ID NO: 6016 - DNA, 20 bp, Artificial Sequence
  chemically synthesized
ttacactacagttctcacaa

SEQ ID NO: 6017 - DNA, 20 bp, Artificial Sequence
  chemically synthesized
cagttctcacaagagcctgt

SEQ ID NO: 6018 - DNA, 20 bp, Artificial Sequence
  chemically synthesized
agttctcacaagagcctgtg

SEQ ID NO: 6019 - DNA, 20 bp, Artificial Sequence
  chemically synthesized
gttctcacaagagcctgtga

SEQ ID NO: 6020 - DNA, 20 bp, Artificial Sequence
  chemically synthesized
ttctcacaagagcctgtgag

SEQ ID NO: 6021 - DNA, 20 bp, Artificial Sequence
  chemically synthesized
aagagcctgtgaggggatgt

SEQ ID NO: 6022 - DNA, 20 bp, Artificial Sequence
  chemically synthesized
agagcctgtgaggggatgtc

SEQ ID NO: 6023 - DNA, 20 bp, Artificial Sequence
  chemically synthesized
tgtcaggtgcatcattacat

SEQ ID NO: 6024 - DNA, 20 bp, Artificial Sequence
  chemically synthesized
gtcaggtgcatcattacatt

SEQ ID NO: 6025 - DNA, 20 bp, Artificial Sequence
  chemically synthesized
acattgggtgtctcttttcc

SEQ ID NO: 6026 - DNA, 20 bp, Artificial Sequence
  chemically synthesized
ttttcctagatttatgcttt

SEQ ID NO: 6027 - DNA, 20 bp, Artificial Sequence
  chemically synthesized
tttcctagatttatgctttt

SEQ ID NO: 6028 - DNA, 20 bp, Artificial Sequence
  chemically synthesized
agatttatgcttttgggata

SEQ ID NO: 6029 - DNA, 20 bp, Artificial Sequence
  chemically synthesized
aatattattgctatctttta

SEQ ID NO: 6030 - DNA, 20 bp, Artificial Sequence
  chemically synthesized
atcttttaaagatataataa

SEQ ID NO: 6031 - DNA, 20 bp, Artificial Sequence
  chemically synthesized
tcttttaaagatataataat

SEQ ID NO: 6032 - DNA, 20 bp, Artificial Sequence
  chemically synthesized
tttttgaaatacatgattca

SEQ ID NO: 6033 - DNA, 20 bp, Artificial Sequence
  chemically synthesized
attcatggtttacatgtgtc

SEQ ID NO: 6034 - DNA, 20 bp, Artificial Sequence
  chemically synthesized
ttcatggtttacatgtgtca

SEQ ID NO: 6035 - DNA, 20 bp, Artificial Sequence
  chemically synthesized
catgtgtcaaggtgaaatct

SEQ ID NO: 6036 - DNA, 20 bp, Artificial Sequence
  chemically synthesized
tgtcaaggtgaaatctgagt

SEQ ID NO: 6037 - DNA, 20 bp, Artificial Sequence
  chemically synthesized
gaaatctgagttggctttta

SEQ ID NO: 6038 - DNA, 20 bp, Artificial Sequence
  chemically synthesized
tctgagttggcttttacaga

SEQ ID NO: 6039 - DNA, 20 bp, Artificial Sequence
  chemically synthesized
atagttgactttctatcttt

SEQ ID NO: 6040 - DNA, 20 bp, Artificial Sequence
  chemically synthesized
ttctatcttttggcattctt

SEQ ID NO: 6041 - DNA, 20 bp, Artificial Sequence
  chemically synthesized
ttttggcattctttggtgtg

SEQ ID NO: 6042 - DNA, 20 bp, Artificial Sequence
  chemically synthesized
ttctgcaatcaactgaaaac

SEQ ID NO: 6043 - DNA, 20 bp, Artificial Sequence
  chemically synthesized
ctgcaatcaactgaaaacta

SEQ ID NO: 6044 - DNA, 20 bp, Artificial Sequence
  chemically synthesized
tttaaatgatttcaattcca

SEQ ID NO: 6045 - DNA, 20 bp, Artificial Sequence
  chemically synthesized
aatgatttcaattccacaga

SEQ ID NO: 6046 - DNA, 20 bp, Artificial Sequence
  chemically synthesized
atttcaattccacagaaaga

SEQ ID NO: 6047 - DNA, 20 bp, Artificial Sequence
  chemically synthesized
caattccacagaaagaaagt

SEQ ID NO: 6048 - DNA, 20 bp, Artificial Sequence
  chemically synthesized
aaagaaagtgagcttgaaca

SEQ ID NO: 6049 - DNA, 20 bp, Artificial Sequence
  chemically synthesized
aagaaagtgagcttgaacat

SEQ ID NO: 6050 - DNA, 20 bp, Artificial Sequence
  chemically synthesized
agtgagcttgaacataggat

SEQ ID NO: 6051 - DNA, 20 bp, Artificial Sequence
  chemically synthesized
cttgaacataggatgagctt

SEQ ID NO: 6052 - DNA, 20 bp, Artificial Sequence
  chemically synthesized
aacataggatgagctttaga

SEQ ID NO: 6053 - DNA, 20 bp, Artificial Sequence
  chemically synthesized
ctttagaaagaaaattgatc

SEQ ID NO: 6054 - DNA, 20 bp, Artificial Sequence
  chemically synthesized
tagaaagaaaattgatcaag

SEQ ID NO: 6055 - DNA, 20 bp, Artificial Sequence
  chemically synthesized
tgatcaagcagatgtttaat

SEQ ID NO: 6056 - DNA, 20 bp, Artificial Sequence
  chemically synthesized
gtttaattggaattgattat

SEQ ID NO: 6057 - DNA, 20 bp, Artificial Sequence
  chemically synthesized
gattattagatcctactttg

SEQ ID NO: 6058 - DNA, 20 bp, Artificial Sequence
  chemically synthesized
tagatcctactttgtggatt

SEQ ID NO: 6059 - DNA, 20 bp, Artificial Sequence
  chemically synthesized
tactttgtggatttagtccc

SEQ ID NO: 6060 - DNA, 20 bp, Artificial Sequence
  chemically synthesized
actttgtggatttagtccct

SEQ ID NO: 6061 - DNA, 20 bp, Artificial Sequence
  chemically synthesized
tggatttagtccctgggatt

SEQ ID NO: 6062 - DNA, 20 bp, Artificial Sequence
  chemically synthesized
agtccctgggattcagtctg

SEQ ID NO: 6063 - DNA, 20 bp, Artificial Sequence
  chemically synthesized
cagtctgtagaaatgtctaa

SEQ ID NO: 6064 - DNA, 20 bp, Artificial Sequence
  chemically synthesized
aaatgtctaatagttctcta

SEQ ID NO: 6065 - DNA, 20 bp, Artificial Sequence
  chemically synthesized
ttctctatagtccttgttcc

SEQ ID NO: 6066 - DNA, 20 bp, Artificial Sequence
  chemically synthesized
tccttgttcctggtgaacca

SEQ ID NO: 6067 - DNA, 20 bp, Artificial Sequence
  chemically synthesized
tgttcctggtgaaccacagt

SEQ ID NO: 6068 - DNA, 20 bp, Artificial Sequence
  chemically synthesized
gttcctggtgaaccacagtt

SEQ ID NO: 6069 - DNA, 20 bp, Artificial Sequence
  chemically synthesized
ttcctggtgaaccacagtta

SEQ ID NO: 6070 - DNA, 20 bp, Artificial Sequence
  chemically synthesized
gctattgttgatattctatg

SEQ ID NO: 6071 - DNA, 20 bp, Artificial Sequence
  chemically synthesized
tgttgatattctatgtagtt

SEQ ID NO: 6072 - DNA, 20 bp, Artificial Sequence
  chemically synthesized
tatgtagttgagctctgtaa

SEQ ID NO: 6073 - DNA, 20 bp, Artificial Sequence
  chemically synthesized
atgtagttgagctctgtaaa

SEQ ID NO: 6074 - DNA, 20 bp, Artificial Sequence
  chemically synthesized
ggaaattgtattttatgttt

SEQ ID NO: 6075 - DNA, 20 bp, Artificial Sequence
  chemically synthesized
aattaattttcattattttt

SEQ ID NO: 6076 - DNA, 20 bp, Artificial Sequence
  chemically synthesized
tcctgtgccttttttctcct

SEQ ID NO: 6077 - DNA, 20 bp, Artificial Sequence
  chemically synthesized
ccttagaaaatctaattact

SEQ ID NO: 6078 - DNA, 20 bp, Artificial Sequence
  chemically synthesized
aaaatctaattacttggaac

SEQ ID NO: 6079 - DNA, 20 bp, Artificial Sequence
  chemically synthesized
ctaattacttggaacaagtt

SEQ ID NO: 6080 - DNA, 20 bp, Artificial Sequence
  chemically synthesized
ggaacaagttcagatttcac

SEQ ID NO: 6081 - DNA, 20 bp, Artificial Sequence
  chemically synthesized
caagttcagatttcactggt

SEQ ID NO: 6082 - DNA, 20 bp, Artificial Sequence
  chemically synthesized
catcttgttttcttcttgct

SEQ ID NO: 6083 - DNA, 20 bp, Artificial Sequence
  chemically synthesized
gtcttaccatgtacctgctt

SEQ ID NO: 6084 - DNA, 20 bp, Artificial Sequence
  chemically synthesized
ttggcaatcattgcaactct

SEQ ID NO: 6085 - DNA, 20 bp, Artificial Sequence
  chemically synthesized
tctgagattataaaatgcct

SEQ ID NO: 6086 - DNA, 20 bp, Artificial Sequence
  chemically synthesized
tgagattataaaatgcctta

SEQ ID NO: 6087 - DNA, 20 bp, Artificial Sequence
  chemically synthesized
tagagaatatactaactaat

SEQ ID NO: 6088 - DNA, 20 bp, Artificial Sequence
  chemically synthesized
aactaataagatcttttttt

SEQ ID NO: 6089 - DNA, 20 bp, Artificial Sequence
  chemically synthesized
taagatctttttttcagaaa

SEQ ID NO: 6090 - DNA, 20 bp, Artificial Sequence
  chemically synthesized
tttttttcagaaacagaaaa

SEQ ID NO: 6091 - DNA, 20 bp, Artificial Sequence
  chemically synthesized
gaaacagaaaatagttcctt

SEQ ID NO: 6092 - DNA, 20 bp, Artificial Sequence
  chemically synthesized
catttctgcctatgtttttg

SEQ ID NO: 6093 - DNA, 20 bp, Artificial Sequence
  chemically synthesized
ttgttgctgtttgcctgcaa

SEQ ID NO: 6094 - DNA, 20 bp, Artificial Sequence
  chemically synthesized
tgttgctgtttgcctgcaat

SEQ ID NO: 6095 - DNA, 20 bp, Artificial Sequence
  chemically synthesized
gtttgcctgcaataggctat

SEQ ID NO: 6096 - DNA, 20 bp, Artificial Sequence
  chemically synthesized
tttgcctgcaataggctata

SEQ ID NO: 6097 - DNA, 20 bp, Artificial Sequence
  chemically synthesized
ctgcaataggctataaggaa

SEQ ID NO: 6098 - DNA, 20 bp, Artificial Sequence
  chemically synthesized
caataggctataaggaatag

SEQ ID NO: 6099 - DNA, 20 bp, Artificial Sequence
  chemically synthesized
aataggctataaggaatagc

SEQ ID NO: 6100 - DNA, 20 bp, Artificial Sequence
  chemically synthesized
taggctataaggaatagcag

SEQ ID NO: 6101 - DNA, 20 bp, Artificial Sequence
  chemically synthesized
tagcaggagaaattttactg

SEQ ID NO: 6102 - DNA, 20 bp, Artificial Sequence
  chemically synthesized
ttactgaagtgctgttttcc

SEQ ID NO: 6103 - DNA, 20 bp, Artificial Sequence
  chemically synthesized
tactgaagtgctgttttcct

SEQ ID NO: 6104 - DNA, 20 bp, Artificial Sequence
  chemically synthesized
tgttttcctaggtgctactt

SEQ ID NO: 6105 - DNA, 20 bp, Artificial Sequence
  chemically synthesized
tttcctaggtgctactttgg

SEQ ID NO: 6106 - DNA, 20 bp, Artificial Sequence
  chemically synthesized
tcctaggtgctactttggca

SEQ ID NO: 6107 - DNA, 20 bp, Artificial Sequence
  chemically synthesized
ggtgctactttggcagagct

SEQ ID NO: 6108 - DNA, 20 bp, Artificial Sequence
  chemically synthesized
ttttgttttcttaatgcgtt

SEQ ID NO: 6109 - DNA, 20 bp, Artificial Sequence
  chemically synthesized
atgcgtttggaccattttgc

SEQ ID NO: 6110 - DNA, 20 bp, Artificial Sequence
  chemically synthesized
ctaacacaatgttgacattg

SEQ ID NO: 6111 - DNA, 20 bp, Artificial Sequence
  chemically synthesized
aaatattttatttaaaattc

SEQ ID NO: 6112 - DNA, 20 bp, Artificial Sequence
  chemically synthesized
tattttatttaaaattctgg

SEQ ID NO: 6113 - DNA, 20 bp, Artificial Sequence
  chemically synthesized
aaattctggaagtaatataa

SEQ ID NO: 6114 - DNA, 20 bp, Artificial Sequence
  chemically synthesized
aattctggaagtaatataaa

SEQ ID NO: 6115 - DNA, 20 bp, Artificial Sequence
  chemically synthesized
attctggaagtaatataaaa

SEQ ID NO: 6116 - DNA, 20 bp, Artificial Sequence
  chemically synthesized
aaaagggaaaatatatttat

SEQ ID NO: 6117 - DNA, 20 bp, Artificial Sequence
  chemically synthesized
gggaaaatatatttataaga

SEQ ID NO: 6118 - DNA, 20 bp, Artificial Sequence
  chemically synthesized
ggaaaatatatttataagaa

SEQ ID NO: 6119 - DNA, 20 bp, Artificial Sequence
  chemically synthesized
gaaaatatatttataagaaa

SEQ ID NO: 6120 - DNA, 20 bp, Artificial Sequence
  chemically synthesized
atatttataagaaagggata

SEQ ID NO: 6121 - DNA, 20 bp, Artificial Sequence
  chemically synthesized
tatttataagaaagggataa

SEQ ID NO: 6122 - DNA, 20 bp, Artificial Sequence
  chemically synthesized
taagaaagggataaaggtaa

SEQ ID NO: 6123 - DNA, 20 bp, Artificial Sequence
  chemically synthesized
agaaagggataaaggtaata

SEQ ID NO: 6124 - DNA, 20 bp, Artificial Sequence
  chemically synthesized
aatgacatgttcgaatgtga

SEQ ID NO: 6125 - DNA, 20 bp, Artificial Sequence
  chemically synthesized
atgacatgttcgaatgtgaa

SEQ ID NO: 6126 - DNA, 20 bp, Artificial Sequence
  chemically synthesized
tcgaatgtgaaaggtcataa

SEQ ID NO: 6127 - DNA, 20 bp, Artificial Sequence
  chemically synthesized
atagctttcccatcatgaat

SEQ ID NO: 6128 - DNA, 20 bp, Artificial Sequence
  chemically synthesized
ctttcccatcatgaatcaga

SEQ ID NO: 6129 - DNA, 20 bp, Artificial Sequence
  chemically synthesized
catcatgaatcagaaagatg

SEQ ID NO: 6130 - DNA, 20 bp, Artificial Sequence
  chemically synthesized
atgaatcagaaagatgtgga

SEQ ID NO: 6131 - DNA, 20 bp, Artificial Sequence
  chemically synthesized
atgtggacagcttgatgttt

SEQ ID NO: 6132 - DNA, 20 bp, Artificial Sequence
  chemically synthesized
gttttagacaaccactgaac

SEQ ID NO: 6133 - DNA, 20 bp, Artificial Sequence
  chemically synthesized
actagatgactgttgtactg

SEQ ID NO: 6134 - DNA, 20 bp, Artificial Sequence
  chemically synthesized
atgactgttgtactgtagct

SEQ ID NO: 6135 - DNA, 20 bp, Artificial Sequence
  chemically synthesized
aatatataaatactaccttg

SEQ ID NO: 6136 - DNA, 20 bp, Artificial Sequence
  chemically synthesized
cccatactgtgttttttaca

SEQ ID NO: 6137 - DNA, 20 bp, Artificial Sequence
  chemically synthesized
atactgtgttttttacatgg

SEQ ID NO: 6138 - DNA, 20 bp, Artificial Sequence
  chemically synthesized
tacatggtagattcttattt

SEQ ID NO: 6139 - DNA, 20 bp, Artificial Sequence
  chemically synthesized
attcttatttaagtgctaac

SEQ ID NO: 6140 - DNA, 20 bp, Artificial Sequence
  chemically synthesized
tgctaactggttattttctt

SEQ ID NO: 6141 - DNA, 20 bp, Artificial Sequence
  chemically synthesized
aactggttattttctttggc

SEQ ID NO: 6142 - DNA, 20 bp, Artificial Sequence
  chemically synthesized
tggtttattgtactgttata

SEQ ID NO: 6143 - DNA, 20 bp, Artificial Sequence
  chemically synthesized
tgtactgttatacagaatgt

SEQ ID NO: 6144 - DNA, 20 bp, Artificial Sequence
  chemically synthesized
tatacagaatgtaagttgta

SEQ ID NO: 6145 - DNA, 20 bp, Artificial Sequence
  chemically synthesized
tgtaagttgtacagtgaaat

SEQ ID NO: 6146 - DNA, 20 bp, Artificial Sequence
  chemically synthesized
tacagtgaaataagttatta

SEQ ID NO: 6147 - DNA, 20 bp, Artificial Sequence
  chemically synthesized
tatatatcttttctcctaaa

SEQ ID NO: 6148 - DNA, 20 bp, Artificial Sequence
  chemically synthesized
tatatcttttctcctaaatg

SEQ ID NO: 6149 - DNA, 20 bp, Artificial Sequence
  chemically synthesized
taaccagttagcacttaaat

SEQ ID NO: 6150 - DNA, 20 bp, Artificial Sequence
  chemically synthesized
cattttgttgtgtaaatttg

SEQ ID NO: 6151 - DNA, 20 bp, Artificial Sequence
  chemically synthesized
tttcccttttatattacttc

SEQ ID NO: 6152 - DNA, 20 bp, Artificial Sequence
  chemically synthesized
ctacaatgtcaacattgtgt

SEQ ID NO: 6153 - DNA, 20 bp, Artificial Sequence
  chemically synthesized
tctaaggcattttataatct

SEQ ID NO: 6154 - DNA, 20 bp, Artificial Sequence
  chemically synthesized
ttttacagagctcaactaca

SEQ ID NO: 6155 - DNA, 20 bp, Artificial Sequence
  chemically synthesized
ctattagacatttctacaga

SEQ ID NO: 6156 - DNA, 20 bp, Artificial Sequence
  chemically synthesized
cagggactaaatccacaaag

SEQ ID NO: 6157 - DNA, 20 bp, Artificial Sequence
  chemically synthesized
tcaagctcactttctttctg

SEQ ID NO: 6158 - DNA, 20 bp, Artificial Sequence
  chemically synthesized
tacagtaattctacacacca

SEQ ID NO: 6159 - DNA, 20 bp, Artificial Sequence
  chemically synthesized
caccttgacacatgtaaacc

SEQ ID NO: 6160 - DNA, 20 bp, Artificial Sequence
  chemically synthesized
ttaactgcaattgctgagag

SEQ ID NO: 6161 - DNA, 20 bp, Artificial Sequence
  chemically synthesized
aattgctgagagcagaattc

SEQ ID NO: 6162 - DNA, 20 bp, Artificial Sequence
  chemically synthesized
accagcgatcatgattgtga

SEQ ID NO: 6163 - DNA, 20 bp, Artificial Sequence
  chemically synthesized
gaaaggtcttccaaagataa

SEQ ID NO: 6164 - DNA, 20 bp, Artificial Sequence
  chemically synthesized
caaaggtttttcttccgtgt

SEQ ID NO: 6165 - DNA, 20 bp, Artificial Sequence
  chemically synthesized
ttccactgatgccccctaac

SEQ ID NO: 6166 - DNA, 20 bp, Artificial Sequence
  chemically synthesized
atttttttttttttttgaga

SEQ ID NO: 6167 - DNA, 20 bp, Artificial Sequence
  chemically synthesized
ctcactgcaacctacacctc

SEQ ID NO: 6168 - DNA, 20 bp, Artificial Sequence
  chemically synthesized
gcctcagcctcccaggtagc

SEQ ID NO: 6169 - DNA, 20 bp, Artificial Sequence
  chemically synthesized
ttttgtatacttagtagaga

SEQ ID NO: 6170 - DNA, 20 bp, Artificial Sequence
  chemically synthesized
acggggtttcaccatgttgg

SEQ ID NO: 6171 - DNA, 20 bp, Artificial Sequence
  chemically synthesized
acctcggactcccaaagtgc

SEQ ID NO: 6172 - DNA, 20 bp, Artificial Sequence
  chemically synthesized
tcaaattttgcattctactt

SEQ ID NO: 6173 - DNA, 20 bp, Artificial Sequence
  chemically synthesized
catatacctgtacttttgca

SEQ ID NO: 6174 - DNA, 20 bp, Artificial Sequence
  chemically synthesized
acctgtacttttgcaggggg

SEQ ID NO: 6175 - DNA, 20 bp, Artificial Sequence
  chemically synthesized
gtacttttgcagggggtgga

SEQ ID NO: 6176 - DNA, 20 bp, Artificial Sequence
  chemically synthesized
ttttgcagggggtggagtgg

SEQ ID NO: 6177 - DNA, 20 bp, Artificial Sequence
  chemically synthesized
agggggtggagtgggtgggt

SEQ ID NO: 6178 - DNA, 20 bp, Artificial Sequence
  chemically synthesized
gtggagtgggtgggtaggag

SEQ ID NO: 6179 - DNA, 20 bp, Artificial Sequence
  chemically synthesized
tgtgtgcatatgatgaggtg

SEQ ID NO: 6180 - DNA, 20 bp, Artificial Sequence
  chemically synthesized
atgatgaggtggagagtggg

SEQ ID NO: 6181 - DNA, 20 bp, Artificial Sequence
  chemically synthesized
aagcatgaaattccaggcct

SEQ ID NO: 6182 - DNA, 20 bp, Artificial Sequence
  chemically synthesized
ccaaaatttctagtaaacat

SEQ ID NO: 6183 - DNA, 20 bp, Artificial Sequence
  chemically synthesized
cagtttcctggcctgatccc

SEQ ID NO: 6184 - DNA, 20 bp, Artificial Sequence
  chemically synthesized
attaagtagatattttttaa

SEQ ID NO: 6185 - DNA, 20 bp, Artificial Sequence
  chemically synthesized
actatgtttcaaaaatattt

SEQ ID NO: 6186 - DNA, 20 bp, Artificial Sequence
  chemically synthesized
tacttgttataggttaatgc

SEQ ID NO: 6187 - DNA, 20 bp, Artificial Sequence
  chemically synthesized
aatgtttgttgtttgacgta

SEQ ID NO: 6188 - DNA, 20 bp, Artificial Sequence
  chemically synthesized
aaatatattacactctatca

SEQ ID NO: 6189 - DNA, 20 bp, Artificial Sequence
  chemically synthesized
atatactctacataacataa

SEQ ID NO: 6190 - DNA, 20 bp, Artificial Sequence
  chemically synthesized
catatatagtacaagcattg

SEQ ID NO: 6191 - DNA, 20 bp, Artificial Sequence
  chemically synthesized
cactttgatacatgtaaacc

SEQ ID NO: 6192 - DNA, 20 bp, Artificial Sequence
  chemically synthesized
attatattgtaaacaaaggt

SEQ ID NO: 6193 - DNA, 20 bp, Artificial Sequence
  chemically synthesized
aactctggggcatgatccag

SEQ ID NO: 6194 - DNA, 20 bp, Artificial Sequence
  chemically synthesized
aatatatagaacaggcattg

SEQ ID NO: 6195 - DNA, 20 bp, Artificial Sequence
  chemically synthesized
tgatccaggaaggctttcac

SEQ ID NO: 6196 - DNA, 20 bp, Artificial Sequence
  chemically synthesized
ttacatataaacacatttgt

SEQ ID NO: 6197 - DNA, 20 bp, Artificial Sequence
  chemically synthesized
atacattcatttatttactc

SEQ ID NO: 6198 - DNA, 20 bp, Artificial Sequence
  chemically synthesized
aatatgtaattttttctcta

SEQ ID NO: 6199 - DNA, 20 bp, Artificial Sequence
  chemically synthesized
gaatataagcagtccccagt

SEQ ID NO: 6200 - DNA, 20 bp, Artificial Sequence
  chemically synthesized
caaaaaatgtgaagaaaaat

SEQ ID NO: 6201 - DNA, 20 bp, Artificial Sequence
  chemically synthesized
cacactccgatgattatcca

SEQ ID NO: 6202 - DNA, 20 bp, Artificial Sequence
  chemically synthesized
ctacctaccttggcaacgac

SEQ ID NO: 6203 - DNA, 20 bp, Artificial Sequence
  chemically synthesized
ctaccttggcaacgaccaga

SEQ ID NO: 6204 - DNA, 20 bp, Artificial Sequence
  chemically synthesized
tgtgtgcctaacacagcacc

SEQ ID NO: 6205 - DNA, 20 bp, Artificial Sequence
  chemically synthesized
cctaggttctactcaggcca

SEQ ID NO: 6206 - DNA, 20 bp, Artificial Sequence
  chemically synthesized
agagaacatttagtaagagg

SEQ ID NO: 6207 - DNA, 20 bp, Artificial Sequence
  chemically synthesized
agtttttaactgaaagtggt

SEQ ID NO: 6208 - DNA, 20 bp, Artificial Sequence
  chemically synthesized
gggatcatcctatacctgac

SEQ ID NO: 6209 - DNA, 20 bp, Artificial Sequence
  chemically synthesized
tgaccagagtggcaaaaaaa

SEQ ID NO: 6210 - DNA, 20 bp, Artificial Sequence
  chemically synthesized
cagagtggcaaaaaaagaga

SEQ ID NO: 6211 - DNA, 20 bp, Artificial Sequence
  chemically synthesized
aagtttccttatcttaagaa

SEQ ID NO: 6212 - DNA, 20 bp, Artificial Sequence
  chemically synthesized
cccttcttgggctctggaaa

SEQ ID NO: 6213 - DNA, 20 bp, Artificial Sequence
  chemically synthesized
agaataaggcttatatttaa

SEQ ID NO: 6214 - DNA, 20 bp, Artificial Sequence
  chemically synthesized
gacttattatacctgttcca

SEQ ID NO: 6215 - DNA, 20 bp, Artificial Sequence
  chemically synthesized
tattatacctgttccactga

SEQ ID NO: 6216 - DNA, 20 bp, Artificial Sequence
  chemically synthesized
aatgagtatcttcatcataa

SEQ ID NO: 6217 - DNA, 20 bp, Artificial Sequence
  chemically synthesized
tctttcacctccctggttag

SEQ ID NO: 6218 - DNA, 20 bp, Artificial Sequence
  chemically synthesized
ttattcgttttgcggctatt

SEQ ID NO: 6219 - DNA, 20 bp, Artificial Sequence
  chemically synthesized
gctctcactttggaaggtgt

SEQ ID NO: 6220 - DNA, 20 bp, Artificial Sequence
  chemically synthesized
ttggaaggtgttggagtata

SEQ ID NO: 6221 - DNA, 20 bp, Artificial Sequence
  chemically synthesized
ctgaaatttttaacagattt

SEQ ID NO: 6222 - DNA, 20 bp, Artificial Sequence
  chemically synthesized
actatgagattttctaggta

SEQ ID NO: 6223 - DNA, 20 bp, Artificial Sequence
  chemically synthesized
ttgacttcttctcttcctat

SEQ ID NO: 6224 - DNA, 20 bp, Artificial Sequence
  chemically synthesized
cttccagaactatgctgaaa

SEQ ID NO: 6225 - DNA, 20 bp, Artificial Sequence
  chemically synthesized
ctatgctgaaaaggagtggt

SEQ ID NO: 6226 - DNA, 20 bp, Artificial Sequence
  chemically synthesized
gtcttgttacggttctcaag

SEQ ID NO: 6227 - DNA, 20 bp, Artificial Sequence
  chemically synthesized
catttggtaagatattggct

SEQ ID NO: 6228 - DNA, 20 bp, Artificial Sequence
  chemically synthesized
ccttcaatgcctagtttgtt

SEQ ID NO: 6229 - DNA, 20 bp, Artificial Sequence
  chemically synthesized
gtgatttttcttttttgaga

SEQ ID NO: 6230 - DNA, 20 bp, Artificial Sequence
  chemically synthesized
tctcactccgttgcccaggc

SEQ ID NO: 6231 - DNA, 20 bp, Artificial Sequence
  chemically synthesized
aatcctcccacctcaacctc

SEQ ID NO: 6232 - DNA, 20 bp, Artificial Sequence
  chemically synthesized
tttttttttttttgtagaga

SEQ ID NO: 6233 - DNA, 20 bp, Artificial Sequence
  chemically synthesized
gccttggcctcccaaagtgc

SEQ ID NO: 6234 - DNA, 20 bp, Artificial Sequence
  chemically synthesized
aaagtgctgggattacaggt

SEQ ID NO: 6235 - DNA, 20 bp, Artificial Sequence
  chemically synthesized
tactgaaggtttttaacatg

SEQ ID NO: 6236 - DNA, 20 bp, Artificial Sequence
  chemically synthesized
tttttagctctgtttatgtg

SEQ ID NO: 6237 - DNA, 20 bp, Artificial Sequence
  chemically synthesized
ttgaaccaaccttgcatccc

SEQ ID NO: 6238 - DNA, 20 bp, Artificial Sequence
  chemically synthesized
atcagctttttgatgtgctg

SEQ ID NO: 6239 - DNA, 20 bp, Artificial Sequence
  chemically synthesized
tggtttgctagtattttgtt

SEQ ID NO: 6240 - DNA, 20 bp, Artificial Sequence
  chemically synthesized
tttttgcatctatattcatc

SEQ ID NO: 6241 - DNA, 20 bp, Artificial Sequence
  chemically synthesized
tctctgccaggttttggtat

SEQ ID NO: 6242 - DNA, 20 bp, Artificial Sequence
  chemically synthesized
tgatgctggcctcattaggg

SEQ ID NO: 6243 - DNA, 20 bp, Artificial Sequence
  chemically synthesized
cctcaattttttggaacaga

SEQ ID NO: 6244 - DNA, 20 bp, Artificial Sequence
  chemically synthesized
ttttttggaacagattgagt

SEQ ID NO: 6245 - DNA, 20 bp, Artificial Sequence
  chemically synthesized
attccatattcatagatagg

SEQ ID NO: 6246 - DNA, 20 bp, Artificial Sequence
  chemically synthesized
ggctataggaacctgaacag

SEQ ID NO: 6247 - DNA, 20 bp, Artificial Sequence
  chemically synthesized
aacagacacatagaccaatg

SEQ ID NO: 6248 - DNA, 20 bp, Artificial Sequence
  chemically synthesized
ccgtattcaataaatggtgc

SEQ ID NO: 6249 - DNA, 20 bp, Artificial Sequence
  chemically synthesized
ctgggataattgctagccat

SEQ ID NO: 6250 - DNA, 20 bp, Artificial Sequence
  chemically synthesized
taattgctagccataggaat

SEQ ID NO: 6251 - DNA, 20 bp, Artificial Sequence
  chemically synthesized
tatacaaaaatcaactcaag

SEQ ID NO: 6252 - DNA, 20 bp, Artificial Sequence
  chemically synthesized
atggcaaaagaaactatcaa

SEQ ID NO: 6253 - DNA, 20 bp, Artificial Sequence
  chemically synthesized
gcaaaccatgtatccaacaa

SEQ ID NO: 6254 - DNA, 20 bp, Artificial Sequence
  chemically synthesized
gtatccaacaaagggatatg

SEQ ID NO: 6255 - DNA, 20 bp, Artificial Sequence
  chemically synthesized
aggacatgaaaatttttcag

SEQ ID NO: 6256 - DNA, 20 bp, Artificial Sequence
  chemically synthesized
aatgcttaatatcactaata

SEQ ID NO: 6257 - DNA, 20 bp, Artificial Sequence
  chemically synthesized
gaattgcaaatcaattctct

SEQ ID NO: 6258 - DNA, 20 bp, Artificial Sequence
  chemically synthesized
attattctatatgtacctaa

SEQ ID NO: 6259 - DNA, 20 bp, Artificial Sequence
  chemically synthesized
tattcatgataacaaagaca

SEQ ID NO: 6260 - DNA, 20 bp, Artificial Sequence
  chemically synthesized
aaatgcctatcaatggtaga

SEQ ID NO: 6261 - DNA, 20 bp, Artificial Sequence
  chemically synthesized
aatgtgatacatatacacca

SEQ ID NO: 6262 - DNA, 20 bp, Artificial Sequence
  chemically synthesized
ttctaagtgggagctaaaca

SEQ ID NO: 6263 - DNA, 20 bp, Artificial Sequence
  chemically synthesized
agcaacaccagggcctactt

SEQ ID NO: 6264 - DNA, 20 bp, Artificial Sequence
  chemically synthesized
ggcctacttgagggtgggag

SEQ ID NO: 6265 - DNA, 20 bp, Artificial Sequence
  chemically synthesized
cttgagggtgggagaagggt

SEQ ID NO: 6266 - DNA, 20 bp, Artificial Sequence
  chemically synthesized
gaggatcaaaaaactaccta

SEQ ID NO: 6267 - DNA, 20 bp, Artificial Sequence
  chemically synthesized
ttgggtactatgcttattac

SEQ ID NO: 6268 - DNA, 20 bp, Artificial Sequence
  chemically synthesized
tttcatgtattggcagtgac

SEQ ID NO: 6269 - DNA, 20 bp, Artificial Sequence
  chemically synthesized
tatgtttagaaaatttagag

SEQ ID NO: 6270 - DNA, 20 bp, Artificial Sequence
  chemically synthesized
ggatgcaaaatttaaaaatt

SEQ ID NO: 6271 - DNA, 20 bp, Artificial Sequence
  chemically synthesized
tttgtcatgatcagcaaaat

SEQ ID NO: 6272 - DNA, 20 bp, Artificial Sequence
  chemically synthesized
ctctggagaactaggaaaaa

SEQ ID NO: 6273 - DNA, 20 bp, Artificial Sequence
  chemically synthesized
accttgagatgtataaggct

SEQ ID NO: 6274 - DNA, 20 bp, Artificial Sequence
  chemically synthesized
attgccttacacacttagac

SEQ ID NO: 6275 - DNA, 20 bp, Artificial Sequence
  chemically synthesized
ttttttttttttaaataaga

SEQ ID NO: 6276 - DNA, 20 bp, Artificial Sequence
  chemically synthesized
agtctcggtgttccccaggc

SEQ ID NO: 6277 - DNA, 20 bp, Artificial Sequence
  chemically synthesized
gatcctcctgcctcagcttt

SEQ ID NO: 6278 - DNA, 20 bp, Artificial Sequence
  chemically synthesized
gcctcagctttcggaatagc

SEQ ID NO: 6279 - DNA, 20 bp, Artificial Sequence
  chemically synthesized
ttttttattttttgtagaga

SEQ ID NO: 6280 - DNA, 20 bp, Artificial Sequence
  chemically synthesized
acatcttttaagtgtttact

SEQ ID NO: 6281 - DNA, 20 bp, Artificial Sequence
  chemically synthesized
taagtgtttacttagggttt

SEQ ID NO: 6282 - DNA, 20 bp, Artificial Sequence
  chemically synthesized
tcatcattttttttttcaag

SEQ ID NO: 6283 - DNA, 20 bp, Artificial Sequence
  chemically synthesized
aattatcattacttttcctt

SEQ ID NO: 6284 - DNA, 20 bp, Artificial Sequence
  chemically synthesized
tttttaaaaaaaaataagaa

SEQ ID NO: 6285 - DNA, 20 bp, Artificial Sequence
  chemically synthesized
atgtcaagaaaaaaaagact

SEQ ID NO: 6286 - DNA, 20 bp, Artificial Sequence
  chemically synthesized
aatagttaaatatttacttt

SEQ ID NO: 6287 - DNA, 20 bp, Artificial Sequence
  chemically synthesized
agggttaatcttacctattt

SEQ ID NO: 6288 - DNA, 20 bp, Artificial Sequence
  chemically synthesized
cagagcattacgtacaaatc

SEQ ID NO: 6289 - DNA, 20 bp, Artificial Sequence
  chemically synthesized
ctctccagaaggctgtcagc

SEQ ID NO: 6290 - DNA, 20 bp, Artificial Sequence
  chemically synthesized
gattataaatatgttcatga

SEQ ID NO: 6291 - DNA, 20 bp, Artificial Sequence
  chemically synthesized
atccacatctatgtgtgtgg

SEQ ID NO: 6292 - DNA, 20 bp, Artificial Sequence
  chemically synthesized
aggcagcacaaagcttccag

SEQ ID NO: 6293 - DNA, 20 bp, Artificial Sequence
  chemically synthesized
tgtcttacatgccaaacgat

SEQ ID NO: 6294 - DNA, 20 bp, Artificial Sequence
  chemically synthesized
tttatcctaagaagctattc

SEQ ID NO: 6295 - DNA, 20 bp, Artificial Sequence
  chemically synthesized
tggtttcaatagcaaaacat

SEQ ID NO: 6296 - DNA, 20 bp, Artificial Sequence
  chemically synthesized
aagtggttaagtaaataaaa

SEQ ID NO: 6297 - DNA, 20 bp, Artificial Sequence
  chemically synthesized
tgttgatattcaaagaggct

SEQ ID NO: 6298 - DNA, 20 bp, Artificial Sequence
  chemically synthesized
acatgcagagatgatccagt

SEQ ID NO: 6299 - DNA, 20 bp, Artificial Sequence
  chemically synthesized
agagatgatccagtgggggt

SEQ ID NO: 6300 - DNA, 20 bp, Artificial Sequence
  chemically synthesized
agatataccaaatattaaca

SEQ ID NO: 6301 - DNA, 20 bp, Artificial Sequence
  chemically synthesized
atattaacagtgggtattca

SEQ ID NO: 6302 - DNA, 20 bp, Artificial Sequence
  chemically synthesized
taattattctatgcacctca

SEQ ID NO: 6303 - DNA, 20 bp, Artificial Sequence
  chemically synthesized
ttacttctttcctaatcagt

SEQ ID NO: 6304 - DNA, 20 bp, Artificial Sequence
  chemically synthesized
aaaattatataattaaatga

SEQ ID NO: 6305 - DNA, 20 bp, Artificial Sequence
  chemically synthesized
tatatttaaatactatcatt

SEQ ID NO: 6306 - DNA, 20 bp, Artificial Sequence
  chemically synthesized
atattttagtacacatacat

SEQ ID NO: 6307 - DNA, 20 bp, Artificial Sequence
  chemically synthesized
agggacccacctggaacaca

SEQ ID NO: 6308 - DNA, 20 bp, Artificial Sequence
  chemically synthesized
atatttaagatttgtctata

SEQ ID NO: 6309 - DNA, 20 bp, Artificial Sequence
  chemically synthesized
ctggagcattttctctctgc

SEQ ID NO: 6310 - DNA, 20 bp, Artificial Sequence
  chemically synthesized
ataagtattctttagtcacc

SEQ ID NO: 6311 - DNA, 20 bp, Artificial Sequence
  chemically synthesized
ctttagtcacctggaatcca

SEQ ID NO: 6312 - DNA, 20 bp, Artificial Sequence
  chemically synthesized
taacagttgttgcttaaaat

SEQ ID NO: 6313 - DNA, 20 bp, Artificial Sequence
  chemically synthesized
tacatactgtgactcttcag

SEQ ID NO: 6314 - DNA, 20 bp, Artificial Sequence
  chemically synthesized
acttttatagcttctgttta

SEQ ID NO: 6315 - DNA, 20 bp, Artificial Sequence
  chemically synthesized
attcgttgtaagaaatatca

SEQ ID NO: 6316 - DNA, 20 bp, Artificial Sequence
  chemically synthesized
tccagatcctccaaaaagaa

SEQ ID NO: 6317 - DNA, 20 bp, Artificial Sequence
  chemically synthesized
aaaaagaagagaattaatta

SEQ ID NO: 6318 - DNA, 20 bp, Artificial Sequence
  chemically synthesized
gatttaaaataagcaggtca

SEQ ID NO: 6319 - DNA, 20 bp, Artificial Sequence
  chemically synthesized
aaaataagcaggtcattggg

SEQ ID NO: 6320 - DNA, 20 bp, Artificial Sequence
  chemically synthesized
atccacagttattatgttaa

SEQ ID NO: 6321 - DNA, 20 bp, Artificial Sequence
  chemically synthesized
taaaggagtggttttcaacc

SEQ ID NO: 6322 - DNA, 20 bp, Artificial Sequence
  chemically synthesized
ggtaagctattctccctcaa

SEQ ID NO: 6323 - DNA, 20 bp, Artificial Sequence
  chemically synthesized
tattctccctcaagaggatg

SEQ ID NO: 6324 - DNA, 20 bp, Artificial Sequence
  chemically synthesized
cacctgtttgaggtaacaga

SEQ ID NO: 6325 - DNA, 20 bp, Artificial Sequence
  chemically synthesized
gctgattacaaaaaaaaatt

SEQ ID NO: 6326 - DNA, 20 bp, Artificial Sequence
  chemically synthesized
actcaagtagcactgaagga

SEQ ID NO: 6327 - DNA, 20 bp, Artificial Sequence
  chemically synthesized
ggaaagggtcagaaacatta

SEQ ID NO: 6328 - DNA, 20 bp, Artificial Sequence
  chemically synthesized
gcgaagacaatgaaatcaag

SEQ ID NO: 6329 - DNA, 20 bp, Artificial Sequence
  chemically synthesized
aagataacattgggaaatag

SEQ ID NO: 6330 - DNA, 20 bp, Artificial Sequence
  chemically synthesized
atgatatatcatcagtctta

SEQ ID NO: 6331 - DNA, 20 bp, Artificial Sequence
  chemically synthesized
ggtgagctcttcaaataact

SEQ ID NO: 6332 - DNA, 20 bp, Artificial Sequence
  chemically synthesized
gtgacttacttaaagtcaaa

SEQ ID NO: 6333 - DNA, 20 bp, Artificial Sequence
  chemically synthesized
aaaagactgtgaacataaaa

SEQ ID NO: 6334 - DNA, 20 bp, Artificial Sequence
  chemically synthesized
actgtgaagaaactttaaaa

SEQ ID NO: 6335 - DNA, 20 bp, Artificial Sequence
  chemically synthesized
gatgaggaaataggtgtata

SEQ ID NO: 6336 - DNA, 20 bp, Artificial Sequence
  chemically synthesized
agaattcaggcaccttgccc

SEQ ID NO: 6337 - DNA, 20 bp, Artificial Sequence
  chemically synthesized
gggtacacagcattaatcca

SEQ ID NO: 6338 - DNA, 20 bp, Artificial Sequence
  chemically synthesized
ttaagtactaaactccactg

SEQ ID NO: 6339 - DNA, 20 bp, Artificial Sequence
  chemically synthesized
ggaaaaagatcagtataaat

SEQ ID NO: 6340 - DNA, 20 bp, Artificial Sequence
  chemically synthesized
tacagtacaacttaatatga

SEQ ID NO: 6341 - DNA, 20 bp, Artificial Sequence
  chemically synthesized
tgagaagtaaaacaagaaac

SEQ ID NO: 6342 - DNA, 20 bp, Artificial Sequence
  chemically synthesized
aggggccatgatttcttgtc

SEQ ID NO: 6343 - DNA, 20 bp, Artificial Sequence
  chemically synthesized
cggtttctttaaatagcaaa

SEQ ID NO: 6344 - DNA, 20 bp, Artificial Sequence
  chemically synthesized
caaatatatatagaaatata

SEQ ID NO: 6345 - DNA, 20 bp, Artificial Sequence
  chemically synthesized
tgtcaccaatatcatcatca

SEQ ID NO: 6346 - DNA, 20 bp, Artificial Sequence
  chemically synthesized
atatacaagttttcggaagt

SEQ ID NO: 6347 - DNA, 20 bp, Artificial Sequence
  chemically synthesized
aacacactgccttcatttcc

SEQ ID NO: 6348 - DNA, 20 bp, Artificial Sequence
  chemically synthesized
aacttcctcttctgagctgt

SEQ ID NO: 6349 - DNA, 20 bp, Artificial Sequence
  chemically synthesized
tgacaaaatcagaaaacaac

SEQ ID NO: 6350 - DNA, 20 bp, Artificial Sequence
  chemically synthesized
ttaattgctcctataagagc

SEQ ID NO: 6351 - DNA, 20 bp, Artificial Sequence
  chemically synthesized
gctgggatcctcccactttt

SEQ ID NO: 6352 - DNA, 20 bp, Artificial Sequence
  chemically synthesized
aaagtaatgaaataaacaaa

SEQ ID NO: 6353 - DNA, 20 bp, Artificial Sequence
  chemically synthesized
ctctgttttgccataaaatc

SEQ ID NO: 6354 - DNA, 20 bp, Artificial Sequence
  chemically synthesized
taaagtggctaatactgtat

SEQ ID NO: 6355 - DNA, 20 bp, Artificial Sequence
  chemically synthesized
aaagtccttactattaaaat

SEQ ID NO: 6356 - DNA, 20 bp, Artificial Sequence
  chemically synthesized
gatgaaagcagttccattac

SEQ ID NO: 6357 - DNA, 20 bp, Artificial Sequence
  chemically synthesized
atcacttctccagtaagcat

SEQ ID NO: 6358 - DNA, 20 bp, Artificial Sequence
  chemically synthesized
acaagtctactacatgtcta

SEQ ID NO: 6359 - DNA, 20 bp, Artificial Sequence
  chemically synthesized
ttctttttttttttttgaga

SEQ ID NO: 6360 - DNA, 20 bp, Artificial Sequence
  chemically synthesized
tttgctttcattgctcaggc

SEQ ID NO: 6361 - DNA, 20 bp, Artificial Sequence
  chemically synthesized
ttttgtatttttagtagaga

SEQ ID NO: 6362 - DNA, 20 bp, Artificial Sequence
  chemically synthesized
aagctcacttttattcttta

SEQ ID NO: 6363 - DNA, 20 bp, Artificial Sequence
  chemically synthesized
cttttattctttagagagta

SEQ ID NO: 6364 - DNA, 20 bp, Artificial Sequence
  chemically synthesized
accaaataggtaaggaaaac

SEQ ID NO: 6365 - DNA, 20 bp, Artificial Sequence
  chemically synthesized
aaaatcagcacatatatttt

SEQ ID NO: 6366 - DNA, 20 bp, Artificial Sequence
  chemically synthesized
attttgaaatttgtagtcta

SEQ ID NO: 6367 - DNA, 20 bp, Artificial Sequence
  chemically synthesized
aaatgtaaagtgtctcaaat

SEQ ID NO: 6368 - DNA, 20 bp, Artificial Sequence
  chemically synthesized
taaatcatacattatttaag

SEQ ID NO: 6369 - DNA, 20 bp, Artificial Sequence
  chemically synthesized
cttcataagcatctttaagt

SEQ ID NO: 6370 - DNA, 20 bp, Artificial Sequence
  chemically synthesized
gtcagacccagggccatttt

SEQ ID NO: 6371 - DNA, 20 bp, Artificial Sequence
  chemically synthesized
cccatattattaagttgctt

SEQ ID NO: 6372 - DNA, 20 bp, Artificial Sequence
  chemically synthesized
attcacacattcaatctaac

SEQ ID NO: 6373 - DNA, 20 bp, Artificial Sequence
  chemically synthesized
ggcaactcctccttttcggg

SEQ ID NO: 6374 - DNA, 20 bp, Artificial Sequence
  chemically synthesized
ctcagacattatcagtataa

SEQ ID NO: 6375 - DNA, 20 bp, Artificial Sequence
  chemically synthesized
gacattatcagtataagtga

SEQ ID NO: 6376 - DNA, 20 bp, Artificial Sequence
  chemically synthesized
aaacaaaatcccagtaaaag

SEQ ID NO: 6377 - DNA, 20 bp, Artificial Sequence
  chemically synthesized
aattagtctactaataacta

SEQ ID NO: 6378 - DNA, 20 bp, Artificial Sequence
  chemically synthesized
tactaataactagtgggtta

SEQ ID NO: 6379 - DNA, 20 bp, Artificial Sequence
  chemically synthesized
attgaccagcaaataaggac

SEQ ID NO: 6380 - DNA, 20 bp, Artificial Sequence
  chemically synthesized
caaataaggactgggattct

SEQ ID NO: 6381 - DNA, 20 bp, Artificial Sequence
  chemically synthesized
tgttaagtcagacctttaca

SEQ ID NO: 6382 - DNA, 20 bp, Artificial Sequence
  chemically synthesized
tttacacagaataactgtct

SEQ ID NO: 6383 - DNA, 20 bp, Artificial Sequence
  chemically synthesized
tggtaaaggagatcattgta

SEQ ID NO: 6384 - DNA, 20 bp, Artificial Sequence
  chemically synthesized
aacagccatgtttaaaatat

SEQ ID NO: 6385 - DNA, 20 bp, Artificial Sequence
  chemically synthesized
ggagttttacaaggagcatt

SEQ ID NO: 6386 - DNA, 20 bp, Artificial Sequence
  chemically synthesized
ctgaggggcattcaaagcca

SEQ ID NO: 6387 - DNA, 20 bp, Artificial Sequence
  chemically synthesized
tggcacattttcctagagga

SEQ ID NO: 6388 - DNA, 20 bp, Artificial Sequence
  chemically synthesized
ttttaatactaaaatagtta

SEQ ID NO: 6389 - DNA, 20 bp, Artificial Sequence
  chemically synthesized
tggaataaaatgtaaattgc

SEQ ID NO: 6390 - DNA, 20 bp, Artificial Sequence
  chemically synthesized
acaccccagacagatacctc

SEQ ID NO: 6391 - DNA, 20 bp, Artificial Sequence
  chemically synthesized
ttgtttactgatttaactct

SEQ ID NO: 6392 - DNA, 20 bp, Artificial Sequence
  chemically synthesized
tttagggaaaaaatgggggc

SEQ ID NO: 6393 - DNA, 20 bp, Artificial Sequence
  chemically synthesized
tgcatagtttcaaaaaggaa

SEQ ID NO: 6394 - DNA, 20 bp, Artificial Sequence
  chemically synthesized
taaaagattctcctgatttt

SEQ ID NO: 6395 - DNA, 20 bp, Artificial Sequence
  chemically synthesized
tcaaactggaacacaggaag

SEQ ID NO: 6396 - DNA, 20 bp, Artificial Sequence
  chemically synthesized
tagcattatatattcaacta

SEQ ID NO: 6397 - DNA, 20 bp, Artificial Sequence
  chemically synthesized
ataatttctgtaagattaaa

SEQ ID NO: 6398 - DNA, 20 bp, Artificial Sequence
  chemically synthesized
acatagtagtaagcaaaaga

SEQ ID NO: 6399 - DNA, 20 bp, Artificial Sequence
  chemically synthesized
gaaagggaaacaaaaggtat

SEQ ID NO: 6400 - DNA, 20 bp, Artificial Sequence
  chemically synthesized
tagagtcaaaggctcccaag

SEQ ID NO: 6401 - DNA, 20 bp, Artificial Sequence
  chemically synthesized
aaaggctcccaagaagaatc

SEQ ID NO: 6402 - DNA, 20 bp, Artificial Sequence
  chemically synthesized
ccagatgtatttgtatctaa

SEQ ID NO: 6403 - DNA, 20 bp, Artificial Sequence
  chemically synthesized
tgcatccatattcttccttt

SEQ ID NO: 6404 - DNA, 20 bp, Artificial Sequence
  chemically synthesized
gcaccactctctgcatttcg

SEQ ID NO: 6405 - DNA, 20 bp, Artificial Sequence
  chemically synthesized
tttcgaaggatttctccatt

SEQ ID NO: 6406 - DNA, 20 bp, Artificial Sequence
  chemically synthesized
atgtgccttactctaggacc

SEQ ID NO: 6407 - DNA, 20 bp, Artificial Sequence
  chemically synthesized
gctggagatggcggtgggca

SEQ ID NO: 6408 - DNA, 20 bp, Artificial Sequence
  chemically synthesized
gtcctcttaagtcaaagatg

SEQ ID NO: 6409 - DNA, 20 bp, Artificial Sequence
  chemically synthesized
ggaatcctgttatctcctat

SEQ ID NO: 6410 - DNA, 20 bp, Artificial Sequence
  chemically synthesized
atgttacatactaaagctca

SEQ ID NO: 6411 - DNA, 20 bp, Artificial Sequence
  chemically synthesized
tcagctagagactgacactt

SEQ ID NO: 6412 - DNA, 20 bp, Artificial Sequence
  chemically synthesized
tagagactgacacttgtggg

SEQ ID NO: 6413 - DNA, 20 bp, Artificial Sequence
  chemically synthesized
attcctaacccttggtgtac

SEQ ID NO: 6414 - DNA, 20 bp, Artificial Sequence
  chemically synthesized
taagtgtaatcatgttaaaa

SEQ ID NO: 6415 - DNA, 20 bp, Artificial Sequence
  chemically synthesized
catgttaaaatggggtcata

SEQ ID NO: 6416 - DNA, 20 bp, Artificial Sequence
  chemically synthesized
aaaatggggtcatactggat

SEQ ID NO: 6417 - DNA, 20 bp, Artificial Sequence
  chemically synthesized
gtgaagacaaaaggcagata

SEQ ID NO: 6418 - DNA, 20 bp, Artificial Sequence
  chemically synthesized
caaggcaagaaaggaacact

SEQ ID NO: 6419 - DNA, 20 bp, Artificial Sequence
  chemically synthesized
aagccaggaagaggcaagga

SEQ ID NO: 6420 - DNA, 20 bp, Artificial Sequence
  chemically synthesized
gatttcggacttctagcttc

SEQ ID NO: 6421 - DNA, 20 bp, Artificial Sequence
  chemically synthesized
tctagcttctagaattgtga

SEQ ID NO: 6422 - DNA, 20 bp, Artificial Sequence
  chemically synthesized
tcagtgaactctctggttat

SEQ ID NO: 6423 - DNA, 20 bp, Artificial Sequence
  chemically synthesized
cagcatttcatcactgcaaa

SEQ ID NO: 6424 - DNA, 20 bp, Artificial Sequence
  chemically synthesized
agagttctacactaaatggc

SEQ ID NO: 6425 - DNA, 20 bp, Artificial Sequence
  chemically synthesized
aatagggcccgttcaagcct

SEQ ID NO: 6426 - DNA, 20 bp, Artificial Sequence
  chemically synthesized
tatgccttttattgttattt

SEQ ID NO: 6427 - DNA, 20 bp, Artificial Sequence
  chemically synthesized
tggaaggcagtgaggtggaa

SEQ ID NO: 6428 - DNA, 20 bp, Artificial Sequence
  chemically synthesized
agaaaatagaaaaaagcttc

SEQ ID NO: 6429 - DNA, 20 bp, Artificial Sequence
  chemically synthesized
tagaaaaaagcttctagaat

SEQ ID NO: 6430 - DNA, 20 bp, Artificial Sequence
  chemically synthesized
tatctaagactgaaagtaaa

SEQ ID NO: 6431 - DNA, 20 bp, Artificial Sequence
  chemically synthesized
aaagtaaacaattttactta

SEQ ID NO: 6432 - DNA, 20 bp, Artificial Sequence
  chemically synthesized
tttcatccacatcttgtcaa

SEQ ID NO: 6433 - DNA, 20 bp, Artificial Sequence
  chemically synthesized
ttctatttacagagcattag

SEQ ID NO: 6434 - DNA, 20 bp, Artificial Sequence
  chemically synthesized
atgagtgcttttatcatatt

SEQ ID NO: 6435 - DNA, 20 bp, Artificial Sequence
  chemically synthesized
agtttacaatgatcaaatat

SEQ ID NO: 6436 - DNA, 20 bp, Artificial Sequence
  chemically synthesized
atcaaatataggaatgtaat

SEQ ID NO: 6437 - DNA, 20 bp, Artificial Sequence
  chemically synthesized
gcaaactggaggccaacata

SEQ ID NO: 6438 - DNA, 20 bp, Artificial Sequence
  chemically synthesized
cattcttttaggttaaaaag

SEQ ID NO: 6439 - DNA, 20 bp, Artificial Sequence
  chemically synthesized
aaccctggagcaaaatctga

SEQ ID NO: 6440 - DNA, 20 bp, Artificial Sequence
  chemically synthesized
agttacactctcactcctaa

SEQ ID NO: 6441 - DNA, 20 bp, Artificial Sequence
  chemically synthesized
aaaaaaatgggccgggcatg

SEQ ID NO: 6442 - DNA, 20 bp, Artificial Sequence
  chemically synthesized
tctttggtaggccgaggcag

SEQ ID NO: 6443 - DNA, 20 bp, Artificial Sequence
  chemically synthesized
ctaaaaatacaaaaaattag

SEQ ID NO: 6444 - DNA, 20 bp, Artificial Sequence
  chemically synthesized
tactcgggaggctgaggcag

SEQ ID NO: 6445 - DNA, 20 bp, Artificial Sequence
  chemically synthesized
caaacaaacaaacaaacaaa

SEQ ID NO: 6446 - DNA, 20 bp, Artificial Sequence
  chemically synthesized
aatgaaggacaaagatcata

SEQ ID NO: 6447 - DNA, 20 bp, Artificial Sequence
  chemically synthesized
atgtagtgctgtctactcca

SEQ ID NO: 6448 - DNA, 20 bp, Artificial Sequence
  chemically synthesized
gagggaagccaagattcaaa

SEQ ID NO: 6449 - DNA, 20 bp, Artificial Sequence
  chemically synthesized
gtgagacggtggcttgctca

SEQ ID NO: 6450 - DNA, 20 bp, Artificial Sequence
  chemically synthesized
acatctgctaaaactgttag

SEQ ID NO: 6451 - DNA, 20 bp, Artificial Sequence
  chemically synthesized
cacttcttgttttttagaga

SEQ ID NO: 6452 - DNA, 20 bp, Artificial Sequence
  chemically synthesized
tctcgttttgtcatccaggc

SEQ ID NO: 6453 - DNA, 20 bp, Artificial Sequence
  chemically synthesized
tccaggctggaatgcactgg

SEQ ID NO: 6454 - DNA, 20 bp, Artificial Sequence
  chemically synthesized
tttttaattttttgtagaga

SEQ ID NO: 6455 - DNA, 20 bp, Artificial Sequence
  chemically synthesized
tctcccagcccaaagagaag

SEQ ID NO: 6456 - DNA, 20 bp, Artificial Sequence
  chemically synthesized
tgggaactatctaattaacg

SEQ ID NO: 6457 - DNA, 20 bp, Artificial Sequence
  chemically synthesized
gtttctctgaaagcaaattg

SEQ ID NO: 6458 - DNA, 20 bp, Artificial Sequence
  chemically synthesized
tgctggcttagtgaacaatc

SEQ ID NO: 6459 - DNA, 20 bp, Artificial Sequence
  chemically synthesized
gtagcagtttccaactgatt

SEQ ID NO: 6460 - DNA, 20 bp, Artificial Sequence
  chemically synthesized
aactggtgcatggcaactgt

SEQ ID NO: 6461 - DNA, 20 bp, Artificial Sequence
  chemically synthesized
gcaggacctccctcctgttt

SEQ ID NO: 6462 - DNA, 20 bp, Artificial Sequence
  chemically synthesized
agcaaccaggtcatgtccca

SEQ ID NO: 6463 - DNA, 20 bp, Artificial Sequence
  chemically synthesized
cctcgccggcagggaccgtc

SEQ ID NO: 6464 - DNA, 20 bp, Artificial Sequence
  chemically synthesized
ccgcagcggcagcgctccca

SEQ ID NO: 6465 - DNA, 20 bp, Artificial Sequence
  chemically synthesized
gtccccgggaaggagacagc

SEQ ID NO: 6466 - DNA, 20 bp, Artificial Sequence
  chemically synthesized
gccgccgggaagcccggggc

SEQ ID NO: 6467 - DNA, 20 bp, Artificial Sequence
  chemically synthesized
aaccccaaacagccacccgc

SEQ ID NO: 6468 - DNA, 20 bp, Artificial Sequence
  chemically synthesized
cggcccctagcgcgcgactc

SEQ ID NO: 6469 - DNA, 20 bp, Artificial Sequence
  chemically synthesized
tcttttcttgttcaccctca

SEQ ID NO: 6470 - DNA, 20 bp, Artificial Sequence
  chemically synthesized
gagagcaagtagtggggaga

SEQ ID NO: 6471 - DNA, 20 bp, Artificial Sequence
  chemically synthesized
aaccttaataggggaggctg

SEQ ID NO: 6472 - DNA, 20 bp, Artificial Sequence
  chemically synthesized
gtgaagacgatttcgtggtt

SEQ ID NO: 6473 - DNA, 20 bp, Artificial Sequence
  chemically synthesized
gggcgctcaacacataattg

SEQ ID NO: 6474 - DNA, 20 bp, Artificial Sequence
  chemically synthesized
acagctccggcactgcgggc

SEQ ID NO: 6475 - DNA, 20 bp, Artificial Sequence
  chemically synthesized
gcaattttgcctttacatgt

SEQ ID NO: 6476 - DNA, 20 bp, Artificial Sequence
  chemically synthesized
caagcatgattttcacactg

SEQ ID NO: 6477 - DNA, 20 bp, Artificial Sequence
  chemically synthesized
atttttgctagttgcaatat

SEQ ID NO: 6478 - DNA, 20 bp, Artificial Sequence
  chemically synthesized
ttgctagttgcaatatgtgg

SEQ ID NO: 6479 - DNA, 20 bp, Artificial Sequence
  chemically synthesized
atagattccacttactacag

SEQ ID NO: 6480 - DNA, 20 bp, Artificial Sequence
  chemically synthesized
gtgagatggcacttactaca

SEQ ID NO: 6481 - DNA, 20 bp, Artificial Sequence
  chemically synthesized
attcaccgaggaagaaaggg

SEQ ID NO: 6482 - DNA, 20 bp, Artificial Sequence
  chemically synthesized
gtgaaagttgatcatacaaa

SEQ ID NO: 6483 - DNA, 20 bp, Artificial Sequence
  chemically synthesized
ttatacccaactaaaatagt

SEQ ID NO: 6484 - DNA, 20 bp, Artificial Sequence
  chemically synthesized
caactaaaatagtgggggta

SEQ ID NO: 6485 - DNA, 20 bp, Artificial Sequence
  chemically synthesized
tcagatccttaatagtgcca

SEQ ID NO: 6486 - DNA, 20 bp, Artificial Sequence
  chemically synthesized
ctcccccttttctttgttgt

SEQ ID NO: 6487 - DNA, 20 bp, Artificial Sequence
  chemically synthesized
gcatttaccaagtttctaca

SEQ ID NO: 6488 - DNA, 20 bp, Artificial Sequence
  chemically synthesized
agttgtacttcacttatacg

SEQ ID NO: 6489 - DNA, 20 bp, Artificial Sequence
  chemically synthesized
tacgtggaattaaaaaacaa

SEQ ID NO: 6490 - DNA, 20 bp, Artificial Sequence
  chemically synthesized
aacaactgaatttatagaaa

SEQ ID NO: 6491 - DNA, 20 bp, Artificial Sequence
  chemically synthesized
cttggggggaaagaaaattg

SEQ ID NO: 6492 - DNA, 20 bp, Artificial Sequence
  chemically synthesized
ggggaaagaaaattgtaggg

SEQ ID NO: 6493 - DNA, 20 bp, Artificial Sequence
  chemically synthesized
ctataaagaaataactgaaa

SEQ ID NO: 6494 - DNA, 20 bp, Artificial Sequence
  chemically synthesized
aggctgtacaagaagcatgg

SEQ ID NO: 6495 - DNA, 20 bp, Artificial Sequence
  chemically synthesized
caggcccaacctccaacact

SEQ ID NO: 6496 - DNA, 20 bp, Artificial Sequence
  chemically synthesized
attacagttgaacatgagat

SEQ ID NO: 6497 - DNA, 20 bp, Artificial Sequence
  chemically synthesized
agacttgggactttggactt

SEQ ID NO: 6498 - DNA, 20 bp, Artificial Sequence
  chemically synthesized
ttgggactttggacttttga

SEQ ID NO: 6499 - DNA, 20 bp, Artificial Sequence
  chemically synthesized
tttggacttttgaatgaatg

SEQ ID NO: 6500 - DNA, 20 bp, Artificial Sequence
  chemically synthesized
acttttgaatgaatgctgga

SEQ ID NO: 6501 - DNA, 20 bp, Artificial Sequence
  chemically synthesized
acattagatttgggaggggc

SEQ ID NO: 6502 - DNA, 20 bp, Artificial Sequence
  chemically synthesized
gatttgggaggggccagagt

SEQ ID NO: 6503 - DNA, 20 bp, Artificial Sequence
  chemically synthesized
cagagttggaataacatggt

SEQ ID NO: 6504 - DNA, 20 bp, Artificial Sequence
  chemically synthesized
gaggttgggcctggtgggag

SEQ ID NO: 6505 - DNA, 20 bp, Artificial Sequence
  chemically synthesized
ttgggcctggtgggaggtga

SEQ ID NO: 6506 - DNA, 20 bp, Artificial Sequence
  chemically synthesized
ggtgggaggtgagtggatta

SEQ ID NO: 6507 - DNA, 20 bp, Artificial Sequence
  chemically synthesized
tcccctcttggtactatata

SEQ ID NO: 6508 - DNA, 20 bp, Artificial Sequence
  chemically synthesized
agttcctgccatgtgaagtc

SEQ ID NO: 6509 - DNA, 20 bp, Artificial Sequence
  chemically synthesized
ttatttctttatagcagtgt

SEQ ID NO: 6510 - DNA, 20 bp, Artificial Sequence
  chemically synthesized
tccccccaagccccccaacc

SEQ ID NO: 6511 - DNA, 20 bp, Artificial Sequence
  chemically synthesized
gtcaaaataaaaatacagag

SEQ ID NO: 6512 - DNA, 20 bp, Artificial Sequence
  chemically synthesized
aagtgatttatttgggaaga

SEQ ID NO: 6513 - DNA, 20 bp, Artificial Sequence
  chemically synthesized
gaaaattcattggcactatt

SEQ ID NO: 6514 - DNA, 20 bp, Artificial Sequence
  chemically synthesized
attaaggatctgaggagctg

SEQ ID NO: 6515 - DNA, 20 bp, Artificial Sequence
  chemically synthesized
gagctggtgagtttcaactg

SEQ ID NO: 6516 - DNA, 20 bp, Artificial Sequence
  chemically synthesized
ttgcagcagctggacttgga

SEQ ID NO: 6517 - DNA, 20 bp, Artificial Sequence
  chemically synthesized
ccctacccccactattttag

SEQ ID NO: 6518 - DNA, 20 bp, Artificial Sequence
  chemically synthesized
ctattttagttgggtataaa

SEQ ID NO: 6519 - DNA, 20 bp, Artificial Sequence
  chemically synthesized
aaagcatagaacagtaggaa

SEQ ID NO: 6520 - DNA, 20 bp, Artificial Sequence
  chemically synthesized
attcctccctttcttcctcg

SEQ ID NO: 6521 - DNA, 20 bp, Artificial Sequence
  chemically synthesized
acctttgtttttttacacat

SEQ ID NO: 6522 - DNA, 20 bp, Artificial Sequence
  chemically synthesized
tgctactcatctgtagtaag

SEQ ID NO: 6523 - DNA, 20 bp, Artificial Sequence
  chemically synthesized
tgtgttttttacacatcaaa

SEQ ID NO: 6524 - DNA, 20 bp, Artificial Sequence
  chemically synthesized
agtgtgaaaatcatgcttga

SEQ ID NO: 6525 - DNA, 20 bp, Artificial Sequence
  chemically synthesized
gatgactttgcaggggaccg

SEQ ID NO: 6526 - DNA, 20 bp, Artificial Sequence
  chemically synthesized
gtgccggagctgtcccctac

SEQ ID NO: 6527 - DNA, 20 bp, Artificial Sequence
  chemically synthesized
tcccctaccagggtttgcag

SEQ ID NO: 6528 - DNA, 20 bp, Artificial Sequence
  chemically synthesized
ccagggtttgcagtggagtt

SEQ ID NO: 6529 - DNA, 20 bp, Artificial Sequence
  chemically synthesized
tgcgccaacgctcctccaga

SEQ ID NO: 6530 - DNA, 20 bp, Artificial Sequence
  chemically synthesized
ggttgcttctcttttggggg

SEQ ID NO: 6531 - DNA, 20 bp, Artificial Sequence
  chemically synthesized
ggggtctagcaagagcaggt

SEQ ID NO: 6532 - DNA, 20 bp, Artificial Sequence
  chemically synthesized
ttgctctcacagtactcgct

SEQ ID NO: 6533 - DNA, 20 bp, Artificial Sequence
  chemically synthesized
tgtagcaagctctggaactc

SEQ ID NO: 6534 - DNA, 20 bp, Artificial Sequence
  chemically synthesized
cggcggaggcgcaggcggtg

SEQ ID NO: 6535 - DNA, 20 bp, Artificial Sequence
  chemically synthesized
ggaggcgcaggcggtggcga

SEQ ID NO: 6536 - DNA, 20 bp, Artificial Sequence
  chemically synthesized
gcgcaggcggtggcgagtgg

SEQ ID NO: 6537 - DNA, 20 bp, Artificial Sequence
  chemically synthesized
agtgaggaggcggcatcctg

SEQ ID NO: 6538 - DNA, 20 bp, Artificial Sequence
  chemically synthesized
catcctggcgggtggctgtt

SEQ ID NO: 6539 - DNA, 20 bp, Artificial Sequence
  chemically synthesized
ttcggctgccgggaagaggc

SEQ ID NO: 6540 - DNA, 20 bp, Artificial Sequence
  chemically synthesized
tctcatttctctgaccgaag

SEQ ID NO: 6541 - DNA, 20 bp, Artificial Sequence
  chemically synthesized
ctttcgcctctagcgactgg

SEQ ID NO: 6542 - DNA, 20 bp, Artificial Sequence
  chemically synthesized
gcggcggcggcgcagggaca

SEQ ID NO: 6543 - DNA, 20 bp, Artificial Sequence
  chemically synthesized
gcggcgcagggacaagggat

SEQ ID NO: 6544 - DNA, 20 bp, Artificial Sequence
  chemically synthesized
gggctcgagaaaagggagcc

SEQ ID NO: 6545 - DNA, 20 bp, Artificial Sequence
  chemically synthesized
cctcgcctgggggaaggccg

SEQ ID NO: 6546 - DNA, 20 bp, Artificial Sequence
  chemically synthesized
gcggcttctgcggaccaagt

SEQ ID NO: 6547 - DNA, 20 bp, Artificial Sequence
  chemically synthesized
ctgccggcgaggagatcatg

SEQ ID NO: 6548 - DNA, 20 bp, Artificial Sequence
  chemically synthesized
gagatcatgcgggatgagat

SEQ ID NO: 6549 - DNA, 20 bp, Artificial Sequence
  chemically synthesized
aatttcagcccaagcttcta

SEQ ID NO: 6550 - DNA, 20 bp, Artificial Sequence
  chemically synthesized
attacatgtccgtgtgctca

SEQ ID NO: 6551 - DNA, 20 bp, Artificial Sequence
  chemically synthesized
aggtcctgcactttcccagg

SEQ ID NO: 6552 - DNA, 20 bp, Artificial Sequence
  chemically synthesized
tcgagattgttaggctctgg

SEQ ID NO: 6553 - DNA, 20 bp, Artificial Sequence
  chemically synthesized
atgcaccagttgttcacaac

SEQ ID NO: 6554 - DNA, 20 bp, Artificial Sequence
  chemically synthesized
attacttctacttttgtaca

SEQ ID NO: 6555 - DNA, 20 bp, Artificial Sequence
  chemically synthesized
ggaaacttttaacataatct

SEQ ID NO: 6556 - DNA, 20 bp, Artificial Sequence
  chemically synthesized
agaaacaagactatcatata

SEQ ID NO: 6557 - DNA, 20 bp, Artificial Sequence
  chemically synthesized
tataggggatattaataacc

SEQ ID NO: 6558 - DNA, 20 bp, Artificial Sequence
  chemically synthesized
ggatattaataacctggagt

SEQ ID NO: 6559 - DNA, 20 bp, Artificial Sequence
  chemically synthesized
cctgccactttaggaaaacc

SEQ ID NO: 6560 - DNA, 20 bp, Artificial Sequence
  chemically synthesized
agtacatctgaaacaagaac

SEQ ID NO: 6561 - DNA, 20 bp, Artificial Sequence
  chemically synthesized
tctgtttttcaagtctgccc

SEQ ID NO: 6562 - DNA, 20 bp, Artificial Sequence
  chemically synthesized
gttgtggaaagtggacggtt

SEQ ID NO: 6563 - DNA, 20 bp, Artificial Sequence
  chemically synthesized
gctttgggaggcggaggcaa

SEQ ID NO: 6564 - DNA, 20 bp, Artificial Sequence
  chemically synthesized
caagaggatcacttgaagcc

SEQ ID NO: 6565 - DNA, 20 bp, Artificial Sequence
  chemically synthesized
tacttgggaggctgaggcag

SEQ ID NO: 6566 - DNA, 20 bp, Artificial Sequence
  chemically synthesized
caggagggtcatttgagccc

SEQ ID NO: 6567 - DNA, 20 bp, Artificial Sequence
  chemically synthesized
tcctgccagtgcattccagc

SEQ ID NO: 6568 - DNA, 20 bp, Artificial Sequence
  chemically synthesized
aagtgagggctttatgattg

SEQ ID NO: 6569 - DNA, 20 bp, Artificial Sequence
  chemically synthesized
tgtaatcatgtctgcatgta

SEQ ID NO: 6570 - DNA, 20 bp, Artificial Sequence
  chemically synthesized
aagccaccgtctcactcaat

SEQ ID NO: 6571 - DNA, 20 bp, Artificial Sequence
  chemically synthesized
gctaatgtttggtaactctc

SEQ ID NO: 6572 - DNA, 20 bp, Artificial Sequence
  chemically synthesized
tttcagctgcatttgcatgt

SEQ ID NO: 6573 - DNA, 20 bp, Artificial Sequence
  chemically synthesized
tcccaggctatttcttttgg

SEQ ID NO: 6574 - DNA, 20 bp, Artificial Sequence
  chemically synthesized
tgtttgtttttttcttgagg

SEQ ID NO: 6575 - DNA, 20 bp, Artificial Sequence
  chemically synthesized
tctctctctgtcgcccaggc

SEQ ID NO: 6576 - DNA, 20 bp, Artificial Sequence
  chemically synthesized
cattgcaacctctgccacct

SEQ ID NO: 6577 - DNA, 20 bp, Artificial Sequence
  chemically synthesized
gattctcctgcctcagcctc

SEQ ID NO: 6578 - DNA, 20 bp, Artificial Sequence
  chemically synthesized
gcctcagcctcccgagtagc

SEQ ID NO: 6579 - DNA, 20 bp, Artificial Sequence
  chemically synthesized
ttttgtatttttagtagagg

SEQ ID NO: 6580 - DNA, 20 bp, Artificial Sequence
  chemically synthesized
gcctcggcctaccaaagagc

SEQ ID NO: 6581 - DNA, 20 bp, Artificial Sequence
  chemically synthesized
tttttttttcttattctgtt

SEQ ID NO: 6582 - DNA, 20 bp, Artificial Sequence
  chemically synthesized
tttcttattctgttaggagt

SEQ ID NO: 6583 - DNA, 20 bp, Artificial Sequence
  chemically synthesized
aattcaatcagattttgctc

SEQ ID NO: 6584 - DNA, 20 bp, Artificial Sequence
  chemically synthesized
tcagtttaatgatgaaatat

SEQ ID NO: 6585 - DNA, 20 bp, Artificial Sequence
  chemically synthesized
tatccacctttttaacctaa

SEQ ID NO: 6586 - DNA, 20 bp, Artificial Sequence
  chemically synthesized
cttacattgtattaaaaaca

SEQ ID NO: 6587 - DNA, 20 bp, Artificial Sequence
  chemically synthesized
taaaagtaaatattacctaa

SEQ ID NO: 6588 - DNA, 20 bp, Artificial Sequence
  chemically synthesized
caaccatttctgtacatact

SEQ ID NO: 6589 - DNA, 20 bp, Artificial Sequence
  chemically synthesized
ctgaactctcttgacaagat

SEQ ID NO: 6590 - DNA, 20 bp, Artificial Sequence
  chemically synthesized
agtacaatcacacattgctt

SEQ ID NO: 6591 - DNA, 20 bp, Artificial Sequence
  chemically synthesized
ttgtcattatgcaaacatca

SEQ ID NO: 6592 - DNA, 20 bp, Artificial Sequence
  chemically synthesized
cctgtacaactgttactgta

SEQ ID NO: 6593 - DNA, 20 bp, Artificial Sequence
  chemically synthesized
acctgtgtaggccacttacc

SEQ ID NO: 6594 - DNA, 20 bp, Artificial Sequence
  chemically synthesized
ttgcaggactagaagttgct

SEQ ID NO: 6595 - DNA, 20 bp, Artificial Sequence
  chemically synthesized
aggactagaagttgctctgg

SEQ ID NO: 6596 - DNA, 20 bp, Artificial Sequence
  chemically synthesized
aagttgctctgggtgagtca

SEQ ID NO: 6597 - DNA, 20 bp, Artificial Sequence
  chemically synthesized
tgctctgggtgagtcagtga

SEQ ID NO: 6598 - DNA, 20 bp, Artificial Sequence
  chemically synthesized
ggtgagtcagtgagtgagtg

SEQ ID NO: 6599 - DNA, 20 bp, Artificial Sequence
  chemically synthesized
cactttcacctaggcataga

SEQ ID NO: 6600 - DNA, 20 bp, Artificial Sequence
  chemically synthesized
cacctaggcatagacaggat

SEQ ID NO: 6601 - DNA, 20 bp, Artificial Sequence
  chemically synthesized
tatgataacagtgctttctg

SEQ ID NO: 6602 - DNA, 20 bp, Artificial Sequence
  chemically synthesized
ttaaaaaaaaaaaaagtaga

SEQ ID NO: 6603 - DNA, 20 bp, Artificial Sequence
  chemically synthesized
acaataaaaggcatagtata

SEQ ID NO: 6604 - DNA, 20 bp, Artificial Sequence
  chemically synthesized
tggcacataactgtatttgc

SEQ ID NO: 6605 - DNA, 20 bp, Artificial Sequence
  chemically synthesized
tgttttacattaatatcaca

SEQ ID NO: 6606 - DNA, 20 bp, Artificial Sequence
  chemically synthesized
tcacataggatgtacctttt

SEQ ID NO: 6607 - DNA, 20 bp, Artificial Sequence
  chemically synthesized
ttttagagtggtatgtttat

SEQ ID NO: 6608 - DNA, 20 bp, Artificial Sequence
  chemically synthesized
gagcaaggggaccaagagcc

SEQ ID NO: 6609 - DNA, 20 bp, Artificial Sequence
  chemically synthesized
caagagccctgggttctgtc

SEQ ID NO: 6610 - DNA, 20 bp, Artificial Sequence
  chemically synthesized
ttcaatgtcgttttaaacat

SEQ ID NO: 6611 - DNA, 20 bp, Artificial Sequence
  chemically synthesized
cttcagtattctcataacca

SEQ ID NO: 6612 - DNA, 20 bp, Artificial Sequence
  chemically synthesized
tcataaccagagagttcact

SEQ ID NO: 6613 - DNA, 20 bp, Artificial Sequence
  chemically synthesized
acttaacaaagcaccacaaa

SEQ ID NO: 6614 - DNA, 20 bp, Artificial Sequence
  chemically synthesized
tctggtggttaccagcaatc

SEQ ID NO: 6615 - DNA, 20 bp, Artificial Sequence
  chemically synthesized
ccttataaacacagcagtta

SEQ ID NO: 6616 - DNA, 20 bp, Artificial Sequence
  chemically synthesized
aggtcacattcacgtacacc

SEQ ID NO: 6617 - DNA, 20 bp, Artificial Sequence
  chemically synthesized
attcacgtacaccaagggtt

SEQ ID NO: 6618 - DNA, 20 bp, Artificial Sequence
  chemically synthesized
ttttctcctttttagttgct

SEQ ID NO: 6619 - DNA, 20 bp, Artificial Sequence
  chemically synthesized
ggccaaatctccagtcatac

SEQ ID NO: 6620 - DNA, 20 bp, Artificial Sequence
  chemically synthesized
atactagaattgcacatgga

SEQ ID NO: 6621 - DNA, 20 bp, Artificial Sequence
  chemically synthesized
tgcacatggactggatattt

SEQ ID NO: 6622 - DNA, 20 bp, Artificial Sequence
  chemically synthesized
actggatatttgggaatact

SEQ ID NO: 6623 - DNA, 20 bp, Artificial Sequence
  chemically synthesized
cccttttttaagttatttct

SEQ ID NO: 6624 - DNA, 20 bp, Artificial Sequence
  chemically synthesized
tgaatttctaaatgtatgcc

SEQ ID NO: 6625 - DNA, 20 bp, Artificial Sequence
  chemically synthesized
atgtgcacctactgtgctag

SEQ ID NO: 6626 - DNA, 20 bp, Artificial Sequence
  chemically synthesized
tttatcctgataggagataa

SEQ ID NO: 6627 - DNA, 20 bp, Artificial Sequence
  chemically synthesized
ccaaatatgtctaaatcatt

SEQ ID NO: 6628 - DNA, 20 bp, Artificial Sequence
  chemically synthesized
ctaaatcatttggggttttg

SEQ ID NO: 6629 - DNA, 20 bp, Artificial Sequence
  chemically synthesized
tttagatatctccggagcat

SEQ ID NO: 6630 - DNA, 20 bp, Artificial Sequence
  chemically synthesized
catttggataatgtgacagt

SEQ ID NO: 6631 - DNA, 20 bp, Artificial Sequence
  chemically synthesized
tgggacaatattcttggtcc

SEQ ID NO: 6632 - DNA, 20 bp, Artificial Sequence
  chemically synthesized
gagaaatccttcgaaatgca

SEQ ID NO: 6633 - DNA, 20 bp, Artificial Sequence
  chemically synthesized
ttttttgtcttgtctgaaaa

SEQ ID NO: 6634 - DNA, 20 bp, Artificial Sequence
  chemically synthesized
cattaatctttgatggaaac

SEQ ID NO: 6635 - DNA, 20 bp, Artificial Sequence
  chemically synthesized
tctttgatggaaactggaat

SEQ ID NO: 6636 - DNA, 20 bp, Artificial Sequence
  chemically synthesized
agtttctacctcccacttca

SEQ ID NO: 6637 - DNA, 20 bp, Artificial Sequence
  chemically synthesized
acacatataatccggaaagg

SEQ ID NO: 6638 - DNA, 20 bp, Artificial Sequence
  chemically synthesized
ataatccggaaaggaagaat

SEQ ID NO: 6639 - DNA, 20 bp, Artificial Sequence
  chemically synthesized
aataaagaaacttttagacc

SEQ ID NO: 6640 - DNA, 20 bp, Artificial Sequence
  chemically synthesized
aggttcataaaatgaggagg

SEQ ID NO: 6641 - DNA, 20 bp, Artificial Sequence
  chemically synthesized
cataaaatgaggaggttgaa

SEQ ID NO: 6642 - DNA, 20 bp, Artificial Sequence
  chemically synthesized
ttgaatggaatggttcccaa

SEQ ID NO: 6643 - DNA, 20 bp, Artificial Sequence
  chemically synthesized
tgttttcctaaatcctgtag

SEQ ID NO: 6644 - DNA, 20 bp, Artificial Sequence
  chemically synthesized
tgatgtatctaaagaacaca

SEQ ID NO: 6645 - DNA, 20 bp, Artificial Sequence
  chemically synthesized
ggaaaaataatatcttttaa

SEQ ID NO: 6646 - DNA, 20 bp, Artificial Sequence
  chemically synthesized
tatgaaactcttaaaatcag

SEQ ID NO: 6647 - DNA, 20 bp, Artificial Sequence
  chemically synthesized
aagttatctttttttcactg

SEQ ID NO: 6648 - DNA, 20 bp, Artificial Sequence
  chemically synthesized
tttatgagaacatgcatttg

SEQ ID NO: 6649 - DNA, 20 bp, Artificial Sequence
  chemically synthesized
taagcaagtatcaaaatgtt

SEQ ID NO: 6650 - DNA, 20 bp, Artificial Sequence
  chemically synthesized
attatcttagaaggcacaga

SEQ ID NO: 6651 - DNA, 20 bp, Artificial Sequence
  chemically synthesized
tgtcaaggccttggagacat

SEQ ID NO: 6652 - DNA, 20 bp, Artificial Sequence
  chemically synthesized
ggagcttttatggaggtgta

SEQ ID NO: 6653 - DNA, 20 bp, Artificial Sequence
  chemically synthesized
atttccatatcttaaaccca

SEQ ID NO: 6654 - DNA, 20 bp, Artificial Sequence
  chemically synthesized
cctttttttttctgtttgcc

SEQ ID NO: 6655 - DNA, 20 bp, Artificial Sequence
  chemically synthesized
ctgtttgcccagaataaatt

SEQ ID NO: 6656 - DNA, 20 bp, Artificial Sequence
  chemically synthesized
gtacccctgaggtatctgtc

SEQ ID NO: 6657 - DNA, 20 bp, Artificial Sequence
  chemically synthesized
gccatgtttatcccttggct

SEQ ID NO: 6658 - DNA, 20 bp, Artificial Sequence
  chemically synthesized
gcccctcaggaacagacact

SEQ ID NO: 6659 - DNA, 20 bp, Artificial Sequence
  chemically synthesized
agtttgagaagcatggttac

SEQ ID NO: 6660 - DNA, 20 bp, Artificial Sequence
  chemically synthesized
gcagagaagttcttttgaag

SEQ ID NO: 6661 - DNA, 20 bp, Artificial Sequence
  chemically synthesized
aggagaatctccagtgaaga

SEQ ID NO: 6662 - DNA, 20 bp, Artificial Sequence
  chemically synthesized
ttttacttccatttcctctt

SEQ ID NO: 6663 - DNA, 20 bp, Artificial Sequence
  chemically synthesized
tttctttgcttctttttagc

SEQ ID NO: 6664 - DNA, 20 bp, Artificial Sequence
  chemically synthesized
aaaagatttccctttaccca

SEQ ID NO: 6665 - DNA, 20 bp, Artificial Sequence
  chemically synthesized
cttatttgctggtcaataag

SEQ ID NO: 6666 - DNA, 20 bp, Artificial Sequence
  chemically synthesized
ggtcaataagcagggtcccc

SEQ ID NO: 6667 - DNA, 20 bp, Artificial Sequence
  chemically synthesized
ataagcagggtccccaggaa

SEQ ID NO: 6668 - DNA, 20 bp, Artificial Sequence
  chemically synthesized
aactaaaattctgcttttac

SEQ ID NO: 6669 - DNA, 20 bp, Artificial Sequence
  chemically synthesized
acttaagttgactactatta

SEQ ID NO: 6670 - DNA, 20 bp, Artificial Sequence
  chemically synthesized
caagtttgggaagtacaagg

SEQ ID NO: 6671 - DNA, 20 bp, Artificial Sequence
  chemically synthesized
ctcttctgtatttagccctg

SEQ ID NO: 6672 - DNA, 20 bp, Artificial Sequence
  chemically synthesized
ctgataatgtctgagatact

SEQ ID NO: 6673 - DNA, 20 bp, Artificial Sequence
  chemically synthesized
aattattcttcccgaaaagg

SEQ ID NO: 6674 - DNA, 20 bp, Artificial Sequence
  chemically synthesized
aaggaggagttgccttttga

SEQ ID NO: 6675 - DNA, 20 bp, Artificial Sequence
  chemically synthesized
tattttgaacaatactgttt

SEQ ID NO: 6676 - DNA, 20 bp, Artificial Sequence
  chemically synthesized
cacagggaaggaaatttaac

SEQ ID NO: 6677 - DNA, 20 bp, Artificial Sequence
  chemically synthesized
tagtcattattcttgttaga

SEQ ID NO: 6678 - DNA, 20 bp, Artificial Sequence
  chemically synthesized
attcttgttagattgaatgt

SEQ ID NO: 6679 - DNA, 20 bp, Artificial Sequence
  chemically synthesized
tactttaaaaactaaaaaca

SEQ ID NO: 6680 - DNA, 20 bp, Artificial Sequence
  chemically synthesized
gttagttgtggaggttacta

SEQ ID NO: 6681 - DNA, 20 bp, Artificial Sequence
  chemically synthesized
atgcaaatgggcatatggct

SEQ ID NO: 6682 - DNA, 20 bp, Artificial Sequence
  chemically synthesized
aggttactccaaaaatggcc

SEQ ID NO: 6683 - DNA, 20 bp, Artificial Sequence
  chemically synthesized
taaagatgcttatgaagact

SEQ ID NO: 6684 - DNA, 20 bp, Artificial Sequence
  chemically synthesized
tgatgagactggtggtggta

SEQ ID NO: 6685 - DNA, 20 bp, Artificial Sequence
  chemically synthesized
tacatttgtgatgtgttata

SEQ ID NO: 6686 - DNA, 20 bp, Artificial Sequence
  chemically synthesized
tatcttgaaatagctctaaa

SEQ ID NO: 6687 - DNA, 20 bp, Artificial Sequence
  chemically synthesized
gtgctgattttgatttgcat

SEQ ID NO: 6688 - DNA, 20 bp, Artificial Sequence
  chemically synthesized
tttgggtagattatactttt

SEQ ID NO: 6689 - DNA, 20 bp, Artificial Sequence
  chemically synthesized
gttttccttacctatttggt

SEQ ID NO: 6690 - DNA, 20 bp, Artificial Sequence
  chemically synthesized
caatgattccatactctcta

SEQ ID NO: 6691 - DNA, 20 bp, Artificial Sequence
  chemically synthesized
ctatagtcccagctacttgg

SEQ ID NO: 6692 - DNA, 20 bp, Artificial Sequence
  chemically synthesized
tacttgggaggatgagacag

SEQ ID NO: 6693 - DNA, 20 bp, Artificial Sequence
  chemically synthesized
aaaaaaaaaaaaagaaaaga

SEQ ID NO: 6694 - DNA, 20 bp, Artificial Sequence
  chemically synthesized
agaaagaataaaagtgagct

SEQ ID NO: 6695 - DNA, 20 bp, Artificial Sequence
  chemically synthesized
attacgaagtattttcatca

SEQ ID NO: 6696 - DNA, 20 bp, Artificial Sequence
  chemically synthesized
cttcatgtcactttattgtg

SEQ ID NO: 6697 - DNA, 20 bp, Artificial Sequence
  chemically synthesized
gtcactttattgtgcagggt

SEQ ID NO: 6698 - DNA, 20 bp, Artificial Sequence
  chemically synthesized
tgagagcaattatacacttt

SEQ ID NO: 6699 - DNA, 20 bp, Artificial Sequence
  chemically synthesized
tatacactttatgagttttt

SEQ ID NO: 6700 - DNA, 20 bp, Artificial Sequence
  chemically synthesized
aaataagcacacacaaaatc

SEQ ID NO: 6701 - DNA, 20 bp, Artificial Sequence
  chemically synthesized
tttataattcctaaaagtgg

SEQ ID NO: 6702 - DNA, 20 bp, Artificial Sequence
  chemically synthesized
aatcatttgttgaggacgtt

SEQ ID NO: 6703 - DNA, 20 bp, Artificial Sequence
  chemically synthesized
gacgttttgaatcacacact

SEQ ID NO: 6704 - DNA, 20 bp, Artificial Sequence
  chemically synthesized
tgcacagagattgttttttg

SEQ ID NO: 6705 - DNA, 20 bp, Artificial Sequence
  chemically synthesized
aatgaaggcagtgtgttata

SEQ ID NO: 6706 - DNA, 20 bp, Artificial Sequence
  chemically synthesized
tgaaggctttcttctcaagt

SEQ ID NO: 6707 - DNA, 20 bp, Artificial Sequence
  chemically synthesized
aatttttcttttcataaaag

SEQ ID NO: 6708 - DNA, 20 bp, Artificial Sequence
  chemically synthesized
ccatttgctatttaaagaaa

SEQ ID NO: 6709 - DNA, 20 bp, Artificial Sequence
  chemically synthesized
ttacttctcattaaagctaa

SEQ ID NO: 6710 - DNA, 20 bp, Artificial Sequence
  chemically synthesized
gatctttttccatccagcag

SEQ ID NO: 6711 - DNA, 20 bp, Artificial Sequence
  chemically synthesized
agcagtggagtttagtactt

SEQ ID NO: 6712 - DNA, 20 bp, Artificial Sequence
  chemically synthesized
gtgcccttaaaccagactcc

SEQ ID NO: 6713 - DNA, 20 bp, Artificial Sequence
  chemically synthesized
tgtacccgtgggcaaggtgc

SEQ ID NO: 6714 - DNA, 20 bp, Artificial Sequence
  chemically synthesized
tagtaatagtacctaatgtg

SEQ ID NO: 6715 - DNA, 20 bp, Artificial Sequence
  chemically synthesized
gtgtagggttgttataagca

SEQ ID NO: 6716 - DNA, 20 bp, Artificial Sequence
  chemically synthesized
ctagaaatagccagtatttg

SEQ ID NO: 6717 - DNA, 20 bp, Artificial Sequence
  chemically synthesized
cttttcctttaggctcatga

SEQ ID NO: 6718 - DNA, 20 bp, Artificial Sequence
  chemically synthesized
catgatggagtatcagaggc

SEQ ID NO: 6719 - DNA, 20 bp, Artificial Sequence
  chemically synthesized
aacctaagagccttaatggc

SEQ ID NO: 6720 - DNA, 20 bp, Artificial Sequence
  chemically synthesized
gtttatcatataaagctatt

SEQ ID NO: 6721 - DNA, 20 bp, Artificial Sequence
  chemically synthesized
tttaagactgatgatatatc

SEQ ID NO: 6722 - DNA, 20 bp, Artificial Sequence
  chemically synthesized
taagacaccttgtggcaaca

SEQ ID NO: 6723 - DNA, 20 bp, Artificial Sequence
  chemically synthesized
aacagtgagtttgaaataaa

SEQ ID NO: 6724 - DNA, 20 bp, Artificial Sequence
  chemically synthesized
gagtttgaaataaactgagt

SEQ ID NO: 6725 - DNA, 20 bp, Artificial Sequence
  chemically synthesized
agtagtgtataaatggtttt

SEQ ID NO: 6726 - DNA, 20 bp, Artificial Sequence
  chemically synthesized
tgtcccttctagggagctat

SEQ ID NO: 6727 - DNA, 20 bp, Artificial Sequence
  chemically synthesized
accctttccttcagtgctac

SEQ ID NO: 6728 - DNA, 20 bp, Artificial Sequence
  chemically synthesized
cagtgctacttgagttaatt

SEQ ID NO: 6729 - DNA, 20 bp, Artificial Sequence
  chemically synthesized
aagcattagctaataaacta

SEQ ID NO: 6730 - DNA, 20 bp, Artificial Sequence
  chemically synthesized
ttcactgaccattagttaga

SEQ ID NO: 6731 - DNA, 20 bp, Artificial Sequence
  chemically synthesized
ctccaaagccttaggttgca

SEQ ID NO: 6732 - DNA, 20 bp, Artificial Sequence
  chemically synthesized
agggagaaaggctccatagt

SEQ ID NO: 6733 - DNA, 20 bp, Artificial Sequence
  chemically synthesized
catcctccatcctcttgagg

SEQ ID NO: 6734 - DNA, 20 bp, Artificial Sequence
  chemically synthesized
actcctttaacataataact

SEQ ID NO: 6735 - DNA, 20 bp, Artificial Sequence
  chemically synthesized
ataataactgtggatatggt

SEQ ID NO: 6736 - DNA, 20 bp, Artificial Sequence
  chemically synthesized
agctgtaggtcaaatattat

SEQ ID NO: 6737 - DNA, 20 bp, Artificial Sequence
  chemically synthesized
aattaattctcttctttttg

SEQ ID NO: 6738 - DNA, 20 bp, Artificial Sequence
  chemically synthesized
attctttgatatttcttaca

SEQ ID NO: 6739 - DNA, 20 bp, Artificial Sequence
  chemically synthesized
cagatgatataattcacctg

SEQ ID NO: 6740 - DNA, 20 bp, Artificial Sequence
  chemically synthesized
tttctaaatttatttgacca

SEQ ID NO: 6741 - DNA, 20 bp, Artificial Sequence
  chemically synthesized
agcaacaactgttacatccc

SEQ ID NO: 6742 - DNA, 20 bp, Artificial Sequence
  chemically synthesized
ccatggattccaggtgacta

SEQ ID NO: 6743 - DNA, 20 bp, Artificial Sequence
  chemically synthesized
actaaagaatacttatttct

SEQ ID NO: 6744 - DNA, 20 bp, Artificial Sequence
  chemically synthesized
atgctccaggttatgtgaag

SEQ ID NO: 6745 - DNA, 20 bp, Artificial Sequence
  chemically synthesized
agcagaatcatcatttaaat

SEQ ID NO: 6746 - DNA, 20 bp, Artificial Sequence
  chemically synthesized
gcacatagactatatgtctt

SEQ ID NO: 6747 - DNA, 20 bp, Artificial Sequence
  chemically synthesized
gtatcatcagtgaaacacca

SEQ ID NO: 6748 - DNA, 20 bp, Artificial Sequence
  chemically synthesized
gaataccctttgtgttccag

SEQ ID NO: 6749 - DNA, 20 bp, Artificial Sequence
  chemically synthesized
ttctttttaactaaatagat

SEQ ID NO: 6750 - DNA, 20 bp, Artificial Sequence
  chemically synthesized
aaacatctttaagaagctta

SEQ ID NO: 6751 - DNA, 20 bp, Artificial Sequence
  chemically synthesized
aaattgtatttttcttttat

SEQ ID NO: 6752 - DNA, 20 bp, Artificial Sequence
  chemically synthesized
gaagaaagttgttcaccttg

SEQ ID NO: 6753 - DNA, 20 bp, Artificial Sequence
  chemically synthesized
ctcatagtgactactttctt

SEQ ID NO: 6754 - DNA, 20 bp, Artificial Sequence
  chemically synthesized
ataatgtgctgctatgaact

SEQ ID NO: 6755 - DNA, 20 bp, Artificial Sequence
  chemically synthesized
aaaggaaacgtagtttctat

SEQ ID NO: 6756 - DNA, 20 bp, Artificial Sequence
  chemically synthesized
tacatactcattgaggtgca

SEQ ID NO: 6757 - DNA, 20 bp, Artificial Sequence
  chemically synthesized
attaaaagacacttgtaatt

SEQ ID NO: 6758 - DNA, 20 bp, Artificial Sequence
  chemically synthesized
cacttgtaattttgaatcca

SEQ ID NO: 6759 - DNA, 20 bp, Artificial Sequence
  chemically synthesized
ctttaagactcccaccccca

SEQ ID NO: 6760 - DNA, 20 bp, Artificial Sequence
  chemically synthesized
acagcagattctaagcctct

SEQ ID NO: 6761 - DNA, 20 bp, Artificial Sequence
  chemically synthesized
tatttacttaaccacttcct

SEQ ID NO: 6762 - DNA, 20 bp, Artificial Sequence
  chemically synthesized
ctaaaactttgcacacactc

SEQ ID NO: 6763 - DNA, 20 bp, Artificial Sequence
  chemically synthesized
cacactcatgaatagcttct

SEQ ID NO: 6764 - DNA, 20 bp, Artificial Sequence
  chemically synthesized
cttaggataaatttttagag

SEQ ID NO: 6765 - DNA, 20 bp, Artificial Sequence
  chemically synthesized
aaattttccttttattttga

SEQ ID NO: 6766 - DNA, 20 bp, Artificial Sequence
  chemically synthesized
atcccaccacacacatagat

SEQ ID NO: 6767 - DNA, 20 bp, Artificial Sequence
  chemically synthesized
cttcagaagaagacatggct

SEQ ID NO: 6768 - DNA, 20 bp, Artificial Sequence
  chemically synthesized
aatatgaaattgtgtctttt

SEQ ID NO: 6769 - DNA, 20 bp, Artificial Sequence
  chemically synthesized
aaagaaagaaatattaccag

SEQ ID NO: 6770 - DNA, 20 bp, Artificial Sequence
  chemically synthesized
agtctattatgtaacagtta

SEQ ID NO: 6771 - DNA, 20 bp, Artificial Sequence
  chemically synthesized
agtcttttttttcttgacat

SEQ ID NO: 6772 - DNA, 20 bp, Artificial Sequence
  chemically synthesized
agatgttctgaaatcaggaa

SEQ ID NO: 6773 - DNA, 20 bp, Artificial Sequence
  chemically synthesized
gcctgtaagaacagagcttt

SEQ ID NO: 6774 - DNA, 20 bp, Artificial Sequence
  chemically synthesized
gctttgggagtgcaaggcag

SEQ ID NO: 6775 - DNA, 20 bp, Artificial Sequence
  chemically synthesized
caggcggatcacttgaggcc

SEQ ID NO: 6776 - DNA, 20 bp, Artificial Sequence
  chemically synthesized
catctctacaaaaaataaaa

SEQ ID NO: 6777 - DNA, 20 bp, Artificial Sequence
  chemically synthesized
aaaaaataaaaaagaattat

SEQ ID NO: 6778 - DNA, 20 bp, Artificial Sequence
  chemically synthesized
tattccgaaagctgaggcag

SEQ ID NO: 6779 - DNA, 20 bp, Artificial Sequence
  chemically synthesized
caggaggatcttttgagccc

SEQ ID NO: 6780 - DNA, 20 bp, Artificial Sequence
  chemically synthesized
cccaggagtttgaggttaca

SEQ ID NO: 6781 - DNA, 20 bp, Artificial Sequence
  chemically synthesized
aagcctgacctatgtatcta

SEQ ID NO: 6782 - DNA, 20 bp, Artificial Sequence
  chemically synthesized
gtaagtgttaaccaaaagca

SEQ ID NO: 6783 - DNA, 20 bp, Artificial Sequence
  chemically synthesized
gttaaccaaaagcatagaat

SEQ ID NO: 6784 - DNA, 20 bp, Artificial Sequence
  chemically synthesized
cccattttttcctagttctc

SEQ ID NO: 6785 - DNA, 20 bp, Artificial Sequence
  chemically synthesized
ggttcttgagaaagtagtag

SEQ ID NO: 6786 - DNA, 20 bp, Artificial Sequence
  chemically synthesized
gtaggggaatgttttagaaa

SEQ ID NO: 6787 - DNA, 20 bp, Artificial Sequence
  chemically synthesized
tgaggaaatttagtgaactg

SEQ ID NO: 6788 - DNA, 20 bp, Artificial Sequence
  chemically synthesized
gaaatttagtgaactgcaga

SEQ ID NO: 6789 - DNA, 20 bp, Artificial Sequence
  chemically synthesized
tatttttgttttgtttttta

SEQ ID NO: 6790 - DNA, 20 bp, Artificial Sequence
  chemically synthesized
gatcatgacaaaataatatc

SEQ ID NO: 6791 - DNA, 20 bp, Artificial Sequence
  chemically synthesized
gtgtgttaagtctattgtca

SEQ ID NO: 6792 - DNA, 20 bp, Artificial Sequence
  chemically synthesized
atacatgaaaaattggtcac

SEQ ID NO: 6793 - DNA, 20 bp, Artificial Sequence
  chemically synthesized
acaggtaaattgcgtgtcat

SEQ ID NO: 6794 - DNA, 20 bp, Artificial Sequence
  chemically synthesized
cggtagttggttttctgttc

SEQ ID NO: 6795 - DNA, 20 bp, Artificial Sequence
  chemically synthesized
tgttcctggattagttcact

SEQ ID NO: 6796 - DNA, 20 bp, Artificial Sequence
  chemically synthesized
gattccctgtctttgttatc

SEQ ID NO: 6797 - DNA, 20 bp, Artificial Sequence
  chemically synthesized
tgtattcctttaggtacata

SEQ ID NO: 6798 - DNA, 20 bp, Artificial Sequence
  chemically synthesized
tttaggtacatatagaataa

SEQ ID NO: 6799 - DNA, 20 bp, Artificial Sequence
  chemically synthesized
atatagaataatggggttgc

SEQ ID NO: 6800 - DNA, 20 bp, Artificial Sequence
  chemically synthesized
agaataatggggttgctagg

SEQ ID NO: 6801 - DNA, 20 bp, Artificial Sequence
  chemically synthesized
tttaataatagccattccta

SEQ ID NO: 6802 - DNA, 20 bp, Artificial Sequence
  chemically synthesized
gtcctttgcccagtttgtag

SEQ ID NO: 6803 - DNA, 20 bp, Artificial Sequence
  chemically synthesized
tttgcccagtttgtagtggg

SEQ ID NO: 6804 - DNA, 20 bp, Artificial Sequence
  chemically synthesized
agattctgcatatccctttg

SEQ ID NO: 6805 - DNA, 20 bp, Artificial Sequence
  chemically synthesized
tctgtgccagggcctatgtc

SEQ ID NO: 6806 - DNA, 20 bp, Artificial Sequence
  chemically synthesized
gtatttcctaggttgtcttc

SEQ ID NO: 6807 - DNA, 20 bp, Artificial Sequence
  chemically synthesized
gtttatgtctttaatccatc

SEQ ID NO: 6808 - DNA, 20 bp, Artificial Sequence
  chemically synthesized
ttttgtatatggcacaagga

SEQ ID NO: 6809 - DNA, 20 bp, Artificial Sequence
  chemically synthesized
aattatcccagcaccattta

SEQ ID NO: 6810 - DNA, 20 bp, Artificial Sequence
  chemically synthesized
ccagcaccatttattgaata

SEQ ID NO: 6811 - DNA, 20 bp, Artificial Sequence
  chemically synthesized
ccagctttgttctttttgct

SEQ ID NO: 6812 - DNA, 20 bp, Artificial Sequence
  chemically synthesized
ttggctatttgggctccttt

SEQ ID NO: 6813 - DNA, 20 bp, Artificial Sequence
  chemically synthesized
cagttttttctggttttgtg

SEQ ID NO: 6814 - DNA, 20 bp, Artificial Sequence
  chemically synthesized
ggatatcattggtagtttat

SEQ ID NO: 6815 - DNA, 20 bp, Artificial Sequence
  chemically synthesized
ggtagtttataggaatagca

SEQ ID NO: 6816 - DNA, 20 bp, Artificial Sequence
  chemically synthesized
aatattaattcttcctatct

SEQ ID NO: 6817 - DNA, 20 bp, Artificial Sequence
  chemically synthesized
attcttcctatctatgaata

SEQ ID NO: 6818 - DNA, 20 bp, Artificial Sequence
  chemically synthesized
acttcaggccaatatccttg

SEQ ID NO: 6819 - DNA, 20 bp, Artificial Sequence
  chemically synthesized
gatcaagtaggctttatccc

SEQ ID NO: 6820 - DNA, 20 bp, Artificial Sequence
  chemically synthesized
cgggcatatctcttaagccc

SEQ ID NO: 6821 - DNA, 20 bp, Artificial Sequence
  chemically synthesized
tattcaggaggttgaggtgg

SEQ ID NO: 6822 - DNA, 20 bp, Artificial Sequence
  chemically synthesized
ccgcactccagcctgggcaa

SEQ ID NO: 6823 - DNA, 20 bp, Artificial Sequence
  chemically synthesized
cttgagaaccgtaacaagac

SEQ ID NO: 6824 - DNA, 20 bp, Artificial Sequence
  chemically synthesized
ccattcacaatagccgcaaa

SEQ ID NO: 6825 - DNA, 20 bp, Artificial Sequence
  chemically synthesized
gcaaaacgaataaaatacct

SEQ ID NO: 6826 - DNA, 20 bp, Artificial Sequence
  chemically synthesized
gggaggtgaaagatctctat

SEQ ID NO: 6827 - DNA, 20 bp, Artificial Sequence
  chemically synthesized
tttgccactctggtcaggta

SEQ ID NO: 6828 - DNA, 20 bp, Artificial Sequence
  chemically synthesized
atgttctcttaccctctggc

SEQ ID NO: 6829 - DNA, 20 bp, Artificial Sequence
  chemically synthesized
agggaggtggggcctgggaa

SEQ ID NO: 6830 - DNA, 20 bp, Artificial Sequence
  chemically synthesized
ccaaggtaggtagtactttc

SEQ ID NO: 6831 - DNA, 20 bp, Artificial Sequence
  chemically synthesized
ggcttgttgaggcaaaccca

SEQ ID NO: 6832 - DNA, 20 bp, Artificial Sequence
  chemically synthesized
caaacccagtggataatcat

SEQ ID NO: 6833 - DNA, 20 bp, Artificial Sequence
  chemically synthesized
ttgtttttttttgagatggc

SEQ ID NO: 6834 - DNA, 20 bp, Artificial Sequence
  chemically synthesized
gttttatttattaattgcct

SEQ ID NO: 6835 - DNA, 20 bp, Artificial Sequence
  chemically synthesized
ctctactttttttaaaagat

SEQ ID NO: 6836 - DNA, 20 bp, Artificial Sequence
  chemically synthesized
agtaaaatgtaaatatatcc

SEQ ID NO: 6837 - DNA, 20 bp, Artificial Sequence
  chemically synthesized
atatatccttgagtaaataa

SEQ ID NO: 6838 - DNA, 20 bp, Artificial Sequence
  chemically synthesized
ttaaaatgttggctcaagtg

SEQ ID NO: 6839 - DNA, 20 bp, Artificial Sequence
  chemically synthesized
ttcattttcttcttttcttc

SEQ ID NO: 6840 - DNA, 20 bp, Artificial Sequence
  chemically synthesized
acactctagtgaaagccttc

SEQ ID NO: 6841 - DNA, 20 bp, Artificial Sequence
  chemically synthesized
aatgttgaacttgagattgt

SEQ ID NO: 6842 - DNA, 20 bp, Artificial Sequence
  chemically synthesized
ttgaacttgagattgtcaga

SEQ ID NO: 6843 - DNA, 20 bp, Artificial Sequence
  chemically synthesized
ttctatatatttatattccc

SEQ ID NO: 6844 - DNA, 20 bp, Artificial Sequence
  chemically synthesized
tattcccctggatcatgccc

SEQ ID NO: 6845 - DNA, 20 bp, Artificial Sequence
  chemically synthesized
agttacactacagttctcag

SEQ ID NO: 6846 - DNA, 20 bp, Artificial Sequence
  chemically synthesized
ttgtcctagatttatgcttc

SEQ ID NO: 6847 - DNA, 20 bp, Artificial Sequence
  chemically synthesized
aactactgttttttgaaaca

SEQ ID NO: 6848 - DNA, 20 bp, Artificial Sequence
  chemically synthesized
tatacatattaccagcattg

SEQ ID NO: 6849 - DNA, 20 bp, Artificial Sequence
  chemically synthesized
taaaaccctattatgttatg

SEQ ID NO: 6850 - DNA, 20 bp, Artificial Sequence
  chemically synthesized
atataacatatactctatga

SEQ ID NO: 6851 - DNA, 20 bp, Artificial Sequence
  chemically synthesized
ttttaacatttataaaatga

SEQ ID NO: 6852 - DNA, 20 bp, Artificial Sequence
  chemically synthesized
atttataaaatgatagaatt

SEQ ID NO: 6853 - DNA, 20 bp, Artificial Sequence
  chemically synthesized
taaaatgatagaattaagaa

SEQ ID NO: 6854 - DNA, 20 bp, Artificial Sequence
  chemically synthesized
gagcctgtatattaacaatt

SEQ ID NO: 6855 - DNA, 20 bp, Artificial Sequence
  chemically synthesized
gtttgttataataacattct

SEQ ID NO: 6856 - DNA, 20 bp, Artificial Sequence
  chemically synthesized
ccttatgtttactagaaatt

SEQ ID NO: 6857 - DNA, 20 bp, Artificial Sequence
  chemically synthesized
tcaaggaaaattcgtaggcc

SEQ ID NO: 6858 - DNA, 20 bp, Artificial Sequence
  chemically synthesized
ccctgcaaaagtacaggtat

SEQ ID NO: 6859 - DNA, 20 bp, Artificial Sequence
  chemically synthesized
taatacgaaataacttatgt

SEQ ID NO: 6860 - DNA, 20 bp, Artificial Sequence
  chemically synthesized
gttttaaaagtgaagtaaac

SEQ ID NO: 6861 - DNA, 20 bp, Artificial Sequence
  chemically synthesized
aacatggatgtattctgaag

SEQ ID NO: 6862 - DNA, 20 bp, Artificial Sequence
  chemically synthesized
tctgaagtagaatgcaaaat

SEQ ID NO: 6863 - DNA, 20 bp, Artificial Sequence
  chemically synthesized
gcctgtaatcccagcacttt

SEQ ID NO: 6864 - DNA, 20 bp, Artificial Sequence
  chemically synthesized
cagcactttgggagtccgag

SEQ ID NO: 6865 - DNA, 20 bp, Artificial Sequence
  chemically synthesized
actttgggagtccgaggtgg

SEQ ID NO: 6866 - DNA, 20 bp, Artificial Sequence
  chemically synthesized
tacctgggaggctgaggcag

SEQ ID NO: 6867 - DNA, 20 bp, Artificial Sequence
  chemically synthesized
cccaggaggtgtaggttgca

SEQ ID NO: 6868 - DNA, 20 bp, Artificial Sequence
  chemically synthesized
actgtcatagaaacttctgt

SEQ ID NO: 6869 - DNA, 20 bp, Artificial Sequence
  chemically synthesized
catagaaacttctgtacgag

SEQ ID NO: 6870 - DNA, 20 bp, Artificial Sequence
  chemically synthesized
aaatatatagaagacgatac

SEQ ID NO: 6871 - DNA, 20 bp, Artificial Sequence
  chemically synthesized
tggtgtggggaaacgttccc

SEQ ID NO: 6872 - DNA, 20 bp, Artificial Sequence
  chemically synthesized
cgttcccctggatcatactc

SEQ ID NO: 6873 - DNA, 20 bp, Artificial Sequence
  chemically synthesized
gttctcacaagagcctgtga

SEQ ID NO: 6874 - DNA, 20 bp, Artificial Sequence
  chemically synthesized
atgtcaggtgcatcattaca

SEQ ID NO: 6875 - DNA, 20 bp, Artificial Sequence
  chemically synthesized
ttttcctagatttatgcttt

SEQ ID NO: 6876 - DNA, 20 bp, Artificial Sequence
  chemically synthesized
atcttttaaagatataataa

SEQ ID NO: 6877 - DNA, 20 bp, Artificial Sequence
  chemically synthesized
tacatgtgtcaaggtgaaat

SEQ ID NO: 6878 - DNA, 20 bp, Artificial Sequence
  chemically synthesized
ttttggcattctttggtgtg

SEQ ID NO: 6879 - DNA, 20 bp, Artificial Sequence
  chemically synthesized
aaagaaagtgagcttgaaca

SEQ ID NO: 6880 - DNA, 20 bp, Artificial Sequence
  chemically synthesized
tgatcaagcagatgtttaat

SEQ ID NO: 6881 - DNA, 20 bp, Artificial Sequence
  chemically synthesized
tgattattagatcctacttt

SEQ ID NO: 6882 - DNA, 20 bp, Artificial Sequence
  chemically synthesized
tactttgtggatttagtccc

SEQ ID NO: 6883 - DNA, 20 bp, Artificial Sequence
  chemically synthesized
tgttcctggtgaaccacagt

SEQ ID NO: 6884 - DNA, 20 bp, Artificial Sequence
  chemically synthesized
tgagattataaaatgcctta

SEQ ID NO: 6885 - DNA, 20 bp, Artificial Sequence
  chemically synthesized
cagaaacagaaaatagttcc

SEQ ID NO: 6886 - DNA, 20 bp, Artificial Sequence
  chemically synthesized
tttgcctgcaataggctata

SEQ ID NO: 6887 - DNA, 20 bp, Artificial Sequence
  chemically synthesized
ggaaaatatatttataagaa

SEQ ID NO: 6888 - DNA, 20 bp, Artificial Sequence
  chemically synthesized
tacacaacaaaatgacatgt

SEQ ID NO: 6889 - DNA, 20 bp, Artificial Sequence
  chemically synthesized
gtcataatagctttcccatc

SEQ ID NO: 6890 - DNA, 20 bp, Artificial Sequence
  chemically synthesized
tggtttattgtactgttata

SEQ ID NO: 6891 - DNA, 20 bp, Artificial Sequence
  chemically synthesized
tatatcttttctcctaaatg

SEQ ID NO: 6892 - DNA, 20 bp, Artificial Sequence
  chemically synthesized
tttctcctaaatggagaatt

SEQ ID NO: 6893 - DNA, 20 bp, Artificial Sequence
  chemically synthesized
ttaggagaaaagatatataa

SEQ ID NO: 6894 - DNA, 20 bp, Artificial Sequence
  chemically synthesized
agatatataacaatgtttac

SEQ ID NO: 6895 - DNA, 20 bp, Artificial Sequence
  chemically synthesized
acatcaagctgtccacatct

SEQ ID NO: 6896 - DNA, 20 bp, Artificial Sequence
  chemically synthesized
attttaaataaaatatttat

SEQ ID NO: 6897 - DNA, 20 bp, Artificial Sequence
  chemically synthesized
gaagtactcaaggaactatt

SEQ ID NO: 6898 - DNA, 20 bp, Artificial Sequence
  chemically synthesized
attttataatctcagagttg

SEQ ID NO: 6899 - DNA, 20 bp, Artificial Sequence
  chemically synthesized
atctgaacttgttccaagta

SEQ ID NO: 6900 - DNA, 20 bp, Artificial Sequence
  chemically synthesized
ataatcaattccaattaaac

SEQ ID NO: 6901 - DNA, 20 bp, Artificial Sequence
  chemically synthesized
aattgaaatcatttaaaggc

SEQ ID NO: 6902 - DNA, 20 bp, Artificial Sequence
  chemically synthesized
atttaaaggctctagttttc

SEQ ID NO: 6903 - DNA, 20 bp, Artificial Sequence
  chemically synthesized
caactatctgtaaaagccaa

SEQ ID NO: 6904 - DNA, 20 bp, Artificial Sequence
  chemically synthesized
caaaaaaacagtagttgtgg

SEQ ID NO: 6905 - DNA, 20 bp, Artificial Sequence
  chemically synthesized
ttctggagtatgatccaggg

SEQ ID NO: 6906 - DNA, 20 bp, Artificial Sequence
  chemically synthesized
ctgagctactttaccagcga

SEQ ID NO: 6907 - DNA, 20 bp, Artificial Sequence
  chemically synthesized
gcgatcatgattgtgatgga

SEQ ID NO: 6908 - DNA, 20 bp, Artificial Sequence
  chemically synthesized
caaagataaaagagtgtagg

SEQ ID NO: 6909 - DNA, 20 bp, Artificial Sequence
  chemically synthesized
aggtctatcttcaggttccg

SEQ ID NO: 6910 - DNA, 20 bp, Artificial Sequence
  chemically synthesized
tcaggttccgaagagattta

SEQ ID NO: 6911 - DNA, 20 bp, Artificial Sequence
  chemically synthesized
aaaacaaaaaaacaatgtac

SEQ ID NO: 6912 - DNA, 20 bp, Artificial Sequence
  chemically synthesized
caaaggtttttcttccgtgt

SEQ ID NO: 6913 - DNA, 20 bp, Artificial Sequence
  chemically synthesized
tctatatattttattagtgt

SEQ ID NO: 6914 - DNA, 20 bp, Artificial Sequence
  chemically synthesized
aagtacttctgagagataag

SEQ ID NO: 6915 - DNA, 20 bp, Artificial Sequence
  chemically synthesized
tgctcacattctactcgtac

SEQ ID NO: 6916 - DNA, 20 bp, Artificial Sequence
  chemically synthesized
agtttctatgacagtgttga

SEQ ID NO: 6917 - DNA, 20 bp, Artificial Sequence
  chemically synthesized
aacctacacctcctgggttc

SEQ ID NO: 6918 - DNA, 20 bp, Artificial Sequence
  chemically synthesized
tgcctcagcctcccaggtag

SEQ ID NO: 6919 - DNA, 20 bp, Artificial Sequence
  chemically synthesized
ttttgtatacttagtagaga

SEQ ID NO: 6920 - DNA, 20 bp, Artificial Sequence
  chemically synthesized
cacctcggactcccaaagtg

SEQ ID NO: 6921 - DNA, 20 bp, Artificial Sequence
  chemically synthesized
ccaccaggcccagacaatct

SEQ ID NO: 6922 - DNA, 20 bp, Artificial Sequence
  chemically synthesized
cagacaatctgacagttttt

SEQ ID NO: 6923 - DNA, 20 bp, Artificial Sequence
  chemically synthesized
cattctacttcagaatacat

SEQ ID NO: 6924 - DNA, 20 bp, Artificial Sequence
  chemically synthesized
aagctcctagaagatgagcc

SEQ ID NO: 6925 - DNA, 20 bp, Artificial Sequence
  chemically synthesized
tatgatgaggtggagagtgg

SEQ ID NO: 6926 - DNA, 20 bp, Artificial Sequence
  chemically synthesized
gagagtgggagggattttat

SEQ ID NO: 6927 - DNA, 20 bp, Artificial Sequence
  chemically synthesized
acataaggatctcattattt

SEQ ID NO: 6928 - DNA, 20 bp, Artificial Sequence
  chemically synthesized
tttcaaagctttatctatga

SEQ ID NO: 6929 - DNA, 20 bp, Artificial Sequence
  chemically synthesized
agaaataagttccatataat

SEQ ID NO: 6930 - DNA, 20 bp, Artificial Sequence
  chemically synthesized
atgttatttaaataagtaca

SEQ ID NO: 6931 - DNA, 20 bp, Artificial Sequence
  chemically synthesized
aaaacttacttgttataggt

SEQ ID NO: 6932 - DNA, 20 bp, Artificial Sequence
  chemically synthesized
ataggttaatgcttgaatta

SEQ ID NO: 6933 - DNA, 20 bp, Artificial Sequence
  chemically synthesized
aatgcttgaattaaaatgtt

SEQ ID NO: 6934 - DNA, 20 bp, Artificial Sequence
  chemically synthesized
ctacaaaaagcacctaataa

SEQ ID NO: 6935 - DNA, 20 bp, Artificial Sequence
  chemically synthesized
atatactctacataacataa

SEQ ID NO: 6936 - DNA, 20 bp, Artificial Sequence
  chemically synthesized
ctacataacataatagggtt

SEQ ID NO: 6937 - DNA, 20 bp, Artificial Sequence
  chemically synthesized
attatatctgtaaaagctaa

SEQ ID NO: 6938 - DNA, 20 bp, Artificial Sequence
  chemically synthesized
atacatgtaaaccaggaatt

SEQ ID NO: 6939 - DNA, 20 bp, Artificial Sequence
  chemically synthesized
tcaacatttacctgatccag

SEQ ID NO: 6940 - DNA, 20 bp, Artificial Sequence
  chemically synthesized
aggatatatttacattttac

SEQ ID NO: 6941 - DNA, 20 bp, Artificial Sequence
  chemically synthesized
aaatgtgaagaaaaatttga

SEQ ID NO: 6942 - DNA, 20 bp, Artificial Sequence
  chemically synthesized
tgagattagagaacacactc

SEQ ID NO: 6943 - DNA, 20 bp, Artificial Sequence
  chemically synthesized
cacactccgatgattatcca

SEQ ID NO: 6944 - DNA, 20 bp, Artificial Sequence
  chemically synthesized
agagaacatttagtaagagg

SEQ ID NO: 6945 - DNA, 20 bp, Artificial Sequence
  chemically synthesized
gaagcaaacaggaaggtagt

SEQ ID NO: 6946 - DNA, 20 bp, Artificial Sequence
  chemically synthesized
cttgggctctggaaagagaa

SEQ ID NO: 6947 - DNA, 20 bp, Artificial Sequence
  chemically synthesized
tgttaaaaaagaacatttcc

SEQ ID NO: 6948 - DNA, 20 bp, Artificial Sequence
  chemically synthesized
tttccatttgtttgtgtcat

SEQ ID NO: 6949 - DNA, 20 bp, Artificial Sequence
  chemically synthesized
tcatctctgatttctttcag

SEQ ID NO: 6950 - DNA, 20 bp, Artificial Sequence
  chemically synthesized
atctttcacctccctggtta

SEQ ID NO: 6951 - DNA, 20 bp, Artificial Sequence
  chemically synthesized
gctggattcctaggtatttt

SEQ ID NO: 6952 - DNA, 20 bp, Artificial Sequence
  chemically synthesized
tattgtgaatgggactgtgt

SEQ ID NO: 6953 - DNA, 20 bp, Artificial Sequence
  chemically synthesized
aaaactttgctgaaattttt

SEQ ID NO: 6954 - DNA, 20 bp, Artificial Sequence
  chemically synthesized
ctgaaatttttaacagattt

SEQ ID NO: 6955 - DNA, 20 bp, Artificial Sequence
  chemically synthesized
ggagtttctgggcagagact

SEQ ID NO: 6956 - DNA, 20 bp, Artificial Sequence
  chemically synthesized
ttatactgcctgcaaacaga

SEQ ID NO: 6957 - DNA, 20 bp, Artificial Sequence
  chemically synthesized
tgtctttctttctttctctt

SEQ ID NO: 6958 - DNA, 20 bp, Artificial Sequence
  chemically synthesized
cggttctcaaggagaatact

SEQ ID NO: 6959 - DNA, 20 bp, Artificial Sequence
  chemically synthesized
tgaggcatgttccttcaatg

SEQ ID NO: 6960 - DNA, 20 bp, Artificial Sequence
  chemically synthesized
gcatgttccttcaatgccta

SEQ ID NO: 6961 - DNA, 20 bp, Artificial Sequence
  chemically synthesized
tccttcaatgcctagtttgt

SEQ ID NO: 6962 - DNA, 20 bp, Artificial Sequence
  chemically synthesized
tcaatgcctagtttgtttag

SEQ ID NO: 6963 - DNA, 20 bp, Artificial Sequence
  chemically synthesized
cctagtttgtttaggattgt

SEQ ID NO: 6964 - DNA, 20 bp, Artificial Sequence
  chemically synthesized
tttttttttttttgtagaga

SEQ ID NO: 6965 - DNA, 20 bp, Artificial Sequence
  chemically synthesized
cctaggctcgtcttgaactc

SEQ ID NO: 6966 - DNA, 20 bp, Artificial Sequence
  chemically synthesized
cgccttggcctcccaaagtg

SEQ ID NO: 6967 - DNA, 20 bp, Artificial Sequence
  chemically synthesized
gtcactacacctgacctact

SEQ ID NO: 6968 - DNA, 20 bp, Artificial Sequence
  chemically synthesized
tctacctattgagataatct

SEQ ID NO: 6969 - DNA, 20 bp, Artificial Sequence
  chemically synthesized
tattgagataatcttgtggt

SEQ ID NO: 6970 - DNA, 20 bp, Artificial Sequence
  chemically synthesized
cttgtggtttttgtttttag

SEQ ID NO: 6971 - DNA, 20 bp, Artificial Sequence
  chemically synthesized
tttatgtgatgaatcacact

SEQ ID NO: 6972 - DNA, 20 bp, Artificial Sequence
  chemically synthesized
agcctacttgatcaaagtag

SEQ ID NO: 6973 - DNA, 20 bp, Artificial Sequence
  chemically synthesized
gatcagctttttgatgtgct

SEQ ID NO: 6974 - DNA, 20 bp, Artificial Sequence
  chemically synthesized
ctttttgatgtgctgctgga

SEQ ID NO: 6975 - DNA, 20 bp, Artificial Sequence
  chemically synthesized
ttggtttgctagtattttgt

SEQ ID NO: 6976 - DNA, 20 bp, Artificial Sequence
  chemically synthesized
attcatcaaggatattggcc

SEQ ID NO: 6977 - DNA, 20 bp, Artificial Sequence
  chemically synthesized
ttttttctgttgtgtctctg

SEQ ID NO: 6978 - DNA, 20 bp, Artificial Sequence
  chemically synthesized
cctcctcctcaattttttgg

SEQ ID NO: 6979 - DNA, 20 bp, Artificial Sequence
  chemically synthesized
acagattgagtaggaataat

SEQ ID NO: 6980 - DNA, 20 bp, Artificial Sequence
  chemically synthesized
ccatactgcccaaagcaatc

SEQ ID NO: 6981 - DNA, 20 bp, Artificial Sequence
  chemically synthesized
tccttcacaaaaccagaaaa

SEQ ID NO: 6982 - DNA, 20 bp, Artificial Sequence
  chemically synthesized
aaagctggaggcatcacatt

SEQ ID NO: 6983 - DNA, 20 bp, Artificial Sequence
  chemically synthesized
atatacaaaaatcaactcaa

SEQ ID NO: 6984 - DNA, 20 bp, Artificial Sequence
  chemically synthesized
attctggacataggccctgg

SEQ ID NO: 6985 - DNA, 20 bp, Artificial Sequence
  chemically synthesized
cagctaaaaagcatatgaaa

SEQ ID NO: 6986 - DNA, 20 bp, Artificial Sequence
  chemically synthesized
cactgctggcgggactgtaa

SEQ ID NO: 6987 - DNA, 20 bp, Artificial Sequence
  chemically synthesized
ttagtttagctattatgaaa

SEQ ID NO: 6988 - DNA, 20 bp, Artificial Sequence
  chemically synthesized
agctattatgaaaagcagtt

SEQ ID NO: 6989 - DNA, 20 bp, Artificial Sequence
  chemically synthesized
aaaaaactacctattgggta

SEQ ID NO: 6990 - DNA, 20 bp, Artificial Sequence
  chemically synthesized
atactattttttggacaatt

SEQ ID NO: 6991 - DNA, 20 bp, Artificial Sequence
  chemically synthesized
aatgagaatagctgtctaac

SEQ ID NO: 6992 - DNA, 20 bp, Artificial Sequence
  chemically synthesized
aaacaaacatagctggctaa

SEQ ID NO: 6993 - DNA, 20 bp, Artificial Sequence
  chemically synthesized
aagcactttaggaaaaaaga

SEQ ID NO: 6994 - DNA, 20 bp, Artificial Sequence
  chemically synthesized
aaaaagaaaatgtttcaagg

SEQ ID NO: 6995 - DNA, 20 bp, Artificial Sequence
  chemically synthesized
ttgaacaagatattcctatt

SEQ ID NO: 6996 - DNA, 20 bp, Artificial Sequence
  chemically synthesized
aggtctgttacctaagctca

SEQ ID NO: 6997 - DNA, 20 bp, Artificial Sequence
  chemically synthesized
tgattctgtagatacatagg

SEQ ID NO: 6998 - DNA, 20 bp, Artificial Sequence
  chemically synthesized
ggctcaaaagatcctcctgc

SEQ ID NO: 6999 - DNA, 20 bp, Artificial Sequence
  chemically synthesized
tgcctcagctttcggaatag

SEQ ID NO: 7000 - DNA, 20 bp, Artificial Sequence
  chemically synthesized
ttttttattttttgtagaga

SEQ ID NO: 7001 - DNA, 20 bp, Artificial Sequence
  chemically synthesized
aaagtatactataattcttt

SEQ ID NO: 7002 - DNA, 20 bp, Artificial Sequence
  chemically synthesized
ctgatttcagaacatctttt

SEQ ID NO: 7003 - DNA, 20 bp, Artificial Sequence
  chemically synthesized
acatcttttaagtgtttact

SEQ ID NO: 7004 - DNA, 20 bp, Artificial Sequence
  chemically synthesized
ttaagtgtttacttagggtt

SEQ ID NO: 7005 - DNA, 20 bp, Artificial Sequence
  chemically synthesized
tttacttagggttttaggat

SEQ ID NO: 7006 - DNA, 20 bp, Artificial Sequence
  chemically synthesized
tttccttttgaatttactgt

SEQ ID NO: 7007 - DNA, 20 bp, Artificial Sequence
  chemically synthesized
atgttccattaatatatttt

SEQ ID NO: 7008 - DNA, 20 bp, Artificial Sequence
  chemically synthesized
aaaagacttagaattacttc

SEQ ID NO: 7009 - DNA, 20 bp, Artificial Sequence
  chemically synthesized
aagaagaacatttaagaaaa

SEQ ID NO: 7010 - DNA, 20 bp, Artificial Sequence
  chemically synthesized
agaacatttaagaaaaaaat

SEQ ID NO: 7011 - DNA, 20 bp, Artificial Sequence
  chemically synthesized
taagaaaaaaatgcttgatt

SEQ ID NO: 7012 - DNA, 20 bp, Artificial Sequence
  chemically synthesized
tctttctttttaaatgcaac

SEQ ID NO: 7013 - DNA, 20 bp, Artificial Sequence
  chemically synthesized
ctttttaaatgcaacttctg

SEQ ID NO: 7014 - DNA, 20 bp, Artificial Sequence
  chemically synthesized
tcgtaaaagacacaatttca

SEQ ID NO: 7015 - DNA, 20 bp, Artificial Sequence
  chemically synthesized
cattacgtacaaatcaggag

SEQ ID NO: 7016 - DNA, 20 bp, Artificial Sequence
  chemically synthesized
gctcggatctcatgtatcta

SEQ ID NO: 7017 - DNA, 20 bp, Artificial Sequence
  chemically synthesized
tatgttcatgacagggtggc

SEQ ID NO: 7018 - DNA, 20 bp, Artificial Sequence
  chemically synthesized
gacttgccggaaaggcagca

SEQ ID NO: 7019 - DNA, 20 bp, Artificial Sequence
  chemically synthesized
acatgccaaacgatatgaat

SEQ ID NO: 7020 - DNA, 20 bp, Artificial Sequence
  chemically synthesized
ttttaattttaaaaaatggt

SEQ ID NO: 7021 - DNA, 20 bp, Artificial Sequence
  chemically synthesized
aagctattcatgagtgtgtg

SEQ ID NO: 7022 - DNA, 20 bp, Artificial Sequence
  chemically synthesized
acagaagtgttcagtatagc

SEQ ID NO: 7023 - DNA, 20 bp, Artificial Sequence
  chemically synthesized
gcatctatagatgaagttgt

SEQ ID NO: 7024 - DNA, 20 bp, Artificial Sequence
  chemically synthesized
aagtttgtgttgatattcaa

SEQ ID NO: 7025 - DNA, 20 bp, Artificial Sequence
  chemically synthesized
ttagaatctgctgtgaaaaa

SEQ ID NO: 7026 - DNA, 20 bp, Artificial Sequence
  chemically synthesized
aatattaacagtgggtattc

SEQ ID NO: 7027 - DNA, 20 bp, Artificial Sequence
  chemically synthesized
aaggtattttctggaaaact

SEQ ID NO: 7028 - DNA, 20 bp, Artificial Sequence
  chemically synthesized
taaatattttttcattagat

SEQ ID NO: 7029 - DNA, 20 bp, Artificial Sequence
  chemically synthesized
atgtataactcaaatagaaa

SEQ ID NO: 7030 - DNA, 20 bp, Artificial Sequence
  chemically synthesized
tagaaactacgtttccttta

SEQ ID NO: 7031 - DNA, 20 bp, Artificial Sequence
  chemically synthesized
actataattgaaataacaat

SEQ ID NO: 7032 - DNA, 20 bp, Artificial Sequence
  chemically synthesized
ataattgctaatttacattt

SEQ ID NO: 7033 - DNA, 20 bp, Artificial Sequence
  chemically synthesized
ttttagtacacatacatagg

SEQ ID NO: 7034 - DNA, 20 bp, Artificial Sequence
  chemically synthesized
ataggaattgcttaaatcct

SEQ ID NO: 7035 - DNA, 20 bp, Artificial Sequence
  chemically synthesized
aaatcctataagcttcttaa

SEQ ID NO: 7036 - DNA, 20 bp, Artificial Sequence
  chemically synthesized
gatcttatttttgatgtgca

SEQ ID NO: 7037 - DNA, 20 bp, Artificial Sequence
  chemically synthesized
ggaacacaaagggtattcta

SEQ ID NO: 7038 - DNA, 20 bp, Artificial Sequence
  chemically synthesized
gatacattaaatgctaatat

SEQ ID NO: 7039 - DNA, 20 bp, Artificial Sequence
  chemically synthesized
ttgtctataaagagtctcaa

SEQ ID NO: 7040 - DNA, 20 bp, Artificial Sequence
  chemically synthesized
ctcaaaaatgattttagaaa

SEQ ID NO: 7041 - DNA, 20 bp, Artificial Sequence
  chemically synthesized
agccctgactcatatttaaa

SEQ ID NO: 7042 - DNA, 20 bp, Artificial Sequence
  chemically synthesized
gactcatatttaaatgatga

SEQ ID NO: 7043 - DNA, 20 bp, Artificial Sequence
  chemically synthesized
aaaacatgaagtaaaaagac

SEQ ID NO: 7044 - DNA, 20 bp, Artificial Sequence
  chemically synthesized
atgaagtaaaaagaccactg

SEQ ID NO: 7045 - DNA, 20 bp, Artificial Sequence
  chemically synthesized
aatccatgggatgtaacagt

SEQ ID NO: 7046 - DNA, 20 bp, Artificial Sequence
  chemically synthesized
gtaacagttgttgcttaaaa

SEQ ID NO: 7047 - DNA, 20 bp, Artificial Sequence
  chemically synthesized
tgtggtcaaataaatttaga

SEQ ID NO: 7048 - DNA, 20 bp, Artificial Sequence
  chemically synthesized
ttatttgaccatgcaacttt

SEQ ID NO: 7049 - DNA, 20 bp, Artificial Sequence
  chemically synthesized
gaccatgcaacttttatagc

SEQ ID NO: 7050 - DNA, 20 bp, Artificial Sequence
  chemically synthesized
agaagagaattaattattga

SEQ ID NO: 7051 - DNA, 20 bp, Artificial Sequence
  chemically synthesized
taaaataagcaggtcattgg

SEQ ID NO: 7052 - DNA, 20 bp, Artificial Sequence
  chemically synthesized
tcattgggtgggatttagaa

SEQ ID NO: 7053 - DNA, 20 bp, Artificial Sequence
  chemically synthesized
cacagttattatgttaaagg

SEQ ID NO: 7054 - DNA, 20 bp, Artificial Sequence
  chemically synthesized
aagaggatggaggatgggaa

SEQ ID NO: 7055 - DNA, 20 bp, Artificial Sequence
  chemically synthesized
ggcagtcactctgtgcaacc

SEQ ID NO: 7056 - DNA, 20 bp, Artificial Sequence
  chemically synthesized
gagatcacagatggaaagcc

SEQ ID NO: 7057 - DNA, 20 bp, Artificial Sequence
  chemically synthesized
ctcatgtaaatatacaaagt

SEQ ID NO: 7058 - DNA, 20 bp, Artificial Sequence
  chemically synthesized
gtaaaactttttttaaaaaa

SEQ ID NO: 7059 - DNA, 20 bp, Artificial Sequence
  chemically synthesized
tgaagaaaagtgcaaaatcc

SEQ ID NO: 7060 - DNA, 20 bp, Artificial Sequence
  chemically synthesized
aaatcctttagtttattagc

SEQ ID NO: 7061 - DNA, 20 bp, Artificial Sequence
  chemically synthesized
cccaatagctccctagaagg

SEQ ID NO: 7062 - DNA, 20 bp, Artificial Sequence
  chemically synthesized
accaaaagtacatgactatc

SEQ ID NO: 7063 - DNA, 20 bp, Artificial Sequence
  chemically synthesized
aagagtaattttttttatat

SEQ ID NO: 7064 - DNA, 20 bp, Artificial Sequence
  chemically synthesized
agctatcaaaataaactgat

SEQ ID NO: 7065 - DNA, 20 bp, Artificial Sequence
  chemically synthesized
aaactgataaatgattctta

SEQ ID NO: 7066 - DNA, 20 bp, Artificial Sequence
  chemically synthesized
caaggtgtcttagcaatttg

SEQ ID NO: 7067 - DNA, 20 bp, Artificial Sequence
  chemically synthesized
cttaaagagtcaaatcattt

SEQ ID NO: 7068 - DNA, 20 bp, Artificial Sequence
  chemically synthesized
cctactacaacggaacagcc

SEQ ID NO: 7069 - DNA, 20 bp, Artificial Sequence
  chemically synthesized
tggcactgtaagttaaagaa

SEQ ID NO: 7070 - DNA, 20 bp, Artificial Sequence
  chemically synthesized
gagctcttcaaataactcag

SEQ ID NO: 7071 - DNA, 20 bp, Artificial Sequence
  chemically synthesized
gctgaagaaattgacatgta

SEQ ID NO: 7072 - DNA, 20 bp, Artificial Sequence
  chemically synthesized
agtgacttacttaaagtcaa

SEQ ID NO: 7073 - DNA, 20 bp, Artificial Sequence
  chemically synthesized
actgaacagatacaggacta

SEQ ID NO: 7074 - DNA, 20 bp, Artificial Sequence
  chemically synthesized
cagatacaggactaaagtgc

SEQ ID NO: 7075 - DNA, 20 bp, Artificial Sequence
  chemically synthesized
gttagctatgagctattatt

SEQ ID NO: 7076 - DNA, 20 bp, Artificial Sequence
  chemically synthesized
tatgttccaggcactgttct

SEQ ID NO: 7077 - DNA, 20 bp, Artificial Sequence
  chemically synthesized
tttatattatttatcttact

SEQ ID NO: 7078 - DNA, 20 bp, Artificial Sequence
  chemically synthesized
cacagcattaatccagggag

SEQ ID NO: 7079 - DNA, 20 bp, Artificial Sequence
  chemically synthesized
ctacagtacaacttaatatg

SEQ ID NO: 7080 - DNA, 20 bp, Artificial Sequence
  chemically synthesized
acttaatatgaaaggattct

SEQ ID NO: 7081 - DNA, 20 bp, Artificial Sequence
  chemically synthesized
aaccagaatcaagcaagggg

SEQ ID NO: 7082 - DNA, 20 bp, Artificial Sequence
  chemically synthesized
tttcttgtctgggatggaaa

SEQ ID NO: 7083 - DNA, 20 bp, Artificial Sequence
  chemically synthesized
ataggtgagcataagatggt

SEQ ID NO: 7084 - DNA, 20 bp, Artificial Sequence
  chemically synthesized
ataagatggtatctgcttca

SEQ ID NO: 7085 - DNA, 20 bp, Artificial Sequence
  chemically synthesized
tgaaataacacttttaatat

SEQ ID NO: 7086 - DNA, 20 bp, Artificial Sequence
  chemically synthesized
aatatacaagttttcggaag

SEQ ID NO: 7087 - DNA, 20 bp, Artificial Sequence
  chemically synthesized
caaaatcagaaaacaacaag

SEQ ID NO: 7088 - DNA, 20 bp, Artificial Sequence
  chemically synthesized
tatctcttaacactcatagt

SEQ ID NO: 7089 - DNA, 20 bp, Artificial Sequence
  chemically synthesized
tgattcaaaacgtcctcaac

SEQ ID NO: 7090 - DNA, 20 bp, Artificial Sequence
  chemically synthesized
taatggttactactttggca

SEQ ID NO: 7091 - DNA, 20 bp, Artificial Sequence
  chemically synthesized
gttactactttggcacacag

SEQ ID NO: 7092 - DNA, 20 bp, Artificial Sequence
  chemically synthesized
tcatcactgatcaaaaatgc

SEQ ID NO: 7093 - DNA, 20 bp, Artificial Sequence
  chemically synthesized
cctctgttttgccataaaat

SEQ ID NO: 7094 - DNA, 20 bp, Artificial Sequence
  chemically synthesized
cataaaatccaggattttgt

SEQ ID NO: 7095 - DNA, 20 bp, Artificial Sequence
  chemically synthesized
tctatttcttcaggaacact

SEQ ID NO: 7096 - DNA, 20 bp, Artificial Sequence
  chemically synthesized
aacaagtctactacatgtct

SEQ ID NO: 7097 - DNA, 20 bp, Artificial Sequence
  chemically synthesized
ttctttttttttttttgaga

SEQ ID NO: 7098 - DNA, 20 bp, Artificial Sequence
  chemically synthesized
tttttttttttgagatggag

SEQ ID NO: 7099 - DNA, 20 bp, Artificial Sequence
  chemically synthesized
taggtgccgccaccatgccc

SEQ ID NO: 7100 - DNA, 20 bp, Artificial Sequence
  chemically synthesized
ttttgtatttttagtagaga

SEQ ID NO: 7101 - DNA, 20 bp, Artificial Sequence
  chemically synthesized
tctttagagagtatggaatc

SEQ ID NO: 7102 - DNA, 20 bp, Artificial Sequence
  chemically synthesized
agagtatggaatcattggtt

SEQ ID NO: 7103 - DNA, 20 bp, Artificial Sequence
  chemically synthesized
ttatcgtttactgttacatg

SEQ ID NO: 7104 - DNA, 20 bp, Artificial Sequence
  chemically synthesized
tcactaccaccaccagtctc

SEQ ID NO: 7105 - DNA, 20 bp, Artificial Sequence
  chemically synthesized
tttaagatgaatttaatact

SEQ ID NO: 7106 - DNA, 20 bp, Artificial Sequence
  chemically synthesized
ttttcctcacttattttatg

SEQ ID NO: 7107 - DNA, 20 bp, Artificial Sequence
  chemically synthesized
ccatttttggagtaacctta

SEQ ID NO: 7108 - DNA, 20 bp, Artificial Sequence
  chemically synthesized
ttcagagccccatattatta

SEQ ID NO: 7109 - DNA, 20 bp, Artificial Sequence
  chemically synthesized
ttaaatgtgatgctacttct

SEQ ID NO: 7110 - DNA, 20 bp, Artificial Sequence
  chemically synthesized
atgcccatttgcataatgct

SEQ ID NO: 7111 - DNA, 20 bp, Artificial Sequence
  chemically synthesized
aacctccacaactaactatt

SEQ ID NO: 7112 - DNA, 20 bp, Artificial Sequence
  chemically synthesized
acaactaactattcactgtt

SEQ ID NO: 7113 - DNA, 20 bp, Artificial Sequence
  chemically synthesized
tttaaagtaataattatcat

SEQ ID NO: 7114 - DNA, 20 bp, Artificial Sequence
  chemically synthesized
cagatgacagctacaactga

SEQ ID NO: 7115 - DNA, 20 bp, Artificial Sequence
  chemically synthesized
ttgttcaaaataaagtcgtt

SEQ ID NO: 7116 - DNA, 20 bp, Artificial Sequence
  chemically synthesized
ttttgggaaaatatttcctc

SEQ ID NO: 7117 - DNA, 20 bp, Artificial Sequence
  chemically synthesized
aggctctaaaagaaaatctc

SEQ ID NO: 7118 - DNA, 20 bp, Artificial Sequence
  chemically synthesized
taatagtagtcaacttaagt

SEQ ID NO: 7119 - DNA, 20 bp, Artificial Sequence
  chemically synthesized
agtcaacttaagtaaaggtt

SEQ ID NO: 7120 - DNA, 20 bp, Artificial Sequence
  chemically synthesized
aagcagaattttagttggtt

SEQ ID NO: 7121 - DNA, 20 bp, Artificial Sequence
  chemically synthesized
ctaagtttcctcaacttgcg

SEQ ID NO: 7122 - DNA, 20 bp, Artificial Sequence
  chemically synthesized
agttaccccattcctgggga

SEQ ID NO: 7123 - DNA, 20 bp, Artificial Sequence
  chemically synthesized
tattgaccagcaaataagga

SEQ ID NO: 7124 - DNA, 20 bp, Artificial Sequence
  chemically synthesized
tattatggccatgtattttc

SEQ ID NO: 7125 - DNA, 20 bp, Artificial Sequence
  chemically synthesized
agcaaagaaaggcaaaacag

SEQ ID NO: 7126 - DNA, 20 bp, Artificial Sequence
  chemically synthesized
aacagccatgtttaaaatat

SEQ ID NO: 7127 - DNA, 20 bp, Artificial Sequence
  chemically synthesized
gtgaagaactctttcttcac

SEQ ID NO: 7128 - DNA, 20 bp, Artificial Sequence
  chemically synthesized
attctccttcaaaagaactt

SEQ ID NO: 7129 - DNA, 20 bp, Artificial Sequence
  chemically synthesized
ttacagtgaaatagtctgta

SEQ ID NO: 7130 - DNA, 20 bp, Artificial Sequence
  chemically synthesized
gggaagccacacccttgtaa

SEQ ID NO: 7131 - DNA, 20 bp, Artificial Sequence
  chemically synthesized
tagatgcaattactattttc

SEQ ID NO: 7132 - DNA, 20 bp, Artificial Sequence
  chemically synthesized
aattactattttcctttgtt

SEQ ID NO: 7133 - DNA, 20 bp, Artificial Sequence
  chemically synthesized
ttgtttactgatttaactct

SEQ ID NO: 7134 - DNA, 20 bp, Artificial Sequence
  chemically synthesized
ttaagatatggaaatcttcc

SEQ ID NO: 7135 - DNA, 20 bp, Artificial Sequence
  chemically synthesized
acctccataaaagctccatt

SEQ ID NO: 7136 - DNA, 20 bp, Artificial Sequence
  chemically synthesized
acaacccacaacattttgat

SEQ ID NO: 7137 - DNA, 20 bp, Artificial Sequence
  chemically synthesized
aacagtcaatgtaacatctg

SEQ ID NO: 7138 - DNA, 20 bp, Artificial Sequence
  chemically synthesized
tttcaaattaaacattatga

SEQ ID NO: 7139 - DNA, 20 bp, Artificial Sequence
  chemically synthesized
taaacattatgatgttgttt

SEQ ID NO: 7140 - DNA, 20 bp, Artificial Sequence
  chemically synthesized
tgatgttgtttaaaagattc

SEQ ID NO: 7141 - DNA, 20 bp, Artificial Sequence
  chemically synthesized
taaaagattctcctgatttt

SEQ ID NO: 7142 - DNA, 20 bp, Artificial Sequence
  chemically synthesized
caaaagccttttaaaactgg

SEQ ID NO: 7143 - DNA, 20 bp, Artificial Sequence
  chemically synthesized
atagcattatatattcaact

SEQ ID NO: 7144 - DNA, 20 bp, Artificial Sequence
  chemically synthesized
ttaggaaaacaataatttct

SEQ ID NO: 7145 - DNA, 20 bp, Artificial Sequence
  chemically synthesized
agaccaaaggctacatgacc

SEQ ID NO: 7146 - DNA, 20 bp, Artificial Sequence
  chemically synthesized
ccaagaagaatccagggtct

SEQ ID NO: 7147 - DNA, 20 bp, Artificial Sequence
  chemically synthesized
ctaaaagtttctttatttgt

SEQ ID NO: 7148 - DNA, 20 bp, Artificial Sequence
  chemically synthesized
gtttctttatttgtctaagc

SEQ ID NO: 7149 - DNA, 20 bp, Artificial Sequence
  chemically synthesized
aatgcaaaataaataacatt

SEQ ID NO: 7150 - DNA, 20 bp, Artificial Sequence
  chemically synthesized
cactgcatataattaaaaaa

SEQ ID NO: 7151 - DNA, 20 bp, Artificial Sequence
  chemically synthesized
agatttatatgtaccagaaa

SEQ ID NO: 7152 - DNA, 20 bp, Artificial Sequence
  chemically synthesized
agctttcaacagataggtta

SEQ ID NO: 7153 - DNA, 20 bp, Artificial Sequence
  chemically synthesized
atgcatccatattcttcctt

SEQ ID NO: 7154 - DNA, 20 bp, Artificial Sequence
  chemically synthesized
atatgtgctgcgatccccat

SEQ ID NO: 7155 - DNA, 20 bp, Artificial Sequence
  chemically synthesized
atccccattccagtttccat

SEQ ID NO: 7156 - DNA, 20 bp, Artificial Sequence
  chemically synthesized
agcaccactctctgcatttc

SEQ ID NO: 7157 - DNA, 20 bp, Artificial Sequence
  chemically synthesized
gcaaaagtagctgctaataa

SEQ ID NO: 7158 - DNA, 20 bp, Artificial Sequence
  chemically synthesized
taaacaatgacatatgaaac

SEQ ID NO: 7159 - DNA, 20 bp, Artificial Sequence
  chemically synthesized
aagatatccatcaaaacccc

SEQ ID NO: 7160 - DNA, 20 bp, Artificial Sequence
  chemically synthesized
ccccaaatgatttagacata

SEQ ID NO: 7161 - DNA, 20 bp, Artificial Sequence
  chemically synthesized
tagcacagtaggtgcacatt

SEQ ID NO: 7162 - DNA, 20 bp, Artificial Sequence
  chemically synthesized
ttcaaagaaataacttaaaa

SEQ ID NO: 7163 - DNA, 20 bp, Artificial Sequence
  chemically synthesized
atgtgcaattctagtatgac

SEQ ID NO: 7164 - DNA, 20 bp, Artificial Sequence
  chemically synthesized
tcatgttaaaatggggtcat

SEQ ID NO: 7165 - DNA, 20 bp, Artificial Sequence
  chemically synthesized
ggggcctaatccaataactg

SEQ ID NO: 7166 - DNA, 20 bp, Artificial Sequence
  chemically synthesized
aactgctgtgtttataagga

SEQ ID NO: 7167 - DNA, 20 bp, Artificial Sequence
  chemically synthesized
tgtgaagacaaaaggcagat

SEQ ID NO: 7168 - DNA, 20 bp, Artificial Sequence
  chemically synthesized
acaaggcaagaaaggaacac

SEQ ID NO: 7169 - DNA, 20 bp, Artificial Sequence
  chemically synthesized
agatcatgcccctgtcaaca

SEQ ID NO: 7170 - DNA, 20 bp, Artificial Sequence
  chemically synthesized
caacactttgatttcggact

SEQ ID NO: 7171 - DNA, 20 bp, Artificial Sequence
  chemically synthesized
attgtgagagaataaattgc

SEQ ID NO: 7172 - DNA, 20 bp, Artificial Sequence
  chemically synthesized
attgctgttgtttaaagcca

SEQ ID NO: 7173 - DNA, 20 bp, Artificial Sequence
  chemically synthesized
gtttaaagccactcagtttg

SEQ ID NO: 7174 - DNA, 20 bp, Artificial Sequence
  chemically synthesized
agaatactgaagcccgatcc

SEQ ID NO: 7175 - DNA, 20 bp, Artificial Sequence
  chemically synthesized
acactaaatggctagaattt

SEQ ID NO: 7176 - DNA, 20 bp, Artificial Sequence
  chemically synthesized
aaatacagttatgtgccatg

SEQ ID NO: 7177 - DNA, 20 bp, Artificial Sequence
  chemically synthesized
gcatatatgatggtagtccc

SEQ ID NO: 7178 - DNA, 20 bp, Artificial Sequence
  chemically synthesized
tgataataaactactacatt

SEQ ID NO: 7179 - DNA, 20 bp, Artificial Sequence
  chemically synthesized
ctatgcctaggtgaaagtgt

SEQ ID NO: 7180 - DNA, 20 bp, Artificial Sequence
  chemically synthesized
ctaggtgaaagtgtgtgtgt

SEQ ID NO: 7181 - DNA, 20 bp, Artificial Sequence
  chemically synthesized
atttaaaatagaaaatagaa

SEQ ID NO: 7182 - DNA, 20 bp, Artificial Sequence
  chemically synthesized
tgtatagctatacaatgtat

SEQ ID NO: 7183 - DNA, 20 bp, Artificial Sequence
  chemically synthesized
ttttaaaagttaaaaaatta

SEQ ID NO: 7184 - DNA, 20 bp, Artificial Sequence
  chemically synthesized
aactgttaagataaatttgg

SEQ ID NO: 7185 - DNA, 20 bp, Artificial Sequence
  chemically synthesized
tttggtgtagcttcagcgta

SEQ ID NO: 7186 - DNA, 20 bp, Artificial Sequence
  chemically synthesized
atacttttactgtacctttt

SEQ ID NO: 7187 - DNA, 20 bp, Artificial Sequence
  chemically synthesized
ttcagtacagtaacagttgt

SEQ ID NO: 7188 - DNA, 20 bp, Artificial Sequence
  chemically synthesized
gtacataaaggctatactat

SEQ ID NO: 7189 - DNA, 20 bp, Artificial Sequence
  chemically synthesized
gtttgtgtaagtacactcta

SEQ ID NO: 7190 - DNA, 20 bp, Artificial Sequence
  chemically synthesized
atgatgcattcctaagcaat

SEQ ID NO: 7191 - DNA, 20 bp, Artificial Sequence
  chemically synthesized
atgatatacctatctttgcc

SEQ ID NO: 7192 - DNA, 20 bp, Artificial Sequence
  chemically synthesized
tatacctatctttgccatat

SEQ ID NO: 7193 - DNA, 20 bp, Artificial Sequence
  chemically synthesized
ctatttacagagcattagat

SEQ ID NO: 7194 - DNA, 20 bp, Artificial Sequence
  chemically synthesized
cagaaatggttgaacacaac

SEQ ID NO: 7195 - DNA, 20 bp, Artificial Sequence
  chemically synthesized
acagcactagatataagccg

SEQ ID NO: 7196 - DNA, 20 bp, Artificial Sequence
  chemically synthesized
tacagcttctttaaaatatc

SEQ ID NO: 7197 - DNA, 20 bp, Artificial Sequence
  chemically synthesized
tttttaatacaatgtaagca

SEQ ID NO: 7198 - DNA, 20 bp, Artificial Sequence
  chemically synthesized
gaactgaaccctggagcaaa

SEQ ID NO: 7199 - DNA, 20 bp, Artificial Sequence
  chemically synthesized
gaaggacaaagatcatactg

SEQ ID NO: 7200 - DNA, 20 bp, Artificial Sequence
  chemically synthesized
acaaagatcatactgaattg

SEQ ID NO: 7201 - DNA, 20 bp, Artificial Sequence
  chemically synthesized
aaaatcagctcaaaaccaat

SEQ ID NO: 7202 - DNA, 20 bp, Artificial Sequence
  chemically synthesized
agccagtcttttgagggaag

SEQ ID NO: 7203 - DNA, 20 bp, Artificial Sequence
  chemically synthesized
agattcaaattgagtgagac

SEQ ID NO: 7204 - DNA, 20 bp, Artificial Sequence
  chemically synthesized
gcttgctcacagggttcatg

SEQ ID NO: 7205 - DNA, 20 bp, Artificial Sequence
  chemically synthesized
aaataatcccatacatgcag

SEQ ID NO: 7206 - DNA, 20 bp, Artificial Sequence
  chemically synthesized
ctaaaactgttagtagagtg

SEQ ID NO: 7207 - DNA, 20 bp, Artificial Sequence
  chemically synthesized
tgttagtagagtgctaagtt

SEQ ID NO: 7208 - DNA, 20 bp, Artificial Sequence
  chemically synthesized
gtagagtgctaagtttgagg

SEQ ID NO: 7209 - DNA, 20 bp, Artificial Sequence
  chemically synthesized
taaaaaatcaaccatctctt

SEQ ID NO: 7210 - DNA, 20 bp, Artificial Sequence
  chemically synthesized
acaatcataaagccctcact

SEQ ID NO: 7211 - DNA, 20 bp, Artificial Sequence
  chemically synthesized
cttgttttttagagacaggg

SEQ ID NO: 7212 - DNA, 20 bp, Artificial Sequence
  chemically synthesized
gtgcacatcaccacgcccgg

SEQ ID NO: 7213 - DNA, 20 bp, Artificial Sequence
  chemically synthesized
cagggtctacgttgcccagg

SEQ ID NO: 7214 - DNA, 20 bp, Artificial Sequence
  chemically synthesized
gcccaggttgagcttgaact

SEQ ID NO: 7215 - DNA, 20 bp, Artificial Sequence
  chemically synthesized
gctctcaatacttgtaacca

SEQ ID NO: 7216 - DNA, 20 bp, Artificial Sequence
  chemically synthesized
ggaccacttcaaggacagtg

SEQ ID NO: 7217 - DNA, 20 bp, Artificial Sequence
  chemically synthesized
tctggccatttctcacagtt

SEQ ID NO: 7218 - DNA, 20 bp, Artificial Sequence
  chemically synthesized
cttgaaaaacagaagtcctc

SEQ ID NO: 7219 - DNA, 20 bp, Artificial Sequence
  chemically synthesized
cagaagtcctccttggttta

SEQ ID NO: 7220 - DNA, 20 bp, Artificial Sequence
  chemically synthesized
aatattttatcaacttcata

SEQ ID NO: 7221 - DNA, 20 bp, Artificial Sequence
  chemically synthesized
ttttcctggagcaggtaaat

SEQ ID NO: 7222 - DNA, 20 bp, Artificial Sequence
  chemically synthesized
aatgtggtaattactctcgt

SEQ ID NO: 7223 - DNA, 20 bp, Artificial Sequence
  chemically synthesized
cagatgtactatcagcatgt

SEQ ID NO: 7224 - DNA, 20 bp, Artificial Sequence
  chemically synthesized
atcagcatgtagcagtttcc

SEQ ID NO: 7225 - DNA, 20 bp, Artificial Sequence
  chemically synthesized
gtagcagtttccaactgatt

SEQ ID NO: 7226 - DNA, 20 bp, Artificial Sequence
  chemically synthesized
taatatcccctatatgatag

SEQ ID NO: 7227 - DNA, 20 bp, Artificial Sequence
  chemically synthesized
agtcttgtttctgtgatatt

SEQ ID NO: 7228 - DNA, 20 bp, Artificial Sequence
  chemically synthesized
tgatattcacagattatgtt

SEQ ID NO: 7229 - DNA, 20 bp, Artificial Sequence
  chemically synthesized
caaaagtagaagtaatgcca

SEQ ID NO: 7230 - DNA, 20 bp, Artificial Sequence
  chemically synthesized
gtgaacaactggtgcatggc

SEQ ID NO: 7231 - DNA, 20 bp, Artificial Sequence
  chemically synthesized
actctcccagagcctaacaa

SEQ ID NO: 7232 - DNA, 20 bp, Artificial Sequence
  chemically synthesized
gggaaagtgcaggacctccc

SEQ ID NO: 7233 - DNA, 20 bp, Artificial Sequence
  chemically synthesized
atctgtgcacttctttagac

SEQ ID NO: 7234 - DNA, 20 bp, Artificial Sequence
  chemically synthesized
gcaagtcatcaccactctct

SEQ ID NO: 7235 - DNA, 20 bp, Artificial Sequence
  chemically synthesized
ctagaggcgaaagcccgaca

SEQ ID NO: 7236 - DNA, 20 bp, Artificial Sequence
  chemically synthesized
cgtcgagctctgaggagagc

SEQ ID NO: 7237 - DNA, 20 bp, Artificial Sequence
  chemically synthesized
agcgcgcgactcctgagttc

SEQ ID NO: 7238 - DNA, 20 bp, Artificial Sequence
  chemically synthesized
cagagcttgctacaggctgc

SEQ ID NO: 7239 - DNA, 20 bp, Artificial Sequence
  chemically synthesized
caggctgcggttgtttccct

SEQ ID NO: 7240 - DNA, 20 bp, Artificial Sequence
  chemically synthesized
tttacgtgggcggaacttgt

SEQ ID NO: 7241 - DNA, 20 bp, Artificial Sequence
  chemically synthesized
ggacaccgtaggttacgtct

SEQ ID NO: 7242 - DNA, 20 bp, Artificial Sequence
  chemically synthesized
tgtctgttttctatgtgcga

SEQ ID NO: 7243 - DNA, 20 bp, Artificial Sequence
  chemically synthesized
gctggatctggagaaagtga

SEQ ID NO: 7244 - DNA, 20 bp, Artificial Sequence
  chemically synthesized
ggagaaagtgaagacgattt

SEQ ID NO: 7245 - DNA, 20 bp, Artificial Sequence
  chemically synthesized
aagacgatttcgtggttttg

SEQ ID NO: 7246 - DNA, 20 bp, Artificial Sequence
  chemically synthesized
gatttcgtggttttgaatgg

SEQ ID NO: 7247 - DNA, 20 bp, Artificial Sequence
  chemically synthesized
gtggttttgaatggttttgt

SEQ ID NO: 7248 - DNA, 20 bp, Artificial Sequence
  chemically synthesized
cacataattggtggatgaaa

SEQ ID NO: 7249 - DNA, 20 bp, Artificial Sequence
  chemically synthesized
acatgtaagaattctctcaa

SEQ ID NO: 7250 - DNA, 20 bp, Artificial Sequence
  chemically synthesized
ctagttgcaatatgtggatg

SEQ ID NO: 7251 - DNA, 20 bp, Artificial Sequence
  chemically synthesized
aacttttgaaaaacgtacca

SEQ ID NO: 7252 - DNA, 20 bp, Artificial Sequence
  chemically synthesized
tgtttgatgtgtaaaaaaca

SEQ ID NO: 7253 - DNA, 20 bp, Artificial Sequence
  chemically synthesized
cgtcttttggtctgcaggtg

SEQ ID NO: 7254 - DNA, 20 bp, Artificial Sequence
  chemically synthesized
actcagatgtgtaaaaaaac

SEQ ID NO: 7255 - DNA, 20 bp, Artificial Sequence
  chemically synthesized
tcatcactaaaaatcacaca

SEQ ID NO: 7256 - DNA, 20 bp, Artificial Sequence
  chemically synthesized
cagacccttttcctactgtt

SEQ ID NO: 7257 - DNA, 20 bp, Artificial Sequence
  chemically synthesized
actgcccgttgtgacctgag

SEQ ID NO: 7258 - DNA, 20 bp, Artificial Sequence
  chemically synthesized
cccaaataaatcacttaatt

SEQ ID NO: 7259 - DNA, 20 bp, Artificial Sequence
  chemically synthesized
tctgtatttttattttgact

SEQ ID NO: 7260 - DNA, 20 bp, Artificial Sequence
  chemically synthesized
taacaagtagctagcattta

SEQ ID NO: 7261 - DNA, 20 bp, Artificial Sequence
  chemically synthesized
acagagtagacccttggttg

SEQ ID NO: 7262 - DNA, 20 bp, Artificial Sequence
  chemically synthesized
gcagttacgtctaatacatc

SEQ ID NO: 7263 - DNA, 20 bp, Artificial Sequence
  chemically synthesized
aaactgggtaatttataaag

SEQ ID NO: 7264 - DNA, 20 bp, Artificial Sequence
  chemically synthesized
tgtacaagaagcatggctgg

SEQ ID NO: 7265 - DNA, 20 bp, Artificial Sequence
  chemically synthesized
agagaaatgggaggtgctac

SEQ ID NO: 7266 - DNA, 20 bp, Artificial Sequence
  chemically synthesized
ccaggcccaacctccaacac

SEQ ID NO: 7267 - DNA, 20 bp, Artificial Sequence
  chemically synthesized
actggggattacagttgaac

SEQ ID NO: 7268 - DNA, 20 bp, Artificial Sequence
  chemically synthesized
ttttgcaatatgagaaggac

SEQ ID NO: 7269 - DNA, 20 bp, Artificial Sequence
  chemically synthesized
aggggccagagttggaataa

SEQ ID NO: 7270 - DNA, 20 bp, Artificial Sequence
  chemically synthesized
gttgggcctggtgggaggtg

SEQ ID NO: 7271 - DNA, 20 bp, Artificial Sequence
  chemically synthesized
gggaggtgagtggattatgg

SEQ ID NO: 7272 - DNA, 20 bp, Artificial Sequence
  chemically synthesized
tggattatggggtggcttct

SEQ ID NO: 7273 - DNA, 20 bp, Artificial Sequence
  chemically synthesized
agtgagttctgacaagatct

SEQ ID NO: 7274 - DNA, 20 bp, Artificial Sequence
  chemically synthesized
gggtctccctatgccttcca

SEQ ID NO: 7275 - DNA, 20 bp, Artificial Sequence
  chemically synthesized
ctgcccagaagctgatccag

SEQ ID NO: 7276 - DNA, 20 bp, Artificial Sequence
  chemically synthesized
aaacttttctttataaatta

SEQ ID NO: 7277 - DNA, 20 bp, Artificial Sequence
  chemically synthesized
gccccccaaccaagggtcta

SEQ ID NO: 7278 - DNA, 20 bp, Artificial Sequence
  chemically synthesized
tactctgtttctataaattc

SEQ ID NO: 7279 - DNA, 20 bp, Artificial Sequence
  chemically synthesized
cagagatgaatctctaaatt

SEQ ID NO: 7280 - DNA, 20 bp, Artificial Sequence
  chemically synthesized
ccacacaacaaagaaaaggg

SEQ ID NO: 7281 - DNA, 20 bp, Artificial Sequence
  chemically synthesized
attaaggatctgaggagctg

SEQ ID NO: 7282 - DNA, 20 bp, Artificial Sequence
  chemically synthesized
ggagcagtgtcatttgtcct

SEQ ID NO: 7283 - DNA, 20 bp, Artificial Sequence
  chemically synthesized
catagaacagtaggaaaagg

SEQ ID NO: 7284 - DNA, 20 bp, Artificial Sequence
  chemically synthesized
tcctccctttcttcctcggt

SEQ ID NO: 7285 - DNA, 20 bp, Artificial Sequence
  chemically synthesized
gtgaatgattaaaacgttct

SEQ ID NO: 7286 - DNA, 20 bp, Artificial Sequence
  chemically synthesized
tgtgtgatttttagtgatga

SEQ ID NO: 7287 - DNA, 20 bp, Artificial Sequence
  chemically synthesized
cacttgcagatcaaaaggca

SEQ ID NO: 7288 - DNA, 20 bp, Artificial Sequence
  chemically synthesized
aggcacacagtttaaaaaac

SEQ ID NO: 7289 - DNA, 20 bp, Artificial Sequence
  chemically synthesized
cacctgcagaccaaaagacg

SEQ ID NO: 7290 - DNA, 20 bp, Artificial Sequence
  chemically synthesized
acgcaaggtttcaaaaatct

SEQ ID NO: 7291 - DNA, 20 bp, Artificial Sequence
  chemically synthesized
tttacacatcaaacagaatg

SEQ ID NO: 7292 - DNA, 20 bp, Artificial Sequence
  chemically synthesized
gacattccccagtgtgaaaa

SEQ ID NO: 7293 - DNA, 20 bp, Artificial Sequence
  chemically synthesized
cgatgactttgcaggggacc

SEQ ID NO: 7294 - DNA, 20 bp, Artificial Sequence
  chemically synthesized
gtgccggagctgtcccctac

SEQ ID NO: 7295 - DNA, 20 bp, Artificial Sequence
  chemically synthesized
tcccctaccagggtttgcag

SEQ ID NO: 7296 - DNA, 20 bp, Artificial Sequence
  chemically synthesized
agttccgcccacgtaaaaga

SEQ ID NO: 7297 - DNA, 20 bp, Artificial Sequence
  chemically synthesized
gtcagccgtccctgctgccc

SEQ ID NO: 7298 - DNA, 20 bp, Artificial Sequence
  chemically synthesized
ggggtctagcaagagcaggt

SEQ ID NO: 7299 - DNA, 20 bp, Artificial Sequence
  chemically synthesized
caggtgtgggtttaggaggt

SEQ ID NO: 7300 - DNA, 20 bp, Artificial Sequence
  chemically synthesized
tgggtttaggaggtgtgtgt

SEQ ID NO: 7301 - DNA, 20 bp, Artificial Sequence
  chemically synthesized
gtgaacaagaaaagacctga

SEQ ID NO: 7302 - DNA, 20 bp, Artificial Sequence
  chemically synthesized
gaggcggcatcctggcgggt

SEQ ID NO: 7303 - DNA, 20 bp, Artificial Sequence
  chemically synthesized
tctctgaccgaagctgggtg

SEQ ID NO: 7304 - DNA, 20 bp, Artificial Sequence
  chemically synthesized
gaattgcctgcatccgggcc

SEQ ID NO: 7305 - DNA, 20 bp, Artificial Sequence
  chemically synthesized
ggatggggatctggcctctt

SEQ ID NO: 7306 - DNA, 20 bp, Artificial Sequence
  chemically synthesized
aggccggagggtgggcggcg

SEQ ID NO: 7307 - DNA, 20 bp, Artificial Sequence
  chemically synthesized
gacgcctgcacaatttcagc

SEQ ID NO: 7308 - DNA, 20 bp, Artificial Sequence
  chemically synthesized
cattctgtgggacatgacct

SEQ ID NO: 7309 - DNA, 20 bp, Artificial Sequence
  chemically synthesized
acagctccgagatgacacag

SEQ ID NO: 7310 - DNA, 20 bp, Artificial Sequence
  chemically synthesized
atcagttgtctaaagaagtg

SEQ ID NO: 7311 - DNA, 20 bp, Artificial Sequence
  chemically synthesized
tctggccgcgttgaacacca

SEQ ID NO: 7312 - DNA, 20 bp, Artificial Sequence
  chemically synthesized
ggtggccctttcagatgcaa

SEQ ID NO: 7313 - DNA, 20 bp, Artificial Sequence
  chemically synthesized
aaaaaaaagatactgttaag

SEQ ID NO: 7314 - DNA, 20 bp, Artificial Sequence
  chemically synthesized
aacgagagtaattaccacat

SEQ ID NO: 7315 - DNA, 20 bp, Artificial Sequence
  chemically synthesized
cttatgaagttgataaaata

SEQ ID NO: 7316 - DNA, 20 bp, Artificial Sequence
  chemically synthesized
ggctatgttggcactccaca

SEQ ID NO: 7317 - DNA, 20 bp, Artificial Sequence
  chemically synthesized
caaagtaaaccaaggaggac

SEQ ID NO: 7318 - DNA, 20 bp, Artificial Sequence
  chemically synthesized
cttccagtcttccctgatgt

SEQ ID NO: 7319 - DNA, 20 bp, Artificial Sequence
  chemically synthesized
agctcctgttgtggaaagtg

SEQ ID NO: 7320 - DNA, 20 bp, Artificial Sequence
  chemically synthesized
ggaaagtggacggtttagga

SEQ ID NO: 7321 - DNA, 20 bp, Artificial Sequence
  chemically synthesized
ttgagagccaggttggagaa

SEQ ID NO: 7322 - DNA, 20 bp, Artificial Sequence
  chemically synthesized
gtggcttacacctgtaatgc

SEQ ID NO: 7323 - DNA, 20 bp, Artificial Sequence
  chemically synthesized
caggagggtcatttgagccc

SEQ ID NO: 7324 - DNA, 20 bp, Artificial Sequence
  chemically synthesized
gtctctaaaaaacaagaagt

SEQ ID NO: 7325 - DNA, 20 bp, Artificial Sequence
  chemically synthesized
aaaaacaagaagtgagggct

SEQ ID NO: 7326 - DNA, 20 bp, Artificial Sequence
  chemically synthesized
ataccaatcagggaagagat

SEQ ID NO: 7327 - DNA, 20 bp, Artificial Sequence
  chemically synthesized
gagatggttgattttttaac

SEQ ID NO: 7328 - DNA, 20 bp, Artificial Sequence
  chemically synthesized
ctcaaacttagcactctact

SEQ ID NO: 7329 - DNA, 20 bp, Artificial Sequence
  chemically synthesized
atgtaatcatgtctgcatgt

SEQ ID NO: 7330 - DNA, 20 bp, Artificial Sequence
  chemically synthesized
ccgtctcactcaatttgaat

SEQ ID NO: 7331 - DNA, 20 bp, Artificial Sequence
  chemically synthesized
gcttccctcaaaagactggc

SEQ ID NO: 7332 - DNA, 20 bp, Artificial Sequence
  chemically synthesized
agataggtacataaacaact

SEQ ID NO: 7333 - DNA, 20 bp, Artificial Sequence
  chemically synthesized
ataaacaactattggttttg

SEQ ID NO: 7334 - DNA, 20 bp, Artificial Sequence
  chemically synthesized
ttttcagctgcatttgcatg

SEQ ID NO: 7335 - DNA, 20 bp, Artificial Sequence
  chemically synthesized
gtaaaataattgtacagctc

SEQ ID NO: 7336 - DNA, 20 bp, Artificial Sequence
  chemically synthesized
ttcccaggctatttcttttg

SEQ ID NO: 7337 - DNA, 20 bp, Artificial Sequence
  chemically synthesized
ttcattttctttcttattct

SEQ ID NO: 7338 - DNA, 20 bp, Artificial Sequence
  chemically synthesized
ttttctttcttattcttttt

SEQ ID NO: 7339 - DNA, 20 bp, Artificial Sequence
  chemically synthesized
ctttcttattctttttgttt

SEQ ID NO: 7340 - DNA, 20 bp, Artificial Sequence
  chemically synthesized
cttattctttttgtttgttt

SEQ ID NO: 7341 - DNA, 20 bp, Artificial Sequence
  chemically synthesized
ttctttttgtttgtttgttt

SEQ ID NO: 7342 - DNA, 20 bp, Artificial Sequence
  chemically synthesized
cctctgccacctccgggttc

SEQ ID NO: 7343 - DNA, 20 bp, Artificial Sequence
  chemically synthesized
tgcctcagcctcccgagtag

SEQ ID NO: 7344 - DNA, 20 bp, Artificial Sequence
  chemically synthesized
ttttgtatttttagtagagg

SEQ ID NO: 7345 - DNA, 20 bp, Artificial Sequence
  chemically synthesized
ttcaattttcacaacgtggt

SEQ ID NO: 7346 - DNA, 20 bp, Artificial Sequence
  chemically synthesized
aaaagtttccctataattca

SEQ ID NO: 7347 - DNA, 20 bp, Artificial Sequence
  chemically synthesized
gattttgctccagggttcag

SEQ ID NO: 7348 - DNA, 20 bp, Artificial Sequence
  chemically synthesized
ttttaggaaatacttttatt

SEQ ID NO: 7349 - DNA, 20 bp, Artificial Sequence
  chemically synthesized
ttagagttgtaatattgcct

SEQ ID NO: 7350 - DNA, 20 bp, Artificial Sequence
  chemically synthesized
cctaaaagaatgaaagaaaa

SEQ ID NO: 7351 - DNA, 20 bp, Artificial Sequence
  chemically synthesized
cttaattcattatgttggcc

SEQ ID NO: 7352 - DNA, 20 bp, Artificial Sequence
  chemically synthesized
tagtgtcattaccatttcaa

SEQ ID NO: 7353 - DNA, 20 bp, Artificial Sequence
  chemically synthesized
atatttgatcattgtaaact

SEQ ID NO: 7354 - DNA, 20 bp, Artificial Sequence
  chemically synthesized
tggatattttaaagaagctg

SEQ ID NO: 7355 - DNA, 20 bp, Artificial Sequence
  chemically synthesized
ttctgtacatacttagagtt

SEQ ID NO: 7356 - DNA, 20 bp, Artificial Sequence
  chemically synthesized
aatgctctgtaaatagaagt

SEQ ID NO: 7357 - DNA, 20 bp, Artificial Sequence
  chemically synthesized
ggatgaaattctttaagtaa

SEQ ID NO: 7358 - DNA, 20 bp, Artificial Sequence
  chemically synthesized
tatggcaaagataggtatat

SEQ ID NO: 7359 - DNA, 20 bp, Artificial Sequence
  chemically synthesized
tatatcatagtttgcctatt

SEQ ID NO: 7360 - DNA, 20 bp, Artificial Sequence
  chemically synthesized
ctattattataaatagactt

SEQ ID NO: 7361 - DNA, 20 bp, Artificial Sequence
  chemically synthesized
aatagacttcacagttttag

SEQ ID NO: 7362 - DNA, 20 bp, Artificial Sequence
  chemically synthesized
tcaattatagtacaatcaca

SEQ ID NO: 7363 - DNA, 20 bp, Artificial Sequence
  chemically synthesized
ttgcttaggaatgcatcatt

SEQ ID NO: 7364 - DNA, 20 bp, Artificial Sequence
  chemically synthesized
tgtaggccacttaccacgaa

SEQ ID NO: 7365 - DNA, 20 bp, Artificial Sequence
  chemically synthesized
agctacaccaaatttatctt

SEQ ID NO: 7366 - DNA, 20 bp, Artificial Sequence
  chemically synthesized
attttttaacttttaaaata

SEQ ID NO: 7367 - DNA, 20 bp, Artificial Sequence
  chemically synthesized
tttctttgtatccttattct

SEQ ID NO: 7368 - DNA, 20 bp, Artificial Sequence
  chemically synthesized
aatttttttttttacttgtt

SEQ ID NO: 7369 - DNA, 20 bp, Artificial Sequence
  chemically synthesized
acactttcacctaggcatag

SEQ ID NO: 7370 - DNA, 20 bp, Artificial Sequence
  chemically synthesized
ctccacatcttgtcccactg

SEQ ID NO: 7371 - DNA, 20 bp, Artificial Sequence
  chemically synthesized
gtagctgtcacctatgataa

SEQ ID NO: 7372 - DNA, 20 bp, Artificial Sequence
  chemically synthesized
ctcctgaaggacttgcctga

SEQ ID NO: 7373 - DNA, 20 bp, Artificial Sequence
  chemically synthesized
aatacataaaccagcaatgt

SEQ ID NO: 7374 - DNA, 20 bp, Artificial Sequence
  chemically synthesized
gcacataactgtatttgcaa

SEQ ID NO: 7375 - DNA, 20 bp, Artificial Sequence
  chemically synthesized
taactgtatttgcaagaatg

SEQ ID NO: 7376 - DNA, 20 bp, Artificial Sequence
  chemically synthesized
ggatgtacctttttagagtg

SEQ ID NO: 7377 - DNA, 20 bp, Artificial Sequence
  chemically synthesized
tttttagagtggtatgttta

SEQ ID NO: 7378 - DNA, 20 bp, Artificial Sequence
  chemically synthesized
ctgggttctgtcttggatgt

SEQ ID NO: 7379 - DNA, 20 bp, Artificial Sequence
  chemically synthesized
gtttatgttcttctcctcat

SEQ ID NO: 7380 - DNA, 20 bp, Artificial Sequence
  chemically synthesized
tctgttttctcattaaattc

SEQ ID NO: 7381 - DNA, 20 bp, Artificial Sequence
  chemically synthesized
gaacgggccctatttagccc

SEQ ID NO: 7382 - DNA, 20 bp, Artificial Sequence
  chemically synthesized
ttctacgtgttctaaataac

SEQ ID NO: 7383 - DNA, 20 bp, Artificial Sequence
  chemically synthesized
ttgcagtgatgaaatgctgt

SEQ ID NO: 7384 - DNA, 20 bp, Artificial Sequence
  chemically synthesized
tctttgtcttgatacttcaa

SEQ ID NO: 7385 - DNA, 20 bp, Artificial Sequence
  chemically synthesized
tgtcgttttaaacatcagga

SEQ ID NO: 7386 - DNA, 20 bp, Artificial Sequence
  chemically synthesized
agagttcactgaggatacag

SEQ ID NO: 7387 - DNA, 20 bp, Artificial Sequence
  chemically synthesized
ttttttttttttgacctttt

SEQ ID NO: 7388 - DNA, 20 bp, Artificial Sequence
  chemically synthesized
ttaggtgttgtattactttt

SEQ ID NO: 7389 - DNA, 20 bp, Artificial Sequence
  chemically synthesized
taacaaagcaccacaaactg

SEQ ID NO: 7390 - DNA, 20 bp, Artificial Sequence
  chemically synthesized
agactctttccttgcctctt

SEQ ID NO: 7391 - DNA, 20 bp, Artificial Sequence
  chemically synthesized
tgagtgttcctttcttgcct

SEQ ID NO: 7392 - DNA, 20 bp, Artificial Sequence
  chemically synthesized
tccttataaacacagcagtt

SEQ ID NO: 7393 - DNA, 20 bp, Artificial Sequence
  chemically synthesized
tccagtatgaccccatttta

SEQ ID NO: 7394 - DNA, 20 bp, Artificial Sequence
  chemically synthesized
ctctagctgagcctttccct

SEQ ID NO: 7395 - DNA, 20 bp, Artificial Sequence
  chemically synthesized
gaatactgcgggtctattct

SEQ ID NO: 7396 - DNA, 20 bp, Artificial Sequence
  chemically synthesized
ctttatcctgataggagata

SEQ ID NO: 7397 - DNA, 20 bp, Artificial Sequence
  chemically synthesized
ccaaatatgtctaaatcatt

SEQ ID NO: 7398 - DNA, 20 bp, Artificial Sequence
  chemically synthesized
ttaaattgctgaacctaatc

SEQ ID NO: 7399 - DNA, 20 bp, Artificial Sequence
  chemically synthesized
taatcattggtttcatatgt

SEQ ID NO: 7400 - DNA, 20 bp, Artificial Sequence
  chemically synthesized
atctccagctgttgccaaga

SEQ ID NO: 7401 - DNA, 20 bp, Artificial Sequence
  chemically synthesized
ccagctgttgccaagacaga

SEQ ID NO: 7402 - DNA, 20 bp, Artificial Sequence
  chemically synthesized
tcacctttattagcagctac

SEQ ID NO: 7403 - DNA, 20 bp, Artificial Sequence
  chemically synthesized
agagagtggtgctatagatg

SEQ ID NO: 7404 - DNA, 20 bp, Artificial Sequence
  chemically synthesized
ttttgtcttgtctgaaaagg

SEQ ID NO: 7405 - DNA, 20 bp, Artificial Sequence
  chemically synthesized
ttgtctgaaaagggagtgat

SEQ ID NO: 7406 - DNA, 20 bp, Artificial Sequence
  chemically synthesized
ttatacttccacagacagaa

SEQ ID NO: 7407 - DNA, 20 bp, Artificial Sequence
  chemically synthesized
cacttcatagagtgtgtgtt

SEQ ID NO: 7408 - DNA, 20 bp, Artificial Sequence
  chemically synthesized
agaatatggatgcataaggt

SEQ ID NO: 7409 - DNA, 20 bp, Artificial Sequence
  chemically synthesized
atgcataaggtaagtgattt

SEQ ID NO: 7410 - DNA, 20 bp, Artificial Sequence
  chemically synthesized
atcatgttaacctatctgtt

SEQ ID NO: 7411 - DNA, 20 bp, Artificial Sequence
  chemically synthesized
ccacattatagatgaaaagc

SEQ ID NO: 7412 - DNA, 20 bp, Artificial Sequence
  chemically synthesized
aaataaagaaacttttagac

SEQ ID NO: 7413 - DNA, 20 bp, Artificial Sequence
  chemically synthesized
gagcctttgactctaatacc

SEQ ID NO: 7414 - DNA, 20 bp, Artificial Sequence
  chemically synthesized
tttcattgcacaattctgtc

SEQ ID NO: 7415 - DNA, 20 bp, Artificial Sequence
  chemically synthesized
taagtataacagttcaaagt

SEQ ID NO: 7416 - DNA, 20 bp, Artificial Sequence
  chemically synthesized
ccttttaatcttacagaaat

SEQ ID NO: 7417 - DNA, 20 bp, Artificial Sequence
  chemically synthesized
taatgctatttacatttcag

SEQ ID NO: 7418 - DNA, 20 bp, Artificial Sequence
  chemically synthesized
ttgaattctccttcctgtgt

SEQ ID NO: 7419 - DNA, 20 bp, Artificial Sequence
  chemically synthesized
ctgaaagtccattaagcatt

SEQ ID NO: 7420 - DNA, 20 bp, Artificial Sequence
  chemically synthesized
attaagcattaccagtttta

SEQ ID NO: 7421 - DNA, 20 bp, Artificial Sequence
  chemically synthesized
tttaaaagaataatttttta

SEQ ID NO: 7422 - DNA, 20 bp, Artificial Sequence
  chemically synthesized
aataattttttactatgttt

SEQ ID NO: 7423 - DNA, 20 bp, Artificial Sequence
  chemically synthesized
gaatcttttaaacaacatca

SEQ ID NO: 7424 - DNA, 20 bp, Artificial Sequence
  chemically synthesized
aactatgcagatgttacatt

SEQ ID NO: 7425 - DNA, 20 bp, Artificial Sequence
  chemically synthesized
ttttttcactgcagaataaa

SEQ ID NO: 7426 - DNA, 20 bp, Artificial Sequence
  chemically synthesized
tcactgcagaataaaggttg

SEQ ID NO: 7427 - DNA, 20 bp, Artificial Sequence
  chemically synthesized
gttgttttgattttattttg

SEQ ID NO: 7428 - DNA, 20 bp, Artificial Sequence
  chemically synthesized
gcaagtatcaaaatgttgtg

SEQ ID NO: 7429 - DNA, 20 bp, Artificial Sequence
  chemically synthesized
ggaaagacaagaaaatgtcc

SEQ ID NO: 7430 - DNA, 20 bp, Artificial Sequence
  chemically synthesized
tatgcaaattgcatactgtc

SEQ ID NO: 7431 - DNA, 20 bp, Artificial Sequence
  chemically synthesized
acatacgaataagcctttaa

SEQ ID NO: 7432 - DNA, 20 bp, Artificial Sequence
  chemically synthesized
ggtgtacagaataaactgga

SEQ ID NO: 7433 - DNA, 20 bp, Artificial Sequence
  chemically synthesized
aatatttgctcccttttttt

SEQ ID NO: 7434 - DNA, 20 bp, Artificial Sequence
  chemically synthesized
ctctcctctaggaaaatgtg

SEQ ID NO: 7435 - DNA, 20 bp, Artificial Sequence
  chemically synthesized
aaaatgtgccatgtttatcc

SEQ ID NO: 7436 - DNA, 20 bp, Artificial Sequence
  chemically synthesized
gcccctcaggaacagacact

SEQ ID NO: 7437 - DNA, 20 bp, Artificial Sequence
  chemically synthesized
gagaagcatggttacaaggg

SEQ ID NO: 7438 - DNA, 20 bp, Artificial Sequence
  chemically synthesized
aactccaatattttaaacat

SEQ ID NO: 7439 - DNA, 20 bp, Artificial Sequence
  chemically synthesized
aacatggctgttttgccttt

SEQ ID NO: 7440 - DNA, 20 bp, Artificial Sequence
  chemically synthesized
tgatctcctttaccaaattg

SEQ ID NO: 7441 - DNA, 20 bp, Artificial Sequence
  chemically synthesized
gttatgtttgtacttttgta

SEQ ID NO: 7442 - DNA, 20 bp, Artificial Sequence
  chemically synthesized
taaaggtctgacttaacaag

SEQ ID NO: 7443 - DNA, 20 bp, Artificial Sequence
  chemically synthesized
aaacttagaaccaactaaaa

SEQ ID NO: 7444 - DNA, 20 bp, Artificial Sequence
  chemically synthesized
caactaaaattctgctttta

SEQ ID NO: 7445 - DNA, 20 bp, Artificial Sequence
  chemically synthesized
aaattctgcttttactggga

SEQ ID NO: 7446 - DNA, 20 bp, Artificial Sequence
  chemically synthesized
ttatcttactgctgagaagt

SEQ ID NO: 7447 - DNA, 20 bp, Artificial Sequence
  chemically synthesized
acaaggaggaatagaaactt

SEQ ID NO: 7448 - DNA, 20 bp, Artificial Sequence
  chemically synthesized
cctcttctgtatttagccct

SEQ ID NO: 7449 - DNA, 20 bp, Artificial Sequence
  chemically synthesized
tttttttttttttggtgttg

SEQ ID NO: 7450 - DNA, 20 bp, Artificial Sequence
  chemically synthesized
tactgtgaatgaaatactat

SEQ ID NO: 7451 - DNA, 20 bp, Artificial Sequence
  chemically synthesized
cccgaaaaggaggagttgcc

SEQ ID NO: 7452 - DNA, 20 bp, Artificial Sequence
  chemically synthesized
aacgactttattttgaacaa

SEQ ID NO: 7453 - DNA, 20 bp, Artificial Sequence
  chemically synthesized
atactgtttggggatgatgc

SEQ ID NO: 7454 - DNA, 20 bp, Artificial Sequence
  chemically synthesized
ttgtagctgtcatctgataa

SEQ ID NO: 7455 - DNA, 20 bp, Artificial Sequence
  chemically synthesized
cggatctagtcattattctt

SEQ ID NO: 7456 - DNA, 20 bp, Artificial Sequence
  chemically synthesized
agttgtggaggttactaaag

SEQ ID NO: 7457 - DNA, 20 bp, Artificial Sequence
  chemically synthesized
cagcattatgcaaatgggca

SEQ ID NO: 7458 - DNA, 20 bp, Artificial Sequence
  chemically synthesized
aaaaatggccctgggtctga

SEQ ID NO: 7459 - DNA, 20 bp, Artificial Sequence
  chemically synthesized
tgacaaagattctaacttaa

SEQ ID NO: 7460 - DNA, 20 bp, Artificial Sequence
  chemically synthesized
ttaaattcatcttaaataat

SEQ ID NO: 7461 - DNA, 20 bp, Artificial Sequence
  chemically synthesized
aataatgtatgatttaaaaa

SEQ ID NO: 7462 - DNA, 20 bp, Artificial Sequence
  chemically synthesized
gtgatgtgttatactgaatt

SEQ ID NO: 7463 - DNA, 20 bp, Artificial Sequence
  chemically synthesized
tgtgttatactgaattttca

SEQ ID NO: 7464 - DNA, 20 bp, Artificial Sequence
  chemically synthesized
aatagctctaaagggaattt

SEQ ID NO: 7465 - DNA, 20 bp, Artificial Sequence
  chemically synthesized
taaagggaatttttctgttt

SEQ ID NO: 7466 - DNA, 20 bp, Artificial Sequence
  chemically synthesized
attgattcttaaaatatatg

SEQ ID NO: 7467 - DNA, 20 bp, Artificial Sequence
  chemically synthesized
tcttaaaatatatgtgctga

SEQ ID NO: 7468 - DNA, 20 bp, Artificial Sequence
  chemically synthesized
ctgattttgatttgcatttg

SEQ ID NO: 7469 - DNA, 20 bp, Artificial Sequence
  chemically synthesized
ttatgagtatggaggttagg

SEQ ID NO: 7470 - DNA, 20 bp, Artificial Sequence
  chemically synthesized
tatggaggttaggtattgat

SEQ ID NO: 7471 - DNA, 20 bp, Artificial Sequence
  chemically synthesized
agttttccttacctatttgg

SEQ ID NO: 7472 - DNA, 20 bp, Artificial Sequence
  chemically synthesized
gtaaggatttcaaagtcttt

SEQ ID NO: 7473 - DNA, 20 bp, Artificial Sequence
  chemically synthesized
gatttcaaagtctttttgtg

SEQ ID NO: 7474 - DNA, 20 bp, Artificial Sequence
  chemically synthesized
tgtaacagtaaacgataaac

SEQ ID NO: 7475 - DNA, 20 bp, Artificial Sequence
  chemically synthesized
atactctctaaagaataaaa

SEQ ID NO: 7476 - DNA, 20 bp, Artificial Sequence
  chemically synthesized
aaagaaaagaaagaataaaa

SEQ ID NO: 7477 - DNA, 20 bp, Artificial Sequence
  chemically synthesized
aagaaagaataaaagtgagc

SEQ ID NO: 7478 - DNA, 20 bp, Artificial Sequence
  chemically synthesized
atcctttagacatgtagtag

SEQ ID NO: 7479 - DNA, 20 bp, Artificial Sequence
  chemically synthesized
tgtagtagacttgtttgata

SEQ ID NO: 7480 - DNA, 20 bp, Artificial Sequence
  chemically synthesized
gtattttcatcaaagaatgt

SEQ ID NO: 7481 - DNA, 20 bp, Artificial Sequence
  chemically synthesized
gttatttttattttttattg

SEQ ID NO: 7482 - DNA, 20 bp, Artificial Sequence
  chemically synthesized
tgcccagcttctctcatatt

SEQ ID NO: 7483 - DNA, 20 bp, Artificial Sequence
  chemically synthesized
gcagggtcagagtattattc

SEQ ID NO: 7484 - DNA, 20 bp, Artificial Sequence
  chemically synthesized
tattccaatgcttactggag

SEQ ID NO: 7485 - DNA, 20 bp, Artificial Sequence
  chemically synthesized
agaagtgattcctgtaatgg

SEQ ID NO: 7486 - DNA, 20 bp, Artificial Sequence
  chemically synthesized
gtgttcctgaagaaatagat

SEQ ID NO: 7487 - DNA, 20 bp, Artificial Sequence
  chemically synthesized
tgagagcaattatacacttt

SEQ ID NO: 7488 - DNA, 20 bp, Artificial Sequence
  chemically synthesized
caaataagcacacacaaaat

SEQ ID NO: 7489 - DNA, 20 bp, Artificial Sequence
  chemically synthesized
tgatgacaaaattaaattca

SEQ ID NO: 7490 - DNA, 20 bp, Artificial Sequence
  chemically synthesized
ccaaagtagtaaccattaat

SEQ ID NO: 7491 - DNA, 20 bp, Artificial Sequence
  chemically synthesized
agtttacttgtagtcacaaa

SEQ ID NO: 7492 - DNA, 20 bp, Artificial Sequence
  chemically synthesized
tttccttaatcatttgttga

SEQ ID NO: 7493 - DNA, 20 bp, Artificial Sequence
  chemically synthesized
tacctttaggaaactattct

SEQ ID NO: 7494 - DNA, 20 bp, Artificial Sequence
  chemically synthesized
aggaaactattcttgttgtt

SEQ ID NO: 7495 - DNA, 20 bp, Artificial Sequence
  chemically synthesized
ttttgtcatttaggttagtc

SEQ ID NO: 7496 - DNA, 20 bp, Artificial Sequence
  chemically synthesized
gaggaagttgttcttgtaaa

SEQ ID NO: 7497 - DNA, 20 bp, Artificial Sequence
  chemically synthesized
gttcttgtaaaaattgttta

SEQ ID NO: 7498 - DNA, 20 bp, Artificial Sequence
  chemically synthesized
aaaattgtttaacctgcttg

SEQ ID NO: 7499 - DNA, 20 bp, Artificial Sequence
  chemically synthesized
agctttcacatttgttcttc

SEQ ID NO: 7500 - DNA, 20 bp, Artificial Sequence
  chemically synthesized
ctgaagtttatggtagtgca

SEQ ID NO: 7501 - DNA, 20 bp, Artificial Sequence
  chemically synthesized
agtttatggtagtgcacaga

SEQ ID NO: 7502 - DNA, 20 bp, Artificial Sequence
  chemically synthesized
agagattgttttttggggag

SEQ ID NO: 7503 - DNA, 20 bp, Artificial Sequence
  chemically synthesized
atattggtgacagctgtcat

SEQ ID NO: 7504 - DNA, 20 bp, Artificial Sequence
  chemically synthesized
ccatcttatgctcacctatg

SEQ ID NO: 7505 - DNA, 20 bp, Artificial Sequence
  chemically synthesized
agaaaataacagactgtcta

SEQ ID NO: 7506 - DNA, 20 bp, Artificial Sequence
  chemically synthesized
gggacattacgtatttgaac

SEQ ID NO: 7507 - DNA, 20 bp, Artificial Sequence
  chemically synthesized
ccatttgctatttaaagaaa

SEQ ID NO: 7508 - DNA, 20 bp, Artificial Sequence
  chemically synthesized
ccagacaagaaatcatggcc

SEQ ID NO: 7509 - DNA, 20 bp, Artificial Sequence
  chemically synthesized
acaagaaatcatggcccctt

SEQ ID NO: 7510 - DNA, 20 bp, Artificial Sequence
  chemically synthesized
atcatggccccttgcttgat

SEQ ID NO: 7511 - DNA, 20 bp, Artificial Sequence
  chemically synthesized
ccccttgcttgattctggtt

SEQ ID NO: 7512 - DNA, 20 bp, Artificial Sequence
  chemically synthesized
gatctttttccatccagcag

SEQ ID NO: 7513 - DNA, 20 bp, Artificial Sequence
  chemically synthesized
agcagtggagtttagtactt

SEQ ID NO: 7514 - DNA, 20 bp, Artificial Sequence
  chemically synthesized
tgtgcccttaaaccagactc

SEQ ID NO: 7515 - DNA, 20 bp, Artificial Sequence
  chemically synthesized
tacatgttagttcctttact

SEQ ID NO: 7516 - DNA, 20 bp, Artificial Sequence
  chemically synthesized
tttacatgtattatcttata

SEQ ID NO: 7517 - DNA, 20 bp, Artificial Sequence
  chemically synthesized
tattatcttatattctgttt

SEQ ID NO: 7518 - DNA, 20 bp, Artificial Sequence
  chemically synthesized
ttttaaagtttcttcacagt

SEQ ID NO: 7519 - DNA, 20 bp, Artificial Sequence
  chemically synthesized
atggagtatcagaggcatga

SEQ ID NO: 7520 - DNA, 20 bp, Artificial Sequence
  chemically synthesized
gtgtttaacctaagagcctt

SEQ ID NO: 7521 - DNA, 20 bp, Artificial Sequence
  chemically synthesized
gatattatactgactaattg

SEQ ID NO: 7522 - DNA, 20 bp, Artificial Sequence
  chemically synthesized
tatacaaataaaagataaca

SEQ ID NO: 7523 - DNA, 20 bp, Artificial Sequence
  chemically synthesized
ataaaagataacattgtgct

SEQ ID NO: 7524 - DNA, 20 bp, Artificial Sequence
  chemically synthesized
taacattgtgcttatagctt

SEQ ID NO: 7525 - DNA, 20 bp, Artificial Sequence
  chemically synthesized
tgaagagctcacctactttt

SEQ ID NO: 7526 - DNA, 20 bp, Artificial Sequence
  chemically synthesized
ctcacctacttttttttgtt

SEQ ID NO: 7527 - DNA, 20 bp, Artificial Sequence
  chemically synthesized
tttttgtttttagtttgtta

SEQ ID NO: 7528 - DNA, 20 bp, Artificial Sequence
  chemically synthesized
ttgttaaattgttttatagg

SEQ ID NO: 7529 - DNA, 20 bp, Artificial Sequence
  chemically synthesized
ttttataggcaatgttttta

SEQ ID NO: 7530 - DNA, 20 bp, Artificial Sequence
  chemically synthesized
agtgcagagaaagtaaataa

SEQ ID NO: 7531 - DNA, 20 bp, Artificial Sequence
  chemically synthesized
agtttattttataatctagc

SEQ ID NO: 7532 - DNA, 20 bp, Artificial Sequence
  chemically synthesized
ctttaagactgatgatatat

SEQ ID NO: 7533 - DNA, 20 bp, Artificial Sequence
  chemically synthesized
taagacaccttgtggcaaca

SEQ ID NO: 7534 - DNA, 20 bp, Artificial Sequence
  chemically synthesized
aaactgagtaagaatcattt

SEQ ID NO: 7535 - DNA, 20 bp, Artificial Sequence
  chemically synthesized
accagtgtcagtagtgtata

SEQ ID NO: 7536 - DNA, 20 bp, Artificial Sequence
  chemically synthesized
agtagttccaaagaaatgtt

SEQ ID NO: 7537 - DNA, 20 bp, Artificial Sequence
  chemically synthesized
aaatgttatttgtttattca

SEQ ID NO: 7538 - DNA, 20 bp, Artificial Sequence
  chemically synthesized
attcatcttgatttcattgt

SEQ ID NO: 7539 - DNA, 20 bp, Artificial Sequence
  chemically synthesized
ctgtcccttctagggagcta

SEQ ID NO: 7540 - DNA, 20 bp, Artificial Sequence
  chemically synthesized
agctattgggattaagtggt

SEQ ID NO: 7541 - DNA, 20 bp, Artificial Sequence
  chemically synthesized
gattattatactttattcag

SEQ ID NO: 7542 - DNA, 20 bp, Artificial Sequence
  chemically synthesized
tcagtgctacttgagttaat

SEQ ID NO: 7543 - DNA, 20 bp, Artificial Sequence
  chemically synthesized
caagcattagctaataaact

SEQ ID NO: 7544 - DNA, 20 bp, Artificial Sequence
  chemically synthesized
agcaaacctaattttttaaa

SEQ ID NO: 7545 - DNA, 20 bp, Artificial Sequence
  chemically synthesized
tttctcatataaccatttat

SEQ ID NO: 7546 - DNA, 20 bp, Artificial Sequence
  chemically synthesized
tccttctgttacctcaaaca

SEQ ID NO: 7547 - DNA, 20 bp, Artificial Sequence
  chemically synthesized
gttgcacagagtgactgccg

SEQ ID NO: 7548 - DNA, 20 bp, Artificial Sequence
  chemically synthesized
ggagaaaggctccatagttg

SEQ ID NO: 7549 - DNA, 20 bp, Artificial Sequence
  chemically synthesized
cctccatcctcttgagggag

SEQ ID NO: 7550 - DNA, 20 bp, Artificial Sequence
  chemically synthesized
ggagaatagcttacctttta

SEQ ID NO: 7551 - DNA, 20 bp, Artificial Sequence
  chemically synthesized
tttaacataataactgtgga

SEQ ID NO: 7552 - DNA, 20 bp, Artificial Sequence
  chemically synthesized
gtaggtcaaatattattaga

SEQ ID NO: 7553 - DNA, 20 bp, Artificial Sequence
  chemically synthesized
tttctaaatcccacccaatg

SEQ ID NO: 7554 - DNA, 20 bp, Artificial Sequence
  chemically synthesized
acagtatgtagccaaatgtt

SEQ ID NO: 7555 - DNA, 20 bp, Artificial Sequence
  chemically synthesized
aagcaacaactgttacatcc

SEQ ID NO: 7556 - DNA, 20 bp, Artificial Sequence
  chemically synthesized
aagaatacttatttcttagg

SEQ ID NO: 7557 - DNA, 20 bp, Artificial Sequence
  chemically synthesized
aaatcagtggtctttttact

SEQ ID NO: 7558 - DNA, 20 bp, Artificial Sequence
  chemically synthesized
tgtacaaggcctgctaaagg

SEQ ID NO: 7559 - DNA, 20 bp, Artificial Sequence
  chemically synthesized
tgcacatagactatatgtct

SEQ ID NO: 7560 - DNA, 20 bp, Artificial Sequence
  chemically synthesized
aggacttttttttttttaac

SEQ ID NO: 7561 - DNA, 20 bp, Artificial Sequence
  chemically synthesized
agatcatttctttttaacta

SEQ ID NO: 7562 - DNA, 20 bp, Artificial Sequence
  chemically synthesized
aaaaattttaaacatcttta

SEQ ID NO: 7563 - DNA, 20 bp, Artificial Sequence
  chemically synthesized
taaacatctttaagaagctt

SEQ ID NO: 7564 - DNA, 20 bp, Artificial Sequence
  chemically synthesized
atagtcccaagacgtgaaga

SEQ ID NO: 7565 - DNA, 20 bp, Artificial Sequence
  chemically synthesized
aaatagctttcctaatggtt

SEQ ID NO: 7566 - DNA, 20 bp, Artificial Sequence
  chemically synthesized
tgttgcaaatacaagttata

SEQ ID NO: 7567 - DNA, 20 bp, Artificial Sequence
  chemically synthesized
tagaaactagttaaaggaaa

SEQ ID NO: 7568 - DNA, 20 bp, Artificial Sequence
  chemically synthesized
ctcctgttaaaggcataata

SEQ ID NO: 7569 - DNA, 20 bp, Artificial Sequence
  chemically synthesized
cataataaagtgcttaatac

SEQ ID NO: 7570 - DNA, 20 bp, Artificial Sequence
  chemically synthesized
ctccatgcaaatacaaatca

SEQ ID NO: 7571 - DNA, 20 bp, Artificial Sequence
  chemically synthesized
atacctttgacattatacaa

SEQ ID NO: 7572 - DNA, 20 bp, Artificial Sequence
  chemically synthesized
acatggtaactggctacccc

SEQ ID NO: 7573 - DNA, 20 bp, Artificial Sequence
  chemically synthesized
actgattaggaaagaagtaa

SEQ ID NO: 7574 - DNA, 20 bp, Artificial Sequence
  chemically synthesized
gatcatctctgcatgttcta

SEQ ID NO: 7575 - DNA, 20 bp, Artificial Sequence
  chemically synthesized
ttctaatctgcttttttcac

SEQ ID NO: 7576 - DNA, 20 bp, Artificial Sequence
  chemically synthesized
tttacttaaccacttccttt

SEQ ID NO: 7577 - DNA, 20 bp, Artificial Sequence
  chemically synthesized
tttggatgcttaggtcattc

SEQ ID NO: 7578 - DNA, 20 bp, Artificial Sequence
  chemically synthesized
aaactttgcacacactcatg

SEQ ID NO: 7579 - DNA, 20 bp, Artificial Sequence
  chemically synthesized
tcttaggataaatttttaga

SEQ ID NO: 7580 - DNA, 20 bp, Artificial Sequence
  chemically synthesized
aattaaaaaacaattattca

SEQ ID NO: 7581 - DNA, 20 bp, Artificial Sequence
  chemically synthesized
taaattttccttttattttg

SEQ ID NO: 7582 - DNA, 20 bp, Artificial Sequence
  chemically synthesized
tattttgacaggattcaact

SEQ ID NO: 7583 - DNA, 20 bp, Artificial Sequence
  chemically synthesized
atacgatcatctacactgac

SEQ ID NO: 7584 - DNA, 20 bp, Artificial Sequence
  chemically synthesized
tacactgacgaaagctttac

SEQ ID NO: 7585 - DNA, 20 bp, Artificial Sequence
  chemically synthesized
aagaaatattaccagcagaa

SEQ ID NO: 7586 - DNA, 20 bp, Artificial Sequence
  chemically synthesized
gttcttctttttccatacaa

SEQ ID NO: 7587 - DNA, 20 bp, Artificial Sequence
  chemically synthesized
ttgtgtttaccctaaaatag

SEQ ID NO: 7588 - DNA, 20 bp, Artificial Sequence
  chemically synthesized
cttaaagtaaatatttaact

SEQ ID NO: 7589 - DNA, 20 bp, Artificial Sequence
  chemically synthesized
cctaggcactgttctaggta

SEQ ID NO: 7590 - DNA, 20 bp, Artificial Sequence
  chemically synthesized
aaaagaattatagtatactt

SEQ ID NO: 7591 - DNA, 20 bp, Artificial Sequence
  chemically synthesized
gtagctcatgcctgtaagaa

SEQ ID NO: 7592 - DNA, 20 bp, Artificial Sequence
  chemically synthesized
aataaaaaagaattattgga

SEQ ID NO: 7593 - DNA, 20 bp, Artificial Sequence
  chemically synthesized
caggaggatcttttgagccc

SEQ ID NO: 7594 - DNA, 20 bp, Artificial Sequence
  chemically synthesized
atttaaaaaaaaaaaaaaaa

SEQ ID NO: 7595 - DNA, 20 bp, Artificial Sequence
  chemically synthesized
ctgacctatgtatctacaga

SEQ ID NO: 7596 - DNA, 20 bp, Artificial Sequence
  chemically synthesized
tatgtatctacagaatcagt

SEQ ID NO: 7597 - DNA, 20 bp, Artificial Sequence
  chemically synthesized
cccattttttcctagttctc

SEQ ID NO: 7598 - DNA, 20 bp, Artificial Sequence
  chemically synthesized
ttcttgagaaagtagtaggg

SEQ ID NO: 7599 - DNA, 20 bp, Artificial Sequence
  chemically synthesized
ccaactgaaattacatgtca

SEQ ID NO: 7600 - DNA, 20 bp, Artificial Sequence
  chemically synthesized
gtaaattttagtagacatgt

SEQ ID NO: 7601 - DNA, 20 bp, Artificial Sequence
  chemically synthesized
aaacattttcttttttccta

SEQ ID NO: 7602 - DNA, 20 bp, Artificial Sequence
  chemically synthesized
cctaaagtgcttagtatttt

SEQ ID NO: 7603 - DNA, 20 bp, Artificial Sequence
  chemically synthesized
tgcttagtattttttccgtt

SEQ ID NO: 7604 - DNA, 20 bp, Artificial Sequence
  chemically synthesized
cgttttttgattggttactt

SEQ ID NO: 7605 - DNA, 20 bp, Artificial Sequence
  chemically synthesized
gaaatttagtgaactgcaga

SEQ ID NO: 7606 - DNA, 20 bp, Artificial Sequence
  chemically synthesized
ggtttgcaaccatttggtat

SEQ ID NO: 7607 - DNA, 20 bp, Artificial Sequence
  chemically synthesized
gcaaccatttggtatttttg

SEQ ID NO: 7608 - DNA, 20 bp, Artificial Sequence
  chemically synthesized
tcttaatcatttttagccag

SEQ ID NO: 7609 - DNA, 20 bp, Artificial Sequence
  chemically synthesized
aatcatttttagccagctat

SEQ ID NO: 7610 - DNA, 20 bp, Artificial Sequence
  chemically synthesized
ttagccagctatgtttgttt

SEQ ID NO: 7611 - DNA, 20 bp, Artificial Sequence
  chemically synthesized
aaaaaatagtattttcagcc

SEQ ID NO: 7612 - DNA, 20 bp, Artificial Sequence
  chemically synthesized
gagtcattttacttttaagt

SEQ ID NO: 7613 - DNA, 20 bp, Artificial Sequence
  chemically synthesized
tatatgtttttacatgttaa

SEQ ID NO: 7614 - DNA, 20 bp, Artificial Sequence
  chemically synthesized
acaggtaaattgcgtgtcat

SEQ ID NO: 7615 - DNA, 20 bp, Artificial Sequence
  chemically synthesized
gtcatgagggtttggtgtac

SEQ ID NO: 7616 - DNA, 20 bp, Artificial Sequence
  chemically synthesized
aataagcatagtacccaata

SEQ ID NO: 7617 - DNA, 20 bp, Artificial Sequence
  chemically synthesized
cctcaagtaggccctggtgt

SEQ ID NO: 7618 - DNA, 20 bp, Artificial Sequence
  chemically synthesized
tctttgtgtccatgtatact

SEQ ID NO: 7619 - DNA, 20 bp, Artificial Sequence
  chemically synthesized
agaagtgagaacatgcggta

SEQ ID NO: 7620 - DNA, 20 bp, Artificial Sequence
  chemically synthesized
gcggtagttggttttctgtt

SEQ ID NO: 7621 - DNA, 20 bp, Artificial Sequence
  chemically synthesized
gataatgacctctagctcca

SEQ ID NO: 7622 - DNA, 20 bp, Artificial Sequence
  chemically synthesized
ctaccattgataggcattta

SEQ ID NO: 7623 - DNA, 20 bp, Artificial Sequence
  chemically synthesized
agttatttgagaaatcttca

SEQ ID NO: 7624 - DNA, 20 bp, Artificial Sequence
  chemically synthesized
ctccacaaccttgccaacat

SEQ ID NO: 7625 - DNA, 20 bp, Artificial Sequence
  chemically synthesized
aataatagccattcctagag

SEQ ID NO: 7626 - DNA, 20 bp, Artificial Sequence
  chemically synthesized
gtgatattaagcattttttc

SEQ ID NO: 7627 - DNA, 20 bp, Artificial Sequence
  chemically synthesized
aaaaattttcatgtcctttg

SEQ ID NO: 7628 - DNA, 20 bp, Artificial Sequence
  chemically synthesized
gcccagtttgtagtggggtg

SEQ ID NO: 7629 - DNA, 20 bp, Artificial Sequence
  chemically synthesized
ttgtagtggggtgggttgtt

SEQ ID NO: 7630 - DNA, 20 bp, Artificial Sequence
  chemically synthesized
gggttgttttttgcttgtta

SEQ ID NO: 7631 - DNA, 20 bp, Artificial Sequence
  chemically synthesized
ttaattagttttaagttcct

SEQ ID NO: 7632 - DNA, 20 bp, Artificial Sequence
  chemically synthesized
gcatatccctttgttggata

SEQ ID NO: 7633 - DNA, 20 bp, Artificial Sequence
  chemically synthesized
aggttgtcttttactctgtt

SEQ ID NO: 7634 - DNA, 20 bp, Artificial Sequence
  chemically synthesized
aggagctcgttaggtcccat

SEQ ID NO: 7635 - DNA, 20 bp, Artificial Sequence
  chemically synthesized
gctcgttaggtcccatttgt

SEQ ID NO: 7636 - DNA, 20 bp, Artificial Sequence
  chemically synthesized
tttgtgtttgtttttgttgc

SEQ ID NO: 7637 - DNA, 20 bp, Artificial Sequence
  chemically synthesized
gtatttcctaggttgtcttc

SEQ ID NO: 7638 - DNA, 20 bp, Artificial Sequence
  chemically synthesized
tcttccagggtttttacaat

SEQ ID NO: 7639 - DNA, 20 bp, Artificial Sequence
  chemically synthesized
ggtttttacaattttagatt

SEQ ID NO: 7640 - DNA, 20 bp, Artificial Sequence
  chemically synthesized
tatgtctttaatccatcttg

SEQ ID NO: 7641 - DNA, 20 bp, Artificial Sequence
  chemically synthesized
tatatggcacaaggaagggg

SEQ ID NO: 7642 - DNA, 20 bp, Artificial Sequence
  chemically synthesized
tgaatacggagtcctttccc

SEQ ID NO: 7643 - DNA, 20 bp, Artificial Sequence
  chemically synthesized
tacggagtcctttccccatt

SEQ ID NO: 7644 - DNA, 20 bp, Artificial Sequence
  chemically synthesized
agatcagatggttgtaagtg

SEQ ID NO: 7645 - DNA, 20 bp, Artificial Sequence
  chemically synthesized
tattctccattggtctatgt

SEQ ID NO: 7646 - DNA, 20 bp, Artificial Sequence
  chemically synthesized
aaatcggctaatgtgatgcc

SEQ ID NO: 7647 - DNA, 20 bp, Artificial Sequence
  chemically synthesized
gatgcctccagctttgttct

SEQ ID NO: 7648 - DNA, 20 bp, Artificial Sequence
  chemically synthesized
tccagctttgttctttttgc

SEQ ID NO: 7649 - DNA, 20 bp, Artificial Sequence
  chemically synthesized
gctttgttctttttgcttag

SEQ ID NO: 7650 - DNA, 20 bp, Artificial Sequence
  chemically synthesized
tgggtccatattaattttaa

SEQ ID NO: 7651 - DNA, 20 bp, Artificial Sequence
  chemically synthesized
ttaattttaaaacagttttt

SEQ ID NO: 7652 - DNA, 20 bp, Artificial Sequence
  chemically synthesized
gttttgtgaaggatatcatt

SEQ ID NO: 7653 - DNA, 20 bp, Artificial Sequence
  chemically synthesized
tataggaatagcattgaatc

SEQ ID NO: 7654 - DNA, 20 bp, Artificial Sequence
  chemically synthesized
ggaatagcattgaatctgta

SEQ ID NO: 7655 - DNA, 20 bp, Artificial Sequence
  chemically synthesized
tcttcctatctatgaatatg

SEQ ID NO: 7656 - DNA, 20 bp, Artificial Sequence
  chemically synthesized
tgaatatggaatgtttttcc

SEQ ID NO: 7657 - DNA, 20 bp, Artificial Sequence
  chemically synthesized
agctgatctactttgatcaa

SEQ ID NO: 7658 - DNA, 20 bp, Artificial Sequence
  chemically synthesized
caacatacacaaatcaataa

SEQ ID NO: 7659 - DNA, 20 bp, Artificial Sequence
  chemically synthesized
cagagctaaaaacaaaaacc

SEQ ID NO: 7660 - DNA, 20 bp, Artificial Sequence
  chemically synthesized
aaaaaaaaaaaaaaaaaaaa

SEQ ID NO: 7661 - DNA, 20 bp, Artificial Sequence
  chemically synthesized
ctattcaggaggttgaggtg

SEQ ID NO: 7662 - DNA, 20 bp, Artificial Sequence
  chemically synthesized
tcaggaggttgaggtgggag

SEQ ID NO: 7663 - DNA, 20 bp, Artificial Sequence
  chemically synthesized
aagagaagaagtcaaactat

SEQ ID NO: 7664 - DNA, 20 bp, Artificial Sequence
  chemically synthesized
aaatctgttaaaaatttcag

SEQ ID NO: 7665 - DNA, 20 bp, Artificial Sequence
  chemically synthesized
ggaaatgttcttttttaaca

SEQ ID NO: 7666 - DNA, 20 bp, Artificial Sequence
  chemically synthesized
ggaacaggtataataagtcc

SEQ ID NO: 7667 - DNA, 20 bp, Artificial Sequence
  chemically synthesized
atgctaatatttttcccctt

SEQ ID NO: 7668 - DNA, 20 bp, Artificial Sequence
  chemically synthesized
tttcttctgtagtgtggtac

SEQ ID NO: 7669 - DNA, 20 bp, Artificial Sequence
  chemically synthesized
taaggaaacttgaactacct

SEQ ID NO: 7670 - DNA, 20 bp, Artificial Sequence
  chemically synthesized
gaaacttgaactaccttcct

SEQ ID NO: 7671 - DNA, 20 bp, Artificial Sequence
  chemically synthesized
cctgggaagggaataagtag

SEQ ID NO: 7672 - DNA, 20 bp, Artificial Sequence
  chemically synthesized
ggaagggaataagtagtcct

SEQ ID NO: 7673 - DNA, 20 bp, Artificial Sequence
  chemically synthesized
ataagtagtcctgtttgttt

SEQ ID NO: 7674 - DNA, 20 bp, Artificial Sequence
  chemically synthesized
gtagtcctgtttgtttgtgt

SEQ ID NO: 7675 - DNA, 20 bp, Artificial Sequence
  chemically synthesized
gttcatgttacttacagatg

SEQ ID NO: 7676 - DNA, 20 bp, Artificial Sequence
  chemically synthesized
tcaaatttttcttcacattt

SEQ ID NO: 7677 - DNA, 20 bp, Artificial Sequence
  chemically synthesized
atttttcttcacattttttg

SEQ ID NO: 7678 - DNA, 20 bp, Artificial Sequence
  chemically synthesized
cttcacattttttggtttgt

SEQ ID NO: 7679 - DNA, 20 bp, Artificial Sequence
  chemically synthesized
ttgttttggtttttgatggt

SEQ ID NO: 7680 - DNA, 20 bp, Artificial Sequence
  chemically synthesized
ggtagtggcttatttttgtt

SEQ ID NO: 7681 - DNA, 20 bp, Artificial Sequence
  chemically synthesized
gtggcttatttttgttgctg

SEQ ID NO: 7682 - DNA, 20 bp, Artificial Sequence
  chemically synthesized
atttttgttgctggtttgtt

SEQ ID NO: 7683 - DNA, 20 bp, Artificial Sequence
  chemically synthesized
tttttgagatggcaagaatt

SEQ ID NO: 7684 - DNA, 20 bp, Artificial Sequence
  chemically synthesized
ttaaaagatgagagtagtaa

SEQ ID NO: 7685 - DNA, 20 bp, Artificial Sequence
  chemically synthesized
acatacatacccttactggg

SEQ ID NO: 7686 - DNA, 20 bp, Artificial Sequence
  chemically synthesized
atatatctatattcttacaa

SEQ ID NO: 7687 - DNA, 20 bp, Artificial Sequence
  chemically synthesized
cttaaaatgttggctcaagt

SEQ ID NO: 7688 - DNA, 20 bp, Artificial Sequence
  chemically synthesized
ggatcaggtaaatgttgaac

SEQ ID NO: 7689 - DNA, 20 bp, Artificial Sequence
  chemically synthesized
ttgtcagagtgaatgatatg

SEQ ID NO: 7690 - DNA, 20 bp, Artificial Sequence
  chemically synthesized
ttacattggttgcctcttgt

SEQ ID NO: 7691 - DNA, 20 bp, Artificial Sequence
  chemically synthesized
ggttgcctcttgtcctagat

SEQ ID NO: 7692 - DNA, 20 bp, Artificial Sequence
  chemically synthesized
tatgcttcgggaattcagac

SEQ ID NO: 7693 - DNA, 20 bp, Artificial Sequence
  chemically synthesized
gatataaagttgaccacaac

SEQ ID NO: 7694 - DNA, 20 bp, Artificial Sequence
  chemically synthesized
gttttttgaaacatagaatt

SEQ ID NO: 7695 - DNA, 20 bp, Artificial Sequence
  chemically synthesized
tgtatcaaagtgaaatctga

SEQ ID NO: 7696 - DNA, 20 bp, Artificial Sequence
  chemically synthesized
atatacatatatatatcctg

SEQ ID NO: 7697 - DNA, 20 bp, Artificial Sequence
  chemically synthesized
tatgtagtacaagtatatat

SEQ ID NO: 7698 - DNA, 20 bp, Artificial Sequence
  chemically synthesized
accagcattgtaggatatat

SEQ ID NO: 7699 - DNA, 20 bp, Artificial Sequence
  chemically synthesized
gaattaagaattgagtccta

SEQ ID NO: 7700 - DNA, 20 bp, Artificial Sequence
  chemically synthesized
gagtcctaatctgttttatt

SEQ ID NO: 7701 - DNA, 20 bp, Artificial Sequence
  chemically synthesized
ctggtctttctaaagtgtct

SEQ ID NO: 7702 - DNA, 20 bp, Artificial Sequence
  chemically synthesized
caagcattaacctataacaa

SEQ ID NO: 7703 - DNA, 20 bp, Artificial Sequence
  chemically synthesized
ttttttttttgagaaaggga

SEQ ID NO: 7704 - DNA, 20 bp, Artificial Sequence
  chemically synthesized
acttatttaaataacatctt

SEQ ID NO: 7705 - DNA, 20 bp, Artificial Sequence
  chemically synthesized
attacacagttgaaggaaat

SEQ ID NO: 7706 - DNA, 20 bp, Artificial Sequence
  chemically synthesized
gaacttatttcttaatatat

SEQ ID NO: 7707 - DNA, 20 bp, Artificial Sequence
  chemically synthesized
ccaggaaactgtgtcataga

SEQ ID NO: 7708 - DNA, 20 bp, Artificial Sequence
  chemically synthesized
gctttgaaataatgagatcc

SEQ ID NO: 7709 - DNA, 20 bp, Artificial Sequence
  chemically synthesized
tccttatgtttactagaaat

SEQ ID NO: 7710 - DNA, 20 bp, Artificial Sequence
  chemically synthesized
aaattcgtaggcctggaatt

SEQ ID NO: 7711 - DNA, 20 bp, Artificial Sequence
  chemically synthesized
aaaccataggctcatcttct

SEQ ID NO: 7712 - DNA, 20 bp, Artificial Sequence
  chemically synthesized
ctaggagcttcaatgttatt

SEQ ID NO: 7713 - DNA, 20 bp, Artificial Sequence
  chemically synthesized
taatacgaaataacttatgt

SEQ ID NO: 7714 - DNA, 20 bp, Artificial Sequence
  chemically synthesized
ttagaaaacttctaaaaact

SEQ ID NO: 7715 - DNA, 20 bp, Artificial Sequence
  chemically synthesized
ctgtcagattgtctgggcct

SEQ ID NO: 7716 - DNA, 20 bp, Artificial Sequence
  chemically synthesized
ctgggaggctgaggcaggag

SEQ ID NO: 7717 - DNA, 20 bp, Artificial Sequence
  chemically synthesized
tctcaaaaaaaaaaaaaaat

SEQ ID NO: 7718 - DNA, 20 bp, Artificial Sequence
  chemically synthesized
tatcagattgttcctacacc

SEQ ID NO: 7719 - DNA, 20 bp, Artificial Sequence
  chemically synthesized
atcagtggaaatggttaagg

SEQ ID NO: 7720 - DNA, 20 bp, Artificial Sequence
  chemically synthesized
tgcaggtctttcagctgaaa

SEQ ID NO: 7721 - DNA, 20 bp, Artificial Sequence
  chemically synthesized
tctcagaagtactttccttg

SEQ ID NO: 7722 - DNA, 20 bp, Artificial Sequence
  chemically synthesized
acggaagaaaaacctttgta

SEQ ID NO: 7723 - DNA, 20 bp, Artificial Sequence
  chemically synthesized
aaaacctttgtacattgttt

SEQ ID NO: 7724 - DNA, 20 bp, Artificial Sequence
  chemically synthesized
ctttgtacattgtttttttg

SEQ ID NO: 7725 - DNA, 20 bp, Artificial Sequence
  chemically synthesized
cattttctatatcataattt

SEQ ID NO: 7726 - DNA, 20 bp, Artificial Sequence
  chemically synthesized
cttcggaacctgaagataga

SEQ ID NO: 7727 - DNA, 20 bp, Artificial Sequence
  chemically synthesized
ttacattgggtgtctctttt

SEQ ID NO: 7728 - DNA, 20 bp, Artificial Sequence
  chemically synthesized
gggtgtctcttttcctagat

SEQ ID NO: 7729 - DNA, 20 bp, Artificial Sequence
  chemically synthesized
tatgcttttgggatacagac

SEQ ID NO: 7730 - DNA, 20 bp, Artificial Sequence
  chemically synthesized
gatgtaaacttgaccacaac

SEQ ID NO: 7731 - DNA, 20 bp, Artificial Sequence
  chemically synthesized
aactactgtttttttgaaat

SEQ ID NO: 7732 - DNA, 20 bp, Artificial Sequence
  chemically synthesized
tttttttgaaatacatgatt

SEQ ID NO: 7733 - DNA, 20 bp, Artificial Sequence
  chemically synthesized
tgtgtcaaggtgaaatctga

SEQ ID NO: 7734 - DNA, 20 bp, Artificial Sequence
  chemically synthesized
aactgaaaactagagccttt

SEQ ID NO: 7735 - DNA, 20 bp, Artificial Sequence
  chemically synthesized
ttcaattccacagaaagaaa

SEQ ID NO: 7736 - DNA, 20 bp, Artificial Sequence
  chemically synthesized
aaagtgagcttgaacatagg

SEQ ID NO: 7737 - DNA, 20 bp, Artificial Sequence
  chemically synthesized
agaaagaaaattgatcaagc

SEQ ID NO: 7738 - DNA, 20 bp, Artificial Sequence
  chemically synthesized
tcaagcagatgtttaattgg

SEQ ID NO: 7739 - DNA, 20 bp, Artificial Sequence
  chemically synthesized
ttgattattagatcctactt

SEQ ID NO: 7740 - DNA, 20 bp, Artificial Sequence
  chemically synthesized
ctactttgtggatttagtcc

SEQ ID NO: 7741 - DNA, 20 bp, Artificial Sequence
  chemically synthesized
ttcctggtgaaccacagtta

SEQ ID NO: 7742 - DNA, 20 bp, Artificial Sequence
  chemically synthesized
ggtgaaccacagttagggtg

SEQ ID NO: 7743 - DNA, 20 bp, Artificial Sequence
  chemically synthesized
ctgtaaaaggaaattgtatt

SEQ ID NO: 7744 - DNA, 20 bp, Artificial Sequence
  chemically synthesized
atctaattacttggaacaag

SEQ ID NO: 7745 - DNA, 20 bp, Artificial Sequence
  chemically synthesized
tcactggtcagtcattttca

SEQ ID NO: 7746 - DNA, 20 bp, Artificial Sequence
  chemically synthesized
cttgctaagtcttaccatgt

SEQ ID NO: 7747 - DNA, 20 bp, Artificial Sequence
  chemically synthesized
ctttggcaatcattgcaact

SEQ ID NO: 7748 - DNA, 20 bp, Artificial Sequence
  chemically synthesized
cttccttcttgcatttctgc

SEQ ID NO: 7749 - DNA, 20 bp, Artificial Sequence
  chemically synthesized
gcctatgtttttgaagttgt

SEQ ID NO: 7750 - DNA, 20 bp, Artificial Sequence
  chemically synthesized
caggagaaattttactgaag

SEQ ID NO: 7751 - DNA, 20 bp, Artificial Sequence
  chemically synthesized
tttggcagagctaagttatc

SEQ ID NO: 7752 - DNA, 20 bp, Artificial Sequence
  chemically synthesized
agttatcttttgttttctta

SEQ ID NO: 7753 - DNA, 20 bp, Artificial Sequence
  chemically synthesized
cattttgctggctataaaat

SEQ ID NO: 7754 - DNA, 20 bp, Artificial Sequence
  chemically synthesized
gttcgaatgtgaaaggtcat

SEQ ID NO: 7755 - DNA, 20 bp, Artificial Sequence
  chemically synthesized
tcatgaatcagaaagatgtg

SEQ ID NO: 7756 - DNA, 20 bp, Artificial Sequence
  chemically synthesized
tcagaaagatgtggacagct

SEQ ID NO: 7757 - DNA, 20 bp, Artificial Sequence
  chemically synthesized
ctaccttgtagtgtcccata

SEQ ID NO: 7758 - DNA, 20 bp, Artificial Sequence
  chemically synthesized
ccatactgtgttttttacat

SEQ ID NO: 7759 - DNA, 20 bp, Artificial Sequence
  chemically synthesized
ctaactggttattttctttg

SEQ ID NO: 7760 - DNA, 20 bp, Artificial Sequence
  chemically synthesized
tattcaaaattctccattta

SEQ ID NO: 7761 - DNA, 20 bp, Artificial Sequence
  chemically synthesized
aacagtacaataaaccagcc

SEQ ID NO: 7762 - DNA, 20 bp, Artificial Sequence
  chemically synthesized
ataaccagttagcacttaaa

SEQ ID NO: 7763 - DNA, 20 bp, Artificial Sequence
  chemically synthesized
ttttcccttttatattactt

SEQ ID NO: 7764 - DNA, 20 bp, Artificial Sequence
  chemically synthesized
actacaatgtcaacattgtg

SEQ ID NO: 7765 - DNA, 20 bp, Artificial Sequence
  chemically synthesized
gcaaaatggtccaaacgcat

SEQ ID NO: 7766 - DNA, 20 bp, Artificial Sequence
  chemically synthesized
caacaacttcaaaaacatag

SEQ ID NO: 7767 - DNA, 20 bp, Artificial Sequence
  chemically synthesized
tacatggtaagacttagcaa

SEQ ID NO: 7768 - DNA, 20 bp, Artificial Sequence
  chemically synthesized
caagtaattagattttctaa

SEQ ID NO: 7769 - DNA, 20 bp, Artificial Sequence
  chemically synthesized
cttttacagagctcaactac

SEQ ID NO: 7770 - DNA, 20 bp, Artificial Sequence
  chemically synthesized
ttacagtaattctacacacc

SEQ ID NO: 7771 - DNA, 20 bp, Artificial Sequence
  chemically synthesized
acaccaaagaatgccaaaag

SEQ ID NO: 7772 - DNA, 20 bp, Artificial Sequence
  chemically synthesized
cttaactgcaattgctgaga

SEQ ID NO: 7773 - DNA, 20 bp, Artificial Sequence
  chemically synthesized
tctcgttcttgcacactagt

SEQ ID NO: 7774 - DNA, 20 bp, Artificial Sequence
  chemically synthesized
agaagcgcaaaaattatgat

SEQ ID NO: 7775 - DNA, 20 bp, Artificial Sequence
  chemically synthesized
ggcttttctgtgaaggacaa

SEQ ID NO: 7776 - DNA, 20 bp, Artificial Sequence
  chemically synthesized
ttcaaattttgcattctact

SEQ ID NO: 7777 - DNA, 20 bp, Artificial Sequence
  chemically synthesized
ggtggagtgggtgggtagga

SEQ ID NO: 7778 - DNA, 20 bp, Artificial Sequence
  chemically synthesized
acagtttcctggcctgatcc

SEQ ID NO: 7779 - DNA, 20 bp, Artificial Sequence
  chemically synthesized
tataacaaactgtaatatat

SEQ ID NO: 7780 - DNA, 20 bp, Artificial Sequence
  chemically synthesized
aattaagtagatatttttta

SEQ ID NO: 7781 - DNA, 20 bp, Artificial Sequence
  chemically synthesized
ggaaaaatcatttagacact

SEQ ID NO: 7782 - DNA, 20 bp, Artificial Sequence
  chemically synthesized
gcattgtaggatatattaaa

SEQ ID NO: 7783 - DNA, 20 bp, Artificial Sequence
  chemically synthesized
acatcttgaaaaatattcct

SEQ ID NO: 7784 - DNA, 20 bp, Artificial Sequence
  chemically synthesized
aaaaatattcctgaagaaaa

SEQ ID NO: 7785 - DNA, 20 bp, Artificial Sequence
  chemically synthesized
cctgaagaaaagaagaaaat

SEQ ID NO: 7786 - DNA, 20 bp, Artificial Sequence
  chemically synthesized
agaaaagaagaaaatgaaga

SEQ ID NO: 7787 - DNA, 20 bp, Artificial Sequence
  chemically synthesized
attacatataaacacatttg

SEQ ID NO: 7788 - DNA, 20 bp, Artificial Sequence
  chemically synthesized
taatatgtaattttttctct

SEQ ID NO: 7789 - DNA, 20 bp, Artificial Sequence
  chemically synthesized
caaaacaaaccaaaaaatgt

SEQ ID NO: 7790 - DNA, 20 bp, Artificial Sequence
  chemically synthesized
agtaacatgaaccaactatc

SEQ ID NO: 7791 - DNA, 20 bp, Artificial Sequence
  chemically synthesized
ctgaccagagtggcaaaaaa

SEQ ID NO: 7792 - DNA, 20 bp, Artificial Sequence
  chemically synthesized
tagttcaagtttccttatct

SEQ ID NO: 7793 - DNA, 20 bp, Artificial Sequence
  chemically synthesized
aacgagtgtaccacactaca

SEQ ID NO: 7794 - DNA, 20 bp, Artificial Sequence
  chemically synthesized
agtgtaccacactacagaag

SEQ ID NO: 7795 - DNA, 20 bp, Artificial Sequence
  chemically synthesized
ccccttcttgggctctggaa

SEQ ID NO: 7796 - DNA, 20 bp, Artificial Sequence
  chemically synthesized
tttggaaggtgttggagtat

SEQ ID NO: 7797 - DNA, 20 bp, Artificial Sequence
  chemically synthesized
gactatgagattttctaggt

SEQ ID NO: 7798 - DNA, 20 bp, Artificial Sequence
  chemically synthesized
cagaattatactgcctgcaa

SEQ ID NO: 7799 - DNA, 20 bp, Artificial Sequence
  chemically synthesized
tgtcttgttacggttctcaa

SEQ ID NO: 7800 - DNA, 20 bp, Artificial Sequence
  chemically synthesized
gtctctgccaggttttggta

SEQ ID NO: 7801 - DNA, 20 bp, Artificial Sequence
  chemically synthesized
cattccatattcatagatag

SEQ ID NO: 7802 - DNA, 20 bp, Artificial Sequence
  chemically synthesized
caatgatatccttcacaaaa

SEQ ID NO: 7803 - DNA, 20 bp, Artificial Sequence
  chemically synthesized
aaacagacacatagaccaat

SEQ ID NO: 7804 - DNA, 20 bp, Artificial Sequence
  chemically synthesized
accaatggagaatagagagc

SEQ ID NO: 7805 - DNA, 20 bp, Artificial Sequence
  chemically synthesized
taacgagctcctgcatggca

SEQ ID NO: 7806 - DNA, 20 bp, Artificial Sequence
  chemically synthesized
aaaagacaacctacacaatg

SEQ ID NO: 7807 - DNA, 20 bp, Artificial Sequence
  chemically synthesized
tgtatccaacaaagggatat

SEQ ID NO: 7808 - DNA, 20 bp, Artificial Sequence
  chemically synthesized
aaggacatgaaaatttttca

SEQ ID NO: 7809 - DNA, 20 bp, Artificial Sequence
  chemically synthesized
aaatgcttaatatcactaat

SEQ ID NO: 7810 - DNA, 20 bp, Artificial Sequence
  chemically synthesized
acagatgttggcaaggttgt

SEQ ID NO: 7811 - DNA, 20 bp, Artificial Sequence
  chemically synthesized
ctatcaatggtagactggat

SEQ ID NO: 7812 - DNA, 20 bp, Artificial Sequence
  chemically synthesized
ctaagtgaactaatccagga

SEQ ID NO: 7813 - DNA, 20 bp, Artificial Sequence
  chemically synthesized
ttttttggacaattttatgt

SEQ ID NO: 7814 - DNA, 20 bp, Artificial Sequence
  chemically synthesized
ttttgtcatgatcagcaaaa

SEQ ID NO: 7815 - DNA, 20 bp, Artificial Sequence
  chemically synthesized
catagctggctaaaaatgat

SEQ ID NO: 7816 - DNA, 20 bp, Artificial Sequence
  chemically synthesized
atactaagcactttaggaaa

SEQ ID NO: 7817 - DNA, 20 bp, Artificial Sequence
  chemically synthesized
tgtttcaaggcacagattaa

SEQ ID NO: 7818 - DNA, 20 bp, Artificial Sequence
  chemically synthesized
atagctaggattacaggcac

SEQ ID NO: 7819 - DNA, 20 bp, Artificial Sequence
  chemically synthesized
gccttttttcaactgataaa

SEQ ID NO: 7820 - DNA, 20 bp, Artificial Sequence
  chemically synthesized
tgtattttatattcatatgt

SEQ ID NO: 7821 - DNA, 20 bp, Artificial Sequence
  chemically synthesized
tatgtcaagaaaaaaaagac

SEQ ID NO: 7822 - DNA, 20 bp, Artificial Sequence
  chemically synthesized
tatggaaaaagaagaacatt

SEQ ID NO: 7823 - DNA, 20 bp, Artificial Sequence
  chemically synthesized
ttggtttcaatagcaaaaca

SEQ ID NO: 7824 - DNA, 20 bp, Artificial Sequence
  chemically synthesized
gtgttgatattcaaagaggc

SEQ ID NO: 7825 - DNA, 20 bp, Artificial Sequence
  chemically synthesized
ccagtgggggtgggagtctt

SEQ ID NO: 7826 - DNA, 20 bp, Artificial Sequence
  chemically synthesized
atgcaaaagggaaaaaaaga

SEQ ID NO: 7827 - DNA, 20 bp, Artificial Sequence
  chemically synthesized
actgtgctatgaacagaaca

SEQ ID NO: 7828 - DNA, 20 bp, Artificial Sequence
  chemically synthesized
tacagatatgtataactcaa

SEQ ID NO: 7829 - DNA, 20 bp, Artificial Sequence
  chemically synthesized
ttttgccgtggctacatcct

SEQ ID NO: 7830 - DNA, 20 bp, Artificial Sequence
  chemically synthesized
cttgacagtagactcaaata

SEQ ID NO: 7831 - DNA, 20 bp, Artificial Sequence
  chemically synthesized
ttttctaatatatattatat

SEQ ID NO: 7832 - DNA, 20 bp, Artificial Sequence
  chemically synthesized
attcaaatctatttagttaa

SEQ ID NO: 7833 - DNA, 20 bp, Artificial Sequence
  chemically synthesized
aaagagtctcaaaaatgatt

SEQ ID NO: 7834 - DNA, 20 bp, Artificial Sequence
  chemically synthesized
agtggtttcacttgtgataa

SEQ ID NO: 7835 - DNA, 20 bp, Artificial Sequence
  chemically synthesized
gcattttctctctgctggag

SEQ ID NO: 7836 - DNA, 20 bp, Artificial Sequence
  chemically synthesized
taatgttctgactatctata

SEQ ID NO: 7837 - DNA, 20 bp, Artificial Sequence
  chemically synthesized
attatcaataaaacatatcc

SEQ ID NO: 7838 - DNA, 20 bp, Artificial Sequence
  chemically synthesized
gattctgtggtcaaataaat

SEQ ID NO: 7839 - DNA, 20 bp, Artificial Sequence
  chemically synthesized
tctacacatgaaattcgttg

SEQ ID NO: 7840 - DNA, 20 bp, Artificial Sequence
  chemically synthesized
aattcgttgtaagaaatatc

SEQ ID NO: 7841 - DNA, 20 bp, Artificial Sequence
  chemically synthesized
gtccagatcctccaaaaaga

SEQ ID NO: 7842 - DNA, 20 bp, Artificial Sequence
  chemically synthesized
agcaggtcattgggtgggat

SEQ ID NO: 7843 - DNA, 20 bp, Artificial Sequence
  chemically synthesized
agctctcataaatggttata

SEQ ID NO: 7844 - DNA, 20 bp, Artificial Sequence
  chemically synthesized
ctttctaactaatggtcagt

SEQ ID NO: 7845 - DNA, 20 bp, Artificial Sequence
  chemically synthesized
agtagcactgaaggaaaggg

SEQ ID NO: 7846 - DNA, 20 bp, Artificial Sequence
  chemically synthesized
agctgatggcactgtaagtt

SEQ ID NO: 7847 - DNA, 20 bp, Artificial Sequence
  chemically synthesized
aggtgagctcttcaaataac

SEQ ID NO: 7848 - DNA, 20 bp, Artificial Sequence
  chemically synthesized
acattttctagagacctttc

SEQ ID NO: 7849 - DNA, 20 bp, Artificial Sequence
  chemically synthesized
aataccatcattttatagct

SEQ ID NO: 7850 - DNA, 20 bp, Artificial Sequence
  chemically synthesized
tcatgaaaatctgtaactgt

SEQ ID NO: 7851 - DNA, 20 bp, Artificial Sequence
  chemically synthesized
aactgtgaagaaactttaaa

SEQ ID NO: 7852 - DNA, 20 bp, Artificial Sequence
  chemically synthesized
acaaatactggctatttcta

SEQ ID NO: 7853 - DNA, 20 bp, Artificial Sequence
  chemically synthesized
agatgaggaaataggtgtat

SEQ ID NO: 7854 - DNA, 20 bp, Artificial Sequence
  chemically synthesized
agctttaatgagaagtaaaa

SEQ ID NO: 7855 - DNA, 20 bp, Artificial Sequence
  chemically synthesized
atgagaagtaaaacaagaaa

SEQ ID NO: 7856 - DNA, 20 bp, Artificial Sequence
  chemically synthesized
tggaataacaccaaatatat

SEQ ID NO: 7857 - DNA, 20 bp, Artificial Sequence
  chemically synthesized
gcttcatccagcttttatga

SEQ ID NO: 7858 - DNA, 20 bp, Artificial Sequence
  chemically synthesized
aaagaaaaattcttacttga

SEQ ID NO: 7859 - DNA, 20 bp, Artificial Sequence
  chemically synthesized
taacacactgccttcatttc

SEQ ID NO: 7860 - DNA, 20 bp, Artificial Sequence
  chemically synthesized
caacttcctcttctgagctg

SEQ ID NO: 7861 - DNA, 20 bp, Artificial Sequence
  chemically synthesized
gactaacctaaatgacaaaa

SEQ ID NO: 7862 - DNA, 20 bp, Artificial Sequence
  chemically synthesized
atgacaaaatcagaaaacaa

SEQ ID NO: 7863 - DNA, 20 bp, Artificial Sequence
  chemically synthesized
caaagtccttactattaaaa

SEQ ID NO: 7864 - DNA, 20 bp, Artificial Sequence
  chemically synthesized
acaataaagtgacatgaagt

SEQ ID NO: 7865 - DNA, 20 bp, Artificial Sequence
  chemically synthesized
attaagtcatcatgcctctt

SEQ ID NO: 7866 - DNA, 20 bp, Artificial Sequence
  chemically synthesized
caaaatcagcacatatattt

SEQ ID NO: 7867 - DNA, 20 bp, Artificial Sequence
  chemically synthesized
atattttaagaatcaataaa

SEQ ID NO: 7868 - DNA, 20 bp, Artificial Sequence
  chemically synthesized
aattttgaaatttgtagtct

SEQ ID NO: 7869 - DNA, 20 bp, Artificial Sequence
  chemically synthesized
tcttcataagcatctttaag

SEQ ID NO: 7870 - DNA, 20 bp, Artificial Sequence
  chemically synthesized
ccccatattattaagttgct

SEQ ID NO: 7871 - DNA, 20 bp, Artificial Sequence
  chemically synthesized
aattcacacattcaatctaa

SEQ ID NO: 7872 - DNA, 20 bp, Artificial Sequence
  chemically synthesized
aggcaactcctccttttcgg

SEQ ID NO: 7873 - DNA, 20 bp, Artificial Sequence
  chemically synthesized
taaatacagaagaggctcta

SEQ ID NO: 7874 - DNA, 20 bp, Artificial Sequence
  chemically synthesized
aaaacaaaatcccagtaaaa

SEQ ID NO: 7875 - DNA, 20 bp, Artificial Sequence
  chemically synthesized
ttgttaagtcagacctttac

SEQ ID NO: 7876 - DNA, 20 bp, Artificial Sequence
  chemically synthesized
cattcatgctaaaaagaagc

SEQ ID NO: 7877 - DNA, 20 bp, Artificial Sequence
  chemically synthesized
cattttcctagaggagaggg

SEQ ID NO: 7878 - DNA, 20 bp, Artificial Sequence
  chemically synthesized
acgatacaacataagactta

SEQ ID NO: 7879 - DNA, 20 bp, Artificial Sequence
  chemically synthesized
ccaaaatttattctgggcaa

SEQ ID NO: 7880 - DNA, 20 bp, Artificial Sequence
  chemically synthesized
ccttatacagatacatgctg

SEQ ID NO: 7881 - DNA, 20 bp, Artificial Sequence
  chemically synthesized
tttcttgtctttcctgagca

SEQ ID NO: 7882 - DNA, 20 bp, Artificial Sequence
  chemically synthesized
ttgtgtagtaatttagttca

SEQ ID NO: 7883 - DNA, 20 bp, Artificial Sequence
  chemically synthesized
agtgaaaaaaagataacttc

SEQ ID NO: 7884 - DNA, 20 bp, Artificial Sequence
  chemically synthesized
ctgcatagtttcaaaaagga

SEQ ID NO: 7885 - DNA, 20 bp, Artificial Sequence
  chemically synthesized
attttaagagtttcataatg

SEQ ID NO: 7886 - DNA, 20 bp, Artificial Sequence
  chemically synthesized
atcaaactggaacacaggaa

SEQ ID NO: 7887 - DNA, 20 bp, Artificial Sequence
  chemically synthesized
cacatagtagtaagcaaaag

SEQ ID NO: 7888 - DNA, 20 bp, Artificial Sequence
  chemically synthesized
ttagagtcaaaggctcccaa

SEQ ID NO: 7889 - DNA, 20 bp, Artificial Sequence
  chemically synthesized
aaaaataagatttatatgta

SEQ ID NO: 7890 - DNA, 20 bp, Artificial Sequence
  chemically synthesized
cacactctatgaagtgggag

SEQ ID NO: 7891 - DNA, 20 bp, Artificial Sequence
  chemically synthesized
tccatttagagtgtggttgg

SEQ ID NO: 7892 - DNA, 20 bp, Artificial Sequence
  chemically synthesized
aatgtgccttactctaggac

SEQ ID NO: 7893 - DNA, 20 bp, Artificial Sequence
  chemically synthesized
cttatattcagggcatacat

SEQ ID NO: 7894 - DNA, 20 bp, Artificial Sequence
  chemically synthesized
gggcatacatttagaaattc

SEQ ID NO: 7895 - DNA, 20 bp, Artificial Sequence
  chemically synthesized
aatgttacatactaaagctc

SEQ ID NO: 7896 - DNA, 20 bp, Artificial Sequence
  chemically synthesized
taacccatagcaactaaaaa

SEQ ID NO: 7897 - DNA, 20 bp, Artificial Sequence
  chemically synthesized
gtacgtgaatgtgaccttat

SEQ ID NO: 7898 - DNA, 20 bp, Artificial Sequence
  chemically synthesized
ggattgttgaaactacaagg

SEQ ID NO: 7899 - DNA, 20 bp, Artificial Sequence
  chemically synthesized
tgatttcggacttctagctt

SEQ ID NO: 7900 - DNA, 20 bp, Artificial Sequence
  chemically synthesized
ttctagcttctagaattgtg

SEQ ID NO: 7901 - DNA, 20 bp, Artificial Sequence
  chemically synthesized
tggtgctttgttaagtaatc

SEQ ID NO: 7902 - DNA, 20 bp, Artificial Sequence
  chemically synthesized
aagtaatacaacacctaaca

SEQ ID NO: 7903 - DNA, 20 bp, Artificial Sequence
  chemically synthesized
ctcagtgaactctctggtta

SEQ ID NO: 7904 - DNA, 20 bp, Artificial Sequence
  chemically synthesized
aaaatatttaatatgctagc

SEQ ID NO: 7905 - DNA, 20 bp, Artificial Sequence
  chemically synthesized
gagagttctacactaaatgg

SEQ ID NO: 7906 - DNA, 20 bp, Artificial Sequence
  chemically synthesized
gctttagttatttagaacac

SEQ ID NO: 7907 - DNA, 20 bp, Artificial Sequence
  chemically synthesized
gttcaagcctttgaatttaa

SEQ ID NO: 7908 - DNA, 20 bp, Artificial Sequence
  chemically synthesized
agtccttcaggaggtattca

SEQ ID NO: 7909 - DNA, 20 bp, Artificial Sequence
  chemically synthesized
agtaaaaaaaaaaatttaaa

SEQ ID NO: 7910 - DNA, 20 bp, Artificial Sequence
  chemically synthesized
aaaaaaatttaaaatagaaa

SEQ ID NO: 7911 - DNA, 20 bp, Artificial Sequence
  chemically synthesized
tagaaaatagaaaaaagctt

SEQ ID NO: 7912 - DNA, 20 bp, Artificial Sequence
  chemically synthesized
agcttctagaataaggatac

SEQ ID NO: 7913 - DNA, 20 bp, Artificial Sequence
  chemically synthesized
aaaagttataattttttatt

SEQ ID NO: 7914 - DNA, 20 bp, Artificial Sequence
  chemically synthesized
ttatctaagactgaaagtaa

SEQ ID NO: 7915 - DNA, 20 bp, Artificial Sequence
  chemically synthesized
caaagtaaacaattttactt

SEQ ID NO: 7916 - DNA, 20 bp, Artificial Sequence
  chemically synthesized
acagttaactctaagtatgt

SEQ ID NO: 7917 - DNA, 20 bp, Artificial Sequence
  chemically synthesized
tagttacactctcactccta

SEQ ID NO: 7918 - DNA, 20 bp, Artificial Sequence
  chemically synthesized
cactctcactcctaacagaa

SEQ ID NO: 7919 - DNA, 20 bp, Artificial Sequence
  chemically synthesized
ctactcgggaggctgaggca

SEQ ID NO: 7920 - DNA, 20 bp, Artificial Sequence
  chemically synthesized
gacagagagagactctgcct

SEQ ID NO: 7921 - DNA, 20 bp, Artificial Sequence
  chemically synthesized
acaaacaaacaaacaaacaa

SEQ ID NO: 7922 - DNA, 20 bp, Artificial Sequence
  chemically synthesized
aaacaaacaaacaaaaagaa

SEQ ID NO: 7923 - DNA, 20 bp, Artificial Sequence
  chemically synthesized
aaacaaacaaaaagaataag

SEQ ID NO: 7924 - DNA, 20 bp, Artificial Sequence
  chemically synthesized
cttagttttaaatcctacca

SEQ ID NO: 7925 - DNA, 20 bp, Artificial Sequence
  chemically synthesized
cttgaagtcatcgtctttgg

SEQ ID NO: 7926 - DNA, 20 bp, Artificial Sequence
  chemically synthesized
atctcttccctgattggtat

SEQ ID NO: 7927 - DNA, 20 bp, Artificial Sequence
  chemically synthesized
acagtgaactgtttacagta

SEQ ID NO: 7928 - DNA, 20 bp, Artificial Sequence
  chemically synthesized
ctgggaactatctaattaac

SEQ ID NO: 7929 - DNA, 20 bp, Artificial Sequence
  chemically synthesized
gttaaaagtttcccaaagtc

SEQ ID NO: 7930 - DNA, 20 bp, Artificial Sequence
  chemically synthesized
ggtgcatggcaactgtttga

SEQ ID NO: 7931 - DNA, 20 bp, Artificial Sequence
  chemically synthesized
aagcaaccaggtcatgtccc

SEQ ID NO: 7932 - DNA, 20 bp, Artificial Sequence
  chemically synthesized
cccgacacccagcttcggtc

SEQ ID NO: 7933 - DNA, 20 bp, Artificial Sequence
  chemically synthesized
taggggaggctgctggatct

SEQ ID NO: 7934 - DNA, 20 bp, Artificial Sequence
  chemically synthesized
cgcaattttgcctttacatg

SEQ ID NO: 7935 - DNA, 20 bp, Artificial Sequence
  chemically synthesized
cgttttaatcattcaccgag

SEQ ID NO: 7936 - DNA, 20 bp, Artificial Sequence
  chemically synthesized
tctcaacgtctacaccttct

SEQ ID NO: 7937 - DNA, 20 bp, Artificial Sequence
  chemically synthesized
taaaatagtgggggtagggg

SEQ ID NO: 7938 - DNA, 20 bp, Artificial Sequence
  chemically synthesized
attaaaaaacaactgaattt

SEQ ID NO: 7939 - DNA, 20 bp, Artificial Sequence
  chemically synthesized
tggttggggggcttgggggg

SEQ ID NO: 7940 - DNA, 20 bp, Artificial Sequence
  chemically synthesized
gtccattcttacactgctat

SEQ ID NO: 7941 - DNA, 20 bp, Artificial Sequence
  chemically synthesized
actgaaactgggtaatttat

SEQ ID NO: 7942 - DNA, 20 bp, Artificial Sequence
  chemically synthesized
atggcaggaactgggggaag

SEQ ID NO: 7943 - DNA, 20 bp, Artificial Sequence
  chemically synthesized
gttatttctttatagcagtg

SEQ ID NO: 7944 - DNA, 20 bp, Artificial Sequence
  chemically synthesized
taagtgaagtacaactcagt

SEQ ID NO: 7945 - DNA, 20 bp, Artificial Sequence
  chemically synthesized
aaattaagtgatttatttgg

SEQ ID NO: 7946 - DNA, 20 bp, Artificial Sequence
  chemically synthesized
taagtgatttatttgggaag

SEQ ID NO: 7947 - DNA, 20 bp, Artificial Sequence
  chemically synthesized
cttcggtatatccacacaac

SEQ ID NO: 7948 - DNA, 20 bp, Artificial Sequence
  chemically synthesized
gggggaggttttgttaaaaa

SEQ ID NO: 7949 - DNA, 20 bp, Artificial Sequence
  chemically synthesized
aaatgttacatagtgctctt

SEQ ID NO: 7950 - DNA, 20 bp, Artificial Sequence
  chemically synthesized
gttgcagcagctggacttgg

SEQ ID NO: 7951 - DNA, 20 bp, Artificial Sequence
  chemically synthesized
actattttagttgggtataa

SEQ ID NO: 7952 - DNA, 20 bp, Artificial Sequence
  chemically synthesized
ttgtgttttttacacatcaa

SEQ ID NO: 7953 - DNA, 20 bp, Artificial Sequence
  chemically synthesized
cagtgtgaaaatcatgcttg

SEQ ID NO: 7954 - DNA, 20 bp, Artificial Sequence
  chemically synthesized
gccccatttcgctagcctcg

SEQ ID NO: 7955 - DNA, 20 bp, Artificial Sequence
  chemically synthesized
gtgagaaaacgtcatcgcac

SEQ ID NO: 7956 - DNA, 20 bp, Artificial Sequence
  chemically synthesized
cagtactcgctgagggtgaa

SEQ ID NO: 7957 - DNA, 20 bp, Artificial Sequence
  chemically synthesized
gacctgataaagattaacca

SEQ ID NO: 7958 - DNA, 20 bp, Artificial Sequence
  chemically synthesized
gagcgctgccgctgcgggct

SEQ ID NO: 7959 - DNA, 20 bp, Artificial Sequence
  chemically synthesized
aacaccaccaggctttgtat

SEQ ID NO: 7960 - DNA, 20 bp, Artificial Sequence
  chemically synthesized
taacataatctgtgaatatc

SEQ ID NO: 7961 - DNA, 20 bp, Artificial Sequence
  chemically synthesized
gggatattaataacctggag

SEQ ID NO: 7962 - DNA, 20 bp, Artificial Sequence
  chemically synthesized
gcactccacaatttgctttc

SEQ ID NO: 7963 - DNA, 20 bp, Artificial Sequence
  chemically synthesized
aggttagcctacctattgtc

SEQ ID NO: 7964 - DNA, 20 bp, Artificial Sequence
  chemically synthesized
gtctgagaaacttggaactg

SEQ ID NO: 7965 - DNA, 20 bp, Artificial Sequence
  chemically synthesized
tcttccctgatgttgaagat

SEQ ID NO: 7966 - DNA, 20 bp, Artificial Sequence
  chemically synthesized
tcctgcttctctttgggctg

SEQ ID NO: 7967 - DNA, 20 bp, Artificial Sequence
  chemically synthesized
gaagtgagggctttatgatt

SEQ ID NO: 7968 - DNA, 20 bp, Artificial Sequence
  chemically synthesized
tgattttttaacagacgttt

SEQ ID NO: 7969 - DNA, 20 bp, Artificial Sequence
  chemically synthesized
ctgcatgtatgggattattt

SEQ ID NO: 7970 - DNA, 20 bp, Artificial Sequence
  chemically synthesized
ttatccacctttttaaccta

SEQ ID NO: 7971 - DNA, 20 bp, Artificial Sequence
  chemically synthesized
ctttttaacctaaaagaatg

SEQ ID NO: 7972 - DNA, 20 bp, Artificial Sequence
  chemically synthesized
ttatctaaatatatgcaaac

SEQ ID NO: 7973 - DNA, 20 bp, Artificial Sequence
  chemically synthesized
atggcacataactgtatttg

SEQ ID NO: 7974 - DNA, 20 bp, Artificial Sequence
  chemically synthesized
gggccaaatctccagtcata

SEQ ID NO: 7975 - DNA, 20 bp, Artificial Sequence
  chemically synthesized
aacaggtacttctcagtgat

SEQ ID NO: 7976 - DNA, 20 bp, Artificial Sequence
  chemically synthesized
ttgccaaccacactctaaat

SEQ ID NO: 7977 - DNA, 20 bp, Artificial Sequence
  chemically synthesized
aacacatataatccggaaag

SEQ ID NO: 7978 - DNA, 20 bp, Artificial Sequence
  chemically synthesized
aagctaaagcttagacaaat

SEQ ID NO: 7979 - DNA, 20 bp, Artificial Sequence
  chemically synthesized
gttgaatggaatggttccca

SEQ ID NO: 7980 - DNA, 20 bp, Artificial Sequence
  chemically synthesized
agagaattccttttaatctt

SEQ ID NO: 7981 - DNA, 20 bp, Artificial Sequence
  chemically synthesized
aggaaaaataatatctttta

SEQ ID NO: 7982 - DNA, 20 bp, Artificial Sequence
  chemically synthesized
ttatgaaactcttaaaatca

SEQ ID NO: 7983 - DNA, 20 bp, Artificial Sequence
  chemically synthesized
gaagttatctttttttcact

SEQ ID NO: 7984 - DNA, 20 bp, Artificial Sequence
  chemically synthesized
gcccccattttttccctaaa

SEQ ID NO: 7985 - DNA, 20 bp, Artificial Sequence
  chemically synthesized
tttctcttgctcaggaaaga

SEQ ID NO: 7986 - DNA, 20 bp, Artificial Sequence
  chemically synthesized
gattatcttagaaggcacag

SEQ ID NO: 7987 - DNA, 20 bp, Artificial Sequence
  chemically synthesized
tggagcttttatggaggtgt

SEQ ID NO: 7988 - DNA, 20 bp, Artificial Sequence
  chemically synthesized
ccctttttttttctgtttgc

SEQ ID NO: 7989 - DNA, 20 bp, Artificial Sequence
  chemically synthesized
agcagagaagttcttttgaa

SEQ ID NO: 7990 - DNA, 20 bp, Artificial Sequence
  chemically synthesized
tttgaaggagaatctccagt

SEQ ID NO: 7991 - DNA, 20 bp, Artificial Sequence
  chemically synthesized
tgtgtaaaggtctgacttaa

SEQ ID NO: 7992 - DNA, 20 bp, Artificial Sequence
  chemically synthesized
gaaaagatttccctttaccc

SEQ ID NO: 7993 - DNA, 20 bp, Artificial Sequence
  chemically synthesized
tgggattttgttttttcaaa

SEQ ID NO: 7994 - DNA, 20 bp, Artificial Sequence
  chemically synthesized
tttgggaagtacaaggagga

SEQ ID NO: 7995 - DNA, 20 bp, Artificial Sequence
  chemically synthesized
ccaatgattccatactctct

SEQ ID NO: 7996 - DNA, 20 bp, Artificial Sequence
  chemically synthesized
agctttagggccgggcatgg

SEQ ID NO: 7997 - DNA, 20 bp, Artificial Sequence
  chemically synthesized
actccatctcaaaaaaaaaa

SEQ ID NO: 7998 - DNA, 20 bp, Artificial Sequence
  chemically synthesized
atctcaaaaaaaaaaaaaga

SEQ ID NO: 7999 - DNA, 20 bp, Artificial Sequence
  chemically synthesized
caaaaaaaaaaaaagaaaag

SEQ ID NO: 8000 - DNA, 20 bp, Artificial Sequence
  chemically synthesized
aattacgaagtattttcatc

SEQ ID NO: 8001 - DNA, 20 bp, Artificial Sequence
  chemically synthesized
tgaaatcacacagtgttcct

SEQ ID NO: 8002 - DNA, 20 bp, Artificial Sequence
  chemically synthesized
atgaaggctttcttctcaag

SEQ ID NO: 8003 - DNA, 20 bp, Artificial Sequence
  chemically synthesized
ctcacctatgacaagatttg

SEQ ID NO: 8004 - DNA, 20 bp, Artificial Sequence
  chemically synthesized
cctatgacaagatttggaag

SEQ ID NO: 8005 - DNA, 20 bp, Artificial Sequence
  chemically synthesized
tgttattccatttgctattt

SEQ ID NO: 8006 - DNA, 20 bp, Artificial Sequence
  chemically synthesized
aaccgagtttccatcccaga

SEQ ID NO: 8007 - DNA, 20 bp, Artificial Sequence
  chemically synthesized
tttacttctcattaaagcta

SEQ ID NO: 8008 - DNA, 20 bp, Artificial Sequence
  chemically synthesized
atttcctatttacatttctt

SEQ ID NO: 8009 - DNA, 20 bp, Artificial Sequence
  chemically synthesized
tgggctgttttaaggctcaa

SEQ ID NO: 8010 - DNA, 20 bp, Artificial Sequence
  chemically synthesized
aaaatttctgtgaaaggtct

SEQ ID NO: 8011 - DNA, 20 bp, Artificial Sequence
  chemically synthesized
gttgtagtaggtagcagtgc

SEQ ID NO: 8012 - DNA, 20 bp, Artificial Sequence
  chemically synthesized
tgagtttgaaataaactgag

SEQ ID NO: 8013 - DNA, 20 bp, Artificial Sequence
  chemically synthesized
cagtagtgtataaatggttt

SEQ ID NO: 8014 - DNA, 20 bp, Artificial Sequence
  chemically synthesized
gtacttttggtagtagttcc

SEQ ID NO: 8015 - DNA, 20 bp, Artificial Sequence
  chemically synthesized
ttttcttcactgaccattag

SEQ ID NO: 8016 - DNA, 20 bp, Artificial Sequence
  chemically synthesized
tgccgagctgctttatgaag

SEQ ID NO: 8017 - DNA, 20 bp, Artificial Sequence
  chemically synthesized
ccatcctccatcctcttgag

SEQ ID NO: 8018 - DNA, 20 bp, Artificial Sequence
  chemically synthesized
ccttttatcttgttttaatt

SEQ ID NO: 8019 - DNA, 20 bp, Artificial Sequence
  chemically synthesized
gagctgtaggtcaaatatta

SEQ ID NO: 8020 - DNA, 20 bp, Artificial Sequence
  chemically synthesized
gttgcatggtcaaataagtc

SEQ ID NO: 8021 - DNA, 20 bp, Artificial Sequence
  chemically synthesized
ttttctaaatttatttgacc

SEQ ID NO: 8022 - DNA, 20 bp, Artificial Sequence
  chemically synthesized
cccatggattccaggtgact

SEQ ID NO: 8023 - DNA, 20 bp, Artificial Sequence
  chemically synthesized
cctttttctgactccagcag

SEQ ID NO: 8024 - DNA, 20 bp, Artificial Sequence
  chemically synthesized
aatgctccaggttatgtgaa

SEQ ID NO: 8025 - DNA, 20 bp, Artificial Sequence
  chemically synthesized
agtatcatcagtgaaacacc

SEQ ID NO: 8026 - DNA, 20 bp, Artificial Sequence
  chemically synthesized
atttctatatataatatata

SEQ ID NO: 8027 - DNA, 20 bp, Artificial Sequence
  chemically synthesized
ctactgtcaaggagcaaaac

SEQ ID NO: 8028 - DNA, 20 bp, Artificial Sequence
  chemically synthesized
ttatttataatacttaaagg

SEQ ID NO: 8029 - DNA, 20 bp, Artificial Sequence
  chemically synthesized
caattatagtcccaagacgt

SEQ ID NO: 8030 - DNA, 20 bp, Artificial Sequence
  chemically synthesized
aataatgtgctgctatgaac

SEQ ID NO: 8031 - DNA, 20 bp, Artificial Sequence
  chemically synthesized
cagaatgatagtatttaaat

SEQ ID NO: 8032 - DNA, 20 bp, Artificial Sequence
  chemically synthesized
aatacaaatcatatagtttt

SEQ ID NO: 8033 - DNA, 20 bp, Artificial Sequence
  chemically synthesized
atacatactcattgaggtgc

SEQ ID NO: 8034 - DNA, 20 bp, Artificial Sequence
  chemically synthesized
attgaggtgcatagaataat

SEQ ID NO: 8035 - DNA, 20 bp, Artificial Sequence
  chemically synthesized
aaaacagaagttgcatttaa

SEQ ID NO: 8036 - DNA, 20 bp, Artificial Sequence
  chemically synthesized
cagaagttgcatttaaaaag

SEQ ID NO: 8037 - DNA, 20 bp, Artificial Sequence
  chemically synthesized
aaaagaaagaaatattacca

SEQ ID NO: 8038 - DNA, 20 bp, Artificial Sequence
  chemically synthesized
ttaccagcagaattatgctt

SEQ ID NO: 8039 - DNA, 20 bp, Artificial Sequence
  chemically synthesized
aagatgttctgaaatcagga

SEQ ID NO: 8040 - DNA, 20 bp, Artificial Sequence
  chemically synthesized
ccatctctacaaaaaataaa

SEQ ID NO: 8041 - DNA, 20 bp, Artificial Sequence
  chemically synthesized
aggtctaagtgtgtaaggca

SEQ ID NO: 8042 - DNA, 20 bp, Artificial Sequence
  chemically synthesized
taagcctgacctatgtatct

SEQ ID NO: 8043 - DNA, 20 bp, Artificial Sequence
  chemically synthesized
agtaagtgttaaccaaaagc

SEQ ID NO: 8044 - DNA, 20 bp, Artificial Sequence
  chemically synthesized
agccttatacatctcaaggt

SEQ ID NO: 8045 - DNA, 20 bp, Artificial Sequence
  chemically synthesized
ccagagtttttattggttct

SEQ ID NO: 8046 - DNA, 20 bp, Artificial Sequence
  chemically synthesized
gaaagtagtaggggaatgtt

SEQ ID NO: 8047 - DNA, 20 bp, Artificial Sequence
  chemically synthesized
ttgaggaaatttagtgaact

SEQ ID NO: 8048 - DNA, 20 bp, Artificial Sequence
  chemically synthesized
cacatgcatgtgtctttatg

SEQ ID NO: 8049 - DNA, 20 bp, Artificial Sequence
  chemically synthesized
ttgtattcctttaggtacat

SEQ ID NO: 8050 - DNA, 20 bp, Artificial Sequence
  chemically synthesized
tagttctattttcagttatt

SEQ ID NO: 8051 - DNA, 20 bp, Artificial Sequence
  chemically synthesized
ttttaataatagccattcct

SEQ ID NO: 8052 - DNA, 20 bp, Artificial Sequence
  chemically synthesized
atctgtgccagggcctatgt

SEQ ID NO: 8053 - DNA, 20 bp, Artificial Sequence
  chemically synthesized
tctctttatacctgatgtat

SEQ ID NO: 8054 - DNA, 20 bp, Artificial Sequence
  chemically synthesized
caaaacctggcagagacaca

SEQ ID NO: 8055 - DNA, 20 bp, Artificial Sequence
  chemically synthesized
tggcagagacacaacagaaa

SEQ ID NO: 8056 - DNA, 20 bp, Artificial Sequence
  chemically synthesized
acaagattatctcaataggt

SEQ ID NO: 8057 - DNA, 20 bp, Artificial Sequence
  chemically synthesized
gagtgagaccctgtctcaaa

SEQ ID NO: 8058 - DNA, 20 bp, Artificial Sequence
  chemically synthesized
ctagccagagcaatcaggaa

SEQ ID NO: 8059 - DNA, 20 bp, Artificial Sequence
  chemically synthesized
ccagagcaatcaggaaagag

SEQ ID NO: 8060 - DNA, 20 bp, Artificial Sequence
  chemically synthesized
agcaatcaggaaagagaaag

SEQ ID NO: 8061 - DNA, 20 bp, Artificial Sequence
  chemically synthesized
caggcagtataattctgtac

SEQ ID NO: 8062 - DNA, 20 bp, Artificial Sequence
  chemically synthesized
gaaaatctcatagtctctgc

SEQ ID NO: 8063 - DNA, 20 bp, Artificial Sequence
  chemically synthesized
agggaggtgaaagatctcta

SEQ ID NO: 8064 - DNA, 20 bp, Artificial Sequence
  chemically synthesized
agaattacaaaacactgctg

SEQ ID NO: 8065 - DNA, 20 bp, Artificial Sequence
  chemically synthesized
tagaacctagggaaaatgga

SEQ ID NO: 8066 - DNA, 20 bp, Artificial Sequence
  chemically synthesized
tttgtttttttttgagatgg

SEQ ID NO: 8067 - DNA, 20 bp, Artificial Sequence
  chemically synthesized
ggggactgcttatattcttt

SEQ ID NO: 8068 - DNA, 20 bp, Artificial Sequence
  chemically synthesized
caactactgttttttgaaac

SEQ ID NO: 8069 - DNA, 20 bp, Artificial Sequence
  chemically synthesized
attttaacatttataaaatg

SEQ ID NO: 8070 - DNA, 20 bp, Artificial Sequence
  chemically synthesized
catttataaaatgatagaat

SEQ ID NO: 8071 - DNA, 20 bp, Artificial Sequence
  chemically synthesized
gtaagttttttttttttttt

SEQ ID NO: 8072 - DNA, 20 bp, Artificial Sequence
  chemically synthesized
taatgagatccttatgttta

SEQ ID NO: 8073 - DNA, 20 bp, Artificial Sequence
  chemically synthesized
aatgttatttgaagatttgg

SEQ ID NO: 8074 - DNA, 20 bp, Artificial Sequence
  chemically synthesized
aaacatggatgtattctgaa

SEQ ID NO: 8075 - DNA, 20 bp, Artificial Sequence
  chemically synthesized
aatgcatttttaaagataaa

SEQ ID NO: 8076 - DNA, 20 bp, Artificial Sequence
  chemically synthesized
ctacctgggaggctgaggca

SEQ ID NO: 8077 - DNA, 20 bp, Artificial Sequence
  chemically synthesized
caagcactgtcaacactgtc

SEQ ID NO: 8078 - DNA, 20 bp, Artificial Sequence
  chemically synthesized
tcatagaaacttctgtacga

SEQ ID NO: 8079 - DNA, 20 bp, Artificial Sequence
  chemically synthesized
acagtttctacttgtccttc

SEQ ID NO: 8080 - DNA, 20 bp, Artificial Sequence
  chemically synthesized
gtgagtaaaactcctacacg

SEQ ID NO: 8081 - DNA, 20 bp, Artificial Sequence
  chemically synthesized
aacataataatggctctggc

SEQ ID NO: 8082 - DNA, 20 bp, Artificial Sequence
  chemically synthesized
acgttcccctggatcatact

SEQ ID NO: 8083 - DNA, 20 bp, Artificial Sequence
  chemically synthesized
cttttggcattctttggtgt

SEQ ID NO: 8084 - DNA, 20 bp, Artificial Sequence
  chemically synthesized
ctttaaatgatttcaattcc

SEQ ID NO: 8085 - DNA, 20 bp, Artificial Sequence
  chemically synthesized
aaatgatttcaattccacag

SEQ ID NO: 8086 - DNA, 20 bp, Artificial Sequence
  chemically synthesized
gcttgaacataggatgagct

SEQ ID NO: 8087 - DNA, 20 bp, Artificial Sequence
  chemically synthesized
gaacataggatgagctttag

SEQ ID NO: 8088 - DNA, 20 bp, Artificial Sequence
  chemically synthesized
tagtccctgggattcagtct

SEQ ID NO: 8089 - DNA, 20 bp, Artificial Sequence
  chemically synthesized
ctcctgtgccttttttctcc

SEQ ID NO: 8090 - DNA, 20 bp, Artificial Sequence
  chemically synthesized
ctgagattataaaatgcctt

SEQ ID NO: 8091 - DNA, 20 bp, Artificial Sequence
  chemically synthesized
taactaataagatctttttt

SEQ ID NO: 8092 - DNA, 20 bp, Artificial Sequence
  chemically synthesized
ataagatctttttttcagaa

SEQ ID NO: 8093 - DNA, 20 bp, Artificial Sequence
  chemically synthesized
ataggctataaggaatagca

SEQ ID NO: 8094 - DNA, 20 bp, Artificial Sequence
  chemically synthesized
taaaagggaaaatatattta

SEQ ID NO: 8095 - DNA, 20 bp, Artificial Sequence
  chemically synthesized
aatagctttcccatcatgaa

SEQ ID NO: 8096 - DNA, 20 bp, Artificial Sequence
  chemically synthesized
ctggtttattgtactgttat

SEQ ID NO: 8097 - DNA, 20 bp, Artificial Sequence
  chemically synthesized
atatatcttttctcctaaat

SEQ ID NO: 8098 - DNA, 20 bp, Artificial Sequence
  chemically synthesized
aaataagaatctaccatgta

SEQ ID NO: 8099 - DNA, 20 bp, Artificial Sequence
  chemically synthesized
catctagttcagtggttgtc

SEQ ID NO: 8100 - DNA, 20 bp, Artificial Sequence
  chemically synthesized
aaatggtccaaacgcattaa

SEQ ID NO: 8101 - DNA, 20 bp, Artificial Sequence
  chemically synthesized
tctgccaaagtagcacctag

SEQ ID NO: 8102 - DNA, 20 bp, Artificial Sequence
  chemically synthesized
aggcaaacagcaacaacttc

SEQ ID NO: 8103 - DNA, 20 bp, Artificial Sequence
  chemically synthesized
atggtaagacttagcaagaa

SEQ ID NO: 8104 - DNA, 20 bp, Artificial Sequence
  chemically synthesized
aaaaagttggcaacaattac

SEQ ID NO: 8105 - DNA, 20 bp, Artificial Sequence
  chemically synthesized
agcaagaacaataaaataaa

SEQ ID NO: 8106 - DNA, 20 bp, Artificial Sequence
  chemically synthesized
ccatgaatcatgtatttcaa

SEQ ID NO: 8107 - DNA, 20 bp, Artificial Sequence
  chemically synthesized
tagaaaatgtacaaaggaaa

SEQ ID NO: 8108 - DNA, 20 bp, Artificial Sequence
  chemically synthesized
gtacaaaggaaacaaaacaa

SEQ ID NO: 8109 - DNA, 20 bp, Artificial Sequence
  chemically synthesized
atccatgtttacttcacttt

SEQ ID NO: 8110 - DNA, 20 bp, Artificial Sequence
  chemically synthesized
ccctttctcaaaaaaaaaaa

SEQ ID NO: 8111 - DNA, 20 bp, Artificial Sequence
  chemically synthesized
acactacaaaaagcacctaa

SEQ ID NO: 8112 - DNA, 20 bp, Artificial Sequence
  chemically synthesized
accaggaattctatgtttca

SEQ ID NO: 8113 - DNA, 20 bp, Artificial Sequence
  chemically synthesized
ttgtaggatatattaaaaaa

SEQ ID NO: 8114 - DNA, 20 bp, Artificial Sequence
  chemically synthesized
acccttaggcaattaataaa

SEQ ID NO: 8115 - DNA, 20 bp, Artificial Sequence
  chemically synthesized
caattcttgccatctcaaaa

SEQ ID NO: 8116 - DNA, 20 bp, Artificial Sequence
  chemically synthesized
tgccatctcaaaaaaaaaca

SEQ ID NO: 8117 - DNA, 20 bp, Artificial Sequence
  chemically synthesized
aaaaataagccactaccatc

SEQ ID NO: 8118 - DNA, 20 bp, Artificial Sequence
  chemically synthesized
aagccactaccatcaaaaac

SEQ ID NO: 8119 - DNA, 20 bp, Artificial Sequence
  chemically synthesized
tgttggagtatagagaatgc

SEQ ID NO: 8120 - DNA, 20 bp, Artificial Sequence
  chemically synthesized
gagatgacacaaacacatgg

SEQ ID NO: 8121 - DNA, 20 bp, Artificial Sequence
  chemically synthesized
actaccaatgatatccttca

SEQ ID NO: 8122 - DNA, 20 bp, Artificial Sequence
  chemically synthesized
atatccttcacaaaaccaga

SEQ ID NO: 8123 - DNA, 20 bp, Artificial Sequence
  chemically synthesized
gaacagcagggtactgttat

SEQ ID NO: 8124 - DNA, 20 bp, Artificial Sequence
  chemically synthesized
gatcttcaacaaagttgaca

SEQ ID NO: 8125 - DNA, 20 bp, Artificial Sequence
  chemically synthesized
aacgtaaaatctaaaattgt

SEQ ID NO: 8126 - DNA, 20 bp, Artificial Sequence
  chemically synthesized
acgccaaaagcaactgcaac

SEQ ID NO: 8127 - DNA, 20 bp, Artificial Sequence
  chemically synthesized
tgcagaatctggaaggaact

SEQ ID NO: 8128 - DNA, 20 bp, Artificial Sequence
  chemically synthesized
ttaaaactaattaacaagca

SEQ ID NO: 8129 - DNA, 20 bp, Artificial Sequence
  chemically synthesized
atggaatactatgcagccat

SEQ ID NO: 8130 - DNA, 20 bp, Artificial Sequence
  chemically synthesized
agtgaactaatccaggaaca

SEQ ID NO: 8131 - DNA, 20 bp, Artificial Sequence
  chemically synthesized
tgggagaagggtgaggatca

SEQ ID NO: 8132 - DNA, 20 bp, Artificial Sequence
  chemically synthesized
aacaaacataattaacatgt

SEQ ID NO: 8133 - DNA, 20 bp, Artificial Sequence
  chemically synthesized
actgtagtttgtcaaatcag

SEQ ID NO: 8134 - DNA, 20 bp, Artificial Sequence
  chemically synthesized
aaatacacatacatcctcta

SEQ ID NO: 8135 - DNA, 20 bp, Artificial Sequence
  chemically synthesized
cacatacatcctctaaaaaa

SEQ ID NO: 8136 - DNA, 20 bp, Artificial Sequence
  chemically synthesized
agctcccaagtaaccaatca

SEQ ID NO: 8137 - DNA, 20 bp, Artificial Sequence
  chemically synthesized
ttcaaggcacagattaatta

SEQ ID NO: 8138 - DNA, 20 bp, Artificial Sequence
  chemically synthesized
actaaaatttaccaatatat

SEQ ID NO: 8139 - DNA, 20 bp, Artificial Sequence
  chemically synthesized
agttggaccaattcattttc

SEQ ID NO: 8140 - DNA, 20 bp, Artificial Sequence
  chemically synthesized
ctactttctcaagaaccaat

SEQ ID NO: 8141 - DNA, 20 bp, Artificial Sequence
  chemically synthesized
tatagcattggtttcaatag

SEQ ID NO: 8142 - DNA, 20 bp, Artificial Sequence
  chemically synthesized
tcaatgagtatgtattttta

SEQ ID NO: 8143 - DNA, 20 bp, Artificial Sequence
  chemically synthesized
aatgtcaaaggtattttctg

SEQ ID NO: 8144 - DNA, 20 bp, Artificial Sequence
  chemically synthesized
aaaagaaaatattttagcat

SEQ ID NO: 8145 - DNA, 20 bp, Artificial Sequence
  chemically synthesized
attttaattgttattatcaa

SEQ ID NO: 8146 - DNA, 20 bp, Artificial Sequence
  chemically synthesized
aaatttactgtatggcatct

SEQ ID NO: 8147 - DNA, 20 bp, Artificial Sequence
  chemically synthesized
tggcaacttctttctcaaat

SEQ ID NO: 8148 - DNA, 20 bp, Artificial Sequence
  chemically synthesized
aaatgtttaaaaaaaaaaaa

SEQ ID NO: 8149 - DNA, 20 bp, Artificial Sequence
  chemically synthesized
tttccaacatatttcctatg

SEQ ID NO: 8150 - DNA, 20 bp, Artificial Sequence
  chemically synthesized
atctgattttaatatattct

SEQ ID NO: 8151 - DNA, 20 bp, Artificial Sequence
  chemically synthesized
tgatggcactgtaagttaaa

SEQ ID NO: 8152 - DNA, 20 bp, Artificial Sequence
  chemically synthesized
taagttaaagaaaacagatt

SEQ ID NO: 8153 - DNA, 20 bp, Artificial Sequence
  chemically synthesized
cagattaaaaacattgccta

SEQ ID NO: 8154 - DNA, 20 bp, Artificial Sequence
  chemically synthesized
ataaaacaatttaacaaact

SEQ ID NO: 8155 - DNA, 20 bp, Artificial Sequence
  chemically synthesized
gaaattttcttattgagcct

SEQ ID NO: 8156 - DNA, 20 bp, Artificial Sequence
  chemically synthesized
ctgtaactgtgaagaaactt

SEQ ID NO: 8157 - DNA, 20 bp, Artificial Sequence
  chemically synthesized
ctgttagctttaatgagaag

SEQ ID NO: 8158 - DNA, 20 bp, Artificial Sequence
  chemically synthesized
ccgagaatcaagactcccca

SEQ ID NO: 8159 - DNA, 20 bp, Artificial Sequence
  chemically synthesized
taacctaaatgacaaaatca

SEQ ID NO: 8160 - DNA, 20 bp, Artificial Sequence
  chemically synthesized
aacactcatagtgtgtgatt

SEQ ID NO: 8161 - DNA, 20 bp, Artificial Sequence
  chemically synthesized
ataataatactataacccca

SEQ ID NO: 8162 - DNA, 20 bp, Artificial Sequence
  chemically synthesized
atttcatatttaaaaatgag

SEQ ID NO: 8163 - DNA, 20 bp, Artificial Sequence
  chemically synthesized
atccttaccaaataggtaag

SEQ ID NO: 8164 - DNA, 20 bp, Artificial Sequence
  chemically synthesized
acatatattttaagaatcaa

SEQ ID NO: 8165 - DNA, 20 bp, Artificial Sequence
  chemically synthesized
gctgaaagttttatttaaaa

SEQ ID NO: 8166 - DNA, 20 bp, Artificial Sequence
  chemically synthesized
agtaaaggtttctggtttga

SEQ ID NO: 8167 - DNA, 20 bp, Artificial Sequence
  chemically synthesized
taaaaagaagcaaagaaagg

SEQ ID NO: 8168 - DNA, 20 bp, Artificial Sequence
  chemically synthesized
atacagatacatgctgtgag

SEQ ID NO: 8169 - DNA, 20 bp, Artificial Sequence
  chemically synthesized
gcaagagaaaatttatttaa

SEQ ID NO: 8170 - DNA, 20 bp, Artificial Sequence
  chemically synthesized
taaacaatacaaaataaaat

SEQ ID NO: 8171 - DNA, 20 bp, Artificial Sequence
  chemically synthesized
gaaaaaaagataacttcaca

SEQ ID NO: 8172 - DNA, 20 bp, Artificial Sequence
  chemically synthesized
actattgggcaaaagccttt

SEQ ID NO: 8173 - DNA, 20 bp, Artificial Sequence
  chemically synthesized
aatgtgttctttagatacat

SEQ ID NO: 8174 - DNA, 20 bp, Artificial Sequence
  chemically synthesized
tattcaactacaggatttag

SEQ ID NO: 8175 - DNA, 20 bp, Artificial Sequence
  chemically synthesized
ctcccttttcagacaagaca

SEQ ID NO: 8176 - DNA, 20 bp, Artificial Sequence
  chemically synthesized
agcaatttaaagatatccat

SEQ ID NO: 8177 - DNA, 20 bp, Artificial Sequence
  chemically synthesized
ccatagcaactaaaaaggag

SEQ ID NO: 8178 - DNA, 20 bp, Artificial Sequence
  chemically synthesized
tgaagcccgatcctgatgtt

SEQ ID NO: 8179 - DNA, 20 bp, Artificial Sequence
  chemically synthesized
ttagttatttagaacacgta

SEQ ID NO: 8180 - DNA, 20 bp, Artificial Sequence
  chemically synthesized
caagcctttgaatttaatga

SEQ ID NO: 8181 - DNA, 20 bp, Artificial Sequence
  chemically synthesized
catcctatgtgatattaatg

SEQ ID NO: 8182 - DNA, 20 bp, Artificial Sequence
  chemically synthesized
ttttttttttaagttaaatg

SEQ ID NO: 8183 - DNA, 20 bp, Artificial Sequence
  chemically synthesized
acatgtgtgttattgcccct

SEQ ID NO: 8184 - DNA, 20 bp, Artificial Sequence
  chemically synthesized
tgtgtgttttagtttttaac

SEQ ID NO: 8185 - DNA, 20 bp, Artificial Sequence
  chemically synthesized
gttataattttttattgaag

SEQ ID NO: 8186 - DNA, 20 bp, Artificial Sequence
  chemically synthesized
caatttcacctaagcaagtc

SEQ ID NO: 8187 - DNA, 20 bp, Artificial Sequence
  chemically synthesized
agtaggcatacagagcctgg

SEQ ID NO: 8188 - DNA, 20 bp, Artificial Sequence
  chemically synthesized
ctgaaaataaaagtatttcc

SEQ ID NO: 8189 - DNA, 20 bp, Artificial Sequence
  chemically synthesized
gagagactctgcctcaagaa

SEQ ID NO: 8190 - DNA, 20 bp, Artificial Sequence
  chemically synthesized
gcagctgaaaaaaatcagct

SEQ ID NO: 8191 - DNA, 20 bp, Artificial Sequence
  chemically synthesized
ttacattaattaacatctgc

SEQ ID NO: 8192 - DNA, 20 bp, Artificial Sequence
  chemically synthesized
agaacccgagggcagacttg

SEQ ID NO: 8193 - DNA, 20 bp, Artificial Sequence
  chemically synthesized
tagtggggagagagggtggg

SEQ ID NO: 8194 - DNA, 20 bp, Artificial Sequence
  chemically synthesized
ggagagagggtgggaaaaac

SEQ ID NO: 8195 - DNA, 20 bp, Artificial Sequence
  chemically synthesized
aagacactgttaagtgcatt

SEQ ID NO: 8196 - DNA, 20 bp, Artificial Sequence
  chemically synthesized
ttgtttttttttaacttttg

SEQ ID NO: 8197 - DNA, 20 bp, Artificial Sequence
  chemically synthesized
accattctgtttgatgtgta

SEQ ID NO: 8198 - DNA, 20 bp, Artificial Sequence
  chemically synthesized
tacaccactcagatgtgtaa

SEQ ID NO: 8199 - DNA, 20 bp, Artificial Sequence
  chemically synthesized
gtaacatttctcttttttaa

SEQ ID NO: 8200 - DNA, 20 bp, Artificial Sequence
  chemically synthesized
ttcacttatacgtggaatta

SEQ ID NO: 8201 - DNA, 20 bp, Artificial Sequence
  chemically synthesized
agtaccaagaggggactgta

SEQ ID NO: 8202 - DNA, 20 bp, Artificial Sequence
  chemically synthesized
tcattttagcaactattaga

SEQ ID NO: 8203 - DNA, 20 bp, Artificial Sequence
  chemically synthesized
tttcttcctcggtgaatgat

SEQ ID NO: 8204 - DNA, 20 bp, Artificial Sequence
  chemically synthesized
atcaaaaggcacacagttta

SEQ ID NO: 8205 - DNA, 20 bp, Artificial Sequence
  chemically synthesized
acgtttttcaaaagttaaaa

SEQ ID NO: 8206 - DNA, 20 bp, Artificial Sequence
  chemically synthesized
acttaacagtgtcttacggt

SEQ ID NO: 8207 - DNA, 20 bp, Artificial Sequence
  chemically synthesized
cactgcctaccaagcacaaa

SEQ ID NO: 8208 - DNA, 20 bp, Artificial Sequence
  chemically synthesized
caagcacaaacaaaaccatt

SEQ ID NO: 8209 - DNA, 20 bp, Artificial Sequence
  chemically synthesized
ccatttcgctagcctcgtga

SEQ ID NO: 8210 - DNA, 20 bp, Artificial Sequence
  chemically synthesized
agaaaacgtcatcgcacata

SEQ ID NO: 8211 - DNA, 20 bp, Artificial Sequence
  chemically synthesized
ctgataaagattaaccagaa

SEQ ID NO: 8212 - DNA, 20 bp, Artificial Sequence
  chemically synthesized
gccaaggcctgccactttag

SEQ ID NO: 8213 - DNA, 20 bp, Artificial Sequence
  chemically synthesized
ccctgtctctacaaaaaatt

SEQ ID NO: 8214 - DNA, 20 bp, Artificial Sequence
  chemically synthesized
gtgcattccagcctggatga

SEQ ID NO: 8215 - DNA, 20 bp, Artificial Sequence
  chemically synthesized
aaaacgagaccctgtctcta

SEQ ID NO: 8216 - DNA, 20 bp, Artificial Sequence
  chemically synthesized
acagacgtttaaagaaaaag

SEQ ID NO: 8217 - DNA, 20 bp, Artificial Sequence
  chemically synthesized
ctatttcttttggtaggatt

SEQ ID NO: 8218 - DNA, 20 bp, Artificial Sequence
  chemically synthesized
ctgactgcttacattgtatt

SEQ ID NO: 8219 - DNA, 20 bp, Artificial Sequence
  chemically synthesized
gaaattacaaatacacgtgt

SEQ ID NO: 8220 - DNA, 20 bp, Artificial Sequence
  chemically synthesized
acttgttagtcgtttttgtt

SEQ ID NO: 8221 - DNA, 20 bp, Artificial Sequence
  chemically synthesized
tagtcgtttttgttaaaaac

SEQ ID NO: 8222 - DNA, 20 bp, Artificial Sequence
  chemically synthesized
gtgaccctcaatgctccttg

SEQ ID NO: 8223 - DNA, 20 bp, Artificial Sequence
  chemically synthesized
ttaaaaaagtaattaaaaaa

SEQ ID NO: 8224 - DNA, 20 bp, Artificial Sequence
  chemically synthesized
ggcatgataattattacttt

SEQ ID NO: 8225 - DNA, 20 bp, Artificial Sequence
  chemically synthesized
taattattactttaaaaact

SEQ ID NO: 8226 - DNA, 20 bp, Artificial Sequence
  chemically synthesized
aaggatggtttttttttaaa

SEQ ID NO: 8227 - DNA, 20 bp, Artificial Sequence
  chemically synthesized
aatgggcatatggcttagga

SEQ ID NO: 8228 - DNA, 20 bp, Artificial Sequence
  chemically synthesized
cttaataatatggggctctg

SEQ ID NO: 8229 - DNA, 20 bp, Artificial Sequence
  chemically synthesized
atttcataaaataagtgagg

SEQ ID NO: 8230 - DNA, 20 bp, Artificial Sequence
  chemically synthesized
ttacttaaccaagttggtca

SEQ ID NO: 8231 - DNA, 20 bp, Artificial Sequence
  chemically synthesized
tccagcctgagcaatgaaag

SEQ ID NO: 8232 - DNA, 20 bp, Artificial Sequence
  chemically synthesized
caaaatcctggattttatgg

SEQ ID NO: 8233 - DNA, 20 bp, Artificial Sequence
  chemically synthesized
taatgtagtgtcttttgaaa

SEQ ID NO: 8234 - DNA, 20 bp, Artificial Sequence
  chemically synthesized
tatattgaatccagacttcc

SEQ ID NO: 8235 - DNA, 20 bp, Artificial Sequence
  chemically synthesized
tagaacagtgcctggaacat

SEQ ID NO: 8236 - DNA, 20 bp, Artificial Sequence
  chemically synthesized
agttgccaccactctaggtt

SEQ ID NO: 8237 - DNA, 20 bp, Artificial Sequence
  chemically synthesized
ttgagtctactgtcaaggag

SEQ ID NO: 8238 - DNA, 20 bp, Artificial Sequence
  chemically synthesized
cagatgcctagaggaaattt

SEQ ID NO: 8239 - DNA, 20 bp, Artificial Sequence
  chemically synthesized
atactgaacacttctgtcac

SEQ ID NO: 8240 - DNA, 20 bp, Artificial Sequence
  chemically synthesized
gagaccattttttaaaatta

SEQ ID NO: 8241 - DNA, 20 bp, Artificial Sequence
  chemically synthesized
aaattgtgtcttttacgaat

SEQ ID NO: 8242 - DNA, 20 bp, Artificial Sequence
  chemically synthesized
gtgtcttttacgaataaaaa

SEQ ID NO: 8243 - DNA, 20 bp, Artificial Sequence
  chemically synthesized
ttattgaatggacttattaa

SEQ ID NO: 8244 - DNA, 20 bp, Artificial Sequence
  chemically synthesized
catatgaatataaaatacag

SEQ ID NO: 8245 - DNA, 20 bp, Artificial Sequence
  chemically synthesized
tgatgataaatctataatcc

SEQ ID NO: 8246 - DNA, 20 bp, Artificial Sequence
  chemically synthesized
ttttgggtccatattaattt

SEQ ID NO: 8247 - DNA, 20 bp, Artificial Sequence
  chemically synthesized
ggccagcatcattctgatac

SEQ ID NO: 8248 - DNA, 20 bp, Artificial Sequence
  chemically synthesized
cagagacacaacagaaaaaa

SEQ ID NO: 8249 - DNA, 20 bp, Artificial Sequence
  chemically synthesized
ttcatcacataaacagagct

SEQ ID NO: 8250 - DNA, 20 bp, Artificial Sequence
  chemically synthesized
acataaacagagctaaaaac

SEQ ID NO: 8251 - DNA, 20 bp, Artificial Sequence
  chemically synthesized
aatttaacatcctccatgtt

SEQ ID NO: 8252 - DNA, 20 bp, Artificial Sequence
  chemically synthesized
agtcccattcacaatagccg

SEQ ID NO: 8253 - DNA, 20 bp, Artificial Sequence
  chemically synthesized
aaagatctctatgagaatta

SEQ ID NO: 8254 - DNA, 20 bp, Artificial Sequence
  chemically synthesized
gatccctaccactttcagtt

SEQ ID NO: 8255 - DNA, 20 bp, Artificial Sequence
  chemically synthesized
ttaaaaaaaagttataaact

SEQ ID NO: 8256 - DNA, 20 bp, Artificial Sequence
  chemically synthesized
gtacaggtatatgaatgtct

SEQ ID NO: 8257 - DNA, 20 bp, Artificial Sequence
  chemically synthesized
gcatttttaaagataaatta

SEQ ID NO: 8258 - DNA, 20 bp, Artificial Sequence
  chemically synthesized
agataaattagaaaacttct

SEQ ID NO: 8259 - DNA, 20 bp, Artificial Sequence
  chemically synthesized
tatagaagacgatacgtgag

SEQ ID NO: 8260 - DNA, 20 bp, Artificial Sequence
  chemically synthesized
gtaaaactcctacacggaag

SEQ ID NO: 8261 - DNA, 20 bp, Artificial Sequence
  chemically synthesized
taatacttctgcaatcaact

SEQ ID NO: 8262 - DNA, 22 bp, Artificial Sequence
  chemically synthesized
caaatatattttattcaaaatt

SEQ ID NO: 8263 - DNA, 22 bp, Artificial Sequence
  chemically synthesized
aaatatattttattcaaaattc

SEQ ID NO: 8264 - DNA, 22 bp, Artificial Sequence
  chemically synthesized
tattcaaaattctccatttagg

SEQ ID NO: 8265 - DNA, 22 bp, Artificial Sequence
  chemically synthesized
attcaaaattctccatttagga

SEQ ID NO: 8266 - DNA, 22 bp, Artificial Sequence
  chemically synthesized
ttcaaaattctccatttaggag

SEQ ID NO: 8267 - DNA, 22 bp, Artificial Sequence
  chemically synthesized
aaaattctccatttaggagaaa

SEQ ID NO: 8268 - DNA, 22 bp, Artificial Sequence
  chemically synthesized
tccatttaggagaaaagatata

SEQ ID NO: 8269 - DNA, 22 bp, Artificial Sequence
  chemically synthesized
catttaggagaaaagatatata

SEQ ID NO: 8270 - DNA, 22 bp, Artificial Sequence
  chemically synthesized
aggagaaaagatatataacaat

SEQ ID NO: 8271 - DNA, 22 bp, Artificial Sequence
  chemically synthesized
ggagaaaagatatataacaatg

SEQ ID NO: 8272 - DNA, 22 bp, Artificial Sequence
  chemically synthesized
acacatgctttaataacttatt

SEQ ID NO: 8273 - DNA, 22 bp, Artificial Sequence
  chemically synthesized
cacatgctttaataacttattt

SEQ ID NO: 8274 - DNA, 22 bp, Artificial Sequence
  chemically synthesized
taataacttatttcactgtaca

SEQ ID NO: 8275 - DNA, 22 bp, Artificial Sequence
  chemically synthesized
aataacttatttcactgtacaa

SEQ ID NO: 8276 - DNA, 22 bp, Artificial Sequence
  chemically synthesized
ataacttatttcactgtacaac

SEQ ID NO: 8277 - DNA, 22 bp, Artificial Sequence
  chemically synthesized
atttcactgtacaacttacatt

SEQ ID NO: 8278 - DNA, 22 bp, Artificial Sequence
  chemically synthesized
tttcactgtacaacttacattc

SEQ ID NO: 8279 - DNA, 22 bp, Artificial Sequence
  chemically synthesized
cactgtacaacttacattctgt

SEQ ID NO: 8280 - DNA, 22 bp, Artificial Sequence
  chemically synthesized
actgtacaacttacattctgta

SEQ ID NO: 8281 - DNA, 22 bp, Artificial Sequence
  chemically synthesized
tacaacttacattctgtataac

SEQ ID NO: 8282 - DNA, 22 bp, Artificial Sequence
  chemically synthesized
acattctgtataacagtacaat

SEQ ID NO: 8283 - DNA, 22 bp, Artificial Sequence
  chemically synthesized
cattctgtataacagtacaata

SEQ ID NO: 8284 - DNA, 22 bp, Artificial Sequence
  chemically synthesized
tgtataacagtacaataaacca

SEQ ID NO: 8285 - DNA, 22 bp, Artificial Sequence
  chemically synthesized
tataacagtacaataaaccagc

SEQ ID NO: 8286 - DNA, 22 bp, Artificial Sequence
  chemically synthesized
gcacttaaataagaatctacca

SEQ ID NO: 8287 - DNA, 22 bp, Artificial Sequence
  chemically synthesized
aaataagaatctaccatgtaaa

SEQ ID NO: 8288 - DNA, 22 bp, Artificial Sequence
  chemically synthesized
aataagaatctaccatgtaaaa

SEQ ID NO: 8289 - DNA, 22 bp, Artificial Sequence
  chemically synthesized
ccatgtaaaaaacacagtatgg

SEQ ID NO: 8290 - DNA, 22 bp, Artificial Sequence
  chemically synthesized
caaggtagtatttatatatttt

SEQ ID NO: 8291 - DNA, 22 bp, Artificial Sequence
  chemically synthesized
atatattttttaaatgactgag

SEQ ID NO: 8292 - DNA, 22 bp, Artificial Sequence
  chemically synthesized
tatattttttaaatgactgagc

SEQ ID NO: 8293 - DNA, 22 bp, Artificial Sequence
  chemically synthesized
tttaaatgactgagctacagta

SEQ ID NO: 8294 - DNA, 22 bp, Artificial Sequence
  chemically synthesized
ttaaatgactgagctacagtac

SEQ ID NO: 8295 - DNA, 22 bp, Artificial Sequence
  chemically synthesized
taaatgactgagctacagtaca

SEQ ID NO: 8296 - DNA, 22 bp, Artificial Sequence
  chemically synthesized
aaatgactgagctacagtacaa

SEQ ID NO: 8297 - DNA, 22 bp, Artificial Sequence
  chemically synthesized
aatgactgagctacagtacaac

SEQ ID NO: 8298 - DNA, 22 bp, Artificial Sequence
  chemically synthesized
agctacagtacaacagtcatct

SEQ ID NO: 8299 - DNA, 22 bp, Artificial Sequence
  chemically synthesized
cagtacaacagtcatctagttc

SEQ ID NO: 8300 - DNA, 22 bp, Artificial Sequence
  chemically synthesized
gttcagtggttgtctaaaacat

SEQ ID NO: 8301 - DNA, 22 bp, Artificial Sequence
  chemically synthesized
agtggttgtctaaaacatcaag

SEQ ID NO: 8302 - DNA, 22 bp, Artificial Sequence
  chemically synthesized
tctaaaacatcaagctgtccac

SEQ ID NO: 8303 - DNA, 22 bp, Artificial Sequence
  chemically synthesized
aaacatcaagctgtccacatct

SEQ ID NO: 8304 - DNA, 22 bp, Artificial Sequence
  chemically synthesized
tccacatctttctgattcatga

SEQ ID NO: 8305 - DNA, 22 bp, Artificial Sequence
  chemically synthesized
tctgattcatgatgggaaagct

SEQ ID NO: 8306 - DNA, 22 bp, Artificial Sequence
  chemically synthesized
ctgattcatgatgggaaagcta

SEQ ID NO: 8307 - DNA, 22 bp, Artificial Sequence
  chemically synthesized
tgattcatgatgggaaagctat

SEQ ID NO: 8308 - DNA, 22 bp, Artificial Sequence
  chemically synthesized
attcatgatgggaaagctatta

SEQ ID NO: 8309 - DNA, 22 bp, Artificial Sequence
  chemically synthesized
atgatgggaaagctattatgac

SEQ ID NO: 8310 - DNA, 22 bp, Artificial Sequence
  chemically synthesized
ttatgacctttcacattcgaac

SEQ ID NO: 8311 - DNA, 22 bp, Artificial Sequence
  chemically synthesized
tgacctttcacattcgaacatg

SEQ ID NO: 8312 - DNA, 22 bp, Artificial Sequence
  chemically synthesized
tcacattcgaacatgtcatttt

SEQ ID NO: 8313 - DNA, 22 bp, Artificial Sequence
  chemically synthesized
cacattcgaacatgtcattttg

SEQ ID NO: 8314 - DNA, 22 bp, Artificial Sequence
  chemically synthesized
acattcgaacatgtcattttgt

SEQ ID NO: 8315 - DNA, 22 bp, Artificial Sequence
  chemically synthesized
gaacatgtcattttgttgtgta

SEQ ID NO: 8316 - DNA, 22 bp, Artificial Sequence
  chemically synthesized
tgttgtgtaaatttggtgggtg

SEQ ID NO: 8317 - DNA, 22 bp, Artificial Sequence
  chemically synthesized
gttgtgtaaatttggtgggtgg

SEQ ID NO: 8318 - DNA, 22 bp, Artificial Sequence
  chemically synthesized
ttgtgtaaatttggtgggtggg

SEQ ID NO: 8319 - DNA, 22 bp, Artificial Sequence
  chemically synthesized
tgtaaatttggtgggtgggggg

SEQ ID NO: 8320 - DNA, 22 bp, Artificial Sequence
  chemically synthesized
ggtgggtggggggcagaagggc

SEQ ID NO: 8321 - DNA, 22 bp, Artificial Sequence
  chemically synthesized
gtgggtggggggcagaagggct

SEQ ID NO: 8322 - DNA, 22 bp, Artificial Sequence
  chemically synthesized
tattacctttatccctttctta

SEQ ID NO: 8323 - DNA, 22 bp, Artificial Sequence
  chemically synthesized
ttacctttatccctttcttata

SEQ ID NO: 8324 - DNA, 22 bp, Artificial Sequence
  chemically synthesized
cctttatccctttcttataaat

SEQ ID NO: 8325 - DNA, 22 bp, Artificial Sequence
  chemically synthesized
tatccctttcttataaatatat

SEQ ID NO: 8326 - DNA, 22 bp, Artificial Sequence
  chemically synthesized
atccctttcttataaatatatt

SEQ ID NO: 8327 - DNA, 22 bp, Artificial Sequence
  chemically synthesized
tccctttcttataaatatattt

SEQ ID NO: 8328 - DNA, 22 bp, Artificial Sequence
  chemically synthesized
tcttataaatatattttccctt

SEQ ID NO: 8329 - DNA, 22 bp, Artificial Sequence
  chemically synthesized
cttataaatatattttcccttt

SEQ ID NO: 8330 - DNA, 22 bp, Artificial Sequence
  chemically synthesized
ttataaatatattttccctttt

SEQ ID NO: 8331 - DNA, 22 bp, Artificial Sequence
  chemically synthesized
ataaatatattttcccttttat

SEQ ID NO: 8332 - DNA, 22 bp, Artificial Sequence
  chemically synthesized
taaatatattttcccttttata

SEQ ID NO: 8333 - DNA, 22 bp, Artificial Sequence
  chemically synthesized
tcccttttatattacttccaga

SEQ ID NO: 8334 - DNA, 22 bp, Artificial Sequence
  chemically synthesized
cccttttatattacttccagaa

SEQ ID NO: 8335 - DNA, 22 bp, Artificial Sequence
  chemically synthesized
ccttttatattacttccagaat

SEQ ID NO: 8336 - DNA, 22 bp, Artificial Sequence
  chemically synthesized
ttatattacttccagaatttta

SEQ ID NO: 8337 - DNA, 22 bp, Artificial Sequence
  chemically synthesized
tatattacttccagaattttaa

SEQ ID NO: 8338 - DNA, 22 bp, Artificial Sequence
  chemically synthesized
atattacttccagaattttaaa

SEQ ID NO: 8339 - DNA, 22 bp, Artificial Sequence
  chemically synthesized
tattacttccagaattttaaat

SEQ ID NO: 8340 - DNA, 22 bp, Artificial Sequence
  chemically synthesized
cttccagaattttaaataaaat

SEQ ID NO: 8341 - DNA, 22 bp, Artificial Sequence
  chemically synthesized
ccagaattttaaataaaatatt

SEQ ID NO: 8342 - DNA, 22 bp, Artificial Sequence
  chemically synthesized
cagaattttaaataaaatattt

SEQ ID NO: 8343 - DNA, 22 bp, Artificial Sequence
  chemically synthesized
taaataaaatatttatttgtgt

SEQ ID NO: 8344 - DNA, 22 bp, Artificial Sequence
  chemically synthesized
aaataaaatatttatttgtgtt

SEQ ID NO: 8345 - DNA, 22 bp, Artificial Sequence
  chemically synthesized
aataaaatatttatttgtgttt

SEQ ID NO: 8346 - DNA, 22 bp, Artificial Sequence
  chemically synthesized
atttgtgtttgtgtaactacaa

SEQ ID NO: 8347 - DNA, 22 bp, Artificial Sequence
  chemically synthesized
tttgtgtttgtgtaactacaat

SEQ ID NO: 8348 - DNA, 22 bp, Artificial Sequence
  chemically synthesized
gtgtttgtgtaactacaatgtc

SEQ ID NO: 8349 - DNA, 22 bp, Artificial Sequence
  chemically synthesized
tgtttgtgtaactacaatgtca

SEQ ID NO: 8350 - DNA, 22 bp, Artificial Sequence
  chemically synthesized
gtgtaactacaatgtcaacatt

SEQ ID NO: 8351 - DNA, 22 bp, Artificial Sequence
  chemically synthesized
tgtaactacaatgtcaacattg

SEQ ID NO: 8352 - DNA, 22 bp, Artificial Sequence
  chemically synthesized
caatgtcaacattgtgttagaa

SEQ ID NO: 8353 - DNA, 22 bp, Artificial Sequence
  chemically synthesized
tgttagaattatattaatcagt

SEQ ID NO: 8354 - DNA, 22 bp, Artificial Sequence
  chemically synthesized
gaattatattaatcagttattt

SEQ ID NO: 8355 - DNA, 22 bp, Artificial Sequence
  chemically synthesized
tattaatcagttattttatagc

SEQ ID NO: 8356 - DNA, 22 bp, Artificial Sequence
  chemically synthesized
atcagttattttatagccagca

SEQ ID NO: 8357 - DNA, 22 bp, Artificial Sequence
  chemically synthesized
ttttatagccagcaaaatggtc

SEQ ID NO: 8358 - DNA, 22 bp, Artificial Sequence
  chemically synthesized
tatagccagcaaaatggtccaa

SEQ ID NO: 8359 - DNA, 22 bp, Artificial Sequence
  chemically synthesized
atagccagcaaaatggtccaaa

SEQ ID NO: 8360 - DNA, 22 bp, Artificial Sequence
  chemically synthesized
tagccagcaaaatggtccaaac

SEQ ID NO: 8361 - DNA, 22 bp, Artificial Sequence
  chemically synthesized
agaaaacaaaagataacttagc

SEQ ID NO: 8362 - DNA, 22 bp, Artificial Sequence
  chemically synthesized
agctctgccaaagtagcaccta

SEQ ID NO: 8363 - DNA, 22 bp, Artificial Sequence
  chemically synthesized
gctctgccaaagtagcacctag

SEQ ID NO: 8364 - DNA, 22 bp, Artificial Sequence
  chemically synthesized
tgccaaagtagcacctaggaaa

SEQ ID NO: 8365 - DNA, 22 bp, Artificial Sequence
  chemically synthesized
ccaaagtagcacctaggaaaac

SEQ ID NO: 8366 - DNA, 22 bp, Artificial Sequence
  chemically synthesized
ggaaaacagcacttcagtaaaa

SEQ ID NO: 8367 - DNA, 22 bp, Artificial Sequence
  chemically synthesized
cagtaaaatttctcctgctatt

SEQ ID NO: 8368 - DNA, 22 bp, Artificial Sequence
  chemically synthesized
agtaaaatttctcctgctattc

SEQ ID NO: 8369 - DNA, 22 bp, Artificial Sequence
  chemically synthesized
ctcctgctattccttatagcct

SEQ ID NO: 8370 - DNA, 22 bp, Artificial Sequence
  chemically synthesized
tcctgctattccttatagccta

SEQ ID NO: 8371 - DNA, 22 bp, Artificial Sequence
  chemically synthesized
ctgctattccttatagcctatt

SEQ ID NO: 8372 - DNA, 22 bp, Artificial Sequence
  chemically synthesized
ctattccttatagcctattgca

SEQ ID NO: 8373 - DNA, 22 bp, Artificial Sequence
  chemically synthesized
ttccttatagcctattgcaggc

SEQ ID NO: 8374 - DNA, 22 bp, Artificial Sequence
  chemically synthesized
cttatagcctattgcaggcaaa

SEQ ID NO: 8375 - DNA, 22 bp, Artificial Sequence
  chemically synthesized
atagcctattgcaggcaaacag

SEQ ID NO: 8376 - DNA, 22 bp, Artificial Sequence
  chemically synthesized
tagcctattgcaggcaaacagc

SEQ ID NO: 8377 - DNA, 22 bp, Artificial Sequence
  chemically synthesized
ttgcaggcaaacagcaacaact

SEQ ID NO: 8378 - DNA, 22 bp, Artificial Sequence
  chemically synthesized
caggcaaacagcaacaacttca

SEQ ID NO: 8379 - DNA, 22 bp, Artificial Sequence
  chemically synthesized
caaaaacataggcagaaatgca

SEQ ID NO: 8380 - DNA, 22 bp, Artificial Sequence
  chemically synthesized
aaaaacataggcagaaatgcaa

SEQ ID NO: 8381 - DNA, 22 bp, Artificial Sequence
  chemically synthesized
aaggaactattttctgtttctg

SEQ ID NO: 8382 - DNA, 22 bp, Artificial Sequence
  chemically synthesized
ttttctgtttctgaaaaaaaga

SEQ ID NO: 8383 - DNA, 22 bp, Artificial Sequence
  chemically synthesized
tctgtttctgaaaaaaagatct

SEQ ID NO: 8384 - DNA, 22 bp, Artificial Sequence
  chemically synthesized
ctgtttctgaaaaaaagatctt

SEQ ID NO: 8385 - DNA, 22 bp, Artificial Sequence
  chemically synthesized
tgtttctgaaaaaaagatctta

SEQ ID NO: 8386 - DNA, 22 bp, Artificial Sequence
  chemically synthesized
tttctgaaaaaaagatcttatt

SEQ ID NO: 8387 - DNA, 22 bp, Artificial Sequence
  chemically synthesized
ctgaaaaaaagatcttattagt

SEQ ID NO: 8388 - DNA, 22 bp, Artificial Sequence
  chemically synthesized
tgaaaaaaagatcttattagtt

SEQ ID NO: 8389 - DNA, 22 bp, Artificial Sequence
  chemically synthesized
aaaaaaagatcttattagttag

SEQ ID NO: 8390 - DNA, 22 bp, Artificial Sequence
  chemically synthesized
attagttagtatattctctaag

SEQ ID NO: 8391 - DNA, 22 bp, Artificial Sequence
  chemically synthesized
ttagttagtatattctctaagg

SEQ ID NO: 8392 - DNA, 22 bp, Artificial Sequence
  chemically synthesized
gttagtatattctctaaggcat

SEQ ID NO: 8393 - DNA, 22 bp, Artificial Sequence
  chemically synthesized
gtatattctctaaggcatttta

SEQ ID NO: 8394 - DNA, 22 bp, Artificial Sequence
  chemically synthesized
tctaaggcattttataatctca

SEQ ID NO: 8395 - DNA, 22 bp, Artificial Sequence
  chemically synthesized
taaggcattttataatctcaga

SEQ ID NO: 8396 - DNA, 22 bp, Artificial Sequence
  chemically synthesized
aggcattttataatctcagagt

SEQ ID NO: 8397 - DNA, 22 bp, Artificial Sequence
  chemically synthesized
tataatctcagagttgcaatga

SEQ ID NO: 8398 - DNA, 22 bp, Artificial Sequence
  chemically synthesized
ataatctcagagttgcaatgat

SEQ ID NO: 8399 - DNA, 22 bp, Artificial Sequence
  chemically synthesized
taatctcagagttgcaatgatt

SEQ ID NO: 8400 - DNA, 22 bp, Artificial Sequence
  chemically synthesized
agagttgcaatgattgccaaag

SEQ ID NO: 8401 - DNA, 22 bp, Artificial Sequence
  chemically synthesized
caatgattgccaaagcaggtac

SEQ ID NO: 8402 - DNA, 22 bp, Artificial Sequence
  chemically synthesized
ccaaagcaggtacatggtaaga

SEQ ID NO: 8403 - DNA, 22 bp, Artificial Sequence
  chemically synthesized
agcaagaagaaaacaagatgaa

SEQ ID NO: 8404 - DNA, 22 bp, Artificial Sequence
  chemically synthesized
gcaagaagaaaacaagatgaaa

SEQ ID NO: 8405 - DNA, 22 bp, Artificial Sequence
  chemically synthesized
accagtgaaatctgaacttgtt

SEQ ID NO: 8406 - DNA, 22 bp, Artificial Sequence
  chemically synthesized
aacttgttccaagtaattagat

SEQ ID NO: 8407 - DNA, 22 bp, Artificial Sequence
  chemically synthesized
gttccaagtaattagattttct

SEQ ID NO: 8408 - DNA, 22 bp, Artificial Sequence
  chemically synthesized
ttccaagtaattagattttcta

SEQ ID NO: 8409 - DNA, 22 bp, Artificial Sequence
  chemically synthesized
caagtaattagattttctaagg

SEQ ID NO: 8410 - DNA, 22 bp, Artificial Sequence
  chemically synthesized
gattttctaaggagaaaaaagg

SEQ ID NO: 8411 - DNA, 22 bp, Artificial Sequence
  chemically synthesized
tctaaggagaaaaaaggcacag

SEQ ID NO: 8412 - DNA, 22 bp, Artificial Sequence
  chemically synthesized
ctaaggagaaaaaaggcacagg

SEQ ID NO: 8413 - DNA, 22 bp, Artificial Sequence
  chemically synthesized
taaggagaaaaaaggcacagga

SEQ ID NO: 8414 - DNA, 22 bp, Artificial Sequence
  chemically synthesized
aggagaaaaaaggcacaggagg

SEQ ID NO: 8415 - DNA, 22 bp, Artificial Sequence
  chemically synthesized
caatttggctcaaaaataatga

SEQ ID NO: 8416 - DNA, 22 bp, Artificial Sequence
  chemically synthesized
aatttggctcaaaaataatgaa

SEQ ID NO: 8417 - DNA, 22 bp, Artificial Sequence
  chemically synthesized
ggctcaaaaataatgaaaatta

SEQ ID NO: 8418 - DNA, 22 bp, Artificial Sequence
  chemically synthesized
gctcaaaaataatgaaaattaa

SEQ ID NO: 8419 - DNA, 22 bp, Artificial Sequence
  chemically synthesized
aaaaataatgaaaattaattta

SEQ ID NO: 8420 - DNA, 22 bp, Artificial Sequence
  chemically synthesized
atttaaaaagttggcaacaatt

SEQ ID NO: 8421 - DNA, 22 bp, Artificial Sequence
  chemically synthesized
aaaaagttggcaacaattacta

SEQ ID NO: 8422 - DNA, 22 bp, Artificial Sequence
  chemically synthesized
aaaagttggcaacaattactaa

SEQ ID NO: 8423 - DNA, 22 bp, Artificial Sequence
  chemically synthesized
gcaacaattactaaaacataaa

SEQ ID NO: 8424 - DNA, 22 bp, Artificial Sequence
  chemically synthesized
ctaaaacataaaatacaatttc

SEQ ID NO: 8425 - DNA, 22 bp, Artificial Sequence
  chemically synthesized
aaacataaaatacaatttcctt

SEQ ID NO: 8426 - DNA, 22 bp, Artificial Sequence
  chemically synthesized
ccttttacagagctcaactaca

SEQ ID NO: 8427 - DNA, 22 bp, Artificial Sequence
  chemically synthesized
cttttacagagctcaactacat

SEQ ID NO: 8428 - DNA, 22 bp, Artificial Sequence
  chemically synthesized
ttacagagctcaactacataga

SEQ ID NO: 8429 - DNA, 22 bp, Artificial Sequence
  chemically synthesized
tacagagctcaactacatagaa

SEQ ID NO: 8430 - DNA, 22 bp, Artificial Sequence
  chemically synthesized
acagagctcaactacatagaat

SEQ ID NO: 8431 - DNA, 22 bp, Artificial Sequence
  chemically synthesized
cagagctcaactacatagaata

SEQ ID NO: 8432 - DNA, 22 bp, Artificial Sequence
  chemically synthesized
aactacatagaatatcaacaat

SEQ ID NO: 8433 - DNA, 22 bp, Artificial Sequence
  chemically synthesized
catagaatatcaacaatagcaa

SEQ ID NO: 8434 - DNA, 22 bp, Artificial Sequence
  chemically synthesized
actgtggttcaccaggaacaag

SEQ ID NO: 8435 - DNA, 22 bp, Artificial Sequence
  chemically synthesized
tggttcaccaggaacaaggact

SEQ ID NO: 8436 - DNA, 22 bp, Artificial Sequence
  chemically synthesized
accaggaacaaggactatagag

SEQ ID NO: 8437 - DNA, 22 bp, Artificial Sequence
  chemically synthesized
tagagaactattagacatttct

SEQ ID NO: 8438 - DNA, 22 bp, Artificial Sequence
  chemically synthesized
ttagacatttctacagactgaa

SEQ ID NO: 8439 - DNA, 22 bp, Artificial Sequence
  chemically synthesized
gacatttctacagactgaatcc

SEQ ID NO: 8440 - DNA, 22 bp, Artificial Sequence
  chemically synthesized
ctacagactgaatcccagggac

SEQ ID NO: 8441 - DNA, 22 bp, Artificial Sequence
  chemically synthesized
tacagactgaatcccagggact

SEQ ID NO: 8442 - DNA, 22 bp, Artificial Sequence
  chemically synthesized
cagactgaatcccagggactaa

SEQ ID NO: 8443 - DNA, 22 bp, Artificial Sequence
  chemically synthesized
aatcccagggactaaatccaca

SEQ ID NO: 8444 - DNA, 22 bp, Artificial Sequence
  chemically synthesized
aatccacaaagtaggatctaat

SEQ ID NO: 8445 - DNA, 22 bp, Artificial Sequence
  chemically synthesized
ataatcaattccaattaaacat

SEQ ID NO: 8446 - DNA, 22 bp, Artificial Sequence
  chemically synthesized
caattaaacatctgcttgatca

SEQ ID NO: 8447 - DNA, 22 bp, Artificial Sequence
  chemically synthesized
aacatctgcttgatcaattttc

SEQ ID NO: 8448 - DNA, 22 bp, Artificial Sequence
  chemically synthesized
cttgatcaattttctttctaaa

SEQ ID NO: 8449 - DNA, 22 bp, Artificial Sequence
  chemically synthesized
gatcaattttctttctaaagct

SEQ ID NO: 8450 - DNA, 22 bp, Artificial Sequence
  chemically synthesized
atcaattttctttctaaagctc

SEQ ID NO: 8451 - DNA, 22 bp, Artificial Sequence
  chemically synthesized
tctttctaaagctcatcctatg

SEQ ID NO: 8452 - DNA, 22 bp, Artificial Sequence
  chemically synthesized
ctttctaaagctcatcctatgt

SEQ ID NO: 8453 - DNA, 22 bp, Artificial Sequence
  chemically synthesized
tttctaaagctcatcctatgtt

SEQ ID NO: 8454 - DNA, 22 bp, Artificial Sequence
  chemically synthesized
tctaaagctcatcctatgttca

SEQ ID NO: 8455 - DNA, 22 bp, Artificial Sequence
  chemically synthesized
ctaaagctcatcctatgttcaa

SEQ ID NO: 8456 - DNA, 22 bp, Artificial Sequence
  chemically synthesized
taaagctcatcctatgttcaag

SEQ ID NO: 8457 - DNA, 22 bp, Artificial Sequence
  chemically synthesized
aagctcatcctatgttcaagct

SEQ ID NO: 8458 - DNA, 22 bp, Artificial Sequence
  chemically synthesized
atcctatgttcaagctcacttt

SEQ ID NO: 8459 - DNA, 22 bp, Artificial Sequence
  chemically synthesized
tgttcaagctcactttctttct

SEQ ID NO: 8460 - DNA, 22 bp, Artificial Sequence
  chemically synthesized
aagctcactttctttctgtgga

SEQ ID NO: 8461 - DNA, 22 bp, Artificial Sequence
  chemically synthesized
actttctttctgtggaattgaa

SEQ ID NO: 8462 - DNA, 22 bp, Artificial Sequence
  chemically synthesized
tctttctgtggaattgaaatca

SEQ ID NO: 8463 - DNA, 22 bp, Artificial Sequence
  chemically synthesized
ctttctgtggaattgaaatcat

SEQ ID NO: 8464 - DNA, 22 bp, Artificial Sequence
  chemically synthesized
tttctgtggaattgaaatcatt

SEQ ID NO: 8465 - DNA, 22 bp, Artificial Sequence
  chemically synthesized
tctgtggaattgaaatcattta

SEQ ID NO: 8466 - DNA, 22 bp, Artificial Sequence
  chemically synthesized
ctgtggaattgaaatcatttaa

SEQ ID NO: 8467 - DNA, 22 bp, Artificial Sequence
  chemically synthesized
tgtggaattgaaatcatttaaa

SEQ ID NO: 8468 - DNA, 22 bp, Artificial Sequence
  chemically synthesized
tggaattgaaatcatttaaagg

SEQ ID NO: 8469 - DNA, 22 bp, Artificial Sequence
  chemically synthesized
aaatcatttaaaggctctagtt

SEQ ID NO: 8470 - DNA, 22 bp, Artificial Sequence
  chemically synthesized
aaaggctctagttttcagttga

SEQ ID NO: 8471 - DNA, 22 bp, Artificial Sequence
  chemically synthesized
aaggctctagttttcagttgat

SEQ ID NO: 8472 - DNA, 22 bp, Artificial Sequence
  chemically synthesized
tagttttcagttgattgcagaa

SEQ ID NO: 8473 - DNA, 22 bp, Artificial Sequence
  chemically synthesized
gttttcagttgattgcagaagt

SEQ ID NO: 8474 - DNA, 22 bp, Artificial Sequence
  chemically synthesized
tcagttgattgcagaagtatta

SEQ ID NO: 8475 - DNA, 22 bp, Artificial Sequence
  chemically synthesized
cagttgattgcagaagtattac

SEQ ID NO: 8476 - DNA, 22 bp, Artificial Sequence
  chemically synthesized
agttgattgcagaagtattaca

SEQ ID NO: 8477 - DNA, 22 bp, Artificial Sequence
  chemically synthesized
attgcagaagtattacagtaat

SEQ ID NO: 8478 - DNA, 22 bp, Artificial Sequence
  chemically synthesized
cagaagtattacagtaattcta

SEQ ID NO: 8479 - DNA, 22 bp, Artificial Sequence
  chemically synthesized
cagtaattctacacaccaaaga

SEQ ID NO: 8480 - DNA, 22 bp, Artificial Sequence
  chemically synthesized
tacacaccaaagaatgccaaaa

SEQ ID NO: 8481 - DNA, 22 bp, Artificial Sequence
  chemically synthesized
cacaccaaagaatgccaaaaga

SEQ ID NO: 8482 - DNA, 22 bp, Artificial Sequence
  chemically synthesized
tctgtaaaagccaactcagatt

SEQ ID NO: 8483 - DNA, 22 bp, Artificial Sequence
  chemically synthesized
taaaagccaactcagatttcac

SEQ ID NO: 8484 - DNA, 22 bp, Artificial Sequence
  chemically synthesized
agatttcaccttgacacatgta

SEQ ID NO: 8485 - DNA, 22 bp, Artificial Sequence
  chemically synthesized
caccttgacacatgtaaaccat

SEQ ID NO: 8486 - DNA, 22 bp, Artificial Sequence
  chemically synthesized
accttgacacatgtaaaccatg

SEQ ID NO: 8487 - DNA, 22 bp, Artificial Sequence
  chemically synthesized
gacacatgtaaaccatgaatca

SEQ ID NO: 8488 - DNA, 22 bp, Artificial Sequence
  chemically synthesized
acacatgtaaaccatgaatcat

SEQ ID NO: 8489 - DNA, 22 bp, Artificial Sequence
  chemically synthesized
caaaaaaacagtagttgtggtc

SEQ ID NO: 8490 - DNA, 22 bp, Artificial Sequence
  chemically synthesized
aaaaaaacagtagttgtggtca

SEQ ID NO: 8491 - DNA, 22 bp, Artificial Sequence
  chemically synthesized
tggtcaagtttacatcctatta

SEQ ID NO: 8492 - DNA, 22 bp, Artificial Sequence
  chemically synthesized
acatcctattattatatcttta

SEQ ID NO: 8493 - DNA, 22 bp, Artificial Sequence
  chemically synthesized
catcctattattatatctttaa

SEQ ID NO: 8494 - DNA, 22 bp, Artificial Sequence
  chemically synthesized
ttattatatctttaaaagatag

SEQ ID NO: 8495 - DNA, 22 bp, Artificial Sequence
  chemically synthesized
ttatatctttaaaagatagcaa

SEQ ID NO: 8496 - DNA, 22 bp, Artificial Sequence
  chemically synthesized
tatctttaaaagatagcaataa

SEQ ID NO: 8497 - DNA, 22 bp, Artificial Sequence
  chemically synthesized
taaaagatagcaataatattta

SEQ ID NO: 8498 - DNA, 22 bp, Artificial Sequence
  chemically synthesized
aaaagatagcaataatatttat

SEQ ID NO: 8499 - DNA, 22 bp, Artificial Sequence
  chemically synthesized
aaagatagcaataatatttatt

SEQ ID NO: 8500 - DNA, 22 bp, Artificial Sequence
  chemically synthesized
attatattgtaaacataggtct

SEQ ID NO: 8501 - DNA, 22 bp, Artificial Sequence
  chemically synthesized
ttatattgtaaacataggtctg

SEQ ID NO: 8502 - DNA, 22 bp, Artificial Sequence
  chemically synthesized
tattgtaaacataggtctgtat

SEQ ID NO: 8503 - DNA, 22 bp, Artificial Sequence
  chemically synthesized
taaacataggtctgtatcccaa

SEQ ID NO: 8504 - DNA, 22 bp, Artificial Sequence
  chemically synthesized
tatcccaaaagcataaatctag

SEQ ID NO: 8505 - DNA, 22 bp, Artificial Sequence
  chemically synthesized
ggaaaagagacacccaatgtaa

SEQ ID NO: 8506 - DNA, 22 bp, Artificial Sequence
  chemically synthesized
acatcccctcacaggctcttgt

SEQ ID NO: 8507 - DNA, 22 bp, Artificial Sequence
  chemically synthesized
acaggctcttgtgagaactgta

SEQ ID NO: 8508 - DNA, 22 bp, Artificial Sequence
  chemically synthesized
ttgtgagaactgtagtgtaact

SEQ ID NO: 8509 - DNA, 22 bp, Artificial Sequence
  chemically synthesized
gtgagaactgtagtgtaactta

SEQ ID NO: 8510 - DNA, 22 bp, Artificial Sequence
  chemically synthesized
tgagaactgtagtgtaacttac

SEQ ID NO: 8511 - DNA, 22 bp, Artificial Sequence
  chemically synthesized
tagtgtaacttacttaactgca

SEQ ID NO: 8512 - DNA, 22 bp, Artificial Sequence
  chemically synthesized
acttaactgcaattgctgagag

SEQ ID NO: 8513 - DNA, 22 bp, Artificial Sequence
  chemically synthesized
cttaactgcaattgctgagagc

SEQ ID NO: 8514 - DNA, 22 bp, Artificial Sequence
  chemically synthesized
aactgcaattgctgagagcaga

SEQ ID NO: 8515 - DNA, 22 bp, Artificial Sequence
  chemically synthesized
actgcaattgctgagagcagaa

SEQ ID NO: 8516 - DNA, 22 bp, Artificial Sequence
  chemically synthesized
caattgctgagagcagaattct

SEQ ID NO: 8517 - DNA, 22 bp, Artificial Sequence
  chemically synthesized
ctgagagcagaattctggagta

SEQ ID NO: 8518 - DNA, 22 bp, Artificial Sequence
  chemically synthesized
agagcagaattctggagtatga

SEQ ID NO: 8519 - DNA, 22 bp, Artificial Sequence
  chemically synthesized
tggagtatgatccaggggaacg

SEQ ID NO: 8520 - DNA, 22 bp, Artificial Sequence
  chemically synthesized
gagtatgatccaggggaacgtt

SEQ ID NO: 8521 - DNA, 22 bp, Artificial Sequence
  chemically synthesized
ccccacaccactgagctacttt

SEQ ID NO: 8522 - DNA, 22 bp, Artificial Sequence
  chemically synthesized
cccacaccactgagctacttta

SEQ ID NO: 8523 - DNA, 22 bp, Artificial Sequence
  chemically synthesized
agctactttaccagcgatcatg

SEQ ID NO: 8524 - DNA, 22 bp, Artificial Sequence
  chemically synthesized
ctttaccagcgatcatgattgt

SEQ ID NO: 8525 - DNA, 22 bp, Artificial Sequence
  chemically synthesized
taccagcgatcatgattgtgat

SEQ ID NO: 8526 - DNA, 22 bp, Artificial Sequence
  chemically synthesized
accagcgatcatgattgtgatg

SEQ ID NO: 8527 - DNA, 22 bp, Artificial Sequence
  chemically synthesized
ccagcgatcatgattgtgatgg

SEQ ID NO: 8528 - DNA, 22 bp, Artificial Sequence
  chemically synthesized
tgatggaataggcttattaagt

SEQ ID NO: 8529 - DNA, 22 bp, Artificial Sequence
  chemically synthesized
attaagttacacatttaaaaag

SEQ ID NO: 8530 - DNA, 22 bp, Artificial Sequence
  chemically synthesized
ttaagttacacatttaaaaagt

SEQ ID NO: 8531 - DNA, 22 bp, Artificial Sequence
  chemically synthesized
agttacacatttaaaaagtcat

SEQ ID NO: 8532 - DNA, 22 bp, Artificial Sequence
  chemically synthesized
cacatttaaaaagtcattagaa

SEQ ID NO: 8533 - DNA, 22 bp, Artificial Sequence
  chemically synthesized
aaaaagtcattagaacatctcg

SEQ ID NO: 8534 - DNA, 22 bp, Artificial Sequence
  chemically synthesized
aaaagtcattagaacatctcgt

SEQ ID NO: 8535 - DNA, 22 bp, Artificial Sequence
  chemically synthesized
gaacatctcgttcttgcacact

SEQ ID NO: 8536 - DNA, 22 bp, Artificial Sequence
  chemically synthesized
gttcttgcacactagtgtagaa

SEQ ID NO: 8537 - DNA, 22 bp, Artificial Sequence
  chemically synthesized
ttgcacactagtgtagaaaggt

SEQ ID NO: 8538 - DNA, 22 bp, Artificial Sequence
  chemically synthesized
gcacactagtgtagaaaggtct

SEQ ID NO: 8539 - DNA, 22 bp, Artificial Sequence
  chemically synthesized
cacactagtgtagaaaggtctt

SEQ ID NO: 8540 - DNA, 22 bp, Artificial Sequence
  chemically synthesized
gtgtagaaaggtcttccaaaga

SEQ ID NO: 8541 - DNA, 22 bp, Artificial Sequence
  chemically synthesized
ccaaagataaaagagtgtaggc

SEQ ID NO: 8542 - DNA, 22 bp, Artificial Sequence
  chemically synthesized
caaagataaaagagtgtaggcc

SEQ ID NO: 8543 - DNA, 22 bp, Artificial Sequence
  chemically synthesized
gtttaattttctcagccagagc

SEQ ID NO: 8544 - DNA, 22 bp, Artificial Sequence
  chemically synthesized
aattttctcagccagagccatt

SEQ ID NO: 8545 - DNA, 22 bp, Artificial Sequence
  chemically synthesized
attttctcagccagagccatta

SEQ ID NO: 8546 - DNA, 22 bp, Artificial Sequence
  chemically synthesized
tctcagccagagccattattat

SEQ ID NO: 8547 - DNA, 22 bp, Artificial Sequence
  chemically synthesized
ctcagccagagccattattatg

SEQ ID NO: 8548 - DNA, 22 bp, Artificial Sequence
  chemically synthesized
tcagccagagccattattatgt

SEQ ID NO: 8549 - DNA, 22 bp, Artificial Sequence
  chemically synthesized
agccagagccattattatgtta

SEQ ID NO: 8550 - DNA, 22 bp, Artificial Sequence
  chemically synthesized
ttatgttaagatcgccctctgc

SEQ ID NO: 8551 - DNA, 22 bp, Artificial Sequence
  chemically synthesized
tgttaagatcgccctctgctgt

SEQ ID NO: 8552 - DNA, 22 bp, Artificial Sequence
  chemically synthesized
agatcgccctctgctgttaaat

SEQ ID NO: 8553 - DNA, 22 bp, Artificial Sequence
  chemically synthesized
tgctgttaaatcaaggtctatc

SEQ ID NO: 8554 - DNA, 22 bp, Artificial Sequence
  chemically synthesized
ctgttaaatcaaggtctatctt

SEQ ID NO: 8555 - DNA, 22 bp, Artificial Sequence
  chemically synthesized
ttaaatcaaggtctatcttcag

SEQ ID NO: 8556 - DNA, 22 bp, Artificial Sequence
  chemically synthesized
aatcaaggtctatcttcaggtt

SEQ ID NO: 8557 - DNA, 22 bp, Artificial Sequence
  chemically synthesized
tcttcaggttccgaagagattt

SEQ ID NO: 8558 - DNA, 22 bp, Artificial Sequence
  chemically synthesized
caggttccgaagagatttaaag

SEQ ID NO: 8559 - DNA, 22 bp, Artificial Sequence
  chemically synthesized
aggttccgaagagatttaaagg

SEQ ID NO: 8560 - DNA, 22 bp, Artificial Sequence
  chemically synthesized
cgaagagatttaaagggctttt

SEQ ID NO: 8561 - DNA, 22 bp, Artificial Sequence
  chemically synthesized
aaagggcttttttcccttctgc

SEQ ID NO: 8562 - DNA, 22 bp, Artificial Sequence
  chemically synthesized
aagggcttttttcccttctgcc

SEQ ID NO: 8563 - DNA, 22 bp, Artificial Sequence
  chemically synthesized
ttttcccttctgcctaaaaata

SEQ ID NO: 8564 - DNA, 22 bp, Artificial Sequence
  chemically synthesized
tttcccttctgcctaaaaataa

SEQ ID NO: 8565 - DNA, 22 bp, Artificial Sequence
  chemically synthesized
ttcccttctgcctaaaaataat

SEQ ID NO: 8566 - DNA, 22 bp, Artificial Sequence
  chemically synthesized
tcccttctgcctaaaaataatg

SEQ ID NO: 8567 - DNA, 22 bp, Artificial Sequence
  chemically synthesized
cccttctgcctaaaaataatgg

SEQ ID NO: 8568 - DNA, 22 bp, Artificial Sequence
  chemically synthesized
ccttctgcctaaaaataatgga

SEQ ID NO: 8569 - DNA, 22 bp, Artificial Sequence
  chemically synthesized
ctgcctaaaaataatggaaaaa

SEQ ID NO: 8570 - DNA, 22 bp, Artificial Sequence
  chemically synthesized
tgcctaaaaataatggaaaaaa

SEQ ID NO: 8571 - DNA, 22 bp, Artificial Sequence
  chemically synthesized
cctaaaaataatggaaaaaaaa

SEQ ID NO: 8572 - DNA, 22 bp, Artificial Sequence
  chemically synthesized
aaaataatggaaaaaaaaaaaa

SEQ ID NO: 8573 - DNA, 22 bp, Artificial Sequence
  chemically synthesized
tgatatagaaaatgtacaaagg

SEQ ID NO: 8574 - DNA, 22 bp, Artificial Sequence
  chemically synthesized
ttcttccgtgtaggagttttac

SEQ ID NO: 8575 - DNA, 22 bp, Artificial Sequence
  chemically synthesized
tcttccgtgtaggagttttact

SEQ ID NO: 8576 - DNA, 22 bp, Artificial Sequence
  chemically synthesized
cttccgtgtaggagttttactc

SEQ ID NO: 8577 - DNA, 22 bp, Artificial Sequence
  chemically synthesized
ttccgtgtaggagttttactca

SEQ ID NO: 8578 - DNA, 22 bp, Artificial Sequence
  chemically synthesized
ccgtgtaggagttttactcacg

SEQ ID NO: 8579 - DNA, 22 bp, Artificial Sequence
  chemically synthesized
cgtgtaggagttttactcacgt

SEQ ID NO: 8580 - DNA, 22 bp, Artificial Sequence
  chemically synthesized
tactcacgtatcgtcttctata

SEQ ID NO: 8581 - DNA, 22 bp, Artificial Sequence
  chemically synthesized
actcacgtatcgtcttctatat

SEQ ID NO: 8582 - DNA, 22 bp, Artificial Sequence
  chemically synthesized
ctcacgtatcgtcttctatata

SEQ ID NO: 8583 - DNA, 22 bp, Artificial Sequence
  chemically synthesized
acgtatcgtcttctatatattt

SEQ ID NO: 8584 - DNA, 22 bp, Artificial Sequence
  chemically synthesized
ctatatattttattagtgtcaa

SEQ ID NO: 8585 - DNA, 22 bp, Artificial Sequence
  chemically synthesized
tatatattttattagtgtcaag

SEQ ID NO: 8586 - DNA, 22 bp, Artificial Sequence
  chemically synthesized
tatattttattagtgtcaaggc

SEQ ID NO: 8587 - DNA, 22 bp, Artificial Sequence
  chemically synthesized
tattagtgtcaaggcttttctg

SEQ ID NO: 8588 - DNA, 22 bp, Artificial Sequence
  chemically synthesized
attagtgtcaaggcttttctgt

SEQ ID NO: 8589 - DNA, 22 bp, Artificial Sequence
  chemically synthesized
ttagtgtcaaggcttttctgtg

SEQ ID NO: 8590 - DNA, 22 bp, Artificial Sequence
  chemically synthesized
gtgtcaaggcttttctgtgaag

SEQ ID NO: 8591 - DNA, 22 bp, Artificial Sequence
  chemically synthesized
ttctgtgaaggacaagtagaaa

SEQ ID NO: 8592 - DNA, 22 bp, Artificial Sequence
  chemically synthesized
tctgtgaaggacaagtagaaac

SEQ ID NO: 8593 - DNA, 22 bp, Artificial Sequence
  chemically synthesized
ctgtgaaggacaagtagaaact

SEQ ID NO: 8594 - DNA, 22 bp, Artificial Sequence
  chemically synthesized
tgtgaaggacaagtagaaactg

SEQ ID NO: 8595 - DNA, 22 bp, Artificial Sequence
  chemically synthesized
tgaaggacaagtagaaactgtg

SEQ ID NO: 8596 - DNA, 22 bp, Artificial Sequence
  chemically synthesized
tgcaaggaaagtacttctgaga

SEQ ID NO: 8597 - DNA, 22 bp, Artificial Sequence
  chemically synthesized
ctgagagataagccaggtttca

SEQ ID NO: 8598 - DNA, 22 bp, Artificial Sequence
  chemically synthesized
tgagagataagccaggtttcag

SEQ ID NO: 8599 - DNA, 22 bp, Artificial Sequence
  chemically synthesized
agagataagccaggtttcagct

SEQ ID NO: 8600 - DNA, 22 bp, Artificial Sequence
  chemically synthesized
cagctgaaagacctgcagggag

SEQ ID NO: 8601 - DNA, 22 bp, Artificial Sequence
  chemically synthesized
agctgaaagacctgcagggaga

SEQ ID NO: 8602 - DNA, 22 bp, Artificial Sequence
  chemically synthesized
aaagacctgcagggagaggaac

SEQ ID NO: 8603 - DNA, 22 bp, Artificial Sequence
  chemically synthesized
cagggagaggaaccatttcaac

SEQ ID NO: 8604 - DNA, 22 bp, Artificial Sequence
  chemically synthesized
caacacataatttgctcacatt

SEQ ID NO: 8605 - DNA, 22 bp, Artificial Sequence
  chemically synthesized
aacacataatttgctcacattc

SEQ ID NO: 8606 - DNA, 22 bp, Artificial Sequence
  chemically synthesized
gctcacattctactcgtacaga

SEQ ID NO: 8607 - DNA, 22 bp, Artificial Sequence
  chemically synthesized
ctcacattctactcgtacagaa

SEQ ID NO: 8608 - DNA, 22 bp, Artificial Sequence
  chemically synthesized
acattctactcgtacagaagtt

SEQ ID NO: 8609 - DNA, 22 bp, Artificial Sequence
  chemically synthesized
tactcgtacagaagtttctatg

SEQ ID NO: 8610 - DNA, 22 bp, Artificial Sequence
  chemically synthesized
ctcgtacagaagtttctatgac

SEQ ID NO: 8611 - DNA, 22 bp, Artificial Sequence
  chemically synthesized
gtacagaagtttctatgacagt

SEQ ID NO: 8612 - DNA, 22 bp, Artificial Sequence
  chemically synthesized
ctatgacagtgttgacagtgct

SEQ ID NO: 8613 - DNA, 22 bp, Artificial Sequence
  chemically synthesized
tatgacagtgttgacagtgctt

SEQ ID NO: 8614 - DNA, 22 bp, Artificial Sequence
  chemically synthesized
tgacagtgttgacagtgcttgg

SEQ ID NO: 8615 - DNA, 22 bp, Artificial Sequence
  chemically synthesized
acagtgcttggcagacaataca

SEQ ID NO: 8616 - DNA, 22 bp, Artificial Sequence
  chemically synthesized
ggcagacaatacacactaaaca

SEQ ID NO: 8617 - DNA, 22 bp, Artificial Sequence
  chemically synthesized
gcagacaatacacactaaacat

SEQ ID NO: 8618 - DNA, 22 bp, Artificial Sequence
  chemically synthesized
aacatctccttaaccatttcca

SEQ ID NO: 8619 - DNA, 22 bp, Artificial Sequence
  chemically synthesized
cttaaccatttccactgatgcc

SEQ ID NO: 8620 - DNA, 22 bp, Artificial Sequence
  chemically synthesized
aaccatttccactgatgccccc

SEQ ID NO: 8621 - DNA, 22 bp, Artificial Sequence
  chemically synthesized
accatttccactgatgccccct

SEQ ID NO: 8622 - DNA, 22 bp, Artificial Sequence
  chemically synthesized
ccactgatgccccctaacagga

SEQ ID NO: 8623 - DNA, 22 bp, Artificial Sequence
  chemically synthesized
cactgatgccccctaacaggag

SEQ ID NO: 8624 - DNA, 22 bp, Artificial Sequence
  chemically synthesized
atgccccctaacaggagtgtgg

SEQ ID NO: 8625 - DNA, 22 bp, Artificial Sequence
  chemically synthesized
acaggagtgtggtatagaagca

SEQ ID NO: 8626 - DNA, 22 bp, Artificial Sequence
  chemically synthesized
ggtgtaggaacaatctgatatt

SEQ ID NO: 8627 - DNA, 22 bp, Artificial Sequence
  chemically synthesized
atatttttttttttttttgaga

SEQ ID NO: 8628 - DNA, 22 bp, Artificial Sequence
  chemically synthesized
ttttttttttttgagacggagt

SEQ ID NO: 8629 - DNA, 22 bp, Artificial Sequence
  chemically synthesized
tttttttttttgagacggagtc

SEQ ID NO: 8630 - DNA, 22 bp, Artificial Sequence
  chemically synthesized
ttttttttttgagacggagtct

SEQ ID NO: 8631 - DNA, 22 bp, Artificial Sequence
  chemically synthesized
tttttttttgagacggagtcta

SEQ ID NO: 8632 - DNA, 22 bp, Artificial Sequence
  chemically synthesized
ttttttttgagacggagtctag

SEQ ID NO: 8633 - DNA, 22 bp, Artificial Sequence
  chemically synthesized
tttttttgagacggagtctagc

SEQ ID NO: 8634 - DNA, 22 bp, Artificial Sequence
  chemically synthesized
ttttttgagacggagtctagct

SEQ ID NO: 8635 - DNA, 22 bp, Artificial Sequence
  chemically synthesized
tttttgagacggagtctagctc

SEQ ID NO: 8636 - DNA, 22 bp, Artificial Sequence
  chemically synthesized
ttttgagacggagtctagctct

SEQ ID NO: 8637 - DNA, 22 bp, Artificial Sequence
  chemically synthesized
tttgagacggagtctagctctg

SEQ ID NO: 8638 - DNA, 22 bp, Artificial Sequence
  chemically synthesized
ttgagacggagtctagctctgt

SEQ ID NO: 8639 - DNA, 22 bp, Artificial Sequence
  chemically synthesized
tgagacggagtctagctctgtc

SEQ ID NO: 8640 - DNA, 22 bp, Artificial Sequence
  chemically synthesized
gagacggagtctagctctgtca

SEQ ID NO: 8641 - DNA, 22 bp, Artificial Sequence
  chemically synthesized
agacggagtctagctctgtcac

SEQ ID NO: 8642 - DNA, 22 bp, Artificial Sequence
  chemically synthesized
gctctgtcaccaggctaaagtg

SEQ ID NO: 8643 - DNA, 22 bp, Artificial Sequence
  chemically synthesized
tgtcaccaggctaaagtgcagt

SEQ ID NO: 8644 - DNA, 22 bp, Artificial Sequence
  chemically synthesized
tcaccaggctaaagtgcagtgg

SEQ ID NO: 8645 - DNA, 22 bp, Artificial Sequence
  chemically synthesized
aagtgcagtggcgcgatcttga

SEQ ID NO: 8646 - DNA, 22 bp, Artificial Sequence
  chemically synthesized
gactcactgcaacctacacctc

SEQ ID NO: 8647 - DNA, 22 bp, Artificial Sequence
  chemically synthesized
actcactgcaacctacacctcc

SEQ ID NO: 8648 - DNA, 22 bp, Artificial Sequence
  chemically synthesized
actgcaacctacacctcctggg

SEQ ID NO: 8649 - DNA, 22 bp, Artificial Sequence
  chemically synthesized
caacctacacctcctgggttca

SEQ ID NO: 8650 - DNA, 22 bp, Artificial Sequence
  chemically synthesized
cacctcctgggttcaagcgatt

SEQ ID NO: 8651 - DNA, 22 bp, Artificial Sequence
  chemically synthesized
ctgggttcaagcgattctcctg

SEQ ID NO: 8652 - DNA, 22 bp, Artificial Sequence
  chemically synthesized
ggttcaagcgattctcctgcct

SEQ ID NO: 8653 - DNA, 22 bp, Artificial Sequence
  chemically synthesized
aagcgattctcctgcctcagcc

SEQ ID NO: 8654 - DNA, 22 bp, Artificial Sequence
  chemically synthesized
tcctgcctcagcctcccaggta

SEQ ID NO: 8655 - DNA, 22 bp, Artificial Sequence
  chemically synthesized
ctgcctcagcctcccaggtagc

SEQ ID NO: 8656 - DNA, 22 bp, Artificial Sequence
  chemically synthesized
cctcagcctcccaggtagctgg

SEQ ID NO: 8657 - DNA, 22 bp, Artificial Sequence
  chemically synthesized
agcctcccaggtagctgggatt

SEQ ID NO: 8658 - DNA, 22 bp, Artificial Sequence
  chemically synthesized
ccaggtagctgggattacaggc

SEQ ID NO: 8659 - DNA, 22 bp, Artificial Sequence
  chemically synthesized
ggattacaggcacacgctgcca

SEQ ID NO: 8660 - DNA, 22 bp, Artificial Sequence
  chemically synthesized
caggcacacgctgccacgccca

SEQ ID NO: 8661 - DNA, 22 bp, Artificial Sequence
  chemically synthesized
ccacgcccagctaatttttgta

SEQ ID NO: 8662 - DNA, 22 bp, Artificial Sequence
  chemically synthesized
atttttgtatacttagtagaga

SEQ ID NO: 8663 - DNA, 22 bp, Artificial Sequence
  chemically synthesized
ttgtatacttagtagagacggg

SEQ ID NO: 8664 - DNA, 22 bp, Artificial Sequence
  chemically synthesized
tgtatacttagtagagacgggg

SEQ ID NO: 8665 - DNA, 22 bp, Artificial Sequence
  chemically synthesized
gtatacttagtagagacggggt

SEQ ID NO: 8666 - DNA, 22 bp, Artificial Sequence
  chemically synthesized
tatacttagtagagacggggtt

SEQ ID NO: 8667 - DNA, 22 bp, Artificial Sequence
  chemically synthesized
agtagagacggggtttcaccat

SEQ ID NO: 8668 - DNA, 22 bp, Artificial Sequence
  chemically synthesized
gtagagacggggtttcaccatg

SEQ ID NO: 8669 - DNA, 22 bp, Artificial Sequence
  chemically synthesized
caccatgttggcaggatggtct

SEQ ID NO: 8670 - DNA, 22 bp, Artificial Sequence
  chemically synthesized
accatgttggcaggatggtctc

SEQ ID NO: 8671 - DNA, 22 bp, Artificial Sequence
  chemically synthesized
gcaggatggtctcgatctcctg

SEQ ID NO: 8672 - DNA, 22 bp, Artificial Sequence
  chemically synthesized
gatctcctgaccttgtgatcca

SEQ ID NO: 8673 - DNA, 22 bp, Artificial Sequence
  chemically synthesized
ctgaccttgtgatccacccacc

SEQ ID NO: 8674 - DNA, 22 bp, Artificial Sequence
  chemically synthesized
accttgtgatccacccacctcg

SEQ ID NO: 8675 - DNA, 22 bp, Artificial Sequence
  chemically synthesized
gtgatccacccacctcggactc

SEQ ID NO: 8676 - DNA, 22 bp, Artificial Sequence
  chemically synthesized
tgatccacccacctcggactcc

SEQ ID NO: 8677 - DNA, 22 bp, Artificial Sequence
  chemically synthesized
ggactcccaaagtgctgggatt

SEQ ID NO: 8678 - DNA, 22 bp, Artificial Sequence
  chemically synthesized
ccaaagtgctgggattacaggc

SEQ ID NO: 8679 - DNA, 22 bp, Artificial Sequence
  chemically synthesized
ggattacaggcataagccacca

SEQ ID NO: 8680 - DNA, 22 bp, Artificial Sequence
  chemically synthesized
caggcataagccaccaggccca

SEQ ID NO: 8681 - DNA, 22 bp, Artificial Sequence
  chemically synthesized
acagtttttagaagttttctaa

SEQ ID NO: 8682 - DNA, 22 bp, Artificial Sequence
  chemically synthesized
ttagaagttttctaatttatct

SEQ ID NO: 8683 - DNA, 22 bp, Artificial Sequence
  chemically synthesized
tagaagttttctaatttatctt

SEQ ID NO: 8684 - DNA, 22 bp, Artificial Sequence
  chemically synthesized
agaagttttctaatttatcttt

SEQ ID NO: 8685 - DNA, 22 bp, Artificial Sequence
  chemically synthesized
gaagttttctaatttatcttta

SEQ ID NO: 8686 - DNA, 22 bp, Artificial Sequence
  chemically synthesized
tctaatttatctttaaaaatgc

SEQ ID NO: 8687 - DNA, 22 bp, Artificial Sequence
  chemically synthesized
ctaatttatctttaaaaatgca

SEQ ID NO: 8688 - DNA, 22 bp, Artificial Sequence
  chemically synthesized
taatttatctttaaaaatgcat

SEQ ID NO: 8689 - DNA, 22 bp, Artificial Sequence
  chemically synthesized
atttatctttaaaaatgcattc

SEQ ID NO: 8690 - DNA, 22 bp, Artificial Sequence
  chemically synthesized
atctttaaaaatgcattcaaat

SEQ ID NO: 8691 - DNA, 22 bp, Artificial Sequence
  chemically synthesized
tctttaaaaatgcattcaaatt

SEQ ID NO: 8692 - DNA, 22 bp, Artificial Sequence
  chemically synthesized
taaaaatgcattcaaattttgc

SEQ ID NO: 8693 - DNA, 22 bp, Artificial Sequence
  chemically synthesized
aaaaatgcattcaaattttgca

SEQ ID NO: 8694 - DNA, 22 bp, Artificial Sequence
  chemically synthesized
aaaatgcattcaaattttgcat

SEQ ID NO: 8695 - DNA, 22 bp, Artificial Sequence
  chemically synthesized
aaattttgcattctacttcaga

SEQ ID NO: 8696 - DNA, 22 bp, Artificial Sequence
  chemically synthesized
tgcattctacttcagaatacat

SEQ ID NO: 8697 - DNA, 22 bp, Artificial Sequence
  chemically synthesized
gcattctacttcagaatacatc

SEQ ID NO: 8698 - DNA, 22 bp, Artificial Sequence
  chemically synthesized
cattctacttcagaatacatcc

SEQ ID NO: 8699 - DNA, 22 bp, Artificial Sequence
  chemically synthesized
tacttcagaatacatccatgtt

SEQ ID NO: 8700 - DNA, 22 bp, Artificial Sequence
  chemically synthesized
cttcagaatacatccatgttta

SEQ ID NO: 8701 - DNA, 22 bp, Artificial Sequence
  chemically synthesized
cagaatacatccatgtttactt

SEQ ID NO: 8702 - DNA, 22 bp, Artificial Sequence
  chemically synthesized
agaatacatccatgtttacttc

SEQ ID NO: 8703 - DNA, 22 bp, Artificial Sequence
  chemically synthesized
acttcacttttaaaactcatac

SEQ ID NO: 8704 - DNA, 22 bp, Artificial Sequence
  chemically synthesized
cttcacttttaaaactcataca

SEQ ID NO: 8705 - DNA, 22 bp, Artificial Sequence
  chemically synthesized
cacttttaaaactcatacataa

SEQ ID NO: 8706 - DNA, 22 bp, Artificial Sequence
  chemically synthesized
acttttaaaactcatacataag

SEQ ID NO: 8707 - DNA, 22 bp, Artificial Sequence
  chemically synthesized
ttaaaactcatacataagttat

SEQ ID NO: 8708 - DNA, 22 bp, Artificial Sequence
  chemically synthesized
taaaactcatacataagttatt

SEQ ID NO: 8709 - DNA, 22 bp, Artificial Sequence
  chemically synthesized
aaaactcatacataagttattt

SEQ ID NO: 8710 - DNA, 22 bp, Artificial Sequence
  chemically synthesized
aaactcatacataagttatttc

SEQ ID NO: 8711 - DNA, 22 bp, Artificial Sequence
  chemically synthesized
atacataagttatttcgtatta

SEQ ID NO: 8712 - DNA, 22 bp, Artificial Sequence
  chemically synthesized
tttcgtattacttaattttttc

SEQ ID NO: 8713 - DNA, 22 bp, Artificial Sequence
  chemically synthesized
cgtattacttaattttttctgc

SEQ ID NO: 8714 - DNA, 22 bp, Artificial Sequence
  chemically synthesized
gtattacttaattttttctgcc

SEQ ID NO: 8715 - DNA, 22 bp, Artificial Sequence
  chemically synthesized
cttaattttttctgcccaaatc

SEQ ID NO: 8716 - DNA, 22 bp, Artificial Sequence
  chemically synthesized
aattttttctgcccaaatcttc

SEQ ID NO: 8717 - DNA, 22 bp, Artificial Sequence
  chemically synthesized
attttttctgcccaaatcttca

SEQ ID NO: 8718 - DNA, 22 bp, Artificial Sequence
  chemically synthesized
tttctgcccaaatcttcaaata

SEQ ID NO: 8719 - DNA, 22 bp, Artificial Sequence
  chemically synthesized
ttctgcccaaatcttcaaataa

SEQ ID NO: 8720 - DNA, 22 bp, Artificial Sequence
  chemically synthesized
tctgcccaaatcttcaaataac

SEQ ID NO: 8721 - DNA, 22 bp, Artificial Sequence
  chemically synthesized
ctgcccaaatcttcaaataaca

SEQ ID NO: 8722 - DNA, 22 bp, Artificial Sequence
  chemically synthesized
tgcccaaatcttcaaataacat

SEQ ID NO: 8723 - DNA, 22 bp, Artificial Sequence
  chemically synthesized
cccaaatcttcaaataacattg

SEQ ID NO: 8724 - DNA, 22 bp, Artificial Sequence
  chemically synthesized
caaataacattgaagctcctag

SEQ ID NO: 8725 - DNA, 22 bp, Artificial Sequence
  chemically synthesized
aaataacattgaagctcctaga

SEQ ID NO: 8726 - DNA, 22 bp, Artificial Sequence
  chemically synthesized
aagctcctagaagatgagccta

SEQ ID NO: 8727 - DNA, 22 bp, Artificial Sequence
  chemically synthesized
ctagaagatgagcctatggttt

SEQ ID NO: 8728 - DNA, 22 bp, Artificial Sequence
  chemically synthesized
gaagatgagcctatggttttga

SEQ ID NO: 8729 - DNA, 22 bp, Artificial Sequence
  chemically synthesized
tggttttgagacattcatatac

SEQ ID NO: 8730 - DNA, 22 bp, Artificial Sequence
  chemically synthesized
tgagacattcatatacctgtac

SEQ ID NO: 8731 - DNA, 22 bp, Artificial Sequence
  chemically synthesized
gagacattcatatacctgtact

SEQ ID NO: 8732 - DNA, 22 bp, Artificial Sequence
  chemically synthesized
agacattcatatacctgtactt

SEQ ID NO: 8733 - DNA, 22 bp, Artificial Sequence
  chemically synthesized
atatacctgtacttttgcaggg

SEQ ID NO: 8734 - DNA, 22 bp, Artificial Sequence
  chemically synthesized
tacttttgcagggggtggagtg

SEQ ID NO: 8735 - DNA, 22 bp, Artificial Sequence
  chemically synthesized
ttgcagggggtggagtgggtgg

SEQ ID NO: 8736 - DNA, 22 bp, Artificial Sequence
  chemically synthesized
tgcagggggtggagtgggtggg

SEQ ID NO: 8737 - DNA, 22 bp, Artificial Sequence
  chemically synthesized
gcagggggtggagtgggtgggt

SEQ ID NO: 8738 - DNA, 22 bp, Artificial Sequence
  chemically synthesized
cagggggtggagtgggtgggta

SEQ ID NO: 8739 - DNA, 22 bp, Artificial Sequence
  chemically synthesized
tatgtcagcttgagaagcatga

SEQ ID NO: 8740 - DNA, 22 bp, Artificial Sequence
  chemically synthesized
atgtcagcttgagaagcatgaa

SEQ ID NO: 8741 - DNA, 22 bp, Artificial Sequence
  chemically synthesized
tgtcagcttgagaagcatgaaa

SEQ ID NO: 8742 - DNA, 22 bp, Artificial Sequence
  chemically synthesized
gagaagcatgaaattccaggcc

SEQ ID NO: 8743 - DNA, 22 bp, Artificial Sequence
  chemically synthesized
agaagcatgaaattccaggcct

SEQ ID NO: 8744 - DNA, 22 bp, Artificial Sequence
  chemically synthesized
caggcctacgaattttccttga

SEQ ID NO: 8745 - DNA, 22 bp, Artificial Sequence
  chemically synthesized
cgaattttccttgaacttcgca

SEQ ID NO: 8746 - DNA, 22 bp, Artificial Sequence
  chemically synthesized
tccttgaacttcgcaatatgtc

SEQ ID NO: 8747 - DNA, 22 bp, Artificial Sequence
  chemically synthesized
ccttgaacttcgcaatatgtca

SEQ ID NO: 8748 - DNA, 22 bp, Artificial Sequence
  chemically synthesized
cttgaacttcgcaatatgtcac

SEQ ID NO: 8749 - DNA, 22 bp, Artificial Sequence
  chemically synthesized
gaacttcgcaatatgtcacaga

SEQ ID NO: 8750 - DNA, 22 bp, Artificial Sequence
  chemically synthesized
aacttcgcaatatgtcacagac

SEQ ID NO: 8751 - DNA, 22 bp, Artificial Sequence
  chemically synthesized
cgcaatatgtcacagacctcat

SEQ ID NO: 8752 - DNA, 22 bp, Artificial Sequence
  chemically synthesized
gcaatatgtcacagacctcata

SEQ ID NO: 8753 - DNA, 22 bp, Artificial Sequence
  chemically synthesized
atagatctcaatccaaaatttc

SEQ ID NO: 8754 - DNA, 22 bp, Artificial Sequence
  chemically synthesized
aatccaaaatttctagtaaaca

SEQ ID NO: 8755 - DNA, 22 bp, Artificial Sequence
  chemically synthesized
ctagtaaacataaggatctcat

SEQ ID NO: 8756 - DNA, 22 bp, Artificial Sequence
  chemically synthesized
tagtaaacataaggatctcatt

SEQ ID NO: 8757 - DNA, 22 bp, Artificial Sequence
  chemically synthesized
gtaaacataaggatctcattat

SEQ ID NO: 8758 - DNA, 22 bp, Artificial Sequence
  chemically synthesized
attatttcaaagctttatctat

SEQ ID NO: 8759 - DNA, 22 bp, Artificial Sequence
  chemically synthesized
tttcaaagctttatctatgaca

SEQ ID NO: 8760 - DNA, 22 bp, Artificial Sequence
  chemically synthesized
caaagctttatctatgacacag

SEQ ID NO: 8761 - DNA, 22 bp, Artificial Sequence
  chemically synthesized
aaagctttatctatgacacagt

SEQ ID NO: 8762 - DNA, 22 bp, Artificial Sequence
  chemically synthesized
tatctatgacacagtttcctgg

SEQ ID NO: 8763 - DNA, 22 bp, Artificial Sequence
  chemically synthesized
atctatgacacagtttcctggc

SEQ ID NO: 8764 - DNA, 22 bp, Artificial Sequence
  chemically synthesized
tctatgacacagtttcctggcc

SEQ ID NO: 8765 - DNA, 22 bp, Artificial Sequence
  chemically synthesized
tgacacagtttcctggcctgat

SEQ ID NO: 8766 - DNA, 22 bp, Artificial Sequence
  chemically synthesized
cctggcctgatccccagaatgt

SEQ ID NO: 8767 - DNA, 22 bp, Artificial Sequence
  chemically synthesized
ctggcctgatccccagaatgtt

SEQ ID NO: 8768 - DNA, 22 bp, Artificial Sequence
  chemically synthesized
gcctgatccccagaatgttatt

SEQ ID NO: 8769 - DNA, 22 bp, Artificial Sequence
  chemically synthesized
atccccagaatgttattataac

SEQ ID NO: 8770 - DNA, 22 bp, Artificial Sequence
  chemically synthesized
ttataacaaactgtaatatatt

SEQ ID NO: 8771 - DNA, 22 bp, Artificial Sequence
  chemically synthesized
taacaaactgtaatatattaag

SEQ ID NO: 8772 - DNA, 22 bp, Artificial Sequence
  chemically synthesized
taatatattaagaaataagttc

SEQ ID NO: 8773 - DNA, 22 bp, Artificial Sequence
  chemically synthesized
agaaataagttccatataatct

SEQ ID NO: 8774 - DNA, 22 bp, Artificial Sequence
  chemically synthesized
catataatctacgatttccttc

SEQ ID NO: 8775 - DNA, 22 bp, Artificial Sequence
  chemically synthesized
cgatttccttcaactgtgtaat

SEQ ID NO: 8776 - DNA, 22 bp, Artificial Sequence
  chemically synthesized
ccttcaactgtgtaattaagta

SEQ ID NO: 8777 - DNA, 22 bp, Artificial Sequence
  chemically synthesized
cttcaactgtgtaattaagtag

SEQ ID NO: 8778 - DNA, 22 bp, Artificial Sequence
  chemically synthesized
caactgtgtaattaagtagata

SEQ ID NO: 8779 - DNA, 22 bp, Artificial Sequence
  chemically synthesized
aactgtgtaattaagtagatat

SEQ ID NO: 8780 - DNA, 22 bp, Artificial Sequence
  chemically synthesized
tgtaattaagtagatatttttt

SEQ ID NO: 8781 - DNA, 22 bp, Artificial Sequence
  chemically synthesized
agtagatattttttaaaagaat

SEQ ID NO: 8782 - DNA, 22 bp, Artificial Sequence
  chemically synthesized
tttaaaagaatgaaacaataaa

SEQ ID NO: 8783 - DNA, 22 bp, Artificial Sequence
  chemically synthesized
ttaaaagaatgaaacaataaag

SEQ ID NO: 8784 - DNA, 22 bp, Artificial Sequence
  chemically synthesized
taaaagaatgaaacaataaaga

SEQ ID NO: 8785 - DNA, 22 bp, Artificial Sequence
  chemically synthesized
aaaagaatgaaacaataaagat

SEQ ID NO: 8786 - DNA, 22 bp, Artificial Sequence
  chemically synthesized
aaagaatgaaacaataaagatg

SEQ ID NO: 8787 - DNA, 22 bp, Artificial Sequence
  chemically synthesized
tttaaataagtacactatgttt

SEQ ID NO: 8788 - DNA, 22 bp, Artificial Sequence
  chemically synthesized
aaataagtacactatgtttcaa

SEQ ID NO: 8789 - DNA, 22 bp, Artificial Sequence
  chemically synthesized
aataagtacactatgtttcaaa

SEQ ID NO: 8790 - DNA, 22 bp, Artificial Sequence
  chemically synthesized
tgtttcaaaaatatttttgagt

SEQ ID NO: 8791 - DNA, 22 bp, Artificial Sequence
  chemically synthesized
caaaaatatttttgagtcattt

SEQ ID NO: 8792 - DNA, 22 bp, Artificial Sequence
  chemically synthesized
aaaaatatttttgagtcatttc

SEQ ID NO: 8793 - DNA, 22 bp, Artificial Sequence
  chemically synthesized
ttgagtcatttcaggcaaataa

SEQ ID NO: 8794 - DNA, 22 bp, Artificial Sequence
  chemically synthesized
tgagtcatttcaggcaaataaa

SEQ ID NO: 8795 - DNA, 22 bp, Artificial Sequence
  chemically synthesized
gagtcatttcaggcaaataaac

SEQ ID NO: 8796 - DNA, 22 bp, Artificial Sequence
  chemically synthesized
agtcatttcaggcaaataaaca

SEQ ID NO: 8797 - DNA, 22 bp, Artificial Sequence
  chemically synthesized
caggcaaataaacaacctccct

SEQ ID NO: 8798 - DNA, 22 bp, Artificial Sequence
  chemically synthesized
aggcaaataaacaacctccctt

SEQ ID NO: 8799 - DNA, 22 bp, Artificial Sequence
  chemically synthesized
cctttctcaaaaaaaaaaaaaa

SEQ ID NO: 8800 - DNA, 22 bp, Artificial Sequence
  chemically synthesized
tctcaaaaaaaaaaaaaaaact

SEQ ID NO: 8801 - DNA, 22 bp, Artificial Sequence
  chemically synthesized
ctcaaaaaaaaaaaaaaaactt

SEQ ID NO: 8802 - DNA, 22 bp, Artificial Sequence
  chemically synthesized
tcaaaaaaaaaaaaaaaactta

SEQ ID NO: 8803 - DNA, 22 bp, Artificial Sequence
  chemically synthesized
aaaaaaaaaaaaaaaacttact

SEQ ID NO: 8804 - DNA, 22 bp, Artificial Sequence
  chemically synthesized
acttgttataggttaatgcttg

SEQ ID NO: 8805 - DNA, 22 bp, Artificial Sequence
  chemically synthesized
cttgttataggttaatgcttga

SEQ ID NO: 8806 - DNA, 22 bp, Artificial Sequence
  chemically synthesized
gttataggttaatgcttgaatt

SEQ ID NO: 8807 - DNA, 22 bp, Artificial Sequence
  chemically synthesized
ttataggttaatgcttgaatta

SEQ ID NO: 8808 - DNA, 22 bp, Artificial Sequence
  chemically synthesized
taggttaatgcttgaattaaaa

SEQ ID NO: 8809 - DNA, 22 bp, Artificial Sequence
  chemically synthesized
atgcttgaattaaaatgtttgt

SEQ ID NO: 8810 - DNA, 22 bp, Artificial Sequence
  chemically synthesized
gaattaaaatgtttgttgtttg

SEQ ID NO: 8811 - DNA, 22 bp, Artificial Sequence
  chemically synthesized
aattaaaatgtttgttgtttga

SEQ ID NO: 8812 - DNA, 22 bp, Artificial Sequence
  chemically synthesized
aaatgtttgttgtttgacgtat

SEQ ID NO: 8813 - DNA, 22 bp, Artificial Sequence
  chemically synthesized
gttgtttgacgtatggaatgct

SEQ ID NO: 8814 - DNA, 22 bp, Artificial Sequence
  chemically synthesized
ttgtttgacgtatggaatgctg

SEQ ID NO: 8815 - DNA, 22 bp, Artificial Sequence
  chemically synthesized
tttgacgtatggaatgctgcac

SEQ ID NO: 8816 - DNA, 22 bp, Artificial Sequence
  chemically synthesized
gacgtatggaatgctgcactct

SEQ ID NO: 8817 - DNA, 22 bp, Artificial Sequence
  chemically synthesized
acgtatggaatgctgcactctt

SEQ ID NO: 8818 - DNA, 22 bp, Artificial Sequence
  chemically synthesized
cactcttaattgttaatataca

SEQ ID NO: 8819 - DNA, 22 bp, Artificial Sequence
  chemically synthesized
ttaattgttaatatacaggctc

SEQ ID NO: 8820 - DNA, 22 bp, Artificial Sequence
  chemically synthesized
aattgttaatatacaggctctt

SEQ ID NO: 8821 - DNA, 22 bp, Artificial Sequence
  chemically synthesized
attgttaatatacaggctcttc

SEQ ID NO: 8822 - DNA, 22 bp, Artificial Sequence
  chemically synthesized
ttaatatacaggctcttcccca

SEQ ID NO: 8823 - DNA, 22 bp, Artificial Sequence
  chemically synthesized
atatacaggctcttccccatta

SEQ ID NO: 8824 - DNA, 22 bp, Artificial Sequence
  chemically synthesized
ttccccattaataagtcaaaag

SEQ ID NO: 8825 - DNA, 22 bp, Artificial Sequence
  chemically synthesized
ccccattaataagtcaaaagga

SEQ ID NO: 8826 - DNA, 22 bp, Artificial Sequence
  chemically synthesized
cccattaataagtcaaaaggaa

SEQ ID NO: 8827 - DNA, 22 bp, Artificial Sequence
  chemically synthesized
ataagtcaaaaggaaaaatcat

SEQ ID NO: 8828 - DNA, 22 bp, Artificial Sequence
  chemically synthesized
agacactttagaaagaccagac

SEQ ID NO: 8829 - DNA, 22 bp, Artificial Sequence
  chemically synthesized
gacactttagaaagaccagaca

SEQ ID NO: 8830 - DNA, 22 bp, Artificial Sequence
  chemically synthesized
tagaaagaccagacactacaaa

SEQ ID NO: 8831 - DNA, 22 bp, Artificial Sequence
  chemically synthesized
agaaagaccagacactacaaaa

SEQ ID NO: 8832 - DNA, 22 bp, Artificial Sequence
  chemically synthesized
gaaagaccagacactacaaaaa

SEQ ID NO: 8833 - DNA, 22 bp, Artificial Sequence
  chemically synthesized
caaaaagcacctaataaaacag

SEQ ID NO: 8834 - DNA, 22 bp, Artificial Sequence
  chemically synthesized
ataaaacagattaggactcaat

SEQ ID NO: 8835 - DNA, 22 bp, Artificial Sequence
  chemically synthesized
ggactcaattcttaattctatc

SEQ ID NO: 8836 - DNA, 22 bp, Artificial Sequence
  chemically synthesized
aattcttaattctatcatttta

SEQ ID NO: 8837 - DNA, 22 bp, Artificial Sequence
  chemically synthesized
ttaattctatcattttataaat

SEQ ID NO: 8838 - DNA, 22 bp, Artificial Sequence
  chemically synthesized
aattctatcattttataaatgt

SEQ ID NO: 8839 - DNA, 22 bp, Artificial Sequence
  chemically synthesized
attctatcattttataaatgtt

SEQ ID NO: 8840 - DNA, 22 bp, Artificial Sequence
  chemically synthesized
tatcattttataaatgttaaaa

SEQ ID NO: 8841 - DNA, 22 bp, Artificial Sequence
  chemically synthesized
tcattttataaatgttaaaata

SEQ ID NO: 8842 - DNA, 22 bp, Artificial Sequence
  chemically synthesized
tataaatgttaaaatatatata

SEQ ID NO: 8843 - DNA, 22 bp, Artificial Sequence
  chemically synthesized
ataaatgttaaaatatatataa

SEQ ID NO: 8844 - DNA, 22 bp, Artificial Sequence
  chemically synthesized
taaatgttaaaatatatataaa

SEQ ID NO: 8845 - DNA, 22 bp, Artificial Sequence
  chemically synthesized
aaatatatataaaaaatatatt

SEQ ID NO: 8846 - DNA, 22 bp, Artificial Sequence
  chemically synthesized
cactctatcatagagtatatgt

SEQ ID NO: 8847 - DNA, 22 bp, Artificial Sequence
  chemically synthesized
tatcatagagtatatgttatat

SEQ ID NO: 8848 - DNA, 22 bp, Artificial Sequence
  chemically synthesized
tcatagagtatatgttatatat

SEQ ID NO: 8849 - DNA, 22 bp, Artificial Sequence
  chemically synthesized
tatattttacatatcatatata

SEQ ID NO: 8850 - DNA, 22 bp, Artificial Sequence
  chemically synthesized
tacatatcatatataacatata

SEQ ID NO: 8851 - DNA, 22 bp, Artificial Sequence
  chemically synthesized
acatatcatatataacatatac

SEQ ID NO: 8852 - DNA, 22 bp, Artificial Sequence
  chemically synthesized
catatcatatataacatatact

SEQ ID NO: 8853 - DNA, 22 bp, Artificial Sequence
  chemically synthesized
tacataacataatagggtttta

SEQ ID NO: 8854 - DNA, 22 bp, Artificial Sequence
  chemically synthesized
cataacataatagggttttaag

SEQ ID NO: 8855 - DNA, 22 bp, Artificial Sequence
  chemically synthesized
taagtttataacttttttttaa

SEQ ID NO: 8856 - DNA, 22 bp, Artificial Sequence
  chemically synthesized
aagtttataacttttttttaat

SEQ ID NO: 8857 - DNA, 22 bp, Artificial Sequence
  chemically synthesized
agtttataacttttttttaata

SEQ ID NO: 8858 - DNA, 22 bp, Artificial Sequence
  chemically synthesized
ataacttttttttaatatataa

SEQ ID NO: 8859 - DNA, 22 bp, Artificial Sequence
  chemically synthesized
taacttttttttaatatataaa

SEQ ID NO: 8860 - DNA, 22 bp, Artificial Sequence
  chemically synthesized
ttttttaatatataaacatata

SEQ ID NO: 8861 - DNA, 22 bp, Artificial Sequence
  chemically synthesized
tttttaatatataaacatatat

SEQ ID NO: 8862 - DNA, 22 bp, Artificial Sequence
  chemically synthesized
ttttaatatataaacatatata

SEQ ID NO: 8863 - DNA, 22 bp, Artificial Sequence
  chemically synthesized
tttaatatataaacatatatat

SEQ ID NO: 8864 - DNA, 22 bp, Artificial Sequence
  chemically synthesized
ttaatatataaacatatatata

SEQ ID NO: 8865 - DNA, 22 bp, Artificial Sequence
  chemically synthesized
taatatataaacatatatatat

SEQ ID NO: 8866 - DNA, 22 bp, Artificial Sequence
  chemically synthesized
aatatataaacatatatatatc

SEQ ID NO: 8867 - DNA, 22 bp, Artificial Sequence
  chemically synthesized
atatataaacatatatatatcc

SEQ ID NO: 8868 - DNA, 22 bp, Artificial Sequence
  chemically synthesized
caatgctggtaatatgtatata

SEQ ID NO: 8869 - DNA, 22 bp, Artificial Sequence
  chemically synthesized
gtaatatgtatatatgctcgta

SEQ ID NO: 8870 - DNA, 22 bp, Artificial Sequence
  chemically synthesized
gtactatatatatatacacaca

SEQ ID NO: 8871 - DNA, 22 bp, Artificial Sequence
  chemically synthesized
tatatatatacacacacaaaca

SEQ ID NO: 8872 - DNA, 22 bp, Artificial Sequence
  chemically synthesized
gtactacatatatagtacaagc

SEQ ID NO: 8873 - DNA, 22 bp, Artificial Sequence
  chemically synthesized
tactacatatatagtacaagca

SEQ ID NO: 8874 - DNA, 22 bp, Artificial Sequence
  chemically synthesized
catatatagtacaagcattgca

SEQ ID NO: 8875 - DNA, 22 bp, Artificial Sequence
  chemically synthesized
caggatatatatatgtatatat

SEQ ID NO: 8876 - DNA, 22 bp, Artificial Sequence
  chemically synthesized
tatctgtaaaagctaagtcaga

SEQ ID NO: 8877 - DNA, 22 bp, Artificial Sequence
  chemically synthesized
taaaagctaagtcagatttcac

SEQ ID NO: 8878 - DNA, 22 bp, Artificial Sequence
  chemically synthesized
agtcagatttcactttgataca

SEQ ID NO: 8879 - DNA, 22 bp, Artificial Sequence
  chemically synthesized
cactttgatacatgtaaaccag

SEQ ID NO: 8880 - DNA, 22 bp, Artificial Sequence
  chemically synthesized
actttgatacatgtaaaccagg

SEQ ID NO: 8881 - DNA, 22 bp, Artificial Sequence
  chemically synthesized
tgatacatgtaaaccaggaatt

SEQ ID NO: 8882 - DNA, 22 bp, Artificial Sequence
  chemically synthesized
gatacatgtaaaccaggaattc

SEQ ID NO: 8883 - DNA, 22 bp, Artificial Sequence
  chemically synthesized
atacatgtaaaccaggaattct

SEQ ID NO: 8884 - DNA, 22 bp, Artificial Sequence
  chemically synthesized
tatgtttcaaaaaacagtagtt

SEQ ID NO: 8885 - DNA, 22 bp, Artificial Sequence
  chemically synthesized
tgtttcaaaaaacagtagttgt

SEQ ID NO: 8886 - DNA, 22 bp, Artificial Sequence
  chemically synthesized
caaaaaacagtagttgtggtca

SEQ ID NO: 8887 - DNA, 22 bp, Artificial Sequence
  chemically synthesized
aaaaaacagtagttgtggtcaa

SEQ ID NO: 8888 - DNA, 22 bp, Artificial Sequence
  chemically synthesized
tggtcaactttatatcttatta

SEQ ID NO: 8889 - DNA, 22 bp, Artificial Sequence
  chemically synthesized
tatatcttattattatatcttt

SEQ ID NO: 8890 - DNA, 22 bp, Artificial Sequence
  chemically synthesized
atatcttattattatatcttta

SEQ ID NO: 8891 - DNA, 22 bp, Artificial Sequence
  chemically synthesized
tatcttattattatatctttaa

SEQ ID NO: 8892 - DNA, 22 bp, Artificial Sequence
  chemically synthesized
attattatatctttaaaagata

SEQ ID NO: 8893 - DNA, 22 bp, Artificial Sequence
  chemically synthesized
ttattatatctttaaaagatag

SEQ ID NO: 8894 - DNA, 22 bp, Artificial Sequence
  chemically synthesized
ttatatctttaaaagatagcaa

SEQ ID NO: 8895 - DNA, 22 bp, Artificial Sequence
  chemically synthesized
tatctttaaaagatagcaataa

SEQ ID NO: 8896 - DNA, 22 bp, Artificial Sequence
  chemically synthesized
taaaagatagcaataatattta

SEQ ID NO: 8897 - DNA, 22 bp, Artificial Sequence
  chemically synthesized
aaaagatagcaataatatttat

SEQ ID NO: 8898 - DNA, 22 bp, Artificial Sequence
  chemically synthesized
aaagatagcaataatatttatt

SEQ ID NO: 8899 - DNA, 22 bp, Artificial Sequence
  chemically synthesized
attatattgtaaacaaaggtct

SEQ ID NO: 8900 - DNA, 22 bp, Artificial Sequence
  chemically synthesized
ttatattgtaaacaaaggtctg

SEQ ID NO: 8901 - DNA, 22 bp, Artificial Sequence
  chemically synthesized
tattgtaaacaaaggtctgaat

SEQ ID NO: 8902 - DNA, 22 bp, Artificial Sequence
  chemically synthesized
taaacaaaggtctgaattcccg

SEQ ID NO: 8903 - DNA, 22 bp, Artificial Sequence
  chemically synthesized
aattcccgaagcataaatctag

SEQ ID NO: 8904 - DNA, 22 bp, Artificial Sequence
  chemically synthesized
ccgaagcataaatctaggacaa

SEQ ID NO: 8905 - DNA, 22 bp, Artificial Sequence
  chemically synthesized
ggacaagaggcaaccaatgtaa

SEQ ID NO: 8906 - DNA, 22 bp, Artificial Sequence
  chemically synthesized
gacatgccctcacagactcttc

SEQ ID NO: 8907 - DNA, 22 bp, Artificial Sequence
  chemically synthesized
acatgccctcacagactcttct

SEQ ID NO: 8908 - DNA, 22 bp, Artificial Sequence
  chemically synthesized
acagactcttctgagaactgta

SEQ ID NO: 8909 - DNA, 22 bp, Artificial Sequence
  chemically synthesized
ttctgagaactgtagtgtaact

SEQ ID NO: 8910 - DNA, 22 bp, Artificial Sequence
  chemically synthesized
ctgagaactgtagtgtaactaa

SEQ ID NO: 8911 - DNA, 22 bp, Artificial Sequence
  chemically synthesized
tgagaactgtagtgtaactaac

SEQ ID NO: 8912 - DNA, 22 bp, Artificial Sequence
  chemically synthesized
agaactgtagtgtaactaactt

SEQ ID NO: 8913 - DNA, 22 bp, Artificial Sequence
  chemically synthesized
tagtgtaactaacttaactgca

SEQ ID NO: 8914 - DNA, 22 bp, Artificial Sequence
  chemically synthesized
acttaactgcaattgctgagca

SEQ ID NO: 8915 - DNA, 22 bp, Artificial Sequence
  chemically synthesized
aactgcaattgctgagcagaac

SEQ ID NO: 8916 - DNA, 22 bp, Artificial Sequence
  chemically synthesized
actgcaattgctgagcagaact

SEQ ID NO: 8917 - DNA, 22 bp, Artificial Sequence
  chemically synthesized
caattgctgagcagaactctgg

SEQ ID NO: 8918 - DNA, 22 bp, Artificial Sequence
  chemically synthesized
ctgagcagaactctggggcatg

SEQ ID NO: 8919 - DNA, 22 bp, Artificial Sequence
  chemically synthesized
agcagaactctggggcatgatc

SEQ ID NO: 8920 - DNA, 22 bp, Artificial Sequence
  chemically synthesized
tggggcatgatccaggggaata

SEQ ID NO: 8921 - DNA, 22 bp, Artificial Sequence
  chemically synthesized
gggcatgatccaggggaatata

SEQ ID NO: 8922 - DNA, 22 bp, Artificial Sequence
  chemically synthesized
taggatatattaaaaaagaaaa

SEQ ID NO: 8923 - DNA, 22 bp, Artificial Sequence
  chemically synthesized
aaaaagaaaacatgtcatatca

SEQ ID NO: 8924 - DNA, 22 bp, Artificial Sequence
  chemically synthesized
actctgacaatctcaagttcaa

SEQ ID NO: 8925 - DNA, 22 bp, Artificial Sequence
  chemically synthesized
tgacaatctcaagttcaacatt

SEQ ID NO: 8926 - DNA, 22 bp, Artificial Sequence
  chemically synthesized
acaatctcaagttcaacattta

SEQ ID NO: 8927 - DNA, 22 bp, Artificial Sequence
  chemically synthesized
aagttcaacatttacctgatcc

SEQ ID NO: 8928 - DNA, 22 bp, Artificial Sequence
  chemically synthesized
aacatttacctgatccaggaag

SEQ ID NO: 8929 - DNA, 22 bp, Artificial Sequence
  chemically synthesized
acctgatccaggaaggctttca

SEQ ID NO: 8930 - DNA, 22 bp, Artificial Sequence
  chemically synthesized
cctgatccaggaaggctttcac

SEQ ID NO: 8931 - DNA, 22 bp, Artificial Sequence
  chemically synthesized
atccaggaaggctttcactaga

SEQ ID NO: 8932 - DNA, 22 bp, Artificial Sequence
  chemically synthesized
tcactagagtgtctctgtgtaa

SEQ ID NO: 8933 - DNA, 22 bp, Artificial Sequence
  chemically synthesized
cactagagtgtctctgtgtaag

SEQ ID NO: 8934 - DNA, 22 bp, Artificial Sequence
  chemically synthesized
actagagtgtctctgtgtaaga

SEQ ID NO: 8935 - DNA, 22 bp, Artificial Sequence
  chemically synthesized
gagtgtctctgtgtaagacatc

SEQ ID NO: 8936 - DNA, 22 bp, Artificial Sequence
  chemically synthesized
tgtgtaagacatcttgaaaaat

SEQ ID NO: 8937 - DNA, 22 bp, Artificial Sequence
  chemically synthesized
tgtaagacatcttgaaaaatat

SEQ ID NO: 8938 - DNA, 22 bp, Artificial Sequence
  chemically synthesized
gaaaaatattcctgaagaaaag

SEQ ID NO: 8939 - DNA, 22 bp, Artificial Sequence
  chemically synthesized
aaaaatattcctgaagaaaaga

SEQ ID NO: 8940 - DNA, 22 bp, Artificial Sequence
  chemically synthesized
ctgaagaaaagaagaaaatgaa

SEQ ID NO: 8941 - DNA, 22 bp, Artificial Sequence
  chemically synthesized
aagaaaagaagaaaatgaagaa

SEQ ID NO: 8942 - DNA, 22 bp, Artificial Sequence
  chemically synthesized
aaatgttgaaatggccatataa

SEQ ID NO: 8943 - DNA, 22 bp, Artificial Sequence
  chemically synthesized
aaatggccatataatgctacct

SEQ ID NO: 8944 - DNA, 22 bp, Artificial Sequence
  chemically synthesized
ccttccacaatccctcacttga

SEQ ID NO: 8945 - DNA, 22 bp, Artificial Sequence
  chemically synthesized
ccacaatccctcacttgagcca

SEQ ID NO: 8946 - DNA, 22 bp, Artificial Sequence
  chemically synthesized
cacaatccctcacttgagccaa

SEQ ID NO: 8947 - DNA, 22 bp, Artificial Sequence
  chemically synthesized
acttgagccaacattttaagtt

SEQ ID NO: 8948 - DNA, 22 bp, Artificial Sequence
  chemically synthesized
gagccaacattttaagttctta

SEQ ID NO: 8949 - DNA, 22 bp, Artificial Sequence
  chemically synthesized
agccaacattttaagttcttat

SEQ ID NO: 8950 - DNA, 22 bp, Artificial Sequence
  chemically synthesized
taagttcttataaattgatatt

SEQ ID NO: 8951 - DNA, 22 bp, Artificial Sequence
  chemically synthesized
aagttcttataaattgatatta

SEQ ID NO: 8952 - DNA, 22 bp, Artificial Sequence
  chemically synthesized
agttcttataaattgatattac

SEQ ID NO: 8953 - DNA, 22 bp, Artificial Sequence
  chemically synthesized
ttataaattgatattacatata

SEQ ID NO: 8954 - DNA, 22 bp, Artificial Sequence
  chemically synthesized
ataaattgatattacatataaa

SEQ ID NO: 8955 - DNA, 22 bp, Artificial Sequence
  chemically synthesized
taaattgatattacatataaac

SEQ ID NO: 8956 - DNA, 22 bp, Artificial Sequence
  chemically synthesized
atattacatataaacacatttg

SEQ ID NO: 8957 - DNA, 22 bp, Artificial Sequence
  chemically synthesized
catataaacacatttgtaagaa

SEQ ID NO: 8958 - DNA, 22 bp, Artificial Sequence
  chemically synthesized
gtaagaatatagatatatatat

SEQ ID NO: 8959 - DNA, 22 bp, Artificial Sequence
  chemically synthesized
taagaatatagatatatatatt

SEQ ID NO: 8960 - DNA, 22 bp, Artificial Sequence
  chemically synthesized
ggagacacaaaatatacattca

SEQ ID NO: 8961 - DNA, 22 bp, Artificial Sequence
  chemically synthesized
gagacacaaaatatacattcat

SEQ ID NO: 8962 - DNA, 22 bp, Artificial Sequence
  chemically synthesized
atttatttactcaaggatatat

SEQ ID NO: 8963 - DNA, 22 bp, Artificial Sequence
  chemically synthesized
atttactcaaggatatatttac

SEQ ID NO: 8964 - DNA, 22 bp, Artificial Sequence
  chemically synthesized
tttactcaaggatatatttaca

SEQ ID NO: 8965 - DNA, 22 bp, Artificial Sequence
  chemically synthesized
actcaaggatatatttacattt

SEQ ID NO: 8966 - DNA, 22 bp, Artificial Sequence
  chemically synthesized
ctcaaggatatatttacatttt

SEQ ID NO: 8967 - DNA, 22 bp, Artificial Sequence
  chemically synthesized
aaggatatatttacattttact

SEQ ID NO: 8968 - DNA, 22 bp, Artificial Sequence
  chemically synthesized
acattttactggtgtttgtcag

SEQ ID NO: 8969 - DNA, 22 bp, Artificial Sequence
  chemically synthesized
cattttactggtgtttgtcagg

SEQ ID NO: 8970 - DNA, 22 bp, Artificial Sequence
  chemically synthesized
tactggtgtttgtcaggctaat

SEQ ID NO: 8971 - DNA, 22 bp, Artificial Sequence
  chemically synthesized
actggtgtttgtcaggctaata

SEQ ID NO: 8972 - DNA, 22 bp, Artificial Sequence
  chemically synthesized
ctggtgtttgtcaggctaatat

SEQ ID NO: 8973 - DNA, 22 bp, Artificial Sequence
  chemically synthesized
gtgtttgtcaggctaatatgta

SEQ ID NO: 8974 - DNA, 22 bp, Artificial Sequence
  chemically synthesized
gtcaggctaatatgtaattttt

SEQ ID NO: 8975 - DNA, 22 bp, Artificial Sequence
  chemically synthesized
tcaggctaatatgtaatttttt

SEQ ID NO: 8976 - DNA, 22 bp, Artificial Sequence
  chemically synthesized
atatgtaattttttctctaaag

SEQ ID NO: 8977 - DNA, 22 bp, Artificial Sequence
  chemically synthesized
tttctctaaagaatataagcag

SEQ ID NO: 8978 - DNA, 22 bp, Artificial Sequence
  chemically synthesized
ttctctaaagaatataagcagt

SEQ ID NO: 8979 - DNA, 22 bp, Artificial Sequence
  chemically synthesized
tctctaaagaatataagcagtc

SEQ ID NO: 8980 - DNA, 22 bp, Artificial Sequence
  chemically synthesized
ctctaaagaatataagcagtcc

SEQ ID NO: 8981 - DNA, 22 bp, Artificial Sequence
  chemically synthesized
tctaaagaatataagcagtccc

SEQ ID NO: 8982 - DNA, 22 bp, Artificial Sequence
  chemically synthesized
taaagaatataagcagtcccca

SEQ ID NO: 8983 - DNA, 22 bp, Artificial Sequence
  chemically synthesized
aagaatataagcagtccccagt

SEQ ID NO: 8984 - DNA, 22 bp, Artificial Sequence
  chemically synthesized
tcaatctattttactactctca

SEQ ID NO: 8985 - DNA, 22 bp, Artificial Sequence
  chemically synthesized
ttttactactctcatcttttaa

SEQ ID NO: 8986 - DNA, 22 bp, Artificial Sequence
  chemically synthesized
tactactctcatcttttaaaaa

SEQ ID NO: 8987 - DNA, 22 bp, Artificial Sequence
  chemically synthesized
actactctcatcttttaaaaaa

SEQ ID NO: 8988 - DNA, 22 bp, Artificial Sequence
  chemically synthesized
ctactctcatcttttaaaaaaa

SEQ ID NO: 8989 - DNA, 22 bp, Artificial Sequence
  chemically synthesized
ctctcatcttttaaaaaaagta

SEQ ID NO: 8990 - DNA, 22 bp, Artificial Sequence
  chemically synthesized
tcatcttttaaaaaaagtagag

SEQ ID NO: 8991 - DNA, 22 bp, Artificial Sequence
  chemically synthesized
atcttttaaaaaaagtagagac

SEQ ID NO: 8992 - DNA, 22 bp, Artificial Sequence
  chemically synthesized
ttaaaaaaagtagagaccctta

SEQ ID NO: 8993 - DNA, 22 bp, Artificial Sequence
  chemically synthesized
taaaaaaagtagagacccttag

SEQ ID NO: 8994 - DNA, 22 bp, Artificial Sequence
  chemically synthesized
aaaaaaagtagagacccttagg

SEQ ID NO: 8995 - DNA, 22 bp, Artificial Sequence
  chemically synthesized
aaaaaagtagagacccttaggc

SEQ ID NO: 8996 - DNA, 22 bp, Artificial Sequence
  chemically synthesized
aggcaattaataaataaaacta

SEQ ID NO: 8997 - DNA, 22 bp, Artificial Sequence
  chemically synthesized
ggcaattaataaataaaactac

SEQ ID NO: 8998 - DNA, 22 bp, Artificial Sequence
  chemically synthesized
ataaataaaactaccaattctt

SEQ ID NO: 8999 - DNA, 22 bp, Artificial Sequence
  chemically synthesized
ccaattcttgccatctcaaaaa

SEQ ID NO: 9000 - DNA, 22 bp, Artificial Sequence
  chemically synthesized
ttgccatctcaaaaaaaaacaa

SEQ ID NO: 9001 - DNA, 22 bp, Artificial Sequence
  chemically synthesized
gccatctcaaaaaaaaacaaaa

SEQ ID NO: 9002 - DNA, 22 bp, Artificial Sequence
  chemically synthesized
ccatctcaaaaaaaaacaaaaa

SEQ ID NO: 9003 - DNA, 22 bp, Artificial Sequence
  chemically synthesized
aaaaaaaaacaaaaaacaaacc

SEQ ID NO: 9004 - DNA, 22 bp, Artificial Sequence
  chemically synthesized
ccatcaaaaaccaaaacaaacc

SEQ ID NO: 9005 - DNA, 22 bp, Artificial Sequence
  chemically synthesized
gagtgagattagagaacacact

SEQ ID NO: 9006 - DNA, 22 bp, Artificial Sequence
  chemically synthesized
agtgagattagagaacacactc

SEQ ID NO: 9007 - DNA, 22 bp, Artificial Sequence
  chemically synthesized
gagaacacactccgatgattat

SEQ ID NO: 9008 - DNA, 22 bp, Artificial Sequence
  chemically synthesized
cgatgattatccactgggtttg

SEQ ID NO: 9009 - DNA, 22 bp, Artificial Sequence
  chemically synthesized
tccactgggtttgcctcaacaa

SEQ ID NO: 9010 - DNA, 22 bp, Artificial Sequence
  chemically synthesized
ggtttgcctcaacaagcccacc

SEQ ID NO: 9011 - DNA, 22 bp, Artificial Sequence
  chemically synthesized
gcctcaacaagcccaccatctg

SEQ ID NO: 9012 - DNA, 22 bp, Artificial Sequence
  chemically synthesized
cctcaacaagcccaccatctgt

SEQ ID NO: 9013 - DNA, 22 bp, Artificial Sequence
  chemically synthesized
aacaagcccaccatctgtaagt

SEQ ID NO: 9014 - DNA, 22 bp, Artificial Sequence
  chemically synthesized
taagtaacatgaaccaactatc

SEQ ID NO: 9015 - DNA, 22 bp, Artificial Sequence
  chemically synthesized
tccaagaaagtactacctacct

SEQ ID NO: 9016 - DNA, 22 bp, Artificial Sequence
  chemically synthesized
cctaccttggcaacgaccagag

SEQ ID NO: 9017 - DNA, 22 bp, Artificial Sequence
  chemically synthesized
ccttggcaacgaccagagtgag

SEQ ID NO: 9018 - DNA, 22 bp, Artificial Sequence
  chemically synthesized
ggcaacgaccagagtgagtagt

SEQ ID NO: 9019 - DNA, 22 bp, Artificial Sequence
  chemically synthesized
gcaacgaccagagtgagtagta

SEQ ID NO: 9020 - DNA, 22 bp, Artificial Sequence
  chemically synthesized
aaaataatgtgtgcctaacaca

SEQ ID NO: 9021 - DNA, 22 bp, Artificial Sequence
  chemically synthesized
aaataatgtgtgcctaacacag

SEQ ID NO: 9022 - DNA, 22 bp, Artificial Sequence
  chemically synthesized
acacagcacctaggatatagca

SEQ ID NO: 9023 - DNA, 22 bp, Artificial Sequence
  chemically synthesized
ggatatagcaggtgctaaagca

SEQ ID NO: 9024 - DNA, 22 bp, Artificial Sequence
  chemically synthesized
aagcaaacacacaaacaaacag

SEQ ID NO: 9025 - DNA, 22 bp, Artificial Sequence
  chemically synthesized
cttattcccttcccaggcccca

SEQ ID NO: 9026 - DNA, 22 bp, Artificial Sequence
  chemically synthesized
attcccttcccaggccccacct

SEQ ID NO: 9027 - DNA, 22 bp, Artificial Sequence
  chemically synthesized
ttcccttcccaggccccacctc

SEQ ID NO: 9028 - DNA, 22 bp, Artificial Sequence
  chemically synthesized
ccttcccaggccccacctccct

SEQ ID NO: 9029 - DNA, 22 bp, Artificial Sequence
  chemically synthesized
cccaggccccacctccctttca

SEQ ID NO: 9030 - DNA, 22 bp, Artificial Sequence
  chemically synthesized
ccaggccccacctccctttcat

SEQ ID NO: 9031 - DNA, 22 bp, Artificial Sequence
  chemically synthesized
cctttcatctttttctcttcca

SEQ ID NO: 9032 - DNA, 22 bp, Artificial Sequence
  chemically synthesized
tcatctttttctcttccatttt

SEQ ID NO: 9033 - DNA, 22 bp, Artificial Sequence
  chemically synthesized
catctttttctcttccattttc

SEQ ID NO: 9034 - DNA, 22 bp, Artificial Sequence
  chemically synthesized
atctttttctcttccattttcc

SEQ ID NO: 9035 - DNA, 22 bp, Artificial Sequence
  chemically synthesized
tttctcttccattttccctagg

SEQ ID NO: 9036 - DNA, 22 bp, Artificial Sequence
  chemically synthesized
ttctcttccattttccctaggt

SEQ ID NO: 9037 - DNA, 22 bp, Artificial Sequence
  chemically synthesized
tctcttccattttccctaggtt

SEQ ID NO: 9038 - DNA, 22 bp, Artificial Sequence
  chemically synthesized
ctcttccattttccctaggttc

SEQ ID NO: 9039 - DNA, 22 bp, Artificial Sequence
  chemically synthesized
tcttccattttccctaggttct

SEQ ID NO: 9040 - DNA, 22 bp, Artificial Sequence
  chemically synthesized
ttccattttccctaggttctac

SEQ ID NO: 9041 - DNA, 22 bp, Artificial Sequence
  chemically synthesized
ccattttccctaggttctactc

SEQ ID NO: 9042 - DNA, 22 bp, Artificial Sequence
  chemically synthesized
cattttccctaggttctactca

SEQ ID NO: 9043 - DNA, 22 bp, Artificial Sequence
  chemically synthesized
tccctaggttctactcaggcca

SEQ ID NO: 9044 - DNA, 22 bp, Artificial Sequence
  chemically synthesized
ccctaggttctactcaggccag

SEQ ID NO: 9045 - DNA, 22 bp, Artificial Sequence
  chemically synthesized
cctaggttctactcaggccaga

SEQ ID NO: 9046 - DNA, 22 bp, Artificial Sequence
  chemically synthesized
ggttctactcaggccagagggt

SEQ ID NO: 9047 - DNA, 22 bp, Artificial Sequence
  chemically synthesized
tactcaggccagagggtaagag

SEQ ID NO: 9048 - DNA, 22 bp, Artificial Sequence
  chemically synthesized
ctcaggccagagggtaagagaa

SEQ ID NO: 9049 - DNA, 22 bp, Artificial Sequence
  chemically synthesized
aggccagagggtaagagaacat

SEQ ID NO: 9050 - DNA, 22 bp, Artificial Sequence
  chemically synthesized
agtaagaggaggagtttttaac

SEQ ID NO: 9051 - DNA, 22 bp, Artificial Sequence
  chemically synthesized
gtaagaggaggagtttttaact

SEQ ID NO: 9052 - DNA, 22 bp, Artificial Sequence
  chemically synthesized
ttaactgaaagtggtagggatc

SEQ ID NO: 9053 - DNA, 22 bp, Artificial Sequence
  chemically synthesized
taactgaaagtggtagggatca

SEQ ID NO: 9054 - DNA, 22 bp, Artificial Sequence
  chemically synthesized
aactgaaagtggtagggatcat

SEQ ID NO: 9055 - DNA, 22 bp, Artificial Sequence
  chemically synthesized
actgaaagtggtagggatcatc

SEQ ID NO: 9056 - DNA, 22 bp, Artificial Sequence
  chemically synthesized
aaagtggtagggatcatcctat

SEQ ID NO: 9057 - DNA, 22 bp, Artificial Sequence
  chemically synthesized
tacctgaccagagtggcaaaaa

SEQ ID NO: 9058 - DNA, 22 bp, Artificial Sequence
  chemically synthesized
accagagtggcaaaaaaagaga

SEQ ID NO: 9059 - DNA, 22 bp, Artificial Sequence
  chemically synthesized
aagtttccttatcttaagaaac

SEQ ID NO: 9060 - DNA, 22 bp, Artificial Sequence
  chemically synthesized
ccttatcttaagaaacgagtgt

SEQ ID NO: 9061 - DNA, 22 bp, Artificial Sequence
  chemically synthesized
cttatcttaagaaacgagtgta

SEQ ID NO: 9062 - DNA, 22 bp, Artificial Sequence
  chemically synthesized
atcttaagaaacgagtgtacca

SEQ ID NO: 9063 - DNA, 22 bp, Artificial Sequence
  chemically synthesized
tcttaagaaacgagtgtaccac

SEQ ID NO: 9064 - DNA, 22 bp, Artificial Sequence
  chemically synthesized
aagaaacgagtgtaccacacta

SEQ ID NO: 9065 - DNA, 22 bp, Artificial Sequence
  chemically synthesized
agaaacgagtgtaccacactac

SEQ ID NO: 9066 - DNA, 22 bp, Artificial Sequence
  chemically synthesized
cagaagaaagaaaccgtaaagg

SEQ ID NO: 9067 - DNA, 22 bp, Artificial Sequence
  chemically synthesized
gcatttcgtcattattgactgg

SEQ ID NO: 9068 - DNA, 22 bp, Artificial Sequence
  chemically synthesized
cgtcattattgactgggcactg

SEQ ID NO: 9069 - DNA, 22 bp, Artificial Sequence
  chemically synthesized
gtcattattgactgggcactga

SEQ ID NO: 9070 - DNA, 22 bp, Artificial Sequence
  chemically synthesized
ttgactgggcactgatagtgcc

SEQ ID NO: 9071 - DNA, 22 bp, Artificial Sequence
  chemically synthesized
actgggcactgatagtgcccct

SEQ ID NO: 9072 - DNA, 22 bp, Artificial Sequence
  chemically synthesized
ggcactgatagtgccccttctt

SEQ ID NO: 9073 - DNA, 22 bp, Artificial Sequence
  chemically synthesized
atagtgccccttcttgggctct

SEQ ID NO: 9074 - DNA, 22 bp, Artificial Sequence
  chemically synthesized
cttgggctctggaaagagaata

SEQ ID NO: 9075 - DNA, 22 bp, Artificial Sequence
  chemically synthesized
ttgggctctggaaagagaataa

SEQ ID NO: 9076 - DNA, 22 bp, Artificial Sequence
  chemically synthesized
gggctctggaaagagaataagg

SEQ ID NO: 9077 - DNA, 22 bp, Artificial Sequence
  chemically synthesized
ggctctggaaagagaataaggc

SEQ ID NO: 9078 - DNA, 22 bp, Artificial Sequence
  chemically synthesized
tggaaagagaataaggcttata

SEQ ID NO: 9079 - DNA, 22 bp, Artificial Sequence
  chemically synthesized
gaaagagaataaggcttatatt

SEQ ID NO: 9080 - DNA, 22 bp, Artificial Sequence
  chemically synthesized
atatttaatcgagtggacttat

SEQ ID NO: 9081 - DNA, 22 bp, Artificial Sequence
  chemically synthesized
tatttaatcgagtggacttatt

SEQ ID NO: 9082 - DNA, 22 bp, Artificial Sequence
  chemically synthesized
aatcgagtggacttattatacc

SEQ ID NO: 9083 - DNA, 22 bp, Artificial Sequence
  chemically synthesized
atcgagtggacttattatacct

SEQ ID NO: 9084 - DNA, 22 bp, Artificial Sequence
  chemically synthesized
attatacctgttccactgaatg

SEQ ID NO: 9085 - DNA, 22 bp, Artificial Sequence
  chemically synthesized
ttatacctgttccactgaatga

SEQ ID NO: 9086 - DNA, 22 bp, Artificial Sequence
  chemically synthesized
tacctgttccactgaatgagta

SEQ ID NO: 9087 - DNA, 22 bp, Artificial Sequence
  chemically synthesized
ttccactgaatgagtatcttca

SEQ ID NO: 9088 - DNA, 22 bp, Artificial Sequence
  chemically synthesized
cactgaatgagtatcttcatca

SEQ ID NO: 9089 - DNA, 22 bp, Artificial Sequence
  chemically synthesized
aatgagtatcttcatcataagt

SEQ ID NO: 9090 - DNA, 22 bp, Artificial Sequence
  chemically synthesized
catcataagtgaattagataaa

SEQ ID NO: 9091 - DNA, 22 bp, Artificial Sequence
  chemically synthesized
atcataagtgaattagataaag

SEQ ID NO: 9092 - DNA, 22 bp, Artificial Sequence
  chemically synthesized
gataaagcaaggtgttaaaaaa

SEQ ID NO: 9093 - DNA, 22 bp, Artificial Sequence
  chemically synthesized
aaaaagaacatttccatttgtt

SEQ ID NO: 9094 - DNA, 22 bp, Artificial Sequence
  chemically synthesized
ccatttgtttgtgtcatctctg

SEQ ID NO: 9095 - DNA, 22 bp, Artificial Sequence
  chemically synthesized
catttgtttgtgtcatctctga

SEQ ID NO: 9096 - DNA, 22 bp, Artificial Sequence
  chemically synthesized
gtttgtgtcatctctgatttct

SEQ ID NO: 9097 - DNA, 22 bp, Artificial Sequence
  chemically synthesized
tttgtgtcatctctgatttctt

SEQ ID NO: 9098 - DNA, 22 bp, Artificial Sequence
  chemically synthesized
gtgtcatctctgatttctttca

SEQ ID NO: 9099 - DNA, 22 bp, Artificial Sequence
  chemically synthesized
tgtcatctctgatttctttcag

SEQ ID NO: 9100 - DNA, 22 bp, Artificial Sequence
  chemically synthesized
tgatttctttcagcagtgtttt

SEQ ID NO: 9101 - DNA, 22 bp, Artificial Sequence
  chemically synthesized
atttctttcagcagtgttttgt

SEQ ID NO: 9102 - DNA, 22 bp, Artificial Sequence
  chemically synthesized
ctttcagcagtgttttgtaatt

SEQ ID NO: 9103 - DNA, 22 bp, Artificial Sequence
  chemically synthesized
tttcagcagtgttttgtaattc

SEQ ID NO: 9104 - DNA, 22 bp, Artificial Sequence
  chemically synthesized
tcagcagtgttttgtaattctc

SEQ ID NO: 9105 - DNA, 22 bp, Artificial Sequence
  chemically synthesized
cagcagtgttttgtaattctca

SEQ ID NO: 9106 - DNA, 22 bp, Artificial Sequence
  chemically synthesized
agcagtgttttgtaattctcat

SEQ ID NO: 9107 - DNA, 22 bp, Artificial Sequence
  chemically synthesized
tgtaattctcatagagatcttt

SEQ ID NO: 9108 - DNA, 22 bp, Artificial Sequence
  chemically synthesized
gtaattctcatagagatctttc

SEQ ID NO: 9109 - DNA, 22 bp, Artificial Sequence
  chemically synthesized
taattctcatagagatctttca

SEQ ID NO: 9110 - DNA, 22 bp, Artificial Sequence
  chemically synthesized
tcatagagatctttcacctccc

SEQ ID NO: 9111 - DNA, 22 bp, Artificial Sequence
  chemically synthesized
atagagatctttcacctccctg

SEQ ID NO: 9112 - DNA, 22 bp, Artificial Sequence
  chemically synthesized
tcacctccctggttagctggat

SEQ ID NO: 9113 - DNA, 22 bp, Artificial Sequence
  chemically synthesized
cacctccctggttagctggatt

SEQ ID NO: 9114 - DNA, 22 bp, Artificial Sequence
  chemically synthesized
acctccctggttagctggattc

SEQ ID NO: 9115 - DNA, 22 bp, Artificial Sequence
  chemically synthesized
cctggttagctggattcctagg

SEQ ID NO: 9116 - DNA, 22 bp, Artificial Sequence
  chemically synthesized
gttagctggattcctaggtatt

SEQ ID NO: 9117 - DNA, 22 bp, Artificial Sequence
  chemically synthesized
gctggattcctaggtattttat

SEQ ID NO: 9118 - DNA, 22 bp, Artificial Sequence
  chemically synthesized
gattcctaggtattttattcgt

SEQ ID NO: 9119 - DNA, 22 bp, Artificial Sequence
  chemically synthesized
ctaggtattttattcgttttgc

SEQ ID NO: 9120 - DNA, 22 bp, Artificial Sequence
  chemically synthesized
ggtattttattcgttttgcggc

SEQ ID NO: 9121 - DNA, 22 bp, Artificial Sequence
  chemically synthesized
tattcgttttgcggctattgtg

SEQ ID NO: 9122 - DNA, 22 bp, Artificial Sequence
  chemically synthesized
attcgttttgcggctattgtga

SEQ ID NO: 9123 - DNA, 22 bp, Artificial Sequence
  chemically synthesized
ttcgttttgcggctattgtgaa

SEQ ID NO: 9124 - DNA, 22 bp, Artificial Sequence
  chemically synthesized
gttttgcggctattgtgaatgg

SEQ ID NO: 9125 - DNA, 22 bp, Artificial Sequence
  chemically synthesized
tgcggctattgtgaatgggact

SEQ ID NO: 9126 - DNA, 22 bp, Artificial Sequence
  chemically synthesized
gcggctattgtgaatgggactg

SEQ ID NO: 9127 - DNA, 22 bp, Artificial Sequence
  chemically synthesized
cggctattgtgaatgggactgt

SEQ ID NO: 9128 - DNA, 22 bp, Artificial Sequence
  chemically synthesized
ttgtgaatgggactgtgttctt

SEQ ID NO: 9129 - DNA, 22 bp, Artificial Sequence
  chemically synthesized
tgaatgggactgtgttcttgat

SEQ ID NO: 9130 - DNA, 22 bp, Artificial Sequence
  chemically synthesized
tgttcttgattttgctctcact

SEQ ID NO: 9131 - DNA, 22 bp, Artificial Sequence
  chemically synthesized
ttgattttgctctcactttgga

SEQ ID NO: 9132 - DNA, 22 bp, Artificial Sequence
  chemically synthesized
gattttgctctcactttggaag

SEQ ID NO: 9133 - DNA, 22 bp, Artificial Sequence
  chemically synthesized
attttgctctcactttggaagg

SEQ ID NO: 9134 - DNA, 22 bp, Artificial Sequence
  chemically synthesized
tgctctcactttggaaggtgtt

SEQ ID NO: 9135 - DNA, 22 bp, Artificial Sequence
  chemically synthesized
gctctcactttggaaggtgttg

SEQ ID NO: 9136 - DNA, 22 bp, Artificial Sequence
  chemically synthesized
ctctcactttggaaggtgttgg

SEQ ID NO: 9137 - DNA, 22 bp, Artificial Sequence
  chemically synthesized
tcactttggaaggtgttggagt

SEQ ID NO: 9138 - DNA, 22 bp, Artificial Sequence
  chemically synthesized
actttggaaggtgttggagtat

SEQ ID NO: 9139 - DNA, 22 bp, Artificial Sequence
  chemically synthesized
tggaaggtgttggagtatagag

SEQ ID NO: 9140 - DNA, 22 bp, Artificial Sequence
  chemically synthesized
ggaaggtgttggagtatagaga

SEQ ID NO: 9141 - DNA, 22 bp, Artificial Sequence
  chemically synthesized
gaaggtgttggagtatagagaa

SEQ ID NO: 9142 - DNA, 22 bp, Artificial Sequence
  chemically synthesized
gagtatagagaatgccaaaact

SEQ ID NO: 9143 - DNA, 22 bp, Artificial Sequence
  chemically synthesized
tgctgaaatttttaacagattt

SEQ ID NO: 9144 - DNA, 22 bp, Artificial Sequence
  chemically synthesized
gctgaaatttttaacagattta

SEQ ID NO: 9145 - DNA, 22 bp, Artificial Sequence
  chemically synthesized
ctgaaatttttaacagatttag

SEQ ID NO: 9146 - DNA, 22 bp, Artificial Sequence
  chemically synthesized
aaatttttaacagatttaggag

SEQ ID NO: 9147 - DNA, 22 bp, Artificial Sequence
  chemically synthesized
ttaacagatttaggagtttctg

SEQ ID NO: 9148 - DNA, 22 bp, Artificial Sequence
  chemically synthesized
taacagatttaggagtttctgg

SEQ ID NO: 9149 - DNA, 22 bp, Artificial Sequence
  chemically synthesized
aacagatttaggagtttctggg

SEQ ID NO: 9150 - DNA, 22 bp, Artificial Sequence
  chemically synthesized
acagatttaggagtttctgggc

SEQ ID NO: 9151 - DNA, 22 bp, Artificial Sequence
  chemically synthesized
aggagtttctgggcagagacta

SEQ ID NO: 9152 - DNA, 22 bp, Artificial Sequence
  chemically synthesized
ggagtttctgggcagagactat

SEQ ID NO: 9153 - DNA, 22 bp, Artificial Sequence
  chemically synthesized
ctgggcagagactatgagattt

SEQ ID NO: 9154 - DNA, 22 bp, Artificial Sequence
  chemically synthesized
tgggcagagactatgagatttt

SEQ ID NO: 9155 - DNA, 22 bp, Artificial Sequence
  chemically synthesized
ggcagagactatgagattttct

SEQ ID NO: 9156 - DNA, 22 bp, Artificial Sequence
  chemically synthesized
tgagattttctaggtacagaat

SEQ ID NO: 9157 - DNA, 22 bp, Artificial Sequence
  chemically synthesized
tctaggtacagaattatactgc

SEQ ID NO: 9158 - DNA, 22 bp, Artificial Sequence
  chemically synthesized
ctaggtacagaattatactgcc

SEQ ID NO: 9159 - DNA, 22 bp, Artificial Sequence
  chemically synthesized
taggtacagaattatactgcct

SEQ ID NO: 9160 - DNA, 22 bp, Artificial Sequence
  chemically synthesized
ggtacagaattatactgcctgc

SEQ ID NO: 9161 - DNA, 22 bp, Artificial Sequence
  chemically synthesized
tactgcctgcaaacagaaatag

SEQ ID NO: 9162 - DNA, 22 bp, Artificial Sequence
  chemically synthesized
cctgcaaacagaaatagtttga

SEQ ID NO: 9163 - DNA, 22 bp, Artificial Sequence
  chemically synthesized
caaacagaaatagtttgacttc

SEQ ID NO: 9164 - DNA, 22 bp, Artificial Sequence
  chemically synthesized
gacttcttctcttcctatctga

SEQ ID NO: 9165 - DNA, 22 bp, Artificial Sequence
  chemically synthesized
acttcttctcttcctatctgaa

SEQ ID NO: 9166 - DNA, 22 bp, Artificial Sequence
  chemically synthesized
cttctcttcctatctgaatgtc

SEQ ID NO: 9167 - DNA, 22 bp, Artificial Sequence
  chemically synthesized
ttctcttcctatctgaatgtct

SEQ ID NO: 9168 - DNA, 22 bp, Artificial Sequence
  chemically synthesized
ctcttcctatctgaatgtcttt

SEQ ID NO: 9169 - DNA, 22 bp, Artificial Sequence
  chemically synthesized
tcttcctatctgaatgtctttc

SEQ ID NO: 9170 - DNA, 22 bp, Artificial Sequence
  chemically synthesized
ttcctatctgaatgtctttctt

SEQ ID NO: 9171 - DNA, 22 bp, Artificial Sequence
  chemically synthesized
cctatctgaatgtctttctttc

SEQ ID NO: 9172 - DNA, 22 bp, Artificial Sequence
  chemically synthesized
ctatctgaatgtctttctttct

SEQ ID NO: 9173 - DNA, 22 bp, Artificial Sequence
  chemically synthesized
tctgaatgtctttctttctttc

SEQ ID NO: 9174 - DNA, 22 bp, Artificial Sequence
  chemically synthesized
aatgtctttctttctttctctt

SEQ ID NO: 9175 - DNA, 22 bp, Artificial Sequence
  chemically synthesized
tctttctttctctttcctgatt

SEQ ID NO: 9176 - DNA, 22 bp, Artificial Sequence
  chemically synthesized
ctttctttctctttcctgattg

SEQ ID NO: 9177 - DNA, 22 bp, Artificial Sequence
  chemically synthesized
tttctttctctttcctgattgc

SEQ ID NO: 9178 - DNA, 22 bp, Artificial Sequence
  chemically synthesized
tctttctctttcctgattgctc

SEQ ID NO: 9179 - DNA, 22 bp, Artificial Sequence
  chemically synthesized
ctttctctttcctgattgctct

SEQ ID NO: 9180 - DNA, 22 bp, Artificial Sequence
  chemically synthesized
tttctctttcctgattgctctg

SEQ ID NO: 9181 - DNA, 22 bp, Artificial Sequence
  chemically synthesized
tctctttcctgattgctctggc

SEQ ID NO: 9182 - DNA, 22 bp, Artificial Sequence
  chemically synthesized
ctctttcctgattgctctggct

SEQ ID NO: 9183 - DNA, 22 bp, Artificial Sequence
  chemically synthesized
tctttcctgattgctctggcta

SEQ ID NO: 9184 - DNA, 22 bp, Artificial Sequence
  chemically synthesized
tttcctgattgctctggctagg

SEQ ID NO: 9185 - DNA, 22 bp, Artificial Sequence
  chemically synthesized
tcctgattgctctggctaggac

SEQ ID NO: 9186 - DNA, 22 bp, Artificial Sequence
  chemically synthesized
cctgattgctctggctaggact

SEQ ID NO: 9187 - DNA, 22 bp, Artificial Sequence
  chemically synthesized
ctgattgctctggctaggactt

SEQ ID NO: 9188 - DNA, 22 bp, Artificial Sequence
  chemically synthesized
attgctctggctaggacttcca

SEQ ID NO: 9189 - DNA, 22 bp, Artificial Sequence
  chemically synthesized
ctctggctaggacttccagaac

SEQ ID NO: 9190 - DNA, 22 bp, Artificial Sequence
  chemically synthesized
tggctaggacttccagaactat

SEQ ID NO: 9191 - DNA, 22 bp, Artificial Sequence
  chemically synthesized
gctaggacttccagaactatgc

SEQ ID NO: 9192 - DNA, 22 bp, Artificial Sequence
  chemically synthesized
ggacttccagaactatgctgaa

SEQ ID NO: 9193 - DNA, 22 bp, Artificial Sequence
  chemically synthesized
ccagaactatgctgaaaaggag

SEQ ID NO: 9194 - DNA, 22 bp, Artificial Sequence
  chemically synthesized
cagaactatgctgaaaaggagt

SEQ ID NO: 9195 - DNA, 22 bp, Artificial Sequence
  chemically synthesized
tgctgaaaaggagtggtgagag

SEQ ID NO: 9196 - DNA, 22 bp, Artificial Sequence
  chemically synthesized
aaaaggagtggtgagagtggac

SEQ ID NO: 9197 - DNA, 22 bp, Artificial Sequence
  chemically synthesized
gtcttgttacggttctcaagga

SEQ ID NO: 9198 - DNA, 22 bp, Artificial Sequence
  chemically synthesized
tcttgttacggttctcaaggag

SEQ ID NO: 9199 - DNA, 22 bp, Artificial Sequence
  chemically synthesized
gttacggttctcaaggagaata

SEQ ID NO: 9200 - DNA, 22 bp, Artificial Sequence
  chemically synthesized
ttacggttctcaaggagaatac

SEQ ID NO: 9201 - DNA, 22 bp, Artificial Sequence
  chemically synthesized
cggttctcaaggagaatacttc

SEQ ID NO: 9202 - DNA, 22 bp, Artificial Sequence
  chemically synthesized
tcaaggagaatacttccagctt

SEQ ID NO: 9203 - DNA, 22 bp, Artificial Sequence
  chemically synthesized
aaggagaatacttccagctttt

SEQ ID NO: 9204 - DNA, 22 bp, Artificial Sequence
  chemically synthesized
ccagcttttgcccatttggtaa

SEQ ID NO: 9205 - DNA, 22 bp, Artificial Sequence
  chemically synthesized
cagcttttgcccatttggtaag

SEQ ID NO: 9206 - DNA, 22 bp, Artificial Sequence
  chemically synthesized
ttgcccatttggtaagatattg

SEQ ID NO: 9207 - DNA, 22 bp, Artificial Sequence
  chemically synthesized
tgcccatttggtaagatattgg

SEQ ID NO: 9208 - DNA, 22 bp, Artificial Sequence
  chemically synthesized
gcccatttggtaagatattggc

SEQ ID NO: 9209 - DNA, 22 bp, Artificial Sequence
  chemically synthesized
cccatttggtaagatattggct

SEQ ID NO: 9210 - DNA, 22 bp, Artificial Sequence
  chemically synthesized
ggtaagatattggctatgggtc

SEQ ID NO: 9211 - DNA, 22 bp, Artificial Sequence
  chemically synthesized
gtaagatattggctatgggtct

SEQ ID NO: 9212 - DNA, 22 bp, Artificial Sequence
  chemically synthesized
gctatgggtctgtcatagatgg

SEQ ID NO: 9213 - DNA, 22 bp, Artificial Sequence
  chemically synthesized
tgggtctgtcatagatggttct

SEQ ID NO: 9214 - DNA, 22 bp, Artificial Sequence
  chemically synthesized
tcatagatggttcttatttttt

SEQ ID NO: 9215 - DNA, 22 bp, Artificial Sequence
  chemically synthesized
ttatttttttgaggcatgttcc

SEQ ID NO: 9216 - DNA, 22 bp, Artificial Sequence
  chemically synthesized
atttttttgaggcatgttcctt

SEQ ID NO: 9217 - DNA, 22 bp, Artificial Sequence
  chemically synthesized
tttttttgaggcatgttccttc

SEQ ID NO: 9218 - DNA, 22 bp, Artificial Sequence
  chemically synthesized
ttttgaggcatgttccttcaat

SEQ ID NO: 9219 - DNA, 22 bp, Artificial Sequence
  chemically synthesized
tttgaggcatgttccttcaatg

SEQ ID NO: 9220 - DNA, 22 bp, Artificial Sequence
  chemically synthesized
ttgaggcatgttccttcaatgc

SEQ ID NO: 9221 - DNA, 22 bp, Artificial Sequence
  chemically synthesized
tgaggcatgttccttcaatgcc

SEQ ID NO: 9222 - DNA, 22 bp, Artificial Sequence
  chemically synthesized
gaggcatgttccttcaatgcct

SEQ ID NO: 9223 - DNA, 22 bp, Artificial Sequence
  chemically synthesized
aggcatgttccttcaatgccta

SEQ ID NO: 9224 - DNA, 22 bp, Artificial Sequence
  chemically synthesized
cttcaatgcctagtttgtttag

SEQ ID NO: 9225 - DNA, 22 bp, Artificial Sequence
  chemically synthesized
caatgcctagtttgtttaggat

SEQ ID NO: 9226 - DNA, 22 bp, Artificial Sequence
  chemically synthesized
aatgcctagtttgtttaggatt

SEQ ID NO: 9227 - DNA, 22 bp, Artificial Sequence
  chemically synthesized
gtttgtttaggattgtttgtga

SEQ ID NO: 9228 - DNA, 22 bp, Artificial Sequence
  chemically synthesized
gtttaggattgtttgtgatttt

SEQ ID NO: 9229 - DNA, 22 bp, Artificial Sequence
  chemically synthesized
tttaggattgtttgtgattttt

SEQ ID NO: 9230 - DNA, 22 bp, Artificial Sequence
  chemically synthesized
aggattgtttgtgatttttctt

SEQ ID NO: 9231 - DNA, 22 bp, Artificial Sequence
  chemically synthesized
ggattgtttgtgatttttcttt

SEQ ID NO: 9232 - DNA, 22 bp, Artificial Sequence
  chemically synthesized
tttgtgatttttcttttttgag

SEQ ID NO: 9233 - DNA, 22 bp, Artificial Sequence
  chemically synthesized
gtgatttttcttttttgagaca

SEQ ID NO: 9234 - DNA, 22 bp, Artificial Sequence
  chemically synthesized
tgatttttcttttttgagacag

SEQ ID NO: 9235 - DNA, 22 bp, Artificial Sequence
  chemically synthesized
ttcttttttgagacagggtctc

SEQ ID NO: 9236 - DNA, 22 bp, Artificial Sequence
  chemically synthesized
tcttttttgagacagggtctca

SEQ ID NO: 9237 - DNA, 22 bp, Artificial Sequence
  chemically synthesized
cttttttgagacagggtctcac

SEQ ID NO: 9238 - DNA, 22 bp, Artificial Sequence
  chemically synthesized
ttttttgagacagggtctcact

SEQ ID NO: 9239 - DNA, 22 bp, Artificial Sequence
  chemically synthesized
ttttgagacagggtctcactcc

SEQ ID NO: 9240 - DNA, 22 bp, Artificial Sequence
  chemically synthesized
tttgagacagggtctcactccg

SEQ ID NO: 9241 - DNA, 22 bp, Artificial Sequence
  chemically synthesized
ttgagacagggtctcactccgt

SEQ ID NO: 9242 - DNA, 22 bp, Artificial Sequence
  chemically synthesized
tgagacagggtctcactccgtt

SEQ ID NO: 9243 - DNA, 22 bp, Artificial Sequence
  chemically synthesized
gagacagggtctcactccgttg

SEQ ID NO: 9244 - DNA, 22 bp, Artificial Sequence
  chemically synthesized
agacagggtctcactccgttgc

SEQ ID NO: 9245 - DNA, 22 bp, Artificial Sequence
  chemically synthesized
actccgttgcccaggctggagt

SEQ ID NO: 9246 - DNA, 22 bp, Artificial Sequence
  chemically synthesized
cgttgcccaggctggagtgcgg

SEQ ID NO: 9247 - DNA, 22 bp, Artificial Sequence
  chemically synthesized
cccaggctggagtgcggtggca

SEQ ID NO: 9248 - DNA, 22 bp, Artificial Sequence
  chemically synthesized
gagtgcggtggcatgatctcag

SEQ ID NO: 9249 - DNA, 22 bp, Artificial Sequence
  chemically synthesized
agctcgctgccaacctctgcct

SEQ ID NO: 9250 - DNA, 22 bp, Artificial Sequence
  chemically synthesized
gctgccaacctctgcctcccgg

SEQ ID NO: 9251 - DNA, 22 bp, Artificial Sequence
  chemically synthesized
ccaacctctgcctcccgggctc

SEQ ID NO: 9252 - DNA, 22 bp, Artificial Sequence
  chemically synthesized
tgcctcccgggctcaaacaatc

SEQ ID NO: 9253 - DNA, 22 bp, Artificial Sequence
  chemically synthesized
cctcccgggctcaaacaatcct

SEQ ID NO: 9254 - DNA, 22 bp, Artificial Sequence
  chemically synthesized
ccgggctcaaacaatcctccca

SEQ ID NO: 9255 - DNA, 22 bp, Artificial Sequence
  chemically synthesized
aaacaatcctcccacctcaacc

SEQ ID NO: 9256 - DNA, 22 bp, Artificial Sequence
  chemically synthesized
ccacctcaacctcctgaatagc

SEQ ID NO: 9257 - DNA, 22 bp, Artificial Sequence
  chemically synthesized
aacctcctgaatagctgggact

SEQ ID NO: 9258 - DNA, 22 bp, Artificial Sequence
  chemically synthesized
ctgaatagctgggactataggt

SEQ ID NO: 9259 - DNA, 22 bp, Artificial Sequence
  chemically synthesized
aatagctgggactataggtgca

SEQ ID NO: 9260 - DNA, 22 bp, Artificial Sequence
  chemically synthesized
ggactataggtgcatgtcacca

SEQ ID NO: 9261 - DNA, 22 bp, Artificial Sequence
  chemically synthesized
taggtgcatgtcaccataccaa

SEQ ID NO: 9262 - DNA, 22 bp, Artificial Sequence
  chemically synthesized
attttttttttttttttttttt

SEQ ID NO: 9263 - DNA, 22 bp, Artificial Sequence
  chemically synthesized
ttttttttttttttttttgtag

SEQ ID NO: 9264 - DNA, 22 bp, Artificial Sequence
  chemically synthesized
tttttttttttttttttgtaga

SEQ ID NO: 9265 - DNA, 22 bp, Artificial Sequence
  chemically synthesized
ttttttttttttttttgtagag

SEQ ID NO: 9266 - DNA, 22 bp, Artificial Sequence
  chemically synthesized
tttttttttttttttgtagaga

SEQ ID NO: 9267 - DNA, 22 bp, Artificial Sequence
  chemically synthesized
ttttttttttttttgtagagat

SEQ ID NO: 9268 - DNA, 22 bp, Artificial Sequence
  chemically synthesized
tttttttttttttgtagagatg

SEQ ID NO: 9269 - DNA, 22 bp, Artificial Sequence
  chemically synthesized
ttttttttttttgtagagatgg

SEQ ID NO: 9270 - DNA, 22 bp, Artificial Sequence
  chemically synthesized
tttttttttttgtagagatggg

SEQ ID NO: 9271 - DNA, 22 bp, Artificial Sequence
  chemically synthesized
ttttttttttgtagagatgggg

SEQ ID NO: 9272 - DNA, 22 bp, Artificial Sequence
  chemically synthesized
tttttttttgtagagatggggt

SEQ ID NO: 9273 - DNA, 22 bp, Artificial Sequence
  chemically synthesized
ttttttttgtagagatggggtt

SEQ ID NO: 9274 - DNA, 22 bp, Artificial Sequence
  chemically synthesized
tttttttgtagagatggggttt

SEQ ID NO: 9275 - DNA, 22 bp, Artificial Sequence
  chemically synthesized
ttttttgtagagatggggtttc

SEQ ID NO: 9276 - DNA, 22 bp, Artificial Sequence
  chemically synthesized
tttttgtagagatggggtttca

SEQ ID NO: 9277 - DNA, 22 bp, Artificial Sequence
  chemically synthesized
ttttgtagagatggggtttcac

SEQ ID NO: 9278 - DNA, 22 bp, Artificial Sequence
  chemically synthesized
tttgtagagatggggtttcacc

SEQ ID NO: 9279 - DNA, 22 bp, Artificial Sequence
  chemically synthesized
ttgtagagatggggtttcacca

SEQ ID NO: 9280 - DNA, 22 bp, Artificial Sequence
  chemically synthesized
tgtagagatggggtttcaccat

SEQ ID NO: 9281 - DNA, 22 bp, Artificial Sequence
  chemically synthesized
gtagagatggggtttcaccatg

SEQ ID NO: 9282 - DNA, 22 bp, Artificial Sequence
  chemically synthesized
tagagatggggtttcaccatgc

SEQ ID NO: 9283 - DNA, 22 bp, Artificial Sequence
  chemically synthesized
caccatgctgcctaggctcgtc

SEQ ID NO: 9284 - DNA, 22 bp, Artificial Sequence
  chemically synthesized
accatgctgcctaggctcgtct

SEQ ID NO: 9285 - DNA, 22 bp, Artificial Sequence
  chemically synthesized
cctaggctcgtcttgaactcct

SEQ ID NO: 9286 - DNA, 22 bp, Artificial Sequence
  chemically synthesized
ggctcgtcttgaactcctgggc

SEQ ID NO: 9287 - DNA, 22 bp, Artificial Sequence
  chemically synthesized
gtcttgaactcctgggcttaag

SEQ ID NO: 9288 - DNA, 22 bp, Artificial Sequence
  chemically synthesized
gaactcctgggcttaagagata

SEQ ID NO: 9289 - DNA, 22 bp, Artificial Sequence
  chemically synthesized
aactcctgggcttaagagatat

SEQ ID NO: 9290 - DNA, 22 bp, Artificial Sequence
  chemically synthesized
ctgggcttaagagatatgcccg

SEQ ID NO: 9291 - DNA, 22 bp, Artificial Sequence
  chemically synthesized
ggcttaagagatatgcccgcct

SEQ ID NO: 9292 - DNA, 22 bp, Artificial Sequence
  chemically synthesized
aagagatatgcccgccttggcc

SEQ ID NO: 9293 - DNA, 22 bp, Artificial Sequence
  chemically synthesized
agagatatgcccgccttggcct

SEQ ID NO: 9294 - DNA, 22 bp, Artificial Sequence
  chemically synthesized
ggcctcccaaagtgctgggatt

SEQ ID NO: 9295 - DNA, 22 bp, Artificial Sequence
  chemically synthesized
gcctcccaaagtgctgggatta

SEQ ID NO: 9296 - DNA, 22 bp, Artificial Sequence
  chemically synthesized
ccaaagtgctgggattacaggt

SEQ ID NO: 9297 - DNA, 22 bp, Artificial Sequence
  chemically synthesized
ggattacaggtgtgagtcacta

SEQ ID NO: 9298 - DNA, 22 bp, Artificial Sequence
  chemically synthesized
caggtgtgagtcactacacctg

SEQ ID NO: 9299 - DNA, 22 bp, Artificial Sequence
  chemically synthesized
cacctgacctactgaaggtttt

SEQ ID NO: 9300 - DNA, 22 bp, Artificial Sequence
  chemically synthesized
acctactgaaggtttttaacat

SEQ ID NO: 9301 - DNA, 22 bp, Artificial Sequence
  chemically synthesized
ctgaaggtttttaacatggagg

SEQ ID NO: 9302 - DNA, 22 bp, Artificial Sequence
  chemically synthesized
aaggtttttaacatggaggatg

SEQ ID NO: 9303 - DNA, 22 bp, Artificial Sequence
  chemically synthesized
ttaacatggaggatgttaaatt

SEQ ID NO: 9304 - DNA, 22 bp, Artificial Sequence
  chemically synthesized
taacatggaggatgttaaattt

SEQ ID NO: 9305 - DNA, 22 bp, Artificial Sequence
  chemically synthesized
aacatggaggatgttaaatttt

SEQ ID NO: 9306 - DNA, 22 bp, Artificial Sequence
  chemically synthesized
acatggaggatgttaaatttta

SEQ ID NO: 9307 - DNA, 22 bp, Artificial Sequence
  chemically synthesized
aattttattgacaaccttttct

SEQ ID NO: 9308 - DNA, 22 bp, Artificial Sequence
  chemically synthesized
tattgacaaccttttctctacc

SEQ ID NO: 9309 - DNA, 22 bp, Artificial Sequence
  chemically synthesized
attgacaaccttttctctacct

SEQ ID NO: 9310 - DNA, 22 bp, Artificial Sequence
  chemically synthesized
ttgacaaccttttctctaccta

SEQ ID NO: 9311 - DNA, 22 bp, Artificial Sequence
  chemically synthesized
acaaccttttctctacctattg

SEQ ID NO: 9312 - DNA, 22 bp, Artificial Sequence
  chemically synthesized
ttctctacctattgagataatc

SEQ ID NO: 9313 - DNA, 22 bp, Artificial Sequence
  chemically synthesized
tctctacctattgagataatct

SEQ ID NO: 9314 - DNA, 22 bp, Artificial Sequence
  chemically synthesized
ctctacctattgagataatctt

SEQ ID NO: 9315 - DNA, 22 bp, Artificial Sequence
  chemically synthesized
tctacctattgagataatcttg

SEQ ID NO: 9316 - DNA, 22 bp, Artificial Sequence
  chemically synthesized
tacctattgagataatcttgtg

SEQ ID NO: 9317 - DNA, 22 bp, Artificial Sequence
  chemically synthesized
cctattgagataatcttgtggt

SEQ ID NO: 9318 - DNA, 22 bp, Artificial Sequence
  chemically synthesized
ttgagataatcttgtggttttt

SEQ ID NO: 9319 - DNA, 22 bp, Artificial Sequence
  chemically synthesized
agataatcttgtggtttttgtt

SEQ ID NO: 9320 - DNA, 22 bp, Artificial Sequence
  chemically synthesized
gtggtttttgtttttagctctg

SEQ ID NO: 9321 - DNA, 22 bp, Artificial Sequence
  chemically synthesized
tggtttttgtttttagctctgt

SEQ ID NO: 9322 - DNA, 22 bp, Artificial Sequence
  chemically synthesized
ttgtttttagctctgtttatgt

SEQ ID NO: 9323 - DNA, 22 bp, Artificial Sequence
  chemically synthesized
tgtttttagctctgtttatgtg

SEQ ID NO: 9324 - DNA, 22 bp, Artificial Sequence
  chemically synthesized
gtttttagctctgtttatgtga

SEQ ID NO: 9325 - DNA, 22 bp, Artificial Sequence
  chemically synthesized
tttttagctctgtttatgtgat

SEQ ID NO: 9326 - DNA, 22 bp, Artificial Sequence
  chemically synthesized
ttagctctgtttatgtgatgaa

SEQ ID NO: 9327 - DNA, 22 bp, Artificial Sequence
  chemically synthesized
tagctctgtttatgtgatgaat

SEQ ID NO: 9328 - DNA, 22 bp, Artificial Sequence
  chemically synthesized
agctctgtttatgtgatgaatc

SEQ ID NO: 9329 - DNA, 22 bp, Artificial Sequence
  chemically synthesized
gctctgtttatgtgatgaatca

SEQ ID NO: 9330 - DNA, 22 bp, Artificial Sequence
  chemically synthesized
tgtttatgtgatgaatcacact

SEQ ID NO: 9331 - DNA, 22 bp, Artificial Sequence
  chemically synthesized
tttatgtgatgaatcacactta

SEQ ID NO: 9332 - DNA, 22 bp, Artificial Sequence
  chemically synthesized
atgtgatgaatcacacttattg

SEQ ID NO: 9333 - DNA, 22 bp, Artificial Sequence
  chemically synthesized
tgtgatgaatcacacttattga

SEQ ID NO: 9334 - DNA, 22 bp, Artificial Sequence
  chemically synthesized
attgatttgtgtatgttgaacc

SEQ ID NO: 9335 - DNA, 22 bp, Artificial Sequence
  chemically synthesized
ttgatttgtgtatgttgaacca

SEQ ID NO: 9336 - DNA, 22 bp, Artificial Sequence
  chemically synthesized
atttgtgtatgttgaaccaacc

SEQ ID NO: 9337 - DNA, 22 bp, Artificial Sequence
  chemically synthesized
gtgtatgttgaaccaaccttgc

SEQ ID NO: 9338 - DNA, 22 bp, Artificial Sequence
  chemically synthesized
tgtatgttgaaccaaccttgca

SEQ ID NO: 9339 - DNA, 22 bp, Artificial Sequence
  chemically synthesized
aaccaaccttgcatcccaggga

SEQ ID NO: 9340 - DNA, 22 bp, Artificial Sequence
  chemically synthesized
gcatcccagggataaagcctac

SEQ ID NO: 9341 - DNA, 22 bp, Artificial Sequence
  chemically synthesized
catcccagggataaagcctact

SEQ ID NO: 9342 - DNA, 22 bp, Artificial Sequence
  chemically synthesized
cttgatcaaagtagatcagctt

SEQ ID NO: 9343 - DNA, 22 bp, Artificial Sequence
  chemically synthesized
gatcaaagtagatcagcttttt

SEQ ID NO: 9344 - DNA, 22 bp, Artificial Sequence
  chemically synthesized
atcaaagtagatcagctttttg

SEQ ID NO: 9345 - DNA, 22 bp, Artificial Sequence
  chemically synthesized
tttgatgtgctgctggatttgg

SEQ ID NO: 9346 - DNA, 22 bp, Artificial Sequence
  chemically synthesized
ttgatgtgctgctggatttggt

SEQ ID NO: 9347 - DNA, 22 bp, Artificial Sequence
  chemically synthesized
tgatgtgctgctggatttggtt

SEQ ID NO: 9348 - DNA, 22 bp, Artificial Sequence
  chemically synthesized
gatgtgctgctggatttggttt

SEQ ID NO: 9349 - DNA, 22 bp, Artificial Sequence
  chemically synthesized
atgtgctgctggatttggtttg

SEQ ID NO: 9350 - DNA, 22 bp, Artificial Sequence
  chemically synthesized
ctggatttggtttgctagtatt

SEQ ID NO: 9351 - DNA, 22 bp, Artificial Sequence
  chemically synthesized
gatttggtttgctagtattttg

SEQ ID NO: 9352 - DNA, 22 bp, Artificial Sequence
  chemically synthesized
ggtttgctagtattttgttgag

SEQ ID NO: 9353 - DNA, 22 bp, Artificial Sequence
  chemically synthesized
gtttgctagtattttgttgagg

SEQ ID NO: 9354 - DNA, 22 bp, Artificial Sequence
  chemically synthesized
gctagtattttgttgaggattt

SEQ ID NO: 9355 - DNA, 22 bp, Artificial Sequence
  chemically synthesized
ctagtattttgttgaggatttt

SEQ ID NO: 9356 - DNA, 22 bp, Artificial Sequence
  chemically synthesized
gtattttgttgaggatttttgc

SEQ ID NO: 9357 - DNA, 22 bp, Artificial Sequence
  chemically synthesized
tgttgaggatttttgcatctat

SEQ ID NO: 9358 - DNA, 22 bp, Artificial Sequence
  chemically synthesized
gttgaggatttttgcatctata

SEQ ID NO: 9359 - DNA, 22 bp, Artificial Sequence
  chemically synthesized
ttgaggatttttgcatctatat

SEQ ID NO: 9360 - DNA, 22 bp, Artificial Sequence
  chemically synthesized
aggatttttgcatctatattca

SEQ ID NO: 9361 - DNA, 22 bp, Artificial Sequence
  chemically synthesized
ttgcatctatattcatcaagga

SEQ ID NO: 9362 - DNA, 22 bp, Artificial Sequence
  chemically synthesized
tgcatctatattcatcaaggat

SEQ ID NO: 9363 - DNA, 22 bp, Artificial Sequence
  chemically synthesized
gcatctatattcatcaaggata

SEQ ID NO: 9364 - DNA, 22 bp, Artificial Sequence
  chemically synthesized
catctatattcatcaaggatat

SEQ ID NO: 9365 - DNA, 22 bp, Artificial Sequence
  chemically synthesized
tattcatcaaggatattggcct

SEQ ID NO: 9366 - DNA, 22 bp, Artificial Sequence
  chemically synthesized
atcaaggatattggcctgaagt

SEQ ID NO: 9367 - DNA, 22 bp, Artificial Sequence
  chemically synthesized
gcctgaagttttcttttttctg

SEQ ID NO: 9368 - DNA, 22 bp, Artificial Sequence
  chemically synthesized
aagttttcttttttctgttgtg

SEQ ID NO: 9369 - DNA, 22 bp, Artificial Sequence
  chemically synthesized
tcttttttctgttgtgtctctg

SEQ ID NO: 9370 - DNA, 22 bp, Artificial Sequence
  chemically synthesized
cttttttctgttgtgtctctgc

SEQ ID NO: 9371 - DNA, 22 bp, Artificial Sequence
  chemically synthesized
ttttttctgttgtgtctctgcc

SEQ ID NO: 9372 - DNA, 22 bp, Artificial Sequence
  chemically synthesized
ttttctgttgtgtctctgccag

SEQ ID NO: 9373 - DNA, 22 bp, Artificial Sequence
  chemically synthesized
tttctgttgtgtctctgccagg

SEQ ID NO: 9374 - DNA, 22 bp, Artificial Sequence
  chemically synthesized
ttctgttgtgtctctgccaggt

SEQ ID NO: 9375 - DNA, 22 bp, Artificial Sequence
  chemically synthesized
tctgttgtgtctctgccaggtt

SEQ ID NO: 9376 - DNA, 22 bp, Artificial Sequence
  chemically synthesized
ctgttgtgtctctgccaggttt

SEQ ID NO: 9377 - DNA, 22 bp, Artificial Sequence
  chemically synthesized
tgttgtgtctctgccaggtttt

SEQ ID NO: 9378 - DNA, 22 bp, Artificial Sequence
  chemically synthesized
ttgtgtctctgccaggttttgg

SEQ ID NO: 9379 - DNA, 22 bp, Artificial Sequence
  chemically synthesized
tgtctctgccaggttttggtat

SEQ ID NO: 9380 - DNA, 22 bp, Artificial Sequence
  chemically synthesized
tgccaggttttggtatcagaat

SEQ ID NO: 9381 - DNA, 22 bp, Artificial Sequence
  chemically synthesized
ccaggttttggtatcagaatga

SEQ ID NO: 9382 - DNA, 22 bp, Artificial Sequence
  chemically synthesized
tggtatcagaatgatgctggcc

SEQ ID NO: 9383 - DNA, 22 bp, Artificial Sequence
  chemically synthesized
ggtatcagaatgatgctggcct

SEQ ID NO: 9384 - DNA, 22 bp, Artificial Sequence
  chemically synthesized
gtatcagaatgatgctggcctc

SEQ ID NO: 9385 - DNA, 22 bp, Artificial Sequence
  chemically synthesized
gcctcattagggaagagttcct

SEQ ID NO: 9386 - DNA, 22 bp, Artificial Sequence
  chemically synthesized
attagggaagagttcctcctcc

SEQ ID NO: 9387 - DNA, 22 bp, Artificial Sequence
  chemically synthesized
gggaagagttcctcctcctcaa

SEQ ID NO: 9388 - DNA, 22 bp, Artificial Sequence
  chemically synthesized
ctcctcctcaattttttggaac

SEQ ID NO: 9389 - DNA, 22 bp, Artificial Sequence
  chemically synthesized
ctcctcaattttttggaacaga

SEQ ID NO: 9390 - DNA, 22 bp, Artificial Sequence
  chemically synthesized
ctcaattttttggaacagattg

SEQ ID NO: 9391 - DNA, 22 bp, Artificial Sequence
  chemically synthesized
aattttttggaacagattgagt

SEQ ID NO: 9392 - DNA, 22 bp, Artificial Sequence
  chemically synthesized
tttggaacagattgagtaggaa

SEQ ID NO: 9393 - DNA, 22 bp, Artificial Sequence
  chemically synthesized
ttggaacagattgagtaggaat

SEQ ID NO: 9394 - DNA, 22 bp, Artificial Sequence
  chemically synthesized
tggaacagattgagtaggaata

SEQ ID NO: 9395 - DNA, 22 bp, Artificial Sequence
  chemically synthesized
ggaacagattgagtaggaataa

SEQ ID NO: 9396 - DNA, 22 bp, Artificial Sequence
  chemically synthesized
gaacagattgagtaggaataat

SEQ ID NO: 9397 - DNA, 22 bp, Artificial Sequence
  chemically synthesized
agtaggaataataccagctttt

SEQ ID NO: 9398 - DNA, 22 bp, Artificial Sequence
  chemically synthesized
ttctttatacatcaggtataaa

SEQ ID NO: 9399 - DNA, 22 bp, Artificial Sequence
  chemically synthesized
tctttatacatcaggtataaag

SEQ ID NO: 9400 - DNA, 22 bp, Artificial Sequence
  chemically synthesized
ctttatacatcaggtataaaga

SEQ ID NO: 9401 - DNA, 22 bp, Artificial Sequence
  chemically synthesized
tttatacatcaggtataaagag

SEQ ID NO: 9402 - DNA, 22 bp, Artificial Sequence
  chemically synthesized
tatacatcaggtataaagagat

SEQ ID NO: 9403 - DNA, 22 bp, Artificial Sequence
  chemically synthesized
atacatcaggtataaagagatg

SEQ ID NO: 9404 - DNA, 22 bp, Artificial Sequence
  chemically synthesized
tacatcaggtataaagagatga

SEQ ID NO: 9405 - DNA, 22 bp, Artificial Sequence
  chemically synthesized
catattcatagataggaagaat

SEQ ID NO: 9406 - DNA, 22 bp, Artificial Sequence
  chemically synthesized
atagataggaagaattaatatt

SEQ ID NO: 9407 - DNA, 22 bp, Artificial Sequence
  chemically synthesized
atattgttaaaatggccatact

SEQ ID NO: 9408 - DNA, 22 bp, Artificial Sequence
  chemically synthesized
ttaaaatggccatactgcccaa

SEQ ID NO: 9409 - DNA, 22 bp, Artificial Sequence
  chemically synthesized
aaatggccatactgcccaaagc

SEQ ID NO: 9410 - DNA, 22 bp, Artificial Sequence
  chemically synthesized
cccaaagcaatctacagattca

SEQ ID NO: 9411 - DNA, 22 bp, Artificial Sequence
  chemically synthesized
cagattcaatgctattcctata

SEQ ID NO: 9412 - DNA, 22 bp, Artificial Sequence
  chemically synthesized
aatgctattcctataaactacc

SEQ ID NO: 9413 - DNA, 22 bp, Artificial Sequence
  chemically synthesized
ttcctataaactaccaatgata

SEQ ID NO: 9414 - DNA, 22 bp, Artificial Sequence
  chemically synthesized
ctataaactaccaatgatatcc

SEQ ID NO: 9415 - DNA, 22 bp, Artificial Sequence
  chemically synthesized
taaactaccaatgatatccttc

SEQ ID NO: 9416 - DNA, 22 bp, Artificial Sequence
  chemically synthesized
ccaatgatatccttcacaaaac

SEQ ID NO: 9417 - DNA, 22 bp, Artificial Sequence
  chemically synthesized
cacaaaaccagaaaaaactgtt

SEQ ID NO: 9418 - DNA, 22 bp, Artificial Sequence
  chemically synthesized
acaaaaccagaaaaaactgttt

SEQ ID NO: 9419 - DNA, 22 bp, Artificial Sequence
  chemically synthesized
ttttaaaattaatatggaccca

SEQ ID NO: 9420 - DNA, 22 bp, Artificial Sequence
  chemically synthesized
taaaattaatatggacccaaaa

SEQ ID NO: 9421 - DNA, 22 bp, Artificial Sequence
  chemically synthesized
aaaattaatatggacccaaaaa

SEQ ID NO: 9422 - DNA, 22 bp, Artificial Sequence
  chemically synthesized
aaattaatatggacccaaaaag

SEQ ID NO: 9423 - DNA, 22 bp, Artificial Sequence
  chemically synthesized
atatggacccaaaaaggagccc

SEQ ID NO: 9424 - DNA, 22 bp, Artificial Sequence
  chemically synthesized
agcaaaaagaacaaagctggag

SEQ ID NO: 9425 - DNA, 22 bp, Artificial Sequence
  chemically synthesized
gaggcatcacattagccgattt

SEQ ID NO: 9426 - DNA, 22 bp, Artificial Sequence
  chemically synthesized
gccgattttatactaaaaggct

SEQ ID NO: 9427 - DNA, 22 bp, Artificial Sequence
  chemically synthesized
tatactaaaaggctataggaac

SEQ ID NO: 9428 - DNA, 22 bp, Artificial Sequence
  chemically synthesized
atactaaaaggctataggaacc

SEQ ID NO: 9429 - DNA, 22 bp, Artificial Sequence
  chemically synthesized
tactaaaaggctataggaacct

SEQ ID NO: 9430 - DNA, 22 bp, Artificial Sequence
  chemically synthesized
aaaggctataggaacctgaaca

SEQ ID NO: 9431 - DNA, 22 bp, Artificial Sequence
  chemically synthesized
taggaacctgaacagcagggta

SEQ ID NO: 9432 - DNA, 22 bp, Artificial Sequence
  chemically synthesized
aacagcagggtactgttataaa

SEQ ID NO: 9433 - DNA, 22 bp, Artificial Sequence
  chemically synthesized
ttataaaaacagacacatagac

SEQ ID NO: 9434 - DNA, 22 bp, Artificial Sequence
  chemically synthesized
taaaaacagacacatagaccaa

SEQ ID NO: 9435 - DNA, 22 bp, Artificial Sequence
  chemically synthesized
acaaccatctgatcttcaacaa

SEQ ID NO: 9436 - DNA, 22 bp, Artificial Sequence
  chemically synthesized
caaccatctgatcttcaacaaa

SEQ ID NO: 9437 - DNA, 22 bp, Artificial Sequence
  chemically synthesized
atcttcaacaaagttgacaaaa

SEQ ID NO: 9438 - DNA, 22 bp, Artificial Sequence
  chemically synthesized
caacaaagttgacaaaaaacaa

SEQ ID NO: 9439 - DNA, 22 bp, Artificial Sequence
  chemically synthesized
aacaaagttgacaaaaaacaag

SEQ ID NO: 9440 - DNA, 22 bp, Artificial Sequence
  chemically synthesized
acaaaaaacaagcaatggggaa

SEQ ID NO: 9441 - DNA, 22 bp, Artificial Sequence
  chemically synthesized
cgtattcaataaatggtgctgg

SEQ ID NO: 9442 - DNA, 22 bp, Artificial Sequence
  chemically synthesized
aataaatggtgctgggataatt

SEQ ID NO: 9443 - DNA, 22 bp, Artificial Sequence
  chemically synthesized
ggataattgctagccataggaa

SEQ ID NO: 9444 - DNA, 22 bp, Artificial Sequence
  chemically synthesized
ctagccataggaattggagtga

SEQ ID NO: 9445 - DNA, 22 bp, Artificial Sequence
  chemically synthesized
gccataggaattggagtgaaac

SEQ ID NO: 9446 - DNA, 22 bp, Artificial Sequence
  chemically synthesized
gagtgaaactggaccccttcct

SEQ ID NO: 9447 - DNA, 22 bp, Artificial Sequence
  chemically synthesized
gaccccttccttgtgccatata

SEQ ID NO: 9448 - DNA, 22 bp, Artificial Sequence
  chemically synthesized
ccttgtgccatatacaaaaatc

SEQ ID NO: 9449 - DNA, 22 bp, Artificial Sequence
  chemically synthesized
cttgtgccatatacaaaaatca

SEQ ID NO: 9450 - DNA, 22 bp, Artificial Sequence
  chemically synthesized
gtgccatatacaaaaatcaact

SEQ ID NO: 9451 - DNA, 22 bp, Artificial Sequence
  chemically synthesized
tgccatatacaaaaatcaactc

SEQ ID NO: 9452 - DNA, 22 bp, Artificial Sequence
  chemically synthesized
aagatggattaaagacataaac

SEQ ID NO: 9453 - DNA, 22 bp, Artificial Sequence
  chemically synthesized
aagacataaacgtaaaatctaa

SEQ ID NO: 9454 - DNA, 22 bp, Artificial Sequence
  chemically synthesized
aaattgtaaaaaccctggaaga

SEQ ID NO: 9455 - DNA, 22 bp, Artificial Sequence
  chemically synthesized
taaaaaccctggaagacaacct

SEQ ID NO: 9456 - DNA, 22 bp, Artificial Sequence
  chemically synthesized
gaagacaacctaggaaatacca

SEQ ID NO: 9457 - DNA, 22 bp, Artificial Sequence
  chemically synthesized
ggaaataccattctggacatag

SEQ ID NO: 9458 - DNA, 22 bp, Artificial Sequence
  chemically synthesized
tggacataggccctggcacaga

SEQ ID NO: 9459 - DNA, 22 bp, Artificial Sequence
  chemically synthesized
gacataggccctggcacagatt

SEQ ID NO: 9460 - DNA, 22 bp, Artificial Sequence
  chemically synthesized
gcacagattttatgatgaagac

SEQ ID NO: 9461 - DNA, 22 bp, Artificial Sequence
  chemically synthesized
tatgatgaagacgccaaaagca

SEQ ID NO: 9462 - DNA, 22 bp, Artificial Sequence
  chemically synthesized
atgatgaagacgccaaaagcaa

SEQ ID NO: 9463 - DNA, 22 bp, Artificial Sequence
  chemically synthesized
tgatgaagacgccaaaagcaac

SEQ ID NO: 9464 - DNA, 22 bp, Artificial Sequence
  chemically synthesized
caacaaaaacaaacacaaatgg

SEQ ID NO: 9465 - DNA, 22 bp, Artificial Sequence
  chemically synthesized
acgagctcctgcatggcaaaag

SEQ ID NO: 9466 - DNA, 22 bp, Artificial Sequence
  chemically synthesized
ctgcatggcaaaagaaactatc

SEQ ID NO: 9467 - DNA, 22 bp, Artificial Sequence
  chemically synthesized
catggcaaaagaaactatcaac

SEQ ID NO: 9468 - DNA, 22 bp, Artificial Sequence
  chemically synthesized
tcaacagagtaaaagacaacct

SEQ ID NO: 9469 - DNA, 22 bp, Artificial Sequence
  chemically synthesized
cacaatgggagaaaaatatctg

SEQ ID NO: 9470 - DNA, 22 bp, Artificial Sequence
  chemically synthesized
caaaccatgtatccaacaaagg

SEQ ID NO: 9471 - DNA, 22 bp, Artificial Sequence
  chemically synthesized
gaaggaacttaaaactaattaa

SEQ ID NO: 9472 - DNA, 22 bp, Artificial Sequence
  chemically synthesized
aaaactaattaacaagcaaaaa

SEQ ID NO: 9473 - DNA, 22 bp, Artificial Sequence
  chemically synthesized
aaactaattaacaagcaaaaaa

SEQ ID NO: 9474 - DNA, 22 bp, Artificial Sequence
  chemically synthesized
attaacaagcaaaaaacaaccc

SEQ ID NO: 9475 - DNA, 22 bp, Artificial Sequence
  chemically synthesized
acaagcaaaaaacaacccaccc

SEQ ID NO: 9476 - DNA, 22 bp, Artificial Sequence
  chemically synthesized
caaactgggcaaaggacatgaa

SEQ ID NO: 9477 - DNA, 22 bp, Artificial Sequence
  chemically synthesized
ggcaaaggacatgaaaattttt

SEQ ID NO: 9478 - DNA, 22 bp, Artificial Sequence
  chemically synthesized
ttcagaagaatatatacagaca

SEQ ID NO: 9479 - DNA, 22 bp, Artificial Sequence
  chemically synthesized
tcagaagaatatatacagacag

SEQ ID NO: 9480 - DNA, 22 bp, Artificial Sequence
  chemically synthesized
cagaagaatatatacagacagc

SEQ ID NO: 9481 - DNA, 22 bp, Artificial Sequence
  chemically synthesized
agaagaatatatacagacagct

SEQ ID NO: 9482 - DNA, 22 bp, Artificial Sequence
  chemically synthesized
aaaagcatatgaaaaaatgctt

SEQ ID NO: 9483 - DNA, 22 bp, Artificial Sequence
  chemically synthesized
aatatcactaatagagaattgc

SEQ ID NO: 9484 - DNA, 22 bp, Artificial Sequence
  chemically synthesized
atatcactaatagagaattgca

SEQ ID NO: 9485 - DNA, 22 bp, Artificial Sequence
  chemically synthesized
atagagaattgcaaatcaattc

SEQ ID NO: 9486 - DNA, 22 bp, Artificial Sequence
  chemically synthesized
caaatcaattctctaggaatgg

SEQ ID NO: 9487 - DNA, 22 bp, Artificial Sequence
  chemically synthesized
tctaggaatggctattattaaa

SEQ ID NO: 9488 - DNA, 22 bp, Artificial Sequence
  chemically synthesized
taggaatggctattattaaaaa

SEQ ID NO: 9489 - DNA, 22 bp, Artificial Sequence
  chemically synthesized
ggaatggctattattaaaaagt

SEQ ID NO: 9490 - DNA, 22 bp, Artificial Sequence
  chemically synthesized
ttattaaaaagtcaaaaaatca

SEQ ID NO: 9491 - DNA, 22 bp, Artificial Sequence
  chemically synthesized
ttaaaaagtcaaaaaatcacag

SEQ ID NO: 9492 - DNA, 22 bp, Artificial Sequence
  chemically synthesized
aaaagtcaaaaaatcacagatg

SEQ ID NO: 9493 - DNA, 22 bp, Artificial Sequence
  chemically synthesized
gcaaggttgtggagaaaaggga

SEQ ID NO: 9494 - DNA, 22 bp, Artificial Sequence
  chemically synthesized
tggagaaaagggaacacttata

SEQ ID NO: 9495 - DNA, 22 bp, Artificial Sequence
  chemically synthesized
atacactgctggcgggactgta

SEQ ID NO: 9496 - DNA, 22 bp, Artificial Sequence
  chemically synthesized
tacactgctggcgggactgtaa

SEQ ID NO: 9497 - DNA, 22 bp, Artificial Sequence
  chemically synthesized
ctggcgggactgtaaattagtt

SEQ ID NO: 9498 - DNA, 22 bp, Artificial Sequence
  chemically synthesized
gcgggactgtaaattagtttag

SEQ ID NO: 9499 - DNA, 22 bp, Artificial Sequence
  chemically synthesized
taaattagtttagctattatga

SEQ ID NO: 9500 - DNA, 22 bp, Artificial Sequence
  chemically synthesized
gtttagctattatgaaaagcag

SEQ ID NO: 9501 - DNA, 22 bp, Artificial Sequence
  chemically synthesized
agctattatgaaaagcagtttg

SEQ ID NO: 9502 - DNA, 22 bp, Artificial Sequence
  chemically synthesized
gctattatgaaaagcagtttga

SEQ ID NO: 9503 - DNA, 22 bp, Artificial Sequence
  chemically synthesized
ttatgaaaagcagtttgaagat

SEQ ID NO: 9504 - DNA, 22 bp, Artificial Sequence
  chemically synthesized
tgaaaagcagtttgaagatttc

SEQ ID NO: 9505 - DNA, 22 bp, Artificial Sequence
  chemically synthesized
gaagatttctcaaataactgaa

SEQ ID NO: 9506 - DNA, 22 bp, Artificial Sequence
  chemically synthesized
aagatttctcaaataactgaaa

SEQ ID NO: 9507 - DNA, 22 bp, Artificial Sequence
  chemically synthesized
ctcaaataactgaaaatagaac

SEQ ID NO: 9508 - DNA, 22 bp, Artificial Sequence
  chemically synthesized
tcaaataactgaaaatagaact

SEQ ID NO: 9509 - DNA, 22 bp, Artificial Sequence
  chemically synthesized
aaataactgaaaatagaactac

SEQ ID NO: 9510 - DNA, 22 bp, Artificial Sequence
  chemically synthesized
aaaatagaactaccattcaccc

SEQ ID NO: 9511 - DNA, 22 bp, Artificial Sequence
  chemically synthesized
ccattcaccctagcaaccccat

SEQ ID NO: 9512 - DNA, 22 bp, Artificial Sequence
  chemically synthesized
accctagcaaccccattattct

SEQ ID NO: 9513 - DNA, 22 bp, Artificial Sequence
  chemically synthesized
gcaaccccattattctatatgt

SEQ ID NO: 9514 - DNA, 22 bp, Artificial Sequence
  chemically synthesized
ttctatatgtacctaaaggaat

SEQ ID NO: 9515 - DNA, 22 bp, Artificial Sequence
  chemically synthesized
tatatgtacctaaaggaataca

SEQ ID NO: 9516 - DNA, 22 bp, Artificial Sequence
  chemically synthesized
tatgtacctaaaggaatacaaa

SEQ ID NO: 9517 - DNA, 22 bp, Artificial Sequence
  chemically synthesized
aaggaatacaaatttttctacc

SEQ ID NO: 9518 - DNA, 22 bp, Artificial Sequence
  chemically synthesized
ttctaccataaagacacatgca

SEQ ID NO: 9519 - DNA, 22 bp, Artificial Sequence
  chemically synthesized
tctaccataaagacacatgcat

SEQ ID NO: 9520 - DNA, 22 bp, Artificial Sequence
  chemically synthesized
ctaccataaagacacatgcatg

SEQ ID NO: 9521 - DNA, 22 bp, Artificial Sequence
  chemically synthesized
taccataaagacacatgcatgt

SEQ ID NO: 9522 - DNA, 22 bp, Artificial Sequence
  chemically synthesized
ccataaagacacatgcatgtgt

SEQ ID NO: 9523 - DNA, 22 bp, Artificial Sequence
  chemically synthesized
atcacagcactattcatgataa

SEQ ID NO: 9524 - DNA, 22 bp, Artificial Sequence
  chemically synthesized
ttcatgataacaaagacaggga

SEQ ID NO: 9525 - DNA, 22 bp, Artificial Sequence
  chemically synthesized
atgataacaaagacagggaatc

SEQ ID NO: 9526 - DNA, 22 bp, Artificial Sequence
  chemically synthesized
aatgcctatcaatggtagactg

SEQ ID NO: 9527 - DNA, 22 bp, Artificial Sequence
  chemically synthesized
tcaatggtagactggataaaga

SEQ ID NO: 9528 - DNA, 22 bp, Artificial Sequence
  chemically synthesized
gataaagaaaatgtgatacata

SEQ ID NO: 9529 - DNA, 22 bp, Artificial Sequence
  chemically synthesized
tgcagccataaaaaccagatgg

SEQ ID NO: 9530 - DNA, 22 bp, Artificial Sequence
  chemically synthesized
gaggtcattatcctaagtgaac

SEQ ID NO: 9531 - DNA, 22 bp, Artificial Sequence
  chemically synthesized
tcctaagtgaactaatccagga

SEQ ID NO: 9532 - DNA, 22 bp, Artificial Sequence
  chemically synthesized
agtgaactaatccaggaacaga

SEQ ID NO: 9533 - DNA, 22 bp, Artificial Sequence
  chemically synthesized
atccaggaacagaaaaccaact

SEQ ID NO: 9534 - DNA, 22 bp, Artificial Sequence
  chemically synthesized
ccgcatgttctcacttctaagt

SEQ ID NO: 9535 - DNA, 22 bp, Artificial Sequence
  chemically synthesized
tcacttctaagtgggagctaaa

SEQ ID NO: 9536 - DNA, 22 bp, Artificial Sequence
  chemically synthesized
acttctaagtgggagctaaaca

SEQ ID NO: 9537 - DNA, 22 bp, Artificial Sequence
  chemically synthesized
ctaagtgggagctaaacactga

SEQ ID NO: 9538 - DNA, 22 bp, Artificial Sequence
  chemically synthesized
taagtgggagctaaacactgag

SEQ ID NO: 9539 - DNA, 22 bp, Artificial Sequence
  chemically synthesized
agtgggagctaaacactgagta

SEQ ID NO: 9540 - DNA, 22 bp, Artificial Sequence
  chemically synthesized
aacactgagtatacatggacac

SEQ ID NO: 9541 - DNA, 22 bp, Artificial Sequence
  chemically synthesized
agtatacatggacacaaagaag

SEQ ID NO: 9542 - DNA, 22 bp, Artificial Sequence
  chemically synthesized
cttgagggtgggagaagggtga

SEQ ID NO: 9543 - DNA, 22 bp, Artificial Sequence
  chemically synthesized
gagggtgggagaagggtgagga

SEQ ID NO: 9544 - DNA, 22 bp, Artificial Sequence
  chemically synthesized
agggtgggagaagggtgaggat

SEQ ID NO: 9545 - DNA, 22 bp, Artificial Sequence
  chemically synthesized
cctattgggtactatgcttatt

SEQ ID NO: 9546 - DNA, 22 bp, Artificial Sequence
  chemically synthesized
ttgggtactatgcttattacct

SEQ ID NO: 9547 - DNA, 22 bp, Artificial Sequence
  chemically synthesized
ggtactatgcttattacctggg

SEQ ID NO: 9548 - DNA, 22 bp, Artificial Sequence
  chemically synthesized
tgcttattacctgggtaatgaa

SEQ ID NO: 9549 - DNA, 22 bp, Artificial Sequence
  chemically synthesized
attacctgggtaatgaaatcac

SEQ ID NO: 9550 - DNA, 22 bp, Artificial Sequence
  chemically synthesized
ttacctgggtaatgaaatcacc

SEQ ID NO: 9551 - DNA, 22 bp, Artificial Sequence
  chemically synthesized
cctgggtaatgaaatcacctgt

SEQ ID NO: 9552 - DNA, 22 bp, Artificial Sequence
  chemically synthesized
ggtaatgaaatcacctgtacac

SEQ ID NO: 9553 - DNA, 22 bp, Artificial Sequence
  chemically synthesized
tacaccaaaccctcatgacacg

SEQ ID NO: 9554 - DNA, 22 bp, Artificial Sequence
  chemically synthesized
atgacacgcaatttacctgtat

SEQ ID NO: 9555 - DNA, 22 bp, Artificial Sequence
  chemically synthesized
acctgtataacacacctgcaca

SEQ ID NO: 9556 - DNA, 22 bp, Artificial Sequence
  chemically synthesized
cctgtataacacacctgcacat

SEQ ID NO: 9557 - DNA, 22 bp, Artificial Sequence
  chemically synthesized
tataacacacctgcacatgtac

SEQ ID NO: 9558 - DNA, 22 bp, Artificial Sequence
  chemically synthesized
cacatgtacacatgaacctaaa

SEQ ID NO: 9559 - DNA, 22 bp, Artificial Sequence
  chemically synthesized
aaataaaagtcaaaaaaaaaat

SEQ ID NO: 9560 - DNA, 22 bp, Artificial Sequence
  chemically synthesized
cagtgaccaatttttcatgtat

SEQ ID NO: 9561 - DNA, 22 bp, Artificial Sequence
  chemically synthesized
ttcatgtattggcagtgactgg

SEQ ID NO: 9562 - DNA, 22 bp, Artificial Sequence
  chemically synthesized
tcatgtattggcagtgactgga

SEQ ID NO: 9563 - DNA, 22 bp, Artificial Sequence
  chemically synthesized
catgtattggcagtgactggaa

SEQ ID NO: 9564 - DNA, 22 bp, Artificial Sequence
  chemically synthesized
atgtattggcagtgactggaat

SEQ ID NO: 9565 - DNA, 22 bp, Artificial Sequence
  chemically synthesized
gcagtgactggaattattttaa

SEQ ID NO: 9566 - DNA, 22 bp, Artificial Sequence
  chemically synthesized
gaattattttaaaaagttaaaa

SEQ ID NO: 9567 - DNA, 22 bp, Artificial Sequence
  chemically synthesized
ttttaaaaagttaaaattaaaa

SEQ ID NO: 9568 - DNA, 22 bp, Artificial Sequence
  chemically synthesized
taaaaagttaaaattaaaaata

SEQ ID NO: 9569 - DNA, 22 bp, Artificial Sequence
  chemically synthesized
aaaaagttaaaattaaaaataa

SEQ ID NO: 9570 - DNA, 22 bp, Artificial Sequence
  chemically synthesized
aaaagttaaaattaaaaataac

SEQ ID NO: 9571 - DNA, 22 bp, Artificial Sequence
  chemically synthesized
aaattaaaaataacaaacataa

SEQ ID NO: 9572 - DNA, 22 bp, Artificial Sequence
  chemically synthesized
aaaataacaaacataattaaca

SEQ ID NO: 9573 - DNA, 22 bp, Artificial Sequence
  chemically synthesized
acatgtaaaaacatatacttaa

SEQ ID NO: 9574 - DNA, 22 bp, Artificial Sequence
  chemically synthesized
aaaagtaaaatgactctgtgac

SEQ ID NO: 9575 - DNA, 22 bp, Artificial Sequence
  chemically synthesized
aaagtaaaatgactctgtgaca

SEQ ID NO: 9576 - DNA, 22 bp, Artificial Sequence
  chemically synthesized
tgtgacaatagacttaacacac

SEQ ID NO: 9577 - DNA, 22 bp, Artificial Sequence
  chemically synthesized
tgacaatagacttaacacacaa

SEQ ID NO: 9578 - DNA, 22 bp, Artificial Sequence
  chemically synthesized
aacacacaatctagtggctgaa

SEQ ID NO: 9579 - DNA, 22 bp, Artificial Sequence
  chemically synthesized
acacacaatctagtggctgaaa

SEQ ID NO: 9580 - DNA, 22 bp, Artificial Sequence
  chemically synthesized
gtggctgaaaatactatttttt

SEQ ID NO: 9581 - DNA, 22 bp, Artificial Sequence
  chemically synthesized
aaaatactattttttggacaat

SEQ ID NO: 9582 - DNA, 22 bp, Artificial Sequence
  chemically synthesized
ttttttggacaattttatgttt

SEQ ID NO: 9583 - DNA, 22 bp, Artificial Sequence
  chemically synthesized
tttggacaattttatgtttaga

SEQ ID NO: 9584 - DNA, 22 bp, Artificial Sequence
  chemically synthesized
ttggacaattttatgtttagaa

SEQ ID NO: 9585 - DNA, 22 bp, Artificial Sequence
  chemically synthesized
tggacaattttatgtttagaaa

SEQ ID NO: 9586 - DNA, 22 bp, Artificial Sequence
  chemically synthesized
ggacaattttatgtttagaaaa

SEQ ID NO: 9587 - DNA, 22 bp, Artificial Sequence
  chemically synthesized
gacaattttatgtttagaaaat

SEQ ID NO: 9588 - DNA, 22 bp, Artificial Sequence
  chemically synthesized
tatgtttagaaaatttagagct

SEQ ID NO: 9589 - DNA, 22 bp, Artificial Sequence
  chemically synthesized
atgtttagaaaatttagagctg

SEQ ID NO: 9590 - DNA, 22 bp, Artificial Sequence
  chemically synthesized
tgtttagaaaatttagagctgg

SEQ ID NO: 9591 - DNA, 22 bp, Artificial Sequence
  chemically synthesized
agaaaatttagagctggatgca

SEQ ID NO: 9592 - DNA, 22 bp, Artificial Sequence
  chemically synthesized
gaaaatttagagctggatgcaa

SEQ ID NO: 9593 - DNA, 22 bp, Artificial Sequence
  chemically synthesized
agagctggatgcaaaatttaaa

SEQ ID NO: 9594 - DNA, 22 bp, Artificial Sequence
  chemically synthesized
gagctggatgcaaaatttaaaa

SEQ ID NO: 9595 - DNA, 22 bp, Artificial Sequence
  chemically synthesized
gatgcaaaatttaaaaattcag

SEQ ID NO: 9596 - DNA, 22 bp, Artificial Sequence
  chemically synthesized
aaaaattcaggatattattttg

SEQ ID NO: 9597 - DNA, 22 bp, Artificial Sequence
  chemically synthesized
aaaattcaggatattattttgt

SEQ ID NO: 9598 - DNA, 22 bp, Artificial Sequence
  chemically synthesized
aggatattattttgtcatgatc

SEQ ID NO: 9599 - DNA, 22 bp, Artificial Sequence
  chemically synthesized
ttttgtcatgatcagcaaaatg

SEQ ID NO: 9600 - DNA, 22 bp, Artificial Sequence
  chemically synthesized
tgtcatgatcagcaaaatgaga

SEQ ID NO: 9601 - DNA, 22 bp, Artificial Sequence
  chemically synthesized
gtcatgatcagcaaaatgagaa

SEQ ID NO: 9602 - DNA, 22 bp, Artificial Sequence
  chemically synthesized
tcatgatcagcaaaatgagaat

SEQ ID NO: 9603 - DNA, 22 bp, Artificial Sequence
  chemically synthesized
tctaactgtagtttgtcaaatc

SEQ ID NO: 9604 - DNA, 22 bp, Artificial Sequence
  chemically synthesized
actgtagtttgtcaaatcagca

SEQ ID NO: 9605 - DNA, 22 bp, Artificial Sequence
  chemically synthesized
tagtttgtcaaatcagcaaaac

SEQ ID NO: 9606 - DNA, 22 bp, Artificial Sequence
  chemically synthesized
gtcaaatcagcaaaacaaacat

SEQ ID NO: 9607 - DNA, 22 bp, Artificial Sequence
  chemically synthesized
tcaaatcagcaaaacaaacata

SEQ ID NO: 9608 - DNA, 22 bp, Artificial Sequence
  chemically synthesized
gctaaaaatgattaagaaatgt

SEQ ID NO: 9609 - DNA, 22 bp, Artificial Sequence
  chemically synthesized
aaaatgattaagaaatgttaaa

SEQ ID NO: 9610 - DNA, 22 bp, Artificial Sequence
  chemically synthesized
agaaatgttaaaatacacatac

SEQ ID NO: 9611 - DNA, 22 bp, Artificial Sequence
  chemically synthesized
aaatacacatacatcctctaaa

SEQ ID NO: 9612 - DNA, 22 bp, Artificial Sequence
  chemically synthesized
taaaaaacaaaacaaaaatacc

SEQ ID NO: 9613 - DNA, 22 bp, Artificial Sequence
  chemically synthesized
aaaaacaaaacaaaaataccaa

SEQ ID NO: 9614 - DNA, 22 bp, Artificial Sequence
  chemically synthesized
caaacccattctgcagttcact

SEQ ID NO: 9615 - DNA, 22 bp, Artificial Sequence
  chemically synthesized
tgcagttcactaaatttcctca

SEQ ID NO: 9616 - DNA, 22 bp, Artificial Sequence
  chemically synthesized
cagttcactaaatttcctcaaa

SEQ ID NO: 9617 - DNA, 22 bp, Artificial Sequence
  chemically synthesized
actaaatttcctcaaaaaagct

SEQ ID NO: 9618 - DNA, 22 bp, Artificial Sequence
  chemically synthesized
aatttcctcaaaaaagctccca

SEQ ID NO: 9619 - DNA, 22 bp, Artificial Sequence
  chemically synthesized
cctcaaaaaagctcccaagtaa

SEQ ID NO: 9620 - DNA, 22 bp, Artificial Sequence
  chemically synthesized
ctcaaaaaagctcccaagtaac

SEQ ID NO: 9621 - DNA, 22 bp, Artificial Sequence
  chemically synthesized
aaaaaagctcccaagtaaccaa

SEQ ID NO: 9622 - DNA, 22 bp, Artificial Sequence
  chemically synthesized
ccaagtaaccaatcaaaaaacg

SEQ ID NO: 9623 - DNA, 22 bp, Artificial Sequence
  chemically synthesized
agcactttaggaaaaaagaaaa

SEQ ID NO: 9624 - DNA, 22 bp, Artificial Sequence
  chemically synthesized
taggaaaaaagaaaatgtttca

SEQ ID NO: 9625 - DNA, 22 bp, Artificial Sequence
  chemically synthesized
aggaaaaaagaaaatgtttcaa

SEQ ID NO: 9626 - DNA, 22 bp, Artificial Sequence
  chemically synthesized
ggaaaaaagaaaatgtttcaag

SEQ ID NO: 9627 - DNA, 22 bp, Artificial Sequence
  chemically synthesized
caaggcacagattaattagaaa

SEQ ID NO: 9628 - DNA, 22 bp, Artificial Sequence
  chemically synthesized
aaggcacagattaattagaaaa

SEQ ID NO: 9629 - DNA, 22 bp, Artificial Sequence
  chemically synthesized
attagaaaacttctacatgtct

SEQ ID NO: 9630 - DNA, 22 bp, Artificial Sequence
  chemically synthesized
gaaaacttctacatgtctacta

SEQ ID NO: 9631 - DNA, 22 bp, Artificial Sequence
  chemically synthesized
ctacatgtctactaaaatttac

SEQ ID NO: 9632 - DNA, 22 bp, Artificial Sequence
  chemically synthesized
tacatgtctactaaaatttacc

SEQ ID NO: 9633 - DNA, 22 bp, Artificial Sequence
  chemically synthesized
catgtctactaaaatttaccaa

SEQ ID NO: 9634 - DNA, 22 bp, Artificial Sequence
  chemically synthesized
ctaaaatttaccaatatataaa

SEQ ID NO: 9635 - DNA, 22 bp, Artificial Sequence
  chemically synthesized
aaatttaccaatatataaaaac

SEQ ID NO: 9636 - DNA, 22 bp, Artificial Sequence
  chemically synthesized
accaatatataaaaacttactg

SEQ ID NO: 9637 - DNA, 22 bp, Artificial Sequence
  chemically synthesized
ccaatatataaaaacttactga

SEQ ID NO: 9638 - DNA, 22 bp, Artificial Sequence
  chemically synthesized
actgacatgtaatttcagttgg

SEQ ID NO: 9639 - DNA, 22 bp, Artificial Sequence
  chemically synthesized
ctgacatgtaatttcagttgga

SEQ ID NO: 9640 - DNA, 22 bp, Artificial Sequence
  chemically synthesized
acatgtaatttcagttggacca

SEQ ID NO: 9641 - DNA, 22 bp, Artificial Sequence
  chemically synthesized
cagttggaccaattcattttct

SEQ ID NO: 9642 - DNA, 22 bp, Artificial Sequence
  chemically synthesized
agttggaccaattcattttcta

SEQ ID NO: 9643 - DNA, 22 bp, Artificial Sequence
  chemically synthesized
gaccaattcattttctaaaaca

SEQ ID NO: 9644 - DNA, 22 bp, Artificial Sequence
  chemically synthesized
attttctaaaacattcccctac

SEQ ID NO: 9645 - DNA, 22 bp, Artificial Sequence
  chemically synthesized
tctaaaacattcccctactact

SEQ ID NO: 9646 - DNA, 22 bp, Artificial Sequence
  chemically synthesized
ctaaaacattcccctactactt

SEQ ID NO: 9647 - DNA, 22 bp, Artificial Sequence
  chemically synthesized
taaaacattcccctactacttt

SEQ ID NO: 9648 - DNA, 22 bp, Artificial Sequence
  chemically synthesized
aaacattcccctactactttct

SEQ ID NO: 9649 - DNA, 22 bp, Artificial Sequence
  chemically synthesized
ccctactactttctcaagaacc

SEQ ID NO: 9650 - DNA, 22 bp, Artificial Sequence
  chemically synthesized
ctactttctcaagaaccaataa

SEQ ID NO: 9651 - DNA, 22 bp, Artificial Sequence
  chemically synthesized
ctttctcaagaaccaataaaaa

SEQ ID NO: 9652 - DNA, 22 bp, Artificial Sequence
  chemically synthesized
tctcaagaaccaataaaaactc

SEQ ID NO: 9653 - DNA, 22 bp, Artificial Sequence
  chemically synthesized
ctcaagaaccaataaaaactct

SEQ ID NO: 9654 - DNA, 22 bp, Artificial Sequence
  chemically synthesized
tcaagaaccaataaaaactctg

SEQ ID NO: 9655 - DNA, 22 bp, Artificial Sequence
  chemically synthesized
aagaaccaataaaaactctgga

SEQ ID NO: 9656 - DNA, 22 bp, Artificial Sequence
  chemically synthesized
tggagaactaggaaaaaatggg

SEQ ID NO: 9657 - DNA, 22 bp, Artificial Sequence
  chemically synthesized
gagaactaggaaaaaatgggtc

SEQ ID NO: 9658 - DNA, 22 bp, Artificial Sequence
  chemically synthesized
ggaaaaaatgggtcctatatta

SEQ ID NO: 9659 - DNA, 22 bp, Artificial Sequence
  chemically synthesized
tattaagtcatctttctgcacc

SEQ ID NO: 9660 - DNA, 22 bp, Artificial Sequence
  chemically synthesized
agtcatctttctgcaccttgag

SEQ ID NO: 9661 - DNA, 22 bp, Artificial Sequence
  chemically synthesized
tctgcaccttgagatgtataag

SEQ ID NO: 9662 - DNA, 22 bp, Artificial Sequence
  chemically synthesized
ctgcaccttgagatgtataagg

SEQ ID NO: 9663 - DNA, 22 bp, Artificial Sequence
  chemically synthesized
tgcaccttgagatgtataaggc

SEQ ID NO: 9664 - DNA, 22 bp, Artificial Sequence
  chemically synthesized
caccttgagatgtataaggctg

SEQ ID NO: 9665 - DNA, 22 bp, Artificial Sequence
  chemically synthesized
gagatgtataaggctgggggtc

SEQ ID NO: 9666 - DNA, 22 bp, Artificial Sequence
  chemically synthesized
agatgtataaggctgggggtcc

SEQ ID NO: 9667 - DNA, 22 bp, Artificial Sequence
  chemically synthesized
ggggtcccttgaacaagatatt

SEQ ID NO: 9668 - DNA, 22 bp, Artificial Sequence
  chemically synthesized
gaacaagatattcctattctat

SEQ ID NO: 9669 - DNA, 22 bp, Artificial Sequence
  chemically synthesized
aacaagatattcctattctatg

SEQ ID NO: 9670 - DNA, 22 bp, Artificial Sequence
  chemically synthesized
ctattctatgcttttggttaac

SEQ ID NO: 9671 - DNA, 22 bp, Artificial Sequence
  chemically synthesized
ttctatgcttttggttaacact

SEQ ID NO: 9672 - DNA, 22 bp, Artificial Sequence
  chemically synthesized
tatgcttttggttaacacttac

SEQ ID NO: 9673 - DNA, 22 bp, Artificial Sequence
  chemically synthesized
tgcttttggttaacacttactg

SEQ ID NO: 9674 - DNA, 22 bp, Artificial Sequence
  chemically synthesized
ttggttaacacttactgtgtaa

SEQ ID NO: 9675 - DNA, 22 bp, Artificial Sequence
  chemically synthesized
tggttaacacttactgtgtaat

SEQ ID NO: 9676 - DNA, 22 bp, Artificial Sequence
  chemically synthesized
ggttaacacttactgtgtaatt

SEQ ID NO: 9677 - DNA, 22 bp, Artificial Sequence
  chemically synthesized
gttaacacttactgtgtaatta

SEQ ID NO: 9678 - DNA, 22 bp, Artificial Sequence
  chemically synthesized
acacttactgtgtaattactgg

SEQ ID NO: 9679 - DNA, 22 bp, Artificial Sequence
  chemically synthesized
actgtgtaattactggtgctcc

SEQ ID NO: 9680 - DNA, 22 bp, Artificial Sequence
  chemically synthesized
ctgtgtaattactggtgctcca

SEQ ID NO: 9681 - DNA, 22 bp, Artificial Sequence
  chemically synthesized
tgtaattactggtgctccacag

SEQ ID NO: 9682 - DNA, 22 bp, Artificial Sequence
  chemically synthesized
ctggtgctccacaggtctgtta

SEQ ID NO: 9683 - DNA, 22 bp, Artificial Sequence
  chemically synthesized
gtgctccacaggtctgttacct

SEQ ID NO: 9684 - DNA, 22 bp, Artificial Sequence
  chemically synthesized
cacaggtctgttacctaagctc

SEQ ID NO: 9685 - DNA, 22 bp, Artificial Sequence
  chemically synthesized
ttacctaagctcaaactgattc

SEQ ID NO: 9686 - DNA, 22 bp, Artificial Sequence
  chemically synthesized
cctaagctcaaactgattctgt

SEQ ID NO: 9687 - DNA, 22 bp, Artificial Sequence
  chemically synthesized
agctcaaactgattctgtagat

SEQ ID NO: 9688 - DNA, 22 bp, Artificial Sequence
  chemically synthesized
aaactgattctgtagatacata

SEQ ID NO: 9689 - DNA, 22 bp, Artificial Sequence
  chemically synthesized
attctgtagatacataggtcag

SEQ ID NO: 9690 - DNA, 22 bp, Artificial Sequence
  chemically synthesized
tgtagatacataggtcaggctt

SEQ ID NO: 9691 - DNA, 22 bp, Artificial Sequence
  chemically synthesized
tagatacataggtcaggcttat

SEQ ID NO: 9692 - DNA, 22 bp, Artificial Sequence
  chemically synthesized
atttgccccaatttttctattg

SEQ ID NO: 9693 - DNA, 22 bp, Artificial Sequence
  chemically synthesized
tttgccccaatttttctattgc

SEQ ID NO: 9694 - DNA, 22 bp, Artificial Sequence
  chemically synthesized
gccccaatttttctattgcctt

SEQ ID NO: 9695 - DNA, 22 bp, Artificial Sequence
  chemically synthesized
ccccaatttttctattgcctta

SEQ ID NO: 9696 - DNA, 22 bp, Artificial Sequence
  chemically synthesized
ttctattgccttacacacttag

SEQ ID NO: 9697 - DNA, 22 bp, Artificial Sequence
  chemically synthesized
tctattgccttacacacttaga

SEQ ID NO: 9698 - DNA, 22 bp, Artificial Sequence
  chemically synthesized
ctattgccttacacacttagac

SEQ ID NO: 9699 - DNA, 22 bp, Artificial Sequence
  chemically synthesized
tattgccttacacacttagacc

SEQ ID NO: 9700 - DNA, 22 bp, Artificial Sequence
  chemically synthesized
ttgccttacacacttagacctg

SEQ ID NO: 9701 - DNA, 22 bp, Artificial Sequence
  chemically synthesized
ccttacacacttagacctgggt

SEQ ID NO: 9702 - DNA, 22 bp, Artificial Sequence
  chemically synthesized
acacacttagacctgggttatt

SEQ ID NO: 9703 - DNA, 22 bp, Artificial Sequence
  chemically synthesized
cacacttagacctgggttatta

SEQ ID NO: 9704 - DNA, 22 bp, Artificial Sequence
  chemically synthesized
agacctgggttattacagttaa

SEQ ID NO: 9705 - DNA, 22 bp, Artificial Sequence
  chemically synthesized
gacctgggttattacagttaac

SEQ ID NO: 9706 - DNA, 22 bp, Artificial Sequence
  chemically synthesized
ggttattacagttaacacttac

SEQ ID NO: 9707 - DNA, 22 bp, Artificial Sequence
  chemically synthesized
ttacagttaacacttactgtta

SEQ ID NO: 9708 - DNA, 22 bp, Artificial Sequence
  chemically synthesized
cagttaacacttactgttacct

SEQ ID NO: 9709 - DNA, 22 bp, Artificial Sequence
  chemically synthesized
acacttactgttaccttctatg

SEQ ID NO: 9710 - DNA, 22 bp, Artificial Sequence
  chemically synthesized
actgttaccttctatgtgccag

SEQ ID NO: 9711 - DNA, 22 bp, Artificial Sequence
  chemically synthesized
ctgttaccttctatgtgccagg

SEQ ID NO: 9712 - DNA, 22 bp, Artificial Sequence
  chemically synthesized
ttaccttctatgtgccaggcat

SEQ ID NO: 9713 - DNA, 22 bp, Artificial Sequence
  chemically synthesized
ccttctatgtgccaggcattat

SEQ ID NO: 9714 - DNA, 22 bp, Artificial Sequence
  chemically synthesized
ctatgtgccaggcattattgca

SEQ ID NO: 9715 - DNA, 22 bp, Artificial Sequence
  chemically synthesized
tatgtgccaggcattattgcaa

SEQ ID NO: 9716 - DNA, 22 bp, Artificial Sequence
  chemically synthesized
tgtgccaggcattattgcaagc

SEQ ID NO: 9717 - DNA, 22 bp, Artificial Sequence
  chemically synthesized
ttgcaagcattttttttttttt

SEQ ID NO: 9718 - DNA, 22 bp, Artificial Sequence
  chemically synthesized
caagcatttttttttttttttt

SEQ ID NO: 9719 - DNA, 22 bp, Artificial Sequence
  chemically synthesized
ttttttttttttttttaaataa

SEQ ID NO: 9720 - DNA, 22 bp, Artificial Sequence
  chemically synthesized
tttttttttttttttaaataag

SEQ ID NO: 9721 - DNA, 22 bp, Artificial Sequence
  chemically synthesized
ttttttttttttttaaataaga

SEQ ID NO: 9722 - DNA, 22 bp, Artificial Sequence
  chemically synthesized
tttttttttttttaaataagac

SEQ ID NO: 9723 - DNA, 22 bp, Artificial Sequence
  chemically synthesized
ttttttttttttaaataagaca

SEQ ID NO: 9724 - DNA, 22 bp, Artificial Sequence
  chemically synthesized
tttttttttttaaataagacag

SEQ ID NO: 9725 - DNA, 22 bp, Artificial Sequence
  chemically synthesized
ttttttttttaaataagacaga

SEQ ID NO: 9726 - DNA, 22 bp, Artificial Sequence
  chemically synthesized
tttttttttaaataagacagag

SEQ ID NO: 9727 - DNA, 22 bp, Artificial Sequence
  chemically synthesized
ttttttttaaataagacagagt

SEQ ID NO: 9728 - DNA, 22 bp, Artificial Sequence
  chemically synthesized
tttttttaaataagacagagtc

SEQ ID NO: 9729 - DNA, 22 bp, Artificial Sequence
  chemically synthesized
ttttttaaataagacagagtct

SEQ ID NO: 9730 - DNA, 22 bp, Artificial Sequence
  chemically synthesized
tttttaaataagacagagtctc

SEQ ID NO: 9731 - DNA, 22 bp, Artificial Sequence
  chemically synthesized
ttttaaataagacagagtctcg

SEQ ID NO: 9732 - DNA, 22 bp, Artificial Sequence
  chemically synthesized
tttaaataagacagagtctcgg

SEQ ID NO: 9733 - DNA, 22 bp, Artificial Sequence
  chemically synthesized
ttaaataagacagagtctcggt

SEQ ID NO: 9734 - DNA, 22 bp, Artificial Sequence
  chemically synthesized
taaataagacagagtctcggtg

SEQ ID NO: 9735 - DNA, 22 bp, Artificial Sequence
  chemically synthesized
aaataagacagagtctcggtgt

SEQ ID NO: 9736 - DNA, 22 bp, Artificial Sequence
  chemically synthesized
aataagacagagtctcggtgtt

SEQ ID NO: 9737 - DNA, 22 bp, Artificial Sequence
  chemically synthesized
ggtgttccccaggctggagtac

SEQ ID NO: 9738 - DNA, 22 bp, Artificial Sequence
  chemically synthesized
cccaggctggagtacactggca

SEQ ID NO: 9739 - DNA, 22 bp, Artificial Sequence
  chemically synthesized
gagtacactggcacatcataac

SEQ ID NO: 9740 - DNA, 22 bp, Artificial Sequence
  chemically synthesized
gcacatcataactccctgtaac

SEQ ID NO: 9741 - DNA, 22 bp, Artificial Sequence
  chemically synthesized
cctgtaacctcaaactcctggg

SEQ ID NO: 9742 - DNA, 22 bp, Artificial Sequence
  chemically synthesized
taacctcaaactcctgggctca

SEQ ID NO: 9743 - DNA, 22 bp, Artificial Sequence
  chemically synthesized
aaactcctgggctcaaaagatc

SEQ ID NO: 9744 - DNA, 22 bp, Artificial Sequence
  chemically synthesized
ctgggctcaaaagatcctcctg

SEQ ID NO: 9745 - DNA, 22 bp, Artificial Sequence
  chemically synthesized
ggctcaaaagatcctcctgcct

SEQ ID NO: 9746 - DNA, 22 bp, Artificial Sequence
  chemically synthesized
aaaagatcctcctgcctcagct

SEQ ID NO: 9747 - DNA, 22 bp, Artificial Sequence
  chemically synthesized
ctgcctcagctttcggaatagc

SEQ ID NO: 9748 - DNA, 22 bp, Artificial Sequence
  chemically synthesized
cctcagctttcggaatagctag

SEQ ID NO: 9749 - DNA, 22 bp, Artificial Sequence
  chemically synthesized
agctttcggaatagctaggatt

SEQ ID NO: 9750 - DNA, 22 bp, Artificial Sequence
  chemically synthesized
tcggaatagctaggattacagg

SEQ ID NO: 9751 - DNA, 22 bp, Artificial Sequence
  chemically synthesized
cggaatagctaggattacaggc

SEQ ID NO: 9752 - DNA, 22 bp, Artificial Sequence
  chemically synthesized
ggaatagctaggattacaggca

SEQ ID NO: 9753 - DNA, 22 bp, Artificial Sequence
  chemically synthesized
ggattacaggcacacagaaaca

SEQ ID NO: 9754 - DNA, 22 bp, Artificial Sequence
  chemically synthesized
caggcacacagaaacacattcc

SEQ ID NO: 9755 - DNA, 22 bp, Artificial Sequence
  chemically synthesized
caataattcttttttatttttt

SEQ ID NO: 9756 - DNA, 22 bp, Artificial Sequence
  chemically synthesized
ttttttattttttgtagagatg

SEQ ID NO: 9757 - DNA, 22 bp, Artificial Sequence
  chemically synthesized
ttttattttttgtagagatggg

SEQ ID NO: 9758 - DNA, 22 bp, Artificial Sequence
  chemically synthesized
tttattttttgtagagatgggg

SEQ ID NO: 9759 - DNA, 22 bp, Artificial Sequence
  chemically synthesized
ttattttttgtagagatggggt

SEQ ID NO: 9760 - DNA, 22 bp, Artificial Sequence
  chemically synthesized
tattttttgtagagatggggtt

SEQ ID NO: 9761 - DNA, 22 bp, Artificial Sequence
  chemically synthesized
attttttgtagagatggggttt

SEQ ID NO: 9762 - DNA, 22 bp, Artificial Sequence
  chemically synthesized
ttttttgtagagatggggtttc

SEQ ID NO: 9763 - DNA, 22 bp, Artificial Sequence
  chemically synthesized
tttgtagagatggggtttcact

SEQ ID NO: 9764 - DNA, 22 bp, Artificial Sequence
  chemically synthesized
ttgtagagatggggtttcacta

SEQ ID NO: 9765 - DNA, 22 bp, Artificial Sequence
  chemically synthesized
tgtagagatggggtttcactat

SEQ ID NO: 9766 - DNA, 22 bp, Artificial Sequence
  chemically synthesized
gtagagatggggtttcactatg

SEQ ID NO: 9767 - DNA, 22 bp, Artificial Sequence
  chemically synthesized
tagagatggggtttcactatgt

SEQ ID NO: 9768 - DNA, 22 bp, Artificial Sequence
  chemically synthesized
cactatgttgcccaggctggtc

SEQ ID NO: 9769 - DNA, 22 bp, Artificial Sequence
  chemically synthesized
actatgttgcccaggctggtct

SEQ ID NO: 9770 - DNA, 22 bp, Artificial Sequence
  chemically synthesized
tgttgcccaggctggtctggaa

SEQ ID NO: 9771 - DNA, 22 bp, Artificial Sequence
  chemically synthesized
cccaggctggtctggaactcct

SEQ ID NO: 9772 - DNA, 22 bp, Artificial Sequence
  chemically synthesized
gtctggaactcctggcctcaag

SEQ ID NO: 9773 - DNA, 22 bp, Artificial Sequence
  chemically synthesized
gaactcctggcctcaagtgatc

SEQ ID NO: 9774 - DNA, 22 bp, Artificial Sequence
  chemically synthesized
ctggcctcaagtgatccgcctg

SEQ ID NO: 9775 - DNA, 22 bp, Artificial Sequence
  chemically synthesized
gcctcaagtgatccgcctgcct

SEQ ID NO: 9776 - DNA, 22 bp, Artificial Sequence
  chemically synthesized
aagtgatccgcctgccttgcac

SEQ ID NO: 9777 - DNA, 22 bp, Artificial Sequence
  chemically synthesized
ccttgcactcccaaagctctgt

SEQ ID NO: 9778 - DNA, 22 bp, Artificial Sequence
  chemically synthesized
gcactcccaaagctctgttctt

SEQ ID NO: 9779 - DNA, 22 bp, Artificial Sequence
  chemically synthesized
cactcccaaagctctgttctta

SEQ ID NO: 9780 - DNA, 22 bp, Artificial Sequence
  chemically synthesized
ccaaagctctgttcttacaggc

SEQ ID NO: 9781 - DNA, 22 bp, Artificial Sequence
  chemically synthesized
tgttcttacaggcatgagctac

SEQ ID NO: 9782 - DNA, 22 bp, Artificial Sequence
  chemically synthesized
ttcttacaggcatgagctactg

SEQ ID NO: 9783 - DNA, 22 bp, Artificial Sequence
  chemically synthesized
ttacaggcatgagctactgtgc

SEQ ID NO: 9784 - DNA, 22 bp, Artificial Sequence
  chemically synthesized
acaggcatgagctactgtgcct

SEQ ID NO: 9785 - DNA, 22 bp, Artificial Sequence
  chemically synthesized
caggcatgagctactgtgcctt

SEQ ID NO: 9786 - DNA, 22 bp, Artificial Sequence
  chemically synthesized
ctgtgccttttttcaactgata

SEQ ID NO: 9787 - DNA, 22 bp, Artificial Sequence
  chemically synthesized
tgccttttttcaactgataaaa

SEQ ID NO: 9788 - DNA, 22 bp, Artificial Sequence
  chemically synthesized
ttttcaactgataaaagagaaa

SEQ ID NO: 9789 - DNA, 22 bp, Artificial Sequence
  chemically synthesized
tttcaactgataaaagagaaac

SEQ ID NO: 9790 - DNA, 22 bp, Artificial Sequence
  chemically synthesized
ttcaactgataaaagagaaaca

SEQ ID NO: 9791 - DNA, 22 bp, Artificial Sequence
  chemically synthesized
tcaactgataaaagagaaacac

SEQ ID NO: 9792 - DNA, 22 bp, Artificial Sequence
  chemically synthesized
caactgataaaagagaaacaca

SEQ ID NO: 9793 - DNA, 22 bp, Artificial Sequence
  chemically synthesized
aactgataaaagagaaacacaa

SEQ ID NO: 9794 - DNA, 22 bp, Artificial Sequence
  chemically synthesized
ataaaagagaaacacaaaagta

SEQ ID NO: 9795 - DNA, 22 bp, Artificial Sequence
  chemically synthesized
taattcttttcctgatttcaga

SEQ ID NO: 9796 - DNA, 22 bp, Artificial Sequence
  chemically synthesized
ttttcctgatttcagaacatct

SEQ ID NO: 9797 - DNA, 22 bp, Artificial Sequence
  chemically synthesized
ttcctgatttcagaacatcttt

SEQ ID NO: 9798 - DNA, 22 bp, Artificial Sequence
  chemically synthesized
tcctgatttcagaacatctttt

SEQ ID NO: 9799 - DNA, 22 bp, Artificial Sequence
  chemically synthesized
cctgatttcagaacatctttta

SEQ ID NO: 9800 - DNA, 22 bp, Artificial Sequence
  chemically synthesized
ctgatttcagaacatcttttaa

SEQ ID NO: 9801 - DNA, 22 bp, Artificial Sequence
  chemically synthesized
atttcagaacatcttttaagtg

SEQ ID NO: 9802 - DNA, 22 bp, Artificial Sequence
  chemically synthesized
cagaacatcttttaagtgttta

SEQ ID NO: 9803 - DNA, 22 bp, Artificial Sequence
  chemically synthesized
agaacatcttttaagtgtttac

SEQ ID NO: 9804 - DNA, 22 bp, Artificial Sequence
  chemically synthesized
ttaagtgtttacttagggtttt

SEQ ID NO: 9805 - DNA, 22 bp, Artificial Sequence
  chemically synthesized
taagtgtttacttagggtttta

SEQ ID NO: 9806 - DNA, 22 bp, Artificial Sequence
  chemically synthesized
aagtgtttacttagggttttag

SEQ ID NO: 9807 - DNA, 22 bp, Artificial Sequence
  chemically synthesized
agtgtttacttagggttttagg

SEQ ID NO: 9808 - DNA, 22 bp, Artificial Sequence
  chemically synthesized
acttagggttttaggattatag

SEQ ID NO: 9809 - DNA, 22 bp, Artificial Sequence
  chemically synthesized
cttagggttttaggattataga

SEQ ID NO: 9810 - DNA, 22 bp, Artificial Sequence
  chemically synthesized
agggttttaggattatagattt

SEQ ID NO: 9811 - DNA, 22 bp, Artificial Sequence
  chemically synthesized
gggttttaggattatagattta

SEQ ID NO: 9812 - DNA, 22 bp, Artificial Sequence
  chemically synthesized
taggattatagatttatcatca

SEQ ID NO: 9813 - DNA, 22 bp, Artificial Sequence
  chemically synthesized
aggattatagatttatcatcat

SEQ ID NO: 9814 - DNA, 22 bp, Artificial Sequence
  chemically synthesized
ggattatagatttatcatcatc

SEQ ID NO: 9815 - DNA, 22 bp, Artificial Sequence
  chemically synthesized
tagatttatcatcatcattttt

SEQ ID NO: 9816 - DNA, 22 bp, Artificial Sequence
  chemically synthesized
atcatcatcattttttttttca

SEQ ID NO: 9817 - DNA, 22 bp, Artificial Sequence
  chemically synthesized
tcatcatcattttttttttcaa

SEQ ID NO: 9818 - DNA, 22 bp, Artificial Sequence
  chemically synthesized
tttttttcaagttgggtccatg

SEQ ID NO: 9819 - DNA, 22 bp, Artificial Sequence
  chemically synthesized
ttttttcaagttgggtccatgc

SEQ ID NO: 9820 - DNA, 22 bp, Artificial Sequence
  chemically synthesized
tttttcaagttgggtccatgct

SEQ ID NO: 9821 - DNA, 22 bp, Artificial Sequence
  chemically synthesized
ttttcaagttgggtccatgctc

SEQ ID NO: 9822 - DNA, 22 bp, Artificial Sequence
  chemically synthesized
tttcaagttgggtccatgctca

SEQ ID NO: 9823 - DNA, 22 bp, Artificial Sequence
  chemically synthesized
ttcaagttgggtccatgctcaa

SEQ ID NO: 9824 - DNA, 22 bp, Artificial Sequence
  chemically synthesized
tcaagttgggtccatgctcaac

SEQ ID NO: 9825 - DNA, 22 bp, Artificial Sequence
  chemically synthesized
caagttgggtccatgctcaaca

SEQ ID NO: 9826 - DNA, 22 bp, Artificial Sequence
  chemically synthesized
aagttgggtccatgctcaacaa

SEQ ID NO: 9827 - DNA, 22 bp, Artificial Sequence
  chemically synthesized
ggtccatgctcaacaattaatt

SEQ ID NO: 9828 - DNA, 22 bp, Artificial Sequence
  chemically synthesized
aacaattaattatcattacttt

SEQ ID NO: 9829 - DNA, 22 bp, Artificial Sequence
  chemically synthesized
attatcattacttttccttttg

SEQ ID NO: 9830 - DNA, 22 bp, Artificial Sequence
  chemically synthesized
tcattacttttccttttgaatt

SEQ ID NO: 9831 - DNA, 22 bp, Artificial Sequence
  chemically synthesized
cttttccttttgaatttactgt

SEQ ID NO: 9832 - DNA, 22 bp, Artificial Sequence
  chemically synthesized
ttccttttgaatttactgttca

SEQ ID NO: 9833 - DNA, 22 bp, Artificial Sequence
  chemically synthesized
tccttttgaatttactgttcag

SEQ ID NO: 9834 - DNA, 22 bp, Artificial Sequence
  chemically synthesized
ccttttgaatttactgttcagg

SEQ ID NO: 9835 - DNA, 22 bp, Artificial Sequence
  chemically synthesized
cttttgaatttactgttcaggc

SEQ ID NO: 9836 - DNA, 22 bp, Artificial Sequence
  chemically synthesized
ttgaatttactgttcaggcttt

SEQ ID NO: 9837 - DNA, 22 bp, Artificial Sequence
  chemically synthesized
tgaatttactgttcaggctttt

SEQ ID NO: 9838 - DNA, 22 bp, Artificial Sequence
  chemically synthesized
gaatttactgttcaggcttttt

SEQ ID NO: 9839 - DNA, 22 bp, Artificial Sequence
  chemically synthesized
aatttactgttcaggctttttt

SEQ ID NO: 9840 - DNA, 22 bp, Artificial Sequence
  chemically synthesized
actgttcaggctttttttttta

SEQ ID NO: 9841 - DNA, 22 bp, Artificial Sequence
  chemically synthesized
ctgttcaggcttttttttttaa

SEQ ID NO: 9842 - DNA, 22 bp, Artificial Sequence
  chemically synthesized
ttcaggcttttttttttaaaaa

SEQ ID NO: 9843 - DNA, 22 bp, Artificial Sequence
  chemically synthesized
aggcttttttttttaaaaaaaa

SEQ ID NO: 9844 - DNA, 22 bp, Artificial Sequence
  chemically synthesized
ttttttttaaaaaaaaataaga

SEQ ID NO: 9845 - DNA, 22 bp, Artificial Sequence
  chemically synthesized
tttttttaaaaaaaaataagaa

SEQ ID NO: 9846 - DNA, 22 bp, Artificial Sequence
  chemically synthesized
ttttttaaaaaaaaataagaag

SEQ ID NO: 9847 - DNA, 22 bp, Artificial Sequence
  chemically synthesized
tttttaaaaaaaaataagaagt

SEQ ID NO: 9848 - DNA, 22 bp, Artificial Sequence
  chemically synthesized
ttttaaaaaaaaataagaagtg

SEQ ID NO: 9849 - DNA, 22 bp, Artificial Sequence
  chemically synthesized
tttaaaaaaaaataagaagtga

SEQ ID NO: 9850 - DNA, 22 bp, Artificial Sequence
  chemically synthesized
ttaaaaaaaaataagaagtgaa

SEQ ID NO: 9851 - DNA, 22 bp, Artificial Sequence
  chemically synthesized
taaaaaaaaataagaagtgaat

SEQ ID NO: 9852 - DNA, 22 bp, Artificial Sequence
  chemically synthesized
aaaaaaaaataagaagtgaata

SEQ ID NO: 9853 - DNA, 22 bp, Artificial Sequence
  chemically synthesized
aaaaaaaataagaagtgaataa

SEQ ID NO: 9854 - DNA, 22 bp, Artificial Sequence
  chemically synthesized
cattaatatattttaacagttt

SEQ ID NO: 9855 - DNA, 22 bp, Artificial Sequence
  chemically synthesized
atatattttaacagttttgctg

SEQ ID NO: 9856 - DNA, 22 bp, Artificial Sequence
  chemically synthesized
taacagttttgctgtattttat

SEQ ID NO: 9857 - DNA, 22 bp, Artificial Sequence
  chemically synthesized
aacagttttgctgtattttata

SEQ ID NO: 9858 - DNA, 22 bp, Artificial Sequence
  chemically synthesized
acagttttgctgtattttatat

SEQ ID NO: 9859 - DNA, 22 bp, Artificial Sequence
  chemically synthesized
tgctgtattttatattcatatg

SEQ ID NO: 9860 - DNA, 22 bp, Artificial Sequence
  chemically synthesized
gctgtattttatattcatatgt

SEQ ID NO: 9861 - DNA, 22 bp, Artificial Sequence
  chemically synthesized
ctgtattttatattcatatgtc

SEQ ID NO: 9862 - DNA, 22 bp, Artificial Sequence
  chemically synthesized
tattttatattcatatgtcaag

SEQ ID NO: 9863 - DNA, 22 bp, Artificial Sequence
  chemically synthesized
tatattcatatgtcaagaaaaa

SEQ ID NO: 9864 - DNA, 22 bp, Artificial Sequence
  chemically synthesized
atattcatatgtcaagaaaaaa

SEQ ID NO: 9865 - DNA, 22 bp, Artificial Sequence
  chemically synthesized
tattcatatgtcaagaaaaaaa

SEQ ID NO: 9866 - DNA, 22 bp, Artificial Sequence
  chemically synthesized
atatgtcaagaaaaaaaagact

SEQ ID NO: 9867 - DNA, 22 bp, Artificial Sequence
  chemically synthesized
agaattacttctttggttttgt

SEQ ID NO: 9868 - DNA, 22 bp, Artificial Sequence
  chemically synthesized
gaattacttctttggttttgtt

SEQ ID NO: 9869 - DNA, 22 bp, Artificial Sequence
  chemically synthesized
cttctttggttttgttaataag

SEQ ID NO: 9870 - DNA, 22 bp, Artificial Sequence
  chemically synthesized
ctttggttttgttaataagtcc

SEQ ID NO: 9871 - DNA, 22 bp, Artificial Sequence
  chemically synthesized
tttggttttgttaataagtcca

SEQ ID NO: 9872 - DNA, 22 bp, Artificial Sequence
  chemically synthesized
tggttttgttaataagtccatt

SEQ ID NO: 9873 - DNA, 22 bp, Artificial Sequence
  chemically synthesized
ggttttgttaataagtccattc

SEQ ID NO: 9874 - DNA, 22 bp, Artificial Sequence
  chemically synthesized
gttttgttaataagtccattca

SEQ ID NO: 9875 - DNA, 22 bp, Artificial Sequence
  chemically synthesized
tgttaataagtccattcaataa

SEQ ID NO: 9876 - DNA, 22 bp, Artificial Sequence
  chemically synthesized
gttaataagtccattcaataac

SEQ ID NO: 9877 - DNA, 22 bp, Artificial Sequence
  chemically synthesized
ttaataagtccattcaataact

SEQ ID NO: 9878 - DNA, 22 bp, Artificial Sequence
  chemically synthesized
ataagtccattcaataactgtt

SEQ ID NO: 9879 - DNA, 22 bp, Artificial Sequence
  chemically synthesized
aataactgttacataatagact

SEQ ID NO: 9880 - DNA, 22 bp, Artificial Sequence
  chemically synthesized
ttacataatagactatacacaa

SEQ ID NO: 9881 - DNA, 22 bp, Artificial Sequence
  chemically synthesized
cataatagactatacacaatgt

SEQ ID NO: 9882 - DNA, 22 bp, Artificial Sequence
  chemically synthesized
tacacaatgtaggggctggggc

SEQ ID NO: 9883 - DNA, 22 bp, Artificial Sequence
  chemically synthesized
gggctggggctgtctggttggc

SEQ ID NO: 9884 - DNA, 22 bp, Artificial Sequence
  chemically synthesized
gggctgtctggttggccactat

SEQ ID NO: 9885 - DNA, 22 bp, Artificial Sequence
  chemically synthesized
tctggttggccactattaagcc

SEQ ID NO: 9886 - DNA, 22 bp, Artificial Sequence
  chemically synthesized
gttggccactattaagcccggt

SEQ ID NO: 9887 - DNA, 22 bp, Artificial Sequence
  chemically synthesized
gccactattaagcccggtacct

SEQ ID NO: 9888 - DNA, 22 bp, Artificial Sequence
  chemically synthesized
ttaagcccggtacctagaacag

SEQ ID NO: 9889 - DNA, 22 bp, Artificial Sequence
  chemically synthesized
agcccggtacctagaacagtgc

SEQ ID NO: 9890 - DNA, 22 bp, Artificial Sequence
  chemically synthesized
gaacagtgcctaggagctcaat

SEQ ID NO: 9891 - DNA, 22 bp, Artificial Sequence
  chemically synthesized
ggagctcaatatatatttatta

SEQ ID NO: 9892 - DNA, 22 bp, Artificial Sequence
  chemically synthesized
aatatatatttattaaacaaat

SEQ ID NO: 9893 - DNA, 22 bp, Artificial Sequence
  chemically synthesized
attaaacaaatagttaaatatt

SEQ ID NO: 9894 - DNA, 22 bp, Artificial Sequence
  chemically synthesized
ttaaacaaatagttaaatattt

SEQ ID NO: 9895 - DNA, 22 bp, Artificial Sequence
  chemically synthesized
aacaaatagttaaatatttact

SEQ ID NO: 9896 - DNA, 22 bp, Artificial Sequence
  chemically synthesized
aatatttactttaagggttaat

SEQ ID NO: 9897 - DNA, 22 bp, Artificial Sequence
  chemically synthesized
actttaagggttaatcttacct

SEQ ID NO: 9898 - DNA, 22 bp, Artificial Sequence
  chemically synthesized
ctttaagggttaatcttaccta

SEQ ID NO: 9899 - DNA, 22 bp, Artificial Sequence
  chemically synthesized
taagggttaatcttacctattt

SEQ ID NO: 9900 - DNA, 22 bp, Artificial Sequence
  chemically synthesized
aagggttaatcttacctatttt

SEQ ID NO: 9901 - DNA, 22 bp, Artificial Sequence
  chemically synthesized
agggttaatcttacctatttta

SEQ ID NO: 9902 - DNA, 22 bp, Artificial Sequence
  chemically synthesized
atcttacctattttagggtaaa

SEQ ID NO: 9903 - DNA, 22 bp, Artificial Sequence
  chemically synthesized
acctattttagggtaaacacaa

SEQ ID NO: 9904 - DNA, 22 bp, Artificial Sequence
  chemically synthesized
cctattttagggtaaacacaat

SEQ ID NO: 9905 - DNA, 22 bp, Artificial Sequence
  chemically synthesized
ttttagggtaaacacaattgta

SEQ ID NO: 9906 - DNA, 22 bp, Artificial Sequence
  chemically synthesized
tagggtaaacacaattgtatgg

SEQ ID NO: 9907 - DNA, 22 bp, Artificial Sequence
  chemically synthesized
agggtaaacacaattgtatgga

SEQ ID NO: 9908 - DNA, 22 bp, Artificial Sequence
  chemically synthesized
gggtaaacacaattgtatggaa

SEQ ID NO: 9909 - DNA, 22 bp, Artificial Sequence
  chemically synthesized
tatggaaaaagaagaacattta

SEQ ID NO: 9910 - DNA, 22 bp, Artificial Sequence
  chemically synthesized
aagaaaaaaatgcttgattaaa

SEQ ID NO: 9911 - DNA, 22 bp, Artificial Sequence
  chemically synthesized
agaaaaaaatgcttgattaaat

SEQ ID NO: 9912 - DNA, 22 bp, Artificial Sequence
  chemically synthesized
gattaaatgtttcttcaagcat

SEQ ID NO: 9913 - DNA, 22 bp, Artificial Sequence
  chemically synthesized
attaaatgtttcttcaagcata

SEQ ID NO: 9914 - DNA, 22 bp, Artificial Sequence
  chemically synthesized
aatgtttcttcaagcataattc

SEQ ID NO: 9915 - DNA, 22 bp, Artificial Sequence
  chemically synthesized
cttcaagcataattctgctggt

SEQ ID NO: 9916 - DNA, 22 bp, Artificial Sequence
  chemically synthesized
ttcaagcataattctgctggta

SEQ ID NO: 9917 - DNA, 22 bp, Artificial Sequence
  chemically synthesized
caagcataattctgctggtaat

SEQ ID NO: 9918 - DNA, 22 bp, Artificial Sequence
  chemically synthesized
aagcataattctgctggtaata

SEQ ID NO: 9919 - DNA, 22 bp, Artificial Sequence
  chemically synthesized
tgctggtaatatttctttcttt

SEQ ID NO: 9920 - DNA, 22 bp, Artificial Sequence
  chemically synthesized
ctggtaatatttctttcttttt

SEQ ID NO: 9921 - DNA, 22 bp, Artificial Sequence
  chemically synthesized
gtaatatttctttctttttaaa

SEQ ID NO: 9922 - DNA, 22 bp, Artificial Sequence
  chemically synthesized
ctttctttttaaatgcaacttc

SEQ ID NO: 9923 - DNA, 22 bp, Artificial Sequence
  chemically synthesized
tttctttttaaatgcaacttct

SEQ ID NO: 9924 - DNA, 22 bp, Artificial Sequence
  chemically synthesized
tctttttaaatgcaacttctgt

SEQ ID NO: 9925 - DNA, 22 bp, Artificial Sequence
  chemically synthesized
ctttttaaatgcaacttctgtt

SEQ ID NO: 9926 - DNA, 22 bp, Artificial Sequence
  chemically synthesized
tttttaaatgcaacttctgttt

SEQ ID NO: 9927 - DNA, 22 bp, Artificial Sequence
  chemically synthesized
tttaaatgcaacttctgttttg

SEQ ID NO: 9928 - DNA, 22 bp, Artificial Sequence
  chemically synthesized
ttaaatgcaacttctgttttgt

SEQ ID NO: 9929 - DNA, 22 bp, Artificial Sequence
  chemically synthesized
taaatgcaacttctgttttgtt

SEQ ID NO: 9930 - DNA, 22 bp, Artificial Sequence
  chemically synthesized
aaatgcaacttctgttttgttt

SEQ ID NO: 9931 - DNA, 22 bp, Artificial Sequence
  chemically synthesized
aatgcaacttctgttttgtttt

SEQ ID NO: 9932 - DNA, 22 bp, Artificial Sequence
  chemically synthesized
ctgttttgtttttattcgtaaa

SEQ ID NO: 9933 - DNA, 22 bp, Artificial Sequence
  chemically synthesized
tgttttgtttttattcgtaaaa

SEQ ID NO: 9934 - DNA, 22 bp, Artificial Sequence
  chemically synthesized
ttttgtttttattcgtaaaaga

SEQ ID NO: 9935 - DNA, 22 bp, Artificial Sequence
  chemically synthesized
tgtttttattcgtaaaagacac

SEQ ID NO: 9936 - DNA, 22 bp, Artificial Sequence
  chemically synthesized
gtttttattcgtaaaagacaca

SEQ ID NO: 9937 - DNA, 22 bp, Artificial Sequence
  chemically synthesized
tttttattcgtaaaagacacaa

SEQ ID NO: 9938 - DNA, 22 bp, Artificial Sequence
  chemically synthesized
ttattcgtaaaagacacaattt

SEQ ID NO: 9939 - DNA, 22 bp, Artificial Sequence
  chemically synthesized
tattcgtaaaagacacaatttc

SEQ ID NO: 9940 - DNA, 22 bp, Artificial Sequence
  chemically synthesized
attcgtaaaagacacaatttca

SEQ ID NO: 9941 - DNA, 22 bp, Artificial Sequence
  chemically synthesized
ttcgtaaaagacacaatttcat

SEQ ID NO: 9942 - DNA, 22 bp, Artificial Sequence
  chemically synthesized
gtaaaagacacaatttcatatt

SEQ ID NO: 9943 - DNA, 22 bp, Artificial Sequence
  chemically synthesized
catattgcttgactacagtacc

SEQ ID NO: 9944 - DNA, 22 bp, Artificial Sequence
  chemically synthesized
atattgcttgactacagtacca

SEQ ID NO: 9945 - DNA, 22 bp, Artificial Sequence
  chemically synthesized
cttgactacagtaccagcaggc

SEQ ID NO: 9946 - DNA, 22 bp, Artificial Sequence
  chemically synthesized
gactacagtaccagcaggcaga

SEQ ID NO: 9947 - DNA, 22 bp, Artificial Sequence
  chemically synthesized
actacagtaccagcaggcagag

SEQ ID NO: 9948 - DNA, 22 bp, Artificial Sequence
  chemically synthesized
cagtaccagcaggcagagcatt

SEQ ID NO: 9949 - DNA, 22 bp, Artificial Sequence
  chemically synthesized
cgtacaaatcaggagtaaagct

SEQ ID NO: 9950 - DNA, 22 bp, Artificial Sequence
  chemically synthesized
tcgtcagtgtagatgatcgtat

SEQ ID NO: 9951 - DNA, 22 bp, Artificial Sequence
  chemically synthesized
cgtcagtgtagatgatcgtatc

SEQ ID NO: 9952 - DNA, 22 bp, Artificial Sequence
  chemically synthesized
gtcagtgtagatgatcgtatcc

SEQ ID NO: 9953 - DNA, 22 bp, Artificial Sequence
  chemically synthesized
agccatgtcttcttctgaagtg

SEQ ID NO: 9954 - DNA, 22 bp, Artificial Sequence
  chemically synthesized
cttctgaagtggctctccagaa

SEQ ID NO: 9955 - DNA, 22 bp, Artificial Sequence
  chemically synthesized
ttctgaagtggctctccagaag

SEQ ID NO: 9956 - DNA, 22 bp, Artificial Sequence
  chemically synthesized
ctgaagtggctctccagaaggc

SEQ ID NO: 9957 - DNA, 22 bp, Artificial Sequence
  chemically synthesized
tgaagtggctctccagaaggct

SEQ ID NO: 9958 - DNA, 22 bp, Artificial Sequence
  chemically synthesized
aagtggctctccagaaggctgt

SEQ ID NO: 9959 - DNA, 22 bp, Artificial Sequence
  chemically synthesized
tccagaaggctgtcagctcgga

SEQ ID NO: 9960 - DNA, 22 bp, Artificial Sequence
  chemically synthesized
cagaaggctgtcagctcggatc

SEQ ID NO: 9961 - DNA, 22 bp, Artificial Sequence
  chemically synthesized
tcagctcggatctcatgtatct

SEQ ID NO: 9962 - DNA, 22 bp, Artificial Sequence
  chemically synthesized
ggatctcatgtatctacgctga

SEQ ID NO: 9963 - DNA, 22 bp, Artificial Sequence
  chemically synthesized
atgtatctacgctgattataaa

SEQ ID NO: 9964 - DNA, 22 bp, Artificial Sequence
  chemically synthesized
cgctgattataaatatgttcat

SEQ ID NO: 9965 - DNA, 22 bp, Artificial Sequence
  chemically synthesized
attataaatatgttcatgacag

SEQ ID NO: 9966 - DNA, 22 bp, Artificial Sequence
  chemically synthesized
taaatatgttcatgacagggtg

SEQ ID NO: 9967 - DNA, 22 bp, Artificial Sequence
  chemically synthesized
atgacagggtggcatctgcttc

SEQ ID NO: 9968 - DNA, 22 bp, Artificial Sequence
  chemically synthesized
cttcacagtattgacatccaca

SEQ ID NO: 9969 - DNA, 22 bp, Artificial Sequence
  chemically synthesized
cacagtattgacatccacatct

SEQ ID NO: 9970 - DNA, 22 bp, Artificial Sequence
  chemically synthesized
acagtattgacatccacatcta

SEQ ID NO: 9971 - DNA, 22 bp, Artificial Sequence
  chemically synthesized
acatccacatctatgtgtgtgg

SEQ ID NO: 9972 - DNA, 22 bp, Artificial Sequence
  chemically synthesized
tgtgtgtggtgggatatggagc

SEQ ID NO: 9973 - DNA, 22 bp, Artificial Sequence
  chemically synthesized
gccggaaaggcagcacaaagct

SEQ ID NO: 9974 - DNA, 22 bp, Artificial Sequence
  chemically synthesized
ccggaaaggcagcacaaagctt

SEQ ID NO: 9975 - DNA, 22 bp, Artificial Sequence
  chemically synthesized
ccagttgaatcctgtcaaaata

SEQ ID NO: 9976 - DNA, 22 bp, Artificial Sequence
  chemically synthesized
cagttgaatcctgtcaaaataa

SEQ ID NO: 9977 - DNA, 22 bp, Artificial Sequence
  chemically synthesized
aatcctgtcaaaataaaaggaa

SEQ ID NO: 9978 - DNA, 22 bp, Artificial Sequence
  chemically synthesized
tcaaaataaaaggaaaatttac

SEQ ID NO: 9979 - DNA, 22 bp, Artificial Sequence
  chemically synthesized
actgtcttacatgccaaacgat

SEQ ID NO: 9980 - DNA, 22 bp, Artificial Sequence
  chemically synthesized
ctgtcttacatgccaaacgata

SEQ ID NO: 9981 - DNA, 22 bp, Artificial Sequence
  chemically synthesized
tcttacatgccaaacgatatga

SEQ ID NO: 9982 - DNA, 22 bp, Artificial Sequence
  chemically synthesized
acatgccaaacgatatgaataa

SEQ ID NO: 9983 - DNA, 22 bp, Artificial Sequence
  chemically synthesized
catgccaaacgatatgaataat

SEQ ID NO: 9984 - DNA, 22 bp, Artificial Sequence
  chemically synthesized
ttttttaattttaaaaaatggt

SEQ ID NO: 9985 - DNA, 22 bp, Artificial Sequence
  chemically synthesized
tttaattttaaaaaatggtctc

SEQ ID NO: 9986 - DNA, 22 bp, Artificial Sequence
  chemically synthesized
ttaattttaaaaaatggtctct

SEQ ID NO: 9987 - DNA, 22 bp, Artificial Sequence
  chemically synthesized
taattttaaaaaatggtctctg

SEQ ID NO: 9988 - DNA, 22 bp, Artificial Sequence
  chemically synthesized
aattttaaaaaatggtctctga

SEQ ID NO: 9989 - DNA, 22 bp, Artificial Sequence
  chemically synthesized
attttaaaaaatggtctctgat

SEQ ID NO: 9990 - DNA, 22 bp, Artificial Sequence
  chemically synthesized
taaaaaatggtctctgatttag

SEQ ID NO: 9991 - DNA, 22 bp, Artificial Sequence
  chemically synthesized
aaaaaatggtctctgatttagc

SEQ ID NO: 9992 - DNA, 22 bp, Artificial Sequence
  chemically synthesized
aaaaatggtctctgatttagca

SEQ ID NO: 9993 - DNA, 22 bp, Artificial Sequence
  chemically synthesized
tgatttagcaaatccatctcta

SEQ ID NO: 9994 - DNA, 22 bp, Artificial Sequence
  chemically synthesized
atttagcaaatccatctctaaa

SEQ ID NO: 9995 - DNA, 22 bp, Artificial Sequence
  chemically synthesized
agcaaatccatctctaaaaatt

SEQ ID NO: 9996 - DNA, 22 bp, Artificial Sequence
  chemically synthesized
gcaaatccatctctaaaaattt

SEQ ID NO: 9997 - DNA, 22 bp, Artificial Sequence
  chemically synthesized
taaaaatttatcctaagaagct

SEQ ID NO: 9998 - DNA, 22 bp, Artificial Sequence
  chemically synthesized
aaaatttatcctaagaagctat

SEQ ID NO: 9999 - DNA, 22 bp, Artificial Sequence
  chemically synthesized
atcctaagaagctattcatgag

SEQ ID NO: 10000 - DNA, 22 bp, Artificial Sequence
  chemically synthesized
tcctaagaagctattcatgagt

SEQ ID NO: 10001 - DNA, 22 bp, Artificial Sequence
  chemically synthesized
agaagctattcatgagtgtgtg

SEQ ID NO: 10002 - DNA, 22 bp, Artificial Sequence
  chemically synthesized
ttcatgagtgtgtgcaaagttt

SEQ ID NO: 10003 - DNA, 22 bp, Artificial Sequence
  chemically synthesized
atgagtgtgtgcaaagttttag

SEQ ID NO: 10004 - DNA, 22 bp, Artificial Sequence
  chemically synthesized
tagtgacagaagtgttcagtat

SEQ ID NO: 10005 - DNA, 22 bp, Artificial Sequence
  chemically synthesized
agtgacagaagtgttcagtata

SEQ ID NO: 10006 - DNA, 22 bp, Artificial Sequence
  chemically synthesized
gtgacagaagtgttcagtatag

SEQ ID NO: 10007 - DNA, 22 bp, Artificial Sequence
  chemically synthesized
agtatagcattggtttcaatag

SEQ ID NO: 10008 - DNA, 22 bp, Artificial Sequence
  chemically synthesized
gtttcaatagcaaaacatcaga

SEQ ID NO: 10009 - DNA, 22 bp, Artificial Sequence
  chemically synthesized
caatagcaaaacatcagaatga

SEQ ID NO: 10010 - DNA, 22 bp, Artificial Sequence
  chemically synthesized
aatagcaaaacatcagaatgac

SEQ ID NO: 10011 - DNA, 22 bp, Artificial Sequence
  chemically synthesized
agcatccaaaggaagtggttaa

SEQ ID NO: 10012 - DNA, 22 bp, Artificial Sequence
  chemically synthesized
agtaaataaaaatgaatttatt

SEQ ID NO: 10013 - DNA, 22 bp, Artificial Sequence
  chemically synthesized
attatttggcatctatagatga

SEQ ID NO: 10014 - DNA, 22 bp, Artificial Sequence
  chemically synthesized
ttatttggcatctatagatgaa

SEQ ID NO: 10015 - DNA, 22 bp, Artificial Sequence
  chemically synthesized
tttggcatctatagatgaagtt

SEQ ID NO: 10016 - DNA, 22 bp, Artificial Sequence
  chemically synthesized
ggcatctatagatgaagttgtt

SEQ ID NO: 10017 - DNA, 22 bp, Artificial Sequence
  chemically synthesized
gcatctatagatgaagttgttg

SEQ ID NO: 10018 - DNA, 22 bp, Artificial Sequence
  chemically synthesized
tagatgaagttgttgaagtttg

SEQ ID NO: 10019 - DNA, 22 bp, Artificial Sequence
  chemically synthesized
ttgaagtttgtgttgatattca

SEQ ID NO: 10020 - DNA, 22 bp, Artificial Sequence
  chemically synthesized
aagtttgtgttgatattcaaag

SEQ ID NO: 10021 - DNA, 22 bp, Artificial Sequence
  chemically synthesized
gtgttgatattcaaagaggctt

SEQ ID NO: 10022 - DNA, 22 bp, Artificial Sequence
  chemically synthesized
tgttgatattcaaagaggctta

SEQ ID NO: 10023 - DNA, 22 bp, Artificial Sequence
  chemically synthesized
atattcaaagaggcttagaatc

SEQ ID NO: 10024 - DNA, 22 bp, Artificial Sequence
  chemically synthesized
aaagaggcttagaatctgctgt

SEQ ID NO: 10025 - DNA, 22 bp, Artificial Sequence
  chemically synthesized
agaatctgctgtgaaaaaagca

SEQ ID NO: 10026 - DNA, 22 bp, Artificial Sequence
  chemically synthesized
gaatctgctgtgaaaaaagcag

SEQ ID NO: 10027 - DNA, 22 bp, Artificial Sequence
  chemically synthesized
ctgtgaaaaaagcagattagaa

SEQ ID NO: 10028 - DNA, 22 bp, Artificial Sequence
  chemically synthesized
tgaaaaaagcagattagaacat

SEQ ID NO: 10029 - DNA, 22 bp, Artificial Sequence
  chemically synthesized
gaacatgcagagatgatccagt

SEQ ID NO: 10030 - DNA, 22 bp, Artificial Sequence
  chemically synthesized
aaagaaaatacatgcaaaaggg

SEQ ID NO: 10031 - DNA, 22 bp, Artificial Sequence
  chemically synthesized
aagaaaatacatgcaaaaggga

SEQ ID NO: 10032 - DNA, 22 bp, Artificial Sequence
  chemically synthesized
gaaagagatataccaaatatta

SEQ ID NO: 10033 - DNA, 22 bp, Artificial Sequence
  chemically synthesized
acagtgggtattcactggattc

SEQ ID NO: 10034 - DNA, 22 bp, Artificial Sequence
  chemically synthesized
actggattcaaaattacaagtg

SEQ ID NO: 10035 - DNA, 22 bp, Artificial Sequence
  chemically synthesized
gattcaaaattacaagtgtctt

SEQ ID NO: 10036 - DNA, 22 bp, Artificial Sequence
  chemically synthesized
aaaattacaagtgtcttttaat

SEQ ID NO: 10037 - DNA, 22 bp, Artificial Sequence
  chemically synthesized
caagtgtcttttaatttcttaa

SEQ ID NO: 10038 - DNA, 22 bp, Artificial Sequence
  chemically synthesized
ttaatttcttaattattctatg

SEQ ID NO: 10039 - DNA, 22 bp, Artificial Sequence
  chemically synthesized
taatttcttaattattctatgc

SEQ ID NO: 10040 - DNA, 22 bp, Artificial Sequence
  chemically synthesized
aatttcttaattattctatgca

SEQ ID NO: 10041 - DNA, 22 bp, Artificial Sequence
  chemically synthesized
atttcttaattattctatgcac

SEQ ID NO: 10042 - DNA, 22 bp, Artificial Sequence
  chemically synthesized
cttaattattctatgcacctca

SEQ ID NO: 10043 - DNA, 22 bp, Artificial Sequence
  chemically synthesized
ttaattattctatgcacctcaa

SEQ ID NO: 10044 - DNA, 22 bp, Artificial Sequence
  chemically synthesized
aattattctatgcacctcaatg

SEQ ID NO: 10045 - DNA, 22 bp, Artificial Sequence
  chemically synthesized
attattctatgcacctcaatga

SEQ ID NO: 10046 - DNA, 22 bp, Artificial Sequence
  chemically synthesized
ttctatgcacctcaatgagtat

SEQ ID NO: 10047 - DNA, 22 bp, Artificial Sequence
  chemically synthesized
tatgcacctcaatgagtatgta

SEQ ID NO: 10048 - DNA, 22 bp, Artificial Sequence
  chemically synthesized
tgcacctcaatgagtatgtatt

SEQ ID NO: 10049 - DNA, 22 bp, Artificial Sequence
  chemically synthesized
aatgagtatgtatttttataaa

SEQ ID NO: 10050 - DNA, 22 bp, Artificial Sequence
  chemically synthesized
ttataaaacaaatttacttctt

SEQ ID NO: 10051 - DNA, 22 bp, Artificial Sequence
  chemically synthesized
tataaaacaaatttacttcttt

SEQ ID NO: 10052 - DNA, 22 bp, Artificial Sequence
  chemically synthesized
ataaaacaaatttacttctttc

SEQ ID NO: 10053 - DNA, 22 bp, Artificial Sequence
  chemically synthesized
taaaacaaatttacttctttcc

SEQ ID NO: 10054 - DNA, 22 bp, Artificial Sequence
  chemically synthesized
acttctttcctaatcagttggg

SEQ ID NO: 10055 - DNA, 22 bp, Artificial Sequence
  chemically synthesized
cttctttcctaatcagttgggg

SEQ ID NO: 10056 - DNA, 22 bp, Artificial Sequence
  chemically synthesized
ctttcctaatcagttggggtag

SEQ ID NO: 10057 - DNA, 22 bp, Artificial Sequence
  chemically synthesized
tttcctaatcagttggggtagc

SEQ ID NO: 10058 - DNA, 22 bp, Artificial Sequence
  chemically synthesized
tcctaatcagttggggtagcca

SEQ ID NO: 10059 - DNA, 22 bp, Artificial Sequence
  chemically synthesized
cctaatcagttggggtagccag

SEQ ID NO: 10060 - DNA, 22 bp, Artificial Sequence
  chemically synthesized
ctaatcagttggggtagccagt

SEQ ID NO: 10061 - DNA, 22 bp, Artificial Sequence
  chemically synthesized
atcagttggggtagccagttac

SEQ ID NO: 10062 - DNA, 22 bp, Artificial Sequence
  chemically synthesized
gggtagccagttaccatgtaat

SEQ ID NO: 10063 - DNA, 22 bp, Artificial Sequence
  chemically synthesized
ccatgtaataataacctactgc

SEQ ID NO: 10064 - DNA, 22 bp, Artificial Sequence
  chemically synthesized
ctgcgtatgaggcactgtgcta

SEQ ID NO: 10065 - DNA, 22 bp, Artificial Sequence
  chemically synthesized
cgtatgaggcactgtgctatga

SEQ ID NO: 10066 - DNA, 22 bp, Artificial Sequence
  chemically synthesized
tgctatgaacagaacagaagaa

SEQ ID NO: 10067 - DNA, 22 bp, Artificial Sequence
  chemically synthesized
tgaacagaacagaagaaagagg

SEQ ID NO: 10068 - DNA, 22 bp, Artificial Sequence
  chemically synthesized
tttccatttttttactattata

SEQ ID NO: 10069 - DNA, 22 bp, Artificial Sequence
  chemically synthesized
ccatttttttactattataatg

SEQ ID NO: 10070 - DNA, 22 bp, Artificial Sequence
  chemically synthesized
catttttttactattataatgc

SEQ ID NO: 10071 - DNA, 22 bp, Artificial Sequence
  chemically synthesized
ttttactattataatgctgtga

SEQ ID NO: 10072 - DNA, 22 bp, Artificial Sequence
  chemically synthesized
tttactattataatgctgtgat

SEQ ID NO: 10073 - DNA, 22 bp, Artificial Sequence
  chemically synthesized
ttactattataatgctgtgata

SEQ ID NO: 10074 - DNA, 22 bp, Artificial Sequence
  chemically synthesized
tactattataatgctgtgataa

SEQ ID NO: 10075 - DNA, 22 bp, Artificial Sequence
  chemically synthesized
actattataatgctgtgataat

SEQ ID NO: 10076 - DNA, 22 bp, Artificial Sequence
  chemically synthesized
ctattataatgctgtgataatc

SEQ ID NO: 10077 - DNA, 22 bp, Artificial Sequence
  chemically synthesized
ttataatgctgtgataatcatc

SEQ ID NO: 10078 - DNA, 22 bp, Artificial Sequence
  chemically synthesized
taatgctgtgataatcatcttt

SEQ ID NO: 10079 - DNA, 22 bp, Artificial Sequence
  chemically synthesized
tgataatcatctttgtataatg

SEQ ID NO: 10080 - DNA, 22 bp, Artificial Sequence
  chemically synthesized
tgtataatgtcaaaggtatttt

SEQ ID NO: 10081 - DNA, 22 bp, Artificial Sequence
  chemically synthesized
gtataatgtcaaaggtattttc

SEQ ID NO: 10082 - DNA, 22 bp, Artificial Sequence
  chemically synthesized
tataatgtcaaaggtattttct

SEQ ID NO: 10083 - DNA, 22 bp, Artificial Sequence
  chemically synthesized
tctggaaaactatatgatttgt

SEQ ID NO: 10084 - DNA, 22 bp, Artificial Sequence
  chemically synthesized
ctggaaaactatatgatttgta

SEQ ID NO: 10085 - DNA, 22 bp, Artificial Sequence
  chemically synthesized
tggaaaactatatgatttgtat

SEQ ID NO: 10086 - DNA, 22 bp, Artificial Sequence
  chemically synthesized
gaaaactatatgatttgtattt

SEQ ID NO: 10087 - DNA, 22 bp, Artificial Sequence
  chemically synthesized
tatgatttgtatttgcatggag

SEQ ID NO: 10088 - DNA, 22 bp, Artificial Sequence
  chemically synthesized
gtatttgcatggagaactatta

SEQ ID NO: 10089 - DNA, 22 bp, Artificial Sequence
  chemically synthesized
tatttgcatggagaactattaa

SEQ ID NO: 10090 - DNA, 22 bp, Artificial Sequence
  chemically synthesized
gcatggagaactattaaatatt

SEQ ID NO: 10091 - DNA, 22 bp, Artificial Sequence
  chemically synthesized
catggagaactattaaatattt

SEQ ID NO: 10092 - DNA, 22 bp, Artificial Sequence
  chemically synthesized
ttaaatattttttcattagatc

SEQ ID NO: 10093 - DNA, 22 bp, Artificial Sequence
  chemically synthesized
aatattttttcattagatcata

SEQ ID NO: 10094 - DNA, 22 bp, Artificial Sequence
  chemically synthesized
tttcattagatcatagttttga

SEQ ID NO: 10095 - DNA, 22 bp, Artificial Sequence
  chemically synthesized
ttcattagatcatagttttgaa

SEQ ID NO: 10096 - DNA, 22 bp, Artificial Sequence
  chemically synthesized
tcattagatcatagttttgaaa

SEQ ID NO: 10097 - DNA, 22 bp, Artificial Sequence
  chemically synthesized
cattagatcatagttttgaaat

SEQ ID NO: 10098 - DNA, 22 bp, Artificial Sequence
  chemically synthesized
attagatcatagttttgaaatt

SEQ ID NO: 10099 - DNA, 22 bp, Artificial Sequence
  chemically synthesized
gatcatagttttgaaatttcct

SEQ ID NO: 10100 - DNA, 22 bp, Artificial Sequence
  chemically synthesized
tgaaatttcctctaggcatctg

SEQ ID NO: 10101 - DNA, 22 bp, Artificial Sequence
  chemically synthesized
gaaatttcctctaggcatctgg

SEQ ID NO: 10102 - DNA, 22 bp, Artificial Sequence
  chemically synthesized
aaatttcctctaggcatctggt

SEQ ID NO: 10103 - DNA, 22 bp, Artificial Sequence
  chemically synthesized
cctctaggcatctggtataggt

SEQ ID NO: 10104 - DNA, 22 bp, Artificial Sequence
  chemically synthesized
ctctaggcatctggtataggtc

SEQ ID NO: 10105 - DNA, 22 bp, Artificial Sequence
  chemically synthesized
taggcatctggtataggtccct

SEQ ID NO: 10106 - DNA, 22 bp, Artificial Sequence
  chemically synthesized
ggcatctggtataggtcccttt

SEQ ID NO: 10107 - DNA, 22 bp, Artificial Sequence
  chemically synthesized
gtataggtccctttcagaacta

SEQ ID NO: 10108 - DNA, 22 bp, Artificial Sequence
  chemically synthesized
tcagaactaaaattatataatt

SEQ ID NO: 10109 - DNA, 22 bp, Artificial Sequence
  chemically synthesized
cagaactaaaattatataatta

SEQ ID NO: 10110 - DNA, 22 bp, Artificial Sequence
  chemically synthesized
agaactaaaattatataattaa

SEQ ID NO: 10111 - DNA, 22 bp, Artificial Sequence
  chemically synthesized
aaattatataattaaatgagag

SEQ ID NO: 10112 - DNA, 22 bp, Artificial Sequence
  chemically synthesized
tataattaaatgagagggtgct

SEQ ID NO: 10113 - DNA, 22 bp, Artificial Sequence
  chemically synthesized
aatgagagggtgctgaggaaac

SEQ ID NO: 10114 - DNA, 22 bp, Artificial Sequence
  chemically synthesized
aggaaacaaaagtattaagcac

SEQ ID NO: 10115 - DNA, 22 bp, Artificial Sequence
  chemically synthesized
agcactttattatgcctttaac

SEQ ID NO: 10116 - DNA, 22 bp, Artificial Sequence
  chemically synthesized
tattatgcctttaacaggagaa

SEQ ID NO: 10117 - DNA, 22 bp, Artificial Sequence
  chemically synthesized
attatgcctttaacaggagaag

SEQ ID NO: 10118 - DNA, 22 bp, Artificial Sequence
  chemically synthesized
ttatgcctttaacaggagaagt

SEQ ID NO: 10119 - DNA, 22 bp, Artificial Sequence
  chemically synthesized
tgcctttaacaggagaagttct

SEQ ID NO: 10120 - DNA, 22 bp, Artificial Sequence
  chemically synthesized
taacaggagaagttctaattta

SEQ ID NO: 10121 - DNA, 22 bp, Artificial Sequence
  chemically synthesized
aacaggagaagttctaatttac

SEQ ID NO: 10122 - DNA, 22 bp, Artificial Sequence
  chemically synthesized
acaggagaagttctaatttaca

SEQ ID NO: 10123 - DNA, 22 bp, Artificial Sequence
  chemically synthesized
taatttacagatatgtataact

SEQ ID NO: 10124 - DNA, 22 bp, Artificial Sequence
  chemically synthesized
atttacagatatgtataactca

SEQ ID NO: 10125 - DNA, 22 bp, Artificial Sequence
  chemically synthesized
acagatatgtataactcaaata

SEQ ID NO: 10126 - DNA, 22 bp, Artificial Sequence
  chemically synthesized
cagatatgtataactcaaatag

SEQ ID NO: 10127 - DNA, 22 bp, Artificial Sequence
  chemically synthesized
aaatagaaactacgtttccttt

SEQ ID NO: 10128 - DNA, 22 bp, Artificial Sequence
  chemically synthesized
cgtttcctttaactagtttcta

SEQ ID NO: 10129 - DNA, 22 bp, Artificial Sequence
  chemically synthesized
cctttaactagtttctatattt

SEQ ID NO: 10130 - DNA, 22 bp, Artificial Sequence
  chemically synthesized
ctttaactagtttctatattta

SEQ ID NO: 10131 - DNA, 22 bp, Artificial Sequence
  chemically synthesized
taactagtttctatatttaaat

SEQ ID NO: 10132 - DNA, 22 bp, Artificial Sequence
  chemically synthesized
aactagtttctatatttaaata

SEQ ID NO: 10133 - DNA, 22 bp, Artificial Sequence
  chemically synthesized
actagtttctatatttaaatac

SEQ ID NO: 10134 - DNA, 22 bp, Artificial Sequence
  chemically synthesized
gtttctatatttaaatactatc

SEQ ID NO: 10135 - DNA, 22 bp, Artificial Sequence
  chemically synthesized
ctatatttaaatactatcattc

SEQ ID NO: 10136 - DNA, 22 bp, Artificial Sequence
  chemically synthesized
tatatttaaatactatcattct

SEQ ID NO: 10137 - DNA, 22 bp, Artificial Sequence
  chemically synthesized
tatttaaatactatcattctga

SEQ ID NO: 10138 - DNA, 22 bp, Artificial Sequence
  chemically synthesized
aaatactatcattctgagttca

SEQ ID NO: 10139 - DNA, 22 bp, Artificial Sequence
  chemically synthesized
aatactatcattctgagttcat

SEQ ID NO: 10140 - DNA, 22 bp, Artificial Sequence
  chemically synthesized
tcattctgagttcatagcagca

SEQ ID NO: 10141 - DNA, 22 bp, Artificial Sequence
  chemically synthesized
tgagttcatagcagcacattat

SEQ ID NO: 10142 - DNA, 22 bp, Artificial Sequence
  chemically synthesized
agttcatagcagcacattattg

SEQ ID NO: 10143 - DNA, 22 bp, Artificial Sequence
  chemically synthesized
atagcagcacattattgaaaat

SEQ ID NO: 10144 - DNA, 22 bp, Artificial Sequence
  chemically synthesized
ttgaaaatgcacaaaagcctaa

SEQ ID NO: 10145 - DNA, 22 bp, Artificial Sequence
  chemically synthesized
aaaatgcacaaaagcctaatat

SEQ ID NO: 10146 - DNA, 22 bp, Artificial Sequence
  chemically synthesized
atataacttgtatttgcaacaa

SEQ ID NO: 10147 - DNA, 22 bp, Artificial Sequence
  chemically synthesized
gtatttgcaacaatttttaaat

SEQ ID NO: 10148 - DNA, 22 bp, Artificial Sequence
  chemically synthesized
tatttgcaacaatttttaaatt

SEQ ID NO: 10149 - DNA, 22 bp, Artificial Sequence
  chemically synthesized
gcaacaatttttaaattttttt

SEQ ID NO: 10150 - DNA, 22 bp, Artificial Sequence
  chemically synthesized
caacaatttttaaattttttta

SEQ ID NO: 10151 - DNA, 22 bp, Artificial Sequence
  chemically synthesized
ttaaatttttttatttcatttt

SEQ ID NO: 10152 - DNA, 22 bp, Artificial Sequence
  chemically synthesized
taaatttttttatttcattttg

SEQ ID NO: 10153 - DNA, 22 bp, Artificial Sequence
  chemically synthesized
aaatttttttatttcattttgc

SEQ ID NO: 10154 - DNA, 22 bp, Artificial Sequence
  chemically synthesized
aatttttttatttcattttgcc

SEQ ID NO: 10155 - DNA, 22 bp, Artificial Sequence
  chemically synthesized
ttttatttcattttgccgtggc

SEQ ID NO: 10156 - DNA, 22 bp, Artificial Sequence
  chemically synthesized
tttatttcattttgccgtggct

SEQ ID NO: 10157 - DNA, 22 bp, Artificial Sequence
  chemically synthesized
ttatttcattttgccgtggcta

SEQ ID NO: 10158 - DNA, 22 bp, Artificial Sequence
  chemically synthesized
tatttcattttgccgtggctac

SEQ ID NO: 10159 - DNA, 22 bp, Artificial Sequence
  chemically synthesized
atttcattttgccgtggctaca

SEQ ID NO: 10160 - DNA, 22 bp, Artificial Sequence
  chemically synthesized
tttcattttgccgtggctacat

SEQ ID NO: 10161 - DNA, 22 bp, Artificial Sequence
  chemically synthesized
cattttgccgtggctacatcct

SEQ ID NO: 10162 - DNA, 22 bp, Artificial Sequence
  chemically synthesized
attttgccgtggctacatcctc

SEQ ID NO: 10163 - DNA, 22 bp, Artificial Sequence
  chemically synthesized
tgccgtggctacatcctcaaga

SEQ ID NO: 10164 - DNA, 22 bp, Artificial Sequence
  chemically synthesized
gccgtggctacatcctcaagaa

SEQ ID NO: 10165 - DNA, 22 bp, Artificial Sequence
  chemically synthesized
ccgtggctacatcctcaagaaa

SEQ ID NO: 10166 - DNA, 22 bp, Artificial Sequence
  chemically synthesized
catcctcaagaaagtagtcact

SEQ ID NO: 10167 - DNA, 22 bp, Artificial Sequence
  chemically synthesized
aagaaagtagtcactatgagac

SEQ ID NO: 10168 - DNA, 22 bp, Artificial Sequence
  chemically synthesized
tgagacaatcacataaccatta

SEQ ID NO: 10169 - DNA, 22 bp, Artificial Sequence
  chemically synthesized
ggaaagctatttcttcacgtct

SEQ ID NO: 10170 - DNA, 22 bp, Artificial Sequence
  chemically synthesized
tttcttcacgtcttgggactat

SEQ ID NO: 10171 - DNA, 22 bp, Artificial Sequence
  chemically synthesized
cttcacgtcttgggactataat

SEQ ID NO: 10172 - DNA, 22 bp, Artificial Sequence
  chemically synthesized
ttcacgtcttgggactataatt

SEQ ID NO: 10173 - DNA, 22 bp, Artificial Sequence
  chemically synthesized
cacgtcttgggactataattga

SEQ ID NO: 10174 - DNA, 22 bp, Artificial Sequence
  chemically synthesized
acgtcttgggactataattgaa

SEQ ID NO: 10175 - DNA, 22 bp, Artificial Sequence
  chemically synthesized
gggactataattgaaataacaa

SEQ ID NO: 10176 - DNA, 22 bp, Artificial Sequence
  chemically synthesized
ggactataattgaaataacaat

SEQ ID NO: 10177 - DNA, 22 bp, Artificial Sequence
  chemically synthesized
taattgaaataacaataataga

SEQ ID NO: 10178 - DNA, 22 bp, Artificial Sequence
  chemically synthesized
aaataacaataatagattcaac

SEQ ID NO: 10179 - DNA, 22 bp, Artificial Sequence
  chemically synthesized
aacaaggtgaacaactttcttc

SEQ ID NO: 10180 - DNA, 22 bp, Artificial Sequence
  chemically synthesized
tcttccctttaagtattataaa

SEQ ID NO: 10181 - DNA, 22 bp, Artificial Sequence
  chemically synthesized
cttccctttaagtattataaat

SEQ ID NO: 10182 - DNA, 22 bp, Artificial Sequence
  chemically synthesized
ttccctttaagtattataaata

SEQ ID NO: 10183 - DNA, 22 bp, Artificial Sequence
  chemically synthesized
ccctttaagtattataaataat

SEQ ID NO: 10184 - DNA, 22 bp, Artificial Sequence
  chemically synthesized
cctttaagtattataaataatt

SEQ ID NO: 10185 - DNA, 22 bp, Artificial Sequence
  chemically synthesized
taagtattataaataattgcta

SEQ ID NO: 10186 - DNA, 22 bp, Artificial Sequence
  chemically synthesized
aagtattataaataattgctaa

SEQ ID NO: 10187 - DNA, 22 bp, Artificial Sequence
  chemically synthesized
agtattataaataattgctaat

SEQ ID NO: 10188 - DNA, 22 bp, Artificial Sequence
  chemically synthesized
taaataattgctaatttacatt

SEQ ID NO: 10189 - DNA, 22 bp, Artificial Sequence
  chemically synthesized
ctaatttacatttctctgtttt

SEQ ID NO: 10190 - DNA, 22 bp, Artificial Sequence
  chemically synthesized
atttacatttctctgttttgct

SEQ ID NO: 10191 - DNA, 22 bp, Artificial Sequence
  chemically synthesized
acatttctctgttttgctcctt

SEQ ID NO: 10192 - DNA, 22 bp, Artificial Sequence
  chemically synthesized
catttctctgttttgctccttg

SEQ ID NO: 10193 - DNA, 22 bp, Artificial Sequence
  chemically synthesized
ctctgttttgctccttgacagt

SEQ ID NO: 10194 - DNA, 22 bp, Artificial Sequence
  chemically synthesized
tctgttttgctccttgacagta

SEQ ID NO: 10195 - DNA, 22 bp, Artificial Sequence
  chemically synthesized
tgttttgctccttgacagtaga

SEQ ID NO: 10196 - DNA, 22 bp, Artificial Sequence
  chemically synthesized
ttttgctccttgacagtagact

SEQ ID NO: 10197 - DNA, 22 bp, Artificial Sequence
  chemically synthesized
tgctccttgacagtagactcaa

SEQ ID NO: 10198 - DNA, 22 bp, Artificial Sequence
  chemically synthesized
gctccttgacagtagactcaaa

SEQ ID NO: 10199 - DNA, 22 bp, Artificial Sequence
  chemically synthesized
ctccttgacagtagactcaaat

SEQ ID NO: 10200 - DNA, 22 bp, Artificial Sequence
  chemically synthesized
cttgacagtagactcaaataaa

SEQ ID NO: 10201 - DNA, 22 bp, Artificial Sequence
  chemically synthesized
gacagtagactcaaataaaaga

SEQ ID NO: 10202 - DNA, 22 bp, Artificial Sequence
  chemically synthesized
acagtagactcaaataaaagaa

SEQ ID NO: 10203 - DNA, 22 bp, Artificial Sequence
  chemically synthesized
aaataaaagaaaaatacaattt

SEQ ID NO: 10204 - DNA, 22 bp, Artificial Sequence
  chemically synthesized
ttttctaatatatattatatat

SEQ ID NO: 10205 - DNA, 22 bp, Artificial Sequence
  chemically synthesized
tttctaatatatattatatata

SEQ ID NO: 10206 - DNA, 22 bp, Artificial Sequence
  chemically synthesized
ttctaatatatattatatatag

SEQ ID NO: 10207 - DNA, 22 bp, Artificial Sequence
  chemically synthesized
tctaatatatattatatataga

SEQ ID NO: 10208 - DNA, 22 bp, Artificial Sequence
  chemically synthesized
ctaatatatattatatatagaa

SEQ ID NO: 10209 - DNA, 22 bp, Artificial Sequence
  chemically synthesized
taatatatattatatatagaaa

SEQ ID NO: 10210 - DNA, 22 bp, Artificial Sequence
  chemically synthesized
atatatattatatatagaaata

SEQ ID NO: 10211 - DNA, 22 bp, Artificial Sequence
  chemically synthesized
tatatagaaatatatatatttt

SEQ ID NO: 10212 - DNA, 22 bp, Artificial Sequence
  chemically synthesized
tagtacacatacataggaattg

SEQ ID NO: 10213 - DNA, 22 bp, Artificial Sequence
  chemically synthesized
agtacacatacataggaattgc

SEQ ID NO: 10214 - DNA, 22 bp, Artificial Sequence
  chemically synthesized
gtacacatacataggaattgct

SEQ ID NO: 10215 - DNA, 22 bp, Artificial Sequence
  chemically synthesized
cttaaatcctataagcttctta

SEQ ID NO: 10216 - DNA, 22 bp, Artificial Sequence
  chemically synthesized
aaatcctataagcttcttaaag

SEQ ID NO: 10217 - DNA, 22 bp, Artificial Sequence
  chemically synthesized
aatcctataagcttcttaaaga

SEQ ID NO: 10218 - DNA, 22 bp, Artificial Sequence
  chemically synthesized
taagcttcttaaagatgtttaa

SEQ ID NO: 10219 - DNA, 22 bp, Artificial Sequence
  chemically synthesized
cttaaagatgtttaaaattttt

SEQ ID NO: 10220 - DNA, 22 bp, Artificial Sequence
  chemically synthesized
ttaaagatgtttaaaatttttt

SEQ ID NO: 10221 - DNA, 22 bp, Artificial Sequence
  chemically synthesized
aaagatgtttaaaatttttttt

SEQ ID NO: 10222 - DNA, 22 bp, Artificial Sequence
  chemically synthesized
aagatgtttaaaattttttttc

SEQ ID NO: 10223 - DNA, 22 bp, Artificial Sequence
  chemically synthesized
aaaattttttttcaataaaatt

SEQ ID NO: 10224 - DNA, 22 bp, Artificial Sequence
  chemically synthesized
aaattttttttcaataaaattc

SEQ ID NO: 10225 - DNA, 22 bp, Artificial Sequence
  chemically synthesized
tttttcaataaaattcaaatct

SEQ ID NO: 10226 - DNA, 22 bp, Artificial Sequence
  chemically synthesized
ttttcaataaaattcaaatcta

SEQ ID NO: 10227 - DNA, 22 bp, Artificial Sequence
  chemically synthesized
tttcaataaaattcaaatctat

SEQ ID NO: 10228 - DNA, 22 bp, Artificial Sequence
  chemically synthesized
ttcaataaaattcaaatctatt

SEQ ID NO: 10229 - DNA, 22 bp, Artificial Sequence
  chemically synthesized
tcaataaaattcaaatctattt

SEQ ID NO: 10230 - DNA, 22 bp, Artificial Sequence
  chemically synthesized
caataaaattcaaatctattta

SEQ ID NO: 10231 - DNA, 22 bp, Artificial Sequence
  chemically synthesized
aataaaattcaaatctatttag

SEQ ID NO: 10232 - DNA, 22 bp, Artificial Sequence
  chemically synthesized
aaatctatttagttaaaaagaa

SEQ ID NO: 10233 - DNA, 22 bp, Artificial Sequence
  chemically synthesized
tttagttaaaaagaaatgatct

SEQ ID NO: 10234 - DNA, 22 bp, Artificial Sequence
  chemically synthesized
agttaaaaagaaatgatcttat

SEQ ID NO: 10235 - DNA, 22 bp, Artificial Sequence
  chemically synthesized
gttaaaaagaaatgatcttatt

SEQ ID NO: 10236 - DNA, 22 bp, Artificial Sequence
  chemically synthesized
aaaagaaatgatcttatttttg

SEQ ID NO: 10237 - DNA, 22 bp, Artificial Sequence
  chemically synthesized
atttttgatgtgcaacctgatt

SEQ ID NO: 10238 - DNA, 22 bp, Artificial Sequence
  chemically synthesized
tttttgatgtgcaacctgattt

SEQ ID NO: 10239 - DNA, 22 bp, Artificial Sequence
  chemically synthesized
ttgatgtgcaacctgatttaag

SEQ ID NO: 10240 - DNA, 22 bp, Artificial Sequence
  chemically synthesized
tgatgtgcaacctgatttaagc

SEQ ID NO: 10241 - DNA, 22 bp, Artificial Sequence
  chemically synthesized
gatgtgcaacctgatttaagca

SEQ ID NO: 10242 - DNA, 22 bp, Artificial Sequence
  chemically synthesized
atgtgcaacctgatttaagcat

SEQ ID NO: 10243 - DNA, 22 bp, Artificial Sequence
  chemically synthesized
atttaagcatgtgttaaaaaaa

SEQ ID NO: 10244 - DNA, 22 bp, Artificial Sequence
  chemically synthesized
aagcatgtgttaaaaaaaaaaa

SEQ ID NO: 10245 - DNA, 22 bp, Artificial Sequence
  chemically synthesized
agcatgtgttaaaaaaaaaaaa

SEQ ID NO: 10246 - DNA, 22 bp, Artificial Sequence
  chemically synthesized
aaaaaaaaaaagtcctgaggct

SEQ ID NO: 10247 - DNA, 22 bp, Artificial Sequence
  chemically synthesized
aggctagacatgtaggaacagg

SEQ ID NO: 10248 - DNA, 22 bp, Artificial Sequence
  chemically synthesized
gacatgtaggaacagggaccca

SEQ ID NO: 10249 - DNA, 22 bp, Artificial Sequence
  chemically synthesized
gaacacaaagggtattctatgg

SEQ ID NO: 10250 - DNA, 22 bp, Artificial Sequence
  chemically synthesized
tatggtgtttcactgatgatac

SEQ ID NO: 10251 - DNA, 22 bp, Artificial Sequence
  chemically synthesized
tggtgtttcactgatgatacta

SEQ ID NO: 10252 - DNA, 22 bp, Artificial Sequence
  chemically synthesized
cactgatgatactaactataaa

SEQ ID NO: 10253 - DNA, 22 bp, Artificial Sequence
  chemically synthesized
actgatgatactaactataaat

SEQ ID NO: 10254 - DNA, 22 bp, Artificial Sequence
  chemically synthesized
atgatactaactataaatccat

SEQ ID NO: 10255 - DNA, 22 bp, Artificial Sequence
  chemically synthesized
actataaatccataagacatat

SEQ ID NO: 10256 - DNA, 22 bp, Artificial Sequence
  chemically synthesized
taaatccataagacatatagtc

SEQ ID NO: 10257 - DNA, 22 bp, Artificial Sequence
  chemically synthesized
tgtgcagaactgtgtaaaggaa

SEQ ID NO: 10258 - DNA, 22 bp, Artificial Sequence
  chemically synthesized
tgtaaaggaagtcagtctctgg

SEQ ID NO: 10259 - DNA, 22 bp, Artificial Sequence
  chemically synthesized
tgggcatgtcaatatgagatac

SEQ ID NO: 10260 - DNA, 22 bp, Artificial Sequence
  chemically synthesized
ggcatgtcaatatgagatacat

SEQ ID NO: 10261 - DNA, 22 bp, Artificial Sequence
  chemically synthesized
aatgctaatatttaagatttgt

SEQ ID NO: 10262 - DNA, 22 bp, Artificial Sequence
  chemically synthesized
atatttaagatttgtctataaa

SEQ ID NO: 10263 - DNA, 22 bp, Artificial Sequence
  chemically synthesized
aagatttgtctataaagagtct

SEQ ID NO: 10264 - DNA, 22 bp, Artificial Sequence
  chemically synthesized
agatttgtctataaagagtctc

SEQ ID NO: 10265 - DNA, 22 bp, Artificial Sequence
  chemically synthesized
gtctataaagagtctcaaaaat

SEQ ID NO: 10266 - DNA, 22 bp, Artificial Sequence
  chemically synthesized
tctataaagagtctcaaaaatg

SEQ ID NO: 10267 - DNA, 22 bp, Artificial Sequence
  chemically synthesized
taaagagtctcaaaaatgattt

SEQ ID NO: 10268 - DNA, 22 bp, Artificial Sequence
  chemically synthesized
aaaaatgattttagaaaagtgg

SEQ ID NO: 10269 - DNA, 22 bp, Artificial Sequence
  chemically synthesized
tagaaaagtggtttcacttgtg

SEQ ID NO: 10270 - DNA, 22 bp, Artificial Sequence
  chemically synthesized
agaaaagtggtttcacttgtga

SEQ ID NO: 10271 - DNA, 22 bp, Artificial Sequence
  chemically synthesized
gaaaagtggtttcacttgtgat

SEQ ID NO: 10272 - DNA, 22 bp, Artificial Sequence
  chemically synthesized
cacttgtgataactagaaacta

SEQ ID NO: 10273 - DNA, 22 bp, Artificial Sequence
  chemically synthesized
acttgtgataactagaaactat

SEQ ID NO: 10274 - DNA, 22 bp, Artificial Sequence
  chemically synthesized
gtgataactagaaactatacct

SEQ ID NO: 10275 - DNA, 22 bp, Artificial Sequence
  chemically synthesized
tgataactagaaactatacctt

SEQ ID NO: 10276 - DNA, 22 bp, Artificial Sequence
  chemically synthesized
gaaactatacctttagcaggcc

SEQ ID NO: 10277 - DNA, 22 bp, Artificial Sequence
  chemically synthesized
tacctttagcaggccttgtaca

SEQ ID NO: 10278 - DNA, 22 bp, Artificial Sequence
  chemically synthesized
tagcaggccttgtacaaagagc

SEQ ID NO: 10279 - DNA, 22 bp, Artificial Sequence
  chemically synthesized
agcaggccttgtacaaagagcc

SEQ ID NO: 10280 - DNA, 22 bp, Artificial Sequence
  chemically synthesized
gcaggccttgtacaaagagccc

SEQ ID NO: 10281 - DNA, 22 bp, Artificial Sequence
  chemically synthesized
gtacaaagagccctgactcata

SEQ ID NO: 10282 - DNA, 22 bp, Artificial Sequence
  chemically synthesized
tacaaagagccctgactcatat

SEQ ID NO: 10283 - DNA, 22 bp, Artificial Sequence
  chemically synthesized
actcatatttaaatgatgattc

SEQ ID NO: 10284 - DNA, 22 bp, Artificial Sequence
  chemically synthesized
atatttaaatgatgattctgct

SEQ ID NO: 10285 - DNA, 22 bp, Artificial Sequence
  chemically synthesized
aaatgatgattctgcttcacat

SEQ ID NO: 10286 - DNA, 22 bp, Artificial Sequence
  chemically synthesized
aatgatgattctgcttcacata

SEQ ID NO: 10287 - DNA, 22 bp, Artificial Sequence
  chemically synthesized
tgcttcacataacctggagcat

SEQ ID NO: 10288 - DNA, 22 bp, Artificial Sequence
  chemically synthesized
cttcacataacctggagcattt

SEQ ID NO: 10289 - DNA, 22 bp, Artificial Sequence
  chemically synthesized
cacataacctggagcattttct

SEQ ID NO: 10290 - DNA, 22 bp, Artificial Sequence
  chemically synthesized
acataacctggagcattttctc

SEQ ID NO: 10291 - DNA, 22 bp, Artificial Sequence
  chemically synthesized
gagcattttctctctgctggag

SEQ ID NO: 10292 - DNA, 22 bp, Artificial Sequence
  chemically synthesized
tctctctgctggagtcagaaaa

SEQ ID NO: 10293 - DNA, 22 bp, Artificial Sequence
  chemically synthesized
ctctctgctggagtcagaaaaa

SEQ ID NO: 10294 - DNA, 22 bp, Artificial Sequence
  chemically synthesized
tctctgctggagtcagaaaaag

SEQ ID NO: 10295 - DNA, 22 bp, Artificial Sequence
  chemically synthesized
tctgctggagtcagaaaaaggc

SEQ ID NO: 10296 - DNA, 22 bp, Artificial Sequence
  chemically synthesized
tgctggagtcagaaaaaggcat

SEQ ID NO: 10297 - DNA, 22 bp, Artificial Sequence
  chemically synthesized
ctggagtcagaaaaaggcataa

SEQ ID NO: 10298 - DNA, 22 bp, Artificial Sequence
  chemically synthesized
gagtcagaaaaaggcataatgt

SEQ ID NO: 10299 - DNA, 22 bp, Artificial Sequence
  chemically synthesized
tgactatctataaaagaaaata

SEQ ID NO: 10300 - DNA, 22 bp, Artificial Sequence
  chemically synthesized
actatctataaaagaaaatatt

SEQ ID NO: 10301 - DNA, 22 bp, Artificial Sequence
  chemically synthesized
tctataaaagaaaatattttag

SEQ ID NO: 10302 - DNA, 22 bp, Artificial Sequence
  chemically synthesized
taaaagaaaatattttagcatt

SEQ ID NO: 10303 - DNA, 22 bp, Artificial Sequence
  chemically synthesized
tagcattaaaacatgaagtaaa

SEQ ID NO: 10304 - DNA, 22 bp, Artificial Sequence
  chemically synthesized
agcattaaaacatgaagtaaaa

SEQ ID NO: 10305 - DNA, 22 bp, Artificial Sequence
  chemically synthesized
gcattaaaacatgaagtaaaaa

SEQ ID NO: 10306 - DNA, 22 bp, Artificial Sequence
  chemically synthesized
aaacatgaagtaaaaagaccac

SEQ ID NO: 10307 - DNA, 22 bp, Artificial Sequence
  chemically synthesized
atttgcttatgaaagatatctg

SEQ ID NO: 10308 - DNA, 22 bp, Artificial Sequence
  chemically synthesized
gcttatgaaagatatctgaaat

SEQ ID NO: 10309 - DNA, 22 bp, Artificial Sequence
  chemically synthesized
cttatgaaagatatctgaaatt

SEQ ID NO: 10310 - DNA, 22 bp, Artificial Sequence
  chemically synthesized
atgaaagatatctgaaatttta

SEQ ID NO: 10311 - DNA, 22 bp, Artificial Sequence
  chemically synthesized
tgaaagatatctgaaattttaa

SEQ ID NO: 10312 - DNA, 22 bp, Artificial Sequence
  chemically synthesized
aaattttaattgttattatcaa

SEQ ID NO: 10313 - DNA, 22 bp, Artificial Sequence
  chemically synthesized
taattgttattatcaataaaac

SEQ ID NO: 10314 - DNA, 22 bp, Artificial Sequence
  chemically synthesized
aattgttattatcaataaaaca

SEQ ID NO: 10315 - DNA, 22 bp, Artificial Sequence
  chemically synthesized
attgttattatcaataaaacat

SEQ ID NO: 10316 - DNA, 22 bp, Artificial Sequence
  chemically synthesized
ttattatcaataaaacatatcc

SEQ ID NO: 10317 - DNA, 22 bp, Artificial Sequence
  chemically synthesized
ttatcaataaaacatatcctaa

SEQ ID NO: 10318 - DNA, 22 bp, Artificial Sequence
  chemically synthesized
tcaataaaacatatcctaagaa

SEQ ID NO: 10319 - DNA, 22 bp, Artificial Sequence
  chemically synthesized
agaaataagtattctttagtca

SEQ ID NO: 10320 - DNA, 22 bp, Artificial Sequence
  chemically synthesized
tttagtcacctggaatccatgg

SEQ ID NO: 10321 - DNA, 22 bp, Artificial Sequence
  chemically synthesized
tagtcacctggaatccatggga

SEQ ID NO: 10322 - DNA, 22 bp, Artificial Sequence
  chemically synthesized
agtcacctggaatccatgggat

SEQ ID NO: 10323 - DNA, 22 bp, Artificial Sequence
  chemically synthesized
gtcacctggaatccatgggatg

SEQ ID NO: 10324 - DNA, 22 bp, Artificial Sequence
  chemically synthesized
gaatccatgggatgtaacagtt

SEQ ID NO: 10325 - DNA, 22 bp, Artificial Sequence
  chemically synthesized
ttgcttaaaatagggattctgt

SEQ ID NO: 10326 - DNA, 22 bp, Artificial Sequence
  chemically synthesized
cttaaaatagggattctgtggt

SEQ ID NO: 10327 - DNA, 22 bp, Artificial Sequence
  chemically synthesized
aaaatagggattctgtggtcaa

SEQ ID NO: 10328 - DNA, 22 bp, Artificial Sequence
  chemically synthesized
aaatagggattctgtggtcaaa

SEQ ID NO: 10329 - DNA, 22 bp, Artificial Sequence
  chemically synthesized
tgtggtcaaataaatttagaaa

SEQ ID NO: 10330 - DNA, 22 bp, Artificial Sequence
  chemically synthesized
tggtcaaataaatttagaaaat

SEQ ID NO: 10331 - DNA, 22 bp, Artificial Sequence
  chemically synthesized
agaaaatgcttggtaaatttac

SEQ ID NO: 10332 - DNA, 22 bp, Artificial Sequence
  chemically synthesized
gaaaatgcttggtaaatttact

SEQ ID NO: 10333 - DNA, 22 bp, Artificial Sequence
  chemically synthesized
ggtaaatttactgtatggcatc

SEQ ID NO: 10334 - DNA, 22 bp, Artificial Sequence
  chemically synthesized
gtaaatttactgtatggcatct

SEQ ID NO: 10335 - DNA, 22 bp, Artificial Sequence
  chemically synthesized
actgtatggcatctcaaaacct

SEQ ID NO: 10336 - DNA, 22 bp, Artificial Sequence
  chemically synthesized
ctgtatggcatctcaaaacctt

SEQ ID NO: 10337 - DNA, 22 bp, Artificial Sequence
  chemically synthesized
tatggcatctcaaaacctttaa

SEQ ID NO: 10338 - DNA, 22 bp, Artificial Sequence
  chemically synthesized
aaaacctttaacatttggctac

SEQ ID NO: 10339 - DNA, 22 bp, Artificial Sequence
  chemically synthesized
taacatttggctacatactgtg

SEQ ID NO: 10340 - DNA, 22 bp, Artificial Sequence
  chemically synthesized
aacatttggctacatactgtga

SEQ ID NO: 10341 - DNA, 22 bp, Artificial Sequence
  chemically synthesized
acatttggctacatactgtgac

SEQ ID NO: 10342 - DNA, 22 bp, Artificial Sequence
  chemically synthesized
ggctacatactgtgactcttca

SEQ ID NO: 10343 - DNA, 22 bp, Artificial Sequence
  chemically synthesized
gctacatactgtgactcttcag

SEQ ID NO: 10344 - DNA, 22 bp, Artificial Sequence
  chemically synthesized
catactgtgactcttcaggtga

SEQ ID NO: 10345 - DNA, 22 bp, Artificial Sequence
  chemically synthesized
tgactcttcaggtgaattatat

SEQ ID NO: 10346 - DNA, 22 bp, Artificial Sequence
  chemically synthesized
ttcaggtgaattatatcatctg

SEQ ID NO: 10347 - DNA, 22 bp, Artificial Sequence
  chemically synthesized
caggtgaattatatcatctgca

SEQ ID NO: 10348 - DNA, 22 bp, Artificial Sequence
  chemically synthesized
aggtgaattatatcatctgcag

SEQ ID NO: 10349 - DNA, 22 bp, Artificial Sequence
  chemically synthesized
tatcatctgcagactttctcag

SEQ ID NO: 10350 - DNA, 22 bp, Artificial Sequence
  chemically synthesized
cagactttctcagacttatttg

SEQ ID NO: 10351 - DNA, 22 bp, Artificial Sequence
  chemically synthesized
tctcagacttatttgaccatgc

SEQ ID NO: 10352 - DNA, 22 bp, Artificial Sequence
  chemically synthesized
ctcagacttatttgaccatgca

SEQ ID NO: 10353 - DNA, 22 bp, Artificial Sequence
  chemically synthesized
tcagacttatttgaccatgcaa

SEQ ID NO: 10354 - DNA, 22 bp, Artificial Sequence
  chemically synthesized
agacttatttgaccatgcaact

SEQ ID NO: 10355 - DNA, 22 bp, Artificial Sequence
  chemically synthesized
atttgaccatgcaacttttata

SEQ ID NO: 10356 - DNA, 22 bp, Artificial Sequence
  chemically synthesized
tttgaccatgcaacttttatag

SEQ ID NO: 10357 - DNA, 22 bp, Artificial Sequence
  chemically synthesized
gaccatgcaacttttatagctt

SEQ ID NO: 10358 - DNA, 22 bp, Artificial Sequence
  chemically synthesized
accatgcaacttttatagcttc

SEQ ID NO: 10359 - DNA, 22 bp, Artificial Sequence
  chemically synthesized
ttatagcttctgtttagtgggt

SEQ ID NO: 10360 - DNA, 22 bp, Artificial Sequence
  chemically synthesized
tatagcttctgtttagtgggtc

SEQ ID NO: 10361 - DNA, 22 bp, Artificial Sequence
  chemically synthesized
atagcttctgtttagtgggtct

SEQ ID NO: 10362 - DNA, 22 bp, Artificial Sequence
  chemically synthesized
tagcttctgtttagtgggtcta

SEQ ID NO: 10363 - DNA, 22 bp, Artificial Sequence
  chemically synthesized
ctgtttagtgggtctacacatg

SEQ ID NO: 10364 - DNA, 22 bp, Artificial Sequence
  chemically synthesized
tgtttagtgggtctacacatga

SEQ ID NO: 10365 - DNA, 22 bp, Artificial Sequence
  chemically synthesized
tttagtgggtctacacatgaaa

SEQ ID NO: 10366 - DNA, 22 bp, Artificial Sequence
  chemically synthesized
agtgggtctacacatgaaattc

SEQ ID NO: 10367 - DNA, 22 bp, Artificial Sequence
  chemically synthesized
gtgggtctacacatgaaattcg

SEQ ID NO: 10368 - DNA, 22 bp, Artificial Sequence
  chemically synthesized
cacatgaaattcgttgtaagaa

SEQ ID NO: 10369 - DNA, 22 bp, Artificial Sequence
  chemically synthesized
gttgtaagaaatatcaaagaat

SEQ ID NO: 10370 - DNA, 22 bp, Artificial Sequence
  chemically synthesized
taagaaatatcaaagaatgtcc

SEQ ID NO: 10371 - DNA, 22 bp, Artificial Sequence
  chemically synthesized
caaaaagaagagaattaattat

SEQ ID NO: 10372 - DNA, 22 bp, Artificial Sequence
  chemically synthesized
attattgaatttgatttaaaat

SEQ ID NO: 10373 - DNA, 22 bp, Artificial Sequence
  chemically synthesized
ttgaatttgatttaaaataagc

SEQ ID NO: 10374 - DNA, 22 bp, Artificial Sequence
  chemically synthesized
aatttgatttaaaataagcagg

SEQ ID NO: 10375 - DNA, 22 bp, Artificial Sequence
  chemically synthesized
gatttaaaataagcaggtcatt

SEQ ID NO: 10376 - DNA, 22 bp, Artificial Sequence
  chemically synthesized
atttaaaataagcaggtcattg

SEQ ID NO: 10377 - DNA, 22 bp, Artificial Sequence
  chemically synthesized
aaaataagcaggtcattgggtg

SEQ ID NO: 10378 - DNA, 22 bp, Artificial Sequence
  chemically synthesized
aaataagcaggtcattgggtgg

SEQ ID NO: 10379 - DNA, 22 bp, Artificial Sequence
  chemically synthesized
ggtgggatttagaaatctgatt

SEQ ID NO: 10380 - DNA, 22 bp, Artificial Sequence
  chemically synthesized
agaaatctgattctaataatat

SEQ ID NO: 10381 - DNA, 22 bp, Artificial Sequence
  chemically synthesized
gaaatctgattctaataatatt

SEQ ID NO: 10382 - DNA, 22 bp, Artificial Sequence
  chemically synthesized
attctaataatatttgacctac

SEQ ID NO: 10383 - DNA, 22 bp, Artificial Sequence
  chemically synthesized
taataatatttgacctacagct

SEQ ID NO: 10384 - DNA, 22 bp, Artificial Sequence
  chemically synthesized
ataatatttgacctacagctct

SEQ ID NO: 10385 - DNA, 22 bp, Artificial Sequence
  chemically synthesized
gacctacagctctattaggaaa

SEQ ID NO: 10386 - DNA, 22 bp, Artificial Sequence
  chemically synthesized
acctacagctctattaggaaaa

SEQ ID NO: 10387 - DNA, 22 bp, Artificial Sequence
  chemically synthesized
cagctctattaggaaaaataaa

SEQ ID NO: 10388 - DNA, 22 bp, Artificial Sequence
  chemically synthesized
tattaggaaaaataaaaaggca

SEQ ID NO: 10389 - DNA, 22 bp, Artificial Sequence
  chemically synthesized
ttaggaaaaataaaaaggcatg

SEQ ID NO: 10390 - DNA, 22 bp, Artificial Sequence
  chemically synthesized
ggaaaaataaaaaggcatgtaa

SEQ ID NO: 10391 - DNA, 22 bp, Artificial Sequence
  chemically synthesized
tcttgaaattcaaaccatatcc

SEQ ID NO: 10392 - DNA, 22 bp, Artificial Sequence
  chemically synthesized
gaaattcaaaccatatccacag

SEQ ID NO: 10393 - DNA, 22 bp, Artificial Sequence
  chemically synthesized
aaattcaaaccatatccacagt

SEQ ID NO: 10394 - DNA, 22 bp, Artificial Sequence
  chemically synthesized
aaaccatatccacagttattat

SEQ ID NO: 10395 - DNA, 22 bp, Artificial Sequence
  chemically synthesized
ttatgttaaaggagtggttttc

SEQ ID NO: 10396 - DNA, 22 bp, Artificial Sequence
  chemically synthesized
tgttaaaggagtggttttcaac

SEQ ID NO: 10397 - DNA, 22 bp, Artificial Sequence
  chemically synthesized
aaggagtggttttcaacctaga

SEQ ID NO: 10398 - DNA, 22 bp, Artificial Sequence
  chemically synthesized
tcaacctagagtggtggcaact

SEQ ID NO: 10399 - DNA, 22 bp, Artificial Sequence
  chemically synthesized
caacctagagtggtggcaactt

SEQ ID NO: 10400 - DNA, 22 bp, Artificial Sequence
  chemically synthesized
aacctagagtggtggcaacttc

SEQ ID NO: 10401 - DNA, 22 bp, Artificial Sequence
  chemically synthesized
gagtggtggcaacttctttctc

SEQ ID NO: 10402 - DNA, 22 bp, Artificial Sequence
  chemically synthesized
ctttctcaaattaaaacaagat

SEQ ID NO: 10403 - DNA, 22 bp, Artificial Sequence
  chemically synthesized
tttctcaaattaaaacaagata

SEQ ID NO: 10404 - DNA, 22 bp, Artificial Sequence
  chemically synthesized
tctcaaattaaaacaagataaa

SEQ ID NO: 10405 - DNA, 22 bp, Artificial Sequence
  chemically synthesized
ctcaaattaaaacaagataaaa

SEQ ID NO: 10406 - DNA, 22 bp, Artificial Sequence
  chemically synthesized
tcaaattaaaacaagataaaag

SEQ ID NO: 10407 - DNA, 22 bp, Artificial Sequence
  chemically synthesized
aaattaaaacaagataaaaggt

SEQ ID NO: 10408 - DNA, 22 bp, Artificial Sequence
  chemically synthesized
aaacaagataaaaggtaagcta

SEQ ID NO: 10409 - DNA, 22 bp, Artificial Sequence
  chemically synthesized
ttctccctcaagaggatggagg

SEQ ID NO: 10410 - DNA, 22 bp, Artificial Sequence
  chemically synthesized
tccctcaagaggatggaggatg

SEQ ID NO: 10411 - DNA, 22 bp, Artificial Sequence
  chemically synthesized
cctcaagaggatggaggatggg

SEQ ID NO: 10412 - DNA, 22 bp, Artificial Sequence
  chemically synthesized
aagaggatggaggatgggaaaa

SEQ ID NO: 10413 - DNA, 22 bp, Artificial Sequence
  chemically synthesized
aaaaaaaaaaaaaaaaacactc

SEQ ID NO: 10414 - DNA, 22 bp, Artificial Sequence
  chemically synthesized
aaaaaaaaaaaaaaaacactcc

SEQ ID NO: 10415 - DNA, 22 bp, Artificial Sequence
  chemically synthesized
caactatggagcctttctccct

SEQ ID NO: 10416 - DNA, 22 bp, Artificial Sequence
  chemically synthesized
tggagcctttctcccttcataa

SEQ ID NO: 10417 - DNA, 22 bp, Artificial Sequence
  chemically synthesized
tctcccttcataaagcagctcg

SEQ ID NO: 10418 - DNA, 22 bp, Artificial Sequence
  chemically synthesized
ctcccttcataaagcagctcgg

SEQ ID NO: 10419 - DNA, 22 bp, Artificial Sequence
  chemically synthesized
tcccttcataaagcagctcggc

SEQ ID NO: 10420 - DNA, 22 bp, Artificial Sequence
  chemically synthesized
ccttcataaagcagctcggcag

SEQ ID NO: 10421 - DNA, 22 bp, Artificial Sequence
  chemically synthesized
cataaagcagctcggcagtcac

SEQ ID NO: 10422 - DNA, 22 bp, Artificial Sequence
  chemically synthesized
ataaagcagctcggcagtcact

SEQ ID NO: 10423 - DNA, 22 bp, Artificial Sequence
  chemically synthesized
ggcagtcactctgtgcaaccta

SEQ ID NO: 10424 - DNA, 22 bp, Artificial Sequence
  chemically synthesized
tgtgcaacctaaggctttggag

SEQ ID NO: 10425 - DNA, 22 bp, Artificial Sequence
  chemically synthesized
tgcaacctaaggctttggagat

SEQ ID NO: 10426 - DNA, 22 bp, Artificial Sequence
  chemically synthesized
aggctttggagatcacagatgg

SEQ ID NO: 10427 - DNA, 22 bp, Artificial Sequence
  chemically synthesized
tggagatcacagatggaaagcc

SEQ ID NO: 10428 - DNA, 22 bp, Artificial Sequence
  chemically synthesized
ggagatcacagatggaaagcca

SEQ ID NO: 10429 - DNA, 22 bp, Artificial Sequence
  chemically synthesized
gagatcacagatggaaagccac

SEQ ID NO: 10430 - DNA, 22 bp, Artificial Sequence
  chemically synthesized
tttgaggtaacagaaggaataa

SEQ ID NO: 10431 - DNA, 22 bp, Artificial Sequence
  chemically synthesized
gaggtaacagaaggaataaggt

SEQ ID NO: 10432 - DNA, 22 bp, Artificial Sequence
  chemically synthesized
aggtaacagaaggaataaggtc

SEQ ID NO: 10433 - DNA, 22 bp, Artificial Sequence
  chemically synthesized
gttcgtagatgcaatataatga

SEQ ID NO: 10434 - DNA, 22 bp, Artificial Sequence
  chemically synthesized
gtagatgcaatataatgacaca

SEQ ID NO: 10435 - DNA, 22 bp, Artificial Sequence
  chemically synthesized
agctctcataaatggttatatg

SEQ ID NO: 10436 - DNA, 22 bp, Artificial Sequence
  chemically synthesized
tcataaatggttatatgagaaa

SEQ ID NO: 10437 - DNA, 22 bp, Artificial Sequence
  chemically synthesized
ataaatggttatatgagaaata

SEQ ID NO: 10438 - DNA, 22 bp, Artificial Sequence
  chemically synthesized
tatgagaaatataaattaaggc

SEQ ID NO: 10439 - DNA, 22 bp, Artificial Sequence
  chemically synthesized
aggctcatgtaaatatacaaag

SEQ ID NO: 10440 - DNA, 22 bp, Artificial Sequence
  chemically synthesized
atgtaaatatacaaagtagctg

SEQ ID NO: 10441 - DNA, 22 bp, Artificial Sequence
  chemically synthesized
attacaaaaaaaaattatgaat

SEQ ID NO: 10442 - DNA, 22 bp, Artificial Sequence
  chemically synthesized
caaaaaaaaattatgaatatct

SEQ ID NO: 10443 - DNA, 22 bp, Artificial Sequence
  chemically synthesized
tgaatatctttgtaaagtatca

SEQ ID NO: 10444 - DNA, 22 bp, Artificial Sequence
  chemically synthesized
tgtaaagtatcatttccaacat

SEQ ID NO: 10445 - DNA, 22 bp, Artificial Sequence
  chemically synthesized
gtaaagtatcatttccaacata

SEQ ID NO: 10446 - DNA, 22 bp, Artificial Sequence
  chemically synthesized
taaagtatcatttccaacatat

SEQ ID NO: 10447 - DNA, 22 bp, Artificial Sequence
  chemically synthesized
ccaacatatttcctatgtaaaa

SEQ ID NO: 10448 - DNA, 22 bp, Artificial Sequence
  chemically synthesized
caacatatttcctatgtaaaac

SEQ ID NO: 10449 - DNA, 22 bp, Artificial Sequence
  chemically synthesized
cctatgtaaaactttttttaaa

SEQ ID NO: 10450 - DNA, 22 bp, Artificial Sequence
  chemically synthesized
ctatgtaaaactttttttaaaa

SEQ ID NO: 10451 - DNA, 22 bp, Artificial Sequence
  chemically synthesized
tgtaaaactttttttaaaaaat

SEQ ID NO: 10452 - DNA, 22 bp, Artificial Sequence
  chemically synthesized
tttttaaaaaattaggtttgct

SEQ ID NO: 10453 - DNA, 22 bp, Artificial Sequence
  chemically synthesized
ttttaaaaaattaggtttgctg

SEQ ID NO: 10454 - DNA, 22 bp, Artificial Sequence
  chemically synthesized
tttaaaaaattaggtttgctga

SEQ ID NO: 10455 - DNA, 22 bp, Artificial Sequence
  chemically synthesized
ttaaaaaattaggtttgctgaa

SEQ ID NO: 10456 - DNA, 22 bp, Artificial Sequence
  chemically synthesized
taaaaaattaggtttgctgaaa

SEQ ID NO: 10457 - DNA, 22 bp, Artificial Sequence
  chemically synthesized
aaaaaattaggtttgctgaaat

SEQ ID NO: 10458 - DNA, 22 bp, Artificial Sequence
  chemically synthesized
aaaaattaggtttgctgaaatt

SEQ ID NO: 10459 - DNA, 22 bp, Artificial Sequence
  chemically synthesized
ggtttgctgaaattgaaagata

SEQ ID NO: 10460 - DNA, 22 bp, Artificial Sequence
  chemically synthesized
gctgaaattgaaagatacacat

SEQ ID NO: 10461 - DNA, 22 bp, Artificial Sequence
  chemically synthesized
ctgaaattgaaagatacacata

SEQ ID NO: 10462 - DNA, 22 bp, Artificial Sequence
  chemically synthesized
aaattgaaagatacacatactt

SEQ ID NO: 10463 - DNA, 22 bp, Artificial Sequence
  chemically synthesized
aaagatacacatacttatctct

SEQ ID NO: 10464 - DNA, 22 bp, Artificial Sequence
  chemically synthesized
atctctgaactctttctaacta

SEQ ID NO: 10465 - DNA, 22 bp, Artificial Sequence
  chemically synthesized
tctctgaactctttctaactaa

SEQ ID NO: 10466 - DNA, 22 bp, Artificial Sequence
  chemically synthesized
tgaactctttctaactaatggt

SEQ ID NO: 10467 - DNA, 22 bp, Artificial Sequence
  chemically synthesized
aactctttctaactaatggtca

SEQ ID NO: 10468 - DNA, 22 bp, Artificial Sequence
  chemically synthesized
tttctaactaatggtcagtgaa

SEQ ID NO: 10469 - DNA, 22 bp, Artificial Sequence
  chemically synthesized
tctaactaatggtcagtgaaga

SEQ ID NO: 10470 - DNA, 22 bp, Artificial Sequence
  chemically synthesized
ctaactaatggtcagtgaagaa

SEQ ID NO: 10471 - DNA, 22 bp, Artificial Sequence
  chemically synthesized
taactaatggtcagtgaagaaa

SEQ ID NO: 10472 - DNA, 22 bp, Artificial Sequence
  chemically synthesized
actaatggtcagtgaagaaaag

SEQ ID NO: 10473 - DNA, 22 bp, Artificial Sequence
  chemically synthesized
atggtcagtgaagaaaagtgca

SEQ ID NO: 10474 - DNA, 22 bp, Artificial Sequence
  chemically synthesized
tagtttattagctaatgcttgg

SEQ ID NO: 10475 - DNA, 22 bp, Artificial Sequence
  chemically synthesized
agtttattagctaatgcttgga

SEQ ID NO: 10476 - DNA, 22 bp, Artificial Sequence
  chemically synthesized
gtttattagctaatgcttggaa

SEQ ID NO: 10477 - DNA, 22 bp, Artificial Sequence
  chemically synthesized
attagctaatgcttggaaatgt

SEQ ID NO: 10478 - DNA, 22 bp, Artificial Sequence
  chemically synthesized
ttagctaatgcttggaaatgta

SEQ ID NO: 10479 - DNA, 22 bp, Artificial Sequence
  chemically synthesized
gctaatgcttggaaatgtaact

SEQ ID NO: 10480 - DNA, 22 bp, Artificial Sequence
  chemically synthesized
atgcttggaaatgtaactgttc

SEQ ID NO: 10481 - DNA, 22 bp, Artificial Sequence
  chemically synthesized
ggaaatgtaactgttcattaat

SEQ ID NO: 10482 - DNA, 22 bp, Artificial Sequence
  chemically synthesized
gaaatgtaactgttcattaatc

SEQ ID NO: 10483 - DNA, 22 bp, Artificial Sequence
  chemically synthesized
ttcattaatccttaattaactc

SEQ ID NO: 10484 - DNA, 22 bp, Artificial Sequence
  chemically synthesized
attaatccttaattaactcaag

SEQ ID NO: 10485 - DNA, 22 bp, Artificial Sequence
  chemically synthesized
atccttaattaactcaagtagc

SEQ ID NO: 10486 - DNA, 22 bp, Artificial Sequence
  chemically synthesized
aattaactcaagtagcactgaa

SEQ ID NO: 10487 - DNA, 22 bp, Artificial Sequence
  chemically synthesized
attaactcaagtagcactgaag

SEQ ID NO: 10488 - DNA, 22 bp, Artificial Sequence
  chemically synthesized
actcaagtagcactgaaggaaa

SEQ ID NO: 10489 - DNA, 22 bp, Artificial Sequence
  chemically synthesized
aagtagcactgaaggaaagggt

SEQ ID NO: 10490 - DNA, 22 bp, Artificial Sequence
  chemically synthesized
aaggaaagggtcagaaacatta

SEQ ID NO: 10491 - DNA, 22 bp, Artificial Sequence
  chemically synthesized
ctgaataaagtataataatcaa

SEQ ID NO: 10492 - DNA, 22 bp, Artificial Sequence
  chemically synthesized
aataaagtataataatcaatga

SEQ ID NO: 10493 - DNA, 22 bp, Artificial Sequence
  chemically synthesized
aatcccaatagctccctagaag

SEQ ID NO: 10494 - DNA, 22 bp, Artificial Sequence
  chemically synthesized
atcccaatagctccctagaagg

SEQ ID NO: 10495 - DNA, 22 bp, Artificial Sequence
  chemically synthesized
cctagaagggacagatttagaa

SEQ ID NO: 10496 - DNA, 22 bp, Artificial Sequence
  chemically synthesized
gaagggacagatttagaaggaa

SEQ ID NO: 10497 - DNA, 22 bp, Artificial Sequence
  chemically synthesized
agaaggaaagcgaagacaatga

SEQ ID NO: 10498 - DNA, 22 bp, Artificial Sequence
  chemically synthesized
gaaggaaagcgaagacaatgaa

SEQ ID NO: 10499 - DNA, 22 bp, Artificial Sequence
  chemically synthesized
ctttggaactactaccaaaagt

SEQ ID NO: 10500 - DNA, 22 bp, Artificial Sequence
  chemically synthesized
tttggaactactaccaaaagta

SEQ ID NO: 10501 - DNA, 22 bp, Artificial Sequence
  chemically synthesized
tggaactactaccaaaagtaca

SEQ ID NO: 10502 - DNA, 22 bp, Artificial Sequence
  chemically synthesized
ggaactactaccaaaagtacat

SEQ ID NO: 10503 - DNA, 22 bp, Artificial Sequence
  chemically synthesized
gaactactaccaaaagtacatg

SEQ ID NO: 10504 - DNA, 22 bp, Artificial Sequence
  chemically synthesized
ctaccaaaagtacatgactatc

SEQ ID NO: 10505 - DNA, 22 bp, Artificial Sequence
  chemically synthesized
ccaaaagtacatgactatcttc

SEQ ID NO: 10506 - DNA, 22 bp, Artificial Sequence
  chemically synthesized
tcttcagatttgttaaagataa

SEQ ID NO: 10507 - DNA, 22 bp, Artificial Sequence
  chemically synthesized
cagatttgttaaagataacatt

SEQ ID NO: 10508 - DNA, 22 bp, Artificial Sequence
  chemically synthesized
agatttgttaaagataacattg

SEQ ID NO: 10509 - DNA, 22 bp, Artificial Sequence
  chemically synthesized
gttaaagataacattgggaaat

SEQ ID NO: 10510 - DNA, 22 bp, Artificial Sequence
  chemically synthesized
ttaaagataacattgggaaata

SEQ ID NO: 10511 - DNA, 22 bp, Artificial Sequence
  chemically synthesized
aagataacattgggaaatagaa

SEQ ID NO: 10512 - DNA, 22 bp, Artificial Sequence
  chemically synthesized
ggaaatagaagagtaatttttt

SEQ ID NO: 10513 - DNA, 22 bp, Artificial Sequence
  chemically synthesized
tttttatatatctgattttaat

SEQ ID NO: 10514 - DNA, 22 bp, Artificial Sequence
  chemically synthesized
ttttatatatctgattttaata

SEQ ID NO: 10515 - DNA, 22 bp, Artificial Sequence
  chemically synthesized
tttatatatctgattttaatat

SEQ ID NO: 10516 - DNA, 22 bp, Artificial Sequence
  chemically synthesized
ttatatatctgattttaatata

SEQ ID NO: 10517 - DNA, 22 bp, Artificial Sequence
  chemically synthesized
tatatatctgattttaatatat

SEQ ID NO: 10518 - DNA, 22 bp, Artificial Sequence
  chemically synthesized
atatatctgattttaatatatt

SEQ ID NO: 10519 - DNA, 22 bp, Artificial Sequence
  chemically synthesized
tatatctgattttaatatattc

SEQ ID NO: 10520 - DNA, 22 bp, Artificial Sequence
  chemically synthesized
attttaatatattctcaaaacc

SEQ ID NO: 10521 - DNA, 22 bp, Artificial Sequence
  chemically synthesized
taatatattctcaaaaccattt

SEQ ID NO: 10522 - DNA, 22 bp, Artificial Sequence
  chemically synthesized
aatatattctcaaaaccattta

SEQ ID NO: 10523 - DNA, 22 bp, Artificial Sequence
  chemically synthesized
atatattctcaaaaccatttat

SEQ ID NO: 10524 - DNA, 22 bp, Artificial Sequence
  chemically synthesized
tcaaaaccatttatacactact

SEQ ID NO: 10525 - DNA, 22 bp, Artificial Sequence
  chemically synthesized
aaaaccatttatacactactga

SEQ ID NO: 10526 - DNA, 22 bp, Artificial Sequence
  chemically synthesized
atacactactgacactggtatt

SEQ ID NO: 10527 - DNA, 22 bp, Artificial Sequence
  chemically synthesized
tacactactgacactggtattt

SEQ ID NO: 10528 - DNA, 22 bp, Artificial Sequence
  chemically synthesized
ctgacactggtatttccgagct

SEQ ID NO: 10529 - DNA, 22 bp, Artificial Sequence
  chemically synthesized
acactggtatttccgagctatc

SEQ ID NO: 10530 - DNA, 22 bp, Artificial Sequence
  chemically synthesized
gtatttccgagctatcaaaata

SEQ ID NO: 10531 - DNA, 22 bp, Artificial Sequence
  chemically synthesized
ccgagctatcaaaataaactga

SEQ ID NO: 10532 - DNA, 22 bp, Artificial Sequence
  chemically synthesized
cgagctatcaaaataaactgat

SEQ ID NO: 10533 - DNA, 22 bp, Artificial Sequence
  chemically synthesized
tcaaaataaactgataaatgat

SEQ ID NO: 10534 - DNA, 22 bp, Artificial Sequence
  chemically synthesized
ataaatgattcttactcagttt

SEQ ID NO: 10535 - DNA, 22 bp, Artificial Sequence
  chemically synthesized
ttactcagtttatttcaaactc

SEQ ID NO: 10536 - DNA, 22 bp, Artificial Sequence
  chemically synthesized
actcagtttatttcaaactcac

SEQ ID NO: 10537 - DNA, 22 bp, Artificial Sequence
  chemically synthesized
ctcagtttatttcaaactcact

SEQ ID NO: 10538 - DNA, 22 bp, Artificial Sequence
  chemically synthesized
agtttatttcaaactcactgtt

SEQ ID NO: 10539 - DNA, 22 bp, Artificial Sequence
  chemically synthesized
atttcaaactcactgttgccac

SEQ ID NO: 10540 - DNA, 22 bp, Artificial Sequence
  chemically synthesized
tttcaaactcactgttgccaca

SEQ ID NO: 10541 - DNA, 22 bp, Artificial Sequence
  chemically synthesized
caaactcactgttgccacaagg

SEQ ID NO: 10542 - DNA, 22 bp, Artificial Sequence
  chemically synthesized
aaactcactgttgccacaaggt

SEQ ID NO: 10543 - DNA, 22 bp, Artificial Sequence
  chemically synthesized
actgttgccacaaggtgtctta

SEQ ID NO: 10544 - DNA, 22 bp, Artificial Sequence
  chemically synthesized
ttgccacaaggtgtcttagcaa

SEQ ID NO: 10545 - DNA, 22 bp, Artificial Sequence
  chemically synthesized
ccacaaggtgtcttagcaattt

SEQ ID NO: 10546 - DNA, 22 bp, Artificial Sequence
  chemically synthesized
agcaatttgatgagattacatt

SEQ ID NO: 10547 - DNA, 22 bp, Artificial Sequence
  chemically synthesized
gcaatttgatgagattacattg

SEQ ID NO: 10548 - DNA, 22 bp, Artificial Sequence
  chemically synthesized
gatgagattacattgcctcctt

SEQ ID NO: 10549 - DNA, 22 bp, Artificial Sequence
  chemically synthesized
atgagattacattgcctcctta

SEQ ID NO: 10550 - DNA, 22 bp, Artificial Sequence
  chemically synthesized
cattgcctccttatactactag

SEQ ID NO: 10551 - DNA, 22 bp, Artificial Sequence
  chemically synthesized
cctccttatactactagatcat

SEQ ID NO: 10552 - DNA, 22 bp, Artificial Sequence
  chemically synthesized
cttatactactagatcatttta

SEQ ID NO: 10553 - DNA, 22 bp, Artificial Sequence
  chemically synthesized
atactactagatcattttaatt

SEQ ID NO: 10554 - DNA, 22 bp, Artificial Sequence
  chemically synthesized
tactactagatcattttaattg

SEQ ID NO: 10555 - DNA, 22 bp, Artificial Sequence
  chemically synthesized
ctagatcattttaattgcaacc

SEQ ID NO: 10556 - DNA, 22 bp, Artificial Sequence
  chemically synthesized
gatcattttaattgcaacctac

SEQ ID NO: 10557 - DNA, 22 bp, Artificial Sequence
  chemically synthesized
taattgcaacctaccatttaaa

SEQ ID NO: 10558 - DNA, 22 bp, Artificial Sequence
  chemically synthesized
aattgcaacctaccatttaaat

SEQ ID NO: 10559 - DNA, 22 bp, Artificial Sequence
  chemically synthesized
attgcaacctaccatttaaatg

SEQ ID NO: 10560 - DNA, 22 bp, Artificial Sequence
  chemically synthesized
caacctaccatttaaatgacaa

SEQ ID NO: 10561 - DNA, 22 bp, Artificial Sequence
  chemically synthesized
ccatttaaatgacaatccatga

SEQ ID NO: 10562 - DNA, 22 bp, Artificial Sequence
  chemically synthesized
aaatgacaatccatgatatatc

SEQ ID NO: 10563 - DNA, 22 bp, Artificial Sequence
  chemically synthesized
aatgacaatccatgatatatca

SEQ ID NO: 10564 - DNA, 22 bp, Artificial Sequence
  chemically synthesized
aaagagtcaaatcatttgctag

SEQ ID NO: 10565 - DNA, 22 bp, Artificial Sequence
  chemically synthesized
aagagtcaaatcatttgctaga

SEQ ID NO: 10566 - DNA, 22 bp, Artificial Sequence
  chemically synthesized
gctagattataaaataaactac

SEQ ID NO: 10567 - DNA, 22 bp, Artificial Sequence
  chemically synthesized
ctagattataaaataaactacc

SEQ ID NO: 10568 - DNA, 22 bp, Artificial Sequence
  chemically synthesized
gattataaaataaactacctta

SEQ ID NO: 10569 - DNA, 22 bp, Artificial Sequence
  chemically synthesized
taaaataaactaccttatttac

SEQ ID NO: 10570 - DNA, 22 bp, Artificial Sequence
  chemically synthesized
ccttatttactttctctgcact

SEQ ID NO: 10571 - DNA, 22 bp, Artificial Sequence
  chemically synthesized
atttactttctctgcactgcta

SEQ ID NO: 10572 - DNA, 22 bp, Artificial Sequence
  chemically synthesized
tttactttctctgcactgctac

SEQ ID NO: 10573 - DNA, 22 bp, Artificial Sequence
  chemically synthesized
actttctctgcactgctaccta

SEQ ID NO: 10574 - DNA, 22 bp, Artificial Sequence
  chemically synthesized
ctttctctgcactgctacctac

SEQ ID NO: 10575 - DNA, 22 bp, Artificial Sequence
  chemically synthesized
tctctgcactgctacctactac

SEQ ID NO: 10576 - DNA, 22 bp, Artificial Sequence
  chemically synthesized
ctctgcactgctacctactaca

SEQ ID NO: 10577 - DNA, 22 bp, Artificial Sequence
  chemically synthesized
tctgcactgctacctactacaa

SEQ ID NO: 10578 - DNA, 22 bp, Artificial Sequence
  chemically synthesized
tgcactgctacctactacaacg

SEQ ID NO: 10579 - DNA, 22 bp, Artificial Sequence
  chemically synthesized
cactgctacctactacaacgga

SEQ ID NO: 10580 - DNA, 22 bp, Artificial Sequence
  chemically synthesized
ctacctactacaacggaacagc

SEQ ID NO: 10581 - DNA, 22 bp, Artificial Sequence
  chemically synthesized
cctactacaacggaacagccac

SEQ ID NO: 10582 - DNA, 22 bp, Artificial Sequence
  chemically synthesized
ctacaacggaacagccacaggt

SEQ ID NO: 10583 - DNA, 22 bp, Artificial Sequence
  chemically synthesized
caacggaacagccacaggtttg

SEQ ID NO: 10584 - DNA, 22 bp, Artificial Sequence
  chemically synthesized
gcaagtgtgagctgatggcact

SEQ ID NO: 10585 - DNA, 22 bp, Artificial Sequence
  chemically synthesized
caagtgtgagctgatggcactg

SEQ ID NO: 10586 - DNA, 22 bp, Artificial Sequence
  chemically synthesized
atggcactgtaagttaaagaaa

SEQ ID NO: 10587 - DNA, 22 bp, Artificial Sequence
  chemically synthesized
taagttaaagaaaacagattaa

SEQ ID NO: 10588 - DNA, 22 bp, Artificial Sequence
  chemically synthesized
aagaaaacagattaaaaacatt

SEQ ID NO: 10589 - DNA, 22 bp, Artificial Sequence
  chemically synthesized
aaaacattgcctataaaacaat

SEQ ID NO: 10590 - DNA, 22 bp, Artificial Sequence
  chemically synthesized
cctataaaacaatttaacaaac

SEQ ID NO: 10591 - DNA, 22 bp, Artificial Sequence
  chemically synthesized
taaaacaatttaacaaactaaa

SEQ ID NO: 10592 - DNA, 22 bp, Artificial Sequence
  chemically synthesized
aacaaactaaaaacaaaaaaaa

SEQ ID NO: 10593 - DNA, 22 bp, Artificial Sequence
  chemically synthesized
acaaactaaaaacaaaaaaaag

SEQ ID NO: 10594 - DNA, 22 bp, Artificial Sequence
  chemically synthesized
aaaacaaaaaaaagtaggtgag

SEQ ID NO: 10595 - DNA, 22 bp, Artificial Sequence
  chemically synthesized
ttcaaataactcagaatagctt

SEQ ID NO: 10596 - DNA, 22 bp, Artificial Sequence
  chemically synthesized
caaataactcagaatagcttta

SEQ ID NO: 10597 - DNA, 22 bp, Artificial Sequence
  chemically synthesized
aaataactcagaatagctttat

SEQ ID NO: 10598 - DNA, 22 bp, Artificial Sequence
  chemically synthesized
agaatagctttatatgataaac

SEQ ID NO: 10599 - DNA, 22 bp, Artificial Sequence
  chemically synthesized
tatatgataaacaccgaagcta

SEQ ID NO: 10600 - DNA, 22 bp, Artificial Sequence
  chemically synthesized
atatgataaacaccgaagctat

SEQ ID NO: 10601 - DNA, 22 bp, Artificial Sequence
  chemically synthesized
tatgataaacaccgaagctata

SEQ ID NO: 10602 - DNA, 22 bp, Artificial Sequence
  chemically synthesized
taagcacaatgttatcttttat

SEQ ID NO: 10603 - DNA, 22 bp, Artificial Sequence
  chemically synthesized
tcttttatttgtataggaacct

SEQ ID NO: 10604 - DNA, 22 bp, Artificial Sequence
  chemically synthesized
ttatttgtataggaacctacat

SEQ ID NO: 10605 - DNA, 22 bp, Artificial Sequence
  chemically synthesized
tatttgtataggaacctacatt

SEQ ID NO: 10606 - DNA, 22 bp, Artificial Sequence
  chemically synthesized
atttgtataggaacctacattt

SEQ ID NO: 10607 - DNA, 22 bp, Artificial Sequence
  chemically synthesized
tttgtataggaacctacatttt

SEQ ID NO: 10608 - DNA, 22 bp, Artificial Sequence
  chemically synthesized
gtataggaacctacattttcta

SEQ ID NO: 10609 - DNA, 22 bp, Artificial Sequence
  chemically synthesized
tataggaacctacattttctag

SEQ ID NO: 10610 - DNA, 22 bp, Artificial Sequence
  chemically synthesized
cattttctagagacctttcaca

SEQ ID NO: 10611 - DNA, 22 bp, Artificial Sequence
  chemically synthesized
tctagagacctttcacagaaat

SEQ ID NO: 10612 - DNA, 22 bp, Artificial Sequence
  chemically synthesized
ctagagacctttcacagaaatt

SEQ ID NO: 10613 - DNA, 22 bp, Artificial Sequence
  chemically synthesized
tagagacctttcacagaaattt

SEQ ID NO: 10614 - DNA, 22 bp, Artificial Sequence
  chemically synthesized
gagacctttcacagaaattttc

SEQ ID NO: 10615 - DNA, 22 bp, Artificial Sequence
  chemically synthesized
tcacagaaattttcttattgag

SEQ ID NO: 10616 - DNA, 22 bp, Artificial Sequence
  chemically synthesized
cacagaaattttcttattgagc

SEQ ID NO: 10617 - DNA, 22 bp, Artificial Sequence
  chemically synthesized
acagaaattttcttattgagcc

SEQ ID NO: 10618 - DNA, 22 bp, Artificial Sequence
  chemically synthesized
tcttattgagccttaaaacagc

SEQ ID NO: 10619 - DNA, 22 bp, Artificial Sequence
  chemically synthesized
cttattgagccttaaaacagcc

SEQ ID NO: 10620 - DNA, 22 bp, Artificial Sequence
  chemically synthesized
ttattgagccttaaaacagccc

SEQ ID NO: 10621 - DNA, 22 bp, Artificial Sequence
  chemically synthesized
attgagccttaaaacagcccaa

SEQ ID NO: 10622 - DNA, 22 bp, Artificial Sequence
  chemically synthesized
ttgagccttaaaacagcccaat

SEQ ID NO: 10623 - DNA, 22 bp, Artificial Sequence
  chemically synthesized
agccttaaaacagcccaattag

SEQ ID NO: 10624 - DNA, 22 bp, Artificial Sequence
  chemically synthesized
aaaacagcccaattagtcagta

SEQ ID NO: 10625 - DNA, 22 bp, Artificial Sequence
  chemically synthesized
aaacagcccaattagtcagtat

SEQ ID NO: 10626 - DNA, 22 bp, Artificial Sequence
  chemically synthesized
gtcagtataatatcatttaatt

SEQ ID NO: 10627 - DNA, 22 bp, Artificial Sequence
  chemically synthesized
aattaatgtatttatttattga

SEQ ID NO: 10628 - DNA, 22 bp, Artificial Sequence
  chemically synthesized
attaatgtatttatttattgaa

SEQ ID NO: 10629 - DNA, 22 bp, Artificial Sequence
  chemically synthesized
atgtatttatttattgaaatac

SEQ ID NO: 10630 - DNA, 22 bp, Artificial Sequence
  chemically synthesized
atttattgaaataccatcattt

SEQ ID NO: 10631 - DNA, 22 bp, Artificial Sequence
  chemically synthesized
tttattgaaataccatcatttt

SEQ ID NO: 10632 - DNA, 22 bp, Artificial Sequence
  chemically synthesized
attgaaataccatcattttata

SEQ ID NO: 10633 - DNA, 22 bp, Artificial Sequence
  chemically synthesized
ttgaaataccatcattttatag

SEQ ID NO: 10634 - DNA, 22 bp, Artificial Sequence
  chemically synthesized
aaataccatcattttatagctg

SEQ ID NO: 10635 - DNA, 22 bp, Artificial Sequence
  chemically synthesized
tatagctgaagaaattgacatg

SEQ ID NO: 10636 - DNA, 22 bp, Artificial Sequence
  chemically synthesized
atagctgaagaaattgacatgt

SEQ ID NO: 10637 - DNA, 22 bp, Artificial Sequence
  chemically synthesized
tagctgaagaaattgacatgta

SEQ ID NO: 10638 - DNA, 22 bp, Artificial Sequence
  chemically synthesized
aagaaattgacatgtagagaga

SEQ ID NO: 10639 - DNA, 22 bp, Artificial Sequence
  chemically synthesized
acatgtagagagattaagtgac

SEQ ID NO: 10640 - DNA, 22 bp, Artificial Sequence
  chemically synthesized
agtgacttacttaaagtcaaat

SEQ ID NO: 10641 - DNA, 22 bp, Artificial Sequence
  chemically synthesized
acttaaagtcaaatgggattta

SEQ ID NO: 10642 - DNA, 22 bp, Artificial Sequence
  chemically synthesized
cttaaagtcaaatgggatttaa

SEQ ID NO: 10643 - DNA, 22 bp, Artificial Sequence
  chemically synthesized
aaagtcaaatgggatttaaaat

SEQ ID NO: 10644 - DNA, 22 bp, Artificial Sequence
  chemically synthesized
aagtcaaatgggatttaaaatg

SEQ ID NO: 10645 - DNA, 22 bp, Artificial Sequence
  chemically synthesized
aaaatgatgtatgaaaggctga

SEQ ID NO: 10646 - DNA, 22 bp, Artificial Sequence
  chemically synthesized
aaatgatgtatgaaaggctgac

SEQ ID NO: 10647 - DNA, 22 bp, Artificial Sequence
  chemically synthesized
acactgaacagatacaggacta

SEQ ID NO: 10648 - DNA, 22 bp, Artificial Sequence
  chemically synthesized
aacagatacaggactaaagtgc

SEQ ID NO: 10649 - DNA, 22 bp, Artificial Sequence
  chemically synthesized
aagtgcttctgattcaagccat

SEQ ID NO: 10650 - DNA, 22 bp, Artificial Sequence
  chemically synthesized
ctgattcaagccattaaggctc

SEQ ID NO: 10651 - DNA, 22 bp, Artificial Sequence
  chemically synthesized
tgattcaagccattaaggctct

SEQ ID NO: 10652 - DNA, 22 bp, Artificial Sequence
  chemically synthesized
attcaagccattaaggctctta

SEQ ID NO: 10653 - DNA, 22 bp, Artificial Sequence
  chemically synthesized
aagccattaaggctcttaggtt

SEQ ID NO: 10654 - DNA, 22 bp, Artificial Sequence
  chemically synthesized
aggctcttaggttaaacacact

SEQ ID NO: 10655 - DNA, 22 bp, Artificial Sequence
  chemically synthesized
ttaggttaaacacactcatgcc

SEQ ID NO: 10656 - DNA, 22 bp, Artificial Sequence
  chemically synthesized
aggttaaacacactcatgcctc

SEQ ID NO: 10657 - DNA, 22 bp, Artificial Sequence
  chemically synthesized
ggttaaacacactcatgcctct

SEQ ID NO: 10658 - DNA, 22 bp, Artificial Sequence
  chemically synthesized
aacacactcatgcctctgatac

SEQ ID NO: 10659 - DNA, 22 bp, Artificial Sequence
  chemically synthesized
atgcctctgatactccatcatg

SEQ ID NO: 10660 - DNA, 22 bp, Artificial Sequence
  chemically synthesized
tgatactccatcatgagcctaa

SEQ ID NO: 10661 - DNA, 22 bp, Artificial Sequence
  chemically synthesized
atactccatcatgagcctaaag

SEQ ID NO: 10662 - DNA, 22 bp, Artificial Sequence
  chemically synthesized
catcatgagcctaaaggaaaag

SEQ ID NO: 10663 - DNA, 22 bp, Artificial Sequence
  chemically synthesized
aaggaaaagactgtgaacataa

SEQ ID NO: 10664 - DNA, 22 bp, Artificial Sequence
  chemically synthesized
tgaacataaaagtgaatacttt

SEQ ID NO: 10665 - DNA, 22 bp, Artificial Sequence
  chemically synthesized
tatacttttacttctcttttat

SEQ ID NO: 10666 - DNA, 22 bp, Artificial Sequence
  chemically synthesized
atacttttacttctcttttatt

SEQ ID NO: 10667 - DNA, 22 bp, Artificial Sequence
  chemically synthesized
tacttttacttctcttttatta

SEQ ID NO: 10668 - DNA, 22 bp, Artificial Sequence
  chemically synthesized
ttacttctcttttattaaaagt

SEQ ID NO: 10669 - DNA, 22 bp, Artificial Sequence
  chemically synthesized
tacttctcttttattaaaagta

SEQ ID NO: 10670 - DNA, 22 bp, Artificial Sequence
  chemically synthesized
acttctcttttattaaaagtaa

SEQ ID NO: 10671 - DNA, 22 bp, Artificial Sequence
  chemically synthesized
cttctcttttattaaaagtaaa

SEQ ID NO: 10672 - DNA, 22 bp, Artificial Sequence
  chemically synthesized
ctcttttattaaaagtaaaatt

SEQ ID NO: 10673 - DNA, 22 bp, Artificial Sequence
  chemically synthesized
tcttttattaaaagtaaaattt

SEQ ID NO: 10674 - DNA, 22 bp, Artificial Sequence
  chemically synthesized
ttttattaaaagtaaaatttca

SEQ ID NO: 10675 - DNA, 22 bp, Artificial Sequence
  chemically synthesized
ttattaaaagtaaaatttcatg

SEQ ID NO: 10676 - DNA, 22 bp, Artificial Sequence
  chemically synthesized
tattaaaagtaaaatttcatga

SEQ ID NO: 10677 - DNA, 22 bp, Artificial Sequence
  chemically synthesized
attaaaagtaaaatttcatgaa

SEQ ID NO: 10678 - DNA, 22 bp, Artificial Sequence
  chemically synthesized
ttaaaagtaaaatttcatgaaa

SEQ ID NO: 10679 - DNA, 22 bp, Artificial Sequence
  chemically synthesized
aaagtaaaatttcatgaaaatc

SEQ ID NO: 10680 - DNA, 22 bp, Artificial Sequence
  chemically synthesized
catgaaaatctgtaactgtgaa

SEQ ID NO: 10681 - DNA, 22 bp, Artificial Sequence
  chemically synthesized
atgaaaatctgtaactgtgaag

SEQ ID NO: 10682 - DNA, 22 bp, Artificial Sequence
  chemically synthesized
taactgtgaagaaactttaaaa

SEQ ID NO: 10683 - DNA, 22 bp, Artificial Sequence
  chemically synthesized
tgaagaaactttaaaacagaat

SEQ ID NO: 10684 - DNA, 22 bp, Artificial Sequence
  chemically synthesized
taaaacagaatataagataata

SEQ ID NO: 10685 - DNA, 22 bp, Artificial Sequence
  chemically synthesized
aaaacagaatataagataatac

SEQ ID NO: 10686 - DNA, 22 bp, Artificial Sequence
  chemically synthesized
aaacagaatataagataataca

SEQ ID NO: 10687 - DNA, 22 bp, Artificial Sequence
  chemically synthesized
gtaaaggaactaacatgtaggc

SEQ ID NO: 10688 - DNA, 22 bp, Artificial Sequence
  chemically synthesized
acatgtaggcactcaacaaata

SEQ ID NO: 10689 - DNA, 22 bp, Artificial Sequence
  chemically synthesized
aacaaatactggctatttctag

SEQ ID NO: 10690 - DNA, 22 bp, Artificial Sequence
  chemically synthesized
gctatttctagaagaaatgtaa

SEQ ID NO: 10691 - DNA, 22 bp, Artificial Sequence
  chemically synthesized
tttctagaagaaatgtaaatag

SEQ ID NO: 10692 - DNA, 22 bp, Artificial Sequence
  chemically synthesized
ctagaagaaatgtaaataggaa

SEQ ID NO: 10693 - DNA, 22 bp, Artificial Sequence
  chemically synthesized
tagaagaaatgtaaataggaaa

SEQ ID NO: 10694 - DNA, 22 bp, Artificial Sequence
  chemically synthesized
gaagaaatgtaaataggaaatg

SEQ ID NO: 10695 - DNA, 22 bp, Artificial Sequence
  chemically synthesized
gctatgagctattattaagtgt

SEQ ID NO: 10696 - DNA, 22 bp, Artificial Sequence
  chemically synthesized
tgagctattattaagtgttttt

SEQ ID NO: 10697 - DNA, 22 bp, Artificial Sequence
  chemically synthesized
ttattaagtgtttttatgttcc

SEQ ID NO: 10698 - DNA, 22 bp, Artificial Sequence
  chemically synthesized
ttaagtgtttttatgttccagg

SEQ ID NO: 10699 - DNA, 22 bp, Artificial Sequence
  chemically synthesized
agtgtttttatgttccaggcac

SEQ ID NO: 10700 - DNA, 22 bp, Artificial Sequence
  chemically synthesized
ttatgttccaggcactgttcta

SEQ ID NO: 10701 - DNA, 22 bp, Artificial Sequence
  chemically synthesized
tatgttccaggcactgttctaa

SEQ ID NO: 10702 - DNA, 22 bp, Artificial Sequence
  chemically synthesized
atgttccaggcactgttctaag

SEQ ID NO: 10703 - DNA, 22 bp, Artificial Sequence
  chemically synthesized
tgttccaggcactgttctaagt

SEQ ID NO: 10704 - DNA, 22 bp, Artificial Sequence
  chemically synthesized
caggcactgttctaagtgcttt

SEQ ID NO: 10705 - DNA, 22 bp, Artificial Sequence
  chemically synthesized
ttctaagtgctttatattattt

SEQ ID NO: 10706 - DNA, 22 bp, Artificial Sequence
  chemically synthesized
taagtgctttatattatttatc

SEQ ID NO: 10707 - DNA, 22 bp, Artificial Sequence
  chemically synthesized
agtgctttatattatttatctt

SEQ ID NO: 10708 - DNA, 22 bp, Artificial Sequence
  chemically synthesized
tatattatttatcttactcaat

SEQ ID NO: 10709 - DNA, 22 bp, Artificial Sequence
  chemically synthesized
atattatttatcttactcaatg

SEQ ID NO: 10710 - DNA, 22 bp, Artificial Sequence
  chemically synthesized
tattatttatcttactcaatgc

SEQ ID NO: 10711 - DNA, 22 bp, Artificial Sequence
  chemically synthesized
tttatcttactcaatgcttata

SEQ ID NO: 10712 - DNA, 22 bp, Artificial Sequence
  chemically synthesized
atcttactcaatgcttataaca

SEQ ID NO: 10713 - DNA, 22 bp, Artificial Sequence
  chemically synthesized
tcttactcaatgcttataacaa

SEQ ID NO: 10714 - DNA, 22 bp, Artificial Sequence
  chemically synthesized
actcaatgcttataacaaccct

SEQ ID NO: 10715 - DNA, 22 bp, Artificial Sequence
  chemically synthesized
ctcaatgcttataacaacccta

SEQ ID NO: 10716 - DNA, 22 bp, Artificial Sequence
  chemically synthesized
aatgcttataacaaccctacac

SEQ ID NO: 10717 - DNA, 22 bp, Artificial Sequence
  chemically synthesized
ataacaaccctacacattaggt

SEQ ID NO: 10718 - DNA, 22 bp, Artificial Sequence
  chemically synthesized
taacaaccctacacattaggta

SEQ ID NO: 10719 - DNA, 22 bp, Artificial Sequence
  chemically synthesized
cacattaggtactattactatt

SEQ ID NO: 10720 - DNA, 22 bp, Artificial Sequence
  chemically synthesized
ggtactattactattattgcca

SEQ ID NO: 10721 - DNA, 22 bp, Artificial Sequence
  chemically synthesized
ttactattattgccattttaca

SEQ ID NO: 10722 - DNA, 22 bp, Artificial Sequence
  chemically synthesized
ctattattgccattttacagat

SEQ ID NO: 10723 - DNA, 22 bp, Artificial Sequence
  chemically synthesized
ttattgccattttacagatgag

SEQ ID NO: 10724 - DNA, 22 bp, Artificial Sequence
  chemically synthesized
ttgccattttacagatgaggaa

SEQ ID NO: 10725 - DNA, 22 bp, Artificial Sequence
  chemically synthesized
ccattttacagatgaggaaata

SEQ ID NO: 10726 - DNA, 22 bp, Artificial Sequence
  chemically synthesized
tacagatgaggaaataggtgta

SEQ ID NO: 10727 - DNA, 22 bp, Artificial Sequence
  chemically synthesized
acagatgaggaaataggtgtat

SEQ ID NO: 10728 - DNA, 22 bp, Artificial Sequence
  chemically synthesized
cagatgaggaaataggtgtata

SEQ ID NO: 10729 - DNA, 22 bp, Artificial Sequence
  chemically synthesized
aggcaccttgcccacgggtaca

SEQ ID NO: 10730 - DNA, 22 bp, Artificial Sequence
  chemically synthesized
gcccacgggtacacagcattaa

SEQ ID NO: 10731 - DNA, 22 bp, Artificial Sequence
  chemically synthesized
cccacgggtacacagcattaat

SEQ ID NO: 10732 - DNA, 22 bp, Artificial Sequence
  chemically synthesized
atccagggagtctggtttaagg

SEQ ID NO: 10733 - DNA, 22 bp, Artificial Sequence
  chemically synthesized
gtttaagggcacaaactcttaa

SEQ ID NO: 10734 - DNA, 22 bp, Artificial Sequence
  chemically synthesized
aagggcacaaactcttaagtac

SEQ ID NO: 10735 - DNA, 22 bp, Artificial Sequence
  chemically synthesized
agggcacaaactcttaagtact

SEQ ID NO: 10736 - DNA, 22 bp, Artificial Sequence
  chemically synthesized
ttaagtactaaactccactgct

SEQ ID NO: 10737 - DNA, 22 bp, Artificial Sequence
  chemically synthesized
aagtactaaactccactgctgg

SEQ ID NO: 10738 - DNA, 22 bp, Artificial Sequence
  chemically synthesized
agtactaaactccactgctgga

SEQ ID NO: 10739 - DNA, 22 bp, Artificial Sequence
  chemically synthesized
aactccactgctggatggaaaa

SEQ ID NO: 10740 - DNA, 22 bp, Artificial Sequence
  chemically synthesized
cactgctggatggaaaaagatc

SEQ ID NO: 10741 - DNA, 22 bp, Artificial Sequence
  chemically synthesized
ctggatggaaaaagatcagtat

SEQ ID NO: 10742 - DNA, 22 bp, Artificial Sequence
  chemically synthesized
gatggaaaaagatcagtataaa

SEQ ID NO: 10743 - DNA, 22 bp, Artificial Sequence
  chemically synthesized
tgttctacgcctaaataactta

SEQ ID NO: 10744 - DNA, 22 bp, Artificial Sequence
  chemically synthesized
gttctacgcctaaataacttaa

SEQ ID NO: 10745 - DNA, 22 bp, Artificial Sequence
  chemically synthesized
ttctacgcctaaataacttaag

SEQ ID NO: 10746 - DNA, 22 bp, Artificial Sequence
  chemically synthesized
tacgcctaaataacttaagttc

SEQ ID NO: 10747 - DNA, 22 bp, Artificial Sequence
  chemically synthesized
cgcctaaataacttaagttcat

SEQ ID NO: 10748 - DNA, 22 bp, Artificial Sequence
  chemically synthesized
aataacttaagttcatctacag

SEQ ID NO: 10749 - DNA, 22 bp, Artificial Sequence
  chemically synthesized
aagttcatctacagtacaactt

SEQ ID NO: 10750 - DNA, 22 bp, Artificial Sequence
  chemically synthesized
agttcatctacagtacaactta

SEQ ID NO: 10751 - DNA, 22 bp, Artificial Sequence
  chemically synthesized
atctacagtacaacttaatatg

SEQ ID NO: 10752 - DNA, 22 bp, Artificial Sequence
  chemically synthesized
cagtacaacttaatatgaaagg

SEQ ID NO: 10753 - DNA, 22 bp, Artificial Sequence
  chemically synthesized
aatatgaaaggattctgttagc

SEQ ID NO: 10754 - DNA, 22 bp, Artificial Sequence
  chemically synthesized
atatgaaaggattctgttagct

SEQ ID NO: 10755 - DNA, 22 bp, Artificial Sequence
  chemically synthesized
tgttagctttaatgagaagtaa

SEQ ID NO: 10756 - DNA, 22 bp, Artificial Sequence
  chemically synthesized
ttagctttaatgagaagtaaaa

SEQ ID NO: 10757 - DNA, 22 bp, Artificial Sequence
  chemically synthesized
gctttaatgagaagtaaaacaa

SEQ ID NO: 10758 - DNA, 22 bp, Artificial Sequence
  chemically synthesized
taatgagaagtaaaacaagaaa

SEQ ID NO: 10759 - DNA, 22 bp, Artificial Sequence
  chemically synthesized
aatgagaagtaaaacaagaaac

SEQ ID NO: 10760 - DNA, 22 bp, Artificial Sequence
  chemically synthesized
atgagaagtaaaacaagaaacc

SEQ ID NO: 10761 - DNA, 22 bp, Artificial Sequence
  chemically synthesized
cttgtctgggatggaaactcgg

SEQ ID NO: 10762 - DNA, 22 bp, Artificial Sequence
  chemically synthesized
ttgtctgggatggaaactcggt

SEQ ID NO: 10763 - DNA, 22 bp, Artificial Sequence
  chemically synthesized
gtctgggatggaaactcggttt

SEQ ID NO: 10764 - DNA, 22 bp, Artificial Sequence
  chemically synthesized
tctgggatggaaactcggtttc

SEQ ID NO: 10765 - DNA, 22 bp, Artificial Sequence
  chemically synthesized
ggatggaaactcggtttcttta

SEQ ID NO: 10766 - DNA, 22 bp, Artificial Sequence
  chemically synthesized
ggtttctttaaatagcaaatgg

SEQ ID NO: 10767 - DNA, 22 bp, Artificial Sequence
  chemically synthesized
ctttaaatagcaaatggaataa

SEQ ID NO: 10768 - DNA, 22 bp, Artificial Sequence
  chemically synthesized
tttaaatagcaaatggaataac

SEQ ID NO: 10769 - DNA, 22 bp, Artificial Sequence
  chemically synthesized
taaatagcaaatggaataacac

SEQ ID NO: 10770 - DNA, 22 bp, Artificial Sequence
  chemically synthesized
aaatagcaaatggaataacacc

SEQ ID NO: 10771 - DNA, 22 bp, Artificial Sequence
  chemically synthesized
aatagcaaatggaataacacca

SEQ ID NO: 10772 - DNA, 22 bp, Artificial Sequence
  chemically synthesized
aagcaacagttcaaatacgtaa

SEQ ID NO: 10773 - DNA, 22 bp, Artificial Sequence
  chemically synthesized
agcaacagttcaaatacgtaat

SEQ ID NO: 10774 - DNA, 22 bp, Artificial Sequence
  chemically synthesized
aaatacgtaatgtccctagaac

SEQ ID NO: 10775 - DNA, 22 bp, Artificial Sequence
  chemically synthesized
gaacaatctaagtagacagtct

SEQ ID NO: 10776 - DNA, 22 bp, Artificial Sequence
  chemically synthesized
agtagacagtctgttattttct

SEQ ID NO: 10777 - DNA, 22 bp, Artificial Sequence
  chemically synthesized
ttattttctttcttccaaatct

SEQ ID NO: 10778 - DNA, 22 bp, Artificial Sequence
  chemically synthesized
ttttctttcttccaaatcttgt

SEQ ID NO: 10779 - DNA, 22 bp, Artificial Sequence
  chemically synthesized
tctttcttccaaatcttgtcat

SEQ ID NO: 10780 - DNA, 22 bp, Artificial Sequence
  chemically synthesized
ctttcttccaaatcttgtcata

SEQ ID NO: 10781 - DNA, 22 bp, Artificial Sequence
  chemically synthesized
tttcttccaaatcttgtcatag

SEQ ID NO: 10782 - DNA, 22 bp, Artificial Sequence
  chemically synthesized
tcttccaaatcttgtcataggt

SEQ ID NO: 10783 - DNA, 22 bp, Artificial Sequence
  chemically synthesized
cttccaaatcttgtcataggtg

SEQ ID NO: 10784 - DNA, 22 bp, Artificial Sequence
  chemically synthesized
ttccaaatcttgtcataggtga

SEQ ID NO: 10785 - DNA, 22 bp, Artificial Sequence
  chemically synthesized
ccaaatcttgtcataggtgagc

SEQ ID NO: 10786 - DNA, 22 bp, Artificial Sequence
  chemically synthesized
caaatcttgtcataggtgagca

SEQ ID NO: 10787 - DNA, 22 bp, Artificial Sequence
  chemically synthesized
gtcataggtgagcataagatgg

SEQ ID NO: 10788 - DNA, 22 bp, Artificial Sequence
  chemically synthesized
tcataggtgagcataagatggt

SEQ ID NO: 10789 - DNA, 22 bp, Artificial Sequence
  chemically synthesized
cttcatccagcttttatgaaaa

SEQ ID NO: 10790 - DNA, 22 bp, Artificial Sequence
  chemically synthesized
catccagcttttatgaaaagaa

SEQ ID NO: 10791 - DNA, 22 bp, Artificial Sequence
  chemically synthesized
atccagcttttatgaaaagaaa

SEQ ID NO: 10792 - DNA, 22 bp, Artificial Sequence
  chemically synthesized
ttatgaaaagaaaaattcttac

SEQ ID NO: 10793 - DNA, 22 bp, Artificial Sequence
  chemically synthesized
tatgaaaagaaaaattcttact

SEQ ID NO: 10794 - DNA, 22 bp, Artificial Sequence
  chemically synthesized
atgaaaagaaaaattcttactt

SEQ ID NO: 10795 - DNA, 22 bp, Artificial Sequence
  chemically synthesized
tgaaaagaaaaattcttacttg

SEQ ID NO: 10796 - DNA, 22 bp, Artificial Sequence
  chemically synthesized
ttacttgagaagaaagccttca

SEQ ID NO: 10797 - DNA, 22 bp, Artificial Sequence
  chemically synthesized
acttgagaagaaagccttcatg

SEQ ID NO: 10798 - DNA, 22 bp, Artificial Sequence
  chemically synthesized
cttgagaagaaagccttcatga

SEQ ID NO: 10799 - DNA, 22 bp, Artificial Sequence
  chemically synthesized
gagaagaaagccttcatgacag

SEQ ID NO: 10800 - DNA, 22 bp, Artificial Sequence
  chemically synthesized
agaagaaagccttcatgacagc

SEQ ID NO: 10801 - DNA, 22 bp, Artificial Sequence
  chemically synthesized
catgacagctgtcaccaatatc

SEQ ID NO: 10802 - DNA, 22 bp, Artificial Sequence
  chemically synthesized
atgacagctgtcaccaatatca

SEQ ID NO: 10803 - DNA, 22 bp, Artificial Sequence
  chemically synthesized
tcaccaatatcatcatcattga

SEQ ID NO: 10804 - DNA, 22 bp, Artificial Sequence
  chemically synthesized
agtactgtatcagctatctaaa

SEQ ID NO: 10805 - DNA, 22 bp, Artificial Sequence
  chemically synthesized
tatcagctatctaaaatgcatc

SEQ ID NO: 10806 - DNA, 22 bp, Artificial Sequence
  chemically synthesized
tctaaaatgcatcaaaaaataa

SEQ ID NO: 10807 - DNA, 22 bp, Artificial Sequence
  chemically synthesized
aaatgcatcaaaaaataaaaaa

SEQ ID NO: 10808 - DNA, 22 bp, Artificial Sequence
  chemically synthesized
gtctggctgtaacatagtgttg

SEQ ID NO: 10809 - DNA, 22 bp, Artificial Sequence
  chemically synthesized
gctgtaacatagtgttgaaata

SEQ ID NO: 10810 - DNA, 22 bp, Artificial Sequence
  chemically synthesized
taacatagtgttgaaataacac

SEQ ID NO: 10811 - DNA, 22 bp, Artificial Sequence
  chemically synthesized
aaataacacttttaatatacaa

SEQ ID NO: 10812 - DNA, 22 bp, Artificial Sequence
  chemically synthesized
ttaatatacaagttttcggaag

SEQ ID NO: 10813 - DNA, 22 bp, Artificial Sequence
  chemically synthesized
taatatacaagttttcggaagt

SEQ ID NO: 10814 - DNA, 22 bp, Artificial Sequence
  chemically synthesized
aatatacaagttttcggaagtc

SEQ ID NO: 10815 - DNA, 22 bp, Artificial Sequence
  chemically synthesized
atatacaagttttcggaagtct

SEQ ID NO: 10816 - DNA, 22 bp, Artificial Sequence
  chemically synthesized
tcggaagtctggattcaatata

SEQ ID NO: 10817 - DNA, 22 bp, Artificial Sequence
  chemically synthesized
cggaagtctggattcaatataa

SEQ ID NO: 10818 - DNA, 22 bp, Artificial Sequence
  chemically synthesized
ggaagtctggattcaatataac

SEQ ID NO: 10819 - DNA, 22 bp, Artificial Sequence
  chemically synthesized
gattcaatataacacactgcct

SEQ ID NO: 10820 - DNA, 22 bp, Artificial Sequence
  chemically synthesized
aatataacacactgccttcatt

SEQ ID NO: 10821 - DNA, 22 bp, Artificial Sequence
  chemically synthesized
ccttcatttccgagaatcaaga

SEQ ID NO: 10822 - DNA, 22 bp, Artificial Sequence
  chemically synthesized
catttccgagaatcaagactcc

SEQ ID NO: 10823 - DNA, 22 bp, Artificial Sequence
  chemically synthesized
atttccgagaatcaagactccc

SEQ ID NO: 10824 - DNA, 22 bp, Artificial Sequence
  chemically synthesized
ccgagaatcaagactccccaaa

SEQ ID NO: 10825 - DNA, 22 bp, Artificial Sequence
  chemically synthesized
cgagaatcaagactccccaaaa

SEQ ID NO: 10826 - DNA, 22 bp, Artificial Sequence
  chemically synthesized
cccaaaaaacaatctctgtgca

SEQ ID NO: 10827 - DNA, 22 bp, Artificial Sequence
  chemically synthesized
tgtgcactaccataaacttcag

SEQ ID NO: 10828 - DNA, 22 bp, Artificial Sequence
  chemically synthesized
tgcactaccataaacttcagaa

SEQ ID NO: 10829 - DNA, 22 bp, Artificial Sequence
  chemically synthesized
ccataaacttcagaagaacaaa

SEQ ID NO: 10830 - DNA, 22 bp, Artificial Sequence
  chemically synthesized
cagaagaacaaatgtgaaagct

SEQ ID NO: 10831 - DNA, 22 bp, Artificial Sequence
  chemically synthesized
agaagaacaaatgtgaaagctg

SEQ ID NO: 10832 - DNA, 22 bp, Artificial Sequence
  chemically synthesized
gtcaagcaggttaaacaatttt

SEQ ID NO: 10833 - DNA, 22 bp, Artificial Sequence
  chemically synthesized
aacaatttttacaagaacaact

SEQ ID NO: 10834 - DNA, 22 bp, Artificial Sequence
  chemically synthesized
ttacaagaacaacttcctcttc

SEQ ID NO: 10835 - DNA, 22 bp, Artificial Sequence
  chemically synthesized
tacaagaacaacttcctcttct

SEQ ID NO: 10836 - DNA, 22 bp, Artificial Sequence
  chemically synthesized
acaagaacaacttcctcttctg

SEQ ID NO: 10837 - DNA, 22 bp, Artificial Sequence
  chemically synthesized
caagaacaacttcctcttctga

SEQ ID NO: 10838 - DNA, 22 bp, Artificial Sequence
  chemically synthesized
cctcttctgagctgtcagaatc

SEQ ID NO: 10839 - DNA, 22 bp, Artificial Sequence
  chemically synthesized
ctcttctgagctgtcagaatca

SEQ ID NO: 10840 - DNA, 22 bp, Artificial Sequence
  chemically synthesized
ttctgagctgtcagaatcagga

SEQ ID NO: 10841 - DNA, 22 bp, Artificial Sequence
  chemically synthesized
ctgagctgtcagaatcaggaga

SEQ ID NO: 10842 - DNA, 22 bp, Artificial Sequence
  chemically synthesized
tgagctgtcagaatcaggagac

SEQ ID NO: 10843 - DNA, 22 bp, Artificial Sequence
  chemically synthesized
agctgtcagaatcaggagacta

SEQ ID NO: 10844 - DNA, 22 bp, Artificial Sequence
  chemically synthesized
tcagaatcaggagactaaccta

SEQ ID NO: 10845 - DNA, 22 bp, Artificial Sequence
  chemically synthesized
acctaaatgacaaaatcagaaa

SEQ ID NO: 10846 - DNA, 22 bp, Artificial Sequence
  chemically synthesized
aatgacaaaatcagaaaacaac

SEQ ID NO: 10847 - DNA, 22 bp, Artificial Sequence
  chemically synthesized
cctaaaggtatctcttaacact

SEQ ID NO: 10848 - DNA, 22 bp, Artificial Sequence
  chemically synthesized
ctaaaggtatctcttaacactc

SEQ ID NO: 10849 - DNA, 22 bp, Artificial Sequence
  chemically synthesized
aaggtatctcttaacactcata

SEQ ID NO: 10850 - DNA, 22 bp, Artificial Sequence
  chemically synthesized
ttaacactcatagtgtgtgatt

SEQ ID NO: 10851 - DNA, 22 bp, Artificial Sequence
  chemically synthesized
aacactcatagtgtgtgattca

SEQ ID NO: 10852 - DNA, 22 bp, Artificial Sequence
  chemically synthesized
acactcatagtgtgtgattcaa

SEQ ID NO: 10853 - DNA, 22 bp, Artificial Sequence
  chemically synthesized
atagtgtgtgattcaaaacgtc

SEQ ID NO: 10854 - DNA, 22 bp, Artificial Sequence
  chemically synthesized
aaaacgtcctcaacaaatgatt

SEQ ID NO: 10855 - DNA, 22 bp, Artificial Sequence
  chemically synthesized
aacaaatgattaaggaaactaa

SEQ ID NO: 10856 - DNA, 22 bp, Artificial Sequence
  chemically synthesized
aggaaactaaatttgtgactac

SEQ ID NO: 10857 - DNA, 22 bp, Artificial Sequence
  chemically synthesized
aatttgtgactacaagtaaact

SEQ ID NO: 10858 - DNA, 22 bp, Artificial Sequence
  chemically synthesized
gtgactacaagtaaacttccat

SEQ ID NO: 10859 - DNA, 22 bp, Artificial Sequence
  chemically synthesized
tgactacaagtaaacttccatt

SEQ ID NO: 10860 - DNA, 22 bp, Artificial Sequence
  chemically synthesized
caagtaaacttccattaatggt

SEQ ID NO: 10861 - DNA, 22 bp, Artificial Sequence
  chemically synthesized
ccattaatggttactactttgg

SEQ ID NO: 10862 - DNA, 22 bp, Artificial Sequence
  chemically synthesized
cattaatggttactactttggc

SEQ ID NO: 10863 - DNA, 22 bp, Artificial Sequence
  chemically synthesized
atggttactactttggcacaca

SEQ ID NO: 10864 - DNA, 22 bp, Artificial Sequence
  chemically synthesized
ctactttggcacacagttttgt

SEQ ID NO: 10865 - DNA, 22 bp, Artificial Sequence
  chemically synthesized
ctttggcacacagttttgtttc

SEQ ID NO: 10866 - DNA, 22 bp, Artificial Sequence
  chemically synthesized
tggcacacagttttgtttcaaa

SEQ ID NO: 10867 - DNA, 22 bp, Artificial Sequence
  chemically synthesized
ggcacacagttttgtttcaaaa

SEQ ID NO: 10868 - DNA, 22 bp, Artificial Sequence
  chemically synthesized
gcacacagttttgtttcaaaag

SEQ ID NO: 10869 - DNA, 22 bp, Artificial Sequence
  chemically synthesized
tgtttcaaaagacactacatta

SEQ ID NO: 10870 - DNA, 22 bp, Artificial Sequence
  chemically synthesized
gtttcaaaagacactacattaa

SEQ ID NO: 10871 - DNA, 22 bp, Artificial Sequence
  chemically synthesized
tttcaaaagacactacattaaa

SEQ ID NO: 10872 - DNA, 22 bp, Artificial Sequence
  chemically synthesized
caaaagacactacattaaatat

SEQ ID NO: 10873 - DNA, 22 bp, Artificial Sequence
  chemically synthesized
aaaagacactacattaaatatt

SEQ ID NO: 10874 - DNA, 22 bp, Artificial Sequence
  chemically synthesized
cattaaatattaattgctccta

SEQ ID NO: 10875 - DNA, 22 bp, Artificial Sequence
  chemically synthesized
aatattaattgctcctataaga

SEQ ID NO: 10876 - DNA, 22 bp, Artificial Sequence
  chemically synthesized
attgctcctataagagctggga

SEQ ID NO: 10877 - DNA, 22 bp, Artificial Sequence
  chemically synthesized
ctcctataagagctgggatcct

SEQ ID NO: 10878 - DNA, 22 bp, Artificial Sequence
  chemically synthesized
ctataagagctgggatcctccc

SEQ ID NO: 10879 - DNA, 22 bp, Artificial Sequence
  chemically synthesized
taagagctgggatcctcccact

SEQ ID NO: 10880 - DNA, 22 bp, Artificial Sequence
  chemically synthesized
ggatcctcccacttttaggaat

SEQ ID NO: 10881 - DNA, 22 bp, Artificial Sequence
  chemically synthesized
ccacttttaggaattataaaag

SEQ ID NO: 10882 - DNA, 22 bp, Artificial Sequence
  chemically synthesized
ttaggaattataaaagtaatga

SEQ ID NO: 10883 - DNA, 22 bp, Artificial Sequence
  chemically synthesized
taggaattataaaagtaatgaa

SEQ ID NO: 10884 - DNA, 22 bp, Artificial Sequence
  chemically synthesized
aggaattataaaagtaatgaaa

SEQ ID NO: 10885 - DNA, 22 bp, Artificial Sequence
  chemically synthesized
ggaattataaaagtaatgaaat

SEQ ID NO: 10886 - DNA, 22 bp, Artificial Sequence
  chemically synthesized
taaaagtaatgaaataaacaaa

SEQ ID NO: 10887 - DNA, 22 bp, Artificial Sequence
  chemically synthesized
aattttgtcatcactgatcaaa

SEQ ID NO: 10888 - DNA, 22 bp, Artificial Sequence
  chemically synthesized
attttgtcatcactgatcaaaa

SEQ ID NO: 10889 - DNA, 22 bp, Artificial Sequence
  chemically synthesized
tgtcatcactgatcaaaaatgc

SEQ ID NO: 10890 - DNA, 22 bp, Artificial Sequence
  chemically synthesized
gtcatcactgatcaaaaatgcc

SEQ ID NO: 10891 - DNA, 22 bp, Artificial Sequence
  chemically synthesized
tcatcactgatcaaaaatgcct

SEQ ID NO: 10892 - DNA, 22 bp, Artificial Sequence
  chemically synthesized
atcaaaaatgcctctgttttgc

SEQ ID NO: 10893 - DNA, 22 bp, Artificial Sequence
  chemically synthesized
tgttttgccataaaatccagga

SEQ ID NO: 10894 - DNA, 22 bp, Artificial Sequence
  chemically synthesized
ttttgccataaaatccaggatt

SEQ ID NO: 10895 - DNA, 22 bp, Artificial Sequence
  chemically synthesized
tgccataaaatccaggattttg

SEQ ID NO: 10896 - DNA, 22 bp, Artificial Sequence
  chemically synthesized
gccataaaatccaggattttgt

SEQ ID NO: 10897 - DNA, 22 bp, Artificial Sequence
  chemically synthesized
ccataaaatccaggattttgtg

SEQ ID NO: 10898 - DNA, 22 bp, Artificial Sequence
  chemically synthesized
tgtgtgtgcttatttgctaaag

SEQ ID NO: 10899 - DNA, 22 bp, Artificial Sequence
  chemically synthesized
gtgtgtgcttatttgctaaagt

SEQ ID NO: 10900 - DNA, 22 bp, Artificial Sequence
  chemically synthesized
tgtgtgcttatttgctaaagtg

SEQ ID NO: 10901 - DNA, 22 bp, Artificial Sequence
  chemically synthesized
atttgctaaagtggctaatact

SEQ ID NO: 10902 - DNA, 22 bp, Artificial Sequence
  chemically synthesized
tttgctaaagtggctaatactg

SEQ ID NO: 10903 - DNA, 22 bp, Artificial Sequence
  chemically synthesized
gctaaagtggctaatactgtat

SEQ ID NO: 10904 - DNA, 22 bp, Artificial Sequence
  chemically synthesized
ctaaagtggctaatactgtatg

SEQ ID NO: 10905 - DNA, 22 bp, Artificial Sequence
  chemically synthesized
aagtggctaatactgtatgtga

SEQ ID NO: 10906 - DNA, 22 bp, Artificial Sequence
  chemically synthesized
atactgtatgtgaatagtatgt

SEQ ID NO: 10907 - DNA, 22 bp, Artificial Sequence
  chemically synthesized
tatgtgaatagtatgtatgaca

SEQ ID NO: 10908 - DNA, 22 bp, Artificial Sequence
  chemically synthesized
actattaaaattagaatattaa

SEQ ID NO: 10909 - DNA, 22 bp, Artificial Sequence
  chemically synthesized
ctattaaaattagaatattaat

SEQ ID NO: 10910 - DNA, 22 bp, Artificial Sequence
  chemically synthesized
ttaaaattagaatattaataat

SEQ ID NO: 10911 - DNA, 22 bp, Artificial Sequence
  chemically synthesized
aaattagaatattaataatata

SEQ ID NO: 10912 - DNA, 22 bp, Artificial Sequence
  chemically synthesized
gaatattaataatatacataat

SEQ ID NO: 10913 - DNA, 22 bp, Artificial Sequence
  chemically synthesized
ataatatacataataatactat

SEQ ID NO: 10914 - DNA, 22 bp, Artificial Sequence
  chemically synthesized
taaccccaaaaaactcataaag

SEQ ID NO: 10915 - DNA, 22 bp, Artificial Sequence
  chemically synthesized
ataaagtgtataattgctctca

SEQ ID NO: 10916 - DNA, 22 bp, Artificial Sequence
  chemically synthesized
ctctcatttaaacttacatcta

SEQ ID NO: 10917 - DNA, 22 bp, Artificial Sequence
  chemically synthesized
tcatttaaacttacatctattt

SEQ ID NO: 10918 - DNA, 22 bp, Artificial Sequence
  chemically synthesized
atttaaacttacatctatttct

SEQ ID NO: 10919 - DNA, 22 bp, Artificial Sequence
  chemically synthesized
aaacttacatctatttcttcag

SEQ ID NO: 10920 - DNA, 22 bp, Artificial Sequence
  chemically synthesized
aacttacatctatttcttcagg

SEQ ID NO: 10921 - DNA, 22 bp, Artificial Sequence
  chemically synthesized
acatctatttcttcaggaacac

SEQ ID NO: 10922 - DNA, 22 bp, Artificial Sequence
  chemically synthesized
catctatttcttcaggaacact

SEQ ID NO: 10923 - DNA, 22 bp, Artificial Sequence
  chemically synthesized
tttcttcaggaacactgtgtga

SEQ ID NO: 10924 - DNA, 22 bp, Artificial Sequence
  chemically synthesized
cttcaggaacactgtgtgattt

SEQ ID NO: 10925 - DNA, 22 bp, Artificial Sequence
  chemically synthesized
ttcaggaacactgtgtgatttc

SEQ ID NO: 10926 - DNA, 22 bp, Artificial Sequence
  chemically synthesized
caggaacactgtgtgatttcat

SEQ ID NO: 10927 - DNA, 22 bp, Artificial Sequence
  chemically synthesized
aggaacactgtgtgatttcata

SEQ ID NO: 10928 - DNA, 22 bp, Artificial Sequence
  chemically synthesized
tgtgatttcatagatgaaagca

SEQ ID NO: 10929 - DNA, 22 bp, Artificial Sequence
  chemically synthesized
catagatgaaagcagttccatt

SEQ ID NO: 10930 - DNA, 22 bp, Artificial Sequence
  chemically synthesized
atagatgaaagcagttccatta

SEQ ID NO: 10931 - DNA, 22 bp, Artificial Sequence
  chemically synthesized
cattacaggaatcacttctcca

SEQ ID NO: 10932 - DNA, 22 bp, Artificial Sequence
  chemically synthesized
caggaatcacttctccagtaag

SEQ ID NO: 10933 - DNA, 22 bp, Artificial Sequence
  chemically synthesized
ctccagtaagcattggaataat

SEQ ID NO: 10934 - DNA, 22 bp, Artificial Sequence
  chemically synthesized
tccagtaagcattggaataata

SEQ ID NO: 10935 - DNA, 22 bp, Artificial Sequence
  chemically synthesized
cagtaagcattggaataatact

SEQ ID NO: 10936 - DNA, 22 bp, Artificial Sequence
  chemically synthesized
gaataatactctgaccctgcac

SEQ ID NO: 10937 - DNA, 22 bp, Artificial Sequence
  chemically synthesized
tgaccctgcacaataaagtgac

SEQ ID NO: 10938 - DNA, 22 bp, Artificial Sequence
  chemically synthesized
accctgcacaataaagtgacat

SEQ ID NO: 10939 - DNA, 22 bp, Artificial Sequence
  chemically synthesized
cacaataaagtgacatgaagtg

SEQ ID NO: 10940 - DNA, 22 bp, Artificial Sequence
  chemically synthesized
ggcaataaaaaataaaaataac

SEQ ID NO: 10941 - DNA, 22 bp, Artificial Sequence
  chemically synthesized
tttgatgaaaatacttcgtaat

SEQ ID NO: 10942 - DNA, 22 bp, Artificial Sequence
  chemically synthesized
tgatgaaaatacttcgtaattt

SEQ ID NO: 10943 - DNA, 22 bp, Artificial Sequence
  chemically synthesized
gatgaaaatacttcgtaatttg

SEQ ID NO: 10944 - DNA, 22 bp, Artificial Sequence
  chemically synthesized
atgaaaatacttcgtaatttgt

SEQ ID NO: 10945 - DNA, 22 bp, Artificial Sequence
  chemically synthesized
cgtaatttgttcaaacacagta

SEQ ID NO: 10946 - DNA, 22 bp, Artificial Sequence
  chemically synthesized
gtaatttgttcaaacacagtat

SEQ ID NO: 10947 - DNA, 22 bp, Artificial Sequence
  chemically synthesized
gttcaaacacagtatcaaacaa

SEQ ID NO: 10948 - DNA, 22 bp, Artificial Sequence
  chemically synthesized
ttcaaacacagtatcaaacaag

SEQ ID NO: 10949 - DNA, 22 bp, Artificial Sequence
  chemically synthesized
aaacacagtatcaaacaagtct

SEQ ID NO: 10950 - DNA, 22 bp, Artificial Sequence
  chemically synthesized
ctacatgtctaaaggatttata

SEQ ID NO: 10951 - DNA, 22 bp, Artificial Sequence
  chemically synthesized
catgtctaaaggatttatatgc

SEQ ID NO: 10952 - DNA, 22 bp, Artificial Sequence
  chemically synthesized
aaggatttatatgcaatccaaa

SEQ ID NO: 10953 - DNA, 22 bp, Artificial Sequence
  chemically synthesized
atatgcaatccaaagctcactt

SEQ ID NO: 10954 - DNA, 22 bp, Artificial Sequence
  chemically synthesized
tatgcaatccaaagctcacttt

SEQ ID NO: 10955 - DNA, 22 bp, Artificial Sequence
  chemically synthesized
acttttattctttcttttcttt

SEQ ID NO: 10956 - DNA, 22 bp, Artificial Sequence
  chemically synthesized
ttattctttcttttcttttttt

SEQ ID NO: 10957 - DNA, 22 bp, Artificial Sequence
  chemically synthesized
tattctttcttttctttttttt

SEQ ID NO: 10958 - DNA, 22 bp, Artificial Sequence
  chemically synthesized
attctttcttttcttttttttt

SEQ ID NO: 10959 - DNA, 22 bp, Artificial Sequence
  chemically synthesized
ttctttcttttctttttttttt

SEQ ID NO: 10960 - DNA, 22 bp, Artificial Sequence
  chemically synthesized
tttcttttcttttttttttttt

SEQ ID NO: 10961 - DNA, 22 bp, Artificial Sequence
  chemically synthesized
tcttttctttttttttttttga

SEQ ID NO: 10962 - DNA, 22 bp, Artificial Sequence
  chemically synthesized
cttttctttttttttttttgag

SEQ ID NO: 10963 - DNA, 22 bp, Artificial Sequence
  chemically synthesized
ttttctttttttttttttgaga

SEQ ID NO: 10964 - DNA, 22 bp, Artificial Sequence
  chemically synthesized
ttctttttttttttttgagatg

SEQ ID NO: 10965 - DNA, 22 bp, Artificial Sequence
  chemically synthesized
tctttttttttttttgagatgg

SEQ ID NO: 10966 - DNA, 22 bp, Artificial Sequence
  chemically synthesized
ctttttttttttttgagatgga

SEQ ID NO: 10967 - DNA, 22 bp, Artificial Sequence
  chemically synthesized
tttttttttttttgagatggag

SEQ ID NO: 10968 - DNA, 22 bp, Artificial Sequence
  chemically synthesized
tttttttttttgagatggagtt

SEQ ID NO: 10969 - DNA, 22 bp, Artificial Sequence
  chemically synthesized
ttttttttttgagatggagttt

SEQ ID NO: 10970 - DNA, 22 bp, Artificial Sequence
  chemically synthesized
tttttttttgagatggagtttt

SEQ ID NO: 10971 - DNA, 22 bp, Artificial Sequence
  chemically synthesized
ttttttttgagatggagttttg

SEQ ID NO: 10972 - DNA, 22 bp, Artificial Sequence
  chemically synthesized
tttttttgagatggagttttgc

SEQ ID NO: 10973 - DNA, 22 bp, Artificial Sequence
  chemically synthesized
ttttttgagatggagttttgct

SEQ ID NO: 10974 - DNA, 22 bp, Artificial Sequence
  chemically synthesized
tttttgagatggagttttgctt

SEQ ID NO: 10975 - DNA, 22 bp, Artificial Sequence
  chemically synthesized
ttttgagatggagttttgcttt

SEQ ID NO: 10976 - DNA, 22 bp, Artificial Sequence
  chemically synthesized
tttgagatggagttttgctttc

SEQ ID NO: 10977 - DNA, 22 bp, Artificial Sequence
  chemically synthesized
ttgagatggagttttgctttca

SEQ ID NO: 10978 - DNA, 22 bp, Artificial Sequence
  chemically synthesized
tgagatggagttttgctttcat

SEQ ID NO: 10979 - DNA, 22 bp, Artificial Sequence
  chemically synthesized
gagatggagttttgctttcatt

SEQ ID NO: 10980 - DNA, 22 bp, Artificial Sequence
  chemically synthesized
agatggagttttgctttcattg

SEQ ID NO: 10981 - DNA, 22 bp, Artificial Sequence
  chemically synthesized
tgctttcattgctcaggctgga

SEQ ID NO: 10982 - DNA, 22 bp, Artificial Sequence
  chemically synthesized
gctttcattgctcaggctggag

SEQ ID NO: 10983 - DNA, 22 bp, Artificial Sequence
  chemically synthesized
ctttcattgctcaggctggagt

SEQ ID NO: 10984 - DNA, 22 bp, Artificial Sequence
  chemically synthesized
tcattgctcaggctggagtgca

SEQ ID NO: 10985 - DNA, 22 bp, Artificial Sequence
  chemically synthesized
cattgctcaggctggagtgcaa

SEQ ID NO: 10986 - DNA, 22 bp, Artificial Sequence
  chemically synthesized
attgctcaggctggagtgcaat

SEQ ID NO: 10987 - DNA, 22 bp, Artificial Sequence
  chemically synthesized
ctcaggctggagtgcaatggcg

SEQ ID NO: 10988 - DNA, 22 bp, Artificial Sequence
  chemically synthesized
aggctggagtgcaatggcgtga

SEQ ID NO: 10989 - DNA, 22 bp, Artificial Sequence
  chemically synthesized
gagtgcaatggcgtgatctcag

SEQ ID NO: 10990 - DNA, 22 bp, Artificial Sequence
  chemically synthesized
agctcactgcaacctctcctcc

SEQ ID NO: 10991 - DNA, 22 bp, Artificial Sequence
  chemically synthesized
actgcaacctctcctcccaggt

SEQ ID NO: 10992 - DNA, 22 bp, Artificial Sequence
  chemically synthesized
caacctctcctcccaggttcaa

SEQ ID NO: 10993 - DNA, 22 bp, Artificial Sequence
  chemically synthesized
tcctcccaggttcaagtgactc

SEQ ID NO: 10994 - DNA, 22 bp, Artificial Sequence
  chemically synthesized
ctcccaggttcaagtgactctc

SEQ ID NO: 10995 - DNA, 22 bp, Artificial Sequence
  chemically synthesized
ccaggttcaagtgactctcctg

SEQ ID NO: 10996 - DNA, 22 bp, Artificial Sequence
  chemically synthesized
aagtgactctcctgtctcatcc

SEQ ID NO: 10997 - DNA, 22 bp, Artificial Sequence
  chemically synthesized
tcctgtctcatcctcccaagta

SEQ ID NO: 10998 - DNA, 22 bp, Artificial Sequence
  chemically synthesized
ctgtctcatcctcccaagtagc

SEQ ID NO: 10999 - DNA, 22 bp, Artificial Sequence
  chemically synthesized
tctcatcctcccaagtagctgg

SEQ ID NO: 11000 - DNA, 22 bp, Artificial Sequence
  chemically synthesized
atcctcccaagtagctgggact

SEQ ID NO: 11001 - DNA, 22 bp, Artificial Sequence
  chemically synthesized
ccaagtagctgggactataggt

SEQ ID NO: 11002 - DNA, 22 bp, Artificial Sequence
  chemically synthesized
ggactataggtgccgccaccat

SEQ ID NO: 11003 - DNA, 22 bp, Artificial Sequence
  chemically synthesized
taggtgccgccaccatgcccgg

SEQ ID NO: 11004 - DNA, 22 bp, Artificial Sequence
  chemically synthesized
atttttgtatttttagtagaga

SEQ ID NO: 11005 - DNA, 22 bp, Artificial Sequence
  chemically synthesized
ttgtatttttagtagagacggg

SEQ ID NO: 11006 - DNA, 22 bp, Artificial Sequence
  chemically synthesized
tgtatttttagtagagacgggg

SEQ ID NO: 11007 - DNA, 22 bp, Artificial Sequence
  chemically synthesized
gtatttttagtagagacggggt

SEQ ID NO: 11008 - DNA, 22 bp, Artificial Sequence
  chemically synthesized
tatttttagtagagacggggtt

SEQ ID NO: 11009 - DNA, 22 bp, Artificial Sequence
  chemically synthesized
ttagtagagacggggtttcgcc

SEQ ID NO: 11010 - DNA, 22 bp, Artificial Sequence
  chemically synthesized
tagtagagacggggtttcgcca

SEQ ID NO: 11011 - DNA, 22 bp, Artificial Sequence
  chemically synthesized
agtagagacggggtttcgccat

SEQ ID NO: 11012 - DNA, 22 bp, Artificial Sequence
  chemically synthesized
gtagagacggggtttcgccatg

SEQ ID NO: 11013 - DNA, 22 bp, Artificial Sequence
  chemically synthesized
cgccatgttggccaggttggtg

SEQ ID NO: 11014 - DNA, 22 bp, Artificial Sequence
  chemically synthesized
gccatgttggccaggttggtgt

SEQ ID NO: 11015 - DNA, 22 bp, Artificial Sequence
  chemically synthesized
gccaggttggtgtcaaatttct

SEQ ID NO: 11016 - DNA, 22 bp, Artificial Sequence
  chemically synthesized
gtgtcaaatttctgaccatgcc

SEQ ID NO: 11017 - DNA, 22 bp, Artificial Sequence
  chemically synthesized
ctgaccatgcccggccctaaag

SEQ ID NO: 11018 - DNA, 22 bp, Artificial Sequence
  chemically synthesized
tgaccatgcccggccctaaagc

SEQ ID NO: 11019 - DNA, 22 bp, Artificial Sequence
  chemically synthesized
accatgcccggccctaaagctc

SEQ ID NO: 11020 - DNA, 22 bp, Artificial Sequence
  chemically synthesized
aagctcacttttattctttaga

SEQ ID NO: 11021 - DNA, 22 bp, Artificial Sequence
  chemically synthesized
acttttattctttagagagtat

SEQ ID NO: 11022 - DNA, 22 bp, Artificial Sequence
  chemically synthesized
ttattctttagagagtatggaa

SEQ ID NO: 11023 - DNA, 22 bp, Artificial Sequence
  chemically synthesized
tattctttagagagtatggaat

SEQ ID NO: 11024 - DNA, 22 bp, Artificial Sequence
  chemically synthesized
attctttagagagtatggaatc

SEQ ID NO: 11025 - DNA, 22 bp, Artificial Sequence
  chemically synthesized
ttctttagagagtatggaatca

SEQ ID NO: 11026 - DNA, 22 bp, Artificial Sequence
  chemically synthesized
tttagagagtatggaatcattg

SEQ ID NO: 11027 - DNA, 22 bp, Artificial Sequence
  chemically synthesized
tagagagtatggaatcattggt

SEQ ID NO: 11028 - DNA, 22 bp, Artificial Sequence
  chemically synthesized
agagagtatggaatcattggtt

SEQ ID NO: 11029 - DNA, 22 bp, Artificial Sequence
  chemically synthesized
gagagtatggaatcattggttt

SEQ ID NO: 11030 - DNA, 22 bp, Artificial Sequence
  chemically synthesized
gtttatcgtttactgttacatg

SEQ ID NO: 11031 - DNA, 22 bp, Artificial Sequence
  chemically synthesized
atcgtttactgttacatgcaat

SEQ ID NO: 11032 - DNA, 22 bp, Artificial Sequence
  chemically synthesized
tcgtttactgttacatgcaatg

SEQ ID NO: 11033 - DNA, 22 bp, Artificial Sequence
  chemically synthesized
actgttacatgcaatgattaag

SEQ ID NO: 11034 - DNA, 22 bp, Artificial Sequence
  chemically synthesized
ctgttacatgcaatgattaagt

SEQ ID NO: 11035 - DNA, 22 bp, Artificial Sequence
  chemically synthesized
ttacatgcaatgattaagtcat

SEQ ID NO: 11036 - DNA, 22 bp, Artificial Sequence
  chemically synthesized
catgcaatgattaagtcatcat

SEQ ID NO: 11037 - DNA, 22 bp, Artificial Sequence
  chemically synthesized
agtcatcatgcctcttttagaa

SEQ ID NO: 11038 - DNA, 22 bp, Artificial Sequence
  chemically synthesized
ttttagaaaagatctcctttaa

SEQ ID NO: 11039 - DNA, 22 bp, Artificial Sequence
  chemically synthesized
ttagaaaagatctcctttaaaa

SEQ ID NO: 11040 - DNA, 22 bp, Artificial Sequence
  chemically synthesized
tagaaaagatctcctttaaaat

SEQ ID NO: 11041 - DNA, 22 bp, Artificial Sequence
  chemically synthesized
agaaaagatctcctttaaaatt

SEQ ID NO: 11042 - DNA, 22 bp, Artificial Sequence
  chemically synthesized
gaaaagatctcctttaaaattt

SEQ ID NO: 11043 - DNA, 22 bp, Artificial Sequence
  chemically synthesized
ctttaaaatttgagataaaaaa

SEQ ID NO: 11044 - DNA, 22 bp, Artificial Sequence
  chemically synthesized
taaaatttgagataaaaaaaat

SEQ ID NO: 11045 - DNA, 22 bp, Artificial Sequence
  chemically synthesized
aaaatttgagataaaaaaaatt

SEQ ID NO: 11046 - DNA, 22 bp, Artificial Sequence
  chemically synthesized
aaatttgagataaaaaaaattt

SEQ ID NO: 11047 - DNA, 22 bp, Artificial Sequence
  chemically synthesized
gagataaaaaaaatttgttaaa

SEQ ID NO: 11048 - DNA, 22 bp, Artificial Sequence
  chemically synthesized
agataaaaaaaatttgttaaag

SEQ ID NO: 11049 - DNA, 22 bp, Artificial Sequence
  chemically synthesized
gttaaaggtcatcaatatattt

SEQ ID NO: 11050 - DNA, 22 bp, Artificial Sequence
  chemically synthesized
ttaaaggtcatcaatatatttc

SEQ ID NO: 11051 - DNA, 22 bp, Artificial Sequence
  chemically synthesized
aaggtcatcaatatatttcata

SEQ ID NO: 11052 - DNA, 22 bp, Artificial Sequence
  chemically synthesized
catatttaaaaatgaggaaaac

SEQ ID NO: 11053 - DNA, 22 bp, Artificial Sequence
  chemically synthesized
atatttaaaaatgaggaaaacc

SEQ ID NO: 11054 - DNA, 22 bp, Artificial Sequence
  chemically synthesized
aaaaatgaggaaaaccaagcac

SEQ ID NO: 11055 - DNA, 22 bp, Artificial Sequence
  chemically synthesized
aaaatgaggaaaaccaagcaca

SEQ ID NO: 11056 - DNA, 22 bp, Artificial Sequence
  chemically synthesized
tgaaatccttaccaaataggta

SEQ ID NO: 11057 - DNA, 22 bp, Artificial Sequence
  chemically synthesized
gaaatccttaccaaataggtaa

SEQ ID NO: 11058 - DNA, 22 bp, Artificial Sequence
  chemically synthesized
aaatccttaccaaataggtaag

SEQ ID NO: 11059 - DNA, 22 bp, Artificial Sequence
  chemically synthesized
accaaataggtaaggaaaactt

SEQ ID NO: 11060 - DNA, 22 bp, Artificial Sequence
  chemically synthesized
ccaaataggtaaggaaaacttg

SEQ ID NO: 11061 - DNA, 22 bp, Artificial Sequence
  chemically synthesized
gaatcaatacctaacctccata

SEQ ID NO: 11062 - DNA, 22 bp, Artificial Sequence
  chemically synthesized
aatcaatacctaacctccatac

SEQ ID NO: 11063 - DNA, 22 bp, Artificial Sequence
  chemically synthesized
acctccatactcataaaagtat

SEQ ID NO: 11064 - DNA, 22 bp, Artificial Sequence
  chemically synthesized
catactcataaaagtataatct

SEQ ID NO: 11065 - DNA, 22 bp, Artificial Sequence
  chemically synthesized
ataaaagtataatctacccaaa

SEQ ID NO: 11066 - DNA, 22 bp, Artificial Sequence
  chemically synthesized
cccaaatgcaaatcaaaatcag

SEQ ID NO: 11067 - DNA, 22 bp, Artificial Sequence
  chemically synthesized
taagaatcaataaaacagaaaa

SEQ ID NO: 11068 - DNA, 22 bp, Artificial Sequence
  chemically synthesized
aagaatcaataaaacagaaaaa

SEQ ID NO: 11069 - DNA, 22 bp, Artificial Sequence
  chemically synthesized
agaatcaataaaacagaaaaat

SEQ ID NO: 11070 - DNA, 22 bp, Artificial Sequence
  chemically synthesized
cctttagagctatttcaagata

SEQ ID NO: 11071 - DNA, 22 bp, Artificial Sequence
  chemically synthesized
tagagctatttcaagatattac

SEQ ID NO: 11072 - DNA, 22 bp, Artificial Sequence
  chemically synthesized
agagctatttcaagatattact

SEQ ID NO: 11073 - DNA, 22 bp, Artificial Sequence
  chemically synthesized
gagctatttcaagatattacta

SEQ ID NO: 11074 - DNA, 22 bp, Artificial Sequence
  chemically synthesized
tttcaagatattactacttatt

SEQ ID NO: 11075 - DNA, 22 bp, Artificial Sequence
  chemically synthesized
caagatattactacttattaca

SEQ ID NO: 11076 - DNA, 22 bp, Artificial Sequence
  chemically synthesized
aagatattactacttattacat

SEQ ID NO: 11077 - DNA, 22 bp, Artificial Sequence
  chemically synthesized
ctacttattacatcttgaaatt

SEQ ID NO: 11078 - DNA, 22 bp, Artificial Sequence
  chemically synthesized
cttattacatcttgaaattgta

SEQ ID NO: 11079 - DNA, 22 bp, Artificial Sequence
  chemically synthesized
attacatcttgaaattgtaatt

SEQ ID NO: 11080 - DNA, 22 bp, Artificial Sequence
  chemically synthesized
ttacatcttgaaattgtaattt

SEQ ID NO: 11081 - DNA, 22 bp, Artificial Sequence
  chemically synthesized
catcttgaaattgtaattttga

SEQ ID NO: 11082 - DNA, 22 bp, Artificial Sequence
  chemically synthesized
gaaattgtaattttgaaatttg

SEQ ID NO: 11083 - DNA, 22 bp, Artificial Sequence
  chemically synthesized
aaattgtaattttgaaatttgt

SEQ ID NO: 11084 - DNA, 22 bp, Artificial Sequence
  chemically synthesized
taattttgaaatttgtagtcta

SEQ ID NO: 11085 - DNA, 22 bp, Artificial Sequence
  chemically synthesized
tgaaatttgtagtctatagaat

SEQ ID NO: 11086 - DNA, 22 bp, Artificial Sequence
  chemically synthesized
gaaatttgtagtctatagaatc

SEQ ID NO: 11087 - DNA, 22 bp, Artificial Sequence
  chemically synthesized
aaatttgtagtctatagaatca

SEQ ID NO: 11088 - DNA, 22 bp, Artificial Sequence
  chemically synthesized
gtagtctatagaatcaaactga

SEQ ID NO: 11089 - DNA, 22 bp, Artificial Sequence
  chemically synthesized
tagtctatagaatcaaactgaa

SEQ ID NO: 11090 - DNA, 22 bp, Artificial Sequence
  chemically synthesized
tagaatcaaactgaaaattcag

SEQ ID NO: 11091 - DNA, 22 bp, Artificial Sequence
  chemically synthesized
aaaattcagtataacacatcac

SEQ ID NO: 11092 - DNA, 22 bp, Artificial Sequence
  chemically synthesized
agtataacacatcacaaatgta

SEQ ID NO: 11093 - DNA, 22 bp, Artificial Sequence
  chemically synthesized
aaatatggatggtccctcattt

SEQ ID NO: 11094 - DNA, 22 bp, Artificial Sequence
  chemically synthesized
atttattcactaccaccaccag

SEQ ID NO: 11095 - DNA, 22 bp, Artificial Sequence
  chemically synthesized
attcactaccaccaccagtctc

SEQ ID NO: 11096 - DNA, 22 bp, Artificial Sequence
  chemically synthesized
ttcactaccaccaccagtctca

SEQ ID NO: 11097 - DNA, 22 bp, Artificial Sequence
  chemically synthesized
actaccaccaccagtctcatca

SEQ ID NO: 11098 - DNA, 22 bp, Artificial Sequence
  chemically synthesized
ccaccaccagtctcatcagttt

SEQ ID NO: 11099 - DNA, 22 bp, Artificial Sequence
  chemically synthesized
atcagttttgtgaccaacttgg

SEQ ID NO: 11100 - DNA, 22 bp, Artificial Sequence
  chemically synthesized
tgtgaccaacttggttaagtaa

SEQ ID NO: 11101 - DNA, 22 bp, Artificial Sequence
  chemically synthesized
gtgaccaacttggttaagtaaa

SEQ ID NO: 11102 - DNA, 22 bp, Artificial Sequence
  chemically synthesized
tgaccaacttggttaagtaaat

SEQ ID NO: 11103 - DNA, 22 bp, Artificial Sequence
  chemically synthesized
ggttaagtaaattttttgagat

SEQ ID NO: 11104 - DNA, 22 bp, Artificial Sequence
  chemically synthesized
gttaagtaaattttttgagata

SEQ ID NO: 11105 - DNA, 22 bp, Artificial Sequence
  chemically synthesized
agtaaattttttgagatataaa

SEQ ID NO: 11106 - DNA, 22 bp, Artificial Sequence
  chemically synthesized
tttgagatataaatgaaattgt

SEQ ID NO: 11107 - DNA, 22 bp, Artificial Sequence
  chemically synthesized
ttgagatataaatgaaattgtc

SEQ ID NO: 11108 - DNA, 22 bp, Artificial Sequence
  chemically synthesized
tgagatataaatgaaattgtca

SEQ ID NO: 11109 - DNA, 22 bp, Artificial Sequence
  chemically synthesized
gagatataaatgaaattgtcaa

SEQ ID NO: 11110 - DNA, 22 bp, Artificial Sequence
  chemically synthesized
agatataaatgaaattgtcaaa

SEQ ID NO: 11111 - DNA, 22 bp, Artificial Sequence
  chemically synthesized
tcaaatgactatgcatttttag

SEQ ID NO: 11112 - DNA, 22 bp, Artificial Sequence
  chemically synthesized
tgcatttttagctaaacatatt

SEQ ID NO: 11113 - DNA, 22 bp, Artificial Sequence
  chemically synthesized
ttagctaaacatattttttaaa

SEQ ID NO: 11114 - DNA, 22 bp, Artificial Sequence
  chemically synthesized
tagctaaacatattttttaaat

SEQ ID NO: 11115 - DNA, 22 bp, Artificial Sequence
  chemically synthesized
agctaaacatattttttaaatc

SEQ ID NO: 11116 - DNA, 22 bp, Artificial Sequence
  chemically synthesized
gctaaacatattttttaaatca

SEQ ID NO: 11117 - DNA, 22 bp, Artificial Sequence
  chemically synthesized
aacatattttttaaatcataca

SEQ ID NO: 11118 - DNA, 22 bp, Artificial Sequence
  chemically synthesized
tttaaatcatacattatttaag

SEQ ID NO: 11119 - DNA, 22 bp, Artificial Sequence
  chemically synthesized
ttaaatcatacattatttaaga

SEQ ID NO: 11120 - DNA, 22 bp, Artificial Sequence
  chemically synthesized
taaatcatacattatttaagat

SEQ ID NO: 11121 - DNA, 22 bp, Artificial Sequence
  chemically synthesized
aaatcatacattatttaagatg

SEQ ID NO: 11122 - DNA, 22 bp, Artificial Sequence
  chemically synthesized
aatcatacattatttaagatga

SEQ ID NO: 11123 - DNA, 22 bp, Artificial Sequence
  chemically synthesized
tttaagatgaatttaatactag

SEQ ID NO: 11124 - DNA, 22 bp, Artificial Sequence
  chemically synthesized
aagatgaatttaatactagttg

SEQ ID NO: 11125 - DNA, 22 bp, Artificial Sequence
  chemically synthesized
agatgaatttaatactagttgt

SEQ ID NO: 11126 - DNA, 22 bp, Artificial Sequence
  chemically synthesized
aatactagttgtttttcctcac

SEQ ID NO: 11127 - DNA, 22 bp, Artificial Sequence
  chemically synthesized
atactagttgtttttcctcact

SEQ ID NO: 11128 - DNA, 22 bp, Artificial Sequence
  chemically synthesized
gttgtttttcctcacttatttt

SEQ ID NO: 11129 - DNA, 22 bp, Artificial Sequence
  chemically synthesized
tttttcctcacttattttatga

SEQ ID NO: 11130 - DNA, 22 bp, Artificial Sequence
  chemically synthesized
ttcctcacttattttatgaaat

SEQ ID NO: 11131 - DNA, 22 bp, Artificial Sequence
  chemically synthesized
tcctcacttattttatgaaatg

SEQ ID NO: 11132 - DNA, 22 bp, Artificial Sequence
  chemically synthesized
cctcacttattttatgaaatga

SEQ ID NO: 11133 - DNA, 22 bp, Artificial Sequence
  chemically synthesized
ctcacttattttatgaaatgat

SEQ ID NO: 11134 - DNA, 22 bp, Artificial Sequence
  chemically synthesized
acttattttatgaaatgatttt

SEQ ID NO: 11135 - DNA, 22 bp, Artificial Sequence
  chemically synthesized
attttatgaaatgattttactc

SEQ ID NO: 11136 - DNA, 22 bp, Artificial Sequence
  chemically synthesized
ttttatgaaatgattttactca

SEQ ID NO: 11137 - DNA, 22 bp, Artificial Sequence
  chemically synthesized
tatgaaatgattttactcaaag

SEQ ID NO: 11138 - DNA, 22 bp, Artificial Sequence
  chemically synthesized
atgaaatgattttactcaaagt

SEQ ID NO: 11139 - DNA, 22 bp, Artificial Sequence
  chemically synthesized
tgaaatgattttactcaaagtc

SEQ ID NO: 11140 - DNA, 22 bp, Artificial Sequence
  chemically synthesized
tactcaaagtcttcataagcat

SEQ ID NO: 11141 - DNA, 22 bp, Artificial Sequence
  chemically synthesized
actcaaagtcttcataagcatc

SEQ ID NO: 11142 - DNA, 22 bp, Artificial Sequence
  chemically synthesized
ctcaaagtcttcataagcatct

SEQ ID NO: 11143 - DNA, 22 bp, Artificial Sequence
  chemically synthesized
aaagtcttcataagcatcttta

SEQ ID NO: 11144 - DNA, 22 bp, Artificial Sequence
  chemically synthesized
cataagcatctttaagttagaa

SEQ ID NO: 11145 - DNA, 22 bp, Artificial Sequence
  chemically synthesized
ataagcatctttaagttagaat

SEQ ID NO: 11146 - DNA, 22 bp, Artificial Sequence
  chemically synthesized
taagttagaatctttgtcagac

SEQ ID NO: 11147 - DNA, 22 bp, Artificial Sequence
  chemically synthesized
aagttagaatctttgtcagacc

SEQ ID NO: 11148 - DNA, 22 bp, Artificial Sequence
  chemically synthesized
agttagaatctttgtcagaccc

SEQ ID NO: 11149 - DNA, 22 bp, Artificial Sequence
  chemically synthesized
gaatctttgtcagacccagggc

SEQ ID NO: 11150 - DNA, 22 bp, Artificial Sequence
  chemically synthesized
tgtcagacccagggccattttt

SEQ ID NO: 11151 - DNA, 22 bp, Artificial Sequence
  chemically synthesized
gtcagacccagggccatttttg

SEQ ID NO: 11152 - DNA, 22 bp, Artificial Sequence
  chemically synthesized
tcagacccagggccatttttgg

SEQ ID NO: 11153 - DNA, 22 bp, Artificial Sequence
  chemically synthesized
ttggagtaaccttaaccagttt

SEQ ID NO: 11154 - DNA, 22 bp, Artificial Sequence
  chemically synthesized
tggagtaaccttaaccagtttt

SEQ ID NO: 11155 - DNA, 22 bp, Artificial Sequence
  chemically synthesized
ggagtaaccttaaccagttttt

SEQ ID NO: 11156 - DNA, 22 bp, Artificial Sequence
  chemically synthesized
gagtaaccttaaccagtttttc

SEQ ID NO: 11157 - DNA, 22 bp, Artificial Sequence
  chemically synthesized
aaccagtttttcagagccccat

SEQ ID NO: 11158 - DNA, 22 bp, Artificial Sequence
  chemically synthesized
accagtttttcagagccccata

SEQ ID NO: 11159 - DNA, 22 bp, Artificial Sequence
  chemically synthesized
ttcagagccccatattattaag

SEQ ID NO: 11160 - DNA, 22 bp, Artificial Sequence
  chemically synthesized
tcagagccccatattattaagt

SEQ ID NO: 11161 - DNA, 22 bp, Artificial Sequence
  chemically synthesized
cagagccccatattattaagtt

SEQ ID NO: 11162 - DNA, 22 bp, Artificial Sequence
  chemically synthesized
agagccccatattattaagttg

SEQ ID NO: 11163 - DNA, 22 bp, Artificial Sequence
  chemically synthesized
ttaagttgcttgagaatttaaa

SEQ ID NO: 11164 - DNA, 22 bp, Artificial Sequence
  chemically synthesized
agttgcttgagaatttaaatgt

SEQ ID NO: 11165 - DNA, 22 bp, Artificial Sequence
  chemically synthesized
cttgagaatttaaatgtgatgc

SEQ ID NO: 11166 - DNA, 22 bp, Artificial Sequence
  chemically synthesized
gagaatttaaatgtgatgctac

SEQ ID NO: 11167 - DNA, 22 bp, Artificial Sequence
  chemically synthesized
agaatttaaatgtgatgctact

SEQ ID NO: 11168 - DNA, 22 bp, Artificial Sequence
  chemically synthesized
aaatgtgatgctacttctggaa

SEQ ID NO: 11169 - DNA, 22 bp, Artificial Sequence
  chemically synthesized
aatgtgatgctacttctggaag

SEQ ID NO: 11170 - DNA, 22 bp, Artificial Sequence
  chemically synthesized
cttctggaagttttatcctaag

SEQ ID NO: 11171 - DNA, 22 bp, Artificial Sequence
  chemically synthesized
ctggaagttttatcctaagcca

SEQ ID NO: 11172 - DNA, 22 bp, Artificial Sequence
  chemically synthesized
tggaagttttatcctaagccat

SEQ ID NO: 11173 - DNA, 22 bp, Artificial Sequence
  chemically synthesized
gaagttttatcctaagccatat

SEQ ID NO: 11174 - DNA, 22 bp, Artificial Sequence
  chemically synthesized
tatcctaagccatatgcccatt

SEQ ID NO: 11175 - DNA, 22 bp, Artificial Sequence
  chemically synthesized
atcctaagccatatgcccattt

SEQ ID NO: 11176 - DNA, 22 bp, Artificial Sequence
  chemically synthesized
tcctaagccatatgcccatttg

SEQ ID NO: 11177 - DNA, 22 bp, Artificial Sequence
  chemically synthesized
agccatatgcccatttgcataa

SEQ ID NO: 11178 - DNA, 22 bp, Artificial Sequence
  chemically synthesized
gcataatgctgaaagttttatt

SEQ ID NO: 11179 - DNA, 22 bp, Artificial Sequence
  chemically synthesized
cataatgctgaaagttttattt

SEQ ID NO: 11180 - DNA, 22 bp, Artificial Sequence
  chemically synthesized
aaagttttatttaaaaaaaaac

SEQ ID NO: 11181 - DNA, 22 bp, Artificial Sequence
  chemically synthesized
tatttaaaaaaaaaccatcctt

SEQ ID NO: 11182 - DNA, 22 bp, Artificial Sequence
  chemically synthesized
atttaaaaaaaaaccatccttt

SEQ ID NO: 11183 - DNA, 22 bp, Artificial Sequence
  chemically synthesized
tttaaaaaaaaaccatccttta

SEQ ID NO: 11184 - DNA, 22 bp, Artificial Sequence
  chemically synthesized
aaaaaaaaaccatcctttagta

SEQ ID NO: 11185 - DNA, 22 bp, Artificial Sequence
  chemically synthesized
aaaaaaaaccatcctttagtaa

SEQ ID NO: 11186 - DNA, 22 bp, Artificial Sequence
  chemically synthesized
tagtaacctccacaactaacta

SEQ ID NO: 11187 - DNA, 22 bp, Artificial Sequence
  chemically synthesized
agtaacctccacaactaactat

SEQ ID NO: 11188 - DNA, 22 bp, Artificial Sequence
  chemically synthesized
gtaacctccacaactaactatt

SEQ ID NO: 11189 - DNA, 22 bp, Artificial Sequence
  chemically synthesized
cacaactaactattcactgttt

SEQ ID NO: 11190 - DNA, 22 bp, Artificial Sequence
  chemically synthesized
actattcactgtttttagtttt

SEQ ID NO: 11191 - DNA, 22 bp, Artificial Sequence
  chemically synthesized
ttcactgtttttagtttttaaa

SEQ ID NO: 11192 - DNA, 22 bp, Artificial Sequence
  chemically synthesized
actgtttttagtttttaaagta

SEQ ID NO: 11193 - DNA, 22 bp, Artificial Sequence
  chemically synthesized
tttttagtttttaaagtaataa

SEQ ID NO: 11194 - DNA, 22 bp, Artificial Sequence
  chemically synthesized
ttagtttttaaagtaataatta

SEQ ID NO: 11195 - DNA, 22 bp, Artificial Sequence
  chemically synthesized
tagtttttaaagtaataattat

SEQ ID NO: 11196 - DNA, 22 bp, Artificial Sequence
  chemically synthesized
agtttttaaagtaataattatc

SEQ ID NO: 11197 - DNA, 22 bp, Artificial Sequence
  chemically synthesized
gtttttaaagtaataattatca

SEQ ID NO: 11198 - DNA, 22 bp, Artificial Sequence
  chemically synthesized
ttaaagtaataattatcatgcc

SEQ ID NO: 11199 - DNA, 22 bp, Artificial Sequence
  chemically synthesized
taaagtaataattatcatgcct

SEQ ID NO: 11200 - DNA, 22 bp, Artificial Sequence
  chemically synthesized
aaagtaataattatcatgcctg

SEQ ID NO: 11201 - DNA, 22 bp, Artificial Sequence
  chemically synthesized
aagtaataattatcatgcctgt

SEQ ID NO: 11202 - DNA, 22 bp, Artificial Sequence
  chemically synthesized
tcatgcctgtttacaattacaa

SEQ ID NO: 11203 - DNA, 22 bp, Artificial Sequence
  chemically synthesized
tttacaattacaattcacacat

SEQ ID NO: 11204 - DNA, 22 bp, Artificial Sequence
  chemically synthesized
acaattacaattcacacattca

SEQ ID NO: 11205 - DNA, 22 bp, Artificial Sequence
  chemically synthesized
caattacaattcacacattcaa

SEQ ID NO: 11206 - DNA, 22 bp, Artificial Sequence
  chemically synthesized
caattcacacattcaatctaac

SEQ ID NO: 11207 - DNA, 22 bp, Artificial Sequence
  chemically synthesized
acacattcaatctaacaagaat

SEQ ID NO: 11208 - DNA, 22 bp, Artificial Sequence
  chemically synthesized
aatctaacaagaataatgacta

SEQ ID NO: 11209 - DNA, 22 bp, Artificial Sequence
  chemically synthesized
acaagaataatgactagatccg

SEQ ID NO: 11210 - DNA, 22 bp, Artificial Sequence
  chemically synthesized
gatccgtgttaaatttccttcc

SEQ ID NO: 11211 - DNA, 22 bp, Artificial Sequence
  chemically synthesized
aatttccttccctgtgaagcaa

SEQ ID NO: 11212 - DNA, 22 bp, Artificial Sequence
  chemically synthesized
ccttccctgtgaagcaatttta

SEQ ID NO: 11213 - DNA, 22 bp, Artificial Sequence
  chemically synthesized
cttccctgtgaagcaattttat

SEQ ID NO: 11214 - DNA, 22 bp, Artificial Sequence
  chemically synthesized
ccctgtgaagcaattttatcag

SEQ ID NO: 11215 - DNA, 22 bp, Artificial Sequence
  chemically synthesized
cctgtgaagcaattttatcaga

SEQ ID NO: 11216 - DNA, 22 bp, Artificial Sequence
  chemically synthesized
tgaagcaattttatcagatgac

SEQ ID NO: 11217 - DNA, 22 bp, Artificial Sequence
  chemically synthesized
tatcagatgacagctacaactg

SEQ ID NO: 11218 - DNA, 22 bp, Artificial Sequence
  chemically synthesized
atcagatgacagctacaactga

SEQ ID NO: 11219 - DNA, 22 bp, Artificial Sequence
  chemically synthesized
tcagatgacagctacaactgaa

SEQ ID NO: 11220 - DNA, 22 bp, Artificial Sequence
  chemically synthesized
caactgaagttgtttcaaacta

SEQ ID NO: 11221 - DNA, 22 bp, Artificial Sequence
  chemically synthesized
aagttgtttcaaactaatgcat

SEQ ID NO: 11222 - DNA, 22 bp, Artificial Sequence
  chemically synthesized
tttcaaactaatgcatcatccc

SEQ ID NO: 11223 - DNA, 22 bp, Artificial Sequence
  chemically synthesized
caaactaatgcatcatccccaa

SEQ ID NO: 11224 - DNA, 22 bp, Artificial Sequence
  chemically synthesized
aaactaatgcatcatccccaaa

SEQ ID NO: 11225 - DNA, 22 bp, Artificial Sequence
  chemically synthesized
atgcatcatccccaaacagtat

SEQ ID NO: 11226 - DNA, 22 bp, Artificial Sequence
  chemically synthesized
ttcaaaataaagtcgttgtgag

SEQ ID NO: 11227 - DNA, 22 bp, Artificial Sequence
  chemically synthesized
aaaataaagtcgttgtgagatt

SEQ ID NO: 11228 - DNA, 22 bp, Artificial Sequence
  chemically synthesized
tgagatttgcaagaactcaatc

SEQ ID NO: 11229 - DNA, 22 bp, Artificial Sequence
  chemically synthesized
gcaagaactcaatcaaaaggca

SEQ ID NO: 11230 - DNA, 22 bp, Artificial Sequence
  chemically synthesized
caagaactcaatcaaaaggcaa

SEQ ID NO: 11231 - DNA, 22 bp, Artificial Sequence
  chemically synthesized
aatcaaaaggcaactcctcctt

SEQ ID NO: 11232 - DNA, 22 bp, Artificial Sequence
  chemically synthesized
ctccttttcgggaagaataatt

SEQ ID NO: 11233 - DNA, 22 bp, Artificial Sequence
  chemically synthesized
cttttcgggaagaataattttg

SEQ ID NO: 11234 - DNA, 22 bp, Artificial Sequence
  chemically synthesized
ttcgggaagaataattttggga

SEQ ID NO: 11235 - DNA, 22 bp, Artificial Sequence
  chemically synthesized
tcgggaagaataattttgggaa

SEQ ID NO: 11236 - DNA, 22 bp, Artificial Sequence
  chemically synthesized
cgggaagaataattttgggaaa

SEQ ID NO: 11237 - DNA, 22 bp, Artificial Sequence
  chemically synthesized
gggaagaataattttgggaaaa

SEQ ID NO: 11238 - DNA, 22 bp, Artificial Sequence
  chemically synthesized
tgggaaaatatttcctcttagg

SEQ ID NO: 11239 - DNA, 22 bp, Artificial Sequence
  chemically synthesized
gggaaaatatttcctcttaggt

SEQ ID NO: 11240 - DNA, 22 bp, Artificial Sequence
  chemically synthesized
ggaaaatatttcctcttaggtt

SEQ ID NO: 11241 - DNA, 22 bp, Artificial Sequence
  chemically synthesized
cctcttaggtttaagcatacat

SEQ ID NO: 11242 - DNA, 22 bp, Artificial Sequence
  chemically synthesized
ctcttaggtttaagcatacata

SEQ ID NO: 11243 - DNA, 22 bp, Artificial Sequence
  chemically synthesized
ttaggtttaagcatacatagta

SEQ ID NO: 11244 - DNA, 22 bp, Artificial Sequence
  chemically synthesized
aggtttaagcatacatagtatt

SEQ ID NO: 11245 - DNA, 22 bp, Artificial Sequence
  chemically synthesized
ggtttaagcatacatagtattt

SEQ ID NO: 11246 - DNA, 22 bp, Artificial Sequence
  chemically synthesized
aagcatacatagtatttcattc

SEQ ID NO: 11247 - DNA, 22 bp, Artificial Sequence
  chemically synthesized
agcatacatagtatttcattca

SEQ ID NO: 11248 - DNA, 22 bp, Artificial Sequence
  chemically synthesized
cattcacagtatctcagacatt

SEQ ID NO: 11249 - DNA, 22 bp, Artificial Sequence
  chemically synthesized
attcacagtatctcagacatta

SEQ ID NO: 11250 - DNA, 22 bp, Artificial Sequence
  chemically synthesized
acagtatctcagacattatcag

SEQ ID NO: 11251 - DNA, 22 bp, Artificial Sequence
  chemically synthesized
agacattatcagtataagtgaa

SEQ ID NO: 11252 - DNA, 22 bp, Artificial Sequence
  chemically synthesized
tcagtataagtgaatgaatagc

SEQ ID NO: 11253 - DNA, 22 bp, Artificial Sequence
  chemically synthesized
actgaagctcaacaacaccaaa

SEQ ID NO: 11254 - DNA, 22 bp, Artificial Sequence
  chemically synthesized
aagctcaacaacaccaaaaaaa

SEQ ID NO: 11255 - DNA, 22 bp, Artificial Sequence
  chemically synthesized
aacaacaccaaaaaaaaaaaaa

SEQ ID NO: 11256 - DNA, 22 bp, Artificial Sequence
  chemically synthesized
cagggctaaatacagaagaggc

SEQ ID NO: 11257 - DNA, 22 bp, Artificial Sequence
  chemically synthesized
aatacagaagaggctctaaaag

SEQ ID NO: 11258 - DNA, 22 bp, Artificial Sequence
  chemically synthesized
taaaagaaaatctcttaagttt

SEQ ID NO: 11259 - DNA, 22 bp, Artificial Sequence
  chemically synthesized
aaagaaaatctcttaagtttct

SEQ ID NO: 11260 - DNA, 22 bp, Artificial Sequence
  chemically synthesized
ttaagtttctattcctccttgt

SEQ ID NO: 11261 - DNA, 22 bp, Artificial Sequence
  chemically synthesized
aagtttctattcctccttgtac

SEQ ID NO: 11262 - DNA, 22 bp, Artificial Sequence
  chemically synthesized
agtttctattcctccttgtact

SEQ ID NO: 11263 - DNA, 22 bp, Artificial Sequence
  chemically synthesized
ctattcctccttgtacttccca

SEQ ID NO: 11264 - DNA, 22 bp, Artificial Sequence
  chemically synthesized
tattcctccttgtacttcccaa

SEQ ID NO: 11265 - DNA, 22 bp, Artificial Sequence
  chemically synthesized
ttcctccttgtacttcccaaac

SEQ ID NO: 11266 - DNA, 22 bp, Artificial Sequence
  chemically synthesized
ctccttgtacttcccaaacttg

SEQ ID NO: 11267 - DNA, 22 bp, Artificial Sequence
  chemically synthesized
cttgtacttcccaaacttgaac

SEQ ID NO: 11268 - DNA, 22 bp, Artificial Sequence
  chemically synthesized
gtacttcccaaacttgaacttc

SEQ ID NO: 11269 - DNA, 22 bp, Artificial Sequence
  chemically synthesized
tacttcccaaacttgaacttct

SEQ ID NO: 11270 - DNA, 22 bp, Artificial Sequence
  chemically synthesized
cccaaacttgaacttctcagca

SEQ ID NO: 11271 - DNA, 22 bp, Artificial Sequence
  chemically synthesized
ccaaacttgaacttctcagcag

SEQ ID NO: 11272 - DNA, 22 bp, Artificial Sequence
  chemically synthesized
gaacttctcagcagtaagataa

SEQ ID NO: 11273 - DNA, 22 bp, Artificial Sequence
  chemically synthesized
aacttctcagcagtaagataac

SEQ ID NO: 11274 - DNA, 22 bp, Artificial Sequence
  chemically synthesized
ctcagcagtaagataacatttt

SEQ ID NO: 11275 - DNA, 22 bp, Artificial Sequence
  chemically synthesized
tcagcagtaagataacattttt

SEQ ID NO: 11276 - DNA, 22 bp, Artificial Sequence
  chemically synthesized
agcagtaagataacatttttaa

SEQ ID NO: 11277 - DNA, 22 bp, Artificial Sequence
  chemically synthesized
ttaagaagagcacttaaaagag

SEQ ID NO: 11278 - DNA, 22 bp, Artificial Sequence
  chemically synthesized
taagaagagcacttaaaagaga

SEQ ID NO: 11279 - DNA, 22 bp, Artificial Sequence
  chemically synthesized
aagaagagcacttaaaagagag

SEQ ID NO: 11280 - DNA, 22 bp, Artificial Sequence
  chemically synthesized
agaagagcacttaaaagagaga

SEQ ID NO: 11281 - DNA, 22 bp, Artificial Sequence
  chemically synthesized
aaaagagagaccaaaattcatt

SEQ ID NO: 11282 - DNA, 22 bp, Artificial Sequence
  chemically synthesized
aaagagagaccaaaattcatta

SEQ ID NO: 11283 - DNA, 22 bp, Artificial Sequence
  chemically synthesized
attaatagtagtcaacttaagt

SEQ ID NO: 11284 - DNA, 22 bp, Artificial Sequence
  chemically synthesized
atagtagtcaacttaagtaaag

SEQ ID NO: 11285 - DNA, 22 bp, Artificial Sequence
  chemically synthesized
aagtaaaggtttctggtttgaa

SEQ ID NO: 11286 - DNA, 22 bp, Artificial Sequence
  chemically synthesized
agtaaaggtttctggtttgaaa

SEQ ID NO: 11287 - DNA, 22 bp, Artificial Sequence
  chemically synthesized
ctggtttgaaaaaacaaaatcc

SEQ ID NO: 11288 - DNA, 22 bp, Artificial Sequence
  chemically synthesized
tggtttgaaaaaacaaaatccc

SEQ ID NO: 11289 - DNA, 22 bp, Artificial Sequence
  chemically synthesized
gtttgaaaaaacaaaatcccag

SEQ ID NO: 11290 - DNA, 22 bp, Artificial Sequence
  chemically synthesized
gaaaaaacaaaatcccagtaaa

SEQ ID NO: 11291 - DNA, 22 bp, Artificial Sequence
  chemically synthesized
aaaaaacaaaatcccagtaaaa

SEQ ID NO: 11292 - DNA, 22 bp, Artificial Sequence
  chemically synthesized
tagttggttctaagtttcctca

SEQ ID NO: 11293 - DNA, 22 bp, Artificial Sequence
  chemically synthesized
agttggttctaagtttcctcaa

SEQ ID NO: 11294 - DNA, 22 bp, Artificial Sequence
  chemically synthesized
gttggttctaagtttcctcaac

SEQ ID NO: 11295 - DNA, 22 bp, Artificial Sequence
  chemically synthesized
gttctaagtttcctcaacttgc

SEQ ID NO: 11296 - DNA, 22 bp, Artificial Sequence
  chemically synthesized
taagtttcctcaacttgcgata

SEQ ID NO: 11297 - DNA, 22 bp, Artificial Sequence
  chemically synthesized
agtttcctcaacttgcgataag

SEQ ID NO: 11298 - DNA, 22 bp, Artificial Sequence
  chemically synthesized
cctcaacttgcgataagtttac

SEQ ID NO: 11299 - DNA, 22 bp, Artificial Sequence
  chemically synthesized
ctcaacttgcgataagtttact

SEQ ID NO: 11300 - DNA, 22 bp, Artificial Sequence
  chemically synthesized
aacttgcgataagtttacttaa

SEQ ID NO: 11301 - DNA, 22 bp, Artificial Sequence
  chemically synthesized
gcgataagtttacttaattagt

SEQ ID NO: 11302 - DNA, 22 bp, Artificial Sequence
  chemically synthesized
cgataagtttacttaattagtc

SEQ ID NO: 11303 - DNA, 22 bp, Artificial Sequence
  chemically synthesized
acttaattagtctactaataac

SEQ ID NO: 11304 - DNA, 22 bp, Artificial Sequence
  chemically synthesized
cttaattagtctactaataact

SEQ ID NO: 11305 - DNA, 22 bp, Artificial Sequence
  chemically synthesized
aattagtctactaataactagt

SEQ ID NO: 11306 - DNA, 22 bp, Artificial Sequence
  chemically synthesized
attagtctactaataactagtg

SEQ ID NO: 11307 - DNA, 22 bp, Artificial Sequence
  chemically synthesized
gtctactaataactagtgggtt

SEQ ID NO: 11308 - DNA, 22 bp, Artificial Sequence
  chemically synthesized
ctaataactagtgggttagagg

SEQ ID NO: 11309 - DNA, 22 bp, Artificial Sequence
  chemically synthesized
ataactagtgggttagagggtg

SEQ ID NO: 11310 - DNA, 22 bp, Artificial Sequence
  chemically synthesized
gtgggttagagggtgctgaaag

SEQ ID NO: 11311 - DNA, 22 bp, Artificial Sequence
  chemically synthesized
gagggtgctgaaagttacccca

SEQ ID NO: 11312 - DNA, 22 bp, Artificial Sequence
  chemically synthesized
aaagttaccccattcctgggga

SEQ ID NO: 11313 - DNA, 22 bp, Artificial Sequence
  chemically synthesized
ccccattcctggggaccctgct

SEQ ID NO: 11314 - DNA, 22 bp, Artificial Sequence
  chemically synthesized
ctggggaccctgcttattgacc

SEQ ID NO: 11315 - DNA, 22 bp, Artificial Sequence
  chemically synthesized
gggaccctgcttattgaccagc

SEQ ID NO: 11316 - DNA, 22 bp, Artificial Sequence
  chemically synthesized
cttattgaccagcaaataagga

SEQ ID NO: 11317 - DNA, 22 bp, Artificial Sequence
  chemically synthesized
attgaccagcaaataaggactg

SEQ ID NO: 11318 - DNA, 22 bp, Artificial Sequence
  chemically synthesized
ttgaccagcaaataaggactgg

SEQ ID NO: 11319 - DNA, 22 bp, Artificial Sequence
  chemically synthesized
accagcaaataaggactgggat

SEQ ID NO: 11320 - DNA, 22 bp, Artificial Sequence
  chemically synthesized
ggattctttgggtaaagggaaa

SEQ ID NO: 11321 - DNA, 22 bp, Artificial Sequence
  chemically synthesized
tttgggtaaagggaaatctttt

SEQ ID NO: 11322 - DNA, 22 bp, Artificial Sequence
  chemically synthesized
tgggtaaagggaaatcttttct

SEQ ID NO: 11323 - DNA, 22 bp, Artificial Sequence
  chemically synthesized
gggtaaagggaaatcttttctt

SEQ ID NO: 11324 - DNA, 22 bp, Artificial Sequence
  chemically synthesized
ggtaaagggaaatcttttcttg

SEQ ID NO: 11325 - DNA, 22 bp, Artificial Sequence
  chemically synthesized
ttcttgttaagtcagaccttta

SEQ ID NO: 11326 - DNA, 22 bp, Artificial Sequence
  chemically synthesized
tcttgttaagtcagacctttac

SEQ ID NO: 11327 - DNA, 22 bp, Artificial Sequence
  chemically synthesized
cttgttaagtcagacctttaca

SEQ ID NO: 11328 - DNA, 22 bp, Artificial Sequence
  chemically synthesized
ttgttaagtcagacctttacac

SEQ ID NO: 11329 - DNA, 22 bp, Artificial Sequence
  chemically synthesized
gttaagtcagacctttacacag

SEQ ID NO: 11330 - DNA, 22 bp, Artificial Sequence
  chemically synthesized
ttaagtcagacctttacacaga

SEQ ID NO: 11331 - DNA, 22 bp, Artificial Sequence
  chemically synthesized
agtcagacctttacacagaata

SEQ ID NO: 11332 - DNA, 22 bp, Artificial Sequence
  chemically synthesized
tacacagaataactgtctctga

SEQ ID NO: 11333 - DNA, 22 bp, Artificial Sequence
  chemically synthesized
acacagaataactgtctctgaa

SEQ ID NO: 11334 - DNA, 22 bp, Artificial Sequence
  chemically synthesized
cacagaataactgtctctgaat

SEQ ID NO: 11335 - DNA, 22 bp, Artificial Sequence
  chemically synthesized
tctctgaattggaaagctatct

SEQ ID NO: 11336 - DNA, 22 bp, Artificial Sequence
  chemically synthesized
tgaattggaaagctatctacaa

SEQ ID NO: 11337 - DNA, 22 bp, Artificial Sequence
  chemically synthesized
aattggaaagctatctacaaaa

SEQ ID NO: 11338 - DNA, 22 bp, Artificial Sequence
  chemically synthesized
gaaagctatctacaaaagtaca

SEQ ID NO: 11339 - DNA, 22 bp, Artificial Sequence
  chemically synthesized
tctacaaaagtacaaacataac

SEQ ID NO: 11340 - DNA, 22 bp, Artificial Sequence
  chemically synthesized
caaaagtacaaacataacaatt

SEQ ID NO: 11341 - DNA, 22 bp, Artificial Sequence
  chemically synthesized
ggtaaaggagatcattgtattg

SEQ ID NO: 11342 - DNA, 22 bp, Artificial Sequence
  chemically synthesized
gtaaaggagatcattgtattgg

SEQ ID NO: 11343 - DNA, 22 bp, Artificial Sequence
  chemically synthesized
tattgggttctgtattatggcc

SEQ ID NO: 11344 - DNA, 22 bp, Artificial Sequence
  chemically synthesized
ggttctgtattatggccatgta

SEQ ID NO: 11345 - DNA, 22 bp, Artificial Sequence
  chemically synthesized
tgtattatggccatgtattttc

SEQ ID NO: 11346 - DNA, 22 bp, Artificial Sequence
  chemically synthesized
tattatggccatgtattttcac

SEQ ID NO: 11347 - DNA, 22 bp, Artificial Sequence
  chemically synthesized
tggccatgtattttcacaagtt

SEQ ID NO: 11348 - DNA, 22 bp, Artificial Sequence
  chemically synthesized
tcacaagtttttttttttaatt

SEQ ID NO: 11349 - DNA, 22 bp, Artificial Sequence
  chemically synthesized
cacaagtttttttttttaatta

SEQ ID NO: 11350 - DNA, 22 bp, Artificial Sequence
  chemically synthesized
acaagtttttttttttaattac

SEQ ID NO: 11351 - DNA, 22 bp, Artificial Sequence
  chemically synthesized
ttttttttaattacttttttaa

SEQ ID NO: 11352 - DNA, 22 bp, Artificial Sequence
  chemically synthesized
tttttttaattacttttttaaa

SEQ ID NO: 11353 - DNA, 22 bp, Artificial Sequence
  chemically synthesized
ttttttaattacttttttaaag

SEQ ID NO: 11354 - DNA, 22 bp, Artificial Sequence
  chemically synthesized
tttttaattacttttttaaagt

SEQ ID NO: 11355 - DNA, 22 bp, Artificial Sequence
  chemically synthesized
ttttaattacttttttaaagta

SEQ ID NO: 11356 - DNA, 22 bp, Artificial Sequence
  chemically synthesized
tttaattacttttttaaagtat

SEQ ID NO: 11357 - DNA, 22 bp, Artificial Sequence
  chemically synthesized
ttaattacttttttaaagtatc

SEQ ID NO: 11358 - DNA, 22 bp, Artificial Sequence
  chemically synthesized
taattacttttttaaagtatca

SEQ ID NO: 11359 - DNA, 22 bp, Artificial Sequence
  chemically synthesized
aattacttttttaaagtatcat

SEQ ID NO: 11360 - DNA, 22 bp, Artificial Sequence
  chemically synthesized
attacttttttaaagtatcatc

SEQ ID NO: 11361 - DNA, 22 bp, Artificial Sequence
  chemically synthesized
cttttttaaagtatcatctgtc

SEQ ID NO: 11362 - DNA, 22 bp, Artificial Sequence
  chemically synthesized
ttttaaagtatcatctgtctca

SEQ ID NO: 11363 - DNA, 22 bp, Artificial Sequence
  chemically synthesized
tttaaagtatcatctgtctcat

SEQ ID NO: 11364 - DNA, 22 bp, Artificial Sequence
  chemically synthesized
ttaaagtatcatctgtctcatt

SEQ ID NO: 11365 - DNA, 22 bp, Artificial Sequence
  chemically synthesized
taaagtatcatctgtctcattc

SEQ ID NO: 11366 - DNA, 22 bp, Artificial Sequence
  chemically synthesized
aaagtatcatctgtctcattca

SEQ ID NO: 11367 - DNA, 22 bp, Artificial Sequence
  chemically synthesized
aagtatcatctgtctcattcat

SEQ ID NO: 11368 - DNA, 22 bp, Artificial Sequence
  chemically synthesized
tctcattcatgctaaaaagaag

SEQ ID NO: 11369 - DNA, 22 bp, Artificial Sequence
  chemically synthesized
attcatgctaaaaagaagcaaa

SEQ ID NO: 11370 - DNA, 22 bp, Artificial Sequence
  chemically synthesized
atgctaaaaagaagcaaagaaa

SEQ ID NO: 11371 - DNA, 22 bp, Artificial Sequence
  chemically synthesized
aaaagaagcaaagaaaggcaaa

SEQ ID NO: 11372 - DNA, 22 bp, Artificial Sequence
  chemically synthesized
aaaatattggagttttacaagg

SEQ ID NO: 11373 - DNA, 22 bp, Artificial Sequence
  chemically synthesized
aaatattggagttttacaagga

SEQ ID NO: 11374 - DNA, 22 bp, Artificial Sequence
  chemically synthesized
gagttttacaaggagcattgag

SEQ ID NO: 11375 - DNA, 22 bp, Artificial Sequence
  chemically synthesized
tacaaggagcattgagggtcac

SEQ ID NO: 11376 - DNA, 22 bp, Artificial Sequence
  chemically synthesized
acaaggagcattgagggtcacc

SEQ ID NO: 11377 - DNA, 22 bp, Artificial Sequence
  chemically synthesized
caaggagcattgagggtcaccc

SEQ ID NO: 11378 - DNA, 22 bp, Artificial Sequence
  chemically synthesized
agggtcacccacaagaggaaat

SEQ ID NO: 11379 - DNA, 22 bp, Artificial Sequence
  chemically synthesized
tttcttcactggagattctcct

SEQ ID NO: 11380 - DNA, 22 bp, Artificial Sequence
  chemically synthesized
tcttcactggagattctccttc

SEQ ID NO: 11381 - DNA, 22 bp, Artificial Sequence
  chemically synthesized
cttcactggagattctccttca

SEQ ID NO: 11382 - DNA, 22 bp, Artificial Sequence
  chemically synthesized
ttcactggagattctccttcaa

SEQ ID NO: 11383 - DNA, 22 bp, Artificial Sequence
  chemically synthesized
cactggagattctccttcaaaa

SEQ ID NO: 11384 - DNA, 22 bp, Artificial Sequence
  chemically synthesized
actggagattctccttcaaaag

SEQ ID NO: 11385 - DNA, 22 bp, Artificial Sequence
  chemically synthesized
gagattctccttcaaaagaact

SEQ ID NO: 11386 - DNA, 22 bp, Artificial Sequence
  chemically synthesized
tccttcaaaagaacttctctgc

SEQ ID NO: 11387 - DNA, 22 bp, Artificial Sequence
  chemically synthesized
cttcaaaagaacttctctgctt

SEQ ID NO: 11388 - DNA, 22 bp, Artificial Sequence
  chemically synthesized
caaaagaacttctctgctttac

SEQ ID NO: 11389 - DNA, 22 bp, Artificial Sequence
  chemically synthesized
aaaagaacttctctgctttaca

SEQ ID NO: 11390 - DNA, 22 bp, Artificial Sequence
  chemically synthesized
ctctgctttacagtgaaatagt

SEQ ID NO: 11391 - DNA, 22 bp, Artificial Sequence
  chemically synthesized
tctgctttacagtgaaatagtc

SEQ ID NO: 11392 - DNA, 22 bp, Artificial Sequence
  chemically synthesized
tgctttacagtgaaatagtctg

SEQ ID NO: 11393 - DNA, 22 bp, Artificial Sequence
  chemically synthesized
ctttacagtgaaatagtctgta

SEQ ID NO: 11394 - DNA, 22 bp, Artificial Sequence
  chemically synthesized
tacagtgaaatagtctgtactt

SEQ ID NO: 11395 - DNA, 22 bp, Artificial Sequence
  chemically synthesized
acagtgaaatagtctgtactta

SEQ ID NO: 11396 - DNA, 22 bp, Artificial Sequence
  chemically synthesized
cagtgaaatagtctgtacttag

SEQ ID NO: 11397 - DNA, 22 bp, Artificial Sequence
  chemically synthesized
tacttagtttccgcaggggaag

SEQ ID NO: 11398 - DNA, 22 bp, Artificial Sequence
  chemically synthesized
agtttccgcaggggaagccaca

SEQ ID NO: 11399 - DNA, 22 bp, Artificial Sequence
  chemically synthesized
gtttccgcaggggaagccacac

SEQ ID NO: 11400 - DNA, 22 bp, Artificial Sequence
  chemically synthesized
ccgcaggggaagccacaccctt

SEQ ID NO: 11401 - DNA, 22 bp, Artificial Sequence
  chemically synthesized
cgcaggggaagccacacccttg

SEQ ID NO: 11402 - DNA, 22 bp, Artificial Sequence
  chemically synthesized
gtaaccatgcttctcaaactct

SEQ ID NO: 11403 - DNA, 22 bp, Artificial Sequence
  chemically synthesized
taaccatgcttctcaaactctt

SEQ ID NO: 11404 - DNA, 22 bp, Artificial Sequence
  chemically synthesized
ctcaaactcttagtgtctgttc

SEQ ID NO: 11405 - DNA, 22 bp, Artificial Sequence
  chemically synthesized
tcaaactcttagtgtctgttcc

SEQ ID NO: 11406 - DNA, 22 bp, Artificial Sequence
  chemically synthesized
aaactcttagtgtctgttcctg

SEQ ID NO: 11407 - DNA, 22 bp, Artificial Sequence
  chemically synthesized
ttagtgtctgttcctgaggggc

SEQ ID NO: 11408 - DNA, 22 bp, Artificial Sequence
  chemically synthesized
agtgtctgttcctgaggggcat

SEQ ID NO: 11409 - DNA, 22 bp, Artificial Sequence
  chemically synthesized
gtgtctgttcctgaggggcatt

SEQ ID NO: 11410 - DNA, 22 bp, Artificial Sequence
  chemically synthesized
ttcctgaggggcattcaaagcc

SEQ ID NO: 11411 - DNA, 22 bp, Artificial Sequence
  chemically synthesized
ctgaggggcattcaaagccaag

SEQ ID NO: 11412 - DNA, 22 bp, Artificial Sequence
  chemically synthesized
aggggcattcaaagccaaggga

SEQ ID NO: 11413 - DNA, 22 bp, Artificial Sequence
  chemically synthesized
aaagccaagggataaacatggc

SEQ ID NO: 11414 - DNA, 22 bp, Artificial Sequence
  chemically synthesized
tcctagaggagagggtaagaaa

SEQ ID NO: 11415 - DNA, 22 bp, Artificial Sequence
  chemically synthesized
cctagaggagagggtaagaaat

SEQ ID NO: 11416 - DNA, 22 bp, Artificial Sequence
  chemically synthesized
ctagaggagagggtaagaaata

SEQ ID NO: 11417 - DNA, 22 bp, Artificial Sequence
  chemically synthesized
gaggagagggtaagaaatatca

SEQ ID NO: 11418 - DNA, 22 bp, Artificial Sequence
  chemically synthesized
acaaattttaatactaaaatag

SEQ ID NO: 11419 - DNA, 22 bp, Artificial Sequence
  chemically synthesized
taatactaaaatagttatggaa

SEQ ID NO: 11420 - DNA, 22 bp, Artificial Sequence
  chemically synthesized
aatactaaaatagttatggaat

SEQ ID NO: 11421 - DNA, 22 bp, Artificial Sequence
  chemically synthesized
atactaaaatagttatggaata

SEQ ID NO: 11422 - DNA, 22 bp, Artificial Sequence
  chemically synthesized
aaatagttatggaataaaatgt

SEQ ID NO: 11423 - DNA, 22 bp, Artificial Sequence
  chemically synthesized
tggaataaaatgtaaattgcat

SEQ ID NO: 11424 - DNA, 22 bp, Artificial Sequence
  chemically synthesized
catgagtcttaacgatacaaca

SEQ ID NO: 11425 - DNA, 22 bp, Artificial Sequence
  chemically synthesized
aacgatacaacataagacttag

SEQ ID NO: 11426 - DNA, 22 bp, Artificial Sequence
  chemically synthesized
acgatacaacataagacttaga

SEQ ID NO: 11427 - DNA, 22 bp, Artificial Sequence
  chemically synthesized
agaagaaatattgtgtggacct

SEQ ID NO: 11428 - DNA, 22 bp, Artificial Sequence
  chemically synthesized
gaagaaatattgtgtggacctg

SEQ ID NO: 11429 - DNA, 22 bp, Artificial Sequence
  chemically synthesized
tgtggacctgggcctacacccc

SEQ ID NO: 11430 - DNA, 22 bp, Artificial Sequence
  chemically synthesized
ggcctacaccccagacagatac

SEQ ID NO: 11431 - DNA, 22 bp, Artificial Sequence
  chemically synthesized
caccccagacagatacctcagg

SEQ ID NO: 11432 - DNA, 22 bp, Artificial Sequence
  chemically synthesized
aggggtacatatgctctccttc

SEQ ID NO: 11433 - DNA, 22 bp, Artificial Sequence
  chemically synthesized
tccttctgttacagctacttct

SEQ ID NO: 11434 - DNA, 22 bp, Artificial Sequence
  chemically synthesized
cttctgttacagctacttctag

SEQ ID NO: 11435 - DNA, 22 bp, Artificial Sequence
  chemically synthesized
ctgttacagctacttctaggga

SEQ ID NO: 11436 - DNA, 22 bp, Artificial Sequence
  chemically synthesized
tgttacagctacttctagggaa

SEQ ID NO: 11437 - DNA, 22 bp, Artificial Sequence
  chemically synthesized
ttacagctacttctagggaaag

SEQ ID NO: 11438 - DNA, 22 bp, Artificial Sequence
  chemically synthesized
cagctacttctagggaaaggtt

SEQ ID NO: 11439 - DNA, 22 bp, Artificial Sequence
  chemically synthesized
cttctagggaaaggttcgagaa

SEQ ID NO: 11440 - DNA, 22 bp, Artificial Sequence
  chemically synthesized
ctagggaaaggttcgagaagta

SEQ ID NO: 11441 - DNA, 22 bp, Artificial Sequence
  chemically synthesized
tagggaaaggttcgagaagtag

SEQ ID NO: 11442 - DNA, 22 bp, Artificial Sequence
  chemically synthesized
gggaaaggttcgagaagtagta

SEQ ID NO: 11443 - DNA, 22 bp, Artificial Sequence
  chemically synthesized
gagaagtagtaccttaaagaac

SEQ ID NO: 11444 - DNA, 22 bp, Artificial Sequence
  chemically synthesized
aaagaacatatcagagacaatt

SEQ ID NO: 11445 - DNA, 22 bp, Artificial Sequence
  chemically synthesized
aagaacatatcagagacaattt

SEQ ID NO: 11446 - DNA, 22 bp, Artificial Sequence
  chemically synthesized
tttttatttttactatgaacaa

SEQ ID NO: 11447 - DNA, 22 bp, Artificial Sequence
  chemically synthesized
ttttatttttactatgaacaag

SEQ ID NO: 11448 - DNA, 22 bp, Artificial Sequence
  chemically synthesized
tttatttttactatgaacaagt

SEQ ID NO: 11449 - DNA, 22 bp, Artificial Sequence
  chemically synthesized
ttatttttactatgaacaagtt

SEQ ID NO: 11450 - DNA, 22 bp, Artificial Sequence
  chemically synthesized
tatttttactatgaacaagtta

SEQ ID NO: 11451 - DNA, 22 bp, Artificial Sequence
  chemically synthesized
atttttactatgaacaagttat

SEQ ID NO: 11452 - DNA, 22 bp, Artificial Sequence
  chemically synthesized
tttttactatgaacaagttatc

SEQ ID NO: 11453 - DNA, 22 bp, Artificial Sequence
  chemically synthesized
ttactatgaacaagttatccaa

SEQ ID NO: 11454 - DNA, 22 bp, Artificial Sequence
  chemically synthesized
tactatgaacaagttatccaaa

SEQ ID NO: 11455 - DNA, 22 bp, Artificial Sequence
  chemically synthesized
actatgaacaagttatccaaaa

SEQ ID NO: 11456 - DNA, 22 bp, Artificial Sequence
  chemically synthesized
ctatgaacaagttatccaaaat

SEQ ID NO: 11457 - DNA, 22 bp, Artificial Sequence
  chemically synthesized
tgaacaagttatccaaaattta

SEQ ID NO: 11458 - DNA, 22 bp, Artificial Sequence
  chemically synthesized
tccaaaatttattctgggcaaa

SEQ ID NO: 11459 - DNA, 22 bp, Artificial Sequence
  chemically synthesized
attctgggcaaacagaaaaaaa

SEQ ID NO: 11460 - DNA, 22 bp, Artificial Sequence
  chemically synthesized
ttctgggcaaacagaaaaaaaa

SEQ ID NO: 11461 - DNA, 22 bp, Artificial Sequence
  chemically synthesized
tgggcaaacagaaaaaaaaagg

SEQ ID NO: 11462 - DNA, 22 bp, Artificial Sequence
  chemically synthesized
ggcaaacagaaaaaaaaaggga

SEQ ID NO: 11463 - DNA, 22 bp, Artificial Sequence
  chemically synthesized
atttgtagatgcaattactatt

SEQ ID NO: 11464 - DNA, 22 bp, Artificial Sequence
  chemically synthesized
gtagatgcaattactattttcc

SEQ ID NO: 11465 - DNA, 22 bp, Artificial Sequence
  chemically synthesized
tagatgcaattactattttcct

SEQ ID NO: 11466 - DNA, 22 bp, Artificial Sequence
  chemically synthesized
ctattttcctttgtttactgat

SEQ ID NO: 11467 - DNA, 22 bp, Artificial Sequence
  chemically synthesized
ttttcctttgtttactgattta

SEQ ID NO: 11468 - DNA, 22 bp, Artificial Sequence
  chemically synthesized
tcctttgtttactgatttaact

SEQ ID NO: 11469 - DNA, 22 bp, Artificial Sequence
  chemically synthesized
cctttgtttactgatttaactc

SEQ ID NO: 11470 - DNA, 22 bp, Artificial Sequence
  chemically synthesized
ctttgtttactgatttaactct

SEQ ID NO: 11471 - DNA, 22 bp, Artificial Sequence
  chemically synthesized
tgtttactgatttaactctttg

SEQ ID NO: 11472 - DNA, 22 bp, Artificial Sequence
  chemically synthesized
gtttactgatttaactctttgg

SEQ ID NO: 11473 - DNA, 22 bp, Artificial Sequence
  chemically synthesized
tttactgatttaactctttggg

SEQ ID NO: 11474 - DNA, 22 bp, Artificial Sequence
  chemically synthesized
actgatttaactctttgggttt

SEQ ID NO: 11475 - DNA, 22 bp, Artificial Sequence
  chemically synthesized
ctgatttaactctttgggttta

SEQ ID NO: 11476 - DNA, 22 bp, Artificial Sequence
  chemically synthesized
atttaactctttgggtttaaga

SEQ ID NO: 11477 - DNA, 22 bp, Artificial Sequence
  chemically synthesized
aactctttgggtttaagatatg

SEQ ID NO: 11478 - DNA, 22 bp, Artificial Sequence
  chemically synthesized
actctttgggtttaagatatgg

SEQ ID NO: 11479 - DNA, 22 bp, Artificial Sequence
  chemically synthesized
tttgggtttaagatatggaaat

SEQ ID NO: 11480 - DNA, 22 bp, Artificial Sequence
  chemically synthesized
tgggtttaagatatggaaatct

SEQ ID NO: 11481 - DNA, 22 bp, Artificial Sequence
  chemically synthesized
gggtttaagatatggaaatctt

SEQ ID NO: 11482 - DNA, 22 bp, Artificial Sequence
  chemically synthesized
ggtttaagatatggaaatcttc

SEQ ID NO: 11483 - DNA, 22 bp, Artificial Sequence
  chemically synthesized
aagatatggaaatcttcctcca

SEQ ID NO: 11484 - DNA, 22 bp, Artificial Sequence
  chemically synthesized
agatatggaaatcttcctccag

SEQ ID NO: 11485 - DNA, 22 bp, Artificial Sequence
  chemically synthesized
cctccagtttattctgtacacc

SEQ ID NO: 11486 - DNA, 22 bp, Artificial Sequence
  chemically synthesized
ctccagtttattctgtacacct

SEQ ID NO: 11487 - DNA, 22 bp, Artificial Sequence
  chemically synthesized
cagtttattctgtacacctcca

SEQ ID NO: 11488 - DNA, 22 bp, Artificial Sequence
  chemically synthesized
attctgtacacctccataaaag

SEQ ID NO: 11489 - DNA, 22 bp, Artificial Sequence
  chemically synthesized
ttctgtacacctccataaaagc

SEQ ID NO: 11490 - DNA, 22 bp, Artificial Sequence
  chemically synthesized
tgtacacctccataaaagctcc

SEQ ID NO: 11491 - DNA, 22 bp, Artificial Sequence
  chemically synthesized
tacacctccataaaagctccat

SEQ ID NO: 11492 - DNA, 22 bp, Artificial Sequence
  chemically synthesized
cataaaagctccattaaaggct

SEQ ID NO: 11493 - DNA, 22 bp, Artificial Sequence
  chemically synthesized
cattaaaggcttattcgtatgt

SEQ ID NO: 11494 - DNA, 22 bp, Artificial Sequence
  chemically synthesized
aaggcttattcgtatgtctcca

SEQ ID NO: 11495 - DNA, 22 bp, Artificial Sequence
  chemically synthesized
attcgtatgtctccaaggcctt

SEQ ID NO: 11496 - DNA, 22 bp, Artificial Sequence
  chemically synthesized
ttcgtatgtctccaaggccttg

SEQ ID NO: 11497 - DNA, 22 bp, Artificial Sequence
  chemically synthesized
gtatgtctccaaggccttgaca

SEQ ID NO: 11498 - DNA, 22 bp, Artificial Sequence
  chemically synthesized
caaggccttgacaaatgtagcc

SEQ ID NO: 11499 - DNA, 22 bp, Artificial Sequence
  chemically synthesized
gacaaatgtagccatcaacctt

SEQ ID NO: 11500 - DNA, 22 bp, Artificial Sequence
  chemically synthesized
acaaatgtagccatcaacctta

SEQ ID NO: 11501 - DNA, 22 bp, Artificial Sequence
  chemically synthesized
atacagatacatgctgtgagaa

SEQ ID NO: 11502 - DNA, 22 bp, Artificial Sequence
  chemically synthesized
tacagatacatgctgtgagaaa

SEQ ID NO: 11503 - DNA, 22 bp, Artificial Sequence
  chemically synthesized
tgagaaaaacatttgacagtat

SEQ ID NO: 11504 - DNA, 22 bp, Artificial Sequence
  chemically synthesized
gacagtatgcaatttgcatata

SEQ ID NO: 11505 - DNA, 22 bp, Artificial Sequence
  chemically synthesized
acagtatgcaatttgcatatac

SEQ ID NO: 11506 - DNA, 22 bp, Artificial Sequence
  chemically synthesized
gcatatacctgatcttccattc

SEQ ID NO: 11507 - DNA, 22 bp, Artificial Sequence
  chemically synthesized
catatacctgatcttccattct

SEQ ID NO: 11508 - DNA, 22 bp, Artificial Sequence
  chemically synthesized
atcttccattctctctgtgcct

SEQ ID NO: 11509 - DNA, 22 bp, Artificial Sequence
  chemically synthesized
ccattctctctgtgccttctaa

SEQ ID NO: 11510 - DNA, 22 bp, Artificial Sequence
  chemically synthesized
cattctctctgtgccttctaag

SEQ ID NO: 11511 - DNA, 22 bp, Artificial Sequence
  chemically synthesized
tctctgtgccttctaagataat

SEQ ID NO: 11512 - DNA, 22 bp, Artificial Sequence
  chemically synthesized
tctgtgccttctaagataatct

SEQ ID NO: 11513 - DNA, 22 bp, Artificial Sequence
  chemically synthesized
tgtgccttctaagataatcttc

SEQ ID NO: 11514 - DNA, 22 bp, Artificial Sequence
  chemically synthesized
tgccttctaagataatcttctg

SEQ ID NO: 11515 - DNA, 22 bp, Artificial Sequence
  chemically synthesized
ctaagataatcttctggacatt

SEQ ID NO: 11516 - DNA, 22 bp, Artificial Sequence
  chemically synthesized
taagataatcttctggacattt

SEQ ID NO: 11517 - DNA, 22 bp, Artificial Sequence
  chemically synthesized
agataatcttctggacattttc

SEQ ID NO: 11518 - DNA, 22 bp, Artificial Sequence
  chemically synthesized
ctggacattttcttgtctttcc

SEQ ID NO: 11519 - DNA, 22 bp, Artificial Sequence
  chemically synthesized
tggacattttcttgtctttcct

SEQ ID NO: 11520 - DNA, 22 bp, Artificial Sequence
  chemically synthesized
gacattttcttgtctttcctga

SEQ ID NO: 11521 - DNA, 22 bp, Artificial Sequence
  chemically synthesized
tcttgtctttcctgagcaagag

SEQ ID NO: 11522 - DNA, 22 bp, Artificial Sequence
  chemically synthesized
cttgtctttcctgagcaagaga

SEQ ID NO: 11523 - DNA, 22 bp, Artificial Sequence
  chemically synthesized
ttgtctttcctgagcaagagaa

SEQ ID NO: 11524 - DNA, 22 bp, Artificial Sequence
  chemically synthesized
gtctttcctgagcaagagaaaa

SEQ ID NO: 11525 - DNA, 22 bp, Artificial Sequence
  chemically synthesized
tctttcctgagcaagagaaaat

SEQ ID NO: 11526 - DNA, 22 bp, Artificial Sequence
  chemically synthesized
tcctgagcaagagaaaatttat

SEQ ID NO: 11527 - DNA, 22 bp, Artificial Sequence
  chemically synthesized
cctgagcaagagaaaatttatt

SEQ ID NO: 11528 - DNA, 22 bp, Artificial Sequence
  chemically synthesized
ctgagcaagagaaaatttattt

SEQ ID NO: 11529 - DNA, 22 bp, Artificial Sequence
  chemically synthesized
agcaagagaaaatttatttaaa

SEQ ID NO: 11530 - DNA, 22 bp, Artificial Sequence
  chemically synthesized
atttaaaaaaacaacccacaac

SEQ ID NO: 11531 - DNA, 22 bp, Artificial Sequence
  chemically synthesized
tttaaaaaaacaacccacaaca

SEQ ID NO: 11532 - DNA, 22 bp, Artificial Sequence
  chemically synthesized
aaaaaaacaacccacaacattt

SEQ ID NO: 11533 - DNA, 22 bp, Artificial Sequence
  chemically synthesized
aaaaaacaacccacaacatttt

SEQ ID NO: 11534 - DNA, 22 bp, Artificial Sequence
  chemically synthesized
tgatacttgcttatttttcaat

SEQ ID NO: 11535 - DNA, 22 bp, Artificial Sequence
  chemically synthesized
gatacttgcttatttttcaata

SEQ ID NO: 11536 - DNA, 22 bp, Artificial Sequence
  chemically synthesized
atacttgcttatttttcaatag

SEQ ID NO: 11537 - DNA, 22 bp, Artificial Sequence
  chemically synthesized
gcttatttttcaatagacatgt

SEQ ID NO: 11538 - DNA, 22 bp, Artificial Sequence
  chemically synthesized
cttatttttcaatagacatgtt

SEQ ID NO: 11539 - DNA, 22 bp, Artificial Sequence
  chemically synthesized
atttttcaatagacatgttctt

SEQ ID NO: 11540 - DNA, 22 bp, Artificial Sequence
  chemically synthesized
tttttcaatagacatgttcttg

SEQ ID NO: 11541 - DNA, 22 bp, Artificial Sequence
  chemically synthesized
ttcaatagacatgttcttgtgt

SEQ ID NO: 11542 - DNA, 22 bp, Artificial Sequence
  chemically synthesized
tcaatagacatgttcttgtgta

SEQ ID NO: 11543 - DNA, 22 bp, Artificial Sequence
  chemically synthesized
caatagacatgttcttgtgtag

SEQ ID NO: 11544 - DNA, 22 bp, Artificial Sequence
  chemically synthesized
aatagacatgttcttgtgtagt

SEQ ID NO: 11545 - DNA, 22 bp, Artificial Sequence
  chemically synthesized
ttgtgtagtaatttagttcaca

SEQ ID NO: 11546 - DNA, 22 bp, Artificial Sequence
  chemically synthesized
gtgtagtaatttagttcacaag

SEQ ID NO: 11547 - DNA, 22 bp, Artificial Sequence
  chemically synthesized
tgtagtaatttagttcacaaga

SEQ ID NO: 11548 - DNA, 22 bp, Artificial Sequence
  chemically synthesized
agttcacaagaaaaatactttc

SEQ ID NO: 11549 - DNA, 22 bp, Artificial Sequence
  chemically synthesized
gttcacaagaaaaatactttct

SEQ ID NO: 11550 - DNA, 22 bp, Artificial Sequence
  chemically synthesized
acaagaaaaatactttctactt

SEQ ID NO: 11551 - DNA, 22 bp, Artificial Sequence
  chemically synthesized
tctactttagggaaaaaatggg

SEQ ID NO: 11552 - DNA, 22 bp, Artificial Sequence
  chemically synthesized
ctactttagggaaaaaatgggg

SEQ ID NO: 11553 - DNA, 22 bp, Artificial Sequence
  chemically synthesized
tactttagggaaaaaatggggg

SEQ ID NO: 11554 - DNA, 22 bp, Artificial Sequence
  chemically synthesized
ctttagggaaaaaatgggggca

SEQ ID NO: 11555 - DNA, 22 bp, Artificial Sequence
  chemically synthesized
tagggaaaaaatgggggcaggg

SEQ ID NO: 11556 - DNA, 22 bp, Artificial Sequence
  chemically synthesized
agggaaaaaatgggggcagggg

SEQ ID NO: 11557 - DNA, 22 bp, Artificial Sequence
  chemically synthesized
gggaaaaaatgggggcaggggt

SEQ ID NO: 11558 - DNA, 22 bp, Artificial Sequence
  chemically synthesized
acccaacaaatgcatgttctca

SEQ ID NO: 11559 - DNA, 22 bp, Artificial Sequence
  chemically synthesized
tcataaacaatacaaaataaaa

SEQ ID NO: 11560 - DNA, 22 bp, Artificial Sequence
  chemically synthesized
ataaacaatacaaaataaaatc

SEQ ID NO: 11561 - DNA, 22 bp, Artificial Sequence
  chemically synthesized
tattctgcagtgaaaaaaagat

SEQ ID NO: 11562 - DNA, 22 bp, Artificial Sequence
  chemically synthesized
attctgcagtgaaaaaaagata

SEQ ID NO: 11563 - DNA, 22 bp, Artificial Sequence
  chemically synthesized
ttctgcagtgaaaaaaagataa

SEQ ID NO: 11564 - DNA, 22 bp, Artificial Sequence
  chemically synthesized
tgcagtgaaaaaaagataactt

SEQ ID NO: 11565 - DNA, 22 bp, Artificial Sequence
  chemically synthesized
cagtgaaaaaaagataacttca

SEQ ID NO: 11566 - DNA, 22 bp, Artificial Sequence
  chemically synthesized
cacagaaaacagtcaatgtaac

SEQ ID NO: 11567 - DNA, 22 bp, Artificial Sequence
  chemically synthesized
acagaaaacagtcaatgtaaca

SEQ ID NO: 11568 - DNA, 22 bp, Artificial Sequence
  chemically synthesized
catagtttcaaaaaggaaaaga

SEQ ID NO: 11569 - DNA, 22 bp, Artificial Sequence
  chemically synthesized
caaaaaggaaaagaatgacttg

SEQ ID NO: 11570 - DNA, 22 bp, Artificial Sequence
  chemically synthesized
aaaaaggaaaagaatgacttgc

SEQ ID NO: 11571 - DNA, 22 bp, Artificial Sequence
  chemically synthesized
gcacttttcaaattaaacatta

SEQ ID NO: 11572 - DNA, 22 bp, Artificial Sequence
  chemically synthesized
cacttttcaaattaaacattat

SEQ ID NO: 11573 - DNA, 22 bp, Artificial Sequence
  chemically synthesized
ttcaaattaaacattatgatgt

SEQ ID NO: 11574 - DNA, 22 bp, Artificial Sequence
  chemically synthesized
tcaaattaaacattatgatgtt

SEQ ID NO: 11575 - DNA, 22 bp, Artificial Sequence
  chemically synthesized
caaattaaacattatgatgttg

SEQ ID NO: 11576 - DNA, 22 bp, Artificial Sequence
  chemically synthesized
aaattaaacattatgatgttgt

SEQ ID NO: 11577 - DNA, 22 bp, Artificial Sequence
  chemically synthesized
aacattatgatgttgtttaaaa

SEQ ID NO: 11578 - DNA, 22 bp, Artificial Sequence
  chemically synthesized
tgatgttgtttaaaagattctc

SEQ ID NO: 11579 - DNA, 22 bp, Artificial Sequence
  chemically synthesized
tttaaaagattctcctgatttt

SEQ ID NO: 11580 - DNA, 22 bp, Artificial Sequence
  chemically synthesized
aaaagattctcctgattttaag

SEQ ID NO: 11581 - DNA, 22 bp, Artificial Sequence
  chemically synthesized
aaagattctcctgattttaaga

SEQ ID NO: 11582 - DNA, 22 bp, Artificial Sequence
  chemically synthesized
tcctgattttaagagtttcata

SEQ ID NO: 11583 - DNA, 22 bp, Artificial Sequence
  chemically synthesized
ctgattttaagagtttcataat

SEQ ID NO: 11584 - DNA, 22 bp, Artificial Sequence
  chemically synthesized
attttaagagtttcataatgtg

SEQ ID NO: 11585 - DNA, 22 bp, Artificial Sequence
  chemically synthesized
taagagtttcataatgtgagaa

SEQ ID NO: 11586 - DNA, 22 bp, Artificial Sequence
  chemically synthesized
aagagtttcataatgtgagaaa

SEQ ID NO: 11587 - DNA, 22 bp, Artificial Sequence
  chemically synthesized
agagtttcataatgtgagaaaa

SEQ ID NO: 11588 - DNA, 22 bp, Artificial Sequence
  chemically synthesized
cataatgtgagaaaaaaggaag

SEQ ID NO: 11589 - DNA, 22 bp, Artificial Sequence
  chemically synthesized
ataatgtgagaaaaaaggaagt

SEQ ID NO: 11590 - DNA, 22 bp, Artificial Sequence
  chemically synthesized
caaacatagtaaaaaattattc

SEQ ID NO: 11591 - DNA, 22 bp, Artificial Sequence
  chemically synthesized
ttcttttaaaagatattatttt

SEQ ID NO: 11592 - DNA, 22 bp, Artificial Sequence
  chemically synthesized
ttttaaaagatattatttttcc

SEQ ID NO: 11593 - DNA, 22 bp, Artificial Sequence
  chemically synthesized
ttaaaagatattatttttcctt

SEQ ID NO: 11594 - DNA, 22 bp, Artificial Sequence
  chemically synthesized
taaaagatattatttttcctta

SEQ ID NO: 11595 - DNA, 22 bp, Artificial Sequence
  chemically synthesized
aaaagatattatttttccttac

SEQ ID NO: 11596 - DNA, 22 bp, Artificial Sequence
  chemically synthesized
aaagatattatttttccttact

SEQ ID NO: 11597 - DNA, 22 bp, Artificial Sequence
  chemically synthesized
tttttccttactattgggcaaa

SEQ ID NO: 11598 - DNA, 22 bp, Artificial Sequence
  chemically synthesized
ttccttactattgggcaaaagc

SEQ ID NO: 11599 - DNA, 22 bp, Artificial Sequence
  chemically synthesized
tccttactattgggcaaaagcc

SEQ ID NO: 11600 - DNA, 22 bp, Artificial Sequence
  chemically synthesized
ccttactattgggcaaaagcct

SEQ ID NO: 11601 - DNA, 22 bp, Artificial Sequence
  chemically synthesized
cttactattgggcaaaagcctt

SEQ ID NO: 11602 - DNA, 22 bp, Artificial Sequence
  chemically synthesized
actattgggcaaaagcctttta

SEQ ID NO: 11603 - DNA, 22 bp, Artificial Sequence
  chemically synthesized
ctattgggcaaaagccttttaa

SEQ ID NO: 11604 - DNA, 22 bp, Artificial Sequence
  chemically synthesized
ttgggcaaaagccttttaaaac

SEQ ID NO: 11605 - DNA, 22 bp, Artificial Sequence
  chemically synthesized
ggcaaaagccttttaaaactgg

SEQ ID NO: 11606 - DNA, 22 bp, Artificial Sequence
  chemically synthesized
ttaaaactggtaatgcttaatg

SEQ ID NO: 11607 - DNA, 22 bp, Artificial Sequence
  chemically synthesized
taaaactggtaatgcttaatgg

SEQ ID NO: 11608 - DNA, 22 bp, Artificial Sequence
  chemically synthesized
aaaactggtaatgcttaatgga

SEQ ID NO: 11609 - DNA, 22 bp, Artificial Sequence
  chemically synthesized
aaactggtaatgcttaatggac

SEQ ID NO: 11610 - DNA, 22 bp, Artificial Sequence
  chemically synthesized
gtaatgcttaatggactttcag

SEQ ID NO: 11611 - DNA, 22 bp, Artificial Sequence
  chemically synthesized
aatggactttcaggttagtatc

SEQ ID NO: 11612 - DNA, 22 bp, Artificial Sequence
  chemically synthesized
atggactttcaggttagtatca

SEQ ID NO: 11613 - DNA, 22 bp, Artificial Sequence
  chemically synthesized
tcaggttagtatcaaactggaa

SEQ ID NO: 11614 - DNA, 22 bp, Artificial Sequence
  chemically synthesized
caggttagtatcaaactggaac

SEQ ID NO: 11615 - DNA, 22 bp, Artificial Sequence
  chemically synthesized
aggttagtatcaaactggaaca

SEQ ID NO: 11616 - DNA, 22 bp, Artificial Sequence
  chemically synthesized
gtatcaaactggaacacaggaa

SEQ ID NO: 11617 - DNA, 22 bp, Artificial Sequence
  chemically synthesized
gaacacaggaaggagaattcaa

SEQ ID NO: 11618 - DNA, 22 bp, Artificial Sequence
  chemically synthesized
aatgtgttctttagatacatca

SEQ ID NO: 11619 - DNA, 22 bp, Artificial Sequence
  chemically synthesized
tttagatacatcaaaactatac

SEQ ID NO: 11620 - DNA, 22 bp, Artificial Sequence
  chemically synthesized
tagatacatcaaaactatactg

SEQ ID NO: 11621 - DNA, 22 bp, Artificial Sequence
  chemically synthesized
agatacatcaaaactatactga

SEQ ID NO: 11622 - DNA, 22 bp, Artificial Sequence
  chemically synthesized
gatacatcaaaactatactgaa

SEQ ID NO: 11623 - DNA, 22 bp, Artificial Sequence
  chemically synthesized
tactgaaatgtaaatagcatta

SEQ ID NO: 11624 - DNA, 22 bp, Artificial Sequence
  chemically synthesized
aaatgtaaatagcattatatat

SEQ ID NO: 11625 - DNA, 22 bp, Artificial Sequence
  chemically synthesized
tatattcaactacaggatttag

SEQ ID NO: 11626 - DNA, 22 bp, Artificial Sequence
  chemically synthesized
aactacaggatttaggaaaaca

SEQ ID NO: 11627 - DNA, 22 bp, Artificial Sequence
  chemically synthesized
caggatttaggaaaacaataat

SEQ ID NO: 11628 - DNA, 22 bp, Artificial Sequence
  chemically synthesized
aggaaaacaataatttctgtaa

SEQ ID NO: 11629 - DNA, 22 bp, Artificial Sequence
  chemically synthesized
ggaaaacaataatttctgtaag

SEQ ID NO: 11630 - DNA, 22 bp, Artificial Sequence
  chemically synthesized
ctgtaagattaaaaggaattct

SEQ ID NO: 11631 - DNA, 22 bp, Artificial Sequence
  chemically synthesized
tgtaagattaaaaggaattctc

SEQ ID NO: 11632 - DNA, 22 bp, Artificial Sequence
  chemically synthesized
taagattaaaaggaattctctt

SEQ ID NO: 11633 - DNA, 22 bp, Artificial Sequence
  chemically synthesized
aaaggaattctcttgggaacca

SEQ ID NO: 11634 - DNA, 22 bp, Artificial Sequence
  chemically synthesized
tcttgggaaccattccattcaa

SEQ ID NO: 11635 - DNA, 22 bp, Artificial Sequence
  chemically synthesized
ttgggaaccattccattcaacc

SEQ ID NO: 11636 - DNA, 22 bp, Artificial Sequence
  chemically synthesized
gggaaccattccattcaacctc

SEQ ID NO: 11637 - DNA, 22 bp, Artificial Sequence
  chemically synthesized
ggaaccattccattcaacctcc

SEQ ID NO: 11638 - DNA, 22 bp, Artificial Sequence
  chemically synthesized
cattcaacctcctcattttatg

SEQ ID NO: 11639 - DNA, 22 bp, Artificial Sequence
  chemically synthesized
aacctcctcattttatgaacct

SEQ ID NO: 11640 - DNA, 22 bp, Artificial Sequence
  chemically synthesized
ctcattttatgaacctgggaac

SEQ ID NO: 11641 - DNA, 22 bp, Artificial Sequence
  chemically synthesized
attttatgaacctgggaacttg

SEQ ID NO: 11642 - DNA, 22 bp, Artificial Sequence
  chemically synthesized
tatgaacctgggaacttggcaa

SEQ ID NO: 11643 - DNA, 22 bp, Artificial Sequence
  chemically synthesized
atgaacctgggaacttggcaaa

SEQ ID NO: 11644 - DNA, 22 bp, Artificial Sequence
  chemically synthesized
tgaacctgggaacttggcaaag

SEQ ID NO: 11645 - DNA, 22 bp, Artificial Sequence
  chemically synthesized
ggaacttggcaaagaggttaaa

SEQ ID NO: 11646 - DNA, 22 bp, Artificial Sequence
  chemically synthesized
ggcaaagaggttaaagagacca

SEQ ID NO: 11647 - DNA, 22 bp, Artificial Sequence
  chemically synthesized
gcaaagaggttaaagagaccaa

SEQ ID NO: 11648 - DNA, 22 bp, Artificial Sequence
  chemically synthesized
aagagaccaaaggctacatgac

SEQ ID NO: 11649 - DNA, 22 bp, Artificial Sequence
  chemically synthesized
catgaccaacagcttatgaaac

SEQ ID NO: 11650 - DNA, 22 bp, Artificial Sequence
  chemically synthesized
atgaaactattactttgaactg

SEQ ID NO: 11651 - DNA, 22 bp, Artificial Sequence
  chemically synthesized
tgaaactattactttgaactgt

SEQ ID NO: 11652 - DNA, 22 bp, Artificial Sequence
  chemically synthesized
ttactttgaactgttatactta

SEQ ID NO: 11653 - DNA, 22 bp, Artificial Sequence
  chemically synthesized
ctttgaactgttatacttacac

SEQ ID NO: 11654 - DNA, 22 bp, Artificial Sequence
  chemically synthesized
tgaactgttatacttacacata

SEQ ID NO: 11655 - DNA, 22 bp, Artificial Sequence
  chemically synthesized
gaactgttatacttacacatag

SEQ ID NO: 11656 - DNA, 22 bp, Artificial Sequence
  chemically synthesized
aactgttatacttacacatagt

SEQ ID NO: 11657 - DNA, 22 bp, Artificial Sequence
  chemically synthesized
ttatacttacacatagtagtaa

SEQ ID NO: 11658 - DNA, 22 bp, Artificial Sequence
  chemically synthesized
tacttacacatagtagtaagca

SEQ ID NO: 11659 - DNA, 22 bp, Artificial Sequence
  chemically synthesized
acacatagtagtaagcaaaaga

SEQ ID NO: 11660 - DNA, 22 bp, Artificial Sequence
  chemically synthesized
cacatagtagtaagcaaaagac

SEQ ID NO: 11661 - DNA, 22 bp, Artificial Sequence
  chemically synthesized
tgcaatgaaagggaaacaaaag

SEQ ID NO: 11662 - DNA, 22 bp, Artificial Sequence
  chemically synthesized
gagtcaaaggctcccaagaaga

SEQ ID NO: 11663 - DNA, 22 bp, Artificial Sequence
  chemically synthesized
ccaagaagaatccagggtctaa

SEQ ID NO: 11664 - DNA, 22 bp, Artificial Sequence
  chemically synthesized
aaagtttctttatttgtctaag

SEQ ID NO: 11665 - DNA, 22 bp, Artificial Sequence
  chemically synthesized
ctttatttgtctaagctttagc

SEQ ID NO: 11666 - DNA, 22 bp, Artificial Sequence
  chemically synthesized
tttatttgtctaagctttagct

SEQ ID NO: 11667 - DNA, 22 bp, Artificial Sequence
  chemically synthesized
tatttgtctaagctttagcttt

SEQ ID NO: 11668 - DNA, 22 bp, Artificial Sequence
  chemically synthesized
atttgtctaagctttagctttt

SEQ ID NO: 11669 - DNA, 22 bp, Artificial Sequence
  chemically synthesized
tttgtctaagctttagcttttc

SEQ ID NO: 11670 - DNA, 22 bp, Artificial Sequence
  chemically synthesized
gtctaagctttagcttttcatc

SEQ ID NO: 11671 - DNA, 22 bp, Artificial Sequence
  chemically synthesized
tctaagctttagcttttcatct

SEQ ID NO: 11672 - DNA, 22 bp, Artificial Sequence
  chemically synthesized
agctttagcttttcatctataa

SEQ ID NO: 11673 - DNA, 22 bp, Artificial Sequence
  chemically synthesized
tagcttttcatctataatgtgg

SEQ ID NO: 11674 - DNA, 22 bp, Artificial Sequence
  chemically synthesized
agcttttcatctataatgtgga

SEQ ID NO: 11675 - DNA, 22 bp, Artificial Sequence
  chemically synthesized
gcttttcatctataatgtggag

SEQ ID NO: 11676 - DNA, 22 bp, Artificial Sequence
  chemically synthesized
ttcatctataatgtggagctac

SEQ ID NO: 11677 - DNA, 22 bp, Artificial Sequence
  chemically synthesized
tcatctataatgtggagctacc

SEQ ID NO: 11678 - DNA, 22 bp, Artificial Sequence
  chemically synthesized
catctataatgtggagctacca

SEQ ID NO: 11679 - DNA, 22 bp, Artificial Sequence
  chemically synthesized
atctataatgtggagctaccat

SEQ ID NO: 11680 - DNA, 22 bp, Artificial Sequence
  chemically synthesized
taatgtggagctaccatttcgt

SEQ ID NO: 11681 - DNA, 22 bp, Artificial Sequence
  chemically synthesized
ccatttcgtaccttccacagtt

SEQ ID NO: 11682 - DNA, 22 bp, Artificial Sequence
  chemically synthesized
cgtaccttccacagttaatatg

SEQ ID NO: 11683 - DNA, 22 bp, Artificial Sequence
  chemically synthesized
gtaccttccacagttaatatga

SEQ ID NO: 11684 - DNA, 22 bp, Artificial Sequence
  chemically synthesized
ccacagttaatatgaagatgac

SEQ ID NO: 11685 - DNA, 22 bp, Artificial Sequence
  chemically synthesized
cacagttaatatgaagatgaca

SEQ ID NO: 11686 - DNA, 22 bp, Artificial Sequence
  chemically synthesized
atatgaagatgacaggtatcag

SEQ ID NO: 11687 - DNA, 22 bp, Artificial Sequence
  chemically synthesized
gtatctaatagggtaaatgcaa

SEQ ID NO: 11688 - DNA, 22 bp, Artificial Sequence
  chemically synthesized
tatctaatagggtaaatgcaaa

SEQ ID NO: 11689 - DNA, 22 bp, Artificial Sequence
  chemically synthesized
atagggtaaatgcaaaataaat

SEQ ID NO: 11690 - DNA, 22 bp, Artificial Sequence
  chemically synthesized
attgtttgatgttcactgcata

SEQ ID NO: 11691 - DNA, 22 bp, Artificial Sequence
  chemically synthesized
ttgtttgatgttcactgcatat

SEQ ID NO: 11692 - DNA, 22 bp, Artificial Sequence
  chemically synthesized
tttgatgttcactgcatataat

SEQ ID NO: 11693 - DNA, 22 bp, Artificial Sequence
  chemically synthesized
gatgttcactgcatataattaa

SEQ ID NO: 11694 - DNA, 22 bp, Artificial Sequence
  chemically synthesized
atgttcactgcatataattaaa

SEQ ID NO: 11695 - DNA, 22 bp, Artificial Sequence
  chemically synthesized
actgcatataattaaaaaaata

SEQ ID NO: 11696 - DNA, 22 bp, Artificial Sequence
  chemically synthesized
catataattaaaaaaataagat

SEQ ID NO: 11697 - DNA, 22 bp, Artificial Sequence
  chemically synthesized
aaaaaataagatttatatgtac

SEQ ID NO: 11698 - DNA, 22 bp, Artificial Sequence
  chemically synthesized
atatgtaccagaaaataagctt

SEQ ID NO: 11699 - DNA, 22 bp, Artificial Sequence
  chemically synthesized
tatgtaccagaaaataagcttt

SEQ ID NO: 11700 - DNA, 22 bp, Artificial Sequence
  chemically synthesized
tcaacagataggttaacatgat

SEQ ID NO: 11701 - DNA, 22 bp, Artificial Sequence
  chemically synthesized
caacagataggttaacatgatt

SEQ ID NO: 11702 - DNA, 22 bp, Artificial Sequence
  chemically synthesized
aacagataggttaacatgatta

SEQ ID NO: 11703 - DNA, 22 bp, Artificial Sequence
  chemically synthesized
acatgattaataagctgaaaaa

SEQ ID NO: 11704 - DNA, 22 bp, Artificial Sequence
  chemically synthesized
ataagctgaaaaatcacttacc

SEQ ID NO: 11705 - DNA, 22 bp, Artificial Sequence
  chemically synthesized
aaaaatcacttaccttatgcat

SEQ ID NO: 11706 - DNA, 22 bp, Artificial Sequence
  chemically synthesized
accttatgcatccatattcttc

SEQ ID NO: 11707 - DNA, 22 bp, Artificial Sequence
  chemically synthesized
ccttatgcatccatattcttcc

SEQ ID NO: 11708 - DNA, 22 bp, Artificial Sequence
  chemically synthesized
atgcatccatattcttcctttc

SEQ ID NO: 11709 - DNA, 22 bp, Artificial Sequence
  chemically synthesized
tgcatccatattcttcctttcc

SEQ ID NO: 11710 - DNA, 22 bp, Artificial Sequence
  chemically synthesized
ttcctttccggattatatgtgt

SEQ ID NO: 11711 - DNA, 22 bp, Artificial Sequence
  chemically synthesized
cctttccggattatatgtgtta

SEQ ID NO: 11712 - DNA, 22 bp, Artificial Sequence
  chemically synthesized
ctttccggattatatgtgttaa

SEQ ID NO: 11713 - DNA, 22 bp, Artificial Sequence
  chemically synthesized
tccggattatatgtgttaatct

SEQ ID NO: 11714 - DNA, 22 bp, Artificial Sequence
  chemically synthesized
ccggattatatgtgttaatcta

SEQ ID NO: 11715 - DNA, 22 bp, Artificial Sequence
  chemically synthesized
cggattatatgtgttaatctat

SEQ ID NO: 11716 - DNA, 22 bp, Artificial Sequence
  chemically synthesized
tatgtgttaatctatcaacaca

SEQ ID NO: 11717 - DNA, 22 bp, Artificial Sequence
  chemically synthesized
atctatcaacacacactctatg

SEQ ID NO: 11718 - DNA, 22 bp, Artificial Sequence
  chemically synthesized
tcaacacacactctatgaagtg

SEQ ID NO: 11719 - DNA, 22 bp, Artificial Sequence
  chemically synthesized
tatgaagtgggaggtagaaact

SEQ ID NO: 11720 - DNA, 22 bp, Artificial Sequence
  chemically synthesized
tgaagtgggaggtagaaactaa

SEQ ID NO: 11721 - DNA, 22 bp, Artificial Sequence
  chemically synthesized
agttctgtctgtggaagtataa

SEQ ID NO: 11722 - DNA, 22 bp, Artificial Sequence
  chemically synthesized
tgtctgtggaagtataattgat

SEQ ID NO: 11723 - DNA, 22 bp, Artificial Sequence
  chemically synthesized
tctgtggaagtataattgatag

SEQ ID NO: 11724 - DNA, 22 bp, Artificial Sequence
  chemically synthesized
tggaagtataattgatagtcca

SEQ ID NO: 11725 - DNA, 22 bp, Artificial Sequence
  chemically synthesized
atagtccatatgtgctgcgatc

SEQ ID NO: 11726 - DNA, 22 bp, Artificial Sequence
  chemically synthesized
cgatccccattccagtttccat

SEQ ID NO: 11727 - DNA, 22 bp, Artificial Sequence
  chemically synthesized
cagtttccatcaaagattaatg

SEQ ID NO: 11728 - DNA, 22 bp, Artificial Sequence
  chemically synthesized
ccatcaaagattaatgaaacaa

SEQ ID NO: 11729 - DNA, 22 bp, Artificial Sequence
  chemically synthesized
catcaaagattaatgaaacaat

SEQ ID NO: 11730 - DNA, 22 bp, Artificial Sequence
  chemically synthesized
atgaaacaataatcactccctt

SEQ ID NO: 11731 - DNA, 22 bp, Artificial Sequence
  chemically synthesized
ccttttcagacaagacaaaaaa

SEQ ID NO: 11732 - DNA, 22 bp, Artificial Sequence
  chemically synthesized
ttcagacaagacaaaaaacttt

SEQ ID NO: 11733 - DNA, 22 bp, Artificial Sequence
  chemically synthesized
tcagacaagacaaaaaacttta

SEQ ID NO: 11734 - DNA, 22 bp, Artificial Sequence
  chemically synthesized
cagacaagacaaaaaactttac

SEQ ID NO: 11735 - DNA, 22 bp, Artificial Sequence
  chemically synthesized
agacaagacaaaaaactttaca

SEQ ID NO: 11736 - DNA, 22 bp, Artificial Sequence
  chemically synthesized
tacatctatagcaccactctct

SEQ ID NO: 11737 - DNA, 22 bp, Artificial Sequence
  chemically synthesized
acatctatagcaccactctctg

SEQ ID NO: 11738 - DNA, 22 bp, Artificial Sequence
  chemically synthesized
catctatagcaccactctctgc

SEQ ID NO: 11739 - DNA, 22 bp, Artificial Sequence
  chemically synthesized
tagcaccactctctgcatttcg

SEQ ID NO: 11740 - DNA, 22 bp, Artificial Sequence
  chemically synthesized
tctgcatttcgaaggatttctc

SEQ ID NO: 11741 - DNA, 22 bp, Artificial Sequence
  chemically synthesized
tgcatttcgaaggatttctcca

SEQ ID NO: 11742 - DNA, 22 bp, Artificial Sequence
  chemically synthesized
catttcgaaggatttctccatt

SEQ ID NO: 11743 - DNA, 22 bp, Artificial Sequence
  chemically synthesized
cgaaggatttctccatttagag

SEQ ID NO: 11744 - DNA, 22 bp, Artificial Sequence
  chemically synthesized
gaaggatttctccatttagagt

SEQ ID NO: 11745 - DNA, 22 bp, Artificial Sequence
  chemically synthesized
ctccatttagagtgtggttggc

SEQ ID NO: 11746 - DNA, 22 bp, Artificial Sequence
  chemically synthesized
tccatttagagtgtggttggca

SEQ ID NO: 11747 - DNA, 22 bp, Artificial Sequence
  chemically synthesized
catttagagtgtggttggcaag

SEQ ID NO: 11748 - DNA, 22 bp, Artificial Sequence
  chemically synthesized
agagtgtggttggcaagaaaag

SEQ ID NO: 11749 - DNA, 22 bp, Artificial Sequence
  chemically synthesized
gagtgtggttggcaagaaaagt

SEQ ID NO: 11750 - DNA, 22 bp, Artificial Sequence
  chemically synthesized
gcaagaaaagttatttctccat

SEQ ID NO: 11751 - DNA, 22 bp, Artificial Sequence
  chemically synthesized
tttctccatcactgagaagtac

SEQ ID NO: 11752 - DNA, 22 bp, Artificial Sequence
  chemically synthesized
ctccatcactgagaagtacctg

SEQ ID NO: 11753 - DNA, 22 bp, Artificial Sequence
  chemically synthesized
tccatcactgagaagtacctgt

SEQ ID NO: 11754 - DNA, 22 bp, Artificial Sequence
  chemically synthesized
catcactgagaagtacctgttc

SEQ ID NO: 11755 - DNA, 22 bp, Artificial Sequence
  chemically synthesized
agaagtacctgttctgtctttg

SEQ ID NO: 11756 - DNA, 22 bp, Artificial Sequence
  chemically synthesized
ttctgtctttggagcccaaatg

SEQ ID NO: 11757 - DNA, 22 bp, Artificial Sequence
  chemically synthesized
tgtctttggagcccaaatgtgc

SEQ ID NO: 11758 - DNA, 22 bp, Artificial Sequence
  chemically synthesized
tctttggagcccaaatgtgcct

SEQ ID NO: 11759 - DNA, 22 bp, Artificial Sequence
  chemically synthesized
tggagcccaaatgtgccttact

SEQ ID NO: 11760 - DNA, 22 bp, Artificial Sequence
  chemically synthesized
ggagcccaaatgtgccttactc

SEQ ID NO: 11761 - DNA, 22 bp, Artificial Sequence
  chemically synthesized
gagcccaaatgtgccttactct

SEQ ID NO: 11762 - DNA, 22 bp, Artificial Sequence
  chemically synthesized
actctaggaccaagaatattgt

SEQ ID NO: 11763 - DNA, 22 bp, Artificial Sequence
  chemically synthesized
ctctaggaccaagaatattgtc

SEQ ID NO: 11764 - DNA, 22 bp, Artificial Sequence
  chemically synthesized
taggaccaagaatattgtccca

SEQ ID NO: 11765 - DNA, 22 bp, Artificial Sequence
  chemically synthesized
ggaccaagaatattgtcccagt

SEQ ID NO: 11766 - DNA, 22 bp, Artificial Sequence
  chemically synthesized
tcccagtaagcaaaagtagctg

SEQ ID NO: 11767 - DNA, 22 bp, Artificial Sequence
  chemically synthesized
ctaataaaggtgatttgccact

SEQ ID NO: 11768 - DNA, 22 bp, Artificial Sequence
  chemically synthesized
ataaaggtgatttgccacttaa

SEQ ID NO: 11769 - DNA, 22 bp, Artificial Sequence
  chemically synthesized
gccacttaaagcaatctctgtc

SEQ ID NO: 11770 - DNA, 22 bp, Artificial Sequence
  chemically synthesized
ccacttaaagcaatctctgtct

SEQ ID NO: 11771 - DNA, 22 bp, Artificial Sequence
  chemically synthesized
aaagcaatctctgtcttggcaa

SEQ ID NO: 11772 - DNA, 22 bp, Artificial Sequence
  chemically synthesized
aagcaatctctgtcttggcaac

SEQ ID NO: 11773 - DNA, 22 bp, Artificial Sequence
  chemically synthesized
tgtcttggcaacagctggagat

SEQ ID NO: 11774 - DNA, 22 bp, Artificial Sequence
  chemically synthesized
tcttggcaacagctggagatgg

SEQ ID NO: 11775 - DNA, 22 bp, Artificial Sequence
  chemically synthesized
ggcaacagctggagatggcggt

SEQ ID NO: 11776 - DNA, 22 bp, Artificial Sequence
  chemically synthesized
gcaacagctggagatggcggtg

SEQ ID NO: 11777 - DNA, 22 bp, Artificial Sequence
  chemically synthesized
gagatggcggtgggcaaagagt

SEQ ID NO: 11778 - DNA, 22 bp, Artificial Sequence
  chemically synthesized
cattccaactgtcacattatcc

SEQ ID NO: 11779 - DNA, 22 bp, Artificial Sequence
  chemically synthesized
caactgtcacattatccaaatg

SEQ ID NO: 11780 - DNA, 22 bp, Artificial Sequence
  chemically synthesized
tcacattatccaaatgctccgg

SEQ ID NO: 11781 - DNA, 22 bp, Artificial Sequence
  chemically synthesized
tccaaatgctccggagatatct

SEQ ID NO: 11782 - DNA, 22 bp, Artificial Sequence
  chemically synthesized
cggagatatctaaacaatgaca

SEQ ID NO: 11783 - DNA, 22 bp, Artificial Sequence
  chemically synthesized
aacaatgacatatgaaaccaat

SEQ ID NO: 11784 - DNA, 22 bp, Artificial Sequence
  chemically synthesized
ggttcagcaatttaaagatatc

SEQ ID NO: 11785 - DNA, 22 bp, Artificial Sequence
  chemically synthesized
agcaatttaaagatatccatca

SEQ ID NO: 11786 - DNA, 22 bp, Artificial Sequence
  chemically synthesized
aaagatatccatcaaaacccca

SEQ ID NO: 11787 - DNA, 22 bp, Artificial Sequence
  chemically synthesized
aagatatccatcaaaaccccaa

SEQ ID NO: 11788 - DNA, 22 bp, Artificial Sequence
  chemically synthesized
agacatatttggtttgtcctct

SEQ ID NO: 11789 - DNA, 22 bp, Artificial Sequence
  chemically synthesized
gacatatttggtttgtcctctt

SEQ ID NO: 11790 - DNA, 22 bp, Artificial Sequence
  chemically synthesized
ggtttgtcctcttaagtcaaag

SEQ ID NO: 11791 - DNA, 22 bp, Artificial Sequence
  chemically synthesized
gtttgtcctcttaagtcaaaga

SEQ ID NO: 11792 - DNA, 22 bp, Artificial Sequence
  chemically synthesized
gtcctcttaagtcaaagatgtg

SEQ ID NO: 11793 - DNA, 22 bp, Artificial Sequence
  chemically synthesized
tcctcttaagtcaaagatgtgg

SEQ ID NO: 11794 - DNA, 22 bp, Artificial Sequence
  chemically synthesized
ttaagtcaaagatgtggaatcc

SEQ ID NO: 11795 - DNA, 22 bp, Artificial Sequence
  chemically synthesized
aagtcaaagatgtggaatcctg

SEQ ID NO: 11796 - DNA, 22 bp, Artificial Sequence
  chemically synthesized
agtcaaagatgtggaatcctgt

SEQ ID NO: 11797 - DNA, 22 bp, Artificial Sequence
  chemically synthesized
ttatctcctatcaggataaaga

SEQ ID NO: 11798 - DNA, 22 bp, Artificial Sequence
  chemically synthesized
tctcctatcaggataaagacat

SEQ ID NO: 11799 - DNA, 22 bp, Artificial Sequence
  chemically synthesized
ctatcaggataaagacattcaa

SEQ ID NO: 11800 - DNA, 22 bp, Artificial Sequence
  chemically synthesized
tcaggataaagacattcaacta

SEQ ID NO: 11801 - DNA, 22 bp, Artificial Sequence
  chemically synthesized
aactagcacagtaggtgcacat

SEQ ID NO: 11802 - DNA, 22 bp, Artificial Sequence
  chemically synthesized
gcacagtaggtgcacattaaat

SEQ ID NO: 11803 - DNA, 22 bp, Artificial Sequence
  chemically synthesized
aatgtttgttgatatgatcatt

SEQ ID NO: 11804 - DNA, 22 bp, Artificial Sequence
  chemically synthesized
gttgatatgatcattttacaag

SEQ ID NO: 11805 - DNA, 22 bp, Artificial Sequence
  chemically synthesized
ttgatatgatcattttacaaga

SEQ ID NO: 11806 - DNA, 22 bp, Artificial Sequence
  chemically synthesized
atatgatcattttacaagacat

SEQ ID NO: 11807 - DNA, 22 bp, Artificial Sequence
  chemically synthesized
tacaagacatggtaacttgtta

SEQ ID NO: 11808 - DNA, 22 bp, Artificial Sequence
  chemically synthesized
acaagacatggtaacttgttac

SEQ ID NO: 11809 - DNA, 22 bp, Artificial Sequence
  chemically synthesized
caagacatggtaacttgttact

SEQ ID NO: 11810 - DNA, 22 bp, Artificial Sequence
  chemically synthesized
gttacttatattcagggcatac

SEQ ID NO: 11811 - DNA, 22 bp, Artificial Sequence
  chemically synthesized
ttacttatattcagggcataca

SEQ ID NO: 11812 - DNA, 22 bp, Artificial Sequence
  chemically synthesized
cttatattcagggcatacattt

SEQ ID NO: 11813 - DNA, 22 bp, Artificial Sequence
  chemically synthesized
atattcagggcatacatttaga

SEQ ID NO: 11814 - DNA, 22 bp, Artificial Sequence
  chemically synthesized
tattcagggcatacatttagaa

SEQ ID NO: 11815 - DNA, 22 bp, Artificial Sequence
  chemically synthesized
agggcatacatttagaaattca

SEQ ID NO: 11816 - DNA, 22 bp, Artificial Sequence
  chemically synthesized
agaaattcaaagaaataactta

SEQ ID NO: 11817 - DNA, 22 bp, Artificial Sequence
  chemically synthesized
gaaattcaaagaaataacttaa

SEQ ID NO: 11818 - DNA, 22 bp, Artificial Sequence
  chemically synthesized
aaagaaataacttaaaaaaggg

SEQ ID NO: 11819 - DNA, 22 bp, Artificial Sequence
  chemically synthesized
aaaaaagggcttctttacactg

SEQ ID NO: 11820 - DNA, 22 bp, Artificial Sequence
  chemically synthesized
aaaaagggcttctttacactga

SEQ ID NO: 11821 - DNA, 22 bp, Artificial Sequence
  chemically synthesized
ctttacactgatattaaatgtt

SEQ ID NO: 11822 - DNA, 22 bp, Artificial Sequence
  chemically synthesized
tttacactgatattaaatgtta

SEQ ID NO: 11823 - DNA, 22 bp, Artificial Sequence
  chemically synthesized
tacactgatattaaatgttaca

SEQ ID NO: 11824 - DNA, 22 bp, Artificial Sequence
  chemically synthesized
acactgatattaaatgttacat

SEQ ID NO: 11825 - DNA, 22 bp, Artificial Sequence
  chemically synthesized
cactgatattaaatgttacata

SEQ ID NO: 11826 - DNA, 22 bp, Artificial Sequence
  chemically synthesized
atattaaatgttacatactaaa

SEQ ID NO: 11827 - DNA, 22 bp, Artificial Sequence
  chemically synthesized
aatgttacatactaaagctcat

SEQ ID NO: 11828 - DNA, 22 bp, Artificial Sequence
  chemically synthesized
catactaaagctcatagaatag

SEQ ID NO: 11829 - DNA, 22 bp, Artificial Sequence
  chemically synthesized
aagctcatagaatagacccgca

SEQ ID NO: 11830 - DNA, 22 bp, Artificial Sequence
  chemically synthesized
atagaatagacccgcagtattc

SEQ ID NO: 11831 - DNA, 22 bp, Artificial Sequence
  chemically synthesized
ccaaatatccagtccatgtgca

SEQ ID NO: 11832 - DNA, 22 bp, Artificial Sequence
  chemically synthesized
tagtatgactggagatttggcc

SEQ ID NO: 11833 - DNA, 22 bp, Artificial Sequence
  chemically synthesized
gtatgactggagatttggcccc

SEQ ID NO: 11834 - DNA, 22 bp, Artificial Sequence
  chemically synthesized
gagatttggcccctaacccata

SEQ ID NO: 11835 - DNA, 22 bp, Artificial Sequence
  chemically synthesized
ggcccctaacccatagcaacta

SEQ ID NO: 11836 - DNA, 22 bp, Artificial Sequence
  chemically synthesized
gcccctaacccatagcaactaa

SEQ ID NO: 11837 - DNA, 22 bp, Artificial Sequence
  chemically synthesized
acccatagcaactaaaaaggag

SEQ ID NO: 11838 - DNA, 22 bp, Artificial Sequence
  chemically synthesized
aaaaggagaaaaacaggaaggg

SEQ ID NO: 11839 - DNA, 22 bp, Artificial Sequence
  chemically synthesized
agctagagactgacacttgtgg

SEQ ID NO: 11840 - DNA, 22 bp, Artificial Sequence
  chemically synthesized
gagactgacacttgtgggttga

SEQ ID NO: 11841 - DNA, 22 bp, Artificial Sequence
  chemically synthesized
acacttgtgggttgaattgtgt

SEQ ID NO: 11842 - DNA, 22 bp, Artificial Sequence
  chemically synthesized
gtgggttgaattgtgtccccca

SEQ ID NO: 11843 - DNA, 22 bp, Artificial Sequence
  chemically synthesized
tgggttgaattgtgtcccccaa

SEQ ID NO: 11844 - DNA, 22 bp, Artificial Sequence
  chemically synthesized
aattgtgtcccccaaaaagata

SEQ ID NO: 11845 - DNA, 22 bp, Artificial Sequence
  chemically synthesized
tgtcccccaaaaagatatgttc

SEQ ID NO: 11846 - DNA, 22 bp, Artificial Sequence
  chemically synthesized
aattcctaacccttggtgtacg

SEQ ID NO: 11847 - DNA, 22 bp, Artificial Sequence
  chemically synthesized
ctaacccttggtgtacgtgaat

SEQ ID NO: 11848 - DNA, 22 bp, Artificial Sequence
  chemically synthesized
acccttggtgtacgtgaatgtg

SEQ ID NO: 11849 - DNA, 22 bp, Artificial Sequence
  chemically synthesized
ggtgtacgtgaatgtgacctta

SEQ ID NO: 11850 - DNA, 22 bp, Artificial Sequence
  chemically synthesized
gtgtacgtgaatgtgaccttat

SEQ ID NO: 11851 - DNA, 22 bp, Artificial Sequence
  chemically synthesized
atctagaaataagtgtaatcat

SEQ ID NO: 11852 - DNA, 22 bp, Artificial Sequence
  chemically synthesized
tctagaaataagtgtaatcatg

SEQ ID NO: 11853 - DNA, 22 bp, Artificial Sequence
  chemically synthesized
gaaataagtgtaatcatgttaa

SEQ ID NO: 11854 - DNA, 22 bp, Artificial Sequence
  chemically synthesized
aaatggggtcatactggattag

SEQ ID NO: 11855 - DNA, 22 bp, Artificial Sequence
  chemically synthesized
gattagagtggggcctaatcca

SEQ ID NO: 11856 - DNA, 22 bp, Artificial Sequence
  chemically synthesized
gagtggggcctaatccaataac

SEQ ID NO: 11857 - DNA, 22 bp, Artificial Sequence
  chemically synthesized
atccaataactgctgtgtttat

SEQ ID NO: 11858 - DNA, 22 bp, Artificial Sequence
  chemically synthesized
ctgtgtttataaggagagagat

SEQ ID NO: 11859 - DNA, 22 bp, Artificial Sequence
  chemically synthesized
tgtttataaggagagagatttg

SEQ ID NO: 11860 - DNA, 22 bp, Artificial Sequence
  chemically synthesized
ataaggagagagatttggagac

SEQ ID NO: 11861 - DNA, 22 bp, Artificial Sequence
  chemically synthesized
taaggagagagatttggagaca

SEQ ID NO: 11862 - DNA, 22 bp, Artificial Sequence
  chemically synthesized
ggagacacagagacaaatggta

SEQ ID NO: 11863 - DNA, 22 bp, Artificial Sequence
  chemically synthesized
gagacacagagacaaatggtag

SEQ ID NO: 11864 - DNA, 22 bp, Artificial Sequence
  chemically synthesized
gattgttgaaactacaaggcaa

SEQ ID NO: 11865 - DNA, 22 bp, Artificial Sequence
  chemically synthesized
ttgaaactacaaggcaagaaag

SEQ ID NO: 11866 - DNA, 22 bp, Artificial Sequence
  chemically synthesized
aaactacaaggcaagaaaggaa

SEQ ID NO: 11867 - DNA, 22 bp, Artificial Sequence
  chemically synthesized
caaggcaagaaaggaacactca

SEQ ID NO: 11868 - DNA, 22 bp, Artificial Sequence
  chemically synthesized
aggattgctggtaaccaccaga

SEQ ID NO: 11869 - DNA, 22 bp, Artificial Sequence
  chemically synthesized
ctggtaaccaccagaagccagg

SEQ ID NO: 11870 - DNA, 22 bp, Artificial Sequence
  chemically synthesized
gtaaccaccagaagccaggaag

SEQ ID NO: 11871 - DNA, 22 bp, Artificial Sequence
  chemically synthesized
ctctcttgaagatcatgcccct

SEQ ID NO: 11872 - DNA, 22 bp, Artificial Sequence
  chemically synthesized
tctcttgaagatcatgcccctg

SEQ ID NO: 11873 - DNA, 22 bp, Artificial Sequence
  chemically synthesized
tcttgaagatcatgcccctgtc

SEQ ID NO: 11874 - DNA, 22 bp, Artificial Sequence
  chemically synthesized
ttgaagatcatgcccctgtcaa

SEQ ID NO: 11875 - DNA, 22 bp, Artificial Sequence
  chemically synthesized
gaagatcatgcccctgtcaaca

SEQ ID NO: 11876 - DNA, 22 bp, Artificial Sequence
  chemically synthesized
aagatcatgcccctgtcaacac

SEQ ID NO: 11877 - DNA, 22 bp, Artificial Sequence
  chemically synthesized
tcaacactttgatttcggactt

SEQ ID NO: 11878 - DNA, 22 bp, Artificial Sequence
  chemically synthesized
tgatttcggacttctagcttct

SEQ ID NO: 11879 - DNA, 22 bp, Artificial Sequence
  chemically synthesized
gatttcggacttctagcttcta

SEQ ID NO: 11880 - DNA, 22 bp, Artificial Sequence
  chemically synthesized
atttcggacttctagcttctag

SEQ ID NO: 11881 - DNA, 22 bp, Artificial Sequence
  chemically synthesized
cggacttctagcttctagaatt

SEQ ID NO: 11882 - DNA, 22 bp, Artificial Sequence
  chemically synthesized
ggacttctagcttctagaattg

SEQ ID NO: 11883 - DNA, 22 bp, Artificial Sequence
  chemically synthesized
ctagcttctagaattgtgagag

SEQ ID NO: 11884 - DNA, 22 bp, Artificial Sequence
  chemically synthesized
tagcttctagaattgtgagaga

SEQ ID NO: 11885 - DNA, 22 bp, Artificial Sequence
  chemically synthesized
gcttctagaattgtgagagaat

SEQ ID NO: 11886 - DNA, 22 bp, Artificial Sequence
  chemically synthesized
ctagaattgtgagagaataaat

SEQ ID NO: 11887 - DNA, 22 bp, Artificial Sequence
  chemically synthesized
tagaattgtgagagaataaatt

SEQ ID NO: 11888 - DNA, 22 bp, Artificial Sequence
  chemically synthesized
gaattgtgagagaataaattgc

SEQ ID NO: 11889 - DNA, 22 bp, Artificial Sequence
  chemically synthesized
tgagagaataaattgctgttgt

SEQ ID NO: 11890 - DNA, 22 bp, Artificial Sequence
  chemically synthesized
ctgttgtttaaagccactcagt

SEQ ID NO: 11891 - DNA, 22 bp, Artificial Sequence
  chemically synthesized
ttgtttaaagccactcagtttg

SEQ ID NO: 11892 - DNA, 22 bp, Artificial Sequence
  chemically synthesized
tttaaagccactcagtttgtgg

SEQ ID NO: 11893 - DNA, 22 bp, Artificial Sequence
  chemically synthesized
aaagccactcagtttgtggtgc

SEQ ID NO: 11894 - DNA, 22 bp, Artificial Sequence
  chemically synthesized
aagccactcagtttgtggtgct

SEQ ID NO: 11895 - DNA, 22 bp, Artificial Sequence
  chemically synthesized
agtttgtggtgctttgttaagt

SEQ ID NO: 11896 - DNA, 22 bp, Artificial Sequence
  chemically synthesized
gtggtgctttgttaagtaatct

SEQ ID NO: 11897 - DNA, 22 bp, Artificial Sequence
  chemically synthesized
tggtgctttgttaagtaatctt

SEQ ID NO: 11898 - DNA, 22 bp, Artificial Sequence
  chemically synthesized
tgttaagtaatcttagaaaagt

SEQ ID NO: 11899 - DNA, 22 bp, Artificial Sequence
  chemically synthesized
gttaagtaatcttagaaaagta

SEQ ID NO: 11900 - DNA, 22 bp, Artificial Sequence
  chemically synthesized
ttaagtaatcttagaaaagtaa

SEQ ID NO: 11901 - DNA, 22 bp, Artificial Sequence
  chemically synthesized
agtaatcttagaaaagtaatac

SEQ ID NO: 11902 - DNA, 22 bp, Artificial Sequence
  chemically synthesized
agaaaagtaatacaacacctaa

SEQ ID NO: 11903 - DNA, 22 bp, Artificial Sequence
  chemically synthesized
gaaaagtaatacaacacctaac

SEQ ID NO: 11904 - DNA, 22 bp, Artificial Sequence
  chemically synthesized
acaacagaaatactttaaagcc

SEQ ID NO: 11905 - DNA, 22 bp, Artificial Sequence
  chemically synthesized
taaagccgctaaaaggtcaaaa

SEQ ID NO: 11906 - DNA, 22 bp, Artificial Sequence
  chemically synthesized
aaagccgctaaaaggtcaaaaa

SEQ ID NO: 11907 - DNA, 22 bp, Artificial Sequence
  chemically synthesized
aagccgctaaaaggtcaaaaaa

SEQ ID NO: 11908 - DNA, 22 bp, Artificial Sequence
  chemically synthesized
aaaggtcaaaaaaaaaaaaaaa

SEQ ID NO: 11909 - DNA, 22 bp, Artificial Sequence
  chemically synthesized
gagccataacaaaaaatgggca

SEQ ID NO: 11910 - DNA, 22 bp, Artificial Sequence
  chemically synthesized
tatcctcagtgaactctctggt

SEQ ID NO: 11911 - DNA, 22 bp, Artificial Sequence
  chemically synthesized
agtgaactctctggttatgaga

SEQ ID NO: 11912 - DNA, 22 bp, Artificial Sequence
  chemically synthesized
tctggttatgagaatactgaag

SEQ ID NO: 11913 - DNA, 22 bp, Artificial Sequence
  chemically synthesized
tggttatgagaatactgaagcc

SEQ ID NO: 11914 - DNA, 22 bp, Artificial Sequence
  chemically synthesized
gttatgagaatactgaagcccg

SEQ ID NO: 11915 - DNA, 22 bp, Artificial Sequence
  chemically synthesized
tgagaatactgaagcccgatcc

SEQ ID NO: 11916 - DNA, 22 bp, Artificial Sequence
  chemically synthesized
aagcccgatcctgatgtttaaa

SEQ ID NO: 11917 - DNA, 22 bp, Artificial Sequence
  chemically synthesized
atgtttaaaacgacattgaagt

SEQ ID NO: 11918 - DNA, 22 bp, Artificial Sequence
  chemically synthesized
aaaacgacattgaagtatcaag

SEQ ID NO: 11919 - DNA, 22 bp, Artificial Sequence
  chemically synthesized
aaacgacattgaagtatcaaga

SEQ ID NO: 11920 - DNA, 22 bp, Artificial Sequence
  chemically synthesized
aagtatcaagacaaagataaaa

SEQ ID NO: 11921 - DNA, 22 bp, Artificial Sequence
  chemically synthesized
aatatgctagccaagaaaccaa

SEQ ID NO: 11922 - DNA, 22 bp, Artificial Sequence
  chemically synthesized
atatgctagccaagaaaccaat

SEQ ID NO: 11923 - DNA, 22 bp, Artificial Sequence
  chemically synthesized
gccaagaaaccaatacagcatt

SEQ ID NO: 11924 - DNA, 22 bp, Artificial Sequence
  chemically synthesized
catcactgcaaagagagttcta

SEQ ID NO: 11925 - DNA, 22 bp, Artificial Sequence
  chemically synthesized
atcactgcaaagagagttctac

SEQ ID NO: 11926 - DNA, 22 bp, Artificial Sequence
  chemically synthesized
caaagagagttctacactaaat

SEQ ID NO: 11927 - DNA, 22 bp, Artificial Sequence
  chemically synthesized
tacactaaatggctagaattta

SEQ ID NO: 11928 - DNA, 22 bp, Artificial Sequence
  chemically synthesized
cactaaatggctagaatttaaa

SEQ ID NO: 11929 - DNA, 22 bp, Artificial Sequence
  chemically synthesized
aatggctagaatttaaaagctt

SEQ ID NO: 11930 - DNA, 22 bp, Artificial Sequence
  chemically synthesized
gaatttaaaagctttagttatt

SEQ ID NO: 11931 - DNA, 22 bp, Artificial Sequence
  chemically synthesized
aaaagctttagttatttagaac

SEQ ID NO: 11932 - DNA, 22 bp, Artificial Sequence
  chemically synthesized
aaagctttagttatttagaaca

SEQ ID NO: 11933 - DNA, 22 bp, Artificial Sequence
  chemically synthesized
tagttatttagaacacgtagaa

SEQ ID NO: 11934 - DNA, 22 bp, Artificial Sequence
  chemically synthesized
agttatttagaacacgtagaaa

SEQ ID NO: 11935 - DNA, 22 bp, Artificial Sequence
  chemically synthesized
gttatttagaacacgtagaaaa

SEQ ID NO: 11936 - DNA, 22 bp, Artificial Sequence
  chemically synthesized
tttagaacacgtagaaaacaga

SEQ ID NO: 11937 - DNA, 22 bp, Artificial Sequence
  chemically synthesized
agaacacgtagaaaacagaagg

SEQ ID NO: 11938 - DNA, 22 bp, Artificial Sequence
  chemically synthesized
gaacacgtagaaaacagaaggg

SEQ ID NO: 11939 - DNA, 22 bp, Artificial Sequence
  chemically synthesized
aatagggcccgttcaagccttt

SEQ ID NO: 11940 - DNA, 22 bp, Artificial Sequence
  chemically synthesized
aagcctttgaatttaatgagaa

SEQ ID NO: 11941 - DNA, 22 bp, Artificial Sequence
  chemically synthesized
tgaatttaatgagaaaacagac

SEQ ID NO: 11942 - DNA, 22 bp, Artificial Sequence
  chemically synthesized
gaatttaatgagaaaacagaca

SEQ ID NO: 11943 - DNA, 22 bp, Artificial Sequence
  chemically synthesized
aatttaatgagaaaacagacat

SEQ ID NO: 11944 - DNA, 22 bp, Artificial Sequence
  chemically synthesized
aatgagaaaacagacatgagga

SEQ ID NO: 11945 - DNA, 22 bp, Artificial Sequence
  chemically synthesized
atgagaaaacagacatgaggag

SEQ ID NO: 11946 - DNA, 22 bp, Artificial Sequence
  chemically synthesized
acatccaagacagaacccaggg

SEQ ID NO: 11947 - DNA, 22 bp, Artificial Sequence
  chemically synthesized
ttggtccccttgctcaacttgt

SEQ ID NO: 11948 - DNA, 22 bp, Artificial Sequence
  chemically synthesized
ggtccccttgctcaacttgtac

SEQ ID NO: 11949 - DNA, 22 bp, Artificial Sequence
  chemically synthesized
gtccccttgctcaacttgtaca

SEQ ID NO: 11950 - DNA, 22 bp, Artificial Sequence
  chemically synthesized
gctcaacttgtacatcttaatc

SEQ ID NO: 11951 - DNA, 22 bp, Artificial Sequence
  chemically synthesized
ctcaacttgtacatcttaatcc

SEQ ID NO: 11952 - DNA, 22 bp, Artificial Sequence
  chemically synthesized
aacttgtacatcttaatccaca

SEQ ID NO: 11953 - DNA, 22 bp, Artificial Sequence
  chemically synthesized
gtacatcttaatccacataaac

SEQ ID NO: 11954 - DNA, 22 bp, Artificial Sequence
  chemically synthesized
tacatcttaatccacataaaca

SEQ ID NO: 11955 - DNA, 22 bp, Artificial Sequence
  chemically synthesized
aatccacataaacataccactc

SEQ ID NO: 11956 - DNA, 22 bp, Artificial Sequence
  chemically synthesized
atccacataaacataccactct

SEQ ID NO: 11957 - DNA, 22 bp, Artificial Sequence
  chemically synthesized
taaaaaggtacatcctatgtga

SEQ ID NO: 11958 - DNA, 22 bp, Artificial Sequence
  chemically synthesized
aaaaggtacatcctatgtgata

SEQ ID NO: 11959 - DNA, 22 bp, Artificial Sequence
  chemically synthesized
tgtgatattaatgtaaaacaaa

SEQ ID NO: 11960 - DNA, 22 bp, Artificial Sequence
  chemically synthesized
atgtaaaacaaatcattcttgc

SEQ ID NO: 11961 - DNA, 22 bp, Artificial Sequence
  chemically synthesized
ttgcaaatacagttatgtgcca

SEQ ID NO: 11962 - DNA, 22 bp, Artificial Sequence
  chemically synthesized
gcaaatacagttatgtgccatg

SEQ ID NO: 11963 - DNA, 22 bp, Artificial Sequence
  chemically synthesized
caaatacagttatgtgccatgt

SEQ ID NO: 11964 - DNA, 22 bp, Artificial Sequence
  chemically synthesized
tgtgccatgtaacgtttcagtc

SEQ ID NO: 11965 - DNA, 22 bp, Artificial Sequence
  chemically synthesized
cagtcaatggtagactgcatat

SEQ ID NO: 11966 - DNA, 22 bp, Artificial Sequence
  chemically synthesized
agtcaatggtagactgcatata

SEQ ID NO: 11967 - DNA, 22 bp, Artificial Sequence
  chemically synthesized
catatatgatggtagtcccatt

SEQ ID NO: 11968 - DNA, 22 bp, Artificial Sequence
  chemically synthesized
gattacaatggacctgaaaata

SEQ ID NO: 11969 - DNA, 22 bp, Artificial Sequence
  chemically synthesized
caatggacctgaaaatatgcta

SEQ ID NO: 11970 - DNA, 22 bp, Artificial Sequence
  chemically synthesized
aaaatatgctattgccttagtg

SEQ ID NO: 11971 - DNA, 22 bp, Artificial Sequence
  chemically synthesized
ttgccttagtgacactgtaacc

SEQ ID NO: 11972 - DNA, 22 bp, Artificial Sequence
  chemically synthesized
ccttagtgacactgtaaccatc

SEQ ID NO: 11973 - DNA, 22 bp, Artificial Sequence
  chemically synthesized
agtgacactgtaaccatcataa

SEQ ID NO: 11974 - DNA, 22 bp, Artificial Sequence
  chemically synthesized
gtgacactgtaaccatcataag

SEQ ID NO: 11975 - DNA, 22 bp, Artificial Sequence
  chemically synthesized
taaccatcataaggtcttagta

SEQ ID NO: 11976 - DNA, 22 bp, Artificial Sequence
  chemically synthesized
agtactattttgcaagttattt

SEQ ID NO: 11977 - DNA, 22 bp, Artificial Sequence
  chemically synthesized
gtactattttgcaagttattta

SEQ ID NO: 11978 - DNA, 22 bp, Artificial Sequence
  chemically synthesized
ttttgcaagttatttaaagtat

SEQ ID NO: 11979 - DNA, 22 bp, Artificial Sequence
  chemically synthesized
tgcaagttatttaaagtatagc

SEQ ID NO: 11980 - DNA, 22 bp, Artificial Sequence
  chemically synthesized
gcaagttatttaaagtatagca

SEQ ID NO: 11981 - DNA, 22 bp, Artificial Sequence
  chemically synthesized
caagttatttaaagtatagcac

SEQ ID NO: 11982 - DNA, 22 bp, Artificial Sequence
  chemically synthesized
tttaaagtatagcacatacaat

SEQ ID NO: 11983 - DNA, 22 bp, Artificial Sequence
  chemically synthesized
aaagtatagcacatacaattat

SEQ ID NO: 11984 - DNA, 22 bp, Artificial Sequence
  chemically synthesized
aagtatagcacatacaattatt

SEQ ID NO: 11985 - DNA, 22 bp, Artificial Sequence
  chemically synthesized
ttacagtgtacaacacttgata

SEQ ID NO: 11986 - DNA, 22 bp, Artificial Sequence
  chemically synthesized
cagtgtacaacacttgataata

SEQ ID NO: 11987 - DNA, 22 bp, Artificial Sequence
  chemically synthesized
gataataaactactacattgct

SEQ ID NO: 11988 - DNA, 22 bp, Artificial Sequence
  chemically synthesized
ataataaactactacattgctg

SEQ ID NO: 11989 - DNA, 22 bp, Artificial Sequence
  chemically synthesized
ctacattgctggtttatgtatt

SEQ ID NO: 11990 - DNA, 22 bp, Artificial Sequence
  chemically synthesized
cattgctggtttatgtattcac

SEQ ID NO: 11991 - DNA, 22 bp, Artificial Sequence
  chemically synthesized
ctggtttatgtattcactatac

SEQ ID NO: 11992 - DNA, 22 bp, Artificial Sequence
  chemically synthesized
gtttatgtattcactatactat

SEQ ID NO: 11993 - DNA, 22 bp, Artificial Sequence
  chemically synthesized
atgtattcactatactatgcct

SEQ ID NO: 11994 - DNA, 22 bp, Artificial Sequence
  chemically synthesized
tgtattcactatactatgcctt

SEQ ID NO: 11995 - DNA, 22 bp, Artificial Sequence
  chemically synthesized
actatactatgccttttattgt

SEQ ID NO: 11996 - DNA, 22 bp, Artificial Sequence
  chemically synthesized
tactatgccttttattgttatt

SEQ ID NO: 11997 - DNA, 22 bp, Artificial Sequence
  chemically synthesized
tgccttttattgttattttaga

SEQ ID NO: 11998 - DNA, 22 bp, Artificial Sequence
  chemically synthesized
ttattgttattttagagtgcac

SEQ ID NO: 11999 - DNA, 22 bp, Artificial Sequence
  chemically synthesized
tattgttattttagagtgcact

SEQ ID NO: 12000 - DNA, 22 bp, Artificial Sequence
  chemically synthesized
attgttattttagagtgcactc

SEQ ID NO: 12001 - DNA, 22 bp, Artificial Sequence
  chemically synthesized
ttgttattttagagtgcactcc

SEQ ID NO: 12002 - DNA, 22 bp, Artificial Sequence
  chemically synthesized
ttattttagagtgcactccttc

SEQ ID NO: 12003 - DNA, 22 bp, Artificial Sequence
  chemically synthesized
ttttagagtgcactccttctac

SEQ ID NO: 12004 - DNA, 22 bp, Artificial Sequence
  chemically synthesized
tagagtgcactccttctacttt

SEQ ID NO: 12005 - DNA, 22 bp, Artificial Sequence
  chemically synthesized
agagtgcactccttctactttt

SEQ ID NO: 12006 - DNA, 22 bp, Artificial Sequence
  chemically synthesized
gagtgcactccttctacttttt

SEQ ID NO: 12007 - DNA, 22 bp, Artificial Sequence
  chemically synthesized
cttctactttttttttttttaa

SEQ ID NO: 12008 - DNA, 22 bp, Artificial Sequence
  chemically synthesized
ctactttttttttttttaagtt

SEQ ID NO: 12009 - DNA, 22 bp, Artificial Sequence
  chemically synthesized
tactttttttttttttaagtta

SEQ ID NO: 12010 - DNA, 22 bp, Artificial Sequence
  chemically synthesized
ctttttttttttttaagttaaa

SEQ ID NO: 12011 - DNA, 22 bp, Artificial Sequence
  chemically synthesized
tttttttttttaagttaaatgt

SEQ ID NO: 12012 - DNA, 22 bp, Artificial Sequence
  chemically synthesized
ttttttttttaagttaaatgta

SEQ ID NO: 12013 - DNA, 22 bp, Artificial Sequence
  chemically synthesized
tttttttttaagttaaatgtaa

SEQ ID NO: 12014 - DNA, 22 bp, Artificial Sequence
  chemically synthesized
ttttttttaagttaaatgtaaa

SEQ ID NO: 12015 - DNA, 22 bp, Artificial Sequence
  chemically synthesized
tttttttaagttaaatgtaaaa

SEQ ID NO: 12016 - DNA, 22 bp, Artificial Sequence
  chemically synthesized
ttttttaagttaaatgtaaaac

SEQ ID NO: 12017 - DNA, 22 bp, Artificial Sequence
  chemically synthesized
tttttaagttaaatgtaaaaca

SEQ ID NO: 12018 - DNA, 22 bp, Artificial Sequence
  chemically synthesized
ttttaagttaaatgtaaaacag

SEQ ID NO: 12019 - DNA, 22 bp, Artificial Sequence
  chemically synthesized
tttaagttaaatgtaaaacagc

SEQ ID NO: 12020 - DNA, 22 bp, Artificial Sequence
  chemically synthesized
ttaagttaaatgtaaaacagcc

SEQ ID NO: 12021 - DNA, 22 bp, Artificial Sequence
  chemically synthesized
taagttaaatgtaaaacagcct

SEQ ID NO: 12022 - DNA, 22 bp, Artificial Sequence
  chemically synthesized
aagttaaatgtaaaacagcctc

SEQ ID NO: 12023 - DNA, 22 bp, Artificial Sequence
  chemically synthesized
agttaaatgtaaaacagcctca

SEQ ID NO: 12024 - DNA, 22 bp, Artificial Sequence
  chemically synthesized
aatgtaaaacagcctcaggcaa

SEQ ID NO: 12025 - DNA, 22 bp, Artificial Sequence
  chemically synthesized
aggcaagtccttcaggaggtat

SEQ ID NO: 12026 - DNA, 22 bp, Artificial Sequence
  chemically synthesized
caggaggtattcaacagaaagc

SEQ ID NO: 12027 - DNA, 22 bp, Artificial Sequence
  chemically synthesized
aggaggtattcaacagaaagca

SEQ ID NO: 12028 - DNA, 22 bp, Artificial Sequence
  chemically synthesized
aacagaaagcactgttatcata

SEQ ID NO: 12029 - DNA, 22 bp, Artificial Sequence
  chemically synthesized
ttatcataggtgacagctacat

SEQ ID NO: 12030 - DNA, 22 bp, Artificial Sequence
  chemically synthesized
tcataggtgacagctacatgtg

SEQ ID NO: 12031 - DNA, 22 bp, Artificial Sequence
  chemically synthesized
catgtgtgttattgcccctaaa

SEQ ID NO: 12032 - DNA, 22 bp, Artificial Sequence
  chemically synthesized
ttgcccctaaaaaccttccagt

SEQ ID NO: 12033 - DNA, 22 bp, Artificial Sequence
  chemically synthesized
cccctaaaaaccttccagtggg

SEQ ID NO: 12034 - DNA, 22 bp, Artificial Sequence
  chemically synthesized
aaaaccttccagtgggacaaga

SEQ ID NO: 12035 - DNA, 22 bp, Artificial Sequence
  chemically synthesized
ccagtgggacaagatgtggagg

SEQ ID NO: 12036 - DNA, 22 bp, Artificial Sequence
  chemically synthesized
cagtgggacaagatgtggaggt

SEQ ID NO: 12037 - DNA, 22 bp, Artificial Sequence
  chemically synthesized
atgatcctaatcctgtctatgc

SEQ ID NO: 12038 - DNA, 22 bp, Artificial Sequence
  chemically synthesized
atcctgtctatgcctaggtgaa

SEQ ID NO: 12039 - DNA, 22 bp, Artificial Sequence
  chemically synthesized
tctatgcctaggtgaaagtgtg

SEQ ID NO: 12040 - DNA, 22 bp, Artificial Sequence
  chemically synthesized
tgcctaggtgaaagtgtgtgtg

SEQ ID NO: 12041 - DNA, 22 bp, Artificial Sequence
  chemically synthesized
ggtgaaagtgtgtgtgttttag

SEQ ID NO: 12042 - DNA, 22 bp, Artificial Sequence
  chemically synthesized
tagtttttaacaaaaacgacta

SEQ ID NO: 12043 - DNA, 22 bp, Artificial Sequence
  chemically synthesized
agtttttaacaaaaacgactaa

SEQ ID NO: 12044 - DNA, 22 bp, Artificial Sequence
  chemically synthesized
gtttttaacaaaaacgactaac

SEQ ID NO: 12045 - DNA, 22 bp, Artificial Sequence
  chemically synthesized
ttaacaaaaacgactaacaagt

SEQ ID NO: 12046 - DNA, 22 bp, Artificial Sequence
  chemically synthesized
taacaaaaacgactaacaagta

SEQ ID NO: 12047 - DNA, 22 bp, Artificial Sequence
  chemically synthesized
aacaaaaacgactaacaagtaa

SEQ ID NO: 12048 - DNA, 22 bp, Artificial Sequence
  chemically synthesized
acaaaaacgactaacaagtaaa

SEQ ID NO: 12049 - DNA, 22 bp, Artificial Sequence
  chemically synthesized
acaagtaaaaaaaaaaatttaa

SEQ ID NO: 12050 - DNA, 22 bp, Artificial Sequence
  chemically synthesized
aaaatagaaaatagaaaaaagc

SEQ ID NO: 12051 - DNA, 22 bp, Artificial Sequence
  chemically synthesized
aaatagaaaatagaaaaaagct

SEQ ID NO: 12052 - DNA, 22 bp, Artificial Sequence
  chemically synthesized
ctagaataaggatacaaagaaa

SEQ ID NO: 12053 - DNA, 22 bp, Artificial Sequence
  chemically synthesized
tagaataaggatacaaagaaaa

SEQ ID NO: 12054 - DNA, 22 bp, Artificial Sequence
  chemically synthesized
gaataaggatacaaagaaaaaa

SEQ ID NO: 12055 - DNA, 22 bp, Artificial Sequence
  chemically synthesized
ttgtatagctatacaatgtatt

SEQ ID NO: 12056 - DNA, 22 bp, Artificial Sequence
  chemically synthesized
tgtatagctatacaatgtattt

SEQ ID NO: 12057 - DNA, 22 bp, Artificial Sequence
  chemically synthesized
gtatagctatacaatgtatttg

SEQ ID NO: 12058 - DNA, 22 bp, Artificial Sequence
  chemically synthesized
tatagctatacaatgtatttgt

SEQ ID NO: 12059 - DNA, 22 bp, Artificial Sequence
  chemically synthesized
tacaatgtatttgtgtttcaag

SEQ ID NO: 12060 - DNA, 22 bp, Artificial Sequence
  chemically synthesized
gtgtttcaagctaagtatttta

SEQ ID NO: 12061 - DNA, 22 bp, Artificial Sequence
  chemically synthesized
tgtttcaagctaagtattttaa

SEQ ID NO: 12062 - DNA, 22 bp, Artificial Sequence
  chemically synthesized
caagctaagtattttaaaagtt

SEQ ID NO: 12063 - DNA, 22 bp, Artificial Sequence
  chemically synthesized
aagctaagtattttaaaagtta

SEQ ID NO: 12064 - DNA, 22 bp, Artificial Sequence
  chemically synthesized
agtattttaaaagttaaaaaat

SEQ ID NO: 12065 - DNA, 22 bp, Artificial Sequence
  chemically synthesized
taaaagttaaaaaattaaaaag

SEQ ID NO: 12066 - DNA, 22 bp, Artificial Sequence
  chemically synthesized
aaaagttaaaaaattaaaaagt

SEQ ID NO: 12067 - DNA, 22 bp, Artificial Sequence
  chemically synthesized
aaagttaaaaaattaaaaagtt

SEQ ID NO: 12068 - DNA, 22 bp, Artificial Sequence
  chemically synthesized
aaaaattaaaaagtttacaaag

SEQ ID NO: 12069 - DNA, 22 bp, Artificial Sequence
  chemically synthesized
aaaagtttacaaagttaaaaag

SEQ ID NO: 12070 - DNA, 22 bp, Artificial Sequence
  chemically synthesized
acaaagttaaaaagttataatt

SEQ ID NO: 12071 - DNA, 22 bp, Artificial Sequence
  chemically synthesized
caaagttaaaaagttataattt

SEQ ID NO: 12072 - DNA, 22 bp, Artificial Sequence
  chemically synthesized
aaaagttataattttttattga

SEQ ID NO: 12073 - DNA, 22 bp, Artificial Sequence
  chemically synthesized
taattttttattgaagaaaaac

SEQ ID NO: 12074 - DNA, 22 bp, Artificial Sequence
  chemically synthesized
tttattgaagaaaaactgttaa

SEQ ID NO: 12075 - DNA, 22 bp, Artificial Sequence
  chemically synthesized
ttattgaagaaaaactgttaag

SEQ ID NO: 12076 - DNA, 22 bp, Artificial Sequence
  chemically synthesized
tattgaagaaaaactgttaaga

SEQ ID NO: 12077 - DNA, 22 bp, Artificial Sequence
  chemically synthesized
attgaagaaaaactgttaagat

SEQ ID NO: 12078 - DNA, 22 bp, Artificial Sequence
  chemically synthesized
ttgaagaaaaactgttaagata

SEQ ID NO: 12079 - DNA, 22 bp, Artificial Sequence
  chemically synthesized
aagaaaaactgttaagataaat

SEQ ID NO: 12080 - DNA, 22 bp, Artificial Sequence
  chemically synthesized
ttaagataaatttggtgtagct

SEQ ID NO: 12081 - DNA, 22 bp, Artificial Sequence
  chemically synthesized
agataaatttggtgtagcttca

SEQ ID NO: 12082 - DNA, 22 bp, Artificial Sequence
  chemically synthesized
ggtgtagcttcagcgtactgtg

SEQ ID NO: 12083 - DNA, 22 bp, Artificial Sequence
  chemically synthesized
gtgtagcttcagcgtactgtgt

SEQ ID NO: 12084 - DNA, 22 bp, Artificial Sequence
  chemically synthesized
cagcgtactgtgtttatagtct

SEQ ID NO: 12085 - DNA, 22 bp, Artificial Sequence
  chemically synthesized
agcgtactgtgtttatagtcta

SEQ ID NO: 12086 - DNA, 22 bp, Artificial Sequence
  chemically synthesized
tgtttatagtctacagtggtgt

SEQ ID NO: 12087 - DNA, 22 bp, Artificial Sequence
  chemically synthesized
atagtctacagtggtgtacagt

SEQ ID NO: 12088 - DNA, 22 bp, Artificial Sequence
  chemically synthesized
tagtctacagtggtgtacagtg

SEQ ID NO: 12089 - DNA, 22 bp, Artificial Sequence
  chemically synthesized
cagtggtgtacagtgttctagg

SEQ ID NO: 12090 - DNA, 22 bp, Artificial Sequence
  chemically synthesized
taggccttcacattaattcacc

SEQ ID NO: 12091 - DNA, 22 bp, Artificial Sequence
  chemically synthesized
ggccttcacattaattcaccac

SEQ ID NO: 12092 - DNA, 22 bp, Artificial Sequence
  chemically synthesized
cacattaattcaccactcactc

SEQ ID NO: 12093 - DNA, 22 bp, Artificial Sequence
  chemically synthesized
acattaattcaccactcactca

SEQ ID NO: 12094 - DNA, 22 bp, Artificial Sequence
  chemically synthesized
attcaccactcactcactgact

SEQ ID NO: 12095 - DNA, 22 bp, Artificial Sequence
  chemically synthesized
accactcactcactgactcacc

SEQ ID NO: 12096 - DNA, 22 bp, Artificial Sequence
  chemically synthesized
actcactgactcacccagagca

SEQ ID NO: 12097 - DNA, 22 bp, Artificial Sequence
  chemically synthesized
actgactcacccagagcaactt

SEQ ID NO: 12098 - DNA, 22 bp, Artificial Sequence
  chemically synthesized
actcacccagagcaacttctag

SEQ ID NO: 12099 - DNA, 22 bp, Artificial Sequence
  chemically synthesized
acccagagcaacttctagtcct

SEQ ID NO: 12100 - DNA, 22 bp, Artificial Sequence
  chemically synthesized
ctagtcctgcaagctccattcg

SEQ ID NO: 12101 - DNA, 22 bp, Artificial Sequence
  chemically synthesized
tagtcctgcaagctccattcgt

SEQ ID NO: 12102 - DNA, 22 bp, Artificial Sequence
  chemically synthesized
gtcctgcaagctccattcgtgg

SEQ ID NO: 12103 - DNA, 22 bp, Artificial Sequence
  chemically synthesized
caagctccattcgtggtaagtg

SEQ ID NO: 12104 - DNA, 22 bp, Artificial Sequence
  chemically synthesized
cattcgtggtaagtggcctaca

SEQ ID NO: 12105 - DNA, 22 bp, Artificial Sequence
  chemically synthesized
gtggtaagtggcctacacaggt

SEQ ID NO: 12106 - DNA, 22 bp, Artificial Sequence
  chemically synthesized
cacaggtataccattatctttt

SEQ ID NO: 12107 - DNA, 22 bp, Artificial Sequence
  chemically synthesized
tcttttataccatacttttact

SEQ ID NO: 12108 - DNA, 22 bp, Artificial Sequence
  chemically synthesized
ttataccatacttttactgtac

SEQ ID NO: 12109 - DNA, 22 bp, Artificial Sequence
  chemically synthesized
tataccatacttttactgtacc

SEQ ID NO: 12110 - DNA, 22 bp, Artificial Sequence
  chemically synthesized
ataccatacttttactgtacct

SEQ ID NO: 12111 - DNA, 22 bp, Artificial Sequence
  chemically synthesized
taccatacttttactgtacctt

SEQ ID NO: 12112 - DNA, 22 bp, Artificial Sequence
  chemically synthesized
ttactgtaccttttctctgttt

SEQ ID NO: 12113 - DNA, 22 bp, Artificial Sequence
  chemically synthesized
tactgtaccttttctctgtttg

SEQ ID NO: 12114 - DNA, 22 bp, Artificial Sequence
  chemically synthesized
actgtaccttttctctgtttgc

SEQ ID NO: 12115 - DNA, 22 bp, Artificial Sequence
  chemically synthesized
ctgtaccttttctctgtttgca

SEQ ID NO: 12116 - DNA, 22 bp, Artificial Sequence
  chemically synthesized
taccttttctctgtttgcatat

SEQ ID NO: 12117 - DNA, 22 bp, Artificial Sequence
  chemically synthesized
ttctctgtttgcatatatttag

SEQ ID NO: 12118 - DNA, 22 bp, Artificial Sequence
  chemically synthesized
tctctgtttgcatatatttaga

SEQ ID NO: 12119 - DNA, 22 bp, Artificial Sequence
  chemically synthesized
ctctgtttgcatatatttagat

SEQ ID NO: 12120 - DNA, 22 bp, Artificial Sequence
  chemically synthesized
tctgtttgcatatatttagata

SEQ ID NO: 12121 - DNA, 22 bp, Artificial Sequence
  chemically synthesized
tgtttgcatatatttagataaa

SEQ ID NO: 12122 - DNA, 22 bp, Artificial Sequence
  chemically synthesized
tttgcatatatttagataaata

SEQ ID NO: 12123 - DNA, 22 bp, Artificial Sequence
  chemically synthesized
gcatatatttagataaatattt

SEQ ID NO: 12124 - DNA, 22 bp, Artificial Sequence
  chemically synthesized
catatatttagataaatattta

SEQ ID NO: 12125 - DNA, 22 bp, Artificial Sequence
  chemically synthesized
agataaatatttaccactgtgt

SEQ ID NO: 12126 - DNA, 22 bp, Artificial Sequence
  chemically synthesized
gataaatatttaccactgtgtt

SEQ ID NO: 12127 - DNA, 22 bp, Artificial Sequence
  chemically synthesized
accactgtgttacaactgtcta

SEQ ID NO: 12128 - DNA, 22 bp, Artificial Sequence
  chemically synthesized
ccactgtgttacaactgtctat

SEQ ID NO: 12129 - DNA, 22 bp, Artificial Sequence
  chemically synthesized
tgttacaactgtctatagtatt

SEQ ID NO: 12130 - DNA, 22 bp, Artificial Sequence
  chemically synthesized
caactgtctatagtattcagta

SEQ ID NO: 12131 - DNA, 22 bp, Artificial Sequence
  chemically synthesized
tctatagtattcagtacagtaa

SEQ ID NO: 12132 - DNA, 22 bp, Artificial Sequence
  chemically synthesized
tagtattcagtacagtaacagt

SEQ ID NO: 12133 - DNA, 22 bp, Artificial Sequence
  chemically synthesized
agtacagtaacagttgtacagg

SEQ ID NO: 12134 - DNA, 22 bp, Artificial Sequence
  chemically synthesized
tacaggtttgtggcctaggagc

SEQ ID NO: 12135 - DNA, 22 bp, Artificial Sequence
  chemically synthesized
gtggcctaggagcaacagacta

SEQ ID NO: 12136 - DNA, 22 bp, Artificial Sequence
  chemically synthesized
tggcctaggagcaacagactat

SEQ ID NO: 12137 - DNA, 22 bp, Artificial Sequence
  chemically synthesized
ggagcaacagactataccatac

SEQ ID NO: 12138 - DNA, 22 bp, Artificial Sequence
  chemically synthesized
taccatacggcctaggtacata

SEQ ID NO: 12139 - DNA, 22 bp, Artificial Sequence
  chemically synthesized
ggtacataaaggctatactatc

SEQ ID NO: 12140 - DNA, 22 bp, Artificial Sequence
  chemically synthesized
tactatctaggtttgtgtaagt

SEQ ID NO: 12141 - DNA, 22 bp, Artificial Sequence
  chemically synthesized
tctaggtttgtgtaagtacact

SEQ ID NO: 12142 - DNA, 22 bp, Artificial Sequence
  chemically synthesized
ggtttgtgtaagtacactctat

SEQ ID NO: 12143 - DNA, 22 bp, Artificial Sequence
  chemically synthesized
gtgtaagtacactctatgatgt

SEQ ID NO: 12144 - DNA, 22 bp, Artificial Sequence
  chemically synthesized
tgtaagtacactctatgatgtt

SEQ ID NO: 12145 - DNA, 22 bp, Artificial Sequence
  chemically synthesized
tatgatgtttgcataatgacaa

SEQ ID NO: 12146 - DNA, 22 bp, Artificial Sequence
  chemically synthesized
tgatgtttgcataatgacaaaa

SEQ ID NO: 12147 - DNA, 22 bp, Artificial Sequence
  chemically synthesized
gcataatgacaaaatcgcctaa

SEQ ID NO: 12148 - DNA, 22 bp, Artificial Sequence
  chemically synthesized
cataatgacaaaatcgcctaat

SEQ ID NO: 12149 - DNA, 22 bp, Artificial Sequence
  chemically synthesized
atgatgcattcctaagcaatgt

SEQ ID NO: 12150 - DNA, 22 bp, Artificial Sequence
  chemically synthesized
ctaagcaatgtgtgattgtact

SEQ ID NO: 12151 - DNA, 22 bp, Artificial Sequence
  chemically synthesized
agcaatgtgtgattgtactata

SEQ ID NO: 12152 - DNA, 22 bp, Artificial Sequence
  chemically synthesized
tactataattgaagacttgtta

SEQ ID NO: 12153 - DNA, 22 bp, Artificial Sequence
  chemically synthesized
taattgaagacttgttatctaa

SEQ ID NO: 12154 - DNA, 22 bp, Artificial Sequence
  chemically synthesized
aagacttgttatctaagactga

SEQ ID NO: 12155 - DNA, 22 bp, Artificial Sequence
  chemically synthesized
gttatctaagactgaaagtaaa

SEQ ID NO: 12156 - DNA, 22 bp, Artificial Sequence
  chemically synthesized
ttatctaagactgaaagtaaaa

SEQ ID NO: 12157 - DNA, 22 bp, Artificial Sequence
  chemically synthesized
tctaagactgaaagtaaaaaga

SEQ ID NO: 12158 - DNA, 22 bp, Artificial Sequence
  chemically synthesized
agactgaaagtaaaaagaattg

SEQ ID NO: 12159 - DNA, 22 bp, Artificial Sequence
  chemically synthesized
aaagtaaaaagaattgcaattt

SEQ ID NO: 12160 - DNA, 22 bp, Artificial Sequence
  chemically synthesized
caatttcacctaagcaagtcta

SEQ ID NO: 12161 - DNA, 22 bp, Artificial Sequence
  chemically synthesized
cacctaagcaagtctaaaactg

SEQ ID NO: 12162 - DNA, 22 bp, Artificial Sequence
  chemically synthesized
acctaagcaagtctaaaactgt

SEQ ID NO: 12163 - DNA, 22 bp, Artificial Sequence
  chemically synthesized
agcaagtctaaaactgtgaagt

SEQ ID NO: 12164 - DNA, 22 bp, Artificial Sequence
  chemically synthesized
aaactgtgaagtctatttataa

SEQ ID NO: 12165 - DNA, 22 bp, Artificial Sequence
  chemically synthesized
tgaagtctatttataataatag

SEQ ID NO: 12166 - DNA, 22 bp, Artificial Sequence
  chemically synthesized
tttataataatagcaatacaaa

SEQ ID NO: 12167 - DNA, 22 bp, Artificial Sequence
  chemically synthesized
ataataatagcaatacaaagca

SEQ ID NO: 12168 - DNA, 22 bp, Artificial Sequence
  chemically synthesized
taataatagcaatacaaagcag

SEQ ID NO: 12169 - DNA, 22 bp, Artificial Sequence
  chemically synthesized
ataggcaaactatgatatacct

SEQ ID NO: 12170 - DNA, 22 bp, Artificial Sequence
  chemically synthesized
tgatatacctatctttgccata

SEQ ID NO: 12171 - DNA, 22 bp, Artificial Sequence
  chemically synthesized
tctttgccatatgattgctttg

SEQ ID NO: 12172 - DNA, 22 bp, Artificial Sequence
  chemically synthesized
tgccatatgattgctttgggag

SEQ ID NO: 12173 - DNA, 22 bp, Artificial Sequence
  chemically synthesized
gccatatgattgctttgggagc

SEQ ID NO: 12174 - DNA, 22 bp, Artificial Sequence
  chemically synthesized
ccatatgattgctttgggagct

SEQ ID NO: 12175 - DNA, 22 bp, Artificial Sequence
  chemically synthesized
ctttgggagctaacatttgatc

SEQ ID NO: 12176 - DNA, 22 bp, Artificial Sequence
  chemically synthesized
tgggagctaacatttgatctgt

SEQ ID NO: 12177 - DNA, 22 bp, Artificial Sequence
  chemically synthesized
gggagctaacatttgatctgta

SEQ ID NO: 12178 - DNA, 22 bp, Artificial Sequence
  chemically synthesized
ggagctaacatttgatctgtaa

SEQ ID NO: 12179 - DNA, 22 bp, Artificial Sequence
  chemically synthesized
acatttgatctgtaaatgtatg

SEQ ID NO: 12180 - DNA, 22 bp, Artificial Sequence
  chemically synthesized
gatctgtaaatgtatgacaaag

SEQ ID NO: 12181 - DNA, 22 bp, Artificial Sequence
  chemically synthesized
atctgtaaatgtatgacaaagt

SEQ ID NO: 12182 - DNA, 22 bp, Artificial Sequence
  chemically synthesized
taaatgtatgacaaagtaaaca

SEQ ID NO: 12183 - DNA, 22 bp, Artificial Sequence
  chemically synthesized
tacttaaagaatttcatccaca

SEQ ID NO: 12184 - DNA, 22 bp, Artificial Sequence
  chemically synthesized
acttaaagaatttcatccacat

SEQ ID NO: 12185 - DNA, 22 bp, Artificial Sequence
  chemically synthesized
cttaaagaatttcatccacatc

SEQ ID NO: 12186 - DNA, 22 bp, Artificial Sequence
  chemically synthesized
aaagaatttcatccacatcttg

SEQ ID NO: 12187 - DNA, 22 bp, Artificial Sequence
  chemically synthesized
aagaatttcatccacatcttgt

SEQ ID NO: 12188 - DNA, 22 bp, Artificial Sequence
  chemically synthesized
catccacatcttgtcaagagag

SEQ ID NO: 12189 - DNA, 22 bp, Artificial Sequence
  chemically synthesized
atccacatcttgtcaagagagt

SEQ ID NO: 12190 - DNA, 22 bp, Artificial Sequence
  chemically synthesized
gtcaagagagttcagtctgatg

SEQ ID NO: 12191 - DNA, 22 bp, Artificial Sequence
  chemically synthesized
tcaagagagttcagtctgatgg

SEQ ID NO: 12192 - DNA, 22 bp, Artificial Sequence
  chemically synthesized
agtctgatggaaagcactgact

SEQ ID NO: 12193 - DNA, 22 bp, Artificial Sequence
  chemically synthesized
atggaaagcactgacttctatt

SEQ ID NO: 12194 - DNA, 22 bp, Artificial Sequence
  chemically synthesized
acttctatttacagagcattag

SEQ ID NO: 12195 - DNA, 22 bp, Artificial Sequence
  chemically synthesized
ctatttacagagcattagatga

SEQ ID NO: 12196 - DNA, 22 bp, Artificial Sequence
  chemically synthesized
tatttacagagcattagatgag

SEQ ID NO: 12197 - DNA, 22 bp, Artificial Sequence
  chemically synthesized
tttacagagcattagatgagtg

SEQ ID NO: 12198 - DNA, 22 bp, Artificial Sequence
  chemically synthesized
acagagcattagatgagtgctt

SEQ ID NO: 12199 - DNA, 22 bp, Artificial Sequence
  chemically synthesized
cagagcattagatgagtgcttt

SEQ ID NO: 12200 - DNA, 22 bp, Artificial Sequence
  chemically synthesized
gatgagtgcttttatcatatta

SEQ ID NO: 12201 - DNA, 22 bp, Artificial Sequence
  chemically synthesized
ttatcatattatgagtaggcat

SEQ ID NO: 12202 - DNA, 22 bp, Artificial Sequence
  chemically synthesized
tatcatattatgagtaggcata

SEQ ID NO: 12203 - DNA, 22 bp, Artificial Sequence
  chemically synthesized
atcatattatgagtaggcatac

SEQ ID NO: 12204 - DNA, 22 bp, Artificial Sequence
  chemically synthesized
tcatattatgagtaggcataca

SEQ ID NO: 12205 - DNA, 22 bp, Artificial Sequence
  chemically synthesized
tgagtaggcatacagagcctgg

SEQ ID NO: 12206 - DNA, 22 bp, Artificial Sequence
  chemically synthesized
gcaaaacagttaactctaagta

SEQ ID NO: 12207 - DNA, 22 bp, Artificial Sequence
  chemically synthesized
actctaagtatgtacagaaatg

SEQ ID NO: 12208 - DNA, 22 bp, Artificial Sequence
  chemically synthesized
taagtatgtacagaaatggttg

SEQ ID NO: 12209 - DNA, 22 bp, Artificial Sequence
  chemically synthesized
agtatgtacagaaatggttgaa

SEQ ID NO: 12210 - DNA, 22 bp, Artificial Sequence
  chemically synthesized
aacacaacgacagttttaacac

SEQ ID NO: 12211 - DNA, 22 bp, Artificial Sequence
  chemically synthesized
taacacgtgtatttgtaatttc

SEQ ID NO: 12212 - DNA, 22 bp, Artificial Sequence
  chemically synthesized
aacacgtgtatttgtaatttca

SEQ ID NO: 12213 - DNA, 22 bp, Artificial Sequence
  chemically synthesized
acacgtgtatttgtaatttcaa

SEQ ID NO: 12214 - DNA, 22 bp, Artificial Sequence
  chemically synthesized
gtaatttcaaaaattcatttag

SEQ ID NO: 12215 - DNA, 22 bp, Artificial Sequence
  chemically synthesized
taatttcaaaaattcatttagg

SEQ ID NO: 12216 - DNA, 22 bp, Artificial Sequence
  chemically synthesized
caaaaattcatttaggtaatat

SEQ ID NO: 12217 - DNA, 22 bp, Artificial Sequence
  chemically synthesized
aaaaattcatttaggtaatatt

SEQ ID NO: 12218 - DNA, 22 bp, Artificial Sequence
  chemically synthesized
atttaggtaatatttactttta

SEQ ID NO: 12219 - DNA, 22 bp, Artificial Sequence
  chemically synthesized
aggtaatatttacttttaaata

SEQ ID NO: 12220 - DNA, 22 bp, Artificial Sequence
  chemically synthesized
ggtaatatttacttttaaatat

SEQ ID NO: 12221 - DNA, 22 bp, Artificial Sequence
  chemically synthesized
acttttaaatatgttgtatcaa

SEQ ID NO: 12222 - DNA, 22 bp, Artificial Sequence
  chemically synthesized
cttttaaatatgttgtatcaat

SEQ ID NO: 12223 - DNA, 22 bp, Artificial Sequence
  chemically synthesized
ttaaatatgttgtatcaattta

SEQ ID NO: 12224 - DNA, 22 bp, Artificial Sequence
  chemically synthesized
taaatatgttgtatcaatttaa

SEQ ID NO: 12225 - DNA, 22 bp, Artificial Sequence
  chemically synthesized
aaatatgttgtatcaatttaat

SEQ ID NO: 12226 - DNA, 22 bp, Artificial Sequence
  chemically synthesized
aatatgttgtatcaatttaata

SEQ ID NO: 12227 - DNA, 22 bp, Artificial Sequence
  chemically synthesized
tatcaatttaatagtcttaaga

SEQ ID NO: 12228 - DNA, 22 bp, Artificial Sequence
  chemically synthesized
aatagtcttaagagacagcact

SEQ ID NO: 12229 - DNA, 22 bp, Artificial Sequence
  chemically synthesized
atagtcttaagagacagcacta

SEQ ID NO: 12230 - DNA, 22 bp, Artificial Sequence
  chemically synthesized
aagagacagcactagatataag

SEQ ID NO: 12231 - DNA, 22 bp, Artificial Sequence
  chemically synthesized
agagacagcactagatataagc

SEQ ID NO: 12232 - DNA, 22 bp, Artificial Sequence
  chemically synthesized
gatataagccgtacagcttctt

SEQ ID NO: 12233 - DNA, 22 bp, Artificial Sequence
  chemically synthesized
ctttaaaatatccactgttttt

SEQ ID NO: 12234 - DNA, 22 bp, Artificial Sequence
  chemically synthesized
tttaaaatatccactgttttta

SEQ ID NO: 12235 - DNA, 22 bp, Artificial Sequence
  chemically synthesized
taaaatatccactgtttttaat

SEQ ID NO: 12236 - DNA, 22 bp, Artificial Sequence
  chemically synthesized
aaaatatccactgtttttaata

SEQ ID NO: 12237 - DNA, 22 bp, Artificial Sequence
  chemically synthesized
aaatatccactgtttttaatac

SEQ ID NO: 12238 - DNA, 22 bp, Artificial Sequence
  chemically synthesized
tttttaatacaatgtaagcagt

SEQ ID NO: 12239 - DNA, 22 bp, Artificial Sequence
  chemically synthesized
ttaatacaatgtaagcagtcag

SEQ ID NO: 12240 - DNA, 22 bp, Artificial Sequence
  chemically synthesized
taatacaatgtaagcagtcagt

SEQ ID NO: 12241 - DNA, 22 bp, Artificial Sequence
  chemically synthesized
aatacaatgtaagcagtcagtt

SEQ ID NO: 12242 - DNA, 22 bp, Artificial Sequence
  chemically synthesized
atacaatgtaagcagtcagttt

SEQ ID NO: 12243 - DNA, 22 bp, Artificial Sequence
  chemically synthesized
acaatgatcaaatataggaatg

SEQ ID NO: 12244 - DNA, 22 bp, Artificial Sequence
  chemically synthesized
caatgatcaaatataggaatgt

SEQ ID NO: 12245 - DNA, 22 bp, Artificial Sequence
  chemically synthesized
aattgaaatggtaatgacacta

SEQ ID NO: 12246 - DNA, 22 bp, Artificial Sequence
  chemically synthesized
aaatggtaatgacactactgct

SEQ ID NO: 12247 - DNA, 22 bp, Artificial Sequence
  chemically synthesized
ctgctgtcataactaacaacag

SEQ ID NO: 12248 - DNA, 22 bp, Artificial Sequence
  chemically synthesized
ctgtcataactaacaacagcaa

SEQ ID NO: 12249 - DNA, 22 bp, Artificial Sequence
  chemically synthesized
tcataactaacaacagcaaact

SEQ ID NO: 12250 - DNA, 22 bp, Artificial Sequence
  chemically synthesized
acaacagcaaactggaggccaa

SEQ ID NO: 12251 - DNA, 22 bp, Artificial Sequence
  chemically synthesized
gaggccaacataatgaattaag

SEQ ID NO: 12252 - DNA, 22 bp, Artificial Sequence
  chemically synthesized
agttaacatacaaccataaaat

SEQ ID NO: 12253 - DNA, 22 bp, Artificial Sequence
  chemically synthesized
acatacaaccataaaattatat

SEQ ID NO: 12254 - DNA, 22 bp, Artificial Sequence
  chemically synthesized
tattgcaaacatatttttcttt

SEQ ID NO: 12255 - DNA, 22 bp, Artificial Sequence
  chemically synthesized
caaacatatttttctttcattc

SEQ ID NO: 12256 - DNA, 22 bp, Artificial Sequence
  chemically synthesized
ttctttcattcttttaggttaa

SEQ ID NO: 12257 - DNA, 22 bp, Artificial Sequence
  chemically synthesized
tctttcattcttttaggttaaa

SEQ ID NO: 12258 - DNA, 22 bp, Artificial Sequence
  chemically synthesized
ctttcattcttttaggttaaaa

SEQ ID NO: 12259 - DNA, 22 bp, Artificial Sequence
  chemically synthesized
tttcattcttttaggttaaaaa

SEQ ID NO: 12260 - DNA, 22 bp, Artificial Sequence
  chemically synthesized
tcattcttttaggttaaaaagg

SEQ ID NO: 12261 - DNA, 22 bp, Artificial Sequence
  chemically synthesized
cattcttttaggttaaaaaggt

SEQ ID NO: 12262 - DNA, 22 bp, Artificial Sequence
  chemically synthesized
attcttttaggttaaaaaggtg

SEQ ID NO: 12263 - DNA, 22 bp, Artificial Sequence
  chemically synthesized
ttttaggttaaaaaggtggata

SEQ ID NO: 12264 - DNA, 22 bp, Artificial Sequence
  chemically synthesized
ttaggttaaaaaggtggataat

SEQ ID NO: 12265 - DNA, 22 bp, Artificial Sequence
  chemically synthesized
taggttaaaaaggtggataatc

SEQ ID NO: 12266 - DNA, 22 bp, Artificial Sequence
  chemically synthesized
aggttaaaaaggtggataatca

SEQ ID NO: 12267 - DNA, 22 bp, Artificial Sequence
  chemically synthesized
ggttaaaaaggtggataatcat

SEQ ID NO: 12268 - DNA, 22 bp, Artificial Sequence
  chemically synthesized
aaaaggtggataatcataaagg

SEQ ID NO: 12269 - DNA, 22 bp, Artificial Sequence
  chemically synthesized
caactctaatatttcatcatta

SEQ ID NO: 12270 - DNA, 22 bp, Artificial Sequence
  chemically synthesized
taatatttcatcattaaactga

SEQ ID NO: 12271 - DNA, 22 bp, Artificial Sequence
  chemically synthesized
atatttcatcattaaactgaaa

SEQ ID NO: 12272 - DNA, 22 bp, Artificial Sequence
  chemically synthesized
catcattaaactgaaaataaaa

SEQ ID NO: 12273 - DNA, 22 bp, Artificial Sequence
  chemically synthesized
atcattaaactgaaaataaaag

SEQ ID NO: 12274 - DNA, 22 bp, Artificial Sequence
  chemically synthesized
aactgaaaataaaagtatttcc

SEQ ID NO: 12275 - DNA, 22 bp, Artificial Sequence
  chemically synthesized
aaaataaaagtatttcctaaaa

SEQ ID NO: 12276 - DNA, 22 bp, Artificial Sequence
  chemically synthesized
cctaaaacagaactgaaccctg

SEQ ID NO: 12277 - DNA, 22 bp, Artificial Sequence
  chemically synthesized
ctaaaacagaactgaaccctgg

SEQ ID NO: 12278 - DNA, 22 bp, Artificial Sequence
  chemically synthesized
aaacagaactgaaccctggagc

SEQ ID NO: 12279 - DNA, 22 bp, Artificial Sequence
  chemically synthesized
aaccctggagcaaaatctgatt

SEQ ID NO: 12280 - DNA, 22 bp, Artificial Sequence
  chemically synthesized
gagcaaaatctgattgaattat

SEQ ID NO: 12281 - DNA, 22 bp, Artificial Sequence
  chemically synthesized
attgaattatagggaaactttt

SEQ ID NO: 12282 - DNA, 22 bp, Artificial Sequence
  chemically synthesized
aattatagggaaacttttacca

SEQ ID NO: 12283 - DNA, 22 bp, Artificial Sequence
  chemically synthesized
tagggaaacttttaccacgttg

SEQ ID NO: 12284 - DNA, 22 bp, Artificial Sequence
  chemically synthesized
ttaccacgttgtgaaaattgaa

SEQ ID NO: 12285 - DNA, 22 bp, Artificial Sequence
  chemically synthesized
taccacgttgtgaaaattgaac

SEQ ID NO: 12286 - DNA, 22 bp, Artificial Sequence
  chemically synthesized
accacgttgtgaaaattgaact

SEQ ID NO: 12287 - DNA, 22 bp, Artificial Sequence
  chemically synthesized
ccacgttgtgaaaattgaacta

SEQ ID NO: 12288 - DNA, 22 bp, Artificial Sequence
  chemically synthesized
tgaaaattgaactattatactg

SEQ ID NO: 12289 - DNA, 22 bp, Artificial Sequence
  chemically synthesized
aactattatactgctagttaca

SEQ ID NO: 12290 - DNA, 22 bp, Artificial Sequence
  chemically synthesized
ttatactgctagttacactctc

SEQ ID NO: 12291 - DNA, 22 bp, Artificial Sequence
  chemically synthesized
tactgctagttacactctcact

SEQ ID NO: 12292 - DNA, 22 bp, Artificial Sequence
  chemically synthesized
ctagttacactctcactcctaa

SEQ ID NO: 12293 - DNA, 22 bp, Artificial Sequence
  chemically synthesized
gttacactctcactcctaacag

SEQ ID NO: 12294 - DNA, 22 bp, Artificial Sequence
  chemically synthesized
cactctcactcctaacagaata

SEQ ID NO: 12295 - DNA, 22 bp, Artificial Sequence
  chemically synthesized
tcactcctaacagaataagaaa

SEQ ID NO: 12296 - DNA, 22 bp, Artificial Sequence
  chemically synthesized
actcctaacagaataagaaaaa

SEQ ID NO: 12297 - DNA, 22 bp, Artificial Sequence
  chemically synthesized
ctaacagaataagaaaaaaaaa

SEQ ID NO: 12298 - DNA, 22 bp, Artificial Sequence
  chemically synthesized
acagaataagaaaaaaaaaatg

SEQ ID NO: 12299 - DNA, 22 bp, Artificial Sequence
  chemically synthesized
ttatcccagctctttggtaggc

SEQ ID NO: 12300 - DNA, 22 bp, Artificial Sequence
  chemically synthesized
tcccagctctttggtaggccga

SEQ ID NO: 12301 - DNA, 22 bp, Artificial Sequence
  chemically synthesized
tttggtaggccgaggcaggtgg

SEQ ID NO: 12302 - DNA, 22 bp, Artificial Sequence
  chemically synthesized
tggtaggccgaggcaggtggat

SEQ ID NO: 12303 - DNA, 22 bp, Artificial Sequence
  chemically synthesized
ggtaggccgaggcaggtggatc

SEQ ID NO: 12304 - DNA, 22 bp, Artificial Sequence
  chemically synthesized
gtaggccgaggcaggtggatca

SEQ ID NO: 12305 - DNA, 22 bp, Artificial Sequence
  chemically synthesized
aggtcaggagctcaagaccagc

SEQ ID NO: 12306 - DNA, 22 bp, Artificial Sequence
  chemically synthesized
aagaccagcctggccaacatgg

SEQ ID NO: 12307 - DNA, 22 bp, Artificial Sequence
  chemically synthesized
gccaacatggtgaaaccccacc

SEQ ID NO: 12308 - DNA, 22 bp, Artificial Sequence
  chemically synthesized
tactaaaaatacaaaaaattag

SEQ ID NO: 12309 - DNA, 22 bp, Artificial Sequence
  chemically synthesized
ctaaaaatacaaaaaattagcc

SEQ ID NO: 12310 - DNA, 22 bp, Artificial Sequence
  chemically synthesized
aaaatacaaaaaattagccggg

SEQ ID NO: 12311 - DNA, 22 bp, Artificial Sequence
  chemically synthesized
gccgggtgtggtggtggacacc

SEQ ID NO: 12312 - DNA, 22 bp, Artificial Sequence
  chemically synthesized
taatcccagctactcgggaggc

SEQ ID NO: 12313 - DNA, 22 bp, Artificial Sequence
  chemically synthesized
ctcgggaggctgaggcaggaga

SEQ ID NO: 12314 - DNA, 22 bp, Artificial Sequence
  chemically synthesized
gggaggctgaggcaggagaatc

SEQ ID NO: 12315 - DNA, 22 bp, Artificial Sequence
  chemically synthesized
aggcaggagaatctcttgaacc

SEQ ID NO: 12316 - DNA, 22 bp, Artificial Sequence
  chemically synthesized
ttgaacccggaggtggcagagg

SEQ ID NO: 12317 - DNA, 22 bp, Artificial Sequence
  chemically synthesized
gaacccggaggtggcagaggtt

SEQ ID NO: 12318 - DNA, 22 bp, Artificial Sequence
  chemically synthesized
aacccggaggtggcagaggttg

SEQ ID NO: 12319 - DNA, 22 bp, Artificial Sequence
  chemically synthesized
caatgagctgagatggcgccac

SEQ ID NO: 12320 - DNA, 22 bp, Artificial Sequence
  chemically synthesized
agatggcgccactgcactccag

SEQ ID NO: 12321 - DNA, 22 bp, Artificial Sequence
  chemically synthesized
cactccagcctgggcgacagag

SEQ ID NO: 12322 - DNA, 22 bp, Artificial Sequence
  chemically synthesized
cagcctgggcgacagagagaga

SEQ ID NO: 12323 - DNA, 22 bp, Artificial Sequence
  chemically synthesized
ggcgacagagagagactctgcc

SEQ ID NO: 12324 - DNA, 22 bp, Artificial Sequence
  chemically synthesized
tgcctcaagaaaaaaacaaaca

SEQ ID NO: 12325 - DNA, 22 bp, Artificial Sequence
  chemically synthesized
cctcaagaaaaaaacaaacaaa

SEQ ID NO: 12326 - DNA, 22 bp, Artificial Sequence
  chemically synthesized
aagaaaaaaacaaacaaacaaa

SEQ ID NO: 12327 - DNA, 22 bp, Artificial Sequence
  chemically synthesized
aattgcttagttttaaatccta

SEQ ID NO: 12328 - DNA, 22 bp, Artificial Sequence
  chemically synthesized
cttagttttaaatcctaccaaa

SEQ ID NO: 12329 - DNA, 22 bp, Artificial Sequence
  chemically synthesized
agttttaaatcctaccaaaaga

SEQ ID NO: 12330 - DNA, 22 bp, Artificial Sequence
  chemically synthesized
gttttaaatcctaccaaaagaa

SEQ ID NO: 12331 - DNA, 22 bp, Artificial Sequence
  chemically synthesized
taaatcctaccaaaagaaatag

SEQ ID NO: 12332 - DNA, 22 bp, Artificial Sequence
  chemically synthesized
aaatcctaccaaaagaaatagc

SEQ ID NO: 12333 - DNA, 22 bp, Artificial Sequence
  chemically synthesized
aatcctaccaaaagaaatagcc

SEQ ID NO: 12334 - DNA, 22 bp, Artificial Sequence
  chemically synthesized
ccaaaagaaatagcctgggaaa

SEQ ID NO: 12335 - DNA, 22 bp, Artificial Sequence
  chemically synthesized
ggaaatgaaatgtcacagagaa

SEQ ID NO: 12336 - DNA, 22 bp, Artificial Sequence
  chemically synthesized
tacaattattttactaatactt

SEQ ID NO: 12337 - DNA, 22 bp, Artificial Sequence
  chemically synthesized
ttttactaatacttgaagtcat

SEQ ID NO: 12338 - DNA, 22 bp, Artificial Sequence
  chemically synthesized
tactaatacttgaagtcatcgt

SEQ ID NO: 12339 - DNA, 22 bp, Artificial Sequence
  chemically synthesized
actaatacttgaagtcatcgtc

SEQ ID NO: 12340 - DNA, 22 bp, Artificial Sequence
  chemically synthesized
ctaatacttgaagtcatcgtct

SEQ ID NO: 12341 - DNA, 22 bp, Artificial Sequence
  chemically synthesized
atacttgaagtcatcgtctttg

SEQ ID NO: 12342 - DNA, 22 bp, Artificial Sequence
  chemically synthesized
gaagtcatcgtctttggtgaga

SEQ ID NO: 12343 - DNA, 22 bp, Artificial Sequence
  chemically synthesized
aagtcatcgtctttggtgagaa

SEQ ID NO: 12344 - DNA, 22 bp, Artificial Sequence
  chemically synthesized
tggtgagaaaaatccatacatg

SEQ ID NO: 12345 - DNA, 22 bp, Artificial Sequence
  chemically synthesized
ggtgagaaaaatccatacatgc

SEQ ID NO: 12346 - DNA, 22 bp, Artificial Sequence
  chemically synthesized
gtgagaaaaatccatacatgca

SEQ ID NO: 12347 - DNA, 22 bp, Artificial Sequence
  chemically synthesized
aaaaaaatcagctcaaaaccaa

SEQ ID NO: 12348 - DNA, 22 bp, Artificial Sequence
  chemically synthesized
aaaaccaatagttgtttatgta

SEQ ID NO: 12349 - DNA, 22 bp, Artificial Sequence
  chemically synthesized
tttatgtacctatcttacgtac

SEQ ID NO: 12350 - DNA, 22 bp, Artificial Sequence
  chemically synthesized
atgtacctatcttacgtacatg

SEQ ID NO: 12351 - DNA, 22 bp, Artificial Sequence
  chemically synthesized
tgtacctatcttacgtacatgt

SEQ ID NO: 12352 - DNA, 22 bp, Artificial Sequence
  chemically synthesized
tcttacgtacatgtagtgctgt

SEQ ID NO: 12353 - DNA, 22 bp, Artificial Sequence
  chemically synthesized
acgtacatgtagtgctgtctac

SEQ ID NO: 12354 - DNA, 22 bp, Artificial Sequence
  chemically synthesized
cgtacatgtagtgctgtctact

SEQ ID NO: 12355 - DNA, 22 bp, Artificial Sequence
  chemically synthesized
tctactccagagagttaccaaa

SEQ ID NO: 12356 - DNA, 22 bp, Artificial Sequence
  chemically synthesized
ctccagagagttaccaaacatt

SEQ ID NO: 12357 - DNA, 22 bp, Artificial Sequence
  chemically synthesized
cagagagttaccaaacattagc

SEQ ID NO: 12358 - DNA, 22 bp, Artificial Sequence
  chemically synthesized
ccaaacattagccagtcttttg

SEQ ID NO: 12359 - DNA, 22 bp, Artificial Sequence
  chemically synthesized
gccagtcttttgagggaagcca

SEQ ID NO: 12360 - DNA, 22 bp, Artificial Sequence
  chemically synthesized
ttgagggaagccaagattcaaa

SEQ ID NO: 12361 - DNA, 22 bp, Artificial Sequence
  chemically synthesized
tgagggaagccaagattcaaat

SEQ ID NO: 12362 - DNA, 22 bp, Artificial Sequence
  chemically synthesized
gagggaagccaagattcaaatt

SEQ ID NO: 12363 - DNA, 22 bp, Artificial Sequence
  chemically synthesized
agggaagccaagattcaaattg

SEQ ID NO: 12364 - DNA, 22 bp, Artificial Sequence
  chemically synthesized
aaattgagtgagacggtggctt

SEQ ID NO: 12365 - DNA, 22 bp, Artificial Sequence
  chemically synthesized
agtgagacggtggcttgctcac

SEQ ID NO: 12366 - DNA, 22 bp, Artificial Sequence
  chemically synthesized
gctcacagggttcatgagaggt

SEQ ID NO: 12367 - DNA, 22 bp, Artificial Sequence
  chemically synthesized
ctcacagggttcatgagaggtt

SEQ ID NO: 12368 - DNA, 22 bp, Artificial Sequence
  chemically synthesized
acagggttcatgagaggtttcc

SEQ ID NO: 12369 - DNA, 22 bp, Artificial Sequence
  chemically synthesized
atgagaggtttcccaatacact

SEQ ID NO: 12370 - DNA, 22 bp, Artificial Sequence
  chemically synthesized
cccaatacactttctggaaata

SEQ ID NO: 12371 - DNA, 22 bp, Artificial Sequence
  chemically synthesized
ccaatacactttctggaaataa

SEQ ID NO: 12372 - DNA, 22 bp, Artificial Sequence
  chemically synthesized
tctggaaataatcccatacatg

SEQ ID NO: 12373 - DNA, 22 bp, Artificial Sequence
  chemically synthesized
ctggaaataatcccatacatgc

SEQ ID NO: 12374 - DNA, 22 bp, Artificial Sequence
  chemically synthesized
tggaaataatcccatacatgca

SEQ ID NO: 12375 - DNA, 22 bp, Artificial Sequence
  chemically synthesized
gaaataatcccatacatgcaga

SEQ ID NO: 12376 - DNA, 22 bp, Artificial Sequence
  chemically synthesized
cattaattaacatctgctaaaa

SEQ ID NO: 12377 - DNA, 22 bp, Artificial Sequence
  chemically synthesized
attaacatctgctaaaactgtt

SEQ ID NO: 12378 - DNA, 22 bp, Artificial Sequence
  chemically synthesized
acatctgctaaaactgttagta

SEQ ID NO: 12379 - DNA, 22 bp, Artificial Sequence
  chemically synthesized
ctaaaactgttagtagagtgct

SEQ ID NO: 12380 - DNA, 22 bp, Artificial Sequence
  chemically synthesized
aaactgttagtagagtgctaag

SEQ ID NO: 12381 - DNA, 22 bp, Artificial Sequence
  chemically synthesized
ttagtagagtgctaagtttgag

SEQ ID NO: 12382 - DNA, 22 bp, Artificial Sequence
  chemically synthesized
gtagagtgctaagtttgaggtt

SEQ ID NO: 12383 - DNA, 22 bp, Artificial Sequence
  chemically synthesized
agtttgaggttttgctttttct

SEQ ID NO: 12384 - DNA, 22 bp, Artificial Sequence
  chemically synthesized
gaggttttgctttttctttaaa

SEQ ID NO: 12385 - DNA, 22 bp, Artificial Sequence
  chemically synthesized
aggttttgctttttctttaaac

SEQ ID NO: 12386 - DNA, 22 bp, Artificial Sequence
  chemically synthesized
tgctttttctttaaacgtctgt

SEQ ID NO: 12387 - DNA, 22 bp, Artificial Sequence
  chemically synthesized
gctttttctttaaacgtctgtt

SEQ ID NO: 12388 - DNA, 22 bp, Artificial Sequence
  chemically synthesized
ctttttctttaaacgtctgtta

SEQ ID NO: 12389 - DNA, 22 bp, Artificial Sequence
  chemically synthesized
tttctttaaacgtctgttaaaa

SEQ ID NO: 12390 - DNA, 22 bp, Artificial Sequence
  chemically synthesized
ttctttaaacgtctgttaaaaa

SEQ ID NO: 12391 - DNA, 22 bp, Artificial Sequence
  chemically synthesized
tctttaaacgtctgttaaaaaa

SEQ ID NO: 12392 - DNA, 22 bp, Artificial Sequence
  chemically synthesized
ctttaaacgtctgttaaaaaat

SEQ ID NO: 12393 - DNA, 22 bp, Artificial Sequence
  chemically synthesized
tttaaacgtctgttaaaaaatc

SEQ ID NO: 12394 - DNA, 22 bp, Artificial Sequence
  chemically synthesized
taaacgtctgttaaaaaatcaa

SEQ ID NO: 12395 - DNA, 22 bp, Artificial Sequence
  chemically synthesized
aaacgtctgttaaaaaatcaac

SEQ ID NO: 12396 - DNA, 22 bp, Artificial Sequence
  chemically synthesized
aacgtctgttaaaaaatcaacc

SEQ ID NO: 12397 - DNA, 22 bp, Artificial Sequence
  chemically synthesized
ttaaaaaatcaaccatctcttc

SEQ ID NO: 12398 - DNA, 22 bp, Artificial Sequence
  chemically synthesized
aaaaatcaaccatctcttccct

SEQ ID NO: 12399 - DNA, 22 bp, Artificial Sequence
  chemically synthesized
ttccctgattggtatttagaaa

SEQ ID NO: 12400 - DNA, 22 bp, Artificial Sequence
  chemically synthesized
ccctgattggtatttagaaagg

SEQ ID NO: 12401 - DNA, 22 bp, Artificial Sequence
  chemically synthesized
cctgattggtatttagaaaggt

SEQ ID NO: 12402 - DNA, 22 bp, Artificial Sequence
  chemically synthesized
attggtatttagaaaggtggtt

SEQ ID NO: 12403 - DNA, 22 bp, Artificial Sequence
  chemically synthesized
gtatttagaaaggtggttggtc

SEQ ID NO: 12404 - DNA, 22 bp, Artificial Sequence
  chemically synthesized
agaaaggtggttggtccactgc

SEQ ID NO: 12405 - DNA, 22 bp, Artificial Sequence
  chemically synthesized
gaaaggtggttggtccactgct

SEQ ID NO: 12406 - DNA, 22 bp, Artificial Sequence
  chemically synthesized
gtccactgctattgtagtgaaa

SEQ ID NO: 12407 - DNA, 22 bp, Artificial Sequence
  chemically synthesized
ctattgtagtgaaaattctaca

SEQ ID NO: 12408 - DNA, 22 bp, Artificial Sequence
  chemically synthesized
ttgtagtgaaaattctacaatc

SEQ ID NO: 12409 - DNA, 22 bp, Artificial Sequence
  chemically synthesized
tagtgaaaattctacaatcata

SEQ ID NO: 12410 - DNA, 22 bp, Artificial Sequence
  chemically synthesized
tacaatcataaagccctcactt

SEQ ID NO: 12411 - DNA, 22 bp, Artificial Sequence
  chemically synthesized
caatcataaagccctcacttct

SEQ ID NO: 12412 - DNA, 22 bp, Artificial Sequence
  chemically synthesized
acttcttgttttttagagacag

SEQ ID NO: 12413 - DNA, 22 bp, Artificial Sequence
  chemically synthesized
cttgttttttagagacagggtc

SEQ ID NO: 12414 - DNA, 22 bp, Artificial Sequence
  chemically synthesized
ttgttttttagagacagggtct

SEQ ID NO: 12415 - DNA, 22 bp, Artificial Sequence
  chemically synthesized
gttttttagagacagggtctcg

SEQ ID NO: 12416 - DNA, 22 bp, Artificial Sequence
  chemically synthesized
ttttttagagacagggtctcgt

SEQ ID NO: 12417 - DNA, 22 bp, Artificial Sequence
  chemically synthesized
tttagagacagggtctcgtttt

SEQ ID NO: 12418 - DNA, 22 bp, Artificial Sequence
  chemically synthesized
ttagagacagggtctcgttttg

SEQ ID NO: 12419 - DNA, 22 bp, Artificial Sequence
  chemically synthesized
tagagacagggtctcgttttgt

SEQ ID NO: 12420 - DNA, 22 bp, Artificial Sequence
  chemically synthesized
agagacagggtctcgttttgtc

SEQ ID NO: 12421 - DNA, 22 bp, Artificial Sequence
  chemically synthesized
gagacagggtctcgttttgtca

SEQ ID NO: 12422 - DNA, 22 bp, Artificial Sequence
  chemically synthesized
gttttgtcatccaggctggaat

SEQ ID NO: 12423 - DNA, 22 bp, Artificial Sequence
  chemically synthesized
tgtcatccaggctggaatgcac

SEQ ID NO: 12424 - DNA, 22 bp, Artificial Sequence
  chemically synthesized
gtcatccaggctggaatgcact

SEQ ID NO: 12425 - DNA, 22 bp, Artificial Sequence
  chemically synthesized
tcatccaggctggaatgcactg

SEQ ID NO: 12426 - DNA, 22 bp, Artificial Sequence
  chemically synthesized
gaatgcactggcaggatcatag

SEQ ID NO: 12427 - DNA, 22 bp, Artificial Sequence
  chemically synthesized
gcaggatcatagctctcggtaa

SEQ ID NO: 12428 - DNA, 22 bp, Artificial Sequence
  chemically synthesized
tcggtaacttcaaactcttggg

SEQ ID NO: 12429 - DNA, 22 bp, Artificial Sequence
  chemically synthesized
ggtaacttcaaactcttgggct

SEQ ID NO: 12430 - DNA, 22 bp, Artificial Sequence
  chemically synthesized
caaactcttgggctcaaatgac

SEQ ID NO: 12431 - DNA, 22 bp, Artificial Sequence
  chemically synthesized
aaactcttgggctcaaatgacc

SEQ ID NO: 12432 - DNA, 22 bp, Artificial Sequence
  chemically synthesized
ttgggctcaaatgaccctcctg

SEQ ID NO: 12433 - DNA, 22 bp, Artificial Sequence
  chemically synthesized
gggctcaaatgaccctcctgcc

SEQ ID NO: 12434 - DNA, 22 bp, Artificial Sequence
  chemically synthesized
ggctcaaatgaccctcctgcct

SEQ ID NO: 12435 - DNA, 22 bp, Artificial Sequence
  chemically synthesized
aaatgaccctcctgcctcagcc

SEQ ID NO: 12436 - DNA, 22 bp, Artificial Sequence
  chemically synthesized
ctgcctcagcctcccaagtagc

SEQ ID NO: 12437 - DNA, 22 bp, Artificial Sequence
  chemically synthesized
cctcagcctcccaagtagctag

SEQ ID NO: 12438 - DNA, 22 bp, Artificial Sequence
  chemically synthesized
agcctcccaagtagctaggact

SEQ ID NO: 12439 - DNA, 22 bp, Artificial Sequence
  chemically synthesized
ccaagtagctaggactacaggt

SEQ ID NO: 12440 - DNA, 22 bp, Artificial Sequence
  chemically synthesized
ggactacaggtgcacatcacca

SEQ ID NO: 12441 - DNA, 22 bp, Artificial Sequence
  chemically synthesized
caggtgcacatcaccacgcccg

SEQ ID NO: 12442 - DNA, 22 bp, Artificial Sequence
  chemically synthesized
agtttttaattttttgtagaga

SEQ ID NO: 12443 - DNA, 22 bp, Artificial Sequence
  chemically synthesized
ttaattttttgtagagacaggg

SEQ ID NO: 12444 - DNA, 22 bp, Artificial Sequence
  chemically synthesized
taattttttgtagagacagggt

SEQ ID NO: 12445 - DNA, 22 bp, Artificial Sequence
  chemically synthesized
aattttttgtagagacagggtc

SEQ ID NO: 12446 - DNA, 22 bp, Artificial Sequence
  chemically synthesized
attttttgtagagacagggtct

SEQ ID NO: 12447 - DNA, 22 bp, Artificial Sequence
  chemically synthesized
tttgtagagacagggtctacgt

SEQ ID NO: 12448 - DNA, 22 bp, Artificial Sequence
  chemically synthesized
ttgtagagacagggtctacgtt

SEQ ID NO: 12449 - DNA, 22 bp, Artificial Sequence
  chemically synthesized
tgtagagacagggtctacgttg

SEQ ID NO: 12450 - DNA, 22 bp, Artificial Sequence
  chemically synthesized
gtagagacagggtctacgttgc

SEQ ID NO: 12451 - DNA, 22 bp, Artificial Sequence
  chemically synthesized
tagagacagggtctacgttgcc

SEQ ID NO: 12452 - DNA, 22 bp, Artificial Sequence
  chemically synthesized
cgttgcccaggttgagcttgaa

SEQ ID NO: 12453 - DNA, 22 bp, Artificial Sequence
  chemically synthesized
cccaggttgagcttgaactcct

SEQ ID NO: 12454 - DNA, 22 bp, Artificial Sequence
  chemically synthesized
agcttgaactcctggcttcaag

SEQ ID NO: 12455 - DNA, 22 bp, Artificial Sequence
  chemically synthesized
gaactcctggcttcaagtgatc

SEQ ID NO: 12456 - DNA, 22 bp, Artificial Sequence
  chemically synthesized
aactcctggcttcaagtgatcc

SEQ ID NO: 12457 - DNA, 22 bp, Artificial Sequence
  chemically synthesized
ctggcttcaagtgatcctcttg

SEQ ID NO: 12458 - DNA, 22 bp, Artificial Sequence
  chemically synthesized
gcttcaagtgatcctcttgcct

SEQ ID NO: 12459 - DNA, 22 bp, Artificial Sequence
  chemically synthesized
caagtgatcctcttgcctccgc

SEQ ID NO: 12460 - DNA, 22 bp, Artificial Sequence
  chemically synthesized
aagtgatcctcttgcctccgcc

SEQ ID NO: 12461 - DNA, 22 bp, Artificial Sequence
  chemically synthesized
ttgcctccgcctcccaaagctc

SEQ ID NO: 12462 - DNA, 22 bp, Artificial Sequence
  chemically synthesized
gcctccgcctcccaaagctctg

SEQ ID NO: 12463 - DNA, 22 bp, Artificial Sequence
  chemically synthesized
cctccgcctcccaaagctctgg

SEQ ID NO: 12464 - DNA, 22 bp, Artificial Sequence
  chemically synthesized
cgcctcccaaagctctggcatt

SEQ ID NO: 12465 - DNA, 22 bp, Artificial Sequence
  chemically synthesized
ccaaagctctggcattacaggt

SEQ ID NO: 12466 - DNA, 22 bp, Artificial Sequence
  chemically synthesized
tggcattacaggtgtaagccac

SEQ ID NO: 12467 - DNA, 22 bp, Artificial Sequence
  chemically synthesized
gcattacaggtgtaagccacct

SEQ ID NO: 12468 - DNA, 22 bp, Artificial Sequence
  chemically synthesized
caggtgtaagccaccttctcca

SEQ ID NO: 12469 - DNA, 22 bp, Artificial Sequence
  chemically synthesized
ctccaacctggctctcaatact

SEQ ID NO: 12470 - DNA, 22 bp, Artificial Sequence
  chemically synthesized
tccaacctggctctcaatactt

SEQ ID NO: 12471 - DNA, 22 bp, Artificial Sequence
  chemically synthesized
caacctggctctcaatacttgt

SEQ ID NO: 12472 - DNA, 22 bp, Artificial Sequence
  chemically synthesized
gctctcaatacttgtaaccatg

SEQ ID NO: 12473 - DNA, 22 bp, Artificial Sequence
  chemically synthesized
tcaatacttgtaaccatgctgt

SEQ ID NO: 12474 - DNA, 22 bp, Artificial Sequence
  chemically synthesized
aatacttgtaaccatgctgttt

SEQ ID NO: 12475 - DNA, 22 bp, Artificial Sequence
  chemically synthesized
gtaaccatgctgtttattttct

SEQ ID NO: 12476 - DNA, 22 bp, Artificial Sequence
  chemically synthesized
taaccatgctgtttattttctc

SEQ ID NO: 12477 - DNA, 22 bp, Artificial Sequence
  chemically synthesized
tttattttctcccagcccaaag

SEQ ID NO: 12478 - DNA, 22 bp, Artificial Sequence
  chemically synthesized
attttctcccagcccaaagaga

SEQ ID NO: 12479 - DNA, 22 bp, Artificial Sequence
  chemically synthesized
ttttctcccagcccaaagagaa

SEQ ID NO: 12480 - DNA, 22 bp, Artificial Sequence
  chemically synthesized
tctcccagcccaaagagaagca

SEQ ID NO: 12481 - DNA, 22 bp, Artificial Sequence
  chemically synthesized
ctcccagcccaaagagaagcag

SEQ ID NO: 12482 - DNA, 22 bp, Artificial Sequence
  chemically synthesized
tcccagcccaaagagaagcagg

SEQ ID NO: 12483 - DNA, 22 bp, Artificial Sequence
  chemically synthesized
ccagcccaaagagaagcaggat

SEQ ID NO: 12484 - DNA, 22 bp, Artificial Sequence
  chemically synthesized
aaccgtccactttccacaacag

SEQ ID NO: 12485 - DNA, 22 bp, Artificial Sequence
  chemically synthesized
tccacaacaggagctgcccagg

SEQ ID NO: 12486 - DNA, 22 bp, Artificial Sequence
  chemically synthesized
ccacaacaggagctgcccagga

SEQ ID NO: 12487 - DNA, 22 bp, Artificial Sequence
  chemically synthesized
cacaacaggagctgcccaggac

SEQ ID NO: 12488 - DNA, 22 bp, Artificial Sequence
  chemically synthesized
cccaggaccacttcaaggacag

SEQ ID NO: 12489 - DNA, 22 bp, Artificial Sequence
  chemically synthesized
caaggacagtgaactgtttaca

SEQ ID NO: 12490 - DNA, 22 bp, Artificial Sequence
  chemically synthesized
aaggacagtgaactgtttacag

SEQ ID NO: 12491 - DNA, 22 bp, Artificial Sequence
  chemically synthesized
tttacagtaccagaaagttcac

SEQ ID NO: 12492 - DNA, 22 bp, Artificial Sequence
  chemically synthesized
acagtaccagaaagttcacaac

SEQ ID NO: 12493 - DNA, 22 bp, Artificial Sequence
  chemically synthesized
cagtaccagaaagttcacaaca

SEQ ID NO: 12494 - DNA, 22 bp, Artificial Sequence
  chemically synthesized
acaacactttctcaatcttcaa

SEQ ID NO: 12495 - DNA, 22 bp, Artificial Sequence
  chemically synthesized
tctcaatcttcaacatcaggga

SEQ ID NO: 12496 - DNA, 22 bp, Artificial Sequence
  chemically synthesized
ctcaatcttcaacatcagggaa

SEQ ID NO: 12497 - DNA, 22 bp, Artificial Sequence
  chemically synthesized
tcaatcttcaacatcagggaag

SEQ ID NO: 12498 - DNA, 22 bp, Artificial Sequence
  chemically synthesized
aatcttcaacatcagggaagac

SEQ ID NO: 12499 - DNA, 22 bp, Artificial Sequence
  chemically synthesized
caacatcagggaagactggaag

SEQ ID NO: 12500 - DNA, 22 bp, Artificial Sequence
  chemically synthesized
aacatcagggaagactggaagg

SEQ ID NO: 12501 - DNA, 22 bp, Artificial Sequence
  chemically synthesized
gaaggtgaagttcatatcacta

SEQ ID NO: 12502 - DNA, 22 bp, Artificial Sequence
  chemically synthesized
atatcactatctggccatttct

SEQ ID NO: 12503 - DNA, 22 bp, Artificial Sequence
  chemically synthesized
tctggccatttctcacagttcc

SEQ ID NO: 12504 - DNA, 22 bp, Artificial Sequence
  chemically synthesized
gccatttctcacagttccaagt

SEQ ID NO: 12505 - DNA, 22 bp, Artificial Sequence
  chemically synthesized
ctcacagttccaagtttctcag

SEQ ID NO: 12506 - DNA, 22 bp, Artificial Sequence
  chemically synthesized
tcacagttccaagtttctcaga

SEQ ID NO: 12507 - DNA, 22 bp, Artificial Sequence
  chemically synthesized
acagttccaagtttctcagaca

SEQ ID NO: 12508 - DNA, 22 bp, Artificial Sequence
  chemically synthesized
caagtttctcagacaataggta

SEQ ID NO: 12509 - DNA, 22 bp, Artificial Sequence
  chemically synthesized
ctcagacaataggtaggctaac

SEQ ID NO: 12510 - DNA, 22 bp, Artificial Sequence
  chemically synthesized
tcagacaataggtaggctaacc

SEQ ID NO: 12511 - DNA, 22 bp, Artificial Sequence
  chemically synthesized
agacaataggtaggctaaccta

SEQ ID NO: 12512 - DNA, 22 bp, Artificial Sequence
  chemically synthesized
acctagtcctcctgggaactat

SEQ ID NO: 12513 - DNA, 22 bp, Artificial Sequence
  chemically synthesized
gtcctcctgggaactatctaat

SEQ ID NO: 12514 - DNA, 22 bp, Artificial Sequence
  chemically synthesized
ctgggaactatctaattaacgt

SEQ ID NO: 12515 - DNA, 22 bp, Artificial Sequence
  chemically synthesized
ggaactatctaattaacgtaga

SEQ ID NO: 12516 - DNA, 22 bp, Artificial Sequence
  chemically synthesized
tctaattaacgtagaatagaac

SEQ ID NO: 12517 - DNA, 22 bp, Artificial Sequence
  chemically synthesized
attaacgtagaatagaacccga

SEQ ID NO: 12518 - DNA, 22 bp, Artificial Sequence
  chemically synthesized
acgtagaatagaacccgagggc

SEQ ID NO: 12519 - DNA, 22 bp, Artificial Sequence
  chemically synthesized
gaaaaacagaagtcctccttgg

SEQ ID NO: 12520 - DNA, 22 bp, Artificial Sequence
  chemically synthesized
aaaaacagaagtcctccttggt

SEQ ID NO: 12521 - DNA, 22 bp, Artificial Sequence
  chemically synthesized
cttggtttactttgtttctctg

SEQ ID NO: 12522 - DNA, 22 bp, Artificial Sequence
  chemically synthesized
ggtttactttgtttctctgaaa

SEQ ID NO: 12523 - DNA, 22 bp, Artificial Sequence
  chemically synthesized
gtttactttgtttctctgaaag

SEQ ID NO: 12524 - DNA, 22 bp, Artificial Sequence
  chemically synthesized
actttgtttctctgaaagcaaa

SEQ ID NO: 12525 - DNA, 22 bp, Artificial Sequence
  chemically synthesized
ctttgtttctctgaaagcaaat

SEQ ID NO: 12526 - DNA, 22 bp, Artificial Sequence
  chemically synthesized
tgtttctctgaaagcaaattgt

SEQ ID NO: 12527 - DNA, 22 bp, Artificial Sequence
  chemically synthesized
gtttctctgaaagcaaattgtg

SEQ ID NO: 12528 - DNA, 22 bp, Artificial Sequence
  chemically synthesized
tttctctgaaagcaaattgtgg

SEQ ID NO: 12529 - DNA, 22 bp, Artificial Sequence
  chemically synthesized
ctctgaaagcaaattgtggagt

SEQ ID NO: 12530 - DNA, 22 bp, Artificial Sequence
  chemically synthesized
tctgaaagcaaattgtggagtg

SEQ ID NO: 12531 - DNA, 22 bp, Artificial Sequence
  chemically synthesized
tgaaagcaaattgtggagtgcc

SEQ ID NO: 12532 - DNA, 22 bp, Artificial Sequence
  chemically synthesized
aaagcaaattgtggagtgccaa

SEQ ID NO: 12533 - DNA, 22 bp, Artificial Sequence
  chemically synthesized
tggagtgccaacatagccaaac

SEQ ID NO: 12534 - DNA, 22 bp, Artificial Sequence
  chemically synthesized
tatcaacttcataaggtgcttg

SEQ ID NO: 12535 - DNA, 22 bp, Artificial Sequence
  chemically synthesized
atcaacttcataaggtgcttgt

SEQ ID NO: 12536 - DNA, 22 bp, Artificial Sequence
  chemically synthesized
tcaacttcataaggtgcttgta

SEQ ID NO: 12537 - DNA, 22 bp, Artificial Sequence
  chemically synthesized
cataaggtgcttgtaatttttt

SEQ ID NO: 12538 - DNA, 22 bp, Artificial Sequence
  chemically synthesized
ataaggtgcttgtaattttttc

SEQ ID NO: 12539 - DNA, 22 bp, Artificial Sequence
  chemically synthesized
gtaattttttcctggagcaggt

SEQ ID NO: 12540 - DNA, 22 bp, Artificial Sequence
  chemically synthesized
taattttttcctggagcaggta

SEQ ID NO: 12541 - DNA, 22 bp, Artificial Sequence
  chemically synthesized
tttcctggagcaggtaaatgct

SEQ ID NO: 12542 - DNA, 22 bp, Artificial Sequence
  chemically synthesized
ttcctggagcaggtaaatgctg

SEQ ID NO: 12543 - DNA, 22 bp, Artificial Sequence
  chemically synthesized
tcctggagcaggtaaatgctgg

SEQ ID NO: 12544 - DNA, 22 bp, Artificial Sequence
  chemically synthesized
cctggagcaggtaaatgctggc

SEQ ID NO: 12545 - DNA, 22 bp, Artificial Sequence
  chemically synthesized
ctggagcaggtaaatgctggct

SEQ ID NO: 12546 - DNA, 22 bp, Artificial Sequence
  chemically synthesized
gagcaggtaaatgctggcttag

SEQ ID NO: 12547 - DNA, 22 bp, Artificial Sequence
  chemically synthesized
gcttagtgaacaatctggaatg

SEQ ID NO: 12548 - DNA, 22 bp, Artificial Sequence
  chemically synthesized
agtgaacaatctggaatgtggt

SEQ ID NO: 12549 - DNA, 22 bp, Artificial Sequence
  chemically synthesized
gtgaacaatctggaatgtggta

SEQ ID NO: 12550 - DNA, 22 bp, Artificial Sequence
  chemically synthesized
gaatgtggtaattactctcgtt

SEQ ID NO: 12551 - DNA, 22 bp, Artificial Sequence
  chemically synthesized
ctctcgttcttgtttcagatgt

SEQ ID NO: 12552 - DNA, 22 bp, Artificial Sequence
  chemically synthesized
tcgttcttgtttcagatgtact

SEQ ID NO: 12553 - DNA, 22 bp, Artificial Sequence
  chemically synthesized
gttcttgtttcagatgtactat

SEQ ID NO: 12554 - DNA, 22 bp, Artificial Sequence
  chemically synthesized
ttgtttcagatgtactatcagc

SEQ ID NO: 12555 - DNA, 22 bp, Artificial Sequence
  chemically synthesized
gtttcagatgtactatcagcat

SEQ ID NO: 12556 - DNA, 22 bp, Artificial Sequence
  chemically synthesized
tttcagatgtactatcagcatg

SEQ ID NO: 12557 - DNA, 22 bp, Artificial Sequence
  chemically synthesized
cagatgtactatcagcatgtag

SEQ ID NO: 12558 - DNA, 22 bp, Artificial Sequence
  chemically synthesized
agatgtactatcagcatgtagc

SEQ ID NO: 12559 - DNA, 22 bp, Artificial Sequence
  chemically synthesized
tcagcatgtagcagtttccaac

SEQ ID NO: 12560 - DNA, 22 bp, Artificial Sequence
  chemically synthesized
ccaactgattcagggttttcct

SEQ ID NO: 12561 - DNA, 22 bp, Artificial Sequence
  chemically synthesized
caactgattcagggttttccta

SEQ ID NO: 12562 - DNA, 22 bp, Artificial Sequence
  chemically synthesized
attcagggttttcctaaagtgg

SEQ ID NO: 12563 - DNA, 22 bp, Artificial Sequence
  chemically synthesized
agggttttcctaaagtggcagg

SEQ ID NO: 12564 - DNA, 22 bp, Artificial Sequence
  chemically synthesized
tcctaaagtggcaggccttggc

SEQ ID NO: 12565 - DNA, 22 bp, Artificial Sequence
  chemically synthesized
cctaaagtggcaggccttggca

SEQ ID NO: 12566 - DNA, 22 bp, Artificial Sequence
  chemically synthesized
ctaaagtggcaggccttggcag

SEQ ID NO: 12567 - DNA, 22 bp, Artificial Sequence
  chemically synthesized
aagtggcaggccttggcagagg

SEQ ID NO: 12568 - DNA, 22 bp, Artificial Sequence
  chemically synthesized
ggcagaggtggtgacaacaatg

SEQ ID NO: 12569 - DNA, 22 bp, Artificial Sequence
  chemically synthesized
gcagaggtggtgacaacaatgc

SEQ ID NO: 12570 - DNA, 22 bp, Artificial Sequence
  chemically synthesized
caagtattctgactccaggtta

SEQ ID NO: 12571 - DNA, 22 bp, Artificial Sequence
  chemically synthesized
aagtattctgactccaggttat

SEQ ID NO: 12572 - DNA, 22 bp, Artificial Sequence
  chemically synthesized
tgactccaggttattaatatcc

SEQ ID NO: 12573 - DNA, 22 bp, Artificial Sequence
  chemically synthesized
actccaggttattaatatcccc

SEQ ID NO: 12574 - DNA, 22 bp, Artificial Sequence
  chemically synthesized
caggttattaatatcccctata

SEQ ID NO: 12575 - DNA, 22 bp, Artificial Sequence
  chemically synthesized
ttaatatcccctatatgatagt

SEQ ID NO: 12576 - DNA, 22 bp, Artificial Sequence
  chemically synthesized
atatcccctatatgatagtctt

SEQ ID NO: 12577 - DNA, 22 bp, Artificial Sequence
  chemically synthesized
tatgatagtcttgtttctgtga

SEQ ID NO: 12578 - DNA, 22 bp, Artificial Sequence
  chemically synthesized
gtttctgtgatattcacagatt

SEQ ID NO: 12579 - DNA, 22 bp, Artificial Sequence
  chemically synthesized
tttctgtgatattcacagatta

SEQ ID NO: 12580 - DNA, 22 bp, Artificial Sequence
  chemically synthesized
ctgtgatattcacagattatgt

SEQ ID NO: 12581 - DNA, 22 bp, Artificial Sequence
  chemically synthesized
tgtgatattcacagattatgtt

SEQ ID NO: 12582 - DNA, 22 bp, Artificial Sequence
  chemically synthesized
tgatattcacagattatgttaa

SEQ ID NO: 12583 - DNA, 22 bp, Artificial Sequence
  chemically synthesized
acagattatgttaaaagtttcc

SEQ ID NO: 12584 - DNA, 22 bp, Artificial Sequence
  chemically synthesized
tgttaaaagtttcccaaagtct

SEQ ID NO: 12585 - DNA, 22 bp, Artificial Sequence
  chemically synthesized
aaagtttcccaaagtctgagaa

SEQ ID NO: 12586 - DNA, 22 bp, Artificial Sequence
  chemically synthesized
cccaaagtctgagaaaaatcat

SEQ ID NO: 12587 - DNA, 22 bp, Artificial Sequence
  chemically synthesized
ccaaagtctgagaaaaatcata

SEQ ID NO: 12588 - DNA, 22 bp, Artificial Sequence
  chemically synthesized
agaaaaatcatatcttaacagt

SEQ ID NO: 12589 - DNA, 22 bp, Artificial Sequence
  chemically synthesized
aacagtatcttttttttttttg

SEQ ID NO: 12590 - DNA, 22 bp, Artificial Sequence
  chemically synthesized
acagtatcttttttttttttga

SEQ ID NO: 12591 - DNA, 22 bp, Artificial Sequence
  chemically synthesized
ttttttttttgatcctttgtac

SEQ ID NO: 12592 - DNA, 22 bp, Artificial Sequence
  chemically synthesized
tttttttttgatcctttgtaca

SEQ ID NO: 12593 - DNA, 22 bp, Artificial Sequence
  chemically synthesized
ttttttttgatcctttgtacaa

SEQ ID NO: 12594 - DNA, 22 bp, Artificial Sequence
  chemically synthesized
tttttttgatcctttgtacaaa

SEQ ID NO: 12595 - DNA, 22 bp, Artificial Sequence
  chemically synthesized
ttttttgatcctttgtacaaaa

SEQ ID NO: 12596 - DNA, 22 bp, Artificial Sequence
  chemically synthesized
tttttgatcctttgtacaaaag

SEQ ID NO: 12597 - DNA, 22 bp, Artificial Sequence
  chemically synthesized
ttttgatcctttgtacaaaagt

SEQ ID NO: 12598 - DNA, 22 bp, Artificial Sequence
  chemically synthesized
tttgatcctttgtacaaaagta

SEQ ID NO: 12599 - DNA, 22 bp, Artificial Sequence
  chemically synthesized
ttgatcctttgtacaaaagtag

SEQ ID NO: 12600 - DNA, 22 bp, Artificial Sequence
  chemically synthesized
tgatcctttgtacaaaagtaga

SEQ ID NO: 12601 - DNA, 22 bp, Artificial Sequence
  chemically synthesized
gatcctttgtacaaaagtagaa

SEQ ID NO: 12602 - DNA, 22 bp, Artificial Sequence
  chemically synthesized
atcctttgtacaaaagtagaag

SEQ ID NO: 12603 - DNA, 22 bp, Artificial Sequence
  chemically synthesized
tgtacaaaagtagaagtaatgc

SEQ ID NO: 12604 - DNA, 22 bp, Artificial Sequence
  chemically synthesized
gtacaaaagtagaagtaatgcc

SEQ ID NO: 12605 - DNA, 22 bp, Artificial Sequence
  chemically synthesized
tacaaaagtagaagtaatgcca

SEQ ID NO: 12606 - DNA, 22 bp, Artificial Sequence
  chemically synthesized
cgtacccttgttgtgaacaact

SEQ ID NO: 12607 - DNA, 22 bp, Artificial Sequence
  chemically synthesized
gttgtgaacaactggtgcatgg

SEQ ID NO: 12608 - DNA, 22 bp, Artificial Sequence
  chemically synthesized
ttgtgaacaactggtgcatggc

SEQ ID NO: 12609 - DNA, 22 bp, Artificial Sequence
  chemically synthesized
tgaacaactggtgcatggcaac

SEQ ID NO: 12610 - DNA, 22 bp, Artificial Sequence
  chemically synthesized
gtgcatggcaactgtttgaata

SEQ ID NO: 12611 - DNA, 22 bp, Artificial Sequence
  chemically synthesized
tttgaatagaaatttaccaact

SEQ ID NO: 12612 - DNA, 22 bp, Artificial Sequence
  chemically synthesized
gaatagaaatttaccaactgcc

SEQ ID NO: 12613 - DNA, 22 bp, Artificial Sequence
  chemically synthesized
aatagaaatttaccaactgcca

SEQ ID NO: 12614 - DNA, 22 bp, Artificial Sequence
  chemically synthesized
accaactgccacaaccaggcaa

SEQ ID NO: 12615 - DNA, 22 bp, Artificial Sequence
  chemically synthesized
ccaactgccacaaccaggcaac

SEQ ID NO: 12616 - DNA, 22 bp, Artificial Sequence
  chemically synthesized
ccacaaccaggcaactactctc

SEQ ID NO: 12617 - DNA, 22 bp, Artificial Sequence
  chemically synthesized
ctctcccagagcctaacaatct

SEQ ID NO: 12618 - DNA, 22 bp, Artificial Sequence
  chemically synthesized
tcccagagcctaacaatctcga

SEQ ID NO: 12619 - DNA, 22 bp, Artificial Sequence
  chemically synthesized
ccagagcctaacaatctcgatt

SEQ ID NO: 12620 - DNA, 22 bp, Artificial Sequence
  chemically synthesized
acaatctcgattgcatctgaaa

SEQ ID NO: 12621 - DNA, 22 bp, Artificial Sequence
  chemically synthesized
gattgcatctgaaagggccacc

SEQ ID NO: 12622 - DNA, 22 bp, Artificial Sequence
  chemically synthesized
catctgaaagggccacccctcc

SEQ ID NO: 12623 - DNA, 22 bp, Artificial Sequence
  chemically synthesized
aaagggccacccctcctgggaa

SEQ ID NO: 12624 - DNA, 22 bp, Artificial Sequence
  chemically synthesized
ctgggaaagtgcaggacctccc

SEQ ID NO: 12625 - DNA, 22 bp, Artificial Sequence
  chemically synthesized
ggaaagtgcaggacctccctcc

SEQ ID NO: 12626 - DNA, 22 bp, Artificial Sequence
  chemically synthesized
cctcctgtttctgaatacaaag

SEQ ID NO: 12627 - DNA, 22 bp, Artificial Sequence
  chemically synthesized
ctgtttctgaatacaaagcctg

SEQ ID NO: 12628 - DNA, 22 bp, Artificial Sequence
  chemically synthesized
tttctgaatacaaagcctggtg

SEQ ID NO: 12629 - DNA, 22 bp, Artificial Sequence
  chemically synthesized
ctgaatacaaagcctggtggtg

SEQ ID NO: 12630 - DNA, 22 bp, Artificial Sequence
  chemically synthesized
tgaatacaaagcctggtggtgt

SEQ ID NO: 12631 - DNA, 22 bp, Artificial Sequence
  chemically synthesized
aatacaaagcctggtggtgttc

SEQ ID NO: 12632 - DNA, 22 bp, Artificial Sequence
  chemically synthesized
gtggtgttcaacgcggccagat

SEQ ID NO: 12633 - DNA, 22 bp, Artificial Sequence
  chemically synthesized
aacgcggccagatagacccaat

SEQ ID NO: 12634 - DNA, 22 bp, Artificial Sequence
  chemically synthesized
tgcacttctttagacaactgat

SEQ ID NO: 12635 - DNA, 22 bp, Artificial Sequence
  chemically synthesized
ctttagacaactgattaccatc

SEQ ID NO: 12636 - DNA, 22 bp, Artificial Sequence
  chemically synthesized
tttagacaactgattaccatca

SEQ ID NO: 12637 - DNA, 22 bp, Artificial Sequence
  chemically synthesized
tagacaactgattaccatcagt

SEQ ID NO: 12638 - DNA, 22 bp, Artificial Sequence
  chemically synthesized
agacaactgattaccatcagtc

SEQ ID NO: 12639 - DNA, 22 bp, Artificial Sequence
  chemically synthesized
gacaactgattaccatcagtca

SEQ ID NO: 12640 - DNA, 22 bp, Artificial Sequence
  chemically synthesized
attaccatcagtcaagtgatgc

SEQ ID NO: 12641 - DNA, 22 bp, Artificial Sequence
  chemically synthesized
ccatcagtcaagtgatgcccaa

SEQ ID NO: 12642 - DNA, 22 bp, Artificial Sequence
  chemically synthesized
cctttaagcaagtctgtgtcat

SEQ ID NO: 12643 - DNA, 22 bp, Artificial Sequence
  chemically synthesized
ctttaagcaagtctgtgtcatc

SEQ ID NO: 12644 - DNA, 22 bp, Artificial Sequence
  chemically synthesized
taagcaagtctgtgtcatctcg

SEQ ID NO: 12645 - DNA, 22 bp, Artificial Sequence
  chemically synthesized
aagcaagtctgtgtcatctcgg

SEQ ID NO: 12646 - DNA, 22 bp, Artificial Sequence
  chemically synthesized
agcaagtctgtgtcatctcgga

SEQ ID NO: 12647 - DNA, 22 bp, Artificial Sequence
  chemically synthesized
tgtcatctcggagctgtgaagc

SEQ ID NO: 12648 - DNA, 22 bp, Artificial Sequence
  chemically synthesized
ggagctgtgaagcaaccaggtc

SEQ ID NO: 12649 - DNA, 22 bp, Artificial Sequence
  chemically synthesized
tgaagcaaccaggtcatgtccc

SEQ ID NO: 12650 - DNA, 22 bp, Artificial Sequence
  chemically synthesized
gcattgctgccctcatatgcaa

SEQ ID NO: 12651 - DNA, 22 bp, Artificial Sequence
  chemically synthesized
cattgctgccctcatatgcaag

SEQ ID NO: 12652 - DNA, 22 bp, Artificial Sequence
  chemically synthesized
ctgccctcatatgcaagtcatc

SEQ ID NO: 12653 - DNA, 22 bp, Artificial Sequence
  chemically synthesized
ccctcatatgcaagtcatcacc

SEQ ID NO: 12654 - DNA, 22 bp, Artificial Sequence
  chemically synthesized
atatgcaagtcatcaccactct

SEQ ID NO: 12655 - DNA, 22 bp, Artificial Sequence
  chemically synthesized
tctagaagcttgggctgaaatt

SEQ ID NO: 12656 - DNA, 22 bp, Artificial Sequence
  chemically synthesized
tagaagcttgggctgaaattgt

SEQ ID NO: 12657 - DNA, 22 bp, Artificial Sequence
  chemically synthesized
gaagcttgggctgaaattgtgc

SEQ ID NO: 12658 - DNA, 22 bp, Artificial Sequence
  chemically synthesized
gggctgaaattgtgcaggcgtc

SEQ ID NO: 12659 - DNA, 22 bp, Artificial Sequence
  chemically synthesized
ggctgaaattgtgcaggcgtct

SEQ ID NO: 12660 - DNA, 22 bp, Artificial Sequence
  chemically synthesized
aaattgtgcaggcgtctccaca

SEQ ID NO: 12661 - DNA, 22 bp, Artificial Sequence
  chemically synthesized
tgcaggcgtctccacaccccca

SEQ ID NO: 12662 - DNA, 22 bp, Artificial Sequence
  chemically synthesized
cacacccccatctcatcccgca

SEQ ID NO: 12663 - DNA, 22 bp, Artificial Sequence
  chemically synthesized
atcccgcatgatctcctcgccg

SEQ ID NO: 12664 - DNA, 22 bp, Artificial Sequence
  chemically synthesized
ctcgccggcagggaccgtctcg

SEQ ID NO: 12665 - DNA, 22 bp, Artificial Sequence
  chemically synthesized
gccggcagggaccgtctcgggt

SEQ ID NO: 12666 - DNA, 22 bp, Artificial Sequence
  chemically synthesized
gggttcctagcgaaccccgact

SEQ ID NO: 12667 - DNA, 22 bp, Artificial Sequence
  chemically synthesized
ctagcgaaccccgacttggtcc

SEQ ID NO: 12668 - DNA, 22 bp, Artificial Sequence
  chemically synthesized
gcgaaccccgacttggtccgca

SEQ ID NO: 12669 - DNA, 22 bp, Artificial Sequence
  chemically synthesized
ggtccgcagaagccgcgcgccg

SEQ ID NO: 12670 - DNA, 22 bp, Artificial Sequence
  chemically synthesized
gtccgcagaagccgcgcgccgc

SEQ ID NO: 12671 - DNA, 22 bp, Artificial Sequence
  chemically synthesized
cggccttcccccaggcgaggcc

SEQ ID NO: 12672 - DNA, 22 bp, Artificial Sequence
  chemically synthesized
cccccaggcgaggcctctcagt

SEQ ID NO: 12673 - DNA, 22 bp, Artificial Sequence
  chemically synthesized
ccccaggcgaggcctctcagta

SEQ ID NO: 12674 - DNA, 22 bp, Artificial Sequence
  chemically synthesized
tcagtacccgaggctccctttt

SEQ ID NO: 12675 - DNA, 22 bp, Artificial Sequence
  chemically synthesized
agtacccgaggctcccttttct

SEQ ID NO: 12676 - DNA, 22 bp, Artificial Sequence
  chemically synthesized
ccttttctcgagcccgcagcgg

SEQ ID NO: 12677 - DNA, 22 bp, Artificial Sequence
  chemically synthesized
ttctcgagcccgcagcggcagc

SEQ ID NO: 12678 - DNA, 22 bp, Artificial Sequence
  chemically synthesized
tctcgagcccgcagcggcagcg

SEQ ID NO: 12679 - DNA, 22 bp, Artificial Sequence
  chemically synthesized
ctcgagcccgcagcggcagcgc

SEQ ID NO: 12680 - DNA, 22 bp, Artificial Sequence
  chemically synthesized
tcgagcccgcagcggcagcgct

SEQ ID NO: 12681 - DNA, 22 bp, Artificial Sequence
  chemically synthesized
gagcccgcagcggcagcgctcc

SEQ ID NO: 12682 - DNA, 22 bp, Artificial Sequence
  chemically synthesized
ccagcgggtccccgggaaggag

SEQ ID NO: 12683 - DNA, 22 bp, Artificial Sequence
  chemically synthesized
gggtactgagggcgggaaagca

SEQ ID NO: 12684 - DNA, 22 bp, Artificial Sequence
  chemically synthesized
agggcgggaaagcaaggaagag

SEQ ID NO: 12685 - DNA, 22 bp, Artificial Sequence
  chemically synthesized
gtccctgcgccgccgccgccgc

SEQ ID NO: 12686 - DNA, 22 bp, Artificial Sequence
  chemically synthesized
tccctgcgccgccgccgccgcc

SEQ ID NO: 12687 - DNA, 22 bp, Artificial Sequence
  chemically synthesized
cgccgccgccgccgccgccgcc

SEQ ID NO: 12688 - DNA, 22 bp, Artificial Sequence
  chemically synthesized
caccagtcgctagaggcgaaag

SEQ ID NO: 12689 - DNA, 22 bp, Artificial Sequence
  chemically synthesized
gaggcgaaagcccgacacccag

SEQ ID NO: 12690 - DNA, 22 bp, Artificial Sequence
  chemically synthesized
cggtcagagaaatgagagggaa

SEQ ID NO: 12691 - DNA, 22 bp, Artificial Sequence
  chemically synthesized
ggtcagagaaatgagagggaaa

SEQ ID NO: 12692 - DNA, 22 bp, Artificial Sequence
  chemically synthesized
tgaggagagcccccgcttctac

SEQ ID NO: 12693 - DNA, 22 bp, Artificial Sequence
  chemically synthesized
aggagagcccccgcttctaccc

SEQ ID NO: 12694 - DNA, 22 bp, Artificial Sequence
  chemically synthesized
ctacccgcgcctcttcccggca

SEQ ID NO: 12695 - DNA, 22 bp, Artificial Sequence
  chemically synthesized
tacccgcgcctcttcccggcag

SEQ ID NO: 12696 - DNA, 22 bp, Artificial Sequence
  chemically synthesized
cccgcgcctcttcccggcagcc

SEQ ID NO: 12697 - DNA, 22 bp, Artificial Sequence
  chemically synthesized
ttcccggcagccgaaccccaaa

SEQ ID NO: 12698 - DNA, 22 bp, Artificial Sequence
  chemically synthesized
cccggcagccgaaccccaaaca

SEQ ID NO: 12699 - DNA, 22 bp, Artificial Sequence
  chemically synthesized
ccggcagccgaaccccaaacag

SEQ ID NO: 12700 - DNA, 22 bp, Artificial Sequence
  chemically synthesized
ctcactcacccactcgccaccg

SEQ ID NO: 12701 - DNA, 22 bp, Artificial Sequence
  chemically synthesized
actcacccactcgccaccgcct

SEQ ID NO: 12702 - DNA, 22 bp, Artificial Sequence
  chemically synthesized
acccactcgccaccgcctgcgc

SEQ ID NO: 12703 - DNA, 22 bp, Artificial Sequence
  chemically synthesized
gccaccgcctgcgcctccgccg

SEQ ID NO: 12704 - DNA, 22 bp, Artificial Sequence
  chemically synthesized
cgcctccgccgccgcgggcgca

SEQ ID NO: 12705 - DNA, 22 bp, Artificial Sequence
  chemically synthesized
cgccgccgcgggcgcaggcacc

SEQ ID NO: 12706 - DNA, 22 bp, Artificial Sequence
  chemically synthesized
gcgcgcgactcctgagttccag

SEQ ID NO: 12707 - DNA, 22 bp, Artificial Sequence
  chemically synthesized
ctgagttccagagcttgctaca

SEQ ID NO: 12708 - DNA, 22 bp, Artificial Sequence
  chemically synthesized
agttccagagcttgctacaggc

SEQ ID NO: 12709 - DNA, 22 bp, Artificial Sequence
  chemically synthesized
cagagcttgctacaggctgcgg

SEQ ID NO: 12710 - DNA, 22 bp, Artificial Sequence
  chemically synthesized
gctacaggctgcggttgtttcc

SEQ ID NO: 12711 - DNA, 22 bp, Artificial Sequence
  chemically synthesized
ctacaggctgcggttgtttccc

SEQ ID NO: 12712 - DNA, 22 bp, Artificial Sequence
  chemically synthesized
caggctgcggttgtttccctcc

SEQ ID NO: 12713 - DNA, 22 bp, Artificial Sequence
  chemically synthesized
cggttgtttccctccttgtttt

SEQ ID NO: 12714 - DNA, 22 bp, Artificial Sequence
  chemically synthesized
tttccctccttgttttcttctg

SEQ ID NO: 12715 - DNA, 22 bp, Artificial Sequence
  chemically synthesized
ccctccttgttttcttctggtt

SEQ ID NO: 12716 - DNA, 22 bp, Artificial Sequence
  chemically synthesized
cctccttgttttcttctggtta

SEQ ID NO: 12717 - DNA, 22 bp, Artificial Sequence
  chemically synthesized
cttgttttcttctggttaatct

SEQ ID NO: 12718 - DNA, 22 bp, Artificial Sequence
  chemically synthesized
gttttcttctggttaatcttta

SEQ ID NO: 12719 - DNA, 22 bp, Artificial Sequence
  chemically synthesized
ttttcttctggttaatctttat

SEQ ID NO: 12720 - DNA, 22 bp, Artificial Sequence
  chemically synthesized
tcttctggttaatctttatcag

SEQ ID NO: 12721 - DNA, 22 bp, Artificial Sequence
  chemically synthesized
cttctggttaatctttatcagg

SEQ ID NO: 12722 - DNA, 22 bp, Artificial Sequence
  chemically synthesized
ttctggttaatctttatcaggt

SEQ ID NO: 12723 - DNA, 22 bp, Artificial Sequence
  chemically synthesized
ctggttaatctttatcaggtct

SEQ ID NO: 12724 - DNA, 22 bp, Artificial Sequence
  chemically synthesized
tggttaatctttatcaggtctt

SEQ ID NO: 12725 - DNA, 22 bp, Artificial Sequence
  chemically synthesized
gttaatctttatcaggtctttt

SEQ ID NO: 12726 - DNA, 22 bp, Artificial Sequence
  chemically synthesized
atctttatcaggtcttttcttg

SEQ ID NO: 12727 - DNA, 22 bp, Artificial Sequence
  chemically synthesized
tatcaggtcttttcttgttcac

SEQ ID NO: 12728 - DNA, 22 bp, Artificial Sequence
  chemically synthesized
atcaggtcttttcttgttcacc

SEQ ID NO: 12729 - DNA, 22 bp, Artificial Sequence
  chemically synthesized
tcaggtcttttcttgttcaccc

SEQ ID NO: 12730 - DNA, 22 bp, Artificial Sequence
  chemically synthesized
ttcttgttcaccctcagcgagt

SEQ ID NO: 12731 - DNA, 22 bp, Artificial Sequence
  chemically synthesized
tcttgttcaccctcagcgagta

SEQ ID NO: 12732 - DNA, 22 bp, Artificial Sequence
  chemically synthesized
cttgttcaccctcagcgagtac

SEQ ID NO: 12733 - DNA, 22 bp, Artificial Sequence
  chemically synthesized
ttgttcaccctcagcgagtact

SEQ ID NO: 12734 - DNA, 22 bp, Artificial Sequence
  chemically synthesized
gttcaccctcagcgagtactgt

SEQ ID NO: 12735 - DNA, 22 bp, Artificial Sequence
  chemically synthesized
ttcaccctcagcgagtactgtg

SEQ ID NO: 12736 - DNA, 22 bp, Artificial Sequence
  chemically synthesized
accctcagcgagtactgtgaga

SEQ ID NO: 12737 - DNA, 22 bp, Artificial Sequence
  chemically synthesized
agcgagtactgtgagagcaagt

SEQ ID NO: 12738 - DNA, 22 bp, Artificial Sequence
  chemically synthesized
tgagagcaagtagtggggagag

SEQ ID NO: 12739 - DNA, 22 bp, Artificial Sequence
  chemically synthesized
ctaaacccacacctgctcttgc

SEQ ID NO: 12740 - DNA, 22 bp, Artificial Sequence
  chemically synthesized
aacccacacctgctcttgctag

SEQ ID NO: 12741 - DNA, 22 bp, Artificial Sequence
  chemically synthesized
ctcttgctagaccccgccccca

SEQ ID NO: 12742 - DNA, 22 bp, Artificial Sequence
  chemically synthesized
ttgctagaccccgcccccaaaa

SEQ ID NO: 12743 - DNA, 22 bp, Artificial Sequence
  chemically synthesized
gctagaccccgcccccaaaaga

SEQ ID NO: 12744 - DNA, 22 bp, Artificial Sequence
  chemically synthesized
ctagaccccgcccccaaaagag

SEQ ID NO: 12745 - DNA, 22 bp, Artificial Sequence
  chemically synthesized
gaccccgcccccaaaagagaag

SEQ ID NO: 12746 - DNA, 22 bp, Artificial Sequence
  chemically synthesized
acacaccaagcgtcatctttta

SEQ ID NO: 12747 - DNA, 22 bp, Artificial Sequence
  chemically synthesized
ttacgtgggcggaacttgtcgc

SEQ ID NO: 12748 - DNA, 22 bp, Artificial Sequence
  chemically synthesized
tacgtgggcggaacttgtcgct

SEQ ID NO: 12749 - DNA, 22 bp, Artificial Sequence
  chemically synthesized
acgtgggcggaacttgtcgctg

SEQ ID NO: 12750 - DNA, 22 bp, Artificial Sequence
  chemically synthesized
cgtgggcggaacttgtcgctgt

SEQ ID NO: 12751 - DNA, 22 bp, Artificial Sequence
  chemically synthesized
gtcgctgtttgacgcacctctc

SEQ ID NO: 12752 - DNA, 22 bp, Artificial Sequence
  chemically synthesized
tcgctgtttgacgcacctctct

SEQ ID NO: 12753 - DNA, 22 bp, Artificial Sequence
  chemically synthesized
tttgacgcacctctctttccta

SEQ ID NO: 12754 - DNA, 22 bp, Artificial Sequence
  chemically synthesized
gacgcacctctctttcctagcg

SEQ ID NO: 12755 - DNA, 22 bp, Artificial Sequence
  chemically synthesized
acgcacctctctttcctagcgg

SEQ ID NO: 12756 - DNA, 22 bp, Artificial Sequence
  chemically synthesized
tctttcctagcgggacaccgta

SEQ ID NO: 12757 - DNA, 22 bp, Artificial Sequence
  chemically synthesized
tttcctagcgggacaccgtagg

SEQ ID NO: 12758 - DNA, 22 bp, Artificial Sequence
  chemically synthesized
tcctagcgggacaccgtaggtt

SEQ ID NO: 12759 - DNA, 22 bp, Artificial Sequence
  chemically synthesized
cctagcgggacaccgtaggtta

SEQ ID NO: 12760 - DNA, 22 bp, Artificial Sequence
  chemically synthesized
ctagcgggacaccgtaggttac

SEQ ID NO: 12761 - DNA, 22 bp, Artificial Sequence
  chemically synthesized
gcgggacaccgtaggttacgtc

SEQ ID NO: 12762 - DNA, 22 bp, Artificial Sequence
  chemically synthesized
cgtctgtctgttttctatgtgc

SEQ ID NO: 12763 - DNA, 22 bp, Artificial Sequence
  chemically synthesized
tctgttttctatgtgcgatgac

SEQ ID NO: 12764 - DNA, 22 bp, Artificial Sequence
  chemically synthesized
ttttctatgtgcgatgacgttt

SEQ ID NO: 12765 - DNA, 22 bp, Artificial Sequence
  chemically synthesized
tctatgtgcgatgacgttttct

SEQ ID NO: 12766 - DNA, 22 bp, Artificial Sequence
  chemically synthesized
ctatgtgcgatgacgttttctc

SEQ ID NO: 12767 - DNA, 22 bp, Artificial Sequence
  chemically synthesized
tatgtgcgatgacgttttctca

SEQ ID NO: 12768 - DNA, 22 bp, Artificial Sequence
  chemically synthesized
tgtgcgatgacgttttctcacg

SEQ ID NO: 12769 - DNA, 22 bp, Artificial Sequence
  chemically synthesized
tctcacgaggctagcgaaatgg

SEQ ID NO: 12770 - DNA, 22 bp, Artificial Sequence
  chemically synthesized
ctcacgaggctagcgaaatggg

SEQ ID NO: 12771 - DNA, 22 bp, Artificial Sequence
  chemically synthesized
tcacgaggctagcgaaatgggg

SEQ ID NO: 12772 - DNA, 22 bp, Artificial Sequence
  chemically synthesized
acgaggctagcgaaatggggcg

SEQ ID NO: 12773 - DNA, 22 bp, Artificial Sequence
  chemically synthesized
gcgaaatggggcggggcaactt

SEQ ID NO: 12774 - DNA, 22 bp, Artificial Sequence
  chemically synthesized
gtcctgttcttttatcttaaga

SEQ ID NO: 12775 - DNA, 22 bp, Artificial Sequence
  chemically synthesized
tcctgttcttttatcttaagac

SEQ ID NO: 12776 - DNA, 22 bp, Artificial Sequence
  chemically synthesized
ttcttttatcttaagacccgct

SEQ ID NO: 12777 - DNA, 22 bp, Artificial Sequence
  chemically synthesized
ttttatcttaagacccgctctg

SEQ ID NO: 12778 - DNA, 22 bp, Artificial Sequence
  chemically synthesized
ttatcttaagacccgctctgga

SEQ ID NO: 12779 - DNA, 22 bp, Artificial Sequence
  chemically synthesized
tatcttaagacccgctctggag

SEQ ID NO: 12780 - DNA, 22 bp, Artificial Sequence
  chemically synthesized
atcttaagacccgctctggagg

SEQ ID NO: 12781 - DNA, 22 bp, Artificial Sequence
  chemically synthesized
tcttaagacccgctctggagga

SEQ ID NO: 12782 - DNA, 22 bp, Artificial Sequence
  chemically synthesized
aagacccgctctggaggagcgt

SEQ ID NO: 12783 - DNA, 22 bp, Artificial Sequence
  chemically synthesized
agacccgctctggaggagcgtt

SEQ ID NO: 12784 - DNA, 22 bp, Artificial Sequence
  chemically synthesized
tggaggagcgttggcgcaatag

SEQ ID NO: 12785 - DNA, 22 bp, Artificial Sequence
  chemically synthesized
gaggagcgttggcgcaatagcg

SEQ ID NO: 12786 - DNA, 22 bp, Artificial Sequence
  chemically synthesized
gcgcaatagcgtgtgcgaacct

SEQ ID NO: 12787 - DNA, 22 bp, Artificial Sequence
  chemically synthesized
aataggggaggctgctggatct

SEQ ID NO: 12788 - DNA, 22 bp, Artificial Sequence
  chemically synthesized
ataggggaggctgctggatctg

SEQ ID NO: 12789 - DNA, 22 bp, Artificial Sequence
  chemically synthesized
ctggatctggagaaagtgaaga

SEQ ID NO: 12790 - DNA, 22 bp, Artificial Sequence
  chemically synthesized
gatctggagaaagtgaagacga

SEQ ID NO: 12791 - DNA, 22 bp, Artificial Sequence
  chemically synthesized
gagaaagtgaagacgatttcgt

SEQ ID NO: 12792 - DNA, 22 bp, Artificial Sequence
  chemically synthesized
cgtggttttgaatggttttgtt

SEQ ID NO: 12793 - DNA, 22 bp, Artificial Sequence
  chemically synthesized
gtggttttgaatggttttgttt

SEQ ID NO: 12794 - DNA, 22 bp, Artificial Sequence
  chemically synthesized
tgaatggttttgtttgtgcttg

SEQ ID NO: 12795 - DNA, 22 bp, Artificial Sequence
  chemically synthesized
gaatggttttgtttgtgcttgg

SEQ ID NO: 12796 - DNA, 22 bp, Artificial Sequence
  chemically synthesized
aatggttttgtttgtgcttggt

SEQ ID NO: 12797 - DNA, 22 bp, Artificial Sequence
  chemically synthesized
tgtttgtgcttggtaggcagtg

SEQ ID NO: 12798 - DNA, 22 bp, Artificial Sequence
  chemically synthesized
gtttgtgcttggtaggcagtgg

SEQ ID NO: 12799 - DNA, 22 bp, Artificial Sequence
  chemically synthesized
tttgtgcttggtaggcagtggg

SEQ ID NO: 12800 - DNA, 22 bp, Artificial Sequence
  chemically synthesized
gtgcttggtaggcagtgggcgc

SEQ ID NO: 12801 - DNA, 22 bp, Artificial Sequence
  chemically synthesized
tgcttggtaggcagtgggcgct

SEQ ID NO: 12802 - DNA, 22 bp, Artificial Sequence
  chemically synthesized
ggtaggcagtgggcgctcaaca

SEQ ID NO: 12803 - DNA, 22 bp, Artificial Sequence
  chemically synthesized
gtaggcagtgggcgctcaacac

SEQ ID NO: 12804 - DNA, 22 bp, Artificial Sequence
  chemically synthesized
aacacataattggtggatgaaa

SEQ ID NO: 12805 - DNA, 22 bp, Artificial Sequence
  chemically synthesized
gtggatgaaattttgtttttac

SEQ ID NO: 12806 - DNA, 22 bp, Artificial Sequence
  chemically synthesized
tgtttttaccgtaagacactgt

SEQ ID NO: 12807 - DNA, 22 bp, Artificial Sequence
  chemically synthesized
gtttttaccgtaagacactgtt

SEQ ID NO: 12808 - DNA, 22 bp, Artificial Sequence
  chemically synthesized
tttttaccgtaagacactgtta

SEQ ID NO: 12809 - DNA, 22 bp, Artificial Sequence
  chemically synthesized
ttaccgtaagacactgttaagt

SEQ ID NO: 12810 - DNA, 22 bp, Artificial Sequence
  chemically synthesized
taccgtaagacactgttaagtg

SEQ ID NO: 12811 - DNA, 22 bp, Artificial Sequence
  chemically synthesized
accgtaagacactgttaagtgc

SEQ ID NO: 12812 - DNA, 22 bp, Artificial Sequence
  chemically synthesized
ccgtaagacactgttaagtgca

SEQ ID NO: 12813 - DNA, 22 bp, Artificial Sequence
  chemically synthesized
ttaagtgcattcaaaactccac

SEQ ID NO: 12814 - DNA, 22 bp, Artificial Sequence
  chemically synthesized
agtgcattcaaaactccactgc

SEQ ID NO: 12815 - DNA, 22 bp, Artificial Sequence
  chemically synthesized
aaaactccactgcaaaccctgg

SEQ ID NO: 12816 - DNA, 22 bp, Artificial Sequence
  chemically synthesized
cactgcaaaccctggtagggga

SEQ ID NO: 12817 - DNA, 22 bp, Artificial Sequence
  chemically synthesized
caaaccctggtaggggacagct

SEQ ID NO: 12818 - DNA, 22 bp, Artificial Sequence
  chemically synthesized
gtaggggacagctccggcactg

SEQ ID NO: 12819 - DNA, 22 bp, Artificial Sequence
  chemically synthesized
cggcactgcgggcgggaatccc

SEQ ID NO: 12820 - DNA, 22 bp, Artificial Sequence
  chemically synthesized
cgggcgggaatcccacggtccc

SEQ ID NO: 12821 - DNA, 22 bp, Artificial Sequence
  chemically synthesized
caaagtcatcgcaattttgcct

SEQ ID NO: 12822 - DNA, 22 bp, Artificial Sequence
  chemically synthesized
tgcctttacatgtaagaattct

SEQ ID NO: 12823 - DNA, 22 bp, Artificial Sequence
  chemically synthesized
gcctttacatgtaagaattctc

SEQ ID NO: 12824 - DNA, 22 bp, Artificial Sequence
  chemically synthesized
cctttacatgtaagaattctct

SEQ ID NO: 12825 - DNA, 22 bp, Artificial Sequence
  chemically synthesized
tacatgtaagaattctctcaag

SEQ ID NO: 12826 - DNA, 22 bp, Artificial Sequence
  chemically synthesized
acatgtaagaattctctcaagc

SEQ ID NO: 12827 - DNA, 22 bp, Artificial Sequence
  chemically synthesized
catgtaagaattctctcaagca

SEQ ID NO: 12828 - DNA, 22 bp, Artificial Sequence
  chemically synthesized
tctcaagcatgattttcacact

SEQ ID NO: 12829 - DNA, 22 bp, Artificial Sequence
  chemically synthesized
tcaagcatgattttcacactgg

SEQ ID NO: 12830 - DNA, 22 bp, Artificial Sequence
  chemically synthesized
aagcatgattttcacactgggg

SEQ ID NO: 12831 - DNA, 22 bp, Artificial Sequence
  chemically synthesized
tcacactggggaatgtcatttt

SEQ ID NO: 12832 - DNA, 22 bp, Artificial Sequence
  chemically synthesized
cacactggggaatgtcattttt

SEQ ID NO: 12833 - DNA, 22 bp, Artificial Sequence
  chemically synthesized
acactggggaatgtcatttttg

SEQ ID NO: 12834 - DNA, 22 bp, Artificial Sequence
  chemically synthesized
gggaatgtcatttttgctagtt

SEQ ID NO: 12835 - DNA, 22 bp, Artificial Sequence
  chemically synthesized
ttgctagttgcaatatgtggat

SEQ ID NO: 12836 - DNA, 22 bp, Artificial Sequence
  chemically synthesized
tgctagttgcaatatgtggatg

SEQ ID NO: 12837 - DNA, 22 bp, Artificial Sequence
  chemically synthesized
gctagttgcaatatgtggatga

SEQ ID NO: 12838 - DNA, 22 bp, Artificial Sequence
  chemically synthesized
ctagttgcaatatgtggatgag

SEQ ID NO: 12839 - DNA, 22 bp, Artificial Sequence
  chemically synthesized
gttgcaatatgtggatgagttg

SEQ ID NO: 12840 - DNA, 22 bp, Artificial Sequence
  chemically synthesized
caatatgtggatgagttgtttt

SEQ ID NO: 12841 - DNA, 22 bp, Artificial Sequence
  chemically synthesized
tttttttttaacttttgaaaaa

SEQ ID NO: 12842 - DNA, 22 bp, Artificial Sequence
  chemically synthesized
ttttttaacttttgaaaaacgt

SEQ ID NO: 12843 - DNA, 22 bp, Artificial Sequence
  chemically synthesized
tttttaacttttgaaaaacgta

SEQ ID NO: 12844 - DNA, 22 bp, Artificial Sequence
  chemically synthesized
ttttaacttttgaaaaacgtac

SEQ ID NO: 12845 - DNA, 22 bp, Artificial Sequence
  chemically synthesized
tttaacttttgaaaaacgtacc

SEQ ID NO: 12846 - DNA, 22 bp, Artificial Sequence
  chemically synthesized
ttaacttttgaaaaacgtacca

SEQ ID NO: 12847 - DNA, 22 bp, Artificial Sequence
  chemically synthesized
taacttttgaaaaacgtaccat

SEQ ID NO: 12848 - DNA, 22 bp, Artificial Sequence
  chemically synthesized
aacttttgaaaaacgtaccatt

SEQ ID NO: 12849 - DNA, 22 bp, Artificial Sequence
  chemically synthesized
acttttgaaaaacgtaccattc

SEQ ID NO: 12850 - DNA, 22 bp, Artificial Sequence
  chemically synthesized
ttgaaaaacgtaccattctgtt

SEQ ID NO: 12851 - DNA, 22 bp, Artificial Sequence
  chemically synthesized
tgaaaaacgtaccattctgttt

SEQ ID NO: 12852 - DNA, 22 bp, Artificial Sequence
  chemically synthesized
gaaaaacgtaccattctgtttg

SEQ ID NO: 12853 - DNA, 22 bp, Artificial Sequence
  chemically synthesized
aaaaacgtaccattctgtttga

SEQ ID NO: 12854 - DNA, 22 bp, Artificial Sequence
  chemically synthesized
tgtttgatgtgtaaaaaacaca

SEQ ID NO: 12855 - DNA, 22 bp, Artificial Sequence
  chemically synthesized
tttgatgtgtaaaaaacacaaa

SEQ ID NO: 12856 - DNA, 22 bp, Artificial Sequence
  chemically synthesized
gatgtgtaaaaaacacaaagat

SEQ ID NO: 12857 - DNA, 22 bp, Artificial Sequence
  chemically synthesized
atgtgtaaaaaacacaaagatt

SEQ ID NO: 12858 - DNA, 22 bp, Artificial Sequence
  chemically synthesized
ttgaaaccttgcgtcttttggt

SEQ ID NO: 12859 - DNA, 22 bp, Artificial Sequence
  chemically synthesized
tgaaaccttgcgtcttttggtc

SEQ ID NO: 12860 - DNA, 22 bp, Artificial Sequence
  chemically synthesized
gaaaccttgcgtcttttggtct

SEQ ID NO: 12861 - DNA, 22 bp, Artificial Sequence
  chemically synthesized
aaaccttgcgtcttttggtctg

SEQ ID NO: 12862 - DNA, 22 bp, Artificial Sequence
  chemically synthesized
gcgtcttttggtctgcaggtgt

SEQ ID NO: 12863 - DNA, 22 bp, Artificial Sequence
  chemically synthesized
cgtcttttggtctgcaggtgta

SEQ ID NO: 12864 - DNA, 22 bp, Artificial Sequence
  chemically synthesized
ttggtctgcaggtgtatagatt

SEQ ID NO: 12865 - DNA, 22 bp, Artificial Sequence
  chemically synthesized
tggtctgcaggtgtatagattc

SEQ ID NO: 12866 - DNA, 22 bp, Artificial Sequence
  chemically synthesized
ggtctgcaggtgtatagattcc

SEQ ID NO: 12867 - DNA, 22 bp, Artificial Sequence
  chemically synthesized
gtctgcaggtgtatagattcca

SEQ ID NO: 12868 - DNA, 22 bp, Artificial Sequence
  chemically synthesized
caggtgtatagattccacttac

SEQ ID NO: 12869 - DNA, 22 bp, Artificial Sequence
  chemically synthesized
cacttactacagatgagtagca

SEQ ID NO: 12870 - DNA, 22 bp, Artificial Sequence
  chemically synthesized
actacagatgagtagcatttac

SEQ ID NO: 12871 - DNA, 22 bp, Artificial Sequence
  chemically synthesized
ctacagatgagtagcatttaca

SEQ ID NO: 12872 - DNA, 22 bp, Artificial Sequence
  chemically synthesized
cagatgagtagcatttacacca

SEQ ID NO: 12873 - DNA, 22 bp, Artificial Sequence
  chemically synthesized
acaccactcagatgtgtaaaaa

SEQ ID NO: 12874 - DNA, 22 bp, Artificial Sequence
  chemically synthesized
caccactcagatgtgtaaaaaa

SEQ ID NO: 12875 - DNA, 22 bp, Artificial Sequence
  chemically synthesized
agatgtgtaaaaaaacaaaggt

SEQ ID NO: 12876 - DNA, 22 bp, Artificial Sequence
  chemically synthesized
tttaaactgtgtgccttttgat

SEQ ID NO: 12877 - DNA, 22 bp, Artificial Sequence
  chemically synthesized
ttaaactgtgtgccttttgatc

SEQ ID NO: 12878 - DNA, 22 bp, Artificial Sequence
  chemically synthesized
taaactgtgtgccttttgatct

SEQ ID NO: 12879 - DNA, 22 bp, Artificial Sequence
  chemically synthesized
aaactgtgtgccttttgatctg

SEQ ID NO: 12880 - DNA, 22 bp, Artificial Sequence
  chemically synthesized
aactgtgtgccttttgatctgc

SEQ ID NO: 12881 - DNA, 22 bp, Artificial Sequence
  chemically synthesized
tgtgccttttgatctgcaagtg

SEQ ID NO: 12882 - DNA, 22 bp, Artificial Sequence
  chemically synthesized
ttgatctgcaagtgtgagatgg

SEQ ID NO: 12883 - DNA, 22 bp, Artificial Sequence
  chemically synthesized
tgatctgcaagtgtgagatggc

SEQ ID NO: 12884 - DNA, 22 bp, Artificial Sequence
  chemically synthesized
gatctgcaagtgtgagatggca

SEQ ID NO: 12885 - DNA, 22 bp, Artificial Sequence
  chemically synthesized
atctgcaagtgtgagatggcac

SEQ ID NO: 12886 - DNA, 22 bp, Artificial Sequence
  chemically synthesized
caagtgtgagatggcacttact

SEQ ID NO: 12887 - DNA, 22 bp, Artificial Sequence
  chemically synthesized
actacagtgagtagcatttaat

SEQ ID NO: 12888 - DNA, 22 bp, Artificial Sequence
  chemically synthesized
ctacagtgagtagcatttaatc

SEQ ID NO: 12889 - DNA, 22 bp, Artificial Sequence
  chemically synthesized
cagtgagtagcatttaatcttt

SEQ ID NO: 12890 - DNA, 22 bp, Artificial Sequence
  chemically synthesized
aatctttttcatcactaaaaat

SEQ ID NO: 12891 - DNA, 22 bp, Artificial Sequence
  chemically synthesized
atctttttcatcactaaaaatc

SEQ ID NO: 12892 - DNA, 22 bp, Artificial Sequence
  chemically synthesized
tttcatcactaaaaatcacaca

SEQ ID NO: 12893 - DNA, 22 bp, Artificial Sequence
  chemically synthesized
ttcatcactaaaaatcacacag

SEQ ID NO: 12894 - DNA, 22 bp, Artificial Sequence
  chemically synthesized
tcatcactaaaaatcacacaga

SEQ ID NO: 12895 - DNA, 22 bp, Artificial Sequence
  chemically synthesized
catcactaaaaatcacacagaa

SEQ ID NO: 12896 - DNA, 22 bp, Artificial Sequence
  chemically synthesized
atcactaaaaatcacacagaac

SEQ ID NO: 12897 - DNA, 22 bp, Artificial Sequence
  chemically synthesized
aaaatcacacagaacgttttaa

SEQ ID NO: 12898 - DNA, 22 bp, Artificial Sequence
  chemically synthesized
taatcattcaccgaggaagaaa

SEQ ID NO: 12899 - DNA, 22 bp, Artificial Sequence
  chemically synthesized
aatcattcaccgaggaagaaag

SEQ ID NO: 12900 - DNA, 22 bp, Artificial Sequence
  chemically synthesized
atcattcaccgaggaagaaagg

SEQ ID NO: 12901 - DNA, 22 bp, Artificial Sequence
  chemically synthesized
accgaggaagaaagggaggaat

SEQ ID NO: 12902 - DNA, 22 bp, Artificial Sequence
  chemically synthesized
tcaacgtctacaccttctgcag

SEQ ID NO: 12903 - DNA, 22 bp, Artificial Sequence
  chemically synthesized
aacgtctacaccttctgcagaa

SEQ ID NO: 12904 - DNA, 22 bp, Artificial Sequence
  chemically synthesized
caccttctgcagaaacagaccc

SEQ ID NO: 12905 - DNA, 22 bp, Artificial Sequence
  chemically synthesized
ctgcagaaacagacccttttcc

SEQ ID NO: 12906 - DNA, 22 bp, Artificial Sequence
  chemically synthesized
tgcagaaacagacccttttcct

SEQ ID NO: 12907 - DNA, 22 bp, Artificial Sequence
  chemically synthesized
cagaaacagacccttttcctac

SEQ ID NO: 12908 - DNA, 22 bp, Artificial Sequence
  chemically synthesized
ttcctactgttctatgctttgt

SEQ ID NO: 12909 - DNA, 22 bp, Artificial Sequence
  chemically synthesized
tcctactgttctatgctttgtg

SEQ ID NO: 12910 - DNA, 22 bp, Artificial Sequence
  chemically synthesized
cctactgttctatgctttgtga

SEQ ID NO: 12911 - DNA, 22 bp, Artificial Sequence
  chemically synthesized
ctactgttctatgctttgtgaa

SEQ ID NO: 12912 - DNA, 22 bp, Artificial Sequence
  chemically synthesized
ctgttctatgctttgtgaaagt

SEQ ID NO: 12913 - DNA, 22 bp, Artificial Sequence
  chemically synthesized
ttctatgctttgtgaaagttga

SEQ ID NO: 12914 - DNA, 22 bp, Artificial Sequence
  chemically synthesized
tatgctttgtgaaagttgatca

SEQ ID NO: 12915 - DNA, 22 bp, Artificial Sequence
  chemically synthesized
tgctttgtgaaagttgatcata

SEQ ID NO: 12916 - DNA, 22 bp, Artificial Sequence
  chemically synthesized
tgtgaaagttgatcatacaaat

SEQ ID NO: 12917 - DNA, 22 bp, Artificial Sequence
  chemically synthesized
gtgaaagttgatcatacaaatt

SEQ ID NO: 12918 - DNA, 22 bp, Artificial Sequence
  chemically synthesized
tgaaagttgatcatacaaattg

SEQ ID NO: 12919 - DNA, 22 bp, Artificial Sequence
  chemically synthesized
atcatacaaattgggtcattct

SEQ ID NO: 12920 - DNA, 22 bp, Artificial Sequence
  chemically synthesized
ggtcattctttttatacccaac

SEQ ID NO: 12921 - DNA, 22 bp, Artificial Sequence
  chemically synthesized
tttttatacccaactaaaatag

SEQ ID NO: 12922 - DNA, 22 bp, Artificial Sequence
  chemically synthesized
tttatacccaactaaaatagtg

SEQ ID NO: 12923 - DNA, 22 bp, Artificial Sequence
  chemically synthesized
ttatacccaactaaaatagtgg

SEQ ID NO: 12924 - DNA, 22 bp, Artificial Sequence
  chemically synthesized
tatacccaactaaaatagtggg

SEQ ID NO: 12925 - DNA, 22 bp, Artificial Sequence
  chemically synthesized
atacccaactaaaatagtgggg

SEQ ID NO: 12926 - DNA, 22 bp, Artificial Sequence
  chemically synthesized
tacccaactaaaatagtggggg

SEQ ID NO: 12927 - DNA, 22 bp, Artificial Sequence
  chemically synthesized
aaatagtgggggtagggggtag

SEQ ID NO: 12928 - DNA, 22 bp, Artificial Sequence
  chemically synthesized
aggacaaatgacactgctccca

SEQ ID NO: 12929 - DNA, 22 bp, Artificial Sequence
  chemically synthesized
ggacaaatgacactgctcccac

SEQ ID NO: 12930 - DNA, 22 bp, Artificial Sequence
  chemically synthesized
ctcccacagtgtaattctctcc

SEQ ID NO: 12931 - DNA, 22 bp, Artificial Sequence
  chemically synthesized
ccacagtgtaattctctccaag

SEQ ID NO: 12932 - DNA, 22 bp, Artificial Sequence
  chemically synthesized
tctccaagtccagctgctgcaa

SEQ ID NO: 12933 - DNA, 22 bp, Artificial Sequence
  chemically synthesized
tccaagtccagctgctgcaact

SEQ ID NO: 12934 - DNA, 22 bp, Artificial Sequence
  chemically synthesized
caagtccagctgctgcaactgc

SEQ ID NO: 12935 - DNA, 22 bp, Artificial Sequence
  chemically synthesized
ctgcaactgcccgttgtgacct

SEQ ID NO: 12936 - DNA, 22 bp, Artificial Sequence
  chemically synthesized
caactgcccgttgtgacctgag

SEQ ID NO: 12937 - DNA, 22 bp, Artificial Sequence
  chemically synthesized
cccgttgtgacctgagaccagt

SEQ ID NO: 12938 - DNA, 22 bp, Artificial Sequence
  chemically synthesized
tgacctgagaccagttttatct

SEQ ID NO: 12939 - DNA, 22 bp, Artificial Sequence
  chemically synthesized
agaccagttttatctaatagtt

SEQ ID NO: 12940 - DNA, 22 bp, Artificial Sequence
  chemically synthesized
tatctaatagttgctaaaatga

SEQ ID NO: 12941 - DNA, 22 bp, Artificial Sequence
  chemically synthesized
atctaatagttgctaaaatgac

SEQ ID NO: 12942 - DNA, 22 bp, Artificial Sequence
  chemically synthesized
tctaatagttgctaaaatgacc

SEQ ID NO: 12943 - DNA, 22 bp, Artificial Sequence
  chemically synthesized
atagttgctaaaatgacctgct

SEQ ID NO: 12944 - DNA, 22 bp, Artificial Sequence
  chemically synthesized
ctaaaatgacctgctgcagctc

SEQ ID NO: 12945 - DNA, 22 bp, Artificial Sequence
  chemically synthesized
aaatgacctgctgcagctctaa

SEQ ID NO: 12946 - DNA, 22 bp, Artificial Sequence
  chemically synthesized
ctgcagctctaattttatctac

SEQ ID NO: 12947 - DNA, 22 bp, Artificial Sequence
  chemically synthesized
cagctctaattttatctaccac

SEQ ID NO: 12948 - DNA, 22 bp, Artificial Sequence
  chemically synthesized
taattttatctaccaccatcac

SEQ ID NO: 12949 - DNA, 22 bp, Artificial Sequence
  chemically synthesized
attttatctaccaccatcactc

SEQ ID NO: 12950 - DNA, 22 bp, Artificial Sequence
  chemically synthesized
tatctaccaccatcactcacca

SEQ ID NO: 12951 - DNA, 22 bp, Artificial Sequence
  chemically synthesized
atctaccaccatcactcaccag

SEQ ID NO: 12952 - DNA, 22 bp, Artificial Sequence
  chemically synthesized
tctaccaccatcactcaccagt

SEQ ID NO: 12953 - DNA, 22 bp, Artificial Sequence
  chemically synthesized
ccaccatcactcaccagttgaa

SEQ ID NO: 12954 - DNA, 22 bp, Artificial Sequence
  chemically synthesized
accagttgaaactcaccagctc

SEQ ID NO: 12955 - DNA, 22 bp, Artificial Sequence
  chemically synthesized
aaactcaccagctcctcagatc

SEQ ID NO: 12956 - DNA, 22 bp, Artificial Sequence
  chemically synthesized
accagctcctcagatccttaat

SEQ ID NO: 12957 - DNA, 22 bp, Artificial Sequence
  chemically synthesized
ctcagatccttaatagtgccaa

SEQ ID NO: 12958 - DNA, 22 bp, Artificial Sequence
  chemically synthesized
agatccttaatagtgccaatga

SEQ ID NO: 12959 - DNA, 22 bp, Artificial Sequence
  chemically synthesized
aatagtgccaatgaattttctc

SEQ ID NO: 12960 - DNA, 22 bp, Artificial Sequence
  chemically synthesized
atagtgccaatgaattttctca

SEQ ID NO: 12961 - DNA, 22 bp, Artificial Sequence
  chemically synthesized
tctcaaagagcactatgtaaca

SEQ ID NO: 12962 - DNA, 22 bp, Artificial Sequence
  chemically synthesized
ctcaaagagcactatgtaacat

SEQ ID NO: 12963 - DNA, 22 bp, Artificial Sequence
  chemically synthesized
tcaaagagcactatgtaacatt

SEQ ID NO: 12964 - DNA, 22 bp, Artificial Sequence
  chemically synthesized
aaagagcactatgtaacatttc

SEQ ID NO: 12965 - DNA, 22 bp, Artificial Sequence
  chemically synthesized
tgtaacatttctcttttttaac

SEQ ID NO: 12966 - DNA, 22 bp, Artificial Sequence
  chemically synthesized
ctcttttttaacaaaacctccc

SEQ ID NO: 12967 - DNA, 22 bp, Artificial Sequence
  chemically synthesized
tcttttttaacaaaacctcccc

SEQ ID NO: 12968 - DNA, 22 bp, Artificial Sequence
  chemically synthesized
ttttttaacaaaacctccccct

SEQ ID NO: 12969 - DNA, 22 bp, Artificial Sequence
  chemically synthesized
ttttaacaaaacctcccccttt

SEQ ID NO: 12970 - DNA, 22 bp, Artificial Sequence
  chemically synthesized
tttaacaaaacctccccctttt

SEQ ID NO: 12971 - DNA, 22 bp, Artificial Sequence
  chemically synthesized
ttaacaaaacctcccccttttc

SEQ ID NO: 12972 - DNA, 22 bp, Artificial Sequence
  chemically synthesized
taacaaaacctcccccttttct

SEQ ID NO: 12973 - DNA, 22 bp, Artificial Sequence
  chemically synthesized
aacaaaacctcccccttttctt

SEQ ID NO: 12974 - DNA, 22 bp, Artificial Sequence
  chemically synthesized
acaaaacctcccccttttcttt

SEQ ID NO: 12975 - DNA, 22 bp, Artificial Sequence
  chemically synthesized
ccccttttctttgttgtgtgga

SEQ ID NO: 12976 - DNA, 22 bp, Artificial Sequence
  chemically synthesized
ttctttgttgtgtggatatacc

SEQ ID NO: 12977 - DNA, 22 bp, Artificial Sequence
  chemically synthesized
tctttgttgtgtggatataccg

SEQ ID NO: 12978 - DNA, 22 bp, Artificial Sequence
  chemically synthesized
ctttgttgtgtggatataccga

SEQ ID NO: 12979 - DNA, 22 bp, Artificial Sequence
  chemically synthesized
tttgttgtgtggatataccgaa

SEQ ID NO: 12980 - DNA, 22 bp, Artificial Sequence
  chemically synthesized
tgttgtgtggatataccgaaga

SEQ ID NO: 12981 - DNA, 22 bp, Artificial Sequence
  chemically synthesized
gttgtgtggatataccgaagac

SEQ ID NO: 12982 - DNA, 22 bp, Artificial Sequence
  chemically synthesized
ttgtgtggatataccgaagacc

SEQ ID NO: 12983 - DNA, 22 bp, Artificial Sequence
  chemically synthesized
tgtggatataccgaagaccatc

SEQ ID NO: 12984 - DNA, 22 bp, Artificial Sequence
  chemically synthesized
atctacatgtatgccctaattg

SEQ ID NO: 12985 - DNA, 22 bp, Artificial Sequence
  chemically synthesized
catgtatgccctaattgcaatt

SEQ ID NO: 12986 - DNA, 22 bp, Artificial Sequence
  chemically synthesized
attgcaattctttcttcccaaa

SEQ ID NO: 12987 - DNA, 22 bp, Artificial Sequence
  chemically synthesized
caattctttcttcccaaataaa

SEQ ID NO: 12988 - DNA, 22 bp, Artificial Sequence
  chemically synthesized
tttcttcccaaataaatcactt

SEQ ID NO: 12989 - DNA, 22 bp, Artificial Sequence
  chemically synthesized
tcttcccaaataaatcacttaa

SEQ ID NO: 12990 - DNA, 22 bp, Artificial Sequence
  chemically synthesized
cttcccaaataaatcacttaat

SEQ ID NO: 12991 - DNA, 22 bp, Artificial Sequence
  chemically synthesized
ttcccaaataaatcacttaatt

SEQ ID NO: 12992 - DNA, 22 bp, Artificial Sequence
  chemically synthesized
cccaaataaatcacttaattta

SEQ ID NO: 12993 - DNA, 22 bp, Artificial Sequence
  chemically synthesized
ccaaataaatcacttaatttag

SEQ ID NO: 12994 - DNA, 22 bp, Artificial Sequence
  chemically synthesized
aatttagagattcatctctgta

SEQ ID NO: 12995 - DNA, 22 bp, Artificial Sequence
  chemically synthesized
atttagagattcatctctgtat

SEQ ID NO: 12996 - DNA, 22 bp, Artificial Sequence
  chemically synthesized
agagattcatctctgtattttt

SEQ ID NO: 12997 - DNA, 22 bp, Artificial Sequence
  chemically synthesized
gagattcatctctgtattttta

SEQ ID NO: 12998 - DNA, 22 bp, Artificial Sequence
  chemically synthesized
atctctgtatttttattttgac

SEQ ID NO: 12999 - DNA, 22 bp, Artificial Sequence
  chemically synthesized
tgtatttttattttgactgaca

SEQ ID NO: 13000 - DNA, 22 bp, Artificial Sequence
  chemically synthesized
tatttttattttgactgacagc

SEQ ID NO: 13001 - DNA, 22 bp, Artificial Sequence
  chemically synthesized
ttattttgactgacagcttata

SEQ ID NO: 13002 - DNA, 22 bp, Artificial Sequence
  chemically synthesized
tattttgactgacagcttataa

SEQ ID NO: 13003 - DNA, 22 bp, Artificial Sequence
  chemically synthesized
attttgactgacagcttataac

SEQ ID NO: 13004 - DNA, 22 bp, Artificial Sequence
  chemically synthesized
ttttgactgacagcttataaca

SEQ ID NO: 13005 - DNA, 22 bp, Artificial Sequence
  chemically synthesized
tgactgacagcttataacaagt

SEQ ID NO: 13006 - DNA, 22 bp, Artificial Sequence
  chemically synthesized
gactgacagcttataacaagta

SEQ ID NO: 13007 - DNA, 22 bp, Artificial Sequence
  chemically synthesized
actgacagcttataacaagtag

SEQ ID NO: 13008 - DNA, 22 bp, Artificial Sequence
  chemically synthesized
acagcttataacaagtagctag

SEQ ID NO: 13009 - DNA, 22 bp, Artificial Sequence
  chemically synthesized
ataacaagtagctagcatttac

SEQ ID NO: 13010 - DNA, 22 bp, Artificial Sequence
  chemically synthesized
taacaagtagctagcatttacc

SEQ ID NO: 13011 - DNA, 22 bp, Artificial Sequence
  chemically synthesized
gcatttaccaagtttctacact

SEQ ID NO: 13012 - DNA, 22 bp, Artificial Sequence
  chemically synthesized
accaagtttctacactgagttg

SEQ ID NO: 13013 - DNA, 22 bp, Artificial Sequence
  chemically synthesized
ccaagtttctacactgagttgt

SEQ ID NO: 13014 - DNA, 22 bp, Artificial Sequence
  chemically synthesized
ctacactgagttgtacttcact

SEQ ID NO: 13015 - DNA, 22 bp, Artificial Sequence
  chemically synthesized
tacactgagttgtacttcactt

SEQ ID NO: 13016 - DNA, 22 bp, Artificial Sequence
  chemically synthesized
cactgagttgtacttcacttat

SEQ ID NO: 13017 - DNA, 22 bp, Artificial Sequence
  chemically synthesized
agttgtacttcacttatacgtg

SEQ ID NO: 13018 - DNA, 22 bp, Artificial Sequence
  chemically synthesized
tacttcacttatacgtggaatt

SEQ ID NO: 13019 - DNA, 22 bp, Artificial Sequence
  chemically synthesized
cacttatacgtggaattaaaaa

SEQ ID NO: 13020 - DNA, 22 bp, Artificial Sequence
  chemically synthesized
acttatacgtggaattaaaaaa

SEQ ID NO: 13021 - DNA, 22 bp, Artificial Sequence
  chemically synthesized
atacgtggaattaaaaaacaac

SEQ ID NO: 13022 - DNA, 22 bp, Artificial Sequence
  chemically synthesized
tacgtggaattaaaaaacaact

SEQ ID NO: 13023 - DNA, 22 bp, Artificial Sequence
  chemically synthesized
aaaaacaactgaatttatagaa

SEQ ID NO: 13024 - DNA, 22 bp, Artificial Sequence
  chemically synthesized
aatttatagaaacagagtagac

SEQ ID NO: 13025 - DNA, 22 bp, Artificial Sequence
  chemically synthesized
atagaaacagagtagacccttg

SEQ ID NO: 13026 - DNA, 22 bp, Artificial Sequence
  chemically synthesized
tagaaacagagtagacccttgg

SEQ ID NO: 13027 - DNA, 22 bp, Artificial Sequence
  chemically synthesized
ggttggggggcttggggggaaa

SEQ ID NO: 13028 - DNA, 22 bp, Artificial Sequence
  chemically synthesized
gttggggggcttggggggaaag

SEQ ID NO: 13029 - DNA, 22 bp, Artificial Sequence
  chemically synthesized
gggggcttggggggaaagaaaa

SEQ ID NO: 13030 - DNA, 22 bp, Artificial Sequence
  chemically synthesized
ggggggaaagaaaattgtaggg

SEQ ID NO: 13031 - DNA, 22 bp, Artificial Sequence
  chemically synthesized
gggggaaagaaaattgtagggt

SEQ ID NO: 13032 - DNA, 22 bp, Artificial Sequence
  chemically synthesized
tagggtagggtacaaagttgca

SEQ ID NO: 13033 - DNA, 22 bp, Artificial Sequence
  chemically synthesized
cagttacgtctaatacatctag

SEQ ID NO: 13034 - DNA, 22 bp, Artificial Sequence
  chemically synthesized
cgtctaatacatctagagattt

SEQ ID NO: 13035 - DNA, 22 bp, Artificial Sequence
  chemically synthesized
atacatctagagatttaatgta

SEQ ID NO: 13036 - DNA, 22 bp, Artificial Sequence
  chemically synthesized
gagatttaatgtacaacatgag

SEQ ID NO: 13037 - DNA, 22 bp, Artificial Sequence
  chemically synthesized
aatgtacaacatgaggactagc

SEQ ID NO: 13038 - DNA, 22 bp, Artificial Sequence
  chemically synthesized
atgtacaacatgaggactagcg

SEQ ID NO: 13039 - DNA, 22 bp, Artificial Sequence
  chemically synthesized
gcgttaataattgtgttagtcc

SEQ ID NO: 13040 - DNA, 22 bp, Artificial Sequence
  chemically synthesized
ataattgtgttagtccattctt

SEQ ID NO: 13041 - DNA, 22 bp, Artificial Sequence
  chemically synthesized
tgttagtccattcttacactgc

SEQ ID NO: 13042 - DNA, 22 bp, Artificial Sequence
  chemically synthesized
gtccattcttacactgctataa

SEQ ID NO: 13043 - DNA, 22 bp, Artificial Sequence
  chemically synthesized
ttacactgctataaagaaataa

SEQ ID NO: 13044 - DNA, 22 bp, Artificial Sequence
  chemically synthesized
acactgctataaagaaataact

SEQ ID NO: 13045 - DNA, 22 bp, Artificial Sequence
  chemically synthesized
cactgctataaagaaataactg

SEQ ID NO: 13046 - DNA, 22 bp, Artificial Sequence
  chemically synthesized
ctataaagaaataactgaaact

SEQ ID NO: 13047 - DNA, 22 bp, Artificial Sequence
  chemically synthesized
taaagaaataactgaaactggg

SEQ ID NO: 13048 - DNA, 22 bp, Artificial Sequence
  chemically synthesized
aaactgggtaatttataaagaa

SEQ ID NO: 13049 - DNA, 22 bp, Artificial Sequence
  chemically synthesized
ggtaatttataaagaaaagttt

SEQ ID NO: 13050 - DNA, 22 bp, Artificial Sequence
  chemically synthesized
ataaagaaaagtttaatggctc

SEQ ID NO: 13051 - DNA, 22 bp, Artificial Sequence
  chemically synthesized
taaagaaaagtttaatggctca

SEQ ID NO: 13052 - DNA, 22 bp, Artificial Sequence
  chemically synthesized
aatggctcacagttctgcaggc

SEQ ID NO: 13053 - DNA, 22 bp, Artificial Sequence
  chemically synthesized
atggctcacagttctgcaggct

SEQ ID NO: 13054 - DNA, 22 bp, Artificial Sequence
  chemically synthesized
acagttctgcaggctgtacaag

SEQ ID NO: 13055 - DNA, 22 bp, Artificial Sequence
  chemically synthesized
tgcaggctgtacaagaagcatg

SEQ ID NO: 13056 - DNA, 22 bp, Artificial Sequence
  chemically synthesized
caggctgtacaagaagcatggc

SEQ ID NO: 13057 - DNA, 22 bp, Artificial Sequence
  chemically synthesized
tacaagaagcatggctggatca

SEQ ID NO: 13058 - DNA, 22 bp, Artificial Sequence
  chemically synthesized
gatcagcttctgggcaggccat

SEQ ID NO: 13059 - DNA, 22 bp, Artificial Sequence
  chemically synthesized
ctgggcaggccatagggaactt

SEQ ID NO: 13060 - DNA, 22 bp, Artificial Sequence
  chemically synthesized
tgggcaggccatagggaactta

SEQ ID NO: 13061 - DNA, 22 bp, Artificial Sequence
  chemically synthesized
ggcaggccatagggaacttaaa

SEQ ID NO: 13062 - DNA, 22 bp, Artificial Sequence
  chemically synthesized
aaaatcatgatggaaggcatag

SEQ ID NO: 13063 - DNA, 22 bp, Artificial Sequence
  chemically synthesized
aaatcatgatggaaggcatagg

SEQ ID NO: 13064 - DNA, 22 bp, Artificial Sequence
  chemically synthesized
cacatggcaggaactgggggaa

SEQ ID NO: 13065 - DNA, 22 bp, Artificial Sequence
  chemically synthesized
acatggcaggaactgggggaag

SEQ ID NO: 13066 - DNA, 22 bp, Artificial Sequence
  chemically synthesized
ggggaagagagaaatgggaggt

SEQ ID NO: 13067 - DNA, 22 bp, Artificial Sequence
  chemically synthesized
catacgtttaaacaactagatc

SEQ ID NO: 13068 - DNA, 22 bp, Artificial Sequence
  chemically synthesized
aaacaactagatcttgtcagaa

SEQ ID NO: 13069 - DNA, 22 bp, Artificial Sequence
  chemically synthesized
aacaactagatcttgtcagaac

SEQ ID NO: 13070 - DNA, 22 bp, Artificial Sequence
  chemically synthesized
gatcttgtcagaactcactata

SEQ ID NO: 13071 - DNA, 22 bp, Artificial Sequence
  chemically synthesized
gtcagaactcactatatagtac

SEQ ID NO: 13072 - DNA, 22 bp, Artificial Sequence
  chemically synthesized
tcagaactcactatatagtacc

SEQ ID NO: 13073 - DNA, 22 bp, Artificial Sequence
  chemically synthesized
actatatagtaccaagagggga

SEQ ID NO: 13074 - DNA, 22 bp, Artificial Sequence
  chemically synthesized
tatagtaccaagaggggactgt

SEQ ID NO: 13075 - DNA, 22 bp, Artificial Sequence
  chemically synthesized
tacaaaaccattagaagccacc

SEQ ID NO: 13076 - DNA, 22 bp, Artificial Sequence
  chemically synthesized
gaagccaccccataatccactc

SEQ ID NO: 13077 - DNA, 22 bp, Artificial Sequence
  chemically synthesized
acctcccaccaggcccaacctc

SEQ ID NO: 13078 - DNA, 22 bp, Artificial Sequence
  chemically synthesized
ccaccaggcccaacctccaaca

SEQ ID NO: 13079 - DNA, 22 bp, Artificial Sequence
  chemically synthesized
caacactggggattacagttga

SEQ ID NO: 13080 - DNA, 22 bp, Artificial Sequence
  chemically synthesized
gggattacagttgaacatgaga

SEQ ID NO: 13081 - DNA, 22 bp, Artificial Sequence
  chemically synthesized
cagttgaacatgagatttgggt

SEQ ID NO: 13082 - DNA, 22 bp, Artificial Sequence
  chemically synthesized
aacatgagatttgggtggggac

SEQ ID NO: 13083 - DNA, 22 bp, Artificial Sequence
  chemically synthesized
gggtggggacagagatccaaac

SEQ ID NO: 13084 - DNA, 22 bp, Artificial Sequence
  chemically synthesized
ggtggggacagagatccaaacc

SEQ ID NO: 13085 - DNA, 22 bp, Artificial Sequence
  chemically synthesized
ttccaactctggcccctcccaa

SEQ ID NO: 13086 - DNA, 22 bp, Artificial Sequence
  chemically synthesized
caactctggcccctcccaaatc

SEQ ID NO: 13087 - DNA, 22 bp, Artificial Sequence
  chemically synthesized
tggcccctcccaaatctaatgt

SEQ ID NO: 13088 - DNA, 22 bp, Artificial Sequence
  chemically synthesized
gcccctcccaaatctaatgtcc

SEQ ID NO: 13089 - DNA, 22 bp, Artificial Sequence
  chemically synthesized
ccaaatctaatgtccttctcat

SEQ ID NO: 13090 - DNA, 22 bp, Artificial Sequence
  chemically synthesized
atgtccttctcatattgcaaaa

SEQ ID NO: 13091 - DNA, 22 bp, Artificial Sequence
  chemically synthesized
ctcatattgcaaaatactgtcg

SEQ ID NO: 13092 - DNA, 22 bp, Artificial Sequence
  chemically synthesized
tcatattgcaaaatactgtcgt

SEQ ID NO: 13093 - DNA, 22 bp, Artificial Sequence
  chemically synthesized
atattgcaaaatactgtcgtgc

SEQ ID NO: 13094 - DNA, 22 bp, Artificial Sequence
  chemically synthesized
caaaatactgtcgtgccttacc

SEQ ID NO: 13095 - DNA, 22 bp, Artificial Sequence
  chemically synthesized
tcgtgccttaccaacagttccc

SEQ ID NO: 13096 - DNA, 22 bp, Artificial Sequence
  chemically synthesized
accaacagttccccaaagtctt

SEQ ID NO: 13097 - DNA, 22 bp, Artificial Sequence
  chemically synthesized
ccaacagttccccaaagtctta

SEQ ID NO: 13098 - DNA, 22 bp, Artificial Sequence
  chemically synthesized
cccaaagtcttaactcgatcca

SEQ ID NO: 13099 - DNA, 22 bp, Artificial Sequence
  chemically synthesized
aactcgatccagcattcattca

SEQ ID NO: 13100 - DNA, 22 bp, Artificial Sequence
  chemically synthesized
actcgatccagcattcattcaa

SEQ ID NO: 13101 - DNA, 22 bp, Artificial Sequence
  chemically synthesized
gatccagcattcattcaaaagt

SEQ ID NO: 13102 - DNA, 22 bp, Artificial Sequence
  chemically synthesized
attcaaaagtccaaagtcccaa

SEQ ID NO: 13103 - DNA, 22 bp, Artificial Sequence
  chemically synthesized
aaaagtccaaagtcccaagtct

SEQ ID NO: 13104 - DNA, 22 bp, Artificial Sequence
  chemically synthesized
gggactttggacttttgaatga

SEQ ID NO: 13105 - DNA, 22 bp, Artificial Sequence
  chemically synthesized
ggactttggacttttgaatgaa

SEQ ID NO: 13106 - DNA, 22 bp, Artificial Sequence
  chemically synthesized
tggacttttgaatgaatgctgg

SEQ ID NO: 13107 - DNA, 22 bp, Artificial Sequence
  chemically synthesized
ggacttttgaatgaatgctgga

SEQ ID NO: 13108 - DNA, 22 bp, Artificial Sequence
  chemically synthesized
gacttttgaatgaatgctggat

SEQ ID NO: 13109 - DNA, 22 bp, Artificial Sequence
  chemically synthesized
ttgaatgaatgctggatcgagt

SEQ ID NO: 13110 - DNA, 22 bp, Artificial Sequence
  chemically synthesized
tgaatgaatgctggatcgagtt

SEQ ID NO: 13111 - DNA, 22 bp, Artificial Sequence
  chemically synthesized
gaatgaatgctggatcgagtta

SEQ ID NO: 13112 - DNA, 22 bp, Artificial Sequence
  chemically synthesized
aatgaatgctggatcgagttaa

SEQ ID NO: 13113 - DNA, 22 bp, Artificial Sequence
  chemically synthesized
gatcgagttaagactttgggga

SEQ ID NO: 13114 - DNA, 22 bp, Artificial Sequence
  chemically synthesized
agactttggggaactgttggta

SEQ ID NO: 13115 - DNA, 22 bp, Artificial Sequence
  chemically synthesized
tggggaactgttggtaaggcac

SEQ ID NO: 13116 - DNA, 22 bp, Artificial Sequence
  chemically synthesized
ggggaactgttggtaaggcacg

SEQ ID NO: 13117 - DNA, 22 bp, Artificial Sequence
  chemically synthesized
gggaactgttggtaaggcacga

SEQ ID NO: 13118 - DNA, 22 bp, Artificial Sequence
  chemically synthesized
ttggtaaggcacgacagtattt

SEQ ID NO: 13119 - DNA, 22 bp, Artificial Sequence
  chemically synthesized
gtaaggcacgacagtattttgc

SEQ ID NO: 13120 - DNA, 22 bp, Artificial Sequence
  chemically synthesized
tgcaatatgagaaggacattag

SEQ ID NO: 13121 - DNA, 22 bp, Artificial Sequence
  chemically synthesized
gcaatatgagaaggacattaga

SEQ ID NO: 13122 - DNA, 22 bp, Artificial Sequence
  chemically synthesized
caatatgagaaggacattagat

SEQ ID NO: 13123 - DNA, 22 bp, Artificial Sequence
  chemically synthesized
gatttgggaggggccagagttg

SEQ ID NO: 13124 - DNA, 22 bp, Artificial Sequence
  chemically synthesized
gggaggggccagagttggaata

SEQ ID NO: 13125 - DNA, 22 bp, Artificial Sequence
  chemically synthesized
ggaggggccagagttggaataa

SEQ ID NO: 13126 - DNA, 22 bp, Artificial Sequence
  chemically synthesized
gaataacatggtttggatctct

SEQ ID NO: 13127 - DNA, 22 bp, Artificial Sequence
  chemically synthesized
ggatctctgtccccacccaaat

SEQ ID NO: 13128 - DNA, 22 bp, Artificial Sequence
  chemically synthesized
gatctctgtccccacccaaatc

SEQ ID NO: 13129 - DNA, 22 bp, Artificial Sequence
  chemically synthesized
tgtccccacccaaatctcatgt

SEQ ID NO: 13130 - DNA, 22 bp, Artificial Sequence
  chemically synthesized
tccccacccaaatctcatgttc

SEQ ID NO: 13131 - DNA, 22 bp, Artificial Sequence
  chemically synthesized
atgttcaactgtaatccccagt

SEQ ID NO: 13132 - DNA, 22 bp, Artificial Sequence
  chemically synthesized
aactgtaatccccagtgttgga

SEQ ID NO: 13133 - DNA, 22 bp, Artificial Sequence
  chemically synthesized
taatccccagtgttggaggttg

SEQ ID NO: 13134 - DNA, 22 bp, Artificial Sequence
  chemically synthesized
gaggttgggcctggtgggaggt

SEQ ID NO: 13135 - DNA, 22 bp, Artificial Sequence
  chemically synthesized
ggcctggtgggaggtgagtgga

SEQ ID NO: 13136 - DNA, 22 bp, Artificial Sequence
  chemically synthesized
gtgggaggtgagtggattatgg

SEQ ID NO: 13137 - DNA, 22 bp, Artificial Sequence
  chemically synthesized
tggggtggcttctaatggtttt

SEQ ID NO: 13138 - DNA, 22 bp, Artificial Sequence
  chemically synthesized
ctaatggttttgtacagtcccc

SEQ ID NO: 13139 - DNA, 22 bp, Artificial Sequence
  chemically synthesized
taatggttttgtacagtcccct

SEQ ID NO: 13140 - DNA, 22 bp, Artificial Sequence
  chemically synthesized
atggttttgtacagtcccctct

SEQ ID NO: 13141 - DNA, 22 bp, Artificial Sequence
  chemically synthesized
tgtacagtcccctcttggtact

SEQ ID NO: 13142 - DNA, 22 bp, Artificial Sequence
  chemically synthesized
gtacagtcccctcttggtacta

SEQ ID NO: 13143 - DNA, 22 bp, Artificial Sequence
  chemically synthesized
tacagtcccctcttggtactat

SEQ ID NO: 13144 - DNA, 22 bp, Artificial Sequence
  chemically synthesized
ttggtactatatagtgagttct

SEQ ID NO: 13145 - DNA, 22 bp, Artificial Sequence
  chemically synthesized
ggtactatatagtgagttctga

SEQ ID NO: 13146 - DNA, 22 bp, Artificial Sequence
  chemically synthesized
gtactatatagtgagttctgac

SEQ ID NO: 13147 - DNA, 22 bp, Artificial Sequence
  chemically synthesized
tatagtgagttctgacaagatc

SEQ ID NO: 13148 - DNA, 22 bp, Artificial Sequence
  chemically synthesized
tgacaagatctagttgtttaaa

SEQ ID NO: 13149 - DNA, 22 bp, Artificial Sequence
  chemically synthesized
acaagatctagttgtttaaacg

SEQ ID NO: 13150 - DNA, 22 bp, Artificial Sequence
  chemically synthesized
gttgtttaaacgtatgtagcac

SEQ ID NO: 13151 - DNA, 22 bp, Artificial Sequence
  chemically synthesized
tttaaacgtatgtagcacctcc

SEQ ID NO: 13152 - DNA, 22 bp, Artificial Sequence
  chemically synthesized
aaacgtatgtagcacctcccat

SEQ ID NO: 13153 - DNA, 22 bp, Artificial Sequence
  chemically synthesized
aacgtatgtagcacctcccatt

SEQ ID NO: 13154 - DNA, 22 bp, Artificial Sequence
  chemically synthesized
ccatttctctcttcccccagtt

SEQ ID NO: 13155 - DNA, 22 bp, Artificial Sequence
  chemically synthesized
ctctcttcccccagttcctgcc

SEQ ID NO: 13156 - DNA, 22 bp, Artificial Sequence
  chemically synthesized
tctcttcccccagttcctgcca

SEQ ID NO: 13157 - DNA, 22 bp, Artificial Sequence
  chemically synthesized
tcttcccccagttcctgccatg

SEQ ID NO: 13158 - DNA, 22 bp, Artificial Sequence
  chemically synthesized
ttcccccagttcctgccatgtg

SEQ ID NO: 13159 - DNA, 22 bp, Artificial Sequence
  chemically synthesized
cccccagttcctgccatgtgaa

SEQ ID NO: 13160 - DNA, 22 bp, Artificial Sequence
  chemically synthesized
ccccagttcctgccatgtgaag

SEQ ID NO: 13161 - DNA, 22 bp, Artificial Sequence
  chemically synthesized
ctgccatgtgaagtctggggtc

SEQ ID NO: 13162 - DNA, 22 bp, Artificial Sequence
  chemically synthesized
ccatgtgaagtctggggtctcc

SEQ ID NO: 13163 - DNA, 22 bp, Artificial Sequence
  chemically synthesized
gggtctccctatgccttccatc

SEQ ID NO: 13164 - DNA, 22 bp, Artificial Sequence
  chemically synthesized
cctatgccttccatcatgattt

SEQ ID NO: 13165 - DNA, 22 bp, Artificial Sequence
  chemically synthesized
tgccttccatcatgattttaag

SEQ ID NO: 13166 - DNA, 22 bp, Artificial Sequence
  chemically synthesized
ccatcatgattttaagttccct

SEQ ID NO: 13167 - DNA, 22 bp, Artificial Sequence
  chemically synthesized
catcatgattttaagttcccta

SEQ ID NO: 13168 - DNA, 22 bp, Artificial Sequence
  chemically synthesized
taagttccctatggcctgccca

SEQ ID NO: 13169 - DNA, 22 bp, Artificial Sequence
  chemically synthesized
aagttccctatggcctgcccag

SEQ ID NO: 13170 - DNA, 22 bp, Artificial Sequence
  chemically synthesized
agttccctatggcctgcccaga

SEQ ID NO: 13171 - DNA, 22 bp, Artificial Sequence
  chemically synthesized
cctatggcctgcccagaagctg

SEQ ID NO: 13172 - DNA, 22 bp, Artificial Sequence
  chemically synthesized
tggcctgcccagaagctgatcc

SEQ ID NO: 13173 - DNA, 22 bp, Artificial Sequence
  chemically synthesized
cccagaagctgatccagccatg

SEQ ID NO: 13174 - DNA, 22 bp, Artificial Sequence
  chemically synthesized
atccagccatgcttcttgtaca

SEQ ID NO: 13175 - DNA, 22 bp, Artificial Sequence
  chemically synthesized
cttgtacagcctgcagaactgt

SEQ ID NO: 13176 - DNA, 22 bp, Artificial Sequence
  chemically synthesized
ttgtacagcctgcagaactgtg

SEQ ID NO: 13177 - DNA, 22 bp, Artificial Sequence
  chemically synthesized
gtacagcctgcagaactgtgag

SEQ ID NO: 13178 - DNA, 22 bp, Artificial Sequence
  chemically synthesized
tacagcctgcagaactgtgagc

SEQ ID NO: 13179 - DNA, 22 bp, Artificial Sequence
  chemically synthesized
cagaactgtgagccattaaact

SEQ ID NO: 13180 - DNA, 22 bp, Artificial Sequence
  chemically synthesized
tgagccattaaacttttcttta

SEQ ID NO: 13181 - DNA, 22 bp, Artificial Sequence
  chemically synthesized
aacttttctttataaattaccc

SEQ ID NO: 13182 - DNA, 22 bp, Artificial Sequence
  chemically synthesized
ttctttataaattacccagttt

SEQ ID NO: 13183 - DNA, 22 bp, Artificial Sequence
  chemically synthesized
tctttataaattacccagtttc

SEQ ID NO: 13184 - DNA, 22 bp, Artificial Sequence
  chemically synthesized
ctttataaattacccagtttca

SEQ ID NO: 13185 - DNA, 22 bp, Artificial Sequence
  chemically synthesized
tttataaattacccagtttcag

SEQ ID NO: 13186 - DNA, 22 bp, Artificial Sequence
  chemically synthesized
tataaattacccagtttcagtt

SEQ ID NO: 13187 - DNA, 22 bp, Artificial Sequence
  chemically synthesized
ataaattacccagtttcagtta

SEQ ID NO: 13188 - DNA, 22 bp, Artificial Sequence
  chemically synthesized
taaattacccagtttcagttat

SEQ ID NO: 13189 - DNA, 22 bp, Artificial Sequence
  chemically synthesized
cccagtttcagttatttcttta

SEQ ID NO: 13190 - DNA, 22 bp, Artificial Sequence
  chemically synthesized
cagttatttctttatagcagtg

SEQ ID NO: 13191 - DNA, 22 bp, Artificial Sequence
  chemically synthesized
agttatttctttatagcagtgt

SEQ ID NO: 13192 - DNA, 22 bp, Artificial Sequence
  chemically synthesized
tttctttatagcagtgtaagaa

SEQ ID NO: 13193 - DNA, 22 bp, Artificial Sequence
  chemically synthesized
ctttatagcagtgtaagaatgg

SEQ ID NO: 13194 - DNA, 22 bp, Artificial Sequence
  chemically synthesized
tttatagcagtgtaagaatgga

SEQ ID NO: 13195 - DNA, 22 bp, Artificial Sequence
  chemically synthesized
tatagcagtgtaagaatggact

SEQ ID NO: 13196 - DNA, 22 bp, Artificial Sequence
  chemically synthesized
atagcagtgtaagaatggacta

SEQ ID NO: 13197 - DNA, 22 bp, Artificial Sequence
  chemically synthesized
tagcagtgtaagaatggactaa

SEQ ID NO: 13198 - DNA, 22 bp, Artificial Sequence
  chemically synthesized
acacaattattaacgctagtcc

SEQ ID NO: 13199 - DNA, 22 bp, Artificial Sequence
  chemically synthesized
ttaacgctagtcctcatgttgt

SEQ ID NO: 13200 - DNA, 22 bp, Artificial Sequence
  chemically synthesized
acgctagtcctcatgttgtaca

SEQ ID NO: 13201 - DNA, 22 bp, Artificial Sequence
  chemically synthesized
gtcctcatgttgtacattaaat

SEQ ID NO: 13202 - DNA, 22 bp, Artificial Sequence
  chemically synthesized
atgttgtacattaaatctctag

SEQ ID NO: 13203 - DNA, 22 bp, Artificial Sequence
  chemically synthesized
tacattaaatctctagatgtat

SEQ ID NO: 13204 - DNA, 22 bp, Artificial Sequence
  chemically synthesized
aatctctagatgtattagacgt

SEQ ID NO: 13205 - DNA, 22 bp, Artificial Sequence
  chemically synthesized
tagatgtattagacgtaactgc

SEQ ID NO: 13206 - DNA, 22 bp, Artificial Sequence
  chemically synthesized
gatgtattagacgtaactgcaa

SEQ ID NO: 13207 - DNA, 22 bp, Artificial Sequence
  chemically synthesized
gacgtaactgcaactttgtacc

SEQ ID NO: 13208 - DNA, 22 bp, Artificial Sequence
  chemically synthesized
caactttgtaccctaccctaca

SEQ ID NO: 13209 - DNA, 22 bp, Artificial Sequence
  chemically synthesized
tgtaccctaccctacaattttc

SEQ ID NO: 13210 - DNA, 22 bp, Artificial Sequence
  chemically synthesized
gtaccctaccctacaattttct

SEQ ID NO: 13211 - DNA, 22 bp, Artificial Sequence
  chemically synthesized
taccctaccctacaattttctt

SEQ ID NO: 13212 - DNA, 22 bp, Artificial Sequence
  chemically synthesized
ccctacaattttctttcccccc

SEQ ID NO: 13213 - DNA, 22 bp, Artificial Sequence
  chemically synthesized
caattttctttccccccaagcc

SEQ ID NO: 13214 - DNA, 22 bp, Artificial Sequence
  chemically synthesized
tctttccccccaagccccccaa

SEQ ID NO: 13215 - DNA, 22 bp, Artificial Sequence
  chemically synthesized
ctttccccccaagccccccaac

SEQ ID NO: 13216 - DNA, 22 bp, Artificial Sequence
  chemically synthesized
tttccccccaagccccccaacc

SEQ ID NO: 13217 - DNA, 22 bp, Artificial Sequence
  chemically synthesized
tccccccaagccccccaaccaa

SEQ ID NO: 13218 - DNA, 22 bp, Artificial Sequence
  chemically synthesized
ccccccaagccccccaaccaag

SEQ ID NO: 13219 - DNA, 22 bp, Artificial Sequence
  chemically synthesized
cccccaagccccccaaccaagg

SEQ ID NO: 13220 - DNA, 22 bp, Artificial Sequence
  chemically synthesized
ctctgtttctataaattcagtt

SEQ ID NO: 13221 - DNA, 22 bp, Artificial Sequence
  chemically synthesized
tgtttctataaattcagttgtt

SEQ ID NO: 13222 - DNA, 22 bp, Artificial Sequence
  chemically synthesized
tttctataaattcagttgtttt

SEQ ID NO: 13223 - DNA, 22 bp, Artificial Sequence
  chemically synthesized
ctataaattcagttgtttttta

SEQ ID NO: 13224 - DNA, 22 bp, Artificial Sequence
  chemically synthesized
tataaattcagttgttttttaa

SEQ ID NO: 13225 - DNA, 22 bp, Artificial Sequence
  chemically synthesized
taaattcagttgttttttaatt

SEQ ID NO: 13226 - DNA, 22 bp, Artificial Sequence
  chemically synthesized
agttgttttttaattccacgta

SEQ ID NO: 13227 - DNA, 22 bp, Artificial Sequence
  chemically synthesized
ttttttaattccacgtataagt

SEQ ID NO: 13228 - DNA, 22 bp, Artificial Sequence
  chemically synthesized
tttaattccacgtataagtgaa

SEQ ID NO: 13229 - DNA, 22 bp, Artificial Sequence
  chemically synthesized
ttaattccacgtataagtgaag

SEQ ID NO: 13230 - DNA, 22 bp, Artificial Sequence
  chemically synthesized
taattccacgtataagtgaagt

SEQ ID NO: 13231 - DNA, 22 bp, Artificial Sequence
  chemically synthesized
aattccacgtataagtgaagta

SEQ ID NO: 13232 - DNA, 22 bp, Artificial Sequence
  chemically synthesized
attccacgtataagtgaagtac

SEQ ID NO: 13233 - DNA, 22 bp, Artificial Sequence
  chemically synthesized
cacgtataagtgaagtacaact

SEQ ID NO: 13234 - DNA, 22 bp, Artificial Sequence
  chemically synthesized
agtgtagaaacttggtaaatgc

SEQ ID NO: 13235 - DNA, 22 bp, Artificial Sequence
  chemically synthesized
ggtaaatgctagctacttgtta

SEQ ID NO: 13236 - DNA, 22 bp, Artificial Sequence
  chemically synthesized
gtaaatgctagctacttgttat

SEQ ID NO: 13237 - DNA, 22 bp, Artificial Sequence
  chemically synthesized
gctacttgttataagctgtcag

SEQ ID NO: 13238 - DNA, 22 bp, Artificial Sequence
  chemically synthesized
cttgttataagctgtcagtcaa

SEQ ID NO: 13239 - DNA, 22 bp, Artificial Sequence
  chemically synthesized
gttataagctgtcagtcaaaat

SEQ ID NO: 13240 - DNA, 22 bp, Artificial Sequence
  chemically synthesized
ttataagctgtcagtcaaaata

SEQ ID NO: 13241 - DNA, 22 bp, Artificial Sequence
  chemically synthesized
taagctgtcagtcaaaataaaa

SEQ ID NO: 13242 - DNA, 22 bp, Artificial Sequence
  chemically synthesized
tcagtcaaaataaaaatacaga

SEQ ID NO: 13243 - DNA, 22 bp, Artificial Sequence
  chemically synthesized
taaattaagtgatttatttggg

SEQ ID NO: 13244 - DNA, 22 bp, Artificial Sequence
  chemically synthesized
aattaagtgatttatttgggaa

SEQ ID NO: 13245 - DNA, 22 bp, Artificial Sequence
  chemically synthesized
agtgatttatttgggaagaaag

SEQ ID NO: 13246 - DNA, 22 bp, Artificial Sequence
  chemically synthesized
atttgggaagaaagaattgcaa

SEQ ID NO: 13247 - DNA, 22 bp, Artificial Sequence
  chemically synthesized
tttgggaagaaagaattgcaat

SEQ ID NO: 13248 - DNA, 22 bp, Artificial Sequence
  chemically synthesized
gggaagaaagaattgcaattag

SEQ ID NO: 13249 - DNA, 22 bp, Artificial Sequence
  chemically synthesized
ggaagaaagaattgcaattagg

SEQ ID NO: 13250 - DNA, 22 bp, Artificial Sequence
  chemically synthesized
caattagggcatacatgtagat

SEQ ID NO: 13251 - DNA, 22 bp, Artificial Sequence
  chemically synthesized
gggcatacatgtagatcagatg

SEQ ID NO: 13252 - DNA, 22 bp, Artificial Sequence
  chemically synthesized
cggtatatccacacaacaaaga

SEQ ID NO: 13253 - DNA, 22 bp, Artificial Sequence
  chemically synthesized
ggtatatccacacaacaaagaa

SEQ ID NO: 13254 - DNA, 22 bp, Artificial Sequence
  chemically synthesized
tgttaaaaaagagaaatgttac

SEQ ID NO: 13255 - DNA, 22 bp, Artificial Sequence
  chemically synthesized
gttaaaaaagagaaatgttaca

SEQ ID NO: 13256 - DNA, 22 bp, Artificial Sequence
  chemically synthesized
ttaaaaaagagaaatgttacat

SEQ ID NO: 13257 - DNA, 22 bp, Artificial Sequence
  chemically synthesized
aaaaagagaaatgttacatagt

SEQ ID NO: 13258 - DNA, 22 bp, Artificial Sequence
  chemically synthesized
catagtgctctttgagaaaatt

SEQ ID NO: 13259 - DNA, 22 bp, Artificial Sequence
  chemically synthesized
tttgagaaaattcattggcact

SEQ ID NO: 13260 - DNA, 22 bp, Artificial Sequence
  chemically synthesized
tgagaaaattcattggcactat

SEQ ID NO: 13261 - DNA, 22 bp, Artificial Sequence
  chemically synthesized
gagaaaattcattggcactatt

SEQ ID NO: 13262 - DNA, 22 bp, Artificial Sequence
  chemically synthesized
agaaaattcattggcactatta

SEQ ID NO: 13263 - DNA, 22 bp, Artificial Sequence
  chemically synthesized
attggcactattaaggatctga

SEQ ID NO: 13264 - DNA, 22 bp, Artificial Sequence
  chemically synthesized
gcactattaaggatctgaggag

SEQ ID NO: 13265 - DNA, 22 bp, Artificial Sequence
  chemically synthesized
ttaaggatctgaggagctggtg

SEQ ID NO: 13266 - DNA, 22 bp, Artificial Sequence
  chemically synthesized
aggatctgaggagctggtgagt

SEQ ID NO: 13267 - DNA, 22 bp, Artificial Sequence
  chemically synthesized
aggagctggtgagtttcaactg

SEQ ID NO: 13268 - DNA, 22 bp, Artificial Sequence
  chemically synthesized
gtgagtttcaactggtgagtga

SEQ ID NO: 13269 - DNA, 22 bp, Artificial Sequence
  chemically synthesized
caactggtgagtgatggtggta

SEQ ID NO: 13270 - DNA, 22 bp, Artificial Sequence
  chemically synthesized
aactggtgagtgatggtggtag

SEQ ID NO: 13271 - DNA, 22 bp, Artificial Sequence
  chemically synthesized
gtgagtgatggtggtagataaa

SEQ ID NO: 13272 - DNA, 22 bp, Artificial Sequence
  chemically synthesized
gagctgcagcaggtcattttag

SEQ ID NO: 13273 - DNA, 22 bp, Artificial Sequence
  chemically synthesized
cagcaggtcattttagcaacta

SEQ ID NO: 13274 - DNA, 22 bp, Artificial Sequence
  chemically synthesized
tagcaactattagataaaactg

SEQ ID NO: 13275 - DNA, 22 bp, Artificial Sequence
  chemically synthesized
agcaactattagataaaactgg

SEQ ID NO: 13276 - DNA, 22 bp, Artificial Sequence
  chemically synthesized
gcaactattagataaaactggt

SEQ ID NO: 13277 - DNA, 22 bp, Artificial Sequence
  chemically synthesized
ttagataaaactggtctcaggt

SEQ ID NO: 13278 - DNA, 22 bp, Artificial Sequence
  chemically synthesized
gataaaactggtctcaggtcac

SEQ ID NO: 13279 - DNA, 22 bp, Artificial Sequence
  chemically synthesized
gtctcaggtcacaacgggcagt

SEQ ID NO: 13280 - DNA, 22 bp, Artificial Sequence
  chemically synthesized
aggtcacaacgggcagttgcag

SEQ ID NO: 13281 - DNA, 22 bp, Artificial Sequence
  chemically synthesized
cagcagctggacttggagagaa

SEQ ID NO: 13282 - DNA, 22 bp, Artificial Sequence
  chemically synthesized
gacttggagagaattacactgt

SEQ ID NO: 13283 - DNA, 22 bp, Artificial Sequence
  chemically synthesized
ggagagaattacactgtgggag

SEQ ID NO: 13284 - DNA, 22 bp, Artificial Sequence
  chemically synthesized
gagagaattacactgtgggagc

SEQ ID NO: 13285 - DNA, 22 bp, Artificial Sequence
  chemically synthesized
cactgtgggagcagtgtcattt

SEQ ID NO: 13286 - DNA, 22 bp, Artificial Sequence
  chemically synthesized
tgggagcagtgtcatttgtcct

SEQ ID NO: 13287 - DNA, 22 bp, Artificial Sequence
  chemically synthesized
gtcctaagtgcttttctacccc

SEQ ID NO: 13288 - DNA, 22 bp, Artificial Sequence
  chemically synthesized
tcctaagtgcttttctaccccc

SEQ ID NO: 13289 - DNA, 22 bp, Artificial Sequence
  chemically synthesized
agtgcttttctaccccctaccc

SEQ ID NO: 13290 - DNA, 22 bp, Artificial Sequence
  chemically synthesized
ttctaccccctacccccactat

SEQ ID NO: 13291 - DNA, 22 bp, Artificial Sequence
  chemically synthesized
tctaccccctacccccactatt

SEQ ID NO: 13292 - DNA, 22 bp, Artificial Sequence
  chemically synthesized
ctaccccctacccccactattt

SEQ ID NO: 13293 - DNA, 22 bp, Artificial Sequence
  chemically synthesized
taccccctacccccactatttt

SEQ ID NO: 13294 - DNA, 22 bp, Artificial Sequence
  chemically synthesized
ccccctacccccactattttag

SEQ ID NO: 13295 - DNA, 22 bp, Artificial Sequence
  chemically synthesized
cccccactattttagttgggta

SEQ ID NO: 13296 - DNA, 22 bp, Artificial Sequence
  chemically synthesized
ttttagttgggtataaaaagaa

SEQ ID NO: 13297 - DNA, 22 bp, Artificial Sequence
  chemically synthesized
tagttgggtataaaaagaatga

SEQ ID NO: 13298 - DNA, 22 bp, Artificial Sequence
  chemically synthesized
agttgggtataaaaagaatgac

SEQ ID NO: 13299 - DNA, 22 bp, Artificial Sequence
  chemically synthesized
gttgggtataaaaagaatgacc

SEQ ID NO: 13300 - DNA, 22 bp, Artificial Sequence
  chemically synthesized
ggtataaaaagaatgacccaat

SEQ ID NO: 13301 - DNA, 22 bp, Artificial Sequence
  chemically synthesized
gtatgatcaactttcacaaagc

SEQ ID NO: 13302 - DNA, 22 bp, Artificial Sequence
  chemically synthesized
tatgatcaactttcacaaagca

SEQ ID NO: 13303 - DNA, 22 bp, Artificial Sequence
  chemically synthesized
tcacaaagcatagaacagtagg

SEQ ID NO: 13304 - DNA, 22 bp, Artificial Sequence
  chemically synthesized
cacaaagcatagaacagtagga

SEQ ID NO: 13305 - DNA, 22 bp, Artificial Sequence
  chemically synthesized
acaaagcatagaacagtaggaa

SEQ ID NO: 13306 - DNA, 22 bp, Artificial Sequence
  chemically synthesized
tttctgcagaaggtgtagacgt

SEQ ID NO: 13307 - DNA, 22 bp, Artificial Sequence
  chemically synthesized
ctgcagaaggtgtagacgttga

SEQ ID NO: 13308 - DNA, 22 bp, Artificial Sequence
  chemically synthesized
tgcagaaggtgtagacgttgag

SEQ ID NO: 13309 - DNA, 22 bp, Artificial Sequence
  chemically synthesized
cagaaggtgtagacgttgagag

SEQ ID NO: 13310 - DNA, 22 bp, Artificial Sequence
  chemically synthesized
agagccattttgtgtatttatt

SEQ ID NO: 13311 - DNA, 22 bp, Artificial Sequence
  chemically synthesized
tgtgtatttattcctccctttc

SEQ ID NO: 13312 - DNA, 22 bp, Artificial Sequence
  chemically synthesized
gtgtatttattcctccctttct

SEQ ID NO: 13313 - DNA, 22 bp, Artificial Sequence
  chemically synthesized
tgtatttattcctccctttctt

SEQ ID NO: 13314 - DNA, 22 bp, Artificial Sequence
  chemically synthesized
attcctccctttcttcctcggt

SEQ ID NO: 13315 - DNA, 22 bp, Artificial Sequence
  chemically synthesized
ttcctccctttcttcctcggtg

SEQ ID NO: 13316 - DNA, 22 bp, Artificial Sequence
  chemically synthesized
ctccctttcttcctcggtgaat

SEQ ID NO: 13317 - DNA, 22 bp, Artificial Sequence
  chemically synthesized
cctttcttcctcggtgaatgat

SEQ ID NO: 13318 - DNA, 22 bp, Artificial Sequence
  chemically synthesized
tcttcctcggtgaatgattaaa

SEQ ID NO: 13319 - DNA, 22 bp, Artificial Sequence
  chemically synthesized
cttcctcggtgaatgattaaaa

SEQ ID NO: 13320 - DNA, 22 bp, Artificial Sequence
  chemically synthesized
ttcctcggtgaatgattaaaac

SEQ ID NO: 13321 - DNA, 22 bp, Artificial Sequence
  chemically synthesized
cctcggtgaatgattaaaacgt

SEQ ID NO: 13322 - DNA, 22 bp, Artificial Sequence
  chemically synthesized
ctcggtgaatgattaaaacgtt

SEQ ID NO: 13323 - DNA, 22 bp, Artificial Sequence
  chemically synthesized
ggtgaatgattaaaacgttctg

SEQ ID NO: 13324 - DNA, 22 bp, Artificial Sequence
  chemically synthesized
aaacgttctgtgtgatttttag

SEQ ID NO: 13325 - DNA, 22 bp, Artificial Sequence
  chemically synthesized
tgtgtgatttttagtgatgaaa

SEQ ID NO: 13326 - DNA, 22 bp, Artificial Sequence
  chemically synthesized
tgtgatttttagtgatgaaaaa

SEQ ID NO: 13327 - DNA, 22 bp, Artificial Sequence
  chemically synthesized
ttagtgatgaaaaagattaaat

SEQ ID NO: 13328 - DNA, 22 bp, Artificial Sequence
  chemically synthesized
tagtgatgaaaaagattaaatg

SEQ ID NO: 13329 - DNA, 22 bp, Artificial Sequence
  chemically synthesized
agtgatgaaaaagattaaatgc

SEQ ID NO: 13330 - DNA, 22 bp, Artificial Sequence
  chemically synthesized
gtgatgaaaaagattaaatgct

SEQ ID NO: 13331 - DNA, 22 bp, Artificial Sequence
  chemically synthesized
aatgctactcactgtagtaagt

SEQ ID NO: 13332 - DNA, 22 bp, Artificial Sequence
  chemically synthesized
ctcactgtagtaagtgccatct

SEQ ID NO: 13333 - DNA, 22 bp, Artificial Sequence
  chemically synthesized
actgtagtaagtgccatctcac

SEQ ID NO: 13334 - DNA, 22 bp, Artificial Sequence
  chemically synthesized
tagtaagtgccatctcacactt

SEQ ID NO: 13335 - DNA, 22 bp, Artificial Sequence
  chemically synthesized
acacttgcagatcaaaaggcac

SEQ ID NO: 13336 - DNA, 22 bp, Artificial Sequence
  chemically synthesized
gcagatcaaaaggcacacagtt

SEQ ID NO: 13337 - DNA, 22 bp, Artificial Sequence
  chemically synthesized
cagatcaaaaggcacacagttt

SEQ ID NO: 13338 - DNA, 22 bp, Artificial Sequence
  chemically synthesized
aaaaaacctttgtttttttaca

SEQ ID NO: 13339 - DNA, 22 bp, Artificial Sequence
  chemically synthesized
aaaaacctttgtttttttacac

SEQ ID NO: 13340 - DNA, 22 bp, Artificial Sequence
  chemically synthesized
tgtttttttacacatctgagtg

SEQ ID NO: 13341 - DNA, 22 bp, Artificial Sequence
  chemically synthesized
gtttttttacacatctgagtgg

SEQ ID NO: 13342 - DNA, 22 bp, Artificial Sequence
  chemically synthesized
tttttttacacatctgagtggt

SEQ ID NO: 13343 - DNA, 22 bp, Artificial Sequence
  chemically synthesized
ttttacacatctgagtggtgta

SEQ ID NO: 13344 - DNA, 22 bp, Artificial Sequence
  chemically synthesized
tttacacatctgagtggtgtaa

SEQ ID NO: 13345 - DNA, 22 bp, Artificial Sequence
  chemically synthesized
ttacacatctgagtggtgtaaa

SEQ ID NO: 13346 - DNA, 22 bp, Artificial Sequence
  chemically synthesized
tacacatctgagtggtgtaaat

SEQ ID NO: 13347 - DNA, 22 bp, Artificial Sequence
  chemically synthesized
acacatctgagtggtgtaaatg

SEQ ID NO: 13348 - DNA, 22 bp, Artificial Sequence
  chemically synthesized
cacatctgagtggtgtaaatgc

SEQ ID NO: 13349 - DNA, 22 bp, Artificial Sequence
  chemically synthesized
agtggtgtaaatgctactcatc

SEQ ID NO: 13350 - DNA, 22 bp, Artificial Sequence
  chemically synthesized
ctcatctgtagtaagtggaatc

SEQ ID NO: 13351 - DNA, 22 bp, Artificial Sequence
  chemically synthesized
atctgtagtaagtggaatctat

SEQ ID NO: 13352 - DNA, 22 bp, Artificial Sequence
  chemically synthesized
tagtaagtggaatctatacacc

SEQ ID NO: 13353 - DNA, 22 bp, Artificial Sequence
  chemically synthesized
tacacctgcagaccaaaagacg

SEQ ID NO: 13354 - DNA, 22 bp, Artificial Sequence
  chemically synthesized
cagaccaaaagacgcaaggttt

SEQ ID NO: 13355 - DNA, 22 bp, Artificial Sequence
  chemically synthesized
caaaaatctttgtgttttttac

SEQ ID NO: 13356 - DNA, 22 bp, Artificial Sequence
  chemically synthesized
aaaaatctttgtgttttttaca

SEQ ID NO: 13357 - DNA, 22 bp, Artificial Sequence
  chemically synthesized
tgtgttttttacacatcaaaca

SEQ ID NO: 13358 - DNA, 22 bp, Artificial Sequence
  chemically synthesized
gtgttttttacacatcaaacag

SEQ ID NO: 13359 - DNA, 22 bp, Artificial Sequence
  chemically synthesized
tgttttttacacatcaaacaga

SEQ ID NO: 13360 - DNA, 22 bp, Artificial Sequence
  chemically synthesized
tttacacatcaaacagaatggt

SEQ ID NO: 13361 - DNA, 22 bp, Artificial Sequence
  chemically synthesized
ttacacatcaaacagaatggta

SEQ ID NO: 13362 - DNA, 22 bp, Artificial Sequence
  chemically synthesized
tacacatcaaacagaatggtac

SEQ ID NO: 13363 - DNA, 22 bp, Artificial Sequence
  chemically synthesized
acacatcaaacagaatggtacg

SEQ ID NO: 13364 - DNA, 22 bp, Artificial Sequence
  chemically synthesized
cacatcaaacagaatggtacgt

SEQ ID NO: 13365 - DNA, 22 bp, Artificial Sequence
  chemically synthesized
ttcaaaagttaaaaaaaaacaa

SEQ ID NO: 13366 - DNA, 22 bp, Artificial Sequence
  chemically synthesized
tcaaaagttaaaaaaaaacaac

SEQ ID NO: 13367 - DNA, 22 bp, Artificial Sequence
  chemically synthesized
caaaagttaaaaaaaaacaact

SEQ ID NO: 13368 - DNA, 22 bp, Artificial Sequence
  chemically synthesized
aaaagttaaaaaaaaacaactc

SEQ ID NO: 13369 - DNA, 22 bp, Artificial Sequence
  chemically synthesized
aaaaaaaacaactcatccacat

SEQ ID NO: 13370 - DNA, 22 bp, Artificial Sequence
  chemically synthesized
atccacatattgcaactagcaa

SEQ ID NO: 13371 - DNA, 22 bp, Artificial Sequence
  chemically synthesized
caactagcaaaaatgacattcc

SEQ ID NO: 13372 - DNA, 22 bp, Artificial Sequence
  chemically synthesized
gcaaaaatgacattccccagtg

SEQ ID NO: 13373 - DNA, 22 bp, Artificial Sequence
  chemically synthesized
cccagtgtgaaaatcatgcttg

SEQ ID NO: 13374 - DNA, 22 bp, Artificial Sequence
  chemically synthesized
gagagaattcttacatgtaaag

SEQ ID NO: 13375 - DNA, 22 bp, Artificial Sequence
  chemically synthesized
agagaattcttacatgtaaagg

SEQ ID NO: 13376 - DNA, 22 bp, Artificial Sequence
  chemically synthesized
ttacatgtaaaggcaaaattgc

SEQ ID NO: 13377 - DNA, 22 bp, Artificial Sequence
  chemically synthesized
acatgtaaaggcaaaattgcga

SEQ ID NO: 13378 - DNA, 22 bp, Artificial Sequence
  chemically synthesized
catgtaaaggcaaaattgcgat

SEQ ID NO: 13379 - DNA, 22 bp, Artificial Sequence
  chemically synthesized
cgatgactttgcaggggaccgt

SEQ ID NO: 13380 - DNA, 22 bp, Artificial Sequence
  chemically synthesized
tgcaggggaccgtgggattccc

SEQ ID NO: 13381 - DNA, 22 bp, Artificial Sequence
  chemically synthesized
gcaggggaccgtgggattcccg

SEQ ID NO: 13382 - DNA, 22 bp, Artificial Sequence
  chemically synthesized
caggggaccgtgggattcccgc

SEQ ID NO: 13383 - DNA, 22 bp, Artificial Sequence
  chemically synthesized
ccgcccgcagtgccggagctgt

SEQ ID NO: 13384 - DNA, 22 bp, Artificial Sequence
  chemically synthesized
tcccctaccagggtttgcagtg

SEQ ID NO: 13385 - DNA, 22 bp, Artificial Sequence
  chemically synthesized
ccagggtttgcagtggagtttt

SEQ ID NO: 13386 - DNA, 22 bp, Artificial Sequence
  chemically synthesized
gcagtggagttttgaatgcact

SEQ ID NO: 13387 - DNA, 22 bp, Artificial Sequence
  chemically synthesized
cagtggagttttgaatgcactt

SEQ ID NO: 13388 - DNA, 22 bp, Artificial Sequence
  chemically synthesized
tgaatgcacttaacagtgtctt

SEQ ID NO: 13389 - DNA, 22 bp, Artificial Sequence
  chemically synthesized
gaatgcacttaacagtgtctta

SEQ ID NO: 13390 - DNA, 22 bp, Artificial Sequence
  chemically synthesized
aatgcacttaacagtgtcttac

SEQ ID NO: 13391 - DNA, 22 bp, Artificial Sequence
  chemically synthesized
aacagtgtcttacggtaaaaac

SEQ ID NO: 13392 - DNA, 22 bp, Artificial Sequence
  chemically synthesized
acagtgtcttacggtaaaaaca

SEQ ID NO: 13393 - DNA, 22 bp, Artificial Sequence
  chemically synthesized
acggtaaaaacaaaatttcatc

SEQ ID NO: 13394 - DNA, 22 bp, Artificial Sequence
  chemically synthesized
cggtaaaaacaaaatttcatcc

SEQ ID NO: 13395 - DNA, 22 bp, Artificial Sequence
  chemically synthesized
catccaccaattatgtgttgag

SEQ ID NO: 13396 - DNA, 22 bp, Artificial Sequence
  chemically synthesized
atccaccaattatgtgttgagc

SEQ ID NO: 13397 - DNA, 22 bp, Artificial Sequence
  chemically synthesized
tgtgttgagcgcccactgccta

SEQ ID NO: 13398 - DNA, 22 bp, Artificial Sequence
  chemically synthesized
agcgcccactgcctaccaagca

SEQ ID NO: 13399 - DNA, 22 bp, Artificial Sequence
  chemically synthesized
cctaccaagcacaaacaaaacc

SEQ ID NO: 13400 - DNA, 22 bp, Artificial Sequence
  chemically synthesized
ccaagcacaaacaaaaccattc

SEQ ID NO: 13401 - DNA, 22 bp, Artificial Sequence
  chemically synthesized
aaaaccacgaaatcgtcttcac

SEQ ID NO: 13402 - DNA, 22 bp, Artificial Sequence
  chemically synthesized
cactttctccagatccagcagc

SEQ ID NO: 13403 - DNA, 22 bp, Artificial Sequence
  chemically synthesized
actttctccagatccagcagcc

SEQ ID NO: 13404 - DNA, 22 bp, Artificial Sequence
  chemically synthesized
tctccagatccagcagcctccc

SEQ ID NO: 13405 - DNA, 22 bp, Artificial Sequence
  chemically synthesized
ctccagatccagcagcctcccc

SEQ ID NO: 13406 - DNA, 22 bp, Artificial Sequence
  chemically synthesized
tccagatccagcagcctcccct

SEQ ID NO: 13407 - DNA, 22 bp, Artificial Sequence
  chemically synthesized
cagatccagcagcctcccctat

SEQ ID NO: 13408 - DNA, 22 bp, Artificial Sequence
  chemically synthesized
ccctattaaggttcgcacacgc

SEQ ID NO: 13409 - DNA, 22 bp, Artificial Sequence
  chemically synthesized
ttaaggttcgcacacgctattg

SEQ ID NO: 13410 - DNA, 22 bp, Artificial Sequence
  chemically synthesized
aggttcgcacacgctattgcgc

SEQ ID NO: 13411 - DNA, 22 bp, Artificial Sequence
  chemically synthesized
gcacacgctattgcgccaacgc

SEQ ID NO: 13412 - DNA, 22 bp, Artificial Sequence
  chemically synthesized
ttgcgccaacgctcctccagag

SEQ ID NO: 13413 - DNA, 22 bp, Artificial Sequence
  chemically synthesized
cgccaacgctcctccagagcgg

SEQ ID NO: 13414 - DNA, 22 bp, Artificial Sequence
  chemically synthesized
ctccagagcgggtcttaagata

SEQ ID NO: 13415 - DNA, 22 bp, Artificial Sequence
  chemically synthesized
cagagcgggtcttaagataaaa

SEQ ID NO: 13416 - DNA, 22 bp, Artificial Sequence
  chemically synthesized
aagataaaagaacaggacaagt

SEQ ID NO: 13417 - DNA, 22 bp, Artificial Sequence
  chemically synthesized
agataaaagaacaggacaagtt

SEQ ID NO: 13418 - DNA, 22 bp, Artificial Sequence
  chemically synthesized
ccccgccccatttcgctagcct

SEQ ID NO: 13419 - DNA, 22 bp, Artificial Sequence
  chemically synthesized
cgctagcctcgtgagaaaacgt

SEQ ID NO: 13420 - DNA, 22 bp, Artificial Sequence
  chemically synthesized
gctagcctcgtgagaaaacgtc

SEQ ID NO: 13421 - DNA, 22 bp, Artificial Sequence
  chemically synthesized
gcctcgtgagaaaacgtcatcg

SEQ ID NO: 13422 - DNA, 22 bp, Artificial Sequence
  chemically synthesized
gtgagaaaacgtcatcgcacat

SEQ ID NO: 13423 - DNA, 22 bp, Artificial Sequence
  chemically synthesized
cggtgtcccgctaggaaagaga

SEQ ID NO: 13424 - DNA, 22 bp, Artificial Sequence
  chemically synthesized
ggaaagagaggtgcgtcaaaca

SEQ ID NO: 13425 - DNA, 22 bp, Artificial Sequence
  chemically synthesized
cgcccacgtaaaagatgacgct

SEQ ID NO: 13426 - DNA, 22 bp, Artificial Sequence
  chemically synthesized
ggtgtgtcagccgtccctgctg

SEQ ID NO: 13427 - DNA, 22 bp, Artificial Sequence
  chemically synthesized
gtgtgtcagccgtccctgctgc

SEQ ID NO: 13428 - DNA, 22 bp, Artificial Sequence
  chemically synthesized
ctgcccggttgcttctcttttg

SEQ ID NO: 13429 - DNA, 22 bp, Artificial Sequence
  chemically synthesized
cccggttgcttctcttttgggg

SEQ ID NO: 13430 - DNA, 22 bp, Artificial Sequence
  chemically synthesized
cttctcttttgggggcggggtc

SEQ ID NO: 13431 - DNA, 22 bp, Artificial Sequence
  chemically synthesized
ctcttttgggggcggggtctag

SEQ ID NO: 13432 - DNA, 22 bp, Artificial Sequence
  chemically synthesized
tcttttgggggcggggtctagc

SEQ ID NO: 13433 - DNA, 22 bp, Artificial Sequence
  chemically synthesized
ttttgggggcggggtctagcaa

SEQ ID NO: 13434 - DNA, 22 bp, Artificial Sequence
  chemically synthesized
ttgggggcggggtctagcaaga

SEQ ID NO: 13435 - DNA, 22 bp, Artificial Sequence
  chemically synthesized
tgggggcggggtctagcaagag

SEQ ID NO: 13436 - DNA, 22 bp, Artificial Sequence
  chemically synthesized
gggggcggggtctagcaagagc

SEQ ID NO: 13437 - DNA, 22 bp, Artificial Sequence
  chemically synthesized
ggggcggggtctagcaagagca

SEQ ID NO: 13438 - DNA, 22 bp, Artificial Sequence
  chemically synthesized
gcaagagcaggtgtgggtttag

SEQ ID NO: 13439 - DNA, 22 bp, Artificial Sequence
  chemically synthesized
aggaggtgtgtgtttttgtttt

SEQ ID NO: 13440 - DNA, 22 bp, Artificial Sequence
  chemically synthesized
ggaggtgtgtgtttttgttttt

SEQ ID NO: 13441 - DNA, 22 bp, Artificial Sequence
  chemically synthesized
ttgtttttcccaccctctctcc

SEQ ID NO: 13442 - DNA, 22 bp, Artificial Sequence
  chemically synthesized
tgtttttcccaccctctctccc

SEQ ID NO: 13443 - DNA, 22 bp, Artificial Sequence
  chemically synthesized
gtttttcccaccctctctcccc

SEQ ID NO: 13444 - DNA, 22 bp, Artificial Sequence
  chemically synthesized
tttttcccaccctctctcccca

SEQ ID NO: 13445 - DNA, 22 bp, Artificial Sequence
  chemically synthesized
ttcccaccctctctccccacta

SEQ ID NO: 13446 - DNA, 22 bp, Artificial Sequence
  chemically synthesized
tcccaccctctctccccactac

SEQ ID NO: 13447 - DNA, 22 bp, Artificial Sequence
  chemically synthesized
cccaccctctctccccactact

SEQ ID NO: 13448 - DNA, 22 bp, Artificial Sequence
  chemically synthesized
ccaccctctctccccactactt

SEQ ID NO: 13449 - DNA, 22 bp, Artificial Sequence
  chemically synthesized
tctccccactacttgctctcac

SEQ ID NO: 13450 - DNA, 22 bp, Artificial Sequence
  chemically synthesized
tccccactacttgctctcacag

SEQ ID NO: 13451 - DNA, 22 bp, Artificial Sequence
  chemically synthesized
cccactacttgctctcacagta

SEQ ID NO: 13452 - DNA, 22 bp, Artificial Sequence
  chemically synthesized
cttgctctcacagtactcgctg

SEQ ID NO: 13453 - DNA, 22 bp, Artificial Sequence
  chemically synthesized
gctctcacagtactcgctgagg

SEQ ID NO: 13454 - DNA, 22 bp, Artificial Sequence
  chemically synthesized
ctctcacagtactcgctgaggg

SEQ ID NO: 13455 - DNA, 22 bp, Artificial Sequence
  chemically synthesized
tcacagtactcgctgagggtga

SEQ ID NO: 13456 - DNA, 22 bp, Artificial Sequence
  chemically synthesized
acagtactcgctgagggtgaac

SEQ ID NO: 13457 - DNA, 22 bp, Artificial Sequence
  chemically synthesized
gctgagggtgaacaagaaaaga

SEQ ID NO: 13458 - DNA, 22 bp, Artificial Sequence
  chemically synthesized
agggtgaacaagaaaagacctg

SEQ ID NO: 13459 - DNA, 22 bp, Artificial Sequence
  chemically synthesized
ataaagattaaccagaagaaaa

SEQ ID NO: 13460 - DNA, 22 bp, Artificial Sequence
  chemically synthesized
accagaagaaaacaaggaggga

SEQ ID NO: 13461 - DNA, 22 bp, Artificial Sequence
  chemically synthesized
tagcaagctctggaactcagga

SEQ ID NO: 13462 - DNA, 22 bp, Artificial Sequence
  chemically synthesized
tggaactcaggagtcgcgcgct

SEQ ID NO: 13463 - DNA, 22 bp, Artificial Sequence
  chemically synthesized
gaactcaggagtcgcgcgctag

SEQ ID NO: 13464 - DNA, 22 bp, Artificial Sequence
  chemically synthesized
aggagtcgcgcgctaggggccg

SEQ ID NO: 13465 - DNA, 22 bp, Artificial Sequence
  chemically synthesized
ggggccggggccggggccgggg

SEQ ID NO: 13466 - DNA, 22 bp, Artificial Sequence
  chemically synthesized
cggttgcggtgcctgcgcccgc

SEQ ID NO: 13467 - DNA, 22 bp, Artificial Sequence
  chemically synthesized
cggtgcctgcgcccgcggcggc

SEQ ID NO: 13468 - DNA, 22 bp, Artificial Sequence
  chemically synthesized
cgcccgcggcggcggaggcgca

SEQ ID NO: 13469 - DNA, 22 bp, Artificial Sequence
  chemically synthesized
gcgggtggctgtttggggttcg

SEQ ID NO: 13470 - DNA, 22 bp, Artificial Sequence
  chemically synthesized
tttggggttcggctgccgggaa

SEQ ID NO: 13471 - DNA, 22 bp, Artificial Sequence
  chemically synthesized
ggggttcggctgccgggaagag

SEQ ID NO: 13472 - DNA, 22 bp, Artificial Sequence
  chemically synthesized
gggttcggctgccgggaagagg

SEQ ID NO: 13473 - DNA, 22 bp, Artificial Sequence
  chemically synthesized
ggctgccgggaagaggcgcggg

SEQ ID NO: 13474 - DNA, 22 bp, Artificial Sequence
  chemically synthesized
ccgggaagaggcgcgggtagaa

SEQ ID NO: 13475 - DNA, 22 bp, Artificial Sequence
  chemically synthesized
tcctcagagctcgacgcatttt

SEQ ID NO: 13476 - DNA, 22 bp, Artificial Sequence
  chemically synthesized
ctcagagctcgacgcattttta

SEQ ID NO: 13477 - DNA, 22 bp, Artificial Sequence
  chemically synthesized
agagctcgacgcatttttactt

SEQ ID NO: 13478 - DNA, 22 bp, Artificial Sequence
  chemically synthesized
gacgcatttttactttccctct

SEQ ID NO: 13479 - DNA, 22 bp, Artificial Sequence
  chemically synthesized
ttactttccctctcatttctct

SEQ ID NO: 13480 - DNA, 22 bp, Artificial Sequence
  chemically synthesized
tactttccctctcatttctctg

SEQ ID NO: 13481 - DNA, 22 bp, Artificial Sequence
  chemically synthesized
actttccctctcatttctctga

SEQ ID NO: 13482 - DNA, 22 bp, Artificial Sequence
  chemically synthesized
ctttccctctcatttctctgac

SEQ ID NO: 13483 - DNA, 22 bp, Artificial Sequence
  chemically synthesized
tccctctcatttctctgaccga

SEQ ID NO: 13484 - DNA, 22 bp, Artificial Sequence
  chemically synthesized
ccctctcatttctctgaccgaa

SEQ ID NO: 13485 - DNA, 22 bp, Artificial Sequence
  chemically synthesized
cctctcatttctctgaccgaag

SEQ ID NO: 13486 - DNA, 22 bp, Artificial Sequence
  chemically synthesized
tcatttctctgaccgaagctgg

SEQ ID NO: 13487 - DNA, 22 bp, Artificial Sequence
  chemically synthesized
atttctctgaccgaagctgggt

SEQ ID NO: 13488 - DNA, 22 bp, Artificial Sequence
  chemically synthesized
ctctgaccgaagctgggtgtcg

SEQ ID NO: 13489 - DNA, 22 bp, Artificial Sequence
  chemically synthesized
tctgaccgaagctgggtgtcgg

SEQ ID NO: 13490 - DNA, 22 bp, Artificial Sequence
  chemically synthesized
tgaccgaagctgggtgtcgggc

SEQ ID NO: 13491 - DNA, 22 bp, Artificial Sequence
  chemically synthesized
accgaagctgggtgtcgggctt

SEQ ID NO: 13492 - DNA, 22 bp, Artificial Sequence
  chemically synthesized
ggtgtcgggctttcgcctctag

SEQ ID NO: 13493 - DNA, 22 bp, Artificial Sequence
  chemically synthesized
tcgcctctagcgactggtggaa

SEQ ID NO: 13494 - DNA, 22 bp, Artificial Sequence
  chemically synthesized
cgcctctagcgactggtggaat

SEQ ID NO: 13495 - DNA, 22 bp, Artificial Sequence
  chemically synthesized
gcctctagcgactggtggaatt

SEQ ID NO: 13496 - DNA, 22 bp, Artificial Sequence
  chemically synthesized
tagcgactggtggaattgcctg

SEQ ID NO: 13497 - DNA, 22 bp, Artificial Sequence
  chemically synthesized
gcgactggtggaattgcctgca

SEQ ID NO: 13498 - DNA, 22 bp, Artificial Sequence
  chemically synthesized
gtggaattgcctgcatccgggc

SEQ ID NO: 13499 - DNA, 22 bp, Artificial Sequence
  chemically synthesized
cctgcatccgggccccgggctt

SEQ ID NO: 13500 - DNA, 22 bp, Artificial Sequence
  chemically synthesized
catccgggccccgggcttcccg

SEQ ID NO: 13501 - DNA, 22 bp, Artificial Sequence
  chemically synthesized
cccggcggcggcggcggcggcg

SEQ ID NO: 13502 - DNA, 22 bp, Artificial Sequence
  chemically synthesized
ccggcggcggcggcggcggcgg

SEQ ID NO: 13503 - DNA, 22 bp, Artificial Sequence
  chemically synthesized
gcctcttccttgctttcccgcc

SEQ ID NO: 13504 - DNA, 22 bp, Artificial Sequence
  chemically synthesized
ttccttgctttcccgccctcag

SEQ ID NO: 13505 - DNA, 22 bp, Artificial Sequence
  chemically synthesized
ccttgctttcccgccctcagta

SEQ ID NO: 13506 - DNA, 22 bp, Artificial Sequence
  chemically synthesized
cttgctttcccgccctcagtac

SEQ ID NO: 13507 - DNA, 22 bp, Artificial Sequence
  chemically synthesized
gctttcccgccctcagtacccg

SEQ ID NO: 13508 - DNA, 22 bp, Artificial Sequence
  chemically synthesized
ctttcccgccctcagtacccga

SEQ ID NO: 13509 - DNA, 22 bp, Artificial Sequence
  chemically synthesized
tcccgccctcagtacccgagct

SEQ ID NO: 13510 - DNA, 22 bp, Artificial Sequence
  chemically synthesized
cccgccctcagtacccgagctg

SEQ ID NO: 13511 - DNA, 22 bp, Artificial Sequence
  chemically synthesized
ccgccctcagtacccgagctgt

SEQ ID NO: 13512 - DNA, 22 bp, Artificial Sequence
  chemically synthesized
agtacccgagctgtctccttcc

SEQ ID NO: 13513 - DNA, 22 bp, Artificial Sequence
  chemically synthesized
tctccttcccggggacccgctg

SEQ ID NO: 13514 - DNA, 22 bp, Artificial Sequence
  chemically synthesized
cttcccggggacccgctgggag

SEQ ID NO: 13515 - DNA, 22 bp, Artificial Sequence
  chemically synthesized
cccggggacccgctgggagcgc

SEQ ID NO: 13516 - DNA, 22 bp, Artificial Sequence
  chemically synthesized
ccggggacccgctgggagcgct

SEQ ID NO: 13517 - DNA, 22 bp, Artificial Sequence
  chemically synthesized
ggagcgctgccgctgcgggctc

SEQ ID NO: 13518 - DNA, 22 bp, Artificial Sequence
  chemically synthesized
ccgctgcgggctcgagaaaagg

SEQ ID NO: 13519 - DNA, 22 bp, Artificial Sequence
  chemically synthesized
cgggctcgagaaaagggagcct

SEQ ID NO: 13520 - DNA, 22 bp, Artificial Sequence
  chemically synthesized
gagaaaagggagcctcgggtac

SEQ ID NO: 13521 - DNA, 22 bp, Artificial Sequence
  chemically synthesized
gggtactgagaggcctcgcctg

SEQ ID NO: 13522 - DNA, 22 bp, Artificial Sequence
  chemically synthesized
agaggcctcgcctgggggaagg

SEQ ID NO: 13523 - DNA, 22 bp, Artificial Sequence
  chemically synthesized
gcctgggggaaggccggagggt

SEQ ID NO: 13524 - DNA, 22 bp, Artificial Sequence
  chemically synthesized
ggggaaggccggagggtgggcg

SEQ ID NO: 13525 - DNA, 22 bp, Artificial Sequence
  chemically synthesized
ctgcggaccaagtcggggttcg

SEQ ID NO: 13526 - DNA, 22 bp, Artificial Sequence
  chemically synthesized
tgcggaccaagtcggggttcgc

SEQ ID NO: 13527 - DNA, 22 bp, Artificial Sequence
  chemically synthesized
cggaccaagtcggggttcgcta

SEQ ID NO: 13528 - DNA, 22 bp, Artificial Sequence
  chemically synthesized
gctaggaacccgagacggtccc

SEQ ID NO: 13529 - DNA, 22 bp, Artificial Sequence
  chemically synthesized
ggaacccgagacggtccctgcc

SEQ ID NO: 13530 - DNA, 22 bp, Artificial Sequence
  chemically synthesized
ccggcgaggagatcatgcggga

SEQ ID NO: 13531 - DNA, 22 bp, Artificial Sequence
  chemically synthesized
cacaatttcagcccaagcttct

SEQ ID NO: 13532 - DNA, 22 bp, Artificial Sequence
  chemically synthesized
cagcccaagcttctagagagtg

SEQ ID NO: 13533 - DNA, 22 bp, Artificial Sequence
  chemically synthesized
agcccaagcttctagagagtgg

SEQ ID NO: 13534 - DNA, 22 bp, Artificial Sequence
  chemically synthesized
ctagagagtggtgatgacttgc

SEQ ID NO: 13535 - DNA, 22 bp, Artificial Sequence
  chemically synthesized
tagagagtggtgatgacttgca

SEQ ID NO: 13536 - DNA, 22 bp, Artificial Sequence
  chemically synthesized
gagagtggtgatgacttgcata

SEQ ID NO: 13537 - DNA, 22 bp, Artificial Sequence
  chemically synthesized
gcatatgagggcagcaatgcaa

SEQ ID NO: 13538 - DNA, 22 bp, Artificial Sequence
  chemically synthesized
catatgagggcagcaatgcaag

SEQ ID NO: 13539 - DNA, 22 bp, Artificial Sequence
  chemically synthesized
cccattctgtgggacatgacct

SEQ ID NO: 13540 - DNA, 22 bp, Artificial Sequence
  chemically synthesized
tgtgggacatgacctggttgct

SEQ ID NO: 13541 - DNA, 22 bp, Artificial Sequence
  chemically synthesized
tgggacatgacctggttgcttc

SEQ ID NO: 13542 - DNA, 22 bp, Artificial Sequence
  chemically synthesized
gttgcttcacagctccgagatg

SEQ ID NO: 13543 - DNA, 22 bp, Artificial Sequence
  chemically synthesized
cttcacagctccgagatgacac

SEQ ID NO: 13544 - DNA, 22 bp, Artificial Sequence
  chemically synthesized
cacagctccgagatgacacaga

SEQ ID NO: 13545 - DNA, 22 bp, Artificial Sequence
  chemically synthesized
acagctccgagatgacacagac

SEQ ID NO: 13546 - DNA, 22 bp, Artificial Sequence
  chemically synthesized
cgagatgacacagacttgctta

SEQ ID NO: 13547 - DNA, 22 bp, Artificial Sequence
  chemically synthesized
gcttaaaggaagtgactattgt

SEQ ID NO: 13548 - DNA, 22 bp, Artificial Sequence
  chemically synthesized
cttaaaggaagtgactattgtg

SEQ ID NO: 13549 - DNA, 22 bp, Artificial Sequence
  chemically synthesized
aaaggaagtgactattgtgact

SEQ ID NO: 13550 - DNA, 22 bp, Artificial Sequence
  chemically synthesized
aaggaagtgactattgtgactt

SEQ ID NO: 13551 - DNA, 22 bp, Artificial Sequence
  chemically synthesized
ttgtgacttgggcatcacttga

SEQ ID NO: 13552 - DNA, 22 bp, Artificial Sequence
  chemically synthesized
tgacttgggcatcacttgactg

SEQ ID NO: 13553 - DNA, 22 bp, Artificial Sequence
  chemically synthesized
gggcatcacttgactgatggta

SEQ ID NO: 13554 - DNA, 22 bp, Artificial Sequence
  chemically synthesized
ggcatcacttgactgatggtaa

SEQ ID NO: 13555 - DNA, 22 bp, Artificial Sequence
  chemically synthesized
gactgatggtaatcagttgtct

SEQ ID NO: 13556 - DNA, 22 bp, Artificial Sequence
  chemically synthesized
actgatggtaatcagttgtcta

SEQ ID NO: 13557 - DNA, 22 bp, Artificial Sequence
  chemically synthesized
atggtaatcagttgtctaaaga

SEQ ID NO: 13558 - DNA, 22 bp, Artificial Sequence
  chemically synthesized
tctaaagaagtgcacagattac

SEQ ID NO: 13559 - DNA, 22 bp, Artificial Sequence
  chemically synthesized
aagaagtgcacagattacatgt

SEQ ID NO: 13560 - DNA, 22 bp, Artificial Sequence
  chemically synthesized
catgtccgtgtgctcattgggt

SEQ ID NO: 13561 - DNA, 22 bp, Artificial Sequence
  chemically synthesized
attgggtctatctggccgcgtt

SEQ ID NO: 13562 - DNA, 22 bp, Artificial Sequence
  chemically synthesized
ggtctatctggccgcgttgaac

SEQ ID NO: 13563 - DNA, 22 bp, Artificial Sequence
  chemically synthesized
tctggccgcgttgaacaccacc

SEQ ID NO: 13564 - DNA, 22 bp, Artificial Sequence
  chemically synthesized
gccgcgttgaacaccaccaggc

SEQ ID NO: 13565 - DNA, 22 bp, Artificial Sequence
  chemically synthesized
aacaccaccaggctttgtattc

SEQ ID NO: 13566 - DNA, 22 bp, Artificial Sequence
  chemically synthesized
tgtattcagaaacaggagggag

SEQ ID NO: 13567 - DNA, 22 bp, Artificial Sequence
  chemically synthesized
gtattcagaaacaggagggagg

SEQ ID NO: 13568 - DNA, 22 bp, Artificial Sequence
  chemically synthesized
tattcagaaacaggagggaggt

SEQ ID NO: 13569 - DNA, 22 bp, Artificial Sequence
  chemically synthesized
agaaacaggagggaggtcctgc

SEQ ID NO: 13570 - DNA, 22 bp, Artificial Sequence
  chemically synthesized
cactttcccaggaggggtggcc

SEQ ID NO: 13571 - DNA, 22 bp, Artificial Sequence
  chemically synthesized
tcccaggaggggtggccctttc

SEQ ID NO: 13572 - DNA, 22 bp, Artificial Sequence
  chemically synthesized
cccaggaggggtggccctttca

SEQ ID NO: 13573 - DNA, 22 bp, Artificial Sequence
  chemically synthesized
ccaggaggggtggccctttcag

SEQ ID NO: 13574 - DNA, 22 bp, Artificial Sequence
  chemically synthesized
tcagatgcaatcgagattgtta

SEQ ID NO: 13575 - DNA, 22 bp, Artificial Sequence
  chemically synthesized
cagatgcaatcgagattgttag

SEQ ID NO: 13576 - DNA, 22 bp, Artificial Sequence
  chemically synthesized
agatgcaatcgagattgttagg

SEQ ID NO: 13577 - DNA, 22 bp, Artificial Sequence
  chemically synthesized
ttaggctctgggagagtagttg

SEQ ID NO: 13578 - DNA, 22 bp, Artificial Sequence
  chemically synthesized
ggctctgggagagtagttgcct

SEQ ID NO: 13579 - DNA, 22 bp, Artificial Sequence
  chemically synthesized
tgggagagtagttgcctggttg

SEQ ID NO: 13580 - DNA, 22 bp, Artificial Sequence
  chemically synthesized
ggagagtagttgcctggttgtg

SEQ ID NO: 13581 - DNA, 22 bp, Artificial Sequence
  chemically synthesized
cctggttgtggcagttggtaaa

SEQ ID NO: 13582 - DNA, 22 bp, Artificial Sequence
  chemically synthesized
gttgtggcagttggtaaatttc

SEQ ID NO: 13583 - DNA, 22 bp, Artificial Sequence
  chemically synthesized
tggcagttggtaaatttctatt

SEQ ID NO: 13584 - DNA, 22 bp, Artificial Sequence
  chemically synthesized
gtaaatttctattcaaacagtt

SEQ ID NO: 13585 - DNA, 22 bp, Artificial Sequence
  chemically synthesized
ctattcaaacagttgccatgca

SEQ ID NO: 13586 - DNA, 22 bp, Artificial Sequence
  chemically synthesized
tattcaaacagttgccatgcac

SEQ ID NO: 13587 - DNA, 22 bp, Artificial Sequence
  chemically synthesized
ttcaaacagttgccatgcacca

SEQ ID NO: 13588 - DNA, 22 bp, Artificial Sequence
  chemically synthesized
aaacagttgccatgcaccagtt

SEQ ID NO: 13589 - DNA, 22 bp, Artificial Sequence
  chemically synthesized
ccatgcaccagttgttcacaac

SEQ ID NO: 13590 - DNA, 22 bp, Artificial Sequence
  chemically synthesized
ttcacaacaagggtacgtaatc

SEQ ID NO: 13591 - DNA, 22 bp, Artificial Sequence
  chemically synthesized
acaacaagggtacgtaatctgt

SEQ ID NO: 13592 - DNA, 22 bp, Artificial Sequence
  chemically synthesized
tctggcattacttctacttttg

SEQ ID NO: 13593 - DNA, 22 bp, Artificial Sequence
  chemically synthesized
gcattacttctacttttgtaca

SEQ ID NO: 13594 - DNA, 22 bp, Artificial Sequence
  chemically synthesized
cttctacttttgtacaaaggat

SEQ ID NO: 13595 - DNA, 22 bp, Artificial Sequence
  chemically synthesized
ctacttttgtacaaaggatcaa

SEQ ID NO: 13596 - DNA, 22 bp, Artificial Sequence
  chemically synthesized
tacttttgtacaaaggatcaaa

SEQ ID NO: 13597 - DNA, 22 bp, Artificial Sequence
  chemically synthesized
cttttgtacaaaggatcaaaaa

SEQ ID NO: 13598 - DNA, 22 bp, Artificial Sequence
  chemically synthesized
ttgtacaaaggatcaaaaaaaa

SEQ ID NO: 13599 - DNA, 22 bp, Artificial Sequence
  chemically synthesized
tgtacaaaggatcaaaaaaaaa

SEQ ID NO: 13600 - DNA, 22 bp, Artificial Sequence
  chemically synthesized
gtacaaaggatcaaaaaaaaaa

SEQ ID NO: 13601 - DNA, 22 bp, Artificial Sequence
  chemically synthesized
tacaaaggatcaaaaaaaaaaa

SEQ ID NO: 13602 - DNA, 22 bp, Artificial Sequence
  chemically synthesized
ttaagatatgatttttctcaga

SEQ ID NO: 13603 - DNA, 22 bp, Artificial Sequence
  chemically synthesized
agatatgatttttctcagactt

SEQ ID NO: 13604 - DNA, 22 bp, Artificial Sequence
  chemically synthesized
ttctcagactttgggaaacttt

SEQ ID NO: 13605 - DNA, 22 bp, Artificial Sequence
  chemically synthesized
tctcagactttgggaaactttt

SEQ ID NO: 13606 - DNA, 22 bp, Artificial Sequence
  chemically synthesized
ctcagactttgggaaactttta

SEQ ID NO: 13607 - DNA, 22 bp, Artificial Sequence
  chemically synthesized
tcagactttgggaaacttttaa

SEQ ID NO: 13608 - DNA, 22 bp, Artificial Sequence
  chemically synthesized
agactttgggaaacttttaaca

SEQ ID NO: 13609 - DNA, 22 bp, Artificial Sequence
  chemically synthesized
tgggaaacttttaacataatct

SEQ ID NO: 13610 - DNA, 22 bp, Artificial Sequence
  chemically synthesized
gggaaacttttaacataatctg

SEQ ID NO: 13611 - DNA, 22 bp, Artificial Sequence
  chemically synthesized
ggaaacttttaacataatctgt

SEQ ID NO: 13612 - DNA, 22 bp, Artificial Sequence
  chemically synthesized
ttaacataatctgtgaatatca

SEQ ID NO: 13613 - DNA, 22 bp, Artificial Sequence
  chemically synthesized
taacataatctgtgaatatcac

SEQ ID NO: 13614 - DNA, 22 bp, Artificial Sequence
  chemically synthesized
aacataatctgtgaatatcaca

SEQ ID NO: 13615 - DNA, 22 bp, Artificial Sequence
  chemically synthesized
acataatctgtgaatatcacag

SEQ ID NO: 13616 - DNA, 22 bp, Artificial Sequence
  chemically synthesized
tgaatatcacagaaacaagact

SEQ ID NO: 13617 - DNA, 22 bp, Artificial Sequence
  chemically synthesized
tcatataggggatattaataac

SEQ ID NO: 13618 - DNA, 22 bp, Artificial Sequence
  chemically synthesized
ataacctggagtcagaatactt

SEQ ID NO: 13619 - DNA, 22 bp, Artificial Sequence
  chemically synthesized
gagtcagaatacttgaaatacg

SEQ ID NO: 13620 - DNA, 22 bp, Artificial Sequence
  chemically synthesized
gaaatacggtgtcatttgacac

SEQ ID NO: 13621 - DNA, 22 bp, Artificial Sequence
  chemically synthesized
aaatacggtgtcatttgacacg

SEQ ID NO: 13622 - DNA, 22 bp, Artificial Sequence
  chemically synthesized
gacacgggcattgttgtcacca

SEQ ID NO: 13623 - DNA, 22 bp, Artificial Sequence
  chemically synthesized
acacgggcattgttgtcaccac

SEQ ID NO: 13624 - DNA, 22 bp, Artificial Sequence
  chemically synthesized
ttgtcaccacctctgccaaggc

SEQ ID NO: 13625 - DNA, 22 bp, Artificial Sequence
  chemically synthesized
tcaccacctctgccaaggcctg

SEQ ID NO: 13626 - DNA, 22 bp, Artificial Sequence
  chemically synthesized
tgccaaggcctgccactttagg

SEQ ID NO: 13627 - DNA, 22 bp, Artificial Sequence
  chemically synthesized
ccaaggcctgccactttaggaa

SEQ ID NO: 13628 - DNA, 22 bp, Artificial Sequence
  chemically synthesized
ccactttaggaaaaccctgaat

SEQ ID NO: 13629 - DNA, 22 bp, Artificial Sequence
  chemically synthesized
taggaaaaccctgaatcagttg

SEQ ID NO: 13630 - DNA, 22 bp, Artificial Sequence
  chemically synthesized
aggaaaaccctgaatcagttgg

SEQ ID NO: 13631 - DNA, 22 bp, Artificial Sequence
  chemically synthesized
ggaaaaccctgaatcagttgga

SEQ ID NO: 13632 - DNA, 22 bp, Artificial Sequence
  chemically synthesized
aatcagttggaaactgctacat

SEQ ID NO: 13633 - DNA, 22 bp, Artificial Sequence
  chemically synthesized
gaaactgctacatgctgatagt

SEQ ID NO: 13634 - DNA, 22 bp, Artificial Sequence
  chemically synthesized
ctacatgctgatagtacatctg

SEQ ID NO: 13635 - DNA, 22 bp, Artificial Sequence
  chemically synthesized
catgctgatagtacatctgaaa

SEQ ID NO: 13636 - DNA, 22 bp, Artificial Sequence
  chemically synthesized
atagtacatctgaaacaagaac

SEQ ID NO: 13637 - DNA, 22 bp, Artificial Sequence
  chemically synthesized
aaacaagaacgagagtaattac

SEQ ID NO: 13638 - DNA, 22 bp, Artificial Sequence
  chemically synthesized
ccacattccagattgttcacta

SEQ ID NO: 13639 - DNA, 22 bp, Artificial Sequence
  chemically synthesized
cagattgttcactaagccagca

SEQ ID NO: 13640 - DNA, 22 bp, Artificial Sequence
  chemically synthesized
ttcactaagccagcatttacct

SEQ ID NO: 13641 - DNA, 22 bp, Artificial Sequence
  chemically synthesized
actaagccagcatttacctgct

SEQ ID NO: 13642 - DNA, 22 bp, Artificial Sequence
  chemically synthesized
agccagcatttacctgctccag

SEQ ID NO: 13643 - DNA, 22 bp, Artificial Sequence
  chemically synthesized
acctgctccaggaaaaaattac

SEQ ID NO: 13644 - DNA, 22 bp, Artificial Sequence
  chemically synthesized
cctgctccaggaaaaaattaca

SEQ ID NO: 13645 - DNA, 22 bp, Artificial Sequence
  chemically synthesized
ctccaggaaaaaattacaagca

SEQ ID NO: 13646 - DNA, 22 bp, Artificial Sequence
  chemically synthesized
caggaaaaaattacaagcacct

SEQ ID NO: 13647 - DNA, 22 bp, Artificial Sequence
  chemically synthesized
caagcaccttatgaagttgata

SEQ ID NO: 13648 - DNA, 22 bp, Artificial Sequence
  chemically synthesized
atgaagttgataaaatattttg

SEQ ID NO: 13649 - DNA, 22 bp, Artificial Sequence
  chemically synthesized
tgaagttgataaaatattttgt

SEQ ID NO: 13650 - DNA, 22 bp, Artificial Sequence
  chemically synthesized
ataaaatattttgtttggctat

SEQ ID NO: 13651 - DNA, 22 bp, Artificial Sequence
  chemically synthesized
tgtttggctatgttggcactcc

SEQ ID NO: 13652 - DNA, 22 bp, Artificial Sequence
  chemically synthesized
gtttggctatgttggcactcca

SEQ ID NO: 13653 - DNA, 22 bp, Artificial Sequence
  chemically synthesized
tttggctatgttggcactccac

SEQ ID NO: 13654 - DNA, 22 bp, Artificial Sequence
  chemically synthesized
ggctatgttggcactccacaat

SEQ ID NO: 13655 - DNA, 22 bp, Artificial Sequence
  chemically synthesized
gctatgttggcactccacaatt

SEQ ID NO: 13656 - DNA, 22 bp, Artificial Sequence
  chemically synthesized
tgttggcactccacaatttgct

SEQ ID NO: 13657 - DNA, 22 bp, Artificial Sequence
  chemically synthesized
gcactccacaatttgctttcag

SEQ ID NO: 13658 - DNA, 22 bp, Artificial Sequence
  chemically synthesized
cacaatttgctttcagagaaac

SEQ ID NO: 13659 - DNA, 22 bp, Artificial Sequence
  chemically synthesized
gctttcagagaaacaaagtaaa

SEQ ID NO: 13660 - DNA, 22 bp, Artificial Sequence
  chemically synthesized
ctttcagagaaacaaagtaaac

SEQ ID NO: 13661 - DNA, 22 bp, Artificial Sequence
  chemically synthesized
tcagagaaacaaagtaaaccaa

SEQ ID NO: 13662 - DNA, 22 bp, Artificial Sequence
  chemically synthesized
cagagaaacaaagtaaaccaag

SEQ ID NO: 13663 - DNA, 22 bp, Artificial Sequence
  chemically synthesized
agagaaacaaagtaaaccaagg

SEQ ID NO: 13664 - DNA, 22 bp, Artificial Sequence
  chemically synthesized
ctgtttttcaagtctgccctcg

SEQ ID NO: 13665 - DNA, 22 bp, Artificial Sequence
  chemically synthesized
tgtttttcaagtctgccctcgg

SEQ ID NO: 13666 - DNA, 22 bp, Artificial Sequence
  chemically synthesized
tttttcaagtctgccctcgggt

SEQ ID NO: 13667 - DNA, 22 bp, Artificial Sequence
  chemically synthesized
ttcaagtctgccctcgggttct

SEQ ID NO: 13668 - DNA, 22 bp, Artificial Sequence
  chemically synthesized
tcaagtctgccctcgggttcta

SEQ ID NO: 13669 - DNA, 22 bp, Artificial Sequence
  chemically synthesized
caagtctgccctcgggttctat

SEQ ID NO: 13670 - DNA, 22 bp, Artificial Sequence
  chemically synthesized
aagtctgccctcgggttctatt

SEQ ID NO: 13671 - DNA, 22 bp, Artificial Sequence
  chemically synthesized
ccctcgggttctattctacgtt

SEQ ID NO: 13672 - DNA, 22 bp, Artificial Sequence
  chemically synthesized
gggttctattctacgttaatta

SEQ ID NO: 13673 - DNA, 22 bp, Artificial Sequence
  chemically synthesized
tattctacgttaattagatagt

SEQ ID NO: 13674 - DNA, 22 bp, Artificial Sequence
  chemically synthesized
ttctacgttaattagatagttc

SEQ ID NO: 13675 - DNA, 22 bp, Artificial Sequence
  chemically synthesized
tacgttaattagatagttccca

SEQ ID NO: 13676 - DNA, 22 bp, Artificial Sequence
  chemically synthesized
cgttaattagatagttcccagg

SEQ ID NO: 13677 - DNA, 22 bp, Artificial Sequence
  chemically synthesized
attagatagttcccaggaggac

SEQ ID NO: 13678 - DNA, 22 bp, Artificial Sequence
  chemically synthesized
gatagttcccaggaggactagg

SEQ ID NO: 13679 - DNA, 22 bp, Artificial Sequence
  chemically synthesized
ccaggaggactaggttagccta

SEQ ID NO: 13680 - DNA, 22 bp, Artificial Sequence
  chemically synthesized
ggttagcctacctattgtctga

SEQ ID NO: 13681 - DNA, 22 bp, Artificial Sequence
  chemically synthesized
gcctacctattgtctgagaaac

SEQ ID NO: 13682 - DNA, 22 bp, Artificial Sequence
  chemically synthesized
cctattgtctgagaaacttgga

SEQ ID NO: 13683 - DNA, 22 bp, Artificial Sequence
  chemically synthesized
ttgtctgagaaacttggaactg

SEQ ID NO: 13684 - DNA, 22 bp, Artificial Sequence
  chemically synthesized
tctgagaaacttggaactgtga

SEQ ID NO: 13685 - DNA, 22 bp, Artificial Sequence
  chemically synthesized
agaaacttggaactgtgagaaa

SEQ ID NO: 13686 - DNA, 22 bp, Artificial Sequence
  chemically synthesized
ggaactgtgagaaatggccaga

SEQ ID NO: 13687 - DNA, 22 bp, Artificial Sequence
  chemically synthesized
gaactgtgagaaatggccagat

SEQ ID NO: 13688 - DNA, 22 bp, Artificial Sequence
  chemically synthesized
tgagaaatggccagatagtgat

SEQ ID NO: 13689 - DNA, 22 bp, Artificial Sequence
  chemically synthesized
caccttccagtcttccctgatg

SEQ ID NO: 13690 - DNA, 22 bp, Artificial Sequence
  chemically synthesized
accttccagtcttccctgatgt

SEQ ID NO: 13691 - DNA, 22 bp, Artificial Sequence
  chemically synthesized
ccagtcttccctgatgttgaag

SEQ ID NO: 13692 - DNA, 22 bp, Artificial Sequence
  chemically synthesized
cagtcttccctgatgttgaaga

SEQ ID NO: 13693 - DNA, 22 bp, Artificial Sequence
  chemically synthesized
ccctgatgttgaagattgagaa

SEQ ID NO: 13694 - DNA, 22 bp, Artificial Sequence
  chemically synthesized
cctgatgttgaagattgagaaa

SEQ ID NO: 13695 - DNA, 22 bp, Artificial Sequence
  chemically synthesized
atgttgaagattgagaaagtgt

SEQ ID NO: 13696 - DNA, 22 bp, Artificial Sequence
  chemically synthesized
aagattgagaaagtgttgtgaa

SEQ ID NO: 13697 - DNA, 22 bp, Artificial Sequence
  chemically synthesized
agaaagtgttgtgaactttctg

SEQ ID NO: 13698 - DNA, 22 bp, Artificial Sequence
  chemically synthesized
tgaactttctggtactgtaaac

SEQ ID NO: 13699 - DNA, 22 bp, Artificial Sequence
  chemically synthesized
tctggtactgtaaacagttcac

SEQ ID NO: 13700 - DNA, 22 bp, Artificial Sequence
  chemically synthesized
ctggtactgtaaacagttcact

SEQ ID NO: 13701 - DNA, 22 bp, Artificial Sequence
  chemically synthesized
tggtactgtaaacagttcactg

SEQ ID NO: 13702 - DNA, 22 bp, Artificial Sequence
  chemically synthesized
gtactgtaaacagttcactgtc

SEQ ID NO: 13703 - DNA, 22 bp, Artificial Sequence
  chemically synthesized
taaacagttcactgtccttgaa

SEQ ID NO: 13704 - DNA, 22 bp, Artificial Sequence
  chemically synthesized
actgtccttgaagtggtcctgg

SEQ ID NO: 13705 - DNA, 22 bp, Artificial Sequence
  chemically synthesized
tccttgaagtggtcctgggcag

SEQ ID NO: 13706 - DNA, 22 bp, Artificial Sequence
  chemically synthesized
gaagtggtcctgggcagctcct

SEQ ID NO: 13707 - DNA, 22 bp, Artificial Sequence
  chemically synthesized
aagtggtcctgggcagctcctg

SEQ ID NO: 13708 - DNA, 22 bp, Artificial Sequence
  chemically synthesized
ggcagctcctgttgtggaaagt

SEQ ID NO: 13709 - DNA, 22 bp, Artificial Sequence
  chemically synthesized
ctgttgtggaaagtggacggtt

SEQ ID NO: 13710 - DNA, 22 bp, Artificial Sequence
  chemically synthesized
ttgtggaaagtggacggtttag

SEQ ID NO: 13711 - DNA, 22 bp, Artificial Sequence
  chemically synthesized
tggaaagtggacggtttaggat

SEQ ID NO: 13712 - DNA, 22 bp, Artificial Sequence
  chemically synthesized
aggatcctgcttctctttgggc

SEQ ID NO: 13713 - DNA, 22 bp, Artificial Sequence
  chemically synthesized
ggatcctgcttctctttgggct

SEQ ID NO: 13714 - DNA, 22 bp, Artificial Sequence
  chemically synthesized
cttctctttgggctgggagaaa

SEQ ID NO: 13715 - DNA, 22 bp, Artificial Sequence
  chemically synthesized
ctctttgggctgggagaaaata

SEQ ID NO: 13716 - DNA, 22 bp, Artificial Sequence
  chemically synthesized
tctttgggctgggagaaaataa

SEQ ID NO: 13717 - DNA, 22 bp, Artificial Sequence
  chemically synthesized
tttgggctgggagaaaataaac

SEQ ID NO: 13718 - DNA, 22 bp, Artificial Sequence
  chemically synthesized
tgggctgggagaaaataaacag

SEQ ID NO: 13719 - DNA, 22 bp, Artificial Sequence
  chemically synthesized
gggctgggagaaaataaacagc

SEQ ID NO: 13720 - DNA, 22 bp, Artificial Sequence
  chemically synthesized
ggctgggagaaaataaacagca

SEQ ID NO: 13721 - DNA, 22 bp, Artificial Sequence
  chemically synthesized
ggagaaaataaacagcatggtt

SEQ ID NO: 13722 - DNA, 22 bp, Artificial Sequence
  chemically synthesized
caagtattgagagccaggttgg

SEQ ID NO: 13723 - DNA, 22 bp, Artificial Sequence
  chemically synthesized
agagccaggttggagaaggtgg

SEQ ID NO: 13724 - DNA, 22 bp, Artificial Sequence
  chemically synthesized
gagaaggtggcttacacctgta

SEQ ID NO: 13725 - DNA, 22 bp, Artificial Sequence
  chemically synthesized
acacctgtaatgccagagcttt

SEQ ID NO: 13726 - DNA, 22 bp, Artificial Sequence
  chemically synthesized
cacctgtaatgccagagctttg

SEQ ID NO: 13727 - DNA, 22 bp, Artificial Sequence
  chemically synthesized
taatgccagagctttgggaggc

SEQ ID NO: 13728 - DNA, 22 bp, Artificial Sequence
  chemically synthesized
tgggaggcggaggcaagaggat

SEQ ID NO: 13729 - DNA, 22 bp, Artificial Sequence
  chemically synthesized
gggaggcggaggcaagaggatc

SEQ ID NO: 13730 - DNA, 22 bp, Artificial Sequence
  chemically synthesized
ggaggcggaggcaagaggatca

SEQ ID NO: 13731 - DNA, 22 bp, Artificial Sequence
  chemically synthesized
gaagccaggagttcaagctcaa

SEQ ID NO: 13732 - DNA, 22 bp, Artificial Sequence
  chemically synthesized
aagccaggagttcaagctcaac

SEQ ID NO: 13733 - DNA, 22 bp, Artificial Sequence
  chemically synthesized
aagctcaacctgggcaacgtag

SEQ ID NO: 13734 - DNA, 22 bp, Artificial Sequence
  chemically synthesized
aacctgggcaacgtagaccctg

SEQ ID NO: 13735 - DNA, 22 bp, Artificial Sequence
  chemically synthesized
ggcaacgtagaccctgtctcta

SEQ ID NO: 13736 - DNA, 22 bp, Artificial Sequence
  chemically synthesized
tctctacaaaaaattaaaaact

SEQ ID NO: 13737 - DNA, 22 bp, Artificial Sequence
  chemically synthesized
tacaaaaaattaaaaacttagc

SEQ ID NO: 13738 - DNA, 22 bp, Artificial Sequence
  chemically synthesized
caaaaaattaaaaacttagccg

SEQ ID NO: 13739 - DNA, 22 bp, Artificial Sequence
  chemically synthesized
aaaacttagccgggcgtggtga

SEQ ID NO: 13740 - DNA, 22 bp, Artificial Sequence
  chemically synthesized
agccgggcgtggtgatgtgcac

SEQ ID NO: 13741 - DNA, 22 bp, Artificial Sequence
  chemically synthesized
gccgggcgtggtgatgtgcacc

SEQ ID NO: 13742 - DNA, 22 bp, Artificial Sequence
  chemically synthesized
tagtcctagctacttgggaggc

SEQ ID NO: 13743 - DNA, 22 bp, Artificial Sequence
  chemically synthesized
gctacttgggaggctgaggcag

SEQ ID NO: 13744 - DNA, 22 bp, Artificial Sequence
  chemically synthesized
cttgggaggctgaggcaggagg

SEQ ID NO: 13745 - DNA, 22 bp, Artificial Sequence
  chemically synthesized
gggaggctgaggcaggagggtc

SEQ ID NO: 13746 - DNA, 22 bp, Artificial Sequence
  chemically synthesized
ggaggctgaggcaggagggtca

SEQ ID NO: 13747 - DNA, 22 bp, Artificial Sequence
  chemically synthesized
aggcaggagggtcatttgagcc

SEQ ID NO: 13748 - DNA, 22 bp, Artificial Sequence
  chemically synthesized
gagcccaagagtttgaagttac

SEQ ID NO: 13749 - DNA, 22 bp, Artificial Sequence
  chemically synthesized
agcccaagagtttgaagttacc

SEQ ID NO: 13750 - DNA, 22 bp, Artificial Sequence
  chemically synthesized
gaagttaccgagagctatgatc

SEQ ID NO: 13751 - DNA, 22 bp, Artificial Sequence
  chemically synthesized
aagttaccgagagctatgatcc

SEQ ID NO: 13752 - DNA, 22 bp, Artificial Sequence
  chemically synthesized
ccgagagctatgatcctgccag

SEQ ID NO: 13753 - DNA, 22 bp, Artificial Sequence
  chemically synthesized
tgatcctgccagtgcattccag

SEQ ID NO: 13754 - DNA, 22 bp, Artificial Sequence
  chemically synthesized
ccagtgcattccagcctggatg

SEQ ID NO: 13755 - DNA, 22 bp, Artificial Sequence
  chemically synthesized
cagcctggatgacaaaacgaga

SEQ ID NO: 13756 - DNA, 22 bp, Artificial Sequence
  chemically synthesized
gatgacaaaacgagaccctgtc

SEQ ID NO: 13757 - DNA, 22 bp, Artificial Sequence
  chemically synthesized
tctctaaaaaacaagaagtgag

SEQ ID NO: 13758 - DNA, 22 bp, Artificial Sequence
  chemically synthesized
taaaaaacaagaagtgagggct

SEQ ID NO: 13759 - DNA, 22 bp, Artificial Sequence
  chemically synthesized
aaaaacaagaagtgagggcttt

SEQ ID NO: 13760 - DNA, 22 bp, Artificial Sequence
  chemically synthesized
tatgattgtagaattttcacta

SEQ ID NO: 13761 - DNA, 22 bp, Artificial Sequence
  chemically synthesized
atgattgtagaattttcactac

SEQ ID NO: 13762 - DNA, 22 bp, Artificial Sequence
  chemically synthesized
tgattgtagaattttcactaca

SEQ ID NO: 13763 - DNA, 22 bp, Artificial Sequence
  chemically synthesized
tagaattttcactacaatagca

SEQ ID NO: 13764 - DNA, 22 bp, Artificial Sequence
  chemically synthesized
tcactacaatagcagtggacca

SEQ ID NO: 13765 - DNA, 22 bp, Artificial Sequence
  chemically synthesized
cactacaatagcagtggaccaa

SEQ ID NO: 13766 - DNA, 22 bp, Artificial Sequence
  chemically synthesized
actacaatagcagtggaccaac

SEQ ID NO: 13767 - DNA, 22 bp, Artificial Sequence
  chemically synthesized
caatagcagtggaccaaccacc

SEQ ID NO: 13768 - DNA, 22 bp, Artificial Sequence
  chemically synthesized
tctaaataccaatcagggaaga

SEQ ID NO: 13769 - DNA, 22 bp, Artificial Sequence
  chemically synthesized
ctaaataccaatcagggaagag

SEQ ID NO: 13770 - DNA, 22 bp, Artificial Sequence
  chemically synthesized
taaataccaatcagggaagaga

SEQ ID NO: 13771 - DNA, 22 bp, Artificial Sequence
  chemically synthesized
aataccaatcagggaagagatg

SEQ ID NO: 13772 - DNA, 22 bp, Artificial Sequence
  chemically synthesized
attttttaacagacgtttaaag

SEQ ID NO: 13773 - DNA, 22 bp, Artificial Sequence
  chemically synthesized
tttaacagacgtttaaagaaaa

SEQ ID NO: 13774 - DNA, 22 bp, Artificial Sequence
  chemically synthesized
ttaacagacgtttaaagaaaaa

SEQ ID NO: 13775 - DNA, 22 bp, Artificial Sequence
  chemically synthesized
taacagacgtttaaagaaaaag

SEQ ID NO: 13776 - DNA, 22 bp, Artificial Sequence
  chemically synthesized
aacagacgtttaaagaaaaagc

SEQ ID NO: 13777 - DNA, 22 bp, Artificial Sequence
  chemically synthesized
acagacgtttaaagaaaaagca

SEQ ID NO: 13778 - DNA, 22 bp, Artificial Sequence
  chemically synthesized
aaagaaaaagcaaaacctcaaa

SEQ ID NO: 13779 - DNA, 22 bp, Artificial Sequence
  chemically synthesized
aagaaaaagcaaaacctcaaac

SEQ ID NO: 13780 - DNA, 22 bp, Artificial Sequence
  chemically synthesized
aaacttagcactctactaacag

SEQ ID NO: 13781 - DNA, 22 bp, Artificial Sequence
  chemically synthesized
agcactctactaacagttttag

SEQ ID NO: 13782 - DNA, 22 bp, Artificial Sequence
  chemically synthesized
gcactctactaacagttttagc

SEQ ID NO: 13783 - DNA, 22 bp, Artificial Sequence
  chemically synthesized
tactaacagttttagcagatgt

SEQ ID NO: 13784 - DNA, 22 bp, Artificial Sequence
  chemically synthesized
ctaacagttttagcagatgtta

SEQ ID NO: 13785 - DNA, 22 bp, Artificial Sequence
  chemically synthesized
acagttttagcagatgttaatt

SEQ ID NO: 13786 - DNA, 22 bp, Artificial Sequence
  chemically synthesized
tagcagatgttaattaatgtaa

SEQ ID NO: 13787 - DNA, 22 bp, Artificial Sequence
  chemically synthesized
agcagatgttaattaatgtaat

SEQ ID NO: 13788 - DNA, 22 bp, Artificial Sequence
  chemically synthesized
gcagatgttaattaatgtaatc

SEQ ID NO: 13789 - DNA, 22 bp, Artificial Sequence
  chemically synthesized
attaatgtaatcatgtctgcat

SEQ ID NO: 13790 - DNA, 22 bp, Artificial Sequence
  chemically synthesized
atgtaatcatgtctgcatgtat

SEQ ID NO: 13791 - DNA, 22 bp, Artificial Sequence
  chemically synthesized
catgtatgggattatttccaga

SEQ ID NO: 13792 - DNA, 22 bp, Artificial Sequence
  chemically synthesized
tttccagaaagtgtattgggaa

SEQ ID NO: 13793 - DNA, 22 bp, Artificial Sequence
  chemically synthesized
ccagaaagtgtattgggaaacc

SEQ ID NO: 13794 - DNA, 22 bp, Artificial Sequence
  chemically synthesized
cagaaagtgtattgggaaacct

SEQ ID NO: 13795 - DNA, 22 bp, Artificial Sequence
  chemically synthesized
ggaaacctctcatgaaccctgt

SEQ ID NO: 13796 - DNA, 22 bp, Artificial Sequence
  chemically synthesized
tcatgaaccctgtgagcaagcc

SEQ ID NO: 13797 - DNA, 22 bp, Artificial Sequence
  chemically synthesized
atgaaccctgtgagcaagccac

SEQ ID NO: 13798 - DNA, 22 bp, Artificial Sequence
  chemically synthesized
tgagcaagccaccgtctcactc

SEQ ID NO: 13799 - DNA, 22 bp, Artificial Sequence
  chemically synthesized
actcaatttgaatcttggcttc

SEQ ID NO: 13800 - DNA, 22 bp, Artificial Sequence
  chemically synthesized
aatttgaatcttggcttccctc

SEQ ID NO: 13801 - DNA, 22 bp, Artificial Sequence
  chemically synthesized
gaatcttggcttccctcaaaag

SEQ ID NO: 13802 - DNA, 22 bp, Artificial Sequence
  chemically synthesized
aatcttggcttccctcaaaaga

SEQ ID NO: 13803 - DNA, 22 bp, Artificial Sequence
  chemically synthesized
ggcttccctcaaaagactggct

SEQ ID NO: 13804 - DNA, 22 bp, Artificial Sequence
  chemically synthesized
gcttccctcaaaagactggcta

SEQ ID NO: 13805 - DNA, 22 bp, Artificial Sequence
  chemically synthesized
ccctcaaaagactggctaatgt

SEQ ID NO: 13806 - DNA, 22 bp, Artificial Sequence
  chemically synthesized
cctcaaaagactggctaatgtt

SEQ ID NO: 13807 - DNA, 22 bp, Artificial Sequence
  chemically synthesized
aaaagactggctaatgtttggt

SEQ ID NO: 13808 - DNA, 22 bp, Artificial Sequence
  chemically synthesized
gctaatgtttggtaactctctg

SEQ ID NO: 13809 - DNA, 22 bp, Artificial Sequence
  chemically synthesized
atgtttggtaactctctggagt

SEQ ID NO: 13810 - DNA, 22 bp, Artificial Sequence
  chemically synthesized
ggtaactctctggagtagacag

SEQ ID NO: 13811 - DNA, 22 bp, Artificial Sequence
  chemically synthesized
gtaactctctggagtagacagc

SEQ ID NO: 13812 - DNA, 22 bp, Artificial Sequence
  chemically synthesized
tctggagtagacagcactacat

SEQ ID NO: 13813 - DNA, 22 bp, Artificial Sequence
  chemically synthesized
tggagtagacagcactacatgt

SEQ ID NO: 13814 - DNA, 22 bp, Artificial Sequence
  chemically synthesized
gagtagacagcactacatgtac

SEQ ID NO: 13815 - DNA, 22 bp, Artificial Sequence
  chemically synthesized
catgtacgtaagataggtacat

SEQ ID NO: 13816 - DNA, 22 bp, Artificial Sequence
  chemically synthesized
ttggttttgagctgattttttt

SEQ ID NO: 13817 - DNA, 22 bp, Artificial Sequence
  chemically synthesized
gttttgagctgatttttttcag

SEQ ID NO: 13818 - DNA, 22 bp, Artificial Sequence
  chemically synthesized
tgagctgatttttttcagctgc

SEQ ID NO: 13819 - DNA, 22 bp, Artificial Sequence
  chemically synthesized
gagctgatttttttcagctgca

SEQ ID NO: 13820 - DNA, 22 bp, Artificial Sequence
  chemically synthesized
agctgatttttttcagctgcat

SEQ ID NO: 13821 - DNA, 22 bp, Artificial Sequence
  chemically synthesized
atttttttcagctgcatttgca

SEQ ID NO: 13822 - DNA, 22 bp, Artificial Sequence
  chemically synthesized
ttttcagctgcatttgcatgta

SEQ ID NO: 13823 - DNA, 22 bp, Artificial Sequence
  chemically synthesized
tttcagctgcatttgcatgtat

SEQ ID NO: 13824 - DNA, 22 bp, Artificial Sequence
  chemically synthesized
ttcagctgcatttgcatgtatg

SEQ ID NO: 13825 - DNA, 22 bp, Artificial Sequence
  chemically synthesized
tcagctgcatttgcatgtatgg

SEQ ID NO: 13826 - DNA, 22 bp, Artificial Sequence
  chemically synthesized
cagctgcatttgcatgtatgga

SEQ ID NO: 13827 - DNA, 22 bp, Artificial Sequence
  chemically synthesized
agctgcatttgcatgtatggat

SEQ ID NO: 13828 - DNA, 22 bp, Artificial Sequence
  chemically synthesized
catttgcatgtatggatttttc

SEQ ID NO: 13829 - DNA, 22 bp, Artificial Sequence
  chemically synthesized
gcatgtatggatttttctcacc

SEQ ID NO: 13830 - DNA, 22 bp, Artificial Sequence
  chemically synthesized
catgtatggatttttctcacca

SEQ ID NO: 13831 - DNA, 22 bp, Artificial Sequence
  chemically synthesized
ttctcaccaaagacgatgactt

SEQ ID NO: 13832 - DNA, 22 bp, Artificial Sequence
  chemically synthesized
tctcaccaaagacgatgacttc

SEQ ID NO: 13833 - DNA, 22 bp, Artificial Sequence
  chemically synthesized
ctcaccaaagacgatgacttca

SEQ ID NO: 13834 - DNA, 22 bp, Artificial Sequence
  chemically synthesized
tcaccaaagacgatgacttcaa

SEQ ID NO: 13835 - DNA, 22 bp, Artificial Sequence
  chemically synthesized
accaaagacgatgacttcaagt

SEQ ID NO: 13836 - DNA, 22 bp, Artificial Sequence
  chemically synthesized
caagtattagtaaaataattgt

SEQ ID NO: 13837 - DNA, 22 bp, Artificial Sequence
  chemically synthesized
aagtattagtaaaataattgta

SEQ ID NO: 13838 - DNA, 22 bp, Artificial Sequence
  chemically synthesized
gtaaaataattgtacagctctc

SEQ ID NO: 13839 - DNA, 22 bp, Artificial Sequence
  chemically synthesized
tacagctctcctgattatactt

SEQ ID NO: 13840 - DNA, 22 bp, Artificial Sequence
  chemically synthesized
tcctgattatacttctctgtga

SEQ ID NO: 13841 - DNA, 22 bp, Artificial Sequence
  chemically synthesized
ctgattatacttctctgtgaca

SEQ ID NO: 13842 - DNA, 22 bp, Artificial Sequence
  chemically synthesized
attatacttctctgtgacattt

SEQ ID NO: 13843 - DNA, 22 bp, Artificial Sequence
  chemically synthesized
tacttctctgtgacatttcatt

SEQ ID NO: 13844 - DNA, 22 bp, Artificial Sequence
  chemically synthesized
ctctgtgacatttcatttccca

SEQ ID NO: 13845 - DNA, 22 bp, Artificial Sequence
  chemically synthesized
tctgtgacatttcatttcccag

SEQ ID NO: 13846 - DNA, 22 bp, Artificial Sequence
  chemically synthesized
tgtgacatttcatttcccaggc

SEQ ID NO: 13847 - DNA, 22 bp, Artificial Sequence
  chemically synthesized
tgacatttcatttcccaggcta

SEQ ID NO: 13848 - DNA, 22 bp, Artificial Sequence
  chemically synthesized
catttcccaggctatttctttt

SEQ ID NO: 13849 - DNA, 22 bp, Artificial Sequence
  chemically synthesized
atttcccaggctatttcttttg

SEQ ID NO: 13850 - DNA, 22 bp, Artificial Sequence
  chemically synthesized
cccaggctatttcttttggtag

SEQ ID NO: 13851 - DNA, 22 bp, Artificial Sequence
  chemically synthesized
ccaggctatttcttttggtagg

SEQ ID NO: 13852 - DNA, 22 bp, Artificial Sequence
  chemically synthesized
tttcttttggtaggatttaaaa

SEQ ID NO: 13853 - DNA, 22 bp, Artificial Sequence
  chemically synthesized
cttttggtaggatttaaaacta

SEQ ID NO: 13854 - DNA, 22 bp, Artificial Sequence
  chemically synthesized
ttttggtaggatttaaaactaa

SEQ ID NO: 13855 - DNA, 22 bp, Artificial Sequence
  chemically synthesized
ttggtaggatttaaaactaagc

SEQ ID NO: 13856 - DNA, 22 bp, Artificial Sequence
  chemically synthesized
tggtaggatttaaaactaagca

SEQ ID NO: 13857 - DNA, 22 bp, Artificial Sequence
  chemically synthesized
ggtaggatttaaaactaagcaa

SEQ ID NO: 13858 - DNA, 22 bp, Artificial Sequence
  chemically synthesized
gtaggatttaaaactaagcaat

SEQ ID NO: 13859 - DNA, 22 bp, Artificial Sequence
  chemically synthesized
aaaactaagcaattcagtatga

SEQ ID NO: 13860 - DNA, 22 bp, Artificial Sequence
  chemically synthesized
aaactaagcaattcagtatgat

SEQ ID NO: 13861 - DNA, 22 bp, Artificial Sequence
  chemically synthesized
agcaattcagtatgatctttgt

SEQ ID NO: 13862 - DNA, 22 bp, Artificial Sequence
  chemically synthesized
agtatgatctttgtccttcatt

SEQ ID NO: 13863 - DNA, 22 bp, Artificial Sequence
  chemically synthesized
tgtccttcattttctttcttat

SEQ ID NO: 13864 - DNA, 22 bp, Artificial Sequence
  chemically synthesized
gtccttcattttctttcttatt

SEQ ID NO: 13865 - DNA, 22 bp, Artificial Sequence
  chemically synthesized
tccttcattttctttcttattc

SEQ ID NO: 13866 - DNA, 22 bp, Artificial Sequence
  chemically synthesized
cattttctttcttattcttttt

SEQ ID NO: 13867 - DNA, 22 bp, Artificial Sequence
  chemically synthesized
attttctttcttattctttttg

SEQ ID NO: 13868 - DNA, 22 bp, Artificial Sequence
  chemically synthesized
tctttcttattctttttgtttg

SEQ ID NO: 13869 - DNA, 22 bp, Artificial Sequence
  chemically synthesized
ctttcttattctttttgtttgt

SEQ ID NO: 13870 - DNA, 22 bp, Artificial Sequence
  chemically synthesized
tttcttattctttttgtttgtt

SEQ ID NO: 13871 - DNA, 22 bp, Artificial Sequence
  chemically synthesized
tcttattctttttgtttgtttg

SEQ ID NO: 13872 - DNA, 22 bp, Artificial Sequence
  chemically synthesized
cttattctttttgtttgtttgt

SEQ ID NO: 13873 - DNA, 22 bp, Artificial Sequence
  chemically synthesized
ttattctttttgtttgtttgtt

SEQ ID NO: 13874 - DNA, 22 bp, Artificial Sequence
  chemically synthesized
attctttttgtttgtttgtttg

SEQ ID NO: 13875 - DNA, 22 bp, Artificial Sequence
  chemically synthesized
ttctttttgtttgtttgtttgt

SEQ ID NO: 13876 - DNA, 22 bp, Artificial Sequence
  chemically synthesized
tttttgtttgtttgtttgtttg

SEQ ID NO: 13877 - DNA, 22 bp, Artificial Sequence
  chemically synthesized
tttgtttgtttgtttgtttgtt

SEQ ID NO: 13878 - DNA, 22 bp, Artificial Sequence
  chemically synthesized
ttgtttgtttgtttgtttgttt

SEQ ID NO: 13879 - DNA, 22 bp, Artificial Sequence
  chemically synthesized
tgtttgtttgtttgtttgtttt

SEQ ID NO: 13880 - DNA, 22 bp, Artificial Sequence
  chemically synthesized
gtttgtttgtttgtttgttttt

SEQ ID NO: 13881 - DNA, 22 bp, Artificial Sequence
  chemically synthesized
tttgtttgtttgtttgtttttt

SEQ ID NO: 13882 - DNA, 22 bp, Artificial Sequence
  chemically synthesized
gtttgtttgtttgtttttttct

SEQ ID NO: 13883 - DNA, 22 bp, Artificial Sequence
  chemically synthesized
tttgtttgtttgtttttttctt

SEQ ID NO: 13884 - DNA, 22 bp, Artificial Sequence
  chemically synthesized
gtttgtttgtttttttcttgag

SEQ ID NO: 13885 - DNA, 22 bp, Artificial Sequence
  chemically synthesized
tttgtttgtttttttcttgagg

SEQ ID NO: 13886 - DNA, 22 bp, Artificial Sequence
  chemically synthesized
gtttgtttttttcttgaggcag

SEQ ID NO: 13887 - DNA, 22 bp, Artificial Sequence
  chemically synthesized
tttgtttttttcttgaggcaga

SEQ ID NO: 13888 - DNA, 22 bp, Artificial Sequence
  chemically synthesized
gtttttttcttgaggcagagtc

SEQ ID NO: 13889 - DNA, 22 bp, Artificial Sequence
  chemically synthesized
tttttttcttgaggcagagtct

SEQ ID NO: 13890 - DNA, 22 bp, Artificial Sequence
  chemically synthesized
ttttcttgaggcagagtctctc

SEQ ID NO: 13891 - DNA, 22 bp, Artificial Sequence
  chemically synthesized
tttcttgaggcagagtctctct

SEQ ID NO: 13892 - DNA, 22 bp, Artificial Sequence
  chemically synthesized
ttcttgaggcagagtctctctc

SEQ ID NO: 13893 - DNA, 22 bp, Artificial Sequence
  chemically synthesized
tcttgaggcagagtctctctct

SEQ ID NO: 13894 - DNA, 22 bp, Artificial Sequence
  chemically synthesized
cttgaggcagagtctctctctg

SEQ ID NO: 13895 - DNA, 22 bp, Artificial Sequence
  chemically synthesized
ttgaggcagagtctctctctgt

SEQ ID NO: 13896 - DNA, 22 bp, Artificial Sequence
  chemically synthesized
gaggcagagtctctctctgtcg

SEQ ID NO: 13897 - DNA, 22 bp, Artificial Sequence
  chemically synthesized
aggcagagtctctctctgtcgc

SEQ ID NO: 13898 - DNA, 22 bp, Artificial Sequence
  chemically synthesized
tctctgtcgcccaggctggagt

SEQ ID NO: 13899 - DNA, 22 bp, Artificial Sequence
  chemically synthesized
tctgtcgcccaggctggagtgc

SEQ ID NO: 13900 - DNA, 22 bp, Artificial Sequence
  chemically synthesized
tgtcgcccaggctggagtgcag

SEQ ID NO: 13901 - DNA, 22 bp, Artificial Sequence
  chemically synthesized
tcgcccaggctggagtgcagtg

SEQ ID NO: 13902 - DNA, 22 bp, Artificial Sequence
  chemically synthesized
gagtgcagtggcgccatctcag

SEQ ID NO: 13903 - DNA, 22 bp, Artificial Sequence
  chemically synthesized
agctcattgcaacctctgccac

SEQ ID NO: 13904 - DNA, 22 bp, Artificial Sequence
  chemically synthesized
attgcaacctctgccacctccg

SEQ ID NO: 13905 - DNA, 22 bp, Artificial Sequence
  chemically synthesized
caacctctgccacctccgggtt

SEQ ID NO: 13906 - DNA, 22 bp, Artificial Sequence
  chemically synthesized
tgccacctccgggttcaagaga

SEQ ID NO: 13907 - DNA, 22 bp, Artificial Sequence
  chemically synthesized
ccacctccgggttcaagagatt

SEQ ID NO: 13908 - DNA, 22 bp, Artificial Sequence
  chemically synthesized
cgggttcaagagattctcctgc

SEQ ID NO: 13909 - DNA, 22 bp, Artificial Sequence
  chemically synthesized
aagagattctcctgcctcagcc

SEQ ID NO: 13910 - DNA, 22 bp, Artificial Sequence
  chemically synthesized
tcctgcctcagcctcccgagta

SEQ ID NO: 13911 - DNA, 22 bp, Artificial Sequence
  chemically synthesized
ctgcctcagcctcccgagtagc

SEQ ID NO: 13912 - DNA, 22 bp, Artificial Sequence
  chemically synthesized
cctcagcctcccgagtagctgg

SEQ ID NO: 13913 - DNA, 22 bp, Artificial Sequence
  chemically synthesized
agcctcccgagtagctgggatt

SEQ ID NO: 13914 - DNA, 22 bp, Artificial Sequence
  chemically synthesized
ccgagtagctgggattacaggt

SEQ ID NO: 13915 - DNA, 22 bp, Artificial Sequence
  chemically synthesized
ggattacaggtgtccaccacca

SEQ ID NO: 13916 - DNA, 22 bp, Artificial Sequence
  chemically synthesized
caggtgtccaccaccacacccg

SEQ ID NO: 13917 - DNA, 22 bp, Artificial Sequence
  chemically synthesized
attttttgtatttttagtagag

SEQ ID NO: 13918 - DNA, 22 bp, Artificial Sequence
  chemically synthesized
tttgtatttttagtagaggtgg

SEQ ID NO: 13919 - DNA, 22 bp, Artificial Sequence
  chemically synthesized
ttgtatttttagtagaggtggg

SEQ ID NO: 13920 - DNA, 22 bp, Artificial Sequence
  chemically synthesized
tgtatttttagtagaggtgggg

SEQ ID NO: 13921 - DNA, 22 bp, Artificial Sequence
  chemically synthesized
gtatttttagtagaggtggggt

SEQ ID NO: 13922 - DNA, 22 bp, Artificial Sequence
  chemically synthesized
tatttttagtagaggtggggtt

SEQ ID NO: 13923 - DNA, 22 bp, Artificial Sequence
  chemically synthesized
ttagtagaggtggggtttcacc

SEQ ID NO: 13924 - DNA, 22 bp, Artificial Sequence
  chemically synthesized
tagtagaggtggggtttcacca

SEQ ID NO: 13925 - DNA, 22 bp, Artificial Sequence
  chemically synthesized
agtagaggtggggtttcaccat

SEQ ID NO: 13926 - DNA, 22 bp, Artificial Sequence
  chemically synthesized
gtagaggtggggtttcaccatg

SEQ ID NO: 13927 - DNA, 22 bp, Artificial Sequence
  chemically synthesized
caccatgttggccaggctggtc

SEQ ID NO: 13928 - DNA, 22 bp, Artificial Sequence
  chemically synthesized
accatgttggccaggctggtct

SEQ ID NO: 13929 - DNA, 22 bp, Artificial Sequence
  chemically synthesized
gccaggctggtcttgagctcct

SEQ ID NO: 13930 - DNA, 22 bp, Artificial Sequence
  chemically synthesized
gtcttgagctcctgacctcagg

SEQ ID NO: 13931 - DNA, 22 bp, Artificial Sequence
  chemically synthesized
gagctcctgacctcaggtgatc

SEQ ID NO: 13932 - DNA, 22 bp, Artificial Sequence
  chemically synthesized
agctcctgacctcaggtgatcc

SEQ ID NO: 13933 - DNA, 22 bp, Artificial Sequence
  chemically synthesized
ctgacctcaggtgatccacctg

SEQ ID NO: 13934 - DNA, 22 bp, Artificial Sequence
  chemically synthesized
acctcaggtgatccacctgcct

SEQ ID NO: 13935 - DNA, 22 bp, Artificial Sequence
  chemically synthesized
aggtgatccacctgcctcggcc

SEQ ID NO: 13936 - DNA, 22 bp, Artificial Sequence
  chemically synthesized
cctcggcctaccaaagagctgg

SEQ ID NO: 13937 - DNA, 22 bp, Artificial Sequence
  chemically synthesized
ggcctaccaaagagctgggata

SEQ ID NO: 13938 - DNA, 22 bp, Artificial Sequence
  chemically synthesized
ccaaagagctgggataacaggt

SEQ ID NO: 13939 - DNA, 22 bp, Artificial Sequence
  chemically synthesized
ggataacaggtgtgacccacca

SEQ ID NO: 13940 - DNA, 22 bp, Artificial Sequence
  chemically synthesized
tttttttcttattctgttagga

SEQ ID NO: 13941 - DNA, 22 bp, Artificial Sequence
  chemically synthesized
ttttttcttattctgttaggag

SEQ ID NO: 13942 - DNA, 22 bp, Artificial Sequence
  chemically synthesized
tttttcttattctgttaggagt

SEQ ID NO: 13943 - DNA, 22 bp, Artificial Sequence
  chemically synthesized
ttttcttattctgttaggagtg

SEQ ID NO: 13944 - DNA, 22 bp, Artificial Sequence
  chemically synthesized
tttcttattctgttaggagtga

SEQ ID NO: 13945 - DNA, 22 bp, Artificial Sequence
  chemically synthesized
ttcttattctgttaggagtgag

SEQ ID NO: 13946 - DNA, 22 bp, Artificial Sequence
  chemically synthesized
tcttattctgttaggagtgaga

SEQ ID NO: 13947 - DNA, 22 bp, Artificial Sequence
  chemically synthesized
cttattctgttaggagtgagag

SEQ ID NO: 13948 - DNA, 22 bp, Artificial Sequence
  chemically synthesized
ttattctgttaggagtgagagt

SEQ ID NO: 13949 - DNA, 22 bp, Artificial Sequence
  chemically synthesized
attctgttaggagtgagagtgt

SEQ ID NO: 13950 - DNA, 22 bp, Artificial Sequence
  chemically synthesized
ttctgttaggagtgagagtgta

SEQ ID NO: 13951 - DNA, 22 bp, Artificial Sequence
  chemically synthesized
tgttaggagtgagagtgtaact

SEQ ID NO: 13952 - DNA, 22 bp, Artificial Sequence
  chemically synthesized
ttaggagtgagagtgtaactag

SEQ ID NO: 13953 - DNA, 22 bp, Artificial Sequence
  chemically synthesized
ggagtgagagtgtaactagcag

SEQ ID NO: 13954 - DNA, 22 bp, Artificial Sequence
  chemically synthesized
gcagtataatagttcaattttc

SEQ ID NO: 13955 - DNA, 22 bp, Artificial Sequence
  chemically synthesized
aattttcacaacgtggtaaaag

SEQ ID NO: 13956 - DNA, 22 bp, Artificial Sequence
  chemically synthesized
tcacaacgtggtaaaagtttcc

SEQ ID NO: 13957 - DNA, 22 bp, Artificial Sequence
  chemically synthesized
cacaacgtggtaaaagtttccc

SEQ ID NO: 13958 - DNA, 22 bp, Artificial Sequence
  chemically synthesized
acaacgtggtaaaagtttccct

SEQ ID NO: 13959 - DNA, 22 bp, Artificial Sequence
  chemically synthesized
ccctataattcaatcagatttt

SEQ ID NO: 13960 - DNA, 22 bp, Artificial Sequence
  chemically synthesized
cctataattcaatcagattttg

SEQ ID NO: 13961 - DNA, 22 bp, Artificial Sequence
  chemically synthesized
taattcaatcagattttgctcc

SEQ ID NO: 13962 - DNA, 22 bp, Artificial Sequence
  chemically synthesized
aatcagattttgctccagggtt

SEQ ID NO: 13963 - DNA, 22 bp, Artificial Sequence
  chemically synthesized
tgctccagggttcagttctgtt

SEQ ID NO: 13964 - DNA, 22 bp, Artificial Sequence
  chemically synthesized
gctccagggttcagttctgttt

SEQ ID NO: 13965 - DNA, 22 bp, Artificial Sequence
  chemically synthesized
ctccagggttcagttctgtttt

SEQ ID NO: 13966 - DNA, 22 bp, Artificial Sequence
  chemically synthesized
cagggttcagttctgttttagg

SEQ ID NO: 13967 - DNA, 22 bp, Artificial Sequence
  chemically synthesized
agttctgttttaggaaatactt

SEQ ID NO: 13968 - DNA, 22 bp, Artificial Sequence
  chemically synthesized
tgttttaggaaatacttttatt

SEQ ID NO: 13969 - DNA, 22 bp, Artificial Sequence
  chemically synthesized
ttttaggaaatacttttatttt

SEQ ID NO: 13970 - DNA, 22 bp, Artificial Sequence
  chemically synthesized
taggaaatacttttattttcag

SEQ ID NO: 13971 - DNA, 22 bp, Artificial Sequence
  chemically synthesized
aggaaatacttttattttcagt

SEQ ID NO: 13972 - DNA, 22 bp, Artificial Sequence
  chemically synthesized
ggaaatacttttattttcagtt

SEQ ID NO: 13973 - DNA, 22 bp, Artificial Sequence
  chemically synthesized
ttattttcagtttaatgatgaa

SEQ ID NO: 13974 - DNA, 22 bp, Artificial Sequence
  chemically synthesized
tattttcagtttaatgatgaaa

SEQ ID NO: 13975 - DNA, 22 bp, Artificial Sequence
  chemically synthesized
attttcagtttaatgatgaaat

SEQ ID NO: 13976 - DNA, 22 bp, Artificial Sequence
  chemically synthesized
ttttcagtttaatgatgaaata

SEQ ID NO: 13977 - DNA, 22 bp, Artificial Sequence
  chemically synthesized
tcagtttaatgatgaaatatta

SEQ ID NO: 13978 - DNA, 22 bp, Artificial Sequence
  chemically synthesized
cagtttaatgatgaaatattag

SEQ ID NO: 13979 - DNA, 22 bp, Artificial Sequence
  chemically synthesized
agtttaatgatgaaatattaga

SEQ ID NO: 13980 - DNA, 22 bp, Artificial Sequence
  chemically synthesized
aatgatgaaatattagagttgt

SEQ ID NO: 13981 - DNA, 22 bp, Artificial Sequence
  chemically synthesized
atgatgaaatattagagttgta

SEQ ID NO: 13982 - DNA, 22 bp, Artificial Sequence
  chemically synthesized
gagttgtaatattgcctttatg

SEQ ID NO: 13983 - DNA, 22 bp, Artificial Sequence
  chemically synthesized
taatattgcctttatgattatc

SEQ ID NO: 13984 - DNA, 22 bp, Artificial Sequence
  chemically synthesized
cctttatgattatccacctttt

SEQ ID NO: 13985 - DNA, 22 bp, Artificial Sequence
  chemically synthesized
tatgattatccacctttttaac

SEQ ID NO: 13986 - DNA, 22 bp, Artificial Sequence
  chemically synthesized
atgattatccacctttttaacc

SEQ ID NO: 13987 - DNA, 22 bp, Artificial Sequence
  chemically synthesized
tgattatccacctttttaacct

SEQ ID NO: 13988 - DNA, 22 bp, Artificial Sequence
  chemically synthesized
tccacctttttaacctaaaaga

SEQ ID NO: 13989 - DNA, 22 bp, Artificial Sequence
  chemically synthesized
tttaacctaaaagaatgaaaga

SEQ ID NO: 13990 - DNA, 22 bp, Artificial Sequence
  chemically synthesized
ttaacctaaaagaatgaaagaa

SEQ ID NO: 13991 - DNA, 22 bp, Artificial Sequence
  chemically synthesized
taacctaaaagaatgaaagaaa

SEQ ID NO: 13992 - DNA, 22 bp, Artificial Sequence
  chemically synthesized
aacctaaaagaatgaaagaaaa

SEQ ID NO: 13993 - DNA, 22 bp, Artificial Sequence
  chemically synthesized
acctaaaagaatgaaagaaaaa

SEQ ID NO: 13994 - DNA, 22 bp, Artificial Sequence
  chemically synthesized
aaagaatgaaagaaaaatatgt

SEQ ID NO: 13995 - DNA, 22 bp, Artificial Sequence
  chemically synthesized
gcaatataattttatggttgta

SEQ ID NO: 13996 - DNA, 22 bp, Artificial Sequence
  chemically synthesized
caatataattttatggttgtat

SEQ ID NO: 13997 - DNA, 22 bp, Artificial Sequence
  chemically synthesized
tatggttgtatgttaacttaat

SEQ ID NO: 13998 - DNA, 22 bp, Artificial Sequence
  chemically synthesized
atggttgtatgttaacttaatt

SEQ ID NO: 13999 - DNA, 22 bp, Artificial Sequence
  chemically synthesized
tggttgtatgttaacttaattc

SEQ ID NO: 14000 - DNA, 22 bp, Artificial Sequence
  chemically synthesized
tatgttaacttaattcattatg

SEQ ID NO: 14001 - DNA, 22 bp, Artificial Sequence
  chemically synthesized
acttaattcattatgttggcct

SEQ ID NO: 14002 - DNA, 22 bp, Artificial Sequence
  chemically synthesized
aattcattatgttggcctccag

SEQ ID NO: 14003 - DNA, 22 bp, Artificial Sequence
  chemically synthesized
attcattatgttggcctccagt

SEQ ID NO: 14004 - DNA, 22 bp, Artificial Sequence
  chemically synthesized
attatgttggcctccagtttgc

SEQ ID NO: 14005 - DNA, 22 bp, Artificial Sequence
  chemically synthesized
tgttggcctccagtttgctgtt

SEQ ID NO: 14006 - DNA, 22 bp, Artificial Sequence
  chemically synthesized
gcctccagtttgctgttgttag

SEQ ID NO: 14007 - DNA, 22 bp, Artificial Sequence
  chemically synthesized
cagtttgctgttgttagttatg

SEQ ID NO: 14008 - DNA, 22 bp, Artificial Sequence
  chemically synthesized
gctgttgttagttatgacagca

SEQ ID NO: 14009 - DNA, 22 bp, Artificial Sequence
  chemically synthesized
ctgttgttagttatgacagcag

SEQ ID NO: 14010 - DNA, 22 bp, Artificial Sequence
  chemically synthesized
ttgttagttatgacagcagtag

SEQ ID NO: 14011 - DNA, 22 bp, Artificial Sequence
  chemically synthesized
ttagttatgacagcagtagtgt

SEQ ID NO: 14012 - DNA, 22 bp, Artificial Sequence
  chemically synthesized
gttatgacagcagtagtgtcat

SEQ ID NO: 14013 - DNA, 22 bp, Artificial Sequence
  chemically synthesized
tgacagcagtagtgtcattacc

SEQ ID NO: 14014 - DNA, 22 bp, Artificial Sequence
  chemically synthesized
ccatttcaattcagattacatt

SEQ ID NO: 14015 - DNA, 22 bp, Artificial Sequence
  chemically synthesized
caattcagattacattcctata

SEQ ID NO: 14016 - DNA, 22 bp, Artificial Sequence
  chemically synthesized
aattcagattacattcctatat

SEQ ID NO: 14017 - DNA, 22 bp, Artificial Sequence
  chemically synthesized
agattacattcctatatttgat

SEQ ID NO: 14018 - DNA, 22 bp, Artificial Sequence
  chemically synthesized
cattcctatatttgatcattgt

SEQ ID NO: 14019 - DNA, 22 bp, Artificial Sequence
  chemically synthesized
ctatatttgatcattgtaaact

SEQ ID NO: 14020 - DNA, 22 bp, Artificial Sequence
  chemically synthesized
tatttgatcattgtaaactgac

SEQ ID NO: 14021 - DNA, 22 bp, Artificial Sequence
  chemically synthesized
gatcattgtaaactgactgctt

SEQ ID NO: 14022 - DNA, 22 bp, Artificial Sequence
  chemically synthesized
atcattgtaaactgactgctta

SEQ ID NO: 14023 - DNA, 22 bp, Artificial Sequence
  chemically synthesized
taaactgactgcttacattgta

SEQ ID NO: 14024 - DNA, 22 bp, Artificial Sequence
  chemically synthesized
actgcttacattgtattaaaaa

SEQ ID NO: 14025 - DNA, 22 bp, Artificial Sequence
  chemically synthesized
cttacattgtattaaaaacagt

SEQ ID NO: 14026 - DNA, 22 bp, Artificial Sequence
  chemically synthesized
acattgtattaaaaacagtgga

SEQ ID NO: 14027 - DNA, 22 bp, Artificial Sequence
  chemically synthesized
cattgtattaaaaacagtggat

SEQ ID NO: 14028 - DNA, 22 bp, Artificial Sequence
  chemically synthesized
tattaaaaacagtggatatttt

SEQ ID NO: 14029 - DNA, 22 bp, Artificial Sequence
  chemically synthesized
aaaacagtggatattttaaaga

SEQ ID NO: 14030 - DNA, 22 bp, Artificial Sequence
  chemically synthesized
taaagaagctgtacggcttata

SEQ ID NO: 14031 - DNA, 22 bp, Artificial Sequence
  chemically synthesized
aaagaagctgtacggcttatat

SEQ ID NO: 14032 - DNA, 22 bp, Artificial Sequence
  chemically synthesized
aagaagctgtacggcttatatc

SEQ ID NO: 14033 - DNA, 22 bp, Artificial Sequence
  chemically synthesized
tacggcttatatctagtgctgt

SEQ ID NO: 14034 - DNA, 22 bp, Artificial Sequence
  chemically synthesized
atatctagtgctgtctcttaag

SEQ ID NO: 14035 - DNA, 22 bp, Artificial Sequence
  chemically synthesized
tatctagtgctgtctcttaaga

SEQ ID NO: 14036 - DNA, 22 bp, Artificial Sequence
  chemically synthesized
gtgctgtctcttaagactatta

SEQ ID NO: 14037 - DNA, 22 bp, Artificial Sequence
  chemically synthesized
tctcttaagactattaaattga

SEQ ID NO: 14038 - DNA, 22 bp, Artificial Sequence
  chemically synthesized
ttaagactattaaattgataca

SEQ ID NO: 14039 - DNA, 22 bp, Artificial Sequence
  chemically synthesized
aagactattaaattgatacaac

SEQ ID NO: 14040 - DNA, 22 bp, Artificial Sequence
  chemically synthesized
agactattaaattgatacaaca

SEQ ID NO: 14041 - DNA, 22 bp, Artificial Sequence
  chemically synthesized
ttaaattgatacaacatattta

SEQ ID NO: 14042 - DNA, 22 bp, Artificial Sequence
  chemically synthesized
aattgatacaacatatttaaaa

SEQ ID NO: 14043 - DNA, 22 bp, Artificial Sequence
  chemically synthesized
atacaacatatttaaaagtaaa

SEQ ID NO: 14044 - DNA, 22 bp, Artificial Sequence
  chemically synthesized
aaaagtaaatattacctaaatg

SEQ ID NO: 14045 - DNA, 22 bp, Artificial Sequence
  chemically synthesized
aaagtaaatattacctaaatga

SEQ ID NO: 14046 - DNA, 22 bp, Artificial Sequence
  chemically synthesized
cctaaatgaatttttgaaatta

SEQ ID NO: 14047 - DNA, 22 bp, Artificial Sequence
  chemically synthesized
aatgaatttttgaaattacaaa

SEQ ID NO: 14048 - DNA, 22 bp, Artificial Sequence
  chemically synthesized
ttgaaattacaaatacacgtgt

SEQ ID NO: 14049 - DNA, 22 bp, Artificial Sequence
  chemically synthesized
tgaaattacaaatacacgtgtt

SEQ ID NO: 14050 - DNA, 22 bp, Artificial Sequence
  chemically synthesized
gaaattacaaatacacgtgtta

SEQ ID NO: 14051 - DNA, 22 bp, Artificial Sequence
  chemically synthesized
aaattacaaatacacgtgttaa

SEQ ID NO: 14052 - DNA, 22 bp, Artificial Sequence
  chemically synthesized
caaatacacgtgttaaaactgt

SEQ ID NO: 14053 - DNA, 22 bp, Artificial Sequence
  chemically synthesized
aaactgtcgttgtgttcaacca

SEQ ID NO: 14054 - DNA, 22 bp, Artificial Sequence
  chemically synthesized
tcgttgtgttcaaccatttctg

SEQ ID NO: 14055 - DNA, 22 bp, Artificial Sequence
  chemically synthesized
tgttcaaccatttctgtacata

SEQ ID NO: 14056 - DNA, 22 bp, Artificial Sequence
  chemically synthesized
aaccatttctgtacatacttag

SEQ ID NO: 14057 - DNA, 22 bp, Artificial Sequence
  chemically synthesized
ctgtacatacttagagttaact

SEQ ID NO: 14058 - DNA, 22 bp, Artificial Sequence
  chemically synthesized
tgtacatacttagagttaactg

SEQ ID NO: 14059 - DNA, 22 bp, Artificial Sequence
  chemically synthesized
tacatacttagagttaactgtt

SEQ ID NO: 14060 - DNA, 22 bp, Artificial Sequence
  chemically synthesized
agagttaactgttttgccaggc

SEQ ID NO: 14061 - DNA, 22 bp, Artificial Sequence
  chemically synthesized
gagttaactgttttgccaggct

SEQ ID NO: 14062 - DNA, 22 bp, Artificial Sequence
  chemically synthesized
actgttttgccaggctctgtat

SEQ ID NO: 14063 - DNA, 22 bp, Artificial Sequence
  chemically synthesized
ttttgccaggctctgtatgcct

SEQ ID NO: 14064 - DNA, 22 bp, Artificial Sequence
  chemically synthesized
tgccaggctctgtatgcctact

SEQ ID NO: 14065 - DNA, 22 bp, Artificial Sequence
  chemically synthesized
gccaggctctgtatgcctactc

SEQ ID NO: 14066 - DNA, 22 bp, Artificial Sequence
  chemically synthesized
ccaggctctgtatgcctactca

SEQ ID NO: 14067 - DNA, 22 bp, Artificial Sequence
  chemically synthesized
tgtatgcctactcataatatga

SEQ ID NO: 14068 - DNA, 22 bp, Artificial Sequence
  chemically synthesized
tatgcctactcataatatgata

SEQ ID NO: 14069 - DNA, 22 bp, Artificial Sequence
  chemically synthesized
ctcataatatgataaaagcact

SEQ ID NO: 14070 - DNA, 22 bp, Artificial Sequence
  chemically synthesized
ataatatgataaaagcactcat

SEQ ID NO: 14071 - DNA, 22 bp, Artificial Sequence
  chemically synthesized
atctaatgctctgtaaatagaa

SEQ ID NO: 14072 - DNA, 22 bp, Artificial Sequence
  chemically synthesized
atgctctgtaaatagaagtcag

SEQ ID NO: 14073 - DNA, 22 bp, Artificial Sequence
  chemically synthesized
tgtaaatagaagtcagtgcttt

SEQ ID NO: 14074 - DNA, 22 bp, Artificial Sequence
  chemically synthesized
taaatagaagtcagtgctttcc

SEQ ID NO: 14075 - DNA, 22 bp, Artificial Sequence
  chemically synthesized
tccatcagactgaactctcttg

SEQ ID NO: 14076 - DNA, 22 bp, Artificial Sequence
  chemically synthesized
ccatcagactgaactctcttga

SEQ ID NO: 14077 - DNA, 22 bp, Artificial Sequence
  chemically synthesized
catcagactgaactctcttgac

SEQ ID NO: 14078 - DNA, 22 bp, Artificial Sequence
  chemically synthesized
aactctcttgacaagatgtgga

SEQ ID NO: 14079 - DNA, 22 bp, Artificial Sequence
  chemically synthesized
tcttgacaagatgtggatgaaa

SEQ ID NO: 14080 - DNA, 22 bp, Artificial Sequence
  chemically synthesized
ttgacaagatgtggatgaaatt

SEQ ID NO: 14081 - DNA, 22 bp, Artificial Sequence
  chemically synthesized
gacaagatgtggatgaaattct

SEQ ID NO: 14082 - DNA, 22 bp, Artificial Sequence
  chemically synthesized
acaagatgtggatgaaattctt

SEQ ID NO: 14083 - DNA, 22 bp, Artificial Sequence
  chemically synthesized
tttaagtaaaattgtttacttt

SEQ ID NO: 14084 - DNA, 22 bp, Artificial Sequence
  chemically synthesized
taagtaaaattgtttactttgt

SEQ ID NO: 14085 - DNA, 22 bp, Artificial Sequence
  chemically synthesized
aagtaaaattgtttactttgtc

SEQ ID NO: 14086 - DNA, 22 bp, Artificial Sequence
  chemically synthesized
agtaaaattgtttactttgtca

SEQ ID NO: 14087 - DNA, 22 bp, Artificial Sequence
  chemically synthesized
tttactttgtcatacatttaca

SEQ ID NO: 14088 - DNA, 22 bp, Artificial Sequence
  chemically synthesized
actttgtcatacatttacagat

SEQ ID NO: 14089 - DNA, 22 bp, Artificial Sequence
  chemically synthesized
ctttgtcatacatttacagatc

SEQ ID NO: 14090 - DNA, 22 bp, Artificial Sequence
  chemically synthesized
tgtcatacatttacagatcaaa

SEQ ID NO: 14091 - DNA, 22 bp, Artificial Sequence
  chemically synthesized
gtcatacatttacagatcaaat

SEQ ID NO: 14092 - DNA, 22 bp, Artificial Sequence
  chemically synthesized
tcatacatttacagatcaaatg

SEQ ID NO: 14093 - DNA, 22 bp, Artificial Sequence
  chemically synthesized
acagatcaaatgttagctccca

SEQ ID NO: 14094 - DNA, 22 bp, Artificial Sequence
  chemically synthesized
cagatcaaatgttagctcccaa

SEQ ID NO: 14095 - DNA, 22 bp, Artificial Sequence
  chemically synthesized
gctcccaaagcaatcatatggc

SEQ ID NO: 14096 - DNA, 22 bp, Artificial Sequence
  chemically synthesized
ccaaagcaatcatatggcaaag

SEQ ID NO: 14097 - DNA, 22 bp, Artificial Sequence
  chemically synthesized
gcctattagctgctttgtattg

SEQ ID NO: 14098 - DNA, 22 bp, Artificial Sequence
  chemically synthesized
cctattagctgctttgtattgc

SEQ ID NO: 14099 - DNA, 22 bp, Artificial Sequence
  chemically synthesized
ttagctgctttgtattgctatt

SEQ ID NO: 14100 - DNA, 22 bp, Artificial Sequence
  chemically synthesized
gctgctttgtattgctattatt

SEQ ID NO: 14101 - DNA, 22 bp, Artificial Sequence
  chemically synthesized
ctttgtattgctattattataa

SEQ ID NO: 14102 - DNA, 22 bp, Artificial Sequence
  chemically synthesized
tgtattgctattattataaata

SEQ ID NO: 14103 - DNA, 22 bp, Artificial Sequence
  chemically synthesized
gtattgctattattataaatag

SEQ ID NO: 14104 - DNA, 22 bp, Artificial Sequence
  chemically synthesized
tattgctattattataaataga

SEQ ID NO: 14105 - DNA, 22 bp, Artificial Sequence
  chemically synthesized
ctattattataaatagacttca

SEQ ID NO: 14106 - DNA, 22 bp, Artificial Sequence
  chemically synthesized
ttattataaatagacttcacag

SEQ ID NO: 14107 - DNA, 22 bp, Artificial Sequence
  chemically synthesized
ttataaatagacttcacagttt

SEQ ID NO: 14108 - DNA, 22 bp, Artificial Sequence
  chemically synthesized
taaatagacttcacagttttag

SEQ ID NO: 14109 - DNA, 22 bp, Artificial Sequence
  chemically synthesized
cacagttttagacttgcttagg

SEQ ID NO: 14110 - DNA, 22 bp, Artificial Sequence
  chemically synthesized
acagttttagacttgcttaggt

SEQ ID NO: 14111 - DNA, 22 bp, Artificial Sequence
  chemically synthesized
tagacttgcttaggtgaaattg

SEQ ID NO: 14112 - DNA, 22 bp, Artificial Sequence
  chemically synthesized
agacttgcttaggtgaaattgc

SEQ ID NO: 14113 - DNA, 22 bp, Artificial Sequence
  chemically synthesized
gacttgcttaggtgaaattgca

SEQ ID NO: 14114 - DNA, 22 bp, Artificial Sequence
  chemically synthesized
gcttaggtgaaattgcaattct

SEQ ID NO: 14115 - DNA, 22 bp, Artificial Sequence
  chemically synthesized
cttaggtgaaattgcaattctt

SEQ ID NO: 14116 - DNA, 22 bp, Artificial Sequence
  chemically synthesized
aggtgaaattgcaattcttttt

SEQ ID NO: 14117 - DNA, 22 bp, Artificial Sequence
  chemically synthesized
ggtgaaattgcaattcttttta

SEQ ID NO: 14118 - DNA, 22 bp, Artificial Sequence
  chemically synthesized
caattctttttactttcagtct

SEQ ID NO: 14119 - DNA, 22 bp, Artificial Sequence
  chemically synthesized
tttttactttcagtcttagata

SEQ ID NO: 14120 - DNA, 22 bp, Artificial Sequence
  chemically synthesized
tttactttcagtcttagataac

SEQ ID NO: 14121 - DNA, 22 bp, Artificial Sequence
  chemically synthesized
ttactttcagtcttagataaca

SEQ ID NO: 14122 - DNA, 22 bp, Artificial Sequence
  chemically synthesized
tactttcagtcttagataacaa

SEQ ID NO: 14123 - DNA, 22 bp, Artificial Sequence
  chemically synthesized
actttcagtcttagataacaag

SEQ ID NO: 14124 - DNA, 22 bp, Artificial Sequence
  chemically synthesized
ctttcagtcttagataacaagt

SEQ ID NO: 14125 - DNA, 22 bp, Artificial Sequence
  chemically synthesized
tcagtcttagataacaagtctt

SEQ ID NO: 14126 - DNA, 22 bp, Artificial Sequence
  chemically synthesized
cagtcttagataacaagtcttc

SEQ ID NO: 14127 - DNA, 22 bp, Artificial Sequence
  chemically synthesized
agtcttagataacaagtcttca

SEQ ID NO: 14128 - DNA, 22 bp, Artificial Sequence
  chemically synthesized
agataacaagtcttcaattata

SEQ ID NO: 14129 - DNA, 22 bp, Artificial Sequence
  chemically synthesized
gataacaagtcttcaattatag

SEQ ID NO: 14130 - DNA, 22 bp, Artificial Sequence
  chemically synthesized
caattatagtacaatcacacat

SEQ ID NO: 14131 - DNA, 22 bp, Artificial Sequence
  chemically synthesized
aattatagtacaatcacacatt

SEQ ID NO: 14132 - DNA, 22 bp, Artificial Sequence
  chemically synthesized
tagtacaatcacacattgctta

SEQ ID NO: 14133 - DNA, 22 bp, Artificial Sequence
  chemically synthesized
cttaggaatgcatcattaggcg

SEQ ID NO: 14134 - DNA, 22 bp, Artificial Sequence
  chemically synthesized
aggaatgcatcattaggcgatt

SEQ ID NO: 14135 - DNA, 22 bp, Artificial Sequence
  chemically synthesized
ggaatgcatcattaggcgattt

SEQ ID NO: 14136 - DNA, 22 bp, Artificial Sequence
  chemically synthesized
ggcgattttgtcattatgcaaa

SEQ ID NO: 14137 - DNA, 22 bp, Artificial Sequence
  chemically synthesized
tgtcattatgcaaacatcatag

SEQ ID NO: 14138 - DNA, 22 bp, Artificial Sequence
  chemically synthesized
gtcattatgcaaacatcataga

SEQ ID NO: 14139 - DNA, 22 bp, Artificial Sequence
  chemically synthesized
tcattatgcaaacatcatagag

SEQ ID NO: 14140 - DNA, 22 bp, Artificial Sequence
  chemically synthesized
tgcaaacatcatagagtgtact

SEQ ID NO: 14141 - DNA, 22 bp, Artificial Sequence
  chemically synthesized
acacaaacctagatagtatagc

SEQ ID NO: 14142 - DNA, 22 bp, Artificial Sequence
  chemically synthesized
cacaaacctagatagtatagcc

SEQ ID NO: 14143 - DNA, 22 bp, Artificial Sequence
  chemically synthesized
gatagtatagcctttatgtacc

SEQ ID NO: 14144 - DNA, 22 bp, Artificial Sequence
  chemically synthesized
tatgtacctaggccgtatggta

SEQ ID NO: 14145 - DNA, 22 bp, Artificial Sequence
  chemically synthesized
atgtacctaggccgtatggtat

SEQ ID NO: 14146 - DNA, 22 bp, Artificial Sequence
  chemically synthesized
tgtacctaggccgtatggtata

SEQ ID NO: 14147 - DNA, 22 bp, Artificial Sequence
  chemically synthesized
ggccgtatggtatagtctgttg

SEQ ID NO: 14148 - DNA, 22 bp, Artificial Sequence
  chemically synthesized
ttgctcctaggccacaaacctg

SEQ ID NO: 14149 - DNA, 22 bp, Artificial Sequence
  chemically synthesized
ctcctaggccacaaacctgtac

SEQ ID NO: 14150 - DNA, 22 bp, Artificial Sequence
  chemically synthesized
ctaggccacaaacctgtacaac

SEQ ID NO: 14151 - DNA, 22 bp, Artificial Sequence
  chemically synthesized
ggccacaaacctgtacaactgt

SEQ ID NO: 14152 - DNA, 22 bp, Artificial Sequence
  chemically synthesized
tacaactgttactgtactgaat

SEQ ID NO: 14153 - DNA, 22 bp, Artificial Sequence
  chemically synthesized
ttactgtactgaatactataga

SEQ ID NO: 14154 - DNA, 22 bp, Artificial Sequence
  chemically synthesized
ctgtactgaatactatagacag

SEQ ID NO: 14155 - DNA, 22 bp, Artificial Sequence
  chemically synthesized
tactgaatactatagacagttg

SEQ ID NO: 14156 - DNA, 22 bp, Artificial Sequence
  chemically synthesized
aatactatagacagttgtaaca

SEQ ID NO: 14157 - DNA, 22 bp, Artificial Sequence
  chemically synthesized
tagacagttgtaacacagtggt

SEQ ID NO: 14158 - DNA, 22 bp, Artificial Sequence
  chemically synthesized
taacacagtggtaaatatttat

SEQ ID NO: 14159 - DNA, 22 bp, Artificial Sequence
  chemically synthesized
atctaaatatatgcaaacagag

SEQ ID NO: 14160 - DNA, 22 bp, Artificial Sequence
  chemically synthesized
tctaaatatatgcaaacagaga

SEQ ID NO: 14161 - DNA, 22 bp, Artificial Sequence
  chemically synthesized
aatatatgcaaacagagaaaag

SEQ ID NO: 14162 - DNA, 22 bp, Artificial Sequence
  chemically synthesized
tgtaggccacttaccacgaatg

SEQ ID NO: 14163 - DNA, 22 bp, Artificial Sequence
  chemically synthesized
accacgaatggagcttgcagga

SEQ ID NO: 14164 - DNA, 22 bp, Artificial Sequence
  chemically synthesized
ccacgaatggagcttgcaggac

SEQ ID NO: 14165 - DNA, 22 bp, Artificial Sequence
  chemically synthesized
gcaggactagaagttgctctgg

SEQ ID NO: 14166 - DNA, 22 bp, Artificial Sequence
  chemically synthesized
caggactagaagttgctctggg

SEQ ID NO: 14167 - DNA, 22 bp, Artificial Sequence
  chemically synthesized
gaagttgctctgggtgagtcag

SEQ ID NO: 14168 - DNA, 22 bp, Artificial Sequence
  chemically synthesized
ctctgggtgagtcagtgagtga

SEQ ID NO: 14169 - DNA, 22 bp, Artificial Sequence
  chemically synthesized
tgggtgagtcagtgagtgagtg

SEQ ID NO: 14170 - DNA, 22 bp, Artificial Sequence
  chemically synthesized
ggtgagtcagtgagtgagtggt

SEQ ID NO: 14171 - DNA, 22 bp, Artificial Sequence
  chemically synthesized
atgtgaaggcctagaacactgt

SEQ ID NO: 14172 - DNA, 22 bp, Artificial Sequence
  chemically synthesized
gaacactgtacaccactgtaga

SEQ ID NO: 14173 - DNA, 22 bp, Artificial Sequence
  chemically synthesized
tacaccactgtagactataaac

SEQ ID NO: 14174 - DNA, 22 bp, Artificial Sequence
  chemically synthesized
tagactataaacacagtacgct

SEQ ID NO: 14175 - DNA, 22 bp, Artificial Sequence
  chemically synthesized
taaacacagtacgctgaagcta

SEQ ID NO: 14176 - DNA, 22 bp, Artificial Sequence
  chemically synthesized
aagctacaccaaatttatctta

SEQ ID NO: 14177 - DNA, 22 bp, Artificial Sequence
  chemically synthesized
caccaaatttatcttaacagtt

SEQ ID NO: 14178 - DNA, 22 bp, Artificial Sequence
  chemically synthesized
atcttaacagtttttcttcaat

SEQ ID NO: 14179 - DNA, 22 bp, Artificial Sequence
  chemically synthesized
tcttaacagtttttcttcaata

SEQ ID NO: 14180 - DNA, 22 bp, Artificial Sequence
  chemically synthesized
aacagtttttcttcaataaaaa

SEQ ID NO: 14181 - DNA, 22 bp, Artificial Sequence
  chemically synthesized
acagtttttcttcaataaaaaa

SEQ ID NO: 14182 - DNA, 22 bp, Artificial Sequence
  chemically synthesized
ttcttcaataaaaaattataac

SEQ ID NO: 14183 - DNA, 22 bp, Artificial Sequence
  chemically synthesized
tcttcaataaaaaattataact

SEQ ID NO: 14184 - DNA, 22 bp, Artificial Sequence
  chemically synthesized
cttcaataaaaaattataactt

SEQ ID NO: 14185 - DNA, 22 bp, Artificial Sequence
  chemically synthesized
ttcaataaaaaattataacttt

SEQ ID NO: 14186 - DNA, 22 bp, Artificial Sequence
  chemically synthesized
caataaaaaattataacttttt

SEQ ID NO: 14187 - DNA, 22 bp, Artificial Sequence
  chemically synthesized
aataaaaaattataacttttta

SEQ ID NO: 14188 - DNA, 22 bp, Artificial Sequence
  chemically synthesized
taactttttaactttgtaaact

SEQ ID NO: 14189 - DNA, 22 bp, Artificial Sequence
  chemically synthesized
tttaactttgtaaactttttaa

SEQ ID NO: 14190 - DNA, 22 bp, Artificial Sequence
  chemically synthesized
ttaactttgtaaactttttaat

SEQ ID NO: 14191 - DNA, 22 bp, Artificial Sequence
  chemically synthesized
taactttgtaaactttttaatt

SEQ ID NO: 14192 - DNA, 22 bp, Artificial Sequence
  chemically synthesized
aactttgtaaactttttaattt

SEQ ID NO: 14193 - DNA, 22 bp, Artificial Sequence
  chemically synthesized
actttgtaaactttttaatttt

SEQ ID NO: 14194 - DNA, 22 bp, Artificial Sequence
  chemically synthesized
tgtaaactttttaattttttaa

SEQ ID NO: 14195 - DNA, 22 bp, Artificial Sequence
  chemically synthesized
gtaaactttttaattttttaac

SEQ ID NO: 14196 - DNA, 22 bp, Artificial Sequence
  chemically synthesized
taaactttttaattttttaact

SEQ ID NO: 14197 - DNA, 22 bp, Artificial Sequence
  chemically synthesized
tttaattttttaacttttaaaa

SEQ ID NO: 14198 - DNA, 22 bp, Artificial Sequence
  chemically synthesized
ttaattttttaacttttaaaat

SEQ ID NO: 14199 - DNA, 22 bp, Artificial Sequence
  chemically synthesized
taattttttaacttttaaaata

SEQ ID NO: 14200 - DNA, 22 bp, Artificial Sequence
  chemically synthesized
aattttttaacttttaaaatac

SEQ ID NO: 14201 - DNA, 22 bp, Artificial Sequence
  chemically synthesized
attttttaacttttaaaatact

SEQ ID NO: 14202 - DNA, 22 bp, Artificial Sequence
  chemically synthesized
tttaacttttaaaatacttagc

SEQ ID NO: 14203 - DNA, 22 bp, Artificial Sequence
  chemically synthesized
ttaacttttaaaatacttagct

SEQ ID NO: 14204 - DNA, 22 bp, Artificial Sequence
  chemically synthesized
taacttttaaaatacttagctt

SEQ ID NO: 14205 - DNA, 22 bp, Artificial Sequence
  chemically synthesized
aacttttaaaatacttagcttg

SEQ ID NO: 14206 - DNA, 22 bp, Artificial Sequence
  chemically synthesized
acttttaaaatacttagcttga

SEQ ID NO: 14207 - DNA, 22 bp, Artificial Sequence
  chemically synthesized
ttaaaatacttagcttgaaaca

SEQ ID NO: 14208 - DNA, 22 bp, Artificial Sequence
  chemically synthesized
taaaatacttagcttgaaacac

SEQ ID NO: 14209 - DNA, 22 bp, Artificial Sequence
  chemically synthesized
aaaatacttagcttgaaacaca

SEQ ID NO: 14210 - DNA, 22 bp, Artificial Sequence
  chemically synthesized
aaatacttagcttgaaacacaa

SEQ ID NO: 14211 - DNA, 22 bp, Artificial Sequence
  chemically synthesized
agcttgaaacacaaatacattg

SEQ ID NO: 14212 - DNA, 22 bp, Artificial Sequence
  chemically synthesized
gcttgaaacacaaatacattgt

SEQ ID NO: 14213 - DNA, 22 bp, Artificial Sequence
  chemically synthesized
gaaacacaaatacattgtatag

SEQ ID NO: 14214 - DNA, 22 bp, Artificial Sequence
  chemically synthesized
aaacacaaatacattgtatagc

SEQ ID NO: 14215 - DNA, 22 bp, Artificial Sequence
  chemically synthesized
tatagctatacaaaaatatttt

SEQ ID NO: 14216 - DNA, 22 bp, Artificial Sequence
  chemically synthesized
tacaaaaatattttttctttgt

SEQ ID NO: 14217 - DNA, 22 bp, Artificial Sequence
  chemically synthesized
tttctttgtatccttattctag

SEQ ID NO: 14218 - DNA, 22 bp, Artificial Sequence
  chemically synthesized
ttctttgtatccttattctaga

SEQ ID NO: 14219 - DNA, 22 bp, Artificial Sequence
  chemically synthesized
tctttgtatccttattctagaa

SEQ ID NO: 14220 - DNA, 22 bp, Artificial Sequence
  chemically synthesized
ctttgtatccttattctagaag

SEQ ID NO: 14221 - DNA, 22 bp, Artificial Sequence
  chemically synthesized
tttgtatccttattctagaagc

SEQ ID NO: 14222 - DNA, 22 bp, Artificial Sequence
  chemically synthesized
tgtatccttattctagaagctt

SEQ ID NO: 14223 - DNA, 22 bp, Artificial Sequence
  chemically synthesized
gtatccttattctagaagcttt

SEQ ID NO: 14224 - DNA, 22 bp, Artificial Sequence
  chemically synthesized
tatccttattctagaagctttt

SEQ ID NO: 14225 - DNA, 22 bp, Artificial Sequence
  chemically synthesized
attctagaagcttttttctatt

SEQ ID NO: 14226 - DNA, 22 bp, Artificial Sequence
  chemically synthesized
ttctagaagcttttttctattt

SEQ ID NO: 14227 - DNA, 22 bp, Artificial Sequence
  chemically synthesized
tagaagcttttttctattttct

SEQ ID NO: 14228 - DNA, 22 bp, Artificial Sequence
  chemically synthesized
gaagcttttttctattttctat

SEQ ID NO: 14229 - DNA, 22 bp, Artificial Sequence
  chemically synthesized
ttttctattttctattttaaat

SEQ ID NO: 14230 - DNA, 22 bp, Artificial Sequence
  chemically synthesized
tttctattttctattttaaatt

SEQ ID NO: 14231 - DNA, 22 bp, Artificial Sequence
  chemically synthesized
ttctattttctattttaaattt

SEQ ID NO: 14232 - DNA, 22 bp, Artificial Sequence
  chemically synthesized
tctattttctattttaaatttt

SEQ ID NO: 14233 - DNA, 22 bp, Artificial Sequence
  chemically synthesized
ctattttctattttaaattttt

SEQ ID NO: 14234 - DNA, 22 bp, Artificial Sequence
  chemically synthesized
tattttctattttaaatttttt

SEQ ID NO: 14235 - DNA, 22 bp, Artificial Sequence
  chemically synthesized
ttttctattttaaatttttttt

SEQ ID NO: 14236 - DNA, 22 bp, Artificial Sequence
  chemically synthesized
tctattttaaattttttttttt

SEQ ID NO: 14237 - DNA, 22 bp, Artificial Sequence
  chemically synthesized
ctattttaaattttttttttta

SEQ ID NO: 14238 - DNA, 22 bp, Artificial Sequence
  chemically synthesized
tattttaaatttttttttttac

SEQ ID NO: 14239 - DNA, 22 bp, Artificial Sequence
  chemically synthesized
ttttaaatttttttttttactt

SEQ ID NO: 14240 - DNA, 22 bp, Artificial Sequence
  chemically synthesized
taaatttttttttttacttgtt

SEQ ID NO: 14241 - DNA, 22 bp, Artificial Sequence
  chemically synthesized
aaatttttttttttacttgtta

SEQ ID NO: 14242 - DNA, 22 bp, Artificial Sequence
  chemically synthesized
aatttttttttttacttgttag

SEQ ID NO: 14243 - DNA, 22 bp, Artificial Sequence
  chemically synthesized
ttttttttacttgttagtcgtt

SEQ ID NO: 14244 - DNA, 22 bp, Artificial Sequence
  chemically synthesized
tttttttacttgttagtcgttt

SEQ ID NO: 14245 - DNA, 22 bp, Artificial Sequence
  chemically synthesized
ttttttacttgttagtcgtttt

SEQ ID NO: 14246 - DNA, 22 bp, Artificial Sequence
  chemically synthesized
tttttacttgttagtcgttttt

SEQ ID NO: 14247 - DNA, 22 bp, Artificial Sequence
  chemically synthesized
ttttacttgttagtcgtttttg

SEQ ID NO: 14248 - DNA, 22 bp, Artificial Sequence
  chemically synthesized
tttacttgttagtcgtttttgt

SEQ ID NO: 14249 - DNA, 22 bp, Artificial Sequence
  chemically synthesized
ttacttgttagtcgtttttgtt

SEQ ID NO: 14250 - DNA, 22 bp, Artificial Sequence
  chemically synthesized
tacttgttagtcgtttttgtta

SEQ ID NO: 14251 - DNA, 22 bp, Artificial Sequence
  chemically synthesized
acttgttagtcgtttttgttaa

SEQ ID NO: 14252 - DNA, 22 bp, Artificial Sequence
  chemically synthesized
cttgttagtcgtttttgttaaa

SEQ ID NO: 14253 - DNA, 22 bp, Artificial Sequence
  chemically synthesized
gttagtcgtttttgttaaaaac

SEQ ID NO: 14254 - DNA, 22 bp, Artificial Sequence
  chemically synthesized
ttagtcgtttttgttaaaaact

SEQ ID NO: 14255 - DNA, 22 bp, Artificial Sequence
  chemically synthesized
gtcgtttttgttaaaaactaaa

SEQ ID NO: 14256 - DNA, 22 bp, Artificial Sequence
  chemically synthesized
ttgttaaaaactaaaacacaca

SEQ ID NO: 14257 - DNA, 22 bp, Artificial Sequence
  chemically synthesized
tgttaaaaactaaaacacacac

SEQ ID NO: 14258 - DNA, 22 bp, Artificial Sequence
  chemically synthesized
gttaaaaactaaaacacacaca

SEQ ID NO: 14259 - DNA, 22 bp, Artificial Sequence
  chemically synthesized
ttaaaaactaaaacacacacac

SEQ ID NO: 14260 - DNA, 22 bp, Artificial Sequence
  chemically synthesized
aaaactaaaacacacacacttt

SEQ ID NO: 14261 - DNA, 22 bp, Artificial Sequence
  chemically synthesized
aaacacacacactttcacctag

SEQ ID NO: 14262 - DNA, 22 bp, Artificial Sequence
  chemically synthesized
tcacctaggcatagacaggatt

SEQ ID NO: 14263 - DNA, 22 bp, Artificial Sequence
  chemically synthesized
cacctaggcatagacaggatta

SEQ ID NO: 14264 - DNA, 22 bp, Artificial Sequence
  chemically synthesized
acctaggcatagacaggattag

SEQ ID NO: 14265 - DNA, 22 bp, Artificial Sequence
  chemically synthesized
ggcatagacaggattaggatca

SEQ ID NO: 14266 - DNA, 22 bp, Artificial Sequence
  chemically synthesized
ggatcatcagtatcactccctt

SEQ ID NO: 14267 - DNA, 22 bp, Artificial Sequence
  chemically synthesized
ccttccacctcactgccttcca

SEQ ID NO: 14268 - DNA, 22 bp, Artificial Sequence
  chemically synthesized
ccacctcactgccttccacctc

SEQ ID NO: 14269 - DNA, 22 bp, Artificial Sequence
  chemically synthesized
cacctcactgccttccacctcc

SEQ ID NO: 14270 - DNA, 22 bp, Artificial Sequence
  chemically synthesized
actgccttccacctccacatct

SEQ ID NO: 14271 - DNA, 22 bp, Artificial Sequence
  chemically synthesized
ccttccacctccacatcttgtc

SEQ ID NO: 14272 - DNA, 22 bp, Artificial Sequence
  chemically synthesized
ccacctccacatcttgtcccac

SEQ ID NO: 14273 - DNA, 22 bp, Artificial Sequence
  chemically synthesized
cacctccacatcttgtcccact

SEQ ID NO: 14274 - DNA, 22 bp, Artificial Sequence
  chemically synthesized
cacatcttgtcccactggaagg

SEQ ID NO: 14275 - DNA, 22 bp, Artificial Sequence
  chemically synthesized
gtcccactggaaggtttttagg

SEQ ID NO: 14276 - DNA, 22 bp, Artificial Sequence
  chemically synthesized
tcccactggaaggtttttaggg

SEQ ID NO: 14277 - DNA, 22 bp, Artificial Sequence
  chemically synthesized
gaaggtttttaggggcaataac

SEQ ID NO: 14278 - DNA, 22 bp, Artificial Sequence
  chemically synthesized
ttaggggcaataacacacatgt

SEQ ID NO: 14279 - DNA, 22 bp, Artificial Sequence
  chemically synthesized
taggggcaataacacacatgta

SEQ ID NO: 14280 - DNA, 22 bp, Artificial Sequence
  chemically synthesized
aggggcaataacacacatgtag

SEQ ID NO: 14281 - DNA, 22 bp, Artificial Sequence
  chemically synthesized
ggggcaataacacacatgtagc

SEQ ID NO: 14282 - DNA, 22 bp, Artificial Sequence
  chemically synthesized
tcacctatgataacagtgcttt

SEQ ID NO: 14283 - DNA, 22 bp, Artificial Sequence
  chemically synthesized
tgataacagtgctttctgttga

SEQ ID NO: 14284 - DNA, 22 bp, Artificial Sequence
  chemically synthesized
tctgttgaatacctcctgaagg

SEQ ID NO: 14285 - DNA, 22 bp, Artificial Sequence
  chemically synthesized
ctgttgaatacctcctgaagga

SEQ ID NO: 14286 - DNA, 22 bp, Artificial Sequence
  chemically synthesized
tgttgaatacctcctgaaggac

SEQ ID NO: 14287 - DNA, 22 bp, Artificial Sequence
  chemically synthesized
ttgaatacctcctgaaggactt

SEQ ID NO: 14288 - DNA, 22 bp, Artificial Sequence
  chemically synthesized
aatacctcctgaaggacttgcc

SEQ ID NO: 14289 - DNA, 22 bp, Artificial Sequence
  chemically synthesized
ctgaaggacttgcctgaggctg

SEQ ID NO: 14290 - DNA, 22 bp, Artificial Sequence
  chemically synthesized
aaggacttgcctgaggctgttt

SEQ ID NO: 14291 - DNA, 22 bp, Artificial Sequence
  chemically synthesized
gcctgaggctgttttacattta

SEQ ID NO: 14292 - DNA, 22 bp, Artificial Sequence
  chemically synthesized
cctgaggctgttttacatttaa

SEQ ID NO: 14293 - DNA, 22 bp, Artificial Sequence
  chemically synthesized
aggctgttttacatttaactta

SEQ ID NO: 14294 - DNA, 22 bp, Artificial Sequence
  chemically synthesized
ttttacatttaacttaaaaaaa

SEQ ID NO: 14295 - DNA, 22 bp, Artificial Sequence
  chemically synthesized
tacatttaacttaaaaaaaaaa

SEQ ID NO: 14296 - DNA, 22 bp, Artificial Sequence
  chemically synthesized
acatttaacttaaaaaaaaaaa

SEQ ID NO: 14297 - DNA, 22 bp, Artificial Sequence
  chemically synthesized
catttaacttaaaaaaaaaaaa

SEQ ID NO: 14298 - DNA, 22 bp, Artificial Sequence
  chemically synthesized
aacttaaaaaaaaaaaaagtag

SEQ ID NO: 14299 - DNA, 22 bp, Artificial Sequence
  chemically synthesized
acttaaaaaaaaaaaaagtaga

SEQ ID NO: 14300 - DNA, 22 bp, Artificial Sequence
  chemically synthesized
aaaaaaaaaaaaagtagaagga

SEQ ID NO: 14301 - DNA, 22 bp, Artificial Sequence
  chemically synthesized
aaaaaaaaaaaagtagaaggag

SEQ ID NO: 14302 - DNA, 22 bp, Artificial Sequence
  chemically synthesized
taaaataacaataaaaggcata

SEQ ID NO: 14303 - DNA, 22 bp, Artificial Sequence
  chemically synthesized
aaataacaataaaaggcatagt

SEQ ID NO: 14304 - DNA, 22 bp, Artificial Sequence
  chemically synthesized
attatcaagtgttgtacactgt

SEQ ID NO: 14305 - DNA, 22 bp, Artificial Sequence
  chemically synthesized
ttatcaagtgttgtacactgta

SEQ ID NO: 14306 - DNA, 22 bp, Artificial Sequence
  chemically synthesized
tcaagtgttgtacactgtaata

SEQ ID NO: 14307 - DNA, 22 bp, Artificial Sequence
  chemically synthesized
tacactgtaataattgtatgtg

SEQ ID NO: 14308 - DNA, 22 bp, Artificial Sequence
  chemically synthesized
taataattgtatgtgctatact

SEQ ID NO: 14309 - DNA, 22 bp, Artificial Sequence
  chemically synthesized
tatgtgctatactttaaataac

SEQ ID NO: 14310 - DNA, 22 bp, Artificial Sequence
  chemically synthesized
tactttaaataacttgcaaaat

SEQ ID NO: 14311 - DNA, 22 bp, Artificial Sequence
  chemically synthesized
taaataacttgcaaaatagtac

SEQ ID NO: 14312 - DNA, 22 bp, Artificial Sequence
  chemically synthesized
aaataacttgcaaaatagtact

SEQ ID NO: 14313 - DNA, 22 bp, Artificial Sequence
  chemically synthesized
aataacttgcaaaatagtacta

SEQ ID NO: 14314 - DNA, 22 bp, Artificial Sequence
  chemically synthesized
gcaaaatagtactaagacctta

SEQ ID NO: 14315 - DNA, 22 bp, Artificial Sequence
  chemically synthesized
caaaatagtactaagaccttat

SEQ ID NO: 14316 - DNA, 22 bp, Artificial Sequence
  chemically synthesized
agaccttatgatggttacagtg

SEQ ID NO: 14317 - DNA, 22 bp, Artificial Sequence
  chemically synthesized
atgatggttacagtgtcactaa

SEQ ID NO: 14318 - DNA, 22 bp, Artificial Sequence
  chemically synthesized
tgatggttacagtgtcactaag

SEQ ID NO: 14319 - DNA, 22 bp, Artificial Sequence
  chemically synthesized
cagtgtcactaaggcaatagca

SEQ ID NO: 14320 - DNA, 22 bp, Artificial Sequence
  chemically synthesized
aggcaatagcatattttcaggt

SEQ ID NO: 14321 - DNA, 22 bp, Artificial Sequence
  chemically synthesized
tcaggtccattgtaatctaatg

SEQ ID NO: 14322 - DNA, 22 bp, Artificial Sequence
  chemically synthesized
caggtccattgtaatctaatgg

SEQ ID NO: 14323 - DNA, 22 bp, Artificial Sequence
  chemically synthesized
aggtccattgtaatctaatggg

SEQ ID NO: 14324 - DNA, 22 bp, Artificial Sequence
  chemically synthesized
taatctaatgggactaccatca

SEQ ID NO: 14325 - DNA, 22 bp, Artificial Sequence
  chemically synthesized
atgggactaccatcatatatgc

SEQ ID NO: 14326 - DNA, 22 bp, Artificial Sequence
  chemically synthesized
ccatcatatatgcagtctacca

SEQ ID NO: 14327 - DNA, 22 bp, Artificial Sequence
  chemically synthesized
ccattgactgaaacgttacatg

SEQ ID NO: 14328 - DNA, 22 bp, Artificial Sequence
  chemically synthesized
actgaaacgttacatggcacat

SEQ ID NO: 14329 - DNA, 22 bp, Artificial Sequence
  chemically synthesized
aaacgttacatggcacataact

SEQ ID NO: 14330 - DNA, 22 bp, Artificial Sequence
  chemically synthesized
catggcacataactgtatttgc

SEQ ID NO: 14331 - DNA, 22 bp, Artificial Sequence
  chemically synthesized
tatttgcaagaatgatttgttt

SEQ ID NO: 14332 - DNA, 22 bp, Artificial Sequence
  chemically synthesized
gcaagaatgatttgttttacat

SEQ ID NO: 14333 - DNA, 22 bp, Artificial Sequence
  chemically synthesized
caagaatgatttgttttacatt

SEQ ID NO: 14334 - DNA, 22 bp, Artificial Sequence
  chemically synthesized
gttttacattaatatcacatag

SEQ ID NO: 14335 - DNA, 22 bp, Artificial Sequence
  chemically synthesized
ttttacattaatatcacatagg

SEQ ID NO: 14336 - DNA, 22 bp, Artificial Sequence
  chemically synthesized
tacattaatatcacataggatg

SEQ ID NO: 14337 - DNA, 22 bp, Artificial Sequence
  chemically synthesized
acattaatatcacataggatgt

SEQ ID NO: 14338 - DNA, 22 bp, Artificial Sequence
  chemically synthesized
cattaatatcacataggatgta

SEQ ID NO: 14339 - DNA, 22 bp, Artificial Sequence
  chemically synthesized
atatcacataggatgtaccttt

SEQ ID NO: 14340 - DNA, 22 bp, Artificial Sequence
  chemically synthesized
tttagagtggtatgtttatgtg

SEQ ID NO: 14341 - DNA, 22 bp, Artificial Sequence
  chemically synthesized
ttagagtggtatgtttatgtgg

SEQ ID NO: 14342 - DNA, 22 bp, Artificial Sequence
  chemically synthesized
tagagtggtatgtttatgtgga

SEQ ID NO: 14343 - DNA, 22 bp, Artificial Sequence
  chemically synthesized
agagtggtatgtttatgtggat

SEQ ID NO: 14344 - DNA, 22 bp, Artificial Sequence
  chemically synthesized
gagtggtatgtttatgtggatt

SEQ ID NO: 14345 - DNA, 22 bp, Artificial Sequence
  chemically synthesized
atgtggattaagatgtacaagt

SEQ ID NO: 14346 - DNA, 22 bp, Artificial Sequence
  chemically synthesized
tgtggattaagatgtacaagtt

SEQ ID NO: 14347 - DNA, 22 bp, Artificial Sequence
  chemically synthesized
agatgtacaagttgagcaaggg

SEQ ID NO: 14348 - DNA, 22 bp, Artificial Sequence
  chemically synthesized
agcaaggggaccaagagccctg

SEQ ID NO: 14349 - DNA, 22 bp, Artificial Sequence
  chemically synthesized
ggttctgtcttggatgtgagcg

SEQ ID NO: 14350 - DNA, 22 bp, Artificial Sequence
  chemically synthesized
tgtcttggatgtgagcgtttat

SEQ ID NO: 14351 - DNA, 22 bp, Artificial Sequence
  chemically synthesized
tcttggatgtgagcgtttatgt

SEQ ID NO: 14352 - DNA, 22 bp, Artificial Sequence
  chemically synthesized
ggatgtgagcgtttatgttctt

SEQ ID NO: 14353 - DNA, 22 bp, Artificial Sequence
  chemically synthesized
gatgtgagcgtttatgttcttc

SEQ ID NO: 14354 - DNA, 22 bp, Artificial Sequence
  chemically synthesized
atgttcttctcctcatgtctgt

SEQ ID NO: 14355 - DNA, 22 bp, Artificial Sequence
  chemically synthesized
tgttcttctcctcatgtctgtt

SEQ ID NO: 14356 - DNA, 22 bp, Artificial Sequence
  chemically synthesized
ttctcctcatgtctgttttctc

SEQ ID NO: 14357 - DNA, 22 bp, Artificial Sequence
  chemically synthesized
ctcctcatgtctgttttctcat

SEQ ID NO: 14358 - DNA, 22 bp, Artificial Sequence
  chemically synthesized
tcctcatgtctgttttctcatt

SEQ ID NO: 14359 - DNA, 22 bp, Artificial Sequence
  chemically synthesized
ctcatgtctgttttctcattaa

SEQ ID NO: 14360 - DNA, 22 bp, Artificial Sequence
  chemically synthesized
atgtctgttttctcattaaatt

SEQ ID NO: 14361 - DNA, 22 bp, Artificial Sequence
  chemically synthesized
ttttctcattaaattcaaaggc

SEQ ID NO: 14362 - DNA, 22 bp, Artificial Sequence
  chemically synthesized
tctcattaaattcaaaggcttg

SEQ ID NO: 14363 - DNA, 22 bp, Artificial Sequence
  chemically synthesized
ctcattaaattcaaaggcttga

SEQ ID NO: 14364 - DNA, 22 bp, Artificial Sequence
  chemically synthesized
tcattaaattcaaaggcttgaa

SEQ ID NO: 14365 - DNA, 22 bp, Artificial Sequence
  chemically synthesized
attaaattcaaaggcttgaacg

SEQ ID NO: 14366 - DNA, 22 bp, Artificial Sequence
  chemically synthesized
aattcaaaggcttgaacgggcc

SEQ ID NO: 14367 - DNA, 22 bp, Artificial Sequence
  chemically synthesized
aaaggcttgaacgggccctatt

SEQ ID NO: 14368 - DNA, 22 bp, Artificial Sequence
  chemically synthesized
gaacgggccctatttagccctt

SEQ ID NO: 14369 - DNA, 22 bp, Artificial Sequence
  chemically synthesized
aacgggccctatttagcccttc

SEQ ID NO: 14370 - DNA, 22 bp, Artificial Sequence
  chemically synthesized
tttagcccttctgttttctacg

SEQ ID NO: 14371 - DNA, 22 bp, Artificial Sequence
  chemically synthesized
agcccttctgttttctacgtgt

SEQ ID NO: 14372 - DNA, 22 bp, Artificial Sequence
  chemically synthesized
gcccttctgttttctacgtgtt

SEQ ID NO: 14373 - DNA, 22 bp, Artificial Sequence
  chemically synthesized
ctgttttctacgtgttctaaat

SEQ ID NO: 14374 - DNA, 22 bp, Artificial Sequence
  chemically synthesized
tgttttctacgtgttctaaata

SEQ ID NO: 14375 - DNA, 22 bp, Artificial Sequence
  chemically synthesized
ttttctacgtgttctaaataac

SEQ ID NO: 14376 - DNA, 22 bp, Artificial Sequence
  chemically synthesized
tctacgtgttctaaataactaa

SEQ ID NO: 14377 - DNA, 22 bp, Artificial Sequence
  chemically synthesized
ctacgtgttctaaataactaaa

SEQ ID NO: 14378 - DNA, 22 bp, Artificial Sequence
  chemically synthesized
tacgtgttctaaataactaaag

SEQ ID NO: 14379 - DNA, 22 bp, Artificial Sequence
  chemically synthesized
cgtgttctaaataactaaagct

SEQ ID NO: 14380 - DNA, 22 bp, Artificial Sequence
  chemically synthesized
taaataactaaagcttttaaat

SEQ ID NO: 14381 - DNA, 22 bp, Artificial Sequence
  chemically synthesized
aataactaaagcttttaaattc

SEQ ID NO: 14382 - DNA, 22 bp, Artificial Sequence
  chemically synthesized
aagcttttaaattctagccatt

SEQ ID NO: 14383 - DNA, 22 bp, Artificial Sequence
  chemically synthesized
ttaaattctagccatttagtgt

SEQ ID NO: 14384 - DNA, 22 bp, Artificial Sequence
  chemically synthesized
taaattctagccatttagtgta

SEQ ID NO: 14385 - DNA, 22 bp, Artificial Sequence
  chemically synthesized
aaattctagccatttagtgtag

SEQ ID NO: 14386 - DNA, 22 bp, Artificial Sequence
  chemically synthesized
aattctagccatttagtgtaga

SEQ ID NO: 14387 - DNA, 22 bp, Artificial Sequence
  chemically synthesized
tagccatttagtgtagaactct

SEQ ID NO: 14388 - DNA, 22 bp, Artificial Sequence
  chemically synthesized
gccatttagtgtagaactctct

SEQ ID NO: 14389 - DNA, 22 bp, Artificial Sequence
  chemically synthesized
agtgtagaactctctttgcagt

SEQ ID NO: 14390 - DNA, 22 bp, Artificial Sequence
  chemically synthesized
gtgtagaactctctttgcagtg

SEQ ID NO: 14391 - DNA, 22 bp, Artificial Sequence
  chemically synthesized
tctttgcagtgatgaaatgctg

SEQ ID NO: 14392 - DNA, 22 bp, Artificial Sequence
  chemically synthesized
tttgcagtgatgaaatgctgta

SEQ ID NO: 14393 - DNA, 22 bp, Artificial Sequence
  chemically synthesized
tgcagtgatgaaatgctgtatt

SEQ ID NO: 14394 - DNA, 22 bp, Artificial Sequence
  chemically synthesized
gcagtgatgaaatgctgtattg

SEQ ID NO: 14395 - DNA, 22 bp, Artificial Sequence
  chemically synthesized
cagtgatgaaatgctgtattgg

SEQ ID NO: 14396 - DNA, 22 bp, Artificial Sequence
  chemically synthesized
tattggtttcttggctagcata

SEQ ID NO: 14397 - DNA, 22 bp, Artificial Sequence
  chemically synthesized
gtttcttggctagcatattaaa

SEQ ID NO: 14398 - DNA, 22 bp, Artificial Sequence
  chemically synthesized
cttggctagcatattaaatatt

SEQ ID NO: 14399 - DNA, 22 bp, Artificial Sequence
  chemically synthesized
ttggctagcatattaaatattt

SEQ ID NO: 14400 - DNA, 22 bp, Artificial Sequence
  chemically synthesized
ggctagcatattaaatattttt

SEQ ID NO: 14401 - DNA, 22 bp, Artificial Sequence
  chemically synthesized
gctagcatattaaatattttta

SEQ ID NO: 14402 - DNA, 22 bp, Artificial Sequence
  chemically synthesized
gcatattaaatatttttatctt

SEQ ID NO: 14403 - DNA, 22 bp, Artificial Sequence
  chemically synthesized
aatatttttatctttgtcttga

SEQ ID NO: 14404 - DNA, 22 bp, Artificial Sequence
  chemically synthesized
ttatctttgtcttgatacttca

SEQ ID NO: 14405 - DNA, 22 bp, Artificial Sequence
  chemically synthesized
tatctttgtcttgatacttcaa

SEQ ID NO: 14406 - DNA, 22 bp, Artificial Sequence
  chemically synthesized
atctttgtcttgatacttcaat

SEQ ID NO: 14407 - DNA, 22 bp, Artificial Sequence
  chemically synthesized
tctttgtcttgatacttcaatg

SEQ ID NO: 14408 - DNA, 22 bp, Artificial Sequence
  chemically synthesized
tgtcttgatacttcaatgtcgt

SEQ ID NO: 14409 - DNA, 22 bp, Artificial Sequence
  chemically synthesized
gtcttgatacttcaatgtcgtt

SEQ ID NO: 14410 - DNA, 22 bp, Artificial Sequence
  chemically synthesized
tcttgatacttcaatgtcgttt

SEQ ID NO: 14411 - DNA, 22 bp, Artificial Sequence
  chemically synthesized
gatacttcaatgtcgttttaaa

SEQ ID NO: 14412 - DNA, 22 bp, Artificial Sequence
  chemically synthesized
atacttcaatgtcgttttaaac

SEQ ID NO: 14413 - DNA, 22 bp, Artificial Sequence
  chemically synthesized
caatgtcgttttaaacatcagg

SEQ ID NO: 14414 - DNA, 22 bp, Artificial Sequence
  chemically synthesized
aatgtcgttttaaacatcagga

SEQ ID NO: 14415 - DNA, 22 bp, Artificial Sequence
  chemically synthesized
taaacatcaggatcgggcttca

SEQ ID NO: 14416 - DNA, 22 bp, Artificial Sequence
  chemically synthesized
aaacatcaggatcgggcttcag

SEQ ID NO: 14417 - DNA, 22 bp, Artificial Sequence
  chemically synthesized
aacatcaggatcgggcttcagt

SEQ ID NO: 14418 - DNA, 22 bp, Artificial Sequence
  chemically synthesized
cagtattctcataaccagagag

SEQ ID NO: 14419 - DNA, 22 bp, Artificial Sequence
  chemically synthesized
agtattctcataaccagagagt

SEQ ID NO: 14420 - DNA, 22 bp, Artificial Sequence
  chemically synthesized
tcataaccagagagttcactga

SEQ ID NO: 14421 - DNA, 22 bp, Artificial Sequence
  chemically synthesized
ataaccagagagttcactgagg

SEQ ID NO: 14422 - DNA, 22 bp, Artificial Sequence
  chemically synthesized
actgaggatacaggactgtttg

SEQ ID NO: 14423 - DNA, 22 bp, Artificial Sequence
  chemically synthesized
aggatacaggactgtttgccca

SEQ ID NO: 14424 - DNA, 22 bp, Artificial Sequence
  chemically synthesized
tttgcccattttttgttatggc

SEQ ID NO: 14425 - DNA, 22 bp, Artificial Sequence
  chemically synthesized
gcccattttttgttatggctcc

SEQ ID NO: 14426 - DNA, 22 bp, Artificial Sequence
  chemically synthesized
cccattttttgttatggctcca

SEQ ID NO: 14427 - DNA, 22 bp, Artificial Sequence
  chemically synthesized
tttgttatggctccagacttgt

SEQ ID NO: 14428 - DNA, 22 bp, Artificial Sequence
  chemically synthesized
ttgttatggctccagacttgtg

SEQ ID NO: 14429 - DNA, 22 bp, Artificial Sequence
  chemically synthesized
tgttatggctccagacttgtgg

SEQ ID NO: 14430 - DNA, 22 bp, Artificial Sequence
  chemically synthesized
gttatggctccagacttgtggt

SEQ ID NO: 14431 - DNA, 22 bp, Artificial Sequence
  chemically synthesized
ttatggctccagacttgtggta

SEQ ID NO: 14432 - DNA, 22 bp, Artificial Sequence
  chemically synthesized
tggctccagacttgtggtattt

SEQ ID NO: 14433 - DNA, 22 bp, Artificial Sequence
  chemically synthesized
cagacttgtggtatttccatgt

SEQ ID NO: 14434 - DNA, 22 bp, Artificial Sequence
  chemically synthesized
gtggtatttccatgtctttttt

SEQ ID NO: 14435 - DNA, 22 bp, Artificial Sequence
  chemically synthesized
tggtatttccatgtcttttttt

SEQ ID NO: 14436 - DNA, 22 bp, Artificial Sequence
  chemically synthesized
ccatgtcttttttttttttttt

SEQ ID NO: 14437 - DNA, 22 bp, Artificial Sequence
  chemically synthesized
catgtctttttttttttttttt

SEQ ID NO: 14438 - DNA, 22 bp, Artificial Sequence
  chemically synthesized
tttttttttttttttttttgac

SEQ ID NO: 14439 - DNA, 22 bp, Artificial Sequence
  chemically synthesized
ttttttttttttttttttgacc

SEQ ID NO: 14440 - DNA, 22 bp, Artificial Sequence
  chemically synthesized
tttttttttttttttttgacct

SEQ ID NO: 14441 - DNA, 22 bp, Artificial Sequence
  chemically synthesized
ttttttttttttttttgacctt

SEQ ID NO: 14442 - DNA, 22 bp, Artificial Sequence
  chemically synthesized
tttttttttttttttgaccttt

SEQ ID NO: 14443 - DNA, 22 bp, Artificial Sequence
  chemically synthesized
ttttttttttttttgacctttt

SEQ ID NO: 14444 - DNA, 22 bp, Artificial Sequence
  chemically synthesized
tttttttttttttgacctttta

SEQ ID NO: 14445 - DNA, 22 bp, Artificial Sequence
  chemically synthesized
ttttttttttttgaccttttag

SEQ ID NO: 14446 - DNA, 22 bp, Artificial Sequence
  chemically synthesized
tttttttttttgaccttttagc

SEQ ID NO: 14447 - DNA, 22 bp, Artificial Sequence
  chemically synthesized
ttttttttttgaccttttagcg

SEQ ID NO: 14448 - DNA, 22 bp, Artificial Sequence
  chemically synthesized
tttttttttgaccttttagcgg

SEQ ID NO: 14449 - DNA, 22 bp, Artificial Sequence
  chemically synthesized
ttttttttgaccttttagcggc

SEQ ID NO: 14450 - DNA, 22 bp, Artificial Sequence
  chemically synthesized
tttttttgaccttttagcggct

SEQ ID NO: 14451 - DNA, 22 bp, Artificial Sequence
  chemically synthesized
ttttttgaccttttagcggctt

SEQ ID NO: 14452 - DNA, 22 bp, Artificial Sequence
  chemically synthesized
tttttgaccttttagcggcttt

SEQ ID NO: 14453 - DNA, 22 bp, Artificial Sequence
  chemically synthesized
ttttgaccttttagcggcttta

SEQ ID NO: 14454 - DNA, 22 bp, Artificial Sequence
  chemically synthesized
tttgaccttttagcggctttaa

SEQ ID NO: 14455 - DNA, 22 bp, Artificial Sequence
  chemically synthesized
ttgaccttttagcggctttaaa

SEQ ID NO: 14456 - DNA, 22 bp, Artificial Sequence
  chemically synthesized
tgaccttttagcggctttaaag

SEQ ID NO: 14457 - DNA, 22 bp, Artificial Sequence
  chemically synthesized
gaccttttagcggctttaaagt

SEQ ID NO: 14458 - DNA, 22 bp, Artificial Sequence
  chemically synthesized
accttttagcggctttaaagta

SEQ ID NO: 14459 - DNA, 22 bp, Artificial Sequence
  chemically synthesized
ttagcggctttaaagtatttct

SEQ ID NO: 14460 - DNA, 22 bp, Artificial Sequence
  chemically synthesized
tagcggctttaaagtatttctg

SEQ ID NO: 14461 - DNA, 22 bp, Artificial Sequence
  chemically synthesized
agcggctttaaagtatttctgt

SEQ ID NO: 14462 - DNA, 22 bp, Artificial Sequence
  chemically synthesized
gcggctttaaagtatttctgtt

SEQ ID NO: 14463 - DNA, 22 bp, Artificial Sequence
  chemically synthesized
taaagtatttctgttgttaggt

SEQ ID NO: 14464 - DNA, 22 bp, Artificial Sequence
  chemically synthesized
aaagtatttctgttgttaggtg

SEQ ID NO: 14465 - DNA, 22 bp, Artificial Sequence
  chemically synthesized
aagtatttctgttgttaggtgt

SEQ ID NO: 14466 - DNA, 22 bp, Artificial Sequence
  chemically synthesized
ctgttgttaggtgttgtattac

SEQ ID NO: 14467 - DNA, 22 bp, Artificial Sequence
  chemically synthesized
tgttgttaggtgttgtattact

SEQ ID NO: 14468 - DNA, 22 bp, Artificial Sequence
  chemically synthesized
ttgttaggtgttgtattacttt

SEQ ID NO: 14469 - DNA, 22 bp, Artificial Sequence
  chemically synthesized
ttaggtgttgtattacttttct

SEQ ID NO: 14470 - DNA, 22 bp, Artificial Sequence
  chemically synthesized
ggtgttgtattacttttctaag

SEQ ID NO: 14471 - DNA, 22 bp, Artificial Sequence
  chemically synthesized
tattacttttctaagattactt

SEQ ID NO: 14472 - DNA, 22 bp, Artificial Sequence
  chemically synthesized
cttttctaagattacttaacaa

SEQ ID NO: 14473 - DNA, 22 bp, Artificial Sequence
  chemically synthesized
ttctaagattacttaacaaagc

SEQ ID NO: 14474 - DNA, 22 bp, Artificial Sequence
  chemically synthesized
tctaagattacttaacaaagca

SEQ ID NO: 14475 - DNA, 22 bp, Artificial Sequence
  chemically synthesized
ctaagattacttaacaaagcac

SEQ ID NO: 14476 - DNA, 22 bp, Artificial Sequence
  chemically synthesized
taagattacttaacaaagcacc

SEQ ID NO: 14477 - DNA, 22 bp, Artificial Sequence
  chemically synthesized
agattacttaacaaagcaccac

SEQ ID NO: 14478 - DNA, 22 bp, Artificial Sequence
  chemically synthesized
cttaacaaagcaccacaaactg

SEQ ID NO: 14479 - DNA, 22 bp, Artificial Sequence
  chemically synthesized
aacaaagcaccacaaactgagt

SEQ ID NO: 14480 - DNA, 22 bp, Artificial Sequence
  chemically synthesized
acaaagcaccacaaactgagtg

SEQ ID NO: 14481 - DNA, 22 bp, Artificial Sequence
  chemically synthesized
agtggctttaaacaacagcaat

SEQ ID NO: 14482 - DNA, 22 bp, Artificial Sequence
  chemically synthesized
taaacaacagcaatttattctc

SEQ ID NO: 14483 - DNA, 22 bp, Artificial Sequence
  chemically synthesized
aaacaacagcaatttattctct

SEQ ID NO: 14484 - DNA, 22 bp, Artificial Sequence
  chemically synthesized
aacaacagcaatttattctctc

SEQ ID NO: 14485 - DNA, 22 bp, Artificial Sequence
  chemically synthesized
attctctcacaattctagaagc

SEQ ID NO: 14486 - DNA, 22 bp, Artificial Sequence
  chemically synthesized
ttctctcacaattctagaagct

SEQ ID NO: 14487 - DNA, 22 bp, Artificial Sequence
  chemically synthesized
tctcacaattctagaagctaga

SEQ ID NO: 14488 - DNA, 22 bp, Artificial Sequence
  chemically synthesized
tcacaattctagaagctagaag

SEQ ID NO: 14489 - DNA, 22 bp, Artificial Sequence
  chemically synthesized
acaattctagaagctagaagtc

SEQ ID NO: 14490 - DNA, 22 bp, Artificial Sequence
  chemically synthesized
tagaagctagaagtccgaaatc

SEQ ID NO: 14491 - DNA, 22 bp, Artificial Sequence
  chemically synthesized
gaagctagaagtccgaaatcaa

SEQ ID NO: 14492 - DNA, 22 bp, Artificial Sequence
  chemically synthesized
gaagtccgaaatcaaagtgttg

SEQ ID NO: 14493 - DNA, 22 bp, Artificial Sequence
  chemically synthesized
acaggggcatgatcttcaagag

SEQ ID NO: 14494 - DNA, 22 bp, Artificial Sequence
  chemically synthesized
caagagagaagactctttcctt

SEQ ID NO: 14495 - DNA, 22 bp, Artificial Sequence
  chemically synthesized
aagagagaagactctttccttg

SEQ ID NO: 14496 - DNA, 22 bp, Artificial Sequence
  chemically synthesized
tttccttgcctcttcctggctt

SEQ ID NO: 14497 - DNA, 22 bp, Artificial Sequence
  chemically synthesized
tccttgcctcttcctggcttct

SEQ ID NO: 14498 - DNA, 22 bp, Artificial Sequence
  chemically synthesized
ccttgcctcttcctggcttctg

SEQ ID NO: 14499 - DNA, 22 bp, Artificial Sequence
  chemically synthesized
cttgcctcttcctggcttctgg

SEQ ID NO: 14500 - DNA, 22 bp, Artificial Sequence
  chemically synthesized
gcctcttcctggcttctggtgg

SEQ ID NO: 14501 - DNA, 22 bp, Artificial Sequence
  chemically synthesized
cctcttcctggcttctggtggt

SEQ ID NO: 14502 - DNA, 22 bp, Artificial Sequence
  chemically synthesized
ttcctggcttctggtggttacc

SEQ ID NO: 14503 - DNA, 22 bp, Artificial Sequence
  chemically synthesized
cctggcttctggtggttaccag

SEQ ID NO: 14504 - DNA, 22 bp, Artificial Sequence
  chemically synthesized
ctggcttctggtggttaccagc

SEQ ID NO: 14505 - DNA, 22 bp, Artificial Sequence
  chemically synthesized
gcttctggtggttaccagcaat

SEQ ID NO: 14506 - DNA, 22 bp, Artificial Sequence
  chemically synthesized
ctggtggttaccagcaatcctg

SEQ ID NO: 14507 - DNA, 22 bp, Artificial Sequence
  chemically synthesized
tggtggttaccagcaatcctga

SEQ ID NO: 14508 - DNA, 22 bp, Artificial Sequence
  chemically synthesized
gtggttaccagcaatcctgagt

SEQ ID NO: 14509 - DNA, 22 bp, Artificial Sequence
  chemically synthesized
ccagcaatcctgagtgttcctt

SEQ ID NO: 14510 - DNA, 22 bp, Artificial Sequence
  chemically synthesized
agtgttcctttcttgccttgta

SEQ ID NO: 14511 - DNA, 22 bp, Artificial Sequence
  chemically synthesized
ctttcttgccttgtagtttcaa

SEQ ID NO: 14512 - DNA, 22 bp, Artificial Sequence
  chemically synthesized
tcttgccttgtagtttcaacaa

SEQ ID NO: 14513 - DNA, 22 bp, Artificial Sequence
  chemically synthesized
cttgccttgtagtttcaacaat

SEQ ID NO: 14514 - DNA, 22 bp, Artificial Sequence
  chemically synthesized
ttgccttgtagtttcaacaatc

SEQ ID NO: 14515 - DNA, 22 bp, Artificial Sequence
  chemically synthesized
gccttgtagtttcaacaatcca

SEQ ID NO: 14516 - DNA, 22 bp, Artificial Sequence
  chemically synthesized
ccttgtagtttcaacaatccag

SEQ ID NO: 14517 - DNA, 22 bp, Artificial Sequence
  chemically synthesized
gtagtttcaacaatccagtatc

SEQ ID NO: 14518 - DNA, 22 bp, Artificial Sequence
  chemically synthesized
tagtttcaacaatccagtatct

SEQ ID NO: 14519 - DNA, 22 bp, Artificial Sequence
  chemically synthesized
caacaatccagtatctgccttt

SEQ ID NO: 14520 - DNA, 22 bp, Artificial Sequence
  chemically synthesized
aacaatccagtatctgcctttt

SEQ ID NO: 14521 - DNA, 22 bp, Artificial Sequence
  chemically synthesized
ccttttgtcttcacatggctgt

SEQ ID NO: 14522 - DNA, 22 bp, Artificial Sequence
  chemically synthesized
ttgtcttcacatggctgtctac

SEQ ID NO: 14523 - DNA, 22 bp, Artificial Sequence
  chemically synthesized
tgtcttcacatggctgtctacc

SEQ ID NO: 14524 - DNA, 22 bp, Artificial Sequence
  chemically synthesized
gtcttcacatggctgtctacca

SEQ ID NO: 14525 - DNA, 22 bp, Artificial Sequence
  chemically synthesized
tcttcacatggctgtctaccat

SEQ ID NO: 14526 - DNA, 22 bp, Artificial Sequence
  chemically synthesized
cacatggctgtctaccatttgt

SEQ ID NO: 14527 - DNA, 22 bp, Artificial Sequence
  chemically synthesized
acatggctgtctaccatttgtc

SEQ ID NO: 14528 - DNA, 22 bp, Artificial Sequence
  chemically synthesized
tctaccatttgtctctgtgtct

SEQ ID NO: 14529 - DNA, 22 bp, Artificial Sequence
  chemically synthesized
ccatttgtctctgtgtctccaa

SEQ ID NO: 14530 - DNA, 22 bp, Artificial Sequence
  chemically synthesized
gtctctgtgtctccaaatctct

SEQ ID NO: 14531 - DNA, 22 bp, Artificial Sequence
  chemically synthesized
tctctgtgtctccaaatctctc

SEQ ID NO: 14532 - DNA, 22 bp, Artificial Sequence
  chemically synthesized
tgtgtctccaaatctctctcct

SEQ ID NO: 14533 - DNA, 22 bp, Artificial Sequence
  chemically synthesized
tgtctccaaatctctctcctta

SEQ ID NO: 14534 - DNA, 22 bp, Artificial Sequence
  chemically synthesized
caaatctctctccttataaaca

SEQ ID NO: 14535 - DNA, 22 bp, Artificial Sequence
  chemically synthesized
tctccttataaacacagcagtt

SEQ ID NO: 14536 - DNA, 22 bp, Artificial Sequence
  chemically synthesized
tccttataaacacagcagttat

SEQ ID NO: 14537 - DNA, 22 bp, Artificial Sequence
  chemically synthesized
cttataaacacagcagttattg

SEQ ID NO: 14538 - DNA, 22 bp, Artificial Sequence
  chemically synthesized
ataaacacagcagttattggat

SEQ ID NO: 14539 - DNA, 22 bp, Artificial Sequence
  chemically synthesized
taaacacagcagttattggatt

SEQ ID NO: 14540 - DNA, 22 bp, Artificial Sequence
  chemically synthesized
ttggattaggccccactctaat

SEQ ID NO: 14541 - DNA, 22 bp, Artificial Sequence
  chemically synthesized
gattaggccccactctaatcca

SEQ ID NO: 14542 - DNA, 22 bp, Artificial Sequence
  chemically synthesized
ggccccactctaatccagtatg

SEQ ID NO: 14543 - DNA, 22 bp, Artificial Sequence
  chemically synthesized
taatccagtatgaccccatttt

SEQ ID NO: 14544 - DNA, 22 bp, Artificial Sequence
  chemically synthesized
atccagtatgaccccattttaa

SEQ ID NO: 14545 - DNA, 22 bp, Artificial Sequence
  chemically synthesized
taacatgattacacttatttct

SEQ ID NO: 14546 - DNA, 22 bp, Artificial Sequence
  chemically synthesized
aacatgattacacttatttcta

SEQ ID NO: 14547 - DNA, 22 bp, Artificial Sequence
  chemically synthesized
acatgattacacttatttctag

SEQ ID NO: 14548 - DNA, 22 bp, Artificial Sequence
  chemically synthesized
cacttatttctagataaggtca

SEQ ID NO: 14549 - DNA, 22 bp, Artificial Sequence
  chemically synthesized
atttctagataaggtcacattc

SEQ ID NO: 14550 - DNA, 22 bp, Artificial Sequence
  chemically synthesized
tttctagataaggtcacattca

SEQ ID NO: 14551 - DNA, 22 bp, Artificial Sequence
  chemically synthesized
ctagataaggtcacattcacgt

SEQ ID NO: 14552 - DNA, 22 bp, Artificial Sequence
  chemically synthesized
tagataaggtcacattcacgta

SEQ ID NO: 14553 - DNA, 22 bp, Artificial Sequence
  chemically synthesized
gataaggtcacattcacgtaca

SEQ ID NO: 14554 - DNA, 22 bp, Artificial Sequence
  chemically synthesized
acgtacaccaagggttaggaat

SEQ ID NO: 14555 - DNA, 22 bp, Artificial Sequence
  chemically synthesized
ggaattgaacatatctttttgg

SEQ ID NO: 14556 - DNA, 22 bp, Artificial Sequence
  chemically synthesized
aacatatctttttgggggacac

SEQ ID NO: 14557 - DNA, 22 bp, Artificial Sequence
  chemically synthesized
tttgggggacacaattcaaccc

SEQ ID NO: 14558 - DNA, 22 bp, Artificial Sequence
  chemically synthesized
ttgggggacacaattcaaccca

SEQ ID NO: 14559 - DNA, 22 bp, Artificial Sequence
  chemically synthesized
tgggggacacaattcaacccac

SEQ ID NO: 14560 - DNA, 22 bp, Artificial Sequence
  chemically synthesized
gggggacacaattcaacccaca

SEQ ID NO: 14561 - DNA, 22 bp, Artificial Sequence
  chemically synthesized
ggggacacaattcaacccacaa

SEQ ID NO: 14562 - DNA, 22 bp, Artificial Sequence
  chemically synthesized
aacccacaagtgtcagtctcta

SEQ ID NO: 14563 - DNA, 22 bp, Artificial Sequence
  chemically synthesized
tagctgagcctttcccttcctg

SEQ ID NO: 14564 - DNA, 22 bp, Artificial Sequence
  chemically synthesized
gctgagcctttcccttcctgtt

SEQ ID NO: 14565 - DNA, 22 bp, Artificial Sequence
  chemically synthesized
agcctttcccttcctgtttttc

SEQ ID NO: 14566 - DNA, 22 bp, Artificial Sequence
  chemically synthesized
tcccttcctgtttttctccttt

SEQ ID NO: 14567 - DNA, 22 bp, Artificial Sequence
  chemically synthesized
cccttcctgtttttctcctttt

SEQ ID NO: 14568 - DNA, 22 bp, Artificial Sequence
  chemically synthesized
ccttcctgtttttctccttttt

SEQ ID NO: 14569 - DNA, 22 bp, Artificial Sequence
  chemically synthesized
cctgtttttctcctttttagtt

SEQ ID NO: 14570 - DNA, 22 bp, Artificial Sequence
  chemically synthesized
ctgtttttctcctttttagttg

SEQ ID NO: 14571 - DNA, 22 bp, Artificial Sequence
  chemically synthesized
tttttctcctttttagttgcta

SEQ ID NO: 14572 - DNA, 22 bp, Artificial Sequence
  chemically synthesized
ttctcctttttagttgctatgg

SEQ ID NO: 14573 - DNA, 22 bp, Artificial Sequence
  chemically synthesized
tctcctttttagttgctatggg

SEQ ID NO: 14574 - DNA, 22 bp, Artificial Sequence
  chemically synthesized
ctcctttttagttgctatgggt

SEQ ID NO: 14575 - DNA, 22 bp, Artificial Sequence
  chemically synthesized
tcctttttagttgctatgggtt

SEQ ID NO: 14576 - DNA, 22 bp, Artificial Sequence
  chemically synthesized
ctttttagttgctatgggttag

SEQ ID NO: 14577 - DNA, 22 bp, Artificial Sequence
  chemically synthesized
tttagttgctatgggttagggg

SEQ ID NO: 14578 - DNA, 22 bp, Artificial Sequence
  chemically synthesized
ttagttgctatgggttaggggc

SEQ ID NO: 14579 - DNA, 22 bp, Artificial Sequence
  chemically synthesized
tagttgctatgggttaggggcc

SEQ ID NO: 14580 - DNA, 22 bp, Artificial Sequence
  chemically synthesized
agttgctatgggttaggggcca

SEQ ID NO: 14581 - DNA, 22 bp, Artificial Sequence
  chemically synthesized
gttgctatgggttaggggccaa

SEQ ID NO: 14582 - DNA, 22 bp, Artificial Sequence
  chemically synthesized
ctatgggttaggggccaaatct

SEQ ID NO: 14583 - DNA, 22 bp, Artificial Sequence
  chemically synthesized
tgggttaggggccaaatctcca

SEQ ID NO: 14584 - DNA, 22 bp, Artificial Sequence
  chemically synthesized
ggggccaaatctccagtcatac

SEQ ID NO: 14585 - DNA, 22 bp, Artificial Sequence
  chemically synthesized
cagtcatactagaattgcacat

SEQ ID NO: 14586 - DNA, 22 bp, Artificial Sequence
  chemically synthesized
gaattgcacatggactggatat

SEQ ID NO: 14587 - DNA, 22 bp, Artificial Sequence
  chemically synthesized
cacatggactggatatttggga

SEQ ID NO: 14588 - DNA, 22 bp, Artificial Sequence
  chemically synthesized
gatatttgggaatactgcgggt

SEQ ID NO: 14589 - DNA, 22 bp, Artificial Sequence
  chemically synthesized
gggaatactgcgggtctattct

SEQ ID NO: 14590 - DNA, 22 bp, Artificial Sequence
  chemically synthesized
ggaatactgcgggtctattcta

SEQ ID NO: 14591 - DNA, 22 bp, Artificial Sequence
  chemically synthesized
cgggtctattctatgagcttta

SEQ ID NO: 14592 - DNA, 22 bp, Artificial Sequence
  chemically synthesized
ttctatgagctttagtatgtaa

SEQ ID NO: 14593 - DNA, 22 bp, Artificial Sequence
  chemically synthesized
tatgagctttagtatgtaacat

SEQ ID NO: 14594 - DNA, 22 bp, Artificial Sequence
  chemically synthesized
tgagctttagtatgtaacattt

SEQ ID NO: 14595 - DNA, 22 bp, Artificial Sequence
  chemically synthesized
tagtatgtaacatttaatatca

SEQ ID NO: 14596 - DNA, 22 bp, Artificial Sequence
  chemically synthesized
agtatgtaacatttaatatcag

SEQ ID NO: 14597 - DNA, 22 bp, Artificial Sequence
  chemically synthesized
gtatgtaacatttaatatcagt

SEQ ID NO: 14598 - DNA, 22 bp, Artificial Sequence
  chemically synthesized
aatatcagtgtaaagaagccct

SEQ ID NO: 14599 - DNA, 22 bp, Artificial Sequence
  chemically synthesized
atatcagtgtaaagaagccctt

SEQ ID NO: 14600 - DNA, 22 bp, Artificial Sequence
  chemically synthesized
ttttaagttatttctttgaatt

SEQ ID NO: 14601 - DNA, 22 bp, Artificial Sequence
  chemically synthesized
tttaagttatttctttgaattt

SEQ ID NO: 14602 - DNA, 22 bp, Artificial Sequence
  chemically synthesized
ttaagttatttctttgaatttc

SEQ ID NO: 14603 - DNA, 22 bp, Artificial Sequence
  chemically synthesized
taagttatttctttgaatttct

SEQ ID NO: 14604 - DNA, 22 bp, Artificial Sequence
  chemically synthesized
aagttatttctttgaatttcta

SEQ ID NO: 14605 - DNA, 22 bp, Artificial Sequence
  chemically synthesized
agttatttctttgaatttctaa

SEQ ID NO: 14606 - DNA, 22 bp, Artificial Sequence
  chemically synthesized
tttctttgaatttctaaatgta

SEQ ID NO: 14607 - DNA, 22 bp, Artificial Sequence
  chemically synthesized
ctttgaatttctaaatgtatgc

SEQ ID NO: 14608 - DNA, 22 bp, Artificial Sequence
  chemically synthesized
tttgaatttctaaatgtatgcc

SEQ ID NO: 14609 - DNA, 22 bp, Artificial Sequence
  chemically synthesized
tgaatttctaaatgtatgccct

SEQ ID NO: 14610 - DNA, 22 bp, Artificial Sequence
  chemically synthesized
gaatttctaaatgtatgccctg

SEQ ID NO: 14611 - DNA, 22 bp, Artificial Sequence
  chemically synthesized
aatttctaaatgtatgccctga

SEQ ID NO: 14612 - DNA, 22 bp, Artificial Sequence
  chemically synthesized
ctaaatgtatgccctgaatata

SEQ ID NO: 14613 - DNA, 22 bp, Artificial Sequence
  chemically synthesized
taaatgtatgccctgaatataa

SEQ ID NO: 14614 - DNA, 22 bp, Artificial Sequence
  chemically synthesized
aatgtatgccctgaatataagt

SEQ ID NO: 14615 - DNA, 22 bp, Artificial Sequence
  chemically synthesized
aatataagtaacaagttaccat

SEQ ID NO: 14616 - DNA, 22 bp, Artificial Sequence
  chemically synthesized
ccatgtcttgtaaaatgatcat

SEQ ID NO: 14617 - DNA, 22 bp, Artificial Sequence
  chemically synthesized
gtaaaatgatcatatcaacaaa

SEQ ID NO: 14618 - DNA, 22 bp, Artificial Sequence
  chemically synthesized
taaaatgatcatatcaacaaac

SEQ ID NO: 14619 - DNA, 22 bp, Artificial Sequence
  chemically synthesized
aatgtgcacctactgtgctagt

SEQ ID NO: 14620 - DNA, 22 bp, Artificial Sequence
  chemically synthesized
atgtgcacctactgtgctagtt

SEQ ID NO: 14621 - DNA, 22 bp, Artificial Sequence
  chemically synthesized
ctgtgctagttgaatgtcttta

SEQ ID NO: 14622 - DNA, 22 bp, Artificial Sequence
  chemically synthesized
tgctagttgaatgtctttatcc

SEQ ID NO: 14623 - DNA, 22 bp, Artificial Sequence
  chemically synthesized
gttgaatgtctttatcctgata

SEQ ID NO: 14624 - DNA, 22 bp, Artificial Sequence
  chemically synthesized
aatgtctttatcctgataggag

SEQ ID NO: 14625 - DNA, 22 bp, Artificial Sequence
  chemically synthesized
tatcctgataggagataacagg

SEQ ID NO: 14626 - DNA, 22 bp, Artificial Sequence
  chemically synthesized
atcctgataggagataacagga

SEQ ID NO: 14627 - DNA, 22 bp, Artificial Sequence
  chemically synthesized
tcctgataggagataacaggat

SEQ ID NO: 14628 - DNA, 22 bp, Artificial Sequence
  chemically synthesized
ataggagataacaggattccac

SEQ ID NO: 14629 - DNA, 22 bp, Artificial Sequence
  chemically synthesized
cacatctttgacttaagaggac

SEQ ID NO: 14630 - DNA, 22 bp, Artificial Sequence
  chemically synthesized
tgacttaagaggacaaaccaaa

SEQ ID NO: 14631 - DNA, 22 bp, Artificial Sequence
  chemically synthesized
gacttaagaggacaaaccaaat

SEQ ID NO: 14632 - DNA, 22 bp, Artificial Sequence
  chemically synthesized
acttaagaggacaaaccaaata

SEQ ID NO: 14633 - DNA, 22 bp, Artificial Sequence
  chemically synthesized
aagaggacaaaccaaatatgtc

SEQ ID NO: 14634 - DNA, 22 bp, Artificial Sequence
  chemically synthesized
agaggacaaaccaaatatgtct

SEQ ID NO: 14635 - DNA, 22 bp, Artificial Sequence
  chemically synthesized
aatcatttggggttttgatgga

SEQ ID NO: 14636 - DNA, 22 bp, Artificial Sequence
  chemically synthesized
ggggttttgatggatatcttta

SEQ ID NO: 14637 - DNA, 22 bp, Artificial Sequence
  chemically synthesized
gggttttgatggatatctttaa

SEQ ID NO: 14638 - DNA, 22 bp, Artificial Sequence
  chemically synthesized
tgatggatatctttaaattgct

SEQ ID NO: 14639 - DNA, 22 bp, Artificial Sequence
  chemically synthesized
gatggatatctttaaattgctg

SEQ ID NO: 14640 - DNA, 22 bp, Artificial Sequence
  chemically synthesized
atggatatctttaaattgctga

SEQ ID NO: 14641 - DNA, 22 bp, Artificial Sequence
  chemically synthesized
taaattgctgaacctaatcatt

SEQ ID NO: 14642 - DNA, 22 bp, Artificial Sequence
  chemically synthesized
aaattgctgaacctaatcattg

SEQ ID NO: 14643 - DNA, 22 bp, Artificial Sequence
  chemically synthesized
aattgctgaacctaatcattgg

SEQ ID NO: 14644 - DNA, 22 bp, Artificial Sequence
  chemically synthesized
ctgaacctaatcattggtttca

SEQ ID NO: 14645 - DNA, 22 bp, Artificial Sequence
  chemically synthesized
aacctaatcattggtttcatat

SEQ ID NO: 14646 - DNA, 22 bp, Artificial Sequence
  chemically synthesized
atcattggtttcatatgtcatt

SEQ ID NO: 14647 - DNA, 22 bp, Artificial Sequence
  chemically synthesized
gtttcatatgtcattgtttaga

SEQ ID NO: 14648 - DNA, 22 bp, Artificial Sequence
  chemically synthesized
catatgtcattgtttagatatc

SEQ ID NO: 14649 - DNA, 22 bp, Artificial Sequence
  chemically synthesized
atatgtcattgtttagatatct

SEQ ID NO: 14650 - DNA, 22 bp, Artificial Sequence
  chemically synthesized
tttagatatctccggagcattt

SEQ ID NO: 14651 - DNA, 22 bp, Artificial Sequence
  chemically synthesized
agatatctccggagcatttgga

SEQ ID NO: 14652 - DNA, 22 bp, Artificial Sequence
  chemically synthesized
gatatctccggagcatttggat

SEQ ID NO: 14653 - DNA, 22 bp, Artificial Sequence
  chemically synthesized
cggagcatttggataatgtgac

SEQ ID NO: 14654 - DNA, 22 bp, Artificial Sequence
  chemically synthesized
ggataatgtgacagttggaatg

SEQ ID NO: 14655 - DNA, 22 bp, Artificial Sequence
  chemically synthesized
gataatgtgacagttggaatgc

SEQ ID NO: 14656 - DNA, 22 bp, Artificial Sequence
  chemically synthesized
gaatgcagtgatgtcgactctt

SEQ ID NO: 14657 - DNA, 22 bp, Artificial Sequence
  chemically synthesized
tttgcccaccgccatctccagc

SEQ ID NO: 14658 - DNA, 22 bp, Artificial Sequence
  chemically synthesized
tgcccaccgccatctccagctg

SEQ ID NO: 14659 - DNA, 22 bp, Artificial Sequence
  chemically synthesized
gcccaccgccatctccagctgt

SEQ ID NO: 14660 - DNA, 22 bp, Artificial Sequence
  chemically synthesized
cccaccgccatctccagctgtt

SEQ ID NO: 14661 - DNA, 22 bp, Artificial Sequence
  chemically synthesized
cagctgttgccaagacagagat

SEQ ID NO: 14662 - DNA, 22 bp, Artificial Sequence
  chemically synthesized
ttgccaagacagagattgcttt

SEQ ID NO: 14663 - DNA, 22 bp, Artificial Sequence
  chemically synthesized
ccaagacagagattgctttaag

SEQ ID NO: 14664 - DNA, 22 bp, Artificial Sequence
  chemically synthesized
ctttaagtggcaaatcaccttt

SEQ ID NO: 14665 - DNA, 22 bp, Artificial Sequence
  chemically synthesized
taagtggcaaatcacctttatt

SEQ ID NO: 14666 - DNA, 22 bp, Artificial Sequence
  chemically synthesized
aagtggcaaatcacctttatta

SEQ ID NO: 14667 - DNA, 22 bp, Artificial Sequence
  chemically synthesized
agtggcaaatcacctttattag

SEQ ID NO: 14668 - DNA, 22 bp, Artificial Sequence
  chemically synthesized
tattagcagctacttttgctta

SEQ ID NO: 14669 - DNA, 22 bp, Artificial Sequence
  chemically synthesized
attagcagctacttttgcttac

SEQ ID NO: 14670 - DNA, 22 bp, Artificial Sequence
  chemically synthesized
ttagcagctacttttgcttact

SEQ ID NO: 14671 - DNA, 22 bp, Artificial Sequence
  chemically synthesized
gcagctacttttgcttactggg

SEQ ID NO: 14672 - DNA, 22 bp, Artificial Sequence
  chemically synthesized
cttttgcttactgggacaatat

SEQ ID NO: 14673 - DNA, 22 bp, Artificial Sequence
  chemically synthesized
ttgcttactgggacaatattct

SEQ ID NO: 14674 - DNA, 22 bp, Artificial Sequence
  chemically synthesized
tgcttactgggacaatattctt

SEQ ID NO: 14675 - DNA, 22 bp, Artificial Sequence
  chemically synthesized
gcttactgggacaatattcttg

SEQ ID NO: 14676 - DNA, 22 bp, Artificial Sequence
  chemically synthesized
cttactgggacaatattcttgg

SEQ ID NO: 14677 - DNA, 22 bp, Artificial Sequence
  chemically synthesized
actgggacaatattcttggtcc

SEQ ID NO: 14678 - DNA, 22 bp, Artificial Sequence
  chemically synthesized
ctgggacaatattcttggtcct

SEQ ID NO: 14679 - DNA, 22 bp, Artificial Sequence
  chemically synthesized
ggacaatattcttggtcctaga

SEQ ID NO: 14680 - DNA, 22 bp, Artificial Sequence
  chemically synthesized
ttggtcctagagtaaggcacat

SEQ ID NO: 14681 - DNA, 22 bp, Artificial Sequence
  chemically synthesized
ggtcctagagtaaggcacattt

SEQ ID NO: 14682 - DNA, 22 bp, Artificial Sequence
  chemically synthesized
gtcctagagtaaggcacatttg

SEQ ID NO: 14683 - DNA, 22 bp, Artificial Sequence
  chemically synthesized
gagtaaggcacatttgggctcc

SEQ ID NO: 14684 - DNA, 22 bp, Artificial Sequence
  chemically synthesized
gggctccaaagacagaacaggt

SEQ ID NO: 14685 - DNA, 22 bp, Artificial Sequence
  chemically synthesized
ggctccaaagacagaacaggta

SEQ ID NO: 14686 - DNA, 22 bp, Artificial Sequence
  chemically synthesized
caaagacagaacaggtacttct

SEQ ID NO: 14687 - DNA, 22 bp, Artificial Sequence
  chemically synthesized
ctcagtgatggagaaataactt

SEQ ID NO: 14688 - DNA, 22 bp, Artificial Sequence
  chemically synthesized
tcagtgatggagaaataacttt

SEQ ID NO: 14689 - DNA, 22 bp, Artificial Sequence
  chemically synthesized
agtgatggagaaataacttttc

SEQ ID NO: 14690 - DNA, 22 bp, Artificial Sequence
  chemically synthesized
ttcttgccaaccacactctaaa

SEQ ID NO: 14691 - DNA, 22 bp, Artificial Sequence
  chemically synthesized
tcttgccaaccacactctaaat

SEQ ID NO: 14692 - DNA, 22 bp, Artificial Sequence
  chemically synthesized
cttgccaaccacactctaaatg

SEQ ID NO: 14693 - DNA, 22 bp, Artificial Sequence
  chemically synthesized
ttgccaaccacactctaaatgg

SEQ ID NO: 14694 - DNA, 22 bp, Artificial Sequence
  chemically synthesized
gccaaccacactctaaatggag

SEQ ID NO: 14695 - DNA, 22 bp, Artificial Sequence
  chemically synthesized
ccaaccacactctaaatggaga

SEQ ID NO: 14696 - DNA, 22 bp, Artificial Sequence
  chemically synthesized
taaatggagaaatccttcgaaa

SEQ ID NO: 14697 - DNA, 22 bp, Artificial Sequence
  chemically synthesized
aatggagaaatccttcgaaatg

SEQ ID NO: 14698 - DNA, 22 bp, Artificial Sequence
  chemically synthesized
cgaaatgcagagagtggtgcta

SEQ ID NO: 14699 - DNA, 22 bp, Artificial Sequence
  chemically synthesized
gaaatgcagagagtggtgctat

SEQ ID NO: 14700 - DNA, 22 bp, Artificial Sequence
  chemically synthesized
tagatgtaaagttttttgtctt

SEQ ID NO: 14701 - DNA, 22 bp, Artificial Sequence
  chemically synthesized
tttgtcttgtctgaaaagggag

SEQ ID NO: 14702 - DNA, 22 bp, Artificial Sequence
  chemically synthesized
ttgtcttgtctgaaaagggagt

SEQ ID NO: 14703 - DNA, 22 bp, Artificial Sequence
  chemically synthesized
tgtcttgtctgaaaagggagtg

SEQ ID NO: 14704 - DNA, 22 bp, Artificial Sequence
  chemically synthesized
gtcttgtctgaaaagggagtga

SEQ ID NO: 14705 - DNA, 22 bp, Artificial Sequence
  chemically synthesized
tcttgtctgaaaagggagtgat

SEQ ID NO: 14706 - DNA, 22 bp, Artificial Sequence
  chemically synthesized
gtctgaaaagggagtgattatt

SEQ ID NO: 14707 - DNA, 22 bp, Artificial Sequence
  chemically synthesized
tctgaaaagggagtgattattg

SEQ ID NO: 14708 - DNA, 22 bp, Artificial Sequence
  chemically synthesized
aaaagggagtgattattgtttc

SEQ ID NO: 14709 - DNA, 22 bp, Artificial Sequence
  chemically synthesized
ttgtttcattaatctttgatgg

SEQ ID NO: 14710 - DNA, 22 bp, Artificial Sequence
  chemically synthesized
tttcattaatctttgatggaaa

SEQ ID NO: 14711 - DNA, 22 bp, Artificial Sequence
  chemically synthesized
cattaatctttgatggaaactg

SEQ ID NO: 14712 - DNA, 22 bp, Artificial Sequence
  chemically synthesized
attaatctttgatggaaactgg

SEQ ID NO: 14713 - DNA, 22 bp, Artificial Sequence
  chemically synthesized
atctttgatggaaactggaatg

SEQ ID NO: 14714 - DNA, 22 bp, Artificial Sequence
  chemically synthesized
tgatggaaactggaatggggat

SEQ ID NO: 14715 - DNA, 22 bp, Artificial Sequence
  chemically synthesized
gatggaaactggaatggggatc

SEQ ID NO: 14716 - DNA, 22 bp, Artificial Sequence
  chemically synthesized
atggaaactggaatggggatcg

SEQ ID NO: 14717 - DNA, 22 bp, Artificial Sequence
  chemically synthesized
gaatggggatcgcagcacatat

SEQ ID NO: 14718 - DNA, 22 bp, Artificial Sequence
  chemically synthesized
tcaattatacttccacagacag

SEQ ID NO: 14719 - DNA, 22 bp, Artificial Sequence
  chemically synthesized
tacttccacagacagaacttag

SEQ ID NO: 14720 - DNA, 22 bp, Artificial Sequence
  chemically synthesized
ccacagacagaacttagtttct

SEQ ID NO: 14721 - DNA, 22 bp, Artificial Sequence
  chemically synthesized
cacagacagaacttagtttcta

SEQ ID NO: 14722 - DNA, 22 bp, Artificial Sequence
  chemically synthesized
agtttctacctcccacttcata

SEQ ID NO: 14723 - DNA, 22 bp, Artificial Sequence
  chemically synthesized
gtttctacctcccacttcatag

SEQ ID NO: 14724 - DNA, 22 bp, Artificial Sequence
  chemically synthesized
ctacctcccacttcatagagtg

SEQ ID NO: 14725 - DNA, 22 bp, Artificial Sequence
  chemically synthesized
tacctcccacttcatagagtgt

SEQ ID NO: 14726 - DNA, 22 bp, Artificial Sequence
  chemically synthesized
cctcccacttcatagagtgtgt

SEQ ID NO: 14727 - DNA, 22 bp, Artificial Sequence
  chemically synthesized
ccacttcatagagtgtgtgttg

SEQ ID NO: 14728 - DNA, 22 bp, Artificial Sequence
  chemically synthesized
catagagtgtgtgttgatagat

SEQ ID NO: 14729 - DNA, 22 bp, Artificial Sequence
  chemically synthesized
atagagtgtgtgttgatagatt

SEQ ID NO: 14730 - DNA, 22 bp, Artificial Sequence
  chemically synthesized
atagattaacacatataatccg

SEQ ID NO: 14731 - DNA, 22 bp, Artificial Sequence
  chemically synthesized
acacatataatccggaaaggaa

SEQ ID NO: 14732 - DNA, 22 bp, Artificial Sequence
  chemically synthesized
ttcagcttattaatcatgttaa

SEQ ID NO: 14733 - DNA, 22 bp, Artificial Sequence
  chemically synthesized
tcagcttattaatcatgttaac

SEQ ID NO: 14734 - DNA, 22 bp, Artificial Sequence
  chemically synthesized
cagcttattaatcatgttaacc

SEQ ID NO: 14735 - DNA, 22 bp, Artificial Sequence
  chemically synthesized
agcttattaatcatgttaacct

SEQ ID NO: 14736 - DNA, 22 bp, Artificial Sequence
  chemically synthesized
attaatcatgttaacctatctg

SEQ ID NO: 14737 - DNA, 22 bp, Artificial Sequence
  chemically synthesized
ttaatcatgttaacctatctgt

SEQ ID NO: 14738 - DNA, 22 bp, Artificial Sequence
  chemically synthesized
atcatgttaacctatctgttga

SEQ ID NO: 14739 - DNA, 22 bp, Artificial Sequence
  chemically synthesized
acctatctgttgaaagcttatt

SEQ ID NO: 14740 - DNA, 22 bp, Artificial Sequence
  chemically synthesized
tctgttgaaagcttattttctg

SEQ ID NO: 14741 - DNA, 22 bp, Artificial Sequence
  chemically synthesized
ttgaaagcttattttctggtac

SEQ ID NO: 14742 - DNA, 22 bp, Artificial Sequence
  chemically synthesized
aaagcttattttctggtacata

SEQ ID NO: 14743 - DNA, 22 bp, Artificial Sequence
  chemically synthesized
attttctggtacatataaatct

SEQ ID NO: 14744 - DNA, 22 bp, Artificial Sequence
  chemically synthesized
ttttctggtacatataaatctt

SEQ ID NO: 14745 - DNA, 22 bp, Artificial Sequence
  chemically synthesized
tctggtacatataaatcttatt

SEQ ID NO: 14746 - DNA, 22 bp, Artificial Sequence
  chemically synthesized
ctggtacatataaatcttattt

SEQ ID NO: 14747 - DNA, 22 bp, Artificial Sequence
  chemically synthesized
tggtacatataaatcttatttt

SEQ ID NO: 14748 - DNA, 22 bp, Artificial Sequence
  chemically synthesized
gtacatataaatcttatttttt

SEQ ID NO: 14749 - DNA, 22 bp, Artificial Sequence
  chemically synthesized
atttttttaattatatgcagtg

SEQ ID NO: 14750 - DNA, 22 bp, Artificial Sequence
  chemically synthesized
tttttttaattatatgcagtga

SEQ ID NO: 14751 - DNA, 22 bp, Artificial Sequence
  chemically synthesized
ttttaattatatgcagtgaaca

SEQ ID NO: 14752 - DNA, 22 bp, Artificial Sequence
  chemically synthesized
tttaattatatgcagtgaacat

SEQ ID NO: 14753 - DNA, 22 bp, Artificial Sequence
  chemically synthesized
ttaattatatgcagtgaacatc

SEQ ID NO: 14754 - DNA, 22 bp, Artificial Sequence
  chemically synthesized
taattatatgcagtgaacatca

SEQ ID NO: 14755 - DNA, 22 bp, Artificial Sequence
  chemically synthesized
aattatatgcagtgaacatcaa

SEQ ID NO: 14756 - DNA, 22 bp, Artificial Sequence
  chemically synthesized
attatatgcagtgaacatcaaa

SEQ ID NO: 14757 - DNA, 22 bp, Artificial Sequence
  chemically synthesized
tatgcagtgaacatcaaacaat

SEQ ID NO: 14758 - DNA, 22 bp, Artificial Sequence
  chemically synthesized
tttattttgcatttaccctatt

SEQ ID NO: 14759 - DNA, 22 bp, Artificial Sequence
  chemically synthesized
attttgcatttaccctattaga

SEQ ID NO: 14760 - DNA, 22 bp, Artificial Sequence
  chemically synthesized
ttttgcatttaccctattagat

SEQ ID NO: 14761 - DNA, 22 bp, Artificial Sequence
  chemically synthesized
tgcatttaccctattagataca

SEQ ID NO: 14762 - DNA, 22 bp, Artificial Sequence
  chemically synthesized
gcatttaccctattagatacaa

SEQ ID NO: 14763 - DNA, 22 bp, Artificial Sequence
  chemically synthesized
catttaccctattagatacaaa

SEQ ID NO: 14764 - DNA, 22 bp, Artificial Sequence
  chemically synthesized
accctattagatacaaatacat

SEQ ID NO: 14765 - DNA, 22 bp, Artificial Sequence
  chemically synthesized
ccctattagatacaaatacatc

SEQ ID NO: 14766 - DNA, 22 bp, Artificial Sequence
  chemically synthesized
ttagatacaaatacatctggtc

SEQ ID NO: 14767 - DNA, 22 bp, Artificial Sequence
  chemically synthesized
gatacaaatacatctggtctga

SEQ ID NO: 14768 - DNA, 22 bp, Artificial Sequence
  chemically synthesized
gtctgatacctgtcatcttcat

SEQ ID NO: 14769 - DNA, 22 bp, Artificial Sequence
  chemically synthesized
atacctgtcatcttcatattaa

SEQ ID NO: 14770 - DNA, 22 bp, Artificial Sequence
  chemically synthesized
tcatcttcatattaactgtgga

SEQ ID NO: 14771 - DNA, 22 bp, Artificial Sequence
  chemically synthesized
catattaactgtggaaggtacg

SEQ ID NO: 14772 - DNA, 22 bp, Artificial Sequence
  chemically synthesized
atattaactgtggaaggtacga

SEQ ID NO: 14773 - DNA, 22 bp, Artificial Sequence
  chemically synthesized
actgtggaaggtacgaaatggt

SEQ ID NO: 14774 - DNA, 22 bp, Artificial Sequence
  chemically synthesized
tggaaggtacgaaatggtagct

SEQ ID NO: 14775 - DNA, 22 bp, Artificial Sequence
  chemically synthesized
cacattatagatgaaaagctaa

SEQ ID NO: 14776 - DNA, 22 bp, Artificial Sequence
  chemically synthesized
tagatgaaaagctaaagcttag

SEQ ID NO: 14777 - DNA, 22 bp, Artificial Sequence
  chemically synthesized
aagcttagacaaataaagaaac

SEQ ID NO: 14778 - DNA, 22 bp, Artificial Sequence
  chemically synthesized
agacaaataaagaaacttttag

SEQ ID NO: 14779 - DNA, 22 bp, Artificial Sequence
  chemically synthesized
gacaaataaagaaacttttaga

SEQ ID NO: 14780 - DNA, 22 bp, Artificial Sequence
  chemically synthesized
ttagaccctggattcttcttgg

SEQ ID NO: 14781 - DNA, 22 bp, Artificial Sequence
  chemically synthesized
tagaccctggattcttcttggg

SEQ ID NO: 14782 - DNA, 22 bp, Artificial Sequence
  chemically synthesized
agaccctggattcttcttggga

SEQ ID NO: 14783 - DNA, 22 bp, Artificial Sequence
  chemically synthesized
gaccctggattcttcttgggag

SEQ ID NO: 14784 - DNA, 22 bp, Artificial Sequence
  chemically synthesized
gattcttcttgggagcctttga

SEQ ID NO: 14785 - DNA, 22 bp, Artificial Sequence
  chemically synthesized
ttcttgggagcctttgactcta

SEQ ID NO: 14786 - DNA, 22 bp, Artificial Sequence
  chemically synthesized
cttgggagcctttgactctaat

SEQ ID NO: 14787 - DNA, 22 bp, Artificial Sequence
  chemically synthesized
ttgggagcctttgactctaata

SEQ ID NO: 14788 - DNA, 22 bp, Artificial Sequence
  chemically synthesized
gggagcctttgactctaatacc

SEQ ID NO: 14789 - DNA, 22 bp, Artificial Sequence
  chemically synthesized
ggagcctttgactctaatacct

SEQ ID NO: 14790 - DNA, 22 bp, Artificial Sequence
  chemically synthesized
tgactctaataccttttgtttc

SEQ ID NO: 14791 - DNA, 22 bp, Artificial Sequence
  chemically synthesized
gactctaataccttttgtttcc

SEQ ID NO: 14792 - DNA, 22 bp, Artificial Sequence
  chemically synthesized
actctaataccttttgtttccc

SEQ ID NO: 14793 - DNA, 22 bp, Artificial Sequence
  chemically synthesized
taataccttttgtttccctttc

SEQ ID NO: 14794 - DNA, 22 bp, Artificial Sequence
  chemically synthesized
ataccttttgtttccctttcat

SEQ ID NO: 14795 - DNA, 22 bp, Artificial Sequence
  chemically synthesized
ttgtttccctttcattgcacaa

SEQ ID NO: 14796 - DNA, 22 bp, Artificial Sequence
  chemically synthesized
tgtttccctttcattgcacaat

SEQ ID NO: 14797 - DNA, 22 bp, Artificial Sequence
  chemically synthesized
gtttccctttcattgcacaatt

SEQ ID NO: 14798 - DNA, 22 bp, Artificial Sequence
  chemically synthesized
tttccctttcattgcacaattc

SEQ ID NO: 14799 - DNA, 22 bp, Artificial Sequence
  chemically synthesized
ccctttcattgcacaattctgt

SEQ ID NO: 14800 - DNA, 22 bp, Artificial Sequence
  chemically synthesized
cctttcattgcacaattctgtc

SEQ ID NO: 14801 - DNA, 22 bp, Artificial Sequence
  chemically synthesized
tcattgcacaattctgtctttt

SEQ ID NO: 14802 - DNA, 22 bp, Artificial Sequence
  chemically synthesized
cattgcacaattctgtcttttg

SEQ ID NO: 14803 - DNA, 22 bp, Artificial Sequence
  chemically synthesized
attgcacaattctgtcttttgc

SEQ ID NO: 14804 - DNA, 22 bp, Artificial Sequence
  chemically synthesized
cacaattctgtcttttgcttac

SEQ ID NO: 14805 - DNA, 22 bp, Artificial Sequence
  chemically synthesized
tgtcttttgcttactactatgt

SEQ ID NO: 14806 - DNA, 22 bp, Artificial Sequence
  chemically synthesized
tcttttgcttactactatgtgt

SEQ ID NO: 14807 - DNA, 22 bp, Artificial Sequence
  chemically synthesized
ttgcttactactatgtgtaagt

SEQ ID NO: 14808 - DNA, 22 bp, Artificial Sequence
  chemically synthesized
tgcttactactatgtgtaagta

SEQ ID NO: 14809 - DNA, 22 bp, Artificial Sequence
  chemically synthesized
gcttactactatgtgtaagtat

SEQ ID NO: 14810 - DNA, 22 bp, Artificial Sequence
  chemically synthesized
cttactactatgtgtaagtata

SEQ ID NO: 14811 - DNA, 22 bp, Artificial Sequence
  chemically synthesized
actactatgtgtaagtataaca

SEQ ID NO: 14812 - DNA, 22 bp, Artificial Sequence
  chemically synthesized
ctactatgtgtaagtataacag

SEQ ID NO: 14813 - DNA, 22 bp, Artificial Sequence
  chemically synthesized
ctatgtgtaagtataacagttc

SEQ ID NO: 14814 - DNA, 22 bp, Artificial Sequence
  chemically synthesized
tgtgtaagtataacagttcaaa

SEQ ID NO: 14815 - DNA, 22 bp, Artificial Sequence
  chemically synthesized
aaagtaatagtttcataagctg

SEQ ID NO: 14816 - DNA, 22 bp, Artificial Sequence
  chemically synthesized
cataagctgttggtcatgtagc

SEQ ID NO: 14817 - DNA, 22 bp, Artificial Sequence
  chemically synthesized
ataagctgttggtcatgtagcc

SEQ ID NO: 14818 - DNA, 22 bp, Artificial Sequence
  chemically synthesized
ttggtcatgtagcctttggtct

SEQ ID NO: 14819 - DNA, 22 bp, Artificial Sequence
  chemically synthesized
gtcatgtagcctttggtctctt

SEQ ID NO: 14820 - DNA, 22 bp, Artificial Sequence
  chemically synthesized
tggtctctttaacctctttgcc

SEQ ID NO: 14821 - DNA, 22 bp, Artificial Sequence
  chemically synthesized
ggtctctttaacctctttgcca

SEQ ID NO: 14822 - DNA, 22 bp, Artificial Sequence
  chemically synthesized
gtctctttaacctctttgccaa

SEQ ID NO: 14823 - DNA, 22 bp, Artificial Sequence
  chemically synthesized
tttaacctctttgccaagttcc

SEQ ID NO: 14824 - DNA, 22 bp, Artificial Sequence
  chemically synthesized
taacctctttgccaagttccca

SEQ ID NO: 14825 - DNA, 22 bp, Artificial Sequence
  chemically synthesized
aacctctttgccaagttcccag

SEQ ID NO: 14826 - DNA, 22 bp, Artificial Sequence
  chemically synthesized
acctctttgccaagttcccagg

SEQ ID NO: 14827 - DNA, 22 bp, Artificial Sequence
  chemically synthesized
tttgccaagttcccaggttcat

SEQ ID NO: 14828 - DNA, 22 bp, Artificial Sequence
  chemically synthesized
tgccaagttcccaggttcataa

SEQ ID NO: 14829 - DNA, 22 bp, Artificial Sequence
  chemically synthesized
gccaagttcccaggttcataaa

SEQ ID NO: 14830 - DNA, 22 bp, Artificial Sequence
  chemically synthesized
ccaagttcccaggttcataaaa

SEQ ID NO: 14831 - DNA, 22 bp, Artificial Sequence
  chemically synthesized
ccaggttcataaaatgaggagg

SEQ ID NO: 14832 - DNA, 22 bp, Artificial Sequence
  chemically synthesized
ataaaatgaggaggttgaatgg

SEQ ID NO: 14833 - DNA, 22 bp, Artificial Sequence
  chemically synthesized
aatggaatggttcccaagagaa

SEQ ID NO: 14834 - DNA, 22 bp, Artificial Sequence
  chemically synthesized
ccaagagaattccttttaatct

SEQ ID NO: 14835 - DNA, 22 bp, Artificial Sequence
  chemically synthesized
cttttaatcttacagaaattat

SEQ ID NO: 14836 - DNA, 22 bp, Artificial Sequence
  chemically synthesized
ttaatcttacagaaattattgt

SEQ ID NO: 14837 - DNA, 22 bp, Artificial Sequence
  chemically synthesized
taatcttacagaaattattgtt

SEQ ID NO: 14838 - DNA, 22 bp, Artificial Sequence
  chemically synthesized
aatcttacagaaattattgttt

SEQ ID NO: 14839 - DNA, 22 bp, Artificial Sequence
  chemically synthesized
atcttacagaaattattgtttt

SEQ ID NO: 14840 - DNA, 22 bp, Artificial Sequence
  chemically synthesized
acagaaattattgttttcctaa

SEQ ID NO: 14841 - DNA, 22 bp, Artificial Sequence
  chemically synthesized
cagaaattattgttttcctaaa

SEQ ID NO: 14842 - DNA, 22 bp, Artificial Sequence
  chemically synthesized
ttgttttcctaaatcctgtagt

SEQ ID NO: 14843 - DNA, 22 bp, Artificial Sequence
  chemically synthesized
ttttcctaaatcctgtagttga

SEQ ID NO: 14844 - DNA, 22 bp, Artificial Sequence
  chemically synthesized
tcctaaatcctgtagttgaata

SEQ ID NO: 14845 - DNA, 22 bp, Artificial Sequence
  chemically synthesized
cctaaatcctgtagttgaatat

SEQ ID NO: 14846 - DNA, 22 bp, Artificial Sequence
  chemically synthesized
ctaaatcctgtagttgaatata

SEQ ID NO: 14847 - DNA, 22 bp, Artificial Sequence
  chemically synthesized
aatcctgtagttgaatatataa

SEQ ID NO: 14848 - DNA, 22 bp, Artificial Sequence
  chemically synthesized
tagttgaatatataatgctatt

SEQ ID NO: 14849 - DNA, 22 bp, Artificial Sequence
  chemically synthesized
aatatataatgctatttacatt

SEQ ID NO: 14850 - DNA, 22 bp, Artificial Sequence
  chemically synthesized
tttacatttcagtatagttttg

SEQ ID NO: 14851 - DNA, 22 bp, Artificial Sequence
  chemically synthesized
acatttcagtatagttttgatg

SEQ ID NO: 14852 - DNA, 22 bp, Artificial Sequence
  chemically synthesized
catttcagtatagttttgatgt

SEQ ID NO: 14853 - DNA, 22 bp, Artificial Sequence
  chemically synthesized
cagtatagttttgatgtatcta

SEQ ID NO: 14854 - DNA, 22 bp, Artificial Sequence
  chemically synthesized
agtatagttttgatgtatctaa

SEQ ID NO: 14855 - DNA, 22 bp, Artificial Sequence
  chemically synthesized
tgatgtatctaaagaacacatt

SEQ ID NO: 14856 - DNA, 22 bp, Artificial Sequence
  chemically synthesized
gatgtatctaaagaacacattg

SEQ ID NO: 14857 - DNA, 22 bp, Artificial Sequence
  chemically synthesized
atgtatctaaagaacacattga

SEQ ID NO: 14858 - DNA, 22 bp, Artificial Sequence
  chemically synthesized
aagaacacattgaattctcctt

SEQ ID NO: 14859 - DNA, 22 bp, Artificial Sequence
  chemically synthesized
aattctccttcctgtgttccag

SEQ ID NO: 14860 - DNA, 22 bp, Artificial Sequence
  chemically synthesized
tccttcctgtgttccagtttga

SEQ ID NO: 14861 - DNA, 22 bp, Artificial Sequence
  chemically synthesized
cttcctgtgttccagtttgata

SEQ ID NO: 14862 - DNA, 22 bp, Artificial Sequence
  chemically synthesized
cctgtgttccagtttgatacta

SEQ ID NO: 14863 - DNA, 22 bp, Artificial Sequence
  chemically synthesized
ctgtgttccagtttgatactaa

SEQ ID NO: 14864 - DNA, 22 bp, Artificial Sequence
  chemically synthesized
tgttccagtttgatactaacct

SEQ ID NO: 14865 - DNA, 22 bp, Artificial Sequence
  chemically synthesized
cagtttgatactaacctgaaag

SEQ ID NO: 14866 - DNA, 22 bp, Artificial Sequence
  chemically synthesized
gatactaacctgaaagtccatt

SEQ ID NO: 14867 - DNA, 22 bp, Artificial Sequence
  chemically synthesized
atactaacctgaaagtccatta

SEQ ID NO: 14868 - DNA, 22 bp, Artificial Sequence
  chemically synthesized
acctgaaagtccattaagcatt

SEQ ID NO: 14869 - DNA, 22 bp, Artificial Sequence
  chemically synthesized
aaagtccattaagcattaccag

SEQ ID NO: 14870 - DNA, 22 bp, Artificial Sequence
  chemically synthesized
agcattaccagttttaaaaggc

SEQ ID NO: 14871 - DNA, 22 bp, Artificial Sequence
  chemically synthesized
ccagttttaaaaggcttttgcc

SEQ ID NO: 14872 - DNA, 22 bp, Artificial Sequence
  chemically synthesized
taaaaggcttttgcccaatagt

SEQ ID NO: 14873 - DNA, 22 bp, Artificial Sequence
  chemically synthesized
aaaaggcttttgcccaatagta

SEQ ID NO: 14874 - DNA, 22 bp, Artificial Sequence
  chemically synthesized
aaaggcttttgcccaatagtaa

SEQ ID NO: 14875 - DNA, 22 bp, Artificial Sequence
  chemically synthesized
ttgcccaatagtaaggaaaaat

SEQ ID NO: 14876 - DNA, 22 bp, Artificial Sequence
  chemically synthesized
tgcccaatagtaaggaaaaata

SEQ ID NO: 14877 - DNA, 22 bp, Artificial Sequence
  chemically synthesized
gcccaatagtaaggaaaaataa

SEQ ID NO: 14878 - DNA, 22 bp, Artificial Sequence
  chemically synthesized
cccaatagtaaggaaaaataat

SEQ ID NO: 14879 - DNA, 22 bp, Artificial Sequence
  chemically synthesized
ttaaaagaataattttttacta

SEQ ID NO: 14880 - DNA, 22 bp, Artificial Sequence
  chemically synthesized
taaaagaataattttttactat

SEQ ID NO: 14881 - DNA, 22 bp, Artificial Sequence
  chemically synthesized
aaaagaataattttttactatg

SEQ ID NO: 14882 - DNA, 22 bp, Artificial Sequence
  chemically synthesized
aaagaataattttttactatgt

SEQ ID NO: 14883 - DNA, 22 bp, Artificial Sequence
  chemically synthesized
tttactatgtttgcaggcttac

SEQ ID NO: 14884 - DNA, 22 bp, Artificial Sequence
  chemically synthesized
ttactatgtttgcaggcttact

SEQ ID NO: 14885 - DNA, 22 bp, Artificial Sequence
  chemically synthesized
tactatgtttgcaggcttactt

SEQ ID NO: 14886 - DNA, 22 bp, Artificial Sequence
  chemically synthesized
actatgtttgcaggcttacttc

SEQ ID NO: 14887 - DNA, 22 bp, Artificial Sequence
  chemically synthesized
ctatgtttgcaggcttacttcc

SEQ ID NO: 14888 - DNA, 22 bp, Artificial Sequence
  chemically synthesized
tgtttgcaggcttacttccttt

SEQ ID NO: 14889 - DNA, 22 bp, Artificial Sequence
  chemically synthesized
gcaggcttacttccttttttct

SEQ ID NO: 14890 - DNA, 22 bp, Artificial Sequence
  chemically synthesized
caggcttacttccttttttctc

SEQ ID NO: 14891 - DNA, 22 bp, Artificial Sequence
  chemically synthesized
acttccttttttctcacattat

SEQ ID NO: 14892 - DNA, 22 bp, Artificial Sequence
  chemically synthesized
cttccttttttctcacattatg

SEQ ID NO: 14893 - DNA, 22 bp, Artificial Sequence
  chemically synthesized
ccttttttctcacattatgaaa

SEQ ID NO: 14894 - DNA, 22 bp, Artificial Sequence
  chemically synthesized
cttttttctcacattatgaaac

SEQ ID NO: 14895 - DNA, 22 bp, Artificial Sequence
  chemically synthesized
ttttctcacattatgaaactct

SEQ ID NO: 14896 - DNA, 22 bp, Artificial Sequence
  chemically synthesized
tttctcacattatgaaactctt

SEQ ID NO: 14897 - DNA, 22 bp, Artificial Sequence
  chemically synthesized
ttctcacattatgaaactctta

SEQ ID NO: 14898 - DNA, 22 bp, Artificial Sequence
  chemically synthesized
tctcacattatgaaactcttaa

SEQ ID NO: 14899 - DNA, 22 bp, Artificial Sequence
  chemically synthesized
ctcacattatgaaactcttaaa

SEQ ID NO: 14900 - DNA, 22 bp, Artificial Sequence
  chemically synthesized
tcacattatgaaactcttaaaa

SEQ ID NO: 14901 - DNA, 22 bp, Artificial Sequence
  chemically synthesized
acattatgaaactcttaaaatc

SEQ ID NO: 14902 - DNA, 22 bp, Artificial Sequence
  chemically synthesized
tgaaactcttaaaatcaggaga

SEQ ID NO: 14903 - DNA, 22 bp, Artificial Sequence
  chemically synthesized
ttaaaatcaggagaatctttta

SEQ ID NO: 14904 - DNA, 22 bp, Artificial Sequence
  chemically synthesized
aaaatcaggagaatcttttaaa

SEQ ID NO: 14905 - DNA, 22 bp, Artificial Sequence
  chemically synthesized
aaatcaggagaatcttttaaac

SEQ ID NO: 14906 - DNA, 22 bp, Artificial Sequence
  chemically synthesized
ttaaacaacatcataatgttta

SEQ ID NO: 14907 - DNA, 22 bp, Artificial Sequence
  chemically synthesized
taaacaacatcataatgtttaa

SEQ ID NO: 14908 - DNA, 22 bp, Artificial Sequence
  chemically synthesized
aaacaacatcataatgtttaat

SEQ ID NO: 14909 - DNA, 22 bp, Artificial Sequence
  chemically synthesized
aacaacatcataatgtttaatt

SEQ ID NO: 14910 - DNA, 22 bp, Artificial Sequence
  chemically synthesized
aatttgaaaagtgcaagtcatt

SEQ ID NO: 14911 - DNA, 22 bp, Artificial Sequence
  chemically synthesized
atttgaaaagtgcaagtcattc

SEQ ID NO: 14912 - DNA, 22 bp, Artificial Sequence
  chemically synthesized
gaaaagtgcaagtcattctttt

SEQ ID NO: 14913 - DNA, 22 bp, Artificial Sequence
  chemically synthesized
aaaagtgcaagtcattcttttc

SEQ ID NO: 14914 - DNA, 22 bp, Artificial Sequence
  chemically synthesized
ttttcctttttgaaactatgca

SEQ ID NO: 14915 - DNA, 22 bp, Artificial Sequence
  chemically synthesized
ttcctttttgaaactatgcaga

SEQ ID NO: 14916 - DNA, 22 bp, Artificial Sequence
  chemically synthesized
tcctttttgaaactatgcagat

SEQ ID NO: 14917 - DNA, 22 bp, Artificial Sequence
  chemically synthesized
cctttttgaaactatgcagatg

SEQ ID NO: 14918 - DNA, 22 bp, Artificial Sequence
  chemically synthesized
ctttttgaaactatgcagatgt

SEQ ID NO: 14919 - DNA, 22 bp, Artificial Sequence
  chemically synthesized
tttgaaactatgcagatgttac

SEQ ID NO: 14920 - DNA, 22 bp, Artificial Sequence
  chemically synthesized
ttgaaactatgcagatgttaca

SEQ ID NO: 14921 - DNA, 22 bp, Artificial Sequence
  chemically synthesized
tgaaactatgcagatgttacat

SEQ ID NO: 14922 - DNA, 22 bp, Artificial Sequence
  chemically synthesized
gaaactatgcagatgttacatt

SEQ ID NO: 14923 - DNA, 22 bp, Artificial Sequence
  chemically synthesized
aaactatgcagatgttacattg

SEQ ID NO: 14924 - DNA, 22 bp, Artificial Sequence
  chemically synthesized
tgcagatgttacattgactgtt

SEQ ID NO: 14925 - DNA, 22 bp, Artificial Sequence
  chemically synthesized
cattgactgttttctgtgaagt

SEQ ID NO: 14926 - DNA, 22 bp, Artificial Sequence
  chemically synthesized
actgttttctgtgaagttatct

SEQ ID NO: 14927 - DNA, 22 bp, Artificial Sequence
  chemically synthesized
ttttctgtgaagttatcttttt

SEQ ID NO: 14928 - DNA, 22 bp, Artificial Sequence
  chemically synthesized
tctgtgaagttatctttttttc

SEQ ID NO: 14929 - DNA, 22 bp, Artificial Sequence
  chemically synthesized
ctgtgaagttatctttttttca

SEQ ID NO: 14930 - DNA, 22 bp, Artificial Sequence
  chemically synthesized
tgtgaagttatctttttttcac

SEQ ID NO: 14931 - DNA, 22 bp, Artificial Sequence
  chemically synthesized
tgaagttatctttttttcactg

SEQ ID NO: 14932 - DNA, 22 bp, Artificial Sequence
  chemically synthesized
tctttttttcactgcagaataa

SEQ ID NO: 14933 - DNA, 22 bp, Artificial Sequence
  chemically synthesized
tttttcactgcagaataaaggt

SEQ ID NO: 14934 - DNA, 22 bp, Artificial Sequence
  chemically synthesized
ttttcactgcagaataaaggtt

SEQ ID NO: 14935 - DNA, 22 bp, Artificial Sequence
  chemically synthesized
tttcactgcagaataaaggttg

SEQ ID NO: 14936 - DNA, 22 bp, Artificial Sequence
  chemically synthesized
ttcactgcagaataaaggttgt

SEQ ID NO: 14937 - DNA, 22 bp, Artificial Sequence
  chemically synthesized
tcactgcagaataaaggttgtt

SEQ ID NO: 14938 - DNA, 22 bp, Artificial Sequence
  chemically synthesized
cactgcagaataaaggttgttt

SEQ ID NO: 14939 - DNA, 22 bp, Artificial Sequence
  chemically synthesized
actgcagaataaaggttgtttt

SEQ ID NO: 14940 - DNA, 22 bp, Artificial Sequence
  chemically synthesized
cagaataaaggttgttttgatt

SEQ ID NO: 14941 - DNA, 22 bp, Artificial Sequence
  chemically synthesized
ttttgattttattttgtattgt

SEQ ID NO: 14942 - DNA, 22 bp, Artificial Sequence
  chemically synthesized
tgattttattttgtattgttta

SEQ ID NO: 14943 - DNA, 22 bp, Artificial Sequence
  chemically synthesized
gattttattttgtattgtttat

SEQ ID NO: 14944 - DNA, 22 bp, Artificial Sequence
  chemically synthesized
attttattttgtattgtttatg

SEQ ID NO: 14945 - DNA, 22 bp, Artificial Sequence
  chemically synthesized
tattttgtattgtttatgagaa

SEQ ID NO: 14946 - DNA, 22 bp, Artificial Sequence
  chemically synthesized
attttgtattgtttatgagaac

SEQ ID NO: 14947 - DNA, 22 bp, Artificial Sequence
  chemically synthesized
ttttgtattgtttatgagaaca

SEQ ID NO: 14948 - DNA, 22 bp, Artificial Sequence
  chemically synthesized
tgtattgtttatgagaacatgc

SEQ ID NO: 14949 - DNA, 22 bp, Artificial Sequence
  chemically synthesized
gtattgtttatgagaacatgca

SEQ ID NO: 14950 - DNA, 22 bp, Artificial Sequence
  chemically synthesized
tattgtttatgagaacatgcat

SEQ ID NO: 14951 - DNA, 22 bp, Artificial Sequence
  chemically synthesized
tttatgagaacatgcatttgtt

SEQ ID NO: 14952 - DNA, 22 bp, Artificial Sequence
  chemically synthesized
atgagaacatgcatttgttggg

SEQ ID NO: 14953 - DNA, 22 bp, Artificial Sequence
  chemically synthesized
tgagaacatgcatttgttgggt

SEQ ID NO: 14954 - DNA, 22 bp, Artificial Sequence
  chemically synthesized
gttgggttaatttcctacccct

SEQ ID NO: 14955 - DNA, 22 bp, Artificial Sequence
  chemically synthesized
ttgggttaatttcctacccctg

SEQ ID NO: 14956 - DNA, 22 bp, Artificial Sequence
  chemically synthesized
ggttaatttcctacccctgccc

SEQ ID NO: 14957 - DNA, 22 bp, Artificial Sequence
  chemically synthesized
atttcctacccctgcccccatt

SEQ ID NO: 14958 - DNA, 22 bp, Artificial Sequence
  chemically synthesized
cctacccctgcccccatttttt

SEQ ID NO: 14959 - DNA, 22 bp, Artificial Sequence
  chemically synthesized
ctacccctgcccccattttttc

SEQ ID NO: 14960 - DNA, 22 bp, Artificial Sequence
  chemically synthesized
cccctgcccccattttttccct

SEQ ID NO: 14961 - DNA, 22 bp, Artificial Sequence
  chemically synthesized
cccccattttttccctaaagta

SEQ ID NO: 14962 - DNA, 22 bp, Artificial Sequence
  chemically synthesized
tttccctaaagtagaaagtatt

SEQ ID NO: 14963 - DNA, 22 bp, Artificial Sequence
  chemically synthesized
ttccctaaagtagaaagtattt

SEQ ID NO: 14964 - DNA, 22 bp, Artificial Sequence
  chemically synthesized
tccctaaagtagaaagtatttt

SEQ ID NO: 14965 - DNA, 22 bp, Artificial Sequence
  chemically synthesized
ccctaaagtagaaagtattttt

SEQ ID NO: 14966 - DNA, 22 bp, Artificial Sequence
  chemically synthesized
cctaaagtagaaagtatttttc

SEQ ID NO: 14967 - DNA, 22 bp, Artificial Sequence
  chemically synthesized
aagtagaaagtatttttcttgt

SEQ ID NO: 14968 - DNA, 22 bp, Artificial Sequence
  chemically synthesized
ttcttgtgaactaaattactac

SEQ ID NO: 14969 - DNA, 22 bp, Artificial Sequence
  chemically synthesized
tcttgtgaactaaattactaca

SEQ ID NO: 14970 - DNA, 22 bp, Artificial Sequence
  chemically synthesized
cttgtgaactaaattactacac

SEQ ID NO: 14971 - DNA, 22 bp, Artificial Sequence
  chemically synthesized
ttgtgaactaaattactacaca

SEQ ID NO: 14972 - DNA, 22 bp, Artificial Sequence
  chemically synthesized
gtgaactaaattactacacaag

SEQ ID NO: 14973 - DNA, 22 bp, Artificial Sequence
  chemically synthesized
tgaactaaattactacacaaga

SEQ ID NO: 14974 - DNA, 22 bp, Artificial Sequence
  chemically synthesized
aattactacacaagaacatgtc

SEQ ID NO: 14975 - DNA, 22 bp, Artificial Sequence
  chemically synthesized
ctacacaagaacatgtctattg

SEQ ID NO: 14976 - DNA, 22 bp, Artificial Sequence
  chemically synthesized
cacaagaacatgtctattgaaa

SEQ ID NO: 14977 - DNA, 22 bp, Artificial Sequence
  chemically synthesized
ttgaaaaataagcaagtatcaa

SEQ ID NO: 14978 - DNA, 22 bp, Artificial Sequence
  chemically synthesized
aaaaataagcaagtatcaaaat

SEQ ID NO: 14979 - DNA, 22 bp, Artificial Sequence
  chemically synthesized
tgggttgtttttttaaataaat

SEQ ID NO: 14980 - DNA, 22 bp, Artificial Sequence
  chemically synthesized
tttttttaaataaattttctct

SEQ ID NO: 14981 - DNA, 22 bp, Artificial Sequence
  chemically synthesized
ttttaaataaattttctcttgc

SEQ ID NO: 14982 - DNA, 22 bp, Artificial Sequence
  chemically synthesized
tttaaataaattttctcttgct

SEQ ID NO: 14983 - DNA, 22 bp, Artificial Sequence
  chemically synthesized
ttaaataaattttctcttgctc

SEQ ID NO: 14984 - DNA, 22 bp, Artificial Sequence
  chemically synthesized
taaataaattttctcttgctca

SEQ ID NO: 14985 - DNA, 22 bp, Artificial Sequence
  chemically synthesized
aaataaattttctcttgctcag

SEQ ID NO: 14986 - DNA, 22 bp, Artificial Sequence
  chemically synthesized
aataaattttctcttgctcagg

SEQ ID NO: 14987 - DNA, 22 bp, Artificial Sequence
  chemically synthesized
tctcttgctcaggaaagacaag

SEQ ID NO: 14988 - DNA, 22 bp, Artificial Sequence
  chemically synthesized
ctcttgctcaggaaagacaaga

SEQ ID NO: 14989 - DNA, 22 bp, Artificial Sequence
  chemically synthesized
tcttgctcaggaaagacaagaa

SEQ ID NO: 14990 - DNA, 22 bp, Artificial Sequence
  chemically synthesized
ttgctcaggaaagacaagaaaa

SEQ ID NO: 14991 - DNA, 22 bp, Artificial Sequence
  chemically synthesized
gctcaggaaagacaagaaaatg

SEQ ID NO: 14992 - DNA, 22 bp, Artificial Sequence
  chemically synthesized
ctcaggaaagacaagaaaatgt

SEQ ID NO: 14993 - DNA, 22 bp, Artificial Sequence
  chemically synthesized
aggaaagacaagaaaatgtcca

SEQ ID NO: 14994 - DNA, 22 bp, Artificial Sequence
  chemically synthesized
tcttagaaggcacagagagaat

SEQ ID NO: 14995 - DNA, 22 bp, Artificial Sequence
  chemically synthesized
agaaggcacagagagaatggaa

SEQ ID NO: 14996 - DNA, 22 bp, Artificial Sequence
  chemically synthesized
gaaggcacagagagaatggaag

SEQ ID NO: 14997 - DNA, 22 bp, Artificial Sequence
  chemically synthesized
catactgtcaaatgtttttctc

SEQ ID NO: 14998 - DNA, 22 bp, Artificial Sequence
  chemically synthesized
tcaaatgtttttctcacagcat

SEQ ID NO: 14999 - DNA, 22 bp, Artificial Sequence
  chemically synthesized
ttctcacagcatgtatctgtat

SEQ ID NO: 15000 - DNA, 22 bp, Artificial Sequence
  chemically synthesized
tctcacagcatgtatctgtata

SEQ ID NO: 15001 - DNA, 22 bp, Artificial Sequence
  chemically synthesized
ctcacagcatgtatctgtataa

SEQ ID NO: 15002 - DNA, 22 bp, Artificial Sequence
  chemically synthesized
tcacagcatgtatctgtataag

SEQ ID NO: 15003 - DNA, 22 bp, Artificial Sequence
  chemically synthesized
acagcatgtatctgtataaggt

SEQ ID NO: 15004 - DNA, 22 bp, Artificial Sequence
  chemically synthesized
tataaggttgatggctacattt

SEQ ID NO: 15005 - DNA, 22 bp, Artificial Sequence
  chemically synthesized
atggctacatttgtcaaggcct

SEQ ID NO: 15006 - DNA, 22 bp, Artificial Sequence
  chemically synthesized
catttgtcaaggccttggagac

SEQ ID NO: 15007 - DNA, 22 bp, Artificial Sequence
  chemically synthesized
gtcaaggccttggagacatacg

SEQ ID NO: 15008 - DNA, 22 bp, Artificial Sequence
  chemically synthesized
tcaaggccttggagacatacga

SEQ ID NO: 15009 - DNA, 22 bp, Artificial Sequence
  chemically synthesized
ggagacatacgaataagccttt

SEQ ID NO: 15010 - DNA, 22 bp, Artificial Sequence
  chemically synthesized
gagacatacgaataagccttta

SEQ ID NO: 15011 - DNA, 22 bp, Artificial Sequence
  chemically synthesized
taatggagcttttatggaggtg

SEQ ID NO: 15012 - DNA, 22 bp, Artificial Sequence
  chemically synthesized
aatggagcttttatggaggtgt

SEQ ID NO: 15013 - DNA, 22 bp, Artificial Sequence
  chemically synthesized
atggagcttttatggaggtgta

SEQ ID NO: 15014 - DNA, 22 bp, Artificial Sequence
  chemically synthesized
ttatggaggtgtacagaataaa

SEQ ID NO: 15015 - DNA, 22 bp, Artificial Sequence
  chemically synthesized
tatggaggtgtacagaataaac

SEQ ID NO: 15016 - DNA, 22 bp, Artificial Sequence
  chemically synthesized
atggaggtgtacagaataaact

SEQ ID NO: 15017 - DNA, 22 bp, Artificial Sequence
  chemically synthesized
tggaggtgtacagaataaactg

SEQ ID NO: 15018 - DNA, 22 bp, Artificial Sequence
  chemically synthesized
gaggaagatttccatatcttaa

SEQ ID NO: 15019 - DNA, 22 bp, Artificial Sequence
  chemically synthesized
ccatatcttaaacccaaagagt

SEQ ID NO: 15020 - DNA, 22 bp, Artificial Sequence
  chemically synthesized
catatcttaaacccaaagagtt

SEQ ID NO: 15021 - DNA, 22 bp, Artificial Sequence
  chemically synthesized
aaacccaaagagttaaatcagt

SEQ ID NO: 15022 - DNA, 22 bp, Artificial Sequence
  chemically synthesized
aacccaaagagttaaatcagta

SEQ ID NO: 15023 - DNA, 22 bp, Artificial Sequence
  chemically synthesized
aatcagtaaacaaaggaaaata

SEQ ID NO: 15024 - DNA, 22 bp, Artificial Sequence
  chemically synthesized
catctacaaattaatatttgct

SEQ ID NO: 15025 - DNA, 22 bp, Artificial Sequence
  chemically synthesized
caaattaatatttgctcccttt

SEQ ID NO: 15026 - DNA, 22 bp, Artificial Sequence
  chemically synthesized
atatttgctccctttttttttc

SEQ ID NO: 15027 - DNA, 22 bp, Artificial Sequence
  chemically synthesized
gctccctttttttttctgtttg

SEQ ID NO: 15028 - DNA, 22 bp, Artificial Sequence
  chemically synthesized
ctccctttttttttctgtttgc

SEQ ID NO: 15029 - DNA, 22 bp, Artificial Sequence
  chemically synthesized
cctttttttttctgtttgccca

SEQ ID NO: 15030 - DNA, 22 bp, Artificial Sequence
  chemically synthesized
tttttttctgtttgcccagaat

SEQ ID NO: 15031 - DNA, 22 bp, Artificial Sequence
  chemically synthesized
ttttttctgtttgcccagaata

SEQ ID NO: 15032 - DNA, 22 bp, Artificial Sequence
  chemically synthesized
tttttctgtttgcccagaataa

SEQ ID NO: 15033 - DNA, 22 bp, Artificial Sequence
  chemically synthesized
ttttctgtttgcccagaataaa

SEQ ID NO: 15034 - DNA, 22 bp, Artificial Sequence
  chemically synthesized
tttctgtttgcccagaataaat

SEQ ID NO: 15035 - DNA, 22 bp, Artificial Sequence
  chemically synthesized
ttctgtttgcccagaataaatt

SEQ ID NO: 15036 - DNA, 22 bp, Artificial Sequence
  chemically synthesized
tctgtttgcccagaataaattt

SEQ ID NO: 15037 - DNA, 22 bp, Artificial Sequence
  chemically synthesized
ctgtttgcccagaataaatttt

SEQ ID NO: 15038 - DNA, 22 bp, Artificial Sequence
  chemically synthesized
tgtttgcccagaataaattttg

SEQ ID NO: 15039 - DNA, 22 bp, Artificial Sequence
  chemically synthesized
tttgcccagaataaattttgga

SEQ ID NO: 15040 - DNA, 22 bp, Artificial Sequence
  chemically synthesized
gcccagaataaattttggataa

SEQ ID NO: 15041 - DNA, 22 bp, Artificial Sequence
  chemically synthesized
cccagaataaattttggataac

SEQ ID NO: 15042 - DNA, 22 bp, Artificial Sequence
  chemically synthesized
tggataacttgttcatagtaaa

SEQ ID NO: 15043 - DNA, 22 bp, Artificial Sequence
  chemically synthesized
ggataacttgttcatagtaaaa

SEQ ID NO: 15044 - DNA, 22 bp, Artificial Sequence
  chemically synthesized
gataacttgttcatagtaaaaa

SEQ ID NO: 15045 - DNA, 22 bp, Artificial Sequence
  chemically synthesized
gttcatagtaaaaataaaaaaa

SEQ ID NO: 15046 - DNA, 22 bp, Artificial Sequence
  chemically synthesized
ttcatagtaaaaataaaaaaaa

SEQ ID NO: 15047 - DNA, 22 bp, Artificial Sequence
  chemically synthesized
atagtaaaaataaaaaaaattg

SEQ ID NO: 15048 - DNA, 22 bp, Artificial Sequence
  chemically synthesized
tctctgatatgttctttaaggt

SEQ ID NO: 15049 - DNA, 22 bp, Artificial Sequence
  chemically synthesized
tgatatgttctttaaggtacta

SEQ ID NO: 15050 - DNA, 22 bp, Artificial Sequence
  chemically synthesized
atatgttctttaaggtactact

SEQ ID NO: 15051 - DNA, 22 bp, Artificial Sequence
  chemically synthesized
tttaaggtactacttctcgaac

SEQ ID NO: 15052 - DNA, 22 bp, Artificial Sequence
  chemically synthesized
taaggtactacttctcgaacct

SEQ ID NO: 15053 - DNA, 22 bp, Artificial Sequence
  chemically synthesized
aaggtactacttctcgaacctt

SEQ ID NO: 15054 - DNA, 22 bp, Artificial Sequence
  chemically synthesized
aggtactacttctcgaaccttt

SEQ ID NO: 15055 - DNA, 22 bp, Artificial Sequence
  chemically synthesized
cttctcgaacctttccctagaa

SEQ ID NO: 15056 - DNA, 22 bp, Artificial Sequence
  chemically synthesized
ctcgaacctttccctagaagta

SEQ ID NO: 15057 - DNA, 22 bp, Artificial Sequence
  chemically synthesized
tcgaacctttccctagaagtag

SEQ ID NO: 15058 - DNA, 22 bp, Artificial Sequence
  chemically synthesized
gaacctttccctagaagtagct

SEQ ID NO: 15059 - DNA, 22 bp, Artificial Sequence
  chemically synthesized
tccctagaagtagctgtaacag

SEQ ID NO: 15060 - DNA, 22 bp, Artificial Sequence
  chemically synthesized
ccctagaagtagctgtaacaga

SEQ ID NO: 15061 - DNA, 22 bp, Artificial Sequence
  chemically synthesized
cctagaagtagctgtaacagaa

SEQ ID NO: 15062 - DNA, 22 bp, Artificial Sequence
  chemically synthesized
gaagtagctgtaacagaaggag

SEQ ID NO: 15063 - DNA, 22 bp, Artificial Sequence
  chemically synthesized
taacagaaggagagcatatgta

SEQ ID NO: 15064 - DNA, 22 bp, Artificial Sequence
  chemically synthesized
aggtatctgtctggggtgtagg

SEQ ID NO: 15065 - DNA, 22 bp, Artificial Sequence
  chemically synthesized
tctggggtgtaggcccaggtcc

SEQ ID NO: 15066 - DNA, 22 bp, Artificial Sequence
  chemically synthesized
gggtgtaggcccaggtccacac

SEQ ID NO: 15067 - DNA, 22 bp, Artificial Sequence
  chemically synthesized
cttctaagtcttatgttgtatc

SEQ ID NO: 15068 - DNA, 22 bp, Artificial Sequence
  chemically synthesized
ttctaagtcttatgttgtatcg

SEQ ID NO: 15069 - DNA, 22 bp, Artificial Sequence
  chemically synthesized
ctaagtcttatgttgtatcgtt

SEQ ID NO: 15070 - DNA, 22 bp, Artificial Sequence
  chemically synthesized
taagtcttatgttgtatcgtta

SEQ ID NO: 15071 - DNA, 22 bp, Artificial Sequence
  chemically synthesized
agtcttatgttgtatcgttaag

SEQ ID NO: 15072 - DNA, 22 bp, Artificial Sequence
  chemically synthesized
atgttgtatcgttaagactcat

SEQ ID NO: 15073 - DNA, 22 bp, Artificial Sequence
  chemically synthesized
tgttgtatcgttaagactcatg

SEQ ID NO: 15074 - DNA, 22 bp, Artificial Sequence
  chemically synthesized
tatcgttaagactcatgcaatt

SEQ ID NO: 15075 - DNA, 22 bp, Artificial Sequence
  chemically synthesized
agactcatgcaatttacatttt

SEQ ID NO: 15076 - DNA, 22 bp, Artificial Sequence
  chemically synthesized
atgcaatttacattttattcca

SEQ ID NO: 15077 - DNA, 22 bp, Artificial Sequence
  chemically synthesized
acattttattccataactattt

SEQ ID NO: 15078 - DNA, 22 bp, Artificial Sequence
  chemically synthesized
cattttattccataactatttt

SEQ ID NO: 15079 - DNA, 22 bp, Artificial Sequence
  chemically synthesized
tattccataactattttagtat

SEQ ID NO: 15080 - DNA, 22 bp, Artificial Sequence
  chemically synthesized
attccataactattttagtatt

SEQ ID NO: 15081 - DNA, 22 bp, Artificial Sequence
  chemically synthesized
ttccataactattttagtatta

SEQ ID NO: 15082 - DNA, 22 bp, Artificial Sequence
  chemically synthesized
cataactattttagtattaaaa

SEQ ID NO: 15083 - DNA, 22 bp, Artificial Sequence
  chemically synthesized
ttttagtattaaaatttgtcag

SEQ ID NO: 15084 - DNA, 22 bp, Artificial Sequence
  chemically synthesized
tagtattaaaatttgtcagtga

SEQ ID NO: 15085 - DNA, 22 bp, Artificial Sequence
  chemically synthesized
agtattaaaatttgtcagtgat

SEQ ID NO: 15086 - DNA, 22 bp, Artificial Sequence
  chemically synthesized
gtattaaaatttgtcagtgata

SEQ ID NO: 15087 - DNA, 22 bp, Artificial Sequence
  chemically synthesized
aaatttgtcagtgatatttctt

SEQ ID NO: 15088 - DNA, 22 bp, Artificial Sequence
  chemically synthesized
gtcagtgatatttcttaccctc

SEQ ID NO: 15089 - DNA, 22 bp, Artificial Sequence
  chemically synthesized
tcagtgatatttcttaccctct

SEQ ID NO: 15090 - DNA, 22 bp, Artificial Sequence
  chemically synthesized
cttaccctctcctctaggaaaa

SEQ ID NO: 15091 - DNA, 22 bp, Artificial Sequence
  chemically synthesized
ttaccctctcctctaggaaaat

SEQ ID NO: 15092 - DNA, 22 bp, Artificial Sequence
  chemically synthesized
accctctcctctaggaaaatgt

SEQ ID NO: 15093 - DNA, 22 bp, Artificial Sequence
  chemically synthesized
ccctctcctctaggaaaatgtg

SEQ ID NO: 15094 - DNA, 22 bp, Artificial Sequence
  chemically synthesized
tcctctaggaaaatgtgccatg

SEQ ID NO: 15095 - DNA, 22 bp, Artificial Sequence
  chemically synthesized
ctctaggaaaatgtgccatgtt

SEQ ID NO: 15096 - DNA, 22 bp, Artificial Sequence
  chemically synthesized
taggaaaatgtgccatgtttat

SEQ ID NO: 15097 - DNA, 22 bp, Artificial Sequence
  chemically synthesized
ggaaaatgtgccatgtttatcc

SEQ ID NO: 15098 - DNA, 22 bp, Artificial Sequence
  chemically synthesized
atcccttggctttgaatgcccc

SEQ ID NO: 15099 - DNA, 22 bp, Artificial Sequence
  chemically synthesized
tcccttggctttgaatgcccct

SEQ ID NO: 15100 - DNA, 22 bp, Artificial Sequence
  chemically synthesized
ggctttgaatgcccctcaggaa

SEQ ID NO: 15101 - DNA, 22 bp, Artificial Sequence
  chemically synthesized
gctttgaatgcccctcaggaac

SEQ ID NO: 15102 - DNA, 22 bp, Artificial Sequence
  chemically synthesized
tgaatgcccctcaggaacagac

SEQ ID NO: 15103 - DNA, 22 bp, Artificial Sequence
  chemically synthesized
gaatgcccctcaggaacagaca

SEQ ID NO: 15104 - DNA, 22 bp, Artificial Sequence
  chemically synthesized
aatgcccctcaggaacagacac

SEQ ID NO: 15105 - DNA, 22 bp, Artificial Sequence
  chemically synthesized
aggaacagacactaagagtttg

SEQ ID NO: 15106 - DNA, 22 bp, Artificial Sequence
  chemically synthesized
agagtttgagaagcatggttac

SEQ ID NO: 15107 - DNA, 22 bp, Artificial Sequence
  chemically synthesized
gagaagcatggttacaagggtg

SEQ ID NO: 15108 - DNA, 22 bp, Artificial Sequence
  chemically synthesized
agaagcatggttacaagggtgt

SEQ ID NO: 15109 - DNA, 22 bp, Artificial Sequence
  chemically synthesized
caagggtgtggcttcccctgcg

SEQ ID NO: 15110 - DNA, 22 bp, Artificial Sequence
  chemically synthesized
cccctgcggaaactaagtacag

SEQ ID NO: 15111 - DNA, 22 bp, Artificial Sequence
  chemically synthesized
ccctgcggaaactaagtacaga

SEQ ID NO: 15112 - DNA, 22 bp, Artificial Sequence
  chemically synthesized
cggaaactaagtacagactatt

SEQ ID NO: 15113 - DNA, 22 bp, Artificial Sequence
  chemically synthesized
agtacagactatttcactgtaa

SEQ ID NO: 15114 - DNA, 22 bp, Artificial Sequence
  chemically synthesized
tttcactgtaaagcagagaagt

SEQ ID NO: 15115 - DNA, 22 bp, Artificial Sequence
  chemically synthesized
cactgtaaagcagagaagttct

SEQ ID NO: 15116 - DNA, 22 bp, Artificial Sequence
  chemically synthesized
actgtaaagcagagaagttctt

SEQ ID NO: 15117 - DNA, 22 bp, Artificial Sequence
  chemically synthesized
taaagcagagaagttcttttga

SEQ ID NO: 15118 - DNA, 22 bp, Artificial Sequence
  chemically synthesized
ttttgaaggagaatctccagtg

SEQ ID NO: 15119 - DNA, 22 bp, Artificial Sequence
  chemically synthesized
ttgaaggagaatctccagtgaa

SEQ ID NO: 15120 - DNA, 22 bp, Artificial Sequence
  chemically synthesized
tgaaggagaatctccagtgaag

SEQ ID NO: 15121 - DNA, 22 bp, Artificial Sequence
  chemically synthesized
gaaggagaatctccagtgaaga

SEQ ID NO: 15122 - DNA, 22 bp, Artificial Sequence
  chemically synthesized
aaggagaatctccagtgaagaa

SEQ ID NO: 15123 - DNA, 22 bp, Artificial Sequence
  chemically synthesized
cagtgaagaaagagttcttcac

SEQ ID NO: 15124 - DNA, 22 bp, Artificial Sequence
  chemically synthesized
ttcacttttacttccatttcct

SEQ ID NO: 15125 - DNA, 22 bp, Artificial Sequence
  chemically synthesized
cacttttacttccatttcctct

SEQ ID NO: 15126 - DNA, 22 bp, Artificial Sequence
  chemically synthesized
acttttacttccatttcctctt

SEQ ID NO: 15127 - DNA, 22 bp, Artificial Sequence
  chemically synthesized
ttacttccatttcctcttgtgg

SEQ ID NO: 15128 - DNA, 22 bp, Artificial Sequence
  chemically synthesized
tacttccatttcctcttgtggg

SEQ ID NO: 15129 - DNA, 22 bp, Artificial Sequence
  chemically synthesized
acttccatttcctcttgtgggt

SEQ ID NO: 15130 - DNA, 22 bp, Artificial Sequence
  chemically synthesized
cttccatttcctcttgtgggtg

SEQ ID NO: 15131 - DNA, 22 bp, Artificial Sequence
  chemically synthesized
ccatttcctcttgtgggtgacc

SEQ ID NO: 15132 - DNA, 22 bp, Artificial Sequence
  chemically synthesized
catttcctcttgtgggtgaccc

SEQ ID NO: 15133 - DNA, 22 bp, Artificial Sequence
  chemically synthesized
cctcttgtgggtgaccctcaat

SEQ ID NO: 15134 - DNA, 22 bp, Artificial Sequence
  chemically synthesized
ctcttgtgggtgaccctcaatg

SEQ ID NO: 15135 - DNA, 22 bp, Artificial Sequence
  chemically synthesized
ttgtgggtgaccctcaatgctc

SEQ ID NO: 15136 - DNA, 22 bp, Artificial Sequence
  chemically synthesized
gtgggtgaccctcaatgctcct

SEQ ID NO: 15137 - DNA, 22 bp, Artificial Sequence
  chemically synthesized
tgggtgaccctcaatgctcctt

SEQ ID NO: 15138 - DNA, 22 bp, Artificial Sequence
  chemically synthesized
aatgctccttgtaaaactccaa

SEQ ID NO: 15139 - DNA, 22 bp, Artificial Sequence
  chemically synthesized
cttgtaaaactccaatatttta

SEQ ID NO: 15140 - DNA, 22 bp, Artificial Sequence
  chemically synthesized
gtaaaactccaatattttaaac

SEQ ID NO: 15141 - DNA, 22 bp, Artificial Sequence
  chemically synthesized
taaaactccaatattttaaaca

SEQ ID NO: 15142 - DNA, 22 bp, Artificial Sequence
  chemically synthesized
caatattttaaacatggctgtt

SEQ ID NO: 15143 - DNA, 22 bp, Artificial Sequence
  chemically synthesized
taaacatggctgttttgccttt

SEQ ID NO: 15144 - DNA, 22 bp, Artificial Sequence
  chemically synthesized
aaacatggctgttttgcctttc

SEQ ID NO: 15145 - DNA, 22 bp, Artificial Sequence
  chemically synthesized
aacatggctgttttgcctttct

SEQ ID NO: 15146 - DNA, 22 bp, Artificial Sequence
  chemically synthesized
ttttgcctttctttgcttcttt

SEQ ID NO: 15147 - DNA, 22 bp, Artificial Sequence
  chemically synthesized
tgcctttctttgcttcttttta

SEQ ID NO: 15148 - DNA, 22 bp, Artificial Sequence
  chemically synthesized
gcctttctttgcttctttttag

SEQ ID NO: 15149 - DNA, 22 bp, Artificial Sequence
  chemically synthesized
cctttctttgcttctttttagc

SEQ ID NO: 15150 - DNA, 22 bp, Artificial Sequence
  chemically synthesized
tctttgcttctttttagcatga

SEQ ID NO: 15151 - DNA, 22 bp, Artificial Sequence
  chemically synthesized
ctttgcttctttttagcatgaa

SEQ ID NO: 15152 - DNA, 22 bp, Artificial Sequence
  chemically synthesized
tttgcttctttttagcatgaat

SEQ ID NO: 15153 - DNA, 22 bp, Artificial Sequence
  chemically synthesized
tgcttctttttagcatgaatga

SEQ ID NO: 15154 - DNA, 22 bp, Artificial Sequence
  chemically synthesized
gcttctttttagcatgaatgag

SEQ ID NO: 15155 - DNA, 22 bp, Artificial Sequence
  chemically synthesized
cttctttttagcatgaatgaga

SEQ ID NO: 15156 - DNA, 22 bp, Artificial Sequence
  chemically synthesized
ctttttagcatgaatgagacag

SEQ ID NO: 15157 - DNA, 22 bp, Artificial Sequence
  chemically synthesized
tttttagcatgaatgagacaga

SEQ ID NO: 15158 - DNA, 22 bp, Artificial Sequence
  chemically synthesized
tttagcatgaatgagacagatg

SEQ ID NO: 15159 - DNA, 22 bp, Artificial Sequence
  chemically synthesized
ttagcatgaatgagacagatga

SEQ ID NO: 15160 - DNA, 22 bp, Artificial Sequence
  chemically synthesized
tagcatgaatgagacagatgat

SEQ ID NO: 15161 - DNA, 22 bp, Artificial Sequence
  chemically synthesized
agcatgaatgagacagatgata

SEQ ID NO: 15162 - DNA, 22 bp, Artificial Sequence
  chemically synthesized
gcatgaatgagacagatgatac

SEQ ID NO: 15163 - DNA, 22 bp, Artificial Sequence
  chemically synthesized
taaaaaagtaattaaaaaaaaa

SEQ ID NO: 15164 - DNA, 22 bp, Artificial Sequence
  chemically synthesized
aaaaaagtaattaaaaaaaaaa

SEQ ID NO: 15165 - DNA, 22 bp, Artificial Sequence
  chemically synthesized
aaaaagtaattaaaaaaaaaaa

SEQ ID NO: 15166 - DNA, 22 bp, Artificial Sequence
  chemically synthesized
aaaaaaaaaacttgtgaaaata

SEQ ID NO: 15167 - DNA, 22 bp, Artificial Sequence
  chemically synthesized
gtgaaaatacatggccataata

SEQ ID NO: 15168 - DNA, 22 bp, Artificial Sequence
  chemically synthesized
tgaaaatacatggccataatac

SEQ ID NO: 15169 - DNA, 22 bp, Artificial Sequence
  chemically synthesized
ctttaccaaattgttatgtttg

SEQ ID NO: 15170 - DNA, 22 bp, Artificial Sequence
  chemically synthesized
taccaaattgttatgtttgtac

SEQ ID NO: 15171 - DNA, 22 bp, Artificial Sequence
  chemically synthesized
accaaattgttatgtttgtact

SEQ ID NO: 15172 - DNA, 22 bp, Artificial Sequence
  chemically synthesized
ccaaattgttatgtttgtactt

SEQ ID NO: 15173 - DNA, 22 bp, Artificial Sequence
  chemically synthesized
ttatgtttgtacttttgtagat

SEQ ID NO: 15174 - DNA, 22 bp, Artificial Sequence
  chemically synthesized
tgtttgtacttttgtagatagc

SEQ ID NO: 15175 - DNA, 22 bp, Artificial Sequence
  chemically synthesized
gtacttttgtagatagctttcc

SEQ ID NO: 15176 - DNA, 22 bp, Artificial Sequence
  chemically synthesized
tacttttgtagatagctttcca

SEQ ID NO: 15177 - DNA, 22 bp, Artificial Sequence
  chemically synthesized
ttgtagatagctttccaattca

SEQ ID NO: 15178 - DNA, 22 bp, Artificial Sequence
  chemically synthesized
tgtagatagctttccaattcag

SEQ ID NO: 15179 - DNA, 22 bp, Artificial Sequence
  chemically synthesized
gtagatagctttccaattcaga

SEQ ID NO: 15180 - DNA, 22 bp, Artificial Sequence
  chemically synthesized
tagatagctttccaattcagag

SEQ ID NO: 15181 - DNA, 22 bp, Artificial Sequence
  chemically synthesized
tccaattcagagacagttattc

SEQ ID NO: 15182 - DNA, 22 bp, Artificial Sequence
  chemically synthesized
ccaattcagagacagttattct

SEQ ID NO: 15183 - DNA, 22 bp, Artificial Sequence
  chemically synthesized
caattcagagacagttattctg

SEQ ID NO: 15184 - DNA, 22 bp, Artificial Sequence
  chemically synthesized
agagacagttattctgtgtaaa

SEQ ID NO: 15185 - DNA, 22 bp, Artificial Sequence
  chemically synthesized
ttctgtgtaaaggtctgactta

SEQ ID NO: 15186 - DNA, 22 bp, Artificial Sequence
  chemically synthesized
tgtgtaaaggtctgacttaaca

SEQ ID NO: 15187 - DNA, 22 bp, Artificial Sequence
  chemically synthesized
tgtaaaggtctgacttaacaag

SEQ ID NO: 15188 - DNA, 22 bp, Artificial Sequence
  chemically synthesized
acttaacaagaaaagatttccc

SEQ ID NO: 15189 - DNA, 22 bp, Artificial Sequence
  chemically synthesized
aacaagaaaagatttcccttta

SEQ ID NO: 15190 - DNA, 22 bp, Artificial Sequence
  chemically synthesized
acaagaaaagatttccctttac

SEQ ID NO: 15191 - DNA, 22 bp, Artificial Sequence
  chemically synthesized
ccctttacccaaagaatcccag

SEQ ID NO: 15192 - DNA, 22 bp, Artificial Sequence
  chemically synthesized
cctttacccaaagaatcccagt

SEQ ID NO: 15193 - DNA, 22 bp, Artificial Sequence
  chemically synthesized
tacccaaagaatcccagtcctt

SEQ ID NO: 15194 - DNA, 22 bp, Artificial Sequence
  chemically synthesized
acccaaagaatcccagtcctta

SEQ ID NO: 15195 - DNA, 22 bp, Artificial Sequence
  chemically synthesized
cccaaagaatcccagtccttat

SEQ ID NO: 15196 - DNA, 22 bp, Artificial Sequence
  chemically synthesized
atttgctggtcaataagcaggg

SEQ ID NO: 15197 - DNA, 22 bp, Artificial Sequence
  chemically synthesized
tttgctggtcaataagcagggt

SEQ ID NO: 15198 - DNA, 22 bp, Artificial Sequence
  chemically synthesized
gctggtcaataagcagggtccc

SEQ ID NO: 15199 - DNA, 22 bp, Artificial Sequence
  chemically synthesized
ctggtcaataagcagggtcccc

SEQ ID NO: 15200 - DNA, 22 bp, Artificial Sequence
  chemically synthesized
gtcaataagcagggtccccagg

SEQ ID NO: 15201 - DNA, 22 bp, Artificial Sequence
  chemically synthesized
tcagcaccctctaacccactag

SEQ ID NO: 15202 - DNA, 22 bp, Artificial Sequence
  chemically synthesized
cagcaccctctaacccactagt

SEQ ID NO: 15203 - DNA, 22 bp, Artificial Sequence
  chemically synthesized
agcaccctctaacccactagtt

SEQ ID NO: 15204 - DNA, 22 bp, Artificial Sequence
  chemically synthesized
taacccactagttattagtaga

SEQ ID NO: 15205 - DNA, 22 bp, Artificial Sequence
  chemically synthesized
acccactagttattagtagact

SEQ ID NO: 15206 - DNA, 22 bp, Artificial Sequence
  chemically synthesized
gttattagtagactaattaagt

SEQ ID NO: 15207 - DNA, 22 bp, Artificial Sequence
  chemically synthesized
ttagtagactaattaagtaaac

SEQ ID NO: 15208 - DNA, 22 bp, Artificial Sequence
  chemically synthesized
gtagactaattaagtaaactta

SEQ ID NO: 15209 - DNA, 22 bp, Artificial Sequence
  chemically synthesized
attaagtaaacttatcgcaagt

SEQ ID NO: 15210 - DNA, 22 bp, Artificial Sequence
  chemically synthesized
agtaaacttatcgcaagttgag

SEQ ID NO: 15211 - DNA, 22 bp, Artificial Sequence
  chemically synthesized
atcgcaagttgaggaaacttag

SEQ ID NO: 15212 - DNA, 22 bp, Artificial Sequence
  chemically synthesized
tcgcaagttgaggaaacttaga

SEQ ID NO: 15213 - DNA, 22 bp, Artificial Sequence
  chemically synthesized
aggaaacttagaaccaactaaa

SEQ ID NO: 15214 - DNA, 22 bp, Artificial Sequence
  chemically synthesized
agaaccaactaaaattctgctt

SEQ ID NO: 15215 - DNA, 22 bp, Artificial Sequence
  chemically synthesized
gaaccaactaaaattctgcttt

SEQ ID NO: 15216 - DNA, 22 bp, Artificial Sequence
  chemically synthesized
aaattctgcttttactgggatt

SEQ ID NO: 15217 - DNA, 22 bp, Artificial Sequence
  chemically synthesized
tgcttttactgggattttgttt

SEQ ID NO: 15218 - DNA, 22 bp, Artificial Sequence
  chemically synthesized
cttttactgggattttgttttt

SEQ ID NO: 15219 - DNA, 22 bp, Artificial Sequence
  chemically synthesized
ttactgggattttgttttttca

SEQ ID NO: 15220 - DNA, 22 bp, Artificial Sequence
  chemically synthesized
tactgggattttgttttttcaa

SEQ ID NO: 15221 - DNA, 22 bp, Artificial Sequence
  chemically synthesized
actgggattttgttttttcaaa

SEQ ID NO: 15222 - DNA, 22 bp, Artificial Sequence
  chemically synthesized
ctgggattttgttttttcaaac

SEQ ID NO: 15223 - DNA, 22 bp, Artificial Sequence
  chemically synthesized
ggattttgttttttcaaaccag

SEQ ID NO: 15224 - DNA, 22 bp, Artificial Sequence
  chemically synthesized
tgttttttcaaaccagaaacct

SEQ ID NO: 15225 - DNA, 22 bp, Artificial Sequence
  chemically synthesized
gttttttcaaaccagaaacctt

SEQ ID NO: 15226 - DNA, 22 bp, Artificial Sequence
  chemically synthesized
ttttttcaaaccagaaaccttt

SEQ ID NO: 15227 - DNA, 22 bp, Artificial Sequence
  chemically synthesized
tttcaaaccagaaacctttact

SEQ ID NO: 15228 - DNA, 22 bp, Artificial Sequence
  chemically synthesized
ttcaaaccagaaacctttactt

SEQ ID NO: 15229 - DNA, 22 bp, Artificial Sequence
  chemically synthesized
tcaaaccagaaacctttactta

SEQ ID NO: 15230 - DNA, 22 bp, Artificial Sequence
  chemically synthesized
caaaccagaaacctttacttaa

SEQ ID NO: 15231 - DNA, 22 bp, Artificial Sequence
  chemically synthesized
aaaccagaaacctttacttaag

SEQ ID NO: 15232 - DNA, 22 bp, Artificial Sequence
  chemically synthesized
tacttaagttgactactattaa

SEQ ID NO: 15233 - DNA, 22 bp, Artificial Sequence
  chemically synthesized
acttaagttgactactattaat

SEQ ID NO: 15234 - DNA, 22 bp, Artificial Sequence
  chemically synthesized
cttaagttgactactattaatg

SEQ ID NO: 15235 - DNA, 22 bp, Artificial Sequence
  chemically synthesized
aagttgactactattaatgaat

SEQ ID NO: 15236 - DNA, 22 bp, Artificial Sequence
  chemically synthesized
agttgactactattaatgaatt

SEQ ID NO: 15237 - DNA, 22 bp, Artificial Sequence
  chemically synthesized
actactattaatgaattttggt

SEQ ID NO: 15238 - DNA, 22 bp, Artificial Sequence
  chemically synthesized
ctattaatgaattttggtctct

SEQ ID NO: 15239 - DNA, 22 bp, Artificial Sequence
  chemically synthesized
ttaatgaattttggtctctctt

SEQ ID NO: 15240 - DNA, 22 bp, Artificial Sequence
  chemically synthesized
atgaattttggtctctctttta

SEQ ID NO: 15241 - DNA, 22 bp, Artificial Sequence
  chemically synthesized
tggtctctcttttaagtgctct

SEQ ID NO: 15242 - DNA, 22 bp, Artificial Sequence
  chemically synthesized
ggtctctcttttaagtgctctt

SEQ ID NO: 15243 - DNA, 22 bp, Artificial Sequence
  chemically synthesized
gtctctcttttaagtgctcttc

SEQ ID NO: 15244 - DNA, 22 bp, Artificial Sequence
  chemically synthesized
tcttttaagtgctcttcttaaa

SEQ ID NO: 15245 - DNA, 22 bp, Artificial Sequence
  chemically synthesized
ttttaagtgctcttcttaaaaa

SEQ ID NO: 15246 - DNA, 22 bp, Artificial Sequence
  chemically synthesized
ttaagtgctcttcttaaaaatg

SEQ ID NO: 15247 - DNA, 22 bp, Artificial Sequence
  chemically synthesized
taagtgctcttcttaaaaatgt

SEQ ID NO: 15248 - DNA, 22 bp, Artificial Sequence
  chemically synthesized
aagtgctcttcttaaaaatgtt

SEQ ID NO: 15249 - DNA, 22 bp, Artificial Sequence
  chemically synthesized
agtgctcttcttaaaaatgtta

SEQ ID NO: 15250 - DNA, 22 bp, Artificial Sequence
  chemically synthesized
ttcttaaaaatgttatcttact

SEQ ID NO: 15251 - DNA, 22 bp, Artificial Sequence
  chemically synthesized
cttaaaaatgttatcttactgc

SEQ ID NO: 15252 - DNA, 22 bp, Artificial Sequence
  chemically synthesized
ttaaaaatgttatcttactgct

SEQ ID NO: 15253 - DNA, 22 bp, Artificial Sequence
  chemically synthesized
aaaaatgttatcttactgctga

SEQ ID NO: 15254 - DNA, 22 bp, Artificial Sequence
  chemically synthesized
aaaatgttatcttactgctgag

SEQ ID NO: 15255 - DNA, 22 bp, Artificial Sequence
  chemically synthesized
tcttactgctgagaagttcaag

SEQ ID NO: 15256 - DNA, 22 bp, Artificial Sequence
  chemically synthesized
actgctgagaagttcaagtttg

SEQ ID NO: 15257 - DNA, 22 bp, Artificial Sequence
  chemically synthesized
ctgctgagaagttcaagtttgg

SEQ ID NO: 15258 - DNA, 22 bp, Artificial Sequence
  chemically synthesized
ctgagaagttcaagtttgggaa

SEQ ID NO: 15259 - DNA, 22 bp, Artificial Sequence
  chemically synthesized
agaagttcaagtttgggaagta

SEQ ID NO: 15260 - DNA, 22 bp, Artificial Sequence
  chemically synthesized
aagtttgggaagtacaaggagg

SEQ ID NO: 15261 - DNA, 22 bp, Artificial Sequence
  chemically synthesized
gggaagtacaaggaggaataga

SEQ ID NO: 15262 - DNA, 22 bp, Artificial Sequence
  chemically synthesized
ggaagtacaaggaggaatagaa

SEQ ID NO: 15263 - DNA, 22 bp, Artificial Sequence
  chemically synthesized
aagagattttcttttagagcct

SEQ ID NO: 15264 - DNA, 22 bp, Artificial Sequence
  chemically synthesized
agagattttcttttagagcctc

SEQ ID NO: 15265 - DNA, 22 bp, Artificial Sequence
  chemically synthesized
tcttttagagcctcttctgtat

SEQ ID NO: 15266 - DNA, 22 bp, Artificial Sequence
  chemically synthesized
cttttagagcctcttctgtatt

SEQ ID NO: 15267 - DNA, 22 bp, Artificial Sequence
  chemically synthesized
ttttagagcctcttctgtattt

SEQ ID NO: 15268 - DNA, 22 bp, Artificial Sequence
  chemically synthesized
ttagagcctcttctgtatttag

SEQ ID NO: 15269 - DNA, 22 bp, Artificial Sequence
  chemically synthesized
tagagcctcttctgtatttagc

SEQ ID NO: 15270 - DNA, 22 bp, Artificial Sequence
  chemically synthesized
agagcctcttctgtatttagcc

SEQ ID NO: 15271 - DNA, 22 bp, Artificial Sequence
  chemically synthesized
gagcctcttctgtatttagccc

SEQ ID NO: 15272 - DNA, 22 bp, Artificial Sequence
  chemically synthesized
ttctgtatttagccctgtagga

SEQ ID NO: 15273 - DNA, 22 bp, Artificial Sequence
  chemically synthesized
ctgtatttagccctgtaggatt

SEQ ID NO: 15274 - DNA, 22 bp, Artificial Sequence
  chemically synthesized
tgtatttagccctgtaggattt

SEQ ID NO: 15275 - DNA, 22 bp, Artificial Sequence
  chemically synthesized
tatttagccctgtaggattttt

SEQ ID NO: 15276 - DNA, 22 bp, Artificial Sequence
  chemically synthesized
agccctgtaggatttttttttt

SEQ ID NO: 15277 - DNA, 22 bp, Artificial Sequence
  chemically synthesized
gccctgtaggattttttttttt

SEQ ID NO: 15278 - DNA, 22 bp, Artificial Sequence
  chemically synthesized
taggattttttttttttttttt

SEQ ID NO: 15279 - DNA, 22 bp, Artificial Sequence
  chemically synthesized
ttttttttttttttttttttgg

SEQ ID NO: 15280 - DNA, 22 bp, Artificial Sequence
  chemically synthesized
tttttttttttttttttttggt

SEQ ID NO: 15281 - DNA, 22 bp, Artificial Sequence
  chemically synthesized
ttttttttttttttttttggtg

SEQ ID NO: 15282 - DNA, 22 bp, Artificial Sequence
  chemically synthesized
tttttttttttttttttggtgt

SEQ ID NO: 15283 - DNA, 22 bp, Artificial Sequence
  chemically synthesized
ttttttttttttttttggtgtt

SEQ ID NO: 15284 - DNA, 22 bp, Artificial Sequence
  chemically synthesized
tttttttttttttttggtgttg

SEQ ID NO: 15285 - DNA, 22 bp, Artificial Sequence
  chemically synthesized
ttttttttttttttggtgttgt

SEQ ID NO: 15286 - DNA, 22 bp, Artificial Sequence
  chemically synthesized
tttttttttttttggtgttgtt

SEQ ID NO: 15287 - DNA, 22 bp, Artificial Sequence
  chemically synthesized
ttttttttttttggtgttgttg

SEQ ID NO: 15288 - DNA, 22 bp, Artificial Sequence
  chemically synthesized
tttttttttttggtgttgttga

SEQ ID NO: 15289 - DNA, 22 bp, Artificial Sequence
  chemically synthesized
ttttttttttggtgttgttgag

SEQ ID NO: 15290 - DNA, 22 bp, Artificial Sequence
  chemically synthesized
tttttttttggtgttgttgagc

SEQ ID NO: 15291 - DNA, 22 bp, Artificial Sequence
  chemically synthesized
ttttttttggtgttgttgagct

SEQ ID NO: 15292 - DNA, 22 bp, Artificial Sequence
  chemically synthesized
tttttttggtgttgttgagctt

SEQ ID NO: 15293 - DNA, 22 bp, Artificial Sequence
  chemically synthesized
ttttttggtgttgttgagcttc

SEQ ID NO: 15294 - DNA, 22 bp, Artificial Sequence
  chemically synthesized
tttttggtgttgttgagcttca

SEQ ID NO: 15295 - DNA, 22 bp, Artificial Sequence
  chemically synthesized
ttttggtgttgttgagcttcag

SEQ ID NO: 15296 - DNA, 22 bp, Artificial Sequence
  chemically synthesized
tttggtgttgttgagcttcagt

SEQ ID NO: 15297 - DNA, 22 bp, Artificial Sequence
  chemically synthesized
ttggtgttgttgagcttcagtg

SEQ ID NO: 15298 - DNA, 22 bp, Artificial Sequence
  chemically synthesized
tggtgttgttgagcttcagtga

SEQ ID NO: 15299 - DNA, 22 bp, Artificial Sequence
  chemically synthesized
ggtgttgttgagcttcagtgag

SEQ ID NO: 15300 - DNA, 22 bp, Artificial Sequence
  chemically synthesized
gtgttgttgagcttcagtgagg

SEQ ID NO: 15301 - DNA, 22 bp, Artificial Sequence
  chemically synthesized
ttgagcttcagtgaggctattc

SEQ ID NO: 15302 - DNA, 22 bp, Artificial Sequence
  chemically synthesized
agcttcagtgaggctattcatt

SEQ ID NO: 15303 - DNA, 22 bp, Artificial Sequence
  chemically synthesized
cagtgaggctattcattcactt

SEQ ID NO: 15304 - DNA, 22 bp, Artificial Sequence
  chemically synthesized
agtgaggctattcattcactta

SEQ ID NO: 15305 - DNA, 22 bp, Artificial Sequence
  chemically synthesized
ttcattcacttatactgataat

SEQ ID NO: 15306 - DNA, 22 bp, Artificial Sequence
  chemically synthesized
attcacttatactgataatgtc

SEQ ID NO: 15307 - DNA, 22 bp, Artificial Sequence
  chemically synthesized
acttatactgataatgtctgag

SEQ ID NO: 15308 - DNA, 22 bp, Artificial Sequence
  chemically synthesized
atactgataatgtctgagatac

SEQ ID NO: 15309 - DNA, 22 bp, Artificial Sequence
  chemically synthesized
tactgataatgtctgagatact

SEQ ID NO: 15310 - DNA, 22 bp, Artificial Sequence
  chemically synthesized
ataatgtctgagatactgtgaa

SEQ ID NO: 15311 - DNA, 22 bp, Artificial Sequence
  chemically synthesized
agatactgtgaatgaaatacta

SEQ ID NO: 15312 - DNA, 22 bp, Artificial Sequence
  chemically synthesized
tgaatgaaatactatgtatgct

SEQ ID NO: 15313 - DNA, 22 bp, Artificial Sequence
  chemically synthesized
tgtatgcttaaacctaagagga

SEQ ID NO: 15314 - DNA, 22 bp, Artificial Sequence
  chemically synthesized
aaacctaagaggaaatattttc

SEQ ID NO: 15315 - DNA, 22 bp, Artificial Sequence
  chemically synthesized
aacctaagaggaaatattttcc

SEQ ID NO: 15316 - DNA, 22 bp, Artificial Sequence
  chemically synthesized
agaggaaatattttcccaaaat

SEQ ID NO: 15317 - DNA, 22 bp, Artificial Sequence
  chemically synthesized
tcccaaaattattcttcccgaa

SEQ ID NO: 15318 - DNA, 22 bp, Artificial Sequence
  chemically synthesized
cccaaaattattcttcccgaaa

SEQ ID NO: 15319 - DNA, 22 bp, Artificial Sequence
  chemically synthesized
ccaaaattattcttcccgaaaa

SEQ ID NO: 15320 - DNA, 22 bp, Artificial Sequence
  chemically synthesized
ttcttcccgaaaaggaggagtt

SEQ ID NO: 15321 - DNA, 22 bp, Artificial Sequence
  chemically synthesized
ttcccgaaaaggaggagttgcc

SEQ ID NO: 15322 - DNA, 22 bp, Artificial Sequence
  chemically synthesized
cccgaaaaggaggagttgcctt

SEQ ID NO: 15323 - DNA, 22 bp, Artificial Sequence
  chemically synthesized
ccgaaaaggaggagttgccttt

SEQ ID NO: 15324 - DNA, 22 bp, Artificial Sequence
  chemically synthesized
ccttttgattgagttcttgcaa

SEQ ID NO: 15325 - DNA, 22 bp, Artificial Sequence
  chemically synthesized
ttgattgagttcttgcaaatct

SEQ ID NO: 15326 - DNA, 22 bp, Artificial Sequence
  chemically synthesized
tgattgagttcttgcaaatctc

SEQ ID NO: 15327 - DNA, 22 bp, Artificial Sequence
  chemically synthesized
gattgagttcttgcaaatctca

SEQ ID NO: 15328 - DNA, 22 bp, Artificial Sequence
  chemically synthesized
attgagttcttgcaaatctcac

SEQ ID NO: 15329 - DNA, 22 bp, Artificial Sequence
  chemically synthesized
agttcttgcaaatctcacaacg

SEQ ID NO: 15330 - DNA, 22 bp, Artificial Sequence
  chemically synthesized
ttgcaaatctcacaacgacttt

SEQ ID NO: 15331 - DNA, 22 bp, Artificial Sequence
  chemically synthesized
gcaaatctcacaacgactttat

SEQ ID NO: 15332 - DNA, 22 bp, Artificial Sequence
  chemically synthesized
caaatctcacaacgactttatt

SEQ ID NO: 15333 - DNA, 22 bp, Artificial Sequence
  chemically synthesized
acaacgactttattttgaacaa

SEQ ID NO: 15334 - DNA, 22 bp, Artificial Sequence
  chemically synthesized
tattttgaacaatactgtttgg

SEQ ID NO: 15335 - DNA, 22 bp, Artificial Sequence
  chemically synthesized
attttgaacaatactgtttggg

SEQ ID NO: 15336 - DNA, 22 bp, Artificial Sequence
  chemically synthesized
ttttgaacaatactgtttgggg

SEQ ID NO: 15337 - DNA, 22 bp, Artificial Sequence
  chemically synthesized
tgaacaatactgtttggggatg

SEQ ID NO: 15338 - DNA, 22 bp, Artificial Sequence
  chemically synthesized
gaacaatactgtttggggatga

SEQ ID NO: 15339 - DNA, 22 bp, Artificial Sequence
  chemically synthesized
aacaatactgtttggggatgat

SEQ ID NO: 15340 - DNA, 22 bp, Artificial Sequence
  chemically synthesized
tttggggatgatgcattagttt

SEQ ID NO: 15341 - DNA, 22 bp, Artificial Sequence
  chemically synthesized
ggggatgatgcattagtttgaa

SEQ ID NO: 15342 - DNA, 22 bp, Artificial Sequence
  chemically synthesized
gggatgatgcattagtttgaaa

SEQ ID NO: 15343 - DNA, 22 bp, Artificial Sequence
  chemically synthesized
gtttgaaacaacttcagttgta

SEQ ID NO: 15344 - DNA, 22 bp, Artificial Sequence
  chemically synthesized
gaaacaacttcagttgtagctg

SEQ ID NO: 15345 - DNA, 22 bp, Artificial Sequence
  chemically synthesized
aaacaacttcagttgtagctgt

SEQ ID NO: 15346 - DNA, 22 bp, Artificial Sequence
  chemically synthesized
cagttgtagctgtcatctgata

SEQ ID NO: 15347 - DNA, 22 bp, Artificial Sequence
  chemically synthesized
agttgtagctgtcatctgataa

SEQ ID NO: 15348 - DNA, 22 bp, Artificial Sequence
  chemically synthesized
tagctgtcatctgataaaattg

SEQ ID NO: 15349 - DNA, 22 bp, Artificial Sequence
  chemically synthesized
tcatctgataaaattgcttcac

SEQ ID NO: 15350 - DNA, 22 bp, Artificial Sequence
  chemically synthesized
ataaaattgcttcacagggaag

SEQ ID NO: 15351 - DNA, 22 bp, Artificial Sequence
  chemically synthesized
cttcacagggaaggaaatttaa

SEQ ID NO: 15352 - DNA, 22 bp, Artificial Sequence
  chemically synthesized
cacagggaaggaaatttaacac

SEQ ID NO: 15353 - DNA, 22 bp, Artificial Sequence
  chemically synthesized
acagggaaggaaatttaacacg

SEQ ID NO: 15354 - DNA, 22 bp, Artificial Sequence
  chemically synthesized
aacacggatctagtcattattc

SEQ ID NO: 15355 - DNA, 22 bp, Artificial Sequence
  chemically synthesized
acacggatctagtcattattct

SEQ ID NO: 15356 - DNA, 22 bp, Artificial Sequence
  chemically synthesized
gtcattattcttgttagattga

SEQ ID NO: 15357 - DNA, 22 bp, Artificial Sequence
  chemically synthesized
ttcttgttagattgaatgtgtg

SEQ ID NO: 15358 - DNA, 22 bp, Artificial Sequence
  chemically synthesized
ttgttagattgaatgtgtgaat

SEQ ID NO: 15359 - DNA, 22 bp, Artificial Sequence
  chemically synthesized
gttagattgaatgtgtgaattg

SEQ ID NO: 15360 - DNA, 22 bp, Artificial Sequence
  chemically synthesized
ttagattgaatgtgtgaattgt

SEQ ID NO: 15361 - DNA, 22 bp, Artificial Sequence
  chemically synthesized
gattgaatgtgtgaattgtaat

SEQ ID NO: 15362 - DNA, 22 bp, Artificial Sequence
  chemically synthesized
aatgtgtgaattgtaattgtaa

SEQ ID NO: 15363 - DNA, 22 bp, Artificial Sequence
  chemically synthesized
taattgtaaacaggcatgataa

SEQ ID NO: 15364 - DNA, 22 bp, Artificial Sequence
  chemically synthesized
taaacaggcatgataattatta

SEQ ID NO: 15365 - DNA, 22 bp, Artificial Sequence
  chemically synthesized
ttactttaaaaactaaaaacag

SEQ ID NO: 15366 - DNA, 22 bp, Artificial Sequence
  chemically synthesized
ctttaaaaactaaaaacagtga

SEQ ID NO: 15367 - DNA, 22 bp, Artificial Sequence
  chemically synthesized
taaaaactaaaaacagtgaata

SEQ ID NO: 15368 - DNA, 22 bp, Artificial Sequence
  chemically synthesized
aaaaactaaaaacagtgaatag

SEQ ID NO: 15369 - DNA, 22 bp, Artificial Sequence
  chemically synthesized
aaaactaaaaacagtgaatagt

SEQ ID NO: 15370 - DNA, 22 bp, Artificial Sequence
  chemically synthesized
aaaacagtgaatagttagttgt

SEQ ID NO: 15371 - DNA, 22 bp, Artificial Sequence
  chemically synthesized
gttgtggaggttactaaaggat

SEQ ID NO: 15372 - DNA, 22 bp, Artificial Sequence
  chemically synthesized
tggaggttactaaaggatggtt

SEQ ID NO: 15373 - DNA, 22 bp, Artificial Sequence
  chemically synthesized
ctaaaggatggtttttttttaa

SEQ ID NO: 15374 - DNA, 22 bp, Artificial Sequence
  chemically synthesized
aaggatggtttttttttaaata

SEQ ID NO: 15375 - DNA, 22 bp, Artificial Sequence
  chemically synthesized
ttttttaaataaaactttcagc

SEQ ID NO: 15376 - DNA, 22 bp, Artificial Sequence
  chemically synthesized
tttttaaataaaactttcagca

SEQ ID NO: 15377 - DNA, 22 bp, Artificial Sequence
  chemically synthesized
ttttaaataaaactttcagcat

SEQ ID NO: 15378 - DNA, 22 bp, Artificial Sequence
  chemically synthesized
tttaaataaaactttcagcatt

SEQ ID NO: 15379 - DNA, 22 bp, Artificial Sequence
  chemically synthesized
ttaaataaaactttcagcatta

SEQ ID NO: 15380 - DNA, 22 bp, Artificial Sequence
  chemically synthesized
taaataaaactttcagcattat

SEQ ID NO: 15381 - DNA, 22 bp, Artificial Sequence
  chemically synthesized
aaataaaactttcagcattatg

SEQ ID NO: 15382 - DNA, 22 bp, Artificial Sequence
  chemically synthesized
aataaaactttcagcattatgc

SEQ ID NO: 15383 - DNA, 22 bp, Artificial Sequence
  chemically synthesized
tcagcattatgcaaatgggcat

SEQ ID NO: 15384 - DNA, 22 bp, Artificial Sequence
  chemically synthesized
cagcattatgcaaatgggcata

SEQ ID NO: 15385 - DNA, 22 bp, Artificial Sequence
  chemically synthesized
agcattatgcaaatgggcatat

SEQ ID NO: 15386 - DNA, 22 bp, Artificial Sequence
  chemically synthesized
tgcaaatgggcatatggcttag

SEQ ID NO: 15387 - DNA, 22 bp, Artificial Sequence
  chemically synthesized
aggataaaacttccagaagtag

SEQ ID NO: 15388 - DNA, 22 bp, Artificial Sequence
  chemically synthesized
ggataaaacttccagaagtagc

SEQ ID NO: 15389 - DNA, 22 bp, Artificial Sequence
  chemically synthesized
ccagaagtagcatcacatttaa

SEQ ID NO: 15390 - DNA, 22 bp, Artificial Sequence
  chemically synthesized
cagaagtagcatcacatttaaa

SEQ ID NO: 15391 - DNA, 22 bp, Artificial Sequence
  chemically synthesized
aaattctcaagcaacttaataa

SEQ ID NO: 15392 - DNA, 22 bp, Artificial Sequence
  chemically synthesized
aattctcaagcaacttaataat

SEQ ID NO: 15393 - DNA, 22 bp, Artificial Sequence
  chemically synthesized
tcaagcaacttaataatatggg

SEQ ID NO: 15394 - DNA, 22 bp, Artificial Sequence
  chemically synthesized
aagcaacttaataatatggggc

SEQ ID NO: 15395 - DNA, 22 bp, Artificial Sequence
  chemically synthesized
aataatatggggctctgaaaaa

SEQ ID NO: 15396 - DNA, 22 bp, Artificial Sequence
  chemically synthesized
ataatatggggctctgaaaaac

SEQ ID NO: 15397 - DNA, 22 bp, Artificial Sequence
  chemically synthesized
tgaaaaactggttaaggttact

SEQ ID NO: 15398 - DNA, 22 bp, Artificial Sequence
  chemically synthesized
aaaaactggttaaggttactcc

SEQ ID NO: 15399 - DNA, 22 bp, Artificial Sequence
  chemically synthesized
gttaaggttactccaaaaatgg

SEQ ID NO: 15400 - DNA, 22 bp, Artificial Sequence
  chemically synthesized
aggttactccaaaaatggccct

SEQ ID NO: 15401 - DNA, 22 bp, Artificial Sequence
  chemically synthesized
ctccaaaaatggccctgggtct

SEQ ID NO: 15402 - DNA, 22 bp, Artificial Sequence
  chemically synthesized
caaaaatggccctgggtctgac

SEQ ID NO: 15403 - DNA, 22 bp, Artificial Sequence
  chemically synthesized
ggtctgacaaagattctaactt

SEQ ID NO: 15404 - DNA, 22 bp, Artificial Sequence
  chemically synthesized
acaaagattctaacttaaagat

SEQ ID NO: 15405 - DNA, 22 bp, Artificial Sequence
  chemically synthesized
taacttaaagatgcttatgaag

SEQ ID NO: 15406 - DNA, 22 bp, Artificial Sequence
  chemically synthesized
acttaaagatgcttatgaagac

SEQ ID NO: 15407 - DNA, 22 bp, Artificial Sequence
  chemically synthesized
aaagatgcttatgaagactttg

SEQ ID NO: 15408 - DNA, 22 bp, Artificial Sequence
  chemically synthesized
aagatgcttatgaagactttga

SEQ ID NO: 15409 - DNA, 22 bp, Artificial Sequence
  chemically synthesized
atgaagactttgagtaaaatca

SEQ ID NO: 15410 - DNA, 22 bp, Artificial Sequence
  chemically synthesized
tgaagactttgagtaaaatcat

SEQ ID NO: 15411 - DNA, 22 bp, Artificial Sequence
  chemically synthesized
tgagtaaaatcatttcataaaa

SEQ ID NO: 15412 - DNA, 22 bp, Artificial Sequence
  chemically synthesized
gagtaaaatcatttcataaaat

SEQ ID NO: 15413 - DNA, 22 bp, Artificial Sequence
  chemically synthesized
agtaaaatcatttcataaaata

SEQ ID NO: 15414 - DNA, 22 bp, Artificial Sequence
  chemically synthesized
cataaaataagtgaggaaaaac

SEQ ID NO: 15415 - DNA, 22 bp, Artificial Sequence
  chemically synthesized
ataaaataagtgaggaaaaaca

SEQ ID NO: 15416 - DNA, 22 bp, Artificial Sequence
  chemically synthesized
gtattaaattcatcttaaataa

SEQ ID NO: 15417 - DNA, 22 bp, Artificial Sequence
  chemically synthesized
aattcatcttaaataatgtatg

SEQ ID NO: 15418 - DNA, 22 bp, Artificial Sequence
  chemically synthesized
atcttaaataatgtatgattta

SEQ ID NO: 15419 - DNA, 22 bp, Artificial Sequence
  chemically synthesized
aaataatgtatgatttaaaaaa

SEQ ID NO: 15420 - DNA, 22 bp, Artificial Sequence
  chemically synthesized
aataatgtatgatttaaaaaat

SEQ ID NO: 15421 - DNA, 22 bp, Artificial Sequence
  chemically synthesized
aaaaaatatgtttagctaaaaa

SEQ ID NO: 15422 - DNA, 22 bp, Artificial Sequence
  chemically synthesized
aaaaatatgtttagctaaaaat

SEQ ID NO: 15423 - DNA, 22 bp, Artificial Sequence
  chemically synthesized
agctaaaaatgcatagtcattt

SEQ ID NO: 15424 - DNA, 22 bp, Artificial Sequence
  chemically synthesized
gctaaaaatgcatagtcatttg

SEQ ID NO: 15425 - DNA, 22 bp, Artificial Sequence
  chemically synthesized
aaaatgcatagtcatttgacaa

SEQ ID NO: 15426 - DNA, 22 bp, Artificial Sequence
  chemically synthesized
gacaatttcatttatatctcaa

SEQ ID NO: 15427 - DNA, 22 bp, Artificial Sequence
  chemically synthesized
acaatttcatttatatctcaaa

SEQ ID NO: 15428 - DNA, 22 bp, Artificial Sequence
  chemically synthesized
catttatatctcaaaaaattta

SEQ ID NO: 15429 - DNA, 22 bp, Artificial Sequence
  chemically synthesized
atttatatctcaaaaaatttac

SEQ ID NO: 15430 - DNA, 22 bp, Artificial Sequence
  chemically synthesized
atatctcaaaaaatttacttaa

SEQ ID NO: 15431 - DNA, 22 bp, Artificial Sequence
  chemically synthesized
tatctcaaaaaatttacttaac

SEQ ID NO: 15432 - DNA, 22 bp, Artificial Sequence
  chemically synthesized
aaaaaatttacttaaccaagtt

SEQ ID NO: 15433 - DNA, 22 bp, Artificial Sequence
  chemically synthesized
acttaaccaagttggtcacaaa

SEQ ID NO: 15434 - DNA, 22 bp, Artificial Sequence
  chemically synthesized
cttaaccaagttggtcacaaaa

SEQ ID NO: 15435 - DNA, 22 bp, Artificial Sequence
  chemically synthesized
aaccaagttggtcacaaaactg

SEQ ID NO: 15436 - DNA, 22 bp, Artificial Sequence
  chemically synthesized
accaagttggtcacaaaactga

SEQ ID NO: 15437 - DNA, 22 bp, Artificial Sequence
  chemically synthesized
gtcacaaaactgatgagactgg

SEQ ID NO: 15438 - DNA, 22 bp, Artificial Sequence
  chemically synthesized
atgagactggtggtggtagtga

SEQ ID NO: 15439 - DNA, 22 bp, Artificial Sequence
  chemically synthesized
gtggtggtagtgaataaatgag

SEQ ID NO: 15440 - DNA, 22 bp, Artificial Sequence
  chemically synthesized
gagacactttacatttgtgatg

SEQ ID NO: 15441 - DNA, 22 bp, Artificial Sequence
  chemically synthesized
agacactttacatttgtgatgt

SEQ ID NO: 15442 - DNA, 22 bp, Artificial Sequence
  chemically synthesized
tacatttgtgatgtgttatact

SEQ ID NO: 15443 - DNA, 22 bp, Artificial Sequence
  chemically synthesized
acatttgtgatgtgttatactg

SEQ ID NO: 15444 - DNA, 22 bp, Artificial Sequence
  chemically synthesized
catttgtgatgtgttatactga

SEQ ID NO: 15445 - DNA, 22 bp, Artificial Sequence
  chemically synthesized
gtgatgtgttatactgaatttt

SEQ ID NO: 15446 - DNA, 22 bp, Artificial Sequence
  chemically synthesized
tgatgtgttatactgaattttc

SEQ ID NO: 15447 - DNA, 22 bp, Artificial Sequence
  chemically synthesized
tactgaattttcagtttgattc

SEQ ID NO: 15448 - DNA, 22 bp, Artificial Sequence
  chemically synthesized
aattttcagtttgattctatag

SEQ ID NO: 15449 - DNA, 22 bp, Artificial Sequence
  chemically synthesized
tcagtttgattctatagactac

SEQ ID NO: 15450 - DNA, 22 bp, Artificial Sequence
  chemically synthesized
cagtttgattctatagactaca

SEQ ID NO: 15451 - DNA, 22 bp, Artificial Sequence
  chemically synthesized
agtttgattctatagactacaa

SEQ ID NO: 15452 - DNA, 22 bp, Artificial Sequence
  chemically synthesized
gattctatagactacaaatttc

SEQ ID NO: 15453 - DNA, 22 bp, Artificial Sequence
  chemically synthesized
attctatagactacaaatttca

SEQ ID NO: 15454 - DNA, 22 bp, Artificial Sequence
  chemically synthesized
tatagactacaaatttcaaaat

SEQ ID NO: 15455 - DNA, 22 bp, Artificial Sequence
  chemically synthesized
tagactacaaatttcaaaatta

SEQ ID NO: 15456 - DNA, 22 bp, Artificial Sequence
  chemically synthesized
caaatttcaaaattacaatttc

SEQ ID NO: 15457 - DNA, 22 bp, Artificial Sequence
  chemically synthesized
caaaattacaatttcaagatgt

SEQ ID NO: 15458 - DNA, 22 bp, Artificial Sequence
  chemically synthesized
aaaattacaatttcaagatgta

SEQ ID NO: 15459 - DNA, 22 bp, Artificial Sequence
  chemically synthesized
caatttcaagatgtaataagta

SEQ ID NO: 15460 - DNA, 22 bp, Artificial Sequence
  chemically synthesized
caagatgtaataagtagtaata

SEQ ID NO: 15461 - DNA, 22 bp, Artificial Sequence
  chemically synthesized
aagatgtaataagtagtaatat

SEQ ID NO: 15462 - DNA, 22 bp, Artificial Sequence
  chemically synthesized
gaaatagctctaaagggaattt

SEQ ID NO: 15463 - DNA, 22 bp, Artificial Sequence
  chemically synthesized
aaatagctctaaagggaatttt

SEQ ID NO: 15464 - DNA, 22 bp, Artificial Sequence
  chemically synthesized
taaagggaatttttctgtttta

SEQ ID NO: 15465 - DNA, 22 bp, Artificial Sequence
  chemically synthesized
aagggaatttttctgttttatt

SEQ ID NO: 15466 - DNA, 22 bp, Artificial Sequence
  chemically synthesized
ttctgttttattgattcttaaa

SEQ ID NO: 15467 - DNA, 22 bp, Artificial Sequence
  chemically synthesized
tctgttttattgattcttaaaa

SEQ ID NO: 15468 - DNA, 22 bp, Artificial Sequence
  chemically synthesized
ctgttttattgattcttaaaat

SEQ ID NO: 15469 - DNA, 22 bp, Artificial Sequence
  chemically synthesized
tgttttattgattcttaaaata

SEQ ID NO: 15470 - DNA, 22 bp, Artificial Sequence
  chemically synthesized
ttttattgattcttaaaatata

SEQ ID NO: 15471 - DNA, 22 bp, Artificial Sequence
  chemically synthesized
tattgattcttaaaatatatgt

SEQ ID NO: 15472 - DNA, 22 bp, Artificial Sequence
  chemically synthesized
attgattcttaaaatatatgtg

SEQ ID NO: 15473 - DNA, 22 bp, Artificial Sequence
  chemically synthesized
ttgattcttaaaatatatgtgc

SEQ ID NO: 15474 - DNA, 22 bp, Artificial Sequence
  chemically synthesized
attcttaaaatatatgtgctga

SEQ ID NO: 15475 - DNA, 22 bp, Artificial Sequence
  chemically synthesized
ttaaaatatatgtgctgatttt

SEQ ID NO: 15476 - DNA, 22 bp, Artificial Sequence
  chemically synthesized
aaaatatatgtgctgattttga

SEQ ID NO: 15477 - DNA, 22 bp, Artificial Sequence
  chemically synthesized
aaatatatgtgctgattttgat

SEQ ID NO: 15478 - DNA, 22 bp, Artificial Sequence
  chemically synthesized
attttgatttgcatttgggtag

SEQ ID NO: 15479 - DNA, 22 bp, Artificial Sequence
  chemically synthesized
tgatttgcatttgggtagatta

SEQ ID NO: 15480 - DNA, 22 bp, Artificial Sequence
  chemically synthesized
gatttgcatttgggtagattat

SEQ ID NO: 15481 - DNA, 22 bp, Artificial Sequence
  chemically synthesized
atttgcatttgggtagattata

SEQ ID NO: 15482 - DNA, 22 bp, Artificial Sequence
  chemically synthesized
gcatttgggtagattatacttt

SEQ ID NO: 15483 - DNA, 22 bp, Artificial Sequence
  chemically synthesized
catttgggtagattatactttt

SEQ ID NO: 15484 - DNA, 22 bp, Artificial Sequence
  chemically synthesized
gggtagattatacttttatgag

SEQ ID NO: 15485 - DNA, 22 bp, Artificial Sequence
  chemically synthesized
ggtagattatacttttatgagt

SEQ ID NO: 15486 - DNA, 22 bp, Artificial Sequence
  chemically synthesized
tacttttatgagtatggaggtt

SEQ ID NO: 15487 - DNA, 22 bp, Artificial Sequence
  chemically synthesized
ttatgagtatggaggttaggta

SEQ ID NO: 15488 - DNA, 22 bp, Artificial Sequence
  chemically synthesized
tatgagtatggaggttaggtat

SEQ ID NO: 15489 - DNA, 22 bp, Artificial Sequence
  chemically synthesized
atgagtatggaggttaggtatt

SEQ ID NO: 15490 - DNA, 22 bp, Artificial Sequence
  chemically synthesized
tgagtatggaggttaggtattg

SEQ ID NO: 15491 - DNA, 22 bp, Artificial Sequence
  chemically synthesized
ggtattgattcaagttttcctt

SEQ ID NO: 15492 - DNA, 22 bp, Artificial Sequence
  chemically synthesized
attcaagttttccttacctatt

SEQ ID NO: 15493 - DNA, 22 bp, Artificial Sequence
  chemically synthesized
aagttttccttacctatttggt

SEQ ID NO: 15494 - DNA, 22 bp, Artificial Sequence
  chemically synthesized
tccttacctatttggtaaggat

SEQ ID NO: 15495 - DNA, 22 bp, Artificial Sequence
  chemically synthesized
ccttacctatttggtaaggatt

SEQ ID NO: 15496 - DNA, 22 bp, Artificial Sequence
  chemically synthesized
cttacctatttggtaaggattt

SEQ ID NO: 15497 - DNA, 22 bp, Artificial Sequence
  chemically synthesized
acctatttggtaaggatttcaa

SEQ ID NO: 15498 - DNA, 22 bp, Artificial Sequence
  chemically synthesized
cctatttggtaaggatttcaaa

SEQ ID NO: 15499 - DNA, 22 bp, Artificial Sequence
  chemically synthesized
tttggtaaggatttcaaagtct

SEQ ID NO: 15500 - DNA, 22 bp, Artificial Sequence
  chemically synthesized
ggtaaggatttcaaagtctttt

SEQ ID NO: 15501 - DNA, 22 bp, Artificial Sequence
  chemically synthesized
gtaaggatttcaaagtcttttt

SEQ ID NO: 15502 - DNA, 22 bp, Artificial Sequence
  chemically synthesized
caaagtctttttgtgcttggtt

SEQ ID NO: 15503 - DNA, 22 bp, Artificial Sequence
  chemically synthesized
aaagtctttttgtgcttggttt

SEQ ID NO: 15504 - DNA, 22 bp, Artificial Sequence
  chemically synthesized
tttgtgcttggttttcctcatt

SEQ ID NO: 15505 - DNA, 22 bp, Artificial Sequence
  chemically synthesized
ttgtgcttggttttcctcattt

SEQ ID NO: 15506 - DNA, 22 bp, Artificial Sequence
  chemically synthesized
tgtgcttggttttcctcatttt

SEQ ID NO: 15507 - DNA, 22 bp, Artificial Sequence
  chemically synthesized
gtgcttggttttcctcattttt

SEQ ID NO: 15508 - DNA, 22 bp, Artificial Sequence
  chemically synthesized
tgcttggttttcctcattttta

SEQ ID NO: 15509 - DNA, 22 bp, Artificial Sequence
  chemically synthesized
ggttttcctcatttttaaatat

SEQ ID NO: 15510 - DNA, 22 bp, Artificial Sequence
  chemically synthesized
gttttcctcatttttaaatatg

SEQ ID NO: 15511 - DNA, 22 bp, Artificial Sequence
  chemically synthesized
tcctcatttttaaatatgaaat

SEQ ID NO: 15512 - DNA, 22 bp, Artificial Sequence
  chemically synthesized
cctcatttttaaatatgaaata

SEQ ID NO: 15513 - DNA, 22 bp, Artificial Sequence
  chemically synthesized
ctcatttttaaatatgaaatat

SEQ ID NO: 15514 - DNA, 22 bp, Artificial Sequence
  chemically synthesized
atttttaaatatgaaatatatt

SEQ ID NO: 15515 - DNA, 22 bp, Artificial Sequence
  chemically synthesized
ttaaatatgaaatatattgatg

SEQ ID NO: 15516 - DNA, 22 bp, Artificial Sequence
  chemically synthesized
taaatatgaaatatattgatga

SEQ ID NO: 15517 - DNA, 22 bp, Artificial Sequence
  chemically synthesized
aaatatgaaatatattgatgac

SEQ ID NO: 15518 - DNA, 22 bp, Artificial Sequence
  chemically synthesized
aatatgaaatatattgatgacc

SEQ ID NO: 15519 - DNA, 22 bp, Artificial Sequence
  chemically synthesized
atgacctttaacaaattttttt

SEQ ID NO: 15520 - DNA, 22 bp, Artificial Sequence
  chemically synthesized
taacaaattttttttatctcaa

SEQ ID NO: 15521 - DNA, 22 bp, Artificial Sequence
  chemically synthesized
aacaaattttttttatctcaaa

SEQ ID NO: 15522 - DNA, 22 bp, Artificial Sequence
  chemically synthesized
acaaattttttttatctcaaat

SEQ ID NO: 15523 - DNA, 22 bp, Artificial Sequence
  chemically synthesized
tttttatctcaaattttaaagg

SEQ ID NO: 15524 - DNA, 22 bp, Artificial Sequence
  chemically synthesized
ttttatctcaaattttaaagga

SEQ ID NO: 15525 - DNA, 22 bp, Artificial Sequence
  chemically synthesized
tttatctcaaattttaaaggag

SEQ ID NO: 15526 - DNA, 22 bp, Artificial Sequence
  chemically synthesized
ttatctcaaattttaaaggaga

SEQ ID NO: 15527 - DNA, 22 bp, Artificial Sequence
  chemically synthesized
tatctcaaattttaaaggagat

SEQ ID NO: 15528 - DNA, 22 bp, Artificial Sequence
  chemically synthesized
atctcaaattttaaaggagatc

SEQ ID NO: 15529 - DNA, 22 bp, Artificial Sequence
  chemically synthesized
tctcaaattttaaaggagatct

SEQ ID NO: 15530 - DNA, 22 bp, Artificial Sequence
  chemically synthesized
aaattttaaaggagatcttttc

SEQ ID NO: 15531 - DNA, 22 bp, Artificial Sequence
  chemically synthesized
taaaggagatcttttctaaaag

SEQ ID NO: 15532 - DNA, 22 bp, Artificial Sequence
  chemically synthesized
aaaggagatcttttctaaaaga

SEQ ID NO: 15533 - DNA, 22 bp, Artificial Sequence
  chemically synthesized
aaggagatcttttctaaaagag

SEQ ID NO: 15534 - DNA, 22 bp, Artificial Sequence
  chemically synthesized
ttctaaaagaggcatgatgact

SEQ ID NO: 15535 - DNA, 22 bp, Artificial Sequence
  chemically synthesized
tctaaaagaggcatgatgactt

SEQ ID NO: 15536 - DNA, 22 bp, Artificial Sequence
  chemically synthesized
ctaaaagaggcatgatgactta

SEQ ID NO: 15537 - DNA, 22 bp, Artificial Sequence
  chemically synthesized
taaaagaggcatgatgacttaa

SEQ ID NO: 15538 - DNA, 22 bp, Artificial Sequence
  chemically synthesized
aaagaggcatgatgacttaatc

SEQ ID NO: 15539 - DNA, 22 bp, Artificial Sequence
  chemically synthesized
aatcattgcatgtaacagtaaa

SEQ ID NO: 15540 - DNA, 22 bp, Artificial Sequence
  chemically synthesized
atcattgcatgtaacagtaaac

SEQ ID NO: 15541 - DNA, 22 bp, Artificial Sequence
  chemically synthesized
catgtaacagtaaacgataaac

SEQ ID NO: 15542 - DNA, 22 bp, Artificial Sequence
  chemically synthesized
catactctctaaagaataaaag

SEQ ID NO: 15543 - DNA, 22 bp, Artificial Sequence
  chemically synthesized
tctaaagaataaaagtgagctt

SEQ ID NO: 15544 - DNA, 22 bp, Artificial Sequence
  chemically synthesized
taaagaataaaagtgagcttta

SEQ ID NO: 15545 - DNA, 22 bp, Artificial Sequence
  chemically synthesized
aagaataaaagtgagctttagg

SEQ ID NO: 15546 - DNA, 22 bp, Artificial Sequence
  chemically synthesized
tagggccgggcatggtcagaaa

SEQ ID NO: 15547 - DNA, 22 bp, Artificial Sequence
  chemically synthesized
agggccgggcatggtcagaaat

SEQ ID NO: 15548 - DNA, 22 bp, Artificial Sequence
  chemically synthesized
gggccgggcatggtcagaaatt

SEQ ID NO: 15549 - DNA, 22 bp, Artificial Sequence
  chemically synthesized
gacaccaacctggccaacatgg

SEQ ID NO: 15550 - DNA, 22 bp, Artificial Sequence
  chemically synthesized
acaccaacctggccaacatggc

SEQ ID NO: 15551 - DNA, 22 bp, Artificial Sequence
  chemically synthesized
gccaacatggcgaaaccccgtc

SEQ ID NO: 15552 - DNA, 22 bp, Artificial Sequence
  chemically synthesized
tactaaaaatacaaaaatcagc

SEQ ID NO: 15553 - DNA, 22 bp, Artificial Sequence
  chemically synthesized
ctaaaaatacaaaaatcagccg

SEQ ID NO: 15554 - DNA, 22 bp, Artificial Sequence
  chemically synthesized
aaaatacaaaaatcagccgggc

SEQ ID NO: 15555 - DNA, 22 bp, Artificial Sequence
  chemically synthesized
tagtcccagctacttgggagga

SEQ ID NO: 15556 - DNA, 22 bp, Artificial Sequence
  chemically synthesized
cttgggaggatgagacaggaga

SEQ ID NO: 15557 - DNA, 22 bp, Artificial Sequence
  chemically synthesized
gggaggatgagacaggagagtc

SEQ ID NO: 15558 - DNA, 22 bp, Artificial Sequence
  chemically synthesized
ggaggatgagacaggagagtca

SEQ ID NO: 15559 - DNA, 22 bp, Artificial Sequence
  chemically synthesized
gaacctgggaggagaggttgca

SEQ ID NO: 15560 - DNA, 22 bp, Artificial Sequence
  chemically synthesized
aacctgggaggagaggttgcag

SEQ ID NO: 15561 - DNA, 22 bp, Artificial Sequence
  chemically synthesized
ggaggagaggttgcagtgagct

SEQ ID NO: 15562 - DNA, 22 bp, Artificial Sequence
  chemically synthesized
cagtgagctgagatcacgccat

SEQ ID NO: 15563 - DNA, 22 bp, Artificial Sequence
  chemically synthesized
agatcacgccattgcactccag

SEQ ID NO: 15564 - DNA, 22 bp, Artificial Sequence
  chemically synthesized
cactccagcctgagcaatgaaa

SEQ ID NO: 15565 - DNA, 22 bp, Artificial Sequence
  chemically synthesized
cagcctgagcaatgaaagcaaa

SEQ ID NO: 15566 - DNA, 22 bp, Artificial Sequence
  chemically synthesized
agcaatgaaagcaaaactccat

SEQ ID NO: 15567 - DNA, 22 bp, Artificial Sequence
  chemically synthesized
catctcaaaaaaaaaaaaagaa

SEQ ID NO: 15568 - DNA, 22 bp, Artificial Sequence
  chemically synthesized
aaaaaaaaaaaaagaaaagaaa

SEQ ID NO: 15569 - DNA, 22 bp, Artificial Sequence
  chemically synthesized
tggattgcatataaatccttta

SEQ ID NO: 15570 - DNA, 22 bp, Artificial Sequence
  chemically synthesized
ggattgcatataaatcctttag

SEQ ID NO: 15571 - DNA, 22 bp, Artificial Sequence
  chemically synthesized
gattgcatataaatcctttaga

SEQ ID NO: 15572 - DNA, 22 bp, Artificial Sequence
  chemically synthesized
catataaatcctttagacatgt

SEQ ID NO: 15573 - DNA, 22 bp, Artificial Sequence
  chemically synthesized
tagacatgtagtagacttgttt

SEQ ID NO: 15574 - DNA, 22 bp, Artificial Sequence
  chemically synthesized
agacatgtagtagacttgtttg

SEQ ID NO: 15575 - DNA, 22 bp, Artificial Sequence
  chemically synthesized
gacatgtagtagacttgtttga

SEQ ID NO: 15576 - DNA, 22 bp, Artificial Sequence
  chemically synthesized
gtttgatactgtgtttgaacaa

SEQ ID NO: 15577 - DNA, 22 bp, Artificial Sequence
  chemically synthesized
tttgatactgtgtttgaacaaa

SEQ ID NO: 15578 - DNA, 22 bp, Artificial Sequence
  chemically synthesized
gatactgtgtttgaacaaatta

SEQ ID NO: 15579 - DNA, 22 bp, Artificial Sequence
  chemically synthesized
atactgtgtttgaacaaattac

SEQ ID NO: 15580 - DNA, 22 bp, Artificial Sequence
  chemically synthesized
tgtttgaacaaattacgaagta

SEQ ID NO: 15581 - DNA, 22 bp, Artificial Sequence
  chemically synthesized
gaacaaattacgaagtattttc

SEQ ID NO: 15582 - DNA, 22 bp, Artificial Sequence
  chemically synthesized
aacaaattacgaagtattttca

SEQ ID NO: 15583 - DNA, 22 bp, Artificial Sequence
  chemically synthesized
cgaagtattttcatcaaagaat

SEQ ID NO: 15584 - DNA, 22 bp, Artificial Sequence
  chemically synthesized
tcatcaaagaatgttattgttt

SEQ ID NO: 15585 - DNA, 22 bp, Artificial Sequence
  chemically synthesized
catcaaagaatgttattgtttg

SEQ ID NO: 15586 - DNA, 22 bp, Artificial Sequence
  chemically synthesized
atcaaagaatgttattgtttga

SEQ ID NO: 15587 - DNA, 22 bp, Artificial Sequence
  chemically synthesized
ttgtttgatgttatttttattt

SEQ ID NO: 15588 - DNA, 22 bp, Artificial Sequence
  chemically synthesized
tttgatgttatttttatttttt

SEQ ID NO: 15589 - DNA, 22 bp, Artificial Sequence
  chemically synthesized
gatgttatttttattttttatt

SEQ ID NO: 15590 - DNA, 22 bp, Artificial Sequence
  chemically synthesized
atgttatttttattttttattg

SEQ ID NO: 15591 - DNA, 22 bp, Artificial Sequence
  chemically synthesized
tttttattttttattgcccagc

SEQ ID NO: 15592 - DNA, 22 bp, Artificial Sequence
  chemically synthesized
ttattttttattgcccagcttc

SEQ ID NO: 15593 - DNA, 22 bp, Artificial Sequence
  chemically synthesized
tattttttattgcccagcttct

SEQ ID NO: 15594 - DNA, 22 bp, Artificial Sequence
  chemically synthesized
attttttattgcccagcttctc

SEQ ID NO: 15595 - DNA, 22 bp, Artificial Sequence
  chemically synthesized
ttttttattgcccagcttctct

SEQ ID NO: 15596 - DNA, 22 bp, Artificial Sequence
  chemically synthesized
tttattgcccagcttctctcat

SEQ ID NO: 15597 - DNA, 22 bp, Artificial Sequence
  chemically synthesized
ttattgcccagcttctctcata

SEQ ID NO: 15598 - DNA, 22 bp, Artificial Sequence
  chemically synthesized
tattgcccagcttctctcatat

SEQ ID NO: 15599 - DNA, 22 bp, Artificial Sequence
  chemically synthesized
attgcccagcttctctcatatt

SEQ ID NO: 15600 - DNA, 22 bp, Artificial Sequence
  chemically synthesized
ttgcccagcttctctcatatta

SEQ ID NO: 15601 - DNA, 22 bp, Artificial Sequence
  chemically synthesized
cccagcttctctcatattacgt

SEQ ID NO: 15602 - DNA, 22 bp, Artificial Sequence
  chemically synthesized
ctctcatattacgtgattttct

SEQ ID NO: 15603 - DNA, 22 bp, Artificial Sequence
  chemically synthesized
tctcatattacgtgattttctt

SEQ ID NO: 15604 - DNA, 22 bp, Artificial Sequence
  chemically synthesized
tcatattacgtgattttcttca

SEQ ID NO: 15605 - DNA, 22 bp, Artificial Sequence
  chemically synthesized
atattacgtgattttcttcact

SEQ ID NO: 15606 - DNA, 22 bp, Artificial Sequence
  chemically synthesized
cgtgattttcttcacttcatgt

SEQ ID NO: 15607 - DNA, 22 bp, Artificial Sequence
  chemically synthesized
tcttcacttcatgtcactttat

SEQ ID NO: 15608 - DNA, 22 bp, Artificial Sequence
  chemically synthesized
cttcacttcatgtcactttatt

SEQ ID NO: 15609 - DNA, 22 bp, Artificial Sequence
  chemically synthesized
ttcacttcatgtcactttattg

SEQ ID NO: 15610 - DNA, 22 bp, Artificial Sequence
  chemically synthesized
cacttcatgtcactttattgtg

SEQ ID NO: 15611 - DNA, 22 bp, Artificial Sequence
  chemically synthesized
acttcatgtcactttattgtgc

SEQ ID NO: 15612 - DNA, 22 bp, Artificial Sequence
  chemically synthesized
catgtcactttattgtgcaggg

SEQ ID NO: 15613 - DNA, 22 bp, Artificial Sequence
  chemically synthesized
atgtcactttattgtgcagggt

SEQ ID NO: 15614 - DNA, 22 bp, Artificial Sequence
  chemically synthesized
tattgtgcagggtcagagtatt

SEQ ID NO: 15615 - DNA, 22 bp, Artificial Sequence
  chemically synthesized
attgtgcagggtcagagtatta

SEQ ID NO: 15616 - DNA, 22 bp, Artificial Sequence
  chemically synthesized
ttgtgcagggtcagagtattat

SEQ ID NO: 15617 - DNA, 22 bp, Artificial Sequence
  chemically synthesized
tgcagggtcagagtattattcc

SEQ ID NO: 15618 - DNA, 22 bp, Artificial Sequence
  chemically synthesized
ttccaatgcttactggagaagt

SEQ ID NO: 15619 - DNA, 22 bp, Artificial Sequence
  chemically synthesized
caatgcttactggagaagtgat

SEQ ID NO: 15620 - DNA, 22 bp, Artificial Sequence
  chemically synthesized
actggagaagtgattcctgtaa

SEQ ID NO: 15621 - DNA, 22 bp, Artificial Sequence
  chemically synthesized
ctggagaagtgattcctgtaat

SEQ ID NO: 15622 - DNA, 22 bp, Artificial Sequence
  chemically synthesized
gagaagtgattcctgtaatgga

SEQ ID NO: 15623 - DNA, 22 bp, Artificial Sequence
  chemically synthesized
ctgtaatggaactgctttcatc

SEQ ID NO: 15624 - DNA, 22 bp, Artificial Sequence
  chemically synthesized
taatggaactgctttcatctat

SEQ ID NO: 15625 - DNA, 22 bp, Artificial Sequence
  chemically synthesized
ctttcatctatgaaatcacaca

SEQ ID NO: 15626 - DNA, 22 bp, Artificial Sequence
  chemically synthesized
tcatctatgaaatcacacagtg

SEQ ID NO: 15627 - DNA, 22 bp, Artificial Sequence
  chemically synthesized
catctatgaaatcacacagtgt

SEQ ID NO: 15628 - DNA, 22 bp, Artificial Sequence
  chemically synthesized
atctatgaaatcacacagtgtt

SEQ ID NO: 15629 - DNA, 22 bp, Artificial Sequence
  chemically synthesized
tgaaatcacacagtgttcctga

SEQ ID NO: 15630 - DNA, 22 bp, Artificial Sequence
  chemically synthesized
ctgaagaaatagatgtaagttt

SEQ ID NO: 15631 - DNA, 22 bp, Artificial Sequence
  chemically synthesized
aagaaatagatgtaagtttaaa

SEQ ID NO: 15632 - DNA, 22 bp, Artificial Sequence
  chemically synthesized
aaatgagagcaattatacactt

SEQ ID NO: 15633 - DNA, 22 bp, Artificial Sequence
  chemically synthesized
aatgagagcaattatacacttt

SEQ ID NO: 15634 - DNA, 22 bp, Artificial Sequence
  chemically synthesized
tacactttatgagttttttggg

SEQ ID NO: 15635 - DNA, 22 bp, Artificial Sequence
  chemically synthesized
tatgagttttttggggttatag

SEQ ID NO: 15636 - DNA, 22 bp, Artificial Sequence
  chemically synthesized
atgagttttttggggttatagt

SEQ ID NO: 15637 - DNA, 22 bp, Artificial Sequence
  chemically synthesized
tgagttttttggggttatagta

SEQ ID NO: 15638 - DNA, 22 bp, Artificial Sequence
  chemically synthesized
tttggggttatagtattattat

SEQ ID NO: 15639 - DNA, 22 bp, Artificial Sequence
  chemically synthesized
ttggggttatagtattattatg

SEQ ID NO: 15640 - DNA, 22 bp, Artificial Sequence
  chemically synthesized
tggggttatagtattattatgt

SEQ ID NO: 15641 - DNA, 22 bp, Artificial Sequence
  chemically synthesized
ggggttatagtattattatgta

SEQ ID NO: 15642 - DNA, 22 bp, Artificial Sequence
  chemically synthesized
gggttatagtattattatgtat

SEQ ID NO: 15643 - DNA, 22 bp, Artificial Sequence
  chemically synthesized
tagtattattatgtatattatt

SEQ ID NO: 15644 - DNA, 22 bp, Artificial Sequence
  chemically synthesized
ttatgtatattattaatattct

SEQ ID NO: 15645 - DNA, 22 bp, Artificial Sequence
  chemically synthesized
tgtatattattaatattctaat

SEQ ID NO: 15646 - DNA, 22 bp, Artificial Sequence
  chemically synthesized
ttaatattctaattttaatagt

SEQ ID NO: 15647 - DNA, 22 bp, Artificial Sequence
  chemically synthesized
atattctaattttaatagtaag

SEQ ID NO: 15648 - DNA, 22 bp, Artificial Sequence
  chemically synthesized
taattttaatagtaaggacttt

SEQ ID NO: 15649 - DNA, 22 bp, Artificial Sequence
  chemically synthesized
attttaatagtaaggactttgt

SEQ ID NO: 15650 - DNA, 22 bp, Artificial Sequence
  chemically synthesized
taatagtaaggactttgtcata

SEQ ID NO: 15651 - DNA, 22 bp, Artificial Sequence
  chemically synthesized
aatagtaaggactttgtcatac

SEQ ID NO: 15652 - DNA, 22 bp, Artificial Sequence
  chemically synthesized
atagtaaggactttgtcataca

SEQ ID NO: 15653 - DNA, 22 bp, Artificial Sequence
  chemically synthesized
tgtcatacatactattcacata

SEQ ID NO: 15654 - DNA, 22 bp, Artificial Sequence
  chemically synthesized
gtcatacatactattcacatac

SEQ ID NO: 15655 - DNA, 22 bp, Artificial Sequence
  chemically synthesized
tcatacatactattcacataca

SEQ ID NO: 15656 - DNA, 22 bp, Artificial Sequence
  chemically synthesized
ttcacatacagtattagccact

SEQ ID NO: 15657 - DNA, 22 bp, Artificial Sequence
  chemically synthesized
acatacagtattagccacttta

SEQ ID NO: 15658 - DNA, 22 bp, Artificial Sequence
  chemically synthesized
gccactttagcaaataagcaca

SEQ ID NO: 15659 - DNA, 22 bp, Artificial Sequence
  chemically synthesized
tagcaaataagcacacacaaaa

SEQ ID NO: 15660 - DNA, 22 bp, Artificial Sequence
  chemically synthesized
agcaaataagcacacacaaaat

SEQ ID NO: 15661 - DNA, 22 bp, Artificial Sequence
  chemically synthesized
gcaaataagcacacacaaaatc

SEQ ID NO: 15662 - DNA, 22 bp, Artificial Sequence
  chemically synthesized
gattttatggcaaaacagaggc

SEQ ID NO: 15663 - DNA, 22 bp, Artificial Sequence
  chemically synthesized
tatggcaaaacagaggcatttt

SEQ ID NO: 15664 - DNA, 22 bp, Artificial Sequence
  chemically synthesized
atggcaaaacagaggcattttt

SEQ ID NO: 15665 - DNA, 22 bp, Artificial Sequence
  chemically synthesized
tggcaaaacagaggcatttttg

SEQ ID NO: 15666 - DNA, 22 bp, Artificial Sequence
  chemically synthesized
ttgatcagtgatgacaaaatta

SEQ ID NO: 15667 - DNA, 22 bp, Artificial Sequence
  chemically synthesized
tgatcagtgatgacaaaattaa

SEQ ID NO: 15668 - DNA, 22 bp, Artificial Sequence
  chemically synthesized
gatcagtgatgacaaaattaaa

SEQ ID NO: 15669 - DNA, 22 bp, Artificial Sequence
  chemically synthesized
atcagtgatgacaaaattaaat

SEQ ID NO: 15670 - DNA, 22 bp, Artificial Sequence
  chemically synthesized
aattcattttgtttatttcatt

SEQ ID NO: 15671 - DNA, 22 bp, Artificial Sequence
  chemically synthesized
attttgtttatttcattacttt

SEQ ID NO: 15672 - DNA, 22 bp, Artificial Sequence
  chemically synthesized
tgtttatttcattacttttata

SEQ ID NO: 15673 - DNA, 22 bp, Artificial Sequence
  chemically synthesized
gtttatttcattacttttataa

SEQ ID NO: 15674 - DNA, 22 bp, Artificial Sequence
  chemically synthesized
tttatttcattacttttataat

SEQ ID NO: 15675 - DNA, 22 bp, Artificial Sequence
  chemically synthesized
atttcattacttttataattcc

SEQ ID NO: 15676 - DNA, 22 bp, Artificial Sequence
  chemically synthesized
tttcattacttttataattcct

SEQ ID NO: 15677 - DNA, 22 bp, Artificial Sequence
  chemically synthesized
cattacttttataattcctaaa

SEQ ID NO: 15678 - DNA, 22 bp, Artificial Sequence
  chemically synthesized
attacttttataattcctaaaa

SEQ ID NO: 15679 - DNA, 22 bp, Artificial Sequence
  chemically synthesized
cttttataattcctaaaagtgg

SEQ ID NO: 15680 - DNA, 22 bp, Artificial Sequence
  chemically synthesized
ttataattcctaaaagtgggag

SEQ ID NO: 15681 - DNA, 22 bp, Artificial Sequence
  chemically synthesized
tataattcctaaaagtgggagg

SEQ ID NO: 15682 - DNA, 22 bp, Artificial Sequence
  chemically synthesized
ataattcctaaaagtgggagga

SEQ ID NO: 15683 - DNA, 22 bp, Artificial Sequence
  chemically synthesized
taattcctaaaagtgggaggat

SEQ ID NO: 15684 - DNA, 22 bp, Artificial Sequence
  chemically synthesized
ctaaaagtgggaggatcccagc

SEQ ID NO: 15685 - DNA, 22 bp, Artificial Sequence
  chemically synthesized
aaagtgggaggatcccagctct

SEQ ID NO: 15686 - DNA, 22 bp, Artificial Sequence
  chemically synthesized
ttataggagcaattaatattta

SEQ ID NO: 15687 - DNA, 22 bp, Artificial Sequence
  chemically synthesized
ataggagcaattaatatttaat

SEQ ID NO: 15688 - DNA, 22 bp, Artificial Sequence
  chemically synthesized
taggagcaattaatatttaatg

SEQ ID NO: 15689 - DNA, 22 bp, Artificial Sequence
  chemically synthesized
atatttaatgtagtgtcttttg

SEQ ID NO: 15690 - DNA, 22 bp, Artificial Sequence
  chemically synthesized
aatgtagtgtcttttgaaacaa

SEQ ID NO: 15691 - DNA, 22 bp, Artificial Sequence
  chemically synthesized
atgtagtgtcttttgaaacaaa

SEQ ID NO: 15692 - DNA, 22 bp, Artificial Sequence
  chemically synthesized
ttgaaacaaaactgtgtgccaa

SEQ ID NO: 15693 - DNA, 22 bp, Artificial Sequence
  chemically synthesized
tgaaacaaaactgtgtgccaaa

SEQ ID NO: 15694 - DNA, 22 bp, Artificial Sequence
  chemically synthesized
gaaacaaaactgtgtgccaaag

SEQ ID NO: 15695 - DNA, 22 bp, Artificial Sequence
  chemically synthesized
aaacaaaactgtgtgccaaagt

SEQ ID NO: 15696 - DNA, 22 bp, Artificial Sequence
  chemically synthesized
tgtgccaaagtagtaaccatta

SEQ ID NO: 15697 - DNA, 22 bp, Artificial Sequence
  chemically synthesized
atggaagtttacttgtagtcac

SEQ ID NO: 15698 - DNA, 22 bp, Artificial Sequence
  chemically synthesized
acttgtagtcacaaatttagtt

SEQ ID NO: 15699 - DNA, 22 bp, Artificial Sequence
  chemically synthesized
cttgtagtcacaaatttagttt

SEQ ID NO: 15700 - DNA, 22 bp, Artificial Sequence
  chemically synthesized
gtagtcacaaatttagtttcct

SEQ ID NO: 15701 - DNA, 22 bp, Artificial Sequence
  chemically synthesized
tagtcacaaatttagtttcctt

SEQ ID NO: 15702 - DNA, 22 bp, Artificial Sequence
  chemically synthesized
agtttccttaatcatttgttga

SEQ ID NO: 15703 - DNA, 22 bp, Artificial Sequence
  chemically synthesized
gtttccttaatcatttgttgag

SEQ ID NO: 15704 - DNA, 22 bp, Artificial Sequence
  chemically synthesized
ccttaatcatttgttgaggacg

SEQ ID NO: 15705 - DNA, 22 bp, Artificial Sequence
  chemically synthesized
cttaatcatttgttgaggacgt

SEQ ID NO: 15706 - DNA, 22 bp, Artificial Sequence
  chemically synthesized
aatcatttgttgaggacgtttt

SEQ ID NO: 15707 - DNA, 22 bp, Artificial Sequence
  chemically synthesized
atcatttgttgaggacgttttg

SEQ ID NO: 15708 - DNA, 22 bp, Artificial Sequence
  chemically synthesized
gttgaggacgttttgaatcaca

SEQ ID NO: 15709 - DNA, 22 bp, Artificial Sequence
  chemically synthesized
ttgaggacgttttgaatcacac

SEQ ID NO: 15710 - DNA, 22 bp, Artificial Sequence
  chemically synthesized
aggacgttttgaatcacacact

SEQ ID NO: 15711 - DNA, 22 bp, Artificial Sequence
  chemically synthesized
tgaatcacacactatgagtgtt

SEQ ID NO: 15712 - DNA, 22 bp, Artificial Sequence
  chemically synthesized
gaatcacacactatgagtgtta

SEQ ID NO: 15713 - DNA, 22 bp, Artificial Sequence
  chemically synthesized
aatcacacactatgagtgttaa

SEQ ID NO: 15714 - DNA, 22 bp, Artificial Sequence
  chemically synthesized
tgagtgttaagagataccttta

SEQ ID NO: 15715 - DNA, 22 bp, Artificial Sequence
  chemically synthesized
agagatacctttaggaaactat

SEQ ID NO: 15716 - DNA, 22 bp, Artificial Sequence
  chemically synthesized
taggaaactattcttgttgttt

SEQ ID NO: 15717 - DNA, 22 bp, Artificial Sequence
  chemically synthesized
aggaaactattcttgttgtttt

SEQ ID NO: 15718 - DNA, 22 bp, Artificial Sequence
  chemically synthesized
ggaaactattcttgttgttttc

SEQ ID NO: 15719 - DNA, 22 bp, Artificial Sequence
  chemically synthesized
ttcttgttgttttctgattttg

SEQ ID NO: 15720 - DNA, 22 bp, Artificial Sequence
  chemically synthesized
ttgttgttttctgattttgtca

SEQ ID NO: 15721 - DNA, 22 bp, Artificial Sequence
  chemically synthesized
gttgttttctgattttgtcatt

SEQ ID NO: 15722 - DNA, 22 bp, Artificial Sequence
  chemically synthesized
ttgttttctgattttgtcattt

SEQ ID NO: 15723 - DNA, 22 bp, Artificial Sequence
  chemically synthesized
ttttctgattttgtcatttagg

SEQ ID NO: 15724 - DNA, 22 bp, Artificial Sequence
  chemically synthesized
tctgattttgtcatttaggtta

SEQ ID NO: 15725 - DNA, 22 bp, Artificial Sequence
  chemically synthesized
ctgattttgtcatttaggttag

SEQ ID NO: 15726 - DNA, 22 bp, Artificial Sequence
  chemically synthesized
tgattttgtcatttaggttagt

SEQ ID NO: 15727 - DNA, 22 bp, Artificial Sequence
  chemically synthesized
attttgtcatttaggttagtct

SEQ ID NO: 15728 - DNA, 22 bp, Artificial Sequence
  chemically synthesized
tgtcatttaggttagtctcctg

SEQ ID NO: 15729 - DNA, 22 bp, Artificial Sequence
  chemically synthesized
gtcatttaggttagtctcctga

SEQ ID NO: 15730 - DNA, 22 bp, Artificial Sequence
  chemically synthesized
tcatttaggttagtctcctgat

SEQ ID NO: 15731 - DNA, 22 bp, Artificial Sequence
  chemically synthesized
aggttagtctcctgattctgac

SEQ ID NO: 15732 - DNA, 22 bp, Artificial Sequence
  chemically synthesized
ggttagtctcctgattctgaca

SEQ ID NO: 15733 - DNA, 22 bp, Artificial Sequence
  chemically synthesized
gtctcctgattctgacagctca

SEQ ID NO: 15734 - DNA, 22 bp, Artificial Sequence
  chemically synthesized
ctgattctgacagctcagaaga

SEQ ID NO: 15735 - DNA, 22 bp, Artificial Sequence
  chemically synthesized
attctgacagctcagaagagga

SEQ ID NO: 15736 - DNA, 22 bp, Artificial Sequence
  chemically synthesized
tgacagctcagaagaggaagtt

SEQ ID NO: 15737 - DNA, 22 bp, Artificial Sequence
  chemically synthesized
acagctcagaagaggaagttgt

SEQ ID NO: 15738 - DNA, 22 bp, Artificial Sequence
  chemically synthesized
agaagaggaagttgttcttgta

SEQ ID NO: 15739 - DNA, 22 bp, Artificial Sequence
  chemically synthesized
ttcttgtaaaaattgtttaacc

SEQ ID NO: 15740 - DNA, 22 bp, Artificial Sequence
  chemically synthesized
ttgtaaaaattgtttaacctgc

SEQ ID NO: 15741 - DNA, 22 bp, Artificial Sequence
  chemically synthesized
gtaaaaattgtttaacctgctt

SEQ ID NO: 15742 - DNA, 22 bp, Artificial Sequence
  chemically synthesized
taaaaattgtttaacctgcttg

SEQ ID NO: 15743 - DNA, 22 bp, Artificial Sequence
  chemically synthesized
tttaacctgcttgaccagcttt

SEQ ID NO: 15744 - DNA, 22 bp, Artificial Sequence
  chemically synthesized
aacctgcttgaccagctttcac

SEQ ID NO: 15745 - DNA, 22 bp, Artificial Sequence
  chemically synthesized
acctgcttgaccagctttcaca

SEQ ID NO: 15746 - DNA, 22 bp, Artificial Sequence
  chemically synthesized
cttgaccagctttcacatttgt

SEQ ID NO: 15747 - DNA, 22 bp, Artificial Sequence
  chemically synthesized
gaccagctttcacatttgttct

SEQ ID NO: 15748 - DNA, 22 bp, Artificial Sequence
  chemically synthesized
accagctttcacatttgttctt

SEQ ID NO: 15749 - DNA, 22 bp, Artificial Sequence
  chemically synthesized
tcacatttgttcttctgaagtt

SEQ ID NO: 15750 - DNA, 22 bp, Artificial Sequence
  chemically synthesized
cacatttgttcttctgaagttt

SEQ ID NO: 15751 - DNA, 22 bp, Artificial Sequence
  chemically synthesized
acatttgttcttctgaagttta

SEQ ID NO: 15752 - DNA, 22 bp, Artificial Sequence
  chemically synthesized
gttcttctgaagtttatggtag

SEQ ID NO: 15753 - DNA, 22 bp, Artificial Sequence
  chemically synthesized
ttcttctgaagtttatggtagt

SEQ ID NO: 15754 - DNA, 22 bp, Artificial Sequence
  chemically synthesized
ttctgaagtttatggtagtgca

SEQ ID NO: 15755 - DNA, 22 bp, Artificial Sequence
  chemically synthesized
ctgaagtttatggtagtgcaca

SEQ ID NO: 15756 - DNA, 22 bp, Artificial Sequence
  chemically synthesized
tgaagtttatggtagtgcacag

SEQ ID NO: 15757 - DNA, 22 bp, Artificial Sequence
  chemically synthesized
aagtttatggtagtgcacagag

SEQ ID NO: 15758 - DNA, 22 bp, Artificial Sequence
  chemically synthesized
atggtagtgcacagagattgtt

SEQ ID NO: 15759 - DNA, 22 bp, Artificial Sequence
  chemically synthesized
tggtagtgcacagagattgttt

SEQ ID NO: 15760 - DNA, 22 bp, Artificial Sequence
  chemically synthesized
ttttttggggagtcttgattct

SEQ ID NO: 15761 - DNA, 22 bp, Artificial Sequence
  chemically synthesized
tttggggagtcttgattctcgg

SEQ ID NO: 15762 - DNA, 22 bp, Artificial Sequence
  chemically synthesized
ttggggagtcttgattctcgga

SEQ ID NO: 15763 - DNA, 22 bp, Artificial Sequence
  chemically synthesized
tggggagtcttgattctcggaa

SEQ ID NO: 15764 - DNA, 22 bp, Artificial Sequence
  chemically synthesized
ggggagtcttgattctcggaaa

SEQ ID NO: 15765 - DNA, 22 bp, Artificial Sequence
  chemically synthesized
gggagtcttgattctcggaaat

SEQ ID NO: 15766 - DNA, 22 bp, Artificial Sequence
  chemically synthesized
gattctcggaaatgaaggcagt

SEQ ID NO: 15767 - DNA, 22 bp, Artificial Sequence
  chemically synthesized
attctcggaaatgaaggcagtg

SEQ ID NO: 15768 - DNA, 22 bp, Artificial Sequence
  chemically synthesized
tcggaaatgaaggcagtgtgtt

SEQ ID NO: 15769 - DNA, 22 bp, Artificial Sequence
  chemically synthesized
ggaaatgaaggcagtgtgttat

SEQ ID NO: 15770 - DNA, 22 bp, Artificial Sequence
  chemically synthesized
tattgaatccagacttccgaaa

SEQ ID NO: 15771 - DNA, 22 bp, Artificial Sequence
  chemically synthesized
aatccagacttccgaaaacttg

SEQ ID NO: 15772 - DNA, 22 bp, Artificial Sequence
  chemically synthesized
ccgaaaacttgtatattaaaag

SEQ ID NO: 15773 - DNA, 22 bp, Artificial Sequence
  chemically synthesized
cgaaaacttgtatattaaaagt

SEQ ID NO: 15774 - DNA, 22 bp, Artificial Sequence
  chemically synthesized
gtatattaaaagtgttatttca

SEQ ID NO: 15775 - DNA, 22 bp, Artificial Sequence
  chemically synthesized
tatattaaaagtgttatttcaa

SEQ ID NO: 15776 - DNA, 22 bp, Artificial Sequence
  chemically synthesized
aaagtgttatttcaacactatg

SEQ ID NO: 15777 - DNA, 22 bp, Artificial Sequence
  chemically synthesized
tttcaacactatgttacagcca

SEQ ID NO: 15778 - DNA, 22 bp, Artificial Sequence
  chemically synthesized
caacactatgttacagccagac

SEQ ID NO: 15779 - DNA, 22 bp, Artificial Sequence
  chemically synthesized
aacactatgttacagccagact

SEQ ID NO: 15780 - DNA, 22 bp, Artificial Sequence
  chemically synthesized
tgttacagccagactaattttt

SEQ ID NO: 15781 - DNA, 22 bp, Artificial Sequence
  chemically synthesized
cagccagactaatttttttatt

SEQ ID NO: 15782 - DNA, 22 bp, Artificial Sequence
  chemically synthesized
atttttttattttttgatgcat

SEQ ID NO: 15783 - DNA, 22 bp, Artificial Sequence
  chemically synthesized
ttttattttttgatgcatttta

SEQ ID NO: 15784 - DNA, 22 bp, Artificial Sequence
  chemically synthesized
tttattttttgatgcattttag

SEQ ID NO: 15785 - DNA, 22 bp, Artificial Sequence
  chemically synthesized
ttattttttgatgcattttaga

SEQ ID NO: 15786 - DNA, 22 bp, Artificial Sequence
  chemically synthesized
tattttttgatgcattttagat

SEQ ID NO: 15787 - DNA, 22 bp, Artificial Sequence
  chemically synthesized
attttttgatgcattttagata

SEQ ID NO: 15788 - DNA, 22 bp, Artificial Sequence
  chemically synthesized
ttttttgatgcattttagatag

SEQ ID NO: 15789 - DNA, 22 bp, Artificial Sequence
  chemically synthesized
tttgatgcattttagatagctg

SEQ ID NO: 15790 - DNA, 22 bp, Artificial Sequence
  chemically synthesized
ttgatgcattttagatagctga

SEQ ID NO: 15791 - DNA, 22 bp, Artificial Sequence
  chemically synthesized
tgatgcattttagatagctgat

SEQ ID NO: 15792 - DNA, 22 bp, Artificial Sequence
  chemically synthesized
gatgcattttagatagctgata

SEQ ID NO: 15793 - DNA, 22 bp, Artificial Sequence
  chemically synthesized
atgcattttagatagctgatac

SEQ ID NO: 15794 - DNA, 22 bp, Artificial Sequence
  chemically synthesized
tagatagctgatacagtactca

SEQ ID NO: 15795 - DNA, 22 bp, Artificial Sequence
  chemically synthesized
agatagctgatacagtactcaa

SEQ ID NO: 15796 - DNA, 22 bp, Artificial Sequence
  chemically synthesized
gatagctgatacagtactcaat

SEQ ID NO: 15797 - DNA, 22 bp, Artificial Sequence
  chemically synthesized
atacagtactcaatgatgatga

SEQ ID NO: 15798 - DNA, 22 bp, Artificial Sequence
  chemically synthesized
aatgatgatgatattggtgaca

SEQ ID NO: 15799 - DNA, 22 bp, Artificial Sequence
  chemically synthesized
gtgacagctgtcatgaaggctt

SEQ ID NO: 15800 - DNA, 22 bp, Artificial Sequence
  chemically synthesized
tcatgaaggctttcttctcaag

SEQ ID NO: 15801 - DNA, 22 bp, Artificial Sequence
  chemically synthesized
tcttctcaagtaagaatttttc

SEQ ID NO: 15802 - DNA, 22 bp, Artificial Sequence
  chemically synthesized
cttctcaagtaagaatttttct

SEQ ID NO: 15803 - DNA, 22 bp, Artificial Sequence
  chemically synthesized
ttctcaagtaagaatttttctt

SEQ ID NO: 15804 - DNA, 22 bp, Artificial Sequence
  chemically synthesized
ctcaagtaagaatttttctttt

SEQ ID NO: 15805 - DNA, 22 bp, Artificial Sequence
  chemically synthesized
tcaagtaagaatttttcttttc

SEQ ID NO: 15806 - DNA, 22 bp, Artificial Sequence
  chemically synthesized
aagtaagaatttttcttttcat

SEQ ID NO: 15807 - DNA, 22 bp, Artificial Sequence
  chemically synthesized
ttcttttcataaaagctggatg

SEQ ID NO: 15808 - DNA, 22 bp, Artificial Sequence
  chemically synthesized
tcttttcataaaagctggatga

SEQ ID NO: 15809 - DNA, 22 bp, Artificial Sequence
  chemically synthesized
cttttcataaaagctggatgaa

SEQ ID NO: 15810 - DNA, 22 bp, Artificial Sequence
  chemically synthesized
ttttcataaaagctggatgaag

SEQ ID NO: 15811 - DNA, 22 bp, Artificial Sequence
  chemically synthesized
ttcataaaagctggatgaagca

SEQ ID NO: 15812 - DNA, 22 bp, Artificial Sequence
  chemically synthesized
tcataaaagctggatgaagcag

SEQ ID NO: 15813 - DNA, 22 bp, Artificial Sequence
  chemically synthesized
cataaaagctggatgaagcaga

SEQ ID NO: 15814 - DNA, 22 bp, Artificial Sequence
  chemically synthesized
ataaaagctggatgaagcagat

SEQ ID NO: 15815 - DNA, 22 bp, Artificial Sequence
  chemically synthesized
gatgaagcagataccatcttat

SEQ ID NO: 15816 - DNA, 22 bp, Artificial Sequence
  chemically synthesized
atgctcacctatgacaagattt

SEQ ID NO: 15817 - DNA, 22 bp, Artificial Sequence
  chemically synthesized
tgctcacctatgacaagatttg

SEQ ID NO: 15818 - DNA, 22 bp, Artificial Sequence
  chemically synthesized
acctatgacaagatttggaaga

SEQ ID NO: 15819 - DNA, 22 bp, Artificial Sequence
  chemically synthesized
tgacaagatttggaagaaagaa

SEQ ID NO: 15820 - DNA, 22 bp, Artificial Sequence
  chemically synthesized
ggaagaaagaaaataacagact

SEQ ID NO: 15821 - DNA, 22 bp, Artificial Sequence
  chemically synthesized
gaagaaagaaaataacagactg

SEQ ID NO: 15822 - DNA, 22 bp, Artificial Sequence
  chemically synthesized
tctacttagattgttctaggga

SEQ ID NO: 15823 - DNA, 22 bp, Artificial Sequence
  chemically synthesized
cttagattgttctagggacatt

SEQ ID NO: 15824 - DNA, 22 bp, Artificial Sequence
  chemically synthesized
agattgttctagggacattacg

SEQ ID NO: 15825 - DNA, 22 bp, Artificial Sequence
  chemically synthesized
gattgttctagggacattacgt

SEQ ID NO: 15826 - DNA, 22 bp, Artificial Sequence
  chemically synthesized
ttctagggacattacgtatttg

SEQ ID NO: 15827 - DNA, 22 bp, Artificial Sequence
  chemically synthesized
tagggacattacgtatttgaac

SEQ ID NO: 15828 - DNA, 22 bp, Artificial Sequence
  chemically synthesized
gggacattacgtatttgaactg

SEQ ID NO: 15829 - DNA, 22 bp, Artificial Sequence
  chemically synthesized
cgtatttgaactgttgcttaaa

SEQ ID NO: 15830 - DNA, 22 bp, Artificial Sequence
  chemically synthesized
gaactgttgcttaaatttgtgt

SEQ ID NO: 15831 - DNA, 22 bp, Artificial Sequence
  chemically synthesized
aactgttgcttaaatttgtgtt

SEQ ID NO: 15832 - DNA, 22 bp, Artificial Sequence
  chemically synthesized
ttgcttaaatttgtgttatttt

SEQ ID NO: 15833 - DNA, 22 bp, Artificial Sequence
  chemically synthesized
cttaaatttgtgttatttttca

SEQ ID NO: 15834 - DNA, 22 bp, Artificial Sequence
  chemically synthesized
aaatttgtgttatttttcactc

SEQ ID NO: 15835 - DNA, 22 bp, Artificial Sequence
  chemically synthesized
aatttgtgttatttttcactca

SEQ ID NO: 15836 - DNA, 22 bp, Artificial Sequence
  chemically synthesized
gtgttatttttcactcattata

SEQ ID NO: 15837 - DNA, 22 bp, Artificial Sequence
  chemically synthesized
tgttatttttcactcattatat

SEQ ID NO: 15838 - DNA, 22 bp, Artificial Sequence
  chemically synthesized
tttttcactcattatatttcta

SEQ ID NO: 15839 - DNA, 22 bp, Artificial Sequence
  chemically synthesized
ttcactcattatatttctatat

SEQ ID NO: 15840 - DNA, 22 bp, Artificial Sequence
  chemically synthesized
tcactcattatatttctatata

SEQ ID NO: 15841 - DNA, 22 bp, Artificial Sequence
  chemically synthesized
cactcattatatttctatatat

SEQ ID NO: 15842 - DNA, 22 bp, Artificial Sequence
  chemically synthesized
actcattatatttctatatata

SEQ ID NO: 15843 - DNA, 22 bp, Artificial Sequence
  chemically synthesized
attatatttctatatatatttg

SEQ ID NO: 15844 - DNA, 22 bp, Artificial Sequence
  chemically synthesized
tatttctatatatatttggtgt

SEQ ID NO: 15845 - DNA, 22 bp, Artificial Sequence
  chemically synthesized
ctatatatatttggtgttattc

SEQ ID NO: 15846 - DNA, 22 bp, Artificial Sequence
  chemically synthesized
tatatatatttggtgttattcc

SEQ ID NO: 15847 - DNA, 22 bp, Artificial Sequence
  chemically synthesized
tatatatttggtgttattccat

SEQ ID NO: 15848 - DNA, 22 bp, Artificial Sequence
  chemically synthesized
ggtgttattccatttgctattt

SEQ ID NO: 15849 - DNA, 22 bp, Artificial Sequence
  chemically synthesized
gtgttattccatttgctattta

SEQ ID NO: 15850 - DNA, 22 bp, Artificial Sequence
  chemically synthesized
ttccatttgctatttaaagaaa

SEQ ID NO: 15851 - DNA, 22 bp, Artificial Sequence
  chemically synthesized
catttgctatttaaagaaaccg

SEQ ID NO: 15852 - DNA, 22 bp, Artificial Sequence
  chemically synthesized
gctatttaaagaaaccgagttt

SEQ ID NO: 15853 - DNA, 22 bp, Artificial Sequence
  chemically synthesized
ctatttaaagaaaccgagtttc

SEQ ID NO: 15854 - DNA, 22 bp, Artificial Sequence
  chemically synthesized
tttaaagaaaccgagtttccat

SEQ ID NO: 15855 - DNA, 22 bp, Artificial Sequence
  chemically synthesized
aaagaaaccgagtttccatccc

SEQ ID NO: 15856 - DNA, 22 bp, Artificial Sequence
  chemically synthesized
aagaaaccgagtttccatccca

SEQ ID NO: 15857 - DNA, 22 bp, Artificial Sequence
  chemically synthesized
ccatcccagacaagaaatcatg

SEQ ID NO: 15858 - DNA, 22 bp, Artificial Sequence
  chemically synthesized
catcccagacaagaaatcatgg

SEQ ID NO: 15859 - DNA, 22 bp, Artificial Sequence
  chemically synthesized
gcttgattctggtttcttgttt

SEQ ID NO: 15860 - DNA, 22 bp, Artificial Sequence
  chemically synthesized
cttgattctggtttcttgtttt

SEQ ID NO: 15861 - DNA, 22 bp, Artificial Sequence
  chemically synthesized
gattctggtttcttgttttact

SEQ ID NO: 15862 - DNA, 22 bp, Artificial Sequence
  chemically synthesized
attctggtttcttgttttactt

SEQ ID NO: 15863 - DNA, 22 bp, Artificial Sequence
  chemically synthesized
tggtttcttgttttacttctca

SEQ ID NO: 15864 - DNA, 22 bp, Artificial Sequence
  chemically synthesized
gtttcttgttttacttctcatt

SEQ ID NO: 15865 - DNA, 22 bp, Artificial Sequence
  chemically synthesized
cttgttttacttctcattaaag

SEQ ID NO: 15866 - DNA, 22 bp, Artificial Sequence
  chemically synthesized
ttgttttacttctcattaaagc

SEQ ID NO: 15867 - DNA, 22 bp, Artificial Sequence
  chemically synthesized
gttttacttctcattaaagcta

SEQ ID NO: 15868 - DNA, 22 bp, Artificial Sequence
  chemically synthesized
ttttacttctcattaaagctaa

SEQ ID NO: 15869 - DNA, 22 bp, Artificial Sequence
  chemically synthesized
tacttctcattaaagctaacag

SEQ ID NO: 15870 - DNA, 22 bp, Artificial Sequence
  chemically synthesized
acttctcattaaagctaacaga

SEQ ID NO: 15871 - DNA, 22 bp, Artificial Sequence
  chemically synthesized
cttctcattaaagctaacagaa

SEQ ID NO: 15872 - DNA, 22 bp, Artificial Sequence
  chemically synthesized
ctcattaaagctaacagaatcc

SEQ ID NO: 15873 - DNA, 22 bp, Artificial Sequence
  chemically synthesized
tcattaaagctaacagaatcct

SEQ ID NO: 15874 - DNA, 22 bp, Artificial Sequence
  chemically synthesized
attaaagctaacagaatccttt

SEQ ID NO: 15875 - DNA, 22 bp, Artificial Sequence
  chemically synthesized
aagctaacagaatcctttcata

SEQ ID NO: 15876 - DNA, 22 bp, Artificial Sequence
  chemically synthesized
acagaatcctttcatattaagt

SEQ ID NO: 15877 - DNA, 22 bp, Artificial Sequence
  chemically synthesized
tcatattaagttgtactgtaga

SEQ ID NO: 15878 - DNA, 22 bp, Artificial Sequence
  chemically synthesized
catattaagttgtactgtagat

SEQ ID NO: 15879 - DNA, 22 bp, Artificial Sequence
  chemically synthesized
atattaagttgtactgtagatg

SEQ ID NO: 15880 - DNA, 22 bp, Artificial Sequence
  chemically synthesized
agttgtactgtagatgaactta

SEQ ID NO: 15881 - DNA, 22 bp, Artificial Sequence
  chemically synthesized
tactgtagatgaacttaagtta

SEQ ID NO: 15882 - DNA, 22 bp, Artificial Sequence
  chemically synthesized
tagatgaacttaagttatttag

SEQ ID NO: 15883 - DNA, 22 bp, Artificial Sequence
  chemically synthesized
aagttatttaggcgtagaacaa

SEQ ID NO: 15884 - DNA, 22 bp, Artificial Sequence
  chemically synthesized
agttatttaggcgtagaacaaa

SEQ ID NO: 15885 - DNA, 22 bp, Artificial Sequence
  chemically synthesized
tttaggcgtagaacaaaattat

SEQ ID NO: 15886 - DNA, 22 bp, Artificial Sequence
  chemically synthesized
aggcgtagaacaaaattattca

SEQ ID NO: 15887 - DNA, 22 bp, Artificial Sequence
  chemically synthesized
ggcgtagaacaaaattattcat

SEQ ID NO: 15888 - DNA, 22 bp, Artificial Sequence
  chemically synthesized
ttcatatttatactgatctttt

SEQ ID NO: 15889 - DNA, 22 bp, Artificial Sequence
  chemically synthesized
atatttatactgatctttttcc

SEQ ID NO: 15890 - DNA, 22 bp, Artificial Sequence
  chemically synthesized
atactgatctttttccatccag

SEQ ID NO: 15891 - DNA, 22 bp, Artificial Sequence
  chemically synthesized
tactgatctttttccatccagc

SEQ ID NO: 15892 - DNA, 22 bp, Artificial Sequence
  chemically synthesized
atctttttccatccagcagtgg

SEQ ID NO: 15893 - DNA, 22 bp, Artificial Sequence
  chemically synthesized
tttccatccagcagtggagttt

SEQ ID NO: 15894 - DNA, 22 bp, Artificial Sequence
  chemically synthesized
ttccatccagcagtggagttta

SEQ ID NO: 15895 - DNA, 22 bp, Artificial Sequence
  chemically synthesized
tccatccagcagtggagtttag

SEQ ID NO: 15896 - DNA, 22 bp, Artificial Sequence
  chemically synthesized
ccatccagcagtggagtttagt

SEQ ID NO: 15897 - DNA, 22 bp, Artificial Sequence
  chemically synthesized
catccagcagtggagtttagta

SEQ ID NO: 15898 - DNA, 22 bp, Artificial Sequence
  chemically synthesized
agtacttaagagtttgtgccct

SEQ ID NO: 15899 - DNA, 22 bp, Artificial Sequence
  chemically synthesized
gtacttaagagtttgtgccctt

SEQ ID NO: 15900 - DNA, 22 bp, Artificial Sequence
  chemically synthesized
aagagtttgtgcccttaaacca

SEQ ID NO: 15901 - DNA, 22 bp, Artificial Sequence
  chemically synthesized
agagtttgtgcccttaaaccag

SEQ ID NO: 15902 - DNA, 22 bp, Artificial Sequence
  chemically synthesized
gtgcccttaaaccagactccct

SEQ ID NO: 15903 - DNA, 22 bp, Artificial Sequence
  chemically synthesized
tgcccttaaaccagactccctg

SEQ ID NO: 15904 - DNA, 22 bp, Artificial Sequence
  chemically synthesized
aaaccagactccctggattaat

SEQ ID NO: 15905 - DNA, 22 bp, Artificial Sequence
  chemically synthesized
aaccagactccctggattaatg

SEQ ID NO: 15906 - DNA, 22 bp, Artificial Sequence
  chemically synthesized
cctggattaatgctgtgtaccc

SEQ ID NO: 15907 - DNA, 22 bp, Artificial Sequence
  chemically synthesized
gattaatgctgtgtacccgtgg

SEQ ID NO: 15908 - DNA, 22 bp, Artificial Sequence
  chemically synthesized
atgctgtgtacccgtgggcaag

SEQ ID NO: 15909 - DNA, 22 bp, Artificial Sequence
  chemically synthesized
tgtacccgtgggcaaggtgcct

SEQ ID NO: 15910 - DNA, 22 bp, Artificial Sequence
  chemically synthesized
aattctctatacacctatttcc

SEQ ID NO: 15911 - DNA, 22 bp, Artificial Sequence
  chemically synthesized
tctatacacctatttcctcatc

SEQ ID NO: 15912 - DNA, 22 bp, Artificial Sequence
  chemically synthesized
tatacacctatttcctcatctg

SEQ ID NO: 15913 - DNA, 22 bp, Artificial Sequence
  chemically synthesized
tacacctatttcctcatctgta

SEQ ID NO: 15914 - DNA, 22 bp, Artificial Sequence
  chemically synthesized
tttcctcatctgtaaaatggca

SEQ ID NO: 15915 - DNA, 22 bp, Artificial Sequence
  chemically synthesized
cctcatctgtaaaatggcaata

SEQ ID NO: 15916 - DNA, 22 bp, Artificial Sequence
  chemically synthesized
ctcatctgtaaaatggcaataa

SEQ ID NO: 15917 - DNA, 22 bp, Artificial Sequence
  chemically synthesized
atctgtaaaatggcaataatag

SEQ ID NO: 15918 - DNA, 22 bp, Artificial Sequence
  chemically synthesized
taaaatggcaataatagtaata

SEQ ID NO: 15919 - DNA, 22 bp, Artificial Sequence
  chemically synthesized
atgtgtagggttgttataagca

SEQ ID NO: 15920 - DNA, 22 bp, Artificial Sequence
  chemically synthesized
ttataagcattgagtaagataa

SEQ ID NO: 15921 - DNA, 22 bp, Artificial Sequence
  chemically synthesized
taagcattgagtaagataaata

SEQ ID NO: 15922 - DNA, 22 bp, Artificial Sequence
  chemically synthesized
agtaagataaataatataaagc

SEQ ID NO: 15923 - DNA, 22 bp, Artificial Sequence
  chemically synthesized
agaacagtgcctggaacataaa

SEQ ID NO: 15924 - DNA, 22 bp, Artificial Sequence
  chemically synthesized
gaacagtgcctggaacataaaa

SEQ ID NO: 15925 - DNA, 22 bp, Artificial Sequence
  chemically synthesized
gaacataaaaacacttaataat

SEQ ID NO: 15926 - DNA, 22 bp, Artificial Sequence
  chemically synthesized
aataatagctcatagctaacat

SEQ ID NO: 15927 - DNA, 22 bp, Artificial Sequence
  chemically synthesized
ataatagctcatagctaacatt

SEQ ID NO: 15928 - DNA, 22 bp, Artificial Sequence
  chemically synthesized
atagctaacatttcctatttac

SEQ ID NO: 15929 - DNA, 22 bp, Artificial Sequence
  chemically synthesized
acatttcctatttacatttctt

SEQ ID NO: 15930 - DNA, 22 bp, Artificial Sequence
  chemically synthesized
cctatttacatttcttctagaa

SEQ ID NO: 15931 - DNA, 22 bp, Artificial Sequence
  chemically synthesized
ctatttacatttcttctagaaa

SEQ ID NO: 15932 - DNA, 22 bp, Artificial Sequence
  chemically synthesized
tttacatttcttctagaaatag

SEQ ID NO: 15933 - DNA, 22 bp, Artificial Sequence
  chemically synthesized
acatttcttctagaaatagcca

SEQ ID NO: 15934 - DNA, 22 bp, Artificial Sequence
  chemically synthesized
catttcttctagaaatagccag

SEQ ID NO: 15935 - DNA, 22 bp, Artificial Sequence
  chemically synthesized
cttctagaaatagccagtattt

SEQ ID NO: 15936 - DNA, 22 bp, Artificial Sequence
  chemically synthesized
ttctagaaatagccagtatttg

SEQ ID NO: 15937 - DNA, 22 bp, Artificial Sequence
  chemically synthesized
ctagaaatagccagtatttgtt

SEQ ID NO: 15938 - DNA, 22 bp, Artificial Sequence
  chemically synthesized
tagaaatagccagtatttgttg

SEQ ID NO: 15939 - DNA, 22 bp, Artificial Sequence
  chemically synthesized
gaaatagccagtatttgttgag

SEQ ID NO: 15940 - DNA, 22 bp, Artificial Sequence
  chemically synthesized
gttgagtgcctacatgttagtt

SEQ ID NO: 15941 - DNA, 22 bp, Artificial Sequence
  chemically synthesized
ttgagtgcctacatgttagttc

SEQ ID NO: 15942 - DNA, 22 bp, Artificial Sequence
  chemically synthesized
agtgcctacatgttagttcctt

SEQ ID NO: 15943 - DNA, 22 bp, Artificial Sequence
  chemically synthesized
catgttagttcctttactagtt

SEQ ID NO: 15944 - DNA, 22 bp, Artificial Sequence
  chemically synthesized
gttcctttactagttgctttac

SEQ ID NO: 15945 - DNA, 22 bp, Artificial Sequence
  chemically synthesized
ctttactagttgctttacatgt

SEQ ID NO: 15946 - DNA, 22 bp, Artificial Sequence
  chemically synthesized
tactagttgctttacatgtatt

SEQ ID NO: 15947 - DNA, 22 bp, Artificial Sequence
  chemically synthesized
actagttgctttacatgtatta

SEQ ID NO: 15948 - DNA, 22 bp, Artificial Sequence
  chemically synthesized
ctagttgctttacatgtattat

SEQ ID NO: 15949 - DNA, 22 bp, Artificial Sequence
  chemically synthesized
gttgctttacatgtattatctt

SEQ ID NO: 15950 - DNA, 22 bp, Artificial Sequence
  chemically synthesized
ctttacatgtattatcttatat

SEQ ID NO: 15951 - DNA, 22 bp, Artificial Sequence
  chemically synthesized
tacatgtattatcttatattct

SEQ ID NO: 15952 - DNA, 22 bp, Artificial Sequence
  chemically synthesized
acatgtattatcttatattctg

SEQ ID NO: 15953 - DNA, 22 bp, Artificial Sequence
  chemically synthesized
catgtattatcttatattctgt

SEQ ID NO: 15954 - DNA, 22 bp, Artificial Sequence
  chemically synthesized
tcttatattctgttttaaagtt

SEQ ID NO: 15955 - DNA, 22 bp, Artificial Sequence
  chemically synthesized
atattctgttttaaagtttctt

SEQ ID NO: 15956 - DNA, 22 bp, Artificial Sequence
  chemically synthesized
tattctgttttaaagtttcttc

SEQ ID NO: 15957 - DNA, 22 bp, Artificial Sequence
  chemically synthesized
tgttttaaagtttcttcacagt

SEQ ID NO: 15958 - DNA, 22 bp, Artificial Sequence
  chemically synthesized
ttttaaagtttcttcacagtta

SEQ ID NO: 15959 - DNA, 22 bp, Artificial Sequence
  chemically synthesized
taaagtttcttcacagttacag

SEQ ID NO: 15960 - DNA, 22 bp, Artificial Sequence
  chemically synthesized
aaagtttcttcacagttacaga

SEQ ID NO: 15961 - DNA, 22 bp, Artificial Sequence
  chemically synthesized
aagtttcttcacagttacagat

SEQ ID NO: 15962 - DNA, 22 bp, Artificial Sequence
  chemically synthesized
cttcacagttacagattttcat

SEQ ID NO: 15963 - DNA, 22 bp, Artificial Sequence
  chemically synthesized
ttcacagttacagattttcatg

SEQ ID NO: 15964 - DNA, 22 bp, Artificial Sequence
  chemically synthesized
cacagttacagattttcatgaa

SEQ ID NO: 15965 - DNA, 22 bp, Artificial Sequence
  chemically synthesized
acagttacagattttcatgaaa

SEQ ID NO: 15966 - DNA, 22 bp, Artificial Sequence
  chemically synthesized
cagattttcatgaaattttact

SEQ ID NO: 15967 - DNA, 22 bp, Artificial Sequence
  chemically synthesized
tcatgaaattttacttttaata

SEQ ID NO: 15968 - DNA, 22 bp, Artificial Sequence
  chemically synthesized
catgaaattttacttttaataa

SEQ ID NO: 15969 - DNA, 22 bp, Artificial Sequence
  chemically synthesized
atgaaattttacttttaataaa

SEQ ID NO: 15970 - DNA, 22 bp, Artificial Sequence
  chemically synthesized
tacttttaataaaagagaagta

SEQ ID NO: 15971 - DNA, 22 bp, Artificial Sequence
  chemically synthesized
acttttaataaaagagaagtaa

SEQ ID NO: 15972 - DNA, 22 bp, Artificial Sequence
  chemically synthesized
cttttaataaaagagaagtaaa

SEQ ID NO: 15973 - DNA, 22 bp, Artificial Sequence
  chemically synthesized
ttaataaaagagaagtaaaagt

SEQ ID NO: 15974 - DNA, 22 bp, Artificial Sequence
  chemically synthesized
taataaaagagaagtaaaagta

SEQ ID NO: 15975 - DNA, 22 bp, Artificial Sequence
  chemically synthesized
aataaaagagaagtaaaagtat

SEQ ID NO: 15976 - DNA, 22 bp, Artificial Sequence
  chemically synthesized
ataaaagagaagtaaaagtata

SEQ ID NO: 15977 - DNA, 22 bp, Artificial Sequence
  chemically synthesized
acttttatgttcacagtctttt

SEQ ID NO: 15978 - DNA, 22 bp, Artificial Sequence
  chemically synthesized
ttatgttcacagtcttttcctt

SEQ ID NO: 15979 - DNA, 22 bp, Artificial Sequence
  chemically synthesized
tatgttcacagtcttttccttt

SEQ ID NO: 15980 - DNA, 22 bp, Artificial Sequence
  chemically synthesized
atgttcacagtcttttccttta

SEQ ID NO: 15981 - DNA, 22 bp, Artificial Sequence
  chemically synthesized
tgttcacagtcttttcctttag

SEQ ID NO: 15982 - DNA, 22 bp, Artificial Sequence
  chemically synthesized
acagtcttttcctttaggctca

SEQ ID NO: 15983 - DNA, 22 bp, Artificial Sequence
  chemically synthesized
ttcctttaggctcatgatggag

SEQ ID NO: 15984 - DNA, 22 bp, Artificial Sequence
  chemically synthesized
tcctttaggctcatgatggagt

SEQ ID NO: 15985 - DNA, 22 bp, Artificial Sequence
  chemically synthesized
cctttaggctcatgatggagta

SEQ ID NO: 15986 - DNA, 22 bp, Artificial Sequence
  chemically synthesized
ctttaggctcatgatggagtat

SEQ ID NO: 15987 - DNA, 22 bp, Artificial Sequence
  chemically synthesized
taggctcatgatggagtatcag

SEQ ID NO: 15988 - DNA, 22 bp, Artificial Sequence
  chemically synthesized
aggctcatgatggagtatcaga

SEQ ID NO: 15989 - DNA, 22 bp, Artificial Sequence
  chemically synthesized
ggctcatgatggagtatcagag

SEQ ID NO: 15990 - DNA, 22 bp, Artificial Sequence
  chemically synthesized
atgatggagtatcagaggcatg

SEQ ID NO: 15991 - DNA, 22 bp, Artificial Sequence
  chemically synthesized
aacctaagagccttaatggctt

SEQ ID NO: 15992 - DNA, 22 bp, Artificial Sequence
  chemically synthesized
acctaagagccttaatggcttg

SEQ ID NO: 15993 - DNA, 22 bp, Artificial Sequence
  chemically synthesized
agagccttaatggcttgaatca

SEQ ID NO: 15994 - DNA, 22 bp, Artificial Sequence
  chemically synthesized
aatggcttgaatcagaagcact

SEQ ID NO: 15995 - DNA, 22 bp, Artificial Sequence
  chemically synthesized
atggcttgaatcagaagcactt

SEQ ID NO: 15996 - DNA, 22 bp, Artificial Sequence
  chemically synthesized
gaatcagaagcactttagtcct

SEQ ID NO: 15997 - DNA, 22 bp, Artificial Sequence
  chemically synthesized
aatcagaagcactttagtcctg

SEQ ID NO: 15998 - DNA, 22 bp, Artificial Sequence
  chemically synthesized
tagtcctgtatctgttcagtgt

SEQ ID NO: 15999 - DNA, 22 bp, Artificial Sequence
  chemically synthesized
agtcctgtatctgttcagtgtc

SEQ ID NO: 16000 - DNA, 22 bp, Artificial Sequence
  chemically synthesized
gtcctgtatctgttcagtgtca

SEQ ID NO: 16001 - DNA, 22 bp, Artificial Sequence
  chemically synthesized
tatctgttcagtgtcagccttt

SEQ ID NO: 16002 - DNA, 22 bp, Artificial Sequence
  chemically synthesized
ttcagtgtcagcctttcataca

SEQ ID NO: 16003 - DNA, 22 bp, Artificial Sequence
  chemically synthesized
agtgtcagcctttcatacatca

SEQ ID NO: 16004 - DNA, 22 bp, Artificial Sequence
  chemically synthesized
tcatacatcattttaaatccca

SEQ ID NO: 16005 - DNA, 22 bp, Artificial Sequence
  chemically synthesized
catacatcattttaaatcccat

SEQ ID NO: 16006 - DNA, 22 bp, Artificial Sequence
  chemically synthesized
atacatcattttaaatcccatt

SEQ ID NO: 16007 - DNA, 22 bp, Artificial Sequence
  chemically synthesized
taaatcccatttgactttaagt

SEQ ID NO: 16008 - DNA, 22 bp, Artificial Sequence
  chemically synthesized
aaatcccatttgactttaagta

SEQ ID NO: 16009 - DNA, 22 bp, Artificial Sequence
  chemically synthesized
aatcccatttgactttaagtaa

SEQ ID NO: 16010 - DNA, 22 bp, Artificial Sequence
  chemically synthesized
gactttaagtaagtcacttaat

SEQ ID NO: 16011 - DNA, 22 bp, Artificial Sequence
  chemically synthesized
actttaagtaagtcacttaatc

SEQ ID NO: 16012 - DNA, 22 bp, Artificial Sequence
  chemically synthesized
taagtaagtcacttaatctctc

SEQ ID NO: 16013 - DNA, 22 bp, Artificial Sequence
  chemically synthesized
aagtaagtcacttaatctctct

SEQ ID NO: 16014 - DNA, 22 bp, Artificial Sequence
  chemically synthesized
agtaagtcacttaatctctcta

SEQ ID NO: 16015 - DNA, 22 bp, Artificial Sequence
  chemically synthesized
aatctctctacatgtcaatttc

SEQ ID NO: 16016 - DNA, 22 bp, Artificial Sequence
  chemically synthesized
atctctctacatgtcaatttct

SEQ ID NO: 16017 - DNA, 22 bp, Artificial Sequence
  chemically synthesized
tctacatgtcaatttcttcagc

SEQ ID NO: 16018 - DNA, 22 bp, Artificial Sequence
  chemically synthesized
tacatgtcaatttcttcagcta

SEQ ID NO: 16019 - DNA, 22 bp, Artificial Sequence
  chemically synthesized
catgtcaatttcttcagctata

SEQ ID NO: 16020 - DNA, 22 bp, Artificial Sequence
  chemically synthesized
cttcagctataaaatgatggta

SEQ ID NO: 16021 - DNA, 22 bp, Artificial Sequence
  chemically synthesized
ttcagctataaaatgatggtat

SEQ ID NO: 16022 - DNA, 22 bp, Artificial Sequence
  chemically synthesized
cagctataaaatgatggtattt

SEQ ID NO: 16023 - DNA, 22 bp, Artificial Sequence
  chemically synthesized
agctataaaatgatggtatttc

SEQ ID NO: 16024 - DNA, 22 bp, Artificial Sequence
  chemically synthesized
taaaatgatggtatttcaataa

SEQ ID NO: 16025 - DNA, 22 bp, Artificial Sequence
  chemically synthesized
caataaataaatacattaatta

SEQ ID NO: 16026 - DNA, 22 bp, Artificial Sequence
  chemically synthesized
aataaataaatacattaattaa

SEQ ID NO: 16027 - DNA, 22 bp, Artificial Sequence
  chemically synthesized
attaaatgatattatactgact

SEQ ID NO: 16028 - DNA, 22 bp, Artificial Sequence
  chemically synthesized
aatgatattatactgactaatt

SEQ ID NO: 16029 - DNA, 22 bp, Artificial Sequence
  chemically synthesized
tactgactaattgggctgtttt

SEQ ID NO: 16030 - DNA, 22 bp, Artificial Sequence
  chemically synthesized
actaattgggctgttttaaggc

SEQ ID NO: 16031 - DNA, 22 bp, Artificial Sequence
  chemically synthesized
attgggctgttttaaggctcaa

SEQ ID NO: 16032 - DNA, 22 bp, Artificial Sequence
  chemically synthesized
ggctgttttaaggctcaataag

SEQ ID NO: 16033 - DNA, 22 bp, Artificial Sequence
  chemically synthesized
ttttaaggctcaataagaaaat

SEQ ID NO: 16034 - DNA, 22 bp, Artificial Sequence
  chemically synthesized
taaggctcaataagaaaatttc

SEQ ID NO: 16035 - DNA, 22 bp, Artificial Sequence
  chemically synthesized
aaggctcaataagaaaatttct

SEQ ID NO: 16036 - DNA, 22 bp, Artificial Sequence
  chemically synthesized
aggctcaataagaaaatttctg

SEQ ID NO: 16037 - DNA, 22 bp, Artificial Sequence
  chemically synthesized
aataagaaaatttctgtgaaag

SEQ ID NO: 16038 - DNA, 22 bp, Artificial Sequence
  chemically synthesized
ctgtgaaaggtctctagaaaat

SEQ ID NO: 16039 - DNA, 22 bp, Artificial Sequence
  chemically synthesized
tgtgaaaggtctctagaaaatg

SEQ ID NO: 16040 - DNA, 22 bp, Artificial Sequence
  chemically synthesized
tgaaaggtctctagaaaatgta

SEQ ID NO: 16041 - DNA, 22 bp, Artificial Sequence
  chemically synthesized
tagaaaatgtaggttcctatac

SEQ ID NO: 16042 - DNA, 22 bp, Artificial Sequence
  chemically synthesized
gaaaatgtaggttcctatacaa

SEQ ID NO: 16043 - DNA, 22 bp, Artificial Sequence
  chemically synthesized
ctatacaaataaaagataacat

SEQ ID NO: 16044 - DNA, 22 bp, Artificial Sequence
  chemically synthesized
tacaaataaaagataacattgt

SEQ ID NO: 16045 - DNA, 22 bp, Artificial Sequence
  chemically synthesized
tgcttatagcttcggtgtttat

SEQ ID NO: 16046 - DNA, 22 bp, Artificial Sequence
  chemically synthesized
atagcttcggtgtttatcatat

SEQ ID NO: 16047 - DNA, 22 bp, Artificial Sequence
  chemically synthesized
tagcttcggtgtttatcatata

SEQ ID NO: 16048 - DNA, 22 bp, Artificial Sequence
  chemically synthesized
cggtgtttatcatataaagcta

SEQ ID NO: 16049 - DNA, 22 bp, Artificial Sequence
  chemically synthesized
ggtgtttatcatataaagctat

SEQ ID NO: 16050 - DNA, 22 bp, Artificial Sequence
  chemically synthesized
atcatataaagctattctgagt

SEQ ID NO: 16051 - DNA, 22 bp, Artificial Sequence
  chemically synthesized
tcatataaagctattctgagtt

SEQ ID NO: 16052 - DNA, 22 bp, Artificial Sequence
  chemically synthesized
ttctgagttatttgaagagctc

SEQ ID NO: 16053 - DNA, 22 bp, Artificial Sequence
  chemically synthesized
tgagttatttgaagagctcacc

SEQ ID NO: 16054 - DNA, 22 bp, Artificial Sequence
  chemically synthesized
agttatttgaagagctcaccta

SEQ ID NO: 16055 - DNA, 22 bp, Artificial Sequence
  chemically synthesized
tttgaagagctcacctactttt

SEQ ID NO: 16056 - DNA, 22 bp, Artificial Sequence
  chemically synthesized
gaagagctcacctacttttttt

SEQ ID NO: 16057 - DNA, 22 bp, Artificial Sequence
  chemically synthesized
aagagctcacctactttttttt

SEQ ID NO: 16058 - DNA, 22 bp, Artificial Sequence
  chemically synthesized
acctacttttttttgtttttag

SEQ ID NO: 16059 - DNA, 22 bp, Artificial Sequence
  chemically synthesized
cttttttttgtttttagtttgt

SEQ ID NO: 16060 - DNA, 22 bp, Artificial Sequence
  chemically synthesized
ttttttgtttttagtttgttaa

SEQ ID NO: 16061 - DNA, 22 bp, Artificial Sequence
  chemically synthesized
tttttgtttttagtttgttaaa

SEQ ID NO: 16062 - DNA, 22 bp, Artificial Sequence
  chemically synthesized
ttttgtttttagtttgttaaat

SEQ ID NO: 16063 - DNA, 22 bp, Artificial Sequence
  chemically synthesized
tttgtttttagtttgttaaatt

SEQ ID NO: 16064 - DNA, 22 bp, Artificial Sequence
  chemically synthesized
ttgtttttagtttgttaaattg

SEQ ID NO: 16065 - DNA, 22 bp, Artificial Sequence
  chemically synthesized
tgtttttagtttgttaaattgt

SEQ ID NO: 16066 - DNA, 22 bp, Artificial Sequence
  chemically synthesized
gtttttagtttgttaaattgtt

SEQ ID NO: 16067 - DNA, 22 bp, Artificial Sequence
  chemically synthesized
tttttagtttgttaaattgttt

SEQ ID NO: 16068 - DNA, 22 bp, Artificial Sequence
  chemically synthesized
ttagtttgttaaattgttttat

SEQ ID NO: 16069 - DNA, 22 bp, Artificial Sequence
  chemically synthesized
tagtttgttaaattgttttata

SEQ ID NO: 16070 - DNA, 22 bp, Artificial Sequence
  chemically synthesized
agtttgttaaattgttttatag

SEQ ID NO: 16071 - DNA, 22 bp, Artificial Sequence
  chemically synthesized
gtttgttaaattgttttatagg

SEQ ID NO: 16072 - DNA, 22 bp, Artificial Sequence
  chemically synthesized
gttaaattgttttataggcaat

SEQ ID NO: 16073 - DNA, 22 bp, Artificial Sequence
  chemically synthesized
ttaaattgttttataggcaatg

SEQ ID NO: 16074 - DNA, 22 bp, Artificial Sequence
  chemically synthesized
aattgttttataggcaatgttt

SEQ ID NO: 16075 - DNA, 22 bp, Artificial Sequence
  chemically synthesized
ttttataggcaatgtttttaat

SEQ ID NO: 16076 - DNA, 22 bp, Artificial Sequence
  chemically synthesized
tataggcaatgtttttaatctg

SEQ ID NO: 16077 - DNA, 22 bp, Artificial Sequence
  chemically synthesized
ataggcaatgtttttaatctgt

SEQ ID NO: 16078 - DNA, 22 bp, Artificial Sequence
  chemically synthesized
taggcaatgtttttaatctgtt

SEQ ID NO: 16079 - DNA, 22 bp, Artificial Sequence
  chemically synthesized
ttaatctgttttctttaactta

SEQ ID NO: 16080 - DNA, 22 bp, Artificial Sequence
  chemically synthesized
taatctgttttctttaacttac

SEQ ID NO: 16081 - DNA, 22 bp, Artificial Sequence
  chemically synthesized
aatctgttttctttaacttaca

SEQ ID NO: 16082 - DNA, 22 bp, Artificial Sequence
  chemically synthesized
atctgttttctttaacttacag

SEQ ID NO: 16083 - DNA, 22 bp, Artificial Sequence
  chemically synthesized
ttttctttaacttacagtgcca

SEQ ID NO: 16084 - DNA, 22 bp, Artificial Sequence
  chemically synthesized
tctttaacttacagtgccatca

SEQ ID NO: 16085 - DNA, 22 bp, Artificial Sequence
  chemically synthesized
ctttaacttacagtgccatcag

SEQ ID NO: 16086 - DNA, 22 bp, Artificial Sequence
  chemically synthesized
tttaacttacagtgccatcagc

SEQ ID NO: 16087 - DNA, 22 bp, Artificial Sequence
  chemically synthesized
taacttacagtgccatcagctc

SEQ ID NO: 16088 - DNA, 22 bp, Artificial Sequence
  chemically synthesized
aacttacagtgccatcagctca

SEQ ID NO: 16089 - DNA, 22 bp, Artificial Sequence
  chemically synthesized
acttacagtgccatcagctcac

SEQ ID NO: 16090 - DNA, 22 bp, Artificial Sequence
  chemically synthesized
acagtgccatcagctcacactt

SEQ ID NO: 16091 - DNA, 22 bp, Artificial Sequence
  chemically synthesized
cagtgccatcagctcacacttg

SEQ ID NO: 16092 - DNA, 22 bp, Artificial Sequence
  chemically synthesized
acacttgcaaacctgtggctgt

SEQ ID NO: 16093 - DNA, 22 bp, Artificial Sequence
  chemically synthesized
gcaaacctgtggctgttccgtt

SEQ ID NO: 16094 - DNA, 22 bp, Artificial Sequence
  chemically synthesized
caaacctgtggctgttccgttg

SEQ ID NO: 16095 - DNA, 22 bp, Artificial Sequence
  chemically synthesized
tggctgttccgttgtagtaggt

SEQ ID NO: 16096 - DNA, 22 bp, Artificial Sequence
  chemically synthesized
ttccgttgtagtaggtagcagt

SEQ ID NO: 16097 - DNA, 22 bp, Artificial Sequence
  chemically synthesized
cgttgtagtaggtagcagtgca

SEQ ID NO: 16098 - DNA, 22 bp, Artificial Sequence
  chemically synthesized
tagtaggtagcagtgcagagaa

SEQ ID NO: 16099 - DNA, 22 bp, Artificial Sequence
  chemically synthesized
attttataatctagcaaatgat

SEQ ID NO: 16100 - DNA, 22 bp, Artificial Sequence
  chemically synthesized
ttttataatctagcaaatgatt

SEQ ID NO: 16101 - DNA, 22 bp, Artificial Sequence
  chemically synthesized
tataatctagcaaatgatttga

SEQ ID NO: 16102 - DNA, 22 bp, Artificial Sequence
  chemically synthesized
ataatctagcaaatgatttgac

SEQ ID NO: 16103 - DNA, 22 bp, Artificial Sequence
  chemically synthesized
taatctagcaaatgatttgact

SEQ ID NO: 16104 - DNA, 22 bp, Artificial Sequence
  chemically synthesized
gcaaatgatttgactctttaag

SEQ ID NO: 16105 - DNA, 22 bp, Artificial Sequence
  chemically synthesized
gactctttaagactgatgatat

SEQ ID NO: 16106 - DNA, 22 bp, Artificial Sequence
  chemically synthesized
actctttaagactgatgatata

SEQ ID NO: 16107 - DNA, 22 bp, Artificial Sequence
  chemically synthesized
tttaagactgatgatatatcat

SEQ ID NO: 16108 - DNA, 22 bp, Artificial Sequence
  chemically synthesized
taagactgatgatatatcatgg

SEQ ID NO: 16109 - DNA, 22 bp, Artificial Sequence
  chemically synthesized
aagactgatgatatatcatgga

SEQ ID NO: 16110 - DNA, 22 bp, Artificial Sequence
  chemically synthesized
agactgatgatatatcatggat

SEQ ID NO: 16111 - DNA, 22 bp, Artificial Sequence
  chemically synthesized
atgatatatcatggattgtcat

SEQ ID NO: 16112 - DNA, 22 bp, Artificial Sequence
  chemically synthesized
tcatttaaatggtaggttgcaa

SEQ ID NO: 16113 - DNA, 22 bp, Artificial Sequence
  chemically synthesized
aaatggtaggttgcaattaaaa

SEQ ID NO: 16114 - DNA, 22 bp, Artificial Sequence
  chemically synthesized
aatggtaggttgcaattaaaat

SEQ ID NO: 16115 - DNA, 22 bp, Artificial Sequence
  chemically synthesized
caattaaaatgatctagtagta

SEQ ID NO: 16116 - DNA, 22 bp, Artificial Sequence
  chemically synthesized
aaatgatctagtagtataagga

SEQ ID NO: 16117 - DNA, 22 bp, Artificial Sequence
  chemically synthesized
gtagtataaggaggcaatgtaa

SEQ ID NO: 16118 - DNA, 22 bp, Artificial Sequence
  chemically synthesized
atcaaattgctaagacaccttg

SEQ ID NO: 16119 - DNA, 22 bp, Artificial Sequence
  chemically synthesized
ctaagacaccttgtggcaacag

SEQ ID NO: 16120 - DNA, 22 bp, Artificial Sequence
  chemically synthesized
agacaccttgtggcaacagtga

SEQ ID NO: 16121 - DNA, 22 bp, Artificial Sequence
  chemically synthesized
gtggcaacagtgagtttgaaat

SEQ ID NO: 16122 - DNA, 22 bp, Artificial Sequence
  chemically synthesized
tggcaacagtgagtttgaaata

SEQ ID NO: 16123 - DNA, 22 bp, Artificial Sequence
  chemically synthesized
gaaataaactgagtaagaatca

SEQ ID NO: 16124 - DNA, 22 bp, Artificial Sequence
  chemically synthesized
aaataaactgagtaagaatcat

SEQ ID NO: 16125 - DNA, 22 bp, Artificial Sequence
  chemically synthesized
agtaagaatcatttatcagttt

SEQ ID NO: 16126 - DNA, 22 bp, Artificial Sequence
  chemically synthesized
atcagtttattttgatagctcg

SEQ ID NO: 16127 - DNA, 22 bp, Artificial Sequence
  chemically synthesized
tcagtttattttgatagctcgg

SEQ ID NO: 16128 - DNA, 22 bp, Artificial Sequence
  chemically synthesized
attttgatagctcggaaatacc

SEQ ID NO: 16129 - DNA, 22 bp, Artificial Sequence
  chemically synthesized
ttttgatagctcggaaatacca

SEQ ID NO: 16130 - DNA, 22 bp, Artificial Sequence
  chemically synthesized
tgatagctcggaaataccagtg

SEQ ID NO: 16131 - DNA, 22 bp, Artificial Sequence
  chemically synthesized
gatagctcggaaataccagtgt

SEQ ID NO: 16132 - DNA, 22 bp, Artificial Sequence
  chemically synthesized
atagctcggaaataccagtgtc

SEQ ID NO: 16133 - DNA, 22 bp, Artificial Sequence
  chemically synthesized
ggaaataccagtgtcagtagtg

SEQ ID NO: 16134 - DNA, 22 bp, Artificial Sequence
  chemically synthesized
tgagaatatattaaaatcagat

SEQ ID NO: 16135 - DNA, 22 bp, Artificial Sequence
  chemically synthesized
gagaatatattaaaatcagata

SEQ ID NO: 16136 - DNA, 22 bp, Artificial Sequence
  chemically synthesized
agaatatattaaaatcagatat

SEQ ID NO: 16137 - DNA, 22 bp, Artificial Sequence
  chemically synthesized
aaatcagatatataaaaaaaat

SEQ ID NO: 16138 - DNA, 22 bp, Artificial Sequence
  chemically synthesized
ctcttctatttcccaatgttat

SEQ ID NO: 16139 - DNA, 22 bp, Artificial Sequence
  chemically synthesized
ttctatttcccaatgttatctt

SEQ ID NO: 16140 - DNA, 22 bp, Artificial Sequence
  chemically synthesized
ctatttcccaatgttatcttta

SEQ ID NO: 16141 - DNA, 22 bp, Artificial Sequence
  chemically synthesized
tatttcccaatgttatctttaa

SEQ ID NO: 16142 - DNA, 22 bp, Artificial Sequence
  chemically synthesized
tttcccaatgttatctttaaca

SEQ ID NO: 16143 - DNA, 22 bp, Artificial Sequence
  chemically synthesized
cccaatgttatctttaacaaat

SEQ ID NO: 16144 - DNA, 22 bp, Artificial Sequence
  chemically synthesized
ccaatgttatctttaacaaatc

SEQ ID NO: 16145 - DNA, 22 bp, Artificial Sequence
  chemically synthesized
tctttaacaaatctgaagatag

SEQ ID NO: 16146 - DNA, 22 bp, Artificial Sequence
  chemically synthesized
taacaaatctgaagatagtcat

SEQ ID NO: 16147 - DNA, 22 bp, Artificial Sequence
  chemically synthesized
aacaaatctgaagatagtcatg

SEQ ID NO: 16148 - DNA, 22 bp, Artificial Sequence
  chemically synthesized
acaaatctgaagatagtcatgt

SEQ ID NO: 16149 - DNA, 22 bp, Artificial Sequence
  chemically synthesized
aagatagtcatgtacttttggt

SEQ ID NO: 16150 - DNA, 22 bp, Artificial Sequence
  chemically synthesized
ttggtagtagttccaaagaaat

SEQ ID NO: 16151 - DNA, 22 bp, Artificial Sequence
  chemically synthesized
tggtagtagttccaaagaaatg

SEQ ID NO: 16152 - DNA, 22 bp, Artificial Sequence
  chemically synthesized
ggtagtagttccaaagaaatgt

SEQ ID NO: 16153 - DNA, 22 bp, Artificial Sequence
  chemically synthesized
gtagtagttccaaagaaatgtt

SEQ ID NO: 16154 - DNA, 22 bp, Artificial Sequence
  chemically synthesized
caaagaaatgttatttgtttat

SEQ ID NO: 16155 - DNA, 22 bp, Artificial Sequence
  chemically synthesized
tttgtttattcatcttgatttc

SEQ ID NO: 16156 - DNA, 22 bp, Artificial Sequence
  chemically synthesized
gtttattcatcttgatttcatt

SEQ ID NO: 16157 - DNA, 22 bp, Artificial Sequence
  chemically synthesized
tttattcatcttgatttcattg

SEQ ID NO: 16158 - DNA, 22 bp, Artificial Sequence
  chemically synthesized
attcatcttgatttcattgtct

SEQ ID NO: 16159 - DNA, 22 bp, Artificial Sequence
  chemically synthesized
ttcatcttgatttcattgtctt

SEQ ID NO: 16160 - DNA, 22 bp, Artificial Sequence
  chemically synthesized
atcttgatttcattgtcttcgc

SEQ ID NO: 16161 - DNA, 22 bp, Artificial Sequence
  chemically synthesized
gatttcattgtcttcgctttcc

SEQ ID NO: 16162 - DNA, 22 bp, Artificial Sequence
  chemically synthesized
atttcattgtcttcgctttcct

SEQ ID NO: 16163 - DNA, 22 bp, Artificial Sequence
  chemically synthesized
cattgtcttcgctttccttcta

SEQ ID NO: 16164 - DNA, 22 bp, Artificial Sequence
  chemically synthesized
attgtcttcgctttccttctaa

SEQ ID NO: 16165 - DNA, 22 bp, Artificial Sequence
  chemically synthesized
tcttcgctttccttctaaatct

SEQ ID NO: 16166 - DNA, 22 bp, Artificial Sequence
  chemically synthesized
cgctttccttctaaatctgtcc

SEQ ID NO: 16167 - DNA, 22 bp, Artificial Sequence
  chemically synthesized
gctttccttctaaatctgtccc

SEQ ID NO: 16168 - DNA, 22 bp, Artificial Sequence
  chemically synthesized
tccttctaaatctgtcccttct

SEQ ID NO: 16169 - DNA, 22 bp, Artificial Sequence
  chemically synthesized
ccttctaaatctgtcccttcta

SEQ ID NO: 16170 - DNA, 22 bp, Artificial Sequence
  chemically synthesized
cttctaaatctgtcccttctag

SEQ ID NO: 16171 - DNA, 22 bp, Artificial Sequence
  chemically synthesized
ctaaatctgtcccttctaggga

SEQ ID NO: 16172 - DNA, 22 bp, Artificial Sequence
  chemically synthesized
taaatctgtcccttctagggag

SEQ ID NO: 16173 - DNA, 22 bp, Artificial Sequence
  chemically synthesized
aatctgtcccttctagggagct

SEQ ID NO: 16174 - DNA, 22 bp, Artificial Sequence
  chemically synthesized
tcccttctagggagctattggg

SEQ ID NO: 16175 - DNA, 22 bp, Artificial Sequence
  chemically synthesized
ctagggagctattgggattaag

SEQ ID NO: 16176 - DNA, 22 bp, Artificial Sequence
  chemically synthesized
tagggagctattgggattaagt

SEQ ID NO: 16177 - DNA, 22 bp, Artificial Sequence
  chemically synthesized
gggagctattgggattaagtgg

SEQ ID NO: 16178 - DNA, 22 bp, Artificial Sequence
  chemically synthesized
ttgggattaagtggtcattgat

SEQ ID NO: 16179 - DNA, 22 bp, Artificial Sequence
  chemically synthesized
ggattaagtggtcattgattat

SEQ ID NO: 16180 - DNA, 22 bp, Artificial Sequence
  chemically synthesized
agtggtcattgattattatact

SEQ ID NO: 16181 - DNA, 22 bp, Artificial Sequence
  chemically synthesized
attattatactttattcagtaa

SEQ ID NO: 16182 - DNA, 22 bp, Artificial Sequence
  chemically synthesized
ttatactttattcagtaatgtt

SEQ ID NO: 16183 - DNA, 22 bp, Artificial Sequence
  chemically synthesized
tactttattcagtaatgtttct

SEQ ID NO: 16184 - DNA, 22 bp, Artificial Sequence
  chemically synthesized
tattcagtaatgtttctgaccc

SEQ ID NO: 16185 - DNA, 22 bp, Artificial Sequence
  chemically synthesized
attcagtaatgtttctgaccct

SEQ ID NO: 16186 - DNA, 22 bp, Artificial Sequence
  chemically synthesized
ttcagtaatgtttctgaccctt

SEQ ID NO: 16187 - DNA, 22 bp, Artificial Sequence
  chemically synthesized
agtaatgtttctgaccctttcc

SEQ ID NO: 16188 - DNA, 22 bp, Artificial Sequence
  chemically synthesized
ctgaccctttccttcagtgcta

SEQ ID NO: 16189 - DNA, 22 bp, Artificial Sequence
  chemically synthesized
tgaccctttccttcagtgctac

SEQ ID NO: 16190 - DNA, 22 bp, Artificial Sequence
  chemically synthesized
accctttccttcagtgctactt

SEQ ID NO: 16191 - DNA, 22 bp, Artificial Sequence
  chemically synthesized
tccttcagtgctacttgagtta

SEQ ID NO: 16192 - DNA, 22 bp, Artificial Sequence
  chemically synthesized
ccttcagtgctacttgagttaa

SEQ ID NO: 16193 - DNA, 22 bp, Artificial Sequence
  chemically synthesized
cttcagtgctacttgagttaat

SEQ ID NO: 16194 - DNA, 22 bp, Artificial Sequence
  chemically synthesized
cagtgctacttgagttaattaa

SEQ ID NO: 16195 - DNA, 22 bp, Artificial Sequence
  chemically synthesized
agtgctacttgagttaattaag

SEQ ID NO: 16196 - DNA, 22 bp, Artificial Sequence
  chemically synthesized
cttgagttaattaaggattaat

SEQ ID NO: 16197 - DNA, 22 bp, Artificial Sequence
  chemically synthesized
gagttaattaaggattaatgaa

SEQ ID NO: 16198 - DNA, 22 bp, Artificial Sequence
  chemically synthesized
agttaattaaggattaatgaac

SEQ ID NO: 16199 - DNA, 22 bp, Artificial Sequence
  chemically synthesized
attaaggattaatgaacagtta

SEQ ID NO: 16200 - DNA, 22 bp, Artificial Sequence
  chemically synthesized
aggattaatgaacagttacatt

SEQ ID NO: 16201 - DNA, 22 bp, Artificial Sequence
  chemically synthesized
atgaacagttacatttccaagc

SEQ ID NO: 16202 - DNA, 22 bp, Artificial Sequence
  chemically synthesized
catttccaagcattagctaata

SEQ ID NO: 16203 - DNA, 22 bp, Artificial Sequence
  chemically synthesized
ccaagcattagctaataaacta

SEQ ID NO: 16204 - DNA, 22 bp, Artificial Sequence
  chemically synthesized
caagcattagctaataaactaa

SEQ ID NO: 16205 - DNA, 22 bp, Artificial Sequence
  chemically synthesized
gctaataaactaaaggattttg

SEQ ID NO: 16206 - DNA, 22 bp, Artificial Sequence
  chemically synthesized
ataaactaaaggattttgcact

SEQ ID NO: 16207 - DNA, 22 bp, Artificial Sequence
  chemically synthesized
aaggattttgcacttttcttca

SEQ ID NO: 16208 - DNA, 22 bp, Artificial Sequence
  chemically synthesized
tgcacttttcttcactgaccat

SEQ ID NO: 16209 - DNA, 22 bp, Artificial Sequence
  chemically synthesized
gcacttttcttcactgaccatt

SEQ ID NO: 16210 - DNA, 22 bp, Artificial Sequence
  chemically synthesized
cacttttcttcactgaccatta

SEQ ID NO: 16211 - DNA, 22 bp, Artificial Sequence
  chemically synthesized
ttcttcactgaccattagttag

SEQ ID NO: 16212 - DNA, 22 bp, Artificial Sequence
  chemically synthesized
tcttcactgaccattagttaga

SEQ ID NO: 16213 - DNA, 22 bp, Artificial Sequence
  chemically synthesized
cttcactgaccattagttagaa

SEQ ID NO: 16214 - DNA, 22 bp, Artificial Sequence
  chemically synthesized
ttcactgaccattagttagaaa

SEQ ID NO: 16215 - DNA, 22 bp, Artificial Sequence
  chemically synthesized
cactgaccattagttagaaaga

SEQ ID NO: 16216 - DNA, 22 bp, Artificial Sequence
  chemically synthesized
actgaccattagttagaaagag

SEQ ID NO: 16217 - DNA, 22 bp, Artificial Sequence
  chemically synthesized
accattagttagaaagagttca

SEQ ID NO: 16218 - DNA, 22 bp, Artificial Sequence
  chemically synthesized
gttagaaagagttcagagataa

SEQ ID NO: 16219 - DNA, 22 bp, Artificial Sequence
  chemically synthesized
gaaagagttcagagataagtat

SEQ ID NO: 16220 - DNA, 22 bp, Artificial Sequence
  chemically synthesized
agagataagtatgtgtatcttt

SEQ ID NO: 16221 - DNA, 22 bp, Artificial Sequence
  chemically synthesized
tcaatttcagcaaacctaattt

SEQ ID NO: 16222 - DNA, 22 bp, Artificial Sequence
  chemically synthesized
caatttcagcaaacctaatttt

SEQ ID NO: 16223 - DNA, 22 bp, Artificial Sequence
  chemically synthesized
aatttcagcaaacctaattttt

SEQ ID NO: 16224 - DNA, 22 bp, Artificial Sequence
  chemically synthesized
cagcaaacctaattttttaaaa

SEQ ID NO: 16225 - DNA, 22 bp, Artificial Sequence
  chemically synthesized
agcaaacctaattttttaaaaa

SEQ ID NO: 16226 - DNA, 22 bp, Artificial Sequence
  chemically synthesized
attttttaaaaaaagttttaca

SEQ ID NO: 16227 - DNA, 22 bp, Artificial Sequence
  chemically synthesized
tttaaaaaaagttttacatagg

SEQ ID NO: 16228 - DNA, 22 bp, Artificial Sequence
  chemically synthesized
ttaaaaaaagttttacatagga

SEQ ID NO: 16229 - DNA, 22 bp, Artificial Sequence
  chemically synthesized
taaaaaaagttttacataggaa

SEQ ID NO: 16230 - DNA, 22 bp, Artificial Sequence
  chemically synthesized
aaaaaaagttttacataggaaa

SEQ ID NO: 16231 - DNA, 22 bp, Artificial Sequence
  chemically synthesized
aaaaaagttttacataggaaat

SEQ ID NO: 16232 - DNA, 22 bp, Artificial Sequence
  chemically synthesized
tacataggaaatatgttggaaa

SEQ ID NO: 16233 - DNA, 22 bp, Artificial Sequence
  chemically synthesized
acataggaaatatgttggaaat

SEQ ID NO: 16234 - DNA, 22 bp, Artificial Sequence
  chemically synthesized
cataggaaatatgttggaaatg

SEQ ID NO: 16235 - DNA, 22 bp, Artificial Sequence
  chemically synthesized
gaaatgatactttacaaagata

SEQ ID NO: 16236 - DNA, 22 bp, Artificial Sequence
  chemically synthesized
tacaaagatattcataattttt

SEQ ID NO: 16237 - DNA, 22 bp, Artificial Sequence
  chemically synthesized
acaaagatattcataatttttt

SEQ ID NO: 16238 - DNA, 22 bp, Artificial Sequence
  chemically synthesized
caaagatattcataattttttt

SEQ ID NO: 16239 - DNA, 22 bp, Artificial Sequence
  chemically synthesized
ataatttttttttgtaatcagc

SEQ ID NO: 16240 - DNA, 22 bp, Artificial Sequence
  chemically synthesized
ttttttgtaatcagctactttg

SEQ ID NO: 16241 - DNA, 22 bp, Artificial Sequence
  chemically synthesized
tttttgtaatcagctactttgt

SEQ ID NO: 16242 - DNA, 22 bp, Artificial Sequence
  chemically synthesized
ttttgtaatcagctactttgta

SEQ ID NO: 16243 - DNA, 22 bp, Artificial Sequence
  chemically synthesized
tttgtaatcagctactttgtat

SEQ ID NO: 16244 - DNA, 22 bp, Artificial Sequence
  chemically synthesized
ttgtaatcagctactttgtata

SEQ ID NO: 16245 - DNA, 22 bp, Artificial Sequence
  chemically synthesized
tgtaatcagctactttgtatat

SEQ ID NO: 16246 - DNA, 22 bp, Artificial Sequence
  chemically synthesized
gtaatcagctactttgtatatt

SEQ ID NO: 16247 - DNA, 22 bp, Artificial Sequence
  chemically synthesized
taatcagctactttgtatattt

SEQ ID NO: 16248 - DNA, 22 bp, Artificial Sequence
  chemically synthesized
ctttgtatatttacatgagcct

SEQ ID NO: 16249 - DNA, 22 bp, Artificial Sequence
  chemically synthesized
tgtatatttacatgagccttaa

SEQ ID NO: 16250 - DNA, 22 bp, Artificial Sequence
  chemically synthesized
gtatatttacatgagccttaat

SEQ ID NO: 16251 - DNA, 22 bp, Artificial Sequence
  chemically synthesized
tatatttacatgagccttaatt

SEQ ID NO: 16252 - DNA, 22 bp, Artificial Sequence
  chemically synthesized
acatgagccttaatttatattt

SEQ ID NO: 16253 - DNA, 22 bp, Artificial Sequence
  chemically synthesized
catgagccttaatttatatttc

SEQ ID NO: 16254 - DNA, 22 bp, Artificial Sequence
  chemically synthesized
aatttatatttctcatataacc

SEQ ID NO: 16255 - DNA, 22 bp, Artificial Sequence
  chemically synthesized
atttatatttctcatataacca

SEQ ID NO: 16256 - DNA, 22 bp, Artificial Sequence
  chemically synthesized
atatttctcatataaccattta

SEQ ID NO: 16257 - DNA, 22 bp, Artificial Sequence
  chemically synthesized
tatttctcatataaccatttat

SEQ ID NO: 16258 - DNA, 22 bp, Artificial Sequence
  chemically synthesized
ctcatataaccatttatgagag

SEQ ID NO: 16259 - DNA, 22 bp, Artificial Sequence
  chemically synthesized
tcatataaccatttatgagagc

SEQ ID NO: 16260 - DNA, 22 bp, Artificial Sequence
  chemically synthesized
atataaccatttatgagagctt

SEQ ID NO: 16261 - DNA, 22 bp, Artificial Sequence
  chemically synthesized
atgagagcttagtatacctgtg

SEQ ID NO: 16262 - DNA, 22 bp, Artificial Sequence
  chemically synthesized
tgagagcttagtatacctgtgt

SEQ ID NO: 16263 - DNA, 22 bp, Artificial Sequence
  chemically synthesized
agtatacctgtgtcattatatt

SEQ ID NO: 16264 - DNA, 22 bp, Artificial Sequence
  chemically synthesized
gtatacctgtgtcattatattg

SEQ ID NO: 16265 - DNA, 22 bp, Artificial Sequence
  chemically synthesized
tgtcattatattgcatctacga

SEQ ID NO: 16266 - DNA, 22 bp, Artificial Sequence
  chemically synthesized
tattgcatctacgaactagtga

SEQ ID NO: 16267 - DNA, 22 bp, Artificial Sequence
  chemically synthesized
catctacgaactagtgacctta

SEQ ID NO: 16268 - DNA, 22 bp, Artificial Sequence
  chemically synthesized
cgaactagtgaccttattcctt

SEQ ID NO: 16269 - DNA, 22 bp, Artificial Sequence
  chemically synthesized
gtgaccttattccttctgttac

SEQ ID NO: 16270 - DNA, 22 bp, Artificial Sequence
  chemically synthesized
attccttctgttacctcaaaca

SEQ ID NO: 16271 - DNA, 22 bp, Artificial Sequence
  chemically synthesized
ttccttctgttacctcaaacag

SEQ ID NO: 16272 - DNA, 22 bp, Artificial Sequence
  chemically synthesized
cttctgttacctcaaacaggtg

SEQ ID NO: 16273 - DNA, 22 bp, Artificial Sequence
  chemically synthesized
ctgttacctcaaacaggtggct

SEQ ID NO: 16274 - DNA, 22 bp, Artificial Sequence
  chemically synthesized
tgttacctcaaacaggtggctt

SEQ ID NO: 16275 - DNA, 22 bp, Artificial Sequence
  chemically synthesized
ttacctcaaacaggtggctttc

SEQ ID NO: 16276 - DNA, 22 bp, Artificial Sequence
  chemically synthesized
cctcaaacaggtggctttccat

SEQ ID NO: 16277 - DNA, 22 bp, Artificial Sequence
  chemically synthesized
aaacaggtggctttccatctgt

SEQ ID NO: 16278 - DNA, 22 bp, Artificial Sequence
  chemically synthesized
tccatctgtgatctccaaagcc

SEQ ID NO: 16279 - DNA, 22 bp, Artificial Sequence
  chemically synthesized
ccatctgtgatctccaaagcct

SEQ ID NO: 16280 - DNA, 22 bp, Artificial Sequence
  chemically synthesized
catctgtgatctccaaagcctt

SEQ ID NO: 16281 - DNA, 22 bp, Artificial Sequence
  chemically synthesized
tgatctccaaagccttaggttg

SEQ ID NO: 16282 - DNA, 22 bp, Artificial Sequence
  chemically synthesized
caaagccttaggttgcacagag

SEQ ID NO: 16283 - DNA, 22 bp, Artificial Sequence
  chemically synthesized
aggttgcacagagtgactgccg

SEQ ID NO: 16284 - DNA, 22 bp, Artificial Sequence
  chemically synthesized
ggttgcacagagtgactgccga

SEQ ID NO: 16285 - DNA, 22 bp, Artificial Sequence
  chemically synthesized
cacagagtgactgccgagctgc

SEQ ID NO: 16286 - DNA, 22 bp, Artificial Sequence
  chemically synthesized
ccgagctgctttatgaagggag

SEQ ID NO: 16287 - DNA, 22 bp, Artificial Sequence
  chemically synthesized
ctttatgaagggagaaaggctc

SEQ ID NO: 16288 - DNA, 22 bp, Artificial Sequence
  chemically synthesized
tatgaagggagaaaggctccat

SEQ ID NO: 16289 - DNA, 22 bp, Artificial Sequence
  chemically synthesized
atgaagggagaaaggctccata

SEQ ID NO: 16290 - DNA, 22 bp, Artificial Sequence
  chemically synthesized
tgaagggagaaaggctccatag

SEQ ID NO: 16291 - DNA, 22 bp, Artificial Sequence
  chemically synthesized
catagttggagtgttttttttt

SEQ ID NO: 16292 - DNA, 22 bp, Artificial Sequence
  chemically synthesized
gagtgttttttttttttttttt

SEQ ID NO: 16293 - DNA, 22 bp, Artificial Sequence
  chemically synthesized
ttttttttttttttaaacattt

SEQ ID NO: 16294 - DNA, 22 bp, Artificial Sequence
  chemically synthesized
tttttttttttttaaacatttt

SEQ ID NO: 16295 - DNA, 22 bp, Artificial Sequence
  chemically synthesized
ttttttttttttaaacattttt

SEQ ID NO: 16296 - DNA, 22 bp, Artificial Sequence
  chemically synthesized
tttttttttttaaacatttttc

SEQ ID NO: 16297 - DNA, 22 bp, Artificial Sequence
  chemically synthesized
ttttttttttaaacatttttcc

SEQ ID NO: 16298 - DNA, 22 bp, Artificial Sequence
  chemically synthesized
tttttttttaaacatttttccc

SEQ ID NO: 16299 - DNA, 22 bp, Artificial Sequence
  chemically synthesized
ttttttttaaacatttttccca

SEQ ID NO: 16300 - DNA, 22 bp, Artificial Sequence
  chemically synthesized
tttttttaaacatttttcccat

SEQ ID NO: 16301 - DNA, 22 bp, Artificial Sequence
  chemically synthesized
ttttttaaacatttttcccatc

SEQ ID NO: 16302 - DNA, 22 bp, Artificial Sequence
  chemically synthesized
tttttaaacatttttcccatcc

SEQ ID NO: 16303 - DNA, 22 bp, Artificial Sequence
  chemically synthesized
ttttaaacatttttcccatcct

SEQ ID NO: 16304 - DNA, 22 bp, Artificial Sequence
  chemically synthesized
tttaaacatttttcccatcctc

SEQ ID NO: 16305 - DNA, 22 bp, Artificial Sequence
  chemically synthesized
ttaaacatttttcccatcctcc

SEQ ID NO: 16306 - DNA, 22 bp, Artificial Sequence
  chemically synthesized
taaacatttttcccatcctcca

SEQ ID NO: 16307 - DNA, 22 bp, Artificial Sequence
  chemically synthesized
aaacatttttcccatcctccat

SEQ ID NO: 16308 - DNA, 22 bp, Artificial Sequence
  chemically synthesized
aacatttttcccatcctccatc

SEQ ID NO: 16309 - DNA, 22 bp, Artificial Sequence
  chemically synthesized
ttcccatcctccatcctcttga

SEQ ID NO: 16310 - DNA, 22 bp, Artificial Sequence
  chemically synthesized
tcccatcctccatcctcttgag

SEQ ID NO: 16311 - DNA, 22 bp, Artificial Sequence
  chemically synthesized
cccatcctccatcctcttgagg

SEQ ID NO: 16312 - DNA, 22 bp, Artificial Sequence
  chemically synthesized
ccatcctccatcctcttgaggg

SEQ ID NO: 16313 - DNA, 22 bp, Artificial Sequence
  chemically synthesized
catcctcttgagggagaatagc

SEQ ID NO: 16314 - DNA, 22 bp, Artificial Sequence
  chemically synthesized
ttgagggagaatagcttacctt

SEQ ID NO: 16315 - DNA, 22 bp, Artificial Sequence
  chemically synthesized
gagggagaatagcttacctttt

SEQ ID NO: 16316 - DNA, 22 bp, Artificial Sequence
  chemically synthesized
agggagaatagcttacctttta

SEQ ID NO: 16317 - DNA, 22 bp, Artificial Sequence
  chemically synthesized
accttttatcttgttttaattt

SEQ ID NO: 16318 - DNA, 22 bp, Artificial Sequence
  chemically synthesized
ccttttatcttgttttaatttg

SEQ ID NO: 16319 - DNA, 22 bp, Artificial Sequence
  chemically synthesized
ttatcttgttttaatttgagaa

SEQ ID NO: 16320 - DNA, 22 bp, Artificial Sequence
  chemically synthesized
tatcttgttttaatttgagaaa

SEQ ID NO: 16321 - DNA, 22 bp, Artificial Sequence
  chemically synthesized
atcttgttttaatttgagaaag

SEQ ID NO: 16322 - DNA, 22 bp, Artificial Sequence
  chemically synthesized
tcttgttttaatttgagaaaga

SEQ ID NO: 16323 - DNA, 22 bp, Artificial Sequence
  chemically synthesized
gttttaatttgagaaagaagtt

SEQ ID NO: 16324 - DNA, 22 bp, Artificial Sequence
  chemically synthesized
ttttaatttgagaaagaagttg

SEQ ID NO: 16325 - DNA, 22 bp, Artificial Sequence
  chemically synthesized
taatttgagaaagaagttgcca

SEQ ID NO: 16326 - DNA, 22 bp, Artificial Sequence
  chemically synthesized
aatttgagaaagaagttgccac

SEQ ID NO: 16327 - DNA, 22 bp, Artificial Sequence
  chemically synthesized
atttgagaaagaagttgccacc

SEQ ID NO: 16328 - DNA, 22 bp, Artificial Sequence
  chemically synthesized
gagaaagaagttgccaccactc

SEQ ID NO: 16329 - DNA, 22 bp, Artificial Sequence
  chemically synthesized
agaaagaagttgccaccactct

SEQ ID NO: 16330 - DNA, 22 bp, Artificial Sequence
  chemically synthesized
ccaccactctaggttgaaaacc

SEQ ID NO: 16331 - DNA, 22 bp, Artificial Sequence
  chemically synthesized
taggttgaaaaccactccttta

SEQ ID NO: 16332 - DNA, 22 bp, Artificial Sequence
  chemically synthesized
ggttgaaaaccactcctttaac

SEQ ID NO: 16333 - DNA, 22 bp, Artificial Sequence
  chemically synthesized
aaaaccactcctttaacataat

SEQ ID NO: 16334 - DNA, 22 bp, Artificial Sequence
  chemically synthesized
ctttaacataataactgtggat

SEQ ID NO: 16335 - DNA, 22 bp, Artificial Sequence
  chemically synthesized
taacataataactgtggatatg

SEQ ID NO: 16336 - DNA, 22 bp, Artificial Sequence
  chemically synthesized
aacataataactgtggatatgg

SEQ ID NO: 16337 - DNA, 22 bp, Artificial Sequence
  chemically synthesized
acataataactgtggatatggt

SEQ ID NO: 16338 - DNA, 22 bp, Artificial Sequence
  chemically synthesized
tggatatggtttgaatttcaag

SEQ ID NO: 16339 - DNA, 22 bp, Artificial Sequence
  chemically synthesized
gaatttcaagatagttacatgc

SEQ ID NO: 16340 - DNA, 22 bp, Artificial Sequence
  chemically synthesized
aatttcaagatagttacatgcc

SEQ ID NO: 16341 - DNA, 22 bp, Artificial Sequence
  chemically synthesized
caagatagttacatgccttttt

SEQ ID NO: 16342 - DNA, 22 bp, Artificial Sequence
  chemically synthesized
aagatagttacatgccttttta

SEQ ID NO: 16343 - DNA, 22 bp, Artificial Sequence
  chemically synthesized
catgcctttttatttttcctaa

SEQ ID NO: 16344 - DNA, 22 bp, Artificial Sequence
  chemically synthesized
tttatttttcctaatagagctg

SEQ ID NO: 16345 - DNA, 22 bp, Artificial Sequence
  chemically synthesized
ttatttttcctaatagagctgt

SEQ ID NO: 16346 - DNA, 22 bp, Artificial Sequence
  chemically synthesized
tatttttcctaatagagctgta

SEQ ID NO: 16347 - DNA, 22 bp, Artificial Sequence
  chemically synthesized
atttttcctaatagagctgtag

SEQ ID NO: 16348 - DNA, 22 bp, Artificial Sequence
  chemically synthesized
tttttcctaatagagctgtagg

SEQ ID NO: 16349 - DNA, 22 bp, Artificial Sequence
  chemically synthesized
ttcctaatagagctgtaggtca

SEQ ID NO: 16350 - DNA, 22 bp, Artificial Sequence
  chemically synthesized
tcctaatagagctgtaggtcaa

SEQ ID NO: 16351 - DNA, 22 bp, Artificial Sequence
  chemically synthesized
cctaatagagctgtaggtcaaa

SEQ ID NO: 16352 - DNA, 22 bp, Artificial Sequence
  chemically synthesized
ctaatagagctgtaggtcaaat

SEQ ID NO: 16353 - DNA, 22 bp, Artificial Sequence
  chemically synthesized
atagagctgtaggtcaaatatt

SEQ ID NO: 16354 - DNA, 22 bp, Artificial Sequence
  chemically synthesized
taggtcaaatattattagaatc

SEQ ID NO: 16355 - DNA, 22 bp, Artificial Sequence
  chemically synthesized
ttagaatcagatttctaaatcc

SEQ ID NO: 16356 - DNA, 22 bp, Artificial Sequence
  chemically synthesized
gaatcagatttctaaatcccac

SEQ ID NO: 16357 - DNA, 22 bp, Artificial Sequence
  chemically synthesized
ctaaatcccacccaatgacctg

SEQ ID NO: 16358 - DNA, 22 bp, Artificial Sequence
  chemically synthesized
taaatcccacccaatgacctgc

SEQ ID NO: 16359 - DNA, 22 bp, Artificial Sequence
  chemically synthesized
aatcccacccaatgacctgctt

SEQ ID NO: 16360 - DNA, 22 bp, Artificial Sequence
  chemically synthesized
cttattttaaatcaaattcaat

SEQ ID NO: 16361 - DNA, 22 bp, Artificial Sequence
  chemically synthesized
attttaaatcaaattcaataat

SEQ ID NO: 16362 - DNA, 22 bp, Artificial Sequence
  chemically synthesized
ttttaaatcaaattcaataatt

SEQ ID NO: 16363 - DNA, 22 bp, Artificial Sequence
  chemically synthesized
taaatcaaattcaataattaat

SEQ ID NO: 16364 - DNA, 22 bp, Artificial Sequence
  chemically synthesized
aaatcaaattcaataattaatt

SEQ ID NO: 16365 - DNA, 22 bp, Artificial Sequence
  chemically synthesized
aatcaaattcaataattaattc

SEQ ID NO: 16366 - DNA, 22 bp, Artificial Sequence
  chemically synthesized
aataattaattctcttcttttt

SEQ ID NO: 16367 - DNA, 22 bp, Artificial Sequence
  chemically synthesized
attctcttctttttggaggatc

SEQ ID NO: 16368 - DNA, 22 bp, Artificial Sequence
  chemically synthesized
tcttctttttggaggatctgga

SEQ ID NO: 16369 - DNA, 22 bp, Artificial Sequence
  chemically synthesized
ttctttttggaggatctggaca

SEQ ID NO: 16370 - DNA, 22 bp, Artificial Sequence
  chemically synthesized
ctttttggaggatctggacatt

SEQ ID NO: 16371 - DNA, 22 bp, Artificial Sequence
  chemically synthesized
tttttggaggatctggacattc

SEQ ID NO: 16372 - DNA, 22 bp, Artificial Sequence
  chemically synthesized
tttggaggatctggacattctt

SEQ ID NO: 16373 - DNA, 22 bp, Artificial Sequence
  chemically synthesized
ttggaggatctggacattcttt

SEQ ID NO: 16374 - DNA, 22 bp, Artificial Sequence
  chemically synthesized
tggaggatctggacattctttg

SEQ ID NO: 16375 - DNA, 22 bp, Artificial Sequence
  chemically synthesized
ggaggatctggacattctttga

SEQ ID NO: 16376 - DNA, 22 bp, Artificial Sequence
  chemically synthesized
gaggatctggacattctttgat

SEQ ID NO: 16377 - DNA, 22 bp, Artificial Sequence
  chemically synthesized
gacattctttgatatttcttac

SEQ ID NO: 16378 - DNA, 22 bp, Artificial Sequence
  chemically synthesized
tttgatatttcttacaacgaat

SEQ ID NO: 16379 - DNA, 22 bp, Artificial Sequence
  chemically synthesized
tgatatttcttacaacgaattt

SEQ ID NO: 16380 - DNA, 22 bp, Artificial Sequence
  chemically synthesized
gatatttcttacaacgaatttc

SEQ ID NO: 16381 - DNA, 22 bp, Artificial Sequence
  chemically synthesized
atatttcttacaacgaatttca

SEQ ID NO: 16382 - DNA, 22 bp, Artificial Sequence
  chemically synthesized
cttacaacgaatttcatgtgta

SEQ ID NO: 16383 - DNA, 22 bp, Artificial Sequence
  chemically synthesized
ttacaacgaatttcatgtgtag

SEQ ID NO: 16384 - DNA, 22 bp, Artificial Sequence
  chemically synthesized
acaacgaatttcatgtgtagac

SEQ ID NO: 16385 - DNA, 22 bp, Artificial Sequence
  chemically synthesized
caacgaatttcatgtgtagacc

SEQ ID NO: 16386 - DNA, 22 bp, Artificial Sequence
  chemically synthesized
catgtgtagacccactaaacag

SEQ ID NO: 16387 - DNA, 22 bp, Artificial Sequence
  chemically synthesized
atgtgtagacccactaaacaga

SEQ ID NO: 16388 - DNA, 22 bp, Artificial Sequence
  chemically synthesized
aacagaagctataaaagttgca

SEQ ID NO: 16389 - DNA, 22 bp, Artificial Sequence
  chemically synthesized
taaaagttgcatggtcaaataa

SEQ ID NO: 16390 - DNA, 22 bp, Artificial Sequence
  chemically synthesized
catggtcaaataagtctgagaa

SEQ ID NO: 16391 - DNA, 22 bp, Artificial Sequence
  chemically synthesized
agaaagtctgcagatgatataa

SEQ ID NO: 16392 - DNA, 22 bp, Artificial Sequence
  chemically synthesized
cagatgatataattcacctgaa

SEQ ID NO: 16393 - DNA, 22 bp, Artificial Sequence
  chemically synthesized
acctgaagagtcacagtatgta

SEQ ID NO: 16394 - DNA, 22 bp, Artificial Sequence
  chemically synthesized
aagagtcacagtatgtagccaa

SEQ ID NO: 16395 - DNA, 22 bp, Artificial Sequence
  chemically synthesized
aaggttttgagatgccatacag

SEQ ID NO: 16396 - DNA, 22 bp, Artificial Sequence
  chemically synthesized
tgagatgccatacagtaaattt

SEQ ID NO: 16397 - DNA, 22 bp, Artificial Sequence
  chemically synthesized
gagatgccatacagtaaattta

SEQ ID NO: 16398 - DNA, 22 bp, Artificial Sequence
  chemically synthesized
agatgccatacagtaaatttac

SEQ ID NO: 16399 - DNA, 22 bp, Artificial Sequence
  chemically synthesized
accaagcattttctaaatttat

SEQ ID NO: 16400 - DNA, 22 bp, Artificial Sequence
  chemically synthesized
ccaagcattttctaaatttatt

SEQ ID NO: 16401 - DNA, 22 bp, Artificial Sequence
  chemically synthesized
tctaaatttatttgaccacaga

SEQ ID NO: 16402 - DNA, 22 bp, Artificial Sequence
  chemically synthesized
ctaaatttatttgaccacagaa

SEQ ID NO: 16403 - DNA, 22 bp, Artificial Sequence
  chemically synthesized
taaatttatttgaccacagaat

SEQ ID NO: 16404 - DNA, 22 bp, Artificial Sequence
  chemically synthesized
aatttatttgaccacagaatcc

SEQ ID NO: 16405 - DNA, 22 bp, Artificial Sequence
  chemically synthesized
atttgaccacagaatccctatt

SEQ ID NO: 16406 - DNA, 22 bp, Artificial Sequence
  chemically synthesized
tttgaccacagaatccctattt

SEQ ID NO: 16407 - DNA, 22 bp, Artificial Sequence
  chemically synthesized
gaccacagaatccctattttaa

SEQ ID NO: 16408 - DNA, 22 bp, Artificial Sequence
  chemically synthesized
accacagaatccctattttaag

SEQ ID NO: 16409 - DNA, 22 bp, Artificial Sequence
  chemically synthesized
ttttaagcaacaactgttacat

SEQ ID NO: 16410 - DNA, 22 bp, Artificial Sequence
  chemically synthesized
taagcaacaactgttacatccc

SEQ ID NO: 16411 - DNA, 22 bp, Artificial Sequence
  chemically synthesized
aagcaacaactgttacatccca

SEQ ID NO: 16412 - DNA, 22 bp, Artificial Sequence
  chemically synthesized
agcaacaactgttacatcccat

SEQ ID NO: 16413 - DNA, 22 bp, Artificial Sequence
  chemically synthesized
ttacatcccatggattccaggt

SEQ ID NO: 16414 - DNA, 22 bp, Artificial Sequence
  chemically synthesized
catcccatggattccaggtgac

SEQ ID NO: 16415 - DNA, 22 bp, Artificial Sequence
  chemically synthesized
caggtgactaaagaatacttat

SEQ ID NO: 16416 - DNA, 22 bp, Artificial Sequence
  chemically synthesized
aagaatacttatttcttaggat

SEQ ID NO: 16417 - DNA, 22 bp, Artificial Sequence
  chemically synthesized
atttcttaggatatgttttatt

SEQ ID NO: 16418 - DNA, 22 bp, Artificial Sequence
  chemically synthesized
tttcttaggatatgttttattg

SEQ ID NO: 16419 - DNA, 22 bp, Artificial Sequence
  chemically synthesized
cttaggatatgttttattgata

SEQ ID NO: 16420 - DNA, 22 bp, Artificial Sequence
  chemically synthesized
ttaggatatgttttattgataa

SEQ ID NO: 16421 - DNA, 22 bp, Artificial Sequence
  chemically synthesized
aggatatgttttattgataata

SEQ ID NO: 16422 - DNA, 22 bp, Artificial Sequence
  chemically synthesized
ggatatgttttattgataataa

SEQ ID NO: 16423 - DNA, 22 bp, Artificial Sequence
  chemically synthesized
tattgataataacaattaaaat

SEQ ID NO: 16424 - DNA, 22 bp, Artificial Sequence
  chemically synthesized
attgataataacaattaaaatt

SEQ ID NO: 16425 - DNA, 22 bp, Artificial Sequence
  chemically synthesized
ttgataataacaattaaaattt

SEQ ID NO: 16426 - DNA, 22 bp, Artificial Sequence
  chemically synthesized
ataataacaattaaaatttcag

SEQ ID NO: 16427 - DNA, 22 bp, Artificial Sequence
  chemically synthesized
aaatttcagatatctttcataa

SEQ ID NO: 16428 - DNA, 22 bp, Artificial Sequence
  chemically synthesized
cagatatctttcataagcaaat

SEQ ID NO: 16429 - DNA, 22 bp, Artificial Sequence
  chemically synthesized
agatatctttcataagcaaatc

SEQ ID NO: 16430 - DNA, 22 bp, Artificial Sequence
  chemically synthesized
tcataagcaaatcagtggtctt

SEQ ID NO: 16431 - DNA, 22 bp, Artificial Sequence
  chemically synthesized
cataagcaaatcagtggtcttt

SEQ ID NO: 16432 - DNA, 22 bp, Artificial Sequence
  chemically synthesized
ataagcaaatcagtggtctttt

SEQ ID NO: 16433 - DNA, 22 bp, Artificial Sequence
  chemically synthesized
tttacttcatgttttaatgcta

SEQ ID NO: 16434 - DNA, 22 bp, Artificial Sequence
  chemically synthesized
ttacttcatgttttaatgctaa

SEQ ID NO: 16435 - DNA, 22 bp, Artificial Sequence
  chemically synthesized
tacttcatgttttaatgctaaa

SEQ ID NO: 16436 - DNA, 22 bp, Artificial Sequence
  chemically synthesized
acttcatgttttaatgctaaaa

SEQ ID NO: 16437 - DNA, 22 bp, Artificial Sequence
  chemically synthesized
cttcatgttttaatgctaaaat

SEQ ID NO: 16438 - DNA, 22 bp, Artificial Sequence
  chemically synthesized
catgttttaatgctaaaatatt

SEQ ID NO: 16439 - DNA, 22 bp, Artificial Sequence
  chemically synthesized
atgttttaatgctaaaatattt

SEQ ID NO: 16440 - DNA, 22 bp, Artificial Sequence
  chemically synthesized
taatgctaaaatattttctttt

SEQ ID NO: 16441 - DNA, 22 bp, Artificial Sequence
  chemically synthesized
aatgctaaaatattttctttta

SEQ ID NO: 16442 - DNA, 22 bp, Artificial Sequence
  chemically synthesized
atgctaaaatattttcttttat

SEQ ID NO: 16443 - DNA, 22 bp, Artificial Sequence
  chemically synthesized
aaatattttcttttatagatag

SEQ ID NO: 16444 - DNA, 22 bp, Artificial Sequence
  chemically synthesized
tcttttatagatagtcagaaca

SEQ ID NO: 16445 - DNA, 22 bp, Artificial Sequence
  chemically synthesized
cttttatagatagtcagaacat

SEQ ID NO: 16446 - DNA, 22 bp, Artificial Sequence
  chemically synthesized
ttttatagatagtcagaacatt

SEQ ID NO: 16447 - DNA, 22 bp, Artificial Sequence
  chemically synthesized
ttatagatagtcagaacattat

SEQ ID NO: 16448 - DNA, 22 bp, Artificial Sequence
  chemically synthesized
tatagatagtcagaacattatg

SEQ ID NO: 16449 - DNA, 22 bp, Artificial Sequence
  chemically synthesized
atagatagtcagaacattatgc

SEQ ID NO: 16450 - DNA, 22 bp, Artificial Sequence
  chemically synthesized
tagatagtcagaacattatgcc

SEQ ID NO: 16451 - DNA, 22 bp, Artificial Sequence
  chemically synthesized
tgcctttttctgactccagcag

SEQ ID NO: 16452 - DNA, 22 bp, Artificial Sequence
  chemically synthesized
tttctgactccagcagagagaa

SEQ ID NO: 16453 - DNA, 22 bp, Artificial Sequence
  chemically synthesized
ttctgactccagcagagagaaa

SEQ ID NO: 16454 - DNA, 22 bp, Artificial Sequence
  chemically synthesized
tctgactccagcagagagaaaa

SEQ ID NO: 16455 - DNA, 22 bp, Artificial Sequence
  chemically synthesized
ctgactccagcagagagaaaat

SEQ ID NO: 16456 - DNA, 22 bp, Artificial Sequence
  chemically synthesized
tgactccagcagagagaaaatg

SEQ ID NO: 16457 - DNA, 22 bp, Artificial Sequence
  chemically synthesized
actccagcagagagaaaatgct

SEQ ID NO: 16458 - DNA, 22 bp, Artificial Sequence
  chemically synthesized
cagcagagagaaaatgctccag

SEQ ID NO: 16459 - DNA, 22 bp, Artificial Sequence
  chemically synthesized
caggttatgtgaagcagaatca

SEQ ID NO: 16460 - DNA, 22 bp, Artificial Sequence
  chemically synthesized
tgtgaagcagaatcatcattta

SEQ ID NO: 16461 - DNA, 22 bp, Artificial Sequence
  chemically synthesized
aaatatgagtcagggctctttg

SEQ ID NO: 16462 - DNA, 22 bp, Artificial Sequence
  chemically synthesized
aatatgagtcagggctctttgt

SEQ ID NO: 16463 - DNA, 22 bp, Artificial Sequence
  chemically synthesized
tttgtacaaggcctgctaaagg

SEQ ID NO: 16464 - DNA, 22 bp, Artificial Sequence
  chemically synthesized
tgtacaaggcctgctaaaggta

SEQ ID NO: 16465 - DNA, 22 bp, Artificial Sequence
  chemically synthesized
gtacaaggcctgctaaaggtat

SEQ ID NO: 16466 - DNA, 22 bp, Artificial Sequence
  chemically synthesized
tacaaggcctgctaaaggtata

SEQ ID NO: 16467 - DNA, 22 bp, Artificial Sequence
  chemically synthesized
ctaaaggtatagtttctagtta

SEQ ID NO: 16468 - DNA, 22 bp, Artificial Sequence
  chemically synthesized
aaggtatagtttctagttatca

SEQ ID NO: 16469 - DNA, 22 bp, Artificial Sequence
  chemically synthesized
ctagttatcacaagtgaaacca

SEQ ID NO: 16470 - DNA, 22 bp, Artificial Sequence
  chemically synthesized
tagttatcacaagtgaaaccac

SEQ ID NO: 16471 - DNA, 22 bp, Artificial Sequence
  chemically synthesized
gttatcacaagtgaaaccactt

SEQ ID NO: 16472 - DNA, 22 bp, Artificial Sequence
  chemically synthesized
tcacaagtgaaaccacttttct

SEQ ID NO: 16473 - DNA, 22 bp, Artificial Sequence
  chemically synthesized
ttctaaaatcatttttgagact

SEQ ID NO: 16474 - DNA, 22 bp, Artificial Sequence
  chemically synthesized
tctaaaatcatttttgagactc

SEQ ID NO: 16475 - DNA, 22 bp, Artificial Sequence
  chemically synthesized
ctaaaatcatttttgagactct

SEQ ID NO: 16476 - DNA, 22 bp, Artificial Sequence
  chemically synthesized
taaaatcatttttgagactctt

SEQ ID NO: 16477 - DNA, 22 bp, Artificial Sequence
  chemically synthesized
aaatcatttttgagactcttta

SEQ ID NO: 16478 - DNA, 22 bp, Artificial Sequence
  chemically synthesized
ttgagactctttatagacaaat

SEQ ID NO: 16479 - DNA, 22 bp, Artificial Sequence
  chemically synthesized
tgagactctttatagacaaatc

SEQ ID NO: 16480 - DNA, 22 bp, Artificial Sequence
  chemically synthesized
gagactctttatagacaaatct

SEQ ID NO: 16481 - DNA, 22 bp, Artificial Sequence
  chemically synthesized
agactctttatagacaaatctt

SEQ ID NO: 16482 - DNA, 22 bp, Artificial Sequence
  chemically synthesized
tttatagacaaatcttaaatat

SEQ ID NO: 16483 - DNA, 22 bp, Artificial Sequence
  chemically synthesized
tatagacaaatcttaaatatta

SEQ ID NO: 16484 - DNA, 22 bp, Artificial Sequence
  chemically synthesized
atagacaaatcttaaatattag

SEQ ID NO: 16485 - DNA, 22 bp, Artificial Sequence
  chemically synthesized
tagacaaatcttaaatattagc

SEQ ID NO: 16486 - DNA, 22 bp, Artificial Sequence
  chemically synthesized
aaatattagcatttaatgtatc

SEQ ID NO: 16487 - DNA, 22 bp, Artificial Sequence
  chemically synthesized
aatattagcatttaatgtatct

SEQ ID NO: 16488 - DNA, 22 bp, Artificial Sequence
  chemically synthesized
gcatttaatgtatctcatattg

SEQ ID NO: 16489 - DNA, 22 bp, Artificial Sequence
  chemically synthesized
aatgtatctcatattgacatgc

SEQ ID NO: 16490 - DNA, 22 bp, Artificial Sequence
  chemically synthesized
atgtatctcatattgacatgcc

SEQ ID NO: 16491 - DNA, 22 bp, Artificial Sequence
  chemically synthesized
atattgacatgcccagagactg

SEQ ID NO: 16492 - DNA, 22 bp, Artificial Sequence
  chemically synthesized
acatgcccagagactgacttcc

SEQ ID NO: 16493 - DNA, 22 bp, Artificial Sequence
  chemically synthesized
acttcctttacacagttctgca

SEQ ID NO: 16494 - DNA, 22 bp, Artificial Sequence
  chemically synthesized
cctttacacagttctgcacata

SEQ ID NO: 16495 - DNA, 22 bp, Artificial Sequence
  chemically synthesized
ctttacacagttctgcacatag

SEQ ID NO: 16496 - DNA, 22 bp, Artificial Sequence
  chemically synthesized
tacacagttctgcacatagact

SEQ ID NO: 16497 - DNA, 22 bp, Artificial Sequence
  chemically synthesized
acacagttctgcacatagacta

SEQ ID NO: 16498 - DNA, 22 bp, Artificial Sequence
  chemically synthesized
cacagttctgcacatagactat

SEQ ID NO: 16499 - DNA, 22 bp, Artificial Sequence
  chemically synthesized
tgcacatagactatatgtctta

SEQ ID NO: 16500 - DNA, 22 bp, Artificial Sequence
  chemically synthesized
cacatagactatatgtcttatg

SEQ ID NO: 16501 - DNA, 22 bp, Artificial Sequence
  chemically synthesized
tatgtcttatggatttatagtt

SEQ ID NO: 16502 - DNA, 22 bp, Artificial Sequence
  chemically synthesized
atggatttatagttagtatcat

SEQ ID NO: 16503 - DNA, 22 bp, Artificial Sequence
  chemically synthesized
tggatttatagttagtatcatc

SEQ ID NO: 16504 - DNA, 22 bp, Artificial Sequence
  chemically synthesized
atagttagtatcatcagtgaaa

SEQ ID NO: 16505 - DNA, 22 bp, Artificial Sequence
  chemically synthesized
tagttagtatcatcagtgaaac

SEQ ID NO: 16506 - DNA, 22 bp, Artificial Sequence
  chemically synthesized
gtatcatcagtgaaacaccata

SEQ ID NO: 16507 - DNA, 22 bp, Artificial Sequence
  chemically synthesized
tgtgttccaggtgggtccctgt

SEQ ID NO: 16508 - DNA, 22 bp, Artificial Sequence
  chemically synthesized
gtgttccaggtgggtccctgtt

SEQ ID NO: 16509 - DNA, 22 bp, Artificial Sequence
  chemically synthesized
tgttccaggtgggtccctgttc

SEQ ID NO: 16510 - DNA, 22 bp, Artificial Sequence
  chemically synthesized
caggtgggtccctgttcctaca

SEQ ID NO: 16511 - DNA, 22 bp, Artificial Sequence
  chemically synthesized
ttcctacatgtctagcctcagg

SEQ ID NO: 16512 - DNA, 22 bp, Artificial Sequence
  chemically synthesized
ctacatgtctagcctcaggact

SEQ ID NO: 16513 - DNA, 22 bp, Artificial Sequence
  chemically synthesized
catgtctagcctcaggactttt

SEQ ID NO: 16514 - DNA, 22 bp, Artificial Sequence
  chemically synthesized
gcctcaggactttttttttttt

SEQ ID NO: 16515 - DNA, 22 bp, Artificial Sequence
  chemically synthesized
aggacttttttttttttaacac

SEQ ID NO: 16516 - DNA, 22 bp, Artificial Sequence
  chemically synthesized
ttttttttttaacacatgctta

SEQ ID NO: 16517 - DNA, 22 bp, Artificial Sequence
  chemically synthesized
tttttttttaacacatgcttaa

SEQ ID NO: 16518 - DNA, 22 bp, Artificial Sequence
  chemically synthesized
ttttttttaacacatgcttaaa

SEQ ID NO: 16519 - DNA, 22 bp, Artificial Sequence
  chemically synthesized
tttttttaacacatgcttaaat

SEQ ID NO: 16520 - DNA, 22 bp, Artificial Sequence
  chemically synthesized
ttttttaacacatgcttaaatc

SEQ ID NO: 16521 - DNA, 22 bp, Artificial Sequence
  chemically synthesized
tttttaacacatgcttaaatca

SEQ ID NO: 16522 - DNA, 22 bp, Artificial Sequence
  chemically synthesized
ttttaacacatgcttaaatcag

SEQ ID NO: 16523 - DNA, 22 bp, Artificial Sequence
  chemically synthesized
tttaacacatgcttaaatcagg

SEQ ID NO: 16524 - DNA, 22 bp, Artificial Sequence
  chemically synthesized
ttaacacatgcttaaatcaggt

SEQ ID NO: 16525 - DNA, 22 bp, Artificial Sequence
  chemically synthesized
taacacatgcttaaatcaggtt

SEQ ID NO: 16526 - DNA, 22 bp, Artificial Sequence
  chemically synthesized
aacacatgcttaaatcaggttg

SEQ ID NO: 16527 - DNA, 22 bp, Artificial Sequence
  chemically synthesized
acacatgcttaaatcaggttgc

SEQ ID NO: 16528 - DNA, 22 bp, Artificial Sequence
  chemically synthesized
aaatcaggttgcacatcaaaaa

SEQ ID NO: 16529 - DNA, 22 bp, Artificial Sequence
  chemically synthesized
aatcaggttgcacatcaaaaat

SEQ ID NO: 16530 - DNA, 22 bp, Artificial Sequence
  chemically synthesized
cacatcaaaaataagatcattt

SEQ ID NO: 16531 - DNA, 22 bp, Artificial Sequence
  chemically synthesized
ctttttaactaaatagatttga

SEQ ID NO: 16532 - DNA, 22 bp, Artificial Sequence
  chemically synthesized
tttttaactaaatagatttgaa

SEQ ID NO: 16533 - DNA, 22 bp, Artificial Sequence
  chemically synthesized
tttaactaaatagatttgaatt

SEQ ID NO: 16534 - DNA, 22 bp, Artificial Sequence
  chemically synthesized
ttaactaaatagatttgaattt

SEQ ID NO: 16535 - DNA, 22 bp, Artificial Sequence
  chemically synthesized
taactaaatagatttgaatttt

SEQ ID NO: 16536 - DNA, 22 bp, Artificial Sequence
  chemically synthesized
aactaaatagatttgaatttta

SEQ ID NO: 16537 - DNA, 22 bp, Artificial Sequence
  chemically synthesized
actaaatagatttgaattttat

SEQ ID NO: 16538 - DNA, 22 bp, Artificial Sequence
  chemically synthesized
aatagatttgaattttattgaa

SEQ ID NO: 16539 - DNA, 22 bp, Artificial Sequence
  chemically synthesized
gaattttattgaaaaaaaattt

SEQ ID NO: 16540 - DNA, 22 bp, Artificial Sequence
  chemically synthesized
aattttattgaaaaaaaatttt

SEQ ID NO: 16541 - DNA, 22 bp, Artificial Sequence
  chemically synthesized
tattgaaaaaaaattttaaaca

SEQ ID NO: 16542 - DNA, 22 bp, Artificial Sequence
  chemically synthesized
attgaaaaaaaattttaaacat

SEQ ID NO: 16543 - DNA, 22 bp, Artificial Sequence
  chemically synthesized
ttgaaaaaaaattttaaacatc

SEQ ID NO: 16544 - DNA, 22 bp, Artificial Sequence
  chemically synthesized
aaaaaaaattttaaacatcttt

SEQ ID NO: 16545 - DNA, 22 bp, Artificial Sequence
  chemically synthesized
taaacatctttaagaagcttat

SEQ ID NO: 16546 - DNA, 22 bp, Artificial Sequence
  chemically synthesized
aaacatctttaagaagcttata

SEQ ID NO: 16547 - DNA, 22 bp, Artificial Sequence
  chemically synthesized
aacatctttaagaagcttatag

SEQ ID NO: 16548 - DNA, 22 bp, Artificial Sequence
  chemically synthesized
taagaagcttataggatttaag

SEQ ID NO: 16549 - DNA, 22 bp, Artificial Sequence
  chemically synthesized
aagaagcttataggatttaagc

SEQ ID NO: 16550 - DNA, 22 bp, Artificial Sequence
  chemically synthesized
agaagcttataggatttaagca

SEQ ID NO: 16551 - DNA, 22 bp, Artificial Sequence
  chemically synthesized
ataggatttaagcaattcctat

SEQ ID NO: 16552 - DNA, 22 bp, Artificial Sequence
  chemically synthesized
taggatttaagcaattcctatg

SEQ ID NO: 16553 - DNA, 22 bp, Artificial Sequence
  chemically synthesized
aagcaattcctatgtatgtgta

SEQ ID NO: 16554 - DNA, 22 bp, Artificial Sequence
  chemically synthesized
agcaattcctatgtatgtgtac

SEQ ID NO: 16555 - DNA, 22 bp, Artificial Sequence
  chemically synthesized
ctatgtatgtgtactaaaatat

SEQ ID NO: 16556 - DNA, 22 bp, Artificial Sequence
  chemically synthesized
tgtatgtgtactaaaatatata

SEQ ID NO: 16557 - DNA, 22 bp, Artificial Sequence
  chemically synthesized
aaatatatatatttctatatat

SEQ ID NO: 16558 - DNA, 22 bp, Artificial Sequence
  chemically synthesized
ctatatataatatatattagaa

SEQ ID NO: 16559 - DNA, 22 bp, Artificial Sequence
  chemically synthesized
tatatataatatatattagaaa

SEQ ID NO: 16560 - DNA, 22 bp, Artificial Sequence
  chemically synthesized
tatataatatatattagaaaaa

SEQ ID NO: 16561 - DNA, 22 bp, Artificial Sequence
  chemically synthesized
gaaaaaaattgtatttttcttt

SEQ ID NO: 16562 - DNA, 22 bp, Artificial Sequence
  chemically synthesized
tatttttcttttatttgagtct

SEQ ID NO: 16563 - DNA, 22 bp, Artificial Sequence
  chemically synthesized
ttcttttatttgagtctactgt

SEQ ID NO: 16564 - DNA, 22 bp, Artificial Sequence
  chemically synthesized
tcttttatttgagtctactgtc

SEQ ID NO: 16565 - DNA, 22 bp, Artificial Sequence
  chemically synthesized
cttttatttgagtctactgtca

SEQ ID NO: 16566 - DNA, 22 bp, Artificial Sequence
  chemically synthesized
ttttatttgagtctactgtcaa

SEQ ID NO: 16567 - DNA, 22 bp, Artificial Sequence
  chemically synthesized
ttatttgagtctactgtcaagg

SEQ ID NO: 16568 - DNA, 22 bp, Artificial Sequence
  chemically synthesized
tatttgagtctactgtcaagga

SEQ ID NO: 16569 - DNA, 22 bp, Artificial Sequence
  chemically synthesized
atttgagtctactgtcaaggag

SEQ ID NO: 16570 - DNA, 22 bp, Artificial Sequence
  chemically synthesized
tttgagtctactgtcaaggagc

SEQ ID NO: 16571 - DNA, 22 bp, Artificial Sequence
  chemically synthesized
gagtctactgtcaaggagcaaa

SEQ ID NO: 16572 - DNA, 22 bp, Artificial Sequence
  chemically synthesized
agtctactgtcaaggagcaaaa

SEQ ID NO: 16573 - DNA, 22 bp, Artificial Sequence
  chemically synthesized
ctgtcaaggagcaaaacagaga

SEQ ID NO: 16574 - DNA, 22 bp, Artificial Sequence
  chemically synthesized
tcaaggagcaaaacagagaaat

SEQ ID NO: 16575 - DNA, 22 bp, Artificial Sequence
  chemically synthesized
gcaattatttataatacttaaa

SEQ ID NO: 16576 - DNA, 22 bp, Artificial Sequence
  chemically synthesized
tttataatacttaaagggaaga

SEQ ID NO: 16577 - DNA, 22 bp, Artificial Sequence
  chemically synthesized
ataatacttaaagggaagaaag

SEQ ID NO: 16578 - DNA, 22 bp, Artificial Sequence
  chemically synthesized
taatacttaaagggaagaaagt

SEQ ID NO: 16579 - DNA, 22 bp, Artificial Sequence
  chemically synthesized
aaagggaagaaagttgttcacc

SEQ ID NO: 16580 - DNA, 22 bp, Artificial Sequence
  chemically synthesized
aagggaagaaagttgttcacct

SEQ ID NO: 16581 - DNA, 22 bp, Artificial Sequence
  chemically synthesized
ttcaccttgttgaatctattat

SEQ ID NO: 16582 - DNA, 22 bp, Artificial Sequence
  chemically synthesized
accttgttgaatctattattgt

SEQ ID NO: 16583 - DNA, 22 bp, Artificial Sequence
  chemically synthesized
gttgaatctattattgttattt

SEQ ID NO: 16584 - DNA, 22 bp, Artificial Sequence
  chemically synthesized
ttgaatctattattgttatttc

SEQ ID NO: 16585 - DNA, 22 bp, Artificial Sequence
  chemically synthesized
aatctattattgttatttcaat

SEQ ID NO: 16586 - DNA, 22 bp, Artificial Sequence
  chemically synthesized
ttattgttatttcaattatagt

SEQ ID NO: 16587 - DNA, 22 bp, Artificial Sequence
  chemically synthesized
ttgttatttcaattatagtccc

SEQ ID NO: 16588 - DNA, 22 bp, Artificial Sequence
  chemically synthesized
ttatttcaattatagtcccaag

SEQ ID NO: 16589 - DNA, 22 bp, Artificial Sequence
  chemically synthesized
tttcaattatagtcccaagacg

SEQ ID NO: 16590 - DNA, 22 bp, Artificial Sequence
  chemically synthesized
caattatagtcccaagacgtga

SEQ ID NO: 16591 - DNA, 22 bp, Artificial Sequence
  chemically synthesized
aattatagtcccaagacgtgaa

SEQ ID NO: 16592 - DNA, 22 bp, Artificial Sequence
  chemically synthesized
tagtcccaagacgtgaagaaat

SEQ ID NO: 16593 - DNA, 22 bp, Artificial Sequence
  chemically synthesized
tcctaatggttatgtgattgtc

SEQ ID NO: 16594 - DNA, 22 bp, Artificial Sequence
  chemically synthesized
cctaatggttatgtgattgtct

SEQ ID NO: 16595 - DNA, 22 bp, Artificial Sequence
  chemically synthesized
ctaatggttatgtgattgtctc

SEQ ID NO: 16596 - DNA, 22 bp, Artificial Sequence
  chemically synthesized
atggttatgtgattgtctcata

SEQ ID NO: 16597 - DNA, 22 bp, Artificial Sequence
  chemically synthesized
tgtgattgtctcatagtgacta

SEQ ID NO: 16598 - DNA, 22 bp, Artificial Sequence
  chemically synthesized
tctcatagtgactactttcttg

SEQ ID NO: 16599 - DNA, 22 bp, Artificial Sequence
  chemically synthesized
atagtgactactttcttgagga

SEQ ID NO: 16600 - DNA, 22 bp, Artificial Sequence
  chemically synthesized
ctttcttgaggatgtagccacg

SEQ ID NO: 16601 - DNA, 22 bp, Artificial Sequence
  chemically synthesized
tcttgaggatgtagccacggca

SEQ ID NO: 16602 - DNA, 22 bp, Artificial Sequence
  chemically synthesized
cttgaggatgtagccacggcaa

SEQ ID NO: 16603 - DNA, 22 bp, Artificial Sequence
  chemically synthesized
ttgaggatgtagccacggcaaa

SEQ ID NO: 16604 - DNA, 22 bp, Artificial Sequence
  chemically synthesized
gaggatgtagccacggcaaaat

SEQ ID NO: 16605 - DNA, 22 bp, Artificial Sequence
  chemically synthesized
aggatgtagccacggcaaaatg

SEQ ID NO: 16606 - DNA, 22 bp, Artificial Sequence
  chemically synthesized
aaaaattgttgcaaatacaagt

SEQ ID NO: 16607 - DNA, 22 bp, Artificial Sequence
  chemically synthesized
aaaattgttgcaaatacaagtt

SEQ ID NO: 16608 - DNA, 22 bp, Artificial Sequence
  chemically synthesized
ttgcaaatacaagttatattag

SEQ ID NO: 16609 - DNA, 22 bp, Artificial Sequence
  chemically synthesized
caaatacaagttatattaggct

SEQ ID NO: 16610 - DNA, 22 bp, Artificial Sequence
  chemically synthesized
tattaggcttttgtgcattttc

SEQ ID NO: 16611 - DNA, 22 bp, Artificial Sequence
  chemically synthesized
ggcttttgtgcattttcaataa

SEQ ID NO: 16612 - DNA, 22 bp, Artificial Sequence
  chemically synthesized
ttgtgcattttcaataatgtgc

SEQ ID NO: 16613 - DNA, 22 bp, Artificial Sequence
  chemically synthesized
tgtgcattttcaataatgtgct

SEQ ID NO: 16614 - DNA, 22 bp, Artificial Sequence
  chemically synthesized
gtgcattttcaataatgtgctg

SEQ ID NO: 16615 - DNA, 22 bp, Artificial Sequence
  chemically synthesized
tgcattttcaataatgtgctgc

SEQ ID NO: 16616 - DNA, 22 bp, Artificial Sequence
  chemically synthesized
tcaataatgtgctgctatgaac

SEQ ID NO: 16617 - DNA, 22 bp, Artificial Sequence
  chemically synthesized
caataatgtgctgctatgaact

SEQ ID NO: 16618 - DNA, 22 bp, Artificial Sequence
  chemically synthesized
aataatgtgctgctatgaactc

SEQ ID NO: 16619 - DNA, 22 bp, Artificial Sequence
  chemically synthesized
ctatgaactcagaatgatagta

SEQ ID NO: 16620 - DNA, 22 bp, Artificial Sequence
  chemically synthesized
tgaactcagaatgatagtattt

SEQ ID NO: 16621 - DNA, 22 bp, Artificial Sequence
  chemically synthesized
agaatgatagtatttaaatata

SEQ ID NO: 16622 - DNA, 22 bp, Artificial Sequence
  chemically synthesized
aaatatagaaactagttaaagg

SEQ ID NO: 16623 - DNA, 22 bp, Artificial Sequence
  chemically synthesized
aatatagaaactagttaaagga

SEQ ID NO: 16624 - DNA, 22 bp, Artificial Sequence
  chemically synthesized
gttaaaggaaacgtagtttcta

SEQ ID NO: 16625 - DNA, 22 bp, Artificial Sequence
  chemically synthesized
aaggaaacgtagtttctatttg

SEQ ID NO: 16626 - DNA, 22 bp, Artificial Sequence
  chemically synthesized
ctatttgagttatacatatctg

SEQ ID NO: 16627 - DNA, 22 bp, Artificial Sequence
  chemically synthesized
tatttgagttatacatatctgt

SEQ ID NO: 16628 - DNA, 22 bp, Artificial Sequence
  chemically synthesized
tttgagttatacatatctgtaa

SEQ ID NO: 16629 - DNA, 22 bp, Artificial Sequence
  chemically synthesized
gagttatacatatctgtaaatt

SEQ ID NO: 16630 - DNA, 22 bp, Artificial Sequence
  chemically synthesized
agttatacatatctgtaaatta

SEQ ID NO: 16631 - DNA, 22 bp, Artificial Sequence
  chemically synthesized
tacatatctgtaaattagaact

SEQ ID NO: 16632 - DNA, 22 bp, Artificial Sequence
  chemically synthesized
taaattagaacttctcctgtta

SEQ ID NO: 16633 - DNA, 22 bp, Artificial Sequence
  chemically synthesized
gaacttctcctgttaaaggcat

SEQ ID NO: 16634 - DNA, 22 bp, Artificial Sequence
  chemically synthesized
ctcctgttaaaggcataataaa

SEQ ID NO: 16635 - DNA, 22 bp, Artificial Sequence
  chemically synthesized
tcctgttaaaggcataataaag

SEQ ID NO: 16636 - DNA, 22 bp, Artificial Sequence
  chemically synthesized
ctgttaaaggcataataaagtg

SEQ ID NO: 16637 - DNA, 22 bp, Artificial Sequence
  chemically synthesized
ttaaaggcataataaagtgctt

SEQ ID NO: 16638 - DNA, 22 bp, Artificial Sequence
  chemically synthesized
aaggcataataaagtgcttaat

SEQ ID NO: 16639 - DNA, 22 bp, Artificial Sequence
  chemically synthesized
aatacttttgtttcctcagcac

SEQ ID NO: 16640 - DNA, 22 bp, Artificial Sequence
  chemically synthesized
atacttttgtttcctcagcacc

SEQ ID NO: 16641 - DNA, 22 bp, Artificial Sequence
  chemically synthesized
ttgtttcctcagcaccctctca

SEQ ID NO: 16642 - DNA, 22 bp, Artificial Sequence
  chemically synthesized
tgtttcctcagcaccctctcat

SEQ ID NO: 16643 - DNA, 22 bp, Artificial Sequence
  chemically synthesized
gtttcctcagcaccctctcatt

SEQ ID NO: 16644 - DNA, 22 bp, Artificial Sequence
  chemically synthesized
tttcctcagcaccctctcattt

SEQ ID NO: 16645 - DNA, 22 bp, Artificial Sequence
  chemically synthesized
cctcagcaccctctcatttaat

SEQ ID NO: 16646 - DNA, 22 bp, Artificial Sequence
  chemically synthesized
ctcagcaccctctcatttaatt

SEQ ID NO: 16647 - DNA, 22 bp, Artificial Sequence
  chemically synthesized
agcaccctctcatttaattata

SEQ ID NO: 16648 - DNA, 22 bp, Artificial Sequence
  chemically synthesized
tcatttaattatataattttag

SEQ ID NO: 16649 - DNA, 22 bp, Artificial Sequence
  chemically synthesized
atttaattatataattttagtt

SEQ ID NO: 16650 - DNA, 22 bp, Artificial Sequence
  chemically synthesized
aattatataattttagttctga

SEQ ID NO: 16651 - DNA, 22 bp, Artificial Sequence
  chemically synthesized
attatataattttagttctgaa

SEQ ID NO: 16652 - DNA, 22 bp, Artificial Sequence
  chemically synthesized
tataattttagttctgaaaggg

SEQ ID NO: 16653 - DNA, 22 bp, Artificial Sequence
  chemically synthesized
tagttctgaaagggacctatac

SEQ ID NO: 16654 - DNA, 22 bp, Artificial Sequence
  chemically synthesized
agttctgaaagggacctatacc

SEQ ID NO: 16655 - DNA, 22 bp, Artificial Sequence
  chemically synthesized
gttctgaaagggacctatacca

SEQ ID NO: 16656 - DNA, 22 bp, Artificial Sequence
  chemically synthesized
tgaaagggacctataccagatg

SEQ ID NO: 16657 - DNA, 22 bp, Artificial Sequence
  chemically synthesized
aaagggacctataccagatgcc

SEQ ID NO: 16658 - DNA, 22 bp, Artificial Sequence
  chemically synthesized
taccagatgcctagaggaaatt

SEQ ID NO: 16659 - DNA, 22 bp, Artificial Sequence
  chemically synthesized
gaggaaatttcaaaactatgat

SEQ ID NO: 16660 - DNA, 22 bp, Artificial Sequence
  chemically synthesized
caaaactatgatctaatgaaaa

SEQ ID NO: 16661 - DNA, 22 bp, Artificial Sequence
  chemically synthesized
aaaactatgatctaatgaaaaa

SEQ ID NO: 16662 - DNA, 22 bp, Artificial Sequence
  chemically synthesized
tgatctaatgaaaaaatattta

SEQ ID NO: 16663 - DNA, 22 bp, Artificial Sequence
  chemically synthesized
atgaaaaaatatttaatagttc

SEQ ID NO: 16664 - DNA, 22 bp, Artificial Sequence
  chemically synthesized
aatagttctccatgcaaataca

SEQ ID NO: 16665 - DNA, 22 bp, Artificial Sequence
  chemically synthesized
atagttctccatgcaaatacaa

SEQ ID NO: 16666 - DNA, 22 bp, Artificial Sequence
  chemically synthesized
tccatgcaaatacaaatcatat

SEQ ID NO: 16667 - DNA, 22 bp, Artificial Sequence
  chemically synthesized
catgcaaatacaaatcatatag

SEQ ID NO: 16668 - DNA, 22 bp, Artificial Sequence
  chemically synthesized
tccagaaaatacctttgacatt

SEQ ID NO: 16669 - DNA, 22 bp, Artificial Sequence
  chemically synthesized
ccagaaaatacctttgacatta

SEQ ID NO: 16670 - DNA, 22 bp, Artificial Sequence
  chemically synthesized
cagaaaatacctttgacattat

SEQ ID NO: 16671 - DNA, 22 bp, Artificial Sequence
  chemically synthesized
tgacattatacaaagatgatta

SEQ ID NO: 16672 - DNA, 22 bp, Artificial Sequence
  chemically synthesized
gacattatacaaagatgattat

SEQ ID NO: 16673 - DNA, 22 bp, Artificial Sequence
  chemically synthesized
acattatacaaagatgattatc

SEQ ID NO: 16674 - DNA, 22 bp, Artificial Sequence
  chemically synthesized
tacaaagatgattatcacagca

SEQ ID NO: 16675 - DNA, 22 bp, Artificial Sequence
  chemically synthesized
tcacagcattataatagtaaaa

SEQ ID NO: 16676 - DNA, 22 bp, Artificial Sequence
  chemically synthesized
taatagtaaaaaaatggaaata

SEQ ID NO: 16677 - DNA, 22 bp, Artificial Sequence
  chemically synthesized
tttcttctgttctgttcatagc

SEQ ID NO: 16678 - DNA, 22 bp, Artificial Sequence
  chemically synthesized
tcttctgttctgttcatagcac

SEQ ID NO: 16679 - DNA, 22 bp, Artificial Sequence
  chemically synthesized
cttctgttctgttcatagcaca

SEQ ID NO: 16680 - DNA, 22 bp, Artificial Sequence
  chemically synthesized
ttctgttctgttcatagcacag

SEQ ID NO: 16681 - DNA, 22 bp, Artificial Sequence
  chemically synthesized
ctgttctgttcatagcacagtg

SEQ ID NO: 16682 - DNA, 22 bp, Artificial Sequence
  chemically synthesized
tgttctgttcatagcacagtgc

SEQ ID NO: 16683 - DNA, 22 bp, Artificial Sequence
  chemically synthesized
ttctgttcatagcacagtgcct

SEQ ID NO: 16684 - DNA, 22 bp, Artificial Sequence
  chemically synthesized
tgttcatagcacagtgcctcat

SEQ ID NO: 16685 - DNA, 22 bp, Artificial Sequence
  chemically synthesized
ttcatagcacagtgcctcatac

SEQ ID NO: 16686 - DNA, 22 bp, Artificial Sequence
  chemically synthesized
atagcacagtgcctcatacgca

SEQ ID NO: 16687 - DNA, 22 bp, Artificial Sequence
  chemically synthesized
atacgcagtaggttattattac

SEQ ID NO: 16688 - DNA, 22 bp, Artificial Sequence
  chemically synthesized
ttattacatggtaactggctac

SEQ ID NO: 16689 - DNA, 22 bp, Artificial Sequence
  chemically synthesized
ttacatggtaactggctacccc

SEQ ID NO: 16690 - DNA, 22 bp, Artificial Sequence
  chemically synthesized
catggtaactggctaccccaac

SEQ ID NO: 16691 - DNA, 22 bp, Artificial Sequence
  chemically synthesized
gctaccccaactgattaggaaa

SEQ ID NO: 16692 - DNA, 22 bp, Artificial Sequence
  chemically synthesized
ccccaactgattaggaaagaag

SEQ ID NO: 16693 - DNA, 22 bp, Artificial Sequence
  chemically synthesized
attaggaaagaagtaaatttgt

SEQ ID NO: 16694 - DNA, 22 bp, Artificial Sequence
  chemically synthesized
ggaaagaagtaaatttgtttta

SEQ ID NO: 16695 - DNA, 22 bp, Artificial Sequence
  chemically synthesized
gttttataaaaatacatactca

SEQ ID NO: 16696 - DNA, 22 bp, Artificial Sequence
  chemically synthesized
ttttataaaaatacatactcat

SEQ ID NO: 16697 - DNA, 22 bp, Artificial Sequence
  chemically synthesized
tataaaaatacatactcattga

SEQ ID NO: 16698 - DNA, 22 bp, Artificial Sequence
  chemically synthesized
ataaaaatacatactcattgag

SEQ ID NO: 16699 - DNA, 22 bp, Artificial Sequence
  chemically synthesized
taaaaatacatactcattgagg

SEQ ID NO: 16700 - DNA, 22 bp, Artificial Sequence
  chemically synthesized
attgaggtgcatagaataatta

SEQ ID NO: 16701 - DNA, 22 bp, Artificial Sequence
  chemically synthesized
aggtgcatagaataattaagaa

SEQ ID NO: 16702 - DNA, 22 bp, Artificial Sequence
  chemically synthesized
agaaattaaaagacacttgtaa

SEQ ID NO: 16703 - DNA, 22 bp, Artificial Sequence
  chemically synthesized
aaagacacttgtaattttgaat

SEQ ID NO: 16704 - DNA, 22 bp, Artificial Sequence
  chemically synthesized
gtaattttgaatccagtgaata

SEQ ID NO: 16705 - DNA, 22 bp, Artificial Sequence
  chemically synthesized
taattttgaatccagtgaatac

SEQ ID NO: 16706 - DNA, 22 bp, Artificial Sequence
  chemically synthesized
tgaatccagtgaatacccactg

SEQ ID NO: 16707 - DNA, 22 bp, Artificial Sequence
  chemically synthesized
gaatccagtgaatacccactgt

SEQ ID NO: 16708 - DNA, 22 bp, Artificial Sequence
  chemically synthesized
aatccagtgaatacccactgtt

SEQ ID NO: 16709 - DNA, 22 bp, Artificial Sequence
  chemically synthesized
ttaatatttggtatatctcttt

SEQ ID NO: 16710 - DNA, 22 bp, Artificial Sequence
  chemically synthesized
atatttggtatatctctttcta

SEQ ID NO: 16711 - DNA, 22 bp, Artificial Sequence
  chemically synthesized
ggtatatctctttctagtcttt

SEQ ID NO: 16712 - DNA, 22 bp, Artificial Sequence
  chemically synthesized
gtatatctctttctagtctttt

SEQ ID NO: 16713 - DNA, 22 bp, Artificial Sequence
  chemically synthesized
tttctagtctttttttcccttt

SEQ ID NO: 16714 - DNA, 22 bp, Artificial Sequence
  chemically synthesized
tctagtctttttttcccttttg

SEQ ID NO: 16715 - DNA, 22 bp, Artificial Sequence
  chemically synthesized
ctagtctttttttcccttttgc

SEQ ID NO: 16716 - DNA, 22 bp, Artificial Sequence
  chemically synthesized
tagtctttttttcccttttgca

SEQ ID NO: 16717 - DNA, 22 bp, Artificial Sequence
  chemically synthesized
gtctttttttcccttttgcatg

SEQ ID NO: 16718 - DNA, 22 bp, Artificial Sequence
  chemically synthesized
tttttcccttttgcatgtattt

SEQ ID NO: 16719 - DNA, 22 bp, Artificial Sequence
  chemically synthesized
ttttcccttttgcatgtatttt

SEQ ID NO: 16720 - DNA, 22 bp, Artificial Sequence
  chemically synthesized
tttcccttttgcatgtattttc

SEQ ID NO: 16721 - DNA, 22 bp, Artificial Sequence
  chemically synthesized
ttcccttttgcatgtattttct

SEQ ID NO: 16722 - DNA, 22 bp, Artificial Sequence
  chemically synthesized
tcccttttgcatgtattttctt

SEQ ID NO: 16723 - DNA, 22 bp, Artificial Sequence
  chemically synthesized
cccttttgcatgtattttcttt

SEQ ID NO: 16724 - DNA, 22 bp, Artificial Sequence
  chemically synthesized
ccttttgcatgtattttcttta

SEQ ID NO: 16725 - DNA, 22 bp, Artificial Sequence
  chemically synthesized
ttgcatgtattttctttaagac

SEQ ID NO: 16726 - DNA, 22 bp, Artificial Sequence
  chemically synthesized
tgcatgtattttctttaagact

SEQ ID NO: 16727 - DNA, 22 bp, Artificial Sequence
  chemically synthesized
gcatgtattttctttaagactc

SEQ ID NO: 16728 - DNA, 22 bp, Artificial Sequence
  chemically synthesized
catgtattttctttaagactcc

SEQ ID NO: 16729 - DNA, 22 bp, Artificial Sequence
  chemically synthesized
tctttaagactcccacccccac

SEQ ID NO: 16730 - DNA, 22 bp, Artificial Sequence
  chemically synthesized
ctttaagactcccacccccact

SEQ ID NO: 16731 - DNA, 22 bp, Artificial Sequence
  chemically synthesized
tttaagactcccacccccactg

SEQ ID NO: 16732 - DNA, 22 bp, Artificial Sequence
  chemically synthesized
taagactcccacccccactgga

SEQ ID NO: 16733 - DNA, 22 bp, Artificial Sequence
  chemically synthesized
aagactcccacccccactggat

SEQ ID NO: 16734 - DNA, 22 bp, Artificial Sequence
  chemically synthesized
agactcccacccccactggatc

SEQ ID NO: 16735 - DNA, 22 bp, Artificial Sequence
  chemically synthesized
ccacccccactggatcatctct

SEQ ID NO: 16736 - DNA, 22 bp, Artificial Sequence
  chemically synthesized
gatcatctctgcatgttctaat

SEQ ID NO: 16737 - DNA, 22 bp, Artificial Sequence
  chemically synthesized
tgcatgttctaatctgcttttt

SEQ ID NO: 16738 - DNA, 22 bp, Artificial Sequence
  chemically synthesized
catgttctaatctgcttttttc

SEQ ID NO: 16739 - DNA, 22 bp, Artificial Sequence
  chemically synthesized
taatctgcttttttcacagcag

SEQ ID NO: 16740 - DNA, 22 bp, Artificial Sequence
  chemically synthesized
atctgcttttttcacagcagat

SEQ ID NO: 16741 - DNA, 22 bp, Artificial Sequence
  chemically synthesized
cttttttcacagcagattctaa

SEQ ID NO: 16742 - DNA, 22 bp, Artificial Sequence
  chemically synthesized
ttttcacagcagattctaagcc

SEQ ID NO: 16743 - DNA, 22 bp, Artificial Sequence
  chemically synthesized
tttcacagcagattctaagcct

SEQ ID NO: 16744 - DNA, 22 bp, Artificial Sequence
  chemically synthesized
ttcacagcagattctaagcctc

SEQ ID NO: 16745 - DNA, 22 bp, Artificial Sequence
  chemically synthesized
tcacagcagattctaagcctct

SEQ ID NO: 16746 - DNA, 22 bp, Artificial Sequence
  chemically synthesized
cacagcagattctaagcctctt

SEQ ID NO: 16747 - DNA, 22 bp, Artificial Sequence
  chemically synthesized
acagcagattctaagcctcttt

SEQ ID NO: 16748 - DNA, 22 bp, Artificial Sequence
  chemically synthesized
taagcctctttgaatatcaaca

SEQ ID NO: 16749 - DNA, 22 bp, Artificial Sequence
  chemically synthesized
agcctctttgaatatcaacaca

SEQ ID NO: 16750 - DNA, 22 bp, Artificial Sequence
  chemically synthesized
tttgaatatcaacacaaacttc

SEQ ID NO: 16751 - DNA, 22 bp, Artificial Sequence
  chemically synthesized
tgaatatcaacacaaacttcaa

SEQ ID NO: 16752 - DNA, 22 bp, Artificial Sequence
  chemically synthesized
gaatatcaacacaaacttcaac

SEQ ID NO: 16753 - DNA, 22 bp, Artificial Sequence
  chemically synthesized
aatatcaacacaaacttcaaca

SEQ ID NO: 16754 - DNA, 22 bp, Artificial Sequence
  chemically synthesized
caacaacttcatctatagatgc

SEQ ID NO: 16755 - DNA, 22 bp, Artificial Sequence
  chemically synthesized
aacaacttcatctatagatgcc

SEQ ID NO: 16756 - DNA, 22 bp, Artificial Sequence
  chemically synthesized
catctatagatgccaaataata

SEQ ID NO: 16757 - DNA, 22 bp, Artificial Sequence
  chemically synthesized
atctatagatgccaaataataa

SEQ ID NO: 16758 - DNA, 22 bp, Artificial Sequence
  chemically synthesized
tagatgccaaataataaattca

SEQ ID NO: 16759 - DNA, 22 bp, Artificial Sequence
  chemically synthesized
atttttatttacttaaccactt

SEQ ID NO: 16760 - DNA, 22 bp, Artificial Sequence
  chemically synthesized
ttatttacttaaccacttcctt

SEQ ID NO: 16761 - DNA, 22 bp, Artificial Sequence
  chemically synthesized
tatttacttaaccacttccttt

SEQ ID NO: 16762 - DNA, 22 bp, Artificial Sequence
  chemically synthesized
atttacttaaccacttcctttg

SEQ ID NO: 16763 - DNA, 22 bp, Artificial Sequence
  chemically synthesized
tttacttaaccacttcctttgg

SEQ ID NO: 16764 - DNA, 22 bp, Artificial Sequence
  chemically synthesized
acttaaccacttcctttggatg

SEQ ID NO: 16765 - DNA, 22 bp, Artificial Sequence
  chemically synthesized
cttaaccacttcctttggatgc

SEQ ID NO: 16766 - DNA, 22 bp, Artificial Sequence
  chemically synthesized
aaccacttcctttggatgctta

SEQ ID NO: 16767 - DNA, 22 bp, Artificial Sequence
  chemically synthesized
accacttcctttggatgcttag

SEQ ID NO: 16768 - DNA, 22 bp, Artificial Sequence
  chemically synthesized
cctttggatgcttaggtcattc

SEQ ID NO: 16769 - DNA, 22 bp, Artificial Sequence
  chemically synthesized
ctttggatgcttaggtcattct

SEQ ID NO: 16770 - DNA, 22 bp, Artificial Sequence
  chemically synthesized
tggatgcttaggtcattctgat

SEQ ID NO: 16771 - DNA, 22 bp, Artificial Sequence
  chemically synthesized
ggatgcttaggtcattctgatg

SEQ ID NO: 16772 - DNA, 22 bp, Artificial Sequence
  chemically synthesized
gatgcttaggtcattctgatgt

SEQ ID NO: 16773 - DNA, 22 bp, Artificial Sequence
  chemically synthesized
aggtcattctgatgttttgcta

SEQ ID NO: 16774 - DNA, 22 bp, Artificial Sequence
  chemically synthesized
ggtcattctgatgttttgctat

SEQ ID NO: 16775 - DNA, 22 bp, Artificial Sequence
  chemically synthesized
tgatgttttgctattgaaacca

SEQ ID NO: 16776 - DNA, 22 bp, Artificial Sequence
  chemically synthesized
atgttttgctattgaaaccaat

SEQ ID NO: 16777 - DNA, 22 bp, Artificial Sequence
  chemically synthesized
tgctattgaaaccaatgctata

SEQ ID NO: 16778 - DNA, 22 bp, Artificial Sequence
  chemically synthesized
gctattgaaaccaatgctatac

SEQ ID NO: 16779 - DNA, 22 bp, Artificial Sequence
  chemically synthesized
ctattgaaaccaatgctatact

SEQ ID NO: 16780 - DNA, 22 bp, Artificial Sequence
  chemically synthesized
ttgaaaccaatgctatactgaa

SEQ ID NO: 16781 - DNA, 22 bp, Artificial Sequence
  chemically synthesized
aaaccaatgctatactgaacac

SEQ ID NO: 16782 - DNA, 22 bp, Artificial Sequence
  chemically synthesized
tactgaacacttctgtcactaa

SEQ ID NO: 16783 - DNA, 22 bp, Artificial Sequence
  chemically synthesized
aacacttctgtcactaaaactt

SEQ ID NO: 16784 - DNA, 22 bp, Artificial Sequence
  chemically synthesized
ctgtcactaaaactttgcacac

SEQ ID NO: 16785 - DNA, 22 bp, Artificial Sequence
  chemically synthesized
tgtcactaaaactttgcacaca

SEQ ID NO: 16786 - DNA, 22 bp, Artificial Sequence
  chemically synthesized
tcactaaaactttgcacacact

SEQ ID NO: 16787 - DNA, 22 bp, Artificial Sequence
  chemically synthesized
aaactttgcacacactcatgaa

SEQ ID NO: 16788 - DNA, 22 bp, Artificial Sequence
  chemically synthesized
tgcacacactcatgaatagctt

SEQ ID NO: 16789 - DNA, 22 bp, Artificial Sequence
  chemically synthesized
gcacacactcatgaatagcttc

SEQ ID NO: 16790 - DNA, 22 bp, Artificial Sequence
  chemically synthesized
cacacactcatgaatagcttct

SEQ ID NO: 16791 - DNA, 22 bp, Artificial Sequence
  chemically synthesized
atgaatagcttcttaggataaa

SEQ ID NO: 16792 - DNA, 22 bp, Artificial Sequence
  chemically synthesized
cttaggataaatttttagagat

SEQ ID NO: 16793 - DNA, 22 bp, Artificial Sequence
  chemically synthesized
ttaggataaatttttagagatg

SEQ ID NO: 16794 - DNA, 22 bp, Artificial Sequence
  chemically synthesized
aggataaatttttagagatgga

SEQ ID NO: 16795 - DNA, 22 bp, Artificial Sequence
  chemically synthesized
ggataaatttttagagatggat

SEQ ID NO: 16796 - DNA, 22 bp, Artificial Sequence
  chemically synthesized
ttagagatggatttgctaaatc

SEQ ID NO: 16797 - DNA, 22 bp, Artificial Sequence
  chemically synthesized
tagagatggatttgctaaatca

SEQ ID NO: 16798 - DNA, 22 bp, Artificial Sequence
  chemically synthesized
agagatggatttgctaaatcag

SEQ ID NO: 16799 - DNA, 22 bp, Artificial Sequence
  chemically synthesized
gagatggatttgctaaatcaga

SEQ ID NO: 16800 - DNA, 22 bp, Artificial Sequence
  chemically synthesized
gctaaatcagagaccatttttt

SEQ ID NO: 16801 - DNA, 22 bp, Artificial Sequence
  chemically synthesized
ctaaatcagagaccatttttta

SEQ ID NO: 16802 - DNA, 22 bp, Artificial Sequence
  chemically synthesized
aatcagagaccattttttaaaa

SEQ ID NO: 16803 - DNA, 22 bp, Artificial Sequence
  chemically synthesized
tttaaaattaaaaaacaattat

SEQ ID NO: 16804 - DNA, 22 bp, Artificial Sequence
  chemically synthesized
ttaaaattaaaaaacaattatt

SEQ ID NO: 16805 - DNA, 22 bp, Artificial Sequence
  chemically synthesized
taaaattaaaaaacaattattc

SEQ ID NO: 16806 - DNA, 22 bp, Artificial Sequence
  chemically synthesized
aaaattaaaaaacaattattca

SEQ ID NO: 16807 - DNA, 22 bp, Artificial Sequence
  chemically synthesized
aaattaaaaaacaattattcat

SEQ ID NO: 16808 - DNA, 22 bp, Artificial Sequence
  chemically synthesized
aaaaacaattattcatatcgtt

SEQ ID NO: 16809 - DNA, 22 bp, Artificial Sequence
  chemically synthesized
ttcatatcgtttggcatgtaag

SEQ ID NO: 16810 - DNA, 22 bp, Artificial Sequence
  chemically synthesized
atatcgtttggcatgtaagaca

SEQ ID NO: 16811 - DNA, 22 bp, Artificial Sequence
  chemically synthesized
ggcatgtaagacagtaaatttt

SEQ ID NO: 16812 - DNA, 22 bp, Artificial Sequence
  chemically synthesized
gcatgtaagacagtaaattttc

SEQ ID NO: 16813 - DNA, 22 bp, Artificial Sequence
  chemically synthesized
tccttttattttgacaggattc

SEQ ID NO: 16814 - DNA, 22 bp, Artificial Sequence
  chemically synthesized
ccttttattttgacaggattca

SEQ ID NO: 16815 - DNA, 22 bp, Artificial Sequence
  chemically synthesized
cttttattttgacaggattcaa

SEQ ID NO: 16816 - DNA, 22 bp, Artificial Sequence
  chemically synthesized
ttattttgacaggattcaactg

SEQ ID NO: 16817 - DNA, 22 bp, Artificial Sequence
  chemically synthesized
tattttgacaggattcaactgg

SEQ ID NO: 16818 - DNA, 22 bp, Artificial Sequence
  chemically synthesized
attttgacaggattcaactgga

SEQ ID NO: 16819 - DNA, 22 bp, Artificial Sequence
  chemically synthesized
ttttgacaggattcaactggaa

SEQ ID NO: 16820 - DNA, 22 bp, Artificial Sequence
  chemically synthesized
tgacaggattcaactggaagct

SEQ ID NO: 16821 - DNA, 22 bp, Artificial Sequence
  chemically synthesized
gacaggattcaactggaagctt

SEQ ID NO: 16822 - DNA, 22 bp, Artificial Sequence
  chemically synthesized
acaggattcaactggaagcttt

SEQ ID NO: 16823 - DNA, 22 bp, Artificial Sequence
  chemically synthesized
aactggaagctttgtgctgcct

SEQ ID NO: 16824 - DNA, 22 bp, Artificial Sequence
  chemically synthesized
gaagctttgtgctgcctttccg

SEQ ID NO: 16825 - DNA, 22 bp, Artificial Sequence
  chemically synthesized
tgtgctgcctttccggcaagtc

SEQ ID NO: 16826 - DNA, 22 bp, Artificial Sequence
  chemically synthesized
gtgctgcctttccggcaagtca

SEQ ID NO: 16827 - DNA, 22 bp, Artificial Sequence
  chemically synthesized
tgctgcctttccggcaagtcat

SEQ ID NO: 16828 - DNA, 22 bp, Artificial Sequence
  chemically synthesized
cctttccggcaagtcatgtatg

SEQ ID NO: 16829 - DNA, 22 bp, Artificial Sequence
  chemically synthesized
tccggcaagtcatgtatgctcc

SEQ ID NO: 16830 - DNA, 22 bp, Artificial Sequence
  chemically synthesized
ccggcaagtcatgtatgctcca

SEQ ID NO: 16831 - DNA, 22 bp, Artificial Sequence
  chemically synthesized
cggcaagtcatgtatgctccat

SEQ ID NO: 16832 - DNA, 22 bp, Artificial Sequence
  chemically synthesized
catatcccaccacacacataga

SEQ ID NO: 16833 - DNA, 22 bp, Artificial Sequence
  chemically synthesized
tgaagcagatgccaccctgtca

SEQ ID NO: 16834 - DNA, 22 bp, Artificial Sequence
  chemically synthesized
tcatgaacatatttataatcag

SEQ ID NO: 16835 - DNA, 22 bp, Artificial Sequence
  chemically synthesized
ataatcagcgtagatacatgag

SEQ ID NO: 16836 - DNA, 22 bp, Artificial Sequence
  chemically synthesized
taatcagcgtagatacatgaga

SEQ ID NO: 16837 - DNA, 22 bp, Artificial Sequence
  chemically synthesized
acagccttctggagagccactt

SEQ ID NO: 16838 - DNA, 22 bp, Artificial Sequence
  chemically synthesized
ctggagagccacttcagaagaa

SEQ ID NO: 16839 - DNA, 22 bp, Artificial Sequence
  chemically synthesized
tggagagccacttcagaagaag

SEQ ID NO: 16840 - DNA, 22 bp, Artificial Sequence
  chemically synthesized
gagagccacttcagaagaagac

SEQ ID NO: 16841 - DNA, 22 bp, Artificial Sequence
  chemically synthesized
cagaagaagacatggctcagga

SEQ ID NO: 16842 - DNA, 22 bp, Artificial Sequence
  chemically synthesized
agaagaagacatggctcaggat

SEQ ID NO: 16843 - DNA, 22 bp, Artificial Sequence
  chemically synthesized
aggatacgatcatctacactga

SEQ ID NO: 16844 - DNA, 22 bp, Artificial Sequence
  chemically synthesized
cactgacgaaagctttactcct

SEQ ID NO: 16845 - DNA, 22 bp, Artificial Sequence
  chemically synthesized
acgaaagctttactcctgattt

SEQ ID NO: 16846 - DNA, 22 bp, Artificial Sequence
  chemically synthesized
tactcctgatttgtacgtaatg

SEQ ID NO: 16847 - DNA, 22 bp, Artificial Sequence
  chemically synthesized
actcctgatttgtacgtaatgc

SEQ ID NO: 16848 - DNA, 22 bp, Artificial Sequence
  chemically synthesized
ctcctgatttgtacgtaatgct

SEQ ID NO: 16849 - DNA, 22 bp, Artificial Sequence
  chemically synthesized
ctgatttgtacgtaatgctctg

SEQ ID NO: 16850 - DNA, 22 bp, Artificial Sequence
  chemically synthesized
atttgtacgtaatgctctgcct

SEQ ID NO: 16851 - DNA, 22 bp, Artificial Sequence
  chemically synthesized
gtacgtaatgctctgcctgctg

SEQ ID NO: 16852 - DNA, 22 bp, Artificial Sequence
  chemically synthesized
tacgtaatgctctgcctgctgg

SEQ ID NO: 16853 - DNA, 22 bp, Artificial Sequence
  chemically synthesized
tgcctgctggtactgtagtcaa

SEQ ID NO: 16854 - DNA, 22 bp, Artificial Sequence
  chemically synthesized
cctgctggtactgtagtcaagc

SEQ ID NO: 16855 - DNA, 22 bp, Artificial Sequence
  chemically synthesized
ctggtactgtagtcaagcaata

SEQ ID NO: 16856 - DNA, 22 bp, Artificial Sequence
  chemically synthesized
gtactgtagtcaagcaatatga

SEQ ID NO: 16857 - DNA, 22 bp, Artificial Sequence
  chemically synthesized
tagtcaagcaatatgaaattgt

SEQ ID NO: 16858 - DNA, 22 bp, Artificial Sequence
  chemically synthesized
tgtcttttacgaataaaaacaa

SEQ ID NO: 16859 - DNA, 22 bp, Artificial Sequence
  chemically synthesized
ttacgaataaaaacaaaacaga

SEQ ID NO: 16860 - DNA, 22 bp, Artificial Sequence
  chemically synthesized
tacgaataaaaacaaaacagaa

SEQ ID NO: 16861 - DNA, 22 bp, Artificial Sequence
  chemically synthesized
acgaataaaaacaaaacagaag

SEQ ID NO: 16862 - DNA, 22 bp, Artificial Sequence
  chemically synthesized
cgaataaaaacaaaacagaagt

SEQ ID NO: 16863 - DNA, 22 bp, Artificial Sequence
  chemically synthesized
catttaaaaagaaagaaatatt

SEQ ID NO: 16864 - DNA, 22 bp, Artificial Sequence
  chemically synthesized
aaaaagaaagaaatattaccag

SEQ ID NO: 16865 - DNA, 22 bp, Artificial Sequence
  chemically synthesized
aaaagaaagaaatattaccagc

SEQ ID NO: 16866 - DNA, 22 bp, Artificial Sequence
  chemically synthesized
ccagcagaattatgcttgaaga

SEQ ID NO: 16867 - DNA, 22 bp, Artificial Sequence
  chemically synthesized
tgcttgaagaaacatttaatca

SEQ ID NO: 16868 - DNA, 22 bp, Artificial Sequence
  chemically synthesized
gaagaaacatttaatcaagcat

SEQ ID NO: 16869 - DNA, 22 bp, Artificial Sequence
  chemically synthesized
aagaaacatttaatcaagcatt

SEQ ID NO: 16870 - DNA, 22 bp, Artificial Sequence
  chemically synthesized
aatcaagcatttttttcttaaa

SEQ ID NO: 16871 - DNA, 22 bp, Artificial Sequence
  chemically synthesized
atcaagcatttttttcttaaat

SEQ ID NO: 16872 - DNA, 22 bp, Artificial Sequence
  chemically synthesized
ttttcttaaatgttcttctttt

SEQ ID NO: 16873 - DNA, 22 bp, Artificial Sequence
  chemically synthesized
tttcttaaatgttcttcttttt

SEQ ID NO: 16874 - DNA, 22 bp, Artificial Sequence
  chemically synthesized
ttcttaaatgttcttctttttc

SEQ ID NO: 16875 - DNA, 22 bp, Artificial Sequence
  chemically synthesized
tcttaaatgttcttctttttcc

SEQ ID NO: 16876 - DNA, 22 bp, Artificial Sequence
  chemically synthesized
cttaaatgttcttctttttcca

SEQ ID NO: 16877 - DNA, 22 bp, Artificial Sequence
  chemically synthesized
ttaaatgttcttctttttccat

SEQ ID NO: 16878 - DNA, 22 bp, Artificial Sequence
  chemically synthesized
aaatgttcttctttttccatac

SEQ ID NO: 16879 - DNA, 22 bp, Artificial Sequence
  chemically synthesized
aatgttcttctttttccataca

SEQ ID NO: 16880 - DNA, 22 bp, Artificial Sequence
  chemically synthesized
ttctttttccatacaattgtgt

SEQ ID NO: 16881 - DNA, 22 bp, Artificial Sequence
  chemically synthesized
ctttttccatacaattgtgttt

SEQ ID NO: 16882 - DNA, 22 bp, Artificial Sequence
  chemically synthesized
tttttccatacaattgtgttta

SEQ ID NO: 16883 - DNA, 22 bp, Artificial Sequence
  chemically synthesized
tttccatacaattgtgtttacc

SEQ ID NO: 16884 - DNA, 22 bp, Artificial Sequence
  chemically synthesized
ttccatacaattgtgtttaccc

SEQ ID NO: 16885 - DNA, 22 bp, Artificial Sequence
  chemically synthesized
tccatacaattgtgtttaccct

SEQ ID NO: 16886 - DNA, 22 bp, Artificial Sequence
  chemically synthesized
ccatacaattgtgtttacccta

SEQ ID NO: 16887 - DNA, 22 bp, Artificial Sequence
  chemically synthesized
catacaattgtgtttaccctaa

SEQ ID NO: 16888 - DNA, 22 bp, Artificial Sequence
  chemically synthesized
tgtttaccctaaaataggtaag

SEQ ID NO: 16889 - DNA, 22 bp, Artificial Sequence
  chemically synthesized
accctaaaataggtaagattaa

SEQ ID NO: 16890 - DNA, 22 bp, Artificial Sequence
  chemically synthesized
ccctaaaataggtaagattaac

SEQ ID NO: 16891 - DNA, 22 bp, Artificial Sequence
  chemically synthesized
aaataggtaagattaaccctta

SEQ ID NO: 16892 - DNA, 22 bp, Artificial Sequence
  chemically synthesized
acccttaaagtaaatatttaac

SEQ ID NO: 16893 - DNA, 22 bp, Artificial Sequence
  chemically synthesized
aaagtaaatatttaactatttg

SEQ ID NO: 16894 - DNA, 22 bp, Artificial Sequence
  chemically synthesized
aagtaaatatttaactatttgt

SEQ ID NO: 16895 - DNA, 22 bp, Artificial Sequence
  chemically synthesized
aactatttgtttaataaatata

SEQ ID NO: 16896 - DNA, 22 bp, Artificial Sequence
  chemically synthesized
actatttgtttaataaatatat

SEQ ID NO: 16897 - DNA, 22 bp, Artificial Sequence
  chemically synthesized
tttgtttaataaatatatattg

SEQ ID NO: 16898 - DNA, 22 bp, Artificial Sequence
  chemically synthesized
gtttaataaatatatattgagc

SEQ ID NO: 16899 - DNA, 22 bp, Artificial Sequence
  chemically synthesized
tttaataaatatatattgagct

SEQ ID NO: 16900 - DNA, 22 bp, Artificial Sequence
  chemically synthesized
aataaatatatattgagctcct

SEQ ID NO: 16901 - DNA, 22 bp, Artificial Sequence
  chemically synthesized
ataaatatatattgagctccta

SEQ ID NO: 16902 - DNA, 22 bp, Artificial Sequence
  chemically synthesized
agctcctaggcactgttctagg

SEQ ID NO: 16903 - DNA, 22 bp, Artificial Sequence
  chemically synthesized
ctaggcactgttctaggtaccg

SEQ ID NO: 16904 - DNA, 22 bp, Artificial Sequence
  chemically synthesized
ggcactgttctaggtaccgggc

SEQ ID NO: 16905 - DNA, 22 bp, Artificial Sequence
  chemically synthesized
ttctaggtaccgggcttaatag

SEQ ID NO: 16906 - DNA, 22 bp, Artificial Sequence
  chemically synthesized
taggtaccgggcttaatagtgg

SEQ ID NO: 16907 - DNA, 22 bp, Artificial Sequence
  chemically synthesized
ggtaccgggcttaatagtggcc

SEQ ID NO: 16908 - DNA, 22 bp, Artificial Sequence
  chemically synthesized
aatagtggccaaccagacagcc

SEQ ID NO: 16909 - DNA, 22 bp, Artificial Sequence
  chemically synthesized
atagtggccaaccagacagccc

SEQ ID NO: 16910 - DNA, 22 bp, Artificial Sequence
  chemically synthesized
cattgtgtatagtctattatgt

SEQ ID NO: 16911 - DNA, 22 bp, Artificial Sequence
  chemically synthesized
tgtatagtctattatgtaacag

SEQ ID NO: 16912 - DNA, 22 bp, Artificial Sequence
  chemically synthesized
ttatgtaacagttattgaatgg

SEQ ID NO: 16913 - DNA, 22 bp, Artificial Sequence
  chemically synthesized
tgtaacagttattgaatggact

SEQ ID NO: 16914 - DNA, 22 bp, Artificial Sequence
  chemically synthesized
ttgaatggacttattaacaaaa

SEQ ID NO: 16915 - DNA, 22 bp, Artificial Sequence
  chemically synthesized
aatggacttattaacaaaacca

SEQ ID NO: 16916 - DNA, 22 bp, Artificial Sequence
  chemically synthesized
attaacaaaaccaaagaagtaa

SEQ ID NO: 16917 - DNA, 22 bp, Artificial Sequence
  chemically synthesized
ttaacaaaaccaaagaagtaat

SEQ ID NO: 16918 - DNA, 22 bp, Artificial Sequence
  chemically synthesized
acaaaaccaaagaagtaattct

SEQ ID NO: 16919 - DNA, 22 bp, Artificial Sequence
  chemically synthesized
taagtcttttttttcttgacat

SEQ ID NO: 16920 - DNA, 22 bp, Artificial Sequence
  chemically synthesized
agtcttttttttcttgacatat

SEQ ID NO: 16921 - DNA, 22 bp, Artificial Sequence
  chemically synthesized
ttttttcttgacatatgaatat

SEQ ID NO: 16922 - DNA, 22 bp, Artificial Sequence
  chemically synthesized
tttttcttgacatatgaatata

SEQ ID NO: 16923 - DNA, 22 bp, Artificial Sequence
  chemically synthesized
ttttcttgacatatgaatataa

SEQ ID NO: 16924 - DNA, 22 bp, Artificial Sequence
  chemically synthesized
tttcttgacatatgaatataaa

SEQ ID NO: 16925 - DNA, 22 bp, Artificial Sequence
  chemically synthesized
ttcttgacatatgaatataaaa

SEQ ID NO: 16926 - DNA, 22 bp, Artificial Sequence
  chemically synthesized
tcttgacatatgaatataaaat

SEQ ID NO: 16927 - DNA, 22 bp, Artificial Sequence
  chemically synthesized
cttgacatatgaatataaaata

SEQ ID NO: 16928 - DNA, 22 bp, Artificial Sequence
  chemically synthesized
ttgacatatgaatataaaatac

SEQ ID NO: 16929 - DNA, 22 bp, Artificial Sequence
  chemically synthesized
gacatatgaatataaaatacag

SEQ ID NO: 16930 - DNA, 22 bp, Artificial Sequence
  chemically synthesized
acatatgaatataaaatacagc

SEQ ID NO: 16931 - DNA, 22 bp, Artificial Sequence
  chemically synthesized
ttaaaatatattaatggaacat

SEQ ID NO: 16932 - DNA, 22 bp, Artificial Sequence
  chemically synthesized
aaatatattaatggaacatttt

SEQ ID NO: 16933 - DNA, 22 bp, Artificial Sequence
  chemically synthesized
atggaacatttttttactttgc

SEQ ID NO: 16934 - DNA, 22 bp, Artificial Sequence
  chemically synthesized
ttttactttgcattttatattg

SEQ ID NO: 16935 - DNA, 22 bp, Artificial Sequence
  chemically synthesized
tttactttgcattttatattgt

SEQ ID NO: 16936 - DNA, 22 bp, Artificial Sequence
  chemically synthesized
ttactttgcattttatattgtt

SEQ ID NO: 16937 - DNA, 22 bp, Artificial Sequence
  chemically synthesized
tactttgcattttatattgtta

SEQ ID NO: 16938 - DNA, 22 bp, Artificial Sequence
  chemically synthesized
actttgcattttatattgttat

SEQ ID NO: 16939 - DNA, 22 bp, Artificial Sequence
  chemically synthesized
ctttgcattttatattgttatt

SEQ ID NO: 16940 - DNA, 22 bp, Artificial Sequence
  chemically synthesized
tgcattttatattgttattcac

SEQ ID NO: 16941 - DNA, 22 bp, Artificial Sequence
  chemically synthesized
gcattttatattgttattcact

SEQ ID NO: 16942 - DNA, 22 bp, Artificial Sequence
  chemically synthesized
cattttatattgttattcactt

SEQ ID NO: 16943 - DNA, 22 bp, Artificial Sequence
  chemically synthesized
tatattgttattcacttcttat

SEQ ID NO: 16944 - DNA, 22 bp, Artificial Sequence
  chemically synthesized
atattgttattcacttcttatt

SEQ ID NO: 16945 - DNA, 22 bp, Artificial Sequence
  chemically synthesized
tattgttattcacttcttattt

SEQ ID NO: 16946 - DNA, 22 bp, Artificial Sequence
  chemically synthesized
ttattcacttcttatttttttt

SEQ ID NO: 16947 - DNA, 22 bp, Artificial Sequence
  chemically synthesized
ttcacttcttatttttttttaa

SEQ ID NO: 16948 - DNA, 22 bp, Artificial Sequence
  chemically synthesized
acttcttatttttttttaaaaa

SEQ ID NO: 16949 - DNA, 22 bp, Artificial Sequence
  chemically synthesized
cttatttttttttaaaaaaaaa

SEQ ID NO: 16950 - DNA, 22 bp, Artificial Sequence
  chemically synthesized
ttatttttttttaaaaaaaaaa

SEQ ID NO: 16951 - DNA, 22 bp, Artificial Sequence
  chemically synthesized
atttttttttaaaaaaaaaagc

SEQ ID NO: 16952 - DNA, 22 bp, Artificial Sequence
  chemically synthesized
tttttttttaaaaaaaaaagcc

SEQ ID NO: 16953 - DNA, 22 bp, Artificial Sequence
  chemically synthesized
ttttttaaaaaaaaaagcctga

SEQ ID NO: 16954 - DNA, 22 bp, Artificial Sequence
  chemically synthesized
tttttaaaaaaaaaagcctgaa

SEQ ID NO: 16955 - DNA, 22 bp, Artificial Sequence
  chemically synthesized
ttttaaaaaaaaaagcctgaac

SEQ ID NO: 16956 - DNA, 22 bp, Artificial Sequence
  chemically synthesized
tttaaaaaaaaaagcctgaaca

SEQ ID NO: 16957 - DNA, 22 bp, Artificial Sequence
  chemically synthesized
ttaaaaaaaaaagcctgaacag

SEQ ID NO: 16958 - DNA, 22 bp, Artificial Sequence
  chemically synthesized
taaaaaaaaaagcctgaacagt

SEQ ID NO: 16959 - DNA, 22 bp, Artificial Sequence
  chemically synthesized
aaaaaaaaaagcctgaacagta

SEQ ID NO: 16960 - DNA, 22 bp, Artificial Sequence
  chemically synthesized
aaaaaaaaagcctgaacagtaa

SEQ ID NO: 16961 - DNA, 22 bp, Artificial Sequence
  chemically synthesized
aacagtaaattcaaaaggaaaa

SEQ ID NO: 16962 - DNA, 22 bp, Artificial Sequence
  chemically synthesized
aaaaggaaaagtaatgataatt

SEQ ID NO: 16963 - DNA, 22 bp, Artificial Sequence
  chemically synthesized
attgttgagcatggacccaact

SEQ ID NO: 16964 - DNA, 22 bp, Artificial Sequence
  chemically synthesized
ttgagcatggacccaacttgaa

SEQ ID NO: 16965 - DNA, 22 bp, Artificial Sequence
  chemically synthesized
agcatggacccaacttgaaaaa

SEQ ID NO: 16966 - DNA, 22 bp, Artificial Sequence
  chemically synthesized
gaaaaaaaaaatgatgatgata

SEQ ID NO: 16967 - DNA, 22 bp, Artificial Sequence
  chemically synthesized
aaaaaaaaaatgatgatgataa

SEQ ID NO: 16968 - DNA, 22 bp, Artificial Sequence
  chemically synthesized
taatcctaaaaccctaagtaaa

SEQ ID NO: 16969 - DNA, 22 bp, Artificial Sequence
  chemically synthesized
aaaccctaagtaaacacttaaa

SEQ ID NO: 16970 - DNA, 22 bp, Artificial Sequence
  chemically synthesized
agtaaacacttaaaagatgttc

SEQ ID NO: 16971 - DNA, 22 bp, Artificial Sequence
  chemically synthesized
aaaagatgttctgaaatcagga

SEQ ID NO: 16972 - DNA, 22 bp, Artificial Sequence
  chemically synthesized
aaagatgttctgaaatcaggaa

SEQ ID NO: 16973 - DNA, 22 bp, Artificial Sequence
  chemically synthesized
tgaaatcaggaaaagaattata

SEQ ID NO: 16974 - DNA, 22 bp, Artificial Sequence
  chemically synthesized
aaatcaggaaaagaattatagt

SEQ ID NO: 16975 - DNA, 22 bp, Artificial Sequence
  chemically synthesized
tagtatacttttgtgtttctct

SEQ ID NO: 16976 - DNA, 22 bp, Artificial Sequence
  chemically synthesized
ttgtgtttctcttttatcagtt

SEQ ID NO: 16977 - DNA, 22 bp, Artificial Sequence
  chemically synthesized
tgtgtttctcttttatcagttg

SEQ ID NO: 16978 - DNA, 22 bp, Artificial Sequence
  chemically synthesized
gtgtttctcttttatcagttga

SEQ ID NO: 16979 - DNA, 22 bp, Artificial Sequence
  chemically synthesized
tgtttctcttttatcagttgaa

SEQ ID NO: 16980 - DNA, 22 bp, Artificial Sequence
  chemically synthesized
ctcttttatcagttgaaaaaag

SEQ ID NO: 16981 - DNA, 22 bp, Artificial Sequence
  chemically synthesized
tcttttatcagttgaaaaaagg

SEQ ID NO: 16982 - DNA, 22 bp, Artificial Sequence
  chemically synthesized
ttttatcagttgaaaaaaggca

SEQ ID NO: 16983 - DNA, 22 bp, Artificial Sequence
  chemically synthesized
ttatcagttgaaaaaaggcaca

SEQ ID NO: 16984 - DNA, 22 bp, Artificial Sequence
  chemically synthesized
tatcagttgaaaaaaggcacag

SEQ ID NO: 16985 - DNA, 22 bp, Artificial Sequence
  chemically synthesized
atcagttgaaaaaaggcacagt

SEQ ID NO: 16986 - DNA, 22 bp, Artificial Sequence
  chemically synthesized
tcagttgaaaaaaggcacagta

SEQ ID NO: 16987 - DNA, 22 bp, Artificial Sequence
  chemically synthesized
aaaaaaggcacagtagctcatg

SEQ ID NO: 16988 - DNA, 22 bp, Artificial Sequence
  chemically synthesized
atgcctgtaagaacagagcttt

SEQ ID NO: 16989 - DNA, 22 bp, Artificial Sequence
  chemically synthesized
taagaacagagctttgggagtg

SEQ ID NO: 16990 - DNA, 22 bp, Artificial Sequence
  chemically synthesized
tgggagtgcaaggcaggcggat

SEQ ID NO: 16991 - DNA, 22 bp, Artificial Sequence
  chemically synthesized
gggagtgcaaggcaggcggatc

SEQ ID NO: 16992 - DNA, 22 bp, Artificial Sequence
  chemically synthesized
ggagtgcaaggcaggcggatca

SEQ ID NO: 16993 - DNA, 22 bp, Artificial Sequence
  chemically synthesized
gaggccaggagttccagaccag

SEQ ID NO: 16994 - DNA, 22 bp, Artificial Sequence
  chemically synthesized
aggccaggagttccagaccagc

SEQ ID NO: 16995 - DNA, 22 bp, Artificial Sequence
  chemically synthesized
cagaccagcctgggcaacatag

SEQ ID NO: 16996 - DNA, 22 bp, Artificial Sequence
  chemically synthesized
ggcaacatagtgaaaccccatc

SEQ ID NO: 16997 - DNA, 22 bp, Artificial Sequence
  chemically synthesized
tacaaaaaataaaaaagaatta

SEQ ID NO: 16998 - DNA, 22 bp, Artificial Sequence
  chemically synthesized
caaaaaataaaaaagaattatt

SEQ ID NO: 16999 - DNA, 22 bp, Artificial Sequence
  chemically synthesized
ttggaatgtgtttctgtgtgcc

SEQ ID NO: 17000 - DNA, 22 bp, Artificial Sequence
  chemically synthesized
gaatgtgtttctgtgtgcctgt

SEQ ID NO: 17001 - DNA, 22 bp, Artificial Sequence
  chemically synthesized
ctgtgtgcctgtaatcctagct

SEQ ID NO: 17002 - DNA, 22 bp, Artificial Sequence
  chemically synthesized
tgtgtgcctgtaatcctagcta

SEQ ID NO: 17003 - DNA, 22 bp, Artificial Sequence
  chemically synthesized
tgtgcctgtaatcctagctatt

SEQ ID NO: 17004 - DNA, 22 bp, Artificial Sequence
  chemically synthesized
taatcctagctattccgaaagc

SEQ ID NO: 17005 - DNA, 22 bp, Artificial Sequence
  chemically synthesized
gctattccgaaagctgaggcag

SEQ ID NO: 17006 - DNA, 22 bp, Artificial Sequence
  chemically synthesized
ttccgaaagctgaggcaggagg

SEQ ID NO: 17007 - DNA, 22 bp, Artificial Sequence
  chemically synthesized
cgaaagctgaggcaggaggatc

SEQ ID NO: 17008 - DNA, 22 bp, Artificial Sequence
  chemically synthesized
aggcaggaggatcttttgagcc

SEQ ID NO: 17009 - DNA, 22 bp, Artificial Sequence
  chemically synthesized
ttgagcccaggagtttgaggtt

SEQ ID NO: 17010 - DNA, 22 bp, Artificial Sequence
  chemically synthesized
tgagcccaggagtttgaggtta

SEQ ID NO: 17011 - DNA, 22 bp, Artificial Sequence
  chemically synthesized
gagcccaggagtttgaggttac

SEQ ID NO: 17012 - DNA, 22 bp, Artificial Sequence
  chemically synthesized
agcccaggagtttgaggttaca

SEQ ID NO: 17013 - DNA, 22 bp, Artificial Sequence
  chemically synthesized
gaggttacagggagttatgatg

SEQ ID NO: 17014 - DNA, 22 bp, Artificial Sequence
  chemically synthesized
aggttacagggagttatgatgt

SEQ ID NO: 17015 - DNA, 22 bp, Artificial Sequence
  chemically synthesized
cagggagttatgatgtgccagt

SEQ ID NO: 17016 - DNA, 22 bp, Artificial Sequence
  chemically synthesized
tgatgtgccagtgtactccagc

SEQ ID NO: 17017 - DNA, 22 bp, Artificial Sequence
  chemically synthesized
cagcctggggaacaccgagact

SEQ ID NO: 17018 - DNA, 22 bp, Artificial Sequence
  chemically synthesized
gggaacaccgagactctgtctt

SEQ ID NO: 17019 - DNA, 22 bp, Artificial Sequence
  chemically synthesized
tgtcttatttaaaaaaaaaaaa

SEQ ID NO: 17020 - DNA, 22 bp, Artificial Sequence
  chemically synthesized
tcttatttaaaaaaaaaaaaaa

SEQ ID NO: 17021 - DNA, 22 bp, Artificial Sequence
  chemically synthesized
atttaaaaaaaaaaaaaaaaaa

SEQ ID NO: 17022 - DNA, 22 bp, Artificial Sequence
  chemically synthesized
tttaaaaaaaaaaaaaaaaaaa

SEQ ID NO: 17023 - DNA, 22 bp, Artificial Sequence
  chemically synthesized
aaaaaaaaaaaaaaaaaaatgc

SEQ ID NO: 17024 - DNA, 22 bp, Artificial Sequence
  chemically synthesized
aaaaaaaaaaaaaaaaaatgct

SEQ ID NO: 17025 - DNA, 22 bp, Artificial Sequence
  chemically synthesized
gcaataatgcctggcacataga

SEQ ID NO: 17026 - DNA, 22 bp, Artificial Sequence
  chemically synthesized
caataatgcctggcacatagaa

SEQ ID NO: 17027 - DNA, 22 bp, Artificial Sequence
  chemically synthesized
gcacatagaaggtaacagtaag

SEQ ID NO: 17028 - DNA, 22 bp, Artificial Sequence
  chemically synthesized
actgtaataacccaggtctaag

SEQ ID NO: 17029 - DNA, 22 bp, Artificial Sequence
  chemically synthesized
taataacccaggtctaagtgtg

SEQ ID NO: 17030 - DNA, 22 bp, Artificial Sequence
  chemically synthesized
agtgtgtaaggcaatagaaaaa

SEQ ID NO: 17031 - DNA, 22 bp, Artificial Sequence
  chemically synthesized
gggcaaataagcctgacctatg

SEQ ID NO: 17032 - DNA, 22 bp, Artificial Sequence
  chemically synthesized
acctatgtatctacagaatcag

SEQ ID NO: 17033 - DNA, 22 bp, Artificial Sequence
  chemically synthesized
tgtatctacagaatcagtttga

SEQ ID NO: 17034 - DNA, 22 bp, Artificial Sequence
  chemically synthesized
cagaatcagtttgagcttaggt

SEQ ID NO: 17035 - DNA, 22 bp, Artificial Sequence
  chemically synthesized
gagcttaggtaacagacctgtg

SEQ ID NO: 17036 - DNA, 22 bp, Artificial Sequence
  chemically synthesized
agcttaggtaacagacctgtgg

SEQ ID NO: 17037 - DNA, 22 bp, Artificial Sequence
  chemically synthesized
aggtaacagacctgtggagcac

SEQ ID NO: 17038 - DNA, 22 bp, Artificial Sequence
  chemically synthesized
ggtaacagacctgtggagcacc

SEQ ID NO: 17039 - DNA, 22 bp, Artificial Sequence
  chemically synthesized
tggagcaccagtaattacacag

SEQ ID NO: 17040 - DNA, 22 bp, Artificial Sequence
  chemically synthesized
cacagtaagtgttaaccaaaag

SEQ ID NO: 17041 - DNA, 22 bp, Artificial Sequence
  chemically synthesized
accaaaagcatagaataggaat

SEQ ID NO: 17042 - DNA, 22 bp, Artificial Sequence
  chemically synthesized
gttcaagggacccccagcctta

SEQ ID NO: 17043 - DNA, 22 bp, Artificial Sequence
  chemically synthesized
ttcaagggacccccagccttat

SEQ ID NO: 17044 - DNA, 22 bp, Artificial Sequence
  chemically synthesized
aagggacccccagccttataca

SEQ ID NO: 17045 - DNA, 22 bp, Artificial Sequence
  chemically synthesized
atacatctcaaggtgcagaaag

SEQ ID NO: 17046 - DNA, 22 bp, Artificial Sequence
  chemically synthesized
tacatctcaaggtgcagaaaga

SEQ ID NO: 17047 - DNA, 22 bp, Artificial Sequence
  chemically synthesized
aaggtgcagaaagatgacttaa

SEQ ID NO: 17048 - DNA, 22 bp, Artificial Sequence
  chemically synthesized
aatataggacccattttttcct

SEQ ID NO: 17049 - DNA, 22 bp, Artificial Sequence
  chemically synthesized
atataggacccattttttccta

SEQ ID NO: 17050 - DNA, 22 bp, Artificial Sequence
  chemically synthesized
tttcctagttctccagagtttt

SEQ ID NO: 17051 - DNA, 22 bp, Artificial Sequence
  chemically synthesized
ttcctagttctccagagttttt

SEQ ID NO: 17052 - DNA, 22 bp, Artificial Sequence
  chemically synthesized
tcctagttctccagagttttta

SEQ ID NO: 17053 - DNA, 22 bp, Artificial Sequence
  chemically synthesized
cctagttctccagagtttttat

SEQ ID NO: 17054 - DNA, 22 bp, Artificial Sequence
  chemically synthesized
ctagttctccagagtttttatt

SEQ ID NO: 17055 - DNA, 22 bp, Artificial Sequence
  chemically synthesized
gttctccagagtttttattggt

SEQ ID NO: 17056 - DNA, 22 bp, Artificial Sequence
  chemically synthesized
tccagagtttttattggttctt

SEQ ID NO: 17057 - DNA, 22 bp, Artificial Sequence
  chemically synthesized
cagagtttttattggttcttga

SEQ ID NO: 17058 - DNA, 22 bp, Artificial Sequence
  chemically synthesized
ttattggttcttgagaaagtag

SEQ ID NO: 17059 - DNA, 22 bp, Artificial Sequence
  chemically synthesized
tattggttcttgagaaagtagt

SEQ ID NO: 17060 - DNA, 22 bp, Artificial Sequence
  chemically synthesized
attggttcttgagaaagtagta

SEQ ID NO: 17061 - DNA, 22 bp, Artificial Sequence
  chemically synthesized
ttggttcttgagaaagtagtag

SEQ ID NO: 17062 - DNA, 22 bp, Artificial Sequence
  chemically synthesized
gttcttgagaaagtagtagggg

SEQ ID NO: 17063 - DNA, 22 bp, Artificial Sequence
  chemically synthesized
ttgagaaagtagtaggggaatg

SEQ ID NO: 17064 - DNA, 22 bp, Artificial Sequence
  chemically synthesized
gagaaagtagtaggggaatgtt

SEQ ID NO: 17065 - DNA, 22 bp, Artificial Sequence
  chemically synthesized
agaaagtagtaggggaatgttt

SEQ ID NO: 17066 - DNA, 22 bp, Artificial Sequence
  chemically synthesized
tagaaaatgaattggtccaact

SEQ ID NO: 17067 - DNA, 22 bp, Artificial Sequence
  chemically synthesized
agaaaatgaattggtccaactg

SEQ ID NO: 17068 - DNA, 22 bp, Artificial Sequence
  chemically synthesized
gaaaatgaattggtccaactga

SEQ ID NO: 17069 - DNA, 22 bp, Artificial Sequence
  chemically synthesized
gtccaactgaaattacatgtca

SEQ ID NO: 17070 - DNA, 22 bp, Artificial Sequence
  chemically synthesized
aaattacatgtcagtaagtttt

SEQ ID NO: 17071 - DNA, 22 bp, Artificial Sequence
  chemically synthesized
catgtcagtaagtttttatata

SEQ ID NO: 17072 - DNA, 22 bp, Artificial Sequence
  chemically synthesized
ttatatattggtaaattttagt

SEQ ID NO: 17073 - DNA, 22 bp, Artificial Sequence
  chemically synthesized
tatatattggtaaattttagta

SEQ ID NO: 17074 - DNA, 22 bp, Artificial Sequence
  chemically synthesized
atatattggtaaattttagtag

SEQ ID NO: 17075 - DNA, 22 bp, Artificial Sequence
  chemically synthesized
tatattggtaaattttagtaga

SEQ ID NO: 17076 - DNA, 22 bp, Artificial Sequence
  chemically synthesized
gtaaattttagtagacatgtag

SEQ ID NO: 17077 - DNA, 22 bp, Artificial Sequence
  chemically synthesized
tagtagacatgtagaagttttc

SEQ ID NO: 17078 - DNA, 22 bp, Artificial Sequence
  chemically synthesized
agtagacatgtagaagttttct

SEQ ID NO: 17079 - DNA, 22 bp, Artificial Sequence
  chemically synthesized
gtagacatgtagaagttttcta

SEQ ID NO: 17080 - DNA, 22 bp, Artificial Sequence
  chemically synthesized
tctaattaatctgtgccttgaa

SEQ ID NO: 17081 - DNA, 22 bp, Artificial Sequence
  chemically synthesized
ctaattaatctgtgccttgaaa

SEQ ID NO: 17082 - DNA, 22 bp, Artificial Sequence
  chemically synthesized
taattaatctgtgccttgaaac

SEQ ID NO: 17083 - DNA, 22 bp, Artificial Sequence
  chemically synthesized
attaatctgtgccttgaaacat

SEQ ID NO: 17084 - DNA, 22 bp, Artificial Sequence
  chemically synthesized
atctgtgccttgaaacattttc

SEQ ID NO: 17085 - DNA, 22 bp, Artificial Sequence
  chemically synthesized
tgccttgaaacattttcttttt

SEQ ID NO: 17086 - DNA, 22 bp, Artificial Sequence
  chemically synthesized
gaaacattttcttttttcctaa

SEQ ID NO: 17087 - DNA, 22 bp, Artificial Sequence
  chemically synthesized
aaacattttcttttttcctaaa

SEQ ID NO: 17088 - DNA, 22 bp, Artificial Sequence
  chemically synthesized
tcttttttcctaaagtgcttag

SEQ ID NO: 17089 - DNA, 22 bp, Artificial Sequence
  chemically synthesized
cttttttcctaaagtgcttagt

SEQ ID NO: 17090 - DNA, 22 bp, Artificial Sequence
  chemically synthesized
ttttttcctaaagtgcttagta

SEQ ID NO: 17091 - DNA, 22 bp, Artificial Sequence
  chemically synthesized
ttttcctaaagtgcttagtatt

SEQ ID NO: 17092 - DNA, 22 bp, Artificial Sequence
  chemically synthesized
tttcctaaagtgcttagtattt

SEQ ID NO: 17093 - DNA, 22 bp, Artificial Sequence
  chemically synthesized
ttcctaaagtgcttagtatttt

SEQ ID NO: 17094 - DNA, 22 bp, Artificial Sequence
  chemically synthesized
tcctaaagtgcttagtattttt

SEQ ID NO: 17095 - DNA, 22 bp, Artificial Sequence
  chemically synthesized
cctaaagtgcttagtatttttt

SEQ ID NO: 17096 - DNA, 22 bp, Artificial Sequence
  chemically synthesized
ctaaagtgcttagtattttttc

SEQ ID NO: 17097 - DNA, 22 bp, Artificial Sequence
  chemically synthesized
aagtgcttagtattttttccgt

SEQ ID NO: 17098 - DNA, 22 bp, Artificial Sequence
  chemically synthesized
agtattttttccgttttttgat

SEQ ID NO: 17099 - DNA, 22 bp, Artificial Sequence
  chemically synthesized
gtattttttccgttttttgatt

SEQ ID NO: 17100 - DNA, 22 bp, Artificial Sequence
  chemically synthesized
tttccgttttttgattggttac

SEQ ID NO: 17101 - DNA, 22 bp, Artificial Sequence
  chemically synthesized
ttccgttttttgattggttact

SEQ ID NO: 17102 - DNA, 22 bp, Artificial Sequence
  chemically synthesized
tccgttttttgattggttactt

SEQ ID NO: 17103 - DNA, 22 bp, Artificial Sequence
  chemically synthesized
ccgttttttgattggttacttg

SEQ ID NO: 17104 - DNA, 22 bp, Artificial Sequence
  chemically synthesized
cgttttttgattggttacttgg

SEQ ID NO: 17105 - DNA, 22 bp, Artificial Sequence
  chemically synthesized
tttgattggttacttgggagct

SEQ ID NO: 17106 - DNA, 22 bp, Artificial Sequence
  chemically synthesized
ttgattggttacttgggagctt

SEQ ID NO: 17107 - DNA, 22 bp, Artificial Sequence
  chemically synthesized
tgattggttacttgggagcttt

SEQ ID NO: 17108 - DNA, 22 bp, Artificial Sequence
  chemically synthesized
gattggttacttgggagctttt

SEQ ID NO: 17109 - DNA, 22 bp, Artificial Sequence
  chemically synthesized
attggttacttgggagcttttt

SEQ ID NO: 17110 - DNA, 22 bp, Artificial Sequence
  chemically synthesized
gttacttgggagcttttttgag

SEQ ID NO: 17111 - DNA, 22 bp, Artificial Sequence
  chemically synthesized
cttgggagcttttttgaggaaa

SEQ ID NO: 17112 - DNA, 22 bp, Artificial Sequence
  chemically synthesized
gggagcttttttgaggaaattt

SEQ ID NO: 17113 - DNA, 22 bp, Artificial Sequence
  chemically synthesized
ggagcttttttgaggaaattta

SEQ ID NO: 17114 - DNA, 22 bp, Artificial Sequence
  chemically synthesized
ttttgaggaaatttagtgaact

SEQ ID NO: 17115 - DNA, 22 bp, Artificial Sequence
  chemically synthesized
tttgaggaaatttagtgaactg

SEQ ID NO: 17116 - DNA, 22 bp, Artificial Sequence
  chemically synthesized
ttgaggaaatttagtgaactgc

SEQ ID NO: 17117 - DNA, 22 bp, Artificial Sequence
  chemically synthesized
tgaggaaatttagtgaactgca

SEQ ID NO: 17118 - DNA, 22 bp, Artificial Sequence
  chemically synthesized
gaggaaatttagtgaactgcag

SEQ ID NO: 17119 - DNA, 22 bp, Artificial Sequence
  chemically synthesized
aggaaatttagtgaactgcaga

SEQ ID NO: 17120 - DNA, 22 bp, Artificial Sequence
  chemically synthesized
agtgaactgcagaatgggtttg

SEQ ID NO: 17121 - DNA, 22 bp, Artificial Sequence
  chemically synthesized
gtgaactgcagaatgggtttgc

SEQ ID NO: 17122 - DNA, 22 bp, Artificial Sequence
  chemically synthesized
cagaatgggtttgcaaccattt

SEQ ID NO: 17123 - DNA, 22 bp, Artificial Sequence
  chemically synthesized
gcaaccatttggtatttttgtt

SEQ ID NO: 17124 - DNA, 22 bp, Artificial Sequence
  chemically synthesized
caaccatttggtatttttgttt

SEQ ID NO: 17125 - DNA, 22 bp, Artificial Sequence
  chemically synthesized
ggtatttttgttttgtttttta

SEQ ID NO: 17126 - DNA, 22 bp, Artificial Sequence
  chemically synthesized
gtatttttgttttgttttttag

SEQ ID NO: 17127 - DNA, 22 bp, Artificial Sequence
  chemically synthesized
ttgttttgttttttagaggatg

SEQ ID NO: 17128 - DNA, 22 bp, Artificial Sequence
  chemically synthesized
tgttttgttttttagaggatgt

SEQ ID NO: 17129 - DNA, 22 bp, Artificial Sequence
  chemically synthesized
gttttgttttttagaggatgta

SEQ ID NO: 17130 - DNA, 22 bp, Artificial Sequence
  chemically synthesized
ttttgttttttagaggatgtat

SEQ ID NO: 17131 - DNA, 22 bp, Artificial Sequence
  chemically synthesized
tgttttttagaggatgtatgtg

SEQ ID NO: 17132 - DNA, 22 bp, Artificial Sequence
  chemically synthesized
gttttttagaggatgtatgtgt

SEQ ID NO: 17133 - DNA, 22 bp, Artificial Sequence
  chemically synthesized
ttttttagaggatgtatgtgta

SEQ ID NO: 17134 - DNA, 22 bp, Artificial Sequence
  chemically synthesized
tttagaggatgtatgtgtattt

SEQ ID NO: 17135 - DNA, 22 bp, Artificial Sequence
  chemically synthesized
ttagaggatgtatgtgtatttt

SEQ ID NO: 17136 - DNA, 22 bp, Artificial Sequence
  chemically synthesized
tagaggatgtatgtgtatttta

SEQ ID NO: 17137 - DNA, 22 bp, Artificial Sequence
  chemically synthesized
agaggatgtatgtgtattttaa

SEQ ID NO: 17138 - DNA, 22 bp, Artificial Sequence
  chemically synthesized
gaggatgtatgtgtattttaac

SEQ ID NO: 17139 - DNA, 22 bp, Artificial Sequence
  chemically synthesized
taacatttcttaatcattttta

SEQ ID NO: 17140 - DNA, 22 bp, Artificial Sequence
  chemically synthesized
aacatttcttaatcatttttag

SEQ ID NO: 17141 - DNA, 22 bp, Artificial Sequence
  chemically synthesized
acatttcttaatcatttttagc

SEQ ID NO: 17142 - DNA, 22 bp, Artificial Sequence
  chemically synthesized
cttaatcatttttagccagcta

SEQ ID NO: 17143 - DNA, 22 bp, Artificial Sequence
  chemically synthesized
ttaatcatttttagccagctat

SEQ ID NO: 17144 - DNA, 22 bp, Artificial Sequence
  chemically synthesized
aatcatttttagccagctatgt

SEQ ID NO: 17145 - DNA, 22 bp, Artificial Sequence
  chemically synthesized
atcatttttagccagctatgtt

SEQ ID NO: 17146 - DNA, 22 bp, Artificial Sequence
  chemically synthesized
ttagccagctatgtttgttttg

SEQ ID NO: 17147 - DNA, 22 bp, Artificial Sequence
  chemically synthesized
tagccagctatgtttgttttgc

SEQ ID NO: 17148 - DNA, 22 bp, Artificial Sequence
  chemically synthesized
agccagctatgtttgttttgct

SEQ ID NO: 17149 - DNA, 22 bp, Artificial Sequence
  chemically synthesized
gccagctatgtttgttttgctg

SEQ ID NO: 17150 - DNA, 22 bp, Artificial Sequence
  chemically synthesized
tgtttgttttgctgatttgaca

SEQ ID NO: 17151 - DNA, 22 bp, Artificial Sequence
  chemically synthesized
gttttgctgatttgacaaacta

SEQ ID NO: 17152 - DNA, 22 bp, Artificial Sequence
  chemically synthesized
ttttgctgatttgacaaactac

SEQ ID NO: 17153 - DNA, 22 bp, Artificial Sequence
  chemically synthesized
tgctgatttgacaaactacagt

SEQ ID NO: 17154 - DNA, 22 bp, Artificial Sequence
  chemically synthesized
gctgatttgacaaactacagtt

SEQ ID NO: 17155 - DNA, 22 bp, Artificial Sequence
  chemically synthesized
ctgatttgacaaactacagtta

SEQ ID NO: 17156 - DNA, 22 bp, Artificial Sequence
  chemically synthesized
atttgacaaactacagttagac

SEQ ID NO: 17157 - DNA, 22 bp, Artificial Sequence
  chemically synthesized
gacaaactacagttagacagct

SEQ ID NO: 17158 - DNA, 22 bp, Artificial Sequence
  chemically synthesized
acaaactacagttagacagcta

SEQ ID NO: 17159 - DNA, 22 bp, Artificial Sequence
  chemically synthesized
cagttagacagctattctcatt

SEQ ID NO: 17160 - DNA, 22 bp, Artificial Sequence
  chemically synthesized
gacagctattctcattttgctg

SEQ ID NO: 17161 - DNA, 22 bp, Artificial Sequence
  chemically synthesized
ttctcattttgctgatcatgac

SEQ ID NO: 17162 - DNA, 22 bp, Artificial Sequence
  chemically synthesized
tcattttgctgatcatgacaaa

SEQ ID NO: 17163 - DNA, 22 bp, Artificial Sequence
  chemically synthesized
attttgctgatcatgacaaaat

SEQ ID NO: 17164 - DNA, 22 bp, Artificial Sequence
  chemically synthesized
tgctgatcatgacaaaataata

SEQ ID NO: 17165 - DNA, 22 bp, Artificial Sequence
  chemically synthesized
gctgatcatgacaaaataatat

SEQ ID NO: 17166 - DNA, 22 bp, Artificial Sequence
  chemically synthesized
ctgatcatgacaaaataatatc

SEQ ID NO: 17167 - DNA, 22 bp, Artificial Sequence
  chemically synthesized
atcatgacaaaataatatcctg

SEQ ID NO: 17168 - DNA, 22 bp, Artificial Sequence
  chemically synthesized
aatttttaaattttgcatccag

SEQ ID NO: 17169 - DNA, 22 bp, Artificial Sequence
  chemically synthesized
ttaaattttgcatccagctcta

SEQ ID NO: 17170 - DNA, 22 bp, Artificial Sequence
  chemically synthesized
taaattttgcatccagctctaa

SEQ ID NO: 17171 - DNA, 22 bp, Artificial Sequence
  chemically synthesized
aaattttgcatccagctctaaa

SEQ ID NO: 17172 - DNA, 22 bp, Artificial Sequence
  chemically synthesized
aattttgcatccagctctaaat

SEQ ID NO: 17173 - DNA, 22 bp, Artificial Sequence
  chemically synthesized
tgcatccagctctaaattttct

SEQ ID NO: 17174 - DNA, 22 bp, Artificial Sequence
  chemically synthesized
gcatccagctctaaattttcta

SEQ ID NO: 17175 - DNA, 22 bp, Artificial Sequence
  chemically synthesized
catccagctctaaattttctaa

SEQ ID NO: 17176 - DNA, 22 bp, Artificial Sequence
  chemically synthesized
taaattttctaaacataaaatt

SEQ ID NO: 17177 - DNA, 22 bp, Artificial Sequence
  chemically synthesized
aattttctaaacataaaattgt

SEQ ID NO: 17178 - DNA, 22 bp, Artificial Sequence
  chemically synthesized
tctaaacataaaattgtccaaa

SEQ ID NO: 17179 - DNA, 22 bp, Artificial Sequence
  chemically synthesized
ctaaacataaaattgtccaaaa

SEQ ID NO: 17180 - DNA, 22 bp, Artificial Sequence
  chemically synthesized
taaacataaaattgtccaaaaa

SEQ ID NO: 17181 - DNA, 22 bp, Artificial Sequence
  chemically synthesized
aacataaaattgtccaaaaaat

SEQ ID NO: 17182 - DNA, 22 bp, Artificial Sequence
  chemically synthesized
tccaaaaaatagtattttcagc

SEQ ID NO: 17183 - DNA, 22 bp, Artificial Sequence
  chemically synthesized
tcagccactagattgtgtgtta

SEQ ID NO: 17184 - DNA, 22 bp, Artificial Sequence
  chemically synthesized
cagccactagattgtgtgttaa

SEQ ID NO: 17185 - DNA, 22 bp, Artificial Sequence
  chemically synthesized
agccactagattgtgtgttaag

SEQ ID NO: 17186 - DNA, 22 bp, Artificial Sequence
  chemically synthesized
gattgtgtgttaagtctattgt

SEQ ID NO: 17187 - DNA, 22 bp, Artificial Sequence
  chemically synthesized
tgtgttaagtctattgtcacag

SEQ ID NO: 17188 - DNA, 22 bp, Artificial Sequence
  chemically synthesized
agtctattgtcacagagtcatt

SEQ ID NO: 17189 - DNA, 22 bp, Artificial Sequence
  chemically synthesized
ttgtcacagagtcattttactt

SEQ ID NO: 17190 - DNA, 22 bp, Artificial Sequence
  chemically synthesized
tcacagagtcattttactttta

SEQ ID NO: 17191 - DNA, 22 bp, Artificial Sequence
  chemically synthesized
tacttttaagtatatgttttta

SEQ ID NO: 17192 - DNA, 22 bp, Artificial Sequence
  chemically synthesized
acttttaagtatatgtttttac

SEQ ID NO: 17193 - DNA, 22 bp, Artificial Sequence
  chemically synthesized
cttttaagtatatgtttttaca

SEQ ID NO: 17194 - DNA, 22 bp, Artificial Sequence
  chemically synthesized
ttaagtatatgtttttacatgt

SEQ ID NO: 17195 - DNA, 22 bp, Artificial Sequence
  chemically synthesized
taagtatatgtttttacatgtt

SEQ ID NO: 17196 - DNA, 22 bp, Artificial Sequence
  chemically synthesized
aagtatatgtttttacatgtta

SEQ ID NO: 17197 - DNA, 22 bp, Artificial Sequence
  chemically synthesized
agtatatgtttttacatgttaa

SEQ ID NO: 17198 - DNA, 22 bp, Artificial Sequence
  chemically synthesized
ttacatgttaattatgtttgtt

SEQ ID NO: 17199 - DNA, 22 bp, Artificial Sequence
  chemically synthesized
tacatgttaattatgtttgtta

SEQ ID NO: 17200 - DNA, 22 bp, Artificial Sequence
  chemically synthesized
acatgttaattatgtttgttat

SEQ ID NO: 17201 - DNA, 22 bp, Artificial Sequence
  chemically synthesized
catgttaattatgtttgttatt

SEQ ID NO: 17202 - DNA, 22 bp, Artificial Sequence
  chemically synthesized
attatgtttgttatttttaatt

SEQ ID NO: 17203 - DNA, 22 bp, Artificial Sequence
  chemically synthesized
tgtttgttatttttaattttaa

SEQ ID NO: 17204 - DNA, 22 bp, Artificial Sequence
  chemically synthesized
gttatttttaattttaactttt

SEQ ID NO: 17205 - DNA, 22 bp, Artificial Sequence
  chemically synthesized
ttatttttaattttaacttttt

SEQ ID NO: 17206 - DNA, 22 bp, Artificial Sequence
  chemically synthesized
tttttaattttaactttttaaa

SEQ ID NO: 17207 - DNA, 22 bp, Artificial Sequence
  chemically synthesized
ttaattttaactttttaaaata

SEQ ID NO: 17208 - DNA, 22 bp, Artificial Sequence
  chemically synthesized
taattttaactttttaaaataa

SEQ ID NO: 17209 - DNA, 22 bp, Artificial Sequence
  chemically synthesized
aattttaactttttaaaataat

SEQ ID NO: 17210 - DNA, 22 bp, Artificial Sequence
  chemically synthesized
attttaactttttaaaataatt

SEQ ID NO: 17211 - DNA, 22 bp, Artificial Sequence
  chemically synthesized
taactttttaaaataattccag

SEQ ID NO: 17212 - DNA, 22 bp, Artificial Sequence
  chemically synthesized
aactttttaaaataattccagt

SEQ ID NO: 17213 - DNA, 22 bp, Artificial Sequence
  chemically synthesized
actttttaaaataattccagtc

SEQ ID NO: 17214 - DNA, 22 bp, Artificial Sequence
  chemically synthesized
tttaaaataattccagtcactg

SEQ ID NO: 17215 - DNA, 22 bp, Artificial Sequence
  chemically synthesized
ttaaaataattccagtcactgc

SEQ ID NO: 17216 - DNA, 22 bp, Artificial Sequence
  chemically synthesized
taaaataattccagtcactgcc

SEQ ID NO: 17217 - DNA, 22 bp, Artificial Sequence
  chemically synthesized
aaaataattccagtcactgcca

SEQ ID NO: 17218 - DNA, 22 bp, Artificial Sequence
  chemically synthesized
aaataattccagtcactgccaa

SEQ ID NO: 17219 - DNA, 22 bp, Artificial Sequence
  chemically synthesized
cagtcactgccaatacatgaaa

SEQ ID NO: 17220 - DNA, 22 bp, Artificial Sequence
  chemically synthesized
ccaatacatgaaaaattggtca

SEQ ID NO: 17221 - DNA, 22 bp, Artificial Sequence
  chemically synthesized
gtcactggaattttttttttga

SEQ ID NO: 17222 - DNA, 22 bp, Artificial Sequence
  chemically synthesized
gaattttttttttgacttttat

SEQ ID NO: 17223 - DNA, 22 bp, Artificial Sequence
  chemically synthesized
tttttttgacttttattttagg

SEQ ID NO: 17224 - DNA, 22 bp, Artificial Sequence
  chemically synthesized
ttttttgacttttattttaggt

SEQ ID NO: 17225 - DNA, 22 bp, Artificial Sequence
  chemically synthesized
tttttgacttttattttaggtt

SEQ ID NO: 17226 - DNA, 22 bp, Artificial Sequence
  chemically synthesized
ttttgacttttattttaggttc

SEQ ID NO: 17227 - DNA, 22 bp, Artificial Sequence
  chemically synthesized
tttgacttttattttaggttca

SEQ ID NO: 17228 - DNA, 22 bp, Artificial Sequence
  chemically synthesized
ttgacttttattttaggttcat

SEQ ID NO: 17229 - DNA, 22 bp, Artificial Sequence
  chemically synthesized
tgacttttattttaggttcatg

SEQ ID NO: 17230 - DNA, 22 bp, Artificial Sequence
  chemically synthesized
gacttttattttaggttcatgt

SEQ ID NO: 17231 - DNA, 22 bp, Artificial Sequence
  chemically synthesized
acttttattttaggttcatgtg

SEQ ID NO: 17232 - DNA, 22 bp, Artificial Sequence
  chemically synthesized
ttattttaggttcatgtgtaca

SEQ ID NO: 17233 - DNA, 22 bp, Artificial Sequence
  chemically synthesized
tattttaggttcatgtgtacat

SEQ ID NO: 17234 - DNA, 22 bp, Artificial Sequence
  chemically synthesized
attttaggttcatgtgtacatg

SEQ ID NO: 17235 - DNA, 22 bp, Artificial Sequence
  chemically synthesized
ttttaggttcatgtgtacatgt

SEQ ID NO: 17236 - DNA, 22 bp, Artificial Sequence
  chemically synthesized
taggttcatgtgtacatgtgca

SEQ ID NO: 17237 - DNA, 22 bp, Artificial Sequence
  chemically synthesized
aggttcatgtgtacatgtgcag

SEQ ID NO: 17238 - DNA, 22 bp, Artificial Sequence
  chemically synthesized
ggttcatgtgtacatgtgcagg

SEQ ID NO: 17239 - DNA, 22 bp, Artificial Sequence
  chemically synthesized
atgtgtacatgtgcaggtgtgt

SEQ ID NO: 17240 - DNA, 22 bp, Artificial Sequence
  chemically synthesized
tacaggtaaattgcgtgtcatg

SEQ ID NO: 17241 - DNA, 22 bp, Artificial Sequence
  chemically synthesized
cgtgtcatgagggtttggtgta

SEQ ID NO: 17242 - DNA, 22 bp, Artificial Sequence
  chemically synthesized
ggtgtacaggtgatttcattac

SEQ ID NO: 17243 - DNA, 22 bp, Artificial Sequence
  chemically synthesized
gtgtacaggtgatttcattacc

SEQ ID NO: 17244 - DNA, 22 bp, Artificial Sequence
  chemically synthesized
cattacccaggtaataagcata

SEQ ID NO: 17245 - DNA, 22 bp, Artificial Sequence
  chemically synthesized
attacccaggtaataagcatag

SEQ ID NO: 17246 - DNA, 22 bp, Artificial Sequence
  chemically synthesized
cccaggtaataagcatagtacc

SEQ ID NO: 17247 - DNA, 22 bp, Artificial Sequence
  chemically synthesized
tttgatcctcacccttctccca

SEQ ID NO: 17248 - DNA, 22 bp, Artificial Sequence
  chemically synthesized
ttgatcctcacccttctcccac

SEQ ID NO: 17249 - DNA, 22 bp, Artificial Sequence
  chemically synthesized
tgatcctcacccttctcccacc

SEQ ID NO: 17250 - DNA, 22 bp, Artificial Sequence
  chemically synthesized
gatcctcacccttctcccaccc

SEQ ID NO: 17251 - DNA, 22 bp, Artificial Sequence
  chemically synthesized
atcctcacccttctcccaccct

SEQ ID NO: 17252 - DNA, 22 bp, Artificial Sequence
  chemically synthesized
acccttctcccaccctcaagta

SEQ ID NO: 17253 - DNA, 22 bp, Artificial Sequence
  chemically synthesized
ctcccaccctcaagtaggccct

SEQ ID NO: 17254 - DNA, 22 bp, Artificial Sequence
  chemically synthesized
tcccaccctcaagtaggccctg

SEQ ID NO: 17255 - DNA, 22 bp, Artificial Sequence
  chemically synthesized
ccaccctcaagtaggccctggt

SEQ ID NO: 17256 - DNA, 22 bp, Artificial Sequence
  chemically synthesized
aagtaggccctggtgttgctgt

SEQ ID NO: 17257 - DNA, 22 bp, Artificial Sequence
  chemically synthesized
gtgttgctgtttccttctttgt

SEQ ID NO: 17258 - DNA, 22 bp, Artificial Sequence
  chemically synthesized
ctgtttccttctttgtgtccat

SEQ ID NO: 17259 - DNA, 22 bp, Artificial Sequence
  chemically synthesized
tttccttctttgtgtccatgta

SEQ ID NO: 17260 - DNA, 22 bp, Artificial Sequence
  chemically synthesized
ccttctttgtgtccatgtatac

SEQ ID NO: 17261 - DNA, 22 bp, Artificial Sequence
  chemically synthesized
cttctttgtgtccatgtatact

SEQ ID NO: 17262 - DNA, 22 bp, Artificial Sequence
  chemically synthesized
ctttgtgtccatgtatactcag

SEQ ID NO: 17263 - DNA, 22 bp, Artificial Sequence
  chemically synthesized
tttgtgtccatgtatactcagt

SEQ ID NO: 17264 - DNA, 22 bp, Artificial Sequence
  chemically synthesized
tgtgtccatgtatactcagtgt

SEQ ID NO: 17265 - DNA, 22 bp, Artificial Sequence
  chemically synthesized
gtgtccatgtatactcagtgtt

SEQ ID NO: 17266 - DNA, 22 bp, Artificial Sequence
  chemically synthesized
tgtccatgtatactcagtgttt

SEQ ID NO: 17267 - DNA, 22 bp, Artificial Sequence
  chemically synthesized
agtgtttagctcccacttagaa

SEQ ID NO: 17268 - DNA, 22 bp, Artificial Sequence
  chemically synthesized
agctcccacttagaagtgagaa

SEQ ID NO: 17269 - DNA, 22 bp, Artificial Sequence
  chemically synthesized
gctcccacttagaagtgagaac

SEQ ID NO: 17270 - DNA, 22 bp, Artificial Sequence
  chemically synthesized
ccacttagaagtgagaacatgc

SEQ ID NO: 17271 - DNA, 22 bp, Artificial Sequence
  chemically synthesized
agaagtgagaacatgcggtagt

SEQ ID NO: 17272 - DNA, 22 bp, Artificial Sequence
  chemically synthesized
gaagtgagaacatgcggtagtt

SEQ ID NO: 17273 - DNA, 22 bp, Artificial Sequence
  chemically synthesized
gttttctgttcctggattagtt

SEQ ID NO: 17274 - DNA, 22 bp, Artificial Sequence
  chemically synthesized
tctgttcctggattagttcact

SEQ ID NO: 17275 - DNA, 22 bp, Artificial Sequence
  chemically synthesized
ctgttcctggattagttcactt

SEQ ID NO: 17276 - DNA, 22 bp, Artificial Sequence
  chemically synthesized
tgttcctggattagttcactta

SEQ ID NO: 17277 - DNA, 22 bp, Artificial Sequence
  chemically synthesized
ttcctggattagttcacttagg

SEQ ID NO: 17278 - DNA, 22 bp, Artificial Sequence
  chemically synthesized
ctggattagttcacttaggata

SEQ ID NO: 17279 - DNA, 22 bp, Artificial Sequence
  chemically synthesized
gattagttcacttaggataatg

SEQ ID NO: 17280 - DNA, 22 bp, Artificial Sequence
  chemically synthesized
gttcacttaggataatgacctc

SEQ ID NO: 17281 - DNA, 22 bp, Artificial Sequence
  chemically synthesized
acttaggataatgacctctagc

SEQ ID NO: 17282 - DNA, 22 bp, Artificial Sequence
  chemically synthesized
aggataatgacctctagctcca

SEQ ID NO: 17283 - DNA, 22 bp, Artificial Sequence
  chemically synthesized
ggataatgacctctagctccat

SEQ ID NO: 17284 - DNA, 22 bp, Artificial Sequence
  chemically synthesized
tagctccatctggtttttatgg

SEQ ID NO: 17285 - DNA, 22 bp, Artificial Sequence
  chemically synthesized
gctccatctggtttttatggct

SEQ ID NO: 17286 - DNA, 22 bp, Artificial Sequence
  chemically synthesized
catctggtttttatggctgcat

SEQ ID NO: 17287 - DNA, 22 bp, Artificial Sequence
  chemically synthesized
gtttttatggctgcatagtatt

SEQ ID NO: 17288 - DNA, 22 bp, Artificial Sequence
  chemically synthesized
ttatggctgcatagtattccat

SEQ ID NO: 17289 - DNA, 22 bp, Artificial Sequence
  chemically synthesized
tatggctgcatagtattccatg

SEQ ID NO: 17290 - DNA, 22 bp, Artificial Sequence
  chemically synthesized
atggctgcatagtattccatgg

SEQ ID NO: 17291 - DNA, 22 bp, Artificial Sequence
  chemically synthesized
tggctgcatagtattccatggt

SEQ ID NO: 17292 - DNA, 22 bp, Artificial Sequence
  chemically synthesized
catagtattccatggtgtatat

SEQ ID NO: 17293 - DNA, 22 bp, Artificial Sequence
  chemically synthesized
catggtgtatatgtatcacatt

SEQ ID NO: 17294 - DNA, 22 bp, Artificial Sequence
  chemically synthesized
tctttatccagtctaccattga

SEQ ID NO: 17295 - DNA, 22 bp, Artificial Sequence
  chemically synthesized
ctttatccagtctaccattgat

SEQ ID NO: 17296 - DNA, 22 bp, Artificial Sequence
  chemically synthesized
tttatccagtctaccattgata

SEQ ID NO: 17297 - DNA, 22 bp, Artificial Sequence
  chemically synthesized
tatccagtctaccattgatagg

SEQ ID NO: 17298 - DNA, 22 bp, Artificial Sequence
  chemically synthesized
atccagtctaccattgataggc

SEQ ID NO: 17299 - DNA, 22 bp, Artificial Sequence
  chemically synthesized
tccagtctaccattgataggca

SEQ ID NO: 17300 - DNA, 22 bp, Artificial Sequence
  chemically synthesized
ccattgataggcatttaggttg

SEQ ID NO: 17301 - DNA, 22 bp, Artificial Sequence
  chemically synthesized
ataggcatttaggttgattccc

SEQ ID NO: 17302 - DNA, 22 bp, Artificial Sequence
  chemically synthesized
aggttgattccctgtctttgtt

SEQ ID NO: 17303 - DNA, 22 bp, Artificial Sequence
  chemically synthesized
ggttgattccctgtctttgtta

SEQ ID NO: 17304 - DNA, 22 bp, Artificial Sequence
  chemically synthesized
attccctgtctttgttatcatg

SEQ ID NO: 17305 - DNA, 22 bp, Artificial Sequence
  chemically synthesized
cctgtctttgttatcatgaata

SEQ ID NO: 17306 - DNA, 22 bp, Artificial Sequence
  chemically synthesized
tctttgttatcatgaatagtgc

SEQ ID NO: 17307 - DNA, 22 bp, Artificial Sequence
  chemically synthesized
tgttatcatgaatagtgctgtg

SEQ ID NO: 17308 - DNA, 22 bp, Artificial Sequence
  chemically synthesized
gttatcatgaatagtgctgtga

SEQ ID NO: 17309 - DNA, 22 bp, Artificial Sequence
  chemically synthesized
ttatcatgaatagtgctgtgat

SEQ ID NO: 17310 - DNA, 22 bp, Artificial Sequence
  chemically synthesized
tcatgaatagtgctgtgatgaa

SEQ ID NO: 17311 - DNA, 22 bp, Artificial Sequence
  chemically synthesized
tgatgaacatacacatgcatgt

SEQ ID NO: 17312 - DNA, 22 bp, Artificial Sequence
  chemically synthesized
tatggtagaaaaatttgtattc

SEQ ID NO: 17313 - DNA, 22 bp, Artificial Sequence
  chemically synthesized
atggtagaaaaatttgtattcc

SEQ ID NO: 17314 - DNA, 22 bp, Artificial Sequence
  chemically synthesized
tggtagaaaaatttgtattcct

SEQ ID NO: 17315 - DNA, 22 bp, Artificial Sequence
  chemically synthesized
gtattcctttaggtacatatag

SEQ ID NO: 17316 - DNA, 22 bp, Artificial Sequence
  chemically synthesized
tattcctttaggtacatataga

SEQ ID NO: 17317 - DNA, 22 bp, Artificial Sequence
  chemically synthesized
ctttaggtacatatagaataat

SEQ ID NO: 17318 - DNA, 22 bp, Artificial Sequence
  chemically synthesized
taggtacatatagaataatggg

SEQ ID NO: 17319 - DNA, 22 bp, Artificial Sequence
  chemically synthesized
aggtacatatagaataatgggg

SEQ ID NO: 17320 - DNA, 22 bp, Artificial Sequence
  chemically synthesized
ggtacatatagaataatggggt

SEQ ID NO: 17321 - DNA, 22 bp, Artificial Sequence
  chemically synthesized
ctagggtgaatggtagttctat

SEQ ID NO: 17322 - DNA, 22 bp, Artificial Sequence
  chemically synthesized
gggtgaatggtagttctatttt

SEQ ID NO: 17323 - DNA, 22 bp, Artificial Sequence
  chemically synthesized
tattttcagttatttgagaaat

SEQ ID NO: 17324 - DNA, 22 bp, Artificial Sequence
  chemically synthesized
ttttcagttatttgagaaatct

SEQ ID NO: 17325 - DNA, 22 bp, Artificial Sequence
  chemically synthesized
tcagttatttgagaaatcttca

SEQ ID NO: 17326 - DNA, 22 bp, Artificial Sequence
  chemically synthesized
cagttatttgagaaatcttcaa

SEQ ID NO: 17327 - DNA, 22 bp, Artificial Sequence
  chemically synthesized
agttatttgagaaatcttcaaa

SEQ ID NO: 17328 - DNA, 22 bp, Artificial Sequence
  chemically synthesized
tttgagaaatcttcaaactgct

SEQ ID NO: 17329 - DNA, 22 bp, Artificial Sequence
  chemically synthesized
gagaaatcttcaaactgctttt

SEQ ID NO: 17330 - DNA, 22 bp, Artificial Sequence
  chemically synthesized
agaaatcttcaaactgcttttc

SEQ ID NO: 17331 - DNA, 22 bp, Artificial Sequence
  chemically synthesized
caaactgcttttcataatagct

SEQ ID NO: 17332 - DNA, 22 bp, Artificial Sequence
  chemically synthesized
aaactgcttttcataatagcta

SEQ ID NO: 17333 - DNA, 22 bp, Artificial Sequence
  chemically synthesized
cttttcataatagctaaactaa

SEQ ID NO: 17334 - DNA, 22 bp, Artificial Sequence
  chemically synthesized
ttcataatagctaaactaattt

SEQ ID NO: 17335 - DNA, 22 bp, Artificial Sequence
  chemically synthesized
tcataatagctaaactaattta

SEQ ID NO: 17336 - DNA, 22 bp, Artificial Sequence
  chemically synthesized
cataatagctaaactaatttac

SEQ ID NO: 17337 - DNA, 22 bp, Artificial Sequence
  chemically synthesized
ataatagctaaactaatttaca

SEQ ID NO: 17338 - DNA, 22 bp, Artificial Sequence
  chemically synthesized
aactaatttacagtcccgccag

SEQ ID NO: 17339 - DNA, 22 bp, Artificial Sequence
  chemically synthesized
atttacagtcccgccagcagtg

SEQ ID NO: 17340 - DNA, 22 bp, Artificial Sequence
  chemically synthesized
acagtcccgccagcagtgtata

SEQ ID NO: 17341 - DNA, 22 bp, Artificial Sequence
  chemically synthesized
cagtcccgccagcagtgtataa

SEQ ID NO: 17342 - DNA, 22 bp, Artificial Sequence
  chemically synthesized
ccttttctccacaaccttgcca

SEQ ID NO: 17343 - DNA, 22 bp, Artificial Sequence
  chemically synthesized
ttctccacaaccttgccaacat

SEQ ID NO: 17344 - DNA, 22 bp, Artificial Sequence
  chemically synthesized
tctccacaaccttgccaacatc

SEQ ID NO: 17345 - DNA, 22 bp, Artificial Sequence
  chemically synthesized
ctccacaaccttgccaacatct

SEQ ID NO: 17346 - DNA, 22 bp, Artificial Sequence
  chemically synthesized
tccacaaccttgccaacatctg

SEQ ID NO: 17347 - DNA, 22 bp, Artificial Sequence
  chemically synthesized
cacaaccttgccaacatctgtg

SEQ ID NO: 17348 - DNA, 22 bp, Artificial Sequence
  chemically synthesized
gccaacatctgtgattttttga

SEQ ID NO: 17349 - DNA, 22 bp, Artificial Sequence
  chemically synthesized
ccaacatctgtgattttttgac

SEQ ID NO: 17350 - DNA, 22 bp, Artificial Sequence
  chemically synthesized
tgattttttgactttttaataa

SEQ ID NO: 17351 - DNA, 22 bp, Artificial Sequence
  chemically synthesized
tttgactttttaataatagcca

SEQ ID NO: 17352 - DNA, 22 bp, Artificial Sequence
  chemically synthesized
ttgactttttaataatagccat

SEQ ID NO: 17353 - DNA, 22 bp, Artificial Sequence
  chemically synthesized
tgactttttaataatagccatt

SEQ ID NO: 17354 - DNA, 22 bp, Artificial Sequence
  chemically synthesized
gactttttaataatagccattc

SEQ ID NO: 17355 - DNA, 22 bp, Artificial Sequence
  chemically synthesized
actttttaataatagccattcc

SEQ ID NO: 17356 - DNA, 22 bp, Artificial Sequence
  chemically synthesized
tttaataatagccattcctaga

SEQ ID NO: 17357 - DNA, 22 bp, Artificial Sequence
  chemically synthesized
ttaataatagccattcctagag

SEQ ID NO: 17358 - DNA, 22 bp, Artificial Sequence
  chemically synthesized
taataatagccattcctagaga

SEQ ID NO: 17359 - DNA, 22 bp, Artificial Sequence
  chemically synthesized
aataatagccattcctagagaa

SEQ ID NO: 17360 - DNA, 22 bp, Artificial Sequence
  chemically synthesized
ataatagccattcctagagaat

SEQ ID NO: 17361 - DNA, 22 bp, Artificial Sequence
  chemically synthesized
ctagagaattgatttgcaattc

SEQ ID NO: 17362 - DNA, 22 bp, Artificial Sequence
  chemically synthesized
gagaattgatttgcaattctct

SEQ ID NO: 17363 - DNA, 22 bp, Artificial Sequence
  chemically synthesized
atttgcaattctctattagtga

SEQ ID NO: 17364 - DNA, 22 bp, Artificial Sequence
  chemically synthesized
gcaattctctattagtgatatt

SEQ ID NO: 17365 - DNA, 22 bp, Artificial Sequence
  chemically synthesized
caattctctattagtgatatta

SEQ ID NO: 17366 - DNA, 22 bp, Artificial Sequence
  chemically synthesized
tctattagtgatattaagcatt

SEQ ID NO: 17367 - DNA, 22 bp, Artificial Sequence
  chemically synthesized
tattagtgatattaagcatttt

SEQ ID NO: 17368 - DNA, 22 bp, Artificial Sequence
  chemically synthesized
ttagtgatattaagcatttttt

SEQ ID NO: 17369 - DNA, 22 bp, Artificial Sequence
  chemically synthesized
gtgatattaagcattttttcat

SEQ ID NO: 17370 - DNA, 22 bp, Artificial Sequence
  chemically synthesized
agcattttttcatatgcttttt

SEQ ID NO: 17371 - DNA, 22 bp, Artificial Sequence
  chemically synthesized
tttcatatgctttttagctgtc

SEQ ID NO: 17372 - DNA, 22 bp, Artificial Sequence
  chemically synthesized
ttcatatgctttttagctgtct

SEQ ID NO: 17373 - DNA, 22 bp, Artificial Sequence
  chemically synthesized
tcatatgctttttagctgtctg

SEQ ID NO: 17374 - DNA, 22 bp, Artificial Sequence
  chemically synthesized
catatgctttttagctgtctgt

SEQ ID NO: 17375 - DNA, 22 bp, Artificial Sequence
  chemically synthesized
atatgctttttagctgtctgta

SEQ ID NO: 17376 - DNA, 22 bp, Artificial Sequence
  chemically synthesized
tttagctgtctgtatatattct

SEQ ID NO: 17377 - DNA, 22 bp, Artificial Sequence
  chemically synthesized
ttagctgtctgtatatattctt

SEQ ID NO: 17378 - DNA, 22 bp, Artificial Sequence
  chemically synthesized
tagctgtctgtatatattcttc

SEQ ID NO: 17379 - DNA, 22 bp, Artificial Sequence
  chemically synthesized
agctgtctgtatatattcttct

SEQ ID NO: 17380 - DNA, 22 bp, Artificial Sequence
  chemically synthesized
gctgtctgtatatattcttctg

SEQ ID NO: 17381 - DNA, 22 bp, Artificial Sequence
  chemically synthesized
tctgtatatattcttctgaaaa

SEQ ID NO: 17382 - DNA, 22 bp, Artificial Sequence
  chemically synthesized
tatatattcttctgaaaaattt

SEQ ID NO: 17383 - DNA, 22 bp, Artificial Sequence
  chemically synthesized
ttctgaaaaattttcatgtcct

SEQ ID NO: 17384 - DNA, 22 bp, Artificial Sequence
  chemically synthesized
ctgaaaaattttcatgtccttt

SEQ ID NO: 17385 - DNA, 22 bp, Artificial Sequence
  chemically synthesized
tgaaaaattttcatgtcctttg

SEQ ID NO: 17386 - DNA, 22 bp, Artificial Sequence
  chemically synthesized
aaaaattttcatgtcctttgcc

SEQ ID NO: 17387 - DNA, 22 bp, Artificial Sequence
  chemically synthesized
tcatgtcctttgcccagtttgt

SEQ ID NO: 17388 - DNA, 22 bp, Artificial Sequence
  chemically synthesized
catgtcctttgcccagtttgta

SEQ ID NO: 17389 - DNA, 22 bp, Artificial Sequence
  chemically synthesized
atgtcctttgcccagtttgtag

SEQ ID NO: 17390 - DNA, 22 bp, Artificial Sequence
  chemically synthesized
tgcccagtttgtagtggggtgg

SEQ ID NO: 17391 - DNA, 22 bp, Artificial Sequence
  chemically synthesized
gcccagtttgtagtggggtggg

SEQ ID NO: 17392 - DNA, 22 bp, Artificial Sequence
  chemically synthesized
cccagtttgtagtggggtgggt

SEQ ID NO: 17393 - DNA, 22 bp, Artificial Sequence
  chemically synthesized
gtagtggggtgggttgtttttt

SEQ ID NO: 17394 - DNA, 22 bp, Artificial Sequence
  chemically synthesized
tagtggggtgggttgttttttg

SEQ ID NO: 17395 - DNA, 22 bp, Artificial Sequence
  chemically synthesized
ttttttgcttgttaattagttt

SEQ ID NO: 17396 - DNA, 22 bp, Artificial Sequence
  chemically synthesized
tttgcttgttaattagttttaa

SEQ ID NO: 17397 - DNA, 22 bp, Artificial Sequence
  chemically synthesized
ttgcttgttaattagttttaag

SEQ ID NO: 17398 - DNA, 22 bp, Artificial Sequence
  chemically synthesized
tgcttgttaattagttttaagt

SEQ ID NO: 17399 - DNA, 22 bp, Artificial Sequence
  chemically synthesized
gcttgttaattagttttaagtt

SEQ ID NO: 17400 - DNA, 22 bp, Artificial Sequence
  chemically synthesized
cttgttaattagttttaagttc

SEQ ID NO: 17401 - DNA, 22 bp, Artificial Sequence
  chemically synthesized
gttaattagttttaagttcctt

SEQ ID NO: 17402 - DNA, 22 bp, Artificial Sequence
  chemically synthesized
ttaattagttttaagttccttc

SEQ ID NO: 17403 - DNA, 22 bp, Artificial Sequence
  chemically synthesized
attagttttaagttccttccag

SEQ ID NO: 17404 - DNA, 22 bp, Artificial Sequence
  chemically synthesized
gttttaagttccttccagattc

SEQ ID NO: 17405 - DNA, 22 bp, Artificial Sequence
  chemically synthesized
taagttccttccagattctgca

SEQ ID NO: 17406 - DNA, 22 bp, Artificial Sequence
  chemically synthesized
aagttccttccagattctgcat

SEQ ID NO: 17407 - DNA, 22 bp, Artificial Sequence
  chemically synthesized
agttccttccagattctgcata

SEQ ID NO: 17408 - DNA, 22 bp, Artificial Sequence
  chemically synthesized
cttccagattctgcatatccct

SEQ ID NO: 17409 - DNA, 22 bp, Artificial Sequence
  chemically synthesized
ccagattctgcatatccctttg

SEQ ID NO: 17410 - DNA, 22 bp, Artificial Sequence
  chemically synthesized
cagattctgcatatccctttgt

SEQ ID NO: 17411 - DNA, 22 bp, Artificial Sequence
  chemically synthesized
tgcatatccctttgttggatac

SEQ ID NO: 17412 - DNA, 22 bp, Artificial Sequence
  chemically synthesized
catatccctttgttggatacat

SEQ ID NO: 17413 - DNA, 22 bp, Artificial Sequence
  chemically synthesized
tgttggatacatggtttgcaga

SEQ ID NO: 17414 - DNA, 22 bp, Artificial Sequence
  chemically synthesized
gttggatacatggtttgcagat

SEQ ID NO: 17415 - DNA, 22 bp, Artificial Sequence
  chemically synthesized
ttggatacatggtttgcagata

SEQ ID NO: 17416 - DNA, 22 bp, Artificial Sequence
  chemically synthesized
gatacatggtttgcagatattt

SEQ ID NO: 17417 - DNA, 22 bp, Artificial Sequence
  chemically synthesized
gcagatatttttctcccattgt

SEQ ID NO: 17418 - DNA, 22 bp, Artificial Sequence
  chemically synthesized
cagatatttttctcccattgtg

SEQ ID NO: 17419 - DNA, 22 bp, Artificial Sequence
  chemically synthesized
ttctcccattgtgtaggttgtc

SEQ ID NO: 17420 - DNA, 22 bp, Artificial Sequence
  chemically synthesized
tctcccattgtgtaggttgtct

SEQ ID NO: 17421 - DNA, 22 bp, Artificial Sequence
  chemically synthesized
ctcccattgtgtaggttgtctt

SEQ ID NO: 17422 - DNA, 22 bp, Artificial Sequence
  chemically synthesized
tcccattgtgtaggttgtcttt

SEQ ID NO: 17423 - DNA, 22 bp, Artificial Sequence
  chemically synthesized
ccattgtgtaggttgtctttta

SEQ ID NO: 17424 - DNA, 22 bp, Artificial Sequence
  chemically synthesized
tgtaggttgtcttttactctgt

SEQ ID NO: 17425 - DNA, 22 bp, Artificial Sequence
  chemically synthesized
tcttttactctgttgatagttt

SEQ ID NO: 17426 - DNA, 22 bp, Artificial Sequence
  chemically synthesized
ttactctgttgatagtttcttt

SEQ ID NO: 17427 - DNA, 22 bp, Artificial Sequence
  chemically synthesized
tactctgttgatagtttctttt

SEQ ID NO: 17428 - DNA, 22 bp, Artificial Sequence
  chemically synthesized
actctgttgatagtttcttttg

SEQ ID NO: 17429 - DNA, 22 bp, Artificial Sequence
  chemically synthesized
ctctgttgatagtttcttttgc

SEQ ID NO: 17430 - DNA, 22 bp, Artificial Sequence
  chemically synthesized
tgttgatagtttcttttgccat

SEQ ID NO: 17431 - DNA, 22 bp, Artificial Sequence
  chemically synthesized
ttgatagtttcttttgccatgc

SEQ ID NO: 17432 - DNA, 22 bp, Artificial Sequence
  chemically synthesized
atagtttcttttgccatgcagg

SEQ ID NO: 17433 - DNA, 22 bp, Artificial Sequence
  chemically synthesized
cttttgccatgcaggagctcgt

SEQ ID NO: 17434 - DNA, 22 bp, Artificial Sequence
  chemically synthesized
ttttgccatgcaggagctcgtt

SEQ ID NO: 17435 - DNA, 22 bp, Artificial Sequence
  chemically synthesized
ttgccatgcaggagctcgttag

SEQ ID NO: 17436 - DNA, 22 bp, Artificial Sequence
  chemically synthesized
tgccatgcaggagctcgttagg

SEQ ID NO: 17437 - DNA, 22 bp, Artificial Sequence
  chemically synthesized
gccatgcaggagctcgttaggt

SEQ ID NO: 17438 - DNA, 22 bp, Artificial Sequence
  chemically synthesized
ccatgcaggagctcgttaggtc

SEQ ID NO: 17439 - DNA, 22 bp, Artificial Sequence
  chemically synthesized
gttaggtcccatttgtgtttgt

SEQ ID NO: 17440 - DNA, 22 bp, Artificial Sequence
  chemically synthesized
ggtcccatttgtgtttgttttt

SEQ ID NO: 17441 - DNA, 22 bp, Artificial Sequence
  chemically synthesized
gtgtttgtttttgttgcagttg

SEQ ID NO: 17442 - DNA, 22 bp, Artificial Sequence
  chemically synthesized
tgtttgtttttgttgcagttgc

SEQ ID NO: 17443 - DNA, 22 bp, Artificial Sequence
  chemically synthesized
gtttttgttgcagttgcttttg

SEQ ID NO: 17444 - DNA, 22 bp, Artificial Sequence
  chemically synthesized
tttttgttgcagttgcttttgg

SEQ ID NO: 17445 - DNA, 22 bp, Artificial Sequence
  chemically synthesized
ttgttgcagttgcttttggcgt

SEQ ID NO: 17446 - DNA, 22 bp, Artificial Sequence
  chemically synthesized
tgttgcagttgcttttggcgtc

SEQ ID NO: 17447 - DNA, 22 bp, Artificial Sequence
  chemically synthesized
gttgcagttgcttttggcgtct

SEQ ID NO: 17448 - DNA, 22 bp, Artificial Sequence
  chemically synthesized
ttgcagttgcttttggcgtctt

SEQ ID NO: 17449 - DNA, 22 bp, Artificial Sequence
  chemically synthesized
cagttgcttttggcgtcttcat

SEQ ID NO: 17450 - DNA, 22 bp, Artificial Sequence
  chemically synthesized
cttttggcgtcttcatcataaa

SEQ ID NO: 17451 - DNA, 22 bp, Artificial Sequence
  chemically synthesized
ttggcgtcttcatcataaaatc

SEQ ID NO: 17452 - DNA, 22 bp, Artificial Sequence
  chemically synthesized
tggcgtcttcatcataaaatct

SEQ ID NO: 17453 - DNA, 22 bp, Artificial Sequence
  chemically synthesized
ggcgtcttcatcataaaatctg

SEQ ID NO: 17454 - DNA, 22 bp, Artificial Sequence
  chemically synthesized
gcgtcttcatcataaaatctgt

SEQ ID NO: 17455 - DNA, 22 bp, Artificial Sequence
  chemically synthesized
catcataaaatctgtgccaggg

SEQ ID NO: 17456 - DNA, 22 bp, Artificial Sequence
  chemically synthesized
atcataaaatctgtgccagggc

SEQ ID NO: 17457 - DNA, 22 bp, Artificial Sequence
  chemically synthesized
tgccagggcctatgtccagaat

SEQ ID NO: 17458 - DNA, 22 bp, Artificial Sequence
  chemically synthesized
tgtccagaatggtatttcctag

SEQ ID NO: 17459 - DNA, 22 bp, Artificial Sequence
  chemically synthesized
cctaggttgtcttccagggttt

SEQ ID NO: 17460 - DNA, 22 bp, Artificial Sequence
  chemically synthesized
ctaggttgtcttccagggtttt

SEQ ID NO: 17461 - DNA, 22 bp, Artificial Sequence
  chemically synthesized
ggttgtcttccagggtttttac

SEQ ID NO: 17462 - DNA, 22 bp, Artificial Sequence
  chemically synthesized
tcttccagggtttttacaattt

SEQ ID NO: 17463 - DNA, 22 bp, Artificial Sequence
  chemically synthesized
ccagggtttttacaattttaga

SEQ ID NO: 17464 - DNA, 22 bp, Artificial Sequence
  chemically synthesized
cagggtttttacaattttagat

SEQ ID NO: 17465 - DNA, 22 bp, Artificial Sequence
  chemically synthesized
ttacaattttagattttacgtt

SEQ ID NO: 17466 - DNA, 22 bp, Artificial Sequence
  chemically synthesized
tacaattttagattttacgttt

SEQ ID NO: 17467 - DNA, 22 bp, Artificial Sequence
  chemically synthesized
acaattttagattttacgttta

SEQ ID NO: 17468 - DNA, 22 bp, Artificial Sequence
  chemically synthesized
caattttagattttacgtttat

SEQ ID NO: 17469 - DNA, 22 bp, Artificial Sequence
  chemically synthesized
tagattttacgtttatgtcttt

SEQ ID NO: 17470 - DNA, 22 bp, Artificial Sequence
  chemically synthesized
agattttacgtttatgtcttta

SEQ ID NO: 17471 - DNA, 22 bp, Artificial Sequence
  chemically synthesized
gattttacgtttatgtctttaa

SEQ ID NO: 17472 - DNA, 22 bp, Artificial Sequence
  chemically synthesized
tacgtttatgtctttaatccat

SEQ ID NO: 17473 - DNA, 22 bp, Artificial Sequence
  chemically synthesized
acgtttatgtctttaatccatc

SEQ ID NO: 17474 - DNA, 22 bp, Artificial Sequence
  chemically synthesized
cgtttatgtctttaatccatct

SEQ ID NO: 17475 - DNA, 22 bp, Artificial Sequence
  chemically synthesized
atgtctttaatccatcttgagt

SEQ ID NO: 17476 - DNA, 22 bp, Artificial Sequence
  chemically synthesized
tgtctttaatccatcttgagtt

SEQ ID NO: 17477 - DNA, 22 bp, Artificial Sequence
  chemically synthesized
taatccatcttgagttgatttt

SEQ ID NO: 17478 - DNA, 22 bp, Artificial Sequence
  chemically synthesized
aatccatcttgagttgattttt

SEQ ID NO: 17479 - DNA, 22 bp, Artificial Sequence
  chemically synthesized
atccatcttgagttgatttttg

SEQ ID NO: 17480 - DNA, 22 bp, Artificial Sequence
  chemically synthesized
gagttgatttttgtatatggca

SEQ ID NO: 17481 - DNA, 22 bp, Artificial Sequence
  chemically synthesized
agttgatttttgtatatggcac

SEQ ID NO: 17482 - DNA, 22 bp, Artificial Sequence
  chemically synthesized
atttttgtatatggcacaagga

SEQ ID NO: 17483 - DNA, 22 bp, Artificial Sequence
  chemically synthesized
ttgtatatggcacaaggaaggg

SEQ ID NO: 17484 - DNA, 22 bp, Artificial Sequence
  chemically synthesized
tgtatatggcacaaggaagggg

SEQ ID NO: 17485 - DNA, 22 bp, Artificial Sequence
  chemically synthesized
gtatatggcacaaggaaggggt

SEQ ID NO: 17486 - DNA, 22 bp, Artificial Sequence
  chemically synthesized
tatatggcacaaggaaggggtc

SEQ ID NO: 17487 - DNA, 22 bp, Artificial Sequence
  chemically synthesized
cactccaattcctatggctagc

SEQ ID NO: 17488 - DNA, 22 bp, Artificial Sequence
  chemically synthesized
actccaattcctatggctagca

SEQ ID NO: 17489 - DNA, 22 bp, Artificial Sequence
  chemically synthesized
caattcctatggctagcaatta

SEQ ID NO: 17490 - DNA, 22 bp, Artificial Sequence
  chemically synthesized
ctatggctagcaattatcccag

SEQ ID NO: 17491 - DNA, 22 bp, Artificial Sequence
  chemically synthesized
tggctagcaattatcccagcac

SEQ ID NO: 17492 - DNA, 22 bp, Artificial Sequence
  chemically synthesized
gcaattatcccagcaccattta

SEQ ID NO: 17493 - DNA, 22 bp, Artificial Sequence
  chemically synthesized
tcccagcaccatttattgaata

SEQ ID NO: 17494 - DNA, 22 bp, Artificial Sequence
  chemically synthesized
attgaatacggagtcctttccc

SEQ ID NO: 17495 - DNA, 22 bp, Artificial Sequence
  chemically synthesized
ttgaatacggagtcctttcccc

SEQ ID NO: 17496 - DNA, 22 bp, Artificial Sequence
  chemically synthesized
aatacggagtcctttccccatt

SEQ ID NO: 17497 - DNA, 22 bp, Artificial Sequence
  chemically synthesized
tccccattgcttgttttttgtc

SEQ ID NO: 17498 - DNA, 22 bp, Artificial Sequence
  chemically synthesized
ccccattgcttgttttttgtca

SEQ ID NO: 17499 - DNA, 22 bp, Artificial Sequence
  chemically synthesized
cccattgcttgttttttgtcaa

SEQ ID NO: 17500 - DNA, 22 bp, Artificial Sequence
  chemically synthesized
cttgttttttgtcaactttgtt

SEQ ID NO: 17501 - DNA, 22 bp, Artificial Sequence
  chemically synthesized
gttttttgtcaactttgttgaa

SEQ ID NO: 17502 - DNA, 22 bp, Artificial Sequence
  chemically synthesized
ttttttgtcaactttgttgaag

SEQ ID NO: 17503 - DNA, 22 bp, Artificial Sequence
  chemically synthesized
tttgtcaactttgttgaagatc

SEQ ID NO: 17504 - DNA, 22 bp, Artificial Sequence
  chemically synthesized
ttgtcaactttgttgaagatca

SEQ ID NO: 17505 - DNA, 22 bp, Artificial Sequence
  chemically synthesized
tgtcaactttgttgaagatcag

SEQ ID NO: 17506 - DNA, 22 bp, Artificial Sequence
  chemically synthesized
gtcaactttgttgaagatcaga

SEQ ID NO: 17507 - DNA, 22 bp, Artificial Sequence
  chemically synthesized
tcaactttgttgaagatcagat

SEQ ID NO: 17508 - DNA, 22 bp, Artificial Sequence
  chemically synthesized
tgttgaagatcagatggttgta

SEQ ID NO: 17509 - DNA, 22 bp, Artificial Sequence
  chemically synthesized
gttgaagatcagatggttgtaa

SEQ ID NO: 17510 - DNA, 22 bp, Artificial Sequence
  chemically synthesized
ttgaagatcagatggttgtaag

SEQ ID NO: 17511 - DNA, 22 bp, Artificial Sequence
  chemically synthesized
aagatcagatggttgtaagtgt

SEQ ID NO: 17512 - DNA, 22 bp, Artificial Sequence
  chemically synthesized
taagtgtgtggctttatttctt

SEQ ID NO: 17513 - DNA, 22 bp, Artificial Sequence
  chemically synthesized
tatttcttggctctctattctc

SEQ ID NO: 17514 - DNA, 22 bp, Artificial Sequence
  chemically synthesized
atttcttggctctctattctcc

SEQ ID NO: 17515 - DNA, 22 bp, Artificial Sequence
  chemically synthesized
tttcttggctctctattctcca

SEQ ID NO: 17516 - DNA, 22 bp, Artificial Sequence
  chemically synthesized
cttggctctctattctccattg

SEQ ID NO: 17517 - DNA, 22 bp, Artificial Sequence
  chemically synthesized
ttggctctctattctccattgg

SEQ ID NO: 17518 - DNA, 22 bp, Artificial Sequence
  chemically synthesized
ggctctctattctccattggtc

SEQ ID NO: 17519 - DNA, 22 bp, Artificial Sequence
  chemically synthesized
gctctctattctccattggtct

SEQ ID NO: 17520 - DNA, 22 bp, Artificial Sequence
  chemically synthesized
tctattctccattggtctatgt

SEQ ID NO: 17521 - DNA, 22 bp, Artificial Sequence
  chemically synthesized
tattctccattggtctatgtgt

SEQ ID NO: 17522 - DNA, 22 bp, Artificial Sequence
  chemically synthesized
ttctccattggtctatgtgtct

SEQ ID NO: 17523 - DNA, 22 bp, Artificial Sequence
  chemically synthesized
tccattggtctatgtgtctgtt

SEQ ID NO: 17524 - DNA, 22 bp, Artificial Sequence
  chemically synthesized
cattggtctatgtgtctgtttt

SEQ ID NO: 17525 - DNA, 22 bp, Artificial Sequence
  chemically synthesized
gtctatgtgtctgtttttataa

SEQ ID NO: 17526 - DNA, 22 bp, Artificial Sequence
  chemically synthesized
tgtgtctgtttttataacagta

SEQ ID NO: 17527 - DNA, 22 bp, Artificial Sequence
  chemically synthesized
tttttataacagtaccctgctg

SEQ ID NO: 17528 - DNA, 22 bp, Artificial Sequence
  chemically synthesized
ttataacagtaccctgctgttc

SEQ ID NO: 17529 - DNA, 22 bp, Artificial Sequence
  chemically synthesized
tataacagtaccctgctgttca

SEQ ID NO: 17530 - DNA, 22 bp, Artificial Sequence
  chemically synthesized
ataacagtaccctgctgttcag

SEQ ID NO: 17531 - DNA, 22 bp, Artificial Sequence
  chemically synthesized
taacagtaccctgctgttcagg

SEQ ID NO: 17532 - DNA, 22 bp, Artificial Sequence
  chemically synthesized
ctgttcaggttcctatagcctt

SEQ ID NO: 17533 - DNA, 22 bp, Artificial Sequence
  chemically synthesized
ttcaggttcctatagcctttta

SEQ ID NO: 17534 - DNA, 22 bp, Artificial Sequence
  chemically synthesized
aggttcctatagccttttagta

SEQ ID NO: 17535 - DNA, 22 bp, Artificial Sequence
  chemically synthesized
ctatagccttttagtataaaat

SEQ ID NO: 17536 - DNA, 22 bp, Artificial Sequence
  chemically synthesized
tagccttttagtataaaatcgg

SEQ ID NO: 17537 - DNA, 22 bp, Artificial Sequence
  chemically synthesized
ttagtataaaatcggctaatgt

SEQ ID NO: 17538 - DNA, 22 bp, Artificial Sequence
  chemically synthesized
tagtataaaatcggctaatgtg

SEQ ID NO: 17539 - DNA, 22 bp, Artificial Sequence
  chemically synthesized
agtataaaatcggctaatgtga

SEQ ID NO: 17540 - DNA, 22 bp, Artificial Sequence
  chemically synthesized
gtataaaatcggctaatgtgat

SEQ ID NO: 17541 - DNA, 22 bp, Artificial Sequence
  chemically synthesized
atgtgatgcctccagctttgtt

SEQ ID NO: 17542 - DNA, 22 bp, Artificial Sequence
  chemically synthesized
cagctttgttctttttgcttag

SEQ ID NO: 17543 - DNA, 22 bp, Artificial Sequence
  chemically synthesized
tgttctttttgcttaggattgc

SEQ ID NO: 17544 - DNA, 22 bp, Artificial Sequence
  chemically synthesized
gttctttttgcttaggattgct

SEQ ID NO: 17545 - DNA, 22 bp, Artificial Sequence
  chemically synthesized
ttctttttgcttaggattgctt

SEQ ID NO: 17546 - DNA, 22 bp, Artificial Sequence
  chemically synthesized
tttttgcttaggattgctttgg

SEQ ID NO: 17547 - DNA, 22 bp, Artificial Sequence
  chemically synthesized
tttgcttaggattgctttggct

SEQ ID NO: 17548 - DNA, 22 bp, Artificial Sequence
  chemically synthesized
ttgcttaggattgctttggcta

SEQ ID NO: 17549 - DNA, 22 bp, Artificial Sequence
  chemically synthesized
tgcttaggattgctttggctat

SEQ ID NO: 17550 - DNA, 22 bp, Artificial Sequence
  chemically synthesized
gcttaggattgctttggctatt

SEQ ID NO: 17551 - DNA, 22 bp, Artificial Sequence
  chemically synthesized
cttaggattgctttggctattt

SEQ ID NO: 17552 - DNA, 22 bp, Artificial Sequence
  chemically synthesized
aggattgctttggctatttggg

SEQ ID NO: 17553 - DNA, 22 bp, Artificial Sequence
  chemically synthesized
ggattgctttggctatttgggc

SEQ ID NO: 17554 - DNA, 22 bp, Artificial Sequence
  chemically synthesized
ctttggctatttgggctccttt

SEQ ID NO: 17555 - DNA, 22 bp, Artificial Sequence
  chemically synthesized
tggctatttgggctcctttttg

SEQ ID NO: 17556 - DNA, 22 bp, Artificial Sequence
  chemically synthesized
ggctatttgggctcctttttgg

SEQ ID NO: 17557 - DNA, 22 bp, Artificial Sequence
  chemically synthesized
gctatttgggctcctttttggg

SEQ ID NO: 17558 - DNA, 22 bp, Artificial Sequence
  chemically synthesized
tttgggctcctttttgggtcca

SEQ ID NO: 17559 - DNA, 22 bp, Artificial Sequence
  chemically synthesized
gggctcctttttgggtccatat

SEQ ID NO: 17560 - DNA, 22 bp, Artificial Sequence
  chemically synthesized
ggctcctttttgggtccatatt

SEQ ID NO: 17561 - DNA, 22 bp, Artificial Sequence
  chemically synthesized
ctttttgggtccatattaattt

SEQ ID NO: 17562 - DNA, 22 bp, Artificial Sequence
  chemically synthesized
tttgggtccatattaattttaa

SEQ ID NO: 17563 - DNA, 22 bp, Artificial Sequence
  chemically synthesized
ttgggtccatattaattttaaa

SEQ ID NO: 17564 - DNA, 22 bp, Artificial Sequence
  chemically synthesized
tgggtccatattaattttaaaa

SEQ ID NO: 17565 - DNA, 22 bp, Artificial Sequence
  chemically synthesized
gggtccatattaattttaaaac

SEQ ID NO: 17566 - DNA, 22 bp, Artificial Sequence
  chemically synthesized
ggtccatattaattttaaaaca

SEQ ID NO: 17567 - DNA, 22 bp, Artificial Sequence
  chemically synthesized
attttaaaacagttttttctgg

SEQ ID NO: 17568 - DNA, 22 bp, Artificial Sequence
  chemically synthesized
taaaacagttttttctggtttt

SEQ ID NO: 17569 - DNA, 22 bp, Artificial Sequence
  chemically synthesized
aaaacagttttttctggttttg

SEQ ID NO: 17570 - DNA, 22 bp, Artificial Sequence
  chemically synthesized
aaacagttttttctggttttgt

SEQ ID NO: 17571 - DNA, 22 bp, Artificial Sequence
  chemically synthesized
tttctggttttgtgaaggatat

SEQ ID NO: 17572 - DNA, 22 bp, Artificial Sequence
  chemically synthesized
ttctggttttgtgaaggatatc

SEQ ID NO: 17573 - DNA, 22 bp, Artificial Sequence
  chemically synthesized
tctggttttgtgaaggatatca

SEQ ID NO: 17574 - DNA, 22 bp, Artificial Sequence
  chemically synthesized
ctggttttgtgaaggatatcat

SEQ ID NO: 17575 - DNA, 22 bp, Artificial Sequence
  chemically synthesized
tggttttgtgaaggatatcatt

SEQ ID NO: 17576 - DNA, 22 bp, Artificial Sequence
  chemically synthesized
gttttgtgaaggatatcattgg

SEQ ID NO: 17577 - DNA, 22 bp, Artificial Sequence
  chemically synthesized
tgtgaaggatatcattggtagt

SEQ ID NO: 17578 - DNA, 22 bp, Artificial Sequence
  chemically synthesized
gtgaaggatatcattggtagtt

SEQ ID NO: 17579 - DNA, 22 bp, Artificial Sequence
  chemically synthesized
tgaaggatatcattggtagttt

SEQ ID NO: 17580 - DNA, 22 bp, Artificial Sequence
  chemically synthesized
gtagtttataggaatagcattg

SEQ ID NO: 17581 - DNA, 22 bp, Artificial Sequence
  chemically synthesized
ataggaatagcattgaatctgt

SEQ ID NO: 17582 - DNA, 22 bp, Artificial Sequence
  chemically synthesized
taggaatagcattgaatctgta

SEQ ID NO: 17583 - DNA, 22 bp, Artificial Sequence
  chemically synthesized
aatctgtagattgctttgggca

SEQ ID NO: 17584 - DNA, 22 bp, Artificial Sequence
  chemically synthesized
tagattgctttgggcagtatgg

SEQ ID NO: 17585 - DNA, 22 bp, Artificial Sequence
  chemically synthesized
ctttgggcagtatggccatttt

SEQ ID NO: 17586 - DNA, 22 bp, Artificial Sequence
  chemically synthesized
tgggcagtatggccattttaac

SEQ ID NO: 17587 - DNA, 22 bp, Artificial Sequence
  chemically synthesized
gggcagtatggccattttaaca

SEQ ID NO: 17588 - DNA, 22 bp, Artificial Sequence
  chemically synthesized
ggcagtatggccattttaacaa

SEQ ID NO: 17589 - DNA, 22 bp, Artificial Sequence
  chemically synthesized
taacaatattaattcttcctat

SEQ ID NO: 17590 - DNA, 22 bp, Artificial Sequence
  chemically synthesized
aacaatattaattcttcctatc

SEQ ID NO: 17591 - DNA, 22 bp, Artificial Sequence
  chemically synthesized
acaatattaattcttcctatct

SEQ ID NO: 17592 - DNA, 22 bp, Artificial Sequence
  chemically synthesized
attcttcctatctatgaatatg

SEQ ID NO: 17593 - DNA, 22 bp, Artificial Sequence
  chemically synthesized
ttcctatctatgaatatggaat

SEQ ID NO: 17594 - DNA, 22 bp, Artificial Sequence
  chemically synthesized
cctatctatgaatatggaatgt

SEQ ID NO: 17595 - DNA, 22 bp, Artificial Sequence
  chemically synthesized
ctatctatgaatatggaatgtt

SEQ ID NO: 17596 - DNA, 22 bp, Artificial Sequence
  chemically synthesized
tctatgaatatggaatgttttt

SEQ ID NO: 17597 - DNA, 22 bp, Artificial Sequence
  chemically synthesized
tgaatatggaatgtttttccat

SEQ ID NO: 17598 - DNA, 22 bp, Artificial Sequence
  chemically synthesized
ttccatgtgtttgtgtcatctc

SEQ ID NO: 17599 - DNA, 22 bp, Artificial Sequence
  chemically synthesized
tccatgtgtttgtgtcatctct

SEQ ID NO: 17600 - DNA, 22 bp, Artificial Sequence
  chemically synthesized
ccatgtgtttgtgtcatctctt

SEQ ID NO: 17601 - DNA, 22 bp, Artificial Sequence
  chemically synthesized
catgtgtttgtgtcatctcttt

SEQ ID NO: 17602 - DNA, 22 bp, Artificial Sequence
  chemically synthesized
gtgtcatctctttatacctgat

SEQ ID NO: 17603 - DNA, 22 bp, Artificial Sequence
  chemically synthesized
tgtcatctctttatacctgatg

SEQ ID NO: 17604 - DNA, 22 bp, Artificial Sequence
  chemically synthesized
tttatacctgatgtataaagaa

SEQ ID NO: 17605 - DNA, 22 bp, Artificial Sequence
  chemically synthesized
tatacctgatgtataaagaaaa

SEQ ID NO: 17606 - DNA, 22 bp, Artificial Sequence
  chemically synthesized
atacctgatgtataaagaaaag

SEQ ID NO: 17607 - DNA, 22 bp, Artificial Sequence
  chemically synthesized
tacctgatgtataaagaaaagc

SEQ ID NO: 17608 - DNA, 22 bp, Artificial Sequence
  chemically synthesized
atgtataaagaaaagctggtat

SEQ ID NO: 17609 - DNA, 22 bp, Artificial Sequence
  chemically synthesized
gtattattcctactcaatctgt

SEQ ID NO: 17610 - DNA, 22 bp, Artificial Sequence
  chemically synthesized
ttcctactcaatctgttccaaa

SEQ ID NO: 17611 - DNA, 22 bp, Artificial Sequence
  chemically synthesized
ctactcaatctgttccaaaaaa

SEQ ID NO: 17612 - DNA, 22 bp, Artificial Sequence
  chemically synthesized
ctcaatctgttccaaaaaattg

SEQ ID NO: 17613 - DNA, 22 bp, Artificial Sequence
  chemically synthesized
aatctgttccaaaaaattgagg

SEQ ID NO: 17614 - DNA, 22 bp, Artificial Sequence
  chemically synthesized
ttccaaaaaattgaggaggagg

SEQ ID NO: 17615 - DNA, 22 bp, Artificial Sequence
  chemically synthesized
caaaaaattgaggaggaggaac

SEQ ID NO: 17616 - DNA, 22 bp, Artificial Sequence
  chemically synthesized
aggaggaggaactcttccctaa

SEQ ID NO: 17617 - DNA, 22 bp, Artificial Sequence
  chemically synthesized
ttccctaatgaggccagcatca

SEQ ID NO: 17618 - DNA, 22 bp, Artificial Sequence
  chemically synthesized
ccctaatgaggccagcatcatt

SEQ ID NO: 17619 - DNA, 22 bp, Artificial Sequence
  chemically synthesized
cctaatgaggccagcatcattc

SEQ ID NO: 17620 - DNA, 22 bp, Artificial Sequence
  chemically synthesized
atgaggccagcatcattctgat

SEQ ID NO: 17621 - DNA, 22 bp, Artificial Sequence
  chemically synthesized
tgataccaaaacctggcagaga

SEQ ID NO: 17622 - DNA, 22 bp, Artificial Sequence
  chemically synthesized
ataccaaaacctggcagagaca

SEQ ID NO: 17623 - DNA, 22 bp, Artificial Sequence
  chemically synthesized
gcagagacacaacagaaaaaag

SEQ ID NO: 17624 - DNA, 22 bp, Artificial Sequence
  chemically synthesized
caggccaatatccttgatgaat

SEQ ID NO: 17625 - DNA, 22 bp, Artificial Sequence
  chemically synthesized
aggccaatatccttgatgaata

SEQ ID NO: 17626 - DNA, 22 bp, Artificial Sequence
  chemically synthesized
gatgaatatagatgcaaaaatc

SEQ ID NO: 17627 - DNA, 22 bp, Artificial Sequence
  chemically synthesized
atgaatatagatgcaaaaatcc

SEQ ID NO: 17628 - DNA, 22 bp, Artificial Sequence
  chemically synthesized
aacaaaatactagcaaaccaaa

SEQ ID NO: 17629 - DNA, 22 bp, Artificial Sequence
  chemically synthesized
gcaaaccaaatccagcagcaca

SEQ ID NO: 17630 - DNA, 22 bp, Artificial Sequence
  chemically synthesized
atctactttgatcaagtaggct

SEQ ID NO: 17631 - DNA, 22 bp, Artificial Sequence
  chemically synthesized
ctttgatcaagtaggctttatc

SEQ ID NO: 17632 - DNA, 22 bp, Artificial Sequence
  chemically synthesized
tgatcaagtaggctttatccct

SEQ ID NO: 17633 - DNA, 22 bp, Artificial Sequence
  chemically synthesized
gatcaagtaggctttatccctg

SEQ ID NO: 17634 - DNA, 22 bp, Artificial Sequence
  chemically synthesized
atcaagtaggctttatccctgg

SEQ ID NO: 17635 - DNA, 22 bp, Artificial Sequence
  chemically synthesized
tatccctgggatgcaaggttgg

SEQ ID NO: 17636 - DNA, 22 bp, Artificial Sequence
  chemically synthesized
atccctgggatgcaaggttggt

SEQ ID NO: 17637 - DNA, 22 bp, Artificial Sequence
  chemically synthesized
tccctgggatgcaaggttggtt

SEQ ID NO: 17638 - DNA, 22 bp, Artificial Sequence
  chemically synthesized
ggatgcaaggttggttcaacat

SEQ ID NO: 17639 - DNA, 22 bp, Artificial Sequence
  chemically synthesized
gttcaacatacacaaatcaata

SEQ ID NO: 17640 - DNA, 22 bp, Artificial Sequence
  chemically synthesized
aacatacacaaatcaataagtg

SEQ ID NO: 17641 - DNA, 22 bp, Artificial Sequence
  chemically synthesized
atcacataaacagagctaaaaa

SEQ ID NO: 17642 - DNA, 22 bp, Artificial Sequence
  chemically synthesized
aaaacaaaaaccacaagattat

SEQ ID NO: 17643 - DNA, 22 bp, Artificial Sequence
  chemically synthesized
tctcaataggtagagaaaaggt

SEQ ID NO: 17644 - DNA, 22 bp, Artificial Sequence
  chemically synthesized
aataggtagagaaaaggttgtc

SEQ ID NO: 17645 - DNA, 22 bp, Artificial Sequence
  chemically synthesized
tcaataaaatttaacatcctcc

SEQ ID NO: 17646 - DNA, 22 bp, Artificial Sequence
  chemically synthesized
aacatcctccatgttaaaaacc

SEQ ID NO: 17647 - DNA, 22 bp, Artificial Sequence
  chemically synthesized
acatcctccatgttaaaaacct

SEQ ID NO: 17648 - DNA, 22 bp, Artificial Sequence
  chemically synthesized
catgttaaaaaccttcagtagg

SEQ ID NO: 17649 - DNA, 22 bp, Artificial Sequence
  chemically synthesized
aaaaccttcagtaggtcaggtg

SEQ ID NO: 17650 - DNA, 22 bp, Artificial Sequence
  chemically synthesized
cagtaggtcaggtgtagtgact

SEQ ID NO: 17651 - DNA, 22 bp, Artificial Sequence
  chemically synthesized
agtaggtcaggtgtagtgactc

SEQ ID NO: 17652 - DNA, 22 bp, Artificial Sequence
  chemically synthesized
acacctgtaatcccagcacttt

SEQ ID NO: 17653 - DNA, 22 bp, Artificial Sequence
  chemically synthesized
taatcccagcactttgggaggc

SEQ ID NO: 17654 - DNA, 22 bp, Artificial Sequence
  chemically synthesized
tgggaggccaaggcgggcatat

SEQ ID NO: 17655 - DNA, 22 bp, Artificial Sequence
  chemically synthesized
gggaggccaaggcgggcatatc

SEQ ID NO: 17656 - DNA, 22 bp, Artificial Sequence
  chemically synthesized
ggaggccaaggcgggcatatct

SEQ ID NO: 17657 - DNA, 22 bp, Artificial Sequence
  chemically synthesized
ttaagcccaggagttcaagacg

SEQ ID NO: 17658 - DNA, 22 bp, Artificial Sequence
  chemically synthesized
aagcccaggagttcaagacgag

SEQ ID NO: 17659 - DNA, 22 bp, Artificial Sequence
  chemically synthesized
agcccaggagttcaagacgagc

SEQ ID NO: 17660 - DNA, 22 bp, Artificial Sequence
  chemically synthesized
aagacgagcctaggcagcatgg

SEQ ID NO: 17661 - DNA, 22 bp, Artificial Sequence
  chemically synthesized
ggcagcatggtgaaaccccatc

SEQ ID NO: 17662 - DNA, 22 bp, Artificial Sequence
  chemically synthesized
tacaaaaaaaaaaaaaaaaaaa

SEQ ID NO: 17663 - DNA, 22 bp, Artificial Sequence
  chemically synthesized
caaaaaaaaaaaaaaaaaaaaa

SEQ ID NO: 17664 - DNA, 22 bp, Artificial Sequence
  chemically synthesized
gcttggtatggtgacatgcacc

SEQ ID NO: 17665 - DNA, 22 bp, Artificial Sequence
  chemically synthesized
ggtatggtgacatgcacctata

SEQ ID NO: 17666 - DNA, 22 bp, Artificial Sequence
  chemically synthesized
gtatggtgacatgcacctatag

SEQ ID NO: 17667 - DNA, 22 bp, Artificial Sequence
  chemically synthesized
tagtcccagctattcaggaggt

SEQ ID NO: 17668 - DNA, 22 bp, Artificial Sequence
  chemically synthesized
ttcaggaggttgaggtgggagg

SEQ ID NO: 17669 - DNA, 22 bp, Artificial Sequence
  chemically synthesized
aggaggttgaggtgggaggatt

SEQ ID NO: 17670 - DNA, 22 bp, Artificial Sequence
  chemically synthesized
aggtgggaggattgtttgagcc

SEQ ID NO: 17671 - DNA, 22 bp, Artificial Sequence
  chemically synthesized
tttgagcccgggaggcagaggt

SEQ ID NO: 17672 - DNA, 22 bp, Artificial Sequence
  chemically synthesized
gagcccgggaggcagaggttgg

SEQ ID NO: 17673 - DNA, 22 bp, Artificial Sequence
  chemically synthesized
agcccgggaggcagaggttggc

SEQ ID NO: 17674 - DNA, 22 bp, Artificial Sequence
  chemically synthesized
gcagcgagctgagatcatgcca

SEQ ID NO: 17675 - DNA, 22 bp, Artificial Sequence
  chemically synthesized
agatcatgccaccgcactccag

SEQ ID NO: 17676 - DNA, 22 bp, Artificial Sequence
  chemically synthesized
cagcctgggcaacggagtgaga

SEQ ID NO: 17677 - DNA, 22 bp, Artificial Sequence
  chemically synthesized
ggcaacggagtgagaccctgtc

SEQ ID NO: 17678 - DNA, 22 bp, Artificial Sequence
  chemically synthesized
tctcaaaaaagaaaaatcacaa

SEQ ID NO: 17679 - DNA, 22 bp, Artificial Sequence
  chemically synthesized
aaaaaagaaaaatcacaaacaa

SEQ ID NO: 17680 - DNA, 22 bp, Artificial Sequence
  chemically synthesized
aacaaactaggcattgaaggaa

SEQ ID NO: 17681 - DNA, 22 bp, Artificial Sequence
  chemically synthesized
ggcattgaaggaacatgcctca

SEQ ID NO: 17682 - DNA, 22 bp, Artificial Sequence
  chemically synthesized
aaggaacatgcctcaaaaaaat

SEQ ID NO: 17683 - DNA, 22 bp, Artificial Sequence
  chemically synthesized
aaaaaaataagaaccatctatg

SEQ ID NO: 17684 - DNA, 22 bp, Artificial Sequence
  chemically synthesized
tgacagacccatagccaatatc

SEQ ID NO: 17685 - DNA, 22 bp, Artificial Sequence
  chemically synthesized
accaaatgggcaaaagctggaa

SEQ ID NO: 17686 - DNA, 22 bp, Artificial Sequence
  chemically synthesized
ccaaatgggcaaaagctggaag

SEQ ID NO: 17687 - DNA, 22 bp, Artificial Sequence
  chemically synthesized
gaagtattctccttgagaaccg

SEQ ID NO: 17688 - DNA, 22 bp, Artificial Sequence
  chemically synthesized
tccttgagaaccgtaacaagac

SEQ ID NO: 17689 - DNA, 22 bp, Artificial Sequence
  chemically synthesized
cttgagaaccgtaacaagacaa

SEQ ID NO: 17690 - DNA, 22 bp, Artificial Sequence
  chemically synthesized
gagaaccgtaacaagacaagga

SEQ ID NO: 17691 - DNA, 22 bp, Artificial Sequence
  chemically synthesized
agaaccgtaacaagacaaggat

SEQ ID NO: 17692 - DNA, 22 bp, Artificial Sequence
  chemically synthesized
tcaccactccttttcagcatag

SEQ ID NO: 17693 - DNA, 22 bp, Artificial Sequence
  chemically synthesized
accactccttttcagcatagtt

SEQ ID NO: 17694 - DNA, 22 bp, Artificial Sequence
  chemically synthesized
cttttcagcatagttctggaag

SEQ ID NO: 17695 - DNA, 22 bp, Artificial Sequence
  chemically synthesized
ttcagcatagttctggaagtcc

SEQ ID NO: 17696 - DNA, 22 bp, Artificial Sequence
  chemically synthesized
tcagcatagttctggaagtcct

SEQ ID NO: 17697 - DNA, 22 bp, Artificial Sequence
  chemically synthesized
cagcatagttctggaagtccta

SEQ ID NO: 17698 - DNA, 22 bp, Artificial Sequence
  chemically synthesized
agcatagttctggaagtcctag

SEQ ID NO: 17699 - DNA, 22 bp, Artificial Sequence
  chemically synthesized
tggaagtcctagccagagcaat

SEQ ID NO: 17700 - DNA, 22 bp, Artificial Sequence
  chemically synthesized
gaagtcctagccagagcaatca

SEQ ID NO: 17701 - DNA, 22 bp, Artificial Sequence
  chemically synthesized
gccagagcaatcaggaaagaga

SEQ ID NO: 17702 - DNA, 22 bp, Artificial Sequence
  chemically synthesized
agataggaagagaagaagtcaa

SEQ ID NO: 17703 - DNA, 22 bp, Artificial Sequence
  chemically synthesized
tttctgtttgcaggcagtataa

SEQ ID NO: 17704 - DNA, 22 bp, Artificial Sequence
  chemically synthesized
ctgtttgcaggcagtataattc

SEQ ID NO: 17705 - DNA, 22 bp, Artificial Sequence
  chemically synthesized
tgtttgcaggcagtataattct

SEQ ID NO: 17706 - DNA, 22 bp, Artificial Sequence
  chemically synthesized
tttgcaggcagtataattctgt

SEQ ID NO: 17707 - DNA, 22 bp, Artificial Sequence
  chemically synthesized
gcaggcagtataattctgtacc

SEQ ID NO: 17708 - DNA, 22 bp, Artificial Sequence
  chemically synthesized
caggcagtataattctgtacct

SEQ ID NO: 17709 - DNA, 22 bp, Artificial Sequence
  chemically synthesized
tgtacctagaaaatctcatagt

SEQ ID NO: 17710 - DNA, 22 bp, Artificial Sequence
  chemically synthesized
tacctagaaaatctcatagtct

SEQ ID NO: 17711 - DNA, 22 bp, Artificial Sequence
  chemically synthesized
gaaaatctcatagtctctgccc

SEQ ID NO: 17712 - DNA, 22 bp, Artificial Sequence
  chemically synthesized
atagtctctgcccagaaactcc

SEQ ID NO: 17713 - DNA, 22 bp, Artificial Sequence
  chemically synthesized
tgcccagaaactcctaaatctg

SEQ ID NO: 17714 - DNA, 22 bp, Artificial Sequence
  chemically synthesized
cccagaaactcctaaatctgtt

SEQ ID NO: 17715 - DNA, 22 bp, Artificial Sequence
  chemically synthesized
ctaaatctgttaaaaatttcag

SEQ ID NO: 17716 - DNA, 22 bp, Artificial Sequence
  chemically synthesized
aatctgttaaaaatttcagcaa

SEQ ID NO: 17717 - DNA, 22 bp, Artificial Sequence
  chemically synthesized
ttaaaaatttcagcaaagtttt

SEQ ID NO: 17718 - DNA, 22 bp, Artificial Sequence
  chemically synthesized
aaaatttcagcaaagttttggc

SEQ ID NO: 17719 - DNA, 22 bp, Artificial Sequence
  chemically synthesized
cagcaaagttttggcattctct

SEQ ID NO: 17720 - DNA, 22 bp, Artificial Sequence
  chemically synthesized
agcaaagttttggcattctcta

SEQ ID NO: 17721 - DNA, 22 bp, Artificial Sequence
  chemically synthesized
tggcattctctatactccaaca

SEQ ID NO: 17722 - DNA, 22 bp, Artificial Sequence
  chemically synthesized
ggcattctctatactccaacac

SEQ ID NO: 17723 - DNA, 22 bp, Artificial Sequence
  chemically synthesized
gcattctctatactccaacacc

SEQ ID NO: 17724 - DNA, 22 bp, Artificial Sequence
  chemically synthesized
tctatactccaacaccttccaa

SEQ ID NO: 17725 - DNA, 22 bp, Artificial Sequence
  chemically synthesized
tatactccaacaccttccaaag

SEQ ID NO: 17726 - DNA, 22 bp, Artificial Sequence
  chemically synthesized
tactccaacaccttccaaagtg

SEQ ID NO: 17727 - DNA, 22 bp, Artificial Sequence
  chemically synthesized
caacaccttccaaagtgagagc

SEQ ID NO: 17728 - DNA, 22 bp, Artificial Sequence
  chemically synthesized
ccaaagtgagagcaaaatcaag

SEQ ID NO: 17729 - DNA, 22 bp, Artificial Sequence
  chemically synthesized
caaagtgagagcaaaatcaaga

SEQ ID NO: 17730 - DNA, 22 bp, Artificial Sequence
  chemically synthesized
acaatagccgcaaaacgaataa

SEQ ID NO: 17731 - DNA, 22 bp, Artificial Sequence
  chemically synthesized
ggaatccagctaaccagggagg

SEQ ID NO: 17732 - DNA, 22 bp, Artificial Sequence
  chemically synthesized
accagggaggtgaaagatctct

SEQ ID NO: 17733 - DNA, 22 bp, Artificial Sequence
  chemically synthesized
tatgagaattacaaaacactgc

SEQ ID NO: 17734 - DNA, 22 bp, Artificial Sequence
  chemically synthesized
tgagaattacaaaacactgctg

SEQ ID NO: 17735 - DNA, 22 bp, Artificial Sequence
  chemically synthesized
caaaacactgctgaaagaaatc

SEQ ID NO: 17736 - DNA, 22 bp, Artificial Sequence
  chemically synthesized
ctgaaagaaatcagagatgaca

SEQ ID NO: 17737 - DNA, 22 bp, Artificial Sequence
  chemically synthesized
aaagaaatcagagatgacacaa

SEQ ID NO: 17738 - DNA, 22 bp, Artificial Sequence
  chemically synthesized
ttttttaacaccttgctttatc

SEQ ID NO: 17739 - DNA, 22 bp, Artificial Sequence
  chemically synthesized
ttttaacaccttgctttatcta

SEQ ID NO: 17740 - DNA, 22 bp, Artificial Sequence
  chemically synthesized
tttaacaccttgctttatctaa

SEQ ID NO: 17741 - DNA, 22 bp, Artificial Sequence
  chemically synthesized
ttaacaccttgctttatctaat

SEQ ID NO: 17742 - DNA, 22 bp, Artificial Sequence
  chemically synthesized
taacaccttgctttatctaatt

SEQ ID NO: 17743 - DNA, 22 bp, Artificial Sequence
  chemically synthesized
aacaccttgctttatctaattc

SEQ ID NO: 17744 - DNA, 22 bp, Artificial Sequence
  chemically synthesized
acaccttgctttatctaattca

SEQ ID NO: 17745 - DNA, 22 bp, Artificial Sequence
  chemically synthesized
gctttatctaattcacttatga

SEQ ID NO: 17746 - DNA, 22 bp, Artificial Sequence
  chemically synthesized
ctttatctaattcacttatgat

SEQ ID NO: 17747 - DNA, 22 bp, Artificial Sequence
  chemically synthesized
tatctaattcacttatgatgaa

SEQ ID NO: 17748 - DNA, 22 bp, Artificial Sequence
  chemically synthesized
atctaattcacttatgatgaag

SEQ ID NO: 17749 - DNA, 22 bp, Artificial Sequence
  chemically synthesized
tctaattcacttatgatgaaga

SEQ ID NO: 17750 - DNA, 22 bp, Artificial Sequence
  chemically synthesized
attcacttatgatgaagatact

SEQ ID NO: 17751 - DNA, 22 bp, Artificial Sequence
  chemically synthesized
acttatgatgaagatactcatt

SEQ ID NO: 17752 - DNA, 22 bp, Artificial Sequence
  chemically synthesized
atgatgaagatactcattcagt

SEQ ID NO: 17753 - DNA, 22 bp, Artificial Sequence
  chemically synthesized
tgatgaagatactcattcagtg

SEQ ID NO: 17754 - DNA, 22 bp, Artificial Sequence
  chemically synthesized
attcagtggaacaggtataata

SEQ ID NO: 17755 - DNA, 22 bp, Artificial Sequence
  chemically synthesized
agtggaacaggtataataagtc

SEQ ID NO: 17756 - DNA, 22 bp, Artificial Sequence
  chemically synthesized
gattaaatataagccttattct

SEQ ID NO: 17757 - DNA, 22 bp, Artificial Sequence
  chemically synthesized
aatataagccttattctctttc

SEQ ID NO: 17758 - DNA, 22 bp, Artificial Sequence
  chemically synthesized
attctctttccagagcccaaga

SEQ ID NO: 17759 - DNA, 22 bp, Artificial Sequence
  chemically synthesized
ttctctttccagagcccaagaa

SEQ ID NO: 17760 - DNA, 22 bp, Artificial Sequence
  chemically synthesized
tctttccagagcccaagaaggg

SEQ ID NO: 17761 - DNA, 22 bp, Artificial Sequence
  chemically synthesized
tttccagagcccaagaaggggc

SEQ ID NO: 17762 - DNA, 22 bp, Artificial Sequence
  chemically synthesized
tccagagcccaagaaggggcac

SEQ ID NO: 17763 - DNA, 22 bp, Artificial Sequence
  chemically synthesized
ccagagcccaagaaggggcact

SEQ ID NO: 17764 - DNA, 22 bp, Artificial Sequence
  chemically synthesized
cagagcccaagaaggggcacta

SEQ ID NO: 17765 - DNA, 22 bp, Artificial Sequence
  chemically synthesized
tcagtgcccagtcaataatgac

SEQ ID NO: 17766 - DNA, 22 bp, Artificial Sequence
  chemically synthesized
atatttttcccctttacggttt

SEQ ID NO: 17767 - DNA, 22 bp, Artificial Sequence
  chemically synthesized
ttcccctttacggtttctttct

SEQ ID NO: 17768 - DNA, 22 bp, Artificial Sequence
  chemically synthesized
tcccctttacggtttctttctt

SEQ ID NO: 17769 - DNA, 22 bp, Artificial Sequence
  chemically synthesized
cccctttacggtttctttcttc

SEQ ID NO: 17770 - DNA, 22 bp, Artificial Sequence
  chemically synthesized
ccctttacggtttctttcttct

SEQ ID NO: 17771 - DNA, 22 bp, Artificial Sequence
  chemically synthesized
tacggtttctttcttctgtagt

SEQ ID NO: 17772 - DNA, 22 bp, Artificial Sequence
  chemically synthesized
acggtttctttcttctgtagtg

SEQ ID NO: 17773 - DNA, 22 bp, Artificial Sequence
  chemically synthesized
cggtttctttcttctgtagtgt

SEQ ID NO: 17774 - DNA, 22 bp, Artificial Sequence
  chemically synthesized
ctttcttctgtagtgtggtaca

SEQ ID NO: 17775 - DNA, 22 bp, Artificial Sequence
  chemically synthesized
tttcttctgtagtgtggtacac

SEQ ID NO: 17776 - DNA, 22 bp, Artificial Sequence
  chemically synthesized
tcttctgtagtgtggtacactc

SEQ ID NO: 17777 - DNA, 22 bp, Artificial Sequence
  chemically synthesized
cttctgtagtgtggtacactcg

SEQ ID NO: 17778 - DNA, 22 bp, Artificial Sequence
  chemically synthesized
ttctgtagtgtggtacactcgt

SEQ ID NO: 17779 - DNA, 22 bp, Artificial Sequence
  chemically synthesized
ctgtagtgtggtacactcgttt

SEQ ID NO: 17780 - DNA, 22 bp, Artificial Sequence
  chemically synthesized
tgtagtgtggtacactcgtttc

SEQ ID NO: 17781 - DNA, 22 bp, Artificial Sequence
  chemically synthesized
tagtgtggtacactcgtttctt

SEQ ID NO: 17782 - DNA, 22 bp, Artificial Sequence
  chemically synthesized
gtttcttaagataaggaaactt

SEQ ID NO: 17783 - DNA, 22 bp, Artificial Sequence
  chemically synthesized
cttaagataaggaaacttgaac

SEQ ID NO: 17784 - DNA, 22 bp, Artificial Sequence
  chemically synthesized
ttaagataaggaaacttgaact

SEQ ID NO: 17785 - DNA, 22 bp, Artificial Sequence
  chemically synthesized
aagataaggaaacttgaactac

SEQ ID NO: 17786 - DNA, 22 bp, Artificial Sequence
  chemically synthesized
agataaggaaacttgaactacc

SEQ ID NO: 17787 - DNA, 22 bp, Artificial Sequence
  chemically synthesized
gaactaccttcctgtttgcttc

SEQ ID NO: 17788 - DNA, 22 bp, Artificial Sequence
  chemically synthesized
aactaccttcctgtttgcttct

SEQ ID NO: 17789 - DNA, 22 bp, Artificial Sequence
  chemically synthesized
ccttcctgtttgcttctacaca

SEQ ID NO: 17790 - DNA, 22 bp, Artificial Sequence
  chemically synthesized
cctgtttgcttctacacatacc

SEQ ID NO: 17791 - DNA, 22 bp, Artificial Sequence
  chemically synthesized
ctgtttgcttctacacataccc

SEQ ID NO: 17792 - DNA, 22 bp, Artificial Sequence
  chemically synthesized
tttgcttctacacatacccatt

SEQ ID NO: 17793 - DNA, 22 bp, Artificial Sequence
  chemically synthesized
gcttctacacatacccattctc

SEQ ID NO: 17794 - DNA, 22 bp, Artificial Sequence
  chemically synthesized
cttctacacatacccattctct

SEQ ID NO: 17795 - DNA, 22 bp, Artificial Sequence
  chemically synthesized
ctacacatacccattctctttt

SEQ ID NO: 17796 - DNA, 22 bp, Artificial Sequence
  chemically synthesized
tacacatacccattctcttttt

SEQ ID NO: 17797 - DNA, 22 bp, Artificial Sequence
  chemically synthesized
cacatacccattctcttttttt

SEQ ID NO: 17798 - DNA, 22 bp, Artificial Sequence
  chemically synthesized
tctttttttgccactctggtca

SEQ ID NO: 17799 - DNA, 22 bp, Artificial Sequence
  chemically synthesized
tttttttgccactctggtcagg

SEQ ID NO: 17800 - DNA, 22 bp, Artificial Sequence
  chemically synthesized
tttttgccactctggtcaggta

SEQ ID NO: 17801 - DNA, 22 bp, Artificial Sequence
  chemically synthesized
ttttgccactctggtcaggtat

SEQ ID NO: 17802 - DNA, 22 bp, Artificial Sequence
  chemically synthesized
tttgccactctggtcaggtata

SEQ ID NO: 17803 - DNA, 22 bp, Artificial Sequence
  chemically synthesized
ttgccactctggtcaggtatag

SEQ ID NO: 17804 - DNA, 22 bp, Artificial Sequence
  chemically synthesized
tgccactctggtcaggtatagg

SEQ ID NO: 17805 - DNA, 22 bp, Artificial Sequence
  chemically synthesized
gccactctggtcaggtatagga

SEQ ID NO: 17806 - DNA, 22 bp, Artificial Sequence
  chemically synthesized
ccactctggtcaggtataggat

SEQ ID NO: 17807 - DNA, 22 bp, Artificial Sequence
  chemically synthesized
tggtcaggtataggatgatccc

SEQ ID NO: 17808 - DNA, 22 bp, Artificial Sequence
  chemically synthesized
gtcaggtataggatgatcccta

SEQ ID NO: 17809 - DNA, 22 bp, Artificial Sequence
  chemically synthesized
ccactttcagttaaaaactcct

SEQ ID NO: 17810 - DNA, 22 bp, Artificial Sequence
  chemically synthesized
tcagttaaaaactcctcctctt

SEQ ID NO: 17811 - DNA, 22 bp, Artificial Sequence
  chemically synthesized
cagttaaaaactcctcctctta

SEQ ID NO: 17812 - DNA, 22 bp, Artificial Sequence
  chemically synthesized
agttaaaaactcctcctcttac

SEQ ID NO: 17813 - DNA, 22 bp, Artificial Sequence
  chemically synthesized
aaaactcctcctcttactaaat

SEQ ID NO: 17814 - DNA, 22 bp, Artificial Sequence
  chemically synthesized
ctcctcttactaaatgttctct

SEQ ID NO: 17815 - DNA, 22 bp, Artificial Sequence
  chemically synthesized
ctcttactaaatgttctcttac

SEQ ID NO: 17816 - DNA, 22 bp, Artificial Sequence
  chemically synthesized
ttactaaatgttctcttaccct

SEQ ID NO: 17817 - DNA, 22 bp, Artificial Sequence
  chemically synthesized
actaaatgttctcttaccctct

SEQ ID NO: 17818 - DNA, 22 bp, Artificial Sequence
  chemically synthesized
ctaaatgttctcttaccctctg

SEQ ID NO: 17819 - DNA, 22 bp, Artificial Sequence
  chemically synthesized
aatgttctcttaccctctggcc

SEQ ID NO: 17820 - DNA, 22 bp, Artificial Sequence
  chemically synthesized
tcttaccctctggcctgagtag

SEQ ID NO: 17821 - DNA, 22 bp, Artificial Sequence
  chemically synthesized
ttaccctctggcctgagtagaa

SEQ ID NO: 17822 - DNA, 22 bp, Artificial Sequence
  chemically synthesized
accctctggcctgagtagaacc

SEQ ID NO: 17823 - DNA, 22 bp, Artificial Sequence
  chemically synthesized
ccctctggcctgagtagaacct

SEQ ID NO: 17824 - DNA, 22 bp, Artificial Sequence
  chemically synthesized
tggcctgagtagaacctaggga

SEQ ID NO: 17825 - DNA, 22 bp, Artificial Sequence
  chemically synthesized
gcctgagtagaacctagggaaa

SEQ ID NO: 17826 - DNA, 22 bp, Artificial Sequence
  chemically synthesized
agtagaacctagggaaaatgga

SEQ ID NO: 17827 - DNA, 22 bp, Artificial Sequence
  chemically synthesized
gggaaaatggaagagaaaaaga

SEQ ID NO: 17828 - DNA, 22 bp, Artificial Sequence
  chemically synthesized
ggaagggaataagtagtcctgt

SEQ ID NO: 17829 - DNA, 22 bp, Artificial Sequence
  chemically synthesized
tttgtttgtgtgtttgctttag

SEQ ID NO: 17830 - DNA, 22 bp, Artificial Sequence
  chemically synthesized
gtttgtgtgtttgctttagcac

SEQ ID NO: 17831 - DNA, 22 bp, Artificial Sequence
  chemically synthesized
tttgtgtgtttgctttagcacc

SEQ ID NO: 17832 - DNA, 22 bp, Artificial Sequence
  chemically synthesized
gtgtgtttgctttagcacctgc

SEQ ID NO: 17833 - DNA, 22 bp, Artificial Sequence
  chemically synthesized
tgtgtttgctttagcacctgct

SEQ ID NO: 17834 - DNA, 22 bp, Artificial Sequence
  chemically synthesized
gctttagcacctgctatatcct

SEQ ID NO: 17835 - DNA, 22 bp, Artificial Sequence
  chemically synthesized
ctttagcacctgctatatccta

SEQ ID NO: 17836 - DNA, 22 bp, Artificial Sequence
  chemically synthesized
tagcacctgctatatcctaggt

SEQ ID NO: 17837 - DNA, 22 bp, Artificial Sequence
  chemically synthesized
agcacctgctatatcctaggtg

SEQ ID NO: 17838 - DNA, 22 bp, Artificial Sequence
  chemically synthesized
gcacctgctatatcctaggtgc

SEQ ID NO: 17839 - DNA, 22 bp, Artificial Sequence
  chemically synthesized
ctatatcctaggtgctgtgtta

SEQ ID NO: 17840 - DNA, 22 bp, Artificial Sequence
  chemically synthesized
tatcctaggtgctgtgttaggc

SEQ ID NO: 17841 - DNA, 22 bp, Artificial Sequence
  chemically synthesized
ggtgctgtgttaggcacacatt

SEQ ID NO: 17842 - DNA, 22 bp, Artificial Sequence
  chemically synthesized
tgttaggcacacattattttaa

SEQ ID NO: 17843 - DNA, 22 bp, Artificial Sequence
  chemically synthesized
ggcacacattattttaagtggc

SEQ ID NO: 17844 - DNA, 22 bp, Artificial Sequence
  chemically synthesized
ttttaagtggccattatattac

SEQ ID NO: 17845 - DNA, 22 bp, Artificial Sequence
  chemically synthesized
taagtggccattatattactac

SEQ ID NO: 17846 - DNA, 22 bp, Artificial Sequence
  chemically synthesized
aagtggccattatattactact

SEQ ID NO: 17847 - DNA, 22 bp, Artificial Sequence
  chemically synthesized
agtggccattatattactacta

SEQ ID NO: 17848 - DNA, 22 bp, Artificial Sequence
  chemically synthesized
tattactactactcactctggt

SEQ ID NO: 17849 - DNA, 22 bp, Artificial Sequence
  chemically synthesized
ctactactcactctggtcgttg

SEQ ID NO: 17850 - DNA, 22 bp, Artificial Sequence
  chemically synthesized
ctactcactctggtcgttgcca

SEQ ID NO: 17851 - DNA, 22 bp, Artificial Sequence
  chemically synthesized
ctcactctggtcgttgccaagg

SEQ ID NO: 17852 - DNA, 22 bp, Artificial Sequence
  chemically synthesized
actctggtcgttgccaaggtag

SEQ ID NO: 17853 - DNA, 22 bp, Artificial Sequence
  chemically synthesized
tggtcgttgccaaggtaggtag

SEQ ID NO: 17854 - DNA, 22 bp, Artificial Sequence
  chemically synthesized
gtcgttgccaaggtaggtagta

SEQ ID NO: 17855 - DNA, 22 bp, Artificial Sequence
  chemically synthesized
ccaaggtaggtagtactttctt

SEQ ID NO: 17856 - DNA, 22 bp, Artificial Sequence
  chemically synthesized
tcttggatagttggttcatgtt

SEQ ID NO: 17857 - DNA, 22 bp, Artificial Sequence
  chemically synthesized
cttggatagttggttcatgtta

SEQ ID NO: 17858 - DNA, 22 bp, Artificial Sequence
  chemically synthesized
ttggatagttggttcatgttac

SEQ ID NO: 17859 - DNA, 22 bp, Artificial Sequence
  chemically synthesized
ggatagttggttcatgttactt

SEQ ID NO: 17860 - DNA, 22 bp, Artificial Sequence
  chemically synthesized
gatagttggttcatgttactta

SEQ ID NO: 17861 - DNA, 22 bp, Artificial Sequence
  chemically synthesized
gttcatgttacttacagatggt

SEQ ID NO: 17862 - DNA, 22 bp, Artificial Sequence
  chemically synthesized
atgttacttacagatggtgggc

SEQ ID NO: 17863 - DNA, 22 bp, Artificial Sequence
  chemically synthesized
cttacagatggtgggcttgttg

SEQ ID NO: 17864 - DNA, 22 bp, Artificial Sequence
  chemically synthesized
acagatggtgggcttgttgagg

SEQ ID NO: 17865 - DNA, 22 bp, Artificial Sequence
  chemically synthesized
cagatggtgggcttgttgaggc

SEQ ID NO: 17866 - DNA, 22 bp, Artificial Sequence
  chemically synthesized
gttgaggcaaacccagtggata

SEQ ID NO: 17867 - DNA, 22 bp, Artificial Sequence
  chemically synthesized
ttgaggcaaacccagtggataa

SEQ ID NO: 17868 - DNA, 22 bp, Artificial Sequence
  chemically synthesized
aggcaaacccagtggataatca

SEQ ID NO: 17869 - DNA, 22 bp, Artificial Sequence
  chemically synthesized
tctaatctcactcaaatttttc

SEQ ID NO: 17870 - DNA, 22 bp, Artificial Sequence
  chemically synthesized
taatctcactcaaatttttctt

SEQ ID NO: 17871 - DNA, 22 bp, Artificial Sequence
  chemically synthesized
atctcactcaaatttttcttca

SEQ ID NO: 17872 - DNA, 22 bp, Artificial Sequence
  chemically synthesized
actcaaatttttcttcacattt

SEQ ID NO: 17873 - DNA, 22 bp, Artificial Sequence
  chemically synthesized
aaatttttcttcacattttttg

SEQ ID NO: 17874 - DNA, 22 bp, Artificial Sequence
  chemically synthesized
ttcttcacattttttggtttgt

SEQ ID NO: 17875 - DNA, 22 bp, Artificial Sequence
  chemically synthesized
tcttcacattttttggtttgtt

SEQ ID NO: 17876 - DNA, 22 bp, Artificial Sequence
  chemically synthesized
cttcacattttttggtttgttt

SEQ ID NO: 17877 - DNA, 22 bp, Artificial Sequence
  chemically synthesized
ttcacattttttggtttgtttt

SEQ ID NO: 17878 - DNA, 22 bp, Artificial Sequence
  chemically synthesized
cacattttttggtttgttttgg

SEQ ID NO: 17879 - DNA, 22 bp, Artificial Sequence
  chemically synthesized
acattttttggtttgttttggt

SEQ ID NO: 17880 - DNA, 22 bp, Artificial Sequence
  chemically synthesized
tttggtttgttttggtttttga

SEQ ID NO: 17881 - DNA, 22 bp, Artificial Sequence
  chemically synthesized
ttggtttgttttggtttttgat

SEQ ID NO: 17882 - DNA, 22 bp, Artificial Sequence
  chemically synthesized
tggtttgttttggtttttgatg

SEQ ID NO: 17883 - DNA, 22 bp, Artificial Sequence
  chemically synthesized
ggtttgttttggtttttgatgg

SEQ ID NO: 17884 - DNA, 22 bp, Artificial Sequence
  chemically synthesized
gtttgttttggtttttgatggt

SEQ ID NO: 17885 - DNA, 22 bp, Artificial Sequence
  chemically synthesized
gttttggtttttgatggtagtg

SEQ ID NO: 17886 - DNA, 22 bp, Artificial Sequence
  chemically synthesized
ttttggtttttgatggtagtgg

SEQ ID NO: 17887 - DNA, 22 bp, Artificial Sequence
  chemically synthesized
tggtttttgatggtagtggctt

SEQ ID NO: 17888 - DNA, 22 bp, Artificial Sequence
  chemically synthesized
ggtttttgatggtagtggctta

SEQ ID NO: 17889 - DNA, 22 bp, Artificial Sequence
  chemically synthesized
gtttttgatggtagtggcttat

SEQ ID NO: 17890 - DNA, 22 bp, Artificial Sequence
  chemically synthesized
ttgatggtagtggcttattttt

SEQ ID NO: 17891 - DNA, 22 bp, Artificial Sequence
  chemically synthesized
tgatggtagtggcttatttttg

SEQ ID NO: 17892 - DNA, 22 bp, Artificial Sequence
  chemically synthesized
gatggtagtggcttatttttgt

SEQ ID NO: 17893 - DNA, 22 bp, Artificial Sequence
  chemically synthesized
atggtagtggcttatttttgtt

SEQ ID NO: 17894 - DNA, 22 bp, Artificial Sequence
  chemically synthesized
atttttgttgctggtttgtttt

SEQ ID NO: 17895 - DNA, 22 bp, Artificial Sequence
  chemically synthesized
tttttgttgctggtttgttttt

SEQ ID NO: 17896 - DNA, 22 bp, Artificial Sequence
  chemically synthesized
ttgttgctggtttgttttttgt

SEQ ID NO: 17897 - DNA, 22 bp, Artificial Sequence
  chemically synthesized
tgttgctggtttgttttttgtt

SEQ ID NO: 17898 - DNA, 22 bp, Artificial Sequence
  chemically synthesized
gttgctggtttgttttttgttt

SEQ ID NO: 17899 - DNA, 22 bp, Artificial Sequence
  chemically synthesized
ttgctggtttgttttttgtttt

SEQ ID NO: 17900 - DNA, 22 bp, Artificial Sequence
  chemically synthesized
ctggtttgttttttgttttttt

SEQ ID NO: 17901 - DNA, 22 bp, Artificial Sequence
  chemically synthesized
gtttgttttttgtttttttttg

SEQ ID NO: 17902 - DNA, 22 bp, Artificial Sequence
  chemically synthesized
gttttttgtttttttttgagat

SEQ ID NO: 17903 - DNA, 22 bp, Artificial Sequence
  chemically synthesized
ttttttgtttttttttgagatg

SEQ ID NO: 17904 - DNA, 22 bp, Artificial Sequence
  chemically synthesized
tttgtttttttttgagatggca

SEQ ID NO: 17905 - DNA, 22 bp, Artificial Sequence
  chemically synthesized
ttgtttttttttgagatggcaa

SEQ ID NO: 17906 - DNA, 22 bp, Artificial Sequence
  chemically synthesized
tgtttttttttgagatggcaag

SEQ ID NO: 17907 - DNA, 22 bp, Artificial Sequence
  chemically synthesized
gtttttttttgagatggcaaga

SEQ ID NO: 17908 - DNA, 22 bp, Artificial Sequence
  chemically synthesized
tttttttttgagatggcaagaa

SEQ ID NO: 17909 - DNA, 22 bp, Artificial Sequence
  chemically synthesized
ttttttgagatggcaagaattg

SEQ ID NO: 17910 - DNA, 22 bp, Artificial Sequence
  chemically synthesized
tttttgagatggcaagaattgg

SEQ ID NO: 17911 - DNA, 22 bp, Artificial Sequence
  chemically synthesized
ttttgagatggcaagaattggt

SEQ ID NO: 17912 - DNA, 22 bp, Artificial Sequence
  chemically synthesized
tttgagatggcaagaattggta

SEQ ID NO: 17913 - DNA, 22 bp, Artificial Sequence
  chemically synthesized
ttgagatggcaagaattggtag

SEQ ID NO: 17914 - DNA, 22 bp, Artificial Sequence
  chemically synthesized
tgagatggcaagaattggtagt

SEQ ID NO: 17915 - DNA, 22 bp, Artificial Sequence
  chemically synthesized
gagatggcaagaattggtagtt

SEQ ID NO: 17916 - DNA, 22 bp, Artificial Sequence
  chemically synthesized
agatggcaagaattggtagttt

SEQ ID NO: 17917 - DNA, 22 bp, Artificial Sequence
  chemically synthesized
gtagttttatttattaattgcc

SEQ ID NO: 17918 - DNA, 22 bp, Artificial Sequence
  chemically synthesized
tatttattaattgcctaagggt

SEQ ID NO: 17919 - DNA, 22 bp, Artificial Sequence
  chemically synthesized
atttattaattgcctaagggtc

SEQ ID NO: 17920 - DNA, 22 bp, Artificial Sequence
  chemically synthesized
tttattaattgcctaagggtct

SEQ ID NO: 17921 - DNA, 22 bp, Artificial Sequence
  chemically synthesized
attaattgcctaagggtctcta

SEQ ID NO: 17922 - DNA, 22 bp, Artificial Sequence
  chemically synthesized
ttaattgcctaagggtctctac

SEQ ID NO: 17923 - DNA, 22 bp, Artificial Sequence
  chemically synthesized
attgcctaagggtctctacttt

SEQ ID NO: 17924 - DNA, 22 bp, Artificial Sequence
  chemically synthesized
cctaagggtctctacttttttt

SEQ ID NO: 17925 - DNA, 22 bp, Artificial Sequence
  chemically synthesized
agggtctctactttttttaaaa

SEQ ID NO: 17926 - DNA, 22 bp, Artificial Sequence
  chemically synthesized
tactttttttaaaagatgagag

SEQ ID NO: 17927 - DNA, 22 bp, Artificial Sequence
  chemically synthesized
ctttttttaaaagatgagagta

SEQ ID NO: 17928 - DNA, 22 bp, Artificial Sequence
  chemically synthesized
tttttaaaagatgagagtagta

SEQ ID NO: 17929 - DNA, 22 bp, Artificial Sequence
  chemically synthesized
ttttaaaagatgagagtagtaa

SEQ ID NO: 17930 - DNA, 22 bp, Artificial Sequence
  chemically synthesized
tttaaaagatgagagtagtaaa

SEQ ID NO: 17931 - DNA, 22 bp, Artificial Sequence
  chemically synthesized
ttaaaagatgagagtagtaaaa

SEQ ID NO: 17932 - DNA, 22 bp, Artificial Sequence
  chemically synthesized
taaaagatgagagtagtaaaat

SEQ ID NO: 17933 - DNA, 22 bp, Artificial Sequence
  chemically synthesized
aaaagatgagagtagtaaaata

SEQ ID NO: 17934 - DNA, 22 bp, Artificial Sequence
  chemically synthesized
aaagatgagagtagtaaaatag

SEQ ID NO: 17935 - DNA, 22 bp, Artificial Sequence
  chemically synthesized
atagatacatacatacccttac

SEQ ID NO: 17936 - DNA, 22 bp, Artificial Sequence
  chemically synthesized
actggggactgcttatattctt

SEQ ID NO: 17937 - DNA, 22 bp, Artificial Sequence
  chemically synthesized
ctggggactgcttatattcttt

SEQ ID NO: 17938 - DNA, 22 bp, Artificial Sequence
  chemically synthesized
gggactgcttatattctttaga

SEQ ID NO: 17939 - DNA, 22 bp, Artificial Sequence
  chemically synthesized
cttatattctttagagaaaaaa

SEQ ID NO: 17940 - DNA, 22 bp, Artificial Sequence
  chemically synthesized
atattctttagagaaaaaatta

SEQ ID NO: 17941 - DNA, 22 bp, Artificial Sequence
  chemically synthesized
tattctttagagaaaaaattac

SEQ ID NO: 17942 - DNA, 22 bp, Artificial Sequence
  chemically synthesized
tttagagaaaaaattacatatt

SEQ ID NO: 17943 - DNA, 22 bp, Artificial Sequence
  chemically synthesized
tagagaaaaaattacatattag

SEQ ID NO: 17944 - DNA, 22 bp, Artificial Sequence
  chemically synthesized
agagaaaaaattacatattagc

SEQ ID NO: 17945 - DNA, 22 bp, Artificial Sequence
  chemically synthesized
gagaaaaaattacatattagcc

SEQ ID NO: 17946 - DNA, 22 bp, Artificial Sequence
  chemically synthesized
catattagcctgacaaacacca

SEQ ID NO: 17947 - DNA, 22 bp, Artificial Sequence
  chemically synthesized
gcctgacaaacaccagtaaaat

SEQ ID NO: 17948 - DNA, 22 bp, Artificial Sequence
  chemically synthesized
acaaacaccagtaaaatgtaaa

SEQ ID NO: 17949 - DNA, 22 bp, Artificial Sequence
  chemically synthesized
gagtaaataaatgaatgtatat

SEQ ID NO: 17950 - DNA, 22 bp, Artificial Sequence
  chemically synthesized
agtaaataaatgaatgtatatt

SEQ ID NO: 17951 - DNA, 22 bp, Artificial Sequence
  chemically synthesized
tgtgtctccaaatatatatatc

SEQ ID NO: 17952 - DNA, 22 bp, Artificial Sequence
  chemically synthesized
gtgtctccaaatatatatatct

SEQ ID NO: 17953 - DNA, 22 bp, Artificial Sequence
  chemically synthesized
tgtctccaaatatatatatcta

SEQ ID NO: 17954 - DNA, 22 bp, Artificial Sequence
  chemically synthesized
caaatatatatatctatattct

SEQ ID NO: 17955 - DNA, 22 bp, Artificial Sequence
  chemically synthesized
tattcttacaaatgtgtttata

SEQ ID NO: 17956 - DNA, 22 bp, Artificial Sequence
  chemically synthesized
ttacaaatgtgtttatatgtaa

SEQ ID NO: 17957 - DNA, 22 bp, Artificial Sequence
  chemically synthesized
acaaatgtgtttatatgtaata

SEQ ID NO: 17958 - DNA, 22 bp, Artificial Sequence
  chemically synthesized
caaatgtgtttatatgtaatat

SEQ ID NO: 17959 - DNA, 22 bp, Artificial Sequence
  chemically synthesized
atatgtaatatcaatttataag

SEQ ID NO: 17960 - DNA, 22 bp, Artificial Sequence
  chemically synthesized
tatgtaatatcaatttataaga

SEQ ID NO: 17961 - DNA, 22 bp, Artificial Sequence
  chemically synthesized
ataagaacttaaaatgttggct

SEQ ID NO: 17962 - DNA, 22 bp, Artificial Sequence
  chemically synthesized
taagaacttaaaatgttggctc

SEQ ID NO: 17963 - DNA, 22 bp, Artificial Sequence
  chemically synthesized
aaaatgttggctcaagtgaggg

SEQ ID NO: 17964 - DNA, 22 bp, Artificial Sequence
  chemically synthesized
aaatgttggctcaagtgaggga

SEQ ID NO: 17965 - DNA, 22 bp, Artificial Sequence
  chemically synthesized
gctcaagtgagggattgtggaa

SEQ ID NO: 17966 - DNA, 22 bp, Artificial Sequence
  chemically synthesized
aagtgagggattgtggaaggta

SEQ ID NO: 17967 - DNA, 22 bp, Artificial Sequence
  chemically synthesized
tggaaggtagcattatatggcc

SEQ ID NO: 17968 - DNA, 22 bp, Artificial Sequence
  chemically synthesized
tatggccatttcaacatttgaa

SEQ ID NO: 17969 - DNA, 22 bp, Artificial Sequence
  chemically synthesized
caacatttgaacttttttcttt

SEQ ID NO: 17970 - DNA, 22 bp, Artificial Sequence
  chemically synthesized
aacatttgaacttttttctttt

SEQ ID NO: 17971 - DNA, 22 bp, Artificial Sequence
  chemically synthesized
gaacttttttcttttcttcatt

SEQ ID NO: 17972 - DNA, 22 bp, Artificial Sequence
  chemically synthesized
aacttttttcttttcttcattt

SEQ ID NO: 17973 - DNA, 22 bp, Artificial Sequence
  chemically synthesized
ttttcttttcttcattttcttc

SEQ ID NO: 17974 - DNA, 22 bp, Artificial Sequence
  chemically synthesized
tttcttttcttcattttcttct

SEQ ID NO: 17975 - DNA, 22 bp, Artificial Sequence
  chemically synthesized
ttcttttcttcattttcttctt

SEQ ID NO: 17976 - DNA, 22 bp, Artificial Sequence
  chemically synthesized
tcttttcttcattttcttcttt

SEQ ID NO: 17977 - DNA, 22 bp, Artificial Sequence
  chemically synthesized
cttttcttcattttcttctttt

SEQ ID NO: 17978 - DNA, 22 bp, Artificial Sequence
  chemically synthesized
ttttcttcattttcttcttttc

SEQ ID NO: 17979 - DNA, 22 bp, Artificial Sequence
  chemically synthesized
ttcttcattttcttcttttctt

SEQ ID NO: 17980 - DNA, 22 bp, Artificial Sequence
  chemically synthesized
tcttcattttcttcttttcttc

SEQ ID NO: 17981 - DNA, 22 bp, Artificial Sequence
  chemically synthesized
cttcattttcttcttttcttca

SEQ ID NO: 17982 - DNA, 22 bp, Artificial Sequence
  chemically synthesized
ttcattttcttcttttcttcag

SEQ ID NO: 17983 - DNA, 22 bp, Artificial Sequence
  chemically synthesized
cattttcttcttttcttcagga

SEQ ID NO: 17984 - DNA, 22 bp, Artificial Sequence
  chemically synthesized
attttcttcttttcttcaggaa

SEQ ID NO: 17985 - DNA, 22 bp, Artificial Sequence
  chemically synthesized
tcttcttttcttcaggaatatt

SEQ ID NO: 17986 - DNA, 22 bp, Artificial Sequence
  chemically synthesized
cttcttttcttcaggaatattt

SEQ ID NO: 17987 - DNA, 22 bp, Artificial Sequence
  chemically synthesized
ttcttttcttcaggaatatttt

SEQ ID NO: 17988 - DNA, 22 bp, Artificial Sequence
  chemically synthesized
cttttcttcaggaatatttttc

SEQ ID NO: 17989 - DNA, 22 bp, Artificial Sequence
  chemically synthesized
ttttcttcaggaatatttttca

SEQ ID NO: 17990 - DNA, 22 bp, Artificial Sequence
  chemically synthesized
ttcttcaggaatatttttcaag

SEQ ID NO: 17991 - DNA, 22 bp, Artificial Sequence
  chemically synthesized
tcttcaggaatatttttcaaga

SEQ ID NO: 17992 - DNA, 22 bp, Artificial Sequence
  chemically synthesized
cttcaggaatatttttcaagat

SEQ ID NO: 17993 - DNA, 22 bp, Artificial Sequence
  chemically synthesized
ttcaggaatatttttcaagatg

SEQ ID NO: 17994 - DNA, 22 bp, Artificial Sequence
  chemically synthesized
caggaatatttttcaagatgtc

SEQ ID NO: 17995 - DNA, 22 bp, Artificial Sequence
  chemically synthesized
aggaatatttttcaagatgtct

SEQ ID NO: 17996 - DNA, 22 bp, Artificial Sequence
  chemically synthesized
ttcaagatgtcttacacagaga

SEQ ID NO: 17997 - DNA, 22 bp, Artificial Sequence
  chemically synthesized
tcaagatgtcttacacagagac

SEQ ID NO: 17998 - DNA, 22 bp, Artificial Sequence
  chemically synthesized
caagatgtcttacacagagaca

SEQ ID NO: 17999 - DNA, 22 bp, Artificial Sequence
  chemically synthesized
aagatgtcttacacagagacac

SEQ ID NO: 18000 - DNA, 22 bp, Artificial Sequence
  chemically synthesized
acacagagacactctagtgaaa

SEQ ID NO: 18001 - DNA, 22 bp, Artificial Sequence
  chemically synthesized
cacagagacactctagtgaaag

SEQ ID NO: 18002 - DNA, 22 bp, Artificial Sequence
  chemically synthesized
tagtgaaagccttcctggatca

SEQ ID NO: 18003 - DNA, 22 bp, Artificial Sequence
  chemically synthesized
gtgaaagccttcctggatcagg

SEQ ID NO: 18004 - DNA, 22 bp, Artificial Sequence
  chemically synthesized
cctggatcaggtaaatgttgaa

SEQ ID NO: 18005 - DNA, 22 bp, Artificial Sequence
  chemically synthesized
ctggatcaggtaaatgttgaac

SEQ ID NO: 18006 - DNA, 22 bp, Artificial Sequence
  chemically synthesized
gatcaggtaaatgttgaacttg

SEQ ID NO: 18007 - DNA, 22 bp, Artificial Sequence
  chemically synthesized
aacttgagattgtcagagtgaa

SEQ ID NO: 18008 - DNA, 22 bp, Artificial Sequence
  chemically synthesized
gagattgtcagagtgaatgata

SEQ ID NO: 18009 - DNA, 22 bp, Artificial Sequence
  chemically synthesized
agattgtcagagtgaatgatat

SEQ ID NO: 18010 - DNA, 22 bp, Artificial Sequence
  chemically synthesized
tcagagtgaatgatatgacatg

SEQ ID NO: 18011 - DNA, 22 bp, Artificial Sequence
  chemically synthesized
tcttttttaatatatcctacaa

SEQ ID NO: 18012 - DNA, 22 bp, Artificial Sequence
  chemically synthesized
cttttttaatatatcctacaat

SEQ ID NO: 18013 - DNA, 22 bp, Artificial Sequence
  chemically synthesized
ttttttaatatatcctacaatg

SEQ ID NO: 18014 - DNA, 22 bp, Artificial Sequence
  chemically synthesized
ttttaatatatcctacaatgcc

SEQ ID NO: 18015 - DNA, 22 bp, Artificial Sequence
  chemically synthesized
tttaatatatcctacaatgcct

SEQ ID NO: 18016 - DNA, 22 bp, Artificial Sequence
  chemically synthesized
ttaatatatcctacaatgcctg

SEQ ID NO: 18017 - DNA, 22 bp, Artificial Sequence
  chemically synthesized
taatatatcctacaatgcctgt

SEQ ID NO: 18018 - DNA, 22 bp, Artificial Sequence
  chemically synthesized
aatatatcctacaatgcctgtt

SEQ ID NO: 18019 - DNA, 22 bp, Artificial Sequence
  chemically synthesized
atatatcctacaatgcctgttc

SEQ ID NO: 18020 - DNA, 22 bp, Artificial Sequence
  chemically synthesized
caatgcctgttctatatattta

SEQ ID NO: 18021 - DNA, 22 bp, Artificial Sequence
  chemically synthesized
ttctatatatttatattcccct

SEQ ID NO: 18022 - DNA, 22 bp, Artificial Sequence
  chemically synthesized
tatatatttatattcccctgga

SEQ ID NO: 18023 - DNA, 22 bp, Artificial Sequence
  chemically synthesized
tatatttatattcccctggatc

SEQ ID NO: 18024 - DNA, 22 bp, Artificial Sequence
  chemically synthesized
atattcccctggatcatgcccc

SEQ ID NO: 18025 - DNA, 22 bp, Artificial Sequence
  chemically synthesized
tattcccctggatcatgcccca

SEQ ID NO: 18026 - DNA, 22 bp, Artificial Sequence
  chemically synthesized
ccctggatcatgccccagagtt

SEQ ID NO: 18027 - DNA, 22 bp, Artificial Sequence
  chemically synthesized
gatcatgccccagagttctgct

SEQ ID NO: 18028 - DNA, 22 bp, Artificial Sequence
  chemically synthesized
tgctcagcaattgcagttaagt

SEQ ID NO: 18029 - DNA, 22 bp, Artificial Sequence
  chemically synthesized
ctcagcaattgcagttaagtta

SEQ ID NO: 18030 - DNA, 22 bp, Artificial Sequence
  chemically synthesized
agcaattgcagttaagttagtt

SEQ ID NO: 18031 - DNA, 22 bp, Artificial Sequence
  chemically synthesized
cagttaagttagttacactaca

SEQ ID NO: 18032 - DNA, 22 bp, Artificial Sequence
  chemically synthesized
agttagttacactacagttctc

SEQ ID NO: 18033 - DNA, 22 bp, Artificial Sequence
  chemically synthesized
gttacactacagttctcagaag

SEQ ID NO: 18034 - DNA, 22 bp, Artificial Sequence
  chemically synthesized
cactacagttctcagaagagtc

SEQ ID NO: 18035 - DNA, 22 bp, Artificial Sequence
  chemically synthesized
cagttctcagaagagtctgtga

SEQ ID NO: 18036 - DNA, 22 bp, Artificial Sequence
  chemically synthesized
tcagaagagtctgtgagggcat

SEQ ID NO: 18037 - DNA, 22 bp, Artificial Sequence
  chemically synthesized
agaagagtctgtgagggcatgt

SEQ ID NO: 18038 - DNA, 22 bp, Artificial Sequence
  chemically synthesized
tgagggcatgtcaagtgcatca

SEQ ID NO: 18039 - DNA, 22 bp, Artificial Sequence
  chemically synthesized
cattggttgcctcttgtcctag

SEQ ID NO: 18040 - DNA, 22 bp, Artificial Sequence
  chemically synthesized
gttgcctcttgtcctagattta

SEQ ID NO: 18041 - DNA, 22 bp, Artificial Sequence
  chemically synthesized
cctcttgtcctagatttatgct

SEQ ID NO: 18042 - DNA, 22 bp, Artificial Sequence
  chemically synthesized
ttgtcctagatttatgcttcgg

SEQ ID NO: 18043 - DNA, 22 bp, Artificial Sequence
  chemically synthesized
gtcctagatttatgcttcggga

SEQ ID NO: 18044 - DNA, 22 bp, Artificial Sequence
  chemically synthesized
tcctagatttatgcttcgggaa

SEQ ID NO: 18045 - DNA, 22 bp, Artificial Sequence
  chemically synthesized
gatttatgcttcgggaattcag

SEQ ID NO: 18046 - DNA, 22 bp, Artificial Sequence
  chemically synthesized
atgcttcgggaattcagacctt

SEQ ID NO: 18047 - DNA, 22 bp, Artificial Sequence
  chemically synthesized
tgcttcgggaattcagaccttt

SEQ ID NO: 18048 - DNA, 22 bp, Artificial Sequence
  chemically synthesized
cgggaattcagacctttgttta

SEQ ID NO: 18049 - DNA, 22 bp, Artificial Sequence
  chemically synthesized
gggaattcagacctttgtttac

SEQ ID NO: 18050 - DNA, 22 bp, Artificial Sequence
  chemically synthesized
agacctttgtttacaatataat

SEQ ID NO: 18051 - DNA, 22 bp, Artificial Sequence
  chemically synthesized
tgtttacaatataataaatatt

SEQ ID NO: 18052 - DNA, 22 bp, Artificial Sequence
  chemically synthesized
gtttacaatataataaatatta

SEQ ID NO: 18053 - DNA, 22 bp, Artificial Sequence
  chemically synthesized
tttacaatataataaatattat

SEQ ID NO: 18054 - DNA, 22 bp, Artificial Sequence
  chemically synthesized
acaatataataaatattattgc

SEQ ID NO: 18055 - DNA, 22 bp, Artificial Sequence
  chemically synthesized
caatataataaatattattgct

SEQ ID NO: 18056 - DNA, 22 bp, Artificial Sequence
  chemically synthesized
ttgctatcttttaaagatataa

SEQ ID NO: 18057 - DNA, 22 bp, Artificial Sequence
  chemically synthesized
ctatcttttaaagatataataa

SEQ ID NO: 18058 - DNA, 22 bp, Artificial Sequence
  chemically synthesized
tcttttaaagatataataataa

SEQ ID NO: 18059 - DNA, 22 bp, Artificial Sequence
  chemically synthesized
ttaaagatataataataagata

SEQ ID NO: 18060 - DNA, 22 bp, Artificial Sequence
  chemically synthesized
taaagatataataataagatat

SEQ ID NO: 18061 - DNA, 22 bp, Artificial Sequence
  chemically synthesized
aaagatataataataagatata

SEQ ID NO: 18062 - DNA, 22 bp, Artificial Sequence
  chemically synthesized
aagatataataataagatataa

SEQ ID NO: 18063 - DNA, 22 bp, Artificial Sequence
  chemically synthesized
accacaactactgttttttgaa

SEQ ID NO: 18064 - DNA, 22 bp, Artificial Sequence
  chemically synthesized
ctgttttttgaaacatagaatt

SEQ ID NO: 18065 - DNA, 22 bp, Artificial Sequence
  chemically synthesized
ttttttgaaacatagaattcct

SEQ ID NO: 18066 - DNA, 22 bp, Artificial Sequence
  chemically synthesized
tttgaaacatagaattcctggt

SEQ ID NO: 18067 - DNA, 22 bp, Artificial Sequence
  chemically synthesized
ttgaaacatagaattcctggtt

SEQ ID NO: 18068 - DNA, 22 bp, Artificial Sequence
  chemically synthesized
tgaaacatagaattcctggttt

SEQ ID NO: 18069 - DNA, 22 bp, Artificial Sequence
  chemically synthesized
gaaacatagaattcctggttta

SEQ ID NO: 18070 - DNA, 22 bp, Artificial Sequence
  chemically synthesized
aaacatagaattcctggtttac

SEQ ID NO: 18071 - DNA, 22 bp, Artificial Sequence
  chemically synthesized
ctggtttacatgtatcaaagtg

SEQ ID NO: 18072 - DNA, 22 bp, Artificial Sequence
  chemically synthesized
gtttacatgtatcaaagtgaaa

SEQ ID NO: 18073 - DNA, 22 bp, Artificial Sequence
  chemically synthesized
acatgtatcaaagtgaaatctg

SEQ ID NO: 18074 - DNA, 22 bp, Artificial Sequence
  chemically synthesized
catgtatcaaagtgaaatctga

SEQ ID NO: 18075 - DNA, 22 bp, Artificial Sequence
  chemically synthesized
acttagcttttacagatataat

SEQ ID NO: 18076 - DNA, 22 bp, Artificial Sequence
  chemically synthesized
agcttttacagatataatatat

SEQ ID NO: 18077 - DNA, 22 bp, Artificial Sequence
  chemically synthesized
gcttttacagatataatatata

SEQ ID NO: 18078 - DNA, 22 bp, Artificial Sequence
  chemically synthesized
ttacagatataatatatacata

SEQ ID NO: 18079 - DNA, 22 bp, Artificial Sequence
  chemically synthesized
tacagatataatatatacatat

SEQ ID NO: 18080 - DNA, 22 bp, Artificial Sequence
  chemically synthesized
acagatataatatatacatata

SEQ ID NO: 18081 - DNA, 22 bp, Artificial Sequence
  chemically synthesized
cagatataatatatacatatat

SEQ ID NO: 18082 - DNA, 22 bp, Artificial Sequence
  chemically synthesized
caatgcttgtactatatatgta

SEQ ID NO: 18083 - DNA, 22 bp, Artificial Sequence
  chemically synthesized
gtactatatatgtagtacaagt

SEQ ID NO: 18084 - DNA, 22 bp, Artificial Sequence
  chemically synthesized
tactatatatgtagtacaagta

SEQ ID NO: 18085 - DNA, 22 bp, Artificial Sequence
  chemically synthesized
tatatgtagtacaagtatatat

SEQ ID NO: 18086 - DNA, 22 bp, Artificial Sequence
  chemically synthesized
gtgtgtgtatatatatatagta

SEQ ID NO: 18087 - DNA, 22 bp, Artificial Sequence
  chemically synthesized
tgtgtgtatatatatatagtac

SEQ ID NO: 18088 - DNA, 22 bp, Artificial Sequence
  chemically synthesized
ccagcattgtaggatatatata

SEQ ID NO: 18089 - DNA, 22 bp, Artificial Sequence
  chemically synthesized
taggatatatatatgtttatat

SEQ ID NO: 18090 - DNA, 22 bp, Artificial Sequence
  chemically synthesized
atatattaaaaaaaagttataa

SEQ ID NO: 18091 - DNA, 22 bp, Artificial Sequence
  chemically synthesized
tatattaaaaaaaagttataaa

SEQ ID NO: 18092 - DNA, 22 bp, Artificial Sequence
  chemically synthesized
aaaaaaagttataaacttaaaa

SEQ ID NO: 18093 - DNA, 22 bp, Artificial Sequence
  chemically synthesized
taaacttaaaaccctattatgt

SEQ ID NO: 18094 - DNA, 22 bp, Artificial Sequence
  chemically synthesized
aaaaccctattatgttatgtag

SEQ ID NO: 18095 - DNA, 22 bp, Artificial Sequence
  chemically synthesized
aaaccctattatgttatgtaga

SEQ ID NO: 18096 - DNA, 22 bp, Artificial Sequence
  chemically synthesized
ttatgttatgtagagtatatgt

SEQ ID NO: 18097 - DNA, 22 bp, Artificial Sequence
  chemically synthesized
tgttatgtagagtatatgttat

SEQ ID NO: 18098 - DNA, 22 bp, Artificial Sequence
  chemically synthesized
tgtagagtatatgttatatatg

SEQ ID NO: 18099 - DNA, 22 bp, Artificial Sequence
  chemically synthesized
tatatgatatgtaaaatatata

SEQ ID NO: 18100 - DNA, 22 bp, Artificial Sequence
  chemically synthesized
tatgatagagtgtaatatattt

SEQ ID NO: 18101 - DNA, 22 bp, Artificial Sequence
  chemically synthesized
tgatagagtgtaatatattttt

SEQ ID NO: 18102 - DNA, 22 bp, Artificial Sequence
  chemically synthesized
tttatatatattttaacattta

SEQ ID NO: 18103 - DNA, 22 bp, Artificial Sequence
  chemically synthesized
ttatatatattttaacatttat

SEQ ID NO: 18104 - DNA, 22 bp, Artificial Sequence
  chemically synthesized
tatatatattttaacatttata

SEQ ID NO: 18105 - DNA, 22 bp, Artificial Sequence
  chemically synthesized
atatatattttaacatttataa

SEQ ID NO: 18106 - DNA, 22 bp, Artificial Sequence
  chemically synthesized
tatatattttaacatttataaa

SEQ ID NO: 18107 - DNA, 22 bp, Artificial Sequence
  chemically synthesized
taacatttataaaatgatagaa

SEQ ID NO: 18108 - DNA, 22 bp, Artificial Sequence
  chemically synthesized
aacatttataaaatgatagaat

SEQ ID NO: 18109 - DNA, 22 bp, Artificial Sequence
  chemically synthesized
acatttataaaatgatagaatt

SEQ ID NO: 18110 - DNA, 22 bp, Artificial Sequence
  chemically synthesized
ataaaatgatagaattaagaat

SEQ ID NO: 18111 - DNA, 22 bp, Artificial Sequence
  chemically synthesized
taaaatgatagaattaagaatt

SEQ ID NO: 18112 - DNA, 22 bp, Artificial Sequence
  chemically synthesized
agaattgagtcctaatctgttt

SEQ ID NO: 18113 - DNA, 22 bp, Artificial Sequence
  chemically synthesized
agtcctaatctgttttattagg

SEQ ID NO: 18114 - DNA, 22 bp, Artificial Sequence
  chemically synthesized
atctgttttattaggtgctttt

SEQ ID NO: 18115 - DNA, 22 bp, Artificial Sequence
  chemically synthesized
ttttattaggtgctttttgtag

SEQ ID NO: 18116 - DNA, 22 bp, Artificial Sequence
  chemically synthesized
tattaggtgctttttgtagtgt

SEQ ID NO: 18117 - DNA, 22 bp, Artificial Sequence
  chemically synthesized
attaggtgctttttgtagtgtc

SEQ ID NO: 18118 - DNA, 22 bp, Artificial Sequence
  chemically synthesized
ttaggtgctttttgtagtgtct

SEQ ID NO: 18119 - DNA, 22 bp, Artificial Sequence
  chemically synthesized
ggtgctttttgtagtgtctggt

SEQ ID NO: 18120 - DNA, 22 bp, Artificial Sequence
  chemically synthesized
tttgtagtgtctggtctttcta

SEQ ID NO: 18121 - DNA, 22 bp, Artificial Sequence
  chemically synthesized
ttgtagtgtctggtctttctaa

SEQ ID NO: 18122 - DNA, 22 bp, Artificial Sequence
  chemically synthesized
tgtagtgtctggtctttctaaa

SEQ ID NO: 18123 - DNA, 22 bp, Artificial Sequence
  chemically synthesized
gtagtgtctggtctttctaaag

SEQ ID NO: 18124 - DNA, 22 bp, Artificial Sequence
  chemically synthesized
tagtgtctggtctttctaaagt

SEQ ID NO: 18125 - DNA, 22 bp, Artificial Sequence
  chemically synthesized
gtctttctaaagtgtctaaatg

SEQ ID NO: 18126 - DNA, 22 bp, Artificial Sequence
  chemically synthesized
tctaaagtgtctaaatgatttt

SEQ ID NO: 18127 - DNA, 22 bp, Artificial Sequence
  chemically synthesized
ctaaagtgtctaaatgattttt

SEQ ID NO: 18128 - DNA, 22 bp, Artificial Sequence
  chemically synthesized
taaagtgtctaaatgatttttc

SEQ ID NO: 18129 - DNA, 22 bp, Artificial Sequence
  chemically synthesized
aagtgtctaaatgatttttcct

SEQ ID NO: 18130 - DNA, 22 bp, Artificial Sequence
  chemically synthesized
aatgatttttccttttgactta

SEQ ID NO: 18131 - DNA, 22 bp, Artificial Sequence
  chemically synthesized
ttccttttgacttattaatggg

SEQ ID NO: 18132 - DNA, 22 bp, Artificial Sequence
  chemically synthesized
tccttttgacttattaatgggg

SEQ ID NO: 18133 - DNA, 22 bp, Artificial Sequence
  chemically synthesized
ccttttgacttattaatgggga

SEQ ID NO: 18134 - DNA, 22 bp, Artificial Sequence
  chemically synthesized
cttttgacttattaatggggaa

SEQ ID NO: 18135 - DNA, 22 bp, Artificial Sequence
  chemically synthesized
ttgacttattaatggggaagag

SEQ ID NO: 18136 - DNA, 22 bp, Artificial Sequence
  chemically synthesized
tgacttattaatggggaagagc

SEQ ID NO: 18137 - DNA, 22 bp, Artificial Sequence
  chemically synthesized
gacttattaatggggaagagcc

SEQ ID NO: 18138 - DNA, 22 bp, Artificial Sequence
  chemically synthesized
acttattaatggggaagagcct

SEQ ID NO: 18139 - DNA, 22 bp, Artificial Sequence
  chemically synthesized
attaatggggaagagcctgtat

SEQ ID NO: 18140 - DNA, 22 bp, Artificial Sequence
  chemically synthesized
ttaatggggaagagcctgtata

SEQ ID NO: 18141 - DNA, 22 bp, Artificial Sequence
  chemically synthesized
atggggaagagcctgtatatta

SEQ ID NO: 18142 - DNA, 22 bp, Artificial Sequence
  chemically synthesized
tatattaacaattaagagtgca

SEQ ID NO: 18143 - DNA, 22 bp, Artificial Sequence
  chemically synthesized
acaattaagagtgcagcattcc

SEQ ID NO: 18144 - DNA, 22 bp, Artificial Sequence
  chemically synthesized
agagtgcagcattccatacgtc

SEQ ID NO: 18145 - DNA, 22 bp, Artificial Sequence
  chemically synthesized
catacgtcaaacaacaaacatt

SEQ ID NO: 18146 - DNA, 22 bp, Artificial Sequence
  chemically synthesized
taattcaagcattaacctataa

SEQ ID NO: 18147 - DNA, 22 bp, Artificial Sequence
  chemically synthesized
aattcaagcattaacctataac

SEQ ID NO: 18148 - DNA, 22 bp, Artificial Sequence
  chemically synthesized
attcaagcattaacctataaca

SEQ ID NO: 18149 - DNA, 22 bp, Artificial Sequence
  chemically synthesized
aagcattaacctataacaagta

SEQ ID NO: 18150 - DNA, 22 bp, Artificial Sequence
  chemically synthesized
acctataacaagtaagtttttt

SEQ ID NO: 18151 - DNA, 22 bp, Artificial Sequence
  chemically synthesized
taacaagtaagttttttttttt

SEQ ID NO: 18152 - DNA, 22 bp, Artificial Sequence
  chemically synthesized
tttttttttttttgagaaaggg

SEQ ID NO: 18153 - DNA, 22 bp, Artificial Sequence
  chemically synthesized
ttttttttttttgagaaaggga

SEQ ID NO: 18154 - DNA, 22 bp, Artificial Sequence
  chemically synthesized
tttttttttttgagaaagggag

SEQ ID NO: 18155 - DNA, 22 bp, Artificial Sequence
  chemically synthesized
ttttttttttgagaaagggagg

SEQ ID NO: 18156 - DNA, 22 bp, Artificial Sequence
  chemically synthesized
tttttttttgagaaagggaggt

SEQ ID NO: 18157 - DNA, 22 bp, Artificial Sequence
  chemically synthesized
ttttttttgagaaagggaggtt

SEQ ID NO: 18158 - DNA, 22 bp, Artificial Sequence
  chemically synthesized
tttttttgagaaagggaggttg

SEQ ID NO: 18159 - DNA, 22 bp, Artificial Sequence
  chemically synthesized
ttttttgagaaagggaggttgt

SEQ ID NO: 18160 - DNA, 22 bp, Artificial Sequence
  chemically synthesized
tttttgagaaagggaggttgtt

SEQ ID NO: 18161 - DNA, 22 bp, Artificial Sequence
  chemically synthesized
ttttgagaaagggaggttgttt

SEQ ID NO: 18162 - DNA, 22 bp, Artificial Sequence
  chemically synthesized
tttgagaaagggaggttgttta

SEQ ID NO: 18163 - DNA, 22 bp, Artificial Sequence
  chemically synthesized
ttgagaaagggaggttgtttat

SEQ ID NO: 18164 - DNA, 22 bp, Artificial Sequence
  chemically synthesized
tgagaaagggaggttgtttatt

SEQ ID NO: 18165 - DNA, 22 bp, Artificial Sequence
  chemically synthesized
gagaaagggaggttgtttattt

SEQ ID NO: 18166 - DNA, 22 bp, Artificial Sequence
  chemically synthesized
agaaagggaggttgtttatttg

SEQ ID NO: 18167 - DNA, 22 bp, Artificial Sequence
  chemically synthesized
tttatttgcctgaaatgactca

SEQ ID NO: 18168 - DNA, 22 bp, Artificial Sequence
  chemically synthesized
atttgcctgaaatgactcaaaa

SEQ ID NO: 18169 - DNA, 22 bp, Artificial Sequence
  chemically synthesized
tttgcctgaaatgactcaaaaa

SEQ ID NO: 18170 - DNA, 22 bp, Artificial Sequence
  chemically synthesized
gcctgaaatgactcaaaaatat

SEQ ID NO: 18171 - DNA, 22 bp, Artificial Sequence
  chemically synthesized
cctgaaatgactcaaaaatatt

SEQ ID NO: 18172 - DNA, 22 bp, Artificial Sequence
  chemically synthesized
aaatgactcaaaaatatttttg

SEQ ID NO: 18173 - DNA, 22 bp, Artificial Sequence
  chemically synthesized
aaaaatatttttgaaacatagt

SEQ ID NO: 18174 - DNA, 22 bp, Artificial Sequence
  chemically synthesized
ttgaaacatagtgtacttattt

SEQ ID NO: 18175 - DNA, 22 bp, Artificial Sequence
  chemically synthesized
tgaaacatagtgtacttattta

SEQ ID NO: 18176 - DNA, 22 bp, Artificial Sequence
  chemically synthesized
gaaacatagtgtacttatttaa

SEQ ID NO: 18177 - DNA, 22 bp, Artificial Sequence
  chemically synthesized
aaacatagtgtacttatttaaa

SEQ ID NO: 18178 - DNA, 22 bp, Artificial Sequence
  chemically synthesized
atttaaataacatctttattgt

SEQ ID NO: 18179 - DNA, 22 bp, Artificial Sequence
  chemically synthesized
tttaaataacatctttattgtt

SEQ ID NO: 18180 - DNA, 22 bp, Artificial Sequence
  chemically synthesized
aaataacatctttattgtttca

SEQ ID NO: 18181 - DNA, 22 bp, Artificial Sequence
  chemically synthesized
aataacatctttattgtttcat

SEQ ID NO: 18182 - DNA, 22 bp, Artificial Sequence
  chemically synthesized
tattgtttcattcttttaaaaa

SEQ ID NO: 18183 - DNA, 22 bp, Artificial Sequence
  chemically synthesized
attgtttcattcttttaaaaaa

SEQ ID NO: 18184 - DNA, 22 bp, Artificial Sequence
  chemically synthesized
ttgtttcattcttttaaaaaat

SEQ ID NO: 18185 - DNA, 22 bp, Artificial Sequence
  chemically synthesized
tttcattcttttaaaaaatatc

SEQ ID NO: 18186 - DNA, 22 bp, Artificial Sequence
  chemically synthesized
cattcttttaaaaaatatctac

SEQ ID NO: 18187 - DNA, 22 bp, Artificial Sequence
  chemically synthesized
attcttttaaaaaatatctact

SEQ ID NO: 18188 - DNA, 22 bp, Artificial Sequence
  chemically synthesized
ttttaaaaaatatctacttaat

SEQ ID NO: 18189 - DNA, 22 bp, Artificial Sequence
  chemically synthesized
ttaaaaaatatctacttaatta

SEQ ID NO: 18190 - DNA, 22 bp, Artificial Sequence
  chemically synthesized
taaaaaatatctacttaattac

SEQ ID NO: 18191 - DNA, 22 bp, Artificial Sequence
  chemically synthesized
aaaaaatatctacttaattaca

SEQ ID NO: 18192 - DNA, 22 bp, Artificial Sequence
  chemically synthesized
aaaaatatctacttaattacac

SEQ ID NO: 18193 - DNA, 22 bp, Artificial Sequence
  chemically synthesized
cttaattacacagttgaaggaa

SEQ ID NO: 18194 - DNA, 22 bp, Artificial Sequence
  chemically synthesized
aattacacagttgaaggaaatc

SEQ ID NO: 18195 - DNA, 22 bp, Artificial Sequence
  chemically synthesized
attacacagttgaaggaaatcg

SEQ ID NO: 18196 - DNA, 22 bp, Artificial Sequence
  chemically synthesized
cacagttgaaggaaatcgtaga

SEQ ID NO: 18197 - DNA, 22 bp, Artificial Sequence
  chemically synthesized
aaggaaatcgtagattatatgg

SEQ ID NO: 18198 - DNA, 22 bp, Artificial Sequence
  chemically synthesized
tatggaacttatttcttaatat

SEQ ID NO: 18199 - DNA, 22 bp, Artificial Sequence
  chemically synthesized
atttcttaatatattacagttt

SEQ ID NO: 18200 - DNA, 22 bp, Artificial Sequence
  chemically synthesized
tttcttaatatattacagtttg

SEQ ID NO: 18201 - DNA, 22 bp, Artificial Sequence
  chemically synthesized
cttaatatattacagtttgtta

SEQ ID NO: 18202 - DNA, 22 bp, Artificial Sequence
  chemically synthesized
ttaatatattacagtttgttat

SEQ ID NO: 18203 - DNA, 22 bp, Artificial Sequence
  chemically synthesized
aatatattacagtttgttataa

SEQ ID NO: 18204 - DNA, 22 bp, Artificial Sequence
  chemically synthesized
atatattacagtttgttataat

SEQ ID NO: 18205 - DNA, 22 bp, Artificial Sequence
  chemically synthesized
cagtttgttataataacattct

SEQ ID NO: 18206 - DNA, 22 bp, Artificial Sequence
  chemically synthesized
gttataataacattctggggat

SEQ ID NO: 18207 - DNA, 22 bp, Artificial Sequence
  chemically synthesized
ttataataacattctggggatc

SEQ ID NO: 18208 - DNA, 22 bp, Artificial Sequence
  chemically synthesized
taataacattctggggatcagg

SEQ ID NO: 18209 - DNA, 22 bp, Artificial Sequence
  chemically synthesized
tggggatcaggccaggaaactg

SEQ ID NO: 18210 - DNA, 22 bp, Artificial Sequence
  chemically synthesized
gggatcaggccaggaaactgtg

SEQ ID NO: 18211 - DNA, 22 bp, Artificial Sequence
  chemically synthesized
tgtcatagataaagctttgaaa

SEQ ID NO: 18212 - DNA, 22 bp, Artificial Sequence
  chemically synthesized
tgaaataatgagatccttatgt

SEQ ID NO: 18213 - DNA, 22 bp, Artificial Sequence
  chemically synthesized
gaaataatgagatccttatgtt

SEQ ID NO: 18214 - DNA, 22 bp, Artificial Sequence
  chemically synthesized
aaataatgagatccttatgttt

SEQ ID NO: 18215 - DNA, 22 bp, Artificial Sequence
  chemically synthesized
atgtttactagaaattttggat

SEQ ID NO: 18216 - DNA, 22 bp, Artificial Sequence
  chemically synthesized
tgtttactagaaattttggatt

SEQ ID NO: 18217 - DNA, 22 bp, Artificial Sequence
  chemically synthesized
actagaaattttggattgagat

SEQ ID NO: 18218 - DNA, 22 bp, Artificial Sequence
  chemically synthesized
ctagaaattttggattgagatc

SEQ ID NO: 18219 - DNA, 22 bp, Artificial Sequence
  chemically synthesized
gaaattttggattgagatctat

SEQ ID NO: 18220 - DNA, 22 bp, Artificial Sequence
  chemically synthesized
tggattgagatctatgaggtct

SEQ ID NO: 18221 - DNA, 22 bp, Artificial Sequence
  chemically synthesized
ggattgagatctatgaggtctg

SEQ ID NO: 18222 - DNA, 22 bp, Artificial Sequence
  chemically synthesized
gattgagatctatgaggtctgt

SEQ ID NO: 18223 - DNA, 22 bp, Artificial Sequence
  chemically synthesized
agatctatgaggtctgtgacat

SEQ ID NO: 18224 - DNA, 22 bp, Artificial Sequence
  chemically synthesized
tgaggtctgtgacatattgcga

SEQ ID NO: 18225 - DNA, 22 bp, Artificial Sequence
  chemically synthesized
tgacatattgcgaagttcaagg

SEQ ID NO: 18226 - DNA, 22 bp, Artificial Sequence
  chemically synthesized
cgaagttcaaggaaaattcgta

SEQ ID NO: 18227 - DNA, 22 bp, Artificial Sequence
  chemically synthesized
aaggaaaattcgtaggcctgga

SEQ ID NO: 18228 - DNA, 22 bp, Artificial Sequence
  chemically synthesized
gtaggcctggaatttcatgctt

SEQ ID NO: 18229 - DNA, 22 bp, Artificial Sequence
  chemically synthesized
gaatttcatgcttctcaagctg

SEQ ID NO: 18230 - DNA, 22 bp, Artificial Sequence
  chemically synthesized
catgcttctcaagctgacataa

SEQ ID NO: 18231 - DNA, 22 bp, Artificial Sequence
  chemically synthesized
atgcttctcaagctgacataaa

SEQ ID NO: 18232 - DNA, 22 bp, Artificial Sequence
  chemically synthesized
ctcaagctgacataaaatccct

SEQ ID NO: 18233 - DNA, 22 bp, Artificial Sequence
  chemically synthesized
tcaagctgacataaaatccctc

SEQ ID NO: 18234 - DNA, 22 bp, Artificial Sequence
  chemically synthesized
aagctgacataaaatccctccc

SEQ ID NO: 18235 - DNA, 22 bp, Artificial Sequence
  chemically synthesized
acataaaatccctcccactctc

SEQ ID NO: 18236 - DNA, 22 bp, Artificial Sequence
  chemically synthesized
ccactctccacctcatcatatg

SEQ ID NO: 18237 - DNA, 22 bp, Artificial Sequence
  chemically synthesized
tccacctcatcatatgcacaca

SEQ ID NO: 18238 - DNA, 22 bp, Artificial Sequence
  chemically synthesized
cacctcatcatatgcacacatt

SEQ ID NO: 18239 - DNA, 22 bp, Artificial Sequence
  chemically synthesized
atcatatgcacacattctactc

SEQ ID NO: 18240 - DNA, 22 bp, Artificial Sequence
  chemically synthesized
tactcctacccacccactccac

SEQ ID NO: 18241 - DNA, 22 bp, Artificial Sequence
  chemically synthesized
ctcctacccacccactccaccc

SEQ ID NO: 18242 - DNA, 22 bp, Artificial Sequence
  chemically synthesized
ctacccacccactccaccccct

SEQ ID NO: 18243 - DNA, 22 bp, Artificial Sequence
  chemically synthesized
cccacccactccaccccctgca

SEQ ID NO: 18244 - DNA, 22 bp, Artificial Sequence
  chemically synthesized
caccccctgcaaaagtacaggt

SEQ ID NO: 18245 - DNA, 22 bp, Artificial Sequence
  chemically synthesized
caaaagtacaggtatatgaatg

SEQ ID NO: 18246 - DNA, 22 bp, Artificial Sequence
  chemically synthesized
aaaaccataggctcatcttcta

SEQ ID NO: 18247 - DNA, 22 bp, Artificial Sequence
  chemically synthesized
atcttctaggagcttcaatgtt

SEQ ID NO: 18248 - DNA, 22 bp, Artificial Sequence
  chemically synthesized
ctaggagcttcaatgttatttg

SEQ ID NO: 18249 - DNA, 22 bp, Artificial Sequence
  chemically synthesized
taggagcttcaatgttatttga

SEQ ID NO: 18250 - DNA, 22 bp, Artificial Sequence
  chemically synthesized
ggagcttcaatgttatttgaag

SEQ ID NO: 18251 - DNA, 22 bp, Artificial Sequence
  chemically synthesized
caatgttatttgaagatttggg

SEQ ID NO: 18252 - DNA, 22 bp, Artificial Sequence
  chemically synthesized
aatgttatttgaagatttgggc

SEQ ID NO: 18253 - DNA, 22 bp, Artificial Sequence
  chemically synthesized
tttgaagatttgggcagaaaaa

SEQ ID NO: 18254 - DNA, 22 bp, Artificial Sequence
  chemically synthesized
gaagatttgggcagaaaaaatt

SEQ ID NO: 18255 - DNA, 22 bp, Artificial Sequence
  chemically synthesized
aagatttgggcagaaaaaatta

SEQ ID NO: 18256 - DNA, 22 bp, Artificial Sequence
  chemically synthesized
gggcagaaaaaattaagtaata

SEQ ID NO: 18257 - DNA, 22 bp, Artificial Sequence
  chemically synthesized
ggcagaaaaaattaagtaatac

SEQ ID NO: 18258 - DNA, 22 bp, Artificial Sequence
  chemically synthesized
agtaatacgaaataacttatgt

SEQ ID NO: 18259 - DNA, 22 bp, Artificial Sequence
  chemically synthesized
atgtatgagttttaaaagtgaa

SEQ ID NO: 18260 - DNA, 22 bp, Artificial Sequence
  chemically synthesized
tgtatgagttttaaaagtgaag

SEQ ID NO: 18261 - DNA, 22 bp, Artificial Sequence
  chemically synthesized
taaaagtgaagtaaacatggat

SEQ ID NO: 18262 - DNA, 22 bp, Artificial Sequence
  chemically synthesized
aaaagtgaagtaaacatggatg

SEQ ID NO: 18263 - DNA, 22 bp, Artificial Sequence
  chemically synthesized
aaagtgaagtaaacatggatgt

SEQ ID NO: 18264 - DNA, 22 bp, Artificial Sequence
  chemically synthesized
tgaagtagaatgcaaaatttga

SEQ ID NO: 18265 - DNA, 22 bp, Artificial Sequence
  chemically synthesized
aagtagaatgcaaaatttgaat

SEQ ID NO: 18266 - DNA, 22 bp, Artificial Sequence
  chemically synthesized
gaatgcatttttaaagataaat

SEQ ID NO: 18267 - DNA, 22 bp, Artificial Sequence
  chemically synthesized
aatgcatttttaaagataaatt

SEQ ID NO: 18268 - DNA, 22 bp, Artificial Sequence
  chemically synthesized
ttaaagataaattagaaaactt

SEQ ID NO: 18269 - DNA, 22 bp, Artificial Sequence
  chemically synthesized
taaagataaattagaaaacttc

SEQ ID NO: 18270 - DNA, 22 bp, Artificial Sequence
  chemically synthesized
aaagataaattagaaaacttct

SEQ ID NO: 18271 - DNA, 22 bp, Artificial Sequence
  chemically synthesized
aagataaattagaaaacttcta

SEQ ID NO: 18272 - DNA, 22 bp, Artificial Sequence
  chemically synthesized
gaaaacttctaaaaactgtcag

SEQ ID NO: 18273 - DNA, 22 bp, Artificial Sequence
  chemically synthesized
ctaaaaactgtcagattgtctg

SEQ ID NO: 18274 - DNA, 22 bp, Artificial Sequence
  chemically synthesized
taaaaactgtcagattgtctgg

SEQ ID NO: 18275 - DNA, 22 bp, Artificial Sequence
  chemically synthesized
aaaactgtcagattgtctgggc

SEQ ID NO: 18276 - DNA, 22 bp, Artificial Sequence
  chemically synthesized
tcagattgtctgggcctggtgg

SEQ ID NO: 18277 - DNA, 22 bp, Artificial Sequence
  chemically synthesized
tctgggcctggtggcttatgcc

SEQ ID NO: 18278 - DNA, 22 bp, Artificial Sequence
  chemically synthesized
ggcctggtggcttatgcctgta

SEQ ID NO: 18279 - DNA, 22 bp, Artificial Sequence
  chemically synthesized
gtggcttatgcctgtaatccca

SEQ ID NO: 18280 - DNA, 22 bp, Artificial Sequence
  chemically synthesized
atgcctgtaatcccagcacttt

SEQ ID NO: 18281 - DNA, 22 bp, Artificial Sequence
  chemically synthesized
tgcctgtaatcccagcactttg

SEQ ID NO: 18282 - DNA, 22 bp, Artificial Sequence
  chemically synthesized
taatcccagcactttgggagtc

SEQ ID NO: 18283 - DNA, 22 bp, Artificial Sequence
  chemically synthesized
tgggagtccgaggtgggtggat

SEQ ID NO: 18284 - DNA, 22 bp, Artificial Sequence
  chemically synthesized
gggagtccgaggtgggtggatc

SEQ ID NO: 18285 - DNA, 22 bp, Artificial Sequence
  chemically synthesized
ggagtccgaggtgggtggatca

SEQ ID NO: 18286 - DNA, 22 bp, Artificial Sequence
  chemically synthesized
ccaacatggtgaaaccccgtct

SEQ ID NO: 18287 - DNA, 22 bp, Artificial Sequence
  chemically synthesized
tactaagtatacaaaaattagc

SEQ ID NO: 18288 - DNA, 22 bp, Artificial Sequence
  chemically synthesized
ctaagtatacaaaaattagctg

SEQ ID NO: 18289 - DNA, 22 bp, Artificial Sequence
  chemically synthesized
agtatacaaaaattagctgggc

SEQ ID NO: 18290 - DNA, 22 bp, Artificial Sequence
  chemically synthesized
gctgggcgtggcagcgtgtgcc

SEQ ID NO: 18291 - DNA, 22 bp, Artificial Sequence
  chemically synthesized
ggcgtggcagcgtgtgcctgta

SEQ ID NO: 18292 - DNA, 22 bp, Artificial Sequence
  chemically synthesized
taatcccagctacctgggaggc

SEQ ID NO: 18293 - DNA, 22 bp, Artificial Sequence
  chemically synthesized
cctgggaggctgaggcaggaga

SEQ ID NO: 18294 - DNA, 22 bp, Artificial Sequence
  chemically synthesized
ggaggctgaggcaggagaatcg

SEQ ID NO: 18295 - DNA, 22 bp, Artificial Sequence
  chemically synthesized
aggcaggagaatcgcttgaacc

SEQ ID NO: 18296 - DNA, 22 bp, Artificial Sequence
  chemically synthesized
gaacccaggaggtgtaggttgc

SEQ ID NO: 18297 - DNA, 22 bp, Artificial Sequence
  chemically synthesized
aacccaggaggtgtaggttgca

SEQ ID NO: 18298 - DNA, 22 bp, Artificial Sequence
  chemically synthesized
cagtgagtcaagatcgcgccac

SEQ ID NO: 18299 - DNA, 22 bp, Artificial Sequence
  chemically synthesized
cactttagcctggtgacagagc

SEQ ID NO: 18300 - DNA, 22 bp, Artificial Sequence
  chemically synthesized
tagcctggtgacagagctagac

SEQ ID NO: 18301 - DNA, 22 bp, Artificial Sequence
  chemically synthesized
agcctggtgacagagctagact

SEQ ID NO: 18302 - DNA, 22 bp, Artificial Sequence
  chemically synthesized
gcctggtgacagagctagactc

SEQ ID NO: 18303 - DNA, 22 bp, Artificial Sequence
  chemically synthesized
gtgacagagctagactccgtct

SEQ ID NO: 18304 - DNA, 22 bp, Artificial Sequence
  chemically synthesized
gactccgtctcaaaaaaaaaaa

SEQ ID NO: 18305 - DNA, 22 bp, Artificial Sequence
  chemically synthesized
cgtctcaaaaaaaaaaaaaaat

SEQ ID NO: 18306 - DNA, 22 bp, Artificial Sequence
  chemically synthesized
aaaaaaaaaaaaaaatatcaga

SEQ ID NO: 18307 - DNA, 22 bp, Artificial Sequence
  chemically synthesized
ttcctacacctagtgcttctat

SEQ ID NO: 18308 - DNA, 22 bp, Artificial Sequence
  chemically synthesized
ctacacctagtgcttctatacc

SEQ ID NO: 18309 - DNA, 22 bp, Artificial Sequence
  chemically synthesized
cacctagtgcttctataccaca

SEQ ID NO: 18310 - DNA, 22 bp, Artificial Sequence
  chemically synthesized
gtgcttctataccacactcctg

SEQ ID NO: 18311 - DNA, 22 bp, Artificial Sequence
  chemically synthesized
ctataccacactcctgttaggg

SEQ ID NO: 18312 - DNA, 22 bp, Artificial Sequence
  chemically synthesized
tataccacactcctgttagggg

SEQ ID NO: 18313 - DNA, 22 bp, Artificial Sequence
  chemically synthesized
taccacactcctgttagggggc

SEQ ID NO: 18314 - DNA, 22 bp, Artificial Sequence
  chemically synthesized
ctgttagggggcatcagtggaa

SEQ ID NO: 18315 - DNA, 22 bp, Artificial Sequence
  chemically synthesized
ttagggggcatcagtggaaatg

SEQ ID NO: 18316 - DNA, 22 bp, Artificial Sequence
  chemically synthesized
gggggcatcagtggaaatggtt

SEQ ID NO: 18317 - DNA, 22 bp, Artificial Sequence
  chemically synthesized
aggagatgtttagtgtgtattg

SEQ ID NO: 18318 - DNA, 22 bp, Artificial Sequence
  chemically synthesized
agtgtgtattgtctgccaagca

SEQ ID NO: 18319 - DNA, 22 bp, Artificial Sequence
  chemically synthesized
gtgtgtattgtctgccaagcac

SEQ ID NO: 18320 - DNA, 22 bp, Artificial Sequence
  chemically synthesized
tctgccaagcactgtcaacact

SEQ ID NO: 18321 - DNA, 22 bp, Artificial Sequence
  chemically synthesized
ccaagcactgtcaacactgtca

SEQ ID NO: 18322 - DNA, 22 bp, Artificial Sequence
  chemically synthesized
tcaacactgtcatagaaacttc

SEQ ID NO: 18323 - DNA, 22 bp, Artificial Sequence
  chemically synthesized
tcatagaaacttctgtacgagt

SEQ ID NO: 18324 - DNA, 22 bp, Artificial Sequence
  chemically synthesized
ctgtacgagtagaatgtgagca

SEQ ID NO: 18325 - DNA, 22 bp, Artificial Sequence
  chemically synthesized
tgtacgagtagaatgtgagcaa

SEQ ID NO: 18326 - DNA, 22 bp, Artificial Sequence
  chemically synthesized
tacgagtagaatgtgagcaaat

SEQ ID NO: 18327 - DNA, 22 bp, Artificial Sequence
  chemically synthesized
tgtgttgaaatggttcctctcc

SEQ ID NO: 18328 - DNA, 22 bp, Artificial Sequence
  chemically synthesized
aaatggttcctctccctgcagg

SEQ ID NO: 18329 - DNA, 22 bp, Artificial Sequence
  chemically synthesized
ctctccctgcaggtctttcagc

SEQ ID NO: 18330 - DNA, 22 bp, Artificial Sequence
  chemically synthesized
tccctgcaggtctttcagctga

SEQ ID NO: 18331 - DNA, 22 bp, Artificial Sequence
  chemically synthesized
cctgcaggtctttcagctgaaa

SEQ ID NO: 18332 - DNA, 22 bp, Artificial Sequence
  chemically synthesized
caggtctttcagctgaaacctg

SEQ ID NO: 18333 - DNA, 22 bp, Artificial Sequence
  chemically synthesized
tcagctgaaacctggcttatct

SEQ ID NO: 18334 - DNA, 22 bp, Artificial Sequence
  chemically synthesized
cagctgaaacctggcttatctc

SEQ ID NO: 18335 - DNA, 22 bp, Artificial Sequence
  chemically synthesized
agctgaaacctggcttatctct

SEQ ID NO: 18336 - DNA, 22 bp, Artificial Sequence
  chemically synthesized
aaacctggcttatctctcagaa

SEQ ID NO: 18337 - DNA, 22 bp, Artificial Sequence
  chemically synthesized
gcttatctctcagaagtacttt

SEQ ID NO: 18338 - DNA, 22 bp, Artificial Sequence
  chemically synthesized
atctctcagaagtactttcctt

SEQ ID NO: 18339 - DNA, 22 bp, Artificial Sequence
  chemically synthesized
tctctcagaagtactttccttg

SEQ ID NO: 18340 - DNA, 22 bp, Artificial Sequence
  chemically synthesized
tcagaagtactttccttgcaca

SEQ ID NO: 18341 - DNA, 22 bp, Artificial Sequence
  chemically synthesized
agaagtactttccttgcacagt

SEQ ID NO: 18342 - DNA, 22 bp, Artificial Sequence
  chemically synthesized
tccttgcacagtttctacttgt

SEQ ID NO: 18343 - DNA, 22 bp, Artificial Sequence
  chemically synthesized
ccttgcacagtttctacttgtc

SEQ ID NO: 18344 - DNA, 22 bp, Artificial Sequence
  chemically synthesized
cttgcacagtttctacttgtcc

SEQ ID NO: 18345 - DNA, 22 bp, Artificial Sequence
  chemically synthesized
gcacagtttctacttgtccttc

SEQ ID NO: 18346 - DNA, 22 bp, Artificial Sequence
  chemically synthesized
cacagtttctacttgtccttca

SEQ ID NO: 18347 - DNA, 22 bp, Artificial Sequence
  chemically synthesized
ctacttgtccttcacagaaaag

SEQ ID NO: 18348 - DNA, 22 bp, Artificial Sequence
  chemically synthesized
tacttgtccttcacagaaaagc

SEQ ID NO: 18349 - DNA, 22 bp, Artificial Sequence
  chemically synthesized
cttgtccttcacagaaaagcct

SEQ ID NO: 18350 - DNA, 22 bp, Artificial Sequence
  chemically synthesized
gtccttcacagaaaagccttga

SEQ ID NO: 18351 - DNA, 22 bp, Artificial Sequence
  chemically synthesized
tccttcacagaaaagccttgac

SEQ ID NO: 18352 - DNA, 22 bp, Artificial Sequence
  chemically synthesized
cacagaaaagccttgacactaa

SEQ ID NO: 18353 - DNA, 22 bp, Artificial Sequence
  chemically synthesized
acagaaaagccttgacactaat

SEQ ID NO: 18354 - DNA, 22 bp, Artificial Sequence
  chemically synthesized
gacactaataaaatatatagaa

SEQ ID NO: 18355 - DNA, 22 bp, Artificial Sequence
  chemically synthesized
acactaataaaatatatagaag

SEQ ID NO: 18356 - DNA, 22 bp, Artificial Sequence
  chemically synthesized
ataaaatatatagaagacgata

SEQ ID NO: 18357 - DNA, 22 bp, Artificial Sequence
  chemically synthesized
ctacacggaagaaaaacctttg

SEQ ID NO: 18358 - DNA, 22 bp, Artificial Sequence
  chemically synthesized
cacggaagaaaaacctttgtac

SEQ ID NO: 18359 - DNA, 22 bp, Artificial Sequence
  chemically synthesized
tgtacattgtttttttgttttg

SEQ ID NO: 18360 - DNA, 22 bp, Artificial Sequence
  chemically synthesized
gtacattgtttttttgttttgt

SEQ ID NO: 18361 - DNA, 22 bp, Artificial Sequence
  chemically synthesized
tacattgtttttttgttttgtt

SEQ ID NO: 18362 - DNA, 22 bp, Artificial Sequence
  chemically synthesized
tttttttgttttgtttcctttg

SEQ ID NO: 18363 - DNA, 22 bp, Artificial Sequence
  chemically synthesized
ttttgttttgtttcctttgtac

SEQ ID NO: 18364 - DNA, 22 bp, Artificial Sequence
  chemically synthesized
tttgttttgtttcctttgtaca

SEQ ID NO: 18365 - DNA, 22 bp, Artificial Sequence
  chemically synthesized
ttgttttgtttcctttgtacat

SEQ ID NO: 18366 - DNA, 22 bp, Artificial Sequence
  chemically synthesized
tgttttgtttcctttgtacatt

SEQ ID NO: 18367 - DNA, 22 bp, Artificial Sequence
  chemically synthesized
gttttgtttcctttgtacattt

SEQ ID NO: 18368 - DNA, 22 bp, Artificial Sequence
  chemically synthesized
ttttgtttcctttgtacatttt

SEQ ID NO: 18369 - DNA, 22 bp, Artificial Sequence
  chemically synthesized
tgtttcctttgtacattttcta

SEQ ID NO: 18370 - DNA, 22 bp, Artificial Sequence
  chemically synthesized
gtttcctttgtacattttctat

SEQ ID NO: 18371 - DNA, 22 bp, Artificial Sequence
  chemically synthesized
tttcctttgtacattttctata

SEQ ID NO: 18372 - DNA, 22 bp, Artificial Sequence
  chemically synthesized
cctttgtacattttctatatca

SEQ ID NO: 18373 - DNA, 22 bp, Artificial Sequence
  chemically synthesized
ctttgtacattttctatatcat

SEQ ID NO: 18374 - DNA, 22 bp, Artificial Sequence
  chemically synthesized
tgtacattttctatatcataat

SEQ ID NO: 18375 - DNA, 22 bp, Artificial Sequence
  chemically synthesized
gtacattttctatatcataatt

SEQ ID NO: 18376 - DNA, 22 bp, Artificial Sequence
  chemically synthesized
tacattttctatatcataattt

SEQ ID NO: 18377 - DNA, 22 bp, Artificial Sequence
  chemically synthesized
tctatatcataatttttgcgct

SEQ ID NO: 18378 - DNA, 22 bp, Artificial Sequence
  chemically synthesized
ctatatcataatttttgcgctt

SEQ ID NO: 18379 - DNA, 22 bp, Artificial Sequence
  chemically synthesized
tatatcataatttttgcgcttc

SEQ ID NO: 18380 - DNA, 22 bp, Artificial Sequence
  chemically synthesized
tatcataatttttgcgcttctt

SEQ ID NO: 18381 - DNA, 22 bp, Artificial Sequence
  chemically synthesized
ttgcgcttcttttttttttttt

SEQ ID NO: 18382 - DNA, 22 bp, Artificial Sequence
  chemically synthesized
tgcgcttctttttttttttttt

SEQ ID NO: 18383 - DNA, 22 bp, Artificial Sequence
  chemically synthesized
gcgcttcttttttttttttttt

SEQ ID NO: 18384 - DNA, 22 bp, Artificial Sequence
  chemically synthesized
cgcttctttttttttttttttt

SEQ ID NO: 18385 - DNA, 22 bp, Artificial Sequence
  chemically synthesized
cttttttttttttttttttttt

SEQ ID NO: 18386 - DNA, 22 bp, Artificial Sequence
  chemically synthesized
tttttttttttttttttttttt

SEQ ID NO: 18387 - DNA, 22 bp, Artificial Sequence
  chemically synthesized
tttttttttttttttttttttt

SEQ ID NO: 18388 - DNA, 22 bp, Artificial Sequence
  chemically synthesized
tttttttttttttttttttttt

SEQ ID NO: 18389 - DNA, 22 bp, Artificial Sequence
  chemically synthesized
tttttttttttttttttttttt

SEQ ID NO: 18390 - DNA, 22 bp, Artificial Sequence
  chemically synthesized
tttttttttttttttttttttc

SEQ ID NO: 18391 - DNA, 22 bp, Artificial Sequence
  chemically synthesized
ttttttttttttttttttttcc

SEQ ID NO: 18392 - DNA, 22 bp, Artificial Sequence
  chemically synthesized
tttttttttttttttttttcca

SEQ ID NO: 18393 - DNA, 22 bp, Artificial Sequence
  chemically synthesized
ttttttttttttttttttccat

SEQ ID NO: 18394 - DNA, 22 bp, Artificial Sequence
  chemically synthesized
tttttttttttttttttccatt

SEQ ID NO: 18395 - DNA, 22 bp, Artificial Sequence
  chemically synthesized
ttttttttttttttttccatta

SEQ ID NO: 18396 - DNA, 22 bp, Artificial Sequence
  chemically synthesized
tttttttttttttttccattat

SEQ ID NO: 18397 - DNA, 22 bp, Artificial Sequence
  chemically synthesized
ttttttttttttttccattatt

SEQ ID NO: 18398 - DNA, 22 bp, Artificial Sequence
  chemically synthesized
tttttttttttttccattattt

SEQ ID NO: 18399 - DNA, 22 bp, Artificial Sequence
  chemically synthesized
ttttttttttttccattatttt

SEQ ID NO: 18400 - DNA, 22 bp, Artificial Sequence
  chemically synthesized
tttttttttttccattattttt

SEQ ID NO: 18401 - DNA, 22 bp, Artificial Sequence
  chemically synthesized
ttttttttttccattattttta

SEQ ID NO: 18402 - DNA, 22 bp, Artificial Sequence
  chemically synthesized
tttttttttccattatttttag

SEQ ID NO: 18403 - DNA, 22 bp, Artificial Sequence
  chemically synthesized
ttttttttccattatttttagg

SEQ ID NO: 18404 - DNA, 22 bp, Artificial Sequence
  chemically synthesized
tttttttccattatttttaggc

SEQ ID NO: 18405 - DNA, 22 bp, Artificial Sequence
  chemically synthesized
ttttttccattatttttaggca

SEQ ID NO: 18406 - DNA, 22 bp, Artificial Sequence
  chemically synthesized
tttttccattatttttaggcag

SEQ ID NO: 18407 - DNA, 22 bp, Artificial Sequence
  chemically synthesized
ttttccattatttttaggcaga

SEQ ID NO: 18408 - DNA, 22 bp, Artificial Sequence
  chemically synthesized
tttccattatttttaggcagaa

SEQ ID NO: 18409 - DNA, 22 bp, Artificial Sequence
  chemically synthesized
ttccattatttttaggcagaag

SEQ ID NO: 18410 - DNA, 22 bp, Artificial Sequence
  chemically synthesized
tccattatttttaggcagaagg

SEQ ID NO: 18411 - DNA, 22 bp, Artificial Sequence
  chemically synthesized
ccattatttttaggcagaaggg

SEQ ID NO: 18412 - DNA, 22 bp, Artificial Sequence
  chemically synthesized
cattatttttaggcagaaggga

SEQ ID NO: 18413 - DNA, 22 bp, Artificial Sequence
  chemically synthesized
tttttaggcagaagggaaaaaa

SEQ ID NO: 18414 - DNA, 22 bp, Artificial Sequence
  chemically synthesized
ttaggcagaagggaaaaaagcc

SEQ ID NO: 18415 - DNA, 22 bp, Artificial Sequence
  chemically synthesized
taggcagaagggaaaaaagccc

SEQ ID NO: 18416 - DNA, 22 bp, Artificial Sequence
  chemically synthesized
aggcagaagggaaaaaagccct

SEQ ID NO: 18417 - DNA, 22 bp, Artificial Sequence
  chemically synthesized
ggcagaagggaaaaaagccctt

SEQ ID NO: 18418 - DNA, 22 bp, Artificial Sequence
  chemically synthesized
taaatctcttcggaacctgaag

SEQ ID NO: 18419 - DNA, 22 bp, Artificial Sequence
  chemically synthesized
aaatctcttcggaacctgaaga

SEQ ID NO: 18420 - DNA, 22 bp, Artificial Sequence
  chemically synthesized
aatctcttcggaacctgaagat

SEQ ID NO: 18421 - DNA, 22 bp, Artificial Sequence
  chemically synthesized
ttcggaacctgaagatagacct

SEQ ID NO: 18422 - DNA, 22 bp, Artificial Sequence
  chemically synthesized
cggaacctgaagatagaccttg

SEQ ID NO: 18423 - DNA, 22 bp, Artificial Sequence
  chemically synthesized
ggaacctgaagatagaccttga

SEQ ID NO: 18424 - DNA, 22 bp, Artificial Sequence
  chemically synthesized
aagatagaccttgatttaacag

SEQ ID NO: 18425 - DNA, 22 bp, Artificial Sequence
  chemically synthesized
gatttaacagcagagggcgatc

SEQ ID NO: 18426 - DNA, 22 bp, Artificial Sequence
  chemically synthesized
atttaacagcagagggcgatct

SEQ ID NO: 18427 - DNA, 22 bp, Artificial Sequence
  chemically synthesized
aacagcagagggcgatcttaac

SEQ ID NO: 18428 - DNA, 22 bp, Artificial Sequence
  chemically synthesized
acagcagagggcgatcttaaca

SEQ ID NO: 18429 - DNA, 22 bp, Artificial Sequence
  chemically synthesized
aacataataatggctctggctg

SEQ ID NO: 18430 - DNA, 22 bp, Artificial Sequence
  chemically synthesized
acataataatggctctggctga

SEQ ID NO: 18431 - DNA, 22 bp, Artificial Sequence
  chemically synthesized
tggctgagaaaattaaaccagg

SEQ ID NO: 18432 - DNA, 22 bp, Artificial Sequence
  chemically synthesized
gctgagaaaattaaaccaggcc

SEQ ID NO: 18433 - DNA, 22 bp, Artificial Sequence
  chemically synthesized
agaaaattaaaccaggcctaca

SEQ ID NO: 18434 - DNA, 22 bp, Artificial Sequence
  chemically synthesized
aaccaggcctacactcttttat

SEQ ID NO: 18435 - DNA, 22 bp, Artificial Sequence
  chemically synthesized
cactcttttatctttggaagac

SEQ ID NO: 18436 - DNA, 22 bp, Artificial Sequence
  chemically synthesized
ttttatctttggaagacctttc

SEQ ID NO: 18437 - DNA, 22 bp, Artificial Sequence
  chemically synthesized
ttatctttggaagacctttcta

SEQ ID NO: 18438 - DNA, 22 bp, Artificial Sequence
  chemically synthesized
tatctttggaagacctttctac

SEQ ID NO: 18439 - DNA, 22 bp, Artificial Sequence
  chemically synthesized
atctttggaagacctttctaca

SEQ ID NO: 18440 - DNA, 22 bp, Artificial Sequence
  chemically synthesized
tctttggaagacctttctacac

SEQ ID NO: 18441 - DNA, 22 bp, Artificial Sequence
  chemically synthesized
tggaagacctttctacactagt

SEQ ID NO: 18442 - DNA, 22 bp, Artificial Sequence
  chemically synthesized
ggaagacctttctacactagtg

SEQ ID NO: 18443 - DNA, 22 bp, Artificial Sequence
  chemically synthesized
gaagacctttctacactagtgt

SEQ ID NO: 18444 - DNA, 22 bp, Artificial Sequence
  chemically synthesized
tctacactagtgtgcaagaacg

SEQ ID NO: 18445 - DNA, 22 bp, Artificial Sequence
  chemically synthesized
ctacactagtgtgcaagaacga

SEQ ID NO: 18446 - DNA, 22 bp, Artificial Sequence
  chemically synthesized
tacactagtgtgcaagaacgag

SEQ ID NO: 18447 - DNA, 22 bp, Artificial Sequence
  chemically synthesized
cactagtgtgcaagaacgagat

SEQ ID NO: 18448 - DNA, 22 bp, Artificial Sequence
  chemically synthesized
gtgtgcaagaacgagatgttct

SEQ ID NO: 18449 - DNA, 22 bp, Artificial Sequence
  chemically synthesized
taatgactttttaaatgtgtaa

SEQ ID NO: 18450 - DNA, 22 bp, Artificial Sequence
  chemically synthesized
atgactttttaaatgtgtaact

SEQ ID NO: 18451 - DNA, 22 bp, Artificial Sequence
  chemically synthesized
tttaaatgtgtaacttaataag

SEQ ID NO: 18452 - DNA, 22 bp, Artificial Sequence
  chemically synthesized
ttaaatgtgtaacttaataagc

SEQ ID NO: 18453 - DNA, 22 bp, Artificial Sequence
  chemically synthesized
taaatgtgtaacttaataagcc

SEQ ID NO: 18454 - DNA, 22 bp, Artificial Sequence
  chemically synthesized
aaatgtgtaacttaataagcct

SEQ ID NO: 18455 - DNA, 22 bp, Artificial Sequence
  chemically synthesized
aatgtgtaacttaataagccta

SEQ ID NO: 18456 - DNA, 22 bp, Artificial Sequence
  chemically synthesized
aataagcctattccatcacaat

SEQ ID NO: 18457 - DNA, 22 bp, Artificial Sequence
  chemically synthesized
ataagcctattccatcacaatc

SEQ ID NO: 18458 - DNA, 22 bp, Artificial Sequence
  chemically synthesized
ttccatcacaatcatgatcgct

SEQ ID NO: 18459 - DNA, 22 bp, Artificial Sequence
  chemically synthesized
catcacaatcatgatcgctggt

SEQ ID NO: 18460 - DNA, 22 bp, Artificial Sequence
  chemically synthesized
gtaaagtagctcagtggtgtgg

SEQ ID NO: 18461 - DNA, 22 bp, Artificial Sequence
  chemically synthesized
agtggtgtggggaaacgttccc

SEQ ID NO: 18462 - DNA, 22 bp, Artificial Sequence
  chemically synthesized
ccctggatcatactccagaatt

SEQ ID NO: 18463 - DNA, 22 bp, Artificial Sequence
  chemically synthesized
gatcatactccagaattctgct

SEQ ID NO: 18464 - DNA, 22 bp, Artificial Sequence
  chemically synthesized
cagaattctgctctcagcaatt

SEQ ID NO: 18465 - DNA, 22 bp, Artificial Sequence
  chemically synthesized
tgctctcagcaattgcagttaa

SEQ ID NO: 18466 - DNA, 22 bp, Artificial Sequence
  chemically synthesized
ctctcagcaattgcagttaagt

SEQ ID NO: 18467 - DNA, 22 bp, Artificial Sequence
  chemically synthesized
tcagcaattgcagttaagtaag

SEQ ID NO: 18468 - DNA, 22 bp, Artificial Sequence
  chemically synthesized
agcaattgcagttaagtaagtt

SEQ ID NO: 18469 - DNA, 22 bp, Artificial Sequence
  chemically synthesized
cagttaagtaagttacactaca

SEQ ID NO: 18470 - DNA, 22 bp, Artificial Sequence
  chemically synthesized
agtaagttacactacagttctc

SEQ ID NO: 18471 - DNA, 22 bp, Artificial Sequence
  chemically synthesized
cactacagttctcacaagagcc

SEQ ID NO: 18472 - DNA, 22 bp, Artificial Sequence
  chemically synthesized
cagttctcacaagagcctgtga

SEQ ID NO: 18473 - DNA, 22 bp, Artificial Sequence
  chemically synthesized
tcacaagagcctgtgaggggat

SEQ ID NO: 18474 - DNA, 22 bp, Artificial Sequence
  chemically synthesized
acaagagcctgtgaggggatgt

SEQ ID NO: 18475 - DNA, 22 bp, Artificial Sequence
  chemically synthesized
tgaggggatgtcaggtgcatca

SEQ ID NO: 18476 - DNA, 22 bp, Artificial Sequence
  chemically synthesized
cattgggtgtctcttttcctag

SEQ ID NO: 18477 - DNA, 22 bp, Artificial Sequence
  chemically synthesized
ggtgtctcttttcctagattta

SEQ ID NO: 18478 - DNA, 22 bp, Artificial Sequence
  chemically synthesized
ttttcctagatttatgcttttg

SEQ ID NO: 18479 - DNA, 22 bp, Artificial Sequence
  chemically synthesized
ttcctagatttatgcttttggg

SEQ ID NO: 18480 - DNA, 22 bp, Artificial Sequence
  chemically synthesized
tcctagatttatgcttttggga

SEQ ID NO: 18481 - DNA, 22 bp, Artificial Sequence
  chemically synthesized
cctagatttatgcttttgggat

SEQ ID NO: 18482 - DNA, 22 bp, Artificial Sequence
  chemically synthesized
ctagatttatgcttttgggata

SEQ ID NO: 18483 - DNA, 22 bp, Artificial Sequence
  chemically synthesized
gatttatgcttttgggatacag

SEQ ID NO: 18484 - DNA, 22 bp, Artificial Sequence
  chemically synthesized
atgcttttgggatacagaccta

SEQ ID NO: 18485 - DNA, 22 bp, Artificial Sequence
  chemically synthesized
tgcttttgggatacagacctat

SEQ ID NO: 18486 - DNA, 22 bp, Artificial Sequence
  chemically synthesized
ttgggatacagacctatgttta

SEQ ID NO: 18487 - DNA, 22 bp, Artificial Sequence
  chemically synthesized
tgggatacagacctatgtttac

SEQ ID NO: 18488 - DNA, 22 bp, Artificial Sequence
  chemically synthesized
gggatacagacctatgtttaca

SEQ ID NO: 18489 - DNA, 22 bp, Artificial Sequence
  chemically synthesized
ggatacagacctatgtttacaa

SEQ ID NO: 18490 - DNA, 22 bp, Artificial Sequence
  chemically synthesized
tgtttacaatataataaatatt

SEQ ID NO: 18491 - DNA, 22 bp, Artificial Sequence
  chemically synthesized
acaatataataaatattattgc

SEQ ID NO: 18492 - DNA, 22 bp, Artificial Sequence
  chemically synthesized
caatataataaatattattgct

SEQ ID NO: 18493 - DNA, 22 bp, Artificial Sequence
  chemically synthesized
ttgctatcttttaaagatataa

SEQ ID NO: 18494 - DNA, 22 bp, Artificial Sequence
  chemically synthesized
ctatcttttaaagatataataa

SEQ ID NO: 18495 - DNA, 22 bp, Artificial Sequence
  chemically synthesized
tcttttaaagatataataatag

SEQ ID NO: 18496 - DNA, 22 bp, Artificial Sequence
  chemically synthesized
ttaaagatataataataggatg

SEQ ID NO: 18497 - DNA, 22 bp, Artificial Sequence
  chemically synthesized
taaagatataataataggatgt

SEQ ID NO: 18498 - DNA, 22 bp, Artificial Sequence
  chemically synthesized
aaagatataataataggatgta

SEQ ID NO: 18499 - DNA, 22 bp, Artificial Sequence
  chemically synthesized
aagatataataataggatgtaa

SEQ ID NO: 18500 - DNA, 22 bp, Artificial Sequence
  chemically synthesized
gaccacaactactgtttttttg

SEQ ID NO: 18501 - DNA, 22 bp, Artificial Sequence
  chemically synthesized
accacaactactgtttttttga

SEQ ID NO: 18502 - DNA, 22 bp, Artificial Sequence
  chemically synthesized
ctgtttttttgaaatacatgat

SEQ ID NO: 18503 - DNA, 22 bp, Artificial Sequence
  chemically synthesized
tttttttgaaatacatgattca

SEQ ID NO: 18504 - DNA, 22 bp, Artificial Sequence
  chemically synthesized
ttttgaaatacatgattcatgg

SEQ ID NO: 18505 - DNA, 22 bp, Artificial Sequence
  chemically synthesized
tttgaaatacatgattcatggt

SEQ ID NO: 18506 - DNA, 22 bp, Artificial Sequence
  chemically synthesized
ttgaaatacatgattcatggtt

SEQ ID NO: 18507 - DNA, 22 bp, Artificial Sequence
  chemically synthesized
tgaaatacatgattcatggttt

SEQ ID NO: 18508 - DNA, 22 bp, Artificial Sequence
  chemically synthesized
gaaatacatgattcatggttta

SEQ ID NO: 18509 - DNA, 22 bp, Artificial Sequence
  chemically synthesized
aaatacatgattcatggtttac

SEQ ID NO: 18510 - DNA, 22 bp, Artificial Sequence
  chemically synthesized
atggtttacatgtgtcaaggtg

SEQ ID NO: 18511 - DNA, 22 bp, Artificial Sequence
  chemically synthesized
acatgtgtcaaggtgaaatctg

SEQ ID NO: 18512 - DNA, 22 bp, Artificial Sequence
  chemically synthesized
catgtgtcaaggtgaaatctga

SEQ ID NO: 18513 - DNA, 22 bp, Artificial Sequence
  chemically synthesized
agttggcttttacagatagttg

SEQ ID NO: 18514 - DNA, 22 bp, Artificial Sequence
  chemically synthesized
gcttttacagatagttgacttt

SEQ ID NO: 18515 - DNA, 22 bp, Artificial Sequence
  chemically synthesized
ttacagatagttgactttctat

SEQ ID NO: 18516 - DNA, 22 bp, Artificial Sequence
  chemically synthesized
tacagatagttgactttctatc

SEQ ID NO: 18517 - DNA, 22 bp, Artificial Sequence
  chemically synthesized
acagatagttgactttctatct

SEQ ID NO: 18518 - DNA, 22 bp, Artificial Sequence
  chemically synthesized
cagatagttgactttctatctt

SEQ ID NO: 18519 - DNA, 22 bp, Artificial Sequence
  chemically synthesized
actttctatcttttggcattct

SEQ ID NO: 18520 - DNA, 22 bp, Artificial Sequence
  chemically synthesized
tctatcttttggcattctttgg

SEQ ID NO: 18521 - DNA, 22 bp, Artificial Sequence
  chemically synthesized
ctatcttttggcattctttggt

SEQ ID NO: 18522 - DNA, 22 bp, Artificial Sequence
  chemically synthesized
tatcttttggcattctttggtg

SEQ ID NO: 18523 - DNA, 22 bp, Artificial Sequence
  chemically synthesized
tcttttggcattctttggtgtg

SEQ ID NO: 18524 - DNA, 22 bp, Artificial Sequence
  chemically synthesized
ttggcattctttggtgtgtaga

SEQ ID NO: 18525 - DNA, 22 bp, Artificial Sequence
  chemically synthesized
tggcattctttggtgtgtagaa

SEQ ID NO: 18526 - DNA, 22 bp, Artificial Sequence
  chemically synthesized
ggcattctttggtgtgtagaat

SEQ ID NO: 18527 - DNA, 22 bp, Artificial Sequence
  chemically synthesized
gcattctttggtgtgtagaatt

SEQ ID NO: 18528 - DNA, 22 bp, Artificial Sequence
  chemically synthesized
tttggtgtgtagaattactgta

SEQ ID NO: 18529 - DNA, 22 bp, Artificial Sequence
  chemically synthesized
tggtgtgtagaattactgtaat

SEQ ID NO: 18530 - DNA, 22 bp, Artificial Sequence
  chemically synthesized
ggtgtgtagaattactgtaata

SEQ ID NO: 18531 - DNA, 22 bp, Artificial Sequence
  chemically synthesized
gtgtgtagaattactgtaatac

SEQ ID NO: 18532 - DNA, 22 bp, Artificial Sequence
  chemically synthesized
ctgtaatacttctgcaatcaac

SEQ ID NO: 18533 - DNA, 22 bp, Artificial Sequence
  chemically synthesized
taatacttctgcaatcaactga

SEQ ID NO: 18534 - DNA, 22 bp, Artificial Sequence
  chemically synthesized
ctgcaatcaactgaaaactaga

SEQ ID NO: 18535 - DNA, 22 bp, Artificial Sequence
  chemically synthesized
tgcaatcaactgaaaactagag

SEQ ID NO: 18536 - DNA, 22 bp, Artificial Sequence
  chemically synthesized
caatcaactgaaaactagagcc

SEQ ID NO: 18537 - DNA, 22 bp, Artificial Sequence
  chemically synthesized
aaaactagagcctttaaatgat

SEQ ID NO: 18538 - DNA, 22 bp, Artificial Sequence
  chemically synthesized
gagcctttaaatgatttcaatt

SEQ ID NO: 18539 - DNA, 22 bp, Artificial Sequence
  chemically synthesized
taaatgatttcaattccacaga

SEQ ID NO: 18540 - DNA, 22 bp, Artificial Sequence
  chemically synthesized
aaatgatttcaattccacagaa

SEQ ID NO: 18541 - DNA, 22 bp, Artificial Sequence
  chemically synthesized
aatgatttcaattccacagaaa

SEQ ID NO: 18542 - DNA, 22 bp, Artificial Sequence
  chemically synthesized
caattccacagaaagaaagtga

SEQ ID NO: 18543 - DNA, 22 bp, Artificial Sequence
  chemically synthesized
aattccacagaaagaaagtgag

SEQ ID NO: 18544 - DNA, 22 bp, Artificial Sequence
  chemically synthesized
cacagaaagaaagtgagcttga

SEQ ID NO: 18545 - DNA, 22 bp, Artificial Sequence
  chemically synthesized
gaacataggatgagctttagaa

SEQ ID NO: 18546 - DNA, 22 bp, Artificial Sequence
  chemically synthesized
aacataggatgagctttagaaa

SEQ ID NO: 18547 - DNA, 22 bp, Artificial Sequence
  chemically synthesized
tagaaagaaaattgatcaagca

SEQ ID NO: 18548 - DNA, 22 bp, Artificial Sequence
  chemically synthesized
agaaagaaaattgatcaagcag

SEQ ID NO: 18549 - DNA, 22 bp, Artificial Sequence
  chemically synthesized
gaaagaaaattgatcaagcaga

SEQ ID NO: 18550 - DNA, 22 bp, Artificial Sequence
  chemically synthesized
atcaagcagatgtttaattgga

SEQ ID NO: 18551 - DNA, 22 bp, Artificial Sequence
  chemically synthesized
aattggaattgattattagatc

SEQ ID NO: 18552 - DNA, 22 bp, Artificial Sequence
  chemically synthesized
attggaattgattattagatcc

SEQ ID NO: 18553 - DNA, 22 bp, Artificial Sequence
  chemically synthesized
gaattgattattagatcctact

SEQ ID NO: 18554 - DNA, 22 bp, Artificial Sequence
  chemically synthesized
attattagatcctactttgtgg

SEQ ID NO: 18555 - DNA, 22 bp, Artificial Sequence
  chemically synthesized
ttagatcctactttgtggattt

SEQ ID NO: 18556 - DNA, 22 bp, Artificial Sequence
  chemically synthesized
gatcctactttgtggatttagt

SEQ ID NO: 18557 - DNA, 22 bp, Artificial Sequence
  chemically synthesized
ctttgtggatttagtccctggg

SEQ ID NO: 18558 - DNA, 22 bp, Artificial Sequence
  chemically synthesized
tgtggatttagtccctgggatt

SEQ ID NO: 18559 - DNA, 22 bp, Artificial Sequence
  chemically synthesized
gtggatttagtccctgggattc

SEQ ID NO: 18560 - DNA, 22 bp, Artificial Sequence
  chemically synthesized
tggatttagtccctgggattca

SEQ ID NO: 18561 - DNA, 22 bp, Artificial Sequence
  chemically synthesized
agtccctgggattcagtctgta

SEQ ID NO: 18562 - DNA, 22 bp, Artificial Sequence
  chemically synthesized
gtccctgggattcagtctgtag

SEQ ID NO: 18563 - DNA, 22 bp, Artificial Sequence
  chemically synthesized
ggattcagtctgtagaaatgtc

SEQ ID NO: 18564 - DNA, 22 bp, Artificial Sequence
  chemically synthesized
agtctgtagaaatgtctaatag

SEQ ID NO: 18565 - DNA, 22 bp, Artificial Sequence
  chemically synthesized
tagaaatgtctaatagttctct

SEQ ID NO: 18566 - DNA, 22 bp, Artificial Sequence
  chemically synthesized
atagttctctatagtccttgtt

SEQ ID NO: 18567 - DNA, 22 bp, Artificial Sequence
  chemically synthesized
tctatagtccttgttcctggtg

SEQ ID NO: 18568 - DNA, 22 bp, Artificial Sequence
  chemically synthesized
tatagtccttgttcctggtgaa

SEQ ID NO: 18569 - DNA, 22 bp, Artificial Sequence
  chemically synthesized
tagtccttgttcctggtgaacc

SEQ ID NO: 18570 - DNA, 22 bp, Artificial Sequence
  chemically synthesized
gttcctggtgaaccacagttag

SEQ ID NO: 18571 - DNA, 22 bp, Artificial Sequence
  chemically synthesized
ttcctggtgaaccacagttagg

SEQ ID NO: 18572 - DNA, 22 bp, Artificial Sequence
  chemically synthesized
ctggtgaaccacagttagggtg

SEQ ID NO: 18573 - DNA, 22 bp, Artificial Sequence
  chemically synthesized
gtgaaccacagttagggtgttt

SEQ ID NO: 18574 - DNA, 22 bp, Artificial Sequence
  chemically synthesized
gggtgttttgtttattttattg

SEQ ID NO: 18575 - DNA, 22 bp, Artificial Sequence
  chemically synthesized
tgtttattttattgttcttgct

SEQ ID NO: 18576 - DNA, 22 bp, Artificial Sequence
  chemically synthesized
gtttattttattgttcttgcta

SEQ ID NO: 18577 - DNA, 22 bp, Artificial Sequence
  chemically synthesized
tttattttattgttcttgctat

SEQ ID NO: 18578 - DNA, 22 bp, Artificial Sequence
  chemically synthesized
attttattgttcttgctattgt

SEQ ID NO: 18579 - DNA, 22 bp, Artificial Sequence
  chemically synthesized
ttttattgttcttgctattgtt

SEQ ID NO: 18580 - DNA, 22 bp, Artificial Sequence
  chemically synthesized
tattgttcttgctattgttgat

SEQ ID NO: 18581 - DNA, 22 bp, Artificial Sequence
  chemically synthesized
attgttcttgctattgttgata

SEQ ID NO: 18582 - DNA, 22 bp, Artificial Sequence
  chemically synthesized
ttgttcttgctattgttgatat

SEQ ID NO: 18583 - DNA, 22 bp, Artificial Sequence
  chemically synthesized
ttcttgctattgttgatattct

SEQ ID NO: 18584 - DNA, 22 bp, Artificial Sequence
  chemically synthesized
ttgctattgttgatattctatg

SEQ ID NO: 18585 - DNA, 22 bp, Artificial Sequence
  chemically synthesized
gctattgttgatattctatgta

SEQ ID NO: 18586 - DNA, 22 bp, Artificial Sequence
  chemically synthesized
ctattgttgatattctatgtag

SEQ ID NO: 18587 - DNA, 22 bp, Artificial Sequence
  chemically synthesized
ttgttgatattctatgtagttg

SEQ ID NO: 18588 - DNA, 22 bp, Artificial Sequence
  chemically synthesized
ttgatattctatgtagttgagc

SEQ ID NO: 18589 - DNA, 22 bp, Artificial Sequence
  chemically synthesized
atattctatgtagttgagctct

SEQ ID NO: 18590 - DNA, 22 bp, Artificial Sequence
  chemically synthesized
tatgtagttgagctctgtaaaa

SEQ ID NO: 18591 - DNA, 22 bp, Artificial Sequence
  chemically synthesized
tgtagttgagctctgtaaaagg

SEQ ID NO: 18592 - DNA, 22 bp, Artificial Sequence
  chemically synthesized
agctctgtaaaaggaaattgta

SEQ ID NO: 18593 - DNA, 22 bp, Artificial Sequence
  chemically synthesized
tgtaaaaggaaattgtatttta

SEQ ID NO: 18594 - DNA, 22 bp, Artificial Sequence
  chemically synthesized
taaaaggaaattgtattttatg

SEQ ID NO: 18595 - DNA, 22 bp, Artificial Sequence
  chemically synthesized
tattttatgttttagtaattgt

SEQ ID NO: 18596 - DNA, 22 bp, Artificial Sequence
  chemically synthesized
tatgttttagtaattgttgcca

SEQ ID NO: 18597 - DNA, 22 bp, Artificial Sequence
  chemically synthesized
atgttttagtaattgttgccaa

SEQ ID NO: 18598 - DNA, 22 bp, Artificial Sequence
  chemically synthesized
tgttttagtaattgttgccaac

SEQ ID NO: 18599 - DNA, 22 bp, Artificial Sequence
  chemically synthesized
tagtaattgttgccaacttttt

SEQ ID NO: 18600 - DNA, 22 bp, Artificial Sequence
  chemically synthesized
agtaattgttgccaacttttta

SEQ ID NO: 18601 - DNA, 22 bp, Artificial Sequence
  chemically synthesized
gtaattgttgccaactttttaa

SEQ ID NO: 18602 - DNA, 22 bp, Artificial Sequence
  chemically synthesized
ttgccaactttttaaattaatt

SEQ ID NO: 18603 - DNA, 22 bp, Artificial Sequence
  chemically synthesized
ccaactttttaaattaattttc

SEQ ID NO: 18604 - DNA, 22 bp, Artificial Sequence
  chemically synthesized
tttaaattaattttcattattt

SEQ ID NO: 18605 - DNA, 22 bp, Artificial Sequence
  chemically synthesized
ttaaattaattttcattatttt

SEQ ID NO: 18606 - DNA, 22 bp, Artificial Sequence
  chemically synthesized
taaattaattttcattattttt

SEQ ID NO: 18607 - DNA, 22 bp, Artificial Sequence
  chemically synthesized
aaattaattttcattatttttg

SEQ ID NO: 18608 - DNA, 22 bp, Artificial Sequence
  chemically synthesized
aattaattttcattatttttga

SEQ ID NO: 18609 - DNA, 22 bp, Artificial Sequence
  chemically synthesized
attttcattatttttgagccaa

SEQ ID NO: 18610 - DNA, 22 bp, Artificial Sequence
  chemically synthesized
tcattatttttgagccaaattg

SEQ ID NO: 18611 - DNA, 22 bp, Artificial Sequence
  chemically synthesized
cattatttttgagccaaattga

SEQ ID NO: 18612 - DNA, 22 bp, Artificial Sequence
  chemically synthesized
attatttttgagccaaattgaa

SEQ ID NO: 18613 - DNA, 22 bp, Artificial Sequence
  chemically synthesized
tttttgagccaaattgaaatgt

SEQ ID NO: 18614 - DNA, 22 bp, Artificial Sequence
  chemically synthesized
ttgagccaaattgaaatgtgca

SEQ ID NO: 18615 - DNA, 22 bp, Artificial Sequence
  chemically synthesized
tgagccaaattgaaatgtgcac

SEQ ID NO: 18616 - DNA, 22 bp, Artificial Sequence
  chemically synthesized
gagccaaattgaaatgtgcacc

SEQ ID NO: 18617 - DNA, 22 bp, Artificial Sequence
  chemically synthesized
agccaaattgaaatgtgcacct

SEQ ID NO: 18618 - DNA, 22 bp, Artificial Sequence
  chemically synthesized
aaatgtgcacctcctgtgcctt

SEQ ID NO: 18619 - DNA, 22 bp, Artificial Sequence
  chemically synthesized
ctgtgccttttttctccttaga

SEQ ID NO: 18620 - DNA, 22 bp, Artificial Sequence
  chemically synthesized
tgccttttttctccttagaaaa

SEQ ID NO: 18621 - DNA, 22 bp, Artificial Sequence
  chemically synthesized
ttttctccttagaaaatctaat

SEQ ID NO: 18622 - DNA, 22 bp, Artificial Sequence
  chemically synthesized
tttctccttagaaaatctaatt

SEQ ID NO: 18623 - DNA, 22 bp, Artificial Sequence
  chemically synthesized
ttctccttagaaaatctaatta

SEQ ID NO: 18624 - DNA, 22 bp, Artificial Sequence
  chemically synthesized
tctccttagaaaatctaattac

SEQ ID NO: 18625 - DNA, 22 bp, Artificial Sequence
  chemically synthesized
ctccttagaaaatctaattact

SEQ ID NO: 18626 - DNA, 22 bp, Artificial Sequence
  chemically synthesized
tccttagaaaatctaattactt

SEQ ID NO: 18627 - DNA, 22 bp, Artificial Sequence
  chemically synthesized
cttagaaaatctaattacttgg

SEQ ID NO: 18628 - DNA, 22 bp, Artificial Sequence
  chemically synthesized
agaaaatctaattacttggaac

SEQ ID NO: 18629 - DNA, 22 bp, Artificial Sequence
  chemically synthesized
gaaaatctaattacttggaaca

SEQ ID NO: 18630 - DNA, 22 bp, Artificial Sequence
  chemically synthesized
attacttggaacaagttcagat

SEQ ID NO: 18631 - DNA, 22 bp, Artificial Sequence
  chemically synthesized
cttggaacaagttcagatttca

SEQ ID NO: 18632 - DNA, 22 bp, Artificial Sequence
  chemically synthesized
ggaacaagttcagatttcactg

SEQ ID NO: 18633 - DNA, 22 bp, Artificial Sequence
  chemically synthesized
gaacaagttcagatttcactgg

SEQ ID NO: 18634 - DNA, 22 bp, Artificial Sequence
  chemically synthesized
agatttcactggtcagtcattt

SEQ ID NO: 18635 - DNA, 22 bp, Artificial Sequence
  chemically synthesized
cactggtcagtcattttcatct

SEQ ID NO: 18636 - DNA, 22 bp, Artificial Sequence
  chemically synthesized
actggtcagtcattttcatctt

SEQ ID NO: 18637 - DNA, 22 bp, Artificial Sequence
  chemically synthesized
gtcagtcattttcatcttgttt

SEQ ID NO: 18638 - DNA, 22 bp, Artificial Sequence
  chemically synthesized
tcatcttgttttcttcttgcta

SEQ ID NO: 18639 - DNA, 22 bp, Artificial Sequence
  chemically synthesized
catcttgttttcttcttgctaa

SEQ ID NO: 18640 - DNA, 22 bp, Artificial Sequence
  chemically synthesized
atcttgttttcttcttgctaag

SEQ ID NO: 18641 - DNA, 22 bp, Artificial Sequence
  chemically synthesized
gttttcttcttgctaagtctta

SEQ ID NO: 18642 - DNA, 22 bp, Artificial Sequence
  chemically synthesized
ttttcttcttgctaagtcttac

SEQ ID NO: 18643 - DNA, 22 bp, Artificial Sequence
  chemically synthesized
tcttcttgctaagtcttaccat

SEQ ID NO: 18644 - DNA, 22 bp, Artificial Sequence
  chemically synthesized
cttcttgctaagtcttaccatg

SEQ ID NO: 18645 - DNA, 22 bp, Artificial Sequence
  chemically synthesized
ttcttgctaagtcttaccatgt

SEQ ID NO: 18646 - DNA, 22 bp, Artificial Sequence
  chemically synthesized
cttgctaagtcttaccatgtac

SEQ ID NO: 18647 - DNA, 22 bp, Artificial Sequence
  chemically synthesized
ttgctaagtcttaccatgtacc

SEQ ID NO: 18648 - DNA, 22 bp, Artificial Sequence
  chemically synthesized
gctaagtcttaccatgtacctg

SEQ ID NO: 18649 - DNA, 22 bp, Artificial Sequence
  chemically synthesized
ctaagtcttaccatgtacctgc

SEQ ID NO: 18650 - DNA, 22 bp, Artificial Sequence
  chemically synthesized
agtcttaccatgtacctgcttt

SEQ ID NO: 18651 - DNA, 22 bp, Artificial Sequence
  chemically synthesized
accatgtacctgctttggcaat

SEQ ID NO: 18652 - DNA, 22 bp, Artificial Sequence
  chemically synthesized
ccatgtacctgctttggcaatc

SEQ ID NO: 18653 - DNA, 22 bp, Artificial Sequence
  chemically synthesized
ctttggcaatcattgcaactct

SEQ ID NO: 18654 - DNA, 22 bp, Artificial Sequence
  chemically synthesized
tggcaatcattgcaactctgag

SEQ ID NO: 18655 - DNA, 22 bp, Artificial Sequence
  chemically synthesized
ggcaatcattgcaactctgaga

SEQ ID NO: 18656 - DNA, 22 bp, Artificial Sequence
  chemically synthesized
gcaatcattgcaactctgagat

SEQ ID NO: 18657 - DNA, 22 bp, Artificial Sequence
  chemically synthesized
caactctgagattataaaatgc

SEQ ID NO: 18658 - DNA, 22 bp, Artificial Sequence
  chemically synthesized
tgagattataaaatgccttaga

SEQ ID NO: 18659 - DNA, 22 bp, Artificial Sequence
  chemically synthesized
agattataaaatgccttagaga

SEQ ID NO: 18660 - DNA, 22 bp, Artificial Sequence
  chemically synthesized
taaaatgccttagagaatatac

SEQ ID NO: 18661 - DNA, 22 bp, Artificial Sequence
  chemically synthesized
agagaatatactaactaataag

SEQ ID NO: 18662 - DNA, 22 bp, Artificial Sequence
  chemically synthesized
gagaatatactaactaataaga

SEQ ID NO: 18663 - DNA, 22 bp, Artificial Sequence
  chemically synthesized
actaataagatctttttttcag

SEQ ID NO: 18664 - DNA, 22 bp, Artificial Sequence
  chemically synthesized
ataagatctttttttcagaaac

SEQ ID NO: 18665 - DNA, 22 bp, Artificial Sequence
  chemically synthesized
tttttcagaaacagaaaatagt

SEQ ID NO: 18666 - DNA, 22 bp, Artificial Sequence
  chemically synthesized
ttttcagaaacagaaaatagtt

SEQ ID NO: 18667 - DNA, 22 bp, Artificial Sequence
  chemically synthesized
tttcagaaacagaaaatagttc

SEQ ID NO: 18668 - DNA, 22 bp, Artificial Sequence
  chemically synthesized
ttcagaaacagaaaatagttcc

SEQ ID NO: 18669 - DNA, 22 bp, Artificial Sequence
  chemically synthesized
tcagaaacagaaaatagttcct

SEQ ID NO: 18670 - DNA, 22 bp, Artificial Sequence
  chemically synthesized
cagaaacagaaaatagttcctt

SEQ ID NO: 18671 - DNA, 22 bp, Artificial Sequence
  chemically synthesized
agaaacagaaaatagttccttg

SEQ ID NO: 18672 - DNA, 22 bp, Artificial Sequence
  chemically synthesized
cttgagtacttccttcttgcat

SEQ ID NO: 18673 - DNA, 22 bp, Artificial Sequence
  chemically synthesized
gagtacttccttcttgcatttc

SEQ ID NO: 18674 - DNA, 22 bp, Artificial Sequence
  chemically synthesized
agtacttccttcttgcatttct

SEQ ID NO: 18675 - DNA, 22 bp, Artificial Sequence
  chemically synthesized
ccttcttgcatttctgcctatg

SEQ ID NO: 18676 - DNA, 22 bp, Artificial Sequence
  chemically synthesized
cttcttgcatttctgcctatgt

SEQ ID NO: 18677 - DNA, 22 bp, Artificial Sequence
  chemically synthesized
cttgcatttctgcctatgtttt

SEQ ID NO: 18678 - DNA, 22 bp, Artificial Sequence
  chemically synthesized
ttgcatttctgcctatgttttt

SEQ ID NO: 18679 - DNA, 22 bp, Artificial Sequence
  chemically synthesized
gcatttctgcctatgtttttga

SEQ ID NO: 18680 - DNA, 22 bp, Artificial Sequence
  chemically synthesized
catttctgcctatgtttttgaa

SEQ ID NO: 18681 - DNA, 22 bp, Artificial Sequence
  chemically synthesized
ctgcctatgtttttgaagttgt

SEQ ID NO: 18682 - DNA, 22 bp, Artificial Sequence
  chemically synthesized
tgcctatgtttttgaagttgtt

SEQ ID NO: 18683 - DNA, 22 bp, Artificial Sequence
  chemically synthesized
cctatgtttttgaagttgttgc

SEQ ID NO: 18684 - DNA, 22 bp, Artificial Sequence
  chemically synthesized
tgtttttgaagttgttgctgtt

SEQ ID NO: 18685 - DNA, 22 bp, Artificial Sequence
  chemically synthesized
ttgaagttgttgctgtttgcct

SEQ ID NO: 18686 - DNA, 22 bp, Artificial Sequence
  chemically synthesized
tgaagttgttgctgtttgcctg

SEQ ID NO: 18687 - DNA, 22 bp, Artificial Sequence
  chemically synthesized
gaagttgttgctgtttgcctgc

SEQ ID NO: 18688 - DNA, 22 bp, Artificial Sequence
  chemically synthesized
aagttgttgctgtttgcctgca

SEQ ID NO: 18689 - DNA, 22 bp, Artificial Sequence
  chemically synthesized
ttgctgtttgcctgcaataggc

SEQ ID NO: 18690 - DNA, 22 bp, Artificial Sequence
  chemically synthesized
ctgtttgcctgcaataggctat

SEQ ID NO: 18691 - DNA, 22 bp, Artificial Sequence
  chemically synthesized
tttgcctgcaataggctataag

SEQ ID NO: 18692 - DNA, 22 bp, Artificial Sequence
  chemically synthesized
gcctgcaataggctataaggaa

SEQ ID NO: 18693 - DNA, 22 bp, Artificial Sequence
  chemically synthesized
cctgcaataggctataaggaat

SEQ ID NO: 18694 - DNA, 22 bp, Artificial Sequence
  chemically synthesized
caataggctataaggaatagca

SEQ ID NO: 18695 - DNA, 22 bp, Artificial Sequence
  chemically synthesized
taaggaatagcaggagaaattt

SEQ ID NO: 18696 - DNA, 22 bp, Artificial Sequence
  chemically synthesized
tactgaagtgctgttttcctag

SEQ ID NO: 18697 - DNA, 22 bp, Artificial Sequence
  chemically synthesized
actgaagtgctgttttcctagg

SEQ ID NO: 18698 - DNA, 22 bp, Artificial Sequence
  chemically synthesized
ctgaagtgctgttttcctaggt

SEQ ID NO: 18699 - DNA, 22 bp, Artificial Sequence
  chemically synthesized
aagtgctgttttcctaggtgct

SEQ ID NO: 18700 - DNA, 22 bp, Artificial Sequence
  chemically synthesized
ttttcctaggtgctactttggc

SEQ ID NO: 18701 - DNA, 22 bp, Artificial Sequence
  chemically synthesized
tcctaggtgctactttggcaga

SEQ ID NO: 18702 - DNA, 22 bp, Artificial Sequence
  chemically synthesized
cctaggtgctactttggcagag

SEQ ID NO: 18703 - DNA, 22 bp, Artificial Sequence
  chemically synthesized
ctaggtgctactttggcagagc

SEQ ID NO: 18704 - DNA, 22 bp, Artificial Sequence
  chemically synthesized
ggtgctactttggcagagctaa

SEQ ID NO: 18705 - DNA, 22 bp, Artificial Sequence
  chemically synthesized
ctttggcagagctaagttatct

SEQ ID NO: 18706 - DNA, 22 bp, Artificial Sequence
  chemically synthesized
tggcagagctaagttatctttt

SEQ ID NO: 18707 - DNA, 22 bp, Artificial Sequence
  chemically synthesized
ggcagagctaagttatcttttg

SEQ ID NO: 18708 - DNA, 22 bp, Artificial Sequence
  chemically synthesized
gcagagctaagttatcttttgt

SEQ ID NO: 18709 - DNA, 22 bp, Artificial Sequence
  chemically synthesized
agttatcttttgttttcttaat

SEQ ID NO: 18710 - DNA, 22 bp, Artificial Sequence
  chemically synthesized
tcttttgttttcttaatgcgtt

SEQ ID NO: 18711 - DNA, 22 bp, Artificial Sequence
  chemically synthesized
ttgttttcttaatgcgtttgga

SEQ ID NO: 18712 - DNA, 22 bp, Artificial Sequence
  chemically synthesized
tgttttcttaatgcgtttggac

SEQ ID NO: 18713 - DNA, 22 bp, Artificial Sequence
  chemically synthesized
gttttcttaatgcgtttggacc

SEQ ID NO: 18714 - DNA, 22 bp, Artificial Sequence
  chemically synthesized
ttttcttaatgcgtttggacca

SEQ ID NO: 18715 - DNA, 22 bp, Artificial Sequence
  chemically synthesized
tcttaatgcgtttggaccattt

SEQ ID NO: 18716 - DNA, 22 bp, Artificial Sequence
  chemically synthesized
cttaatgcgtttggaccatttt

SEQ ID NO: 18717 - DNA, 22 bp, Artificial Sequence
  chemically synthesized
ttaatgcgtttggaccattttg

SEQ ID NO: 18718 - DNA, 22 bp, Artificial Sequence
  chemically synthesized
aatgcgtttggaccattttgct

SEQ ID NO: 18719 - DNA, 22 bp, Artificial Sequence
  chemically synthesized
atgcgtttggaccattttgctg

SEQ ID NO: 18720 - DNA, 22 bp, Artificial Sequence
  chemically synthesized
ggaccattttgctggctataaa

SEQ ID NO: 18721 - DNA, 22 bp, Artificial Sequence
  chemically synthesized
gaccattttgctggctataaaa

SEQ ID NO: 18722 - DNA, 22 bp, Artificial Sequence
  chemically synthesized
tgctggctataaaataactgat

SEQ ID NO: 18723 - DNA, 22 bp, Artificial Sequence
  chemically synthesized
gctggctataaaataactgatt

SEQ ID NO: 18724 - DNA, 22 bp, Artificial Sequence
  chemically synthesized
ctggctataaaataactgatta

SEQ ID NO: 18725 - DNA, 22 bp, Artificial Sequence
  chemically synthesized
gctataaaataactgattaata

SEQ ID NO: 18726 - DNA, 22 bp, Artificial Sequence
  chemically synthesized
taaaataactgattaatataat

SEQ ID NO: 18727 - DNA, 22 bp, Artificial Sequence
  chemically synthesized
attaatataattctaacacaat

SEQ ID NO: 18728 - DNA, 22 bp, Artificial Sequence
  chemically synthesized
atataattctaacacaatgttg

SEQ ID NO: 18729 - DNA, 22 bp, Artificial Sequence
  chemically synthesized
taacacaatgttgacattgtag

SEQ ID NO: 18730 - DNA, 22 bp, Artificial Sequence
  chemically synthesized
acacaatgttgacattgtagtt

SEQ ID NO: 18731 - DNA, 22 bp, Artificial Sequence
  chemically synthesized
acattgtagttacacaaacaca

SEQ ID NO: 18732 - DNA, 22 bp, Artificial Sequence
  chemically synthesized
tagttacacaaacacaaataaa

SEQ ID NO: 18733 - DNA, 22 bp, Artificial Sequence
  chemically synthesized
cacaaacacaaataaatatttt

SEQ ID NO: 18734 - DNA, 22 bp, Artificial Sequence
  chemically synthesized
tatttaaaattctggaagtaat

SEQ ID NO: 18735 - DNA, 22 bp, Artificial Sequence
  chemically synthesized
atttaaaattctggaagtaata

SEQ ID NO: 18736 - DNA, 22 bp, Artificial Sequence
  chemically synthesized
tttaaaattctggaagtaatat

SEQ ID NO: 18737 - DNA, 22 bp, Artificial Sequence
  chemically synthesized
aaaattctggaagtaatataaa

SEQ ID NO: 18738 - DNA, 22 bp, Artificial Sequence
  chemically synthesized
aaattctggaagtaatataaaa

SEQ ID NO: 18739 - DNA, 22 bp, Artificial Sequence
  chemically synthesized
tggaagtaatataaaagggaaa

SEQ ID NO: 18740 - DNA, 22 bp, Artificial Sequence
  chemically synthesized
gaagtaatataaaagggaaaat

SEQ ID NO: 18741 - DNA, 22 bp, Artificial Sequence
  chemically synthesized
ataagaaagggataaaggtaat

SEQ ID NO: 18742 - DNA, 22 bp, Artificial Sequence
  chemically synthesized
taagaaagggataaaggtaata

SEQ ID NO: 18743 - DNA, 22 bp, Artificial Sequence
  chemically synthesized
ctgccccccacccaccaaattt

SEQ ID NO: 18744 - DNA, 22 bp, Artificial Sequence
  chemically synthesized
tgccccccacccaccaaattta

SEQ ID NO: 18745 - DNA, 22 bp, Artificial Sequence
  chemically synthesized
ccccccacccaccaaatttaca

SEQ ID NO: 18746 - DNA, 22 bp, Artificial Sequence
  chemically synthesized
acacaacaaaatgacatgttcg

SEQ ID NO: 18747 - DNA, 22 bp, Artificial Sequence
  chemically synthesized
cacaacaaaatgacatgttcga

SEQ ID NO: 18748 - DNA, 22 bp, Artificial Sequence
  chemically synthesized
gaatgtgaaaggtcataatagc

SEQ ID NO: 18749 - DNA, 22 bp, Artificial Sequence
  chemically synthesized
tcccatcatgaatcagaaagat

SEQ ID NO: 18750 - DNA, 22 bp, Artificial Sequence
  chemically synthesized
cccatcatgaatcagaaagatg

SEQ ID NO: 18751 - DNA, 22 bp, Artificial Sequence
  chemically synthesized
ccatcatgaatcagaaagatgt

SEQ ID NO: 18752 - DNA, 22 bp, Artificial Sequence
  chemically synthesized
gatgttttagacaaccactgaa

SEQ ID NO: 18753 - DNA, 22 bp, Artificial Sequence
  chemically synthesized
atgttttagacaaccactgaac

SEQ ID NO: 18754 - DNA, 22 bp, Artificial Sequence
  chemically synthesized
tagacaaccactgaactagatg

SEQ ID NO: 18755 - DNA, 22 bp, Artificial Sequence
  chemically synthesized
agacaaccactgaactagatga

SEQ ID NO: 18756 - DNA, 22 bp, Artificial Sequence
  chemically synthesized
gacaaccactgaactagatgac

SEQ ID NO: 18757 - DNA, 22 bp, Artificial Sequence
  chemically synthesized
aactagatgactgttgtactgt

SEQ ID NO: 18758 - DNA, 22 bp, Artificial Sequence
  chemically synthesized
gatgactgttgtactgtagctc

SEQ ID NO: 18759 - DNA, 22 bp, Artificial Sequence
  chemically synthesized
ttgtactgtagctcagtcattt

SEQ ID NO: 18760 - DNA, 22 bp, Artificial Sequence
  chemically synthesized
tactgtagctcagtcatttaaa

SEQ ID NO: 18761 - DNA, 22 bp, Artificial Sequence
  chemically synthesized
tagctcagtcatttaaaaaata

SEQ ID NO: 18762 - DNA, 22 bp, Artificial Sequence
  chemically synthesized
agtcatttaaaaaatatataaa

SEQ ID NO: 18763 - DNA, 22 bp, Artificial Sequence
  chemically synthesized
aaaaaatatataaatactacct

SEQ ID NO: 18764 - DNA, 22 bp, Artificial Sequence
  chemically synthesized
aaaaatatataaatactacctt

SEQ ID NO: 18765 - DNA, 22 bp, Artificial Sequence
  chemically synthesized
ccttgtagtgtcccatactgtg

SEQ ID NO: 18766 - DNA, 22 bp, Artificial Sequence
  chemically synthesized
gtagtgtcccatactgtgtttt

SEQ ID NO: 18767 - DNA, 22 bp, Artificial Sequence
  chemically synthesized
tagtgtcccatactgtgttttt

SEQ ID NO: 18768 - DNA, 22 bp, Artificial Sequence
  chemically synthesized
tgttttttacatggtagattct

SEQ ID NO: 18769 - DNA, 22 bp, Artificial Sequence
  chemically synthesized
tttacatggtagattcttattt

SEQ ID NO: 18770 - DNA, 22 bp, Artificial Sequence
  chemically synthesized
ttacatggtagattcttattta

SEQ ID NO: 18771 - DNA, 22 bp, Artificial Sequence
  chemically synthesized
tacatggtagattcttatttaa

SEQ ID NO: 18772 - DNA, 22 bp, Artificial Sequence
  chemically synthesized
acatggtagattcttatttaag

SEQ ID NO: 18773 - DNA, 22 bp, Artificial Sequence
  chemically synthesized
catggtagattcttatttaagt

SEQ ID NO: 18774 - DNA, 22 bp, Artificial Sequence
  chemically synthesized
ttatttaagtgctaactggtta

SEQ ID NO: 18775 - DNA, 22 bp, Artificial Sequence
  chemically synthesized
atttaagtgctaactggttatt

SEQ ID NO: 18776 - DNA, 22 bp, Artificial Sequence
  chemically synthesized
tttaagtgctaactggttattt

SEQ ID NO: 18777 - DNA, 22 bp, Artificial Sequence
  chemically synthesized
aagtgctaactggttattttct

SEQ ID NO: 18778 - DNA, 22 bp, Artificial Sequence
  chemically synthesized
agtgctaactggttattttctt

SEQ ID NO: 18779 - DNA, 22 bp, Artificial Sequence
  chemically synthesized
actggttattttctttggctgg

SEQ ID NO: 18780 - DNA, 22 bp, Artificial Sequence
  chemically synthesized
gttattttctttggctggttta

SEQ ID NO: 18781 - DNA, 22 bp, Artificial Sequence
  chemically synthesized
ttttctttggctggtttattgt

SEQ ID NO: 18782 - DNA, 22 bp, Artificial Sequence
  chemically synthesized
tctttggctggtttattgtact

SEQ ID NO: 18783 - DNA, 22 bp, Artificial Sequence
  chemically synthesized
ctttggctggtttattgtactg

SEQ ID NO: 18784 - DNA, 22 bp, Artificial Sequence
  chemically synthesized
tttggctggtttattgtactgt

SEQ ID NO: 18785 - DNA, 22 bp, Artificial Sequence
  chemically synthesized
tggctggtttattgtactgtta

SEQ ID NO: 18786 - DNA, 22 bp, Artificial Sequence
  chemically synthesized
ggctggtttattgtactgttat

SEQ ID NO: 18787 - DNA, 22 bp, Artificial Sequence
  chemically synthesized
gctggtttattgtactgttata

SEQ ID NO: 18788 - DNA, 22 bp, Artificial Sequence
  chemically synthesized
gtttattgtactgttatacaga

SEQ ID NO: 18789 - DNA, 22 bp, Artificial Sequence
  chemically synthesized
attgtactgttatacagaatgt

SEQ ID NO: 18790 - DNA, 22 bp, Artificial Sequence
  chemically synthesized
ttgtactgttatacagaatgta

SEQ ID NO: 18791 - DNA, 22 bp, Artificial Sequence
  chemically synthesized
tactgttatacagaatgtaagt

SEQ ID NO: 18792 - DNA, 22 bp, Artificial Sequence
  chemically synthesized
ttatacagaatgtaagttgtac

SEQ ID NO: 18793 - DNA, 22 bp, Artificial Sequence
  chemically synthesized
tacagaatgtaagttgtacagt

SEQ ID NO: 18794 - DNA, 22 bp, Artificial Sequence
  chemically synthesized
tacagtgaaataagttattaaa

SEQ ID NO: 18795 - DNA, 22 bp, Artificial Sequence
  chemically synthesized
ttaaagcatgtgtaaacattgt

SEQ ID NO: 18796 - DNA, 22 bp, Artificial Sequence
  chemically synthesized
aagcatgtgtaaacattgttat

SEQ ID NO: 18797 - DNA, 22 bp, Artificial Sequence
  chemically synthesized
ttatatatcttttctcctaaat

SEQ ID NO: 18798 - DNA, 22 bp, Artificial Sequence
  chemically synthesized
tatatcttttctcctaaatgga

SEQ ID NO: 18799 - DNA, 22 bp, Artificial Sequence
  chemically synthesized
ttctcctaaatggagaattttg

SEQ ID NO: 18800 - DNA, 22 bp, Artificial Sequence
  chemically synthesized
tctcctaaatggagaattttga

SEQ ID NO: 18801 - DNA, 22 bp, Artificial Sequence
  chemically synthesized
ctcctaaatggagaattttgaa

SEQ ID NO: 18802 - DNA, 22 bp, Artificial Sequence
  chemically synthesized
tcctaaatggagaattttgaat

SEQ ID NO: 18803 - DNA, 22 bp, Artificial Sequence
  chemically synthesized
ctaaatggagaattttgaataa

SEQ ID NO: 18804 - DNA, 22 bp, Artificial Sequence
  chemically synthesized
aatggagaattttgaataaaat

SEQ ID NO: 18805 - DNA, 22 bp, Artificial Sequence
  chemically synthesized
tgaataaaatatatttgaaatt

SEQ ID NO: 18806 - DNA, 22 bp, Artificial Sequence
  chemically synthesized
gaataaaatatatttgaaattt

SEQ ID NO: 18807 - DNA, 22 bp, Artificial Sequence
  chemically synthesized
aataaaatatatttgaaatttt

SEQ ID NO: 18808 - DNA, 23 bp, Artificial Sequence
  chemically synthesized
  misc_feature (1)..(21): n is a, c, g, or t
nnnnnnnnnnnnnnnnnnnnnrg

SEQ ID NO: 18809 - protein, 9 aa, Artificial Sequence
  chemically synthesized
LAGLIDADG

SEQ ID NO: 18810 - DNA, 20 bp, Artificial Sequence
  chemically synthesized
tggcgatatctaggtagcca

SEQ ID NO: 18811 - DNA, 20 bp, Artificial Sequence
  chemically synthesized
ggcgatatctaggtagccac

SEQ ID NO: 18812 - DNA, 20 bp, Artificial Sequence
  chemically synthesized
cgatatctaggtagccacag

SEQ ID NO: 18813 - DNA, 20 bp, Artificial Sequence
  chemically synthesized
gatatctaggtagccacagg

SEQ ID NO: 18814 - DNA, 20 bp, Artificial Sequence
  chemically synthesized
atctaggtagccacaggagg

SEQ ID NO: 18815 - DNA, 20 bp, Artificial Sequence
  chemically synthesized
ccacaggaggcggccacgtg

SEQ ID NO: 18816 - DNA, 20 bp, Artificial Sequence
  chemically synthesized
caggaggcggccacgtgcag

SEQ ID NO: 18817 - DNA, 20 bp, Artificial Sequence
  chemically synthesized
cggccacgtgcagtggcgtc

SEQ ID NO: 18818 - DNA, 20 bp, Artificial Sequence
  chemically synthesized
tccagccctcgttgtctgcc

SEQ ID NO: 18819 - DNA, 20 bp, Artificial Sequence
  chemically synthesized
ctcgttgtctgcctggttca

SEQ ID NO: 18820 - DNA, 20 bp, Artificial Sequence
  chemically synthesized
gttgtctgcctggttcacag

SEQ ID NO: 18821 - DNA, 20 bp, Artificial Sequence
  chemically synthesized
cagtggcgccctgctccacc

SEQ ID NO: 18822 - DNA, 20 bp, Artificial Sequence
  chemically synthesized
tggcgccctgctccaccaag

SEQ ID NO: 18823 - DNA, 20 bp, Artificial Sequence
  chemically synthesized
accaagaagcgcaccacctc

SEQ ID NO: 18824 - DNA, 20 bp, Artificial Sequence
  chemically synthesized
ccaagaagcgcaccacctcc

SEQ ID NO: 18825 - DNA, 20 bp, Artificial Sequence
  chemically synthesized
cctccaggttctcatcaatg

SEQ ID NO: 18826 - DNA, 20 bp, Artificial Sequence
  chemically synthesized
ctccaggttctcatcaatgc

SEQ ID NO: 18827 - DNA, 20 bp, Artificial Sequence
  chemically synthesized
ggttctcatcaatgcaggcc

SEQ ID NO: 18828 - DNA, 20 bp, Artificial Sequence
  chemically synthesized
gttctcatcaatgcaggcct

SEQ ID NO: 18829 - DNA, 20 bp, Artificial Sequence
  chemically synthesized
ttctcatcaatgcaggcctg

SEQ ID NO: 18830 - DNA, 20 bp, Artificial Sequence
  chemically synthesized
tctcatcaatgcaggcctgg

SEQ ID NO: 18831 - DNA, 20 bp, Artificial Sequence
  chemically synthesized
catcaatgcaggcctggggg

SEQ ID NO: 18832 - DNA, 20 bp, Artificial Sequence
  chemically synthesized
atcaatgcaggcctgggggt

SEQ ID NO: 18833 - DNA, 20 bp, Artificial Sequence
  chemically synthesized
gcaggcctgggggtgggaaa

SEQ ID NO: 18834 - DNA, 20 bp, Artificial Sequence
  chemically synthesized
tgggggtgggaaacagccgt

SEQ ID NO: 18835 - DNA, 20 bp, Artificial Sequence
  chemically synthesized
gccgtcagccgcacctaccc

SEQ ID NO: 18836 - DNA, 20 bp, Artificial Sequence
  chemically synthesized
agccgcacctaccccagcca

SEQ ID NO: 18837 - DNA, 20 bp, Artificial Sequence
  chemically synthesized
ctaccccagccacggtgtcc

SEQ ID NO: 18838 - DNA, 20 bp, Artificial Sequence
  chemically synthesized
cccagccacggtgtcccagc

SEQ ID NO: 18839 - DNA, 20 bp, Artificial Sequence
  chemically synthesized
gccacggtgtcccagcaagt

SEQ ID NO: 18840 - DNA, 20 bp, Artificial Sequence
  chemically synthesized
ccacggtgtcccagcaagtc

SEQ ID NO: 18841 - DNA, 20 bp, Artificial Sequence
  chemically synthesized
gtcccagcaagtcgggactc

SEQ ID NO: 18842 - DNA, 20 bp, Artificial Sequence
  chemically synthesized
cccagcaagtcgggactcca

SEQ ID NO: 18843 - DNA, 20 bp, Artificial Sequence
  chemically synthesized
ccagcaagtcgggactccag

SEQ ID NO: 18844 - DNA, 20 bp, Artificial Sequence
  chemically synthesized
cagcaagtcgggactccaga

SEQ ID NO: 18845 - DNA, 20 bp, Artificial Sequence
  chemically synthesized
gcaagtcgggactccagagg

SEQ ID NO: 18846 - DNA, 20 bp, Artificial Sequence
  chemically synthesized
tccagagggagccacgaaaa

SEQ ID NO: 18847 - DNA, 20 bp, Artificial Sequence
  chemically synthesized
gggagccacgaaaacagatc

SEQ ID NO: 18848 - DNA, 20 bp, Artificial Sequence
  chemically synthesized
ggagccacgaaaacagatcc

SEQ ID NO: 18849 - DNA, 20 bp, Artificial Sequence
  chemically synthesized
gagccacgaaaacagatcca

SEQ ID NO: 18850 - DNA, 20 bp, Artificial Sequence
  chemically synthesized
cgaaaacagatccagggaca

SEQ ID NO: 18851 - DNA, 20 bp, Artificial Sequence
  chemically synthesized
cagatccagggacacggtgc

SEQ ID NO: 18852 - DNA, 20 bp, Artificial Sequence
  chemically synthesized
agatccagggacacggtgct

SEQ ID NO: 18853 - DNA, 20 bp, Artificial Sequence
  chemically synthesized
ccagggacacggtgctagga

SEQ ID NO: 18854 - DNA, 20 bp, Artificial Sequence
  chemically synthesized
gggacacggtgctaggacag

SEQ ID NO: 18855 - DNA, 20 bp, Artificial Sequence
  chemically synthesized
ggacacggtgctaggacagt

SEQ ID NO: 18856 - DNA, 20 bp, Artificial Sequence
  chemically synthesized
gacacggtgctaggacagtg

SEQ ID NO: 18857 - DNA, 20 bp, Artificial Sequence
  chemically synthesized
cagtggggaaaatgacccaa

SEQ ID NO: 18858 - DNA, 20 bp, Artificial Sequence
  chemically synthesized
gaaaatgacccaacagcctc

SEQ ID NO: 18859 - DNA, 20 bp, Artificial Sequence
  chemically synthesized
acccaacagcctctggccac

SEQ ID NO: 18860 - DNA, 20 bp, Artificial Sequence
  chemically synthesized
cctctggccactggctgttt

SEQ ID NO: 18861 - DNA, 20 bp, Artificial Sequence
  chemically synthesized
ctggctgtttaagatacgcc

SEQ ID NO: 18862 - DNA, 20 bp, Artificial Sequence
  chemically synthesized
ttaagatacgcctggttgcc

SEQ ID NO: 18863 - DNA, 20 bp, Artificial Sequence
  chemically synthesized
agatacgcctggttgcccag

SEQ ID NO: 18864 - DNA, 20 bp, Artificial Sequence
  chemically synthesized
acgcctggttgcccagtggt

SEQ ID NO: 18865 - DNA, 20 bp, Artificial Sequence
  chemically synthesized
cgcctggttgcccagtggtc

SEQ ID NO: 18866 - DNA, 20 bp, Artificial Sequence
  chemically synthesized
tggttgcccagtggtcaggc

SEQ ID NO: 18867 - DNA, 20 bp, Artificial Sequence
  chemically synthesized
tgcccagtggtcaggccggc

SEQ ID NO: 18868 - DNA, 20 bp, Artificial Sequence
  chemically synthesized
gcccagtggtcaggccggcc

SEQ ID NO: 18869 - DNA, 20 bp, Artificial Sequence
  chemically synthesized
ggtcaggccggccaggcctt

SEQ ID NO: 18870 - DNA, 20 bp, Artificial Sequence
  chemically synthesized
ccggccaggccttcagtgct

SEQ ID NO: 18871 - DNA, 20 bp, Artificial Sequence
  chemically synthesized
gccaggccttcagtgctcag

SEQ ID NO: 18872 - DNA, 20 bp, Artificial Sequence
  chemically synthesized
gtgctcagtggaaaccacga

SEQ ID NO: 18873 - DNA, 20 bp, Artificial Sequence
  chemically synthesized
tgctcagtggaaaccacgaa

SEQ ID NO: 18874 - DNA, 20 bp, Artificial Sequence
  chemically synthesized
ggaaaccacgaaaggactcc

SEQ ID NO: 18875 - DNA, 20 bp, Artificial Sequence
  chemically synthesized
gactcctggctatctgcaaa

SEQ ID NO: 18876 - DNA, 20 bp, Artificial Sequence
  chemically synthesized
actcctggctatctgcaaac

SEQ ID NO: 18877 - DNA, 20 bp, Artificial Sequence
  chemically synthesized
cctggctatctgcaaacagg

SEQ ID NO: 18878 - DNA, 20 bp, Artificial Sequence
  chemically synthesized
atctgcaaacaggaagtgaa

SEQ ID NO: 18879 - DNA, 20 bp, Artificial Sequence
  chemically synthesized
tctgcaaacaggaagtgaac

SEQ ID NO: 18880 - DNA, 20 bp, Artificial Sequence
  chemically synthesized
ctgcaaacaggaagtgaacg

SEQ ID NO: 18881 - DNA, 20 bp, Artificial Sequence
  chemically synthesized
caaacaggaagtgaacgggg

SEQ ID NO: 18882 - DNA, 20 bp, Artificial Sequence
  chemically synthesized
aaacaggaagtgaacgggga

SEQ ID NO: 18883 - DNA, 20 bp, Artificial Sequence
  chemically synthesized
aacaggaagtgaacggggaa

SEQ ID NO: 18884 - DNA, 20 bp, Artificial Sequence
  chemically synthesized
caggaagtgaacggggaagg

SEQ ID NO: 18885 - DNA, 20 bp, Artificial Sequence
  chemically synthesized
aggaagtgaacggggaaggg

SEQ ID NO: 18886 - DNA, 20 bp, Artificial Sequence
  chemically synthesized
ggaagtgaacggggaaggga

SEQ ID NO: 18887 - DNA, 20 bp, Artificial Sequence
  chemically synthesized
gaagtgaacggggaagggag

SEQ ID NO: 18888 - DNA, 20 bp, Artificial Sequence
  chemically synthesized
aagtgaacggggaagggagg

SEQ ID NO: 18889 - DNA, 20 bp, Artificial Sequence
  chemically synthesized
aagggagggggcttctcatc

SEQ ID NO: 18890 - DNA, 20 bp, Artificial Sequence
  chemically synthesized
agggagggggcttctcatct

SEQ ID NO: 18891 - DNA, 20 bp, Artificial Sequence
  chemically synthesized
gggggcttctcatctgggtg

SEQ ID NO: 18892 - DNA, 20 bp, Artificial Sequence
  chemically synthesized
ggggcttctcatctgggtgc

SEQ ID NO: 18893 - DNA, 20 bp, Artificial Sequence
  chemically synthesized
ctgggtgcgggaaccccaca

SEQ ID NO: 18894 - DNA, 20 bp, Artificial Sequence
  chemically synthesized
gaaccccacatggtacctgt

SEQ ID NO: 18895 - DNA, 20 bp, Artificial Sequence
  chemically synthesized
cacatggtacctgttagaca

SEQ ID NO: 18896 - DNA, 20 bp, Artificial Sequence
  chemically synthesized
aaaacccccgtcaccaccca

SEQ ID NO: 18897 - DNA, 20 bp, Artificial Sequence
  chemically synthesized
aaacccccgtcaccacccac

SEQ ID NO: 18898 - DNA, 20 bp, Artificial Sequence
  chemically synthesized
cccccgtcaccacccacagg

SEQ ID NO: 18899 - DNA, 20 bp, Artificial Sequence
  chemically synthesized
ccacccacaggtggcgcttc

SEQ ID NO: 18900 - DNA, 20 bp, Artificial Sequence
  chemically synthesized
caggtggcgcttccagtgct

SEQ ID NO: 18901 - DNA, 20 bp, Artificial Sequence
  chemically synthesized
ggcgcttccagtgctcagac

SEQ ID NO: 18902 - DNA, 20 bp, Artificial Sequence
  chemically synthesized
gcgcttccagtgctcagact

SEQ ID NO: 18903 - DNA, 20 bp, Artificial Sequence
  chemically synthesized
cgcttccagtgctcagacta

SEQ ID NO: 18904 - DNA, 20 bp, Artificial Sequence
  chemically synthesized
ttccagtgctcagactaggg

SEQ ID NO: 18905 - DNA, 20 bp, Artificial Sequence
  chemically synthesized
ccagtgctcagactagggaa

SEQ ID NO: 18906 - DNA, 20 bp, Artificial Sequence
  chemically synthesized
cagtgctcagactagggaag

SEQ ID NO: 18907 - DNA, 20 bp, Artificial Sequence
  chemically synthesized
tcagactagggaagaggttc

SEQ ID NO: 18908 - DNA, 20 bp, Artificial Sequence
  chemically synthesized
ggttccagcccctcctcctt

SEQ ID NO: 18909 - DNA, 20 bp, Artificial Sequence
  chemically synthesized
ttccagcccctcctccttca

SEQ ID NO: 18910 - DNA, 20 bp, Artificial Sequence
  chemically synthesized
agcccctcctccttcagagc

SEQ ID NO: 18911 - DNA, 20 bp, Artificial Sequence
  chemically synthesized
gcccctcctccttcagagcc

SEQ ID NO: 18912 - DNA, 20 bp, Artificial Sequence
  chemically synthesized
ccctcctccttcagagccag

SEQ ID NO: 18913 - DNA, 20 bp, Artificial Sequence
  chemically synthesized
tccttcagagccaggagtcc

SEQ ID NO: 18914 - DNA, 20 bp, Artificial Sequence
  chemically synthesized
gagccaggagtcctggcccc

SEQ ID NO: 18915 - DNA, 20 bp, Artificial Sequence
  chemically synthesized
agcccctcctgccttaaacc

SEQ ID NO: 18916 - DNA, 20 bp, Artificial Sequence
  chemically synthesized
cctcctgccttaaacccagc

SEQ ID NO: 18917 - DNA, 20 bp, Artificial Sequence
  chemically synthesized
ctcctgccttaaacccagcc

SEQ ID NO: 18918 - DNA, 20 bp, Artificial Sequence
  chemically synthesized
aaacccagccaggtccttcc

SEQ ID NO: 18919 - DNA, 20 bp, Artificial Sequence
  chemically synthesized
aacccagccaggtccttcca

SEQ ID NO: 18920 - DNA, 20 bp, Artificial Sequence
  chemically synthesized
acccagccaggtccttccaa

SEQ ID NO: 18921 - DNA, 20 bp, Artificial Sequence
  chemically synthesized
gccaggtccttccaagggtc

SEQ ID NO: 18922 - DNA, 20 bp, Artificial Sequence
  chemically synthesized
gtccttccaagggtcaagct

SEQ ID NO: 18923 - DNA, 20 bp, Artificial Sequence
  chemically synthesized
gtcaagctcggaaaccaccc

SEQ ID NO: 18924 - DNA, 20 bp, Artificial Sequence
  chemically synthesized
aagctcggaaaccaccccag

SEQ ID NO: 18925 - DNA, 20 bp, Artificial Sequence
  chemically synthesized
ccaccccagcagatactctg

SEQ ID NO: 18926 - DNA, 20 bp, Artificial Sequence
  chemically synthesized
caccccagcagatactctgc

SEQ ID NO: 18927 - DNA, 20 bp, Artificial Sequence
  chemically synthesized
gcagatactctgcaggaacg

SEQ ID NO: 18928 - DNA, 20 bp, Artificial Sequence
  chemically synthesized
actctgcaggaacgaagccg

SEQ ID NO: 18929 - DNA, 20 bp, Artificial Sequence
  chemically synthesized
ctctgcaggaacgaagccgt

SEQ ID NO: 18930 - DNA, 20 bp, Artificial Sequence
  chemically synthesized
caggaacgaagccgtgggcc

SEQ ID NO: 18931 - DNA, 20 bp, Artificial Sequence
  chemically synthesized
aggaacgaagccgtgggccc

SEQ ID NO: 18932 - DNA, 20 bp, Artificial Sequence
  chemically synthesized
ggaacgaagccgtgggccca

SEQ ID NO: 18933 - DNA, 20 bp, Artificial Sequence
  chemically synthesized
gccgtgggcccagggctatg

SEQ ID NO: 18934 - DNA, 20 bp, Artificial Sequence
  chemically synthesized
ccgtgggcccagggctatgc

SEQ ID NO: 18935 - DNA, 20 bp, Artificial Sequence
  chemically synthesized
cgtgggcccagggctatgca

SEQ ID NO: 18936 - DNA, 20 bp, Artificial Sequence
  chemically synthesized
gggcccagggctatgcaggg

SEQ ID NO: 18937 - DNA, 20 bp, Artificial Sequence
  chemically synthesized
gcccagggctatgcagggtg

SEQ ID NO: 18938 - DNA, 20 bp, Artificial Sequence
  chemically synthesized
cccagggctatgcagggtgg

SEQ ID NO: 18939 - DNA, 20 bp, Artificial Sequence
  chemically synthesized
agggctatgcagggtggagg

SEQ ID NO: 18940 - DNA, 20 bp, Artificial Sequence
  chemically synthesized
gggctatgcagggtggagga

SEQ ID NO: 18941 - DNA, 20 bp, Artificial Sequence
  chemically synthesized
ggaggaaggccaccctgtgc

SEQ ID NO: 18942 - DNA, 20 bp, Artificial Sequence
  chemically synthesized
gaggaaggccaccctgtgct

SEQ ID NO: 18943 - DNA, 20 bp, Artificial Sequence
  chemically synthesized
aaggccaccctgtgctggga

SEQ ID NO: 18944 - DNA, 20 bp, Artificial Sequence
  chemically synthesized
accctgtgctgggacagact

SEQ ID NO: 18945 - DNA, 20 bp, Artificial Sequence
  chemically synthesized
ccctgtgctgggacagactc

SEQ ID NO: 18946 - DNA, 20 bp, Artificial Sequence
  chemically synthesized
cctgtgctgggacagactca

SEQ ID NO: 18947 - DNA, 20 bp, Artificial Sequence
  chemically synthesized
ctgtgctgggacagactcag

SEQ ID NO: 18948 - DNA, 20 bp, Artificial Sequence
  chemically synthesized
ctgggacagactcaggggcc

SEQ ID NO: 18949 - DNA, 20 bp, Artificial Sequence
  chemically synthesized
tgggacagactcaggggcct

SEQ ID NO: 18950 - DNA, 20 bp, Artificial Sequence
  chemically synthesized
gacagactcaggggcctggg

SEQ ID NO: 18951 - DNA, 20 bp, Artificial Sequence
  chemically synthesized
acagactcaggggcctgggc

SEQ ID NO: 18952 - DNA, 20 bp, Artificial Sequence
  chemically synthesized
aggggcctgggcgggactcc

SEQ ID NO: 18953 - DNA, 20 bp, Artificial Sequence
  chemically synthesized
gggcctgggcgggactccca

SEQ ID NO: 18954 - DNA, 20 bp, Artificial Sequence
  chemically synthesized
ggcctgggcgggactcccag

SEQ ID NO: 18955 - DNA, 20 bp, Artificial Sequence
  chemically synthesized
gcctgggcgggactcccaga

SEQ ID NO: 18956 - DNA, 20 bp, Artificial Sequence
  chemically synthesized
cctgggcgggactcccagag

SEQ ID NO: 18957 - DNA, 20 bp, Artificial Sequence
  chemically synthesized
ggcgggactcccagaggggt

SEQ ID NO: 18958 - DNA, 20 bp, Artificial Sequence
  chemically synthesized
ggactcccagaggggtgaga

SEQ ID NO: 18959 - DNA, 20 bp, Artificial Sequence
  chemically synthesized
cagctgcacacctgtgtgcc

SEQ ID NO: 18960 - DNA, 20 bp, Artificial Sequence
  chemically synthesized
agctgcacacctgtgtgcct

SEQ ID NO: 18961 - DNA, 20 bp, Artificial Sequence
  chemically synthesized
acacctgtgtgcctgggccc

SEQ ID NO: 18962 - DNA, 20 bp, Artificial Sequence
  chemically synthesized
cacctgtgtgcctgggcccc

SEQ ID NO: 18963 - DNA, 20 bp, Artificial Sequence
  chemically synthesized
ggccccaggctgtcacactc

SEQ ID NO: 18964 - DNA, 20 bp, Artificial Sequence
  chemically synthesized
ctgtcacactccagttcact

SEQ ID NO: 18965 - DNA, 20 bp, Artificial Sequence
  chemically synthesized
tgtcacactccagttcactg

SEQ ID NO: 18966 - DNA, 20 bp, Artificial Sequence
  chemically synthesized
tcactgaggccccctctgca

SEQ ID NO: 18967 - DNA, 20 bp, Artificial Sequence
  chemically synthesized
cactgaggccccctctgcac

SEQ ID NO: 18968 - DNA, 20 bp, Artificial Sequence
  chemically synthesized
actgaggccccctctgcacg

SEQ ID NO: 18969 - DNA, 20 bp, Artificial Sequence
  chemically synthesized
cccctctgcacggggccctg

SEQ ID NO: 18970 - DNA, 20 bp, Artificial Sequence
  chemically synthesized
tctgcacggggccctgcagc

SEQ ID NO: 18971 - DNA, 20 bp, Artificial Sequence
  chemically synthesized
ctgcacggggccctgcagcc

SEQ ID NO: 18972 - DNA, 20 bp, Artificial Sequence
  chemically synthesized
tgcacggggccctgcagcca

SEQ ID NO: 18973 - DNA, 20 bp, Artificial Sequence
  chemically synthesized
gcacggggccctgcagccag

SEQ ID NO: 18974 - DNA, 20 bp, Artificial Sequence
  chemically synthesized
cctgcagccaggggctgaca

SEQ ID NO: 18975 - DNA, 20 bp, Artificial Sequence
  chemically synthesized
ctgcagccaggggctgacac

SEQ ID NO: 18976 - DNA, 20 bp, Artificial Sequence
  chemically synthesized
accgtttctcattcttccct

SEQ ID NO: 18977 - DNA, 20 bp, Artificial Sequence
  chemically synthesized
ccgtttctcattcttccctt

SEQ ID NO: 18978 - DNA, 20 bp, Artificial Sequence
  chemically synthesized
cgtttctcattcttccctta

SEQ ID NO: 18979 - DNA, 20 bp, Artificial Sequence
  chemically synthesized
gtttctcattcttcccttag

SEQ ID NO: 18980 - DNA, 20 bp, Artificial Sequence
  chemically synthesized
tcccttaggggtccaaaact

SEQ ID NO: 18981 - DNA, 20 bp, Artificial Sequence
  chemically synthesized
cccttaggggtccaaaactt

SEQ ID NO: 18982 - DNA, 20 bp, Artificial Sequence
  chemically synthesized
ccttaggggtccaaaacttg

SEQ ID NO: 18983 - DNA, 20 bp, Artificial Sequence
  chemically synthesized
cttaggggtccaaaacttgg

SEQ ID NO: 18984 - DNA, 20 bp, Artificial Sequence
  chemically synthesized
ttaggggtccaaaacttggg

SEQ ID NO: 18985 - DNA, 20 bp, Artificial Sequence
  chemically synthesized
tccaaaacttggggggacaa

SEQ ID NO: 18986 - DNA, 20 bp, Artificial Sequence
  chemically synthesized
acttggggggacaaaagccg

SEQ ID NO: 18987 - DNA, 20 bp, Artificial Sequence
  chemically synthesized
gggggacaaaagccgaagtc

SEQ ID NO: 18988 - DNA, 20 bp, Artificial Sequence
  chemically synthesized
ggggacaaaagccgaagtcc

SEQ ID NO: 18989 - DNA, 20 bp, Artificial Sequence
  chemically synthesized
gggacaaaagccgaagtcca

SEQ ID NO: 18990 - DNA, 20 bp, Artificial Sequence
  chemically synthesized
ggacaaaagccgaagtccag

SEQ ID NO: 18991 - DNA, 20 bp, Artificial Sequence
  chemically synthesized
gacaaaagccgaagtccagg

SEQ ID NO: 18992 - DNA, 20 bp, Artificial Sequence
  chemically synthesized
aaagccgaagtccagggggt

SEQ ID NO: 18993 - DNA, 20 bp, Artificial Sequence
  chemically synthesized
agccgaagtccagggggtcg

SEQ ID NO: 18994 - DNA, 20 bp, Artificial Sequence
  chemically synthesized
gccgaagtccagggggtcgg

SEQ ID NO: 18995 - DNA, 20 bp, Artificial Sequence
  chemically synthesized
cgaagtccagggggtcggag

SEQ ID NO: 18996 - DNA, 20 bp, Artificial Sequence
  chemically synthesized
gaagtccagggggtcggagg

SEQ ID NO: 18997 - DNA, 20 bp, Artificial Sequence
  chemically synthesized
aagtccagggggtcggagga

SEQ ID NO: 18998 - DNA, 20 bp, Artificial Sequence
  chemically synthesized
gtcggaggagggacttgccc

SEQ ID NO: 18999 - DNA, 20 bp, Artificial Sequence
  chemically synthesized
tcggaggagggacttgcccc

SEQ ID NO: 19000 - DNA, 20 bp, Artificial Sequence
  chemically synthesized
gggacttgccccaggccttg

SEQ ID NO: 19001 - DNA, 20 bp, Artificial Sequence
  chemically synthesized
gccccaggccttgtggacac

SEQ ID NO: 19002 - DNA, 20 bp, Artificial Sequence
  chemically synthesized
ccccaggccttgtggacact

SEQ ID NO: 19003 - DNA, 20 bp, Artificial Sequence
  chemically synthesized
caggccttgtggacactggg

SEQ ID NO: 19004 - DNA, 20 bp, Artificial Sequence
  chemically synthesized
aggccttgtggacactgggt

SEQ ID NO: 19005 - DNA, 20 bp, Artificial Sequence
  chemically synthesized
tgtggacactgggtgggctc

SEQ ID NO: 19006 - DNA, 20 bp, Artificial Sequence
  chemically synthesized
gtggacactgggtgggctcc

SEQ ID NO: 19007 - DNA, 20 bp, Artificial Sequence
  chemically synthesized
gtgggctccgggacctgaac

SEQ ID NO: 19008 - DNA, 20 bp, Artificial Sequence
  chemically synthesized
gggctccgggacctgaactg

SEQ ID NO: 19009 - DNA, 20 bp, Artificial Sequence
  chemically synthesized
ccgggacctgaactggagct

SEQ ID NO: 19010 - DNA, 20 bp, Artificial Sequence
  chemically synthesized
cgggacctgaactggagctg

SEQ ID NO: 19011 - DNA, 20 bp, Artificial Sequence
  chemically synthesized
gacctgaactggagctgagg

SEQ ID NO: 19012 - DNA, 20 bp, Artificial Sequence
  chemically synthesized
acctgaactggagctgagga

SEQ ID NO: 19013 - DNA, 20 bp, Artificial Sequence
  chemically synthesized
ctgaactggagctgaggaag

SEQ ID NO: 19014 - DNA, 20 bp, Artificial Sequence
  chemically synthesized
ctggagctgaggaaggagtg

SEQ ID NO: 19015 - DNA, 20 bp, Artificial Sequence
  chemically synthesized
aaggagtgaagctaaactcc

SEQ ID NO: 19016 - DNA, 20 bp, Artificial Sequence
  chemically synthesized
aagctaaactcctagatcca

SEQ ID NO: 19017 - DNA, 20 bp, Artificial Sequence
  chemically synthesized
agctaaactcctagatccac

SEQ ID NO: 19018 - DNA, 20 bp, Artificial Sequence
  chemically synthesized
cacgggataaattacccccc

SEQ ID NO: 19019 - DNA, 20 bp, Artificial Sequence
  chemically synthesized
ccaagtccctcacctctcca

SEQ ID NO: 19020 - DNA, 20 bp, Artificial Sequence
  chemically synthesized
cctctccaaagctgcccatc

SEQ ID NO: 19021 - DNA, 20 bp, Artificial Sequence
  chemically synthesized
tctccaaagctgcccatctg

SEQ ID NO: 19022 - DNA, 20 bp, Artificial Sequence
  chemically synthesized
ctccaaagctgcccatctgg

SEQ ID NO: 19023 - DNA, 20 bp, Artificial Sequence
  chemically synthesized
ccaaagctgcccatctggag

SEQ ID NO: 19024 - DNA, 20 bp, Artificial Sequence
  chemically synthesized
caaagctgcccatctggagg

SEQ ID NO: 19025 - DNA, 20 bp, Artificial Sequence
  chemically synthesized
agctgcccatctggaggagg

SEQ ID NO: 19026 - DNA, 20 bp, Artificial Sequence
  chemically synthesized
gctgcccatctggaggaggc

SEQ ID NO: 19027 - DNA, 20 bp, Artificial Sequence
  chemically synthesized
tgcccatctggaggaggcgg

SEQ ID NO: 19028 - DNA, 20 bp, Artificial Sequence
  chemically synthesized
gcccatctggaggaggcggg

SEQ ID NO: 19029 - DNA, 20 bp, Artificial Sequence
  chemically synthesized
cccatctggaggaggcggga

SEQ ID NO: 19030 - DNA, 20 bp, Artificial Sequence
  chemically synthesized
catctggaggaggcgggagg

SEQ ID NO: 19031 - DNA, 20 bp, Artificial Sequence
  chemically synthesized
aggaggcgggagggagctac

SEQ ID NO: 19032 - DNA, 20 bp, Artificial Sequence
  chemically synthesized
ggaggcgggagggagctacg

SEQ ID NO: 19033 - DNA, 20 bp, Artificial Sequence
  chemically synthesized
gaggcgggagggagctacga

SEQ ID NO: 19034 - DNA, 20 bp, Artificial Sequence
  chemically synthesized
gggagggagctacgagggcc

SEQ ID NO: 19035 - DNA, 20 bp, Artificial Sequence
  chemically synthesized
gagggagctacgagggccaa

SEQ ID NO: 19036 - DNA, 20 bp, Artificial Sequence
  chemically synthesized
gctacgagggccaagagcat

SEQ ID NO: 19037 - DNA, 20 bp, Artificial Sequence
  chemically synthesized
ctacgagggccaagagcatg

SEQ ID NO: 19038 - DNA, 20 bp, Artificial Sequence
  chemically synthesized
gggccaagagcatgaggtca

SEQ ID NO: 19039 - DNA, 20 bp, Artificial Sequence
  chemically synthesized
agcatgaggtcatggaaact

SEQ ID NO: 19040 - DNA, 20 bp, Artificial Sequence
  chemically synthesized
gcatgaggtcatggaaactc

SEQ ID NO: 19041 - DNA, 20 bp, Artificial Sequence
  chemically synthesized
tcatggaaactcgggctgtg

SEQ ID NO: 19042 - DNA, 20 bp, Artificial Sequence
  chemically synthesized
catggaaactcgggctgtga

SEQ ID NO: 19043 - DNA, 20 bp, Artificial Sequence
  chemically synthesized
atggaaactcgggctgtgaa

SEQ ID NO: 19044 - DNA, 20 bp, Artificial Sequence
  chemically synthesized
tggaaactcgggctgtgaag

SEQ ID NO: 19045 - DNA, 20 bp, Artificial Sequence
  chemically synthesized
tgaaggggccgcacgtgccc

SEQ ID NO: 19046 - DNA, 20 bp, Artificial Sequence
  chemically synthesized
gaaggggccgcacgtgccct

SEQ ID NO: 19047 - DNA, 20 bp, Artificial Sequence
  chemically synthesized
ggccgcacgtgccctgggaa

SEQ ID NO: 19048 - DNA, 20 bp, Artificial Sequence
  chemically synthesized
gccgcacgtgccctgggaac

SEQ ID NO: 19049 - DNA, 20 bp, Artificial Sequence
  chemically synthesized
ccctgggaacgggatgaact

SEQ ID NO: 19050 - DNA, 20 bp, Artificial Sequence
  chemically synthesized
tcggctcgtttatttccacc

SEQ ID NO: 19051 - DNA, 20 bp, Artificial Sequence
  chemically synthesized
ttatttccacccagttgtca

SEQ ID NO: 19052 - DNA, 20 bp, Artificial Sequence
  chemically synthesized
ccacccagttgtcatggcga

SEQ ID NO: 19053 - DNA, 20 bp, Artificial Sequence
  chemically synthesized
cacccagttgtcatggcgat

SEQ ID NO: 19054 - DNA, 20 bp, Artificial Sequence
  chemically synthesized
acccagttgtcatggcgata

SEQ ID NO: 19055 - DNA, 20 bp, Artificial Sequence
  chemically synthesized
cccagttgtcatggcgatag

SEQ ID NO: 19056 - DNA, 20 bp, Artificial Sequence
  chemically synthesized
cagttgtcatggcgataggg

SEQ ID NO: 19057 - DNA, 20 bp, Artificial Sequence
  chemically synthesized
agttgtcatggcgatagggg

SEQ ID NO: 19058 - DNA, 20 bp, Artificial Sequence
  chemically synthesized
gttgtcatggcgatagggga

SEQ ID NO: 19059 - DNA, 20 bp, Artificial Sequence
  chemically synthesized
ttgtcatggcgataggggag

SEQ ID NO: 19060 - DNA, 20 bp, Artificial Sequence
  chemically synthesized
tgtcatggcgataggggagg

SEQ ID NO: 19061 - DNA, 20 bp, Artificial Sequence
  chemically synthesized
gtcatggcgataggggaggg

SEQ ID NO: 19062 - DNA, 20 bp, Artificial Sequence
  chemically synthesized
tggcgataggggaggggggc

SEQ ID NO: 19063 - DNA, 20 bp, Artificial Sequence
  chemically synthesized
ggcgataggggaggggggca

SEQ ID NO: 19064 - DNA, 20 bp, Artificial Sequence
  chemically synthesized
cgataggggaggggggcaag

SEQ ID NO: 19065 - DNA, 20 bp, Artificial Sequence
  chemically synthesized
ataggggaggggggcaagga

SEQ ID NO: 19066 - DNA, 20 bp, Artificial Sequence
  chemically synthesized
gaggggggcaaggagagcaa

SEQ ID NO: 19067 - DNA, 20 bp, Artificial Sequence
  chemically synthesized
aggggggcaaggagagcaat

SEQ ID NO: 19068 - DNA, 20 bp, Artificial Sequence
  chemically synthesized
gcaatgggcctttccctttc

SEQ ID NO: 19069 - DNA, 20 bp, Artificial Sequence
  chemically synthesized
caatgggcctttccctttca

SEQ ID NO: 19070 - DNA, 20 bp, Artificial Sequence
  chemically synthesized
ttccctttcaaggacctgcc

SEQ ID NO: 19071 - DNA, 20 bp, Artificial Sequence
  chemically synthesized
tttcaaggacctgcccagta

SEQ ID NO: 19072 - DNA, 20 bp, Artificial Sequence
  chemically synthesized
ttcaaggacctgcccagtac

SEQ ID NO: 19073 - DNA, 20 bp, Artificial Sequence
  chemically synthesized
cagtacaggcatccctgtga

SEQ ID NO: 19074 - DNA, 20 bp, Artificial Sequence
  chemically synthesized
catccctgtgaaagatgcct

SEQ ID NO: 19075 - DNA, 20 bp, Artificial Sequence
  chemically synthesized
atccctgtgaaagatgcctg

SEQ ID NO: 19076 - DNA, 20 bp, Artificial Sequence
  chemically synthesized
tgtgaaagatgcctgaggcc

SEQ ID NO: 19077 - DNA, 20 bp, Artificial Sequence
  chemically synthesized
gtgaaagatgcctgaggcct

SEQ ID NO: 19078 - DNA, 20 bp, Artificial Sequence
  chemically synthesized
gatgcctgaggcctgggcac

SEQ ID NO: 19079 - DNA, 20 bp, Artificial Sequence
  chemically synthesized
atgcctgaggcctgggcacc

SEQ ID NO: 19080 - DNA, 20 bp, Artificial Sequence
  chemically synthesized
tgcctgaggcctgggcacca

SEQ ID NO: 19081 - DNA, 20 bp, Artificial Sequence
  chemically synthesized
ggcctgggcaccagggactc

SEQ ID NO: 19082 - DNA, 20 bp, Artificial Sequence
  chemically synthesized
cctgggcaccagggactcca

SEQ ID NO: 19083 - DNA, 20 bp, Artificial Sequence
  chemically synthesized
gcaccagggactccagagtc

SEQ ID NO: 19084 - DNA, 20 bp, Artificial Sequence
  chemically synthesized
caccagggactccagagtcc

SEQ ID NO: 19085 - DNA, 20 bp, Artificial Sequence
  chemically synthesized
caacccctccccattcaacc

SEQ ID NO: 19086 - DNA, 20 bp, Artificial Sequence
  chemically synthesized
aacccctccccattcaaccc

SEQ ID NO: 19087 - DNA, 20 bp, Artificial Sequence
  chemically synthesized
cccctccccattcaacccag

SEQ ID NO: 19088 - DNA, 20 bp, Artificial Sequence
  chemically synthesized
ccctccccattcaacccagg

SEQ ID NO: 19089 - DNA, 20 bp, Artificial Sequence
  chemically synthesized
ccccattcaacccaggaggc

SEQ ID NO: 19090 - DNA, 20 bp, Artificial Sequence
  chemically synthesized
cccattcaacccaggaggcc

SEQ ID NO: 19091 - DNA, 20 bp, Artificial Sequence
  chemically synthesized
caacccaggaggccaggccc

SEQ ID NO: 19092 - DNA, 20 bp, Artificial Sequence
  chemically synthesized
ggccccagcccttccgccct

SEQ ID NO: 19093 - DNA, 20 bp, Artificial Sequence
  chemically synthesized
agcccttccgccctcagatg

SEQ ID NO: 19094 - DNA, 20 bp, Artificial Sequence
  chemically synthesized
gcccttccgccctcagatga

SEQ ID NO: 19095 - DNA, 20 bp, Artificial Sequence
  chemically synthesized
ccttccgccctcagatgaag

SEQ ID NO: 19096 - DNA, 20 bp, Artificial Sequence
  chemically synthesized
cgccctcagatgaaggagtc

SEQ ID NO: 19097 - DNA, 20 bp, Artificial Sequence
  chemically synthesized
gccctcagatgaaggagtcc

SEQ ID NO: 19098 - DNA, 20 bp, Artificial Sequence
  chemically synthesized
gatgaaggagtccaggcccc

SEQ ID NO: 19099 - DNA, 20 bp, Artificial Sequence
  chemically synthesized
gcccccagcctctccccatt

SEQ ID NO: 19100 - DNA, 20 bp, Artificial Sequence
  chemically synthesized
agcctctccccattcagacc

SEQ ID NO: 19101 - DNA, 20 bp, Artificial Sequence
  chemically synthesized
gcctctccccattcagaccc

SEQ ID NO: 19102 - DNA, 20 bp, Artificial Sequence
  chemically synthesized
cctctccccattcagaccca

SEQ ID NO: 19103 - DNA, 20 bp, Artificial Sequence
  chemically synthesized
ctctccccattcagacccag

SEQ ID NO: 19104 - DNA, 20 bp, Artificial Sequence
  chemically synthesized
cccattcagacccaggggtc

SEQ ID NO: 19105 - DNA, 20 bp, Artificial Sequence
  chemically synthesized
ccattcagacccaggggtcc

SEQ ID NO: 19106 - DNA, 20 bp, Artificial Sequence
  chemically synthesized
cagacccaggggtccaggcc

SEQ ID NO: 19107 - DNA, 20 bp, Artificial Sequence
  chemically synthesized
aggcccagccccgcctccct

SEQ ID NO: 19108 - DNA, 20 bp, Artificial Sequence
  chemically synthesized
agccccgcctccctaagacc

SEQ ID NO: 19109 - DNA, 20 bp, Artificial Sequence
  chemically synthesized
cccgcctccctaagacccag

SEQ ID NO: 19110 - DNA, 20 bp, Artificial Sequence
  chemically synthesized
ctccctaagacccagaagtc

SEQ ID NO: 19111 - DNA, 20 bp, Artificial Sequence
  chemically synthesized
tccctaagacccagaagtcc

SEQ ID NO: 19112 - DNA, 20 bp, Artificial Sequence
  chemically synthesized
gacccagaagtccaggcccc

SEQ ID NO: 19113 - DNA, 20 bp, Artificial Sequence
  chemically synthesized
gcccccagcccctcctccct

SEQ ID NO: 19114 - DNA, 20 bp, Artificial Sequence
  chemically synthesized
ccctcctccctcagacccac

SEQ ID NO: 19115 - DNA, 20 bp, Artificial Sequence
  chemically synthesized
ctccctcagacccacgagtc

SEQ ID NO: 19116 - DNA, 20 bp, Artificial Sequence
  chemically synthesized
tccctcagacccacgagtcc

SEQ ID NO: 19117 - DNA, 20 bp, Artificial Sequence
  chemically synthesized
agacccacgagtccaggccc

SEQ ID NO: 19118 - DNA, 20 bp, Artificial Sequence
  chemically synthesized
ggccccagcccctcctccct

SEQ ID NO: 19119 - DNA, 20 bp, Artificial Sequence
  chemically synthesized
agcccctcctccctcggacc

SEQ ID NO: 19120 - DNA, 20 bp, Artificial Sequence
  chemically synthesized
gcccctcctccctcggaccc

SEQ ID NO: 19121 - DNA, 20 bp, Artificial Sequence
  chemically synthesized
ccctcctccctcggacccag

SEQ ID NO: 19122 - DNA, 20 bp, Artificial Sequence
  chemically synthesized
ctccctcggacccaggagtc

SEQ ID NO: 19123 - DNA, 20 bp, Artificial Sequence
  chemically synthesized
tccctcggacccaggagtcc

SEQ ID NO: 19124 - DNA, 20 bp, Artificial Sequence
  chemically synthesized
gacccaggagtccaggcccc

SEQ ID NO: 19125 - DNA, 20 bp, Artificial Sequence
  chemically synthesized
gcccccagtccctccaccct

SEQ ID NO: 19126 - DNA, 20 bp, Artificial Sequence
  chemically synthesized
agtccctccaccctcagacc

SEQ ID NO: 19127 - DNA, 20 bp, Artificial Sequence
  chemically synthesized
gtccctccaccctcagaccc

SEQ ID NO: 19128 - DNA, 20 bp, Artificial Sequence
  chemically synthesized
ccctccaccctcagacccag

SEQ ID NO: 19129 - DNA, 20 bp, Artificial Sequence
  chemically synthesized
caccctcagacccaggagtc

SEQ ID NO: 19130 - DNA, 20 bp, Artificial Sequence
  chemically synthesized
accctcagacccaggagtcc

SEQ ID NO: 19131 - DNA, 20 bp, Artificial Sequence
  chemically synthesized
agacccaggagtccaggccc

SEQ ID NO: 19132 - DNA, 20 bp, Artificial Sequence
  chemically synthesized
ggccccagcccctcctccct

SEQ ID NO: 19133 - DNA, 20 bp, Artificial Sequence
  chemically synthesized
agcccctcctccctcggacc

SEQ ID NO: 19134 - DNA, 20 bp, Artificial Sequence
  chemically synthesized
gcccctcctccctcggaccc

SEQ ID NO: 19135 - DNA, 20 bp, Artificial Sequence
  chemically synthesized
ccctcctccctcggacccag

SEQ ID NO: 19136 - DNA, 20 bp, Artificial Sequence
  chemically synthesized
ctccctcggacccaggagtc

SEQ ID NO: 19137 - DNA, 20 bp, Artificial Sequence
  chemically synthesized
tccctcggacccaggagtcc

SEQ ID NO: 19138 - DNA, 20 bp, Artificial Sequence
  chemically synthesized
ggacccaggagtccaggccc

SEQ ID NO: 19139 - DNA, 20 bp, Artificial Sequence
  chemically synthesized
agcccctcctctctcaaacc

SEQ ID NO: 19140 - DNA, 20 bp, Artificial Sequence
  chemically synthesized
gcccctcctctctcaaaccc

SEQ ID NO: 19141 - DNA, 20 bp, Artificial Sequence
  chemically synthesized
ccctcctctctcaaacccag

SEQ ID NO: 19142 - DNA, 20 bp, Artificial Sequence
  chemically synthesized
ctctctcaaacccaggagcc

SEQ ID NO: 19143 - DNA, 20 bp, Artificial Sequence
  chemically synthesized
tctctcaaacccaggagccc

SEQ ID NO: 19144 - DNA, 20 bp, Artificial Sequence
  chemically synthesized
aacccaggagcccaggcccc

SEQ ID NO: 19145 - DNA, 20 bp, Artificial Sequence
  chemically synthesized
gcccccagctcttctctgtt

SEQ ID NO: 19146 - DNA, 20 bp, Artificial Sequence
  chemically synthesized
gctcttctctgttcagccct

SEQ ID NO: 19147 - DNA, 20 bp, Artificial Sequence
  chemically synthesized
ctgttcagccctaagaatcc

SEQ ID NO: 19148 - DNA, 20 bp, Artificial Sequence
  chemically synthesized
agccctaagaatcctggctc

SEQ ID NO: 19149 - DNA, 20 bp, Artificial Sequence
  chemically synthesized
ggctccagcccctcctactc

SEQ ID NO: 19150 - DNA, 20 bp, Artificial Sequence
  chemically synthesized
tactctagcccccaaccccc

SEQ ID NO: 19151 - DNA, 20 bp, Artificial Sequence
  chemically synthesized
cccccaaccccctagccact

SEQ ID NO: 19152 - DNA, 20 bp, Artificial Sequence
  chemically synthesized
ccccaaccccctagccacta

SEQ ID NO: 19153 - DNA, 20 bp, Artificial Sequence
  chemically synthesized
cccctagccactaaggcaat

SEQ ID NO: 19154 - DNA, 20 bp, Artificial Sequence
  chemically synthesized
ccctagccactaaggcaatt

SEQ ID NO: 19155 - DNA, 20 bp, Artificial Sequence
  chemically synthesized
cctagccactaaggcaattg

SEQ ID NO: 19156 - DNA, 20 bp, Artificial Sequence
  chemically synthesized
ccactaaggcaattggggtg

SEQ ID NO: 19157 - DNA, 20 bp, Artificial Sequence
  chemically synthesized
cactaaggcaattggggtgc

SEQ ID NO: 19158 - DNA, 20 bp, Artificial Sequence
  chemically synthesized
aggcaattggggtgcaggaa

SEQ ID NO: 19159 - DNA, 20 bp, Artificial Sequence
  chemically synthesized
ggcaattggggtgcaggaat

SEQ ID NO: 19160 - DNA, 20 bp, Artificial Sequence
  chemically synthesized
gcaattggggtgcaggaatg

SEQ ID NO: 19161 - DNA, 20 bp, Artificial Sequence
  chemically synthesized
caattggggtgcaggaatgg

SEQ ID NO: 19162 - DNA, 20 bp, Artificial Sequence
  chemically synthesized
ttggggtgcaggaatggggg

SEQ ID NO: 19163 - DNA, 20 bp, Artificial Sequence
  chemically synthesized
tggggtgcaggaatgggggc

SEQ ID NO: 19164 - DNA, 20 bp, Artificial Sequence
  chemically synthesized
ggggtgcaggaatgggggca

SEQ ID NO: 19165 - DNA, 20 bp, Artificial Sequence
  chemically synthesized
caggaatgggggcagggtac

SEQ ID NO: 19166 - DNA, 20 bp, Artificial Sequence
  chemically synthesized
ggcagggtaccagcctcacc

SEQ ID NO: 19167 - DNA, 20 bp, Artificial Sequence
  chemically synthesized
agggtaccagcctcaccaag

SEQ ID NO: 19168 - DNA, 20 bp, Artificial Sequence
  chemically synthesized
aagtggttgataaacccacg

SEQ ID NO: 19169 - DNA, 20 bp, Artificial Sequence
  chemically synthesized
agtggttgataaacccacgt

SEQ ID NO: 19170 - DNA, 20 bp, Artificial Sequence
  chemically synthesized
gtggttgataaacccacgtg

SEQ ID NO: 19171 - DNA, 20 bp, Artificial Sequence
  chemically synthesized
aaacccacgtggggtaccct

SEQ ID NO: 19172 - DNA, 20 bp, Artificial Sequence
  chemically synthesized
cgtggggtaccctaagaact

SEQ ID NO: 19173 - DNA, 20 bp, Artificial Sequence
  chemically synthesized
gtggggtaccctaagaactt

SEQ ID NO: 19174 - DNA, 20 bp, Artificial Sequence
  chemically synthesized
gtaccctaagaacttgggaa

SEQ ID NO: 19175 - DNA, 20 bp, Artificial Sequence
  chemically synthesized
taagaacttgggaacagcca

SEQ ID NO: 19176 - DNA, 20 bp, Artificial Sequence
  chemically synthesized
gaacttgggaacagccacag

SEQ ID NO: 19177 - DNA, 20 bp, Artificial Sequence
  chemically synthesized
aacttgggaacagccacagc

SEQ ID NO: 19178 - DNA, 20 bp, Artificial Sequence
  chemically synthesized
acttgggaacagccacagca

SEQ ID NO: 19179 - DNA, 20 bp, Artificial Sequence
  chemically synthesized
cttgggaacagccacagcag

SEQ ID NO: 19180 - DNA, 20 bp, Artificial Sequence
  chemically synthesized
ttgggaacagccacagcagg

SEQ ID NO: 19181 - DNA, 20 bp, Artificial Sequence
  chemically synthesized
tgggaacagccacagcaggg

SEQ ID NO: 19182 - DNA, 20 bp, Artificial Sequence
  chemically synthesized
cacagcaggggggcgatgct

SEQ ID NO: 19183 - DNA, 20 bp, Artificial Sequence
  chemically synthesized
acagcaggggggcgatgctt

SEQ ID NO: 19184 - DNA, 20 bp, Artificial Sequence
  chemically synthesized
cagcaggggggcgatgcttg

SEQ ID NO: 19185 - DNA, 20 bp, Artificial Sequence
  chemically synthesized
gcgatgcttggggacctgcc

SEQ ID NO: 19186 - DNA, 20 bp, Artificial Sequence
  chemically synthesized
gatgcttggggacctgcctg

SEQ ID NO: 19187 - DNA, 20 bp, Artificial Sequence
  chemically synthesized
gcttggggacctgcctggag

SEQ ID NO: 19188 - DNA, 20 bp, Artificial Sequence
  chemically synthesized
cttggggacctgcctggaga

SEQ ID NO: 19189 - DNA, 20 bp, Artificial Sequence
  chemically synthesized
gacctgcctggagaaggatg

SEQ ID NO: 19190 - DNA, 20 bp, Artificial Sequence
  chemically synthesized
acctgcctggagaaggatgc

SEQ ID NO: 19191 - DNA, 20 bp, Artificial Sequence
  chemically synthesized
cctggagaaggatgcaggac

SEQ ID NO: 19192 - DNA, 20 bp, Artificial Sequence
  chemically synthesized
aggatgcaggacgagaaaca

SEQ ID NO: 19193 - DNA, 20 bp, Artificial Sequence
  chemically synthesized
caggacgagaaacacagccc

SEQ ID NO: 19194 - DNA, 20 bp, Artificial Sequence
  chemically synthesized
aggacgagaaacacagcccc

SEQ ID NO: 19195 - DNA, 20 bp, Artificial Sequence
  chemically synthesized
acgagaaacacagccccagg

SEQ ID NO: 19196 - DNA, 20 bp, Artificial Sequence
  chemically synthesized
gagaaacacagccccaggtg

SEQ ID NO: 19197 - DNA, 20 bp, Artificial Sequence
  chemically synthesized
acagccccaggtggagaaac

SEQ ID NO: 19198 - DNA, 20 bp, Artificial Sequence
  chemically synthesized
ccccaggtggagaaactggc

SEQ ID NO: 19199 - DNA, 20 bp, Artificial Sequence
  chemically synthesized
cccaggtggagaaactggcc

SEQ ID NO: 19200 - DNA, 20 bp, Artificial Sequence
  chemically synthesized
ggagaaactggccgggaatc

SEQ ID NO: 19201 - DNA, 20 bp, Artificial Sequence
  chemically synthesized
agaaactggccgggaatcaa

SEQ ID NO: 19202 - DNA, 20 bp, Artificial Sequence
  chemically synthesized
gccgggaatcaagagtcacc

SEQ ID NO: 19203 - DNA, 20 bp, Artificial Sequence
  chemically synthesized
cgggaatcaagagtcaccca

SEQ ID NO: 19204 - DNA, 20 bp, Artificial Sequence
  chemically synthesized
aatcaagagtcacccagaga

SEQ ID NO: 19205 - DNA, 20 bp, Artificial Sequence
  chemically synthesized
accaaccatccctgttttcc

SEQ ID NO: 19206 - DNA, 20 bp, Artificial Sequence
  chemically synthesized
ccaaccatccctgttttcct

SEQ ID NO: 19207 - DNA, 20 bp, Artificial Sequence
  chemically synthesized
atccctgttttcctaggact

SEQ ID NO: 19208 - DNA, 20 bp, Artificial Sequence
  chemically synthesized
tccctgttttcctaggactg

SEQ ID NO: 19209 - DNA, 20 bp, Artificial Sequence
  chemically synthesized
ccctgttttcctaggactga

SEQ ID NO: 19210 - DNA, 20 bp, Artificial Sequence
  chemically synthesized
tttcctaggactgagggttt

SEQ ID NO: 19211 - DNA, 20 bp, Artificial Sequence
  chemically synthesized
gagggtttcagtgctaaaac

SEQ ID NO: 19212 - DNA, 20 bp, Artificial Sequence
  chemically synthesized
agggtttcagtgctaaaact

SEQ ID NO: 19213 - DNA, 20 bp, Artificial Sequence
  chemically synthesized
gtgctaaaactaggctgtcc

SEQ ID NO: 19214 - DNA, 20 bp, Artificial Sequence
  chemically synthesized
tgctaaaactaggctgtcct

SEQ ID NO: 19215 - DNA, 20 bp, Artificial Sequence
  chemically synthesized
actaggctgtcctgggcaaa

SEQ ID NO: 19216 - DNA, 20 bp, Artificial Sequence
  chemically synthesized
ctgtcctgggcaaacagcat

SEQ ID NO: 19217 - DNA, 20 bp, Artificial Sequence
  chemically synthesized
cctgggcaaacagcataagc

SEQ ID NO: 19218 - DNA, 20 bp, Artificial Sequence
  chemically synthesized
taagctggtcaccccacacc

SEQ ID NO: 19219 - DNA, 20 bp, Artificial Sequence
  chemically synthesized
acccagacctgacccaaacc

SEQ ID NO: 19220 - DNA, 20 bp, Artificial Sequence
  chemically synthesized
aacccagctcccctgcttct

SEQ ID NO: 19221 - DNA, 20 bp, Artificial Sequence
  chemically synthesized
gcttcttggccacgtaacct

SEQ ID NO: 19222 - DNA, 20 bp, Artificial Sequence
  chemically synthesized
tcttggccacgtaacctgag

SEQ ID NO: 19223 - DNA, 20 bp, Artificial Sequence
  chemically synthesized
cttggccacgtaacctgaga

SEQ ID NO: 19224 - DNA, 20 bp, Artificial Sequence
  chemically synthesized
ttggccacgtaacctgagaa

SEQ ID NO: 19225 - DNA, 20 bp, Artificial Sequence
  chemically synthesized
aatccctcctctctgaaccc

SEQ ID NO: 19226 - DNA, 20 bp, Artificial Sequence
  chemically synthesized
cccagcccaccccaatgctc

SEQ ID NO: 19227 - DNA, 20 bp, Artificial Sequence
  chemically synthesized
ccagcccaccccaatgctcc

SEQ ID NO: 19228 - DNA, 20 bp, Artificial Sequence
  chemically synthesized
ccccaatgctccaggcctcc

SEQ ID NO: 19229 - DNA, 20 bp, Artificial Sequence
  chemically synthesized
cccaatgctccaggcctcct

SEQ ID NO: 19230 - DNA, 20 bp, Artificial Sequence
  chemically synthesized
aggcctcctgggataccccg

SEQ ID NO: 19231 - DNA, 20 bp, Artificial Sequence
  chemically synthesized
gcctcctgggataccccgaa

SEQ ID NO: 19232 - DNA, 20 bp, Artificial Sequence
  chemically synthesized
cctgggataccccgaagagt

SEQ ID NO: 19233 - DNA, 20 bp, Artificial Sequence
  chemically synthesized
ccccgaagagtgagtttgcc

SEQ ID NO: 19234 - DNA, 20 bp, Artificial Sequence
  chemically synthesized
cgaagagtgagtttgccaag

SEQ ID NO: 19235 - DNA, 20 bp, Artificial Sequence
  chemically synthesized
tttgccaagcagtcacccca

SEQ ID NO: 19236 - DNA, 20 bp, Artificial Sequence
  chemically synthesized
ccaagcagtcaccccacagt

SEQ ID NO: 19237 - DNA, 20 bp, Artificial Sequence
  chemically synthesized
aagcagtcaccccacagttg

SEQ ID NO: 19238 - DNA, 20 bp, Artificial Sequence
  chemically synthesized
agcagtcaccccacagttgg

SEQ ID NO: 19239 - DNA, 20 bp, Artificial Sequence
  chemically synthesized
cagtcaccccacagttggag

SEQ ID NO: 19240 - DNA, 20 bp, Artificial Sequence
  chemically synthesized
ttggaggagaatccacccaa

SEQ ID NO: 19241 - DNA, 20 bp, Artificial Sequence
  chemically synthesized
tggaggagaatccacccaaa

SEQ ID NO: 19242 - DNA, 20 bp, Artificial Sequence
  chemically synthesized
aggagaatccacccaaaagg

SEQ ID NO: 19243 - DNA, 20 bp, Artificial Sequence
  chemically synthesized
aatccacccaaaaggcagcc

SEQ ID NO: 19244 - DNA, 20 bp, Artificial Sequence
  chemically synthesized
ccacccaaaaggcagcctgg

SEQ ID NO: 19245 - DNA, 20 bp, Artificial Sequence
  chemically synthesized
ccaaaaggcagcctggtaga

SEQ ID NO: 19246 - DNA, 20 bp, Artificial Sequence
  chemically synthesized
caaaaggcagcctggtagac

SEQ ID NO: 19247 - DNA, 20 bp, Artificial Sequence
  chemically synthesized
aaaaggcagcctggtagaca

SEQ ID NO: 19248 - DNA, 20 bp, Artificial Sequence
  chemically synthesized
ggcagcctggtagacagggc

SEQ ID NO: 19249 - DNA, 20 bp, Artificial Sequence
  chemically synthesized
gcagcctggtagacagggct

SEQ ID NO: 19250 - DNA, 20 bp, Artificial Sequence
  chemically synthesized
cagcctggtagacagggctg

SEQ ID NO: 19251 - DNA, 20 bp, Artificial Sequence
  chemically synthesized
cctggtagacagggctgggg

SEQ ID NO: 19252 - DNA, 20 bp, Artificial Sequence
  chemically synthesized
agggctggggtggcctctcg

SEQ ID NO: 19253 - DNA, 20 bp, Artificial Sequence
  chemically synthesized
gggctggggtggcctctcgt

SEQ ID NO: 19254 - DNA, 20 bp, Artificial Sequence
  chemically synthesized
ggctggggtggcctctcgtg

SEQ ID NO: 19255 - DNA, 20 bp, Artificial Sequence
  chemically synthesized
gggtggcctctcgtggggtc

SEQ ID NO: 19256 - DNA, 20 bp, Artificial Sequence
  chemically synthesized
ggtggcctctcgtggggtcc

SEQ ID NO: 19257 - DNA, 20 bp, Artificial Sequence
  chemically synthesized
cctctcgtggggtccaggcc

SEQ ID NO: 19258 - DNA, 20 bp, Artificial Sequence
  chemically synthesized
ctcgtggggtccaggccaag

SEQ ID NO: 19259 - DNA, 20 bp, Artificial Sequence
  chemically synthesized
tcgtggggtccaggccaagt

SEQ ID NO: 19260 - DNA, 20 bp, Artificial Sequence
  chemically synthesized
tggggtccaggccaagtagg

SEQ ID NO: 19261 - DNA, 20 bp, Artificial Sequence
  chemically synthesized
tccaggccaagtaggtggcc

SEQ ID NO: 19262 - DNA, 20 bp, Artificial Sequence
  chemically synthesized
ccaggccaagtaggtggcct

SEQ ID NO: 19263 - DNA, 20 bp, Artificial Sequence
  chemically synthesized
caggccaagtaggtggcctg

SEQ ID NO: 19264 - DNA, 20 bp, Artificial Sequence
  chemically synthesized
agtaggtggcctggggcctc

SEQ ID NO: 19265 - DNA, 20 bp, Artificial Sequence
  chemically synthesized
gtaggtggcctggggcctct

SEQ ID NO: 19266 - DNA, 20 bp, Artificial Sequence
  chemically synthesized
taggtggcctggggcctctg

SEQ ID NO: 19267 - DNA, 20 bp, Artificial Sequence
  chemically synthesized
aggtggcctggggcctctgg

SEQ ID NO: 19268 - DNA, 20 bp, Artificial Sequence
  chemically synthesized
cctggggcctctgggggatg

SEQ ID NO: 19269 - DNA, 20 bp, Artificial Sequence
  chemically synthesized
ctggggcctctgggggatgc

SEQ ID NO: 19270 - DNA, 20 bp, Artificial Sequence
  chemically synthesized
tggggcctctgggggatgca

SEQ ID NO: 19271 - DNA, 20 bp, Artificial Sequence
  chemically synthesized
ggggcctctgggggatgcag

SEQ ID NO: 19272 - DNA, 20 bp, Artificial Sequence
  chemically synthesized
gcctctgggggatgcagggg

SEQ ID NO: 19273 - DNA, 20 bp, Artificial Sequence
  chemically synthesized
cctctgggggatgcagggga

SEQ ID NO: 19274 - DNA, 20 bp, Artificial Sequence
  chemically synthesized
ctctgggggatgcaggggaa

SEQ ID NO: 19275 - DNA, 20 bp, Artificial Sequence
  chemically synthesized
tctgggggatgcaggggaag

SEQ ID NO: 19276 - DNA, 20 bp, Artificial Sequence
  chemically synthesized
ctgggggatgcaggggaagg

SEQ ID NO: 19277 - DNA, 20 bp, Artificial Sequence
  chemically synthesized
gatgcaggggaagggggatg

SEQ ID NO: 19278 - DNA, 20 bp, Artificial Sequence
  chemically synthesized
atgcaggggaagggggatgc

SEQ ID NO: 19279 - DNA, 20 bp, Artificial Sequence
  chemically synthesized
tgcaggggaagggggatgca

SEQ ID NO: 19280 - DNA, 20 bp, Artificial Sequence
  chemically synthesized
gcaggggaagggggatgcag

SEQ ID NO: 19281 - DNA, 20 bp, Artificial Sequence
  chemically synthesized
ggaagggggatgcaggggaa

SEQ ID NO: 19282 - DNA, 20 bp, Artificial Sequence
  chemically synthesized
gaagggggatgcaggggaac

SEQ ID NO: 19283 - DNA, 20 bp, Artificial Sequence
  chemically synthesized
aagggggatgcaggggaacg

SEQ ID NO: 19284 - DNA, 20 bp, Artificial Sequence
  chemically synthesized
gatgcaggggaacggggatg

SEQ ID NO: 19285 - DNA, 20 bp, Artificial Sequence
  chemically synthesized
atgcaggggaacggggatgc

SEQ ID NO: 19286 - DNA, 20 bp, Artificial Sequence
  chemically synthesized
tgcaggggaacggggatgca

SEQ ID NO: 19287 - DNA, 20 bp, Artificial Sequence
  chemically synthesized
gcaggggaacggggatgcag

SEQ ID NO: 19288 - DNA, 20 bp, Artificial Sequence
  chemically synthesized
ggaacggggatgcaggggaa

SEQ ID NO: 19289 - DNA, 20 bp, Artificial Sequence
  chemically synthesized
gaacggggatgcaggggaac

SEQ ID NO: 19290 - DNA, 20 bp, Artificial Sequence
  chemically synthesized
aacggggatgcaggggaacg

SEQ ID NO: 19291 - DNA, 20 bp, Artificial Sequence
  chemically synthesized
ggatgcaggggaacggggct

SEQ ID NO: 19292 - DNA, 20 bp, Artificial Sequence
  chemically synthesized
ggggaacggggctcagtctg

SEQ ID NO: 19293 - DNA, 20 bp, Artificial Sequence
  chemically synthesized
ggaacggggctcagtctgaa

SEQ ID NO: 19294 - DNA, 20 bp, Artificial Sequence
  chemically synthesized
acggggctcagtctgaagag

SEQ ID NO: 19295 - DNA, 20 bp, Artificial Sequence
  chemically synthesized
ggggctcagtctgaagagca

SEQ ID NO: 19296 - DNA, 20 bp, Artificial Sequence
  chemically synthesized
ctcagtctgaagagcagagc

SEQ ID NO: 19297 - DNA, 20 bp, Artificial Sequence
  chemically synthesized
tcagtctgaagagcagagcc

SEQ ID NO: 19298 - DNA, 20 bp, Artificial Sequence
  chemically synthesized
agcagagccaggaacccctg

SEQ ID NO: 19299 - DNA, 20 bp, Artificial Sequence
  chemically synthesized
gcagagccaggaacccctgt

SEQ ID NO: 19300 - DNA, 20 bp, Artificial Sequence
  chemically synthesized
cagagccaggaacccctgta

SEQ ID NO: 19301 - DNA, 20 bp, Artificial Sequence
  chemically synthesized
agccaggaacccctgtaggg

SEQ ID NO: 19302 - DNA, 20 bp, Artificial Sequence
  chemically synthesized
gccaggaacccctgtaggga

SEQ ID NO: 19303 - DNA, 20 bp, Artificial Sequence
  chemically synthesized
ccaggaacccctgtagggaa

SEQ ID NO: 19304 - DNA, 20 bp, Artificial Sequence
  chemically synthesized
caggaacccctgtagggaag

SEQ ID NO: 19305 - DNA, 20 bp, Artificial Sequence
  chemically synthesized
gaacccctgtagggaagggg

SEQ ID NO: 19306 - DNA, 20 bp, Artificial Sequence
  chemically synthesized
aacccctgtagggaaggggc

SEQ ID NO: 19307 - DNA, 20 bp, Artificial Sequence
  chemically synthesized
cccctgtagggaaggggcag

SEQ ID NO: 19308 - DNA, 20 bp, Artificial Sequence
  chemically synthesized
cctgtagggaaggggcagga

SEQ ID NO: 19309 - DNA, 20 bp, Artificial Sequence
  chemically synthesized
tagggaaggggcaggagagc

SEQ ID NO: 19310 - DNA, 20 bp, Artificial Sequence
  chemically synthesized
agggaaggggcaggagagcc

SEQ ID NO: 19311 - DNA, 20 bp, Artificial Sequence
  chemically synthesized
gggaaggggcaggagagcca

SEQ ID NO: 19312 - DNA, 20 bp, Artificial Sequence
  chemically synthesized
ggaaggggcaggagagccag

SEQ ID NO: 19313 - DNA, 20 bp, Artificial Sequence
  chemically synthesized
ggcaggagagccaggggcat

SEQ ID NO: 19314 - DNA, 20 bp, Artificial Sequence
  chemically synthesized
ggagagccaggggcatgaga

SEQ ID NO: 19315 - DNA, 20 bp, Artificial Sequence
  chemically synthesized
gagccaggggcatgagatgg

SEQ ID NO: 19316 - DNA, 20 bp, Artificial Sequence
  chemically synthesized
aggggcatgagatggtggac

SEQ ID NO: 19317 - DNA, 20 bp, Artificial Sequence
  chemically synthesized
ggggcatgagatggtggacg

SEQ ID NO: 19318 - DNA, 20 bp, Artificial Sequence
  chemically synthesized
gcatgagatggtggacgagg

SEQ ID NO: 19319 - DNA, 20 bp, Artificial Sequence
  chemically synthesized
catgagatggtggacgagga

SEQ ID NO: 19320 - DNA, 20 bp, Artificial Sequence
  chemically synthesized
atgagatggtggacgaggaa

SEQ ID NO: 19321 - DNA, 20 bp, Artificial Sequence
  chemically synthesized
tgagatggtggacgaggaag

SEQ ID NO: 19322 - DNA, 20 bp, Artificial Sequence
  chemically synthesized
gagatggtggacgaggaagg

SEQ ID NO: 19323 - DNA, 20 bp, Artificial Sequence
  chemically synthesized
tggtggacgaggaaggggga

SEQ ID NO: 19324 - DNA, 20 bp, Artificial Sequence
  chemically synthesized
ggtggacgaggaagggggac

SEQ ID NO: 19325 - DNA, 20 bp, Artificial Sequence
  chemically synthesized
gtggacgaggaagggggaca

SEQ ID NO: 19326 - DNA, 20 bp, Artificial Sequence
  chemically synthesized
gacgaggaagggggacaggg

SEQ ID NO: 19327 - DNA, 20 bp, Artificial Sequence
  chemically synthesized
gaagggggacagggaagcct

SEQ ID NO: 19328 - DNA, 20 bp, Artificial Sequence
  chemically synthesized
ggaagcctgagcgcctctcc

SEQ ID NO: 19329 - DNA, 20 bp, Artificial Sequence
  chemically synthesized
gaagcctgagcgcctctcct

SEQ ID NO: 19330 - DNA, 20 bp, Artificial Sequence
  chemically synthesized
gcgcctctcctgggcttgcc

SEQ ID NO: 19331 - DNA, 20 bp, Artificial Sequence
  chemically synthesized
cgcctctcctgggcttgcca

SEQ ID NO: 19332 - DNA, 20 bp, Artificial Sequence
  chemically synthesized
gcttgccaaggactcaaacc

SEQ ID NO: 19333 - DNA, 20 bp, Artificial Sequence
  chemically synthesized
tgccaaggactcaaacccag

SEQ ID NO: 19334 - DNA, 20 bp, Artificial Sequence
  chemically synthesized
aggactcaaacccagaagcc

SEQ ID NO: 19335 - DNA, 20 bp, Artificial Sequence
  chemically synthesized
gactcaaacccagaagccca

SEQ ID NO: 19336 - DNA, 20 bp, Artificial Sequence
  chemically synthesized
tcaaacccagaagcccagag

SEQ ID NO: 19337 - DNA, 20 bp, Artificial Sequence
  chemically synthesized
caaacccagaagcccagagc

SEQ ID NO: 19338 - DNA, 20 bp, Artificial Sequence
  chemically synthesized
aaacccagaagcccagagca

SEQ ID NO: 19339 - DNA, 20 bp, Artificial Sequence
  chemically synthesized
agaagcccagagcagggcct

SEQ ID NO: 19340 - DNA, 20 bp, Artificial Sequence
  chemically synthesized
gaagcccagagcagggcctt

SEQ ID NO: 19341 - DNA, 20 bp, Artificial Sequence
  chemically synthesized
aagcccagagcagggcctta

SEQ ID NO: 19342 - DNA, 20 bp, Artificial Sequence
  chemically synthesized
cccagagcagggccttaggg

SEQ ID NO: 19343 - DNA, 20 bp, Artificial Sequence
  chemically synthesized
agagcagggccttagggaag

SEQ ID NO: 19344 - DNA, 20 bp, Artificial Sequence
  chemically synthesized
gagcagggccttagggaagc

SEQ ID NO: 19345 - DNA, 20 bp, Artificial Sequence
  chemically synthesized
agggaagcgggaccctgctc

SEQ ID NO: 19346 - DNA, 20 bp, Artificial Sequence
  chemically synthesized
gggaagcgggaccctgctct

SEQ ID NO: 19347 - DNA, 20 bp, Artificial Sequence
  chemically synthesized
aagcgggaccctgctctggg

SEQ ID NO: 19348 - DNA, 20 bp, Artificial Sequence
  chemically synthesized
gcgggaccctgctctgggcg

SEQ ID NO: 19349 - DNA, 20 bp, Artificial Sequence
  chemically synthesized
cgggaccctgctctgggcgg

SEQ ID NO: 19350 - DNA, 20 bp, Artificial Sequence
  chemically synthesized
ctgggcggaggaatatgtcc

SEQ ID NO: 19351 - DNA, 20 bp, Artificial Sequence
  chemically synthesized
gcggaggaatatgtcccaga

SEQ ID NO: 19352 - DNA, 20 bp, Artificial Sequence
  chemically synthesized
gaatatgtcccagatagcac

SEQ ID NO: 19353 - DNA, 20 bp, Artificial Sequence
  chemically synthesized
aatatgtcccagatagcact

SEQ ID NO: 19354 - DNA, 20 bp, Artificial Sequence
  chemically synthesized
atatgtcccagatagcactg

SEQ ID NO: 19355 - DNA, 20 bp, Artificial Sequence
  chemically synthesized
gatagcactggggactcttt

SEQ ID NO: 19356 - DNA, 20 bp, Artificial Sequence
  chemically synthesized
atagcactggggactcttta

SEQ ID NO: 19357 - DNA, 20 bp, Artificial Sequence
  chemically synthesized
cactggggactctttaagga

SEQ ID NO: 19358 - DNA, 20 bp, Artificial Sequence
  chemically synthesized
tggggactctttaaggaaag

SEQ ID NO: 19359 - DNA, 20 bp, Artificial Sequence
  chemically synthesized
ggggactctttaaggaaaga

SEQ ID NO: 19360 - DNA, 20 bp, Artificial Sequence
  chemically synthesized
actctttaaggaaagaagga

SEQ ID NO: 19361 - DNA, 20 bp, Artificial Sequence
  chemically synthesized
tctttaaggaaagaaggatg

SEQ ID NO: 19362 - DNA, 20 bp, Artificial Sequence
  chemically synthesized
taaggaaagaaggatggaga

SEQ ID NO: 19363 - DNA, 20 bp, Artificial Sequence
  chemically synthesized
aggaaagaaggatggagaaa

SEQ ID NO: 19364 - DNA, 20 bp, Artificial Sequence
  chemically synthesized
aagaaggatggagaaagaga

SEQ ID NO: 19365 - DNA, 20 bp, Artificial Sequence
  chemically synthesized
agaaggatggagaaagagaa

SEQ ID NO: 19366 - DNA, 20 bp, Artificial Sequence
  chemically synthesized
gaaggatggagaaagagaaa

SEQ ID NO: 19367 - DNA, 20 bp, Artificial Sequence
  chemically synthesized
aggatggagaaagagaaagg

SEQ ID NO: 19368 - DNA, 20 bp, Artificial Sequence
  chemically synthesized
atggagaaagagaaagggag

SEQ ID NO: 19369 - DNA, 20 bp, Artificial Sequence
  chemically synthesized
ggagaaagagaaagggagta

SEQ ID NO: 19370 - DNA, 20 bp, Artificial Sequence
  chemically synthesized
gagaaagagaaagggagtag

SEQ ID NO: 19371 - DNA, 20 bp, Artificial Sequence
  chemically synthesized
aaagagaaagggagtagagg

SEQ ID NO: 19372 - DNA, 20 bp, Artificial Sequence
  chemically synthesized
gagtagaggcggccacgacc

SEQ ID NO: 19373 - DNA, 20 bp, Artificial Sequence
  chemically synthesized
gccacgacctggtgaacacc

SEQ ID NO: 19374 - DNA, 20 bp, Artificial Sequence
  chemically synthesized
ccacgacctggtgaacacct

SEQ ID NO: 19375 - DNA, 20 bp, Artificial Sequence
  chemically synthesized
taggacgcaccattctcaca

SEQ ID NO: 19376 - DNA, 20 bp, Artificial Sequence
  chemically synthesized
aggacgcaccattctcacaa

SEQ ID NO: 19377 - DNA, 20 bp, Artificial Sequence
  chemically synthesized
ggacgcaccattctcacaaa

SEQ ID NO: 19378 - DNA, 20 bp, Artificial Sequence
  chemically synthesized
acgcaccattctcacaaagg

SEQ ID NO: 19379 - DNA, 20 bp, Artificial Sequence
  chemically synthesized
cacaaagggagttttccaca

SEQ ID NO: 19380 - DNA, 20 bp, Artificial Sequence
  chemically synthesized
ggacacccccctcctcacca

SEQ ID NO: 19381 - DNA, 20 bp, Artificial Sequence
  chemically synthesized
cctcctcaccacagccctgc

SEQ ID NO: 19382 - DNA, 20 bp, Artificial Sequence
  chemically synthesized
ctcctcaccacagccctgcc

SEQ ID NO: 19383 - DNA, 20 bp, Artificial Sequence
  chemically synthesized
tcaccacagccctgccagga

SEQ ID NO: 19384 - DNA, 20 bp, Artificial Sequence
  chemically synthesized
caccacagccctgccaggac

SEQ ID NO: 19385 - DNA, 20 bp, Artificial Sequence
  chemically synthesized
accacagccctgccaggacg

SEQ ID NO: 19386 - DNA, 20 bp, Artificial Sequence
  chemically synthesized
cagccctgccaggacggggc

SEQ ID NO: 19387 - DNA, 20 bp, Artificial Sequence
  chemically synthesized
gccaggacggggctggctac

SEQ ID NO: 19388 - DNA, 20 bp, Artificial Sequence
  chemically synthesized
tggctactggccttatctca

SEQ ID NO: 19389 - DNA, 20 bp, Artificial Sequence
  chemically synthesized
ggctactggccttatctcac

SEQ ID NO: 19390 - DNA, 20 bp, Artificial Sequence
  chemically synthesized
tcacaggtaaaactgacgca

SEQ ID NO: 19391 - DNA, 20 bp, Artificial Sequence
  chemically synthesized
acaggtaaaactgacgcacg

SEQ ID NO: 19392 - DNA, 20 bp, Artificial Sequence
  chemically synthesized
caggtaaaactgacgcacgg

SEQ ID NO: 19393 - DNA, 20 bp, Artificial Sequence
  chemically synthesized
cacggaggaacaatataaat

SEQ ID NO: 19394 - DNA, 20 bp, Artificial Sequence
  chemically synthesized
acggaggaacaatataaatt

SEQ ID NO: 19395 - DNA, 20 bp, Artificial Sequence
  chemically synthesized
cggaggaacaatataaattg

SEQ ID NO: 19396 - DNA, 20 bp, Artificial Sequence
  chemically synthesized
gaacaatataaattggggac

SEQ ID NO: 19397 - DNA, 20 bp, Artificial Sequence
  chemically synthesized
aatataaattggggactaga

SEQ ID NO: 19398 - DNA, 20 bp, Artificial Sequence
  chemically synthesized
atataaattggggactagaa

SEQ ID NO: 19399 - DNA, 20 bp, Artificial Sequence
  chemically synthesized
aattggggactagaaaggtg

SEQ ID NO: 19400 - DNA, 20 bp, Artificial Sequence
  chemically synthesized
ttggggactagaaaggtgaa

SEQ ID NO: 19401 - DNA, 20 bp, Artificial Sequence
  chemically synthesized
actagaaaggtgaagagcca

SEQ ID NO: 19402 - DNA, 20 bp, Artificial Sequence
  chemically synthesized
gaaaggtgaagagccaaagt

SEQ ID NO: 19403 - DNA, 20 bp, Artificial Sequence
  chemically synthesized
gaagagccaaagttagaact

SEQ ID NO: 19404 - DNA, 20 bp, Artificial Sequence
  chemically synthesized
aagagccaaagttagaactc

SEQ ID NO: 19405 - DNA, 20 bp, Artificial Sequence
  chemically synthesized
ttccaaactgcttctcctct

SEQ ID NO: 19406 - DNA, 20 bp, Artificial Sequence
  chemically synthesized
tccaaactgcttctcctctt

SEQ ID NO: 19407 - DNA, 20 bp, Artificial Sequence
  chemically synthesized
aaactgcttctcctcttggg

SEQ ID NO: 19408 - DNA, 20 bp, Artificial Sequence
  chemically synthesized
cttctcctcttgggaagtgt

SEQ ID NO: 19409 - DNA, 20 bp, Artificial Sequence
  chemically synthesized
ttctcctcttgggaagtgta

SEQ ID NO: 19410 - DNA, 20 bp, Artificial Sequence
  chemically synthesized
tcctcttgggaagtgtaagg

SEQ ID NO: 19411 - DNA, 20 bp, Artificial Sequence
  chemically synthesized
tgggaagtgtaaggaagctg

SEQ ID NO: 19412 - DNA, 20 bp, Artificial Sequence
  chemically synthesized
gtgtaaggaagctgcagcac

SEQ ID NO: 19413 - DNA, 20 bp, Artificial Sequence
  chemically synthesized
tgtaaggaagctgcagcacc

SEQ ID NO: 19414 - DNA, 20 bp, Artificial Sequence
  chemically synthesized
ggaagctgcagcaccaggat

SEQ ID NO: 19415 - DNA, 20 bp, Artificial Sequence
  chemically synthesized
ccaggatcagtgaaacgcac

SEQ ID NO: 19416 - DNA, 20 bp, Artificial Sequence
  chemically synthesized
gatcagtgaaacgcaccaga

SEQ ID NO: 19417 - DNA, 20 bp, Artificial Sequence
  chemically synthesized
aacgcaccagacggccgcgt

SEQ ID NO: 19418 - DNA, 20 bp, Artificial Sequence
  chemically synthesized
cgcaccagacggccgcgtca

SEQ ID NO: 19419 - DNA, 20 bp, Artificial Sequence
  chemically synthesized
accagacggccgcgtcagag

SEQ ID NO: 19420 - DNA, 20 bp, Artificial Sequence
  chemically synthesized
acggccgcgtcagagcagct

SEQ ID NO: 19421 - DNA, 20 bp, Artificial Sequence
  chemically synthesized
cggccgcgtcagagcagctc

SEQ ID NO: 19422 - DNA, 20 bp, Artificial Sequence
  chemically synthesized
cgtcagagcagctcaggttc

SEQ ID NO: 19423 - DNA, 20 bp, Artificial Sequence
  chemically synthesized
gtcagagcagctcaggttct

SEQ ID NO: 19424 - DNA, 20 bp, Artificial Sequence
  chemically synthesized
cagagcagctcaggttctgg

SEQ ID NO: 19425 - DNA, 20 bp, Artificial Sequence
  chemically synthesized
gagcagctcaggttctggga

SEQ ID NO: 19426 - DNA, 20 bp, Artificial Sequence
  chemically synthesized
agcagctcaggttctgggag

SEQ ID NO: 19427 - DNA, 20 bp, Artificial Sequence
  chemically synthesized
gcagctcaggttctgggaga

SEQ ID NO: 19428 - DNA, 20 bp, Artificial Sequence
  chemically synthesized
gctcaggttctgggagaggg

SEQ ID NO: 19429 - DNA, 20 bp, Artificial Sequence
  chemically synthesized
ggttctgggagagggtagcg

SEQ ID NO: 19430 - DNA, 20 bp, Artificial Sequence
  chemically synthesized
gttctgggagagggtagcgc

SEQ ID NO: 19431 - DNA, 20 bp, Artificial Sequence
  chemically synthesized
ttctgggagagggtagcgca

SEQ ID NO: 19432 - DNA, 20 bp, Artificial Sequence
  chemically synthesized
tgggagagggtagcgcaggg

SEQ ID NO: 19433 - DNA, 20 bp, Artificial Sequence
  chemically synthesized
ggtagcgcagggtggccact

SEQ ID NO: 19434 - DNA, 20 bp, Artificial Sequence
  chemically synthesized
gcagggtggccactgagaac

SEQ ID NO: 19435 - DNA, 20 bp, Artificial Sequence
  chemically synthesized
cagggtggccactgagaacc

SEQ ID NO: 19436 - DNA, 20 bp, Artificial Sequence
  chemically synthesized
ggtggccactgagaaccggg

SEQ ID NO: 19437 - DNA, 20 bp, Artificial Sequence
  chemically synthesized
gtggccactgagaaccgggc

SEQ ID NO: 19438 - DNA, 20 bp, Artificial Sequence
  chemically synthesized
cttccctcccaccccctgcc

SEQ ID NO: 19439 - DNA, 20 bp, Artificial Sequence
  chemically synthesized
ccctgccaagctctccctcc

SEQ ID NO: 19440 - DNA, 20 bp, Artificial Sequence
  chemically synthesized
cctgccaagctctccctccc

SEQ ID NO: 19441 - DNA, 20 bp, Artificial Sequence
  chemically synthesized
ctccctcccaggatcctctc

SEQ ID NO: 19442 - DNA, 20 bp, Artificial Sequence
  chemically synthesized
atcctctctggctccatcgt

SEQ ID NO: 19443 - DNA, 20 bp, Artificial Sequence
  chemically synthesized
gctccatcgtaagcaaacct

SEQ ID NO: 19444 - DNA, 20 bp, Artificial Sequence
  chemically synthesized
tccatcgtaagcaaacctta

SEQ ID NO: 19445 - DNA, 20 bp, Artificial Sequence
  chemically synthesized
ccatcgtaagcaaaccttag

SEQ ID NO: 19446 - DNA, 20 bp, Artificial Sequence
  chemically synthesized
taagcaaaccttagaggttc

SEQ ID NO: 19447 - DNA, 20 bp, Artificial Sequence
  chemically synthesized
caaaccttagaggttctggc

SEQ ID NO: 19448 - DNA, 20 bp, Artificial Sequence
  chemically synthesized
aaaccttagaggttctggca

SEQ ID NO: 19449 - DNA, 20 bp, Artificial Sequence
  chemically synthesized
accttagaggttctggcaag

SEQ ID NO: 19450 - DNA, 20 bp, Artificial Sequence
  chemically synthesized
cttagaggttctggcaagga

SEQ ID NO: 19451 - DNA, 20 bp, Artificial Sequence
  chemically synthesized
tagaggttctggcaaggaga

SEQ ID NO: 19452 - DNA, 20 bp, Artificial Sequence
  chemically synthesized
ggttctggcaaggagagaga

SEQ ID NO: 19453 - DNA, 20 bp, Artificial Sequence
  chemically synthesized
ggcaaggagagagatggctc

SEQ ID NO: 19454 - DNA, 20 bp, Artificial Sequence
  chemically synthesized
gcaaggagagagatggctcc

SEQ ID NO: 19455 - DNA, 20 bp, Artificial Sequence
  chemically synthesized
agagagatggctccaggaaa

SEQ ID NO: 19456 - DNA, 20 bp, Artificial Sequence
  chemically synthesized
gagagatggctccaggaaat

SEQ ID NO: 19457 - DNA, 20 bp, Artificial Sequence
  chemically synthesized
agagatggctccaggaaatg

SEQ ID NO: 19458 - DNA, 20 bp, Artificial Sequence
  chemically synthesized
gagatggctccaggaaatgg

SEQ ID NO: 19459 - DNA, 20 bp, Artificial Sequence
  chemically synthesized
aggaaatgggggtgtgtcac

SEQ ID NO: 19460 - DNA, 20 bp, Artificial Sequence
  chemically synthesized
atgggggtgtgtcaccagat

SEQ ID NO: 19461 - DNA, 20 bp, Artificial Sequence
  chemically synthesized
tgggggtgtgtcaccagata

SEQ ID NO: 19462 - DNA, 20 bp, Artificial Sequence
  chemically synthesized
cagataaggaatctgcctaa

SEQ ID NO: 19463 - DNA, 20 bp, Artificial Sequence
  chemically synthesized
agataaggaatctgcctaac

SEQ ID NO: 19464 - DNA, 20 bp, Artificial Sequence
  chemically synthesized
ataaggaatctgcctaacag

SEQ ID NO: 19465 - DNA, 20 bp, Artificial Sequence
  chemically synthesized
taaggaatctgcctaacagg

SEQ ID NO: 19466 - DNA, 20 bp, Artificial Sequence
  chemically synthesized
ggaatctgcctaacaggagg

SEQ ID NO: 19467 - DNA, 20 bp, Artificial Sequence
  chemically synthesized
gaatctgcctaacaggaggt

SEQ ID NO: 19468 - DNA, 20 bp, Artificial Sequence
  chemically synthesized
aatctgcctaacaggaggtg

SEQ ID NO: 19469 - DNA, 20 bp, Artificial Sequence
  chemically synthesized
atctgcctaacaggaggtgg

SEQ ID NO: 19470 - DNA, 20 bp, Artificial Sequence
  chemically synthesized
gcctaacaggaggtgggggt

SEQ ID NO: 19471 - DNA, 20 bp, Artificial Sequence
  chemically synthesized
gtgggggttagacccaatat

SEQ ID NO: 19472 - DNA, 20 bp, Artificial Sequence
  chemically synthesized
tgggggttagacccaatatc

SEQ ID NO: 19473 - DNA, 20 bp, Artificial Sequence
  chemically synthesized
ggggttagacccaatatcag

SEQ ID NO: 19474 - DNA, 20 bp, Artificial Sequence
  chemically synthesized
tagacccaatatcaggagac

SEQ ID NO: 19475 - DNA, 20 bp, Artificial Sequence
  chemically synthesized
agacccaatatcaggagact

SEQ ID NO: 19476 - DNA, 20 bp, Artificial Sequence
  chemically synthesized
cccaatatcaggagactagg

SEQ ID NO: 19477 - DNA, 20 bp, Artificial Sequence
  chemically synthesized
ccaatatcaggagactagga

SEQ ID NO: 19478 - DNA, 20 bp, Artificial Sequence
  chemically synthesized
aatatcaggagactaggaag

SEQ ID NO: 19479 - DNA, 20 bp, Artificial Sequence
  chemically synthesized
atatcaggagactaggaagg

SEQ ID NO: 19480 - DNA, 20 bp, Artificial Sequence
  chemically synthesized
atcaggagactaggaaggag

SEQ ID NO: 19481 - DNA, 20 bp, Artificial Sequence
  chemically synthesized
tcaggagactaggaaggagg

SEQ ID NO: 19482 - DNA, 20 bp, Artificial Sequence
  chemically synthesized
gactaggaaggaggaggcct

SEQ ID NO: 19483 - DNA, 20 bp, Artificial Sequence
  chemically synthesized
actaggaaggaggaggccta

SEQ ID NO: 19484 - DNA, 20 bp, Artificial Sequence
  chemically synthesized
ggaaggaggaggcctaagga

SEQ ID NO: 19485 - DNA, 20 bp, Artificial Sequence
  chemically synthesized
gaaggaggaggcctaaggat

SEQ ID NO: 19486 - DNA, 20 bp, Artificial Sequence
  chemically synthesized
aaggaggaggcctaaggatg

SEQ ID NO: 19487 - DNA, 20 bp, Artificial Sequence
  chemically synthesized
tctgtcaccaatcctgtccc

SEQ ID NO: 19488 - DNA, 20 bp, Artificial Sequence
  chemically synthesized
gtcaccaatcctgtccctag

SEQ ID NO: 19489 - DNA, 20 bp, Artificial Sequence
  chemically synthesized
tgtccctagtggccccactg

SEQ ID NO: 19490 - DNA, 20 bp, Artificial Sequence
  chemically synthesized
gtccctagtggccccactgt

SEQ ID NO: 19491 - DNA, 20 bp, Artificial Sequence
  chemically synthesized
tccctagtggccccactgtg

SEQ ID NO: 19492 - DNA, 20 bp, Artificial Sequence
  chemically synthesized
ctagtggccccactgtgggg

SEQ ID NO: 19493 - DNA, 20 bp, Artificial Sequence
  chemically synthesized
agtggccccactgtggggtg

SEQ ID NO: 19494 - DNA, 20 bp, Artificial Sequence
  chemically synthesized
gtggccccactgtggggtgg

SEQ ID NO: 19495 - DNA, 20 bp, Artificial Sequence
  chemically synthesized
tggccccactgtggggtgga

SEQ ID NO: 19496 - DNA, 20 bp, Artificial Sequence
  chemically synthesized
ggccccactgtggggtggag

SEQ ID NO: 19497 - DNA, 20 bp, Artificial Sequence
  chemically synthesized
ccactgtggggtggagggga

SEQ ID NO: 19498 - DNA, 20 bp, Artificial Sequence
  chemically synthesized
ggggtggaggggacagataa

SEQ ID NO: 19499 - DNA, 20 bp, Artificial Sequence
  chemically synthesized
aggggacagataaaagtacc

SEQ ID NO: 19500 - DNA, 20 bp, Artificial Sequence
  chemically synthesized
cagataaaagtacccagaac

SEQ ID NO: 19501 - DNA, 20 bp, Artificial Sequence
  chemically synthesized
gataaaagtacccagaacca

SEQ ID NO: 19502 - DNA, 20 bp, Artificial Sequence
  chemically synthesized
agaaccagagccacattaac

SEQ ID NO: 19503 - DNA, 20 bp, Artificial Sequence
  chemically synthesized
agagccacattaaccggccc

SEQ ID NO: 19504 - DNA, 20 bp, Artificial Sequence
  chemically synthesized
gagccacattaaccggccct

SEQ ID NO: 19505 - DNA, 20 bp, Artificial Sequence
  chemically synthesized
ttaaccggccctgggaatat

SEQ ID NO: 19506 - DNA, 20 bp, Artificial Sequence
  chemically synthesized
taaccggccctgggaatata

SEQ ID NO: 19507 - DNA, 20 bp, Artificial Sequence
  chemically synthesized
ccggccctgggaatataagg

SEQ ID NO: 19508 - DNA, 20 bp, Artificial Sequence
  chemically synthesized
ctgggaatataaggtggtcc

SEQ ID NO: 19509 - DNA, 20 bp, Artificial Sequence
  chemically synthesized
aatataaggtggtcccagct

SEQ ID NO: 19510 - DNA, 20 bp, Artificial Sequence
  chemically synthesized
atataaggtggtcccagctc

SEQ ID NO: 19511 - DNA, 20 bp, Artificial Sequence
  chemically synthesized
tataaggtggtcccagctcg

SEQ ID NO: 19512 - DNA, 20 bp, Artificial Sequence
  chemically synthesized
gtggtcccagctcggggaca

SEQ ID NO: 19513 - DNA, 20 bp, Artificial Sequence
  chemically synthesized
tggtcccagctcggggacac

SEQ ID NO: 19514 - DNA, 20 bp, Artificial Sequence
  chemically synthesized
gctcggggacacaggatccc

SEQ ID NO: 19515 - DNA, 20 bp, Artificial Sequence
  chemically synthesized
tcggggacacaggatccctg

SEQ ID NO: 19516 - DNA, 20 bp, Artificial Sequence
  chemically synthesized
cggggacacaggatccctgg

SEQ ID NO: 19517 - DNA, 20 bp, Artificial Sequence
  chemically synthesized
ggacacaggatccctggagg

SEQ ID NO: 19518 - DNA, 20 bp, Artificial Sequence
  chemically synthesized
gcagcaaacatgctgtcctg

SEQ ID NO: 19519 - DNA, 20 bp, Artificial Sequence
  chemically synthesized
gcaaacatgctgtcctgaag

SEQ ID NO: 19520 - DNA, 20 bp, Artificial Sequence
  chemically synthesized
atgctgtcctgaagtggaca

SEQ ID NO: 19521 - DNA, 20 bp, Artificial Sequence
  chemically synthesized
tgctgtcctgaagtggacat

SEQ ID NO: 19522 - DNA, 20 bp, Artificial Sequence
  chemically synthesized
gctgtcctgaagtggacata

SEQ ID NO: 19523 - DNA, 20 bp, Artificial Sequence
  chemically synthesized
ctgtcctgaagtggacatag

SEQ ID NO: 19524 - DNA, 20 bp, Artificial Sequence
  chemically synthesized
ctgaagtggacataggggcc

SEQ ID NO: 19525 - DNA, 20 bp, Artificial Sequence
  chemically synthesized
tgaagtggacataggggccc

SEQ ID NO: 19526 - DNA, 20 bp, Artificial Sequence
  chemically synthesized
gtggacataggggcccgggt

SEQ ID NO: 19527 - DNA, 20 bp, Artificial Sequence
  chemically synthesized
ggacataggggcccgggttg

SEQ ID NO: 19528 - DNA, 20 bp, Artificial Sequence
  chemically synthesized
gacataggggcccgggttgg

SEQ ID NO: 19529 - DNA, 20 bp, Artificial Sequence
  chemically synthesized
ataggggcccgggttggagg

SEQ ID NO: 19530 - DNA, 20 bp, Artificial Sequence
  chemically synthesized
ggggcccgggttggaggaag

SEQ ID NO: 19531 - DNA, 20 bp, Artificial Sequence
  chemically synthesized
ccgggttggaggaagaagac

SEQ ID NO: 19532 - DNA, 20 bp, Artificial Sequence
  chemically synthesized
ttggaggaagaagactagct

SEQ ID NO: 19533 - DNA, 20 bp, Artificial Sequence
  chemically synthesized
aagaagactagctgagctct

SEQ ID NO: 19534 - DNA, 20 bp, Artificial Sequence
  chemically synthesized
tagctgagctctcggacccc

SEQ ID NO: 19535 - DNA, 20 bp, Artificial Sequence
  chemically synthesized
ctgagctctcggacccctgg

SEQ ID NO: 19536 - DNA, 20 bp, Artificial Sequence
  chemically synthesized
acccctggaagatgccatga

SEQ ID NO: 19537 - DNA, 20 bp, Artificial Sequence
  chemically synthesized
cccctggaagatgccatgac

SEQ ID NO: 19538 - DNA, 20 bp, Artificial Sequence
  chemically synthesized
ccctggaagatgccatgaca

SEQ ID NO: 19539 - DNA, 20 bp, Artificial Sequence
  chemically synthesized
cctggaagatgccatgacag

SEQ ID NO: 19540 - DNA, 20 bp, Artificial Sequence
  chemically synthesized
ctggaagatgccatgacagg

SEQ ID NO: 19541 - DNA, 20 bp, Artificial Sequence
  chemically synthesized
aagatgccatgacagggggc

SEQ ID NO: 19542 - DNA, 20 bp, Artificial Sequence
  chemically synthesized
atgccatgacagggggctgg

SEQ ID NO: 19543 - DNA, 20 bp, Artificial Sequence
  chemically synthesized
gccatgacagggggctggaa

SEQ ID NO: 19544 - DNA, 20 bp, Artificial Sequence
  chemically synthesized
tgacagggggctggaagagc

SEQ ID NO: 19545 - DNA, 20 bp, Artificial Sequence
  chemically synthesized
gggggctggaagagctagca

SEQ ID NO: 19546 - DNA, 20 bp, Artificial Sequence
  chemically synthesized
ctggaagagctagcacagac

SEQ ID NO: 19547 - DNA, 20 bp, Artificial Sequence
  chemically synthesized
ggaagagctagcacagacta

SEQ ID NO: 19548 - DNA, 20 bp, Artificial Sequence
  chemically synthesized
aagagctagcacagactaga

SEQ ID NO: 19549 - DNA, 20 bp, Artificial Sequence
  chemically synthesized
agagctagcacagactagag

SEQ ID NO: 19550 - DNA, 20 bp, Artificial Sequence
  chemically synthesized
ctagcacagactagagaggt

SEQ ID NO: 19551 - DNA, 20 bp, Artificial Sequence
  chemically synthesized
tagcacagactagagaggta

SEQ ID NO: 19552 - DNA, 20 bp, Artificial Sequence
  chemically synthesized
agcacagactagagaggtaa

SEQ ID NO: 19553 - DNA, 20 bp, Artificial Sequence
  chemically synthesized
gcacagactagagaggtaag

SEQ ID NO: 19554 - DNA, 20 bp, Artificial Sequence
  chemically synthesized
cacagactagagaggtaagg

SEQ ID NO: 19555 - DNA, 20 bp, Artificial Sequence
  chemically synthesized
acagactagagaggtaaggg

SEQ ID NO: 19556 - DNA, 20 bp, Artificial Sequence
  chemically synthesized
gactagagaggtaagggggg

SEQ ID NO: 19557 - DNA, 20 bp, Artificial Sequence
  chemically synthesized
actagagaggtaaggggggt

SEQ ID NO: 19558 - DNA, 20 bp, Artificial Sequence
  chemically synthesized
ctagagaggtaaggggggta

SEQ ID NO: 19559 - DNA, 20 bp, Artificial Sequence
  chemically synthesized
tagagaggtaaggggggtag

SEQ ID NO: 19560 - DNA, 20 bp, Artificial Sequence
  chemically synthesized
gagaggtaaggggggtaggg

SEQ ID NO: 19561 - DNA, 20 bp, Artificial Sequence
  chemically synthesized
taggggagctgcccaaatga

SEQ ID NO: 19562 - DNA, 20 bp, Artificial Sequence
  chemically synthesized
aggggagctgcccaaatgaa

SEQ ID NO: 19563 - DNA, 20 bp, Artificial Sequence
  chemically synthesized
gggagctgcccaaatgaaag

SEQ ID NO: 19564 - DNA, 20 bp, Artificial Sequence
  chemically synthesized
gctgcccaaatgaaaggagt

SEQ ID NO: 19565 - DNA, 20 bp, Artificial Sequence
  chemically synthesized
tgcccaaatgaaaggagtga

SEQ ID NO: 19566 - DNA, 20 bp, Artificial Sequence
  chemically synthesized
gcccaaatgaaaggagtgag

SEQ ID NO: 19567 - DNA, 20 bp, Artificial Sequence
  chemically synthesized
tgagaggtgacccgaatcca

SEQ ID NO: 19568 - DNA, 20 bp, Artificial Sequence
  chemically synthesized
gagaggtgacccgaatccac

SEQ ID NO: 19569 - DNA, 20 bp, Artificial Sequence
  chemically synthesized
gaggtgacccgaatccacag

SEQ ID NO: 19570 - DNA, 20 bp, Artificial Sequence
  chemically synthesized
gacccgaatccacaggagaa

SEQ ID NO: 19571 - DNA, 20 bp, Artificial Sequence
  chemically synthesized
acccgaatccacaggagaac

SEQ ID NO: 19572 - DNA, 20 bp, Artificial Sequence
  chemically synthesized
cccgaatccacaggagaacg

SEQ ID NO: 19573 - DNA, 20 bp, Artificial Sequence
  chemically synthesized
ccacaggagaacggggtgtc

SEQ ID NO: 19574 - DNA, 20 bp, Artificial Sequence
  chemically synthesized
cacaggagaacggggtgtcc

SEQ ID NO: 19575 - DNA, 20 bp, Artificial Sequence
  chemically synthesized
gagaacggggtgtccaggca

SEQ ID NO: 19576 - DNA, 20 bp, Artificial Sequence
  chemically synthesized
acggggtgtccaggcaaaga

SEQ ID NO: 19577 - DNA, 20 bp, Artificial Sequence
  chemically synthesized
ggtgtccaggcaaagaaagc

SEQ ID NO: 19578 - DNA, 20 bp, Artificial Sequence
  chemically synthesized
tgtccaggcaaagaaagcaa

SEQ ID NO: 19579 - DNA, 20 bp, Artificial Sequence
  chemically synthesized
gtccaggcaaagaaagcaag

SEQ ID NO: 19580 - DNA, 20 bp, Artificial Sequence
  chemically synthesized
aggcaaagaaagcaagagga

SEQ ID NO: 19581 - DNA, 20 bp, Artificial Sequence
  chemically synthesized
gcaaagaaagcaagaggatg

SEQ ID NO: 19582 - DNA, 20 bp, Artificial Sequence
  chemically synthesized
aaagaaagcaagaggatgga

SEQ ID NO: 19583 - DNA, 20 bp, Artificial Sequence
  chemically synthesized
aagaaagcaagaggatggag

SEQ ID NO: 19584 - DNA, 20 bp, Artificial Sequence
  chemically synthesized
aaagcaagaggatggagagg

SEQ ID NO: 19585 - DNA, 20 bp, Artificial Sequence
  chemically synthesized
agaggatggagaggtggcta

SEQ ID NO: 19586 - DNA, 20 bp, Artificial Sequence
  chemically synthesized
gatggagaggtggctaaagc

SEQ ID NO: 19587 - DNA, 20 bp, Artificial Sequence
  chemically synthesized
atggagaggtggctaaagcc

SEQ ID NO: 19588 - DNA, 20 bp, Artificial Sequence
  chemically synthesized
tggagaggtggctaaagcca

SEQ ID NO: 19589 - DNA, 20 bp, Artificial Sequence
  chemically synthesized
gagaggtggctaaagccagg

SEQ ID NO: 19590 - DNA, 20 bp, Artificial Sequence
  chemically synthesized
ggtggctaaagccagggaga

SEQ ID NO: 19591 - DNA, 20 bp, Artificial Sequence
  chemically synthesized
gtggctaaagccagggagac

SEQ ID NO: 19592 - DNA, 20 bp, Artificial Sequence
  chemically synthesized
tggctaaagccagggagacg

SEQ ID NO: 19593 - DNA, 20 bp, Artificial Sequence
  chemically synthesized
gccagggagacggggtactt

SEQ ID NO: 19594 - DNA, 20 bp, Artificial Sequence
  chemically synthesized
ccagggagacggggtacttt

SEQ ID NO: 19595 - DNA, 20 bp, Artificial Sequence
  chemically synthesized
cagggagacggggtactttg

SEQ ID NO: 19596 - DNA, 20 bp, Artificial Sequence
  chemically synthesized
cggggtactttggggttgtc

SEQ ID NO: 19597 - DNA, 20 bp, Artificial Sequence
  chemically synthesized
tttggggttgtccagaaaaa

SEQ ID NO: 19598 - DNA, 20 bp, Artificial Sequence
  chemically synthesized
ccagaaaaacggtgatgatg

SEQ ID NO: 19599 - DNA, 20 bp, Artificial Sequence
  chemically synthesized
cagaaaaacggtgatgatgc

SEQ ID NO: 19600 - DNA, 20 bp, Artificial Sequence
  chemically synthesized
cggtgatgatgcaggcctac

SEQ ID NO: 19601 - DNA, 20 bp, Artificial Sequence
  chemically synthesized
tgatgatgcaggcctacaag

SEQ ID NO: 19602 - DNA, 20 bp, Artificial Sequence
  chemically synthesized
gatgatgcaggcctacaaga

SEQ ID NO: 19603 - DNA, 20 bp, Artificial Sequence
  chemically synthesized
atgatgcaggcctacaagaa

SEQ ID NO: 19604 - DNA, 20 bp, Artificial Sequence
  chemically synthesized
tgatgcaggcctacaagaag

SEQ ID NO: 19605 - DNA, 20 bp, Artificial Sequence
  chemically synthesized
atgcaggcctacaagaaggg

SEQ ID NO: 19606 - DNA, 20 bp, Artificial Sequence
  chemically synthesized
tgcaggcctacaagaagggg

SEQ ID NO: 19607 - DNA, 20 bp, Artificial Sequence
  chemically synthesized
aggcctacaagaaggggagg

SEQ ID NO: 19608 - DNA, 20 bp, Artificial Sequence
  chemically synthesized
ggcctacaagaaggggaggc

SEQ ID NO: 19609 - DNA, 20 bp, Artificial Sequence
  chemically synthesized
aagaaggggaggcgggacgc

SEQ ID NO: 19610 - DNA, 20 bp, Artificial Sequence
  chemically synthesized
agaaggggaggcgggacgca

SEQ ID NO: 19611 - DNA, 20 bp, Artificial Sequence
  chemically synthesized
gaaggggaggcgggacgcaa

SEQ ID NO: 19612 - DNA, 20 bp, Artificial Sequence
  chemically synthesized
aggggaggcgggacgcaagg

SEQ ID NO: 19613 - DNA, 20 bp, Artificial Sequence
  chemically synthesized
gacgcaagggagacatccgt

SEQ ID NO: 19614 - DNA, 20 bp, Artificial Sequence
  chemically synthesized
cgcaagggagacatccgtcg

SEQ ID NO: 19615 - DNA, 20 bp, Artificial Sequence
  chemically synthesized
aagggagacatccgtcggag

SEQ ID NO: 19616 - DNA, 20 bp, Artificial Sequence
  chemically synthesized
agggagacatccgtcggaga

SEQ ID NO: 19617 - DNA, 20 bp, Artificial Sequence
  chemically synthesized
ccgtcggagaaggccatcct

SEQ ID NO: 19618 - DNA, 20 bp, Artificial Sequence
  chemically synthesized
agaaggccatcctaagaaac

SEQ ID NO: 19619 - DNA, 20 bp, Artificial Sequence
  chemically synthesized
aaggccatcctaagaaacga

SEQ ID NO: 19620 - DNA, 20 bp, Artificial Sequence
  chemically synthesized
ccatcctaagaaacgagaga

SEQ ID NO: 19621 - DNA, 20 bp, Artificial Sequence
  chemically synthesized
ctaagaaacgagagatggca

SEQ ID NO: 19622 - DNA, 20 bp, Artificial Sequence
  chemically synthesized
taagaaacgagagatggcac

SEQ ID NO: 19623 - DNA, 20 bp, Artificial Sequence
  chemically synthesized
acgagagatggcacaggccc

SEQ ID NO: 19624 - DNA, 20 bp, Artificial Sequence
  chemically synthesized
agagatggcacaggccccag

SEQ ID NO: 19625 - DNA, 20 bp, Artificial Sequence
  chemically synthesized
gagatggcacaggccccaga

SEQ ID NO: 19626 - DNA, 20 bp, Artificial Sequence
  chemically synthesized
gatggcacaggccccagaag

SEQ ID NO: 19627 - DNA, 20 bp, Artificial Sequence
  chemically synthesized
ggcacaggccccagaaggag

SEQ ID NO: 19628 - DNA, 20 bp, Artificial Sequence
  chemically synthesized
gcacaggccccagaaggaga

SEQ ID NO: 19629 - DNA, 20 bp, Artificial Sequence
  chemically synthesized
ggccccagaaggagaaggaa

SEQ ID NO: 19630 - DNA, 20 bp, Artificial Sequence
  chemically synthesized
gccccagaaggagaaggaaa

SEQ ID NO: 19631 - DNA, 20 bp, Artificial Sequence
  chemically synthesized
ccccagaaggagaaggaaaa

SEQ ID NO: 19632 - DNA, 20 bp, Artificial Sequence
  chemically synthesized
aggagaaggaaaagggaacc

SEQ ID NO: 19633 - DNA, 20 bp, Artificial Sequence
  chemically synthesized
gaaggaaaagggaacccagc

SEQ ID NO: 19634 - DNA, 20 bp, Artificial Sequence
  chemically synthesized
aaaagggaacccagcgagtg

SEQ ID NO: 19635 - DNA, 20 bp, Artificial Sequence
  chemically synthesized
gggaacccagcgagtgaaga

SEQ ID NO: 19636 - DNA, 20 bp, Artificial Sequence
  chemically synthesized
cccagcgagtgaagacggca

SEQ ID NO: 19637 - DNA, 20 bp, Artificial Sequence
  chemically synthesized
ccagcgagtgaagacggcat

SEQ ID NO: 19638 - DNA, 20 bp, Artificial Sequence
  chemically synthesized
cagcgagtgaagacggcatg

SEQ ID NO: 19639 - DNA, 20 bp, Artificial Sequence
  chemically synthesized
gagtgaagacggcatggggt

SEQ ID NO: 19640 - DNA, 20 bp, Artificial Sequence
  chemically synthesized
agtgaagacggcatggggtt

SEQ ID NO: 19641 - DNA, 20 bp, Artificial Sequence
  chemically synthesized
aagacggcatggggttgggt

SEQ ID NO: 19642 - DNA, 20 bp, Artificial Sequence
  chemically synthesized
agacggcatggggttgggtg

SEQ ID NO: 19643 - DNA, 20 bp, Artificial Sequence
  chemically synthesized
gacggcatggggttgggtga

SEQ ID NO: 19644 - DNA, 20 bp, Artificial Sequence
  chemically synthesized
cggcatggggttgggtgagg

SEQ ID NO: 19645 - DNA, 20 bp, Artificial Sequence
  chemically synthesized
ggcatggggttgggtgaggg

SEQ ID NO: 19646 - DNA, 20 bp, Artificial Sequence
  chemically synthesized
catggggttgggtgagggag

SEQ ID NO: 19647 - DNA, 20 bp, Artificial Sequence
  chemically synthesized
tggggttgggtgagggagga

SEQ ID NO: 19648 - DNA, 20 bp, Artificial Sequence
  chemically synthesized
ggtgagggaggagagatgcc

SEQ ID NO: 19649 - DNA, 20 bp, Artificial Sequence
  chemically synthesized
tgagggaggagagatgcccg

SEQ ID NO: 19650 - DNA, 20 bp, Artificial Sequence
  chemically synthesized
agggaggagagatgcccgga

SEQ ID NO: 19651 - DNA, 20 bp, Artificial Sequence
  chemically synthesized
gggaggagagatgcccggag

SEQ ID NO: 19652 - DNA, 20 bp, Artificial Sequence
  chemically synthesized
agagatgcccggagaggacc

SEQ ID NO: 19653 - DNA, 20 bp, Artificial Sequence
  chemically synthesized
gcccggagaggacccagaca

SEQ ID NO: 19654 - DNA, 20 bp, Artificial Sequence
  chemically synthesized
cccggagaggacccagacac

SEQ ID NO: 19655 - DNA, 20 bp, Artificial Sequence
  chemically synthesized
ccggagaggacccagacacg

SEQ ID NO: 19656 - DNA, 20 bp, Artificial Sequence
  chemically synthesized
ggagaggacccagacacggg

SEQ ID NO: 19657 - DNA, 20 bp, Artificial Sequence
  chemically synthesized
gagaggacccagacacgggg

SEQ ID NO: 19658 - DNA, 20 bp, Artificial Sequence
  chemically synthesized
agacacggggaggatccgct

SEQ ID NO: 19659 - DNA, 20 bp, Artificial Sequence
  chemically synthesized
acacggggaggatccgctca

SEQ ID NO: 19660 - DNA, 20 bp, Artificial Sequence
  chemically synthesized
cacggggaggatccgctcag

SEQ ID NO: 19661 - DNA, 20 bp, Artificial Sequence
  chemically synthesized
tccgctcagaggacatcacg

SEQ ID NO: 19662 - DNA, 20 bp, Artificial Sequence
  chemically synthesized
tcagaggacatcacgtggtg

SEQ ID NO: 19663 - DNA, 20 bp, Artificial Sequence
  chemically synthesized
acatcacgtggtgcagcgcc

SEQ ID NO: 19664 - DNA, 20 bp, Artificial Sequence
  chemically synthesized
tcacgtggtgcagcgccgag

SEQ ID NO: 19665 - DNA, 20 bp, Artificial Sequence
  chemically synthesized
cacgtggtgcagcgccgaga

SEQ ID NO: 19666 - DNA, 20 bp, Artificial Sequence
  chemically synthesized
gtggtgcagcgccgagaagg

SEQ ID NO: 19667 - DNA, 20 bp, Artificial Sequence
  chemically synthesized
gcgccgagaaggaagtgctc

SEQ ID NO: 19668 - DNA, 20 bp, Artificial Sequence
  chemically synthesized
cgagaaggaagtgctccgga

SEQ ID NO: 19669 - DNA, 20 bp, Artificial Sequence
  chemically synthesized
agaaggaagtgctccggaaa

SEQ ID NO: 19670 - DNA, 20 bp, Artificial Sequence
  chemically synthesized
tgctccggaaagagcatcct

SEQ ID NO: 19671 - DNA, 20 bp, Artificial Sequence
  chemically synthesized
gctccggaaagagcatcctt

SEQ ID NO: 19672 - DNA, 20 bp, Artificial Sequence
  chemically synthesized
ccggaaagagcatccttggg

SEQ ID NO: 19673 - DNA, 20 bp, Artificial Sequence
  chemically synthesized
agcatccttgggcagcaaca

SEQ ID NO: 19674 - DNA, 20 bp, Artificial Sequence
  chemically synthesized
atccttgggcagcaacacag

SEQ ID NO: 19675 - DNA, 20 bp, Artificial Sequence
  chemically synthesized
ccttgggcagcaacacagca

SEQ ID NO: 19676 - DNA, 20 bp, Artificial Sequence
  chemically synthesized
ttgggcagcaacacagcaga

SEQ ID NO: 19677 - DNA, 20 bp, Artificial Sequence
  chemically synthesized
gcagcaacacagcagagagc

SEQ ID NO: 19678 - DNA, 20 bp, Artificial Sequence
  chemically synthesized
cagcaacacagcagagagca

SEQ ID NO: 19679 - DNA, 20 bp, Artificial Sequence
  chemically synthesized
agcaacacagcagagagcaa

SEQ ID NO: 19680 - DNA, 20 bp, Artificial Sequence
  chemically synthesized
gcaacacagcagagagcaag

SEQ ID NO: 19681 - DNA, 20 bp, Artificial Sequence
  chemically synthesized
acacagcagagagcaagggg

SEQ ID NO: 19682 - DNA, 20 bp, Artificial Sequence
  chemically synthesized
acagcagagagcaaggggaa

SEQ ID NO: 19683 - DNA, 20 bp, Artificial Sequence
  chemically synthesized
cagcagagagcaaggggaag

SEQ ID NO: 19684 - DNA, 20 bp, Artificial Sequence
  chemically synthesized
agcagagagcaaggggaaga

SEQ ID NO: 19685 - DNA, 20 bp, Artificial Sequence
  chemically synthesized
cagagagcaaggggaagagg

SEQ ID NO: 19686 - DNA, 20 bp, Artificial Sequence
  chemically synthesized
agagcaaggggaagagggag

SEQ ID NO: 19687 - DNA, 20 bp, Artificial Sequence
  chemically synthesized
agcaaggggaagagggagtg

SEQ ID NO: 19688 - DNA, 20 bp, Artificial Sequence
  chemically synthesized
gcaaggggaagagggagtgg

SEQ ID NO: 19689 - DNA, 20 bp, Artificial Sequence
  chemically synthesized
aggggaagagggagtggagg

SEQ ID NO: 19690 - DNA, 20 bp, Artificial Sequence
  chemically synthesized
gaagagggagtggaggaaga

SEQ ID NO: 19691 - DNA, 20 bp, Artificial Sequence
  chemically synthesized
gtggaggaagacggaacctg

SEQ ID NO: 19692 - DNA, 20 bp, Artificial Sequence
  chemically synthesized
tggaggaagacggaacctga

SEQ ID NO: 19693 - DNA, 20 bp, Artificial Sequence
  chemically synthesized
gaggaagacggaacctgaag

SEQ ID NO: 19694 - DNA, 20 bp, Artificial Sequence
  chemically synthesized
aggaagacggaacctgaagg

SEQ ID NO: 19695 - DNA, 20 bp, Artificial Sequence
  chemically synthesized
aagacggaacctgaaggagg

SEQ ID NO: 19696 - DNA, 20 bp, Artificial Sequence
  chemically synthesized
acggaacctgaaggaggcgg

SEQ ID NO: 19697 - DNA, 20 bp, Artificial Sequence
  chemically synthesized
cggaacctgaaggaggcggc

SEQ ID NO: 19698 - DNA, 20 bp, Artificial Sequence
  chemically synthesized
ggaacctgaaggaggcggca

SEQ ID NO: 19699 - DNA, 20 bp, Artificial Sequence
  chemically synthesized
acctgaaggaggcggcaggg

SEQ ID NO: 19700 - DNA, 20 bp, Artificial Sequence
  chemically synthesized
cctgaaggaggcggcaggga

SEQ ID NO: 19701 - DNA, 20 bp, Artificial Sequence
  chemically synthesized
ggaggcggcagggaaggatc

SEQ ID NO: 19702 - DNA, 20 bp, Artificial Sequence
  chemically synthesized
gaggcggcagggaaggatct

SEQ ID NO: 19703 - DNA, 20 bp, Artificial Sequence
  chemically synthesized
cggcagggaaggatctgggc

SEQ ID NO: 19704 - DNA, 20 bp, Artificial Sequence
  chemically synthesized
ggaaggatctgggccagccg

SEQ ID NO: 19705 - DNA, 20 bp, Artificial Sequence
  chemically synthesized
aaggatctgggccagccgta

SEQ ID NO: 19706 - DNA, 20 bp, Artificial Sequence
  chemically synthesized
aggatctgggccagccgtag

SEQ ID NO: 19707 - DNA, 20 bp, Artificial Sequence
  chemically synthesized
ggccagccgtagaggtgacc

SEQ ID NO: 19708 - DNA, 20 bp, Artificial Sequence
  chemically synthesized
gccagccgtagaggtgaccc

SEQ ID NO: 19709 - DNA, 20 bp, Artificial Sequence
  chemically synthesized
gtagaggtgacccaggccac

SEQ ID NO: 19710 - DNA, 20 bp, Artificial Sequence
  chemically synthesized
gtgacccaggccacaagctg

SEQ ID NO: 19711 - DNA, 20 bp, Artificial Sequence
  chemically synthesized
cccaggccacaagctgcaga

SEQ ID NO: 19712 - DNA, 20 bp, Artificial Sequence
  chemically synthesized
ggccacaagctgcagacaga

SEQ ID NO: 19713 - DNA, 20 bp, Artificial Sequence
  chemically synthesized
cacaagctgcagacagaaag

SEQ ID NO: 19714 - DNA, 20 bp, Artificial Sequence
  chemically synthesized
gctgcagacagaaagcggca

SEQ ID NO: 19715 - DNA, 20 bp, Artificial Sequence
  chemically synthesized
ctgcagacagaaagcggcac

SEQ ID NO: 19716 - DNA, 20 bp, Artificial Sequence
  chemically synthesized
gacagaaagcggcacaggcc

SEQ ID NO: 19717 - DNA, 20 bp, Artificial Sequence
  chemically synthesized
acagaaagcggcacaggccc

SEQ ID NO: 19718 - DNA, 20 bp, Artificial Sequence
  chemically synthesized
cagaaagcggcacaggccca

SEQ ID NO: 19719 - DNA, 20 bp, Artificial Sequence
  chemically synthesized
agaaagcggcacaggcccag

SEQ ID NO: 19720 - DNA, 20 bp, Artificial Sequence
  chemically synthesized
aaagcggcacaggcccaggg

SEQ ID NO: 19721 - DNA, 20 bp, Artificial Sequence
  chemically synthesized
agcggcacaggcccagggga

SEQ ID NO: 19722 - DNA, 20 bp, Artificial Sequence
  chemically synthesized
caggcccaggggagagaatg

SEQ ID NO: 19723 - DNA, 20 bp, Artificial Sequence
  chemically synthesized
aggcccaggggagagaatgc

SEQ ID NO: 19724 - DNA, 20 bp, Artificial Sequence
  chemically synthesized
ccaggggagagaatgcaggt

SEQ ID NO: 19725 - DNA, 20 bp, Artificial Sequence
  chemically synthesized
aggggagagaatgcaggtca

SEQ ID NO: 19726 - DNA, 20 bp, Artificial Sequence
  chemically synthesized
gagagaatgcaggtcagaga

SEQ ID NO: 19727 - DNA, 20 bp, Artificial Sequence
  chemically synthesized
agaatgcaggtcagagaaag

SEQ ID NO: 19728 - DNA, 20 bp, Artificial Sequence
  chemically synthesized
gaatgcaggtcagagaaagc

SEQ ID NO: 19729 - DNA, 20 bp, Artificial Sequence
  chemically synthesized
cagagaaagcaggacctgcc

SEQ ID NO: 19730 - DNA, 20 bp, Artificial Sequence
  chemically synthesized
agagaaagcaggacctgcct

SEQ ID NO: 19731 - DNA, 20 bp, Artificial Sequence
  chemically synthesized
gaaagcaggacctgcctggg

SEQ ID NO: 19732 - DNA, 20 bp, Artificial Sequence
  chemically synthesized
aaagcaggacctgcctggga

SEQ ID NO: 19733 - DNA, 20 bp, Artificial Sequence
  chemically synthesized
aagcaggacctgcctgggaa

SEQ ID NO: 19734 - DNA, 20 bp, Artificial Sequence
  chemically synthesized
agcaggacctgcctgggaag

SEQ ID NO: 19735 - DNA, 20 bp, Artificial Sequence
  chemically synthesized
acctgcctgggaaggggaaa

SEQ ID NO: 19736 - DNA, 20 bp, Artificial Sequence
  chemically synthesized
tgcctgggaaggggaaacag

SEQ ID NO: 19737 - DNA, 20 bp, Artificial Sequence
  chemically synthesized
gcctgggaaggggaaacagt

SEQ ID NO: 19738 - DNA, 20 bp, Artificial Sequence
  chemically synthesized
gggaaggggaaacagtgggc

SEQ ID NO: 19739 - DNA, 20 bp, Artificial Sequence
  chemically synthesized
gaaggggaaacagtgggcca

SEQ ID NO: 19740 - DNA, 20 bp, Artificial Sequence
  chemically synthesized
aaggggaaacagtgggccag

SEQ ID NO: 19741 - DNA, 20 bp, Artificial Sequence
  chemically synthesized
gggaaacagtgggccagagg

SEQ ID NO: 19742 - DNA, 20 bp, Artificial Sequence
  chemically synthesized
acagtgggccagaggcggcg

SEQ ID NO: 19743 - DNA, 20 bp, Artificial Sequence
  chemically synthesized
gtgggccagaggcggcgcag

SEQ ID NO: 19744 - DNA, 20 bp, Artificial Sequence
  chemically synthesized
gccagaggcggcgcagaagc

SEQ ID NO: 19745 - DNA, 20 bp, Artificial Sequence
  chemically synthesized
agaggcggcgcagaagccag

SEQ ID NO: 19746 - DNA, 20 bp, Artificial Sequence
  chemically synthesized
aggcggcgcagaagccagta

SEQ ID NO: 19747 - DNA, 20 bp, Artificial Sequence
  chemically synthesized
gcagaagccagtagagctca

SEQ ID NO: 19748 - DNA, 20 bp, Artificial Sequence
  chemically synthesized
gaagccagtagagctcaaag

SEQ ID NO: 19749 - DNA, 20 bp, Artificial Sequence
  chemically synthesized
cagtagagctcaaagtggtc

SEQ ID NO: 19750 - DNA, 20 bp, Artificial Sequence
  chemically synthesized
agctcaaagtggtccggact

SEQ ID NO: 19751 - DNA, 20 bp, Artificial Sequence
  chemically synthesized
gctcaaagtggtccggactc

SEQ ID NO: 19752 - DNA, 20 bp, Artificial Sequence
  chemically synthesized
tcaaagtggtccggactcag

SEQ ID NO: 19753 - DNA, 20 bp, Artificial Sequence
  chemically synthesized
aaagtggtccggactcagga

SEQ ID NO: 19754 - DNA, 20 bp, Artificial Sequence
  chemically synthesized
agtggtccggactcaggaga

SEQ ID NO: 19755 - DNA, 20 bp, Artificial Sequence
  chemically synthesized
gtccggactcaggagagaga

SEQ ID NO: 19756 - DNA, 20 bp, Artificial Sequence
  chemically synthesized
cggactcaggagagagacgg

SEQ ID NO: 19757 - DNA, 20 bp, Artificial Sequence
  chemically synthesized
caggagagagacggcagcgt

SEQ ID NO: 19758 - DNA, 20 bp, Artificial Sequence
  chemically synthesized
ggagagagacggcagcgtta

SEQ ID NO: 19759 - DNA, 20 bp, Artificial Sequence
  chemically synthesized
gagagagacggcagcgttag

SEQ ID NO: 19760 - DNA, 20 bp, Artificial Sequence
  chemically synthesized
agagagacggcagcgttaga

SEQ ID NO: 19761 - DNA, 20 bp, Artificial Sequence
  chemically synthesized
gagacggcagcgttagaggg

SEQ ID NO: 19762 - DNA, 20 bp, Artificial Sequence
  chemically synthesized
gacggcagcgttagagggca

SEQ ID NO: 19763 - DNA, 20 bp, Artificial Sequence
  chemically synthesized
agcgttagagggcagagttc

SEQ ID NO: 19764 - DNA, 20 bp, Artificial Sequence
  chemically synthesized
gttagagggcagagttccgg

SEQ ID NO: 19765 - DNA, 20 bp, Artificial Sequence
  chemically synthesized
agggcagagttccggcggca

SEQ ID NO: 19766 - DNA, 20 bp, Artificial Sequence
  chemically synthesized
cagagttccggcggcacagc

SEQ ID NO: 19767 - DNA, 20 bp, Artificial Sequence
  chemically synthesized
agagttccggcggcacagca

SEQ ID NO: 19768 - DNA, 20 bp, Artificial Sequence
  chemically synthesized
gagttccggcggcacagcaa

SEQ ID NO: 19769 - DNA, 20 bp, Artificial Sequence
  chemically synthesized
ggcggcacagcaagggcact

SEQ ID NO: 19770 - DNA, 20 bp, Artificial Sequence
  chemically synthesized
gcggcacagcaagggcactc

SEQ ID NO: 19771 - DNA, 20 bp, Artificial Sequence
  chemically synthesized
cggcacagcaagggcactcg

SEQ ID NO: 19772 - DNA, 20 bp, Artificial Sequence
  chemically synthesized
ggcacagcaagggcactcgg

SEQ ID NO: 19773 - DNA, 20 bp, Artificial Sequence
  chemically synthesized
cagcaagggcactcgggggc

SEQ ID NO: 19774 - DNA, 20 bp, Artificial Sequence
  chemically synthesized
gcaagggcactcgggggcga

SEQ ID NO: 19775 - DNA, 20 bp, Artificial Sequence
  chemically synthesized
caagggcactcgggggcgag

SEQ ID NO: 19776 - DNA, 20 bp, Artificial Sequence
  chemically synthesized
agggcactcgggggcgagag

SEQ ID NO: 19777 - DNA, 20 bp, Artificial Sequence
  chemically synthesized
gggcactcgggggcgagagg

SEQ ID NO: 19778 - DNA, 20 bp, Artificial Sequence
  chemically synthesized
ggcactcgggggcgagagga

SEQ ID NO: 19779 - DNA, 20 bp, Artificial Sequence
  chemically synthesized
actcgggggcgagaggaggg

SEQ ID NO: 19780 - DNA, 20 bp, Artificial Sequence
  chemically synthesized
ggcgagaggagggcagcgca

SEQ ID NO: 19781 - DNA, 20 bp, Artificial Sequence
  chemically synthesized
agggcagcgcaaagtgacaa

SEQ ID NO: 19782 - DNA, 20 bp, Artificial Sequence
  chemically synthesized
cagcgcaaagtgacaatggc

SEQ ID NO: 19783 - DNA, 20 bp, Artificial Sequence
  chemically synthesized
agcgcaaagtgacaatggcc

SEQ ID NO: 19784 - DNA, 20 bp, Artificial Sequence
  chemically synthesized
gcgcaaagtgacaatggcca

SEQ ID NO: 19785 - DNA, 20 bp, Artificial Sequence
  chemically synthesized
aaagtgacaatggccagggc

SEQ ID NO: 19786 - DNA, 20 bp, Artificial Sequence
  chemically synthesized
aagtgacaatggccagggcc

SEQ ID NO: 19787 - DNA, 20 bp, Artificial Sequence
  chemically synthesized
tgacaatggccagggccagg

SEQ ID NO: 19788 - DNA, 20 bp, Artificial Sequence
  chemically synthesized
aatggccagggccaggcaga

SEQ ID NO: 19789 - DNA, 20 bp, Artificial Sequence
  chemically synthesized
ccagggccaggcagatagac

SEQ ID NO: 19790 - DNA, 20 bp, Artificial Sequence
  chemically synthesized
ccaggcagatagaccagact

SEQ ID NO: 19791 - DNA, 20 bp, Artificial Sequence
  chemically synthesized
agatagaccagactgagcta

SEQ ID NO: 19792 - DNA, 20 bp, Artificial Sequence
  chemically synthesized
gatagaccagactgagctat

SEQ ID NO: 19793 - DNA, 20 bp, Artificial Sequence
  chemically synthesized
tagaccagactgagctatgg

SEQ ID NO: 19794 - DNA, 20 bp, Artificial Sequence
  chemically synthesized
ccagactgagctatgggagc

SEQ ID NO: 19795 - DNA, 20 bp, Artificial Sequence
  chemically synthesized
ctgagctatgggagctggct

SEQ ID NO: 19796 - DNA, 20 bp, Artificial Sequence
  chemically synthesized
tgagctatgggagctggctc

SEQ ID NO: 19797 - DNA, 20 bp, Artificial Sequence
  chemically synthesized
tatgggagctggctcaggtt

SEQ ID NO: 19798 - DNA, 20 bp, Artificial Sequence
  chemically synthesized
atgggagctggctcaggttc

SEQ ID NO: 19799 - DNA, 20 bp, Artificial Sequence
  chemically synthesized
gggagctggctcaggttcag

SEQ ID NO: 19800 - DNA, 20 bp, Artificial Sequence
  chemically synthesized
gagctggctcaggttcagga

SEQ ID NO: 19801 - DNA, 20 bp, Artificial Sequence
  chemically synthesized
agctggctcaggttcaggag

SEQ ID NO: 19802 - DNA, 20 bp, Artificial Sequence
  chemically synthesized
gctggctcaggttcaggaga

SEQ ID NO: 19803 - DNA, 20 bp, Artificial Sequence
  chemically synthesized
ggctcaggttcaggagaggg

SEQ ID NO: 19804 - DNA, 20 bp, Artificial Sequence
  chemically synthesized
gctcaggttcaggagagggc

SEQ ID NO: 19805 - DNA, 20 bp, Artificial Sequence
  chemically synthesized
ctcaggttcaggagagggca

SEQ ID NO: 19806 - DNA, 20 bp, Artificial Sequence
  chemically synthesized
aggttcaggagagggcaggg

SEQ ID NO: 19807 - DNA, 20 bp, Artificial Sequence
  chemically synthesized
ggttcaggagagggcagggc

SEQ ID NO: 19808 - DNA, 20 bp, Artificial Sequence
  chemically synthesized
gttcaggagagggcagggca

SEQ ID NO: 19809 - DNA, 20 bp, Artificial Sequence
  chemically synthesized
caggagagggcagggcaggg

SEQ ID NO: 19810 - DNA, 20 bp, Artificial Sequence
  chemically synthesized
aggagagggcagggcaggga

SEQ ID NO: 19811 - DNA, 20 bp, Artificial Sequence
  chemically synthesized
gagagggcagggcagggaag

SEQ ID NO: 19812 - DNA, 20 bp, Artificial Sequence
  chemically synthesized
gcagggcagggaaggagaca

SEQ ID NO: 19813 - DNA, 20 bp, Artificial Sequence
  chemically synthesized
gcagggaaggagacaaagtc

SEQ ID NO: 19814 - DNA, 20 bp, Artificial Sequence
  chemically synthesized
cagggaaggagacaaagtcc

SEQ ID NO: 19815 - DNA, 20 bp, Artificial Sequence
  chemically synthesized
aaggagacaaagtccaggac

SEQ ID NO: 19816 - DNA, 20 bp, Artificial Sequence
  chemically synthesized
agacaaagtccaggaccggc

SEQ ID NO: 19817 - DNA, 20 bp, Artificial Sequence
  chemically synthesized
acaaagtccaggaccggctg

SEQ ID NO: 19818 - DNA, 20 bp, Artificial Sequence
  chemically synthesized
caaagtccaggaccggctgg

SEQ ID NO: 19819 - DNA, 20 bp, Artificial Sequence
  chemically synthesized
aaagtccaggaccggctgga

SEQ ID NO: 19820 - DNA, 20 bp, Artificial Sequence
  chemically synthesized
aagtccaggaccggctggag

SEQ ID NO: 19821 - DNA, 20 bp, Artificial Sequence
  chemically synthesized
cggctggaggggctcaacat

SEQ ID NO: 19822 - DNA, 20 bp, Artificial Sequence
  chemically synthesized
ctggaggggctcaacatcgg

SEQ ID NO: 19823 - DNA, 20 bp, Artificial Sequence
  chemically synthesized
ggaggggctcaacatcggaa

SEQ ID NO: 19824 - DNA, 20 bp, Artificial Sequence
  chemically synthesized
gaggggctcaacatcggaag

SEQ ID NO: 19825 - DNA, 20 bp, Artificial Sequence
  chemically synthesized
aggggctcaacatcggaaga

SEQ ID NO: 19826 - DNA, 20 bp, Artificial Sequence
  chemically synthesized
ggggctcaacatcggaagag

SEQ ID NO: 19827 - DNA, 20 bp, Artificial Sequence
  chemically synthesized
gctcaacatcggaagagggg

SEQ ID NO: 19828 - DNA, 20 bp, Artificial Sequence
  chemically synthesized
acatcggaagaggggaagtc

SEQ ID NO: 19829 - DNA, 20 bp, Artificial Sequence
  chemically synthesized
catcggaagaggggaagtcg

SEQ ID NO: 19830 - DNA, 20 bp, Artificial Sequence
  chemically synthesized
atcggaagaggggaagtcga

SEQ ID NO: 19831 - DNA, 20 bp, Artificial Sequence
  chemically synthesized
cggaagaggggaagtcgagg

SEQ ID NO: 19832 - DNA, 20 bp, Artificial Sequence
  chemically synthesized
ggaagaggggaagtcgaggg

SEQ ID NO: 19833 - DNA, 20 bp, Artificial Sequence
  chemically synthesized
gaagaggggaagtcgaggga

SEQ ID NO: 19834 - DNA, 20 bp, Artificial Sequence
  chemically synthesized
aggggaagtcgagggaggga

SEQ ID NO: 19835 - DNA, 20 bp, Artificial Sequence
  chemically synthesized
gaagtcgagggagggatggt

SEQ ID NO: 19836 - DNA, 20 bp, Artificial Sequence
  chemically synthesized
aagtcgagggagggatggta

SEQ ID NO: 19837 - DNA, 20 bp, Artificial Sequence
  chemically synthesized
gtcgagggagggatggtaag

SEQ ID NO: 19838 - DNA, 20 bp, Artificial Sequence
  chemically synthesized
tcgagggagggatggtaagg

SEQ ID NO: 19839 - DNA, 20 bp, Artificial Sequence
  chemically synthesized
ggatggtaaggaggactgca

SEQ ID NO: 19840 - DNA, 20 bp, Artificial Sequence
  chemically synthesized
gatggtaaggaggactgcat

SEQ ID NO: 19841 - DNA, 20 bp, Artificial Sequence
  chemically synthesized
gtaaggaggactgcatgggt

SEQ ID NO: 19842 - DNA, 20 bp, Artificial Sequence
  chemically synthesized
gaggactgcatgggtcagca

SEQ ID NO: 19843 - DNA, 20 bp, Artificial Sequence
  chemically synthesized
aggactgcatgggtcagcac

SEQ ID NO: 19844 - DNA, 20 bp, Artificial Sequence
  chemically synthesized
tgggtcagcacaggctgcca

SEQ ID NO: 19845 - DNA, 20 bp, Artificial Sequence
  chemically synthesized
tcagcacaggctgccaaagc

SEQ ID NO: 19846 - DNA, 20 bp, Artificial Sequence
  chemically synthesized
cagcacaggctgccaaagcc

SEQ ID NO: 19847 - DNA, 20 bp, Artificial Sequence
  chemically synthesized
agcacaggctgccaaagcca

SEQ ID NO: 19848 - DNA, 20 bp, Artificial Sequence
  chemically synthesized
caggctgccaaagccagggc

SEQ ID NO: 19849 - DNA, 20 bp, Artificial Sequence
  chemically synthesized
gccaaagccagggccagtta

SEQ ID NO: 19850 - DNA, 20 bp, Artificial Sequence
  chemically synthesized
cagttaaagcgactccaatg

SEQ ID NO: 19851 - DNA, 20 bp, Artificial Sequence
  chemically synthesized
ttaaagcgactccaatgcgg

SEQ ID NO: 19852 - DNA, 20 bp, Artificial Sequence
  chemically synthesized
aaagcgactccaatgcggaa

SEQ ID NO: 19853 - DNA, 20 bp, Artificial Sequence
  chemically synthesized
agcgactccaatgcggaaga

SEQ ID NO: 19854 - DNA, 20 bp, Artificial Sequence
  chemically synthesized
gactccaatgcggaagagag

SEQ ID NO: 19855 - DNA, 20 bp, Artificial Sequence
  chemically synthesized
actccaatgcggaagagagt

SEQ ID NO: 19856 - DNA, 20 bp, Artificial Sequence
  chemically synthesized
atgcggaagagagtaggtcg

SEQ ID NO: 19857 - DNA, 20 bp, Artificial Sequence
  chemically synthesized
tgcggaagagagtaggtcga

SEQ ID NO: 19858 - DNA, 20 bp, Artificial Sequence
  chemically synthesized
gcggaagagagtaggtcgaa

SEQ ID NO: 19859 - DNA, 20 bp, Artificial Sequence
  chemically synthesized
cggaagagagtaggtcgaag

SEQ ID NO: 19860 - DNA, 20 bp, Artificial Sequence
  chemically synthesized
gagagtaggtcgaaggggaa

SEQ ID NO: 19861 - DNA, 20 bp, Artificial Sequence
  chemically synthesized
gtaggtcgaaggggaatggt

SEQ ID NO: 19862 - DNA, 20 bp, Artificial Sequence
  chemically synthesized
taggtcgaaggggaatggta

SEQ ID NO: 19863 - DNA, 20 bp, Artificial Sequence
  chemically synthesized
ggtcgaaggggaatggtaag

SEQ ID NO: 19864 - DNA, 20 bp, Artificial Sequence
  chemically synthesized
gtcgaaggggaatggtaagg

SEQ ID NO: 19865 - DNA, 20 bp, Artificial Sequence
  chemically synthesized
aggggaatggtaaggaggcc

SEQ ID NO: 19866 - DNA, 20 bp, Artificial Sequence
  chemically synthesized
ggggaatggtaaggaggcct

SEQ ID NO: 19867 - DNA, 20 bp, Artificial Sequence
  chemically synthesized
gggaatggtaaggaggcctg

SEQ ID NO: 19868 - DNA, 20 bp, Artificial Sequence
  chemically synthesized
aatggtaaggaggcctgggg

SEQ ID NO: 19869 - DNA, 20 bp, Artificial Sequence
  chemically synthesized
tggtaaggaggcctggggca

SEQ ID NO: 19870 - DNA, 20 bp, Artificial Sequence
  chemically synthesized
taaggaggcctggggcagag

SEQ ID NO: 19871 - DNA, 20 bp, Artificial Sequence
  chemically synthesized
gaggcctggggcagagtggt

SEQ ID NO: 19872 - DNA, 20 bp, Artificial Sequence
  chemically synthesized
ctggggcagagtggtcagca

SEQ ID NO: 19873 - DNA, 20 bp, Artificial Sequence
  chemically synthesized
ggggcagagtggtcagcaca

SEQ ID NO: 19874 - DNA, 20 bp, Artificial Sequence
  chemically synthesized
gcagagtggtcagcacagag

SEQ ID NO: 19875 - DNA, 20 bp, Artificial Sequence
  chemically synthesized
gtggtcagcacagagtggct

SEQ ID NO: 19876 - DNA, 20 bp, Artificial Sequence
  chemically synthesized
cagcacagagtggctaagcc

SEQ ID NO: 19877 - DNA, 20 bp, Artificial Sequence
  chemically synthesized
agcacagagtggctaagccc

SEQ ID NO: 19878 - DNA, 20 bp, Artificial Sequence
  chemically synthesized
gcacagagtggctaagccca

SEQ ID NO: 19879 - DNA, 20 bp, Artificial Sequence
  chemically synthesized
agagtggctaagcccagggc

SEQ ID NO: 19880 - DNA, 20 bp, Artificial Sequence
  chemically synthesized
gctaagcccagggccagttg

SEQ ID NO: 19881 - DNA, 20 bp, Artificial Sequence
  chemically synthesized
aagcccagggccagttgaag

SEQ ID NO: 19882 - DNA, 20 bp, Artificial Sequence
  chemically synthesized
cagttgaagcggctccaatt

SEQ ID NO: 19883 - DNA, 20 bp, Artificial Sequence
  chemically synthesized
ttgaagcggctccaattcgg

SEQ ID NO: 19884 - DNA, 20 bp, Artificial Sequence
  chemically synthesized
aagcggctccaattcggaag

SEQ ID NO: 19885 - DNA, 20 bp, Artificial Sequence
  chemically synthesized
agcggctccaattcggaagt

SEQ ID NO: 19886 - DNA, 20 bp, Artificial Sequence
  chemically synthesized
gcggctccaattcggaagtg

SEQ ID NO: 19887 - DNA, 20 bp, Artificial Sequence
  chemically synthesized
gctccaattcggaagtgggg

SEQ ID NO: 19888 - DNA, 20 bp, Artificial Sequence
  chemically synthesized
attcggaagtggggtggtcg

SEQ ID NO: 19889 - DNA, 20 bp, Artificial Sequence
  chemically synthesized
ttcggaagtggggtggtcga

SEQ ID NO: 19890 - DNA, 20 bp, Artificial Sequence
  chemically synthesized
tcggaagtggggtggtcgaa

SEQ ID NO: 19891 - DNA, 20 bp, Artificial Sequence
  chemically synthesized
cggaagtggggtggtcgaag

SEQ ID NO: 19892 - DNA, 20 bp, Artificial Sequence
  chemically synthesized
gtggggtggtcgaaggggaa

SEQ ID NO: 19893 - DNA, 20 bp, Artificial Sequence
  chemically synthesized
ggtggtcgaaggggaatggt

SEQ ID NO: 19894 - DNA, 20 bp, Artificial Sequence
  chemically synthesized
gtggtcgaaggggaatggta

SEQ ID NO: 19895 - DNA, 20 bp, Artificial Sequence
  chemically synthesized
tggtcgaaggggaatggtaa

SEQ ID NO: 19896 - DNA, 20 bp, Artificial Sequence
  chemically synthesized
ggtcgaaggggaatggtaag

SEQ ID NO: 19897 - DNA, 20 bp, Artificial Sequence
  chemically synthesized
gtcgaaggggaatggtaagg

SEQ ID NO: 19898 - DNA, 20 bp, Artificial Sequence
  chemically synthesized
aggggaatggtaagggggac

SEQ ID NO: 19899 - DNA, 20 bp, Artificial Sequence
  chemically synthesized
ggggaatggtaagggggact

SEQ ID NO: 19900 - DNA, 20 bp, Artificial Sequence
  chemically synthesized
aatggtaagggggactggga

SEQ ID NO: 19901 - DNA, 20 bp, Artificial Sequence
  chemically synthesized
atggtaagggggactgggac

SEQ ID NO: 19902 - DNA, 20 bp, Artificial Sequence
  chemically synthesized
tggtaagggggactgggacg

SEQ ID NO: 19903 - DNA, 20 bp, Artificial Sequence
  chemically synthesized
gggggactgggacggggtgt

SEQ ID NO: 19904 - DNA, 20 bp, Artificial Sequence
  chemically synthesized
actgggacggggtgtcagca

SEQ ID NO: 19905 - DNA, 20 bp, Artificial Sequence
  chemically synthesized
ctgggacggggtgtcagcat

SEQ ID NO: 19906 - DNA, 20 bp, Artificial Sequence
  chemically synthesized
tgggacggggtgtcagcata

SEQ ID NO: 19907 - DNA, 20 bp, Artificial Sequence
  chemically synthesized
gacggggtgtcagcataggg

SEQ ID NO: 19908 - DNA, 20 bp, Artificial Sequence
  chemically synthesized
ggtgtcagcatagggtggca

SEQ ID NO: 19909 - DNA, 20 bp, Artificial Sequence
  chemically synthesized
cagcatagggtggcaaagcc

SEQ ID NO: 19910 - DNA, 20 bp, Artificial Sequence
  chemically synthesized
agcatagggtggcaaagccc

SEQ ID NO: 19911 - DNA, 20 bp, Artificial Sequence
  chemically synthesized
gcatagggtggcaaagccca

SEQ ID NO: 19912 - DNA, 20 bp, Artificial Sequence
  chemically synthesized
agggtggcaaagcccagggc

SEQ ID NO: 19913 - DNA, 20 bp, Artificial Sequence
  chemically synthesized
gggtggcaaagcccagggcc

SEQ ID NO: 19914 - DNA, 20 bp, Artificial Sequence
  chemically synthesized
aagcccagggccaggaacga

SEQ ID NO: 19915 - DNA, 20 bp, Artificial Sequence
  chemically synthesized
agcccagggccaggaacgac

SEQ ID NO: 19916 - DNA, 20 bp, Artificial Sequence
  chemically synthesized
gcccagggccaggaacgacg

SEQ ID NO: 19917 - DNA, 20 bp, Artificial Sequence
  chemically synthesized
cagggccaggaacgacgggg

SEQ ID NO: 19918 - DNA, 20 bp, Artificial Sequence
  chemically synthesized
caggaacgacggggcggatc

SEQ ID NO: 19919 - DNA, 20 bp, Artificial Sequence
  chemically synthesized
acgacggggcggatcgagac

SEQ ID NO: 19920 - DNA, 20 bp, Artificial Sequence
  chemically synthesized
gggcggatcgagactggcaa

SEQ ID NO: 19921 - DNA, 20 bp, Artificial Sequence
  chemically synthesized
ggcggatcgagactggcaac

SEQ ID NO: 19922 - DNA, 20 bp, Artificial Sequence
  chemically synthesized
gcggatcgagactggcaacg

SEQ ID NO: 19923 - DNA, 20 bp, Artificial Sequence
  chemically synthesized
gatcgagactggcaacgggg

SEQ ID NO: 19924 - DNA, 20 bp, Artificial Sequence
  chemically synthesized
atcgagactggcaacgggga

SEQ ID NO: 19925 - DNA, 20 bp, Artificial Sequence
  chemically synthesized
cgagactggcaacggggaag

SEQ ID NO: 19926 - DNA, 20 bp, Artificial Sequence
  chemically synthesized
gagactggcaacggggaagg

SEQ ID NO: 19927 - DNA, 20 bp, Artificial Sequence
  chemically synthesized
aacggggaaggaggatgccc

SEQ ID NO: 19928 - DNA, 20 bp, Artificial Sequence
  chemically synthesized
acggggaaggaggatgcccc

SEQ ID NO: 19929 - DNA, 20 bp, Artificial Sequence
  chemically synthesized
gggaaggaggatgccccagg

SEQ ID NO: 19930 - DNA, 20 bp, Artificial Sequence
  chemically synthesized
ggaggatgccccaggtggcg

SEQ ID NO: 19931 - DNA, 20 bp, Artificial Sequence
  chemically synthesized
ggatgccccaggtggcgcag

SEQ ID NO: 19932 - DNA, 20 bp, Artificial Sequence
  chemically synthesized
atgccccaggtggcgcagca

SEQ ID NO: 19933 - DNA, 20 bp, Artificial Sequence
  chemically synthesized
tgccccaggtggcgcagcag

SEQ ID NO: 19934 - DNA, 20 bp, Artificial Sequence
  chemically synthesized
gccccaggtggcgcagcaga

SEQ ID NO: 19935 - DNA, 20 bp, Artificial Sequence
  chemically synthesized
ccaggtggcgcagcagaggg

SEQ ID NO: 19936 - DNA, 20 bp, Artificial Sequence
  chemically synthesized
ggcgcagcagagggtggacc

SEQ ID NO: 19937 - DNA, 20 bp, Artificial Sequence
  chemically synthesized
gcagagggtggacctggccc

SEQ ID NO: 19938 - DNA, 20 bp, Artificial Sequence
  chemically synthesized
cagagggtggacctggcccc

SEQ ID NO: 19939 - DNA, 20 bp, Artificial Sequence
  chemically synthesized
gagggtggacctggccccgg

SEQ ID NO: 19940 - DNA, 20 bp, Artificial Sequence
  chemically synthesized
gacctggccccgggagacgc

SEQ ID NO: 19941 - DNA, 20 bp, Artificial Sequence
  chemically synthesized
acctggccccgggagacgcc

SEQ ID NO: 19942 - DNA, 20 bp, Artificial Sequence
  chemically synthesized
tggccccgggagacgccggg

SEQ ID NO: 19943 - DNA, 20 bp, Artificial Sequence
  chemically synthesized
ggccccgggagacgccgggc

SEQ ID NO: 19944 - DNA, 20 bp, Artificial Sequence
  chemically synthesized
gccccgggagacgccgggcg

SEQ ID NO: 19945 - DNA, 20 bp, Artificial Sequence
  chemically synthesized
ccccgggagacgccgggcgg

SEQ ID NO: 19946 - DNA, 20 bp, Artificial Sequence
  chemically synthesized
cccgggagacgccgggcggg

SEQ ID NO: 19947 - DNA, 20 bp, Artificial Sequence
  chemically synthesized
ccgggcggggggcgctgacc

SEQ ID NO: 19948 - DNA, 20 bp, Artificial Sequence
  chemically synthesized
cggggggcgctgacctggtg

SEQ ID NO: 19949 - DNA, 20 bp, Artificial Sequence
  chemically synthesized
ggggggcgctgacctggtgc

SEQ ID NO: 19950 - DNA, 20 bp, Artificial Sequence
  chemically synthesized
gggggcgctgacctggtgca

SEQ ID NO: 19951 - DNA, 20 bp, Artificial Sequence
  chemically synthesized
gtgcagggcgctgataccgt

SEQ ID NO: 19952 - DNA, 20 bp, Artificial Sequence
  chemically synthesized
ggcgctgataccgtcggcgt

SEQ ID NO: 19953 - DNA, 20 bp, Artificial Sequence
  chemically synthesized
gctgataccgtcggcgttgg

SEQ ID NO: 19954 - DNA, 20 bp, Artificial Sequence
  chemically synthesized
tgataccgtcggcgttggtg

SEQ ID NO: 19955 - DNA, 20 bp, Artificial Sequence
  chemically synthesized
ccgtcggcgttggtggagtc

SEQ ID NO: 19956 - DNA, 20 bp, Artificial Sequence
  chemically synthesized
ggcgttggtggagtccagca

SEQ ID NO: 19957 - DNA, 20 bp, Artificial Sequence
  chemically synthesized
tggtggagtccagcacggcg

SEQ ID NO: 19958 - DNA, 20 bp, Artificial Sequence
  chemically synthesized
ggtggagtccagcacggcgc

SEQ ID NO: 19959 - DNA, 20 bp, Artificial Sequence
  chemically synthesized
ggagtccagcacggcgcggg

SEQ ID NO: 19960 - DNA, 20 bp, Artificial Sequence
  chemically synthesized
gagtccagcacggcgcgggc

SEQ ID NO: 19961 - DNA, 20 bp, Artificial Sequence
  chemically synthesized
tccagcacggcgcgggcggg

SEQ ID NO: 19962 - DNA, 20 bp, Artificial Sequence
  chemically synthesized
agcacggcgcgggcgggcgg

SEQ ID NO: 19963 - DNA, 20 bp, Artificial Sequence
  chemically synthesized
ggcgcgggcgggcggcggcg

SEQ ID NO: 19964 - DNA, 20 bp, Artificial Sequence
  chemically synthesized
gcgggcgggcggcggcgcgg

SEQ ID NO: 19965 - DNA, 20 bp, Artificial Sequence
  chemically synthesized
cgggcgggcggcggcgcggc

SEQ ID NO: 19966 - DNA, 20 bp, Artificial Sequence
  chemically synthesized
gggcgggcggcggcgcggcg

SEQ ID NO: 19967 - DNA, 20 bp, Artificial Sequence
  chemically synthesized
ggcggcggcgcggcggggtc

SEQ ID NO: 19968 - DNA, 20 bp, Artificial Sequence
  chemically synthesized
cggcgcggcggggtcgagct

SEQ ID NO: 19969 - DNA, 20 bp, Artificial Sequence
  chemically synthesized
ggcggggtcgagctcggcgc

SEQ ID NO: 19970 - DNA, 20 bp, Artificial Sequence
  chemically synthesized
gcggggtcgagctcggcgcc

SEQ ID NO: 19971 - DNA, 20 bp, Artificial Sequence
  chemically synthesized
cggggtcgagctcggcgccg

SEQ ID NO: 19972 - DNA, 20 bp, Artificial Sequence
  chemically synthesized
gtcgagctcggcgccggggc

SEQ ID NO: 19973 - DNA, 20 bp, Artificial Sequence
  chemically synthesized
tcgagctcggcgccggggcc

SEQ ID NO: 19974 - DNA, 20 bp, Artificial Sequence
  chemically synthesized
cgagctcggcgccggggcca

SEQ ID NO: 19975 - DNA, 20 bp, Artificial Sequence
  chemically synthesized
ctcggcgccggggccagggt

SEQ ID NO: 19976 - DNA, 20 bp, Artificial Sequence
  chemically synthesized
ggcgccggggccagggtcgg

SEQ ID NO: 19977 - DNA, 20 bp, Artificial Sequence
  chemically synthesized
gggccagggtcggcggcgcg

SEQ ID NO: 19978 - DNA, 20 bp, Artificial Sequence
  chemically synthesized
gggtcggcggcgcgcagcat

SEQ ID NO: 19979 - DNA, 20 bp, Artificial Sequence
  chemically synthesized
agcatcagacgcgcctcgtc

SEQ ID NO: 19980 - DNA, 20 bp, Artificial Sequence
  chemically synthesized
gcatcagacgcgcctcgtcc

SEQ ID NO: 19981 - DNA, 20 bp, Artificial Sequence
  chemically synthesized
cgtccaggtcgccgcccgca

SEQ ID NO: 19982 - DNA, 20 bp, Artificial Sequence
  chemically synthesized
gtccaggtcgccgcccgcac

SEQ ID NO: 19983 - DNA, 20 bp, Artificial Sequence
  chemically synthesized
tcgccgcccgcacaggccgc

SEQ ID NO: 19984 - DNA, 20 bp, Artificial Sequence
  chemically synthesized
cgccgcccgcacaggccgcc

SEQ ID NO: 19985 - DNA, 20 bp, Artificial Sequence
  chemically synthesized
cgcacaggccgccaggaact

SEQ ID NO: 19986 - DNA, 20 bp, Artificial Sequence
  chemically synthesized
acaggccgccaggaactcgg

SEQ ID NO: 19987 - DNA, 20 bp, Artificial Sequence
  chemically synthesized
ggaactcggcggcgcgctcg

SEQ ID NO: 19988 - DNA, 20 bp, Artificial Sequence
  chemically synthesized
actcggcggcgcgctcgaag

SEQ ID NO: 19989 - DNA, 20 bp, Artificial Sequence
  chemically synthesized
ggcggcgcgctcgaagcgga

SEQ ID NO: 19990 - DNA, 20 bp, Artificial Sequence
  chemically synthesized
cgcgctcgaagcggacggtg

SEQ ID NO: 19991 - DNA, 20 bp, Artificial Sequence
  chemically synthesized
gcgctcgaagcggacggtgc

SEQ ID NO: 19992 - DNA, 20 bp, Artificial Sequence
  chemically synthesized
cgaagcggacggtgcgggcg

SEQ ID NO: 19993 - DNA, 20 bp, Artificial Sequence
  chemically synthesized
ggtgcgggcgcggcgctctc

SEQ ID NO: 19994 - DNA, 20 bp, Artificial Sequence
  chemically synthesized
gtgcgggcgcggcgctctcc

SEQ ID NO: 19995 - DNA, 20 bp, Artificial Sequence
  chemically synthesized
tgcgggcgcggcgctctccg

SEQ ID NO: 19996 - DNA, 20 bp, Artificial Sequence
  chemically synthesized
ggcgcggcgctctccggggc

SEQ ID NO: 19997 - DNA, 20 bp, Artificial Sequence
  chemically synthesized
gcgcggcgctctccggggcc

SEQ ID NO: 19998 - DNA, 20 bp, Artificial Sequence
  chemically synthesized
gcgctctccggggccaggct

SEQ ID NO: 19999 - DNA, 20 bp, Artificial Sequence
  chemically synthesized
gcccgcgccccccactgccg

SEQ ID NO: 20000 - DNA, 20 bp, Artificial Sequence
  chemically synthesized
gctgctcccgtcgccgctcc

SEQ ID NO: 20001 - DNA, 20 bp, Artificial Sequence
  chemically synthesized
ctgctcccgtcgccgctccc

SEQ ID NO: 20002 - DNA, 20 bp, Artificial Sequence
  chemically synthesized
ctcccgtcgccgctcccggg

SEQ ID NO: 20003 - DNA, 20 bp, Artificial Sequence
  chemically synthesized
gcagccgccgccgccgcccc

SEQ ID NO: 20004 - DNA, 20 bp, Artificial Sequence
  chemically synthesized
cagccgccgccgccgccccc

SEQ ID NO: 20005 - DNA, 20 bp, Artificial Sequence
  chemically synthesized
cgccgccgccgcccccgggc

SEQ ID NO: 20006 - DNA, 20 bp, Artificial Sequence
  chemically synthesized
gccgcccccgggccagccgc

SEQ ID NO: 20007 - DNA, 20 bp, Artificial Sequence
  chemically synthesized
ccgcccccgggccagccgcc

SEQ ID NO: 20008 - DNA, 20 bp, Artificial Sequence
  chemically synthesized
agccgccgggccatcctctc

SEQ ID NO: 20009 - DNA, 20 bp, Artificial Sequence
  chemically synthesized
catcgcaccgcccgcccgcc

SEQ ID NO: 20010 - DNA, 20 bp, Artificial Sequence
  chemically synthesized
gcaccgcccgcccgcccagc

SEQ ID NO: 20011 - DNA, 20 bp, Artificial Sequence
  chemically synthesized
cgcccgcccgcccagcgagc

SEQ ID NO: 20012 - DNA, 20 bp, Artificial Sequence
  chemically synthesized
cgcccgcccagcgagcgagc

SEQ ID NO: 20013 - DNA, 20 bp, Artificial Sequence
  chemically synthesized
ccagcgagcgagcgagcgcc

SEQ ID NO: 20014 - DNA, 20 bp, Artificial Sequence
  chemically synthesized
tggtggcggcggttggggct

SEQ ID NO: 20015 - DNA, 20 bp, Artificial Sequence
  chemically synthesized
ctcggcgctcgctcgctcgc

SEQ ID NO: 20016 - DNA, 20 bp, Artificial Sequence
  chemically synthesized
tcggcgctcgctcgctcgct

SEQ ID NO: 20017 - DNA, 20 bp, Artificial Sequence
  chemically synthesized
gcgctcgctcgctcgctggg

SEQ ID NO: 20018 - DNA, 20 bp, Artificial Sequence
  chemically synthesized
cgctcgctcgctcgctgggc

SEQ ID NO: 20019 - DNA, 20 bp, Artificial Sequence
  chemically synthesized
tcgctcgctcgctgggcggg

SEQ ID NO: 20020 - DNA, 20 bp, Artificial Sequence
  chemically synthesized
cgctcgctcgctgggcgggc

SEQ ID NO: 20021 - DNA, 20 bp, Artificial Sequence
  chemically synthesized
tcgctcgctgggcgggcggg

SEQ ID NO: 20022 - DNA, 20 bp, Artificial Sequence
  chemically synthesized
cgggcgggcggtgcgatgtc

SEQ ID NO: 20023 - DNA, 20 bp, Artificial Sequence
  chemically synthesized
ggcgggcggtgcgatgtccg

SEQ ID NO: 20024 - DNA, 20 bp, Artificial Sequence
  chemically synthesized
cgggcggtgcgatgtccgga

SEQ ID NO: 20025 - DNA, 20 bp, Artificial Sequence
  chemically synthesized
gggcggtgcgatgtccggag

SEQ ID NO: 20026 - DNA, 20 bp, Artificial Sequence
  chemically synthesized
ggtgcgatgtccggagagga

SEQ ID NO: 20027 - DNA, 20 bp, Artificial Sequence
  chemically synthesized
gatgtccggagaggatggcc

SEQ ID NO: 20028 - DNA, 20 bp, Artificial Sequence
  chemically synthesized
gtccggagaggatggcccgg

SEQ ID NO: 20029 - DNA, 20 bp, Artificial Sequence
  chemically synthesized
ggagaggatggcccggcggc

SEQ ID NO: 20030 - DNA, 20 bp, Artificial Sequence
  chemically synthesized
ggatggcccggcggctggcc

SEQ ID NO: 20031 - DNA, 20 bp, Artificial Sequence
  chemically synthesized
gatggcccggcggctggccc

SEQ ID NO: 20032 - DNA, 20 bp, Artificial Sequence
  chemically synthesized
atggcccggcggctggcccg

SEQ ID NO: 20033 - DNA, 20 bp, Artificial Sequence
  chemically synthesized
tggcccggcggctggcccgg

SEQ ID NO: 20034 - DNA, 20 bp, Artificial Sequence
  chemically synthesized
cccggcggctggcccggggg

SEQ ID NO: 20035 - DNA, 20 bp, Artificial Sequence
  chemically synthesized
ggcggctggcccgggggcgg

SEQ ID NO: 20036 - DNA, 20 bp, Artificial Sequence
  chemically synthesized
ggctggcccgggggcggcgg

SEQ ID NO: 20037 - DNA, 20 bp, Artificial Sequence
  chemically synthesized
tggcccgggggcggcggcgg

SEQ ID NO: 20038 - DNA, 20 bp, Artificial Sequence
  chemically synthesized
gggcggcggcggcggctgcc

SEQ ID NO: 20039 - DNA, 20 bp, Artificial Sequence
  chemically synthesized
ggcggcggcggcggctgccc

SEQ ID NO: 20040 - DNA, 20 bp, Artificial Sequence
  chemically synthesized
cggcggcggcggctgcccgg

SEQ ID NO: 20041 - DNA, 20 bp, Artificial Sequence
  chemically synthesized
cggcggcggctgcccgggag

SEQ ID NO: 20042 - DNA, 20 bp, Artificial Sequence
  chemically synthesized
cggctgcccgggagcggcga

SEQ ID NO: 20043 - DNA, 20 bp, Artificial Sequence
  chemically synthesized
ggctgcccgggagcggcgac

SEQ ID NO: 20044 - DNA, 20 bp, Artificial Sequence
  chemically synthesized
ctgcccgggagcggcgacgg

SEQ ID NO: 20045 - DNA, 20 bp, Artificial Sequence
  chemically synthesized
cccgggagcggcgacgggag

SEQ ID NO: 20046 - DNA, 20 bp, Artificial Sequence
  chemically synthesized
agcggcgacgggagcagctg

SEQ ID NO: 20047 - DNA, 20 bp, Artificial Sequence
  chemically synthesized
ggcgacgggagcagctgcgg

SEQ ID NO: 20048 - DNA, 20 bp, Artificial Sequence
  chemically synthesized
gacgggagcagctgcggcag

SEQ ID NO: 20049 - DNA, 20 bp, Artificial Sequence
  chemically synthesized
acgggagcagctgcggcagt

SEQ ID NO: 20050 - DNA, 20 bp, Artificial Sequence
  chemically synthesized
cgggagcagctgcggcagtg

SEQ ID NO: 20051 - DNA, 20 bp, Artificial Sequence
  chemically synthesized
gggagcagctgcggcagtgg

SEQ ID NO: 20052 - DNA, 20 bp, Artificial Sequence
  chemically synthesized
ggagcagctgcggcagtggg

SEQ ID NO: 20053 - DNA, 20 bp, Artificial Sequence
  chemically synthesized
agctgcggcagtggggggcg

SEQ ID NO: 20054 - DNA, 20 bp, Artificial Sequence
  chemically synthesized
gctgcggcagtggggggcgc

SEQ ID NO: 20055 - DNA, 20 bp, Artificial Sequence
  chemically synthesized
gcggcagtggggggcgcggg

SEQ ID NO: 20056 - DNA, 20 bp, Artificial Sequence
  chemically synthesized
cggcagtggggggcgcgggc

SEQ ID NO: 20057 - DNA, 20 bp, Artificial Sequence
  chemically synthesized
ggggggcgcgggcgggcgcc

SEQ ID NO: 20058 - DNA, 20 bp, Artificial Sequence
  chemically synthesized
gcgcgggcgggcgccgagcc

SEQ ID NO: 20059 - DNA, 20 bp, Artificial Sequence
  chemically synthesized
gcgggcgccgagcctggccc

SEQ ID NO: 20060 - DNA, 20 bp, Artificial Sequence
  chemically synthesized
gggcgccgagcctggccccg

SEQ ID NO: 20061 - DNA, 20 bp, Artificial Sequence
  chemically synthesized
gcgccgagcctggccccgga

SEQ ID NO: 20062 - DNA, 20 bp, Artificial Sequence
  chemically synthesized
gcgcccgcaccgtccgcttc

SEQ ID NO: 20063 - DNA, 20 bp, Artificial Sequence
  chemically synthesized
tccgcttcgagcgcgccgcc

SEQ ID NO: 20064 - DNA, 20 bp, Artificial Sequence
  chemically synthesized
cgagcgcgccgccgagttcc

SEQ ID NO: 20065 - DNA, 20 bp, Artificial Sequence
  chemically synthesized
gcgcgccgccgagttcctgg

SEQ ID NO: 20066 - DNA, 20 bp, Artificial Sequence
  chemically synthesized
cgagttcctggcggcctgtg

SEQ ID NO: 20067 - DNA, 20 bp, Artificial Sequence
  chemically synthesized
gagttcctggcggcctgtgc

SEQ ID NO: 20068 - DNA, 20 bp, Artificial Sequence
  chemically synthesized
ttcctggcggcctgtgcggg

SEQ ID NO: 20069 - DNA, 20 bp, Artificial Sequence
  chemically synthesized
ggcctgtgcgggcggcgacc

SEQ ID NO: 20070 - DNA, 20 bp, Artificial Sequence
  chemically synthesized
gtgcgggcggcgacctggac

SEQ ID NO: 20071 - DNA, 20 bp, Artificial Sequence
  chemically synthesized
tgcgggcggcgacctggacg

SEQ ID NO: 20072 - DNA, 20 bp, Artificial Sequence
  chemically synthesized
atgctgcgcgccgccgaccc

SEQ ID NO: 20073 - DNA, 20 bp, Artificial Sequence
  chemically synthesized
cgcgccgccgaccctggccc

SEQ ID NO: 20074 - DNA, 20 bp, Artificial Sequence
  chemically synthesized
ccgaccctggccccggcgcc

SEQ ID NO: 20075 - DNA, 20 bp, Artificial Sequence
  chemically synthesized
gccgcccgcccgcgccgtgc

SEQ ID NO: 20076 - DNA, 20 bp, Artificial Sequence
  chemically synthesized
ctggactccaccaacgccga

SEQ ID NO: 20077 - DNA, 20 bp, Artificial Sequence
  chemically synthesized
tccaccaacgccgacggtat

SEQ ID NO: 20078 - DNA, 20 bp, Artificial Sequence
  chemically synthesized
acggtatcagcgccctgcac

SEQ ID NO: 20079 - DNA, 20 bp, Artificial Sequence
  chemically synthesized
cggtatcagcgccctgcacc

SEQ ID NO: 20080 - DNA, 20 bp, Artificial Sequence
  chemically synthesized
atcagcgccctgcaccaggt

SEQ ID NO: 20081 - DNA, 20 bp, Artificial Sequence
  chemically synthesized
ccaggtcagcgccccccgcc

SEQ ID NO: 20082 - DNA, 20 bp, Artificial Sequence
  chemically synthesized
gccccccgcccggcgtctcc

SEQ ID NO: 20083 - DNA, 20 bp, Artificial Sequence
  chemically synthesized
ccccccgcccggcgtctccc

SEQ ID NO: 20084 - DNA, 20 bp, Artificial Sequence
  chemically synthesized
cccccgcccggcgtctcccg

SEQ ID NO: 20085 - DNA, 20 bp, Artificial Sequence
  chemically synthesized
cgcccggcgtctcccggggc

SEQ ID NO: 20086 - DNA, 20 bp, Artificial Sequence
  chemically synthesized
gcccggcgtctcccggggcc

SEQ ID NO: 20087 - DNA, 20 bp, Artificial Sequence
  chemically synthesized
ccaccctctgctgcgccacc

SEQ ID NO: 20088 - DNA, 20 bp, Artificial Sequence
  chemically synthesized
caccctctgctgcgccacct

SEQ ID NO: 20089 - DNA, 20 bp, Artificial Sequence
  chemically synthesized
accctctgctgcgccacctg

SEQ ID NO: 20090 - DNA, 20 bp, Artificial Sequence
  chemically synthesized
gcatcctccttccccgttgc

SEQ ID NO: 20091 - DNA, 20 bp, Artificial Sequence
  chemically synthesized
tcgatccgccccgtcgttcc

SEQ ID NO: 20092 - DNA, 20 bp, Artificial Sequence
  chemically synthesized
cgccccgtcgttcctggccc

SEQ ID NO: 20093 - DNA, 20 bp, Artificial Sequence
  chemically synthesized
gccccgtcgttcctggccct

SEQ ID NO: 20094 - DNA, 20 bp, Artificial Sequence
  chemically synthesized
cctatgctgacaccccgtcc

SEQ ID NO: 20095 - DNA, 20 bp, Artificial Sequence
  chemically synthesized
cgaccaccccacttccgaat

SEQ ID NO: 20096 - DNA, 20 bp, Artificial Sequence
  chemically synthesized
accaccccacttccgaattg

SEQ ID NO: 20097 - DNA, 20 bp, Artificial Sequence
  chemically synthesized
cgaattggagccgcttcaac

SEQ ID NO: 20098 - DNA, 20 bp, Artificial Sequence
  chemically synthesized
ggagccgcttcaactggccc

SEQ ID NO: 20099 - DNA, 20 bp, Artificial Sequence
  chemically synthesized
gagccgcttcaactggccct

SEQ ID NO: 20100 - DNA, 20 bp, Artificial Sequence
  chemically synthesized
gcttcaactggccctgggct

SEQ ID NO: 20101 - DNA, 20 bp, Artificial Sequence
  chemically synthesized
ctgtgctgaccactctgccc

SEQ ID NO: 20102 - DNA, 20 bp, Artificial Sequence
  chemically synthesized
tgtgctgaccactctgcccc

SEQ ID NO: 20103 - DNA, 20 bp, Artificial Sequence
  chemically synthesized
cgacctactctcttccgcat

SEQ ID NO: 20104 - DNA, 20 bp, Artificial Sequence
  chemically synthesized
acctactctcttccgcattg

SEQ ID NO: 20105 - DNA, 20 bp, Artificial Sequence
  chemically synthesized
cgcattggagtcgctttaac

SEQ ID NO: 20106 - DNA, 20 bp, Artificial Sequence
  chemically synthesized
ggagtcgctttaactggccc

SEQ ID NO: 20107 - DNA, 20 bp, Artificial Sequence
  chemically synthesized
gctttaactggccctggctt

SEQ ID NO: 20108 - DNA, 20 bp, Artificial Sequence
  chemically synthesized
ttaactggccctggctttgg

SEQ ID NO: 20109 - DNA, 20 bp, Artificial Sequence
  chemically synthesized
gcagcctgtgctgacccatg

SEQ ID NO: 20110 - DNA, 20 bp, Artificial Sequence
  chemically synthesized
acttcccctcttccgatgtt

SEQ ID NO: 20111 - DNA, 20 bp, Artificial Sequence
  chemically synthesized
cttccgatgttgagcccctc

SEQ ID NO: 20112 - DNA, 20 bp, Artificial Sequence
  chemically synthesized
cgatgttgagcccctccagc

SEQ ID NO: 20113 - DNA, 20 bp, Artificial Sequence
  chemically synthesized
tgagcccctccagccggtcc

SEQ ID NO: 20114 - DNA, 20 bp, Artificial Sequence
  chemically synthesized
ccctgccctctcctgaacct

SEQ ID NO: 20115 - DNA, 20 bp, Artificial Sequence
  chemically synthesized
gccctctcctgaacctgagc

SEQ ID NO: 20116 - DNA, 20 bp, Artificial Sequence
  chemically synthesized
tgaacctgagccagctccca

SEQ ID NO: 20117 - DNA, 20 bp, Artificial Sequence
  chemically synthesized
ctgagccagctcccatagct

SEQ ID NO: 20118 - DNA, 20 bp, Artificial Sequence
  chemically synthesized
ccagctcccatagctcagtc

SEQ ID NO: 20119 - DNA, 20 bp, Artificial Sequence
  chemically synthesized
ctcagtctggtctatctgcc

SEQ ID NO: 20120 - DNA, 20 bp, Artificial Sequence
  chemically synthesized
ctggtctatctgcctggccc

SEQ ID NO: 20121 - DNA, 20 bp, Artificial Sequence
  chemically synthesized
gctgccctcctctcgccccc

SEQ ID NO: 20122 - DNA, 20 bp, Artificial Sequence
  chemically synthesized
gagtgcccttgctgtgccgc

SEQ ID NO: 20123 - DNA, 20 bp, Artificial Sequence
  chemically synthesized
aacgctgccgtctctctcct

SEQ ID NO: 20124 - DNA, 20 bp, Artificial Sequence
  chemically synthesized
tgccgtctctctcctgagtc

SEQ ID NO: 20125 - DNA, 20 bp, Artificial Sequence
  chemically synthesized
tcctgagtccggaccacttt

SEQ ID NO: 20126 - DNA, 20 bp, Artificial Sequence
  chemically synthesized
cggaccactttgagctctac

SEQ ID NO: 20127 - DNA, 20 bp, Artificial Sequence
  chemically synthesized
actggcttctgcgccgcctc

SEQ ID NO: 20128 - DNA, 20 bp, Artificial Sequence
  chemically synthesized
ggcccactgtttccccttcc

SEQ ID NO: 20129 - DNA, 20 bp, Artificial Sequence
  chemically synthesized
gcccactgtttccccttccc

SEQ ID NO: 20130 - DNA, 20 bp, Artificial Sequence
  chemically synthesized
cactgtttccccttcccagg

SEQ ID NO: 20131 - DNA, 20 bp, Artificial Sequence
  chemically synthesized
actgtttccccttcccaggc

SEQ ID NO: 20132 - DNA, 20 bp, Artificial Sequence
  chemically synthesized
ctgacctgcattctctcccc

SEQ ID NO: 20133 - DNA, 20 bp, Artificial Sequence
  chemically synthesized
tgacctgcattctctcccct

SEQ ID NO: 20134 - DNA, 20 bp, Artificial Sequence
  chemically synthesized
cctgtgccgctttctgtctg

SEQ ID NO: 20135 - DNA, 20 bp, Artificial Sequence
  chemically synthesized
cgctttctgtctgcagcttg

SEQ ID NO: 20136 - DNA, 20 bp, Artificial Sequence
  chemically synthesized
tctgtctgcagcttgtggcc

SEQ ID NO: 20137 - DNA, 20 bp, Artificial Sequence
  chemically synthesized
ctgtctgcagcttgtggcct

SEQ ID NO: 20138 - DNA, 20 bp, Artificial Sequence
  chemically synthesized
tgtggcctgggtcacctcta

SEQ ID NO: 20139 - DNA, 20 bp, Artificial Sequence
  chemically synthesized
gcctgggtcacctctacggc

SEQ ID NO: 20140 - DNA, 20 bp, Artificial Sequence
  chemically synthesized
ggtcacctctacggctggcc

SEQ ID NO: 20141 - DNA, 20 bp, Artificial Sequence
  chemically synthesized
tccttccctgccgcctcctt

SEQ ID NO: 20142 - DNA, 20 bp, Artificial Sequence
  chemically synthesized
ccttccctgccgcctccttc

SEQ ID NO: 20143 - DNA, 20 bp, Artificial Sequence
  chemically synthesized
tctctgctgtgttgctgccc

SEQ ID NO: 20144 - DNA, 20 bp, Artificial Sequence
  chemically synthesized
ctctgctgtgttgctgccca

SEQ ID NO: 20145 - DNA, 20 bp, Artificial Sequence
  chemically synthesized
ctgcccaaggatgctctttc

SEQ ID NO: 20146 - DNA, 20 bp, Artificial Sequence
  chemically synthesized
gcccaaggatgctctttccg

SEQ ID NO: 20147 - DNA, 20 bp, Artificial Sequence
  chemically synthesized
tttccggagcacttccttct

SEQ ID NO: 20148 - DNA, 20 bp, Artificial Sequence
  chemically synthesized
tgcaccacgtgatgtcctct

SEQ ID NO: 20149 - DNA, 20 bp, Artificial Sequence
  chemically synthesized
accacgtgatgtcctctgag

SEQ ID NO: 20150 - DNA, 20 bp, Artificial Sequence
  chemically synthesized
gagcggatcctccccgtgtc

SEQ ID NO: 20151 - DNA, 20 bp, Artificial Sequence
  chemically synthesized
agcggatcctccccgtgtct

SEQ ID NO: 20152 - DNA, 20 bp, Artificial Sequence
  chemically synthesized
ccccgtgtctgggtcctctc

SEQ ID NO: 20153 - DNA, 20 bp, Artificial Sequence
  chemically synthesized
cccgtgtctgggtcctctcc

SEQ ID NO: 20154 - DNA, 20 bp, Artificial Sequence
  chemically synthesized
cccatgccgtcttcactcgc

SEQ ID NO: 20155 - DNA, 20 bp, Artificial Sequence
  chemically synthesized
ccatgccgtcttcactcgct

SEQ ID NO: 20156 - DNA, 20 bp, Artificial Sequence
  chemically synthesized
ttcccttttccttctccttc

SEQ ID NO: 20157 - DNA, 20 bp, Artificial Sequence
  chemically synthesized
tcccttttccttctccttct

SEQ ID NO: 20158 - DNA, 20 bp, Artificial Sequence
  chemically synthesized
cccttttccttctccttctg

SEQ ID NO: 20159 - DNA, 20 bp, Artificial Sequence
  chemically synthesized
ctgtgccatctctcgtttct

SEQ ID NO: 20160 - DNA, 20 bp, Artificial Sequence
  chemically synthesized
tgtgccatctctcgtttctt

SEQ ID NO: 20161 - DNA, 20 bp, Artificial Sequence
  chemically synthesized
ccatctctcgtttcttagga

SEQ ID NO: 20162 - DNA, 20 bp, Artificial Sequence
  chemically synthesized
cttaggatggccttctccga

SEQ ID NO: 20163 - DNA, 20 bp, Artificial Sequence
  chemically synthesized
cgtcccgcctccccttcttg

SEQ ID NO: 20164 - DNA, 20 bp, Artificial Sequence
  chemically synthesized
gtcccgcctccccttcttgt

SEQ ID NO: 20165 - DNA, 20 bp, Artificial Sequence
  chemically synthesized
ctgcatcatcaccgtttttc

SEQ ID NO: 20166 - DNA, 20 bp, Artificial Sequence
  chemically synthesized
cgtttttctggacaacccca

SEQ ID NO: 20167 - DNA, 20 bp, Artificial Sequence
  chemically synthesized
cccaaagtaccccgtctccc

SEQ ID NO: 20168 - DNA, 20 bp, Artificial Sequence
  chemically synthesized
gtaccccgtctccctggctt

SEQ ID NO: 20169 - DNA, 20 bp, Artificial Sequence
  chemically synthesized
atcctcttgctttctttgcc

SEQ ID NO: 20170 - DNA, 20 bp, Artificial Sequence
  chemically synthesized
ctggacaccccgttctcctg

SEQ ID NO: 20171 - DNA, 20 bp, Artificial Sequence
  chemically synthesized
accccgttctcctgtggatt

SEQ ID NO: 20172 - DNA, 20 bp, Artificial Sequence
  chemically synthesized
ccccgttctcctgtggattc

SEQ ID NO: 20173 - DNA, 20 bp, Artificial Sequence
  chemically synthesized
cacctctcactcctttcatt

SEQ ID NO: 20174 - DNA, 20 bp, Artificial Sequence
  chemically synthesized
acctctcactcctttcattt

SEQ ID NO: 20175 - DNA, 20 bp, Artificial Sequence
  chemically synthesized
tctcactcctttcatttggg

SEQ ID NO: 20176 - DNA, 20 bp, Artificial Sequence
  chemically synthesized
ccctaccccccttacctctc

SEQ ID NO: 20177 - DNA, 20 bp, Artificial Sequence
  chemically synthesized
cttacctctctagtctgtgc

SEQ ID NO: 20178 - DNA, 20 bp, Artificial Sequence
  chemically synthesized
ctagtctgtgctagctcttc

SEQ ID NO: 20179 - DNA, 20 bp, Artificial Sequence
  chemically synthesized
gctcttccagccccctgtca

SEQ ID NO: 20180 - DNA, 20 bp, Artificial Sequence
  chemically synthesized
ccccctgtcatggcatcttc

SEQ ID NO: 20181 - DNA, 20 bp, Artificial Sequence
  chemically synthesized
cccctgtcatggcatcttcc

SEQ ID NO: 20182 - DNA, 20 bp, Artificial Sequence
  chemically synthesized
ccctgtcatggcatcttcca

SEQ ID NO: 20183 - DNA, 20 bp, Artificial Sequence
  chemically synthesized
cctgtcatggcatcttccag

SEQ ID NO: 20184 - DNA, 20 bp, Artificial Sequence
  chemically synthesized
atggcatcttccaggggtcc

SEQ ID NO: 20185 - DNA, 20 bp, Artificial Sequence
  chemically synthesized
ggcatcttccaggggtccga

SEQ ID NO: 20186 - DNA, 20 bp, Artificial Sequence
  chemically synthesized
cttccaggggtccgagagct

SEQ ID NO: 20187 - DNA, 20 bp, Artificial Sequence
  chemically synthesized
caggggtccgagagctcagc

SEQ ID NO: 20188 - DNA, 20 bp, Artificial Sequence
  chemically synthesized
ctagtcttcttcctccaacc

SEQ ID NO: 20189 - DNA, 20 bp, Artificial Sequence
  chemically synthesized
tagtcttcttcctccaaccc

SEQ ID NO: 20190 - DNA, 20 bp, Artificial Sequence
  chemically synthesized
ccgggcccctatgtccactt

SEQ ID NO: 20191 - DNA, 20 bp, Artificial Sequence
  chemically synthesized
cgggcccctatgtccacttc

SEQ ID NO: 20192 - DNA, 20 bp, Artificial Sequence
  chemically synthesized
cccctatgtccacttcagga

SEQ ID NO: 20193 - DNA, 20 bp, Artificial Sequence
  chemically synthesized
gacagcatgtttgctgcctc

SEQ ID NO: 20194 - DNA, 20 bp, Artificial Sequence
  chemically synthesized
acagcatgtttgctgcctcc

SEQ ID NO: 20195 - DNA, 20 bp, Artificial Sequence
  chemically synthesized
cagcatgtttgctgcctcca

SEQ ID NO: 20196 - DNA, 20 bp, Artificial Sequence
  chemically synthesized
tccagggatcctgtgtcccc

SEQ ID NO: 20197 - DNA, 20 bp, Artificial Sequence
  chemically synthesized
gggatcctgtgtccccgagc

SEQ ID NO: 20198 - DNA, 20 bp, Artificial Sequence
  chemically synthesized
ggatcctgtgtccccgagct

SEQ ID NO: 20199 - DNA, 20 bp, Artificial Sequence
  chemically synthesized
ctgggaccaccttatattcc

SEQ ID NO: 20200 - DNA, 20 bp, Artificial Sequence
  chemically synthesized
tgggaccaccttatattccc

SEQ ID NO: 20201 - DNA, 20 bp, Artificial Sequence
  chemically synthesized
gggaccaccttatattccca

SEQ ID NO: 20202 - DNA, 20 bp, Artificial Sequence
  chemically synthesized
ccaccttatattcccagggc

SEQ ID NO: 20203 - DNA, 20 bp, Artificial Sequence
  chemically synthesized
attcccagggccggttaatg

SEQ ID NO: 20204 - DNA, 20 bp, Artificial Sequence
  chemically synthesized
agggccggttaatgtggctc

SEQ ID NO: 20205 - DNA, 20 bp, Artificial Sequence
  chemically synthesized
ggttaatgtggctctggttc

SEQ ID NO: 20206 - DNA, 20 bp, Artificial Sequence
  chemically synthesized
gttaatgtggctctggttct

SEQ ID NO: 20207 - DNA, 20 bp, Artificial Sequence
  chemically synthesized
tatctgtcccctccacccca

SEQ ID NO: 20208 - DNA, 20 bp, Artificial Sequence
  chemically synthesized
ctgtcccctccaccccacag

SEQ ID NO: 20209 - DNA, 20 bp, Artificial Sequence
  chemically synthesized
tgtcccctccaccccacagt

SEQ ID NO: 20210 - DNA, 20 bp, Artificial Sequence
  chemically synthesized
gtcccctccaccccacagtg

SEQ ID NO: 20211 - DNA, 20 bp, Artificial Sequence
  chemically synthesized
ccaccccacagtggggccac

SEQ ID NO: 20212 - DNA, 20 bp, Artificial Sequence
  chemically synthesized
caccccacagtggggccact

SEQ ID NO: 20213 - DNA, 20 bp, Artificial Sequence
  chemically synthesized
accccacagtggggccacta

SEQ ID NO: 20214 - DNA, 20 bp, Artificial Sequence
  chemically synthesized
cacagtggggccactaggga

SEQ ID NO: 20215 - DNA, 20 bp, Artificial Sequence
  chemically synthesized
acagtggggccactagggac

SEQ ID NO: 20216 - DNA, 20 bp, Artificial Sequence
  chemically synthesized
ggggccactagggacaggat

SEQ ID NO: 20217 - DNA, 20 bp, Artificial Sequence
  chemically synthesized
actagggacaggattggtga

SEQ ID NO: 20218 - DNA, 20 bp, Artificial Sequence
  chemically synthesized
ggacaggattggtgacagaa

SEQ ID NO: 20219 - DNA, 20 bp, Artificial Sequence
  chemically synthesized
tgacagaaaagccccatcct

SEQ ID NO: 20220 - DNA, 20 bp, Artificial Sequence
  chemically synthesized
gacagaaaagccccatcctt

SEQ ID NO: 20221 - DNA, 20 bp, Artificial Sequence
  chemically synthesized
tccttaggcctcctccttcc

SEQ ID NO: 20222 - DNA, 20 bp, Artificial Sequence
  chemically synthesized
ccttcctagtctcctgatat

SEQ ID NO: 20223 - DNA, 20 bp, Artificial Sequence
  chemically synthesized
cttcctagtctcctgatatt

SEQ ID NO: 20224 - DNA, 20 bp, Artificial Sequence
  chemically synthesized
gtctaacccccacctcctgt

SEQ ID NO: 20225 - DNA, 20 bp, Artificial Sequence
  chemically synthesized
tctaacccccacctcctgtt

SEQ ID NO: 20226 - DNA, 20 bp, Artificial Sequence
  chemically synthesized
aacccccacctcctgttagg

SEQ ID NO: 20227 - DNA, 20 bp, Artificial Sequence
  chemically synthesized
tgttaggcagattccttatc

SEQ ID NO: 20228 - DNA, 20 bp, Artificial Sequence
  chemically synthesized
ggtgacacacccccatttcc

SEQ ID NO: 20229 - DNA, 20 bp, Artificial Sequence
  chemically synthesized
tgacacacccccatttcctg

SEQ ID NO: 20230 - DNA, 20 bp, Artificial Sequence
  chemically synthesized
ggagccatctctctccttgc

SEQ ID NO: 20231 - DNA, 20 bp, Artificial Sequence
  chemically synthesized
ctctccttgccagaacctct

SEQ ID NO: 20232 - DNA, 20 bp, Artificial Sequence
  chemically synthesized
tctccttgccagaacctcta

SEQ ID NO: 20233 - DNA, 20 bp, Artificial Sequence
  chemically synthesized
cctctaaggtttgcttacga

SEQ ID NO: 20234 - DNA, 20 bp, Artificial Sequence
  chemically synthesized
tctaaggtttgcttacgatg

SEQ ID NO: 20235 - DNA, 20 bp, Artificial Sequence
  chemically synthesized
aggtttgcttacgatggagc

SEQ ID NO: 20236 - DNA, 20 bp, Artificial Sequence
  chemically synthesized
gtttgcttacgatggagcca

SEQ ID NO: 20237 - DNA, 20 bp, Artificial Sequence
  chemically synthesized
ttgcttacgatggagccaga

SEQ ID NO: 20238 - DNA, 20 bp, Artificial Sequence
  chemically synthesized
tgcttacgatggagccagag

SEQ ID NO: 20239 - DNA, 20 bp, Artificial Sequence
  chemically synthesized
gatggagccagagaggatcc

SEQ ID NO: 20240 - DNA, 20 bp, Artificial Sequence
  chemically synthesized
atggagccagagaggatcct

SEQ ID NO: 20241 - DNA, 20 bp, Artificial Sequence
  chemically synthesized
ggagccagagaggatcctgg

SEQ ID NO: 20242 - DNA, 20 bp, Artificial Sequence
  chemically synthesized
gagccagagaggatcctggg

SEQ ID NO: 20243 - DNA, 20 bp, Artificial Sequence
  chemically synthesized
agccagagaggatcctggga

SEQ ID NO: 20244 - DNA, 20 bp, Artificial Sequence
  chemically synthesized
ccagagaggatcctgggagg

SEQ ID NO: 20245 - DNA, 20 bp, Artificial Sequence
  chemically synthesized
agagaggatcctgggaggga

SEQ ID NO: 20246 - DNA, 20 bp, Artificial Sequence
  chemically synthesized
ggatcctgggagggagagct

SEQ ID NO: 20247 - DNA, 20 bp, Artificial Sequence
  chemically synthesized
tcctgggagggagagcttgg

SEQ ID NO: 20248 - DNA, 20 bp, Artificial Sequence
  chemically synthesized
cctgggagggagagcttggc

SEQ ID NO: 20249 - DNA, 20 bp, Artificial Sequence
  chemically synthesized
ctgggagggagagcttggca

SEQ ID NO: 20250 - DNA, 20 bp, Artificial Sequence
  chemically synthesized
tgggagggagagcttggcag

SEQ ID NO: 20251 - DNA, 20 bp, Artificial Sequence
  chemically synthesized
gggagggagagcttggcagg

SEQ ID NO: 20252 - DNA, 20 bp, Artificial Sequence
  chemically synthesized
agggagagcttggcaggggg

SEQ ID NO: 20253 - DNA, 20 bp, Artificial Sequence
  chemically synthesized
gggagagcttggcagggggt

SEQ ID NO: 20254 - DNA, 20 bp, Artificial Sequence
  chemically synthesized
gagagcttggcagggggtgg

SEQ ID NO: 20255 - DNA, 20 bp, Artificial Sequence
  chemically synthesized
agagcttggcagggggtggg

SEQ ID NO: 20256 - DNA, 20 bp, Artificial Sequence
  chemically synthesized
gagcttggcagggggtggga

SEQ ID NO: 20257 - DNA, 20 bp, Artificial Sequence
  chemically synthesized
cttggcagggggtgggaggg

SEQ ID NO: 20258 - DNA, 20 bp, Artificial Sequence
  chemically synthesized
ttggcagggggtgggaggga

SEQ ID NO: 20259 - DNA, 20 bp, Artificial Sequence
  chemically synthesized
tggcagggggtgggagggaa

SEQ ID NO: 20260 - DNA, 20 bp, Artificial Sequence
  chemically synthesized
ggcagggggtgggagggaag

SEQ ID NO: 20261 - DNA, 20 bp, Artificial Sequence
  chemically synthesized
gcagggggtgggagggaagg

SEQ ID NO: 20262 - DNA, 20 bp, Artificial Sequence
  chemically synthesized
cagggggtgggagggaaggg

SEQ ID NO: 20263 - DNA, 20 bp, Artificial Sequence
  chemically synthesized
agggggtgggagggaagggg

SEQ ID NO: 20264 - DNA, 20 bp, Artificial Sequence
  chemically synthesized
ggggggatgcgtgacctgcc

SEQ ID NO: 20265 - DNA, 20 bp, Artificial Sequence
  chemically synthesized
tgcgtgacctgcccggttct

SEQ ID NO: 20266 - DNA, 20 bp, Artificial Sequence
  chemically synthesized
gtgacctgcccggttctcag

SEQ ID NO: 20267 - DNA, 20 bp, Artificial Sequence
  chemically synthesized
caccctgcgctaccctctcc

SEQ ID NO: 20268 - DNA, 20 bp, Artificial Sequence
  chemically synthesized
gctaccctctcccagaacct

SEQ ID NO: 20269 - DNA, 20 bp, Artificial Sequence
  chemically synthesized
gaacctgagctgctctgacg

SEQ ID NO: 20270 - DNA, 20 bp, Artificial Sequence
  chemically synthesized
gctgctctgacgcggccgtc

SEQ ID NO: 20271 - DNA, 20 bp, Artificial Sequence
  chemically synthesized
ctggtgcgtttcactgatcc

SEQ ID NO: 20272 - DNA, 20 bp, Artificial Sequence
  chemically synthesized
tttcactgatcctggtgctg

SEQ ID NO: 20273 - DNA, 20 bp, Artificial Sequence
  chemically synthesized
gcagcttccttacacttccc

SEQ ID NO: 20274 - DNA, 20 bp, Artificial Sequence
  chemically synthesized
agcttccttacacttcccaa

SEQ ID NO: 20275 - DNA, 20 bp, Artificial Sequence
  chemically synthesized
gcttccttacacttcccaag

SEQ ID NO: 20276 - DNA, 20 bp, Artificial Sequence
  chemically synthesized
ttccttacacttcccaagag

SEQ ID NO: 20277 - DNA, 20 bp, Artificial Sequence
  chemically synthesized
cttacacttcccaagaggag

SEQ ID NO: 20278 - DNA, 20 bp, Artificial Sequence
  chemically synthesized
acacttcccaagaggagaag

SEQ ID NO: 20279 - DNA, 20 bp, Artificial Sequence
  chemically synthesized
tcccaagaggagaagcagtt

SEQ ID NO: 20280 - DNA, 20 bp, Artificial Sequence
  chemically synthesized
gcagtttggaaaaacaaaat

SEQ ID NO: 20281 - DNA, 20 bp, Artificial Sequence
  chemically synthesized
tggaaaaacaaaatcagaat

SEQ ID NO: 20282 - DNA, 20 bp, Artificial Sequence
  chemically synthesized
aaaacaaaatcagaataagt

SEQ ID NO: 20283 - DNA, 20 bp, Artificial Sequence
  chemically synthesized
aatcagaataagttggtcct

SEQ ID NO: 20284 - DNA, 20 bp, Artificial Sequence
  chemically synthesized
ttggtcctgagttctaactt

SEQ ID NO: 20285 - DNA, 20 bp, Artificial Sequence
  chemically synthesized
actttggctcttcacctttc

SEQ ID NO: 20286 - DNA, 20 bp, Artificial Sequence
  chemically synthesized
tatattgttcctccgtgcgt

SEQ ID NO: 20287 - DNA, 20 bp, Artificial Sequence
  chemically synthesized
cgtgcgtcagttttacctgt

SEQ ID NO: 20288 - DNA, 20 bp, Artificial Sequence
  chemically synthesized
gtcagttttacctgtgagat

SEQ ID NO: 20289 - DNA, 20 bp, Artificial Sequence
  chemically synthesized
tcagttttacctgtgagata

SEQ ID NO: 20290 - DNA, 20 bp, Artificial Sequence
  chemically synthesized
ttttacctgtgagataaggc

SEQ ID NO: 20291 - DNA, 20 bp, Artificial Sequence
  chemically synthesized
tacctgtgagataaggccag

SEQ ID NO: 20292 - DNA, 20 bp, Artificial Sequence
  chemically synthesized
tgtgagataaggccagtagc

SEQ ID NO: 20293 - DNA, 20 bp, Artificial Sequence
  chemically synthesized
gccagtagccagccccgtcc

SEQ ID NO: 20294 - DNA, 20 bp, Artificial Sequence
  chemically synthesized
agtagccagccccgtcctgg

SEQ ID NO: 20295 - DNA, 20 bp, Artificial Sequence
  chemically synthesized
gtagccagccccgtcctggc

SEQ ID NO: 20296 - DNA, 20 bp, Artificial Sequence
  chemically synthesized
tagccagccccgtcctggca

SEQ ID NO: 20297 - DNA, 20 bp, Artificial Sequence
  chemically synthesized
gccccgtcctggcagggctg

SEQ ID NO: 20298 - DNA, 20 bp, Artificial Sequence
  chemically synthesized
cgtcctggcagggctgtggt

SEQ ID NO: 20299 - DNA, 20 bp, Artificial Sequence
  chemically synthesized
gtcctggcagggctgtggtg

SEQ ID NO: 20300 - DNA, 20 bp, Artificial Sequence
  chemically synthesized
cctggcagggctgtggtgag

SEQ ID NO: 20301 - DNA, 20 bp, Artificial Sequence
  chemically synthesized
ctggcagggctgtggtgagg

SEQ ID NO: 20302 - DNA, 20 bp, Artificial Sequence
  chemically synthesized
tggcagggctgtggtgagga

SEQ ID NO: 20303 - DNA, 20 bp, Artificial Sequence
  chemically synthesized
ggcagggctgtggtgaggag

SEQ ID NO: 20304 - DNA, 20 bp, Artificial Sequence
  chemically synthesized
gcagggctgtggtgaggagg

SEQ ID NO: 20305 - DNA, 20 bp, Artificial Sequence
  chemically synthesized
cagggctgtggtgaggaggg

SEQ ID NO: 20306 - DNA, 20 bp, Artificial Sequence
  chemically synthesized
tgaggaggggggtgtccgtg

SEQ ID NO: 20307 - DNA, 20 bp, Artificial Sequence
  chemically synthesized
gtgtggaaaactccctttgt

SEQ ID NO: 20308 - DNA, 20 bp, Artificial Sequence
  chemically synthesized
gaaaactccctttgtgagaa

SEQ ID NO: 20309 - DNA, 20 bp, Artificial Sequence
  chemically synthesized
tttgtgagaatggtgcgtcc

SEQ ID NO: 20310 - DNA, 20 bp, Artificial Sequence
  chemically synthesized
ttgtgagaatggtgcgtcct

SEQ ID NO: 20311 - DNA, 20 bp, Artificial Sequence
  chemically synthesized
ggtgcgtcctaggtgttcac

SEQ ID NO: 20312 - DNA, 20 bp, Artificial Sequence
  chemically synthesized
gtgcgtcctaggtgttcacc

SEQ ID NO: 20313 - DNA, 20 bp, Artificial Sequence
  chemically synthesized
cctaggtgttcaccaggtcg

SEQ ID NO: 20314 - DNA, 20 bp, Artificial Sequence
  chemically synthesized
tctccatccttctttcctta

SEQ ID NO: 20315 - DNA, 20 bp, Artificial Sequence
  chemically synthesized
tccatccttctttccttaaa

SEQ ID NO: 20316 - DNA, 20 bp, Artificial Sequence
  chemically synthesized
ttctttccttaaagagtccc

SEQ ID NO: 20317 - DNA, 20 bp, Artificial Sequence
  chemically synthesized
aaagagtccccagtgctatc

SEQ ID NO: 20318 - DNA, 20 bp, Artificial Sequence
  chemically synthesized
aagagtccccagtgctatct

SEQ ID NO: 20319 - DNA, 20 bp, Artificial Sequence
  chemically synthesized
ctgggacatattcctccgcc

SEQ ID NO: 20320 - DNA, 20 bp, Artificial Sequence
  chemically synthesized
gggacatattcctccgccca

SEQ ID NO: 20321 - DNA, 20 bp, Artificial Sequence
  chemically synthesized
acatattcctccgcccagag

SEQ ID NO: 20322 - DNA, 20 bp, Artificial Sequence
  chemically synthesized
catattcctccgcccagagc

SEQ ID NO: 20323 - DNA, 20 bp, Artificial Sequence
  chemically synthesized
atattcctccgcccagagca

SEQ ID NO: 20324 - DNA, 20 bp, Artificial Sequence
  chemically synthesized
gagcagggtcccgcttccct

SEQ ID NO: 20325 - DNA, 20 bp, Artificial Sequence
  chemically synthesized
agcagggtcccgcttcccta

SEQ ID NO: 20326 - DNA, 20 bp, Artificial Sequence
  chemically synthesized
gcttccctaaggccctgctc

SEQ ID NO: 20327 - DNA, 20 bp, Artificial Sequence
  chemically synthesized
cttccctaaggccctgctct

SEQ ID NO: 20328 - DNA, 20 bp, Artificial Sequence
  chemically synthesized
aaggccctgctctgggcttc

SEQ ID NO: 20329 - DNA, 20 bp, Artificial Sequence
  chemically synthesized
aggccctgctctgggcttct

SEQ ID NO: 20330 - DNA, 20 bp, Artificial Sequence
  chemically synthesized
tgctctgggcttctgggttt

SEQ ID NO: 20331 - DNA, 20 bp, Artificial Sequence
  chemically synthesized
ggcttctgggtttgagtcct

SEQ ID NO: 20332 - DNA, 20 bp, Artificial Sequence
  chemically synthesized
tctgggtttgagtccttggc

SEQ ID NO: 20333 - DNA, 20 bp, Artificial Sequence
  chemically synthesized
gtttgagtccttggcaagcc

SEQ ID NO: 20334 - DNA, 20 bp, Artificial Sequence
  chemically synthesized
tttgagtccttggcaagccc

SEQ ID NO: 20335 - DNA, 20 bp, Artificial Sequence
  chemically synthesized
tgagtccttggcaagcccag

SEQ ID NO: 20336 - DNA, 20 bp, Artificial Sequence
  chemically synthesized
agtccttggcaagcccagga

SEQ ID NO: 20337 - DNA, 20 bp, Artificial Sequence
  chemically synthesized
gtccttggcaagcccaggag

SEQ ID NO: 20338 - DNA, 20 bp, Artificial Sequence
  chemically synthesized
gcaagcccaggagaggcgct

SEQ ID NO: 20339 - DNA, 20 bp, Artificial Sequence
  chemically synthesized
caagcccaggagaggcgctc

SEQ ID NO: 20340 - DNA, 20 bp, Artificial Sequence
  chemically synthesized
cgtccaccatctcatgcccc

SEQ ID NO: 20341 - DNA, 20 bp, Artificial Sequence
  chemically synthesized
gctctcctgccccttcccta

SEQ ID NO: 20342 - DNA, 20 bp, Artificial Sequence
  chemically synthesized
ctctcctgccccttccctac

SEQ ID NO: 20343 - DNA, 20 bp, Artificial Sequence
  chemically synthesized
tctcctgccccttccctaca

SEQ ID NO: 20344 - DNA, 20 bp, Artificial Sequence
  chemically synthesized
ctcctgccccttccctacag

SEQ ID NO: 20345 - DNA, 20 bp, Artificial Sequence
  chemically synthesized
cccttccctacaggggttcc

SEQ ID NO: 20346 - DNA, 20 bp, Artificial Sequence
  chemically synthesized
gggttcctggctctgctctt

SEQ ID NO: 20347 - DNA, 20 bp, Artificial Sequence
  chemically synthesized
ctggctctgctcttcagact

SEQ ID NO: 20348 - DNA, 20 bp, Artificial Sequence
  chemically synthesized
cccccttcccctgcatcccc

SEQ ID NO: 20349 - DNA, 20 bp, Artificial Sequence
  chemically synthesized
cccttcccctgcatccccca

SEQ ID NO: 20350 - DNA, 20 bp, Artificial Sequence
  chemically synthesized
ccttcccctgcatcccccag

SEQ ID NO: 20351 - DNA, 20 bp, Artificial Sequence
  chemically synthesized
cctgcatcccccagaggccc

SEQ ID NO: 20352 - DNA, 20 bp, Artificial Sequence
  chemically synthesized
ctgcatcccccagaggcccc

SEQ ID NO: 20353 - DNA, 20 bp, Artificial Sequence
  chemically synthesized
gaggccccaggccacctact

SEQ ID NO: 20354 - DNA, 20 bp, Artificial Sequence
  chemically synthesized
cccaggccacctacttggcc

SEQ ID NO: 20355 - DNA, 20 bp, Artificial Sequence
  chemically synthesized
ctacttggcctggaccccac

SEQ ID NO: 20356 - DNA, 20 bp, Artificial Sequence
  chemically synthesized
acttggcctggaccccacga

SEQ ID NO: 20357 - DNA, 20 bp, Artificial Sequence
  chemically synthesized
cttggcctggaccccacgag

SEQ ID NO: 20358 - DNA, 20 bp, Artificial Sequence
  chemically synthesized
gaccccacgagaggccaccc

SEQ ID NO: 20359 - DNA, 20 bp, Artificial Sequence
  chemically synthesized
gccaccccagccctgtctac

SEQ ID NO: 20360 - DNA, 20 bp, Artificial Sequence
  chemically synthesized
ccaccccagccctgtctacc

SEQ ID NO: 20361 - DNA, 20 bp, Artificial Sequence
  chemically synthesized
ctgtctaccaggctgccttt

SEQ ID NO: 20362 - DNA, 20 bp, Artificial Sequence
  chemically synthesized
tgtctaccaggctgcctttt

SEQ ID NO: 20363 - DNA, 20 bp, Artificial Sequence
  chemically synthesized
ctaccaggctgccttttggg

SEQ ID NO: 20364 - DNA, 20 bp, Artificial Sequence
  chemically synthesized
ggtggattctcctccaactg

SEQ ID NO: 20365 - DNA, 20 bp, Artificial Sequence
  chemically synthesized
gtggattctcctccaactgt

SEQ ID NO: 20366 - DNA, 20 bp, Artificial Sequence
  chemically synthesized
tggattctcctccaactgtg

SEQ ID NO: 20367 - DNA, 20 bp, Artificial Sequence
  chemically synthesized
ccaactgtggggtgactgct

SEQ ID NO: 20368 - DNA, 20 bp, Artificial Sequence
  chemically synthesized
tgcttggcaaactcactctt

SEQ ID NO: 20369 - DNA, 20 bp, Artificial Sequence
  chemically synthesized
gcttggcaaactcactcttc

SEQ ID NO: 20370 - DNA, 20 bp, Artificial Sequence
  chemically synthesized
cttggcaaactcactcttcg

SEQ ID NO: 20371 - DNA, 20 bp, Artificial Sequence
  chemically synthesized
actcactcttcggggtatcc

SEQ ID NO: 20372 - DNA, 20 bp, Artificial Sequence
  chemically synthesized
ctcactcttcggggtatccc

SEQ ID NO: 20373 - DNA, 20 bp, Artificial Sequence
  chemically synthesized
cactcttcggggtatcccag

SEQ ID NO: 20374 - DNA, 20 bp, Artificial Sequence
  chemically synthesized
actcttcggggtatcccagg

SEQ ID NO: 20375 - DNA, 20 bp, Artificial Sequence
  chemically synthesized
tcggggtatcccaggaggcc

SEQ ID NO: 20376 - DNA, 20 bp, Artificial Sequence
  chemically synthesized
ggggtatcccaggaggcctg

SEQ ID NO: 20377 - DNA, 20 bp, Artificial Sequence
  chemically synthesized
tcccaggaggcctggagcat

SEQ ID NO: 20378 - DNA, 20 bp, Artificial Sequence
  chemically synthesized
cccaggaggcctggagcatt

SEQ ID NO: 20379 - DNA, 20 bp, Artificial Sequence
  chemically synthesized
ccaggaggcctggagcattg

SEQ ID NO: 20380 - DNA, 20 bp, Artificial Sequence
  chemically synthesized
ggaggcctggagcattgggg

SEQ ID NO: 20381 - DNA, 20 bp, Artificial Sequence
  chemically synthesized
gaggcctggagcattggggt

SEQ ID NO: 20382 - DNA, 20 bp, Artificial Sequence
  chemically synthesized
cctggagcattggggtgggc

SEQ ID NO: 20383 - DNA, 20 bp, Artificial Sequence
  chemically synthesized
ctggagcattggggtgggct

SEQ ID NO: 20384 - DNA, 20 bp, Artificial Sequence
  chemically synthesized
tggagcattggggtgggctg

SEQ ID NO: 20385 - DNA, 20 bp, Artificial Sequence
  chemically synthesized
cattggggtgggctggggtt

SEQ ID NO: 20386 - DNA, 20 bp, Artificial Sequence
  chemically synthesized
ttggggtgggctggggttca

SEQ ID NO: 20387 - DNA, 20 bp, Artificial Sequence
  chemically synthesized
ggggtgggctggggttcaga

SEQ ID NO: 20388 - DNA, 20 bp, Artificial Sequence
  chemically synthesized
gggtgggctggggttcagag

SEQ ID NO: 20389 - DNA, 20 bp, Artificial Sequence
  chemically synthesized
gtgggctggggttcagagag

SEQ ID NO: 20390 - DNA, 20 bp, Artificial Sequence
  chemically synthesized
tgggctggggttcagagagg

SEQ ID NO: 20391 - DNA, 20 bp, Artificial Sequence
  chemically synthesized
gggctggggttcagagagga

SEQ ID NO: 20392 - DNA, 20 bp, Artificial Sequence
  chemically synthesized
gagaggagggattcccttct

SEQ ID NO: 20393 - DNA, 20 bp, Artificial Sequence
  chemically synthesized
agaggagggattcccttctc

SEQ ID NO: 20394 - DNA, 20 bp, Artificial Sequence
  chemically synthesized
gattcccttctcaggttacg

SEQ ID NO: 20395 - DNA, 20 bp, Artificial Sequence
  chemically synthesized
ccttctcaggttacgtggcc

SEQ ID NO: 20396 - DNA, 20 bp, Artificial Sequence
  chemically synthesized
tctcaggttacgtggccaag

SEQ ID NO: 20397 - DNA, 20 bp, Artificial Sequence
  chemically synthesized
caggttacgtggccaagaag

SEQ ID NO: 20398 - DNA, 20 bp, Artificial Sequence
  chemically synthesized
aggttacgtggccaagaagc

SEQ ID NO: 20399 - DNA, 20 bp, Artificial Sequence
  chemically synthesized
ggttacgtggccaagaagca

SEQ ID NO: 20400 - DNA, 20 bp, Artificial Sequence
  chemically synthesized
gttacgtggccaagaagcag

SEQ ID NO: 20401 - DNA, 20 bp, Artificial Sequence
  chemically synthesized
tacgtggccaagaagcaggg

SEQ ID NO: 20402 - DNA, 20 bp, Artificial Sequence
  chemically synthesized
tggccaagaagcaggggagc

SEQ ID NO: 20403 - DNA, 20 bp, Artificial Sequence
  chemically synthesized
ggccaagaagcaggggagct

SEQ ID NO: 20404 - DNA, 20 bp, Artificial Sequence
  chemically synthesized
agaagcaggggagctgggtt

SEQ ID NO: 20405 - DNA, 20 bp, Artificial Sequence
  chemically synthesized
gaagcaggggagctgggttt

SEQ ID NO: 20406 - DNA, 20 bp, Artificial Sequence
  chemically synthesized
caggggagctgggtttgggt

SEQ ID NO: 20407 - DNA, 20 bp, Artificial Sequence
  chemically synthesized
aggggagctgggtttgggtc

SEQ ID NO: 20408 - DNA, 20 bp, Artificial Sequence
  chemically synthesized
agctgggtttgggtcaggtc

SEQ ID NO: 20409 - DNA, 20 bp, Artificial Sequence
  chemically synthesized
gctgggtttgggtcaggtct

SEQ ID NO: 20410 - DNA, 20 bp, Artificial Sequence
  chemically synthesized
gtttgggtcaggtctgggtg

SEQ ID NO: 20411 - DNA, 20 bp, Artificial Sequence
  chemically synthesized
tttgggtcaggtctgggtgt

SEQ ID NO: 20412 - DNA, 20 bp, Artificial Sequence
  chemically synthesized
ttgggtcaggtctgggtgtg

SEQ ID NO: 20413 - DNA, 20 bp, Artificial Sequence
  chemically synthesized
aggtctgggtgtggggtgac

SEQ ID NO: 20414 - DNA, 20 bp, Artificial Sequence
  chemically synthesized
accagcttatgctgtttgcc

SEQ ID NO: 20415 - DNA, 20 bp, Artificial Sequence
  chemically synthesized
ccagcttatgctgtttgccc

SEQ ID NO: 20416 - DNA, 20 bp, Artificial Sequence
  chemically synthesized
cttatgctgtttgcccagga

SEQ ID NO: 20417 - DNA, 20 bp, Artificial Sequence
  chemically synthesized
gctgtttgcccaggacagcc

SEQ ID NO: 20418 - DNA, 20 bp, Artificial Sequence
  chemically synthesized
tgcccaggacagcctagttt

SEQ ID NO: 20419 - DNA, 20 bp, Artificial Sequence
  chemically synthesized
agttttagcactgaaaccct

SEQ ID NO: 20420 - DNA, 20 bp, Artificial Sequence
  chemically synthesized
agcactgaaaccctcagtcc

SEQ ID NO: 20421 - DNA, 20 bp, Artificial Sequence
  chemically synthesized
gcactgaaaccctcagtcct

SEQ ID NO: 20422 - DNA, 20 bp, Artificial Sequence
  chemically synthesized
aaccctcagtcctaggaaaa

SEQ ID NO: 20423 - DNA, 20 bp, Artificial Sequence
  chemically synthesized
accctcagtcctaggaaaac

SEQ ID NO: 20424 - DNA, 20 bp, Artificial Sequence
  chemically synthesized
ccctcagtcctaggaaaaca

SEQ ID NO: 20425 - DNA, 20 bp, Artificial Sequence
  chemically synthesized
cagtcctaggaaaacaggga

SEQ ID NO: 20426 - DNA, 20 bp, Artificial Sequence
  chemically synthesized
cctaggaaaacagggatggt

SEQ ID NO: 20427 - DNA, 20 bp, Artificial Sequence
  chemically synthesized
ggatggttggtcactgtctc

SEQ ID NO: 20428 - DNA, 20 bp, Artificial Sequence
  chemically synthesized
gatggttggtcactgtctct

SEQ ID NO: 20429 - DNA, 20 bp, Artificial Sequence
  chemically synthesized
tctgggtgactcttgattcc

SEQ ID NO: 20430 - DNA, 20 bp, Artificial Sequence
  chemically synthesized
ggtgactcttgattcccggc

SEQ ID NO: 20431 - DNA, 20 bp, Artificial Sequence
  chemically synthesized
tcccggccagtttctccacc

SEQ ID NO: 20432 - DNA, 20 bp, Artificial Sequence
  chemically synthesized
cccggccagtttctccacct

SEQ ID NO: 20433 - DNA, 20 bp, Artificial Sequence
  chemically synthesized
ccggccagtttctccacctg

SEQ ID NO: 20434 - DNA, 20 bp, Artificial Sequence
  chemically synthesized
tctcgtcctgcatccttctc

SEQ ID NO: 20435 - DNA, 20 bp, Artificial Sequence
  chemically synthesized
ctcgtcctgcatccttctcc

SEQ ID NO: 20436 - DNA, 20 bp, Artificial Sequence
  chemically synthesized
gtcctgcatccttctccagg

SEQ ID NO: 20437 - DNA, 20 bp, Artificial Sequence
  chemically synthesized
tcctgcatccttctccaggc

SEQ ID NO: 20438 - DNA, 20 bp, Artificial Sequence
  chemically synthesized
ccttctccaggcaggtcccc

SEQ ID NO: 20439 - DNA, 20 bp, Artificial Sequence
  chemically synthesized
caagcatcgcccccctgctg

SEQ ID NO: 20440 - DNA, 20 bp, Artificial Sequence
  chemically synthesized
cccctgctgtggctgttccc

SEQ ID NO: 20441 - DNA, 20 bp, Artificial Sequence
  chemically synthesized
tgtggctgttcccaagttct

SEQ ID NO: 20442 - DNA, 20 bp, Artificial Sequence
  chemically synthesized
gtggctgttcccaagttctt

SEQ ID NO: 20443 - DNA, 20 bp, Artificial Sequence
  chemically synthesized
tggctgttcccaagttctta

SEQ ID NO: 20444 - DNA, 20 bp, Artificial Sequence
  chemically synthesized
agttcttagggtaccccacg

SEQ ID NO: 20445 - DNA, 20 bp, Artificial Sequence
  chemically synthesized
gttcttagggtaccccacgt

SEQ ID NO: 20446 - DNA, 20 bp, Artificial Sequence
  chemically synthesized
acgtgggtttatcaaccact

SEQ ID NO: 20447 - DNA, 20 bp, Artificial Sequence
  chemically synthesized
gggtttatcaaccacttggt

SEQ ID NO: 20448 - DNA, 20 bp, Artificial Sequence
  chemically synthesized
ggtttatcaaccacttggtg

SEQ ID NO: 20449 - DNA, 20 bp, Artificial Sequence
  chemically synthesized
tatcaaccacttggtgaggc

SEQ ID NO: 20450 - DNA, 20 bp, Artificial Sequence
  chemically synthesized
ttcctgcaccccaattgcct

SEQ ID NO: 20451 - DNA, 20 bp, Artificial Sequence
  chemically synthesized
ctgcaccccaattgccttag

SEQ ID NO: 20452 - DNA, 20 bp, Artificial Sequence
  chemically synthesized
accccaattgccttagtggc

SEQ ID NO: 20453 - DNA, 20 bp, Artificial Sequence
  chemically synthesized
ccccaattgccttagtggct

SEQ ID NO: 20454 - DNA, 20 bp, Artificial Sequence
  chemically synthesized
cccaattgccttagtggcta

SEQ ID NO: 20455 - DNA, 20 bp, Artificial Sequence
  chemically synthesized
ccaattgccttagtggctag

SEQ ID NO: 20456 - DNA, 20 bp, Artificial Sequence
  chemically synthesized
caattgccttagtggctagg

SEQ ID NO: 20457 - DNA, 20 bp, Artificial Sequence
  chemically synthesized
tgccttagtggctagggggt

SEQ ID NO: 20458 - DNA, 20 bp, Artificial Sequence
  chemically synthesized
gccttagtggctagggggtt

SEQ ID NO: 20459 - DNA, 20 bp, Artificial Sequence
  chemically synthesized
ccttagtggctagggggttg

SEQ ID NO: 20460 - DNA, 20 bp, Artificial Sequence
  chemically synthesized
cttagtggctagggggttgg

SEQ ID NO: 20461 - DNA, 20 bp, Artificial Sequence
  chemically synthesized
gtggctagggggttgggggc

SEQ ID NO: 20462 - DNA, 20 bp, Artificial Sequence
  chemically synthesized
ggctagggggttgggggcta

SEQ ID NO: 20463 - DNA, 20 bp, Artificial Sequence
  chemically synthesized
tagggggttgggggctagag

SEQ ID NO: 20464 - DNA, 20 bp, Artificial Sequence
  chemically synthesized
agggggttgggggctagagt

SEQ ID NO: 20465 - DNA, 20 bp, Artificial Sequence
  chemically synthesized
ggggttgggggctagagtag

SEQ ID NO: 20466 - DNA, 20 bp, Artificial Sequence
  chemically synthesized
gggttgggggctagagtagg

SEQ ID NO: 20467 - DNA, 20 bp, Artificial Sequence
  chemically synthesized
ggttgggggctagagtagga

SEQ ID NO: 20468 - DNA, 20 bp, Artificial Sequence
  chemically synthesized
gttgggggctagagtaggag

SEQ ID NO: 20469 - DNA, 20 bp, Artificial Sequence
  chemically synthesized
ggggctagagtaggaggggc

SEQ ID NO: 20470 - DNA, 20 bp, Artificial Sequence
  chemically synthesized
ggctagagtaggaggggctg

SEQ ID NO: 20471 - DNA, 20 bp, Artificial Sequence
  chemically synthesized
agagtaggaggggctggagc

SEQ ID NO: 20472 - DNA, 20 bp, Artificial Sequence
  chemically synthesized
gagtaggaggggctggagcc

SEQ ID NO: 20473 - DNA, 20 bp, Artificial Sequence
  chemically synthesized
ggggctggagccaggattct

SEQ ID NO: 20474 - DNA, 20 bp, Artificial Sequence
  chemically synthesized
gggctggagccaggattctt

SEQ ID NO: 20475 - DNA, 20 bp, Artificial Sequence
  chemically synthesized
ggctggagccaggattctta

SEQ ID NO: 20476 - DNA, 20 bp, Artificial Sequence
  chemically synthesized
ccaggattcttagggctgaa

SEQ ID NO: 20477 - DNA, 20 bp, Artificial Sequence
  chemically synthesized
aggattcttagggctgaaca

SEQ ID NO: 20478 - DNA, 20 bp, Artificial Sequence
  chemically synthesized
attcttagggctgaacagag

SEQ ID NO: 20479 - DNA, 20 bp, Artificial Sequence
  chemically synthesized
tcttagggctgaacagagaa

SEQ ID NO: 20480 - DNA, 20 bp, Artificial Sequence
  chemically synthesized
agggctgaacagagaagagc

SEQ ID NO: 20481 - DNA, 20 bp, Artificial Sequence
  chemically synthesized
gggctgaacagagaagagct

SEQ ID NO: 20482 - DNA, 20 bp, Artificial Sequence
  chemically synthesized
ggctgaacagagaagagctg

SEQ ID NO: 20483 - DNA, 20 bp, Artificial Sequence
  chemically synthesized
gctgaacagagaagagctgg

SEQ ID NO: 20484 - DNA, 20 bp, Artificial Sequence
  chemically synthesized
acagagaagagctgggggcc

SEQ ID NO: 20485 - DNA, 20 bp, Artificial Sequence
  chemically synthesized
cagagaagagctgggggcct

SEQ ID NO: 20486 - DNA, 20 bp, Artificial Sequence
  chemically synthesized
gagctgggggcctgggctcc

SEQ ID NO: 20487 - DNA, 20 bp, Artificial Sequence
  chemically synthesized
agctgggggcctgggctcct

SEQ ID NO: 20488 - DNA, 20 bp, Artificial Sequence
  chemically synthesized
gggcctgggctcctgggttt

SEQ ID NO: 20489 - DNA, 20 bp, Artificial Sequence
  chemically synthesized
gcctgggctcctgggtttga

SEQ ID NO: 20490 - DNA, 20 bp, Artificial Sequence
  chemically synthesized
ctgggctcctgggtttgaga

SEQ ID NO: 20491 - DNA, 20 bp, Artificial Sequence
  chemically synthesized
tgggctcctgggtttgagag

SEQ ID NO: 20492 - DNA, 20 bp, Artificial Sequence
  chemically synthesized
ggctcctgggtttgagagag

SEQ ID NO: 20493 - DNA, 20 bp, Artificial Sequence
  chemically synthesized
gctcctgggtttgagagagg

SEQ ID NO: 20494 - DNA, 20 bp, Artificial Sequence
  chemically synthesized
ctcctgggtttgagagagga

SEQ ID NO: 20495 - DNA, 20 bp, Artificial Sequence
  chemically synthesized
tcctgggtttgagagaggag

SEQ ID NO: 20496 - DNA, 20 bp, Artificial Sequence
  chemically synthesized
gggtttgagagaggaggggc

SEQ ID NO: 20497 - DNA, 20 bp, Artificial Sequence
  chemically synthesized
ggtttgagagaggaggggct

SEQ ID NO: 20498 - DNA, 20 bp, Artificial Sequence
  chemically synthesized
gtttgagagaggaggggctg

SEQ ID NO: 20499 - DNA, 20 bp, Artificial Sequence
  chemically synthesized
agagaggaggggctggggcc

SEQ ID NO: 20500 - DNA, 20 bp, Artificial Sequence
  chemically synthesized
ggggctggggcctggactcc

SEQ ID NO: 20501 - DNA, 20 bp, Artificial Sequence
  chemically synthesized
gggctggggcctggactcct

SEQ ID NO: 20502 - DNA, 20 bp, Artificial Sequence
  chemically synthesized
gggcctggactcctgggtcc

SEQ ID NO: 20503 - DNA, 20 bp, Artificial Sequence
  chemically synthesized
ggcctggactcctgggtccg

SEQ ID NO: 20504 - DNA, 20 bp, Artificial Sequence
  chemically synthesized
gcctggactcctgggtccga

SEQ ID NO: 20505 - DNA, 20 bp, Artificial Sequence
  chemically synthesized
ctggactcctgggtccgagg

SEQ ID NO: 20506 - DNA, 20 bp, Artificial Sequence
  chemically synthesized
tggactcctgggtccgaggg

SEQ ID NO: 20507 - DNA, 20 bp, Artificial Sequence
  chemically synthesized
gactcctgggtccgagggag

SEQ ID NO: 20508 - DNA, 20 bp, Artificial Sequence
  chemically synthesized
actcctgggtccgagggagg

SEQ ID NO: 20509 - DNA, 20 bp, Artificial Sequence
  chemically synthesized
ctcctgggtccgagggagga

SEQ ID NO: 20510 - DNA, 20 bp, Artificial Sequence
  chemically synthesized
tcctgggtccgagggaggag

SEQ ID NO: 20511 - DNA, 20 bp, Artificial Sequence
  chemically synthesized
gggtccgagggaggaggggc

SEQ ID NO: 20512 - DNA, 20 bp, Artificial Sequence
  chemically synthesized
ggtccgagggaggaggggct

SEQ ID NO: 20513 - DNA, 20 bp, Artificial Sequence
  chemically synthesized
gtccgagggaggaggggctg

SEQ ID NO: 20514 - DNA, 20 bp, Artificial Sequence
  chemically synthesized
agggaggaggggctggggcc

SEQ ID NO: 20515 - DNA, 20 bp, Artificial Sequence
  chemically synthesized
ggggctggggcctggactcc

SEQ ID NO: 20516 - DNA, 20 bp, Artificial Sequence
  chemically synthesized
gggctggggcctggactcct

SEQ ID NO: 20517 - DNA, 20 bp, Artificial Sequence
  chemically synthesized
gggcctggactcctgggtct

SEQ ID NO: 20518 - DNA, 20 bp, Artificial Sequence
  chemically synthesized
ggcctggactcctgggtctg

SEQ ID NO: 20519 - DNA, 20 bp, Artificial Sequence
  chemically synthesized
gcctggactcctgggtctga

SEQ ID NO: 20520 - DNA, 20 bp, Artificial Sequence
  chemically synthesized
tggactcctgggtctgaggg

SEQ ID NO: 20521 - DNA, 20 bp, Artificial Sequence
  chemically synthesized
gactcctgggtctgagggtg

SEQ ID NO: 20522 - DNA, 20 bp, Artificial Sequence
  chemically synthesized
actcctgggtctgagggtgg

SEQ ID NO: 20523 - DNA, 20 bp, Artificial Sequence
  chemically synthesized
ctcctgggtctgagggtgga

SEQ ID NO: 20524 - DNA, 20 bp, Artificial Sequence
  chemically synthesized
gggtctgagggtggagggac

SEQ ID NO: 20525 - DNA, 20 bp, Artificial Sequence
  chemically synthesized
ggtctgagggtggagggact

SEQ ID NO: 20526 - DNA, 20 bp, Artificial Sequence
  chemically synthesized
gtctgagggtggagggactg

SEQ ID NO: 20527 - DNA, 20 bp, Artificial Sequence
  chemically synthesized
tctgagggtggagggactgg

SEQ ID NO: 20528 - DNA, 20 bp, Artificial Sequence
  chemically synthesized
gggtggagggactgggggcc

SEQ ID NO: 20529 - DNA, 20 bp, Artificial Sequence
  chemically synthesized
ggactgggggcctggactcc

SEQ ID NO: 20530 - DNA, 20 bp, Artificial Sequence
  chemically synthesized
gactgggggcctggactcct

SEQ ID NO: 20531 - DNA, 20 bp, Artificial Sequence
  chemically synthesized
gggcctggactcctgggtcc

SEQ ID NO: 20532 - DNA, 20 bp, Artificial Sequence
  chemically synthesized
ggcctggactcctgggtccg

SEQ ID NO: 20533 - DNA, 20 bp, Artificial Sequence
  chemically synthesized
gcctggactcctgggtccga

SEQ ID NO: 20534 - DNA, 20 bp, Artificial Sequence
  chemically synthesized
ctggactcctgggtccgagg

SEQ ID NO: 20535 - DNA, 20 bp, Artificial Sequence
  chemically synthesized
tggactcctgggtccgaggg

SEQ ID NO: 20536 - DNA, 20 bp, Artificial Sequence
  chemically synthesized
gactcctgggtccgagggag

SEQ ID NO: 20537 - DNA, 20 bp, Artificial Sequence
  chemically synthesized
actcctgggtccgagggagg

SEQ ID NO: 20538 - DNA, 20 bp, Artificial Sequence
  chemically synthesized
ctcctgggtccgagggagga

SEQ ID NO: 20539 - DNA, 20 bp, Artificial Sequence
  chemically synthesized
tcctgggtccgagggaggag

SEQ ID NO: 20540 - DNA, 20 bp, Artificial Sequence
  chemically synthesized
gggtccgagggaggaggggc

SEQ ID NO: 20541 - DNA, 20 bp, Artificial Sequence
  chemically synthesized
ggtccgagggaggaggggct

SEQ ID NO: 20542 - DNA, 20 bp, Artificial Sequence
  chemically synthesized
gtccgagggaggaggggctg

SEQ ID NO: 20543 - DNA, 20 bp, Artificial Sequence
  chemically synthesized
agggaggaggggctggggcc

SEQ ID NO: 20544 - DNA, 20 bp, Artificial Sequence
  chemically synthesized
ggggctggggcctggactcg

SEQ ID NO: 20545 - DNA, 20 bp, Artificial Sequence
  chemically synthesized
gggctggggcctggactcgt

SEQ ID NO: 20546 - DNA, 20 bp, Artificial Sequence
  chemically synthesized
gggcctggactcgtgggtct

SEQ ID NO: 20547 - DNA, 20 bp, Artificial Sequence
  chemically synthesized
ggcctggactcgtgggtctg

SEQ ID NO: 20548 - DNA, 20 bp, Artificial Sequence
  chemically synthesized
gcctggactcgtgggtctga

SEQ ID NO: 20549 - DNA, 20 bp, Artificial Sequence
  chemically synthesized
ctggactcgtgggtctgagg

SEQ ID NO: 20550 - DNA, 20 bp, Artificial Sequence
  chemically synthesized
tggactcgtgggtctgaggg

SEQ ID NO: 20551 - DNA, 20 bp, Artificial Sequence
  chemically synthesized
gactcgtgggtctgagggag

SEQ ID NO: 20552 - DNA, 20 bp, Artificial Sequence
  chemically synthesized
actcgtgggtctgagggagg

SEQ ID NO: 20553 - DNA, 20 bp, Artificial Sequence
  chemically synthesized
ctcgtgggtctgagggagga

SEQ ID NO: 20554 - DNA, 20 bp, Artificial Sequence
  chemically synthesized
tcgtgggtctgagggaggag

SEQ ID NO: 20555 - DNA, 20 bp, Artificial Sequence
  chemically synthesized
gggtctgagggaggaggggc

SEQ ID NO: 20556 - DNA, 20 bp, Artificial Sequence
  chemically synthesized
ggtctgagggaggaggggct

SEQ ID NO: 20557 - DNA, 20 bp, Artificial Sequence
  chemically synthesized
gtctgagggaggaggggctg

SEQ ID NO: 20558 - DNA, 20 bp, Artificial Sequence
  chemically synthesized
tctgagggaggaggggctgg

SEQ ID NO: 20559 - DNA, 20 bp, Artificial Sequence
  chemically synthesized
gggaggaggggctgggggcc

SEQ ID NO: 20560 - DNA, 20 bp, Artificial Sequence
  chemically synthesized
gggctgggggcctggacttc

SEQ ID NO: 20561 - DNA, 20 bp, Artificial Sequence
  chemically synthesized
ggctgggggcctggacttct

SEQ ID NO: 20562 - DNA, 20 bp, Artificial Sequence
  chemically synthesized
gggcctggacttctgggtct

SEQ ID NO: 20563 - DNA, 20 bp, Artificial Sequence
  chemically synthesized
ggcctggacttctgggtctt

SEQ ID NO: 20564 - DNA, 20 bp, Artificial Sequence
  chemically synthesized
gcctggacttctgggtctta

SEQ ID NO: 20565 - DNA, 20 bp, Artificial Sequence
  chemically synthesized
ctggacttctgggtcttagg

SEQ ID NO: 20566 - DNA, 20 bp, Artificial Sequence
  chemically synthesized
tggacttctgggtcttaggg

SEQ ID NO: 20567 - DNA, 20 bp, Artificial Sequence
  chemically synthesized
acttctgggtcttagggagg

SEQ ID NO: 20568 - DNA, 20 bp, Artificial Sequence
  chemically synthesized
cttctgggtcttagggaggc

SEQ ID NO: 20569 - DNA, 20 bp, Artificial Sequence
  chemically synthesized
ttctgggtcttagggaggcg

SEQ ID NO: 20570 - DNA, 20 bp, Artificial Sequence
  chemically synthesized
gggtcttagggaggcggggc

SEQ ID NO: 20571 - DNA, 20 bp, Artificial Sequence
  chemically synthesized
ggtcttagggaggcggggct

SEQ ID NO: 20572 - DNA, 20 bp, Artificial Sequence
  chemically synthesized
tagggaggcggggctgggcc

SEQ ID NO: 20573 - DNA, 20 bp, Artificial Sequence
  chemically synthesized
cggggctgggcctggacccc

SEQ ID NO: 20574 - DNA, 20 bp, Artificial Sequence
  chemically synthesized
ggggctgggcctggacccct

SEQ ID NO: 20575 - DNA, 20 bp, Artificial Sequence
  chemically synthesized
cctggacccctgggtctgaa

SEQ ID NO: 20576 - DNA, 20 bp, Artificial Sequence
  chemically synthesized
ctggacccctgggtctgaat

SEQ ID NO: 20577 - DNA, 20 bp, Artificial Sequence
  chemically synthesized
tggacccctgggtctgaatg

SEQ ID NO: 20578 - DNA, 20 bp, Artificial Sequence
  chemically synthesized
gacccctgggtctgaatggg

SEQ ID NO: 20579 - DNA, 20 bp, Artificial Sequence
  chemically synthesized
cccctgggtctgaatgggga

SEQ ID NO: 20580 - DNA, 20 bp, Artificial Sequence
  chemically synthesized
ccctgggtctgaatggggag

SEQ ID NO: 20581 - DNA, 20 bp, Artificial Sequence
  chemically synthesized
gggtctgaatggggagaggc

SEQ ID NO: 20582 - DNA, 20 bp, Artificial Sequence
  chemically synthesized
ggtctgaatggggagaggct

SEQ ID NO: 20583 - DNA, 20 bp, Artificial Sequence
  chemically synthesized
gtctgaatggggagaggctg

SEQ ID NO: 20584 - DNA, 20 bp, Artificial Sequence
  chemically synthesized
tctgaatggggagaggctgg

SEQ ID NO: 20585 - DNA, 20 bp, Artificial Sequence
  chemically synthesized
atggggagaggctgggggcc

SEQ ID NO: 20586 - DNA, 20 bp, Artificial Sequence
  chemically synthesized
gggcctggactccttcatct

SEQ ID NO: 20587 - DNA, 20 bp, Artificial Sequence
  chemically synthesized
ggcctggactccttcatctg

SEQ ID NO: 20588 - DNA, 20 bp, Artificial Sequence
  chemically synthesized
gcctggactccttcatctga

SEQ ID NO: 20589 - DNA, 20 bp, Artificial Sequence
  chemically synthesized
tggactccttcatctgaggg

SEQ ID NO: 20590 - DNA, 20 bp, Artificial Sequence
  chemically synthesized
actccttcatctgagggcgg

SEQ ID NO: 20591 - DNA, 20 bp, Artificial Sequence
  chemically synthesized
ctccttcatctgagggcgga

SEQ ID NO: 20592 - DNA, 20 bp, Artificial Sequence
  chemically synthesized
tccttcatctgagggcggaa

SEQ ID NO: 20593 - DNA, 20 bp, Artificial Sequence
  chemically synthesized
tcatctgagggcggaagggc

SEQ ID NO: 20594 - DNA, 20 bp, Artificial Sequence
  chemically synthesized
catctgagggcggaagggct

SEQ ID NO: 20595 - DNA, 20 bp, Artificial Sequence
  chemically synthesized
atctgagggcggaagggctg

SEQ ID NO: 20596 - DNA, 20 bp, Artificial Sequence
  chemically synthesized
agggcggaagggctggggcc

SEQ ID NO: 20597 - DNA, 20 bp, Artificial Sequence
  chemically synthesized
agggctggggcctggcctcc

SEQ ID NO: 20598 - DNA, 20 bp, Artificial Sequence
  chemically synthesized
gggctggggcctggcctcct

SEQ ID NO: 20599 - DNA, 20 bp, Artificial Sequence
  chemically synthesized
gcctggcctcctgggttgaa

SEQ ID NO: 20600 - DNA, 20 bp, Artificial Sequence
  chemically synthesized
cctggcctcctgggttgaat

SEQ ID NO: 20601 - DNA, 20 bp, Artificial Sequence
  chemically synthesized
ctggcctcctgggttgaatg

SEQ ID NO: 20602 - DNA, 20 bp, Artificial Sequence
  chemically synthesized
ggcctcctgggttgaatggg

SEQ ID NO: 20603 - DNA, 20 bp, Artificial Sequence
  chemically synthesized
gcctcctgggttgaatgggg

SEQ ID NO: 20604 - DNA, 20 bp, Artificial Sequence
  chemically synthesized
cctcctgggttgaatgggga

SEQ ID NO: 20605 - DNA, 20 bp, Artificial Sequence
  chemically synthesized
ctcctgggttgaatggggag

SEQ ID NO: 20606 - DNA, 20 bp, Artificial Sequence
  chemically synthesized
tgggttgaatggggaggggt

SEQ ID NO: 20607 - DNA, 20 bp, Artificial Sequence
  chemically synthesized
gggttgaatggggaggggtt

SEQ ID NO: 20608 - DNA, 20 bp, Artificial Sequence
  chemically synthesized
gaatggggaggggttgggcc

SEQ ID NO: 20609 - DNA, 20 bp, Artificial Sequence
  chemically synthesized
gaggggttgggcctggactc

SEQ ID NO: 20610 - DNA, 20 bp, Artificial Sequence
  chemically synthesized
ggggttgggcctggactctg

SEQ ID NO: 20611 - DNA, 20 bp, Artificial Sequence
  chemically synthesized
ggcctggactctggagtccc

SEQ ID NO: 20612 - DNA, 20 bp, Artificial Sequence
  chemically synthesized
actctggagtccctggtgcc

SEQ ID NO: 20613 - DNA, 20 bp, Artificial Sequence
  chemically synthesized
ctctggagtccctggtgccc

SEQ ID NO: 20614 - DNA, 20 bp, Artificial Sequence
  chemically synthesized
agtccctggtgcccaggcct

SEQ ID NO: 20615 - DNA, 20 bp, Artificial Sequence
  chemically synthesized
gtccctggtgcccaggcctc

SEQ ID NO: 20616 - DNA, 20 bp, Artificial Sequence
  chemically synthesized
caggcctcaggcatctttca

SEQ ID NO: 20617 - DNA, 20 bp, Artificial Sequence
  chemically synthesized
aggcctcaggcatctttcac

SEQ ID NO: 20618 - DNA, 20 bp, Artificial Sequence
  chemically synthesized
ggcctcaggcatctttcaca

SEQ ID NO: 20619 - DNA, 20 bp, Artificial Sequence
  chemically synthesized
tttcacagggatgcctgtac

SEQ ID NO: 20620 - DNA, 20 bp, Artificial Sequence
  chemically synthesized
ttcacagggatgcctgtact

SEQ ID NO: 20621 - DNA, 20 bp, Artificial Sequence
  chemically synthesized
acagggatgcctgtactggg

SEQ ID NO: 20622 - DNA, 20 bp, Artificial Sequence
  chemically synthesized
cagggatgcctgtactgggc

SEQ ID NO: 20623 - DNA, 20 bp, Artificial Sequence
  chemically synthesized
tgtactgggcaggtccttga

SEQ ID NO: 20624 - DNA, 20 bp, Artificial Sequence
  chemically synthesized
gtactgggcaggtccttgaa

SEQ ID NO: 20625 - DNA, 20 bp, Artificial Sequence
  chemically synthesized
tactgggcaggtccttgaaa

SEQ ID NO: 20626 - DNA, 20 bp, Artificial Sequence
  chemically synthesized
gggcaggtccttgaaaggga

SEQ ID NO: 20627 - DNA, 20 bp, Artificial Sequence
  chemically synthesized
ggcaggtccttgaaagggaa

SEQ ID NO: 20628 - DNA, 20 bp, Artificial Sequence
  chemically synthesized
tcccctatcgccatgacaac

SEQ ID NO: 20629 - DNA, 20 bp, Artificial Sequence
  chemically synthesized
cccctatcgccatgacaact

SEQ ID NO: 20630 - DNA, 20 bp, Artificial Sequence
  chemically synthesized
ctatcgccatgacaactggg

SEQ ID NO: 20631 - DNA, 20 bp, Artificial Sequence
  chemically synthesized
acaactgggtggaaataaac

SEQ ID NO: 20632 - DNA, 20 bp, Artificial Sequence
  chemically synthesized
tgggtggaaataaacgagcc

SEQ ID NO: 20633 - DNA, 20 bp, Artificial Sequence
  chemically synthesized
agccgagttcatcccgttcc

SEQ ID NO: 20634 - DNA, 20 bp, Artificial Sequence
  chemically synthesized
gccgagttcatcccgttccc

SEQ ID NO: 20635 - DNA, 20 bp, Artificial Sequence
  chemically synthesized
ccgagttcatcccgttccca

SEQ ID NO: 20636 - DNA, 20 bp, Artificial Sequence
  chemically synthesized
tcccgttcccagggcacgtg

SEQ ID NO: 20637 - DNA, 20 bp, Artificial Sequence
  chemically synthesized
gggcacgtgcggccccttca

SEQ ID NO: 20638 - DNA, 20 bp, Artificial Sequence
  chemically synthesized
gtgcggccccttcacagccc

SEQ ID NO: 20639 - DNA, 20 bp, Artificial Sequence
  chemically synthesized
tttccatgacctcatgctct

SEQ ID NO: 20640 - DNA, 20 bp, Artificial Sequence
  chemically synthesized
cctcatgctcttggccctcg

SEQ ID NO: 20641 - DNA, 20 bp, Artificial Sequence
  chemically synthesized
tagctccctcccgcctcctc

SEQ ID NO: 20642 - DNA, 20 bp, Artificial Sequence
  chemically synthesized
tccctcccgcctcctccaga

SEQ ID NO: 20643 - DNA, 20 bp, Artificial Sequence
  chemically synthesized
ccctcccgcctcctccagat

SEQ ID NO: 20644 - DNA, 20 bp, Artificial Sequence
  chemically synthesized
tcccgcctcctccagatggg

SEQ ID NO: 20645 - DNA, 20 bp, Artificial Sequence
  chemically synthesized
ctcctccagatgggcagctt

SEQ ID NO: 20646 - DNA, 20 bp, Artificial Sequence
  chemically synthesized
cctccagatgggcagctttg

SEQ ID NO: 20647 - DNA, 20 bp, Artificial Sequence
  chemically synthesized
tccagatgggcagctttgga

SEQ ID NO: 20648 - DNA, 20 bp, Artificial Sequence
  chemically synthesized
ccagatgggcagctttggag

SEQ ID NO: 20649 - DNA, 20 bp, Artificial Sequence
  chemically synthesized
atgggcagctttggagaggt

SEQ ID NO: 20650 - DNA, 20 bp, Artificial Sequence
  chemically synthesized
tgggcagctttggagaggtg

SEQ ID NO: 20651 - DNA, 20 bp, Artificial Sequence
  chemically synthesized
gggcagctttggagaggtga

SEQ ID NO: 20652 - DNA, 20 bp, Artificial Sequence
  chemically synthesized
ctttggagaggtgagggact

SEQ ID NO: 20653 - DNA, 20 bp, Artificial Sequence
  chemically synthesized
tttggagaggtgagggactt

SEQ ID NO: 20654 - DNA, 20 bp, Artificial Sequence
  chemically synthesized
ttggagaggtgagggacttg

SEQ ID NO: 20655 - DNA, 20 bp, Artificial Sequence
  chemically synthesized
tggagaggtgagggacttgg

SEQ ID NO: 20656 - DNA, 20 bp, Artificial Sequence
  chemically synthesized
ggagaggtgagggacttggg

SEQ ID NO: 20657 - DNA, 20 bp, Artificial Sequence
  chemically synthesized
ttggggggtaatttatcccg

SEQ ID NO: 20658 - DNA, 20 bp, Artificial Sequence
  chemically synthesized
ggtaatttatcccgtggatc

SEQ ID NO: 20659 - DNA, 20 bp, Artificial Sequence
  chemically synthesized
gtaatttatcccgtggatct

SEQ ID NO: 20660 - DNA, 20 bp, Artificial Sequence
  chemically synthesized
aatttatcccgtggatctag

SEQ ID NO: 20661 - DNA, 20 bp, Artificial Sequence
  chemically synthesized
atcccgtggatctaggagtt

SEQ ID NO: 20662 - DNA, 20 bp, Artificial Sequence
  chemically synthesized
gtttagcttcactccttcct

SEQ ID NO: 20663 - DNA, 20 bp, Artificial Sequence
  chemically synthesized
cttcactccttcctcagctc

SEQ ID NO: 20664 - DNA, 20 bp, Artificial Sequence
  chemically synthesized
ctccttcctcagctccagtt

SEQ ID NO: 20665 - DNA, 20 bp, Artificial Sequence
  chemically synthesized
tccttcctcagctccagttc

SEQ ID NO: 20666 - DNA, 20 bp, Artificial Sequence
  chemically synthesized
ctcagctccagttcaggtcc

SEQ ID NO: 20667 - DNA, 20 bp, Artificial Sequence
  chemically synthesized
cagctccagttcaggtcccg

SEQ ID NO: 20668 - DNA, 20 bp, Artificial Sequence
  chemically synthesized
ttcaggtcccggagcccacc

SEQ ID NO: 20669 - DNA, 20 bp, Artificial Sequence
  chemically synthesized
ggagcccacccagtgtccac

SEQ ID NO: 20670 - DNA, 20 bp, Artificial Sequence
  chemically synthesized
gagcccacccagtgtccaca

SEQ ID NO: 20671 - DNA, 20 bp, Artificial Sequence
  chemically synthesized
cacccagtgtccacaaggcc

SEQ ID NO: 20672 - DNA, 20 bp, Artificial Sequence
  chemically synthesized
acccagtgtccacaaggcct

SEQ ID NO: 20673 - DNA, 20 bp, Artificial Sequence
  chemically synthesized
cccagtgtccacaaggcctg

SEQ ID NO: 20674 - DNA, 20 bp, Artificial Sequence
  chemically synthesized
gtgtccacaaggcctggggc

SEQ ID NO: 20675 - DNA, 20 bp, Artificial Sequence
  chemically synthesized
aagtccctcctccgaccccc

SEQ ID NO: 20676 - DNA, 20 bp, Artificial Sequence
  chemically synthesized
tcctccgaccccctggactt

SEQ ID NO: 20677 - DNA, 20 bp, Artificial Sequence
  chemically synthesized
acttcggcttttgtcccccc

SEQ ID NO: 20678 - DNA, 20 bp, Artificial Sequence
  chemically synthesized
gcttttgtccccccaagttt

SEQ ID NO: 20679 - DNA, 20 bp, Artificial Sequence
  chemically synthesized
cccccaagttttggacccct

SEQ ID NO: 20680 - DNA, 20 bp, Artificial Sequence
  chemically synthesized
ccccaagttttggaccccta

SEQ ID NO: 20681 - DNA, 20 bp, Artificial Sequence
  chemically synthesized
cccaagttttggacccctaa

SEQ ID NO: 20682 - DNA, 20 bp, Artificial Sequence
  chemically synthesized
aagttttggacccctaaggg

SEQ ID NO: 20683 - DNA, 20 bp, Artificial Sequence
  chemically synthesized
tggacccctaagggaagaat

SEQ ID NO: 20684 - DNA, 20 bp, Artificial Sequence
  chemically synthesized
cctaagggaagaatgagaaa

SEQ ID NO: 20685 - DNA, 20 bp, Artificial Sequence
  chemically synthesized
aagggaagaatgagaaacgg

SEQ ID NO: 20686 - DNA, 20 bp, Artificial Sequence
  chemically synthesized
tgagaaacggtggcccgtgt

SEQ ID NO: 20687 - DNA, 20 bp, Artificial Sequence
  chemically synthesized
cggtggcccgtgtcagcccc

SEQ ID NO: 20688 - DNA, 20 bp, Artificial Sequence
  chemically synthesized
cccgtgtcagcccctggctg

SEQ ID NO: 20689 - DNA, 20 bp, Artificial Sequence
  chemically synthesized
ccgtgtcagcccctggctgc

SEQ ID NO: 20690 - DNA, 20 bp, Artificial Sequence
  chemically synthesized
cgtgtcagcccctggctgca

SEQ ID NO: 20691 - DNA, 20 bp, Artificial Sequence
  chemically synthesized
cctggctgcagggccccgtg

SEQ ID NO: 20692 - DNA, 20 bp, Artificial Sequence
  chemically synthesized
tggctgcagggccccgtgca

SEQ ID NO: 20693 - DNA, 20 bp, Artificial Sequence
  chemically synthesized
ggctgcagggccccgtgcag

SEQ ID NO: 20694 - DNA, 20 bp, Artificial Sequence
  chemically synthesized
gctgcagggccccgtgcaga

SEQ ID NO: 20695 - DNA, 20 bp, Artificial Sequence
  chemically synthesized
ctgcagggccccgtgcagag

SEQ ID NO: 20696 - DNA, 20 bp, Artificial Sequence
  chemically synthesized
tgcagggccccgtgcagagg

SEQ ID NO: 20697 - DNA, 20 bp, Artificial Sequence
  chemically synthesized
gccccgtgcagagggggcct

SEQ ID NO: 20698 - DNA, 20 bp, Artificial Sequence
  chemically synthesized
cagagggggcctcagtgaac

SEQ ID NO: 20699 - DNA, 20 bp, Artificial Sequence
  chemically synthesized
gagggggcctcagtgaactg

SEQ ID NO: 20700 - DNA, 20 bp, Artificial Sequence
  chemically synthesized
ctcagtgaactggagtgtga

SEQ ID NO: 20701 - DNA, 20 bp, Artificial Sequence
  chemically synthesized
tgaactggagtgtgacagcc

SEQ ID NO: 20702 - DNA, 20 bp, Artificial Sequence
  chemically synthesized
gaactggagtgtgacagcct

SEQ ID NO: 20703 - DNA, 20 bp, Artificial Sequence
  chemically synthesized
aactggagtgtgacagcctg

SEQ ID NO: 20704 - DNA, 20 bp, Artificial Sequence
  chemically synthesized
gagtgtgacagcctggggcc

SEQ ID NO: 20705 - DNA, 20 bp, Artificial Sequence
  chemically synthesized
agtgtgacagcctggggccc

SEQ ID NO: 20706 - DNA, 20 bp, Artificial Sequence
  chemically synthesized
cagcctggggcccaggcaca

SEQ ID NO: 20707 - DNA, 20 bp, Artificial Sequence
  chemically synthesized
agcctggggcccaggcacac

SEQ ID NO: 20708 - DNA, 20 bp, Artificial Sequence
  chemically synthesized
ggcccaggcacacaggtgtg

SEQ ID NO: 20709 - DNA, 20 bp, Artificial Sequence
  chemically synthesized
gtgcagctgtctcacccctc

SEQ ID NO: 20710 - DNA, 20 bp, Artificial Sequence
  chemically synthesized
tgcagctgtctcacccctct

SEQ ID NO: 20711 - DNA, 20 bp, Artificial Sequence
  chemically synthesized
cagctgtctcacccctctgg

SEQ ID NO: 20712 - DNA, 20 bp, Artificial Sequence
  chemically synthesized
acccctctgggagtcccgcc

SEQ ID NO: 20713 - DNA, 20 bp, Artificial Sequence
  chemically synthesized
cccctctgggagtcccgccc

SEQ ID NO: 20714 - DNA, 20 bp, Artificial Sequence
  chemically synthesized
ggagtcccgcccaggcccct

SEQ ID NO: 20715 - DNA, 20 bp, Artificial Sequence
  chemically synthesized
ccaggcccctgagtctgtcc

SEQ ID NO: 20716 - DNA, 20 bp, Artificial Sequence
  chemically synthesized
cccctgagtctgtcccagca

SEQ ID NO: 20717 - DNA, 20 bp, Artificial Sequence
  chemically synthesized
ccctgagtctgtcccagcac

SEQ ID NO: 20718 - DNA, 20 bp, Artificial Sequence
  chemically synthesized
cctgagtctgtcccagcaca

SEQ ID NO: 20719 - DNA, 20 bp, Artificial Sequence
  chemically synthesized
gagtctgtcccagcacaggg

SEQ ID NO: 20720 - DNA, 20 bp, Artificial Sequence
  chemically synthesized
tggccttcctccaccctgca

SEQ ID NO: 20721 - DNA, 20 bp, Artificial Sequence
  chemically synthesized
tcctccaccctgcatagccc

SEQ ID NO: 20722 - DNA, 20 bp, Artificial Sequence
  chemically synthesized
cctccaccctgcatagccct

SEQ ID NO: 20723 - DNA, 20 bp, Artificial Sequence
  chemically synthesized
cctgcatagccctgggccca

SEQ ID NO: 20724 - DNA, 20 bp, Artificial Sequence
  chemically synthesized
ggcccacggcttcgttcctg

SEQ ID NO: 20725 - DNA, 20 bp, Artificial Sequence
  chemically synthesized
cccacggcttcgttcctgca

SEQ ID NO: 20726 - DNA, 20 bp, Artificial Sequence
  chemically synthesized
cgttcctgcagagtatctgc

SEQ ID NO: 20727 - DNA, 20 bp, Artificial Sequence
  chemically synthesized
gttcctgcagagtatctgct

SEQ ID NO: 20728 - DNA, 20 bp, Artificial Sequence
  chemically synthesized
ttcctgcagagtatctgctg

SEQ ID NO: 20729 - DNA, 20 bp, Artificial Sequence
  chemically synthesized
ctgcagagtatctgctgggg

SEQ ID NO: 20730 - DNA, 20 bp, Artificial Sequence
  chemically synthesized
tatctgctggggtggtttcc

SEQ ID NO: 20731 - DNA, 20 bp, Artificial Sequence
  chemically synthesized
tggtttccgagcttgaccct

SEQ ID NO: 20732 - DNA, 20 bp, Artificial Sequence
  chemically synthesized
tttccgagcttgacccttgg

SEQ ID NO: 20733 - DNA, 20 bp, Artificial Sequence
  chemically synthesized
ttccgagcttgacccttgga

SEQ ID NO: 20734 - DNA, 20 bp, Artificial Sequence
  chemically synthesized
gcttgacccttggaaggacc

SEQ ID NO: 20735 - DNA, 20 bp, Artificial Sequence
  chemically synthesized
gacccttggaaggacctggc

SEQ ID NO: 20736 - DNA, 20 bp, Artificial Sequence
  chemically synthesized
acccttggaaggacctggct

SEQ ID NO: 20737 - DNA, 20 bp, Artificial Sequence
  chemically synthesized
ggaaggacctggctgggttt

SEQ ID NO: 20738 - DNA, 20 bp, Artificial Sequence
  chemically synthesized
gaaggacctggctgggttta

SEQ ID NO: 20739 - DNA, 20 bp, Artificial Sequence
  chemically synthesized
ggacctggctgggtttaagg

SEQ ID NO: 20740 - DNA, 20 bp, Artificial Sequence
  chemically synthesized
gacctggctgggtttaaggc

SEQ ID NO: 20741 - DNA, 20 bp, Artificial Sequence
  chemically synthesized
cctggctgggtttaaggcag

SEQ ID NO: 20742 - DNA, 20 bp, Artificial Sequence
  chemically synthesized
ctggctgggtttaaggcagg

SEQ ID NO: 20743 - DNA, 20 bp, Artificial Sequence
  chemically synthesized
tggctgggtttaaggcagga

SEQ ID NO: 20744 - DNA, 20 bp, Artificial Sequence
  chemically synthesized
ggctgggtttaaggcaggag

SEQ ID NO: 20745 - DNA, 20 bp, Artificial Sequence
  chemically synthesized
gggtttaaggcaggaggggc

SEQ ID NO: 20746 - DNA, 20 bp, Artificial Sequence
  chemically synthesized
ggtttaaggcaggaggggct

SEQ ID NO: 20747 - DNA, 20 bp, Artificial Sequence
  chemically synthesized
gtttaaggcaggaggggctg

SEQ ID NO: 20748 - DNA, 20 bp, Artificial Sequence
  chemically synthesized
tttaaggcaggaggggctgg

SEQ ID NO: 20749 - DNA, 20 bp, Artificial Sequence
  chemically synthesized
aggcaggaggggctgggggc

SEQ ID NO: 20750 - DNA, 20 bp, Artificial Sequence
  chemically synthesized
ggcaggaggggctgggggcc

SEQ ID NO: 20751 - DNA, 20 bp, Artificial Sequence
  chemically synthesized
gggctgggggccaggactcc

SEQ ID NO: 20752 - DNA, 20 bp, Artificial Sequence
  chemically synthesized
ggccaggactcctggctctg

SEQ ID NO: 20753 - DNA, 20 bp, Artificial Sequence
  chemically synthesized
gccaggactcctggctctga

SEQ ID NO: 20754 - DNA, 20 bp, Artificial Sequence
  chemically synthesized
caggactcctggctctgaag

SEQ ID NO: 20755 - DNA, 20 bp, Artificial Sequence
  chemically synthesized
aggactcctggctctgaagg

SEQ ID NO: 20756 - DNA, 20 bp, Artificial Sequence
  chemically synthesized
gactcctggctctgaaggag

SEQ ID NO: 20757 - DNA, 20 bp, Artificial Sequence
  chemically synthesized
actcctggctctgaaggagg

SEQ ID NO: 20758 - DNA, 20 bp, Artificial Sequence
  chemically synthesized
ctcctggctctgaaggagga

SEQ ID NO: 20759 - DNA, 20 bp, Artificial Sequence
  chemically synthesized
tcctggctctgaaggaggag

SEQ ID NO: 20760 - DNA, 20 bp, Artificial Sequence
  chemically synthesized
ggctctgaaggaggaggggc

SEQ ID NO: 20761 - DNA, 20 bp, Artificial Sequence
  chemically synthesized
aggggctggaacctcttccc

SEQ ID NO: 20762 - DNA, 20 bp, Artificial Sequence
  chemically synthesized
tggaacctcttccctagtct

SEQ ID NO: 20763 - DNA, 20 bp, Artificial Sequence
  chemically synthesized
ctcttccctagtctgagcac

SEQ ID NO: 20764 - DNA, 20 bp, Artificial Sequence
  chemically synthesized
ttccctagtctgagcactgg

SEQ ID NO: 20765 - DNA, 20 bp, Artificial Sequence
  chemically synthesized
agcactggaagcgccacctg

SEQ ID NO: 20766 - DNA, 20 bp, Artificial Sequence
  chemically synthesized
gcactggaagcgccacctgt

SEQ ID NO: 20767 - DNA, 20 bp, Artificial Sequence
  chemically synthesized
ctggaagcgccacctgtggg

SEQ ID NO: 20768 - DNA, 20 bp, Artificial Sequence
  chemically synthesized
gcgccacctgtgggtggtga

SEQ ID NO: 20769 - DNA, 20 bp, Artificial Sequence
  chemically synthesized
cgccacctgtgggtggtgac

SEQ ID NO: 20770 - DNA, 20 bp, Artificial Sequence
  chemically synthesized
gccacctgtgggtggtgacg

SEQ ID NO: 20771 - DNA, 20 bp, Artificial Sequence
  chemically synthesized
ccacctgtgggtggtgacgg

SEQ ID NO: 20772 - DNA, 20 bp, Artificial Sequence
  chemically synthesized
gggggttttgccgtgtctaa

SEQ ID NO: 20773 - DNA, 20 bp, Artificial Sequence
  chemically synthesized
ggggttttgccgtgtctaac

SEQ ID NO: 20774 - DNA, 20 bp, Artificial Sequence
  chemically synthesized
cgtgtctaacaggtaccatg

SEQ ID NO: 20775 - DNA, 20 bp, Artificial Sequence
  chemically synthesized
gtgtctaacaggtaccatgt

SEQ ID NO: 20776 - DNA, 20 bp, Artificial Sequence
  chemically synthesized
tgtctaacaggtaccatgtg

SEQ ID NO: 20777 - DNA, 20 bp, Artificial Sequence
  chemically synthesized
ccatgtggggttcccgcacc

SEQ ID NO: 20778 - DNA, 20 bp, Artificial Sequence
  chemically synthesized
tggggttcccgcacccagat

SEQ ID NO: 20779 - DNA, 20 bp, Artificial Sequence
  chemically synthesized
ggttcccgcacccagatgag

SEQ ID NO: 20780 - DNA, 20 bp, Artificial Sequence
  chemically synthesized
ccccgttcacttcctgtttg

SEQ ID NO: 20781 - DNA, 20 bp, Artificial Sequence
  chemically synthesized
gttcacttcctgtttgcaga

SEQ ID NO: 20782 - DNA, 20 bp, Artificial Sequence
  chemically synthesized
acttcctgtttgcagatagc

SEQ ID NO: 20783 - DNA, 20 bp, Artificial Sequence
  chemically synthesized
cttcctgtttgcagatagcc

SEQ ID NO: 20784 - DNA, 20 bp, Artificial Sequence
  chemically synthesized
tcctgtttgcagatagccag

SEQ ID NO: 20785 - DNA, 20 bp, Artificial Sequence
  chemically synthesized
gatagccaggagtcctttcg

SEQ ID NO: 20786 - DNA, 20 bp, Artificial Sequence
  chemically synthesized
gtcctttcgtggtttccact

SEQ ID NO: 20787 - DNA, 20 bp, Artificial Sequence
  chemically synthesized
gtggtttccactgagcactg

SEQ ID NO: 20788 - DNA, 20 bp, Artificial Sequence
  chemically synthesized
tggtttccactgagcactga

SEQ ID NO: 20789 - DNA, 20 bp, Artificial Sequence
  chemically synthesized
tccactgagcactgaaggcc

SEQ ID NO: 20790 - DNA, 20 bp, Artificial Sequence
  chemically synthesized
ctgagcactgaaggcctggc

SEQ ID NO: 20791 - DNA, 20 bp, Artificial Sequence
  chemically synthesized
ggcctggccggcctgaccac

SEQ ID NO: 20792 - DNA, 20 bp, Artificial Sequence
  chemically synthesized
gcctggccggcctgaccact

SEQ ID NO: 20793 - DNA, 20 bp, Artificial Sequence
  chemically synthesized
cggcctgaccactgggcaac

SEQ ID NO: 20794 - DNA, 20 bp, Artificial Sequence
  chemically synthesized
ggcctgaccactgggcaacc

SEQ ID NO: 20795 - DNA, 20 bp, Artificial Sequence
  chemically synthesized
gcaaccaggcgtatcttaaa

SEQ ID NO: 20796 - DNA, 20 bp, Artificial Sequence
  chemically synthesized
ccaggcgtatcttaaacagc

SEQ ID NO: 20797 - DNA, 20 bp, Artificial Sequence
  chemically synthesized
ggcgtatcttaaacagccag

SEQ ID NO: 20798 - DNA, 20 bp, Artificial Sequence
  chemically synthesized
tatcttaaacagccagtggc

SEQ ID NO: 20799 - DNA, 20 bp, Artificial Sequence
  chemically synthesized
tcttaaacagccagtggcca

SEQ ID NO: 20800 - DNA, 20 bp, Artificial Sequence
  chemically synthesized
cttaaacagccagtggccag

SEQ ID NO: 20801 - DNA, 20 bp, Artificial Sequence
  chemically synthesized
agccagtggccagaggctgt

SEQ ID NO: 20802 - DNA, 20 bp, Artificial Sequence
  chemically synthesized
gccagtggccagaggctgtt

SEQ ID NO: 20803 - DNA, 20 bp, Artificial Sequence
  chemically synthesized
ggtcattttccccactgtcc

SEQ ID NO: 20804 - DNA, 20 bp, Artificial Sequence
  chemically synthesized
ctgtcctagcaccgtgtccc

SEQ ID NO: 20805 - DNA, 20 bp, Artificial Sequence
  chemically synthesized
tgtccctggatctgttttcg

SEQ ID NO: 20806 - DNA, 20 bp, Artificial Sequence
  chemically synthesized
tctgttttcgtggctccctc

SEQ ID NO: 20807 - DNA, 20 bp, Artificial Sequence
  chemically synthesized
tgttttcgtggctccctctg

SEQ ID NO: 20808 - DNA, 20 bp, Artificial Sequence
  chemically synthesized
cctctggagtcccgacttgc

SEQ ID NO: 20809 - DNA, 20 bp, Artificial Sequence
  chemically synthesized
ctctggagtcccgacttgct

SEQ ID NO: 20810 - DNA, 20 bp, Artificial Sequence
  chemically synthesized
cccgacttgctgggacaccg

SEQ ID NO: 20811 - DNA, 20 bp, Artificial Sequence
  chemically synthesized
acttgctgggacaccgtggc

SEQ ID NO: 20812 - DNA, 20 bp, Artificial Sequence
  chemically synthesized
cttgctgggacaccgtggct

SEQ ID NO: 20813 - DNA, 20 bp, Artificial Sequence
  chemically synthesized
ttgctgggacaccgtggctg

SEQ ID NO: 20814 - DNA, 20 bp, Artificial Sequence
  chemically synthesized
ctgggacaccgtggctgggg

SEQ ID NO: 20815 - DNA, 20 bp, Artificial Sequence
  chemically synthesized
tgggacaccgtggctggggt

SEQ ID NO: 20816 - DNA, 20 bp, Artificial Sequence
  chemically synthesized
caccgtggctggggtaggtg

SEQ ID NO: 20817 - DNA, 20 bp, Artificial Sequence
  chemically synthesized
gctggggtaggtgcggctga

SEQ ID NO: 20818 - DNA, 20 bp, Artificial Sequence
  chemically synthesized
tgacggctgtttcccacccc

SEQ ID NO: 20819 - DNA, 20 bp, Artificial Sequence
  chemically synthesized
gacggctgtttcccaccccc

SEQ ID NO: 20820 - DNA, 20 bp, Artificial Sequence
  chemically synthesized
acccccaggcctgcattgat

SEQ ID NO: 20821 - DNA, 20 bp, Artificial Sequence
  chemically synthesized
ggcctgcattgatgagaacc

SEQ ID NO: 20822 - DNA, 20 bp, Artificial Sequence
  chemically synthesized
cctgcattgatgagaacctg

SEQ ID NO: 20823 - DNA, 20 bp, Artificial Sequence
  chemically synthesized
ctgcattgatgagaacctgg

SEQ ID NO: 20824 - DNA, 20 bp, Artificial Sequence
  chemically synthesized
cattgatgagaacctggagg

SEQ ID NO: 20825 - DNA, 20 bp, Artificial Sequence
  chemically synthesized
cctggaggtggtgcgcttct

SEQ ID NO: 20826 - DNA, 20 bp, Artificial Sequence
  chemically synthesized
ggaggtggtgcgcttcttgg

SEQ ID NO: 20827 - DNA, 20 bp, Artificial Sequence
  chemically synthesized
aggtggtgcgcttcttggtg

SEQ ID NO: 20828 - DNA, 20 bp, Artificial Sequence
  chemically synthesized
tggtgcgcttcttggtggag

SEQ ID NO: 20829 - DNA, 20 bp, Artificial Sequence
  chemically synthesized
ggtgcgcttcttggtggagc

SEQ ID NO: 20830 - DNA, 20 bp, Artificial Sequence
  chemically synthesized
gtgcgcttcttggtggagca

SEQ ID NO: 20831 - DNA, 20 bp, Artificial Sequence
  chemically synthesized
agcagggcgccactgtgaac

SEQ ID NO: 20832 - DNA, 20 bp, Artificial Sequence
  chemically synthesized
gcagggcgccactgtgaacc

SEQ ID NO: 20833 - DNA, 20 bp, Artificial Sequence
  chemically synthesized
gggcgccactgtgaaccagg

SEQ ID NO: 20834 - DNA, 20 bp, Artificial Sequence
  chemically synthesized
ctgtgaaccaggcagacaac

SEQ ID NO: 20835 - DNA, 20 bp, Artificial Sequence
  chemically synthesized
tgtgaaccaggcagacaacg

SEQ ID NO: 20836 - DNA, 20 bp, Artificial Sequence
  chemically synthesized
gtgaaccaggcagacaacga

SEQ ID NO: 20837 - DNA, 20 bp, Artificial Sequence
  chemically synthesized
accaggcagacaacgagggc

SEQ ID NO: 20838 - DNA, 20 bp, Artificial Sequence
  chemically synthesized
gggctggacgccactgcacg

SEQ ID NO: 20839 - DNA, 20 bp, Artificial Sequence
  chemically synthesized
ctgcacgtggccgcctcctg

SEQ ID NO: 20840 - DNA, 20 bp, Artificial Sequence
  chemically synthesized
ggccgcctcctgtggctacc

SEQ ID NO: 20841 - DNA, 20 bp, Artificial Sequence
  chemically synthesized
tgtggctacctagatatcgc

SEQ ID NO: 20842 - DNA, 20 bp, Artificial Sequence
  chemically synthesized
gttctcatcaatgcaggcct

SEQ ID NO: 20843 - DNA, 20 bp, Artificial Sequence
  chemically synthesized
gaagggagggggcttctcat

SEQ ID NO: 20844 - DNA, 20 bp, Artificial Sequence
  chemically synthesized
gcccctcctccttcagagcc

SEQ ID NO: 20845 - DNA, 20 bp, Artificial Sequence
  chemically synthesized
aaacccagccaggtccttcc

SEQ ID NO: 20846 - DNA, 20 bp, Artificial Sequence
  chemically synthesized
gccgtgggcccagggctatg

SEQ ID NO: 20847 - DNA, 20 bp, Artificial Sequence
  chemically synthesized
ggcctgggcgggactcccag

SEQ ID NO: 20848 - DNA, 20 bp, Artificial Sequence
  chemically synthesized
ccgtttctcattcttccctt

SEQ ID NO: 20849 - DNA, 20 bp, Artificial Sequence
  chemically synthesized
gggacaaaagccgaagtcca

SEQ ID NO: 20850 - DNA, 20 bp, Artificial Sequence
  chemically synthesized
tgccccaggccttgtggaca

SEQ ID NO: 20851 - DNA, 20 bp, Artificial Sequence
  chemically synthesized
acctgaactggagctgagga

SEQ ID NO: 20852 - DNA, 20 bp, Artificial Sequence
  chemically synthesized
aagctaaactcctagatcca

SEQ ID NO: 20853 - DNA, 20 bp, Artificial Sequence
  chemically synthesized
ggccgcacgtgccctgggaa

SEQ ID NO: 20854 - DNA, 20 bp, Artificial Sequence
  chemically synthesized
ggcctgggcaccagggactc

SEQ ID NO: 20855 - DNA, 20 bp, Artificial Sequence
  chemically synthesized
gcccttccgccctcagatga

SEQ ID NO: 20856 - DNA, 20 bp, Artificial Sequence
  chemically synthesized
gcctctccccattcagaccc

SEQ ID NO: 20857 - DNA, 20 bp, Artificial Sequence
  chemically synthesized
gcccctcctccctcagaccc

SEQ ID NO: 20858 - DNA, 20 bp, Artificial Sequence
  chemically synthesized
gcccctcctccctcggaccc

SEQ ID NO: 20859 - DNA, 20 bp, Artificial Sequence
  chemically synthesized
gtccctccaccctcagaccc

SEQ ID NO: 20860 - DNA, 20 bp, Artificial Sequence
  chemically synthesized
gcccctcctccctcggaccc

SEQ ID NO: 20861 - DNA, 20 bp, Artificial Sequence
  chemically synthesized
gctcttctctgttcagccct

SEQ ID NO: 20862 - DNA, 20 bp, Artificial Sequence
  chemically synthesized
cccctagccactaaggcaat

SEQ ID NO: 20863 - DNA, 20 bp, Artificial Sequence
  chemically synthesized
cactaaggcaattggggtgc

SEQ ID NO: 20864 - DNA, 20 bp, Artificial Sequence
  chemically synthesized
ttggggtgcaggaatggggg

SEQ ID NO: 20865 - DNA, 20 bp, Artificial Sequence
  chemically synthesized
aagtggttgataaacccacg

SEQ ID NO: 20866 - DNA, 20 bp, Artificial Sequence
  chemically synthesized
gcttggggacctgcctggag

SEQ ID NO: 20867 - DNA, 20 bp, Artificial Sequence
  chemically synthesized
cccaggtggagaaactggcc

SEQ ID NO: 20868 - DNA, 20 bp, Artificial Sequence
  chemically synthesized
ggagaaactggccgggaatc

SEQ ID NO: 20869 - DNA, 20 bp, Artificial Sequence
  chemically synthesized
atccctgttttcctaggact

SEQ ID NO: 20870 - DNA, 20 bp, Artificial Sequence
  chemically synthesized
ttggccacgtaacctgagaa

SEQ ID NO: 20871 - DNA, 20 bp, Artificial Sequence
  chemically synthesized
ccccaatgctccaggcctcc

SEQ ID NO: 20872 - DNA, 20 bp, Artificial Sequence
  chemically synthesized
aggcctcctgggataccccg

SEQ ID NO: 20873 - DNA, 20 bp, Artificial Sequence
  chemically synthesized
ctcctgggataccccgaaga

SEQ ID NO: 20874 - DNA, 20 bp, Artificial Sequence
  chemically synthesized
cagtcaccccacagttggag

SEQ ID NO: 20875 - DNA, 20 bp, Artificial Sequence
  chemically synthesized
ggcagcctggtagacagggc

SEQ ID NO: 20876 - DNA, 20 bp, Artificial Sequence
  chemically synthesized
agggctggggtggcctctcg

SEQ ID NO: 20877 - DNA, 20 bp, Artificial Sequence
  chemically synthesized
taggtggcctggggcctctg

SEQ ID NO: 20878 - DNA, 20 bp, Artificial Sequence
  chemically synthesized
tctgggggatgcaggggaag

SEQ ID NO: 20879 - DNA, 20 bp, Artificial Sequence
  chemically synthesized
gaagggggatgcaggggaac

SEQ ID NO: 20880 - DNA, 20 bp, Artificial Sequence
  chemically synthesized
cgggaccctgctctgggcgg

SEQ ID NO: 20881 - DNA, 20 bp, Artificial Sequence
  chemically synthesized
tggggactctttaaggaaag

SEQ ID NO: 20882 - DNA, 20 bp, Artificial Sequence
  chemically synthesized
gaaggatggagaaagagaaa

SEQ ID NO: 20883 - DNA, 20 bp, Artificial Sequence
  chemically synthesized
ggacgcaccattctcacaaa

SEQ ID NO: 20884 - DNA, 20 bp, Artificial Sequence
  chemically synthesized
gtgtaaggaagctgcagcac

SEQ ID NO: 20885 - DNA, 20 bp, Artificial Sequence
  chemically synthesized
gagcagctcaggttctggga

SEQ ID NO: 20886 - DNA, 20 bp, Artificial Sequence
  chemically synthesized
ggttctgggagagggtagcg

SEQ ID NO: 20887 - DNA, 20 bp, Artificial Sequence
  chemically synthesized
ccctgccaagctctccctcc

SEQ ID NO: 20888 - DNA, 20 bp, Artificial Sequence
  chemically synthesized
gagagatggctccaggaaat

SEQ ID NO: 20889 - DNA, 20 bp, Artificial Sequence
  chemically synthesized
tgggggtgtgtcaccagata

SEQ ID NO: 20890 - DNA, 20 bp, Artificial Sequence
  chemically synthesized
gaatctgcctaacaggaggt

SEQ ID NO: 20891 - DNA, 20 bp, Artificial Sequence
  chemically synthesized
gactaggaaggaggaggcct

SEQ ID NO: 20892 - DNA, 20 bp, Artificial Sequence
  chemically synthesized
tgtccctagtggccccactg

SEQ ID NO: 20893 - DNA, 20 bp, Artificial Sequence
  chemically synthesized
gagccacattaaccggccct

SEQ ID NO: 20894 - DNA, 20 bp, Artificial Sequence
  chemically synthesized
gtggtcccagctcggggaca

SEQ ID NO: 20895 - DNA, 20 bp, Artificial Sequence
  chemically synthesized
cctgaagtggacataggggc

SEQ ID NO: 20896 - DNA, 20 bp, Artificial Sequence
  chemically synthesized
gcacagactagagaggtaag

SEQ ID NO: 20897 - DNA, 20 bp, Artificial Sequence
  chemically synthesized
aggggagctgcccaaatgaa

SEQ ID NO: 20898 - DNA, 20 bp, Artificial Sequence
  chemically synthesized
tgaaaggagtgagaggtgac

SEQ ID NO: 20899 - DNA, 20 bp, Artificial Sequence
  chemically synthesized
gacccgaatccacaggagaa

SEQ ID NO: 20900 - DNA, 20 bp, Artificial Sequence
  chemically synthesized
tgtccaggcaaagaaagcaa

SEQ ID NO: 20901 - DNA, 20 bp, Artificial Sequence
  chemically synthesized
ggtggctaaagccagggaga

SEQ ID NO: 20902 - DNA, 20 bp, Artificial Sequence
  chemically synthesized
gccagggagacggggtactt

SEQ ID NO: 20903 - DNA, 20 bp, Artificial Sequence
  chemically synthesized
gagaaggaaaagggaaccca

SEQ ID NO: 20904 - DNA, 20 bp, Artificial Sequence
  chemically synthesized
cccagcgagtgaagacggca

SEQ ID NO: 20905 - DNA, 20 bp, Artificial Sequence
  chemically synthesized
cgagtgaagacggcatgggg

SEQ ID NO: 20906 - DNA, 20 bp, Artificial Sequence
  chemically synthesized
ggagaggacccagacacggg

SEQ ID NO: 20907 - DNA, 20 bp, Artificial Sequence
  chemically synthesized
agcagagagcaaggggaaga

SEQ ID NO: 20908 - DNA, 20 bp, Artificial Sequence
  chemically synthesized
acctgaaggaggcggcaggg

SEQ ID NO: 20909 - DNA, 20 bp, Artificial Sequence
  chemically synthesized
agcggcacaggcccagggga

SEQ ID NO: 20910 - DNA, 20 bp, Artificial Sequence
  chemically synthesized
gagacggcagcgttagaggg

SEQ ID NO: 20911 - DNA, 20 bp, Artificial Sequence
  chemically synthesized
ggaagaggggaagtcgaggg

SEQ ID NO: 20912 - DNA, 20 bp, Artificial Sequence
  chemically synthesized
gggatggtaaggaggactgc

SEQ ID NO: 20913 - DNA, 20 bp, Artificial Sequence
  chemically synthesized
aaagcgactccaatgcggaa

SEQ ID NO: 20914 - DNA, 20 bp, Artificial Sequence
  chemically synthesized
cggaagagagtaggtcgaag

SEQ ID NO: 20915 - DNA, 20 bp, Artificial Sequence
  chemically synthesized
aatggtaaggaggcctgggg

SEQ ID NO: 20916 - DNA, 20 bp, Artificial Sequence
  chemically synthesized
ctggggcagagtggtcagca

SEQ ID NO: 20917 - DNA, 20 bp, Artificial Sequence
  chemically synthesized
aagcggctccaattcggaag

SEQ ID NO: 20918 - DNA, 20 bp, Artificial Sequence
  chemically synthesized
cggaagtggggtggtcgaag

SEQ ID NO: 20919 - DNA, 20 bp, Artificial Sequence
  chemically synthesized
aatggtaagggggactggga

SEQ ID NO: 20920 - DNA, 20 bp, Artificial Sequence
  chemically synthesized
actgggacggggtgtcagca

SEQ ID NO: 20921 - DNA, 20 bp, Artificial Sequence
  chemically synthesized
ccagggccaggaacgacggg

SEQ ID NO: 20922 - DNA, 20 bp, Artificial Sequence
  chemically synthesized
cgagactggcaacggggaag

SEQ ID NO: 20923 - DNA, 20 bp, Artificial Sequence
  chemically synthesized
atgccccaggtggcgcagca

SEQ ID NO: 20924 - DNA, 20 bp, Artificial Sequence
  chemically synthesized
gctgataccgtcggcgttgg

SEQ ID NO: 20925 - DNA, 20 bp, Artificial Sequence
  chemically synthesized
gcgggcgggcggcggcgcgg

SEQ ID NO: 20926 - DNA, 20 bp, Artificial Sequence
  chemically synthesized
gtcgagctcggcgccggggc

SEQ ID NO: 20927 - DNA, 20 bp, Artificial Sequence
  chemically synthesized
cgggcggtgcgatgtccgga

SEQ ID NO: 20928 - DNA, 20 bp, Artificial Sequence
  chemically synthesized
cgtccgcttcgagcgcgccg

SEQ ID NO: 20929 - DNA, 20 bp, Artificial Sequence
  chemically synthesized
ccccttcgaccaccccactt

SEQ ID NO: 20930 - DNA, 20 bp, Artificial Sequence
  chemically synthesized
cgacctactctcttccgcat

SEQ ID NO: 20931 - DNA, 20 bp, Artificial Sequence
  chemically synthesized
gcgctgccctcctctcgccc

SEQ ID NO: 20932 - DNA, 20 bp, Artificial Sequence
  chemically synthesized
ctaacgctgccgtctctctc

SEQ ID NO: 20933 - DNA, 20 bp, Artificial Sequence
  chemically synthesized
ttctgtctgcagcttgtggc

SEQ ID NO: 20934 - DNA, 20 bp, Artificial Sequence
  chemically synthesized
tctctgctgtgttgctgccc

SEQ ID NO: 20935 - DNA, 20 bp, Artificial Sequence
  chemically synthesized
caccacgtgatgtcctctga

SEQ ID NO: 20936 - DNA, 20 bp, Artificial Sequence
  chemically synthesized
tgagcggatcctccccgtgt

SEQ ID NO: 20937 - DNA, 20 bp, Artificial Sequence
  chemically synthesized
ccccatgccgtcttcactcg

SEQ ID NO: 20938 - DNA, 20 bp, Artificial Sequence
  chemically synthesized
ctgtgccatctctcgtttct

SEQ ID NO: 20939 - DNA, 20 bp, Artificial Sequence
  chemically synthesized
tcttaggatggccttctccg

SEQ ID NO: 20940 - DNA, 20 bp, Artificial Sequence
  chemically synthesized
cctggacaccccgttctcct

SEQ ID NO: 20941 - DNA, 20 bp, Artificial Sequence
  chemically synthesized
caccccgttctcctgtggat

SEQ ID NO: 20942 - DNA, 20 bp, Artificial Sequence
  chemically synthesized
cccctgtcatggcatcttcc

SEQ ID NO: 20943 - DNA, 20 bp, Artificial Sequence
  chemically synthesized
acagcatgtttgctgcctcc

SEQ ID NO: 20944 - DNA, 20 bp, Artificial Sequence
  chemically synthesized
cggttaatgtggctctggtt

SEQ ID NO: 20945 - DNA, 20 bp, Artificial Sequence
  chemically synthesized
cacagtggggccactaggga

SEQ ID NO: 20946 - DNA, 20 bp, Artificial Sequence
  chemically synthesized
tccttcctagtctcctgata

SEQ ID NO: 20947 - DNA, 20 bp, Artificial Sequence
  chemically synthesized
ttgcttacgatggagccaga

SEQ ID NO: 20948 - DNA, 20 bp, Artificial Sequence
  chemically synthesized
ctgggagggagagcttggca

SEQ ID NO: 20949 - DNA, 20 bp, Artificial Sequence
  chemically synthesized
cagggggtgggagggaaggg

SEQ ID NO: 20950 - DNA, 20 bp, Artificial Sequence
  chemically synthesized
gcagtttggaaaaacaaaat

SEQ ID NO: 20951 - DNA, 20 bp, Artificial Sequence
  chemically synthesized
aaaatcagaataagttggtc

SEQ ID NO: 20952 - DNA, 20 bp, Artificial Sequence
  chemically synthesized
ggcagggctgtggtgaggag

SEQ ID NO: 20953 - DNA, 20 bp, Artificial Sequence
  chemically synthesized
gtgtggaaaactccctttgt

SEQ ID NO: 20954 - DNA, 20 bp, Artificial Sequence
  chemically synthesized
tctccatccttctttcctta

SEQ ID NO: 20955 - DNA, 20 bp, Artificial Sequence
  chemically synthesized
acatattcctccgcccagag

SEQ ID NO: 20956 - DNA, 20 bp, Artificial Sequence
  chemically synthesized
taaggccctgctctgggctt

SEQ ID NO: 20957 - DNA, 20 bp, Artificial Sequence
  chemically synthesized
cctgctctgggcttctgggt

SEQ ID NO: 20958 - DNA, 20 bp, Artificial Sequence
  chemically synthesized
ctctcctgccccttccctac

SEQ ID NO: 20959 - DNA, 20 bp, Artificial Sequence
  chemically synthesized
cctgtctaccaggctgcctt

SEQ ID NO: 20960 - DNA, 20 bp, Artificial Sequence
  chemically synthesized
tctaccaggctgccttttgg

SEQ ID NO: 20961 - DNA, 20 bp, Artificial Sequence
  chemically synthesized
ggtggattctcctccaactg

SEQ ID NO: 20962 - DNA, 20 bp, Artificial Sequence
  chemically synthesized
tgcttggcaaactcactctt

SEQ ID NO: 20963 - DNA, 20 bp, Artificial Sequence
  chemically synthesized
tcccaggaggcctggagcat

SEQ ID NO: 20964 - DNA, 20 bp, Artificial Sequence
  chemically synthesized
cctggagcattggggtgggc

SEQ ID NO: 20965 - DNA, 20 bp, Artificial Sequence
  chemically synthesized
tgggctggggttcagagagg

SEQ ID NO: 20966 - DNA, 20 bp, Artificial Sequence
  chemically synthesized
gtggccaagaagcaggggag

SEQ ID NO: 20967 - DNA, 20 bp, Artificial Sequence
  chemically synthesized
aagaagcaggggagctgggt

SEQ ID NO: 20968 - DNA, 20 bp, Artificial Sequence
  chemically synthesized
gagctgggtttgggtcaggt

SEQ ID NO: 20969 - DNA, 20 bp, Artificial Sequence
  chemically synthesized
gtttgggtcaggtctgggtg

SEQ ID NO: 20970 - DNA, 20 bp, Artificial Sequence
  chemically synthesized
accctcagtcctaggaaaac

SEQ ID NO: 20971 - DNA, 20 bp, Artificial Sequence
  chemically synthesized
gggatggttggtcactgtct

SEQ ID NO: 20972 - DNA, 20 bp, Artificial Sequence
  chemically synthesized
tgtggctgttcccaagttct

SEQ ID NO: 20973 - DNA, 20 bp, Artificial Sequence
  chemically synthesized
aagttcttagggtaccccac

SEQ ID NO: 20974 - DNA, 20 bp, Artificial Sequence
  chemically synthesized
cccaattgccttagtggcta

SEQ ID NO: 20975 - DNA, 20 bp, Artificial Sequence
  chemically synthesized
gtggctagggggttgggggc

SEQ ID NO: 20976 - DNA, 20 bp, Artificial Sequence
  chemically synthesized
agagtaggaggggctggagc

SEQ ID NO: 20977 - DNA, 20 bp, Artificial Sequence
  chemically synthesized
agagctgggggcctgggctc

SEQ ID NO: 20978 - DNA, 20 bp, Artificial Sequence
  chemically synthesized
aggggctggggcctggactc

SEQ ID NO: 20979 - DNA, 20 bp, Artificial Sequence
  chemically synthesized
aggggctggggcctggactc

SEQ ID NO: 20980 - DNA, 20 bp, Artificial Sequence
  chemically synthesized
gggcctggactcctgggtct

SEQ ID NO: 20981 - DNA, 20 bp, Artificial Sequence
  chemically synthesized
gggactgggggcctggactc

SEQ ID NO: 20982 - DNA, 20 bp, Artificial Sequence
  chemically synthesized
aggggctggggcctggactc

SEQ ID NO: 20983 - DNA, 20 bp, Artificial Sequence
  chemically synthesized
ggggctgggggcctggactt

SEQ ID NO: 20984 - DNA, 20 bp, Artificial Sequence
  chemically synthesized
gcggggctgggcctggaccc

SEQ ID NO: 20985 - DNA, 20 bp, Artificial Sequence
  chemically synthesized
ctgggcctggacccctgggt

SEQ ID NO: 20986 - DNA, 20 bp, Artificial Sequence
  chemically synthesized
aagggctggggcctggcctc

SEQ ID NO: 20987 - DNA, 20 bp, Artificial Sequence
  chemically synthesized
ctggggcctggcctcctggg

SEQ ID NO: 20988 - DNA, 20 bp, Artificial Sequence
  chemically synthesized
gcctcctgggttgaatgggg

SEQ ID NO: 20989 - DNA, 20 bp, Artificial Sequence
  chemically synthesized
gaggggttgggcctggactc

SEQ ID NO: 20990 - DNA, 20 bp, Artificial Sequence
  chemically synthesized
aggcctcaggcatctttcac

SEQ ID NO: 20991 - DNA, 20 bp, Artificial Sequence
  chemically synthesized
ctcccctatcgccatgacaa

SEQ ID NO: 20992 - DNA, 20 bp, Artificial Sequence
  chemically synthesized
actgggtggaaataaacgag

SEQ ID NO: 20993 - DNA, 20 bp, Artificial Sequence
  chemically synthesized
acgtgcggccccttcacagc

SEQ ID NO: 20994 - DNA, 20 bp, Artificial Sequence
  chemically synthesized
ttggagaggtgagggacttg

SEQ ID NO: 20995 - DNA, 20 bp, Artificial Sequence
  chemically synthesized
cttggggggtaatttatccc

SEQ ID NO: 20996 - DNA, 20 bp, Artificial Sequence
  chemically synthesized
gtaatttatcccgtggatct

SEQ ID NO: 20997 - DNA, 20 bp, Artificial Sequence
  chemically synthesized
aagttttggacccctaaggg

SEQ ID NO: 20998 - DNA, 20 bp, Artificial Sequence
  chemically synthesized
cagagggggcctcagtgaac

SEQ ID NO: 20999 - DNA, 20 bp, Artificial Sequence
  chemically synthesized
tgcagctgtctcacccctct

SEQ ID NO: 21000 - DNA, 20 bp, Artificial Sequence
  chemically synthesized
tgggagtcccgcccaggccc

SEQ ID NO: 21001 - DNA, 20 bp, Artificial Sequence
  chemically synthesized
cccctgagtctgtcccagca

SEQ ID NO: 21002 - DNA, 20 bp, Artificial Sequence
  chemically synthesized
ggcccacggcttcgttcctg

SEQ ID NO: 21003 - DNA, 20 bp, Artificial Sequence
  chemically synthesized
cgttcctgcagagtatctgc

SEQ ID NO: 21004 - DNA, 20 bp, Artificial Sequence
  chemically synthesized
tgacccttggaaggacctgg

SEQ ID NO: 21005 - DNA, 20 bp, Artificial Sequence
  chemically synthesized
gagcactggaagcgccacct

SEQ ID NO: 21006 - DNA, 20 bp, Artificial Sequence
  chemically synthesized
cgccacctgtgggtggtgac

SEQ ID NO: 21007 - DNA, 20 bp, Artificial Sequence
  chemically synthesized
cgtgtctaacaggtaccatg

SEQ ID NO: 21008 - DNA, 20 bp, Artificial Sequence
  chemically synthesized
cttcctgtttgcagatagcc

SEQ ID NO: 21009 - DNA, 20 bp, Artificial Sequence
  chemically synthesized
cagccagtggccagaggctg

SEQ ID NO: 21010 - DNA, 20 bp, Artificial Sequence
  chemically synthesized
actgtcctagcaccgtgtcc

SEQ ID NO: 21011 - DNA, 20 bp, Artificial Sequence
  chemically synthesized
tctgttttcgtggctccctc

SEQ ID NO: 21012 - DNA, 20 bp, Artificial Sequence
  chemically synthesized
acttgctgggacaccgtggc

SEQ ID NO: 21013 - DNA, 20 bp, Artificial Sequence
  chemically synthesized
agctcttctctgttcagccc

SEQ ID NO: 21014 - DNA, 20 bp, Artificial Sequence
  chemically synthesized
gcctggagaaggatgcagga

SEQ ID NO: 21015 - DNA, 20 bp, Artificial Sequence
  chemically synthesized
cgagaaacacagccccaggt

SEQ ID NO: 21016 - DNA, 20 bp, Artificial Sequence
  chemically synthesized
gcagtcaccccacagttgga

SEQ ID NO: 21017 - DNA, 20 bp, Artificial Sequence
  chemically synthesized
ctctttaaggaaagaaggat

SEQ ID NO: 21018 - DNA, 20 bp, Artificial Sequence
  chemically synthesized
aaggaaagaaggatggagaa

SEQ ID NO: 21019 - DNA, 20 bp, Artificial Sequence
  chemically synthesized
ggaacaatataaattgggga

SEQ ID NO: 21020 - DNA, 20 bp, Artificial Sequence
  chemically synthesized
ggagaacggggtgtccaggc

SEQ ID NO: 21021 - DNA, 20 bp, Artificial Sequence
  chemically synthesized
acggggtactttggggttgt

SEQ ID NO: 21022 - DNA, 20 bp, Artificial Sequence
  chemically synthesized
tccgtcggagaaggccatcc

SEQ ID NO: 21023 - DNA, 20 bp, Artificial Sequence
  chemically synthesized
acccaggccacaagctgcag

SEQ ID NO: 21024 - DNA, 20 bp, Artificial Sequence
  chemically synthesized
aagcggcacaggcccagggg

SEQ ID NO: 21025 - DNA, 20 bp, Artificial Sequence
  chemically synthesized
caggggagagaatgcaggtc

SEQ ID NO: 21026 - DNA, 20 bp, Artificial Sequence
  chemically synthesized
cactagggacaggattggtg

SEQ ID NO: 21027 - DNA, 20 bp, Artificial Sequence
  chemically synthesized
agcagtttggaaaaacaaaa

SEQ ID NO: 21028 - DNA, 20 bp, Artificial Sequence
  chemically synthesized
cgtgtggaaaactccctttg

SEQ ID NO: 21029 - DNA, 20 bp, Artificial Sequence
  chemically synthesized
caagttttggacccctaagg

SEQ ID NO: 21030 - DNA, 20 bp, Artificial Sequence
  chemically synthesized
ttggacccctaagggaagaa

SEQ ID NO: 21031 - DNA, 20 bp, Artificial Sequence
  chemically synthesized
gggactccagagggagccac

SEQ ID NO: 21032 - DNA, 20 bp, Artificial Sequence
  chemically synthesized
atggtacctgttagacacgg

SEQ ID NO: 21033 - DNA, 20 bp, Artificial Sequence
  chemically synthesized
tcattcttcccttaggggtc

SEQ ID NO: 21034 - DNA, 20 bp, Artificial Sequence
  chemically synthesized
aggactgagggtttcagtgc

SEQ ID NO: 21035 - DNA, 20 bp, Artificial Sequence
  chemically synthesized
tactggccttatctcacagg

SEQ ID NO: 21036 - DNA, 20 bp, Artificial Sequence
  chemically synthesized
ggtactttggggttgtccag

SEQ ID NO: 21037 - DNA, 20 bp, Artificial Sequence
  chemically synthesized
caagaggagaagcagtttgg

SEQ ID NO: 21038 - DNA, 20 bp, Artificial Sequence
  chemically synthesized
aggaggggggtgtccgtgtg

SEQ ID NO: 21039 - DNA, 20 bp, Artificial Sequence
  chemically synthesized
actgaaaccctcagtcctag

SEQ ID NO: 21040 - DNA, 20 bp, Artificial Sequence
  chemically synthesized
cccaacagcctctggccact

SEQ ID NO: 21041 - DNA, 20 bp, Artificial Sequence
  chemically synthesized
ggaagtgaacggggaaggga

SEQ ID NO: 21042 - DNA, 20 bp, Artificial Sequence
  chemically synthesized
cccccgtcaccacccacagg

SEQ ID NO: 21043 - DNA, 20 bp, Artificial Sequence
  chemically synthesized
agccaggggctgacacgggc

SEQ ID NO: 21044 - DNA, 20 bp, Artificial Sequence
  chemically synthesized
ctgggaacgggatgaactcg

SEQ ID NO: 21045 - DNA, 20 bp, Artificial Sequence
  chemically synthesized
gaacagccacagcagggggg

SEQ ID NO: 21046 - DNA, 20 bp, Artificial Sequence
  chemically synthesized
cagagacagtgaccaaccat

SEQ ID NO: 21047 - DNA, 20 bp, Artificial Sequence
  chemically synthesized
atccctgttttcctaggact

SEQ ID NO: 21048 - DNA, 20 bp, Artificial Sequence
  chemically synthesized
acctgacccaaacccagctc

SEQ ID NO: 21049 - DNA, 20 bp, Artificial Sequence
  chemically synthesized
ctcctgggataccccgaaga

SEQ ID NO: 21050 - DNA, 20 bp, Artificial Sequence
  chemically synthesized
gggaagcctgagcgcctctc

SEQ ID NO: 21051 - DNA, 20 bp, Artificial Sequence
  chemically synthesized
ggacgcaccattctcacaaa

SEQ ID NO: 21052 - DNA, 20 bp, Artificial Sequence
  chemically synthesized
tagaactcaggaccaactta

SEQ ID NO: 21053 - DNA, 20 bp, Artificial Sequence
  chemically synthesized
tcaggaccaacttattctga

SEQ ID NO: 21054 - DNA, 20 bp, Artificial Sequence
  chemically synthesized
attctgattttgtttttcca

SEQ ID NO: 21055 - DNA, 20 bp, Artificial Sequence
  chemically synthesized
ggaaggaggaggcctaagga

SEQ ID NO: 21056 - DNA, 20 bp, Artificial Sequence
  chemically synthesized
gagagcgccgcgcccgcacc

SEQ ID NO: 21057 - DNA, 20 bp, Artificial Sequence
  chemically synthesized
ccgccccgtcgttcctggcc

SEQ ID NO: 21058 - DNA, 20 bp, Artificial Sequence
  chemically synthesized
ccaccccacttccgaattgg

SEQ ID NO: 21059 - DNA, 20 bp, Artificial Sequence
  chemically synthesized
tggagccgcttcaactggcc

SEQ ID NO: 21060 - DNA, 20 bp, Artificial Sequence
  chemically synthesized
cctactctcttccgcattgg

SEQ ID NO: 21061 - DNA, 20 bp, Artificial Sequence
  chemically synthesized
ttggagtcgctttaactggc

SEQ ID NO: 21062 - DNA, 20 bp, Artificial Sequence
  chemically synthesized
tccggaccactttgagctct

SEQ ID NO: 21063 - DNA, 20 bp, Artificial Sequence
  chemically synthesized
cttctgcgccgcctctggcc

SEQ ID NO: 21064 - DNA, 20 bp, Artificial Sequence
  chemically synthesized
gtttccccttcccaggcagg

SEQ ID NO: 21065 - DNA, 20 bp, Artificial Sequence
  chemically synthesized
cattctctcccctgggcctg

SEQ ID NO: 21066 - DNA, 20 bp, Artificial Sequence
  chemically synthesized
ggcctgtgccgctttctgtc

SEQ ID NO: 21067 - DNA, 20 bp, Artificial Sequence
  chemically synthesized
cttctggggcctgtgccatc

SEQ ID NO: 21068 - DNA, 20 bp, Artificial Sequence
  chemically synthesized
ttcttgtaggcctgcatcat

SEQ ID NO: 21069 - DNA, 20 bp, Artificial Sequence
  chemically synthesized
accccaaagtaccccgtctc

SEQ ID NO: 21070 - DNA, 20 bp, Artificial Sequence
  chemically synthesized
ctttagccacctctccatcc

SEQ ID NO: 21071 - DNA, 20 bp, Artificial Sequence
  chemically synthesized
gcctggacaccccgttctcc

SEQ ID NO: 21072 - DNA, 20 bp, Artificial Sequence
  chemically synthesized
cctatgtccacttcaggaca

SEQ ID NO: 21073 - DNA, 20 bp, Artificial Sequence
  chemically synthesized
ccacagtggggccactaggg

SEQ ID NO: 21074 - DNA, 20 bp, Artificial Sequence
  chemically synthesized
ctaacccccacctcctgtta

SEQ ID NO: 21075 - DNA, 20 bp, Artificial Sequence
  chemically synthesized
tctctccttgccagaacctc

SEQ ID NO: 21076 - DNA, 20 bp, Artificial Sequence
  chemically synthesized
tccttgccagaacctctaag

SEQ ID NO: 21077 - DNA, 20 bp, Artificial Sequence
  chemically synthesized
ccagagaggatcctgggagg

SEQ ID NO: 21078 - DNA, 20 bp, Artificial Sequence
  chemically synthesized
tgctctgacgcggccgtctg

SEQ ID NO: 21079 - DNA, 20 bp, Artificial Sequence
  chemically synthesized
cgtttcactgatcctggtgc

SEQ ID NO: 21080 - DNA, 20 bp, Artificial Sequence
  chemically synthesized
ttacacttcccaagaggaga

SEQ ID NO: 21081 - DNA, 20 bp, Artificial Sequence
  chemically synthesized
tttatattgttcctccgtgc

SEQ ID NO: 21082 - DNA, 20 bp, Artificial Sequence
  chemically synthesized
ttcctccgcccagagcaggg

SEQ ID NO: 21083 - DNA, 20 bp, Artificial Sequence
  chemically synthesized
cgcttccctaaggccctgct

SEQ ID NO: 21084 - DNA, 20 bp, Artificial Sequence
  chemically synthesized
taaggccctgctctgggctt

SEQ ID NO: 21085 - DNA, 20 bp, Artificial Sequence
  chemically synthesized
ggcaagcccaggagaggcgc

SEQ ID NO: 21086 - DNA, 20 bp, Artificial Sequence
  chemically synthesized
gtctaccaggctgccttttg

SEQ ID NO: 21087 - DNA, 20 bp, Artificial Sequence
  chemically synthesized
ttctcctccaactgtggggt

SEQ ID NO: 21088 - DNA, 20 bp, Artificial Sequence
  chemically synthesized
gtgggctggggttcagagag

SEQ ID NO: 21089 - DNA, 20 bp, Artificial Sequence
  chemically synthesized
gtggccaagaagcaggggag

SEQ ID NO: 21090 - DNA, 20 bp, Artificial Sequence
  chemically synthesized
tcaggtctgggtgtggggtg

SEQ ID NO: 21091 - DNA, 20 bp, Artificial Sequence
  chemically synthesized
ggtgtggggtgaccagctta

SEQ ID NO: 21092 - DNA, 20 bp, Artificial Sequence
  chemically synthesized
atgctgtttgcccaggacag

SEQ ID NO: 21093 - DNA, 20 bp, Artificial Sequence
  chemically synthesized
ggtcactgtctctgggtgac

SEQ ID NO: 21094 - DNA, 20 bp, Artificial Sequence
  chemically synthesized
tgggtgactcttgattcccg

SEQ ID NO: 21095 - DNA, 20 bp, Artificial Sequence
  chemically synthesized
gccagtttctccacctgggg

SEQ ID NO: 21096 - DNA, 20 bp, Artificial Sequence
  chemically synthesized
aagttcttagggtaccccac

SEQ ID NO: 21097 - DNA, 20 bp, Artificial Sequence
  chemically synthesized
tagagtaggaggggctggag

SEQ ID NO: 21098 - DNA, 20 bp, Artificial Sequence
  chemically synthesized
agagctgggggcctgggctc

SEQ ID NO: 21099 - DNA, 20 bp, Artificial Sequence
  chemically synthesized
acgtgcggccccttcacagc

SEQ ID NO: 21100 - DNA, 20 bp, Artificial Sequence
  chemically synthesized
cctcccgcctcctccagatg

SEQ ID NO: 21101 - DNA, 20 bp, Artificial Sequence
  chemically synthesized
gtaatttatcccgtggatct

SEQ ID NO: 21102 - DNA, 20 bp, Artificial Sequence
  chemically synthesized
ttatcccgtggatctaggag

SEQ ID NO: 21103 - DNA, 20 bp, Artificial Sequence
  chemically synthesized
cctcctccgaccccctggac

SEQ ID NO: 21104 - DNA, 20 bp, Artificial Sequence
  chemically synthesized
ggacttcggcttttgtcccc

SEQ ID NO: 21105 - DNA, 20 bp, Artificial Sequence
  chemically synthesized
accctgcatagccctgggcc

SEQ ID NO: 21106 - DNA, 20 bp, Artificial Sequence
  chemically synthesized
tcctgcagagtatctgctgg

SEQ ID NO: 21107 - DNA, 20 bp, Artificial Sequence
  chemically synthesized
agtatctgctggggtggttt

SEQ ID NO: 21108 - DNA, 20 bp, Artificial Sequence
  chemically synthesized
tgacccttggaaggacctgg

SEQ ID NO: 21109 - DNA, 20 bp, Artificial Sequence
  chemically synthesized
cgccacctgtgggtggtgac

SEQ ID NO: 21110 - DNA, 20 bp, Artificial Sequence
  chemically synthesized
ccctcccttccccgttcact

SEQ ID NO: 21111 - DNA, 20 bp, Artificial Sequence
  chemically synthesized
cagatagccaggagtccttt

SEQ ID NO: 21112 - DNA, 20 bp, Artificial Sequence
  chemically synthesized
tcctagcaccgtgtccctgg

SEQ ID NO: 21113 - DNA, 20 bp, Artificial Sequence
  chemically synthesized
ctggggtaggtgcggctgac

SEQ ID NO: 21114 - DNA, 20 bp, Artificial Sequence
  chemically synthesized
ttgatgagaacctggaggtg

SEQ ID NO: 21115 - DNA, 22 bp, Artificial Sequence
  chemically synthesized
gcgatatctaggtagccacagg

SEQ ID NO: 21116 - DNA, 22 bp, Artificial Sequence
  chemically synthesized
ggtagccacaggaggcggccac

SEQ ID NO: 21117 - DNA, 22 bp, Artificial Sequence
  chemically synthesized
gttgtctgcctggttcacagtg

SEQ ID NO: 21118 - DNA, 22 bp, Artificial Sequence
  chemically synthesized
tctgcctggttcacagtggcgc

SEQ ID NO: 21119 - DNA, 22 bp, Artificial Sequence
  chemically synthesized
cctggttcacagtggcgccctg

SEQ ID NO: 21120 - DNA, 22 bp, Artificial Sequence
  chemically synthesized
gttcacagtggcgccctgctcc

SEQ ID NO: 21121 - DNA, 22 bp, Artificial Sequence
  chemically synthesized
acagtggcgccctgctccacca

SEQ ID NO: 21122 - DNA, 22 bp, Artificial Sequence
  chemically synthesized
ctccaccaagaagcgcaccacc

SEQ ID NO: 21123 - DNA, 22 bp, Artificial Sequence
  chemically synthesized
caccaagaagcgcaccacctcc

SEQ ID NO: 21124 - DNA, 22 bp, Artificial Sequence
  chemically synthesized
caggttctcatcaatgcaggcc

SEQ ID NO: 21125 - DNA, 22 bp, Artificial Sequence
  chemically synthesized
tcatcaatgcaggcctgggggt

SEQ ID NO: 21126 - DNA, 22 bp, Artificial Sequence
  chemically synthesized
atcaatgcaggcctgggggtgg

SEQ ID NO: 21127 - DNA, 22 bp, Artificial Sequence
  chemically synthesized
ggggtgggaaacagccgtcagc

SEQ ID NO: 21128 - DNA, 22 bp, Artificial Sequence
  chemically synthesized
ccccagccacggtgtcccagca

SEQ ID NO: 21129 - DNA, 22 bp, Artificial Sequence
  chemically synthesized
cagagggagccacgaaaacaga

SEQ ID NO: 21130 - DNA, 22 bp, Artificial Sequence
  chemically synthesized
ggacagtggggaaaatgaccca

SEQ ID NO: 21131 - DNA, 22 bp, Artificial Sequence
  chemically synthesized
tggccactggctgtttaagata

SEQ ID NO: 21132 - DNA, 22 bp, Artificial Sequence
  chemically synthesized
gccactggctgtttaagatacg

SEQ ID NO: 21133 - DNA, 22 bp, Artificial Sequence
  chemically synthesized
gctgtttaagatacgcctggtt

SEQ ID NO: 21134 - DNA, 22 bp, Artificial Sequence
  chemically synthesized
tttaagatacgcctggttgccc

SEQ ID NO: 21135 - DNA, 22 bp, Artificial Sequence
  chemically synthesized
aagatacgcctggttgcccagt

SEQ ID NO: 21136 - DNA, 22 bp, Artificial Sequence
  chemically synthesized
agatacgcctggttgcccagtg

SEQ ID NO: 21137 - DNA, 22 bp, Artificial Sequence
  chemically synthesized
gttgcccagtggtcaggccggc

SEQ ID NO: 21138 - DNA, 22 bp, Artificial Sequence
  chemically synthesized
cccagtggtcaggccggccagg

SEQ ID NO: 21139 - DNA, 22 bp, Artificial Sequence
  chemically synthesized
cagtgctcagtggaaaccacga

SEQ ID NO: 21140 - DNA, 22 bp, Artificial Sequence
  chemically synthesized
agtgctcagtggaaaccacgaa

SEQ ID NO: 21141 - DNA, 22 bp, Artificial Sequence
  chemically synthesized
agtggaaaccacgaaaggactc

SEQ ID NO: 21142 - DNA, 22 bp, Artificial Sequence
  chemically synthesized
ctggctatctgcaaacaggaag

SEQ ID NO: 21143 - DNA, 22 bp, Artificial Sequence
  chemically synthesized
gctatctgcaaacaggaagtga

SEQ ID NO: 21144 - DNA, 22 bp, Artificial Sequence
  chemically synthesized
tctgcaaacaggaagtgaacgg

SEQ ID NO: 21145 - DNA, 22 bp, Artificial Sequence
  chemically synthesized
caaacaggaagtgaacggggaa

SEQ ID NO: 21146 - DNA, 22 bp, Artificial Sequence
  chemically synthesized
ctcatctgggtgcgggaacccc

SEQ ID NO: 21147 - DNA, 22 bp, Artificial Sequence
  chemically synthesized
tcatctgggtgcgggaacccca

SEQ ID NO: 21148 - DNA, 22 bp, Artificial Sequence
  chemically synthesized
atctgggtgcgggaaccccaca

SEQ ID NO: 21149 - DNA, 22 bp, Artificial Sequence
  chemically synthesized
ggtgcgggaaccccacatggta

SEQ ID NO: 21150 - DNA, 22 bp, Artificial Sequence
  chemically synthesized
ttagacacggcaaaacccccgt

SEQ ID NO: 21151 - DNA, 22 bp, Artificial Sequence
  chemically synthesized
gacacggcaaaacccccgtcac

SEQ ID NO: 21152 - DNA, 22 bp, Artificial Sequence
  chemically synthesized
ccagtgctcagactagggaaga

SEQ ID NO: 21153 - DNA, 22 bp, Artificial Sequence
  chemically synthesized
cagtgctcagactagggaagag

SEQ ID NO: 21154 - DNA, 22 bp, Artificial Sequence
  chemically synthesized
agactagggaagaggttccagc

SEQ ID NO: 21155 - DNA, 22 bp, Artificial Sequence
  chemically synthesized
gggaagaggttccagcccctcc

SEQ ID NO: 21156 - DNA, 22 bp, Artificial Sequence
  chemically synthesized
cagcccctcctccttcagagcc

SEQ ID NO: 21157 - DNA, 22 bp, Artificial Sequence
  chemically synthesized
ctccttcagagccaggagtcct

SEQ ID NO: 21158 - DNA, 22 bp, Artificial Sequence
  chemically synthesized
cttcagagccaggagtcctggc

SEQ ID NO: 21159 - DNA, 22 bp, Artificial Sequence
  chemically synthesized
cagagccaggagtcctggcccc

SEQ ID NO: 21160 - DNA, 22 bp, Artificial Sequence
  chemically synthesized
agagccaggagtcctggccccc

SEQ ID NO: 21161 - DNA, 22 bp, Artificial Sequence
  chemically synthesized
gcccccagcccctcctgcctta

SEQ ID NO: 21162 - DNA, 22 bp, Artificial Sequence
  chemically synthesized
ctgccttaaacccagccaggtc

SEQ ID NO: 21163 - DNA, 22 bp, Artificial Sequence
  chemically synthesized
ccttaaacccagccaggtcctt

SEQ ID NO: 21164 - DNA, 22 bp, Artificial Sequence
  chemically synthesized
aaacccagccaggtccttccaa

SEQ ID NO: 21165 - DNA, 22 bp, Artificial Sequence
  chemically synthesized
aacccagccaggtccttccaag

SEQ ID NO: 21166 - DNA, 22 bp, Artificial Sequence
  chemically synthesized
ccaagggtcaagctcggaaacc

SEQ ID NO: 21167 - DNA, 22 bp, Artificial Sequence
  chemically synthesized
caagggtcaagctcggaaacca

SEQ ID NO: 21168 - DNA, 22 bp, Artificial Sequence
  chemically synthesized
ggaaaccaccccagcagatact

SEQ ID NO: 21169 - DNA, 22 bp, Artificial Sequence
  chemically synthesized
tgcaggaacgaagccgtgggcc

SEQ ID NO: 21170 - DNA, 22 bp, Artificial Sequence
  chemically synthesized
caggaacgaagccgtgggccca

SEQ ID NO: 21171 - DNA, 22 bp, Artificial Sequence
  chemically synthesized
tgcagggtggaggaaggccacc

SEQ ID NO: 21172 - DNA, 22 bp, Artificial Sequence
  chemically synthesized
tgctgggacagactcaggggcc

SEQ ID NO: 21173 - DNA, 22 bp, Artificial Sequence
  chemically synthesized
ggacagactcaggggcctgggc

SEQ ID NO: 21174 - DNA, 22 bp, Artificial Sequence
  chemically synthesized
aggggcctgggcgggactccca

SEQ ID NO: 21175 - DNA, 22 bp, Artificial Sequence
  chemically synthesized
ggcgggactcccagaggggtga

SEQ ID NO: 21176 - DNA, 22 bp, Artificial Sequence
  chemically synthesized
ccagaggggtgagacagctgca

SEQ ID NO: 21177 - DNA, 22 bp, Artificial Sequence
  chemically synthesized
cacacctgtgtgcctgggcccc

SEQ ID NO: 21178 - DNA, 22 bp, Artificial Sequence
  chemically synthesized
tgtgcctgggccccaggctgtc

SEQ ID NO: 21179 - DNA, 22 bp, Artificial Sequence
  chemically synthesized
ggccccaggctgtcacactcca

SEQ ID NO: 21180 - DNA, 22 bp, Artificial Sequence
  chemically synthesized
tcacactccagttcactgaggc

SEQ ID NO: 21181 - DNA, 22 bp, Artificial Sequence
  chemically synthesized
cagttcactgaggccccctctg

SEQ ID NO: 21182 - DNA, 22 bp, Artificial Sequence
  chemically synthesized
actgaggccccctctgcacggg

SEQ ID NO: 21183 - DNA, 22 bp, Artificial Sequence
  chemically synthesized
aggccccctctgcacggggccc

SEQ ID NO: 21184 - DNA, 22 bp, Artificial Sequence
  chemically synthesized
tgcacggggccctgcagccagg

SEQ ID NO: 21185 - DNA, 22 bp, Artificial Sequence
  chemically synthesized
cacggggccctgcagccagggg

SEQ ID NO: 21186 - DNA, 22 bp, Artificial Sequence
  chemically synthesized
cagccaggggctgacacgggcc

SEQ ID NO: 21187 - DNA, 22 bp, Artificial Sequence
  chemically synthesized
acacgggccaccgtttctcatt

SEQ ID NO: 21188 - DNA, 22 bp, Artificial Sequence
  chemically synthesized
ctcattcttcccttaggggtcc

SEQ ID NO: 21189 - DNA, 22 bp, Artificial Sequence
  chemically synthesized
tcattcttcccttaggggtcca

SEQ ID NO: 21190 - DNA, 22 bp, Artificial Sequence
  chemically synthesized
attcttcccttaggggtccaaa

SEQ ID NO: 21191 - DNA, 22 bp, Artificial Sequence
  chemically synthesized
ttcccttaggggtccaaaactt

SEQ ID NO: 21192 - DNA, 22 bp, Artificial Sequence
  chemically synthesized
cccttaggggtccaaaacttgg

SEQ ID NO: 21193 - DNA, 22 bp, Artificial Sequence
  chemically synthesized
ccttaggggtccaaaacttggg

SEQ ID NO: 21194 - DNA, 22 bp, Artificial Sequence
  chemically synthesized
aggggtccaaaacttgggggga

SEQ ID NO: 21195 - DNA, 22 bp, Artificial Sequence
  chemically synthesized
ggggtccaaaacttggggggac

SEQ ID NO: 21196 - DNA, 22 bp, Artificial Sequence
  chemically synthesized
ggggggacaaaagccgaagtcc

SEQ ID NO: 21197 - DNA, 22 bp, Artificial Sequence
  chemically synthesized
gggggacaaaagccgaagtcca

SEQ ID NO: 21198 - DNA, 22 bp, Artificial Sequence
  chemically synthesized
gccccaggccttgtggacactg

SEQ ID NO: 21199 - DNA, 22 bp, Artificial Sequence
  chemically synthesized
ccccaggccttgtggacactgg

SEQ ID NO: 21200 - DNA, 22 bp, Artificial Sequence
  chemically synthesized
gtggacactgggtgggctccgg

SEQ ID NO: 21201 - DNA, 22 bp, Artificial Sequence
  chemically synthesized
tggacactgggtgggctccggg

SEQ ID NO: 21202 - DNA, 22 bp, Artificial Sequence
  chemically synthesized
ggtgggctccgggacctgaact

SEQ ID NO: 21203 - DNA, 22 bp, Artificial Sequence
  chemically synthesized
cgggacctgaactggagctgag

SEQ ID NO: 21204 - DNA, 22 bp, Artificial Sequence
  chemically synthesized
aactggagctgaggaaggagtg

SEQ ID NO: 21205 - DNA, 22 bp, Artificial Sequence
  chemically synthesized
gagctgaggaaggagtgaagct

SEQ ID NO: 21206 - DNA, 22 bp, Artificial Sequence
  chemically synthesized
aggaaggagtgaagctaaactc

SEQ ID NO: 21207 - DNA, 22 bp, Artificial Sequence
  chemically synthesized
aactcctagatccacgggataa

SEQ ID NO: 21208 - DNA, 22 bp, Artificial Sequence
  chemically synthesized
ctagatccacgggataaattac

SEQ ID NO: 21209 - DNA, 22 bp, Artificial Sequence
  chemically synthesized
gatccacgggataaattacccc

SEQ ID NO: 21210 - DNA, 22 bp, Artificial Sequence
  chemically synthesized
ccccccaagtccctcacctctc

SEQ ID NO: 21211 - DNA, 22 bp, Artificial Sequence
  chemically synthesized
acctctccaaagctgcccatct

SEQ ID NO: 21212 - DNA, 22 bp, Artificial Sequence
  chemically synthesized
tccaaagctgcccatctggagg

SEQ ID NO: 21213 - DNA, 22 bp, Artificial Sequence
  chemically synthesized
caaagctgcccatctggaggag

SEQ ID NO: 21214 - DNA, 22 bp, Artificial Sequence
  chemically synthesized
cccatctggaggaggcgggagg

SEQ ID NO: 21215 - DNA, 22 bp, Artificial Sequence
  chemically synthesized
gaggaggcgggagggagctacg

SEQ ID NO: 21216 - DNA, 22 bp, Artificial Sequence
  chemically synthesized
cgagggccaagagcatgaggtc

SEQ ID NO: 21217 - DNA, 22 bp, Artificial Sequence
  chemically synthesized
gggctgtgaaggggccgcacgt

SEQ ID NO: 21218 - DNA, 22 bp, Artificial Sequence
  chemically synthesized
tgaaggggccgcacgtgccctg

SEQ ID NO: 21219 - DNA, 22 bp, Artificial Sequence
  chemically synthesized
ggaacgggatgaactcggctcg

SEQ ID NO: 21220 - DNA, 22 bp, Artificial Sequence
  chemically synthesized
ggctcgtttatttccacccagt

SEQ ID NO: 21221 - DNA, 22 bp, Artificial Sequence
  chemically synthesized
gtttatttccacccagttgtca

SEQ ID NO: 21222 - DNA, 22 bp, Artificial Sequence
  chemically synthesized
atttccacccagttgtcatggc

SEQ ID NO: 21223 - DNA, 22 bp, Artificial Sequence
  chemically synthesized
tttccacccagttgtcatggcg

SEQ ID NO: 21224 - DNA, 22 bp, Artificial Sequence
  chemically synthesized
ccacccagttgtcatggcgata

SEQ ID NO: 21225 - DNA, 22 bp, Artificial Sequence
  chemically synthesized
cacccagttgtcatggcgatag

SEQ ID NO: 21226 - DNA, 22 bp, Artificial Sequence
  chemically synthesized
tcatggcgataggggagggggg

SEQ ID NO: 21227 - DNA, 22 bp, Artificial Sequence
  chemically synthesized
tccctttcaaggacctgcccag

SEQ ID NO: 21228 - DNA, 22 bp, Artificial Sequence
  chemically synthesized
ccctttcaaggacctgcccagt

SEQ ID NO: 21229 - DNA, 22 bp, Artificial Sequence
  chemically synthesized
cctttcaaggacctgcccagta

SEQ ID NO: 21230 - DNA, 22 bp, Artificial Sequence
  chemically synthesized
tcaaggacctgcccagtacagg

SEQ ID NO: 21231 - DNA, 22 bp, Artificial Sequence
  chemically synthesized
caaggacctgcccagtacaggc

SEQ ID NO: 21232 - DNA, 22 bp, Artificial Sequence
  chemically synthesized
aaggacctgcccagtacaggca

SEQ ID NO: 21233 - DNA, 22 bp, Artificial Sequence
  chemically synthesized
cccagtacaggcatccctgtga

SEQ ID NO: 21234 - DNA, 22 bp, Artificial Sequence
  chemically synthesized
tgaaagatgcctgaggcctggg

SEQ ID NO: 21235 - DNA, 22 bp, Artificial Sequence
  chemically synthesized
aggcctgggcaccagggactcc

SEQ ID NO: 21236 - DNA, 22 bp, Artificial Sequence
  chemically synthesized
ggcaccagggactccagagtcc

SEQ ID NO: 21237 - DNA, 22 bp, Artificial Sequence
  chemically synthesized
cagagtccaggcccaacccctc

SEQ ID NO: 21238 - DNA, 22 bp, Artificial Sequence
  chemically synthesized
cccattcaacccaggaggccag

SEQ ID NO: 21239 - DNA, 22 bp, Artificial Sequence
  chemically synthesized
aacccaggaggccaggccccag

SEQ ID NO: 21240 - DNA, 22 bp, Artificial Sequence
  chemically synthesized
ccgccctcagatgaaggagtcc

SEQ ID NO: 21241 - DNA, 22 bp, Artificial Sequence
  chemically synthesized
cgccctcagatgaaggagtcca

SEQ ID NO: 21242 - DNA, 22 bp, Artificial Sequence
  chemically synthesized
agatgaaggagtccaggccccc

SEQ ID NO: 21243 - DNA, 22 bp, Artificial Sequence
  chemically synthesized
tccccattcagacccaggggtc

SEQ ID NO: 21244 - DNA, 22 bp, Artificial Sequence
  chemically synthesized
cccattcagacccaggggtcca

SEQ ID NO: 21245 - DNA, 22 bp, Artificial Sequence
  chemically synthesized
agacccaggggtccaggcccag

SEQ ID NO: 21246 - DNA, 22 bp, Artificial Sequence
  chemically synthesized
cctaagacccagaagtccaggc

SEQ ID NO: 21247 - DNA, 22 bp, Artificial Sequence
  chemically synthesized
agacccagaagtccaggccccc

SEQ ID NO: 21248 - DNA, 22 bp, Artificial Sequence
  chemically synthesized
ctccctcagacccacgagtcca

SEQ ID NO: 21249 - DNA, 22 bp, Artificial Sequence
  chemically synthesized
cctcagacccacgagtccaggc

SEQ ID NO: 21250 - DNA, 22 bp, Artificial Sequence
  chemically synthesized
agacccacgagtccaggcccca

SEQ ID NO: 21251 - DNA, 22 bp, Artificial Sequence
  chemically synthesized
ctccctcggacccaggagtcca

SEQ ID NO: 21252 - DNA, 22 bp, Artificial Sequence
  chemically synthesized
cctcggacccaggagtccaggc

SEQ ID NO: 21253 - DNA, 22 bp, Artificial Sequence
  chemically synthesized
ggacccaggagtccaggccccc

SEQ ID NO: 21254 - DNA, 22 bp, Artificial Sequence
  chemically synthesized
caccctcagacccaggagtcca

SEQ ID NO: 21255 - DNA, 22 bp, Artificial Sequence
  chemically synthesized
agacccaggagtccaggcccca

SEQ ID NO: 21256 - DNA, 22 bp, Artificial Sequence
  chemically synthesized
ctccctcggacccaggagtcca

SEQ ID NO: 21257 - DNA, 22 bp, Artificial Sequence
  chemically synthesized
cctcggacccaggagtccaggc

SEQ ID NO: 21258 - DNA, 22 bp, Artificial Sequence
  chemically synthesized
ggacccaggagtccaggcccca

SEQ ID NO: 21259 - DNA, 22 bp, Artificial Sequence
  chemically synthesized
ctctctcaaacccaggagccca

SEQ ID NO: 21260 - DNA, 22 bp, Artificial Sequence
  chemically synthesized
tctcaaacccaggagcccaggc

SEQ ID NO: 21261 - DNA, 22 bp, Artificial Sequence
  chemically synthesized
tcaaacccaggagcccaggccc

SEQ ID NO: 21262 - DNA, 22 bp, Artificial Sequence
  chemically synthesized
aaacccaggagcccaggccccc

SEQ ID NO: 21263 - DNA, 22 bp, Artificial Sequence
  chemically synthesized
ttctctgttcagccctaagaat

SEQ ID NO: 21264 - DNA, 22 bp, Artificial Sequence
  chemically synthesized
ctctgttcagccctaagaatcc

SEQ ID NO: 21265 - DNA, 22 bp, Artificial Sequence
  chemically synthesized
tctgttcagccctaagaatcct

SEQ ID NO: 21266 - DNA, 22 bp, Artificial Sequence
  chemically synthesized
tgttcagccctaagaatcctgg

SEQ ID NO: 21267 - DNA, 22 bp, Artificial Sequence
  chemically synthesized
ttcagccctaagaatcctggct

SEQ ID NO: 21268 - DNA, 22 bp, Artificial Sequence
  chemically synthesized
agccctaagaatcctggctcca

SEQ ID NO: 21269 - DNA, 22 bp, Artificial Sequence
  chemically synthesized
agaatcctggctccagcccctc

SEQ ID NO: 21270 - DNA, 22 bp, Artificial Sequence
  chemically synthesized
gctccagcccctcctactctag

SEQ ID NO: 21271 - DNA, 22 bp, Artificial Sequence
  chemically synthesized
cagcccctcctactctagcccc

SEQ ID NO: 21272 - DNA, 22 bp, Artificial Sequence
  chemically synthesized
ctactctagcccccaaccccct

SEQ ID NO: 21273 - DNA, 22 bp, Artificial Sequence
  chemically synthesized
ctctagcccccaaccccctagc

SEQ ID NO: 21274 - DNA, 22 bp, Artificial Sequence
  chemically synthesized
tagcccccaaccccctagccac

SEQ ID NO: 21275 - DNA, 22 bp, Artificial Sequence
  chemically synthesized
gcccccaaccccctagccacta

SEQ ID NO: 21276 - DNA, 22 bp, Artificial Sequence
  chemically synthesized
gccactaaggcaattggggtgc

SEQ ID NO: 21277 - DNA, 22 bp, Artificial Sequence
  chemically synthesized
aggcaattggggtgcaggaatg

SEQ ID NO: 21278 - DNA, 22 bp, Artificial Sequence
  chemically synthesized
gggtgcaggaatgggggcaggg

SEQ ID NO: 21279 - DNA, 22 bp, Artificial Sequence
  chemically synthesized
accaagtggttgataaacccac

SEQ ID NO: 21280 - DNA, 22 bp, Artificial Sequence
  chemically synthesized
ataaacccacgtggggtaccct

SEQ ID NO: 21281 - DNA, 22 bp, Artificial Sequence
  chemically synthesized
agaacttgggaacagccacagc

SEQ ID NO: 21282 - DNA, 22 bp, Artificial Sequence
  chemically synthesized
gggaacagccacagcagggggg

SEQ ID NO: 21283 - DNA, 22 bp, Artificial Sequence
  chemically synthesized
ggaacagccacagcaggggggc

SEQ ID NO: 21284 - DNA, 22 bp, Artificial Sequence
  chemically synthesized
ggggacctgcctggagaaggat

SEQ ID NO: 21285 - DNA, 22 bp, Artificial Sequence
  chemically synthesized
gggacctgcctggagaaggatg

SEQ ID NO: 21286 - DNA, 22 bp, Artificial Sequence
  chemically synthesized
cctggagaaggatgcaggacga

SEQ ID NO: 21287 - DNA, 22 bp, Artificial Sequence
  chemically synthesized
gagaaggatgcaggacgagaaa

SEQ ID NO: 21288 - DNA, 22 bp, Artificial Sequence
  chemically synthesized
gccgggaatcaagagtcaccca

SEQ ID NO: 21289 - DNA, 22 bp, Artificial Sequence
  chemically synthesized
ttttcctaggactgagggtttc

SEQ ID NO: 21290 - DNA, 22 bp, Artificial Sequence
  chemically synthesized
tcctaggactgagggtttcagt

SEQ ID NO: 21291 - DNA, 22 bp, Artificial Sequence
  chemically synthesized
cctaggactgagggtttcagtg

SEQ ID NO: 21292 - DNA, 22 bp, Artificial Sequence
  chemically synthesized
ctaggactgagggtttcagtgc

SEQ ID NO: 21293 - DNA, 22 bp, Artificial Sequence
  chemically synthesized
ggactgagggtttcagtgctaa

SEQ ID NO: 21294 - DNA, 22 bp, Artificial Sequence
  chemically synthesized
agggtttcagtgctaaaactag

SEQ ID NO: 21295 - DNA, 22 bp, Artificial Sequence
  chemically synthesized
cagtgctaaaactaggctgtcc

SEQ ID NO: 21296 - DNA, 22 bp, Artificial Sequence
  chemically synthesized
agtgctaaaactaggctgtcct

SEQ ID NO: 21297 - DNA, 22 bp, Artificial Sequence
  chemically synthesized
aaactaggctgtcctgggcaaa

SEQ ID NO: 21298 - DNA, 22 bp, Artificial Sequence
  chemically synthesized
ggctgtcctgggcaaacagcat

SEQ ID NO: 21299 - DNA, 22 bp, Artificial Sequence
  chemically synthesized
tcctgggcaaacagcataagct

SEQ ID NO: 21300 - DNA, 22 bp, Artificial Sequence
  chemically synthesized
ggcaaacagcataagctggtca

SEQ ID NO: 21301 - DNA, 22 bp, Artificial Sequence
  chemically synthesized
gtcaccccacacccagacctga

SEQ ID NO: 21302 - DNA, 22 bp, Artificial Sequence
  chemically synthesized
acccaaacccagctcccctgct

SEQ ID NO: 21303 - DNA, 22 bp, Artificial Sequence
  chemically synthesized
ccctgcttcttggccacgtaac

SEQ ID NO: 21304 - DNA, 22 bp, Artificial Sequence
  chemically synthesized
cttcttggccacgtaacctgag

SEQ ID NO: 21305 - DNA, 22 bp, Artificial Sequence
  chemically synthesized
cttggccacgtaacctgagaag

SEQ ID NO: 21306 - DNA, 22 bp, Artificial Sequence
  chemically synthesized
ttggccacgtaacctgagaagg

SEQ ID NO: 21307 - DNA, 22 bp, Artificial Sequence
  chemically synthesized
ggccacgtaacctgagaaggga

SEQ ID NO: 21308 - DNA, 22 bp, Artificial Sequence
  chemically synthesized
gccacgtaacctgagaagggaa

SEQ ID NO: 21309 - DNA, 22 bp, Artificial Sequence
  chemically synthesized
agaagggaatccctcctctctg

SEQ ID NO: 21310 - DNA, 22 bp, Artificial Sequence
  chemically synthesized
ctctctgaaccccagcccaccc

SEQ ID NO: 21311 - DNA, 22 bp, Artificial Sequence
  chemically synthesized
tctgaaccccagcccaccccaa

SEQ ID NO: 21312 - DNA, 22 bp, Artificial Sequence
  chemically synthesized
tgaaccccagcccaccccaatg

SEQ ID NO: 21313 - DNA, 22 bp, Artificial Sequence
  chemically synthesized
aaccccagcccaccccaatgct

SEQ ID NO: 21314 - DNA, 22 bp, Artificial Sequence
  chemically synthesized
caggcctcctgggataccccga

SEQ ID NO: 21315 - DNA, 22 bp, Artificial Sequence
  chemically synthesized
ctgggataccccgaagagtgag

SEQ ID NO: 21316 - DNA, 22 bp, Artificial Sequence
  chemically synthesized
ggataccccgaagagtgagttt

SEQ ID NO: 21317 - DNA, 22 bp, Artificial Sequence
  chemically synthesized
gccaagcagtcaccccacagtt

SEQ ID NO: 21318 - DNA, 22 bp, Artificial Sequence
  chemically synthesized
ccaagcagtcaccccacagttg

SEQ ID NO: 21319 - DNA, 22 bp, Artificial Sequence
  chemically synthesized
gaggagaatccacccaaaaggc

SEQ ID NO: 21320 - DNA, 22 bp, Artificial Sequence
  chemically synthesized
gtagacagggctggggtggcct

SEQ ID NO: 21321 - DNA, 22 bp, Artificial Sequence
  chemically synthesized
gggtggcctctcgtggggtcca

SEQ ID NO: 21322 - DNA, 22 bp, Artificial Sequence
  chemically synthesized
tcgtggggtccaggccaagtag

SEQ ID NO: 21323 - DNA, 22 bp, Artificial Sequence
  chemically synthesized
gtggggtccaggccaagtaggt

SEQ ID NO: 21324 - DNA, 22 bp, Artificial Sequence
  chemically synthesized
gggcctctgggggatgcagggg

SEQ ID NO: 21325 - DNA, 22 bp, Artificial Sequence
  chemically synthesized
tgggggatgcaggggaaggggg

SEQ ID NO: 21326 - DNA, 22 bp, Artificial Sequence
  chemically synthesized
ggggatgcaggggaagggggat

SEQ ID NO: 21327 - DNA, 22 bp, Artificial Sequence
  chemically synthesized
agtctgaagagcagagccagga

SEQ ID NO: 21328 - DNA, 22 bp, Artificial Sequence
  chemically synthesized
aagagcagagccaggaacccct

SEQ ID NO: 21329 - DNA, 22 bp, Artificial Sequence
  chemically synthesized
tagggaaggggcaggagagcca

SEQ ID NO: 21330 - DNA, 22 bp, Artificial Sequence
  chemically synthesized
agcgcctctcctgggcttgcca

SEQ ID NO: 21331 - DNA, 22 bp, Artificial Sequence
  chemically synthesized
tcctgggcttgccaaggactca

SEQ ID NO: 21332 - DNA, 22 bp, Artificial Sequence
  chemically synthesized
ctgggcttgccaaggactcaaa

SEQ ID NO: 21333 - DNA, 22 bp, Artificial Sequence
  chemically synthesized
ggcttgccaaggactcaaaccc

SEQ ID NO: 21334 - DNA, 22 bp, Artificial Sequence
  chemically synthesized
gccaaggactcaaacccagaag

SEQ ID NO: 21335 - DNA, 22 bp, Artificial Sequence
  chemically synthesized
ccaaggactcaaacccagaagc

SEQ ID NO: 21336 - DNA, 22 bp, Artificial Sequence
  chemically synthesized
aaacccagaagcccagagcagg

SEQ ID NO: 21337 - DNA, 22 bp, Artificial Sequence
  chemically synthesized
agggaagcgggaccctgctctg

SEQ ID NO: 21338 - DNA, 22 bp, Artificial Sequence
  chemically synthesized
gggaagcgggaccctgctctgg

SEQ ID NO: 21339 - DNA, 22 bp, Artificial Sequence
  chemically synthesized
ctctgggcggaggaatatgtcc

SEQ ID NO: 21340 - DNA, 22 bp, Artificial Sequence
  chemically synthesized
tgggcggaggaatatgtcccag

SEQ ID NO: 21341 - DNA, 22 bp, Artificial Sequence
  chemically synthesized
ggcggaggaatatgtcccagat

SEQ ID NO: 21342 - DNA, 22 bp, Artificial Sequence
  chemically synthesized
gggactctttaaggaaagaagg

SEQ ID NO: 21343 - DNA, 22 bp, Artificial Sequence
  chemically synthesized
tttaaggaaagaaggatggaga

SEQ ID NO: 21344 - DNA, 22 bp, Artificial Sequence
  chemically synthesized
taaggaaagaaggatggagaaa

SEQ ID NO: 21345 - DNA, 22 bp, Artificial Sequence
  chemically synthesized
aaggaaagaaggatggagaaag

SEQ ID NO: 21346 - DNA, 22 bp, Artificial Sequence
  chemically synthesized
aggaaagaaggatggagaaaga

SEQ ID NO: 21347 - DNA, 22 bp, Artificial Sequence
  chemically synthesized
gtgaacacctaggacgcaccat

SEQ ID NO: 21348 - DNA, 22 bp, Artificial Sequence
  chemically synthesized
ggacgcaccattctcacaaagg

SEQ ID NO: 21349 - DNA, 22 bp, Artificial Sequence
  chemically synthesized
tcacaaagggagttttccacac

SEQ ID NO: 21350 - DNA, 22 bp, Artificial Sequence
  chemically synthesized
acaaagggagttttccacacgg

SEQ ID NO: 21351 - DNA, 22 bp, Artificial Sequence
  chemically synthesized
tccacacggacacccccctcct

SEQ ID NO: 21352 - DNA, 22 bp, Artificial Sequence
  chemically synthesized
ccacacggacacccccctcctc

SEQ ID NO: 21353 - DNA, 22 bp, Artificial Sequence
  chemically synthesized
cacacggacacccccctcctca

SEQ ID NO: 21354 - DNA, 22 bp, Artificial Sequence
  chemically synthesized
ctcaccacagccctgccaggac

SEQ ID NO: 21355 - DNA, 22 bp, Artificial Sequence
  chemically synthesized
accacagccctgccaggacggg

SEQ ID NO: 21356 - DNA, 22 bp, Artificial Sequence
  chemically synthesized
ccaggacggggctggctactgg

SEQ ID NO: 21357 - DNA, 22 bp, Artificial Sequence
  chemically synthesized
gctactggccttatctcacagg

SEQ ID NO: 21358 - DNA, 22 bp, Artificial Sequence
  chemically synthesized
ctggccttatctcacaggtaaa

SEQ ID NO: 21359 - DNA, 22 bp, Artificial Sequence
  chemically synthesized
gccttatctcacaggtaaaact

SEQ ID NO: 21360 - DNA, 22 bp, Artificial Sequence
  chemically synthesized
atctcacaggtaaaactgacgc

SEQ ID NO: 21361 - DNA, 22 bp, Artificial Sequence
  chemically synthesized
tctcacaggtaaaactgacgca

SEQ ID NO: 21362 - DNA, 22 bp, Artificial Sequence
  chemically synthesized
acaggtaaaactgacgcacgga

SEQ ID NO: 21363 - DNA, 22 bp, Artificial Sequence
  chemically synthesized
acgcacggaggaacaatataaa

SEQ ID NO: 21364 - DNA, 22 bp, Artificial Sequence
  chemically synthesized
gggactagaaaggtgaagagcc

SEQ ID NO: 21365 - DNA, 22 bp, Artificial Sequence
  chemically synthesized
gaaaggtgaagagccaaagtta

SEQ ID NO: 21366 - DNA, 22 bp, Artificial Sequence
  chemically synthesized
gaactcaggaccaacttattct

SEQ ID NO: 21367 - DNA, 22 bp, Artificial Sequence
  chemically synthesized
aggaccaacttattctgatttt

SEQ ID NO: 21368 - DNA, 22 bp, Artificial Sequence
  chemically synthesized
attctgattttgtttttccaaa

SEQ ID NO: 21369 - DNA, 22 bp, Artificial Sequence
  chemically synthesized
ttctgattttgtttttccaaac

SEQ ID NO: 21370 - DNA, 22 bp, Artificial Sequence
  chemically synthesized
tgattttgtttttccaaactgc

SEQ ID NO: 21371 - DNA, 22 bp, Artificial Sequence
  chemically synthesized
attttgtttttccaaactgctt

SEQ ID NO: 21372 - DNA, 22 bp, Artificial Sequence
  chemically synthesized
tgtttttccaaactgcttctcc

SEQ ID NO: 21373 - DNA, 22 bp, Artificial Sequence
  chemically synthesized
gtttttccaaactgcttctcct

SEQ ID NO: 21374 - DNA, 22 bp, Artificial Sequence
  chemically synthesized
tttttccaaactgcttctcctc

SEQ ID NO: 21375 - DNA, 22 bp, Artificial Sequence
  chemically synthesized
ttccaaactgcttctcctcttg

SEQ ID NO: 21376 - DNA, 22 bp, Artificial Sequence
  chemically synthesized
tccaaactgcttctcctcttgg

SEQ ID NO: 21377 - DNA, 22 bp, Artificial Sequence
  chemically synthesized
ccaaactgcttctcctcttggg

SEQ ID NO: 21378 - DNA, 22 bp, Artificial Sequence
  chemically synthesized
caaactgcttctcctcttggga

SEQ ID NO: 21379 - DNA, 22 bp, Artificial Sequence
  chemically synthesized
cttctcctcttgggaagtgtaa

SEQ ID NO: 21380 - DNA, 22 bp, Artificial Sequence
  chemically synthesized
ctcctcttgggaagtgtaagga

SEQ ID NO: 21381 - DNA, 22 bp, Artificial Sequence
  chemically synthesized
tcctcttgggaagtgtaaggaa

SEQ ID NO: 21382 - DNA, 22 bp, Artificial Sequence
  chemically synthesized
ctcttgggaagtgtaaggaagc

SEQ ID NO: 21383 - DNA, 22 bp, Artificial Sequence
  chemically synthesized
ttgggaagtgtaaggaagctgc

SEQ ID NO: 21384 - DNA, 22 bp, Artificial Sequence
  chemically synthesized
gggaagtgtaaggaagctgcag

SEQ ID NO: 21385 - DNA, 22 bp, Artificial Sequence
  chemically synthesized
ggaagtgtaaggaagctgcagc

SEQ ID NO: 21386 - DNA, 22 bp, Artificial Sequence
  chemically synthesized
cagcaccaggatcagtgaaacg

SEQ ID NO: 21387 - DNA, 22 bp, Artificial Sequence
  chemically synthesized
aggttctgggagagggtagcgc

SEQ ID NO: 21388 - DNA, 22 bp, Artificial Sequence
  chemically synthesized
tgggagagggtagcgcagggtg

SEQ ID NO: 21389 - DNA, 22 bp, Artificial Sequence
  chemically synthesized
ggagagggtagcgcagggtggc

SEQ ID NO: 21390 - DNA, 22 bp, Artificial Sequence
  chemically synthesized
agaaccgggcaggtcacgcatc

SEQ ID NO: 21391 - DNA, 22 bp, Artificial Sequence
  chemically synthesized
ccctcccaccccctgccaagct

SEQ ID NO: 21392 - DNA, 22 bp, Artificial Sequence
  chemically synthesized
cctcccaccccctgccaagctc

SEQ ID NO: 21393 - DNA, 22 bp, Artificial Sequence
  chemically synthesized
ccaccccctgccaagctctccc

SEQ ID NO: 21394 - DNA, 22 bp, Artificial Sequence
  chemically synthesized
ccaagctctccctcccaggatc

SEQ ID NO: 21395 - DNA, 22 bp, Artificial Sequence
  chemically synthesized
tccctcccaggatcctctctgg

SEQ ID NO: 21396 - DNA, 22 bp, Artificial Sequence
  chemically synthesized
cctcccaggatcctctctggct

SEQ ID NO: 21397 - DNA, 22 bp, Artificial Sequence
  chemically synthesized
ccaggatcctctctggctccat

SEQ ID NO: 21398 - DNA, 22 bp, Artificial Sequence
  chemically synthesized
tctggctccatcgtaagcaaac

SEQ ID NO: 21399 - DNA, 22 bp, Artificial Sequence
  chemically synthesized
tggctccatcgtaagcaaacct

SEQ ID NO: 21400 - DNA, 22 bp, Artificial Sequence
  chemically synthesized
gctccatcgtaagcaaacctta

SEQ ID NO: 21401 - DNA, 22 bp, Artificial Sequence
  chemically synthesized
catcgtaagcaaaccttagagg

SEQ ID NO: 21402 - DNA, 22 bp, Artificial Sequence
  chemically synthesized
agaggttctggcaaggagagag

SEQ ID NO: 21403 - DNA, 22 bp, Artificial Sequence
  chemically synthesized
gaggttctggcaaggagagaga

SEQ ID NO: 21404 - DNA, 22 bp, Artificial Sequence
  chemically synthesized
tggcaaggagagagatggctcc

SEQ ID NO: 21405 - DNA, 22 bp, Artificial Sequence
  chemically synthesized
gcaaggagagagatggctccag

SEQ ID NO: 21406 - DNA, 22 bp, Artificial Sequence
  chemically synthesized
caggaaatgggggtgtgtcacc

SEQ ID NO: 21407 - DNA, 22 bp, Artificial Sequence
  chemically synthesized
cctaacaggaggtgggggttag

SEQ ID NO: 21408 - DNA, 22 bp, Artificial Sequence
  chemically synthesized
acaggaggtgggggttagaccc

SEQ ID NO: 21409 - DNA, 22 bp, Artificial Sequence
  chemically synthesized
gacccaatatcaggagactagg

SEQ ID NO: 21410 - DNA, 22 bp, Artificial Sequence
  chemically synthesized
ggaaggaggaggcctaaggatg

SEQ ID NO: 21411 - DNA, 22 bp, Artificial Sequence
  chemically synthesized
aggatggggcttttctgtcacc

SEQ ID NO: 21412 - DNA, 22 bp, Artificial Sequence
  chemically synthesized
ttctgtcaccaatcctgtccct

SEQ ID NO: 21413 - DNA, 22 bp, Artificial Sequence
  chemically synthesized
tctgtcaccaatcctgtcccta

SEQ ID NO: 21414 - DNA, 22 bp, Artificial Sequence
  chemically synthesized
ctgtcaccaatcctgtccctag

SEQ ID NO: 21415 - DNA, 22 bp, Artificial Sequence
  chemically synthesized
tgtcaccaatcctgtccctagt

SEQ ID NO: 21416 - DNA, 22 bp, Artificial Sequence
  chemically synthesized
tcaccaatcctgtccctagtgg

SEQ ID NO: 21417 - DNA, 22 bp, Artificial Sequence
  chemically synthesized
tccctagtggccccactgtggg

SEQ ID NO: 21418 - DNA, 22 bp, Artificial Sequence
  chemically synthesized
gtggccccactgtggggtggag

SEQ ID NO: 21419 - DNA, 22 bp, Artificial Sequence
  chemically synthesized
tggggtggaggggacagataaa

SEQ ID NO: 21420 - DNA, 22 bp, Artificial Sequence
  chemically synthesized
accggccctgggaatataaggt

SEQ ID NO: 21421 - DNA, 22 bp, Artificial Sequence
  chemically synthesized
ggaatataaggtggtcccagct

SEQ ID NO: 21422 - DNA, 22 bp, Artificial Sequence
  chemically synthesized
ggggacacaggatccctggagg

SEQ ID NO: 21423 - DNA, 22 bp, Artificial Sequence
  chemically synthesized
gaggcagcaaacatgctgtcct

SEQ ID NO: 21424 - DNA, 22 bp, Artificial Sequence
  chemically synthesized
tcctgaagtggacataggggcc

SEQ ID NO: 21425 - DNA, 22 bp, Artificial Sequence
  chemically synthesized
aagtggacataggggcccgggt

SEQ ID NO: 21426 - DNA, 22 bp, Artificial Sequence
  chemically synthesized
gaggaagaagactagctgagct

SEQ ID NO: 21427 - DNA, 22 bp, Artificial Sequence
  chemically synthesized
gctgagctctcggacccctgga

SEQ ID NO: 21428 - DNA, 22 bp, Artificial Sequence
  chemically synthesized
agctctcggacccctggaagat

SEQ ID NO: 21429 - DNA, 22 bp, Artificial Sequence
  chemically synthesized
tcggacccctggaagatgccat

SEQ ID NO: 21430 - DNA, 22 bp, Artificial Sequence
  chemically synthesized
ggacccctggaagatgccatga

SEQ ID NO: 21431 - DNA, 22 bp, Artificial Sequence
  chemically synthesized
gaagatgccatgacagggggct

SEQ ID NO: 21432 - DNA, 22 bp, Artificial Sequence
  chemically synthesized
gaagagctagcacagactagag

SEQ ID NO: 21433 - DNA, 22 bp, Artificial Sequence
  chemically synthesized
gcacagactagagaggtaaggg

SEQ ID NO: 21434 - DNA, 22 bp, Artificial Sequence
  chemically synthesized
gagaggtaaggggggtagggga

SEQ ID NO: 21435 - DNA, 22 bp, Artificial Sequence
  chemically synthesized
cccaaatgaaaggagtgagagg

SEQ ID NO: 21436 - DNA, 22 bp, Artificial Sequence
  chemically synthesized
aagccagggagacggggtactt

SEQ ID NO: 21437 - DNA, 22 bp, Artificial Sequence
  chemically synthesized
tggggttgtccagaaaaacggt

SEQ ID NO: 21438 - DNA, 22 bp, Artificial Sequence
  chemically synthesized
ggggttgtccagaaaaacggtg

SEQ ID NO: 21439 - DNA, 22 bp, Artificial Sequence
  chemically synthesized
gggttgtccagaaaaacggtga

SEQ ID NO: 21440 - DNA, 22 bp, Artificial Sequence
  chemically synthesized
tccagaaaaacggtgatgatgc

SEQ ID NO: 21441 - DNA, 22 bp, Artificial Sequence
  chemically synthesized
caagaaggggaggcgggacgca

SEQ ID NO: 21442 - DNA, 22 bp, Artificial Sequence
  chemically synthesized
agaaacgagagatggcacaggc

SEQ ID NO: 21443 - DNA, 22 bp, Artificial Sequence
  chemically synthesized
ggtgagggaggagagatgcccg

SEQ ID NO: 21444 - DNA, 22 bp, Artificial Sequence
  chemically synthesized
agaggacatcacgtggtgcagc

SEQ ID NO: 21445 - DNA, 22 bp, Artificial Sequence
  chemically synthesized
cggaaagagcatccttgggcag

SEQ ID NO: 21446 - DNA, 22 bp, Artificial Sequence
  chemically synthesized
gggcagcaacacagcagagagc

SEQ ID NO: 21447 - DNA, 22 bp, Artificial Sequence
  chemically synthesized
ggcagcaacacagcagagagca

SEQ ID NO: 21448 - DNA, 22 bp, Artificial Sequence
  chemically synthesized
aaggaggcggcagggaaggatc

SEQ ID NO: 21449 - DNA, 22 bp, Artificial Sequence
  chemically synthesized
ggccagccgtagaggtgaccca

SEQ ID NO: 21450 - DNA, 22 bp, Artificial Sequence
  chemically synthesized
cagacagaaagcggcacaggcc

SEQ ID NO: 21451 - DNA, 22 bp, Artificial Sequence
  chemically synthesized
cctgggaaggggaaacagtggg

SEQ ID NO: 21452 - DNA, 22 bp, Artificial Sequence
  chemically synthesized
ggaaggggaaacagtgggccag

SEQ ID NO: 21453 - DNA, 22 bp, Artificial Sequence
  chemically synthesized
aaagtggtccggactcaggaga

SEQ ID NO: 21454 - DNA, 22 bp, Artificial Sequence
  chemically synthesized
aggagagagacggcagcgttag

SEQ ID NO: 21455 - DNA, 22 bp, Artificial Sequence
  chemically synthesized
gagggcagagttccggcggcac

SEQ ID NO: 21456 - DNA, 22 bp, Artificial Sequence
  chemically synthesized
cggcggcacagcaagggcactc

SEQ ID NO: 21457 - DNA, 22 bp, Artificial Sequence
  chemically synthesized
gggggcgagaggagggcagcgc

SEQ ID NO: 21458 - DNA, 22 bp, Artificial Sequence
  chemically synthesized
agctatgggagctggctcaggt

SEQ ID NO: 21459 - DNA, 22 bp, Artificial Sequence
  chemically synthesized
tgggagctggctcaggttcagg

SEQ ID NO: 21460 - DNA, 22 bp, Artificial Sequence
  chemically synthesized
gctcaggttcaggagagggcag

SEQ ID NO: 21461 - DNA, 22 bp, Artificial Sequence
  chemically synthesized
aggttcaggagagggcagggca

SEQ ID NO: 21462 - DNA, 22 bp, Artificial Sequence
  chemically synthesized
aggagagggcagggcagggaag

SEQ ID NO: 21463 - DNA, 22 bp, Artificial Sequence
  chemically synthesized
gaggggctcaacatcggaagag

SEQ ID NO: 21464 - DNA, 22 bp, Artificial Sequence
  chemically synthesized
aacatcggaagaggggaagtcg

SEQ ID NO: 21465 - DNA, 22 bp, Artificial Sequence
  chemically synthesized
catgggtcagcacaggctgcca

SEQ ID NO: 21466 - DNA, 22 bp, Artificial Sequence
  chemically synthesized
ccaaagccagggccagttaaag

SEQ ID NO: 21467 - DNA, 22 bp, Artificial Sequence
  chemically synthesized
aagcgactccaatgcggaagag

SEQ ID NO: 21468 - DNA, 22 bp, Artificial Sequence
  chemically synthesized
caatgcggaagagagtaggtcg

SEQ ID NO: 21469 - DNA, 22 bp, Artificial Sequence
  chemically synthesized
gggcagagtggtcagcacagag

SEQ ID NO: 21470 - DNA, 22 bp, Artificial Sequence
  chemically synthesized
agcccagggccagttgaagcgg

SEQ ID NO: 21471 - DNA, 22 bp, Artificial Sequence
  chemically synthesized
aagcggctccaattcggaagtg

SEQ ID NO: 21472 - DNA, 22 bp, Artificial Sequence
  chemically synthesized
caattcggaagtggggtggtcg

SEQ ID NO: 21473 - DNA, 22 bp, Artificial Sequence
  chemically synthesized
ggaagtggggtggtcgaagggg

SEQ ID NO: 21474 - DNA, 22 bp, Artificial Sequence
  chemically synthesized
ggacggggtgtcagcatagggt

SEQ ID NO: 21475 - DNA, 22 bp, Artificial Sequence
  chemically synthesized
gcaacggggaaggaggatgccc

SEQ ID NO: 21476 - DNA, 22 bp, Artificial Sequence
  chemically synthesized
gccccgggagacgccgggcggg

SEQ ID NO: 21477 - DNA, 22 bp, Artificial Sequence
  chemically synthesized
acctggtgcagggcgctgatac

SEQ ID NO: 21478 - DNA, 22 bp, Artificial Sequence
  chemically synthesized
gtgcagggcgctgataccgtcg

SEQ ID NO: 21479 - DNA, 22 bp, Artificial Sequence
  chemically synthesized
ataccgtcggcgttggtggagt

SEQ ID NO: 21480 - DNA, 22 bp, Artificial Sequence
  chemically synthesized
gtggagtccagcacggcgcggg

SEQ ID NO: 21481 - DNA, 22 bp, Artificial Sequence
  chemically synthesized
ggcgccggggccagggtcggcg

SEQ ID NO: 21482 - DNA, 22 bp, Artificial Sequence
  chemically synthesized
gtccaggtcgccgcccgcacag

SEQ ID NO: 21483 - DNA, 22 bp, Artificial Sequence
  chemically synthesized
ggcggcgcgctcgaagcggacg

SEQ ID NO: 21484 - DNA, 22 bp, Artificial Sequence
  chemically synthesized
gaagcggacggtgcgggcgcgg

SEQ ID NO: 21485 - DNA, 22 bp, Artificial Sequence
  chemically synthesized
tccggggccaggctcggcgccc

SEQ ID NO: 21486 - DNA, 22 bp, Artificial Sequence
  chemically synthesized
cggggccaggctcggcgcccgc

SEQ ID NO: 21487 - DNA, 22 bp, Artificial Sequence
  chemically synthesized
ggcgcccgcccgcgccccccac

SEQ ID NO: 21488 - DNA, 22 bp, Artificial Sequence
  chemically synthesized
ccgcagctgctcccgtcgccgc

SEQ ID NO: 21489 - DNA, 22 bp, Artificial Sequence
  chemically synthesized
ctcccgtcgccgctcccgggca

SEQ ID NO: 21490 - DNA, 22 bp, Artificial Sequence
  chemically synthesized
ccgtcgccgctcccgggcagcc

SEQ ID NO: 21491 - DNA, 22 bp, Artificial Sequence
  chemically synthesized
ccgggcagccgccgccgccgcc

SEQ ID NO: 21492 - DNA, 22 bp, Artificial Sequence
  chemically synthesized
tccggacatcgcaccgcccgcc

SEQ ID NO: 21493 - DNA, 22 bp, Artificial Sequence
  chemically synthesized
cggacatcgcaccgcccgcccg

SEQ ID NO: 21494 - DNA, 22 bp, Artificial Sequence
  chemically synthesized
gggctcggcgctcgctcgctcg

SEQ ID NO: 21495 - DNA, 22 bp, Artificial Sequence
  chemically synthesized
ggcgctcgctcgctcgctgggc

SEQ ID NO: 21496 - DNA, 22 bp, Artificial Sequence
  chemically synthesized
gctcgctcgctgggcgggcggg

SEQ ID NO: 21497 - DNA, 22 bp, Artificial Sequence
  chemically synthesized
gctcgctgggcgggcgggcggt

SEQ ID NO: 21498 - DNA, 22 bp, Artificial Sequence
  chemically synthesized
gctgggcgggcgggcggtgcga

SEQ ID NO: 21499 - DNA, 22 bp, Artificial Sequence
  chemically synthesized
ggcgggcgggcggtgcgatgtc

SEQ ID NO: 21500 - DNA, 22 bp, Artificial Sequence
  chemically synthesized
gcccgggggcggcggcggcggc

SEQ ID NO: 21501 - DNA, 22 bp, Artificial Sequence
  chemically synthesized
cccgggagcggcgacgggagca

SEQ ID NO: 21502 - DNA, 22 bp, Artificial Sequence
  chemically synthesized
cggcagtggggggcgcgggcgg

SEQ ID NO: 21503 - DNA, 22 bp, Artificial Sequence
  chemically synthesized
gccccggagagcgccgcgcccg

SEQ ID NO: 21504 - DNA, 22 bp, Artificial Sequence
  chemically synthesized
cgagcgcgccgccgagttcctg

SEQ ID NO: 21505 - DNA, 22 bp, Artificial Sequence
  chemically synthesized
gagcgcgccgccgagttcctgg

SEQ ID NO: 21506 - DNA, 22 bp, Artificial Sequence
  chemically synthesized
ctggcggcctgtgcgggcggcg

SEQ ID NO: 21507 - DNA, 22 bp, Artificial Sequence
  chemically synthesized
gcggcctgtgcgggcggcgacc

SEQ ID NO: 21508 - DNA, 22 bp, Artificial Sequence
  chemically synthesized
tgcgggcggcgacctggacgag

SEQ ID NO: 21509 - DNA, 22 bp, Artificial Sequence
  chemically synthesized
gacgaggcgcgtctgatgctgc

SEQ ID NO: 21510 - DNA, 22 bp, Artificial Sequence
  chemically synthesized
atgctgcgcgccgccgaccctg

SEQ ID NO: 21511 - DNA, 22 bp, Artificial Sequence
  chemically synthesized
cgcgccgccgaccctggccccg

SEQ ID NO: 21512 - DNA, 22 bp, Artificial Sequence
  chemically synthesized
gccccggcgccgagctcgaccc

SEQ ID NO: 21513 - DNA, 22 bp, Artificial Sequence
  chemically synthesized
gaccccgccgcgccgccgcccg

SEQ ID NO: 21514 - DNA, 22 bp, Artificial Sequence
  chemically synthesized
gactccaccaacgccgacggta

SEQ ID NO: 21515 - DNA, 22 bp, Artificial Sequence
  chemically synthesized
caccaacgccgacggtatcagc

SEQ ID NO: 21516 - DNA, 22 bp, Artificial Sequence
  chemically synthesized
caccaggtcagcgccccccgcc

SEQ ID NO: 21517 - DNA, 22 bp, Artificial Sequence
  chemically synthesized
ccggggccaggtccaccctctg

SEQ ID NO: 21518 - DNA, 22 bp, Artificial Sequence
  chemically synthesized
tgctgcgccacctggggcatcc

SEQ ID NO: 21519 - DNA, 22 bp, Artificial Sequence
  chemically synthesized
ctgcgccacctggggcatcctc

SEQ ID NO: 21520 - DNA, 22 bp, Artificial Sequence
  chemically synthesized
cgccacctggggcatcctcctt

SEQ ID NO: 21521 - DNA, 22 bp, Artificial Sequence
  chemically synthesized
gggcatcctccttccccgttgc

SEQ ID NO: 21522 - DNA, 22 bp, Artificial Sequence
  chemically synthesized
cttccccgttgccagtctcgat

SEQ ID NO: 21523 - DNA, 22 bp, Artificial Sequence
  chemically synthesized
ccccgttgccagtctcgatccg

SEQ ID NO: 21524 - DNA, 22 bp, Artificial Sequence
  chemically synthesized
cccgttgccagtctcgatccgc

SEQ ID NO: 21525 - DNA, 22 bp, Artificial Sequence
  chemically synthesized
ccagtctcgatccgccccgtcg

SEQ ID NO: 21526 - DNA, 22 bp, Artificial Sequence
  chemically synthesized
gatccgccccgtcgttcctggc

SEQ ID NO: 21527 - DNA, 22 bp, Artificial Sequence
  chemically synthesized
ctggccctgggctttgccaccc

SEQ ID NO: 21528 - DNA, 22 bp, Artificial Sequence
  chemically synthesized
gccctgggctttgccaccctat

SEQ ID NO: 21529 - DNA, 22 bp, Artificial Sequence
  chemically synthesized
ggctttgccaccctatgctgac

SEQ ID NO: 21530 - DNA, 22 bp, Artificial Sequence
  chemically synthesized
tgccaccctatgctgacacccc

SEQ ID NO: 21531 - DNA, 22 bp, Artificial Sequence
  chemically synthesized
gccaccctatgctgacaccccg

SEQ ID NO: 21532 - DNA, 22 bp, Artificial Sequence
  chemically synthesized
ccaccctatgctgacaccccgt

SEQ ID NO: 21533 - DNA, 22 bp, Artificial Sequence
  chemically synthesized
tgctgacaccccgtcccagtcc

SEQ ID NO: 21534 - DNA, 22 bp, Artificial Sequence
  chemically synthesized
acaccccgtcccagtccccctt

SEQ ID NO: 21535 - DNA, 22 bp, Artificial Sequence
  chemically synthesized
accattccccttcgaccacccc

SEQ ID NO: 21536 - DNA, 22 bp, Artificial Sequence
  chemically synthesized
ccattccccttcgaccacccca

SEQ ID NO: 21537 - DNA, 22 bp, Artificial Sequence
  chemically synthesized
cccttcgaccaccccacttccg

SEQ ID NO: 21538 - DNA, 22 bp, Artificial Sequence
  chemically synthesized
cgaccaccccacttccgaattg

SEQ ID NO: 21539 - DNA, 22 bp, Artificial Sequence
  chemically synthesized
gaccaccccacttccgaattgg

SEQ ID NO: 21540 - DNA, 22 bp, Artificial Sequence
  chemically synthesized
ccgaattggagccgcttcaact

SEQ ID NO: 21541 - DNA, 22 bp, Artificial Sequence
  chemically synthesized
cgaattggagccgcttcaactg

SEQ ID NO: 21542 - DNA, 22 bp, Artificial Sequence
  chemically synthesized
gagccgcttcaactggccctgg

SEQ ID NO: 21543 - DNA, 22 bp, Artificial Sequence
  chemically synthesized
caactggccctgggcttagcca

SEQ ID NO: 21544 - DNA, 22 bp, Artificial Sequence
  chemically synthesized
aactggccctgggcttagccac

SEQ ID NO: 21545 - DNA, 22 bp, Artificial Sequence
  chemically synthesized
gccctgggcttagccactctgt

SEQ ID NO: 21546 - DNA, 22 bp, Artificial Sequence
  chemically synthesized
ggcttagccactctgtgctgac

SEQ ID NO: 21547 - DNA, 22 bp, Artificial Sequence
  chemically synthesized
agccactctgtgctgaccactc

SEQ ID NO: 21548 - DNA, 22 bp, Artificial Sequence
  chemically synthesized
gccactctgtgctgaccactct

SEQ ID NO: 21549 - DNA, 22 bp, Artificial Sequence
  chemically synthesized
tgtgctgaccactctgccccag

SEQ ID NO: 21550 - DNA, 22 bp, Artificial Sequence
  chemically synthesized
tgctgaccactctgccccaggc

SEQ ID NO: 21551 - DNA, 22 bp, Artificial Sequence
  chemically synthesized
accactctgccccaggcctcct

SEQ ID NO: 21552 - DNA, 22 bp, Artificial Sequence
  chemically synthesized
tgccccaggcctccttaccatt

SEQ ID NO: 21553 - DNA, 22 bp, Artificial Sequence
  chemically synthesized
ccccaggcctccttaccattcc

SEQ ID NO: 21554 - DNA, 22 bp, Artificial Sequence
  chemically synthesized
cttaccattccccttcgaccta

SEQ ID NO: 21555 - DNA, 22 bp, Artificial Sequence
  chemically synthesized
accattccccttcgacctactc

SEQ ID NO: 21556 - DNA, 22 bp, Artificial Sequence
  chemically synthesized
ccattccccttcgacctactct

SEQ ID NO: 21557 - DNA, 22 bp, Artificial Sequence
  chemically synthesized
cccttcgacctactctcttccg

SEQ ID NO: 21558 - DNA, 22 bp, Artificial Sequence
  chemically synthesized
cgacctactctcttccgcattg

SEQ ID NO: 21559 - DNA, 22 bp, Artificial Sequence
  chemically synthesized
gacctactctcttccgcattgg

SEQ ID NO: 21560 - DNA, 22 bp, Artificial Sequence
  chemically synthesized
ctctcttccgcattggagtcgc

SEQ ID NO: 21561 - DNA, 22 bp, Artificial Sequence
  chemically synthesized
tcttccgcattggagtcgcttt

SEQ ID NO: 21562 - DNA, 22 bp, Artificial Sequence
  chemically synthesized
ttccgcattggagtcgctttaa

SEQ ID NO: 21563 - DNA, 22 bp, Artificial Sequence
  chemically synthesized
ccgcattggagtcgctttaact

SEQ ID NO: 21564 - DNA, 22 bp, Artificial Sequence
  chemically synthesized
cgcattggagtcgctttaactg

SEQ ID NO: 21565 - DNA, 22 bp, Artificial Sequence
  chemically synthesized
gagtcgctttaactggccctgg

SEQ ID NO: 21566 - DNA, 22 bp, Artificial Sequence
  chemically synthesized
taactggccctggctttggcag

SEQ ID NO: 21567 - DNA, 22 bp, Artificial Sequence
  chemically synthesized
aactggccctggctttggcagc

SEQ ID NO: 21568 - DNA, 22 bp, Artificial Sequence
  chemically synthesized
actggccctggctttggcagcc

SEQ ID NO: 21569 - DNA, 22 bp, Artificial Sequence
  chemically synthesized
gccctggctttggcagcctgtg

SEQ ID NO: 21570 - DNA, 22 bp, Artificial Sequence
  chemically synthesized
gctttggcagcctgtgctgacc

SEQ ID NO: 21571 - DNA, 22 bp, Artificial Sequence
  chemically synthesized
tggcagcctgtgctgacccatg

SEQ ID NO: 21572 - DNA, 22 bp, Artificial Sequence
  chemically synthesized
ggcagcctgtgctgacccatgc

SEQ ID NO: 21573 - DNA, 22 bp, Artificial Sequence
  chemically synthesized
gcagcctgtgctgacccatgca

SEQ ID NO: 21574 - DNA, 22 bp, Artificial Sequence
  chemically synthesized
tgctgacccatgcagtcctcct

SEQ ID NO: 21575 - DNA, 22 bp, Artificial Sequence
  chemically synthesized
acccatgcagtcctccttacca

SEQ ID NO: 21576 - DNA, 22 bp, Artificial Sequence
  chemically synthesized
cttaccatccctccctcgactt

SEQ ID NO: 21577 - DNA, 22 bp, Artificial Sequence
  chemically synthesized
accatccctccctcgacttccc

SEQ ID NO: 21578 - DNA, 22 bp, Artificial Sequence
  chemically synthesized
ccatccctccctcgacttcccc

SEQ ID NO: 21579 - DNA, 22 bp, Artificial Sequence
  chemically synthesized
cctcgacttcccctcttccgat

SEQ ID NO: 21580 - DNA, 22 bp, Artificial Sequence
  chemically synthesized
gacttcccctcttccgatgttg

SEQ ID NO: 21581 - DNA, 22 bp, Artificial Sequence
  chemically synthesized
cccctcttccgatgttgagccc

SEQ ID NO: 21582 - DNA, 22 bp, Artificial Sequence
  chemically synthesized
ccctcttccgatgttgagcccc

SEQ ID NO: 21583 - DNA, 22 bp, Artificial Sequence
  chemically synthesized
ttccgatgttgagcccctccag

SEQ ID NO: 21584 - DNA, 22 bp, Artificial Sequence
  chemically synthesized
ccgatgttgagcccctccagcc

SEQ ID NO: 21585 - DNA, 22 bp, Artificial Sequence
  chemically synthesized
cgatgttgagcccctccagccg

SEQ ID NO: 21586 - DNA, 22 bp, Artificial Sequence
  chemically synthesized
agcccctccagccggtcctgga

SEQ ID NO: 21587 - DNA, 22 bp, Artificial Sequence
  chemically synthesized
cagccggtcctggactttgtct

SEQ ID NO: 21588 - DNA, 22 bp, Artificial Sequence
  chemically synthesized
gactttgtctccttccctgccc

SEQ ID NO: 21589 - DNA, 22 bp, Artificial Sequence
  chemically synthesized
tgtctccttccctgccctgccc

SEQ ID NO: 21590 - DNA, 22 bp, Artificial Sequence
  chemically synthesized
gtctccttccctgccctgccct

SEQ ID NO: 21591 - DNA, 22 bp, Artificial Sequence
  chemically synthesized
tctccttccctgccctgccctc

SEQ ID NO: 21592 - DNA, 22 bp, Artificial Sequence
  chemically synthesized
cttccctgccctgccctctcct

SEQ ID NO: 21593 - DNA, 22 bp, Artificial Sequence
  chemically synthesized
ccctgccctgccctctcctgaa

SEQ ID NO: 21594 - DNA, 22 bp, Artificial Sequence
  chemically synthesized
cctgccctgccctctcctgaac

SEQ ID NO: 21595 - DNA, 22 bp, Artificial Sequence
  chemically synthesized
ccctgccctctcctgaacctga

SEQ ID NO: 21596 - DNA, 22 bp, Artificial Sequence
  chemically synthesized
ccctctcctgaacctgagccag

SEQ ID NO: 21597 - DNA, 22 bp, Artificial Sequence
  chemically synthesized
tcctgaacctgagccagctccc

SEQ ID NO: 21598 - DNA, 22 bp, Artificial Sequence
  chemically synthesized
ctgaacctgagccagctcccat

SEQ ID NO: 21599 - DNA, 22 bp, Artificial Sequence
  chemically synthesized
aacctgagccagctcccatagc

SEQ ID NO: 21600 - DNA, 22 bp, Artificial Sequence
  chemically synthesized
agccagctcccatagctcagtc

SEQ ID NO: 21601 - DNA, 22 bp, Artificial Sequence
  chemically synthesized
ccatagctcagtctggtctatc

SEQ ID NO: 21602 - DNA, 22 bp, Artificial Sequence
  chemically synthesized
agtctggtctatctgcctggcc

SEQ ID NO: 21603 - DNA, 22 bp, Artificial Sequence
  chemically synthesized
gtctatctgcctggccctggcc

SEQ ID NO: 21604 - DNA, 22 bp, Artificial Sequence
  chemically synthesized
tctgcctggccctggccattgt

SEQ ID NO: 21605 - DNA, 22 bp, Artificial Sequence
  chemically synthesized
cctggccctggccattgtcact

SEQ ID NO: 21606 - DNA, 22 bp, Artificial Sequence
  chemically synthesized
gccctggccattgtcactttgc

SEQ ID NO: 21607 - DNA, 22 bp, Artificial Sequence
  chemically synthesized
gccattgtcactttgcgctgcc

SEQ ID NO: 21608 - DNA, 22 bp, Artificial Sequence
  chemically synthesized
tcactttgcgctgccctcctct

SEQ ID NO: 21609 - DNA, 22 bp, Artificial Sequence
  chemically synthesized
tgcgctgccctcctctcgcccc

SEQ ID NO: 21610 - DNA, 22 bp, Artificial Sequence
  chemically synthesized
gcgctgccctcctctcgccccc

SEQ ID NO: 21611 - DNA, 22 bp, Artificial Sequence
  chemically synthesized
cgctgccctcctctcgcccccg

SEQ ID NO: 21612 - DNA, 22 bp, Artificial Sequence
  chemically synthesized
ccctcctctcgcccccgagtgc

SEQ ID NO: 21613 - DNA, 22 bp, Artificial Sequence
  chemically synthesized
ctctcgcccccgagtgcccttg

SEQ ID NO: 21614 - DNA, 22 bp, Artificial Sequence
  chemically synthesized
tcgcccccgagtgcccttgctg

SEQ ID NO: 21615 - DNA, 22 bp, Artificial Sequence
  chemically synthesized
gcccccgagtgcccttgctgtg

SEQ ID NO: 21616 - DNA, 22 bp, Artificial Sequence
  chemically synthesized
gctgtgccgccggaactctgcc

SEQ ID NO: 21617 - DNA, 22 bp, Artificial Sequence
  chemically synthesized
ctgtgccgccggaactctgccc

SEQ ID NO: 21618 - DNA, 22 bp, Artificial Sequence
  chemically synthesized
tgccgccggaactctgccctct

SEQ ID NO: 21619 - DNA, 22 bp, Artificial Sequence
  chemically synthesized
tgccctctaacgctgccgtctc

SEQ ID NO: 21620 - DNA, 22 bp, Artificial Sequence
  chemically synthesized
ccctctaacgctgccgtctctc

SEQ ID NO: 21621 - DNA, 22 bp, Artificial Sequence
  chemically synthesized
taacgctgccgtctctctcctg

SEQ ID NO: 21622 - DNA, 22 bp, Artificial Sequence
  chemically synthesized
acgctgccgtctctctcctgag

SEQ ID NO: 21623 - DNA, 22 bp, Artificial Sequence
  chemically synthesized
ccgtctctctcctgagtccgga

SEQ ID NO: 21624 - DNA, 22 bp, Artificial Sequence
  chemically synthesized
tctcctgagtccggaccacttt

SEQ ID NO: 21625 - DNA, 22 bp, Artificial Sequence
  chemically synthesized
tcctgagtccggaccactttga

SEQ ID NO: 21626 - DNA, 22 bp, Artificial Sequence
  chemically synthesized
ctgagtccggaccactttgagc

SEQ ID NO: 21627 - DNA, 22 bp, Artificial Sequence
  chemically synthesized
agtccggaccactttgagctct

SEQ ID NO: 21628 - DNA, 22 bp, Artificial Sequence
  chemically synthesized
tgagctctactggcttctgcgc

SEQ ID NO: 21629 - DNA, 22 bp, Artificial Sequence
  chemically synthesized
gagctctactggcttctgcgcc

SEQ ID NO: 21630 - DNA, 22 bp, Artificial Sequence
  chemically synthesized
agctctactggcttctgcgccg

SEQ ID NO: 21631 - DNA, 22 bp, Artificial Sequence
  chemically synthesized
tactggcttctgcgccgcctct

SEQ ID NO: 21632 - DNA, 22 bp, Artificial Sequence
  chemically synthesized
ctggcttctgcgccgcctctgg

SEQ ID NO: 21633 - DNA, 22 bp, Artificial Sequence
  chemically synthesized
gcttctgcgccgcctctggccc

SEQ ID NO: 21634 - DNA, 22 bp, Artificial Sequence
  chemically synthesized
ctgcgccgcctctggcccactg

SEQ ID NO: 21635 - DNA, 22 bp, Artificial Sequence
  chemically synthesized
tgcgccgcctctggcccactgt

SEQ ID NO: 21636 - DNA, 22 bp, Artificial Sequence
  chemically synthesized
cgccgcctctggcccactgttt

SEQ ID NO: 21637 - DNA, 22 bp, Artificial Sequence
  chemically synthesized
tggcccactgtttccccttccc

SEQ ID NO: 21638 - DNA, 22 bp, Artificial Sequence
  chemically synthesized
gcccactgtttccccttcccag

SEQ ID NO: 21639 - DNA, 22 bp, Artificial Sequence
  chemically synthesized
tttccccttcccaggcaggtcc

SEQ ID NO: 21640 - DNA, 22 bp, Artificial Sequence
  chemically synthesized
ccccttcccaggcaggtcctgc

SEQ ID NO: 21641 - DNA, 22 bp, Artificial Sequence
  chemically synthesized
cccttcccaggcaggtcctgct

SEQ ID NO: 21642 - DNA, 22 bp, Artificial Sequence
  chemically synthesized
cccaggcaggtcctgctttctc

SEQ ID NO: 21643 - DNA, 22 bp, Artificial Sequence
  chemically synthesized
ccaggcaggtcctgctttctct

SEQ ID NO: 21644 - DNA, 22 bp, Artificial Sequence
  chemically synthesized
ctttctctgacctgcattctct

SEQ ID NO: 21645 - DNA, 22 bp, Artificial Sequence
  chemically synthesized
tctctgacctgcattctctccc

SEQ ID NO: 21646 - DNA, 22 bp, Artificial Sequence
  chemically synthesized
ctctgacctgcattctctcccc

SEQ ID NO: 21647 - DNA, 22 bp, Artificial Sequence
  chemically synthesized
tctgacctgcattctctcccct

SEQ ID NO: 21648 - DNA, 22 bp, Artificial Sequence
  chemically synthesized
tgacctgcattctctcccctgg

SEQ ID NO: 21649 - DNA, 22 bp, Artificial Sequence
  chemically synthesized
acctgcattctctcccctgggc

SEQ ID NO: 21650 - DNA, 22 bp, Artificial Sequence
  chemically synthesized
cattctctcccctgggcctgtg

SEQ ID NO: 21651 - DNA, 22 bp, Artificial Sequence
  chemically synthesized
tctcccctgggcctgtgccgct

SEQ ID NO: 21652 - DNA, 22 bp, Artificial Sequence
  chemically synthesized
tcccctgggcctgtgccgcttt

SEQ ID NO: 21653 - DNA, 22 bp, Artificial Sequence
  chemically synthesized
ccctgggcctgtgccgctttct

SEQ ID NO: 21654 - DNA, 22 bp, Artificial Sequence
  chemically synthesized
ggcctgtgccgctttctgtctg

SEQ ID NO: 21655 - DNA, 22 bp, Artificial Sequence
  chemically synthesized
tgccgctttctgtctgcagctt

SEQ ID NO: 21656 - DNA, 22 bp, Artificial Sequence
  chemically synthesized
tctgtctgcagcttgtggcctg

SEQ ID NO: 21657 - DNA, 22 bp, Artificial Sequence
  chemically synthesized
ctgtctgcagcttgtggcctgg

SEQ ID NO: 21658 - DNA, 22 bp, Artificial Sequence
  chemically synthesized
tgtctgcagcttgtggcctggg

SEQ ID NO: 21659 - DNA, 22 bp, Artificial Sequence
  chemically synthesized
tctgcagcttgtggcctgggtc

SEQ ID NO: 21660 - DNA, 22 bp, Artificial Sequence
  chemically synthesized
cagcttgtggcctgggtcacct

SEQ ID NO: 21661 - DNA, 22 bp, Artificial Sequence
  chemically synthesized
gtggcctgggtcacctctacgg

SEQ ID NO: 21662 - DNA, 22 bp, Artificial Sequence
  chemically synthesized
tggcctgggtcacctctacggc

SEQ ID NO: 21663 - DNA, 22 bp, Artificial Sequence
  chemically synthesized
ggtcacctctacggctggccca

SEQ ID NO: 21664 - DNA, 22 bp, Artificial Sequence
  chemically synthesized
tacggctggcccagatccttcc

SEQ ID NO: 21665 - DNA, 22 bp, Artificial Sequence
  chemically synthesized
cggctggcccagatccttccct

SEQ ID NO: 21666 - DNA, 22 bp, Artificial Sequence
  chemically synthesized
gcccagatccttccctgccgcc

SEQ ID NO: 21667 - DNA, 22 bp, Artificial Sequence
  chemically synthesized
ccctgccgcctccttcaggttc

SEQ ID NO: 21668 - DNA, 22 bp, Artificial Sequence
  chemically synthesized
cctgccgcctccttcaggttcc

SEQ ID NO: 21669 - DNA, 22 bp, Artificial Sequence
  chemically synthesized
ccgcctccttcaggttccgtct

SEQ ID NO: 21670 - DNA, 22 bp, Artificial Sequence
  chemically synthesized
cttcaggttccgtcttcctcca

SEQ ID NO: 21671 - DNA, 22 bp, Artificial Sequence
  chemically synthesized
caggttccgtcttcctccactc

SEQ ID NO: 21672 - DNA, 22 bp, Artificial Sequence
  chemically synthesized
aggttccgtcttcctccactcc

SEQ ID NO: 21673 - DNA, 22 bp, Artificial Sequence
  chemically synthesized
cgtcttcctccactccctcttc

SEQ ID NO: 21674 - DNA, 22 bp, Artificial Sequence
  chemically synthesized
cctccactccctcttccccttg

SEQ ID NO: 21675 - DNA, 22 bp, Artificial Sequence
  chemically synthesized
ctccactccctcttccccttgc

SEQ ID NO: 21676 - DNA, 22 bp, Artificial Sequence
  chemically synthesized
cactccctcttccccttgctct

SEQ ID NO: 21677 - DNA, 22 bp, Artificial Sequence
  chemically synthesized
cctcttccccttgctctctgct

SEQ ID NO: 21678 - DNA, 22 bp, Artificial Sequence
  chemically synthesized
ttccccttgctctctgctgtgt

SEQ ID NO: 21679 - DNA, 22 bp, Artificial Sequence
  chemically synthesized
ccccttgctctctgctgtgttg

SEQ ID NO: 21680 - DNA, 22 bp, Artificial Sequence
  chemically synthesized
cccttgctctctgctgtgttgc

SEQ ID NO: 21681 - DNA, 22 bp, Artificial Sequence
  chemically synthesized
gctctctgctgtgttgctgccc

SEQ ID NO: 21682 - DNA, 22 bp, Artificial Sequence
  chemically synthesized
ctctctgctgtgttgctgccca

SEQ ID NO: 21683 - DNA, 22 bp, Artificial Sequence
  chemically synthesized
tctgctgtgttgctgcccaagg

SEQ ID NO: 21684 - DNA, 22 bp, Artificial Sequence
  chemically synthesized
tgctgtgttgctgcccaaggat

SEQ ID NO: 21685 - DNA, 22 bp, Artificial Sequence
  chemically synthesized
ctgtgttgctgcccaaggatgc

SEQ ID NO: 21686 - DNA, 22 bp, Artificial Sequence
  chemically synthesized
tgttgctgcccaaggatgctct

SEQ ID NO: 21687 - DNA, 22 bp, Artificial Sequence
  chemically synthesized
ctgcccaaggatgctctttccg

SEQ ID NO: 21688 - DNA, 22 bp, Artificial Sequence
  chemically synthesized
cccaaggatgctctttccggag

SEQ ID NO: 21689 - DNA, 22 bp, Artificial Sequence
  chemically synthesized
tttccggagcacttccttctcg

SEQ ID NO: 21690 - DNA, 22 bp, Artificial Sequence
  chemically synthesized
tccggagcacttccttctcggc

SEQ ID NO: 21691 - DNA, 22 bp, Artificial Sequence
  chemically synthesized
ccggagcacttccttctcggcg

SEQ ID NO: 21692 - DNA, 22 bp, Artificial Sequence
  chemically synthesized
cggagcacttccttctcggcgc

SEQ ID NO: 21693 - DNA, 22 bp, Artificial Sequence
  chemically synthesized
ccttctcggcgctgcaccacgt

SEQ ID NO: 21694 - DNA, 22 bp, Artificial Sequence
  chemically synthesized
cttctcggcgctgcaccacgtg

SEQ ID NO: 21695 - DNA, 22 bp, Artificial Sequence
  chemically synthesized
ctcggcgctgcaccacgtgatg

SEQ ID NO: 21696 - DNA, 22 bp, Artificial Sequence
  chemically synthesized
tcggcgctgcaccacgtgatgt

SEQ ID NO: 21697 - DNA, 22 bp, Artificial Sequence
  chemically synthesized
ggcgctgcaccacgtgatgtcc

SEQ ID NO: 21698 - DNA, 22 bp, Artificial Sequence
  chemically synthesized
caccacgtgatgtcctctgagc

SEQ ID NO: 21699 - DNA, 22 bp, Artificial Sequence
  chemically synthesized
tgagcggatcctccccgtgtct

SEQ ID NO: 21700 - DNA, 22 bp, Artificial Sequence
  chemically synthesized
agcggatcctccccgtgtctgg

SEQ ID NO: 21701 - DNA, 22 bp, Artificial Sequence
  chemically synthesized
cccgtgtctgggtcctctccgg

SEQ ID NO: 21702 - DNA, 22 bp, Artificial Sequence
  chemically synthesized
ggtcctctccgggcatctctcc

SEQ ID NO: 21703 - DNA, 22 bp, Artificial Sequence
  chemically synthesized
tccgggcatctctcctccctca

SEQ ID NO: 21704 - DNA, 22 bp, Artificial Sequence
  chemically synthesized
cgggcatctctcctccctcacc

SEQ ID NO: 21705 - DNA, 22 bp, Artificial Sequence
  chemically synthesized
tcctccctcacccaaccccatg

SEQ ID NO: 21706 - DNA, 22 bp, Artificial Sequence
  chemically synthesized
ctccctcacccaaccccatgcc

SEQ ID NO: 21707 - DNA, 22 bp, Artificial Sequence
  chemically synthesized
cctcacccaaccccatgccgtc

SEQ ID NO: 21708 - DNA, 22 bp, Artificial Sequence
  chemically synthesized
acccaaccccatgccgtcttca

SEQ ID NO: 21709 - DNA, 22 bp, Artificial Sequence
  chemically synthesized
cactcgctgggttcccttttcc

SEQ ID NO: 21710 - DNA, 22 bp, Artificial Sequence
  chemically synthesized
actcgctgggttcccttttcct

SEQ ID NO: 21711 - DNA, 22 bp, Artificial Sequence
  chemically synthesized
gctgggttcccttttccttctc

SEQ ID NO: 21712 - DNA, 22 bp, Artificial Sequence
  chemically synthesized
ggttcccttttccttctccttc

SEQ ID NO: 21713 - DNA, 22 bp, Artificial Sequence
  chemically synthesized
ccttttccttctccttctgggg

SEQ ID NO: 21714 - DNA, 22 bp, Artificial Sequence
  chemically synthesized
ttccttctccttctggggcctg

SEQ ID NO: 21715 - DNA, 22 bp, Artificial Sequence
  chemically synthesized
tccttctccttctggggcctgt

SEQ ID NO: 21716 - DNA, 22 bp, Artificial Sequence
  chemically synthesized
ccttctccttctggggcctgtg

SEQ ID NO: 21717 - DNA, 22 bp, Artificial Sequence
  chemically synthesized
cttctccttctggggcctgtgc

SEQ ID NO: 21718 - DNA, 22 bp, Artificial Sequence
  chemically synthesized
ctccttctggggcctgtgccat

SEQ ID NO: 21719 - DNA, 22 bp, Artificial Sequence
  chemically synthesized
tccttctggggcctgtgccatc

SEQ ID NO: 21720 - DNA, 22 bp, Artificial Sequence
  chemically synthesized
cttctggggcctgtgccatctc

SEQ ID NO: 21721 - DNA, 22 bp, Artificial Sequence
  chemically synthesized
ctggggcctgtgccatctctcg

SEQ ID NO: 21722 - DNA, 22 bp, Artificial Sequence
  chemically synthesized
tggggcctgtgccatctctcgt

SEQ ID NO: 21723 - DNA, 22 bp, Artificial Sequence
  chemically synthesized
gggcctgtgccatctctcgttt

SEQ ID NO: 21724 - DNA, 22 bp, Artificial Sequence
  chemically synthesized
tgccatctctcgtttcttagga

SEQ ID NO: 21725 - DNA, 22 bp, Artificial Sequence
  chemically synthesized
tcgtttcttaggatggccttct

SEQ ID NO: 21726 - DNA, 22 bp, Artificial Sequence
  chemically synthesized
gtttcttaggatggccttctcc

SEQ ID NO: 21727 - DNA, 22 bp, Artificial Sequence
  chemically synthesized
cttaggatggccttctccgacg

SEQ ID NO: 21728 - DNA, 22 bp, Artificial Sequence
  chemically synthesized
ttaggatggccttctccgacgg

SEQ ID NO: 21729 - DNA, 22 bp, Artificial Sequence
  chemically synthesized
aggatggccttctccgacggat

SEQ ID NO: 21730 - DNA, 22 bp, Artificial Sequence
  chemically synthesized
ggatggccttctccgacggatg

SEQ ID NO: 21731 - DNA, 22 bp, Artificial Sequence
  chemically synthesized
ctccgacggatgtctcccttgc

SEQ ID NO: 21732 - DNA, 22 bp, Artificial Sequence
  chemically synthesized
tccgacggatgtctcccttgcg

SEQ ID NO: 21733 - DNA, 22 bp, Artificial Sequence
  chemically synthesized
cgacggatgtctcccttgcgtc

SEQ ID NO: 21734 - DNA, 22 bp, Artificial Sequence
  chemically synthesized
ccttgcgtcccgcctccccttc

SEQ ID NO: 21735 - DNA, 22 bp, Artificial Sequence
  chemically synthesized
gcgtcccgcctccccttcttgt

SEQ ID NO: 21736 - DNA, 22 bp, Artificial Sequence
  chemically synthesized
cgtcccgcctccccttcttgta

SEQ ID NO: 21737 - DNA, 22 bp, Artificial Sequence
  chemically synthesized
cccttcttgtaggcctgcatca

SEQ ID NO: 21738 - DNA, 22 bp, Artificial Sequence
  chemically synthesized
cttgtaggcctgcatcatcacc

SEQ ID NO: 21739 - DNA, 22 bp, Artificial Sequence
  chemically synthesized
ttgtaggcctgcatcatcaccg

SEQ ID NO: 21740 - DNA, 22 bp, Artificial Sequence
  chemically synthesized
gtaggcctgcatcatcaccgtt

SEQ ID NO: 21741 - DNA, 22 bp, Artificial Sequence
  chemically synthesized
taggcctgcatcatcaccgttt

SEQ ID NO: 21742 - DNA, 22 bp, Artificial Sequence
  chemically synthesized
catcatcaccgtttttctggac

SEQ ID NO: 21743 - DNA, 22 bp, Artificial Sequence
  chemically synthesized
ttctggacaaccccaaagtacc

SEQ ID NO: 21744 - DNA, 22 bp, Artificial Sequence
  chemically synthesized
tctggacaaccccaaagtaccc

SEQ ID NO: 21745 - DNA, 22 bp, Artificial Sequence
  chemically synthesized
ctggacaaccccaaagtacccc

SEQ ID NO: 21746 - DNA, 22 bp, Artificial Sequence
  chemically synthesized
tggacaaccccaaagtaccccg

SEQ ID NO: 21747 - DNA, 22 bp, Artificial Sequence
  chemically synthesized
gacaaccccaaagtaccccgtc

SEQ ID NO: 21748 - DNA, 22 bp, Artificial Sequence
  chemically synthesized
cctggctttagccacctctcca

SEQ ID NO: 21749 - DNA, 22 bp, Artificial Sequence
  chemically synthesized
gctttagccacctctccatcct

SEQ ID NO: 21750 - DNA, 22 bp, Artificial Sequence
  chemically synthesized
tagccacctctccatcctcttg

SEQ ID NO: 21751 - DNA, 22 bp, Artificial Sequence
  chemically synthesized
agccacctctccatcctcttgc

SEQ ID NO: 21752 - DNA, 22 bp, Artificial Sequence
  chemically synthesized
gccacctctccatcctcttgct

SEQ ID NO: 21753 - DNA, 22 bp, Artificial Sequence
  chemically synthesized
tccatcctcttgctttctttgc

SEQ ID NO: 21754 - DNA, 22 bp, Artificial Sequence
  chemically synthesized
catcctcttgctttctttgcct

SEQ ID NO: 21755 - DNA, 22 bp, Artificial Sequence
  chemically synthesized
ttgctttctttgcctggacacc

SEQ ID NO: 21756 - DNA, 22 bp, Artificial Sequence
  chemically synthesized
gctttctttgcctggacacccc

SEQ ID NO: 21757 - DNA, 22 bp, Artificial Sequence
  chemically synthesized
ctttctttgcctggacaccccg

SEQ ID NO: 21758 - DNA, 22 bp, Artificial Sequence
  chemically synthesized
tctttgcctggacaccccgttc

SEQ ID NO: 21759 - DNA, 22 bp, Artificial Sequence
  chemically synthesized
ctttgcctggacaccccgttct

SEQ ID NO: 21760 - DNA, 22 bp, Artificial Sequence
  chemically synthesized
tttgcctggacaccccgttctc

SEQ ID NO: 21761 - DNA, 22 bp, Artificial Sequence
  chemically synthesized
tgcctggacaccccgttctcct

SEQ ID NO: 21762 - DNA, 22 bp, Artificial Sequence
  chemically synthesized
gcctggacaccccgttctcctg

SEQ ID NO: 21763 - DNA, 22 bp, Artificial Sequence
  chemically synthesized
cctggacaccccgttctcctgt

SEQ ID NO: 21764 - DNA, 22 bp, Artificial Sequence
  chemically synthesized
gacaccccgttctcctgtggat

SEQ ID NO: 21765 - DNA, 22 bp, Artificial Sequence
  chemically synthesized
tcctgtggattcgggtcacctc

SEQ ID NO: 21766 - DNA, 22 bp, Artificial Sequence
  chemically synthesized
ctgtggattcgggtcacctctc

SEQ ID NO: 21767 - DNA, 22 bp, Artificial Sequence
  chemically synthesized
tggattcgggtcacctctcact

SEQ ID NO: 21768 - DNA, 22 bp, Artificial Sequence
  chemically synthesized
gggtcacctctcactcctttca

SEQ ID NO: 21769 - DNA, 22 bp, Artificial Sequence
  chemically synthesized
tcactcctttcatttgggcagc

SEQ ID NO: 21770 - DNA, 22 bp, Artificial Sequence
  chemically synthesized
actcctttcatttgggcagctc

SEQ ID NO: 21771 - DNA, 22 bp, Artificial Sequence
  chemically synthesized
ctttcatttgggcagctcccct

SEQ ID NO: 21772 - DNA, 22 bp, Artificial Sequence
  chemically synthesized
tcatttgggcagctcccctacc

SEQ ID NO: 21773 - DNA, 22 bp, Artificial Sequence
  chemically synthesized
catttgggcagctcccctaccc

SEQ ID NO: 21774 - DNA, 22 bp, Artificial Sequence
  chemically synthesized
atttgggcagctcccctacccc

SEQ ID NO: 21775 - DNA, 22 bp, Artificial Sequence
  chemically synthesized
gggcagctcccctacccccctt

SEQ ID NO: 21776 - DNA, 22 bp, Artificial Sequence
  chemically synthesized
ggcagctcccctacccccctta

SEQ ID NO: 21777 - DNA, 22 bp, Artificial Sequence
  chemically synthesized
ccctaccccccttacctctcta

SEQ ID NO: 21778 - DNA, 22 bp, Artificial Sequence
  chemically synthesized
ccccccttacctctctagtctg

SEQ ID NO: 21779 - DNA, 22 bp, Artificial Sequence
  chemically synthesized
acctctctagtctgtgctagct

SEQ ID NO: 21780 - DNA, 22 bp, Artificial Sequence
  chemically synthesized
cctctctagtctgtgctagctc

SEQ ID NO: 21781 - DNA, 22 bp, Artificial Sequence
  chemically synthesized
tctagtctgtgctagctcttcc

SEQ ID NO: 21782 - DNA, 22 bp, Artificial Sequence
  chemically synthesized
tagtctgtgctagctcttccag

SEQ ID NO: 21783 - DNA, 22 bp, Artificial Sequence
  chemically synthesized
gtctgtgctagctcttccagcc

SEQ ID NO: 21784 - DNA, 22 bp, Artificial Sequence
  chemically synthesized
tgctagctcttccagccccctg

SEQ ID NO: 21785 - DNA, 22 bp, Artificial Sequence
  chemically synthesized
gctcttccagccccctgtcatg

SEQ ID NO: 21786 - DNA, 22 bp, Artificial Sequence
  chemically synthesized
ttccagccccctgtcatggcat

SEQ ID NO: 21787 - DNA, 22 bp, Artificial Sequence
  chemically synthesized
ccagccccctgtcatggcatct

SEQ ID NO: 21788 - DNA, 22 bp, Artificial Sequence
  chemically synthesized
cagccccctgtcatggcatctt

SEQ ID NO: 21789 - DNA, 22 bp, Artificial Sequence
  chemically synthesized
tcatggcatcttccaggggtcc

SEQ ID NO: 21790 - DNA, 22 bp, Artificial Sequence
  chemically synthesized
ccaggggtccgagagctcagct

SEQ ID NO: 21791 - DNA, 22 bp, Artificial Sequence
  chemically synthesized
caggggtccgagagctcagcta

SEQ ID NO: 21792 - DNA, 22 bp, Artificial Sequence
  chemically synthesized
agctagtcttcttcctccaacc

SEQ ID NO: 21793 - DNA, 22 bp, Artificial Sequence
  chemically synthesized
gtcttcttcctccaacccgggc

SEQ ID NO: 21794 - DNA, 22 bp, Artificial Sequence
  chemically synthesized
cttcctccaacccgggccccta

SEQ ID NO: 21795 - DNA, 22 bp, Artificial Sequence
  chemically synthesized
ttcctccaacccgggcccctat

SEQ ID NO: 21796 - DNA, 22 bp, Artificial Sequence
  chemically synthesized
cctccaacccgggcccctatgt

SEQ ID NO: 21797 - DNA, 22 bp, Artificial Sequence
  chemically synthesized
ctccaacccgggcccctatgtc

SEQ ID NO: 21798 - DNA, 22 bp, Artificial Sequence
  chemically synthesized
caacccgggcccctatgtccac

SEQ ID NO: 21799 - DNA, 22 bp, Artificial Sequence
  chemically synthesized
tgtccacttcaggacagcatgt

SEQ ID NO: 21800 - DNA, 22 bp, Artificial Sequence
  chemically synthesized
caggacagcatgtttgctgcct

SEQ ID NO: 21801 - DNA, 22 bp, Artificial Sequence
  chemically synthesized
aggacagcatgtttgctgcctc

SEQ ID NO: 21802 - DNA, 22 bp, Artificial Sequence
  chemically synthesized
gctgcctccagggatcctgtgt

SEQ ID NO: 21803 - DNA, 22 bp, Artificial Sequence
  chemically synthesized
ctgcctccagggatcctgtgtc

SEQ ID NO: 21804 - DNA, 22 bp, Artificial Sequence
  chemically synthesized
cctccagggatcctgtgtcccc

SEQ ID NO: 21805 - DNA, 22 bp, Artificial Sequence
  chemically synthesized
cagggatcctgtgtccccgagc

SEQ ID NO: 21806 - DNA, 22 bp, Artificial Sequence
  chemically synthesized
tgtccccgagctgggaccacct

SEQ ID NO: 21807 - DNA, 22 bp, Artificial Sequence
  chemically synthesized
ggaccaccttatattcccaggg

SEQ ID NO: 21808 - DNA, 22 bp, Artificial Sequence
  chemically synthesized
atattcccagggccggttaatg

SEQ ID NO: 21809 - DNA, 22 bp, Artificial Sequence
  chemically synthesized
tattcccagggccggttaatgt

SEQ ID NO: 21810 - DNA, 22 bp, Artificial Sequence
  chemically synthesized
ccagggccggttaatgtggctc

SEQ ID NO: 21811 - DNA, 22 bp, Artificial Sequence
  chemically synthesized
atgtggctctggttctgggtac

SEQ ID NO: 21812 - DNA, 22 bp, Artificial Sequence
  chemically synthesized
tggttctgggtacttttatctg

SEQ ID NO: 21813 - DNA, 22 bp, Artificial Sequence
  chemically synthesized
gttctgggtacttttatctgtc

SEQ ID NO: 21814 - DNA, 22 bp, Artificial Sequence
  chemically synthesized
tgggtacttttatctgtcccct

SEQ ID NO: 21815 - DNA, 22 bp, Artificial Sequence
  chemically synthesized
ggtacttttatctgtcccctcc

SEQ ID NO: 21816 - DNA, 22 bp, Artificial Sequence
  chemically synthesized
ttatctgtcccctccaccccac

SEQ ID NO: 21817 - DNA, 22 bp, Artificial Sequence
  chemically synthesized
tatctgtcccctccaccccaca

SEQ ID NO: 21818 - DNA, 22 bp, Artificial Sequence
  chemically synthesized
atctgtcccctccaccccacag

SEQ ID NO: 21819 - DNA, 22 bp, Artificial Sequence
  chemically synthesized
tctgtcccctccaccccacagt

SEQ ID NO: 21820 - DNA, 22 bp, Artificial Sequence
  chemically synthesized
tcccctccaccccacagtgggg

SEQ ID NO: 21821 - DNA, 22 bp, Artificial Sequence
  chemically synthesized
caccccacagtggggccactag

SEQ ID NO: 21822 - DNA, 22 bp, Artificial Sequence
  chemically synthesized
gggacaggattggtgacagaaa

SEQ ID NO: 21823 - DNA, 22 bp, Artificial Sequence
  chemically synthesized
gtgacagaaaagccccatcctt

SEQ ID NO: 21824 - DNA, 22 bp, Artificial Sequence
  chemically synthesized
aggcctcctccttcctagtctc

SEQ ID NO: 21825 - DNA, 22 bp, Artificial Sequence
  chemically synthesized
ggcctcctccttcctagtctcc

SEQ ID NO: 21826 - DNA, 22 bp, Artificial Sequence
  chemically synthesized
ctccttcctagtctcctgatat

SEQ ID NO: 21827 - DNA, 22 bp, Artificial Sequence
  chemically synthesized
cttcctagtctcctgatattgg

SEQ ID NO: 21828 - DNA, 22 bp, Artificial Sequence
  chemically synthesized
cctagtctcctgatattgggtc

SEQ ID NO: 21829 - DNA, 22 bp, Artificial Sequence
  chemically synthesized
ctagtctcctgatattgggtct

SEQ ID NO: 21830 - DNA, 22 bp, Artificial Sequence
  chemically synthesized
gtctcctgatattgggtctaac

SEQ ID NO: 21831 - DNA, 22 bp, Artificial Sequence
  chemically synthesized
ctgatattgggtctaaccccca

SEQ ID NO: 21832 - DNA, 22 bp, Artificial Sequence
  chemically synthesized
atattgggtctaacccccacct

SEQ ID NO: 21833 - DNA, 22 bp, Artificial Sequence
  chemically synthesized
ggtctaacccccacctcctgtt

SEQ ID NO: 21834 - DNA, 22 bp, Artificial Sequence
  chemically synthesized
acccccacctcctgttaggcag

SEQ ID NO: 21835 - DNA, 22 bp, Artificial Sequence
  chemically synthesized
ctgttaggcagattccttatct

SEQ ID NO: 21836 - DNA, 22 bp, Artificial Sequence
  chemically synthesized
ttaggcagattccttatctggt

SEQ ID NO: 21837 - DNA, 22 bp, Artificial Sequence
  chemically synthesized
ggcagattccttatctggtgac

SEQ ID NO: 21838 - DNA, 22 bp, Artificial Sequence
  chemically synthesized
cttatctggtgacacaccccca

SEQ ID NO: 21839 - DNA, 22 bp, Artificial Sequence
  chemically synthesized
atctggtgacacacccccattt

SEQ ID NO: 21840 - DNA, 22 bp, Artificial Sequence
  chemically synthesized
tctggtgacacacccccatttc

SEQ ID NO: 21841 - DNA, 22 bp, Artificial Sequence
  chemically synthesized
gtgacacacccccatttcctgg

SEQ ID NO: 21842 - DNA, 22 bp, Artificial Sequence
  chemically synthesized
cctggagccatctctctccttg

SEQ ID NO: 21843 - DNA, 22 bp, Artificial Sequence
  chemically synthesized
ctggagccatctctctccttgc

SEQ ID NO: 21844 - DNA, 22 bp, Artificial Sequence
  chemically synthesized
gagccatctctctccttgccag

SEQ ID NO: 21845 - DNA, 22 bp, Artificial Sequence
  chemically synthesized
tctccttgccagaacctctaag

SEQ ID NO: 21846 - DNA, 22 bp, Artificial Sequence
  chemically synthesized
tccttgccagaacctctaaggt

SEQ ID NO: 21847 - DNA, 22 bp, Artificial Sequence
  chemically synthesized
cttgccagaacctctaaggttt

SEQ ID NO: 21848 - DNA, 22 bp, Artificial Sequence
  chemically synthesized
gccagaacctctaaggtttgct

SEQ ID NO: 21849 - DNA, 22 bp, Artificial Sequence
  chemically synthesized
ccagaacctctaaggtttgctt

SEQ ID NO: 21850 - DNA, 22 bp, Artificial Sequence
  chemically synthesized
taaggtttgcttacgatggagc

SEQ ID NO: 21851 - DNA, 22 bp, Artificial Sequence
  chemically synthesized
aggtttgcttacgatggagcca

SEQ ID NO: 21852 - DNA, 22 bp, Artificial Sequence
  chemically synthesized
gcttacgatggagccagagagg

SEQ ID NO: 21853 - DNA, 22 bp, Artificial Sequence
  chemically synthesized
cttacgatggagccagagagga

SEQ ID NO: 21854 - DNA, 22 bp, Artificial Sequence
  chemically synthesized
acgatggagccagagaggatcc

SEQ ID NO: 21855 - DNA, 22 bp, Artificial Sequence
  chemically synthesized
cgatggagccagagaggatcct

SEQ ID NO: 21856 - DNA, 22 bp, Artificial Sequence
  chemically synthesized
ggagggagagcttggcaggggg

SEQ ID NO: 21857 - DNA, 22 bp, Artificial Sequence
  chemically synthesized
ggcagggggtgggagggaaggg

SEQ ID NO: 21858 - DNA, 22 bp, Artificial Sequence
  chemically synthesized
gcagggggtgggagggaagggg

SEQ ID NO: 21859 - DNA, 22 bp, Artificial Sequence
  chemically synthesized
cccggttctcagtggccaccct

SEQ ID NO: 21860 - DNA, 22 bp, Artificial Sequence
  chemically synthesized
tcagtggccaccctgcgctacc

SEQ ID NO: 21861 - DNA, 22 bp, Artificial Sequence
  chemically synthesized
agtggccaccctgcgctaccct

SEQ ID NO: 21862 - DNA, 22 bp, Artificial Sequence
  chemically synthesized
cgctaccctctcccagaacctg

SEQ ID NO: 21863 - DNA, 22 bp, Artificial Sequence
  chemically synthesized
ccctctcccagaacctgagctg

SEQ ID NO: 21864 - DNA, 22 bp, Artificial Sequence
  chemically synthesized
tcccagaacctgagctgctctg

SEQ ID NO: 21865 - DNA, 22 bp, Artificial Sequence
  chemically synthesized
ccagaacctgagctgctctgac

SEQ ID NO: 21866 - DNA, 22 bp, Artificial Sequence
  chemically synthesized
agctgctctgacgcggccgtct

SEQ ID NO: 21867 - DNA, 22 bp, Artificial Sequence
  chemically synthesized
ctctgacgcggccgtctggtgc

SEQ ID NO: 21868 - DNA, 22 bp, Artificial Sequence
  chemically synthesized
tgacgcggccgtctggtgcgtt

SEQ ID NO: 21869 - DNA, 22 bp, Artificial Sequence
  chemically synthesized
acgcggccgtctggtgcgtttc

SEQ ID NO: 21870 - DNA, 22 bp, Artificial Sequence
  chemically synthesized
gtgcgtttcactgatcctggtg

SEQ ID NO: 21871 - DNA, 22 bp, Artificial Sequence
  chemically synthesized
cactgatcctggtgctgcagct

SEQ ID NO: 21872 - DNA, 22 bp, Artificial Sequence
  chemically synthesized
actgatcctggtgctgcagctt

SEQ ID NO: 21873 - DNA, 22 bp, Artificial Sequence
  chemically synthesized
atcctggtgctgcagcttcctt

SEQ ID NO: 21874 - DNA, 22 bp, Artificial Sequence
  chemically synthesized
gtgctgcagcttccttacactt

SEQ ID NO: 21875 - DNA, 22 bp, Artificial Sequence
  chemically synthesized
cagcttccttacacttcccaag

SEQ ID NO: 21876 - DNA, 22 bp, Artificial Sequence
  chemically synthesized
ccttacacttcccaagaggaga

SEQ ID NO: 21877 - DNA, 22 bp, Artificial Sequence
  chemically synthesized
cttacacttcccaagaggagaa

SEQ ID NO: 21878 - DNA, 22 bp, Artificial Sequence
  chemically synthesized
acacttcccaagaggagaagca

SEQ ID NO: 21879 - DNA, 22 bp, Artificial Sequence
  chemically synthesized
cacttcccaagaggagaagcag

SEQ ID NO: 21880 - DNA, 22 bp, Artificial Sequence
  chemically synthesized
cccaagaggagaagcagtttgg

SEQ ID NO: 21881 - DNA, 22 bp, Artificial Sequence
  chemically synthesized
ccaagaggagaagcagtttgga

SEQ ID NO: 21882 - DNA, 22 bp, Artificial Sequence
  chemically synthesized
ggaaaaacaaaatcagaataag

SEQ ID NO: 21883 - DNA, 22 bp, Artificial Sequence
  chemically synthesized
gaaaaacaaaatcagaataagt

SEQ ID NO: 21884 - DNA, 22 bp, Artificial Sequence
  chemically synthesized
gtcctgagttctaactttggct

SEQ ID NO: 21885 - DNA, 22 bp, Artificial Sequence
  chemically synthesized
agttctaactttggctcttcac

SEQ ID NO: 21886 - DNA, 22 bp, Artificial Sequence
  chemically synthesized
taactttggctcttcacctttc

SEQ ID NO: 21887 - DNA, 22 bp, Artificial Sequence
  chemically synthesized
actttggctcttcacctttcta

SEQ ID NO: 21888 - DNA, 22 bp, Artificial Sequence
  chemically synthesized
tggctcttcacctttctagtcc

SEQ ID NO: 21889 - DNA, 22 bp, Artificial Sequence
  chemically synthesized
ggctcttcacctttctagtccc

SEQ ID NO: 21890 - DNA, 22 bp, Artificial Sequence
  chemically synthesized
gctcttcacctttctagtcccc

SEQ ID NO: 21891 - DNA, 22 bp, Artificial Sequence
  chemically synthesized
ttcacctttctagtccccaatt

SEQ ID NO: 21892 - DNA, 22 bp, Artificial Sequence
  chemically synthesized
cacctttctagtccccaattta

SEQ ID NO: 21893 - DNA, 22 bp, Artificial Sequence
  chemically synthesized
acctttctagtccccaatttat

SEQ ID NO: 21894 - DNA, 22 bp, Artificial Sequence
  chemically synthesized
tctagtccccaatttatattgt

SEQ ID NO: 21895 - DNA, 22 bp, Artificial Sequence
  chemically synthesized
ctagtccccaatttatattgtt

SEQ ID NO: 21896 - DNA, 22 bp, Artificial Sequence
  chemically synthesized
tagtccccaatttatattgttc

SEQ ID NO: 21897 - DNA, 22 bp, Artificial Sequence
  chemically synthesized
gtccccaatttatattgttcct

SEQ ID NO: 21898 - DNA, 22 bp, Artificial Sequence
  chemically synthesized
atattgttcctccgtgcgtcag

SEQ ID NO: 21899 - DNA, 22 bp, Artificial Sequence
  chemically synthesized
tattgttcctccgtgcgtcagt

SEQ ID NO: 21900 - DNA, 22 bp, Artificial Sequence
  chemically synthesized
ttcctccgtgcgtcagttttac

SEQ ID NO: 21901 - DNA, 22 bp, Artificial Sequence
  chemically synthesized
ctccgtgcgtcagttttacctg

SEQ ID NO: 21902 - DNA, 22 bp, Artificial Sequence
  chemically synthesized
cgtgcgtcagttttacctgtga

SEQ ID NO: 21903 - DNA, 22 bp, Artificial Sequence
  chemically synthesized
tacctgtgagataaggccagta

SEQ ID NO: 21904 - DNA, 22 bp, Artificial Sequence
  chemically synthesized
acctgtgagataaggccagtag

SEQ ID NO: 21905 - DNA, 22 bp, Artificial Sequence
  chemically synthesized
cctgtgagataaggccagtagc

SEQ ID NO: 21906 - DNA, 22 bp, Artificial Sequence
  chemically synthesized
tgagataaggccagtagccagc

SEQ ID NO: 21907 - DNA, 22 bp, Artificial Sequence
  chemically synthesized
gcagggctgtggtgaggagggg

SEQ ID NO: 21908 - DNA, 22 bp, Artificial Sequence
  chemically synthesized
tggtgaggaggggggtgtccgt

SEQ ID NO: 21909 - DNA, 22 bp, Artificial Sequence
  chemically synthesized
cctttgtgagaatggtgcgtcc

SEQ ID NO: 21910 - DNA, 22 bp, Artificial Sequence
  chemically synthesized
tgtgagaatggtgcgtcctagg

SEQ ID NO: 21911 - DNA, 22 bp, Artificial Sequence
  chemically synthesized
gtgagaatggtgcgtcctaggt

SEQ ID NO: 21912 - DNA, 22 bp, Artificial Sequence
  chemically synthesized
tgagaatggtgcgtcctaggtg

SEQ ID NO: 21913 - DNA, 22 bp, Artificial Sequence
  chemically synthesized
ggtgttcaccaggtcgtggccg

SEQ ID NO: 21914 - DNA, 22 bp, Artificial Sequence
  chemically synthesized
accaggtcgtggccgcctctac

SEQ ID NO: 21915 - DNA, 22 bp, Artificial Sequence
  chemically synthesized
tactccctttctctttctccat

SEQ ID NO: 21916 - DNA, 22 bp, Artificial Sequence
  chemically synthesized
ctccctttctctttctccatcc

SEQ ID NO: 21917 - DNA, 22 bp, Artificial Sequence
  chemically synthesized
cctttctctttctccatccttc

SEQ ID NO: 21918 - DNA, 22 bp, Artificial Sequence
  chemically synthesized
tctctttctccatccttctttc

SEQ ID NO: 21919 - DNA, 22 bp, Artificial Sequence
  chemically synthesized
ctctttctccatccttctttcc

SEQ ID NO: 21920 - DNA, 22 bp, Artificial Sequence
  chemically synthesized
tctttctccatccttctttcct

SEQ ID NO: 21921 - DNA, 22 bp, Artificial Sequence
  chemically synthesized
tttctccatccttctttcctta

SEQ ID NO: 21922 - DNA, 22 bp, Artificial Sequence
  chemically synthesized
tctccatccttctttccttaaa

SEQ ID NO: 21923 - DNA, 22 bp, Artificial Sequence
  chemically synthesized
ctccatccttctttccttaaag

SEQ ID NO: 21924 - DNA, 22 bp, Artificial Sequence
  chemically synthesized
tccatccttctttccttaaaga

SEQ ID NO: 21925 - DNA, 22 bp, Artificial Sequence
  chemically synthesized
catccttctttccttaaagagt

SEQ ID NO: 21926 - DNA, 22 bp, Artificial Sequence
  chemically synthesized
ctttccttaaagagtccccagt

SEQ ID NO: 21927 - DNA, 22 bp, Artificial Sequence
  chemically synthesized
tttccttaaagagtccccagtg

SEQ ID NO: 21928 - DNA, 22 bp, Artificial Sequence
  chemically synthesized
tccttaaagagtccccagtgct

SEQ ID NO: 21929 - DNA, 22 bp, Artificial Sequence
  chemically synthesized
ccttaaagagtccccagtgcta

SEQ ID NO: 21930 - DNA, 22 bp, Artificial Sequence
  chemically synthesized
cttaaagagtccccagtgctat

SEQ ID NO: 21931 - DNA, 22 bp, Artificial Sequence
  chemically synthesized
aaagagtccccagtgctatctg

SEQ ID NO: 21932 - DNA, 22 bp, Artificial Sequence
  chemically synthesized
aagagtccccagtgctatctgg

SEQ ID NO: 21933 - DNA, 22 bp, Artificial Sequence
  chemically synthesized
tctgggacatattcctccgccc

SEQ ID NO: 21934 - DNA, 22 bp, Artificial Sequence
  chemically synthesized
ggacatattcctccgcccagag

SEQ ID NO: 21935 - DNA, 22 bp, Artificial Sequence
  chemically synthesized
ctccgcccagagcagggtcccg

SEQ ID NO: 21936 - DNA, 22 bp, Artificial Sequence
  chemically synthesized
cgcccagagcagggtcccgctt

SEQ ID NO: 21937 - DNA, 22 bp, Artificial Sequence
  chemically synthesized
ccctaaggccctgctctgggct

SEQ ID NO: 21938 - DNA, 22 bp, Artificial Sequence
  chemically synthesized
cctaaggccctgctctgggctt

SEQ ID NO: 21939 - DNA, 22 bp, Artificial Sequence
  chemically synthesized
aggccctgctctgggcttctgg

SEQ ID NO: 21940 - DNA, 22 bp, Artificial Sequence
  chemically synthesized
ctctgggcttctgggtttgagt

SEQ ID NO: 21941 - DNA, 22 bp, Artificial Sequence
  chemically synthesized
tgggcttctgggtttgagtcct

SEQ ID NO: 21942 - DNA, 22 bp, Artificial Sequence
  chemically synthesized
ggcttctgggtttgagtccttg

SEQ ID NO: 21943 - DNA, 22 bp, Artificial Sequence
  chemically synthesized
ctgggtttgagtccttggcaag

SEQ ID NO: 21944 - DNA, 22 bp, Artificial Sequence
  chemically synthesized
tgggtttgagtccttggcaagc

SEQ ID NO: 21945 - DNA, 22 bp, Artificial Sequence
  chemically synthesized
ggtttgagtccttggcaagccc

SEQ ID NO: 21946 - DNA, 22 bp, Artificial Sequence
  chemically synthesized
gagtccttggcaagcccaggag

SEQ ID NO: 21947 - DNA, 22 bp, Artificial Sequence
  chemically synthesized
agtccttggcaagcccaggaga

SEQ ID NO: 21948 - DNA, 22 bp, Artificial Sequence
  chemically synthesized
ggcaagcccaggagaggcgctc

SEQ ID NO: 21949 - DNA, 22 bp, Artificial Sequence
  chemically synthesized
gcaagcccaggagaggcgctca

SEQ ID NO: 21950 - DNA, 22 bp, Artificial Sequence
  chemically synthesized
aggcttccctgtcccccttcct

SEQ ID NO: 21951 - DNA, 22 bp, Artificial Sequence
  chemically synthesized
ccctgtcccccttcctcgtcca

SEQ ID NO: 21952 - DNA, 22 bp, Artificial Sequence
  chemically synthesized
cctgtcccccttcctcgtccac

SEQ ID NO: 21953 - DNA, 22 bp, Artificial Sequence
  chemically synthesized
tcccccttcctcgtccaccatc

SEQ ID NO: 21954 - DNA, 22 bp, Artificial Sequence
  chemically synthesized
cctcgtccaccatctcatgccc

SEQ ID NO: 21955 - DNA, 22 bp, Artificial Sequence
  chemically synthesized
ctcgtccaccatctcatgcccc

SEQ ID NO: 21956 - DNA, 22 bp, Artificial Sequence
  chemically synthesized
gtccaccatctcatgcccctgg

SEQ ID NO: 21957 - DNA, 22 bp, Artificial Sequence
  chemically synthesized
atgcccctggctctcctgcccc

SEQ ID NO: 21958 - DNA, 22 bp, Artificial Sequence
  chemically synthesized
gctctcctgccccttccctaca

SEQ ID NO: 21959 - DNA, 22 bp, Artificial Sequence
  chemically synthesized
tcctgccccttccctacagggg

SEQ ID NO: 21960 - DNA, 22 bp, Artificial Sequence
  chemically synthesized
ctgccccttccctacaggggtt

SEQ ID NO: 21961 - DNA, 22 bp, Artificial Sequence
  chemically synthesized
ccccttccctacaggggttcct

SEQ ID NO: 21962 - DNA, 22 bp, Artificial Sequence
  chemically synthesized
ccctacaggggttcctggctct

SEQ ID NO: 21963 - DNA, 22 bp, Artificial Sequence
  chemically synthesized
cctacaggggttcctggctctg

SEQ ID NO: 21964 - DNA, 22 bp, Artificial Sequence
  chemically synthesized
caggggttcctggctctgctct

SEQ ID NO: 21965 - DNA, 22 bp, Artificial Sequence
  chemically synthesized
ctggctctgctcttcagactga

SEQ ID NO: 21966 - DNA, 22 bp, Artificial Sequence
  chemically synthesized
gctctgctcttcagactgagcc

SEQ ID NO: 21967 - DNA, 22 bp, Artificial Sequence
  chemically synthesized
tgctcttcagactgagccccgt

SEQ ID NO: 21968 - DNA, 22 bp, Artificial Sequence
  chemically synthesized
ctcttcagactgagccccgttc

SEQ ID NO: 21969 - DNA, 22 bp, Artificial Sequence
  chemically synthesized
ttcagactgagccccgttcccc

SEQ ID NO: 21970 - DNA, 22 bp, Artificial Sequence
  chemically synthesized
cagactgagccccgttcccctg

SEQ ID NO: 21971 - DNA, 22 bp, Artificial Sequence
  chemically synthesized
agactgagccccgttcccctgc

SEQ ID NO: 21972 - DNA, 22 bp, Artificial Sequence
  chemically synthesized
agccccgttcccctgcatcccc

SEQ ID NO: 21973 - DNA, 22 bp, Artificial Sequence
  chemically synthesized
ccctgcatccccgttcccctgc

SEQ ID NO: 21974 - DNA, 22 bp, Artificial Sequence
  chemically synthesized
catccccgttcccctgcatccc

SEQ ID NO: 21975 - DNA, 22 bp, Artificial Sequence
  chemically synthesized
ccctgcatcccccttcccctgc

SEQ ID NO: 21976 - DNA, 22 bp, Artificial Sequence
  chemically synthesized
catcccccttcccctgcatccc

SEQ ID NO: 21977 - DNA, 22 bp, Artificial Sequence
  chemically synthesized
cccctgcatcccccagaggccc

SEQ ID NO: 21978 - DNA, 22 bp, Artificial Sequence
  chemically synthesized
ccctgcatcccccagaggcccc

SEQ ID NO: 21979 - DNA, 22 bp, Artificial Sequence
  chemically synthesized
catcccccagaggccccaggcc

SEQ ID NO: 21980 - DNA, 22 bp, Artificial Sequence
  chemically synthesized
cttggcctggaccccacgagag

SEQ ID NO: 21981 - DNA, 22 bp, Artificial Sequence
  chemically synthesized
ggcctggaccccacgagaggcc

SEQ ID NO: 21982 - DNA, 22 bp, Artificial Sequence
  chemically synthesized
gcctggaccccacgagaggcca

SEQ ID NO: 21983 - DNA, 22 bp, Artificial Sequence
  chemically synthesized
gaccccacgagaggccacccca

SEQ ID NO: 21984 - DNA, 22 bp, Artificial Sequence
  chemically synthesized
tctaccaggctgccttttgggt

SEQ ID NO: 21985 - DNA, 22 bp, Artificial Sequence
  chemically synthesized
ccaggctgccttttgggtggat

SEQ ID NO: 21986 - DNA, 22 bp, Artificial Sequence
  chemically synthesized
ccttttgggtggattctcctcc

SEQ ID NO: 21987 - DNA, 22 bp, Artificial Sequence
  chemically synthesized
ttgggtggattctcctccaact

SEQ ID NO: 21988 - DNA, 22 bp, Artificial Sequence
  chemically synthesized
tgggtggattctcctccaactg

SEQ ID NO: 21989 - DNA, 22 bp, Artificial Sequence
  chemically synthesized
gggtggattctcctccaactgt

SEQ ID NO: 21990 - DNA, 22 bp, Artificial Sequence
  chemically synthesized
ggtggattctcctccaactgtg

SEQ ID NO: 21991 - DNA, 22 bp, Artificial Sequence
  chemically synthesized
tcctccaactgtggggtgactg

SEQ ID NO: 21992 - DNA, 22 bp, Artificial Sequence
  chemically synthesized
ctccaactgtggggtgactgct

SEQ ID NO: 21993 - DNA, 22 bp, Artificial Sequence
  chemically synthesized
caactgtggggtgactgcttgg

SEQ ID NO: 21994 - DNA, 22 bp, Artificial Sequence
  chemically synthesized
tggggtgactgcttggcaaact

SEQ ID NO: 21995 - DNA, 22 bp, Artificial Sequence
  chemically synthesized
cttggcaaactcactcttcggg

SEQ ID NO: 21996 - DNA, 22 bp, Artificial Sequence
  chemically synthesized
ggcaaactcactcttcggggta

SEQ ID NO: 21997 - DNA, 22 bp, Artificial Sequence
  chemically synthesized
gcaaactcactcttcggggtat

SEQ ID NO: 21998 - DNA, 22 bp, Artificial Sequence
  chemically synthesized
actcttcggggtatcccaggag

SEQ ID NO: 21999 - DNA, 22 bp, Artificial Sequence
  chemically synthesized
ttcggggtatcccaggaggcct

SEQ ID NO: 22000 - DNA, 22 bp, Artificial Sequence
  chemically synthesized
cggggtatcccaggaggcctgg

SEQ ID NO: 22001 - DNA, 22 bp, Artificial Sequence
  chemically synthesized
ggggtatcccaggaggcctgga

SEQ ID NO: 22002 - DNA, 22 bp, Artificial Sequence
  chemically synthesized
gagcattggggtgggctggggt

SEQ ID NO: 22003 - DNA, 22 bp, Artificial Sequence
  chemically synthesized
gggtgggctggggttcagagag

SEQ ID NO: 22004 - DNA, 22 bp, Artificial Sequence
  chemically synthesized
gggttcagagaggagggattcc

SEQ ID NO: 22005 - DNA, 22 bp, Artificial Sequence
  chemically synthesized
agagaggagggattcccttctc

SEQ ID NO: 22006 - DNA, 22 bp, Artificial Sequence
  chemically synthesized
ccttctcaggttacgtggccaa

SEQ ID NO: 22007 - DNA, 22 bp, Artificial Sequence
  chemically synthesized
ctcaggttacgtggccaagaag

SEQ ID NO: 22008 - DNA, 22 bp, Artificial Sequence
  chemically synthesized
tcaggttacgtggccaagaagc

SEQ ID NO: 22009 - DNA, 22 bp, Artificial Sequence
  chemically synthesized
aggttacgtggccaagaagcag

SEQ ID NO: 22010 - DNA, 22 bp, Artificial Sequence
  chemically synthesized
cgtggccaagaagcaggggagc

SEQ ID NO: 22011 - DNA, 22 bp, Artificial Sequence
  chemically synthesized
ggtttgggtcaggtctgggtgt

SEQ ID NO: 22012 - DNA, 22 bp, Artificial Sequence
  chemically synthesized
gggtcaggtctgggtgtggggt

SEQ ID NO: 22013 - DNA, 22 bp, Artificial Sequence
  chemically synthesized
ggtcaggtctgggtgtggggtg

SEQ ID NO: 22014 - DNA, 22 bp, Artificial Sequence
  chemically synthesized
ggtgtggggtgaccagcttatg

SEQ ID NO: 22015 - DNA, 22 bp, Artificial Sequence
  chemically synthesized
atgctgtttgcccaggacagcc

SEQ ID NO: 22016 - DNA, 22 bp, Artificial Sequence
  chemically synthesized
tgctgtttgcccaggacagcct

SEQ ID NO: 22017 - DNA, 22 bp, Artificial Sequence
  chemically synthesized
tttgcccaggacagcctagttt

SEQ ID NO: 22018 - DNA, 22 bp, Artificial Sequence
  chemically synthesized
gcccaggacagcctagttttag

SEQ ID NO: 22019 - DNA, 22 bp, Artificial Sequence
  chemically synthesized
cccaggacagcctagttttagc

SEQ ID NO: 22020 - DNA, 22 bp, Artificial Sequence
  chemically synthesized
gttttagcactgaaaccctcag

SEQ ID NO: 22021 - DNA, 22 bp, Artificial Sequence
  chemically synthesized
tagcactgaaaccctcagtcct

SEQ ID NO: 22022 - DNA, 22 bp, Artificial Sequence
  chemically synthesized
agcactgaaaccctcagtccta

SEQ ID NO: 22023 - DNA, 22 bp, Artificial Sequence
  chemically synthesized
gcactgaaaccctcagtcctag

SEQ ID NO: 22024 - DNA, 22 bp, Artificial Sequence
  chemically synthesized
aaaccctcagtcctaggaaaac

SEQ ID NO: 22025 - DNA, 22 bp, Artificial Sequence
  chemically synthesized
agtcctaggaaaacagggatgg

SEQ ID NO: 22026 - DNA, 22 bp, Artificial Sequence
  chemically synthesized
ggaaaacagggatggttggtca

SEQ ID NO: 22027 - DNA, 22 bp, Artificial Sequence
  chemically synthesized
gtcactgtctctgggtgactct

SEQ ID NO: 22028 - DNA, 22 bp, Artificial Sequence
  chemically synthesized
tctctgggtgactcttgattcc

SEQ ID NO: 22029 - DNA, 22 bp, Artificial Sequence
  chemically synthesized
tgggtgactcttgattcccggc

SEQ ID NO: 22030 - DNA, 22 bp, Artificial Sequence
  chemically synthesized
ggtgactcttgattcccggcca

SEQ ID NO: 22031 - DNA, 22 bp, Artificial Sequence
  chemically synthesized
ttgattcccggccagtttctcc

SEQ ID NO: 22032 - DNA, 22 bp, Artificial Sequence
  chemically synthesized
gattcccggccagtttctccac

SEQ ID NO: 22033 - DNA, 22 bp, Artificial Sequence
  chemically synthesized
attcccggccagtttctccacc

SEQ ID NO: 22034 - DNA, 22 bp, Artificial Sequence
  chemically synthesized
ccggccagtttctccacctggg

SEQ ID NO: 22035 - DNA, 22 bp, Artificial Sequence
  chemically synthesized
ctccacctggggctgtgtttct

SEQ ID NO: 22036 - DNA, 22 bp, Artificial Sequence
  chemically synthesized
tccacctggggctgtgtttctc

SEQ ID NO: 22037 - DNA, 22 bp, Artificial Sequence
  chemically synthesized
cacctggggctgtgtttctcgt

SEQ ID NO: 22038 - DNA, 22 bp, Artificial Sequence
  chemically synthesized
gggctgtgtttctcgtcctgca

SEQ ID NO: 22039 - DNA, 22 bp, Artificial Sequence
  chemically synthesized
tgtttctcgtcctgcatccttc

SEQ ID NO: 22040 - DNA, 22 bp, Artificial Sequence
  chemically synthesized
ctcgtcctgcatccttctccag

SEQ ID NO: 22041 - DNA, 22 bp, Artificial Sequence
  chemically synthesized
tcgtcctgcatccttctccagg

SEQ ID NO: 22042 - DNA, 22 bp, Artificial Sequence
  chemically synthesized
gtcctgcatccttctccaggca

SEQ ID NO: 22043 - DNA, 22 bp, Artificial Sequence
  chemically synthesized
catccttctccaggcaggtccc

SEQ ID NO: 22044 - DNA, 22 bp, Artificial Sequence
  chemically synthesized
ctccaggcaggtccccaagcat

SEQ ID NO: 22045 - DNA, 22 bp, Artificial Sequence
  chemically synthesized
tccaggcaggtccccaagcatc

SEQ ID NO: 22046 - DNA, 22 bp, Artificial Sequence
  chemically synthesized
caggcaggtccccaagcatcgc

SEQ ID NO: 22047 - DNA, 22 bp, Artificial Sequence
  chemically synthesized
ctgtggctgttcccaagttctt

SEQ ID NO: 22048 - DNA, 22 bp, Artificial Sequence
  chemically synthesized
tggctgttcccaagttcttagg

SEQ ID NO: 22049 - DNA, 22 bp, Artificial Sequence
  chemically synthesized
ttcccaagttcttagggtaccc

SEQ ID NO: 22050 - DNA, 22 bp, Artificial Sequence
  chemically synthesized
ccaagttcttagggtaccccac

SEQ ID NO: 22051 - DNA, 22 bp, Artificial Sequence
  chemically synthesized
ttagggtaccccacgtgggttt

SEQ ID NO: 22052 - DNA, 22 bp, Artificial Sequence
  chemically synthesized
agggtaccccacgtgggtttat

SEQ ID NO: 22053 - DNA, 22 bp, Artificial Sequence
  chemically synthesized
gggtaccccacgtgggtttatc

SEQ ID NO: 22054 - DNA, 22 bp, Artificial Sequence
  chemically synthesized
atcaaccacttggtgaggctgg

SEQ ID NO: 22055 - DNA, 22 bp, Artificial Sequence
  chemically synthesized
tcaaccacttggtgaggctggt

SEQ ID NO: 22056 - DNA, 22 bp, Artificial Sequence
  chemically synthesized
ggtgaggctggtaccctgcccc

SEQ ID NO: 22057 - DNA, 22 bp, Artificial Sequence
  chemically synthesized
gtgaggctggtaccctgccccc

SEQ ID NO: 22058 - DNA, 22 bp, Artificial Sequence
  chemically synthesized
gtaccctgcccccattcctgca

SEQ ID NO: 22059 - DNA, 22 bp, Artificial Sequence
  chemically synthesized
cccccattcctgcaccccaatt

SEQ ID NO: 22060 - DNA, 22 bp, Artificial Sequence
  chemically synthesized
ctgcaccccaattgccttagtg

SEQ ID NO: 22061 - DNA, 22 bp, Artificial Sequence
  chemically synthesized
caccccaattgccttagtggct

SEQ ID NO: 22062 - DNA, 22 bp, Artificial Sequence
  chemically synthesized
ccttagtggctagggggttggg

SEQ ID NO: 22063 - DNA, 22 bp, Artificial Sequence
  chemically synthesized
agtggctagggggttgggggct

SEQ ID NO: 22064 - DNA, 22 bp, Artificial Sequence
  chemically synthesized
gtggctagggggttgggggcta

SEQ ID NO: 22065 - DNA, 22 bp, Artificial Sequence
  chemically synthesized
gggggttgggggctagagtagg

SEQ ID NO: 22066 - DNA, 22 bp, Artificial Sequence
  chemically synthesized
ggggctagagtaggaggggctg

SEQ ID NO: 22067 - DNA, 22 bp, Artificial Sequence
  chemically synthesized
gagtaggaggggctggagccag

SEQ ID NO: 22068 - DNA, 22 bp, Artificial Sequence
  chemically synthesized
gagccaggattcttagggctga

SEQ ID NO: 22069 - DNA, 22 bp, Artificial Sequence
  chemically synthesized
ttagggctgaacagagaagagc

SEQ ID NO: 22070 - DNA, 22 bp, Artificial Sequence
  chemically synthesized
agggctgaacagagaagagctg

SEQ ID NO: 22071 - DNA, 22 bp, Artificial Sequence
  chemically synthesized
gggctgaacagagaagagctgg

SEQ ID NO: 22072 - DNA, 22 bp, Artificial Sequence
  chemically synthesized
aacagagaagagctgggggcct

SEQ ID NO: 22073 - DNA, 22 bp, Artificial Sequence
  chemically synthesized
ggggcctgggctcctgggtttg

SEQ ID NO: 22074 - DNA, 22 bp, Artificial Sequence
  chemically synthesized
ggctcctgggtttgagagagga

SEQ ID NO: 22075 - DNA, 22 bp, Artificial Sequence
  chemically synthesized
ctgggtttgagagaggaggggc

SEQ ID NO: 22076 - DNA, 22 bp, Artificial Sequence
  chemically synthesized
ggtttgagagaggaggggctgg

SEQ ID NO: 22077 - DNA, 22 bp, Artificial Sequence
  chemically synthesized
gagagaggaggggctggggcct

SEQ ID NO: 22078 - DNA, 22 bp, Artificial Sequence
  chemically synthesized
agagaggaggggctggggcctg

SEQ ID NO: 22079 - DNA, 22 bp, Artificial Sequence
  chemically synthesized
gggcctggactcctgggtccga

SEQ ID NO: 22080 - DNA, 22 bp, Artificial Sequence
  chemically synthesized
gactcctgggtccgagggagga

SEQ ID NO: 22081 - DNA, 22 bp, Artificial Sequence
  chemically synthesized
ctgggtccgagggaggaggggc

SEQ ID NO: 22082 - DNA, 22 bp, Artificial Sequence
  chemically synthesized
ggtccgagggaggaggggctgg

SEQ ID NO: 22083 - DNA, 22 bp, Artificial Sequence
  chemically synthesized
gggcctggactcctgggtctga

SEQ ID NO: 22084 - DNA, 22 bp, Artificial Sequence
  chemically synthesized
gactcctgggtctgagggtgga

SEQ ID NO: 22085 - DNA, 22 bp, Artificial Sequence
  chemically synthesized
ctgggtctgagggtggagggac

SEQ ID NO: 22086 - DNA, 22 bp, Artificial Sequence
  chemically synthesized
ggtctgagggtggagggactgg

SEQ ID NO: 22087 - DNA, 22 bp, Artificial Sequence
  chemically synthesized
agggtggagggactgggggcct

SEQ ID NO: 22088 - DNA, 22 bp, Artificial Sequence
  chemically synthesized
ggggcctggactcctgggtccg

SEQ ID NO: 22089 - DNA, 22 bp, Artificial Sequence
  chemically synthesized
gactcctgggtccgagggagga

SEQ ID NO: 22090 - DNA, 22 bp, Artificial Sequence
  chemically synthesized
ctgggtccgagggaggaggggc

SEQ ID NO: 22091 - DNA, 22 bp, Artificial Sequence
  chemically synthesized
ggtccgagggaggaggggctgg

SEQ ID NO: 22092 - DNA, 22 bp, Artificial Sequence
  chemically synthesized
gggcctggactcgtgggtctga

SEQ ID NO: 22093 - DNA, 22 bp, Artificial Sequence
  chemically synthesized
gactcgtgggtctgagggagga

SEQ ID NO: 22094 - DNA, 22 bp, Artificial Sequence
  chemically synthesized
gtgggtctgagggaggaggggc

SEQ ID NO: 22095 - DNA, 22 bp, Artificial Sequence
  chemically synthesized
agggaggaggggctgggggcct

SEQ ID NO: 22096 - DNA, 22 bp, Artificial Sequence
  chemically synthesized
ggggcctggacttctgggtctt

SEQ ID NO: 22097 - DNA, 22 bp, Artificial Sequence
  chemically synthesized
gacttctgggtcttagggaggc

SEQ ID NO: 22098 - DNA, 22 bp, Artificial Sequence
  chemically synthesized
ctgggtcttagggaggcggggc

SEQ ID NO: 22099 - DNA, 22 bp, Artificial Sequence
  chemically synthesized
tgggtcttagggaggcggggct

SEQ ID NO: 22100 - DNA, 22 bp, Artificial Sequence
  chemically synthesized
ggtcttagggaggcggggctgg

SEQ ID NO: 22101 - DNA, 22 bp, Artificial Sequence
  chemically synthesized
agggaggcggggctgggcctgg

SEQ ID NO: 22102 - DNA, 22 bp, Artificial Sequence
  chemically synthesized
gggaggcggggctgggcctgga

SEQ ID NO: 22103 - DNA, 22 bp, Artificial Sequence
  chemically synthesized
ggcctggacccctgggtctgaa

SEQ ID NO: 22104 - DNA, 22 bp, Artificial Sequence
  chemically synthesized
gacccctgggtctgaatgggga

SEQ ID NO: 22105 - DNA, 22 bp, Artificial Sequence
  chemically synthesized
ggtctgaatggggagaggctgg

SEQ ID NO: 22106 - DNA, 22 bp, Artificial Sequence
  chemically synthesized
aatggggagaggctgggggcct

SEQ ID NO: 22107 - DNA, 22 bp, Artificial Sequence
  chemically synthesized
ggggcctggactccttcatctg

SEQ ID NO: 22108 - DNA, 22 bp, Artificial Sequence
  chemically synthesized
gactccttcatctgagggcgga

SEQ ID NO: 22109 - DNA, 22 bp, Artificial Sequence
  chemically synthesized
cttcatctgagggcggaagggc

SEQ ID NO: 22110 - DNA, 22 bp, Artificial Sequence
  chemically synthesized
catctgagggcggaagggctgg

SEQ ID NO: 22111 - DNA, 22 bp, Artificial Sequence
  chemically synthesized
atctgagggcggaagggctggg

SEQ ID NO: 22112 - DNA, 22 bp, Artificial Sequence
  chemically synthesized
agggcggaagggctggggcctg

SEQ ID NO: 22113 - DNA, 22 bp, Artificial Sequence
  chemically synthesized
gggcctggcctcctgggttgaa

SEQ ID NO: 22114 - DNA, 22 bp, Artificial Sequence
  chemically synthesized
gcctcctgggttgaatggggag

SEQ ID NO: 22115 - DNA, 22 bp, Artificial Sequence
  chemically synthesized
ctgggttgaatggggaggggtt

SEQ ID NO: 22116 - DNA, 22 bp, Artificial Sequence
  chemically synthesized
ggttgaatggggaggggttggg

SEQ ID NO: 22117 - DNA, 22 bp, Artificial Sequence
  chemically synthesized
aatggggaggggttgggcctgg

SEQ ID NO: 22118 - DNA, 22 bp, Artificial Sequence
  chemically synthesized
ggcctggactctggagtccctg

SEQ ID NO: 22119 - DNA, 22 bp, Artificial Sequence
  chemically synthesized
gactctggagtccctggtgccc

SEQ ID NO: 22120 - DNA, 22 bp, Artificial Sequence
  chemically synthesized
tggagtccctggtgcccaggcc

SEQ ID NO: 22121 - DNA, 22 bp, Artificial Sequence
  chemically synthesized
gagtccctggtgcccaggcctc

SEQ ID NO: 22122 - DNA, 22 bp, Artificial Sequence
  chemically synthesized
gtgcccaggcctcaggcatctt

SEQ ID NO: 22123 - DNA, 22 bp, Artificial Sequence
  chemically synthesized
aggcatctttcacagggatgcc

SEQ ID NO: 22124 - DNA, 22 bp, Artificial Sequence
  chemically synthesized
tcacagggatgcctgtactggg

SEQ ID NO: 22125 - DNA, 22 bp, Artificial Sequence
  chemically synthesized
cacagggatgcctgtactgggc

SEQ ID NO: 22126 - DNA, 22 bp, Artificial Sequence
  chemically synthesized
acagggatgcctgtactgggca

SEQ ID NO: 22127 - DNA, 22 bp, Artificial Sequence
  chemically synthesized
tactgggcaggtccttgaaagg

SEQ ID NO: 22128 - DNA, 22 bp, Artificial Sequence
  chemically synthesized
ggcaggtccttgaaagggaaag

SEQ ID NO: 22129 - DNA, 22 bp, Artificial Sequence
  chemically synthesized
gaaagggaaaggcccattgctc

SEQ ID NO: 22130 - DNA, 22 bp, Artificial Sequence
  chemically synthesized
aaagggaaaggcccattgctct

SEQ ID NO: 22131 - DNA, 22 bp, Artificial Sequence
  chemically synthesized
ctctccttgcccccctccccta

SEQ ID NO: 22132 - DNA, 22 bp, Artificial Sequence
  chemically synthesized
tccttgcccccctcccctatcg

SEQ ID NO: 22133 - DNA, 22 bp, Artificial Sequence
  chemically synthesized
cttgcccccctcccctatcgcc

SEQ ID NO: 22134 - DNA, 22 bp, Artificial Sequence
  chemically synthesized
gcccccctcccctatcgccatg

SEQ ID NO: 22135 - DNA, 22 bp, Artificial Sequence
  chemically synthesized
cccccctcccctatcgccatga

SEQ ID NO: 22136 - DNA, 22 bp, Artificial Sequence
  chemically synthesized
ccctatcgccatgacaactggg

SEQ ID NO: 22137 - DNA, 22 bp, Artificial Sequence
  chemically synthesized
tcgccatgacaactgggtggaa

SEQ ID NO: 22138 - DNA, 22 bp, Artificial Sequence
  chemically synthesized
ggtggaaataaacgagccgagt

SEQ ID NO: 22139 - DNA, 22 bp, Artificial Sequence
  chemically synthesized
atcccgttcccagggcacgtgc

SEQ ID NO: 22140 - DNA, 22 bp, Artificial Sequence
  chemically synthesized
ccagggcacgtgcggccccttc

SEQ ID NO: 22141 - DNA, 22 bp, Artificial Sequence
  chemically synthesized
cacagcccgagtttccatgacc

SEQ ID NO: 22142 - DNA, 22 bp, Artificial Sequence
  chemically synthesized
acagcccgagtttccatgacct

SEQ ID NO: 22143 - DNA, 22 bp, Artificial Sequence
  chemically synthesized
ccatgacctcatgctcttggcc

SEQ ID NO: 22144 - DNA, 22 bp, Artificial Sequence
  chemically synthesized
catgacctcatgctcttggccc

SEQ ID NO: 22145 - DNA, 22 bp, Artificial Sequence
  chemically synthesized
atgctcttggccctcgtagctc

SEQ ID NO: 22146 - DNA, 22 bp, Artificial Sequence
  chemically synthesized
ttggccctcgtagctccctccc

SEQ ID NO: 22147 - DNA, 22 bp, Artificial Sequence
  chemically synthesized
ggccctcgtagctccctcccgc

SEQ ID NO: 22148 - DNA, 22 bp, Artificial Sequence
  chemically synthesized
gccctcgtagctccctcccgcc

SEQ ID NO: 22149 - DNA, 22 bp, Artificial Sequence
  chemically synthesized
gtagctccctcccgcctcctcc

SEQ ID NO: 22150 - DNA, 22 bp, Artificial Sequence
  chemically synthesized
cctcccgcctcctccagatggg

SEQ ID NO: 22151 - DNA, 22 bp, Artificial Sequence
  chemically synthesized
ccgcctcctccagatgggcagc

SEQ ID NO: 22152 - DNA, 22 bp, Artificial Sequence
  chemically synthesized
ctccagatgggcagctttggag

SEQ ID NO: 22153 - DNA, 22 bp, Artificial Sequence
  chemically synthesized
cagatgggcagctttggagagg

SEQ ID NO: 22154 - DNA, 22 bp, Artificial Sequence
  chemically synthesized
tggagaggtgagggacttgggg

SEQ ID NO: 22155 - DNA, 22 bp, Artificial Sequence
  chemically synthesized
ggagaggtgagggacttggggg

SEQ ID NO: 22156 - DNA, 22 bp, Artificial Sequence
  chemically synthesized
gagaggtgagggacttgggggg

SEQ ID NO: 22157 - DNA, 22 bp, Artificial Sequence
  chemically synthesized
ggggggtaatttatcccgtgga

SEQ ID NO: 22158 - DNA, 22 bp, Artificial Sequence
  chemically synthesized
gggggtaatttatcccgtggat

SEQ ID NO: 22159 - DNA, 22 bp, Artificial Sequence
  chemically synthesized
atcccgtggatctaggagttta

SEQ ID NO: 22160 - DNA, 22 bp, Artificial Sequence
  chemically synthesized
tcccgtggatctaggagtttag

SEQ ID NO: 22161 - DNA, 22 bp, Artificial Sequence
  chemically synthesized
ggagtttagcttcactccttcc

SEQ ID NO: 22162 - DNA, 22 bp, Artificial Sequence
  chemically synthesized
agcttcactccttcctcagctc

SEQ ID NO: 22163 - DNA, 22 bp, Artificial Sequence
  chemically synthesized
gcttcactccttcctcagctcc

SEQ ID NO: 22164 - DNA, 22 bp, Artificial Sequence
  chemically synthesized
cactccttcctcagctccagtt

SEQ ID NO: 22165 - DNA, 22 bp, Artificial Sequence
  chemically synthesized
actccttcctcagctccagttc

SEQ ID NO: 22166 - DNA, 22 bp, Artificial Sequence
  chemically synthesized
cttcctcagctccagttcaggt

SEQ ID NO: 22167 - DNA, 22 bp, Artificial Sequence
  chemically synthesized
cctcagctccagttcaggtccc

SEQ ID NO: 22168 - DNA, 22 bp, Artificial Sequence
  chemically synthesized
ctcagctccagttcaggtcccg

SEQ ID NO: 22169 - DNA, 22 bp, Artificial Sequence
  chemically synthesized
agctccagttcaggtcccggag

SEQ ID NO: 22170 - DNA, 22 bp, Artificial Sequence
  chemically synthesized
cagttcaggtcccggagcccac

SEQ ID NO: 22171 - DNA, 22 bp, Artificial Sequence
  chemically synthesized
aggtcccggagcccacccagtg

SEQ ID NO: 22172 - DNA, 22 bp, Artificial Sequence
  chemically synthesized
gggcaagtccctcctccgaccc

SEQ ID NO: 22173 - DNA, 22 bp, Artificial Sequence
  chemically synthesized
ctccgaccccctggacttcggc

SEQ ID NO: 22174 - DNA, 22 bp, Artificial Sequence
  chemically synthesized
cgaccccctggacttcggcttt

SEQ ID NO: 22175 - DNA, 22 bp, Artificial Sequence
  chemically synthesized
gacttcggcttttgtcccccca

SEQ ID NO: 22176 - DNA, 22 bp, Artificial Sequence
  chemically synthesized
cggcttttgtccccccaagttt

SEQ ID NO: 22177 - DNA, 22 bp, Artificial Sequence
  chemically synthesized
ggcttttgtccccccaagtttt

SEQ ID NO: 22178 - DNA, 22 bp, Artificial Sequence
  chemically synthesized
ttgtccccccaagttttggacc

SEQ ID NO: 22179 - DNA, 22 bp, Artificial Sequence
  chemically synthesized
tgtccccccaagttttggaccc

SEQ ID NO: 22180 - DNA, 22 bp, Artificial Sequence
  chemically synthesized
gtccccccaagttttggacccc

SEQ ID NO: 22181 - DNA, 22 bp, Artificial Sequence
  chemically synthesized
tccccccaagttttggacccct

SEQ ID NO: 22182 - DNA, 22 bp, Artificial Sequence
  chemically synthesized
tggacccctaagggaagaatga

SEQ ID NO: 22183 - DNA, 22 bp, Artificial Sequence
  chemically synthesized
ggacccctaagggaagaatgag

SEQ ID NO: 22184 - DNA, 22 bp, Artificial Sequence
  chemically synthesized
gacccctaagggaagaatgaga

SEQ ID NO: 22185 - DNA, 22 bp, Artificial Sequence
  chemically synthesized
agggaagaatgagaaacggtgg

SEQ ID NO: 22186 - DNA, 22 bp, Artificial Sequence
  chemically synthesized
gctgcagggccccgtgcagagg

SEQ ID NO: 22187 - DNA, 22 bp, Artificial Sequence
  chemically synthesized
cagggccccgtgcagagggggc

SEQ ID NO: 22188 - DNA, 22 bp, Artificial Sequence
  chemically synthesized
agtgaactggagtgtgacagcc

SEQ ID NO: 22189 - DNA, 22 bp, Artificial Sequence
  chemically synthesized
gagtgtgacagcctggggccca

SEQ ID NO: 22190 - DNA, 22 bp, Artificial Sequence
  chemically synthesized
gggcccaggcacacaggtgtgc

SEQ ID NO: 22191 - DNA, 22 bp, Artificial Sequence
  chemically synthesized
tctcacccctctgggagtcccg

SEQ ID NO: 22192 - DNA, 22 bp, Artificial Sequence
  chemically synthesized
acccctctgggagtcccgccca

SEQ ID NO: 22193 - DNA, 22 bp, Artificial Sequence
  chemically synthesized
tgggagtcccgcccaggcccct

SEQ ID NO: 22194 - DNA, 22 bp, Artificial Sequence
  chemically synthesized
ggagtcccgcccaggcccctga

SEQ ID NO: 22195 - DNA, 22 bp, Artificial Sequence
  chemically synthesized
agtctgtcccagcacagggtgg

SEQ ID NO: 22196 - DNA, 22 bp, Artificial Sequence
  chemically synthesized
tcccagcacagggtggccttcc

SEQ ID NO: 22197 - DNA, 22 bp, Artificial Sequence
  chemically synthesized
cctccaccctgcatagccctgg

SEQ ID NO: 22198 - DNA, 22 bp, Artificial Sequence
  chemically synthesized
ctccaccctgcatagccctggg

SEQ ID NO: 22199 - DNA, 22 bp, Artificial Sequence
  chemically synthesized
caccctgcatagccctgggccc

SEQ ID NO: 22200 - DNA, 22 bp, Artificial Sequence
  chemically synthesized
catagccctgggcccacggctt

SEQ ID NO: 22201 - DNA, 22 bp, Artificial Sequence
  chemically synthesized
ggcccacggcttcgttcctgca

SEQ ID NO: 22202 - DNA, 22 bp, Artificial Sequence
  chemically synthesized
cgttcctgcagagtatctgctg

SEQ ID NO: 22203 - DNA, 22 bp, Artificial Sequence
  chemically synthesized
gttcctgcagagtatctgctgg

SEQ ID NO: 22204 - DNA, 22 bp, Artificial Sequence
  chemically synthesized
ctgcagagtatctgctggggtg

SEQ ID NO: 22205 - DNA, 22 bp, Artificial Sequence
  chemically synthesized
cagagtatctgctggggtggtt

SEQ ID NO: 22206 - DNA, 22 bp, Artificial Sequence
  chemically synthesized
ctggggtggtttccgagcttga

SEQ ID NO: 22207 - DNA, 22 bp, Artificial Sequence
  chemically synthesized
gggtggtttccgagcttgaccc

SEQ ID NO: 22208 - DNA, 22 bp, Artificial Sequence
  chemically synthesized
ccgagcttgacccttggaagga

SEQ ID NO: 22209 - DNA, 22 bp, Artificial Sequence
  chemically synthesized
cgagcttgacccttggaaggac

SEQ ID NO: 22210 - DNA, 22 bp, Artificial Sequence
  chemically synthesized
gacccttggaaggacctggctg

SEQ ID NO: 22211 - DNA, 22 bp, Artificial Sequence
  chemically synthesized
acccttggaaggacctggctgg

SEQ ID NO: 22212 - DNA, 22 bp, Artificial Sequence
  chemically synthesized
ggaaggacctggctgggtttaa

SEQ ID NO: 22213 - DNA, 22 bp, Artificial Sequence
  chemically synthesized
gaaggacctggctgggtttaag

SEQ ID NO: 22214 - DNA, 22 bp, Artificial Sequence
  chemically synthesized
gctgggtttaaggcaggagggg

SEQ ID NO: 22215 - DNA, 22 bp, Artificial Sequence
  chemically synthesized
ggtttaaggcaggaggggctgg

SEQ ID NO: 22216 - DNA, 22 bp, Artificial Sequence
  chemically synthesized
aaggcaggaggggctgggggcc

SEQ ID NO: 22217 - DNA, 22 bp, Artificial Sequence
  chemically synthesized
aggcaggaggggctgggggcca

SEQ ID NO: 22218 - DNA, 22 bp, Artificial Sequence
  chemically synthesized
ggggccaggactcctggctctg

SEQ ID NO: 22219 - DNA, 22 bp, Artificial Sequence
  chemically synthesized
ctggctctgaaggaggaggggc

SEQ ID NO: 22220 - DNA, 22 bp, Artificial Sequence
  chemically synthesized
gctctgaaggaggaggggctgg

SEQ ID NO: 22221 - DNA, 22 bp, Artificial Sequence
  chemically synthesized
tgaaggaggaggggctggaacc

SEQ ID NO: 22222 - DNA, 22 bp, Artificial Sequence
  chemically synthesized
aaggaggaggggctggaacctc

SEQ ID NO: 22223 - DNA, 22 bp, Artificial Sequence
  chemically synthesized
gaacctcttccctagtctgagc

SEQ ID NO: 22224 - DNA, 22 bp, Artificial Sequence
  chemically synthesized
ttccctagtctgagcactggaa

SEQ ID NO: 22225 - DNA, 22 bp, Artificial Sequence
  chemically synthesized
ccctagtctgagcactggaagc

SEQ ID NO: 22226 - DNA, 22 bp, Artificial Sequence
  chemically synthesized
cctagtctgagcactggaagcg

SEQ ID NO: 22227 - DNA, 22 bp, Artificial Sequence
  chemically synthesized
gtctgagcactggaagcgccac

SEQ ID NO: 22228 - DNA, 22 bp, Artificial Sequence
  chemically synthesized
agcactggaagcgccacctgtg

SEQ ID NO: 22229 - DNA, 22 bp, Artificial Sequence
  chemically synthesized
gaagcgccacctgtgggtggtg

SEQ ID NO: 22230 - DNA, 22 bp, Artificial Sequence
  chemically synthesized
tgggtggtgacgggggttttgc

SEQ ID NO: 22231 - DNA, 22 bp, Artificial Sequence
  chemically synthesized
tgccgtgtctaacaggtaccat

SEQ ID NO: 22232 - DNA, 22 bp, Artificial Sequence
  chemically synthesized
gccgtgtctaacaggtaccatg

SEQ ID NO: 22233 - DNA, 22 bp, Artificial Sequence
  chemically synthesized
ccgtgtctaacaggtaccatgt

SEQ ID NO: 22234 - DNA, 22 bp, Artificial Sequence
  chemically synthesized
acaggtaccatgtggggttccc

SEQ ID NO: 22235 - DNA, 22 bp, Artificial Sequence
  chemically synthesized
ccgcacccagatgagaagcccc

SEQ ID NO: 22236 - DNA, 22 bp, Artificial Sequence
  chemically synthesized
ccttccccgttcacttcctgtt

SEQ ID NO: 22237 - DNA, 22 bp, Artificial Sequence
  chemically synthesized
ccccgttcacttcctgtttgca

SEQ ID NO: 22238 - DNA, 22 bp, Artificial Sequence
  chemically synthesized
cccgttcacttcctgtttgcag

SEQ ID NO: 22239 - DNA, 22 bp, Artificial Sequence
  chemically synthesized
acttcctgtttgcagatagcca

SEQ ID NO: 22240 - DNA, 22 bp, Artificial Sequence
  chemically synthesized
cctgtttgcagatagccaggag

SEQ ID NO: 22241 - DNA, 22 bp, Artificial Sequence
  chemically synthesized
ctgtttgcagatagccaggagt

SEQ ID NO: 22242 - DNA, 22 bp, Artificial Sequence
  chemically synthesized
tttgcagatagccaggagtcct

SEQ ID NO: 22243 - DNA, 22 bp, Artificial Sequence
  chemically synthesized
gcagatagccaggagtcctttc

SEQ ID NO: 22244 - DNA, 22 bp, Artificial Sequence
  chemically synthesized
cagatagccaggagtcctttcg

SEQ ID NO: 22245 - DNA, 22 bp, Artificial Sequence
  chemically synthesized
tcgtggtttccactgagcactg

SEQ ID NO: 22246 - DNA, 22 bp, Artificial Sequence
  chemically synthesized
cgtggtttccactgagcactga

SEQ ID NO: 22247 - DNA, 22 bp, Artificial Sequence
  chemically synthesized
gtggtttccactgagcactgaa

SEQ ID NO: 22248 - DNA, 22 bp, Artificial Sequence
  chemically synthesized
ccactgagcactgaaggcctgg

SEQ ID NO: 22249 - DNA, 22 bp, Artificial Sequence
  chemically synthesized
cactgagcactgaaggcctggc

SEQ ID NO: 22250 - DNA, 22 bp, Artificial Sequence
  chemically synthesized
agcactgaaggcctggccggcc

SEQ ID NO: 22251 - DNA, 22 bp, Artificial Sequence
  chemically synthesized
aaggcctggccggcctgaccac

SEQ ID NO: 22252 - DNA, 22 bp, Artificial Sequence
  chemically synthesized
gccggcctgaccactgggcaac

SEQ ID NO: 22253 - DNA, 22 bp, Artificial Sequence
  chemically synthesized
accactgggcaaccaggcgtat

SEQ ID NO: 22254 - DNA, 22 bp, Artificial Sequence
  chemically synthesized
ggcaaccaggcgtatcttaaac

SEQ ID NO: 22255 - DNA, 22 bp, Artificial Sequence
  chemically synthesized
aaacagccagtggccagaggct

SEQ ID NO: 22256 - DNA, 22 bp, Artificial Sequence
  chemically synthesized
aacagccagtggccagaggctg

SEQ ID NO: 22257 - DNA, 22 bp, Artificial Sequence
  chemically synthesized
ttgggtcattttccccactgtc

SEQ ID NO: 22258 - DNA, 22 bp, Artificial Sequence
  chemically synthesized
ggtcattttccccactgtccta

SEQ ID NO: 22259 - DNA, 22 bp, Artificial Sequence
  chemically synthesized
tccccactgtcctagcaccgtg

SEQ ID NO: 22260 - DNA, 22 bp, Artificial Sequence
  chemically synthesized
ccccactgtcctagcaccgtgt

SEQ ID NO: 22261 - DNA, 22 bp, Artificial Sequence
  chemically synthesized
cccactgtcctagcaccgtgtc

SEQ ID NO: 22262 - DNA, 22 bp, Artificial Sequence
  chemically synthesized
tcctagcaccgtgtccctggat

SEQ ID NO: 22263 - DNA, 22 bp, Artificial Sequence
  chemically synthesized
gcaccgtgtccctggatctgtt

SEQ ID NO: 22264 - DNA, 22 bp, Artificial Sequence
  chemically synthesized
gatctgttttcgtggctccctc

SEQ ID NO: 22265 - DNA, 22 bp, Artificial Sequence
  chemically synthesized
ttttcgtggctccctctggagt

SEQ ID NO: 22266 - DNA, 22 bp, Artificial Sequence
  chemically synthesized
tcgtggctccctctggagtccc

SEQ ID NO: 22267 - DNA, 22 bp, Artificial Sequence
  chemically synthesized
cgtggctccctctggagtcccg

SEQ ID NO: 22268 - DNA, 22 bp, Artificial Sequence
  chemically synthesized
gtggctccctctggagtcccga

SEQ ID NO: 22269 - DNA, 22 bp, Artificial Sequence
  chemically synthesized
cctctggagtcccgacttgctg

SEQ ID NO: 22270 - DNA, 22 bp, Artificial Sequence
  chemically synthesized
tggagtcccgacttgctgggac

SEQ ID NO: 22271 - DNA, 22 bp, Artificial Sequence
  chemically synthesized
gagtcccgacttgctgggacac

SEQ ID NO: 22272 - DNA, 22 bp, Artificial Sequence
  chemically synthesized
gctgggacaccgtggctggggt

SEQ ID NO: 22273 - DNA, 22 bp, Artificial Sequence
  chemically synthesized
ctgggacaccgtggctggggta

SEQ ID NO: 22274 - DNA, 22 bp, Artificial Sequence
  chemically synthesized
ggacaccgtggctggggtaggt

SEQ ID NO: 22275 - DNA, 22 bp, Artificial Sequence
  chemically synthesized
gggtaggtgcggctgacggctg

SEQ ID NO: 22276 - DNA, 22 bp, Artificial Sequence
  chemically synthesized
acggctgtttcccacccccagg

SEQ ID NO: 22277 - DNA, 22 bp, Artificial Sequence
  chemically synthesized
tttcccacccccaggcctgcat

SEQ ID NO: 22278 - DNA, 22 bp, Artificial Sequence
  chemically synthesized
cccacccccaggcctgcattga

SEQ ID NO: 22279 - DNA, 22 bp, Artificial Sequence
  chemically synthesized
ccacccccaggcctgcattgat

SEQ ID NO: 22280 - DNA, 22 bp, Artificial Sequence
  chemically synthesized
cattgatgagaacctggaggtg

SEQ ID NO: 22281 - DNA, 22 bp, Artificial Sequence
  chemically synthesized
atgagaacctggaggtggtgcg

SEQ ID NO: 22282 - DNA, 22 bp, Artificial Sequence
  chemically synthesized
gaggtggtgcgcttcttggtgg

SEQ ID NO: 22283 - DNA, 22 bp, Artificial Sequence
  chemically synthesized
cttggtggagcagggcgccact

SEQ ID NO: 22284 - DNA, 22 bp, Artificial Sequence
  chemically synthesized
ttggtggagcagggcgccactg

SEQ ID NO: 22285 - DNA, 22 bp, Artificial Sequence
  chemically synthesized
ggtggagcagggcgccactgtg

SEQ ID NO: 22286 - DNA, 22 bp, Artificial Sequence
  chemically synthesized
gtggagcagggcgccactgtga

SEQ ID NO: 22287 - DNA, 22 bp, Artificial Sequence
  chemically synthesized
tgaaccaggcagacaacgaggg

SEQ ID NO: 22288 - DNA, 22 bp, Artificial Sequence
  chemically synthesized
gacgccactgcacgtggccgcc

SEQ ID NO: 22289 - DNA, 22 bp, Artificial Sequence
  chemically synthesized
cacgtggccgcctcctgtggct

SEQ ID NO: 22290 - DNA, 22 bp, Artificial Sequence
  chemically synthesized
ctgtggctacctagatatcgcc

SEQ ID NO: 22291 - DNA, 20 bp, Artificial Sequence
  chemically synthesized
taatttccctccgtttgtcc

SEQ ID NO: 22292 - DNA, 20 bp, Artificial Sequence
  chemically synthesized
ctgtcaaccccacacgcctt

SEQ ID NO: 22293 - DNA, 20 bp, Artificial Sequence
  chemically synthesized
cacacgcctttggcacaatg

SEQ ID NO: 22294 - DNA, 20 bp, Artificial Sequence
  chemically synthesized
acgcctttggcacaatgaag

SEQ ID NO: 22295 - DNA, 20 bp, Artificial Sequence
  chemically synthesized
cgcctttggcacaatgaagt

SEQ ID NO: 22296 - DNA, 20 bp, Artificial Sequence
  chemically synthesized
atttcccttctttttctctt

SEQ ID NO: 22297 - DNA, 20 bp, Artificial Sequence
  chemically synthesized
ccttctttttctctttagct

SEQ ID NO: 22298 - DNA, 20 bp, Artificial Sequence
  chemically synthesized
ctctttagctcggcttattc

SEQ ID NO: 22299 - DNA, 20 bp, Artificial Sequence
  chemically synthesized
tctttagctcggcttattcc

SEQ ID NO: 22300 - DNA, 20 bp, Artificial Sequence
  chemically synthesized
ctttagctcggcttattcca

SEQ ID NO: 22301 - DNA, 20 bp, Artificial Sequence
  chemically synthesized
tttagctcggcttattccag

SEQ ID NO: 22302 - DNA, 20 bp, Artificial Sequence
  chemically synthesized
ttccaggggtgtgtttcgtc

SEQ ID NO: 22303 - DNA, 20 bp, Artificial Sequence
  chemically synthesized
tgtttcgtcgagatgcacgt

SEQ ID NO: 22304 - DNA, 20 bp, Artificial Sequence
  chemically synthesized
caacttttattctattttcc

SEQ ID NO: 22305 - DNA, 20 bp, Artificial Sequence
  chemically synthesized
tctattttcccagtaaaata

SEQ ID NO: 22306 - DNA, 20 bp, Artificial Sequence
  chemically synthesized
ttcccagtaaaataaagttt

SEQ ID NO: 22307 - DNA, 20 bp, Artificial Sequence
  chemically synthesized
tagtaaactctgcatcttta

SEQ ID NO: 22308 - DNA, 20 bp, Artificial Sequence
  chemically synthesized
gcatctttaaagaattattt

SEQ ID NO: 22309 - DNA, 20 bp, Artificial Sequence
  chemically synthesized
tttggcatttatttctaaaa

SEQ ID NO: 22310 - DNA, 20 bp, Artificial Sequence
  chemically synthesized
catttatttctaaaatggca

SEQ ID NO: 22311 - DNA, 20 bp, Artificial Sequence
  chemically synthesized
catagtattttgtatttgtg

SEQ ID NO: 22312 - DNA, 20 bp, Artificial Sequence
  chemically synthesized
ttgtatttgtgaagtcttac

SEQ ID NO: 22313 - DNA, 20 bp, Artificial Sequence
  chemically synthesized
tgtatttgtgaagtcttaca

SEQ ID NO: 22314 - DNA, 20 bp, Artificial Sequence
  chemically synthesized
ttaataaaattcaaacatcc

SEQ ID NO: 22315 - DNA, 20 bp, Artificial Sequence
  chemically synthesized
taataaaattcaaacatcct

SEQ ID NO: 22316 - DNA, 20 bp, Artificial Sequence
  chemically synthesized
atcctaggtaaaaaaaaaaa

SEQ ID NO: 22317 - DNA, 20 bp, Artificial Sequence
  chemically synthesized
tcctaggtaaaaaaaaaaaa

SEQ ID NO: 22318 - DNA, 20 bp, Artificial Sequence
  chemically synthesized
aggtaaaaaaaaaaaaaggt

SEQ ID NO: 22319 - DNA, 20 bp, Artificial Sequence
  chemically synthesized
aaaaaaaggtcagaattgtt

SEQ ID NO: 22320 - DNA, 20 bp, Artificial Sequence
  chemically synthesized
gtaattttcttttgcgcact

SEQ ID NO: 22321 - DNA, 20 bp, Artificial Sequence
  chemically synthesized
taattttcttttgcgcacta

SEQ ID NO: 22322 - DNA, 20 bp, Artificial Sequence
  chemically synthesized
tttcttttgcgcactaagga

SEQ ID NO: 22323 - DNA, 20 bp, Artificial Sequence
  chemically synthesized
tgcgcactaaggaaagtgca

SEQ ID NO: 22324 - DNA, 20 bp, Artificial Sequence
  chemically synthesized
aaggaaagtgcaaagtaact

SEQ ID NO: 22325 - DNA, 20 bp, Artificial Sequence
  chemically synthesized
ggaaagtgcaaagtaactta

SEQ ID NO: 22326 - DNA, 20 bp, Artificial Sequence
  chemically synthesized
ttagagtgactgaaacttca

SEQ ID NO: 22327 - DNA, 20 bp, Artificial Sequence
  chemically synthesized
gtgactgaaacttcacagaa

SEQ ID NO: 22328 - DNA, 20 bp, Artificial Sequence
  chemically synthesized
tgactgaaacttcacagaat

SEQ ID NO: 22329 - DNA, 20 bp, Artificial Sequence
  chemically synthesized
gactgaaacttcacagaata

SEQ ID NO: 22330 - DNA, 20 bp, Artificial Sequence
  chemically synthesized
aacttcacagaatagggttg

SEQ ID NO: 22331 - DNA, 20 bp, Artificial Sequence
  chemically synthesized
ttgaattcataactatccca

SEQ ID NO: 22332 - DNA, 20 bp, Artificial Sequence
  chemically synthesized
tgtgctgttgatctcataaa

SEQ ID NO: 22333 - DNA, 20 bp, Artificial Sequence
  chemically synthesized
atttatatttattttcattt

SEQ ID NO: 22334 - DNA, 20 bp, Artificial Sequence
  chemically synthesized
ttcattttagtctgtcttct

SEQ ID NO: 22335 - DNA, 20 bp, Artificial Sequence
  chemically synthesized
gtcttcttggttgctgttga

SEQ ID NO: 22336 - DNA, 20 bp, Artificial Sequence
  chemically synthesized
ttgctgttgatagacactaa

SEQ ID NO: 22337 - DNA, 20 bp, Artificial Sequence
  chemically synthesized
gctgttgatagacactaaaa

SEQ ID NO: 22338 - DNA, 20 bp, Artificial Sequence
  chemically synthesized
gatagacactaaaagagtat

SEQ ID NO: 22339 - DNA, 20 bp, Artificial Sequence
  chemically synthesized
aagagtattagatattatct

SEQ ID NO: 22340 - DNA, 20 bp, Artificial Sequence
  chemically synthesized
tattatctaagtttgaatat

SEQ ID NO: 22341 - DNA, 20 bp, Artificial Sequence
  chemically synthesized
attatctaagtttgaatata

SEQ ID NO: 22342 - DNA, 20 bp, Artificial Sequence
  chemically synthesized
atatttaataatttttaaaa

SEQ ID NO: 22343 - DNA, 20 bp, Artificial Sequence
  chemically synthesized
aatttttaaaatagtattct

SEQ ID NO: 22344 - DNA, 20 bp, Artificial Sequence
  chemically synthesized
ttgaattattcttctgttta

SEQ ID NO: 22345 - DNA, 20 bp, Artificial Sequence
  chemically synthesized
tgaattattcttctgtttaa

SEQ ID NO: 22346 - DNA, 20 bp, Artificial Sequence
  chemically synthesized
attattcttctgtttaaagg

SEQ ID NO: 22347 - DNA, 20 bp, Artificial Sequence
  chemically synthesized
attcttctgtttaaaggcag

SEQ ID NO: 22348 - DNA, 20 bp, Artificial Sequence
  chemically synthesized
aaataattgaacatcatcct

SEQ ID NO: 22349 - DNA, 20 bp, Artificial Sequence
  chemically synthesized
catcatcctgagtttttctg

SEQ ID NO: 22350 - DNA, 20 bp, Artificial Sequence
  chemically synthesized
atcatcctgagtttttctgt

SEQ ID NO: 22351 - DNA, 20 bp, Artificial Sequence
  chemically synthesized
ctgagtttttctgtaggaat

SEQ ID NO: 22352 - DNA, 20 bp, Artificial Sequence
  chemically synthesized
gagtttttctgtaggaatca

SEQ ID NO: 22353 - DNA, 20 bp, Artificial Sequence
  chemically synthesized
ttgaaacaaatgcataatct

SEQ ID NO: 22354 - DNA, 20 bp, Artificial Sequence
  chemically synthesized
aatgcataatctaagtcaaa

SEQ ID NO: 22355 - DNA, 20 bp, Artificial Sequence
  chemically synthesized
cataatctaagtcaaatgga

SEQ ID NO: 22356 - DNA, 20 bp, Artificial Sequence
  chemically synthesized
caaatggaaagaaatataaa

SEQ ID NO: 22357 - DNA, 20 bp, Artificial Sequence
  chemically synthesized
ttattacttcttgttttctt

SEQ ID NO: 22358 - DNA, 20 bp, Artificial Sequence
  chemically synthesized
cttttttttcttcccttgcc

SEQ ID NO: 22359 - DNA, 20 bp, Artificial Sequence
  chemically synthesized
ttttcttcccttgcccagac

SEQ ID NO: 22360 - DNA, 20 bp, Artificial Sequence
  chemically synthesized
ttcttcccttgcccagacaa

SEQ ID NO: 22361 - DNA, 20 bp, Artificial Sequence
  chemically synthesized
tcccttgcccagacaagagt

SEQ ID NO: 22362 - DNA, 20 bp, Artificial Sequence
  chemically synthesized
cccttgcccagacaagagtg

SEQ ID NO: 22363 - DNA, 20 bp, Artificial Sequence
  chemically synthesized
acaagagtgaggttgctcat

SEQ ID NO: 22364 - DNA, 20 bp, Artificial Sequence
  chemically synthesized
tgaggttgctcatcggttta

SEQ ID NO: 22365 - DNA, 20 bp, Artificial Sequence
  chemically synthesized
tgctcatcggtttaaagatt

SEQ ID NO: 22366 - DNA, 20 bp, Artificial Sequence
  chemically synthesized
gctcatcggtttaaagattt

SEQ ID NO: 22367 - DNA, 20 bp, Artificial Sequence
  chemically synthesized
tcatcggtttaaagatttgg

SEQ ID NO: 22368 - DNA, 20 bp, Artificial Sequence
  chemically synthesized
tcggtttaaagatttgggag

SEQ ID NO: 22369 - DNA, 20 bp, Artificial Sequence
  chemically synthesized
tttgggagaagaaaatttca

SEQ ID NO: 22370 - DNA, 20 bp, Artificial Sequence
  chemically synthesized
tcccaaatctttaaaccgat

SEQ ID NO: 22371 - DNA, 20 bp, Artificial Sequence
  chemically synthesized
tgagcaacctcactcttgtc

SEQ ID NO: 22372 - DNA, 20 bp, Artificial Sequence
  chemically synthesized
gagcaacctcactcttgtct

SEQ ID NO: 22373 - DNA, 20 bp, Artificial Sequence
  chemically synthesized
aacctcactcttgtctgggc

SEQ ID NO: 22374 - DNA, 20 bp, Artificial Sequence
  chemically synthesized
acctcactcttgtctgggca

SEQ ID NO: 22375 - DNA, 20 bp, Artificial Sequence
  chemically synthesized
cctcactcttgtctgggcaa

SEQ ID NO: 22376 - DNA, 20 bp, Artificial Sequence
  chemically synthesized
cactcttgtctgggcaaggg

SEQ ID NO: 22377 - DNA, 20 bp, Artificial Sequence
  chemically synthesized
ctgggcaagggaagaaaaaa

SEQ ID NO: 22378 - DNA, 20 bp, Artificial Sequence
  chemically synthesized
tgggcaagggaagaaaaaaa

SEQ ID NO: 22379 - DNA, 20 bp, Artificial Sequence
  chemically synthesized
aaaaggattgttaaatactg

SEQ ID NO: 22380 - DNA, 20 bp, Artificial Sequence
  chemically synthesized
tgttaaatactgaagaaaac

SEQ ID NO: 22381 - DNA, 20 bp, Artificial Sequence
  chemically synthesized
taaatactgaagaaaacaag

SEQ ID NO: 22382 - DNA, 20 bp, Artificial Sequence
  chemically synthesized
atatttctttccatttgact

SEQ ID NO: 22383 - DNA, 20 bp, Artificial Sequence
  chemically synthesized
atgcatttgtttcaaaatat

SEQ ID NO: 22384 - DNA, 20 bp, Artificial Sequence
  chemically synthesized
tgcatttgtttcaaaatatt

SEQ ID NO: 22385 - DNA, 20 bp, Artificial Sequence
  chemically synthesized
atattgggctctgattccta

SEQ ID NO: 22386 - DNA, 20 bp, Artificial Sequence
  chemically synthesized
ctgattcctacagaaaaact

SEQ ID NO: 22387 - DNA, 20 bp, Artificial Sequence
  chemically synthesized
tgattcctacagaaaaactc

SEQ ID NO: 22388 - DNA, 20 bp, Artificial Sequence
  chemically synthesized
ttatttcttctgcctttaaa

SEQ ID NO: 22389 - DNA, 20 bp, Artificial Sequence
  chemically synthesized
tttcttctgcctttaaacag

SEQ ID NO: 22390 - DNA, 20 bp, Artificial Sequence
  chemically synthesized
agaagaataattcaattacc

SEQ ID NO: 22391 - DNA, 20 bp, Artificial Sequence
  chemically synthesized
taaaaattattaaatattta

SEQ ID NO: 22392 - DNA, 20 bp, Artificial Sequence
  chemically synthesized
tatagccttatattcaaact

SEQ ID NO: 22393 - DNA, 20 bp, Artificial Sequence
  chemically synthesized
gataatatctaatactcttt

SEQ ID NO: 22394 - DNA, 20 bp, Artificial Sequence
  chemically synthesized
actcttttagtgtctatcaa

SEQ ID NO: 22395 - DNA, 20 bp, Artificial Sequence
  chemically synthesized
agtgtctatcaacagcaacc

SEQ ID NO: 22396 - DNA, 20 bp, Artificial Sequence
  chemically synthesized
gtctatcaacagcaaccaag

SEQ ID NO: 22397 - DNA, 20 bp, Artificial Sequence
  chemically synthesized
atcaacagcaaccaagaaga

SEQ ID NO: 22398 - DNA, 20 bp, Artificial Sequence
  chemically synthesized
atgaaaataaatataaatac

SEQ ID NO: 22399 - DNA, 20 bp, Artificial Sequence
  chemically synthesized
taaatacaagttctatttat

SEQ ID NO: 22400 - DNA, 20 bp, Artificial Sequence
  chemically synthesized
agttctatttatgagatcaa

SEQ ID NO: 22401 - DNA, 20 bp, Artificial Sequence
  chemically synthesized
tatttatgagatcaacagca

SEQ ID NO: 22402 - DNA, 20 bp, Artificial Sequence
  chemically synthesized
atttatgagatcaacagcac

SEQ ID NO: 22403 - DNA, 20 bp, Artificial Sequence
  chemically synthesized
gatcaacagcacaggttttg

SEQ ID NO: 22404 - DNA, 20 bp, Artificial Sequence
  chemically synthesized
ggttttgtggtttttaaata

SEQ ID NO: 22405 - DNA, 20 bp, Artificial Sequence
  chemically synthesized
tgtggtttttaaataaagca

SEQ ID NO: 22406 - DNA, 20 bp, Artificial Sequence
  chemically synthesized
ttaaataaagcatagtgcaa

SEQ ID NO: 22407 - DNA, 20 bp, Artificial Sequence
  chemically synthesized
ataaagcatagtgcaatgga

SEQ ID NO: 22408 - DNA, 20 bp, Artificial Sequence
  chemically synthesized
taaagcatagtgcaatggat

SEQ ID NO: 22409 - DNA, 20 bp, Artificial Sequence
  chemically synthesized
tagtgcaatggataggtctt

SEQ ID NO: 22410 - DNA, 20 bp, Artificial Sequence
  chemically synthesized
agtgcaatggataggtcttt

SEQ ID NO: 22411 - DNA, 20 bp, Artificial Sequence
  chemically synthesized
caatggataggtctttggga

SEQ ID NO: 22412 - DNA, 20 bp, Artificial Sequence
  chemically synthesized
atcttcaaccctattctgtg

SEQ ID NO: 22413 - DNA, 20 bp, Artificial Sequence
  chemically synthesized
aaccctattctgtgaagttt

SEQ ID NO: 22414 - DNA, 20 bp, Artificial Sequence
  chemically synthesized
tgtgaagtttcagtcactct

SEQ ID NO: 22415 - DNA, 20 bp, Artificial Sequence
  chemically synthesized
aagttactttgcactttcct

SEQ ID NO: 22416 - DNA, 20 bp, Artificial Sequence
  chemically synthesized
gcactttccttagtgcgcaa

SEQ ID NO: 22417 - DNA, 20 bp, Artificial Sequence
  chemically synthesized
tagtgcgcaaaagaaaatta

SEQ ID NO: 22418 - DNA, 20 bp, Artificial Sequence
  chemically synthesized
gacctttttttttttttacc

SEQ ID NO: 22419 - DNA, 20 bp, Artificial Sequence
  chemically synthesized
acctttttttttttttacct

SEQ ID NO: 22420 - DNA, 20 bp, Artificial Sequence
  chemically synthesized
gatgtttgaattttattaat

SEQ ID NO: 22421 - DNA, 20 bp, Artificial Sequence
  chemically synthesized
tattaataagataaccttgt

SEQ ID NO: 22422 - DNA, 20 bp, Artificial Sequence
  chemically synthesized
tacaaaatactatgccattt

SEQ ID NO: 22423 - DNA, 20 bp, Artificial Sequence
  chemically synthesized
aatgccaaaataattcttta

SEQ ID NO: 22424 - DNA, 20 bp, Artificial Sequence
  chemically synthesized
aaaataattctttaaagatg

SEQ ID NO: 22425 - DNA, 20 bp, Artificial Sequence
  chemically synthesized
aataattctttaaagatgca

SEQ ID NO: 22426 - DNA, 20 bp, Artificial Sequence
  chemically synthesized
ttactaaaactttattttac

SEQ ID NO: 22427 - DNA, 20 bp, Artificial Sequence
  chemically synthesized
tactaaaactttattttact

SEQ ID NO: 22428 - DNA, 20 bp, Artificial Sequence
  chemically synthesized
actttattttactgggaaaa

SEQ ID NO: 22429 - DNA, 20 bp, Artificial Sequence
  chemically synthesized
ttactgggaaaatagaataa

SEQ ID NO: 22430 - DNA, 20 bp, Artificial Sequence
  chemically synthesized
atagaataaaagttgaacaa

SEQ ID NO: 22431 - DNA, 20 bp, Artificial Sequence
  chemically synthesized
aaagttgaacaatagaaaaa

SEQ ID NO: 22432 - DNA, 20 bp, Artificial Sequence
  chemically synthesized
atctcgacgaaacacacccc

SEQ ID NO: 22433 - DNA, 20 bp, Artificial Sequence
  chemically synthesized
acgaaacacacccctggaat

SEQ ID NO: 22434 - DNA, 20 bp, Artificial Sequence
  chemically synthesized
acacacccctggaataagcc

SEQ ID NO: 22435 - DNA, 20 bp, Artificial Sequence
  chemically synthesized
ccctggaataagccgagcta

SEQ ID NO: 22436 - DNA, 20 bp, Artificial Sequence
  chemically synthesized
ctggaataagccgagctaaa

SEQ ID NO: 22437 - DNA, 20 bp, Artificial Sequence
  chemically synthesized
taagccgagctaaagagaaa

SEQ ID NO: 22438 - DNA, 20 bp, Artificial Sequence
  chemically synthesized
gccgagctaaagagaaaaag

SEQ ID NO: 22439 - DNA, 20 bp, Artificial Sequence
  chemically synthesized
ccgagctaaagagaaaaaga

SEQ ID NO: 22440 - DNA, 20 bp, Artificial Sequence
  chemically synthesized
cgagctaaagagaaaaagaa

SEQ ID NO: 22441 - DNA, 20 bp, Artificial Sequence
  chemically synthesized
agagaaaaagaagggaaata

SEQ ID NO: 22442 - DNA, 20 bp, Artificial Sequence
  chemically synthesized
gagaaaaagaagggaaataa

SEQ ID NO: 22443 - DNA, 20 bp, Artificial Sequence
  chemically synthesized
ttacccacttcattgtgcca

SEQ ID NO: 22444 - DNA, 20 bp, Artificial Sequence
  chemically synthesized
tacccacttcattgtgccaa

SEQ ID NO: 22445 - DNA, 20 bp, Artificial Sequence
  chemically synthesized
ttcattgtgccaaaggcgtg

SEQ ID NO: 22446 - DNA, 20 bp, Artificial Sequence
  chemically synthesized
tcattgtgccaaaggcgtgt

SEQ ID NO: 22447 - DNA, 20 bp, Artificial Sequence
  chemically synthesized
cattgtgccaaaggcgtgtg

SEQ ID NO: 22448 - DNA, 20 bp, Artificial Sequence
  chemically synthesized
ccaaaggcgtgtggggttga

SEQ ID NO: 22449 - DNA, 20 bp, Artificial Sequence
  chemically synthesized
aaggcgtgtggggttgacag

SEQ ID NO: 22450 - DNA, 20 bp, Artificial Sequence
  chemically synthesized
ggcgtgtggggttgacagaa

SEQ ID NO: 22451 - DNA, 20 bp, Artificial Sequence
  chemically synthesized
gtggggttgacagaagagaa

SEQ ID NO: 22452 - DNA, 20 bp, Artificial Sequence
  chemically synthesized
ggttgacagaagagaaaagc

SEQ ID NO: 22453 - DNA, 20 bp, Artificial Sequence
  chemically synthesized
gttgacagaagagaaaagct

SEQ ID NO: 22454 - DNA, 20 bp, Artificial Sequence
  chemically synthesized
aagagaaaagctaggacaaa

SEQ ID NO: 22455 - DNA, 20 bp, Artificial Sequence
  chemically synthesized
gagaaaagctaggacaaacg

SEQ ID NO: 22456 - DNA, 20 bp, Artificial Sequence
  chemically synthesized
agaaaagctaggacaaacgg

SEQ ID NO: 22457 - DNA, 20 bp, Artificial Sequence
  chemically synthesized
gaaaagctaggacaaacgga

SEQ ID NO: 22458 - DNA, 20 bp, Artificial Sequence
  chemically synthesized
taggacaaacggagggaaat

SEQ ID NO: 22459 - DNA, 20 bp, Artificial Sequence
  chemically synthesized
cacgcctttggcacaatgaa

SEQ ID NO: 22460 - DNA, 20 bp, Artificial Sequence
  chemically synthesized
tctttagctcggcttattcc

SEQ ID NO: 22461 - DNA, 20 bp, Artificial Sequence
  chemically synthesized
tagtaaactctgcatcttta

SEQ ID NO: 22462 - DNA, 20 bp, Artificial Sequence
  chemically synthesized
aggtaaaaaaaaaaaaaggt

SEQ ID NO: 22463 - DNA, 20 bp, Artificial Sequence
  chemically synthesized
aaggaaagtgcaaagtaact

SEQ ID NO: 22464 - DNA, 20 bp, Artificial Sequence
  chemically synthesized
ttagagtgactgaaacttca

SEQ ID NO: 22465 - DNA, 20 bp, Artificial Sequence
  chemically synthesized
gtgactgaaacttcacagaa

SEQ ID NO: 22466 - DNA, 20 bp, Artificial Sequence
  chemically synthesized
tcacagaatagggttgaaga

SEQ ID NO: 22467 - DNA, 20 bp, Artificial Sequence
  chemically synthesized
ttgctgttgatagacactaa

SEQ ID NO: 22468 - DNA, 20 bp, Artificial Sequence
  chemically synthesized
gtattagatattatctaagt

SEQ ID NO: 22469 - DNA, 20 bp, Artificial Sequence
  chemically synthesized
taaaatagtattcttggtaa

SEQ ID NO: 22470 - DNA, 20 bp, Artificial Sequence
  chemically synthesized
agaaataattgaacatcatc

SEQ ID NO: 22471 - DNA, 20 bp, Artificial Sequence
  chemically synthesized
atcatcctgagtttttctgt

SEQ ID NO: 22472 - DNA, 20 bp, Artificial Sequence
  chemically synthesized
ttttcttcccttgcccagac

SEQ ID NO: 22473 - DNA, 20 bp, Artificial Sequence
  chemically synthesized
ctgggcaagggaagaaaaaa

SEQ ID NO: 22474 - DNA, 20 bp, Artificial Sequence
  chemically synthesized
ctgattcctacagaaaaact

SEQ ID NO: 22475 - DNA, 20 bp, Artificial Sequence
  chemically synthesized
tttcttctgcctttaaacag

SEQ ID NO: 22476 - DNA, 20 bp, Artificial Sequence
  chemically synthesized
agaagaataattcaattacc

SEQ ID NO: 22477 - DNA, 20 bp, Artificial Sequence
  chemically synthesized
tttaaataaagcatagtgca

SEQ ID NO: 22478 - DNA, 20 bp, Artificial Sequence
  chemically synthesized
tagtgcaatggataggtctt

SEQ ID NO: 22479 - DNA, 20 bp, Artificial Sequence
  chemically synthesized
gataggtctttgggatagtt

SEQ ID NO: 22480 - DNA, 20 bp, Artificial Sequence
  chemically synthesized
gacctttttttttttttacc

SEQ ID NO: 22481 - DNA, 20 bp, Artificial Sequence
  chemically synthesized
tttttttttacctaggatgt

SEQ ID NO: 22482 - DNA, 20 bp, Artificial Sequence
  chemically synthesized
aaaataattctttaaagatg

SEQ ID NO: 22483 - DNA, 20 bp, Artificial Sequence
  chemically synthesized
actttattttactgggaaaa

SEQ ID NO: 22484 - DNA, 20 bp, Artificial Sequence
  chemically synthesized
aaaagttgaacaatagaaaa

SEQ ID NO: 22485 - DNA, 20 bp, Artificial Sequence
  chemically synthesized
atctcgacgaaacacacccc

SEQ ID NO: 22486 - DNA, 20 bp, Artificial Sequence
  chemically synthesized
ttcattgtgccaaaggcgtg

SEQ ID NO: 22487 - DNA, 20 bp, Artificial Sequence
  chemically synthesized
gtgtttcgtcgagatgcacg

SEQ ID NO: 22488 - DNA, 20 bp, Artificial Sequence
  chemically synthesized
ttagtaaactctgcatcttt

SEQ ID NO: 22489 - DNA, 20 bp, Artificial Sequence
  chemically synthesized
taggtaaaaaaaaaaaaagg

SEQ ID NO: 22490 - DNA, 20 bp, Artificial Sequence
  chemically synthesized
cttagagtgactgaaacttc

SEQ ID NO: 22491 - DNA, 20 bp, Artificial Sequence
  chemically synthesized
tattcttctgtttaaaggca

SEQ ID NO: 22492 - DNA, 20 bp, Artificial Sequence
  chemically synthesized
gcataatctaagtcaaatgg

SEQ ID NO: 22493 - DNA, 20 bp, Artificial Sequence
  chemically synthesized
atcggtttaaagatttggga

SEQ ID NO: 22494 - DNA, 20 bp, Artificial Sequence
  chemically synthesized
tcactcttgtctgggcaagg

SEQ ID NO: 22495 - DNA, 20 bp, Artificial Sequence
  chemically synthesized
aaaaaggattgttaaatact

SEQ ID NO: 22496 - DNA, 20 bp, Artificial Sequence
  chemically synthesized
aatattgggctctgattcct

SEQ ID NO: 22497 - DNA, 20 bp, Artificial Sequence
  chemically synthesized
atttcttctgcctttaaaca

SEQ ID NO: 22498 - DNA, 20 bp, Artificial Sequence
  chemically synthesized
cagaagaataattcaattac

SEQ ID NO: 22499 - DNA, 20 bp, Artificial Sequence
  chemically synthesized
tgcactttccttagtgcgca

SEQ ID NO: 22500 - DNA, 20 bp, Artificial Sequence
  chemically synthesized
atacaaaatactatgccatt

SEQ ID NO: 22501 - DNA, 20 bp, Artificial Sequence
  chemically synthesized
aactttattttactgggaaa

SEQ ID NO: 22502 - DNA, 20 bp, Artificial Sequence
  chemically synthesized
aatagaataaaagttgaaca

SEQ ID NO: 22503 - DNA, 20 bp, Artificial Sequence
  chemically synthesized
cctggaataagccgagctaa

SEQ ID NO: 22504 - DNA, 20 bp, Artificial Sequence
  chemically synthesized
aggcgtgtggggttgacaga

SEQ ID NO: 22505 - DNA, 20 bp, Artificial Sequence
  chemically synthesized
cattgcactatgctttattt

SEQ ID NO: 22506 - DNA, 20 bp, Artificial Sequence
  chemically synthesized
tatgctttatttaaaaacca

SEQ ID NO: 22507 - DNA, 20 bp, Artificial Sequence
  chemically synthesized
aaggattgttaaatactgaa

SEQ ID NO: 22508 - DNA, 20 bp, Artificial Sequence
  chemically synthesized
ttgggctctgattcctacag

SEQ ID NO: 22509 - DNA, 20 bp, Artificial Sequence
  chemically synthesized
tttaaagatgcagagtttac

SEQ ID NO: 22510 - DNA, 20 bp, Artificial Sequence
  chemically synthesized
gtatattagtgctaatttcc

SEQ ID NO: 22511 - DNA, 20 bp, Artificial Sequence
  chemically synthesized
gctaatttccctccgtttgt

SEQ ID NO: 22512 - DNA, 20 bp, Artificial Sequence
  chemically synthesized
tcccttctttttctctttag

SEQ ID NO: 22513 - DNA, 20 bp, Artificial Sequence
  chemically synthesized
tagctcggcttattccaggg

SEQ ID NO: 22514 - DNA, 20 bp, Artificial Sequence
  chemically synthesized
attctattttcccagtaaaa

SEQ ID NO: 22515 - DNA, 20 bp, Artificial Sequence
  chemically synthesized
taaaaaaaaaaaaaggtcag

SEQ ID NO: 22516 - DNA, 20 bp, Artificial Sequence
  chemically synthesized
gaaacttcacagaatagggt

SEQ ID NO: 22517 - DNA, 20 bp, Artificial Sequence
  chemically synthesized
ccaaagacctatccattgca

SEQ ID NO: 22518 - DNA, 20 bp, Artificial Sequence
  chemically synthesized
aaaagagtattagatattat

SEQ ID NO: 22519 - DNA, 20 bp, Artificial Sequence
  chemically synthesized
tcttggtaattgaattattc

SEQ ID NO: 22520 - DNA, 20 bp, Artificial Sequence
  chemically synthesized
agaaataattgaacatcatc

SEQ ID NO: 22521 - DNA, 20 bp, Artificial Sequence
  chemically synthesized
taaaaagtaacattattact

SEQ ID NO: 22522 - DNA, 20 bp, Artificial Sequence
  chemically synthesized
agacaagagtgaggttgctc

SEQ ID NO: 22523 - DNA, 20 bp, Artificial Sequence
  chemically synthesized
agtgaggttgctcatcggtt

SEQ ID NO: 22524 - DNA, 20 bp, Artificial Sequence
  chemically synthesized
tctgggcaagggaagaaaaa

SEQ ID NO: 22525 - DNA, 20 bp, Artificial Sequence
  chemically synthesized
ttatatttctttccatttga

SEQ ID NO: 22526 - DNA, 20 bp, Artificial Sequence
  chemically synthesized
ccatttgacttagattatgc

SEQ ID NO: 22527 - DNA, 20 bp, Artificial Sequence
  chemically synthesized
atttgtttcaaaatattggg

SEQ ID NO: 22528 - DNA, 20 bp, Artificial Sequence
  chemically synthesized
ctatttatgagatcaacagc

SEQ ID NO: 22529 - DNA, 20 bp, Artificial Sequence
  chemically synthesized
gagatcaacagcacaggttt

SEQ ID NO: 22530 - DNA, 20 bp, Artificial Sequence
  chemically synthesized
caatcttcaaccctattctg

SEQ ID NO: 22531 - DNA, 20 bp, Artificial Sequence
  chemically synthesized
cctttttttttttttaccta

SEQ ID NO: 22532 - DNA, 20 bp, Artificial Sequence
  chemically synthesized
aaaataattctttaaagatg

SEQ ID NO: 22533 - DNA, 20 bp, Artificial Sequence
  chemically synthesized
taaaagttgaacaatagaaa

SEQ ID NO: 22534 - DNA, 22 bp, Artificial Sequence
  chemically synthesized
gtgctaatttccctccgtttgt

SEQ ID NO: 22535 - DNA, 22 bp, Artificial Sequence
  chemically synthesized
atttccctccgtttgtcctagc

SEQ ID NO: 22536 - DNA, 22 bp, Artificial Sequence
  chemically synthesized
ccctccgtttgtcctagctttt

SEQ ID NO: 22537 - DNA, 22 bp, Artificial Sequence
  chemically synthesized
cctccgtttgtcctagcttttc

SEQ ID NO: 22538 - DNA, 22 bp, Artificial Sequence
  chemically synthesized
cgtttgtcctagcttttctctt

SEQ ID NO: 22539 - DNA, 22 bp, Artificial Sequence
  chemically synthesized
gtcctagcttttctcttctgtc

SEQ ID NO: 22540 - DNA, 22 bp, Artificial Sequence
  chemically synthesized
tcctagcttttctcttctgtca

SEQ ID NO: 22541 - DNA, 22 bp, Artificial Sequence
  chemically synthesized
gcttttctcttctgtcaacccc

SEQ ID NO: 22542 - DNA, 22 bp, Artificial Sequence
  chemically synthesized
ttctcttctgtcaaccccacac

SEQ ID NO: 22543 - DNA, 22 bp, Artificial Sequence
  chemically synthesized
tctcttctgtcaaccccacacg

SEQ ID NO: 22544 - DNA, 22 bp, Artificial Sequence
  chemically synthesized
ctcttctgtcaaccccacacgc

SEQ ID NO: 22545 - DNA, 22 bp, Artificial Sequence
  chemically synthesized
tcttctgtcaaccccacacgcc

SEQ ID NO: 22546 - DNA, 22 bp, Artificial Sequence
  chemically synthesized
ttctgtcaaccccacacgcctt

SEQ ID NO: 22547 - DNA, 22 bp, Artificial Sequence
  chemically synthesized
ctgtcaaccccacacgcctttg

SEQ ID NO: 22548 - DNA, 22 bp, Artificial Sequence
  chemically synthesized
tgtcaaccccacacgcctttgg

SEQ ID NO: 22549 - DNA, 22 bp, Artificial Sequence
  chemically synthesized
tcaaccccacacgcctttggca

SEQ ID NO: 22550 - DNA, 22 bp, Artificial Sequence
  chemically synthesized
tggcacaatgaagtgggtaacc

SEQ ID NO: 22551 - DNA, 22 bp, Artificial Sequence
  chemically synthesized
ggcacaatgaagtgggtaacct

SEQ ID NO: 22552 - DNA, 22 bp, Artificial Sequence
  chemically synthesized
gcacaatgaagtgggtaacctt

SEQ ID NO: 22553 - DNA, 22 bp, Artificial Sequence
  chemically synthesized
tatttcccttctttttctcttt

SEQ ID NO: 22554 - DNA, 22 bp, Artificial Sequence
  chemically synthesized
atttcccttctttttctcttta

SEQ ID NO: 22555 - DNA, 22 bp, Artificial Sequence
  chemically synthesized
tttcccttctttttctctttag

SEQ ID NO: 22556 - DNA, 22 bp, Artificial Sequence
  chemically synthesized
cccttctttttctctttagctc

SEQ ID NO: 22557 - DNA, 22 bp, Artificial Sequence
  chemically synthesized
ccttctttttctctttagctcg

SEQ ID NO: 22558 - DNA, 22 bp, Artificial Sequence
  chemically synthesized
ctttttctctttagctcggctt

SEQ ID NO: 22559 - DNA, 22 bp, Artificial Sequence
  chemically synthesized
tttttctctttagctcggctta

SEQ ID NO: 22560 - DNA, 22 bp, Artificial Sequence
  chemically synthesized
tttctctttagctcggcttatt

SEQ ID NO: 22561 - DNA, 22 bp, Artificial Sequence
  chemically synthesized
ttctctttagctcggcttattc

SEQ ID NO: 22562 - DNA, 22 bp, Artificial Sequence
  chemically synthesized
tctctttagctcggcttattcc

SEQ ID NO: 22563 - DNA, 22 bp, Artificial Sequence
  chemically synthesized
ctctttagctcggcttattcca

SEQ ID NO: 22564 - DNA, 22 bp, Artificial Sequence
  chemically synthesized
tctttagctcggcttattccag

SEQ ID NO: 22565 - DNA, 22 bp, Artificial Sequence
  chemically synthesized
tttagctcggcttattccaggg

SEQ ID NO: 22566 - DNA, 22 bp, Artificial Sequence
  chemically synthesized
tagctcggcttattccaggggt

SEQ ID NO: 22567 - DNA, 22 bp, Artificial Sequence
  chemically synthesized
agctcggcttattccaggggtg

SEQ ID NO: 22568 - DNA, 22 bp, Artificial Sequence
  chemically synthesized
gctcggcttattccaggggtgt

SEQ ID NO: 22569 - DNA, 22 bp, Artificial Sequence
  chemically synthesized
ggcttattccaggggtgtgttt

SEQ ID NO: 22570 - DNA, 22 bp, Artificial Sequence
  chemically synthesized
attccaggggtgtgtttcgtcg

SEQ ID NO: 22571 - DNA, 22 bp, Artificial Sequence
  chemically synthesized
ttccaggggtgtgtttcgtcga

SEQ ID NO: 22572 - DNA, 22 bp, Artificial Sequence
  chemically synthesized
caggggtgtgtttcgtcgagat

SEQ ID NO: 22573 - DNA, 22 bp, Artificial Sequence
  chemically synthesized
cgtcgagatgcacgtaagaaat

SEQ ID NO: 22574 - DNA, 22 bp, Artificial Sequence
  chemically synthesized
gtcgagatgcacgtaagaaatc

SEQ ID NO: 22575 - DNA, 22 bp, Artificial Sequence
  chemically synthesized
ttctattgttcaacttttattc

SEQ ID NO: 22576 - DNA, 22 bp, Artificial Sequence
  chemically synthesized
tctattgttcaacttttattct

SEQ ID NO: 22577 - DNA, 22 bp, Artificial Sequence
  chemically synthesized
ctattgttcaacttttattcta

SEQ ID NO: 22578 - DNA, 22 bp, Artificial Sequence
  chemically synthesized
tattgttcaacttttattctat

SEQ ID NO: 22579 - DNA, 22 bp, Artificial Sequence
  chemically synthesized
ttgttcaacttttattctattt

SEQ ID NO: 22580 - DNA, 22 bp, Artificial Sequence
  chemically synthesized
ttcaacttttattctattttcc

SEQ ID NO: 22581 - DNA, 22 bp, Artificial Sequence
  chemically synthesized
aacttttattctattttcccag

SEQ ID NO: 22582 - DNA, 22 bp, Artificial Sequence
  chemically synthesized
ttattctattttcccagtaaaa

SEQ ID NO: 22583 - DNA, 22 bp, Artificial Sequence
  chemically synthesized
tattctattttcccagtaaaat

SEQ ID NO: 22584 - DNA, 22 bp, Artificial Sequence
  chemically synthesized
attctattttcccagtaaaata

SEQ ID NO: 22585 - DNA, 22 bp, Artificial Sequence
  chemically synthesized
ttctattttcccagtaaaataa

SEQ ID NO: 22586 - DNA, 22 bp, Artificial Sequence
  chemically synthesized
tattttcccagtaaaataaagt

SEQ ID NO: 22587 - DNA, 22 bp, Artificial Sequence
  chemically synthesized
ttttcccagtaaaataaagttt

SEQ ID NO: 22588 - DNA, 22 bp, Artificial Sequence
  chemically synthesized
tcccagtaaaataaagttttag

SEQ ID NO: 22589 - DNA, 22 bp, Artificial Sequence
  chemically synthesized
cccagtaaaataaagttttagt

SEQ ID NO: 22590 - DNA, 22 bp, Artificial Sequence
  chemically synthesized
ccagtaaaataaagttttagta

SEQ ID NO: 22591 - DNA, 22 bp, Artificial Sequence
  chemically synthesized
tagtaaactctgcatctttaaa

SEQ ID NO: 22592 - DNA, 22 bp, Artificial Sequence
  chemically synthesized
agtaaactctgcatctttaaag

SEQ ID NO: 22593 - DNA, 22 bp, Artificial Sequence
  chemically synthesized
gtaaactctgcatctttaaaga

SEQ ID NO: 22594 - DNA, 22 bp, Artificial Sequence
  chemically synthesized
tgcatctttaaagaattatttt

SEQ ID NO: 22595 - DNA, 22 bp, Artificial Sequence
  chemically synthesized
catctttaaagaattattttgg

SEQ ID NO: 22596 - DNA, 22 bp, Artificial Sequence
  chemically synthesized
taaagaattattttggcattta

SEQ ID NO: 22597 - DNA, 22 bp, Artificial Sequence
  chemically synthesized
aaagaattattttggcatttat

SEQ ID NO: 22598 - DNA, 22 bp, Artificial Sequence
  chemically synthesized
aagaattattttggcatttatt

SEQ ID NO: 22599 - DNA, 22 bp, Artificial Sequence
  chemically synthesized
ttttggcatttatttctaaaat

SEQ ID NO: 22600 - DNA, 22 bp, Artificial Sequence
  chemically synthesized
tggcatttatttctaaaatggc

SEQ ID NO: 22601 - DNA, 22 bp, Artificial Sequence
  chemically synthesized
ggcatttatttctaaaatggca

SEQ ID NO: 22602 - DNA, 22 bp, Artificial Sequence
  chemically synthesized
gcatttatttctaaaatggcat

SEQ ID NO: 22603 - DNA, 22 bp, Artificial Sequence
  chemically synthesized
atttctaaaatggcatagtatt

SEQ ID NO: 22604 - DNA, 22 bp, Artificial Sequence
  chemically synthesized
tttctaaaatggcatagtattt

SEQ ID NO: 22605 - DNA, 22 bp, Artificial Sequence
  chemically synthesized
ctaaaatggcatagtattttgt

SEQ ID NO: 22606 - DNA, 22 bp, Artificial Sequence
  chemically synthesized
taaaatggcatagtattttgta

SEQ ID NO: 22607 - DNA, 22 bp, Artificial Sequence
  chemically synthesized
aaatggcatagtattttgtatt

SEQ ID NO: 22608 - DNA, 22 bp, Artificial Sequence
  chemically synthesized
tgtatttgtgaagtcttacaag

SEQ ID NO: 22609 - DNA, 22 bp, Artificial Sequence
  chemically synthesized
gtatttgtgaagtcttacaagg

SEQ ID NO: 22610 - DNA, 22 bp, Artificial Sequence
  chemically synthesized
tatttgtgaagtcttacaaggt

SEQ ID NO: 22611 - DNA, 22 bp, Artificial Sequence
  chemically synthesized
gtgaagtcttacaaggttatct

SEQ ID NO: 22612 - DNA, 22 bp, Artificial Sequence
  chemically synthesized
tgaagtcttacaaggttatctt

SEQ ID NO: 22613 - DNA, 22 bp, Artificial Sequence
  chemically synthesized
acaaggttatcttattaataaa

SEQ ID NO: 22614 - DNA, 22 bp, Artificial Sequence
  chemically synthesized
caaggttatcttattaataaaa

SEQ ID NO: 22615 - DNA, 22 bp, Artificial Sequence
  chemically synthesized
tcttattaataaaattcaaaca

SEQ ID NO: 22616 - DNA, 22 bp, Artificial Sequence
  chemically synthesized
attaataaaattcaaacatcct

SEQ ID NO: 22617 - DNA, 22 bp, Artificial Sequence
  chemically synthesized
ttaataaaattcaaacatccta

SEQ ID NO: 22618 - DNA, 22 bp, Artificial Sequence
  chemically synthesized
ataaaattcaaacatcctaggt

SEQ ID NO: 22619 - DNA, 22 bp, Artificial Sequence
  chemically synthesized
aaacatcctaggtaaaaaaaaa

SEQ ID NO: 22620 - DNA, 22 bp, Artificial Sequence
  chemically synthesized
ggtaaaaaaaaaaaaaggtcag

SEQ ID NO: 22621 - DNA, 22 bp, Artificial Sequence
  chemically synthesized
tttagtgactgtaattttcttt

SEQ ID NO: 22622 - DNA, 22 bp, Artificial Sequence
  chemically synthesized
agtgactgtaattttcttttgc

SEQ ID NO: 22623 - DNA, 22 bp, Artificial Sequence
  chemically synthesized
gtgactgtaattttcttttgcg

SEQ ID NO: 22624 - DNA, 22 bp, Artificial Sequence
  chemically synthesized
taattttcttttgcgcactaag

SEQ ID NO: 22625 - DNA, 22 bp, Artificial Sequence
  chemically synthesized
tcttttgcgcactaaggaaagt

SEQ ID NO: 22626 - DNA, 22 bp, Artificial Sequence
  chemically synthesized
cttttgcgcactaaggaaagtg

SEQ ID NO: 22627 - DNA, 22 bp, Artificial Sequence
  chemically synthesized
ttttgcgcactaaggaaagtgc

SEQ ID NO: 22628 - DNA, 22 bp, Artificial Sequence
  chemically synthesized
ttgcgcactaaggaaagtgcaa

SEQ ID NO: 22629 - DNA, 22 bp, Artificial Sequence
  chemically synthesized
tgcgcactaaggaaagtgcaaa

SEQ ID NO: 22630 - DNA, 22 bp, Artificial Sequence
  chemically synthesized
gcgcactaaggaaagtgcaaag

SEQ ID NO: 22631 - DNA, 22 bp, Artificial Sequence
  chemically synthesized
cgcactaaggaaagtgcaaagt

SEQ ID NO: 22632 - DNA, 22 bp, Artificial Sequence
  chemically synthesized
aggaaagtgcaaagtaacttag

SEQ ID NO: 22633 - DNA, 22 bp, Artificial Sequence
  chemically synthesized
agagtgactgaaacttcacaga

SEQ ID NO: 22634 - DNA, 22 bp, Artificial Sequence
  chemically synthesized
gagtgactgaaacttcacagaa

SEQ ID NO: 22635 - DNA, 22 bp, Artificial Sequence
  chemically synthesized
aaacttcacagaatagggttga

SEQ ID NO: 22636 - DNA, 22 bp, Artificial Sequence
  chemically synthesized
cacagaatagggttgaagattg

SEQ ID NO: 22637 - DNA, 22 bp, Artificial Sequence
  chemically synthesized
acagaatagggttgaagattga

SEQ ID NO: 22638 - DNA, 22 bp, Artificial Sequence
  chemically synthesized
aagattgaattcataactatcc

SEQ ID NO: 22639 - DNA, 22 bp, Artificial Sequence
  chemically synthesized
aattcataactatcccaaagac

SEQ ID NO: 22640 - DNA, 22 bp, Artificial Sequence
  chemically synthesized
ataactatcccaaagacctatc

SEQ ID NO: 22641 - DNA, 22 bp, Artificial Sequence
  chemically synthesized
tcccaaagacctatccattgca

SEQ ID NO: 22642 - DNA, 22 bp, Artificial Sequence
  chemically synthesized
tccattgcactatgctttattt

SEQ ID NO: 22643 - DNA, 22 bp, Artificial Sequence
  chemically synthesized
cactatgctttatttaaaaacc

SEQ ID NO: 22644 - DNA, 22 bp, Artificial Sequence
  chemically synthesized
tgctttatttaaaaaccacaaa

SEQ ID NO: 22645 - DNA, 22 bp, Artificial Sequence
  chemically synthesized
tatttaaaaaccacaaaacctg

SEQ ID NO: 22646 - DNA, 22 bp, Artificial Sequence
  chemically synthesized
atttaaaaaccacaaaacctgt

SEQ ID NO: 22647 - DNA, 22 bp, Artificial Sequence
  chemically synthesized
tttaaaaaccacaaaacctgtg

SEQ ID NO: 22648 - DNA, 22 bp, Artificial Sequence
  chemically synthesized
aaaaaccacaaaacctgtgctg

SEQ ID NO: 22649 - DNA, 22 bp, Artificial Sequence
  chemically synthesized
aaaaccacaaaacctgtgctgt

SEQ ID NO: 22650 - DNA, 22 bp, Artificial Sequence
  chemically synthesized
tgctgttgatctcataaataga

SEQ ID NO: 22651 - DNA, 22 bp, Artificial Sequence
  chemically synthesized
ttgatctcataaatagaacttg

SEQ ID NO: 22652 - DNA, 22 bp, Artificial Sequence
  chemically synthesized
atctcataaatagaacttgtat

SEQ ID NO: 22653 - DNA, 22 bp, Artificial Sequence
  chemically synthesized
ataaatagaacttgtatttata

SEQ ID NO: 22654 - DNA, 22 bp, Artificial Sequence
  chemically synthesized
gtatttatatttattttcattt

SEQ ID NO: 22655 - DNA, 22 bp, Artificial Sequence
  chemically synthesized
tatttatatttattttcatttt

SEQ ID NO: 22656 - DNA, 22 bp, Artificial Sequence
  chemically synthesized
atatttattttcattttagtct

SEQ ID NO: 22657 - DNA, 22 bp, Artificial Sequence
  chemically synthesized
tatttattttcattttagtctg

SEQ ID NO: 22658 - DNA, 22 bp, Artificial Sequence
  chemically synthesized
attttcattttagtctgtcttc

SEQ ID NO: 22659 - DNA, 22 bp, Artificial Sequence
  chemically synthesized
ttttcattttagtctgtcttct

SEQ ID NO: 22660 - DNA, 22 bp, Artificial Sequence
  chemically synthesized
tcattttagtctgtcttcttgg

SEQ ID NO: 22661 - DNA, 22 bp, Artificial Sequence
  chemically synthesized
cattttagtctgtcttcttggt

SEQ ID NO: 22662 - DNA, 22 bp, Artificial Sequence
  chemically synthesized
attttagtctgtcttcttggtt

SEQ ID NO: 22663 - DNA, 22 bp, Artificial Sequence
  chemically synthesized
tagtctgtcttcttggttgctg

SEQ ID NO: 22664 - DNA, 22 bp, Artificial Sequence
  chemically synthesized
agtctgtcttcttggttgctgt

SEQ ID NO: 22665 - DNA, 22 bp, Artificial Sequence
  chemically synthesized
gtctgtcttcttggttgctgtt

SEQ ID NO: 22666 - DNA, 22 bp, Artificial Sequence
  chemically synthesized
tcttcttggttgctgttgatag

SEQ ID NO: 22667 - DNA, 22 bp, Artificial Sequence
  chemically synthesized
cttggttgctgttgatagacac

SEQ ID NO: 22668 - DNA, 22 bp, Artificial Sequence
  chemically synthesized
ttggttgctgttgatagacact

SEQ ID NO: 22669 - DNA, 22 bp, Artificial Sequence
  chemically synthesized
ggttgctgttgatagacactaa

SEQ ID NO: 22670 - DNA, 22 bp, Artificial Sequence
  chemically synthesized
gttgctgttgatagacactaaa

SEQ ID NO: 22671 - DNA, 22 bp, Artificial Sequence
  chemically synthesized
ctgttgatagacactaaaagag

SEQ ID NO: 22672 - DNA, 22 bp, Artificial Sequence
  chemically synthesized
ttgatagacactaaaagagtat

SEQ ID NO: 22673 - DNA, 22 bp, Artificial Sequence
  chemically synthesized
atagacactaaaagagtattag

SEQ ID NO: 22674 - DNA, 22 bp, Artificial Sequence
  chemically synthesized
aaagagtattagatattatcta

SEQ ID NO: 22675 - DNA, 22 bp, Artificial Sequence
  chemically synthesized
gatattatctaagtttgaatat

SEQ ID NO: 22676 - DNA, 22 bp, Artificial Sequence
  chemically synthesized
tctaagtttgaatataaggcta

SEQ ID NO: 22677 - DNA, 22 bp, Artificial Sequence
  chemically synthesized
agtttgaatataaggctataaa

SEQ ID NO: 22678 - DNA, 22 bp, Artificial Sequence
  chemically synthesized
gaatataaggctataaatattt

SEQ ID NO: 22679 - DNA, 22 bp, Artificial Sequence
  chemically synthesized
aatataaggctataaatattta

SEQ ID NO: 22680 - DNA, 22 bp, Artificial Sequence
  chemically synthesized
taaatatttaataatttttaaa

SEQ ID NO: 22681 - DNA, 22 bp, Artificial Sequence
  chemically synthesized
aataatttttaaaatagtattc

SEQ ID NO: 22682 - DNA, 22 bp, Artificial Sequence
  chemically synthesized
ataatttttaaaatagtattct

SEQ ID NO: 22683 - DNA, 22 bp, Artificial Sequence
  chemically synthesized
ttaaaatagtattcttggtaat

SEQ ID NO: 22684 - DNA, 22 bp, Artificial Sequence
  chemically synthesized
taaaatagtattcttggtaatt

SEQ ID NO: 22685 - DNA, 22 bp, Artificial Sequence
  chemically synthesized
aaaatagtattcttggtaattg

SEQ ID NO: 22686 - DNA, 22 bp, Artificial Sequence
  chemically synthesized
aaatagtattcttggtaattga

SEQ ID NO: 22687 - DNA, 22 bp, Artificial Sequence
  chemically synthesized
ttggtaattgaattattcttct

SEQ ID NO: 22688 - DNA, 22 bp, Artificial Sequence
  chemically synthesized
ggtaattgaattattcttctgt

SEQ ID NO: 22689 - DNA, 22 bp, Artificial Sequence
  chemically synthesized
gtaattgaattattcttctgtt

SEQ ID NO: 22690 - DNA, 22 bp, Artificial Sequence
  chemically synthesized
aattattcttctgtttaaaggc

SEQ ID NO: 22691 - DNA, 22 bp, Artificial Sequence
  chemically synthesized
ttcttctgtttaaaggcagaag

SEQ ID NO: 22692 - DNA, 22 bp, Artificial Sequence
  chemically synthesized
ttctgtttaaaggcagaagaaa

SEQ ID NO: 22693 - DNA, 22 bp, Artificial Sequence
  chemically synthesized
ctgtttaaaggcagaagaaata

SEQ ID NO: 22694 - DNA, 22 bp, Artificial Sequence
  chemically synthesized
tgtttaaaggcagaagaaataa

SEQ ID NO: 22695 - DNA, 22 bp, Artificial Sequence
  chemically synthesized
tttaaaggcagaagaaataatt

SEQ ID NO: 22696 - DNA, 22 bp, Artificial Sequence
  chemically synthesized
aaaggcagaagaaataattgaa

SEQ ID NO: 22697 - DNA, 22 bp, Artificial Sequence
  chemically synthesized
aaggcagaagaaataattgaac

SEQ ID NO: 22698 - DNA, 22 bp, Artificial Sequence
  chemically synthesized
aacatcatcctgagtttttctg

SEQ ID NO: 22699 - DNA, 22 bp, Artificial Sequence
  chemically synthesized
agtttttctgtaggaatcagag

SEQ ID NO: 22700 - DNA, 22 bp, Artificial Sequence
  chemically synthesized
ttctgtaggaatcagagcccaa

SEQ ID NO: 22701 - DNA, 22 bp, Artificial Sequence
  chemically synthesized
tctgtaggaatcagagcccaat

SEQ ID NO: 22702 - DNA, 22 bp, Artificial Sequence
  chemically synthesized
ctgtaggaatcagagcccaata

SEQ ID NO: 22703 - DNA, 22 bp, Artificial Sequence
  chemically synthesized
tgtaggaatcagagcccaatat

SEQ ID NO: 22704 - DNA, 22 bp, Artificial Sequence
  chemically synthesized
taggaatcagagcccaatattt

SEQ ID NO: 22705 - DNA, 22 bp, Artificial Sequence
  chemically synthesized
tgaaacaaatgcataatctaag

SEQ ID NO: 22706 - DNA, 22 bp, Artificial Sequence
  chemically synthesized
gaaacaaatgcataatctaagt

SEQ ID NO: 22707 - DNA, 22 bp, Artificial Sequence
  chemically synthesized
aaacaaatgcataatctaagtc

SEQ ID NO: 22708 - DNA, 22 bp, Artificial Sequence
  chemically synthesized
agtcaaatggaaagaaatataa

SEQ ID NO: 22709 - DNA, 22 bp, Artificial Sequence
  chemically synthesized
ttacttcttgttttcttcagta

SEQ ID NO: 22710 - DNA, 22 bp, Artificial Sequence
  chemically synthesized
cttcttgttttcttcagtattt

SEQ ID NO: 22711 - DNA, 22 bp, Artificial Sequence
  chemically synthesized
cttgttttcttcagtatttaac

SEQ ID NO: 22712 - DNA, 22 bp, Artificial Sequence
  chemically synthesized
ttgttttcttcagtatttaaca

SEQ ID NO: 22713 - DNA, 22 bp, Artificial Sequence
  chemically synthesized
gttttcttcagtatttaacaat

SEQ ID NO: 22714 - DNA, 22 bp, Artificial Sequence
  chemically synthesized
ttttcttcagtatttaacaatc

SEQ ID NO: 22715 - DNA, 22 bp, Artificial Sequence
  chemically synthesized
tcttcagtatttaacaatcctt

SEQ ID NO: 22716 - DNA, 22 bp, Artificial Sequence
  chemically synthesized
cttcagtatttaacaatccttt

SEQ ID NO: 22717 - DNA, 22 bp, Artificial Sequence
  chemically synthesized
ttcagtatttaacaatcctttt

SEQ ID NO: 22718 - DNA, 22 bp, Artificial Sequence
  chemically synthesized
cagtatttaacaatcctttttt

SEQ ID NO: 22719 - DNA, 22 bp, Artificial Sequence
  chemically synthesized
agtatttaacaatccttttttt

SEQ ID NO: 22720 - DNA, 22 bp, Artificial Sequence
  chemically synthesized
aacaatccttttttttcttccc

SEQ ID NO: 22721 - DNA, 22 bp, Artificial Sequence
  chemically synthesized
acaatccttttttttcttccct

SEQ ID NO: 22722 - DNA, 22 bp, Artificial Sequence
  chemically synthesized
ttttttcttcccttgcccagac

SEQ ID NO: 22723 - DNA, 22 bp, Artificial Sequence
  chemically synthesized
tttttcttcccttgcccagaca

SEQ ID NO: 22724 - DNA, 22 bp, Artificial Sequence
  chemically synthesized
ttttcttcccttgcccagacaa

SEQ ID NO: 22725 - DNA, 22 bp, Artificial Sequence
  chemically synthesized
tttcttcccttgcccagacaag

SEQ ID NO: 22726 - DNA, 22 bp, Artificial Sequence
  chemically synthesized
ttcttcccttgcccagacaaga

SEQ ID NO: 22727 - DNA, 22 bp, Artificial Sequence
  chemically synthesized
tcttcccttgcccagacaagag

SEQ ID NO: 22728 - DNA, 22 bp, Artificial Sequence
  chemically synthesized
cttcccttgcccagacaagagt

SEQ ID NO: 22729 - DNA, 22 bp, Artificial Sequence
  chemically synthesized
ttcccttgcccagacaagagtg

SEQ ID NO: 22730 - DNA, 22 bp, Artificial Sequence
  chemically synthesized
cccttgcccagacaagagtgag

SEQ ID NO: 22731 - DNA, 22 bp, Artificial Sequence
  chemically synthesized
ccttgcccagacaagagtgagg

SEQ ID NO: 22732 - DNA, 22 bp, Artificial Sequence
  chemically synthesized
gcccagacaagagtgaggttgc

SEQ ID NO: 22733 - DNA, 22 bp, Artificial Sequence
  chemically synthesized
cccagacaagagtgaggttgct

SEQ ID NO: 22734 - DNA, 22 bp, Artificial Sequence
  chemically synthesized
ctcatcggtttaaagatttggg

SEQ ID NO: 22735 - DNA, 22 bp, Artificial Sequence
  chemically synthesized
atcggtttaaagatttgggaga

SEQ ID NO: 22736 - DNA, 22 bp, Artificial Sequence
  chemically synthesized
aaagatttgggagaagaaaatt

SEQ ID NO: 22737 - DNA, 22 bp, Artificial Sequence
  chemically synthesized
aagatttgggagaagaaaattt

SEQ ID NO: 22738 - DNA, 22 bp, Artificial Sequence
  chemically synthesized
gggagaagaaaatttcaaagcc

SEQ ID NO: 22739 - DNA, 22 bp, Artificial Sequence
  chemically synthesized
ggagaagaaaatttcaaagcct

SEQ ID NO: 22740 - DNA, 22 bp, Artificial Sequence
  chemically synthesized
tgaaattttcttctcccaaatc

SEQ ID NO: 22741 - DNA, 22 bp, Artificial Sequence
  chemically synthesized
gaaattttcttctcccaaatct

SEQ ID NO: 22742 - DNA, 22 bp, Artificial Sequence
  chemically synthesized
aaattttcttctcccaaatctt

SEQ ID NO: 22743 - DNA, 22 bp, Artificial Sequence
  chemically synthesized
tcttctcccaaatctttaaacc

SEQ ID NO: 22744 - DNA, 22 bp, Artificial Sequence
  chemically synthesized
cttctcccaaatctttaaaccg

SEQ ID NO: 22745 - DNA, 22 bp, Artificial Sequence
  chemically synthesized
ttctcccaaatctttaaaccga

SEQ ID NO: 22746 - DNA, 22 bp, Artificial Sequence
  chemically synthesized
ctcccaaatctttaaaccgatg

SEQ ID NO: 22747 - DNA, 22 bp, Artificial Sequence
  chemically synthesized
tcccaaatctttaaaccgatga

SEQ ID NO: 22748 - DNA, 22 bp, Artificial Sequence
  chemically synthesized
ccaaatctttaaaccgatgagc

SEQ ID NO: 22749 - DNA, 22 bp, Artificial Sequence
  chemically synthesized
taaaccgatgagcaacctcact

SEQ ID NO: 22750 - DNA, 22 bp, Artificial Sequence
  chemically synthesized
aaaccgatgagcaacctcactc

SEQ ID NO: 22751 - DNA, 22 bp, Artificial Sequence
  chemically synthesized
aaccgatgagcaacctcactct

SEQ ID NO: 22752 - DNA, 22 bp, Artificial Sequence
  chemically synthesized
actcttgtctgggcaagggaag

SEQ ID NO: 22753 - DNA, 22 bp, Artificial Sequence
  chemically synthesized
ttgtctgggcaagggaagaaaa

SEQ ID NO: 22754 - DNA, 22 bp, Artificial Sequence
  chemically synthesized
gtctgggcaagggaagaaaaaa

SEQ ID NO: 22755 - DNA, 22 bp, Artificial Sequence
  chemically synthesized
tctgggcaagggaagaaaaaaa

SEQ ID NO: 22756 - DNA, 22 bp, Artificial Sequence
  chemically synthesized
ggcaagggaagaaaaaaaagga

SEQ ID NO: 22757 - DNA, 22 bp, Artificial Sequence
  chemically synthesized
ttaaatactgaagaaaacaaga

SEQ ID NO: 22758 - DNA, 22 bp, Artificial Sequence
  chemically synthesized
aatactgaagaaaacaagaagt

SEQ ID NO: 22759 - DNA, 22 bp, Artificial Sequence
  chemically synthesized
aagaaaacaagaagtaataatg

SEQ ID NO: 22760 - DNA, 22 bp, Artificial Sequence
  chemically synthesized
ctttttatatttctttccattt

SEQ ID NO: 22761 - DNA, 22 bp, Artificial Sequence
  chemically synthesized
tttatatttctttccatttgac

SEQ ID NO: 22762 - DNA, 22 bp, Artificial Sequence
  chemically synthesized
ttatatttctttccatttgact

SEQ ID NO: 22763 - DNA, 22 bp, Artificial Sequence
  chemically synthesized
tatatttctttccatttgactt

SEQ ID NO: 22764 - DNA, 22 bp, Artificial Sequence
  chemically synthesized
atatttctttccatttgactta

SEQ ID NO: 22765 - DNA, 22 bp, Artificial Sequence
  chemically synthesized
tatttctttccatttgacttag

SEQ ID NO: 22766 - DNA, 22 bp, Artificial Sequence
  chemically synthesized
ctttccatttgacttagattat

SEQ ID NO: 22767 - DNA, 22 bp, Artificial Sequence
  chemically synthesized
tttccatttgacttagattatg

SEQ ID NO: 22768 - DNA, 22 bp, Artificial Sequence
  chemically synthesized
tccatttgacttagattatgca

SEQ ID NO: 22769 - DNA, 22 bp, Artificial Sequence
  chemically synthesized
ccatttgacttagattatgcat

SEQ ID NO: 22770 - DNA, 22 bp, Artificial Sequence
  chemically synthesized
catttgacttagattatgcatt

SEQ ID NO: 22771 - DNA, 22 bp, Artificial Sequence
  chemically synthesized
gacttagattatgcatttgttt

SEQ ID NO: 22772 - DNA, 22 bp, Artificial Sequence
  chemically synthesized
acttagattatgcatttgtttc

SEQ ID NO: 22773 - DNA, 22 bp, Artificial Sequence
  chemically synthesized
agattatgcatttgtttcaaaa

SEQ ID NO: 22774 - DNA, 22 bp, Artificial Sequence
  chemically synthesized
gattatgcatttgtttcaaaat

SEQ ID NO: 22775 - DNA, 22 bp, Artificial Sequence
  chemically synthesized
tgcatttgtttcaaaatattgg

SEQ ID NO: 22776 - DNA, 22 bp, Artificial Sequence
  chemically synthesized
gtttcaaaatattgggctctga

SEQ ID NO: 22777 - DNA, 22 bp, Artificial Sequence
  chemically synthesized
tttcaaaatattgggctctgat

SEQ ID NO: 22778 - DNA, 22 bp, Artificial Sequence
  chemically synthesized
caaaatattgggctctgattcc

SEQ ID NO: 22779 - DNA, 22 bp, Artificial Sequence
  chemically synthesized
aaaatattgggctctgattcct

SEQ ID NO: 22780 - DNA, 22 bp, Artificial Sequence
  chemically synthesized
ggctctgattcctacagaaaaa

SEQ ID NO: 22781 - DNA, 22 bp, Artificial Sequence
  chemically synthesized
tgattcctacagaaaaactcag

SEQ ID NO: 22782 - DNA, 22 bp, Artificial Sequence
  chemically synthesized
attcctacagaaaaactcagga

SEQ ID NO: 22783 - DNA, 22 bp, Artificial Sequence
  chemically synthesized
ctacagaaaaactcaggatgat

SEQ ID NO: 22784 - DNA, 22 bp, Artificial Sequence
  chemically synthesized
cagaaaaactcaggatgatgtt

SEQ ID NO: 22785 - DNA, 22 bp, Artificial Sequence
  chemically synthesized
aggatgatgttcaattatttct

SEQ ID NO: 22786 - DNA, 22 bp, Artificial Sequence
  chemically synthesized
aattatttcttctgcctttaaa

SEQ ID NO: 22787 - DNA, 22 bp, Artificial Sequence
  chemically synthesized
tttcttctgcctttaaacagaa

SEQ ID NO: 22788 - DNA, 22 bp, Artificial Sequence
  chemically synthesized
cttctgcctttaaacagaagaa

SEQ ID NO: 22789 - DNA, 22 bp, Artificial Sequence
  chemically synthesized
ttctgcctttaaacagaagaat

SEQ ID NO: 22790 - DNA, 22 bp, Artificial Sequence
  chemically synthesized
ctgcctttaaacagaagaataa

SEQ ID NO: 22791 - DNA, 22 bp, Artificial Sequence
  chemically synthesized
tgcctttaaacagaagaataat

SEQ ID NO: 22792 - DNA, 22 bp, Artificial Sequence
  chemically synthesized
cctttaaacagaagaataattc

SEQ ID NO: 22793 - DNA, 22 bp, Artificial Sequence
  chemically synthesized
taaacagaagaataattcaatt

SEQ ID NO: 22794 - DNA, 22 bp, Artificial Sequence
  chemically synthesized
aaacagaagaataattcaatta

SEQ ID NO: 22795 - DNA, 22 bp, Artificial Sequence
  chemically synthesized
aacagaagaataattcaattac

SEQ ID NO: 22796 - DNA, 22 bp, Artificial Sequence
  chemically synthesized
aattaccaagaatactatttta

SEQ ID NO: 22797 - DNA, 22 bp, Artificial Sequence
  chemically synthesized
ccaagaatactattttaaaaat

SEQ ID NO: 22798 - DNA, 22 bp, Artificial Sequence
  chemically synthesized
ttttaaaaattattaaatattt

SEQ ID NO: 22799 - DNA, 22 bp, Artificial Sequence
  chemically synthesized
taaaaattattaaatatttata

SEQ ID NO: 22800 - DNA, 22 bp, Artificial Sequence
  chemically synthesized
aaaaattattaaatatttatag

SEQ ID NO: 22801 - DNA, 22 bp, Artificial Sequence
  chemically synthesized
aaaattattaaatatttatagc

SEQ ID NO: 22802 - DNA, 22 bp, Artificial Sequence
  chemically synthesized
ttaaatatttatagccttatat

SEQ ID NO: 22803 - DNA, 22 bp, Artificial Sequence
  chemically synthesized
aatatttatagccttatattca

SEQ ID NO: 22804 - DNA, 22 bp, Artificial Sequence
  chemically synthesized
atagccttatattcaaacttag

SEQ ID NO: 22805 - DNA, 22 bp, Artificial Sequence
  chemically synthesized
tagccttatattcaaacttaga

SEQ ID NO: 22806 - DNA, 22 bp, Artificial Sequence
  chemically synthesized
atattcaaacttagataatatc

SEQ ID NO: 22807 - DNA, 22 bp, Artificial Sequence
  chemically synthesized
tattcaaacttagataatatct

SEQ ID NO: 22808 - DNA, 22 bp, Artificial Sequence
  chemically synthesized
aaacttagataatatctaatac

SEQ ID NO: 22809 - DNA, 22 bp, Artificial Sequence
  chemically synthesized
agataatatctaatactctttt

SEQ ID NO: 22810 - DNA, 22 bp, Artificial Sequence
  chemically synthesized
gataatatctaatactctttta

SEQ ID NO: 22811 - DNA, 22 bp, Artificial Sequence
  chemically synthesized
atactcttttagtgtctatcaa

SEQ ID NO: 22812 - DNA, 22 bp, Artificial Sequence
  chemically synthesized
ttttagtgtctatcaacagcaa

SEQ ID NO: 22813 - DNA, 22 bp, Artificial Sequence
  chemically synthesized
ttagtgtctatcaacagcaacc

SEQ ID NO: 22814 - DNA, 22 bp, Artificial Sequence
  chemically synthesized
tagtgtctatcaacagcaacca

SEQ ID NO: 22815 - DNA, 22 bp, Artificial Sequence
  chemically synthesized
agtgtctatcaacagcaaccaa

SEQ ID NO: 22816 - DNA, 22 bp, Artificial Sequence
  chemically synthesized
gtgtctatcaacagcaaccaag

SEQ ID NO: 22817 - DNA, 22 bp, Artificial Sequence
  chemically synthesized
tcaacagcaaccaagaagacag

SEQ ID NO: 22818 - DNA, 22 bp, Artificial Sequence
  chemically synthesized
aaatgaaaataaatataaatac

SEQ ID NO: 22819 - DNA, 22 bp, Artificial Sequence
  chemically synthesized
tatttatgagatcaacagcaca

SEQ ID NO: 22820 - DNA, 22 bp, Artificial Sequence
  chemically synthesized
tttatgagatcaacagcacagg

SEQ ID NO: 22821 - DNA, 22 bp, Artificial Sequence
  chemically synthesized
atgagatcaacagcacaggttt

SEQ ID NO: 22822 - DNA, 22 bp, Artificial Sequence
  chemically synthesized
tgagatcaacagcacaggtttt

SEQ ID NO: 22823 - DNA, 22 bp, Artificial Sequence
  chemically synthesized
tgtggtttttaaataaagcata

SEQ ID NO: 22824 - DNA, 22 bp, Artificial Sequence
  chemically synthesized
gtggtttttaaataaagcatag

SEQ ID NO: 22825 - DNA, 22 bp, Artificial Sequence
  chemically synthesized
tggtttttaaataaagcatagt

SEQ ID NO: 22826 - DNA, 22 bp, Artificial Sequence
  chemically synthesized
ttaaataaagcatagtgcaatg

SEQ ID NO: 22827 - DNA, 22 bp, Artificial Sequence
  chemically synthesized
taaataaagcatagtgcaatgg

SEQ ID NO: 22828 - DNA, 22 bp, Artificial Sequence
  chemically synthesized
aaataaagcatagtgcaatgga

SEQ ID NO: 22829 - DNA, 22 bp, Artificial Sequence
  chemically synthesized
aataaagcatagtgcaatggat

SEQ ID NO: 22830 - DNA, 22 bp, Artificial Sequence
  chemically synthesized
tgggatagttatgaattcaatc

SEQ ID NO: 22831 - DNA, 22 bp, Artificial Sequence
  chemically synthesized
gggatagttatgaattcaatct

SEQ ID NO: 22832 - DNA, 22 bp, Artificial Sequence
  chemically synthesized
ggatagttatgaattcaatctt

SEQ ID NO: 22833 - DNA, 22 bp, Artificial Sequence
  chemically synthesized
tgaattcaatcttcaaccctat

SEQ ID NO: 22834 - DNA, 22 bp, Artificial Sequence
  chemically synthesized
aatcttcaaccctattctgtga

SEQ ID NO: 22835 - DNA, 22 bp, Artificial Sequence
  chemically synthesized
caaccctattctgtgaagtttc

SEQ ID NO: 22836 - DNA, 22 bp, Artificial Sequence
  chemically synthesized
aaccctattctgtgaagtttca

SEQ ID NO: 22837 - DNA, 22 bp, Artificial Sequence
  chemically synthesized
ttctgtgaagtttcagtcactc

SEQ ID NO: 22838 - DNA, 22 bp, Artificial Sequence
  chemically synthesized
tgtgaagtttcagtcactctaa

SEQ ID NO: 22839 - DNA, 22 bp, Artificial Sequence
  chemically synthesized
tgaagtttcagtcactctaagt

SEQ ID NO: 22840 - DNA, 22 bp, Artificial Sequence
  chemically synthesized
cagtcactctaagttactttgc

SEQ ID NO: 22841 - DNA, 22 bp, Artificial Sequence
  chemically synthesized
agtcactctaagttactttgca

SEQ ID NO: 22842 - DNA, 22 bp, Artificial Sequence
  chemically synthesized
taagttactttgcactttcctt

SEQ ID NO: 22843 - DNA, 22 bp, Artificial Sequence
  chemically synthesized
agttactttgcactttccttag

SEQ ID NO: 22844 - DNA, 22 bp, Artificial Sequence
  chemically synthesized
ctttgcactttccttagtgcgc

SEQ ID NO: 22845 - DNA, 22 bp, Artificial Sequence
  chemically synthesized
tgcactttccttagtgcgcaaa

SEQ ID NO: 22846 - DNA, 22 bp, Artificial Sequence
  chemically synthesized
gcactttccttagtgcgcaaaa

SEQ ID NO: 22847 - DNA, 22 bp, Artificial Sequence
  chemically synthesized
cactttccttagtgcgcaaaag

SEQ ID NO: 22848 - DNA, 22 bp, Artificial Sequence
  chemically synthesized
tccttagtgcgcaaaagaaaat

SEQ ID NO: 22849 - DNA, 22 bp, Artificial Sequence
  chemically synthesized
ccttagtgcgcaaaagaaaatt

SEQ ID NO: 22850 - DNA, 22 bp, Artificial Sequence
  chemically synthesized
cttagtgcgcaaaagaaaatta

SEQ ID NO: 22851 - DNA, 22 bp, Artificial Sequence
  chemically synthesized
agtgcgcaaaagaaaattacag

SEQ ID NO: 22852 - DNA, 22 bp, Artificial Sequence
  chemically synthesized
gtgcgcaaaagaaaattacagt

SEQ ID NO: 22853 - DNA, 22 bp, Artificial Sequence
  chemically synthesized
cagtcactaaacaattctgacc

SEQ ID NO: 22854 - DNA, 22 bp, Artificial Sequence
  chemically synthesized
aacaattctgaccttttttttt

SEQ ID NO: 22855 - DNA, 22 bp, Artificial Sequence
  chemically synthesized
tgacctttttttttttttacct

SEQ ID NO: 22856 - DNA, 22 bp, Artificial Sequence
  chemically synthesized
acctttttttttttttacctag

SEQ ID NO: 22857 - DNA, 22 bp, Artificial Sequence
  chemically synthesized
tttttttttttacctaggatgt

SEQ ID NO: 22858 - DNA, 22 bp, Artificial Sequence
  chemically synthesized
ttttttttttacctaggatgtt

SEQ ID NO: 22859 - DNA, 22 bp, Artificial Sequence
  chemically synthesized
tttttttttacctaggatgttt

SEQ ID NO: 22860 - DNA, 22 bp, Artificial Sequence
  chemically synthesized
ttttttttacctaggatgtttg

SEQ ID NO: 22861 - DNA, 22 bp, Artificial Sequence
  chemically synthesized
tttttttacctaggatgtttga

SEQ ID NO: 22862 - DNA, 22 bp, Artificial Sequence
  chemically synthesized
ttttttacctaggatgtttgaa

SEQ ID NO: 22863 - DNA, 22 bp, Artificial Sequence
  chemically synthesized
tttttacctaggatgtttgaat

SEQ ID NO: 22864 - DNA, 22 bp, Artificial Sequence
  chemically synthesized
ttttacctaggatgtttgaatt

SEQ ID NO: 22865 - DNA, 22 bp, Artificial Sequence
  chemically synthesized
tttacctaggatgtttgaattt

SEQ ID NO: 22866 - DNA, 22 bp, Artificial Sequence
  chemically synthesized
ttacctaggatgtttgaatttt

SEQ ID NO: 22867 - DNA, 22 bp, Artificial Sequence
  chemically synthesized
tacctaggatgtttgaatttta

SEQ ID NO: 22868 - DNA, 22 bp, Artificial Sequence
  chemically synthesized
acctaggatgtttgaattttat

SEQ ID NO: 22869 - DNA, 22 bp, Artificial Sequence
  chemically synthesized
cctaggatgtttgaattttatt

SEQ ID NO: 22870 - DNA, 22 bp, Artificial Sequence
  chemically synthesized
ggatgtttgaattttattaata

SEQ ID NO: 22871 - DNA, 22 bp, Artificial Sequence
  chemically synthesized
gaattttattaataagataacc

SEQ ID NO: 22872 - DNA, 22 bp, Artificial Sequence
  chemically synthesized
aattttattaataagataacct

SEQ ID NO: 22873 - DNA, 22 bp, Artificial Sequence
  chemically synthesized
tattaataagataaccttgtaa

SEQ ID NO: 22874 - DNA, 22 bp, Artificial Sequence
  chemically synthesized
attaataagataaccttgtaag

SEQ ID NO: 22875 - DNA, 22 bp, Artificial Sequence
  chemically synthesized
ttaataagataaccttgtaaga

SEQ ID NO: 22876 - DNA, 22 bp, Artificial Sequence
  chemically synthesized
ataagataaccttgtaagactt

SEQ ID NO: 22877 - DNA, 22 bp, Artificial Sequence
  chemically synthesized
gtaagacttcacaaatacaaaa

SEQ ID NO: 22878 - DNA, 22 bp, Artificial Sequence
  chemically synthesized
taagacttcacaaatacaaaat

SEQ ID NO: 22879 - DNA, 22 bp, Artificial Sequence
  chemically synthesized
cacaaatacaaaatactatgcc

SEQ ID NO: 22880 - DNA, 22 bp, Artificial Sequence
  chemically synthesized
acaaatacaaaatactatgcca

SEQ ID NO: 22881 - DNA, 22 bp, Artificial Sequence
  chemically synthesized
tgccattttagaaataaatgcc

SEQ ID NO: 22882 - DNA, 22 bp, Artificial Sequence
  chemically synthesized
tagaaataaatgccaaaataat

SEQ ID NO: 22883 - DNA, 22 bp, Artificial Sequence
  chemically synthesized
agaaataaatgccaaaataatt

SEQ ID NO: 22884 - DNA, 22 bp, Artificial Sequence
  chemically synthesized
gaaataaatgccaaaataattc

SEQ ID NO: 22885 - DNA, 22 bp, Artificial Sequence
  chemically synthesized
tttaaagatgcagagtttacta

SEQ ID NO: 22886 - DNA, 22 bp, Artificial Sequence
  chemically synthesized
taaagatgcagagtttactaaa

SEQ ID NO: 22887 - DNA, 22 bp, Artificial Sequence
  chemically synthesized
aaagatgcagagtttactaaaa

SEQ ID NO: 22888 - DNA, 22 bp, Artificial Sequence
  chemically synthesized
aagatgcagagtttactaaaac

SEQ ID NO: 22889 - DNA, 22 bp, Artificial Sequence
  chemically synthesized
actaaaactttattttactggg

SEQ ID NO: 22890 - DNA, 22 bp, Artificial Sequence
  chemically synthesized
ctaaaactttattttactggga

SEQ ID NO: 22891 - DNA, 22 bp, Artificial Sequence
  chemically synthesized
aaactttattttactgggaaaa

SEQ ID NO: 22892 - DNA, 22 bp, Artificial Sequence
  chemically synthesized
tattttactgggaaaatagaat

SEQ ID NO: 22893 - DNA, 22 bp, Artificial Sequence
  chemically synthesized
attttactgggaaaatagaata

SEQ ID NO: 22894 - DNA, 22 bp, Artificial Sequence
  chemically synthesized
ttttactgggaaaatagaataa

SEQ ID NO: 22895 - DNA, 22 bp, Artificial Sequence
  chemically synthesized
tactgggaaaatagaataaaag

SEQ ID NO: 22896 - DNA, 22 bp, Artificial Sequence
  chemically synthesized
actgggaaaatagaataaaagt

SEQ ID NO: 22897 - DNA, 22 bp, Artificial Sequence
  chemically synthesized
ctgggaaaatagaataaaagtt

SEQ ID NO: 22898 - DNA, 22 bp, Artificial Sequence
  chemically synthesized
ggaaaatagaataaaagttgaa

SEQ ID NO: 22899 - DNA, 22 bp, Artificial Sequence
  chemically synthesized
aacaatagaaaaatggatttct

SEQ ID NO: 22900 - DNA, 22 bp, Artificial Sequence
  chemically synthesized
cttacgtgcatctcgacgaaac

SEQ ID NO: 22901 - DNA, 22 bp, Artificial Sequence
  chemically synthesized
ttacgtgcatctcgacgaaaca

SEQ ID NO: 22902 - DNA, 22 bp, Artificial Sequence
  chemically synthesized
acgtgcatctcgacgaaacaca

SEQ ID NO: 22903 - DNA, 22 bp, Artificial Sequence
  chemically synthesized
cgtgcatctcgacgaaacacac

SEQ ID NO: 22904 - DNA, 22 bp, Artificial Sequence
  chemically synthesized
gacgaaacacacccctggaata

SEQ ID NO: 22905 - DNA, 22 bp, Artificial Sequence
  chemically synthesized
gaataagccgagctaaagagaa

SEQ ID NO: 22906 - DNA, 22 bp, Artificial Sequence
  chemically synthesized
aagagaaaaagaagggaaataa

SEQ ID NO: 22907 - DNA, 22 bp, Artificial Sequence
  chemically synthesized
cccacttcattgtgccaaaggc

SEQ ID NO: 22908 - DNA, 22 bp, Artificial Sequence
  chemically synthesized
cattgtgccaaaggcgtgtggg

SEQ ID NO: 22909 - DNA, 22 bp, Artificial Sequence
  chemically synthesized
attgtgccaaaggcgtgtgggg

SEQ ID NO: 22910 - DNA, 22 bp, Artificial Sequence
  chemically synthesized
tgccaaaggcgtgtggggttga

SEQ ID NO: 22911 - DNA, 22 bp, Artificial Sequence
  chemically synthesized
acagaagagaaaagctaggaca

SEQ ID NO: 22912 - DNA, 22 bp, Artificial Sequence
  chemically synthesized
ggacaaacggagggaaattagc

SEQ ID NO: 22913 - DNA, 20 bp, Artificial Sequence
  chemically synthesized
aataaatttacccaacaaaa

SEQ ID NO: 22914 - DNA, 20 bp, Artificial Sequence
  chemically synthesized
aatctcttaaaatcataaaa

SEQ ID NO: 22915 - DNA, 20 bp, Artificial Sequence
  chemically synthesized
aaatcataaaaaagtaaaat

SEQ ID NO: 22916 - DNA, 20 bp, Artificial Sequence
  chemically synthesized
gtaaaattagcttttaaaaa

SEQ ID NO: 22917 - DNA, 20 bp, Artificial Sequence
  chemically synthesized
taaaattagcttttaaaaac

SEQ ID NO: 22918 - DNA, 20 bp, Artificial Sequence
  chemically synthesized
aattagcttttaaaaacagg

SEQ ID NO: 22919 - DNA, 20 bp, Artificial Sequence
  chemically synthesized
ttaaaaacaggtagtcacca

SEQ ID NO: 22920 - DNA, 20 bp, Artificial Sequence
  chemically synthesized
tcaccatagcattgaatgtg

SEQ ID NO: 22921 - DNA, 20 bp, Artificial Sequence
  chemically synthesized
tgaatgtgtagtttataata

SEQ ID NO: 22922 - DNA, 20 bp, Artificial Sequence
  chemically synthesized
gtgtagtttataatacagca

SEQ ID NO: 22923 - DNA, 20 bp, Artificial Sequence
  chemically synthesized
acaatttcaaattacctatt

SEQ ID NO: 22924 - DNA, 20 bp, Artificial Sequence
  chemically synthesized
tttcaaattacctattaagt

SEQ ID NO: 22925 - DNA, 20 bp, Artificial Sequence
  chemically synthesized
ctcatttctttgatttcatt

SEQ ID NO: 22926 - DNA, 20 bp, Artificial Sequence
  chemically synthesized
agcattgatctaactcaatg

SEQ ID NO: 22927 - DNA, 20 bp, Artificial Sequence
  chemically synthesized
attgatctaactcaatgtgg

SEQ ID NO: 22928 - DNA, 20 bp, Artificial Sequence
  chemically synthesized
gatctaactcaatgtggaag

SEQ ID NO: 22929 - DNA, 20 bp, Artificial Sequence
  chemically synthesized
atctaactcaatgtggaaga

SEQ ID NO: 22930 - DNA, 20 bp, Artificial Sequence
  chemically synthesized
gaagaaggttacattcgtgc

SEQ ID NO: 22931 - DNA, 20 bp, Artificial Sequence
  chemically synthesized
tacattcgtgcaagttaaca

SEQ ID NO: 22932 - DNA, 20 bp, Artificial Sequence
  chemically synthesized
cctaccaaccttaccttttc

SEQ ID NO: 22933 - DNA, 20 bp, Artificial Sequence
  chemically synthesized
ctaccaaccttaccttttct

SEQ ID NO: 22934 - DNA, 20 bp, Artificial Sequence
  chemically synthesized
taccttttctgggcaaatat

SEQ ID NO: 22935 - DNA, 20 bp, Artificial Sequence
  chemically synthesized
tgggcaaatattggtatata

SEQ ID NO: 22936 - DNA, 20 bp, Artificial Sequence
  chemically synthesized
ggcaaatattggtatatata

SEQ ID NO: 22937 - DNA, 20 bp, Artificial Sequence
  chemically synthesized
atattggtatatatagagtt

SEQ ID NO: 22938 - DNA, 20 bp, Artificial Sequence
  chemically synthesized
ttggtatatatagagttaag

SEQ ID NO: 22939 - DNA, 20 bp, Artificial Sequence
  chemically synthesized
atatatagagttaagaagtc

SEQ ID NO: 22940 - DNA, 20 bp, Artificial Sequence
  chemically synthesized
tatatagagttaagaagtct

SEQ ID NO: 22941 - DNA, 20 bp, Artificial Sequence
  chemically synthesized
aagaagtctaggtctgcttc

SEQ ID NO: 22942 - DNA, 20 bp, Artificial Sequence
  chemically synthesized
aagtctaggtctgcttccag

SEQ ID NO: 22943 - DNA, 20 bp, Artificial Sequence
  chemically synthesized
ggtctgcttccagaagaaaa

SEQ ID NO: 22944 - DNA, 20 bp, Artificial Sequence
  chemically synthesized
gttgcttgaaattgaaaatc

SEQ ID NO: 22945 - DNA, 20 bp, Artificial Sequence
  chemically synthesized
agataaaaatgttcacaatt

SEQ ID NO: 22946 - DNA, 20 bp, Artificial Sequence
  chemically synthesized
ccttctttttattgttcctc

SEQ ID NO: 22947 - DNA, 20 bp, Artificial Sequence
  chemically synthesized
gttcctctagttatttcctc

SEQ ID NO: 22948 - DNA, 20 bp, Artificial Sequence
  chemically synthesized
tatttcctccagaattgatc

SEQ ID NO: 22949 - DNA, 20 bp, Artificial Sequence
  chemically synthesized
atcatttgattctctatctc

SEQ ID NO: 22950 - DNA, 20 bp, Artificial Sequence
  chemically synthesized
catttgattctctatctcca

SEQ ID NO: 22951 - DNA, 20 bp, Artificial Sequence
  chemically synthesized
ctatctccagagccaaaatc

SEQ ID NO: 22952 - DNA, 20 bp, Artificial Sequence
  chemically synthesized
aaaatcaagatttgctatgt

SEQ ID NO: 22953 - DNA, 20 bp, Artificial Sequence
  chemically synthesized
gttagacgatgtaaaaattt

SEQ ID NO: 22954 - DNA, 20 bp, Artificial Sequence
  chemically synthesized
gatgtaaaaattttagccaa

SEQ ID NO: 22955 - DNA, 20 bp, Artificial Sequence
  chemically synthesized
ttttagccaatggcctcctt

SEQ ID NO: 22956 - DNA, 20 bp, Artificial Sequence
  chemically synthesized
agccaatggcctccttcagt

SEQ ID NO: 22957 - DNA, 20 bp, Artificial Sequence
  chemically synthesized
gccaatggcctccttcagtt

SEQ ID NO: 22958 - DNA, 20 bp, Artificial Sequence
  chemically synthesized
ggcctccttcagttgggaca

SEQ ID NO: 22959 - DNA, 20 bp, Artificial Sequence
  chemically synthesized
tcagttgggacatggtctta

SEQ ID NO: 22960 - DNA, 20 bp, Artificial Sequence
  chemically synthesized
gtcttaaagactttgtccat

SEQ ID NO: 22961 - DNA, 20 bp, Artificial Sequence
  chemically synthesized
aagactttgtccataagacg

SEQ ID NO: 22962 - DNA, 20 bp, Artificial Sequence
  chemically synthesized
agactttgtccataagacga

SEQ ID NO: 22963 - DNA, 20 bp, Artificial Sequence
  chemically synthesized
gactttgtccataagacgaa

SEQ ID NO: 22964 - DNA, 20 bp, Artificial Sequence
  chemically synthesized
aaaaactcaacatatttgat

SEQ ID NO: 22965 - DNA, 20 bp, Artificial Sequence
  chemically synthesized
tatgatctatcgctgcaaac

SEQ ID NO: 22966 - DNA, 20 bp, Artificial Sequence
  chemically synthesized
gctgcaaaccagtgaaatca

SEQ ID NO: 22967 - DNA, 20 bp, Artificial Sequence
  chemically synthesized
gcaaaccagtgaaatcaaag

SEQ ID NO: 22968 - DNA, 20 bp, Artificial Sequence
  chemically synthesized
aaccagtgaaatcaaagaag

SEQ ID NO: 22969 - DNA, 20 bp, Artificial Sequence
  chemically synthesized
gtgaaatcaaagaagaagaa

SEQ ID NO: 22970 - DNA, 20 bp, Artificial Sequence
  chemically synthesized
tgaaatcaaagaagaagaaa

SEQ ID NO: 22971 - DNA, 20 bp, Artificial Sequence
  chemically synthesized
aaagaagaagaaaaggaact

SEQ ID NO: 22972 - DNA, 20 bp, Artificial Sequence
  chemically synthesized
gaagaagaaaaggaactgag

SEQ ID NO: 22973 - DNA, 20 bp, Artificial Sequence
  chemically synthesized
aagaactacatataaactac

SEQ ID NO: 22974 - DNA, 20 bp, Artificial Sequence
  chemically synthesized
taaactacaagtcaaaaatg

SEQ ID NO: 22975 - DNA, 20 bp, Artificial Sequence
  chemically synthesized
aactacaagtcaaaaatgaa

SEQ ID NO: 22976 - DNA, 20 bp, Artificial Sequence
  chemically synthesized
actacaagtcaaaaatgaag

SEQ ID NO: 22977 - DNA, 20 bp, Artificial Sequence
  chemically synthesized
aagtcaaaaatgaagaggta

SEQ ID NO: 22978 - DNA, 20 bp, Artificial Sequence
  chemically synthesized
gaactcaactcaaaacttga

SEQ ID NO: 22979 - DNA, 20 bp, Artificial Sequence
  chemically synthesized
ctcaaaacttgaaagcctcc

SEQ ID NO: 22980 - DNA, 20 bp, Artificial Sequence
  chemically synthesized
aaaacttgaaagcctcctag

SEQ ID NO: 22981 - DNA, 20 bp, Artificial Sequence
  chemically synthesized
aaaaattctacttcaacaaa

SEQ ID NO: 22982 - DNA, 20 bp, Artificial Sequence
  chemically synthesized
tcaacaaaaagtgaaatatt

SEQ ID NO: 22983 - DNA, 20 bp, Artificial Sequence
  chemically synthesized
acaaaaagtgaaatatttag

SEQ ID NO: 22984 - DNA, 20 bp, Artificial Sequence
  chemically synthesized
aaaaagtgaaatatttagaa

SEQ ID NO: 22985 - DNA, 20 bp, Artificial Sequence
  chemically synthesized
tcaaaatcaacctgaaactc

SEQ ID NO: 22986 - DNA, 20 bp, Artificial Sequence
  chemically synthesized
acctgaaactccagaacacc

SEQ ID NO: 22987 - DNA, 20 bp, Artificial Sequence
  chemically synthesized
tgaaactccagaacacccag

SEQ ID NO: 22988 - DNA, 20 bp, Artificial Sequence
  chemically synthesized
cccagaagtaacttcactta

SEQ ID NO: 22989 - DNA, 20 bp, Artificial Sequence
  chemically synthesized
gaagtaacttcacttaaagt

SEQ ID NO: 22990 - DNA, 20 bp, Artificial Sequence
  chemically synthesized
gtaacttcacttaaagtaag

SEQ ID NO: 22991 - DNA, 20 bp, Artificial Sequence
  chemically synthesized
cttaaagtaagtagaaaata

SEQ ID NO: 22992 - DNA, 20 bp, Artificial Sequence
  chemically synthesized
taaagtaagtagaaaataaa

SEQ ID NO: 22993 - DNA, 20 bp, Artificial Sequence
  chemically synthesized
aaagtaagtagaaaataaag

SEQ ID NO: 22994 - DNA, 20 bp, Artificial Sequence
  chemically synthesized
aagtaagtagaaaataaaga

SEQ ID NO: 22995 - DNA, 20 bp, Artificial Sequence
  chemically synthesized
tcatgtttatgttttcaatg

SEQ ID NO: 22996 - DNA, 20 bp, Artificial Sequence
  chemically synthesized
cttttaaaaaaaatatttct

SEQ ID NO: 22997 - DNA, 20 bp, Artificial Sequence
  chemically synthesized
ttttaaaaaaaatatttcta

SEQ ID NO: 22998 - DNA, 20 bp, Artificial Sequence
  chemically synthesized
gttgaaatacttttttttcc

SEQ ID NO: 22999 - DNA, 20 bp, Artificial Sequence
  chemically synthesized
tttccaagaaaaataatctc

SEQ ID NO: 23000 - DNA, 20 bp, Artificial Sequence
  chemically synthesized
aaatttcctattataatttc

SEQ ID NO: 23001 - DNA, 20 bp, Artificial Sequence
  chemically synthesized
ttcctattataatttcaagt

SEQ ID NO: 23002 - DNA, 20 bp, Artificial Sequence
  chemically synthesized
tttatatgaaaattacaaat

SEQ ID NO: 23003 - DNA, 20 bp, Artificial Sequence
  chemically synthesized
atcggttaaattatacaatc

SEQ ID NO: 23004 - DNA, 20 bp, Artificial Sequence
  chemically synthesized
tacactattgtaaattactg

SEQ ID NO: 23005 - DNA, 20 bp, Artificial Sequence
  chemically synthesized
acactattgtaaattactga

SEQ ID NO: 23006 - DNA, 20 bp, Artificial Sequence
  chemically synthesized
tattgtaaattactgaaggt

SEQ ID NO: 23007 - DNA, 20 bp, Artificial Sequence
  chemically synthesized
aattactgaaggtaagtaaa

SEQ ID NO: 23008 - DNA, 20 bp, Artificial Sequence
  chemically synthesized
aaaaatttaaaactattctc

SEQ ID NO: 23009 - DNA, 20 bp, Artificial Sequence
  chemically synthesized
ctattctccagtgtttaaaa

SEQ ID NO: 23010 - DNA, 20 bp, Artificial Sequence
  chemically synthesized
ttaaaacagattaaataata

SEQ ID NO: 23011 - DNA, 20 bp, Artificial Sequence
  chemically synthesized
agattaaataatacagtaaa

SEQ ID NO: 23012 - DNA, 20 bp, Artificial Sequence
  chemically synthesized
aaataatacagtaaatggaa

SEQ ID NO: 23013 - DNA, 20 bp, Artificial Sequence
  chemically synthesized
ttattcatatgaaaatatgc

SEQ ID NO: 23014 - DNA, 20 bp, Artificial Sequence
  chemically synthesized
tattcatatgaaaatatgct

SEQ ID NO: 23015 - DNA, 20 bp, Artificial Sequence
  chemically synthesized
tgggctttttcttttaattg

SEQ ID NO: 23016 - DNA, 20 bp, Artificial Sequence
  chemically synthesized
tttttcttttaattgaagtt

SEQ ID NO: 23017 - DNA, 20 bp, Artificial Sequence
  chemically synthesized
aagttcagaaaatcaaattt

SEQ ID NO: 23018 - DNA, 20 bp, Artificial Sequence
  chemically synthesized
gttcagaaaatcaaatttta

SEQ ID NO: 23019 - DNA, 20 bp, Artificial Sequence
  chemically synthesized
agaaaatcaaattttagaga

SEQ ID NO: 23020 - DNA, 20 bp, Artificial Sequence
  chemically synthesized
tacaatttaaataaaatgtt

SEQ ID NO: 23021 - DNA, 20 bp, Artificial Sequence
  chemically synthesized
acaatttaaataaaatgtta

SEQ ID NO: 23022 - DNA, 20 bp, Artificial Sequence
  chemically synthesized
caaaaatatgtgctatttga

SEQ ID NO: 23023 - DNA, 20 bp, Artificial Sequence
  chemically synthesized
aaatatgtgctatttgaaag

SEQ ID NO: 23024 - DNA, 20 bp, Artificial Sequence
  chemically synthesized
gctatttgaaagaagcatac

SEQ ID NO: 23025 - DNA, 20 bp, Artificial Sequence
  chemically synthesized
ctatttgaaagaagcataca

SEQ ID NO: 23026 - DNA, 20 bp, Artificial Sequence
  chemically synthesized
tatttgaaagaagcatacaa

SEQ ID NO: 23027 - DNA, 20 bp, Artificial Sequence
  chemically synthesized
atttgaaagaagcatacaag

SEQ ID NO: 23028 - DNA, 20 bp, Artificial Sequence
  chemically synthesized
tgaaagaagcatacaagggg

SEQ ID NO: 23029 - DNA, 20 bp, Artificial Sequence
  chemically synthesized
gaaagaagcatacaagggga

SEQ ID NO: 23030 - DNA, 20 bp, Artificial Sequence
  chemically synthesized
tcatttttcaaatccattat

SEQ ID NO: 23031 - DNA, 20 bp, Artificial Sequence
  chemically synthesized
ccattattagtttaaaaatt

SEQ ID NO: 23032 - DNA, 20 bp, Artificial Sequence
  chemically synthesized
tttaaaaatttagattatga

SEQ ID NO: 23033 - DNA, 20 bp, Artificial Sequence
  chemically synthesized
tttagattatgatagtgtta

SEQ ID NO: 23034 - DNA, 20 bp, Artificial Sequence
  chemically synthesized
ttagattatgatagtgttac

SEQ ID NO: 23035 - DNA, 20 bp, Artificial Sequence
  chemically synthesized
atagtgttacaggaaattaa

SEQ ID NO: 23036 - DNA, 20 bp, Artificial Sequence
  chemically synthesized
gttacaggaaattaatagaa

SEQ ID NO: 23037 - DNA, 20 bp, Artificial Sequence
  chemically synthesized
caggaaattaatagaaaaga

SEQ ID NO: 23038 - DNA, 20 bp, Artificial Sequence
  chemically synthesized
ggaaattaatagaaaagaaa

SEQ ID NO: 23039 - DNA, 20 bp, Artificial Sequence
  chemically synthesized
gaaattaatagaaaagaaag

SEQ ID NO: 23040 - DNA, 20 bp, Artificial Sequence
  chemically synthesized
ttaatagaaaagaaagagga

SEQ ID NO: 23041 - DNA, 20 bp, Artificial Sequence
  chemically synthesized
accaacctactctctatatc

SEQ ID NO: 23042 - DNA, 20 bp, Artificial Sequence
  chemically synthesized
tctctatatccagacttttg

SEQ ID NO: 23043 - DNA, 20 bp, Artificial Sequence
  chemically synthesized
ccagacttttgtagaaaaac

SEQ ID NO: 23044 - DNA, 20 bp, Artificial Sequence
  chemically synthesized
tttgtagaaaaacaagataa

SEQ ID NO: 23045 - DNA, 20 bp, Artificial Sequence
  chemically synthesized
aaaacaagataatagcatca

SEQ ID NO: 23046 - DNA, 20 bp, Artificial Sequence
  chemically synthesized
atagcatcaaagaccttctc

SEQ ID NO: 23047 - DNA, 20 bp, Artificial Sequence
  chemically synthesized
caaagaccttctccagaccg

SEQ ID NO: 23048 - DNA, 20 bp, Artificial Sequence
  chemically synthesized
agaccttctccagaccgtgg

SEQ ID NO: 23049 - DNA, 20 bp, Artificial Sequence
  chemically synthesized
aatataaacaattaaaccaa

SEQ ID NO: 23050 - DNA, 20 bp, Artificial Sequence
  chemically synthesized
aaacaattaaaccaacagca

SEQ ID NO: 23051 - DNA, 20 bp, Artificial Sequence
  chemically synthesized
ccaacagcatagtcaaataa

SEQ ID NO: 23052 - DNA, 20 bp, Artificial Sequence
  chemically synthesized
gcatagtcaaataaaagaaa

SEQ ID NO: 23053 - DNA, 20 bp, Artificial Sequence
  chemically synthesized
aaataaaagaaatagaaaat

SEQ ID NO: 23054 - DNA, 20 bp, Artificial Sequence
  chemically synthesized
aataaaagaaatagaaaatc

SEQ ID NO: 23055 - DNA, 20 bp, Artificial Sequence
  chemically synthesized
aaagaaatagaaaatcaggt

SEQ ID NO: 23056 - DNA, 20 bp, Artificial Sequence
  chemically synthesized
aaatagaaaatcaggtaagt

SEQ ID NO: 23057 - DNA, 20 bp, Artificial Sequence
  chemically synthesized
caggtaagtcagtattttaa

SEQ ID NO: 23058 - DNA, 20 bp, Artificial Sequence
  chemically synthesized
ggtatgtcccatctttcaca

SEQ ID NO: 23059 - DNA, 20 bp, Artificial Sequence
  chemically synthesized
gtatgtcccatctttcacac

SEQ ID NO: 23060 - DNA, 20 bp, Artificial Sequence
  chemically synthesized
tgaatcctaaaattatttac

SEQ ID NO: 23061 - DNA, 20 bp, Artificial Sequence
  chemically synthesized
aattatttacaagctttaac

SEQ ID NO: 23062 - DNA, 20 bp, Artificial Sequence
  chemically synthesized
acaagctttaactggatcat

SEQ ID NO: 23063 - DNA, 20 bp, Artificial Sequence
  chemically synthesized
catgagtaaaattatcacat

SEQ ID NO: 23064 - DNA, 20 bp, Artificial Sequence
  chemically synthesized
cagcataactgttaaaattg

SEQ ID NO: 23065 - DNA, 20 bp, Artificial Sequence
  chemically synthesized
agcataactgttaaaattgc

SEQ ID NO: 23066 - DNA, 20 bp, Artificial Sequence
  chemically synthesized
tgttaaaattgcaggctctg

SEQ ID NO: 23067 - DNA, 20 bp, Artificial Sequence
  chemically synthesized
aactacctgcatttaaacca

SEQ ID NO: 23068 - DNA, 20 bp, Artificial Sequence
  chemically synthesized
tacttcacccctttatctct

SEQ ID NO: 23069 - DNA, 20 bp, Artificial Sequence
  chemically synthesized
gtttcctcacatatactaca

SEQ ID NO: 23070 - DNA, 20 bp, Artificial Sequence
  chemically synthesized
atatactacaaagataataa

SEQ ID NO: 23071 - DNA, 20 bp, Artificial Sequence
  chemically synthesized
aaagataataacagaactta

SEQ ID NO: 23072 - DNA, 20 bp, Artificial Sequence
  chemically synthesized
aagataataacagaacttat

SEQ ID NO: 23073 - DNA, 20 bp, Artificial Sequence
  chemically synthesized
agaacttataggattattgt

SEQ ID NO: 23074 - DNA, 20 bp, Artificial Sequence
  chemically synthesized
taagaaaaaaaattaattca

SEQ ID NO: 23075 - DNA, 20 bp, Artificial Sequence
  chemically synthesized
gaaaaaaaattaattcatag

SEQ ID NO: 23076 - DNA, 20 bp, Artificial Sequence
  chemically synthesized
catcttactaaaattcaaat

SEQ ID NO: 23077 - DNA, 20 bp, Artificial Sequence
  chemically synthesized
ctttgctcaaaaccacacaa

SEQ ID NO: 23078 - DNA, 20 bp, Artificial Sequence
  chemically synthesized
gctttccatttcactcatat

SEQ ID NO: 23079 - DNA, 20 bp, Artificial Sequence
  chemically synthesized
tttcactcatattggctctt

SEQ ID NO: 23080 - DNA, 20 bp, Artificial Sequence
  chemically synthesized
tcatattggctctttagacc

SEQ ID NO: 23081 - DNA, 20 bp, Artificial Sequence
  chemically synthesized
ttgggtaatcttggtctaaa

SEQ ID NO: 23082 - DNA, 20 bp, Artificial Sequence
  chemically synthesized
ttggtctaaagagccaatat

SEQ ID NO: 23083 - DNA, 20 bp, Artificial Sequence
  chemically synthesized
aagagccaatatgagtgaaa

SEQ ID NO: 23084 - DNA, 20 bp, Artificial Sequence
  chemically synthesized
gccaatatgagtgaaatgga

SEQ ID NO: 23085 - DNA, 20 bp, Artificial Sequence
  chemically synthesized
tgaaatggaaagctattgtg

SEQ ID NO: 23086 - DNA, 20 bp, Artificial Sequence
  chemically synthesized
gaaagctattgtgtggtttt

SEQ ID NO: 23087 - DNA, 20 bp, Artificial Sequence
  chemically synthesized
ctattgtgtggttttgagca

SEQ ID NO: 23088 - DNA, 20 bp, Artificial Sequence
  chemically synthesized
attgtgtggttttgagcaaa

SEQ ID NO: 23089 - DNA, 20 bp, Artificial Sequence
  chemically synthesized
acatgatctaatttgaattt

SEQ ID NO: 23090 - DNA, 20 bp, Artificial Sequence
  chemically synthesized
gatctaatttgaattttagt

SEQ ID NO: 23091 - DNA, 20 bp, Artificial Sequence
  chemically synthesized
gaattttagtaagatgacat

SEQ ID NO: 23092 - DNA, 20 bp, Artificial Sequence
  chemically synthesized
ttttcttacaataatcctat

SEQ ID NO: 23093 - DNA, 20 bp, Artificial Sequence
  chemically synthesized
aagttctgttattatctttg

SEQ ID NO: 23094 - DNA, 20 bp, Artificial Sequence
  chemically synthesized
attatctttgtagtatatgt

SEQ ID NO: 23095 - DNA, 20 bp, Artificial Sequence
  chemically synthesized
ttatctttgtagtatatgtg

SEQ ID NO: 23096 - DNA, 20 bp, Artificial Sequence
  chemically synthesized
gtagtatatgtgaggaaact

SEQ ID NO: 23097 - DNA, 20 bp, Artificial Sequence
  chemically synthesized
agtatatgtgaggaaactga

SEQ ID NO: 23098 - DNA, 20 bp, Artificial Sequence
  chemically synthesized
tgtgaggaaactgagagata

SEQ ID NO: 23099 - DNA, 20 bp, Artificial Sequence
  chemically synthesized
gtgaggaaactgagagataa

SEQ ID NO: 23100 - DNA, 20 bp, Artificial Sequence
  chemically synthesized
tgaggaaactgagagataaa

SEQ ID NO: 23101 - DNA, 20 bp, Artificial Sequence
  chemically synthesized
gaggaaactgagagataaag

SEQ ID NO: 23102 - DNA, 20 bp, Artificial Sequence
  chemically synthesized
aactgagagataaaggggtg

SEQ ID NO: 23103 - DNA, 20 bp, Artificial Sequence
  chemically synthesized
aggggtgaagtaatttattc

SEQ ID NO: 23104 - DNA, 20 bp, Artificial Sequence
  chemically synthesized
ggggtgaagtaatttattca

SEQ ID NO: 23105 - DNA, 20 bp, Artificial Sequence
  chemically synthesized
aatttattcaaggtcacaca

SEQ ID NO: 23106 - DNA, 20 bp, Artificial Sequence
  chemically synthesized
ttcaaggtcacacaaagttt

SEQ ID NO: 23107 - DNA, 20 bp, Artificial Sequence
  chemically synthesized
caaggtcacacaaagtttta

SEQ ID NO: 23108 - DNA, 20 bp, Artificial Sequence
  chemically synthesized
cacacaaagttttagagcca

SEQ ID NO: 23109 - DNA, 20 bp, Artificial Sequence
  chemically synthesized
ttagagccatggtttaaatg

SEQ ID NO: 23110 - DNA, 20 bp, Artificial Sequence
  chemically synthesized
tagagccatggtttaaatgc

SEQ ID NO: 23111 - DNA, 20 bp, Artificial Sequence
  chemically synthesized
agccatggtttaaatgcagg

SEQ ID NO: 23112 - DNA, 20 bp, Artificial Sequence
  chemically synthesized
tttaaatgcaggtagtttat

SEQ ID NO: 23113 - DNA, 20 bp, Artificial Sequence
  chemically synthesized
tgcaggtagtttattagctt

SEQ ID NO: 23114 - DNA, 20 bp, Artificial Sequence
  chemically synthesized
caggtagtttattagcttca

SEQ ID NO: 23115 - DNA, 20 bp, Artificial Sequence
  chemically synthesized
ttcagagcctgcaattttaa

SEQ ID NO: 23116 - DNA, 20 bp, Artificial Sequence
  chemically synthesized
tgataattttactcatgatc

SEQ ID NO: 23117 - DNA, 20 bp, Artificial Sequence
  chemically synthesized
ttttactcatgatccagtta

SEQ ID NO: 23118 - DNA, 20 bp, Artificial Sequence
  chemically synthesized
ttaaagcttgtaaataattt

SEQ ID NO: 23119 - DNA, 20 bp, Artificial Sequence
  chemically synthesized
taaagcttgtaaataatttt

SEQ ID NO: 23120 - DNA, 20 bp, Artificial Sequence
  chemically synthesized
ttgtaaataattttaggatt

SEQ ID NO: 23121 - DNA, 20 bp, Artificial Sequence
  chemically synthesized
tttaggattcagtgttttta

SEQ ID NO: 23122 - DNA, 20 bp, Artificial Sequence
  chemically synthesized
gtttttacagacctgtgtga

SEQ ID NO: 23123 - DNA, 20 bp, Artificial Sequence
  chemically synthesized
ttacagacctgtgtgaaaga

SEQ ID NO: 23124 - DNA, 20 bp, Artificial Sequence
  chemically synthesized
tacagacctgtgtgaaagat

SEQ ID NO: 23125 - DNA, 20 bp, Artificial Sequence
  chemically synthesized
cttttatttgactatgctgt

SEQ ID NO: 23126 - DNA, 20 bp, Artificial Sequence
  chemically synthesized
gttggtttaattgtttatat

SEQ ID NO: 23127 - DNA, 20 bp, Artificial Sequence
  chemically synthesized
ttgtttatattggtcttcca

SEQ ID NO: 23128 - DNA, 20 bp, Artificial Sequence
  chemically synthesized
tatattggtcttccacggtc

SEQ ID NO: 23129 - DNA, 20 bp, Artificial Sequence
  chemically synthesized
tattggtcttccacggtctg

SEQ ID NO: 23130 - DNA, 20 bp, Artificial Sequence
  chemically synthesized
tggtcttccacggtctggag

SEQ ID NO: 23131 - DNA, 20 bp, Artificial Sequence
  chemically synthesized
ggtcttccacggtctggaga

SEQ ID NO: 23132 - DNA, 20 bp, Artificial Sequence
  chemically synthesized
attatcttgtttttctacaa

SEQ ID NO: 23133 - DNA, 20 bp, Artificial Sequence
  chemically synthesized
cttgtttttctacaaaagtc

SEQ ID NO: 23134 - DNA, 20 bp, Artificial Sequence
  chemically synthesized
tttctacaaaagtctggata

SEQ ID NO: 23135 - DNA, 20 bp, Artificial Sequence
  chemically synthesized
tctacaaaagtctggatata

SEQ ID NO: 23136 - DNA, 20 bp, Artificial Sequence
  chemically synthesized
tacaaaagtctggatataga

SEQ ID NO: 23137 - DNA, 20 bp, Artificial Sequence
  chemically synthesized
aaaagtctggatatagagag

SEQ ID NO: 23138 - DNA, 20 bp, Artificial Sequence
  chemically synthesized
aaagtctggatatagagagt

SEQ ID NO: 23139 - DNA, 20 bp, Artificial Sequence
  chemically synthesized
tctggatatagagagtaggt

SEQ ID NO: 23140 - DNA, 20 bp, Artificial Sequence
  chemically synthesized
atagagagtaggttggttat

SEQ ID NO: 23141 - DNA, 20 bp, Artificial Sequence
  chemically synthesized
ctaaatttttaaactaataa

SEQ ID NO: 23142 - DNA, 20 bp, Artificial Sequence
  chemically synthesized
tggatttgaaaaatgaatat

SEQ ID NO: 23143 - DNA, 20 bp, Artificial Sequence
  chemically synthesized
ccttgtatgcttctttcaaa

SEQ ID NO: 23144 - DNA, 20 bp, Artificial Sequence
  chemically synthesized
attttctgaacttcaattaa

SEQ ID NO: 23145 - DNA, 20 bp, Artificial Sequence
  chemically synthesized
tgaacttcaattaaaagaaa

SEQ ID NO: 23146 - DNA, 20 bp, Artificial Sequence
  chemically synthesized
ttcaattaaaagaaaaagcc

SEQ ID NO: 23147 - DNA, 20 bp, Artificial Sequence
  chemically synthesized
atttaatctgttttaaacac

SEQ ID NO: 23148 - DNA, 20 bp, Artificial Sequence
  chemically synthesized
ttaatctgttttaaacactg

SEQ ID NO: 23149 - DNA, 20 bp, Artificial Sequence
  chemically synthesized
ctgttttaaacactggagaa

SEQ ID NO: 23150 - DNA, 20 bp, Artificial Sequence
  chemically synthesized
tttaactttttacttacctt

SEQ ID NO: 23151 - DNA, 20 bp, Artificial Sequence
  chemically synthesized
ttaccttcagtaatttacaa

SEQ ID NO: 23152 - DNA, 20 bp, Artificial Sequence
  chemically synthesized
tttacaatagtgtaatgaca

SEQ ID NO: 23153 - DNA, 20 bp, Artificial Sequence
  chemically synthesized
agtgtaatgacatagtgttc

SEQ ID NO: 23154 - DNA, 20 bp, Artificial Sequence
  chemically synthesized
tcatataaaatgcaaatttt

SEQ ID NO: 23155 - DNA, 20 bp, Artificial Sequence
  chemically synthesized
agtgttttcatatataacat

SEQ ID NO: 23156 - DNA, 20 bp, Artificial Sequence
  chemically synthesized
gtgttttcatatataacatt

SEQ ID NO: 23157 - DNA, 20 bp, Artificial Sequence
  chemically synthesized
tgttttcatatataacatta

SEQ ID NO: 23158 - DNA, 20 bp, Artificial Sequence
  chemically synthesized
aaactaacttgaaattataa

SEQ ID NO: 23159 - DNA, 20 bp, Artificial Sequence
  chemically synthesized
aactaacttgaaattataat

SEQ ID NO: 23160 - DNA, 20 bp, Artificial Sequence
  chemically synthesized
taataggaaattttattttc

SEQ ID NO: 23161 - DNA, 20 bp, Artificial Sequence
  chemically synthesized
ataggaaattttattttctg

SEQ ID NO: 23162 - DNA, 20 bp, Artificial Sequence
  chemically synthesized
tttctggagattatttttct

SEQ ID NO: 23163 - DNA, 20 bp, Artificial Sequence
  chemically synthesized
attatttttcttggaaaaaa

SEQ ID NO: 23164 - DNA, 20 bp, Artificial Sequence
  chemically synthesized
agtatttcaacaatgcaaca

SEQ ID NO: 23165 - DNA, 20 bp, Artificial Sequence
  chemically synthesized
atgcaacaaagtatttcaaa

SEQ ID NO: 23166 - DNA, 20 bp, Artificial Sequence
  chemically synthesized
gtatttcaaatggcatgcct

SEQ ID NO: 23167 - DNA, 20 bp, Artificial Sequence
  chemically synthesized
cttagaaatattttttttaa

SEQ ID NO: 23168 - DNA, 20 bp, Artificial Sequence
  chemically synthesized
ctttattttctacttacttt

SEQ ID NO: 23169 - DNA, 20 bp, Artificial Sequence
  chemically synthesized
ttttctacttactttaagtg

SEQ ID NO: 23170 - DNA, 20 bp, Artificial Sequence
  chemically synthesized
actttaagtgaagttacttc

SEQ ID NO: 23171 - DNA, 20 bp, Artificial Sequence
  chemically synthesized
ctttaagtgaagttacttct

SEQ ID NO: 23172 - DNA, 20 bp, Artificial Sequence
  chemically synthesized
gaagttacttctgggtgttc

SEQ ID NO: 23173 - DNA, 20 bp, Artificial Sequence
  chemically synthesized
agttacttctgggtgttctg

SEQ ID NO: 23174 - DNA, 20 bp, Artificial Sequence
  chemically synthesized
ttctgggtgttctggagttt

SEQ ID NO: 23175 - DNA, 20 bp, Artificial Sequence
  chemically synthesized
tctgggtgttctggagtttc

SEQ ID NO: 23176 - DNA, 20 bp, Artificial Sequence
  chemically synthesized
tttcaggttgattttgaatt

SEQ ID NO: 23177 - DNA, 20 bp, Artificial Sequence
  chemically synthesized
aggttgattttgaattaagt

SEQ ID NO: 23178 - DNA, 20 bp, Artificial Sequence
  chemically synthesized
tgattttgaattaagttagt

SEQ ID NO: 23179 - DNA, 20 bp, Artificial Sequence
  chemically synthesized
aaatatttcactttttgttg

SEQ ID NO: 23180 - DNA, 20 bp, Artificial Sequence
  chemically synthesized
tatttcactttttgttgaag

SEQ ID NO: 23181 - DNA, 20 bp, Artificial Sequence
  chemically synthesized
tgaagtagaattttttcttc

SEQ ID NO: 23182 - DNA, 20 bp, Artificial Sequence
  chemically synthesized
gaagtagaattttttcttct

SEQ ID NO: 23183 - DNA, 20 bp, Artificial Sequence
  chemically synthesized
agtagaattttttcttctag

SEQ ID NO: 23184 - DNA, 20 bp, Artificial Sequence
  chemically synthesized
gtagaattttttcttctagg

SEQ ID NO: 23185 - DNA, 20 bp, Artificial Sequence
  chemically synthesized
ttttcttctaggaggctttc

SEQ ID NO: 23186 - DNA, 20 bp, Artificial Sequence
  chemically synthesized
ctaggaggctttcaagtttt

SEQ ID NO: 23187 - DNA, 20 bp, Artificial Sequence
  chemically synthesized
aggctttcaagttttgagtt

SEQ ID NO: 23188 - DNA, 20 bp, Artificial Sequence
  chemically synthesized
tcaagttttgagttgagttc

SEQ ID NO: 23189 - DNA, 20 bp, Artificial Sequence
  chemically synthesized
acctcttcatttttgacttg

SEQ ID NO: 23190 - DNA, 20 bp, Artificial Sequence
  chemically synthesized
tttgacttgtagtttatatg

SEQ ID NO: 23191 - DNA, 20 bp, Artificial Sequence
  chemically synthesized
agtttatatgtagttcttct

SEQ ID NO: 23192 - DNA, 20 bp, Artificial Sequence
  chemically synthesized
ttcttcttctttgatttcac

SEQ ID NO: 23193 - DNA, 20 bp, Artificial Sequence
  chemically synthesized
tctttgatttcactggtttg

SEQ ID NO: 23194 - DNA, 20 bp, Artificial Sequence
  chemically synthesized
atttcactggtttgcagcga

SEQ ID NO: 23195 - DNA, 20 bp, Artificial Sequence
  chemically synthesized
ttgcagcgatagatcataaa

SEQ ID NO: 23196 - DNA, 20 bp, Artificial Sequence
  chemically synthesized
aaagactgatcaaatatgtt

SEQ ID NO: 23197 - DNA, 20 bp, Artificial Sequence
  chemically synthesized
tttgaaatatgtcattaatt

SEQ ID NO: 23198 - DNA, 20 bp, Artificial Sequence
  chemically synthesized
taatttggcccttcgtctta

SEQ ID NO: 23199 - DNA, 20 bp, Artificial Sequence
  chemically synthesized
ggcccttcgtcttatggaca

SEQ ID NO: 23200 - DNA, 20 bp, Artificial Sequence
  chemically synthesized
gtcttatggacaaagtcttt

SEQ ID NO: 23201 - DNA, 20 bp, Artificial Sequence
  chemically synthesized
ttaagaccatgtcccaactg

SEQ ID NO: 23202 - DNA, 20 bp, Artificial Sequence
  chemically synthesized
taagaccatgtcccaactga

SEQ ID NO: 23203 - DNA, 20 bp, Artificial Sequence
  chemically synthesized
agaccatgtcccaactgaag

SEQ ID NO: 23204 - DNA, 20 bp, Artificial Sequence
  chemically synthesized
gaccatgtcccaactgaagg

SEQ ID NO: 23205 - DNA, 20 bp, Artificial Sequence
  chemically synthesized
tcccaactgaaggaggccat

SEQ ID NO: 23206 - DNA, 20 bp, Artificial Sequence
  chemically synthesized
aatttttacatcgtctaaca

SEQ ID NO: 23207 - DNA, 20 bp, Artificial Sequence
  chemically synthesized
aacatagcaaatcttgattt

SEQ ID NO: 23208 - DNA, 20 bp, Artificial Sequence
  chemically synthesized
gcaaatcttgattttggctc

SEQ ID NO: 23209 - DNA, 20 bp, Artificial Sequence
  chemically synthesized
aaatcttgattttggctctg

SEQ ID NO: 23210 - DNA, 20 bp, Artificial Sequence
  chemically synthesized
cttgattttggctctggaga

SEQ ID NO: 23211 - DNA, 20 bp, Artificial Sequence
  chemically synthesized
tgattttggctctggagata

SEQ ID NO: 23212 - DNA, 20 bp, Artificial Sequence
  chemically synthesized
tgaattgtcttgatcaattc

SEQ ID NO: 23213 - DNA, 20 bp, Artificial Sequence
  chemically synthesized
aattgtcttgatcaattctg

SEQ ID NO: 23214 - DNA, 20 bp, Artificial Sequence
  chemically synthesized
attgtcttgatcaattctgg

SEQ ID NO: 23215 - DNA, 20 bp, Artificial Sequence
  chemically synthesized
tcaattctggaggaaataac

SEQ ID NO: 23216 - DNA, 20 bp, Artificial Sequence
  chemically synthesized
aattctggaggaaataacta

SEQ ID NO: 23217 - DNA, 20 bp, Artificial Sequence
  chemically synthesized
attctggaggaaataactag

SEQ ID NO: 23218 - DNA, 20 bp, Artificial Sequence
  chemically synthesized
ataactagaggaacaataaa

SEQ ID NO: 23219 - DNA, 20 bp, Artificial Sequence
  chemically synthesized
actagaggaacaataaaaag

SEQ ID NO: 23220 - DNA, 20 bp, Artificial Sequence
  chemically synthesized
ctagaggaacaataaaaaga

SEQ ID NO: 23221 - DNA, 20 bp, Artificial Sequence
  chemically synthesized
agaggaacaataaaaagaag

SEQ ID NO: 23222 - DNA, 20 bp, Artificial Sequence
  chemically synthesized
ttatcttgattttcaatttc

SEQ ID NO: 23223 - DNA, 20 bp, Artificial Sequence
  chemically synthesized
attttcaatttcaagcaacg

SEQ ID NO: 23224 - DNA, 20 bp, Artificial Sequence
  chemically synthesized
aacgtggaactgttttcttc

SEQ ID NO: 23225 - DNA, 20 bp, Artificial Sequence
  chemically synthesized
gtggaactgttttcttctgg

SEQ ID NO: 23226 - DNA, 20 bp, Artificial Sequence
  chemically synthesized
gaactgttttcttctggaag

SEQ ID NO: 23227 - DNA, 20 bp, Artificial Sequence
  chemically synthesized
ttttcttctggaagcagacc

SEQ ID NO: 23228 - DNA, 20 bp, Artificial Sequence
  chemically synthesized
tatatataccaatatttgcc

SEQ ID NO: 23229 - DNA, 20 bp, Artificial Sequence
  chemically synthesized
ataccaatatttgcccagaa

SEQ ID NO: 23230 - DNA, 20 bp, Artificial Sequence
  chemically synthesized
taccaatatttgcccagaaa

SEQ ID NO: 23231 - DNA, 20 bp, Artificial Sequence
  chemically synthesized
aatatttgcccagaaaaggt

SEQ ID NO: 23232 - DNA, 20 bp, Artificial Sequence
  chemically synthesized
atatttgcccagaaaaggta

SEQ ID NO: 23233 - DNA, 20 bp, Artificial Sequence
  chemically synthesized
ttgcccagaaaaggtaaggt

SEQ ID NO: 23234 - DNA, 20 bp, Artificial Sequence
  chemically synthesized
cccagaaaaggtaaggttgg

SEQ ID NO: 23235 - DNA, 20 bp, Artificial Sequence
  chemically synthesized
ccagaaaaggtaaggttggt

SEQ ID NO: 23236 - DNA, 20 bp, Artificial Sequence
  chemically synthesized
gtaaggttggtaggtgaaca

SEQ ID NO: 23237 - DNA, 20 bp, Artificial Sequence
  chemically synthesized
ggtgaacatagttaatcatt

SEQ ID NO: 23238 - DNA, 20 bp, Artificial Sequence
  chemically synthesized
atgtaaccttcttccacatt

SEQ ID NO: 23239 - DNA, 20 bp, Artificial Sequence
  chemically synthesized
aaccttcttccacattgagt

SEQ ID NO: 23240 - DNA, 20 bp, Artificial Sequence
  chemically synthesized
atcaatgctaaatgaaatca

SEQ ID NO: 23241 - DNA, 20 bp, Artificial Sequence
  chemically synthesized
ctaaatgaaatcaaagaaat

SEQ ID NO: 23242 - DNA, 20 bp, Artificial Sequence
  chemically synthesized
gaaatgagcaactaacttaa

SEQ ID NO: 23243 - DNA, 20 bp, Artificial Sequence
  chemically synthesized
aaatgagcaactaacttaat

SEQ ID NO: 23244 - DNA, 20 bp, Artificial Sequence
  chemically synthesized
aaactacacattcaatgcta

SEQ ID NO: 23245 - DNA, 20 bp, Artificial Sequence
  chemically synthesized
tggtgactacctgtttttaa

SEQ ID NO: 23246 - DNA, 20 bp, Artificial Sequence
  chemically synthesized
ttttacttttttatgatttt

SEQ ID NO: 23247 - DNA, 20 bp, Artificial Sequence
  chemically synthesized
ttacttttttatgattttaa

SEQ ID NO: 23248 - DNA, 20 bp, Artificial Sequence
  chemically synthesized
tatgattttaagagatttac

SEQ ID NO: 23249 - DNA, 20 bp, Artificial Sequence
  chemically synthesized
tcaaaaataaacttttttgt

SEQ ID NO: 23250 - DNA, 20 bp, Artificial Sequence
  chemically synthesized
caaaaataaacttttttgtt

SEQ ID NO: 23251 - DNA, 20 bp, Artificial Sequence
  chemically synthesized
gttgggtaaatttattatta

SEQ ID NO: 23252 - DNA, 20 bp, Artificial Sequence
  chemically synthesized
gtaaatttattattaaagtt

SEQ ID NO: 23253 - DNA, 20 bp, Artificial Sequence
  chemically synthesized
taaatttattattaaagttg

SEQ ID NO: 23254 - DNA, 20 bp, Artificial Sequence
  chemically synthesized
aaatttattattaaagttga

SEQ ID NO: 23255 - DNA, 20 bp, Artificial Sequence
  chemically synthesized
aatttattattaaagttgag

SEQ ID NO: 23256 - DNA, 20 bp, Artificial Sequence
  chemically synthesized
tattaaagttgaggggaaaa

SEQ ID NO: 23257 - DNA, 20 bp, Artificial Sequence
  chemically synthesized
ggggaaaaaagtaatgaatt

SEQ ID NO: 23258 - DNA, 20 bp, Artificial Sequence
  chemically synthesized
aacaggtagtcaccatagca

SEQ ID NO: 23259 - DNA, 20 bp, Artificial Sequence
  chemically synthesized
tgggcaaatattggtatata

SEQ ID NO: 23260 - DNA, 20 bp, Artificial Sequence
  chemically synthesized
gttcctctagttatttcctc

SEQ ID NO: 23261 - DNA, 20 bp, Artificial Sequence
  chemically synthesized
aagtcaaaaatgaagaggta

SEQ ID NO: 23262 - DNA, 20 bp, Artificial Sequence
  chemically synthesized
taaagtaagtagaaaataaa

SEQ ID NO: 23263 - DNA, 20 bp, Artificial Sequence
  chemically synthesized
ttcatgtttatgttttcaat

SEQ ID NO: 23264 - DNA, 20 bp, Artificial Sequence
  chemically synthesized
gaaagaagcatacaagggga

SEQ ID NO: 23265 - DNA, 20 bp, Artificial Sequence
  chemically synthesized
cacacaggtctgtaaaaaca

SEQ ID NO: 23266 - DNA, 20 bp, Artificial Sequence
  chemically synthesized
aaattatttacaagctttaa

SEQ ID NO: 23267 - DNA, 20 bp, Artificial Sequence
  chemically synthesized
ttacaagctttaactggatc

SEQ ID NO: 23268 - DNA, 20 bp, Artificial Sequence
  chemically synthesized
ctctaaaactttgtgtgacc

SEQ ID NO: 23269 - DNA, 20 bp, Artificial Sequence
  chemically synthesized
aaagataataacagaactta

SEQ ID NO: 23270 - DNA, 20 bp, Artificial Sequence
  chemically synthesized
tcttggtctaaagagccaat

SEQ ID NO: 23271 - DNA, 20 bp, Artificial Sequence
  chemically synthesized
aaagagaaacatgatctaat

SEQ ID NO: 23272 - DNA, 20 bp, Artificial Sequence
  chemically synthesized
gtaagatgacattggctgct

SEQ ID NO: 23273 - DNA, 20 bp, Artificial Sequence
  chemically synthesized
gtgaggaaactgagagataa

SEQ ID NO: 23274 - DNA, 20 bp, Artificial Sequence
  chemically synthesized
ttaaagcttgtaaataattt

SEQ ID NO: 23275 - DNA, 20 bp, Artificial Sequence
  chemically synthesized
tcttgtttttctacaaaagt

SEQ ID NO: 23276 - DNA, 20 bp, Artificial Sequence
  chemically synthesized
tctacaaaagtctggatata

SEQ ID NO: 23277 - DNA, 20 bp, Artificial Sequence
  chemically synthesized
tctaaatttttaaactaata

SEQ ID NO: 23278 - DNA, 20 bp, Artificial Sequence
  chemically synthesized
actaataatggatttgaaaa

SEQ ID NO: 23279 - DNA, 20 bp, Artificial Sequence
  chemically synthesized
aaagcccagcatattttcat

SEQ ID NO: 23280 - DNA, 20 bp, Artificial Sequence
  chemically synthesized
ttaatctgttttaaacactg

SEQ ID NO: 23281 - DNA, 20 bp, Artificial Sequence
  chemically synthesized
tactttaagtgaagttactt

SEQ ID NO: 23282 - DNA, 20 bp, Artificial Sequence
  chemically synthesized
gaagttacttctgggtgttc

SEQ ID NO: 23283 - DNA, 20 bp, Artificial Sequence
  chemically synthesized
tctggagtttcaggttgatt

SEQ ID NO: 23284 - DNA, 20 bp, Artificial Sequence
  chemically synthesized
tatttcactttttgttgaag

SEQ ID NO: 23285 - DNA, 20 bp, Artificial Sequence
  chemically synthesized
ttctaggaggctttcaagtt

SEQ ID NO: 23286 - DNA, 20 bp, Artificial Sequence
  chemically synthesized
ggaggctttcaagttttgag

SEQ ID NO: 23287 - DNA, 20 bp, Artificial Sequence
  chemically synthesized
aaaaagactgatcaaatatg

SEQ ID NO: 23288 - DNA, 20 bp, Artificial Sequence
  chemically synthesized
tgattttggctctggagata

SEQ ID NO: 23289 - DNA, 20 bp, Artificial Sequence
  chemically synthesized
tggagatagagaatcaaatg

SEQ ID NO: 23290 - DNA, 20 bp, Artificial Sequence
  chemically synthesized
attaagccgtgttaacttgc

SEQ ID NO: 23291 - DNA, 20 bp, Artificial Sequence
  chemically synthesized
gaatgtaaccttcttccaca

SEQ ID NO: 23292 - DNA, 20 bp, Artificial Sequence
  chemically synthesized
gtcaaaaataaacttttttg

SEQ ID NO: 23293 - DNA, 20 bp, Artificial Sequence
  chemically synthesized
aagttgaggggaaaaaagta

SEQ ID NO: 23294 - DNA, 20 bp, Artificial Sequence
  chemically synthesized
gaagtctaggtctgcttcca

SEQ ID NO: 23295 - DNA, 20 bp, Artificial Sequence
  chemically synthesized
tgttcctctagttatttcct

SEQ ID NO: 23296 - DNA, 20 bp, Artificial Sequence
  chemically synthesized
aaaccagtgaaatcaaagaa

SEQ ID NO: 23297 - DNA, 20 bp, Artificial Sequence
  chemically synthesized
caagtcaaaaatgaagaggt

SEQ ID NO: 23298 - DNA, 20 bp, Artificial Sequence
  chemically synthesized
caaaacttgaaagcctccta

SEQ ID NO: 23299 - DNA, 20 bp, Artificial Sequence
  chemically synthesized
agtaacttcacttaaagtaa

SEQ ID NO: 23300 - DNA, 20 bp, Artificial Sequence
  chemically synthesized
tgttgaaatacttttttttc

SEQ ID NO: 23301 - DNA, 20 bp, Artificial Sequence
  chemically synthesized
ttttccaagaaaaataatct

SEQ ID NO: 23302 - DNA, 20 bp, Artificial Sequence
  chemically synthesized
ctttttcttttaattgaagt

SEQ ID NO: 23303 - DNA, 20 bp, Artificial Sequence
  chemically synthesized
gatagtgttacaggaaatta

SEQ ID NO: 23304 - DNA, 20 bp, Artificial Sequence
  chemically synthesized
tgttacaggaaattaataga

SEQ ID NO: 23305 - DNA, 20 bp, Artificial Sequence
  chemically synthesized
ctctctatatccagactttt

SEQ ID NO: 23306 - DNA, 20 bp, Artificial Sequence
  chemically synthesized
accaacagcatagtcaaata

SEQ ID NO: 23307 - DNA, 20 bp, Artificial Sequence
  chemically synthesized
agcatagtcaaataaaagaa

SEQ ID NO: 23308 - DNA, 20 bp, Artificial Sequence
  chemically synthesized
cagaacttataggattattg

SEQ ID NO: 23309 - DNA, 20 bp, Artificial Sequence
  chemically synthesized
tattgtgtggttttgagcaa

SEQ ID NO: 23310 - DNA, 20 bp, Artificial Sequence
  chemically synthesized
gattttctgaacttcaatta

SEQ ID NO: 23311 - DNA, 20 bp, Artificial Sequence
  chemically synthesized
tttaatctgttttaaacact

SEQ ID NO: 23312 - DNA, 20 bp, Artificial Sequence
  chemically synthesized
agtatttcaaatggcatgcc

SEQ ID NO: 23313 - DNA, 20 bp, Artificial Sequence
  chemically synthesized
atatttcactttttgttgaa

SEQ ID NO: 23314 - DNA, 20 bp, Artificial Sequence
  chemically synthesized
ttgattttggctctggagat

SEQ ID NO: 23315 - DNA, 20 bp, Artificial Sequence
  chemically synthesized
ctatatataccaatatttgc

SEQ ID NO: 23316 - DNA, 20 bp, Artificial Sequence
  chemically synthesized
gatcaatgctaaatgaaatc

SEQ ID NO: 23317 - DNA, 20 bp, Artificial Sequence
  chemically synthesized
aaaaagtaaaattagctttt

SEQ ID NO: 23318 - DNA, 20 bp, Artificial Sequence
  chemically synthesized
gtctaggtctgcttccagaa

SEQ ID NO: 23319 - DNA, 20 bp, Artificial Sequence
  chemically synthesized
ccaaattaatgacatatttc

SEQ ID NO: 23320 - DNA, 20 bp, Artificial Sequence
  chemically synthesized
tatgtcacttgaactcaact

SEQ ID NO: 23321 - DNA, 20 bp, Artificial Sequence
  chemically synthesized
gtttccctaatgttatatat

SEQ ID NO: 23322 - DNA, 20 bp, Artificial Sequence
  chemically synthesized
gtaaaaagttaaaaaaaatt

SEQ ID NO: 23323 - DNA, 20 bp, Artificial Sequence
  chemically synthesized
taaaactattctccagtgtt

SEQ ID NO: 23324 - DNA, 20 bp, Artificial Sequence
  chemically synthesized
ctatatccagacttttgtag

SEQ ID NO: 23325 - DNA, 20 bp, Artificial Sequence
  chemically synthesized
catctttcacacaggtctgt

SEQ ID NO: 23326 - DNA, 20 bp, Artificial Sequence
  chemically synthesized
ctgcatttaaaccatggctc

SEQ ID NO: 23327 - DNA, 20 bp, Artificial Sequence
  chemically synthesized
agatcatgtttctctttgct

SEQ ID NO: 23328 - DNA, 20 bp, Artificial Sequence
  chemically synthesized
tatataacattagggaaaca

SEQ ID NO: 23329 - DNA, 20 bp, Artificial Sequence
  chemically synthesized
ttttttaaaagatccacatt

SEQ ID NO: 23330 - DNA, 20 bp, Artificial Sequence
  chemically synthesized
ataataaatttacccaacaa

SEQ ID NO: 23331 - DNA, 20 bp, Artificial Sequence
  chemically synthesized
taaaatcataaaaaagtaaa

SEQ ID NO: 23332 - DNA, 20 bp, Artificial Sequence
  chemically synthesized
agtcaccatagcattgaatg

SEQ ID NO: 23333 - DNA, 20 bp, Artificial Sequence
  chemically synthesized
attaagttagttgctcattt

SEQ ID NO: 23334 - DNA, 20 bp, Artificial Sequence
  chemically synthesized
gttacattcgtgcaagttaa

SEQ ID NO: 23335 - DNA, 20 bp, Artificial Sequence
  chemically synthesized
tcgtgcaagttaacacggct

SEQ ID NO: 23336 - DNA, 20 bp, Artificial Sequence
  chemically synthesized
tatagagttaagaagtctag

SEQ ID NO: 23337 - DNA, 20 bp, Artificial Sequence
  chemically synthesized
tccagaagaaaacagttcca

SEQ ID NO: 23338 - DNA, 20 bp, Artificial Sequence
  chemically synthesized
attgatcaagacaattcatc

SEQ ID NO: 23339 - DNA, 20 bp, Artificial Sequence
  chemically synthesized
ctctatctccagagccaaaa

SEQ ID NO: 23340 - DNA, 20 bp, Artificial Sequence
  chemically synthesized
aagtagaaaataaagagggt

SEQ ID NO: 23341 - DNA, 20 bp, Artificial Sequence
  chemically synthesized
aaaataaagagggttcatgt

SEQ ID NO: 23342 - DNA, 20 bp, Artificial Sequence
  chemically synthesized
atttcctattataatttcaa

SEQ ID NO: 23343 - DNA, 20 bp, Artificial Sequence
  chemically synthesized
attataatttcaagttagtt

SEQ ID NO: 23344 - DNA, 20 bp, Artificial Sequence
  chemically synthesized
aaaaatttaaaactattctc

SEQ ID NO: 23345 - DNA, 20 bp, Artificial Sequence
  chemically synthesized
aactattctccagtgtttaa

SEQ ID NO: 23346 - DNA, 20 bp, Artificial Sequence
  chemically synthesized
ttaaataatacagtaaatgg

SEQ ID NO: 23347 - DNA, 20 bp, Artificial Sequence
  chemically synthesized
tttattcatatgaaaatatg

SEQ ID NO: 23348 - DNA, 20 bp, Artificial Sequence
  chemically synthesized
attcatttttcaaatccatt

SEQ ID NO: 23349 - DNA, 20 bp, Artificial Sequence
  chemically synthesized
atccattattagtttaaaaa

SEQ ID NO: 23350 - DNA, 20 bp, Artificial Sequence
  chemically synthesized
actgaatcctaaaattattt

SEQ ID NO: 23351 - DNA, 20 bp, Artificial Sequence
  chemically synthesized
attacttcacccctttatct

SEQ ID NO: 23352 - DNA, 20 bp, Artificial Sequence
  chemically synthesized
caaagataataacagaactt

SEQ ID NO: 23353 - DNA, 20 bp, Artificial Sequence
  chemically synthesized
ttactaaaattcaaattaga

SEQ ID NO: 23354 - DNA, 20 bp, Artificial Sequence
  chemically synthesized
ctctttgctcaaaaccacac

SEQ ID NO: 23355 - DNA, 20 bp, Artificial Sequence
  chemically synthesized
actcatattggctctttaga

SEQ ID NO: 23356 - DNA, 20 bp, Artificial Sequence
  chemically synthesized
agtgaaatggaaagctattg

SEQ ID NO: 23357 - DNA, 20 bp, Artificial Sequence
  chemically synthesized
gtaatttattcaaggtcaca

SEQ ID NO: 23358 - DNA, 20 bp, Artificial Sequence
  chemically synthesized
gtcacacaaagttttagagc

SEQ ID NO: 23359 - DNA, 20 bp, Artificial Sequence
  chemically synthesized
agagccatggtttaaatgca

SEQ ID NO: 23360 - DNA, 20 bp, Artificial Sequence
  chemically synthesized
ggtttaaatgcaggtagttt

SEQ ID NO: 23361 - DNA, 20 bp, Artificial Sequence
  chemically synthesized
aattttactcatgatccagt

SEQ ID NO: 23362 - DNA, 20 bp, Artificial Sequence
  chemically synthesized
gttaaagcttgtaaataatt

SEQ ID NO: 23363 - DNA, 20 bp, Artificial Sequence
  chemically synthesized
ttgtaaataattttaggatt

SEQ ID NO: 23364 - DNA, 20 bp, Artificial Sequence
  chemically synthesized
taccattaaaatactgactt

SEQ ID NO: 23365 - DNA, 20 bp, Artificial Sequence
  chemically synthesized
ttcttttatttgactatgct

SEQ ID NO: 23366 - DNA, 20 bp, Artificial Sequence
  chemically synthesized
tttgactatgctgttggttt

SEQ ID NO: 23367 - DNA, 20 bp, Artificial Sequence
  chemically synthesized
gaaggtctttgatgctatta

SEQ ID NO: 23368 - DNA, 20 bp, Artificial Sequence
  chemically synthesized
tagagagtaggttggttata

SEQ ID NO: 23369 - DNA, 20 bp, Artificial Sequence
  chemically synthesized
atctaaatttttaaactaat

SEQ ID NO: 23370 - DNA, 20 bp, Artificial Sequence
  chemically synthesized
attggcaattccttcccctt

SEQ ID NO: 23371 - DNA, 20 bp, Artificial Sequence
  chemically synthesized
taaattgtactatctctaaa

SEQ ID NO: 23372 - DNA, 20 bp, Artificial Sequence
  chemically synthesized
tccatttactgtattattta

SEQ ID NO: 23373 - DNA, 20 bp, Artificial Sequence
  chemically synthesized
atctgttttaaacactggag

SEQ ID NO: 23374 - DNA, 20 bp, Artificial Sequence
  chemically synthesized
atagtgtaatgacatagtgt

SEQ ID NO: 23375 - DNA, 20 bp, Artificial Sequence
  chemically synthesized
tgttctagattgtataattt

SEQ ID NO: 23376 - DNA, 20 bp, Artificial Sequence
  chemically synthesized
tcatataaaatgcaaatttt

SEQ ID NO: 23377 - DNA, 20 bp, Artificial Sequence
  chemically synthesized
taataggaaattttattttc

SEQ ID NO: 23378 - DNA, 20 bp, Artificial Sequence
  chemically synthesized
gaagttacttctgggtgttc

SEQ ID NO: 23379 - DNA, 20 bp, Artificial Sequence
  chemically synthesized
ctgggtgttctggagtttca

SEQ ID NO: 23380 - DNA, 20 bp, Artificial Sequence
  chemically synthesized
aagtagaattttttcttcta

SEQ ID NO: 23381 - DNA, 20 bp, Artificial Sequence
  chemically synthesized
ttttttcttctaggaggctt

SEQ ID NO: 23382 - DNA, 20 bp, Artificial Sequence
  chemically synthesized
ttacctcttcatttttgact

SEQ ID NO: 23383 - DNA, 20 bp, Artificial Sequence
  chemically synthesized
tctcagttccttttcttctt

SEQ ID NO: 23384 - DNA, 20 bp, Artificial Sequence
  chemically synthesized
ttttcttcttctttgatttc

SEQ ID NO: 23385 - DNA, 20 bp, Artificial Sequence
  chemically synthesized
aaaaagactgatcaaatatg

SEQ ID NO: 23386 - DNA, 20 bp, Artificial Sequence
  chemically synthesized
acatcgtctaacatagcaaa

SEQ ID NO: 23387 - DNA, 20 bp, Artificial Sequence
  chemically synthesized
ctagaggaacaataaaaaga

SEQ ID NO: 23388 - DNA, 20 bp, Artificial Sequence
  chemically synthesized
cttaattgtgaacattttta

SEQ ID NO: 23389 - DNA, 20 bp, Artificial Sequence
  chemically synthesized
ttcaatttcaagcaacgtgg

SEQ ID NO: 23390 - DNA, 20 bp, Artificial Sequence
  chemically synthesized
cattcaatgctatggtgact

SEQ ID NO: 23391 - DNA, 20 bp, Artificial Sequence
  chemically synthesized
taaaagctaattttactttt

SEQ ID NO: 23392 - DNA, 20 bp, Artificial Sequence
  chemically synthesized
ttttacttttttatgatttt

SEQ ID NO: 23393 - DNA, 22 bp, Artificial Sequence
  chemically synthesized
aattcattacttttttcccctc

SEQ ID NO: 23394 - DNA, 22 bp, Artificial Sequence
  chemically synthesized
attcattacttttttcccctca

SEQ ID NO: 23395 - DNA, 22 bp, Artificial Sequence
  chemically synthesized
attacttttttcccctcaactt

SEQ ID NO: 23396 - DNA, 22 bp, Artificial Sequence
  chemically synthesized
cttttttcccctcaactttaat

SEQ ID NO: 23397 - DNA, 22 bp, Artificial Sequence
  chemically synthesized
ttttcccctcaactttaataat

SEQ ID NO: 23398 - DNA, 22 bp, Artificial Sequence
  chemically synthesized
tttcccctcaactttaataata

SEQ ID NO: 23399 - DNA, 22 bp, Artificial Sequence
  chemically synthesized
ttcccctcaactttaataataa

SEQ ID NO: 23400 - DNA, 22 bp, Artificial Sequence
  chemically synthesized
tcccctcaactttaataataaa

SEQ ID NO: 23401 - DNA, 22 bp, Artificial Sequence
  chemically synthesized
cccctcaactttaataataaat

SEQ ID NO: 23402 - DNA, 22 bp, Artificial Sequence
  chemically synthesized
ccctcaactttaataataaatt

SEQ ID NO: 23403 - DNA, 22 bp, Artificial Sequence
  chemically synthesized
aactttaataataaatttaccc

SEQ ID NO: 23404 - DNA, 22 bp, Artificial Sequence
  chemically synthesized
taataataaatttacccaacaa

SEQ ID NO: 23405 - DNA, 22 bp, Artificial Sequence
  chemically synthesized
aataataaatttacccaacaaa

SEQ ID NO: 23406 - DNA, 22 bp, Artificial Sequence
  chemically synthesized
ataataaatttacccaacaaaa

SEQ ID NO: 23407 - DNA, 22 bp, Artificial Sequence
  chemically synthesized
acccaacaaaaaagtttatttt

SEQ ID NO: 23408 - DNA, 22 bp, Artificial Sequence
  chemically synthesized
cccaacaaaaaagtttattttt

SEQ ID NO: 23409 - DNA, 22 bp, Artificial Sequence
  chemically synthesized
atttttgacttgtaaatctctt

SEQ ID NO: 23410 - DNA, 22 bp, Artificial Sequence
  chemically synthesized
tttttgacttgtaaatctctta

SEQ ID NO: 23411 - DNA, 22 bp, Artificial Sequence
  chemically synthesized
ttgacttgtaaatctcttaaaa

SEQ ID NO: 23412 - DNA, 22 bp, Artificial Sequence
  chemically synthesized
tgacttgtaaatctcttaaaat

SEQ ID NO: 23413 - DNA, 22 bp, Artificial Sequence
  chemically synthesized
gacttgtaaatctcttaaaatc

SEQ ID NO: 23414 - DNA, 22 bp, Artificial Sequence
  chemically synthesized
acttgtaaatctcttaaaatca

SEQ ID NO: 23415 - DNA, 22 bp, Artificial Sequence
  chemically synthesized
gtaaatctcttaaaatcataaa

SEQ ID NO: 23416 - DNA, 22 bp, Artificial Sequence
  chemically synthesized
taaatctcttaaaatcataaaa

SEQ ID NO: 23417 - DNA, 22 bp, Artificial Sequence
  chemically synthesized
ttaaaatcataaaaaagtaaaa

SEQ ID NO: 23418 - DNA, 22 bp, Artificial Sequence
  chemically synthesized
aaaatcataaaaaagtaaaatt

SEQ ID NO: 23419 - DNA, 22 bp, Artificial Sequence
  chemically synthesized
aaatcataaaaaagtaaaatta

SEQ ID NO: 23420 - DNA, 22 bp, Artificial Sequence
  chemically synthesized
gcttttaaaaacaggtagtcac

SEQ ID NO: 23421 - DNA, 22 bp, Artificial Sequence
  chemically synthesized
ttaaaaacaggtagtcaccata

SEQ ID NO: 23422 - DNA, 22 bp, Artificial Sequence
  chemically synthesized
taaaaacaggtagtcaccatag

SEQ ID NO: 23423 - DNA, 22 bp, Artificial Sequence
  chemically synthesized
aaaaacaggtagtcaccatagc

SEQ ID NO: 23424 - DNA, 22 bp, Artificial Sequence
  chemically synthesized
aaaacaggtagtcaccatagca

SEQ ID NO: 23425 - DNA, 22 bp, Artificial Sequence
  chemically synthesized
aatgtgtagtttataatacagc

SEQ ID NO: 23426 - DNA, 22 bp, Artificial Sequence
  chemically synthesized
ataatacagcaaagttaaatac

SEQ ID NO: 23427 - DNA, 22 bp, Artificial Sequence
  chemically synthesized
taatacagcaaagttaaataca

SEQ ID NO: 23428 - DNA, 22 bp, Artificial Sequence
  chemically synthesized
aatacaatttcaaattacctat

SEQ ID NO: 23429 - DNA, 22 bp, Artificial Sequence
  chemically synthesized
caaattacctattaagttagtt

SEQ ID NO: 23430 - DNA, 22 bp, Artificial Sequence
  chemically synthesized
aaattacctattaagttagttg

SEQ ID NO: 23431 - DNA, 22 bp, Artificial Sequence
  chemically synthesized
cctattaagttagttgctcatt

SEQ ID NO: 23432 - DNA, 22 bp, Artificial Sequence
  chemically synthesized
ttaagttagttgctcatttctt

SEQ ID NO: 23433 - DNA, 22 bp, Artificial Sequence
  chemically synthesized
agttagttgctcatttctttga

SEQ ID NO: 23434 - DNA, 22 bp, Artificial Sequence
  chemically synthesized
gttgctcatttctttgatttca

SEQ ID NO: 23435 - DNA, 22 bp, Artificial Sequence
  chemically synthesized
ctcatttctttgatttcattta

SEQ ID NO: 23436 - DNA, 22 bp, Artificial Sequence
  chemically synthesized
atttctttgatttcatttagca

SEQ ID NO: 23437 - DNA, 22 bp, Artificial Sequence
  chemically synthesized
ctttgatttcatttagcattga

SEQ ID NO: 23438 - DNA, 22 bp, Artificial Sequence
  chemically synthesized
tttgatttcatttagcattgat

SEQ ID NO: 23439 - DNA, 22 bp, Artificial Sequence
  chemically synthesized
tgatttcatttagcattgatct

SEQ ID NO: 23440 - DNA, 22 bp, Artificial Sequence
  chemically synthesized
gatttcatttagcattgatcta

SEQ ID NO: 23441 - DNA, 22 bp, Artificial Sequence
  chemically synthesized
atttcatttagcattgatctaa

SEQ ID NO: 23442 - DNA, 22 bp, Artificial Sequence
  chemically synthesized
catttagcattgatctaactca

SEQ ID NO: 23443 - DNA, 22 bp, Artificial Sequence
  chemically synthesized
atttagcattgatctaactcaa

SEQ ID NO: 23444 - DNA, 22 bp, Artificial Sequence
  chemically synthesized
agcattgatctaactcaatgtg

SEQ ID NO: 23445 - DNA, 22 bp, Artificial Sequence
  chemically synthesized
gcattgatctaactcaatgtgg

SEQ ID NO: 23446 - DNA, 22 bp, Artificial Sequence
  chemically synthesized
atctaactcaatgtggaagaag

SEQ ID NO: 23447 - DNA, 22 bp, Artificial Sequence
  chemically synthesized
actcaatgtggaagaaggttac

SEQ ID NO: 23448 - DNA, 22 bp, Artificial Sequence
  chemically synthesized
aatgtggaagaaggttacattc

SEQ ID NO: 23449 - DNA, 22 bp, Artificial Sequence
  chemically synthesized
cattcgtgcaagttaacacggc

SEQ ID NO: 23450 - DNA, 22 bp, Artificial Sequence
  chemically synthesized
gtgcaagttaacacggcttaat

SEQ ID NO: 23451 - DNA, 22 bp, Artificial Sequence
  chemically synthesized
acacggcttaatgattaactat

SEQ ID NO: 23452 - DNA, 22 bp, Artificial Sequence
  chemically synthesized
aatgattaactatgttcaccta

SEQ ID NO: 23453 - DNA, 22 bp, Artificial Sequence
  chemically synthesized
atgattaactatgttcacctac

SEQ ID NO: 23454 - DNA, 22 bp, Artificial Sequence
  chemically synthesized
actatgttcacctaccaacctt

SEQ ID NO: 23455 - DNA, 22 bp, Artificial Sequence
  chemically synthesized
tgttcacctaccaaccttacct

SEQ ID NO: 23456 - DNA, 22 bp, Artificial Sequence
  chemically synthesized
acctaccaaccttaccttttct

SEQ ID NO: 23457 - DNA, 22 bp, Artificial Sequence
  chemically synthesized
ccaaccttaccttttctgggca

SEQ ID NO: 23458 - DNA, 22 bp, Artificial Sequence
  chemically synthesized
accttttctgggcaaatattgg

SEQ ID NO: 23459 - DNA, 22 bp, Artificial Sequence
  chemically synthesized
ccttttctgggcaaatattggt

SEQ ID NO: 23460 - DNA, 22 bp, Artificial Sequence
  chemically synthesized
ttctgggcaaatattggtatat

SEQ ID NO: 23461 - DNA, 22 bp, Artificial Sequence
  chemically synthesized
tctgggcaaatattggtatata

SEQ ID NO: 23462 - DNA, 22 bp, Artificial Sequence
  chemically synthesized
ctgggcaaatattggtatatat

SEQ ID NO: 23463 - DNA, 22 bp, Artificial Sequence
  chemically synthesized
tgggcaaatattggtatatata

SEQ ID NO: 23464 - DNA, 22 bp, Artificial Sequence
  chemically synthesized
ggcaaatattggtatatataga

SEQ ID NO: 23465 - DNA, 22 bp, Artificial Sequence
  chemically synthesized
gtatatatagagttaagaagtc

SEQ ID NO: 23466 - DNA, 22 bp, Artificial Sequence
  chemically synthesized
agaagtctaggtctgcttccag

SEQ ID NO: 23467 - DNA, 22 bp, Artificial Sequence
  chemically synthesized
ggtctgcttccagaagaaaaca

SEQ ID NO: 23468 - DNA, 22 bp, Artificial Sequence
  chemically synthesized
cttccagaagaaaacagttcca

SEQ ID NO: 23469 - DNA, 22 bp, Artificial Sequence
  chemically synthesized
ccagaagaaaacagttccacgt

SEQ ID NO: 23470 - DNA, 22 bp, Artificial Sequence
  chemically synthesized
cagaagaaaacagttccacgtt

SEQ ID NO: 23471 - DNA, 22 bp, Artificial Sequence
  chemically synthesized
cacgttgcttgaaattgaaaat

SEQ ID NO: 23472 - DNA, 22 bp, Artificial Sequence
  chemically synthesized
cttgaaattgaaaatcaagata

SEQ ID NO: 23473 - DNA, 22 bp, Artificial Sequence
  chemically synthesized
gaaattgaaaatcaagataaaa

SEQ ID NO: 23474 - DNA, 22 bp, Artificial Sequence
  chemically synthesized
aaattgaaaatcaagataaaaa

SEQ ID NO: 23475 - DNA, 22 bp, Artificial Sequence
  chemically synthesized
aaaatcaagataaaaatgttca

SEQ ID NO: 23476 - DNA, 22 bp, Artificial Sequence
  chemically synthesized
acaattaagctccttcttttta

SEQ ID NO: 23477 - DNA, 22 bp, Artificial Sequence
  chemically synthesized
agctccttctttttattgttcc

SEQ ID NO: 23478 - DNA, 22 bp, Artificial Sequence
  chemically synthesized
cttctttttattgttcctctag

SEQ ID NO: 23479 - DNA, 22 bp, Artificial Sequence
  chemically synthesized
ctttttattgttcctctagtta

SEQ ID NO: 23480 - DNA, 22 bp, Artificial Sequence
  chemically synthesized
tttttattgttcctctagttat

SEQ ID NO: 23481 - DNA, 22 bp, Artificial Sequence
  chemically synthesized
tttattgttcctctagttattt

SEQ ID NO: 23482 - DNA, 22 bp, Artificial Sequence
  chemically synthesized
ttattgttcctctagttatttc

SEQ ID NO: 23483 - DNA, 22 bp, Artificial Sequence
  chemically synthesized
tattgttcctctagttatttcc

SEQ ID NO: 23484 - DNA, 22 bp, Artificial Sequence
  chemically synthesized
attgttcctctagttatttcct

SEQ ID NO: 23485 - DNA, 22 bp, Artificial Sequence
  chemically synthesized
ttgttcctctagttatttcctc

SEQ ID NO: 23486 - DNA, 22 bp, Artificial Sequence
  chemically synthesized
ttcctctagttatttcctccag

SEQ ID NO: 23487 - DNA, 22 bp, Artificial Sequence
  chemically synthesized
ctctagttatttcctccagaat

SEQ ID NO: 23488 - DNA, 22 bp, Artificial Sequence
  chemically synthesized
tagttatttcctccagaattga

SEQ ID NO: 23489 - DNA, 22 bp, Artificial Sequence
  chemically synthesized
gttatttcctccagaattgatc

SEQ ID NO: 23490 - DNA, 22 bp, Artificial Sequence
  chemically synthesized
tttcctccagaattgatcaaga

SEQ ID NO: 23491 - DNA, 22 bp, Artificial Sequence
  chemically synthesized
cctccagaattgatcaagacaa

SEQ ID NO: 23492 - DNA, 22 bp, Artificial Sequence
  chemically synthesized
ctccagaattgatcaagacaat

SEQ ID NO: 23493 - DNA, 22 bp, Artificial Sequence
  chemically synthesized
cagaattgatcaagacaattca

SEQ ID NO: 23494 - DNA, 22 bp, Artificial Sequence
  chemically synthesized
atcaagacaattcatcatttga

SEQ ID NO: 23495 - DNA, 22 bp, Artificial Sequence
  chemically synthesized
atcatttgattctctatctcca

SEQ ID NO: 23496 - DNA, 22 bp, Artificial Sequence
  chemically synthesized
gattctctatctccagagccaa

SEQ ID NO: 23497 - DNA, 22 bp, Artificial Sequence
  chemically synthesized
attctctatctccagagccaaa

SEQ ID NO: 23498 - DNA, 22 bp, Artificial Sequence
  chemically synthesized
tctatctccagagccaaaatca

SEQ ID NO: 23499 - DNA, 22 bp, Artificial Sequence
  chemically synthesized
tatctccagagccaaaatcaag

SEQ ID NO: 23500 - DNA, 22 bp, Artificial Sequence
  chemically synthesized
tctccagagccaaaatcaagat

SEQ ID NO: 23501 - DNA, 22 bp, Artificial Sequence
  chemically synthesized
cagagccaaaatcaagatttgc

SEQ ID NO: 23502 - DNA, 22 bp, Artificial Sequence
  chemically synthesized
gctatgttagacgatgtaaaaa

SEQ ID NO: 23503 - DNA, 22 bp, Artificial Sequence
  chemically synthesized
ctatgttagacgatgtaaaaat

SEQ ID NO: 23504 - DNA, 22 bp, Artificial Sequence
  chemically synthesized
tgttagacgatgtaaaaatttt

SEQ ID NO: 23505 - DNA, 22 bp, Artificial Sequence
  chemically synthesized
gacgatgtaaaaattttagcca

SEQ ID NO: 23506 - DNA, 22 bp, Artificial Sequence
  chemically synthesized
tagccaatggcctccttcagtt

SEQ ID NO: 23507 - DNA, 22 bp, Artificial Sequence
  chemically synthesized
agccaatggcctccttcagttg

SEQ ID NO: 23508 - DNA, 22 bp, Artificial Sequence
  chemically synthesized
gccaatggcctccttcagttgg

SEQ ID NO: 23509 - DNA, 22 bp, Artificial Sequence
  chemically synthesized
cttcagttgggacatggtctta

SEQ ID NO: 23510 - DNA, 22 bp, Artificial Sequence
  chemically synthesized
cagttgggacatggtcttaaag

SEQ ID NO: 23511 - DNA, 22 bp, Artificial Sequence
  chemically synthesized
agttgggacatggtcttaaaga

SEQ ID NO: 23512 - DNA, 22 bp, Artificial Sequence
  chemically synthesized
ggacatggtcttaaagactttg

SEQ ID NO: 23513 - DNA, 22 bp, Artificial Sequence
  chemically synthesized
aaagactttgtccataagacga

SEQ ID NO: 23514 - DNA, 22 bp, Artificial Sequence
  chemically synthesized
aagactttgtccataagacgaa

SEQ ID NO: 23515 - DNA, 22 bp, Artificial Sequence
  chemically synthesized
tgtccataagacgaagggccaa

SEQ ID NO: 23516 - DNA, 22 bp, Artificial Sequence
  chemically synthesized
gtccataagacgaagggccaaa

SEQ ID NO: 23517 - DNA, 22 bp, Artificial Sequence
  chemically synthesized
tccataagacgaagggccaaat

SEQ ID NO: 23518 - DNA, 22 bp, Artificial Sequence
  chemically synthesized
atgacatatttcaaaaactcaa

SEQ ID NO: 23519 - DNA, 22 bp, Artificial Sequence
  chemically synthesized
caaaaactcaacatatttgatc

SEQ ID NO: 23520 - DNA, 22 bp, Artificial Sequence
  chemically synthesized
aaaaactcaacatatttgatca

SEQ ID NO: 23521 - DNA, 22 bp, Artificial Sequence
  chemically synthesized
aacatatttgatcagtcttttt

SEQ ID NO: 23522 - DNA, 22 bp, Artificial Sequence
  chemically synthesized
gatcagtctttttatgatctat

SEQ ID NO: 23523 - DNA, 22 bp, Artificial Sequence
  chemically synthesized
atcagtctttttatgatctatc

SEQ ID NO: 23524 - DNA, 22 bp, Artificial Sequence
  chemically synthesized
tttatgatctatcgctgcaaac

SEQ ID NO: 23525 - DNA, 22 bp, Artificial Sequence
  chemically synthesized
ttatgatctatcgctgcaaacc

SEQ ID NO: 23526 - DNA, 22 bp, Artificial Sequence
  chemically synthesized
tatgatctatcgctgcaaacca

SEQ ID NO: 23527 - DNA, 22 bp, Artificial Sequence
  chemically synthesized
atgatctatcgctgcaaaccag

SEQ ID NO: 23528 - DNA, 22 bp, Artificial Sequence
  chemically synthesized
tgatctatcgctgcaaaccagt

SEQ ID NO: 23529 - DNA, 22 bp, Artificial Sequence
  chemically synthesized
tcgctgcaaaccagtgaaatca

SEQ ID NO: 23530 - DNA, 22 bp, Artificial Sequence
  chemically synthesized
caaaccagtgaaatcaaagaag

SEQ ID NO: 23531 - DNA, 22 bp, Artificial Sequence
  chemically synthesized
agaagaactacatataaactac

SEQ ID NO: 23532 - DNA, 22 bp, Artificial Sequence
  chemically synthesized
catataaactacaagtcaaaaa

SEQ ID NO: 23533 - DNA, 22 bp, Artificial Sequence
  chemically synthesized
caagtcaaaaatgaagaggtaa

SEQ ID NO: 23534 - DNA, 22 bp, Artificial Sequence
  chemically synthesized
gaactcaactcaaaacttgaaa

SEQ ID NO: 23535 - DNA, 22 bp, Artificial Sequence
  chemically synthesized
aactcaactcaaaacttgaaag

SEQ ID NO: 23536 - DNA, 22 bp, Artificial Sequence
  chemically synthesized
aactcaaaacttgaaagcctcc

SEQ ID NO: 23537 - DNA, 22 bp, Artificial Sequence
  chemically synthesized
aaaacttgaaagcctcctagaa

SEQ ID NO: 23538 - DNA, 22 bp, Artificial Sequence
  chemically synthesized
gaaagcctcctagaagaaaaaa

SEQ ID NO: 23539 - DNA, 22 bp, Artificial Sequence
  chemically synthesized
aaagcctcctagaagaaaaaat

SEQ ID NO: 23540 - DNA, 22 bp, Artificial Sequence
  chemically synthesized
ctagaagaaaaaattctacttc

SEQ ID NO: 23541 - DNA, 22 bp, Artificial Sequence
  chemically synthesized
gaagaaaaaattctacttcaac

SEQ ID NO: 23542 - DNA, 22 bp, Artificial Sequence
  chemically synthesized
tacttcaacaaaaagtgaaata

SEQ ID NO: 23543 - DNA, 22 bp, Artificial Sequence
  chemically synthesized
cttcaacaaaaagtgaaatatt

SEQ ID NO: 23544 - DNA, 22 bp, Artificial Sequence
  chemically synthesized
caacaaaaagtgaaatatttag

SEQ ID NO: 23545 - DNA, 22 bp, Artificial Sequence
  chemically synthesized
aacaaaaagtgaaatatttaga

SEQ ID NO: 23546 - DNA, 22 bp, Artificial Sequence
  chemically synthesized
agaagagcaactaactaactta

SEQ ID NO: 23547 - DNA, 22 bp, Artificial Sequence
  chemically synthesized
gaagagcaactaactaacttaa

SEQ ID NO: 23548 - DNA, 22 bp, Artificial Sequence
  chemically synthesized
actaacttaattcaaaatcaac

SEQ ID NO: 23549 - DNA, 22 bp, Artificial Sequence
  chemically synthesized
acttaattcaaaatcaacctga

SEQ ID NO: 23550 - DNA, 22 bp, Artificial Sequence
  chemically synthesized
aattcaaaatcaacctgaaact

SEQ ID NO: 23551 - DNA, 22 bp, Artificial Sequence
  chemically synthesized
attcaaaatcaacctgaaactc

SEQ ID NO: 23552 - DNA, 22 bp, Artificial Sequence
  chemically synthesized
aaaatcaacctgaaactccaga

SEQ ID NO: 23553 - DNA, 22 bp, Artificial Sequence
  chemically synthesized
aaactccagaacacccagaagt

SEQ ID NO: 23554 - DNA, 22 bp, Artificial Sequence
  chemically synthesized
cagaacacccagaagtaacttc

SEQ ID NO: 23555 - DNA, 22 bp, Artificial Sequence
  chemically synthesized
cacttaaagtaagtagaaaata

SEQ ID NO: 23556 - DNA, 22 bp, Artificial Sequence
  chemically synthesized
acttaaagtaagtagaaaataa

SEQ ID NO: 23557 - DNA, 22 bp, Artificial Sequence
  chemically synthesized
aaagtaagtagaaaataaagag

SEQ ID NO: 23558 - DNA, 22 bp, Artificial Sequence
  chemically synthesized
aagtaagtagaaaataaagagg

SEQ ID NO: 23559 - DNA, 22 bp, Artificial Sequence
  chemically synthesized
atgtttatgttttcaatgtgga

SEQ ID NO: 23560 - DNA, 22 bp, Artificial Sequence
  chemically synthesized
atgttttcaatgtggatctttt

SEQ ID NO: 23561 - DNA, 22 bp, Artificial Sequence
  chemically synthesized
tgttttcaatgtggatctttta

SEQ ID NO: 23562 - DNA, 22 bp, Artificial Sequence
  chemically synthesized
tcaatgtggatcttttaaaaaa

SEQ ID NO: 23563 - DNA, 22 bp, Artificial Sequence
  chemically synthesized
caatgtggatcttttaaaaaaa

SEQ ID NO: 23564 - DNA, 22 bp, Artificial Sequence
  chemically synthesized
aatgtggatcttttaaaaaaaa

SEQ ID NO: 23565 - DNA, 22 bp, Artificial Sequence
  chemically synthesized
ttaaaaaaaatatttctaaggc

SEQ ID NO: 23566 - DNA, 22 bp, Artificial Sequence
  chemically synthesized
taaaaaaaatatttctaaggca

SEQ ID NO: 23567 - DNA, 22 bp, Artificial Sequence
  chemically synthesized
aaaaaaaatatttctaaggcat

SEQ ID NO: 23568 - DNA, 22 bp, Artificial Sequence
  chemically synthesized
aaaaaaatatttctaaggcatg

SEQ ID NO: 23569 - DNA, 22 bp, Artificial Sequence
  chemically synthesized
ctaaggcatgccatttgaaata

SEQ ID NO: 23570 - DNA, 22 bp, Artificial Sequence
  chemically synthesized
taaggcatgccatttgaaatac

SEQ ID NO: 23571 - DNA, 22 bp, Artificial Sequence
  chemically synthesized
aggcatgccatttgaaatactt

SEQ ID NO: 23572 - DNA, 22 bp, Artificial Sequence
  chemically synthesized
gaaatactttgttgcattgttg

SEQ ID NO: 23573 - DNA, 22 bp, Artificial Sequence
  chemically synthesized
aaatactttgttgcattgttga

SEQ ID NO: 23574 - DNA, 22 bp, Artificial Sequence
  chemically synthesized
tgttgcattgttgaaatacttt

SEQ ID NO: 23575 - DNA, 22 bp, Artificial Sequence
  chemically synthesized
gttgcattgttgaaatactttt

SEQ ID NO: 23576 - DNA, 22 bp, Artificial Sequence
  chemically synthesized
ttgcattgttgaaatacttttt

SEQ ID NO: 23577 - DNA, 22 bp, Artificial Sequence
  chemically synthesized
cattgttgaaatactttttttt

SEQ ID NO: 23578 - DNA, 22 bp, Artificial Sequence
  chemically synthesized
ttgaaatacttttttttccaag

SEQ ID NO: 23579 - DNA, 22 bp, Artificial Sequence
  chemically synthesized
aaatacttttttttccaagaaa

SEQ ID NO: 23580 - DNA, 22 bp, Artificial Sequence
  chemically synthesized
ttttttccaagaaaaataatct

SEQ ID NO: 23581 - DNA, 22 bp, Artificial Sequence
  chemically synthesized
tttttccaagaaaaataatctc

SEQ ID NO: 23582 - DNA, 22 bp, Artificial Sequence
  chemically synthesized
ttttccaagaaaaataatctcc

SEQ ID NO: 23583 - DNA, 22 bp, Artificial Sequence
  chemically synthesized
tttccaagaaaaataatctcca

SEQ ID NO: 23584 - DNA, 22 bp, Artificial Sequence
  chemically synthesized
ttccaagaaaaataatctccag

SEQ ID NO: 23585 - DNA, 22 bp, Artificial Sequence
  chemically synthesized
tccaagaaaaataatctccaga

SEQ ID NO: 23586 - DNA, 22 bp, Artificial Sequence
  chemically synthesized
ccaagaaaaataatctccagaa

SEQ ID NO: 23587 - DNA, 22 bp, Artificial Sequence
  chemically synthesized
caagaaaaataatctccagaaa

SEQ ID NO: 23588 - DNA, 22 bp, Artificial Sequence
  chemically synthesized
cagaaaataaaatttcctatta

SEQ ID NO: 23589 - DNA, 22 bp, Artificial Sequence
  chemically synthesized
cctattataatttcaagttagt

SEQ ID NO: 23590 - DNA, 22 bp, Artificial Sequence
  chemically synthesized
ctattataatttcaagttagtt

SEQ ID NO: 23591 - DNA, 22 bp, Artificial Sequence
  chemically synthesized
ttataatttcaagttagttttt

SEQ ID NO: 23592 - DNA, 22 bp, Artificial Sequence
  chemically synthesized
taatttcaagttagttttttgt

SEQ ID NO: 23593 - DNA, 22 bp, Artificial Sequence
  chemically synthesized
caagttagttttttgtttccct

SEQ ID NO: 23594 - DNA, 22 bp, Artificial Sequence
  chemically synthesized
aagttagttttttgtttcccta

SEQ ID NO: 23595 - DNA, 22 bp, Artificial Sequence
  chemically synthesized
gttttttgtttccctaatgtta

SEQ ID NO: 23596 - DNA, 22 bp, Artificial Sequence
  chemically synthesized
tttgtttccctaatgttatata

SEQ ID NO: 23597 - DNA, 22 bp, Artificial Sequence
  chemically synthesized
ttgtttccctaatgttatatat

SEQ ID NO: 23598 - DNA, 22 bp, Artificial Sequence
  chemically synthesized
tgtttccctaatgttatatatg

SEQ ID NO: 23599 - DNA, 22 bp, Artificial Sequence
  chemically synthesized
gtttccctaatgttatatatga

SEQ ID NO: 23600 - DNA, 22 bp, Artificial Sequence
  chemically synthesized
tttccctaatgttatatatgaa

SEQ ID NO: 23601 - DNA, 22 bp, Artificial Sequence
  chemically synthesized
ccctaatgttatatatgaaaac

SEQ ID NO: 23602 - DNA, 22 bp, Artificial Sequence
  chemically synthesized
cctaatgttatatatgaaaaca

SEQ ID NO: 23603 - DNA, 22 bp, Artificial Sequence
  chemically synthesized
atgttatatatgaaaacactga

SEQ ID NO: 23604 - DNA, 22 bp, Artificial Sequence
  chemically synthesized
tatatgaaaacactgaaaattt

SEQ ID NO: 23605 - DNA, 22 bp, Artificial Sequence
  chemically synthesized
aaaatttgcattttatatgaaa

SEQ ID NO: 23606 - DNA, 22 bp, Artificial Sequence
  chemically synthesized
gcattttatatgaaaattacaa

SEQ ID NO: 23607 - DNA, 22 bp, Artificial Sequence
  chemically synthesized
cattttatatgaaaattacaaa

SEQ ID NO: 23608 - DNA, 22 bp, Artificial Sequence
  chemically synthesized
tatatgaaaattacaaatcggt

SEQ ID NO: 23609 - DNA, 22 bp, Artificial Sequence
  chemically synthesized
atatgaaaattacaaatcggtt

SEQ ID NO: 23610 - DNA, 22 bp, Artificial Sequence
  chemically synthesized
tatgaaaattacaaatcggtta

SEQ ID NO: 23611 - DNA, 22 bp, Artificial Sequence
  chemically synthesized
caaatcggttaaattatacaat

SEQ ID NO: 23612 - DNA, 22 bp, Artificial Sequence
  chemically synthesized
aattatacaatctagaacacta

SEQ ID NO: 23613 - DNA, 22 bp, Artificial Sequence
  chemically synthesized
tacaatctagaacactatgtca

SEQ ID NO: 23614 - DNA, 22 bp, Artificial Sequence
  chemically synthesized
gaacactatgtcattacactat

SEQ ID NO: 23615 - DNA, 22 bp, Artificial Sequence
  chemically synthesized
tgtcattacactattgtaaatt

SEQ ID NO: 23616 - DNA, 22 bp, Artificial Sequence
  chemically synthesized
cactattgtaaattactgaagg

SEQ ID NO: 23617 - DNA, 22 bp, Artificial Sequence
  chemically synthesized
ttgtaaattactgaaggtaagt

SEQ ID NO: 23618 - DNA, 22 bp, Artificial Sequence
  chemically synthesized
taaattactgaaggtaagtaaa

SEQ ID NO: 23619 - DNA, 22 bp, Artificial Sequence
  chemically synthesized
ctgaaggtaagtaaaaagttaa

SEQ ID NO: 23620 - DNA, 22 bp, Artificial Sequence
  chemically synthesized
aaggtaagtaaaaagttaaaaa

SEQ ID NO: 23621 - DNA, 22 bp, Artificial Sequence
  chemically synthesized
aaaaaaatttaaaactattctc

SEQ ID NO: 23622 - DNA, 22 bp, Artificial Sequence
  chemically synthesized
aaaactattctccagtgtttaa

SEQ ID NO: 23623 - DNA, 22 bp, Artificial Sequence
  chemically synthesized
aaactattctccagtgtttaaa

SEQ ID NO: 23624 - DNA, 22 bp, Artificial Sequence
  chemically synthesized
ttctccagtgtttaaaacagat

SEQ ID NO: 23625 - DNA, 22 bp, Artificial Sequence
  chemically synthesized
tccagtgtttaaaacagattaa

SEQ ID NO: 23626 - DNA, 22 bp, Artificial Sequence
  chemically synthesized
cagtgtttaaaacagattaaat

SEQ ID NO: 23627 - DNA, 22 bp, Artificial Sequence
  chemically synthesized
aaaacagattaaataatacagt

SEQ ID NO: 23628 - DNA, 22 bp, Artificial Sequence
  chemically synthesized
aaacagattaaataatacagta

SEQ ID NO: 23629 - DNA, 22 bp, Artificial Sequence
  chemically synthesized
aataatacagtaaatggaaaag

SEQ ID NO: 23630 - DNA, 22 bp, Artificial Sequence
  chemically synthesized
attcatatgaaaatatgctggg

SEQ ID NO: 23631 - DNA, 22 bp, Artificial Sequence
  chemically synthesized
ttcatatgaaaatatgctgggc

SEQ ID NO: 23632 - DNA, 22 bp, Artificial Sequence
  chemically synthesized
atatgaaaatatgctgggcttt

SEQ ID NO: 23633 - DNA, 22 bp, Artificial Sequence
  chemically synthesized
ggctttttcttttaattgaagt

SEQ ID NO: 23634 - DNA, 22 bp, Artificial Sequence
  chemically synthesized
tttcttttaattgaagttcaga

SEQ ID NO: 23635 - DNA, 22 bp, Artificial Sequence
  chemically synthesized
ttcttttaattgaagttcagaa

SEQ ID NO: 23636 - DNA, 22 bp, Artificial Sequence
  chemically synthesized
tcttttaattgaagttcagaaa

SEQ ID NO: 23637 - DNA, 22 bp, Artificial Sequence
  chemically synthesized
cttttaattgaagttcagaaaa

SEQ ID NO: 23638 - DNA, 22 bp, Artificial Sequence
  chemically synthesized
ttttaattgaagttcagaaaat

SEQ ID NO: 23639 - DNA, 22 bp, Artificial Sequence
  chemically synthesized
ttaattgaagttcagaaaatca

SEQ ID NO: 23640 - DNA, 22 bp, Artificial Sequence
  chemically synthesized
taattgaagttcagaaaatcaa

SEQ ID NO: 23641 - DNA, 22 bp, Artificial Sequence
  chemically synthesized
aattgaagttcagaaaatcaaa

SEQ ID NO: 23642 - DNA, 22 bp, Artificial Sequence
  chemically synthesized
attgaagttcagaaaatcaaat

SEQ ID NO: 23643 - DNA, 22 bp, Artificial Sequence
  chemically synthesized
aagttcagaaaatcaaatttta

SEQ ID NO: 23644 - DNA, 22 bp, Artificial Sequence
  chemically synthesized
agaaaatcaaattttagagata

SEQ ID NO: 23645 - DNA, 22 bp, Artificial Sequence
  chemically synthesized
tagagatagtacaatttaaata

SEQ ID NO: 23646 - DNA, 22 bp, Artificial Sequence
  chemically synthesized
agagatagtacaatttaaataa

SEQ ID NO: 23647 - DNA, 22 bp, Artificial Sequence
  chemically synthesized
gagatagtacaatttaaataaa

SEQ ID NO: 23648 - DNA, 22 bp, Artificial Sequence
  chemically synthesized
aaataaaatgttaaggacaaaa

SEQ ID NO: 23649 - DNA, 22 bp, Artificial Sequence
  chemically synthesized
aataaaatgttaaggacaaaaa

SEQ ID NO: 23650 - DNA, 22 bp, Artificial Sequence
  chemically synthesized
aggacaaaaatatgtgctattt

SEQ ID NO: 23651 - DNA, 22 bp, Artificial Sequence
  chemically synthesized
tttgaaagaagcatacaagggg

SEQ ID NO: 23652 - DNA, 22 bp, Artificial Sequence
  chemically synthesized
gaaagaagcatacaaggggaag

SEQ ID NO: 23653 - DNA, 22 bp, Artificial Sequence
  chemically synthesized
aaagaagcatacaaggggaagg

SEQ ID NO: 23654 - DNA, 22 bp, Artificial Sequence
  chemically synthesized
ccaatattcatttttcaaatcc

SEQ ID NO: 23655 - DNA, 22 bp, Artificial Sequence
  chemically synthesized
atttttcaaatccattattagt

SEQ ID NO: 23656 - DNA, 22 bp, Artificial Sequence
  chemically synthesized
ttcaaatccattattagtttaa

SEQ ID NO: 23657 - DNA, 22 bp, Artificial Sequence
  chemically synthesized
tcaaatccattattagtttaaa

SEQ ID NO: 23658 - DNA, 22 bp, Artificial Sequence
  chemically synthesized
caaatccattattagtttaaaa

SEQ ID NO: 23659 - DNA, 22 bp, Artificial Sequence
  chemically synthesized
aaatccattattagtttaaaaa

SEQ ID NO: 23660 - DNA, 22 bp, Artificial Sequence
  chemically synthesized
ttagtttaaaaatttagattat

SEQ ID NO: 23661 - DNA, 22 bp, Artificial Sequence
  chemically synthesized
gtttaaaaatttagattatgat

SEQ ID NO: 23662 - DNA, 22 bp, Artificial Sequence
  chemically synthesized
aaaaatttagattatgatagtg

SEQ ID NO: 23663 - DNA, 22 bp, Artificial Sequence
  chemically synthesized
aaaatttagattatgatagtgt

SEQ ID NO: 23664 - DNA, 22 bp, Artificial Sequence
  chemically synthesized
agattatgatagtgttacagga

SEQ ID NO: 23665 - DNA, 22 bp, Artificial Sequence
  chemically synthesized
gattatgatagtgttacaggaa

SEQ ID NO: 23666 - DNA, 22 bp, Artificial Sequence
  chemically synthesized
tgatagtgttacaggaaattaa

SEQ ID NO: 23667 - DNA, 22 bp, Artificial Sequence
  chemically synthesized
caggaaattaatagaaaagaaa

SEQ ID NO: 23668 - DNA, 22 bp, Artificial Sequence
  chemically synthesized
atagaaaagaaagaggaaagca

SEQ ID NO: 23669 - DNA, 22 bp, Artificial Sequence
  chemically synthesized
ataaccaacctactctctatat

SEQ ID NO: 23670 - DNA, 22 bp, Artificial Sequence
  chemically synthesized
taaccaacctactctctatatc

SEQ ID NO: 23671 - DNA, 22 bp, Artificial Sequence
  chemically synthesized
ctctctatatccagacttttgt

SEQ ID NO: 23672 - DNA, 22 bp, Artificial Sequence
  chemically synthesized
tctatatccagacttttgtaga

SEQ ID NO: 23673 - DNA, 22 bp, Artificial Sequence
  chemically synthesized
tatatccagacttttgtagaaa

SEQ ID NO: 23674 - DNA, 22 bp, Artificial Sequence
  chemically synthesized
tatccagacttttgtagaaaaa

SEQ ID NO: 23675 - DNA, 22 bp, Artificial Sequence
  chemically synthesized
ttgtagaaaaacaagataatag

SEQ ID NO: 23676 - DNA, 22 bp, Artificial Sequence
  chemically synthesized
tgtagaaaaacaagataatagc

SEQ ID NO: 23677 - DNA, 22 bp, Artificial Sequence
  chemically synthesized
gtagaaaaacaagataatagca

SEQ ID NO: 23678 - DNA, 22 bp, Artificial Sequence
  chemically synthesized
tagaaaaacaagataatagcat

SEQ ID NO: 23679 - DNA, 22 bp, Artificial Sequence
  chemically synthesized
ctccagaccgtggaagaccaat

SEQ ID NO: 23680 - DNA, 22 bp, Artificial Sequence
  chemically synthesized
tccagaccgtggaagaccaata

SEQ ID NO: 23681 - DNA, 22 bp, Artificial Sequence
  chemically synthesized
cagaccgtggaagaccaatata

SEQ ID NO: 23682 - DNA, 22 bp, Artificial Sequence
  chemically synthesized
aaccaacagcatagtcaaataa

SEQ ID NO: 23683 - DNA, 22 bp, Artificial Sequence
  chemically synthesized
taatggtatgtcccatctttca

SEQ ID NO: 23684 - DNA, 22 bp, Artificial Sequence
  chemically synthesized
aatggtatgtcccatctttcac

SEQ ID NO: 23685 - DNA, 22 bp, Artificial Sequence
  chemically synthesized
atggtatgtcccatctttcaca

SEQ ID NO: 23686 - DNA, 22 bp, Artificial Sequence
  chemically synthesized
tcacacaggtctgtaaaaacac

SEQ ID NO: 23687 - DNA, 22 bp, Artificial Sequence
  chemically synthesized
cacacaggtctgtaaaaacact

SEQ ID NO: 23688 - DNA, 22 bp, Artificial Sequence
  chemically synthesized
acacaggtctgtaaaaacactg

SEQ ID NO: 23689 - DNA, 22 bp, Artificial Sequence
  chemically synthesized
taaaaacactgaatcctaaaat

SEQ ID NO: 23690 - DNA, 22 bp, Artificial Sequence
  chemically synthesized
aatcctaaaattatttacaagc

SEQ ID NO: 23691 - DNA, 22 bp, Artificial Sequence
  chemically synthesized
aaattatttacaagctttaact

SEQ ID NO: 23692 - DNA, 22 bp, Artificial Sequence
  chemically synthesized
tttacaagctttaactggatca

SEQ ID NO: 23693 - DNA, 22 bp, Artificial Sequence
  chemically synthesized
acaagctttaactggatcatga

SEQ ID NO: 23694 - DNA, 22 bp, Artificial Sequence
  chemically synthesized
caagctttaactggatcatgag

SEQ ID NO: 23695 - DNA, 22 bp, Artificial Sequence
  chemically synthesized
taactggatcatgagtaaaatt

SEQ ID NO: 23696 - DNA, 22 bp, Artificial Sequence
  chemically synthesized
aactggatcatgagtaaaatta

SEQ ID NO: 23697 - DNA, 22 bp, Artificial Sequence
  chemically synthesized
actggatcatgagtaaaattat

SEQ ID NO: 23698 - DNA, 22 bp, Artificial Sequence
  chemically synthesized
gatcatgagtaaaattatcaca

SEQ ID NO: 23699 - DNA, 22 bp, Artificial Sequence
  chemically synthesized
tcacatcagcataactgttaaa

SEQ ID NO: 23700 - DNA, 22 bp, Artificial Sequence
  chemically synthesized
ttaaaattgcaggctctgaagc

SEQ ID NO: 23701 - DNA, 22 bp, Artificial Sequence
  chemically synthesized
aaattgcaggctctgaagctaa

SEQ ID NO: 23702 - DNA, 22 bp, Artificial Sequence
  chemically synthesized
caggctctgaagctaataaact

SEQ ID NO: 23703 - DNA, 22 bp, Artificial Sequence
  chemically synthesized
tgaagctaataaactacctgca

SEQ ID NO: 23704 - DNA, 22 bp, Artificial Sequence
  chemically synthesized
aagctaataaactacctgcatt

SEQ ID NO: 23705 - DNA, 22 bp, Artificial Sequence
  chemically synthesized
ataaactacctgcatttaaacc

SEQ ID NO: 23706 - DNA, 22 bp, Artificial Sequence
  chemically synthesized
cctgcatttaaaccatggctct

SEQ ID NO: 23707 - DNA, 22 bp, Artificial Sequence
  chemically synthesized
catttaaaccatggctctaaaa

SEQ ID NO: 23708 - DNA, 22 bp, Artificial Sequence
  chemically synthesized
aaaccatggctctaaaactttg

SEQ ID NO: 23709 - DNA, 22 bp, Artificial Sequence
  chemically synthesized
aaccatggctctaaaactttgt

SEQ ID NO: 23710 - DNA, 22 bp, Artificial Sequence
  chemically synthesized
taaaactttgtgtgaccttgaa

SEQ ID NO: 23711 - DNA, 22 bp, Artificial Sequence
  chemically synthesized
aaactttgtgtgaccttgaata

SEQ ID NO: 23712 - DNA, 22 bp, Artificial Sequence
  chemically synthesized
tgtgtgaccttgaataaattac

SEQ ID NO: 23713 - DNA, 22 bp, Artificial Sequence
  chemically synthesized
gtgtgaccttgaataaattact

SEQ ID NO: 23714 - DNA, 22 bp, Artificial Sequence
  chemically synthesized
tgtgaccttgaataaattactt

SEQ ID NO: 23715 - DNA, 22 bp, Artificial Sequence
  chemically synthesized
gaataaattacttcaccccttt

SEQ ID NO: 23716 - DNA, 22 bp, Artificial Sequence
  chemically synthesized
aataaattacttcaccccttta

SEQ ID NO: 23717 - DNA, 22 bp, Artificial Sequence
  chemically synthesized
cttcacccctttatctctcagt

SEQ ID NO: 23718 - DNA, 22 bp, Artificial Sequence
  chemically synthesized
cacccctttatctctcagtttc

SEQ ID NO: 23719 - DNA, 22 bp, Artificial Sequence
  chemically synthesized
acccctttatctctcagtttcc

SEQ ID NO: 23720 - DNA, 22 bp, Artificial Sequence
  chemically synthesized
tatctctcagtttcctcacata

SEQ ID NO: 23721 - DNA, 22 bp, Artificial Sequence
  chemically synthesized
atctctcagtttcctcacatat

SEQ ID NO: 23722 - DNA, 22 bp, Artificial Sequence
  chemically synthesized
tctctcagtttcctcacatata

SEQ ID NO: 23723 - DNA, 22 bp, Artificial Sequence
  chemically synthesized
tcagtttcctcacatatactac

SEQ ID NO: 23724 - DNA, 22 bp, Artificial Sequence
  chemically synthesized
agtttcctcacatatactacaa

SEQ ID NO: 23725 - DNA, 22 bp, Artificial Sequence
  chemically synthesized
cctcacatatactacaaagata

SEQ ID NO: 23726 - DNA, 22 bp, Artificial Sequence
  chemically synthesized
ctcacatatactacaaagataa

SEQ ID NO: 23727 - DNA, 22 bp, Artificial Sequence
  chemically synthesized
acatatactacaaagataataa

SEQ ID NO: 23728 - DNA, 22 bp, Artificial Sequence
  chemically synthesized
caaagataataacagaacttat

SEQ ID NO: 23729 - DNA, 22 bp, Artificial Sequence
  chemically synthesized
ataggattattgtaagaaaaaa

SEQ ID NO: 23730 - DNA, 22 bp, Artificial Sequence
  chemically synthesized
taggattattgtaagaaaaaaa

SEQ ID NO: 23731 - DNA, 22 bp, Artificial Sequence
  chemically synthesized
ttgtaagaaaaaaaattaattc

SEQ ID NO: 23732 - DNA, 22 bp, Artificial Sequence
  chemically synthesized
taagaaaaaaaattaattcata

SEQ ID NO: 23733 - DNA, 22 bp, Artificial Sequence
  chemically synthesized
attcatagcagccaatgtcatc

SEQ ID NO: 23734 - DNA, 22 bp, Artificial Sequence
  chemically synthesized
atagcagccaatgtcatcttac

SEQ ID NO: 23735 - DNA, 22 bp, Artificial Sequence
  chemically synthesized
actaaaattcaaattagatcat

SEQ ID NO: 23736 - DNA, 22 bp, Artificial Sequence
  chemically synthesized
ctaaaattcaaattagatcatg

SEQ ID NO: 23737 - DNA, 22 bp, Artificial Sequence
  chemically synthesized
aaattcaaattagatcatgttt

SEQ ID NO: 23738 - DNA, 22 bp, Artificial Sequence
  chemically synthesized
aaattagatcatgtttctcttt

SEQ ID NO: 23739 - DNA, 22 bp, Artificial Sequence
  chemically synthesized
gatcatgtttctctttgctcaa

SEQ ID NO: 23740 - DNA, 22 bp, Artificial Sequence
  chemically synthesized
ctctttgctcaaaaccacacaa

SEQ ID NO: 23741 - DNA, 22 bp, Artificial Sequence
  chemically synthesized
tctttgctcaaaaccacacaat

SEQ ID NO: 23742 - DNA, 22 bp, Artificial Sequence
  chemically synthesized
tttgctcaaaaccacacaatag

SEQ ID NO: 23743 - DNA, 22 bp, Artificial Sequence
  chemically synthesized
tgctcaaaaccacacaatagct

SEQ ID NO: 23744 - DNA, 22 bp, Artificial Sequence
  chemically synthesized
gctcaaaaccacacaatagctt

SEQ ID NO: 23745 - DNA, 22 bp, Artificial Sequence
  chemically synthesized
ctcaaaaccacacaatagcttt

SEQ ID NO: 23746 - DNA, 22 bp, Artificial Sequence
  chemically synthesized
aaaaccacacaatagctttcca

SEQ ID NO: 23747 - DNA, 22 bp, Artificial Sequence
  chemically synthesized
tccatttcactcatattggctc

SEQ ID NO: 23748 - DNA, 22 bp, Artificial Sequence
  chemically synthesized
ccatttcactcatattggctct

SEQ ID NO: 23749 - DNA, 22 bp, Artificial Sequence
  chemically synthesized
catttcactcatattggctctt

SEQ ID NO: 23750 - DNA, 22 bp, Artificial Sequence
  chemically synthesized
cactcatattggctctttagac

SEQ ID NO: 23751 - DNA, 22 bp, Artificial Sequence
  chemically synthesized
actcatattggctctttagacc

SEQ ID NO: 23752 - DNA, 22 bp, Artificial Sequence
  chemically synthesized
atattggctctttagaccaaga

SEQ ID NO: 23753 - DNA, 22 bp, Artificial Sequence
  chemically synthesized
gctctttagaccaagattaccc

SEQ ID NO: 23754 - DNA, 22 bp, Artificial Sequence
  chemically synthesized
ggtaatcttggtctaaagagcc

SEQ ID NO: 23755 - DNA, 22 bp, Artificial Sequence
  chemically synthesized
ggtctaaagagccaatatgagt

SEQ ID NO: 23756 - DNA, 22 bp, Artificial Sequence
  chemically synthesized
gtctaaagagccaatatgagtg

SEQ ID NO: 23757 - DNA, 22 bp, Artificial Sequence
  chemically synthesized
aagagccaatatgagtgaaatg

SEQ ID NO: 23758 - DNA, 22 bp, Artificial Sequence
  chemically synthesized
ttgtgtggttttgagcaaagag

SEQ ID NO: 23759 - DNA, 22 bp, Artificial Sequence
  chemically synthesized
tgtggttttgagcaaagagaaa

SEQ ID NO: 23760 - DNA, 22 bp, Artificial Sequence
  chemically synthesized
tgagcaaagagaaacatgatct

SEQ ID NO: 23761 - DNA, 22 bp, Artificial Sequence
  chemically synthesized
gagcaaagagaaacatgatcta

SEQ ID NO: 23762 - DNA, 22 bp, Artificial Sequence
  chemically synthesized
agcaaagagaaacatgatctaa

SEQ ID NO: 23763 - DNA, 22 bp, Artificial Sequence
  chemically synthesized
atttgaattttagtaagatgac

SEQ ID NO: 23764 - DNA, 22 bp, Artificial Sequence
  chemically synthesized
gaattttagtaagatgacattg

SEQ ID NO: 23765 - DNA, 22 bp, Artificial Sequence
  chemically synthesized
aattttagtaagatgacattgg

SEQ ID NO: 23766 - DNA, 22 bp, Artificial Sequence
  chemically synthesized
tagtaagatgacattggctgct

SEQ ID NO: 23767 - DNA, 22 bp, Artificial Sequence
  chemically synthesized
agtaagatgacattggctgcta

SEQ ID NO: 23768 - DNA, 22 bp, Artificial Sequence
  chemically synthesized
gtaagatgacattggctgctat

SEQ ID NO: 23769 - DNA, 22 bp, Artificial Sequence
  chemically synthesized
gctgctatgaattaattttttt

SEQ ID NO: 23770 - DNA, 22 bp, Artificial Sequence
  chemically synthesized
ctatgaattaattttttttctt

SEQ ID NO: 23771 - DNA, 22 bp, Artificial Sequence
  chemically synthesized
tgaattaattttttttcttaca

SEQ ID NO: 23772 - DNA, 22 bp, Artificial Sequence
  chemically synthesized
attttttttcttacaataatcc

SEQ ID NO: 23773 - DNA, 22 bp, Artificial Sequence
  chemically synthesized
tttttcttacaataatcctata

SEQ ID NO: 23774 - DNA, 22 bp, Artificial Sequence
  chemically synthesized
ttttcttacaataatcctataa

SEQ ID NO: 23775 - DNA, 22 bp, Artificial Sequence
  chemically synthesized
tttcttacaataatcctataag

SEQ ID NO: 23776 - DNA, 22 bp, Artificial Sequence
  chemically synthesized
ttcttacaataatcctataagt

SEQ ID NO: 23777 - DNA, 22 bp, Artificial Sequence
  chemically synthesized
tcttacaataatcctataagtt

SEQ ID NO: 23778 - DNA, 22 bp, Artificial Sequence
  chemically synthesized
cttacaataatcctataagttc

SEQ ID NO: 23779 - DNA, 22 bp, Artificial Sequence
  chemically synthesized
ttacaataatcctataagttct

SEQ ID NO: 23780 - DNA, 22 bp, Artificial Sequence
  chemically synthesized
acaataatcctataagttctgt

SEQ ID NO: 23781 - DNA, 22 bp, Artificial Sequence
  chemically synthesized
caataatcctataagttctgtt

SEQ ID NO: 23782 - DNA, 22 bp, Artificial Sequence
  chemically synthesized
taagttctgttattatctttgt

SEQ ID NO: 23783 - DNA, 22 bp, Artificial Sequence
  chemically synthesized
tgttattatctttgtagtatat

SEQ ID NO: 23784 - DNA, 22 bp, Artificial Sequence
  chemically synthesized
ttattatctttgtagtatatgt

SEQ ID NO: 23785 - DNA, 22 bp, Artificial Sequence
  chemically synthesized
ttatctttgtagtatatgtgag

SEQ ID NO: 23786 - DNA, 22 bp, Artificial Sequence
  chemically synthesized
tctttgtagtatatgtgaggaa

SEQ ID NO: 23787 - DNA, 22 bp, Artificial Sequence
  chemically synthesized
tgtagtatatgtgaggaaactg

SEQ ID NO: 23788 - DNA, 22 bp, Artificial Sequence
  chemically synthesized
gtagtatatgtgaggaaactga

SEQ ID NO: 23789 - DNA, 22 bp, Artificial Sequence
  chemically synthesized
tagtatatgtgaggaaactgag

SEQ ID NO: 23790 - DNA, 22 bp, Artificial Sequence
  chemically synthesized
agagataaaggggtgaagtaat

SEQ ID NO: 23791 - DNA, 22 bp, Artificial Sequence
  chemically synthesized
attcaaggtcacacaaagtttt

SEQ ID NO: 23792 - DNA, 22 bp, Artificial Sequence
  chemically synthesized
ttcaaggtcacacaaagtttta

SEQ ID NO: 23793 - DNA, 22 bp, Artificial Sequence
  chemically synthesized
aaggtcacacaaagttttagag

SEQ ID NO: 23794 - DNA, 22 bp, Artificial Sequence
  chemically synthesized
tagagccatggtttaaatgcag

SEQ ID NO: 23795 - DNA, 22 bp, Artificial Sequence
  chemically synthesized
agagccatggtttaaatgcagg

SEQ ID NO: 23796 - DNA, 22 bp, Artificial Sequence
  chemically synthesized
gagccatggtttaaatgcaggt

SEQ ID NO: 23797 - DNA, 22 bp, Artificial Sequence
  chemically synthesized
aaatgcaggtagtttattagct

SEQ ID NO: 23798 - DNA, 22 bp, Artificial Sequence
  chemically synthesized
aatgcaggtagtttattagctt

SEQ ID NO: 23799 - DNA, 22 bp, Artificial Sequence
  chemically synthesized
attagcttcagagcctgcaatt

SEQ ID NO: 23800 - DNA, 22 bp, Artificial Sequence
  chemically synthesized
ttagcttcagagcctgcaattt

SEQ ID NO: 23801 - DNA, 22 bp, Artificial Sequence
  chemically synthesized
gcttcagagcctgcaattttaa

SEQ ID NO: 23802 - DNA, 22 bp, Artificial Sequence
  chemically synthesized
cagagcctgcaattttaacagt

SEQ ID NO: 23803 - DNA, 22 bp, Artificial Sequence
  chemically synthesized
agagcctgcaattttaacagtt

SEQ ID NO: 23804 - DNA, 22 bp, Artificial Sequence
  chemically synthesized
caattttaacagttatgctgat

SEQ ID NO: 23805 - DNA, 22 bp, Artificial Sequence
  chemically synthesized
taacagttatgctgatgtgata

SEQ ID NO: 23806 - DNA, 22 bp, Artificial Sequence
  chemically synthesized
aacagttatgctgatgtgataa

SEQ ID NO: 23807 - DNA, 22 bp, Artificial Sequence
  chemically synthesized
acagttatgctgatgtgataat

SEQ ID NO: 23808 - DNA, 22 bp, Artificial Sequence
  chemically synthesized
tgctgatgtgataattttactc

SEQ ID NO: 23809 - DNA, 22 bp, Artificial Sequence
  chemically synthesized
atgtgataattttactcatgat

SEQ ID NO: 23810 - DNA, 22 bp, Artificial Sequence
  chemically synthesized
tactcatgatccagttaaagct

SEQ ID NO: 23811 - DNA, 22 bp, Artificial Sequence
  chemically synthesized
actcatgatccagttaaagctt

SEQ ID NO: 23812 - DNA, 22 bp, Artificial Sequence
  chemically synthesized
ctcatgatccagttaaagcttg

SEQ ID NO: 23813 - DNA, 22 bp, Artificial Sequence
  chemically synthesized
atgatccagttaaagcttgtaa

SEQ ID NO: 23814 - DNA, 22 bp, Artificial Sequence
  chemically synthesized
aagcttgtaaataattttagga

SEQ ID NO: 23815 - DNA, 22 bp, Artificial Sequence
  chemically synthesized
gtaaataattttaggattcagt

SEQ ID NO: 23816 - DNA, 22 bp, Artificial Sequence
  chemically synthesized
taaataattttaggattcagtg

SEQ ID NO: 23817 - DNA, 22 bp, Artificial Sequence
  chemically synthesized
taggattcagtgtttttacaga

SEQ ID NO: 23818 - DNA, 22 bp, Artificial Sequence
  chemically synthesized
aggattcagtgtttttacagac

SEQ ID NO: 23819 - DNA, 22 bp, Artificial Sequence
  chemically synthesized
ggattcagtgtttttacagacc

SEQ ID NO: 23820 - DNA, 22 bp, Artificial Sequence
  chemically synthesized
agtgtttttacagacctgtgtg

SEQ ID NO: 23821 - DNA, 22 bp, Artificial Sequence
  chemically synthesized
ttacagacctgtgtgaaagatg

SEQ ID NO: 23822 - DNA, 22 bp, Artificial Sequence
  chemically synthesized
tacagacctgtgtgaaagatgg

SEQ ID NO: 23823 - DNA, 22 bp, Artificial Sequence
  chemically synthesized
acagacctgtgtgaaagatggg

SEQ ID NO: 23824 - DNA, 22 bp, Artificial Sequence
  chemically synthesized
cagacctgtgtgaaagatggga

SEQ ID NO: 23825 - DNA, 22 bp, Artificial Sequence
  chemically synthesized
tgtgaaagatgggacataccat

SEQ ID NO: 23826 - DNA, 22 bp, Artificial Sequence
  chemically synthesized
aaatactgacttacctgatttt

SEQ ID NO: 23827 - DNA, 22 bp, Artificial Sequence
  chemically synthesized
acttacctgattttctatttct

SEQ ID NO: 23828 - DNA, 22 bp, Artificial Sequence
  chemically synthesized
acctgattttctatttctttta

SEQ ID NO: 23829 - DNA, 22 bp, Artificial Sequence
  chemically synthesized
cctgattttctatttcttttat

SEQ ID NO: 23830 - DNA, 22 bp, Artificial Sequence
  chemically synthesized
attttctatttcttttatttga

SEQ ID NO: 23831 - DNA, 22 bp, Artificial Sequence
  chemically synthesized
tctatttcttttatttgactat

SEQ ID NO: 23832 - DNA, 22 bp, Artificial Sequence
  chemically synthesized
ctatttcttttatttgactatg

SEQ ID NO: 23833 - DNA, 22 bp, Artificial Sequence
  chemically synthesized
tatttcttttatttgactatgc

SEQ ID NO: 23834 - DNA, 22 bp, Artificial Sequence
  chemically synthesized
tttcttttatttgactatgctg

SEQ ID NO: 23835 - DNA, 22 bp, Artificial Sequence
  chemically synthesized
cttttatttgactatgctgttg

SEQ ID NO: 23836 - DNA, 22 bp, Artificial Sequence
  chemically synthesized
ttttatttgactatgctgttgg

SEQ ID NO: 23837 - DNA, 22 bp, Artificial Sequence
  chemically synthesized
ttatttgactatgctgttggtt

SEQ ID NO: 23838 - DNA, 22 bp, Artificial Sequence
  chemically synthesized
tatttgactatgctgttggttt

SEQ ID NO: 23839 - DNA, 22 bp, Artificial Sequence
  chemically synthesized
atttgactatgctgttggttta

SEQ ID NO: 23840 - DNA, 22 bp, Artificial Sequence
  chemically synthesized
tttgactatgctgttggtttaa

SEQ ID NO: 23841 - DNA, 22 bp, Artificial Sequence
  chemically synthesized
gactatgctgttggtttaattg

SEQ ID NO: 23842 - DNA, 22 bp, Artificial Sequence
  chemically synthesized
actatgctgttggtttaattgt

SEQ ID NO: 23843 - DNA, 22 bp, Artificial Sequence
  chemically synthesized
tgctgttggtttaattgtttat

SEQ ID NO: 23844 - DNA, 22 bp, Artificial Sequence
  chemically synthesized
ttggtttaattgtttatattgg

SEQ ID NO: 23845 - DNA, 22 bp, Artificial Sequence
  chemically synthesized
gtttaattgtttatattggtct

SEQ ID NO: 23846 - DNA, 22 bp, Artificial Sequence
  chemically synthesized
aattgtttatattggtcttcca

SEQ ID NO: 23847 - DNA, 22 bp, Artificial Sequence
  chemically synthesized
attgtttatattggtcttccac

SEQ ID NO: 23848 - DNA, 22 bp, Artificial Sequence
  chemically synthesized
tttatattggtcttccacggtc

SEQ ID NO: 23849 - DNA, 22 bp, Artificial Sequence
  chemically synthesized
atattggtcttccacggtctgg

SEQ ID NO: 23850 - DNA, 22 bp, Artificial Sequence
  chemically synthesized
tattggtcttccacggtctgga

SEQ ID NO: 23851 - DNA, 22 bp, Artificial Sequence
  chemically synthesized
gtcttccacggtctggagaagg

SEQ ID NO: 23852 - DNA, 22 bp, Artificial Sequence
  chemically synthesized
ccacggtctggagaaggtcttt

SEQ ID NO: 23853 - DNA, 22 bp, Artificial Sequence
  chemically synthesized
cacggtctggagaaggtctttg

SEQ ID NO: 23854 - DNA, 22 bp, Artificial Sequence
  chemically synthesized
gagaaggtctttgatgctatta

SEQ ID NO: 23855 - DNA, 22 bp, Artificial Sequence
  chemically synthesized
tgatgctattatcttgtttttc

SEQ ID NO: 23856 - DNA, 22 bp, Artificial Sequence
  chemically synthesized
gatgctattatcttgtttttct

SEQ ID NO: 23857 - DNA, 22 bp, Artificial Sequence
  chemically synthesized
atgctattatcttgtttttcta

SEQ ID NO: 23858 - DNA, 22 bp, Artificial Sequence
  chemically synthesized
ttatcttgtttttctacaaaag

SEQ ID NO: 23859 - DNA, 22 bp, Artificial Sequence
  chemically synthesized
tcttgtttttctacaaaagtct

SEQ ID NO: 23860 - DNA, 22 bp, Artificial Sequence
  chemically synthesized
gtttttctacaaaagtctggat

SEQ ID NO: 23861 - DNA, 22 bp, Artificial Sequence
  chemically synthesized
tttttctacaaaagtctggata

SEQ ID NO: 23862 - DNA, 22 bp, Artificial Sequence
  chemically synthesized
ttctacaaaagtctggatatag

SEQ ID NO: 23863 - DNA, 22 bp, Artificial Sequence
  chemically synthesized
tctacaaaagtctggatataga

SEQ ID NO: 23864 - DNA, 22 bp, Artificial Sequence
  chemically synthesized
ctacaaaagtctggatatagag

SEQ ID NO: 23865 - DNA, 22 bp, Artificial Sequence
  chemically synthesized
tacaaaagtctggatatagaga

SEQ ID NO: 23866 - DNA, 22 bp, Artificial Sequence
  chemically synthesized
caaaagtctggatatagagagt

SEQ ID NO: 23867 - DNA, 22 bp, Artificial Sequence
  chemically synthesized
gatatagagagtaggttggtta

SEQ ID NO: 23868 - DNA, 22 bp, Artificial Sequence
  chemically synthesized
gttataagttgctttcctcttt

SEQ ID NO: 23869 - DNA, 22 bp, Artificial Sequence
  chemically synthesized
taagttgctttcctctttcttt

SEQ ID NO: 23870 - DNA, 22 bp, Artificial Sequence
  chemically synthesized
ctttcctctttcttttctatta

SEQ ID NO: 23871 - DNA, 22 bp, Artificial Sequence
  chemically synthesized
tcctctttcttttctattaatt

SEQ ID NO: 23872 - DNA, 22 bp, Artificial Sequence
  chemically synthesized
cctctttcttttctattaattt

SEQ ID NO: 23873 - DNA, 22 bp, Artificial Sequence
  chemically synthesized
ctctttcttttctattaatttc

SEQ ID NO: 23874 - DNA, 22 bp, Artificial Sequence
  chemically synthesized
tttcttttctattaatttcctg

SEQ ID NO: 23875 - DNA, 22 bp, Artificial Sequence
  chemically synthesized
tcttttctattaatttcctgta

SEQ ID NO: 23876 - DNA, 22 bp, Artificial Sequence
  chemically synthesized
cttttctattaatttcctgtaa

SEQ ID NO: 23877 - DNA, 22 bp, Artificial Sequence
  chemically synthesized
ttttctattaatttcctgtaac

SEQ ID NO: 23878 - DNA, 22 bp, Artificial Sequence
  chemically synthesized
ttctattaatttcctgtaacac

SEQ ID NO: 23879 - DNA, 22 bp, Artificial Sequence
  chemically synthesized
tctattaatttcctgtaacact

SEQ ID NO: 23880 - DNA, 22 bp, Artificial Sequence
  chemically synthesized
ctattaatttcctgtaacacta

SEQ ID NO: 23881 - DNA, 22 bp, Artificial Sequence
  chemically synthesized
tattaatttcctgtaacactat

SEQ ID NO: 23882 - DNA, 22 bp, Artificial Sequence
  chemically synthesized
ttaatttcctgtaacactatca

SEQ ID NO: 23883 - DNA, 22 bp, Artificial Sequence
  chemically synthesized
atttcctgtaacactatcataa

SEQ ID NO: 23884 - DNA, 22 bp, Artificial Sequence
  chemically synthesized
cctgtaacactatcataatcta

SEQ ID NO: 23885 - DNA, 22 bp, Artificial Sequence
  chemically synthesized
ctgtaacactatcataatctaa

SEQ ID NO: 23886 - DNA, 22 bp, Artificial Sequence
  chemically synthesized
taacactatcataatctaaatt

SEQ ID NO: 23887 - DNA, 22 bp, Artificial Sequence
  chemically synthesized
tcataatctaaatttttaaact

SEQ ID NO: 23888 - DNA, 22 bp, Artificial Sequence
  chemically synthesized
aatttttaaactaataatggat

SEQ ID NO: 23889 - DNA, 22 bp, Artificial Sequence
  chemically synthesized
ttaaactaataatggatttgaa

SEQ ID NO: 23890 - DNA, 22 bp, Artificial Sequence
  chemically synthesized
taaactaataatggatttgaaa

SEQ ID NO: 23891 - DNA, 22 bp, Artificial Sequence
  chemically synthesized
aaactaataatggatttgaaaa

SEQ ID NO: 23892 - DNA, 22 bp, Artificial Sequence
  chemically synthesized
aactaataatggatttgaaaaa

SEQ ID NO: 23893 - DNA, 22 bp, Artificial Sequence
  chemically synthesized
ataatggatttgaaaaatgaat

SEQ ID NO: 23894 - DNA, 22 bp, Artificial Sequence
  chemically synthesized
gaaaaatgaatattggcaattc

SEQ ID NO: 23895 - DNA, 22 bp, Artificial Sequence
  chemically synthesized
aaaaatgaatattggcaattcc

SEQ ID NO: 23896 - DNA, 22 bp, Artificial Sequence
  chemically synthesized
gcaattccttccccttgtatgc

SEQ ID NO: 23897 - DNA, 22 bp, Artificial Sequence
  chemically synthesized
cttccccttgtatgcttctttc

SEQ ID NO: 23898 - DNA, 22 bp, Artificial Sequence
  chemically synthesized
ccccttgtatgcttctttcaaa

SEQ ID NO: 23899 - DNA, 22 bp, Artificial Sequence
  chemically synthesized
cccttgtatgcttctttcaaat

SEQ ID NO: 23900 - DNA, 22 bp, Artificial Sequence
  chemically synthesized
gtatgcttctttcaaatagcac

SEQ ID NO: 23901 - DNA, 22 bp, Artificial Sequence
  chemically synthesized
tatgcttctttcaaatagcaca

SEQ ID NO: 23902 - DNA, 22 bp, Artificial Sequence
  chemically synthesized
ctttcaaatagcacatattttt

SEQ ID NO: 23903 - DNA, 22 bp, Artificial Sequence
  chemically synthesized
tttcaaatagcacatatttttg

SEQ ID NO: 23904 - DNA, 22 bp, Artificial Sequence
  chemically synthesized
tcaaatagcacatatttttgtc

SEQ ID NO: 23905 - DNA, 22 bp, Artificial Sequence
  chemically synthesized
caaatagcacatatttttgtcc

SEQ ID NO: 23906 - DNA, 22 bp, Artificial Sequence
  chemically synthesized
aaatagcacatatttttgtcct

SEQ ID NO: 23907 - DNA, 22 bp, Artificial Sequence
  chemically synthesized
ttgtccttaacattttatttaa

SEQ ID NO: 23908 - DNA, 22 bp, Artificial Sequence
  chemically synthesized
tgtccttaacattttatttaaa

SEQ ID NO: 23909 - DNA, 22 bp, Artificial Sequence
  chemically synthesized
gtccttaacattttatttaaat

SEQ ID NO: 23910 - DNA, 22 bp, Artificial Sequence
  chemically synthesized
tccttaacattttatttaaatt

SEQ ID NO: 23911 - DNA, 22 bp, Artificial Sequence
  chemically synthesized
aacattttatttaaattgtact

SEQ ID NO: 23912 - DNA, 22 bp, Artificial Sequence
  chemically synthesized
acattttatttaaattgtacta

SEQ ID NO: 23913 - DNA, 22 bp, Artificial Sequence
  chemically synthesized
tatttaaattgtactatctcta

SEQ ID NO: 23914 - DNA, 22 bp, Artificial Sequence
  chemically synthesized
atttaaattgtactatctctaa

SEQ ID NO: 23915 - DNA, 22 bp, Artificial Sequence
  chemically synthesized
tttaaattgtactatctctaaa

SEQ ID NO: 23916 - DNA, 22 bp, Artificial Sequence
  chemically synthesized
aaattgtactatctctaaaatt

SEQ ID NO: 23917 - DNA, 22 bp, Artificial Sequence
  chemically synthesized
aattgtactatctctaaaattt

SEQ ID NO: 23918 - DNA, 22 bp, Artificial Sequence
  chemically synthesized
tactatctctaaaatttgattt

SEQ ID NO: 23919 - DNA, 22 bp, Artificial Sequence
  chemically synthesized
tctctaaaatttgattttctga

SEQ ID NO: 23920 - DNA, 22 bp, Artificial Sequence
  chemically synthesized
taaaatttgattttctgaactt

SEQ ID NO: 23921 - DNA, 22 bp, Artificial Sequence
  chemically synthesized
aaatttgattttctgaacttca

SEQ ID NO: 23922 - DNA, 22 bp, Artificial Sequence
  chemically synthesized
gattttctgaacttcaattaaa

SEQ ID NO: 23923 - DNA, 22 bp, Artificial Sequence
  chemically synthesized
attttctgaacttcaattaaaa

SEQ ID NO: 23924 - DNA, 22 bp, Artificial Sequence
  chemically synthesized
tctgaacttcaattaaaagaaa

SEQ ID NO: 23925 - DNA, 22 bp, Artificial Sequence
  chemically synthesized
ctgaacttcaattaaaagaaaa

SEQ ID NO: 23926 - DNA, 22 bp, Artificial Sequence
  chemically synthesized
tgaacttcaattaaaagaaaaa

SEQ ID NO: 23927 - DNA, 22 bp, Artificial Sequence
  chemically synthesized
aacttcaattaaaagaaaaagc

SEQ ID NO: 23928 - DNA, 22 bp, Artificial Sequence
  chemically synthesized
caattaaaagaaaaagcccagc

SEQ ID NO: 23929 - DNA, 22 bp, Artificial Sequence
  chemically synthesized
aattaaaagaaaaagcccagca

SEQ ID NO: 23930 - DNA, 22 bp, Artificial Sequence
  chemically synthesized
aaagaaaaagcccagcatattt

SEQ ID NO: 23931 - DNA, 22 bp, Artificial Sequence
  chemically synthesized
tcatatgaataaatcttttcca

SEQ ID NO: 23932 - DNA, 22 bp, Artificial Sequence
  chemically synthesized
catatgaataaatcttttccat

SEQ ID NO: 23933 - DNA, 22 bp, Artificial Sequence
  chemically synthesized
atatgaataaatcttttccatt

SEQ ID NO: 23934 - DNA, 22 bp, Artificial Sequence
  chemically synthesized
ttccatttactgtattatttaa

SEQ ID NO: 23935 - DNA, 22 bp, Artificial Sequence
  chemically synthesized
tccatttactgtattatttaat

SEQ ID NO: 23936 - DNA, 22 bp, Artificial Sequence
  chemically synthesized
ccatttactgtattatttaatc

SEQ ID NO: 23937 - DNA, 22 bp, Artificial Sequence
  chemically synthesized
catttactgtattatttaatct

SEQ ID NO: 23938 - DNA, 22 bp, Artificial Sequence
  chemically synthesized
actgtattatttaatctgtttt

SEQ ID NO: 23939 - DNA, 22 bp, Artificial Sequence
  chemically synthesized
ctgtattatttaatctgtttta

SEQ ID NO: 23940 - DNA, 22 bp, Artificial Sequence
  chemically synthesized
tattatttaatctgttttaaac

SEQ ID NO: 23941 - DNA, 22 bp, Artificial Sequence
  chemically synthesized
tttaatctgttttaaacactgg

SEQ ID NO: 23942 - DNA, 22 bp, Artificial Sequence
  chemically synthesized
aatctgttttaaacactggaga

SEQ ID NO: 23943 - DNA, 22 bp, Artificial Sequence
  chemically synthesized
atctgttttaaacactggagaa

SEQ ID NO: 23944 - DNA, 22 bp, Artificial Sequence
  chemically synthesized
ttttaaacactggagaatagtt

SEQ ID NO: 23945 - DNA, 22 bp, Artificial Sequence
  chemically synthesized
taaacactggagaatagtttta

SEQ ID NO: 23946 - DNA, 22 bp, Artificial Sequence
  chemically synthesized
aaacactggagaatagttttaa

SEQ ID NO: 23947 - DNA, 22 bp, Artificial Sequence
  chemically synthesized
aacactggagaatagttttaaa

SEQ ID NO: 23948 - DNA, 22 bp, Artificial Sequence
  chemically synthesized
gagaatagttttaaattttttt

SEQ ID NO: 23949 - DNA, 22 bp, Artificial Sequence
  chemically synthesized
taaattttttttaactttttac

SEQ ID NO: 23950 - DNA, 22 bp, Artificial Sequence
  chemically synthesized
aaattttttttaactttttact

SEQ ID NO: 23951 - DNA, 22 bp, Artificial Sequence
  chemically synthesized
aattttttttaactttttactt

SEQ ID NO: 23952 - DNA, 22 bp, Artificial Sequence
  chemically synthesized
tttttaactttttacttacctt

SEQ ID NO: 23953 - DNA, 22 bp, Artificial Sequence
  chemically synthesized
ttttaactttttacttaccttc

SEQ ID NO: 23954 - DNA, 22 bp, Artificial Sequence
  chemically synthesized
tttaactttttacttaccttca

SEQ ID NO: 23955 - DNA, 22 bp, Artificial Sequence
  chemically synthesized
ttaactttttacttaccttcag

SEQ ID NO: 23956 - DNA, 22 bp, Artificial Sequence
  chemically synthesized
taactttttacttaccttcagt

SEQ ID NO: 23957 - DNA, 22 bp, Artificial Sequence
  chemically synthesized
aactttttacttaccttcagta

SEQ ID NO: 23958 - DNA, 22 bp, Artificial Sequence
  chemically synthesized
actttttacttaccttcagtaa

SEQ ID NO: 23959 - DNA, 22 bp, Artificial Sequence
  chemically synthesized
tttacttaccttcagtaattta

SEQ ID NO: 23960 - DNA, 22 bp, Artificial Sequence
  chemically synthesized
ttacttaccttcagtaatttac

SEQ ID NO: 23961 - DNA, 22 bp, Artificial Sequence
  chemically synthesized
tacttaccttcagtaatttaca

SEQ ID NO: 23962 - DNA, 22 bp, Artificial Sequence
  chemically synthesized
acttaccttcagtaatttacaa

SEQ ID NO: 23963 - DNA, 22 bp, Artificial Sequence
  chemically synthesized
cttaccttcagtaatttacaat

SEQ ID NO: 23964 - DNA, 22 bp, Artificial Sequence
  chemically synthesized
accttcagtaatttacaatagt

SEQ ID NO: 23965 - DNA, 22 bp, Artificial Sequence
  chemically synthesized
ccttcagtaatttacaatagtg

SEQ ID NO: 23966 - DNA, 22 bp, Artificial Sequence
  chemically synthesized
cagtaatttacaatagtgtaat

SEQ ID NO: 23967 - DNA, 22 bp, Artificial Sequence
  chemically synthesized
agtaatttacaatagtgtaatg

SEQ ID NO: 23968 - DNA, 22 bp, Artificial Sequence
  chemically synthesized
acaatagtgtaatgacatagtg

SEQ ID NO: 23969 - DNA, 22 bp, Artificial Sequence
  chemically synthesized
caatagtgtaatgacatagtgt

SEQ ID NO: 23970 - DNA, 22 bp, Artificial Sequence
  chemically synthesized
tagattgtataatttaaccgat

SEQ ID NO: 23971 - DNA, 22 bp, Artificial Sequence
  chemically synthesized
gattgtataatttaaccgattt

SEQ ID NO: 23972 - DNA, 22 bp, Artificial Sequence
  chemically synthesized
tataatttaaccgatttgtaat

SEQ ID NO: 23973 - DNA, 22 bp, Artificial Sequence
  chemically synthesized
aaccgatttgtaattttcatat

SEQ ID NO: 23974 - DNA, 22 bp, Artificial Sequence
  chemically synthesized
accgatttgtaattttcatata

SEQ ID NO: 23975 - DNA, 22 bp, Artificial Sequence
  chemically synthesized
gtaattttcatataaaatgcaa

SEQ ID NO: 23976 - DNA, 22 bp, Artificial Sequence
  chemically synthesized
taattttcatataaaatgcaaa

SEQ ID NO: 23977 - DNA, 22 bp, Artificial Sequence
  chemically synthesized
tcatataaaatgcaaattttca

SEQ ID NO: 23978 - DNA, 22 bp, Artificial Sequence
  chemically synthesized
catataaaatgcaaattttcag

SEQ ID NO: 23979 - DNA, 22 bp, Artificial Sequence
  chemically synthesized
atataaaatgcaaattttcagt

SEQ ID NO: 23980 - DNA, 22 bp, Artificial Sequence
  chemically synthesized
tcagtgttttcatatataacat

SEQ ID NO: 23981 - DNA, 22 bp, Artificial Sequence
  chemically synthesized
cagtgttttcatatataacatt

SEQ ID NO: 23982 - DNA, 22 bp, Artificial Sequence
  chemically synthesized
agtgttttcatatataacatta

SEQ ID NO: 23983 - DNA, 22 bp, Artificial Sequence
  chemically synthesized
tcatatataacattagggaaac

SEQ ID NO: 23984 - DNA, 22 bp, Artificial Sequence
  chemically synthesized
catatataacattagggaaaca

SEQ ID NO: 23985 - DNA, 22 bp, Artificial Sequence
  chemically synthesized
atatataacattagggaaacaa

SEQ ID NO: 23986 - DNA, 22 bp, Artificial Sequence
  chemically synthesized
gggaaacaaaaaactaacttga

SEQ ID NO: 23987 - DNA, 22 bp, Artificial Sequence
  chemically synthesized
acttgaaattataataggaaat

SEQ ID NO: 23988 - DNA, 22 bp, Artificial Sequence
  chemically synthesized
gaaattataataggaaatttta

SEQ ID NO: 23989 - DNA, 22 bp, Artificial Sequence
  chemically synthesized
aaattataataggaaattttat

SEQ ID NO: 23990 - DNA, 22 bp, Artificial Sequence
  chemically synthesized
taataggaaattttattttctg

SEQ ID NO: 23991 - DNA, 22 bp, Artificial Sequence
  chemically synthesized
tattttctggagattatttttc

SEQ ID NO: 23992 - DNA, 22 bp, Artificial Sequence
  chemically synthesized
attttctggagattatttttct

SEQ ID NO: 23993 - DNA, 22 bp, Artificial Sequence
  chemically synthesized
ttttctggagattatttttctt

SEQ ID NO: 23994 - DNA, 22 bp, Artificial Sequence
  chemically synthesized
tctggagattatttttcttgga

SEQ ID NO: 23995 - DNA, 22 bp, Artificial Sequence
  chemically synthesized
ctggagattatttttcttggaa

SEQ ID NO: 23996 - DNA, 22 bp, Artificial Sequence
  chemically synthesized
tggagattatttttcttggaaa

SEQ ID NO: 23997 - DNA, 22 bp, Artificial Sequence
  chemically synthesized
gagattatttttcttggaaaaa

SEQ ID NO: 23998 - DNA, 22 bp, Artificial Sequence
  chemically synthesized
tttttcttggaaaaaaaagtat

SEQ ID NO: 23999 - DNA, 22 bp, Artificial Sequence
  chemically synthesized
ttcttggaaaaaaaagtatttc

SEQ ID NO: 24000 - DNA, 22 bp, Artificial Sequence
  chemically synthesized
tcttggaaaaaaaagtatttca

SEQ ID NO: 24001 - DNA, 22 bp, Artificial Sequence
  chemically synthesized
cttggaaaaaaaagtatttcaa

SEQ ID NO: 24002 - DNA, 22 bp, Artificial Sequence
  chemically synthesized
ttggaaaaaaaagtatttcaac

SEQ ID NO: 24003 - DNA, 22 bp, Artificial Sequence
  chemically synthesized
ggaaaaaaaagtatttcaacaa

SEQ ID NO: 24004 - DNA, 22 bp, Artificial Sequence
  chemically synthesized
gaaaaaaaagtatttcaacaat

SEQ ID NO: 24005 - DNA, 22 bp, Artificial Sequence
  chemically synthesized
caacaatgcaacaaagtatttc

SEQ ID NO: 24006 - DNA, 22 bp, Artificial Sequence
  chemically synthesized
aacaatgcaacaaagtatttca

SEQ ID NO: 24007 - DNA, 22 bp, Artificial Sequence
  chemically synthesized
caaatggcatgccttagaaata

SEQ ID NO: 24008 - DNA, 22 bp, Artificial Sequence
  chemically synthesized
aaatggcatgccttagaaatat

SEQ ID NO: 24009 - DNA, 22 bp, Artificial Sequence
  chemically synthesized
agaaatattttttttaaaagat

SEQ ID NO: 24010 - DNA, 22 bp, Artificial Sequence
  chemically synthesized
gaaatattttttttaaaagatc

SEQ ID NO: 24011 - DNA, 22 bp, Artificial Sequence
  chemically synthesized
tttttaaaagatccacattgaa

SEQ ID NO: 24012 - DNA, 22 bp, Artificial Sequence
  chemically synthesized
ttttaaaagatccacattgaaa

SEQ ID NO: 24013 - DNA, 22 bp, Artificial Sequence
  chemically synthesized
tttaaaagatccacattgaaaa

SEQ ID NO: 24014 - DNA, 22 bp, Artificial Sequence
  chemically synthesized
ttaaaagatccacattgaaaac

SEQ ID NO: 24015 - DNA, 22 bp, Artificial Sequence
  chemically synthesized
taaaagatccacattgaaaaca

SEQ ID NO: 24016 - DNA, 22 bp, Artificial Sequence
  chemically synthesized
aaaagatccacattgaaaacat

SEQ ID NO: 24017 - DNA, 22 bp, Artificial Sequence
  chemically synthesized
aaagatccacattgaaaacata

SEQ ID NO: 24018 - DNA, 22 bp, Artificial Sequence
  chemically synthesized
aaaacataaacatgaaccctct

SEQ ID NO: 24019 - DNA, 22 bp, Artificial Sequence
  chemically synthesized
tttattttctacttactttaag

SEQ ID NO: 24020 - DNA, 22 bp, Artificial Sequence
  chemically synthesized
tattttctacttactttaagtg

SEQ ID NO: 24021 - DNA, 22 bp, Artificial Sequence
  chemically synthesized
attttctacttactttaagtga

SEQ ID NO: 24022 - DNA, 22 bp, Artificial Sequence
  chemically synthesized
ttttctacttactttaagtgaa

SEQ ID NO: 24023 - DNA, 22 bp, Artificial Sequence
  chemically synthesized
tctacttactttaagtgaagtt

SEQ ID NO: 24024 - DNA, 22 bp, Artificial Sequence
  chemically synthesized
ctacttactttaagtgaagtta

SEQ ID NO: 24025 - DNA, 22 bp, Artificial Sequence
  chemically synthesized
tacttactttaagtgaagttac

SEQ ID NO: 24026 - DNA, 22 bp, Artificial Sequence
  chemically synthesized
cttactttaagtgaagttactt

SEQ ID NO: 24027 - DNA, 22 bp, Artificial Sequence
  chemically synthesized
actttaagtgaagttacttctg

SEQ ID NO: 24028 - DNA, 22 bp, Artificial Sequence
  chemically synthesized
ctttaagtgaagttacttctgg

SEQ ID NO: 24029 - DNA, 22 bp, Artificial Sequence
  chemically synthesized
taagtgaagttacttctgggtg

SEQ ID NO: 24030 - DNA, 22 bp, Artificial Sequence
  chemically synthesized
aagtgaagttacttctgggtgt

SEQ ID NO: 24031 - DNA, 22 bp, Artificial Sequence
  chemically synthesized
agtgaagttacttctgggtgtt

SEQ ID NO: 24032 - DNA, 22 bp, Artificial Sequence
  chemically synthesized
cttctgggtgttctggagtttc

SEQ ID NO: 24033 - DNA, 22 bp, Artificial Sequence
  chemically synthesized
ctgggtgttctggagtttcagg

SEQ ID NO: 24034 - DNA, 22 bp, Artificial Sequence
  chemically synthesized
tgggtgttctggagtttcaggt

SEQ ID NO: 24035 - DNA, 22 bp, Artificial Sequence
  chemically synthesized
ggtgttctggagtttcaggttg

SEQ ID NO: 24036 - DNA, 22 bp, Artificial Sequence
  chemically synthesized
tggagtttcaggttgattttga

SEQ ID NO: 24037 - DNA, 22 bp, Artificial Sequence
  chemically synthesized
gagtttcaggttgattttgaat

SEQ ID NO: 24038 - DNA, 22 bp, Artificial Sequence
  chemically synthesized
caggttgattttgaattaagtt

SEQ ID NO: 24039 - DNA, 22 bp, Artificial Sequence
  chemically synthesized
aggttgattttgaattaagtta

SEQ ID NO: 24040 - DNA, 22 bp, Artificial Sequence
  chemically synthesized
attttgaattaagttagttagt

SEQ ID NO: 24041 - DNA, 22 bp, Artificial Sequence
  chemically synthesized
tgaattaagttagttagttgct

SEQ ID NO: 24042 - DNA, 22 bp, Artificial Sequence
  chemically synthesized
gaattaagttagttagttgctc

SEQ ID NO: 24043 - DNA, 22 bp, Artificial Sequence
  chemically synthesized
aattaagttagttagttgctct

SEQ ID NO: 24044 - DNA, 22 bp, Artificial Sequence
  chemically synthesized
agttagttagttgctcttctaa

SEQ ID NO: 24045 - DNA, 22 bp, Artificial Sequence
  chemically synthesized
gttagttgctcttctaaatatt

SEQ ID NO: 24046 - DNA, 22 bp, Artificial Sequence
  chemically synthesized
gttgctcttctaaatatttcac

SEQ ID NO: 24047 - DNA, 22 bp, Artificial Sequence
  chemically synthesized
ctcttctaaatatttcactttt

SEQ ID NO: 24048 - DNA, 22 bp, Artificial Sequence
  chemically synthesized
ttctaaatatttcactttttgt

SEQ ID NO: 24049 - DNA, 22 bp, Artificial Sequence
  chemically synthesized
ctaaatatttcactttttgttg

SEQ ID NO: 24050 - DNA, 22 bp, Artificial Sequence
  chemically synthesized
taaatatttcactttttgttga

SEQ ID NO: 24051 - DNA, 22 bp, Artificial Sequence
  chemically synthesized
aatatttcactttttgttgaag

SEQ ID NO: 24052 - DNA, 22 bp, Artificial Sequence
  chemically synthesized
cactttttgttgaagtagaatt

SEQ ID NO: 24053 - DNA, 22 bp, Artificial Sequence
  chemically synthesized
actttttgttgaagtagaattt

SEQ ID NO: 24054 - DNA, 22 bp, Artificial Sequence
  chemically synthesized
tttgttgaagtagaattttttc

SEQ ID NO: 24055 - DNA, 22 bp, Artificial Sequence
  chemically synthesized
ttgttgaagtagaattttttct

SEQ ID NO: 24056 - DNA, 22 bp, Artificial Sequence
  chemically synthesized
tgttgaagtagaattttttctt

SEQ ID NO: 24057 - DNA, 22 bp, Artificial Sequence
  chemically synthesized
gttgaagtagaattttttcttc

SEQ ID NO: 24058 - DNA, 22 bp, Artificial Sequence
  chemically synthesized
ttgaagtagaattttttcttct

SEQ ID NO: 24059 - DNA, 22 bp, Artificial Sequence
  chemically synthesized
aagtagaattttttcttctagg

SEQ ID NO: 24060 - DNA, 22 bp, Artificial Sequence
  chemically synthesized
tttcttctaggaggctttcaag

SEQ ID NO: 24061 - DNA, 22 bp, Artificial Sequence
  chemically synthesized
ttcttctaggaggctttcaagt

SEQ ID NO: 24062 - DNA, 22 bp, Artificial Sequence
  chemically synthesized
tcttctaggaggctttcaagtt

SEQ ID NO: 24063 - DNA, 22 bp, Artificial Sequence
  chemically synthesized
cttctaggaggctttcaagttt

SEQ ID NO: 24064 - DNA, 22 bp, Artificial Sequence
  chemically synthesized
ttctaggaggctttcaagtttt

SEQ ID NO: 24065 - DNA, 22 bp, Artificial Sequence
  chemically synthesized
ctaggaggctttcaagttttga

SEQ ID NO: 24066 - DNA, 22 bp, Artificial Sequence
  chemically synthesized
taggaggctttcaagttttgag

SEQ ID NO: 24067 - DNA, 22 bp, Artificial Sequence
  chemically synthesized
ggaggctttcaagttttgagtt

SEQ ID NO: 24068 - DNA, 22 bp, Artificial Sequence
  chemically synthesized
tcaagttttgagttgagttcaa

SEQ ID NO: 24069 - DNA, 22 bp, Artificial Sequence
  chemically synthesized
caagttttgagttgagttcaag

SEQ ID NO: 24070 - DNA, 22 bp, Artificial Sequence
  chemically synthesized
aagttttgagttgagttcaagt

SEQ ID NO: 24071 - DNA, 22 bp, Artificial Sequence
  chemically synthesized
tgagttgagttcaagtgacata

SEQ ID NO: 24072 - DNA, 22 bp, Artificial Sequence
  chemically synthesized
gagttgagttcaagtgacatat

SEQ ID NO: 24073 - DNA, 22 bp, Artificial Sequence
  chemically synthesized
agttgagttcaagtgacatatt

SEQ ID NO: 24074 - DNA, 22 bp, Artificial Sequence
  chemically synthesized
agttcaagtgacatattcttta

SEQ ID NO: 24075 - DNA, 22 bp, Artificial Sequence
  chemically synthesized
aagtgacatattctttacctct

SEQ ID NO: 24076 - DNA, 22 bp, Artificial Sequence
  chemically synthesized
tttacctcttcatttttgactt

SEQ ID NO: 24077 - DNA, 22 bp, Artificial Sequence
  chemically synthesized
tacctcttcatttttgacttgt

SEQ ID NO: 24078 - DNA, 22 bp, Artificial Sequence
  chemically synthesized
acctcttcatttttgacttgta

SEQ ID NO: 24079 - DNA, 22 bp, Artificial Sequence
  chemically synthesized
cctcttcatttttgacttgtag

SEQ ID NO: 24080 - DNA, 22 bp, Artificial Sequence
  chemically synthesized
ttcatttttgacttgtagttta

SEQ ID NO: 24081 - DNA, 22 bp, Artificial Sequence
  chemically synthesized
catttttgacttgtagtttata

SEQ ID NO: 24082 - DNA, 22 bp, Artificial Sequence
  chemically synthesized
atttttgacttgtagtttatat

SEQ ID NO: 24083 - DNA, 22 bp, Artificial Sequence
  chemically synthesized
ttgacttgtagtttatatgtag

SEQ ID NO: 24084 - DNA, 22 bp, Artificial Sequence
  chemically synthesized
tgacttgtagtttatatgtagt

SEQ ID NO: 24085 - DNA, 22 bp, Artificial Sequence
  chemically synthesized
gacttgtagtttatatgtagtt

SEQ ID NO: 24086 - DNA, 22 bp, Artificial Sequence
  chemically synthesized
acttgtagtttatatgtagttc

SEQ ID NO: 24087 - DNA, 22 bp, Artificial Sequence
  chemically synthesized
gtagtttatatgtagttcttct

SEQ ID NO: 24088 - DNA, 22 bp, Artificial Sequence
  chemically synthesized
tagtttatatgtagttcttctc

SEQ ID NO: 24089 - DNA, 22 bp, Artificial Sequence
  chemically synthesized
atatgtagttcttctcagttcc

SEQ ID NO: 24090 - DNA, 22 bp, Artificial Sequence
  chemically synthesized
tatgtagttcttctcagttcct

SEQ ID NO: 24091 - DNA, 22 bp, Artificial Sequence
  chemically synthesized
ttctcagttccttttcttcttc

SEQ ID NO: 24092 - DNA, 22 bp, Artificial Sequence
  chemically synthesized
ctcagttccttttcttcttctt

SEQ ID NO: 24093 - DNA, 22 bp, Artificial Sequence
  chemically synthesized
tcagttccttttcttcttcttt

SEQ ID NO: 24094 - DNA, 22 bp, Artificial Sequence
  chemically synthesized
agttccttttcttcttctttga

SEQ ID NO: 24095 - DNA, 22 bp, Artificial Sequence
  chemically synthesized
cttttcttcttctttgatttca

SEQ ID NO: 24096 - DNA, 22 bp, Artificial Sequence
  chemically synthesized
ttcttcttctttgatttcactg

SEQ ID NO: 24097 - DNA, 22 bp, Artificial Sequence
  chemically synthesized
tcttcttctttgatttcactgg

SEQ ID NO: 24098 - DNA, 22 bp, Artificial Sequence
  chemically synthesized
cttcttctttgatttcactggt

SEQ ID NO: 24099 - DNA, 22 bp, Artificial Sequence
  chemically synthesized
ttcttctttgatttcactggtt

SEQ ID NO: 24100 - DNA, 22 bp, Artificial Sequence
  chemically synthesized
cttctttgatttcactggtttg

SEQ ID NO: 24101 - DNA, 22 bp, Artificial Sequence
  chemically synthesized
ttctttgatttcactggtttgc

SEQ ID NO: 24102 - DNA, 22 bp, Artificial Sequence
  chemically synthesized
ctttgatttcactggtttgcag

SEQ ID NO: 24103 - DNA, 22 bp, Artificial Sequence
  chemically synthesized
tttgatttcactggtttgcagc

SEQ ID NO: 24104 - DNA, 22 bp, Artificial Sequence
  chemically synthesized
tgatttcactggtttgcagcga

SEQ ID NO: 24105 - DNA, 22 bp, Artificial Sequence
  chemically synthesized
gatttcactggtttgcagcgat

SEQ ID NO: 24106 - DNA, 22 bp, Artificial Sequence
  chemically synthesized
atttcactggtttgcagcgata

SEQ ID NO: 24107 - DNA, 22 bp, Artificial Sequence
  chemically synthesized
cactggtttgcagcgatagatc

SEQ ID NO: 24108 - DNA, 22 bp, Artificial Sequence
  chemically synthesized
actggtttgcagcgatagatca

SEQ ID NO: 24109 - DNA, 22 bp, Artificial Sequence
  chemically synthesized
gtttgcagcgatagatcataaa

SEQ ID NO: 24110 - DNA, 22 bp, Artificial Sequence
  chemically synthesized
gcagcgatagatcataaaaaga

SEQ ID NO: 24111 - DNA, 22 bp, Artificial Sequence
  chemically synthesized
cagcgatagatcataaaaagac

SEQ ID NO: 24112 - DNA, 22 bp, Artificial Sequence
  chemically synthesized
atcaaatatgttgagtttttga

SEQ ID NO: 24113 - DNA, 22 bp, Artificial Sequence
  chemically synthesized
agtttttgaaatatgtcattaa

SEQ ID NO: 24114 - DNA, 22 bp, Artificial Sequence
  chemically synthesized
ttgaaatatgtcattaatttgg

SEQ ID NO: 24115 - DNA, 22 bp, Artificial Sequence
  chemically synthesized
tgaaatatgtcattaatttggc

SEQ ID NO: 24116 - DNA, 22 bp, Artificial Sequence
  chemically synthesized
gaaatatgtcattaatttggcc

SEQ ID NO: 24117 - DNA, 22 bp, Artificial Sequence
  chemically synthesized
aaatatgtcattaatttggccc

SEQ ID NO: 24118 - DNA, 22 bp, Artificial Sequence
  chemically synthesized
atttggcccttcgtcttatgga

SEQ ID NO: 24119 - DNA, 22 bp, Artificial Sequence
  chemically synthesized
ggcccttcgtcttatggacaaa

SEQ ID NO: 24120 - DNA, 22 bp, Artificial Sequence
  chemically synthesized
gcccttcgtcttatggacaaag

SEQ ID NO: 24121 - DNA, 22 bp, Artificial Sequence
  chemically synthesized
cgtcttatggacaaagtcttta

SEQ ID NO: 24122 - DNA, 22 bp, Artificial Sequence
  chemically synthesized
gtcttatggacaaagtctttaa

SEQ ID NO: 24123 - DNA, 22 bp, Artificial Sequence
  chemically synthesized
atggacaaagtctttaagacca

SEQ ID NO: 24124 - DNA, 22 bp, Artificial Sequence
  chemically synthesized
tggacaaagtctttaagaccat

SEQ ID NO: 24125 - DNA, 22 bp, Artificial Sequence
  chemically synthesized
taagaccatgtcccaactgaag

SEQ ID NO: 24126 - DNA, 22 bp, Artificial Sequence
  chemically synthesized
aagaccatgtcccaactgaagg

SEQ ID NO: 24127 - DNA, 22 bp, Artificial Sequence
  chemically synthesized
agaccatgtcccaactgaagga

SEQ ID NO: 24128 - DNA, 22 bp, Artificial Sequence
  chemically synthesized
aaggaggccattggctaaaatt

SEQ ID NO: 24129 - DNA, 22 bp, Artificial Sequence
  chemically synthesized
gctaaaatttttacatcgtcta

SEQ ID NO: 24130 - DNA, 22 bp, Artificial Sequence
  chemically synthesized
aaatttttacatcgtctaacat

SEQ ID NO: 24131 - DNA, 22 bp, Artificial Sequence
  chemically synthesized
ttacatcgtctaacatagcaaa

SEQ ID NO: 24132 - DNA, 22 bp, Artificial Sequence
  chemically synthesized
tacatcgtctaacatagcaaat

SEQ ID NO: 24133 - DNA, 22 bp, Artificial Sequence
  chemically synthesized
acatcgtctaacatagcaaatc

SEQ ID NO: 24134 - DNA, 22 bp, Artificial Sequence
  chemically synthesized
catcgtctaacatagcaaatct

SEQ ID NO: 24135 - DNA, 22 bp, Artificial Sequence
  chemically synthesized
acatagcaaatcttgattttgg

SEQ ID NO: 24136 - DNA, 22 bp, Artificial Sequence
  chemically synthesized
gattttggctctggagatagag

SEQ ID NO: 24137 - DNA, 22 bp, Artificial Sequence
  chemically synthesized
attttggctctggagatagaga

SEQ ID NO: 24138 - DNA, 22 bp, Artificial Sequence
  chemically synthesized
tggctctggagatagagaatca

SEQ ID NO: 24139 - DNA, 22 bp, Artificial Sequence
  chemically synthesized
ggctctggagatagagaatcaa

SEQ ID NO: 24140 - DNA, 22 bp, Artificial Sequence
  chemically synthesized
gctctggagatagagaatcaaa

SEQ ID NO: 24141 - DNA, 22 bp, Artificial Sequence
  chemically synthesized
tggagatagagaatcaaatgat

SEQ ID NO: 24142 - DNA, 22 bp, Artificial Sequence
  chemically synthesized
gagatagagaatcaaatgatga

SEQ ID NO: 24143 - DNA, 22 bp, Artificial Sequence
  chemically synthesized
tcttgatcaattctggaggaaa

SEQ ID NO: 24144 - DNA, 22 bp, Artificial Sequence
  chemically synthesized
gatcaattctggaggaaataac

SEQ ID NO: 24145 - DNA, 22 bp, Artificial Sequence
  chemically synthesized
atcaattctggaggaaataact

SEQ ID NO: 24146 - DNA, 22 bp, Artificial Sequence
  chemically synthesized
tggaggaaataactagaggaac

SEQ ID NO: 24147 - DNA, 22 bp, Artificial Sequence
  chemically synthesized
gaggaaataactagaggaacaa

SEQ ID NO: 24148 - DNA, 22 bp, Artificial Sequence
  chemically synthesized
gaggaacaataaaaagaaggag

SEQ ID NO: 24149 - DNA, 22 bp, Artificial Sequence
  chemically synthesized
aattgtgaacatttttatcttg

SEQ ID NO: 24150 - DNA, 22 bp, Artificial Sequence
  chemically synthesized
attgtgaacatttttatcttga

SEQ ID NO: 24151 - DNA, 22 bp, Artificial Sequence
  chemically synthesized
tgaacatttttatcttgatttt

SEQ ID NO: 24152 - DNA, 22 bp, Artificial Sequence
  chemically synthesized
ttatcttgattttcaatttcaa

SEQ ID NO: 24153 - DNA, 22 bp, Artificial Sequence
  chemically synthesized
tatcttgattttcaatttcaag

SEQ ID NO: 24154 - DNA, 22 bp, Artificial Sequence
  chemically synthesized
atcttgattttcaatttcaagc

SEQ ID NO: 24155 - DNA, 22 bp, Artificial Sequence
  chemically synthesized
tcttgattttcaatttcaagca

SEQ ID NO: 24156 - DNA, 22 bp, Artificial Sequence
  chemically synthesized
gattttcaatttcaagcaacgt

SEQ ID NO: 24157 - DNA, 22 bp, Artificial Sequence
  chemically synthesized
attttcaatttcaagcaacgtg

SEQ ID NO: 24158 - DNA, 22 bp, Artificial Sequence
  chemically synthesized
tcaatttcaagcaacgtggaac

SEQ ID NO: 24159 - DNA, 22 bp, Artificial Sequence
  chemically synthesized
caatttcaagcaacgtggaact

SEQ ID NO: 24160 - DNA, 22 bp, Artificial Sequence
  chemically synthesized
aatttcaagcaacgtggaactg

SEQ ID NO: 24161 - DNA, 22 bp, Artificial Sequence
  chemically synthesized
caagcaacgtggaactgttttc

SEQ ID NO: 24162 - DNA, 22 bp, Artificial Sequence
  chemically synthesized
aagcaacgtggaactgttttct

SEQ ID NO: 24163 - DNA, 22 bp, Artificial Sequence
  chemically synthesized
ttttcttctggaagcagaccta

SEQ ID NO: 24164 - DNA, 22 bp, Artificial Sequence
  chemically synthesized
tcttctggaagcagacctagac

SEQ ID NO: 24165 - DNA, 22 bp, Artificial Sequence
  chemically synthesized
cttctggaagcagacctagact

SEQ ID NO: 24166 - DNA, 22 bp, Artificial Sequence
  chemically synthesized
ttctggaagcagacctagactt

SEQ ID NO: 24167 - DNA, 22 bp, Artificial Sequence
  chemically synthesized
ctggaagcagacctagacttct

SEQ ID NO: 24168 - DNA, 22 bp, Artificial Sequence
  chemically synthesized
tggaagcagacctagacttctt

SEQ ID NO: 24169 - DNA, 22 bp, Artificial Sequence
  chemically synthesized
gaagcagacctagacttcttaa

SEQ ID NO: 24170 - DNA, 22 bp, Artificial Sequence
  chemically synthesized
gacttcttaactctatatatac

SEQ ID NO: 24171 - DNA, 22 bp, Artificial Sequence
  chemically synthesized
cttaactctatatataccaata

SEQ ID NO: 24172 - DNA, 22 bp, Artificial Sequence
  chemically synthesized
ttaactctatatataccaatat

SEQ ID NO: 24173 - DNA, 22 bp, Artificial Sequence
  chemically synthesized
aactctatatataccaatattt

SEQ ID NO: 24174 - DNA, 22 bp, Artificial Sequence
  chemically synthesized
actctatatataccaatatttg

SEQ ID NO: 24175 - DNA, 22 bp, Artificial Sequence
  chemically synthesized
tatatataccaatatttgccca

SEQ ID NO: 24176 - DNA, 22 bp, Artificial Sequence
  chemically synthesized
tatataccaatatttgcccaga

SEQ ID NO: 24177 - DNA, 22 bp, Artificial Sequence
  chemically synthesized
gcccagaaaaggtaaggttggt

SEQ ID NO: 24178 - DNA, 22 bp, Artificial Sequence
  chemically synthesized
cccagaaaaggtaaggttggta

SEQ ID NO: 24179 - DNA, 22 bp, Artificial Sequence
  chemically synthesized
gtaggtgaacatagttaatcat

SEQ ID NO: 24180 - DNA, 22 bp, Artificial Sequence
  chemically synthesized
atcattaagccgtgttaacttg

SEQ ID NO: 24181 - DNA, 22 bp, Artificial Sequence
  chemically synthesized
agccgtgttaacttgcacgaat

SEQ ID NO: 24182 - DNA, 22 bp, Artificial Sequence
  chemically synthesized
acttgcacgaatgtaaccttct

SEQ ID NO: 24183 - DNA, 22 bp, Artificial Sequence
  chemically synthesized
gcacgaatgtaaccttcttcca

SEQ ID NO: 24184 - DNA, 22 bp, Artificial Sequence
  chemically synthesized
cacgaatgtaaccttcttccac

SEQ ID NO: 24185 - DNA, 22 bp, Artificial Sequence
  chemically synthesized
cttccacattgagttagatcaa

SEQ ID NO: 24186 - DNA, 22 bp, Artificial Sequence
  chemically synthesized
ttccacattgagttagatcaat

SEQ ID NO: 24187 - DNA, 22 bp, Artificial Sequence
  chemically synthesized
ccacattgagttagatcaatgc

SEQ ID NO: 24188 - DNA, 22 bp, Artificial Sequence
  chemically synthesized
cacattgagttagatcaatgct

SEQ ID NO: 24189 - DNA, 22 bp, Artificial Sequence
  chemically synthesized
agttagatcaatgctaaatgaa

SEQ ID NO: 24190 - DNA, 22 bp, Artificial Sequence
  chemically synthesized
gatcaatgctaaatgaaatcaa

SEQ ID NO: 24191 - DNA, 22 bp, Artificial Sequence
  chemically synthesized
aatgaaatcaaagaaatgagca

SEQ ID NO: 24192 - DNA, 22 bp, Artificial Sequence
  chemically synthesized
acttaataggtaatttgaaatt

SEQ ID NO: 24193 - DNA, 22 bp, Artificial Sequence
  chemically synthesized
aataggtaatttgaaattgtat

SEQ ID NO: 24194 - DNA, 22 bp, Artificial Sequence
  chemically synthesized
ataggtaatttgaaattgtatt

SEQ ID NO: 24195 - DNA, 22 bp, Artificial Sequence
  chemically synthesized
gaaattgtatttaactttgctg

SEQ ID NO: 24196 - DNA, 22 bp, Artificial Sequence
  chemically synthesized
aaattgtatttaactttgctgt

SEQ ID NO: 24197 - DNA, 22 bp, Artificial Sequence
  chemically synthesized
tatttaactttgctgtattata

SEQ ID NO: 24198 - DNA, 22 bp, Artificial Sequence
  chemically synthesized
aactttgctgtattataaacta

SEQ ID NO: 24199 - DNA, 22 bp, Artificial Sequence
  chemically synthesized
actttgctgtattataaactac

SEQ ID NO: 24200 - DNA, 22 bp, Artificial Sequence
  chemically synthesized
tgctgtattataaactacacat

SEQ ID NO: 24201 - DNA, 22 bp, Artificial Sequence
  chemically synthesized
gctgtattataaactacacatt

SEQ ID NO: 24202 - DNA, 22 bp, Artificial Sequence
  chemically synthesized
ctgtattataaactacacattc

SEQ ID NO: 24203 - DNA, 22 bp, Artificial Sequence
  chemically synthesized
tattataaactacacattcaat

SEQ ID NO: 24204 - DNA, 22 bp, Artificial Sequence
  chemically synthesized
taaactacacattcaatgctat

SEQ ID NO: 24205 - DNA, 22 bp, Artificial Sequence
  chemically synthesized
cacattcaatgctatggtgact

SEQ ID NO: 24206 - DNA, 22 bp, Artificial Sequence
  chemically synthesized
aatgctatggtgactacctgtt

SEQ ID NO: 24207 - DNA, 22 bp, Artificial Sequence
  chemically synthesized
tggtgactacctgtttttaaaa

SEQ ID NO: 24208 - DNA, 22 bp, Artificial Sequence
  chemically synthesized
cctgtttttaaaagctaatttt

SEQ ID NO: 24209 - DNA, 22 bp, Artificial Sequence
  chemically synthesized
tttttaaaagctaattttactt

SEQ ID NO: 24210 - DNA, 22 bp, Artificial Sequence
  chemically synthesized
ttaaaagctaattttacttttt

SEQ ID NO: 24211 - DNA, 22 bp, Artificial Sequence
  chemically synthesized
taaaagctaattttactttttt

SEQ ID NO: 24212 - DNA, 22 bp, Artificial Sequence
  chemically synthesized
aaaagctaattttactttttta

SEQ ID NO: 24213 - DNA, 22 bp, Artificial Sequence
  chemically synthesized
aaagctaattttacttttttat

SEQ ID NO: 24214 - DNA, 22 bp, Artificial Sequence
  chemically synthesized
attttacttttttatgatttta

SEQ ID NO: 24215 - DNA, 22 bp, Artificial Sequence
  chemically synthesized
tacttttttatgattttaagag

SEQ ID NO: 24216 - DNA, 22 bp, Artificial Sequence
  chemically synthesized
acttttttatgattttaagaga

SEQ ID NO: 24217 - DNA, 22 bp, Artificial Sequence
  chemically synthesized
cttttttatgattttaagagat

SEQ ID NO: 24218 - DNA, 22 bp, Artificial Sequence
  chemically synthesized
ttttatgattttaagagattta

SEQ ID NO: 24219 - DNA, 22 bp, Artificial Sequence
  chemically synthesized
tttatgattttaagagatttac

SEQ ID NO: 24220 - DNA, 22 bp, Artificial Sequence
  chemically synthesized
ttatgattttaagagatttaca

SEQ ID NO: 24221 - DNA, 22 bp, Artificial Sequence
  chemically synthesized
tatgattttaagagatttacaa

SEQ ID NO: 24222 - DNA, 22 bp, Artificial Sequence
  chemically synthesized
atgattttaagagatttacaag

SEQ ID NO: 24223 - DNA, 22 bp, Artificial Sequence
  chemically synthesized
tgattttaagagatttacaagt

SEQ ID NO: 24224 - DNA, 22 bp, Artificial Sequence
  chemically synthesized
taagagatttacaagtcaaaaa

SEQ ID NO: 24225 - DNA, 22 bp, Artificial Sequence
  chemically synthesized
aagagatttacaagtcaaaaat

SEQ ID NO: 24226 - DNA, 22 bp, Artificial Sequence
  chemically synthesized
agagatttacaagtcaaaaata

SEQ ID NO: 24227 - DNA, 22 bp, Artificial Sequence
  chemically synthesized
acaagtcaaaaataaacttttt

SEQ ID NO: 24228 - DNA, 22 bp, Artificial Sequence
  chemically synthesized
caagtcaaaaataaactttttt

SEQ ID NO: 24229 - DNA, 22 bp, Artificial Sequence
  chemically synthesized
ttttgttgggtaaatttattat

SEQ ID NO: 24230 - DNA, 22 bp, Artificial Sequence
  chemically synthesized
tttgttgggtaaatttattatt

SEQ ID NO: 24231 - DNA, 22 bp, Artificial Sequence
  chemically synthesized
ttgttgggtaaatttattatta

SEQ ID NO: 24232 - DNA, 22 bp, Artificial Sequence
  chemically synthesized
tgttgggtaaatttattattaa

SEQ ID NO: 24233 - DNA, 22 bp, Artificial Sequence
  chemically synthesized
gttgggtaaatttattattaaa

SEQ ID NO: 24234 - DNA, 22 bp, Artificial Sequence
  chemically synthesized
ttgggtaaatttattattaaag

SEQ ID NO: 24235 - DNA, 22 bp, Artificial Sequence
  chemically synthesized
ggtaaatttattattaaagttg

SEQ ID NO: 24236 - DNA, 22 bp, Artificial Sequence
  chemically synthesized
attattaaagttgaggggaaaa

SEQ ID NO: 24237 - DNA, 22 bp, Artificial Sequence
  chemically synthesized
ttattaaagttgaggggaaaaa

SEQ ID NO: 24238 - DNA, 22 bp, Artificial Sequence
  chemically synthesized
ttaaagttgaggggaaaaaagt

SEQ ID NO: 24239 - DNA, 22 bp, Artificial Sequence
  chemically synthesized
aagttgaggggaaaaaagtaat

SEQ ID NO: 24240 - DNA, 22 bp, Artificial Sequence
  chemically synthesized
aggggaaaaaagtaatgaatta

SEQ ID NO: 24241 - DNA, 20 bp, Artificial Sequence
  chemically synthesized
tcccgcccgcttgctgcatc

SEQ ID NO: 24242 - DNA, 20 bp, Artificial Sequence
  chemically synthesized
tgcatctggacaccctgcct

SEQ ID NO: 24243 - DNA, 20 bp, Artificial Sequence
  chemically synthesized
gcatctggacaccctgcctc

SEQ ID NO: 24244 - DNA, 20 bp, Artificial Sequence
  chemically synthesized
cctcaggccctcatctccac

SEQ ID NO: 24245 - DNA, 20 bp, Artificial Sequence
  chemically synthesized
aggccctcatctccactggt

SEQ ID NO: 24246 - DNA, 20 bp, Artificial Sequence
  chemically synthesized
ccctcatctccactggtcag

SEQ ID NO: 24247 - DNA, 20 bp, Artificial Sequence
  chemically synthesized
cctcatctccactggtcagc

SEQ ID NO: 24248 - DNA, 20 bp, Artificial Sequence
  chemically synthesized
gtcagcaggtgacctttgcc

SEQ ID NO: 24249 - DNA, 20 bp, Artificial Sequence
  chemically synthesized
gtgacctttgcccagcgccc

SEQ ID NO: 24250 - DNA, 20 bp, Artificial Sequence
  chemically synthesized
tgacctttgcccagcgccct

SEQ ID NO: 24251 - DNA, 20 bp, Artificial Sequence
  chemically synthesized
tgcccagcgccctgggtcct

SEQ ID NO: 24252 - DNA, 20 bp, Artificial Sequence
  chemically synthesized
gtcctcagtgcctgctgccc

SEQ ID NO: 24253 - DNA, 20 bp, Artificial Sequence
  chemically synthesized
cctcagtgcctgctgccctg

SEQ ID NO: 24254 - DNA, 20 bp, Artificial Sequence
  chemically synthesized
gccctggagatgatataaaa

SEQ ID NO: 24255 - DNA, 20 bp, Artificial Sequence
  chemically synthesized
ccctggagatgatataaaac

SEQ ID NO: 24256 - DNA, 20 bp, Artificial Sequence
  chemically synthesized
ggagatgatataaaacaggt

SEQ ID NO: 24257 - DNA, 20 bp, Artificial Sequence
  chemically synthesized
aaccctcctgcctgtctgct

SEQ ID NO: 24258 - DNA, 20 bp, Artificial Sequence
  chemically synthesized
ctgtctgctcagttcatccc

SEQ ID NO: 24259 - DNA, 20 bp, Artificial Sequence
  chemically synthesized
gtctgctcagttcatcccta

SEQ ID NO: 24260 - DNA, 20 bp, Artificial Sequence
  chemically synthesized
tctgctcagttcatccctag

SEQ ID NO: 24261 - DNA, 20 bp, Artificial Sequence
  chemically synthesized
gctcagttcatccctagagg

SEQ ID NO: 24262 - DNA, 20 bp, Artificial Sequence
  chemically synthesized
atccctagaggcagctgctc

SEQ ID NO: 24263 - DNA, 20 bp, Artificial Sequence
  chemically synthesized
tccctagaggcagctgctcc

SEQ ID NO: 24264 - DNA, 20 bp, Artificial Sequence
  chemically synthesized
ctgctccaggtaatgccctc

SEQ ID NO: 24265 - DNA, 20 bp, Artificial Sequence
  chemically synthesized
tgctccaggtaatgccctct

SEQ ID NO: 24266 - DNA, 20 bp, Artificial Sequence
  chemically synthesized
gctccaggtaatgccctctg

SEQ ID NO: 24267 - DNA, 20 bp, Artificial Sequence
  chemically synthesized
tccaggtaatgccctctggg

SEQ ID NO: 24268 - DNA, 20 bp, Artificial Sequence
  chemically synthesized
ccaggtaatgccctctgggg

SEQ ID NO: 24269 - DNA, 20 bp, Artificial Sequence
  chemically synthesized
caggtaatgccctctgggga

SEQ ID NO: 24270 - DNA, 20 bp, Artificial Sequence
  chemically synthesized
aggtaatgccctctggggag

SEQ ID NO: 24271 - DNA, 20 bp, Artificial Sequence
  chemically synthesized
aatgccctctggggagggga

SEQ ID NO: 24272 - DNA, 20 bp, Artificial Sequence
  chemically synthesized
tgccctctggggaggggaaa

SEQ ID NO: 24273 - DNA, 20 bp, Artificial Sequence
  chemically synthesized
gccctctggggaggggaaag

SEQ ID NO: 24274 - DNA, 20 bp, Artificial Sequence
  chemically synthesized
cctctggggaggggaaagag

SEQ ID NO: 24275 - DNA, 20 bp, Artificial Sequence
  chemically synthesized
ctctggggaggggaaagagg

SEQ ID NO: 24276 - DNA, 20 bp, Artificial Sequence
  chemically synthesized
tctggggaggggaaagagga

SEQ ID NO: 24277 - DNA, 20 bp, Artificial Sequence
  chemically synthesized
ctggggaggggaaagaggag

SEQ ID NO: 24278 - DNA, 20 bp, Artificial Sequence
  chemically synthesized
ggggaggggaaagaggaggg

SEQ ID NO: 24279 - DNA, 20 bp, Artificial Sequence
  chemically synthesized
gggaggggaaagaggagggg

SEQ ID NO: 24280 - DNA, 20 bp, Artificial Sequence
  chemically synthesized
gaggggaaagaggaggggag

SEQ ID NO: 24281 - DNA, 20 bp, Artificial Sequence
  chemically synthesized
aggggaaagaggaggggagg

SEQ ID NO: 24282 - DNA, 20 bp, Artificial Sequence
  chemically synthesized
aagaggaggggaggaggatg

SEQ ID NO: 24283 - DNA, 20 bp, Artificial Sequence
  chemically synthesized
gaggaggggaggaggatgaa

SEQ ID NO: 24284 - DNA, 20 bp, Artificial Sequence
  chemically synthesized
aggaggggaggaggatgaag

SEQ ID NO: 24285 - DNA, 20 bp, Artificial Sequence
  chemically synthesized
ggaggggaggaggatgaaga

SEQ ID NO: 24286 - DNA, 20 bp, Artificial Sequence
  chemically synthesized
gaggggaggaggatgaagag

SEQ ID NO: 24287 - DNA, 20 bp, Artificial Sequence
  chemically synthesized
ggaggaggatgaagaggggc

SEQ ID NO: 24288 - DNA, 20 bp, Artificial Sequence
  chemically synthesized
aggaggatgaagaggggcaa

SEQ ID NO: 24289 - DNA, 20 bp, Artificial Sequence
  chemically synthesized
ggaggatgaagaggggcaag

SEQ ID NO: 24290 - DNA, 20 bp, Artificial Sequence
  chemically synthesized
aggatgaagaggggcaagag

SEQ ID NO: 24291 - DNA, 20 bp, Artificial Sequence
  chemically synthesized
ggcaagaggagctccctgcc

SEQ ID NO: 24292 - DNA, 20 bp, Artificial Sequence
  chemically synthesized
gaggagctccctgcccagcc

SEQ ID NO: 24293 - DNA, 20 bp, Artificial Sequence
  chemically synthesized
agctccctgcccagcccagc

SEQ ID NO: 24294 - DNA, 20 bp, Artificial Sequence
  chemically synthesized
ccctgcccagcccagccagc

SEQ ID NO: 24295 - DNA, 20 bp, Artificial Sequence
  chemically synthesized
cccagcccagccagcaagcc

SEQ ID NO: 24296 - DNA, 20 bp, Artificial Sequence
  chemically synthesized
cagcccagccagcaagcctg

SEQ ID NO: 24297 - DNA, 20 bp, Artificial Sequence
  chemically synthesized
cccagccagcaagcctggag

SEQ ID NO: 24298 - DNA, 20 bp, Artificial Sequence
  chemically synthesized
aagcctggagaagcacttgc

SEQ ID NO: 24299 - DNA, 20 bp, Artificial Sequence
  chemically synthesized
gcctggagaagcacttgcta

SEQ ID NO: 24300 - DNA, 20 bp, Artificial Sequence
  chemically synthesized
gagaagcacttgctagagct

SEQ ID NO: 24301 - DNA, 20 bp, Artificial Sequence
  chemically synthesized
agaagcacttgctagagcta

SEQ ID NO: 24302 - DNA, 20 bp, Artificial Sequence
  chemically synthesized
agcacttgctagagctaagg

SEQ ID NO: 24303 - DNA, 20 bp, Artificial Sequence
  chemically synthesized
tgctagagctaaggaagcct

SEQ ID NO: 24304 - DNA, 20 bp, Artificial Sequence
  chemically synthesized
ctagagctaaggaagcctcg

SEQ ID NO: 24305 - DNA, 20 bp, Artificial Sequence
  chemically synthesized
agctaaggaagcctcggagc

SEQ ID NO: 24306 - DNA, 20 bp, Artificial Sequence
  chemically synthesized
aaggaagcctcggagctgga

SEQ ID NO: 24307 - DNA, 20 bp, Artificial Sequence
  chemically synthesized
aggaagcctcggagctggac

SEQ ID NO: 24308 - DNA, 20 bp, Artificial Sequence
  chemically synthesized
ccacccctcatcataacctg

SEQ ID NO: 24309 - DNA, 20 bp, Artificial Sequence
  chemically synthesized
tcatcataacctgaagaaca

SEQ ID NO: 24310 - DNA, 20 bp, Artificial Sequence
  chemically synthesized
atcataacctgaagaacatg

SEQ ID NO: 24311 - DNA, 20 bp, Artificial Sequence
  chemically synthesized
tcataacctgaagaacatgg

SEQ ID NO: 24312 - DNA, 20 bp, Artificial Sequence
  chemically synthesized
acctgaagaacatggaggcc

SEQ ID NO: 24313 - DNA, 20 bp, Artificial Sequence
  chemically synthesized
cctgaagaacatggaggccc

SEQ ID NO: 24314 - DNA, 20 bp, Artificial Sequence
  chemically synthesized
tgaagaacatggaggcccgg

SEQ ID NO: 24315 - DNA, 20 bp, Artificial Sequence
  chemically synthesized
gaagaacatggaggcccggg

SEQ ID NO: 24316 - DNA, 20 bp, Artificial Sequence
  chemically synthesized
aagaacatggaggcccggga

SEQ ID NO: 24317 - DNA, 20 bp, Artificial Sequence
  chemically synthesized
agaacatggaggcccgggag

SEQ ID NO: 24318 - DNA, 20 bp, Artificial Sequence
  chemically synthesized
ggaggggtgtcacttgccca

SEQ ID NO: 24319 - DNA, 20 bp, Artificial Sequence
  chemically synthesized
gtcacttgcccaaagctaca

SEQ ID NO: 24320 - DNA, 20 bp, Artificial Sequence
  chemically synthesized
tcacttgcccaaagctacac

SEQ ID NO: 24321 - DNA, 20 bp, Artificial Sequence
  chemically synthesized
cacttgcccaaagctacaca

SEQ ID NO: 24322 - DNA, 20 bp, Artificial Sequence
  chemically synthesized
acttgcccaaagctacacag

SEQ ID NO: 24323 - DNA, 20 bp, Artificial Sequence
  chemically synthesized
cttgcccaaagctacacagg

SEQ ID NO: 24324 - DNA, 20 bp, Artificial Sequence
  chemically synthesized
gcccaaagctacacaggggg

SEQ ID NO: 24325 - DNA, 20 bp, Artificial Sequence
  chemically synthesized
cccaaagctacacagggggt

SEQ ID NO: 24326 - DNA, 20 bp, Artificial Sequence
  chemically synthesized
ccaaagctacacagggggtg

SEQ ID NO: 24327 - DNA, 20 bp, Artificial Sequence
  chemically synthesized
agctacacagggggtggggc

SEQ ID NO: 24328 - DNA, 20 bp, Artificial Sequence
  chemically synthesized
tacacagggggtggggctgg

SEQ ID NO: 24329 - DNA, 20 bp, Artificial Sequence
  chemically synthesized
acagggggtggggctggaag

SEQ ID NO: 24330 - DNA, 20 bp, Artificial Sequence
  chemically synthesized
gtggggctggaagtggctcc

SEQ ID NO: 24331 - DNA, 20 bp, Artificial Sequence
  chemically synthesized
gctggaagtggctccaagtg

SEQ ID NO: 24332 - DNA, 20 bp, Artificial Sequence
  chemically synthesized
ctggaagtggctccaagtgc

SEQ ID NO: 24333 - DNA, 20 bp, Artificial Sequence
  chemically synthesized
caggttcccccctcattctt

SEQ ID NO: 24334 - DNA, 20 bp, Artificial Sequence
  chemically synthesized
aggttcccccctcattcttc

SEQ ID NO: 24335 - DNA, 20 bp, Artificial Sequence
  chemically synthesized
cccccctcattcttcaggct

SEQ ID NO: 24336 - DNA, 20 bp, Artificial Sequence
  chemically synthesized
ccccctcattcttcaggctt

SEQ ID NO: 24337 - DNA, 20 bp, Artificial Sequence
  chemically synthesized
cccctcattcttcaggctta

SEQ ID NO: 24338 - DNA, 20 bp, Artificial Sequence
  chemically synthesized
tcattcttcaggcttagggc

SEQ ID NO: 24339 - DNA, 20 bp, Artificial Sequence
  chemically synthesized
attcttcaggcttagggctg

SEQ ID NO: 24340 - DNA, 20 bp, Artificial Sequence
  chemically synthesized
ttcttcaggcttagggctgg

SEQ ID NO: 24341 - DNA, 20 bp, Artificial Sequence
  chemically synthesized
ttcaggcttagggctggagg

SEQ ID NO: 24342 - DNA, 20 bp, Artificial Sequence
  chemically synthesized
cttagggctggaggaagcct

SEQ ID NO: 24343 - DNA, 20 bp, Artificial Sequence
  chemically synthesized
gggctggaggaagccttaga

SEQ ID NO: 24344 - DNA, 20 bp, Artificial Sequence
  chemically synthesized
ggaggaagccttagacagcc

SEQ ID NO: 24345 - DNA, 20 bp, Artificial Sequence
  chemically synthesized
tagacagcccagtcctaccc

SEQ ID NO: 24346 - DNA, 20 bp, Artificial Sequence
  chemically synthesized
cagcccagtcctaccccaga

SEQ ID NO: 24347 - DNA, 20 bp, Artificial Sequence
  chemically synthesized
agcccagtcctaccccagac

SEQ ID NO: 24348 - DNA, 20 bp, Artificial Sequence
  chemically synthesized
gcccagtcctaccccagaca

SEQ ID NO: 24349 - DNA, 20 bp, Artificial Sequence
  chemically synthesized
ctaccccagacagggaaact

SEQ ID NO: 24350 - DNA, 20 bp, Artificial Sequence
  chemically synthesized
taccccagacagggaaactg

SEQ ID NO: 24351 - DNA, 20 bp, Artificial Sequence
  chemically synthesized
cagacagggaaactgaggcc

SEQ ID NO: 24352 - DNA, 20 bp, Artificial Sequence
  chemically synthesized
gacagggaaactgaggcctg

SEQ ID NO: 24353 - DNA, 20 bp, Artificial Sequence
  chemically synthesized
cagggaaactgaggcctgga

SEQ ID NO: 24354 - DNA, 20 bp, Artificial Sequence
  chemically synthesized
agggaaactgaggcctggag

SEQ ID NO: 24355 - DNA, 20 bp, Artificial Sequence
  chemically synthesized
gggaaactgaggcctggaga

SEQ ID NO: 24356 - DNA, 20 bp, Artificial Sequence
  chemically synthesized
aactgaggcctggagagggc

SEQ ID NO: 24357 - DNA, 20 bp, Artificial Sequence
  chemically synthesized
agagggccagaaatcaccca

SEQ ID NO: 24358 - DNA, 20 bp, Artificial Sequence
  chemically synthesized
agaaatcacccaaagacaca

SEQ ID NO: 24359 - DNA, 20 bp, Artificial Sequence
  chemically synthesized
cccaaagacacacagcatgt

SEQ ID NO: 24360 - DNA, 20 bp, Artificial Sequence
  chemically synthesized
aagacacacagcatgttggc

SEQ ID NO: 24361 - DNA, 20 bp, Artificial Sequence
  chemically synthesized
acacagcatgttggctggac

SEQ ID NO: 24362 - DNA, 20 bp, Artificial Sequence
  chemically synthesized
agcatgttggctggactgga

SEQ ID NO: 24363 - DNA, 20 bp, Artificial Sequence
  chemically synthesized
catgttggctggactggacg

SEQ ID NO: 24364 - DNA, 20 bp, Artificial Sequence
  chemically synthesized
tggctggactggacggagat

SEQ ID NO: 24365 - DNA, 20 bp, Artificial Sequence
  chemically synthesized
ggactggacggagatcagtc

SEQ ID NO: 24366 - DNA, 20 bp, Artificial Sequence
  chemically synthesized
acggagatcagtccagaccg

SEQ ID NO: 24367 - DNA, 20 bp, Artificial Sequence
  chemically synthesized
cggagatcagtccagaccgc

SEQ ID NO: 24368 - DNA, 20 bp, Artificial Sequence
  chemically synthesized
accgcaggtgccttgatgtt

SEQ ID NO: 24369 - DNA, 20 bp, Artificial Sequence
  chemically synthesized
aggtgccttgatgttcagtc

SEQ ID NO: 24370 - DNA, 20 bp, Artificial Sequence
  chemically synthesized
tgccttgatgttcagtctgg

SEQ ID NO: 24371 - DNA, 20 bp, Artificial Sequence
  chemically synthesized
gccttgatgttcagtctggt

SEQ ID NO: 24372 - DNA, 20 bp, Artificial Sequence
  chemically synthesized
ccatcccacccacctccctt

SEQ ID NO: 24373 - DNA, 20 bp, Artificial Sequence
  chemically synthesized
catcccacccacctcccttt

SEQ ID NO: 24374 - DNA, 20 bp, Artificial Sequence
  chemically synthesized
ctcgatccctcgcccctcac

SEQ ID NO: 24375 - DNA, 20 bp, Artificial Sequence
  chemically synthesized
ccctcaccagtcccccttct

SEQ ID NO: 24376 - DNA, 20 bp, Artificial Sequence
  chemically synthesized
ctcaccagtcccccttctga

SEQ ID NO: 24377 - DNA, 20 bp, Artificial Sequence
  chemically synthesized
ccccttctgagagcccgtat

SEQ ID NO: 24378 - DNA, 20 bp, Artificial Sequence
  chemically synthesized
cttctgagagcccgtattag

SEQ ID NO: 24379 - DNA, 20 bp, Artificial Sequence
  chemically synthesized
ttctgagagcccgtattagc

SEQ ID NO: 24380 - DNA, 20 bp, Artificial Sequence
  chemically synthesized
tctgagagcccgtattagca

SEQ ID NO: 24381 - DNA, 20 bp, Artificial Sequence
  chemically synthesized
tgagagcccgtattagcagg

SEQ ID NO: 24382 - DNA, 20 bp, Artificial Sequence
  chemically synthesized
agcccgtattagcagggagc

SEQ ID NO: 24383 - DNA, 20 bp, Artificial Sequence
  chemically synthesized
gagccggcccctactccttc

SEQ ID NO: 24384 - DNA, 20 bp, Artificial Sequence
  chemically synthesized
ccggcccctactccttctgg

SEQ ID NO: 24385 - DNA, 20 bp, Artificial Sequence
  chemically synthesized
cctactccttctggcagacc

SEQ ID NO: 24386 - DNA, 20 bp, Artificial Sequence
  chemically synthesized
tccttctggcagacccagct

SEQ ID NO: 24387 - DNA, 20 bp, Artificial Sequence
  chemically synthesized
ccttctggcagacccagcta

SEQ ID NO: 24388 - DNA, 20 bp, Artificial Sequence
  chemically synthesized
acccagctaaggttctacct

SEQ ID NO: 24389 - DNA, 20 bp, Artificial Sequence
  chemically synthesized
cccagctaaggttctacctt

SEQ ID NO: 24390 - DNA, 20 bp, Artificial Sequence
  chemically synthesized
ccagctaaggttctacctta

SEQ ID NO: 24391 - DNA, 20 bp, Artificial Sequence
  chemically synthesized
cagctaaggttctaccttag

SEQ ID NO: 24392 - DNA, 20 bp, Artificial Sequence
  chemically synthesized
taggggccacgccacctccc

SEQ ID NO: 24393 - DNA, 20 bp, Artificial Sequence
  chemically synthesized
aggggccacgccacctcccc

SEQ ID NO: 24394 - DNA, 20 bp, Artificial Sequence
  chemically synthesized
ggggccacgccacctcccca

SEQ ID NO: 24395 - DNA, 20 bp, Artificial Sequence
  chemically synthesized
ggccacgccacctccccagg

SEQ ID NO: 24396 - DNA, 20 bp, Artificial Sequence
  chemically synthesized
gccacgccacctccccaggg

SEQ ID NO: 24397 - DNA, 20 bp, Artificial Sequence
  chemically synthesized
ccacgccacctccccaggga

SEQ ID NO: 24398 - DNA, 20 bp, Artificial Sequence
  chemically synthesized
cacgccacctccccagggag

SEQ ID NO: 24399 - DNA, 20 bp, Artificial Sequence
  chemically synthesized
cacctccccagggaggggtc

SEQ ID NO: 24400 - DNA, 20 bp, Artificial Sequence
  chemically synthesized
cctccccagggaggggtcca

SEQ ID NO: 24401 - DNA, 20 bp, Artificial Sequence
  chemically synthesized
ctccccagggaggggtccag

SEQ ID NO: 24402 - DNA, 20 bp, Artificial Sequence
  chemically synthesized
cagggaggggtccagaggca

SEQ ID NO: 24403 - DNA, 20 bp, Artificial Sequence
  chemically synthesized
agggaggggtccagaggcat

SEQ ID NO: 24404 - DNA, 20 bp, Artificial Sequence
  chemically synthesized
gggaggggtccagaggcatg

SEQ ID NO: 24405 - DNA, 20 bp, Artificial Sequence
  chemically synthesized
ggtccagaggcatggggacc

SEQ ID NO: 24406 - DNA, 20 bp, Artificial Sequence
  chemically synthesized
gtccagaggcatggggacct

SEQ ID NO: 24407 - DNA, 20 bp, Artificial Sequence
  chemically synthesized
tccagaggcatggggacctg

SEQ ID NO: 24408 - DNA, 20 bp, Artificial Sequence
  chemically synthesized
gggacctggggtgcccctca

SEQ ID NO: 24409 - DNA, 20 bp, Artificial Sequence
  chemically synthesized
ggacctggggtgcccctcac

SEQ ID NO: 24410 - DNA, 20 bp, Artificial Sequence
  chemically synthesized
cctcacaggacacttccttg

SEQ ID NO: 24411 - DNA, 20 bp, Artificial Sequence
  chemically synthesized
ctcacaggacacttccttgc

SEQ ID NO: 24412 - DNA, 20 bp, Artificial Sequence
  chemically synthesized
aggacacttccttgcaggaa

SEQ ID NO: 24413 - DNA, 20 bp, Artificial Sequence
  chemically synthesized
gacacttccttgcaggaaca

SEQ ID NO: 24414 - DNA, 20 bp, Artificial Sequence
  chemically synthesized
acacttccttgcaggaacag

SEQ ID NO: 24415 - DNA, 20 bp, Artificial Sequence
  chemically synthesized
gcaggaacagaggtgccatg

SEQ ID NO: 24416 - DNA, 20 bp, Artificial Sequence
  chemically synthesized
acagaggtgccatgcagccc

SEQ ID NO: 24417 - DNA, 20 bp, Artificial Sequence
  chemically synthesized
cagaggtgccatgcagcccc

SEQ ID NO: 24418 - DNA, 20 bp, Artificial Sequence
  chemically synthesized
actccttgttgttgccctcc

SEQ ID NO: 24419 - DNA, 20 bp, Artificial Sequence
  chemically synthesized
tgttgccctcctggcgctcc

SEQ ID NO: 24420 - DNA, 20 bp, Artificial Sequence
  chemically synthesized
cgctcctggcctctgcccgt

SEQ ID NO: 24421 - DNA, 20 bp, Artificial Sequence
  chemically synthesized
ggcctctgcccgtaagcact

SEQ ID NO: 24422 - DNA, 20 bp, Artificial Sequence
  chemically synthesized
ctctgcccgtaagcacttgg

SEQ ID NO: 24423 - DNA, 20 bp, Artificial Sequence
  chemically synthesized
tctgcccgtaagcacttggt

SEQ ID NO: 24424 - DNA, 20 bp, Artificial Sequence
  chemically synthesized
ccgtaagcacttggtgggac

SEQ ID NO: 24425 - DNA, 20 bp, Artificial Sequence
  chemically synthesized
cgtaagcacttggtgggact

SEQ ID NO: 24426 - DNA, 20 bp, Artificial Sequence
  chemically synthesized
agcacttggtgggactgggc

SEQ ID NO: 24427 - DNA, 20 bp, Artificial Sequence
  chemically synthesized
gcacttggtgggactgggct

SEQ ID NO: 24428 - DNA, 20 bp, Artificial Sequence
  chemically synthesized
cacttggtgggactgggctg

SEQ ID NO: 24429 - DNA, 20 bp, Artificial Sequence
  chemically synthesized
acttggtgggactgggctgg

SEQ ID NO: 24430 - DNA, 20 bp, Artificial Sequence
  chemically synthesized
tggtgggactgggctggggg

SEQ ID NO: 24431 - DNA, 20 bp, Artificial Sequence
  chemically synthesized
ggtgggactgggctgggggc

SEQ ID NO: 24432 - DNA, 20 bp, Artificial Sequence
  chemically synthesized
gtgggactgggctgggggca

SEQ ID NO: 24433 - DNA, 20 bp, Artificial Sequence
  chemically synthesized
gcccccagcccagtcccacc

SEQ ID NO: 24434 - DNA, 20 bp, Artificial Sequence
  chemically synthesized
ccagtcccaccaagtgctta

SEQ ID NO: 24435 - DNA, 20 bp, Artificial Sequence
  chemically synthesized
cagtcccaccaagtgcttac

SEQ ID NO: 24436 - DNA, 20 bp, Artificial Sequence
  chemically synthesized
tcccaccaagtgcttacggg

SEQ ID NO: 24437 - DNA, 20 bp, Artificial Sequence
  chemically synthesized
ccaccaagtgcttacgggca

SEQ ID NO: 24438 - DNA, 20 bp, Artificial Sequence
  chemically synthesized
caccaagtgcttacgggcag

SEQ ID NO: 24439 - DNA, 20 bp, Artificial Sequence
  chemically synthesized
aagtgcttacgggcagaggc

SEQ ID NO: 24440 - DNA, 20 bp, Artificial Sequence
  chemically synthesized
agtgcttacgggcagaggcc

SEQ ID NO: 24441 - DNA, 20 bp, Artificial Sequence
  chemically synthesized
tgcttacgggcagaggccag

SEQ ID NO: 24442 - DNA, 20 bp, Artificial Sequence
  chemically synthesized
cgggcagaggccaggagcgc

SEQ ID NO: 24443 - DNA, 20 bp, Artificial Sequence
  chemically synthesized
gggcagaggccaggagcgcc

SEQ ID NO: 24444 - DNA, 20 bp, Artificial Sequence
  chemically synthesized
gcagaggccaggagcgccag

SEQ ID NO: 24445 - DNA, 20 bp, Artificial Sequence
  chemically synthesized
cagaggccaggagcgccagg

SEQ ID NO: 24446 - DNA, 20 bp, Artificial Sequence
  chemically synthesized
agaggccaggagcgccagga

SEQ ID NO: 24447 - DNA, 20 bp, Artificial Sequence
  chemically synthesized
agcgccaggagggcaacaac

SEQ ID NO: 24448 - DNA, 20 bp, Artificial Sequence
  chemically synthesized
gcgccaggagggcaacaaca

SEQ ID NO: 24449 - DNA, 20 bp, Artificial Sequence
  chemically synthesized
gccaggagggcaacaacaag

SEQ ID NO: 24450 - DNA, 20 bp, Artificial Sequence
  chemically synthesized
gggcaacaacaaggagtacc

SEQ ID NO: 24451 - DNA, 20 bp, Artificial Sequence
  chemically synthesized
ggcaacaacaaggagtaccc

SEQ ID NO: 24452 - DNA, 20 bp, Artificial Sequence
  chemically synthesized
gcaacaacaaggagtacccg

SEQ ID NO: 24453 - DNA, 20 bp, Artificial Sequence
  chemically synthesized
aaggagtacccggggctgca

SEQ ID NO: 24454 - DNA, 20 bp, Artificial Sequence
  chemically synthesized
catggcacctctgttcctgc

SEQ ID NO: 24455 - DNA, 20 bp, Artificial Sequence
  chemically synthesized
atggcacctctgttcctgca

SEQ ID NO: 24456 - DNA, 20 bp, Artificial Sequence
  chemically synthesized
gcacctctgttcctgcaagg

SEQ ID NO: 24457 - DNA, 20 bp, Artificial Sequence
  chemically synthesized
cctgcaaggaagtgtcctgt

SEQ ID NO: 24458 - DNA, 20 bp, Artificial Sequence
  chemically synthesized
ctgcaaggaagtgtcctgtg

SEQ ID NO: 24459 - DNA, 20 bp, Artificial Sequence
  chemically synthesized
tgcaaggaagtgtcctgtga

SEQ ID NO: 24460 - DNA, 20 bp, Artificial Sequence
  chemically synthesized
gcaaggaagtgtcctgtgag

SEQ ID NO: 24461 - DNA, 20 bp, Artificial Sequence
  chemically synthesized
gtgtcctgtgaggggcaccc

SEQ ID NO: 24462 - DNA, 20 bp, Artificial Sequence
  chemically synthesized
tgtcctgtgaggggcacccc

SEQ ID NO: 24463 - DNA, 20 bp, Artificial Sequence
  chemically synthesized
accccaggtccccatgcctc

SEQ ID NO: 24464 - DNA, 20 bp, Artificial Sequence
  chemically synthesized
catgcctctggacccctccc

SEQ ID NO: 24465 - DNA, 20 bp, Artificial Sequence
  chemically synthesized
atgcctctggacccctccct

SEQ ID NO: 24466 - DNA, 20 bp, Artificial Sequence
  chemically synthesized
tgcctctggacccctccctg

SEQ ID NO: 24467 - DNA, 20 bp, Artificial Sequence
  chemically synthesized
cctctggacccctccctggg

SEQ ID NO: 24468 - DNA, 20 bp, Artificial Sequence
  chemically synthesized
ctctggacccctccctgggg

SEQ ID NO: 24469 - DNA, 20 bp, Artificial Sequence
  chemically synthesized
tggacccctccctggggagg

SEQ ID NO: 24470 - DNA, 20 bp, Artificial Sequence
  chemically synthesized
ccctccctggggaggtggcg

SEQ ID NO: 24471 - DNA, 20 bp, Artificial Sequence
  chemically synthesized
ggggaggtggcgtggcccct

SEQ ID NO: 24472 - DNA, 20 bp, Artificial Sequence
  chemically synthesized
gggaggtggcgtggccccta

SEQ ID NO: 24473 - DNA, 20 bp, Artificial Sequence
  chemically synthesized
aggtggcgtggcccctaagg

SEQ ID NO: 24474 - DNA, 20 bp, Artificial Sequence
  chemically synthesized
tggcccctaaggtagaacct

SEQ ID NO: 24475 - DNA, 20 bp, Artificial Sequence
  chemically synthesized
ccctaaggtagaaccttagc

SEQ ID NO: 24476 - DNA, 20 bp, Artificial Sequence
  chemically synthesized
cctaaggtagaaccttagct

SEQ ID NO: 24477 - DNA, 20 bp, Artificial Sequence
  chemically synthesized
agaaccttagctgggtctgc

SEQ ID NO: 24478 - DNA, 20 bp, Artificial Sequence
  chemically synthesized
accttagctgggtctgccag

SEQ ID NO: 24479 - DNA, 20 bp, Artificial Sequence
  chemically synthesized
ccttagctgggtctgccaga

SEQ ID NO: 24480 - DNA, 20 bp, Artificial Sequence
  chemically synthesized
ttagctgggtctgccagaag

SEQ ID NO: 24481 - DNA, 20 bp, Artificial Sequence
  chemically synthesized
gctgggtctgccagaaggag

SEQ ID NO: 24482 - DNA, 20 bp, Artificial Sequence
  chemically synthesized
ctgggtctgccagaaggagt

SEQ ID NO: 24483 - DNA, 20 bp, Artificial Sequence
  chemically synthesized
tgggtctgccagaaggagta

SEQ ID NO: 24484 - DNA, 20 bp, Artificial Sequence
  chemically synthesized
gggtctgccagaaggagtag

SEQ ID NO: 24485 - DNA, 20 bp, Artificial Sequence
  chemically synthesized
ctgccagaaggagtaggggc

SEQ ID NO: 24486 - DNA, 20 bp, Artificial Sequence
  chemically synthesized
gggccggctccctgctaata

SEQ ID NO: 24487 - DNA, 20 bp, Artificial Sequence
  chemically synthesized
ggccggctccctgctaatac

SEQ ID NO: 24488 - DNA, 20 bp, Artificial Sequence
  chemically synthesized
tccctgctaatacgggctct

SEQ ID NO: 24489 - DNA, 20 bp, Artificial Sequence
  chemically synthesized
ctgctaatacgggctctcag

SEQ ID NO: 24490 - DNA, 20 bp, Artificial Sequence
  chemically synthesized
tgctaatacgggctctcaga

SEQ ID NO: 24491 - DNA, 20 bp, Artificial Sequence
  chemically synthesized
gctaatacgggctctcagaa

SEQ ID NO: 24492 - DNA, 20 bp, Artificial Sequence
  chemically synthesized
ctaatacgggctctcagaag

SEQ ID NO: 24493 - DNA, 20 bp, Artificial Sequence
  chemically synthesized
taatacgggctctcagaagg

SEQ ID NO: 24494 - DNA, 20 bp, Artificial Sequence
  chemically synthesized
cgggctctcagaagggggac

SEQ ID NO: 24495 - DNA, 20 bp, Artificial Sequence
  chemically synthesized
ctctcagaagggggactggt

SEQ ID NO: 24496 - DNA, 20 bp, Artificial Sequence
  chemically synthesized
tctcagaagggggactggtg

SEQ ID NO: 24497 - DNA, 20 bp, Artificial Sequence
  chemically synthesized
ctcagaagggggactggtga

SEQ ID NO: 24498 - DNA, 20 bp, Artificial Sequence
  chemically synthesized
tcagaagggggactggtgag

SEQ ID NO: 24499 - DNA, 20 bp, Artificial Sequence
  chemically synthesized
aagggggactggtgaggggc

SEQ ID NO: 24500 - DNA, 20 bp, Artificial Sequence
  chemically synthesized
agggggactggtgaggggcg

SEQ ID NO: 24501 - DNA, 20 bp, Artificial Sequence
  chemically synthesized
gggggactggtgaggggcga

SEQ ID NO: 24502 - DNA, 20 bp, Artificial Sequence
  chemically synthesized
ctggtgaggggcgagggatc

SEQ ID NO: 24503 - DNA, 20 bp, Artificial Sequence
  chemically synthesized
tggtgaggggcgagggatcg

SEQ ID NO: 24504 - DNA, 20 bp, Artificial Sequence
  chemically synthesized
gggcgagggatcgaggccca

SEQ ID NO: 24505 - DNA, 20 bp, Artificial Sequence
  chemically synthesized
ggcgagggatcgaggcccaa

SEQ ID NO: 24506 - DNA, 20 bp, Artificial Sequence
  chemically synthesized
gcgagggatcgaggcccaaa

SEQ ID NO: 24507 - DNA, 20 bp, Artificial Sequence
  chemically synthesized
gagggatcgaggcccaaagg

SEQ ID NO: 24508 - DNA, 20 bp, Artificial Sequence
  chemically synthesized
agggatcgaggcccaaaggg

SEQ ID NO: 24509 - DNA, 20 bp, Artificial Sequence
  chemically synthesized
gatcgaggcccaaagggagg

SEQ ID NO: 24510 - DNA, 20 bp, Artificial Sequence
  chemically synthesized
atcgaggcccaaagggaggt

SEQ ID NO: 24511 - DNA, 20 bp, Artificial Sequence
  chemically synthesized
gaggcccaaagggaggtggg

SEQ ID NO: 24512 - DNA, 20 bp, Artificial Sequence
  chemically synthesized
aggcccaaagggaggtgggt

SEQ ID NO: 24513 - DNA, 20 bp, Artificial Sequence
  chemically synthesized
ccaaagggaggtgggtggga

SEQ ID NO: 24514 - DNA, 20 bp, Artificial Sequence
  chemically synthesized
aaagggaggtgggtgggatg

SEQ ID NO: 24515 - DNA, 20 bp, Artificial Sequence
  chemically synthesized
gggaggtgggtgggatggag

SEQ ID NO: 24516 - DNA, 20 bp, Artificial Sequence
  chemically synthesized
ggatggagcagaaaacccac

SEQ ID NO: 24517 - DNA, 20 bp, Artificial Sequence
  chemically synthesized
aacccaccagactgaacatc

SEQ ID NO: 24518 - DNA, 20 bp, Artificial Sequence
  chemically synthesized
acccaccagactgaacatca

SEQ ID NO: 24519 - DNA, 20 bp, Artificial Sequence
  chemically synthesized
actgaacatcaaggcacctg

SEQ ID NO: 24520 - DNA, 20 bp, Artificial Sequence
  chemically synthesized
acatcaaggcacctgcggtc

SEQ ID NO: 24521 - DNA, 20 bp, Artificial Sequence
  chemically synthesized
ggtctggactgatctccgtc

SEQ ID NO: 24522 - DNA, 20 bp, Artificial Sequence
  chemically synthesized
ggactgatctccgtccagtc

SEQ ID NO: 24523 - DNA, 20 bp, Artificial Sequence
  chemically synthesized
gccaacatgctgtgtgtctt

SEQ ID NO: 24524 - DNA, 20 bp, Artificial Sequence
  chemically synthesized
ccaacatgctgtgtgtcttt

SEQ ID NO: 24525 - DNA, 20 bp, Artificial Sequence
  chemically synthesized
gtgtgtctttgggtgatttc

SEQ ID NO: 24526 - DNA, 20 bp, Artificial Sequence
  chemically synthesized
gggtgatttctggccctctc

SEQ ID NO: 24527 - DNA, 20 bp, Artificial Sequence
  chemically synthesized
ggtgatttctggccctctcc

SEQ ID NO: 24528 - DNA, 20 bp, Artificial Sequence
  chemically synthesized
ttctggccctctccaggcct

SEQ ID NO: 24529 - DNA, 20 bp, Artificial Sequence
  chemically synthesized
caggcctcagtttccctgtc

SEQ ID NO: 24530 - DNA, 20 bp, Artificial Sequence
  chemically synthesized
aggcctcagtttccctgtct

SEQ ID NO: 24531 - DNA, 20 bp, Artificial Sequence
  chemically synthesized
ggcctcagtttccctgtctg

SEQ ID NO: 24532 - DNA, 20 bp, Artificial Sequence
  chemically synthesized
ctcagtttccctgtctgggg

SEQ ID NO: 24533 - DNA, 20 bp, Artificial Sequence
  chemically synthesized
tcagtttccctgtctggggt

SEQ ID NO: 24534 - DNA, 20 bp, Artificial Sequence
  chemically synthesized
ttccctgtctggggtaggac

SEQ ID NO: 24535 - DNA, 20 bp, Artificial Sequence
  chemically synthesized
tccctgtctggggtaggact

SEQ ID NO: 24536 - DNA, 20 bp, Artificial Sequence
  chemically synthesized
ggggtaggactgggctgtct

SEQ ID NO: 24537 - DNA, 20 bp, Artificial Sequence
  chemically synthesized
gggtaggactgggctgtcta

SEQ ID NO: 24538 - DNA, 20 bp, Artificial Sequence
  chemically synthesized
gggctgtctaaggcttcctc

SEQ ID NO: 24539 - DNA, 20 bp, Artificial Sequence
  chemically synthesized
ctaaggcttcctccagccct

SEQ ID NO: 24540 - DNA, 20 bp, Artificial Sequence
  chemically synthesized
ttcctccagccctaagcctg

SEQ ID NO: 24541 - DNA, 20 bp, Artificial Sequence
  chemically synthesized
cagccctaagcctgaagaat

SEQ ID NO: 24542 - DNA, 20 bp, Artificial Sequence
  chemically synthesized
agccctaagcctgaagaatg

SEQ ID NO: 24543 - DNA, 20 bp, Artificial Sequence
  chemically synthesized
gccctaagcctgaagaatga

SEQ ID NO: 24544 - DNA, 20 bp, Artificial Sequence
  chemically synthesized
ccctaagcctgaagaatgag

SEQ ID NO: 24545 - DNA, 20 bp, Artificial Sequence
  chemically synthesized
cctaagcctgaagaatgagg

SEQ ID NO: 24546 - DNA, 20 bp, Artificial Sequence
  chemically synthesized
ctaagcctgaagaatgaggg

SEQ ID NO: 24547 - DNA, 20 bp, Artificial Sequence
  chemically synthesized
atgaggggggaacctgcact

SEQ ID NO: 24548 - DNA, 20 bp, Artificial Sequence
  chemically synthesized
gaggggggaacctgcacttg

SEQ ID NO: 24549 - DNA, 20 bp, Artificial Sequence
  chemically synthesized
cctgcacttggagccacttc

SEQ ID NO: 24550 - DNA, 20 bp, Artificial Sequence
  chemically synthesized
ttccagccccaccccctgtg

SEQ ID NO: 24551 - DNA, 20 bp, Artificial Sequence
  chemically synthesized
ccccaccccctgtgtagctt

SEQ ID NO: 24552 - DNA, 20 bp, Artificial Sequence
  chemically synthesized
cccaccccctgtgtagcttt

SEQ ID NO: 24553 - DNA, 20 bp, Artificial Sequence
  chemically synthesized
ccccctgtgtagctttgggc

SEQ ID NO: 24554 - DNA, 20 bp, Artificial Sequence
  chemically synthesized
tgggcaagtgacacccctcc

SEQ ID NO: 24555 - DNA, 20 bp, Artificial Sequence
  chemically synthesized
gggcaagtgacacccctccc

SEQ ID NO: 24556 - DNA, 20 bp, Artificial Sequence
  chemically synthesized
tcccgggcctccatgttctt

SEQ ID NO: 24557 - DNA, 20 bp, Artificial Sequence
  chemically synthesized
cccgggcctccatgttcttc

SEQ ID NO: 24558 - DNA, 20 bp, Artificial Sequence
  chemically synthesized
catgttcttcaggttatgat

SEQ ID NO: 24559 - DNA, 20 bp, Artificial Sequence
  chemically synthesized
atgttcttcaggttatgatg

SEQ ID NO: 24560 - DNA, 20 bp, Artificial Sequence
  chemically synthesized
tgttcttcaggttatgatga

SEQ ID NO: 24561 - DNA, 20 bp, Artificial Sequence
  chemically synthesized
gttcttcaggttatgatgag

SEQ ID NO: 24562 - DNA, 20 bp, Artificial Sequence
  chemically synthesized
cttcaggttatgatgagggg

SEQ ID NO: 24563 - DNA, 20 bp, Artificial Sequence
  chemically synthesized
ttcaggttatgatgaggggt

SEQ ID NO: 24564 - DNA, 20 bp, Artificial Sequence
  chemically synthesized
tcaggttatgatgaggggtg

SEQ ID NO: 24565 - DNA, 20 bp, Artificial Sequence
  chemically synthesized
caggttatgatgaggggtgg

SEQ ID NO: 24566 - DNA, 20 bp, Artificial Sequence
  chemically synthesized
aggttatgatgaggggtggg

SEQ ID NO: 24567 - DNA, 20 bp, Artificial Sequence
  chemically synthesized
aggggtggggggcacccgtc

SEQ ID NO: 24568 - DNA, 20 bp, Artificial Sequence
  chemically synthesized
gggggcacccgtccagctcc

SEQ ID NO: 24569 - DNA, 20 bp, Artificial Sequence
  chemically synthesized
ggggcacccgtccagctccg

SEQ ID NO: 24570 - DNA, 20 bp, Artificial Sequence
  chemically synthesized
gtccagctccgaggcttcct

SEQ ID NO: 24571 - DNA, 20 bp, Artificial Sequence
  chemically synthesized
ctccgaggcttccttagctc

SEQ ID NO: 24572 - DNA, 20 bp, Artificial Sequence
  chemically synthesized
gaggcttccttagctctagc

SEQ ID NO: 24573 - DNA, 20 bp, Artificial Sequence
  chemically synthesized
agctctagcaagtgcttctc

SEQ ID NO: 24574 - DNA, 20 bp, Artificial Sequence
  chemically synthesized
gctctagcaagtgcttctcc

SEQ ID NO: 24575 - DNA, 20 bp, Artificial Sequence
  chemically synthesized
aagtgcttctccaggcttgc

SEQ ID NO: 24576 - DNA, 20 bp, Artificial Sequence
  chemically synthesized
gcttctccaggcttgctggc

SEQ ID NO: 24577 - DNA, 20 bp, Artificial Sequence
  chemically synthesized
cttctccaggcttgctggct

SEQ ID NO: 24578 - DNA, 20 bp, Artificial Sequence
  chemically synthesized
tccaggcttgctggctgggc

SEQ ID NO: 24579 - DNA, 20 bp, Artificial Sequence
  chemically synthesized
ccaggcttgctggctgggct

SEQ ID NO: 24580 - DNA, 20 bp, Artificial Sequence
  chemically synthesized
ggcttgctggctgggctggg

SEQ ID NO: 24581 - DNA, 20 bp, Artificial Sequence
  chemically synthesized
gcttgctggctgggctgggc

SEQ ID NO: 24582 - DNA, 20 bp, Artificial Sequence
  chemically synthesized
cttgctggctgggctgggca

SEQ ID NO: 24583 - DNA, 20 bp, Artificial Sequence
  chemically synthesized
tgctggctgggctgggcagg

SEQ ID NO: 24584 - DNA, 20 bp, Artificial Sequence
  chemically synthesized
cccctcctctttcccctccc

SEQ ID NO: 24585 - DNA, 20 bp, Artificial Sequence
  chemically synthesized
cctcctctttcccctcccca

SEQ ID NO: 24586 - DNA, 20 bp, Artificial Sequence
  chemically synthesized
ctcctctttcccctccccag

SEQ ID NO: 24587 - DNA, 20 bp, Artificial Sequence
  chemically synthesized
tcctctttcccctccccaga

SEQ ID NO: 24588 - DNA, 20 bp, Artificial Sequence
  chemically synthesized
cctccccagagggcattacc

SEQ ID NO: 24589 - DNA, 20 bp, Artificial Sequence
  chemically synthesized
tccccagagggcattacctg

SEQ ID NO: 24590 - DNA, 20 bp, Artificial Sequence
  chemically synthesized
ccagagggcattacctggag

SEQ ID NO: 24591 - DNA, 20 bp, Artificial Sequence
  chemically synthesized
ttacctggagcagctgcctc

SEQ ID NO: 24592 - DNA, 20 bp, Artificial Sequence
  chemically synthesized
tacctggagcagctgcctct

SEQ ID NO: 24593 - DNA, 20 bp, Artificial Sequence
  chemically synthesized
acctggagcagctgcctcta

SEQ ID NO: 24594 - DNA, 20 bp, Artificial Sequence
  chemically synthesized
gctgcctctagggatgaact

SEQ ID NO: 24595 - DNA, 20 bp, Artificial Sequence
  chemically synthesized
gcctctagggatgaactgag

SEQ ID NO: 24596 - DNA, 20 bp, Artificial Sequence
  chemically synthesized
ctagggatgaactgagcaga

SEQ ID NO: 24597 - DNA, 20 bp, Artificial Sequence
  chemically synthesized
tagggatgaactgagcagac

SEQ ID NO: 24598 - DNA, 20 bp, Artificial Sequence
  chemically synthesized
ggatgaactgagcagacagg

SEQ ID NO: 24599 - DNA, 20 bp, Artificial Sequence
  chemically synthesized
gatgaactgagcagacaggc

SEQ ID NO: 24600 - DNA, 20 bp, Artificial Sequence
  chemically synthesized
tgaactgagcagacaggcag

SEQ ID NO: 24601 - DNA, 20 bp, Artificial Sequence
  chemically synthesized
gaactgagcagacaggcagg

SEQ ID NO: 24602 - DNA, 20 bp, Artificial Sequence
  chemically synthesized
aactgagcagacaggcagga

SEQ ID NO: 24603 - DNA, 20 bp, Artificial Sequence
  chemically synthesized
gacctgttttatatcatctc

SEQ ID NO: 24604 - DNA, 20 bp, Artificial Sequence
  chemically synthesized
acctgttttatatcatctcc

SEQ ID NO: 24605 - DNA, 20 bp, Artificial Sequence
  chemically synthesized
cctgttttatatcatctcca

SEQ ID NO: 24606 - DNA, 20 bp, Artificial Sequence
  chemically synthesized
gttttatatcatctccaggg

SEQ ID NO: 24607 - DNA, 20 bp, Artificial Sequence
  chemically synthesized
ttatatcatctccagggcag

SEQ ID NO: 24608 - DNA, 20 bp, Artificial Sequence
  chemically synthesized
tatatcatctccagggcagc

SEQ ID NO: 24609 - DNA, 20 bp, Artificial Sequence
  chemically synthesized
tctccagggcagcaggcact

SEQ ID NO: 24610 - DNA, 20 bp, Artificial Sequence
  chemically synthesized
ctccagggcagcaggcactg

SEQ ID NO: 24611 - DNA, 20 bp, Artificial Sequence
  chemically synthesized
ggcagcaggcactgaggacc

SEQ ID NO: 24612 - DNA, 20 bp, Artificial Sequence
  chemically synthesized
gcagcaggcactgaggaccc

SEQ ID NO: 24613 - DNA, 20 bp, Artificial Sequence
  chemically synthesized
cagcaggcactgaggaccca

SEQ ID NO: 24614 - DNA, 20 bp, Artificial Sequence
  chemically synthesized
gcactgaggacccagggcgc

SEQ ID NO: 24615 - DNA, 20 bp, Artificial Sequence
  chemically synthesized
cactgaggacccagggcgct

SEQ ID NO: 24616 - DNA, 20 bp, Artificial Sequence
  chemically synthesized
aggacccagggcgctgggca

SEQ ID NO: 24617 - DNA, 20 bp, Artificial Sequence
  chemically synthesized
ggacccagggcgctgggcaa

SEQ ID NO: 24618 - DNA, 20 bp, Artificial Sequence
  chemically synthesized
ggcaaaggtcacctgctgac

SEQ ID NO: 24619 - DNA, 20 bp, Artificial Sequence
  chemically synthesized
aaaggtcacctgctgaccag

SEQ ID NO: 24620 - DNA, 20 bp, Artificial Sequence
  chemically synthesized
aggtcacctgctgaccagtg

SEQ ID NO: 24621 - DNA, 20 bp, Artificial Sequence
  chemically synthesized
acctgctgaccagtggagat

SEQ ID NO: 24622 - DNA, 20 bp, Artificial Sequence
  chemically synthesized
cctgctgaccagtggagatg

SEQ ID NO: 24623 - DNA, 20 bp, Artificial Sequence
  chemically synthesized
ctgctgaccagtggagatga

SEQ ID NO: 24624 - DNA, 20 bp, Artificial Sequence
  chemically synthesized
accagtggagatgagggcct

SEQ ID NO: 24625 - DNA, 20 bp, Artificial Sequence
  chemically synthesized
ccagtggagatgagggcctg

SEQ ID NO: 24626 - DNA, 20 bp, Artificial Sequence
  chemically synthesized
gtggagatgagggcctgagg

SEQ ID NO: 24627 - DNA, 20 bp, Artificial Sequence
  chemically synthesized
tggagatgagggcctgaggc

SEQ ID NO: 24628 - DNA, 20 bp, Artificial Sequence
  chemically synthesized
ggagatgagggcctgaggca

SEQ ID NO: 24629 - DNA, 20 bp, Artificial Sequence
  chemically synthesized
agggcctgaggcagggtgtc

SEQ ID NO: 24630 - DNA, 20 bp, Artificial Sequence
  chemically synthesized
tgaggcagggtgtccagatg

SEQ ID NO: 24631 - DNA, 20 bp, Artificial Sequence
  chemically synthesized
gcagggtgtccagatgcagc

SEQ ID NO: 24632 - DNA, 20 bp, Artificial Sequence
  chemically synthesized
gggtgtccagatgcagcaag

SEQ ID NO: 24633 - DNA, 20 bp, Artificial Sequence
  chemically synthesized
ggtgtccagatgcagcaagc

SEQ ID NO: 24634 - DNA, 20 bp, Artificial Sequence
  chemically synthesized
gtccagatgcagcaagcggg

SEQ ID NO: 24635 - DNA, 20 bp, Artificial Sequence
  chemically synthesized
tccagatgcagcaagcgggc

SEQ ID NO: 24636 - DNA, 20 bp, Artificial Sequence
  chemically synthesized
cagatgcagcaagcgggcgg

SEQ ID NO: 24637 - DNA, 20 bp, Artificial Sequence
  chemically synthesized
gatgcagcaagcgggcggga

SEQ ID NO: 24638 - DNA, 20 bp, Artificial Sequence
  chemically synthesized
cagcaagcgggcgggagagt

SEQ ID NO: 24639 - DNA, 20 bp, Artificial Sequence
  chemically synthesized
agcaagcgggcgggagagtt

SEQ ID NO: 24640 - DNA, 20 bp, Artificial Sequence
  chemically synthesized
cgggagagttgggaaatccc

SEQ ID NO: 24641 - DNA, 20 bp, Artificial Sequence
  chemically synthesized
gggagagttgggaaatccct

SEQ ID NO: 24642 - DNA, 20 bp, Artificial Sequence
  chemically synthesized
gagagttgggaaatccctag

SEQ ID NO: 24643 - DNA, 20 bp, Artificial Sequence
  chemically synthesized
tgggaaatccctaggagact

SEQ ID NO: 24644 - DNA, 20 bp, Artificial Sequence
  chemically synthesized
ggtgacctttgcccagcgcc

SEQ ID NO: 24645 - DNA, 20 bp, Artificial Sequence
  chemically synthesized
gaggggaaagaggaggggag

SEQ ID NO: 24646 - DNA, 20 bp, Artificial Sequence
  chemically synthesized
taaggaagcctcggagctgg

SEQ ID NO: 24647 - DNA, 20 bp, Artificial Sequence
  chemically synthesized
gaagaacatggaggcccggg

SEQ ID NO: 24648 - DNA, 20 bp, Artificial Sequence
  chemically synthesized
cacttgcccaaagctacaca

SEQ ID NO: 24649 - DNA, 20 bp, Artificial Sequence
  chemically synthesized
gtgccttgatgttcagtctg

SEQ ID NO: 24650 - DNA, 20 bp, Artificial Sequence
  chemically synthesized
gccacgccacctccccaggg

SEQ ID NO: 24651 - DNA, 20 bp, Artificial Sequence
  chemically synthesized
ggtccagaggcatggggacc

SEQ ID NO: 24652 - DNA, 20 bp, Artificial Sequence
  chemically synthesized
aacagaggtgccatgcagcc

SEQ ID NO: 24653 - DNA, 20 bp, Artificial Sequence
  chemically synthesized
tggtgggactgggctggggg

SEQ ID NO: 24654 - DNA, 20 bp, Artificial Sequence
  chemically synthesized
gcgccaggagggcaacaaca

SEQ ID NO: 24655 - DNA, 20 bp, Artificial Sequence
  chemically synthesized
cccctaaggtagaaccttag

SEQ ID NO: 24656 - DNA, 20 bp, Artificial Sequence
  chemically synthesized
ccttagctgggtctgccaga

SEQ ID NO: 24657 - DNA, 20 bp, Artificial Sequence
  chemically synthesized
agggggactggtgaggggcg

SEQ ID NO: 24658 - DNA, 20 bp, Artificial Sequence
  chemically synthesized
ggatcgaggcccaaagggag

SEQ ID NO: 24659 - DNA, 20 bp, Artificial Sequence
  chemically synthesized
gaggcccaaagggaggtggg

SEQ ID NO: 24660 - DNA, 20 bp, Artificial Sequence
  chemically synthesized
agccaacatgctgtgtgtct

SEQ ID NO: 24661 - DNA, 20 bp, Artificial Sequence
  chemically synthesized
caggcctcagtttccctgtc

SEQ ID NO: 24662 - DNA, 20 bp, Artificial Sequence
  chemically synthesized
ttcctccagccctaagcctg

SEQ ID NO: 24663 - DNA, 20 bp, Artificial Sequence
  chemically synthesized
atgttcttcaggttatgatg

SEQ ID NO: 24664 - DNA, 20 bp, Artificial Sequence
  chemically synthesized
tacctggagcagctgcctct

SEQ ID NO: 24665 - DNA, 20 bp, Artificial Sequence
  chemically synthesized
tgaactgagcagacaggcag

SEQ ID NO: 24666 - DNA, 20 bp, Artificial Sequence
  chemically synthesized
gtggagatgagggcctgagg

SEQ ID NO: 24667 - DNA, 20 bp, Artificial Sequence
  chemically synthesized
cagatgcagcaagcgggcgg

SEQ ID NO: 24668 - DNA, 20 bp, Artificial Sequence
  chemically synthesized
gttgggaaatccctaggaga

SEQ ID NO: 24669 - DNA, 20 bp, Artificial Sequence
  chemically synthesized
aaactgaggcctggagaggg

SEQ ID NO: 24670 - DNA, 20 bp, Artificial Sequence
  chemically synthesized
agggaggtgggtgggatgga

SEQ ID NO: 24671 - DNA, 20 bp, Artificial Sequence
  chemically synthesized
cttcctccagccctaagcct

SEQ ID NO: 24672 - DNA, 20 bp, Artificial Sequence
  chemically synthesized
ctgctgccctggagatgata

SEQ ID NO: 24673 - DNA, 20 bp, Artificial Sequence
  chemically synthesized
gaggtgggtgggatggagca

SEQ ID NO: 24674 - DNA, 20 bp, Artificial Sequence
  chemically synthesized
agggatttcccaactctccc

SEQ ID NO: 24675 - DNA, 20 bp, Artificial Sequence
  chemically synthesized
gcaggttcccccctcattct

SEQ ID NO: 24676 - DNA, 20 bp, Artificial Sequence
  chemically synthesized
gtgccttgatgttcagtctg

SEQ ID NO: 24677 - DNA, 20 bp, Artificial Sequence
  chemically synthesized
gcccccagcccagtcccacc

SEQ ID NO: 24678 - DNA, 20 bp, Artificial Sequence
  chemically synthesized
ccaacatgctgtgtgtcttt

SEQ ID NO: 24679 - DNA, 20 bp, Artificial Sequence
  chemically synthesized
atttctggccctctccaggc

SEQ ID NO: 24680 - DNA, 20 bp, Artificial Sequence
  chemically synthesized
tggggtaggactgggctgtc

SEQ ID NO: 24681 - DNA, 20 bp, Artificial Sequence
  chemically synthesized
acttccagccccaccccctg

SEQ ID NO: 24682 - DNA, 20 bp, Artificial Sequence
  chemically synthesized
ggggggcacccgtccagctc

SEQ ID NO: 24683 - DNA, 20 bp, Artificial Sequence
  chemically synthesized
gaggcttccttagctctagc

SEQ ID NO: 24684 - DNA, 20 bp, Artificial Sequence
  chemically synthesized
tagctctagcaagtgcttct

SEQ ID NO: 24685 - DNA, 20 bp, Artificial Sequence
  chemically synthesized
agacaggcaggagggttctg

SEQ ID NO: 24686 - DNA, 22 bp, Artificial Sequence
  chemically synthesized
agtctcctagggatttcccaac

SEQ ID NO: 24687 - DNA, 22 bp, Artificial Sequence
  chemically synthesized
ctagggatttcccaactctccc

SEQ ID NO: 24688 - DNA, 22 bp, Artificial Sequence
  chemically synthesized
gggatttcccaactctcccgcc

SEQ ID NO: 24689 - DNA, 22 bp, Artificial Sequence
  chemically synthesized
cccaactctcccgcccgcttgc

SEQ ID NO: 24690 - DNA, 22 bp, Artificial Sequence
  chemically synthesized
ccaactctcccgcccgcttgct

SEQ ID NO: 24691 - DNA, 22 bp, Artificial Sequence
  chemically synthesized
tcccgcccgcttgctgcatctg

SEQ ID NO: 24692 - DNA, 22 bp, Artificial Sequence
  chemically synthesized
ccgcccgcttgctgcatctgga

SEQ ID NO: 24693 - DNA, 22 bp, Artificial Sequence
  chemically synthesized
gctgcatctggacaccctgcct

SEQ ID NO: 24694 - DNA, 22 bp, Artificial Sequence
  chemically synthesized
ctgcatctggacaccctgcctc

SEQ ID NO: 24695 - DNA, 22 bp, Artificial Sequence
  chemically synthesized
catctggacaccctgcctcagg

SEQ ID NO: 24696 - DNA, 22 bp, Artificial Sequence
  chemically synthesized
gacaccctgcctcaggccctca

SEQ ID NO: 24697 - DNA, 22 bp, Artificial Sequence
  chemically synthesized
cctcaggccctcatctccactg

SEQ ID NO: 24698 - DNA, 22 bp, Artificial Sequence
  chemically synthesized
aggccctcatctccactggtca

SEQ ID NO: 24699 - DNA, 22 bp, Artificial Sequence
  chemically synthesized
atctccactggtcagcaggtga

SEQ ID NO: 24700 - DNA, 22 bp, Artificial Sequence
  chemically synthesized
cactggtcagcaggtgaccttt

SEQ ID NO: 24701 - DNA, 22 bp, Artificial Sequence
  chemically synthesized
gtcagcaggtgacctttgccca

SEQ ID NO: 24702 - DNA, 22 bp, Artificial Sequence
  chemically synthesized
tgcccagcgccctgggtcctca

SEQ ID NO: 24703 - DNA, 22 bp, Artificial Sequence
  chemically synthesized
gcccagcgccctgggtcctcag

SEQ ID NO: 24704 - DNA, 22 bp, Artificial Sequence
  chemically synthesized
cccagcgccctgggtcctcagt

SEQ ID NO: 24705 - DNA, 22 bp, Artificial Sequence
  chemically synthesized
ggtcctcagtgcctgctgccct

SEQ ID NO: 24706 - DNA, 22 bp, Artificial Sequence
  chemically synthesized
agtgcctgctgccctggagatg

SEQ ID NO: 24707 - DNA, 22 bp, Artificial Sequence
  chemically synthesized
ctgccctggagatgatataaaa

SEQ ID NO: 24708 - DNA, 22 bp, Artificial Sequence
  chemically synthesized
ccctggagatgatataaaacag

SEQ ID NO: 24709 - DNA, 22 bp, Artificial Sequence
  chemically synthesized
gagatgatataaaacaggtcag

SEQ ID NO: 24710 - DNA, 22 bp, Artificial Sequence
  chemically synthesized
ctgcctgtctgctcagttcatc

SEQ ID NO: 24711 - DNA, 22 bp, Artificial Sequence
  chemically synthesized
cctgtctgctcagttcatccct

SEQ ID NO: 24712 - DNA, 22 bp, Artificial Sequence
  chemically synthesized
tctgctcagttcatccctagag

SEQ ID NO: 24713 - DNA, 22 bp, Artificial Sequence
  chemically synthesized
ctcagttcatccctagaggcag

SEQ ID NO: 24714 - DNA, 22 bp, Artificial Sequence
  chemically synthesized
agttcatccctagaggcagctg

SEQ ID NO: 24715 - DNA, 22 bp, Artificial Sequence
  chemically synthesized
atccctagaggcagctgctcca

SEQ ID NO: 24716 - DNA, 22 bp, Artificial Sequence
  chemically synthesized
gaggcagctgctccaggtaatg

SEQ ID NO: 24717 - DNA, 22 bp, Artificial Sequence
  chemically synthesized
ctccaggtaatgccctctgggg

SEQ ID NO: 24718 - DNA, 22 bp, Artificial Sequence
  chemically synthesized
caggtaatgccctctggggagg

SEQ ID NO: 24719 - DNA, 22 bp, Artificial Sequence
  chemically synthesized
tggggaggggaaagaggagggg

SEQ ID NO: 24720 - DNA, 22 bp, Artificial Sequence
  chemically synthesized
gggaggggaaagaggaggggag

SEQ ID NO: 24721 - DNA, 22 bp, Artificial Sequence
  chemically synthesized
cctgcccagcccagccagcaag

SEQ ID NO: 24722 - DNA, 22 bp, Artificial Sequence
  chemically synthesized
cccagcccagccagcaagcctg

SEQ ID NO: 24723 - DNA, 22 bp, Artificial Sequence
  chemically synthesized
gagaagcacttgctagagctaa

SEQ ID NO: 24724 - DNA, 22 bp, Artificial Sequence
  chemically synthesized
gctagagctaaggaagcctcgg

SEQ ID NO: 24725 - DNA, 22 bp, Artificial Sequence
  chemically synthesized
ctagagctaaggaagcctcgga

SEQ ID NO: 24726 - DNA, 22 bp, Artificial Sequence
  chemically synthesized
gagctaaggaagcctcggagct

SEQ ID NO: 24727 - DNA, 22 bp, Artificial Sequence
  chemically synthesized
aggaagcctcggagctggacgg

SEQ ID NO: 24728 - DNA, 22 bp, Artificial Sequence
  chemically synthesized
ggagctggacgggtgcccccca

SEQ ID NO: 24729 - DNA, 22 bp, Artificial Sequence
  chemically synthesized
gacgggtgccccccacccctca

SEQ ID NO: 24730 - DNA, 22 bp, Artificial Sequence
  chemically synthesized
atcataacctgaagaacatgga

SEQ ID NO: 24731 - DNA, 22 bp, Artificial Sequence
  chemically synthesized
aagaacatggaggcccgggagg

SEQ ID NO: 24732 - DNA, 22 bp, Artificial Sequence
  chemically synthesized
gcccaaagctacacagggggtg

SEQ ID NO: 24733 - DNA, 22 bp, Artificial Sequence
  chemically synthesized
cccaaagctacacagggggtgg

SEQ ID NO: 24734 - DNA, 22 bp, Artificial Sequence
  chemically synthesized
cacagggggtggggctggaagt

SEQ ID NO: 24735 - DNA, 22 bp, Artificial Sequence
  chemically synthesized
gaagtggctccaagtgcaggtt

SEQ ID NO: 24736 - DNA, 22 bp, Artificial Sequence
  chemically synthesized
caagtgcaggttcccccctcat

SEQ ID NO: 24737 - DNA, 22 bp, Artificial Sequence
  chemically synthesized
ccccctcattcttcaggcttag

SEQ ID NO: 24738 - DNA, 22 bp, Artificial Sequence
  chemically synthesized
attcttcaggcttagggctgga

SEQ ID NO: 24739 - DNA, 22 bp, Artificial Sequence
  chemically synthesized
ttcaggcttagggctggaggaa

SEQ ID NO: 24740 - DNA, 22 bp, Artificial Sequence
  chemically synthesized
caggcttagggctggaggaagc

SEQ ID NO: 24741 - DNA, 22 bp, Artificial Sequence
  chemically synthesized
aggcttagggctggaggaagcc

SEQ ID NO: 24742 - DNA, 22 bp, Artificial Sequence
  chemically synthesized
agggctggaggaagccttagac

SEQ ID NO: 24743 - DNA, 22 bp, Artificial Sequence
  chemically synthesized
gggctggaggaagccttagaca

SEQ ID NO: 24744 - DNA, 22 bp, Artificial Sequence
  chemically synthesized
gaggaagccttagacagcccag

SEQ ID NO: 24745 - DNA, 22 bp, Artificial Sequence
  chemically synthesized
agacagcccagtcctaccccag

SEQ ID NO: 24746 - DNA, 22 bp, Artificial Sequence
  chemically synthesized
gacagcccagtcctaccccaga

SEQ ID NO: 24747 - DNA, 22 bp, Artificial Sequence
  chemically synthesized
ccccagacagggaaactgaggc

SEQ ID NO: 24748 - DNA, 22 bp, Artificial Sequence
  chemically synthesized
aggcctggagagggccagaaat

SEQ ID NO: 24749 - DNA, 22 bp, Artificial Sequence
  chemically synthesized
gagagggccagaaatcacccaa

SEQ ID NO: 24750 - DNA, 22 bp, Artificial Sequence
  chemically synthesized
gctggactggacggagatcagt

SEQ ID NO: 24751 - DNA, 22 bp, Artificial Sequence
  chemically synthesized
gactggacggagatcagtccag

SEQ ID NO: 24752 - DNA, 22 bp, Artificial Sequence
  chemically synthesized
gacggagatcagtccagaccgc

SEQ ID NO: 24753 - DNA, 22 bp, Artificial Sequence
  chemically synthesized
gatgttcagtctggtgggtttt

SEQ ID NO: 24754 - DNA, 22 bp, Artificial Sequence
  chemically synthesized
atgttcagtctggtgggttttc

SEQ ID NO: 24755 - DNA, 22 bp, Artificial Sequence
  chemically synthesized
agtctggtgggttttctgctcc

SEQ ID NO: 24756 - DNA, 22 bp, Artificial Sequence
  chemically synthesized
gtgggttttctgctccatccca

SEQ ID NO: 24757 - DNA, 22 bp, Artificial Sequence
  chemically synthesized
tctgctccatcccacccacctc

SEQ ID NO: 24758 - DNA, 22 bp, Artificial Sequence
  chemically synthesized
ctgctccatcccacccacctcc

SEQ ID NO: 24759 - DNA, 22 bp, Artificial Sequence
  chemically synthesized
tgctccatcccacccacctccc

SEQ ID NO: 24760 - DNA, 22 bp, Artificial Sequence
  chemically synthesized
ctccatcccacccacctccctt

SEQ ID NO: 24761 - DNA, 22 bp, Artificial Sequence
  chemically synthesized
catcccacccacctccctttgg

SEQ ID NO: 24762 - DNA, 22 bp, Artificial Sequence
  chemically synthesized
cctttgggcctcgatccctcgc

SEQ ID NO: 24763 - DNA, 22 bp, Artificial Sequence
  chemically synthesized
tgggcctcgatccctcgcccct

SEQ ID NO: 24764 - DNA, 22 bp, Artificial Sequence
  chemically synthesized
gggcctcgatccctcgcccctc

SEQ ID NO: 24765 - DNA, 22 bp, Artificial Sequence
  chemically synthesized
ggcctcgatccctcgcccctca

SEQ ID NO: 24766 - DNA, 22 bp, Artificial Sequence
  chemically synthesized
gatccctcgcccctcaccagtc

SEQ ID NO: 24767 - DNA, 22 bp, Artificial Sequence
  chemically synthesized
gcccctcaccagtcccccttct

SEQ ID NO: 24768 - DNA, 22 bp, Artificial Sequence
  chemically synthesized
accagtcccccttctgagagcc

SEQ ID NO: 24769 - DNA, 22 bp, Artificial Sequence
  chemically synthesized
ctgagagcccgtattagcaggg

SEQ ID NO: 24770 - DNA, 22 bp, Artificial Sequence
  chemically synthesized
tgagagcccgtattagcaggga

SEQ ID NO: 24771 - DNA, 22 bp, Artificial Sequence
  chemically synthesized
agagcccgtattagcagggagc

SEQ ID NO: 24772 - DNA, 22 bp, Artificial Sequence
  chemically synthesized
gcagggagccggcccctactcc

SEQ ID NO: 24773 - DNA, 22 bp, Artificial Sequence
  chemically synthesized
ctccttctggcagacccagcta

SEQ ID NO: 24774 - DNA, 22 bp, Artificial Sequence
  chemically synthesized
cttctggcagacccagctaagg

SEQ ID NO: 24775 - DNA, 22 bp, Artificial Sequence
  chemically synthesized
ctggcagacccagctaaggttc

SEQ ID NO: 24776 - DNA, 22 bp, Artificial Sequence
  chemically synthesized
tggcagacccagctaaggttct

SEQ ID NO: 24777 - DNA, 22 bp, Artificial Sequence
  chemically synthesized
gcagacccagctaaggttctac

SEQ ID NO: 24778 - DNA, 22 bp, Artificial Sequence
  chemically synthesized
aggttctaccttaggggccacg

SEQ ID NO: 24779 - DNA, 22 bp, Artificial Sequence
  chemically synthesized
taccttaggggccacgccacct

SEQ ID NO: 24780 - DNA, 22 bp, Artificial Sequence
  chemically synthesized
ccttaggggccacgccacctcc

SEQ ID NO: 24781 - DNA, 22 bp, Artificial Sequence
  chemically synthesized
aggggccacgccacctccccag

SEQ ID NO: 24782 - DNA, 22 bp, Artificial Sequence
  chemically synthesized
ggggccacgccacctccccagg

SEQ ID NO: 24783 - DNA, 22 bp, Artificial Sequence
  chemically synthesized
cccagggaggggtccagaggca

SEQ ID NO: 24784 - DNA, 22 bp, Artificial Sequence
  chemically synthesized
gggtgcccctcacaggacactt

SEQ ID NO: 24785 - DNA, 22 bp, Artificial Sequence
  chemically synthesized
acaggacacttccttgcaggaa

SEQ ID NO: 24786 - DNA, 22 bp, Artificial Sequence
  chemically synthesized
ccttgcaggaacagaggtgcca

SEQ ID NO: 24787 - DNA, 22 bp, Artificial Sequence
  chemically synthesized
cttgcaggaacagaggtgccat

SEQ ID NO: 24788 - DNA, 22 bp, Artificial Sequence
  chemically synthesized
gcaggaacagaggtgccatgca

SEQ ID NO: 24789 - DNA, 22 bp, Artificial Sequence
  chemically synthesized
caggaacagaggtgccatgcag

SEQ ID NO: 24790 - DNA, 22 bp, Artificial Sequence
  chemically synthesized
cttgttgttgccctcctggcgc

SEQ ID NO: 24791 - DNA, 22 bp, Artificial Sequence
  chemically synthesized
gttgttgccctcctggcgctcc

SEQ ID NO: 24792 - DNA, 22 bp, Artificial Sequence
  chemically synthesized
ttgttgccctcctggcgctcct

SEQ ID NO: 24793 - DNA, 22 bp, Artificial Sequence
  chemically synthesized
ttgccctcctggcgctcctggc

SEQ ID NO: 24794 - DNA, 22 bp, Artificial Sequence
  chemically synthesized
ccctcctggcgctcctggcctc

SEQ ID NO: 24795 - DNA, 22 bp, Artificial Sequence
  chemically synthesized
ctggcgctcctggcctctgccc

SEQ ID NO: 24796 - DNA, 22 bp, Artificial Sequence
  chemically synthesized
gcgctcctggcctctgcccgta

SEQ ID NO: 24797 - DNA, 22 bp, Artificial Sequence
  chemically synthesized
ctggcctctgcccgtaagcact

SEQ ID NO: 24798 - DNA, 22 bp, Artificial Sequence
  chemically synthesized
gcctctgcccgtaagcacttgg

SEQ ID NO: 24799 - DNA, 22 bp, Artificial Sequence
  chemically synthesized
tgcccgtaagcacttggtggga

SEQ ID NO: 24800 - DNA, 22 bp, Artificial Sequence
  chemically synthesized
cccgtaagcacttggtgggact

SEQ ID NO: 24801 - DNA, 22 bp, Artificial Sequence
  chemically synthesized
ggtgggactgggctgggggcag

SEQ ID NO: 24802 - DNA, 22 bp, Artificial Sequence
  chemically synthesized
gtgggactgggctgggggcagg

SEQ ID NO: 24803 - DNA, 22 bp, Artificial Sequence
  chemically synthesized
cccccagcccagtcccaccaag

SEQ ID NO: 24804 - DNA, 22 bp, Artificial Sequence
  chemically synthesized
acgggcagaggccaggagcgcc

SEQ ID NO: 24805 - DNA, 22 bp, Artificial Sequence
  chemically synthesized
cgggcagaggccaggagcgcca

SEQ ID NO: 24806 - DNA, 22 bp, Artificial Sequence
  chemically synthesized
catggcacctctgttcctgcaa

SEQ ID NO: 24807 - DNA, 22 bp, Artificial Sequence
  chemically synthesized
tgttcctgcaaggaagtgtcct

SEQ ID NO: 24808 - DNA, 22 bp, Artificial Sequence
  chemically synthesized
ttcctgcaaggaagtgtcctgt

SEQ ID NO: 24809 - DNA, 22 bp, Artificial Sequence
  chemically synthesized
ctgcaaggaagtgtcctgtgag

SEQ ID NO: 24810 - DNA, 22 bp, Artificial Sequence
  chemically synthesized
caaggaagtgtcctgtgagggg

SEQ ID NO: 24811 - DNA, 22 bp, Artificial Sequence
  chemically synthesized
tgaggggcaccccaggtcccca

SEQ ID NO: 24812 - DNA, 22 bp, Artificial Sequence
  chemically synthesized
tggacccctccctggggaggtg

SEQ ID NO: 24813 - DNA, 22 bp, Artificial Sequence
  chemically synthesized
gacccctccctggggaggtggc

SEQ ID NO: 24814 - DNA, 22 bp, Artificial Sequence
  chemically synthesized
cctggggaggtggcgtggcccc

SEQ ID NO: 24815 - DNA, 22 bp, Artificial Sequence
  chemically synthesized
gggaggtggcgtggcccctaag

SEQ ID NO: 24816 - DNA, 22 bp, Artificial Sequence
  chemically synthesized
aggtagaaccttagctgggtct

SEQ ID NO: 24817 - DNA, 22 bp, Artificial Sequence
  chemically synthesized
agctgggtctgccagaaggagt

SEQ ID NO: 24818 - DNA, 22 bp, Artificial Sequence
  chemically synthesized
gctgggtctgccagaaggagta

SEQ ID NO: 24819 - DNA, 22 bp, Artificial Sequence
  chemically synthesized
ggtctgccagaaggagtagggg

SEQ ID NO: 24820 - DNA, 22 bp, Artificial Sequence
  chemically synthesized
ccagaaggagtaggggccggct

SEQ ID NO: 24821 - DNA, 22 bp, Artificial Sequence
  chemically synthesized
cctgctaatacgggctctcaga

SEQ ID NO: 24822 - DNA, 22 bp, Artificial Sequence
  chemically synthesized
ctaatacgggctctcagaaggg

SEQ ID NO: 24823 - DNA, 22 bp, Artificial Sequence
  chemically synthesized
atacgggctctcagaaggggga

SEQ ID NO: 24824 - DNA, 22 bp, Artificial Sequence
  chemically synthesized
tcagaagggggactggtgaggg

SEQ ID NO: 24825 - DNA, 22 bp, Artificial Sequence
  chemically synthesized
agaagggggactggtgaggggc

SEQ ID NO: 24826 - DNA, 22 bp, Artificial Sequence
  chemically synthesized
gtgaggggcgagggatcgaggc

SEQ ID NO: 24827 - DNA, 22 bp, Artificial Sequence
  chemically synthesized
aacatcaaggcacctgcggtct

SEQ ID NO: 24828 - DNA, 22 bp, Artificial Sequence
  chemically synthesized
cggtctggactgatctccgtcc

SEQ ID NO: 24829 - DNA, 22 bp, Artificial Sequence
  chemically synthesized
gactgatctccgtccagtccag

SEQ ID NO: 24830 - DNA, 22 bp, Artificial Sequence
  chemically synthesized
atctccgtccagtccagccaac

SEQ ID NO: 24831 - DNA, 22 bp, Artificial Sequence
  chemically synthesized
cgtccagtccagccaacatgct

SEQ ID NO: 24832 - DNA, 22 bp, Artificial Sequence
  chemically synthesized
tgtgtctttgggtgatttctgg

SEQ ID NO: 24833 - DNA, 22 bp, Artificial Sequence
  chemically synthesized
tgggtgatttctggccctctcc

SEQ ID NO: 24834 - DNA, 22 bp, Artificial Sequence
  chemically synthesized
gggtgatttctggccctctcca

SEQ ID NO: 24835 - DNA, 22 bp, Artificial Sequence
  chemically synthesized
ggtgatttctggccctctccag

SEQ ID NO: 24836 - DNA, 22 bp, Artificial Sequence
  chemically synthesized
ctggccctctccaggcctcagt

SEQ ID NO: 24837 - DNA, 22 bp, Artificial Sequence
  chemically synthesized
tggccctctccaggcctcagtt

SEQ ID NO: 24838 - DNA, 22 bp, Artificial Sequence
  chemically synthesized
gccctctccaggcctcagtttc

SEQ ID NO: 24839 - DNA, 22 bp, Artificial Sequence
  chemically synthesized
tccaggcctcagtttccctgtc

SEQ ID NO: 24840 - DNA, 22 bp, Artificial Sequence
  chemically synthesized
caggcctcagtttccctgtctg

SEQ ID NO: 24841 - DNA, 22 bp, Artificial Sequence
  chemically synthesized
agtttccctgtctggggtagga

SEQ ID NO: 24842 - DNA, 22 bp, Artificial Sequence
  chemically synthesized
ccctgtctggggtaggactggg

SEQ ID NO: 24843 - DNA, 22 bp, Artificial Sequence
  chemically synthesized
cctgtctggggtaggactgggc

SEQ ID NO: 24844 - DNA, 22 bp, Artificial Sequence
  chemically synthesized
tctggggtaggactgggctgtc

SEQ ID NO: 24845 - DNA, 22 bp, Artificial Sequence
  chemically synthesized
gggtaggactgggctgtctaag

SEQ ID NO: 24846 - DNA, 22 bp, Artificial Sequence
  chemically synthesized
ggctgtctaaggcttcctccag

SEQ ID NO: 24847 - DNA, 22 bp, Artificial Sequence
  chemically synthesized
tctaaggcttcctccagcccta

SEQ ID NO: 24848 - DNA, 22 bp, Artificial Sequence
  chemically synthesized
aggcttcctccagccctaagcc

SEQ ID NO: 24849 - DNA, 22 bp, Artificial Sequence
  chemically synthesized
cctccagccctaagcctgaaga

SEQ ID NO: 24850 - DNA, 22 bp, Artificial Sequence
  chemically synthesized
ctccagccctaagcctgaagaa

SEQ ID NO: 24851 - DNA, 22 bp, Artificial Sequence
  chemically synthesized
cagccctaagcctgaagaatga

SEQ ID NO: 24852 - DNA, 22 bp, Artificial Sequence
  chemically synthesized
agcctgaagaatgaggggggaa

SEQ ID NO: 24853 - DNA, 22 bp, Artificial Sequence
  chemically synthesized
aagaatgaggggggaacctgca

SEQ ID NO: 24854 - DNA, 22 bp, Artificial Sequence
  chemically synthesized
cacttggagccacttccagccc

SEQ ID NO: 24855 - DNA, 22 bp, Artificial Sequence
  chemically synthesized
ggagccacttccagccccaccc

SEQ ID NO: 24856 - DNA, 22 bp, Artificial Sequence
  chemically synthesized
gagccacttccagccccacccc

SEQ ID NO: 24857 - DNA, 22 bp, Artificial Sequence
  chemically synthesized
ccagccccaccccctgtgtagc

SEQ ID NO: 24858 - DNA, 22 bp, Artificial Sequence
  chemically synthesized
cagccccaccccctgtgtagct

SEQ ID NO: 24859 - DNA, 22 bp, Artificial Sequence
  chemically synthesized
tgtagctttgggcaagtgacac

SEQ ID NO: 24860 - DNA, 22 bp, Artificial Sequence
  chemically synthesized
tgggcaagtgacacccctcccg

SEQ ID NO: 24861 - DNA, 22 bp, Artificial Sequence
  chemically synthesized
gggcaagtgacacccctcccgg

SEQ ID NO: 24862 - DNA, 22 bp, Artificial Sequence
  chemically synthesized
ggcaagtgacacccctcccggg

SEQ ID NO: 24863 - DNA, 22 bp, Artificial Sequence
  chemically synthesized
ccgggcctccatgttcttcagg

SEQ ID NO: 24864 - DNA, 22 bp, Artificial Sequence
  chemically synthesized
catgttcttcaggttatgatga

SEQ ID NO: 24865 - DNA, 22 bp, Artificial Sequence
  chemically synthesized
ttcaggttatgatgaggggtgg

SEQ ID NO: 24866 - DNA, 22 bp, Artificial Sequence
  chemically synthesized
caggttatgatgaggggtgggg

SEQ ID NO: 24867 - DNA, 22 bp, Artificial Sequence
  chemically synthesized
aggttatgatgaggggtggggg

SEQ ID NO: 24868 - DNA, 22 bp, Artificial Sequence
  chemically synthesized
tgatgaggggtggggggcaccc

SEQ ID NO: 24869 - DNA, 22 bp, Artificial Sequence
  chemically synthesized
cgaggcttccttagctctagca

SEQ ID NO: 24870 - DNA, 22 bp, Artificial Sequence
  chemically synthesized
ccttagctctagcaagtgcttc

SEQ ID NO: 24871 - DNA, 22 bp, Artificial Sequence
  chemically synthesized
cttagctctagcaagtgcttct

SEQ ID NO: 24872 - DNA, 22 bp, Artificial Sequence
  chemically synthesized
agctctagcaagtgcttctcca

SEQ ID NO: 24873 - DNA, 22 bp, Artificial Sequence
  chemically synthesized
gctctagcaagtgcttctccag

SEQ ID NO: 24874 - DNA, 22 bp, Artificial Sequence
  chemically synthesized
tagcaagtgcttctccaggctt

SEQ ID NO: 24875 - DNA, 22 bp, Artificial Sequence
  chemically synthesized
gcaagtgcttctccaggcttgc

SEQ ID NO: 24876 - DNA, 22 bp, Artificial Sequence
  chemically synthesized
ctccaggcttgctggctgggct

SEQ ID NO: 24877 - DNA, 22 bp, Artificial Sequence
  chemically synthesized
tccaggcttgctggctgggctg

SEQ ID NO: 24878 - DNA, 22 bp, Artificial Sequence
  chemically synthesized
caggcttgctggctgggctggg

SEQ ID NO: 24879 - DNA, 22 bp, Artificial Sequence
  chemically synthesized
gctggctgggctgggcagggag

SEQ ID NO: 24880 - DNA, 22 bp, Artificial Sequence
  chemically synthesized
ctggctgggctgggcagggagc

SEQ ID NO: 24881 - DNA, 22 bp, Artificial Sequence
  chemically synthesized
gctgggctgggcagggagctcc

SEQ ID NO: 24882 - DNA, 22 bp, Artificial Sequence
  chemically synthesized
ggctgggcagggagctcctctt

SEQ ID NO: 24883 - DNA, 22 bp, Artificial Sequence
  chemically synthesized
ggcagggagctcctcttgcccc

SEQ ID NO: 24884 - DNA, 22 bp, Artificial Sequence
  chemically synthesized
ctcttgcccctcttcatcctcc

SEQ ID NO: 24885 - DNA, 22 bp, Artificial Sequence
  chemically synthesized
ttgcccctcttcatcctcctcc

SEQ ID NO: 24886 - DNA, 22 bp, Artificial Sequence
  chemically synthesized
gcccctcttcatcctcctcccc

SEQ ID NO: 24887 - DNA, 22 bp, Artificial Sequence
  chemically synthesized
cccctcttcatcctcctcccct

SEQ ID NO: 24888 - DNA, 22 bp, Artificial Sequence
  chemically synthesized
ttcatcctcctcccctcctctt

SEQ ID NO: 24889 - DNA, 22 bp, Artificial Sequence
  chemically synthesized
catcctcctcccctcctctttc

SEQ ID NO: 24890 - DNA, 22 bp, Artificial Sequence
  chemically synthesized
atcctcctcccctcctctttcc

SEQ ID NO: 24891 - DNA, 22 bp, Artificial Sequence
  chemically synthesized
ctcccctcctctttcccctccc

SEQ ID NO: 24892 - DNA, 22 bp, Artificial Sequence
  chemically synthesized
ccctcctctttcccctccccag

SEQ ID NO: 24893 - DNA, 22 bp, Artificial Sequence
  chemically synthesized
ctctttcccctccccagagggc

SEQ ID NO: 24894 - DNA, 22 bp, Artificial Sequence
  chemically synthesized
tttcccctccccagagggcatt

SEQ ID NO: 24895 - DNA, 22 bp, Artificial Sequence
  chemically synthesized
tcccctccccagagggcattac

SEQ ID NO: 24896 - DNA, 22 bp, Artificial Sequence
  chemically synthesized
cccctccccagagggcattacc

SEQ ID NO: 24897 - DNA, 22 bp, Artificial Sequence
  chemically synthesized
ccctccccagagggcattacct

SEQ ID NO: 24898 - DNA, 22 bp, Artificial Sequence
  chemically synthesized
cccagagggcattacctggagc

SEQ ID NO: 24899 - DNA, 22 bp, Artificial Sequence
  chemically synthesized
cctggagcagctgcctctaggg

SEQ ID NO: 24900 - DNA, 22 bp, Artificial Sequence
  chemically synthesized
gagcagctgcctctagggatga

SEQ ID NO: 24901 - DNA, 22 bp, Artificial Sequence
  chemically synthesized
cctctagggatgaactgagcag

SEQ ID NO: 24902 - DNA, 22 bp, Artificial Sequence
  chemically synthesized
tagggatgaactgagcagacag

SEQ ID NO: 24903 - DNA, 22 bp, Artificial Sequence
  chemically synthesized
gggatgaactgagcagacaggc

SEQ ID NO: 24904 - DNA, 22 bp, Artificial Sequence
  chemically synthesized
agcagacaggcaggagggttct

SEQ ID NO: 24905 - DNA, 22 bp, Artificial Sequence
  chemically synthesized
tgacctgttttatatcatctcc

SEQ ID NO: 24906 - DNA, 22 bp, Artificial Sequence
  chemically synthesized
acctgttttatatcatctccag

SEQ ID NO: 24907 - DNA, 22 bp, Artificial Sequence
  chemically synthesized
ttttatatcatctccagggcag

SEQ ID NO: 24908 - DNA, 22 bp, Artificial Sequence
  chemically synthesized
tatatcatctccagggcagcag

SEQ ID NO: 24909 - DNA, 22 bp, Artificial Sequence
  chemically synthesized
atatcatctccagggcagcagg

SEQ ID NO: 24910 - DNA, 22 bp, Artificial Sequence
  chemically synthesized
tatcatctccagggcagcaggc

SEQ ID NO: 24911 - DNA, 22 bp, Artificial Sequence
  chemically synthesized
cagggcagcaggcactgaggac

SEQ ID NO: 24912 - DNA, 22 bp, Artificial Sequence
  chemically synthesized
aggacccagggcgctgggcaaa

SEQ ID NO: 24913 - DNA, 22 bp, Artificial Sequence
  chemically synthesized
ggcaaaggtcacctgctgacca

SEQ ID NO: 24914 - DNA, 22 bp, Artificial Sequence
  chemically synthesized
ctgaccagtggagatgagggcc

SEQ ID NO: 24915 - DNA, 22 bp, Artificial Sequence
  chemically synthesized
accagtggagatgagggcctga

SEQ ID NO: 24916 - DNA, 22 bp, Artificial Sequence
  chemically synthesized
aggcagggtgtccagatgcagc

SEQ ID NO: 24917 - DNA, 22 bp, Artificial Sequence
  chemically synthesized
ggaaatccctaggagactgagt

SEQ ID NO: 24918 - DNA, 20 bp, Artificial Sequence
  chemically synthesized
taccccttgcccatccctgc

SEQ ID NO: 24919 - DNA, 20 bp, Artificial Sequence
  chemically synthesized
ggcccccgtgaccctcactt

SEQ ID NO: 24920 - DNA, 20 bp, Artificial Sequence
  chemically synthesized
gcccccgtgaccctcacttt

SEQ ID NO: 24921 - DNA, 20 bp, Artificial Sequence
  chemically synthesized
gtgaccctcactttgggacc

SEQ ID NO: 24922 - DNA, 20 bp, Artificial Sequence
  chemically synthesized
cactttgggacccagtcaca

SEQ ID NO: 24923 - DNA, 20 bp, Artificial Sequence
  chemically synthesized
ccagtcacacagatgaccac

SEQ ID NO: 24924 - DNA, 20 bp, Artificial Sequence
  chemically synthesized
gtcacacagatgaccaccag

SEQ ID NO: 24925 - DNA, 20 bp, Artificial Sequence
  chemically synthesized
acacagatgaccaccagcag

SEQ ID NO: 24926 - DNA, 20 bp, Artificial Sequence
  chemically synthesized
cacagatgaccaccagcagc

SEQ ID NO: 24927 - DNA, 20 bp, Artificial Sequence
  chemically synthesized
ccaccagcagcaggatgttg

SEQ ID NO: 24928 - DNA, 20 bp, Artificial Sequence
  chemically synthesized
agcagcaggatgttgaagct

SEQ ID NO: 24929 - DNA, 20 bp, Artificial Sequence
  chemically synthesized
gcagcaggatgttgaagctc

SEQ ID NO: 24930 - DNA, 20 bp, Artificial Sequence
  chemically synthesized
cagcaggatgttgaagctca

SEQ ID NO: 24931 - DNA, 20 bp, Artificial Sequence
  chemically synthesized
aggatgttgaagctcagggc

SEQ ID NO: 24932 - DNA, 20 bp, Artificial Sequence
  chemically synthesized
atgttgaagctcagggcaag

SEQ ID NO: 24933 - DNA, 20 bp, Artificial Sequence
  chemically synthesized
agctcagggcaagcagactg

SEQ ID NO: 24934 - DNA, 20 bp, Artificial Sequence
  chemically synthesized
tcagggcaagcagactgaag

SEQ ID NO: 24935 - DNA, 20 bp, Artificial Sequence
  chemically synthesized
aagcagactgaagcagacca

SEQ ID NO: 24936 - DNA, 20 bp, Artificial Sequence
  chemically synthesized
gcagactgaagcagaccatg

SEQ ID NO: 24937 - DNA, 20 bp, Artificial Sequence
  chemically synthesized
gactgaagcagaccatggag

SEQ ID NO: 24938 - DNA, 20 bp, Artificial Sequence
  chemically synthesized
ctgaagcagaccatggagca

SEQ ID NO: 24939 - DNA, 20 bp, Artificial Sequence
  chemically synthesized
atggagcagagacgctgtgc

SEQ ID NO: 24940 - DNA, 20 bp, Artificial Sequence
  chemically synthesized
tggagcagagacgctgtgcc

SEQ ID NO: 24941 - DNA, 20 bp, Artificial Sequence
  chemically synthesized
ggagcagagacgctgtgcca

SEQ ID NO: 24942 - DNA, 20 bp, Artificial Sequence
  chemically synthesized
gagcagagacgctgtgccag

SEQ ID NO: 24943 - DNA, 20 bp, Artificial Sequence
  chemically synthesized
agagacgctgtgccaggggc

SEQ ID NO: 24944 - DNA, 20 bp, Artificial Sequence
  chemically synthesized
gagacgctgtgccaggggct

SEQ ID NO: 24945 - DNA, 20 bp, Artificial Sequence
  chemically synthesized
acgctgtgccaggggctggg

SEQ ID NO: 24946 - DNA, 20 bp, Artificial Sequence
  chemically synthesized
cgctgtgccaggggctgggc

SEQ ID NO: 24947 - DNA, 20 bp, Artificial Sequence
  chemically synthesized
ctgtgccaggggctgggcag

SEQ ID NO: 24948 - DNA, 20 bp, Artificial Sequence
  chemically synthesized
tgtgccaggggctgggcagg

SEQ ID NO: 24949 - DNA, 20 bp, Artificial Sequence
  chemically synthesized
gccaggggctgggcaggagg

SEQ ID NO: 24950 - DNA, 20 bp, Artificial Sequence
  chemically synthesized
ctgggcaggaggtggccctg

SEQ ID NO: 24951 - DNA, 20 bp, Artificial Sequence
  chemically synthesized
tgggcaggaggtggccctgt

SEQ ID NO: 24952 - DNA, 20 bp, Artificial Sequence
  chemically synthesized
ggcaggaggtggccctgtgg

SEQ ID NO: 24953 - DNA, 20 bp, Artificial Sequence
  chemically synthesized
caggaggtggccctgtggga

SEQ ID NO: 24954 - DNA, 20 bp, Artificial Sequence
  chemically synthesized
aggaggtggccctgtgggag

SEQ ID NO: 24955 - DNA, 20 bp, Artificial Sequence
  chemically synthesized
ggaggtggccctgtgggaga

SEQ ID NO: 24956 - DNA, 20 bp, Artificial Sequence
  chemically synthesized
gaggtggccctgtgggagag

SEQ ID NO: 24957 - DNA, 20 bp, Artificial Sequence
  chemically synthesized
gccctgtgggagaggggcat

SEQ ID NO: 24958 - DNA, 20 bp, Artificial Sequence
  chemically synthesized
ccctgtgggagaggggcatc

SEQ ID NO: 24959 - DNA, 20 bp, Artificial Sequence
  chemically synthesized
ctgtgggagaggggcatcag

SEQ ID NO: 24960 - DNA, 20 bp, Artificial Sequence
  chemically synthesized
gggagaggggcatcaggagc

SEQ ID NO: 24961 - DNA, 20 bp, Artificial Sequence
  chemically synthesized
agaggggcatcaggagccgg

SEQ ID NO: 24962 - DNA, 20 bp, Artificial Sequence
  chemically synthesized
ggcatcaggagccggcagcc

SEQ ID NO: 24963 - DNA, 20 bp, Artificial Sequence
  chemically synthesized
gcatcaggagccggcagcct

SEQ ID NO: 24964 - DNA, 20 bp, Artificial Sequence
  chemically synthesized
aggagccggcagcctgggtg

SEQ ID NO: 24965 - DNA, 20 bp, Artificial Sequence
  chemically synthesized
ggagccggcagcctgggtgt

SEQ ID NO: 24966 - DNA, 20 bp, Artificial Sequence
  chemically synthesized
gagccggcagcctgggtgtg

SEQ ID NO: 24967 - DNA, 20 bp, Artificial Sequence
  chemically synthesized
gccggcagcctgggtgtggg

SEQ ID NO: 24968 - DNA, 20 bp, Artificial Sequence
  chemically synthesized
gcagcctgggtgtggggagc

SEQ ID NO: 24969 - DNA, 20 bp, Artificial Sequence
  chemically synthesized
agcctgggtgtggggagccg

SEQ ID NO: 24970 - DNA, 20 bp, Artificial Sequence
  chemically synthesized
gcctgggtgtggggagccgg

SEQ ID NO: 24971 - DNA, 20 bp, Artificial Sequence
  chemically synthesized
cctgggtgtggggagccgga

SEQ ID NO: 24972 - DNA, 20 bp, Artificial Sequence
  chemically synthesized
gtgtggggagccggagggta

SEQ ID NO: 24973 - DNA, 20 bp, Artificial Sequence
  chemically synthesized
ggggagccggagggtaaaga

SEQ ID NO: 24974 - DNA, 20 bp, Artificial Sequence
  chemically synthesized
gggagccggagggtaaagac

SEQ ID NO: 24975 - DNA, 20 bp, Artificial Sequence
  chemically synthesized
ggagccggagggtaaagaca

SEQ ID NO: 24976 - DNA, 20 bp, Artificial Sequence
  chemically synthesized
agggtaaagacagggcaccg

SEQ ID NO: 24977 - DNA, 20 bp, Artificial Sequence
  chemically synthesized
aagacagggcaccgaagcct

SEQ ID NO: 24978 - DNA, 20 bp, Artificial Sequence
  chemically synthesized
agacagggcaccgaagcctg

SEQ ID NO: 24979 - DNA, 20 bp, Artificial Sequence
  chemically synthesized
acagggcaccgaagcctgag

SEQ ID NO: 24980 - DNA, 20 bp, Artificial Sequence
  chemically synthesized
cagggcaccgaagcctgagg

SEQ ID NO: 24981 - DNA, 20 bp, Artificial Sequence
  chemically synthesized
aagcctgaggaggcataacc

SEQ ID NO: 24982 - DNA, 20 bp, Artificial Sequence
  chemically synthesized
agcctgaggaggcataacct

SEQ ID NO: 24983 - DNA, 20 bp, Artificial Sequence
  chemically synthesized
ctgaggaggcataacctggg

SEQ ID NO: 24984 - DNA, 20 bp, Artificial Sequence
  chemically synthesized
tgaggaggcataacctgggc

SEQ ID NO: 24985 - DNA, 20 bp, Artificial Sequence
  chemically synthesized
gaggaggcataacctgggcg

SEQ ID NO: 24986 - DNA, 20 bp, Artificial Sequence
  chemically synthesized
aggaggcataacctgggcgg

SEQ ID NO: 24987 - DNA, 20 bp, Artificial Sequence
  chemically synthesized
ggaggcataacctgggcggg

SEQ ID NO: 24988 - DNA, 20 bp, Artificial Sequence
  chemically synthesized
cataacctgggcggggggat

SEQ ID NO: 24989 - DNA, 20 bp, Artificial Sequence
  chemically synthesized
acctgggcggggggattggt

SEQ ID NO: 24990 - DNA, 20 bp, Artificial Sequence
  chemically synthesized
cctgggcggggggattggtt

SEQ ID NO: 24991 - DNA, 20 bp, Artificial Sequence
  chemically synthesized
ctgggcggggggattggttg

SEQ ID NO: 24992 - DNA, 20 bp, Artificial Sequence
  chemically synthesized
ggggggattggttggggcca

SEQ ID NO: 24993 - DNA, 20 bp, Artificial Sequence
  chemically synthesized
gggggattggttggggccat

SEQ ID NO: 24994 - DNA, 20 bp, Artificial Sequence
  chemically synthesized
ggggattggttggggccatg

SEQ ID NO: 24995 - DNA, 20 bp, Artificial Sequence
  chemically synthesized
gggattggttggggccatgg

SEQ ID NO: 24996 - DNA, 20 bp, Artificial Sequence
  chemically synthesized
ggattggttggggccatggg

SEQ ID NO: 24997 - DNA, 20 bp, Artificial Sequence
  chemically synthesized
gattggttggggccatgggg

SEQ ID NO: 24998 - DNA, 20 bp, Artificial Sequence
  chemically synthesized
attggttggggccatggggg

SEQ ID NO: 24999 - DNA, 20 bp, Artificial Sequence
  chemically synthesized
ttggttggggccatgggggg

SEQ ID NO: 25000 - DNA, 20 bp, Artificial Sequence
  chemically synthesized
gccatgggggggggtcatca

SEQ ID NO: 25001 - DNA, 20 bp, Artificial Sequence
  chemically synthesized
ccatgggggggggtcatcat

SEQ ID NO: 25002 - DNA, 20 bp, Artificial Sequence
  chemically synthesized
gtcatcataggctttgaccc

SEQ ID NO: 25003 - DNA, 20 bp, Artificial Sequence
  chemically synthesized
aggctttgaccccagcattt

SEQ ID NO: 25004 - DNA, 20 bp, Artificial Sequence
  chemically synthesized
catgtataaatatacacacg

SEQ ID NO: 25005 - DNA, 20 bp, Artificial Sequence
  chemically synthesized
atatacacacgcagctaatc

SEQ ID NO: 25006 - DNA, 20 bp, Artificial Sequence
  chemically synthesized
acacacccatgcacacgact

SEQ ID NO: 25007 - DNA, 20 bp, Artificial Sequence
  chemically synthesized
cacacccatgcacacgactc

SEQ ID NO: 25008 - DNA, 20 bp, Artificial Sequence
  chemically synthesized
acgactcaggatattcacat

SEQ ID NO: 25009 - DNA, 20 bp, Artificial Sequence
  chemically synthesized
attcacatcagctgtgtgca

SEQ ID NO: 25010 - DNA, 20 bp, Artificial Sequence
  chemically synthesized
catcagctgtgtgcaaagcc

SEQ ID NO: 25011 - DNA, 20 bp, Artificial Sequence
  chemically synthesized
tgtgtgcaaagcccggatcc

SEQ ID NO: 25012 - DNA, 20 bp, Artificial Sequence
  chemically synthesized
tgtgcaaagcccggatcctg

SEQ ID NO: 25013 - DNA, 20 bp, Artificial Sequence
  chemically synthesized
caaagcccggatcctggagc

SEQ ID NO: 25014 - DNA, 20 bp, Artificial Sequence
  chemically synthesized
aaagcccggatcctggagct

SEQ ID NO: 25015 - DNA, 20 bp, Artificial Sequence
  chemically synthesized
aagcccggatcctggagctg

SEQ ID NO: 25016 - DNA, 20 bp, Artificial Sequence
  chemically synthesized
agcccggatcctggagctgg

SEQ ID NO: 25017 - DNA, 20 bp, Artificial Sequence
  chemically synthesized
ggatcctggagctgggggac

SEQ ID NO: 25018 - DNA, 20 bp, Artificial Sequence
  chemically synthesized
gatcctggagctgggggact

SEQ ID NO: 25019 - DNA, 20 bp, Artificial Sequence
  chemically synthesized
tcctggagctgggggactgg

SEQ ID NO: 25020 - DNA, 20 bp, Artificial Sequence
  chemically synthesized
ctgggggactgggagacgca

SEQ ID NO: 25021 - DNA, 20 bp, Artificial Sequence
  chemically synthesized
tgggggactgggagacgcac

SEQ ID NO: 25022 - DNA, 20 bp, Artificial Sequence
  chemically synthesized
gggggactgggagacgcaca

SEQ ID NO: 25023 - DNA, 20 bp, Artificial Sequence
  chemically synthesized
ggggactgggagacgcacag

SEQ ID NO: 25024 - DNA, 20 bp, Artificial Sequence
  chemically synthesized
gggactgggagacgcacagg

SEQ ID NO: 25025 - DNA, 20 bp, Artificial Sequence
  chemically synthesized
actgggagacgcacaggggg

SEQ ID NO: 25026 - DNA, 20 bp, Artificial Sequence
  chemically synthesized
ctgggagacgcacagggggc

SEQ ID NO: 25027 - DNA, 20 bp, Artificial Sequence
  chemically synthesized
tgggagacgcacagggggcg

SEQ ID NO: 25028 - DNA, 20 bp, Artificial Sequence
  chemically synthesized
gggagacgcacagggggcgg

SEQ ID NO: 25029 - DNA, 20 bp, Artificial Sequence
  chemically synthesized
ggagacgcacagggggcggg

SEQ ID NO: 25030 - DNA, 20 bp, Artificial Sequence
  chemically synthesized
gagacgcacagggggcgggg

SEQ ID NO: 25031 - DNA, 20 bp, Artificial Sequence
  chemically synthesized
acgcacagggggcggggggg

SEQ ID NO: 25032 - DNA, 20 bp, Artificial Sequence
  chemically synthesized
agggggcgggggggcagacc

SEQ ID NO: 25033 - DNA, 20 bp, Artificial Sequence
  chemically synthesized
ggggcagacccggccctgcc

SEQ ID NO: 25034 - DNA, 20 bp, Artificial Sequence
  chemically synthesized
gggcagacccggccctgcct

SEQ ID NO: 25035 - DNA, 20 bp, Artificial Sequence
  chemically synthesized
cctgcctaggcacacatcct

SEQ ID NO: 25036 - DNA, 20 bp, Artificial Sequence
  chemically synthesized
gcctaggcacacatcctgag

SEQ ID NO: 25037 - DNA, 20 bp, Artificial Sequence
  chemically synthesized
cctaggcacacatcctgaga

SEQ ID NO: 25038 - DNA, 20 bp, Artificial Sequence
  chemically synthesized
ctaggcacacatcctgagaa

SEQ ID NO: 25039 - DNA, 20 bp, Artificial Sequence
  chemically synthesized
taggcacacatcctgagaag

SEQ ID NO: 25040 - DNA, 20 bp, Artificial Sequence
  chemically synthesized
aggcacacatcctgagaagg

SEQ ID NO: 25041 - DNA, 20 bp, Artificial Sequence
  chemically synthesized
tgagaagggggatctgtgaa

SEQ ID NO: 25042 - DNA, 20 bp, Artificial Sequence
  chemically synthesized
tgaatggttttcctcccatc

SEQ ID NO: 25043 - DNA, 20 bp, Artificial Sequence
  chemically synthesized
tggttttcctcccatccagc

SEQ ID NO: 25044 - DNA, 20 bp, Artificial Sequence
  chemically synthesized
ttttcctcccatccagccag

SEQ ID NO: 25045 - DNA, 20 bp, Artificial Sequence
  chemically synthesized
tcctcccatccagccagtgg

SEQ ID NO: 25046 - DNA, 20 bp, Artificial Sequence
  chemically synthesized
ctcccatccagccagtggca

SEQ ID NO: 25047 - DNA, 20 bp, Artificial Sequence
  chemically synthesized
tcccatccagccagtggcag

SEQ ID NO: 25048 - DNA, 20 bp, Artificial Sequence
  chemically synthesized
cagccagtggcagaggcctc

SEQ ID NO: 25049 - DNA, 20 bp, Artificial Sequence
  chemically synthesized
cagaggcctccagatcacct

SEQ ID NO: 25050 - DNA, 20 bp, Artificial Sequence
  chemically synthesized
agaggcctccagatcacctc

SEQ ID NO: 25051 - DNA, 20 bp, Artificial Sequence
  chemically synthesized
ctccagatcacctcgggcct

SEQ ID NO: 25052 - DNA, 20 bp, Artificial Sequence
  chemically synthesized
atcacctcgggccttagtct

SEQ ID NO: 25053 - DNA, 20 bp, Artificial Sequence
  chemically synthesized
gccttagtctcagctcttct

SEQ ID NO: 25054 - DNA, 20 bp, Artificial Sequence
  chemically synthesized
ccttagtctcagctcttcta

SEQ ID NO: 25055 - DNA, 20 bp, Artificial Sequence
  chemically synthesized
ttctaaggctcctgtcccct

SEQ ID NO: 25056 - DNA, 20 bp, Artificial Sequence
  chemically synthesized
aggctcctgtcccctcagat

SEQ ID NO: 25057 - DNA, 20 bp, Artificial Sequence
  chemically synthesized
gctcctgtcccctcagattg

SEQ ID NO: 25058 - DNA, 20 bp, Artificial Sequence
  chemically synthesized
tcccctcagattggagactc

SEQ ID NO: 25059 - DNA, 20 bp, Artificial Sequence
  chemically synthesized
cctcagattggagactccag

SEQ ID NO: 25060 - DNA, 20 bp, Artificial Sequence
  chemically synthesized
agattggagactccagaagc

SEQ ID NO: 25061 - DNA, 20 bp, Artificial Sequence
  chemically synthesized
gattggagactccagaagct

SEQ ID NO: 25062 - DNA, 20 bp, Artificial Sequence
  chemically synthesized
gttcttcctaaaatccatac

SEQ ID NO: 25063 - DNA, 20 bp, Artificial Sequence
  chemically synthesized
tcctaaaatccatactggaa

SEQ ID NO: 25064 - DNA, 20 bp, Artificial Sequence
  chemically synthesized
tcccctgccaaaattccatt

SEQ ID NO: 25065 - DNA, 20 bp, Artificial Sequence
  chemically synthesized
tccattgagatccttaaatc

SEQ ID NO: 25066 - DNA, 20 bp, Artificial Sequence
  chemically synthesized
ccattgagatccttaaatct

SEQ ID NO: 25067 - DNA, 20 bp, Artificial Sequence
  chemically synthesized
aaatctgggtcattccacca

SEQ ID NO: 25068 - DNA, 20 bp, Artificial Sequence
  chemically synthesized
tccaccatagcccactctcc

SEQ ID NO: 25069 - DNA, 20 bp, Artificial Sequence
  chemically synthesized
actctccaagcacaaccctc

SEQ ID NO: 25070 - DNA, 20 bp, Artificial Sequence
  chemically synthesized
ctctccaagcacaaccctcc

SEQ ID NO: 25071 - DNA, 20 bp, Artificial Sequence
  chemically synthesized
gtcctcatcccccaccacgc

SEQ ID NO: 25072 - DNA, 20 bp, Artificial Sequence
  chemically synthesized
tcctcatcccccaccacgca

SEQ ID NO: 25073 - DNA, 20 bp, Artificial Sequence
  chemically synthesized
accacgcaaggcctcctccc

SEQ ID NO: 25074 - DNA, 20 bp, Artificial Sequence
  chemically synthesized
gccctttgccctcgcttccc

SEQ ID NO: 25075 - DNA, 20 bp, Artificial Sequence
  chemically synthesized
cacactaaatttgctcccct

SEQ ID NO: 25076 - DNA, 20 bp, Artificial Sequence
  chemically synthesized
aaatttgctcccctcagccc

SEQ ID NO: 25077 - DNA, 20 bp, Artificial Sequence
  chemically synthesized
aatttgctcccctcagcccg

SEQ ID NO: 25078 - DNA, 20 bp, Artificial Sequence
  chemically synthesized
ctcagcccgaggtcatctca

SEQ ID NO: 25079 - DNA, 20 bp, Artificial Sequence
  chemically synthesized
tcagcccgaggtcatctcac

SEQ ID NO: 25080 - DNA, 20 bp, Artificial Sequence
  chemically synthesized
ttgatccatctgcaccctga

SEQ ID NO: 25081 - DNA, 20 bp, Artificial Sequence
  chemically synthesized
cacccacgtcttcctgcaca

SEQ ID NO: 25082 - DNA, 20 bp, Artificial Sequence
  chemically synthesized
cccacgtcttcctgcacaca

SEQ ID NO: 25083 - DNA, 20 bp, Artificial Sequence
  chemically synthesized
cgtcttcctgcacacagagc

SEQ ID NO: 25084 - DNA, 20 bp, Artificial Sequence
  chemically synthesized
gtcttcctgcacacagagct

SEQ ID NO: 25085 - DNA, 20 bp, Artificial Sequence
  chemically synthesized
ggctccctctctgctgcctc

SEQ ID NO: 25086 - DNA, 20 bp, Artificial Sequence
  chemically synthesized
ctctctgctgcctccagacc

SEQ ID NO: 25087 - DNA, 20 bp, Artificial Sequence
  chemically synthesized
ctctgctgcctccagaccca

SEQ ID NO: 25088 - DNA, 20 bp, Artificial Sequence
  chemically synthesized
tgctgcctccagacccagag

SEQ ID NO: 25089 - DNA, 20 bp, Artificial Sequence
  chemically synthesized
ctccagacccagagcagctc

SEQ ID NO: 25090 - DNA, 20 bp, Artificial Sequence
  chemically synthesized
cagagcagctccagttgtcc

SEQ ID NO: 25091 - DNA, 20 bp, Artificial Sequence
  chemically synthesized
gctccagttgtcccagccct

SEQ ID NO: 25092 - DNA, 20 bp, Artificial Sequence
  chemically synthesized
gccctgagctcctctctttg

SEQ ID NO: 25093 - DNA, 20 bp, Artificial Sequence
  chemically synthesized
ttgcagcatccacctgcaaa

SEQ ID NO: 25094 - DNA, 20 bp, Artificial Sequence
  chemically synthesized
cctgcaaacagaacaccttc

SEQ ID NO: 25095 - DNA, 20 bp, Artificial Sequence
  chemically synthesized
ctgcaaacagaacaccttct

SEQ ID NO: 25096 - DNA, 20 bp, Artificial Sequence
  chemically synthesized
acagaacaccttctaggcct

SEQ ID NO: 25097 - DNA, 20 bp, Artificial Sequence
  chemically synthesized
ggccttggaccctgactctg

SEQ ID NO: 25098 - DNA, 20 bp, Artificial Sequence
  chemically synthesized
attcctatcaccccccgacc

SEQ ID NO: 25099 - DNA, 20 bp, Artificial Sequence
  chemically synthesized
cctatcaccccccgacccag

SEQ ID NO: 25100 - DNA, 20 bp, Artificial Sequence
  chemically synthesized
ctatcaccccccgacccagc

SEQ ID NO: 25101 - DNA, 20 bp, Artificial Sequence
  chemically synthesized
gacccagcaggaccacatcc

SEQ ID NO: 25102 - DNA, 20 bp, Artificial Sequence
  chemically synthesized
acccagcaggaccacatcct

SEQ ID NO: 25103 - DNA, 20 bp, Artificial Sequence
  chemically synthesized
cccagcaggaccacatcctg

SEQ ID NO: 25104 - DNA, 20 bp, Artificial Sequence
  chemically synthesized
cagcaggaccacatcctggg

SEQ ID NO: 25105 - DNA, 20 bp, Artificial Sequence
  chemically synthesized
agcaggaccacatcctgggg

SEQ ID NO: 25106 - DNA, 20 bp, Artificial Sequence
  chemically synthesized
gaccacatcctggggaggct

SEQ ID NO: 25107 - DNA, 20 bp, Artificial Sequence
  chemically synthesized
acatcctggggaggctcagt

SEQ ID NO: 25108 - DNA, 20 bp, Artificial Sequence
  chemically synthesized
catcctggggaggctcagtc

SEQ ID NO: 25109 - DNA, 20 bp, Artificial Sequence
  chemically synthesized
atcctggggaggctcagtca

SEQ ID NO: 25110 - DNA, 20 bp, Artificial Sequence
  chemically synthesized
tcctggggaggctcagtcag

SEQ ID NO: 25111 - DNA, 20 bp, Artificial Sequence
  chemically synthesized
gggaggctcagtcaggggcc

SEQ ID NO: 25112 - DNA, 20 bp, Artificial Sequence
  chemically synthesized
gggcccagaatcttcctccc

SEQ ID NO: 25113 - DNA, 20 bp, Artificial Sequence
  chemically synthesized
ggcccagaatcttcctcccc

SEQ ID NO: 25114 - DNA, 20 bp, Artificial Sequence
  chemically synthesized
tcacttcctgccactgtcct

SEQ ID NO: 25115 - DNA, 20 bp, Artificial Sequence
  chemically synthesized
ttcctgccactgtcctgagt

SEQ ID NO: 25116 - DNA, 20 bp, Artificial Sequence
  chemically synthesized
gagtcagacactgcccctgt

SEQ ID NO: 25117 - DNA, 20 bp, Artificial Sequence
  chemically synthesized
actcttcatctttttcacac

SEQ ID NO: 25118 - DNA, 20 bp, Artificial Sequence
  chemically synthesized
gacttccaccttccccactg

SEQ ID NO: 25119 - DNA, 20 bp, Artificial Sequence
  chemically synthesized
ttccccactgcagccacact

SEQ ID NO: 25120 - DNA, 20 bp, Artificial Sequence
  chemically synthesized
tccccactgcagccacactc

SEQ ID NO: 25121 - DNA, 20 bp, Artificial Sequence
  chemically synthesized
actcaggaccccatttgacc

SEQ ID NO: 25122 - DNA, 20 bp, Artificial Sequence
  chemically synthesized
ctcaggaccccatttgaccc

SEQ ID NO: 25123 - DNA, 20 bp, Artificial Sequence
  chemically synthesized
tcaggaccccatttgaccca

SEQ ID NO: 25124 - DNA, 20 bp, Artificial Sequence
  chemically synthesized
aggaccccatttgacccagg

SEQ ID NO: 25125 - DNA, 20 bp, Artificial Sequence
  chemically synthesized
ggaccccatttgacccaggg

SEQ ID NO: 25126 - DNA, 20 bp, Artificial Sequence
  chemically synthesized
ccactgcccactcccgctct

SEQ ID NO: 25127 - DNA, 20 bp, Artificial Sequence
  chemically synthesized
gcccactcccgctctgagca

SEQ ID NO: 25128 - DNA, 20 bp, Artificial Sequence
  chemically synthesized
ctgcccccaccccttcctcc

SEQ ID NO: 25129 - DNA, 20 bp, Artificial Sequence
  chemically synthesized
tgcccccaccccttcctcca

SEQ ID NO: 25130 - DNA, 20 bp, Artificial Sequence
  chemically synthesized
cctttgcattcctctccatc

SEQ ID NO: 25131 - DNA, 20 bp, Artificial Sequence
  chemically synthesized
ttgcattcctctccatccag

SEQ ID NO: 25132 - DNA, 20 bp, Artificial Sequence
  chemically synthesized
ccagaagcgctccatgacca

SEQ ID NO: 25133 - DNA, 20 bp, Artificial Sequence
  chemically synthesized
tgaccacggtgttccccacc

SEQ ID NO: 25134 - DNA, 20 bp, Artificial Sequence
  chemically synthesized
cacggtgttccccaccaagc

SEQ ID NO: 25135 - DNA, 20 bp, Artificial Sequence
  chemically synthesized
cccaccaagctggccctcca

SEQ ID NO: 25136 - DNA, 20 bp, Artificial Sequence
  chemically synthesized
caagctggccctccatggct

SEQ ID NO: 25137 - DNA, 20 bp, Artificial Sequence
  chemically synthesized
gagtccctgactgctgtctt

SEQ ID NO: 25138 - DNA, 20 bp, Artificial Sequence
  chemically synthesized
tgtcttcagcaccctccact

SEQ ID NO: 25139 - DNA, 20 bp, Artificial Sequence
  chemically synthesized
tcttcagcaccctccactca

SEQ ID NO: 25140 - DNA, 20 bp, Artificial Sequence
  chemically synthesized
cttcagcaccctccactcag

SEQ ID NO: 25141 - DNA, 20 bp, Artificial Sequence
  chemically synthesized
ttcagcaccctccactcaga

SEQ ID NO: 25142 - DNA, 20 bp, Artificial Sequence
  chemically synthesized
gagggtcctgtcctgcttcc

SEQ ID NO: 25143 - DNA, 20 bp, Artificial Sequence
  chemically synthesized
gacttatcaactcccaatgc

SEQ ID NO: 25144 - DNA, 20 bp, Artificial Sequence
  chemically synthesized
acttatcaactcccaatgct

SEQ ID NO: 25145 - DNA, 20 bp, Artificial Sequence
  chemically synthesized
atcaactcccaatgctgggt

SEQ ID NO: 25146 - DNA, 20 bp, Artificial Sequence
  chemically synthesized
ctcccaatgctgggtcagcc

SEQ ID NO: 25147 - DNA, 20 bp, Artificial Sequence
  chemically synthesized
ctgtatatccaccctgaaac

SEQ ID NO: 25148 - DNA, 20 bp, Artificial Sequence
  chemically synthesized
ccctgaaaccagactgccca

SEQ ID NO: 25149 - DNA, 20 bp, Artificial Sequence
  chemically synthesized
cctgaaaccagactgcccac

SEQ ID NO: 25150 - DNA, 20 bp, Artificial Sequence
  chemically synthesized
ctgaaaccagactgcccaca

SEQ ID NO: 25151 - DNA, 20 bp, Artificial Sequence
  chemically synthesized
aaaccagactgcccacaggg

SEQ ID NO: 25152 - DNA, 20 bp, Artificial Sequence
  chemically synthesized
agactgcccacagggtagcc

SEQ ID NO: 25153 - DNA, 20 bp, Artificial Sequence
  chemically synthesized
gggtagcccagctgtgcctc

SEQ ID NO: 25154 - DNA, 20 bp, Artificial Sequence
  chemically synthesized
ggtagcccagctgtgcctcc

SEQ ID NO: 25155 - DNA, 20 bp, Artificial Sequence
  chemically synthesized
agcccagctgtgcctccagg

SEQ ID NO: 25156 - DNA, 20 bp, Artificial Sequence
  chemically synthesized
ctgtgcctccaggtagctct

SEQ ID NO: 25157 - DNA, 20 bp, Artificial Sequence
  chemically synthesized
gtagctctgagatcatgcac

SEQ ID NO: 25158 - DNA, 20 bp, Artificial Sequence
  chemically synthesized
ccattttctcgtgtgtaaaa

SEQ ID NO: 25159 - DNA, 20 bp, Artificial Sequence
  chemically synthesized
attttctcgtgtgtaaaatg

SEQ ID NO: 25160 - DNA, 20 bp, Artificial Sequence
  chemically synthesized
cgtgtgtaaaatggagatca

SEQ ID NO: 25161 - DNA, 20 bp, Artificial Sequence
  chemically synthesized
taaaatggagatcacagtcg

SEQ ID NO: 25162 - DNA, 20 bp, Artificial Sequence
  chemically synthesized
cacagtcgtagctacccgat

SEQ ID NO: 25163 - DNA, 20 bp, Artificial Sequence
  chemically synthesized
agctacccgattggattgct

SEQ ID NO: 25164 - DNA, 20 bp, Artificial Sequence
  chemically synthesized
gattggattgctcggataat

SEQ ID NO: 25165 - DNA, 20 bp, Artificial Sequence
  chemically synthesized
gattgctcggataattagat

SEQ ID NO: 25166 - DNA, 20 bp, Artificial Sequence
  chemically synthesized
aaaatatgtaatgtgcttct

SEQ ID NO: 25167 - DNA, 20 bp, Artificial Sequence
  chemically synthesized
aaatatgtaatgtgcttctt

SEQ ID NO: 25168 - DNA, 20 bp, Artificial Sequence
  chemically synthesized
gtaatgtgcttcttaggcaa

SEQ ID NO: 25169 - DNA, 20 bp, Artificial Sequence
  chemically synthesized
aggcaaaagtttgaacataa

SEQ ID NO: 25170 - DNA, 20 bp, Artificial Sequence
  chemically synthesized
aaaagtttgaacataaaaga

SEQ ID NO: 25171 - DNA, 20 bp, Artificial Sequence
  chemically synthesized
aaagtttgaacataaaagac

SEQ ID NO: 25172 - DNA, 20 bp, Artificial Sequence
  chemically synthesized
aagtttgaacataaaagaca

SEQ ID NO: 25173 - DNA, 20 bp, Artificial Sequence
  chemically synthesized
ataaaagacagggtctgccc

SEQ ID NO: 25174 - DNA, 20 bp, Artificial Sequence
  chemically synthesized
aagacagggtctgcccaaga

SEQ ID NO: 25175 - DNA, 20 bp, Artificial Sequence
  chemically synthesized
agacagggtctgcccaagat

SEQ ID NO: 25176 - DNA, 20 bp, Artificial Sequence
  chemically synthesized
cagggtctgcccaagatggg

SEQ ID NO: 25177 - DNA, 20 bp, Artificial Sequence
  chemically synthesized
gggtctgcccaagatgggaa

SEQ ID NO: 25178 - DNA, 20 bp, Artificial Sequence
  chemically synthesized
gggaagagttcttctctccc

SEQ ID NO: 25179 - DNA, 20 bp, Artificial Sequence
  chemically synthesized
agaaacaatcaaaacaaaaa

SEQ ID NO: 25180 - DNA, 20 bp, Artificial Sequence
  chemically synthesized
aaaacaaaaacagacaacta

SEQ ID NO: 25181 - DNA, 20 bp, Artificial Sequence
  chemically synthesized
aaacagacaactatagaaca

SEQ ID NO: 25182 - DNA, 20 bp, Artificial Sequence
  chemically synthesized
cagacaactatagaacatgg

SEQ ID NO: 25183 - DNA, 20 bp, Artificial Sequence
  chemically synthesized
tatagaacatggcagctttc

SEQ ID NO: 25184 - DNA, 20 bp, Artificial Sequence
  chemically synthesized
catggcagctttcaagactc

SEQ ID NO: 25185 - DNA, 20 bp, Artificial Sequence
  chemically synthesized
gctttcaagactctggacat

SEQ ID NO: 25186 - DNA, 20 bp, Artificial Sequence
  chemically synthesized
ctttcaagactctggacatc

SEQ ID NO: 25187 - DNA, 20 bp, Artificial Sequence
  chemically synthesized
caagactctggacatcaggc

SEQ ID NO: 25188 - DNA, 20 bp, Artificial Sequence
  chemically synthesized
aagactctggacatcaggca

SEQ ID NO: 25189 - DNA, 20 bp, Artificial Sequence
  chemically synthesized
gactctggacatcaggcaag

SEQ ID NO: 25190 - DNA, 20 bp, Artificial Sequence
  chemically synthesized
actctggacatcaggcaagg

SEQ ID NO: 25191 - DNA, 20 bp, Artificial Sequence
  chemically synthesized
tctggacatcaggcaaggag

SEQ ID NO: 25192 - DNA, 20 bp, Artificial Sequence
  chemically synthesized
acatcaggcaaggaggagta

SEQ ID NO: 25193 - DNA, 20 bp, Artificial Sequence
  chemically synthesized
aaggaggagtaaagatccct

SEQ ID NO: 25194 - DNA, 20 bp, Artificial Sequence
  chemically synthesized
aggaggagtaaagatccctg

SEQ ID NO: 25195 - DNA, 20 bp, Artificial Sequence
  chemically synthesized
ggaggagtaaagatccctga

SEQ ID NO: 25196 - DNA, 20 bp, Artificial Sequence
  chemically synthesized
agtaaagatccctgagggat

SEQ ID NO: 25197 - DNA, 20 bp, Artificial Sequence
  chemically synthesized
aaagatccctgagggataag

SEQ ID NO: 25198 - DNA, 20 bp, Artificial Sequence
  chemically synthesized
gagggataagaagcaaacaa

SEQ ID NO: 25199 - DNA, 20 bp, Artificial Sequence
  chemically synthesized
agggataagaagcaaacaac

SEQ ID NO: 25200 - DNA, 20 bp, Artificial Sequence
  chemically synthesized
caggaaccctccgatcaccc

SEQ ID NO: 25201 - DNA, 20 bp, Artificial Sequence
  chemically synthesized
gatcaccccagcttactgtt

SEQ ID NO: 25202 - DNA, 20 bp, Artificial Sequence
  chemically synthesized
tcaccccagcttactgtttg

SEQ ID NO: 25203 - DNA, 20 bp, Artificial Sequence
  chemically synthesized
accccagcttactgtttgga

SEQ ID NO: 25204 - DNA, 20 bp, Artificial Sequence
  chemically synthesized
cccagcttactgtttggaga

SEQ ID NO: 25205 - DNA, 20 bp, Artificial Sequence
  chemically synthesized
tactgtttggagagagtctg

SEQ ID NO: 25206 - DNA, 20 bp, Artificial Sequence
  chemically synthesized
actgtttggagagagtctgc

SEQ ID NO: 25207 - DNA, 20 bp, Artificial Sequence
  chemically synthesized
tggagagagtctgcaggtta

SEQ ID NO: 25208 - DNA, 20 bp, Artificial Sequence
  chemically synthesized
ggagagagtctgcaggttac

SEQ ID NO: 25209 - DNA, 20 bp, Artificial Sequence
  chemically synthesized
agagtctgcaggttacaggc

SEQ ID NO: 25210 - DNA, 20 bp, Artificial Sequence
  chemically synthesized
gagtctgcaggttacaggcc

SEQ ID NO: 25211 - DNA, 20 bp, Artificial Sequence
  chemically synthesized
ctgcaggttacaggccagga

SEQ ID NO: 25212 - DNA, 20 bp, Artificial Sequence
  chemically synthesized
tgcaggttacaggccaggaa

SEQ ID NO: 25213 - DNA, 20 bp, Artificial Sequence
  chemically synthesized
gcaggttacaggccaggaaa

SEQ ID NO: 25214 - DNA, 20 bp, Artificial Sequence
  chemically synthesized
ggttacaggccaggaaaggg

SEQ ID NO: 25215 - DNA, 20 bp, Artificial Sequence
  chemically synthesized
caggccaggaaagggaagtc

SEQ ID NO: 25216 - DNA, 20 bp, Artificial Sequence
  chemically synthesized
aggccaggaaagggaagtcc

SEQ ID NO: 25217 - DNA, 20 bp, Artificial Sequence
  chemically synthesized
ccaggaaagggaagtccagg

SEQ ID NO: 25218 - DNA, 20 bp, Artificial Sequence
  chemically synthesized
aggaaagggaagtccaggca

SEQ ID NO: 25219 - DNA, 20 bp, Artificial Sequence
  chemically synthesized
gggaagtccaggcagagccc

SEQ ID NO: 25220 - DNA, 20 bp, Artificial Sequence
  chemically synthesized
gaagtccaggcagagcccaa

SEQ ID NO: 25221 - DNA, 20 bp, Artificial Sequence
  chemically synthesized
cccaagagactccccacgtt

SEQ ID NO: 25222 - DNA, 20 bp, Artificial Sequence
  chemically synthesized
ccaagagactccccacgttg

SEQ ID NO: 25223 - DNA, 20 bp, Artificial Sequence
  chemically synthesized
aagagactccccacgttgag

SEQ ID NO: 25224 - DNA, 20 bp, Artificial Sequence
  chemically synthesized
gactccccacgttgaggaga

SEQ ID NO: 25225 - DNA, 20 bp, Artificial Sequence
  chemically synthesized
ctccccacgttgaggagatg

SEQ ID NO: 25226 - DNA, 20 bp, Artificial Sequence
  chemically synthesized
cacgttgaggagatggagct

SEQ ID NO: 25227 - DNA, 20 bp, Artificial Sequence
  chemically synthesized
cgttgaggagatggagctga

SEQ ID NO: 25228 - DNA, 20 bp, Artificial Sequence
  chemically synthesized
ggagatggagctgagagtcc

SEQ ID NO: 25229 - DNA, 20 bp, Artificial Sequence
  chemically synthesized
gagatggagctgagagtccg

SEQ ID NO: 25230 - DNA, 20 bp, Artificial Sequence
  chemically synthesized
gatggagctgagagtccgag

SEQ ID NO: 25231 - DNA, 20 bp, Artificial Sequence
  chemically synthesized
ccgaggagaccaaaacaatt

SEQ ID NO: 25232 - DNA, 20 bp, Artificial Sequence
  chemically synthesized
gaggagaccaaaacaattaa

SEQ ID NO: 25233 - DNA, 20 bp, Artificial Sequence
  chemically synthesized
caaacgatcaaactgactct

SEQ ID NO: 25234 - DNA, 20 bp, Artificial Sequence
  chemically synthesized
taagttgcttaactgcatcc

SEQ ID NO: 25235 - DNA, 20 bp, Artificial Sequence
  chemically synthesized
agttgcttaactgcatcccg

SEQ ID NO: 25236 - DNA, 20 bp, Artificial Sequence
  chemically synthesized
cttaactgcatcccggagca

SEQ ID NO: 25237 - DNA, 20 bp, Artificial Sequence
  chemically synthesized
tgcatcccggagcaaagctc

SEQ ID NO: 25238 - DNA, 20 bp, Artificial Sequence
  chemically synthesized
gagcaaagctcaagaacatt

SEQ ID NO: 25239 - DNA, 20 bp, Artificial Sequence
  chemically synthesized
gcaaagctcaagaacattta

SEQ ID NO: 25240 - DNA, 20 bp, Artificial Sequence
  chemically synthesized
caaagctcaagaacatttag

SEQ ID NO: 25241 - DNA, 20 bp, Artificial Sequence
  chemically synthesized
tagaggaatacaaaaatatc

SEQ ID NO: 25242 - DNA, 20 bp, Artificial Sequence
  chemically synthesized
aaaaatatccagcacccaac

SEQ ID NO: 25243 - DNA, 20 bp, Artificial Sequence
  chemically synthesized
aaaatatccagcacccaaca

SEQ ID NO: 25244 - DNA, 20 bp, Artificial Sequence
  chemically synthesized
aaggtgaaattgacaatgtc

SEQ ID NO: 25245 - DNA, 20 bp, Artificial Sequence
  chemically synthesized
gtgaaattgacaatgtctgg

SEQ ID NO: 25246 - DNA, 20 bp, Artificial Sequence
  chemically synthesized
caatgtctggcagccaatca

SEQ ID NO: 25247 - DNA, 20 bp, Artificial Sequence
  chemically synthesized
ggcagccaatcaaagattac

SEQ ID NO: 25248 - DNA, 20 bp, Artificial Sequence
  chemically synthesized
gcagccaatcaaagattaca

SEQ ID NO: 25249 - DNA, 20 bp, Artificial Sequence
  chemically synthesized
ttacaaggcatgcaatgaaa

SEQ ID NO: 25250 - DNA, 20 bp, Artificial Sequence
  chemically synthesized
tacaaggcatgcaatgaaac

SEQ ID NO: 25251 - DNA, 20 bp, Artificial Sequence
  chemically synthesized
gggaaaacacaatgcataac

SEQ ID NO: 25252 - DNA, 20 bp, Artificial Sequence
  chemically synthesized
ggaaaacacaatgcataacg

SEQ ID NO: 25253 - DNA, 20 bp, Artificial Sequence
  chemically synthesized
aaaacacaatgcataacgag

SEQ ID NO: 25254 - DNA, 20 bp, Artificial Sequence
  chemically synthesized
aaacacaatgcataacgagg

SEQ ID NO: 25255 - DNA, 20 bp, Artificial Sequence
  chemically synthesized
aggaggttcataaatatcaa

SEQ ID NO: 25256 - DNA, 20 bp, Artificial Sequence
  chemically synthesized
gaggttcataaatatcaaaa

SEQ ID NO: 25257 - DNA, 20 bp, Artificial Sequence
  chemically synthesized
cataaatatcaaaagagatc

SEQ ID NO: 25258 - DNA, 20 bp, Artificial Sequence
  chemically synthesized
aaagagatccagaactgaca

SEQ ID NO: 25259 - DNA, 20 bp, Artificial Sequence
  chemically synthesized
tccagaactgacacggatgc

SEQ ID NO: 25260 - DNA, 20 bp, Artificial Sequence
  chemically synthesized
actgacacggatgctagaat

SEQ ID NO: 25261 - DNA, 20 bp, Artificial Sequence
  chemically synthesized
gacacggatgctagaattag

SEQ ID NO: 25262 - DNA, 20 bp, Artificial Sequence
  chemically synthesized
acacggatgctagaattagc

SEQ ID NO: 25263 - DNA, 20 bp, Artificial Sequence
  chemically synthesized
ggatgctagaattagcaggc

SEQ ID NO: 25264 - DNA, 20 bp, Artificial Sequence
  chemically synthesized
gatgctagaattagcaggca

SEQ ID NO: 25265 - DNA, 20 bp, Artificial Sequence
  chemically synthesized
ctagaattagcaggcaagga

SEQ ID NO: 25266 - DNA, 20 bp, Artificial Sequence
  chemically synthesized
agcaggcaaggatggtaaaa

SEQ ID NO: 25267 - DNA, 20 bp, Artificial Sequence
  chemically synthesized
ggatggtaaaacagatatta

SEQ ID NO: 25268 - DNA, 20 bp, Artificial Sequence
  chemically synthesized
cccattatgttcaaaaaatt

SEQ ID NO: 25269 - DNA, 20 bp, Artificial Sequence
  chemically synthesized
attatgttcaaaaaattaag

SEQ ID NO: 25270 - DNA, 20 bp, Artificial Sequence
  chemically synthesized
caaaaaattaagtagaattg

SEQ ID NO: 25271 - DNA, 20 bp, Artificial Sequence
  chemically synthesized
aaaaattaagtagaattgtg

SEQ ID NO: 25272 - DNA, 20 bp, Artificial Sequence
  chemically synthesized
aaaattaagtagaattgtgg

SEQ ID NO: 25273 - DNA, 20 bp, Artificial Sequence
  chemically synthesized
tagaattgtggaggatattt

SEQ ID NO: 25274 - DNA, 20 bp, Artificial Sequence
  chemically synthesized
gaattgtggaggatatttaa

SEQ ID NO: 25275 - DNA, 20 bp, Artificial Sequence
  chemically synthesized
ggaggatatttaagagtccc

SEQ ID NO: 25276 - DNA, 20 bp, Artificial Sequence
  chemically synthesized
gaggatatttaagagtcccc

SEQ ID NO: 25277 - DNA, 20 bp, Artificial Sequence
  chemically synthesized
agagtccccaggtgaacttc

SEQ ID NO: 25278 - DNA, 20 bp, Artificial Sequence
  chemically synthesized
agtccccaggtgaacttcta

SEQ ID NO: 25279 - DNA, 20 bp, Artificial Sequence
  chemically synthesized
tctgaaatgaaaaaacacac

SEQ ID NO: 25280 - DNA, 20 bp, Artificial Sequence
  chemically synthesized
aaatgaaaaaacacactggc

SEQ ID NO: 25281 - DNA, 20 bp, Artificial Sequence
  chemically synthesized
aatgaaaaaacacactggcc

SEQ ID NO: 25282 - DNA, 20 bp, Artificial Sequence
  chemically synthesized
aacacactggccaggcgccg

SEQ ID NO: 25283 - DNA, 20 bp, Artificial Sequence
  chemically synthesized
caggcgccgtggctcacgcc

SEQ ID NO: 25284 - DNA, 20 bp, Artificial Sequence
  chemically synthesized
gtggctcacgcctggaatcc

SEQ ID NO: 25285 - DNA, 20 bp, Artificial Sequence
  chemically synthesized
cgcctggaatcccagcactg

SEQ ID NO: 25286 - DNA, 20 bp, Artificial Sequence
  chemically synthesized
gcctggaatcccagcactgt

SEQ ID NO: 25287 - DNA, 20 bp, Artificial Sequence
  chemically synthesized
ctggaatcccagcactgtgg

SEQ ID NO: 25288 - DNA, 20 bp, Artificial Sequence
  chemically synthesized
tggaatcccagcactgtggg

SEQ ID NO: 25289 - DNA, 20 bp, Artificial Sequence
  chemically synthesized
tcccagcactgtgggaggcc

SEQ ID NO: 25290 - DNA, 20 bp, Artificial Sequence
  chemically synthesized
cccagcactgtgggaggcca

SEQ ID NO: 25291 - DNA, 20 bp, Artificial Sequence
  chemically synthesized
agcactgtgggaggccaagg

SEQ ID NO: 25292 - DNA, 20 bp, Artificial Sequence
  chemically synthesized
gcactgtgggaggccaaggc

SEQ ID NO: 25293 - DNA, 20 bp, Artificial Sequence
  chemically synthesized
ctgtgggaggccaaggcggg

SEQ ID NO: 25294 - DNA, 20 bp, Artificial Sequence
  chemically synthesized
ggccaaggcgggcagatcat

SEQ ID NO: 25295 - DNA, 20 bp, Artificial Sequence
  chemically synthesized
gccaaggcgggcagatcatg

SEQ ID NO: 25296 - DNA, 20 bp, Artificial Sequence
  chemically synthesized
aggcgggcagatcatgaggt

SEQ ID NO: 25297 - DNA, 20 bp, Artificial Sequence
  chemically synthesized
ggcgggcagatcatgaggtc

SEQ ID NO: 25298 - DNA, 20 bp, Artificial Sequence
  chemically synthesized
cgggcagatcatgaggtcag

SEQ ID NO: 25299 - DNA, 20 bp, Artificial Sequence
  chemically synthesized
tcaggagatcgacaccatcc

SEQ ID NO: 25300 - DNA, 20 bp, Artificial Sequence
  chemically synthesized
cgacaccatcctggctaaca

SEQ ID NO: 25301 - DNA, 20 bp, Artificial Sequence
  chemically synthesized
ctactaaaaatacaaaaaat

SEQ ID NO: 25302 - DNA, 20 bp, Artificial Sequence
  chemically synthesized
taaaaatacaaaaaattagc

SEQ ID NO: 25303 - DNA, 20 bp, Artificial Sequence
  chemically synthesized
tacaaaaaattagccagacg

SEQ ID NO: 25304 - DNA, 20 bp, Artificial Sequence
  chemically synthesized
aaaaaattagccagacgtgg

SEQ ID NO: 25305 - DNA, 20 bp, Artificial Sequence
  chemically synthesized
aaattagccagacgtggtgg

SEQ ID NO: 25306 - DNA, 20 bp, Artificial Sequence
  chemically synthesized
aattagccagacgtggtggc

SEQ ID NO: 25307 - DNA, 20 bp, Artificial Sequence
  chemically synthesized
gacgtggtggcaggcgcctg

SEQ ID NO: 25308 - DNA, 20 bp, Artificial Sequence
  chemically synthesized
gtggcaggcgcctgtagtcc

SEQ ID NO: 25309 - DNA, 20 bp, Artificial Sequence
  chemically synthesized
cgcctgtagtcccagctact

SEQ ID NO: 25310 - DNA, 20 bp, Artificial Sequence
  chemically synthesized
gcctgtagtcccagctactc

SEQ ID NO: 25311 - DNA, 20 bp, Artificial Sequence
  chemically synthesized
ctgtagtcccagctactcgg

SEQ ID NO: 25312 - DNA, 20 bp, Artificial Sequence
  chemically synthesized
tgtagtcccagctactcggg

SEQ ID NO: 25313 - DNA, 20 bp, Artificial Sequence
  chemically synthesized
tcccagctactcgggaggct

SEQ ID NO: 25314 - DNA, 20 bp, Artificial Sequence
  chemically synthesized
cccagctactcgggaggctg

SEQ ID NO: 25315 - DNA, 20 bp, Artificial Sequence
  chemically synthesized
agctactcgggaggctgagg

SEQ ID NO: 25316 - DNA, 20 bp, Artificial Sequence
  chemically synthesized
gctactcgggaggctgaggc

SEQ ID NO: 25317 - DNA, 20 bp, Artificial Sequence
  chemically synthesized
tactcgggaggctgaggcag

SEQ ID NO: 25318 - DNA, 20 bp, Artificial Sequence
  chemically synthesized
gggaggctgaggcaggagaa

SEQ ID NO: 25319 - DNA, 20 bp, Artificial Sequence
  chemically synthesized
gcaggagaatggcatgaacc

SEQ ID NO: 25320 - DNA, 20 bp, Artificial Sequence
  chemically synthesized
caggagaatggcatgaaccc

SEQ ID NO: 25321 - DNA, 20 bp, Artificial Sequence
  chemically synthesized
ggagaatggcatgaacccgg

SEQ ID NO: 25322 - DNA, 20 bp, Artificial Sequence
  chemically synthesized
gagaatggcatgaacccggg

SEQ ID NO: 25323 - DNA, 20 bp, Artificial Sequence
  chemically synthesized
aatggcatgaacccgggagg

SEQ ID NO: 25324 - DNA, 20 bp, Artificial Sequence
  chemically synthesized
tggcatgaacccgggaggca

SEQ ID NO: 25325 - DNA, 20 bp, Artificial Sequence
  chemically synthesized
aacccgggaggcagagcttg

SEQ ID NO: 25326 - DNA, 20 bp, Artificial Sequence
  chemically synthesized
cgggaggcagagcttgcagt

SEQ ID NO: 25327 - DNA, 20 bp, Artificial Sequence
  chemically synthesized
ggcagagcttgcagtgagcc

SEQ ID NO: 25328 - DNA, 20 bp, Artificial Sequence
  chemically synthesized
aagatcgcgccactgcactc

SEQ ID NO: 25329 - DNA, 20 bp, Artificial Sequence
  chemically synthesized
cgcgccactgcactccggcc

SEQ ID NO: 25330 - DNA, 20 bp, Artificial Sequence
  chemically synthesized
gcgccactgcactccggcct

SEQ ID NO: 25331 - DNA, 20 bp, Artificial Sequence
  chemically synthesized
ctgcactccggcctgggcaa

SEQ ID NO: 25332 - DNA, 20 bp, Artificial Sequence
  chemically synthesized
gcactccggcctgggcaaca

SEQ ID NO: 25333 - DNA, 20 bp, Artificial Sequence
  chemically synthesized
tccggcctgggcaacagagc

SEQ ID NO: 25334 - DNA, 20 bp, Artificial Sequence
  chemically synthesized
ccgcctccaaaaaaaaaaaa

SEQ ID NO: 25335 - DNA, 20 bp, Artificial Sequence
  chemically synthesized
tccaaaaaaaaaaaaaagaa

SEQ ID NO: 25336 - DNA, 20 bp, Artificial Sequence
  chemically synthesized
aaaaaaaaaaaaagaaaaga

SEQ ID NO: 25337 - DNA, 20 bp, Artificial Sequence
  chemically synthesized
aaaaaaaagaaaagaaagaa

SEQ ID NO: 25338 - DNA, 20 bp, Artificial Sequence
  chemically synthesized
aaagaaaagaaaaaacacac

SEQ ID NO: 25339 - DNA, 20 bp, Artificial Sequence
  chemically synthesized
aaaagaaaaaacacactgga

SEQ ID NO: 25340 - DNA, 20 bp, Artificial Sequence
  chemically synthesized
aacacactggatggaaataa

SEQ ID NO: 25341 - DNA, 20 bp, Artificial Sequence
  chemically synthesized
acactggatggaaataatgg

SEQ ID NO: 25342 - DNA, 20 bp, Artificial Sequence
  chemically synthesized
ggatggaaataatggaagat

SEQ ID NO: 25343 - DNA, 20 bp, Artificial Sequence
  chemically synthesized
atggaagatgagaaatgcgt

SEQ ID NO: 25344 - DNA, 20 bp, Artificial Sequence
  chemically synthesized
agaaatgcgtaagaaaaatt

SEQ ID NO: 25345 - DNA, 20 bp, Artificial Sequence
  chemically synthesized
gaaatgcgtaagaaaaattt

SEQ ID NO: 25346 - DNA, 20 bp, Artificial Sequence
  chemically synthesized
aaatgcgtaagaaaaattta

SEQ ID NO: 25347 - DNA, 20 bp, Artificial Sequence
  chemically synthesized
gcgtaagaaaaatttagggc

SEQ ID NO: 25348 - DNA, 20 bp, Artificial Sequence
  chemically synthesized
cgtaagaaaaatttagggcc

SEQ ID NO: 25349 - DNA, 20 bp, Artificial Sequence
  chemically synthesized
aaatttagggccaggcactg

SEQ ID NO: 25350 - DNA, 20 bp, Artificial Sequence
  chemically synthesized
gtggatcacatctgtaatcc

SEQ ID NO: 25351 - DNA, 20 bp, Artificial Sequence
  chemically synthesized
catctgtaatcccagcactt

SEQ ID NO: 25352 - DNA, 20 bp, Artificial Sequence
  chemically synthesized
atctgtaatcccagcacttt

SEQ ID NO: 25353 - DNA, 20 bp, Artificial Sequence
  chemically synthesized
ctgtaatcccagcactttgg

SEQ ID NO: 25354 - DNA, 20 bp, Artificial Sequence
  chemically synthesized
tgtaatcccagcactttggg

SEQ ID NO: 25355 - DNA, 20 bp, Artificial Sequence
  chemically synthesized
agcactttgggaggtcgaca

SEQ ID NO: 25356 - DNA, 20 bp, Artificial Sequence
  chemically synthesized
gcactttgggaggtcgacac

SEQ ID NO: 25357 - DNA, 20 bp, Artificial Sequence
  chemically synthesized
cactttgggaggtcgacacg

SEQ ID NO: 25358 - DNA, 20 bp, Artificial Sequence
  chemically synthesized
actttgggaggtcgacacgg

SEQ ID NO: 25359 - DNA, 20 bp, Artificial Sequence
  chemically synthesized
ctttgggaggtcgacacggg

SEQ ID NO: 25360 - DNA, 20 bp, Artificial Sequence
  chemically synthesized
cgacacggggggaatcactt

SEQ ID NO: 25361 - DNA, 20 bp, Artificial Sequence
  chemically synthesized
cggggggaatcacttgagcc

SEQ ID NO: 25362 - DNA, 20 bp, Artificial Sequence
  chemically synthesized
ggggggaatcacttgagccc

SEQ ID NO: 25363 - DNA, 20 bp, Artificial Sequence
  chemically synthesized
ggggaatcacttgagcccag

SEQ ID NO: 25364 - DNA, 20 bp, Artificial Sequence
  chemically synthesized
tcacttgagcccaggagctc

SEQ ID NO: 25365 - DNA, 20 bp, Artificial Sequence
  chemically synthesized
tgagcccaggagctcaagac

SEQ ID NO: 25366 - DNA, 20 bp, Artificial Sequence
  chemically synthesized
ccaggagctcaagactagtc

SEQ ID NO: 25367 - DNA, 20 bp, Artificial Sequence
  chemically synthesized
caggagctcaagactagtct

SEQ ID NO: 25368 - DNA, 20 bp, Artificial Sequence
  chemically synthesized
gagctcaagactagtctggg

SEQ ID NO: 25369 - DNA, 20 bp, Artificial Sequence
  chemically synthesized
caagactagtctgggcagca

SEQ ID NO: 25370 - DNA, 20 bp, Artificial Sequence
  chemically synthesized
catggcaaaacccctctaca

SEQ ID NO: 25371 - DNA, 20 bp, Artificial Sequence
  chemically synthesized
tacaaaaaaaaatttttaat

SEQ ID NO: 25372 - DNA, 20 bp, Artificial Sequence
  chemically synthesized
aaaaaaaatttttaattagc

SEQ ID NO: 25373 - DNA, 20 bp, Artificial Sequence
  chemically synthesized
aaaaaaatttttaattagcc

SEQ ID NO: 25374 - DNA, 20 bp, Artificial Sequence
  chemically synthesized
aatttttaattagccaggtg

SEQ ID NO: 25375 - DNA, 20 bp, Artificial Sequence
  chemically synthesized
ggtgtggtgccacatgccta

SEQ ID NO: 25376 - DNA, 20 bp, Artificial Sequence
  chemically synthesized
gtgccacatgcctatagtcc

SEQ ID NO: 25377 - DNA, 20 bp, Artificial Sequence
  chemically synthesized
tgcctatagtcccagctacc

SEQ ID NO: 25378 - DNA, 20 bp, Artificial Sequence
  chemically synthesized
gcctatagtcccagctacct

SEQ ID NO: 25379 - DNA, 20 bp, Artificial Sequence
  chemically synthesized
ctatagtcccagctacctgg

SEQ ID NO: 25380 - DNA, 20 bp, Artificial Sequence
  chemically synthesized
tatagtcccagctacctggg

SEQ ID NO: 25381 - DNA, 20 bp, Artificial Sequence
  chemically synthesized
cccagctacctgggaggctg

SEQ ID NO: 25382 - DNA, 20 bp, Artificial Sequence
  chemically synthesized
agctacctgggaggctgaag

SEQ ID NO: 25383 - DNA, 20 bp, Artificial Sequence
  chemically synthesized
tacctgggaggctgaagtgg

SEQ ID NO: 25384 - DNA, 20 bp, Artificial Sequence
  chemically synthesized
acctgggaggctgaagtgga

SEQ ID NO: 25385 - DNA, 20 bp, Artificial Sequence
  chemically synthesized
ctgaagtggaaggatcgcct

SEQ ID NO: 25386 - DNA, 20 bp, Artificial Sequence
  chemically synthesized
gtggaaggatcgcctgagcc

SEQ ID NO: 25387 - DNA, 20 bp, Artificial Sequence
  chemically synthesized
tggaaggatcgcctgagccc

SEQ ID NO: 25388 - DNA, 20 bp, Artificial Sequence
  chemically synthesized
gaaggatcgcctgagcccag

SEQ ID NO: 25389 - DNA, 20 bp, Artificial Sequence
  chemically synthesized
aaggatcgcctgagcccagg

SEQ ID NO: 25390 - DNA, 20 bp, Artificial Sequence
  chemically synthesized
gatcgcctgagcccaggagg

SEQ ID NO: 25391 - DNA, 20 bp, Artificial Sequence
  chemically synthesized
tcgcctgagcccaggaggtg

SEQ ID NO: 25392 - DNA, 20 bp, Artificial Sequence
  chemically synthesized
cgcctgagcccaggaggtgg

SEQ ID NO: 25393 - DNA, 20 bp, Artificial Sequence
  chemically synthesized
agcccaggaggtggaggcca

SEQ ID NO: 25394 - DNA, 20 bp, Artificial Sequence
  chemically synthesized
caggaggtggaggccacagt

SEQ ID NO: 25395 - DNA, 20 bp, Artificial Sequence
  chemically synthesized
aggccacagtgagttgtgac

SEQ ID NO: 25396 - DNA, 20 bp, Artificial Sequence
  chemically synthesized
tgtgacaagctactgcattc

SEQ ID NO: 25397 - DNA, 20 bp, Artificial Sequence
  chemically synthesized
caagctactgcattccagcc

SEQ ID NO: 25398 - DNA, 20 bp, Artificial Sequence
  chemically synthesized
aagctactgcattccagcct

SEQ ID NO: 25399 - DNA, 20 bp, Artificial Sequence
  chemically synthesized
ctgcattccagcctgggcaa

SEQ ID NO: 25400 - DNA, 20 bp, Artificial Sequence
  chemically synthesized
gcattccagcctgggcaaca

SEQ ID NO: 25401 - DNA, 20 bp, Artificial Sequence
  chemically synthesized
tccagcctgggcaacagagt

SEQ ID NO: 25402 - DNA, 20 bp, Artificial Sequence
  chemically synthesized
cctgggcaacagagtgagat

SEQ ID NO: 25403 - DNA, 20 bp, Artificial Sequence
  chemically synthesized
tgggcaacagagtgagatga

SEQ ID NO: 25404 - DNA, 20 bp, Artificial Sequence
  chemically synthesized
ggcaacagagtgagatgaga

SEQ ID NO: 25405 - DNA, 20 bp, Artificial Sequence
  chemically synthesized
caacagagtgagatgagaga

SEQ ID NO: 25406 - DNA, 20 bp, Artificial Sequence
  chemically synthesized
acagagtgagatgagagaga

SEQ ID NO: 25407 - DNA, 20 bp, Artificial Sequence
  chemically synthesized
agagtgagatgagagagaga

SEQ ID NO: 25408 - DNA, 20 bp, Artificial Sequence
  chemically synthesized
gagtgagatgagagagagag

SEQ ID NO: 25409 - DNA, 20 bp, Artificial Sequence
  chemically synthesized
agtgagatgagagagagaga

SEQ ID NO: 25410 - DNA, 20 bp, Artificial Sequence
  chemically synthesized
gtgagatgagagagagagag

SEQ ID NO: 25411 - DNA, 20 bp, Artificial Sequence
  chemically synthesized
gagatgagagagagagaggg

SEQ ID NO: 25412 - DNA, 20 bp, Artificial Sequence
  chemically synthesized
agatgagagagagagagggg

SEQ ID NO: 25413 - DNA, 20 bp, Artificial Sequence
  chemically synthesized
gatgagagagagagagggga

SEQ ID NO: 25414 - DNA, 20 bp, Artificial Sequence
  chemically synthesized
atgagagagagagaggggag

SEQ ID NO: 25415 - DNA, 20 bp, Artificial Sequence
  chemically synthesized
agagagagagaggggagggg

SEQ ID NO: 25416 - DNA, 20 bp, Artificial Sequence
  chemically synthesized
agagagaggggaggggaagc

SEQ ID NO: 25417 - DNA, 20 bp, Artificial Sequence
  chemically synthesized
gagagaggggaggggaagcg

SEQ ID NO: 25418 - DNA, 20 bp, Artificial Sequence
  chemically synthesized
agagaggggaggggaagcga

SEQ ID NO: 25419 - DNA, 20 bp, Artificial Sequence
  chemically synthesized
gaggggaggggaagcgaggg

SEQ ID NO: 25420 - DNA, 20 bp, Artificial Sequence
  chemically synthesized
aggggaggggaagcgaggga

SEQ ID NO: 25421 - DNA, 20 bp, Artificial Sequence
  chemically synthesized
gaggggaagcgagggaagga

SEQ ID NO: 25422 - DNA, 20 bp, Artificial Sequence
  chemically synthesized
aggggaagcgagggaaggaa

SEQ ID NO: 25423 - DNA, 20 bp, Artificial Sequence
  chemically synthesized
gggaagcgagggaaggaaag

SEQ ID NO: 25424 - DNA, 20 bp, Artificial Sequence
  chemically synthesized
ggaagcgagggaaggaaagg

SEQ ID NO: 25425 - DNA, 20 bp, Artificial Sequence
  chemically synthesized
gaagcgagggaaggaaagga

SEQ ID NO: 25426 - DNA, 20 bp, Artificial Sequence
  chemically synthesized
aagcgagggaaggaaaggag

SEQ ID NO: 25427 - DNA, 20 bp, Artificial Sequence
  chemically synthesized
gcgagggaaggaaaggaggg

SEQ ID NO: 25428 - DNA, 20 bp, Artificial Sequence
  chemically synthesized
cgagggaaggaaaggagggg

SEQ ID NO: 25429 - DNA, 20 bp, Artificial Sequence
  chemically synthesized
gagggaaggaaaggagggga

SEQ ID NO: 25430 - DNA, 20 bp, Artificial Sequence
  chemically synthesized
agggaaggaaaggaggggag

SEQ ID NO: 25431 - DNA, 20 bp, Artificial Sequence
  chemically synthesized
ggaaggaaaggaggggaggg

SEQ ID NO: 25432 - DNA, 20 bp, Artificial Sequence
  chemically synthesized
gaaggaaaggaggggagggg

SEQ ID NO: 25433 - DNA, 20 bp, Artificial Sequence
  chemically synthesized
aaggaaaggaggggagggga

SEQ ID NO: 25434 - DNA, 20 bp, Artificial Sequence
  chemically synthesized
aggaaaggaggggaggggag

SEQ ID NO: 25435 - DNA, 20 bp, Artificial Sequence
  chemically synthesized
ggaaaggaggggaggggagg

SEQ ID NO: 25436 - DNA, 20 bp, Artificial Sequence
  chemically synthesized
aaaggaggggaggggagggg

SEQ ID NO: 25437 - DNA, 20 bp, Artificial Sequence
  chemically synthesized
aaggaggggaggggaggggg

SEQ ID NO: 25438 - DNA, 20 bp, Artificial Sequence
  chemically synthesized
aggaggggaggggaggggga

SEQ ID NO: 25439 - DNA, 20 bp, Artificial Sequence
  chemically synthesized
ggaggggaggggagggggag

SEQ ID NO: 25440 - DNA, 20 bp, Artificial Sequence
  chemically synthesized
ggggaggggagggggagggg

SEQ ID NO: 25441 - DNA, 20 bp, Artificial Sequence
  chemically synthesized
gggaggggagggggagggga

SEQ ID NO: 25442 - DNA, 20 bp, Artificial Sequence
  chemically synthesized
ggaggggagggggaggggaa

SEQ ID NO: 25443 - DNA, 20 bp, Artificial Sequence
  chemically synthesized
gaggggagggggaggggaag

SEQ ID NO: 25444 - DNA, 20 bp, Artificial Sequence
  chemically synthesized
ggaggggaaggggaaaattt

SEQ ID NO: 25445 - DNA, 20 bp, Artificial Sequence
  chemically synthesized
attttagttaacttaatgaa

SEQ ID NO: 25446 - DNA, 20 bp, Artificial Sequence
  chemically synthesized
aactctataaaatgaaacac

SEQ ID NO: 25447 - DNA, 20 bp, Artificial Sequence
  chemically synthesized
actctataaaatgaaacact

SEQ ID NO: 25448 - DNA, 20 bp, Artificial Sequence
  chemically synthesized
tctataaaatgaaacactgg

SEQ ID NO: 25449 - DNA, 20 bp, Artificial Sequence
  chemically synthesized
aatgaaacactgggagaaaa

SEQ ID NO: 25450 - DNA, 20 bp, Artificial Sequence
  chemically synthesized
gagaaaaaagaattaaaaaa

SEQ ID NO: 25451 - DNA, 20 bp, Artificial Sequence
  chemically synthesized
aaaaagaattaaaaaatgga

SEQ ID NO: 25452 - DNA, 20 bp, Artificial Sequence
  chemically synthesized
aaagaattaaaaaatggaaa

SEQ ID NO: 25453 - DNA, 20 bp, Artificial Sequence
  chemically synthesized
ttaaaaaatggaaagagaat

SEQ ID NO: 25454 - DNA, 20 bp, Artificial Sequence
  chemically synthesized
aaaatggaaagagaatgagt

SEQ ID NO: 25455 - DNA, 20 bp, Artificial Sequence
  chemically synthesized
gaaagagaatgagtgagctg

SEQ ID NO: 25456 - DNA, 20 bp, Artificial Sequence
  chemically synthesized
aaagagaatgagtgagctgt

SEQ ID NO: 25457 - DNA, 20 bp, Artificial Sequence
  chemically synthesized
tgcataattgaaatctttaa

SEQ ID NO: 25458 - DNA, 20 bp, Artificial Sequence
  chemically synthesized
attgaaatctttaaaagaaa

SEQ ID NO: 25459 - DNA, 20 bp, Artificial Sequence
  chemically synthesized
ttgaaatctttaaaagaaaa

SEQ ID NO: 25460 - DNA, 20 bp, Artificial Sequence
  chemically synthesized
tgaaatctttaaaagaaaaa

SEQ ID NO: 25461 - DNA, 20 bp, Artificial Sequence
  chemically synthesized
gaaatctttaaaagaaaaag

SEQ ID NO: 25462 - DNA, 20 bp, Artificial Sequence
  chemically synthesized
aaatctttaaaagaaaaagg

SEQ ID NO: 25463 - DNA, 20 bp, Artificial Sequence
  chemically synthesized
tctttaaaagaaaaaggggg

SEQ ID NO: 25464 - DNA, 20 bp, Artificial Sequence
  chemically synthesized
ttaaaagaaaaagggggtag

SEQ ID NO: 25465 - DNA, 20 bp, Artificial Sequence
  chemically synthesized
gggggtagcagaaaaaaatc

SEQ ID NO: 25466 - DNA, 20 bp, Artificial Sequence
  chemically synthesized
gcagaaaaaaatcaagtgct

SEQ ID NO: 25467 - DNA, 20 bp, Artificial Sequence
  chemically synthesized
aaaaaatcaagtgctgagac

SEQ ID NO: 25468 - DNA, 20 bp, Artificial Sequence
  chemically synthesized
aaatcaagtgctgagacaag

SEQ ID NO: 25469 - DNA, 20 bp, Artificial Sequence
  chemically synthesized
tcaagtgctgagacaagtgg

SEQ ID NO: 25470 - DNA, 20 bp, Artificial Sequence
  chemically synthesized
gtgctgagacaagtggaaga

SEQ ID NO: 25471 - DNA, 20 bp, Artificial Sequence
  chemically synthesized
tgctgagacaagtggaagat

SEQ ID NO: 25472 - DNA, 20 bp, Artificial Sequence
  chemically synthesized
gacaagtggaagatgggccc

SEQ ID NO: 25473 - DNA, 20 bp, Artificial Sequence
  chemically synthesized
agtggaagatgggccccggt

SEQ ID NO: 25474 - DNA, 20 bp, Artificial Sequence
  chemically synthesized
ggaagatgggccccggtgag

SEQ ID NO: 25475 - DNA, 20 bp, Artificial Sequence
  chemically synthesized
ggccccggtgagcagctgat

SEQ ID NO: 25476 - DNA, 20 bp, Artificial Sequence
  chemically synthesized
ggtgagcagctgatcagtgt

SEQ ID NO: 25477 - DNA, 20 bp, Artificial Sequence
  chemically synthesized
ctcccatgatgacgttcccc

SEQ ID NO: 25478 - DNA, 20 bp, Artificial Sequence
  chemically synthesized
ttcccccagcccccaccacc

SEQ ID NO: 25479 - DNA, 20 bp, Artificial Sequence
  chemically synthesized
tcccccagcccccaccaccc

SEQ ID NO: 25480 - DNA, 20 bp, Artificial Sequence
  chemically synthesized
gcccccaccacccgggctgc

SEQ ID NO: 25481 - DNA, 20 bp, Artificial Sequence
  chemically synthesized
ccccaccacccgggctgctg

SEQ ID NO: 25482 - DNA, 20 bp, Artificial Sequence
  chemically synthesized
cccaccacccgggctgctgg

SEQ ID NO: 25483 - DNA, 20 bp, Artificial Sequence
  chemically synthesized
ccaccacccgggctgctgga

SEQ ID NO: 25484 - DNA, 20 bp, Artificial Sequence
  chemically synthesized
cgggctgctggagggaaatg

SEQ ID NO: 25485 - DNA, 20 bp, Artificial Sequence
  chemically synthesized
gtgactttgctacatccctt

SEQ ID NO: 25486 - DNA, 20 bp, Artificial Sequence
  chemically synthesized
ctttgctacatcccttcaga

SEQ ID NO: 25487 - DNA, 20 bp, Artificial Sequence
  chemically synthesized
cccttcagacggtccctcac

SEQ ID NO: 25488 - DNA, 20 bp, Artificial Sequence
  chemically synthesized
ggtccctcactggtgtccct

SEQ ID NO: 25489 - DNA, 20 bp, Artificial Sequence
  chemically synthesized
gtccctcagcccattcgcgt

SEQ ID NO: 25490 - DNA, 20 bp, Artificial Sequence
  chemically synthesized
gctcactctcccattaattt

SEQ ID NO: 25491 - DNA, 20 bp, Artificial Sequence
  chemically synthesized
cccattaatttcagaaatcc

SEQ ID NO: 25492 - DNA, 20 bp, Artificial Sequence
  chemically synthesized
agaaatcctggcctctctcc

SEQ ID NO: 25493 - DNA, 20 bp, Artificial Sequence
  chemically synthesized
actctaaattctgtcaccct

SEQ ID NO: 25494 - DNA, 20 bp, Artificial Sequence
  chemically synthesized
ctaaattctgtcaccctcag

SEQ ID NO: 25495 - DNA, 20 bp, Artificial Sequence
  chemically synthesized
tctgtcaccctcagaagatt

SEQ ID NO: 25496 - DNA, 20 bp, Artificial Sequence
  chemically synthesized
gtcaccctcagaagattcag

SEQ ID NO: 25497 - DNA, 20 bp, Artificial Sequence
  chemically synthesized
cagcatcccgtattctctct

SEQ ID NO: 25498 - DNA, 20 bp, Artificial Sequence
  chemically synthesized
tctgagtgttcactatgtac

SEQ ID NO: 25499 - DNA, 20 bp, Artificial Sequence
  chemically synthesized
ctgagtgttcactatgtacc

SEQ ID NO: 25500 - DNA, 20 bp, Artificial Sequence
  chemically synthesized
actatgtaccgggtgccgtg

SEQ ID NO: 25501 - DNA, 20 bp, Artificial Sequence
  chemically synthesized
ctatgtaccgggtgccgtgt

SEQ ID NO: 25502 - DNA, 20 bp, Artificial Sequence
  chemically synthesized
accgggtgccgtgtgggcac

SEQ ID NO: 25503 - DNA, 20 bp, Artificial Sequence
  chemically synthesized
cgggtgccgtgtgggcactg

SEQ ID NO: 25504 - DNA, 20 bp, Artificial Sequence
  chemically synthesized
ccgtgtgggcactggagttg

SEQ ID NO: 25505 - DNA, 20 bp, Artificial Sequence
  chemically synthesized
gtgtgggcactggagttgca

SEQ ID NO: 25506 - DNA, 20 bp, Artificial Sequence
  chemically synthesized
tgtgggcactggagttgcag

SEQ ID NO: 25507 - DNA, 20 bp, Artificial Sequence
  chemically synthesized
tgggcactggagttgcagag

SEQ ID NO: 25508 - DNA, 20 bp, Artificial Sequence
  chemically synthesized
ggcactggagttgcagagga

SEQ ID NO: 25509 - DNA, 20 bp, Artificial Sequence
  chemically synthesized
ctggagttgcagaggagagt

SEQ ID NO: 25510 - DNA, 20 bp, Artificial Sequence
  chemically synthesized
tggagttgcagaggagagtg

SEQ ID NO: 25511 - DNA, 20 bp, Artificial Sequence
  chemically synthesized
agttgcagaggagagtgagg

SEQ ID NO: 25512 - DNA, 20 bp, Artificial Sequence
  chemically synthesized
gcagaggagagtgaggcgga

SEQ ID NO: 25513 - DNA, 20 bp, Artificial Sequence
  chemically synthesized
cagaggagagtgaggcggac

SEQ ID NO: 25514 - DNA, 20 bp, Artificial Sequence
  chemically synthesized
agaggagagtgaggcggaca

SEQ ID NO: 25515 - DNA, 20 bp, Artificial Sequence
  chemically synthesized
gcggacagggcctctgcctg

SEQ ID NO: 25516 - DNA, 20 bp, Artificial Sequence
  chemically synthesized
cggacagggcctctgcctgt

SEQ ID NO: 25517 - DNA, 20 bp, Artificial Sequence
  chemically synthesized
ggacagggcctctgcctgtg

SEQ ID NO: 25518 - DNA, 20 bp, Artificial Sequence
  chemically synthesized
ctgcctgtggggacaccgcc

SEQ ID NO: 25519 - DNA, 20 bp, Artificial Sequence
  chemically synthesized
cctgtggggacaccgcctgg

SEQ ID NO: 25520 - DNA, 20 bp, Artificial Sequence
  chemically synthesized
ctgtggggacaccgcctggt

SEQ ID NO: 25521 - DNA, 20 bp, Artificial Sequence
  chemically synthesized
tggggacaccgcctggtggg

SEQ ID NO: 25522 - DNA, 20 bp, Artificial Sequence
  chemically synthesized
acaccgcctggtgggaagtc

SEQ ID NO: 25523 - DNA, 20 bp, Artificial Sequence
  chemically synthesized
cgcctggtgggaagtccagc

SEQ ID NO: 25524 - DNA, 20 bp, Artificial Sequence
  chemically synthesized
gaagtccagccagcccccta

SEQ ID NO: 25525 - DNA, 20 bp, Artificial Sequence
  chemically synthesized
agtccagccagccccctaca

SEQ ID NO: 25526 - DNA, 20 bp, Artificial Sequence
  chemically synthesized
tccagccagccccctacaga

SEQ ID NO: 25527 - DNA, 20 bp, Artificial Sequence
  chemically synthesized
cagccagccccctacagaga

SEQ ID NO: 25528 - DNA, 20 bp, Artificial Sequence
  chemically synthesized
agccagccccctacagagag

SEQ ID NO: 25529 - DNA, 20 bp, Artificial Sequence
  chemically synthesized
ccagccccctacagagagag

SEQ ID NO: 25530 - DNA, 20 bp, Artificial Sequence
  chemically synthesized
acagagagaggagatgctac

SEQ ID NO: 25531 - DNA, 20 bp, Artificial Sequence
  chemically synthesized
gagatgctactggtgttcct

SEQ ID NO: 25532 - DNA, 20 bp, Artificial Sequence
  chemically synthesized
atgctactggtgttcctgag

SEQ ID NO: 25533 - DNA, 20 bp, Artificial Sequence
  chemically synthesized
tggtgttcctgagtggtcct

SEQ ID NO: 25534 - DNA, 20 bp, Artificial Sequence
  chemically synthesized
ggtgttcctgagtggtcctc

SEQ ID NO: 25535 - DNA, 20 bp, Artificial Sequence
  chemically synthesized
tgttcctgagtggtcctcgg

SEQ ID NO: 25536 - DNA, 20 bp, Artificial Sequence
  chemically synthesized
gttcctgagtggtcctcggg

SEQ ID NO: 25537 - DNA, 20 bp, Artificial Sequence
  chemically synthesized
ttcctgagtggtcctcggga

SEQ ID NO: 25538 - DNA, 20 bp, Artificial Sequence
  chemically synthesized
gtcccctgccctgccctgcc

SEQ ID NO: 25539 - DNA, 20 bp, Artificial Sequence
  chemically synthesized
tgccctgccctgcccagcac

SEQ ID NO: 25540 - DNA, 20 bp, Artificial Sequence
  chemically synthesized
gcccagcaccggccctccct

SEQ ID NO: 25541 - DNA, 20 bp, Artificial Sequence
  chemically synthesized
agcaccggccctccctcggt

SEQ ID NO: 25542 - DNA, 20 bp, Artificial Sequence
  chemically synthesized
ccggccctccctcggttggc

SEQ ID NO: 25543 - DNA, 20 bp, Artificial Sequence
  chemically synthesized
ctccctcggttggccagcct

SEQ ID NO: 25544 - DNA, 20 bp, Artificial Sequence
  chemically synthesized
tccctcggttggccagcctc

SEQ ID NO: 25545 - DNA, 20 bp, Artificial Sequence
  chemically synthesized
ggttggccagcctcaggaat

SEQ ID NO: 25546 - DNA, 20 bp, Artificial Sequence
  chemically synthesized
gttggccagcctcaggaatg

SEQ ID NO: 25547 - DNA, 20 bp, Artificial Sequence
  chemically synthesized
tggccagcctcaggaatgag

SEQ ID NO: 25548 - DNA, 20 bp, Artificial Sequence
  chemically synthesized
gaatgaggagtccctcattc

SEQ ID NO: 25549 - DNA, 20 bp, Artificial Sequence
  chemically synthesized
aggagtccctcattccagcc

SEQ ID NO: 25550 - DNA, 20 bp, Artificial Sequence
  chemically synthesized
agctaaccaatccccttcct

SEQ ID NO: 25551 - DNA, 20 bp, Artificial Sequence
  chemically synthesized
caatccccttcctaagctcc

SEQ ID NO: 25552 - DNA, 20 bp, Artificial Sequence
  chemically synthesized
ccctgctcctcctgcctcca

SEQ ID NO: 25553 - DNA, 20 bp, Artificial Sequence
  chemically synthesized
cctcctgcctccatggaacc

SEQ ID NO: 25554 - DNA, 20 bp, Artificial Sequence
  chemically synthesized
atggaacccggctccaccac

SEQ ID NO: 25555 - DNA, 20 bp, Artificial Sequence
  chemically synthesized
acctgacactcctccattcc

SEQ ID NO: 25556 - DNA, 20 bp, Artificial Sequence
  chemically synthesized
ctggctcttgcccttctgcc

SEQ ID NO: 25557 - DNA, 20 bp, Artificial Sequence
  chemically synthesized
cccttctgcctagcactgct

SEQ ID NO: 25558 - DNA, 20 bp, Artificial Sequence
  chemically synthesized
accttaaaatcttttcccac

SEQ ID NO: 25559 - DNA, 20 bp, Artificial Sequence
  chemically synthesized
aaaatcttttcccaccagcc

SEQ ID NO: 25560 - DNA, 20 bp, Artificial Sequence
  chemically synthesized
aaatcttttcccaccagcct

SEQ ID NO: 25561 - DNA, 20 bp, Artificial Sequence
  chemically synthesized
tcccaccagcctgggcaaca

SEQ ID NO: 25562 - DNA, 20 bp, Artificial Sequence
  chemically synthesized
accagcctgggcaacatagc

SEQ ID NO: 25563 - DNA, 20 bp, Artificial Sequence
  chemically synthesized
aaaaattttttttaatttgc

SEQ ID NO: 25564 - DNA, 20 bp, Artificial Sequence
  chemically synthesized
aaaattttttttaatttgcc

SEQ ID NO: 25565 - DNA, 20 bp, Artificial Sequence
  chemically synthesized
tttttttaatttgccaggca

SEQ ID NO: 25566 - DNA, 20 bp, Artificial Sequence
  chemically synthesized
ttttaatttgccaggcacag

SEQ ID NO: 25567 - DNA, 20 bp, Artificial Sequence
  chemically synthesized
gcacagtggtgcacacctgt

SEQ ID NO: 25568 - DNA, 20 bp, Artificial Sequence
  chemically synthesized
acctgtaagtcctaactact

SEQ ID NO: 25569 - DNA, 20 bp, Artificial Sequence
  chemically synthesized
cctgtaagtcctaactactt

SEQ ID NO: 25570 - DNA, 20 bp, Artificial Sequence
  chemically synthesized
tgtaagtcctaactacttgg

SEQ ID NO: 25571 - DNA, 20 bp, Artificial Sequence
  chemically synthesized
gtaagtcctaactacttggg

SEQ ID NO: 25572 - DNA, 20 bp, Artificial Sequence
  chemically synthesized
tcctaactacttgggaggct

SEQ ID NO: 25573 - DNA, 20 bp, Artificial Sequence
  chemically synthesized
cctaactacttgggaggctg

SEQ ID NO: 25574 - DNA, 20 bp, Artificial Sequence
  chemically synthesized
aactacttgggaggctgagg

SEQ ID NO: 25575 - DNA, 20 bp, Artificial Sequence
  chemically synthesized
actacttgggaggctgaggt

SEQ ID NO: 25576 - DNA, 20 bp, Artificial Sequence
  chemically synthesized
tacttgggaggctgaggtgg

SEQ ID NO: 25577 - DNA, 20 bp, Artificial Sequence
  chemically synthesized
acttgggaggctgaggtggg

SEQ ID NO: 25578 - DNA, 20 bp, Artificial Sequence
  chemically synthesized
gggaggctgaggtgggagga

SEQ ID NO: 25579 - DNA, 20 bp, Artificial Sequence
  chemically synthesized
ctgaggtgggaggatggctt

SEQ ID NO: 25580 - DNA, 20 bp, Artificial Sequence
  chemically synthesized
gtgggaggatggcttgagcc

SEQ ID NO: 25581 - DNA, 20 bp, Artificial Sequence
  chemically synthesized
tgggaggatggcttgagccc

SEQ ID NO: 25582 - DNA, 20 bp, Artificial Sequence
  chemically synthesized
ggaggatggcttgagcccag

SEQ ID NO: 25583 - DNA, 20 bp, Artificial Sequence
  chemically synthesized
tggcttgagcccaggagttc

SEQ ID NO: 25584 - DNA, 20 bp, Artificial Sequence
  chemically synthesized
ggcttgagcccaggagttcg

SEQ ID NO: 25585 - DNA, 20 bp, Artificial Sequence
  chemically synthesized
agcccaggagttcgaggttg

SEQ ID NO: 25586 - DNA, 20 bp, Artificial Sequence
  chemically synthesized
caggagttcgaggttgcagt

SEQ ID NO: 25587 - DNA, 20 bp, Artificial Sequence
  chemically synthesized
tctctaaaaaaaaaatgtcc

SEQ ID NO: 25588 - DNA, 20 bp, Artificial Sequence
  chemically synthesized
aaaaaaatgtccaagatact

SEQ ID NO: 25589 - DNA, 20 bp, Artificial Sequence
  chemically synthesized
aaaaaatgtccaagatactt

SEQ ID NO: 25590 - DNA, 20 bp, Artificial Sequence
  chemically synthesized
tccaagatacttaggtcctt

SEQ ID NO: 25591 - DNA, 20 bp, Artificial Sequence
  chemically synthesized
gatacttaggtccttcagtc

SEQ ID NO: 25592 - DNA, 20 bp, Artificial Sequence
  chemically synthesized
ccttcagtcaagatttatta

SEQ ID NO: 25593 - DNA, 20 bp, Artificial Sequence
  chemically synthesized
tcagtcaagatttattacag

SEQ ID NO: 25594 - DNA, 20 bp, Artificial Sequence
  chemically synthesized
cagtcaagatttattacaga

SEQ ID NO: 25595 - DNA, 20 bp, Artificial Sequence
  chemically synthesized
agatttattacagaaggatc

SEQ ID NO: 25596 - DNA, 20 bp, Artificial Sequence
  chemically synthesized
gatttattacagaaggatcc

SEQ ID NO: 25597 - DNA, 20 bp, Artificial Sequence
  chemically synthesized
atttattacagaaggatcca

SEQ ID NO: 25598 - DNA, 20 bp, Artificial Sequence
  chemically synthesized
tattacagaaggatccaggg

SEQ ID NO: 25599 - DNA, 20 bp, Artificial Sequence
  chemically synthesized
attacagaaggatccaggga

SEQ ID NO: 25600 - DNA, 20 bp, Artificial Sequence
  chemically synthesized
ttacagaaggatccagggaa

SEQ ID NO: 25601 - DNA, 20 bp, Artificial Sequence
  chemically synthesized
aaggatccagggaagggtct

SEQ ID NO: 25602 - DNA, 20 bp, Artificial Sequence
  chemically synthesized
aggatccagggaagggtctt

SEQ ID NO: 25603 - DNA, 20 bp, Artificial Sequence
  chemically synthesized
gatccagggaagggtcttgg

SEQ ID NO: 25604 - DNA, 20 bp, Artificial Sequence
  chemically synthesized
agggaagggtcttgggagat

SEQ ID NO: 25605 - DNA, 20 bp, Artificial Sequence
  chemically synthesized
ggaagggtcttgggagatga

SEQ ID NO: 25606 - DNA, 20 bp, Artificial Sequence
  chemically synthesized
gaagggtcttgggagatgag

SEQ ID NO: 25607 - DNA, 20 bp, Artificial Sequence
  chemically synthesized
agggtcttgggagatgagag

SEQ ID NO: 25608 - DNA, 20 bp, Artificial Sequence
  chemically synthesized
gtcttgggagatgagaggag

SEQ ID NO: 25609 - DNA, 20 bp, Artificial Sequence
  chemically synthesized
tcttgggagatgagaggagc

SEQ ID NO: 25610 - DNA, 20 bp, Artificial Sequence
  chemically synthesized
cttgggagatgagaggagca

SEQ ID NO: 25611 - DNA, 20 bp, Artificial Sequence
  chemically synthesized
tgagaggagcagggatcttc

SEQ ID NO: 25612 - DNA, 20 bp, Artificial Sequence
  chemically synthesized
gagaggagcagggatcttcc

SEQ ID NO: 25613 - DNA, 20 bp, Artificial Sequence
  chemically synthesized
cacaacatacacacatgcac

SEQ ID NO: 25614 - DNA, 20 bp, Artificial Sequence
  chemically synthesized
cacaacatacactcacacac

SEQ ID NO: 25615 - DNA, 20 bp, Artificial Sequence
  chemically synthesized
cattcactcacacacacaca

SEQ ID NO: 25616 - DNA, 20 bp, Artificial Sequence
  chemically synthesized
ttcactcacacacacacaca

SEQ ID NO: 25617 - DNA, 20 bp, Artificial Sequence
  chemically synthesized
cacacacacacacagagtcc

SEQ ID NO: 25618 - DNA, 20 bp, Artificial Sequence
  chemically synthesized
atacgtgcacacgcacatac

SEQ ID NO: 25619 - DNA, 20 bp, Artificial Sequence
  chemically synthesized
tacgtgcacacgcacatacg

SEQ ID NO: 25620 - DNA, 20 bp, Artificial Sequence
  chemically synthesized
atacgaggcacatgtgttct

SEQ ID NO: 25621 - DNA, 20 bp, Artificial Sequence
  chemically synthesized
tacgaggcacatgtgttctt

SEQ ID NO: 25622 - DNA, 20 bp, Artificial Sequence
  chemically synthesized
aggcacatgtgttcttgggt

SEQ ID NO: 25623 - DNA, 20 bp, Artificial Sequence
  chemically synthesized
ggcacatgtgttcttgggtt

SEQ ID NO: 25624 - DNA, 20 bp, Artificial Sequence
  chemically synthesized
cacatgtgttcttgggttgg

SEQ ID NO: 25625 - DNA, 20 bp, Artificial Sequence
  chemically synthesized
acatgtgttcttgggttggg

SEQ ID NO: 25626 - DNA, 20 bp, Artificial Sequence
  chemically synthesized
atgtgttcttgggttgggag

SEQ ID NO: 25627 - DNA, 20 bp, Artificial Sequence
  chemically synthesized
tgttcttgggttgggaggag

SEQ ID NO: 25628 - DNA, 20 bp, Artificial Sequence
  chemically synthesized
gttcttgggttgggaggaga

SEQ ID NO: 25629 - DNA, 20 bp, Artificial Sequence
  chemically synthesized
ttcttgggttgggaggagaa

SEQ ID NO: 25630 - DNA, 20 bp, Artificial Sequence
  chemically synthesized
ttgggttgggaggagaaggg

SEQ ID NO: 25631 - DNA, 20 bp, Artificial Sequence
  chemically synthesized
tgggttgggaggagaagggc

SEQ ID NO: 25632 - DNA, 20 bp, Artificial Sequence
  chemically synthesized
gttgggaggagaagggcagg

SEQ ID NO: 25633 - DNA, 20 bp, Artificial Sequence
  chemically synthesized
aagggcaggcagttatcttc

SEQ ID NO: 25634 - DNA, 20 bp, Artificial Sequence
  chemically synthesized
tccagatctccccacacctc

SEQ ID NO: 25635 - DNA, 20 bp, Artificial Sequence
  chemically synthesized
cctctggcacatgcctttcc

SEQ ID NO: 25636 - DNA, 20 bp, Artificial Sequence
  chemically synthesized
ctctggcacatgcctttcct

SEQ ID NO: 25637 - DNA, 20 bp, Artificial Sequence
  chemically synthesized
tctggcacatgcctttcctg

SEQ ID NO: 25638 - DNA, 20 bp, Artificial Sequence
  chemically synthesized
acatgcctttcctggggtcc

SEQ ID NO: 25639 - DNA, 20 bp, Artificial Sequence
  chemically synthesized
catgcctttcctggggtcct

SEQ ID NO: 25640 - DNA, 20 bp, Artificial Sequence
  chemically synthesized
atgcctttcctggggtcctg

SEQ ID NO: 25641 - DNA, 20 bp, Artificial Sequence
  chemically synthesized
cctttcctggggtcctgggg

SEQ ID NO: 25642 - DNA, 20 bp, Artificial Sequence
  chemically synthesized
tcctggggtcctggggtaga

SEQ ID NO: 25643 - DNA, 20 bp, Artificial Sequence
  chemically synthesized
cctggggtcctggggtagac

SEQ ID NO: 25644 - DNA, 20 bp, Artificial Sequence
  chemically synthesized
ggggtcctggggtagacagg

SEQ ID NO: 25645 - DNA, 20 bp, Artificial Sequence
  chemically synthesized
gggtcctggggtagacagga

SEQ ID NO: 25646 - DNA, 20 bp, Artificial Sequence
  chemically synthesized
cctggggtagacaggaaggt

SEQ ID NO: 25647 - DNA, 20 bp, Artificial Sequence
  chemically synthesized
ctggggtagacaggaaggtg

SEQ ID NO: 25648 - DNA, 20 bp, Artificial Sequence
  chemically synthesized
ggtagacaggaaggtgaggt

SEQ ID NO: 25649 - DNA, 20 bp, Artificial Sequence
  chemically synthesized
gtagacaggaaggtgaggtg

SEQ ID NO: 25650 - DNA, 20 bp, Artificial Sequence
  chemically synthesized
tagacaggaaggtgaggtga

SEQ ID NO: 25651 - DNA, 20 bp, Artificial Sequence
  chemically synthesized
ggaaggtgaggtgagggaac

SEQ ID NO: 25652 - DNA, 20 bp, Artificial Sequence
  chemically synthesized
aggtgaggtgagggaacaag

SEQ ID NO: 25653 - DNA, 20 bp, Artificial Sequence
  chemically synthesized
ggtgaggtgagggaacaagc

SEQ ID NO: 25654 - DNA, 20 bp, Artificial Sequence
  chemically synthesized
gtgaggtgagggaacaagcg

SEQ ID NO: 25655 - DNA, 20 bp, Artificial Sequence
  chemically synthesized
tgaggtgagggaacaagcgg

SEQ ID NO: 25656 - DNA, 20 bp, Artificial Sequence
  chemically synthesized
gagggaacaagcgggggtgt

SEQ ID NO: 25657 - DNA, 20 bp, Artificial Sequence
  chemically synthesized
agggaacaagcgggggtgtc

SEQ ID NO: 25658 - DNA, 20 bp, Artificial Sequence
  chemically synthesized
cgggggtgtcgggccctcct

SEQ ID NO: 25659 - DNA, 20 bp, Artificial Sequence
  chemically synthesized
ccctcctcagtccctgttca

SEQ ID NO: 25660 - DNA, 20 bp, Artificial Sequence
  chemically synthesized
ctcctcagtccctgttcaca

SEQ ID NO: 25661 - DNA, 20 bp, Artificial Sequence
  chemically synthesized
ctcagtccctgttcacagag

SEQ ID NO: 25662 - DNA, 20 bp, Artificial Sequence
  chemically synthesized
tcagtccctgttcacagagt

SEQ ID NO: 25663 - DNA, 20 bp, Artificial Sequence
  chemically synthesized
ccctgttcacagagtgggtg

SEQ ID NO: 25664 - DNA, 20 bp, Artificial Sequence
  chemically synthesized
tgttcacagagtgggtgcgg

SEQ ID NO: 25665 - DNA, 20 bp, Artificial Sequence
  chemically synthesized
ttcacagagtgggtgcggca

SEQ ID NO: 25666 - DNA, 20 bp, Artificial Sequence
  chemically synthesized
tgggtgcggcagagacctca

SEQ ID NO: 25667 - DNA, 20 bp, Artificial Sequence
  chemically synthesized
gggtgcggcagagacctcaa

SEQ ID NO: 25668 - DNA, 20 bp, Artificial Sequence
  chemically synthesized
ggtgcggcagagacctcaaa

SEQ ID NO: 25669 - DNA, 20 bp, Artificial Sequence
  chemically synthesized
cggcagagacctcaaaggga

SEQ ID NO: 25670 - DNA, 20 bp, Artificial Sequence
  chemically synthesized
gcagagacctcaaagggaca

SEQ ID NO: 25671 - DNA, 20 bp, Artificial Sequence
  chemically synthesized
caaagggacagagcaatcat

SEQ ID NO: 25672 - DNA, 20 bp, Artificial Sequence
  chemically synthesized
ggacagagcaatcatgagct

SEQ ID NO: 25673 - DNA, 20 bp, Artificial Sequence
  chemically synthesized
agagcaatcatgagctgaga

SEQ ID NO: 25674 - DNA, 20 bp, Artificial Sequence
  chemically synthesized
agcaatcatgagctgagaca

SEQ ID NO: 25675 - DNA, 20 bp, Artificial Sequence
  chemically synthesized
gcaatcatgagctgagacag

SEQ ID NO: 25676 - DNA, 20 bp, Artificial Sequence
  chemically synthesized
caatcatgagctgagacaga

SEQ ID NO: 25677 - DNA, 20 bp, Artificial Sequence
  chemically synthesized
aatcatgagctgagacagag

SEQ ID NO: 25678 - DNA, 20 bp, Artificial Sequence
  chemically synthesized
atcatgagctgagacagagg

SEQ ID NO: 25679 - DNA, 20 bp, Artificial Sequence
  chemically synthesized
catgagctgagacagagggg

SEQ ID NO: 25680 - DNA, 20 bp, Artificial Sequence
  chemically synthesized
gctgagacagagggggagca

SEQ ID NO: 25681 - DNA, 20 bp, Artificial Sequence
  chemically synthesized
acagagggggagcaaagccg

SEQ ID NO: 25682 - DNA, 20 bp, Artificial Sequence
  chemically synthesized
gcacacttgcctttcaaaaa

SEQ ID NO: 25683 - DNA, 20 bp, Artificial Sequence
  chemically synthesized
caaaaatggatttcctctcc

SEQ ID NO: 25684 - DNA, 20 bp, Artificial Sequence
  chemically synthesized
aaaaatggatttcctctcct

SEQ ID NO: 25685 - DNA, 20 bp, Artificial Sequence
  chemically synthesized
ggatttcctctcctgggatt

SEQ ID NO: 25686 - DNA, 20 bp, Artificial Sequence
  chemically synthesized
tctcctgggattcagcctgc

SEQ ID NO: 25687 - DNA, 20 bp, Artificial Sequence
  chemically synthesized
ggattcagcctgcgagtgcc

SEQ ID NO: 25688 - DNA, 20 bp, Artificial Sequence
  chemically synthesized
tgcctggcccctcaccttga

SEQ ID NO: 25689 - DNA, 20 bp, Artificial Sequence
  chemically synthesized
tggcccctcaccttgatgga

SEQ ID NO: 25690 - DNA, 20 bp, Artificial Sequence
  chemically synthesized
ggcccctcaccttgatggaa

SEQ ID NO: 25691 - DNA, 20 bp, Artificial Sequence
  chemically synthesized
cctcaccttgatggaaagga

SEQ ID NO: 25692 - DNA, 20 bp, Artificial Sequence
  chemically synthesized
aaggatggtcattttcctcc

SEQ ID NO: 25693 - DNA, 20 bp, Artificial Sequence
  chemically synthesized
tggtcattttcctccgagct

SEQ ID NO: 25694 - DNA, 20 bp, Artificial Sequence
  chemically synthesized
tttcctccgagctcagctgc

SEQ ID NO: 25695 - DNA, 20 bp, Artificial Sequence
  chemically synthesized
tcagctgctggatatcttga

SEQ ID NO: 25696 - DNA, 20 bp, Artificial Sequence
  chemically synthesized
ctggatatcttgaaagtcct

SEQ ID NO: 25697 - DNA, 20 bp, Artificial Sequence
  chemically synthesized
ttgaaagtccttggccatga

SEQ ID NO: 25698 - DNA, 20 bp, Artificial Sequence
  chemically synthesized
tgaaagtccttggccatgat

SEQ ID NO: 25699 - DNA, 20 bp, Artificial Sequence
  chemically synthesized
gaaagtccttggccatgatg

SEQ ID NO: 25700 - DNA, 20 bp, Artificial Sequence
  chemically synthesized
tccttggccatgatggggcc

SEQ ID NO: 25701 - DNA, 20 bp, Artificial Sequence
  chemically synthesized
ccttggccatgatggggccc

SEQ ID NO: 25702 - DNA, 20 bp, Artificial Sequence
  chemically synthesized
ggccatgatggggcccgggc

SEQ ID NO: 25703 - DNA, 20 bp, Artificial Sequence
  chemically synthesized
ccatgatggggcccgggctg

SEQ ID NO: 25704 - DNA, 20 bp, Artificial Sequence
  chemically synthesized
gatggggcccgggctggagc

SEQ ID NO: 25705 - DNA, 20 bp, Artificial Sequence
  chemically synthesized
tggggcccgggctggagctg

SEQ ID NO: 25706 - DNA, 20 bp, Artificial Sequence
  chemically synthesized
gcccgggctggagctggagc

SEQ ID NO: 25707 - DNA, 20 bp, Artificial Sequence
  chemically synthesized
ccgggctggagctggagctg

SEQ ID NO: 25708 - DNA, 20 bp, Artificial Sequence
  chemically synthesized
gctggagctggagctggagc

SEQ ID NO: 25709 - DNA, 20 bp, Artificial Sequence
  chemically synthesized
ctggagctggagctggagct

SEQ ID NO: 25710 - DNA, 20 bp, Artificial Sequence
  chemically synthesized
agctggagctggagctgggc

SEQ ID NO: 25711 - DNA, 20 bp, Artificial Sequence
  chemically synthesized
gctggagctggagctgggct

SEQ ID NO: 25712 - DNA, 20 bp, Artificial Sequence
  chemically synthesized
gagctggagctgggctgggc

SEQ ID NO: 25713 - DNA, 20 bp, Artificial Sequence
  chemically synthesized
agctggagctgggctgggct

SEQ ID NO: 25714 - DNA, 20 bp, Artificial Sequence
  chemically synthesized
gagctgggctgggctgggct

SEQ ID NO: 25715 - DNA, 20 bp, Artificial Sequence
  chemically synthesized
agctgggctgggctgggctg

SEQ ID NO: 25716 - DNA, 20 bp, Artificial Sequence
  chemically synthesized
ggctgggctgaggttgctct

SEQ ID NO: 25717 - DNA, 20 bp, Artificial Sequence
  chemically synthesized
gctgggctgaggttgctctg

SEQ ID NO: 25718 - DNA, 20 bp, Artificial Sequence
  chemically synthesized
ctgggctgaggttgctctga

SEQ ID NO: 25719 - DNA, 20 bp, Artificial Sequence
  chemically synthesized
gctgaggttgctctgagggc

SEQ ID NO: 25720 - DNA, 20 bp, Artificial Sequence
  chemically synthesized
ctgaggttgctctgagggct

SEQ ID NO: 25721 - DNA, 20 bp, Artificial Sequence
  chemically synthesized
tgaggttgctctgagggctg

SEQ ID NO: 25722 - DNA, 20 bp, Artificial Sequence
  chemically synthesized
gttgctctgagggctggggc

SEQ ID NO: 25723 - DNA, 20 bp, Artificial Sequence
  chemically synthesized
ttgctctgagggctggggct

SEQ ID NO: 25724 - DNA, 20 bp, Artificial Sequence
  chemically synthesized
tgctctgagggctggggctg

SEQ ID NO: 25725 - DNA, 20 bp, Artificial Sequence
  chemically synthesized
tctgagggctggggctgggg

SEQ ID NO: 25726 - DNA, 20 bp, Artificial Sequence
  chemically synthesized
tgagggctggggctggggca

SEQ ID NO: 25727 - DNA, 20 bp, Artificial Sequence
  chemically synthesized
gagggctggggctggggcag

SEQ ID NO: 25728 - DNA, 20 bp, Artificial Sequence
  chemically synthesized
ctggggctggggcagaggtg

SEQ ID NO: 25729 - DNA, 20 bp, Artificial Sequence
  chemically synthesized
ggcagaggtgcagattcacg

SEQ ID NO: 25730 - DNA, 20 bp, Artificial Sequence
  chemically synthesized
cagaggtgcagattcacgtg

SEQ ID NO: 25731 - DNA, 20 bp, Artificial Sequence
  chemically synthesized
agaggtgcagattcacgtgg

SEQ ID NO: 25732 - DNA, 20 bp, Artificial Sequence
  chemically synthesized
cagattcacgtggaggttga

SEQ ID NO: 25733 - DNA, 20 bp, Artificial Sequence
  chemically synthesized
attcacgtggaggttgatgg

SEQ ID NO: 25734 - DNA, 20 bp, Artificial Sequence
  chemically synthesized
ttcacgtggaggttgatggt

SEQ ID NO: 25735 - DNA, 20 bp, Artificial Sequence
  chemically synthesized
cgtggaggttgatggtggga

SEQ ID NO: 25736 - DNA, 20 bp, Artificial Sequence
  chemically synthesized
gttgatggtgggatggaacg

SEQ ID NO: 25737 - DNA, 20 bp, Artificial Sequence
  chemically synthesized
ttgatggtgggatggaacgc

SEQ ID NO: 25738 - DNA, 20 bp, Artificial Sequence
  chemically synthesized
tgatggtgggatggaacgca

SEQ ID NO: 25739 - DNA, 20 bp, Artificial Sequence
  chemically synthesized
ggtgggatggaacgcagggt

SEQ ID NO: 25740 - DNA, 20 bp, Artificial Sequence
  chemically synthesized
tgggatggaacgcagggtcg

SEQ ID NO: 25741 - DNA, 20 bp, Artificial Sequence
  chemically synthesized
gggatggaacgcagggtcgg

SEQ ID NO: 25742 - DNA, 20 bp, Artificial Sequence
  chemically synthesized
ggatggaacgcagggtcgga

SEQ ID NO: 25743 - DNA, 20 bp, Artificial Sequence
  chemically synthesized
gatggaacgcagggtcggag

SEQ ID NO: 25744 - DNA, 20 bp, Artificial Sequence
  chemically synthesized
aacgcagggtcggaggggtt

SEQ ID NO: 25745 - DNA, 20 bp, Artificial Sequence
  chemically synthesized
acgcagggtcggaggggttc

SEQ ID NO: 25746 - DNA, 20 bp, Artificial Sequence
  chemically synthesized
cgcagggtcggaggggttcg

SEQ ID NO: 25747 - DNA, 20 bp, Artificial Sequence
  chemically synthesized
agggtcggaggggttcgggg

SEQ ID NO: 25748 - DNA, 20 bp, Artificial Sequence
  chemically synthesized
gtcggaggggttcggggtgg

SEQ ID NO: 25749 - DNA, 20 bp, Artificial Sequence
  chemically synthesized
aggggttcggggtggtggcc

SEQ ID NO: 25750 - DNA, 20 bp, Artificial Sequence
  chemically synthesized
ggggttcggggtggtggcct

SEQ ID NO: 25751 - DNA, 20 bp, Artificial Sequence
  chemically synthesized
gttcggggtggtggcctggg

SEQ ID NO: 25752 - DNA, 20 bp, Artificial Sequence
  chemically synthesized
ttcggggtggtggcctgggt

SEQ ID NO: 25753 - DNA, 20 bp, Artificial Sequence
  chemically synthesized
tggtggcctgggtaggatct

SEQ ID NO: 25754 - DNA, 20 bp, Artificial Sequence
  chemically synthesized
ggtggcctgggtaggatctg

SEQ ID NO: 25755 - DNA, 20 bp, Artificial Sequence
  chemically synthesized
gcctgggtaggatctgaggt

SEQ ID NO: 25756 - DNA, 20 bp, Artificial Sequence
  chemically synthesized
tgccaacctcagatcctacc

SEQ ID NO: 25757 - DNA, 20 bp, Artificial Sequence
  chemically synthesized
gccaacctcagatcctaccc

SEQ ID NO: 25758 - DNA, 20 bp, Artificial Sequence
  chemically synthesized
gtgaatctgcacctctgccc

SEQ ID NO: 25759 - DNA, 20 bp, Artificial Sequence
  chemically synthesized
ctgcacctctgccccagccc

SEQ ID NO: 25760 - DNA, 20 bp, Artificial Sequence
  chemically synthesized
tctgccccagccccagccct

SEQ ID NO: 25761 - DNA, 20 bp, Artificial Sequence
  chemically synthesized
tgccccagccccagccctca

SEQ ID NO: 25762 - DNA, 20 bp, Artificial Sequence
  chemically synthesized
cccagccctcagagcaacct

SEQ ID NO: 25763 - DNA, 20 bp, Artificial Sequence
  chemically synthesized
ccctcagagcaacctcagcc

SEQ ID NO: 25764 - DNA, 20 bp, Artificial Sequence
  chemically synthesized
agagcaacctcagcccagcc

SEQ ID NO: 25765 - DNA, 20 bp, Artificial Sequence
  chemically synthesized
aacctcagcccagcccagcc

SEQ ID NO: 25766 - DNA, 20 bp, Artificial Sequence
  chemically synthesized
agcccagcccagcccagctc

SEQ ID NO: 25767 - DNA, 20 bp, Artificial Sequence
  chemically synthesized
gcccagcccagctccagctc

SEQ ID NO: 25768 - DNA, 20 bp, Artificial Sequence
  chemically synthesized
cccagctccagctccagctc

SEQ ID NO: 25769 - DNA, 20 bp, Artificial Sequence
  chemically synthesized
ctccagctccagctccagcc

SEQ ID NO: 25770 - DNA, 20 bp, Artificial Sequence
  chemically synthesized
tccagctccagctccagccc

SEQ ID NO: 25771 - DNA, 20 bp, Artificial Sequence
  chemically synthesized
ctccagcccgggccccatca

SEQ ID NO: 25772 - DNA, 20 bp, Artificial Sequence
  chemically synthesized
gcccgggccccatcatggcc

SEQ ID NO: 25773 - DNA, 20 bp, Artificial Sequence
  chemically synthesized
cccgggccccatcatggcca

SEQ ID NO: 25774 - DNA, 20 bp, Artificial Sequence
  chemically synthesized
catcatggccaaggactttc

SEQ ID NO: 25775 - DNA, 20 bp, Artificial Sequence
  chemically synthesized
ccaaggactttcaagatatc

SEQ ID NO: 25776 - DNA, 20 bp, Artificial Sequence
  chemically synthesized
aggactttcaagatatccag

SEQ ID NO: 25777 - DNA, 20 bp, Artificial Sequence
  chemically synthesized
tttcaagatatccagcagct

SEQ ID NO: 25778 - DNA, 20 bp, Artificial Sequence
  chemically synthesized
agatatccagcagctgagct

SEQ ID NO: 25779 - DNA, 20 bp, Artificial Sequence
  chemically synthesized
atatccagcagctgagctcg

SEQ ID NO: 25780 - DNA, 20 bp, Artificial Sequence
  chemically synthesized
tatccagcagctgagctcgg

SEQ ID NO: 25781 - DNA, 20 bp, Artificial Sequence
  chemically synthesized
aaatgaccatcctttccatc

SEQ ID NO: 25782 - DNA, 20 bp, Artificial Sequence
  chemically synthesized
aatgaccatcctttccatca

SEQ ID NO: 25783 - DNA, 20 bp, Artificial Sequence
  chemically synthesized
accatcctttccatcaaggt

SEQ ID NO: 25784 - DNA, 20 bp, Artificial Sequence
  chemically synthesized
ccatcctttccatcaaggtg

SEQ ID NO: 25785 - DNA, 20 bp, Artificial Sequence
  chemically synthesized
catcctttccatcaaggtga

SEQ ID NO: 25786 - DNA, 20 bp, Artificial Sequence
  chemically synthesized
atcctttccatcaaggtgag

SEQ ID NO: 25787 - DNA, 20 bp, Artificial Sequence
  chemically synthesized
tttccatcaaggtgaggggc

SEQ ID NO: 25788 - DNA, 20 bp, Artificial Sequence
  chemically synthesized
ttccatcaaggtgaggggcc

SEQ ID NO: 25789 - DNA, 20 bp, Artificial Sequence
  chemically synthesized
ggtgaggggccaggcactcg

SEQ ID NO: 25790 - DNA, 20 bp, Artificial Sequence
  chemically synthesized
gtgaggggccaggcactcgc

SEQ ID NO: 25791 - DNA, 20 bp, Artificial Sequence
  chemically synthesized
ggcactcgcaggctgaatcc

SEQ ID NO: 25792 - DNA, 20 bp, Artificial Sequence
  chemically synthesized
gcactcgcaggctgaatccc

SEQ ID NO: 25793 - DNA, 20 bp, Artificial Sequence
  chemically synthesized
actcgcaggctgaatcccag

SEQ ID NO: 25794 - DNA, 20 bp, Artificial Sequence
  chemically synthesized
tcgcaggctgaatcccagga

SEQ ID NO: 25795 - DNA, 20 bp, Artificial Sequence
  chemically synthesized
cgcaggctgaatcccaggag

SEQ ID NO: 25796 - DNA, 20 bp, Artificial Sequence
  chemically synthesized
gagaggaaatccatttttga

SEQ ID NO: 25797 - DNA, 20 bp, Artificial Sequence
  chemically synthesized
agaggaaatccatttttgaa

SEQ ID NO: 25798 - DNA, 20 bp, Artificial Sequence
  chemically synthesized
gaaatccatttttgaaaggc

SEQ ID NO: 25799 - DNA, 20 bp, Artificial Sequence
  chemically synthesized
atttttgaaaggcaagtgtg

SEQ ID NO: 25800 - DNA, 20 bp, Artificial Sequence
  chemically synthesized
aggcaagtgtgcagtttctg

SEQ ID NO: 25801 - DNA, 20 bp, Artificial Sequence
  chemically synthesized
gctttgctccccctctgtct

SEQ ID NO: 25802 - DNA, 20 bp, Artificial Sequence
  chemically synthesized
catgattgctctgtcccttt

SEQ ID NO: 25803 - DNA, 20 bp, Artificial Sequence
  chemically synthesized
atgattgctctgtccctttg

SEQ ID NO: 25804 - DNA, 20 bp, Artificial Sequence
  chemically synthesized
tgccgcacccactctgtgaa

SEQ ID NO: 25805 - DNA, 20 bp, Artificial Sequence
  chemically synthesized
gccgcacccactctgtgaac

SEQ ID NO: 25806 - DNA, 20 bp, Artificial Sequence
  chemically synthesized
ccgcacccactctgtgaaca

SEQ ID NO: 25807 - DNA, 20 bp, Artificial Sequence
  chemically synthesized
ccactctgtgaacagggact

SEQ ID NO: 25808 - DNA, 20 bp, Artificial Sequence
  chemically synthesized
cactctgtgaacagggactg

SEQ ID NO: 25809 - DNA, 20 bp, Artificial Sequence
  chemically synthesized
ctctgtgaacagggactgag

SEQ ID NO: 25810 - DNA, 20 bp, Artificial Sequence
  chemically synthesized
tctgtgaacagggactgagg

SEQ ID NO: 25811 - DNA, 20 bp, Artificial Sequence
  chemically synthesized
ctgtgaacagggactgagga

SEQ ID NO: 25812 - DNA, 20 bp, Artificial Sequence
  chemically synthesized
cctcaccttcctgtctaccc

SEQ ID NO: 25813 - DNA, 20 bp, Artificial Sequence
  chemically synthesized
ctcaccttcctgtctacccc

SEQ ID NO: 25814 - DNA, 20 bp, Artificial Sequence
  chemically synthesized
tcctgtctaccccaggaccc

SEQ ID NO: 25815 - DNA, 20 bp, Artificial Sequence
  chemically synthesized
cctgtctaccccaggacccc

SEQ ID NO: 25816 - DNA, 20 bp, Artificial Sequence
  chemically synthesized
tctaccccaggaccccagga

SEQ ID NO: 25817 - DNA, 20 bp, Artificial Sequence
  chemically synthesized
ctaccccaggaccccaggaa

SEQ ID NO: 25818 - DNA, 20 bp, Artificial Sequence
  chemically synthesized
accccaggaaaggcatgtgc

SEQ ID NO: 25819 - DNA, 20 bp, Artificial Sequence
  chemically synthesized
cccaggaaaggcatgtgcca

SEQ ID NO: 25820 - DNA, 20 bp, Artificial Sequence
  chemically synthesized
ccaggaaaggcatgtgccag

SEQ ID NO: 25821 - DNA, 20 bp, Artificial Sequence
  chemically synthesized
aaaggcatgtgccagaggtg

SEQ ID NO: 25822 - DNA, 20 bp, Artificial Sequence
  chemically synthesized
aaggcatgtgccagaggtgt

SEQ ID NO: 25823 - DNA, 20 bp, Artificial Sequence
  chemically synthesized
aggcatgtgccagaggtgtg

SEQ ID NO: 25824 - DNA, 20 bp, Artificial Sequence
  chemically synthesized
gcatgtgccagaggtgtggg

SEQ ID NO: 25825 - DNA, 20 bp, Artificial Sequence
  chemically synthesized
gccagaggtgtggggagatc

SEQ ID NO: 25826 - DNA, 20 bp, Artificial Sequence
  chemically synthesized
agaggtgtggggagatctgg

SEQ ID NO: 25827 - DNA, 20 bp, Artificial Sequence
  chemically synthesized
tgcccttctcctcccaaccc

SEQ ID NO: 25828 - DNA, 20 bp, Artificial Sequence
  chemically synthesized
gtgtgcacgtatgtgcatat

SEQ ID NO: 25829 - DNA, 20 bp, Artificial Sequence
  chemically synthesized
tgtgcacgtatgtgcatatg

SEQ ID NO: 25830 - DNA, 20 bp, Artificial Sequence
  chemically synthesized
gtatgtgcatatgaggaatg

SEQ ID NO: 25831 - DNA, 20 bp, Artificial Sequence
  chemically synthesized
gcatatgaggaatgcagatt

SEQ ID NO: 25832 - DNA, 20 bp, Artificial Sequence
  chemically synthesized
atgaggaatgcagattcagc

SEQ ID NO: 25833 - DNA, 20 bp, Artificial Sequence
  chemically synthesized
tgaggaatgcagattcagct

SEQ ID NO: 25834 - DNA, 20 bp, Artificial Sequence
  chemically synthesized
gggactctgtgtgtgtgtgt

SEQ ID NO: 25835 - DNA, 20 bp, Artificial Sequence
  chemically synthesized
gtgtgtgtgtatatgtgcgc

SEQ ID NO: 25836 - DNA, 20 bp, Artificial Sequence
  chemically synthesized
gtgtgtgtatatgtgcgcga

SEQ ID NO: 25837 - DNA, 20 bp, Artificial Sequence
  chemically synthesized
tgtgtgtatgtcgtgtatgt

SEQ ID NO: 25838 - DNA, 20 bp, Artificial Sequence
  chemically synthesized
tgtgtatgtcgtgtatgtga

SEQ ID NO: 25839 - DNA, 20 bp, Artificial Sequence
  chemically synthesized
gtgtatgtcgtgtatgtgag

SEQ ID NO: 25840 - DNA, 20 bp, Artificial Sequence
  chemically synthesized
tgtatgtcgtgtatgtgaga

SEQ ID NO: 25841 - DNA, 20 bp, Artificial Sequence
  chemically synthesized
tgagagggtatgttgtgtgt

SEQ ID NO: 25842 - DNA, 20 bp, Artificial Sequence
  chemically synthesized
agagggtatgttgtgtgtga

SEQ ID NO: 25843 - DNA, 20 bp, Artificial Sequence
  chemically synthesized
gttgtgtgtgtatgttgtgt

SEQ ID NO: 25844 - DNA, 20 bp, Artificial Sequence
  chemically synthesized
gttgtgtgtatcttgtgtgt

SEQ ID NO: 25845 - DNA, 20 bp, Artificial Sequence
  chemically synthesized
tgcatgtgtgtatgttgtgc

SEQ ID NO: 25846 - DNA, 20 bp, Artificial Sequence
  chemically synthesized
cgagtgtatgttgtgtatgt

SEQ ID NO: 25847 - DNA, 20 bp, Artificial Sequence
  chemically synthesized
tgtgtatgtatgttgtgtat

SEQ ID NO: 25848 - DNA, 20 bp, Artificial Sequence
  chemically synthesized
gttgtgtgtgtgtattgtgt

SEQ ID NO: 25849 - DNA, 20 bp, Artificial Sequence
  chemically synthesized
tgtatgtttgtgtgttgtgt

SEQ ID NO: 25850 - DNA, 20 bp, Artificial Sequence
  chemically synthesized
tgcgtgtgtgtatgttgtgc

SEQ ID NO: 25851 - DNA, 20 bp, Artificial Sequence
  chemically synthesized
gtgttgtgtgtgtatgttgt

SEQ ID NO: 25852 - DNA, 20 bp, Artificial Sequence
  chemically synthesized
gttatgtatgttgtgtgtgt

SEQ ID NO: 25853 - DNA, 20 bp, Artificial Sequence
  chemically synthesized
tgtgtgtgagtgtgttgcgt

SEQ ID NO: 25854 - DNA, 20 bp, Artificial Sequence
  chemically synthesized
tgttgcgtgagtgtgtgtgt

SEQ ID NO: 25855 - DNA, 20 bp, Artificial Sequence
  chemically synthesized
tgtgtgtgtgtgtgtgtgtg

SEQ ID NO: 25856 - DNA, 20 bp, Artificial Sequence
  chemically synthesized
tgtgtgtgtgtgtgtgtgta

SEQ ID NO: 25857 - DNA, 20 bp, Artificial Sequence
  chemically synthesized
gtgtgtgtgtgtgtgtgtag

SEQ ID NO: 25858 - DNA, 20 bp, Artificial Sequence
  chemically synthesized
tgtgtgtgtgtgtgtagagg

SEQ ID NO: 25859 - DNA, 20 bp, Artificial Sequence
  chemically synthesized
gtgtgtgtgtgtgtagaggt

SEQ ID NO: 25860 - DNA, 20 bp, Artificial Sequence
  chemically synthesized
tgtgtgtgtgtgtagaggtg

SEQ ID NO: 25861 - DNA, 20 bp, Artificial Sequence
  chemically synthesized
tgtgtgtgtagaggtggggt

SEQ ID NO: 25862 - DNA, 20 bp, Artificial Sequence
  chemically synthesized
tgtgtagaggtggggtgagt

SEQ ID NO: 25863 - DNA, 20 bp, Artificial Sequence
  chemically synthesized
gtgtagaggtggggtgagtt

SEQ ID NO: 25864 - DNA, 20 bp, Artificial Sequence
  chemically synthesized
agaggtggggtgagttggga

SEQ ID NO: 25865 - DNA, 20 bp, Artificial Sequence
  chemically synthesized
gaggtggggtgagttgggat

SEQ ID NO: 25866 - DNA, 20 bp, Artificial Sequence
  chemically synthesized
gtggggtgagttgggatggg

SEQ ID NO: 25867 - DNA, 20 bp, Artificial Sequence
  chemically synthesized
tggggtgagttgggatgggt

SEQ ID NO: 25868 - DNA, 20 bp, Artificial Sequence
  chemically synthesized
ggggtgagttgggatgggtg

SEQ ID NO: 25869 - DNA, 20 bp, Artificial Sequence
  chemically synthesized
gggtgagttgggatgggtgg

SEQ ID NO: 25870 - DNA, 20 bp, Artificial Sequence
  chemically synthesized
ttgggatgggtgggggacgt

SEQ ID NO: 25871 - DNA, 20 bp, Artificial Sequence
  chemically synthesized
atgggtgggggacgtgagca

SEQ ID NO: 25872 - DNA, 20 bp, Artificial Sequence
  chemically synthesized
gggtgggggacgtgagcaca

SEQ ID NO: 25873 - DNA, 20 bp, Artificial Sequence
  chemically synthesized
gtgggggacgtgagcacaga

SEQ ID NO: 25874 - DNA, 20 bp, Artificial Sequence
  chemically synthesized
acgtgagcacagagagatcc

SEQ ID NO: 25875 - DNA, 20 bp, Artificial Sequence
  chemically synthesized
tgagcacagagagatcctgg

SEQ ID NO: 25876 - DNA, 20 bp, Artificial Sequence
  chemically synthesized
ccctgctcctctcatctccc

SEQ ID NO: 25877 - DNA, 20 bp, Artificial Sequence
  chemically synthesized
catctcccaagacccttccc

SEQ ID NO: 25878 - DNA, 20 bp, Artificial Sequence
  chemically synthesized
tctgtaataaatcttgactg

SEQ ID NO: 25879 - DNA, 20 bp, Artificial Sequence
  chemically synthesized
ctgtaataaatcttgactga

SEQ ID NO: 25880 - DNA, 20 bp, Artificial Sequence
  chemically synthesized
aaatcttgactgaaggacct

SEQ ID NO: 25881 - DNA, 20 bp, Artificial Sequence
  chemically synthesized
actgaaggacctaagtatct

SEQ ID NO: 25882 - DNA, 20 bp, Artificial Sequence
  chemically synthesized
tatcttggacattttttttt

SEQ ID NO: 25883 - DNA, 20 bp, Artificial Sequence
  chemically synthesized
tcttggacatttttttttta

SEQ ID NO: 25884 - DNA, 20 bp, Artificial Sequence
  chemically synthesized
ggacattttttttttagaga

SEQ ID NO: 25885 - DNA, 20 bp, Artificial Sequence
  chemically synthesized
gacattttttttttagagac

SEQ ID NO: 25886 - DNA, 20 bp, Artificial Sequence
  chemically synthesized
cattttttttttagagacag

SEQ ID NO: 25887 - DNA, 20 bp, Artificial Sequence
  chemically synthesized
tttttttagagacaggagtg

SEQ ID NO: 25888 - DNA, 20 bp, Artificial Sequence
  chemically synthesized
ttttagagacaggagtgtag

SEQ ID NO: 25889 - DNA, 20 bp, Artificial Sequence
  chemically synthesized
tagagacaggagtgtagtgg

SEQ ID NO: 25890 - DNA, 20 bp, Artificial Sequence
  chemically synthesized
agagacaggagtgtagtggc

SEQ ID NO: 25891 - DNA, 20 bp, Artificial Sequence
  chemically synthesized
ggagtgtagtggcaggatca

SEQ ID NO: 25892 - DNA, 20 bp, Artificial Sequence
  chemically synthesized
tcactgcaacctcgaactcc

SEQ ID NO: 25893 - DNA, 20 bp, Artificial Sequence
  chemically synthesized
cactgcaacctcgaactcct

SEQ ID NO: 25894 - DNA, 20 bp, Artificial Sequence
  chemically synthesized
aacctcgaactcctgggctc

SEQ ID NO: 25895 - DNA, 20 bp, Artificial Sequence
  chemically synthesized
ctcaagccatcctcccacct

SEQ ID NO: 25896 - DNA, 20 bp, Artificial Sequence
  chemically synthesized
tcctcccacctcagcctccc

SEQ ID NO: 25897 - DNA, 20 bp, Artificial Sequence
  chemically synthesized
tcccacctcagcctcccaag

SEQ ID NO: 25898 - DNA, 20 bp, Artificial Sequence
  chemically synthesized
acctcagcctcccaagtagt

SEQ ID NO: 25899 - DNA, 20 bp, Artificial Sequence
  chemically synthesized
cctcagcctcccaagtagtt

SEQ ID NO: 25900 - DNA, 20 bp, Artificial Sequence
  chemically synthesized
tcccaagtagttaggactta

SEQ ID NO: 25901 - DNA, 20 bp, Artificial Sequence
  chemically synthesized
cccaagtagttaggacttac

SEQ ID NO: 25902 - DNA, 20 bp, Artificial Sequence
  chemically synthesized
caggtgtgcaccactgtgcc

SEQ ID NO: 25903 - DNA, 20 bp, Artificial Sequence
  chemically synthesized
gcaaattaaaaaaaattttt

SEQ ID NO: 25904 - DNA, 20 bp, Artificial Sequence
  chemically synthesized
aaattaaaaaaaatttttta

SEQ ID NO: 25905 - DNA, 20 bp, Artificial Sequence
  chemically synthesized
aaaaaaattttttagagaaa

SEQ ID NO: 25906 - DNA, 20 bp, Artificial Sequence
  chemically synthesized
aaaaaattttttagagaaat

SEQ ID NO: 25907 - DNA, 20 bp, Artificial Sequence
  chemically synthesized
aaaaattttttagagaaatg

SEQ ID NO: 25908 - DNA, 20 bp, Artificial Sequence
  chemically synthesized
tggggtcttgctatgttgcc

SEQ ID NO: 25909 - DNA, 20 bp, Artificial Sequence
  chemically synthesized
ggggtcttgctatgttgccc

SEQ ID NO: 25910 - DNA, 20 bp, Artificial Sequence
  chemically synthesized
tcttgctatgttgcccaggc

SEQ ID NO: 25911 - DNA, 20 bp, Artificial Sequence
  chemically synthesized
tgctatgttgcccaggctgg

SEQ ID NO: 25912 - DNA, 20 bp, Artificial Sequence
  chemically synthesized
gctatgttgcccaggctggt

SEQ ID NO: 25913 - DNA, 20 bp, Artificial Sequence
  chemically synthesized
gttgcccaggctggtgggaa

SEQ ID NO: 25914 - DNA, 20 bp, Artificial Sequence
  chemically synthesized
ggctggtgggaaaagatttt

SEQ ID NO: 25915 - DNA, 20 bp, Artificial Sequence
  chemically synthesized
gctggtgggaaaagatttta

SEQ ID NO: 25916 - DNA, 20 bp, Artificial Sequence
  chemically synthesized
gtgggaaaagattttaaggt

SEQ ID NO: 25917 - DNA, 20 bp, Artificial Sequence
  chemically synthesized
gggaaaagattttaaggtga

SEQ ID NO: 25918 - DNA, 20 bp, Artificial Sequence
  chemically synthesized
gaaaagattttaaggtgaga

SEQ ID NO: 25919 - DNA, 20 bp, Artificial Sequence
  chemically synthesized
ttttaaggtgagagagatct

SEQ ID NO: 25920 - DNA, 20 bp, Artificial Sequence
  chemically synthesized
taaggtgagagagatctgag

SEQ ID NO: 25921 - DNA, 20 bp, Artificial Sequence
  chemically synthesized
gagagagatctgagcagtgc

SEQ ID NO: 25922 - DNA, 20 bp, Artificial Sequence
  chemically synthesized
agagagatctgagcagtgct

SEQ ID NO: 25923 - DNA, 20 bp, Artificial Sequence
  chemically synthesized
gagatctgagcagtgctagg

SEQ ID NO: 25924 - DNA, 20 bp, Artificial Sequence
  chemically synthesized
atctgagcagtgctaggcag

SEQ ID NO: 25925 - DNA, 20 bp, Artificial Sequence
  chemically synthesized
tctgagcagtgctaggcaga

SEQ ID NO: 25926 - DNA, 20 bp, Artificial Sequence
  chemically synthesized
ctgagcagtgctaggcagaa

SEQ ID NO: 25927 - DNA, 20 bp, Artificial Sequence
  chemically synthesized
gcagtgctaggcagaagggc

SEQ ID NO: 25928 - DNA, 20 bp, Artificial Sequence
  chemically synthesized
agtgctaggcagaagggcaa

SEQ ID NO: 25929 - DNA, 20 bp, Artificial Sequence
  chemically synthesized
ctaggcagaagggcaagagc

SEQ ID NO: 25930 - DNA, 20 bp, Artificial Sequence
  chemically synthesized
taggcagaagggcaagagcc

SEQ ID NO: 25931 - DNA, 20 bp, Artificial Sequence
  chemically synthesized
agaagggcaagagccaggaa

SEQ ID NO: 25932 - DNA, 20 bp, Artificial Sequence
  chemically synthesized
aagggcaagagccaggaatg

SEQ ID NO: 25933 - DNA, 20 bp, Artificial Sequence
  chemically synthesized
agggcaagagccaggaatgg

SEQ ID NO: 25934 - DNA, 20 bp, Artificial Sequence
  chemically synthesized
ggcaagagccaggaatggag

SEQ ID NO: 25935 - DNA, 20 bp, Artificial Sequence
  chemically synthesized
agccaggaatggaggagtgt

SEQ ID NO: 25936 - DNA, 20 bp, Artificial Sequence
  chemically synthesized
gccaggaatggaggagtgtc

SEQ ID NO: 25937 - DNA, 20 bp, Artificial Sequence
  chemically synthesized
atggaggagtgtcaggtgtg

SEQ ID NO: 25938 - DNA, 20 bp, Artificial Sequence
  chemically synthesized
tggaggagtgtcaggtgtgt

SEQ ID NO: 25939 - DNA, 20 bp, Artificial Sequence
  chemically synthesized
agtgtcaggtgtgtgggtgc

SEQ ID NO: 25940 - DNA, 20 bp, Artificial Sequence
  chemically synthesized
gtcaggtgtgtgggtgctgg

SEQ ID NO: 25941 - DNA, 20 bp, Artificial Sequence
  chemically synthesized
aggtgtgtgggtgctggtgg

SEQ ID NO: 25942 - DNA, 20 bp, Artificial Sequence
  chemically synthesized
gtgtgtgggtgctggtggtg

SEQ ID NO: 25943 - DNA, 20 bp, Artificial Sequence
  chemically synthesized
gtgggtgctggtggtggagc

SEQ ID NO: 25944 - DNA, 20 bp, Artificial Sequence
  chemically synthesized
tgggtgctggtggtggagcc

SEQ ID NO: 25945 - DNA, 20 bp, Artificial Sequence
  chemically synthesized
ggtggtggagccgggttcca

SEQ ID NO: 25946 - DNA, 20 bp, Artificial Sequence
  chemically synthesized
tggtggagccgggttccatg

SEQ ID NO: 25947 - DNA, 20 bp, Artificial Sequence
  chemically synthesized
ggtggagccgggttccatgg

SEQ ID NO: 25948 - DNA, 20 bp, Artificial Sequence
  chemically synthesized
ggagccgggttccatggagg

SEQ ID NO: 25949 - DNA, 20 bp, Artificial Sequence
  chemically synthesized
gagccgggttccatggaggc

SEQ ID NO: 25950 - DNA, 20 bp, Artificial Sequence
  chemically synthesized
gccgggttccatggaggcag

SEQ ID NO: 25951 - DNA, 20 bp, Artificial Sequence
  chemically synthesized
ccgggttccatggaggcagg

SEQ ID NO: 25952 - DNA, 20 bp, Artificial Sequence
  chemically synthesized
gggttccatggaggcaggag

SEQ ID NO: 25953 - DNA, 20 bp, Artificial Sequence
  chemically synthesized
ttccatggaggcaggaggag

SEQ ID NO: 25954 - DNA, 20 bp, Artificial Sequence
  chemically synthesized
tccatggaggcaggaggagc

SEQ ID NO: 25955 - DNA, 20 bp, Artificial Sequence
  chemically synthesized
ccatggaggcaggaggagca

SEQ ID NO: 25956 - DNA, 20 bp, Artificial Sequence
  chemically synthesized
catggaggcaggaggagcag

SEQ ID NO: 25957 - DNA, 20 bp, Artificial Sequence
  chemically synthesized
aggcaggaggagcaggggct

SEQ ID NO: 25958 - DNA, 20 bp, Artificial Sequence
  chemically synthesized
gcaggaggagcaggggcttg

SEQ ID NO: 25959 - DNA, 20 bp, Artificial Sequence
  chemically synthesized
aggagcaggggcttggagct

SEQ ID NO: 25960 - DNA, 20 bp, Artificial Sequence
  chemically synthesized
ggagcaggggcttggagctt

SEQ ID NO: 25961 - DNA, 20 bp, Artificial Sequence
  chemically synthesized
gcaggggcttggagcttagg

SEQ ID NO: 25962 - DNA, 20 bp, Artificial Sequence
  chemically synthesized
caggggcttggagcttagga

SEQ ID NO: 25963 - DNA, 20 bp, Artificial Sequence
  chemically synthesized
aggggcttggagcttaggaa

SEQ ID NO: 25964 - DNA, 20 bp, Artificial Sequence
  chemically synthesized
ggggcttggagcttaggaag

SEQ ID NO: 25965 - DNA, 20 bp, Artificial Sequence
  chemically synthesized
ttggagcttaggaaggggat

SEQ ID NO: 25966 - DNA, 20 bp, Artificial Sequence
  chemically synthesized
agcttaggaaggggattggt

SEQ ID NO: 25967 - DNA, 20 bp, Artificial Sequence
  chemically synthesized
taggaaggggattggttagc

SEQ ID NO: 25968 - DNA, 20 bp, Artificial Sequence
  chemically synthesized
aggaaggggattggttagct

SEQ ID NO: 25969 - DNA, 20 bp, Artificial Sequence
  chemically synthesized
aggggattggttagctgggc

SEQ ID NO: 25970 - DNA, 20 bp, Artificial Sequence
  chemically synthesized
ttggttagctgggctggaat

SEQ ID NO: 25971 - DNA, 20 bp, Artificial Sequence
  chemically synthesized
tggttagctgggctggaatg

SEQ ID NO: 25972 - DNA, 20 bp, Artificial Sequence
  chemically synthesized
ggttagctgggctggaatga

SEQ ID NO: 25973 - DNA, 20 bp, Artificial Sequence
  chemically synthesized
atgagggactcctcattcct

SEQ ID NO: 25974 - DNA, 20 bp, Artificial Sequence
  chemically synthesized
tgagggactcctcattcctg

SEQ ID NO: 25975 - DNA, 20 bp, Artificial Sequence
  chemically synthesized
ggactcctcattcctgaggc

SEQ ID NO: 25976 - DNA, 20 bp, Artificial Sequence
  chemically synthesized
attcctgaggctggccaacc

SEQ ID NO: 25977 - DNA, 20 bp, Artificial Sequence
  chemically synthesized
ttcctgaggctggccaaccg

SEQ ID NO: 25978 - DNA, 20 bp, Artificial Sequence
  chemically synthesized
tcctgaggctggccaaccga

SEQ ID NO: 25979 - DNA, 20 bp, Artificial Sequence
  chemically synthesized
ctgaggctggccaaccgagg

SEQ ID NO: 25980 - DNA, 20 bp, Artificial Sequence
  chemically synthesized
tgaggctggccaaccgaggg

SEQ ID NO: 25981 - DNA, 20 bp, Artificial Sequence
  chemically synthesized
gaggctggccaaccgaggga

SEQ ID NO: 25982 - DNA, 20 bp, Artificial Sequence
  chemically synthesized
ctggccaaccgagggagggc

SEQ ID NO: 25983 - DNA, 20 bp, Artificial Sequence
  chemically synthesized
aaccgagggagggccggtgc

SEQ ID NO: 25984 - DNA, 20 bp, Artificial Sequence
  chemically synthesized
accgagggagggccggtgct

SEQ ID NO: 25985 - DNA, 20 bp, Artificial Sequence
  chemically synthesized
gagggagggccggtgctggg

SEQ ID NO: 25986 - DNA, 20 bp, Artificial Sequence
  chemically synthesized
agggagggccggtgctgggc

SEQ ID NO: 25987 - DNA, 20 bp, Artificial Sequence
  chemically synthesized
gggagggccggtgctgggca

SEQ ID NO: 25988 - DNA, 20 bp, Artificial Sequence
  chemically synthesized
agggccggtgctgggcaggg

SEQ ID NO: 25989 - DNA, 20 bp, Artificial Sequence
  chemically synthesized
gggccggtgctgggcagggc

SEQ ID NO: 25990 - DNA, 20 bp, Artificial Sequence
  chemically synthesized
ggccggtgctgggcagggca

SEQ ID NO: 25991 - DNA, 20 bp, Artificial Sequence
  chemically synthesized
cggtgctgggcagggcaggg

SEQ ID NO: 25992 - DNA, 20 bp, Artificial Sequence
  chemically synthesized
ggtgctgggcagggcagggc

SEQ ID NO: 25993 - DNA, 20 bp, Artificial Sequence
  chemically synthesized
gtgctgggcagggcagggca

SEQ ID NO: 25994 - DNA, 20 bp, Artificial Sequence
  chemically synthesized
tgctgggcagggcagggcag

SEQ ID NO: 25995 - DNA, 20 bp, Artificial Sequence
  chemically synthesized
gggcagggcagggcagggga

SEQ ID NO: 25996 - DNA, 20 bp, Artificial Sequence
  chemically synthesized
ggcagggcagggcaggggac

SEQ ID NO: 25997 - DNA, 20 bp, Artificial Sequence
  chemically synthesized
cagggcagggcaggggacag

SEQ ID NO: 25998 - DNA, 20 bp, Artificial Sequence
  chemically synthesized
agggcagggcaggggacagg

SEQ ID NO: 25999 - DNA, 20 bp, Artificial Sequence
  chemically synthesized
gggcagggcaggggacagga

SEQ ID NO: 26000 - DNA, 20 bp, Artificial Sequence
  chemically synthesized
agggcaggggacaggaggga

SEQ ID NO: 26001 - DNA, 20 bp, Artificial Sequence
  chemically synthesized
gggcaggggacaggagggat

SEQ ID NO: 26002 - DNA, 20 bp, Artificial Sequence
  chemically synthesized
gcaggggacaggagggatag

SEQ ID NO: 26003 - DNA, 20 bp, Artificial Sequence
  chemically synthesized
caggggacaggagggatagg

SEQ ID NO: 26004 - DNA, 20 bp, Artificial Sequence
  chemically synthesized
agggataggaggtccctccc

SEQ ID NO: 26005 - DNA, 20 bp, Artificial Sequence
  chemically synthesized
gggataggaggtccctcccg

SEQ ID NO: 26006 - DNA, 20 bp, Artificial Sequence
  chemically synthesized
ggtccctcccgaggaccact

SEQ ID NO: 26007 - DNA, 20 bp, Artificial Sequence
  chemically synthesized
gtccctcccgaggaccactc

SEQ ID NO: 26008 - DNA, 20 bp, Artificial Sequence
  chemically synthesized
cgaggaccactcaggaacac

SEQ ID NO: 26009 - DNA, 20 bp, Artificial Sequence
  chemically synthesized
ggaccactcaggaacaccag

SEQ ID NO: 26010 - DNA, 20 bp, Artificial Sequence
  chemically synthesized
agtagcatctcctctctctg

SEQ ID NO: 26011 - DNA, 20 bp, Artificial Sequence
  chemically synthesized
gtagcatctcctctctctgt

SEQ ID NO: 26012 - DNA, 20 bp, Artificial Sequence
  chemically synthesized
tagcatctcctctctctgta

SEQ ID NO: 26013 - DNA, 20 bp, Artificial Sequence
  chemically synthesized
agcatctcctctctctgtag

SEQ ID NO: 26014 - DNA, 20 bp, Artificial Sequence
  chemically synthesized
gcatctcctctctctgtagg

SEQ ID NO: 26015 - DNA, 20 bp, Artificial Sequence
  chemically synthesized
ctcctctctctgtagggggc

SEQ ID NO: 26016 - DNA, 20 bp, Artificial Sequence
  chemically synthesized
tctctctgtagggggctggc

SEQ ID NO: 26017 - DNA, 20 bp, Artificial Sequence
  chemically synthesized
gggctggctggacttcccac

SEQ ID NO: 26018 - DNA, 20 bp, Artificial Sequence
  chemically synthesized
ggctggctggacttcccacc

SEQ ID NO: 26019 - DNA, 20 bp, Artificial Sequence
  chemically synthesized
tggctggacttcccaccagg

SEQ ID NO: 26020 - DNA, 20 bp, Artificial Sequence
  chemically synthesized
cccaccaggcggtgtcccca

SEQ ID NO: 26021 - DNA, 20 bp, Artificial Sequence
  chemically synthesized
ccaccaggcggtgtccccac

SEQ ID NO: 26022 - DNA, 20 bp, Artificial Sequence
  chemically synthesized
ccaggcggtgtccccacagg

SEQ ID NO: 26023 - DNA, 20 bp, Artificial Sequence
  chemically synthesized
aggcggtgtccccacaggca

SEQ ID NO: 26024 - DNA, 20 bp, Artificial Sequence
  chemically synthesized
ggcggtgtccccacaggcag

SEQ ID NO: 26025 - DNA, 20 bp, Artificial Sequence
  chemically synthesized
ctcactctcctctgcaactc

SEQ ID NO: 26026 - DNA, 20 bp, Artificial Sequence
  chemically synthesized
ctgcaactccagtgcccaca

SEQ ID NO: 26027 - DNA, 20 bp, Artificial Sequence
  chemically synthesized
tccagtgcccacacggcacc

SEQ ID NO: 26028 - DNA, 20 bp, Artificial Sequence
  chemically synthesized
cccacacggcacccggtaca

SEQ ID NO: 26029 - DNA, 20 bp, Artificial Sequence
  chemically synthesized
cccggtacatagtgaacact

SEQ ID NO: 26030 - DNA, 20 bp, Artificial Sequence
  chemically synthesized
cggtacatagtgaacactca

SEQ ID NO: 26031 - DNA, 20 bp, Artificial Sequence
  chemically synthesized
gtacatagtgaacactcaga

SEQ ID NO: 26032 - DNA, 20 bp, Artificial Sequence
  chemically synthesized
gtgaacactcagagagaata

SEQ ID NO: 26033 - DNA, 20 bp, Artificial Sequence
  chemically synthesized
tgaacactcagagagaatac

SEQ ID NO: 26034 - DNA, 20 bp, Artificial Sequence
  chemically synthesized
gggatgctgctgaatcttct

SEQ ID NO: 26035 - DNA, 20 bp, Artificial Sequence
  chemically synthesized
ggatgctgctgaatcttctg

SEQ ID NO: 26036 - DNA, 20 bp, Artificial Sequence
  chemically synthesized
gatgctgctgaatcttctga

SEQ ID NO: 26037 - DNA, 20 bp, Artificial Sequence
  chemically synthesized
gctgaatcttctgagggtga

SEQ ID NO: 26038 - DNA, 20 bp, Artificial Sequence
  chemically synthesized
cttctgagggtgacagaatt

SEQ ID NO: 26039 - DNA, 20 bp, Artificial Sequence
  chemically synthesized
tctgagggtgacagaattta

SEQ ID NO: 26040 - DNA, 20 bp, Artificial Sequence
  chemically synthesized
ggtgacagaatttagagttt

SEQ ID NO: 26041 - DNA, 20 bp, Artificial Sequence
  chemically synthesized
gacagaatttagagtttgag

SEQ ID NO: 26042 - DNA, 20 bp, Artificial Sequence
  chemically synthesized
acagaatttagagtttgagc

SEQ ID NO: 26043 - DNA, 20 bp, Artificial Sequence
  chemically synthesized
agaatttagagtttgagcag

SEQ ID NO: 26044 - DNA, 20 bp, Artificial Sequence
  chemically synthesized
gaatttagagtttgagcagg

SEQ ID NO: 26045 - DNA, 20 bp, Artificial Sequence
  chemically synthesized
tagagtttgagcaggaggct

SEQ ID NO: 26046 - DNA, 20 bp, Artificial Sequence
  chemically synthesized
gagtttgagcaggaggcttg

SEQ ID NO: 26047 - DNA, 20 bp, Artificial Sequence
  chemically synthesized
gtttgagcaggaggcttgga

SEQ ID NO: 26048 - DNA, 20 bp, Artificial Sequence
  chemically synthesized
ttgagcaggaggcttggaga

SEQ ID NO: 26049 - DNA, 20 bp, Artificial Sequence
  chemically synthesized
tgagcaggaggcttggagag

SEQ ID NO: 26050 - DNA, 20 bp, Artificial Sequence
  chemically synthesized
caggaggcttggagagaggc

SEQ ID NO: 26051 - DNA, 20 bp, Artificial Sequence
  chemically synthesized
aggaggcttggagagaggcc

SEQ ID NO: 26052 - DNA, 20 bp, Artificial Sequence
  chemically synthesized
gccaggatttctgaaattaa

SEQ ID NO: 26053 - DNA, 20 bp, Artificial Sequence
  chemically synthesized
ccaggatttctgaaattaat

SEQ ID NO: 26054 - DNA, 20 bp, Artificial Sequence
  chemically synthesized
aggatttctgaaattaatgg

SEQ ID NO: 26055 - DNA, 20 bp, Artificial Sequence
  chemically synthesized
gatttctgaaattaatggga

SEQ ID NO: 26056 - DNA, 20 bp, Artificial Sequence
  chemically synthesized
tctgaaattaatgggagagt

SEQ ID NO: 26057 - DNA, 20 bp, Artificial Sequence
  chemically synthesized
ggagagtgagctcacgcgaa

SEQ ID NO: 26058 - DNA, 20 bp, Artificial Sequence
  chemically synthesized
gagagtgagctcacgcgaat

SEQ ID NO: 26059 - DNA, 20 bp, Artificial Sequence
  chemically synthesized
tgagctcacgcgaatgggct

SEQ ID NO: 26060 - DNA, 20 bp, Artificial Sequence
  chemically synthesized
gagctcacgcgaatgggctg

SEQ ID NO: 26061 - DNA, 20 bp, Artificial Sequence
  chemically synthesized
agctcacgcgaatgggctga

SEQ ID NO: 26062 - DNA, 20 bp, Artificial Sequence
  chemically synthesized
gcgaatgggctgagggacac

SEQ ID NO: 26063 - DNA, 20 bp, Artificial Sequence
  chemically synthesized
atgggctgagggacaccagt

SEQ ID NO: 26064 - DNA, 20 bp, Artificial Sequence
  chemically synthesized
tgggctgagggacaccagtg

SEQ ID NO: 26065 - DNA, 20 bp, Artificial Sequence
  chemically synthesized
gggctgagggacaccagtga

SEQ ID NO: 26066 - DNA, 20 bp, Artificial Sequence
  chemically synthesized
caccagtgagggaccgtctg

SEQ ID NO: 26067 - DNA, 20 bp, Artificial Sequence
  chemically synthesized
accagtgagggaccgtctga

SEQ ID NO: 26068 - DNA, 20 bp, Artificial Sequence
  chemically synthesized
ccagtgagggaccgtctgaa

SEQ ID NO: 26069 - DNA, 20 bp, Artificial Sequence
  chemically synthesized
agggaccgtctgaagggatg

SEQ ID NO: 26070 - DNA, 20 bp, Artificial Sequence
  chemically synthesized
ccgtctgaagggatgtagca

SEQ ID NO: 26071 - DNA, 20 bp, Artificial Sequence
  chemically synthesized
aaagtcaccgcatttccctc

SEQ ID NO: 26072 - DNA, 20 bp, Artificial Sequence
  chemically synthesized
gtcaccgcatttccctccag

SEQ ID NO: 26073 - DNA, 20 bp, Artificial Sequence
  chemically synthesized
cgcatttccctccagcagcc

SEQ ID NO: 26074 - DNA, 20 bp, Artificial Sequence
  chemically synthesized
gcatttccctccagcagccc

SEQ ID NO: 26075 - DNA, 20 bp, Artificial Sequence
  chemically synthesized
tttccctccagcagcccggg

SEQ ID NO: 26076 - DNA, 20 bp, Artificial Sequence
  chemically synthesized
ccctccagcagcccgggtgg

SEQ ID NO: 26077 - DNA, 20 bp, Artificial Sequence
  chemically synthesized
cctccagcagcccgggtggt

SEQ ID NO: 26078 - DNA, 20 bp, Artificial Sequence
  chemically synthesized
ctccagcagcccgggtggtg

SEQ ID NO: 26079 - DNA, 20 bp, Artificial Sequence
  chemically synthesized
tccagcagcccgggtggtgg

SEQ ID NO: 26080 - DNA, 20 bp, Artificial Sequence
  chemically synthesized
gcagcccgggtggtgggggc

SEQ ID NO: 26081 - DNA, 20 bp, Artificial Sequence
  chemically synthesized
cagcccgggtggtgggggct

SEQ ID NO: 26082 - DNA, 20 bp, Artificial Sequence
  chemically synthesized
agcccgggtggtgggggctg

SEQ ID NO: 26083 - DNA, 20 bp, Artificial Sequence
  chemically synthesized
gcccgggtggtgggggctgg

SEQ ID NO: 26084 - DNA, 20 bp, Artificial Sequence
  chemically synthesized
gggctgggggaacgtcatca

SEQ ID NO: 26085 - DNA, 20 bp, Artificial Sequence
  chemically synthesized
ggctgggggaacgtcatcat

SEQ ID NO: 26086 - DNA, 20 bp, Artificial Sequence
  chemically synthesized
ctgggggaacgtcatcatgg

SEQ ID NO: 26087 - DNA, 20 bp, Artificial Sequence
  chemically synthesized
tcatgggagctgacactgat

SEQ ID NO: 26088 - DNA, 20 bp, Artificial Sequence
  chemically synthesized
gacactgatcagctgctcac

SEQ ID NO: 26089 - DNA, 20 bp, Artificial Sequence
  chemically synthesized
acactgatcagctgctcacc

SEQ ID NO: 26090 - DNA, 20 bp, Artificial Sequence
  chemically synthesized
cactgatcagctgctcaccg

SEQ ID NO: 26091 - DNA, 20 bp, Artificial Sequence
  chemically synthesized
ggcccatcttccacttgtct

SEQ ID NO: 26092 - DNA, 20 bp, Artificial Sequence
  chemically synthesized
gctaccccctttttctttta

SEQ ID NO: 26093 - DNA, 20 bp, Artificial Sequence
  chemically synthesized
atttcaattatgcatgtatt

SEQ ID NO: 26094 - DNA, 20 bp, Artificial Sequence
  chemically synthesized
tttcaattatgcatgtatta

SEQ ID NO: 26095 - DNA, 20 bp, Artificial Sequence
  chemically synthesized
ttcaattatgcatgtattaa

SEQ ID NO: 26096 - DNA, 20 bp, Artificial Sequence
  chemically synthesized
tgcatgtattaagggtccca

SEQ ID NO: 26097 - DNA, 20 bp, Artificial Sequence
  chemically synthesized
tttttaattcttttttctcc

SEQ ID NO: 26098 - DNA, 20 bp, Artificial Sequence
  chemically synthesized
tctcccagtgtttcatttta

SEQ ID NO: 26099 - DNA, 20 bp, Artificial Sequence
  chemically synthesized
tcccagtgtttcattttata

SEQ ID NO: 26100 - DNA, 20 bp, Artificial Sequence
  chemically synthesized
tagagttattgctgttcatt

SEQ ID NO: 26101 - DNA, 20 bp, Artificial Sequence
  chemically synthesized
tctcatctcactctgttgcc

SEQ ID NO: 26102 - DNA, 20 bp, Artificial Sequence
  chemically synthesized
ctcatctcactctgttgccc

SEQ ID NO: 26103 - DNA, 20 bp, Artificial Sequence
  chemically synthesized
tctcactctgttgcccaggc

SEQ ID NO: 26104 - DNA, 20 bp, Artificial Sequence
  chemically synthesized
ctgttgcccaggctggaatg

SEQ ID NO: 26105 - DNA, 20 bp, Artificial Sequence
  chemically synthesized
ttgcccaggctggaatgcag

SEQ ID NO: 26106 - DNA, 20 bp, Artificial Sequence
  chemically synthesized
tagcttgtcacaactcactg

SEQ ID NO: 26107 - DNA, 20 bp, Artificial Sequence
  chemically synthesized
tcactgtggcctccacctcc

SEQ ID NO: 26108 - DNA, 20 bp, Artificial Sequence
  chemically synthesized
cactgtggcctccacctcct

SEQ ID NO: 26109 - DNA, 20 bp, Artificial Sequence
  chemically synthesized
tggcctccacctcctgggct

SEQ ID NO: 26110 - DNA, 20 bp, Artificial Sequence
  chemically synthesized
ggcctccacctcctgggctc

SEQ ID NO: 26111 - DNA, 20 bp, Artificial Sequence
  chemically synthesized
ctcaggcgatccttccactt

SEQ ID NO: 26112 - DNA, 20 bp, Artificial Sequence
  chemically synthesized
atccttccacttcagcctcc

SEQ ID NO: 26113 - DNA, 20 bp, Artificial Sequence
  chemically synthesized
tccttccacttcagcctccc

SEQ ID NO: 26114 - DNA, 20 bp, Artificial Sequence
  chemically synthesized
ttccacttcagcctcccagg

SEQ ID NO: 26115 - DNA, 20 bp, Artificial Sequence
  chemically synthesized
acttcagcctcccaggtagc

SEQ ID NO: 26116 - DNA, 20 bp, Artificial Sequence
  chemically synthesized
cttcagcctcccaggtagct

SEQ ID NO: 26117 - DNA, 20 bp, Artificial Sequence
  chemically synthesized
ctcccaggtagctgggacta

SEQ ID NO: 26118 - DNA, 20 bp, Artificial Sequence
  chemically synthesized
tcccaggtagctgggactat

SEQ ID NO: 26119 - DNA, 20 bp, Artificial Sequence
  chemically synthesized
tagctgggactataggcatg

SEQ ID NO: 26120 - DNA, 20 bp, Artificial Sequence
  chemically synthesized
taggcatgtggcaccacacc

SEQ ID NO: 26121 - DNA, 20 bp, Artificial Sequence
  chemically synthesized
taattaaaaatttttttttg

SEQ ID NO: 26122 - DNA, 20 bp, Artificial Sequence
  chemically synthesized
attaaaaatttttttttgta

SEQ ID NO: 26123 - DNA, 20 bp, Artificial Sequence
  chemically synthesized
aaaatttttttttgtagaga

SEQ ID NO: 26124 - DNA, 20 bp, Artificial Sequence
  chemically synthesized
gtagagacggttttgccatg

SEQ ID NO: 26125 - DNA, 20 bp, Artificial Sequence
  chemically synthesized
agagacggttttgccatgta

SEQ ID NO: 26126 - DNA, 20 bp, Artificial Sequence
  chemically synthesized
gagacggttttgccatgtag

SEQ ID NO: 26127 - DNA, 20 bp, Artificial Sequence
  chemically synthesized
agacggttttgccatgtaga

SEQ ID NO: 26128 - DNA, 20 bp, Artificial Sequence
  chemically synthesized
gacggttttgccatgtagag

SEQ ID NO: 26129 - DNA, 20 bp, Artificial Sequence
  chemically synthesized
aggggttttgccatgctgcc

SEQ ID NO: 26130 - DNA, 20 bp, Artificial Sequence
  chemically synthesized
ttttgccatgctgcccagac

SEQ ID NO: 26131 - DNA, 20 bp, Artificial Sequence
  chemically synthesized
atgctgcccagactagtctt

SEQ ID NO: 26132 - DNA, 20 bp, Artificial Sequence
  chemically synthesized
ccagactagtcttgagctcc

SEQ ID NO: 26133 - DNA, 20 bp, Artificial Sequence
  chemically synthesized
cagactagtcttgagctcct

SEQ ID NO: 26134 - DNA, 20 bp, Artificial Sequence
  chemically synthesized
agtcttgagctcctgggctc

SEQ ID NO: 26135 - DNA, 20 bp, Artificial Sequence
  chemically synthesized
ccccccgtgtcgacctccca

SEQ ID NO: 26136 - DNA, 20 bp, Artificial Sequence
  chemically synthesized
gtgtcgacctcccaaagtgc

SEQ ID NO: 26137 - DNA, 20 bp, Artificial Sequence
  chemically synthesized
tgtcgacctcccaaagtgct

SEQ ID NO: 26138 - DNA, 20 bp, Artificial Sequence
  chemically synthesized
ctcccaaagtgctgggatta

SEQ ID NO: 26139 - DNA, 20 bp, Artificial Sequence
  chemically synthesized
gggattacagatgtgatcca

SEQ ID NO: 26140 - DNA, 20 bp, Artificial Sequence
  chemically synthesized
cagatgtgatccacagtgcc

SEQ ID NO: 26141 - DNA, 20 bp, Artificial Sequence
  chemically synthesized
catcttccattatttccatc

SEQ ID NO: 26142 - DNA, 20 bp, Artificial Sequence
  chemically synthesized
tcttttcttttttttttttt

SEQ ID NO: 26143 - DNA, 20 bp, Artificial Sequence
  chemically synthesized
ttttcttttttttttttttg

SEQ ID NO: 26144 - DNA, 20 bp, Artificial Sequence
  chemically synthesized
tttcttttttttttttttgg

SEQ ID NO: 26145 - DNA, 20 bp, Artificial Sequence
  chemically synthesized
cttttttttttttttggagg

SEQ ID NO: 26146 - DNA, 20 bp, Artificial Sequence
  chemically synthesized
tttttttttttttggaggcg

SEQ ID NO: 26147 - DNA, 20 bp, Artificial Sequence
  chemically synthesized
cggagtctcgctctgttgcc

SEQ ID NO: 26148 - DNA, 20 bp, Artificial Sequence
  chemically synthesized
ggagtctcgctctgttgccc

SEQ ID NO: 26149 - DNA, 20 bp, Artificial Sequence
  chemically synthesized
tctcgctctgttgcccaggc

SEQ ID NO: 26150 - DNA, 20 bp, Artificial Sequence
  chemically synthesized
tcgctctgttgcccaggccg

SEQ ID NO: 26151 - DNA, 20 bp, Artificial Sequence
  chemically synthesized
ctgttgcccaggccggagtg

SEQ ID NO: 26152 - DNA, 20 bp, Artificial Sequence
  chemically synthesized
ttgcccaggccggagtgcag

SEQ ID NO: 26153 - DNA, 20 bp, Artificial Sequence
  chemically synthesized
ggagtgcagtggcgcgatct

SEQ ID NO: 26154 - DNA, 20 bp, Artificial Sequence
  chemically synthesized
gcgcgatcttggctcactgc

SEQ ID NO: 26155 - DNA, 20 bp, Artificial Sequence
  chemically synthesized
tcactgcaagctctgcctcc

SEQ ID NO: 26156 - DNA, 20 bp, Artificial Sequence
  chemically synthesized
cactgcaagctctgcctccc

SEQ ID NO: 26157 - DNA, 20 bp, Artificial Sequence
  chemically synthesized
ttcatgccattctcctgcct

SEQ ID NO: 26158 - DNA, 20 bp, Artificial Sequence
  chemically synthesized
ttctcctgcctcagcctccc

SEQ ID NO: 26159 - DNA, 20 bp, Artificial Sequence
  chemically synthesized
tcctgcctcagcctcccgag

SEQ ID NO: 26160 - DNA, 20 bp, Artificial Sequence
  chemically synthesized
gcctcagcctcccgagtagc

SEQ ID NO: 26161 - DNA, 20 bp, Artificial Sequence
  chemically synthesized
cctcagcctcccgagtagct

SEQ ID NO: 26162 - DNA, 20 bp, Artificial Sequence
  chemically synthesized
ctcccgagtagctgggacta

SEQ ID NO: 26163 - DNA, 20 bp, Artificial Sequence
  chemically synthesized
tcccgagtagctgggactac

SEQ ID NO: 26164 - DNA, 20 bp, Artificial Sequence
  chemically synthesized
caggcgcctgccaccacgtc

SEQ ID NO: 26165 - DNA, 20 bp, Artificial Sequence
  chemically synthesized
tggctaattttttgtatttt

SEQ ID NO: 26166 - DNA, 20 bp, Artificial Sequence
  chemically synthesized
ctaattttttgtatttttag

SEQ ID NO: 26167 - DNA, 20 bp, Artificial Sequence
  chemically synthesized
aattttttgtatttttagta

SEQ ID NO: 26168 - DNA, 20 bp, Artificial Sequence
  chemically synthesized
ttttgtatttttagtagaga

SEQ ID NO: 26169 - DNA, 20 bp, Artificial Sequence
  chemically synthesized
tttgtatttttagtagagat

SEQ ID NO: 26170 - DNA, 20 bp, Artificial Sequence
  chemically synthesized
ttgtatttttagtagagatg

SEQ ID NO: 26171 - DNA, 20 bp, Artificial Sequence
  chemically synthesized
gagatggggtttcaccatgt

SEQ ID NO: 26172 - DNA, 20 bp, Artificial Sequence
  chemically synthesized
tggggtttcaccatgttagc

SEQ ID NO: 26173 - DNA, 20 bp, Artificial Sequence
  chemically synthesized
ggggtttcaccatgttagcc

SEQ ID NO: 26174 - DNA, 20 bp, Artificial Sequence
  chemically synthesized
tttcaccatgttagccagga

SEQ ID NO: 26175 - DNA, 20 bp, Artificial Sequence
  chemically synthesized
acctcatgatctgcccgcct

SEQ ID NO: 26176 - DNA, 20 bp, Artificial Sequence
  chemically synthesized
ctgcccgccttggcctccca

SEQ ID NO: 26177 - DNA, 20 bp, Artificial Sequence
  chemically synthesized
gccttggcctcccacagtgc

SEQ ID NO: 26178 - DNA, 20 bp, Artificial Sequence
  chemically synthesized
ccttggcctcccacagtgct

SEQ ID NO: 26179 - DNA, 20 bp, Artificial Sequence
  chemically synthesized
ctcccacagtgctgggattc

SEQ ID NO: 26180 - DNA, 20 bp, Artificial Sequence
  chemically synthesized
tcccacagtgctgggattcc

SEQ ID NO: 26181 - DNA, 20 bp, Artificial Sequence
  chemically synthesized
agtgctgggattccaggcgt

SEQ ID NO: 26182 - DNA, 20 bp, Artificial Sequence
  chemically synthesized
gggattccaggcgtgagcca

SEQ ID NO: 26183 - DNA, 20 bp, Artificial Sequence
  chemically synthesized
caggcgtgagccacggcgcc

SEQ ID NO: 26184 - DNA, 20 bp, Artificial Sequence
  chemically synthesized
cgtgagccacggcgcctggc

SEQ ID NO: 26185 - DNA, 20 bp, Artificial Sequence
  chemically synthesized
gccagtgtgttttttcattt

SEQ ID NO: 26186 - DNA, 20 bp, Artificial Sequence
  chemically synthesized
ttttttcatttcagacattg

SEQ ID NO: 26187 - DNA, 20 bp, Artificial Sequence
  chemically synthesized
gacattgtagtttttatctc

SEQ ID NO: 26188 - DNA, 20 bp, Artificial Sequence
  chemically synthesized
attgtagtttttatctctag

SEQ ID NO: 26189 - DNA, 20 bp, Artificial Sequence
  chemically synthesized
tttatctctagaagttcacc

SEQ ID NO: 26190 - DNA, 20 bp, Artificial Sequence
  chemically synthesized
ttatctctagaagttcacct

SEQ ID NO: 26191 - DNA, 20 bp, Artificial Sequence
  chemically synthesized
tatctctagaagttcacctg

SEQ ID NO: 26192 - DNA, 20 bp, Artificial Sequence
  chemically synthesized
acttaattttttgaacataa

SEQ ID NO: 26193 - DNA, 20 bp, Artificial Sequence
  chemically synthesized
cttaattttttgaacataat

SEQ ID NO: 26194 - DNA, 20 bp, Artificial Sequence
  chemically synthesized
tttttgaacataatgggata

SEQ ID NO: 26195 - DNA, 20 bp, Artificial Sequence
  chemically synthesized
ccatccttgcctgctaattc

SEQ ID NO: 26196 - DNA, 20 bp, Artificial Sequence
  chemically synthesized
gctaattctagcatccgtgt

SEQ ID NO: 26197 - DNA, 20 bp, Artificial Sequence
  chemically synthesized
tctagcatccgtgtcagttc

SEQ ID NO: 26198 - DNA, 20 bp, Artificial Sequence
  chemically synthesized
catgccttgtaatctttgat

SEQ ID NO: 26199 - DNA, 20 bp, Artificial Sequence
  chemically synthesized
tgtaatctttgattggctgc

SEQ ID NO: 26200 - DNA, 20 bp, Artificial Sequence
  chemically synthesized
cattgtcaatttcaccttgt

SEQ ID NO: 26201 - DNA, 20 bp, Artificial Sequence
  chemically synthesized
attgtcaatttcaccttgtt

SEQ ID NO: 26202 - DNA, 20 bp, Artificial Sequence
  chemically synthesized
aatttcaccttgttgggtgc

SEQ ID NO: 26203 - DNA, 20 bp, Artificial Sequence
  chemically synthesized
gtattcctctaaatgttctt

SEQ ID NO: 26204 - DNA, 20 bp, Artificial Sequence
  chemically synthesized
aatgttcttgagctttgctc

SEQ ID NO: 26205 - DNA, 20 bp, Artificial Sequence
  chemically synthesized
atgttcttgagctttgctcc

SEQ ID NO: 26206 - DNA, 20 bp, Artificial Sequence
  chemically synthesized
ttgagctttgctccgggatg

SEQ ID NO: 26207 - DNA, 20 bp, Artificial Sequence
  chemically synthesized
ctttgctccgggatgcagtt

SEQ ID NO: 26208 - DNA, 20 bp, Artificial Sequence
  chemically synthesized
cgggatgcagttaagcaact

SEQ ID NO: 26209 - DNA, 20 bp, Artificial Sequence
  chemically synthesized
ggatgcagttaagcaactta

SEQ ID NO: 26210 - DNA, 20 bp, Artificial Sequence
  chemically synthesized
gcagttaagcaacttagagt

SEQ ID NO: 26211 - DNA, 20 bp, Artificial Sequence
  chemically synthesized
gtttgaactcttaattgttt

SEQ ID NO: 26212 - DNA, 20 bp, Artificial Sequence
  chemically synthesized
cttaattgttttggtctcct

SEQ ID NO: 26213 - DNA, 20 bp, Artificial Sequence
  chemically synthesized
ttttggtctcctcggactct

SEQ ID NO: 26214 - DNA, 20 bp, Artificial Sequence
  chemically synthesized
tcagctccatctcctcaacg

SEQ ID NO: 26215 - DNA, 20 bp, Artificial Sequence
  chemically synthesized
cagctccatctcctcaacgt

SEQ ID NO: 26216 - DNA, 20 bp, Artificial Sequence
  chemically synthesized
agctccatctcctcaacgtg

SEQ ID NO: 26217 - DNA, 20 bp, Artificial Sequence
  chemically synthesized
ctccatctcctcaacgtggg

SEQ ID NO: 26218 - DNA, 20 bp, Artificial Sequence
  chemically synthesized
cctcaacgtggggagtctct

SEQ ID NO: 26219 - DNA, 20 bp, Artificial Sequence
  chemically synthesized
ctcaacgtggggagtctctt

SEQ ID NO: 26220 - DNA, 20 bp, Artificial Sequence
  chemically synthesized
ggagtctcttgggctctgcc

SEQ ID NO: 26221 - DNA, 20 bp, Artificial Sequence
  chemically synthesized
ctgcctggacttccctttcc

SEQ ID NO: 26222 - DNA, 20 bp, Artificial Sequence
  chemically synthesized
ctttcctggcctgtaacctg

SEQ ID NO: 26223 - DNA, 20 bp, Artificial Sequence
  chemically synthesized
acctgcagactctctccaaa

SEQ ID NO: 26224 - DNA, 20 bp, Artificial Sequence
  chemically synthesized
gcagactctctccaaacagt

SEQ ID NO: 26225 - DNA, 20 bp, Artificial Sequence
  chemically synthesized
actctctccaaacagtaagc

SEQ ID NO: 26226 - DNA, 20 bp, Artificial Sequence
  chemically synthesized
ctctctccaaacagtaagct

SEQ ID NO: 26227 - DNA, 20 bp, Artificial Sequence
  chemically synthesized
tctctccaaacagtaagctg

SEQ ID NO: 26228 - DNA, 20 bp, Artificial Sequence
  chemically synthesized
aaacagtaagctggggtgat

SEQ ID NO: 26229 - DNA, 20 bp, Artificial Sequence
  chemically synthesized
acagtaagctggggtgatcg

SEQ ID NO: 26230 - DNA, 20 bp, Artificial Sequence
  chemically synthesized
cagtaagctggggtgatcgg

SEQ ID NO: 26231 - DNA, 20 bp, Artificial Sequence
  chemically synthesized
agtaagctggggtgatcgga

SEQ ID NO: 26232 - DNA, 20 bp, Artificial Sequence
  chemically synthesized
gttgtttgcttcttatccct

SEQ ID NO: 26233 - DNA, 20 bp, Artificial Sequence
  chemically synthesized
ttgtttgcttcttatccctc

SEQ ID NO: 26234 - DNA, 20 bp, Artificial Sequence
  chemically synthesized
tgtttgcttcttatccctca

SEQ ID NO: 26235 - DNA, 20 bp, Artificial Sequence
  chemically synthesized
actcctccttgcctgatgtc

SEQ ID NO: 26236 - DNA, 20 bp, Artificial Sequence
  chemically synthesized
tcctccttgcctgatgtcca

SEQ ID NO: 26237 - DNA, 20 bp, Artificial Sequence
  chemically synthesized
cctgatgtccagagtcttga

SEQ ID NO: 26238 - DNA, 20 bp, Artificial Sequence
  chemically synthesized
ttgaaagctgccatgttcta

SEQ ID NO: 26239 - DNA, 20 bp, Artificial Sequence
  chemically synthesized
gtttttgttttgattgtttc

SEQ ID NO: 26240 - DNA, 20 bp, Artificial Sequence
  chemically synthesized
tttttgttttgattgtttct

SEQ ID NO: 26241 - DNA, 20 bp, Artificial Sequence
  chemically synthesized
ttttgttttgattgtttctg

SEQ ID NO: 26242 - DNA, 20 bp, Artificial Sequence
  chemically synthesized
ttgttttgattgtttctggg

SEQ ID NO: 26243 - DNA, 20 bp, Artificial Sequence
  chemically synthesized
gttttgattgtttctgggga

SEQ ID NO: 26244 - DNA, 20 bp, Artificial Sequence
  chemically synthesized
ttgattgtttctggggagag

SEQ ID NO: 26245 - DNA, 20 bp, Artificial Sequence
  chemically synthesized
gagaagaactcttcccatct

SEQ ID NO: 26246 - DNA, 20 bp, Artificial Sequence
  chemically synthesized
agaagaactcttcccatctt

SEQ ID NO: 26247 - DNA, 20 bp, Artificial Sequence
  chemically synthesized
agaactcttcccatcttggg

SEQ ID NO: 26248 - DNA, 20 bp, Artificial Sequence
  chemically synthesized
ttatgttcaaacttttgcct

SEQ ID NO: 26249 - DNA, 20 bp, Artificial Sequence
  chemically synthesized
tgttcaaacttttgcctaag

SEQ ID NO: 26250 - DNA, 20 bp, Artificial Sequence
  chemically synthesized
tttaactcatctaattatcc

SEQ ID NO: 26251 - DNA, 20 bp, Artificial Sequence
  chemically synthesized
aattatccgagcaatccaat

SEQ ID NO: 26252 - DNA, 20 bp, Artificial Sequence
  chemically synthesized
attatccgagcaatccaatc

SEQ ID NO: 26253 - DNA, 20 bp, Artificial Sequence
  chemically synthesized
atccgagcaatccaatcggg

SEQ ID NO: 26254 - DNA, 20 bp, Artificial Sequence
  chemically synthesized
gtgatctccattttacacac

SEQ ID NO: 26255 - DNA, 20 bp, Artificial Sequence
  chemically synthesized
ccattttacacacgagaaaa

SEQ ID NO: 26256 - DNA, 20 bp, Artificial Sequence
  chemically synthesized
ttttacacacgagaaaatgg

SEQ ID NO: 26257 - DNA, 20 bp, Artificial Sequence
  chemically synthesized
cacacgagaaaatggaagca

SEQ ID NO: 26258 - DNA, 20 bp, Artificial Sequence
  chemically synthesized
cacgagaaaatggaagcatg

SEQ ID NO: 26259 - DNA, 20 bp, Artificial Sequence
  chemically synthesized
agcatggagaaattgaatgc

SEQ ID NO: 26260 - DNA, 20 bp, Artificial Sequence
  chemically synthesized
tgaatgctggtgcatgatct

SEQ ID NO: 26261 - DNA, 20 bp, Artificial Sequence
  chemically synthesized
aatgctggtgcatgatctca

SEQ ID NO: 26262 - DNA, 20 bp, Artificial Sequence
  chemically synthesized
tgcatgatctcagagctacc

SEQ ID NO: 26263 - DNA, 20 bp, Artificial Sequence
  chemically synthesized
catgatctcagagctacctg

SEQ ID NO: 26264 - DNA, 20 bp, Artificial Sequence
  chemically synthesized
atgatctcagagctacctgg

SEQ ID NO: 26265 - DNA, 20 bp, Artificial Sequence
  chemically synthesized
ctcagagctacctggaggca

SEQ ID NO: 26266 - DNA, 20 bp, Artificial Sequence
  chemically synthesized
gagctacctggaggcacagc

SEQ ID NO: 26267 - DNA, 20 bp, Artificial Sequence
  chemically synthesized
agctacctggaggcacagct

SEQ ID NO: 26268 - DNA, 20 bp, Artificial Sequence
  chemically synthesized
ggcacagctgggctaccctg

SEQ ID NO: 26269 - DNA, 20 bp, Artificial Sequence
  chemically synthesized
gcacagctgggctaccctgt

SEQ ID NO: 26270 - DNA, 20 bp, Artificial Sequence
  chemically synthesized
cagctgggctaccctgtggg

SEQ ID NO: 26271 - DNA, 20 bp, Artificial Sequence
  chemically synthesized
gggctaccctgtgggcagtc

SEQ ID NO: 26272 - DNA, 20 bp, Artificial Sequence
  chemically synthesized
ccctgtgggcagtctggttt

SEQ ID NO: 26273 - DNA, 20 bp, Artificial Sequence
  chemically synthesized
cctgtgggcagtctggtttc

SEQ ID NO: 26274 - DNA, 20 bp, Artificial Sequence
  chemically synthesized
ctgtgggcagtctggtttca

SEQ ID NO: 26275 - DNA, 20 bp, Artificial Sequence
  chemically synthesized
tgggcagtctggtttcaggg

SEQ ID NO: 26276 - DNA, 20 bp, Artificial Sequence
  chemically synthesized
ctggtttcagggtggatata

SEQ ID NO: 26277 - DNA, 20 bp, Artificial Sequence
  chemically synthesized
tggatatacagacacgttgc

SEQ ID NO: 26278 - DNA, 20 bp, Artificial Sequence
  chemically synthesized
ggatatacagacacgttgct

SEQ ID NO: 26279 - DNA, 20 bp, Artificial Sequence
  chemically synthesized
gacacgttgctgggctgacc

SEQ ID NO: 26280 - DNA, 20 bp, Artificial Sequence
  chemically synthesized
ttgctgggctgacccagcat

SEQ ID NO: 26281 - DNA, 20 bp, Artificial Sequence
  chemically synthesized
tgctgggctgacccagcatt

SEQ ID NO: 26282 - DNA, 20 bp, Artificial Sequence
  chemically synthesized
ctgggctgacccagcattgg

SEQ ID NO: 26283 - DNA, 20 bp, Artificial Sequence
  chemically synthesized
acccagcattgggagttgat

SEQ ID NO: 26284 - DNA, 20 bp, Artificial Sequence
  chemically synthesized
agcattgggagttgataagt

SEQ ID NO: 26285 - DNA, 20 bp, Artificial Sequence
  chemically synthesized
tgggagttgataagtcggac

SEQ ID NO: 26286 - DNA, 20 bp, Artificial Sequence
  chemically synthesized
gggagttgataagtcggact

SEQ ID NO: 26287 - DNA, 20 bp, Artificial Sequence
  chemically synthesized
agttgataagtcggactggg

SEQ ID NO: 26288 - DNA, 20 bp, Artificial Sequence
  chemically synthesized
tgataagtcggactgggaag

SEQ ID NO: 26289 - DNA, 20 bp, Artificial Sequence
  chemically synthesized
gataagtcggactgggaagc

SEQ ID NO: 26290 - DNA, 20 bp, Artificial Sequence
  chemically synthesized
agtcggactgggaagcagga

SEQ ID NO: 26291 - DNA, 20 bp, Artificial Sequence
  chemically synthesized
gtcggactgggaagcaggac

SEQ ID NO: 26292 - DNA, 20 bp, Artificial Sequence
  chemically synthesized
gaagcaggacaggaccctct

SEQ ID NO: 26293 - DNA, 20 bp, Artificial Sequence
  chemically synthesized
gcaggacaggaccctctgag

SEQ ID NO: 26294 - DNA, 20 bp, Artificial Sequence
  chemically synthesized
aggacaggaccctctgagtg

SEQ ID NO: 26295 - DNA, 20 bp, Artificial Sequence
  chemically synthesized
ggacaggaccctctgagtgg

SEQ ID NO: 26296 - DNA, 20 bp, Artificial Sequence
  chemically synthesized
gacaggaccctctgagtgga

SEQ ID NO: 26297 - DNA, 20 bp, Artificial Sequence
  chemically synthesized
cctctgagtggagggtgctg

SEQ ID NO: 26298 - DNA, 20 bp, Artificial Sequence
  chemically synthesized
tgagtggagggtgctgaaga

SEQ ID NO: 26299 - DNA, 20 bp, Artificial Sequence
  chemically synthesized
gtggagggtgctgaagacag

SEQ ID NO: 26300 - DNA, 20 bp, Artificial Sequence
  chemically synthesized
agggtgctgaagacagcagt

SEQ ID NO: 26301 - DNA, 20 bp, Artificial Sequence
  chemically synthesized
gggtgctgaagacagcagtc

SEQ ID NO: 26302 - DNA, 20 bp, Artificial Sequence
  chemically synthesized
ggtgctgaagacagcagtca

SEQ ID NO: 26303 - DNA, 20 bp, Artificial Sequence
  chemically synthesized
gaagacagcagtcagggact

SEQ ID NO: 26304 - DNA, 20 bp, Artificial Sequence
  chemically synthesized
agcagtcagggactcagcca

SEQ ID NO: 26305 - DNA, 20 bp, Artificial Sequence
  chemically synthesized
cagtcagggactcagccatg

SEQ ID NO: 26306 - DNA, 20 bp, Artificial Sequence
  chemically synthesized
agtcagggactcagccatgg

SEQ ID NO: 26307 - DNA, 20 bp, Artificial Sequence
  chemically synthesized
gtcagggactcagccatgga

SEQ ID NO: 26308 - DNA, 20 bp, Artificial Sequence
  chemically synthesized
gggactcagccatggagggc

SEQ ID NO: 26309 - DNA, 20 bp, Artificial Sequence
  chemically synthesized
tcagccatggagggccagct

SEQ ID NO: 26310 - DNA, 20 bp, Artificial Sequence
  chemically synthesized
gccatggagggccagcttgg

SEQ ID NO: 26311 - DNA, 20 bp, Artificial Sequence
  chemically synthesized
ccatggagggccagcttggt

SEQ ID NO: 26312 - DNA, 20 bp, Artificial Sequence
  chemically synthesized
catggagggccagcttggtg

SEQ ID NO: 26313 - DNA, 20 bp, Artificial Sequence
  chemically synthesized
cagcttggtggggaacaccg

SEQ ID NO: 26314 - DNA, 20 bp, Artificial Sequence
  chemically synthesized
ggtggggaacaccgtggtca

SEQ ID NO: 26315 - DNA, 20 bp, Artificial Sequence
  chemically synthesized
tggggaacaccgtggtcatg

SEQ ID NO: 26316 - DNA, 20 bp, Artificial Sequence
  chemically synthesized
ccgtggtcatggagcgcttc

SEQ ID NO: 26317 - DNA, 20 bp, Artificial Sequence
  chemically synthesized
ggtcatggagcgcttctgga

SEQ ID NO: 26318 - DNA, 20 bp, Artificial Sequence
  chemically synthesized
tcatggagcgcttctggatg

SEQ ID NO: 26319 - DNA, 20 bp, Artificial Sequence
  chemically synthesized
atggagcgcttctggatgga

SEQ ID NO: 26320 - DNA, 20 bp, Artificial Sequence
  chemically synthesized
tggagcgcttctggatggag

SEQ ID NO: 26321 - DNA, 20 bp, Artificial Sequence
  chemically synthesized
tctggatggagaggaatgca

SEQ ID NO: 26322 - DNA, 20 bp, Artificial Sequence
  chemically synthesized
ctggatggagaggaatgcaa

SEQ ID NO: 26323 - DNA, 20 bp, Artificial Sequence
  chemically synthesized
ggagaggaatgcaaaggcct

SEQ ID NO: 26324 - DNA, 20 bp, Artificial Sequence
  chemically synthesized
agaggaatgcaaaggccttg

SEQ ID NO: 26325 - DNA, 20 bp, Artificial Sequence
  chemically synthesized
gaggaatgcaaaggccttgg

SEQ ID NO: 26326 - DNA, 20 bp, Artificial Sequence
  chemically synthesized
gaatgcaaaggccttggagg

SEQ ID NO: 26327 - DNA, 20 bp, Artificial Sequence
  chemically synthesized
aatgcaaaggccttggagga

SEQ ID NO: 26328 - DNA, 20 bp, Artificial Sequence
  chemically synthesized
atgcaaaggccttggaggaa

SEQ ID NO: 26329 - DNA, 20 bp, Artificial Sequence
  chemically synthesized
tgcaaaggccttggaggaag

SEQ ID NO: 26330 - DNA, 20 bp, Artificial Sequence
  chemically synthesized
aaaggccttggaggaagggg

SEQ ID NO: 26331 - DNA, 20 bp, Artificial Sequence
  chemically synthesized
aaggccttggaggaaggggt

SEQ ID NO: 26332 - DNA, 20 bp, Artificial Sequence
  chemically synthesized
aggccttggaggaaggggtg

SEQ ID NO: 26333 - DNA, 20 bp, Artificial Sequence
  chemically synthesized
ggccttggaggaaggggtgg

SEQ ID NO: 26334 - DNA, 20 bp, Artificial Sequence
  chemically synthesized
cttggaggaaggggtggggg

SEQ ID NO: 26335 - DNA, 20 bp, Artificial Sequence
  chemically synthesized
gaggaaggggtgggggcagt

SEQ ID NO: 26336 - DNA, 20 bp, Artificial Sequence
  chemically synthesized
ggaaggggtgggggcagtga

SEQ ID NO: 26337 - DNA, 20 bp, Artificial Sequence
  chemically synthesized
gaaggggtgggggcagtgag

SEQ ID NO: 26338 - DNA, 20 bp, Artificial Sequence
  chemically synthesized
aaggggtgggggcagtgaga

SEQ ID NO: 26339 - DNA, 20 bp, Artificial Sequence
  chemically synthesized
ggggtgggggcagtgagagg

SEQ ID NO: 26340 - DNA, 20 bp, Artificial Sequence
  chemically synthesized
gggtgggggcagtgagaggg

SEQ ID NO: 26341 - DNA, 20 bp, Artificial Sequence
  chemically synthesized
ggtgggggcagtgagaggga

SEQ ID NO: 26342 - DNA, 20 bp, Artificial Sequence
  chemically synthesized
gggggcagtgagagggaggg

SEQ ID NO: 26343 - DNA, 20 bp, Artificial Sequence
  chemically synthesized
ggggcagtgagagggagggt

SEQ ID NO: 26344 - DNA, 20 bp, Artificial Sequence
  chemically synthesized
gggcagtgagagggagggtg

SEQ ID NO: 26345 - DNA, 20 bp, Artificial Sequence
  chemically synthesized
agggagggtggggctgtgct

SEQ ID NO: 26346 - DNA, 20 bp, Artificial Sequence
  chemically synthesized
ggagggtggggctgtgctca

SEQ ID NO: 26347 - DNA, 20 bp, Artificial Sequence
  chemically synthesized
gggtggggctgtgctcagag

SEQ ID NO: 26348 - DNA, 20 bp, Artificial Sequence
  chemically synthesized
ggtggggctgtgctcagagc

SEQ ID NO: 26349 - DNA, 20 bp, Artificial Sequence
  chemically synthesized
tggggctgtgctcagagcgg

SEQ ID NO: 26350 - DNA, 20 bp, Artificial Sequence
  chemically synthesized
ggctgtgctcagagcgggag

SEQ ID NO: 26351 - DNA, 20 bp, Artificial Sequence
  chemically synthesized
gctgtgctcagagcgggagt

SEQ ID NO: 26352 - DNA, 20 bp, Artificial Sequence
  chemically synthesized
gtgctcagagcgggagtggg

SEQ ID NO: 26353 - DNA, 20 bp, Artificial Sequence
  chemically synthesized
ctcagagcgggagtgggcag

SEQ ID NO: 26354 - DNA, 20 bp, Artificial Sequence
  chemically synthesized
cagagcgggagtgggcagtg

SEQ ID NO: 26355 - DNA, 20 bp, Artificial Sequence
  chemically synthesized
agagcgggagtgggcagtgg

SEQ ID NO: 26356 - DNA, 20 bp, Artificial Sequence
  chemically synthesized
ggagtgggcagtggaggtgt

SEQ ID NO: 26357 - DNA, 20 bp, Artificial Sequence
  chemically synthesized
agtgggcagtggaggtgtca

SEQ ID NO: 26358 - DNA, 20 bp, Artificial Sequence
  chemically synthesized
gtgggcagtggaggtgtcag

SEQ ID NO: 26359 - DNA, 20 bp, Artificial Sequence
  chemically synthesized
ggaggtgtcagaggcctccc

SEQ ID NO: 26360 - DNA, 20 bp, Artificial Sequence
  chemically synthesized
gaggtgtcagaggcctccct

SEQ ID NO: 26361 - DNA, 20 bp, Artificial Sequence
  chemically synthesized
agaggcctccctgggtcaaa

SEQ ID NO: 26362 - DNA, 20 bp, Artificial Sequence
  chemically synthesized
gaggcctccctgggtcaaat

SEQ ID NO: 26363 - DNA, 20 bp, Artificial Sequence
  chemically synthesized
aggcctccctgggtcaaatg

SEQ ID NO: 26364 - DNA, 20 bp, Artificial Sequence
  chemically synthesized
cctgggtcaaatggggtcct

SEQ ID NO: 26365 - DNA, 20 bp, Artificial Sequence
  chemically synthesized
gtcaaatggggtcctgagtg

SEQ ID NO: 26366 - DNA, 20 bp, Artificial Sequence
  chemically synthesized
tggggtcctgagtgtggctg

SEQ ID NO: 26367 - DNA, 20 bp, Artificial Sequence
  chemically synthesized
ggtcctgagtgtggctgcag

SEQ ID NO: 26368 - DNA, 20 bp, Artificial Sequence
  chemically synthesized
gtcctgagtgtggctgcagt

SEQ ID NO: 26369 - DNA, 20 bp, Artificial Sequence
  chemically synthesized
tcctgagtgtggctgcagtg

SEQ ID NO: 26370 - DNA, 20 bp, Artificial Sequence
  chemically synthesized
tgagtgtggctgcagtgggg

SEQ ID NO: 26371 - DNA, 20 bp, Artificial Sequence
  chemically synthesized
gagtgtggctgcagtgggga

SEQ ID NO: 26372 - DNA, 20 bp, Artificial Sequence
  chemically synthesized
tgtggctgcagtggggaagg

SEQ ID NO: 26373 - DNA, 20 bp, Artificial Sequence
  chemically synthesized
ggctgcagtggggaaggtgg

SEQ ID NO: 26374 - DNA, 20 bp, Artificial Sequence
  chemically synthesized
gtggggaaggtggaagtcac

SEQ ID NO: 26375 - DNA, 20 bp, Artificial Sequence
  chemically synthesized
tggaagtcactggtgtgaaa

SEQ ID NO: 26376 - DNA, 20 bp, Artificial Sequence
  chemically synthesized
tcactggtgtgaaaaagatg

SEQ ID NO: 26377 - DNA, 20 bp, Artificial Sequence
  chemically synthesized
actggtgtgaaaaagatgaa

SEQ ID NO: 26378 - DNA, 20 bp, Artificial Sequence
  chemically synthesized
gtgaaaaagatgaagagtta

SEQ ID NO: 26379 - DNA, 20 bp, Artificial Sequence
  chemically synthesized
aaaagatgaagagttatgga

SEQ ID NO: 26380 - DNA, 20 bp, Artificial Sequence
  chemically synthesized
gagttatggacagtcactta

SEQ ID NO: 26381 - DNA, 20 bp, Artificial Sequence
  chemically synthesized
agttatggacagtcacttac

SEQ ID NO: 26382 - DNA, 20 bp, Artificial Sequence
  chemically synthesized
gttatggacagtcacttaca

SEQ ID NO: 26383 - DNA, 20 bp, Artificial Sequence
  chemically synthesized
ttatggacagtcacttacag

SEQ ID NO: 26384 - DNA, 20 bp, Artificial Sequence
  chemically synthesized
tggacagtcacttacagggg

SEQ ID NO: 26385 - DNA, 20 bp, Artificial Sequence
  chemically synthesized
tacaggggcagtgtctgact

SEQ ID NO: 26386 - DNA, 20 bp, Artificial Sequence
  chemically synthesized
acaggggcagtgtctgactc

SEQ ID NO: 26387 - DNA, 20 bp, Artificial Sequence
  chemically synthesized
gggcagtgtctgactcagga

SEQ ID NO: 26388 - DNA, 20 bp, Artificial Sequence
  chemically synthesized
cagtgtctgactcaggacag

SEQ ID NO: 26389 - DNA, 20 bp, Artificial Sequence
  chemically synthesized
tgtctgactcaggacagtgg

SEQ ID NO: 26390 - DNA, 20 bp, Artificial Sequence
  chemically synthesized
gtctgactcaggacagtggc

SEQ ID NO: 26391 - DNA, 20 bp, Artificial Sequence
  chemically synthesized
tgactcaggacagtggcagg

SEQ ID NO: 26392 - DNA, 20 bp, Artificial Sequence
  chemically synthesized
gacagtggcaggaagtgacc

SEQ ID NO: 26393 - DNA, 20 bp, Artificial Sequence
  chemically synthesized
acagtggcaggaagtgacct

SEQ ID NO: 26394 - DNA, 20 bp, Artificial Sequence
  chemically synthesized
cagtggcaggaagtgacctg

SEQ ID NO: 26395 - DNA, 20 bp, Artificial Sequence
  chemically synthesized
gtggcaggaagtgacctggg

SEQ ID NO: 26396 - DNA, 20 bp, Artificial Sequence
  chemically synthesized
tggcaggaagtgacctgggg

SEQ ID NO: 26397 - DNA, 20 bp, Artificial Sequence
  chemically synthesized
caggaagtgacctggggagg

SEQ ID NO: 26398 - DNA, 20 bp, Artificial Sequence
  chemically synthesized
tgacctggggaggaagattc

SEQ ID NO: 26399 - DNA, 20 bp, Artificial Sequence
  chemically synthesized
gacctggggaggaagattct

SEQ ID NO: 26400 - DNA, 20 bp, Artificial Sequence
  chemically synthesized
aagattctgggcccctgact

SEQ ID NO: 26401 - DNA, 20 bp, Artificial Sequence
  chemically synthesized
ggcccctgactgagcctccc

SEQ ID NO: 26402 - DNA, 20 bp, Artificial Sequence
  chemically synthesized
gcccctgactgagcctcccc

SEQ ID NO: 26403 - DNA, 20 bp, Artificial Sequence
  chemically synthesized
gactgagcctccccaggatg

SEQ ID NO: 26404 - DNA, 20 bp, Artificial Sequence
  chemically synthesized
tccccaggatgtggtcctgc

SEQ ID NO: 26405 - DNA, 20 bp, Artificial Sequence
  chemically synthesized
ccccaggatgtggtcctgct

SEQ ID NO: 26406 - DNA, 20 bp, Artificial Sequence
  chemically synthesized
aggatgtggtcctgctgggt

SEQ ID NO: 26407 - DNA, 20 bp, Artificial Sequence
  chemically synthesized
ggatgtggtcctgctgggtc

SEQ ID NO: 26408 - DNA, 20 bp, Artificial Sequence
  chemically synthesized
gatgtggtcctgctgggtcg

SEQ ID NO: 26409 - DNA, 20 bp, Artificial Sequence
  chemically synthesized
atgtggtcctgctgggtcgg

SEQ ID NO: 26410 - DNA, 20 bp, Artificial Sequence
  chemically synthesized
tgtggtcctgctgggtcggg

SEQ ID NO: 26411 - DNA, 20 bp, Artificial Sequence
  chemically synthesized
cctgctgggtcggggggtga

SEQ ID NO: 26412 - DNA, 20 bp, Artificial Sequence
  chemically synthesized
ctgctgggtcggggggtgat

SEQ ID NO: 26413 - DNA, 20 bp, Artificial Sequence
  chemically synthesized
ggtcggggggtgataggaat

SEQ ID NO: 26414 - DNA, 20 bp, Artificial Sequence
  chemically synthesized
cggggggtgataggaatgag

SEQ ID NO: 26415 - DNA, 20 bp, Artificial Sequence
  chemically synthesized
ggtgataggaatgagaagac

SEQ ID NO: 26416 - DNA, 20 bp, Artificial Sequence
  chemically synthesized
gtgataggaatgagaagaca

SEQ ID NO: 26417 - DNA, 20 bp, Artificial Sequence
  chemically synthesized
ataggaatgagaagacaagg

SEQ ID NO: 26418 - DNA, 20 bp, Artificial Sequence
  chemically synthesized
tgagaagacaaggaagtcca

SEQ ID NO: 26419 - DNA, 20 bp, Artificial Sequence
  chemically synthesized
agaagacaaggaagtccaca

SEQ ID NO: 26420 - DNA, 20 bp, Artificial Sequence
  chemically synthesized
gacaaggaagtccacagagt

SEQ ID NO: 26421 - DNA, 20 bp, Artificial Sequence
  chemically synthesized
acaaggaagtccacagagtc

SEQ ID NO: 26422 - DNA, 20 bp, Artificial Sequence
  chemically synthesized
caaggaagtccacagagtca

SEQ ID NO: 26423 - DNA, 20 bp, Artificial Sequence
  chemically synthesized
agtccacagagtcagggtcc

SEQ ID NO: 26424 - DNA, 20 bp, Artificial Sequence
  chemically synthesized
gtccacagagtcagggtcca

SEQ ID NO: 26425 - DNA, 20 bp, Artificial Sequence
  chemically synthesized
cagagtcagggtccaaggcc

SEQ ID NO: 26426 - DNA, 20 bp, Artificial Sequence
  chemically synthesized
agtcagggtccaaggcctag

SEQ ID NO: 26427 - DNA, 20 bp, Artificial Sequence
  chemically synthesized
gtcagggtccaaggcctaga

SEQ ID NO: 26428 - DNA, 20 bp, Artificial Sequence
  chemically synthesized
cctagaaggtgttctgtttg

SEQ ID NO: 26429 - DNA, 20 bp, Artificial Sequence
  chemically synthesized
ctagaaggtgttctgtttgc

SEQ ID NO: 26430 - DNA, 20 bp, Artificial Sequence
  chemically synthesized
gaaggtgttctgtttgcagg

SEQ ID NO: 26431 - DNA, 20 bp, Artificial Sequence
  chemically synthesized
gtttgcaggtggatgctgca

SEQ ID NO: 26432 - DNA, 20 bp, Artificial Sequence
  chemically synthesized
ttgcaggtggatgctgcaaa

SEQ ID NO: 26433 - DNA, 20 bp, Artificial Sequence
  chemically synthesized
gcaggtggatgctgcaaaga

SEQ ID NO: 26434 - DNA, 20 bp, Artificial Sequence
  chemically synthesized
caggtggatgctgcaaagag

SEQ ID NO: 26435 - DNA, 20 bp, Artificial Sequence
  chemically synthesized
ggtggatgctgcaaagagag

SEQ ID NO: 26436 - DNA, 20 bp, Artificial Sequence
  chemically synthesized
atgctgcaaagagaggagct

SEQ ID NO: 26437 - DNA, 20 bp, Artificial Sequence
  chemically synthesized
tgctgcaaagagaggagctc

SEQ ID NO: 26438 - DNA, 20 bp, Artificial Sequence
  chemically synthesized
gctgcaaagagaggagctca

SEQ ID NO: 26439 - DNA, 20 bp, Artificial Sequence
  chemically synthesized
caaagagaggagctcagggc

SEQ ID NO: 26440 - DNA, 20 bp, Artificial Sequence
  chemically synthesized
aaagagaggagctcagggct

SEQ ID NO: 26441 - DNA, 20 bp, Artificial Sequence
  chemically synthesized
gagctcagggctgggacaac

SEQ ID NO: 26442 - DNA, 20 bp, Artificial Sequence
  chemically synthesized
gctcagggctgggacaactg

SEQ ID NO: 26443 - DNA, 20 bp, Artificial Sequence
  chemically synthesized
tgggacaactggagctgctc

SEQ ID NO: 26444 - DNA, 20 bp, Artificial Sequence
  chemically synthesized
gggacaactggagctgctct

SEQ ID NO: 26445 - DNA, 20 bp, Artificial Sequence
  chemically synthesized
aactggagctgctctgggtc

SEQ ID NO: 26446 - DNA, 20 bp, Artificial Sequence
  chemically synthesized
ctggagctgctctgggtctg

SEQ ID NO: 26447 - DNA, 20 bp, Artificial Sequence
  chemically synthesized
tggagctgctctgggtctgg

SEQ ID NO: 26448 - DNA, 20 bp, Artificial Sequence
  chemically synthesized
agctgctctgggtctggagg

SEQ ID NO: 26449 - DNA, 20 bp, Artificial Sequence
  chemically synthesized
tgctctgggtctggaggcag

SEQ ID NO: 26450 - DNA, 20 bp, Artificial Sequence
  chemically synthesized
ctctgggtctggaggcagca

SEQ ID NO: 26451 - DNA, 20 bp, Artificial Sequence
  chemically synthesized
ctgggtctggaggcagcaga

SEQ ID NO: 26452 - DNA, 20 bp, Artificial Sequence
  chemically synthesized
tgggtctggaggcagcagag

SEQ ID NO: 26453 - DNA, 20 bp, Artificial Sequence
  chemically synthesized
gggtctggaggcagcagaga

SEQ ID NO: 26454 - DNA, 20 bp, Artificial Sequence
  chemically synthesized
gtctggaggcagcagagagg

SEQ ID NO: 26455 - DNA, 20 bp, Artificial Sequence
  chemically synthesized
gaggcagcagagagggagcc

SEQ ID NO: 26456 - DNA, 20 bp, Artificial Sequence
  chemically synthesized
agggagcccagctctgtgtg

SEQ ID NO: 26457 - DNA, 20 bp, Artificial Sequence
  chemically synthesized
gggagcccagctctgtgtgc

SEQ ID NO: 26458 - DNA, 20 bp, Artificial Sequence
  chemically synthesized
agcccagctctgtgtgcagg

SEQ ID NO: 26459 - DNA, 20 bp, Artificial Sequence
  chemically synthesized
gctctgtgtgcaggaagacg

SEQ ID NO: 26460 - DNA, 20 bp, Artificial Sequence
  chemically synthesized
ctctgtgtgcaggaagacgt

SEQ ID NO: 26461 - DNA, 20 bp, Artificial Sequence
  chemically synthesized
gcaggaagacgtgggtgtgt

SEQ ID NO: 26462 - DNA, 20 bp, Artificial Sequence
  chemically synthesized
ggtgtgtgagtgtacgtgtg

SEQ ID NO: 26463 - DNA, 20 bp, Artificial Sequence
  chemically synthesized
gtgtgtgagtgtacgtgtgt

SEQ ID NO: 26464 - DNA, 20 bp, Artificial Sequence
  chemically synthesized
gtgtacgtgtgtgggtgtgt

SEQ ID NO: 26465 - DNA, 20 bp, Artificial Sequence
  chemically synthesized
tgtacgtgtgtgggtgtgtc

SEQ ID NO: 26466 - DNA, 20 bp, Artificial Sequence
  chemically synthesized
gtgtgtcaggtgtgtgtgtg

SEQ ID NO: 26467 - DNA, 20 bp, Artificial Sequence
  chemically synthesized
tgtgtcaggtgtgtgtgtgt

SEQ ID NO: 26468 - DNA, 20 bp, Artificial Sequence
  chemically synthesized
tgtcaggtgtgtgtgtgtgg

SEQ ID NO: 26469 - DNA, 20 bp, Artificial Sequence
  chemically synthesized
gtcaggtgtgtgtgtgtggg

SEQ ID NO: 26470 - DNA, 20 bp, Artificial Sequence
  chemically synthesized
tcaggtgtgtgtgtgtggga

SEQ ID NO: 26471 - DNA, 20 bp, Artificial Sequence
  chemically synthesized
aggtgtgtgtgtgtgggagg

SEQ ID NO: 26472 - DNA, 20 bp, Artificial Sequence
  chemically synthesized
gggagtatgaatgtgtgcat

SEQ ID NO: 26473 - DNA, 20 bp, Artificial Sequence
  chemically synthesized
tagcatgcatatgcacatgt

SEQ ID NO: 26474 - DNA, 20 bp, Artificial Sequence
  chemically synthesized
gcatgcatatgcacatgtga

SEQ ID NO: 26475 - DNA, 20 bp, Artificial Sequence
  chemically synthesized
tgcatatgcacatgtgagag

SEQ ID NO: 26476 - DNA, 20 bp, Artificial Sequence
  chemically synthesized
gcatatgcacatgtgagagt

SEQ ID NO: 26477 - DNA, 20 bp, Artificial Sequence
  chemically synthesized
tgcacatgtgagagtgggta

SEQ ID NO: 26478 - DNA, 20 bp, Artificial Sequence
  chemically synthesized
acatgtgagagtgggtacag

SEQ ID NO: 26479 - DNA, 20 bp, Artificial Sequence
  chemically synthesized
atgtgagagtgggtacagca

SEQ ID NO: 26480 - DNA, 20 bp, Artificial Sequence
  chemically synthesized
agagtgggtacagcagagcg

SEQ ID NO: 26481 - DNA, 20 bp, Artificial Sequence
  chemically synthesized
gtacagcagagcgtggtcat

SEQ ID NO: 26482 - DNA, 20 bp, Artificial Sequence
  chemically synthesized
gtgtgcaaatgtgtgttttt

SEQ ID NO: 26483 - DNA, 20 bp, Artificial Sequence
  chemically synthesized
caaatgtgtgtttttgagtg

SEQ ID NO: 26484 - DNA, 20 bp, Artificial Sequence
  chemically synthesized
tgtgtgtttttgagtgaagt

SEQ ID NO: 26485 - DNA, 20 bp, Artificial Sequence
  chemically synthesized
gagtgaagtgagcaatgtgt

SEQ ID NO: 26486 - DNA, 20 bp, Artificial Sequence
  chemically synthesized
tgagcaatgtgtgagtgtgt

SEQ ID NO: 26487 - DNA, 20 bp, Artificial Sequence
  chemically synthesized
gtgagtgtgtgagtgtgtgt

SEQ ID NO: 26488 - DNA, 20 bp, Artificial Sequence
  chemically synthesized
gtgagtgtgtgtgagtttgt

SEQ ID NO: 26489 - DNA, 20 bp, Artificial Sequence
  chemically synthesized
tgagtgtgtgtgagtttgtg

SEQ ID NO: 26490 - DNA, 20 bp, Artificial Sequence
  chemically synthesized
gagtgtgtgtgagtttgtga

SEQ ID NO: 26491 - DNA, 20 bp, Artificial Sequence
  chemically synthesized
gggcatgtgaatgtgtgtgt

SEQ ID NO: 26492 - DNA, 20 bp, Artificial Sequence
  chemically synthesized
aatgtgtgtgtcagtgctgt

SEQ ID NO: 26493 - DNA, 20 bp, Artificial Sequence
  chemically synthesized
atgtgtgtgtcagtgctgtc

SEQ ID NO: 26494 - DNA, 20 bp, Artificial Sequence
  chemically synthesized
tgtgtgtgtcagtgctgtca

SEQ ID NO: 26495 - DNA, 20 bp, Artificial Sequence
  chemically synthesized
gtgtcagtgctgtcagggtg

SEQ ID NO: 26496 - DNA, 20 bp, Artificial Sequence
  chemically synthesized
cagtgctgtcagggtgcaga

SEQ ID NO: 26497 - DNA, 20 bp, Artificial Sequence
  chemically synthesized
tgtcagggtgcagatggatc

SEQ ID NO: 26498 - DNA, 20 bp, Artificial Sequence
  chemically synthesized
gtcagggtgcagatggatca

SEQ ID NO: 26499 - DNA, 20 bp, Artificial Sequence
  chemically synthesized
tcagggtgcagatggatcaa

SEQ ID NO: 26500 - DNA, 20 bp, Artificial Sequence
  chemically synthesized
cagggtgcagatggatcaag

SEQ ID NO: 26501 - DNA, 20 bp, Artificial Sequence
  chemically synthesized
ggtgcagatggatcaagggg

SEQ ID NO: 26502 - DNA, 20 bp, Artificial Sequence
  chemically synthesized
gtgcagatggatcaaggggc

SEQ ID NO: 26503 - DNA, 20 bp, Artificial Sequence
  chemically synthesized
gcagatggatcaaggggcag

SEQ ID NO: 26504 - DNA, 20 bp, Artificial Sequence
  chemically synthesized
agatggatcaaggggcagga

SEQ ID NO: 26505 - DNA, 20 bp, Artificial Sequence
  chemically synthesized
gatggatcaaggggcaggag

SEQ ID NO: 26506 - DNA, 20 bp, Artificial Sequence
  chemically synthesized
ggggcaggagaggtacctgt

SEQ ID NO: 26507 - DNA, 20 bp, Artificial Sequence
  chemically synthesized
aggtacctgtgagatgacct

SEQ ID NO: 26508 - DNA, 20 bp, Artificial Sequence
  chemically synthesized
ggtacctgtgagatgacctc

SEQ ID NO: 26509 - DNA, 20 bp, Artificial Sequence
  chemically synthesized
ctgtgagatgacctcgggct

SEQ ID NO: 26510 - DNA, 20 bp, Artificial Sequence
  chemically synthesized
tgtgagatgacctcgggctg

SEQ ID NO: 26511 - DNA, 20 bp, Artificial Sequence
  chemically synthesized
gtgagatgacctcgggctga

SEQ ID NO: 26512 - DNA, 20 bp, Artificial Sequence
  chemically synthesized
tgagatgacctcgggctgag

SEQ ID NO: 26513 - DNA, 20 bp, Artificial Sequence
  chemically synthesized
agatgacctcgggctgaggg

SEQ ID NO: 26514 - DNA, 20 bp, Artificial Sequence
  chemically synthesized
cgggctgaggggagcaaatt

SEQ ID NO: 26515 - DNA, 20 bp, Artificial Sequence
  chemically synthesized
tgaggggagcaaatttagtg

SEQ ID NO: 26516 - DNA, 20 bp, Artificial Sequence
  chemically synthesized
gagcaaatttagtgtggaac

SEQ ID NO: 26517 - DNA, 20 bp, Artificial Sequence
  chemically synthesized
agcaaatttagtgtggaacg

SEQ ID NO: 26518 - DNA, 20 bp, Artificial Sequence
  chemically synthesized
ttagtgtggaacgaggtttc

SEQ ID NO: 26519 - DNA, 20 bp, Artificial Sequence
  chemically synthesized
tagtgtggaacgaggtttct

SEQ ID NO: 26520 - DNA, 20 bp, Artificial Sequence
  chemically synthesized
agtgtggaacgaggtttcta

SEQ ID NO: 26521 - DNA, 20 bp, Artificial Sequence
  chemically synthesized
gtggaacgaggtttctaggg

SEQ ID NO: 26522 - DNA, 20 bp, Artificial Sequence
  chemically synthesized
aacgaggtttctagggaagc

SEQ ID NO: 26523 - DNA, 20 bp, Artificial Sequence
  chemically synthesized
acgaggtttctagggaagcg

SEQ ID NO: 26524 - DNA, 20 bp, Artificial Sequence
  chemically synthesized
cgaggtttctagggaagcga

SEQ ID NO: 26525 - DNA, 20 bp, Artificial Sequence
  chemically synthesized
tttctagggaagcgagggca

SEQ ID NO: 26526 - DNA, 20 bp, Artificial Sequence
  chemically synthesized
ttctagggaagcgagggcaa

SEQ ID NO: 26527 - DNA, 20 bp, Artificial Sequence
  chemically synthesized
tctagggaagcgagggcaaa

SEQ ID NO: 26528 - DNA, 20 bp, Artificial Sequence
  chemically synthesized
gaagcgagggcaaagggcgc

SEQ ID NO: 26529 - DNA, 20 bp, Artificial Sequence
  chemically synthesized
aagcgagggcaaagggcgct

SEQ ID NO: 26530 - DNA, 20 bp, Artificial Sequence
  chemically synthesized
agcgagggcaaagggcgctg

SEQ ID NO: 26531 - DNA, 20 bp, Artificial Sequence
  chemically synthesized
cgagggcaaagggcgctggg

SEQ ID NO: 26532 - DNA, 20 bp, Artificial Sequence
  chemically synthesized
gagggcaaagggcgctgggg

SEQ ID NO: 26533 - DNA, 20 bp, Artificial Sequence
  chemically synthesized
gggcaaagggcgctggggag

SEQ ID NO: 26534 - DNA, 20 bp, Artificial Sequence
  chemically synthesized
ggcaaagggcgctggggagg

SEQ ID NO: 26535 - DNA, 20 bp, Artificial Sequence
  chemically synthesized
gctggggaggaggccttgcg

SEQ ID NO: 26536 - DNA, 20 bp, Artificial Sequence
  chemically synthesized
ggggaggaggccttgcgtgg

SEQ ID NO: 26537 - DNA, 20 bp, Artificial Sequence
  chemically synthesized
gggaggaggccttgcgtggt

SEQ ID NO: 26538 - DNA, 20 bp, Artificial Sequence
  chemically synthesized
ggaggaggccttgcgtggtg

SEQ ID NO: 26539 - DNA, 20 bp, Artificial Sequence
  chemically synthesized
gaggaggccttgcgtggtgg

SEQ ID NO: 26540 - DNA, 20 bp, Artificial Sequence
  chemically synthesized
ggccttgcgtggtgggggat

SEQ ID NO: 26541 - DNA, 20 bp, Artificial Sequence
  chemically synthesized
gccttgcgtggtgggggatg

SEQ ID NO: 26542 - DNA, 20 bp, Artificial Sequence
  chemically synthesized
gtggtgggggatgaggacaa

SEQ ID NO: 26543 - DNA, 20 bp, Artificial Sequence
  chemically synthesized
tggtgggggatgaggacaac

SEQ ID NO: 26544 - DNA, 20 bp, Artificial Sequence
  chemically synthesized
tgggggatgaggacaacagg

SEQ ID NO: 26545 - DNA, 20 bp, Artificial Sequence
  chemically synthesized
gggggatgaggacaacaggt

SEQ ID NO: 26546 - DNA, 20 bp, Artificial Sequence
  chemically synthesized
tgaggacaacaggtgggacc

SEQ ID NO: 26547 - DNA, 20 bp, Artificial Sequence
  chemically synthesized
aggacaacaggtgggacctg

SEQ ID NO: 26548 - DNA, 20 bp, Artificial Sequence
  chemically synthesized
ggacaacaggtgggacctgg

SEQ ID NO: 26549 - DNA, 20 bp, Artificial Sequence
  chemically synthesized
gacaacaggtgggacctgga

SEQ ID NO: 26550 - DNA, 20 bp, Artificial Sequence
  chemically synthesized
gggacctggagggttgtgct

SEQ ID NO: 26551 - DNA, 20 bp, Artificial Sequence
  chemically synthesized
gacctggagggttgtgcttg

SEQ ID NO: 26552 - DNA, 20 bp, Artificial Sequence
  chemically synthesized
cctggagggttgtgcttgga

SEQ ID NO: 26553 - DNA, 20 bp, Artificial Sequence
  chemically synthesized
ggagggttgtgcttggagag

SEQ ID NO: 26554 - DNA, 20 bp, Artificial Sequence
  chemically synthesized
gagggttgtgcttggagagt

SEQ ID NO: 26555 - DNA, 20 bp, Artificial Sequence
  chemically synthesized
tgtgcttggagagtgggcta

SEQ ID NO: 26556 - DNA, 20 bp, Artificial Sequence
  chemically synthesized
gcttggagagtgggctatgg

SEQ ID NO: 26557 - DNA, 20 bp, Artificial Sequence
  chemically synthesized
tgggctatggtggaatgacc

SEQ ID NO: 26558 - DNA, 20 bp, Artificial Sequence
  chemically synthesized
tggtggaatgacccagattt

SEQ ID NO: 26559 - DNA, 20 bp, Artificial Sequence
  chemically synthesized
ggtggaatgacccagattta

SEQ ID NO: 26560 - DNA, 20 bp, Artificial Sequence
  chemically synthesized
cccagatttaaggatctcaa

SEQ ID NO: 26561 - DNA, 20 bp, Artificial Sequence
  chemically synthesized
taaggatctcaatggaattt

SEQ ID NO: 26562 - DNA, 20 bp, Artificial Sequence
  chemically synthesized
ggatctcaatggaattttgg

SEQ ID NO: 26563 - DNA, 20 bp, Artificial Sequence
  chemically synthesized
gatctcaatggaattttggc

SEQ ID NO: 26564 - DNA, 20 bp, Artificial Sequence
  chemically synthesized
atctcaatggaattttggca

SEQ ID NO: 26565 - DNA, 20 bp, Artificial Sequence
  chemically synthesized
tctcaatggaattttggcag

SEQ ID NO: 26566 - DNA, 20 bp, Artificial Sequence
  chemically synthesized
tcaatggaattttggcaggg

SEQ ID NO: 26567 - DNA, 20 bp, Artificial Sequence
  chemically synthesized
caatggaattttggcagggg

SEQ ID NO: 26568 - DNA, 20 bp, Artificial Sequence
  chemically synthesized
aatggaattttggcagggga

SEQ ID NO: 26569 - DNA, 20 bp, Artificial Sequence
  chemically synthesized
tggcaggggagggactgttc

SEQ ID NO: 26570 - DNA, 20 bp, Artificial Sequence
  chemically synthesized
ggggagggactgttccagta

SEQ ID NO: 26571 - DNA, 20 bp, Artificial Sequence
  chemically synthesized
gactgttccagtatggattt

SEQ ID NO: 26572 - DNA, 20 bp, Artificial Sequence
  chemically synthesized
actgttccagtatggatttt

SEQ ID NO: 26573 - DNA, 20 bp, Artificial Sequence
  chemically synthesized
gttccagtatggattttagg

SEQ ID NO: 26574 - DNA, 20 bp, Artificial Sequence
  chemically synthesized
tatggattttaggaagaaca

SEQ ID NO: 26575 - DNA, 20 bp, Artificial Sequence
  chemically synthesized
atggattttaggaagaacac

SEQ ID NO: 26576 - DNA, 20 bp, Artificial Sequence
  chemically synthesized
tggattttaggaagaacaca

SEQ ID NO: 26577 - DNA, 20 bp, Artificial Sequence
  chemically synthesized
tttaggaagaacacagggcc

SEQ ID NO: 26578 - DNA, 20 bp, Artificial Sequence
  chemically synthesized
agaacacagggcccagcttc

SEQ ID NO: 26579 - DNA, 20 bp, Artificial Sequence
  chemically synthesized
aacacagggcccagcttctg

SEQ ID NO: 26580 - DNA, 20 bp, Artificial Sequence
  chemically synthesized
gcttctggagtctccaatct

SEQ ID NO: 26581 - DNA, 20 bp, Artificial Sequence
  chemically synthesized
cttctggagtctccaatctg

SEQ ID NO: 26582 - DNA, 20 bp, Artificial Sequence
  chemically synthesized
ttctggagtctccaatctga

SEQ ID NO: 26583 - DNA, 20 bp, Artificial Sequence
  chemically synthesized
tctggagtctccaatctgag

SEQ ID NO: 26584 - DNA, 20 bp, Artificial Sequence
  chemically synthesized
gagtctccaatctgagggga

SEQ ID NO: 26585 - DNA, 20 bp, Artificial Sequence
  chemically synthesized
agtctccaatctgaggggac

SEQ ID NO: 26586 - DNA, 20 bp, Artificial Sequence
  chemically synthesized
tctccaatctgaggggacag

SEQ ID NO: 26587 - DNA, 20 bp, Artificial Sequence
  chemically synthesized
atctgaggggacaggagcct

SEQ ID NO: 26588 - DNA, 20 bp, Artificial Sequence
  chemically synthesized
tgaggggacaggagccttag

SEQ ID NO: 26589 - DNA, 20 bp, Artificial Sequence
  chemically synthesized
aggggacaggagccttagaa

SEQ ID NO: 26590 - DNA, 20 bp, Artificial Sequence
  chemically synthesized
acaggagccttagaagagct

SEQ ID NO: 26591 - DNA, 20 bp, Artificial Sequence
  chemically synthesized
gccttagaagagctgagact

SEQ ID NO: 26592 - DNA, 20 bp, Artificial Sequence
  chemically synthesized
ccttagaagagctgagacta

SEQ ID NO: 26593 - DNA, 20 bp, Artificial Sequence
  chemically synthesized
aagagctgagactaaggccc

SEQ ID NO: 26594 - DNA, 20 bp, Artificial Sequence
  chemically synthesized
agagctgagactaaggcccg

SEQ ID NO: 26595 - DNA, 20 bp, Artificial Sequence
  chemically synthesized
gactaaggcccgaggtgatc

SEQ ID NO: 26596 - DNA, 20 bp, Artificial Sequence
  chemically synthesized
ctaaggcccgaggtgatctg

SEQ ID NO: 26597 - DNA, 20 bp, Artificial Sequence
  chemically synthesized
taaggcccgaggtgatctgg

SEQ ID NO: 26598 - DNA, 20 bp, Artificial Sequence
  chemically synthesized
gatctggaggcctctgccac

SEQ ID NO: 26599 - DNA, 20 bp, Artificial Sequence
  chemically synthesized
tggaggcctctgccactggc

SEQ ID NO: 26600 - DNA, 20 bp, Artificial Sequence
  chemically synthesized
ggcctctgccactggctgga

SEQ ID NO: 26601 - DNA, 20 bp, Artificial Sequence
  chemically synthesized
gcctctgccactggctggat

SEQ ID NO: 26602 - DNA, 20 bp, Artificial Sequence
  chemically synthesized
ctctgccactggctggatgg

SEQ ID NO: 26603 - DNA, 20 bp, Artificial Sequence
  chemically synthesized
tctgccactggctggatggg

SEQ ID NO: 26604 - DNA, 20 bp, Artificial Sequence
  chemically synthesized
gatgggaggaaaaccattca

SEQ ID NO: 26605 - DNA, 20 bp, Artificial Sequence
  chemically synthesized
cattcacagatcccccttct

SEQ ID NO: 26606 - DNA, 20 bp, Artificial Sequence
  chemically synthesized
attcacagatcccccttctc

SEQ ID NO: 26607 - DNA, 20 bp, Artificial Sequence
  chemically synthesized
cccttctcaggatgtgtgcc

SEQ ID NO: 26608 - DNA, 20 bp, Artificial Sequence
  chemically synthesized
ccttctcaggatgtgtgcct

SEQ ID NO: 26609 - DNA, 20 bp, Artificial Sequence
  chemically synthesized
tctcaggatgtgtgcctagg

SEQ ID NO: 26610 - DNA, 20 bp, Artificial Sequence
  chemically synthesized
ctcaggatgtgtgcctaggc

SEQ ID NO: 26611 - DNA, 20 bp, Artificial Sequence
  chemically synthesized
tcaggatgtgtgcctaggca

SEQ ID NO: 26612 - DNA, 20 bp, Artificial Sequence
  chemically synthesized
gatgtgtgcctaggcagggc

SEQ ID NO: 26613 - DNA, 20 bp, Artificial Sequence
  chemically synthesized
atgtgtgcctaggcagggcc

SEQ ID NO: 26614 - DNA, 20 bp, Artificial Sequence
  chemically synthesized
cccgccccctgtgcgtctcc

SEQ ID NO: 26615 - DNA, 20 bp, Artificial Sequence
  chemically synthesized
ctgtgcgtctcccagtcccc

SEQ ID NO: 26616 - DNA, 20 bp, Artificial Sequence
  chemically synthesized
gtctcccagtcccccagctc

SEQ ID NO: 26617 - DNA, 20 bp, Artificial Sequence
  chemically synthesized
tctcccagtcccccagctcc

SEQ ID NO: 26618 - DNA, 20 bp, Artificial Sequence
  chemically synthesized
agtcccccagctccaggatc

SEQ ID NO: 26619 - DNA, 20 bp, Artificial Sequence
  chemically synthesized
gtcccccagctccaggatcc

SEQ ID NO: 26620 - DNA, 20 bp, Artificial Sequence
  chemically synthesized
caggatccgggctttgcaca

SEQ ID NO: 26621 - DNA, 20 bp, Artificial Sequence
  chemically synthesized
acagctgatgtgaatatcct

SEQ ID NO: 26622 - DNA, 20 bp, Artificial Sequence
  chemically synthesized
aatatcctgagtcgtgtgca

SEQ ID NO: 26623 - DNA, 20 bp, Artificial Sequence
  chemically synthesized
atatcctgagtcgtgtgcat

SEQ ID NO: 26624 - DNA, 20 bp, Artificial Sequence
  chemically synthesized
gtgcatgggtgtgtgtgcac

SEQ ID NO: 26625 - DNA, 20 bp, Artificial Sequence
  chemically synthesized
tgggtgtgtgtgcaccagat

SEQ ID NO: 26626 - DNA, 20 bp, Artificial Sequence
  chemically synthesized
tgcgtgtgtatatttataca

SEQ ID NO: 26627 - DNA, 20 bp, Artificial Sequence
  chemically synthesized
tatatttatacatggtaata

SEQ ID NO: 26628 - DNA, 20 bp, Artificial Sequence
  chemically synthesized
atatttatacatggtaatat

SEQ ID NO: 26629 - DNA, 20 bp, Artificial Sequence
  chemically synthesized
atacatggtaatatgggtgc

SEQ ID NO: 26630 - DNA, 20 bp, Artificial Sequence
  chemically synthesized
taatatgggtgcgagtgtgt

SEQ ID NO: 26631 - DNA, 20 bp, Artificial Sequence
  chemically synthesized
atatgggtgcgagtgtgtaa

SEQ ID NO: 26632 - DNA, 20 bp, Artificial Sequence
  chemically synthesized
tgtgtgtaatgctcaaatgc

SEQ ID NO: 26633 - DNA, 20 bp, Artificial Sequence
  chemically synthesized
gtgtgtaatgctcaaatgct

SEQ ID NO: 26634 - DNA, 20 bp, Artificial Sequence
  chemically synthesized
tgtgtaatgctcaaatgctg

SEQ ID NO: 26635 - DNA, 20 bp, Artificial Sequence
  chemically synthesized
atgctcaaatgctggggtca

SEQ ID NO: 26636 - DNA, 20 bp, Artificial Sequence
  chemically synthesized
cctatgatgaccccccccca

SEQ ID NO: 26637 - DNA, 20 bp, Artificial Sequence
  chemically synthesized
ccccaaccaatccccccgcc

SEQ ID NO: 26638 - DNA, 20 bp, Artificial Sequence
  chemically synthesized
cccaaccaatccccccgccc

SEQ ID NO: 26639 - DNA, 20 bp, Artificial Sequence
  chemically synthesized
ccgcccaggttatgcctcct

SEQ ID NO: 26640 - DNA, 20 bp, Artificial Sequence
  chemically synthesized
cgcccaggttatgcctcctc

SEQ ID NO: 26641 - DNA, 20 bp, Artificial Sequence
  chemically synthesized
ggttatgcctcctcaggctt

SEQ ID NO: 26642 - DNA, 20 bp, Artificial Sequence
  chemically synthesized
ggtgccctgtctttaccctc

SEQ ID NO: 26643 - DNA, 20 bp, Artificial Sequence
  chemically synthesized
accctccggctccccacacc

SEQ ID NO: 26644 - DNA, 20 bp, Artificial Sequence
  chemically synthesized
ccctccggctccccacaccc

SEQ ID NO: 26645 - DNA, 20 bp, Artificial Sequence
  chemically synthesized
gctccccacacccaggctgc

SEQ ID NO: 26646 - DNA, 20 bp, Artificial Sequence
  chemically synthesized
ctcctgatgcccctctccca

SEQ ID NO: 26647 - DNA, 20 bp, Artificial Sequence
  chemically synthesized
tcctgatgcccctctcccac

SEQ ID NO: 26648 - DNA, 20 bp, Artificial Sequence
  chemically synthesized
cctgatgcccctctcccaca

SEQ ID NO: 26649 - DNA, 20 bp, Artificial Sequence
  chemically synthesized
ccacagggccacctcctgcc

SEQ ID NO: 26650 - DNA, 20 bp, Artificial Sequence
  chemically synthesized
gccacctcctgcccagcccc

SEQ ID NO: 26651 - DNA, 20 bp, Artificial Sequence
  chemically synthesized
ctcctgcccagcccctggca

SEQ ID NO: 26652 - DNA, 20 bp, Artificial Sequence
  chemically synthesized
ggcacagcgtctctgctcca

SEQ ID NO: 26653 - DNA, 20 bp, Artificial Sequence
  chemically synthesized
ctctgctccatggtctgctt

SEQ ID NO: 26654 - DNA, 20 bp, Artificial Sequence
  chemically synthesized
tgcttcagtctgcttgccct

SEQ ID NO: 26655 - DNA, 20 bp, Artificial Sequence
  chemically synthesized
gagcttcaacatcctgctgc

SEQ ID NO: 26656 - DNA, 20 bp, Artificial Sequence
  chemically synthesized
cttcaacatcctgctgctgg

SEQ ID NO: 26657 - DNA, 20 bp, Artificial Sequence
  chemically synthesized
ctggtggtcatctgtgtgac

SEQ ID NO: 26658 - DNA, 20 bp, Artificial Sequence
  chemically synthesized
tggtggtcatctgtgtgact

SEQ ID NO: 26659 - DNA, 20 bp, Artificial Sequence
  chemically synthesized
atctgtgtgactgggtccca

SEQ ID NO: 26660 - DNA, 20 bp, Artificial Sequence
  chemically synthesized
gtgtgactgggtcccaaagt

SEQ ID NO: 26661 - DNA, 20 bp, Artificial Sequence
  chemically synthesized
tgtgactgggtcccaaagtg

SEQ ID NO: 26662 - DNA, 20 bp, Artificial Sequence
  chemically synthesized
gtgactgggtcccaaagtga

SEQ ID NO: 26663 - DNA, 20 bp, Artificial Sequence
  chemically synthesized
gggtcccaaagtgagggtca

SEQ ID NO: 26664 - DNA, 20 bp, Artificial Sequence
  chemically synthesized
ggtcccaaagtgagggtcac

SEQ ID NO: 26665 - DNA, 20 bp, Artificial Sequence
  chemically synthesized
gtcccaaagtgagggtcacg

SEQ ID NO: 26666 - DNA, 20 bp, Artificial Sequence
  chemically synthesized
tcccaaagtgagggtcacgg

SEQ ID NO: 26667 - DNA, 20 bp, Artificial Sequence
  chemically synthesized
aaagtgagggtcacgggggc

SEQ ID NO: 26668 - DNA, 20 bp, Artificial Sequence
  chemically synthesized
gtgagggtcacgggggccag

SEQ ID NO: 26669 - DNA, 20 bp, Artificial Sequence
  chemically synthesized
tgagggtcacgggggccagc

SEQ ID NO: 26670 - DNA, 20 bp, Artificial Sequence
  chemically synthesized
gagggtcacgggggccagca

SEQ ID NO: 26671 - DNA, 20 bp, Artificial Sequence
  chemically synthesized
gtcacgggggccagcaggga

SEQ ID NO: 26672 - DNA, 20 bp, Artificial Sequence
  chemically synthesized
tcacgggggccagcagggat

SEQ ID NO: 26673 - DNA, 20 bp, Artificial Sequence
  chemically synthesized
gggggccagcagggatgggc

SEQ ID NO: 26674 - DNA, 20 bp, Artificial Sequence
  chemically synthesized
ggggccagcagggatgggca

SEQ ID NO: 26675 - DNA, 20 bp, Artificial Sequence
  chemically synthesized
gggccagcagggatgggcaa

SEQ ID NO: 26676 - DNA, 20 bp, Artificial Sequence
  chemically synthesized
ggccagcagggatgggcaag

SEQ ID NO: 26677 - DNA, 20 bp, Artificial Sequence
  chemically synthesized
cagcagggatgggcaagggg

SEQ ID NO: 26678 - DNA, 20 bp, Artificial Sequence
  chemically synthesized
agcagggatgggcaaggggt

SEQ ID NO: 26679 - DNA, 20 bp, Artificial Sequence
  chemically synthesized
gcagggatgggcaaggggta

SEQ ID NO: 26680 - DNA, 20 bp, Artificial Sequence
  chemically synthesized
ggatgggcaaggggtaggga

SEQ ID NO: 26681 - DNA, 20 bp, Artificial Sequence
  chemically synthesized
atgggcaaggggtagggaaa

SEQ ID NO: 26682 - DNA, 20 bp, Artificial Sequence
  chemically synthesized
aaggggtagggaaagagaca

SEQ ID NO: 26683 - DNA, 20 bp, Artificial Sequence
  chemically synthesized
aggggtagggaaagagacat

SEQ ID NO: 26684 - DNA, 20 bp, Artificial Sequence
  chemically synthesized
ggtagggaaagagacatggg

SEQ ID NO: 26685 - DNA, 20 bp, Artificial Sequence
  chemically synthesized
agggaaagagacatgggcag

SEQ ID NO: 26686 - DNA, 20 bp, Artificial Sequence
  chemically synthesized
acacagatgaccaccagcag

SEQ ID NO: 26687 - DNA, 20 bp, Artificial Sequence
  chemically synthesized
gggcatcaggagccggcagc

SEQ ID NO: 26688 - DNA, 20 bp, Artificial Sequence
  chemically synthesized
agcctgggtgtggggagccg

SEQ ID NO: 26689 - DNA, 20 bp, Artificial Sequence
  chemically synthesized
aggaggcataacctgggcgg

SEQ ID NO: 26690 - DNA, 20 bp, Artificial Sequence
  chemically synthesized
gattggttggggccatgggg

SEQ ID NO: 26691 - DNA, 20 bp, Artificial Sequence
  chemically synthesized
acacacccatgcacacgact

SEQ ID NO: 26692 - DNA, 20 bp, Artificial Sequence
  chemically synthesized
acatcagctgtgtgcaaagc

SEQ ID NO: 26693 - DNA, 20 bp, Artificial Sequence
  chemically synthesized
taggcacacatcctgagaag

SEQ ID NO: 26694 - DNA, 20 bp, Artificial Sequence
  chemically synthesized
catcctgagaagggggatct

SEQ ID NO: 26695 - DNA, 20 bp, Artificial Sequence
  chemically synthesized
ttccattgagatccttaaat

SEQ ID NO: 26696 - DNA, 20 bp, Artificial Sequence
  chemically synthesized
gggaggctcagtcaggggcc

SEQ ID NO: 26697 - DNA, 20 bp, Artificial Sequence
  chemically synthesized
ggtcacttcctgccactgtc

SEQ ID NO: 26698 - DNA, 20 bp, Artificial Sequence
  chemically synthesized
accaagctggccctccatgg

SEQ ID NO: 26699 - DNA, 20 bp, Artificial Sequence
  chemically synthesized
tcttcagcaccctccactca

SEQ ID NO: 26700 - DNA, 20 bp, Artificial Sequence
  chemically synthesized
cgacttatcaactcccaatg

SEQ ID NO: 26701 - DNA, 20 bp, Artificial Sequence
  chemically synthesized
ccctgaaaccagactgccca

SEQ ID NO: 26702 - DNA, 20 bp, Artificial Sequence
  chemically synthesized
tcacagtcgtagctacccga

SEQ ID NO: 26703 - DNA, 20 bp, Artificial Sequence
  chemically synthesized
tagctacccgattggattgc

SEQ ID NO: 26704 - DNA, 20 bp, Artificial Sequence
  chemically synthesized
tggattgctcggataattag

SEQ ID NO: 26705 - DNA, 20 bp, Artificial Sequence
  chemically synthesized
aaaagtttgaacataaaaga

SEQ ID NO: 26706 - DNA, 20 bp, Artificial Sequence
  chemically synthesized
cagggtctgcccaagatggg

SEQ ID NO: 26707 - DNA, 20 bp, Artificial Sequence
  chemically synthesized
actctggacatcaggcaagg

SEQ ID NO: 26708 - DNA, 20 bp, Artificial Sequence
  chemically synthesized
aggaggagtaaagatccctg

SEQ ID NO: 26709 - DNA, 20 bp, Artificial Sequence
  chemically synthesized
accccagcttactgtttgga

SEQ ID NO: 26710 - DNA, 20 bp, Artificial Sequence
  chemically synthesized
cacgttgaggagatggagct

SEQ ID NO: 26711 - DNA, 20 bp, Artificial Sequence
  chemically synthesized
ccgaggagaccaaaacaatt

SEQ ID NO: 26712 - DNA, 20 bp, Artificial Sequence
  chemically synthesized
caaagctcaagaacatttag

SEQ ID NO: 26713 - DNA, 20 bp, Artificial Sequence
  chemically synthesized
aaaagagatccagaactgac

SEQ ID NO: 26714 - DNA, 20 bp, Artificial Sequence
  chemically synthesized
tccagaactgacacggatgc

SEQ ID NO: 26715 - DNA, 20 bp, Artificial Sequence
  chemically synthesized
ggatgctagaattagcaggc

SEQ ID NO: 26716 - DNA, 20 bp, Artificial Sequence
  chemically synthesized
attatgttcaaaaaattaag

SEQ ID NO: 26717 - DNA, 20 bp, Artificial Sequence
  chemically synthesized
aaaaattaagtagaattgtg

SEQ ID NO: 26718 - DNA, 20 bp, Artificial Sequence
  chemically synthesized
tagaattgtggaggatattt

SEQ ID NO: 26719 - DNA, 20 bp, Artificial Sequence
  chemically synthesized
caggcgccgtggctcacgcc

SEQ ID NO: 26720 - DNA, 20 bp, Artificial Sequence
  chemically synthesized
tactcgggaggctgaggcag

SEQ ID NO: 26721 - DNA, 20 bp, Artificial Sequence
  chemically synthesized
gaaagaaaagaaaaaacaca

SEQ ID NO: 26722 - DNA, 20 bp, Artificial Sequence
  chemically synthesized
aaaatttagggccaggcact

SEQ ID NO: 26723 - DNA, 20 bp, Artificial Sequence
  chemically synthesized
ctttgggaggtcgacacggg

SEQ ID NO: 26724 - DNA, 20 bp, Artificial Sequence
  chemically synthesized
tacctgggaggctgaagtgg

SEQ ID NO: 26725 - DNA, 20 bp, Artificial Sequence
  chemically synthesized
cccaggaggtggaggccaca

SEQ ID NO: 26726 - DNA, 20 bp, Artificial Sequence
  chemically synthesized
ctgcattccagcctgggcaa

SEQ ID NO: 26727 - DNA, 20 bp, Artificial Sequence
  chemically synthesized
aatgaaacactgggagaaaa

SEQ ID NO: 26728 - DNA, 20 bp, Artificial Sequence
  chemically synthesized
aaagaattaaaaaatggaaa

SEQ ID NO: 26729 - DNA, 20 bp, Artificial Sequence
  chemically synthesized
aattaaaaaatggaaagaga

SEQ ID NO: 26730 - DNA, 20 bp, Artificial Sequence
  chemically synthesized
tgaaatctttaaaagaaaaa

SEQ ID NO: 26731 - DNA, 20 bp, Artificial Sequence
  chemically synthesized
agcagcatcccgtattctct

SEQ ID NO: 26732 - DNA, 20 bp, Artificial Sequence
  chemically synthesized
ctctgagtgttcactatgta

SEQ ID NO: 26733 - DNA, 20 bp, Artificial Sequence
  chemically synthesized
accgggtgccgtgtgggcac

SEQ ID NO: 26734 - DNA, 20 bp, Artificial Sequence
  chemically synthesized
tgggcactggagttgcagag

SEQ ID NO: 26735 - DNA, 20 bp, Artificial Sequence
  chemically synthesized
aggagatgctactggtgttc

SEQ ID NO: 26736 - DNA, 20 bp, Artificial Sequence
  chemically synthesized
tccctcggttggccagcctc

SEQ ID NO: 26737 - DNA, 20 bp, Artificial Sequence
  chemically synthesized
gttggccagcctcaggaatg

SEQ ID NO: 26738 - DNA, 20 bp, Artificial Sequence
  chemically synthesized
tacttgggaggctgaggtgg

SEQ ID NO: 26739 - DNA, 20 bp, Artificial Sequence
  chemically synthesized
tgggaggatggcttgagccc

SEQ ID NO: 26740 - DNA, 20 bp, Artificial Sequence
  chemically synthesized
tcagtcaagatttattacag

SEQ ID NO: 26741 - DNA, 20 bp, Artificial Sequence
  chemically synthesized
tattacagaaggatccaggg

SEQ ID NO: 26742 - DNA, 20 bp, Artificial Sequence
  chemically synthesized
tcttgggagatgagaggagc

SEQ ID NO: 26743 - DNA, 20 bp, Artificial Sequence
  chemically synthesized
tgagaggagcagggatcttc

SEQ ID NO: 26744 - DNA, 20 bp, Artificial Sequence
  chemically synthesized
cattcactcacacacacaca

SEQ ID NO: 26745 - DNA, 20 bp, Artificial Sequence
  chemically synthesized
acacacacacagagtcccag

SEQ ID NO: 26746 - DNA, 20 bp, Artificial Sequence
  chemically synthesized
catacgaggcacatgtgttc

SEQ ID NO: 26747 - DNA, 20 bp, Artificial Sequence
  chemically synthesized
cctctggcacatgcctttcc

SEQ ID NO: 26748 - DNA, 20 bp, Artificial Sequence
  chemically synthesized
acatgcctttcctggggtcc

SEQ ID NO: 26749 - DNA, 20 bp, Artificial Sequence
  chemically synthesized
ggtgaggtgagggaacaagc

SEQ ID NO: 26750 - DNA, 20 bp, Artificial Sequence
  chemically synthesized
ccctcctcagtccctgttca

SEQ ID NO: 26751 - DNA, 20 bp, Artificial Sequence
  chemically synthesized
cctcagtccctgttcacaga

SEQ ID NO: 26752 - DNA, 20 bp, Artificial Sequence
  chemically synthesized
tgcacacttgcctttcaaaa

SEQ ID NO: 26753 - DNA, 20 bp, Artificial Sequence
  chemically synthesized
caaaaatggatttcctctcc

SEQ ID NO: 26754 - DNA, 20 bp, Artificial Sequence
  chemically synthesized
cctctcctgggattcagcct

SEQ ID NO: 26755 - DNA, 20 bp, Artificial Sequence
  chemically synthesized
tggcccctcaccttgatgga

SEQ ID NO: 26756 - DNA, 20 bp, Artificial Sequence
  chemically synthesized
ttttcctccgagctcagctg

SEQ ID NO: 26757 - DNA, 20 bp, Artificial Sequence
  chemically synthesized
attcacgtggaggttgatgg

SEQ ID NO: 26758 - DNA, 20 bp, Artificial Sequence
  chemically synthesized
gttgatggtgggatggaacg

SEQ ID NO: 26759 - DNA, 20 bp, Artificial Sequence
  chemically synthesized
gggatggaacgcagggtcgg

SEQ ID NO: 26760 - DNA, 20 bp, Artificial Sequence
  chemically synthesized
aacgcagggtcggaggggtt

SEQ ID NO: 26761 - DNA, 20 bp, Artificial Sequence
  chemically synthesized
gaggggttcggggtggtggc

SEQ ID NO: 26762 - DNA, 20 bp, Artificial Sequence
  chemically synthesized
gttcggggtggtggcctggg

SEQ ID NO: 26763 - DNA, 20 bp, Artificial Sequence
  chemically synthesized
atcccaccatcaacctccac

SEQ ID NO: 26764 - DNA, 20 bp, Artificial Sequence
  chemically synthesized
aggggccaggcactcgcagg

SEQ ID NO: 26765 - DNA, 20 bp, Artificial Sequence
  chemically synthesized
tgtgcacgtatgtgcatatg

SEQ ID NO: 26766 - DNA, 20 bp, Artificial Sequence
  chemically synthesized
ctgggactctgtgtgtgtgt

SEQ ID NO: 26767 - DNA, 20 bp, Artificial Sequence
  chemically synthesized
gactctgtgtgtgtgtgtga

SEQ ID NO: 26768 - DNA, 20 bp, Artificial Sequence
  chemically synthesized
tgtgtatgtcgtgtatgtga

SEQ ID NO: 26769 - DNA, 20 bp, Artificial Sequence
  chemically synthesized
tgagagggtatgttgtgtgt

SEQ ID NO: 26770 - DNA, 20 bp, Artificial Sequence
  chemically synthesized
gtgttgtgtgtgtatgttgt

SEQ ID NO: 26771 - DNA, 20 bp, Artificial Sequence
  chemically synthesized
atgttgtgtgtatcttgtgt

SEQ ID NO: 26772 - DNA, 20 bp, Artificial Sequence
  chemically synthesized
tgtgcatgtgtgtatgttgt

SEQ ID NO: 26773 - DNA, 20 bp, Artificial Sequence
  chemically synthesized
tgcgagtgtatgttgtgtat

SEQ ID NO: 26774 - DNA, 20 bp, Artificial Sequence
  chemically synthesized
tgtgtgtatgtatgttgtgt

SEQ ID NO: 26775 - DNA, 20 bp, Artificial Sequence
  chemically synthesized
gtgttgtgtgtgtgtattgt

SEQ ID NO: 26776 - DNA, 20 bp, Artificial Sequence
  chemically synthesized
tatgtatgtttgtgtgttgt

SEQ ID NO: 26777 - DNA, 20 bp, Artificial Sequence
  chemically synthesized
tgtgcgtgtgtgtatgttgt

SEQ ID NO: 26778 - DNA, 20 bp, Artificial Sequence
  chemically synthesized
gtgtgttgtgtgtgtatgtt

SEQ ID NO: 26779 - DNA, 20 bp, Artificial Sequence
  chemically synthesized
gtgttatgtatgttgtgtgt

SEQ ID NO: 26780 - DNA, 20 bp, Artificial Sequence
  chemically synthesized
tgtgtgtgtgagtgtgttgc

SEQ ID NO: 26781 - DNA, 20 bp, Artificial Sequence
  chemically synthesized
tgtgtgtgtgtgtgtagagg

SEQ ID NO: 26782 - DNA, 20 bp, Artificial Sequence
  chemically synthesized
tgtgtgtgtgtagaggtggg

SEQ ID NO: 26783 - DNA, 20 bp, Artificial Sequence
  chemically synthesized
tgtgtagaggtggggtgagt

SEQ ID NO: 26784 - DNA, 20 bp, Artificial Sequence
  chemically synthesized
tagaggtggggtgagttggg

SEQ ID NO: 26785 - DNA, 20 bp, Artificial Sequence
  chemically synthesized
tcatctcccaagacccttcc

SEQ ID NO: 26786 - DNA, 20 bp, Artificial Sequence
  chemically synthesized
gacattttttttttagagac

SEQ ID NO: 26787 - DNA, 20 bp, Artificial Sequence
  chemically synthesized
tagagacaggagtgtagtgg

SEQ ID NO: 26788 - DNA, 20 bp, Artificial Sequence
  chemically synthesized
aaaaaaattttttagagaaa

SEQ ID NO: 26789 - DNA, 20 bp, Artificial Sequence
  chemically synthesized
taggcagaagggcaagagcc

SEQ ID NO: 26790 - DNA, 20 bp, Artificial Sequence
  chemically synthesized
agggcaagagccaggaatgg

SEQ ID NO: 26791 - DNA, 20 bp, Artificial Sequence
  chemically synthesized
aatggaggagtgtcaggtgt

SEQ ID NO: 26792 - DNA, 20 bp, Artificial Sequence
  chemically synthesized
tgtgggtgctggtggtggag

SEQ ID NO: 26793 - DNA, 20 bp, Artificial Sequence
  chemically synthesized
aggggcttggagcttaggaa

SEQ ID NO: 26794 - DNA, 20 bp, Artificial Sequence
  chemically synthesized
aggggattggttagctgggc

SEQ ID NO: 26795 - DNA, 20 bp, Artificial Sequence
  chemically synthesized
agggcagggcaggggacagg

SEQ ID NO: 26796 - DNA, 20 bp, Artificial Sequence
  chemically synthesized
gtacatagtgaacactcaga

SEQ ID NO: 26797 - DNA, 20 bp, Artificial Sequence
  chemically synthesized
gtgaacactcagagagaata

SEQ ID NO: 26798 - DNA, 20 bp, Artificial Sequence
  chemically synthesized
agagagaatacgggatgctg

SEQ ID NO: 26799 - DNA, 20 bp, Artificial Sequence
  chemically synthesized
gggatgctgctgaatcttct

SEQ ID NO: 26800 - DNA, 20 bp, Artificial Sequence
  chemically synthesized
gctgaatcttctgagggtga

SEQ ID NO: 26801 - DNA, 20 bp, Artificial Sequence
  chemically synthesized
cttctgagggtgacagaatt

SEQ ID NO: 26802 - DNA, 20 bp, Artificial Sequence
  chemically synthesized
caggaggcttggagagaggc

SEQ ID NO: 26803 - DNA, 20 bp, Artificial Sequence
  chemically synthesized
aggatttctgaaattaatgg

SEQ ID NO: 26804 - DNA, 20 bp, Artificial Sequence
  chemically synthesized
taatgggagagtgagctcac

SEQ ID NO: 26805 - DNA, 20 bp, Artificial Sequence
  chemically synthesized
accagtgagggaccgtctga

SEQ ID NO: 26806 - DNA, 20 bp, Artificial Sequence
  chemically synthesized
ccgcatttccctccagcagc

SEQ ID NO: 26807 - DNA, 20 bp, Artificial Sequence
  chemically synthesized
atttcaattatgcatgtatt

SEQ ID NO: 26808 - DNA, 20 bp, Artificial Sequence
  chemically synthesized
tctcccagtgtttcatttta

SEQ ID NO: 26809 - DNA, 20 bp, Artificial Sequence
  chemically synthesized
tctcactctgttgcccaggc

SEQ ID NO: 26810 - DNA, 20 bp, Artificial Sequence
  chemically synthesized
gagacggttttgccatgtag

SEQ ID NO: 26811 - DNA, 20 bp, Artificial Sequence
  chemically synthesized
gtgtcgacctcccaaagtgc

SEQ ID NO: 26812 - DNA, 20 bp, Artificial Sequence
  chemically synthesized
cttttttttttttttggagg

SEQ ID NO: 26813 - DNA, 20 bp, Artificial Sequence
  chemically synthesized
tctcgctctgttgcccaggc

SEQ ID NO: 26814 - DNA, 20 bp, Artificial Sequence
  chemically synthesized
ctcactgcaagctctgcctc

SEQ ID NO: 26815 - DNA, 20 bp, Artificial Sequence
  chemically synthesized
cattctcctgcctcagcctc

SEQ ID NO: 26816 - DNA, 20 bp, Artificial Sequence
  chemically synthesized
ttttgtatttttagtagaga

SEQ ID NO: 26817 - DNA, 20 bp, Artificial Sequence
  chemically synthesized
tggggtttcaccatgttagc

SEQ ID NO: 26818 - DNA, 20 bp, Artificial Sequence
  chemically synthesized
gccttggcctcccacagtgc

SEQ ID NO: 26819 - DNA, 20 bp, Artificial Sequence
  chemically synthesized
acttaattttttgaacataa

SEQ ID NO: 26820 - DNA, 20 bp, Artificial Sequence
  chemically synthesized
ttctagcatccgtgtcagtt

SEQ ID NO: 26821 - DNA, 20 bp, Artificial Sequence
  chemically synthesized
acattgtcaatttcaccttg

SEQ ID NO: 26822 - DNA, 20 bp, Artificial Sequence
  chemically synthesized
caatttcaccttgttgggtg

SEQ ID NO: 26823 - DNA, 20 bp, Artificial Sequence
  chemically synthesized
aatgttcttgagctttgctc

SEQ ID NO: 26824 - DNA, 20 bp, Artificial Sequence
  chemically synthesized
cgggatgcagttaagcaact

SEQ ID NO: 26825 - DNA, 20 bp, Artificial Sequence
  chemically synthesized
agctccatctcctcaacgtg

SEQ ID NO: 26826 - DNA, 20 bp, Artificial Sequence
  chemically synthesized
actctctccaaacagtaagc

SEQ ID NO: 26827 - DNA, 20 bp, Artificial Sequence
  chemically synthesized
acagtaagctggggtgatcg

SEQ ID NO: 26828 - DNA, 20 bp, Artificial Sequence
  chemically synthesized
ttgtttgcttcttatccctc

SEQ ID NO: 26829 - DNA, 20 bp, Artificial Sequence
  chemically synthesized
actcctccttgcctgatgtc

SEQ ID NO: 26830 - DNA, 20 bp, Artificial Sequence
  chemically synthesized
taattatccgagcaatccaa

SEQ ID NO: 26831 - DNA, 20 bp, Artificial Sequence
  chemically synthesized
aaaatggaagcatggagaaa

SEQ ID NO: 26832 - DNA, 20 bp, Artificial Sequence
  chemically synthesized
ccctgtgggcagtctggttt

SEQ ID NO: 26833 - DNA, 20 bp, Artificial Sequence
  chemically synthesized
gtgggcagtctggtttcagg

SEQ ID NO: 26834 - DNA, 20 bp, Artificial Sequence
  chemically synthesized
tgctgggctgacccagcatt

SEQ ID NO: 26835 - DNA, 20 bp, Artificial Sequence
  chemically synthesized
gggaagcaggacaggaccct

SEQ ID NO: 26836 - DNA, 20 bp, Artificial Sequence
  chemically synthesized
aggacaggaccctctgagtg

SEQ ID NO: 26837 - DNA, 20 bp, Artificial Sequence
  chemically synthesized
accgtggtcatggagcgctt

SEQ ID NO: 26838 - DNA, 20 bp, Artificial Sequence
  chemically synthesized
tggagcgcttctggatggag

SEQ ID NO: 26839 - DNA, 20 bp, Artificial Sequence
  chemically synthesized
aatgcaaaggccttggagga

SEQ ID NO: 26840 - DNA, 20 bp, Artificial Sequence
  chemically synthesized
ggggtgggggcagtgagagg

SEQ ID NO: 26841 - DNA, 20 bp, Artificial Sequence
  chemically synthesized
ggtggggctgtgctcagagc

SEQ ID NO: 26842 - DNA, 20 bp, Artificial Sequence
  chemically synthesized
tggaggtgtcagaggcctcc

SEQ ID NO: 26843 - DNA, 20 bp, Artificial Sequence
  chemically synthesized
agaggcctccctgggtcaaa

SEQ ID NO: 26844 - DNA, 20 bp, Artificial Sequence
  chemically synthesized
tccctgggtcaaatggggtc

SEQ ID NO: 26845 - DNA, 20 bp, Artificial Sequence
  chemically synthesized
tcactggtgtgaaaaagatg

SEQ ID NO: 26846 - DNA, 20 bp, Artificial Sequence
  chemically synthesized
ggcccctgactgagcctccc

SEQ ID NO: 26847 - DNA, 20 bp, Artificial Sequence
  chemically synthesized
ctccccaggatgtggtcctg

SEQ ID NO: 26848 - DNA, 20 bp, Artificial Sequence
  chemically synthesized
gatgtggtcctgctgggtcg

SEQ ID NO: 26849 - DNA, 20 bp, Artificial Sequence
  chemically synthesized
ctgctgggtcggggggtgat

SEQ ID NO: 26850 - DNA, 20 bp, Artificial Sequence
  chemically synthesized
tgagaagacaaggaagtcca

SEQ ID NO: 26851 - DNA, 20 bp, Artificial Sequence
  chemically synthesized
gacaaggaagtccacagagt

SEQ ID NO: 26852 - DNA, 20 bp, Artificial Sequence
  chemically synthesized
agaaggtgttctgtttgcag

SEQ ID NO: 26853 - DNA, 20 bp, Artificial Sequence
  chemically synthesized
ctgggacaactggagctgct

SEQ ID NO: 26854 - DNA, 20 bp, Artificial Sequence
  chemically synthesized
agctctgtgtgcaggaagac

SEQ ID NO: 26855 - DNA, 20 bp, Artificial Sequence
  chemically synthesized
gtgcaggaagacgtgggtgt

SEQ ID NO: 26856 - DNA, 20 bp, Artificial Sequence
  chemically synthesized
gggtgtgtgagtgtacgtgt

SEQ ID NO: 26857 - DNA, 20 bp, Artificial Sequence
  chemically synthesized
tcaggtgtgtgtgtgtggga

SEQ ID NO: 26858 - DNA, 20 bp, Artificial Sequence
  chemically synthesized
gtgtgtgtgtgggagggagt

SEQ ID NO: 26859 - DNA, 20 bp, Artificial Sequence
  chemically synthesized
tagcatgcatatgcacatgt

SEQ ID NO: 26860 - DNA, 20 bp, Artificial Sequence
  chemically synthesized
atgcatatgcacatgtgaga

SEQ ID NO: 26861 - DNA, 20 bp, Artificial Sequence
  chemically synthesized
gggtacagcagagcgtggtc

SEQ ID NO: 26862 - DNA, 20 bp, Artificial Sequence
  chemically synthesized
gtgtgtgcaaatgtgtgttt

SEQ ID NO: 26863 - DNA, 20 bp, Artificial Sequence
  chemically synthesized
ttgagtgaagtgagcaatgt

SEQ ID NO: 26864 - DNA, 20 bp, Artificial Sequence
  chemically synthesized
agtgagcaatgtgtgagtgt

SEQ ID NO: 26865 - DNA, 20 bp, Artificial Sequence
  chemically synthesized
gtgtgagtgtgtgagtgtgt

SEQ ID NO: 26866 - DNA, 20 bp, Artificial Sequence
  chemically synthesized
gtgtgagtttgtgagggcat

SEQ ID NO: 26867 - DNA, 20 bp, Artificial Sequence
  chemically synthesized
aatgtgtgtgtcagtgctgt

SEQ ID NO: 26868 - DNA, 20 bp, Artificial Sequence
  chemically synthesized
tcagtgctgtcagggtgcag

SEQ ID NO: 26869 - DNA, 20 bp, Artificial Sequence
  chemically synthesized
ggaggaggccttgcgtggtg

SEQ ID NO: 26870 - DNA, 20 bp, Artificial Sequence
  chemically synthesized
aggacaacaggtgggacctg

SEQ ID NO: 26871 - DNA, 20 bp, Artificial Sequence
  chemically synthesized
gacctggagggttgtgcttg

SEQ ID NO: 26872 - DNA, 20 bp, Artificial Sequence
  chemically synthesized
gcttggagagtgggctatgg

SEQ ID NO: 26873 - DNA, 20 bp, Artificial Sequence
  chemically synthesized
tggtggaatgacccagattt

SEQ ID NO: 26874 - DNA, 20 bp, Artificial Sequence
  chemically synthesized
cccagatttaaggatctcaa

SEQ ID NO: 26875 - DNA, 20 bp, Artificial Sequence
  chemically synthesized
aggggagggactgttccagt

SEQ ID NO: 26876 - DNA, 20 bp, Artificial Sequence
  chemically synthesized
agaacacagggcccagcttc

SEQ ID NO: 26877 - DNA, 20 bp, Artificial Sequence
  chemically synthesized
ctggaggcctctgccactgg

SEQ ID NO: 26878 - DNA, 20 bp, Artificial Sequence
  chemically synthesized
cattcacagatcccccttct

SEQ ID NO: 26879 - DNA, 20 bp, Artificial Sequence
  chemically synthesized
ggatgtgtgcctaggcaggg

SEQ ID NO: 26880 - DNA, 20 bp, Artificial Sequence
  chemically synthesized
gtctcccagtcccccagctc

SEQ ID NO: 26881 - DNA, 20 bp, Artificial Sequence
  chemically synthesized
gggctttgcacacagctgat

SEQ ID NO: 26882 - DNA, 20 bp, Artificial Sequence
  chemically synthesized
acacagctgatgtgaatatc

SEQ ID NO: 26883 - DNA, 20 bp, Artificial Sequence
  chemically synthesized
gaatatcctgagtcgtgtgc

SEQ ID NO: 26884 - DNA, 20 bp, Artificial Sequence
  chemically synthesized
gtatatttatacatggtaat

SEQ ID NO: 26885 - DNA, 20 bp, Artificial Sequence
  chemically synthesized
ttatacatggtaatatgggt

SEQ ID NO: 26886 - DNA, 20 bp, Artificial Sequence
  chemically synthesized
taatatgggtgcgagtgtgt

SEQ ID NO: 26887 - DNA, 20 bp, Artificial Sequence
  chemically synthesized
tgtgtgtaatgctcaaatgc

SEQ ID NO: 26888 - DNA, 20 bp, Artificial Sequence
  chemically synthesized
gctggtggtcatctgtgtga

SEQ ID NO: 26889 - DNA, 20 bp, Artificial Sequence
  chemically synthesized
gtgtgactgggtcccaaagt

SEQ ID NO: 26890 - DNA, 20 bp, Artificial Sequence
  chemically synthesized
tgagggtcacgggggccagc

SEQ ID NO: 26891 - DNA, 20 bp, Artificial Sequence
  chemically synthesized
ggggccagcagggatgggca

SEQ ID NO: 26892 - DNA, 20 bp, Artificial Sequence
  chemically synthesized
cgccctttgccctcgcttcc

SEQ ID NO: 26893 - DNA, 20 bp, Artificial Sequence
  chemically synthesized
ggggaggctcagtcaggggc

SEQ ID NO: 26894 - DNA, 20 bp, Artificial Sequence
  chemically synthesized
tgggaagagttcttctctcc

SEQ ID NO: 26895 - DNA, 20 bp, Artificial Sequence
  chemically synthesized
atccagaactgacacggatg

SEQ ID NO: 26896 - DNA, 20 bp, Artificial Sequence
  chemically synthesized
cattatgttcaaaaaattaa

SEQ ID NO: 26897 - DNA, 20 bp, Artificial Sequence
  chemically synthesized
ctactcgggaggctgaggca

SEQ ID NO: 26898 - DNA, 20 bp, Artificial Sequence
  chemically synthesized
tccgcctccaaaaaaaaaaa

SEQ ID NO: 26899 - DNA, 20 bp, Artificial Sequence
  chemically synthesized
ctccaaaaaaaaaaaaaaga

SEQ ID NO: 26900 - DNA, 20 bp, Artificial Sequence
  chemically synthesized
aaaaaaaaaaaaaagaaaag

SEQ ID NO: 26901 - DNA, 20 bp, Artificial Sequence
  chemically synthesized
aaaaaaaaagaaaagaaaga

SEQ ID NO: 26902 - DNA, 20 bp, Artificial Sequence
  chemically synthesized
tggatggaaataatggaaga

SEQ ID NO: 26903 - DNA, 20 bp, Artificial Sequence
  chemically synthesized
aatggaagatgagaaatgcg

SEQ ID NO: 26904 - DNA, 20 bp, Artificial Sequence
  chemically synthesized
ctctataaaatgaaacactg

SEQ ID NO: 26905 - DNA, 20 bp, Artificial Sequence
  chemically synthesized
aaatgaaacactgggagaaa

SEQ ID NO: 26906 - DNA, 20 bp, Artificial Sequence
  chemically synthesized
aaaagaattaaaaaatggaa

SEQ ID NO: 26907 - DNA, 20 bp, Artificial Sequence
  chemically synthesized
atgcataattgaaatcttta

SEQ ID NO: 26908 - DNA, 20 bp, Artificial Sequence
  chemically synthesized
tttaaaagaaaaagggggta

SEQ ID NO: 26909 - DNA, 20 bp, Artificial Sequence
  chemically synthesized
agctcactctcccattaatt

SEQ ID NO: 26910 - DNA, 20 bp, Artificial Sequence
  chemically synthesized
gacagagggggagcaaagcc

SEQ ID NO: 26911 - DNA, 20 bp, Artificial Sequence
  chemically synthesized
caaattaaaaaaaatttttt

SEQ ID NO: 26912 - DNA, 20 bp, Artificial Sequence
  chemically synthesized
ggtacatagtgaacactcag

SEQ ID NO: 26913 - DNA, 20 bp, Artificial Sequence
  chemically synthesized
tgctgaatcttctgagggtg

SEQ ID NO: 26914 - DNA, 20 bp, Artificial Sequence
  chemically synthesized
tgtgatctccattttacaca

SEQ ID NO: 26915 - DNA, 20 bp, Artificial Sequence
  chemically synthesized
acacgagaaaatggaagcat

SEQ ID NO: 26916 - DNA, 20 bp, Artificial Sequence
  chemically synthesized
acacattgctcacttcactc

SEQ ID NO: 26917 - DNA, 20 bp, Artificial Sequence
  chemically synthesized
cttctctccccagaaacaat

SEQ ID NO: 26918 - DNA, 20 bp, Artificial Sequence
  chemically synthesized
tccccagaaacaatcaaaac

SEQ ID NO: 26919 - DNA, 20 bp, Artificial Sequence
  chemically synthesized
agctgagagtccgaggagac

SEQ ID NO: 26920 - DNA, 20 bp, Artificial Sequence
  chemically synthesized
caaggcatgcaatgaaacgg

SEQ ID NO: 26921 - DNA, 20 bp, Artificial Sequence
  chemically synthesized
gaattagcaggcaaggatgg

SEQ ID NO: 26922 - DNA, 20 bp, Artificial Sequence
  chemically synthesized
ccaggtgaacttctagagat

SEQ ID NO: 26923 - DNA, 20 bp, Artificial Sequence
  chemically synthesized
aactacaatgtctgaaatga

SEQ ID NO: 26924 - DNA, 20 bp, Artificial Sequence
  chemically synthesized
aaaagaaaagaaagaaaaga

SEQ ID NO: 26925 - DNA, 20 bp, Artificial Sequence
  chemically synthesized
gactagtctgggcagcatgg

SEQ ID NO: 26926 - DNA, 20 bp, Artificial Sequence
  chemically synthesized
ggcaaaacccctctacatgg

SEQ ID NO: 26927 - DNA, 20 bp, Artificial Sequence
  chemically synthesized
tgccactggctggatgggag

SEQ ID NO: 26928 - DNA, 20 bp, Artificial Sequence
  chemically synthesized
gaggaggcataacctgggcg

SEQ ID NO: 26929 - DNA, 20 bp, Artificial Sequence
  chemically synthesized
ggccatgggggggggtcatc

SEQ ID NO: 26930 - DNA, 20 bp, Artificial Sequence
  chemically synthesized
cctgagaagggggatctgtg

SEQ ID NO: 26931 - DNA, 20 bp, Artificial Sequence
  chemically synthesized
tcttctaaggctcctgtccc

SEQ ID NO: 26932 - DNA, 20 bp, Artificial Sequence
  chemically synthesized
tcctccccagcgccctttgc

SEQ ID NO: 26933 - DNA, 20 bp, Artificial Sequence
  chemically synthesized
cctccactcagagggtcctg

SEQ ID NO: 26934 - DNA, 20 bp, Artificial Sequence
  chemically synthesized
tgcaccagcattcaatttct

SEQ ID NO: 26935 - DNA, 20 bp, Artificial Sequence
  chemically synthesized
tggagatcacagtcgtagct

SEQ ID NO: 26936 - DNA, 20 bp, Artificial Sequence
  chemically synthesized
atcacagtcgtagctacccg

SEQ ID NO: 26937 - DNA, 20 bp, Artificial Sequence
  chemically synthesized
tagatgagttaaaatatgta

SEQ ID NO: 26938 - DNA, 20 bp, Artificial Sequence
  chemically synthesized
atgtaatgtgcttcttaggc

SEQ ID NO: 26939 - DNA, 20 bp, Artificial Sequence
  chemically synthesized
aacagacaactatagaacat

SEQ ID NO: 26940 - DNA, 20 bp, Artificial Sequence
  chemically synthesized
aacaggaaccctccgatcac

SEQ ID NO: 26941 - DNA, 20 bp, Artificial Sequence
  chemically synthesized
accctccgatcaccccagct

SEQ ID NO: 26942 - DNA, 20 bp, Artificial Sequence
  chemically synthesized
aaacgatcaaactgactcta

SEQ ID NO: 26943 - DNA, 20 bp, Artificial Sequence
  chemically synthesized
gacaatgtctggcagccaat

SEQ ID NO: 26944 - DNA, 20 bp, Artificial Sequence
  chemically synthesized
aatggcatgaacccgggagg

SEQ ID NO: 26945 - DNA, 20 bp, Artificial Sequence
  chemically synthesized
ctctaaattctgtcaccctc

SEQ ID NO: 26946 - DNA, 20 bp, Artificial Sequence
  chemically synthesized
ttgggaggctgaggtgggag

SEQ ID NO: 26947 - DNA, 20 bp, Artificial Sequence
  chemically synthesized
aagatacttaggtccttcag

SEQ ID NO: 26948 - DNA, 20 bp, Artificial Sequence
  chemically synthesized
ctgcacacttgcctttcaaa

SEQ ID NO: 26949 - DNA, 20 bp, Artificial Sequence
  chemically synthesized
tcaaaaatggatttcctctc

SEQ ID NO: 26950 - DNA, 20 bp, Artificial Sequence
  chemically synthesized
ggctggggctggggcagagg

SEQ ID NO: 26951 - DNA, 20 bp, Artificial Sequence
  chemically synthesized
ccatttttgaaaggcaagtg

SEQ ID NO: 26952 - DNA, 20 bp, Artificial Sequence
  chemically synthesized
aaaggcaagtgtgcagtttc

SEQ ID NO: 26953 - DNA, 20 bp, Artificial Sequence
  chemically synthesized
tgctccccctctgtctcagc

SEQ ID NO: 26954 - DNA, 20 bp, Artificial Sequence
  chemically synthesized
gactgaggagggcccgacac

SEQ ID NO: 26955 - DNA, 20 bp, Artificial Sequence
  chemically synthesized
acgtatgtgcatatgaggaa

SEQ ID NO: 26956 - DNA, 20 bp, Artificial Sequence
  chemically synthesized
tgtgtattgtgtgagtgtat

SEQ ID NO: 26957 - DNA, 20 bp, Artificial Sequence
  chemically synthesized
gtgtgtgtgttagtgtgtgt

SEQ ID NO: 26958 - DNA, 20 bp, Artificial Sequence
  chemically synthesized
atgttgcccaggctggtggg

SEQ ID NO: 26959 - DNA, 20 bp, Artificial Sequence
  chemically synthesized
tccatggaggcaggaggagc

SEQ ID NO: 26960 - DNA, 20 bp, Artificial Sequence
  chemically synthesized
aggcaggaggagcaggggct

SEQ ID NO: 26961 - DNA, 20 bp, Artificial Sequence
  chemically synthesized
caggggcttggagcttagga

SEQ ID NO: 26962 - DNA, 20 bp, Artificial Sequence
  chemically synthesized
cttctgagggtgacagaatt

SEQ ID NO: 26963 - DNA, 20 bp, Artificial Sequence
  chemically synthesized
cagaatttagagtttgagca

SEQ ID NO: 26964 - DNA, 20 bp, Artificial Sequence
  chemically synthesized
gcaggaggcttggagagagg

SEQ ID NO: 26965 - DNA, 20 bp, Artificial Sequence
  chemically synthesized
catcttccacttgtctcagc

SEQ ID NO: 26966 - DNA, 20 bp, Artificial Sequence
  chemically synthesized
ctgctaccccctttttcttt

SEQ ID NO: 26967 - DNA, 20 bp, Artificial Sequence
  chemically synthesized
tttttaattcttttttctcc

SEQ ID NO: 26968 - DNA, 20 bp, Artificial Sequence
  chemically synthesized
cccctcccctcctttccttc

SEQ ID NO: 26969 - DNA, 20 bp, Artificial Sequence
  chemically synthesized
tgttgcccaggctggaatgc

SEQ ID NO: 26970 - DNA, 20 bp, Artificial Sequence
  chemically synthesized
taaaaatttttttttgtaga

SEQ ID NO: 26971 - DNA, 20 bp, Artificial Sequence
  chemically synthesized
gagacggttttgccatgtag

SEQ ID NO: 26972 - DNA, 20 bp, Artificial Sequence
  chemically synthesized
agtcttgagctcctgggctc

SEQ ID NO: 26973 - DNA, 20 bp, Artificial Sequence
  chemically synthesized
cgtgtcgacctcccaaagtg

SEQ ID NO: 26974 - DNA, 20 bp, Artificial Sequence
  chemically synthesized
tcttccattatttccatcca

SEQ ID NO: 26975 - DNA, 20 bp, Artificial Sequence
  chemically synthesized
ttttgtatttttagtagaga

SEQ ID NO: 26976 - DNA, 20 bp, Artificial Sequence
  chemically synthesized
cgccttggcctcccacagtg

SEQ ID NO: 26977 - DNA, 20 bp, Artificial Sequence
  chemically synthesized
tgagccacggcgcctggcca

SEQ ID NO: 26978 - DNA, 20 bp, Artificial Sequence
  chemically synthesized
tgttttttcatttcagacat

SEQ ID NO: 26979 - DNA, 20 bp, Artificial Sequence
  chemically synthesized
taatgggatatggctataat

SEQ ID NO: 26980 - DNA, 20 bp, Artificial Sequence
  chemically synthesized
atgaacctcctcgttatgca

SEQ ID NO: 26981 - DNA, 20 bp, Artificial Sequence
  chemically synthesized
cctcgttatgcattgtgttt

SEQ ID NO: 26982 - DNA, 20 bp, Artificial Sequence
  chemically synthesized
ttcattgcatgccttgtaat

SEQ ID NO: 26983 - DNA, 20 bp, Artificial Sequence
  chemically synthesized
ttgtattcctctaaatgttc

SEQ ID NO: 26984 - DNA, 20 bp, Artificial Sequence
  chemically synthesized
atgcagttaagcaacttaga

SEQ ID NO: 26985 - DNA, 20 bp, Artificial Sequence
  chemically synthesized
aagcaacttagagtcagttt

SEQ ID NO: 26986 - DNA, 20 bp, Artificial Sequence
  chemically synthesized
gtttgatcgtttgaactctt

SEQ ID NO: 26987 - DNA, 20 bp, Artificial Sequence
  chemically synthesized
tggggtgatcggagggttcc

SEQ ID NO: 26988 - DNA, 20 bp, Artificial Sequence
  chemically synthesized
gtgatcggagggttcctgtt

SEQ ID NO: 26989 - DNA, 20 bp, Artificial Sequence
  chemically synthesized
agctgccatgttctatagtt

SEQ ID NO: 26990 - DNA, 20 bp, Artificial Sequence
  chemically synthesized
catgttctatagttgtctgt

SEQ ID NO: 26991 - DNA, 20 bp, Artificial Sequence
  chemically synthesized
tctatagttgtctgtttttg

SEQ ID NO: 26992 - DNA, 20 bp, Artificial Sequence
  chemically synthesized
tagttgtctgtttttgtttt

SEQ ID NO: 26993 - DNA, 20 bp, Artificial Sequence
  chemically synthesized
ctgggctaccctgtgggcag

SEQ ID NO: 26994 - DNA, 20 bp, Artificial Sequence
  chemically synthesized
cagggactcagccatggagg

SEQ ID NO: 26995 - DNA, 20 bp, Artificial Sequence
  chemically synthesized
tggggaacaccgtggtcatg

SEQ ID NO: 26996 - DNA, 20 bp, Artificial Sequence
  chemically synthesized
ggcaggaagtgacctgggga

SEQ ID NO: 26997 - DNA, 20 bp, Artificial Sequence
  chemically synthesized
ggtccaaggcctagaaggtg

SEQ ID NO: 26998 - DNA, 20 bp, Artificial Sequence
  chemically synthesized
ggtcatgagtgtgtgcaaat

SEQ ID NO: 26999 - DNA, 20 bp, Artificial Sequence
  chemically synthesized
gtgtgagtgtgtgagtgtgt

SEQ ID NO: 27000 - DNA, 20 bp, Artificial Sequence
  chemically synthesized
ggagcaaatttagtgtggaa

SEQ ID NO: 27001 - DNA, 20 bp, Artificial Sequence
  chemically synthesized
aacaggtgggacctggaggg

SEQ ID NO: 27002 - DNA, 20 bp, Artificial Sequence
  chemically synthesized
agtgggctatggtggaatga

SEQ ID NO: 27003 - DNA, 20 bp, Artificial Sequence
  chemically synthesized
caggggagggactgttccag

SEQ ID NO: 27004 - DNA, 20 bp, Artificial Sequence
  chemically synthesized
attttaggaagaacacaggg

SEQ ID NO: 27005 - DNA, 20 bp, Artificial Sequence
  chemically synthesized
cagtcccccagctccaggat

SEQ ID NO: 27006 - DNA, 20 bp, Artificial Sequence
  chemically synthesized
gtgtgcatgggtgtgtgtgc

SEQ ID NO: 27007 - DNA, 20 bp, Artificial Sequence
  chemically synthesized
cccgcccaggttatgcctcc

SEQ ID NO: 27008 - DNA, 20 bp, Artificial Sequence
  chemically synthesized
cacagcgtctctgctccatg

SEQ ID NO: 27009 - DNA, 20 bp, Artificial Sequence
  chemically synthesized
ctgctccatggtctgcttca

SEQ ID NO: 27010 - DNA, 20 bp, Artificial Sequence
  chemically synthesized
tctgcttcagtctgcttgcc

SEQ ID NO: 27011 - DNA, 22 bp, Artificial Sequence
  chemically synthesized
cccatgtctctttccctacccc

SEQ ID NO: 27012 - DNA, 22 bp, Artificial Sequence
  chemically synthesized
tttccctaccccttgcccatcc

SEQ ID NO: 27013 - DNA, 22 bp, Artificial Sequence
  chemically synthesized
tccctaccccttgcccatccct

SEQ ID NO: 27014 - DNA, 22 bp, Artificial Sequence
  chemically synthesized
ccctaccccttgcccatccctg

SEQ ID NO: 27015 - DNA, 22 bp, Artificial Sequence
  chemically synthesized
cctaccccttgcccatccctgc

SEQ ID NO: 27016 - DNA, 22 bp, Artificial Sequence
  chemically synthesized
ccccttgcccatccctgctggc

SEQ ID NO: 27017 - DNA, 22 bp, Artificial Sequence
  chemically synthesized
gcccatccctgctggcccccgt

SEQ ID NO: 27018 - DNA, 22 bp, Artificial Sequence
  chemically synthesized
cccatccctgctggcccccgtg

SEQ ID NO: 27019 - DNA, 22 bp, Artificial Sequence
  chemically synthesized
ctggcccccgtgaccctcactt

SEQ ID NO: 27020 - DNA, 22 bp, Artificial Sequence
  chemically synthesized
gcccccgtgaccctcactttgg

SEQ ID NO: 27021 - DNA, 22 bp, Artificial Sequence
  chemically synthesized
actttgggacccagtcacacag

SEQ ID NO: 27022 - DNA, 22 bp, Artificial Sequence
  chemically synthesized
tgggacccagtcacacagatga

SEQ ID NO: 27023 - DNA, 22 bp, Artificial Sequence
  chemically synthesized
gggacccagtcacacagatgac

SEQ ID NO: 27024 - DNA, 22 bp, Artificial Sequence
  chemically synthesized
ggacccagtcacacagatgacc

SEQ ID NO: 27025 - DNA, 22 bp, Artificial Sequence
  chemically synthesized
aagctcagggcaagcagactga

SEQ ID NO: 27026 - DNA, 22 bp, Artificial Sequence
  chemically synthesized
agggcaagcagactgaagcaga

SEQ ID NO: 27027 - DNA, 22 bp, Artificial Sequence
  chemically synthesized
aagcagaccatggagcagagac

SEQ ID NO: 27028 - DNA, 22 bp, Artificial Sequence
  chemically synthesized
tgccaggggctgggcaggaggt

SEQ ID NO: 27029 - DNA, 22 bp, Artificial Sequence
  chemically synthesized
ggcaggaggtggccctgtggga

SEQ ID NO: 27030 - DNA, 22 bp, Artificial Sequence
  chemically synthesized
tgggagaggggcatcaggagcc

SEQ ID NO: 27031 - DNA, 22 bp, Artificial Sequence
  chemically synthesized
ggtgtggggagccggagggtaa

SEQ ID NO: 27032 - DNA, 22 bp, Artificial Sequence
  chemically synthesized
aggaggcataacctgggcgggg

SEQ ID NO: 27033 - DNA, 22 bp, Artificial Sequence
  chemically synthesized
ggcggggggattggttggggcc

SEQ ID NO: 27034 - DNA, 22 bp, Artificial Sequence
  chemically synthesized
gttggggccatgggggggggtc

SEQ ID NO: 27035 - DNA, 22 bp, Artificial Sequence
  chemically synthesized
gggccatgggggggggtcatca

SEQ ID NO: 27036 - DNA, 22 bp, Artificial Sequence
  chemically synthesized
tgaccccagcatttgagcatta

SEQ ID NO: 27037 - DNA, 22 bp, Artificial Sequence
  chemically synthesized
gaccccagcatttgagcattac

SEQ ID NO: 27038 - DNA, 22 bp, Artificial Sequence
  chemically synthesized
accccagcatttgagcattaca

SEQ ID NO: 27039 - DNA, 22 bp, Artificial Sequence
  chemically synthesized
gagcattacacacacactctta

SEQ ID NO: 27040 - DNA, 22 bp, Artificial Sequence
  chemically synthesized
agcattacacacacactcttac

SEQ ID NO: 27041 - DNA, 22 bp, Artificial Sequence
  chemically synthesized
cacacacactcttacacactcg

SEQ ID NO: 27042 - DNA, 22 bp, Artificial Sequence
  chemically synthesized
ttacacactcgcacccatatta

SEQ ID NO: 27043 - DNA, 22 bp, Artificial Sequence
  chemically synthesized
acacactcgcacccatattacc

SEQ ID NO: 27044 - DNA, 22 bp, Artificial Sequence
  chemically synthesized
cacactcgcacccatattacca

SEQ ID NO: 27045 - DNA, 22 bp, Artificial Sequence
  chemically synthesized
gcacccatattaccatgtataa

SEQ ID NO: 27046 - DNA, 22 bp, Artificial Sequence
  chemically synthesized
ccatgtataaatatacacacgc

SEQ ID NO: 27047 - DNA, 22 bp, Artificial Sequence
  chemically synthesized
atctggtgcacacacacccatg

SEQ ID NO: 27048 - DNA, 22 bp, Artificial Sequence
  chemically synthesized
gtgcacacacacccatgcacac

SEQ ID NO: 27049 - DNA, 22 bp, Artificial Sequence
  chemically synthesized
aggatattcacatcagctgtgt

SEQ ID NO: 27050 - DNA, 22 bp, Artificial Sequence
  chemically synthesized
acatcagctgtgtgcaaagccc

SEQ ID NO: 27051 - DNA, 22 bp, Artificial Sequence
  chemically synthesized
tgtgcaaagcccggatcctgga

SEQ ID NO: 27052 - DNA, 22 bp, Artificial Sequence
  chemically synthesized
gagctgggggactgggagacgc

SEQ ID NO: 27053 - DNA, 22 bp, Artificial Sequence
  chemically synthesized
ggggactgggagacgcacaggg

SEQ ID NO: 27054 - DNA, 22 bp, Artificial Sequence
  chemically synthesized
ggagacgcacagggggcggggg

SEQ ID NO: 27055 - DNA, 22 bp, Artificial Sequence
  chemically synthesized
cctaggcacacatcctgagaag

SEQ ID NO: 27056 - DNA, 22 bp, Artificial Sequence
  chemically synthesized
ggcacacatcctgagaaggggg

SEQ ID NO: 27057 - DNA, 22 bp, Artificial Sequence
  chemically synthesized
agaagggggatctgtgaatggt

SEQ ID NO: 27058 - DNA, 22 bp, Artificial Sequence
  chemically synthesized
tgaatggttttcctcccatcca

SEQ ID NO: 27059 - DNA, 22 bp, Artificial Sequence
  chemically synthesized
tcctcccatccagccagtggca

SEQ ID NO: 27060 - DNA, 22 bp, Artificial Sequence
  chemically synthesized
cctcccatccagccagtggcag

SEQ ID NO: 27061 - DNA, 22 bp, Artificial Sequence
  chemically synthesized
ctcccatccagccagtggcaga

SEQ ID NO: 27062 - DNA, 22 bp, Artificial Sequence
  chemically synthesized
ccatccagccagtggcagaggc

SEQ ID NO: 27063 - DNA, 22 bp, Artificial Sequence
  chemically synthesized
cagatcacctcgggccttagtc

SEQ ID NO: 27064 - DNA, 22 bp, Artificial Sequence
  chemically synthesized
gggccttagtctcagctcttct

SEQ ID NO: 27065 - DNA, 22 bp, Artificial Sequence
  chemically synthesized
agtctcagctcttctaaggctc

SEQ ID NO: 27066 - DNA, 22 bp, Artificial Sequence
  chemically synthesized
gtctcagctcttctaaggctcc

SEQ ID NO: 27067 - DNA, 22 bp, Artificial Sequence
  chemically synthesized
agctcttctaaggctcctgtcc

SEQ ID NO: 27068 - DNA, 22 bp, Artificial Sequence
  chemically synthesized
ttctaaggctcctgtcccctca

SEQ ID NO: 27069 - DNA, 22 bp, Artificial Sequence
  chemically synthesized
ctaaggctcctgtcccctcaga

SEQ ID NO: 27070 - DNA, 22 bp, Artificial Sequence
  chemically synthesized
taaggctcctgtcccctcagat

SEQ ID NO: 27071 - DNA, 22 bp, Artificial Sequence
  chemically synthesized
aggctcctgtcccctcagattg

SEQ ID NO: 27072 - DNA, 22 bp, Artificial Sequence
  chemically synthesized
ctgtcccctcagattggagact

SEQ ID NO: 27073 - DNA, 22 bp, Artificial Sequence
  chemically synthesized
tcccctcagattggagactcca

SEQ ID NO: 27074 - DNA, 22 bp, Artificial Sequence
  chemically synthesized
agattggagactccagaagctg

SEQ ID NO: 27075 - DNA, 22 bp, Artificial Sequence
  chemically synthesized
gagactccagaagctgggccct

SEQ ID NO: 27076 - DNA, 22 bp, Artificial Sequence
  chemically synthesized
cagaagctgggccctgtgttct

SEQ ID NO: 27077 - DNA, 22 bp, Artificial Sequence
  chemically synthesized
ggccctgtgttcttcctaaaat

SEQ ID NO: 27078 - DNA, 22 bp, Artificial Sequence
  chemically synthesized
tgttcttcctaaaatccatact

SEQ ID NO: 27079 - DNA, 22 bp, Artificial Sequence
  chemically synthesized
ttcctaaaatccatactggaac

SEQ ID NO: 27080 - DNA, 22 bp, Artificial Sequence
  chemically synthesized
cctaaaatccatactggaacag

SEQ ID NO: 27081 - DNA, 22 bp, Artificial Sequence
  chemically synthesized
ctaaaatccatactggaacagt

SEQ ID NO: 27082 - DNA, 22 bp, Artificial Sequence
  chemically synthesized
aaatccatactggaacagtccc

SEQ ID NO: 27083 - DNA, 22 bp, Artificial Sequence
  chemically synthesized
gaacagtccctcccctgccaaa

SEQ ID NO: 27084 - DNA, 22 bp, Artificial Sequence
  chemically synthesized
ccctgccaaaattccattgaga

SEQ ID NO: 27085 - DNA, 22 bp, Artificial Sequence
  chemically synthesized
ccaaaattccattgagatcctt

SEQ ID NO: 27086 - DNA, 22 bp, Artificial Sequence
  chemically synthesized
cattgagatccttaaatctggg

SEQ ID NO: 27087 - DNA, 22 bp, Artificial Sequence
  chemically synthesized
agatccttaaatctgggtcatt

SEQ ID NO: 27088 - DNA, 22 bp, Artificial Sequence
  chemically synthesized
aaatctgggtcattccaccata

SEQ ID NO: 27089 - DNA, 22 bp, Artificial Sequence
  chemically synthesized
aatctgggtcattccaccatag

SEQ ID NO: 27090 - DNA, 22 bp, Artificial Sequence
  chemically synthesized
ggtcattccaccatagcccact

SEQ ID NO: 27091 - DNA, 22 bp, Artificial Sequence
  chemically synthesized
caccatagcccactctccaagc

SEQ ID NO: 27092 - DNA, 22 bp, Artificial Sequence
  chemically synthesized
tccaagcacaaccctccaggtc

SEQ ID NO: 27093 - DNA, 22 bp, Artificial Sequence
  chemically synthesized
caagcacaaccctccaggtccc

SEQ ID NO: 27094 - DNA, 22 bp, Artificial Sequence
  chemically synthesized
caggtcccacctgttgtcctca

SEQ ID NO: 27095 - DNA, 22 bp, Artificial Sequence
  chemically synthesized
ttgtcctcatcccccaccacgc

SEQ ID NO: 27096 - DNA, 22 bp, Artificial Sequence
  chemically synthesized
tcctcatcccccaccacgcaag

SEQ ID NO: 27097 - DNA, 22 bp, Artificial Sequence
  chemically synthesized
atcccccaccacgcaaggcctc

SEQ ID NO: 27098 - DNA, 22 bp, Artificial Sequence
  chemically synthesized
ctccccagcgccctttgccctc

SEQ ID NO: 27099 - DNA, 22 bp, Artificial Sequence
  chemically synthesized
cccagcgccctttgccctcgct

SEQ ID NO: 27100 - DNA, 22 bp, Artificial Sequence
  chemically synthesized
tgccctcgcttccctagaaacc

SEQ ID NO: 27101 - DNA, 22 bp, Artificial Sequence
  chemically synthesized
gccctcgcttccctagaaacct

SEQ ID NO: 27102 - DNA, 22 bp, Artificial Sequence
  chemically synthesized
ccctcgcttccctagaaacctc

SEQ ID NO: 27103 - DNA, 22 bp, Artificial Sequence
  chemically synthesized
gcttccctagaaacctcgttcc

SEQ ID NO: 27104 - DNA, 22 bp, Artificial Sequence
  chemically synthesized
ccctagaaacctcgttccacac

SEQ ID NO: 27105 - DNA, 22 bp, Artificial Sequence
  chemically synthesized
cctagaaacctcgttccacact

SEQ ID NO: 27106 - DNA, 22 bp, Artificial Sequence
  chemically synthesized
gaaacctcgttccacactaaat

SEQ ID NO: 27107 - DNA, 22 bp, Artificial Sequence
  chemically synthesized
gttccacactaaatttgctccc

SEQ ID NO: 27108 - DNA, 22 bp, Artificial Sequence
  chemically synthesized
cacactaaatttgctcccctca

SEQ ID NO: 27109 - DNA, 22 bp, Artificial Sequence
  chemically synthesized
aatttgctcccctcagcccgag

SEQ ID NO: 27110 - DNA, 22 bp, Artificial Sequence
  chemically synthesized
gctcccctcagcccgaggtcat

SEQ ID NO: 27111 - DNA, 22 bp, Artificial Sequence
  chemically synthesized
ctcccctcagcccgaggtcatc

SEQ ID NO: 27112 - DNA, 22 bp, Artificial Sequence
  chemically synthesized
ccctcagcccgaggtcatctca

SEQ ID NO: 27113 - DNA, 22 bp, Artificial Sequence
  chemically synthesized
agcccgaggtcatctcacaggt

SEQ ID NO: 27114 - DNA, 22 bp, Artificial Sequence
  chemically synthesized
acaggtacctctcctgcccctt

SEQ ID NO: 27115 - DNA, 22 bp, Artificial Sequence
  chemically synthesized
tcctgccccttgatccatctgc

SEQ ID NO: 27116 - DNA, 22 bp, Artificial Sequence
  chemically synthesized
ctgccccttgatccatctgcac

SEQ ID NO: 27117 - DNA, 22 bp, Artificial Sequence
  chemically synthesized
ccccttgatccatctgcaccct

SEQ ID NO: 27118 - DNA, 22 bp, Artificial Sequence
  chemically synthesized
gatccatctgcaccctgacagc

SEQ ID NO: 27119 - DNA, 22 bp, Artificial Sequence
  chemically synthesized
atccatctgcaccctgacagca

SEQ ID NO: 27120 - DNA, 22 bp, Artificial Sequence
  chemically synthesized
caccctgacagcactgacacac

SEQ ID NO: 27121 - DNA, 22 bp, Artificial Sequence
  chemically synthesized
acagcactgacacacacattca

SEQ ID NO: 27122 - DNA, 22 bp, Artificial Sequence
  chemically synthesized
acacacacattcacatgccctc

SEQ ID NO: 27123 - DNA, 22 bp, Artificial Sequence
  chemically synthesized
acatgccctcacaaactcacac

SEQ ID NO: 27124 - DNA, 22 bp, Artificial Sequence
  chemically synthesized
acaaactcacacacactcacac

SEQ ID NO: 27125 - DNA, 22 bp, Artificial Sequence
  chemically synthesized
acacacactcacacactcacac

SEQ ID NO: 27126 - DNA, 22 bp, Artificial Sequence
  chemically synthesized
acacactcacacattgctcact

SEQ ID NO: 27127 - DNA, 22 bp, Artificial Sequence
  chemically synthesized
acacattgctcacttcactcaa

SEQ ID NO: 27128 - DNA, 22 bp, Artificial Sequence
  chemically synthesized
ctcacttcactcaaaaacacac

SEQ ID NO: 27129 - DNA, 22 bp, Artificial Sequence
  chemically synthesized
acttcactcaaaaacacacatt

SEQ ID NO: 27130 - DNA, 22 bp, Artificial Sequence
  chemically synthesized
cactcaaaaacacacatttgca

SEQ ID NO: 27131 - DNA, 22 bp, Artificial Sequence
  chemically synthesized
actcaaaaacacacatttgcac

SEQ ID NO: 27132 - DNA, 22 bp, Artificial Sequence
  chemically synthesized
aaaaacacacatttgcacacac

SEQ ID NO: 27133 - DNA, 22 bp, Artificial Sequence
  chemically synthesized
gcacacactcatgaccacgctc

SEQ ID NO: 27134 - DNA, 22 bp, Artificial Sequence
  chemically synthesized
cacacactcatgaccacgctct

SEQ ID NO: 27135 - DNA, 22 bp, Artificial Sequence
  chemically synthesized
atgaccacgctctgctgtaccc

SEQ ID NO: 27136 - DNA, 22 bp, Artificial Sequence
  chemically synthesized
tgctgtacccactctcacatgt

SEQ ID NO: 27137 - DNA, 22 bp, Artificial Sequence
  chemically synthesized
ctgtacccactctcacatgtgc

SEQ ID NO: 27138 - DNA, 22 bp, Artificial Sequence
  chemically synthesized
tacccactctcacatgtgcata

SEQ ID NO: 27139 - DNA, 22 bp, Artificial Sequence
  chemically synthesized
tcacatgtgcatatgcatgcta

SEQ ID NO: 27140 - DNA, 22 bp, Artificial Sequence
  chemically synthesized
acatgtgcatatgcatgctaat

SEQ ID NO: 27141 - DNA, 22 bp, Artificial Sequence
  chemically synthesized
atgcacacattcatactccctc

SEQ ID NO: 27142 - DNA, 22 bp, Artificial Sequence
  chemically synthesized
atactccctcccacacacacac

SEQ ID NO: 27143 - DNA, 22 bp, Artificial Sequence
  chemically synthesized
cctcccacacacacacacctga

SEQ ID NO: 27144 - DNA, 22 bp, Artificial Sequence
  chemically synthesized
ccacacacacacacctgacaca

SEQ ID NO: 27145 - DNA, 22 bp, Artificial Sequence
  chemically synthesized
acacacccacacacgtacactc

SEQ ID NO: 27146 - DNA, 22 bp, Artificial Sequence
  chemically synthesized
acacacccacgtcttcctgcac

SEQ ID NO: 27147 - DNA, 22 bp, Artificial Sequence
  chemically synthesized
cctgcacacagagctgggctcc

SEQ ID NO: 27148 - DNA, 22 bp, Artificial Sequence
  chemically synthesized
ctgcacacagagctgggctccc

SEQ ID NO: 27149 - DNA, 22 bp, Artificial Sequence
  chemically synthesized
cacacagagctgggctccctct

SEQ ID NO: 27150 - DNA, 22 bp, Artificial Sequence
  chemically synthesized
ggctccctctctgctgcctcca

SEQ ID NO: 27151 - DNA, 22 bp, Artificial Sequence
  chemically synthesized
cctctctgctgcctccagaccc

SEQ ID NO: 27152 - DNA, 22 bp, Artificial Sequence
  chemically synthesized
tctgctgcctccagacccagag

SEQ ID NO: 27153 - DNA, 22 bp, Artificial Sequence
  chemically synthesized
tgctgcctccagacccagagca

SEQ ID NO: 27154 - DNA, 22 bp, Artificial Sequence
  chemically synthesized
ctgcctccagacccagagcagc

SEQ ID NO: 27155 - DNA, 22 bp, Artificial Sequence
  chemically synthesized
cctccagacccagagcagctcc

SEQ ID NO: 27156 - DNA, 22 bp, Artificial Sequence
  chemically synthesized
cagacccagagcagctccagtt

SEQ ID NO: 27157 - DNA, 22 bp, Artificial Sequence
  chemically synthesized
cagttgtcccagccctgagctc

SEQ ID NO: 27158 - DNA, 22 bp, Artificial Sequence
  chemically synthesized
tcccagccctgagctcctctct

SEQ ID NO: 27159 - DNA, 22 bp, Artificial Sequence
  chemically synthesized
agctcctctctttgcagcatcc

SEQ ID NO: 27160 - DNA, 22 bp, Artificial Sequence
  chemically synthesized
ctctctttgcagcatccacctg

SEQ ID NO: 27161 - DNA, 22 bp, Artificial Sequence
  chemically synthesized
tctttgcagcatccacctgcaa

SEQ ID NO: 27162 - DNA, 22 bp, Artificial Sequence
  chemically synthesized
tttgcagcatccacctgcaaac

SEQ ID NO: 27163 - DNA, 22 bp, Artificial Sequence
  chemically synthesized
tgcagcatccacctgcaaacag

SEQ ID NO: 27164 - DNA, 22 bp, Artificial Sequence
  chemically synthesized
gcagcatccacctgcaaacaga

SEQ ID NO: 27165 - DNA, 22 bp, Artificial Sequence
  chemically synthesized
cagcatccacctgcaaacagaa

SEQ ID NO: 27166 - DNA, 22 bp, Artificial Sequence
  chemically synthesized
caaacagaacaccttctaggcc

SEQ ID NO: 27167 - DNA, 22 bp, Artificial Sequence
  chemically synthesized
ctaggccttggaccctgactct

SEQ ID NO: 27168 - DNA, 22 bp, Artificial Sequence
  chemically synthesized
taggccttggaccctgactctg

SEQ ID NO: 27169 - DNA, 22 bp, Artificial Sequence
  chemically synthesized
ggccttggaccctgactctgtg

SEQ ID NO: 27170 - DNA, 22 bp, Artificial Sequence
  chemically synthesized
ggaccctgactctgtggacttc

SEQ ID NO: 27171 - DNA, 22 bp, Artificial Sequence
  chemically synthesized
gaccctgactctgtggacttcc

SEQ ID NO: 27172 - DNA, 22 bp, Artificial Sequence
  chemically synthesized
actctgtggacttccttgtctt

SEQ ID NO: 27173 - DNA, 22 bp, Artificial Sequence
  chemically synthesized
tgtggacttccttgtcttctca

SEQ ID NO: 27174 - DNA, 22 bp, Artificial Sequence
  chemically synthesized
tggacttccttgtcttctcatt

SEQ ID NO: 27175 - DNA, 22 bp, Artificial Sequence
  chemically synthesized
ccttgtcttctcattcctatca

SEQ ID NO: 27176 - DNA, 22 bp, Artificial Sequence
  chemically synthesized
cttgtcttctcattcctatcac

SEQ ID NO: 27177 - DNA, 22 bp, Artificial Sequence
  chemically synthesized
gtcttctcattcctatcacccc

SEQ ID NO: 27178 - DNA, 22 bp, Artificial Sequence
  chemically synthesized
tcttctcattcctatcaccccc

SEQ ID NO: 27179 - DNA, 22 bp, Artificial Sequence
  chemically synthesized
ctcattcctatcaccccccgac

SEQ ID NO: 27180 - DNA, 22 bp, Artificial Sequence
  chemically synthesized
tcattcctatcaccccccgacc

SEQ ID NO: 27181 - DNA, 22 bp, Artificial Sequence
  chemically synthesized
attcctatcaccccccgaccca

SEQ ID NO: 27182 - DNA, 22 bp, Artificial Sequence
  chemically synthesized
ctatcaccccccgacccagcag

SEQ ID NO: 27183 - DNA, 22 bp, Artificial Sequence
  chemically synthesized
tcaccccccgacccagcaggac

SEQ ID NO: 27184 - DNA, 22 bp, Artificial Sequence
  chemically synthesized
gggaggctcagtcaggggccca

SEQ ID NO: 27185 - DNA, 22 bp, Artificial Sequence
  chemically synthesized
agtcaggggcccagaatcttcc

SEQ ID NO: 27186 - DNA, 22 bp, Artificial Sequence
  chemically synthesized
cctccccaggtcacttcctgcc

SEQ ID NO: 27187 - DNA, 22 bp, Artificial Sequence
  chemically synthesized
ctccccaggtcacttcctgcca

SEQ ID NO: 27188 - DNA, 22 bp, Artificial Sequence
  chemically synthesized
cccaggtcacttcctgccactg

SEQ ID NO: 27189 - DNA, 22 bp, Artificial Sequence
  chemically synthesized
cctgccactgtcctgagtcaga

SEQ ID NO: 27190 - DNA, 22 bp, Artificial Sequence
  chemically synthesized
ctgccactgtcctgagtcagac

SEQ ID NO: 27191 - DNA, 22 bp, Artificial Sequence
  chemically synthesized
ccactgtcctgagtcagacact

SEQ ID NO: 27192 - DNA, 22 bp, Artificial Sequence
  chemically synthesized
tcctgagtcagacactgcccct

SEQ ID NO: 27193 - DNA, 22 bp, Artificial Sequence
  chemically synthesized
agtcagacactgcccctgtaag

SEQ ID NO: 27194 - DNA, 22 bp, Artificial Sequence
  chemically synthesized
cccctgtaagtgactgtccata

SEQ ID NO: 27195 - DNA, 22 bp, Artificial Sequence
  chemically synthesized
taagtgactgtccataactctt

SEQ ID NO: 27196 - DNA, 22 bp, Artificial Sequence
  chemically synthesized
tccataactcttcatctttttc

SEQ ID NO: 27197 - DNA, 22 bp, Artificial Sequence
  chemically synthesized
ttcatctttttcacaccagtga

SEQ ID NO: 27198 - DNA, 22 bp, Artificial Sequence
  chemically synthesized
catctttttcacaccagtgact

SEQ ID NO: 27199 - DNA, 22 bp, Artificial Sequence
  chemically synthesized
atctttttcacaccagtgactt

SEQ ID NO: 27200 - DNA, 22 bp, Artificial Sequence
  chemically synthesized
tttcacaccagtgacttccacc

SEQ ID NO: 27201 - DNA, 22 bp, Artificial Sequence
  chemically synthesized
ttcacaccagtgacttccacct

SEQ ID NO: 27202 - DNA, 22 bp, Artificial Sequence
  chemically synthesized
tcacaccagtgacttccacctt

SEQ ID NO: 27203 - DNA, 22 bp, Artificial Sequence
  chemically synthesized
cacaccagtgacttccaccttc

SEQ ID NO: 27204 - DNA, 22 bp, Artificial Sequence
  chemically synthesized
acaccagtgacttccaccttcc

SEQ ID NO: 27205 - DNA, 22 bp, Artificial Sequence
  chemically synthesized
ccaccttccccactgcagccac

SEQ ID NO: 27206 - DNA, 22 bp, Artificial Sequence
  chemically synthesized
caccttccccactgcagccaca

SEQ ID NO: 27207 - DNA, 22 bp, Artificial Sequence
  chemically synthesized
ccccactgcagccacactcagg

SEQ ID NO: 27208 - DNA, 22 bp, Artificial Sequence
  chemically synthesized
cccactgcagccacactcagga

SEQ ID NO: 27209 - DNA, 22 bp, Artificial Sequence
  chemically synthesized
cagccacactcaggaccccatt

SEQ ID NO: 27210 - DNA, 22 bp, Artificial Sequence
  chemically synthesized
aggaccccatttgacccaggga

SEQ ID NO: 27211 - DNA, 22 bp, Artificial Sequence
  chemically synthesized
gacccagggaggcctctgacac

SEQ ID NO: 27212 - DNA, 22 bp, Artificial Sequence
  chemically synthesized
acccagggaggcctctgacacc

SEQ ID NO: 27213 - DNA, 22 bp, Artificial Sequence
  chemically synthesized
tgacacctccactgcccactcc

SEQ ID NO: 27214 - DNA, 22 bp, Artificial Sequence
  chemically synthesized
acacctccactgcccactcccg

SEQ ID NO: 27215 - DNA, 22 bp, Artificial Sequence
  chemically synthesized
cactgcccactcccgctctgag

SEQ ID NO: 27216 - DNA, 22 bp, Artificial Sequence
  chemically synthesized
cccactcccgctctgagcacag

SEQ ID NO: 27217 - DNA, 22 bp, Artificial Sequence
  chemically synthesized
ccgctctgagcacagccccacc

SEQ ID NO: 27218 - DNA, 22 bp, Artificial Sequence
  chemically synthesized
tgagcacagccccaccctccct

SEQ ID NO: 27219 - DNA, 22 bp, Artificial Sequence
  chemically synthesized
agcacagccccaccctccctct

SEQ ID NO: 27220 - DNA, 22 bp, Artificial Sequence
  chemically synthesized
cctctcactgcccccacccctt

SEQ ID NO: 27221 - DNA, 22 bp, Artificial Sequence
  chemically synthesized
tcactgcccccaccccttcctc

SEQ ID NO: 27222 - DNA, 22 bp, Artificial Sequence
  chemically synthesized
actgcccccaccccttcctcca

SEQ ID NO: 27223 - DNA, 22 bp, Artificial Sequence
  chemically synthesized
cccccaccccttcctccaaggc

SEQ ID NO: 27224 - DNA, 22 bp, Artificial Sequence
  chemically synthesized
cctccaaggcctttgcattcct

SEQ ID NO: 27225 - DNA, 22 bp, Artificial Sequence
  chemically synthesized
ctccaaggcctttgcattcctc

SEQ ID NO: 27226 - DNA, 22 bp, Artificial Sequence
  chemically synthesized
caaggcctttgcattcctctcc

SEQ ID NO: 27227 - DNA, 22 bp, Artificial Sequence
  chemically synthesized
tgcattcctctccatccagaag

SEQ ID NO: 27228 - DNA, 22 bp, Artificial Sequence
  chemically synthesized
gcattcctctccatccagaagc

SEQ ID NO: 27229 - DNA, 22 bp, Artificial Sequence
  chemically synthesized
cattcctctccatccagaagcg

SEQ ID NO: 27230 - DNA, 22 bp, Artificial Sequence
  chemically synthesized
ctctccatccagaagcgctcca

SEQ ID NO: 27231 - DNA, 22 bp, Artificial Sequence
  chemically synthesized
tccatccagaagcgctccatga

SEQ ID NO: 27232 - DNA, 22 bp, Artificial Sequence
  chemically synthesized
catccagaagcgctccatgacc

SEQ ID NO: 27233 - DNA, 22 bp, Artificial Sequence
  chemically synthesized
catgaccacggtgttccccacc

SEQ ID NO: 27234 - DNA, 22 bp, Artificial Sequence
  chemically synthesized
cccaccaagctggccctccatg

SEQ ID NO: 27235 - DNA, 22 bp, Artificial Sequence
  chemically synthesized
gccctccatggctgagtccctg

SEQ ID NO: 27236 - DNA, 22 bp, Artificial Sequence
  chemically synthesized
catggctgagtccctgactgct

SEQ ID NO: 27237 - DNA, 22 bp, Artificial Sequence
  chemically synthesized
agtccctgactgctgtcttcag

SEQ ID NO: 27238 - DNA, 22 bp, Artificial Sequence
  chemically synthesized
actgctgtcttcagcaccctcc

SEQ ID NO: 27239 - DNA, 22 bp, Artificial Sequence
  chemically synthesized
ctgtcttcagcaccctccactc

SEQ ID NO: 27240 - DNA, 22 bp, Artificial Sequence
  chemically synthesized
tcttcagcaccctccactcaga

SEQ ID NO: 27241 - DNA, 22 bp, Artificial Sequence
  chemically synthesized
cagcaccctccactcagagggt

SEQ ID NO: 27242 - DNA, 22 bp, Artificial Sequence
  chemically synthesized
agcaccctccactcagagggtc

SEQ ID NO: 27243 - DNA, 22 bp, Artificial Sequence
  chemically synthesized
cactcagagggtcctgtcctgc

SEQ ID NO: 27244 - DNA, 22 bp, Artificial Sequence
  chemically synthesized
agagggtcctgtcctgcttccc

SEQ ID NO: 27245 - DNA, 22 bp, Artificial Sequence
  chemically synthesized
tcctgcttcccagtccgactta

SEQ ID NO: 27246 - DNA, 22 bp, Artificial Sequence
  chemically synthesized
cttcccagtccgacttatcaac

SEQ ID NO: 27247 - DNA, 22 bp, Artificial Sequence
  chemically synthesized
cccagtccgacttatcaactcc

SEQ ID NO: 27248 - DNA, 22 bp, Artificial Sequence
  chemically synthesized
ccagtccgacttatcaactccc

SEQ ID NO: 27249 - DNA, 22 bp, Artificial Sequence
  chemically synthesized
atcaactcccaatgctgggtca

SEQ ID NO: 27250 - DNA, 22 bp, Artificial Sequence
  chemically synthesized
tcaactcccaatgctgggtcag

SEQ ID NO: 27251 - DNA, 22 bp, Artificial Sequence
  chemically synthesized
ccaatgctgggtcagcccagca

SEQ ID NO: 27252 - DNA, 22 bp, Artificial Sequence
  chemically synthesized
ggtcagcccagcaacgtgtctg

SEQ ID NO: 27253 - DNA, 22 bp, Artificial Sequence
  chemically synthesized
tatatccaccctgaaaccagac

SEQ ID NO: 27254 - DNA, 22 bp, Artificial Sequence
  chemically synthesized
aaaccagactgcccacagggta

SEQ ID NO: 27255 - DNA, 22 bp, Artificial Sequence
  chemically synthesized
cccacagggtagcccagctgtg

SEQ ID NO: 27256 - DNA, 22 bp, Artificial Sequence
  chemically synthesized
tgcctccaggtagctctgagat

SEQ ID NO: 27257 - DNA, 22 bp, Artificial Sequence
  chemically synthesized
caggtagctctgagatcatgca

SEQ ID NO: 27258 - DNA, 22 bp, Artificial Sequence
  chemically synthesized
tgagatcatgcaccagcattca

SEQ ID NO: 27259 - DNA, 22 bp, Artificial Sequence
  chemically synthesized
agatcatgcaccagcattcaat

SEQ ID NO: 27260 - DNA, 22 bp, Artificial Sequence
  chemically synthesized
aatttctccatgcttccatttt

SEQ ID NO: 27261 - DNA, 22 bp, Artificial Sequence
  chemically synthesized
ctccatgcttccattttctcgt

SEQ ID NO: 27262 - DNA, 22 bp, Artificial Sequence
  chemically synthesized
tccatgcttccattttctcgtg

SEQ ID NO: 27263 - DNA, 22 bp, Artificial Sequence
  chemically synthesized
catgcttccattttctcgtgtg

SEQ ID NO: 27264 - DNA, 22 bp, Artificial Sequence
  chemically synthesized
ccattttctcgtgtgtaaaatg

SEQ ID NO: 27265 - DNA, 22 bp, Artificial Sequence
  chemically synthesized
cattttctcgtgtgtaaaatgg

SEQ ID NO: 27266 - DNA, 22 bp, Artificial Sequence
  chemically synthesized
tctcgtgtgtaaaatggagatc

SEQ ID NO: 27267 - DNA, 22 bp, Artificial Sequence
  chemically synthesized
ctcgtgtgtaaaatggagatca

SEQ ID NO: 27268 - DNA, 22 bp, Artificial Sequence
  chemically synthesized
tcgtgtgtaaaatggagatcac

SEQ ID NO: 27269 - DNA, 22 bp, Artificial Sequence
  chemically synthesized
gtgtgtaaaatggagatcacag

SEQ ID NO: 27270 - DNA, 22 bp, Artificial Sequence
  chemically synthesized
cccgattggattgctcggataa

SEQ ID NO: 27271 - DNA, 22 bp, Artificial Sequence
  chemically synthesized
gattgctcggataattagatga

SEQ ID NO: 27272 - DNA, 22 bp, Artificial Sequence
  chemically synthesized
ctcggataattagatgagttaa

SEQ ID NO: 27273 - DNA, 22 bp, Artificial Sequence
  chemically synthesized
ggataattagatgagttaaaat

SEQ ID NO: 27274 - DNA, 22 bp, Artificial Sequence
  chemically synthesized
gatgagttaaaatatgtaatgt

SEQ ID NO: 27275 - DNA, 22 bp, Artificial Sequence
  chemically synthesized
aaatatgtaatgtgcttcttag

SEQ ID NO: 27276 - DNA, 22 bp, Artificial Sequence
  chemically synthesized
cttaggcaaaagtttgaacata

SEQ ID NO: 27277 - DNA, 22 bp, Artificial Sequence
  chemically synthesized
ttaggcaaaagtttgaacataa

SEQ ID NO: 27278 - DNA, 22 bp, Artificial Sequence
  chemically synthesized
aggcaaaagtttgaacataaaa

SEQ ID NO: 27279 - DNA, 22 bp, Artificial Sequence
  chemically synthesized
ggcaaaagtttgaacataaaag

SEQ ID NO: 27280 - DNA, 22 bp, Artificial Sequence
  chemically synthesized
gaacataaaagacagggtctgc

SEQ ID NO: 27281 - DNA, 22 bp, Artificial Sequence
  chemically synthesized
aacataaaagacagggtctgcc

SEQ ID NO: 27282 - DNA, 22 bp, Artificial Sequence
  chemically synthesized
cccaagatgggaagagttcttc

SEQ ID NO: 27283 - DNA, 22 bp, Artificial Sequence
  chemically synthesized
ttctctccccagaaacaatcaa

SEQ ID NO: 27284 - DNA, 22 bp, Artificial Sequence
  chemically synthesized
ctctccccagaaacaatcaaaa

SEQ ID NO: 27285 - DNA, 22 bp, Artificial Sequence
  chemically synthesized
tctccccagaaacaatcaaaac

SEQ ID NO: 27286 - DNA, 22 bp, Artificial Sequence
  chemically synthesized
tccccagaaacaatcaaaacaa

SEQ ID NO: 27287 - DNA, 22 bp, Artificial Sequence
  chemically synthesized
cccagaaacaatcaaaacaaaa

SEQ ID NO: 27288 - DNA, 22 bp, Artificial Sequence
  chemically synthesized
tagaacatggcagctttcaaga

SEQ ID NO: 27289 - DNA, 22 bp, Artificial Sequence
  chemically synthesized
tcaagactctggacatcaggca

SEQ ID NO: 27290 - DNA, 22 bp, Artificial Sequence
  chemically synthesized
caagactctggacatcaggcaa

SEQ ID NO: 27291 - DNA, 22 bp, Artificial Sequence
  chemically synthesized
aagactctggacatcaggcaag

SEQ ID NO: 27292 - DNA, 22 bp, Artificial Sequence
  chemically synthesized
tggacatcaggcaaggaggagt

SEQ ID NO: 27293 - DNA, 22 bp, Artificial Sequence
  chemically synthesized
gacatcaggcaaggaggagtaa

SEQ ID NO: 27294 - DNA, 22 bp, Artificial Sequence
  chemically synthesized
agggataagaagcaaacaacag

SEQ ID NO: 27295 - DNA, 22 bp, Artificial Sequence
  chemically synthesized
cgatcaccccagcttactgttt

SEQ ID NO: 27296 - DNA, 22 bp, Artificial Sequence
  chemically synthesized
actgtttggagagagtctgcag

SEQ ID NO: 27297 - DNA, 22 bp, Artificial Sequence
  chemically synthesized
ctgtttggagagagtctgcagg

SEQ ID NO: 27298 - DNA, 22 bp, Artificial Sequence
  chemically synthesized
tttggagagagtctgcaggtta

SEQ ID NO: 27299 - DNA, 22 bp, Artificial Sequence
  chemically synthesized
ggagagagtctgcaggttacag

SEQ ID NO: 27300 - DNA, 22 bp, Artificial Sequence
  chemically synthesized
gagagagtctgcaggttacagg

SEQ ID NO: 27301 - DNA, 22 bp, Artificial Sequence
  chemically synthesized
caggttacaggccaggaaaggg

SEQ ID NO: 27302 - DNA, 22 bp, Artificial Sequence
  chemically synthesized
caggccaggaaagggaagtcca

SEQ ID NO: 27303 - DNA, 22 bp, Artificial Sequence
  chemically synthesized
cccacgttgaggagatggagct

SEQ ID NO: 27304 - DNA, 22 bp, Artificial Sequence
  chemically synthesized
aggagatggagctgagagtccg

SEQ ID NO: 27305 - DNA, 22 bp, Artificial Sequence
  chemically synthesized
agagtccgaggagaccaaaaca

SEQ ID NO: 27306 - DNA, 22 bp, Artificial Sequence
  chemically synthesized
agagttcaaacgatcaaactga

SEQ ID NO: 27307 - DNA, 22 bp, Artificial Sequence
  chemically synthesized
aaacgatcaaactgactctaag

SEQ ID NO: 27308 - DNA, 22 bp, Artificial Sequence
  chemically synthesized
actctaagttgcttaactgcat

SEQ ID NO: 27309 - DNA, 22 bp, Artificial Sequence
  chemically synthesized
taagttgcttaactgcatcccg

SEQ ID NO: 27310 - DNA, 22 bp, Artificial Sequence
  chemically synthesized
agttgcttaactgcatcccgga

SEQ ID NO: 27311 - DNA, 22 bp, Artificial Sequence
  chemically synthesized
cttaactgcatcccggagcaaa

SEQ ID NO: 27312 - DNA, 22 bp, Artificial Sequence
  chemically synthesized
aactgcatcccggagcaaagct

SEQ ID NO: 27313 - DNA, 22 bp, Artificial Sequence
  chemically synthesized
actgcatcccggagcaaagctc

SEQ ID NO: 27314 - DNA, 22 bp, Artificial Sequence
  chemically synthesized
catcccggagcaaagctcaaga

SEQ ID NO: 27315 - DNA, 22 bp, Artificial Sequence
  chemically synthesized
aagaacatttagaggaatacaa

SEQ ID NO: 27316 - DNA, 22 bp, Artificial Sequence
  chemically synthesized
agaggaatacaaaaatatccag

SEQ ID NO: 27317 - DNA, 22 bp, Artificial Sequence
  chemically synthesized
gaggaatacaaaaatatccagc

SEQ ID NO: 27318 - DNA, 22 bp, Artificial Sequence
  chemically synthesized
acaatgtctggcagccaatcaa

SEQ ID NO: 27319 - DNA, 22 bp, Artificial Sequence
  chemically synthesized
gcagccaatcaaagattacaag

SEQ ID NO: 27320 - DNA, 22 bp, Artificial Sequence
  chemically synthesized
caaggcatgcaatgaaacggga

SEQ ID NO: 27321 - DNA, 22 bp, Artificial Sequence
  chemically synthesized
ataaatatcaaaagagatccag

SEQ ID NO: 27322 - DNA, 22 bp, Artificial Sequence
  chemically synthesized
acacggatgctagaattagcag

SEQ ID NO: 27323 - DNA, 22 bp, Artificial Sequence
  chemically synthesized
gaattagcaggcaaggatggta

SEQ ID NO: 27324 - DNA, 22 bp, Artificial Sequence
  chemically synthesized
gcaggcaaggatggtaaaacag

SEQ ID NO: 27325 - DNA, 22 bp, Artificial Sequence
  chemically synthesized
tagccatatcccattatgttca

SEQ ID NO: 27326 - DNA, 22 bp, Artificial Sequence
  chemically synthesized
tgttcaaaaaattaagtagaat

SEQ ID NO: 27327 - DNA, 22 bp, Artificial Sequence
  chemically synthesized
aaaaaattaagtagaattgtgg

SEQ ID NO: 27328 - DNA, 22 bp, Artificial Sequence
  chemically synthesized
agtagaattgtggaggatattt

SEQ ID NO: 27329 - DNA, 22 bp, Artificial Sequence
  chemically synthesized
tggaggatatttaagagtcccc

SEQ ID NO: 27330 - DNA, 22 bp, Artificial Sequence
  chemically synthesized
aagagtccccaggtgaacttct

SEQ ID NO: 27331 - DNA, 22 bp, Artificial Sequence
  chemically synthesized
agagtccccaggtgaacttcta

SEQ ID NO: 27332 - DNA, 22 bp, Artificial Sequence
  chemically synthesized
ctagagataaaaactacaatgt

SEQ ID NO: 27333 - DNA, 22 bp, Artificial Sequence
  chemically synthesized
tagagataaaaactacaatgtc

SEQ ID NO: 27334 - DNA, 22 bp, Artificial Sequence
  chemically synthesized
gagataaaaactacaatgtctg

SEQ ID NO: 27335 - DNA, 22 bp, Artificial Sequence
  chemically synthesized
caatgtctgaaatgaaaaaaca

SEQ ID NO: 27336 - DNA, 22 bp, Artificial Sequence
  chemically synthesized
aaatgaaaaaacacactggcca

SEQ ID NO: 27337 - DNA, 22 bp, Artificial Sequence
  chemically synthesized
gccaggcgccgtggctcacgcc

SEQ ID NO: 27338 - DNA, 22 bp, Artificial Sequence
  chemically synthesized
acgcctggaatcccagcactgt

SEQ ID NO: 27339 - DNA, 22 bp, Artificial Sequence
  chemically synthesized
gaatcccagcactgtgggaggc

SEQ ID NO: 27340 - DNA, 22 bp, Artificial Sequence
  chemically synthesized
tgggaggccaaggcgggcagat

SEQ ID NO: 27341 - DNA, 22 bp, Artificial Sequence
  chemically synthesized
gctaacatggtgaaaccccatc

SEQ ID NO: 27342 - DNA, 22 bp, Artificial Sequence
  chemically synthesized
acatggtgaaaccccatctcta

SEQ ID NO: 27343 - DNA, 22 bp, Artificial Sequence
  chemically synthesized
tactaaaaatacaaaaaattag

SEQ ID NO: 27344 - DNA, 22 bp, Artificial Sequence
  chemically synthesized
ctaaaaatacaaaaaattagcc

SEQ ID NO: 27345 - DNA, 22 bp, Artificial Sequence
  chemically synthesized
aaaatacaaaaaattagccaga

SEQ ID NO: 27346 - DNA, 22 bp, Artificial Sequence
  chemically synthesized
gccagacgtggtggcaggcgcc

SEQ ID NO: 27347 - DNA, 22 bp, Artificial Sequence
  chemically synthesized
tagtcccagctactcgggaggc

SEQ ID NO: 27348 - DNA, 22 bp, Artificial Sequence
  chemically synthesized
ctcgggaggctgaggcaggaga

SEQ ID NO: 27349 - DNA, 22 bp, Artificial Sequence
  chemically synthesized
gggaggctgaggcaggagaatg

SEQ ID NO: 27350 - DNA, 22 bp, Artificial Sequence
  chemically synthesized
aggcaggagaatggcatgaacc

SEQ ID NO: 27351 - DNA, 22 bp, Artificial Sequence
  chemically synthesized
gcagtgagccaagatcgcgcca

SEQ ID NO: 27352 - DNA, 22 bp, Artificial Sequence
  chemically synthesized
cagtgagccaagatcgcgccac

SEQ ID NO: 27353 - DNA, 22 bp, Artificial Sequence
  chemically synthesized
cactccggcctgggcaacagag

SEQ ID NO: 27354 - DNA, 22 bp, Artificial Sequence
  chemically synthesized
cggcctgggcaacagagcgaga

SEQ ID NO: 27355 - DNA, 22 bp, Artificial Sequence
  chemically synthesized
ggcaacagagcgagactccgcc

SEQ ID NO: 27356 - DNA, 22 bp, Artificial Sequence
  chemically synthesized
cgcctccaaaaaaaaaaaaaag

SEQ ID NO: 27357 - DNA, 22 bp, Artificial Sequence
  chemically synthesized
caaaaaaaaaaaaaagaaaaga

SEQ ID NO: 27358 - DNA, 22 bp, Artificial Sequence
  chemically synthesized
gatggaaataatggaagatgag

SEQ ID NO: 27359 - DNA, 22 bp, Artificial Sequence
  chemically synthesized
agggccaggcactgtggatcac

SEQ ID NO: 27360 - DNA, 22 bp, Artificial Sequence
  chemically synthesized
gggccaggcactgtggatcaca

SEQ ID NO: 27361 - DNA, 22 bp, Artificial Sequence
  chemically synthesized
tggatcacatctgtaatcccag

SEQ ID NO: 27362 - DNA, 22 bp, Artificial Sequence
  chemically synthesized
taatcccagcactttgggaggt

SEQ ID NO: 27363 - DNA, 22 bp, Artificial Sequence
  chemically synthesized
tgggaggtcgacacggggggaa

SEQ ID NO: 27364 - DNA, 22 bp, Artificial Sequence
  chemically synthesized
gggaggtcgacacggggggaat

SEQ ID NO: 27365 - DNA, 22 bp, Artificial Sequence
  chemically synthesized
ggaggtcgacacggggggaatc

SEQ ID NO: 27366 - DNA, 22 bp, Artificial Sequence
  chemically synthesized
gagcccaggagctcaagactag

SEQ ID NO: 27367 - DNA, 22 bp, Artificial Sequence
  chemically synthesized
agcccaggagctcaagactagt

SEQ ID NO: 27368 - DNA, 22 bp, Artificial Sequence
  chemically synthesized
aagactagtctgggcagcatgg

SEQ ID NO: 27369 - DNA, 22 bp, Artificial Sequence
  chemically synthesized
gtctgggcagcatggcaaaacc

SEQ ID NO: 27370 - DNA, 22 bp, Artificial Sequence
  chemically synthesized
ggcagcatggcaaaacccctct

SEQ ID NO: 27371 - DNA, 22 bp, Artificial Sequence
  chemically synthesized
tacatggcaaaaccgtctctac

SEQ ID NO: 27372 - DNA, 22 bp, Artificial Sequence
  chemically synthesized
catggcaaaaccgtctctacaa

SEQ ID NO: 27373 - DNA, 22 bp, Artificial Sequence
  chemically synthesized
tacaaaaaaaaatttttaatta

SEQ ID NO: 27374 - DNA, 22 bp, Artificial Sequence
  chemically synthesized
caaaaaaaaatttttaattagc

SEQ ID NO: 27375 - DNA, 22 bp, Artificial Sequence
  chemically synthesized
ttaattagccaggtgtggtgcc

SEQ ID NO: 27376 - DNA, 22 bp, Artificial Sequence
  chemically synthesized
taattagccaggtgtggtgcca

SEQ ID NO: 27377 - DNA, 22 bp, Artificial Sequence
  chemically synthesized
aattagccaggtgtggtgccac

SEQ ID NO: 27378 - DNA, 22 bp, Artificial Sequence
  chemically synthesized
attagccaggtgtggtgccaca

SEQ ID NO: 27379 - DNA, 22 bp, Artificial Sequence
  chemically synthesized
gccaggtgtggtgccacatgcc

SEQ ID NO: 27380 - DNA, 22 bp, Artificial Sequence
  chemically synthesized
tagtcccagctacctgggaggc

SEQ ID NO: 27381 - DNA, 22 bp, Artificial Sequence
  chemically synthesized
cctgggaggctgaagtggaagg

SEQ ID NO: 27382 - DNA, 22 bp, Artificial Sequence
  chemically synthesized
ggaggctgaagtggaaggatcg

SEQ ID NO: 27383 - DNA, 22 bp, Artificial Sequence
  chemically synthesized
aagtggaaggatcgcctgagcc

SEQ ID NO: 27384 - DNA, 22 bp, Artificial Sequence
  chemically synthesized
agcccaggaggtggaggccaca

SEQ ID NO: 27385 - DNA, 22 bp, Artificial Sequence
  chemically synthesized
tgacaagctactgcattccagc

SEQ ID NO: 27386 - DNA, 22 bp, Artificial Sequence
  chemically synthesized
ctgcattccagcctgggcaaca

SEQ ID NO: 27387 - DNA, 22 bp, Artificial Sequence
  chemically synthesized
cattccagcctgggcaacagag

SEQ ID NO: 27388 - DNA, 22 bp, Artificial Sequence
  chemically synthesized
cagcctgggcaacagagtgaga

SEQ ID NO: 27389 - DNA, 22 bp, Artificial Sequence
  chemically synthesized
ggcaacagagtgagatgagaga

SEQ ID NO: 27390 - DNA, 22 bp, Artificial Sequence
  chemically synthesized
tagttaacttaatgaacagcaa

SEQ ID NO: 27391 - DNA, 22 bp, Artificial Sequence
  chemically synthesized
agttaacttaatgaacagcaat

SEQ ID NO: 27392 - DNA, 22 bp, Artificial Sequence
  chemically synthesized
gttaacttaatgaacagcaata

SEQ ID NO: 27393 - DNA, 22 bp, Artificial Sequence
  chemically synthesized
acttaatgaacagcaataactc

SEQ ID NO: 27394 - DNA, 22 bp, Artificial Sequence
  chemically synthesized
aatgaacagcaataactctata

SEQ ID NO: 27395 - DNA, 22 bp, Artificial Sequence
  chemically synthesized
atgaacagcaataactctataa

SEQ ID NO: 27396 - DNA, 22 bp, Artificial Sequence
  chemically synthesized
tataaaatgaaacactgggaga

SEQ ID NO: 27397 - DNA, 22 bp, Artificial Sequence
  chemically synthesized
taaaatgaaacactgggagaaa

SEQ ID NO: 27398 - DNA, 22 bp, Artificial Sequence
  chemically synthesized
ggagaaaaaagaattaaaaaat

SEQ ID NO: 27399 - DNA, 22 bp, Artificial Sequence
  chemically synthesized
aaaaatggaaagagaatgagtg

SEQ ID NO: 27400 - DNA, 22 bp, Artificial Sequence
  chemically synthesized
tgggacccttaatacatgcata

SEQ ID NO: 27401 - DNA, 22 bp, Artificial Sequence
  chemically synthesized
aatacatgcataattgaaatct

SEQ ID NO: 27402 - DNA, 22 bp, Artificial Sequence
  chemically synthesized
atacatgcataattgaaatctt

SEQ ID NO: 27403 - DNA, 22 bp, Artificial Sequence
  chemically synthesized
aaatctttaaaagaaaaagggg

SEQ ID NO: 27404 - DNA, 22 bp, Artificial Sequence
  chemically synthesized
taaaagaaaaagggggtagcag

SEQ ID NO: 27405 - DNA, 22 bp, Artificial Sequence
  chemically synthesized
aaaagaaaaagggggtagcaga

SEQ ID NO: 27406 - DNA, 22 bp, Artificial Sequence
  chemically synthesized
aaagaaaaagggggtagcagaa

SEQ ID NO: 27407 - DNA, 22 bp, Artificial Sequence
  chemically synthesized
agacaagtggaagatgggcccc

SEQ ID NO: 27408 - DNA, 22 bp, Artificial Sequence
  chemically synthesized
atcagtgtcagctcccatgatg

SEQ ID NO: 27409 - DNA, 22 bp, Artificial Sequence
  chemically synthesized
ccatgatgacgttcccccagcc

SEQ ID NO: 27410 - DNA, 22 bp, Artificial Sequence
  chemically synthesized
ccccagcccccaccacccgggc

SEQ ID NO: 27411 - DNA, 22 bp, Artificial Sequence
  chemically synthesized
ctggagggaaatgcggtgactt

SEQ ID NO: 27412 - DNA, 22 bp, Artificial Sequence
  chemically synthesized
gagggaaatgcggtgactttgc

SEQ ID NO: 27413 - DNA, 22 bp, Artificial Sequence
  chemically synthesized
tgctacatcccttcagacggtc

SEQ ID NO: 27414 - DNA, 22 bp, Artificial Sequence
  chemically synthesized
gctacatcccttcagacggtcc

SEQ ID NO: 27415 - DNA, 22 bp, Artificial Sequence
  chemically synthesized
ctacatcccttcagacggtccc

SEQ ID NO: 27416 - DNA, 22 bp, Artificial Sequence
  chemically synthesized
catcccttcagacggtccctca

SEQ ID NO: 27417 - DNA, 22 bp, Artificial Sequence
  chemically synthesized
cagacggtccctcactggtgtc

SEQ ID NO: 27418 - DNA, 22 bp, Artificial Sequence
  chemically synthesized
agacggtccctcactggtgtcc

SEQ ID NO: 27419 - DNA, 22 bp, Artificial Sequence
  chemically synthesized
actggtgtccctcagcccattc

SEQ ID NO: 27420 - DNA, 22 bp, Artificial Sequence
  chemically synthesized
gtgtccctcagcccattcgcgt

SEQ ID NO: 27421 - DNA, 22 bp, Artificial Sequence
  chemically synthesized
agcccattcgcgtgagctcact

SEQ ID NO: 27422 - DNA, 22 bp, Artificial Sequence
  chemically synthesized
gcgtgagctcactctcccatta

SEQ ID NO: 27423 - DNA, 22 bp, Artificial Sequence
  chemically synthesized
actctcccattaatttcagaaa

SEQ ID NO: 27424 - DNA, 22 bp, Artificial Sequence
  chemically synthesized
tcccattaatttcagaaatcct

SEQ ID NO: 27425 - DNA, 22 bp, Artificial Sequence
  chemically synthesized
ccattaatttcagaaatcctgg

SEQ ID NO: 27426 - DNA, 22 bp, Artificial Sequence
  chemically synthesized
atttcagaaatcctggcctctc

SEQ ID NO: 27427 - DNA, 22 bp, Artificial Sequence
  chemically synthesized
cagaaatcctggcctctctcca

SEQ ID NO: 27428 - DNA, 22 bp, Artificial Sequence
  chemically synthesized
agaaatcctggcctctctccaa

SEQ ID NO: 27429 - DNA, 22 bp, Artificial Sequence
  chemically synthesized
gcctctctccaagcctcctgct

SEQ ID NO: 27430 - DNA, 22 bp, Artificial Sequence
  chemically synthesized
tctccaagcctcctgctcaaac

SEQ ID NO: 27431 - DNA, 22 bp, Artificial Sequence
  chemically synthesized
tccaagcctcctgctcaaactc

SEQ ID NO: 27432 - DNA, 22 bp, Artificial Sequence
  chemically synthesized
caagcctcctgctcaaactcta

SEQ ID NO: 27433 - DNA, 22 bp, Artificial Sequence
  chemically synthesized
ctgctcaaactctaaattctgt

SEQ ID NO: 27434 - DNA, 22 bp, Artificial Sequence
  chemically synthesized
ctcaaactctaaattctgtcac

SEQ ID NO: 27435 - DNA, 22 bp, Artificial Sequence
  chemically synthesized
aaactctaaattctgtcaccct

SEQ ID NO: 27436 - DNA, 22 bp, Artificial Sequence
  chemically synthesized
taaattctgtcaccctcagaag

SEQ ID NO: 27437 - DNA, 22 bp, Artificial Sequence
  chemically synthesized
aattctgtcaccctcagaagat

SEQ ID NO: 27438 - DNA, 22 bp, Artificial Sequence
  chemically synthesized
tgtcaccctcagaagattcagc

SEQ ID NO: 27439 - DNA, 22 bp, Artificial Sequence
  chemically synthesized
tcaccctcagaagattcagcag

SEQ ID NO: 27440 - DNA, 22 bp, Artificial Sequence
  chemically synthesized
agaagattcagcagcatcccgt

SEQ ID NO: 27441 - DNA, 22 bp, Artificial Sequence
  chemically synthesized
agcagcatcccgtattctctct

SEQ ID NO: 27442 - DNA, 22 bp, Artificial Sequence
  chemically synthesized
tctctgagtgttcactatgtac

SEQ ID NO: 27443 - DNA, 22 bp, Artificial Sequence
  chemically synthesized
tctgagtgttcactatgtaccg

SEQ ID NO: 27444 - DNA, 22 bp, Artificial Sequence
  chemically synthesized
tgagtgttcactatgtaccggg

SEQ ID NO: 27445 - DNA, 22 bp, Artificial Sequence
  chemically synthesized
agtgttcactatgtaccgggtg

SEQ ID NO: 27446 - DNA, 22 bp, Artificial Sequence
  chemically synthesized
actatgtaccgggtgccgtgtg

SEQ ID NO: 27447 - DNA, 22 bp, Artificial Sequence
  chemically synthesized
tgtaccgggtgccgtgtgggca

SEQ ID NO: 27448 - DNA, 22 bp, Artificial Sequence
  chemically synthesized
gagttgcagaggagagtgaggc

SEQ ID NO: 27449 - DNA, 22 bp, Artificial Sequence
  chemically synthesized
cagaggagagtgaggcggacag

SEQ ID NO: 27450 - DNA, 22 bp, Artificial Sequence
  chemically synthesized
tgcctgtggggacaccgcctgg

SEQ ID NO: 27451 - DNA, 22 bp, Artificial Sequence
  chemically synthesized
cctgtggggacaccgcctggtg

SEQ ID NO: 27452 - DNA, 22 bp, Artificial Sequence
  chemically synthesized
tggggacaccgcctggtgggaa

SEQ ID NO: 27453 - DNA, 22 bp, Artificial Sequence
  chemically synthesized
gtgggaagtccagccagccccc

SEQ ID NO: 27454 - DNA, 22 bp, Artificial Sequence
  chemically synthesized
cagagagaggagatgctactgg

SEQ ID NO: 27455 - DNA, 22 bp, Artificial Sequence
  chemically synthesized
ctggtgttcctgagtggtcctc

SEQ ID NO: 27456 - DNA, 22 bp, Artificial Sequence
  chemically synthesized
gtgttcctgagtggtcctcggg

SEQ ID NO: 27457 - DNA, 22 bp, Artificial Sequence
  chemically synthesized
ctgagtggtcctcgggagggac

SEQ ID NO: 27458 - DNA, 22 bp, Artificial Sequence
  chemically synthesized
agtggtcctcgggagggacctc

SEQ ID NO: 27459 - DNA, 22 bp, Artificial Sequence
  chemically synthesized
gggagggacctcctatccctcc

SEQ ID NO: 27460 - DNA, 22 bp, Artificial Sequence
  chemically synthesized
ctatccctcctgtcccctgccc

SEQ ID NO: 27461 - DNA, 22 bp, Artificial Sequence
  chemically synthesized
tccctcctgtcccctgccctgc

SEQ ID NO: 27462 - DNA, 22 bp, Artificial Sequence
  chemically synthesized
ctgtcccctgccctgccctgcc

SEQ ID NO: 27463 - DNA, 22 bp, Artificial Sequence
  chemically synthesized
tcccctgccctgccctgcccag

SEQ ID NO: 27464 - DNA, 22 bp, Artificial Sequence
  chemically synthesized
ccctgccctgcccagcaccggc

SEQ ID NO: 27465 - DNA, 22 bp, Artificial Sequence
  chemically synthesized
ccctgcccagcaccggccctcc

SEQ ID NO: 27466 - DNA, 22 bp, Artificial Sequence
  chemically synthesized
cccagcaccggccctccctcgg

SEQ ID NO: 27467 - DNA, 22 bp, Artificial Sequence
  chemically synthesized
cctcggttggccagcctcagga

SEQ ID NO: 27468 - DNA, 22 bp, Artificial Sequence
  chemically synthesized
ggttggccagcctcaggaatga

SEQ ID NO: 27469 - DNA, 22 bp, Artificial Sequence
  chemically synthesized
gccagcctcaggaatgaggagt

SEQ ID NO: 27470 - DNA, 22 bp, Artificial Sequence
  chemically synthesized
aggaatgaggagtccctcattc

SEQ ID NO: 27471 - DNA, 22 bp, Artificial Sequence
  chemically synthesized
attccagcccagctaaccaatc

SEQ ID NO: 27472 - DNA, 22 bp, Artificial Sequence
  chemically synthesized
cagcccagctaaccaatcccct

SEQ ID NO: 27473 - DNA, 22 bp, Artificial Sequence
  chemically synthesized
accaatccccttcctaagctcc

SEQ ID NO: 27474 - DNA, 22 bp, Artificial Sequence
  chemically synthesized
cctaagctccaagcccctgctc

SEQ ID NO: 27475 - DNA, 22 bp, Artificial Sequence
  chemically synthesized
ctaagctccaagcccctgctcc

SEQ ID NO: 27476 - DNA, 22 bp, Artificial Sequence
  chemically synthesized
agctccaagcccctgctcctcc

SEQ ID NO: 27477 - DNA, 22 bp, Artificial Sequence
  chemically synthesized
caagcccctgctcctcctgcct

SEQ ID NO: 27478 - DNA, 22 bp, Artificial Sequence
  chemically synthesized
ctcctcctgcctccatggaacc

SEQ ID NO: 27479 - DNA, 22 bp, Artificial Sequence
  chemically synthesized
ctcctgcctccatggaacccgg

SEQ ID NO: 27480 - DNA, 22 bp, Artificial Sequence
  chemically synthesized
ctgcctccatggaacccggctc

SEQ ID NO: 27481 - DNA, 22 bp, Artificial Sequence
  chemically synthesized
cctccatggaacccggctccac

SEQ ID NO: 27482 - DNA, 22 bp, Artificial Sequence
  chemically synthesized
catggaacccggctccaccacc

SEQ ID NO: 27483 - DNA, 22 bp, Artificial Sequence
  chemically synthesized
caccaccagcacccacacacct

SEQ ID NO: 27484 - DNA, 22 bp, Artificial Sequence
  chemically synthesized
acactcctccattcctggctct

SEQ ID NO: 27485 - DNA, 22 bp, Artificial Sequence
  chemically synthesized
ctccattcctggctcttgccct

SEQ ID NO: 27486 - DNA, 22 bp, Artificial Sequence
  chemically synthesized
cattcctggctcttgcccttct

SEQ ID NO: 27487 - DNA, 22 bp, Artificial Sequence
  chemically synthesized
ctggctcttgcccttctgccta

SEQ ID NO: 27488 - DNA, 22 bp, Artificial Sequence
  chemically synthesized
gctcttgcccttctgcctagca

SEQ ID NO: 27489 - DNA, 22 bp, Artificial Sequence
  chemically synthesized
ttgcccttctgcctagcactgc

SEQ ID NO: 27490 - DNA, 22 bp, Artificial Sequence
  chemically synthesized
gcccttctgcctagcactgctc

SEQ ID NO: 27491 - DNA, 22 bp, Artificial Sequence
  chemically synthesized
cccttctgcctagcactgctca

SEQ ID NO: 27492 - DNA, 22 bp, Artificial Sequence
  chemically synthesized
ctgcctagcactgctcagatct

SEQ ID NO: 27493 - DNA, 22 bp, Artificial Sequence
  chemically synthesized
tgcctagcactgctcagatctc

SEQ ID NO: 27494 - DNA, 22 bp, Artificial Sequence
  chemically synthesized
cctagcactgctcagatctctc

SEQ ID NO: 27495 - DNA, 22 bp, Artificial Sequence
  chemically synthesized
gcactgctcagatctctctcac

SEQ ID NO: 27496 - DNA, 22 bp, Artificial Sequence
  chemically synthesized
ctcagatctctctcaccttaaa

SEQ ID NO: 27497 - DNA, 22 bp, Artificial Sequence
  chemically synthesized
agatctctctcaccttaaaatc

SEQ ID NO: 27498 - DNA, 22 bp, Artificial Sequence
  chemically synthesized
tctcaccttaaaatcttttccc

SEQ ID NO: 27499 - DNA, 22 bp, Artificial Sequence
  chemically synthesized
tcaccttaaaatcttttcccac

SEQ ID NO: 27500 - DNA, 22 bp, Artificial Sequence
  chemically synthesized
accttaaaatcttttcccacca

SEQ ID NO: 27501 - DNA, 22 bp, Artificial Sequence
  chemically synthesized
aaaatcttttcccaccagcctg

SEQ ID NO: 27502 - DNA, 22 bp, Artificial Sequence
  chemically synthesized
aaatcttttcccaccagcctgg

SEQ ID NO: 27503 - DNA, 22 bp, Artificial Sequence
  chemically synthesized
ttcccaccagcctgggcaacat

SEQ ID NO: 27504 - DNA, 22 bp, Artificial Sequence
  chemically synthesized
tcccaccagcctgggcaacata

SEQ ID NO: 27505 - DNA, 22 bp, Artificial Sequence
  chemically synthesized
cccaccagcctgggcaacatag

SEQ ID NO: 27506 - DNA, 22 bp, Artificial Sequence
  chemically synthesized
ccaccagcctgggcaacatagc

SEQ ID NO: 27507 - DNA, 22 bp, Artificial Sequence
  chemically synthesized
ggcaacatagcaagaccccatt

SEQ ID NO: 27508 - DNA, 22 bp, Artificial Sequence
  chemically synthesized
ctctaaaaaattttttttaatt

SEQ ID NO: 27509 - DNA, 22 bp, Artificial Sequence
  chemically synthesized
tctaaaaaattttttttaattt

SEQ ID NO: 27510 - DNA, 22 bp, Artificial Sequence
  chemically synthesized
taaaaaattttttttaatttgc

SEQ ID NO: 27511 - DNA, 22 bp, Artificial Sequence
  chemically synthesized
aaaaattttttttaatttgcca

SEQ ID NO: 27512 - DNA, 22 bp, Artificial Sequence
  chemically synthesized
tttttaatttgccaggcacagt

SEQ ID NO: 27513 - DNA, 22 bp, Artificial Sequence
  chemically synthesized
ttttaatttgccaggcacagtg

SEQ ID NO: 27514 - DNA, 22 bp, Artificial Sequence
  chemically synthesized
tttaatttgccaggcacagtgg

SEQ ID NO: 27515 - DNA, 22 bp, Artificial Sequence
  chemically synthesized
ttaatttgccaggcacagtggt

SEQ ID NO: 27516 - DNA, 22 bp, Artificial Sequence
  chemically synthesized
taatttgccaggcacagtggtg

SEQ ID NO: 27517 - DNA, 22 bp, Artificial Sequence
  chemically synthesized
aatttgccaggcacagtggtgc

SEQ ID NO: 27518 - DNA, 22 bp, Artificial Sequence
  chemically synthesized
atttgccaggcacagtggtgca

SEQ ID NO: 27519 - DNA, 22 bp, Artificial Sequence
  chemically synthesized
gccaggcacagtggtgcacacc

SEQ ID NO: 27520 - DNA, 22 bp, Artificial Sequence
  chemically synthesized
ccaggcacagtggtgcacacct

SEQ ID NO: 27521 - DNA, 22 bp, Artificial Sequence
  chemically synthesized
taagtcctaactacttgggagg

SEQ ID NO: 27522 - DNA, 22 bp, Artificial Sequence
  chemically synthesized
actacttgggaggctgaggtgg

SEQ ID NO: 27523 - DNA, 22 bp, Artificial Sequence
  chemically synthesized
cttgggaggctgaggtgggagg

SEQ ID NO: 27524 - DNA, 22 bp, Artificial Sequence
  chemically synthesized
gggaggctgaggtgggaggatg

SEQ ID NO: 27525 - DNA, 22 bp, Artificial Sequence
  chemically synthesized
ggaggctgaggtgggaggatgg

SEQ ID NO: 27526 - DNA, 22 bp, Artificial Sequence
  chemically synthesized
aggtgggaggatggcttgagcc

SEQ ID NO: 27527 - DNA, 22 bp, Artificial Sequence
  chemically synthesized
gagcccaggagttcgaggttgc

SEQ ID NO: 27528 - DNA, 22 bp, Artificial Sequence
  chemically synthesized
agcccaggagttcgaggttgca

SEQ ID NO: 27529 - DNA, 22 bp, Artificial Sequence
  chemically synthesized
gaggttgcagtgagctatgatc

SEQ ID NO: 27530 - DNA, 22 bp, Artificial Sequence
  chemically synthesized
cagtgagctatgatcctgccac

SEQ ID NO: 27531 - DNA, 22 bp, Artificial Sequence
  chemically synthesized
tgatcctgccactacactcctg

SEQ ID NO: 27532 - DNA, 22 bp, Artificial Sequence
  chemically synthesized
ccactacactcctgtctctaaa

SEQ ID NO: 27533 - DNA, 22 bp, Artificial Sequence
  chemically synthesized
cactcctgtctctaaaaaaaaa

SEQ ID NO: 27534 - DNA, 22 bp, Artificial Sequence
  chemically synthesized
ctgtctctaaaaaaaaaatgtc

SEQ ID NO: 27535 - DNA, 22 bp, Artificial Sequence
  chemically synthesized
tctctaaaaaaaaaatgtccaa

SEQ ID NO: 27536 - DNA, 22 bp, Artificial Sequence
  chemically synthesized
taaaaaaaaaatgtccaagata

SEQ ID NO: 27537 - DNA, 22 bp, Artificial Sequence
  chemically synthesized
aaaaaaaaatgtccaagatact

SEQ ID NO: 27538 - DNA, 22 bp, Artificial Sequence
  chemically synthesized
aggtccttcagtcaagatttat

SEQ ID NO: 27539 - DNA, 22 bp, Artificial Sequence
  chemically synthesized
ggtccttcagtcaagatttatt

SEQ ID NO: 27540 - DNA, 22 bp, Artificial Sequence
  chemically synthesized
cagtcaagatttattacagaag

SEQ ID NO: 27541 - DNA, 22 bp, Artificial Sequence
  chemically synthesized
agtcaagatttattacagaagg

SEQ ID NO: 27542 - DNA, 22 bp, Artificial Sequence
  chemically synthesized
attacagaaggatccagggaag

SEQ ID NO: 27543 - DNA, 22 bp, Artificial Sequence
  chemically synthesized
ttacagaaggatccagggaagg

SEQ ID NO: 27544 - DNA, 22 bp, Artificial Sequence
  chemically synthesized
cagaaggatccagggaagggtc

SEQ ID NO: 27545 - DNA, 22 bp, Artificial Sequence
  chemically synthesized
gggagatgagaggagcagggat

SEQ ID NO: 27546 - DNA, 22 bp, Artificial Sequence
  chemically synthesized
ggagatgagaggagcagggatc

SEQ ID NO: 27547 - DNA, 22 bp, Artificial Sequence
  chemically synthesized
ccaggatctctctgtgctcacg

SEQ ID NO: 27548 - DNA, 22 bp, Artificial Sequence
  chemically synthesized
caggatctctctgtgctcacgt

SEQ ID NO: 27549 - DNA, 22 bp, Artificial Sequence
  chemically synthesized
tctgtgctcacgtcccccaccc

SEQ ID NO: 27550 - DNA, 22 bp, Artificial Sequence
  chemically synthesized
tgtgctcacgtcccccacccat

SEQ ID NO: 27551 - DNA, 22 bp, Artificial Sequence
  chemically synthesized
tgctcacgtcccccacccatcc

SEQ ID NO: 27552 - DNA, 22 bp, Artificial Sequence
  chemically synthesized
acgtcccccacccatcccaact

SEQ ID NO: 27553 - DNA, 22 bp, Artificial Sequence
  chemically synthesized
accccacctctacacacacaca

SEQ ID NO: 27554 - DNA, 22 bp, Artificial Sequence
  chemically synthesized
tacacacacacacacacacaca

SEQ ID NO: 27555 - DNA, 22 bp, Artificial Sequence
  chemically synthesized
cacacacacacacacacacata

SEQ ID NO: 27556 - DNA, 22 bp, Artificial Sequence
  chemically synthesized
acacacacactcacgcaacaca

SEQ ID NO: 27557 - DNA, 22 bp, Artificial Sequence
  chemically synthesized
acgcaacacactcacacacaca

SEQ ID NO: 27558 - DNA, 22 bp, Artificial Sequence
  chemically synthesized
acacacacaacatacataacac

SEQ ID NO: 27559 - DNA, 22 bp, Artificial Sequence
  chemically synthesized
acaacatacacacacaacacac

SEQ ID NO: 27560 - DNA, 22 bp, Artificial Sequence
  chemically synthesized
gcacaacatacacacacgcaca

SEQ ID NO: 27561 - DNA, 22 bp, Artificial Sequence
  chemically synthesized
acacaacacacaaacatacata

SEQ ID NO: 27562 - DNA, 22 bp, Artificial Sequence
  chemically synthesized
acacaatacacacacacaacac

SEQ ID NO: 27563 - DNA, 22 bp, Artificial Sequence
  chemically synthesized
atacacaacatacatacacaca

SEQ ID NO: 27564 - DNA, 22 bp, Artificial Sequence
  chemically synthesized
acatacacaacatacactcgca

SEQ ID NO: 27565 - DNA, 22 bp, Artificial Sequence
  chemically synthesized
gcacaacatacacacatgcaca

SEQ ID NO: 27566 - DNA, 22 bp, Artificial Sequence
  chemically synthesized
acacacaagatacacacaacat

SEQ ID NO: 27567 - DNA, 22 bp, Artificial Sequence
  chemically synthesized
acacaacatacacacacaacac

SEQ ID NO: 27568 - DNA, 22 bp, Artificial Sequence
  chemically synthesized
tcacacacaacataccctctca

SEQ ID NO: 27569 - DNA, 22 bp, Artificial Sequence
  chemically synthesized
acacacaacataccctctcaca

SEQ ID NO: 27570 - DNA, 22 bp, Artificial Sequence
  chemically synthesized
tcacatacacgacatacacaca

SEQ ID NO: 27571 - DNA, 22 bp, Artificial Sequence
  chemically synthesized
acatacacgacatacacacaca

SEQ ID NO: 27572 - DNA, 22 bp, Artificial Sequence
  chemically synthesized
tcgcgcacatatacacacacac

SEQ ID NO: 27573 - DNA, 22 bp, Artificial Sequence
  chemically synthesized
gcgcacatatacacacacacaa

SEQ ID NO: 27574 - DNA, 22 bp, Artificial Sequence
  chemically synthesized
actcacacacacacacagagtc

SEQ ID NO: 27575 - DNA, 22 bp, Artificial Sequence
  chemically synthesized
acacacacacacagagtcccag

SEQ ID NO: 27576 - DNA, 22 bp, Artificial Sequence
  chemically synthesized
aatctgcattcctcatatgcac

SEQ ID NO: 27577 - DNA, 22 bp, Artificial Sequence
  chemically synthesized
cattcctcatatgcacatacgt

SEQ ID NO: 27578 - DNA, 22 bp, Artificial Sequence
  chemically synthesized
ctcatatgcacatacgtgcaca

SEQ ID NO: 27579 - DNA, 22 bp, Artificial Sequence
  chemically synthesized
atatgcacatacgtgcacacgc

SEQ ID NO: 27580 - DNA, 22 bp, Artificial Sequence
  chemically synthesized
ttgggttgggaggagaagggca

SEQ ID NO: 27581 - DNA, 22 bp, Artificial Sequence
  chemically synthesized
gggttgggaggagaagggcagg

SEQ ID NO: 27582 - DNA, 22 bp, Artificial Sequence
  chemically synthesized
ggttgggaggagaagggcaggc

SEQ ID NO: 27583 - DNA, 22 bp, Artificial Sequence
  chemically synthesized
ggaggagaagggcaggcagtta

SEQ ID NO: 27584 - DNA, 22 bp, Artificial Sequence
  chemically synthesized
tcttccagatctccccacacct

SEQ ID NO: 27585 - DNA, 22 bp, Artificial Sequence
  chemically synthesized
ccagatctccccacacctctgg

SEQ ID NO: 27586 - DNA, 22 bp, Artificial Sequence
  chemically synthesized
cagatctccccacacctctggc

SEQ ID NO: 27587 - DNA, 22 bp, Artificial Sequence
  chemically synthesized
cccacacctctggcacatgcct

SEQ ID NO: 27588 - DNA, 22 bp, Artificial Sequence
  chemically synthesized
tggcacatgcctttcctggggt

SEQ ID NO: 27589 - DNA, 22 bp, Artificial Sequence
  chemically synthesized
gcacatgcctttcctggggtcc

SEQ ID NO: 27590 - DNA, 22 bp, Artificial Sequence
  chemically synthesized
tcctggggtcctggggtagaca

SEQ ID NO: 27591 - DNA, 22 bp, Artificial Sequence
  chemically synthesized
cctggggtcctggggtagacag

SEQ ID NO: 27592 - DNA, 22 bp, Artificial Sequence
  chemically synthesized
ctggggtcctggggtagacagg

SEQ ID NO: 27593 - DNA, 22 bp, Artificial Sequence
  chemically synthesized
gggtcctggggtagacaggaag

SEQ ID NO: 27594 - DNA, 22 bp, Artificial Sequence
  chemically synthesized
gggtagacaggaaggtgaggtg

SEQ ID NO: 27595 - DNA, 22 bp, Artificial Sequence
  chemically synthesized
ctcagtccctgttcacagagtg

SEQ ID NO: 27596 - DNA, 22 bp, Artificial Sequence
  chemically synthesized
agtccctgttcacagagtgggt

SEQ ID NO: 27597 - DNA, 22 bp, Artificial Sequence
  chemically synthesized
ttcacagagtgggtgcggcaga

SEQ ID NO: 27598 - DNA, 22 bp, Artificial Sequence
  chemically synthesized
acagagtgggtgcggcagagac

SEQ ID NO: 27599 - DNA, 22 bp, Artificial Sequence
  chemically synthesized
aaagggacagagcaatcatgag

SEQ ID NO: 27600 - DNA, 22 bp, Artificial Sequence
  chemically synthesized
agacagagggggagcaaagccg

SEQ ID NO: 27601 - DNA, 22 bp, Artificial Sequence
  chemically synthesized
cacacttgcctttcaaaaatgg

SEQ ID NO: 27602 - DNA, 22 bp, Artificial Sequence
  chemically synthesized
gcctttcaaaaatggatttcct

SEQ ID NO: 27603 - DNA, 22 bp, Artificial Sequence
  chemically synthesized
cctttcaaaaatggatttcctc

SEQ ID NO: 27604 - DNA, 22 bp, Artificial Sequence
  chemically synthesized
tcaaaaatggatttcctctcct

SEQ ID NO: 27605 - DNA, 22 bp, Artificial Sequence
  chemically synthesized
caaaaatggatttcctctcctg

SEQ ID NO: 27606 - DNA, 22 bp, Artificial Sequence
  chemically synthesized
aaaaatggatttcctctcctgg

SEQ ID NO: 27607 - DNA, 22 bp, Artificial Sequence
  chemically synthesized
cctctcctgggattcagcctgc

SEQ ID NO: 27608 - DNA, 22 bp, Artificial Sequence
  chemically synthesized
ctctcctgggattcagcctgcg

SEQ ID NO: 27609 - DNA, 22 bp, Artificial Sequence
  chemically synthesized
tcctgggattcagcctgcgagt

SEQ ID NO: 27610 - DNA, 22 bp, Artificial Sequence
  chemically synthesized
ctgggattcagcctgcgagtgc

SEQ ID NO: 27611 - DNA, 22 bp, Artificial Sequence
  chemically synthesized
ggattcagcctgcgagtgcctg

SEQ ID NO: 27612 - DNA, 22 bp, Artificial Sequence
  chemically synthesized
agcctgcgagtgcctggcccct

SEQ ID NO: 27613 - DNA, 22 bp, Artificial Sequence
  chemically synthesized
cgagtgcctggcccctcacctt

SEQ ID NO: 27614 - DNA, 22 bp, Artificial Sequence
  chemically synthesized
gcccctcaccttgatggaaagg

SEQ ID NO: 27615 - DNA, 22 bp, Artificial Sequence
  chemically synthesized
accttgatggaaaggatggtca

SEQ ID NO: 27616 - DNA, 22 bp, Artificial Sequence
  chemically synthesized
gatggaaaggatggtcattttc

SEQ ID NO: 27617 - DNA, 22 bp, Artificial Sequence
  chemically synthesized
atggaaaggatggtcattttcc

SEQ ID NO: 27618 - DNA, 22 bp, Artificial Sequence
  chemically synthesized
tcctccgagctcagctgctgga

SEQ ID NO: 27619 - DNA, 22 bp, Artificial Sequence
  chemically synthesized
cctccgagctcagctgctggat

SEQ ID NO: 27620 - DNA, 22 bp, Artificial Sequence
  chemically synthesized
ctccgagctcagctgctggata

SEQ ID NO: 27621 - DNA, 22 bp, Artificial Sequence
  chemically synthesized
cgagctcagctgctggatatct

SEQ ID NO: 27622 - DNA, 22 bp, Artificial Sequence
  chemically synthesized
agctgctggatatcttgaaagt

SEQ ID NO: 27623 - DNA, 22 bp, Artificial Sequence
  chemically synthesized
ctggatatcttgaaagtccttg

SEQ ID NO: 27624 - DNA, 22 bp, Artificial Sequence
  chemically synthesized
gatatcttgaaagtccttggcc

SEQ ID NO: 27625 - DNA, 22 bp, Artificial Sequence
  chemically synthesized
gaaagtccttggccatgatggg

SEQ ID NO: 27626 - DNA, 22 bp, Artificial Sequence
  chemically synthesized
aaagtccttggccatgatgggg

SEQ ID NO: 27627 - DNA, 22 bp, Artificial Sequence
  chemically synthesized
ggccatgatggggcccgggctg

SEQ ID NO: 27628 - DNA, 22 bp, Artificial Sequence
  chemically synthesized
gccatgatggggcccgggctgg

SEQ ID NO: 27629 - DNA, 22 bp, Artificial Sequence
  chemically synthesized
gagctggagctggagctgggct

SEQ ID NO: 27630 - DNA, 22 bp, Artificial Sequence
  chemically synthesized
gagctggagctgggctgggctg

SEQ ID NO: 27631 - DNA, 22 bp, Artificial Sequence
  chemically synthesized
gagctgggctgggctgggctga

SEQ ID NO: 27632 - DNA, 22 bp, Artificial Sequence
  chemically synthesized
ggctgggctgggctgaggttgc

SEQ ID NO: 27633 - DNA, 22 bp, Artificial Sequence
  chemically synthesized
ggctgggctgaggttgctctga

SEQ ID NO: 27634 - DNA, 22 bp, Artificial Sequence
  chemically synthesized
ggctgaggttgctctgagggct

SEQ ID NO: 27635 - DNA, 22 bp, Artificial Sequence
  chemically synthesized
aggttgctctgagggctggggc

SEQ ID NO: 27636 - DNA, 22 bp, Artificial Sequence
  chemically synthesized
ctctgagggctggggctggggc

SEQ ID NO: 27637 - DNA, 22 bp, Artificial Sequence
  chemically synthesized
tgagggctggggctggggcaga

SEQ ID NO: 27638 - DNA, 22 bp, Artificial Sequence
  chemically synthesized
agggctggggctggggcagagg

SEQ ID NO: 27639 - DNA, 22 bp, Artificial Sequence
  chemically synthesized
gggctggggcagaggtgcagat

SEQ ID NO: 27640 - DNA, 22 bp, Artificial Sequence
  chemically synthesized
gggcagaggtgcagattcacgt

SEQ ID NO: 27641 - DNA, 22 bp, Artificial Sequence
  chemically synthesized
acgtggaggttgatggtgggat

SEQ ID NO: 27642 - DNA, 22 bp, Artificial Sequence
  chemically synthesized
atggtgggatggaacgcagggt

SEQ ID NO: 27643 - DNA, 22 bp, Artificial Sequence
  chemically synthesized
ggggtggtggcctgggtaggat

SEQ ID NO: 27644 - DNA, 22 bp, Artificial Sequence
  chemically synthesized
agatcctacccaggccaccacc

SEQ ID NO: 27645 - DNA, 22 bp, Artificial Sequence
  chemically synthesized
cccaggccaccaccccgaaccc

SEQ ID NO: 27646 - DNA, 22 bp, Artificial Sequence
  chemically synthesized
cgaccctgcgttccatcccacc

SEQ ID NO: 27647 - DNA, 22 bp, Artificial Sequence
  chemically synthesized
cgttccatcccaccatcaacct

SEQ ID NO: 27648 - DNA, 22 bp, Artificial Sequence
  chemically synthesized
catcccaccatcaacctccacg

SEQ ID NO: 27649 - DNA, 22 bp, Artificial Sequence
  chemically synthesized
cacgtgaatctgcacctctgcc

SEQ ID NO: 27650 - DNA, 22 bp, Artificial Sequence
  chemically synthesized
cacctctgccccagccccagcc

SEQ ID NO: 27651 - DNA, 22 bp, Artificial Sequence
  chemically synthesized
tgccccagccccagccctcaga

SEQ ID NO: 27652 - DNA, 22 bp, Artificial Sequence
  chemically synthesized
ccccagccccagccctcagagc

SEQ ID NO: 27653 - DNA, 22 bp, Artificial Sequence
  chemically synthesized
agagcaacctcagcccagccca

SEQ ID NO: 27654 - DNA, 22 bp, Artificial Sequence
  chemically synthesized
agcccagcccagcccagctcca

SEQ ID NO: 27655 - DNA, 22 bp, Artificial Sequence
  chemically synthesized
cagctccagctccagcccgggc

SEQ ID NO: 27656 - DNA, 22 bp, Artificial Sequence
  chemically synthesized
cagctccagcccgggccccatc

SEQ ID NO: 27657 - DNA, 22 bp, Artificial Sequence
  chemically synthesized
cagcccgggccccatcatggcc

SEQ ID NO: 27658 - DNA, 22 bp, Artificial Sequence
  chemically synthesized
tcaagatatccagcagctgagc

SEQ ID NO: 27659 - DNA, 22 bp, Artificial Sequence
  chemically synthesized
caagatatccagcagctgagct

SEQ ID NO: 27660 - DNA, 22 bp, Artificial Sequence
  chemically synthesized
aagatatccagcagctgagctc

SEQ ID NO: 27661 - DNA, 22 bp, Artificial Sequence
  chemically synthesized
agctcggaggaaaatgaccatc

SEQ ID NO: 27662 - DNA, 22 bp, Artificial Sequence
  chemically synthesized
ggaggaaaatgaccatcctttc

SEQ ID NO: 27663 - DNA, 22 bp, Artificial Sequence
  chemically synthesized
tccatcaaggtgaggggccagg

SEQ ID NO: 27664 - DNA, 22 bp, Artificial Sequence
  chemically synthesized
ccatcaaggtgaggggccaggc

SEQ ID NO: 27665 - DNA, 22 bp, Artificial Sequence
  chemically synthesized
catcaaggtgaggggccaggca

SEQ ID NO: 27666 - DNA, 22 bp, Artificial Sequence
  chemically synthesized
gcaggctgaatcccaggagagg

SEQ ID NO: 27667 - DNA, 22 bp, Artificial Sequence
  chemically synthesized
aatcccaggagaggaaatccat

SEQ ID NO: 27668 - DNA, 22 bp, Artificial Sequence
  chemically synthesized
ttgaaaggcaagtgtgcagttt

SEQ ID NO: 27669 - DNA, 22 bp, Artificial Sequence
  chemically synthesized
tgaaaggcaagtgtgcagtttc

SEQ ID NO: 27670 - DNA, 22 bp, Artificial Sequence
  chemically synthesized
gaaaggcaagtgtgcagtttct

SEQ ID NO: 27671 - DNA, 22 bp, Artificial Sequence
  chemically synthesized
aaaggcaagtgtgcagtttctg

SEQ ID NO: 27672 - DNA, 22 bp, Artificial Sequence
  chemically synthesized
ctgcggctttgctccccctctg

SEQ ID NO: 27673 - DNA, 22 bp, Artificial Sequence
  chemically synthesized
tgcggctttgctccccctctgt

SEQ ID NO: 27674 - DNA, 22 bp, Artificial Sequence
  chemically synthesized
cggctttgctccccctctgtct

SEQ ID NO: 27675 - DNA, 22 bp, Artificial Sequence
  chemically synthesized
tgctccccctctgtctcagctc

SEQ ID NO: 27676 - DNA, 22 bp, Artificial Sequence
  chemically synthesized
gctccccctctgtctcagctca

SEQ ID NO: 27677 - DNA, 22 bp, Artificial Sequence
  chemically synthesized
ctccccctctgtctcagctcat

SEQ ID NO: 27678 - DNA, 22 bp, Artificial Sequence
  chemically synthesized
cccctctgtctcagctcatgat

SEQ ID NO: 27679 - DNA, 22 bp, Artificial Sequence
  chemically synthesized
tgtctcagctcatgattgctct

SEQ ID NO: 27680 - DNA, 22 bp, Artificial Sequence
  chemically synthesized
tctcagctcatgattgctctgt

SEQ ID NO: 27681 - DNA, 22 bp, Artificial Sequence
  chemically synthesized
agctcatgattgctctgtccct

SEQ ID NO: 27682 - DNA, 22 bp, Artificial Sequence
  chemically synthesized
atgattgctctgtccctttgag

SEQ ID NO: 27683 - DNA, 22 bp, Artificial Sequence
  chemically synthesized
ctctgtccctttgaggtctctg

SEQ ID NO: 27684 - DNA, 22 bp, Artificial Sequence
  chemically synthesized
tgtccctttgaggtctctgccg

SEQ ID NO: 27685 - DNA, 22 bp, Artificial Sequence
  chemically synthesized
tccctttgaggtctctgccgca

SEQ ID NO: 27686 - DNA, 22 bp, Artificial Sequence
  chemically synthesized
tgaggtctctgccgcacccact

SEQ ID NO: 27687 - DNA, 22 bp, Artificial Sequence
  chemically synthesized
gaggtctctgccgcacccactc

SEQ ID NO: 27688 - DNA, 22 bp, Artificial Sequence
  chemically synthesized
aggtctctgccgcacccactct

SEQ ID NO: 27689 - DNA, 22 bp, Artificial Sequence
  chemically synthesized
tgccgcacccactctgtgaaca

SEQ ID NO: 27690 - DNA, 22 bp, Artificial Sequence
  chemically synthesized
ccgcacccactctgtgaacagg

SEQ ID NO: 27691 - DNA, 22 bp, Artificial Sequence
  chemically synthesized
tgtgaacagggactgaggaggg

SEQ ID NO: 27692 - DNA, 22 bp, Artificial Sequence
  chemically synthesized
tgaacagggactgaggagggcc

SEQ ID NO: 27693 - DNA, 22 bp, Artificial Sequence
  chemically synthesized
aggagggcccgacacccccgct

SEQ ID NO: 27694 - DNA, 22 bp, Artificial Sequence
  chemically synthesized
gttccctcacctcaccttcctg

SEQ ID NO: 27695 - DNA, 22 bp, Artificial Sequence
  chemically synthesized
ttccctcacctcaccttcctgt

SEQ ID NO: 27696 - DNA, 22 bp, Artificial Sequence
  chemically synthesized
cctcacctcaccttcctgtcta

SEQ ID NO: 27697 - DNA, 22 bp, Artificial Sequence
  chemically synthesized
acctcaccttcctgtctacccc

SEQ ID NO: 27698 - DNA, 22 bp, Artificial Sequence
  chemically synthesized
accttcctgtctaccccaggac

SEQ ID NO: 27699 - DNA, 22 bp, Artificial Sequence
  chemically synthesized
cctgtctaccccaggaccccag

SEQ ID NO: 27700 - DNA, 22 bp, Artificial Sequence
  chemically synthesized
ctgtctaccccaggaccccagg

SEQ ID NO: 27701 - DNA, 22 bp, Artificial Sequence
  chemically synthesized
tctaccccaggaccccaggaaa

SEQ ID NO: 27702 - DNA, 22 bp, Artificial Sequence
  chemically synthesized
ccccaggaccccaggaaaggca

SEQ ID NO: 27703 - DNA, 22 bp, Artificial Sequence
  chemically synthesized
gaagataactgcctgcccttct

SEQ ID NO: 27704 - DNA, 22 bp, Artificial Sequence
  chemically synthesized
cctgcccttctcctcccaaccc

SEQ ID NO: 27705 - DNA, 22 bp, Artificial Sequence
  chemically synthesized
cccttctcctcccaacccaaga

SEQ ID NO: 27706 - DNA, 22 bp, Artificial Sequence
  chemically synthesized
ctcctcccaacccaagaacaca

SEQ ID NO: 27707 - DNA, 22 bp, Artificial Sequence
  chemically synthesized
tcctcccaacccaagaacacat

SEQ ID NO: 27708 - DNA, 22 bp, Artificial Sequence
  chemically synthesized
ctcccaacccaagaacacatgt

SEQ ID NO: 27709 - DNA, 22 bp, Artificial Sequence
  chemically synthesized
ccaacccaagaacacatgtgcc

SEQ ID NO: 27710 - DNA, 22 bp, Artificial Sequence
  chemically synthesized
gtatgtgcgtgtgcacgtatgt

SEQ ID NO: 27711 - DNA, 22 bp, Artificial Sequence
  chemically synthesized
agctgggactctgtgtgtgtgt

SEQ ID NO: 27712 - DNA, 22 bp, Artificial Sequence
  chemically synthesized
ggactctgtgtgtgtgtgtgag

SEQ ID NO: 27713 - DNA, 22 bp, Artificial Sequence
  chemically synthesized
tgtgtgtgtgtgtgagtgaatg

SEQ ID NO: 27714 - DNA, 22 bp, Artificial Sequence
  chemically synthesized
tgtgtgtgtgtgagtgaatgtt

SEQ ID NO: 27715 - DNA, 22 bp, Artificial Sequence
  chemically synthesized
tgtgtgtgtatatgtgcgcgag

SEQ ID NO: 27716 - DNA, 22 bp, Artificial Sequence
  chemically synthesized
tgtgtgtgtatgtcgtgtatgt

SEQ ID NO: 27717 - DNA, 22 bp, Artificial Sequence
  chemically synthesized
tgtgtgagagtgtgttgtgtgt

SEQ ID NO: 27718 - DNA, 22 bp, Artificial Sequence
  chemically synthesized
tgtgtgtatgttgtgtgagtat

SEQ ID NO: 27719 - DNA, 22 bp, Artificial Sequence
  chemically synthesized
tgtgagtatatgttgtgtgtat

SEQ ID NO: 27720 - DNA, 22 bp, Artificial Sequence
  chemically synthesized
tgtgtatcttgtgtgtgagtgt

SEQ ID NO: 27721 - DNA, 22 bp, Artificial Sequence
  chemically synthesized
gtgtgtgagtgtatgttgtgtg

SEQ ID NO: 27722 - DNA, 22 bp, Artificial Sequence
  chemically synthesized
tgtgtgagtgtatgttgtgtgt

SEQ ID NO: 27723 - DNA, 22 bp, Artificial Sequence
  chemically synthesized
tgtgttgtgtgtgtatcttgtg

SEQ ID NO: 27724 - DNA, 22 bp, Artificial Sequence
  chemically synthesized
tgtgtgtatcttgtgcatgtgt

SEQ ID NO: 27725 - DNA, 22 bp, Artificial Sequence
  chemically synthesized
gtgcatgtgtgtatgttgtgcg

SEQ ID NO: 27726 - DNA, 22 bp, Artificial Sequence
  chemically synthesized
tgcatgtgtgtatgttgtgcga

SEQ ID NO: 27727 - DNA, 22 bp, Artificial Sequence
  chemically synthesized
tgcgagtgtatgttgtgtatgt

SEQ ID NO: 27728 - DNA, 22 bp, Artificial Sequence
  chemically synthesized
tgtatgtgagtgtgtgtatgtt

SEQ ID NO: 27729 - DNA, 22 bp, Artificial Sequence
  chemically synthesized
tgtgtatgttgtgtgtatgtat

SEQ ID NO: 27730 - DNA, 22 bp, Artificial Sequence
  chemically synthesized
tgtgtatgtatgttgtgtatga

SEQ ID NO: 27731 - DNA, 22 bp, Artificial Sequence
  chemically synthesized
tgtatgagtgtgtgtatgttgt

SEQ ID NO: 27732 - DNA, 22 bp, Artificial Sequence
  chemically synthesized
tgtgtgtgtacgttgtgtatgt

SEQ ID NO: 27733 - DNA, 22 bp, Artificial Sequence
  chemically synthesized
tgtatgttgtgtgtgtgttgtg

SEQ ID NO: 27734 - DNA, 22 bp, Artificial Sequence
  chemically synthesized
tgtgtgtgttgtgtgtgtgtat

SEQ ID NO: 27735 - DNA, 22 bp, Artificial Sequence
  chemically synthesized
tgtgtgtgtattgtgtgagtgt

SEQ ID NO: 27736 - DNA, 22 bp, Artificial Sequence
  chemically synthesized
tgtgagtgtatgtatgtttgtg

SEQ ID NO: 27737 - DNA, 22 bp, Artificial Sequence
  chemically synthesized
gtgtgttgtgtgagtgttgtgt

SEQ ID NO: 27738 - DNA, 22 bp, Artificial Sequence
  chemically synthesized
tgtgttgtgtgagtgttgtgta

SEQ ID NO: 27739 - DNA, 22 bp, Artificial Sequence
  chemically synthesized
tgtgagtgttgtgtatgttgtg

SEQ ID NO: 27740 - DNA, 22 bp, Artificial Sequence
  chemically synthesized
tgtatgttgtgcgtgtgtgtat

SEQ ID NO: 27741 - DNA, 22 bp, Artificial Sequence
  chemically synthesized
tgcgtgtgtgtatgttgtgcga

SEQ ID NO: 27742 - DNA, 22 bp, Artificial Sequence
  chemically synthesized
tgcgagtgtgtgtgttgtgtgt

SEQ ID NO: 27743 - DNA, 22 bp, Artificial Sequence
  chemically synthesized
tgtgtgtatgttgtgagtgtgt

SEQ ID NO: 27744 - DNA, 22 bp, Artificial Sequence
  chemically synthesized
tgagtgtgttatgtatgttgtg

SEQ ID NO: 27745 - DNA, 22 bp, Artificial Sequence
  chemically synthesized
tgtatgttgtgtgtgtgagtgt

SEQ ID NO: 27746 - DNA, 22 bp, Artificial Sequence
  chemically synthesized
tgtgtgtgagtgtgttgcgtga

SEQ ID NO: 27747 - DNA, 22 bp, Artificial Sequence
  chemically synthesized
cgtgagtgtgtgtgttagtgtg

SEQ ID NO: 27748 - DNA, 22 bp, Artificial Sequence
  chemically synthesized
gtgtgtgtatgtgattgtatgt

SEQ ID NO: 27749 - DNA, 22 bp, Artificial Sequence
  chemically synthesized
tatgtgtgtgtgtgtgtgtgtg

SEQ ID NO: 27750 - DNA, 22 bp, Artificial Sequence
  chemically synthesized
ggatgggtgggggacgtgagca

SEQ ID NO: 27751 - DNA, 22 bp, Artificial Sequence
  chemically synthesized
gaagatccctgctcctctcatc

SEQ ID NO: 27752 - DNA, 22 bp, Artificial Sequence
  chemically synthesized
ctcctctcatctcccaagaccc

SEQ ID NO: 27753 - DNA, 22 bp, Artificial Sequence
  chemically synthesized
ctctcatctcccaagacccttc

SEQ ID NO: 27754 - DNA, 22 bp, Artificial Sequence
  chemically synthesized
tcatctcccaagacccttccct

SEQ ID NO: 27755 - DNA, 22 bp, Artificial Sequence
  chemically synthesized
atctcccaagacccttccctgg

SEQ ID NO: 27756 - DNA, 22 bp, Artificial Sequence
  chemically synthesized
ccaagacccttccctggatcct

SEQ ID NO: 27757 - DNA, 22 bp, Artificial Sequence
  chemically synthesized
ccctggatccttctgtaataaa

SEQ ID NO: 27758 - DNA, 22 bp, Artificial Sequence
  chemically synthesized
cctggatccttctgtaataaat

SEQ ID NO: 27759 - DNA, 22 bp, Artificial Sequence
  chemically synthesized
gatccttctgtaataaatcttg

SEQ ID NO: 27760 - DNA, 22 bp, Artificial Sequence
  chemically synthesized
ctgtaataaatcttgactgaag

SEQ ID NO: 27761 - DNA, 22 bp, Artificial Sequence
  chemically synthesized
tgtaataaatcttgactgaagg

SEQ ID NO: 27762 - DNA, 22 bp, Artificial Sequence
  chemically synthesized
taataaatcttgactgaaggac

SEQ ID NO: 27763 - DNA, 22 bp, Artificial Sequence
  chemically synthesized
gactgaaggacctaagtatctt

SEQ ID NO: 27764 - DNA, 22 bp, Artificial Sequence
  chemically synthesized
actgaaggacctaagtatcttg

SEQ ID NO: 27765 - DNA, 22 bp, Artificial Sequence
  chemically synthesized
aaggacctaagtatcttggaca

SEQ ID NO: 27766 - DNA, 22 bp, Artificial Sequence
  chemically synthesized
agtatcttggacattttttttt

SEQ ID NO: 27767 - DNA, 22 bp, Artificial Sequence
  chemically synthesized
ggacattttttttttagagaca

SEQ ID NO: 27768 - DNA, 22 bp, Artificial Sequence
  chemically synthesized
gacattttttttttagagacag

SEQ ID NO: 27769 - DNA, 22 bp, Artificial Sequence
  chemically synthesized
tttttttagagacaggagtgta

SEQ ID NO: 27770 - DNA, 22 bp, Artificial Sequence
  chemically synthesized
ttttttagagacaggagtgtag

SEQ ID NO: 27771 - DNA, 22 bp, Artificial Sequence
  chemically synthesized
tttttagagacaggagtgtagt

SEQ ID NO: 27772 - DNA, 22 bp, Artificial Sequence
  chemically synthesized
ttttagagacaggagtgtagtg

SEQ ID NO: 27773 - DNA, 22 bp, Artificial Sequence
  chemically synthesized
tttagagacaggagtgtagtgg

SEQ ID NO: 27774 - DNA, 22 bp, Artificial Sequence
  chemically synthesized
ttagagacaggagtgtagtggc

SEQ ID NO: 27775 - DNA, 22 bp, Artificial Sequence
  chemically synthesized
tagagacaggagtgtagtggca

SEQ ID NO: 27776 - DNA, 22 bp, Artificial Sequence
  chemically synthesized
agagacaggagtgtagtggcag

SEQ ID NO: 27777 - DNA, 22 bp, Artificial Sequence
  chemically synthesized
gagacaggagtgtagtggcagg

SEQ ID NO: 27778 - DNA, 22 bp, Artificial Sequence
  chemically synthesized
actgcaacctcgaactcctggg

SEQ ID NO: 27779 - DNA, 22 bp, Artificial Sequence
  chemically synthesized
caacctcgaactcctgggctca

SEQ ID NO: 27780 - DNA, 22 bp, Artificial Sequence
  chemically synthesized
gaactcctgggctcaagccatc

SEQ ID NO: 27781 - DNA, 22 bp, Artificial Sequence
  chemically synthesized
ctgggctcaagccatcctccca

SEQ ID NO: 27782 - DNA, 22 bp, Artificial Sequence
  chemically synthesized
ggctcaagccatcctcccacct

SEQ ID NO: 27783 - DNA, 22 bp, Artificial Sequence
  chemically synthesized
aagccatcctcccacctcagcc

SEQ ID NO: 27784 - DNA, 22 bp, Artificial Sequence
  chemically synthesized
ccacctcagcctcccaagtagt

SEQ ID NO: 27785 - DNA, 22 bp, Artificial Sequence
  chemically synthesized
agcctcccaagtagttaggact

SEQ ID NO: 27786 - DNA, 22 bp, Artificial Sequence
  chemically synthesized
ccaagtagttaggacttacagg

SEQ ID NO: 27787 - DNA, 22 bp, Artificial Sequence
  chemically synthesized
ggacttacaggtgtgcaccact

SEQ ID NO: 27788 - DNA, 22 bp, Artificial Sequence
  chemically synthesized
acaggtgtgcaccactgtgcct

SEQ ID NO: 27789 - DNA, 22 bp, Artificial Sequence
  chemically synthesized
caggtgtgcaccactgtgcctg

SEQ ID NO: 27790 - DNA, 22 bp, Artificial Sequence
  chemically synthesized
tgcctggcaaattaaaaaaaat

SEQ ID NO: 27791 - DNA, 22 bp, Artificial Sequence
  chemically synthesized
gcaaattaaaaaaaatttttta

SEQ ID NO: 27792 - DNA, 22 bp, Artificial Sequence
  chemically synthesized
aaaaaaattttttagagaaatg

SEQ ID NO: 27793 - DNA, 22 bp, Artificial Sequence
  chemically synthesized
tttagagaaatggggtcttgct

SEQ ID NO: 27794 - DNA, 22 bp, Artificial Sequence
  chemically synthesized
ttagagaaatggggtcttgcta

SEQ ID NO: 27795 - DNA, 22 bp, Artificial Sequence
  chemically synthesized
tagagaaatggggtcttgctat

SEQ ID NO: 27796 - DNA, 22 bp, Artificial Sequence
  chemically synthesized
agagaaatggggtcttgctatg

SEQ ID NO: 27797 - DNA, 22 bp, Artificial Sequence
  chemically synthesized
gagaaatggggtcttgctatgt

SEQ ID NO: 27798 - DNA, 22 bp, Artificial Sequence
  chemically synthesized
gctatgttgcccaggctggtgg

SEQ ID NO: 27799 - DNA, 22 bp, Artificial Sequence
  chemically synthesized
ctatgttgcccaggctggtggg

SEQ ID NO: 27800 - DNA, 22 bp, Artificial Sequence
  chemically synthesized
tgttgcccaggctggtgggaaa

SEQ ID NO: 27801 - DNA, 22 bp, Artificial Sequence
  chemically synthesized
cccaggctggtgggaaaagatt

SEQ ID NO: 27802 - DNA, 22 bp, Artificial Sequence
  chemically synthesized
gtgggaaaagattttaaggtga

SEQ ID NO: 27803 - DNA, 22 bp, Artificial Sequence
  chemically synthesized
taaggtgagagagatctgagca

SEQ ID NO: 27804 - DNA, 22 bp, Artificial Sequence
  chemically synthesized
aaggtgagagagatctgagcag

SEQ ID NO: 27805 - DNA, 22 bp, Artificial Sequence
  chemically synthesized
aggtgagagagatctgagcagt

SEQ ID NO: 27806 - DNA, 22 bp, Artificial Sequence
  chemically synthesized
agcagtgctaggcagaagggca

SEQ ID NO: 27807 - DNA, 22 bp, Artificial Sequence
  chemically synthesized
ggcagaagggcaagagccagga

SEQ ID NO: 27808 - DNA, 22 bp, Artificial Sequence
  chemically synthesized
gtggtggagccgggttccatgg

SEQ ID NO: 27809 - DNA, 22 bp, Artificial Sequence
  chemically synthesized
catggaggcaggaggagcaggg

SEQ ID NO: 27810 - DNA, 22 bp, Artificial Sequence
  chemically synthesized
ggagcttaggaaggggattggt

SEQ ID NO: 27811 - DNA, 22 bp, Artificial Sequence
  chemically synthesized
gagcttaggaaggggattggtt

SEQ ID NO: 27812 - DNA, 22 bp, Artificial Sequence
  chemically synthesized
aggaaggggattggttagctgg

SEQ ID NO: 27813 - DNA, 22 bp, Artificial Sequence
  chemically synthesized
ggaaggggattggttagctggg

SEQ ID NO: 27814 - DNA, 22 bp, Artificial Sequence
  chemically synthesized
gttagctgggctggaatgaggg

SEQ ID NO: 27815 - DNA, 22 bp, Artificial Sequence
  chemically synthesized
gctgggctggaatgagggactc

SEQ ID NO: 27816 - DNA, 22 bp, Artificial Sequence
  chemically synthesized
ggctggaatgagggactcctca

SEQ ID NO: 27817 - DNA, 22 bp, Artificial Sequence
  chemically synthesized
gaatgagggactcctcattcct

SEQ ID NO: 27818 - DNA, 22 bp, Artificial Sequence
  chemically synthesized
ctcattcctgaggctggccaac

SEQ ID NO: 27819 - DNA, 22 bp, Artificial Sequence
  chemically synthesized
attcctgaggctggccaaccga

SEQ ID NO: 27820 - DNA, 22 bp, Artificial Sequence
  chemically synthesized
ctgaggctggccaaccgaggga

SEQ ID NO: 27821 - DNA, 22 bp, Artificial Sequence
  chemically synthesized
aggctggccaaccgagggaggg

SEQ ID NO: 27822 - DNA, 22 bp, Artificial Sequence
  chemically synthesized
gccaaccgagggagggccggtg

SEQ ID NO: 27823 - DNA, 22 bp, Artificial Sequence
  chemically synthesized
ggcagggcagggcaggggacag

SEQ ID NO: 27824 - DNA, 22 bp, Artificial Sequence
  chemically synthesized
ccgaggaccactcaggaacacc

SEQ ID NO: 27825 - DNA, 22 bp, Artificial Sequence
  chemically synthesized
aggaacaccagtagcatctcct

SEQ ID NO: 27826 - DNA, 22 bp, Artificial Sequence
  chemically synthesized
ctctctctgtagggggctggct

SEQ ID NO: 27827 - DNA, 22 bp, Artificial Sequence
  chemically synthesized
tctctgtagggggctggctgga

SEQ ID NO: 27828 - DNA, 22 bp, Artificial Sequence
  chemically synthesized
tctgtagggggctggctggact

SEQ ID NO: 27829 - DNA, 22 bp, Artificial Sequence
  chemically synthesized
tgtagggggctggctggacttc

SEQ ID NO: 27830 - DNA, 22 bp, Artificial Sequence
  chemically synthesized
tagggggctggctggacttccc

SEQ ID NO: 27831 - DNA, 22 bp, Artificial Sequence
  chemically synthesized
gctggacttcccaccaggcggt

SEQ ID NO: 27832 - DNA, 22 bp, Artificial Sequence
  chemically synthesized
gacttcccaccaggcggtgtcc

SEQ ID NO: 27833 - DNA, 22 bp, Artificial Sequence
  chemically synthesized
cccaccaggcggtgtccccaca

SEQ ID NO: 27834 - DNA, 22 bp, Artificial Sequence
  chemically synthesized
ccaccaggcggtgtccccacag

SEQ ID NO: 27835 - DNA, 22 bp, Artificial Sequence
  chemically synthesized
tccgcctcactctcctctgcaa

SEQ ID NO: 27836 - DNA, 22 bp, Artificial Sequence
  chemically synthesized
actctcctctgcaactccagtg

SEQ ID NO: 27837 - DNA, 22 bp, Artificial Sequence
  chemically synthesized
tcctctgcaactccagtgccca

SEQ ID NO: 27838 - DNA, 22 bp, Artificial Sequence
  chemically synthesized
ctctgcaactccagtgcccaca

SEQ ID NO: 27839 - DNA, 22 bp, Artificial Sequence
  chemically synthesized
tgcaactccagtgcccacacgg

SEQ ID NO: 27840 - DNA, 22 bp, Artificial Sequence
  chemically synthesized
caactccagtgcccacacggca

SEQ ID NO: 27841 - DNA, 22 bp, Artificial Sequence
  chemically synthesized
cagtgcccacacggcacccggt

SEQ ID NO: 27842 - DNA, 22 bp, Artificial Sequence
  chemically synthesized
agagagaatacgggatgctgct

SEQ ID NO: 27843 - DNA, 22 bp, Artificial Sequence
  chemically synthesized
ctgaatcttctgagggtgacag

SEQ ID NO: 27844 - DNA, 22 bp, Artificial Sequence
  chemically synthesized
aatcttctgagggtgacagaat

SEQ ID NO: 27845 - DNA, 22 bp, Artificial Sequence
  chemically synthesized
ctgagggtgacagaatttagag

SEQ ID NO: 27846 - DNA, 22 bp, Artificial Sequence
  chemically synthesized
tgagggtgacagaatttagagt

SEQ ID NO: 27847 - DNA, 22 bp, Artificial Sequence
  chemically synthesized
agggtgacagaatttagagttt

SEQ ID NO: 27848 - DNA, 22 bp, Artificial Sequence
  chemically synthesized
agagtttgagcaggaggcttgg

SEQ ID NO: 27849 - DNA, 22 bp, Artificial Sequence
  chemically synthesized
gagtttgagcaggaggcttgga

SEQ ID NO: 27850 - DNA, 22 bp, Artificial Sequence
  chemically synthesized
gagcaggaggcttggagagagg

SEQ ID NO: 27851 - DNA, 22 bp, Artificial Sequence
  chemically synthesized
agcaggaggcttggagagaggc

SEQ ID NO: 27852 - DNA, 22 bp, Artificial Sequence
  chemically synthesized
ggagagaggccaggatttctga

SEQ ID NO: 27853 - DNA, 22 bp, Artificial Sequence
  chemically synthesized
gagagaggccaggatttctgaa

SEQ ID NO: 27854 - DNA, 22 bp, Artificial Sequence
  chemically synthesized
ctgaaattaatgggagagtgag

SEQ ID NO: 27855 - DNA, 22 bp, Artificial Sequence
  chemically synthesized
tgaaattaatgggagagtgagc

SEQ ID NO: 27856 - DNA, 22 bp, Artificial Sequence
  chemically synthesized
aaattaatgggagagtgagctc

SEQ ID NO: 27857 - DNA, 22 bp, Artificial Sequence
  chemically synthesized
atgggagagtgagctcacgcga

SEQ ID NO: 27858 - DNA, 22 bp, Artificial Sequence
  chemically synthesized
acgcgaatgggctgagggacac

SEQ ID NO: 27859 - DNA, 22 bp, Artificial Sequence
  chemically synthesized
agggacaccagtgagggaccgt

SEQ ID NO: 27860 - DNA, 22 bp, Artificial Sequence
  chemically synthesized
aagggatgtagcaaagtcaccg

SEQ ID NO: 27861 - DNA, 22 bp, Artificial Sequence
  chemically synthesized
ccctccagcagcccgggtggtg

SEQ ID NO: 27862 - DNA, 22 bp, Artificial Sequence
  chemically synthesized
cctccagcagcccgggtggtgg

SEQ ID NO: 27863 - DNA, 22 bp, Artificial Sequence
  chemically synthesized
cagcagcccgggtggtgggggc

SEQ ID NO: 27864 - DNA, 22 bp, Artificial Sequence
  chemically synthesized
ggggaacgtcatcatgggagct

SEQ ID NO: 27865 - DNA, 22 bp, Artificial Sequence
  chemically synthesized
acactgatcagctgctcaccgg

SEQ ID NO: 27866 - DNA, 22 bp, Artificial Sequence
  chemically synthesized
atcagctgctcaccggggccca

SEQ ID NO: 27867 - DNA, 22 bp, Artificial Sequence
  chemically synthesized
ctcaccggggcccatcttccac

SEQ ID NO: 27868 - DNA, 22 bp, Artificial Sequence
  chemically synthesized
accggggcccatcttccacttg

SEQ ID NO: 27869 - DNA, 22 bp, Artificial Sequence
  chemically synthesized
ccacttgtctcagcacttgatt

SEQ ID NO: 27870 - DNA, 22 bp, Artificial Sequence
  chemically synthesized
cacttgtctcagcacttgattt

SEQ ID NO: 27871 - DNA, 22 bp, Artificial Sequence
  chemically synthesized
gtctcagcacttgatttttttc

SEQ ID NO: 27872 - DNA, 22 bp, Artificial Sequence
  chemically synthesized
tctcagcacttgatttttttct

SEQ ID NO: 27873 - DNA, 22 bp, Artificial Sequence
  chemically synthesized
agcacttgatttttttctgcta

SEQ ID NO: 27874 - DNA, 22 bp, Artificial Sequence
  chemically synthesized
gatttttttctgctaccccctt

SEQ ID NO: 27875 - DNA, 22 bp, Artificial Sequence
  chemically synthesized
atttttttctgctacccccttt

SEQ ID NO: 27876 - DNA, 22 bp, Artificial Sequence
  chemically synthesized
ttttctgctaccccctttttct

SEQ ID NO: 27877 - DNA, 22 bp, Artificial Sequence
  chemically synthesized
tttctgctaccccctttttctt

SEQ ID NO: 27878 - DNA, 22 bp, Artificial Sequence
  chemically synthesized
ttctgctaccccctttttcttt

SEQ ID NO: 27879 - DNA, 22 bp, Artificial Sequence
  chemically synthesized
tctgctaccccctttttctttt

SEQ ID NO: 27880 - DNA, 22 bp, Artificial Sequence
  chemically synthesized
ctgctaccccctttttctttta

SEQ ID NO: 27881 - DNA, 22 bp, Artificial Sequence
  chemically synthesized
tgctaccccctttttcttttaa

SEQ ID NO: 27882 - DNA, 22 bp, Artificial Sequence
  chemically synthesized
ctaccccctttttcttttaaag

SEQ ID NO: 27883 - DNA, 22 bp, Artificial Sequence
  chemically synthesized
ccccctttttcttttaaagatt

SEQ ID NO: 27884 - DNA, 22 bp, Artificial Sequence
  chemically synthesized
tttcttttaaagatttcaatta

SEQ ID NO: 27885 - DNA, 22 bp, Artificial Sequence
  chemically synthesized
ttcttttaaagatttcaattat

SEQ ID NO: 27886 - DNA, 22 bp, Artificial Sequence
  chemically synthesized
tcttttaaagatttcaattatg

SEQ ID NO: 27887 - DNA, 22 bp, Artificial Sequence
  chemically synthesized
cttttaaagatttcaattatgc

SEQ ID NO: 27888 - DNA, 22 bp, Artificial Sequence
  chemically synthesized
ttttaaagatttcaattatgca

SEQ ID NO: 27889 - DNA, 22 bp, Artificial Sequence
  chemically synthesized
ttaaagatttcaattatgcatg

SEQ ID NO: 27890 - DNA, 22 bp, Artificial Sequence
  chemically synthesized
taaagatttcaattatgcatgt

SEQ ID NO: 27891 - DNA, 22 bp, Artificial Sequence
  chemically synthesized
aaagatttcaattatgcatgta

SEQ ID NO: 27892 - DNA, 22 bp, Artificial Sequence
  chemically synthesized
aagatttcaattatgcatgtat

SEQ ID NO: 27893 - DNA, 22 bp, Artificial Sequence
  chemically synthesized
caattatgcatgtattaagggt

SEQ ID NO: 27894 - DNA, 22 bp, Artificial Sequence
  chemically synthesized
aattatgcatgtattaagggtc

SEQ ID NO: 27895 - DNA, 22 bp, Artificial Sequence
  chemically synthesized
tgcatgtattaagggtcccaca

SEQ ID NO: 27896 - DNA, 22 bp, Artificial Sequence
  chemically synthesized
agggtcccacagctcactcatt

SEQ ID NO: 27897 - DNA, 22 bp, Artificial Sequence
  chemically synthesized
actcattctctttccatttttt

SEQ ID NO: 27898 - DNA, 22 bp, Artificial Sequence
  chemically synthesized
attctctttccattttttaatt

SEQ ID NO: 27899 - DNA, 22 bp, Artificial Sequence
  chemically synthesized
tctttccattttttaattcttt

SEQ ID NO: 27900 - DNA, 22 bp, Artificial Sequence
  chemically synthesized
tttccattttttaattcttttt

SEQ ID NO: 27901 - DNA, 22 bp, Artificial Sequence
  chemically synthesized
tccattttttaattcttttttc

SEQ ID NO: 27902 - DNA, 22 bp, Artificial Sequence
  chemically synthesized
ccattttttaattcttttttct

SEQ ID NO: 27903 - DNA, 22 bp, Artificial Sequence
  chemically synthesized
cattttttaattcttttttctc

SEQ ID NO: 27904 - DNA, 22 bp, Artificial Sequence
  chemically synthesized
tttaattcttttttctcccagt

SEQ ID NO: 27905 - DNA, 22 bp, Artificial Sequence
  chemically synthesized
ttaattcttttttctcccagtg

SEQ ID NO: 27906 - DNA, 22 bp, Artificial Sequence
  chemically synthesized
taattcttttttctcccagtgt

SEQ ID NO: 27907 - DNA, 22 bp, Artificial Sequence
  chemically synthesized
aattcttttttctcccagtgtt

SEQ ID NO: 27908 - DNA, 22 bp, Artificial Sequence
  chemically synthesized
attcttttttctcccagtgttt

SEQ ID NO: 27909 - DNA, 22 bp, Artificial Sequence
  chemically synthesized
ttttttctcccagtgtttcatt

SEQ ID NO: 27910 - DNA, 22 bp, Artificial Sequence
  chemically synthesized
ttttctcccagtgtttcatttt

SEQ ID NO: 27911 - DNA, 22 bp, Artificial Sequence
  chemically synthesized
tttctcccagtgtttcatttta

SEQ ID NO: 27912 - DNA, 22 bp, Artificial Sequence
  chemically synthesized
ttctcccagtgtttcattttat

SEQ ID NO: 27913 - DNA, 22 bp, Artificial Sequence
  chemically synthesized
tctcccagtgtttcattttata

SEQ ID NO: 27914 - DNA, 22 bp, Artificial Sequence
  chemically synthesized
ctcccagtgtttcattttatag

SEQ ID NO: 27915 - DNA, 22 bp, Artificial Sequence
  chemically synthesized
tcccagtgtttcattttataga

SEQ ID NO: 27916 - DNA, 22 bp, Artificial Sequence
  chemically synthesized
ccagtgtttcattttatagagt

SEQ ID NO: 27917 - DNA, 22 bp, Artificial Sequence
  chemically synthesized
cattttatagagttattgctgt

SEQ ID NO: 27918 - DNA, 22 bp, Artificial Sequence
  chemically synthesized
attttatagagttattgctgtt

SEQ ID NO: 27919 - DNA, 22 bp, Artificial Sequence
  chemically synthesized
tatagagttattgctgttcatt

SEQ ID NO: 27920 - DNA, 22 bp, Artificial Sequence
  chemically synthesized
atagagttattgctgttcatta

SEQ ID NO: 27921 - DNA, 22 bp, Artificial Sequence
  chemically synthesized
tagagttattgctgttcattaa

SEQ ID NO: 27922 - DNA, 22 bp, Artificial Sequence
  chemically synthesized
ttgctgttcattaagttaacta

SEQ ID NO: 27923 - DNA, 22 bp, Artificial Sequence
  chemically synthesized
ctgttcattaagttaactaaaa

SEQ ID NO: 27924 - DNA, 22 bp, Artificial Sequence
  chemically synthesized
ttcattaagttaactaaaattt

SEQ ID NO: 27925 - DNA, 22 bp, Artificial Sequence
  chemically synthesized
attaagttaactaaaattttcc

SEQ ID NO: 27926 - DNA, 22 bp, Artificial Sequence
  chemically synthesized
agttaactaaaattttcccctt

SEQ ID NO: 27927 - DNA, 22 bp, Artificial Sequence
  chemically synthesized
actaaaattttccccttcccct

SEQ ID NO: 27928 - DNA, 22 bp, Artificial Sequence
  chemically synthesized
aaattttccccttcccctcccc

SEQ ID NO: 27929 - DNA, 22 bp, Artificial Sequence
  chemically synthesized
tccccttcccctccccctcccc

SEQ ID NO: 27930 - DNA, 22 bp, Artificial Sequence
  chemically synthesized
ccccttcccctccccctcccct

SEQ ID NO: 27931 - DNA, 22 bp, Artificial Sequence
  chemically synthesized
cccttcccctccccctcccctc

SEQ ID NO: 27932 - DNA, 22 bp, Artificial Sequence
  chemically synthesized
cccctccccctcccctcccctc

SEQ ID NO: 27933 - DNA, 22 bp, Artificial Sequence
  chemically synthesized
ccctccccctcccctcccctcc

SEQ ID NO: 27934 - DNA, 22 bp, Artificial Sequence
  chemically synthesized
cccctcccctcccctcctttcc

SEQ ID NO: 27935 - DNA, 22 bp, Artificial Sequence
  chemically synthesized
ccctcccctcctttccttccct

SEQ ID NO: 27936 - DNA, 22 bp, Artificial Sequence
  chemically synthesized
ccctcctttccttccctcgctt

SEQ ID NO: 27937 - DNA, 22 bp, Artificial Sequence
  chemically synthesized
ctttccttccctcgcttcccct

SEQ ID NO: 27938 - DNA, 22 bp, Artificial Sequence
  chemically synthesized
tccttccctcgcttcccctccc

SEQ ID NO: 27939 - DNA, 22 bp, Artificial Sequence
  chemically synthesized
ccttccctcgcttcccctcccc

SEQ ID NO: 27940 - DNA, 22 bp, Artificial Sequence
  chemically synthesized
cttccctcgcttcccctcccct

SEQ ID NO: 27941 - DNA, 22 bp, Artificial Sequence
  chemically synthesized
ccctcgcttcccctcccctctc

SEQ ID NO: 27942 - DNA, 22 bp, Artificial Sequence
  chemically synthesized
cctcgcttcccctcccctctct

SEQ ID NO: 27943 - DNA, 22 bp, Artificial Sequence
  chemically synthesized
gcttcccctcccctctctctct

SEQ ID NO: 27944 - DNA, 22 bp, Artificial Sequence
  chemically synthesized
cccctcccctctctctctctca

SEQ ID NO: 27945 - DNA, 22 bp, Artificial Sequence
  chemically synthesized
ccctcccctctctctctctcat

SEQ ID NO: 27946 - DNA, 22 bp, Artificial Sequence
  chemically synthesized
ccctctctctctctcatctcac

SEQ ID NO: 27947 - DNA, 22 bp, Artificial Sequence
  chemically synthesized
tctctctctcatctcactctgt

SEQ ID NO: 27948 - DNA, 22 bp, Artificial Sequence
  chemically synthesized
tctctctcatctcactctgttg

SEQ ID NO: 27949 - DNA, 22 bp, Artificial Sequence
  chemically synthesized
tctctcatctcactctgttgcc

SEQ ID NO: 27950 - DNA, 22 bp, Artificial Sequence
  chemically synthesized
tctcatctcactctgttgccca

SEQ ID NO: 27951 - DNA, 22 bp, Artificial Sequence
  chemically synthesized
tcatctcactctgttgcccagg

SEQ ID NO: 27952 - DNA, 22 bp, Artificial Sequence
  chemically synthesized
atctcactctgttgcccaggct

SEQ ID NO: 27953 - DNA, 22 bp, Artificial Sequence
  chemically synthesized
actctgttgcccaggctggaat

SEQ ID NO: 27954 - DNA, 22 bp, Artificial Sequence
  chemically synthesized
tgttgcccaggctggaatgcag

SEQ ID NO: 27955 - DNA, 22 bp, Artificial Sequence
  chemically synthesized
ttgcccaggctggaatgcagta

SEQ ID NO: 27956 - DNA, 22 bp, Artificial Sequence
  chemically synthesized
cccaggctggaatgcagtagct

SEQ ID NO: 27957 - DNA, 22 bp, Artificial Sequence
  chemically synthesized
gaatgcagtagcttgtcacaac

SEQ ID NO: 27958 - DNA, 22 bp, Artificial Sequence
  chemically synthesized
gtcacaactcactgtggcctcc

SEQ ID NO: 27959 - DNA, 22 bp, Artificial Sequence
  chemically synthesized
tcacaactcactgtggcctcca

SEQ ID NO: 27960 - DNA, 22 bp, Artificial Sequence
  chemically synthesized
actgtggcctccacctcctggg

SEQ ID NO: 27961 - DNA, 22 bp, Artificial Sequence
  chemically synthesized
tggcctccacctcctgggctca

SEQ ID NO: 27962 - DNA, 22 bp, Artificial Sequence
  chemically synthesized
cacctcctgggctcaggcgatc

SEQ ID NO: 27963 - DNA, 22 bp, Artificial Sequence
  chemically synthesized
ctgggctcaggcgatccttcca

SEQ ID NO: 27964 - DNA, 22 bp, Artificial Sequence
  chemically synthesized
ggctcaggcgatccttccactt

SEQ ID NO: 27965 - DNA, 22 bp, Artificial Sequence
  chemically synthesized
aggcgatccttccacttcagcc

SEQ ID NO: 27966 - DNA, 22 bp, Artificial Sequence
  chemically synthesized
ccacttcagcctcccaggtagc

SEQ ID NO: 27967 - DNA, 22 bp, Artificial Sequence
  chemically synthesized
cacttcagcctcccaggtagct

SEQ ID NO: 27968 - DNA, 22 bp, Artificial Sequence
  chemically synthesized
cagcctcccaggtagctgggac

SEQ ID NO: 27969 - DNA, 22 bp, Artificial Sequence
  chemically synthesized
agcctcccaggtagctgggact

SEQ ID NO: 27970 - DNA, 22 bp, Artificial Sequence
  chemically synthesized
ccaggtagctgggactataggc

SEQ ID NO: 27971 - DNA, 22 bp, Artificial Sequence
  chemically synthesized
ggactataggcatgtggcacca

SEQ ID NO: 27972 - DNA, 22 bp, Artificial Sequence
  chemically synthesized
taggcatgtggcaccacacctg

SEQ ID NO: 27973 - DNA, 22 bp, Artificial Sequence
  chemically synthesized
gctaattaaaaatttttttttg

SEQ ID NO: 27974 - DNA, 22 bp, Artificial Sequence
  chemically synthesized
attaaaaatttttttttgtaga

SEQ ID NO: 27975 - DNA, 22 bp, Artificial Sequence
  chemically synthesized
aaaatttttttttgtagagacg

SEQ ID NO: 27976 - DNA, 22 bp, Artificial Sequence
  chemically synthesized
ttttttgtagagacggttttgc

SEQ ID NO: 27977 - DNA, 22 bp, Artificial Sequence
  chemically synthesized
tttttgtagagacggttttgcc

SEQ ID NO: 27978 - DNA, 22 bp, Artificial Sequence
  chemically synthesized
ttttgtagagacggttttgcca

SEQ ID NO: 27979 - DNA, 22 bp, Artificial Sequence
  chemically synthesized
tttgtagagacggttttgccat

SEQ ID NO: 27980 - DNA, 22 bp, Artificial Sequence
  chemically synthesized
ttgtagagacggttttgccatg

SEQ ID NO: 27981 - DNA, 22 bp, Artificial Sequence
  chemically synthesized
tgtagagacggttttgccatgt

SEQ ID NO: 27982 - DNA, 22 bp, Artificial Sequence
  chemically synthesized
gtagagacggttttgccatgta

SEQ ID NO: 27983 - DNA, 22 bp, Artificial Sequence
  chemically synthesized
tagagacggttttgccatgtag

SEQ ID NO: 27984 - DNA, 22 bp, Artificial Sequence
  chemically synthesized
tgccatgtagaggggttttgcc

SEQ ID NO: 27985 - DNA, 22 bp, Artificial Sequence
  chemically synthesized
gccatgtagaggggttttgcca

SEQ ID NO: 27986 - DNA, 22 bp, Artificial Sequence
  chemically synthesized
ccatgtagaggggttttgccat

SEQ ID NO: 27987 - DNA, 22 bp, Artificial Sequence
  chemically synthesized
tgccatgctgcccagactagtc

SEQ ID NO: 27988 - DNA, 22 bp, Artificial Sequence
  chemically synthesized
gccatgctgcccagactagtct

SEQ ID NO: 27989 - DNA, 22 bp, Artificial Sequence
  chemically synthesized
ccatgctgcccagactagtctt

SEQ ID NO: 27990 - DNA, 22 bp, Artificial Sequence
  chemically synthesized
cccagactagtcttgagctcct

SEQ ID NO: 27991 - DNA, 22 bp, Artificial Sequence
  chemically synthesized
gtcttgagctcctgggctcaag

SEQ ID NO: 27992 - DNA, 22 bp, Artificial Sequence
  chemically synthesized
gagctcctgggctcaagtgatt

SEQ ID NO: 27993 - DNA, 22 bp, Artificial Sequence
  chemically synthesized
agctcctgggctcaagtgattc

SEQ ID NO: 27994 - DNA, 22 bp, Artificial Sequence
  chemically synthesized
ctgggctcaagtgattcccccc

SEQ ID NO: 27995 - DNA, 22 bp, Artificial Sequence
  chemically synthesized
ggctcaagtgattccccccgtg

SEQ ID NO: 27996 - DNA, 22 bp, Artificial Sequence
  chemically synthesized
aagtgattccccccgtgtcgac

SEQ ID NO: 27997 - DNA, 22 bp, Artificial Sequence
  chemically synthesized
cccccgtgtcgacctcccaaag

SEQ ID NO: 27998 - DNA, 22 bp, Artificial Sequence
  chemically synthesized
ccaaagtgctgggattacagat

SEQ ID NO: 27999 - DNA, 22 bp, Artificial Sequence
  chemically synthesized
ggattacagatgtgatccacag

SEQ ID NO: 28000 - DNA, 22 bp, Artificial Sequence
  chemically synthesized
cagatgtgatccacagtgcctg

SEQ ID NO: 28001 - DNA, 22 bp, Artificial Sequence
  chemically synthesized
gccctaaatttttcttacgcat

SEQ ID NO: 28002 - DNA, 22 bp, Artificial Sequence
  chemically synthesized
aatttttcttacgcatttctca

SEQ ID NO: 28003 - DNA, 22 bp, Artificial Sequence
  chemically synthesized
ttcttacgcatttctcatcttc

SEQ ID NO: 28004 - DNA, 22 bp, Artificial Sequence
  chemically synthesized
tcttacgcatttctcatcttcc

SEQ ID NO: 28005 - DNA, 22 bp, Artificial Sequence
  chemically synthesized
cttacgcatttctcatcttcca

SEQ ID NO: 28006 - DNA, 22 bp, Artificial Sequence
  chemically synthesized
ttacgcatttctcatcttccat

SEQ ID NO: 28007 - DNA, 22 bp, Artificial Sequence
  chemically synthesized
acgcatttctcatcttccatta

SEQ ID NO: 28008 - DNA, 22 bp, Artificial Sequence
  chemically synthesized
cgcatttctcatcttccattat

SEQ ID NO: 28009 - DNA, 22 bp, Artificial Sequence
  chemically synthesized
ctcatcttccattatttccatc

SEQ ID NO: 28010 - DNA, 22 bp, Artificial Sequence
  chemically synthesized
tcatcttccattatttccatcc

SEQ ID NO: 28011 - DNA, 22 bp, Artificial Sequence
  chemically synthesized
atcttccattatttccatccag

SEQ ID NO: 28012 - DNA, 22 bp, Artificial Sequence
  chemically synthesized
ccattatttccatccagtgtgt

SEQ ID NO: 28013 - DNA, 22 bp, Artificial Sequence
  chemically synthesized
cattatttccatccagtgtgtt

SEQ ID NO: 28014 - DNA, 22 bp, Artificial Sequence
  chemically synthesized
tttccatccagtgtgttttttc

SEQ ID NO: 28015 - DNA, 22 bp, Artificial Sequence
  chemically synthesized
ccatccagtgtgttttttcttt

SEQ ID NO: 28016 - DNA, 22 bp, Artificial Sequence
  chemically synthesized
catccagtgtgttttttctttt

SEQ ID NO: 28017 - DNA, 22 bp, Artificial Sequence
  chemically synthesized
tttcttttctttcttttctttt

SEQ ID NO: 28018 - DNA, 22 bp, Artificial Sequence
  chemically synthesized
ttcttttctttcttttcttttt

SEQ ID NO: 28019 - DNA, 22 bp, Artificial Sequence
  chemically synthesized
tcttttctttcttttctttttt

SEQ ID NO: 28020 - DNA, 22 bp, Artificial Sequence
  chemically synthesized
cttttctttcttttcttttttt

SEQ ID NO: 28021 - DNA, 22 bp, Artificial Sequence
  chemically synthesized
ttttctttcttttctttttttt

SEQ ID NO: 28022 - DNA, 22 bp, Artificial Sequence
  chemically synthesized
ttctttcttttctttttttttt

SEQ ID NO: 28023 - DNA, 22 bp, Artificial Sequence
  chemically synthesized
tctttcttttcttttttttttt

SEQ ID NO: 28024 - DNA, 22 bp, Artificial Sequence
  chemically synthesized
ctttcttttctttttttttttt

SEQ ID NO: 28025 - DNA, 22 bp, Artificial Sequence
  chemically synthesized
tttcttttcttttttttttttt

SEQ ID NO: 28026 - DNA, 22 bp, Artificial Sequence
  chemically synthesized
tcttttcttttttttttttttg

SEQ ID NO: 28027 - DNA, 22 bp, Artificial Sequence
  chemically synthesized
cttttcttttttttttttttgg

SEQ ID NO: 28028 - DNA, 22 bp, Artificial Sequence
  chemically synthesized
ttttcttttttttttttttgga

SEQ ID NO: 28029 - DNA, 22 bp, Artificial Sequence
  chemically synthesized
ttcttttttttttttttggagg

SEQ ID NO: 28030 - DNA, 22 bp, Artificial Sequence
  chemically synthesized
tcttttttttttttttggaggc

SEQ ID NO: 28031 - DNA, 22 bp, Artificial Sequence
  chemically synthesized
cttttttttttttttggaggcg

SEQ ID NO: 28032 - DNA, 22 bp, Artificial Sequence
  chemically synthesized
ttttttttttttttggaggcgg

SEQ ID NO: 28033 - DNA, 22 bp, Artificial Sequence
  chemically synthesized
ttttttttttttggaggcggag

SEQ ID NO: 28034 - DNA, 22 bp, Artificial Sequence
  chemically synthesized
tttttttttttggaggcggagt

SEQ ID NO: 28035 - DNA, 22 bp, Artificial Sequence
  chemically synthesized
ttttttttttggaggcggagtc

SEQ ID NO: 28036 - DNA, 22 bp, Artificial Sequence
  chemically synthesized
tttttttttggaggcggagtct

SEQ ID NO: 28037 - DNA, 22 bp, Artificial Sequence
  chemically synthesized
ttttttttggaggcggagtctc

SEQ ID NO: 28038 - DNA, 22 bp, Artificial Sequence
  chemically synthesized
tttttttggaggcggagtctcg

SEQ ID NO: 28039 - DNA, 22 bp, Artificial Sequence
  chemically synthesized
ttttttggaggcggagtctcgc

SEQ ID NO: 28040 - DNA, 22 bp, Artificial Sequence
  chemically synthesized
tttttggaggcggagtctcgct

SEQ ID NO: 28041 - DNA, 22 bp, Artificial Sequence
  chemically synthesized
ttttggaggcggagtctcgctc

SEQ ID NO: 28042 - DNA, 22 bp, Artificial Sequence
  chemically synthesized
tttggaggcggagtctcgctct

SEQ ID NO: 28043 - DNA, 22 bp, Artificial Sequence
  chemically synthesized
ttggaggcggagtctcgctctg

SEQ ID NO: 28044 - DNA, 22 bp, Artificial Sequence
  chemically synthesized
tggaggcggagtctcgctctgt

SEQ ID NO: 28045 - DNA, 22 bp, Artificial Sequence
  chemically synthesized
ggaggcggagtctcgctctgtt

SEQ ID NO: 28046 - DNA, 22 bp, Artificial Sequence
  chemically synthesized
gaggcggagtctcgctctgttg

SEQ ID NO: 28047 - DNA, 22 bp, Artificial Sequence
  chemically synthesized
gctctgttgcccaggccggagt

SEQ ID NO: 28048 - DNA, 22 bp, Artificial Sequence
  chemically synthesized
tgttgcccaggccggagtgcag

SEQ ID NO: 28049 - DNA, 22 bp, Artificial Sequence
  chemically synthesized
ttgcccaggccggagtgcagtg

SEQ ID NO: 28050 - DNA, 22 bp, Artificial Sequence
  chemically synthesized
cccaggccggagtgcagtggcg

SEQ ID NO: 28051 - DNA, 22 bp, Artificial Sequence
  chemically synthesized
ggctcactgcaagctctgcctc

SEQ ID NO: 28052 - DNA, 22 bp, Artificial Sequence
  chemically synthesized
gctcactgcaagctctgcctcc

SEQ ID NO: 28053 - DNA, 22 bp, Artificial Sequence
  chemically synthesized
actgcaagctctgcctcccggg

SEQ ID NO: 28054 - DNA, 22 bp, Artificial Sequence
  chemically synthesized
caagctctgcctcccgggttca

SEQ ID NO: 28055 - DNA, 22 bp, Artificial Sequence
  chemically synthesized
tgcctcccgggttcatgccatt

SEQ ID NO: 28056 - DNA, 22 bp, Artificial Sequence
  chemically synthesized
cctcccgggttcatgccattct

SEQ ID NO: 28057 - DNA, 22 bp, Artificial Sequence
  chemically synthesized
ccgggttcatgccattctcctg

SEQ ID NO: 28058 - DNA, 22 bp, Artificial Sequence
  chemically synthesized
atgccattctcctgcctcagcc

SEQ ID NO: 28059 - DNA, 22 bp, Artificial Sequence
  chemically synthesized
tcctgcctcagcctcccgagta

SEQ ID NO: 28060 - DNA, 22 bp, Artificial Sequence
  chemically synthesized
ctgcctcagcctcccgagtagc

SEQ ID NO: 28061 - DNA, 22 bp, Artificial Sequence
  chemically synthesized
cctcagcctcccgagtagctgg

SEQ ID NO: 28062 - DNA, 22 bp, Artificial Sequence
  chemically synthesized
agcctcccgagtagctgggact

SEQ ID NO: 28063 - DNA, 22 bp, Artificial Sequence
  chemically synthesized
ccgagtagctgggactacaggc

SEQ ID NO: 28064 - DNA, 22 bp, Artificial Sequence
  chemically synthesized
ggactacaggcgcctgccacca

SEQ ID NO: 28065 - DNA, 22 bp, Artificial Sequence
  chemically synthesized
caggcgcctgccaccacgtctg

SEQ ID NO: 28066 - DNA, 22 bp, Artificial Sequence
  chemically synthesized
ccaccacgtctggctaattttt

SEQ ID NO: 28067 - DNA, 22 bp, Artificial Sequence
  chemically synthesized
gctaattttttgtatttttagt

SEQ ID NO: 28068 - DNA, 22 bp, Artificial Sequence
  chemically synthesized
attttttgtatttttagtagag

SEQ ID NO: 28069 - DNA, 22 bp, Artificial Sequence
  chemically synthesized
tttgtatttttagtagagatgg

SEQ ID NO: 28070 - DNA, 22 bp, Artificial Sequence
  chemically synthesized
ttgtatttttagtagagatggg

SEQ ID NO: 28071 - DNA, 22 bp, Artificial Sequence
  chemically synthesized
tgtatttttagtagagatgggg

SEQ ID NO: 28072 - DNA, 22 bp, Artificial Sequence
  chemically synthesized
gtatttttagtagagatggggt

SEQ ID NO: 28073 - DNA, 22 bp, Artificial Sequence
  chemically synthesized
tatttttagtagagatggggtt

SEQ ID NO: 28074 - DNA, 22 bp, Artificial Sequence
  chemically synthesized
ttagtagagatggggtttcacc

SEQ ID NO: 28075 - DNA, 22 bp, Artificial Sequence
  chemically synthesized
tagtagagatggggtttcacca

SEQ ID NO: 28076 - DNA, 22 bp, Artificial Sequence
  chemically synthesized
agtagagatggggtttcaccat

SEQ ID NO: 28077 - DNA, 22 bp, Artificial Sequence
  chemically synthesized
gtagagatggggtttcaccatg

SEQ ID NO: 28078 - DNA, 22 bp, Artificial Sequence
  chemically synthesized
caccatgttagccaggatggtg

SEQ ID NO: 28079 - DNA, 22 bp, Artificial Sequence
  chemically synthesized
accatgttagccaggatggtgt

SEQ ID NO: 28080 - DNA, 22 bp, Artificial Sequence
  chemically synthesized
gccaggatggtgtcgatctcct

SEQ ID NO: 28081 - DNA, 22 bp, Artificial Sequence
  chemically synthesized
ctgacctcatgatctgcccgcc

SEQ ID NO: 28082 - DNA, 22 bp, Artificial Sequence
  chemically synthesized
acctcatgatctgcccgccttg

SEQ ID NO: 28083 - DNA, 22 bp, Artificial Sequence
  chemically synthesized
atgatctgcccgccttggcctc

SEQ ID NO: 28084 - DNA, 22 bp, Artificial Sequence
  chemically synthesized
cccgccttggcctcccacagtg

SEQ ID NO: 28085 - DNA, 22 bp, Artificial Sequence
  chemically synthesized
ggcctcccacagtgctgggatt

SEQ ID NO: 28086 - DNA, 22 bp, Artificial Sequence
  chemically synthesized
gcctcccacagtgctgggattc

SEQ ID NO: 28087 - DNA, 22 bp, Artificial Sequence
  chemically synthesized
ccacagtgctgggattccaggc

SEQ ID NO: 28088 - DNA, 22 bp, Artificial Sequence
  chemically synthesized
ggattccaggcgtgagccacgg

SEQ ID NO: 28089 - DNA, 22 bp, Artificial Sequence
  chemically synthesized
caggcgtgagccacggcgcctg

SEQ ID NO: 28090 - DNA, 22 bp, Artificial Sequence
  chemically synthesized
gccagtgtgttttttcatttca

SEQ ID NO: 28091 - DNA, 22 bp, Artificial Sequence
  chemically synthesized
tttcatttcagacattgtagtt

SEQ ID NO: 28092 - DNA, 22 bp, Artificial Sequence
  chemically synthesized
ttcatttcagacattgtagttt

SEQ ID NO: 28093 - DNA, 22 bp, Artificial Sequence
  chemically synthesized
tcatttcagacattgtagtttt

SEQ ID NO: 28094 - DNA, 22 bp, Artificial Sequence
  chemically synthesized
catttcagacattgtagttttt

SEQ ID NO: 28095 - DNA, 22 bp, Artificial Sequence
  chemically synthesized
atttcagacattgtagttttta

SEQ ID NO: 28096 - DNA, 22 bp, Artificial Sequence
  chemically synthesized
cagacattgtagtttttatctc

SEQ ID NO: 28097 - DNA, 22 bp, Artificial Sequence
  chemically synthesized
agacattgtagtttttatctct

SEQ ID NO: 28098 - DNA, 22 bp, Artificial Sequence
  chemically synthesized
tagtttttatctctagaagttc

SEQ ID NO: 28099 - DNA, 22 bp, Artificial Sequence
  chemically synthesized
ttatctctagaagttcacctgg

SEQ ID NO: 28100 - DNA, 22 bp, Artificial Sequence
  chemically synthesized
tatctctagaagttcacctggg

SEQ ID NO: 28101 - DNA, 22 bp, Artificial Sequence
  chemically synthesized
atctctagaagttcacctgggg

SEQ ID NO: 28102 - DNA, 22 bp, Artificial Sequence
  chemically synthesized
tctctagaagttcacctgggga

SEQ ID NO: 28103 - DNA, 22 bp, Artificial Sequence
  chemically synthesized
tagaagttcacctggggactct

SEQ ID NO: 28104 - DNA, 22 bp, Artificial Sequence
  chemically synthesized
gaagttcacctggggactctta

SEQ ID NO: 28105 - DNA, 22 bp, Artificial Sequence
  chemically synthesized
acctggggactcttaaatatcc

SEQ ID NO: 28106 - DNA, 22 bp, Artificial Sequence
  chemically synthesized
gggactcttaaatatcctccac

SEQ ID NO: 28107 - DNA, 22 bp, Artificial Sequence
  chemically synthesized
ttaaatatcctccacaattcta

SEQ ID NO: 28108 - DNA, 22 bp, Artificial Sequence
  chemically synthesized
aaatatcctccacaattctact

SEQ ID NO: 28109 - DNA, 22 bp, Artificial Sequence
  chemically synthesized
aatatcctccacaattctactt

SEQ ID NO: 28110 - DNA, 22 bp, Artificial Sequence
  chemically synthesized
cacaattctacttaattttttg

SEQ ID NO: 28111 - DNA, 22 bp, Artificial Sequence
  chemically synthesized
tacttaattttttgaacataat

SEQ ID NO: 28112 - DNA, 22 bp, Artificial Sequence
  chemically synthesized
cttaattttttgaacataatgg

SEQ ID NO: 28113 - DNA, 22 bp, Artificial Sequence
  chemically synthesized
aattttttgaacataatgggat

SEQ ID NO: 28114 - DNA, 22 bp, Artificial Sequence
  chemically synthesized
attttttgaacataatgggata

SEQ ID NO: 28115 - DNA, 22 bp, Artificial Sequence
  chemically synthesized
tttgaacataatgggatatggc

SEQ ID NO: 28116 - DNA, 22 bp, Artificial Sequence
  chemically synthesized
ttgaacataatgggatatggct

SEQ ID NO: 28117 - DNA, 22 bp, Artificial Sequence
  chemically synthesized
tgaacataatgggatatggcta

SEQ ID NO: 28118 - DNA, 22 bp, Artificial Sequence
  chemically synthesized
gaacataatgggatatggctat

SEQ ID NO: 28119 - DNA, 22 bp, Artificial Sequence
  chemically synthesized
aacataatgggatatggctata

SEQ ID NO: 28120 - DNA, 22 bp, Artificial Sequence
  chemically synthesized
taatatctgttttaccatcctt

SEQ ID NO: 28121 - DNA, 22 bp, Artificial Sequence
  chemically synthesized
ttttaccatccttgcctgctaa

SEQ ID NO: 28122 - DNA, 22 bp, Artificial Sequence
  chemically synthesized
taccatccttgcctgctaattc

SEQ ID NO: 28123 - DNA, 22 bp, Artificial Sequence
  chemically synthesized
accatccttgcctgctaattct

SEQ ID NO: 28124 - DNA, 22 bp, Artificial Sequence
  chemically synthesized
ccatccttgcctgctaattcta

SEQ ID NO: 28125 - DNA, 22 bp, Artificial Sequence
  chemically synthesized
gcctgctaattctagcatccgt

SEQ ID NO: 28126 - DNA, 22 bp, Artificial Sequence
  chemically synthesized
cctgctaattctagcatccgtg

SEQ ID NO: 28127 - DNA, 22 bp, Artificial Sequence
  chemically synthesized
ctaattctagcatccgtgtcag

SEQ ID NO: 28128 - DNA, 22 bp, Artificial Sequence
  chemically synthesized
attctagcatccgtgtcagttc

SEQ ID NO: 28129 - DNA, 22 bp, Artificial Sequence
  chemically synthesized
tagcatccgtgtcagttctgga

SEQ ID NO: 28130 - DNA, 22 bp, Artificial Sequence
  chemically synthesized
gcatccgtgtcagttctggatc

SEQ ID NO: 28131 - DNA, 22 bp, Artificial Sequence
  chemically synthesized
tggatctcttttgatatttatg

SEQ ID NO: 28132 - DNA, 22 bp, Artificial Sequence
  chemically synthesized
gatctcttttgatatttatgaa

SEQ ID NO: 28133 - DNA, 22 bp, Artificial Sequence
  chemically synthesized
ttttgatatttatgaacctcct

SEQ ID NO: 28134 - DNA, 22 bp, Artificial Sequence
  chemically synthesized
ttgatatttatgaacctcctcg

SEQ ID NO: 28135 - DNA, 22 bp, Artificial Sequence
  chemically synthesized
tgatatttatgaacctcctcgt

SEQ ID NO: 28136 - DNA, 22 bp, Artificial Sequence
  chemically synthesized
gatatttatgaacctcctcgtt

SEQ ID NO: 28137 - DNA, 22 bp, Artificial Sequence
  chemically synthesized
atatttatgaacctcctcgtta

SEQ ID NO: 28138 - DNA, 22 bp, Artificial Sequence
  chemically synthesized
atgaacctcctcgttatgcatt

SEQ ID NO: 28139 - DNA, 22 bp, Artificial Sequence
  chemically synthesized
tgaacctcctcgttatgcattg

SEQ ID NO: 28140 - DNA, 22 bp, Artificial Sequence
  chemically synthesized
ctcgttatgcattgtgttttcc

SEQ ID NO: 28141 - DNA, 22 bp, Artificial Sequence
  chemically synthesized
gttatgcattgtgttttcccgt

SEQ ID NO: 28142 - DNA, 22 bp, Artificial Sequence
  chemically synthesized
tgcattgtgttttcccgtttca

SEQ ID NO: 28143 - DNA, 22 bp, Artificial Sequence
  chemically synthesized
tgttttcccgtttcattgcatg

SEQ ID NO: 28144 - DNA, 22 bp, Artificial Sequence
  chemically synthesized
tcccgtttcattgcatgccttg

SEQ ID NO: 28145 - DNA, 22 bp, Artificial Sequence
  chemically synthesized
cccgtttcattgcatgccttgt

SEQ ID NO: 28146 - DNA, 22 bp, Artificial Sequence
  chemically synthesized
ccgtttcattgcatgccttgta

SEQ ID NO: 28147 - DNA, 22 bp, Artificial Sequence
  chemically synthesized
cattgcatgccttgtaatcttt

SEQ ID NO: 28148 - DNA, 22 bp, Artificial Sequence
  chemically synthesized
attgcatgccttgtaatctttg

SEQ ID NO: 28149 - DNA, 22 bp, Artificial Sequence
  chemically synthesized
catgccttgtaatctttgattg

SEQ ID NO: 28150 - DNA, 22 bp, Artificial Sequence
  chemically synthesized
gtaatctttgattggctgccag

SEQ ID NO: 28151 - DNA, 22 bp, Artificial Sequence
  chemically synthesized
taatctttgattggctgccaga

SEQ ID NO: 28152 - DNA, 22 bp, Artificial Sequence
  chemically synthesized
tgattggctgccagacattgtc

SEQ ID NO: 28153 - DNA, 22 bp, Artificial Sequence
  chemically synthesized
gattggctgccagacattgtca

SEQ ID NO: 28154 - DNA, 22 bp, Artificial Sequence
  chemically synthesized
attggctgccagacattgtcaa

SEQ ID NO: 28155 - DNA, 22 bp, Artificial Sequence
  chemically synthesized
gctgccagacattgtcaatttc

SEQ ID NO: 28156 - DNA, 22 bp, Artificial Sequence
  chemically synthesized
ccagacattgtcaatttcacct

SEQ ID NO: 28157 - DNA, 22 bp, Artificial Sequence
  chemically synthesized
tcaatttcaccttgttgggtgc

SEQ ID NO: 28158 - DNA, 22 bp, Artificial Sequence
  chemically synthesized
caccttgttgggtgctggatat

SEQ ID NO: 28159 - DNA, 22 bp, Artificial Sequence
  chemically synthesized
accttgttgggtgctggatatt

SEQ ID NO: 28160 - DNA, 22 bp, Artificial Sequence
  chemically synthesized
gttgggtgctggatatttttgt

SEQ ID NO: 28161 - DNA, 22 bp, Artificial Sequence
  chemically synthesized
ttgggtgctggatatttttgta

SEQ ID NO: 28162 - DNA, 22 bp, Artificial Sequence
  chemically synthesized
ggtgctggatatttttgtattc

SEQ ID NO: 28163 - DNA, 22 bp, Artificial Sequence
  chemically synthesized
gatatttttgtattcctctaaa

SEQ ID NO: 28164 - DNA, 22 bp, Artificial Sequence
  chemically synthesized
ttgtattcctctaaatgttctt

SEQ ID NO: 28165 - DNA, 22 bp, Artificial Sequence
  chemically synthesized
tgtattcctctaaatgttcttg

SEQ ID NO: 28166 - DNA, 22 bp, Artificial Sequence
  chemically synthesized
gtattcctctaaatgttcttga

SEQ ID NO: 28167 - DNA, 22 bp, Artificial Sequence
  chemically synthesized
tattcctctaaatgttcttgag

SEQ ID NO: 28168 - DNA, 22 bp, Artificial Sequence
  chemically synthesized
ctctaaatgttcttgagctttg

SEQ ID NO: 28169 - DNA, 22 bp, Artificial Sequence
  chemically synthesized
taaatgttcttgagctttgctc

SEQ ID NO: 28170 - DNA, 22 bp, Artificial Sequence
  chemically synthesized
aatgttcttgagctttgctccg

SEQ ID NO: 28171 - DNA, 22 bp, Artificial Sequence
  chemically synthesized
ttgagctttgctccgggatgca

SEQ ID NO: 28172 - DNA, 22 bp, Artificial Sequence
  chemically synthesized
gagctttgctccgggatgcagt

SEQ ID NO: 28173 - DNA, 22 bp, Artificial Sequence
  chemically synthesized
agctttgctccgggatgcagtt

SEQ ID NO: 28174 - DNA, 22 bp, Artificial Sequence
  chemically synthesized
tgctccgggatgcagttaagca

SEQ ID NO: 28175 - DNA, 22 bp, Artificial Sequence
  chemically synthesized
gctccgggatgcagttaagcaa

SEQ ID NO: 28176 - DNA, 22 bp, Artificial Sequence
  chemically synthesized
ctccgggatgcagttaagcaac

SEQ ID NO: 28177 - DNA, 22 bp, Artificial Sequence
  chemically synthesized
cgggatgcagttaagcaactta

SEQ ID NO: 28178 - DNA, 22 bp, Artificial Sequence
  chemically synthesized
agcaacttagagtcagtttgat

SEQ ID NO: 28179 - DNA, 22 bp, Artificial Sequence
  chemically synthesized
agagtcagtttgatcgtttgaa

SEQ ID NO: 28180 - DNA, 22 bp, Artificial Sequence
  chemically synthesized
gagtcagtttgatcgtttgaac

SEQ ID NO: 28181 - DNA, 22 bp, Artificial Sequence
  chemically synthesized
gatcgtttgaactcttaattgt

SEQ ID NO: 28182 - DNA, 22 bp, Artificial Sequence
  chemically synthesized
atcgtttgaactcttaattgtt

SEQ ID NO: 28183 - DNA, 22 bp, Artificial Sequence
  chemically synthesized
gaactcttaattgttttggtct

SEQ ID NO: 28184 - DNA, 22 bp, Artificial Sequence
  chemically synthesized
aactcttaattgttttggtctc

SEQ ID NO: 28185 - DNA, 22 bp, Artificial Sequence
  chemically synthesized
ttaattgttttggtctcctcgg

SEQ ID NO: 28186 - DNA, 22 bp, Artificial Sequence
  chemically synthesized
aattgttttggtctcctcggac

SEQ ID NO: 28187 - DNA, 22 bp, Artificial Sequence
  chemically synthesized
attgttttggtctcctcggact

SEQ ID NO: 28188 - DNA, 22 bp, Artificial Sequence
  chemically synthesized
ttttggtctcctcggactctca

SEQ ID NO: 28189 - DNA, 22 bp, Artificial Sequence
  chemically synthesized
tggtctcctcggactctcagct

SEQ ID NO: 28190 - DNA, 22 bp, Artificial Sequence
  chemically synthesized
ggtctcctcggactctcagctc

SEQ ID NO: 28191 - DNA, 22 bp, Artificial Sequence
  chemically synthesized
gtctcctcggactctcagctcc

SEQ ID NO: 28192 - DNA, 22 bp, Artificial Sequence
  chemically synthesized
ctcggactctcagctccatctc

SEQ ID NO: 28193 - DNA, 22 bp, Artificial Sequence
  chemically synthesized
ggactctcagctccatctcctc

SEQ ID NO: 28194 - DNA, 22 bp, Artificial Sequence
  chemically synthesized
tcagctccatctcctcaacgtg

SEQ ID NO: 28195 - DNA, 22 bp, Artificial Sequence
  chemically synthesized
agctccatctcctcaacgtggg

SEQ ID NO: 28196 - DNA, 22 bp, Artificial Sequence
  chemically synthesized
catctcctcaacgtggggagtc

SEQ ID NO: 28197 - DNA, 22 bp, Artificial Sequence
  chemically synthesized
ctcaacgtggggagtctcttgg

SEQ ID NO: 28198 - DNA, 22 bp, Artificial Sequence
  chemically synthesized
aacgtggggagtctcttgggct

SEQ ID NO: 28199 - DNA, 22 bp, Artificial Sequence
  chemically synthesized
ttgggctctgcctggacttccc

SEQ ID NO: 28200 - DNA, 22 bp, Artificial Sequence
  chemically synthesized
gggctctgcctggacttccctt

SEQ ID NO: 28201 - DNA, 22 bp, Artificial Sequence
  chemically synthesized
ggctctgcctggacttcccttt

SEQ ID NO: 28202 - DNA, 22 bp, Artificial Sequence
  chemically synthesized
tgcctggacttccctttcctgg

SEQ ID NO: 28203 - DNA, 22 bp, Artificial Sequence
  chemically synthesized
cctggacttccctttcctggcc

SEQ ID NO: 28204 - DNA, 22 bp, Artificial Sequence
  chemically synthesized
gacttccctttcctggcctgta

SEQ ID NO: 28205 - DNA, 22 bp, Artificial Sequence
  chemically synthesized
ccctttcctggcctgtaacctg

SEQ ID NO: 28206 - DNA, 22 bp, Artificial Sequence
  chemically synthesized
cctttcctggcctgtaacctgc

SEQ ID NO: 28207 - DNA, 22 bp, Artificial Sequence
  chemically synthesized
tcctggcctgtaacctgcagac

SEQ ID NO: 28208 - DNA, 22 bp, Artificial Sequence
  chemically synthesized
cctggcctgtaacctgcagact

SEQ ID NO: 28209 - DNA, 22 bp, Artificial Sequence
  chemically synthesized
ctggcctgtaacctgcagactc

SEQ ID NO: 28210 - DNA, 22 bp, Artificial Sequence
  chemically synthesized
gcctgtaacctgcagactctct

SEQ ID NO: 28211 - DNA, 22 bp, Artificial Sequence
  chemically synthesized
taacctgcagactctctccaaa

SEQ ID NO: 28212 - DNA, 22 bp, Artificial Sequence
  chemically synthesized
cagactctctccaaacagtaag

SEQ ID NO: 28213 - DNA, 22 bp, Artificial Sequence
  chemically synthesized
tctccaaacagtaagctggggt

SEQ ID NO: 28214 - DNA, 22 bp, Artificial Sequence
  chemically synthesized
tccaaacagtaagctggggtga

SEQ ID NO: 28215 - DNA, 22 bp, Artificial Sequence
  chemically synthesized
caaacagtaagctggggtgatc

SEQ ID NO: 28216 - DNA, 22 bp, Artificial Sequence
  chemically synthesized
gggtgatcggagggttcctgtt

SEQ ID NO: 28217 - DNA, 22 bp, Artificial Sequence
  chemically synthesized
ctgttgtttgcttcttatccct

SEQ ID NO: 28218 - DNA, 22 bp, Artificial Sequence
  chemically synthesized
ttgtttgcttcttatccctcag

SEQ ID NO: 28219 - DNA, 22 bp, Artificial Sequence
  chemically synthesized
tttgcttcttatccctcaggga

SEQ ID NO: 28220 - DNA, 22 bp, Artificial Sequence
  chemically synthesized
gcttcttatccctcagggatct

SEQ ID NO: 28221 - DNA, 22 bp, Artificial Sequence
  chemically synthesized
cttcttatccctcagggatctt

SEQ ID NO: 28222 - DNA, 22 bp, Artificial Sequence
  chemically synthesized
cttatccctcagggatctttac

SEQ ID NO: 28223 - DNA, 22 bp, Artificial Sequence
  chemically synthesized
ttatccctcagggatctttact

SEQ ID NO: 28224 - DNA, 22 bp, Artificial Sequence
  chemically synthesized
atccctcagggatctttactcc

SEQ ID NO: 28225 - DNA, 22 bp, Artificial Sequence
  chemically synthesized
tccctcagggatctttactcct

SEQ ID NO: 28226 - DNA, 22 bp, Artificial Sequence
  chemically synthesized
agggatctttactcctccttgc

SEQ ID NO: 28227 - DNA, 22 bp, Artificial Sequence
  chemically synthesized
tactcctccttgcctgatgtcc

SEQ ID NO: 28228 - DNA, 22 bp, Artificial Sequence
  chemically synthesized
actcctccttgcctgatgtcca

SEQ ID NO: 28229 - DNA, 22 bp, Artificial Sequence
  chemically synthesized
ctcctccttgcctgatgtccag

SEQ ID NO: 28230 - DNA, 22 bp, Artificial Sequence
  chemically synthesized
ctccttgcctgatgtccagagt

SEQ ID NO: 28231 - DNA, 22 bp, Artificial Sequence
  chemically synthesized
cttgcctgatgtccagagtctt

SEQ ID NO: 28232 - DNA, 22 bp, Artificial Sequence
  chemically synthesized
gcctgatgtccagagtcttgaa

SEQ ID NO: 28233 - DNA, 22 bp, Artificial Sequence
  chemically synthesized
cctgatgtccagagtcttgaaa

SEQ ID NO: 28234 - DNA, 22 bp, Artificial Sequence
  chemically synthesized
atgtccagagtcttgaaagctg

SEQ ID NO: 28235 - DNA, 22 bp, Artificial Sequence
  chemically synthesized
gaaagctgccatgttctatagt

SEQ ID NO: 28236 - DNA, 22 bp, Artificial Sequence
  chemically synthesized
aaagctgccatgttctatagtt

SEQ ID NO: 28237 - DNA, 22 bp, Artificial Sequence
  chemically synthesized
ccatgttctatagttgtctgtt

SEQ ID NO: 28238 - DNA, 22 bp, Artificial Sequence
  chemically synthesized
tatagttgtctgtttttgtttt

SEQ ID NO: 28239 - DNA, 22 bp, Artificial Sequence
  chemically synthesized
tagttgtctgtttttgttttga

SEQ ID NO: 28240 - DNA, 22 bp, Artificial Sequence
  chemically synthesized
tctgtttttgttttgattgttt

SEQ ID NO: 28241 - DNA, 22 bp, Artificial Sequence
  chemically synthesized
tttttgttttgattgtttctgg

SEQ ID NO: 28242 - DNA, 22 bp, Artificial Sequence
  chemically synthesized
ttgttttgattgtttctgggga

SEQ ID NO: 28243 - DNA, 22 bp, Artificial Sequence
  chemically synthesized
tgttttgattgtttctggggag

SEQ ID NO: 28244 - DNA, 22 bp, Artificial Sequence
  chemically synthesized
gttttgattgtttctggggaga

SEQ ID NO: 28245 - DNA, 22 bp, Artificial Sequence
  chemically synthesized
ttttgattgtttctggggagag

SEQ ID NO: 28246 - DNA, 22 bp, Artificial Sequence
  chemically synthesized
tgattgtttctggggagagaag

SEQ ID NO: 28247 - DNA, 22 bp, Artificial Sequence
  chemically synthesized
gattgtttctggggagagaaga

SEQ ID NO: 28248 - DNA, 22 bp, Artificial Sequence
  chemically synthesized
attgtttctggggagagaagaa

SEQ ID NO: 28249 - DNA, 22 bp, Artificial Sequence
  chemically synthesized
tttctggggagagaagaactct

SEQ ID NO: 28250 - DNA, 22 bp, Artificial Sequence
  chemically synthesized
ctggggagagaagaactcttcc

SEQ ID NO: 28251 - DNA, 22 bp, Artificial Sequence
  chemically synthesized
tggggagagaagaactcttccc

SEQ ID NO: 28252 - DNA, 22 bp, Artificial Sequence
  chemically synthesized
gggagagaagaactcttcccat

SEQ ID NO: 28253 - DNA, 22 bp, Artificial Sequence
  chemically synthesized
ttcccatcttgggcagaccctg

SEQ ID NO: 28254 - DNA, 22 bp, Artificial Sequence
  chemically synthesized
cccatcttgggcagaccctgtc

SEQ ID NO: 28255 - DNA, 22 bp, Artificial Sequence
  chemically synthesized
ccatcttgggcagaccctgtct

SEQ ID NO: 28256 - DNA, 22 bp, Artificial Sequence
  chemically synthesized
gggcagaccctgtcttttatgt

SEQ ID NO: 28257 - DNA, 22 bp, Artificial Sequence
  chemically synthesized
ggcagaccctgtcttttatgtt

SEQ ID NO: 28258 - DNA, 22 bp, Artificial Sequence
  chemically synthesized
tcttttatgttcaaacttttgc

SEQ ID NO: 28259 - DNA, 22 bp, Artificial Sequence
  chemically synthesized
ttatgttcaaacttttgcctaa

SEQ ID NO: 28260 - DNA, 22 bp, Artificial Sequence
  chemically synthesized
tatgttcaaacttttgcctaag

SEQ ID NO: 28261 - DNA, 22 bp, Artificial Sequence
  chemically synthesized
atgttcaaacttttgcctaaga

SEQ ID NO: 28262 - DNA, 22 bp, Artificial Sequence
  chemically synthesized
tgttcaaacttttgcctaagaa

SEQ ID NO: 28263 - DNA, 22 bp, Artificial Sequence
  chemically synthesized
aaacttttgcctaagaagcaca

SEQ ID NO: 28264 - DNA, 22 bp, Artificial Sequence
  chemically synthesized
ttgcctaagaagcacattacat

SEQ ID NO: 28265 - DNA, 22 bp, Artificial Sequence
  chemically synthesized
tgcctaagaagcacattacata

SEQ ID NO: 28266 - DNA, 22 bp, Artificial Sequence
  chemically synthesized
gcctaagaagcacattacatat

SEQ ID NO: 28267 - DNA, 22 bp, Artificial Sequence
  chemically synthesized
cctaagaagcacattacatatt

SEQ ID NO: 28268 - DNA, 22 bp, Artificial Sequence
  chemically synthesized
agaagcacattacatattttaa

SEQ ID NO: 28269 - DNA, 22 bp, Artificial Sequence
  chemically synthesized
catattttaactcatctaatta

SEQ ID NO: 28270 - DNA, 22 bp, Artificial Sequence
  chemically synthesized
taactcatctaattatccgagc

SEQ ID NO: 28271 - DNA, 22 bp, Artificial Sequence
  chemically synthesized
aactcatctaattatccgagca

SEQ ID NO: 28272 - DNA, 22 bp, Artificial Sequence
  chemically synthesized
actcatctaattatccgagcaa

SEQ ID NO: 28273 - DNA, 22 bp, Artificial Sequence
  chemically synthesized
atctaattatccgagcaatcca

SEQ ID NO: 28274 - DNA, 22 bp, Artificial Sequence
  chemically synthesized
attatccgagcaatccaatcgg

SEQ ID NO: 28275 - DNA, 22 bp, Artificial Sequence
  chemically synthesized
tccgagcaatccaatcgggtag

SEQ ID NO: 28276 - DNA, 22 bp, Artificial Sequence
  chemically synthesized
cgactgtgatctccattttaca

SEQ ID NO: 28277 - DNA, 22 bp, Artificial Sequence
  chemically synthesized
tgatctccattttacacacgag

SEQ ID NO: 28278 - DNA, 22 bp, Artificial Sequence
  chemically synthesized
cattttacacacgagaaaatgg

SEQ ID NO: 28279 - DNA, 22 bp, Artificial Sequence
  chemically synthesized
tacacacgagaaaatggaagca

SEQ ID NO: 28280 - DNA, 22 bp, Artificial Sequence
  chemically synthesized
acacacgagaaaatggaagcat

SEQ ID NO: 28281 - DNA, 22 bp, Artificial Sequence
  chemically synthesized
cacacgagaaaatggaagcatg

SEQ ID NO: 28282 - DNA, 22 bp, Artificial Sequence
  chemically synthesized
aatgctggtgcatgatctcaga

SEQ ID NO: 28283 - DNA, 22 bp, Artificial Sequence
  chemically synthesized
gtgcatgatctcagagctacct

SEQ ID NO: 28284 - DNA, 22 bp, Artificial Sequence
  chemically synthesized
agagctacctggaggcacagct

SEQ ID NO: 28285 - DNA, 22 bp, Artificial Sequence
  chemically synthesized
cctggaggcacagctgggctac

SEQ ID NO: 28286 - DNA, 22 bp, Artificial Sequence
  chemically synthesized
gaggcacagctgggctaccctg

SEQ ID NO: 28287 - DNA, 22 bp, Artificial Sequence
  chemically synthesized
ggctaccctgtgggcagtctgg

SEQ ID NO: 28288 - DNA, 22 bp, Artificial Sequence
  chemically synthesized
ccctgtgggcagtctggtttca

SEQ ID NO: 28289 - DNA, 22 bp, Artificial Sequence
  chemically synthesized
tgggcagtctggtttcagggtg

SEQ ID NO: 28290 - DNA, 22 bp, Artificial Sequence
  chemically synthesized
gtttcagggtggatatacagac

SEQ ID NO: 28291 - DNA, 22 bp, Artificial Sequence
  chemically synthesized
cagggtggatatacagacacgt

SEQ ID NO: 28292 - DNA, 22 bp, Artificial Sequence
  chemically synthesized
agggtggatatacagacacgtt

SEQ ID NO: 28293 - DNA, 22 bp, Artificial Sequence
  chemically synthesized
ctgggctgacccagcattggga

SEQ ID NO: 28294 - DNA, 22 bp, Artificial Sequence
  chemically synthesized
ggctgacccagcattgggagtt

SEQ ID NO: 28295 - DNA, 22 bp, Artificial Sequence
  chemically synthesized
acccagcattgggagttgataa

SEQ ID NO: 28296 - DNA, 22 bp, Artificial Sequence
  chemically synthesized
ggagttgataagtcggactggg

SEQ ID NO: 28297 - DNA, 22 bp, Artificial Sequence
  chemically synthesized
ataagtcggactgggaagcagg

SEQ ID NO: 28298 - DNA, 22 bp, Artificial Sequence
  chemically synthesized
ggaagcaggacaggaccctctg

SEQ ID NO: 28299 - DNA, 22 bp, Artificial Sequence
  chemically synthesized
tgagtggagggtgctgaagaca

SEQ ID NO: 28300 - DNA, 22 bp, Artificial Sequence
  chemically synthesized
agtggagggtgctgaagacagc

SEQ ID NO: 28301 - DNA, 22 bp, Artificial Sequence
  chemically synthesized
aagacagcagtcagggactcag

SEQ ID NO: 28302 - DNA, 22 bp, Artificial Sequence
  chemically synthesized
agccatggagggccagcttggt

SEQ ID NO: 28303 - DNA, 22 bp, Artificial Sequence
  chemically synthesized
ggtggggaacaccgtggtcatg

SEQ ID NO: 28304 - DNA, 22 bp, Artificial Sequence
  chemically synthesized
gtggggaacaccgtggtcatgg

SEQ ID NO: 28305 - DNA, 22 bp, Artificial Sequence
  chemically synthesized
ctggatggagaggaatgcaaag

SEQ ID NO: 28306 - DNA, 22 bp, Artificial Sequence
  chemically synthesized
tggatggagaggaatgcaaagg

SEQ ID NO: 28307 - DNA, 22 bp, Artificial Sequence
  chemically synthesized
gatggagaggaatgcaaaggcc

SEQ ID NO: 28308 - DNA, 22 bp, Artificial Sequence
  chemically synthesized
ggaggaaggggtgggggcagtg

SEQ ID NO: 28309 - DNA, 22 bp, Artificial Sequence
  chemically synthesized
gaggaaggggtgggggcagtga

SEQ ID NO: 28310 - DNA, 22 bp, Artificial Sequence
  chemically synthesized
tgctcagagcgggagtgggcag

SEQ ID NO: 28311 - DNA, 22 bp, Artificial Sequence
  chemically synthesized
agagcgggagtgggcagtggag

SEQ ID NO: 28312 - DNA, 22 bp, Artificial Sequence
  chemically synthesized
cctgggtcaaatggggtcctga

SEQ ID NO: 28313 - DNA, 22 bp, Artificial Sequence
  chemically synthesized
ggtcaaatggggtcctgagtgt

SEQ ID NO: 28314 - DNA, 22 bp, Artificial Sequence
  chemically synthesized
agtgtggctgcagtggggaagg

SEQ ID NO: 28315 - DNA, 22 bp, Artificial Sequence
  chemically synthesized
cagtggggaaggtggaagtcac

SEQ ID NO: 28316 - DNA, 22 bp, Artificial Sequence
  chemically synthesized
gtgtgaaaaagatgaagagtta

SEQ ID NO: 28317 - DNA, 22 bp, Artificial Sequence
  chemically synthesized
tggacagtcacttacaggggca

SEQ ID NO: 28318 - DNA, 22 bp, Artificial Sequence
  chemically synthesized
acaggggcagtgtctgactcag

SEQ ID NO: 28319 - DNA, 22 bp, Artificial Sequence
  chemically synthesized
caggggcagtgtctgactcagg

SEQ ID NO: 28320 - DNA, 22 bp, Artificial Sequence
  chemically synthesized
actcaggacagtggcaggaagt

SEQ ID NO: 28321 - DNA, 22 bp, Artificial Sequence
  chemically synthesized
aggacagtggcaggaagtgacc

SEQ ID NO: 28322 - DNA, 22 bp, Artificial Sequence
  chemically synthesized
gggaggaagattctgggcccct

SEQ ID NO: 28323 - DNA, 22 bp, Artificial Sequence
  chemically synthesized
tgggcccctgactgagcctccc

SEQ ID NO: 28324 - DNA, 22 bp, Artificial Sequence
  chemically synthesized
ggcccctgactgagcctcccca

SEQ ID NO: 28325 - DNA, 22 bp, Artificial Sequence
  chemically synthesized
actgagcctccccaggatgtgg

SEQ ID NO: 28326 - DNA, 22 bp, Artificial Sequence
  chemically synthesized
agcctccccaggatgtggtcct

SEQ ID NO: 28327 - DNA, 22 bp, Artificial Sequence
  chemically synthesized
cccaggatgtggtcctgctggg

SEQ ID NO: 28328 - DNA, 22 bp, Artificial Sequence
  chemically synthesized
ctgggtcggggggtgataggaa

SEQ ID NO: 28329 - DNA, 22 bp, Artificial Sequence
  chemically synthesized
ggtcggggggtgataggaatga

SEQ ID NO: 28330 - DNA, 22 bp, Artificial Sequence
  chemically synthesized
gaaggtgttctgtttgcaggtg

SEQ ID NO: 28331 - DNA, 22 bp, Artificial Sequence
  chemically synthesized
tgtttgcaggtggatgctgcaa

SEQ ID NO: 28332 - DNA, 22 bp, Artificial Sequence
  chemically synthesized
tttgcaggtggatgctgcaaag

SEQ ID NO: 28333 - DNA, 22 bp, Artificial Sequence
  chemically synthesized
gcaggtggatgctgcaaagaga

SEQ ID NO: 28334 - DNA, 22 bp, Artificial Sequence
  chemically synthesized
caggtggatgctgcaaagagag

SEQ ID NO: 28335 - DNA, 22 bp, Artificial Sequence
  chemically synthesized
caaagagaggagctcagggctg

SEQ ID NO: 28336 - DNA, 22 bp, Artificial Sequence
  chemically synthesized
agggctgggacaactggagctg

SEQ ID NO: 28337 - DNA, 22 bp, Artificial Sequence
  chemically synthesized
ggacaactggagctgctctggg

SEQ ID NO: 28338 - DNA, 22 bp, Artificial Sequence
  chemically synthesized
gagctgctctgggtctggaggc

SEQ ID NO: 28339 - DNA, 22 bp, Artificial Sequence
  chemically synthesized
ctctgggtctggaggcagcaga

SEQ ID NO: 28340 - DNA, 22 bp, Artificial Sequence
  chemically synthesized
tgggtctggaggcagcagagag

SEQ ID NO: 28341 - DNA, 22 bp, Artificial Sequence
  chemically synthesized
ggtctggaggcagcagagaggg

SEQ ID NO: 28342 - DNA, 22 bp, Artificial Sequence
  chemically synthesized
gaggcagcagagagggagccca

SEQ ID NO: 28343 - DNA, 22 bp, Artificial Sequence
  chemically synthesized
tgtgtgcaggaagacgtgggtg

SEQ ID NO: 28344 - DNA, 22 bp, Artificial Sequence
  chemically synthesized
tgtgcaggaagacgtgggtgtg

SEQ ID NO: 28345 - DNA, 22 bp, Artificial Sequence
  chemically synthesized
gcatgcatatgcacatgtgaga

SEQ ID NO: 28346 - DNA, 22 bp, Artificial Sequence
  chemically synthesized
ttgagtgaagtgagcaatgtgt

SEQ ID NO: 28347 - DNA, 22 bp, Artificial Sequence
  chemically synthesized
tgagtgaagtgagcaatgtgtg

SEQ ID NO: 28348 - DNA, 22 bp, Artificial Sequence
  chemically synthesized
gagtgaagtgagcaatgtgtga

SEQ ID NO: 28349 - DNA, 22 bp, Artificial Sequence
  chemically synthesized
agtgaagtgagcaatgtgtgag

SEQ ID NO: 28350 - DNA, 22 bp, Artificial Sequence
  chemically synthesized
gtgagggcatgtgaatgtgtgt

SEQ ID NO: 28351 - DNA, 22 bp, Artificial Sequence
  chemically synthesized
tgagggcatgtgaatgtgtgtg

SEQ ID NO: 28352 - DNA, 22 bp, Artificial Sequence
  chemically synthesized
tcagggtgcagatggatcaagg

SEQ ID NO: 28353 - DNA, 22 bp, Artificial Sequence
  chemically synthesized
tgagatgacctcgggctgaggg

SEQ ID NO: 28354 - DNA, 22 bp, Artificial Sequence
  chemically synthesized
gggctgaggggagcaaatttag

SEQ ID NO: 28355 - DNA, 22 bp, Artificial Sequence
  chemically synthesized
aggggagcaaatttagtgtgga

SEQ ID NO: 28356 - DNA, 22 bp, Artificial Sequence
  chemically synthesized
agtgtggaacgaggtttctagg

SEQ ID NO: 28357 - DNA, 22 bp, Artificial Sequence
  chemically synthesized
gtgtggaacgaggtttctaggg

SEQ ID NO: 28358 - DNA, 22 bp, Artificial Sequence
  chemically synthesized
ctagggaagcgagggcaaaggg

SEQ ID NO: 28359 - DNA, 22 bp, Artificial Sequence
  chemically synthesized
tagggaagcgagggcaaagggc

SEQ ID NO: 28360 - DNA, 22 bp, Artificial Sequence
  chemically synthesized
gggaagcgagggcaaagggcgc

SEQ ID NO: 28361 - DNA, 22 bp, Artificial Sequence
  chemically synthesized
gggaggaggccttgcgtggtgg

SEQ ID NO: 28362 - DNA, 22 bp, Artificial Sequence
  chemically synthesized
gcgtggtgggggatgaggacaa

SEQ ID NO: 28363 - DNA, 22 bp, Artificial Sequence
  chemically synthesized
cgtggtgggggatgaggacaac

SEQ ID NO: 28364 - DNA, 22 bp, Artificial Sequence
  chemically synthesized
gagggttgtgcttggagagtgg

SEQ ID NO: 28365 - DNA, 22 bp, Artificial Sequence
  chemically synthesized
tgcttggagagtgggctatggt

SEQ ID NO: 28366 - DNA, 22 bp, Artificial Sequence
  chemically synthesized
ggagagtgggctatggtggaat

SEQ ID NO: 28367 - DNA, 22 bp, Artificial Sequence
  chemically synthesized
gagagtgggctatggtggaatg

SEQ ID NO: 28368 - DNA, 22 bp, Artificial Sequence
  chemically synthesized
tggtggaatgacccagatttaa

SEQ ID NO: 28369 - DNA, 22 bp, Artificial Sequence
  chemically synthesized
aaggatctcaatggaattttgg

SEQ ID NO: 28370 - DNA, 22 bp, Artificial Sequence
  chemically synthesized
aggatctcaatggaattttggc

SEQ ID NO: 28371 - DNA, 22 bp, Artificial Sequence
  chemically synthesized
aatggaattttggcaggggagg

SEQ ID NO: 28372 - DNA, 22 bp, Artificial Sequence
  chemically synthesized
tggcaggggagggactgttcca

SEQ ID NO: 28373 - DNA, 22 bp, Artificial Sequence
  chemically synthesized
ggcaggggagggactgttccag

SEQ ID NO: 28374 - DNA, 22 bp, Artificial Sequence
  chemically synthesized
gcaggggagggactgttccagt

SEQ ID NO: 28375 - DNA, 22 bp, Artificial Sequence
  chemically synthesized
ttccagtatggattttaggaag

SEQ ID NO: 28376 - DNA, 22 bp, Artificial Sequence
  chemically synthesized
cagtatggattttaggaagaac

SEQ ID NO: 28377 - DNA, 22 bp, Artificial Sequence
  chemically synthesized
taggaagaacacagggcccagc

SEQ ID NO: 28378 - DNA, 22 bp, Artificial Sequence
  chemically synthesized
aggaagaacacagggcccagct

SEQ ID NO: 28379 - DNA, 22 bp, Artificial Sequence
  chemically synthesized
ggaagaacacagggcccagctt

SEQ ID NO: 28380 - DNA, 22 bp, Artificial Sequence
  chemically synthesized
ctggagtctccaatctgagggg

SEQ ID NO: 28381 - DNA, 22 bp, Artificial Sequence
  chemically synthesized
tggagtctccaatctgagggga

SEQ ID NO: 28382 - DNA, 22 bp, Artificial Sequence
  chemically synthesized
gagtctccaatctgaggggaca

SEQ ID NO: 28383 - DNA, 22 bp, Artificial Sequence
  chemically synthesized
caatctgaggggacaggagcct

SEQ ID NO: 28384 - DNA, 22 bp, Artificial Sequence
  chemically synthesized
aggggacaggagccttagaaga

SEQ ID NO: 28385 - DNA, 22 bp, Artificial Sequence
  chemically synthesized
agaagagctgagactaaggccc

SEQ ID NO: 28386 - DNA, 22 bp, Artificial Sequence
  chemically synthesized
gaagagctgagactaaggcccg

SEQ ID NO: 28387 - DNA, 22 bp, Artificial Sequence
  chemically synthesized
agactaaggcccgaggtgatct

SEQ ID NO: 28388 - DNA, 22 bp, Artificial Sequence
  chemically synthesized
aggcccgaggtgatctggaggc

SEQ ID NO: 28389 - DNA, 22 bp, Artificial Sequence
  chemically synthesized
gaggcctctgccactggctgga

SEQ ID NO: 28390 - DNA, 22 bp, Artificial Sequence
  chemically synthesized
tgccactggctggatgggagga

SEQ ID NO: 28391 - DNA, 22 bp, Artificial Sequence
  chemically synthesized
ccactggctggatgggaggaaa

SEQ ID NO: 28392 - DNA, 22 bp, Artificial Sequence
  chemically synthesized
gctggatgggaggaaaaccatt

SEQ ID NO: 28393 - DNA, 22 bp, Artificial Sequence
  chemically synthesized
gatgggaggaaaaccattcaca

SEQ ID NO: 28394 - DNA, 22 bp, Artificial Sequence
  chemically synthesized
acagatcccccttctcaggatg

SEQ ID NO: 28395 - DNA, 22 bp, Artificial Sequence
  chemically synthesized
ctcaggatgtgtgcctaggcag

SEQ ID NO: 28396 - DNA, 22 bp, Artificial Sequence
  chemically synthesized
tcaggatgtgtgcctaggcagg

SEQ ID NO: 28397 - DNA, 22 bp, Artificial Sequence
  chemically synthesized
aggatgtgtgcctaggcagggc

SEQ ID NO: 28398 - DNA, 22 bp, Artificial Sequence
  chemically synthesized
ggcagggccgggtctgcccccc

SEQ ID NO: 28399 - DNA, 22 bp, Artificial Sequence
  chemically synthesized
cccccccgccccctgtgcgtct

SEQ ID NO: 28400 - DNA, 22 bp, Artificial Sequence
  chemically synthesized
tgcgtctcccagtcccccagct

SEQ ID NO: 28401 - DNA, 22 bp, Artificial Sequence
  chemically synthesized
ccagtcccccagctccaggatc

SEQ ID NO: 28402 - DNA, 22 bp, Artificial Sequence
  chemically synthesized
caggatccgggctttgcacaca

SEQ ID NO: 28403 - DNA, 22 bp, Artificial Sequence
  chemically synthesized
tgcacacagctgatgtgaatat

SEQ ID NO: 28404 - DNA, 22 bp, Artificial Sequence
  chemically synthesized
gcacacagctgatgtgaatatc

SEQ ID NO: 28405 - DNA, 22 bp, Artificial Sequence
  chemically synthesized
cacacagctgatgtgaatatcc

SEQ ID NO: 28406 - DNA, 22 bp, Artificial Sequence
  chemically synthesized
atgtgaatatcctgagtcgtgt

SEQ ID NO: 28407 - DNA, 22 bp, Artificial Sequence
  chemically synthesized
agtcgtgtgcatgggtgtgtgt

SEQ ID NO: 28408 - DNA, 22 bp, Artificial Sequence
  chemically synthesized
gctgcgtgtgtatatttataca

SEQ ID NO: 28409 - DNA, 22 bp, Artificial Sequence
  chemically synthesized
cgtgtgtatatttatacatggt

SEQ ID NO: 28410 - DNA, 22 bp, Artificial Sequence
  chemically synthesized
atacatggtaatatgggtgcga

SEQ ID NO: 28411 - DNA, 22 bp, Artificial Sequence
  chemically synthesized
tacatggtaatatgggtgcgag

SEQ ID NO: 28412 - DNA, 22 bp, Artificial Sequence
  chemically synthesized
aaatgctggggtcaaagcctat

SEQ ID NO: 28413 - DNA, 22 bp, Artificial Sequence
  chemically synthesized
gggtcaaagcctatgatgaccc

SEQ ID NO: 28414 - DNA, 22 bp, Artificial Sequence
  chemically synthesized
tgatgacccccccccatggccc

SEQ ID NO: 28415 - DNA, 22 bp, Artificial Sequence
  chemically synthesized
tgcctcctcaggcttcggtgcc

SEQ ID NO: 28416 - DNA, 22 bp, Artificial Sequence
  chemically synthesized
ctcaggcttcggtgccctgtct

SEQ ID NO: 28417 - DNA, 22 bp, Artificial Sequence
  chemically synthesized
aggcttcggtgccctgtcttta

SEQ ID NO: 28418 - DNA, 22 bp, Artificial Sequence
  chemically synthesized
cggtgccctgtctttaccctcc

SEQ ID NO: 28419 - DNA, 22 bp, Artificial Sequence
  chemically synthesized
ggtgccctgtctttaccctccg

SEQ ID NO: 28420 - DNA, 22 bp, Artificial Sequence
  chemically synthesized
tctttaccctccggctccccac

SEQ ID NO: 28421 - DNA, 22 bp, Artificial Sequence
  chemically synthesized
taccctccggctccccacaccc

SEQ ID NO: 28422 - DNA, 22 bp, Artificial Sequence
  chemically synthesized
accctccggctccccacaccca

SEQ ID NO: 28423 - DNA, 22 bp, Artificial Sequence
  chemically synthesized
ccctccggctccccacacccag

SEQ ID NO: 28424 - DNA, 22 bp, Artificial Sequence
  chemically synthesized
cggctccccacacccaggctgc

SEQ ID NO: 28425 - DNA, 22 bp, Artificial Sequence
  chemically synthesized
cccacacccaggctgccggctc

SEQ ID NO: 28426 - DNA, 22 bp, Artificial Sequence
  chemically synthesized
ccggctcctgatgcccctctcc

SEQ ID NO: 28427 - DNA, 22 bp, Artificial Sequence
  chemically synthesized
ctgatgcccctctcccacaggg

SEQ ID NO: 28428 - DNA, 22 bp, Artificial Sequence
  chemically synthesized
atgcccctctcccacagggcca

SEQ ID NO: 28429 - DNA, 22 bp, Artificial Sequence
  chemically synthesized
tcccacagggccacctcctgcc

SEQ ID NO: 28430 - DNA, 22 bp, Artificial Sequence
  chemically synthesized
ccacagggccacctcctgccca

SEQ ID NO: 28431 - DNA, 22 bp, Artificial Sequence
  chemically synthesized
ctgcccagcccctggcacagcg

SEQ ID NO: 28432 - DNA, 22 bp, Artificial Sequence
  chemically synthesized
cccagcccctggcacagcgtct

SEQ ID NO: 28433 - DNA, 22 bp, Artificial Sequence
  chemically synthesized
gcacagcgtctctgctccatgg

SEQ ID NO: 28434 - DNA, 22 bp, Artificial Sequence
  chemically synthesized
tgctccatggtctgcttcagtc

SEQ ID NO: 28435 - DNA, 22 bp, Artificial Sequence
  chemically synthesized
ctccatggtctgcttcagtctg

SEQ ID NO: 28436 - DNA, 22 bp, Artificial Sequence
  chemically synthesized
catggtctgcttcagtctgctt

SEQ ID NO: 28437 - DNA, 22 bp, Artificial Sequence
  chemically synthesized
cttcagtctgcttgccctgagc

SEQ ID NO: 28438 - DNA, 22 bp, Artificial Sequence
  chemically synthesized
cagtctgcttgccctgagcttc

SEQ ID NO: 28439 - DNA, 22 bp, Artificial Sequence
  chemically synthesized
agtctgcttgccctgagcttca

SEQ ID NO: 28440 - DNA, 22 bp, Artificial Sequence
  chemically synthesized
cttgccctgagcttcaacatcc

SEQ ID NO: 28441 - DNA, 22 bp, Artificial Sequence
  chemically synthesized
gccctgagcttcaacatcctgc

SEQ ID NO: 28442 - DNA, 22 bp, Artificial Sequence
  chemically synthesized
ccctgagcttcaacatcctgct

SEQ ID NO: 28443 - DNA, 22 bp, Artificial Sequence
  chemically synthesized
agcttcaacatcctgctgctgg

SEQ ID NO: 28444 - DNA, 22 bp, Artificial Sequence
  chemically synthesized
caacatcctgctgctggtggtc

SEQ ID NO: 28445 - DNA, 22 bp, Artificial Sequence
  chemically synthesized
aacatcctgctgctggtggtca

SEQ ID NO: 28446 - DNA, 22 bp, Artificial Sequence
  chemically synthesized
ctgctggtggtcatctgtgtga

SEQ ID NO: 28447 - DNA, 22 bp, Artificial Sequence
  chemically synthesized
ctggtggtcatctgtgtgactg

SEQ ID NO: 28448 - DNA, 22 bp, Artificial Sequence
  chemically synthesized
gtggtcatctgtgtgactgggt

SEQ ID NO: 28449 - DNA, 22 bp, Artificial Sequence
  chemically synthesized
tgtgactgggtcccaaagtgag

SEQ ID NO: 28450 - DNA, 22 bp, Artificial Sequence
  chemically synthesized
ggtcccaaagtgagggtcacgg

SEQ ID NO: 28451 - DNA, 20 bp, Artificial Sequence
  chemically synthesized
cttcagatagattatatctg

SEQ ID NO: 28452 - DNA, 20 bp, Artificial Sequence
  chemically synthesized
gatagattatatctggagtg

SEQ ID NO: 28453 - DNA, 20 bp, Artificial Sequence
  chemically synthesized
aatcctgccacctatgtatc

SEQ ID NO: 28454 - DNA, 20 bp, Artificial Sequence
  chemically synthesized
tgccacctatgtatctggca

SEQ ID NO: 28455 - DNA, 20 bp, Artificial Sequence
  chemically synthesized
ctatgtatctggcatagtgt

SEQ ID NO: 28456 - DNA, 20 bp, Artificial Sequence
  chemically synthesized
gagtcctcataaatgcttac

SEQ ID NO: 28457 - DNA, 20 bp, Artificial Sequence
  chemically synthesized
cataaatgcttactggtttg

SEQ ID NO: 28458 - DNA, 20 bp, Artificial Sequence
  chemically synthesized
ataaatgcttactggtttga

SEQ ID NO: 28459 - DNA, 20 bp, Artificial Sequence
  chemically synthesized
taaatgcttactggtttgaa

SEQ ID NO: 28460 - DNA, 20 bp, Artificial Sequence
  chemically synthesized
tggtttgaagggcaacaaaa

SEQ ID NO: 28461 - DNA, 20 bp, Artificial Sequence
  chemically synthesized
aagggcaacaaaatagtgaa

SEQ ID NO: 28462 - DNA, 20 bp, Artificial Sequence
  chemically synthesized
gggcaacaaaatagtgaaca

SEQ ID NO: 28463 - DNA, 20 bp, Artificial Sequence
  chemically synthesized
acagagtgaaaatccccact

SEQ ID NO: 28464 - DNA, 20 bp, Artificial Sequence
  chemically synthesized
gaaaatccccactaagatcc

SEQ ID NO: 28465 - DNA, 20 bp, Artificial Sequence
  chemically synthesized
aaaatccccactaagatcct

SEQ ID NO: 28466 - DNA, 20 bp, Artificial Sequence
  chemically synthesized
ccccactaagatcctgggtc

SEQ ID NO: 28467 - DNA, 20 bp, Artificial Sequence
  chemically synthesized
taagatcctgggtccagaaa

SEQ ID NO: 28468 - DNA, 20 bp, Artificial Sequence
  chemically synthesized
atcctgggtccagaaaaaga

SEQ ID NO: 28469 - DNA, 20 bp, Artificial Sequence
  chemically synthesized
tcctgggtccagaaaaagat

SEQ ID NO: 28470 - DNA, 20 bp, Artificial Sequence
  chemically synthesized
aaaaagatgggaaacctgtt

SEQ ID NO: 28471 - DNA, 20 bp, Artificial Sequence
  chemically synthesized
aacctgtttagctcacccgt

SEQ ID NO: 28472 - DNA, 20 bp, Artificial Sequence
  chemically synthesized
ttagctcacccgtgagccca

SEQ ID NO: 28473 - DNA, 20 bp, Artificial Sequence
  chemically synthesized
agcccatagttaaaactctt

SEQ ID NO: 28474 - DNA, 20 bp, Artificial Sequence
  chemically synthesized
agttaaaactctttagacaa

SEQ ID NO: 28475 - DNA, 20 bp, Artificial Sequence
  chemically synthesized
gttaaaactctttagacaac

SEQ ID NO: 28476 - DNA, 20 bp, Artificial Sequence
  chemically synthesized
caacaggttgtttccgttta

SEQ ID NO: 28477 - DNA, 20 bp, Artificial Sequence
  chemically synthesized
acaggttgtttccgtttaca

SEQ ID NO: 28478 - DNA, 20 bp, Artificial Sequence
  chemically synthesized
tttacagagaacaataatat

SEQ ID NO: 28479 - DNA, 20 bp, Artificial Sequence
  chemically synthesized
ttacagagaacaataatatt

SEQ ID NO: 28480 - DNA, 20 bp, Artificial Sequence
  chemically synthesized
cagagaacaataatattggg

SEQ ID NO: 28481 - DNA, 20 bp, Artificial Sequence
  chemically synthesized
gaacaataatattgggtggt

SEQ ID NO: 28482 - DNA, 20 bp, Artificial Sequence
  chemically synthesized
ttgggtggtgagcatctgtg

SEQ ID NO: 28483 - DNA, 20 bp, Artificial Sequence
  chemically synthesized
tgggtggtgagcatctgtgt

SEQ ID NO: 28484 - DNA, 20 bp, Artificial Sequence
  chemically synthesized
gggtggtgagcatctgtgtg

SEQ ID NO: 28485 - DNA, 20 bp, Artificial Sequence
  chemically synthesized
ggtggtgagcatctgtgtgg

SEQ ID NO: 28486 - DNA, 20 bp, Artificial Sequence
  chemically synthesized
gtgagcatctgtgtgggggt

SEQ ID NO: 28487 - DNA, 20 bp, Artificial Sequence
  chemically synthesized
tgagcatctgtgtgggggtt

SEQ ID NO: 28488 - DNA, 20 bp, Artificial Sequence
  chemically synthesized
gagcatctgtgtgggggttg

SEQ ID NO: 28489 - DNA, 20 bp, Artificial Sequence
  chemically synthesized
catctgtgtgggggttgggg

SEQ ID NO: 28490 - DNA, 20 bp, Artificial Sequence
  chemically synthesized
atctgtgtgggggttggggt

SEQ ID NO: 28491 - DNA, 20 bp, Artificial Sequence
  chemically synthesized
gtgtgggggttggggtggga

SEQ ID NO: 28492 - DNA, 20 bp, Artificial Sequence
  chemically synthesized
tgtgggggttggggtgggat

SEQ ID NO: 28493 - DNA, 20 bp, Artificial Sequence
  chemically synthesized
gtgggggttggggtgggata

SEQ ID NO: 28494 - DNA, 20 bp, Artificial Sequence
  chemically synthesized
tgggggttggggtgggatag

SEQ ID NO: 28495 - DNA, 20 bp, Artificial Sequence
  chemically synthesized
ttggggtgggataggggata

SEQ ID NO: 28496 - DNA, 20 bp, Artificial Sequence
  chemically synthesized
tggggtgggataggggatac

SEQ ID NO: 28497 - DNA, 20 bp, Artificial Sequence
  chemically synthesized
ggggtgggataggggatacg

SEQ ID NO: 28498 - DNA, 20 bp, Artificial Sequence
  chemically synthesized
ggtgggataggggatacggg

SEQ ID NO: 28499 - DNA, 20 bp, Artificial Sequence
  chemically synthesized
tgggataggggatacgggga

SEQ ID NO: 28500 - DNA, 20 bp, Artificial Sequence
  chemically synthesized
gataggggatacggggagag

SEQ ID NO: 28501 - DNA, 20 bp, Artificial Sequence
  chemically synthesized
taggggatacggggagagtg

SEQ ID NO: 28502 - DNA, 20 bp, Artificial Sequence
  chemically synthesized
atacggggagagtggagaaa

SEQ ID NO: 28503 - DNA, 20 bp, Artificial Sequence
  chemically synthesized
tacggggagagtggagaaaa

SEQ ID NO: 28504 - DNA, 20 bp, Artificial Sequence
  chemically synthesized
acggggagagtggagaaaaa

SEQ ID NO: 28505 - DNA, 20 bp, Artificial Sequence
  chemically synthesized
cggggagagtggagaaaaag

SEQ ID NO: 28506 - DNA, 20 bp, Artificial Sequence
  chemically synthesized
gagtggagaaaaaggggaca

SEQ ID NO: 28507 - DNA, 20 bp, Artificial Sequence
  chemically synthesized
agtggagaaaaaggggacac

SEQ ID NO: 28508 - DNA, 20 bp, Artificial Sequence
  chemically synthesized
gtggagaaaaaggggacaca

SEQ ID NO: 28509 - DNA, 20 bp, Artificial Sequence
  chemically synthesized
ggggacacagggttaatgtg

SEQ ID NO: 28510 - DNA, 20 bp, Artificial Sequence
  chemically synthesized
cacagggttaatgtgaagtc

SEQ ID NO: 28511 - DNA, 20 bp, Artificial Sequence
  chemically synthesized
acagggttaatgtgaagtcc

SEQ ID NO: 28512 - DNA, 20 bp, Artificial Sequence
  chemically synthesized
aggatccccctctacattta

SEQ ID NO: 28513 - DNA, 20 bp, Artificial Sequence
  chemically synthesized
tccccctctacatttaaagt

SEQ ID NO: 28514 - DNA, 20 bp, Artificial Sequence
  chemically synthesized
tctacatttaaagttggttt

SEQ ID NO: 28515 - DNA, 20 bp, Artificial Sequence
  chemically synthesized
catttaaagttggtttaagt

SEQ ID NO: 28516 - DNA, 20 bp, Artificial Sequence
  chemically synthesized
tttaagttggctttaattaa

SEQ ID NO: 28517 - DNA, 20 bp, Artificial Sequence
  chemically synthesized
tttaattaatagcaactctt

SEQ ID NO: 28518 - DNA, 20 bp, Artificial Sequence
  chemically synthesized
atagcaactcttaagataat

SEQ ID NO: 28519 - DNA, 20 bp, Artificial Sequence
  chemically synthesized
tcagaattttcttaaccttt

SEQ ID NO: 28520 - DNA, 20 bp, Artificial Sequence
  chemically synthesized
cttttagccttactgttgaa

SEQ ID NO: 28521 - DNA, 20 bp, Artificial Sequence
  chemically synthesized
tgtacaaatcatttgcttct

SEQ ID NO: 28522 - DNA, 20 bp, Artificial Sequence
  chemically synthesized
caaatcatttgcttcttgga

SEQ ID NO: 28523 - DNA, 20 bp, Artificial Sequence
  chemically synthesized
taatttcttttactaaaatg

SEQ ID NO: 28524 - DNA, 20 bp, Artificial Sequence
  chemically synthesized
aatttcttttactaaaatgt

SEQ ID NO: 28525 - DNA, 20 bp, Artificial Sequence
  chemically synthesized
ctaaaatgtgggcttttgac

SEQ ID NO: 28526 - DNA, 20 bp, Artificial Sequence
  chemically synthesized
gatgaatgtaaatgttcttc

SEQ ID NO: 28527 - DNA, 20 bp, Artificial Sequence
  chemically synthesized
ttattctttatattttctaa

SEQ ID NO: 28528 - DNA, 20 bp, Artificial Sequence
  chemically synthesized
attttctaacagattctgtg

SEQ ID NO: 28529 - DNA, 20 bp, Artificial Sequence
  chemically synthesized
ttctaacagattctgtgtag

SEQ ID NO: 28530 - DNA, 20 bp, Artificial Sequence
  chemically synthesized
tctaacagattctgtgtagt

SEQ ID NO: 28531 - DNA, 20 bp, Artificial Sequence
  chemically synthesized
cagattctgtgtagtgggat

SEQ ID NO: 28532 - DNA, 20 bp, Artificial Sequence
  chemically synthesized
attctgtgtagtgggatgag

SEQ ID NO: 28533 - DNA, 20 bp, Artificial Sequence
  chemically synthesized
tctgtgtagtgggatgagca

SEQ ID NO: 28534 - DNA, 20 bp, Artificial Sequence
  chemically synthesized
agaacaaaaacaaaataatc

SEQ ID NO: 28535 - DNA, 20 bp, Artificial Sequence
  chemically synthesized
caaaaacaaaataatccagt

SEQ ID NO: 28536 - DNA, 20 bp, Artificial Sequence
  chemically synthesized
acaaaataatccagtgagaa

SEQ ID NO: 28537 - DNA, 20 bp, Artificial Sequence
  chemically synthesized
aaagcccgtaaataaacctt

SEQ ID NO: 28538 - DNA, 20 bp, Artificial Sequence
  chemically synthesized
ccgtaaataaaccttcagac

SEQ ID NO: 28539 - DNA, 20 bp, Artificial Sequence
  chemically synthesized
gtaaataaaccttcagacca

SEQ ID NO: 28540 - DNA, 20 bp, Artificial Sequence
  chemically synthesized
cagaccagagatctattctc

SEQ ID NO: 28541 - DNA, 20 bp, Artificial Sequence
  chemically synthesized
tctattctctagcttatttt

SEQ ID NO: 28542 - DNA, 20 bp, Artificial Sequence
  chemically synthesized
tattttaagctcaacttaaa

SEQ ID NO: 28543 - DNA, 20 bp, Artificial Sequence
  chemically synthesized
tttaagctcaacttaaaaag

SEQ ID NO: 28544 - DNA, 20 bp, Artificial Sequence
  chemically synthesized
ttaactccaccctccttcaa

SEQ ID NO: 28545 - DNA, 20 bp, Artificial Sequence
  chemically synthesized
ccaccctccttcaaaagaaa

SEQ ID NO: 28546 - DNA, 20 bp, Artificial Sequence
  chemically synthesized
gtctatatgattgatttgca

SEQ ID NO: 28547 - DNA, 20 bp, Artificial Sequence
  chemically synthesized
attgatttgcacagctcatc

SEQ ID NO: 28548 - DNA, 20 bp, Artificial Sequence
  chemically synthesized
atttgcacagctcatctggc

SEQ ID NO: 28549 - DNA, 20 bp, Artificial Sequence
  chemically synthesized
tgcacagctcatctggccag

SEQ ID NO: 28550 - DNA, 20 bp, Artificial Sequence
  chemically synthesized
cacagctcatctggccagaa

SEQ ID NO: 28551 - DNA, 20 bp, Artificial Sequence
  chemically synthesized
ctcatctggccagaagagct

SEQ ID NO: 28552 - DNA, 20 bp, Artificial Sequence
  chemically synthesized
tgagacatccgttcccctac

SEQ ID NO: 28553 - DNA, 20 bp, Artificial Sequence
  chemically synthesized
gagagtttcttgtaggggaa

SEQ ID NO: 28554 - DNA, 20 bp, Artificial Sequence
  chemically synthesized
ttgtaggggaacggatgtct

SEQ ID NO: 28555 - DNA, 20 bp, Artificial Sequence
  chemically synthesized
aacggatgtctcagctcttc

SEQ ID NO: 28556 - DNA, 20 bp, Artificial Sequence
  chemically synthesized
gatgtctcagctcttctggc

SEQ ID NO: 28557 - DNA, 20 bp, Artificial Sequence
  chemically synthesized
ctcagctcttctggccagat

SEQ ID NO: 28558 - DNA, 20 bp, Artificial Sequence
  chemically synthesized
agctgtgcaaatcaatcata

SEQ ID NO: 28559 - DNA, 20 bp, Artificial Sequence
  chemically synthesized
gtgcaaatcaatcatataga

SEQ ID NO: 28560 - DNA, 20 bp, Artificial Sequence
  chemically synthesized
caatcatatagacagtataa

SEQ ID NO: 28561 - DNA, 20 bp, Artificial Sequence
  chemically synthesized
tcatatagacagtataaaag

SEQ ID NO: 28562 - DNA, 20 bp, Artificial Sequence
  chemically synthesized
catatagacagtataaaagt

SEQ ID NO: 28563 - DNA, 20 bp, Artificial Sequence
  chemically synthesized
aggaaatgctgtttcttttg

SEQ ID NO: 28564 - DNA, 20 bp, Artificial Sequence
  chemically synthesized
ggaaatgctgtttcttttga

SEQ ID NO: 28565 - DNA, 20 bp, Artificial Sequence
  chemically synthesized
aaatgctgtttcttttgaag

SEQ ID NO: 28566 - DNA, 20 bp, Artificial Sequence
  chemically synthesized
aatgctgtttcttttgaagg

SEQ ID NO: 28567 - DNA, 20 bp, Artificial Sequence
  chemically synthesized
atgctgtttcttttgaagga

SEQ ID NO: 28568 - DNA, 20 bp, Artificial Sequence
  chemically synthesized
ctgtttcttttgaaggaggg

SEQ ID NO: 28569 - DNA, 20 bp, Artificial Sequence
  chemically synthesized
gtttcttttgaaggagggtg

SEQ ID NO: 28570 - DNA, 20 bp, Artificial Sequence
  chemically synthesized
gagggtggagttaaatcatt

SEQ ID NO: 28571 - DNA, 20 bp, Artificial Sequence
  chemically synthesized
ttaaatcattaagtgtattg

SEQ ID NO: 28572 - DNA, 20 bp, Artificial Sequence
  chemically synthesized
taaatcattaagtgtattga

SEQ ID NO: 28573 - DNA, 20 bp, Artificial Sequence
  chemically synthesized
ttaagtgtattgaaggcgaa

SEQ ID NO: 28574 - DNA, 20 bp, Artificial Sequence
  chemically synthesized
gtattgaaggcgaaaagaat

SEQ ID NO: 28575 - DNA, 20 bp, Artificial Sequence
  chemically synthesized
attgaaggcgaaaagaatca

SEQ ID NO: 28576 - DNA, 20 bp, Artificial Sequence
  chemically synthesized
aggcgaaaagaatcagagaa

SEQ ID NO: 28577 - DNA, 20 bp, Artificial Sequence
  chemically synthesized
agagaacagttcttcttttt

SEQ ID NO: 28578 - DNA, 20 bp, Artificial Sequence
  chemically synthesized
acagttcttctttttaagtt

SEQ ID NO: 28579 - DNA, 20 bp, Artificial Sequence
  chemically synthesized
ttttaagttgagcttaaaat

SEQ ID NO: 28580 - DNA, 20 bp, Artificial Sequence
  chemically synthesized
aagttgagcttaaaataagc

SEQ ID NO: 28581 - DNA, 20 bp, Artificial Sequence
  chemically synthesized
gttgagcttaaaataagcta

SEQ ID NO: 28582 - DNA, 20 bp, Artificial Sequence
  chemically synthesized
gcttaaaataagctagagaa

SEQ ID NO: 28583 - DNA, 20 bp, Artificial Sequence
  chemically synthesized
taagctagagaatagatctc

SEQ ID NO: 28584 - DNA, 20 bp, Artificial Sequence
  chemically synthesized
gagaatagatctctggtctg

SEQ ID NO: 28585 - DNA, 20 bp, Artificial Sequence
  chemically synthesized
agaatagatctctggtctga

SEQ ID NO: 28586 - DNA, 20 bp, Artificial Sequence
  chemically synthesized
ctggtctgaaggtttattta

SEQ ID NO: 28587 - DNA, 20 bp, Artificial Sequence
  chemically synthesized
tggtctgaaggtttatttac

SEQ ID NO: 28588 - DNA, 20 bp, Artificial Sequence
  chemically synthesized
tatttacgggcttttctcac

SEQ ID NO: 28589 - DNA, 20 bp, Artificial Sequence
  chemically synthesized
tctctgctcatcccactaca

SEQ ID NO: 28590 - DNA, 20 bp, Artificial Sequence
  chemically synthesized
tcccactacacagaatctgt

SEQ ID NO: 28591 - DNA, 20 bp, Artificial Sequence
  chemically synthesized
agaatctgttagaaaatata

SEQ ID NO: 28592 - DNA, 20 bp, Artificial Sequence
  chemically synthesized
gttagaaaatataaagaata

SEQ ID NO: 28593 - DNA, 20 bp, Artificial Sequence
  chemically synthesized
ttagaaaatataaagaataa

SEQ ID NO: 28594 - DNA, 20 bp, Artificial Sequence
  chemically synthesized
atataaagaataaaggatat

SEQ ID NO: 28595 - DNA, 20 bp, Artificial Sequence
  chemically synthesized
ataaagaataaaggatatca

SEQ ID NO: 28596 - DNA, 20 bp, Artificial Sequence
  chemically synthesized
agaataaaggatatcagagc

SEQ ID NO: 28597 - DNA, 20 bp, Artificial Sequence
  chemically synthesized
ataaaggatatcagagctag

SEQ ID NO: 28598 - DNA, 20 bp, Artificial Sequence
  chemically synthesized
gaagaacatttacattcatc

SEQ ID NO: 28599 - DNA, 20 bp, Artificial Sequence
  chemically synthesized
atttacattcatctagtcaa

SEQ ID NO: 28600 - DNA, 20 bp, Artificial Sequence
  chemically synthesized
ctagtcaaaagcccacattt

SEQ ID NO: 28601 - DNA, 20 bp, Artificial Sequence
  chemically synthesized
aaaagcccacattttagtaa

SEQ ID NO: 28602 - DNA, 20 bp, Artificial Sequence
  chemically synthesized
agtaaaagaaattactatcc

SEQ ID NO: 28603 - DNA, 20 bp, Artificial Sequence
  chemically synthesized
aaaagaaattactatccaag

SEQ ID NO: 28604 - DNA, 20 bp, Artificial Sequence
  chemically synthesized
aagaagcaaatgatttgtac

SEQ ID NO: 28605 - DNA, 20 bp, Artificial Sequence
  chemically synthesized
aaatgatttgtacaagatca

SEQ ID NO: 28606 - DNA, 20 bp, Artificial Sequence
  chemically synthesized
aatgatttgtacaagatcac

SEQ ID NO: 28607 - DNA, 20 bp, Artificial Sequence
  chemically synthesized
atgatttgtacaagatcaca

SEQ ID NO: 28608 - DNA, 20 bp, Artificial Sequence
  chemically synthesized
aagatcacagggcttttcaa

SEQ ID NO: 28609 - DNA, 20 bp, Artificial Sequence
  chemically synthesized
tcacagggcttttcaacagt

SEQ ID NO: 28610 - DNA, 20 bp, Artificial Sequence
  chemically synthesized
cacagggcttttcaacagta

SEQ ID NO: 28611 - DNA, 20 bp, Artificial Sequence
  chemically synthesized
cttttcaacagtaaggctaa

SEQ ID NO: 28612 - DNA, 20 bp, Artificial Sequence
  chemically synthesized
ttttcaacagtaaggctaaa

SEQ ID NO: 28613 - DNA, 20 bp, Artificial Sequence
  chemically synthesized
aacagtaaggctaaaaggtt

SEQ ID NO: 28614 - DNA, 20 bp, Artificial Sequence
  chemically synthesized
aagaaaattctgattatctt

SEQ ID NO: 28615 - DNA, 20 bp, Artificial Sequence
  chemically synthesized
gaaaattctgattatcttaa

SEQ ID NO: 28616 - DNA, 20 bp, Artificial Sequence
  chemically synthesized
ttaagagttgctattaatta

SEQ ID NO: 28617 - DNA, 20 bp, Artificial Sequence
  chemically synthesized
acttaaaccaactttaaatg

SEQ ID NO: 28618 - DNA, 20 bp, Artificial Sequence
  chemically synthesized
ttaaaccaactttaaatgta

SEQ ID NO: 28619 - DNA, 20 bp, Artificial Sequence
  chemically synthesized
taaaccaactttaaatgtag

SEQ ID NO: 28620 - DNA, 20 bp, Artificial Sequence
  chemically synthesized
aaaccaactttaaatgtaga

SEQ ID NO: 28621 - DNA, 20 bp, Artificial Sequence
  chemically synthesized
aaccaactttaaatgtagag

SEQ ID NO: 28622 - DNA, 20 bp, Artificial Sequence
  chemically synthesized
accaactttaaatgtagagg

SEQ ID NO: 28623 - DNA, 20 bp, Artificial Sequence
  chemically synthesized
ttaaatgtagagggggatcc

SEQ ID NO: 28624 - DNA, 20 bp, Artificial Sequence
  chemically synthesized
atcccaccccaacccccaca

SEQ ID NO: 28625 - DNA, 20 bp, Artificial Sequence
  chemically synthesized
atattattgttctctgtaaa

SEQ ID NO: 28626 - DNA, 20 bp, Artificial Sequence
  chemically synthesized
cggaaacaacctgttgtcta

SEQ ID NO: 28627 - DNA, 20 bp, Artificial Sequence
  chemically synthesized
gaaacaacctgttgtctaaa

SEQ ID NO: 28628 - DNA, 20 bp, Artificial Sequence
  chemically synthesized
tgtctaaagagttttaacta

SEQ ID NO: 28629 - DNA, 20 bp, Artificial Sequence
  chemically synthesized
gtctaaagagttttaactat

SEQ ID NO: 28630 - DNA, 20 bp, Artificial Sequence
  chemically synthesized
gagttttaactatgggctca

SEQ ID NO: 28631 - DNA, 20 bp, Artificial Sequence
  chemically synthesized
agttttaactatgggctcac

SEQ ID NO: 28632 - DNA, 20 bp, Artificial Sequence
  chemically synthesized
ttaactatgggctcacgggt

SEQ ID NO: 28633 - DNA, 20 bp, Artificial Sequence
  chemically synthesized
gggctcacgggtgagctaaa

SEQ ID NO: 28634 - DNA, 20 bp, Artificial Sequence
  chemically synthesized
ggctcacgggtgagctaaac

SEQ ID NO: 28635 - DNA, 20 bp, Artificial Sequence
  chemically synthesized
acaggtttcccatctttttc

SEQ ID NO: 28636 - DNA, 20 bp, Artificial Sequence
  chemically synthesized
ttcccatctttttctggacc

SEQ ID NO: 28637 - DNA, 20 bp, Artificial Sequence
  chemically synthesized
tcccatctttttctggaccc

SEQ ID NO: 28638 - DNA, 20 bp, Artificial Sequence
  chemically synthesized
tttttctggacccaggatct

SEQ ID NO: 28639 - DNA, 20 bp, Artificial Sequence
  chemically synthesized
ttctggacccaggatcttag

SEQ ID NO: 28640 - DNA, 20 bp, Artificial Sequence
  chemically synthesized
tctggacccaggatcttagt

SEQ ID NO: 28641 - DNA, 20 bp, Artificial Sequence
  chemically synthesized
ctggacccaggatcttagtg

SEQ ID NO: 28642 - DNA, 20 bp, Artificial Sequence
  chemically synthesized
tattttgttgcccttcaaac

SEQ ID NO: 28643 - DNA, 20 bp, Artificial Sequence
  chemically synthesized
ttgttgcccttcaaaccagt

SEQ ID NO: 28644 - DNA, 20 bp, Artificial Sequence
  chemically synthesized
tcaaaccagtaagcatttat

SEQ ID NO: 28645 - DNA, 20 bp, Artificial Sequence
  chemically synthesized
caaaccagtaagcatttatg

SEQ ID NO: 28646 - DNA, 20 bp, Artificial Sequence
  chemically synthesized
tatgaggactcacactatgc

SEQ ID NO: 28647 - DNA, 20 bp, Artificial Sequence
  chemically synthesized
ctcacactatgccagataca

SEQ ID NO: 28648 - DNA, 20 bp, Artificial Sequence
  chemically synthesized
tcacactatgccagatacat

SEQ ID NO: 28649 - DNA, 20 bp, Artificial Sequence
  chemically synthesized
cactatgccagatacatagg

SEQ ID NO: 28650 - DNA, 20 bp, Artificial Sequence
  chemically synthesized
tatgccagatacataggtgg

SEQ ID NO: 28651 - DNA, 20 bp, Artificial Sequence
  chemically synthesized
atgccagatacataggtggc

SEQ ID NO: 28652 - DNA, 20 bp, Artificial Sequence
  chemically synthesized
ggtggcaggattcttcactc

SEQ ID NO: 28653 - DNA, 20 bp, Artificial Sequence
  chemically synthesized
ctccagatataatctatctg

SEQ ID NO: 28654 - DNA, 20 bp, Artificial Sequence
  chemically synthesized
gatagattatatctggagtg

SEQ ID NO: 28655 - DNA, 20 bp, Artificial Sequence
  chemically synthesized
acctatgtatctggcatagt

SEQ ID NO: 28656 - DNA, 20 bp, Artificial Sequence
  chemically synthesized
aagggcaacaaaatagtgaa

SEQ ID NO: 28657 - DNA, 20 bp, Artificial Sequence
  chemically synthesized
tgaaaatccccactaagatc

SEQ ID NO: 28658 - DNA, 20 bp, Artificial Sequence
  chemically synthesized
gtttacagagaacaataata

SEQ ID NO: 28659 - DNA, 20 bp, Artificial Sequence
  chemically synthesized
tgggtggtgagcatctgtgt

SEQ ID NO: 28660 - DNA, 20 bp, Artificial Sequence
  chemically synthesized
gtgagcatctgtgtgggggt

SEQ ID NO: 28661 - DNA, 20 bp, Artificial Sequence
  chemically synthesized
catctgtgtgggggttgggg

SEQ ID NO: 28662 - DNA, 20 bp, Artificial Sequence
  chemically synthesized
gtgggggttggggtgggata

SEQ ID NO: 28663 - DNA, 20 bp, Artificial Sequence
  chemically synthesized
ggtgggataggggatacggg

SEQ ID NO: 28664 - DNA, 20 bp, Artificial Sequence
  chemically synthesized
gagtggagaaaaaggggaca

SEQ ID NO: 28665 - DNA, 20 bp, Artificial Sequence
  chemically synthesized
cacagggttaatgtgaagtc

SEQ ID NO: 28666 - DNA, 20 bp, Artificial Sequence
  chemically synthesized
atagcaactcttaagataat

SEQ ID NO: 28667 - DNA, 20 bp, Artificial Sequence
  chemically synthesized
ttgtacaaatcatttgcttc

SEQ ID NO: 28668 - DNA, 20 bp, Artificial Sequence
  chemically synthesized
aaatgtgggcttttgactag

SEQ ID NO: 28669 - DNA, 20 bp, Artificial Sequence
  chemically synthesized
ttctaacagattctgtgtag

SEQ ID NO: 28670 - DNA, 20 bp, Artificial Sequence
  chemically synthesized
ggagagtttcttgtagggga

SEQ ID NO: 28671 - DNA, 20 bp, Artificial Sequence
  chemically synthesized
aaatgctgtttcttttgaag

SEQ ID NO: 28672 - DNA, 20 bp, Artificial Sequence
  chemically synthesized
ctgtttcttttgaaggaggg

SEQ ID NO: 28673 - DNA, 20 bp, Artificial Sequence
  chemically synthesized
ttaagtgtattgaaggcgaa

SEQ ID NO: 28674 - DNA, 20 bp, Artificial Sequence
  chemically synthesized
gttgagcttaaaataagcta

SEQ ID NO: 28675 - DNA, 20 bp, Artificial Sequence
  chemically synthesized
ttatttacgggcttttctca

SEQ ID NO: 28676 - DNA, 20 bp, Artificial Sequence
  chemically synthesized
tctctgctcatcccactaca

SEQ ID NO: 28677 - DNA, 20 bp, Artificial Sequence
  chemically synthesized
agaatctgttagaaaatata

SEQ ID NO: 28678 - DNA, 20 bp, Artificial Sequence
  chemically synthesized
gttagaaaatataaagaata

SEQ ID NO: 28679 - DNA, 20 bp, Artificial Sequence
  chemically synthesized
aagaaaattctgattatctt

SEQ ID NO: 28680 - DNA, 20 bp, Artificial Sequence
  chemically synthesized
aaccaactttaaatgtagag

SEQ ID NO: 28681 - DNA, 20 bp, Artificial Sequence
  chemically synthesized
cggaaacaacctgttgtcta

SEQ ID NO: 28682 - DNA, 20 bp, Artificial Sequence
  chemically synthesized
agagttttaactatgggctc

SEQ ID NO: 28683 - DNA, 20 bp, Artificial Sequence
  chemically synthesized
ttcccatctttttctggacc

SEQ ID NO: 28684 - DNA, 20 bp, Artificial Sequence
  chemically synthesized
tctggacccaggatcttagt

SEQ ID NO: 28685 - DNA, 20 bp, Artificial Sequence
  chemically synthesized
tatgccagatacataggtgg

SEQ ID NO: 28686 - DNA, 20 bp, Artificial Sequence
  chemically synthesized
agatagattatatctggagt

SEQ ID NO: 28687 - DNA, 20 bp, Artificial Sequence
  chemically synthesized
tccccactaagatcctgggt

SEQ ID NO: 28688 - DNA, 20 bp, Artificial Sequence
  chemically synthesized
ataggggatacggggagagt

SEQ ID NO: 28689 - DNA, 20 bp, Artificial Sequence
  chemically synthesized
aatagcaactcttaagataa

SEQ ID NO: 28690 - DNA, 20 bp, Artificial Sequence
  chemically synthesized
acaaaaacaaaataatccag

SEQ ID NO: 28691 - DNA, 20 bp, Artificial Sequence
  chemically synthesized
tttaactccaccctccttca

SEQ ID NO: 28692 - DNA, 20 bp, Artificial Sequence
  chemically synthesized
ctgagacatccgttccccta

SEQ ID NO: 28693 - DNA, 20 bp, Artificial Sequence
  chemically synthesized
attaagtgtattgaaggcga

SEQ ID NO: 28694 - DNA, 20 bp, Artificial Sequence
  chemically synthesized
agttgagcttaaaataagct

SEQ ID NO: 28695 - DNA, 20 bp, Artificial Sequence
  chemically synthesized
ttctctgctcatcccactac

SEQ ID NO: 28696 - DNA, 20 bp, Artificial Sequence
  chemically synthesized
atcccactacacagaatctg

SEQ ID NO: 28697 - DNA, 20 bp, Artificial Sequence
  chemically synthesized
cagaatctgttagaaaatat

SEQ ID NO: 28698 - DNA, 20 bp, Artificial Sequence
  chemically synthesized
caaaagcccacattttagta

SEQ ID NO: 28699 - DNA, 20 bp, Artificial Sequence
  chemically synthesized
caacagtaaggctaaaaggt

SEQ ID NO: 28700 - DNA, 20 bp, Artificial Sequence
  chemically synthesized
ctcacccgtgagcccatagt

SEQ ID NO: 28701 - DNA, 20 bp, Artificial Sequence
  chemically synthesized
tagtgggatgagcagagaac

SEQ ID NO: 28702 - DNA, 20 bp, Artificial Sequence
  chemically synthesized
ggcatagtgtgagtcctcat

SEQ ID NO: 28703 - DNA, 20 bp, Artificial Sequence
  chemically synthesized
gtgagtcctcataaatgctt

SEQ ID NO: 28704 - DNA, 20 bp, Artificial Sequence
  chemically synthesized
ggtccagaaaaagatgggaa

SEQ ID NO: 28705 - DNA, 20 bp, Artificial Sequence
  chemically synthesized
ttaaaactctttagacaaca

SEQ ID NO: 28706 - DNA, 20 bp, Artificial Sequence
  chemically synthesized
ctctttagacaacaggttgt

SEQ ID NO: 28707 - DNA, 20 bp, Artificial Sequence
  chemically synthesized
gatccccctctacatttaaa

SEQ ID NO: 28708 - DNA, 20 bp, Artificial Sequence
  chemically synthesized
tacatttaaagttggtttaa

SEQ ID NO: 28709 - DNA, 20 bp, Artificial Sequence
  chemically synthesized
cctgtgatcttgtacaaatc

SEQ ID NO: 28710 - DNA, 20 bp, Artificial Sequence
  chemically synthesized
gtaatttcttttactaaaat

SEQ ID NO: 28711 - DNA, 20 bp, Artificial Sequence
  chemically synthesized
ctttattctttatattttct

SEQ ID NO: 28712 - DNA, 20 bp, Artificial Sequence
  chemically synthesized
ttcagaccagagatctattc

SEQ ID NO: 28713 - DNA, 20 bp, Artificial Sequence
  chemically synthesized
acttaaaaagaagaactgtt

SEQ ID NO: 28714 - DNA, 20 bp, Artificial Sequence
  chemically synthesized
cttttcgccttcaatacact

SEQ ID NO: 28715 - DNA, 20 bp, Artificial Sequence
  chemically synthesized
ttcctacttttatactgtct

SEQ ID NO: 28716 - DNA, 20 bp, Artificial Sequence
  chemically synthesized
tacttttatactgtctatat

SEQ ID NO: 28717 - DNA, 20 bp, Artificial Sequence
  chemically synthesized
gacagtataaaagtaggaaa

SEQ ID NO: 28718 - DNA, 20 bp, Artificial Sequence
  chemically synthesized
gaacagttcttctttttaag

SEQ ID NO: 28719 - DNA, 20 bp, Artificial Sequence
  chemically synthesized
agagaatagatctctggtct

SEQ ID NO: 28720 - DNA, 20 bp, Artificial Sequence
  chemically synthesized
tctggtctgaaggtttattt

SEQ ID NO: 28721 - DNA, 20 bp, Artificial Sequence
  chemically synthesized
tttatttacgggcttttctc

SEQ ID NO: 28722 - DNA, 20 bp, Artificial Sequence
  chemically synthesized
gggcttttctcactggatta

SEQ ID NO: 28723 - DNA, 20 bp, Artificial Sequence
  chemically synthesized
gaaattactatccaagaagc

SEQ ID NO: 28724 - DNA, 20 bp, Artificial Sequence
  chemically synthesized
aaatgatttgtacaagatca

SEQ ID NO: 28725 - DNA, 20 bp, Artificial Sequence
  chemically synthesized
aggctaaaaggttaagaaaa

SEQ ID NO: 28726 - DNA, 20 bp, Artificial Sequence
  chemically synthesized
cggaaacaacctgttgtcta

SEQ ID NO: 28727 - DNA, 20 bp, Artificial Sequence
  chemically synthesized
tgggctcacgggtgagctaa

SEQ ID NO: 28728 - DNA, 20 bp, Artificial Sequence
  chemically synthesized
ttctggacccaggatcttag

SEQ ID NO: 28729 - DNA, 20 bp, Artificial Sequence
  chemically synthesized
ctatgccagatacataggtg

SEQ ID NO: 28730 - DNA, 22 bp, Artificial Sequence
  chemically synthesized
cagatagattatatctggagtg

SEQ ID NO: 28731 - DNA, 22 bp, Artificial Sequence
  chemically synthesized
agatagattatatctggagtga

SEQ ID NO: 28732 - DNA, 22 bp, Artificial Sequence
  chemically synthesized
tatctggagtgaagaatcctgc

SEQ ID NO: 28733 - DNA, 22 bp, Artificial Sequence
  chemically synthesized
gagtgaagaatcctgccaccta

SEQ ID NO: 28734 - DNA, 22 bp, Artificial Sequence
  chemically synthesized
ccacctatgtatctggcatagt

SEQ ID NO: 28735 - DNA, 22 bp, Artificial Sequence
  chemically synthesized
tgtatctggcatagtgtgagtc

SEQ ID NO: 28736 - DNA, 22 bp, Artificial Sequence
  chemically synthesized
gcatagtgtgagtcctcataaa

SEQ ID NO: 28737 - DNA, 22 bp, Artificial Sequence
  chemically synthesized
ataaatgcttactggtttgaag

SEQ ID NO: 28738 - DNA, 22 bp, Artificial Sequence
  chemically synthesized
actggtttgaagggcaacaaaa

SEQ ID NO: 28739 - DNA, 22 bp, Artificial Sequence
  chemically synthesized
ctggtttgaagggcaacaaaat

SEQ ID NO: 28740 - DNA, 22 bp, Artificial Sequence
  chemically synthesized
gtttgaagggcaacaaaatagt

SEQ ID NO: 28741 - DNA, 22 bp, Artificial Sequence
  chemically synthesized
gaagggcaacaaaatagtgaac

SEQ ID NO: 28742 - DNA, 22 bp, Artificial Sequence
  chemically synthesized
aagggcaacaaaatagtgaaca

SEQ ID NO: 28743 - DNA, 22 bp, Artificial Sequence
  chemically synthesized
agatcctgggtccagaaaaaga

SEQ ID NO: 28744 - DNA, 22 bp, Artificial Sequence
  chemically synthesized
ggtccagaaaaagatgggaaac

SEQ ID NO: 28745 - DNA, 22 bp, Artificial Sequence
  chemically synthesized
tttagctcacccgtgagcccat

SEQ ID NO: 28746 - DNA, 22 bp, Artificial Sequence
  chemically synthesized
agctcacccgtgagcccatagt

SEQ ID NO: 28747 - DNA, 22 bp, Artificial Sequence
  chemically synthesized
gctcacccgtgagcccatagtt

SEQ ID NO: 28748 - DNA, 22 bp, Artificial Sequence
  chemically synthesized
acccgtgagcccatagttaaaa

SEQ ID NO: 28749 - DNA, 22 bp, Artificial Sequence
  chemically synthesized
aaactctttagacaacaggttg

SEQ ID NO: 28750 - DNA, 22 bp, Artificial Sequence
  chemically synthesized
tttagacaacaggttgtttccg

SEQ ID NO: 28751 - DNA, 22 bp, Artificial Sequence
  chemically synthesized
tagacaacaggttgtttccgtt

SEQ ID NO: 28752 - DNA, 22 bp, Artificial Sequence
  chemically synthesized
agacaacaggttgtttccgttt

SEQ ID NO: 28753 - DNA, 22 bp, Artificial Sequence
  chemically synthesized
gacaacaggttgtttccgttta

SEQ ID NO: 28754 - DNA, 22 bp, Artificial Sequence
  chemically synthesized
tttccgtttacagagaacaata

SEQ ID NO: 28755 - DNA, 22 bp, Artificial Sequence
  chemically synthesized
ccgtttacagagaacaataata

SEQ ID NO: 28756 - DNA, 22 bp, Artificial Sequence
  chemically synthesized
cgtttacagagaacaataatat

SEQ ID NO: 28757 - DNA, 22 bp, Artificial Sequence
  chemically synthesized
acagagaacaataatattgggt

SEQ ID NO: 28758 - DNA, 22 bp, Artificial Sequence
  chemically synthesized
cagagaacaataatattgggtg

SEQ ID NO: 28759 - DNA, 22 bp, Artificial Sequence
  chemically synthesized
ggtggtgagcatctgtgtgggg

SEQ ID NO: 28760 - DNA, 22 bp, Artificial Sequence
  chemically synthesized
tgtgggggttggggtgggatag

SEQ ID NO: 28761 - DNA, 22 bp, Artificial Sequence
  chemically synthesized
gggtgggataggggatacgggg

SEQ ID NO: 28762 - DNA, 22 bp, Artificial Sequence
  chemically synthesized
atgtgaagtccaggatccccct

SEQ ID NO: 28763 - DNA, 22 bp, Artificial Sequence
  chemically synthesized
tacatttaaagttggtttaagt

SEQ ID NO: 28764 - DNA, 22 bp, Artificial Sequence
  chemically synthesized
catttaaagttggtttaagttg

SEQ ID NO: 28765 - DNA, 22 bp, Artificial Sequence
  chemically synthesized
aaagttggtttaagttggcttt

SEQ ID NO: 28766 - DNA, 22 bp, Artificial Sequence
  chemically synthesized
aagttggtttaagttggcttta

SEQ ID NO: 28767 - DNA, 22 bp, Artificial Sequence
  chemically synthesized
gtttaagttggctttaattaat

SEQ ID NO: 28768 - DNA, 22 bp, Artificial Sequence
  chemically synthesized
aagttggctttaattaatagca

SEQ ID NO: 28769 - DNA, 22 bp, Artificial Sequence
  chemically synthesized
agttggctttaattaatagcaa

SEQ ID NO: 28770 - DNA, 22 bp, Artificial Sequence
  chemically synthesized
gctttaattaatagcaactctt

SEQ ID NO: 28771 - DNA, 22 bp, Artificial Sequence
  chemically synthesized
taattaatagcaactcttaaga

SEQ ID NO: 28772 - DNA, 22 bp, Artificial Sequence
  chemically synthesized
aattaatagcaactcttaagat

SEQ ID NO: 28773 - DNA, 22 bp, Artificial Sequence
  chemically synthesized
attaatagcaactcttaagata

SEQ ID NO: 28774 - DNA, 22 bp, Artificial Sequence
  chemically synthesized
atagcaactcttaagataatca

SEQ ID NO: 28775 - DNA, 22 bp, Artificial Sequence
  chemically synthesized
ttaagataatcagaattttctt

SEQ ID NO: 28776 - DNA, 22 bp, Artificial Sequence
  chemically synthesized
aagataatcagaattttcttaa

SEQ ID NO: 28777 - DNA, 22 bp, Artificial Sequence
  chemically synthesized
agataatcagaattttcttaac

SEQ ID NO: 28778 - DNA, 22 bp, Artificial Sequence
  chemically synthesized
tcttaaccttttagccttactg

SEQ ID NO: 28779 - DNA, 22 bp, Artificial Sequence
  chemically synthesized
cttaaccttttagccttactgt

SEQ ID NO: 28780 - DNA, 22 bp, Artificial Sequence
  chemically synthesized
ttaaccttttagccttactgtt

SEQ ID NO: 28781 - DNA, 22 bp, Artificial Sequence
  chemically synthesized
aaccttttagccttactgttga

SEQ ID NO: 28782 - DNA, 22 bp, Artificial Sequence
  chemically synthesized
accttttagccttactgttgaa

SEQ ID NO: 28783 - DNA, 22 bp, Artificial Sequence
  chemically synthesized
ttagccttactgttgaaaagcc

SEQ ID NO: 28784 - DNA, 22 bp, Artificial Sequence
  chemically synthesized
tagccttactgttgaaaagccc

SEQ ID NO: 28785 - DNA, 22 bp, Artificial Sequence
  chemically synthesized
agccttactgttgaaaagccct

SEQ ID NO: 28786 - DNA, 22 bp, Artificial Sequence
  chemically synthesized
gccttactgttgaaaagccctg

SEQ ID NO: 28787 - DNA, 22 bp, Artificial Sequence
  chemically synthesized
actgttgaaaagccctgtgatc

SEQ ID NO: 28788 - DNA, 22 bp, Artificial Sequence
  chemically synthesized
ctgttgaaaagccctgtgatct

SEQ ID NO: 28789 - DNA, 22 bp, Artificial Sequence
  chemically synthesized
ttgaaaagccctgtgatcttgt

SEQ ID NO: 28790 - DNA, 22 bp, Artificial Sequence
  chemically synthesized
aaaagccctgtgatcttgtaca

SEQ ID NO: 28791 - DNA, 22 bp, Artificial Sequence
  chemically synthesized
tgatcttgtacaaatcatttgc

SEQ ID NO: 28792 - DNA, 22 bp, Artificial Sequence
  chemically synthesized
gtacaaatcatttgcttcttgg

SEQ ID NO: 28793 - DNA, 22 bp, Artificial Sequence
  chemically synthesized
tacaaatcatttgcttcttgga

SEQ ID NO: 28794 - DNA, 22 bp, Artificial Sequence
  chemically synthesized
gcttcttggatagtaatttctt

SEQ ID NO: 28795 - DNA, 22 bp, Artificial Sequence
  chemically synthesized
cttcttggatagtaatttcttt

SEQ ID NO: 28796 - DNA, 22 bp, Artificial Sequence
  chemically synthesized
cttggatagtaatttcttttac

SEQ ID NO: 28797 - DNA, 22 bp, Artificial Sequence
  chemically synthesized
ttggatagtaatttcttttact

SEQ ID NO: 28798 - DNA, 22 bp, Artificial Sequence
  chemically synthesized
ggatagtaatttcttttactaa

SEQ ID NO: 28799 - DNA, 22 bp, Artificial Sequence
  chemically synthesized
gatagtaatttcttttactaaa

SEQ ID NO: 28800 - DNA, 22 bp, Artificial Sequence
  chemically synthesized
cttttactaaaatgtgggcttt

SEQ ID NO: 28801 - DNA, 22 bp, Artificial Sequence
  chemically synthesized
ttttactaaaatgtgggctttt

SEQ ID NO: 28802 - DNA, 22 bp, Artificial Sequence
  chemically synthesized
ttactaaaatgtgggcttttga

SEQ ID NO: 28803 - DNA, 22 bp, Artificial Sequence
  chemically synthesized
tactaaaatgtgggcttttgac

SEQ ID NO: 28804 - DNA, 22 bp, Artificial Sequence
  chemically synthesized
actaaaatgtgggcttttgact

SEQ ID NO: 28805 - DNA, 22 bp, Artificial Sequence
  chemically synthesized
ctaaaatgtgggcttttgacta

SEQ ID NO: 28806 - DNA, 22 bp, Artificial Sequence
  chemically synthesized
aaatgtgggcttttgactagat

SEQ ID NO: 28807 - DNA, 22 bp, Artificial Sequence
  chemically synthesized
ttgactagatgaatgtaaatgt

SEQ ID NO: 28808 - DNA, 22 bp, Artificial Sequence
  chemically synthesized
tgactagatgaatgtaaatgtt

SEQ ID NO: 28809 - DNA, 22 bp, Artificial Sequence
  chemically synthesized
gactagatgaatgtaaatgttc

SEQ ID NO: 28810 - DNA, 22 bp, Artificial Sequence
  chemically synthesized
actagatgaatgtaaatgttct

SEQ ID NO: 28811 - DNA, 22 bp, Artificial Sequence
  chemically synthesized
gatgaatgtaaatgttcttcta

SEQ ID NO: 28812 - DNA, 22 bp, Artificial Sequence
  chemically synthesized
ttctagctctgatatcctttat

SEQ ID NO: 28813 - DNA, 22 bp, Artificial Sequence
  chemically synthesized
ctagctctgatatcctttattc

SEQ ID NO: 28814 - DNA, 22 bp, Artificial Sequence
  chemically synthesized
tagctctgatatcctttattct

SEQ ID NO: 28815 - DNA, 22 bp, Artificial Sequence
  chemically synthesized
gctctgatatcctttattcttt

SEQ ID NO: 28816 - DNA, 22 bp, Artificial Sequence
  chemically synthesized
tgatatcctttattctttatat

SEQ ID NO: 28817 - DNA, 22 bp, Artificial Sequence
  chemically synthesized
atatcctttattctttatattt

SEQ ID NO: 28818 - DNA, 22 bp, Artificial Sequence
  chemically synthesized
tattctttatattttctaacag

SEQ ID NO: 28819 - DNA, 22 bp, Artificial Sequence
  chemically synthesized
attctttatattttctaacaga

SEQ ID NO: 28820 - DNA, 22 bp, Artificial Sequence
  chemically synthesized
ttctttatattttctaacagat

SEQ ID NO: 28821 - DNA, 22 bp, Artificial Sequence
  chemically synthesized
tttatattttctaacagattct

SEQ ID NO: 28822 - DNA, 22 bp, Artificial Sequence
  chemically synthesized
tatattttctaacagattctgt

SEQ ID NO: 28823 - DNA, 22 bp, Artificial Sequence
  chemically synthesized
atattttctaacagattctgtg

SEQ ID NO: 28824 - DNA, 22 bp, Artificial Sequence
  chemically synthesized
tattttctaacagattctgtgt

SEQ ID NO: 28825 - DNA, 22 bp, Artificial Sequence
  chemically synthesized
tctaacagattctgtgtagtgg

SEQ ID NO: 28826 - DNA, 22 bp, Artificial Sequence
  chemically synthesized
ctaacagattctgtgtagtggg

SEQ ID NO: 28827 - DNA, 22 bp, Artificial Sequence
  chemically synthesized
taacagattctgtgtagtggga

SEQ ID NO: 28828 - DNA, 22 bp, Artificial Sequence
  chemically synthesized
acagattctgtgtagtgggatg

SEQ ID NO: 28829 - DNA, 22 bp, Artificial Sequence
  chemically synthesized
tgtgtagtgggatgagcagaga

SEQ ID NO: 28830 - DNA, 22 bp, Artificial Sequence
  chemically synthesized
tgtagtgggatgagcagagaac

SEQ ID NO: 28831 - DNA, 22 bp, Artificial Sequence
  chemically synthesized
cagaccagagatctattctcta

SEQ ID NO: 28832 - DNA, 22 bp, Artificial Sequence
  chemically synthesized
agaccagagatctattctctag

SEQ ID NO: 28833 - DNA, 22 bp, Artificial Sequence
  chemically synthesized
ttctctagcttattttaagctc

SEQ ID NO: 28834 - DNA, 22 bp, Artificial Sequence
  chemically synthesized
tctagcttattttaagctcaac

SEQ ID NO: 28835 - DNA, 22 bp, Artificial Sequence
  chemically synthesized
tagcttattttaagctcaactt

SEQ ID NO: 28836 - DNA, 22 bp, Artificial Sequence
  chemically synthesized
gcttattttaagctcaacttaa

SEQ ID NO: 28837 - DNA, 22 bp, Artificial Sequence
  chemically synthesized
attttaagctcaacttaaaaag

SEQ ID NO: 28838 - DNA, 22 bp, Artificial Sequence
  chemically synthesized
ttttaagctcaacttaaaaaga

SEQ ID NO: 28839 - DNA, 22 bp, Artificial Sequence
  chemically synthesized
taagctcaacttaaaaagaaga

SEQ ID NO: 28840 - DNA, 22 bp, Artificial Sequence
  chemically synthesized
aagctcaacttaaaaagaagaa

SEQ ID NO: 28841 - DNA, 22 bp, Artificial Sequence
  chemically synthesized
agctcaacttaaaaagaagaac

SEQ ID NO: 28842 - DNA, 22 bp, Artificial Sequence
  chemically synthesized
aacttaaaaagaagaactgttc

SEQ ID NO: 28843 - DNA, 22 bp, Artificial Sequence
  chemically synthesized
aaaaagaagaactgttctctga

SEQ ID NO: 28844 - DNA, 22 bp, Artificial Sequence
  chemically synthesized
aaaagaagaactgttctctgat

SEQ ID NO: 28845 - DNA, 22 bp, Artificial Sequence
  chemically synthesized
ttctctgattcttttcgccttc

SEQ ID NO: 28846 - DNA, 22 bp, Artificial Sequence
  chemically synthesized
tctgattcttttcgccttcaat

SEQ ID NO: 28847 - DNA, 22 bp, Artificial Sequence
  chemically synthesized
tgattcttttcgccttcaatac

SEQ ID NO: 28848 - DNA, 22 bp, Artificial Sequence
  chemically synthesized
attcttttcgccttcaatacac

SEQ ID NO: 28849 - DNA, 22 bp, Artificial Sequence
  chemically synthesized
ttttcgccttcaatacacttaa

SEQ ID NO: 28850 - DNA, 22 bp, Artificial Sequence
  chemically synthesized
ttcgccttcaatacacttaatg

SEQ ID NO: 28851 - DNA, 22 bp, Artificial Sequence
  chemically synthesized
tcgccttcaatacacttaatga

SEQ ID NO: 28852 - DNA, 22 bp, Artificial Sequence
  chemically synthesized
cgccttcaatacacttaatgat

SEQ ID NO: 28853 - DNA, 22 bp, Artificial Sequence
  chemically synthesized
gccttcaatacacttaatgatt

SEQ ID NO: 28854 - DNA, 22 bp, Artificial Sequence
  chemically synthesized
caatacacttaatgatttaact

SEQ ID NO: 28855 - DNA, 22 bp, Artificial Sequence
  chemically synthesized
aatacacttaatgatttaactc

SEQ ID NO: 28856 - DNA, 22 bp, Artificial Sequence
  chemically synthesized
aatgatttaactccaccctcct

SEQ ID NO: 28857 - DNA, 22 bp, Artificial Sequence
  chemically synthesized
atgatttaactccaccctcctt

SEQ ID NO: 28858 - DNA, 22 bp, Artificial Sequence
  chemically synthesized
aactccaccctccttcaaaaga

SEQ ID NO: 28859 - DNA, 22 bp, Artificial Sequence
  chemically synthesized
actccaccctccttcaaaagaa

SEQ ID NO: 28860 - DNA, 22 bp, Artificial Sequence
  chemically synthesized
caccctccttcaaaagaaacag

SEQ ID NO: 28861 - DNA, 22 bp, Artificial Sequence
  chemically synthesized
cttcaaaagaaacagcatttcc

SEQ ID NO: 28862 - DNA, 22 bp, Artificial Sequence
  chemically synthesized
caaaagaaacagcatttcctac

SEQ ID NO: 28863 - DNA, 22 bp, Artificial Sequence
  chemically synthesized
aaaagaaacagcatttcctact

SEQ ID NO: 28864 - DNA, 22 bp, Artificial Sequence
  chemically synthesized
cctacttttatactgtctatat

SEQ ID NO: 28865 - DNA, 22 bp, Artificial Sequence
  chemically synthesized
ctacttttatactgtctatatg

SEQ ID NO: 28866 - DNA, 22 bp, Artificial Sequence
  chemically synthesized
cttttatactgtctatatgatt

SEQ ID NO: 28867 - DNA, 22 bp, Artificial Sequence
  chemically synthesized
ttatactgtctatatgattgat

SEQ ID NO: 28868 - DNA, 22 bp, Artificial Sequence
  chemically synthesized
tatactgtctatatgattgatt

SEQ ID NO: 28869 - DNA, 22 bp, Artificial Sequence
  chemically synthesized
atactgtctatatgattgattt

SEQ ID NO: 28870 - DNA, 22 bp, Artificial Sequence
  chemically synthesized
tactgtctatatgattgatttg

SEQ ID NO: 28871 - DNA, 22 bp, Artificial Sequence
  chemically synthesized
tctatatgattgatttgcacag

SEQ ID NO: 28872 - DNA, 22 bp, Artificial Sequence
  chemically synthesized
tatgattgatttgcacagctca

SEQ ID NO: 28873 - DNA, 22 bp, Artificial Sequence
  chemically synthesized
atttgcacagctcatctggcca

SEQ ID NO: 28874 - DNA, 22 bp, Artificial Sequence
  chemically synthesized
gcacagctcatctggccagaag

SEQ ID NO: 28875 - DNA, 22 bp, Artificial Sequence
  chemically synthesized
cacagctcatctggccagaaga

SEQ ID NO: 28876 - DNA, 22 bp, Artificial Sequence
  chemically synthesized
atctggccagaagagctgagac

SEQ ID NO: 28877 - DNA, 22 bp, Artificial Sequence
  chemically synthesized
gccagaagagctgagacatccg

SEQ ID NO: 28878 - DNA, 22 bp, Artificial Sequence
  chemically synthesized
agacatccgttcccctacaaga

SEQ ID NO: 28879 - DNA, 22 bp, Artificial Sequence
  chemically synthesized
cttgtaggggaacggatgtctc

SEQ ID NO: 28880 - DNA, 22 bp, Artificial Sequence
  chemically synthesized
ttgtaggggaacggatgtctca

SEQ ID NO: 28881 - DNA, 22 bp, Artificial Sequence
  chemically synthesized
gtaggggaacggatgtctcagc

SEQ ID NO: 28882 - DNA, 22 bp, Artificial Sequence
  chemically synthesized
taggggaacggatgtctcagct

SEQ ID NO: 28883 - DNA, 22 bp, Artificial Sequence
  chemically synthesized
agctcttctggccagatgagct

SEQ ID NO: 28884 - DNA, 22 bp, Artificial Sequence
  chemically synthesized
ttctggccagatgagctgtgca

SEQ ID NO: 28885 - DNA, 22 bp, Artificial Sequence
  chemically synthesized
ctggccagatgagctgtgcaaa

SEQ ID NO: 28886 - DNA, 22 bp, Artificial Sequence
  chemically synthesized
tggccagatgagctgtgcaaat

SEQ ID NO: 28887 - DNA, 22 bp, Artificial Sequence
  chemically synthesized
gccagatgagctgtgcaaatca

SEQ ID NO: 28888 - DNA, 22 bp, Artificial Sequence
  chemically synthesized
tgcaaatcaatcatatagacag

SEQ ID NO: 28889 - DNA, 22 bp, Artificial Sequence
  chemically synthesized
tttcttttgaaggagggtggag

SEQ ID NO: 28890 - DNA, 22 bp, Artificial Sequence
  chemically synthesized
cttttgaaggagggtggagtta

SEQ ID NO: 28891 - DNA, 22 bp, Artificial Sequence
  chemically synthesized
ttttgaaggagggtggagttaa

SEQ ID NO: 28892 - DNA, 22 bp, Artificial Sequence
  chemically synthesized
ttgaaggagggtggagttaaat

SEQ ID NO: 28893 - DNA, 22 bp, Artificial Sequence
  chemically synthesized
tgaaggagggtggagttaaatc

SEQ ID NO: 28894 - DNA, 22 bp, Artificial Sequence
  chemically synthesized
gaaggagggtggagttaaatca

SEQ ID NO: 28895 - DNA, 22 bp, Artificial Sequence
  chemically synthesized
aaggagggtggagttaaatcat

SEQ ID NO: 28896 - DNA, 22 bp, Artificial Sequence
  chemically synthesized
aatcattaagtgtattgaaggc

SEQ ID NO: 28897 - DNA, 22 bp, Artificial Sequence
  chemically synthesized
agtgtattgaaggcgaaaagaa

SEQ ID NO: 28898 - DNA, 22 bp, Artificial Sequence
  chemically synthesized
aaggcgaaaagaatcagagaac

SEQ ID NO: 28899 - DNA, 22 bp, Artificial Sequence
  chemically synthesized
ttctttttaagttgagcttaaa

SEQ ID NO: 28900 - DNA, 22 bp, Artificial Sequence
  chemically synthesized
ctttttaagttgagcttaaaat

SEQ ID NO: 28901 - DNA, 22 bp, Artificial Sequence
  chemically synthesized
tttttaagttgagcttaaaata

SEQ ID NO: 28902 - DNA, 22 bp, Artificial Sequence
  chemically synthesized
tttaagttgagcttaaaataag

SEQ ID NO: 28903 - DNA, 22 bp, Artificial Sequence
  chemically synthesized
ttaagttgagcttaaaataagc

SEQ ID NO: 28904 - DNA, 22 bp, Artificial Sequence
  chemically synthesized
taagttgagcttaaaataagct

SEQ ID NO: 28905 - DNA, 22 bp, Artificial Sequence
  chemically synthesized
aagttgagcttaaaataagcta

SEQ ID NO: 28906 - DNA, 22 bp, Artificial Sequence
  chemically synthesized
agttgagcttaaaataagctag

SEQ ID NO: 28907 - DNA, 22 bp, Artificial Sequence
  chemically synthesized
agcttaaaataagctagagaat

SEQ ID NO: 28908 - DNA, 22 bp, Artificial Sequence
  chemically synthesized
aaaataagctagagaatagatc

SEQ ID NO: 28909 - DNA, 22 bp, Artificial Sequence
  chemically synthesized
aaataagctagagaatagatct

SEQ ID NO: 28910 - DNA, 22 bp, Artificial Sequence
  chemically synthesized
gagaatagatctctggtctgaa

SEQ ID NO: 28911 - DNA, 22 bp, Artificial Sequence
  chemically synthesized
tggtctgaaggtttatttacgg

SEQ ID NO: 28912 - DNA, 22 bp, Artificial Sequence
  chemically synthesized
gtctgaaggtttatttacgggc

SEQ ID NO: 28913 - DNA, 22 bp, Artificial Sequence
  chemically synthesized
aaggtttatttacgggcttttc

SEQ ID NO: 28914 - DNA, 22 bp, Artificial Sequence
  chemically synthesized
atttacgggcttttctcactgg

SEQ ID NO: 28915 - DNA, 22 bp, Artificial Sequence
  chemically synthesized
tttacgggcttttctcactgga

SEQ ID NO: 28916 - DNA, 22 bp, Artificial Sequence
  chemically synthesized
acgggcttttctcactggatta

SEQ ID NO: 28917 - DNA, 22 bp, Artificial Sequence
  chemically synthesized
cgggcttttctcactggattat

SEQ ID NO: 28918 - DNA, 22 bp, Artificial Sequence
  chemically synthesized
ttctcactggattattttgttt

SEQ ID NO: 28919 - DNA, 22 bp, Artificial Sequence
  chemically synthesized
tctcactggattattttgtttt

SEQ ID NO: 28920 - DNA, 22 bp, Artificial Sequence
  chemically synthesized
ctcactggattattttgttttt

SEQ ID NO: 28921 - DNA, 22 bp, Artificial Sequence
  chemically synthesized
tcactggattattttgtttttg

SEQ ID NO: 28922 - DNA, 22 bp, Artificial Sequence
  chemically synthesized
actggattattttgtttttgtt

SEQ ID NO: 28923 - DNA, 22 bp, Artificial Sequence
  chemically synthesized
gattattttgtttttgttctct

SEQ ID NO: 28924 - DNA, 22 bp, Artificial Sequence
  chemically synthesized
ttttgtttttgttctctgctca

SEQ ID NO: 28925 - DNA, 22 bp, Artificial Sequence
  chemically synthesized
tgtttttgttctctgctcatcc

SEQ ID NO: 28926 - DNA, 22 bp, Artificial Sequence
  chemically synthesized
gtttttgttctctgctcatccc

SEQ ID NO: 28927 - DNA, 22 bp, Artificial Sequence
  chemically synthesized
tttttgttctctgctcatccca

SEQ ID NO: 28928 - DNA, 22 bp, Artificial Sequence
  chemically synthesized
ttgttctctgctcatcccacta

SEQ ID NO: 28929 - DNA, 22 bp, Artificial Sequence
  chemically synthesized
tgttctctgctcatcccactac

SEQ ID NO: 28930 - DNA, 22 bp, Artificial Sequence
  chemically synthesized
gttctctgctcatcccactaca

SEQ ID NO: 28931 - DNA, 22 bp, Artificial Sequence
  chemically synthesized
ttctctgctcatcccactacac

SEQ ID NO: 28932 - DNA, 22 bp, Artificial Sequence
  chemically synthesized
tctgctcatcccactacacaga

SEQ ID NO: 28933 - DNA, 22 bp, Artificial Sequence
  chemically synthesized
tgctcatcccactacacagaat

SEQ ID NO: 28934 - DNA, 22 bp, Artificial Sequence
  chemically synthesized
ctcatcccactacacagaatct

SEQ ID NO: 28935 - DNA, 22 bp, Artificial Sequence
  chemically synthesized
atcccactacacagaatctgtt

SEQ ID NO: 28936 - DNA, 22 bp, Artificial Sequence
  chemically synthesized
cacagaatctgttagaaaatat

SEQ ID NO: 28937 - DNA, 22 bp, Artificial Sequence
  chemically synthesized
ttagaaaatataaagaataaag

SEQ ID NO: 28938 - DNA, 22 bp, Artificial Sequence
  chemically synthesized
gaaaatataaagaataaaggat

SEQ ID NO: 28939 - DNA, 22 bp, Artificial Sequence
  chemically synthesized
gaagaacatttacattcatcta

SEQ ID NO: 28940 - DNA, 22 bp, Artificial Sequence
  chemically synthesized
acattcatctagtcaaaagccc

SEQ ID NO: 28941 - DNA, 22 bp, Artificial Sequence
  chemically synthesized
cattcatctagtcaaaagccca

SEQ ID NO: 28942 - DNA, 22 bp, Artificial Sequence
  chemically synthesized
atctagtcaaaagcccacattt

SEQ ID NO: 28943 - DNA, 22 bp, Artificial Sequence
  chemically synthesized
gtcaaaagcccacattttagta

SEQ ID NO: 28944 - DNA, 22 bp, Artificial Sequence
  chemically synthesized
tagtaaaagaaattactatcca

SEQ ID NO: 28945 - DNA, 22 bp, Artificial Sequence
  chemically synthesized
agtaaaagaaattactatccaa

SEQ ID NO: 28946 - DNA, 22 bp, Artificial Sequence
  chemically synthesized
gtaaaagaaattactatccaag

SEQ ID NO: 28947 - DNA, 22 bp, Artificial Sequence
  chemically synthesized
ctatccaagaagcaaatgattt

SEQ ID NO: 28948 - DNA, 22 bp, Artificial Sequence
  chemically synthesized
tccaagaagcaaatgatttgta

SEQ ID NO: 28949 - DNA, 22 bp, Artificial Sequence
  chemically synthesized
gtacaagatcacagggcttttc

SEQ ID NO: 28950 - DNA, 22 bp, Artificial Sequence
  chemically synthesized
tacaagatcacagggcttttca

SEQ ID NO: 28951 - DNA, 22 bp, Artificial Sequence
  chemically synthesized
ttcaacagtaaggctaaaaggt

SEQ ID NO: 28952 - DNA, 22 bp, Artificial Sequence
  chemically synthesized
tcaacagtaaggctaaaaggtt

SEQ ID NO: 28953 - DNA, 22 bp, Artificial Sequence
  chemically synthesized
caacagtaaggctaaaaggtta

SEQ ID NO: 28954 - DNA, 22 bp, Artificial Sequence
  chemically synthesized
aacagtaaggctaaaaggttaa

SEQ ID NO: 28955 - DNA, 22 bp, Artificial Sequence
  chemically synthesized
aaaggttaagaaaattctgatt

SEQ ID NO: 28956 - DNA, 22 bp, Artificial Sequence
  chemically synthesized
agaaaattctgattatcttaag

SEQ ID NO: 28957 - DNA, 22 bp, Artificial Sequence
  chemically synthesized
tgattatcttaagagttgctat

SEQ ID NO: 28958 - DNA, 22 bp, Artificial Sequence
  chemically synthesized
attatcttaagagttgctatta

SEQ ID NO: 28959 - DNA, 22 bp, Artificial Sequence
  chemically synthesized
tcttaagagttgctattaatta

SEQ ID NO: 28960 - DNA, 22 bp, Artificial Sequence
  chemically synthesized
aagagttgctattaattaaagc

SEQ ID NO: 28961 - DNA, 22 bp, Artificial Sequence
  chemically synthesized
agagttgctattaattaaagcc

SEQ ID NO: 28962 - DNA, 22 bp, Artificial Sequence
  chemically synthesized
ctattaattaaagccaacttaa

SEQ ID NO: 28963 - DNA, 22 bp, Artificial Sequence
  chemically synthesized
ttaattaaagccaacttaaacc

SEQ ID NO: 28964 - DNA, 22 bp, Artificial Sequence
  chemically synthesized
attaaagccaacttaaaccaac

SEQ ID NO: 28965 - DNA, 22 bp, Artificial Sequence
  chemically synthesized
aagccaacttaaaccaacttta

SEQ ID NO: 28966 - DNA, 22 bp, Artificial Sequence
  chemically synthesized
aaaccaactttaaatgtagagg

SEQ ID NO: 28967 - DNA, 22 bp, Artificial Sequence
  chemically synthesized
aaccaactttaaatgtagaggg

SEQ ID NO: 28968 - DNA, 22 bp, Artificial Sequence
  chemically synthesized
taaatgtagagggggatcctgg

SEQ ID NO: 28969 - DNA, 22 bp, Artificial Sequence
  chemically synthesized
aaatgtagagggggatcctgga

SEQ ID NO: 28970 - DNA, 22 bp, Artificial Sequence
  chemically synthesized
aatgtagagggggatcctggac

SEQ ID NO: 28971 - DNA, 22 bp, Artificial Sequence
  chemically synthesized
gacttcacattaaccctgtgtc

SEQ ID NO: 28972 - DNA, 22 bp, Artificial Sequence
  chemically synthesized
cacattaaccctgtgtcccctt

SEQ ID NO: 28973 - DNA, 22 bp, Artificial Sequence
  chemically synthesized
acattaaccctgtgtccccttt

SEQ ID NO: 28974 - DNA, 22 bp, Artificial Sequence
  chemically synthesized
accctgtgtcccctttttctcc

SEQ ID NO: 28975 - DNA, 22 bp, Artificial Sequence
  chemically synthesized
tgtcccctttttctccactctc

SEQ ID NO: 28976 - DNA, 22 bp, Artificial Sequence
  chemically synthesized
tttctccactctccccgtatcc

SEQ ID NO: 28977 - DNA, 22 bp, Artificial Sequence
  chemically synthesized
ttctccactctccccgtatccc

SEQ ID NO: 28978 - DNA, 22 bp, Artificial Sequence
  chemically synthesized
tctccactctccccgtatcccc

SEQ ID NO: 28979 - DNA, 22 bp, Artificial Sequence
  chemically synthesized
ctccactctccccgtatcccct

SEQ ID NO: 28980 - DNA, 22 bp, Artificial Sequence
  chemically synthesized
tccactctccccgtatccccta

SEQ ID NO: 28981 - DNA, 22 bp, Artificial Sequence
  chemically synthesized
cactctccccgtatcccctatc

SEQ ID NO: 28982 - DNA, 22 bp, Artificial Sequence
  chemically synthesized
tccccgtatcccctatcccacc

SEQ ID NO: 28983 - DNA, 22 bp, Artificial Sequence
  chemically synthesized
cccgtatcccctatcccacccc

SEQ ID NO: 28984 - DNA, 22 bp, Artificial Sequence
  chemically synthesized
tcccaccccaacccccacacag

SEQ ID NO: 28985 - DNA, 22 bp, Artificial Sequence
  chemically synthesized
accacccaatattattgttctc

SEQ ID NO: 28986 - DNA, 22 bp, Artificial Sequence
  chemically synthesized
ttgttctctgtaaacggaaaca

SEQ ID NO: 28987 - DNA, 22 bp, Artificial Sequence
  chemically synthesized
ttctctgtaaacggaaacaacc

SEQ ID NO: 28988 - DNA, 22 bp, Artificial Sequence
  chemically synthesized
tctgtaaacggaaacaacctgt

SEQ ID NO: 28989 - DNA, 22 bp, Artificial Sequence
  chemically synthesized
tgtaaacggaaacaacctgttg

SEQ ID NO: 28990 - DNA, 22 bp, Artificial Sequence
  chemically synthesized
taaacggaaacaacctgttgtc

SEQ ID NO: 28991 - DNA, 22 bp, Artificial Sequence
  chemically synthesized
ttgtctaaagagttttaactat

SEQ ID NO: 28992 - DNA, 22 bp, Artificial Sequence
  chemically synthesized
tctaaagagttttaactatggg

SEQ ID NO: 28993 - DNA, 22 bp, Artificial Sequence
  chemically synthesized
aagagttttaactatgggctca

SEQ ID NO: 28994 - DNA, 22 bp, Artificial Sequence
  chemically synthesized
taactatgggctcacgggtgag

SEQ ID NO: 28995 - DNA, 22 bp, Artificial Sequence
  chemically synthesized
aactatgggctcacgggtgagc

SEQ ID NO: 28996 - DNA, 22 bp, Artificial Sequence
  chemically synthesized
actatgggctcacgggtgagct

SEQ ID NO: 28997 - DNA, 22 bp, Artificial Sequence
  chemically synthesized
tgggctcacgggtgagctaaac

SEQ ID NO: 28998 - DNA, 22 bp, Artificial Sequence
  chemically synthesized
acgggtgagctaaacaggtttc

SEQ ID NO: 28999 - DNA, 22 bp, Artificial Sequence
  chemically synthesized
aacaggtttcccatctttttct

SEQ ID NO: 29000 - DNA, 22 bp, Artificial Sequence
  chemically synthesized
cccatctttttctggacccagg

SEQ ID NO: 29001 - DNA, 22 bp, Artificial Sequence
  chemically synthesized
ccatctttttctggacccagga

SEQ ID NO: 29002 - DNA, 22 bp, Artificial Sequence
  chemically synthesized
tttctggacccaggatcttagt

SEQ ID NO: 29003 - DNA, 22 bp, Artificial Sequence
  chemically synthesized
ttctggacccaggatcttagtg

SEQ ID NO: 29004 - DNA, 22 bp, Artificial Sequence
  chemically synthesized
tctggacccaggatcttagtgg

SEQ ID NO: 29005 - DNA, 22 bp, Artificial Sequence
  chemically synthesized
ctggacccaggatcttagtggg

SEQ ID NO: 29006 - DNA, 22 bp, Artificial Sequence
  chemically synthesized
tggacccaggatcttagtgggg

SEQ ID NO: 29007 - DNA, 22 bp, Artificial Sequence
  chemically synthesized
gacccaggatcttagtggggat

SEQ ID NO: 29008 - DNA, 22 bp, Artificial Sequence
  chemically synthesized
agtggggattttcactctgttc

SEQ ID NO: 29009 - DNA, 22 bp, Artificial Sequence
  chemically synthesized
gtggggattttcactctgttca

SEQ ID NO: 29010 - DNA, 22 bp, Artificial Sequence
  chemically synthesized
tcactctgttcactattttgtt

SEQ ID NO: 29011 - DNA, 22 bp, Artificial Sequence
  chemically synthesized
cactctgttcactattttgttg

SEQ ID NO: 29012 - DNA, 22 bp, Artificial Sequence
  chemically synthesized
actctgttcactattttgttgc

SEQ ID NO: 29013 - DNA, 22 bp, Artificial Sequence
  chemically synthesized
tgttcactattttgttgccctt

SEQ ID NO: 29014 - DNA, 22 bp, Artificial Sequence
  chemically synthesized
ttcactattttgttgcccttca

SEQ ID NO: 29015 - DNA, 22 bp, Artificial Sequence
  chemically synthesized
actattttgttgcccttcaaac

SEQ ID NO: 29016 - DNA, 22 bp, Artificial Sequence
  chemically synthesized
ttttgttgcccttcaaaccagt

SEQ ID NO: 29017 - DNA, 22 bp, Artificial Sequence
  chemically synthesized
tgttgcccttcaaaccagtaag

SEQ ID NO: 29018 - DNA, 22 bp, Artificial Sequence
  chemically synthesized
gttgcccttcaaaccagtaagc

SEQ ID NO: 29019 - DNA, 22 bp, Artificial Sequence
  chemically synthesized
ttgcccttcaaaccagtaagca

SEQ ID NO: 29020 - DNA, 22 bp, Artificial Sequence
  chemically synthesized
cccttcaaaccagtaagcattt

SEQ ID NO: 29021 - DNA, 22 bp, Artificial Sequence
  chemically synthesized
caaaccagtaagcatttatgag

SEQ ID NO: 29022 - DNA, 22 bp, Artificial Sequence
  chemically synthesized
aaaccagtaagcatttatgagg

SEQ ID NO: 29023 - DNA, 22 bp, Artificial Sequence
  chemically synthesized
atgaggactcacactatgccag

SEQ ID NO: 29024 - DNA, 22 bp, Artificial Sequence
  chemically synthesized
tgaggactcacactatgccaga

SEQ ID NO: 29025 - DNA, 22 bp, Artificial Sequence
  chemically synthesized
acactatgccagatacataggt

SEQ ID NO: 29026 - DNA, 22 bp, Artificial Sequence
  chemically synthesized
tgccagatacataggtggcagg

SEQ ID NO: 29027 - DNA, 22 bp, Artificial Sequence
  chemically synthesized
ttcactccagatataatctatc

SEQ ID NO: 29028 - DNA, 22 bp, Artificial Sequence
  chemically synthesized
cactccagatataatctatctg

SEQ ID NO: 29029 - DNA, 22 bp, Artificial Sequence
  chemically synthesized
actccagatataatctatctga

SEQ ID NO: 29030 - DNA, 20 bp, Artificial Sequence
  chemically synthesized
actttcacaatctgctagca

SEQ ID NO: 29031 - DNA, 20 bp, Artificial Sequence
  chemically synthesized
ctttcacaatctgctagcaa

SEQ ID NO: 29032 - DNA, 20 bp, Artificial Sequence
  chemically synthesized
atctgctagcaaaggttatg

SEQ ID NO: 29033 - DNA, 20 bp, Artificial Sequence
  chemically synthesized
gcagcgcgtgaacatgatca

SEQ ID NO: 29034 - DNA, 20 bp, Artificial Sequence
  chemically synthesized
gcgcgtgaacatgatcatgg

SEQ ID NO: 29035 - DNA, 20 bp, Artificial Sequence
  chemically synthesized
catgatcatggcagaatcac

SEQ ID NO: 29036 - DNA, 20 bp, Artificial Sequence
  chemically synthesized
atgatcatggcagaatcacc

SEQ ID NO: 29037 - DNA, 20 bp, Artificial Sequence
  chemically synthesized
cctcatcaccatctgccttt

SEQ ID NO: 29038 - DNA, 20 bp, Artificial Sequence
  chemically synthesized
ctcatcaccatctgcctttt

SEQ ID NO: 29039 - DNA, 20 bp, Artificial Sequence
  chemically synthesized
tgccttttaggatatctact

SEQ ID NO: 29040 - DNA, 20 bp, Artificial Sequence
  chemically synthesized
tctactcagtgctgaatgta

SEQ ID NO: 29041 - DNA, 20 bp, Artificial Sequence
  chemically synthesized
ctactcagtgctgaatgtac

SEQ ID NO: 29042 - DNA, 20 bp, Artificial Sequence
  chemically synthesized
ttccttttttaaaatacatt

SEQ ID NO: 29043 - DNA, 20 bp, Artificial Sequence
  chemically synthesized
cattgagtatgcttgccttt

SEQ ID NO: 29044 - DNA, 20 bp, Artificial Sequence
  chemically synthesized
gtatgcttgccttttagata

SEQ ID NO: 29045 - DNA, 20 bp, Artificial Sequence
  chemically synthesized
attttgattacatgatttga

SEQ ID NO: 29046 - DNA, 20 bp, Artificial Sequence
  chemically synthesized
atgatttgacagcaatattg

SEQ ID NO: 29047 - DNA, 20 bp, Artificial Sequence
  chemically synthesized
gatttgacagcaatattgaa

SEQ ID NO: 29048 - DNA, 20 bp, Artificial Sequence
  chemically synthesized
agcaatattgaagagtctaa

SEQ ID NO: 29049 - DNA, 20 bp, Artificial Sequence
  chemically synthesized
atattgaagagtctaacagc

SEQ ID NO: 29050 - DNA, 20 bp, Artificial Sequence
  chemically synthesized
agagtctaacagccagcacg

SEQ ID NO: 29051 - DNA, 20 bp, Artificial Sequence
  chemically synthesized
gagtctaacagccagcacgc

SEQ ID NO: 29052 - DNA, 20 bp, Artificial Sequence
  chemically synthesized
ctaacagccagcacgcaggt

SEQ ID NO: 29053 - DNA, 20 bp, Artificial Sequence
  chemically synthesized
cagccagcacgcaggttggt

SEQ ID NO: 29054 - DNA, 20 bp, Artificial Sequence
  chemically synthesized
gcacgcaggttggtaagtac

SEQ ID NO: 29055 - DNA, 20 bp, Artificial Sequence
  chemically synthesized
ggtaagtactggttctttgt

SEQ ID NO: 29056 - DNA, 20 bp, Artificial Sequence
  chemically synthesized
agtactggttctttgttagc

SEQ ID NO: 29057 - DNA, 20 bp, Artificial Sequence
  chemically synthesized
gtactggttctttgttagct

SEQ ID NO: 29058 - DNA, 20 bp, Artificial Sequence
  chemically synthesized
tcttcatttttaaaactaaa

SEQ ID NO: 29059 - DNA, 20 bp, Artificial Sequence
  chemically synthesized
tatgtttaataaacactgtt

SEQ ID NO: 29060 - DNA, 20 bp, Artificial Sequence
  chemically synthesized
acactgttcagttcatgatt

SEQ ID NO: 29061 - DNA, 20 bp, Artificial Sequence
  chemically synthesized
tttggtcatgtaattcctgt

SEQ ID NO: 29062 - DNA, 20 bp, Artificial Sequence
  chemically synthesized
ttagaaaacattcatctcct

SEQ ID NO: 29063 - DNA, 20 bp, Artificial Sequence
  chemically synthesized
ccttggtttaaaaaaattaa

SEQ ID NO: 29064 - DNA, 20 bp, Artificial Sequence
  chemically synthesized
tggtttaaaaaaattaaaag

SEQ ID NO: 29065 - DNA, 20 bp, Artificial Sequence
  chemically synthesized
ggtttaaaaaaattaaaagt

SEQ ID NO: 29066 - DNA, 20 bp, Artificial Sequence
  chemically synthesized
aaattaaaagtgggaaaaca

SEQ ID NO: 29067 - DNA, 20 bp, Artificial Sequence
  chemically synthesized
aaagtgggaaaacaaagaaa

SEQ ID NO: 29068 - DNA, 20 bp, Artificial Sequence
  chemically synthesized
gtgggaaaacaaagaaatag

SEQ ID NO: 29069 - DNA, 20 bp, Artificial Sequence
  chemically synthesized
aacaaagaaatagcagaata

SEQ ID NO: 29070 - DNA, 20 bp, Artificial Sequence
  chemically synthesized
ataaccacattatttttgtt

SEQ ID NO: 29071 - DNA, 20 bp, Artificial Sequence
  chemically synthesized
ttaccactttgaaatcaaaa

SEQ ID NO: 29072 - DNA, 20 bp, Artificial Sequence
  chemically synthesized
taccactttgaaatcaaaat

SEQ ID NO: 29073 - DNA, 20 bp, Artificial Sequence
  chemically synthesized
gaaatcaaaatgggaaacaa

SEQ ID NO: 29074 - DNA, 20 bp, Artificial Sequence
  chemically synthesized
ggaaacaaaagcacaaacaa

SEQ ID NO: 29075 - DNA, 20 bp, Artificial Sequence
  chemically synthesized
aatggccttatttacacaaa

SEQ ID NO: 29076 - DNA, 20 bp, Artificial Sequence
  chemically synthesized
tacacaaaaagtctgatttt

SEQ ID NO: 29077 - DNA, 20 bp, Artificial Sequence
  chemically synthesized
tttaagatatatgacatttc

SEQ ID NO: 29078 - DNA, 20 bp, Artificial Sequence
  chemically synthesized
ttaagatatatgacatttca

SEQ ID NO: 29079 - DNA, 20 bp, Artificial Sequence
  chemically synthesized
tatatgacatttcaaggttt

SEQ ID NO: 29080 - DNA, 20 bp, Artificial Sequence
  chemically synthesized
atgacatttcaaggtttcag

SEQ ID NO: 29081 - DNA, 20 bp, Artificial Sequence
  chemically synthesized
aggtttcagaagtatgtaat

SEQ ID NO: 29082 - DNA, 20 bp, Artificial Sequence
  chemically synthesized
ggtttcagaagtatgtaatg

SEQ ID NO: 29083 - DNA, 20 bp, Artificial Sequence
  chemically synthesized
aattatatatcttcaattta

SEQ ID NO: 29084 - DNA, 20 bp, Artificial Sequence
  chemically synthesized
atatcttcaatttaaagttt

SEQ ID NO: 29085 - DNA, 20 bp, Artificial Sequence
  chemically synthesized
aaagttttagttaaaacata

SEQ ID NO: 29086 - DNA, 20 bp, Artificial Sequence
  chemically synthesized
cataaagattaacctttcat

SEQ ID NO: 29087 - DNA, 20 bp, Artificial Sequence
  chemically synthesized
aagattaacctttcattagc

SEQ ID NO: 29088 - DNA, 20 bp, Artificial Sequence
  chemically synthesized
acctttcattagcaagctgt

SEQ ID NO: 29089 - DNA, 20 bp, Artificial Sequence
  chemically synthesized
caagctgttagttatcacca

SEQ ID NO: 29090 - DNA, 20 bp, Artificial Sequence
  chemically synthesized
gttatcaccaaagcttttca

SEQ ID NO: 29091 - DNA, 20 bp, Artificial Sequence
  chemically synthesized
caccaaagcttttcatggat

SEQ ID NO: 29092 - DNA, 20 bp, Artificial Sequence
  chemically synthesized
accaaagcttttcatggatt

SEQ ID NO: 29093 - DNA, 20 bp, Artificial Sequence
  chemically synthesized
tgtctctatgtcaaacatct

SEQ ID NO: 29094 - DNA, 20 bp, Artificial Sequence
  chemically synthesized
tctctatgtcaaacatcttg

SEQ ID NO: 29095 - DNA, 20 bp, Artificial Sequence
  chemically synthesized
aacatcttggagttgatatt

SEQ ID NO: 29096 - DNA, 20 bp, Artificial Sequence
  chemically synthesized
acatcttggagttgatattt

SEQ ID NO: 29097 - DNA, 20 bp, Artificial Sequence
  chemically synthesized
catcttggagttgatatttg

SEQ ID NO: 29098 - DNA, 20 bp, Artificial Sequence
  chemically synthesized
atttggggaaacacaatact

SEQ ID NO: 29099 - DNA, 20 bp, Artificial Sequence
  chemically synthesized
gggaaacacaatactcagtt

SEQ ID NO: 29100 - DNA, 20 bp, Artificial Sequence
  chemically synthesized
caatactcagttgagttccc

SEQ ID NO: 29101 - DNA, 20 bp, Artificial Sequence
  chemically synthesized
aatactcagttgagttccct

SEQ ID NO: 29102 - DNA, 20 bp, Artificial Sequence
  chemically synthesized
atactcagttgagttcccta

SEQ ID NO: 29103 - DNA, 20 bp, Artificial Sequence
  chemically synthesized
tactcagttgagttccctag

SEQ ID NO: 29104 - DNA, 20 bp, Artificial Sequence
  chemically synthesized
ctcagttgagttccctaggg

SEQ ID NO: 29105 - DNA, 20 bp, Artificial Sequence
  chemically synthesized
ttgagttccctaggggagaa

SEQ ID NO: 29106 - DNA, 20 bp, Artificial Sequence
  chemically synthesized
gttccctaggggagaaaagc

SEQ ID NO: 29107 - DNA, 20 bp, Artificial Sequence
  chemically synthesized
taggggagaaaagcaagctt

SEQ ID NO: 29108 - DNA, 20 bp, Artificial Sequence
  chemically synthesized
caagcttaagaattgacata

SEQ ID NO: 29109 - DNA, 20 bp, Artificial Sequence
  chemically synthesized
agcttaagaattgacataaa

SEQ ID NO: 29110 - DNA, 20 bp, Artificial Sequence
  chemically synthesized
ttaagaattgacataaagag

SEQ ID NO: 29111 - DNA, 20 bp, Artificial Sequence
  chemically synthesized
taagaattgacataaagagt

SEQ ID NO: 29112 - DNA, 20 bp, Artificial Sequence
  chemically synthesized
gaattgacataaagagtagg

SEQ ID NO: 29113 - DNA, 20 bp, Artificial Sequence
  chemically synthesized
tgacataaagagtaggaagt

SEQ ID NO: 29114 - DNA, 20 bp, Artificial Sequence
  chemically synthesized
actttgttttttcacaacta

SEQ ID NO: 29115 - DNA, 20 bp, Artificial Sequence
  chemically synthesized
cagtgactttatgtatttcc

SEQ ID NO: 29116 - DNA, 20 bp, Artificial Sequence
  chemically synthesized
gtgactttatgtatttccca

SEQ ID NO: 29117 - DNA, 20 bp, Artificial Sequence
  chemically synthesized
tgactttatgtatttcccag

SEQ ID NO: 29118 - DNA, 20 bp, Artificial Sequence
  chemically synthesized
ctttatgtatttcccagagg

SEQ ID NO: 29119 - DNA, 20 bp, Artificial Sequence
  chemically synthesized
tttatgtatttcccagagga

SEQ ID NO: 29120 - DNA, 20 bp, Artificial Sequence
  chemically synthesized
atttcccagaggaaggcata

SEQ ID NO: 29121 - DNA, 20 bp, Artificial Sequence
  chemically synthesized
tttcccagaggaaggcatac

SEQ ID NO: 29122 - DNA, 20 bp, Artificial Sequence
  chemically synthesized
ttcccagaggaaggcataca

SEQ ID NO: 29123 - DNA, 20 bp, Artificial Sequence
  chemically synthesized
ccagaggaaggcatacaggg

SEQ ID NO: 29124 - DNA, 20 bp, Artificial Sequence
  chemically synthesized
agggaagaaattatcccatt

SEQ ID NO: 29125 - DNA, 20 bp, Artificial Sequence
  chemically synthesized
aattatcccatttggacaaa

SEQ ID NO: 29126 - DNA, 20 bp, Artificial Sequence
  chemically synthesized
ggacaaacagcatgttctca

SEQ ID NO: 29127 - DNA, 20 bp, Artificial Sequence
  chemically synthesized
gacaaacagcatgttctcac

SEQ ID NO: 29128 - DNA, 20 bp, Artificial Sequence
  chemically synthesized
aaacagcatgttctcacagg

SEQ ID NO: 29129 - DNA, 20 bp, Artificial Sequence
  chemically synthesized
acacttacttgtcaactttc

SEQ ID NO: 29130 - DNA, 20 bp, Artificial Sequence
  chemically synthesized
caactttctagaatcaaatc

SEQ ID NO: 29131 - DNA, 20 bp, Artificial Sequence
  chemically synthesized
ctttctagaatcaaatctag

SEQ ID NO: 29132 - DNA, 20 bp, Artificial Sequence
  chemically synthesized
gaatcaaatctagtagctga

SEQ ID NO: 29133 - DNA, 20 bp, Artificial Sequence
  chemically synthesized
aatctagtagctgacagtac

SEQ ID NO: 29134 - DNA, 20 bp, Artificial Sequence
  chemically synthesized
atctagtagctgacagtacc

SEQ ID NO: 29135 - DNA, 20 bp, Artificial Sequence
  chemically synthesized
gtagctgacagtaccaggat

SEQ ID NO: 29136 - DNA, 20 bp, Artificial Sequence
  chemically synthesized
tagctgacagtaccaggatc

SEQ ID NO: 29137 - DNA, 20 bp, Artificial Sequence
  chemically synthesized
agctgacagtaccaggatca

SEQ ID NO: 29138 - DNA, 20 bp, Artificial Sequence
  chemically synthesized
gctgacagtaccaggatcag

SEQ ID NO: 29139 - DNA, 20 bp, Artificial Sequence
  chemically synthesized
ggatcaggggtgccaaccct

SEQ ID NO: 29140 - DNA, 20 bp, Artificial Sequence
  chemically synthesized
gtgccaaccctaagcacccc

SEQ ID NO: 29141 - DNA, 20 bp, Artificial Sequence
  chemically synthesized
caaccctaagcacccccaga

SEQ ID NO: 29142 - DNA, 20 bp, Artificial Sequence
  chemically synthesized
agcacccccagaaagctgac

SEQ ID NO: 29143 - DNA, 20 bp, Artificial Sequence
  chemically synthesized
cagaaagctgactggccctg

SEQ ID NO: 29144 - DNA, 20 bp, Artificial Sequence
  chemically synthesized
tggccctgtggttcccactc

SEQ ID NO: 29145 - DNA, 20 bp, Artificial Sequence
  chemically synthesized
tcccactccagacatgatgt

SEQ ID NO: 29146 - DNA, 20 bp, Artificial Sequence
  chemically synthesized
catgatgtcagctgtgaaat

SEQ ID NO: 29147 - DNA, 20 bp, Artificial Sequence
  chemically synthesized
aataacgataaaaaaaaata

SEQ ID NO: 29148 - DNA, 20 bp, Artificial Sequence
  chemically synthesized
taacgataaaaaaaaataca

SEQ ID NO: 29149 - DNA, 20 bp, Artificial Sequence
  chemically synthesized
aacgataaaaaaaaatacag

SEQ ID NO: 29150 - DNA, 20 bp, Artificial Sequence
  chemically synthesized
aaaaaatacagaggttaaac

SEQ ID NO: 29151 - DNA, 20 bp, Artificial Sequence
  chemically synthesized
atacagaggttaaactagca

SEQ ID NO: 29152 - DNA, 20 bp, Artificial Sequence
  chemically synthesized
agaggttaaactagcaaagt

SEQ ID NO: 29153 - DNA, 20 bp, Artificial Sequence
  chemically synthesized
ttaaactagcaaagtgagta

SEQ ID NO: 29154 - DNA, 20 bp, Artificial Sequence
  chemically synthesized
ctagcaaagtgagtaaagtc

SEQ ID NO: 29155 - DNA, 20 bp, Artificial Sequence
  chemically synthesized
tagcaaagtgagtaaagtca

SEQ ID NO: 29156 - DNA, 20 bp, Artificial Sequence
  chemically synthesized
agcaaagtgagtaaagtcaa

SEQ ID NO: 29157 - DNA, 20 bp, Artificial Sequence
  chemically synthesized
gtgagtaaagtcaagggata

SEQ ID NO: 29158 - DNA, 20 bp, Artificial Sequence
  chemically synthesized
aagggataaagaaaatttgt

SEQ ID NO: 29159 - DNA, 20 bp, Artificial Sequence
  chemically synthesized
aatttgttggaaaactcaca

SEQ ID NO: 29160 - DNA, 20 bp, Artificial Sequence
  chemically synthesized
ttgttggaaaactcacaaag

SEQ ID NO: 29161 - DNA, 20 bp, Artificial Sequence
  chemically synthesized
tgttggaaaactcacaaagc

SEQ ID NO: 29162 - DNA, 20 bp, Artificial Sequence
  chemically synthesized
aactcacaaagcaggacata

SEQ ID NO: 29163 - DNA, 20 bp, Artificial Sequence
  chemically synthesized
cacaaagcaggacataaagc

SEQ ID NO: 29164 - DNA, 20 bp, Artificial Sequence
  chemically synthesized
acaaagcaggacataaagca

SEQ ID NO: 29165 - DNA, 20 bp, Artificial Sequence
  chemically synthesized
aggacataaagcaaggccat

SEQ ID NO: 29166 - DNA, 20 bp, Artificial Sequence
  chemically synthesized
ggccattagatatatctcat

SEQ ID NO: 29167 - DNA, 20 bp, Artificial Sequence
  chemically synthesized
tatctcattagtgtgacatc

SEQ ID NO: 29168 - DNA, 20 bp, Artificial Sequence
  chemically synthesized
atctcattagtgtgacatct

SEQ ID NO: 29169 - DNA, 20 bp, Artificial Sequence
  chemically synthesized
ctcattagtgtgacatctgg

SEQ ID NO: 29170 - DNA, 20 bp, Artificial Sequence
  chemically synthesized
tcattagtgtgacatctggg

SEQ ID NO: 29171 - DNA, 20 bp, Artificial Sequence
  chemically synthesized
gtgtgacatctgggaggaca

SEQ ID NO: 29172 - DNA, 20 bp, Artificial Sequence
  chemically synthesized
ccaaaccctttcttctatat

SEQ ID NO: 29173 - DNA, 20 bp, Artificial Sequence
  chemically synthesized
aaccctttcttctatataag

SEQ ID NO: 29174 - DNA, 20 bp, Artificial Sequence
  chemically synthesized
ctttcttctatataagtggt

SEQ ID NO: 29175 - DNA, 20 bp, Artificial Sequence
  chemically synthesized
atataagtggtgagatgatg

SEQ ID NO: 29176 - DNA, 20 bp, Artificial Sequence
  chemically synthesized
tataagtggtgagatgatga

SEQ ID NO: 29177 - DNA, 20 bp, Artificial Sequence
  chemically synthesized
ggtgagatgatgaaggttgt

SEQ ID NO: 29178 - DNA, 20 bp, Artificial Sequence
  chemically synthesized
tgagatgatgaaggttgtaa

SEQ ID NO: 29179 - DNA, 20 bp, Artificial Sequence
  chemically synthesized
gagatgatgaaggttgtaag

SEQ ID NO: 29180 - DNA, 20 bp, Artificial Sequence
  chemically synthesized
agatgatgaaggttgtaaga

SEQ ID NO: 29181 - DNA, 20 bp, Artificial Sequence
  chemically synthesized
agagggcttctgcccccttg

SEQ ID NO: 29182 - DNA, 20 bp, Artificial Sequence
  chemically synthesized
ttctgcccccttgaagactt

SEQ ID NO: 29183 - DNA, 20 bp, Artificial Sequence
  chemically synthesized
cccttgaagacttcagatgc

SEQ ID NO: 29184 - DNA, 20 bp, Artificial Sequence
  chemically synthesized
ccttgaagacttcagatgct

SEQ ID NO: 29185 - DNA, 20 bp, Artificial Sequence
  chemically synthesized
cttgaagacttcagatgctg

SEQ ID NO: 29186 - DNA, 20 bp, Artificial Sequence
  chemically synthesized
aagacttcagatgctgggga

SEQ ID NO: 29187 - DNA, 20 bp, Artificial Sequence
  chemically synthesized
agacttcagatgctggggaa

SEQ ID NO: 29188 - DNA, 20 bp, Artificial Sequence
  chemically synthesized
ttcagatgctggggaaagga

SEQ ID NO: 29189 - DNA, 20 bp, Artificial Sequence
  chemically synthesized
atgctggggaaaggatagat

SEQ ID NO: 29190 - DNA, 20 bp, Artificial Sequence
  chemically synthesized
gggaaaggatagataagaat

SEQ ID NO: 29191 - DNA, 20 bp, Artificial Sequence
  chemically synthesized
ggaaaggatagataagaata

SEQ ID NO: 29192 - DNA, 20 bp, Artificial Sequence
  chemically synthesized
agataagaataaggatgaac

SEQ ID NO: 29193 - DNA, 20 bp, Artificial Sequence
  chemically synthesized
gataagaataaggatgaacc

SEQ ID NO: 29194 - DNA, 20 bp, Artificial Sequence
  chemically synthesized
ataaggatgaaccaggcttt

SEQ ID NO: 29195 - DNA, 20 bp, Artificial Sequence
  chemically synthesized
aaggatgaaccaggcttttg

SEQ ID NO: 29196 - DNA, 20 bp, Artificial Sequence
  chemically synthesized
tgaaccaggcttttggagcc

SEQ ID NO: 29197 - DNA, 20 bp, Artificial Sequence
  chemically synthesized
gaaccaggcttttggagcct

SEQ ID NO: 29198 - DNA, 20 bp, Artificial Sequence
  chemically synthesized
ggagcctgggaaataatgac

SEQ ID NO: 29199 - DNA, 20 bp, Artificial Sequence
  chemically synthesized
aatgactagcgataaacctg

SEQ ID NO: 29200 - DNA, 20 bp, Artificial Sequence
  chemically synthesized
atgactagcgataaacctga

SEQ ID NO: 29201 - DNA, 20 bp, Artificial Sequence
  chemically synthesized
tgactagcgataaacctgaa

SEQ ID NO: 29202 - DNA, 20 bp, Artificial Sequence
  chemically synthesized
ctagcgataaacctgaaggg

SEQ ID NO: 29203 - DNA, 20 bp, Artificial Sequence
  chemically synthesized
gataaacctgaagggaagtt

SEQ ID NO: 29204 - DNA, 20 bp, Artificial Sequence
  chemically synthesized
gaagttaagtatacgatccc

SEQ ID NO: 29205 - DNA, 20 bp, Artificial Sequence
  chemically synthesized
tacgatccccagataatact

SEQ ID NO: 29206 - DNA, 20 bp, Artificial Sequence
  chemically synthesized
acgatccccagataatacta

SEQ ID NO: 29207 - DNA, 20 bp, Artificial Sequence
  chemically synthesized
gatccccagataatactaag

SEQ ID NO: 29208 - DNA, 20 bp, Artificial Sequence
  chemically synthesized
cccagataatactaaggaga

SEQ ID NO: 29209 - DNA, 20 bp, Artificial Sequence
  chemically synthesized
ccagataatactaaggagaa

SEQ ID NO: 29210 - DNA, 20 bp, Artificial Sequence
  chemically synthesized
agaaaggcaatgtgattctg

SEQ ID NO: 29211 - DNA, 20 bp, Artificial Sequence
  chemically synthesized
atgtgattctgcagccattg

SEQ ID NO: 29212 - DNA, 20 bp, Artificial Sequence
  chemically synthesized
gattctgcagccattgtagc

SEQ ID NO: 29213 - DNA, 20 bp, Artificial Sequence
  chemically synthesized
ttctgcagccattgtagcca

SEQ ID NO: 29214 - DNA, 20 bp, Artificial Sequence
  chemically synthesized
ccattgtagccagagataat

SEQ ID NO: 29215 - DNA, 20 bp, Artificial Sequence
  chemically synthesized
gccagagataataagccctt

SEQ ID NO: 29216 - DNA, 20 bp, Artificial Sequence
  chemically synthesized
ccagagataataagcccttg

SEQ ID NO: 29217 - DNA, 20 bp, Artificial Sequence
  chemically synthesized
gagataataagcccttgagg

SEQ ID NO: 29218 - DNA, 20 bp, Artificial Sequence
  chemically synthesized
agataataagcccttgagga

SEQ ID NO: 29219 - DNA, 20 bp, Artificial Sequence
  chemically synthesized
gataataagcccttgaggaa

SEQ ID NO: 29220 - DNA, 20 bp, Artificial Sequence
  chemically synthesized
ataataagcccttgaggaag

SEQ ID NO: 29221 - DNA, 20 bp, Artificial Sequence
  chemically synthesized
taagcccttgaggaaggggc

SEQ ID NO: 29222 - DNA, 20 bp, Artificial Sequence
  chemically synthesized
aagcccttgaggaaggggcc

SEQ ID NO: 29223 - DNA, 20 bp, Artificial Sequence
  chemically synthesized
agcccttgaggaaggggcca

SEQ ID NO: 29224 - DNA, 20 bp, Artificial Sequence
  chemically synthesized
gcccttgaggaaggggccag

SEQ ID NO: 29225 - DNA, 20 bp, Artificial Sequence
  chemically synthesized
ggggccaggggaatttttct

SEQ ID NO: 29226 - DNA, 20 bp, Artificial Sequence
  chemically synthesized
gggccaggggaatttttcta

SEQ ID NO: 29227 - DNA, 20 bp, Artificial Sequence
  chemically synthesized
caggggaatttttctaagga

SEQ ID NO: 29228 - DNA, 20 bp, Artificial Sequence
  chemically synthesized
ggaatttttctaaggataga

SEQ ID NO: 29229 - DNA, 20 bp, Artificial Sequence
  chemically synthesized
aaggatagacagtattaatg

SEQ ID NO: 29230 - DNA, 20 bp, Artificial Sequence
  chemically synthesized
ttctgctattaaactctcat

SEQ ID NO: 29231 - DNA, 20 bp, Artificial Sequence
  chemically synthesized
aaactctcattggcttctaa

SEQ ID NO: 29232 - DNA, 20 bp, Artificial Sequence
  chemically synthesized
aactctcattggcttctaaa

SEQ ID NO: 29233 - DNA, 20 bp, Artificial Sequence
  chemically synthesized
ctctcattggcttctaaaag

SEQ ID NO: 29234 - DNA, 20 bp, Artificial Sequence
  chemically synthesized
ttggcttctaaaaggagttt

SEQ ID NO: 29235 - DNA, 20 bp, Artificial Sequence
  chemically synthesized
cttctaaaaggagtttcggt

SEQ ID NO: 29236 - DNA, 20 bp, Artificial Sequence
  chemically synthesized
gtttcggtgagtgatttgct

SEQ ID NO: 29237 - DNA, 20 bp, Artificial Sequence
  chemically synthesized
gctgagatgttgcattttca

SEQ ID NO: 29238 - DNA, 20 bp, Artificial Sequence
  chemically synthesized
attttcatggctgctgcctt

SEQ ID NO: 29239 - DNA, 20 bp, Artificial Sequence
  chemically synthesized
ttttcatggctgctgccttt

SEQ ID NO: 29240 - DNA, 20 bp, Artificial Sequence
  chemically synthesized
gcctttaggtattattgcaa

SEQ ID NO: 29241 - DNA, 20 bp, Artificial Sequence
  chemically synthesized
taggtattattgcaacagtt

SEQ ID NO: 29242 - DNA, 20 bp, Artificial Sequence
  chemically synthesized
ttggaattttgaaattaaaa

SEQ ID NO: 29243 - DNA, 20 bp, Artificial Sequence
  chemically synthesized
ttaaaacagttctgtaaaac

SEQ ID NO: 29244 - DNA, 20 bp, Artificial Sequence
  chemically synthesized
acagttctgtaaaaccagtt

SEQ ID NO: 29245 - DNA, 20 bp, Artificial Sequence
  chemically synthesized
aaaaccagtttagttttgta

SEQ ID NO: 29246 - DNA, 20 bp, Artificial Sequence
  chemically synthesized
tttgtaaagtgtatgcatca

SEQ ID NO: 29247 - DNA, 20 bp, Artificial Sequence
  chemically synthesized
catcaaagatgtccttcatt

SEQ ID NO: 29248 - DNA, 20 bp, Artificial Sequence
  chemically synthesized
tccttcattcagacattact

SEQ ID NO: 29249 - DNA, 20 bp, Artificial Sequence
  chemically synthesized
acattactgagttacaacta

SEQ ID NO: 29250 - DNA, 20 bp, Artificial Sequence
  chemically synthesized
ctgagttacaactatggtgc

SEQ ID NO: 29251 - DNA, 20 bp, Artificial Sequence
  chemically synthesized
tgagttacaactatggtgcc

SEQ ID NO: 29252 - DNA, 20 bp, Artificial Sequence
  chemically synthesized
tatggtgccaggtactgtgt

SEQ ID NO: 29253 - DNA, 20 bp, Artificial Sequence
  chemically synthesized
atggtgccaggtactgtgtc

SEQ ID NO: 29254 - DNA, 20 bp, Artificial Sequence
  chemically synthesized
tggtgccaggtactgtgtca

SEQ ID NO: 29255 - DNA, 20 bp, Artificial Sequence
  chemically synthesized
caggtactgtgtcagggtac

SEQ ID NO: 29256 - DNA, 20 bp, Artificial Sequence
  chemically synthesized
aggtactgtgtcagggtact

SEQ ID NO: 29257 - DNA, 20 bp, Artificial Sequence
  chemically synthesized
ggtactgtgtcagggtacta

SEQ ID NO: 29258 - DNA, 20 bp, Artificial Sequence
  chemically synthesized
gtactgtgtcagggtactag

SEQ ID NO: 29259 - DNA, 20 bp, Artificial Sequence
  chemically synthesized
gtgtcagggtactaggggta

SEQ ID NO: 29260 - DNA, 20 bp, Artificial Sequence
  chemically synthesized
tgtcagggtactaggggtat

SEQ ID NO: 29261 - DNA, 20 bp, Artificial Sequence
  chemically synthesized
gtcagggtactaggggtatg

SEQ ID NO: 29262 - DNA, 20 bp, Artificial Sequence
  chemically synthesized
ctaggggtatggggataaac

SEQ ID NO: 29263 - DNA, 20 bp, Artificial Sequence
  chemically synthesized
cagactccctctttgatcta

SEQ ID NO: 29264 - DNA, 20 bp, Artificial Sequence
  chemically synthesized
actccctctttgatctaaag

SEQ ID NO: 29265 - DNA, 20 bp, Artificial Sequence
  chemically synthesized
tctttgatctaaagcagcat

SEQ ID NO: 29266 - DNA, 20 bp, Artificial Sequence
  chemically synthesized
ctttgatctaaagcagcatg

SEQ ID NO: 29267 - DNA, 20 bp, Artificial Sequence
  chemically synthesized
gatctaaagcagcatgaggc

SEQ ID NO: 29268 - DNA, 20 bp, Artificial Sequence
  chemically synthesized
atctaaagcagcatgaggcc

SEQ ID NO: 29269 - DNA, 20 bp, Artificial Sequence
  chemically synthesized
aaagcagcatgaggccaggt

SEQ ID NO: 29270 - DNA, 20 bp, Artificial Sequence
  chemically synthesized
agcagcatgaggccaggtga

SEQ ID NO: 29271 - DNA, 20 bp, Artificial Sequence
  chemically synthesized
gcagcatgaggccaggtgag

SEQ ID NO: 29272 - DNA, 20 bp, Artificial Sequence
  chemically synthesized
taatgtgataaaatgtgcac

SEQ ID NO: 29273 - DNA, 20 bp, Artificial Sequence
  chemically synthesized
aatgtgataaaatgtgcact

SEQ ID NO: 29274 - DNA, 20 bp, Artificial Sequence
  chemically synthesized
taaaatgtgcactaggtact

SEQ ID NO: 29275 - DNA, 20 bp, Artificial Sequence
  chemically synthesized
aaaatgtgcactaggtacta

SEQ ID NO: 29276 - DNA, 20 bp, Artificial Sequence
  chemically synthesized
aaatgtgcactaggtactaa

SEQ ID NO: 29277 - DNA, 20 bp, Artificial Sequence
  chemically synthesized
cactaggtactaagggatca

SEQ ID NO: 29278 - DNA, 20 bp, Artificial Sequence
  chemically synthesized
ctaggtactaagggatcata

SEQ ID NO: 29279 - DNA, 20 bp, Artificial Sequence
  chemically synthesized
gtactaagggatcatagaga

SEQ ID NO: 29280 - DNA, 20 bp, Artificial Sequence
  chemically synthesized
tactaagggatcatagagaa

SEQ ID NO: 29281 - DNA, 20 bp, Artificial Sequence
  chemically synthesized
agagaaaggaacacattaaa

SEQ ID NO: 29282 - DNA, 20 bp, Artificial Sequence
  chemically synthesized
gagaaaggaacacattaaat

SEQ ID NO: 29283 - DNA, 20 bp, Artificial Sequence
  chemically synthesized
agaaaggaacacattaaatg

SEQ ID NO: 29284 - DNA, 20 bp, Artificial Sequence
  chemically synthesized
ttaaatggggaaacaattga

SEQ ID NO: 29285 - DNA, 20 bp, Artificial Sequence
  chemically synthesized
aaatggggaaacaattgata

SEQ ID NO: 29286 - DNA, 20 bp, Artificial Sequence
  chemically synthesized
atggggaaacaattgataga

SEQ ID NO: 29287 - DNA, 20 bp, Artificial Sequence
  chemically synthesized
ggggaaacaattgatagaga

SEQ ID NO: 29288 - DNA, 20 bp, Artificial Sequence
  chemically synthesized
agagagagaatattttcatc

SEQ ID NO: 29289 - DNA, 20 bp, Artificial Sequence
  chemically synthesized
gagagagaatattttcatct

SEQ ID NO: 29290 - DNA, 20 bp, Artificial Sequence
  chemically synthesized
tattttcatctgggtcttaa

SEQ ID NO: 29291 - DNA, 20 bp, Artificial Sequence
  chemically synthesized
tcatctgggtcttaaaagat

SEQ ID NO: 29292 - DNA, 20 bp, Artificial Sequence
  chemically synthesized
tctgggtcttaaaagatgag

SEQ ID NO: 29293 - DNA, 20 bp, Artificial Sequence
  chemically synthesized
ctgggtcttaaaagatgagt

SEQ ID NO: 29294 - DNA, 20 bp, Artificial Sequence
  chemically synthesized
tctctttaaatgtctgatat

SEQ ID NO: 29295 - DNA, 20 bp, Artificial Sequence
  chemically synthesized
ctctttaaatgtctgatata

SEQ ID NO: 29296 - DNA, 20 bp, Artificial Sequence
  chemically synthesized
tctttaaatgtctgatataa

SEQ ID NO: 29297 - DNA, 20 bp, Artificial Sequence
  chemically synthesized
atataagggcattttatgca

SEQ ID NO: 29298 - DNA, 20 bp, Artificial Sequence
  chemically synthesized
ataagggcattttatgcaaa

SEQ ID NO: 29299 - DNA, 20 bp, Artificial Sequence
  chemically synthesized
taagggcattttatgcaaag

SEQ ID NO: 29300 - DNA, 20 bp, Artificial Sequence
  chemically synthesized
caaagaggatcactcgtgca

SEQ ID NO: 29301 - DNA, 20 bp, Artificial Sequence
  chemically synthesized
ggatcactcgtgcaaagact

SEQ ID NO: 29302 - DNA, 20 bp, Artificial Sequence
  chemically synthesized
gtgcaaagactcagatttgc

SEQ ID NO: 29303 - DNA, 20 bp, Artificial Sequence
  chemically synthesized
actcagatttgcaagaacgt

SEQ ID NO: 29304 - DNA, 20 bp, Artificial Sequence
  chemically synthesized
ctcagatttgcaagaacgtg

SEQ ID NO: 29305 - DNA, 20 bp, Artificial Sequence
  chemically synthesized
tgcaagaacgtgaggtattt

SEQ ID NO: 29306 - DNA, 20 bp, Artificial Sequence
  chemically synthesized
gcaagaacgtgaggtatttc

SEQ ID NO: 29307 - DNA, 20 bp, Artificial Sequence
  chemically synthesized
aagaacgtgaggtatttcag

SEQ ID NO: 29308 - DNA, 20 bp, Artificial Sequence
  chemically synthesized
ggtatttcaggagttttgta

SEQ ID NO: 29309 - DNA, 20 bp, Artificial Sequence
  chemically synthesized
gagttttgtatggttccata

SEQ ID NO: 29310 - DNA, 20 bp, Artificial Sequence
  chemically synthesized
ggttccatatggactatgac

SEQ ID NO: 29311 - DNA, 20 bp, Artificial Sequence
  chemically synthesized
ccatatggactatgacaagt

SEQ ID NO: 29312 - DNA, 20 bp, Artificial Sequence
  chemically synthesized
atggactatgacaagtgaga

SEQ ID NO: 29313 - DNA, 20 bp, Artificial Sequence
  chemically synthesized
tggactatgacaagtgagac

SEQ ID NO: 29314 - DNA, 20 bp, Artificial Sequence
  chemically synthesized
gacaagtgagacaggtaaac

SEQ ID NO: 29315 - DNA, 20 bp, Artificial Sequence
  chemically synthesized
acaagtgagacaggtaaact

SEQ ID NO: 29316 - DNA, 20 bp, Artificial Sequence
  chemically synthesized
agtgagacaggtaaactagg

SEQ ID NO: 29317 - DNA, 20 bp, Artificial Sequence
  chemically synthesized
tgagacaggtaaactaggca

SEQ ID NO: 29318 - DNA, 20 bp, Artificial Sequence
  chemically synthesized
acaggtaaactaggcagagc

SEQ ID NO: 29319 - DNA, 20 bp, Artificial Sequence
  chemically synthesized
aactaggcagagctggtcat

SEQ ID NO: 29320 - DNA, 20 bp, Artificial Sequence
  chemically synthesized
gagctggtcatcagataatg

SEQ ID NO: 29321 - DNA, 20 bp, Artificial Sequence
  chemically synthesized
gataatgaagtcattaacct

SEQ ID NO: 29322 - DNA, 20 bp, Artificial Sequence
  chemically synthesized
ataatgaagtcattaaccta

SEQ ID NO: 29323 - DNA, 20 bp, Artificial Sequence
  chemically synthesized
aatgaagtcattaacctaag

SEQ ID NO: 29324 - DNA, 20 bp, Artificial Sequence
  chemically synthesized
agtcattaacctaaggagat

SEQ ID NO: 29325 - DNA, 20 bp, Artificial Sequence
  chemically synthesized
ttggacaataaaatgcaata

SEQ ID NO: 29326 - DNA, 20 bp, Artificial Sequence
  chemically synthesized
ggacaataaaatgcaatatg

SEQ ID NO: 29327 - DNA, 20 bp, Artificial Sequence
  chemically synthesized
gacaataaaatgcaatatgg

SEQ ID NO: 29328 - DNA, 20 bp, Artificial Sequence
  chemically synthesized
aatgcaatatggaggtatcg

SEQ ID NO: 29329 - DNA, 20 bp, Artificial Sequence
  chemically synthesized
aggtatcgaagtataaacat

SEQ ID NO: 29330 - DNA, 20 bp, Artificial Sequence
  chemically synthesized
ggtatcgaagtataaacata

SEQ ID NO: 29331 - DNA, 20 bp, Artificial Sequence
  chemically synthesized
tatcgaagtataaacataag

SEQ ID NO: 29332 - DNA, 20 bp, Artificial Sequence
  chemically synthesized
aacataaggagtaccactga

SEQ ID NO: 29333 - DNA, 20 bp, Artificial Sequence
  chemically synthesized
agtaccactgatggctgatt

SEQ ID NO: 29334 - DNA, 20 bp, Artificial Sequence
  chemically synthesized
gtaccactgatggctgattt

SEQ ID NO: 29335 - DNA, 20 bp, Artificial Sequence
  chemically synthesized
gatggctgatttaggatgcc

SEQ ID NO: 29336 - DNA, 20 bp, Artificial Sequence
  chemically synthesized
ctgatttaggatgcccagtc

SEQ ID NO: 29337 - DNA, 20 bp, Artificial Sequence
  chemically synthesized
gcaacacgctaatgaaatga

SEQ ID NO: 29338 - DNA, 20 bp, Artificial Sequence
  chemically synthesized
acacgctaatgaaatgatag

SEQ ID NO: 29339 - DNA, 20 bp, Artificial Sequence
  chemically synthesized
cacgctaatgaaatgatagt

SEQ ID NO: 29340 - DNA, 20 bp, Artificial Sequence
  chemically synthesized
acgctaatgaaatgatagtg

SEQ ID NO: 29341 - DNA, 20 bp, Artificial Sequence
  chemically synthesized
cgctaatgaaatgatagtgg

SEQ ID NO: 29342 - DNA, 20 bp, Artificial Sequence
  chemically synthesized
ctaatgaaatgatagtgggg

SEQ ID NO: 29343 - DNA, 20 bp, Artificial Sequence
  chemically synthesized
taatgaaatgatagtggggg

SEQ ID NO: 29344 - DNA, 20 bp, Artificial Sequence
  chemically synthesized
aatgaaatgatagtggggga

SEQ ID NO: 29345 - DNA, 20 bp, Artificial Sequence
  chemically synthesized
atgaaatgatagtgggggag

SEQ ID NO: 29346 - DNA, 20 bp, Artificial Sequence
  chemically synthesized
tgaaatgatagtgggggagg

SEQ ID NO: 29347 - DNA, 20 bp, Artificial Sequence
  chemically synthesized
gtgggggagggggccgtacc

SEQ ID NO: 29348 - DNA, 20 bp, Artificial Sequence
  chemically synthesized
ggagggggccgtaccaagac

SEQ ID NO: 29349 - DNA, 20 bp, Artificial Sequence
  chemically synthesized
gagggggccgtaccaagact

SEQ ID NO: 29350 - DNA, 20 bp, Artificial Sequence
  chemically synthesized
gggggccgtaccaagactag

SEQ ID NO: 29351 - DNA, 20 bp, Artificial Sequence
  chemically synthesized
gggccgtaccaagactagga

SEQ ID NO: 29352 - DNA, 20 bp, Artificial Sequence
  chemically synthesized
gccgtaccaagactaggaga

SEQ ID NO: 29353 - DNA, 20 bp, Artificial Sequence
  chemically synthesized
gtaccaagactaggagagag

SEQ ID NO: 29354 - DNA, 20 bp, Artificial Sequence
  chemically synthesized
gactaggagagagcagtcct

SEQ ID NO: 29355 - DNA, 20 bp, Artificial Sequence
  chemically synthesized
gagactattgcaattatctg

SEQ ID NO: 29356 - DNA, 20 bp, Artificial Sequence
  chemically synthesized
agactattgcaattatctgc

SEQ ID NO: 29357 - DNA, 20 bp, Artificial Sequence
  chemically synthesized
actattgcaattatctgcgg

SEQ ID NO: 29358 - DNA, 20 bp, Artificial Sequence
  chemically synthesized
aattatctgcgggagacata

SEQ ID NO: 29359 - DNA, 20 bp, Artificial Sequence
  chemically synthesized
attatctgcgggagacataa

SEQ ID NO: 29360 - DNA, 20 bp, Artificial Sequence
  chemically synthesized
tctgcgggagacataaaggc

SEQ ID NO: 29361 - DNA, 20 bp, Artificial Sequence
  chemically synthesized
cataaaggctagaacctgaa

SEQ ID NO: 29362 - DNA, 20 bp, Artificial Sequence
  chemically synthesized
aaaggctagaacctgaacag

SEQ ID NO: 29363 - DNA, 20 bp, Artificial Sequence
  chemically synthesized
ggctagaacctgaacagtag

SEQ ID NO: 29364 - DNA, 20 bp, Artificial Sequence
  chemically synthesized
gaacagtagcagtacaaaaa

SEQ ID NO: 29365 - DNA, 20 bp, Artificial Sequence
  chemically synthesized
acagtagcagtacaaaaaaa

SEQ ID NO: 29366 - DNA, 20 bp, Artificial Sequence
  chemically synthesized
cagtagcagtacaaaaaaag

SEQ ID NO: 29367 - DNA, 20 bp, Artificial Sequence
  chemically synthesized
agtagcagtacaaaaaaaga

SEQ ID NO: 29368 - DNA, 20 bp, Artificial Sequence
  chemically synthesized
gtagcagtacaaaaaaagag

SEQ ID NO: 29369 - DNA, 20 bp, Artificial Sequence
  chemically synthesized
agcagtacaaaaaaagaggg

SEQ ID NO: 29370 - DNA, 20 bp, Artificial Sequence
  chemically synthesized
aggggagttcaaatgatatt

SEQ ID NO: 29371 - DNA, 20 bp, Artificial Sequence
  chemically synthesized
ggggagttcaaatgatatta

SEQ ID NO: 29372 - DNA, 20 bp, Artificial Sequence
  chemically synthesized
gagttcaaatgatattaagg

SEQ ID NO: 29373 - DNA, 20 bp, Artificial Sequence
  chemically synthesized
ttcaaatgatattaaggaag

SEQ ID NO: 29374 - DNA, 20 bp, Artificial Sequence
  chemically synthesized
aaatgatattaaggaagtag

SEQ ID NO: 29375 - DNA, 20 bp, Artificial Sequence
  chemically synthesized
tgatattaaggaagtagaag

SEQ ID NO: 29376 - DNA, 20 bp, Artificial Sequence
  chemically synthesized
agtggtatgacttaaccatc

SEQ ID NO: 29377 - DNA, 20 bp, Artificial Sequence
  chemically synthesized
gtggtatgacttaaccatct

SEQ ID NO: 29378 - DNA, 20 bp, Artificial Sequence
  chemically synthesized
atgacttaaccatctgggta

SEQ ID NO: 29379 - DNA, 20 bp, Artificial Sequence
  chemically synthesized
acttaaccatctgggtatgg

SEQ ID NO: 29380 - DNA, 20 bp, Artificial Sequence
  chemically synthesized
cttaaccatctgggtatgga

SEQ ID NO: 29381 - DNA, 20 bp, Artificial Sequence
  chemically synthesized
ttaaccatctgggtatggaa

SEQ ID NO: 29382 - DNA, 20 bp, Artificial Sequence
  chemically synthesized
taaccatctgggtatggaag

SEQ ID NO: 29383 - DNA, 20 bp, Artificial Sequence
  chemically synthesized
tctgggtatggaaggggaaa

SEQ ID NO: 29384 - DNA, 20 bp, Artificial Sequence
  chemically synthesized
ggtatggaaggggaaatggc

SEQ ID NO: 29385 - DNA, 20 bp, Artificial Sequence
  chemically synthesized
tatggaaggggaaatggcta

SEQ ID NO: 29386 - DNA, 20 bp, Artificial Sequence
  chemically synthesized
aggggaaatggctagagtct

SEQ ID NO: 29387 - DNA, 20 bp, Artificial Sequence
  chemically synthesized
ggggaaatggctagagtctt

SEQ ID NO: 29388 - DNA, 20 bp, Artificial Sequence
  chemically synthesized
gggaaatggctagagtcttg

SEQ ID NO: 29389 - DNA, 20 bp, Artificial Sequence
  chemically synthesized
ctttgtgtttgatgtgatta

SEQ ID NO: 29390 - DNA, 20 bp, Artificial Sequence
  chemically synthesized
tttgatgtgattatggacca

SEQ ID NO: 29391 - DNA, 20 bp, Artificial Sequence
  chemically synthesized
tggaccacagaataatgtct

SEQ ID NO: 29392 - DNA, 20 bp, Artificial Sequence
  chemically synthesized
gaccacagaataatgtctaa

SEQ ID NO: 29393 - DNA, 20 bp, Artificial Sequence
  chemically synthesized
agaataatgtctaagagaac

SEQ ID NO: 29394 - DNA, 20 bp, Artificial Sequence
  chemically synthesized
gtctaagagaactggctctt

SEQ ID NO: 29395 - DNA, 20 bp, Artificial Sequence
  chemically synthesized
tggctctttagtctgactgc

SEQ ID NO: 29396 - DNA, 20 bp, Artificial Sequence
  chemically synthesized
gctctttagtctgactgcca

SEQ ID NO: 29397 - DNA, 20 bp, Artificial Sequence
  chemically synthesized
agtctgaatcctgaatgttt

SEQ ID NO: 29398 - DNA, 20 bp, Artificial Sequence
  chemically synthesized
aatgttttagtatgttacct

SEQ ID NO: 29399 - DNA, 20 bp, Artificial Sequence
  chemically synthesized
atgttttagtatgttacctt

SEQ ID NO: 29400 - DNA, 20 bp, Artificial Sequence
  chemically synthesized
ttagtatgttaccttgggca

SEQ ID NO: 29401 - DNA, 20 bp, Artificial Sequence
  chemically synthesized
gttaccttgggcaaagccct

SEQ ID NO: 29402 - DNA, 20 bp, Artificial Sequence
  chemically synthesized
tcttcctcattcataaaaat

SEQ ID NO: 29403 - DNA, 20 bp, Artificial Sequence
  chemically synthesized
cattcataaaaataagatga

SEQ ID NO: 29404 - DNA, 20 bp, Artificial Sequence
  chemically synthesized
agatgacagtgcctatctcg

SEQ ID NO: 29405 - DNA, 20 bp, Artificial Sequence
  chemically synthesized
gatgacagtgcctatctcgt

SEQ ID NO: 29406 - DNA, 20 bp, Artificial Sequence
  chemically synthesized
ctatctcgtgggacttttgt

SEQ ID NO: 29407 - DNA, 20 bp, Artificial Sequence
  chemically synthesized
tatctcgtgggacttttgtg

SEQ ID NO: 29408 - DNA, 20 bp, Artificial Sequence
  chemically synthesized
gtgggacttttgtgaggatg

SEQ ID NO: 29409 - DNA, 20 bp, Artificial Sequence
  chemically synthesized
gacttttgtgaggatgaagt

SEQ ID NO: 29410 - DNA, 20 bp, Artificial Sequence
  chemically synthesized
gtgaggatgaagtgagataa

SEQ ID NO: 29411 - DNA, 20 bp, Artificial Sequence
  chemically synthesized
gaagtgagataatggatgca

SEQ ID NO: 29412 - DNA, 20 bp, Artificial Sequence
  chemically synthesized
ataatggatgcaaagttact

SEQ ID NO: 29413 - DNA, 20 bp, Artificial Sequence
  chemically synthesized
ggatgcaaagttactgagca

SEQ ID NO: 29414 - DNA, 20 bp, Artificial Sequence
  chemically synthesized
actgagcacagtgtccaaca

SEQ ID NO: 29415 - DNA, 20 bp, Artificial Sequence
  chemically synthesized
gagcacagtgtccaacacag

SEQ ID NO: 29416 - DNA, 20 bp, Artificial Sequence
  chemically synthesized
cacagtgtccaacacagcag

SEQ ID NO: 29417 - DNA, 20 bp, Artificial Sequence
  chemically synthesized
cagaagcattacatatacat

SEQ ID NO: 29418 - DNA, 20 bp, Artificial Sequence
  chemically synthesized
acatatacattagctattac

SEQ ID NO: 29419 - DNA, 20 bp, Artificial Sequence
  chemically synthesized
actggctacattatgatata

SEQ ID NO: 29420 - DNA, 20 bp, Artificial Sequence
  chemically synthesized
gctacattatgatatacagt

SEQ ID NO: 29421 - DNA, 20 bp, Artificial Sequence
  chemically synthesized
ctacattatgatatacagtt

SEQ ID NO: 29422 - DNA, 20 bp, Artificial Sequence
  chemically synthesized
tacattatgatatacagtta

SEQ ID NO: 29423 - DNA, 20 bp, Artificial Sequence
  chemically synthesized
cattatgatatacagttagg

SEQ ID NO: 29424 - DNA, 20 bp, Artificial Sequence
  chemically synthesized
atgatatacagttagggagt

SEQ ID NO: 29425 - DNA, 20 bp, Artificial Sequence
  chemically synthesized
tatacagttagggagttgga

SEQ ID NO: 29426 - DNA, 20 bp, Artificial Sequence
  chemically synthesized
tggaaagataatctgaaatt

SEQ ID NO: 29427 - DNA, 20 bp, Artificial Sequence
  chemically synthesized
ggaaagataatctgaaattc

SEQ ID NO: 29428 - DNA, 20 bp, Artificial Sequence
  chemically synthesized
aaagataatctgaaattcag

SEQ ID NO: 29429 - DNA, 20 bp, Artificial Sequence
  chemically synthesized
tcaggagacgtatctgacta

SEQ ID NO: 29430 - DNA, 20 bp, Artificial Sequence
  chemically synthesized
caggagacgtatctgactat

SEQ ID NO: 29431 - DNA, 20 bp, Artificial Sequence
  chemically synthesized
agacgtatctgactataggt

SEQ ID NO: 29432 - DNA, 20 bp, Artificial Sequence
  chemically synthesized
tctgactataggtgagtatt

SEQ ID NO: 29433 - DNA, 20 bp, Artificial Sequence
  chemically synthesized
ggaactcattgttctgtaaa

SEQ ID NO: 29434 - DNA, 20 bp, Artificial Sequence
  chemically synthesized
actcattgttctgtaaacag

SEQ ID NO: 29435 - DNA, 20 bp, Artificial Sequence
  chemically synthesized
tgttctgtaaacagtagtta

SEQ ID NO: 29436 - DNA, 20 bp, Artificial Sequence
  chemically synthesized
agtagttacagccacgtgtg

SEQ ID NO: 29437 - DNA, 20 bp, Artificial Sequence
  chemically synthesized
gtagttacagccacgtgtgt

SEQ ID NO: 29438 - DNA, 20 bp, Artificial Sequence
  chemically synthesized
cagccacgtgtgtgggcatc

SEQ ID NO: 29439 - DNA, 20 bp, Artificial Sequence
  chemically synthesized
gccacgtgtgtgggcatctg

SEQ ID NO: 29440 - DNA, 20 bp, Artificial Sequence
  chemically synthesized
cacgtgtgtgggcatctgga

SEQ ID NO: 29441 - DNA, 20 bp, Artificial Sequence
  chemically synthesized
tgtgtgggcatctggagagt

SEQ ID NO: 29442 - DNA, 20 bp, Artificial Sequence
  chemically synthesized
gggcatctggagagtgagca

SEQ ID NO: 29443 - DNA, 20 bp, Artificial Sequence
  chemically synthesized
agcatggatattgtgatacc

SEQ ID NO: 29444 - DNA, 20 bp, Artificial Sequence
  chemically synthesized
ggatattgtgatacctagta

SEQ ID NO: 29445 - DNA, 20 bp, Artificial Sequence
  chemically synthesized
gtgatacctagtacagtgcc

SEQ ID NO: 29446 - DNA, 20 bp, Artificial Sequence
  chemically synthesized
atacctagtacagtgcctgg

SEQ ID NO: 29447 - DNA, 20 bp, Artificial Sequence
  chemically synthesized
cctagtacagtgcctggcag

SEQ ID NO: 29448 - DNA, 20 bp, Artificial Sequence
  chemically synthesized
agtacagtgcctggcagtag

SEQ ID NO: 29449 - DNA, 20 bp, Artificial Sequence
  chemically synthesized
ggcagtagtggttgtatgct

SEQ ID NO: 29450 - DNA, 20 bp, Artificial Sequence
  chemically synthesized
tgctcagtaaattttgttga

SEQ ID NO: 29451 - DNA, 20 bp, Artificial Sequence
  chemically synthesized
gctcagtaaattttgttgac

SEQ ID NO: 29452 - DNA, 20 bp, Artificial Sequence
  chemically synthesized
ctcagtaaattttgttgaca

SEQ ID NO: 29453 - DNA, 20 bp, Artificial Sequence
  chemically synthesized
gtaaattttgttgacagggt

SEQ ID NO: 29454 - DNA, 20 bp, Artificial Sequence
  chemically synthesized
taaattttgttgacagggtc

SEQ ID NO: 29455 - DNA, 20 bp, Artificial Sequence
  chemically synthesized
aaattttgttgacagggtca

SEQ ID NO: 29456 - DNA, 20 bp, Artificial Sequence
  chemically synthesized
tttgttgacagggtcagggc

SEQ ID NO: 29457 - DNA, 20 bp, Artificial Sequence
  chemically synthesized
tgacagggtcagggccggac

SEQ ID NO: 29458 - DNA, 20 bp, Artificial Sequence
  chemically synthesized
gtcagggccggactagactg

SEQ ID NO: 29459 - DNA, 20 bp, Artificial Sequence
  chemically synthesized
gggccggactagactgtggt

SEQ ID NO: 29460 - DNA, 20 bp, Artificial Sequence
  chemically synthesized
cggactagactgtggtaagc

SEQ ID NO: 29461 - DNA, 20 bp, Artificial Sequence
  chemically synthesized
ggactagactgtggtaagca

SEQ ID NO: 29462 - DNA, 20 bp, Artificial Sequence
  chemically synthesized
actgtggtaagcaaggcctg

SEQ ID NO: 29463 - DNA, 20 bp, Artificial Sequence
  chemically synthesized
ctgtggtaagcaaggcctgt

SEQ ID NO: 29464 - DNA, 20 bp, Artificial Sequence
  chemically synthesized
tgtggtaagcaaggcctgta

SEQ ID NO: 29465 - DNA, 20 bp, Artificial Sequence
  chemically synthesized
taaatatacttgtatgcccc

SEQ ID NO: 29466 - DNA, 20 bp, Artificial Sequence
  chemically synthesized
atatacttgtatgccccgag

SEQ ID NO: 29467 - DNA, 20 bp, Artificial Sequence
  chemically synthesized
acttgtatgccccgagaagt

SEQ ID NO: 29468 - DNA, 20 bp, Artificial Sequence
  chemically synthesized
cttgtatgccccgagaagtg

SEQ ID NO: 29469 - DNA, 20 bp, Artificial Sequence
  chemically synthesized
tgtgccctacatgccttgtt

SEQ ID NO: 29470 - DNA, 20 bp, Artificial Sequence
  chemically synthesized
tgtttggttcactcttgtcc

SEQ ID NO: 29471 - DNA, 20 bp, Artificial Sequence
  chemically synthesized
gttcactcttgtcccagccc

SEQ ID NO: 29472 - DNA, 20 bp, Artificial Sequence
  chemically synthesized
actcttgtcccagccctagc

SEQ ID NO: 29473 - DNA, 20 bp, Artificial Sequence
  chemically synthesized
cagccctagcaagtatatat

SEQ ID NO: 29474 - DNA, 20 bp, Artificial Sequence
  chemically synthesized
agccctagcaagtatatata

SEQ ID NO: 29475 - DNA, 20 bp, Artificial Sequence
  chemically synthesized
caagtatatataaggtgaaa

SEQ ID NO: 29476 - DNA, 20 bp, Artificial Sequence
  chemically synthesized
aagtatatataaggtgaaaa

SEQ ID NO: 29477 - DNA, 20 bp, Artificial Sequence
  chemically synthesized
atataaggtgaaaaaggaaa

SEQ ID NO: 29478 - DNA, 20 bp, Artificial Sequence
  chemically synthesized
aggtgaaaaaggaaaaagct

SEQ ID NO: 29479 - DNA, 20 bp, Artificial Sequence
  chemically synthesized
ggtgaaaaaggaaaaagctg

SEQ ID NO: 29480 - DNA, 20 bp, Artificial Sequence
  chemically synthesized
aaaaaggaaaaagctgaggc

SEQ ID NO: 29481 - DNA, 20 bp, Artificial Sequence
  chemically synthesized
aaaggaaaaagctgaggctg

SEQ ID NO: 29482 - DNA, 20 bp, Artificial Sequence
  chemically synthesized
aaaaagctgaggctggagcc

SEQ ID NO: 29483 - DNA, 20 bp, Artificial Sequence
  chemically synthesized
aaaagctgaggctggagcct

SEQ ID NO: 29484 - DNA, 20 bp, Artificial Sequence
  chemically synthesized
aagctgaggctggagcctgg

SEQ ID NO: 29485 - DNA, 20 bp, Artificial Sequence
  chemically synthesized
gctggagcctgggagaaccc

SEQ ID NO: 29486 - DNA, 20 bp, Artificial Sequence
  chemically synthesized
tgggagaaccctggacattt

SEQ ID NO: 29487 - DNA, 20 bp, Artificial Sequence
  chemically synthesized
gggagaaccctggacattta

SEQ ID NO: 29488 - DNA, 20 bp, Artificial Sequence
  chemically synthesized
ggagaaccctggacatttaa

SEQ ID NO: 29489 - DNA, 20 bp, Artificial Sequence
  chemically synthesized
ccctggacatttaagggcca

SEQ ID NO: 29490 - DNA, 20 bp, Artificial Sequence
  chemically synthesized
ctggacatttaagggccatg

SEQ ID NO: 29491 - DNA, 20 bp, Artificial Sequence
  chemically synthesized
ggacatttaagggccatgga

SEQ ID NO: 29492 - DNA, 20 bp, Artificial Sequence
  chemically synthesized
gacatttaagggccatggag

SEQ ID NO: 29493 - DNA, 20 bp, Artificial Sequence
  chemically synthesized
ttaagggccatggagaggaa

SEQ ID NO: 29494 - DNA, 20 bp, Artificial Sequence
  chemically synthesized
taagggccatggagaggaac

SEQ ID NO: 29495 - DNA, 20 bp, Artificial Sequence
  chemically synthesized
agggccatggagaggaacag

SEQ ID NO: 29496 - DNA, 20 bp, Artificial Sequence
  chemically synthesized
gaacaggagttaatcaattc

SEQ ID NO: 29497 - DNA, 20 bp, Artificial Sequence
  chemically synthesized
gagttaatcaattcaagtgc

SEQ ID NO: 29498 - DNA, 20 bp, Artificial Sequence
  chemically synthesized
taatcaattcaagtgctgga

SEQ ID NO: 29499 - DNA, 20 bp, Artificial Sequence
  chemically synthesized
ttcaagtgctggatggataa

SEQ ID NO: 29500 - DNA, 20 bp, Artificial Sequence
  chemically synthesized
tcaagtgctggatggataac

SEQ ID NO: 29501 - DNA, 20 bp, Artificial Sequence
  chemically synthesized
aagtgctggatggataacag

SEQ ID NO: 29502 - DNA, 20 bp, Artificial Sequence
  chemically synthesized
gctggatggataacaggagt

SEQ ID NO: 29503 - DNA, 20 bp, Artificial Sequence
  chemically synthesized
tggatggataacaggagtta

SEQ ID NO: 29504 - DNA, 20 bp, Artificial Sequence
  chemically synthesized
ggataacaggagttagagca

SEQ ID NO: 29505 - DNA, 20 bp, Artificial Sequence
  chemically synthesized
taacaggagttagagcaaag

SEQ ID NO: 29506 - DNA, 20 bp, Artificial Sequence
  chemically synthesized
aacaggagttagagcaaagc

SEQ ID NO: 29507 - DNA, 20 bp, Artificial Sequence
  chemically synthesized
acaggagttagagcaaagcg

SEQ ID NO: 29508 - DNA, 20 bp, Artificial Sequence
  chemically synthesized
gttagagcaaagcggggaac

SEQ ID NO: 29509 - DNA, 20 bp, Artificial Sequence
  chemically synthesized
agcaaagcggggaaccagaa

SEQ ID NO: 29510 - DNA, 20 bp, Artificial Sequence
  chemically synthesized
caaagcggggaaccagaata

SEQ ID NO: 29511 - DNA, 20 bp, Artificial Sequence
  chemically synthesized
aatagagtgattattataaa

SEQ ID NO: 29512 - DNA, 20 bp, Artificial Sequence
  chemically synthesized
tagagtgattattataaaaa

SEQ ID NO: 29513 - DNA, 20 bp, Artificial Sequence
  chemically synthesized
tataaaaagagtttcctaaa

SEQ ID NO: 29514 - DNA, 20 bp, Artificial Sequence
  chemically synthesized
ataaaaagagtttcctaaaa

SEQ ID NO: 29515 - DNA, 20 bp, Artificial Sequence
  chemically synthesized
taaaaagagtttcctaaaaa

SEQ ID NO: 29516 - DNA, 20 bp, Artificial Sequence
  chemically synthesized
aaaagagtttcctaaaaagg

SEQ ID NO: 29517 - DNA, 20 bp, Artificial Sequence
  chemically synthesized
aagagtttcctaaaaaggga

SEQ ID NO: 29518 - DNA, 20 bp, Artificial Sequence
  chemically synthesized
aaaagggagagatcaacaat

SEQ ID NO: 29519 - DNA, 20 bp, Artificial Sequence
  chemically synthesized
atcaacaattagaaattatt

SEQ ID NO: 29520 - DNA, 20 bp, Artificial Sequence
  chemically synthesized
caacaattagaaattattta

SEQ ID NO: 29521 - DNA, 20 bp, Artificial Sequence
  chemically synthesized
caattagaaattatttagag

SEQ ID NO: 29522 - DNA, 20 bp, Artificial Sequence
  chemically synthesized
tagaaattatttagagcagc

SEQ ID NO: 29523 - DNA, 20 bp, Artificial Sequence
  chemically synthesized
ataaactcaaaattattctt

SEQ ID NO: 29524 - DNA, 20 bp, Artificial Sequence
  chemically synthesized
taaactcaaaattattcttt

SEQ ID NO: 29525 - DNA, 20 bp, Artificial Sequence
  chemically synthesized
gtcattcctgattgtgacaa

SEQ ID NO: 29526 - DNA, 20 bp, Artificial Sequence
  chemically synthesized
ttcattatataaatgtgatt

SEQ ID NO: 29527 - DNA, 20 bp, Artificial Sequence
  chemically synthesized
tcattatataaatgtgatta

SEQ ID NO: 29528 - DNA, 20 bp, Artificial Sequence
  chemically synthesized
ttatataaatgtgattaagg

SEQ ID NO: 29529 - DNA, 20 bp, Artificial Sequence
  chemically synthesized
tatataaatgtgattaagga

SEQ ID NO: 29530 - DNA, 20 bp, Artificial Sequence
  chemically synthesized
aaatgtgattaaggaaggaa

SEQ ID NO: 29531 - DNA, 20 bp, Artificial Sequence
  chemically synthesized
atgtgattaaggaaggaaaa

SEQ ID NO: 29532 - DNA, 20 bp, Artificial Sequence
  chemically synthesized
aaggaaggaaaagagctaca

SEQ ID NO: 29533 - DNA, 20 bp, Artificial Sequence
  chemically synthesized
gaaggaaaagagctacacag

SEQ ID NO: 29534 - DNA, 20 bp, Artificial Sequence
  chemically synthesized
gagctacacagaagttatta

SEQ ID NO: 29535 - DNA, 20 bp, Artificial Sequence
  chemically synthesized
gctacacagaagttattaaa

SEQ ID NO: 29536 - DNA, 20 bp, Artificial Sequence
  chemically synthesized
cagaagttattaaagagcta

SEQ ID NO: 29537 - DNA, 20 bp, Artificial Sequence
  chemically synthesized
gaagttattaaagagctaaa

SEQ ID NO: 29538 - DNA, 20 bp, Artificial Sequence
  chemically synthesized
ttaaagagctaaagagaatt

SEQ ID NO: 29539 - DNA, 20 bp, Artificial Sequence
  chemically synthesized
gagaattgagaaatttaaaa

SEQ ID NO: 29540 - DNA, 20 bp, Artificial Sequence
  chemically synthesized
aattgagaaatttaaaacag

SEQ ID NO: 29541 - DNA, 20 bp, Artificial Sequence
  chemically synthesized
gagaaatttaaaacagaaga

SEQ ID NO: 29542 - DNA, 20 bp, Artificial Sequence
  chemically synthesized
aaatttaaaacagaagaaag

SEQ ID NO: 29543 - DNA, 20 bp, Artificial Sequence
  chemically synthesized
aatttaaaacagaagaaagt

SEQ ID NO: 29544 - DNA, 20 bp, Artificial Sequence
  chemically synthesized
atttaaaacagaagaaagta

SEQ ID NO: 29545 - DNA, 20 bp, Artificial Sequence
  chemically synthesized
agaaagtagggccaacatga

SEQ ID NO: 29546 - DNA, 20 bp, Artificial Sequence
  chemically synthesized
gaaagtagggccaacatgaa

SEQ ID NO: 29547 - DNA, 20 bp, Artificial Sequence
  chemically synthesized
aagtagggccaacatgaaag

SEQ ID NO: 29548 - DNA, 20 bp, Artificial Sequence
  chemically synthesized
tagggccaacatgaaaggag

SEQ ID NO: 29549 - DNA, 20 bp, Artificial Sequence
  chemically synthesized
agggccaacatgaaaggagt

SEQ ID NO: 29550 - DNA, 20 bp, Artificial Sequence
  chemically synthesized
gggccaacatgaaaggagta

SEQ ID NO: 29551 - DNA, 20 bp, Artificial Sequence
  chemically synthesized
gccaacatgaaaggagtagg

SEQ ID NO: 29552 - DNA, 20 bp, Artificial Sequence
  chemically synthesized
atgaaaggagtagggagaaa

SEQ ID NO: 29553 - DNA, 20 bp, Artificial Sequence
  chemically synthesized
gaaaggagtagggagaaaaa

SEQ ID NO: 29554 - DNA, 20 bp, Artificial Sequence
  chemically synthesized
tagggagaaaaagagataac

SEQ ID NO: 29555 - DNA, 20 bp, Artificial Sequence
  chemically synthesized
ctgatcctgccaacacctgt

SEQ ID NO: 29556 - DNA, 20 bp, Artificial Sequence
  chemically synthesized
tcctgccaacacctgtgaga

SEQ ID NO: 29557 - DNA, 20 bp, Artificial Sequence
  chemically synthesized
aacctaatttacatttgaca

SEQ ID NO: 29558 - DNA, 20 bp, Artificial Sequence
  chemically synthesized
aatttacatttgacaaagtt

SEQ ID NO: 29559 - DNA, 20 bp, Artificial Sequence
  chemically synthesized
atttacatttgacaaagtta

SEQ ID NO: 29560 - DNA, 20 bp, Artificial Sequence
  chemically synthesized
catttgacaaagttaaggtt

SEQ ID NO: 29561 - DNA, 20 bp, Artificial Sequence
  chemically synthesized
tttgacaaagttaaggttca

SEQ ID NO: 29562 - DNA, 20 bp, Artificial Sequence
  chemically synthesized
agagcttgtgtgacttgtcc

SEQ ID NO: 29563 - DNA, 20 bp, Artificial Sequence
  chemically synthesized
gagcttgtgtgacttgtcca

SEQ ID NO: 29564 - DNA, 20 bp, Artificial Sequence
  chemically synthesized
gtgtgacttgtccaaggtca

SEQ ID NO: 29565 - DNA, 20 bp, Artificial Sequence
  chemically synthesized
tgtgacttgtccaaggtcac

SEQ ID NO: 29566 - DNA, 20 bp, Artificial Sequence
  chemically synthesized
cttgtccaaggtcacaggtc

SEQ ID NO: 29567 - DNA, 20 bp, Artificial Sequence
  chemically synthesized
tgtccaaggtcacaggtcta

SEQ ID NO: 29568 - DNA, 20 bp, Artificial Sequence
  chemically synthesized
gtccaaggtcacaggtctag

SEQ ID NO: 29569 - DNA, 20 bp, Artificial Sequence
  chemically synthesized
ccaaggtcacaggtctagag

SEQ ID NO: 29570 - DNA, 20 bp, Artificial Sequence
  chemically synthesized
caaggtcacaggtctagagg

SEQ ID NO: 29571 - DNA, 20 bp, Artificial Sequence
  chemically synthesized
ggtcacaggtctagaggagg

SEQ ID NO: 29572 - DNA, 20 bp, Artificial Sequence
  chemically synthesized
ttctgtctgatctgattcta

SEQ ID NO: 29573 - DNA, 20 bp, Artificial Sequence
  chemically synthesized
tttcactcaaccacactgta

SEQ ID NO: 29574 - DNA, 20 bp, Artificial Sequence
  chemically synthesized
actcaaccacactgtacagt

SEQ ID NO: 29575 - DNA, 20 bp, Artificial Sequence
  chemically synthesized
gtacagtcagctctccttgt

SEQ ID NO: 29576 - DNA, 20 bp, Artificial Sequence
  chemically synthesized
agctctccttgtgagttcca

SEQ ID NO: 29577 - DNA, 20 bp, Artificial Sequence
  chemically synthesized
ccttgtgagttccacagcca

SEQ ID NO: 29578 - DNA, 20 bp, Artificial Sequence
  chemically synthesized
gccacagattcaattaactg

SEQ ID NO: 29579 - DNA, 20 bp, Artificial Sequence
  chemically synthesized
actgcagatcaaaaatattc

SEQ ID NO: 29580 - DNA, 20 bp, Artificial Sequence
  chemically synthesized
aaaaatattcaagaaaaaaa

SEQ ID NO: 29581 - DNA, 20 bp, Artificial Sequence
  chemically synthesized
atattcaagaaaaaaatgga

SEQ ID NO: 29582 - DNA, 20 bp, Artificial Sequence
  chemically synthesized
gcatctctactgaacatgta

SEQ ID NO: 29583 - DNA, 20 bp, Artificial Sequence
  chemically synthesized
tcattattccctaaacaata

SEQ ID NO: 29584 - DNA, 20 bp, Artificial Sequence
  chemically synthesized
cagcataacaactatttaca

SEQ ID NO: 29585 - DNA, 20 bp, Artificial Sequence
  chemically synthesized
acatagcatttacattgtat

SEQ ID NO: 29586 - DNA, 20 bp, Artificial Sequence
  chemically synthesized
tttacattgtattagctatt

SEQ ID NO: 29587 - DNA, 20 bp, Artificial Sequence
  chemically synthesized
tacattgtattagctattaa

SEQ ID NO: 29588 - DNA, 20 bp, Artificial Sequence
  chemically synthesized
attagctattaagagaaacc

SEQ ID NO: 29589 - DNA, 20 bp, Artificial Sequence
  chemically synthesized
tagctattaagagaaaccta

SEQ ID NO: 29590 - DNA, 20 bp, Artificial Sequence
  chemically synthesized
agaaacctagagatgattta

SEQ ID NO: 29591 - DNA, 20 bp, Artificial Sequence
  chemically synthesized
tagagatgatttaaagtaca

SEQ ID NO: 29592 - DNA, 20 bp, Artificial Sequence
  chemically synthesized
agagatgatttaaagtacaa

SEQ ID NO: 29593 - DNA, 20 bp, Artificial Sequence
  chemically synthesized
agatgatttaaagtacaaag

SEQ ID NO: 29594 - DNA, 20 bp, Artificial Sequence
  chemically synthesized
gatgatttaaagtacaaagg

SEQ ID NO: 29595 - DNA, 20 bp, Artificial Sequence
  chemically synthesized
agtacaaaggaggatgtgtt

SEQ ID NO: 29596 - DNA, 20 bp, Artificial Sequence
  chemically synthesized
gtacaaaggaggatgtgttt

SEQ ID NO: 29597 - DNA, 20 bp, Artificial Sequence
  chemically synthesized
gtgtttaggttatatgcaaa

SEQ ID NO: 29598 - DNA, 20 bp, Artificial Sequence
  chemically synthesized
ttaggttatatgcaaatagt

SEQ ID NO: 29599 - DNA, 20 bp, Artificial Sequence
  chemically synthesized
atagtaagccatttttatat

SEQ ID NO: 29600 - DNA, 20 bp, Artificial Sequence
  chemically synthesized
agtaagccatttttatatcg

SEQ ID NO: 29601 - DNA, 20 bp, Artificial Sequence
  chemically synthesized
catttttatatcggagactt

SEQ ID NO: 29602 - DNA, 20 bp, Artificial Sequence
  chemically synthesized
atcggagacttgagcatcca

SEQ ID NO: 29603 - DNA, 20 bp, Artificial Sequence
  chemically synthesized
tccacagatcttgatatttg

SEQ ID NO: 29604 - DNA, 20 bp, Artificial Sequence
  chemically synthesized
ccacagatcttgatatttgc

SEQ ID NO: 29605 - DNA, 20 bp, Artificial Sequence
  chemically synthesized
cacagatcttgatatttgca

SEQ ID NO: 29606 - DNA, 20 bp, Artificial Sequence
  chemically synthesized
acagatcttgatatttgcag

SEQ ID NO: 29607 - DNA, 20 bp, Artificial Sequence
  chemically synthesized
cagatcttgatatttgcagg

SEQ ID NO: 29608 - DNA, 20 bp, Artificial Sequence
  chemically synthesized
gtcttgccaccaattttcca

SEQ ID NO: 29609 - DNA, 20 bp, Artificial Sequence
  chemically synthesized
accaattttccatggatact

SEQ ID NO: 29610 - DNA, 20 bp, Artificial Sequence
  chemically synthesized
ccaattttccatggatactg

SEQ ID NO: 29611 - DNA, 20 bp, Artificial Sequence
  chemically synthesized
tactgaggaacgactgtaaa

SEQ ID NO: 29612 - DNA, 20 bp, Artificial Sequence
  chemically synthesized
ggaacgactgtaaatggatg

SEQ ID NO: 29613 - DNA, 20 bp, Artificial Sequence
  chemically synthesized
gaacgactgtaaatggatgc

SEQ ID NO: 29614 - DNA, 20 bp, Artificial Sequence
  chemically synthesized
actgtaaatggatgcaggca

SEQ ID NO: 29615 - DNA, 20 bp, Artificial Sequence
  chemically synthesized
atgcaggcatggatgctatt

SEQ ID NO: 29616 - DNA, 20 bp, Artificial Sequence
  chemically synthesized
tgcaggcatggatgctattt

SEQ ID NO: 29617 - DNA, 20 bp, Artificial Sequence
  chemically synthesized
caggcatggatgctatttag

SEQ ID NO: 29618 - DNA, 20 bp, Artificial Sequence
  chemically synthesized
ggatgctatttaggagtgtc

SEQ ID NO: 29619 - DNA, 20 bp, Artificial Sequence
  chemically synthesized
gatgctatttaggagtgtcc

SEQ ID NO: 29620 - DNA, 20 bp, Artificial Sequence
  chemically synthesized
atgctatttaggagtgtcca

SEQ ID NO: 29621 - DNA, 20 bp, Artificial Sequence
  chemically synthesized
atttaggagtgtccagggcc

SEQ ID NO: 29622 - DNA, 20 bp, Artificial Sequence
  chemically synthesized
gtgtccagggccaagtaaat

SEQ ID NO: 29623 - DNA, 20 bp, Artificial Sequence
  chemically synthesized
ggccaagtaaatgagttgct

SEQ ID NO: 29624 - DNA, 20 bp, Artificial Sequence
  chemically synthesized
caagtaaatgagttgctgag

SEQ ID NO: 29625 - DNA, 20 bp, Artificial Sequence
  chemically synthesized
agtaaatgagttgctgagca

SEQ ID NO: 29626 - DNA, 20 bp, Artificial Sequence
  chemically synthesized
taaatgagttgctgagcaga

SEQ ID NO: 29627 - DNA, 20 bp, Artificial Sequence
  chemically synthesized
aaatgagttgctgagcagag

SEQ ID NO: 29628 - DNA, 20 bp, Artificial Sequence
  chemically synthesized
tgagttgctgagcagagagg

SEQ ID NO: 29629 - DNA, 20 bp, Artificial Sequence
  chemically synthesized
gagttgctgagcagagaggt

SEQ ID NO: 29630 - DNA, 20 bp, Artificial Sequence
  chemically synthesized
ttgctgagcagagaggtggg

SEQ ID NO: 29631 - DNA, 20 bp, Artificial Sequence
  chemically synthesized
gctgagcagagaggtgggtg

SEQ ID NO: 29632 - DNA, 20 bp, Artificial Sequence
  chemically synthesized
ctgagcagagaggtgggtgg

SEQ ID NO: 29633 - DNA, 20 bp, Artificial Sequence
  chemically synthesized
gagaggtgggtggaggctgt

SEQ ID NO: 29634 - DNA, 20 bp, Artificial Sequence
  chemically synthesized
agaggtgggtggaggctgtg

SEQ ID NO: 29635 - DNA, 20 bp, Artificial Sequence
  chemically synthesized
ggctgtgaggcatcaatatg

SEQ ID NO: 29636 - DNA, 20 bp, Artificial Sequence
  chemically synthesized
tgtgaggcatcaatatgtgg

SEQ ID NO: 29637 - DNA, 20 bp, Artificial Sequence
  chemically synthesized
ggtggcatccatctgcattt

SEQ ID NO: 29638 - DNA, 20 bp, Artificial Sequence
  chemically synthesized
ttggtgatttttttccttca

SEQ ID NO: 29639 - DNA, 20 bp, Artificial Sequence
  chemically synthesized
tttttttccttcacagtcct

SEQ ID NO: 29640 - DNA, 20 bp, Artificial Sequence
  chemically synthesized
cttcacagtcctcggctgtc

SEQ ID NO: 29641 - DNA, 20 bp, Artificial Sequence
  chemically synthesized
ttcacagtcctcggctgtct

SEQ ID NO: 29642 - DNA, 20 bp, Artificial Sequence
  chemically synthesized
acagtcctcggctgtctggg

SEQ ID NO: 29643 - DNA, 20 bp, Artificial Sequence
  chemically synthesized
agtcctcggctgtctgggaa

SEQ ID NO: 29644 - DNA, 20 bp, Artificial Sequence
  chemically synthesized
cctcggctgtctgggaagag

SEQ ID NO: 29645 - DNA, 20 bp, Artificial Sequence
  chemically synthesized
ctcggctgtctgggaagaga

SEQ ID NO: 29646 - DNA, 20 bp, Artificial Sequence
  chemically synthesized
tgtctgggaagagaaggatg

SEQ ID NO: 29647 - DNA, 20 bp, Artificial Sequence
  chemically synthesized
gtctgggaagagaaggatga

SEQ ID NO: 29648 - DNA, 20 bp, Artificial Sequence
  chemically synthesized
tgggaagagaaggatgaagg

SEQ ID NO: 29649 - DNA, 20 bp, Artificial Sequence
  chemically synthesized
aagagaaggatgaaggcaga

SEQ ID NO: 29650 - DNA, 20 bp, Artificial Sequence
  chemically synthesized
ggcagatggctgctccaatt

SEQ ID NO: 29651 - DNA, 20 bp, Artificial Sequence
  chemically synthesized
gcagatggctgctccaattt

SEQ ID NO: 29652 - DNA, 20 bp, Artificial Sequence
  chemically synthesized
cagatggctgctccaattta

SEQ ID NO: 29653 - DNA, 20 bp, Artificial Sequence
  chemically synthesized
agatggctgctccaatttag

SEQ ID NO: 29654 - DNA, 20 bp, Artificial Sequence
  chemically synthesized
ggctgctccaatttaggggc

SEQ ID NO: 29655 - DNA, 20 bp, Artificial Sequence
  chemically synthesized
gctgctccaatttaggggct

SEQ ID NO: 29656 - DNA, 20 bp, Artificial Sequence
  chemically synthesized
caatttaggggctaggattg

SEQ ID NO: 29657 - DNA, 20 bp, Artificial Sequence
  chemically synthesized
aatttaggggctaggattgc

SEQ ID NO: 29658 - DNA, 20 bp, Artificial Sequence
  chemically synthesized
atttaggggctaggattgca

SEQ ID NO: 29659 - DNA, 20 bp, Artificial Sequence
  chemically synthesized
taggggctaggattgcaggg

SEQ ID NO: 29660 - DNA, 20 bp, Artificial Sequence
  chemically synthesized
aggggctaggattgcagggt

SEQ ID NO: 29661 - DNA, 20 bp, Artificial Sequence
  chemically synthesized
ctaggattgcagggtgggca

SEQ ID NO: 29662 - DNA, 20 bp, Artificial Sequence
  chemically synthesized
gtgggcacagcattgcaaac

SEQ ID NO: 29663 - DNA, 20 bp, Artificial Sequence
  chemically synthesized
cacagcattgcaaacgagtg

SEQ ID NO: 29664 - DNA, 20 bp, Artificial Sequence
  chemically synthesized
acagcattgcaaacgagtga

SEQ ID NO: 29665 - DNA, 20 bp, Artificial Sequence
  chemically synthesized
gcaaacgagtgaaggaaatt

SEQ ID NO: 29666 - DNA, 20 bp, Artificial Sequence
  chemically synthesized
gtgaaggaaattgagaaata

SEQ ID NO: 29667 - DNA, 20 bp, Artificial Sequence
  chemically synthesized
attgagaaatatggccaatg

SEQ ID NO: 29668 - DNA, 20 bp, Artificial Sequence
  chemically synthesized
tgagaaatatggccaatgaa

SEQ ID NO: 29669 - DNA, 20 bp, Artificial Sequence
  chemically synthesized
atatggccaatgaagagttg

SEQ ID NO: 29670 - DNA, 20 bp, Artificial Sequence
  chemically synthesized
atggccaatgaagagttgaa

SEQ ID NO: 29671 - DNA, 20 bp, Artificial Sequence
  chemically synthesized
ggccaatgaagagttgaaga

SEQ ID NO: 29672 - DNA, 20 bp, Artificial Sequence
  chemically synthesized
gccaatgaagagttgaagag

SEQ ID NO: 29673 - DNA, 20 bp, Artificial Sequence
  chemically synthesized
tgaagagttgaagagaggcc

SEQ ID NO: 29674 - DNA, 20 bp, Artificial Sequence
  chemically synthesized
agttgaagagaggcctggca

SEQ ID NO: 29675 - DNA, 20 bp, Artificial Sequence
  chemically synthesized
tgaagagaggcctggcatgg

SEQ ID NO: 29676 - DNA, 20 bp, Artificial Sequence
  chemically synthesized
gtggctcacacctataatcc

SEQ ID NO: 29677 - DNA, 20 bp, Artificial Sequence
  chemically synthesized
acctataatcccagcacttt

SEQ ID NO: 29678 - DNA, 20 bp, Artificial Sequence
  chemically synthesized
ctataatcccagcactttca

SEQ ID NO: 29679 - DNA, 20 bp, Artificial Sequence
  chemically synthesized
tataatcccagcactttcag

SEQ ID NO: 29680 - DNA, 20 bp, Artificial Sequence
  chemically synthesized
tcccagcactttcagaggcc

SEQ ID NO: 29681 - DNA, 20 bp, Artificial Sequence
  chemically synthesized
cccagcactttcagaggccc

SEQ ID NO: 29682 - DNA, 20 bp, Artificial Sequence
  chemically synthesized
agcactttcagaggcccagg

SEQ ID NO: 29683 - DNA, 20 bp, Artificial Sequence
  chemically synthesized
gcactttcagaggcccaggc

SEQ ID NO: 29684 - DNA, 20 bp, Artificial Sequence
  chemically synthesized
ctttcagaggcccaggcagg

SEQ ID NO: 29685 - DNA, 20 bp, Artificial Sequence
  chemically synthesized
cccaggcaggcagatcactt

SEQ ID NO: 29686 - DNA, 20 bp, Artificial Sequence
  chemically synthesized
ccaggcaggcagatcacttg

SEQ ID NO: 29687 - DNA, 20 bp, Artificial Sequence
  chemically synthesized
gcaggcagatcacttgaggt

SEQ ID NO: 29688 - DNA, 20 bp, Artificial Sequence
  chemically synthesized
caggcagatcacttgaggtc

SEQ ID NO: 29689 - DNA, 20 bp, Artificial Sequence
  chemically synthesized
ggcagatcacttgaggtcag

SEQ ID NO: 29690 - DNA, 20 bp, Artificial Sequence
  chemically synthesized
tgaggtcaggagttcgacac

SEQ ID NO: 29691 - DNA, 20 bp, Artificial Sequence
  chemically synthesized
tcaggagttcgacaccagcc

SEQ ID NO: 29692 - DNA, 20 bp, Artificial Sequence
  chemically synthesized
tcgacaccagcctggccaac

SEQ ID NO: 29693 - DNA, 20 bp, Artificial Sequence
  chemically synthesized
cgacaccagcctggccaaca

SEQ ID NO: 29694 - DNA, 20 bp, Artificial Sequence
  chemically synthesized
gcctggccaacaaggtgaaa

SEQ ID NO: 29695 - DNA, 20 bp, Artificial Sequence
  chemically synthesized
aaggtgaaatggtgaaaccc

SEQ ID NO: 29696 - DNA, 20 bp, Artificial Sequence
  chemically synthesized
tttactaaaaatacaaaaat

SEQ ID NO: 29697 - DNA, 20 bp, Artificial Sequence
  chemically synthesized
ctaaaaatacaaaaattagc

SEQ ID NO: 29698 - DNA, 20 bp, Artificial Sequence
  chemically synthesized
taaaaatacaaaaattagct

SEQ ID NO: 29699 - DNA, 20 bp, Artificial Sequence
  chemically synthesized
atacaaaaattagctgggca

SEQ ID NO: 29700 - DNA, 20 bp, Artificial Sequence
  chemically synthesized
caaaaattagctgggcatgg

SEQ ID NO: 29701 - DNA, 20 bp, Artificial Sequence
  chemically synthesized
aaattagctgggcatggtgg

SEQ ID NO: 29702 - DNA, 20 bp, Artificial Sequence
  chemically synthesized
aattagctgggcatggtggc

SEQ ID NO: 29703 - DNA, 20 bp, Artificial Sequence
  chemically synthesized
gtggcgggtgcctgtaatcc

SEQ ID NO: 29704 - DNA, 20 bp, Artificial Sequence
  chemically synthesized
tgcctgtaatcccagctact

SEQ ID NO: 29705 - DNA, 20 bp, Artificial Sequence
  chemically synthesized
gcctgtaatcccagctactt

SEQ ID NO: 29706 - DNA, 20 bp, Artificial Sequence
  chemically synthesized
ctgtaatcccagctacttgg

SEQ ID NO: 29707 - DNA, 20 bp, Artificial Sequence
  chemically synthesized
tgtaatcccagctacttggg

SEQ ID NO: 29708 - DNA, 20 bp, Artificial Sequence
  chemically synthesized
tcccagctacttgggaggct

SEQ ID NO: 29709 - DNA, 20 bp, Artificial Sequence
  chemically synthesized
cccagctacttgggaggctg

SEQ ID NO: 29710 - DNA, 20 bp, Artificial Sequence
  chemically synthesized
agctacttgggaggctgagg

SEQ ID NO: 29711 - DNA, 20 bp, Artificial Sequence
  chemically synthesized
gctacttgggaggctgaggc

SEQ ID NO: 29712 - DNA, 20 bp, Artificial Sequence
  chemically synthesized
tacttgggaggctgaggcag

SEQ ID NO: 29713 - DNA, 20 bp, Artificial Sequence
  chemically synthesized
gggaggctgaggcaggagaa

SEQ ID NO: 29714 - DNA, 20 bp, Artificial Sequence
  chemically synthesized
gcaggagaatagcttgaacc

SEQ ID NO: 29715 - DNA, 20 bp, Artificial Sequence
  chemically synthesized
caggagaatagcttgaacct

SEQ ID NO: 29716 - DNA, 20 bp, Artificial Sequence
  chemically synthesized
ggagaatagcttgaacctgg

SEQ ID NO: 29717 - DNA, 20 bp, Artificial Sequence
  chemically synthesized
aatagcttgaacctgggaga

SEQ ID NO: 29718 - DNA, 20 bp, Artificial Sequence
  chemically synthesized
tagcttgaacctgggagatg

SEQ ID NO: 29719 - DNA, 20 bp, Artificial Sequence
  chemically synthesized
agcttgaacctgggagatgg

SEQ ID NO: 29720 - DNA, 20 bp, Artificial Sequence
  chemically synthesized
aacctgggagatggaggttg

SEQ ID NO: 29721 - DNA, 20 bp, Artificial Sequence
  chemically synthesized
tgggagatggaggttgcagt

SEQ ID NO: 29722 - DNA, 20 bp, Artificial Sequence
  chemically synthesized
gatggaggttgcagtgagct

SEQ ID NO: 29723 - DNA, 20 bp, Artificial Sequence
  chemically synthesized
gagatcgcaccactgcactc

SEQ ID NO: 29724 - DNA, 20 bp, Artificial Sequence
  chemically synthesized
cgcaccactgcactccagcc

SEQ ID NO: 29725 - DNA, 20 bp, Artificial Sequence
  chemically synthesized
gcaccactgcactccagcct

SEQ ID NO: 29726 - DNA, 20 bp, Artificial Sequence
  chemically synthesized
ctgcactccagcctgggcga

SEQ ID NO: 29727 - DNA, 20 bp, Artificial Sequence
  chemically synthesized
gcactccagcctgggcgaca

SEQ ID NO: 29728 - DNA, 20 bp, Artificial Sequence
  chemically synthesized
tccagcctgggcgacagagc

SEQ ID NO: 29729 - DNA, 20 bp, Artificial Sequence
  chemically synthesized
caagactctgtcaaaaaaaa

SEQ ID NO: 29730 - DNA, 20 bp, Artificial Sequence
  chemically synthesized
agactctgtcaaaaaaaaaa

SEQ ID NO: 29731 - DNA, 20 bp, Artificial Sequence
  chemically synthesized
tgtcaaaaaaaaaagagttg

SEQ ID NO: 29732 - DNA, 20 bp, Artificial Sequence
  chemically synthesized
tcaaaaaaaaaagagttgaa

SEQ ID NO: 29733 - DNA, 20 bp, Artificial Sequence
  chemically synthesized
aaaaaagagttgaagagaaa

SEQ ID NO: 29734 - DNA, 20 bp, Artificial Sequence
  chemically synthesized
agagttgaagagaaaaagtc

SEQ ID NO: 29735 - DNA, 20 bp, Artificial Sequence
  chemically synthesized
gagttgaagagaaaaagtct

SEQ ID NO: 29736 - DNA, 20 bp, Artificial Sequence
  chemically synthesized
aaaagtctaggctaaattca

SEQ ID NO: 29737 - DNA, 20 bp, Artificial Sequence
  chemically synthesized
aggctaaattcaaagaaaaa

SEQ ID NO: 29738 - DNA, 20 bp, Artificial Sequence
  chemically synthesized
taaattcaaagaaaaaaagt

SEQ ID NO: 29739 - DNA, 20 bp, Artificial Sequence
  chemically synthesized
aagaaaaaaagtgagcccaa

SEQ ID NO: 29740 - DNA, 20 bp, Artificial Sequence
  chemically synthesized
agaaaaaaagtgagcccaaa

SEQ ID NO: 29741 - DNA, 20 bp, Artificial Sequence
  chemically synthesized
gtgagcccaaaaggaacttg

SEQ ID NO: 29742 - DNA, 20 bp, Artificial Sequence
  chemically synthesized
gagcccaaaaggaacttgca

SEQ ID NO: 29743 - DNA, 20 bp, Artificial Sequence
  chemically synthesized
ccaaaaggaacttgcagagc

SEQ ID NO: 29744 - DNA, 20 bp, Artificial Sequence
  chemically synthesized
caaaaggaacttgcagagca

SEQ ID NO: 29745 - DNA, 20 bp, Artificial Sequence
  chemically synthesized
aaaaggaacttgcagagcaa

SEQ ID NO: 29746 - DNA, 20 bp, Artificial Sequence
  chemically synthesized
gaacttgcagagcaagggaa

SEQ ID NO: 29747 - DNA, 20 bp, Artificial Sequence
  chemically synthesized
cttgcagagcaagggaaaag

SEQ ID NO: 29748 - DNA, 20 bp, Artificial Sequence
  chemically synthesized
ttgcagagcaagggaaaagc

SEQ ID NO: 29749 - DNA, 20 bp, Artificial Sequence
  chemically synthesized
tgcagagcaagggaaaagca

SEQ ID NO: 29750 - DNA, 20 bp, Artificial Sequence
  chemically synthesized
aagggaaaagcagggatgtc

SEQ ID NO: 29751 - DNA, 20 bp, Artificial Sequence
  chemically synthesized
agggaaaagcagggatgtca

SEQ ID NO: 29752 - DNA, 20 bp, Artificial Sequence
  chemically synthesized
gggaaaagcagggatgtcaa

SEQ ID NO: 29753 - DNA, 20 bp, Artificial Sequence
  chemically synthesized
aagcagggatgtcaagggac

SEQ ID NO: 29754 - DNA, 20 bp, Artificial Sequence
  chemically synthesized
agggactagaacactccata

SEQ ID NO: 29755 - DNA, 20 bp, Artificial Sequence
  chemically synthesized
agaacactccataaagtgaa

SEQ ID NO: 29756 - DNA, 20 bp, Artificial Sequence
  chemically synthesized
tgaacagctgcaatgaaaat

SEQ ID NO: 29757 - DNA, 20 bp, Artificial Sequence
  chemically synthesized
gaacagctgcaatgaaaata

SEQ ID NO: 29758 - DNA, 20 bp, Artificial Sequence
  chemically synthesized
aacagctgcaatgaaaataa

SEQ ID NO: 29759 - DNA, 20 bp, Artificial Sequence
  chemically synthesized
agctgcaatgaaaataaggg

SEQ ID NO: 29760 - DNA, 20 bp, Artificial Sequence
  chemically synthesized
gcaatgaaaataagggaaga

SEQ ID NO: 29761 - DNA, 20 bp, Artificial Sequence
  chemically synthesized
gaaaataagggaagaaagtt

SEQ ID NO: 29762 - DNA, 20 bp, Artificial Sequence
  chemically synthesized
ctttcctttctcttcctttt

SEQ ID NO: 29763 - DNA, 20 bp, Artificial Sequence
  chemically synthesized
ttcctttctcttcctttttg

SEQ ID NO: 29764 - DNA, 20 bp, Artificial Sequence
  chemically synthesized
tcttcctttttggagttaat

SEQ ID NO: 29765 - DNA, 20 bp, Artificial Sequence
  chemically synthesized
cttcctttttggagttaatc

SEQ ID NO: 29766 - DNA, 20 bp, Artificial Sequence
  chemically synthesized
cctttttggagttaatcagg

SEQ ID NO: 29767 - DNA, 20 bp, Artificial Sequence
  chemically synthesized
ttttggagttaatcaggaag

SEQ ID NO: 29768 - DNA, 20 bp, Artificial Sequence
  chemically synthesized
ggaagtagtcccaaataccc

SEQ ID NO: 29769 - DNA, 20 bp, Artificial Sequence
  chemically synthesized
gtagtcccaaataccccaga

SEQ ID NO: 29770 - DNA, 20 bp, Artificial Sequence
  chemically synthesized
ccccagaaagttcatcttat

SEQ ID NO: 29771 - DNA, 20 bp, Artificial Sequence
  chemically synthesized
aagttcatcttataagccct

SEQ ID NO: 29772 - DNA, 20 bp, Artificial Sequence
  chemically synthesized
tataagcccttggtcctctt

SEQ ID NO: 29773 - DNA, 20 bp, Artificial Sequence
  chemically synthesized
agcccttggtcctcttgaga

SEQ ID NO: 29774 - DNA, 20 bp, Artificial Sequence
  chemically synthesized
tggtcctcttgagatggtat

SEQ ID NO: 29775 - DNA, 20 bp, Artificial Sequence
  chemically synthesized
gatggtatcagatatattgc

SEQ ID NO: 29776 - DNA, 20 bp, Artificial Sequence
  chemically synthesized
gatatattgctagacccttg

SEQ ID NO: 29777 - DNA, 20 bp, Artificial Sequence
  chemically synthesized
tattgctagacccttgaaga

SEQ ID NO: 29778 - DNA, 20 bp, Artificial Sequence
  chemically synthesized
attgctagacccttgaagaa

SEQ ID NO: 29779 - DNA, 20 bp, Artificial Sequence
  chemically synthesized
cttgaagaaaggaacaactc

SEQ ID NO: 29780 - DNA, 20 bp, Artificial Sequence
  chemically synthesized
ttgaagaaaggaacaactcc

SEQ ID NO: 29781 - DNA, 20 bp, Artificial Sequence
  chemically synthesized
acaactccaggcaacttctt

SEQ ID NO: 29782 - DNA, 20 bp, Artificial Sequence
  chemically synthesized
caaacacatgtgtgtgtata

SEQ ID NO: 29783 - DNA, 20 bp, Artificial Sequence
  chemically synthesized
agccatgcattccttaacaa

SEQ ID NO: 29784 - DNA, 20 bp, Artificial Sequence
  chemically synthesized
gccatgcattccttaacaat

SEQ ID NO: 29785 - DNA, 20 bp, Artificial Sequence
  chemically synthesized
ccatgcattccttaacaatg

SEQ ID NO: 29786 - DNA, 20 bp, Artificial Sequence
  chemically synthesized
taacaatggggatatattct

SEQ ID NO: 29787 - DNA, 20 bp, Artificial Sequence
  chemically synthesized
attctgagaaatgtgtcatt

SEQ ID NO: 29788 - DNA, 20 bp, Artificial Sequence
  chemically synthesized
tcatcattgtgcgaacataa

SEQ ID NO: 29789 - DNA, 20 bp, Artificial Sequence
  chemically synthesized
atcattgtgcgaacataata

SEQ ID NO: 29790 - DNA, 20 bp, Artificial Sequence
  chemically synthesized
tgtacttacctaaacctaaa

SEQ ID NO: 29791 - DNA, 20 bp, Artificial Sequence
  chemically synthesized
ttacctaaacctaaatggta

SEQ ID NO: 29792 - DNA, 20 bp, Artificial Sequence
  chemically synthesized
ggtatagcttactacatacc

SEQ ID NO: 29793 - DNA, 20 bp, Artificial Sequence
  chemically synthesized
gtatagcttactacatacct

SEQ ID NO: 29794 - DNA, 20 bp, Artificial Sequence
  chemically synthesized
atacctaggttgtattgatg

SEQ ID NO: 29795 - DNA, 20 bp, Artificial Sequence
  chemically synthesized
ttgatgtggcctattgctcc

SEQ ID NO: 29796 - DNA, 20 bp, Artificial Sequence
  chemically synthesized
tgatgtggcctattgctcct

SEQ ID NO: 29797 - DNA, 20 bp, Artificial Sequence
  chemically synthesized
gcctattgctcctaggctcc

SEQ ID NO: 29798 - DNA, 20 bp, Artificial Sequence
  chemically synthesized
cctattgctcctaggctcct

SEQ ID NO: 29799 - DNA, 20 bp, Artificial Sequence
  chemically synthesized
tcctgggctgcaaacctgta

SEQ ID NO: 29800 - DNA, 20 bp, Artificial Sequence
  chemically synthesized
tgtgactgtactgaacactg

SEQ ID NO: 29801 - DNA, 20 bp, Artificial Sequence
  chemically synthesized
gtgactgtactgaacactgt

SEQ ID NO: 29802 - DNA, 20 bp, Artificial Sequence
  chemically synthesized
gtactgaacactgtaggcaa

SEQ ID NO: 29803 - DNA, 20 bp, Artificial Sequence
  chemically synthesized
aacactgtaggcaatggtaa

SEQ ID NO: 29804 - DNA, 20 bp, Artificial Sequence
  chemically synthesized
actgtaggcaatggtaacag

SEQ ID NO: 29805 - DNA, 20 bp, Artificial Sequence
  chemically synthesized
ggtatttgtgtatctaaaca

SEQ ID NO: 29806 - DNA, 20 bp, Artificial Sequence
  chemically synthesized
ttgtgtatctaaacatagaa

SEQ ID NO: 29807 - DNA, 20 bp, Artificial Sequence
  chemically synthesized
tgtgtatctaaacatagaaa

SEQ ID NO: 29808 - DNA, 20 bp, Artificial Sequence
  chemically synthesized
atctaaacatagaaaaggta

SEQ ID NO: 29809 - DNA, 20 bp, Artificial Sequence
  chemically synthesized
gaaaaggtacagtgaaaata

SEQ ID NO: 29810 - DNA, 20 bp, Artificial Sequence
  chemically synthesized
aatacagtattataacctta

SEQ ID NO: 29811 - DNA, 20 bp, Artificial Sequence
  chemically synthesized
atacagtattataaccttat

SEQ ID NO: 29812 - DNA, 20 bp, Artificial Sequence
  chemically synthesized
gggaccactgtcgtataatg

SEQ ID NO: 29813 - DNA, 20 bp, Artificial Sequence
  chemically synthesized
ttgaccaaaatgtcattgtg

SEQ ID NO: 29814 - DNA, 20 bp, Artificial Sequence
  chemically synthesized
tatatgtacacacacacaca

SEQ ID NO: 29815 - DNA, 20 bp, Artificial Sequence
  chemically synthesized
tatgtacacacacacacata

SEQ ID NO: 29816 - DNA, 20 bp, Artificial Sequence
  chemically synthesized
tgtacacacacacacataga

SEQ ID NO: 29817 - DNA, 20 bp, Artificial Sequence
  chemically synthesized
tacacacacacacatagaga

SEQ ID NO: 29818 - DNA, 20 bp, Artificial Sequence
  chemically synthesized
cacacacacacatagagaga

SEQ ID NO: 29819 - DNA, 20 bp, Artificial Sequence
  chemically synthesized
cacacacacatagagagaga

SEQ ID NO: 29820 - DNA, 20 bp, Artificial Sequence
  chemically synthesized
cacacacatagagagagaga

SEQ ID NO: 29821 - DNA, 20 bp, Artificial Sequence
  chemically synthesized
cacacatagagagagagaga

SEQ ID NO: 29822 - DNA, 20 bp, Artificial Sequence
  chemically synthesized
acacatagagagagagagag

SEQ ID NO: 29823 - DNA, 20 bp, Artificial Sequence
  chemically synthesized
acatagagagagagagagag

SEQ ID NO: 29824 - DNA, 20 bp, Artificial Sequence
  chemically synthesized
atagagagagagagagagga

SEQ ID NO: 29825 - DNA, 20 bp, Artificial Sequence
  chemically synthesized
tagagagagagagagaggag

SEQ ID NO: 29826 - DNA, 20 bp, Artificial Sequence
  chemically synthesized
gagagagagagagaggagag

SEQ ID NO: 29827 - DNA, 20 bp, Artificial Sequence
  chemically synthesized
gagagagagagaggagagga

SEQ ID NO: 29828 - DNA, 20 bp, Artificial Sequence
  chemically synthesized
agagagagagaggagaggag

SEQ ID NO: 29829 - DNA, 20 bp, Artificial Sequence
  chemically synthesized
gagagagaggagaggagagg

SEQ ID NO: 29830 - DNA, 20 bp, Artificial Sequence
  chemically synthesized
agagagaggagaggagagga

SEQ ID NO: 29831 - DNA, 20 bp, Artificial Sequence
  chemically synthesized
agagaggagaggagaggaag

SEQ ID NO: 29832 - DNA, 20 bp, Artificial Sequence
  chemically synthesized
gagaggagaggagaggaagg

SEQ ID NO: 29833 - DNA, 20 bp, Artificial Sequence
  chemically synthesized
agaggagaggagaggaagga

SEQ ID NO: 29834 - DNA, 20 bp, Artificial Sequence
  chemically synthesized
aggagaggagaggaaggagg

SEQ ID NO: 29835 - DNA, 20 bp, Artificial Sequence
  chemically synthesized
ggagaggagaggaaggaggg

SEQ ID NO: 29836 - DNA, 20 bp, Artificial Sequence
  chemically synthesized
gagaggagaggaaggaggga

SEQ ID NO: 29837 - DNA, 20 bp, Artificial Sequence
  chemically synthesized
aggagaggaaggagggaggg

SEQ ID NO: 29838 - DNA, 20 bp, Artificial Sequence
  chemically synthesized
ggagaggaaggagggaggga

SEQ ID NO: 29839 - DNA, 20 bp, Artificial Sequence
  chemically synthesized
agaggaaggagggagggaag

SEQ ID NO: 29840 - DNA, 20 bp, Artificial Sequence
  chemically synthesized
agggaaggagaaatatgatt

SEQ ID NO: 29841 - DNA, 20 bp, Artificial Sequence
  chemically synthesized
aaggagaaatatgattcaga

SEQ ID NO: 29842 - DNA, 20 bp, Artificial Sequence
  chemically synthesized
ggagaaatatgattcagata

SEQ ID NO: 29843 - DNA, 20 bp, Artificial Sequence
  chemically synthesized
agatagagacatctatcctc

SEQ ID NO: 29844 - DNA, 20 bp, Artificial Sequence
  chemically synthesized
atagagacatctatcctcca

SEQ ID NO: 29845 - DNA, 20 bp, Artificial Sequence
  chemically synthesized
gacatctatcctccagagtt

SEQ ID NO: 29846 - DNA, 20 bp, Artificial Sequence
  chemically synthesized
acatctatcctccagagttc

SEQ ID NO: 29847 - DNA, 20 bp, Artificial Sequence
  chemically synthesized
atctatcctccagagttcag

SEQ ID NO: 29848 - DNA, 20 bp, Artificial Sequence
  chemically synthesized
agagttcaggagtgtctctt

SEQ ID NO: 29849 - DNA, 20 bp, Artificial Sequence
  chemically synthesized
tcaggagtgtctcttcagac

SEQ ID NO: 29850 - DNA, 20 bp, Artificial Sequence
  chemically synthesized
caggagtgtctcttcagact

SEQ ID NO: 29851 - DNA, 20 bp, Artificial Sequence
  chemically synthesized
gagtgtctcttcagactagg

SEQ ID NO: 29852 - DNA, 20 bp, Artificial Sequence
  chemically synthesized
ctcttcagactaggtagatg

SEQ ID NO: 29853 - DNA, 20 bp, Artificial Sequence
  chemically synthesized
aaaaaacatatcctgaattc

SEQ ID NO: 29854 - DNA, 20 bp, Artificial Sequence
  chemically synthesized
aaaacatatcctgaattcta

SEQ ID NO: 29855 - DNA, 20 bp, Artificial Sequence
  chemically synthesized
aacatatcctgaattctaga

SEQ ID NO: 29856 - DNA, 20 bp, Artificial Sequence
  chemically synthesized
cctataacacttgccaacca

SEQ ID NO: 29857 - DNA, 20 bp, Artificial Sequence
  chemically synthesized
ctataacacttgccaaccaa

SEQ ID NO: 29858 - DNA, 20 bp, Artificial Sequence
  chemically synthesized
attgcttttttaaattaatg

SEQ ID NO: 29859 - DNA, 20 bp, Artificial Sequence
  chemically synthesized
agtgatttttctttaacatc

SEQ ID NO: 29860 - DNA, 20 bp, Artificial Sequence
  chemically synthesized
ttttctttaacatctagtga

SEQ ID NO: 29861 - DNA, 20 bp, Artificial Sequence
  chemically synthesized
taacatctagtgacagacac

SEQ ID NO: 29862 - DNA, 20 bp, Artificial Sequence
  chemically synthesized
aacatctagtgacagacact

SEQ ID NO: 29863 - DNA, 20 bp, Artificial Sequence
  chemically synthesized
acatctagtgacagacactg

SEQ ID NO: 29864 - DNA, 20 bp, Artificial Sequence
  chemically synthesized
agacactggggtcacatttg

SEQ ID NO: 29865 - DNA, 20 bp, Artificial Sequence
  chemically synthesized
actggggtcacatttgcagc

SEQ ID NO: 29866 - DNA, 20 bp, Artificial Sequence
  chemically synthesized
atttgcagctggaccataat

SEQ ID NO: 29867 - DNA, 20 bp, Artificial Sequence
  chemically synthesized
tttgcagctggaccataatt

SEQ ID NO: 29868 - DNA, 20 bp, Artificial Sequence
  chemically synthesized
ataattaggcttctgttctt

SEQ ID NO: 29869 - DNA, 20 bp, Artificial Sequence
  chemically synthesized
taattaggcttctgttcttc

SEQ ID NO: 29870 - DNA, 20 bp, Artificial Sequence
  chemically synthesized
attaggcttctgttcttcag

SEQ ID NO: 29871 - DNA, 20 bp, Artificial Sequence
  chemically synthesized
cttcaggagacatttgttca

SEQ ID NO: 29872 - DNA, 20 bp, Artificial Sequence
  chemically synthesized
gacatttgttcaaagtcatt

SEQ ID NO: 29873 - DNA, 20 bp, Artificial Sequence
  chemically synthesized
acatttgttcaaagtcattt

SEQ ID NO: 29874 - DNA, 20 bp, Artificial Sequence
  chemically synthesized
gggcaaccatattctgaaaa

SEQ ID NO: 29875 - DNA, 20 bp, Artificial Sequence
  chemically synthesized
accatattctgaaaacagcc

SEQ ID NO: 29876 - DNA, 20 bp, Artificial Sequence
  chemically synthesized
tattctgaaaacagcccagc

SEQ ID NO: 29877 - DNA, 20 bp, Artificial Sequence
  chemically synthesized
attctgaaaacagcccagcc

SEQ ID NO: 29878 - DNA, 20 bp, Artificial Sequence
  chemically synthesized
ttctgaaaacagcccagcca

SEQ ID NO: 29879 - DNA, 20 bp, Artificial Sequence
  chemically synthesized
aaacagcccagccagggtga

SEQ ID NO: 29880 - DNA, 20 bp, Artificial Sequence
  chemically synthesized
gggtgatggatcactttgca

SEQ ID NO: 29881 - DNA, 20 bp, Artificial Sequence
  chemically synthesized
actttgcaaagatcctcaat

SEQ ID NO: 29882 - DNA, 20 bp, Artificial Sequence
  chemically synthesized
atcctcaatgagctattttc

SEQ ID NO: 29883 - DNA, 20 bp, Artificial Sequence
  chemically synthesized
gctattttcaagtgatgaca

SEQ ID NO: 29884 - DNA, 20 bp, Artificial Sequence
  chemically synthesized
tcaagtgatgacaaagtgtg

SEQ ID NO: 29885 - DNA, 20 bp, Artificial Sequence
  chemically synthesized
gtgaagttaaccgctcattt

SEQ ID NO: 29886 - DNA, 20 bp, Artificial Sequence
  chemically synthesized
agaactttctttttcatcca

SEQ ID NO: 29887 - DNA, 20 bp, Artificial Sequence
  chemically synthesized
aaagtaaattcaaatatgat

SEQ ID NO: 29888 - DNA, 20 bp, Artificial Sequence
  chemically synthesized
gaaatctgaccttttattac

SEQ ID NO: 29889 - DNA, 20 bp, Artificial Sequence
  chemically synthesized
actggaattctcttgactaa

SEQ ID NO: 29890 - DNA, 20 bp, Artificial Sequence
  chemically synthesized
cctaaatctccatgtgtata

SEQ ID NO: 29891 - DNA, 20 bp, Artificial Sequence
  chemically synthesized
tccatgtgtatacagtactg

SEQ ID NO: 29892 - DNA, 20 bp, Artificial Sequence
  chemically synthesized
ccatgtgtatacagtactgt

SEQ ID NO: 29893 - DNA, 20 bp, Artificial Sequence
  chemically synthesized
acagtactgtgggaacatca

SEQ ID NO: 29894 - DNA, 20 bp, Artificial Sequence
  chemically synthesized
tgtgggaacatcacagattt

SEQ ID NO: 29895 - DNA, 20 bp, Artificial Sequence
  chemically synthesized
gattttggctccatgcccta

SEQ ID NO: 29896 - DNA, 20 bp, Artificial Sequence
  chemically synthesized
ttttggctccatgccctaaa

SEQ ID NO: 29897 - DNA, 20 bp, Artificial Sequence
  chemically synthesized
tccatgccctaaagagaaat

SEQ ID NO: 29898 - DNA, 20 bp, Artificial Sequence
  chemically synthesized
cctaaagagaaattggcttt

SEQ ID NO: 29899 - DNA, 20 bp, Artificial Sequence
  chemically synthesized
aaattggctttcagattatt

SEQ ID NO: 29900 - DNA, 20 bp, Artificial Sequence
  chemically synthesized
gattatttggattaaaaaca

SEQ ID NO: 29901 - DNA, 20 bp, Artificial Sequence
  chemically synthesized
ttaaaaacaaagactttctt

SEQ ID NO: 29902 - DNA, 20 bp, Artificial Sequence
  chemically synthesized
aaaaacaaagactttcttaa

SEQ ID NO: 29903 - DNA, 20 bp, Artificial Sequence
  chemically synthesized
tttcttttttgctaaaacta

SEQ ID NO: 29904 - DNA, 20 bp, Artificial Sequence
  chemically synthesized
agaattattcttttacattt

SEQ ID NO: 29905 - DNA, 20 bp, Artificial Sequence
  chemically synthesized
acgccaacaaaattctgaat

SEQ ID NO: 29906 - DNA, 20 bp, Artificial Sequence
  chemically synthesized
acaaaattctgaatcggcca

SEQ ID NO: 29907 - DNA, 20 bp, Artificial Sequence
  chemically synthesized
aaaattctgaatcggccaaa

SEQ ID NO: 29908 - DNA, 20 bp, Artificial Sequence
  chemically synthesized
aaattctgaatcggccaaag

SEQ ID NO: 29909 - DNA, 20 bp, Artificial Sequence
  chemically synthesized
tcggccaaagaggtataatt

SEQ ID NO: 29910 - DNA, 20 bp, Artificial Sequence
  chemically synthesized
cggccaaagaggtataattc

SEQ ID NO: 29911 - DNA, 20 bp, Artificial Sequence
  chemically synthesized
gaggtataattcaggtaaat

SEQ ID NO: 29912 - DNA, 20 bp, Artificial Sequence
  chemically synthesized
gtataattcaggtaaattgg

SEQ ID NO: 29913 - DNA, 20 bp, Artificial Sequence
  chemically synthesized
ataattcaggtaaattggaa

SEQ ID NO: 29914 - DNA, 20 bp, Artificial Sequence
  chemically synthesized
taaattggaagagtttgttc

SEQ ID NO: 29915 - DNA, 20 bp, Artificial Sequence
  chemically synthesized
aaattggaagagtttgttca

SEQ ID NO: 29916 - DNA, 20 bp, Artificial Sequence
  chemically synthesized
aattggaagagtttgttcaa

SEQ ID NO: 29917 - DNA, 20 bp, Artificial Sequence
  chemically synthesized
agtttgttcaagggaacctt

SEQ ID NO: 29918 - DNA, 20 bp, Artificial Sequence
  chemically synthesized
tttgttcaagggaaccttga

SEQ ID NO: 29919 - DNA, 20 bp, Artificial Sequence
  chemically synthesized
tgttcaagggaaccttgaga

SEQ ID NO: 29920 - DNA, 20 bp, Artificial Sequence
  chemically synthesized
gaaccttgagagagaatgta

SEQ ID NO: 29921 - DNA, 20 bp, Artificial Sequence
  chemically synthesized
ccttgagagagaatgtatgg

SEQ ID NO: 29922 - DNA, 20 bp, Artificial Sequence
  chemically synthesized
agagagaatgtatggaagaa

SEQ ID NO: 29923 - DNA, 20 bp, Artificial Sequence
  chemically synthesized
gaatgtatggaagaaaagtg

SEQ ID NO: 29924 - DNA, 20 bp, Artificial Sequence
  chemically synthesized
ggaagaaaagtgtagttttg

SEQ ID NO: 29925 - DNA, 20 bp, Artificial Sequence
  chemically synthesized
agaaaagtgtagttttgaag

SEQ ID NO: 29926 - DNA, 20 bp, Artificial Sequence
  chemically synthesized
gtgtagttttgaagaagcac

SEQ ID NO: 29927 - DNA, 20 bp, Artificial Sequence
  chemically synthesized
tagttttgaagaagcacgag

SEQ ID NO: 29928 - DNA, 20 bp, Artificial Sequence
  chemically synthesized
gaagtttttgaaaacactga

SEQ ID NO: 29929 - DNA, 20 bp, Artificial Sequence
  chemically synthesized
tcttccatacattctctctc

SEQ ID NO: 29930 - DNA, 20 bp, Artificial Sequence
  chemically synthesized
cttccatacattctctctca

SEQ ID NO: 29931 - DNA, 20 bp, Artificial Sequence
  chemically synthesized
ttacctgaattatacctctt

SEQ ID NO: 29932 - DNA, 20 bp, Artificial Sequence
  chemically synthesized
ttatacctctttggccgatt

SEQ ID NO: 29933 - DNA, 20 bp, Artificial Sequence
  chemically synthesized
tggccgattcagaattttgt

SEQ ID NO: 29934 - DNA, 20 bp, Artificial Sequence
  chemically synthesized
ttgttggcgttttcatgatc

SEQ ID NO: 29935 - DNA, 20 bp, Artificial Sequence
  chemically synthesized
caagaaaaactgaaatgtaa

SEQ ID NO: 29936 - DNA, 20 bp, Artificial Sequence
  chemically synthesized
aatgtaaaagaataattctt

SEQ ID NO: 29937 - DNA, 20 bp, Artificial Sequence
  chemically synthesized
aaagaataattctttagttt

SEQ ID NO: 29938 - DNA, 20 bp, Artificial Sequence
  chemically synthesized
attctttagttttagcaaaa

SEQ ID NO: 29939 - DNA, 20 bp, Artificial Sequence
  chemically synthesized
atgaaaattttacatctctt

SEQ ID NO: 29940 - DNA, 20 bp, Artificial Sequence
  chemically synthesized
aaattttacatctcttaaga

SEQ ID NO: 29941 - DNA, 20 bp, Artificial Sequence
  chemically synthesized
ttttaatccaaataatctga

SEQ ID NO: 29942 - DNA, 20 bp, Artificial Sequence
  chemically synthesized
tctgaaagccaatttctctt

SEQ ID NO: 29943 - DNA, 20 bp, Artificial Sequence
  chemically synthesized
ctgaaagccaatttctcttt

SEQ ID NO: 29944 - DNA, 20 bp, Artificial Sequence
  chemically synthesized
tgaaagccaatttctcttta

SEQ ID NO: 29945 - DNA, 20 bp, Artificial Sequence
  chemically synthesized
gccaatttctctttagggca

SEQ ID NO: 29946 - DNA, 20 bp, Artificial Sequence
  chemically synthesized
caatttctctttagggcatg

SEQ ID NO: 29947 - DNA, 20 bp, Artificial Sequence
  chemically synthesized
caaaatctgtgatgttccca

SEQ ID NO: 29948 - DNA, 20 bp, Artificial Sequence
  chemically synthesized
cccacagtactgtatacaca

SEQ ID NO: 29949 - DNA, 20 bp, Artificial Sequence
  chemically synthesized
cacagtactgtatacacatg

SEQ ID NO: 29950 - DNA, 20 bp, Artificial Sequence
  chemically synthesized
actgtatacacatggagatt

SEQ ID NO: 29951 - DNA, 20 bp, Artificial Sequence
  chemically synthesized
ctgtatacacatggagattt

SEQ ID NO: 29952 - DNA, 20 bp, Artificial Sequence
  chemically synthesized
ttaaaattcaattttacttt

SEQ ID NO: 29953 - DNA, 20 bp, Artificial Sequence
  chemically synthesized
attcaattttacttttagtc

SEQ ID NO: 29954 - DNA, 20 bp, Artificial Sequence
  chemically synthesized
tcaattttacttttagtcaa

SEQ ID NO: 29955 - DNA, 20 bp, Artificial Sequence
  chemically synthesized
acttttagtcaagagaattc

SEQ ID NO: 29956 - DNA, 20 bp, Artificial Sequence
  chemically synthesized
caagagaattccagtaataa

SEQ ID NO: 29957 - DNA, 20 bp, Artificial Sequence
  chemically synthesized
aagagaattccagtaataaa

SEQ ID NO: 29958 - DNA, 20 bp, Artificial Sequence
  chemically synthesized
gaattccagtaataaaaggt

SEQ ID NO: 29959 - DNA, 20 bp, Artificial Sequence
  chemically synthesized
aatcatatttgaatttactt

SEQ ID NO: 29960 - DNA, 20 bp, Artificial Sequence
  chemically synthesized
tgaatttactttggatgaaa

SEQ ID NO: 29961 - DNA, 20 bp, Artificial Sequence
  chemically synthesized
tttactttggatgaaaaaga

SEQ ID NO: 29962 - DNA, 20 bp, Artificial Sequence
  chemically synthesized
gaaaaagaaagttctcaaat

SEQ ID NO: 29963 - DNA, 20 bp, Artificial Sequence
  chemically synthesized
aaagaaagttctcaaatgag

SEQ ID NO: 29964 - DNA, 20 bp, Artificial Sequence
  chemically synthesized
actttgtcatcacttgaaaa

SEQ ID NO: 29965 - DNA, 20 bp, Artificial Sequence
  chemically synthesized
tcacttgaaaatagctcatt

SEQ ID NO: 29966 - DNA, 20 bp, Artificial Sequence
  chemically synthesized
cacttgaaaatagctcattg

SEQ ID NO: 29967 - DNA, 20 bp, Artificial Sequence
  chemically synthesized
gctcattgaggatctttgca

SEQ ID NO: 29968 - DNA, 20 bp, Artificial Sequence
  chemically synthesized
tgcaaagtgatccatcaccc

SEQ ID NO: 29969 - DNA, 20 bp, Artificial Sequence
  chemically synthesized
aagtgatccatcaccctggc

SEQ ID NO: 29970 - DNA, 20 bp, Artificial Sequence
  chemically synthesized
agtgatccatcaccctggct

SEQ ID NO: 29971 - DNA, 20 bp, Artificial Sequence
  chemically synthesized
caccctggctgggctgtttt

SEQ ID NO: 29972 - DNA, 20 bp, Artificial Sequence
  chemically synthesized
gctgggctgttttcagaata

SEQ ID NO: 29973 - DNA, 20 bp, Artificial Sequence
  chemically synthesized
ctttgaacaaatgtctcctg

SEQ ID NO: 29974 - DNA, 20 bp, Artificial Sequence
  chemically synthesized
aacaaatgtctcctgaagaa

SEQ ID NO: 29975 - DNA, 20 bp, Artificial Sequence
  chemically synthesized
aaatgtctcctgaagaacag

SEQ ID NO: 29976 - DNA, 20 bp, Artificial Sequence
  chemically synthesized
gaagaacagaagcctaatta

SEQ ID NO: 29977 - DNA, 20 bp, Artificial Sequence
  chemically synthesized
acagaagcctaattatggtc

SEQ ID NO: 29978 - DNA, 20 bp, Artificial Sequence
  chemically synthesized
tccagctgcaaatgtgaccc

SEQ ID NO: 29979 - DNA, 20 bp, Artificial Sequence
  chemically synthesized
gtgaccccagtgtctgtcac

SEQ ID NO: 29980 - DNA, 20 bp, Artificial Sequence
  chemically synthesized
gtgtctgtcactagatgtta

SEQ ID NO: 29981 - DNA, 20 bp, Artificial Sequence
  chemically synthesized
atcactgcattaatttaaaa

SEQ ID NO: 29982 - DNA, 20 bp, Artificial Sequence
  chemically synthesized
ttaatttaaaaaagcaattt

SEQ ID NO: 29983 - DNA, 20 bp, Artificial Sequence
  chemically synthesized
aaaaagcaatttcagatcaa

SEQ ID NO: 29984 - DNA, 20 bp, Artificial Sequence
  chemically synthesized
tttcagatcaacagcacctt

SEQ ID NO: 29985 - DNA, 20 bp, Artificial Sequence
  chemically synthesized
agatcaacagcacctttggt

SEQ ID NO: 29986 - DNA, 20 bp, Artificial Sequence
  chemically synthesized
caacagcacctttggttggc

SEQ ID NO: 29987 - DNA, 20 bp, Artificial Sequence
  chemically synthesized
cctttggttggcaagtgtta

SEQ ID NO: 29988 - DNA, 20 bp, Artificial Sequence
  chemically synthesized
ctttggttggcaagtgttat

SEQ ID NO: 29989 - DNA, 20 bp, Artificial Sequence
  chemically synthesized
ggcaagtgttataggaattg

SEQ ID NO: 29990 - DNA, 20 bp, Artificial Sequence
  chemically synthesized
tataggaattgcagtgattt

SEQ ID NO: 29991 - DNA, 20 bp, Artificial Sequence
  chemically synthesized
cagtgatttaagcatctctc

SEQ ID NO: 29992 - DNA, 20 bp, Artificial Sequence
  chemically synthesized
ttaagcatctctctagaatt

SEQ ID NO: 29993 - DNA, 20 bp, Artificial Sequence
  chemically synthesized
taagcatctctctagaattc

SEQ ID NO: 29994 - DNA, 20 bp, Artificial Sequence
  chemically synthesized
attcaggatatgtttttttt

SEQ ID NO: 29995 - DNA, 20 bp, Artificial Sequence
  chemically synthesized
ttttttaagctacatctacc

SEQ ID NO: 29996 - DNA, 20 bp, Artificial Sequence
  chemically synthesized
agctacatctacctagtctg

SEQ ID NO: 29997 - DNA, 20 bp, Artificial Sequence
  chemically synthesized
ctacatctacctagtctgaa

SEQ ID NO: 29998 - DNA, 20 bp, Artificial Sequence
  chemically synthesized
gaagagacactcctgaactc

SEQ ID NO: 29999 - DNA, 20 bp, Artificial Sequence
  chemically synthesized
agagacactcctgaactctg

SEQ ID NO: 30000 - DNA, 20 bp, Artificial Sequence
  chemically synthesized
gagacactcctgaactctgg

SEQ ID NO: 30001 - DNA, 20 bp, Artificial Sequence
  chemically synthesized
cactcctgaactctggagga

SEQ ID NO: 30002 - DNA, 20 bp, Artificial Sequence
  chemically synthesized
tatcatatatatatatatat

SEQ ID NO: 30003 - DNA, 20 bp, Artificial Sequence
  chemically synthesized
tttgctgcacaatgacattt

SEQ ID NO: 30004 - DNA, 20 bp, Artificial Sequence
  chemically synthesized
aatgacattttggtcaatga

SEQ ID NO: 30005 - DNA, 20 bp, Artificial Sequence
  chemically synthesized
tgatggaccacattatacga

SEQ ID NO: 30006 - DNA, 20 bp, Artificial Sequence
  chemically synthesized
tggaccacattatacgacag

SEQ ID NO: 30007 - DNA, 20 bp, Artificial Sequence
  chemically synthesized
ttatacgacagtggtcccat

SEQ ID NO: 30008 - DNA, 20 bp, Artificial Sequence
  chemically synthesized
tatacgacagtggtcccata

SEQ ID NO: 30009 - DNA, 20 bp, Artificial Sequence
  chemically synthesized
cactgtaccttttctatgtt

SEQ ID NO: 30010 - DNA, 20 bp, Artificial Sequence
  chemically synthesized
accactgttaccattgccta

SEQ ID NO: 30011 - DNA, 20 bp, Artificial Sequence
  chemically synthesized
ttaccattgcctacagtgtt

SEQ ID NO: 30012 - DNA, 20 bp, Artificial Sequence
  chemically synthesized
attgcctacagtgttcagta

SEQ ID NO: 30013 - DNA, 20 bp, Artificial Sequence
  chemically synthesized
cagtacagtcacatgctgta

SEQ ID NO: 30014 - DNA, 20 bp, Artificial Sequence
  chemically synthesized
agtacagtcacatgctgtac

SEQ ID NO: 30015 - DNA, 20 bp, Artificial Sequence
  chemically synthesized
tcacatgctgtacaggtttg

SEQ ID NO: 30016 - DNA, 20 bp, Artificial Sequence
  chemically synthesized
tgctgtacaggtttgcagcc

SEQ ID NO: 30017 - DNA, 20 bp, Artificial Sequence
  chemically synthesized
gctgtacaggtttgcagccc

SEQ ID NO: 30018 - DNA, 20 bp, Artificial Sequence
  chemically synthesized
tgtacaggtttgcagcccag

SEQ ID NO: 30019 - DNA, 20 bp, Artificial Sequence
  chemically synthesized
aggtttgcagcccaggagcc

SEQ ID NO: 30020 - DNA, 20 bp, Artificial Sequence
  chemically synthesized
ggtttgcagcccaggagcct

SEQ ID NO: 30021 - DNA, 20 bp, Artificial Sequence
  chemically synthesized
tttgcagcccaggagcctag

SEQ ID NO: 30022 - DNA, 20 bp, Artificial Sequence
  chemically synthesized
gcccaggagcctaggagcaa

SEQ ID NO: 30023 - DNA, 20 bp, Artificial Sequence
  chemically synthesized
cccaggagcctaggagcaat

SEQ ID NO: 30024 - DNA, 20 bp, Artificial Sequence
  chemically synthesized
taggccacatcaatacaacc

SEQ ID NO: 30025 - DNA, 20 bp, Artificial Sequence
  chemically synthesized
aggccacatcaatacaacct

SEQ ID NO: 30026 - DNA, 20 bp, Artificial Sequence
  chemically synthesized
atcaatacaacctaggtatg

SEQ ID NO: 30027 - DNA, 20 bp, Artificial Sequence
  chemically synthesized
atacaacctaggtatgtagt

SEQ ID NO: 30028 - DNA, 20 bp, Artificial Sequence
  chemically synthesized
atgtagtaagctataccatt

SEQ ID NO: 30029 - DNA, 20 bp, Artificial Sequence
  chemically synthesized
tgtagtaagctataccattt

SEQ ID NO: 30030 - DNA, 20 bp, Artificial Sequence
  chemically synthesized
taagctataccatttaggtt

SEQ ID NO: 30031 - DNA, 20 bp, Artificial Sequence
  chemically synthesized
aagctataccatttaggttt

SEQ ID NO: 30032 - DNA, 20 bp, Artificial Sequence
  chemically synthesized
tataccatttaggtttaggt

SEQ ID NO: 30033 - DNA, 20 bp, Artificial Sequence
  chemically synthesized
ttgcttaatgacacatttct

SEQ ID NO: 30034 - DNA, 20 bp, Artificial Sequence
  chemically synthesized
cagaatatatccccattgtt

SEQ ID NO: 30035 - DNA, 20 bp, Artificial Sequence
  chemically synthesized
agaatatatccccattgtta

SEQ ID NO: 30036 - DNA, 20 bp, Artificial Sequence
  chemically synthesized
ccccattgttaaggaatgca

SEQ ID NO: 30037 - DNA, 20 bp, Artificial Sequence
  chemically synthesized
tgtatgtataaaattaataa

SEQ ID NO: 30038 - DNA, 20 bp, Artificial Sequence
  chemically synthesized
gtatgtataaaattaataac

SEQ ID NO: 30039 - DNA, 20 bp, Artificial Sequence
  chemically synthesized
tatgtataaaattaataaca

SEQ ID NO: 30040 - DNA, 20 bp, Artificial Sequence
  chemically synthesized
aaaattaataacagggactc

SEQ ID NO: 30041 - DNA, 20 bp, Artificial Sequence
  chemically synthesized
attaataacagggactcaag

SEQ ID NO: 30042 - DNA, 20 bp, Artificial Sequence
  chemically synthesized
cagggactcaagaagttgcc

SEQ ID NO: 30043 - DNA, 20 bp, Artificial Sequence
  chemically synthesized
gggactcaagaagttgcctg

SEQ ID NO: 30044 - DNA, 20 bp, Artificial Sequence
  chemically synthesized
ctggagttgttcctttcttc

SEQ ID NO: 30045 - DNA, 20 bp, Artificial Sequence
  chemically synthesized
tggagttgttcctttcttca

SEQ ID NO: 30046 - DNA, 20 bp, Artificial Sequence
  chemically synthesized
ggagttgttcctttcttcaa

SEQ ID NO: 30047 - DNA, 20 bp, Artificial Sequence
  chemically synthesized
tgttcctttcttcaagggtc

SEQ ID NO: 30048 - DNA, 20 bp, Artificial Sequence
  chemically synthesized
aatatatctgataccatctc

SEQ ID NO: 30049 - DNA, 20 bp, Artificial Sequence
  chemically synthesized
tatatctgataccatctcaa

SEQ ID NO: 30050 - DNA, 20 bp, Artificial Sequence
  chemically synthesized
atatctgataccatctcaag

SEQ ID NO: 30051 - DNA, 20 bp, Artificial Sequence
  chemically synthesized
gataccatctcaagaggacc

SEQ ID NO: 30052 - DNA, 20 bp, Artificial Sequence
  chemically synthesized
ataccatctcaagaggacca

SEQ ID NO: 30053 - DNA, 20 bp, Artificial Sequence
  chemically synthesized
taccatctcaagaggaccaa

SEQ ID NO: 30054 - DNA, 20 bp, Artificial Sequence
  chemically synthesized
caagaggaccaagggcttat

SEQ ID NO: 30055 - DNA, 20 bp, Artificial Sequence
  chemically synthesized
ggcttataagatgaactttc

SEQ ID NO: 30056 - DNA, 20 bp, Artificial Sequence
  chemically synthesized
gcttataagatgaactttct

SEQ ID NO: 30057 - DNA, 20 bp, Artificial Sequence
  chemically synthesized
cttataagatgaactttctg

SEQ ID NO: 30058 - DNA, 20 bp, Artificial Sequence
  chemically synthesized
gatgaactttctggggtatt

SEQ ID NO: 30059 - DNA, 20 bp, Artificial Sequence
  chemically synthesized
atgaactttctggggtattt

SEQ ID NO: 30060 - DNA, 20 bp, Artificial Sequence
  chemically synthesized
acttcctgattaactccaaa

SEQ ID NO: 30061 - DNA, 20 bp, Artificial Sequence
  chemically synthesized
cttcctgattaactccaaaa

SEQ ID NO: 30062 - DNA, 20 bp, Artificial Sequence
  chemically synthesized
cctgattaactccaaaaagg

SEQ ID NO: 30063 - DNA, 20 bp, Artificial Sequence
  chemically synthesized
tgattaactccaaaaaggaa

SEQ ID NO: 30064 - DNA, 20 bp, Artificial Sequence
  chemically synthesized
taactccaaaaaggaagaga

SEQ ID NO: 30065 - DNA, 20 bp, Artificial Sequence
  chemically synthesized
aactccaaaaaggaagagaa

SEQ ID NO: 30066 - DNA, 20 bp, Artificial Sequence
  chemically synthesized
ccaaaaaggaagagaaagga

SEQ ID NO: 30067 - DNA, 20 bp, Artificial Sequence
  chemically synthesized
ggaagagaaaggaaagtaaa

SEQ ID NO: 30068 - DNA, 20 bp, Artificial Sequence
  chemically synthesized
gaagagaaaggaaagtaaaa

SEQ ID NO: 30069 - DNA, 20 bp, Artificial Sequence
  chemically synthesized
agaaaggaaagtaaaaagga

SEQ ID NO: 30070 - DNA, 20 bp, Artificial Sequence
  chemically synthesized
gaaaggaaagtaaaaaggaa

SEQ ID NO: 30071 - DNA, 20 bp, Artificial Sequence
  chemically synthesized
ggaaagtaaaaaggaaagga

SEQ ID NO: 30072 - DNA, 20 bp, Artificial Sequence
  chemically synthesized
taaaaaggaaaggaaagaaa

SEQ ID NO: 30073 - DNA, 20 bp, Artificial Sequence
  chemically synthesized
aaaaggaaaggaaagaaacg

SEQ ID NO: 30074 - DNA, 20 bp, Artificial Sequence
  chemically synthesized
ttcttcccttattttcattg

SEQ ID NO: 30075 - DNA, 20 bp, Artificial Sequence
  chemically synthesized
cattgcagctgttcacttta

SEQ ID NO: 30076 - DNA, 20 bp, Artificial Sequence
  chemically synthesized
ttgcagctgttcactttatg

SEQ ID NO: 30077 - DNA, 20 bp, Artificial Sequence
  chemically synthesized
gttcactttatggagtgttc

SEQ ID NO: 30078 - DNA, 20 bp, Artificial Sequence
  chemically synthesized
ctgcttttcccttgctctgc

SEQ ID NO: 30079 - DNA, 20 bp, Artificial Sequence
  chemically synthesized
cttgctctgcaagttccttt

SEQ ID NO: 30080 - DNA, 20 bp, Artificial Sequence
  chemically synthesized
ttgctctgcaagttcctttt

SEQ ID NO: 30081 - DNA, 20 bp, Artificial Sequence
  chemically synthesized
tcactttttttctttgaatt

SEQ ID NO: 30082 - DNA, 20 bp, Artificial Sequence
  chemically synthesized
ttttttctttgaatttagcc

SEQ ID NO: 30083 - DNA, 20 bp, Artificial Sequence
  chemically synthesized
ttcaactcttttttttttga

SEQ ID NO: 30084 - DNA, 20 bp, Artificial Sequence
  chemically synthesized
caactcttttttttttgaca

SEQ ID NO: 30085 - DNA, 20 bp, Artificial Sequence
  chemically synthesized
cagagtcttgctctgtcgcc

SEQ ID NO: 30086 - DNA, 20 bp, Artificial Sequence
  chemically synthesized
agagtcttgctctgtcgccc

SEQ ID NO: 30087 - DNA, 20 bp, Artificial Sequence
  chemically synthesized
tcttgctctgtcgcccaggc

SEQ ID NO: 30088 - DNA, 20 bp, Artificial Sequence
  chemically synthesized
ttgctctgtcgcccaggctg

SEQ ID NO: 30089 - DNA, 20 bp, Artificial Sequence
  chemically synthesized
ctgtcgcccaggctggagtg

SEQ ID NO: 30090 - DNA, 20 bp, Artificial Sequence
  chemically synthesized
tcgcccaggctggagtgcag

SEQ ID NO: 30091 - DNA, 20 bp, Artificial Sequence
  chemically synthesized
ggagtgcagtggtgcgatct

SEQ ID NO: 30092 - DNA, 20 bp, Artificial Sequence
  chemically synthesized
tcactgcaacctccatctcc

SEQ ID NO: 30093 - DNA, 20 bp, Artificial Sequence
  chemically synthesized
cactgcaacctccatctccc

SEQ ID NO: 30094 - DNA, 20 bp, Artificial Sequence
  chemically synthesized
aacctccatctcccaggttc

SEQ ID NO: 30095 - DNA, 20 bp, Artificial Sequence
  chemically synthesized
ttcaagctattctcctgcct

SEQ ID NO: 30096 - DNA, 20 bp, Artificial Sequence
  chemically synthesized
ttctcctgcctcagcctccc

SEQ ID NO: 30097 - DNA, 20 bp, Artificial Sequence
  chemically synthesized
tcctgcctcagcctcccaag

SEQ ID NO: 30098 - DNA, 20 bp, Artificial Sequence
  chemically synthesized
gcctcagcctcccaagtagc

SEQ ID NO: 30099 - DNA, 20 bp, Artificial Sequence
  chemically synthesized
cctcagcctcccaagtagct

SEQ ID NO: 30100 - DNA, 20 bp, Artificial Sequence
  chemically synthesized
ctcccaagtagctgggatta

SEQ ID NO: 30101 - DNA, 20 bp, Artificial Sequence
  chemically synthesized
tcccaagtagctgggattac

SEQ ID NO: 30102 - DNA, 20 bp, Artificial Sequence
  chemically synthesized
caggcacccgccaccatgcc

SEQ ID NO: 30103 - DNA, 20 bp, Artificial Sequence
  chemically synthesized
ccagctaatttttgtatttt

SEQ ID NO: 30104 - DNA, 20 bp, Artificial Sequence
  chemically synthesized
taatttttgtatttttagta

SEQ ID NO: 30105 - DNA, 20 bp, Artificial Sequence
  chemically synthesized
ttttgtatttttagtaaagc

SEQ ID NO: 30106 - DNA, 20 bp, Artificial Sequence
  chemically synthesized
tttgtatttttagtaaagcc

SEQ ID NO: 30107 - DNA, 20 bp, Artificial Sequence
  chemically synthesized
ttgtatttttagtaaagccg

SEQ ID NO: 30108 - DNA, 20 bp, Artificial Sequence
  chemically synthesized
gtttcaccatttcaccttgt

SEQ ID NO: 30109 - DNA, 20 bp, Artificial Sequence
  chemically synthesized
caccatttcaccttgttggc

SEQ ID NO: 30110 - DNA, 20 bp, Artificial Sequence
  chemically synthesized
accatttcaccttgttggcc

SEQ ID NO: 30111 - DNA, 20 bp, Artificial Sequence
  chemically synthesized
tttcaccttgttggccaggc

SEQ ID NO: 30112 - DNA, 20 bp, Artificial Sequence
  chemically synthesized
ggtgtcgaactcctgacctc

SEQ ID NO: 30113 - DNA, 20 bp, Artificial Sequence
  chemically synthesized
cctcaagtgatctgcctgcc

SEQ ID NO: 30114 - DNA, 20 bp, Artificial Sequence
  chemically synthesized
ctcaagtgatctgcctgcct

SEQ ID NO: 30115 - DNA, 20 bp, Artificial Sequence
  chemically synthesized
ctgcctgcctgggcctctga

SEQ ID NO: 30116 - DNA, 20 bp, Artificial Sequence
  chemically synthesized
gcctgggcctctgaaagtgc

SEQ ID NO: 30117 - DNA, 20 bp, Artificial Sequence
  chemically synthesized
cctgggcctctgaaagtgct

SEQ ID NO: 30118 - DNA, 20 bp, Artificial Sequence
  chemically synthesized
ctctgaaagtgctgggatta

SEQ ID NO: 30119 - DNA, 20 bp, Artificial Sequence
  chemically synthesized
tctgaaagtgctgggattat

SEQ ID NO: 30120 - DNA, 20 bp, Artificial Sequence
  chemically synthesized
agtgctgggattataggtgt

SEQ ID NO: 30121 - DNA, 20 bp, Artificial Sequence
  chemically synthesized
ataggtgtgagccaccatgc

SEQ ID NO: 30122 - DNA, 20 bp, Artificial Sequence
  chemically synthesized
taggtgtgagccaccatgcc

SEQ ID NO: 30123 - DNA, 20 bp, Artificial Sequence
  chemically synthesized
gcctctcttcaactcttcat

SEQ ID NO: 30124 - DNA, 20 bp, Artificial Sequence
  chemically synthesized
ctgtgcccaccctgcaatcc

SEQ ID NO: 30125 - DNA, 20 bp, Artificial Sequence
  chemically synthesized
tgcaatcctagcccctaaat

SEQ ID NO: 30126 - DNA, 20 bp, Artificial Sequence
  chemically synthesized
caatcctagcccctaaattg

SEQ ID NO: 30127 - DNA, 20 bp, Artificial Sequence
  chemically synthesized
tcctagcccctaaattggag

SEQ ID NO: 30128 - DNA, 20 bp, Artificial Sequence
  chemically synthesized
tgccttcatccttctcttcc

SEQ ID NO: 30129 - DNA, 20 bp, Artificial Sequence
  chemically synthesized
ttcatccttctcttcccaga

SEQ ID NO: 30130 - DNA, 20 bp, Artificial Sequence
  chemically synthesized
ccttctcttcccagacagcc

SEQ ID NO: 30131 - DNA, 20 bp, Artificial Sequence
  chemically synthesized
cttctcttcccagacagccg

SEQ ID NO: 30132 - DNA, 20 bp, Artificial Sequence
  chemically synthesized
ccagacagccgaggactgtg

SEQ ID NO: 30133 - DNA, 20 bp, Artificial Sequence
  chemically synthesized
cagacagccgaggactgtga

SEQ ID NO: 30134 - DNA, 20 bp, Artificial Sequence
  chemically synthesized
ggaaaaaaatcaccaaaatg

SEQ ID NO: 30135 - DNA, 20 bp, Artificial Sequence
  chemically synthesized
aaaaatcaccaaaatgcaga

SEQ ID NO: 30136 - DNA, 20 bp, Artificial Sequence
  chemically synthesized
caccacatattgatgcctca

SEQ ID NO: 30137 - DNA, 20 bp, Artificial Sequence
  chemically synthesized
cctccacccacctctctgct

SEQ ID NO: 30138 - DNA, 20 bp, Artificial Sequence
  chemically synthesized
tgctcagcaactcatttact

SEQ ID NO: 30139 - DNA, 20 bp, Artificial Sequence
  chemically synthesized
gcaactcatttacttggccc

SEQ ID NO: 30140 - DNA, 20 bp, Artificial Sequence
  chemically synthesized
tggccctggacactcctaaa

SEQ ID NO: 30141 - DNA, 20 bp, Artificial Sequence
  chemically synthesized
tccatgcctgcatccattta

SEQ ID NO: 30142 - DNA, 20 bp, Artificial Sequence
  chemically synthesized
atccatttacagtcgttcct

SEQ ID NO: 30143 - DNA, 20 bp, Artificial Sequence
  chemically synthesized
cagtcgttcctcagtatcca

SEQ ID NO: 30144 - DNA, 20 bp, Artificial Sequence
  chemically synthesized
cctcagtatccatggaaaat

SEQ ID NO: 30145 - DNA, 20 bp, Artificial Sequence
  chemically synthesized
cagtatccatggaaaattgg

SEQ ID NO: 30146 - DNA, 20 bp, Artificial Sequence
  chemically synthesized
atccatggaaaattggtggc

SEQ ID NO: 30147 - DNA, 20 bp, Artificial Sequence
  chemically synthesized
caagaccccctgcaaatatc

SEQ ID NO: 30148 - DNA, 20 bp, Artificial Sequence
  chemically synthesized
cctgcaaatatcaagatctg

SEQ ID NO: 30149 - DNA, 20 bp, Artificial Sequence
  chemically synthesized
atcaagatctgtggatgctc

SEQ ID NO: 30150 - DNA, 20 bp, Artificial Sequence
  chemically synthesized
tcaagtctccgatataaaaa

SEQ ID NO: 30151 - DNA, 20 bp, Artificial Sequence
  chemically synthesized
tttgtactttaaatcatctc

SEQ ID NO: 30152 - DNA, 20 bp, Artificial Sequence
  chemically synthesized
ttgtactttaaatcatctct

SEQ ID NO: 30153 - DNA, 20 bp, Artificial Sequence
  chemically synthesized
catctctaggtttctcttaa

SEQ ID NO: 30154 - DNA, 20 bp, Artificial Sequence
  chemically synthesized
caatgtaaatgctatgtaaa

SEQ ID NO: 30155 - DNA, 20 bp, Artificial Sequence
  chemically synthesized
agttgttatgctgtattgtt

SEQ ID NO: 30156 - DNA, 20 bp, Artificial Sequence
  chemically synthesized
gttgttatgctgtattgttt

SEQ ID NO: 30157 - DNA, 20 bp, Artificial Sequence
  chemically synthesized
ttgttatgctgtattgttta

SEQ ID NO: 30158 - DNA, 20 bp, Artificial Sequence
  chemically synthesized
tattgtttagggaataatga

SEQ ID NO: 30159 - DNA, 20 bp, Artificial Sequence
  chemically synthesized
tagggaataatgaaagataa

SEQ ID NO: 30160 - DNA, 20 bp, Artificial Sequence
  chemically synthesized
gggaataatgaaagataaaa

SEQ ID NO: 30161 - DNA, 20 bp, Artificial Sequence
  chemically synthesized
taaaagagtctgtacatgtt

SEQ ID NO: 30162 - DNA, 20 bp, Artificial Sequence
  chemically synthesized
aagagtctgtacatgttcag

SEQ ID NO: 30163 - DNA, 20 bp, Artificial Sequence
  chemically synthesized
gagtctgtacatgttcagta

SEQ ID NO: 30164 - DNA, 20 bp, Artificial Sequence
  chemically synthesized
tcttgaatatttttgatctg

SEQ ID NO: 30165 - DNA, 20 bp, Artificial Sequence
  chemically synthesized
tctgcagttaattgaatctg

SEQ ID NO: 30166 - DNA, 20 bp, Artificial Sequence
  chemically synthesized
gttaattgaatctgtggctg

SEQ ID NO: 30167 - DNA, 20 bp, Artificial Sequence
  chemically synthesized
tctgtggctgtggaactcac

SEQ ID NO: 30168 - DNA, 20 bp, Artificial Sequence
  chemically synthesized
ctgtggctgtggaactcaca

SEQ ID NO: 30169 - DNA, 20 bp, Artificial Sequence
  chemically synthesized
gtggctgtggaactcacaag

SEQ ID NO: 30170 - DNA, 20 bp, Artificial Sequence
  chemically synthesized
ggctgtggaactcacaagga

SEQ ID NO: 30171 - DNA, 20 bp, Artificial Sequence
  chemically synthesized
cacaaggagagctgactgta

SEQ ID NO: 30172 - DNA, 20 bp, Artificial Sequence
  chemically synthesized
ggagagctgactgtacagtg

SEQ ID NO: 30173 - DNA, 20 bp, Artificial Sequence
  chemically synthesized
gctgactgtacagtgtggtt

SEQ ID NO: 30174 - DNA, 20 bp, Artificial Sequence
  chemically synthesized
agtgtggttgagtgaaaaaa

SEQ ID NO: 30175 - DNA, 20 bp, Artificial Sequence
  chemically synthesized
ttgagtgaaaaaacagactt

SEQ ID NO: 30176 - DNA, 20 bp, Artificial Sequence
  chemically synthesized
gaaaaaacagactttagaat

SEQ ID NO: 30177 - DNA, 20 bp, Artificial Sequence
  chemically synthesized
aacagactttagaatcagat

SEQ ID NO: 30178 - DNA, 20 bp, Artificial Sequence
  chemically synthesized
gactttagaatcagatcaga

SEQ ID NO: 30179 - DNA, 20 bp, Artificial Sequence
  chemically synthesized
agaatcagatcagacagaaa

SEQ ID NO: 30180 - DNA, 20 bp, Artificial Sequence
  chemically synthesized
gaatcagatcagacagaaat

SEQ ID NO: 30181 - DNA, 20 bp, Artificial Sequence
  chemically synthesized
gacagaaataggtttgaatc

SEQ ID NO: 30182 - DNA, 20 bp, Artificial Sequence
  chemically synthesized
aatcaagtatctgcctcctc

SEQ ID NO: 30183 - DNA, 20 bp, Artificial Sequence
  chemically synthesized
ctcctctagacctgtgacct

SEQ ID NO: 30184 - DNA, 20 bp, Artificial Sequence
  chemically synthesized
ctagacctgtgaccttggac

SEQ ID NO: 30185 - DNA, 20 bp, Artificial Sequence
  chemically synthesized
tgaccttggacaagtcacac

SEQ ID NO: 30186 - DNA, 20 bp, Artificial Sequence
  chemically synthesized
taactttgtcaaatgtaaat

SEQ ID NO: 30187 - DNA, 20 bp, Artificial Sequence
  chemically synthesized
aactttgtcaaatgtaaatt

SEQ ID NO: 30188 - DNA, 20 bp, Artificial Sequence
  chemically synthesized
caaatgtaaattaggtttaa

SEQ ID NO: 30189 - DNA, 20 bp, Artificial Sequence
  chemically synthesized
atgtaaattaggtttaacag

SEQ ID NO: 30190 - DNA, 20 bp, Artificial Sequence
  chemically synthesized
aggtttaacagtagtataat

SEQ ID NO: 30191 - DNA, 20 bp, Artificial Sequence
  chemically synthesized
taataagaatatctatctca

SEQ ID NO: 30192 - DNA, 20 bp, Artificial Sequence
  chemically synthesized
aataagaatatctatctcac

SEQ ID NO: 30193 - DNA, 20 bp, Artificial Sequence
  chemically synthesized
aatatctatctcacaggtgt

SEQ ID NO: 30194 - DNA, 20 bp, Artificial Sequence
  chemically synthesized
atctatctcacaggtgttgg

SEQ ID NO: 30195 - DNA, 20 bp, Artificial Sequence
  chemically synthesized
tctatctcacaggtgttggc

SEQ ID NO: 30196 - DNA, 20 bp, Artificial Sequence
  chemically synthesized
ctcacaggtgttggcaggat

SEQ ID NO: 30197 - DNA, 20 bp, Artificial Sequence
  chemically synthesized
caggtgttggcaggatcagt

SEQ ID NO: 30198 - DNA, 20 bp, Artificial Sequence
  chemically synthesized
ggatcagtgagacaatatgc

SEQ ID NO: 30199 - DNA, 20 bp, Artificial Sequence
  chemically synthesized
tctccctactcctttcatgt

SEQ ID NO: 30200 - DNA, 20 bp, Artificial Sequence
  chemically synthesized
ttaaatttctcaattctctt

SEQ ID NO: 30201 - DNA, 20 bp, Artificial Sequence
  chemically synthesized
gctctttaataacttctgtg

SEQ ID NO: 30202 - DNA, 20 bp, Artificial Sequence
  chemically synthesized
gaaatgactattgtcacaat

SEQ ID NO: 30203 - DNA, 20 bp, Artificial Sequence
  chemically synthesized
aaatgactattgtcacaatc

SEQ ID NO: 30204 - DNA, 20 bp, Artificial Sequence
  chemically synthesized
tcacaatcaggaatgaccta

SEQ ID NO: 30205 - DNA, 20 bp, Artificial Sequence
  chemically synthesized
atgacctaaagaataatttt

SEQ ID NO: 30206 - DNA, 20 bp, Artificial Sequence
  chemically synthesized
ttttgagtttatgtatttac

SEQ ID NO: 30207 - DNA, 20 bp, Artificial Sequence
  chemically synthesized
attgttgatctctccctttt

SEQ ID NO: 30208 - DNA, 20 bp, Artificial Sequence
  chemically synthesized
ttgttgatctctcccttttt

SEQ ID NO: 30209 - DNA, 20 bp, Artificial Sequence
  chemically synthesized
ttataataatcactctattc

SEQ ID NO: 30210 - DNA, 20 bp, Artificial Sequence
  chemically synthesized
tctaactcctgttatccatc

SEQ ID NO: 30211 - DNA, 20 bp, Artificial Sequence
  chemically synthesized
ttaactcctgttcctctcca

SEQ ID NO: 30212 - DNA, 20 bp, Artificial Sequence
  chemically synthesized
ctccatggcccttaaatgtc

SEQ ID NO: 30213 - DNA, 20 bp, Artificial Sequence
  chemically synthesized
tccatggcccttaaatgtcc

SEQ ID NO: 30214 - DNA, 20 bp, Artificial Sequence
  chemically synthesized
ccatggcccttaaatgtcca

SEQ ID NO: 30215 - DNA, 20 bp, Artificial Sequence
  chemically synthesized
ttaaatgtccagggttctcc

SEQ ID NO: 30216 - DNA, 20 bp, Artificial Sequence
  chemically synthesized
taaatgtccagggttctccc

SEQ ID NO: 30217 - DNA, 20 bp, Artificial Sequence
  chemically synthesized
tccagggttctcccaggctc

SEQ ID NO: 30218 - DNA, 20 bp, Artificial Sequence
  chemically synthesized
gttctcccaggctccagcct

SEQ ID NO: 30219 - DNA, 20 bp, Artificial Sequence
  chemically synthesized
ttcaccttatatatacttgc

SEQ ID NO: 30220 - DNA, 20 bp, Artificial Sequence
  chemically synthesized
tcaccttatatatacttgct

SEQ ID NO: 30221 - DNA, 20 bp, Artificial Sequence
  chemically synthesized
caccttatatatacttgcta

SEQ ID NO: 30222 - DNA, 20 bp, Artificial Sequence
  chemically synthesized
ttatatatacttgctagggc

SEQ ID NO: 30223 - DNA, 20 bp, Artificial Sequence
  chemically synthesized
tatatatacttgctagggct

SEQ ID NO: 30224 - DNA, 20 bp, Artificial Sequence
  chemically synthesized
atacttgctagggctgggac

SEQ ID NO: 30225 - DNA, 20 bp, Artificial Sequence
  chemically synthesized
acttgctagggctgggacaa

SEQ ID NO: 30226 - DNA, 20 bp, Artificial Sequence
  chemically synthesized
gggacaagagtgaaccaaac

SEQ ID NO: 30227 - DNA, 20 bp, Artificial Sequence
  chemically synthesized
ggacaagagtgaaccaaaca

SEQ ID NO: 30228 - DNA, 20 bp, Artificial Sequence
  chemically synthesized
agtgaaccaaacaaggcatg

SEQ ID NO: 30229 - DNA, 20 bp, Artificial Sequence
  chemically synthesized
gtgaaccaaacaaggcatgt

SEQ ID NO: 30230 - DNA, 20 bp, Artificial Sequence
  chemically synthesized
tgaaccaaacaaggcatgta

SEQ ID NO: 30231 - DNA, 20 bp, Artificial Sequence
  chemically synthesized
gcatgtagggcacaatattt

SEQ ID NO: 30232 - DNA, 20 bp, Artificial Sequence
  chemically synthesized
atgtagggcacaatatttaa

SEQ ID NO: 30233 - DNA, 20 bp, Artificial Sequence
  chemically synthesized
tgtagggcacaatatttaag

SEQ ID NO: 30234 - DNA, 20 bp, Artificial Sequence
  chemically synthesized
tttaagaggtcctcacttct

SEQ ID NO: 30235 - DNA, 20 bp, Artificial Sequence
  chemically synthesized
ttaagaggtcctcacttctc

SEQ ID NO: 30236 - DNA, 20 bp, Artificial Sequence
  chemically synthesized
taagaggtcctcacttctcg

SEQ ID NO: 30237 - DNA, 20 bp, Artificial Sequence
  chemically synthesized
cctcacttctcggggcatac

SEQ ID NO: 30238 - DNA, 20 bp, Artificial Sequence
  chemically synthesized
acaagtatatttatgcccta

SEQ ID NO: 30239 - DNA, 20 bp, Artificial Sequence
  chemically synthesized
caagtatatttatgccctac

SEQ ID NO: 30240 - DNA, 20 bp, Artificial Sequence
  chemically synthesized
cctacaggccttgcttacca

SEQ ID NO: 30241 - DNA, 20 bp, Artificial Sequence
  chemically synthesized
aggccttgcttaccacagtc

SEQ ID NO: 30242 - DNA, 20 bp, Artificial Sequence
  chemically synthesized
ttgcttaccacagtctagtc

SEQ ID NO: 30243 - DNA, 20 bp, Artificial Sequence
  chemically synthesized
ccctgtcaacaaaatttact

SEQ ID NO: 30244 - DNA, 20 bp, Artificial Sequence
  chemically synthesized
gagcatacaaccactactgc

SEQ ID NO: 30245 - DNA, 20 bp, Artificial Sequence
  chemically synthesized
agcatacaaccactactgcc

SEQ ID NO: 30246 - DNA, 20 bp, Artificial Sequence
  chemically synthesized
actactgccaggcactgtac

SEQ ID NO: 30247 - DNA, 20 bp, Artificial Sequence
  chemically synthesized
ctactgccaggcactgtact

SEQ ID NO: 30248 - DNA, 20 bp, Artificial Sequence
  chemically synthesized
caatatccatgctcactctc

SEQ ID NO: 30249 - DNA, 20 bp, Artificial Sequence
  chemically synthesized
tctccagatgcccacacacg

SEQ ID NO: 30250 - DNA, 20 bp, Artificial Sequence
  chemically synthesized
gtggctgtaactactgttta

SEQ ID NO: 30251 - DNA, 20 bp, Artificial Sequence
  chemically synthesized
actactgtttacagaacaat

SEQ ID NO: 30252 - DNA, 20 bp, Artificial Sequence
  chemically synthesized
gagttccaaatactcaccta

SEQ ID NO: 30253 - DNA, 20 bp, Artificial Sequence
  chemically synthesized
tccaaatactcacctatagt

SEQ ID NO: 30254 - DNA, 20 bp, Artificial Sequence
  chemically synthesized
cagatacgtctcctgaattt

SEQ ID NO: 30255 - DNA, 20 bp, Artificial Sequence
  chemically synthesized
cctaactgtatatcataatg

SEQ ID NO: 30256 - DNA, 20 bp, Artificial Sequence
  chemically synthesized
actgtatatcataatgtagc

SEQ ID NO: 30257 - DNA, 20 bp, Artificial Sequence
  chemically synthesized
tatcataatgtagccagtaa

SEQ ID NO: 30258 - DNA, 20 bp, Artificial Sequence
  chemically synthesized
atgtaatgcttctgctgtgt

SEQ ID NO: 30259 - DNA, 20 bp, Artificial Sequence
  chemically synthesized
gctgtgttggacactgtgct

SEQ ID NO: 30260 - DNA, 20 bp, Artificial Sequence
  chemically synthesized
atctcacttcatcctcacaa

SEQ ID NO: 30261 - DNA, 20 bp, Artificial Sequence
  chemically synthesized
catcctcacaaaagtcccac

SEQ ID NO: 30262 - DNA, 20 bp, Artificial Sequence
  chemically synthesized
ctcacaaaagtcccacgaga

SEQ ID NO: 30263 - DNA, 20 bp, Artificial Sequence
  chemically synthesized
tcacaaaagtcccacgagat

SEQ ID NO: 30264 - DNA, 20 bp, Artificial Sequence
  chemically synthesized
gtcatcttatttttatgaat

SEQ ID NO: 30265 - DNA, 20 bp, Artificial Sequence
  chemically synthesized
tcatcttatttttatgaatg

SEQ ID NO: 30266 - DNA, 20 bp, Artificial Sequence
  chemically synthesized
tcttatttttatgaatgagg

SEQ ID NO: 30267 - DNA, 20 bp, Artificial Sequence
  chemically synthesized
atttttatgaatgaggaaga

SEQ ID NO: 30268 - DNA, 20 bp, Artificial Sequence
  chemically synthesized
gaatgaggaagatagattca

SEQ ID NO: 30269 - DNA, 20 bp, Artificial Sequence
  chemically synthesized
atgaggaagatagattcata

SEQ ID NO: 30270 - DNA, 20 bp, Artificial Sequence
  chemically synthesized
tgaggaagatagattcatag

SEQ ID NO: 30271 - DNA, 20 bp, Artificial Sequence
  chemically synthesized
aagatagattcatagaggct

SEQ ID NO: 30272 - DNA, 20 bp, Artificial Sequence
  chemically synthesized
agatagattcatagaggcta

SEQ ID NO: 30273 - DNA, 20 bp, Artificial Sequence
  chemically synthesized
gatagattcatagaggctaa

SEQ ID NO: 30274 - DNA, 20 bp, Artificial Sequence
  chemically synthesized
agaggctaagggctttgccc

SEQ ID NO: 30275 - DNA, 20 bp, Artificial Sequence
  chemically synthesized
gaggctaagggctttgccca

SEQ ID NO: 30276 - DNA, 20 bp, Artificial Sequence
  chemically synthesized
aggtaacatactaaaacatt

SEQ ID NO: 30277 - DNA, 20 bp, Artificial Sequence
  chemically synthesized
ggtaacatactaaaacattc

SEQ ID NO: 30278 - DNA, 20 bp, Artificial Sequence
  chemically synthesized
atactaaaacattcaggatt

SEQ ID NO: 30279 - DNA, 20 bp, Artificial Sequence
  chemically synthesized
aacattcaggattcagactc

SEQ ID NO: 30280 - DNA, 20 bp, Artificial Sequence
  chemically synthesized
attcaggattcagactctgg

SEQ ID NO: 30281 - DNA, 20 bp, Artificial Sequence
  chemically synthesized
aggattcagactctggcagt

SEQ ID NO: 30282 - DNA, 20 bp, Artificial Sequence
  chemically synthesized
agactctggcagtcagacta

SEQ ID NO: 30283 - DNA, 20 bp, Artificial Sequence
  chemically synthesized
actctggcagtcagactaaa

SEQ ID NO: 30284 - DNA, 20 bp, Artificial Sequence
  chemically synthesized
tggcagtcagactaaagagc

SEQ ID NO: 30285 - DNA, 20 bp, Artificial Sequence
  chemically synthesized
gactaaagagccagttctct

SEQ ID NO: 30286 - DNA, 20 bp, Artificial Sequence
  chemically synthesized
ttctcttagacattattctg

SEQ ID NO: 30287 - DNA, 20 bp, Artificial Sequence
  chemically synthesized
ccataatcacatcaaacaca

SEQ ID NO: 30288 - DNA, 20 bp, Artificial Sequence
  chemically synthesized
acatcaaacacaaagtcccc

SEQ ID NO: 30289 - DNA, 20 bp, Artificial Sequence
  chemically synthesized
acacaaagtccccaagactc

SEQ ID NO: 30290 - DNA, 20 bp, Artificial Sequence
  chemically synthesized
gccatttccccttccatacc

SEQ ID NO: 30291 - DNA, 20 bp, Artificial Sequence
  chemically synthesized
tttccccttccatacccaga

SEQ ID NO: 30292 - DNA, 20 bp, Artificial Sequence
  chemically synthesized
ccttccatacccagatggtt

SEQ ID NO: 30293 - DNA, 20 bp, Artificial Sequence
  chemically synthesized
ttttttgtactgctactgtt

SEQ ID NO: 30294 - DNA, 20 bp, Artificial Sequence
  chemically synthesized
tttttgtactgctactgttc

SEQ ID NO: 30295 - DNA, 20 bp, Artificial Sequence
  chemically synthesized
tactgctactgttcaggttc

SEQ ID NO: 30296 - DNA, 20 bp, Artificial Sequence
  chemically synthesized
tctagcctttatgtctcccg

SEQ ID NO: 30297 - DNA, 20 bp, Artificial Sequence
  chemically synthesized
tctcccgcagataattgcaa

SEQ ID NO: 30298 - DNA, 20 bp, Artificial Sequence
  chemically synthesized
gcagataattgcaatagtct

SEQ ID NO: 30299 - DNA, 20 bp, Artificial Sequence
  chemically synthesized
cagataattgcaatagtctc

SEQ ID NO: 30300 - DNA, 20 bp, Artificial Sequence
  chemically synthesized
gtctcaggactgctctctcc

SEQ ID NO: 30301 - DNA, 20 bp, Artificial Sequence
  chemically synthesized
ggactgctctctcctagtct

SEQ ID NO: 30302 - DNA, 20 bp, Artificial Sequence
  chemically synthesized
gctctctcctagtcttggta

SEQ ID NO: 30303 - DNA, 20 bp, Artificial Sequence
  chemically synthesized
ctcccccactatcatttcat

SEQ ID NO: 30304 - DNA, 20 bp, Artificial Sequence
  chemically synthesized
tcatttcattagcgtgttgc

SEQ ID NO: 30305 - DNA, 20 bp, Artificial Sequence
  chemically synthesized
tcattagcgtgttgccagac

SEQ ID NO: 30306 - DNA, 20 bp, Artificial Sequence
  chemically synthesized
cattagcgtgttgccagact

SEQ ID NO: 30307 - DNA, 20 bp, Artificial Sequence
  chemically synthesized
ccagactgggcatcctaaat

SEQ ID NO: 30308 - DNA, 20 bp, Artificial Sequence
  chemically synthesized
gggcatcctaaatcagccat

SEQ ID NO: 30309 - DNA, 20 bp, Artificial Sequence
  chemically synthesized
catcctaaatcagccatcag

SEQ ID NO: 30310 - DNA, 20 bp, Artificial Sequence
  chemically synthesized
attttattgtccaatctcct

SEQ ID NO: 30311 - DNA, 20 bp, Artificial Sequence
  chemically synthesized
ttttattgtccaatctcctt

SEQ ID NO: 30312 - DNA, 20 bp, Artificial Sequence
  chemically synthesized
tgacttcattatctgatgac

SEQ ID NO: 30313 - DNA, 20 bp, Artificial Sequence
  chemically synthesized
atctgatgaccagctctgcc

SEQ ID NO: 30314 - DNA, 20 bp, Artificial Sequence
  chemically synthesized
tttacctgtctcacttgtca

SEQ ID NO: 30315 - DNA, 20 bp, Artificial Sequence
  chemically synthesized
ctcacttgtcatagtccata

SEQ ID NO: 30316 - DNA, 20 bp, Artificial Sequence
  chemically synthesized
cctcacgttcttgcaaatct

SEQ ID NO: 30317 - DNA, 20 bp, Artificial Sequence
  chemically synthesized
gcaaatctgagtctttgcac

SEQ ID NO: 30318 - DNA, 20 bp, Artificial Sequence
  chemically synthesized
tgcataaaatgcccttatat

SEQ ID NO: 30319 - DNA, 20 bp, Artificial Sequence
  chemically synthesized
gcccttatatcagacattta

SEQ ID NO: 30320 - DNA, 20 bp, Artificial Sequence
  chemically synthesized
ccttatatcagacatttaaa

SEQ ID NO: 30321 - DNA, 20 bp, Artificial Sequence
  chemically synthesized
ttatatcagacatttaaaga

SEQ ID NO: 30322 - DNA, 20 bp, Artificial Sequence
  chemically synthesized
atatcagacatttaaagaga

SEQ ID NO: 30323 - DNA, 20 bp, Artificial Sequence
  chemically synthesized
agaacgcctactcatctttt

SEQ ID NO: 30324 - DNA, 20 bp, Artificial Sequence
  chemically synthesized
cctactcatcttttaagacc

SEQ ID NO: 30325 - DNA, 20 bp, Artificial Sequence
  chemically synthesized
ttcctttctctatgatccct

SEQ ID NO: 30326 - DNA, 20 bp, Artificial Sequence
  chemically synthesized
ctctatgatcccttagtacc

SEQ ID NO: 30327 - DNA, 20 bp, Artificial Sequence
  chemically synthesized
ttatattgaaacctctcacc

SEQ ID NO: 30328 - DNA, 20 bp, Artificial Sequence
  chemically synthesized
cacctggcctcatgctgctt

SEQ ID NO: 30329 - DNA, 20 bp, Artificial Sequence
  chemically synthesized
cctcatgctgctttagatca

SEQ ID NO: 30330 - DNA, 20 bp, Artificial Sequence
  chemically synthesized
tcatgctgctttagatcaaa

SEQ ID NO: 30331 - DNA, 20 bp, Artificial Sequence
  chemically synthesized
catgctgctttagatcaaag

SEQ ID NO: 30332 - DNA, 20 bp, Artificial Sequence
  chemically synthesized
atgctgctttagatcaaaga

SEQ ID NO: 30333 - DNA, 20 bp, Artificial Sequence
  chemically synthesized
gctgctttagatcaaagagg

SEQ ID NO: 30334 - DNA, 20 bp, Artificial Sequence
  chemically synthesized
tttagatcaaagagggagtc

SEQ ID NO: 30335 - DNA, 20 bp, Artificial Sequence
  chemically synthesized
ctggtttatccccatacccc

SEQ ID NO: 30336 - DNA, 20 bp, Artificial Sequence
  chemically synthesized
atacccctagtaccctgaca

SEQ ID NO: 30337 - DNA, 20 bp, Artificial Sequence
  chemically synthesized
tagtaccctgacacagtacc

SEQ ID NO: 30338 - DNA, 20 bp, Artificial Sequence
  chemically synthesized
tgacacagtacctggcacca

SEQ ID NO: 30339 - DNA, 20 bp, Artificial Sequence
  chemically synthesized
ctggcaccatagttgtaact

SEQ ID NO: 30340 - DNA, 20 bp, Artificial Sequence
  chemically synthesized
aactcagtaatgtctgaatg

SEQ ID NO: 30341 - DNA, 20 bp, Artificial Sequence
  chemically synthesized
actcagtaatgtctgaatga

SEQ ID NO: 30342 - DNA, 20 bp, Artificial Sequence
  chemically synthesized
tacactttacaaaactaaac

SEQ ID NO: 30343 - DNA, 20 bp, Artificial Sequence
  chemically synthesized
acaaaactaaactggtttta

SEQ ID NO: 30344 - DNA, 20 bp, Artificial Sequence
  chemically synthesized
aactgttgcaataataccta

SEQ ID NO: 30345 - DNA, 20 bp, Artificial Sequence
  chemically synthesized
actgttgcaataatacctaa

SEQ ID NO: 30346 - DNA, 20 bp, Artificial Sequence
  chemically synthesized
gttgcaataatacctaaagg

SEQ ID NO: 30347 - DNA, 20 bp, Artificial Sequence
  chemically synthesized
gcaataatacctaaaggcag

SEQ ID NO: 30348 - DNA, 20 bp, Artificial Sequence
  chemically synthesized
gccatgaaaatgcaacatct

SEQ ID NO: 30349 - DNA, 20 bp, Artificial Sequence
  chemically synthesized
tcactcaccgaaactccttt

SEQ ID NO: 30350 - DNA, 20 bp, Artificial Sequence
  chemically synthesized
ctcaccgaaactccttttag

SEQ ID NO: 30351 - DNA, 20 bp, Artificial Sequence
  chemically synthesized
aactccttttagaagccaat

SEQ ID NO: 30352 - DNA, 20 bp, Artificial Sequence
  chemically synthesized
ctccttttagaagccaatga

SEQ ID NO: 30353 - DNA, 20 bp, Artificial Sequence
  chemically synthesized
agaagccaatgagagtttaa

SEQ ID NO: 30354 - DNA, 20 bp, Artificial Sequence
  chemically synthesized
agccaatgagagtttaatag

SEQ ID NO: 30355 - DNA, 20 bp, Artificial Sequence
  chemically synthesized
caatgagagtttaatagcag

SEQ ID NO: 30356 - DNA, 20 bp, Artificial Sequence
  chemically synthesized
atgagagtttaatagcagaa

SEQ ID NO: 30357 - DNA, 20 bp, Artificial Sequence
  chemically synthesized
gagagtttaatagcagaaga

SEQ ID NO: 30358 - DNA, 20 bp, Artificial Sequence
  chemically synthesized
gcattaatactgtctatcct

SEQ ID NO: 30359 - DNA, 20 bp, Artificial Sequence
  chemically synthesized
tatccttagaaaaattcccc

SEQ ID NO: 30360 - DNA, 20 bp, Artificial Sequence
  chemically synthesized
attcccctggccccttcctc

SEQ ID NO: 30361 - DNA, 20 bp, Artificial Sequence
  chemically synthesized
ttcccctggccccttcctca

SEQ ID NO: 30362 - DNA, 20 bp, Artificial Sequence
  chemically synthesized
tcccctggccccttcctcaa

SEQ ID NO: 30363 - DNA, 20 bp, Artificial Sequence
  chemically synthesized
cctcaagggcttattatctc

SEQ ID NO: 30364 - DNA, 20 bp, Artificial Sequence
  chemically synthesized
cttattatctctggctacaa

SEQ ID NO: 30365 - DNA, 20 bp, Artificial Sequence
  chemically synthesized
atctctggctacaatggctg

SEQ ID NO: 30366 - DNA, 20 bp, Artificial Sequence
  chemically synthesized
aatcacattgcctttctcct

SEQ ID NO: 30367 - DNA, 20 bp, Artificial Sequence
  chemically synthesized
cctttctccttagtattatc

SEQ ID NO: 30368 - DNA, 20 bp, Artificial Sequence
  chemically synthesized
ctttctccttagtattatct

SEQ ID NO: 30369 - DNA, 20 bp, Artificial Sequence
  chemically synthesized
tttctccttagtattatctg

SEQ ID NO: 30370 - DNA, 20 bp, Artificial Sequence
  chemically synthesized
tcgtatacttaacttccctt

SEQ ID NO: 30371 - DNA, 20 bp, Artificial Sequence
  chemically synthesized
cgtatacttaacttcccttc

SEQ ID NO: 30372 - DNA, 20 bp, Artificial Sequence
  chemically synthesized
cttcccttcaggtttatcgc

SEQ ID NO: 30373 - DNA, 20 bp, Artificial Sequence
  chemically synthesized
tatcgctagtcattatttcc

SEQ ID NO: 30374 - DNA, 20 bp, Artificial Sequence
  chemically synthesized
atcgctagtcattatttccc

SEQ ID NO: 30375 - DNA, 20 bp, Artificial Sequence
  chemically synthesized
cattatttcccaggctccaa

SEQ ID NO: 30376 - DNA, 20 bp, Artificial Sequence
  chemically synthesized
tttcccaggctccaaaagcc

SEQ ID NO: 30377 - DNA, 20 bp, Artificial Sequence
  chemically synthesized
attcttatctatcctttccc

SEQ ID NO: 30378 - DNA, 20 bp, Artificial Sequence
  chemically synthesized
tatcctttccccagcatctg

SEQ ID NO: 30379 - DNA, 20 bp, Artificial Sequence
  chemically synthesized
ccccagcatctgaagtcttc

SEQ ID NO: 30380 - DNA, 20 bp, Artificial Sequence
  chemically synthesized
cccagcatctgaagtcttca

SEQ ID NO: 30381 - DNA, 20 bp, Artificial Sequence
  chemically synthesized
ccagcatctgaagtcttcaa

SEQ ID NO: 30382 - DNA, 20 bp, Artificial Sequence
  chemically synthesized
cagcatctgaagtcttcaag

SEQ ID NO: 30383 - DNA, 20 bp, Artificial Sequence
  chemically synthesized
agcatctgaagtcttcaagg

SEQ ID NO: 30384 - DNA, 20 bp, Artificial Sequence
  chemically synthesized
atctgaagtcttcaaggggg

SEQ ID NO: 30385 - DNA, 20 bp, Artificial Sequence
  chemically synthesized
tgaagtcttcaagggggcag

SEQ ID NO: 30386 - DNA, 20 bp, Artificial Sequence
  chemically synthesized
tcatcatctcaccacttata

SEQ ID NO: 30387 - DNA, 20 bp, Artificial Sequence
  chemically synthesized
tcatctcaccacttatatag

SEQ ID NO: 30388 - DNA, 20 bp, Artificial Sequence
  chemically synthesized
ctcaccacttatatagaaga

SEQ ID NO: 30389 - DNA, 20 bp, Artificial Sequence
  chemically synthesized
tcaccacttatatagaagaa

SEQ ID NO: 30390 - DNA, 20 bp, Artificial Sequence
  chemically synthesized
caccacttatatagaagaaa

SEQ ID NO: 30391 - DNA, 20 bp, Artificial Sequence
  chemically synthesized
cttatatagaagaaagggtt

SEQ ID NO: 30392 - DNA, 20 bp, Artificial Sequence
  chemically synthesized
gtttggatgctttgtcctcc

SEQ ID NO: 30393 - DNA, 20 bp, Artificial Sequence
  chemically synthesized
ctcccagatgtcacactaat

SEQ ID NO: 30394 - DNA, 20 bp, Artificial Sequence
  chemically synthesized
cactaatgagatatatctaa

SEQ ID NO: 30395 - DNA, 20 bp, Artificial Sequence
  chemically synthesized
tgctttatgtcctgctttgt

SEQ ID NO: 30396 - DNA, 20 bp, Artificial Sequence
  chemically synthesized
cttgactttactcactttgc

SEQ ID NO: 30397 - DNA, 20 bp, Artificial Sequence
  chemically synthesized
atttttttttatcgttattt

SEQ ID NO: 30398 - DNA, 20 bp, Artificial Sequence
  chemically synthesized
ttatcgttatttcagcattt

SEQ ID NO: 30399 - DNA, 20 bp, Artificial Sequence
  chemically synthesized
agcatttcagtctgatttca

SEQ ID NO: 30400 - DNA, 20 bp, Artificial Sequence
  chemically synthesized
ttcacagctgacatcatgtc

SEQ ID NO: 30401 - DNA, 20 bp, Artificial Sequence
  chemically synthesized
cacagctgacatcatgtctg

SEQ ID NO: 30402 - DNA, 20 bp, Artificial Sequence
  chemically synthesized
agctgacatcatgtctggag

SEQ ID NO: 30403 - DNA, 20 bp, Artificial Sequence
  chemically synthesized
gctgacatcatgtctggagt

SEQ ID NO: 30404 - DNA, 20 bp, Artificial Sequence
  chemically synthesized
catgtctggagtgggaacca

SEQ ID NO: 30405 - DNA, 20 bp, Artificial Sequence
  chemically synthesized
atgtctggagtgggaaccac

SEQ ID NO: 30406 - DNA, 20 bp, Artificial Sequence
  chemically synthesized
tgtctggagtgggaaccaca

SEQ ID NO: 30407 - DNA, 20 bp, Artificial Sequence
  chemically synthesized
tggagtgggaaccacagggc

SEQ ID NO: 30408 - DNA, 20 bp, Artificial Sequence
  chemically synthesized
gtgggaaccacagggccagt

SEQ ID NO: 30409 - DNA, 20 bp, Artificial Sequence
  chemically synthesized
cacagggccagtcagctttc

SEQ ID NO: 30410 - DNA, 20 bp, Artificial Sequence
  chemically synthesized
acagggccagtcagctttct

SEQ ID NO: 30411 - DNA, 20 bp, Artificial Sequence
  chemically synthesized
cagggccagtcagctttctg

SEQ ID NO: 30412 - DNA, 20 bp, Artificial Sequence
  chemically synthesized
agggccagtcagctttctgg

SEQ ID NO: 30413 - DNA, 20 bp, Artificial Sequence
  chemically synthesized
gtcagctttctgggggtgct

SEQ ID NO: 30414 - DNA, 20 bp, Artificial Sequence
  chemically synthesized
tcagctttctgggggtgctt

SEQ ID NO: 30415 - DNA, 20 bp, Artificial Sequence
  chemically synthesized
cagctttctgggggtgctta

SEQ ID NO: 30416 - DNA, 20 bp, Artificial Sequence
  chemically synthesized
tttctgggggtgcttagggt

SEQ ID NO: 30417 - DNA, 20 bp, Artificial Sequence
  chemically synthesized
agggttggcacccctgatcc

SEQ ID NO: 30418 - DNA, 20 bp, Artificial Sequence
  chemically synthesized
acccctgatcctggtactgt

SEQ ID NO: 30419 - DNA, 20 bp, Artificial Sequence
  chemically synthesized
atcctggtactgtcagctac

SEQ ID NO: 30420 - DNA, 20 bp, Artificial Sequence
  chemically synthesized
tcagctactagatttgattc

SEQ ID NO: 30421 - DNA, 20 bp, Artificial Sequence
  chemically synthesized
ctactagatttgattctaga

SEQ ID NO: 30422 - DNA, 20 bp, Artificial Sequence
  chemically synthesized
tttgattctagaaagttgac

SEQ ID NO: 30423 - DNA, 20 bp, Artificial Sequence
  chemically synthesized
attctagaaagttgacaagt

SEQ ID NO: 30424 - DNA, 20 bp, Artificial Sequence
  chemically synthesized
gtgtgataaatgcttcctgt

SEQ ID NO: 30425 - DNA, 20 bp, Artificial Sequence
  chemically synthesized
gaacatgctgtttgtccaaa

SEQ ID NO: 30426 - DNA, 20 bp, Artificial Sequence
  chemically synthesized
aacatgctgtttgtccaaat

SEQ ID NO: 30427 - DNA, 20 bp, Artificial Sequence
  chemically synthesized
cttccctgtatgccttcctc

SEQ ID NO: 30428 - DNA, 20 bp, Artificial Sequence
  chemically synthesized
ttccctgtatgccttcctct

SEQ ID NO: 30429 - DNA, 20 bp, Artificial Sequence
  chemically synthesized
cttcctctgggaaatacata

SEQ ID NO: 30430 - DNA, 20 bp, Artificial Sequence
  chemically synthesized
ggaaatacataaagtcactg

SEQ ID NO: 30431 - DNA, 20 bp, Artificial Sequence
  chemically synthesized
actgtagttgtgaaaaaaca

SEQ ID NO: 30432 - DNA, 20 bp, Artificial Sequence
  chemically synthesized
caaagtgatatatgttgcat

SEQ ID NO: 30433 - DNA, 20 bp, Artificial Sequence
  chemically synthesized
tactctttatgtcaattctt

SEQ ID NO: 30434 - DNA, 20 bp, Artificial Sequence
  chemically synthesized
ttaagcttgcttttctcccc

SEQ ID NO: 30435 - DNA, 20 bp, Artificial Sequence
  chemically synthesized
taagcttgcttttctcccct

SEQ ID NO: 30436 - DNA, 20 bp, Artificial Sequence
  chemically synthesized
aagcttgcttttctccccta

SEQ ID NO: 30437 - DNA, 20 bp, Artificial Sequence
  chemically synthesized
ctcccctagggaactcaact

SEQ ID NO: 30438 - DNA, 20 bp, Artificial Sequence
  chemically synthesized
tttccccaaatatcaactcc

SEQ ID NO: 30439 - DNA, 20 bp, Artificial Sequence
  chemically synthesized
caactccaagatgtttgaca

SEQ ID NO: 30440 - DNA, 20 bp, Artificial Sequence
  chemically synthesized
actccaagatgtttgacata

SEQ ID NO: 30441 - DNA, 20 bp, Artificial Sequence
  chemically synthesized
attttttcctaatccatgaa

SEQ ID NO: 30442 - DNA, 20 bp, Artificial Sequence
  chemically synthesized
tcctaatccatgaaaagctt

SEQ ID NO: 30443 - DNA, 20 bp, Artificial Sequence
  chemically synthesized
aaagctttggtgataactaa

SEQ ID NO: 30444 - DNA, 20 bp, Artificial Sequence
  chemically synthesized
aactaacagcttgctaatga

SEQ ID NO: 30445 - DNA, 20 bp, Artificial Sequence
  chemically synthesized
actaacagcttgctaatgaa

SEQ ID NO: 30446 - DNA, 20 bp, Artificial Sequence
  chemically synthesized
ttaactaaaactttaaattg

SEQ ID NO: 30447 - DNA, 20 bp, Artificial Sequence
  chemically synthesized
agatatataatttaaaaaat

SEQ ID NO: 30448 - DNA, 20 bp, Artificial Sequence
  chemically synthesized
atatataatttaaaaaatta

SEQ ID NO: 30449 - DNA, 20 bp, Artificial Sequence
  chemically synthesized
aatgtcatatatcttaaaat

SEQ ID NO: 30450 - DNA, 20 bp, Artificial Sequence
  chemically synthesized
atcagactttttgtgtaaat

SEQ ID NO: 30451 - DNA, 20 bp, Artificial Sequence
  chemically synthesized
tcagactttttgtgtaaata

SEQ ID NO: 30452 - DNA, 20 bp, Artificial Sequence
  chemically synthesized
tgtttcccattttgatttca

SEQ ID NO: 30453 - DNA, 20 bp, Artificial Sequence
  chemically synthesized
ttcccattttgatttcaaag

SEQ ID NO: 30454 - DNA, 20 bp, Artificial Sequence
  chemically synthesized
cattttgatttcaaagtggt

SEQ ID NO: 30455 - DNA, 20 bp, Artificial Sequence
  chemically synthesized
aagtccaaacaaaaataatg

SEQ ID NO: 30456 - DNA, 20 bp, Artificial Sequence
  chemically synthesized
acttttaatttttttaaacc

SEQ ID NO: 30457 - DNA, 20 bp, Artificial Sequence
  chemically synthesized
cttttaatttttttaaacca

SEQ ID NO: 30458 - DNA, 20 bp, Artificial Sequence
  chemically synthesized
tttaatttttttaaaccaag

SEQ ID NO: 30459 - DNA, 20 bp, Artificial Sequence
  chemically synthesized
aggagatgaatgttttctaa

SEQ ID NO: 30460 - DNA, 20 bp, Artificial Sequence
  chemically synthesized
ggagatgaatgttttctaac

SEQ ID NO: 30461 - DNA, 20 bp, Artificial Sequence
  chemically synthesized
tgaccaaatcatgaactgaa

SEQ ID NO: 30462 - DNA, 20 bp, Artificial Sequence
  chemically synthesized
attaaacataaatgcatcat

SEQ ID NO: 30463 - DNA, 20 bp, Artificial Sequence
  chemically synthesized
ataagcattgtcgatctatt

SEQ ID NO: 30464 - DNA, 20 bp, Artificial Sequence
  chemically synthesized
tctatttagttttaaaaatg

SEQ ID NO: 30465 - DNA, 20 bp, Artificial Sequence
  chemically synthesized
atttagttttaaaaatgaag

SEQ ID NO: 30466 - DNA, 20 bp, Artificial Sequence
  chemically synthesized
tagttttaaaaatgaagaag

SEQ ID NO: 30467 - DNA, 20 bp, Artificial Sequence
  chemically synthesized
aaatgaagaagaagaaaacc

SEQ ID NO: 30468 - DNA, 20 bp, Artificial Sequence
  chemically synthesized
agaagaaaacctagctaaca

SEQ ID NO: 30469 - DNA, 20 bp, Artificial Sequence
  chemically synthesized
aaacctagctaacaaagaac

SEQ ID NO: 30470 - DNA, 20 bp, Artificial Sequence
  chemically synthesized
gtacttaccaacctgcgtgc

SEQ ID NO: 30471 - DNA, 20 bp, Artificial Sequence
  chemically synthesized
ccaacctgcgtgctggctgt

SEQ ID NO: 30472 - DNA, 20 bp, Artificial Sequence
  chemically synthesized
caaatcatgtaatcaaaatt

SEQ ID NO: 30473 - DNA, 20 bp, Artificial Sequence
  chemically synthesized
catgtaatcaaaatttagtg

SEQ ID NO: 30474 - DNA, 20 bp, Artificial Sequence
  chemically synthesized
gtaatcaaaatttagtgaag

SEQ ID NO: 30475 - DNA, 20 bp, Artificial Sequence
  chemically synthesized
tcaaaatttagtgaagaaga

SEQ ID NO: 30476 - DNA, 20 bp, Artificial Sequence
  chemically synthesized
tttagtgaagaagacagcat

SEQ ID NO: 30477 - DNA, 20 bp, Artificial Sequence
  chemically synthesized
tcagatatttctatatctaa

SEQ ID NO: 30478 - DNA, 20 bp, Artificial Sequence
  chemically synthesized
cagatatttctatatctaaa

SEQ ID NO: 30479 - DNA, 20 bp, Artificial Sequence
  chemically synthesized
tatttctatatctaaaaggc

SEQ ID NO: 30480 - DNA, 20 bp, Artificial Sequence
  chemically synthesized
atactcaatgtattttaaaa

SEQ ID NO: 30481 - DNA, 20 bp, Artificial Sequence
  chemically synthesized
tactcaatgtattttaaaaa

SEQ ID NO: 30482 - DNA, 20 bp, Artificial Sequence
  chemically synthesized
aggaaacaaacctgtacatt

SEQ ID NO: 30483 - DNA, 20 bp, Artificial Sequence
  chemically synthesized
aaacctgtacattcagcact

SEQ ID NO: 30484 - DNA, 20 bp, Artificial Sequence
  chemically synthesized
cctgtacattcagcactgag

SEQ ID NO: 30485 - DNA, 20 bp, Artificial Sequence
  chemically synthesized
gcactgagtagatatcctaa

SEQ ID NO: 30486 - DNA, 20 bp, Artificial Sequence
  chemically synthesized
cactgagtagatatcctaaa

SEQ ID NO: 30487 - DNA, 20 bp, Artificial Sequence
  chemically synthesized
tgagtagatatcctaaaagg

SEQ ID NO: 30488 - DNA, 20 bp, Artificial Sequence
  chemically synthesized
tagatatcctaaaaggcaga

SEQ ID NO: 30489 - DNA, 20 bp, Artificial Sequence
  chemically synthesized
cctaaaaggcagatggtgat

SEQ ID NO: 30490 - DNA, 20 bp, Artificial Sequence
  chemically synthesized
ctaaaaggcagatggtgatg

SEQ ID NO: 30491 - DNA, 20 bp, Artificial Sequence
  chemically synthesized
aggcagatggtgatgaggcc

SEQ ID NO: 30492 - DNA, 20 bp, Artificial Sequence
  chemically synthesized
acgcgctgcataacctttgc

SEQ ID NO: 30493 - DNA, 20 bp, Artificial Sequence
  chemically synthesized
cgctgcataacctttgctag

SEQ ID NO: 30494 - DNA, 20 bp, Artificial Sequence
  chemically synthesized
cctttgctagcagattgtga

SEQ ID NO: 30495 - DNA, 20 bp, Artificial Sequence
  chemically synthesized
ttgctagcagattgtgaaag

SEQ ID NO: 30496 - DNA, 20 bp, Artificial Sequence
  chemically synthesized
gcgcgtgaacatgatcatgg

SEQ ID NO: 30497 - DNA, 20 bp, Artificial Sequence
  chemically synthesized
cctcatcaccatctgccttt

SEQ ID NO: 30498 - DNA, 20 bp, Artificial Sequence
  chemically synthesized
tttaggatatctactcagtg

SEQ ID NO: 30499 - DNA, 20 bp, Artificial Sequence
  chemically synthesized
gtttccttttttaaaataca

SEQ ID NO: 30500 - DNA, 20 bp, Artificial Sequence
  chemically synthesized
atgatttgacagcaatattg

SEQ ID NO: 30501 - DNA, 20 bp, Artificial Sequence
  chemically synthesized
gtgggaaaacaaagaaatag

SEQ ID NO: 30502 - DNA, 20 bp, Artificial Sequence
  chemically synthesized
agttatcaccaaagcttttc

SEQ ID NO: 30503 - DNA, 20 bp, Artificial Sequence
  chemically synthesized
tgtctctatgtcaaacatct

SEQ ID NO: 30504 - DNA, 20 bp, Artificial Sequence
  chemically synthesized
tggggaaacacaatactcag

SEQ ID NO: 30505 - DNA, 20 bp, Artificial Sequence
  chemically synthesized
taggggagaaaagcaagctt

SEQ ID NO: 30506 - DNA, 20 bp, Artificial Sequence
  chemically synthesized
caagcttaagaattgacata

SEQ ID NO: 30507 - DNA, 20 bp, Artificial Sequence
  chemically synthesized
acacttacttgtcaactttc

SEQ ID NO: 30508 - DNA, 20 bp, Artificial Sequence
  chemically synthesized
aatctagtagctgacagtac

SEQ ID NO: 30509 - DNA, 20 bp, Artificial Sequence
  chemically synthesized
tagctgacagtaccaggatc

SEQ ID NO: 30510 - DNA, 20 bp, Artificial Sequence
  chemically synthesized
acagaggttaaactagcaaa

SEQ ID NO: 30511 - DNA, 20 bp, Artificial Sequence
  chemically synthesized
tagcaaagtgagtaaagtca

SEQ ID NO: 30512 - DNA, 20 bp, Artificial Sequence
  chemically synthesized
aagacttcagatgctgggga

SEQ ID NO: 30513 - DNA, 20 bp, Artificial Sequence
  chemically synthesized
atgctggggaaaggatagat

SEQ ID NO: 30514 - DNA, 20 bp, Artificial Sequence
  chemically synthesized
gggaaaggatagataagaat

SEQ ID NO: 30515 - DNA, 20 bp, Artificial Sequence
  chemically synthesized
gcccttgaggaaggggccag

SEQ ID NO: 30516 - DNA, 20 bp, Artificial Sequence
  chemically synthesized
ggggccaggggaatttttct

SEQ ID NO: 30517 - DNA, 20 bp, Artificial Sequence
  chemically synthesized
aactctcattggcttctaaa

SEQ ID NO: 30518 - DNA, 20 bp, Artificial Sequence
  chemically synthesized
ggcttctaaaaggagtttcg

SEQ ID NO: 30519 - DNA, 20 bp, Artificial Sequence
  chemically synthesized
taggtattattgcaacagtt

SEQ ID NO: 30520 - DNA, 20 bp, Artificial Sequence
  chemically synthesized
tgtccttcattcagacatta

SEQ ID NO: 30521 - DNA, 20 bp, Artificial Sequence
  chemically synthesized
tatggtgccaggtactgtgt

SEQ ID NO: 30522 - DNA, 20 bp, Artificial Sequence
  chemically synthesized
aggtactgtgtcagggtact

SEQ ID NO: 30523 - DNA, 20 bp, Artificial Sequence
  chemically synthesized
tgtcagggtactaggggtat

SEQ ID NO: 30524 - DNA, 20 bp, Artificial Sequence
  chemically synthesized
aaaatgtgcactaggtacta

SEQ ID NO: 30525 - DNA, 20 bp, Artificial Sequence
  chemically synthesized
ggggaaacaattgatagaga

SEQ ID NO: 30526 - DNA, 20 bp, Artificial Sequence
  chemically synthesized
tagagagagaatattttcat

SEQ ID NO: 30527 - DNA, 20 bp, Artificial Sequence
  chemically synthesized
tttcatctgggtcttaaaag

SEQ ID NO: 30528 - DNA, 20 bp, Artificial Sequence
  chemically synthesized
ataagggcattttatgcaaa

SEQ ID NO: 30529 - DNA, 20 bp, Artificial Sequence
  chemically synthesized
gcaagaacgtgaggtatttc

SEQ ID NO: 30530 - DNA, 20 bp, Artificial Sequence
  chemically synthesized
ggtatcgaagtataaacata

SEQ ID NO: 30531 - DNA, 20 bp, Artificial Sequence
  chemically synthesized
agtaccactgatggctgatt

SEQ ID NO: 30532 - DNA, 20 bp, Artificial Sequence
  chemically synthesized
gtagcagtacaaaaaaagag

SEQ ID NO: 30533 - DNA, 20 bp, Artificial Sequence
  chemically synthesized
aagtggtatgacttaaccat

SEQ ID NO: 30534 - DNA, 20 bp, Artificial Sequence
  chemically synthesized
ggtatggaaggggaaatggc

SEQ ID NO: 30535 - DNA, 20 bp, Artificial Sequence
  chemically synthesized
tttgatgtgattatggacca

SEQ ID NO: 30536 - DNA, 20 bp, Artificial Sequence
  chemically synthesized
tggctctttagtctgactgc

SEQ ID NO: 30537 - DNA, 20 bp, Artificial Sequence
  chemically synthesized
tttagtctgactgccagagt

SEQ ID NO: 30538 - DNA, 20 bp, Artificial Sequence
  chemically synthesized
tgactgccagagtctgaatc

SEQ ID NO: 30539 - DNA, 20 bp, Artificial Sequence
  chemically synthesized
gggcaaagcccttagcctct

SEQ ID NO: 30540 - DNA, 20 bp, Artificial Sequence
  chemically synthesized
ctatctcgtgggacttttgt

SEQ ID NO: 30541 - DNA, 20 bp, Artificial Sequence
  chemically synthesized
tgtgaggatgaagtgagata

SEQ ID NO: 30542 - DNA, 20 bp, Artificial Sequence
  chemically synthesized
tacattatgatatacagtta

SEQ ID NO: 30543 - DNA, 20 bp, Artificial Sequence
  chemically synthesized
ggagacgtatctgactatag

SEQ ID NO: 30544 - DNA, 20 bp, Artificial Sequence
  chemically synthesized
gccacgtgtgtgggcatctg

SEQ ID NO: 30545 - DNA, 20 bp, Artificial Sequence
  chemically synthesized
tgggcatctggagagtgagc

SEQ ID NO: 30546 - DNA, 20 bp, Artificial Sequence
  chemically synthesized
tgctcagtaaattttgttga

SEQ ID NO: 30547 - DNA, 20 bp, Artificial Sequence
  chemically synthesized
taagggccatggagaggaac

SEQ ID NO: 30548 - DNA, 20 bp, Artificial Sequence
  chemically synthesized
ggagttaatcaattcaagtg

SEQ ID NO: 30549 - DNA, 20 bp, Artificial Sequence
  chemically synthesized
ttaatcaattcaagtgctgg

SEQ ID NO: 30550 - DNA, 20 bp, Artificial Sequence
  chemically synthesized
tcaagtgctggatggataac

SEQ ID NO: 30551 - DNA, 20 bp, Artificial Sequence
  chemically synthesized
gttagagcaaagcggggaac

SEQ ID NO: 30552 - DNA, 20 bp, Artificial Sequence
  chemically synthesized
agcaaagcggggaaccagaa

SEQ ID NO: 30553 - DNA, 20 bp, Artificial Sequence
  chemically synthesized
aatagagtgattattataaa

SEQ ID NO: 30554 - DNA, 20 bp, Artificial Sequence
  chemically synthesized
gaagttattaaagagctaaa

SEQ ID NO: 30555 - DNA, 20 bp, Artificial Sequence
  chemically synthesized
gaaagtagggccaacatgaa

SEQ ID NO: 30556 - DNA, 20 bp, Artificial Sequence
  chemically synthesized
ctgtacagtcagctctcctt

SEQ ID NO: 30557 - DNA, 20 bp, Artificial Sequence
  chemically synthesized
caaaaatattcaagaaaaaa

SEQ ID NO: 30558 - DNA, 20 bp, Artificial Sequence
  chemically synthesized
agatgatttaaagtacaaag

SEQ ID NO: 30559 - DNA, 20 bp, Artificial Sequence
  chemically synthesized
cacagatcttgatatttgca

SEQ ID NO: 30560 - DNA, 20 bp, Artificial Sequence
  chemically synthesized
ggtcttgccaccaattttcc

SEQ ID NO: 30561 - DNA, 20 bp, Artificial Sequence
  chemically synthesized
atactgaggaacgactgtaa

SEQ ID NO: 30562 - DNA, 20 bp, Artificial Sequence
  chemically synthesized
gactgtaaatggatgcaggc

SEQ ID NO: 30563 - DNA, 20 bp, Artificial Sequence
  chemically synthesized
tgcaggcatggatgctattt

SEQ ID NO: 30564 - DNA, 20 bp, Artificial Sequence
  chemically synthesized
gagtgtccagggccaagtaa

SEQ ID NO: 30565 - DNA, 20 bp, Artificial Sequence
  chemically synthesized
atgagttgctgagcagagag

SEQ ID NO: 30566 - DNA, 20 bp, Artificial Sequence
  chemically synthesized
cctcggctgtctgggaagag

SEQ ID NO: 30567 - DNA, 20 bp, Artificial Sequence
  chemically synthesized
ggctgctccaatttaggggc

SEQ ID NO: 30568 - DNA, 20 bp, Artificial Sequence
  chemically synthesized
caatttaggggctaggattg

SEQ ID NO: 30569 - DNA, 20 bp, Artificial Sequence
  chemically synthesized
gggtgggcacagcattgcaa

SEQ ID NO: 30570 - DNA, 20 bp, Artificial Sequence
  chemically synthesized
attgagaaatatggccaatg

SEQ ID NO: 30571 - DNA, 20 bp, Artificial Sequence
  chemically synthesized
caggcagatcacttgaggtc

SEQ ID NO: 30572 - DNA, 20 bp, Artificial Sequence
  chemically synthesized
aaaattagctgggcatggtg

SEQ ID NO: 30573 - DNA, 20 bp, Artificial Sequence
  chemically synthesized
tacttgggaggctgaggcag

SEQ ID NO: 30574 - DNA, 20 bp, Artificial Sequence
  chemically synthesized
caagactctgtcaaaaaaaa

SEQ ID NO: 30575 - DNA, 20 bp, Artificial Sequence
  chemically synthesized
ttgcagagcaagggaaaagc

SEQ ID NO: 30576 - DNA, 20 bp, Artificial Sequence
  chemically synthesized
ctttcctttctcttcctttt

SEQ ID NO: 30577 - DNA, 20 bp, Artificial Sequence
  chemically synthesized
gaacaactccaggcaacttc

SEQ ID NO: 30578 - DNA, 20 bp, Artificial Sequence
  chemically synthesized
gccatgcattccttaacaat

SEQ ID NO: 30579 - DNA, 20 bp, Artificial Sequence
  chemically synthesized
tcatcattgtgcgaacataa

SEQ ID NO: 30580 - DNA, 20 bp, Artificial Sequence
  chemically synthesized
agatagagacatctatcctc

SEQ ID NO: 30581 - DNA, 20 bp, Artificial Sequence
  chemically synthesized
acatctatcctccagagttc

SEQ ID NO: 30582 - DNA, 20 bp, Artificial Sequence
  chemically synthesized
tagcttaaaaaaaacatatc

SEQ ID NO: 30583 - DNA, 20 bp, Artificial Sequence
  chemically synthesized
taacatctagtgacagacac

SEQ ID NO: 30584 - DNA, 20 bp, Artificial Sequence
  chemically synthesized
tattctgaaaacagcccagc

SEQ ID NO: 30585 - DNA, 20 bp, Artificial Sequence
  chemically synthesized
aaaacagcccagccagggtg

SEQ ID NO: 30586 - DNA, 20 bp, Artificial Sequence
  chemically synthesized
gaaatctgaccttttattac

SEQ ID NO: 30587 - DNA, 20 bp, Artificial Sequence
  chemically synthesized
tctcttgactaaaagtaaaa

SEQ ID NO: 30588 - DNA, 20 bp, Artificial Sequence
  chemically synthesized
gaaattggctttcagattat

SEQ ID NO: 30589 - DNA, 20 bp, Artificial Sequence
  chemically synthesized
tttcttttttgctaaaacta

SEQ ID NO: 30590 - DNA, 20 bp, Artificial Sequence
  chemically synthesized
atgaaaacgccaacaaaatt

SEQ ID NO: 30591 - DNA, 20 bp, Artificial Sequence
  chemically synthesized
gtataattcaggtaaattgg

SEQ ID NO: 30592 - DNA, 20 bp, Artificial Sequence
  chemically synthesized
tgttcaagggaaccttgaga

SEQ ID NO: 30593 - DNA, 20 bp, Artificial Sequence
  chemically synthesized
aacaaactcttccaatttac

SEQ ID NO: 30594 - DNA, 20 bp, Artificial Sequence
  chemically synthesized
ttatacctctttggccgatt

SEQ ID NO: 30595 - DNA, 20 bp, Artificial Sequence
  chemically synthesized
caagaaaaactgaaatgtaa

SEQ ID NO: 30596 - DNA, 20 bp, Artificial Sequence
  chemically synthesized
ctgtatacacatggagattt

SEQ ID NO: 30597 - DNA, 20 bp, Artificial Sequence
  chemically synthesized
tcaattttacttttagtcaa

SEQ ID NO: 30598 - DNA, 20 bp, Artificial Sequence
  chemically synthesized
ggtcagatttctaatcatat

SEQ ID NO: 30599 - DNA, 20 bp, Artificial Sequence
  chemically synthesized
taatcatatttgaatttact

SEQ ID NO: 30600 - DNA, 20 bp, Artificial Sequence
  chemically synthesized
tcacttgaaaatagctcatt

SEQ ID NO: 30601 - DNA, 20 bp, Artificial Sequence
  chemically synthesized
caccctggctgggctgtttt

SEQ ID NO: 30602 - DNA, 20 bp, Artificial Sequence
  chemically synthesized
ctttggttggcaagtgttat

SEQ ID NO: 30603 - DNA, 20 bp, Artificial Sequence
  chemically synthesized
cagtgatttaagcatctctc

SEQ ID NO: 30604 - DNA, 20 bp, Artificial Sequence
  chemically synthesized
ttaagcatctctctagaatt

SEQ ID NO: 30605 - DNA, 20 bp, Artificial Sequence
  chemically synthesized
agagacactcctgaactctg

SEQ ID NO: 30606 - DNA, 20 bp, Artificial Sequence
  chemically synthesized
tggaggatagatgtctctat

SEQ ID NO: 30607 - DNA, 20 bp, Artificial Sequence
  chemically synthesized
ttgcttaatgacacatttct

SEQ ID NO: 30608 - DNA, 20 bp, Artificial Sequence
  chemically synthesized
agaatatatccccattgtta

SEQ ID NO: 30609 - DNA, 20 bp, Artificial Sequence
  chemically synthesized
cagggactcaagaagttgcc

SEQ ID NO: 30610 - DNA, 20 bp, Artificial Sequence
  chemically synthesized
ctggagttgttcctttcttc

SEQ ID NO: 30611 - DNA, 20 bp, Artificial Sequence
  chemically synthesized
ggcttataagatgaactttc

SEQ ID NO: 30612 - DNA, 20 bp, Artificial Sequence
  chemically synthesized
cattgcagctgttcacttta

SEQ ID NO: 30613 - DNA, 20 bp, Artificial Sequence
  chemically synthesized
tttgggctcactttttttct

SEQ ID NO: 30614 - DNA, 20 bp, Artificial Sequence
  chemically synthesized
ttcaactcttttttttttga

SEQ ID NO: 30615 - DNA, 20 bp, Artificial Sequence
  chemically synthesized
tcttgctctgtcgcccaggc

SEQ ID NO: 30616 - DNA, 20 bp, Artificial Sequence
  chemically synthesized
gcctcagcctcccaagtagc

SEQ ID NO: 30617 - DNA, 20 bp, Artificial Sequence
  chemically synthesized
ttttgtatttttagtaaagc

SEQ ID NO: 30618 - DNA, 20 bp, Artificial Sequence
  chemically synthesized
gcctgggcctctgaaagtgc

SEQ ID NO: 30619 - DNA, 20 bp, Artificial Sequence
  chemically synthesized
aaaaaatcaccaaaatgcag

SEQ ID NO: 30620 - DNA, 20 bp, Artificial Sequence
  chemically synthesized
ccctgcaaatatcaagatct

SEQ ID NO: 30621 - DNA, 20 bp, Artificial Sequence
  chemically synthesized
ttgttatgctgtattgttta

SEQ ID NO: 30622 - DNA, 20 bp, Artificial Sequence
  chemically synthesized
tagggaataatgaaagataa

SEQ ID NO: 30623 - DNA, 20 bp, Artificial Sequence
  chemically synthesized
tgcaaccatccatttttttc

SEQ ID NO: 30624 - DNA, 20 bp, Artificial Sequence
  chemically synthesized
tatttttgatctgcagttaa

SEQ ID NO: 30625 - DNA, 20 bp, Artificial Sequence
  chemically synthesized
gagctgactgtacagtgtgg

SEQ ID NO: 30626 - DNA, 20 bp, Artificial Sequence
  chemically synthesized
ttgagtgaaaaaacagactt

SEQ ID NO: 30627 - DNA, 20 bp, Artificial Sequence
  chemically synthesized
cagatcagacagaaataggt

SEQ ID NO: 30628 - DNA, 20 bp, Artificial Sequence
  chemically synthesized
aggtttaacagtagtataat

SEQ ID NO: 30629 - DNA, 20 bp, Artificial Sequence
  chemically synthesized
atctatctcacaggtgttgg

SEQ ID NO: 30630 - DNA, 20 bp, Artificial Sequence
  chemically synthesized
aaatgactattgtcacaatc

SEQ ID NO: 30631 - DNA, 20 bp, Artificial Sequence
  chemically synthesized
tcacaatcaggaatgaccta

SEQ ID NO: 30632 - DNA, 20 bp, Artificial Sequence
  chemically synthesized
gaatgacctaaagaataatt

SEQ ID NO: 30633 - DNA, 20 bp, Artificial Sequence
  chemically synthesized
tcctgttatccatccagcac

SEQ ID NO: 30634 - DNA, 20 bp, Artificial Sequence
  chemically synthesized
ctccatggcccttaaatgtc

SEQ ID NO: 30635 - DNA, 20 bp, Artificial Sequence
  chemically synthesized
atacttgctagggctgggac

SEQ ID NO: 30636 - DNA, 20 bp, Artificial Sequence
  chemically synthesized
taactactgtttacagaaca

SEQ ID NO: 30637 - DNA, 20 bp, Artificial Sequence
  chemically synthesized
cctatagtcagatacgtctc

SEQ ID NO: 30638 - DNA, 20 bp, Artificial Sequence
  chemically synthesized
ggcactgtcatcttattttt

SEQ ID NO: 30639 - DNA, 20 bp, Artificial Sequence
  chemically synthesized
aggtaacatactaaaacatt

SEQ ID NO: 30640 - DNA, 20 bp, Artificial Sequence
  chemically synthesized
tacctcacgttcttgcaaat

SEQ ID NO: 30641 - DNA, 20 bp, Artificial Sequence
  chemically synthesized
ttgcaaatctgagtctttgc

SEQ ID NO: 30642 - DNA, 20 bp, Artificial Sequence
  chemically synthesized
atgctgctttagatcaaaga

SEQ ID NO: 30643 - DNA, 20 bp, Artificial Sequence
  chemically synthesized
tagttgtaactcagtaatgt

SEQ ID NO: 30644 - DNA, 20 bp, Artificial Sequence
  chemically synthesized
aactccttttagaagccaat

SEQ ID NO: 30645 - DNA, 20 bp, Artificial Sequence
  chemically synthesized
atgagagtttaatagcagaa

SEQ ID NO: 30646 - DNA, 20 bp, Artificial Sequence
  chemically synthesized
atctctggctacaatggctg

SEQ ID NO: 30647 - DNA, 20 bp, Artificial Sequence
  chemically synthesized
ctttctccttagtattatct

SEQ ID NO: 30648 - DNA, 20 bp, Artificial Sequence
  chemically synthesized
ctcaccacttatatagaaga

SEQ ID NO: 30649 - DNA, 20 bp, Artificial Sequence
  chemically synthesized
acttatatagaagaaagggt

SEQ ID NO: 30650 - DNA, 20 bp, Artificial Sequence
  chemically synthesized
cttgctttatgtcctgcttt

SEQ ID NO: 30651 - DNA, 20 bp, Artificial Sequence
  chemically synthesized
ttcacagctgacatcatgtc

SEQ ID NO: 30652 - DNA, 20 bp, Artificial Sequence
  chemically synthesized
acagggccagtcagctttct

SEQ ID NO: 30653 - DNA, 20 bp, Artificial Sequence
  chemically synthesized
gtcagctttctgggggtgct

SEQ ID NO: 30654 - DNA, 20 bp, Artificial Sequence
  chemically synthesized
gaacatgctgtttgtccaaa

SEQ ID NO: 30655 - DNA, 20 bp, Artificial Sequence
  chemically synthesized
ttctcccctagggaactcaa

SEQ ID NO: 30656 - DNA, 20 bp, Artificial Sequence
  chemically synthesized
aatttttttaaaccaaggag

SEQ ID NO: 30657 - DNA, 20 bp, Artificial Sequence
  chemically synthesized
ggagatgaatgttttctaac

SEQ ID NO: 30658 - DNA, 20 bp, Artificial Sequence
  chemically synthesized
acaaacctgtacattcagca

SEQ ID NO: 30659 - DNA, 20 bp, Artificial Sequence
  chemically synthesized
agcgcgtgaacatgatcatg

SEQ ID NO: 30660 - DNA, 20 bp, Artificial Sequence
  chemically synthesized
agtatgcttgccttttagat

SEQ ID NO: 30661 - DNA, 20 bp, Artificial Sequence
  chemically synthesized
atttggtcatgtaattcctg

SEQ ID NO: 30662 - DNA, 20 bp, Artificial Sequence
  chemically synthesized
aaaattaaaagtgggaaaac

SEQ ID NO: 30663 - DNA, 20 bp, Artificial Sequence
  chemically synthesized
agtgggaaaacaaagaaata

SEQ ID NO: 30664 - DNA, 20 bp, Artificial Sequence
  chemically synthesized
actcagttgagttccctagg

SEQ ID NO: 30665 - DNA, 20 bp, Artificial Sequence
  chemically synthesized
ctaggggagaaaagcaagct

SEQ ID NO: 30666 - DNA, 20 bp, Artificial Sequence
  chemically synthesized
cccagaggaaggcatacagg

SEQ ID NO: 30667 - DNA, 20 bp, Artificial Sequence
  chemically synthesized
cacacttacttgtcaacttt

SEQ ID NO: 30668 - DNA, 20 bp, Artificial Sequence
  chemically synthesized
ggtgccaaccctaagcaccc

SEQ ID NO: 30669 - DNA, 20 bp, Artificial Sequence
  chemically synthesized
agtgagtaaagtcaagggat

SEQ ID NO: 30670 - DNA, 20 bp, Artificial Sequence
  chemically synthesized
gatgctggggaaaggataga

SEQ ID NO: 30671 - DNA, 20 bp, Artificial Sequence
  chemically synthesized
cgatccccagataatactaa

SEQ ID NO: 30672 - DNA, 20 bp, Artificial Sequence
  chemically synthesized
actaggtactaagggatcat

SEQ ID NO: 30673 - DNA, 20 bp, Artificial Sequence
  chemically synthesized
tggggaaacaattgatagag

SEQ ID NO: 30674 - DNA, 20 bp, Artificial Sequence
  chemically synthesized
gtttgatgtgattatggacc

SEQ ID NO: 30675 - DNA, 20 bp, Artificial Sequence
  chemically synthesized
agttagagcaaagcggggaa

SEQ ID NO: 30676 - DNA, 20 bp, Artificial Sequence
  chemically synthesized
aaaaagggagagatcaacaa

SEQ ID NO: 30677 - DNA, 20 bp, Artificial Sequence
  chemically synthesized
agaagttattaaagagctaa

SEQ ID NO: 30678 - DNA, 20 bp, Artificial Sequence
  chemically synthesized
attaaagagctaaagagaat

SEQ ID NO: 30679 - DNA, 20 bp, Artificial Sequence
  chemically synthesized
gaattgagaaatttaaaaca

SEQ ID NO: 30680 - DNA, 20 bp, Artificial Sequence
  chemically synthesized
ggccaacatgaaaggagtag

SEQ ID NO: 30681 - DNA, 20 bp, Artificial Sequence
  chemically synthesized
aactgcagatcaaaaatatt

SEQ ID NO: 30682 - DNA, 20 bp, Artificial Sequence
  chemically synthesized
ttacattgtattagctatta

SEQ ID NO: 30683 - DNA, 20 bp, Artificial Sequence
  chemically synthesized
tgcaaacgagtgaaggaaat

SEQ ID NO: 30684 - DNA, 20 bp, Artificial Sequence
  chemically synthesized
ctacttgggaggctgaggca

SEQ ID NO: 30685 - DNA, 20 bp, Artificial Sequence
  chemically synthesized
gtcaaaaaaaaaagagttga

SEQ ID NO: 30686 - DNA, 20 bp, Artificial Sequence
  chemically synthesized
aaaaagtctaggctaaattc

SEQ ID NO: 30687 - DNA, 20 bp, Artificial Sequence
  chemically synthesized
cagctgcaatgaaaataagg

SEQ ID NO: 30688 - DNA, 20 bp, Artificial Sequence
  chemically synthesized
aggaagtagtcccaaatacc

SEQ ID NO: 30689 - DNA, 20 bp, Artificial Sequence
  chemically synthesized
agatatattgctagaccctt

SEQ ID NO: 30690 - DNA, 20 bp, Artificial Sequence
  chemically synthesized
ttaacaatggggatatattc

SEQ ID NO: 30691 - DNA, 20 bp, Artificial Sequence
  chemically synthesized
tggtatttgtgtatctaaac

SEQ ID NO: 30692 - DNA, 20 bp, Artificial Sequence
  chemically synthesized
gagaggaaggagggagggaa

SEQ ID NO: 30693 - DNA, 20 bp, Artificial Sequence
  chemically synthesized
caaagtaaattcaaatatga

SEQ ID NO: 30694 - DNA, 20 bp, Artificial Sequence
  chemically synthesized
attttggctccatgccctaa

SEQ ID NO: 30695 - DNA, 20 bp, Artificial Sequence
  chemically synthesized
ttttcttttttgctaaaact

SEQ ID NO: 30696 - DNA, 20 bp, Artificial Sequence
  chemically synthesized
ttgttcaagggaaccttgag

SEQ ID NO: 30697 - DNA, 20 bp, Artificial Sequence
  chemically synthesized
accttgagagagaatgtatg

SEQ ID NO: 30698 - DNA, 20 bp, Artificial Sequence
  chemically synthesized
attatacctctttggccgat

SEQ ID NO: 30699 - DNA, 20 bp, Artificial Sequence
  chemically synthesized
tttgttggcgttttcatgat

SEQ ID NO: 30700 - DNA, 20 bp, Artificial Sequence
  chemically synthesized
tcaagaaaaactgaaatgta

SEQ ID NO: 30701 - DNA, 20 bp, Artificial Sequence
  chemically synthesized
aattctttagttttagcaaa

SEQ ID NO: 30702 - DNA, 20 bp, Artificial Sequence
  chemically synthesized
catgaaaattttacatctct

SEQ ID NO: 30703 - DNA, 20 bp, Artificial Sequence
  chemically synthesized
ttcaattttacttttagtca

SEQ ID NO: 30704 - DNA, 20 bp, Artificial Sequence
  chemically synthesized
ttgaatttactttggatgaa

SEQ ID NO: 30705 - DNA, 20 bp, Artificial Sequence
  chemically synthesized
tcaccctggctgggctgttt

SEQ ID NO: 30706 - DNA, 20 bp, Artificial Sequence
  chemically synthesized
agtgtctgtcactagatgtt

SEQ ID NO: 30707 - DNA, 20 bp, Artificial Sequence
  chemically synthesized
gcagtgatttaagcatctct

SEQ ID NO: 30708 - DNA, 20 bp, Artificial Sequence
  chemically synthesized
attgcttaatgacacatttc

SEQ ID NO: 30709 - DNA, 20 bp, Artificial Sequence
  chemically synthesized
ctgattaactccaaaaagga

SEQ ID NO: 30710 - DNA, 20 bp, Artificial Sequence
  chemically synthesized
aggaaagtaaaaaggaaagg

SEQ ID NO: 30711 - DNA, 20 bp, Artificial Sequence
  chemically synthesized
gttgagtgaaaaaacagact

SEQ ID NO: 30712 - DNA, 20 bp, Artificial Sequence
  chemically synthesized
agactttagaatcagatcag

SEQ ID NO: 30713 - DNA, 20 bp, Artificial Sequence
  chemically synthesized
taggtttaacagtagtataa

SEQ ID NO: 30714 - DNA, 20 bp, Artificial Sequence
  chemically synthesized
gtcacaatcaggaatgacct

SEQ ID NO: 30715 - DNA, 20 bp, Artificial Sequence
  chemically synthesized
tgcattaatactgtctatcc

SEQ ID NO: 30716 - DNA, 20 bp, Artificial Sequence
  chemically synthesized
tatctctggctacaatggct

SEQ ID NO: 30717 - DNA, 20 bp, Artificial Sequence
  chemically synthesized
atcatctcaccacttatata

SEQ ID NO: 30718 - DNA, 20 bp, Artificial Sequence
  chemically synthesized
gtcagctactagatttgatt

SEQ ID NO: 30719 - DNA, 20 bp, Artificial Sequence
  chemically synthesized
ttagttttaaaaatgaagaa

SEQ ID NO: 30720 - DNA, 20 bp, Artificial Sequence
  chemically synthesized
gttttcttcttcttcatttt

SEQ ID NO: 30721 - DNA, 20 bp, Artificial Sequence
  chemically synthesized
tggtcatgtaattcctgtta

SEQ ID NO: 30722 - DNA, 20 bp, Artificial Sequence
  chemically synthesized
tttaaaaaaattaaaagtgg

SEQ ID NO: 30723 - DNA, 20 bp, Artificial Sequence
  chemically synthesized
cttcaatttaaagttttagt

SEQ ID NO: 30724 - DNA, 20 bp, Artificial Sequence
  chemically synthesized
gggataaagaaaatttgttg

SEQ ID NO: 30725 - DNA, 20 bp, Artificial Sequence
  chemically synthesized
acagtttggaattttgaaat

SEQ ID NO: 30726 - DNA, 20 bp, Artificial Sequence
  chemically synthesized
ttgaaattaaaacagttctg

SEQ ID NO: 30727 - DNA, 20 bp, Artificial Sequence
  chemically synthesized
ctaaagagaattgagaaatt

SEQ ID NO: 30728 - DNA, 20 bp, Artificial Sequence
  chemically synthesized
acacatatatgtatatacat

SEQ ID NO: 30729 - DNA, 20 bp, Artificial Sequence
  chemically synthesized
ctaggtagatgtagcttaaa

SEQ ID NO: 30730 - DNA, 20 bp, Artificial Sequence
  chemically synthesized
catttgggcaaccatattct

SEQ ID NO: 30731 - DNA, 20 bp, Artificial Sequence
  chemically synthesized
gctttcagattatttggatt

SEQ ID NO: 30732 - DNA, 20 bp, Artificial Sequence
  chemically synthesized
catgatgttttcttttttgc

SEQ ID NO: 30733 - DNA, 20 bp, Artificial Sequence
  chemically synthesized
tttcagtttttcttgatcat

SEQ ID NO: 30734 - DNA, 20 bp, Artificial Sequence
  chemically synthesized
aagaagcacgagaagttttt

SEQ ID NO: 30735 - DNA, 20 bp, Artificial Sequence
  chemically synthesized
aaaaacttctcgtgcttctt

SEQ ID NO: 30736 - DNA, 20 bp, Artificial Sequence
  chemically synthesized
ttggcgttttcatgatcaag

SEQ ID NO: 30737 - DNA, 20 bp, Artificial Sequence
  chemically synthesized
tctttagttttagcaaaaaa

SEQ ID NO: 30738 - DNA, 20 bp, Artificial Sequence
  chemically synthesized
tgtacagtgtggttgagtga

SEQ ID NO: 30739 - DNA, 20 bp, Artificial Sequence
  chemically synthesized
ctttgcccaaggtaacatac

SEQ ID NO: 30740 - DNA, 20 bp, Artificial Sequence
  chemically synthesized
atagtccatatggaaccata

SEQ ID NO: 30741 - DNA, 20 bp, Artificial Sequence
  chemically synthesized
tctttgatgcatacacttta

SEQ ID NO: 30742 - DNA, 20 bp, Artificial Sequence
  chemically synthesized
taaagtcactgtagttgtga

SEQ ID NO: 30743 - DNA, 20 bp, Artificial Sequence
  chemically synthesized
gttaatctttatgttttaac

SEQ ID NO: 30744 - DNA, 20 bp, Artificial Sequence
  chemically synthesized
gttttaaaaatgaagaagaa

SEQ ID NO: 30745 - DNA, 20 bp, Artificial Sequence
  chemically synthesized
atctactcagtgctgaatgt

SEQ ID NO: 30746 - DNA, 20 bp, Artificial Sequence
  chemically synthesized
actcagtgctgaatgtacag

SEQ ID NO: 30747 - DNA, 20 bp, Artificial Sequence
  chemically synthesized
ccttttttaaaatacattga

SEQ ID NO: 30748 - DNA, 20 bp, Artificial Sequence
  chemically synthesized
atgctgtcttcttcactaaa

SEQ ID NO: 30749 - DNA, 20 bp, Artificial Sequence
  chemically synthesized
ttcttcactaaattttgatt

SEQ ID NO: 30750 - DNA, 20 bp, Artificial Sequence
  chemically synthesized
aagtactggttctttgttag

SEQ ID NO: 30751 - DNA, 20 bp, Artificial Sequence
  chemically synthesized
tttaaaactaaatagatcga

SEQ ID NO: 30752 - DNA, 20 bp, Artificial Sequence
  chemically synthesized
cgacaatgcttatgatgcat

SEQ ID NO: 30753 - DNA, 20 bp, Artificial Sequence
  chemically synthesized
tttaataaacactgttcagt

SEQ ID NO: 30754 - DNA, 20 bp, Artificial Sequence
  chemically synthesized
tgttagaaaacattcatctc

SEQ ID NO: 30755 - DNA, 20 bp, Artificial Sequence
  chemically synthesized
aaaaaaaataaccacattat

SEQ ID NO: 30756 - DNA, 20 bp, Artificial Sequence
  chemically synthesized
tggccttatttacacaaaaa

SEQ ID NO: 30757 - DNA, 20 bp, Artificial Sequence
  chemically synthesized
ttttaagatatatgacattt

SEQ ID NO: 30758 - DNA, 20 bp, Artificial Sequence
  chemically synthesized
taaattatatatcttcaatt

SEQ ID NO: 30759 - DNA, 20 bp, Artificial Sequence
  chemically synthesized
ttaaagttttagttaaaaca

SEQ ID NO: 30760 - DNA, 20 bp, Artificial Sequence
  chemically synthesized
agcaagctgttagttatcac

SEQ ID NO: 30761 - DNA, 20 bp, Artificial Sequence
  chemically synthesized
tagttatcaccaaagctttt

SEQ ID NO: 30762 - DNA, 20 bp, Artificial Sequence
  chemically synthesized
gagttccctaggggagaaaa

SEQ ID NO: 30763 - DNA, 20 bp, Artificial Sequence
  chemically synthesized
agctaatgcaacatatatca

SEQ ID NO: 30764 - DNA, 20 bp, Artificial Sequence
  chemically synthesized
tgagatgatgaaggttgtaa

SEQ ID NO: 30765 - DNA, 20 bp, Artificial Sequence
  chemically synthesized
tagataagaataaggatgaa

SEQ ID NO: 30766 - DNA, 20 bp, Artificial Sequence
  chemically synthesized
taatactaaggagaaaggca

SEQ ID NO: 30767 - DNA, 20 bp, Artificial Sequence
  chemically synthesized
tcttctgctattaaactctc

SEQ ID NO: 30768 - DNA, 20 bp, Artificial Sequence
  chemically synthesized
aactctcattggcttctaaa

SEQ ID NO: 30769 - DNA, 20 bp, Artificial Sequence
  chemically synthesized
cttctaaaaggagtttcggt

SEQ ID NO: 30770 - DNA, 20 bp, Artificial Sequence
  chemically synthesized
ctgcctttaggtattattgc

SEQ ID NO: 30771 - DNA, 20 bp, Artificial Sequence
  chemically synthesized
aattaaaacagttctgtaaa

SEQ ID NO: 30772 - DNA, 20 bp, Artificial Sequence
  chemically synthesized
aaacagttctgtaaaaccag

SEQ ID NO: 30773 - DNA, 20 bp, Artificial Sequence
  chemically synthesized
aagcagcatgaggccaggtg

SEQ ID NO: 30774 - DNA, 20 bp, Artificial Sequence
  chemically synthesized
gaggatcactcgtgcaaaga

SEQ ID NO: 30775 - DNA, 20 bp, Artificial Sequence
  chemically synthesized
gcaagaacgtgaggtatttc

SEQ ID NO: 30776 - DNA, 20 bp, Artificial Sequence
  chemically synthesized
ataatgaagtcattaaccta

SEQ ID NO: 30777 - DNA, 20 bp, Artificial Sequence
  chemically synthesized
acataaggagtaccactgat

SEQ ID NO: 30778 - DNA, 20 bp, Artificial Sequence
  chemically synthesized
tggctagagtcttggggact

SEQ ID NO: 30779 - DNA, 20 bp, Artificial Sequence
  chemically synthesized
tcttggggactttgtgtttg

SEQ ID NO: 30780 - DNA, 20 bp, Artificial Sequence
  chemically synthesized
actgccagagtctgaatcct

SEQ ID NO: 30781 - DNA, 20 bp, Artificial Sequence
  chemically synthesized
taaatattgtgccctacatg

SEQ ID NO: 30782 - DNA, 20 bp, Artificial Sequence
  chemically synthesized
caaagcggggaaccagaata

SEQ ID NO: 30783 - DNA, 20 bp, Artificial Sequence
  chemically synthesized
aatagagtgattattataaa

SEQ ID NO: 30784 - DNA, 20 bp, Artificial Sequence
  chemically synthesized
aaaattattctttaggtcat

SEQ ID NO: 30785 - DNA, 20 bp, Artificial Sequence
  chemically synthesized
atagtcatttcattatataa

SEQ ID NO: 30786 - DNA, 20 bp, Artificial Sequence
  chemically synthesized
catttgacaaagttaaggtt

SEQ ID NO: 30787 - DNA, 20 bp, Artificial Sequence
  chemically synthesized
caggtctagaggaggcagat

SEQ ID NO: 30788 - DNA, 20 bp, Artificial Sequence
  chemically synthesized
ttcaaacctatttctgtctg

SEQ ID NO: 30789 - DNA, 20 bp, Artificial Sequence
  chemically synthesized
ctgtctgatctgattctaaa

SEQ ID NO: 30790 - DNA, 20 bp, Artificial Sequence
  chemically synthesized
ctccttgtgagttccacagc

SEQ ID NO: 30791 - DNA, 20 bp, Artificial Sequence
  chemically synthesized
agctattaagagaaacctag

SEQ ID NO: 30792 - DNA, 20 bp, Artificial Sequence
  chemically synthesized
gatttaaagtacaaaggagg

SEQ ID NO: 30793 - DNA, 20 bp, Artificial Sequence
  chemically synthesized
ggtggcatccatctgcattt

SEQ ID NO: 30794 - DNA, 20 bp, Artificial Sequence
  chemically synthesized
tggctgctccaatttagggg

SEQ ID NO: 30795 - DNA, 20 bp, Artificial Sequence
  chemically synthesized
acaaggtgaaatggtgaaac

SEQ ID NO: 30796 - DNA, 20 bp, Artificial Sequence
  chemically synthesized
ttgggaggctgaggcaggag

SEQ ID NO: 30797 - DNA, 20 bp, Artificial Sequence
  chemically synthesized
ctgcaatgaaaataagggaa

SEQ ID NO: 30798 - DNA, 20 bp, Artificial Sequence
  chemically synthesized
gggaagaaagtttagttcat

SEQ ID NO: 30799 - DNA, 20 bp, Artificial Sequence
  chemically synthesized
acttacctaaacctaaatgg

SEQ ID NO: 30800 - DNA, 20 bp, Artificial Sequence
  chemically synthesized
ccaaaatgtcattgtgcagc

SEQ ID NO: 30801 - DNA, 20 bp, Artificial Sequence
  chemically synthesized
aaggagggagggaaggagaa

SEQ ID NO: 30802 - DNA, 20 bp, Artificial Sequence
  chemically synthesized
gtctcttcagactaggtaga

SEQ ID NO: 30803 - DNA, 20 bp, Artificial Sequence
  chemically synthesized
acatatcctgaattctagag

SEQ ID NO: 30804 - DNA, 20 bp, Artificial Sequence
  chemically synthesized
caaaggtgctgttgatctga

SEQ ID NO: 30805 - DNA, 20 bp, Artificial Sequence
  chemically synthesized
attgcttttttaaattaatg

SEQ ID NO: 30806 - DNA, 20 bp, Artificial Sequence
  chemically synthesized
catttgcagctggaccataa

SEQ ID NO: 30807 - DNA, 20 bp, Artificial Sequence
  chemically synthesized
ttcatccaaagtaaattcaa

SEQ ID NO: 30808 - DNA, 20 bp, Artificial Sequence
  chemically synthesized
atacagtactgtgggaacat

SEQ ID NO: 30809 - DNA, 20 bp, Artificial Sequence
  chemically synthesized
gctccatgccctaaagagaa

SEQ ID NO: 30810 - DNA, 20 bp, Artificial Sequence
  chemically synthesized
gccctaaagagaaattggct

SEQ ID NO: 30811 - DNA, 20 bp, Artificial Sequence
  chemically synthesized
agaaattggctttcagatta

SEQ ID NO: 30812 - DNA, 20 bp, Artificial Sequence
  chemically synthesized
taagagatgtaaaattttca

SEQ ID NO: 30813 - DNA, 20 bp, Artificial Sequence
  chemically synthesized
aaagaattattcttttacat

SEQ ID NO: 30814 - DNA, 20 bp, Artificial Sequence
  chemically synthesized
gtataattcaggtaaattgg

SEQ ID NO: 30815 - DNA, 20 bp, Artificial Sequence
  chemically synthesized
gagaatgtatggaagaaaag

SEQ ID NO: 30816 - DNA, 20 bp, Artificial Sequence
  chemically synthesized
tgtagttttgaagaagcacg

SEQ ID NO: 30817 - DNA, 20 bp, Artificial Sequence
  chemically synthesized
tcagtgttttcaaaaacttc

SEQ ID NO: 30818 - DNA, 20 bp, Artificial Sequence
  chemically synthesized
tacctgaattatacctcttt

SEQ ID NO: 30819 - DNA, 20 bp, Artificial Sequence
  chemically synthesized
tggccgattcagaattttgt

SEQ ID NO: 30820 - DNA, 20 bp, Artificial Sequence
  chemically synthesized
gaaatgtaaaagaataattc

SEQ ID NO: 30821 - DNA, 20 bp, Artificial Sequence
  chemically synthesized
tttacatctcttaagaaagt

SEQ ID NO: 30822 - DNA, 20 bp, Artificial Sequence
  chemically synthesized
cccacagtactgtatacaca

SEQ ID NO: 30823 - DNA, 20 bp, Artificial Sequence
  chemically synthesized
gagaattccagtaataaaag

SEQ ID NO: 30824 - DNA, 20 bp, Artificial Sequence
  chemically synthesized
gtgatccatcaccctggctg

SEQ ID NO: 30825 - DNA, 20 bp, Artificial Sequence
  chemically synthesized
ggcaagtgttataggaattg

SEQ ID NO: 30826 - DNA, 20 bp, Artificial Sequence
  chemically synthesized
gcatctctctagaattcagg

SEQ ID NO: 30827 - DNA, 20 bp, Artificial Sequence
  chemically synthesized
gtattttcactgtacctttt

SEQ ID NO: 30828 - DNA, 20 bp, Artificial Sequence
  chemically synthesized
tcagtacagtcacatgctgt

SEQ ID NO: 30829 - DNA, 20 bp, Artificial Sequence
  chemically synthesized
tatgtagtaagctataccat

SEQ ID NO: 30830 - DNA, 20 bp, Artificial Sequence
  chemically synthesized
ttatgttcgcacaatgatga

SEQ ID NO: 30831 - DNA, 20 bp, Artificial Sequence
  chemically synthesized
gcatggctgtatacacacac

SEQ ID NO: 30832 - DNA, 20 bp, Artificial Sequence
  chemically synthesized
gtatacacacacatgtgttt

SEQ ID NO: 30833 - DNA, 20 bp, Artificial Sequence
  chemically synthesized
gataccatctcaagaggacc

SEQ ID NO: 30834 - DNA, 20 bp, Artificial Sequence
  chemically synthesized
ctggggtatttgggactact

SEQ ID NO: 30835 - DNA, 20 bp, Artificial Sequence
  chemically synthesized
gtgttctagtcccttgacat

SEQ ID NO: 30836 - DNA, 20 bp, Artificial Sequence
  chemically synthesized
tgcctcagcctcccaagtag

SEQ ID NO: 30837 - DNA, 20 bp, Artificial Sequence
  chemically synthesized
ttttgtatttttagtaaagc

SEQ ID NO: 30838 - DNA, 20 bp, Artificial Sequence
  chemically synthesized
tgcctgggcctctgaaagtg

SEQ ID NO: 30839 - DNA, 20 bp, Artificial Sequence
  chemically synthesized
catatttctcaatttccttc

SEQ ID NO: 30840 - DNA, 20 bp, Artificial Sequence
  chemically synthesized
gctcaagtctccgatataaa

SEQ ID NO: 30841 - DNA, 20 bp, Artificial Sequence
  chemically synthesized
ctttgtactttaaatcatct

SEQ ID NO: 30842 - DNA, 20 bp, Artificial Sequence
  chemically synthesized
tgtaaatagttgttatgctg

SEQ ID NO: 30843 - DNA, 20 bp, Artificial Sequence
  chemically synthesized
tagaatcagatcagacagaa

SEQ ID NO: 30844 - DNA, 20 bp, Artificial Sequence
  chemically synthesized
ttaactttgtcaaatgtaaa

SEQ ID NO: 30845 - DNA, 20 bp, Artificial Sequence
  chemically synthesized
ttcatgttggccctactttc

SEQ ID NO: 30846 - DNA, 20 bp, Artificial Sequence
  chemically synthesized
gaatgacctaaagaataatt

SEQ ID NO: 30847 - DNA, 20 bp, Artificial Sequence
  chemically synthesized
ataatcactctattctggtt

SEQ ID NO: 30848 - DNA, 20 bp, Artificial Sequence
  chemically synthesized
tgttatccatccagcacttg

SEQ ID NO: 30849 - DNA, 20 bp, Artificial Sequence
  chemically synthesized
gggttctcccaggctccagc

SEQ ID NO: 30850 - DNA, 20 bp, Artificial Sequence
  chemically synthesized
gtatatttatgccctacagg

SEQ ID NO: 30851 - DNA, 20 bp, Artificial Sequence
  chemically synthesized
cccacacacgtggctgtaac

SEQ ID NO: 30852 - DNA, 20 bp, Artificial Sequence
  chemically synthesized
gtcagatacgtctcctgaat

SEQ ID NO: 30853 - DNA, 20 bp, Artificial Sequence
  chemically synthesized
agtaatagctaatgtatatg

SEQ ID NO: 30854 - DNA, 20 bp, Artificial Sequence
  chemically synthesized
ttatttttatgaatgaggaa

SEQ ID NO: 30855 - DNA, 20 bp, Artificial Sequence
  chemically synthesized
aagatagattcatagaggct

SEQ ID NO: 30856 - DNA, 20 bp, Artificial Sequence
  chemically synthesized
aaggtaacatactaaaacat

SEQ ID NO: 30857 - DNA, 20 bp, Artificial Sequence
  chemically synthesized
tcagccatcagtggtactcc

SEQ ID NO: 30858 - DNA, 20 bp, Artificial Sequence
  chemically synthesized
ttatctgatgaccagctctg

SEQ ID NO: 30859 - DNA, 20 bp, Artificial Sequence
  chemically synthesized
gaaaatattctctctctatc

SEQ ID NO: 30860 - DNA, 20 bp, Artificial Sequence
  chemically synthesized
aaacctctcacctggcctca

SEQ ID NO: 30861 - DNA, 20 bp, Artificial Sequence
  chemically synthesized
gctttagatcaaagagggag

SEQ ID NO: 30862 - DNA, 20 bp, Artificial Sequence
  chemically synthesized
catacactttacaaaactaa

SEQ ID NO: 30863 - DNA, 20 bp, Artificial Sequence
  chemically synthesized
aaactaaactggttttacag

SEQ ID NO: 30864 - DNA, 20 bp, Artificial Sequence
  chemically synthesized
aactccttttagaagccaat

SEQ ID NO: 30865 - DNA, 20 bp, Artificial Sequence
  chemically synthesized
attcccctggccccttcctc

SEQ ID NO: 30866 - DNA, 20 bp, Artificial Sequence
  chemically synthesized
atcgtatacttaacttccct

SEQ ID NO: 30867 - DNA, 20 bp, Artificial Sequence
  chemically synthesized
ctcaccacttatatagaaga

SEQ ID NO: 30868 - DNA, 20 bp, Artificial Sequence
  chemically synthesized
ttatatagaagaaagggttt

SEQ ID NO: 30869 - DNA, 20 bp, Artificial Sequence
  chemically synthesized
taatgagatatatctaatgg

SEQ ID NO: 30870 - DNA, 20 bp, Artificial Sequence
  chemically synthesized
tctaatggccttgctttatg

SEQ ID NO: 30871 - DNA, 20 bp, Artificial Sequence
  chemically synthesized
cttgctttatgtcctgcttt

SEQ ID NO: 30872 - DNA, 20 bp, Artificial Sequence
  chemically synthesized
cccttgactttactcacttt

SEQ ID NO: 30873 - DNA, 20 bp, Artificial Sequence
  chemically synthesized
atcgttatttcagcatttca

SEQ ID NO: 30874 - DNA, 20 bp, Artificial Sequence
  chemically synthesized
gagtgggaaccacagggcca

SEQ ID NO: 30875 - DNA, 20 bp, Artificial Sequence
  chemically synthesized
agggccagtcagctttctgg

SEQ ID NO: 30876 - DNA, 20 bp, Artificial Sequence
  chemically synthesized
tgatcctggtactgtcagct

SEQ ID NO: 30877 - DNA, 20 bp, Artificial Sequence
  chemically synthesized
ctggtactgtcagctactag

SEQ ID NO: 30878 - DNA, 20 bp, Artificial Sequence
  chemically synthesized
agttgacaagtaagtgtgat

SEQ ID NO: 30879 - DNA, 20 bp, Artificial Sequence
  chemically synthesized
aaatgcttcctgtgagaaca

SEQ ID NO: 30880 - DNA, 20 bp, Artificial Sequence
  chemically synthesized
cctactctttatgtcaattc

SEQ ID NO: 30881 - DNA, 20 bp, Artificial Sequence
  chemically synthesized
ctctttatgtcaattcttaa

SEQ ID NO: 30882 - DNA, 20 bp, Artificial Sequence
  chemically synthesized
ctagggaactcaactgagta

SEQ ID NO: 30883 - DNA, 20 bp, Artificial Sequence
  chemically synthesized
ttccccaaatatcaactcca

SEQ ID NO: 30884 - DNA, 20 bp, Artificial Sequence
  chemically synthesized
agatgtttgacatagagaca

SEQ ID NO: 30885 - DNA, 20 bp, Artificial Sequence
  chemically synthesized
tgattttttcctaatccatg

SEQ ID NO: 30886 - DNA, 20 bp, Artificial Sequence
  chemically synthesized
gaaaagctttggtgataact

SEQ ID NO: 30887 - DNA, 20 bp, Artificial Sequence
  chemically synthesized
tgctaatgaaaggttaatct

SEQ ID NO: 30888 - DNA, 20 bp, Artificial Sequence
  chemically synthesized
actttttgtgtaaataaggc

SEQ ID NO: 30889 - DNA, 20 bp, Artificial Sequence
  chemically synthesized
tgtgtaaataaggccattgt

SEQ ID NO: 30890 - DNA, 20 bp, Artificial Sequence
  chemically synthesized
aataaggccattgtttgtgc

SEQ ID NO: 30891 - DNA, 20 bp, Artificial Sequence
  chemically synthesized
gtttgtgcttttgtttccca

SEQ ID NO: 30892 - DNA, 20 bp, Artificial Sequence
  chemically synthesized
ttcactatattctgctattt

SEQ ID NO: 30893 - DNA, 20 bp, Artificial Sequence
  chemically synthesized
tttttttaaaccaaggagat

SEQ ID NO: 30894 - DNA, 20 bp, Artificial Sequence
  chemically synthesized
tgaccaaatcatgaactgaa

SEQ ID NO: 30895 - DNA, 20 bp, Artificial Sequence
  chemically synthesized
tcataagcattgtcgatcta

SEQ ID NO: 30896 - DNA, 20 bp, Artificial Sequence
  chemically synthesized
aggcagatggtgatgaggcc

SEQ ID NO: 30897 - DNA, 20 bp, Artificial Sequence
  chemically synthesized
cgcgctgcataacctttgct

SEQ ID NO: 30898 - DNA, 22 bp, Artificial Sequence
  chemically synthesized
tcacaatctgctagcaaaggtt

SEQ ID NO: 30899 - DNA, 22 bp, Artificial Sequence
  chemically synthesized
cacaatctgctagcaaaggtta

SEQ ID NO: 30900 - DNA, 22 bp, Artificial Sequence
  chemically synthesized
acaatctgctagcaaaggttat

SEQ ID NO: 30901 - DNA, 22 bp, Artificial Sequence
  chemically synthesized
ctagcaaaggttatgcagcgcg

SEQ ID NO: 30902 - DNA, 22 bp, Artificial Sequence
  chemically synthesized
gcaaaggttatgcagcgcgtga

SEQ ID NO: 30903 - DNA, 22 bp, Artificial Sequence
  chemically synthesized
tgcagcgcgtgaacatgatcat

SEQ ID NO: 30904 - DNA, 22 bp, Artificial Sequence
  chemically synthesized
atcaccatctgccttttaggat

SEQ ID NO: 30905 - DNA, 22 bp, Artificial Sequence
  chemically synthesized
ccttttaggatatctactcagt

SEQ ID NO: 30906 - DNA, 22 bp, Artificial Sequence
  chemically synthesized
ttaggatatctactcagtgctg

SEQ ID NO: 30907 - DNA, 22 bp, Artificial Sequence
  chemically synthesized
taggatatctactcagtgctga

SEQ ID NO: 30908 - DNA, 22 bp, Artificial Sequence
  chemically synthesized
aggatatctactcagtgctgaa

SEQ ID NO: 30909 - DNA, 22 bp, Artificial Sequence
  chemically synthesized
ggatatctactcagtgctgaat

SEQ ID NO: 30910 - DNA, 22 bp, Artificial Sequence
  chemically synthesized
ctcagtgctgaatgtacaggtt

SEQ ID NO: 30911 - DNA, 22 bp, Artificial Sequence
  chemically synthesized
agtgctgaatgtacaggtttgt

SEQ ID NO: 30912 - DNA, 22 bp, Artificial Sequence
  chemically synthesized
aatgtacaggtttgtttccttt

SEQ ID NO: 30913 - DNA, 22 bp, Artificial Sequence
  chemically synthesized
gtttccttttttaaaatacatt

SEQ ID NO: 30914 - DNA, 22 bp, Artificial Sequence
  chemically synthesized
tttccttttttaaaatacattg

SEQ ID NO: 30915 - DNA, 22 bp, Artificial Sequence
  chemically synthesized
ccttttttaaaatacattgagt

SEQ ID NO: 30916 - DNA, 22 bp, Artificial Sequence
  chemically synthesized
cttttttaaaatacattgagta

SEQ ID NO: 30917 - DNA, 22 bp, Artificial Sequence
  chemically synthesized
ttttaaaatacattgagtatgc

SEQ ID NO: 30918 - DNA, 22 bp, Artificial Sequence
  chemically synthesized
tttaaaatacattgagtatgct

SEQ ID NO: 30919 - DNA, 22 bp, Artificial Sequence
  chemically synthesized
ttaaaatacattgagtatgctt

SEQ ID NO: 30920 - DNA, 22 bp, Artificial Sequence
  chemically synthesized
taaaatacattgagtatgcttg

SEQ ID NO: 30921 - DNA, 22 bp, Artificial Sequence
  chemically synthesized
aaaatacattgagtatgcttgc

SEQ ID NO: 30922 - DNA, 22 bp, Artificial Sequence
  chemically synthesized
aaatacattgagtatgcttgcc

SEQ ID NO: 30923 - DNA, 22 bp, Artificial Sequence
  chemically synthesized
agtatgcttgccttttagatat

SEQ ID NO: 30924 - DNA, 22 bp, Artificial Sequence
  chemically synthesized
gccttttagatatagaaatatc

SEQ ID NO: 30925 - DNA, 22 bp, Artificial Sequence
  chemically synthesized
ccttttagatatagaaatatct

SEQ ID NO: 30926 - DNA, 22 bp, Artificial Sequence
  chemically synthesized
ttagatatagaaatatctgatg

SEQ ID NO: 30927 - DNA, 22 bp, Artificial Sequence
  chemically synthesized
tagatatagaaatatctgatgc

SEQ ID NO: 30928 - DNA, 22 bp, Artificial Sequence
  chemically synthesized
agatatagaaatatctgatgct

SEQ ID NO: 30929 - DNA, 22 bp, Artificial Sequence
  chemically synthesized
gatatagaaatatctgatgctg

SEQ ID NO: 30930 - DNA, 22 bp, Artificial Sequence
  chemically synthesized
atgctgtcttcttcactaaatt

SEQ ID NO: 30931 - DNA, 22 bp, Artificial Sequence
  chemically synthesized
tcttcttcactaaattttgatt

SEQ ID NO: 30932 - DNA, 22 bp, Artificial Sequence
  chemically synthesized
cttcactaaattttgattacat

SEQ ID NO: 30933 - DNA, 22 bp, Artificial Sequence
  chemically synthesized
ttcactaaattttgattacatg

SEQ ID NO: 30934 - DNA, 22 bp, Artificial Sequence
  chemically synthesized
cactaaattttgattacatgat

SEQ ID NO: 30935 - DNA, 22 bp, Artificial Sequence
  chemically synthesized
actaaattttgattacatgatt

SEQ ID NO: 30936 - DNA, 22 bp, Artificial Sequence
  chemically synthesized
aattttgattacatgatttgac

SEQ ID NO: 30937 - DNA, 22 bp, Artificial Sequence
  chemically synthesized
tgattacatgatttgacagcaa

SEQ ID NO: 30938 - DNA, 22 bp, Artificial Sequence
  chemically synthesized
gattacatgatttgacagcaat

SEQ ID NO: 30939 - DNA, 22 bp, Artificial Sequence
  chemically synthesized
attacatgatttgacagcaata

SEQ ID NO: 30940 - DNA, 22 bp, Artificial Sequence
  chemically synthesized
catgatttgacagcaatattga

SEQ ID NO: 30941 - DNA, 22 bp, Artificial Sequence
  chemically synthesized
gacagcaatattgaagagtcta

SEQ ID NO: 30942 - DNA, 22 bp, Artificial Sequence
  chemically synthesized
acagcaatattgaagagtctaa

SEQ ID NO: 30943 - DNA, 22 bp, Artificial Sequence
  chemically synthesized
aagagtctaacagccagcacgc

SEQ ID NO: 30944 - DNA, 22 bp, Artificial Sequence
  chemically synthesized
acagccagcacgcaggttggta

SEQ ID NO: 30945 - DNA, 22 bp, Artificial Sequence
  chemically synthesized
gtaagtactggttctttgttag

SEQ ID NO: 30946 - DNA, 22 bp, Artificial Sequence
  chemically synthesized
gttctttgttagctaggttttc

SEQ ID NO: 30947 - DNA, 22 bp, Artificial Sequence
  chemically synthesized
tttgttagctaggttttcttct

SEQ ID NO: 30948 - DNA, 22 bp, Artificial Sequence
  chemically synthesized
tgttagctaggttttcttcttc

SEQ ID NO: 30949 - DNA, 22 bp, Artificial Sequence
  chemically synthesized
gttagctaggttttcttcttct

SEQ ID NO: 30950 - DNA, 22 bp, Artificial Sequence
  chemically synthesized
ttagctaggttttcttcttctt

SEQ ID NO: 30951 - DNA, 22 bp, Artificial Sequence
  chemically synthesized
gctaggttttcttcttcttcat

SEQ ID NO: 30952 - DNA, 22 bp, Artificial Sequence
  chemically synthesized
ggttttcttcttcttcattttt

SEQ ID NO: 30953 - DNA, 22 bp, Artificial Sequence
  chemically synthesized
tcttcttcttcatttttaaaac

SEQ ID NO: 30954 - DNA, 22 bp, Artificial Sequence
  chemically synthesized
cttcttcttcatttttaaaact

SEQ ID NO: 30955 - DNA, 22 bp, Artificial Sequence
  chemically synthesized
ttcttcttcatttttaaaacta

SEQ ID NO: 30956 - DNA, 22 bp, Artificial Sequence
  chemically synthesized
cttcttcatttttaaaactaaa

SEQ ID NO: 30957 - DNA, 22 bp, Artificial Sequence
  chemically synthesized
ttcttcatttttaaaactaaat

SEQ ID NO: 30958 - DNA, 22 bp, Artificial Sequence
  chemically synthesized
cttcatttttaaaactaaatag

SEQ ID NO: 30959 - DNA, 22 bp, Artificial Sequence
  chemically synthesized
ttcatttttaaaactaaataga

SEQ ID NO: 30960 - DNA, 22 bp, Artificial Sequence
  chemically synthesized
catttttaaaactaaatagatc

SEQ ID NO: 30961 - DNA, 22 bp, Artificial Sequence
  chemically synthesized
atttttaaaactaaatagatcg

SEQ ID NO: 30962 - DNA, 22 bp, Artificial Sequence
  chemically synthesized
ttaaaactaaatagatcgacaa

SEQ ID NO: 30963 - DNA, 22 bp, Artificial Sequence
  chemically synthesized
taaaactaaatagatcgacaat

SEQ ID NO: 30964 - DNA, 22 bp, Artificial Sequence
  chemically synthesized
aaaactaaatagatcgacaatg

SEQ ID NO: 30965 - DNA, 22 bp, Artificial Sequence
  chemically synthesized
aaactaaatagatcgacaatgc

SEQ ID NO: 30966 - DNA, 22 bp, Artificial Sequence
  chemically synthesized
aatagatcgacaatgcttatga

SEQ ID NO: 30967 - DNA, 22 bp, Artificial Sequence
  chemically synthesized
atgatgcatttatgtttaataa

SEQ ID NO: 30968 - DNA, 22 bp, Artificial Sequence
  chemically synthesized
tgatgcatttatgtttaataaa

SEQ ID NO: 30969 - DNA, 22 bp, Artificial Sequence
  chemically synthesized
atgtttaataaacactgttcag

SEQ ID NO: 30970 - DNA, 22 bp, Artificial Sequence
  chemically synthesized
tgtttaataaacactgttcagt

SEQ ID NO: 30971 - DNA, 22 bp, Artificial Sequence
  chemically synthesized
aataaacactgttcagttcatg

SEQ ID NO: 30972 - DNA, 22 bp, Artificial Sequence
  chemically synthesized
ataaacactgttcagttcatga

SEQ ID NO: 30973 - DNA, 22 bp, Artificial Sequence
  chemically synthesized
ttcagttcatgatttggtcatg

SEQ ID NO: 30974 - DNA, 22 bp, Artificial Sequence
  chemically synthesized
agttcatgatttggtcatgtaa

SEQ ID NO: 30975 - DNA, 22 bp, Artificial Sequence
  chemically synthesized
atgatttggtcatgtaattcct

SEQ ID NO: 30976 - DNA, 22 bp, Artificial Sequence
  chemically synthesized
ggtcatgtaattcctgttagaa

SEQ ID NO: 30977 - DNA, 22 bp, Artificial Sequence
  chemically synthesized
gtcatgtaattcctgttagaaa

SEQ ID NO: 30978 - DNA, 22 bp, Artificial Sequence
  chemically synthesized
ctgttagaaaacattcatctcc

SEQ ID NO: 30979 - DNA, 22 bp, Artificial Sequence
  chemically synthesized
ttagaaaacattcatctccttg

SEQ ID NO: 30980 - DNA, 22 bp, Artificial Sequence
  chemically synthesized
gaaaacattcatctccttggtt

SEQ ID NO: 30981 - DNA, 22 bp, Artificial Sequence
  chemically synthesized
atctccttggtttaaaaaaatt

SEQ ID NO: 30982 - DNA, 22 bp, Artificial Sequence
  chemically synthesized
cttggtttaaaaaaattaaaag

SEQ ID NO: 30983 - DNA, 22 bp, Artificial Sequence
  chemically synthesized
ggtttaaaaaaattaaaagtgg

SEQ ID NO: 30984 - DNA, 22 bp, Artificial Sequence
  chemically synthesized
gtttaaaaaaattaaaagtggg

SEQ ID NO: 30985 - DNA, 22 bp, Artificial Sequence
  chemically synthesized
aaaaaaattaaaagtgggaaaa

SEQ ID NO: 30986 - DNA, 22 bp, Artificial Sequence
  chemically synthesized
aaaaaattaaaagtgggaaaac

SEQ ID NO: 30987 - DNA, 22 bp, Artificial Sequence
  chemically synthesized
aaagtgggaaaacaaagaaata

SEQ ID NO: 30988 - DNA, 22 bp, Artificial Sequence
  chemically synthesized
tttttgtttggacttaccactt

SEQ ID NO: 30989 - DNA, 22 bp, Artificial Sequence
  chemically synthesized
ttgtttggacttaccactttga

SEQ ID NO: 30990 - DNA, 22 bp, Artificial Sequence
  chemically synthesized
tgtttggacttaccactttgaa

SEQ ID NO: 30991 - DNA, 22 bp, Artificial Sequence
  chemically synthesized
gtttggacttaccactttgaaa

SEQ ID NO: 30992 - DNA, 22 bp, Artificial Sequence
  chemically synthesized
tttggacttaccactttgaaat

SEQ ID NO: 30993 - DNA, 22 bp, Artificial Sequence
  chemically synthesized
ggacttaccactttgaaatcaa

SEQ ID NO: 30994 - DNA, 22 bp, Artificial Sequence
  chemically synthesized
gacttaccactttgaaatcaaa

SEQ ID NO: 30995 - DNA, 22 bp, Artificial Sequence
  chemically synthesized
accactttgaaatcaaaatggg

SEQ ID NO: 30996 - DNA, 22 bp, Artificial Sequence
  chemically synthesized
ccactttgaaatcaaaatggga

SEQ ID NO: 30997 - DNA, 22 bp, Artificial Sequence
  chemically synthesized
tgaaatcaaaatgggaaacaaa

SEQ ID NO: 30998 - DNA, 22 bp, Artificial Sequence
  chemically synthesized
gaaatcaaaatgggaaacaaaa

SEQ ID NO: 30999 - DNA, 22 bp, Artificial Sequence
  chemically synthesized
aaatcaaaatgggaaacaaaag

SEQ ID NO: 31000 - DNA, 22 bp, Artificial Sequence
  chemically synthesized
atttacacaaaaagtctgattt

SEQ ID NO: 31001 - DNA, 22 bp, Artificial Sequence
  chemically synthesized
tttacacaaaaagtctgatttt

SEQ ID NO: 31002 - DNA, 22 bp, Artificial Sequence
  chemically synthesized
acacaaaaagtctgattttaag

SEQ ID NO: 31003 - DNA, 22 bp, Artificial Sequence
  chemically synthesized
cacaaaaagtctgattttaaga

SEQ ID NO: 31004 - DNA, 22 bp, Artificial Sequence
  chemically synthesized
attttaagatatatgacatttc

SEQ ID NO: 31005 - DNA, 22 bp, Artificial Sequence
  chemically synthesized
taagatatatgacatttcaagg

SEQ ID NO: 31006 - DNA, 22 bp, Artificial Sequence
  chemically synthesized
aagatatatgacatttcaaggt

SEQ ID NO: 31007 - DNA, 22 bp, Artificial Sequence
  chemically synthesized
agatatatgacatttcaaggtt

SEQ ID NO: 31008 - DNA, 22 bp, Artificial Sequence
  chemically synthesized
caaggtttcagaagtatgtaat

SEQ ID NO: 31009 - DNA, 22 bp, Artificial Sequence
  chemically synthesized
aaggtttcagaagtatgtaatg

SEQ ID NO: 31010 - DNA, 22 bp, Artificial Sequence
  chemically synthesized
cagaagtatgtaatgaggtgtg

SEQ ID NO: 31011 - DNA, 22 bp, Artificial Sequence
  chemically synthesized
agaagtatgtaatgaggtgtgt

SEQ ID NO: 31012 - DNA, 22 bp, Artificial Sequence
  chemically synthesized
taattttttaaattatatatct

SEQ ID NO: 31013 - DNA, 22 bp, Artificial Sequence
  chemically synthesized
attttttaaattatatatcttc

SEQ ID NO: 31014 - DNA, 22 bp, Artificial Sequence
  chemically synthesized
tttaaattatatatcttcaatt

SEQ ID NO: 31015 - DNA, 22 bp, Artificial Sequence
  chemically synthesized
ttaaattatatatcttcaattt

SEQ ID NO: 31016 - DNA, 22 bp, Artificial Sequence
  chemically synthesized
taaattatatatcttcaattta

SEQ ID NO: 31017 - DNA, 22 bp, Artificial Sequence
  chemically synthesized
aaattatatatcttcaatttaa

SEQ ID NO: 31018 - DNA, 22 bp, Artificial Sequence
  chemically synthesized
aattatatatcttcaatttaaa

SEQ ID NO: 31019 - DNA, 22 bp, Artificial Sequence
  chemically synthesized
tatatcttcaatttaaagtttt

SEQ ID NO: 31020 - DNA, 22 bp, Artificial Sequence
  chemically synthesized
caatttaaagttttagttaaaa

SEQ ID NO: 31021 - DNA, 22 bp, Artificial Sequence
  chemically synthesized
aatttaaagttttagttaaaac

SEQ ID NO: 31022 - DNA, 22 bp, Artificial Sequence
  chemically synthesized
aaagttttagttaaaacataaa

SEQ ID NO: 31023 - DNA, 22 bp, Artificial Sequence
  chemically synthesized
aagttttagttaaaacataaag

SEQ ID NO: 31024 - DNA, 22 bp, Artificial Sequence
  chemically synthesized
tagttaaaacataaagattaac

SEQ ID NO: 31025 - DNA, 22 bp, Artificial Sequence
  chemically synthesized
agttaaaacataaagattaacc

SEQ ID NO: 31026 - DNA, 22 bp, Artificial Sequence
  chemically synthesized
gttaaaacataaagattaacct

SEQ ID NO: 31027 - DNA, 22 bp, Artificial Sequence
  chemically synthesized
aaacataaagattaacctttca

SEQ ID NO: 31028 - DNA, 22 bp, Artificial Sequence
  chemically synthesized
acctttcattagcaagctgtta

SEQ ID NO: 31029 - DNA, 22 bp, Artificial Sequence
  chemically synthesized
tcattagcaagctgttagttat

SEQ ID NO: 31030 - DNA, 22 bp, Artificial Sequence
  chemically synthesized
cattagcaagctgttagttatc

SEQ ID NO: 31031 - DNA, 22 bp, Artificial Sequence
  chemically synthesized
attagcaagctgttagttatca

SEQ ID NO: 31032 - DNA, 22 bp, Artificial Sequence
  chemically synthesized
gcaagctgttagttatcaccaa

SEQ ID NO: 31033 - DNA, 22 bp, Artificial Sequence
  chemically synthesized
ttagttatcaccaaagcttttc

SEQ ID NO: 31034 - DNA, 22 bp, Artificial Sequence
  chemically synthesized
gttatcaccaaagcttttcatg

SEQ ID NO: 31035 - DNA, 22 bp, Artificial Sequence
  chemically synthesized
tcaccaaagcttttcatggatt

SEQ ID NO: 31036 - DNA, 22 bp, Artificial Sequence
  chemically synthesized
ttcatggattaggaaaaaatca

SEQ ID NO: 31037 - DNA, 22 bp, Artificial Sequence
  chemically synthesized
tcatggattaggaaaaaatcat

SEQ ID NO: 31038 - DNA, 22 bp, Artificial Sequence
  chemically synthesized
catggattaggaaaaaatcatt

SEQ ID NO: 31039 - DNA, 22 bp, Artificial Sequence
  chemically synthesized
atggattaggaaaaaatcattt

SEQ ID NO: 31040 - DNA, 22 bp, Artificial Sequence
  chemically synthesized
ggaaaaaatcattttgtctcta

SEQ ID NO: 31041 - DNA, 22 bp, Artificial Sequence
  chemically synthesized
tgtctctatgtcaaacatcttg

SEQ ID NO: 31042 - DNA, 22 bp, Artificial Sequence
  chemically synthesized
gtctctatgtcaaacatcttgg

SEQ ID NO: 31043 - DNA, 22 bp, Artificial Sequence
  chemically synthesized
tctctatgtcaaacatcttgga

SEQ ID NO: 31044 - DNA, 22 bp, Artificial Sequence
  chemically synthesized
tatgtcaaacatcttggagttg

SEQ ID NO: 31045 - DNA, 22 bp, Artificial Sequence
  chemically synthesized
tgtcaaacatcttggagttgat

SEQ ID NO: 31046 - DNA, 22 bp, Artificial Sequence
  chemically synthesized
ggagttgatatttggggaaaca

SEQ ID NO: 31047 - DNA, 22 bp, Artificial Sequence
  chemically synthesized
gagttgatatttggggaaacac

SEQ ID NO: 31048 - DNA, 22 bp, Artificial Sequence
  chemically synthesized
atatttggggaaacacaatact

SEQ ID NO: 31049 - DNA, 22 bp, Artificial Sequence
  chemically synthesized
ggggaaacacaatactcagttg

SEQ ID NO: 31050 - DNA, 22 bp, Artificial Sequence
  chemically synthesized
gggaaacacaatactcagttga

SEQ ID NO: 31051 - DNA, 22 bp, Artificial Sequence
  chemically synthesized
agttgagttccctaggggagaa

SEQ ID NO: 31052 - DNA, 22 bp, Artificial Sequence
  chemically synthesized
agttccctaggggagaaaagca

SEQ ID NO: 31053 - DNA, 22 bp, Artificial Sequence
  chemically synthesized
cctaggggagaaaagcaagctt

SEQ ID NO: 31054 - DNA, 22 bp, Artificial Sequence
  chemically synthesized
ggggagaaaagcaagcttaaga

SEQ ID NO: 31055 - DNA, 22 bp, Artificial Sequence
  chemically synthesized
aagaattgacataaagagtagg

SEQ ID NO: 31056 - DNA, 22 bp, Artificial Sequence
  chemically synthesized
agaattgacataaagagtagga

SEQ ID NO: 31057 - DNA, 22 bp, Artificial Sequence
  chemically synthesized
acataaagagtaggaagttagc

SEQ ID NO: 31058 - DNA, 22 bp, Artificial Sequence
  chemically synthesized
gctaatgcaacatatatcactt

SEQ ID NO: 31059 - DNA, 22 bp, Artificial Sequence
  chemically synthesized
atgcaacatatatcactttgtt

SEQ ID NO: 31060 - DNA, 22 bp, Artificial Sequence
  chemically synthesized
tgttttttcacaactacagtga

SEQ ID NO: 31061 - DNA, 22 bp, Artificial Sequence
  chemically synthesized
gttttttcacaactacagtgac

SEQ ID NO: 31062 - DNA, 22 bp, Artificial Sequence
  chemically synthesized
ttttttcacaactacagtgact

SEQ ID NO: 31063 - DNA, 22 bp, Artificial Sequence
  chemically synthesized
tttcacaactacagtgacttta

SEQ ID NO: 31064 - DNA, 22 bp, Artificial Sequence
  chemically synthesized
ttcacaactacagtgactttat

SEQ ID NO: 31065 - DNA, 22 bp, Artificial Sequence
  chemically synthesized
tcacaactacagtgactttatg

SEQ ID NO: 31066 - DNA, 22 bp, Artificial Sequence
  chemically synthesized
cacaactacagtgactttatgt

SEQ ID NO: 31067 - DNA, 22 bp, Artificial Sequence
  chemically synthesized
acaactacagtgactttatgta

SEQ ID NO: 31068 - DNA, 22 bp, Artificial Sequence
  chemically synthesized
cagtgactttatgtatttccca

SEQ ID NO: 31069 - DNA, 22 bp, Artificial Sequence
  chemically synthesized
tatgtatttcccagaggaaggc

SEQ ID NO: 31070 - DNA, 22 bp, Artificial Sequence
  chemically synthesized
atgtatttcccagaggaaggca

SEQ ID NO: 31071 - DNA, 22 bp, Artificial Sequence
  chemically synthesized
tgtatttcccagaggaaggcat

SEQ ID NO: 31072 - DNA, 22 bp, Artificial Sequence
  chemically synthesized
cccagaggaaggcatacaggga

SEQ ID NO: 31073 - DNA, 22 bp, Artificial Sequence
  chemically synthesized
ccagaggaaggcatacagggaa

SEQ ID NO: 31074 - DNA, 22 bp, Artificial Sequence
  chemically synthesized
tcccatttggacaaacagcatg

SEQ ID NO: 31075 - DNA, 22 bp, Artificial Sequence
  chemically synthesized
ggacaaacagcatgttctcaca

SEQ ID NO: 31076 - DNA, 22 bp, Artificial Sequence
  chemically synthesized
gacaaacagcatgttctcacag

SEQ ID NO: 31077 - DNA, 22 bp, Artificial Sequence
  chemically synthesized
tcacaggaagcatttatcacac

SEQ ID NO: 31078 - DNA, 22 bp, Artificial Sequence
  chemically synthesized
acaggaagcatttatcacactt

SEQ ID NO: 31079 - DNA, 22 bp, Artificial Sequence
  chemically synthesized
atcacacttacttgtcaacttt

SEQ ID NO: 31080 - DNA, 22 bp, Artificial Sequence
  chemically synthesized
tcacacttacttgtcaactttc

SEQ ID NO: 31081 - DNA, 22 bp, Artificial Sequence
  chemically synthesized
acttgtcaactttctagaatca

SEQ ID NO: 31082 - DNA, 22 bp, Artificial Sequence
  chemically synthesized
cttgtcaactttctagaatcaa

SEQ ID NO: 31083 - DNA, 22 bp, Artificial Sequence
  chemically synthesized
gtcaactttctagaatcaaatc

SEQ ID NO: 31084 - DNA, 22 bp, Artificial Sequence
  chemically synthesized
tcaactttctagaatcaaatct

SEQ ID NO: 31085 - DNA, 22 bp, Artificial Sequence
  chemically synthesized
tctagaatcaaatctagtagct

SEQ ID NO: 31086 - DNA, 22 bp, Artificial Sequence
  chemically synthesized
ctagaatcaaatctagtagctg

SEQ ID NO: 31087 - DNA, 22 bp, Artificial Sequence
  chemically synthesized
tagaatcaaatctagtagctga

SEQ ID NO: 31088 - DNA, 22 bp, Artificial Sequence
  chemically synthesized
gaatcaaatctagtagctgaca

SEQ ID NO: 31089 - DNA, 22 bp, Artificial Sequence
  chemically synthesized
gtagctgacagtaccaggatca

SEQ ID NO: 31090 - DNA, 22 bp, Artificial Sequence
  chemically synthesized
acagtaccaggatcaggggtgc

SEQ ID NO: 31091 - DNA, 22 bp, Artificial Sequence
  chemically synthesized
agcacccccagaaagctgactg

SEQ ID NO: 31092 - DNA, 22 bp, Artificial Sequence
  chemically synthesized
actggccctgtggttcccactc

SEQ ID NO: 31093 - DNA, 22 bp, Artificial Sequence
  chemically synthesized
gccctgtggttcccactccaga

SEQ ID NO: 31094 - DNA, 22 bp, Artificial Sequence
  chemically synthesized
tggttcccactccagacatgat

SEQ ID NO: 31095 - DNA, 22 bp, Artificial Sequence
  chemically synthesized
ccactccagacatgatgtcagc

SEQ ID NO: 31096 - DNA, 22 bp, Artificial Sequence
  chemically synthesized
cagacatgatgtcagctgtgaa

SEQ ID NO: 31097 - DNA, 22 bp, Artificial Sequence
  chemically synthesized
tgaaatcagactgaaatgctga

SEQ ID NO: 31098 - DNA, 22 bp, Artificial Sequence
  chemically synthesized
aaatgctgaaataacgataaaa

SEQ ID NO: 31099 - DNA, 22 bp, Artificial Sequence
  chemically synthesized
aaataacgataaaaaaaaatac

SEQ ID NO: 31100 - DNA, 22 bp, Artificial Sequence
  chemically synthesized
aactagcaaagtgagtaaagtc

SEQ ID NO: 31101 - DNA, 22 bp, Artificial Sequence
  chemically synthesized
gcaaagtgagtaaagtcaaggg

SEQ ID NO: 31102 - DNA, 22 bp, Artificial Sequence
  chemically synthesized
gttggaaaactcacaaagcagg

SEQ ID NO: 31103 - DNA, 22 bp, Artificial Sequence
  chemically synthesized
ttggaaaactcacaaagcagga

SEQ ID NO: 31104 - DNA, 22 bp, Artificial Sequence
  chemically synthesized
gaaaactcacaaagcaggacat

SEQ ID NO: 31105 - DNA, 22 bp, Artificial Sequence
  chemically synthesized
acaaagcaggacataaagcaag

SEQ ID NO: 31106 - DNA, 22 bp, Artificial Sequence
  chemically synthesized
gatatatctcattagtgtgaca

SEQ ID NO: 31107 - DNA, 22 bp, Artificial Sequence
  chemically synthesized
attagtgtgacatctgggagga

SEQ ID NO: 31108 - DNA, 22 bp, Artificial Sequence
  chemically synthesized
gtgtgacatctgggaggacaaa

SEQ ID NO: 31109 - DNA, 22 bp, Artificial Sequence
  chemically synthesized
ggaggacaaagcatccaaaccc

SEQ ID NO: 31110 - DNA, 22 bp, Artificial Sequence
  chemically synthesized
tcttctatataagtggtgagat

SEQ ID NO: 31111 - DNA, 22 bp, Artificial Sequence
  chemically synthesized
cttctatataagtggtgagatg

SEQ ID NO: 31112 - DNA, 22 bp, Artificial Sequence
  chemically synthesized
ttctatataagtggtgagatga

SEQ ID NO: 31113 - DNA, 22 bp, Artificial Sequence
  chemically synthesized
ctatataagtggtgagatgatg

SEQ ID NO: 31114 - DNA, 22 bp, Artificial Sequence
  chemically synthesized
tatataagtggtgagatgatga

SEQ ID NO: 31115 - DNA, 22 bp, Artificial Sequence
  chemically synthesized
tataagtggtgagatgatgaag

SEQ ID NO: 31116 - DNA, 22 bp, Artificial Sequence
  chemically synthesized
taagagggcttctgcccccttg

SEQ ID NO: 31117 - DNA, 22 bp, Artificial Sequence
  chemically synthesized
ctgcccccttgaagacttcaga

SEQ ID NO: 31118 - DNA, 22 bp, Artificial Sequence
  chemically synthesized
tgcccccttgaagacttcagat

SEQ ID NO: 31119 - DNA, 22 bp, Artificial Sequence
  chemically synthesized
cccccttgaagacttcagatgc

SEQ ID NO: 31120 - DNA, 22 bp, Artificial Sequence
  chemically synthesized
gaagacttcagatgctggggaa

SEQ ID NO: 31121 - DNA, 22 bp, Artificial Sequence
  chemically synthesized
aagacttcagatgctggggaaa

SEQ ID NO: 31122 - DNA, 22 bp, Artificial Sequence
  chemically synthesized
cagatgctggggaaaggataga

SEQ ID NO: 31123 - DNA, 22 bp, Artificial Sequence
  chemically synthesized
agatgctggggaaaggatagat

SEQ ID NO: 31124 - DNA, 22 bp, Artificial Sequence
  chemically synthesized
gggaaaggatagataagaataa

SEQ ID NO: 31125 - DNA, 22 bp, Artificial Sequence
  chemically synthesized
ttggagcctgggaaataatgac

SEQ ID NO: 31126 - DNA, 22 bp, Artificial Sequence
  chemically synthesized
tggagcctgggaaataatgact

SEQ ID NO: 31127 - DNA, 22 bp, Artificial Sequence
  chemically synthesized
ggagcctgggaaataatgacta

SEQ ID NO: 31128 - DNA, 22 bp, Artificial Sequence
  chemically synthesized
gagcctgggaaataatgactag

SEQ ID NO: 31129 - DNA, 22 bp, Artificial Sequence
  chemically synthesized
ggaaataatgactagcgataaa

SEQ ID NO: 31130 - DNA, 22 bp, Artificial Sequence
  chemically synthesized
gcgataaacctgaagggaagtt

SEQ ID NO: 31131 - DNA, 22 bp, Artificial Sequence
  chemically synthesized
aagggaagttaagtatacgatc

SEQ ID NO: 31132 - DNA, 22 bp, Artificial Sequence
  chemically synthesized
agtatacgatccccagataata

SEQ ID NO: 31133 - DNA, 22 bp, Artificial Sequence
  chemically synthesized
aggagaaaggcaatgtgattct

SEQ ID NO: 31134 - DNA, 22 bp, Artificial Sequence
  chemically synthesized
tgcagccattgtagccagagat

SEQ ID NO: 31135 - DNA, 22 bp, Artificial Sequence
  chemically synthesized
cagccattgtagccagagataa

SEQ ID NO: 31136 - DNA, 22 bp, Artificial Sequence
  chemically synthesized
tagccagagataataagccctt

SEQ ID NO: 31137 - DNA, 22 bp, Artificial Sequence
  chemically synthesized
gaggaaggggccaggggaattt

SEQ ID NO: 31138 - DNA, 22 bp, Artificial Sequence
  chemically synthesized
aggaaggggccaggggaatttt

SEQ ID NO: 31139 - DNA, 22 bp, Artificial Sequence
  chemically synthesized
ttctaaggatagacagtattaa

SEQ ID NO: 31140 - DNA, 22 bp, Artificial Sequence
  chemically synthesized
tctaaggatagacagtattaat

SEQ ID NO: 31141 - DNA, 22 bp, Artificial Sequence
  chemically synthesized
ctaaggatagacagtattaatg

SEQ ID NO: 31142 - DNA, 22 bp, Artificial Sequence
  chemically synthesized
taaggatagacagtattaatgc

SEQ ID NO: 31143 - DNA, 22 bp, Artificial Sequence
  chemically synthesized
aggatagacagtattaatgcag

SEQ ID NO: 31144 - DNA, 22 bp, Artificial Sequence
  chemically synthesized
atgcagcactctcttctgctat

SEQ ID NO: 31145 - DNA, 22 bp, Artificial Sequence
  chemically synthesized
tcttctgctattaaactctcat

SEQ ID NO: 31146 - DNA, 22 bp, Artificial Sequence
  chemically synthesized
ttctgctattaaactctcattg

SEQ ID NO: 31147 - DNA, 22 bp, Artificial Sequence
  chemically synthesized
ctgctattaaactctcattggc

SEQ ID NO: 31148 - DNA, 22 bp, Artificial Sequence
  chemically synthesized
tgctattaaactctcattggct

SEQ ID NO: 31149 - DNA, 22 bp, Artificial Sequence
  chemically synthesized
ctattaaactctcattggcttc

SEQ ID NO: 31150 - DNA, 22 bp, Artificial Sequence
  chemically synthesized
ttaaactctcattggcttctaa

SEQ ID NO: 31151 - DNA, 22 bp, Artificial Sequence
  chemically synthesized
aactctcattggcttctaaaag

SEQ ID NO: 31152 - DNA, 22 bp, Artificial Sequence
  chemically synthesized
tcattggcttctaaaaggagtt

SEQ ID NO: 31153 - DNA, 22 bp, Artificial Sequence
  chemically synthesized
attggcttctaaaaggagtttc

SEQ ID NO: 31154 - DNA, 22 bp, Artificial Sequence
  chemically synthesized
gcttctaaaaggagtttcggtg

SEQ ID NO: 31155 - DNA, 22 bp, Artificial Sequence
  chemically synthesized
ctaaaaggagtttcggtgagtg

SEQ ID NO: 31156 - DNA, 22 bp, Artificial Sequence
  chemically synthesized
taaaaggagtttcggtgagtga

SEQ ID NO: 31157 - DNA, 22 bp, Artificial Sequence
  chemically synthesized
aaaggagtttcggtgagtgatt

SEQ ID NO: 31158 - DNA, 22 bp, Artificial Sequence
  chemically synthesized
cggtgagtgatttgctgagatg

SEQ ID NO: 31159 - DNA, 22 bp, Artificial Sequence
  chemically synthesized
ggtgagtgatttgctgagatgt

SEQ ID NO: 31160 - DNA, 22 bp, Artificial Sequence
  chemically synthesized
gctgagatgttgcattttcatg

SEQ ID NO: 31161 - DNA, 22 bp, Artificial Sequence
  chemically synthesized
ctgagatgttgcattttcatgg

SEQ ID NO: 31162 - DNA, 22 bp, Artificial Sequence
  chemically synthesized
agatgttgcattttcatggctg

SEQ ID NO: 31163 - DNA, 22 bp, Artificial Sequence
  chemically synthesized
cattttcatggctgctgccttt

SEQ ID NO: 31164 - DNA, 22 bp, Artificial Sequence
  chemically synthesized
tcatggctgctgcctttaggta

SEQ ID NO: 31165 - DNA, 22 bp, Artificial Sequence
  chemically synthesized
catggctgctgcctttaggtat

SEQ ID NO: 31166 - DNA, 22 bp, Artificial Sequence
  chemically synthesized
atggctgctgcctttaggtatt

SEQ ID NO: 31167 - DNA, 22 bp, Artificial Sequence
  chemically synthesized
ctgcctttaggtattattgcaa

SEQ ID NO: 31168 - DNA, 22 bp, Artificial Sequence
  chemically synthesized
cctttaggtattattgcaacag

SEQ ID NO: 31169 - DNA, 22 bp, Artificial Sequence
  chemically synthesized
taggtattattgcaacagtttg

SEQ ID NO: 31170 - DNA, 22 bp, Artificial Sequence
  chemically synthesized
aggtattattgcaacagtttgg

SEQ ID NO: 31171 - DNA, 22 bp, Artificial Sequence
  chemically synthesized
ggtattattgcaacagtttgga

SEQ ID NO: 31172 - DNA, 22 bp, Artificial Sequence
  chemically synthesized
ttgcaacagtttggaattttga

SEQ ID NO: 31173 - DNA, 22 bp, Artificial Sequence
  chemically synthesized
caacagtttggaattttgaaat

SEQ ID NO: 31174 - DNA, 22 bp, Artificial Sequence
  chemically synthesized
ggaattttgaaattaaaacagt

SEQ ID NO: 31175 - DNA, 22 bp, Artificial Sequence
  chemically synthesized
gaattttgaaattaaaacagtt

SEQ ID NO: 31176 - DNA, 22 bp, Artificial Sequence
  chemically synthesized
tgaaattaaaacagttctgtaa

SEQ ID NO: 31177 - DNA, 22 bp, Artificial Sequence
  chemically synthesized
gaaattaaaacagttctgtaaa

SEQ ID NO: 31178 - DNA, 22 bp, Artificial Sequence
  chemically synthesized
aaattaaaacagttctgtaaaa

SEQ ID NO: 31179 - DNA, 22 bp, Artificial Sequence
  chemically synthesized
aaacagttctgtaaaaccagtt

SEQ ID NO: 31180 - DNA, 22 bp, Artificial Sequence
  chemically synthesized
tgtaaaaccagtttagttttgt

SEQ ID NO: 31181 - DNA, 22 bp, Artificial Sequence
  chemically synthesized
taaaaccagtttagttttgtaa

SEQ ID NO: 31182 - DNA, 22 bp, Artificial Sequence
  chemically synthesized
agttttgtaaagtgtatgcatc

SEQ ID NO: 31183 - DNA, 22 bp, Artificial Sequence
  chemically synthesized
gttttgtaaagtgtatgcatca

SEQ ID NO: 31184 - DNA, 22 bp, Artificial Sequence
  chemically synthesized
tgtaaagtgtatgcatcaaaga

SEQ ID NO: 31185 - DNA, 22 bp, Artificial Sequence
  chemically synthesized
gtaaagtgtatgcatcaaagat

SEQ ID NO: 31186 - DNA, 22 bp, Artificial Sequence
  chemically synthesized
taaagtgtatgcatcaaagatg

SEQ ID NO: 31187 - DNA, 22 bp, Artificial Sequence
  chemically synthesized
cattcagacattactgagttac

SEQ ID NO: 31188 - DNA, 22 bp, Artificial Sequence
  chemically synthesized
attcagacattactgagttaca

SEQ ID NO: 31189 - DNA, 22 bp, Artificial Sequence
  chemically synthesized
agacattactgagttacaacta

SEQ ID NO: 31190 - DNA, 22 bp, Artificial Sequence
  chemically synthesized
ctgagttacaactatggtgcca

SEQ ID NO: 31191 - DNA, 22 bp, Artificial Sequence
  chemically synthesized
agttacaactatggtgccaggt

SEQ ID NO: 31192 - DNA, 22 bp, Artificial Sequence
  chemically synthesized
caactatggtgccaggtactgt

SEQ ID NO: 31193 - DNA, 22 bp, Artificial Sequence
  chemically synthesized
tggtgccaggtactgtgtcagg

SEQ ID NO: 31194 - DNA, 22 bp, Artificial Sequence
  chemically synthesized
tgtcagggtactaggggtatgg

SEQ ID NO: 31195 - DNA, 22 bp, Artificial Sequence
  chemically synthesized
ggggtatggggataaaccagac

SEQ ID NO: 31196 - DNA, 22 bp, Artificial Sequence
  chemically synthesized
cctctttgatctaaagcagcat

SEQ ID NO: 31197 - DNA, 22 bp, Artificial Sequence
  chemically synthesized
tttgatctaaagcagcatgagg

SEQ ID NO: 31198 - DNA, 22 bp, Artificial Sequence
  chemically synthesized
tgatctaaagcagcatgaggcc

SEQ ID NO: 31199 - DNA, 22 bp, Artificial Sequence
  chemically synthesized
gatctaaagcagcatgaggcca

SEQ ID NO: 31200 - DNA, 22 bp, Artificial Sequence
  chemically synthesized
atctaaagcagcatgaggccag

SEQ ID NO: 31201 - DNA, 22 bp, Artificial Sequence
  chemically synthesized
aagcagcatgaggccaggtgag

SEQ ID NO: 31202 - DNA, 22 bp, Artificial Sequence
  chemically synthesized
caatataatgtgataaaatgtg

SEQ ID NO: 31203 - DNA, 22 bp, Artificial Sequence
  chemically synthesized
aatataatgtgataaaatgtgc

SEQ ID NO: 31204 - DNA, 22 bp, Artificial Sequence
  chemically synthesized
ggtactaagggatcatagagaa

SEQ ID NO: 31205 - DNA, 22 bp, Artificial Sequence
  chemically synthesized
agggatcatagagaaaggaaca

SEQ ID NO: 31206 - DNA, 22 bp, Artificial Sequence
  chemically synthesized
aatggggaaacaattgatagag

SEQ ID NO: 31207 - DNA, 22 bp, Artificial Sequence
  chemically synthesized
atagagagagaatattttcatc

SEQ ID NO: 31208 - DNA, 22 bp, Artificial Sequence
  chemically synthesized
tcatctgggtcttaaaagatga

SEQ ID NO: 31209 - DNA, 22 bp, Artificial Sequence
  chemically synthesized
catctgggtcttaaaagatgag

SEQ ID NO: 31210 - DNA, 22 bp, Artificial Sequence
  chemically synthesized
atctgggtcttaaaagatgagt

SEQ ID NO: 31211 - DNA, 22 bp, Artificial Sequence
  chemically synthesized
ggtcttaaaagatgagtaggcg

SEQ ID NO: 31212 - DNA, 22 bp, Artificial Sequence
  chemically synthesized
aaaagatgagtaggcgttctct

SEQ ID NO: 31213 - DNA, 22 bp, Artificial Sequence
  chemically synthesized
aaagatgagtaggcgttctctc

SEQ ID NO: 31214 - DNA, 22 bp, Artificial Sequence
  chemically synthesized
tctctctttaaatgtctgatat

SEQ ID NO: 31215 - DNA, 22 bp, Artificial Sequence
  chemically synthesized
tctctttaaatgtctgatataa

SEQ ID NO: 31216 - DNA, 22 bp, Artificial Sequence
  chemically synthesized
tctttaaatgtctgatataagg

SEQ ID NO: 31217 - DNA, 22 bp, Artificial Sequence
  chemically synthesized
tttaaatgtctgatataagggc

SEQ ID NO: 31218 - DNA, 22 bp, Artificial Sequence
  chemically synthesized
taaatgtctgatataagggcat

SEQ ID NO: 31219 - DNA, 22 bp, Artificial Sequence
  chemically synthesized
aaatgtctgatataagggcatt

SEQ ID NO: 31220 - DNA, 22 bp, Artificial Sequence
  chemically synthesized
aatgtctgatataagggcattt

SEQ ID NO: 31221 - DNA, 22 bp, Artificial Sequence
  chemically synthesized
atataagggcattttatgcaaa

SEQ ID NO: 31222 - DNA, 22 bp, Artificial Sequence
  chemically synthesized
tatgcaaagaggatcactcgtg

SEQ ID NO: 31223 - DNA, 22 bp, Artificial Sequence
  chemically synthesized
atgcaaagaggatcactcgtgc

SEQ ID NO: 31224 - DNA, 22 bp, Artificial Sequence
  chemically synthesized
tgcaaagaggatcactcgtgca

SEQ ID NO: 31225 - DNA, 22 bp, Artificial Sequence
  chemically synthesized
gtgcaaagactcagatttgcaa

SEQ ID NO: 31226 - DNA, 22 bp, Artificial Sequence
  chemically synthesized
agatttgcaagaacgtgaggta

SEQ ID NO: 31227 - DNA, 22 bp, Artificial Sequence
  chemically synthesized
gcaagaacgtgaggtatttcag

SEQ ID NO: 31228 - DNA, 22 bp, Artificial Sequence
  chemically synthesized
caagaacgtgaggtatttcagg

SEQ ID NO: 31229 - DNA, 22 bp, Artificial Sequence
  chemically synthesized
caggagttttgtatggttccat

SEQ ID NO: 31230 - DNA, 22 bp, Artificial Sequence
  chemically synthesized
aggagttttgtatggttccata

SEQ ID NO: 31231 - DNA, 22 bp, Artificial Sequence
  chemically synthesized
tgtatggttccatatggactat

SEQ ID NO: 31232 - DNA, 22 bp, Artificial Sequence
  chemically synthesized
gtatggttccatatggactatg

SEQ ID NO: 31233 - DNA, 22 bp, Artificial Sequence
  chemically synthesized
tatggttccatatggactatga

SEQ ID NO: 31234 - DNA, 22 bp, Artificial Sequence
  chemically synthesized
catatggactatgacaagtgag

SEQ ID NO: 31235 - DNA, 22 bp, Artificial Sequence
  chemically synthesized
tgacaagtgagacaggtaaact

SEQ ID NO: 31236 - DNA, 22 bp, Artificial Sequence
  chemically synthesized
ggcagagctggtcatcagataa

SEQ ID NO: 31237 - DNA, 22 bp, Artificial Sequence
  chemically synthesized
gtcatcagataatgaagtcatt

SEQ ID NO: 31238 - DNA, 22 bp, Artificial Sequence
  chemically synthesized
acctaaggagattggacaataa

SEQ ID NO: 31239 - DNA, 22 bp, Artificial Sequence
  chemically synthesized
aggagattggacaataaaatgc

SEQ ID NO: 31240 - DNA, 22 bp, Artificial Sequence
  chemically synthesized
gacaataaaatgcaatatggag

SEQ ID NO: 31241 - DNA, 22 bp, Artificial Sequence
  chemically synthesized
atggctgatttaggatgcccag

SEQ ID NO: 31242 - DNA, 22 bp, Artificial Sequence
  chemically synthesized
atttaggatgcccagtctggca

SEQ ID NO: 31243 - DNA, 22 bp, Artificial Sequence
  chemically synthesized
aggatgcccagtctggcaacac

SEQ ID NO: 31244 - DNA, 22 bp, Artificial Sequence
  chemically synthesized
ggatgcccagtctggcaacacg

SEQ ID NO: 31245 - DNA, 22 bp, Artificial Sequence
  chemically synthesized
gcaacacgctaatgaaatgata

SEQ ID NO: 31246 - DNA, 22 bp, Artificial Sequence
  chemically synthesized
atgaaatgatagtgggggaggg

SEQ ID NO: 31247 - DNA, 22 bp, Artificial Sequence
  chemically synthesized
ggagagagcagtcctgagacta

SEQ ID NO: 31248 - DNA, 22 bp, Artificial Sequence
  chemically synthesized
agactattgcaattatctgcgg

SEQ ID NO: 31249 - DNA, 22 bp, Artificial Sequence
  chemically synthesized
ttgcaattatctgcgggagaca

SEQ ID NO: 31250 - DNA, 22 bp, Artificial Sequence
  chemically synthesized
caattatctgcgggagacataa

SEQ ID NO: 31251 - DNA, 22 bp, Artificial Sequence
  chemically synthesized
tctgcgggagacataaaggcta

SEQ ID NO: 31252 - DNA, 22 bp, Artificial Sequence
  chemically synthesized
cgggagacataaaggctagaac

SEQ ID NO: 31253 - DNA, 22 bp, Artificial Sequence
  chemically synthesized
gaacctgaacagtagcagtaca

SEQ ID NO: 31254 - DNA, 22 bp, Artificial Sequence
  chemically synthesized
aacagtagcagtacaaaaaaag

SEQ ID NO: 31255 - DNA, 22 bp, Artificial Sequence
  chemically synthesized
aaatgatattaaggaagtagaa

SEQ ID NO: 31256 - DNA, 22 bp, Artificial Sequence
  chemically synthesized
aggaagtagaagtggtatgact

SEQ ID NO: 31257 - DNA, 22 bp, Artificial Sequence
  chemically synthesized
aaccatctgggtatggaagggg

SEQ ID NO: 31258 - DNA, 22 bp, Artificial Sequence
  chemically synthesized
accatctgggtatggaagggga

SEQ ID NO: 31259 - DNA, 22 bp, Artificial Sequence
  chemically synthesized
ggtatggaaggggaaatggcta

SEQ ID NO: 31260 - DNA, 22 bp, Artificial Sequence
  chemically synthesized
gagtcttggggactttgtgttt

SEQ ID NO: 31261 - DNA, 22 bp, Artificial Sequence
  chemically synthesized
ggggactttgtgtttgatgtga

SEQ ID NO: 31262 - DNA, 22 bp, Artificial Sequence
  chemically synthesized
gggactttgtgtttgatgtgat

SEQ ID NO: 31263 - DNA, 22 bp, Artificial Sequence
  chemically synthesized
tgtgtttgatgtgattatggac

SEQ ID NO: 31264 - DNA, 22 bp, Artificial Sequence
  chemically synthesized
gtgtttgatgtgattatggacc

SEQ ID NO: 31265 - DNA, 22 bp, Artificial Sequence
  chemically synthesized
tgtttgatgtgattatggacca

SEQ ID NO: 31266 - DNA, 22 bp, Artificial Sequence
  chemically synthesized
gatgtgattatggaccacagaa

SEQ ID NO: 31267 - DNA, 22 bp, Artificial Sequence
  chemically synthesized
atgtgattatggaccacagaat

SEQ ID NO: 31268 - DNA, 22 bp, Artificial Sequence
  chemically synthesized
tggaccacagaataatgtctaa

SEQ ID NO: 31269 - DNA, 22 bp, Artificial Sequence
  chemically synthesized
agagaactggctctttagtctg

SEQ ID NO: 31270 - DNA, 22 bp, Artificial Sequence
  chemically synthesized
gctctttagtctgactgccaga

SEQ ID NO: 31271 - DNA, 22 bp, Artificial Sequence
  chemically synthesized
tttagtctgactgccagagtct

SEQ ID NO: 31272 - DNA, 22 bp, Artificial Sequence
  chemically synthesized
tagtctgactgccagagtctga

SEQ ID NO: 31273 - DNA, 22 bp, Artificial Sequence
  chemically synthesized
agtctgactgccagagtctgaa

SEQ ID NO: 31274 - DNA, 22 bp, Artificial Sequence
  chemically synthesized
gtctgactgccagagtctgaat

SEQ ID NO: 31275 - DNA, 22 bp, Artificial Sequence
  chemically synthesized
actgccagagtctgaatcctga

SEQ ID NO: 31276 - DNA, 22 bp, Artificial Sequence
  chemically synthesized
ccagagtctgaatcctgaatgt

SEQ ID NO: 31277 - DNA, 22 bp, Artificial Sequence
  chemically synthesized
aatcctgaatgttttagtatgt

SEQ ID NO: 31278 - DNA, 22 bp, Artificial Sequence
  chemically synthesized
aatgttttagtatgttaccttg

SEQ ID NO: 31279 - DNA, 22 bp, Artificial Sequence
  chemically synthesized
tagtatgttaccttgggcaaag

SEQ ID NO: 31280 - DNA, 22 bp, Artificial Sequence
  chemically synthesized
agtatgttaccttgggcaaagc

SEQ ID NO: 31281 - DNA, 22 bp, Artificial Sequence
  chemically synthesized
gtatgttaccttgggcaaagcc

SEQ ID NO: 31282 - DNA, 22 bp, Artificial Sequence
  chemically synthesized
ccttgggcaaagcccttagcct

SEQ ID NO: 31283 - DNA, 22 bp, Artificial Sequence
  chemically synthesized
gggcaaagcccttagcctctat

SEQ ID NO: 31284 - DNA, 22 bp, Artificial Sequence
  chemically synthesized
ggcaaagcccttagcctctatg

SEQ ID NO: 31285 - DNA, 22 bp, Artificial Sequence
  chemically synthesized
agcctctatgaatctatcttcc

SEQ ID NO: 31286 - DNA, 22 bp, Artificial Sequence
  chemically synthesized
gcctctatgaatctatcttcct

SEQ ID NO: 31287 - DNA, 22 bp, Artificial Sequence
  chemically synthesized
tatgaatctatcttcctcattc

SEQ ID NO: 31288 - DNA, 22 bp, Artificial Sequence
  chemically synthesized
tgaatctatcttcctcattcat

SEQ ID NO: 31289 - DNA, 22 bp, Artificial Sequence
  chemically synthesized
tcttcctcattcataaaaataa

SEQ ID NO: 31290 - DNA, 22 bp, Artificial Sequence
  chemically synthesized
cctcattcataaaaataagatg

SEQ ID NO: 31291 - DNA, 22 bp, Artificial Sequence
  chemically synthesized
ctcattcataaaaataagatga

SEQ ID NO: 31292 - DNA, 22 bp, Artificial Sequence
  chemically synthesized
attcataaaaataagatgacag

SEQ ID NO: 31293 - DNA, 22 bp, Artificial Sequence
  chemically synthesized
ataaaaataagatgacagtgcc

SEQ ID NO: 31294 - DNA, 22 bp, Artificial Sequence
  chemically synthesized
tctcgtgggacttttgtgagga

SEQ ID NO: 31295 - DNA, 22 bp, Artificial Sequence
  chemically synthesized
gtgggacttttgtgaggatgaa

SEQ ID NO: 31296 - DNA, 22 bp, Artificial Sequence
  chemically synthesized
ttgtgaggatgaagtgagataa

SEQ ID NO: 31297 - DNA, 22 bp, Artificial Sequence
  chemically synthesized
tgtgaggatgaagtgagataat

SEQ ID NO: 31298 - DNA, 22 bp, Artificial Sequence
  chemically synthesized
gtgaggatgaagtgagataatg

SEQ ID NO: 31299 - DNA, 22 bp, Artificial Sequence
  chemically synthesized
tgaggatgaagtgagataatgg

SEQ ID NO: 31300 - DNA, 22 bp, Artificial Sequence
  chemically synthesized
ctgagcacagtgtccaacacag

SEQ ID NO: 31301 - DNA, 22 bp, Artificial Sequence
  chemically synthesized
agcacagtgtccaacacagcag

SEQ ID NO: 31302 - DNA, 22 bp, Artificial Sequence
  chemically synthesized
catatacattagctattactgg

SEQ ID NO: 31303 - DNA, 22 bp, Artificial Sequence
  chemically synthesized
gctattactggctacattatga

SEQ ID NO: 31304 - DNA, 22 bp, Artificial Sequence
  chemically synthesized
ttactggctacattatgatata

SEQ ID NO: 31305 - DNA, 22 bp, Artificial Sequence
  chemically synthesized
ctggctacattatgatatacag

SEQ ID NO: 31306 - DNA, 22 bp, Artificial Sequence
  chemically synthesized
gctacattatgatatacagtta

SEQ ID NO: 31307 - DNA, 22 bp, Artificial Sequence
  chemically synthesized
cattatgatatacagttaggga

SEQ ID NO: 31308 - DNA, 22 bp, Artificial Sequence
  chemically synthesized
tgatatacagttagggagttgg

SEQ ID NO: 31309 - DNA, 22 bp, Artificial Sequence
  chemically synthesized
gggagttggaaagataatctga

SEQ ID NO: 31310 - DNA, 22 bp, Artificial Sequence
  chemically synthesized
gaaagataatctgaaattcagg

SEQ ID NO: 31311 - DNA, 22 bp, Artificial Sequence
  chemically synthesized
aaattcaggagacgtatctgac

SEQ ID NO: 31312 - DNA, 22 bp, Artificial Sequence
  chemically synthesized
aggagacgtatctgactatagg

SEQ ID NO: 31313 - DNA, 22 bp, Artificial Sequence
  chemically synthesized
actataggtgagtatttggaac

SEQ ID NO: 31314 - DNA, 22 bp, Artificial Sequence
  chemically synthesized
taggtgagtatttggaactcat

SEQ ID NO: 31315 - DNA, 22 bp, Artificial Sequence
  chemically synthesized
ggaactcattgttctgtaaaca

SEQ ID NO: 31316 - DNA, 22 bp, Artificial Sequence
  chemically synthesized
gaactcattgttctgtaaacag

SEQ ID NO: 31317 - DNA, 22 bp, Artificial Sequence
  chemically synthesized
attgttctgtaaacagtagtta

SEQ ID NO: 31318 - DNA, 22 bp, Artificial Sequence
  chemically synthesized
ttctgtaaacagtagttacagc

SEQ ID NO: 31319 - DNA, 22 bp, Artificial Sequence
  chemically synthesized
tgtaaacagtagttacagccac

SEQ ID NO: 31320 - DNA, 22 bp, Artificial Sequence
  chemically synthesized
taaacagtagttacagccacgt

SEQ ID NO: 31321 - DNA, 22 bp, Artificial Sequence
  chemically synthesized
cagccacgtgtgtgggcatctg

SEQ ID NO: 31322 - DNA, 22 bp, Artificial Sequence
  chemically synthesized
gagagtgagcatggatattgtg

SEQ ID NO: 31323 - DNA, 22 bp, Artificial Sequence
  chemically synthesized
tgatacctagtacagtgcctgg

SEQ ID NO: 31324 - DNA, 22 bp, Artificial Sequence
  chemically synthesized
gtacagtgcctggcagtagtgg

SEQ ID NO: 31325 - DNA, 22 bp, Artificial Sequence
  chemically synthesized
gcagtagtggttgtatgctcag

SEQ ID NO: 31326 - DNA, 22 bp, Artificial Sequence
  chemically synthesized
tatgctcagtaaattttgttga

SEQ ID NO: 31327 - DNA, 22 bp, Artificial Sequence
  chemically synthesized
agtaaattttgttgacagggtc

SEQ ID NO: 31328 - DNA, 22 bp, Artificial Sequence
  chemically synthesized
tgttgacagggtcagggccgga

SEQ ID NO: 31329 - DNA, 22 bp, Artificial Sequence
  chemically synthesized
gttgacagggtcagggccggac

SEQ ID NO: 31330 - DNA, 22 bp, Artificial Sequence
  chemically synthesized
ttgacagggtcagggccggact

SEQ ID NO: 31331 - DNA, 22 bp, Artificial Sequence
  chemically synthesized
acagggtcagggccggactaga

SEQ ID NO: 31332 - DNA, 22 bp, Artificial Sequence
  chemically synthesized
gactgtggtaagcaaggcctgt

SEQ ID NO: 31333 - DNA, 22 bp, Artificial Sequence
  chemically synthesized
tggtaagcaaggcctgtagggc

SEQ ID NO: 31334 - DNA, 22 bp, Artificial Sequence
  chemically synthesized
tagggcataaatatacttgtat

SEQ ID NO: 31335 - DNA, 22 bp, Artificial Sequence
  chemically synthesized
gtatgccccgagaagtgaggac

SEQ ID NO: 31336 - DNA, 22 bp, Artificial Sequence
  chemically synthesized
tatgccccgagaagtgaggacc

SEQ ID NO: 31337 - DNA, 22 bp, Artificial Sequence
  chemically synthesized
ttaaatattgtgccctacatgc

SEQ ID NO: 31338 - DNA, 22 bp, Artificial Sequence
  chemically synthesized
aaatattgtgccctacatgcct

SEQ ID NO: 31339 - DNA, 22 bp, Artificial Sequence
  chemically synthesized
aatattgtgccctacatgcctt

SEQ ID NO: 31340 - DNA, 22 bp, Artificial Sequence
  chemically synthesized
tgccctacatgccttgtttggt

SEQ ID NO: 31341 - DNA, 22 bp, Artificial Sequence
  chemically synthesized
catgccttgtttggttcactct

SEQ ID NO: 31342 - DNA, 22 bp, Artificial Sequence
  chemically synthesized
gtttggttcactcttgtcccag

SEQ ID NO: 31343 - DNA, 22 bp, Artificial Sequence
  chemically synthesized
tttggttcactcttgtcccagc

SEQ ID NO: 31344 - DNA, 22 bp, Artificial Sequence
  chemically synthesized
ggttcactcttgtcccagccct

SEQ ID NO: 31345 - DNA, 22 bp, Artificial Sequence
  chemically synthesized
gttcactcttgtcccagcccta

SEQ ID NO: 31346 - DNA, 22 bp, Artificial Sequence
  chemically synthesized
actcttgtcccagccctagcaa

SEQ ID NO: 31347 - DNA, 22 bp, Artificial Sequence
  chemically synthesized
ttgtcccagccctagcaagtat

SEQ ID NO: 31348 - DNA, 22 bp, Artificial Sequence
  chemically synthesized
gtcccagccctagcaagtatat

SEQ ID NO: 31349 - DNA, 22 bp, Artificial Sequence
  chemically synthesized
tcccagccctagcaagtatata

SEQ ID NO: 31350 - DNA, 22 bp, Artificial Sequence
  chemically synthesized
gcaagtatatataaggtgaaaa

SEQ ID NO: 31351 - DNA, 22 bp, Artificial Sequence
  chemically synthesized
aggctggagcctgggagaaccc

SEQ ID NO: 31352 - DNA, 22 bp, Artificial Sequence
  chemically synthesized
gagcctgggagaaccctggaca

SEQ ID NO: 31353 - DNA, 22 bp, Artificial Sequence
  chemically synthesized
ggagaaccctggacatttaagg

SEQ ID NO: 31354 - DNA, 22 bp, Artificial Sequence
  chemically synthesized
gacatttaagggccatggagag

SEQ ID NO: 31355 - DNA, 22 bp, Artificial Sequence
  chemically synthesized
aagggccatggagaggaacagg

SEQ ID NO: 31356 - DNA, 22 bp, Artificial Sequence
  chemically synthesized
agggccatggagaggaacagga

SEQ ID NO: 31357 - DNA, 22 bp, Artificial Sequence
  chemically synthesized
atcaattcaagtgctggatgga

SEQ ID NO: 31358 - DNA, 22 bp, Artificial Sequence
  chemically synthesized
aagtgctggatggataacagga

SEQ ID NO: 31359 - DNA, 22 bp, Artificial Sequence
  chemically synthesized
gatggataacaggagttagagc

SEQ ID NO: 31360 - DNA, 22 bp, Artificial Sequence
  chemically synthesized
gagcaaagcggggaaccagaat

SEQ ID NO: 31361 - DNA, 22 bp, Artificial Sequence
  chemically synthesized
ttataaaaagagtttcctaaaa

SEQ ID NO: 31362 - DNA, 22 bp, Artificial Sequence
  chemically synthesized
taaaaagagtttcctaaaaagg

SEQ ID NO: 31363 - DNA, 22 bp, Artificial Sequence
  chemically synthesized
cctaaaaagggagagatcaaca

SEQ ID NO: 31364 - DNA, 22 bp, Artificial Sequence
  chemically synthesized
ctaaaaagggagagatcaacaa

SEQ ID NO: 31365 - DNA, 22 bp, Artificial Sequence
  chemically synthesized
aaaagggagagatcaacaatta

SEQ ID NO: 31366 - DNA, 22 bp, Artificial Sequence
  chemically synthesized
gaaattatttagagcagccagt

SEQ ID NO: 31367 - DNA, 22 bp, Artificial Sequence
  chemically synthesized
tttagagcagccagtaaataca

SEQ ID NO: 31368 - DNA, 22 bp, Artificial Sequence
  chemically synthesized
agagcagccagtaaatacataa

SEQ ID NO: 31369 - DNA, 22 bp, Artificial Sequence
  chemically synthesized
gagcagccagtaaatacataaa

SEQ ID NO: 31370 - DNA, 22 bp, Artificial Sequence
  chemically synthesized
aaaattattctttaggtcattc

SEQ ID NO: 31371 - DNA, 22 bp, Artificial Sequence
  chemically synthesized
ttctttaggtcattcctgattg

SEQ ID NO: 31372 - DNA, 22 bp, Artificial Sequence
  chemically synthesized
tttaggtcattcctgattgtga

SEQ ID NO: 31373 - DNA, 22 bp, Artificial Sequence
  chemically synthesized
taggtcattcctgattgtgaca

SEQ ID NO: 31374 - DNA, 22 bp, Artificial Sequence
  chemically synthesized
aggtcattcctgattgtgacaa

SEQ ID NO: 31375 - DNA, 22 bp, Artificial Sequence
  chemically synthesized
ggtcattcctgattgtgacaat

SEQ ID NO: 31376 - DNA, 22 bp, Artificial Sequence
  chemically synthesized
ctgattgtgacaatagtcattt

SEQ ID NO: 31377 - DNA, 22 bp, Artificial Sequence
  chemically synthesized
attgtgacaatagtcatttcat

SEQ ID NO: 31378 - DNA, 22 bp, Artificial Sequence
  chemically synthesized
tgacaatagtcatttcattata

SEQ ID NO: 31379 - DNA, 22 bp, Artificial Sequence
  chemically synthesized
cattatataaatgtgattaagg

SEQ ID NO: 31380 - DNA, 22 bp, Artificial Sequence
  chemically synthesized
attatataaatgtgattaagga

SEQ ID NO: 31381 - DNA, 22 bp, Artificial Sequence
  chemically synthesized
tataaatgtgattaaggaagga

SEQ ID NO: 31382 - DNA, 22 bp, Artificial Sequence
  chemically synthesized
aggaaggaaaagagctacacag

SEQ ID NO: 31383 - DNA, 22 bp, Artificial Sequence
  chemically synthesized
cacagaagttattaaagagcta

SEQ ID NO: 31384 - DNA, 22 bp, Artificial Sequence
  chemically synthesized
ttaaagagctaaagagaattga

SEQ ID NO: 31385 - DNA, 22 bp, Artificial Sequence
  chemically synthesized
aagagctaaagagaattgagaa

SEQ ID NO: 31386 - DNA, 22 bp, Artificial Sequence
  chemically synthesized
aagagaattgagaaatttaaaa

SEQ ID NO: 31387 - DNA, 22 bp, Artificial Sequence
  chemically synthesized
agaaatttaaaacagaagaaag

SEQ ID NO: 31388 - DNA, 22 bp, Artificial Sequence
  chemically synthesized
aaaacagaagaaagtagggcca

SEQ ID NO: 31389 - DNA, 22 bp, Artificial Sequence
  chemically synthesized
aaacagaagaaagtagggccaa

SEQ ID NO: 31390 - DNA, 22 bp, Artificial Sequence
  chemically synthesized
tctcactgatcctgccaacacc

SEQ ID NO: 31391 - DNA, 22 bp, Artificial Sequence
  chemically synthesized
actgatcctgccaacacctgtg

SEQ ID NO: 31392 - DNA, 22 bp, Artificial Sequence
  chemically synthesized
atcctgccaacacctgtgagat

SEQ ID NO: 31393 - DNA, 22 bp, Artificial Sequence
  chemically synthesized
ccaacacctgtgagatagatat

SEQ ID NO: 31394 - DNA, 22 bp, Artificial Sequence
  chemically synthesized
tgagatagatattcttattata

SEQ ID NO: 31395 - DNA, 22 bp, Artificial Sequence
  chemically synthesized
ttattatactactgttaaacct

SEQ ID NO: 31396 - DNA, 22 bp, Artificial Sequence
  chemically synthesized
attatactactgttaaacctaa

SEQ ID NO: 31397 - DNA, 22 bp, Artificial Sequence
  chemically synthesized
ttatactactgttaaacctaat

SEQ ID NO: 31398 - DNA, 22 bp, Artificial Sequence
  chemically synthesized
tactactgttaaacctaattta

SEQ ID NO: 31399 - DNA, 22 bp, Artificial Sequence
  chemically synthesized
ctgttaaacctaatttacattt

SEQ ID NO: 31400 - DNA, 22 bp, Artificial Sequence
  chemically synthesized
ttaaacctaatttacatttgac

SEQ ID NO: 31401 - DNA, 22 bp, Artificial Sequence
  chemically synthesized
aacctaatttacatttgacaaa

SEQ ID NO: 31402 - DNA, 22 bp, Artificial Sequence
  chemically synthesized
atttacatttgacaaagttaag

SEQ ID NO: 31403 - DNA, 22 bp, Artificial Sequence
  chemically synthesized
acatttgacaaagttaaggttc

SEQ ID NO: 31404 - DNA, 22 bp, Artificial Sequence
  chemically synthesized
catttgacaaagttaaggttca

SEQ ID NO: 31405 - DNA, 22 bp, Artificial Sequence
  chemically synthesized
gacaaagttaaggttcagagct

SEQ ID NO: 31406 - DNA, 22 bp, Artificial Sequence
  chemically synthesized
acaaagttaaggttcagagctt

SEQ ID NO: 31407 - DNA, 22 bp, Artificial Sequence
  chemically synthesized
aggttcagagcttgtgtgactt

SEQ ID NO: 31408 - DNA, 22 bp, Artificial Sequence
  chemically synthesized
agagcttgtgtgacttgtccaa

SEQ ID NO: 31409 - DNA, 22 bp, Artificial Sequence
  chemically synthesized
gtgtgacttgtccaaggtcaca

SEQ ID NO: 31410 - DNA, 22 bp, Artificial Sequence
  chemically synthesized
tgtgacttgtccaaggtcacag

SEQ ID NO: 31411 - DNA, 22 bp, Artificial Sequence
  chemically synthesized
gtccaaggtcacaggtctagag

SEQ ID NO: 31412 - DNA, 22 bp, Artificial Sequence
  chemically synthesized
tccaaggtcacaggtctagagg

SEQ ID NO: 31413 - DNA, 22 bp, Artificial Sequence
  chemically synthesized
gaggaggcagatacttgattca

SEQ ID NO: 31414 - DNA, 22 bp, Artificial Sequence
  chemically synthesized
gattcaaacctatttctgtctg

SEQ ID NO: 31415 - DNA, 22 bp, Artificial Sequence
  chemically synthesized
attcaaacctatttctgtctga

SEQ ID NO: 31416 - DNA, 22 bp, Artificial Sequence
  chemically synthesized
aaacctatttctgtctgatctg

SEQ ID NO: 31417 - DNA, 22 bp, Artificial Sequence
  chemically synthesized
tttctgtctgatctgattctaa

SEQ ID NO: 31418 - DNA, 22 bp, Artificial Sequence
  chemically synthesized
ctgtctgatctgattctaaagt

SEQ ID NO: 31419 - DNA, 22 bp, Artificial Sequence
  chemically synthesized
tgtctgatctgattctaaagtc

SEQ ID NO: 31420 - DNA, 22 bp, Artificial Sequence
  chemically synthesized
tctgatctgattctaaagtctg

SEQ ID NO: 31421 - DNA, 22 bp, Artificial Sequence
  chemically synthesized
atctgattctaaagtctgtttt

SEQ ID NO: 31422 - DNA, 22 bp, Artificial Sequence
  chemically synthesized
attctaaagtctgttttttcac

SEQ ID NO: 31423 - DNA, 22 bp, Artificial Sequence
  chemically synthesized
taaagtctgttttttcactcaa

SEQ ID NO: 31424 - DNA, 22 bp, Artificial Sequence
  chemically synthesized
aagtctgttttttcactcaacc

SEQ ID NO: 31425 - DNA, 22 bp, Artificial Sequence
  chemically synthesized
ttttttcactcaaccacactgt

SEQ ID NO: 31426 - DNA, 22 bp, Artificial Sequence
  chemically synthesized
tttcactcaaccacactgtaca

SEQ ID NO: 31427 - DNA, 22 bp, Artificial Sequence
  chemically synthesized
ttcactcaaccacactgtacag

SEQ ID NO: 31428 - DNA, 22 bp, Artificial Sequence
  chemically synthesized
tcactcaaccacactgtacagt

SEQ ID NO: 31429 - DNA, 22 bp, Artificial Sequence
  chemically synthesized
cactcaaccacactgtacagtc

SEQ ID NO: 31430 - DNA, 22 bp, Artificial Sequence
  chemically synthesized
actcaaccacactgtacagtca

SEQ ID NO: 31431 - DNA, 22 bp, Artificial Sequence
  chemically synthesized
aaccacactgtacagtcagctc

SEQ ID NO: 31432 - DNA, 22 bp, Artificial Sequence
  chemically synthesized
tacagtcagctctccttgtgag

SEQ ID NO: 31433 - DNA, 22 bp, Artificial Sequence
  chemically synthesized
tccttgtgagttccacagccac

SEQ ID NO: 31434 - DNA, 22 bp, Artificial Sequence
  chemically synthesized
cttgtgagttccacagccacag

SEQ ID NO: 31435 - DNA, 22 bp, Artificial Sequence
  chemically synthesized
gtgagttccacagccacagatt

SEQ ID NO: 31436 - DNA, 22 bp, Artificial Sequence
  chemically synthesized
tgagttccacagccacagattc

SEQ ID NO: 31437 - DNA, 22 bp, Artificial Sequence
  chemically synthesized
cacagccacagattcaattaac

SEQ ID NO: 31438 - DNA, 22 bp, Artificial Sequence
  chemically synthesized
aattaactgcagatcaaaaata

SEQ ID NO: 31439 - DNA, 22 bp, Artificial Sequence
  chemically synthesized
actgcagatcaaaaatattcaa

SEQ ID NO: 31440 - DNA, 22 bp, Artificial Sequence
  chemically synthesized
cagatcaaaaatattcaagaaa

SEQ ID NO: 31441 - DNA, 22 bp, Artificial Sequence
  chemically synthesized
aagaaaaaaatggatggttgca

SEQ ID NO: 31442 - DNA, 22 bp, Artificial Sequence
  chemically synthesized
catctctactgaacatgtacag

SEQ ID NO: 31443 - DNA, 22 bp, Artificial Sequence
  chemically synthesized
tactgaacatgtacagactctt

SEQ ID NO: 31444 - DNA, 22 bp, Artificial Sequence
  chemically synthesized
ctgaacatgtacagactctttt

SEQ ID NO: 31445 - DNA, 22 bp, Artificial Sequence
  chemically synthesized
aacatgtacagactcttttatc

SEQ ID NO: 31446 - DNA, 22 bp, Artificial Sequence
  chemically synthesized
ttttatctttcattattcccta

SEQ ID NO: 31447 - DNA, 22 bp, Artificial Sequence
  chemically synthesized
ttatctttcattattccctaaa

SEQ ID NO: 31448 - DNA, 22 bp, Artificial Sequence
  chemically synthesized
tatctttcattattccctaaac

SEQ ID NO: 31449 - DNA, 22 bp, Artificial Sequence
  chemically synthesized
atctttcattattccctaaaca

SEQ ID NO: 31450 - DNA, 22 bp, Artificial Sequence
  chemically synthesized
tctttcattattccctaaacaa

SEQ ID NO: 31451 - DNA, 22 bp, Artificial Sequence
  chemically synthesized
tcattattccctaaacaataca

SEQ ID NO: 31452 - DNA, 22 bp, Artificial Sequence
  chemically synthesized
cattattccctaaacaatacag

SEQ ID NO: 31453 - DNA, 22 bp, Artificial Sequence
  chemically synthesized
attattccctaaacaatacagc

(The sequence listing continues in the following parts.)

What is claimed is:

1. A method for editing the C9ORF72 gene in a human cell by genome editing comprising introducing into the cell one or more deoxyribonucleic acid (DNA) endonucleases to effect one or more single-strand breaks (SSBs) or double-strand breaks (DSBs) within or near the C9ORF72 gene or other DNA sequences that encode regulatory elements of the C9ORF72 gene that results in permanent deletion, insertion, or correction of the expanded hexanucleotide repeat within or near the C9ORF72 gene and results in restoration of C9orf72 protein activity.

2. A method for inserting the C9ORF72 gene in a human cell by genome editing, the method comprising the step of: introducing into the human cell one or more deoxyribonucleic acid (DNA) endonucleases to effect one or more single-strand breaks (SSBs) or double-strand breaks (DSBs) within or near a safe harbor locus that results in a permanent insertion of the C9ORF72 gene or minigene, and results in restoration of the C9orf72 protein activity.

3. An ex vivo method for treating a patient with amyotrophic lateral sclerosis (ALS) or frontotemporal lobular dementia (FTLD) comprising the steps of:
i) creating a patient specific induced pluripotent stem cell (iPSC);
ii) editing within or near the C9ORF72 gene of the iPSC or other DNA sequences that encode regulatory elements of the C9ORF72 gene of the iPSC, or editing within or near a safe harbor locus of the iPSC;
iii) differentiating the genome edited iPSC into a hematopoietic progenitor cell, a neural progenitor cell, or neural cell; and
iv) implanting the hematopoietic progenitor cell, neural progenitor cell, or neural cell into the patient.

4. The method of claim 3, wherein the creating step comprises:
a) isolating a somatic cell from the patient; and
b) introducing a set of pluripotency-associated genes into the somatic cell to induce the cell to become a pluripotent stem cell.

5. The method of claim 4, wherein the somatic cell is a fibroblast.

6. The method of claim 4, wherein the set of pluripotency-associated genes is one or more of the genes selected from the group consisting of OCT4, SOX2, KLF4, Lin28, NANOG and cMYC.

7. The method of any one of claims 3-6, wherein the editing step comprises introducing into the iPSC one or more deoxyribonucleic acid (DNA) endonucleases to effect one or more single-stranded breaks (SSBs) or double-strand breaks (DSBs) within or near the C9ORF72 gene or other DNA sequences that encode regulatory elements of the C9ORF72 gene that results in permanent deletion, insertion, or correction of the expanded hexanucleotide repeat within or near the C9ORF72 gene or other DNA sequences that encode regulatory elements of the C9ORF72 gene, or within or near a safe harbor locus that results in permanent insertion of the C9ORF72 gene or minigene and restoration of C9orf72 protein activity.

8. The method of claim 7, wherein the safe harbor locus is a safe harbor locus selected from the group consisting of: AAVS1 (PPP1 R12C), ALB, Angptl3, ApoC3, ASGR2, CCRS, FIX (F9), G6PC, Gys2, HGD, Lp(a), Pcsk9, Serpina1, TF, and TTR.

9. The method of any one of claims 3-8, wherein the differentiating step comprises one or more of the following to differentiate the genome edited iPSC into a hematopoietic progenitor cell, a neural progenitor cell, or neural cell: treatment with a combination of small molecules or delivery of master transcription factors.

10. The method of any one of claims 3-9, wherein the implanting step comprises implanting the hematopoietic progenitor cell, neural progenitor cell, or neural cell into the patient by transplantation, local injection, systemic infusion, or combinations thereof.

11. An ex vivo method for treating a patient with amyotrophic lateral sclerosis (ALS) or frontotemporal lobular dementia (FTLD) comprising the steps of:
i) isolating a white blood cell from the patient;
ii) editing within or near the C9ORF72 gene or other DNA sequences that encode regulatory elements of the C9ORF72 gene of the white blood cell, or editing within or near a safe harbor locus of the white blood cell; and
iii) implanting the edited white blood cell into the patient.

12. The method of claim 11, wherein the isolating step comprises: cell differential centrifugation, cell culturing, or combinations thereof.

13. The method of any one of claims 11-12, wherein the editing step comprises introducing into the neural cell one or more deoxyribonucleic acid (DNA) endonucleases to effect one or more single-strand breaks (SSBs) or one or more double-strand breaks (DSBs) within or near the C9ORF72 gene or other DNA sequences that encode regulatory elements of the C9ORF72 gene that results in permanent deletion, insertion, or correction of the expanded hexanucleotide repeat within or near the C9ORF72 gene or other DNA sequences that encode regulatory elements of the C9ORF72 gene, or within or near a safe harbor locus that results in restoration of C9orf72 protein activity.

14. The method of claim 13, wherein the safe harbor locus is a safe harbor locus selected from the group consisting of: AAVS1 (PPP1 R12C), ALB, Angptl3, ApoC3, ASGR2, CCR5, FIX (F9), G6PC, Gys2, HGD, Lp(a), Pcsk9, Serpina1, TF, and TTR.

15. The method of any one of claims 11-14, wherein the implanting step comprises implanting the edited white blood cell into the patient by transplantation, local injection, systemic infusion, or combinations thereof.

16. An ex vivo method for treating a patient with amyotrophic lateral sclerosis (ALS) or frontotemporal lobular dementia (FTLD) comprising the steps of:
i) optionally, performing a biopsy of the patient's bone marrow;
ii) isolating a mesenchymal stem cell;
iii) editing within or near the C9ORF72 gene of the stem cell or other DNA sequences that encode regulatory elements of the C9ORF72 gene of the stem cell, or editing within or near a safe harbor locus of the stem cell;
iv) differentiating the stem cell into a hematopoietic progenitor cell, neural progenitor cell, or neural cell; and
v) implanting the hematopoietic progenitor cell, neural progenitor cell, or neural cell into the patient.

17. The method of claim 16, wherein the isolating step comprises: aspiration of bone marrow and isolation of mesenchymal cells by density centrifugation using Percoll.

18. The method of any one of claims 16-17, wherein the editing step comprises introducing into the stem cell one or more deoxyribonucleic acid (DNA) endonucleases to effect one or more single-strand breaks (SSBs) or one or more double-strand breaks (DSBs) within or near the C9ORF72 gene or other DNA sequences that encode regulatory elements of the C9ORF72 gene that results in permanent deletion, insertion, or correction of the expanded hexanucleotide repeat within or near the C9ORF72 gene or other DNA sequences that encode regulatory elements of the C9ORF72 gene, or within or near a safe harbor locus that results in restoration of C9orf72 protein activity.

19. The method of claim 18, wherein the safe harbor locus is a safe harbor locus selected from the group consisting of: AAVS1 (PPP1 R12C), ALB, Angptl3, ApoC3, ASGR2, CCR5, FIX (F9), G6PC, Gys2, HGD, Lp(a), Pcsk9, Serpina1, TF, and TTR.

20. The method of any one of claims 16-19, wherein the differentiating step comprises one or more of the following to differentiate the genome edited stem cell into a hematopoietic progenitor cell, neural progenitor cell, or neural cell: treatment with a combination of small molecules or delivery of master transcription factors.

21. The method of any one of claims 16-20, wherein the implanting step comprises implanting the cell into the patient by transplantation, local injection, systemic infusion, or combinations thereof.

22. An ex vivo method for treating a patient with amyotrophic lateral sclerosis (ALS) or frontotemporal lobular dementia (FTLD) comprising the steps of:
i) optionally, treating the patient with granulocyte colony stimulating factor (GCSF);
ii) isolating a hematopoietic progenitor cell from the patient;
iii) editing within or near the C9ORF72 gene of the hematopoietic progenitor cell or other DNA sequences that encode regulatory elements of the C9ORF72 gene of the hematopoietic progenitor cell, or editing within or near a safe harbor locus of the hematopoietic progenitor cell; and
iv) implanting the cell into the patient.

23. The method of claim 22, wherein the treating step is performed in combination with Plerixaflor.

24. The method of any one of claims 22-23, wherein the isolating step comprises isolating CD34+ cells.

25. The method of any one of claims 22-24, wherein the editing step comprises introducing into the stem cell one or more deoxyribonucleic acid (DNA) endonucleases to effect one or more single-strand breaks (SSBs) or one or more double-strand breaks (DSBs) within or near the C9ORF72 gene or other DNA sequences that encode regulatory elements of the C9ORF72 gene that results in permanent deletion, insertion, or correction of the expanded hexanucleotide repeat within or near the C9ORF72 gene or other DNA sequences that encode regulatory elements of the C9ORF72 gene, or within or near a safe harbor locus that results in restoration of C9orf72 protein activity.

26. The method of claim 25, wherein the safe harbor locus is a safe harbor locus selected from the group consisting of: AAVS1 (PPP1 R12C), ALB, Angptl3, ApoC3, ASGR2, CCRS, FIX (F9), G6PC, Gys2, HGD, Lp(a), Pcsk9, Serpina1, TF, and TTR.

27. The method of any one of claims 22-26, wherein the implanting step comprises implanting the neural cell into the patient by transplantation, local injection, systemic infusion, or combinations thereof.

28. An in vivo method for treating a patient with amyotrophic lateral sclerosis (ALS) or frontotemporal lobular dementia (FTLD) comprising the step of editing within or near the C9ORF72 gene in a cell of the patient or other DNA sequences that encode regulatory elements of the C9ORF72 gene, or editing within or near a safe harbor locus.

29. The method of claim 28, wherein the editing step comprises introducing into the cell one or more deoxyribonucleic acid (DNA) endonucleases to effect one or more single-strand breaks (SSBs) or one or more double-strand breaks (DSBs) within or near the C9ORF72 gene or other DNA sequences that encode regulatory elements of the C9ORF72 gene that results in permanent deletion, insertion, or correction of the expanded hexanucleotide repeat within or near the C9ORF72 gene or other DNA sequences that encode regulatory elements of the C9ORF72 gene, or within or near a safe harbor locus that results in restoration of C9orf72 protein activity.

30. The method of claim 29, wherein the safe harbor locus is a safe harbor locus selected from the group consisting of: AAVS1 (PPP1 R12C), ALB, Angptl3, ApoC3, ASGR2, CCR5, FIX (F9), G6PC, Gys2, HGD, Lp(a), Pcsk9, Serpina1, TF, and TTR.

31. The method of any one of claims 28-30, wherein the cell a neural cell, a bone marrow cell, a hematopoietic progenitor cell, or a CD34+ cell.

32. The method of any one of claim 1, 7, 13, 18, 25 or 29, wherein the one or more DNA endonucleases is a Cas1, Cas1 B, Cas2, Cas3, Cas4, Cas5, Cas6, Cas7, Cas8, Cas9 (also known as Csn1 and Csx12), Cas100, Csy1, Csy2, Csy3, Cse1, Cse2, Csc1, Csc2, Csa5, Csn2, Csm2, Csm3, Csm4, Csm5, Csm6, Cmr1, Cmr3, Cmr4, Cmr5, Cmr6, Csb1, Csb2, Csb3, Csx17, Csx14, Csx10, Csx16, CsaX, Csx3, Csx1, Csx15, Csf1, Csf2, Csf3, Csf4, or Cpf1 endonuclease; or a homolog thereof, recombination of the naturally occurring molecule, codon-optimized, or modified version thereof, and combinations thereof.

33. The method of claim 32, wherein the method comprises introducing into the cell one or more polynucleotides encoding the one or more DNA endonucleases.

34. The method of claim 32, wherein the method comprises introducing into the cell one or more ribonucleic acids (RNAs) encoding the one or more DNA endonucleases.

35. The method of any one of claim 33 or 34, wherein the one or more polynucleotides or one or more RNAs is one or more modified polynucleotides or one or more modified RNAs.

36. The method of claim 32, wherein the DNA endonuclease is a protein or polypeptide.

37. The method of any one of the preceding claims, wherein the method further comprises introducing into the cell one or more guide ribonucleic acids (gRNAs).

38. The method of claim 37, wherein the one or more gRNAs are single-molecule guide RNA (sgRNAs).

39. The method of any one of claims 37-38, wherein the one or more gRNAs or one or more sgRNAs is one or more modified gRNAs or one or more modified sgRNAs.

40. The method of any one of claims 37-39, wherein the one or more DNA endonucleases is pre-complexed with one or more gRNAs or one or more sgRNAs.

41. The method of any one of the preceding claims, wherein the method further comprises introducing into the cell a polynucleotide donor template comprising a part of the wild-type C9ORF72 gene or minigene or cDNA.

42. The method of claim 41, wherein the part of the wild-type C9ORF72 gene or cDNA is the entire C9ORF72 gene or cDNA, or the cDNA of natural Variant 1, Variant 2, or Variant 3.

43. The method of any one of claims 41-42, wherein the donor template is either single or double stranded.

44. The method of any one of claims 41-43, wherein the donor template has homologous arms to the 9p21.2 region.

45. The method of any one of claims 41-43, wherein the donor template has homologous arms to a safe harbor locus selected from the group consisting of exon 1-2 of AAVS1 (PPP1R12C), exon 1-2 of ALB, exon 1-2 of Angptl3, exon 1-2 of ApoC3, exon 1-2 of ASGR2, exon 1-2 of CCR5, exon 1-2 of FIX (F9), exon 1-2 of G6PC, exon 1-2 of Gys2, exon 1-2 of HGD, exon 1-2 of Lp(a), exon 1-2 of Pcsk9, exon 1-2 of Serpina1, exon 1-2 of TF, and exon 1-2 of TTR.

46. The method of any one of claim 1, 7, 13, 18, 25 or 29, wherein the method further comprises introducing into the cell one guide ribonucleic acid (gRNA) and a polynucleotide donor template comprising at least a portion of the wild-type C9ORF72 gene, and wherein the one or more DNA endonucleases is one or more Cas9 or Cpf1 endonucleases that effect one single-strand break (SSB) or double-strand break (DSB) at a DSB locus within or near the C9ORF72 gene or other DNA sequences that encode regulatory elements of the C9ORF72 gene, or within or near a safe harbor locus that facilitates insertion of a new sequence from the polynucleotide donor template into the chromosomal DNA at the locus or safe harbor that results in permanent insertion or correction of a part of the chromosomal DNA of the C9ORF72 gene or other DNA sequences that encode regulatory elements of the C9ORF72 gene proximal to the locus or safe harbor locus and restoration of C9orf72 protein activity, and wherein the gRNA comprises a spacer sequence that is complementary to a segment of the locus or locus.

47. The method of claim 46, wherein proximal means nucleotides both upstream and downstream of the locus or locus.

48. The method of any one of claim 1, 7, 13, 18, 25 or 29, wherein the method further comprises introducing into the cell two guide ribonucleic acid (gRNAs) and a polynucleotide donor template comprising at least a portion of the wild-type C9ORF72 gene, and wherein the one or more DNA endonucleases is two or more Cas9 or Cpf1 endonucleases that effect a pair of single-strand break (SSB) or double-strand breaks (DSBs), the first at a 5′ locus and the second at a 3′ locus, within or near the C9ORF72 gene or other DNA sequences that encode regulatory elements of the C9ORF72 gene, or within or near a safe harbor locus that facilitates insertion of a new sequence from the polynucleotide donor template into the chromosomal DNA between the 5′ locus and the 3′ locus that results in permanent insertion or correction of the chromosomal DNA between the 5′ locus and the 3′ locus within or near the C9ORF72 gene or other DNA sequences that encode regulatory elements of the C9ORF72 gene or safe harbor locus and restoration of C9orf72 protein activity, and wherein the first guide RNA comprises a spacer sequence that is complementary to a segment of the 5′ locus and the second guide RNA comprises a spacer sequence that is complementary to a segment of the 3′ locus.

49. The method of any one of claims 46-48, wherein the one or two gRNAs are one or two single-molecule guide RNA (sgRNAs).

50. The method of any one of claims 46-49, wherein the one or two gRNAs or one or two sgRNAs is one or two modified gRNAs or one or two modified sgRNAs.

51. The method of any one of claims 46-50, wherein the one or more DNA endonucleases is pre-complexed with one or two gRNAs or one or two sgRNAs.

52. The method of any one of claims 46-51, wherein the part of the wild-type C9ORF72 gene or cDNA is the entire C9ORF72 gene or cDNA; the cDNA of natural Variant 1, Variant 2, Variant 3; or about 30 hexanucleotide repeats.

53. The method of any one of claims 46-52, wherein the donor template is either single or double stranded polynucleotide.

54. The method of any one of claims 46-53, wherein the donor template has homologous arms to the 9p21.2 region.

55. The method of any one of claims 46-44, wherein the donor template has homologous arms to a safe harbor locus selected from the group consisting of exon 1-2 of AAVS1 (PPP1R12C), exon 1-2 of ALB, exon 1-2 of Angptl3, exon 1-2 of ApoC3, exon 1-2 of ASGR2, exon 1-2 of CCR5, exon 1-2 of FIX (F9), exon 1-2 of G6PC, exon 1-2 of Gys2, exon 1-2 of HGD, exon 1-2 of Lp(a), exon 1-2 of Pcsk9, exon 1-2 of Serpina1, exon 1-2 of TF, and exon 1-2 of TTR.

56. The method of claim 44, wherein the DSB, or 5′ DSB and 3′ DSB are in the first intron of the C9ORF72 gene.

57. The method of any one of claim 1, 7, 13, 18, 25 or 29-56, wherein the insertion or correction is by homology directed repair (HDR).

58. The method of any one of claim 1, 7, 13, 18, 25 or 29, wherein the method further comprises introducing into the cell two guide ribonucleic acid (gRNAs), and wherein the one or more DNA endonucleases is two or more Cas9 or Cpf1 endonucleases that effect a pair of double-strand breaks (DSBs), the first at a 5′ DSB locus and the second at a 3′ DSB locus, within or near the C9ORF72 gene that causes a deletion of the chromosomal DNA between the 5′ DSB locus and the 3′ DSB locus that results in permanent deletion of the chromosomal DNA between the 5′ DSB locus and the 3′ DSB locus within or near the C9ORF72 gene, and wherein the first guide RNA comprises a spacer sequence that is complementary to a segment of the 5′ DSB locus and the second guide RNA comprises a spacer sequence that is complementary to a segment of the 3′ DSB locus.

59. The method of claim 58, wherein the two gRNAs are two single-molecule guide RNA (sgRNAs).

60. The method of any one of claims 58-59, wherein the two gRNAs or two sgRNAs are two modified gRNAs or two modified sgRNAs.

61. The method of any one of claims 58-60, wherein the one or more DNA endonucleases is pre-complexed with one or two gRNAs or one or two sgRNAs.

62. The method of any one of claims 58-61, wherein both the 5′ DSB and 3′ DSB are in or near either the first exon, first intron, or second exon of the C9ORF72 gene.

63. The method of any one of claim 58-62, wherein the deletion is a deletion of the expanded hexanucleotide repeat.

64. The method of any one of claim 1, 7, 13, 18, 25 or 29-63, wherein the Cas9 or Cpf1 mRNA, gRNA, and donor template are either each formulated separately into lipid nanoparticles or all co-formulated into a lipid nanoparticle.

65. The method of any one of claim 1, 7, 13, 18, 25 or 29-63, wherein the Cas9 or Cpf1 mRNA is formulated into a lipid nanoparticle, and both the gRNA and donor template are delivered by a viral vector.

66. The method of claim 65, wherein the viral vector is an adeno-associated virus (AAV) vector.

67. The method of claim 66, wherein the AAV vector is an AAV6 vector.

68. The method of any one of claim 1, 7, 13, 18, 25 or 29-63, wherein the Cas9 or Cpf1 mRNA, gRNA, and donor template are either each formulated into separate exosomes or all co-formulated into an exosome.

69. The method of any one of claim 1, 7, 13, 18, 25 or 29-63, wherein the Cas9 or Cpf1 mRNA is formulated into a lipid nanoparticle, and the gRNA is delivered to the cell by electroporation and donor template is delivered to the cell by a viral vector.

70. The method of claims 69, wherein the gRNA is delivered to the cell by electroporation and donor template is delivered to the cell by an adeno-associated virus (AAV) vector.

71. The method of claim 70, wherein the AAV vector is an AAV6 vector.

72. The method of any one of the preceding claims, wherein the C9ORF72 gene is located on Chromosome 9: 27,546,542-27,573,863 (Genome Reference Consortium—GRCh38/hg38).

73. The method of any one of claim 1, 7, 13, 18, 25 or 29, wherein the restoration of C9orf72 protein activity is compared to wild-type or normal C9orf72 protein activity.

74. One or more guide ribonucleic acids (gRNAs) comprising a spacer sequence selected from the group consisting of the nucleic acid sequences in SEQ ID NOs: 1-18807 for editing the C9ORF72 gene in a cell from a patient with amyotrophic lateral sclerosis (ALS) or frontotemporal lobular dementia (FTLD).

75. The one or more gRNAs of claim 74, wherein the one or more gRNAs are one or more single-molecule guide RNAs (sgRNAs).

76. The one or more gRNAs or sgRNAs of claim 74 or 75, wherein the one or more gRNAs or one or more sgRNAs is one or more modified gRNAs or one or more modified sgRNAs.

77. A method for treating a patient with amyotrophic lateral sclerosis (ALS) or frontotemporal lobular dementia (FTLD) comprising transplanting the bone marrow from a donor to the patient.

78. One or more guide ribonucleic acids (gRNAs) comprising a spacer sequence selected from the group consisting of the nucleic acid sequences in SEQ ID NOs:
18810-73668 for editing the C9ORF72 gene in a cell from a patient with amyotrophic lateral sclerosis (ALS) or frontotemporal lobular dementia (FTLD).

79. The one or more gRNAs of claim 78, wherein the one or more gRNAs are one or more single-molecule guide RNAs (sgRNAs).

80. The one or more gRNAs or sgRNAs of claim 78 or 79, wherein the one or more gRNAs or one or more sgRNAs is one or more modified gRNAs or one or more modified sgRNAs.
